United States Patent Application Publication US 2005/0228172 A9 - sequence listing, part 146

SEQ ID NO: 680885 - DNA, 645 bp, Homo sapiens
cagatagtaaacaatttgttcaaggcaaaatgagtaaggaggaatactgatttgaaaagcataaaaattttttaaaatttttattttaaagtttgtgggtacaaagatggtgtatatatttatggggtagatgatgggtatgcatggtggctcatgcctgtgatcctagtattttgggaggccaaggcgggaggatcacttgagcccaggagtttgagaccagcctgcgtaatatggtgagaccctgtctctatttaaaaaaaaaaaawatatatatatatacacacacacacatatatttttatccaaaactaattggacgtatccagctgatatgaagaattggtcttcatatccaagtgtattcattatttattactgtctaatatattacccccaaatttagtggttcaggtatatatatatatatatatatgtatatcaataaaaattaaaaaattaaagaacttgtttcaagacagagtcaacaatgcttgacaaagacttaacaggaattaagggaaaggaaggaatcaaggatgactcctaggtttttagcttgagcaactgggtggtcagtggtgctattttctgacctaagggagcagacttggggaggaagaaagttgaagaagaaaaaaataa

SEQ ID NO: 680886 - DNA, 931 bp, Homo sapiens
tgttacctcatttgatcttcacaacacaacccagaaaacaggctgttctcattctatctaattcagattgccgtgcaggatcaatactaccaattggtcaatttgggattgaaccgtgatctaattccaaagtaatattcttaacaataaaaattttcttcatagcacttgatcaaggtttaaaattatacatttgtgtgatcatttaggtggtgtcatttttttttcacaactagactttatatcacaaagatagaaattccatctggttttgttcattatcatatacctggtatccaatccaaatgcctggcacacagaagtcactcagtaggtactagttaattattcagtgaattgttttatagatatacagctatttatctcagtaacccctgagaatgttatcatggtggtgaacctgagttatcaaaaaaattaagttcagctctttcccatcttacaagatggcaggtgaaaaagttgagaagccggatactaaggagaagaagcctgaaggcaagaaggctgacactagtggcaaggtgaaaaggggtaacttcaaggctaaaaatccaaaggccraaatcctgtcaattgtcagaagaattggcagatatgcctgatctgctatgtattctaggaaagacatgcataaaaggaaatactcacccaatgaatccaagattgaaaacagaaagaggttcttgcagccattagaaaatcagttggcggtgacaagaacagtggtacccaggtgattaaacttcacaaattgccttgatattatcttagggaagacgtgccttgaaagctgttgagccacagcaaataactgcaagccagttagcatgtgagaaaactgcaagccagctcccaggagcactctgatcatcctcactggccgccacagaggcaagaaggtgatttt

SEQ ID NO: 680887 - DNA, 640 bp, Homo sapiens
caagaccagggcaacatgcaaccagacctcggctcttgcaacttccccccagcagaactcacaacctcctgtcctcaacttagaaataaccctggggcggagcccggccctccctgcattcctgcagagcctcggtccactccaagcaacatttattgagggtggcgggagccgcgctggacaggggtcggggctgccctcggcgtccagacgccaggctctatagaacacgtatrtacaggcacggggcggcaagggccgagacgctagctggggactgcgctccagcctcagacggcagacgccagcttccgcttggtgctctcgctgcagcggttcaggatgaggtcggcgctcggccgcgggggcaccgccggctgcggtttagagcgctgcgtctgccgctcctcctctgcgggcagagagcggggccgagtcagacgccccgccccgcacactggccccgcccacagcgctctctggcctcgccccgccgcggtctccaactcctgctccgcgctctggcctcgcctcccgcttgtgcctctccctctgactccgcctcttagggatcgctccgccccctagcgctggctcctcctctgcccccgcctccagtccccgcctctccctctgattc

SEQ ID NO: 680888 - DNA, 619 bp, Homo sapiens
aaggaagtctgttattaacaccaggaatgatcattgtcacttttttttgagacagagtttcactgttgttgcccaggctggagtgcagtggcccactgcaacctccacctcctgggttcaagttgttctcctgcctcagcttcctgtgtagctacaggtgcccacaaccacacccagctaatttttgtatttttagtagagatggggtttcaccatgttggccaggctggtctcgaactcctgacctcaggtgatccacccgcctcagcctcccaaagtgctgggattacaggcatgagtcacggtgtccagcccattgtcactttttactgagcacctgctatctaccagggagtgtcaaatgtgtaaaaatgctatcagtatgccttccaacaactctatagggtgggcattatcacccatattaacagagaaggaaaatgagggttttttccttttttgtttggttggttggttttggttttggttactgagacagggtcatactctgtctcccaggctggagtacagtggcaagcctcatagctsactgcagcctcaacctcccaggctcaagtaatccccccaaggagctgggactacaggcatgcaccaccat

SEQ ID NO: 680889 - DNA, 1544 bp, Homo sapiens
gaggagttgtttaggttaaaatactgagaaaaagataattaggggaccctttgagagtcaaacatattatttataaatcaggtttgaatctagtgaagaaataattaaaacaaaacattgaatttcctaccaaaagaaaaaaaaatcctaagcatcatatccctccatttctatttagtttacaatatttctagagttataagaagtatgcaaccttcctaagttattattcaagaacaaattataaatccccagattcatagatcttgaaaatatgtggaaaaattaaaatacaatattgaagtaaaataaaaagctgaaataccacatttaaaagaaatactcaaaactgtaaaatatagtgggacttctagaacataacatttaggtaaaattacaactgcatttaaagagatgttttccagaaatactgagaaaactgcattaaaaagtctttcttgtacagtaaagcaacagaactttactttttttggaggcaatatttccaatgattcatgcttttttcccataaaacttaagagaagcaaccaccaaggctttgagtttagtattaaataaaaatgtgaaattggatcattgactataaaaatcttaagctaaaacactcatgtttggggaatgtattgctcctataaaaaagttcgaatccctgaaatttggtatgtaaatttctattaacactaaatttttttttaaagaggatgagatcaataagggtagaatgtactttctcagaaactaagtctatagagtaatacttggttagcccattcccaagacacctttatcatagtatcagaatccttgttttccagatgaagtatttcagatatacacaagtcacatccaaactatttatcatttattttttctttttccctactctatctatcactaccatagctacatgccattgttatctatgcctggagaactgcccaggacaccacattgttggcttgcagtagtgattcagtcaattcattcttaacaagttgacagcagagatatttctaaatacacactaaatcatcttaaattctaattacaacccatcaacagtctgccaacgatctcagaataaagcccttactagtcaacatggctttgcaggtgactctacaatttctgacatcagctttawaattcattccgtcaacaaagcatcttttatttaatgtgagcacatcacttatgaggttataatttgctattagcttatttgcctcagtaaatgtgtaccctgttgaaaggaatgcatgtatcttattctggaatatgatcaaatactttgtacttaacatcacaggaagagatgagggcattaaatgggaagaaaaaaattgtcatttagttttcctcagcattcttatttcatataattcctgcagaatgagaagacataaaaaacaaaagtagaaggtaggagataaaaaatctaacatccatataaatcatagcacaaccttaaaatctgtattaaagttgtaattactcttttaggtgtcaaaaatgctatttga

SEQ ID NO: 680890 - DNA, 1544 bp, Homo sapiens
gaggagttgtttaggttaaaatactgagaaaaagataattaggggaccctttgagagtcaaacatattatttataaatcaggtttgaatctagtgaagaaataattaaaacaaaacattgaatttcctaccaaaagaaaaaaaaatcctaagcatcatatccctccatttctatttagtttacaatatttctagagttataagaagtatgcaaccttcctaagttattattcaagaacaaattataaatccccagattcatagatcttgaaaatatgtggaaaaattaaaatacaatattgaagtaaaataaaaagctgaaataccacatttaaaagaaatactcaaaactgtaaaatatagtgggacttctagaacataacatttaggtaaaattacaactgcatttaaagagatgttttccagaaatactgagaaaactgcattaaaaagtctttcttgtacagtaaagcaacagaactttactttttttggaggcaatatttccaatgattcatgcttttttcccataaaacttaagagaagcaaccaccaaggctttgagtttagtattaaataaaaatgtgaaattggatcattgactataaaaatcttaagctaaaacactcatgtttggggaatgtattgctcctataaaaaagttcgaatccctgaaatttggtatgtaaatttctattaacactaaatttttttttaaagaggatgagatcaataagggtagaatgtactttctcagaaactaagtctatagagtaatacttggttagcccattcccaagacacctttatcatagtatcagaatccttgttttccagatgaagtatttcagatatacacaagtcacatccaaactatttatcatttattttttctttttccctactctatctatcactaccatagctacatgccattgttatctatgcctggagaactgcccaggacaccacattgttggcttgcagtagtgattcagtcaattcattcttaacaagttgacagcagagatatttctaaatacacactaaatcatcttaaattctaattacaacccatcaacagtctgccaacgatctcagaataaagcccttactagtcaacatggctttgcaggtgactctacaatttctgacatcagctttataattcattccgtcaacaaagcatcttttatttaatgtgagcacatcacttatgaggttataatttgctattagcttatttgcctcagtaaatgtgtaccctgttgaaaggaatscatgtatcttattctggaatatgatcaaatactttgtacttaacatcacaggaagagatgagggcattaaatgggaagaaaaaaattgtcatttagttttcctcagcattcttatttcatataattcctgcagaatgagaagacataaaaaacaaaagtagaaggtaggagataaaaaatctaacatccatataaatcatagcacaaccttaaaatctgtattaaagttgtaattactcttttaggtgtcaaaaatgctatttga

SEQ ID NO: 680891 - DNA, 1544 bp, Homo sapiens
gaggagttgtttaggttaaaatactgagaaaaagataattaggggaccctttgagagtcaaacatattatttataaatcaggtttgaatctagtgaagaaataattaaaacaaaacattgaatttcctaccaaaagaaaaaaaaatcctaagcatcatatccctccatttctatttagtttacaatatttctagagttataagaagtatgcaaccttcctaagttattattcaagaacaaattataaatccccagattcatagatcttgaaaatatgtggaaaaattaaaatacaatattgaagtaaaataaaaagctgaaataccacatttaaaagaaatactcaaaactgtaaaatatagtgggacttctagaacataacatttaggtaaaattacaactgcatttaaagagatgttttccagaaatactgagaaaactgcattaaaaagtctttcttgtacagtaaagcaacagaactttactttttttggaggcaatatttccaatgattcatgcttttttcccataaaacttaagagaagcaaccaccaaggctttgagtttagtattaaataaaaatgtgaaattggatcattgactataaaaatcttaagctaaaacactcatgtttggggaatgtattgctcctataaaaaagttcgaatccctgaaatttggtatgtaaatttctattaacactaaatttttttttaaagaggatgagatcaataagggtagaatgtactttctcagaaactaagtctatagagtaatacttggttagcccattcccaagacacctttatcatagtatcagaatccttgttttccagatgaagtatttcagatatacacaagtcacatccaaactatttatcatttattttttctttttccctactctatctatcactaccatagctacatgccattgttatctatgcctggagaactgcccaggacaccacattgttggcttgcagtagtgattcagtcaattcattcttaacaagttgacagcagagatatttctaaatacacactaaatcatcttaaattctaattacaacccatcaacagtctgccaacgatctcagaataaagcccttactagtcaacatggctttgcaggtgactctacaatttctgacatcagctttataattcattccgtcaacaaagcatcttttatttaatgtgagcacatcacttatgaggttataatttgctattagcttatttgcctcagtaaatgtgtaccctgttgaaaggaatgcatgtatcttattctggaatatgatcaaatactttgtacttaacatcacaggaaragatgagggcattaaatgggaagaaaaaaattgtcatttagttttcctcagcattcttatttcatataattcctgcagaatgagaagacataaaaaacaaaagtagaaggtaggagataaaaaatctaacatccatataaatcatagcacaaccttaaaatctgtattaaagttgtaattactcttttaggtgtcaaaaatgctatttga

SEQ ID NO: 680892 - DNA, 1544 bp, Homo sapiens
gaggagttgtttaggttaaaatactgagaaaaagataattaggggaccctttgagagtcaaacatattatttataaatcaggtttgaatctagtgaagaaataattaaaacaaaacattgaatttcctaccaaaagaaaaaaaaatcctaagcatcatatccctccatttctatttagtttacaatatttctagagttataagaagtatgcaaccttcctaagttattattcaagaacaaattataaatccccagattcatagatcttgaaaatatgtggaaaaattaaaatacaatattgaagtaaaataaaaagctgaaataccacatttaaaagaaatactcaaaactgtaaaatatagtgggacttctagaacataacatttaggtaaaattacaactgcatttaaagagatgttttccagaaatactgagaaaactgcattaaaaagtctttcttgtacagtaaagcaacagaactttactttttttggaggcaatatttccaatgattcatgcttttttcccataaaacttaagagaagcaaccaccaaggctttgagtttagtattaaataaaaatgtgaaattggatcattgactataaaaatcttaagctaaaacactcatgtttggggaatgtattgctcctataaaaaagttcgaatccctgaaatttggtatgtaaatttctattaacactaaatttttttttaaagaggatgagatcaataagggtagaatgtactttctcagaaactaagtctatagagtaatacttggttagcccattcccaagacacctttatcatagtatcagaatccttgttttccagatgaagtatttcagatatacacaagtcacatccaaactatttatcatttattttttctttttccctactctatctatcactaccatagctacatgccattgttatctatgcctggagaactgcccaggacaccacattgttggcttgcagtagtgattcagtcaattcattcttaacaagttgacagcagagatatttctaaatacacactaaatcatcttaaattctaattacaacccatcaacagtctgccaacgatctcagaataaagcccttactagtcaacatggctttgcaggtgactctacaatttctgacatcagctttataattcattccgtcaacaaagcatcttttatttaatgtgagcacatcacttatgaggttataatttgctattagcttatttgcctcagtaaatgtgtaccctgttgaaaggaatgcatgtatcttattctggaatatgatcaaatactttgtacttaacatcacaggaagagatgagggcattaaatgggaagaaaaaaattgtcatttagttttyctcagcattcttatttcatataattcctgcagaatgagaagacataaaaaacaaaagtagaaggtaggagataaaaaatctaacatccatataaatcatagcacaaccttaaaatctgtattaaagttgtaattactcttttaggtgtcaaaaatgctatttga

SEQ ID NO: 680893 - DNA, 638 bp, Homo sapiens
ttggaagcctgtttccattgctaagataccctgacagggattctcttcctaacccgtttgcaaacctttgctcaggcctctgttctcttccgcactatctaactttctgctgggtgctggtttctaattttctttgacccctgtctgttgtcaaactgctttcgtaggctggatccttgggccgcacttcttcgccactctgcagaagcttaattgctgtccttggtcaagaatatataatgacaactgactgaaaaataatccattaggctccaaaggacataatgggtagagggatgaggaaattcaggagaaggagcagaattacttgtaagcctataagcatcagcctaascagtaactatgcatatatctgaacatacattcttataatcatgggatccgatgtgctaaattctagtagctaatacgcaccatgccaataccagaaatttatcatattgatgtatgtgtggcaatgacatacttaggctagtgcttttagaattggcatatttaataaaaactcatgacattgaactattttttaatattctgtatattttatcaattaaagcctaatatcaaaaagctatgttactttaaattcatctctaattctatatttacagatacat

SEQ ID NO: 680894 - DNA, 3165 bp, Homo sapiens
gtcttttgaaaagcgcagtattagggtgggagtgatcctgtgttccatgtgctgtccgtcactgcttcccttggctaggaaagggaattccctgaccccttgcacttccctgggaggcartgccacaccctgctttggctcacactcagtgggctccacccactgtcctgcccccactgtcctgccctcactgtccgacaagaccctgcgcgatgaacctggtacctaagttggaaatgcagaaataacccgtcttctgcgtcgctcacgctgggagctgtagactggagctgctcctatttggccatcttggaaccgcccccttaagatttttaaaagccctgttgagtagttgagagggtctgtgtggaactttaagtatttctgaggtctcagcaaaggatcttatagtcataaacttgatatgaactttatattgagggcaagttttaatggaaatgcccttgctttgatgtttgccctgtagccattttttactgtaataagtcttttcatgtctgaaaagaatagttttattcatgaaaaaaaaaaaactagtgctggccccttcatattttctgtaaattctgcttgaaaattgaaaaattctttttcattcttttttttttttttttaacttatcttgctgttcttctgtttcactagaagaagctttttccagcattctgactggaaaacttcttagccaaaaccataagttcctgaagtgccctttatatagcccatgttattgcagacaatgctggttgttttgccaaaataacttgttttctttttttttccagcctgtaataatatttcttcactgtactttaagctttcactaagagtctgtgcttgtgtcttgtcccaaaactcaacagttgatgtcttaggttttagttgtccagcaacccacctctaggcccaacatcaatggttaaaaaagaggatagaagcatgaaagcaaaaaaagaaattactgtgaaaaaatatatacacaattcactatataaattttaaagccttataatatcaacctctctcactgtaagtaaagctaaagtcagtaagctaagattacttgaaccatttaagatgagtctagaattagatttaaataaaaaatgggaagtgatcttagaaacgaaacaatatatattaaagtttaaaaatgtttgacacaatagctttattctttgaaatgtatgctaaagaagtcagaggtatacttaaatgtattactatgaggatatgcattacaatattatacatgctaaaagattagaaagaaaaataaaaaactaggtaaaataagagattggctaaataaatcatgatattgctgtattaaaaattaagacccaacatcatgttttctgaggctgtttaacatacagagaaaagctcacaaaatatcaaataaaaaatcaagtttaaaaaattggcgataatacaaacaaatgcataaaaatggaaatatatattcaagtattgagtagtaattttttctgatttcctaataataaatagtaataattttataattgaaaaaccctcaacaaataatatatactgtttctagtgttttctgggagttcagttaatgatttattataattatcattatcattattatccttagagacaggatttcactctgtcatccaggctagagtatggtaaaacaaccacagctcacggcagccttgaactcctgagttcaagtgatcctcccatctcagcctccacggtacctgagactacagatgcataacaccacactaggctaatttttaagttgtttgtatagaaagggtcttggtatgttgtccaggctggtcttgatctcctgatctcaagtaattctctcgccttggcctccaaaagtattgggattacaggcgtgagactctgtgctcaatccattattgctttgaaaaacggaagttgtgactctgacttccttaaaactggatccatattcggggtgaagtatatcttggcctcttaggatttatctgataggtatagaaagttagtgttggtcaggcacaggcacccttgggtaataggaaagtaaaaagaaagagatttggtacctgctttagaaaacagctattagtaaataaaaactgaattgttacttactgtatctcttgtaacaagaaatttgtgaaagagcatttgctcttactagaaagtctaaggttaataaatataaagttgaaaagataacattaaaattataaagaaaactaatttttacttccttggaacattgagacaaaaaaaataattaatgatcatgaagtactttgaaaatgtatctacattgtataacatcagactcggtgctaacctttggtagagttcacaacaaatcaattaattcttgatcatcctggcagcactgccaagtatcattagtgctagaagccataagcagccactgaagacctgcctatttgtacttcctggaagacttagttttcagtgtgtggcatggagctggccctgactgtacattatagcacaaataattactcctcaaaacttggcttgctgcaagcaattcattcttctctgcacagaagtcccccactctgacccagagcagtatgaatgttggctaaaaatagcagctgcacaatgcggcaggcagccatggtgagactgcattgatgtggtttcatacccatggtttcagagcactttgctcacacaaattaacccttaaataccctatcttgtttctctgttctttgagatataatgcatgtttctttttaagaataaactttgctttgcctgatggaaaattcttcctttctctcagtttatgtgtttactgtttcttgtttctccgttttctttccttctgcagttggagtgggagagtaagagtgtcagttctgccactgtcactgcaatttctgatcatactacatgctcaaaagaacacattcactaacactggctatgtgcttgtatgtgctaggcactgtggaggataaacataaaaccctcatgtccttatcgcgttaacctcaggaaaatcaagcgcttaagtaacaaacagtgaagcatttgactccaatcttcagtctcactaaggtgattcgaagatccctgacctcctcaccctatgcttggtttcaagga

SEQ ID NO: 680895 - DNA, 3165 bp, Homo sapiens
gtcttttgaaaagcgcagtattagggtgggagtgatcctgtgttccatgtgctgtccgtcactgcttcccttggctaggaaagggaattccctgaccccttgcacttccctgggaggcaatgccacaccctgctttggctcacactcagtgggctccacccactgtcctgcccccactgtcctgccctcactgtccgacaagaccctgcgcgatgaacctggtacctaagttggaaatgcagaaataacccgtcttctgcgtcgctcacgctgggagctgtagactggagctgctcctatttggccatcttggaaccgcccccttaagatttttaaaagccctgttgagtagttgagagggtctgtgtggaactttaagtatttctgaggtctcagcaaaggatcttatagtcataaacttgatatgaactttatattgagggcaagttttaatggaaatgcccttgctttgatgtttgccctgtagccattttttactgtaataagtcttttcatgtctgaaaagaatagttttattcatgaaaaaaaaaaaactagtgctggccccttcatattttctgtaaattctgcttgaaaattgaaaaattctttttcattcttttttttttttttttaacttatcttgctgttcttctgtttcactagaagaagctttttccagcattctgactggaaaacttcttagccaaaaccataagttcctgaagtgccctttatatagcccatgttattgcagacaatgctggttgttttgccaaaataacttgttttctttttttttccagcctgtaataatatttcttcactgtactttaagctttcactaagagtctgtgcttgtgtcttgtcccaaaactcaacagttgatgtcttaggttttagttgtccagcaacccacctctaggcccaacatcaatggttaaaaaagaggatagaagcatgaaagcaaaaaaagaaattactgtgaaaaaatatatacacaattcactatataaattttaaagccttataatatcaacctctctcactgtaagtaaagctaaagtcagtaagctaagattacttgaaccatttaagatgagtctagaattagatttaaataaaaaatgggaagtgatcttagaaacgaaacaatatatattaaagtttaaaaatgtttgacacaatagctttattctttgaaatgtatgctaaagaagtcagaggtatacttaaatgtattactatgaggatatgcattacaatattatacatgctaaaagattagaaagaaaaataaaaaactaggtaaaataagagattggctaaataaatcatgatawtgctgtattaaaaattaagacccaacatcatgttttctgaggctgtttaacatacagagaaaagctcacaaaatatcaaataaaaaatcaagtttaaaaaattggcgataatacaaacaaatgcataaaaatggaaatatatattcaagtattgagtagtaattttttctgatttcctaataataaatagtaataattttataattgaaaaaccctcaacaaataatatatactgtttctagtgttttctgggagttcagttaatgatttattataattatcattatcattattatccttagagacaggatttcactctgtcatccaggctagagtatggtaaaacaaccacagctcacggcagccttgaactcctgagttcaagtgatcctcccatctcagcctccacggtacctgagactacagatgcataacaccacactaggctaatttttaagttgtttgtatagaaagggtcttggtatgttgtccaggctggtcttgatctcctgatctcaagtaattctctcgccttggcctccaaaagtattgggattacaggcgtgagactctgtgctcaatccattattgctttgaaaaacggaagttgtgactctgacttccttaaaactggatccatattcggggtgaagtatatcttggcctcttaggatttatctgataggtatagaaagttagtgttggtcaggcacaggcacccttgggtaataggaaagtaaaaagaaagagatttggtacctgctttagaaaacagctattagtaaataaaaactgaattgttacttactgtatctcttgtaacaagaaatttgtgaaagagcatttgctcttactagaaagtctaaggttaataaatataaagttgaaaagataacattaaaattataaagaaaactaatttttacttccttggaacattgagacaaaaaaaataattaatgatcatgaagtactttgaaaatgtatctacattgtataacatcagactcggtgctaacctttggtagagttcacaacaaatcaattaattcttgatcatcctggcagcactgccaagtatcattagtgctagaagccataagcagccactgaagacctgcctatttgtacttcctggaagacttagttttcagtgtgtggcatggagctggccctgactgtacattatagcacaaataattactcctcaaaacttggcttgctgcaagcaattcattcttctctgcacagaagtcccccactctgacccagagcagtatgaatgttggctaaaaatagcagctgcacaatgcggcaggcagccatggtgagactgcattgatgtggtttcatacccatggtttcagagcactttgctcacacaaattaacccttaaataccctatcttgtttctctgttctttgagatataatgcatgtttctttttaagaataaactttgctttgcctgatggaaaattcttcctttctctcagtttatgtgtttactgtttcttgtttctccgttttctttccttctgcagttggagtgggagagtaagagtgtcagttctgccactgtcactgcaatttctgatcatactacatgctcaaaagaacacattcactaacactggctatgtgcttgtatgtgctaggcactgtggaggataaacataaaaccctcatgtccttatcgcgttaacctcaggaaaatcaagcgcttaagtaacaaacagtgaagcatttgactccaatcttcagtctcactaaggtgattcgaagatccctgacctcctcaccctatgcttggtttcaagga

SEQ ID NO: 680896 - DNA, 615 bp, Homo sapiens
tatgtgaatatatcttactatatggaaggcattgatatagtgatatacagcactacttttaactggttgcataagaatcacgccaagggaattgttagaaatgcagatttgtatggtccttcctagaccaactgaatcagaatctctagaggttatgaagtgggaaagtttgttaagtttttcaggtgattctaatgcacacactgatatggaagatatacaaaacatactgtttsaccctcaaaactttaattctatattgaaatgctaggtctgttgcttactactccatttcatggagtaagttacttaatttctttgagattcaatgtccttgtttgtaaaatgagaataataacttgctggattagtaggataattaaataagaaattgtctaaaattactcagcataatatccagtgcttggaaaacagtatctattataattttttagagaaaaaaaaagctatctactagaaaaataaatatgcaacaaagatcgggatgagcagaaatttacaaagtttgaaaataggagacagaaatggttcaataattaaaggtatgtatggcacagatatatccaagcaattttgccctacaaaaacaacaga

SEQ ID NO: 680897 - DNA, 2619 bp, Homo sapiens
tttctccacttggaagccagtagagcaatgagtaatgtagatgttcccaaatatgtacatattggaataatttagtgtctgggctcacatgcaagactctaaattttctatactctttcatttaagtataaatggcccaaaggaatgattatattttctactgtatttatttttaatggtgaygtccatcttgtcttgtgcacgaagtcacccacattgttctaaaaccacaattactgccagtactcccctgtttacgtttacccattgccagaagaaaaggaaagaaaagatgtaaatttaagatcttgatggaaactactattcttgctttcttcactactcaattgctggatgatattgagaaagttattagctcctctgagtccacttatagaattagaaatggcaatacttgccacacagaaatgtcttgaaggttatatcaaataaattgatatgttcgaaactactctaaactttcaaacaatacatgttcattactattttattttaaatgcatgctgtggtataagattcagaatgtttgactttcttacatttttcatcccttccatatagaatcaaactaactcagtgttctttttctcactgactttctggccctagtctcacaccaccagggaccttataggtcactgtcattcctttgctccataggaatagaaattaccaacaggaaagtggagactatgctctccaactccagctccctctctggaaagcataatgacgagctgggttctttgcacccagcagtcaaaggtactgagaagctgtcaagagctattttctgttactgcacttggatttctccaaagcccagtgggggtagtctagcatccaaccttgaatcagaggatctacattctaagttcagtccctcatggatagagcattttatttatgtttcatttttatgcttttttttggggggaggggggataagaaaaattctatattgaaagtctcttcttctaaagaggtttatagttcacaaaaactcttaggacagacatactcactcaaacctaagtgaaatgctattacaactacatttgtcttcaggcaagtcatcttatgcctttgcctttattaccaagattataaaaacttggaggtaggaagtaagaagacatcattacattactctctgttaaaatggcaaatatatttctattcaatgagataatcataaataggcactctattcaaatacagacatttgtggagtccttctttggtggtagggatgtggaaatgattaaaatgtggctcctgtcctctgtcagataaaaatcaaaataatttcagctcacctcagatcatttttccttctacacaaagtacctgaccagatgtaccatttgttgaagtcttgcaagttcaccctggagtgtggctgcaaggtagctgctgcccatttttggctggcgcctaaacactgagcaggcccattataagccatgcttcggttttttgcttctccttcagttggtcatttaggactcctccatgtggccacaggtgtaacctgagagagaggagggcagtaatgaaatgtagggggtaacactgaggtttgggctaccaatttatgcagctttcgtgcttaggctttatctcatatgtaccatttgcattttatatagatcgcttcttgacctgcacaactttctgatttgatgagttcaacagaaaccaactcaaggtaagcaattcagagaatgcatagctacttgctgttttgtatgttgagtgctaaatttaatagagaggggcctactactgaatgggcatcacatgttcagatacattcatcagatgtttcagggttcaggttttcccagtgagagccctgacttgccctttggttttttttttgtttgtttggtttttgtttttttgagacggagtctcgctctgtcgcccgggctggggtgcagtggcgccatctcggctcactgcaagctcctcctcccgggttcacgccattctcctgcctcagcctcccgagtagctgggactacaggcacgtgccaccacgccaggctaattttttgcatttttagtagagacggtttcaccgtgttatccaggttggtctcgatttcctgacctcgtgatccgcccgcctcggccttccaaagtgctgggattacaggcgtgaagcactgtgcccagcctgacttgcctttttgtaacttgataattctattaaaagctgggtttggttttcacatttttatttctctgaatataaaagataaagccttttatatgctaccaaaatggccctctgctcatcaaactttacttttaatgttttagtaacttcactctgcttttcattatccctacgtaggacatcaatgtcatttaataataatcaacactattatcttatatacattgcccccccatacccttacttctattttattttatattattactaattttttttgagacagggtctcactctgtcacccaggctggagtgcagtggtgagatcactactcactgcagcctcaaccacctaggttcaggtgatcctcacacctcaacctcccaagtaactgtgatcacaggcatgc

SEQ ID NO: 680898 - DNA, 2619 bp, Homo sapiens
tttctccacttggaagccagtagagcaatgagtaatgtagatgttcccaaatatgtacatattggaataatttagtgtctgggctcacatgcaagactctaaattttctatactctttcatttaagtataaatggcccaaaggaatgattatattttctactgtatttatttttaatggtgatgtccatcttgtcttgtgcacgaagtcacccacattgttctaaaaccacaattactgccagtactcccctgtttacgtttacccattgccagaagaaaaggaaagaaaagatgtaaatttaagatcttgatggaaactactattcttgctttcttcactactcaattgctggatgatattgagaaagttattagctcctctgagtccacttatagaattagaaatggcaatacttgccacacagaaatgtcttgaaggttatatcaaataaattgatatgttcgaaactaytctaaactttcaaacaatacatgttcattactattttattttaaatgcatgctgtggtataagattcagaatgtttgactttcttacatttttcatcccttccatatagaatcaaactaactcagtgttctttttctcactgactttctggccctagtctcacaccaccagggaccttataggtcactgtcattcctttgctccataggaatagaaattaccaacaggaaagtggagactatgctctccaactccagctccctctctggaaagcataatgacgagctgggttctttgcacccagcagtcaaaggtactgagaagctgtcaagagctattttctgttactgcacttggatttctccaaagcccagtgggggtagtctagcatccaaccttgaatcagaggatctacattctaagttcagtccctcatggatagagcattttatttatgtttcatttttatgcttttttttggggggaggggggataagaaaaattctatattgaaagtctcttcttctaaagaggtttatagttcacaaaaactcttaggacagacatactcactcaaacctaagtgaaatgctattacaactacatttgtcttcaggcaagtcatcttatgcctttgcctttattaccaagattataaaaacttggaggtaggaagtaagaagacatcattacattactctctgttaaaatggcaaatatatttctattcaatgagataatcataaataggcactctattcaaatacagacatttgtggagtccttctttggtggtagggatgtggaaatgattaaaatgtggctcctgtcctctgtcagataaaaatcaaaataatttcagctcacctcagatcatttttccttctacacaaagtacctgaccagatgtaccatttgttgaagtcttgcaagttcaccctggagtgtggctgcaaggtagctgctgcccatttttggctggcgcctaaacactgagcaggcccattataagccatgcttcggttttttgcttctccttcagttggtcatttaggactcctccatgtggccacaggtgtaacctgagagagaggagggcagtaatgaaatgtagggggtaacactgaggtttgggctaccaatttatgcagctttcgtgcttaggctttatctcatatgtaccatttgcattttatatagatcgcttcttgacctgcacaactttctgatttgatgagttcaacagaaaccaactcaaggtaagcaattcagagaatgcatagctacttgctgttttgtatgttgagtgctaaatttaatagagaggggcctactactgaatgggcatcacatgttcagatacattcatcagatgtttcagggttcaggttttcccagtgagagccctgacttgccctttggttttttttttgtttgtttggtttttgtttttttgagacggagtctcgctctgtcgcccgggctggggtgcagtggcgccatctcggctcactgcaagctcctcctcccgggttcacgccattctcctgcctcagcctcccgagtagctgggactacaggcacgtgccaccacgccaggctaattttttgcatttttagtagagacggtttcaccgtgttatccaggttggtctcgatttcctgacctcgtgatccgcccgcctcggccttccaaagtgctgggattacaggcgtgaagcactgtgcccagcctgacttgcctttttgtaacttgataattctattaaaagctgggtttggttttcacatttttatttctctgaatataaaagataaagccttttatatgctaccaaaatggccctctgctcatcaaactttacttttaatgttttagtaacttcactctgcttttcattatccctacgtaggacatcaatgtcatttaataataatcaacactattatcttatatacattgcccccccatacccttacttctattttattttatattattactaattttttttgagacagggtctcactctgtcacccaggctggagtgcagtggtgagatcactactcactgcagcctcaaccacctaggttcaggtgatcctcacacctcaacctcccaagtaactgtgatcacaggcatgc

SEQ ID NO: 680899 - DNA, 621 bp, Homo sapiens
tgtcttcttttcagaagtgtctgttcatatccttcacccactttttgatggggctgtttgttttttttcttgtagatttgtttgagttcattgtagattctggatattagccctttgtcagatgagtagattgcaaaaattttctcccattctgtaggttgcttgttcactctgatggtagtttctttggctgtgcagaagctgtttagtttaattagatcccatttgtcaattttggcttttgttgccattgcttttggtgttttagacatgaagtcgttgcccatgcctatgtcctgaatgatattgcytaggttttcttctagggtttttatggttttaggtctaacatttaggtctttaatccaggaatgcttttagcagaatgtacttgatctttctggcctgattgctgtaagtatatctgtagtttatagatttataaactatagctgtgctgatgaatgcaagtccatcacctgactagagctatactgtgtgatgatgatgcatgaacagaaagagcacatcactcagaggctcctctatgctcactctagccatgcagagtgagcaccacccactccagaaccaaatcacatcacagtgctgcaaacagga

SEQ ID NO: 680900 - DNA, 1469 bp, Homo sapiens
ttctgacatgccttggagggggagacggagaagcaggcaagaggggaagagggagagaggggcagatgaagagagagggagaagagagggggaaaggaggtacaaaagtgaggagacggggaggaggaggaaagagagaatgcccacgtctggcctcccaggagattcttattccagccccttcagctttggcctcctccctgtgaaaagaatcccctgtgcccgctcagccctggtgctctgagactctggcctcctccagtggctcctcaatcctgcacagcaggcgagggacatgggaccccagaaaggtttccatgtgagaggggtgctgtaacacccccaggctgtttgaagcacagcgagggctccttggctaccagtagccatgggccgggagctggcccagctgagggtaccaggctccctgggaggcaggtgagcctgggtagtatccatctgcgtggctctggccccctccttcctggctggtctgcacccacagaagtcctggctttggcatgccttccttcctgaagtttcctcttctgggactcgggcttagattccctctgagacaaatgttatgtagaacacatcgtgagtggctcccctggagtggtggccctggagatgcaggtggaaggccttgctttgagcccgagctgcaggggtcaaatggcagccccctacaaggactctgcttggcctaatttgggtcacatgctcacccctggccaggaggatggctttctctgattggttgggtcacgtgcccacccctggccaggaggatggctttctctgattggttgccttggagtggggtcagaggggtggtgtaggtttggcaacccaaagtagagaggggaaggaagtgtaggmagggacaggtggatgtgaatgttacttcagagcacagctgaggtgggaggggaaggaactaccaagtgggggaagaccagagctgctggattgtgccagggtgccggaaggagggtgggcaatgagtgacattttaagagtggagacactgtaaatggaagtcctcaccacttcctgtgaggttgtttgcactcttatggtatcaattccttctcttgccatgctcccaagggctttgtgtgactgtgtgtgtgcgtgtgtgtgtgtgtgtgtgtgtgtgtggtgtgtgtactgcttagtttgaagtaattatagattaacaggaggttgcaaagatagtacaagagaggtcctgtgtactcttcacctcgttgtgattgtagtgggatctcaaaacaggaaatggacattggtacaacggacagtaacgcacagcaggacaatgtcgtttcagtcaatgatgaacctcacaatcgatggtggtcccatgtgattataatggagctaaaatattcctattacctagtgacatcatagcataacacactaccttttctatgtttagatacacaaatgccactgtg

SEQ ID NO: 680901 - DNA, 611 bp, Homo sapiens
aattctccaagttgcttttgagtctcactctatatcartgtagacctgcctaaaatatgtaagagctgagaatccttttgaaatgattccaaactcttgagtctgaaaaccgagctgggaattcctttgtaacagttttgtgggttattttggcactttggtttataatcctagctggaccccatctgaagttctaaagcccataaaataagaatgaatggacaatgtaaataagccaaatttgagaaacttcagaccctgcttggctgaatgtttctgttaatctaccttgtctgtgctggtagaactgccattttgctataactcctttgtaaataagaaacttttcttctcatcaggcaggggatctttctcttcaaaggctgtgatgtattatactatattgaaattaaattgtttggatatgttttgctgaatactgataaaactatgatataaagcgtattatccttaatcaaaggttacttttatttgcagattttaaaggcaacaaaaatttttatttgacaggttctaatagttctagtttggcatacctgcacatttttattgtatcctgggaacaggcataaatcaactgatttcccaca

SEQ ID NO: 680902 - DNA, 611 bp, Homo sapiens
aattctccaagttgcttttgagtctcactctatatcagtgtagacctgcctaaaatatgtaagagctgagaatccttttgaaatgattccaaactyttgagtctgaaaaccgagctgggaattcctttgtaacagttttgtgggttattttggcactttggtttataatcctagctggaccccatctgaagttctaaagcccataaaataagaatgaatggacaatgtaaataagccaaatttgagaaacttcagaccctgcttggctgaatgtttctgttaatctaccttgtctgtgctggtagaactgccattttgctataactcctttgtaaataagaaacttttcttctcatcaggcaggggatctttctcttcaaaggctgtgatgtattatactatattgaaattaaattgtttggatatgttttgctgaatactgataaaactatgatataaagcgtattatccttaatcaaaggttacttttatttgcagattttaaaggcaacaaaaatttttatttgacaggttctaatagttctagtttggcatacctgcacatttttattgtatcctgggaacaggcataaatcaactgatttcccaca

SEQ ID NO: 680903 - DNA, 591 bp, Homo sapiens
ttgacatattagctggcatctcgaagcctaaacttgcagttaggccaatgtagccagaatggaggtgatgcagcaacccaggtgcctcctccggccctcacttttgctgccaaaactgatcttacagcccacatgttacagatggtgactgtaaactggagagatagccatttgacccacatttaactatgatacaagataagcgatagttattttcacagctttccatataaaggattttgatgagaacaaagttatatacaaacaaagttcatttacgcaacacaattgtattgagatcccagtatgtaactagtactaaacacttcttatacattattcccttttcacatgctcacccatttaaaatttcacagcattcttcagatcagtatattaaggcttagaaaagttttgacttgctaaagacacatagttagaaatcaaatgagtcaagatttgaatccatatctccctgctcagcatctacacttttcttcgctggagagtacattggaagcctaagctgatcacattccattaaacctcaagtmattttgagcccaaggcttcagtttcttcctttagaaa

SEQ ID NO: 680904 - DNA, 593 bp, Homo sapiens
caaaacaagaaccttacaaacttccacactcaagcctgcaaagacccagtatctcaagtaagcacttccattgggtcttgttgcagcatggtggacaatggaatgtggccccacagtctattagtcaatattggtctcctgctatggtcatctcactgctctagatgctttccagctgttcttcaaggaagcacactgaagcataagtgctcagtcctttcagtctcctacacagtcaactcagggtgttcttagttccaggcagcaggacagaatggtgcaagcacctgtcacttcgtatgagtagtgctctttttccttcccttctttygcttcttatccccatctcttgagccatcatgtcaatatcacactggttgttctttttaactctatttacaggtatgaatctcagcccacaaattcaggtgagcaagaaatctacagtctttacattataaaactttattttttgttgtaagagccgcctttatcgcatgactagtgggaaacttaaactcagtcccattcatgattttctgtcccttagtgggttctcagagagtgccttgggattaaggagtgggatctct

SEQ ID NO: 680905 - DNA, 574 bp, Homo sapiens
caatgmcattcgttacagaagtagaaagatctattttaaaatttcatatagaaccaaaaaaagagcctaaatagccaacgtagtcctaagcaaaacgaacaaagcagtaggtatcacatgacctgacttcaaactatactacaaggctacagtaaccaaaacagcatattggtgttattaattaccagtaaaacgtaattattaataatggcctatcatgaaaagaaccttcaatttacttcttagggctagatttctctgtgggcctatatgcacataaggcaaaagcatggaacgggtacaaaaacagacacgtagaccagtggagcagaatagagagcccagaaataatgccacacacctacaaccatgtgatcttcaacaaagtcgacaaaaacaagtaatggagaaaggactccatattcaataaatggtgctgggataactgctaggcatatgcagaagactgaaactggactctttccttacaccatacaaaaatatcaactcaagatgaattaaagacttaaatgaaaaaactaaaactatgaaaacattgaaagataacctggga

SEQ ID NO: 680906 - DNA, 664 bp, Homo sapiens
gtcaattggggagctagaatatgaccctaagccagttcctgcctctttgctgtcctagaaccatctgcctgtaacagcacaaggtatgtggatgattttggtgatgcttttaaatcctctgtgtgacaataaacatatacgcatgtagattcatagaataagacaggactggacacacaggcacacacagccaccaagagatatgaaagtccctggatagaaggctggggttaagcagtcagtgctggggtgggacagatgggggtggatgctaatgtttcttacactttcaatacattaatttacaagacttcggtgtaataacagcgacagcatattttgtgagctcctactgtgtgcccggcacacagcaaggagcaccaagaactatctcatttactcctccccgcaaccttgtagcattgtccccatgttactgagcagggaagtgaagtgctcagaggcagagggatgsagccaagaaggaattccacatccacctatgtccagcttctgcccccagggtgaaaagaccagtgatcctgggggccaaggatctggcagccaattctaggcctccaactgacttgctgcacaacacagagtacatcacaaagcaaacctacccactcattctctctctcgtcccagtgtcagcttcctt

SEQ ID NO: 680907 - DNA, 608 bp, Homo sapiens
tatttgaaaaccagcctcatacatatacatctgcaattacaacaaaatgcatgtccatgtaccacaaaacataaaatcacatcctgctgttgggacatactctaggtttaggaagataccggtagttttcaattaatgaaccgttaacgggaaagcagtcaaattttgagcaaggtgcaaaatttacgttggctgtcattgagtacacattcctaagatgctaacccccagggagactggtgagatgaccaaggtacccgtaagcaggaagaggcagaaggtaacgccataccagtatcacagagacatcttggggactgcgaagtggaaaaactttgcctcctgaacagagaagggagcctggctgggctcatggacattcacsctcagtgacccagagatgtcctttgcacacttggagacattgctctgctgcagtaacaatcacatggttatggctgttgacatccagcgaggctgagagtgggccttgaacaggagacagttgaggatggcccctttagggagtgatgaagcaactccattttataagatgtctaaatgctttgtgaaacttctccttttgtactgagacacactttatttta

SEQ ID NO: 680908 - DNA, 1310 bp, Homo sapiens
atactccaaataacttctgttcatacatgcataacaagttcaaattctatatactccaaataattaggtgttttgtttgagacaggatcttgccttgttgctcaggctggagtgcagtggtgtaattataactcacaacagcctcgaacttctgggctcaagagatccacttcagcctcccaagctgggactacaaatgcatgccatcatggccagctaattttttatctttattttttggagagacgggatcttgttatgttgcccaggctggtcttgaactcctgggcttatgcaatcctcctgcctcggccttccaaagtgttgggattataggtgtgagccacagtgcccaccccaaataatttgtgctcatacatacatacatatgtatatagttatatgtgtatgtgtacgtatatatgtgtgtgtatgtatttgygtgtgtgtgtgtagagagagagagagagaaagagaaaagaaggctgggtctgtatacttctggaatttatgcacagcatggtactgaacccataaggatatccaattaaatatgcatttattgcctaacgagatgctagtaaatcatgccataaataacgctaggaaaaaaaatgatcctaccagataataattacatatacaagttcagttaacacaaaaaaagtatcaggaaaatggttcaataaataacggtgtcactactggtgaacaatccttcaaatcatacaacctaagtcttgtataataggtgcatttcaaaagagaaaggatttagaaaacaaaggccaatcctcatgatgctgaagttgatagcgtgttgtgctttccaccagttttacaatggtgaagccataaggtatggattgcctatgaaagttttatgtcagaaaaatgactctggatggcgggtagggactgaggatatgtcacaattcagacatctatgagcatgtagattgacaactcccaggaatctctttgcacaagttgctgtccatgaagcggatggtgcccagaagacatatttctgcttttgcaaaaaaggcagcaatcagaaggacatagtaggggtggtgtgggatagcaacttttactttttatacaagagacaatatctgagatgtttaaagagaagacccatagaagatactaaaaatatcacttttaacagagattatgtgaatactgccccaacaggcttcttacatatcccaggtgacaacaagtaaaccagtaagacagatagacagatagataaacagacagacagacagacagacagacagactaactgactgactgactga

SEQ ID NO: 680909 - DNA, 2879 bp, Homo sapiens
tgagaggaggtgaagcttcggaggagaccgagggctctggagctgagtggccctggggtcacgtgctacctgggcccctcccacatggggcctccacacttaaatcctcagtgcctggcacatgatgagctgccttggccaggcacagtggctccctccagtaatcctagcactttgggaggccaggtggaaggatagcttgagcccaggagtttaagactagcctgggcaaaatggcaaaatactgtctctacaaaaaatcaaaaaaattatccaggcgtggtggtgtccacctataggcccagctacttggcaagctgaggtgggaggattgcttgagcccaggagtttgatgctgtagtgagccacgtttgtgccactgcactccagcctgggcaacagagcaagaccctgcctcaaacaacaacaaacaaacaaacaaacaaacaacaacaacaacaacaaaacaaacaaaacctcaatccccctacatggtgagctgctgatgaggggcagctcttactaagcaaacctccttggctggctgtgtgtctgcaggacttctcagagcctttgtctgggctctccaggggtcagtgttgttgcaggggctggggctgagggtaaaccacagatctatgggaggaagagctgcaaccttaaacttagatggggagctcccactctccctaactggatggagaagctgttgatgcacagctgggctcccacaatttccagtgctgaatataaccccacgcccacacacaactaaacaaaactagggtacagatttgccaaatatggaagttttaaaattttatattcagggcaggcaggacttctacctcaagccagctgtgagtcttaggccttaaaggaagaaagcgttcctttccttccagaagagagaggtggaggagagggagcaccagcttagcttgatcgccagggctgagctggcccaggatgcagcagggcctccataaacggctgctgaacgaatgcacagccgctccggctgcctttacacaccactcattcccaattcaccagtaaacccactgggatagaagcctcatcaagtcttacctgtagccccaaattttaacccaaaagagttcctgtctttggtgtcacccagcatcaagatttggggtgggctggctcctgttttcaagagaaacactttcctcacagcaggaagagaattgaaagaccggaccctaggtcttctggcaaggaacagcctcaatggggaagtggcagccacctgggagccctagggccctggccctgcaggggtgagaaactgtccacgagcagatctgcacttgtacagagcacgccgtcgcgatttcccacgtgtacaggtgtacatacacacatgcacacactcacgtgtgcacacagtttctaaggttattttgggtttgttttttaacaagagccatcaaaatcaagggagacatgcacgaaccttcacagaacttcaattctcatacatatacttgaggcctgaatcagaatgttttcccatcacagtcgacaatattcttcttttttttagacggattctcactctgtcgcccaggctggagtgcagtagtgccatcttggctcactgcaacctctgcctcccaagctcaagcgatcctcccacctcaacctcccaagtagctgggactacaggtgcatgccaccacacctggctacttttgttctcatttattgaaaaaacaaaaaggcacatttatttcatttcatttaaaaaccaaccactttagtcaagaactagcgttctgcagcggaccatttaatgactggaactctctaatcctttcctggagaaaggcctctttcaaaagccaacttgggcttttggttaaaattcctcctggctcaaattggctggagagaacccctatgctctcctggcttggaactgctgtcctgtaagaaatgatagggccctatggcttgaggaatccagggagtgggtaccttgtgactaggtggggaggggagtggaagggtcagatggccatggaggaggatttttgagccttttagtgcaaaaaggaaaggagagcttggggagacgtgagccagggctacctggaggagccctacctggaggcgccacagcaacaaggacatgggtgaatggagaagacgggcaagaagggcaggatgtggctgggtgcccaggacagaggaggcaacctgggaacatcagcgggctcagaccaggggcaccctagagatgggagtagagtggagagggggctgagggaagaattttaacttgtaccaacaaagtggggctcttttgtccagacaaaaggacaaaaggttgctgtttctgagacccaggggcccactgggcatgcctccaccctgcaccggggctgcaaggtcagagggatctgccaaggacagggcaggaggtggggcccaggccatacaactgaagagcatttgaggggtagctgtctcctgcctgcctgttcatctgcttagttctccaggcttcctcaattgcagcgtgtcccgcagagcctctgcctacccttccagccccatctgctgccagtttctgcatcccacctggggtgggctgtaatagcccscaaagatgcccacgacctaatccctggaacctgtgaacatgctaccttacaaaagggatttcatgggtgtgactgaatcaaagagcctgagctgggggagcttatcttggattacctggacaggcccaatctaatcagaaggggttctaaaagtgaaagagtgaggcagacgaggaggtgagagtgatgcagtgtgagaaggactcatcctgccactgctggctttgagaatggagggaggggcca

SEQ ID NO: 680910 - DNA, 2879 bp, Homo sapiens
tgagaggaggtgaagcttcggaggagaccgagggctctggagctgagtggccctggggtcacgtgctacctgggcccctcccacatggggcctccacacttaaatcctcagtgcctggcacatgatgagctgccttggccaggcacagtggctccctccagtaatcctagcactttgggaggccaggtggaaggatagcttgagcccaggagtttaagactagcctgggcaaaatggcaaaatactgtctctacaaaaaatcaaaaaaattatccaggcgtggtggtgtccacctataggcccagctacttggcaagctgaggtgggaggattgcttgagcccaggagtttgatgctgtagtgagccacgtttgtgccactgcactccagcctgggcaacagagcaagaccctgcctcaaacaacaacaaacaaacaaacaaacaaacaacaacaacaacaacaaaacaaacaaaacctcaatccccctacatggtgagctgctgatgaggggcagctcttactaagcaaacctccttggctggctgtgtgtctgcaggacttctcagagcctttgtctgggctctccaggggtcagtgttgttgcaggggctggggctgagggtaaaccacagatctatgggaggaagagctgcaaccttaaacttagatggggagctcccactctccctaactggatggagaagctgttgatgcacagctgggctcccacaatttccagtgctgaatataaccccacgcccacacacaactaaacaaaactagggtacagatttgccaaatatggaagttttaaaattttatattcagggcaggcaggacttctacctcaagccagctgtgagtcttaggccttaaaggaagaaagcgttcctttccttccagaagagagaggtggaggagagggagcaccagcttagcttgatcgccagggctgagctggcccaggatgcagcagggcctccataaacggctgctgaacgaatgcacagccgctccggctgcctttacacaccactcattcccaattcaccagtaaacccactgggatagaagcctcatcaagtcttacctgtagccccaaattttaacccaaaagagttcctgtctttggtgtcacccagcatcaagatttggggtgggctggctcctgttttcaagagaaacactttcctcacagcaggaagagaattgaaagaccggaccctaggtcttctggcaaggaacagcctcaatggggaagtggcagccacctgggagccctagggccctggccctgcaggggtgagaaactgtccacgagcagatctgcacttgtacagagcacgccgtcgcgatttcccacgtgtacaggtgtacatacacacatgcacacactcacgtgtgcacacagtttctaaggttattttgggtttgttttttaacaagagccatcaaaatcaagggagacatgcacgaaccttcacagaacttcaattctcatacatatacttgaggcctgaatcagaatgttttcccatcacagtcgacaatattcttcttttttttagacggattctcactctgtcgcccaggctggagtgcagtagtgccatcttggctcactgcaacctctgcctcccaagctcaagcgatcctcccacctcaacctcccaagtagctgggactacaggtgcatgccaccacacctggctacttttgttctcatttattgaaaaaacaaaaaggcacatttatttcatttcatttaaaaaccaaccactttagtcaagaactagcgttctgcagcggaccatttaatgactggaactctctaatcctttcctggagaaaggcctctttcaaaagccaacttgggcttttggttaaaattcctcctggctcaaattggctggagagaacccctatgctctcctggcttggaactgctgtcctgtaagaaatgatagggccctatggcttgaggaatccagggagtgggtaccttgtgactaggtggggaggggagtggaagggtcagatggccatggaggaggatttttgagccttttagtgcaaaaaggaaaggagagcttggggagacgtgagccagggctacctggaggagccctacctggaggcgccacagcaacaaggacatgggtgaatggagaagacgggcaagaagggcaggatgtggctgggtgcccaggacagaggaggcaacctgggaacatcagcgggctcagaccaggggcaccctagagatgggagtagagtggagagggggctgagggaagaattttaacttgtaccaacaaagtggggctcttttgtccagacaaaaggacaaaaggttgctgtttctgagacccaggggcccactgggcatgcctccaccctgcaccggggctgcaaggtcagagggatctgccaaggacagggcaggaggtggggcccaggccatacaactgaagagcatttgaggggtagctgtctcctgcctgcctgttcatctgcttagttctccaggcttcctcaattgcagcgtgtcccgcagagcctctgcctacccttccagccccatctgctgccagtttctgcatcccacctggggtgggctgtaatagcccccaaagatgcccacgacctaatccctggaacctgtgaacatgctaccttacaaaagggatttcatgggtgtgactgaatcaaagagcctgagctgggggagcttatcttggattacctggacaggcccaatctaatcagaaggggttctaaaagtgaaagagtgaggcagaygaggaggtgagagtgatgcagtgtgagaaggactcatcctgccactgctggctttgagaatggagggaggggcca

SEQ ID NO: 680911 - DNA, 825 bp, Homo sapiens
acactgcagtgatcagtagcagagctgctgatggtctaattggctccatctaggagaagatctgagaaaaatctggagtttcagcagctaacaaataaaatgaggcctgaaagagaagaacttgatagatttactaaaaatgtaacactctggagtgcttctgcatatggagcttctccgactgacttggagattggtgcagataataagccatctgggggcatgtccttactgtcccacccattcctcctgatggcattactgtctgaatacaacctgagcctggaaaaggaggaggcccattctcctagcaagccatatattggtttggaataaaaacaattatcctcgcctgctactytgattagcctccctacccagaagattagtccaggcaagaaagctgggtgtcaacaacttgaccacaaacagttgtaagctcatctccatggaaaccatatagtaacacaactcaactttccacaatgagatgagcccttagggctggaacagtgaccagcacaaatactaacaacatggactgattatctgagcgtgagcacacactactgctgtttttattggctatttctcttctctggttttcaggtctatgaaactgtcggacacagtagtcccaccttgctagcagaagtgtttctgcctattcctgagactactgttgtcactggaagggctcctactgaagaagtggagtttagcagtaatcagcatgtgacactggaccacgagggagttggaagtggtatggaaagctaatatcttcaatggttcactgtttcattgtcagatttgaatgtgtat

SEQ ID NO: 680912 - DNA, 825 bp, Homo sapiens
acactgcagtgatcagtagcagagctgctgatggtctaattggctccatctaggagaagatctgagaaaaatctggagtttcagcagctaacaaataaaatgaggcctgaaagagaagaacttgatagatttactaaaaatgtaacactctggagtgcttctgcatatggagcttctccgactgacttggagattggtgcagataataagccatctgggggcatgtccttactgtcccacccattcctcctgatggcattactgtctgaatacaacctgagcctggaaaaggaggaggcccattctcctagcaagccatatattggtttggaataaaaacaattatcctcgcctgctactttgattagcctccctacccagaagattagtccaggcaagaaagctgggtgtcaacaacttgaccacaaacagttgtaagctcatctccatggaaaccrtatagtaacacaactcaactttccacaatgagatgagcccttagggctggaacagtgaccagcacaaatactaacaacatggactgattatctgagcgtgagcacacactactgctgtttttattggctatttctcttctctggttttcaggtctatgaaactgtcggacacagtagtcccaccttgctagcagaagtgtttctgcctattcctgagactactgttgtcactggaagggctcctactgaagaagtggagtttagcagtaatcagcatgtgacactggaccacgagggagttggaagtggtatggaaagctaatatcttcaatggttcactgtttcattgtcagatttgaatgtgtat

SEQ ID NO: 680913 - DNA, 825 bp, Homo sapiens
acactgcagtgatcagtagcagagctgctgatggtctaattggctccatctaggagaagatctgagaaaaatctggagtttcagcagctaacaaataaaatgaggcctgaaagagaagaacttgatagatttactaaaaatgtaacactctggagtgcttctgcatatggagcttctccgactgacttggagattggtgcagataataagccatctgggggcatgtccttactgtcccacccattcctcctgatggcattactgtctgaatacaacctgagcctggaaaaggaggaggcccattctcctagcaagccatatattggtttggaataaaaacaattatcctcgcctgctactttgattagcctccctacccagaagattagtccaggcaagaaagctgggtgtcaacaacttgaccacaaacagttgtaagctcatctccatggaaaccatatagtaacacaactcaactttccacaatgagatgagcccttagggctggaacagtgaccagcacaaatactaacaacatggactgattatctgagcgtgagcacacactactgctgtttttattggytatttctcttctctggttttcaggtctatgaaactgtcggacacagtagtcccaccttgctagcagaagtgtttctgcctattcctgagactactgttgtcactggaagggctcctactgaagaagtggagtttagcagtaatcagcatgtgacactggaccacgagggagttggaagtggtatggaaagctaatatcttcaatggttcactgtttcattgtcagatttgaatgtgtat

SEQ ID NO: 680914 - DNA, 1234 bp, Homo sapiens
atgttaattattatattgaggacaagatcttttgttagctcataaatttatcaacataaattaacatatttgaagtataatataaaatattcaataaatgttatagccgcatttaaataatttaatgtgactaccccttacatcatgcaagatacaatgtactacaccaacaaattatatttttcattccttatgaaagtaaaaaatagttctaacttcaaatgagtgaaaaataacttggattaaaactttgggccaggcacggtggctcacacctgtaatcccagcactttgggaggccaaggcgggaggatcacgaggtcaggagatcgagaccatcctggctaacacggtaaaacccagtctctactaaaaatacaaaaaaatagccgggcgtggtggcgggcgcctatagtctcagctactcgggaggctgaggcaggagaatgacgtgaacccgggaggcggagtttgcagtgagccgagatcgcgccactgcactccagcctgggcgacagagcgagactccgtctcaaaaaaagaaaaaaaataaaaaaacccacaactttgctgttttaatctacacttcagaaaatacatttagtatttataaatttgaaccaacattttttgtctcttttacagcacagatttattgaaatgactatgcaagaacacatgatcacattaaccttcaattttcatgaaaaagtaggagacttatagtaaataaaaataatttcctgggaaaaaggaagataaaatgattctacgtaatacgtacaaaattaatagcaatcttggagcaatgatgagactccatgcttggtgaagaagctggtggccaagttattattctatacaacaagaattatacatcgcatcgcagaaacgcatgagatcatctcaatacacattaatgacctgttatgcccgtcgaagctcccacttaacttcacctaactgttcaagtaccctgggagggaatgaaaatgttgtggaccaagaactgctaagaacagaattacagccccctagtggcgaattgtgactattgcagtcagaacaatgtgtgctatgattgtaattatgccatttattcacgaagaatttatttttgcgtttttttycccccttaggggaagattgagatatttaacactaaaacattactgctccgtcattaaaaattatccaatcagatattctttaaaaaaatttctccaagacctat

SEQ ID NO: 680915 - DNA, 1104 bp, Homo sapiens
tattgtttaatgggaagtatattaaataatacatatcagatttattgttttaatgggaagcataataaatactaataaaaaaatcagattttatgtagaaagccccagtttctatattccgattttatttactgtttttttattagtgatgttagtggccaaaatacataccaaccaaagttcctactaatgtgttatgccacaccactgttgcaagagaagtattcagagctaattagaatgacaggcaattttatttcataaaaatcctctgaataagtgtaattttaaagacgtgtcttgcatattagagatttagaaaagaaacagatggcacacttcaatcaattgcttcttatgacattcaactgcaaataccacgtacacaaaagtttttttgaggtaaatgcctcttctctggaaaggatagttttgtttgacaaatcttgattggacagaatggaaaaaaaatgaaagaaatggactagaaatttaaccttcctgagtttgaaacttggtttttctgaatcaatttattgttaagaggagtacttggaggatgacttcctttttatttattttgccatactaaaataaaattgaatagcaaaagtaaggatgacagaagctcagagacaaaattttattactttcatttcagaagtgtgaaaaaattaagaacttagccaaataaatcaagaccctattgcctaaatctaacaacaaattttattttgtttgccaacccttcttaatctcaaacaacttctctgacattcccagcaagtacatccgttaaaagtttgcaggttctcagaataagcaaatctacagagataaaaagaggattactggttgcctagtgctgggggttgaagaagtatgtggagtgattgtaaatgggtataggattactttggggggtgatggaaatattctaaattgtgatgatgattatacaactctgagtataytaaaaaccactgaattctacacattaaaataggcaaattggatagtatgtgaattacaggtcaataaaactgttaaaagtgattcggagttaaagccattacttcgaaggaaaaagcagatcttaaaaat

SEQ ID NO: 680916 - DNA, 1882 bp, Homo sapiens
catgtttgccttctcagtctgcggagaaaattagataagtattatatgttgcttttaatatctatccagacaattacatcaaaaacttttaagtgcttctcttctgttccctatttgactgcctgcagcatttctcaactaaaagctctctttccaaactttgctttaattgttaataggcatctgctgagaaggcttaactttgctttatggcatggtgtgggagatttcgatgtgcctcagcttgtttgtggcagaacttggggaatggtgagaaattagatracagtctgttgagccctaaacatacatcagtaagagatcactgcagaaataatagctgacatttgaaaagcatttcataatgttatactaaccaaccttcctgggttaagaactagattgagcagcacacaatccccatgaaaatgttctcaatttactactagctgagagccctgctgcagttctgttattaactgctccactatggcaaaaggatagaggagaatgttgaacagggcttttctaattagtgtttgtggtgctagtctgctggctgaccttgaaattggaataaggcaggtcagacattaaaactcagagaaagaaatcagaattctttaactctcttctctctatactatctttaactccacttctcgactcgtctactctacttctctcatactatcatagacctacaactgggcaacccttcatactctatgtttatttgtcttatacttttacaaggcttaataaaactccagcttactagccaaccaacatgagagtttttctgattctccataatgacttctaaatgtcaaatgagtaagattcagtttatccagttccttaggcaagataacaagcccccgatttctaataatgtaggaagcttgttactttttaacaactggccttgaagacctgggtggttcccaaaaccccttaatttgactgcaaagatgagtcactgaaaactctgtcatcaaccatactatggggacagtgctaacagagatccttgaaattcccagataatccccaaactaccatttggctaccagctttagcctcttaacttaaatcttcactagaactgctaacaacattacactgataaaagcttcaaaagagctagcatatttctgagaagtgttaacttggggatgtatcaagaattgggccatagaaagaagttatagaagcaaaaattgaatattcattcttgtataacaaatgcattgtagagttttgagtacttattgcatcatttaattgtcagtagaatagtttgatttaagctatataacagttttatcatttatttgtaagccttaactaggtagaaatatctttttatagaatttaaacaatatattaggagcagaaactgacttgctgagaaattgctgggtctttccagaggtcgtatgaatagattcttagacaaaacagaagtctaattctagaaaactgtctagttttcaaatgtctattataatctatctctgagtcttaagtgttaaggcctactgctcttctcattgtgttaatgggcttttgcttgtgcgccgcagagactaattttctttcccatatagatataaataaggacaatggtacaaaagagaaaatggtgagggaggccttggagctagagttgggagccttgtaggattccctgggttcctcagaaagcgctccctaatgtggaaaaccaaagtcaggtaaatggaagaggaaatgttaaaggagaattactttctggtatttatgctactttcatagacatcttttatagctcctgcaaaggcaagaaggaaatcattatgcactttgtatagtgacccaagccctggcatggaaatta

SEQ ID NO: 680917 - DNA, 659 bp, Homo sapiens
gcacaagatacaggtcataaagaccttgctgataaaacaggttgcagtaagaagctggctaaaacccagcaaaatcacaatggccaggagaagtacctctggtcatcctcactgctacactcccaccagcgccatgacagtttacaaatgccatggcaacatcaggaagttaccctatatgttctaaaaaggagaggcatgaataatccaccccttgtttagcatatcatcaagaaataaccataaaaatggtcaaccagccgccctcagggctgctctgtctatggagtagccattcttttattcctttactttcttaataaatttgctctcactttacygtatggactcaccctaaactctttcttgcacaagatccaagaaccctctattggggtctggatccggagcccttttctgtaacagaagatggaaacttgtttttcttttcatggtttgtgtgtttggtggatgaatcagaggtcagacttggtcagactctacagtcagccctttggaattagggatttttttcccaataaccaaatagtgaccaactcttctcctggcagtgggaatattaaaattgttcttttaggcctggctgattttcatcttgtgatgatgttttaaaaaagcagtcctattgtgttctctca

SEQ ID NO: 680918 - DNA, 644 bp, Homo sapiens
tgcagtgaacatcctaagtaacgaagtaactagctaaagtaagcttttactagtaatagtgtgacagacatagaggaaataccaaatgaatcacaaataggctaaagcagaagaacacagattatcagctcagtgtaaattataaactttggggcaataaaaagccatagttaaagtttaaaatatttaaatgccaggctctgtgatgtgtccttttcttatttaatctttatgtggcgcctttaagttaggcattattatcctggatttacgaaggtttgcaaaggaggacattgatacttacagggattaacatcgcatgtcaaaagtcataaractgttacttgacaaggctgggatttgaatgcaggttcatttgactcctaacttcttgctttttccacaatgttattaatgctgcttatcaaaaagaaataagataagctttatcttaggtatgtggggtctcgacacatcctattcaaattatcatgtggataggaagctattatcaatgtaaaacaattatatttatccatcatagcgtgtaaccctgagacctggaaatttaggggacagagaatgggatgtggagtcagaatacttaagtttgagctcttgtttaagtattggttggggtcatg

SEQ ID NO: 680919 - DNA, 1459 bp, Homo sapiens
gagtcatgaatctgtttcctttccagtagttatgatcaactaatcataagtttttacttttagatttaggaaggatttatagataggactacaggtgcatgacactgttcccagctaattttctattttttgtagaaatggggtgccactgtgctgctcaggctggtcctgaagtcctggctcaagggatccccttgccttggcctcccaaagtgctgagactcacagggatgagcctctgttcctggcctctgatttattattatataatacaaatatttttatataatataatataatacagaacctccaactaagagatgaaatctgctatatctatggcccctcattttactacagaaacttgtcaaggttttaatactaaaagtaaagctaccaaaatgatagctttagaggctcttttctttctaataaaataaattatacaaacacacatacaytcctatcttaagattcaggcttatatatattacacgcacacacacacacacacacacacacacacacaaagaatttcttgtgtaatgaagaaaaacgtaaattgagagattatccagcaaaaaattaaaagtaaaatttttgcattttattcaacactaaaaacttgtttgttaatatttttagttttaactgaagtaggaagtaatccttcatttaatgtaatttttttaagagacagggtcttgctttattgcccaggttggagtgcagtggaaccatcatagctaactcttcactgcaaccttgaactcctggactcaagtgatcctcctgcctcagcctcttgagtagctgagactacaggcaggtgccatcactcccagctaactttttttatttttagtagagatggggtcttagtattttgcccaggctggtctccaactcctgggctcaagtgatcctccagcctcagtctcccaatgtgctgagtttataggcatgagtgactgcacccagcctcatttaatgtaatatttgcagctattaacatattgttacaataatgagtgagtttagtatgatattaatggtgaaattactgagtttgcattctggacattatttctacaacttgtaaaactcttacctagataacaaatcttaaaatgcccagagttaattatcctggagtaagaatatctcaattgtcccctcatataatgccaagaaggagttgactccatggtaacatatcaaagtttagaatggaaatacaattcctactctgcaggtacctggtaatgacatatgcccggtttttcacaaagaagataaaagtgtagtccttgatttgctcagaccaaaaggtgacctcagggtgtttcgcagatgacctgactctactgaattgcctatggacaaaaaccatgtactagatatgtagatgacagtagaggatgctttttaagtcatactggctaaaaacatttttaaa

SEQ ID NO: 680920 - DNA, 1459 bp, Homo sapiens
gagtcatgaatctgtttcctttccagtagttatgatcaactaatcataagtttttacttttagatttaggaaggatttatagataggactacaggtgcatgacactgttcccagctaattttctattttttgtagaaatggggtgccactgtgctgctcaggctggtcctgaagtcctggctcaagggatccccttgccttggcctcccaaagtgctgagactcacagggatgagcctctgttcctggcctctgatttattattatataatacaaatatttttatataatataatataatacagaacctccaactaagagatgaaatctgctatatctatggcccctcattttactacagaaacttgtcaaggttttaatactaaaagtaaagctaccaaaatgatagctttagaggctcttttctttctaataaaataaattatacaaacacacatacattcctatyttaagattcaggcttatatatattacacgcacacacacacacacacacacacacacacacaaagaatttcttgtgtaatgaagaaaaacgtaaattgagagattatccagcaaaaaattaaaagtaaaatttttgcattttattcaacactaaaaacttgtttgttaatatttttagttttaactgaagtaggaagtaatccttcatttaatgtaatttttttaagagacagggtcttgctttattgcccaggttggagtgcagtggaaccatcatagctaactcttcactgcaaccttgaactcctggactcaagtgatcctcctgcctcagcctcttgagtagctgagactacaggcaggtgccatcactcccagctaactttttttatttttagtagagatggggtcttagtattttgcccaggctggtctccaactcctgggctcaagtgatcctccagcctcagtctcccaatgtgctgagtttataggcatgagtgactgcacccagcctcatttaatgtaatatttgcagctattaacatattgttacaataatgagtgagtttagtatgatattaatggtgaaattactgagtttgcattctggacattatttctacaacttgtaaaactcttacctagataacaaatcttaaaatgcccagagttaattatcctggagtaagaatatctcaattgtcccctcatataatgccaagaaggagttgactccatggtaacatatcaaagtttagaatggaaatacaattcctactctgcaggtacctggtaatgacatatgcccggtttttcacaaagaagataaaagtgtagtccttgatttgctcagaccaaaaggtgacctcagggtgtttcgcagatgacctgactctactgaattgcctatggacaaaaaccatgtactagatatgtagatgacagtagaggatgctttttaagtcatactggctaaaaacatttttaaa

SEQ ID NO: 680921 - DNA, 607 bp, Homo sapiens
aaagtaacctccacaccaaagtattattattaataaaaaataaacacctagctcttatcctaaagaggttattaccaagtggtgagaaatagttataaagtataataagtacatataagccttaaatttccaaacagatttgcataatttagcatagcttgtgggtaatgatgatgataaaatcactaaacatctgctaagcatttaaacaacattttccttccgttagcatcagttgctggaaaataacatactttggctcaaattgtcctgttaaaaatatagtttggggccagcagaattttattcatgcttttatwtggagtctccacttttttctgtaaatgtatttatagccaaaagctttcaccagttaggaaatgcagcagatgccaataagtacattcattattttgattatggcaatgtcagactttcagaaaacttcctccatctctatctgtagcacaacctcacatagggagggaccatgtgctggtcaggaaataaacagctttctggcaggagttaaatgaaaatactgtttattactcttataagatgttataattgacggttttattgtaatacaatagcgattatgaca

SEQ ID NO: 680922 - DNA, 959 bp, Homo sapiens
tattttagctttcagcatgccttcctcactaaacttaatcatgtctaggttttgatttaaaatgagagggatgtgacttttccattcacttgaatactcagaggccactgtggggttattaattgacctaatttaaatactgttgtgtctcagggcatagggaaacttgaagtgagcagagaaagggaatgggtaactggtgaaggagtcacaacacacacagtatttatcaattaagttcactgccttatctgggtgtgccctgtggtgccctaaaacaatcacagtagtaacatcgaagatcactaatcacagatcaccataacagatataatgacaaagtctgaaatattgtgagaatttaccagtatgtgtcacacagacatgaagtgaatacatgttggaaaaatagcaccaacagacttgctcaacacagggtggccacaaccttcaatttgtaaaaaaatgcaatgtttgcaaagcacaataaaatgaggtacgcctgcataacacttatactatctggctaaatctaatactgatgacagtcaatgcttaatttagaagaggtggcagctattctataatttctgaaaaagcacccattaatattatgagttttacagatttgtgaagctccagtytatgaaaactcagacctatgccagcagagtcaaggctttgttttatattccaaggaatatttcttgactgacatttccttgtttcacaatgatacttctttagattcatcattcagggtggccaatgacaactggaagagtaagtatggcttggctggcacctctgtattttaaactactattatttctaaactttaagcaatgcacagagatttataccaacataaacacttacaaagacttaaaattgtatttatattgtgttctttatcaaacataaacaaacttaattataagaaatgccttattgaaact

SEQ ID NO: 680923 - DNA, 996 bp, Homo sapiens
tgcataaaatagtgtttcaaaaaggactgggtttacatagtacttcatattttacataaagactctgcatagttgaaataaaagtggcctgacactgggattcaagagccctggttttgagacctgttttgctggttaccagttggtagttctcaacaagctattaacgctctctgtgcctgtttccacacatttgaaaatggggttgatactatctcataagattcttataaaggttaaatggaaaactaaaaagcactttgcaaatgagaagcattatcatcaccatcatcattatcttcatcatcatgatgttatttttactttctcaacaatctcctgagggagctagatagagcaagtagaccattcacaaatgaggagactgaaggtgagaggatttaagtaacttcccaaggtcacacaactaggaagactagcattctcatcacagctatgaaaaactgggtgargtttagctgaggaacataaaggttttctatttcttttggatctcatcctttagattacagaattataaaaatgaaaaagtcagaactgtgtttagatacaagcaagagagacccccaccaaaggtcttgtgtgttagttacaacaagggccaaccaactggaccaaatctggcctgctttggttaataaagttctattaaaacgccgtcaccctcattcatttacaagctgtctttggctgcttttgcactacaacagcagaactgaatggttgcaatagaaaccctatggaccacaatgctaaaaacatgtacaatctggccctttacagaaaaagtttgccaactcctgctttagaaggccccagtatcgcaaaccacacaaaaataaatgtgttaaagaacacatggctgttctatttggtgattggcactagaagagtgtgactcatgtccttgaatagccactgttgtgaccagtactcctcaggcctcaggccccagatcacatctgccttgtgtcc

SEQ ID NO: 680924 - DNA, 996 bp, Homo sapiens
tgcataaaatagtgtttcaaaaaggactgggtttacatagtacttcatattttacataaagactctgcatagttgaaataaaagtggcctgacactgggattcaagagccctggttttgagacctgttttgctggttaccagttggtagttctcaacaagctattaacgctctctgtgcctgtttccacacatttgaaaatggggttgatactatctcataagattcttataaaggttaaatggaaaactaaaaagcactttgcaaatgagaagcattatcatcaccatcatcattatcttcatcatcatgatgttatttttactttctcaacaatctcctgagggagctagatagagcaagtagaccattcacaaatgaggagactgaaggtgagaggatttaagtaacttcccaaggtcacacaactaggaagactagcattctcatcacagctatgaaaaactgggtgaagtttagctgaggaacataaaggttttctatttcttttggatctcatcctttagatyacagaattataaaaatgaaaaagtcagaactgtgtttagatacaagcaagagagacccccaccaaaggtcttgtgtgttagttacaacaagggccaaccaactggaccaaatctggcctgctttggttaataaagttctattaaaacgccgtcaccctcattcatttacaagctgtctttggctgcttttgcactacaacagcagaactgaatggttgcaatagaaaccctatggaccacaatgctaaaaacatgtacaatctggccctttacagaaaaagtttgccaactcctgctttagaaggccccagtatcgcaaaccacacaaaaataaatgtgttaaagaacacatggctgttctatttggtgattggcactagaagagtgtgactcatgtccttgaatagccactgttgtgaccagtactcctcaggcctcaggccccagatcacatctgccttgtgtcc

SEQ ID NO: 680925 - DNA, 441 bp, Homo sapiens
aaawatttgtccctgaattatatgtgattattttcttctgcttattgaatatgtcacttttgaaataagaaatgttaataaaattttacttttttattttttctttttatttattttccttttttattttattttatttttgttattatactttaagttttagggtacatgtgcacaatgtgcaggttagttacatatgtatatatgtgccatgttggtgtgctgcacccagtaacttgtcatttaacattaggtatatctcctaatgctatccctcccccctccccccacctcacaagaggccccagtgtgtgatgttcccctccctgtgtccatgtgttctcattgttcaattctcacctatgagtgagaacatgcagtgtttggtttttggtccttgtgatagtttgctgagaatgatggtttccagcttcatccatg

SEQ ID NO: 680926 - DNA, 2479 bp, Homo sapiens
caagtgatcctcccaccttggcctcccaaagtgctgggatgataggcgtgagccactgcacctggcctctatgccatagtttctacatctgtaaaatcgggatgataatattagtacctcctgagcagagttgtttgagaaaggtatctaaagtaggggcagcttagatagtctaagccactgtcatttttcatcgtgtctcctaatttgtctccttgcttataacctccacctcactcttactgtagtactgaagtggrggtactaaatagatccaaaatgactgcttggggagactgactctaagccactgtctacccagcagtcattttggatctatttaaaatataagccagatcatgtcaccactatcccccacctcagctgaattgacttcccatcttttataataaaacctaagcccttaccctggccccaagcccccacatgatctaccttcctgccacacagaccctgctggtcctcagatgtgccaagcgcattcctgcctcaaggccttggcacttgcgttctgtctgcctagaaccctcttgccccagatctttccacggctggctcctcgatgctcctgaggcccaagagaagccttcctgaccacatgttcttagatctcaccctcttttattcttcccatagcactcgttagacttggcattctctttttggttttctgccactgccactagactctaagcttcatgagagcagaggccttgtctgtgttatcactgtgttctggcatttggagcagcatccatacatgatgggtgctcagtacatatctataaggatgaataaattatagtctagtgtaaaagacatgtcaaatgtcaagaattcagtttcaaagaataataataatagccatcacttatgttcagtttactatgtagcagacgctgctctcggcactttacatatgccaactcatttaactttagtactctcacataattatataatctctataattatctctgttttacagaggaagaaactgaggcatggcaaactttactaacttttccacagttaataagtggtagagcaacttcaactatagccctgtatttaatgcatggcatcacaggagtgacaacatgggacccaatctagactgggttcagggagtgcttcttattgggcctcacagaaattcattgaggtagatattattattcccactttataggcaaagaaactgaggctcagggagtttaagagattcatccaggactgtaccactaagaagtgacagagcaaggacttgagaccagaggcctgtcctctccaccatgcagaacagcccacaggtggggtcaggccagtagttccaggggcccatgtttagtaaacaggacgcctgtttatttttcctccattttgggtcccttgcacactctttctctatctcgctccacaggccatcccatccatgccgaccctttccaaactgtccctctacctgggacccctctctgtgggccccatgatcagggcctggggtgaaacaaagctgctagtgccctgtgtgtggaggaaattcaagggcatggccaccctgcctggctctacaggtttgataagggagggctcctggccctggtcagaggggtccaaggagtcctttctgccaacttggaaggtccttcggggcttggtaggcttggaatggggtgtcagcagccacttggatgccagataaacagaggggcactcctaggcatggagcaccagctgcgttccttccttgtcttaggccacgagaaatgaggtctctgaacaaagagcactgcccagcccatctgggggcctggatcctgatgattgtgggagagagggagggattcatttcccagattgcccagcctttcctgtcagcccaaagacacgttggactctaaaattttgtatagtttaatccctcctcagcacaaaaacaaaggtagtaatcatgatattattaaagaaaaaggctttatttatggcaggactgtgatttaattttacatgtgtttgtagaggggtgtgtgtgtgtgtgtgtgtgtatccccatttgtggtctgaacacatctttattattaactatgtgatcaaataacagccttcttatttggataaagaaaatagaacttatttaaatgagattgagtcccgcttatgtgctggtatagtggagagaaagtactttcttgttgatttaaactctaccctgtttcctcctctgtcagatagggacagtcatgcctgtattacatgattagtgtggggatgaaatgaagagctgtgcatgtgatgtgctcagtagacataaggccattccacattggctgtgcctgttcatatagagaggttatttctgggaaaatgagaggtcctttgtatattctttgagtggtagtcatgaggagagtagttacgtcaatacaagctcaagtggatgggcataatcgcttat

SEQ ID NO: 680927 - DNA, 2479 bp, Homo sapiens
caagtgatcctcccaccttggcctcccaaagtgctgggatgataggcgtgagccactgcacctggcctctatgccatagtttctacatctgtaaaatcgggatgataatattagtacctcctgagcagagttgtttgagaaaggtatctaaagtaggggcagcttagatagtctaagccactgtcatttttcatcgtgtctcctaatttgtctccttgcttataacctccacctcactcttactgtagtactgaagtggaggtactaaatagatccaaaatgactgcttggggagactgactctaagccactgtctacccagcagtcattttggatctatttaaaatataagccagatcatgtcaccactatcccccacctcagctgaattgacttcccatcttttataataaaacctaagcccttaccctggccccaagcccccacatgatctaccttcctgccacacagaccctgctggtcctcagatgtgccargcgcattcctgcctcaaggccttggcacttgcgttctgtctgcctagaaccctcttgccccagatctttccacggctggctcctcgatgctcctgaggcccaagagaagccttcctgaccacatgttcttagatctcaccctcttttattcttcccatagcactcgttagacttggcattctctttttggttttctgccactgccactagactctaagcttcatgagagcagaggccttgtctgtgttatcactgtgttctggcatttggagcagcatccatacatgatgggtgctcagtacatatctataaggatgaataaattatagtctagtgtaaaagacatgtcaaatgtcaagaattcagtttcaaagaataataataatagccatcacttatgttcagtttactatgtagcagacgctgctctcggcactttacatatgccaactcatttaactttagtactctcacataattatataatctctataattatctctgttttacagaggaagaaactgaggcatggcaaactttactaacttttccacagttaataagtggtagagcaacttcaactatagccctgtatttaatgcatggcatcacaggagtgacaacatgggacccaatctagactgggttcagggagtgcttcttattgggcctcacagaaattcattgaggtagatattattattcccactttataggcaaagaaactgaggctcagggagtttaagagattcatccaggactgtaccactaagaagtgacagagcaaggacttgagaccagaggcctgtcctctccaccatgcagaacagcccacaggtggggtcaggccagtagttccaggggcccatgtttagtaaacaggacgcctgtttatttttcctccattttgggtcccttgcacactctttctctatctcgctccacaggccatcccatccatgccgaccctttccaaactgtccctctacctgggacccctctctgtgggccccatgatcagggcctggggtgaaacaaagctgctagtgccctgtgtgtggaggaaattcaagggcatggccaccctgcctggctctacaggtttgataagggagggctcctggccctggtcagaggggtccaaggagtcctttctgccaacttggaaggtccttcggggcttggtaggcttggaatggggtgtcagcagccacttggatgccagataaacagaggggcactcctaggcatggagcaccagctgcgttccttccttgtcttaggccacgagaaatgaggtctctgaacaaagagcactgcccagcccatctgggggcctggatcctgatgattgtgggagagagggagggattcatttcccagattgcccagcctttcctgtcagcccaaagacacgttggactctaaaattttgtatagtttaatccctcctcagcacaaaaacaaaggtagtaatcatgatattattaaagaaaaaggctttatttatggcaggactgtgatttaattttacatgtgtttgtagaggggtgtgtgtgtgtgtgtgtgtgtatccccatttgtggtctgaacacatctttattattaactatgtgatcaaataacagccttcttatttggataaagaaaatagaacttatttaaatgagattgagtcccgcttatgtgctggtatagtggagagaaagtactttcttgttgatttaaactctaccctgtttcctcctctgtcagatagggacagtcatgcctgtattacatgattagtgtggggatgaaatgaagagctgtgcatgtgatgtgctcagtagacataaggccattccacattggctgtgcctgttcatatagagaggttatttctgggaaaatgagaggtcctttgtatattctttgagtggtagtcatgaggagagtagttacgtcaatacaagctcaagtggatgggcataatcgcttat

SEQ ID NO: 680928 - DNA, 2479 bp, Homo sapiens
caagtgatcctcccaccttggcctcccaaagtgctgggatgataggcgtgagccactgcacctggcctctatgccatagtttctacatctgtaaaatcgggatgataatattagtacctcctgagcagagttgtttgagaaaggtatctaaagtaggggcagcttagatagtctaagccactgtcatttttcatcgtgtctcctaatttgtctccttgcttataacctccacctcactcttactgtagtactgaagtggaggtactaaatagatccaaaatgactgcttggggagactgactctaagccactgtctacccagcagtcattttggatctatttaaaatataagccagatcatgtcaccactatcccccacctcagctgaattgacttcccatcttttataataaaacctaagcccttaccctggccccaagcccccacatgatctaccttcctgccacacagaccctgctggtcctcagatgtgccaagcgcattcctgcctcaaggccttggcacttgcgttctgtctgcctagaaccctcttgccccagatctttccacggctggctcctcgatgctcctgaggcccaagagaarccttcctgaccacatgttcttagatctcaccctcttttattcttcccatagcactcgttagacttggcattctctttttggttttctgccactgccactagactctaagcttcatgagagcagaggccttgtctgtgttatcactgtgttctggcatttggagcagcatccatacatgatgggtgctcagtacatatctataaggatgaataaattatagtctagtgtaaaagacatgtcaaatgtcaagaattcagtttcaaagaataataataatagccatcacttatgttcagtttactatgtagcagacgctgctctcggcactttacatatgccaactcatttaactttagtactctcacataattatataatctctataattatctctgttttacagaggaagaaactgaggcatggcaaactttactaacttttccacagttaataagtggtagagcaacttcaactatagccctgtatttaatgcatggcatcacaggagtgacaacatgggacccaatctagactgggttcagggagtgcttcttattgggcctcacagaaattcattgaggtagatattattattcccactttataggcaaagaaactgaggctcagggagtttaagagattcatccaggactgtaccactaagaagtgacagagcaaggacttgagaccagaggcctgtcctctccaccatgcagaacagcccacaggtggggtcaggccagtagttccaggggcccatgtttagtaaacaggacgcctgtttatttttcctccattttgggtcccttgcacactctttctctatctcgctccacaggccatcccatccatgccgaccctttccaaactgtccctctacctgggacccctctctgtgggccccatgatcagggcctggggtgaaacaaagctgctagtgccctgtgtgtggaggaaattcaagggcatggccaccctgcctggctctacaggtttgataagggagggctcctggccctggtcagaggggtccaaggagtcctttctgccaacttggaaggtccttcggggcttggtaggcttggaatggggtgtcagcagccacttggatgccagataaacagaggggcactcctaggcatggagcaccagctgcgttccttccttgtcttaggccacgagaaatgaggtctctgaacaaagagcactgcccagcccatctgggggcctggatcctgatgattgtgggagagagggagggattcatttcccagattgcccagcctttcctgtcagcccaaagacacgttggactctaaaattttgtatagtttaatccctcctcagcacaaaaacaaaggtagtaatcatgatattattaaagaaaaaggctttatttatggcaggactgtgatttaattttacatgtgtttgtagaggggtgtgtgtgtgtgtgtgtgtgtatccccatttgtggtctgaacacatctttattattaactatgtgatcaaataacagccttcttatttggataaagaaaatagaacttatttaaatgagattgagtcccgcttatgtgctggtatagtggagagaaagtactttcttgttgatttaaactctaccctgtttcctcctctgtcagatagggacagtcatgcctgtattacatgattagtgtggggatgaaatgaagagctgtgcatgtgatgtgctcagtagacataaggccattccacattggctgtgcctgttcatatagagaggttatttctgggaaaatgagaggtcctttgtatattctttgagtggtagtcatgaggagagtagttacgtcaatacaagctcaagtggatgggcataatcgcttat

SEQ ID NO: 680929 - DNA, 1555 bp, Homo sapiens
atgaggatttcttctatcttctctgggaagtatgagaccaagttgccagtgaaaaagaggtaggaaggaaaggaggtgggggggatgactgagtagagaagaaaaacataataggatgcttacacattgttgaaggtgtgttcgtgattttggcttgtgaatttagagttaacccagatggtcccaaattaatgatagacatctggtggctatggtgactccagggaaggaaagagaacagcgagccggcacagttagtgaacgcttcacagaagaggctgtackgggggacttgatcgatttgtgtaatttagatacacaggccatgccctccaggtaaaagtactcggtagcacagagcaaagcacaggagtggggatgaacaaggtcagccagtccagctgcagaggagtaatggagatggaacaggccttatgcaacagtggacacttctgaaaaaagggctactagcaaagataaggtatcatttgggaagattaacacagtatttggtatattgaatgggttggaaagagatttctggccaagagaggtggccatagttaagcccaagagactaagattgtatcctactcgggaggaagagggcacaaatgagagacccccatccttaggatgacatcttcagcccttcacttcattcttggagattttatattcctttgggaagtacgaaaattcgagaatatttttcaggatcttgttacttttgaagtttctgaatgacttctaatgcccatccttcctaaagaaaacagtccgtccactgaatgttcaaggacaaacccacatggtcatagtggtggccatggttaatacattgagtgcttaaaatatcaccagtaatgtgctaagtcctacgcatgcattatttcattcaatcctcagaacaaccctttgaagcagatgtctttactatccccattttataacaagaaaactgagccacacataagtggagtaagttgcccaaagtcacacaactggtgataggaggggccaggttcaaacccaggctacaggcctgcccaaagtcacacaactggtgacagaaggggccaggttcaaacccaggctacagtcggggccatgcagccactgcccacaagatccataactagacagtgtccttgtaaagggaaacaccaagagactttagcctcaggctcagctgagaaaaactagggcccaaatcatttgtggccaaagtggaatgcagaggaaatacatggaggagatcacagaccctgggcttctcctgtgaggccaggtggacacctgtcaccttcagaggcccgaagagaaaagcagagagaaaaatgcctcactgttcctgatacagcacctgcccccaaaataattccacaggaaagcaccaaatcaaggaattacggtgctatcctgacacccagcttttgagaagagattataatttatcagtgagaaatagaaacaggatacatagcctctggggccaaaagatttaatatttcaatttgtttggggtttatttttttcgtgattttacctattt

SEQ ID NO: 680930 - DNA, 606 bp, Homo sapiens
gaaaacatcaaattttgtgaaggaatcaactttcacaaaagttgattttttttttgagacggartctcgctctgtctcccaggctggagtgcagtggcgcgatctcggctcactgcaaactccgcctcccgggttcacgccattctcctgcctcagcctcccgagtagctgggactacaggtggctgccaccacgcccggctattttttttttttttttgtatttttagtagagacggggtttcaccgtgttatccaggatggtctcgatctcctcacctcgtgatccgcccgcctcagcctcccaaagtgctgggattacaggcgtgagccaccgcgcccggccaaaagttgatttttaaattaaattttattcaaatgtttttttcacatttattttccttctaattcgttactgtcttgtaaggttttcatggacccttgaaaccgtaggaaatgtatgacaattctacacatcctcttcacctgttctattgataaacctcccagcctttcagttcttgctctcccaatcctctcctagagttcatcctaagatcacactttcatagcatttctcatatatcctgtctttacttccttccct

SEQ ID NO: 680931 - DNA, 606 bp, Homo sapiens
gaaaacatcaaattttgtgaaggaatcaactttcacaaaagttgattttttttttgagacggagtctcgctctgtctcccaggctggagtgcagtggcgcgatctcggctcactgcaaactccgcctcccgggttcacgccattctcctgcctcagcctcccgagtagctgggactacaggtggctgccaccacgcccggctattttttttttttttttgtatttttagtagagacggggtttcaccgtgttatccaggatggtctcgatctcctcacctcgtgatccgcccgcctcagcctcccaaagtgctgggattacaggcgtgagccaccgcgcccggccaaaagttgatttttaaattaaattttattcaaatgtttttttcacatttattttccttctaattcgttactgtcttgtaaggttttcatggacccttgaaaccgtaggaaatgtatgacaattctacacatcctcttcacctgttctaytgataaacctcccagcctttcagttcttgctctcccaatcctctcctagagttcatcctaagatcacactttcatagcatttctcatatatcctgtctttacttccttccct

SEQ ID NO: 680932 - DNA, 639 bp, Homo sapiens
ccagttcaagatagtgaggatgaacttggagaggtactgagatgctctctccaaccccaccacatacacagggtcctgttgtaattattagaatcctaacaccccagaagcaacaatagcccaggaaatcttcaaactgtatccctgaaaagcactgtcactttatctcaacttgaagccagttgctaaggccctacctggggcagatagccagcatgatttgctagttttgaaggtgtttgccaggtatgctgagtcctggctactggggttggcagacaagtgcgctctcagaagacagtaccctggaaagggagaaacgtgattctgggtggataatctgtattcttgtccctctctgcaggtcactgtggtcttaggggaccttctgtccttttcttaggggaaatacctggaacgctggggtacrgaggagagaccatggtaggggtggagtgatgtagtcagatatgcccagagttgaccctggagccacaggagccttctgataaacttggggtcattcctgttgagaagggatgagaatgtggatggctcagtaagacaacactgattcaagcaacagttattgcttagctactctatattctaaaaagtcaaaaggcaaactgaggaaaa

SEQ ID NO: 680933 - DNA, 594 bp, Homo sapiens
cccgggttcacctcgcccctcgctcattcctcccgaccaaggcccatggtcagaggtgtcctcgccccgcggccgtcagagggcgcggcctacactcgaatgccggccgagccctccacgcgctcggaacttgggcttcccggtgcagcctccccgcgatcgcaatgcccgctgcctttcccgagcccagtccggaacccgcctctctcggggaccttgacctcgcgcggacctcgtcgccttgcttagctctccctgacctgcttttgaacccgctaatcccgtcccgaactctcgccccgcggcaatccctcgccccggccctggcgcgctaattcccgctgaccccgccgccccgccgccwctctccgctcgcgcggctgtgaccaggataagggcttcccgcctctgagtgcaggtgtgatctggagctcaggcaactactgcccccgcattgtccccagcccgcgctcgcacccccaggacccaagcaaagcgtctcttgcctcaaacattctgcccttctcttgcttcctcttgtttccctagcataattcatgtctttctttaagaaacccatcggacccacaaaga

SEQ ID NO: 680934 - DNA, 983 bp, Homo sapiens
tcgatctcctgaccttgtgatccacccgcctcagcctcccaaagtgctgggattacaggtgtgagccaccacgcccggccaaggtattgcttctttaagaatggagctgttaatactgctggtaccagaaacattaaaaaagaaaaatcctgcmtgagggccagaggaggagtacaggagagtgagatggagtggaatcctccagtgggtgatagatggatggacagacagatgaatagacagacgaacagatgaacagacggacagacatgaataaacaggtggacagacagatgaatagatgaacagacagatggacaactggatagatggacagatgaaactaataatctgagaaatcagaaaagcttcatgaaaaaagtgggactgagctgtgtctccacggatagatataaaagcagaggactctccacttgagtcgagaatgacccagtgtcctgatccagagaggaagccagcctggcttgactgggaaatttgtgggaggactcagaggcccttaaaatgaggccaggtgaggttgggctgatccgagccagctcaggactcctctgccacacagcacagctgccttaggggacacattactcagggagttgctgggacctactgggcccagcattgccaccagcaccaacagcttcagagaggggggacacacacttggggtgactccaagactgtgggtggcacctgcctcaaacaggggacaggcacagggacacctctcggggtctggcacccccacgcactgtgcctaggtcccaacaacgcccactgcagccctgtgcccatcatgcccagaaggtttccgcttcagcctggcccctgtactggccccaggaatttggacccaagcctcagtcactgggtaaacagcagtgggaaccagctcattactctaggtaagtggctcttacaaccttccccagccagttccaccctctgttgtctctggaaaa

SEQ ID NO: 680935 - DNA, 620 bp, Homo sapiens
tgaggtgtggatgcttaatggtaaaaaaaaatagttagaaagaatgaataagacctaatatttgatagcacagcagggtgactatagtcaataataatttaattgtatattttaaactaactaaaagatgatagttggattatttgtaacaaaaaggatgaatgcttgcggtgatgaatgcccaattttccttgatatagttattagactattgcatgcctgtaccaaaatatctcatgtaccccataaatgtatgcataaatgtatacacctaccgtgtatccacaaaaaataaaaaaatagaacrggcccagaggcttacacctgtaatcccagcactttgggagacagaggcagcaaaacaccatctctacaaaaaatacaaaaattagctaggcatggtggcacacacctgtagtcccagctacttgggagaccaaaatgggaggatcacttgagcccaggaagtggaggttgcagtgaaccaagatctcgccactgcactccagcctgggtgacagagtgagaccttgtctcaaaaaataaataaataaaaagtaaaagaagaaaaacaagaaaaaatcatttttcaaacaaagtttagaagtgaaaaagttaat

SEQ ID NO: 680936 - DNA, 1244 bp, Homo sapiens
gattacaggcatgtgccatcacgtccagctaattttgtatttttagtagagatggggtttctccatgttggtcaggctggtctcgaactcttgacttcaggcgatccgcccaccttggcctcccaaagtgctgggattaaaggagtgagccactgctcctggccactaacctcaaaagtttttataaatagatgtttgacaccacagtaaatatatccacccttccaaaggaagctctctttgcagaaacagataaaaatatcttggaaggttttgaaatctcagactaaagaactaccaaattttgtctgtgtgcagtggctcacgcctgtaatcccagcactttgggaggctgaggcaggcagatcatgaggtcaggagatcaagaccatcctggctaacacggtgaaaccccatctctactaaaaatacaaaaaattagccaggtgtggtggcacacgcctgtagtcccagctactcaggaggctgagacaggagaattgcttgaacccgggaggccgagcttgcagtgagctgaggtcacaccactgcactccagcctgggagacagaacgagactccgtctcaaaataaataaataaataaataaataacgaactaccaaatttgtgcagctggatgtgcaatgtcaatttgcagaagagattattgattaaaaagaacccaaagagtagctaaccaaaccaccaaatgcagctgacgtcaaagaatttatggcaatgcagatgcaaaaataatgtccttgaccatggtggcaatatgataaaagcctttctttcaaaaatggcccaatgtctttttggaaccatagaaagacgtgtatgaargtaaacaagaggagcatcagcaaagagcaaagctctatttagcaactttcttcatccaaaagcatcaaacctcattccctgagaaacggatatagcaacatcaacatgatggagaatcttatcagatcctgaaattgaccctccaccacctaactcctctgtgccatcacctgccacaaccaatgacaaaccactacagctttaacccccttccttatgtctcttctcaactttcttctaccttaaatttctacttcatttagtaaatataagccaccttgttttgcttgtacattttgtctacagtttttcaagcgatttattttgcatcttatttgtttagctatattagaagtgtaatttttggtccagtgtacaagatgtacatgctattac

SEQ ID NO: 680937 - DNA, 1244 bp, Homo sapiens
gattacaggcatgtgccatcacgtccagctaattttgtatttttagtagagatggggtttctccatgttggtcaggctggtctcgaactcttgacttcaggcgatccgcccaccttggcctcccaaagtgctgggattaaaggagtgagccactgctcctggccactaacctcaaaagtttttataaatagatgtttgacaccacagtaaatatatccacccttccaaaggaagctctctttgcagaaacagataaaaatatcttggaaggttttgaaatctcagactaaagaactaccaaattttgtctgtgtgcagtggctcacgcctgtaatcccagcactttgggaggctgaggcaggcagatcatgaggtcaggagatcaagaccatcctggctaacacggtgaaaccccatctctactaaaaatacaaaaaattagccaggtgtggtggcacacgcctgtagtcccagctactcaggaggctgagacaggagaattgcttgaacccgggaggccgagcttgcagtgagctgaggtcacaccactgcactccagcctgggagacagaacgagactccgtctcaaaataaataaataaataaataaataacgaactaccaaatttgtgcagctggatgtgcaatgtcaatttgcagaagagattattgattaaaaagaacccaaagagtagctaaccaaaccaccaaatgcagctgacgtcaaagaatttatggcaatgcagatgcaaaaataatgtccttgaccatggtggcaatatgataaaagcctttctttcaaaaatggcccaatgtctttttggaaccatagaaagacgtgtatgaaagtaaacaagaggagcatcagcaaagagcaaagctctatttagcaactttcttcatccaaaarcatcaaacctcattccctgagaaacggatatagcaacatcaacatgatggagaatcttatcagatcctgaaattgaccctccaccacctaactcctctgtgccatcacctgccacaaccaatgacaaaccactacagctttaacccccttccttatgtctcttctcaactttcttctaccttaaatttctacttcatttagtaaatataagccaccttgttttgcttgtacattttgtctacagtttttcaagcgatttattttgcatcttatttgtttagctatattagaagtgtaatttttggtccagtgtacaagatgtacatgctattac

SEQ ID NO: 680938 - DNA, 645 bp, Homo sapiens
tggagtggttgtaccattttacatttctaccaggaatgtatgagagattgcatttctttgcatcgtcttccactagcatttgatactgtcactgtttttttttttttttttggagatggagtcttgctctgtcacccaggctggagtgcagtggcgcaatcttggctcagtgcaacctccgcctcccagattcaagcaattctcctgcctcagcctcccgagtagctgggactacaagcgcatgccaccacacctagttaattttttgcattttagtagagatggggttttaccrtgttgcccaagctggtctcgaactcctgagctcaggcaatctgcccgcctcagcctcccaaagtgctaggattatagatgtgagccactgcgcccggccactattttttttttttttaactgttctgatgtgtgatgatatctcagtgtggtcttaatttgcatttcccaaattagctagtgatgttaaatatctggtagagcactttctctcatctttgcccattttcaaagtttggctcagctatttatgtatttttattctttcctatgtattttagagttagtttgagtttctaaaaacaataccagtagaactttgacttacagatttattttgaggaaaattga

SEQ ID NO: 680939 - DNA, 645 bp, Homo sapiens
tggagtggttgtaccattttacatttctaccaggaatgtatgagagattgcatttctttgcatcgtcttccactagcatttgatactgtcactgtttttttttttttttttggagatggagtcttgctctgtcacccaggctggagtgcagtggcgcaatcttggctcagtgcaacctccgcctcccagattcaagcaattctcctgcctcagcctcccgagtagctgggactacaagcgcatgccaccacacctagttaattttttgcattttagtagagatggggttttaccatgttgcccargctggtctcgaactcctgagctcaggcaatctgcccgcctcagcctcccaaagtgctaggattatagatgtgagccactgcgcccggccactattttttttttttttaactgttctgatgtgtgatgatatctcagtgtggtcttaatttgcatttcccaaattagctagtgatgttaaatatctggtagagcactttctctcatctttgcccattttcaaagtttggctcagctatttatgtatttttattctttcctatgtattttagagttagtttgagtttctaaaaacaataccagtagaactttgacttacagatttattttgaggaaaattga

SEQ ID NO: 680940 - DNA, 645 bp, Homo sapiens
tggagtggttgtaccattttacatttctaccaggaatgtatgagagattgcatttctttgcatcgtcttccactagcatttgatactgtcactgtttttttttttttttttggagatggagtcttgctctgtcacccaggctggagtgcagtggcgcaatcttggctcagtgcaacctccgcctcccagattcaagcaattctcctgcctcagcctcccgagtagctgggactacaagcgcatgccaccacacctagttaattttttgcattttagtagagatggggttttaccatgttgcccaagctggtctcgaactcctgagctcaggcaatctgcccgcctcagcctcccaaagtgctaggattatagatgtgagccactgcgcccggccrctattttttttttttttaactgttctgatgtgtgatgatatctcagtgtggtcttaatttgcatttcccaaattagctagtgatgttaaatatctggtagagcactttctctcatctttgcccattttcaaagtttggctcagctatttatgtatttttattctttcctatgtattttagagttagtttgagtttctaaaaacaataccagtagaactttgacttacagatttattttgaggaaaattga

SEQ ID NO: 680941 - DNA, 2391 bp, Homo sapiens
tccatactccaaacctcagtatctcacaatattcccatgtaacaagcctgtacgtatactgtacatatactccctgtatctaaggtaaaaatttaaaataaaatatacagaactatttgcctggtgacttttatacaattttatagtcttaggcacattctcactttcatgcagtttcgacttctattaaaagcaatgctgtttggctgggcgcggtggctcatgccagtaatcccagtactttgggaggccaaggcaggtggatcacgaggtcaggagatcgagaccatcctggctaacacagtgaaacccgatctctactaaaaatatgaaaaaattagtcgggcatggtggcgggcacctgtagtcccagctactcaggaggctgagtcagaagaatggcgtgaacctgggaggcggagcttgcagtgggccgagatcgggccactgaactccagcctgggcgacaaagtgagactatgtctcaaaaaaaaaaaaaaaaaaaaagcaatgctgtttatacaaggyagattataacaaaaatatgttttagataaaaacttattcctctgcttcatctctaaatattatatcaagcttaatttaactcttcagggtcaataaaataaattgctgctaacttttaattatattaaatttctatggattccagcagcatctttttataatctgctaatcaaataaattcatagaaactcaatcttataaaaaatttagtgcaactgtaatttgggattacatatttcaacttctcaatttctattatattagtacactttattgacctttgtgtgtctttcagcatcaagtaactcaacttacctctattcaaaggccattctcgtatagtgagactgatatacatctgcaaaattaattgtggaacagaaccgagaaaagcctgaatcactgacatgtacttgaaagccttctgctgcatgaaattatcccggattgagaatgcaatctccctttccagcatcgtgtttctctttgtgatgctaacttgagtctcttccttctcctgtttaagatttttcaaccatttgtggtaatttctaatggtgtgcaaacacctgttaacatgaagtaacatccaagattaacatttattggtgacagacatctagaaatatttgaaagtttatcaggagaggaactcttaattttgaaattatactatcaaatggcaaatattaacttaatcacactggataaaaaataagtttctaacagtttctaatattattatttatggtagttcttcccctcattttcaacttcaaataatacataactgcagtctgataaacaaaaattcaaacagcagatgaaaagtaaaaatttcctcattcatacacaattcaattcactttctcaaggtcagtttgattaaataatatcacaatgtttttctaatgcgttaatattctgacacatacaaaagctatttctccagaaacatactattctgacaactttttaaagacatcaatgtttttaggtgttcttcccatgatacaaatgtcaactgcctcaaaggaaggaccccagattttcattggaacatattttgacttatgatttttctctagtgatgaaatttagctcatttagcattattttaagacagcagtctaaaaaaactcaatgaatgcttaaaacagccacaggtaagtgataaaaacatacacagatatgatctatagtggagtttaacttcaaagtagtcctcaaagaactttcacaaataaaaatctatgggaaataagcagatctttataaaaaatcacaaaacatgaataaaagcaagataccatgaataagaagcacaagatgaccccaacgtatttcctatgtaaaatttaccaaaccaaaaaatatttactttttgaagaaataatggagtacttcagaagtatgaaaaaataatgcttctcaatgatgagcaagtattaaaaagaaccaacagaatctctagaaaacaaaatataaaaaacactgggtaaattaaatagttgaaagctaattcgataattgaaaaataaataactttaacaaaattacaaaaaaatgtagcaaagagagaaaggagcatctaatatatgatggagattatagggcatttaagaaaagagtgacaaagcctacacttctgatcagaattttaaaagaatacaggaagtggcagtatttttaaaataatgactagaaaaagagtttcaaattgttacaatcatgaattctcagattaaggaagtcttatatatcctaggcagaaaagatttataaagaataaaattaaataagtgtggccaggttcactggctcatgcctggaatccagcactttgggaggtcaagaaggggc

SEQ ID NO: 680942 - DNA, 2391 bp, Homo sapiens
tccatactccaaacctcagtatctcacaatattcccatgtaacaagcctgtacgtatactgtacatatactccctgtatctaaggtaaaaatttaaaataaaatatacagaactatttgcctggtgacttttatacaattttatagtcttaggcacattctcactttcatgcagtttcgacttctattaaaagcaatgctgtttggctgggcgcggtggctcatgccagtaatcccagtactttgggaggccaaggcaggtggatcacgaggtcaggagatcgagaccatcctggctaacacagtgaaacccgatctctactaaaaatatgaaaaaattagtcgggcatggtggcgggcacctgtagtcccagctactcaggaggctgagtcagaagaatggcgtgaacctgggaggcggagcttgcagtgggccgagatcgggccactgaactccagcctgggcgacaaagtgagactatgtctcaaaaaaaaaaaaaaaaaaaaagcaatgctgtttatacaaggtagattataacaaaaatatgttttagataaaaacttattcctcygcttcatctctaaatattatatcaagcttaatttaactcttcagggtcaataaaataaattgctgctaacttttaattatattaaatttctatggattccagcagcatctttttataatctgctaatcaaataaattcatagaaactcaatcttataaaaaatttagtgcaactgtaatttgggattacatatttcaacttctcaatttctattatattagtacactttattgacctttgtgtgtctttcagcatcaagtaactcaacttacctctattcaaaggccattctcgtatagtgagactgatatacatctgcaaaattaattgtggaacagaaccgagaaaagcctgaatcactgacatgtacttgaaagccttctgctgcatgaaattatcccggattgagaatgcaatctccctttccagcatcgtgtttctctttgtgatgctaacttgagtctcttccttctcctgtttaagatttttcaaccatttgtggtaatttctaatggtgtgcaaacacctgttaacatgaagtaacatccaagattaacatttattggtgacagacatctagaaatatttgaaagtttatcaggagaggaactcttaattttgaaattatactatcaaatggcaaatattaacttaatcacactggataaaaaataagtttctaacagtttctaatattattatttatggtagttcttcccctcattttcaacttcaaataatacataactgcagtctgataaacaaaaattcaaacagcagatgaaaagtaaaaatttcctcattcatacacaattcaattcactttctcaaggtcagtttgattaaataatatcacaatgtttttctaatgcgttaatattctgacacatacaaaagctatttctccagaaacatactattctgacaactttttaaagacatcaatgtttttaggtgttcttcccatgatacaaatgtcaactgcctcaaaggaaggaccccagattttcattggaacatattttgacttatgatttttctctagtgatgaaatttagctcatttagcattattttaagacagcagtctaaaaaaactcaatgaatgcttaaaacagccacaggtaagtgataaaaacatacacagatatgatctatagtggagtttaacttcaaagtagtcctcaaagaactttcacaaataaaaatctatgggaaataagcagatctttataaaaaatcacaaaacatgaataaaagcaagataccatgaataagaagcacaagatgaccccaacgtatttcctatgtaaaatttaccaaaccaaaaaatatttactttttgaagaaataatggagtacttcagaagtatgaaaaaataatgcttctcaatgatgagcaagtattaaaaagaaccaacagaatctctagaaaacaaaatataaaaaacactgggtaaattaaatagttgaaagctaattcgataattgaaaaataaataactttaacaaaattacaaaaaaatgtagcaaagagagaaaggagcatctaatatatgatggagattatagggcatttaagaaaagagtgacaaagcctacacttctgatcagaattttaaaagaatacaggaagtggcagtatttttaaaataatgactagaaaaagagtttcaaattgttacaatcatgaattctcagattaaggaagtcttatatatcctaggcagaaaagatttataaagaataaaattaaataagtgtggccaggttcactggctcatgcctggaatccagcactttgggaggtcaagaaggggc

SEQ ID NO: 680943 - DNA, 597 bp, Homo sapiens
ttaacactcttttgactatgaaaatattttgacatcaaaaatctgcaaaatatgaagaaacaaaggacacacagctttttctattttctatttttattttatttttatttttttgagaaggagtctctttctgtcacccaggctagagtgcagtggcgcgatctcggctcactgcaagctgcgcctcccggttcgcgccattctcctgcctcagtctcccgagtagctgggactacaggcgcccgccaccaagcccggctaattttttgtatttttagtagagacggggtttcaccrttagccaggatggtctcaatctcctgacctcgtgatctgcccgcctgggcttctcaaagtgctgggattacaggcgtgagccaccgcccccggccccaggacacacagctttaaaatttctccttggtctcacccagtgccaaccacctaaaacctctcattttcccccagacatttcttctgcctccaggatggaggtagagaatcttggccttgggccacgcactggggagcatgctgggctgccgtggtcagtgacggactcaggttctcaccaggatccccaaaataggcccctga

SEQ ID NO: 680944 - DNA, 607 bp, Homo sapiens
tgaataatgctactagtaacattcatatacaaatgttcacaattatatcttaattttaggaacatatggtgaatgtatgtccaatcttttgagaaactaccagactgttttctaaagaagcaacctcactttatgttcccactagcaattggatgaggttcccaatttttccatatattcaccaacatctgttatttctttctgattacactccattctattcaatatatctcactgtggtttgagattcattgtatctcattgtggtttgattttcatttttctgatagctaattatcatttcctatgcttagctctagatatgatgtgacaatatttttctcccatagtgtcattttacttcataatctctttgaagcacagaagtttaatttcaatgaagttcaatttagttgatgtttattatttgtgtttttggttacatattgaagaaacgtttgcrtaatctaaggtcacaaagattaacgtctacctttttctagagttttattttattgtgttcagctcctgaatttaggtttttgatacattttgagataactgtggtaaaagacagggttccaacttcacatgaatatctagttgt

SEQ ID NO: 680945 - DNA, 647 bp, Homo sapiens
gatctatatgaaattatctatctaaaacttgttgagatcacatttttgaaccaagtaaatcatcattaaaaaagaatgttttcttggtaagtagaaggtatatagtggttaagacacatatttactttttaagagtgaaggtagcaacatttatatacatataaaaggattgttaattgttaattgcaaagtattcctattaacaactaaatgtctgtatactcatcagtctagatgattgatatattaatcacctctcactacaattgtgatttgtcaatataaataaatatccatcaaatttaattctggcrtatattgtgacaatgctactgaggcatttaaatttgtgactgttatatatctttaaaattttttcacattttgatatttcatattttgcctgtcacctcttctgttatctattattgtccctccttattgcttgcattttttctaaaattctcttctgtcttatacaattgtagtggcctatctttttaaataaatatttgttaattttctctacacctttgttttaatatttcagtgtgattattcccaagtaaaagcatattttctcaatccagtgttagagtatttaatattttaacacataatttggaagcatttacatctaatatgat

SEQ ID NO: 680946 - DNA, 647 bp, Homo sapiens
gatctatatgaaattatctatctaaaacttgttgagatcacatttttgaaccaagtaaatcatcattaaaaaagaatgttttcttggtaagtagaaggtatatagtggttaagacacatatttactttttaagagtgaaggtagcaacatttatatacatataaaaggattgttaattgttaattgcaaagtattcctattaacaactaaatgtctgtatactcatcagtctagatgattgatatattaatcacctctcactacaattgtgatttgtcaatataaataaatatccatcaaatttaattctggcgtatattgtgacaatgctactgaggcatttaaatttgtgactgttatatatctttaaaattttttcacattttgatatttcatattttgcctgtcacctcttctgttatctattatygtccctccttattgcttgcattttttctaaaattctcttctgtcttatacaattgtagtggcctatctttttaaataaatatttgttaattttctctacacctttgttttaatatttcagtgtgattattcccaagtaaaagcatattttctcaatccagtgttagagtatttaatattttaacacataatttggaagcatttacatctaatatgat

SEQ ID NO: 680947 - DNA, 587 bp, Homo sapiens
cttcctaaaacccatgtaaaagccaatgcgttcgtcctcacagtattccagtggttgacatactccccctccttgatttccaccattctcctgtagaaaatatatgaaaagtgttgaggatgtaaacttaaatcatgataaatgtttggtggttaactgatgcaacaagaggaatcaatacaagacacgctatttgaaaaagttctatttctcaggctagacctcctggccaggatgctgccaatatcacctgcccagaaaaaaagagctggagatttttcagcgagctcaggctgagtatatattggaccactggaaatgaaattttgagaggtacagagtcayggtacctttcaaagcagggtaaaaccaaagagaatatatggtacacgaaggtaagaaggcttctgcttcttacttcttggacttgctatctgcatatcacgtctgcagtgcctttttctctcaggagcactaccatacttacaaatgagaaatctagaagaaatctggattattcagagaagtcctctctgatcacatcttttaatataatcatcctcgatctacccactctcgctcactat

SEQ ID NO: 680948 - DNA, 1577 bp, Homo sapiens
aattgcccctgtgcagtatgggaaagaaaagcaggcctccaggttaactcagttaaataaacatttactaaatgcctttttatttttccggttggaaagtgaatcctactctgtgccaagtactttattaggtactgcagatatagaggttgagtcgtttctgtccttgatgagccagggaagacagtcatgtcaataaataagcacaagcctctgtaataaatgcaaccatggctatgcatcggagacacagaagtcacacatgagatagtcgggtttcttctgcttggaaggaagtgagtggatggaagaaatgtaaagataagatgacaagtctgaaaaaagggtttgaaggatgaacaaaagaggaaagcacactgcagacaaaggaagcaacaaaaaatggacctaaaatatcccaataagtcagaaaaatctaactactggatcagaagacacaaggagagaaggagagtcaaactagaaaatttacagataggcaaatcatggagaggggggcgggttyccaagctacgtgcagggggaagtgaccttccttgccccatcaagaagagactttgaatgttatcatgagaaggaatgatgccgtgtgacttctgttgcagaagctcatagaagctggaggtgggggtggtatgttgggatcaagccctgagggaggcgggcagggaaaataggaagcacacctcaccaagctcacaggaacccgcaggacccgtgtaggtgccaaagtggggctgaggatcaactggcccgttcatttagctcttcaggagccctagccaatcactggctaggaaccacctcctaatatcattaagtacaacattggggtgaaaggcagggaattggcactttttttgagagagagagagagtctcgctctgtcacccaggctggagtgcagtggtgtgatctcagctcactgcaacctccgcctccccggttcaaatgattctcctgcctcagcctcctgagtagctgggattacaggcacgtaatcctagcctggctaatttttgtatttttagtagagatggaatttcaccatgttggtcaggctggtctcgaactcctgacctcgtgatccaccctcctcggcctcccaaagtactgagatgacaggcgtgagccactgcgcctggccagaattggcagttttcaatcagcaggcagaatatttccagaagttccttttcactagcacccgggtctggtgccaaccttcccccaggctaatctcttgccgtcagccaatgtggcccatattctggcagagggagaggacagggttgaggagagaagatatttctttcccagagtccttgagtgactacttctgcatggtttacctttcctagtgctccagcacctcctccagttctgaccctgataaagtgggatgttacacagcaggactcgccccattggaggaggaaatactgatgaggagggtgtatcaacccagatggattgcttcccagaggacgcctgcacgcagatgctcccacacccactcagatattcccgctggttgtgcggccccgcacagccca

SEQ ID NO: 680949 - DNA, 1281 bp, Homo sapiens
tttttttttttttttttgagacagagtctcgcgctgtcacccaggctgaagtgcaatggcgygacctcggctcactgcaacctctgcttcctaggttctagcagttctcctgcctcagcctcctgaatacctggtattacaagcacccaccaccgtgcctggctaatttttgtatttttagtagagatggggtttcaccatgttggtcaggctggtctcgaactcttgacctcgtgatccacccgtgtcgggcctcccaaagtgctgagattacaggcgtgagccactgtgcccggccctggaattgctttttaaattttattttcagattgcttattgctaggtttagaaaattaagaagtattctttcatttctagagcacaaattaggagttaggatttctatttggttttattccaagtatatagaggtatatgaaaatgttattttctcataaaaacctcttttcattgccttatttaacatttattgagtcttcattcgtaacctcctatggaccatatcttcaccctccaaggcatgcagtgtgaatgaatttaaaaatatatcatcataggtttattgtttgaaacatattaatatagagtgaaatttgaataaggtgataagacattttttcactaacttacaattatcatataggctgctgttaacttaaagggcagtgatttgacaaaaccaatacagattattacaactggttctaattatgtttatgaacaagagttaagattatgaaaccaaccttttttggaggcacttggttagaagagctttgtaaatgattttgattttcttttcactagctatttttattttttattttttattttttttgtgagacagagtcttgctttcacccaggctggagtgcagtggcgtgatctcagctcactgcaacctccacttcccaggttcaagtgattctcatgcctcagcctcccgagtagctaggattgcaggtgtgtgccaccacagctggctaatttttttttgtatttttagtagagatgaggtttcaccgtgttggccaggctggtcttgaacttctgtcctcaagtgatccacccaccttggcatcccaaagtgctgggattacaggtgtgagctaccacgcctggtcttctctagctattaataacacttattaatacttttgcttcatactaaaattaaaaagctcctgccttattaatcctctatatagcctactgcaatggtaaatatatttaatgtatttattttagaaagagaaaaat

SEQ ID NO: 680950 - DNA, 646 bp, Homo sapiens
cgcttgagtgtctgtcaatgatcataaatcatatcttgatatgctaaatgttatatcacaatttaaattattgcctaccattccagaaaatattgtgaaaaaagttaatttccttgtataaaagcaatttcaaaatttgtatgtatacacatagacctacagtagtatacttatagcaaaaatgtgaataaatgcggaaaaaatgctttaagaaagattataagattttcctttgaaactttgaaaactgaggatagcacagctttttgttgctgtacatacaagccttttttgtatttacatcatttaaaaattcatacaattcacttgttctttctctctaaaattataagctaatatgatcaaaacaaaatctatttttatgacacattggctcactaaacaaaatgaactaaatataaggaattttcggcctgaataaacatttctaaaatytcatatataaattaaacatattccttggcttttggaatatttaataactccattactgaaagaacattaacttagttgatcctcatatataaactgttagtataaatttgtggatgtgtaaatggtgaccattatggttttttaacacattgagaaactaacgcaaaaattatgttaacacacgtactat

SEQ ID NO: 680951 - DNA, 2119 bp, Homo sapiens
tgtattgaaatgtagcatcaagaagagggaacccattcacacacatatatgggtgtgtgtgtatatatacacacccatgcttttataaagggatgcactttttacatatctaaaaataacaaaacaataaagaaaaccaccacagtgtgcttagccctaagaataaatgactagaaagtaatcaaaaactgataaatcactggagataatgtgatgaaggctctgacactatatatcaaaaccacatgaatttgtacttatatgttcatactttcttcacaatatttctcatatactttcatttcaatcacaatgacagttcttgaggttaggtctttttgtgtcatgcctaaattgttcaaacaaccctctaatgtaatctccaagactttgatctcttcccataaaccgagtcttgaacattaccaccagatttatattattgatacaattttgatattatgtcactattttggatagtgtttttcaataatgcattcattagtttaatcatttgttcagtctgccatttgtgatacagaactaagtcttagtgtttgatactaagaatgagaagtgatttccttcaaggaatgtacaagttagtagcttgatgcttttctgagaacacatccaaattgcttcacttatgtttatgcaagcccccattacttaaattttagcaccaacatgcttacttaaactgatcatctgcatttcagaaagtctgccctacactctgcctcctaattctttctggcatttctttttccttgaattcccccactctatgtactaaaatatttacctttaaaaaaatagctcaggcaccacttttgcatttaaacttaccctgatcatattattttgaattatttcaaaataaaataatgccaataataatacatagttcataattagaagtgtttagcatgtatacagcactgtgctaaaagctttacttgggttatctttttaatacttgaaacaactgatttattaattcaacaaatatgtattggacacttataatgttctataaactgacctgaagctgggatgcaacatagacattgtaatgaaccagtcaaaaggacaattatgctatggagcttaccttcccaattgaggatgcaagcaaataaataggtagataattgcaggtagtgataaaactctgaggaaaatagaaagaccaaacttctttaggaatatttaatgtgactgttatgtttgtgttctaaactccaaaggaatgtgtgtgtgtgtgtgtgtgtgtgtgtgtgtgtgtactttcttttaacctaaaaatatttatttgcatttttaatcatactcattgactgtttttttctagatttaaagtccttatgatgaggattcacatgcggaatattagtcatctgtgtttttgttgcattacctacactagtatcctgtactaaacaaaccttaactaaaggaatgtatccaagttttcatattaaatgccacagtttagggttgtttctaataaatgaagacatatttttaaaatcactgaattaaaaaataaatgtaatgaactaaagaagtacttttcaaacatatgccaaaaacttaattgataattttattatattttttctatttaccattgtaataccaaggaacaaaactgaaagacacgtggaaaccacaattgagaatattcagtcaccaacattttttatgtttgaaatttatcaatgattccattttgctttatagcaggtttacttgctaagaaatacattgtgaacatttttccatggccataagatcatgatcatgattgaaaacatcccatgacacagaaaaacaaaacacatttcttccatttttatttgtcctaggccttgtgatatggtttggctatgtgtccccacccaaatctcatcttaaattctactcccataatacccacattatgggagaaacccagtgggaggcaatatgaatcatggggatggtttcccccatactgtagtagtatataagtagtatattcacttatagtgaayatacttacagtagtatattcacttatagtgaatatacttacagtagtatattcacttatagtgaatatacttacagt

SEQ ID NO: 680952 - DNA, 1342 bp, Homo sapiens
tacccttataatgaaaatgttttcctatggatactttttcaatgtttggaaaatttataatgggaacataatcctttgtaacttatgtaattaaaaatgtttcaattcctgtgattctggctggtatattctaatctcagctctctttcttcccttctcagtcctatggctttgttcaccaaagtcctgctcctttctgataatgtatactttcccaaactggattgtgctaaaccaccaatatttgaacactctgcagggccctagtctgtgtaaagatgggtccttatcttttctggttataaattttaaattactttttacttcaagaaagtacgtctgtgaagagagattaagaacttcagcctaggaggccatctaagtgctaaagggagaagaagaccagagagattagaggttcagcttacaaacaawctgctttcagctctaggtccttaagtcctgattttctatttcttctctacttttgctggctagacctggtacatcatatgtttatgtcttggatcacaacatgttcatttcagactgccaacttccatggcagaggctctgcttaatgttggtgattgaactgctcatgtgtcatgagggcctgaattgaaacacagtgacacagaataaattcagccatttctagaactttcattagcagtgggagtgccacactttgaaacaccaatacaatccaacagtgcagagctgctcctctttactgtgcgagttccctgctgttgtgttatttctatactccgcattcacagctttgttttccttttgagaccacattgtatttcccttgaatttcccattcttcagtcctattttagaaaattttaaaatcagtgtaactagcatacctatgacatccaaaacaacattagaaggagcaacacttctttaaatgaaatcttatgtgaaagtccaatgtgagaaatgtttagaagtagtagttcccttgctgatggaaaagtggaaacacaaactctctactctcttctgccactcagcctttctgagtaacttcatggagccctcccatccaggggcactgatctcccccatcttcagtaaagcctatacacagtgcaggtccccaagggaccactagttatttcttggggaatcaaagttaaatcttgtcattgtgagtgacaagtgtcattgtgagtgacaatttgagtattttacatttaaaaaacccctcaggtataggctacaacttaaaaaggaattaataatacaattgagtttatatgtacatttctttattcctttaagatttaattcacccatcaaacaaatcttttgaagtatctac

SEQ ID NO: 680953 - DNA, 1342 bp, Homo sapiens
tacccttataatgaaaatgttttcctatggatactttttcaatgtttggaaaatttataatgggaacataatcctttgtaacttatgtaattaaaaatgtttcaattcctgtgattctggctggtatattctaatctcagctctctttcttcccttctcagtcctatggctttgttcaccaaagtcctgctcctttctgataatgtatactttcccaaactggattgtgctaaaccaccaatatttgaacactctgcagggccctagtctgtgtaaagatgggtccttatcttttctggttataaattttaaattactttttacttcaagaaagtacgtctgtgaagagagattaagaacttcagcctaggaggccatctaagtgctaaagggagaagaagaccagagagattagaggttcagcttacaaacaaactgctttcagctctaggtccttaagtcctgattttctatttcttctctacttttgctggctagacctggtacatcatatgtttatgtcttggatcacaacatgttcatttcagactgccaacttccatggcagaggctctgcttaatgttggtgattgaactgctcatgtgtcatgagggcctgaattgaaacacagtgacacagaataaattcagccatttctagaactttcattagcagtgggagtgccacactttgaaacaccaatacaatccaacagtgcagagctgctcctctttactgtgcgagttccctgctgttgtgttatttctatactccgcattcacagctttgttttccttttgagaccacattgtatttcccttgaatttcccattcttcagtcctattttagaaaattttaraatcagtgtaactagcatacctatgacatccaaaacaacattagaaggagcaacacttctttaaatgaaatcttatgtgaaagtccaatgtgagaaatgtttagaagtagtagttcccttgctgatggaaaagtggaaacacaaactctctactctcttctgccactcagcctttctgagtaacttcatggagccctcccatccaggggcactgatctcccccatcttcagtaaagcctatacacagtgcaggtccccaagggaccactagttatttcttggggaatcaaagttaaatcttgtcattgtgagtgacaagtgtcattgtgagtgacaatttgagtattttacatttaaaaaacccctcaggtataggctacaacttaaaaaggaattaataatacaattgagtttatatgtacatttctttattcctttaagatttaattcacccatcaaacaaatcttttgaagtatctac

SEQ ID NO: 680954 - DNA, 1342 bp, Homo sapiens
tacccttataatgaaaatgttttcctatggatactttttcaatgtttggaaaatttataatgggaacataatcctttgtaacttatgtaattaaaaatgtttcaattcctgtgattctggctggtatattctaatctcagctctctttcttcccttctcagtcctatggctttgttcaccaaagtcctgctcctttctgataatgtatactttcccaaactggattgtgctaaaccaccaatatttgaacactctgcagggccctagtctgtgtaaagatgggtccttatcttttctggttataaattttaaattactttttacttcaagaaagtacgtctgtgaagagagattaagaacttcagcctaggaggccatctaagtgctaaagggagaagaagaccagagagattagaggttcagcttacaaacaaactgctttcagctctaggtccttaagtcctgattttctatttcttctctacttttgctggctagacctggtacatcatatgtttatgtcttggatcacaacatgttcatttcagactgccaacttccatggcagaggctctgcttaatgttggtgattgaactgctcatgtgtcatgagggcctgaattgaaacacagtgacacagaataaattcagccatttctagaactttcattagcagtgggagtgccacactttgaaacaccaatacaatccaacagtgcagagctgctcctctttactgtgcgagttccctgctgttgtgttatttctatactccgcattcacagctttgttttccttttgagaccacattgtatttcccttgaatttcccattcttcagtcctattttagaaaattttaaaatcagtgtaactagcatacctatgacatccaaaacaacattagaaggagcaacacttctttaaatgaaatcttatgtgaaagtccaatgtgagaaatgtttagaagtagtagttcccttgctgatggaaaagtggaaacacaaactctctactctcttctgccactcagcctttctgagtaacttcatggagccctcccatccaggggcactgatctcccccatcttcagtaaagcctatacacagtgcaggtccccaagggaccactagttatttcttggggwatcaaagttaaatcttgtcattgtgagtgacaagtgtcattgtgagtgacaatttgagtattttacatttaaaaaacccctcaggtataggctacaacttaaaaaggaattaataatacaattgagtttatatgtacatttctttattcctttaagatttaattcacccatcaaacaaatcttttgaagtatctac

SEQ ID NO: 680955 - DNA, 1342 bp, Homo sapiens
tacccttataatgaaaatgttttcctatggatactttttcaatgtttggaaaatttataatgggaacataatcctttgtaacttatgtaattaaaaatgtttcaattcctgtgattctggctggtatattctaatctcagctctctttcttcccttctcagtcctatggctttgttcaccaaagtcctgctcctttctgataatgtatactttcccaaactggattgtgctaaaccaccaatatttgaacactctgcagggccctagtctgtgtaaagatgggtccttatcttttctggttataaattttaaattactttttacttcaagaaagtacgtctgtgaagagagattaagaacttcagcctaggaggccatctaagtgctaaagggagaagaagaccagagagattagaggttcagcttacaaacaaactgctttcagctctaggtccttaagtcctgattttctatttcttctctacttttgctggctagacctggtacatcatatgtttatgtcttggatcacaacatgttcatttcagactgccaacttccatggcagaggctctgcttaatgttggtgattgaactgctcatgtgtcatgagggcctgaattgaaacacagtgacacagaataaattcagccatttctagaactttcattagcagtgggagtgccacactttgaaacaccaatacaatccaacagtgcagagctgctcctctttactgtgcgagttccctgctgttgtgttatttctatactccgcattcacagctttgttttccttttgagaccacattgtatttcccttgaatttcccattcttcagtcctattttagaaaattttaaaatcagtgtaactagcatacctatgacatccaaaacaacattagaaggagcaacacttctttaaatgaaatcttatgtgaaagtccaatgtgagaaatgtttagaagtagtagttcccttgctgatggaaaagtggaaacacaaactctctactctcttctgccactcagcctttctgagtaacttcatggagccctcccatccaggggcactgatctcccccatcttcagtaaagcctatacacagtgcaggtccccaagggaccactagttatttcttggggaatcaaagttaaatcttgtcattgtgagtgacaagtgtcattgtgagtgacaatttgagtattttacatttaaaaaacccctcaggtataggctacaacttaaaaakgaattaataatacaattgagtttatatgtacatttctttattcctttaagatttaattcacccatcaaacaaatcttttgaagtatctac

SEQ ID NO: 680956 - DNA, 2581 bp, Homo sapiens
aaatattcaggaaagataattctgggaaatgtagtttaccgtagtcaagctgacacattgcaaagcctccatactgccttagagctaggatgcaaatcagctccatctttggaggatagagaatgagacccagagagaataggtaatgtgaatacaaatgtgagaaagcaaggacatctccactgatcttttaaattgttcaagtttgggcctataacatggtaagcactcgatatttgtaaaaaaataacgaaaagaaacagaatgaaaccattgatttagaaacttttagacaatctaaaatgtatttgaaaaagaatatcatctacaaacttatgggcttctttgctgtaagaaatactggtcattgccatgcagatatgactgtatcattactgtaaacttttcagtgatcctactctaatccatgttttatttttgtggttcatcatgtgattttcctcatataatacaaaacttagcttcttgggatgaaatataaggcatgaaataaaggatcacactgaggttattcttctcaaatctcctggatactatggataagcaaagacaataagcaattttcataaaatgctctgccctctgaattccctcaagaaaactggcatttcatttaatggaaaccttcttcataaccatcctcctccagtgaaagcagtcatttgagacattagtgcatgtgtaggttcattatgaaacctaaacacttccattagataaaagacctaaaatgattatgaaaaatgttctttttcttccaaattgctctaaatcaaacactcagtagtataatatgttttaggttaattagtttaatccagttttaattaaactgatgtttccatgccaacaaatggtttttaaattgttgaaatcttgatgttttggaatatgactaaaattaattacctaagagcatttgactcaatttttggaaatgtgtagtgcacttttagcatcaatatagcaatgattttaataatggcaacaaattatgattaaaaactttgactaaatgttctatatggtttccattaatttccatatttttaaatgtattttttatgatgcacatatactactcagattaaatataatttaacaacgacaacaacaaaaaattagttacagagacaccaacacaggcacacacatgtcaactcactattagccctaaataagccccatttcaaaatgttcaaagtctatttcctggtaatatttgtctgtgtctgtacattcaactagaatattaagatcaataacaaaatacgtggttttggcctaattttaaaatttcaattctctcactgagctgcttaaaactgaagaaaaattctcaatatgagataaggaaaatcatgactcaccaatgctaggaatagtgatataccagctgaataaaaattgtatttacatttaagaatttaatttttatatttgcattgctttttcttggaatcgccttatttttgccaggaccaagttggcaaataaaaattatcttacttatttcaacagagatcatttaatacagggaacttgttacataggtattagagacctgaatacataaagggaaccttgagtaactcagagataataattgcaggaactagctctcatctctagggctggagaagaaaggaatgaaattagsattaagtgaacattagaagctcagatgagggtccccacatagctggggctcaaaactcagagaaaacagtgtcacctggctgctgttagtacctctgagaggatgatacgtacttggttctggaagatgctagaggctgaaatcaaatgacaatgctttagcaaatggctgctgctgggctgaaatgttgcttctcatagggaacctcgccggaatcagagcacaaaacaagagaacatcccttcttgcctttgccttcttttcagtctcctctctgccttctattgcctaaatctaatgaggttaccgctagttaaaacgaaacaaacaaacaaaaaccctatggtttgtatagtgtcagccatagcatcacagagtgatggcaaatgtaattaaaggatgaatttgaagctgtaaaacgacagggaaatgaccagcatatttaaatcataatttcattttcttagctggtctgttaacttatctcttgcattaaatgcttctgtattcttcctagacgtttccagtttgcttacaattgtgatatccttctaattttccactttacattgaagtccttggtctttctcatcgaatcagtgtttcataggccacccttctatttcatcaggtgtttctaaacataaaggtattccagtattttctatcttggaactgcagtctatctcaaattctaaaatacaactgaactcccccagttgaaatgatgagacagggaaagcagatttacagaggaaaacatcatgacatttatacttatcagaaatcaggaatgagaagcaaaaaaaaaaatattgaacacaaactatgggtgaggcatggttgctaggttacctctctgatttgacgaggtatgtgacaaaacatttaaattaaaat

SEQ ID NO: 680957 - DNA, 490 bp, Homo sapiens
ggaagaattttgcaaaataatgctaatttgaagtgtccattcatcacaagtttttctcyaaagagaattttaaagactgctttgttaagcatgaatataacattcaaattaaaagattttattaaataatgaacaggtgatgatattcaaacgaggagatcatattggagaggagtatggtgccctgcattatgaataggtgggagaatgggagtccagaatataactaaaaagtgagaatgtaaaaactatgaaggctttagctattatcacagcatgggggctaggaaagcttatggttttgaagcacaaaagtaaaattttggaaggaaggcctaaggtaaaatttttgaagtgtacctgtgtatataatcttgtaaattctctattcatgtccctctgaagtctttggtgtattgcttatagattctttgggtagaagggaattctataatataaatgatccagtttggcaagagcaaaaaaaaaa

SEQ ID NO: 680958 - DNA, 490 bp, Homo sapiens
ggaagaattttgcaaaataatgctaatttgaagtgtccattcatcacaagtttttctccaaagagaattttaaagactsctttgttaagcatgaatataacattcaaattaaaagattttattaaataatgaacaggtgatgatattcaaacgaggagatcatattggagaggagtatggtgccctgcattatgaataggtgggagaatgggagtccagaatataactaaaaagtgagaatgtaaaaactatgaaggctttagctattatcacagcatgggggctaggaaagcttatggttttgaagcacaaaagtaaaattttggaaggaaggcctaaggtaaaatttttgaagtgtacctgtgtatataatcttgtaaattctctattcatgtccctctgaagtctttggtgtattgcttatagattctttgggtagaagggaattctataatataaatgatccagtttggcaagagcaaaaaaaaaa

SEQ ID NO: 680959 - DNA, 490 bp, Homo sapiens
ggaagaattttgcaaaataatgctaatttgaagtgtccattcatcacaagtttttctccaaagagaattttaaagactgctttgttaagcatgaatataacattcaaattaaaagattttattaaataatgaacaggtgatgatattcaaacgaggagatsatattggagaggagtatggtgccctgcattatgaataggtgggagaatgggagtccagaatataactaaaaagtgagaatgtaaaaactatgaaggctttagctattatcacagcatgggggctaggaaagcttatggttttgaagcacaaaagtaaaattttggaaggaaggcctaaggtaaaatttttgaagtgtacctgtgtatataatcttgtaaattctctattcatgtccctctgaagtctttggtgtattgcttatagattctttgggtagaagggaattctataatataaatgatccagtttggcaagagcaaaaaaaaaa

SEQ ID NO: 680960 - DNA, 644 bp, Homo sapiens
cacccagagggggtttccaaaagtcacctaattaacatatactttagtgtggttgaaaggggcttgttaggaaaatcaagatgcttttttcacttttaccacttagaaaattctcagggttgtaggagctctgtatcagaaatggggttgaagttcaagtatatatttctcattataaatcacagtatcacacaaggtgatccagaatacattctaataagggcattgctgactttccccgcttgctttgtcaatagcttcaggatttgcattgtgctatggtttgaatgtagccccaaaaagcatgtgttagaaatgtaatctcccaatgcaacagtgttgggaggtgggrcctaatcagaggcgattaggccataaggaatctgccctcacgaatggattaatgcaggagggggctccacataacaggatgagttcagtcactttattgcattctttctctctctcaatgtctcttcttctgtcacaggctgacacagcaagaaagccctcactggatgctgatcacttagtcttggacttctcagcctctagaaccatgagccaataaatctctgttgattataaataaatattgtaaatataaagtctcaggtattctgttacagcaggacagactaggt

SEQ ID NO: 680961 - DNA, 1782 bp, Homo sapiens
agtaaaaaatcatgtcaaaataggatctcaatctataaaaaccctttaatataaatgcattttccagttgagagtgtagggctaattccaaataaggctattatttctgtaattgtttataacaaactagacctaactctgtgaagcaatccattactattttgtagatgacaaaactgaactttaatttaccctcctatggttaggagagaggaaagaggtggttcacaaaaggtcctctgaatccaatgcttaatcctcttcacggtgctctttgacaatactcatgtgagctgttaaatgagtcatataacattcactgaagctagaataagagagattttgaaaaacaaaacaacaatcaatccacataataacacctaaatgaaatattttttgtttgcatcttttctcaagaagcataattttttttcatcaagtatcagaagtggaggacacactastttagatatgtgttaaagaaaaaagtagcagtgtaacagaatgtctcataagggactatatgcaaaacatgtgttatattataatgaataaaaaattatcccaccttagcaggtacttggaataaattgttaaaagaaatataataggaaatagggatacaaaaattatttctctgaaaaaaagcataataccaagattagcaccaaaatcaggtagtgctttccagatatcacatttacattttttcaaatacatatatttatttatttttcccttagtcaaacacattacagcatctattttatatcaggaacagataaaatatgtccatataaacagaagacattggcttttaattatttgtattcaatttttaagaaatgatcatctagggaaaatgttttaaaatcttttaaaatatctttttgttatactttaaaactgccttcagctgcctattggtaaataaggtctggatatcagtacatgacaacatatactaatgaattgaactgtgaattaggaatgaaaattgcctagaaatttttttatgagttattaggattaaagtaagaatttcctttgctgggctgtgtaggcactaagattccgtggttgttggaggggttaaatttggatctactagtgcatatattttaccgaggattcataaaaacacgacagtggagcctgggtcaatccattaccatgtacaagcagtgaccaatagaaaaggaagaagaagatccaagaaggctgaggtaagcagtcttctgaagccctgtcaaagtggaaacaatagatcaaaggtgttcatggtgactgggacgagtaggtttcactgtttctcatagacgacttgacagcttaaagtaaaaacaaattattttcgtcaaagtttttttttttctcttaactgatttttagcaaacctcagactgagacacaggactcaacggtgtattcctggaaggcaaggtaaactattttgcacttttaaaaactcttaaagttaagcatgcaaagtacttattcaacagacgcagggttacaacttcaataactaaaccaaaaccctattctgaaaaagaaaaaaaaaaatgatgtttctttgttggaacatggccagagcagcgttctgcaatcctagaaaatttgacagcttgcagaagcagttctgcacttgttttctgcaatttaatggcaaaattgaatgatcagcatttcataaatgaagttgactttatcttttcctaaggaatcagtaaaatttatttcatcctattatcaatcagttcaataaatgtacattggtca

SEQ ID NO: 680962 - DNA, 1782 bp, Homo sapiens
agtaaaaaatcatgtcaaaataggatctcaatctataaaaaccctttaatataaatgcattttccagttgagagtgtagggctaattccaaataaggctattatttctgtaattgtttataacaaactagacctaactctgtgaagcaatccattactattttgtagatgacaaaactgaactttaatttaccctcctatggttaggagagaggaaagaggtggttcacaaaaggtcctctgaatccaatgcttaatcctcttcacggtgctctttgacaatactcatgtgagctgttaaatgagtcatataacattcactgaagctagaataagagagattttgaaaaacaaaacaacaatcaatccacataataacacctaaatgaaatattttttgtttgcatcttttctcaagaagcataattttttttcatcaagtatcagaagtggaggacacactactttagatatgtgttaaagaaaaaagtagcagtgtaacagaatgtctcataagggactatatgcaaaacatgtgttatattataatgaataaaaaattatcccaccttagcaggtacttggaataaattgttaaaagaaatataataggaaatagggatacaaaaattatttctctgaaaaaaagcataataccaagattagcaccaaaatcaggtagtgctttccagatatcacatttacattttttcaaatacatatatttatttatttttcccttagtcaaacacattacagcatctattttatatcaggaacagataaaatatgtccatataaacagaagacattggcttttaattatttgtattcaatttttaagaaatgatcatctagggaaaatgttttaaaatcttttaaaatatctttttgttatactttaaaactgccttcagctgcctattggtaaataaggtctggatatcagtacatgacaacatatactaatgaattgaactgtgaattaggaatgaaaattgcctagaaatttttttatgagttattaggattaaagtaagaatttcctttgctgggctgtgtaggcactaagattccgtggttgttggaggggttaaatttggatctactagtgcatatattttaccgaggattcataaaaacacgacagtggagcctgggtcaatccattaccatgtacaagcagtgaccaatagaaaaggaagaagaagatccaagaaggctgaggtaagcagtcttctgaagccctgtcaaagtggaaacaatagatcaaaggtgttcatggtgactgggacgagtaggtttcactgtttctcatagrcgacttgacagcttaaagtaaaaacaaattattttcgtcaaagtttttttttttctcttaactgatttttagcaaacctcagactgagacacaggactcaacggtgtattcctggaaggcaaggtaaactattttgcacttttaaaaactcttaaagttaagcatgcaaagtacttattcaacagacgcagggttacaacttcaataactaaaccaaaaccctattctgaaaaagaaaaaaaaaaatgatgtttctttgttggaacatggccagagcagcgttctgcaatcctagaaaatttgacagcttgcagaagcagttctgcacttgttttctgcaatttaatggcaaaattgaatgatcagcatttcataaatgaagttgactttatcttttcctaaggaatcagtaaaatttatttcatcctattatcaatcagttcaataaatgtacattggtca

SEQ ID NO: 680963 - DNA, 1782 bp, Homo sapiens
agtaaaaaatcatgtcaaaataggatctcaatctataaaaaccctttaatataaatgcattttccagttgagagtgtagggctaattccaaataaggctattatttctgtaattgtttataacaaactagacctaactctgtgaagcaatccattactattttgtagatgacaaaactgaactttaatttaccctcctatggttaggagagaggaaagaggtggttcacaaaaggtcctctgaatccaatgcttaatcctcttcacggtgctctttgacaatactcatgtgagctgttaaatgagtcatataacattcactgaagctagaataagagagattttgaaaaacaaaacaacaatcaatccacataataacacctaaatgaaatattttttgtttgcatcttttctcaagaagcataattttttttcatcaagtatcagaagtggaggacacactactttagatatgtgttaaagaaaaaagtagcagtgtaacagaatgtctcataagggactatatgcaaaacatgtgttatattataatgaataaaaaattatcccaccttagcaggtacttggaataaattgttaaaagaaatataataggaaatagggatacaaaaattatttctctgaaaaaaagcataataccaagattagcaccaaaatcaggtagtgctttccagatatcacatttacattttttcaaatacatatatttatttatttttcccttagtcaaacacattacagcatctattttatatcaggaacagataaaatatgtccatataaacagaagacattggcttttaattatttgtattcaatttttaagaaatgatcatctagggaaaatgttttaaaatcttttaaaatatctttttgttatactttaaaactgccttcagctgcctattggtaaataaggtctggatatcagtacatgacaacatatactaatgaattgaactgtgaattaggaatgaaaattgcctagaaatttttttatgagttattaggattaaagtaagaatttcctttgctgggctgtgtaggcactaagattccgtggttgttggaggggttaaatttggatctactagtgcatatattttaccgaggattcataaaaacacgacagtggagcctgggtcaatccattaccatgtacaagcagtgaccaatagaaaaggaagaagaagatccaagaaggctgaggtaagcagtcttctgaagccctgtcaaagtggaaacaatagatcaaaggtgttcatggtgactgggacgagtaggtttcactgtttctcatagamgacttgacagcttaaagtaaaaacaaattattttcgtcaaagtttttttttttctcttaactgatttttagcaaacctcagactgagacacaggactcaacggtgtattcctggaaggcaaggtaaactattttgcacttttaaaaactcttaaagttaagcatgcaaagtacttattcaacagacgcagggttacaacttcaataactaaaccaaaaccctattctgaaaaagaaaaaaaaaaatgatgtttctttgttggaacatggccagagcagcgttctgcaatcctagaaaatttgacagcttgcagaagcagttctgcacttgttttctgcaatttaatggcaaaattgaatgatcagcatttcataaatgaagttgactttatcttttcctaaggaatcagtaaaatttatttcatcctattatcaatcagttcaataaatgtacattggtca

SEQ ID NO: 680964 - DNA, 1180 bp, Homo sapiens
tagcctggcatttatctatgcatcttcaaactcagagtagaccctttaaaaataactctggggagatttctccaggacaacctaagaaaatgcattccaaaagtaatattcagtcaggatagtttgtaagagaataacaaagataatttgtcaaaaggttgtgctgcctgggtattactcactaaagctttttaagcaaataatcacataaacatatcatttataggaacagactatttttccactgggaactgctcagttatttaagaatttttgtttttttggtggggggagttaaataacagtgtacttgagtctacaatccaggaattaaatggcagcctgccatcatagcggttatktttccatggtgatgaaatgtattgtttaatcctgtagtcaaaaacaaaagatgcaacagaaaaaaaatgttaagagatgaatctgtttagctgaatcaaatagaacaacaacaatattgacctaaatacataatttttcctgacgagtgttctgtgcttctacaggtatattacaggtacattccttaaaagccccacggacaattgatgtgggaagtaaacttcaagtgactccacatagagcccttgcttacaaattatgcatttcatcctgagcatttgtgaattagggtgtttaggagtgaggcagcagtatttaaaacacagttgagaagtataagactttagcttatggagtattatgtgtgtagtatagacccacattttagagttttatcaaagtgttttctcataggtttctaattttctatcgttctcaaatctgagtgtgcatcagaatcacctggagatcttataaacccaggttgctgtttcctacccccagaatttctgacttgctgggtcagaggttgggcctcacagtttactccccaggtattaatagtattgatgttgctggctcacgatttgagaactactatttaatccttgcgagaaacttgtgtgatattattaggaatttctgaaagagagaaactgaagatcagctaggggaggatatttgcccaaggacaaagggtaaatgcaatagccagaacctgagtctgaagtgtttttttcactcatacagtataataacaatactttccttcattgtcatgaatacaaatttttaaaaaattctatcagtagaaaag

SEQ ID NO: 680965 - DNA, 606 bp, Homo sapiens
ttctgcttcagctggcccatgtgccattctgatgttaccccactgcctgttgccttgcaatggtttgccttggacatcttctcctctgggttgctgcatctcctacccctccactttatctccagaggactcaatcaccccaagatggagcaggaacccctcttgggtatctgccagacacccacctcccaccaagcatggaaatgaaggaaaatctgagtttttttcaagggaaatttcaagtacctagttacccctgagaagtaaatgcaacttaataagcaagaasgtaatagtagcttaaaacaatagccaaggaagttggagtcatgggatgtatggttccctatagaaaccaaagttcacatcttaacatatgtccctgagttgttttttaaaaacctgaactgctaccaaccgggtctgctgcacgtagacctcagatcagaaggaaatgaagactgaactctgatcacatttctttgttttaaatttcttcttgaggggcctggaggaagttcctaggccagagctaacattcttttcttcctatcccaaatttttagacaaaggtttgcctcctgaaccaattgcaaattagaaaac

SEQ ID NO: 680966 - DNA, 606 bp, Homo sapiens
ttctgcttcagctggcccatgtgccattctgatgttaccccactgcctgttgccttgcaatggtttgccttggacatcttctcctctgggttgctgcatctcctacccctccactttatctccagaggactcaatcaccccaagatggagcaggaacccctcttgggtatctgccagacacccacctcccaccaagcatggaaatgaaggaaaatctgagtttttttcaagggaaatttcaagtacctagttacccctgagaagtaaatgcaacttaataagcaagaaggtaatagtagcttaaaacaatagccaaggaagttggagtcatgggatgtatkgttccctatagaaaccaaagttcacatcttaacatatgtccctgagttgttttttaaaaacctgaactgctaccaaccgggtctgctgcacgtagacctcagatcagaaggaaatgaagactgaactctgatcacatttctttgttttaaatttcttcttgaggggcctggaggaagttcctaggccagagctaacattcttttcttcctatcccaaatttttagacaaaggtttgcctcctgaaccaattgcaaattagaaaac

SEQ ID NO: 680967 - DNA, 1332 bp, Homo sapiens
gagccagcaatctttgctacctttctatcttgtcaggatctaaatgccaggattccccccatggttttataaatgaaaaccacatgggaggggaactgatgtttattgcagacctcttattgtggaggaggaggtttaagcaccataataatgacaatgatgatgacaacaatgcctcctcctcccccaccagatataaaacactgtattcactccatgccaaatcctcactacaattcctgcaagggaggtaacattattgttttcttgcccatgggaatgctgaaggtctgagaggttaggtaactggttcaaggacacagagcagagaagtggcagaaactagctgcaatcttctgctgcaacaatcagactgttgtcctttctcctgctctgcttgggagtcctctgggtatgaaatgctgcactcaaggcatagagtgagccggtgacaaccctgccaccaagcccagcctggtggctctggatcctctgctgtctttgccacctgttcgaccctcatgccctgctctcttcctattcaatgtccaaggatatcaaccagtccttgaaatatggtctggaagctacgagtggaaaaataccatgagaacctaggaaggaaaaaaaaagtgaagaggagagacaaataccctatttatccctcttgacttcattacaaaagatctgcaaagctcacacaaaaaaaatcaacctgcaaatcatgttatggttaataaagcagtaaattaagccttcctggctctacctgcagtatcctgaaggtagtcacagtgccctttctgtttcattttagggcccagtacaaaaggttttcaccttagcataattaactttttatcattaagattctgaaaaattgaattgtgttggacacaggtcaccgtaatgagaatttaatggcgacgtattacaatgctagctaagctttgagtgcgtgctaaaggcatcacattgctactgacctatgcaaatttccatctcggtggcccttagttttccccactgtggcttccagccccctcctcactttctcctcatctccttaaacaatgattccctcattttcatattaattgcatcacttaactgagataatgctccctctgaaatgagcaaagggatgaatcactgaaacrggccattattctttttgcttaaccaatttcacaggccccgcacaaagcactgccttcatttggcttcctataattgcttatcattaggcccagccgccccacgaagtaccttttaatttatttaagtctcatctctgatggatggaaaatgagtcacttgcatatctgagaa

SEQ ID NO: 680968 - DNA, 593 bp, Homo sapiens
tgaagatatagagtgaaaggggattcagttggcaggargaagatgttatccaacaaattagaggtagccactcatgtattatgttaattacttactgtttttcctatttactaacagatttgcttgacaaacattatcctgtctgctaggtgctaaaaaatatgataatcaccaagacagactcagctctaacttcacggacattatcaccttcttttcactgaggcagcccaataggaaccttcattgcacaatagagtatgctttgatacttcactaaatattgtagactcagcttgattgcattcgtctaatattatatactttgaaaattattttattcacatttgtatgcctaggatccagcacaacttctagcacatacaaggtatacaataaacatctgaaagaaatagtccctggtaatttgagaatgtgtagactgaataatgtaatttctattttggtacattatggaggaaagagcatatataaaaatatatatacataaatggcagggaattaacatgtctttagcatttactatgtgacatccattgtgtgggtactttaaatacatttgttaagaggat

SEQ ID NO: 680969 - DNA, 593 bp, Homo sapiens
tgaagatatagagtgaaaggggattcagttggcaggaagaagatgttatccaacaaattagaggtagccactcatgtattatgttaattacttactgtttttcctatttactaacagatttgcttgacaaacattatcctgtctgctaggtgctaaaaaatatgataatcaccaagacagactcagctctaacttcacggacattatcaccttcttttcactgaggcagcccaataggaaccttcattgcacaatagagtatgctttgatacttcactaaatattgtagactcagcttgattgcattcgtctaatattatatactttgaaaattattttattcacatttgtatrcctaggatccagcacaacttctagcacatacaaggtatacaataaacatctgaaagaaatagtccctggtaatttgagaatgtgtagactgaataatgtaatttctattttggtacattatggaggaaagagcatatataaaaatatatatacataaatggcagggaattaacatgtctttagcatttactatgtgacatccattgtgtgggtactttaaatacatttgttaagaggat

SEQ ID NO: 680970 - DNA, 593 bp, Homo sapiens
tgaagatatagagtgaaaggggattcagttggcaggaagaagatgttatccaacaaattagaggtagccactcatgtattatgttaattacttactgtttttcctatttactaacagatttgcttgacaaacattatcctgtctgctaggtgctaaaaaatatgataatcaccaagacagactcagctctaacttcacggacattatcaccttcttttcactgaggcagcccaataggaaccttcattgcacaatagagtatgctttgatacttcactaaatattgtagactcagcttgattgcattcgtctaatattatatactttgaaaattattttattcacatttgtatgcctaggatccagcacaacttctagcacatacaaggtatacaataaacatctgaaagaaatagtccctggtratttgagaatgtgtagactgaataatgtaatttctattttggtacattatggaggaaagagcatatataaaaatatatatacataaatggcagggaattaacatgtctttagcatttactatgtgacatccattgtgtgggtactttaaatacatttgttaagaggat

SEQ ID NO: 680971 - DNA, 662 bp, Homo sapiens
tttaaagccaaagctataaactcaagttaccttaagttgaaatgaaagtgtcctgcaagagtttcaaagttctgtcacagatagaaatctccagctcttgactccagactaggcgccagctgataaacaaacaatttaagtcaagagctggagaattcccagctttttcatttaatggctttggccaagagtatttattgcctccagttttattctcacttagctctaagaggaaatttaaactcatcattatcttaaagccccatatgggtagcagtcagctcacctgataatagctcctcttactctgcactgattgttgagtctctactaaaagtgatgtaataatataaactaattaaccatagttttaggttgactttttaacaggctaaataaattttgttcaatatagtttacattcccacttkggatagttacaattccaaaaagttaaactttacagttttcagtagaaactaccaactaaaatggaagaggacaatgtaatctctctctcattcttgcatgctctggtctctggcacccccaccccctaacccttgttcactagctcctcaatattgcgtaaggtaacttttctgtatcaaatgtagacttttcctattagcttgaaatatccagtgttgctctatttccta

SEQ ID NO: 680972 - DNA, 586 bp, Homo sapiens
tttttatgtaaaatgttctcattttcatttattttagcttaaaacttctctgatcttaaaactatccagcagaatattttcaagtttgaaatggtagctgtattagtttgccagggccatcataacaaagtaccacaaactgggtggcttaaacaacagaaatttactgtctgacagtcctggaggctagaagtctcagattaaggtgttggcaggattggttcctttggatggctgtgagggaaggatctgtttcaggattttctctttggtttgtggatgactgttttctccctgtgtcttcccatcatcttccttttatgtgtgtgtctaaatttcccctttttgtaaggagaacaatcatattaaattaaggcccaccttaatgacctcactttaacttcattacctttgtgargaccgtatctccaagatggtcatattctgagatacttgggttaaggatttcaacatatgaattttgggagcccacaaatcaacccaaaaccacagcttaaaactgtatttaggctgggcacagtggctcatgcctataatgtcagcattttatgagaccaaggcaggg

SEQ ID NO: 680973 - DNA, 610 bp, Homo sapiens
tcccatggtgctgggattacgggtgtgagccactgcactcagccttttattcatttattttaaatattttttatttcattaacttttggggtacaaatggtttttggttacatggatgaattgtatagtggygaagtctgagattttagagcacctgtcacctgagtagtgtatattgtacccaaaataaatatatcgttgtttcttcttttattgttagcctttaatataattttgtttcaggtatttcttaaaaagagcaaagagctgcattttgttctttaaccttgagaatactgtctcaataacattccattacgtgcatataccacattttgtttgtccatttatccactgatggacatttgggttgtttccaccttttggttactatgagtactgctgctatgaacatatgtgctttcaattctttgggcatatacccagaagtaaaattgctggatcatatggtaattacatgtttaattttttgcagaaccaccaatatcattttccacagtggttgcactattttacattcctaccaacagtgcaaaagggttctaatttctccacatcctcaacaccacttgttttctatttgttgttt

SEQ ID NO: 680974 - DNA, 1096 bp, Homo sapiens
tgaaaatgaccacatgctttcacacctttacacagaagctttgaatattataatagccctaagacaggaatcaactcaaatgcccatcaggaggggaatgaacaaattgtggtatatctatacaatggattattattcagaaataaatataaacacatcactgatagatgcaaaaacatggatgaatttcaaaaacatatgctggtcaaaagaagccagacataaaagagcacacacactgtatgattcaatttatggggaactgtagaaaaggtatcaaatctccagtaacagaaaataggtcagtggtttcctggagttagatgtatgagtggaggttcgaaagggacaaaatgaacatattttgtaaaagaaatattctacatctttattgtggtggtggttgcacaggtgtttatcaattctcaaaaaatacacttaaaagggaacactttattgcatgttaattatacctcaataaaattgactaaaaaaatttaattagtatctgtaatttcttcctcaaygaagacagtattatttgcatccccgtcccctcttttttaattttcttcattgttcagctttatggaaacaatttggaaattctttcccagatagtaaaactgttttcatgttatgcctatccttatttaaaactgacaattaataattgtgacattgtattagttcattttaatactgctataaagaacttccctgagactgagtgatttacaaaggaaagaggtttaattcactcacaattccacgtggctggggaggcctcagaaaacttacagtcatggaagaaggaaagcagccaccttcttcacaaagtggcaggagagagaagagcaggggaaaccaccacttataaaaccatcaggtcttgtgagaactcactcactatcatgagaacagcatggggcaaaccacccccatgatccaatcacctcccaccaggtccctccctaacacatggggattataactgaagatgagatttgggtggggacacagagtcaaatcatatcagacattaaatattctttagagttaattataacttatattgattgatatctggctgtta

SEQ ID NO: 680975 - DNA, 1096 bp, Homo sapiens
tgaaaatgaccacatgctttcacacctttacacagaagctttgaatattataatagccctaagacaggaatcaactcaaatgcccatcaggaggggaatgaacaaattgtggtatatctatacaatggattattattcagaaataaatataaacacatcactgatagatgcaaaaacatggatgaatttcaaaaacatatgctggtcaaaagaagccagacataaaagagcacacacactgtatgattcaatttatggggaactgtagaaaaggtatcaaatctccagtaacagaaaataggtcagtggtttcctggagttagatgtatgagtggaggttcgaaagggacaaaatgaacatattttgtaaaagaaatattctacatctttattgtggtggtggttgcacaggtgtttatcaattctcaaaaaatacacttaaaagggaacactttattgcatgttaattatacctcaataaaattgactaaaaaaatttaattagtatctgtaatttcttcctcaacgaagacagtattatttgcatccccgtcccctcttttttaattttcttcattgttcagctttatggaaacaatttggaaattctttcccagatagtaaaactgttttcatgttatgcctatccttatttaaaactgacaattaataattgtgacattgtattagttcattttaatactgctataaagaacttccctgagactgagtgatttacaaaggaaagaggtttaattcactcacaattccacgtggctggggaggcctcagaaaacttacagtcatggaagaaggaaagcagccaccttcttcacaaagtggcaggagagagaagagcaggggaaaccaccacttataaaaccatcaggtcttgtgagaactcactcactatcatgagaacagcatggggcaaaccacccccatgatccaatcacctcmcaccaggtccctccctaacacatggggattataactgaagatgagatttgggtggggacacagagtcaaatcatatcagacattaaatattctttagagttaattataacttatattgattgatatctggctgtta

SEQ ID NO: 680976 - DNA, 1259 bp, Homo sapiens
ggaaaggagcaaagagttcaaagtgaataattacctgttattgatgtattatatttaaagaccctggctgaggattaaagacactctcaaggctgttaacagcctgcagtaaacaagtcatatatcagagaagtgggggagaaaagagtttcagaaggatttcctccatcattcaggaaccctctgtaggtgaggcacagggtggacatatgcattacacagaaggacacatttgagaccaggaagagagtcattaaatactgasggagctttgtctcagtgtctgaaggctcctcctgggaacttcgctgtcttaagactttgttgattaatcatgatattcctggcaccactgaaggattggcagctggtgggtgcatgacgaacttcattggttggatggttgattggttgattggttgattggttggttggttggttggttgaacccaatttctttcttgcttatagtttcaataaacaaaagaataaaggttttaactactaaagtaggtggctcaccaggccccatgcccctgccctaggaatacgcccagagaaggaacagtttttcgttagcaaagtccccccaaaagcagccactgagtgtctctgtctccatggaggatggacttgatgatccccagtttgcatttccccttctgtagtatctgatcctgtgatctctcagctgaggactattatactaatgaaaaacacttccaggaaatcagtccaagacagatttaatttgatgtggaaaagaaccccaaacgcacattctatccatcagaaattaggatcagctttaggtttcaagtccctagttccgaagatgccatagcacgttgaaggaaatgaagaggagtcctttttgtttttgtcttttatttcttttaaggaaaaatgaagaagaaaaagaagggccctccttcccccagggaaaagacagttctgatcaacataattacaatccccgaggggcagcgcctgcccagccctgaagccacaaggctggtgcctctgcaggtcacgtgtgcctcccgcaggctgtccaggaagagttcagtcgcatgagaagagaaagtcaggttttctgggtgcatgggtcagccactgtctccaggacgggtccctgcctctccaactggcagcgctgagctgagaacccagtcctctccagcaagacccgagctcactttcccaagtccagctgcatttgtgccctcaacaaaccatgccagcctccaggtgagttc

SEQ ID NO: 680977 - DNA, 1259 bp, Homo sapiens
ggaaaggagcaaagagttcaaagtgaataattacctgttattgatgtattatatttaaagaccctggctgaggattaaagacactctcaaggctgttaacagcctgcagtaaacaagtcatatatcagagaagtgggggagaaaagagtttcagaaggatttcctccatcattcaggaaccctctgtaggtgaggcacagggtggacatatgcattacacagaaggacacatttgagaccaggaagagagtcattaaatactgagggagctttgtctcagtgtctgaaggctcctcctgggaacttcgctgtcttaagactttgttgattaatcatgatattcctggcaccactgaaggattggcagctggtgggtgcatgacgaacttcattggttggatggtkgattggttgattggttgattggttggttggttggttggttgaacccaatttctttcttgcttatagtttcaataaacaaaagaataaaggttttaactactaaagtaggtggctcaccaggccccatgcccctgccctaggaatacgcccagagaaggaacagtttttcgttagcaaagtccccccaaaagcagccactgagtgtctctgtctccatggaggatggacttgatgatccccagtttgcatttccccttctgtagtatctgatcctgtgatctctcagctgaggactattatactaatgaaaaacacttccaggaaatcagtccaagacagatttaatttgatgtggaaaagaaccccaaacgcacattctatccatcagaaattaggatcagctttaggtttcaagtccctagttccgaagatgccatagcacgttgaaggaaatgaagaggagtcctttttgtttttgtcttttatttcttttaaggaaaaatgaagaagaaaaagaagggccctccttcccccagggaaaagacagttctgatcaacataattacaatccccgaggggcagcgcctgcccagccctgaagccacaaggctggtgcctctgcaggtcacgtgtgcctcccgcaggctgtccaggaagagttcagtcgcatgagaagagaaagtcaggttttctgggtgcatgggtcagccactgtctccaggacgggtccctgcctctccaactggcagcgctgagctgagaacccagtcctctccagcaagacccgagctcactttcccaagtccagctgcatttgtgccctcaacaaaccatgccagcctccaggtgagttc

SEQ ID NO: 680978 - DNA, 546 bp, Homo sapiens
tcctcagacatggaaaatatcacagggcaaagaagacaaatgttatttgagcatcatctaacattgtcagagatgaaagagaaagacggaaacacgcaagcaaacaaacaagcagcttcctcccaacaaggactctgagacccttgataaacgggcagttcaatatgccactgatagctggtggtaggacattcttcttatttttgcctgcttgaaaacagaagtttgatcattttcacgtcattgatagccagataccactcyactgggttcagtattctcttgcaactttaagatccaactccatttgaggttttcttttttccttctggatatacataatcacaactatgcttgtcattcattcttttggccaatattcattgaacagataactattcttgtcctctgcaaactcctccgttgctttaggagtcttctttgtgatttcactttgatgttgcagagcgagaccttgtcccagtgctctgtttactgaccagccatgacgatgctgataggccaggattagcgcctgtatacgct

SEQ ID NO: 680979 - DNA, 546 bp, Homo sapiens
tcctcagacatggaaaatatcacagggcaaagaagacaaatgttatttgagcatcatctaacattgtcagagatgaaagagaaagacggaaacacgcaagcaaacaaacaagcagcttcctcccaacaaggactctgagacccttgataaacgggcagttcaatatgccactgatagctggtggtaggacattcttcttatttttgcctgcttgaaaacagaagtttgatcattttcacgtcattgatagccagataccactctactgggttcagtattctcttgcaactttaagatccaactccatttgaggttttcttttttccttctggatatacataatcacaactatgcttgtcattcrttcttttggccaatattcattgaacagataactattcttgtcctctgcaaactcctccgttgctttaggagtcttctttgtgatttcactttgatgttgcagagcgagaccttgtcccagtgctctgtttactgaccagccatgacgatgctgataggccaggattagcgcctgtatacgct

SEQ ID NO: 680980 - DNA, 546 bp, Homo sapiens
tcctcagacatggaaaatatcacagggcaaagaagacaaatgttatttgagcatcatctaacattgtcagagatgaaagagaaagacggaaacacgcaagcaaacaaacaagcagcttcctcccaacaaggactctgagacccttgataaacgggcagttcaatatgccactgatagctggtggtaggacattcttcttatttttgcctgcttgaaaacagaagtttgatcattttcacgtcattgatagccagataccactctactgggttcagtattctcttgcaactttaagatccaactccatttgaggttttcttttttccttctggatatacataatcacaactatgcttgtcattcattcttttggccaatattcattgaacagataactattcttgtcctctgcaaactcctccgttgctttaggagtcttctttgtgatttcactttgatgttgcagagcsagaccttgtcccagtgctctgtttactgaccagccatgacgatgctgataggccaggattagcgcctgtatacgct

SEQ ID NO: 680981 - DNA, 890 bp, Homo sapiens
agtccttatgaactgctgcaggtcgtactgtataaagatacatctacacagaatactcatgagaacatgaatagtatctaccactatgcatggatttttttgaatctcatatgctcatactattacgtaccttgtgatcatttaattattcaaccagaattctctatttgaacaattataaaatctttgtaagtttgtaccatttgctctgatgtcatttactgttcatttggtacaaaatttcatttatatattaggtcagcttctgttcttttctcattagcctgtgacaattaatgtagaacattattctaccacattttcatttccatgatataaaaacattctaaatttattaaatgaagtatgaagctaaaatcctagtctgtgaaaatacctttcaattgtagttgatcactgtaaaagagaagttttgtctttataattagcaaaagaatccaacaagagtacaataacagacacatgatgacgcctgtctcattaacatcaggacatgatcacctaacgccagccaaacatgctctgactgggatgtgatcatttggtaccaacatgactaaattcacatgtaagcgggatgcagtggatcatgcctataatcccagtatttcgggaggccgaggcaggyggatcacatgaggtcaggagtttgaggccagcctggccaacatggcgaaaccccatctatactaaaagtacaaaaattaactgggcatggtggtgtgtgcctgtaatcccagctactagggaggctgaggcagggagaattgtttgaacctgggaggcagaggttgcggtgagctgagttcgtgccactgcactccagcctgggagacagagtgagactgtctctcaaaaaataaaaataa

SEQ ID NO: 680982 - DNA, 853 bp, Homo sapiens
ctgttcattgaaatacaccacagagtaaagtaataatcagtttaaggataaagaagatactgcaaaatagaactagtatcctgaatacataaagaactcatatactcaaattaatgaaaaagaaatataagacccagttgasaaaaaagaaatgaacatgagcacacaattctcagaagaagaaaagtagatggtaacagaaaaaggaaaagatgttcaaattcattagtaataagtgaaagtcaaactaagaatgagatgttactttatagccatgagatttatagaaattagagctgtgtaatgccaaattttagtacagttggagataaggtctcttacgcttttattattaataggtgtaaagctgttgtattctcctggagagccatctagcagaactttgtcatattcataaacctcatgcttcatcaatgcaatacagtgaacttccataatgggacacgctctgggctgtttactgtaaaatttatgtttagtagcagaaaatggaagacttcctagttacacactgaggaagcacctataaaaaatgtagtacattggctggtcacggtggctcatgcctgtaatcccagtactttgggaggccgaggcaggcagatcacctgaggtcaggagttcaagaccagcctggccaacatggtgaaaccccatctctactaaaaatacaaaaattagcaacatgtggtggtgcatgcctgtaatccccactacttgggaggctgaggcaggagaatcacttgaacctgggaggcggaggttacagtgagccgagattgcaccactgcactccagcctaaatgacagagtgagactccatctcaaaaaa

SEQ ID NO: 680983 - DNA, 1456 bp, Homo sapiens
tgatggccacaaccttcaggttcataaagtattttattaggaaagtttgtaaaggcacaagcagggaataaactttcagctactacatactaagggacattgaagaaagaagacaaatatataggatgtgttgtttgtttaaaatrtaactgaacccattaaagagactaaataaacgtccacacaaaataaagctcaactataaggtggtatttgctgaccctcatcaaagtgctttcagtggcaagaagcagaactcttattttaaaaaagccttaaacagtaaggccagttatataaaatgttccaggcttggattggcagctcaatgatctcaaagacccaggacctttccatctttttgctctgtcatctttggagtcttcagccatgtcttccctcatgatagtaggttgctatagcagttccagatgccccaagcagacatgaccaaatccagaaacaaagaagagatgtcttttcttctgtgcatctctcttttcaaagggaatagaatgtctcattaaaggccatgagaaagcctcctttctattcactatccaggactgctgccctggttgcaagagaggtcacaaaatgagcctctgccacattcagcctctatagtgaaaggcaagttctgtcagtcaggaatgtggaagcaggtactagaagagggggaatgaatgggtaggcaacctcatcctccaacgtgagccaacccaaatcctctctcatgggatgaagccagtgggattcaaggtcagaatacatatggcacctttacacctcacatctcctgtcttcattcctctgtcaccctccctccattataacctgcagtgcagctcctcctctccatgtagtctgttccatccctccctgaaacaaaccttagagactactcagatctaaaggcaaccattggagtcacacattgtccatgaaatcctgtttgggaataggaatggaaaaggaaaaaaagaaagaaaagagacaagaggaaaaagaagtaagaaaagaaatgcactaggataggaaggaggagacatgaggaaaagagagaatggcaagacaaatatcaaggaaaggggcaatgtgaaagaaagccatgccctgatcatgtccctttgtgcagatacttgtttatctttgtcttaagaaaacctttccaacttgttgcaaagagttcaattcaaaacactgaatgagctcagttttagatcccagtagaaaagcccaatggacatatcatgatggtctaggtttcccagggctctacataccatggtgtggggcccccagatctagttcaaaaagtgagacggagtctaaccaaagagataagggtcagtatttggaactataaaaatatttggtgttggggtaaattatatcactgggagccacctagagaaatcaaaaactaactctgaacaagcccacacaattctat

SEQ ID NO: 680984 - DNA, 1456 bp, Homo sapiens
tgatggccacaaccttcaggttcataaagtattttattaggaaagtttgtaaaggcacaagcagggaataaactttcagctactacatactaagggacattgaagaaagaagacaaatatataggatgtgttgtttgtttaaaatataactgaacccattaaagagactaaataaacgtccacacaaaataaagctcaactataaggtggtatttgctgaccctcatcaaagtgctttcagtggcaagaagcagaactcttattttaaaaaagccttaaacagtaaggccagttatataaaatgttccaggcttggattggcagctcaatgatctcaaagacccaggacctttccatctttttgctctgtcatctttggagtcttcagccatgtcttccctcatgatagtaggttgctatagcagttccagatgccccaagcagacatgaccaaatccagaaacaaagaagagatgtcttttcttctgtgcatctctcttttcaaagggaatagaatgtctcattaaaggccatgagaaagcctcctttctattcactatccaggactgctgccctggttgcaagagaggtcacaaaatgagcctctgccacattcagcctctatagtgaaaggcaagttctgtcagtcaggaatgtggaagcaggtactagaagagggggaatgaatgggtaggcaacctcatcctccaacgtgagccaacccaaatcctctctcatgggatgaagccagtgggattcaaggtcagaatacatatggcacctttacacctcacatctcctgtcttcattcctctgtcaccctccctccattataacctgcagtgcagctcctcctctccatgtagtctgttccatccctccctgaaacaaaccttagagactactcagatctaaaggcaaccattggagtcacacattgtccatgaaatcctgtttgggaataggaatggaaaaggaaaaaaagaaagaaaagagacaagaggaaaaagaagtaasaaaagaaatgcactaggataggaaggaggagacatgaggaaaagagagaatggcaagacaaatatcaaggaaaggggcaatgtgaaagaaagccatgccctgatcatgtccctttgtgcagatacttgtttatctttgtcttaagaaaacctttccaacttgttgcaaagagttcaattcaaaacactgaatgagctcagttttagatcccagtagaaaagcccaatggacatatcatgatggtctaggtttcccagggctctacataccatggtgtggggcccccagatctagttcaaaaagtgagacggagtctaaccaaagagataagggtcagtatttggaactataaaaatatttggtgttggggtaaattatatcactgggagccacctagagaaatcaaaaactaactctgaacaagcccacacaattctat

SEQ ID NO: 680985 - DNA, 961 bp, Homo sapiens
tctactaaaaatacaaaaataagccgggcgtgatggcatgggcctgtagtcccagctacttgggagactgaggcaggagaattgcttgaactcagaaggcagaggttgtagttcttttaaaagaactacaatcctttatccagtgagctgagatcgcgccaactacaatcctttatccagtgagctgagatcacggcaactacaatcctttatccagtgagctgagatcgtgccactgcacttcagcctgggcgacaaagcgagactccrtctcaaaaagaaaaaaaaaaaaaagaaagaaagaaagaaagaaagaaagctcattctggtggctgcctgttgtgtggccgtgggcagagagcagacagggagaggcaacaaatgcaaggagattgggggcagccaaggatatcgcatgcagtgttggagacctttcaaatgagaggacaaggaggtgaggagggcggggagggcagtggtcttggttcagggggacttgggtttctggctctagaggagggaggttgggggtgccattcactggggcagatgtgccagatggggagaggtcggggcaatggggcaagagatcacaggttccatttggggcttatggtgtctgagatgcttggcagggtgtgtggagtctccctgtagctcctccaccgaggggtgtccagccccacagaatgaaggaccaggcaagacaggcaggaagcccccaccatgccctcgcccctctgcacctgcgtttccactcacaggtcgacacactcactcctttaccctcatacaccccaggcctggacgctggcaccatgcagggtggggagggctatgggagagccttgccctgggagaggggctggcagctctggacttacatctactccacatttccaggccaggaaaccagtatcctggaagctgtccctgctccccgttgggctggatgccagca

SEQ ID NO: 680986 - DNA, 961 bp, Homo sapiens
tctactaaaaatacaaaaataagccgggcgtgatggcatgggcctgtagtcccagctacttgggagactgaggcaggagaattgcttgaactcagaaggcagaggttgtagttcttttaaaagaactacaatcctttatccagtgagctgagatcgcgccaactacaatcctttatccagtgagctgagatcacggcaactacaatcctttatccagtgagctgagatcgtgccactgcacttcagcctgggcgacaaagcgagactccatctcaaaaagaaaaaaaaaaaaaagaaagaaagaaagaaagaaagaaagctcattctggtggctgcctgttgtgtggccgtgggcagagagcagacagggagakgcaacaaatgcaaggagattgggggcagccaaggatatcgcatgcagtgttggagacctttcaaatgagaggacaaggaggtgaggagggcggggagggcagtggtcttggttcagggggacttgggtttctggctctagaggagggaggttgggggtgccattcactggggcagatgtgccagatggggagaggtcggggcaatggggcaagagatcacaggttccatttggggcttatggtgtctgagatgcttggcagggtgtgtggagtctccctgtagctcctccaccgaggggtgtccagccccacagaatgaaggaccaggcaagacaggcaggaagcccccaccatgccctcgcccctctgcacctgcgtttccactcacaggtcgacacactcactcctttaccctcatacaccccaggcctggacgctggcaccatgcagggtggggagggctatgggagagccttgccctgggagaggggctggcagctctggacttacatctactccacatttccaggccaggaaaccagtatcctggaagctgtccctgctccccgttgggctggatgccagca

SEQ ID NO: 680987 - DNA, 961 bp, Homo sapiens
tctactaaaaatacaaaaataagccgggcgtgatggcatgggcctgtagtcccagctacttgggagactgaggcaggagaattgcttgaactcagaaggcagaggttgtagttcttttaaaagaactacaatcctttatccagtgagctgagatcgcgccaactacaatcctttatccagtgagctgagatcacggcaactacaatcctttatccagtgagctgagatcgtgccactgcacttcagcctgggcgacaaagcgagactccatctcaaaaagaaaaaaaaaaaaaagaaagaaagaaagaaagaaagaaagctcattctggtggctgcctgttgtgtggccgtgggcagagagcagacagggagaggcaacaaatgcaaggagattgggggcagccaaggatatcgcatgcagtgttggagacctttcaaatgagaggacaaggaggtgaggagggcrgggagggcagtggtcttggttcagggggacttgggtttctggctctagaggagggaggttgggggtgccattcactggggcagatgtgccagatggggagaggtcggggcaatggggcaagagatcacaggttccatttggggcttatggtgtctgagatgcttggcagggtgtgtggagtctccctgtagctcctccaccgaggggtgtccagccccacagaatgaaggaccaggcaagacaggcaggaagcccccaccatgccctcgcccctctgcacctgcgtttccactcacaggtcgacacactcactcctttaccctcatacaccccaggcctggacgctggcaccatgcagggtggggagggctatgggagagccttgccctgggagaggggctggcagctctggacttacatctactccacatttccaggccaggaaaccagtatcctggaagctgtccctgctccccgttgggctggatgccagca

SEQ ID NO: 680988 - DNA, 961 bp, Homo sapiens
tctactaaaaatacaaaaataagccgggcgtgatggcatgggcctgtagtcccagctacttgggagactgaggcaggagaattgcttgaactcagaaggcagaggttgtagttcttttaaaagaactacaatcctttatccagtgagctgagatcgcgccaactacaatcctttatccagtgagctgagatcacggcaactacaatcctttatccagtgagctgagatcgtgccactgcacttcagcctgggcgacaaagcgagactccatctcaaaaagaaaaaaaaaaaaaagaaagaaagaaagaaagaaagaaagctcattctggtggctgcctgttgtgtggccgtgggcagagagcagacagggagaggcaacaaatgcaaggagattgggggcagccaaggatatcgcatgcagtgttggagacctttcaaatgagaggacaaggaggtgaggagggcggggagggcagtggtcttggttcagggggacttgggtttctggctctagaggagggaggttgggggtgccattcactggggcagatgtgccagatggggagaggtcggggcaatggggcaagagatcacaggttccatttggggcttatggtgtctgaratgcttggcagggtgtgtggagtctccctgtagctcctccaccgaggggtgtccagccccacagaatgaaggaccaggcaagacaggcaggaagcccccaccatgccctcgcccctctgcacctgcgtttccactcacaggtcgacacactcactcctttaccctcatacaccccaggcctggacgctggcaccatgcagggtggggagggctatgggagagccttgccctgggagaggggctggcagctctggacttacatctactccacatttccaggccaggaaaccagtatcctggaagctgtccctgctccccgttgggctggatgccagca

SEQ ID NO: 680989 - DNA, 961 bp, Homo sapiens
tctactaaaaatacaaaaataagccgggcgtgatggcatgggcctgtagtcccagctacttgggagactgaggcaggagaattgcttgaactcagaaggcagaggttgtagttcttttaaaagaactacaatcctttatccagtgagctgagatcgcgccaactacaatcctttatccagtgagctgagatcacggcaactacaatcctttatccagtgagctgagatcgtgccactgcacttcagcctgggcgacaaagcgagactccatctcaaaaagaaaaaaaaaaaaaagaaagaaagaaagaaagaaagaaagctcattctggtggctgcctgttgtgtggccgtgggcagagagcagacagggagaggcaacaaatgcaaggagattgggggcagccaaggatatcgcatgcagtgttggagacctttcaaatgagaggacaaggaggtgaggagggcggggagggcagtggtcttggttcagggggacttgggtttctggctctagaggagggaggttgggggtgccattcactggggcagatgtgccagatggggagaggtcggggcaatggggcaagagatcacaggttccatttggggcttatggtgtctgagatgcttggcagggtgtgtggagtctccctgtagctcctccaccgaggggtgtccagccccacagaatgaaggaccaggcaagacaggcaggaagcccccaccatgccctcgcccctctrcacctgcgtttccactcacaggtcgacacactcactcctttaccctcatacaccccaggcctggacgctggcaccatgcagggtggggagggctatgggagagccttgccctgggagaggggctggcagctctggacttacatctactccacatttccaggccaggaaaccagtatcctggaagctgtccctgctccccgttgggctggatgccagca

SEQ ID NO: 680990 - DNA, 961 bp, Homo sapiens
tctactaaaaatacaaaaataagccgggcgtgatggcatgggcctgtagtcccagctacttgggagactgaggcaggagaattgcttgaactcagaaggcagaggttgtagttcttttaaaagaactacaatcctttatccagtgagctgagatcgcgccaactacaatcctttatccagtgagctgagatcacggcaactacaatcctttatccagtgagctgagatcgtgccactgcacttcagcctgggcgacaaagcgagactccatctcaaaaagaaaaaaaaaaaaaagaaagaaagaaagaaagaaagaaagctcattctggtggctgcctgttgtgtggccgtgggcagagagcagacagggagaggcaacaaatgcaaggagattgggggcagccaaggatatcgcatgcagtgttggagacctttcaaatgagaggacaaggaggtgaggagggcggggagggcagtggtcttggttcagggggacttgggtttctggctctagaggagggaggttgggggtgccattcactggggcagatgtgccagatggggagaggtcggggcaatggggcaagagatcacaggttccatttggggcttatggtgtctgagatgcttggcagggtgtgtggagtctccctgtagctcctccaccgaggggtgtccagccccacagaatgaaggaccaggcaagacaggcaggaagcccccaccatgccctcgcccctctgcacctgcgtytccactcacaggtcgacacactcactcctttaccctcatacaccccaggcctggacgctggcaccatgcagggtggggagggctatgggagagccttgccctgggagaggggctggcagctctggacttacatctactccacatttccaggccaggaaaccagtatcctggaagctgtccctgctccccgttgggctggatgccagca

SEQ ID NO: 680991 - DNA, 1189 bp, Homo sapiens
tcacagagcatattccagtctgaggggtccctctcacccctccctttccacagatgtggccattaggcttaagaagacagataaaagcatgcgcgtgaatgatttcaaacccatgtcctccttgtctgttcctccatttgacccgtgtatactgtgtgcccaccttgtgcctggcactagtgtgctctctggagagcacaggagggaaacaagaaggaggagacgackgccttgaaggagcccaccttccagttgggtcatccagccacaaactgataaataagtagacatagtataatcacagtgacatttagtgctgggaaggaaagaaaagcagtggtagggaaaggtgaaaaagtatcacgtgagaaaaacaatttcacatagagccagggcctcacaggtgcaccagcaatgtcagttccacctgaaaagcacagccctgctattgaaaaataagttaacttgtgcatgcagatcacagaaggcatgacagtgtcacacgcagcgtgaccaggtggcgatctgggactcaggtgcctgtgtggcacattgcttaagaatttgaaatccggccgggtgcagtggctcacacttgtaatcccagcactttgggaggctgaggcgggtggatccacgaggtcaagagatcaagaccatcctggccaacatggtgaaaccccgtctctattaaaaatacaaaaattagctgggtgtggtggcaggcgcctgtaatctcagctactcgggaggctgaggcaggagaattgcttgaacccgggaggaagaggttgcagtgagccgagagcacgccactgcagtccagcctggtgacagagcgagactccatcttggaaaaaagaaaaaaaaaaaaactgaaatcagcccaggtccaaatccagcttttatcatttgctagctgtgtgactaggggacagttacatgttcttttcaattctcagtttcttcacttgaaaaatggggagagtaatacctatcttaaagattgctgtgacgtttaaaaatagatcatatttgtgtagcacagtatctggtactcagtattcaataagtaataaatacaatttttaatttttgttactaaaagctgagatggtccaaaaagttttcttattttgttattaatagaaagcataatgacttgaatttgtaatgctttcctttttaa

SEQ ID NO: 680992 - DNA, 1189 bp, Homo sapiens
tcacagagcatattccagtctgaggggtccctctcacccctccctttccacagatgtggccattaggcttaagaagacagataaaagcatgcgcgtgaatgatttcaaacccatgtcctccttgtctgttcctccatttgacccgtgtatactgtgtgcccaccttgtgcctggcactagtgtgctctctggagagcacaggagggaaacaagaaggaggagacgactgccttgaaggagcccaccttccagttgggtcatccagccacaaactgataaataagtagacatagtataatcacagtgacatttagtgctgggaaggaaagaaaagcagtggtagggaaaggtgaaaaagtatcacgtgagaaaaacaatttcacatagagccagggcctcacaggtgcaccagcaatgtcagttccacctgaaaagcacagccctgctattgaaaaataagttaacttgtgcatgcagatcacagaaggcatgacagtgtcacacgcagcgtgaccaggtggcgatctgggactcaggtgcctgtgtggcrcattgcttaagaatttgaaatccggccgggtgcagtggctcacacttgtaatcccagcactttgggaggctgaggcgggtggatccacgaggtcaagagatcaagaccatcctggccaacatggtgaaaccccgtctctattaaaaatacaaaaattagctgggtgtggtggcaggcgcctgtaatctcagctactcgggaggctgaggcaggagaattgcttgaacccgggaggaagaggttgcagtgagccgagagcacgccactgcagtccagcctggtgacagagcgagactccatcttggaaaaaagaaaaaaaaaaaaactgaaatcagcccaggtccaaatccagcttttatcatttgctagctgtgtgactaggggacagttacatgttcttttcaattctcagtttcttcacttgaaaaatggggagagtaatacctatcttaaagattgctgtgacgtttaaaaatagatcatatttgtgtagcacagtatctggtactcagtattcaataagtaataaatacaatttttaatttttgttactaaaagctgagatggtccaaaaagttttcttattttgttattaatagaaagcataatgacttgaatttgtaatgctttcctttttaa

SEQ ID NO: 680993 - DNA, 904 bp, Homo sapiens
tggagagagagagcctcagggaatctggagctgggctcacacagccagagaaggaaccgcgttcccggatccgggcctgcaaggtttccccactcacaacatgccccccaaagacactttcccaatagacacagtagcacttgtcatggggagccctctctcgctaaatatggacacagtaggcagggccagccatcttgcccagatgcttttctgggaggtggagggaggggaagaagagagttccaaagaactgagtgttgcttcactctttggggtcattacctaactcatactgccaaagcgactgtatgcccgggagccttctggtcataagagtgtgtcagatggcagggaacactccctggttgctaatagagaagcccgtgcagtaggtggggggagagaacaaaccccatatgcaatctgccatttgacctgggccaygccttagaatgttctgtaggctcgggtgggcccgcagcagggcagccatgccggcagcacagcacaggccagtgtcagtggcagagcgggtggcttggccacacaccccgtgtgctcaccagcacgggcctggccccacacgtaggatagagctctccagcctcatcctccagcctcctagtcaagcacatctagtgcataacagaaaagactggaagacaccaagaaaagatcgaacttaccaaatcttcccaccccagggtgtccatgatcaatcccagcatcctttttttcattgtttttcctgttcattcacaatggggtttcttttcccagcagcagagtatttgcccaggtgagaagcagcagaatgaaagcacccagcacaagccaaagagtatgggcccaagtcccagccttccacctccacgggaaaattgttaggtggccttgaccc

SEQ ID NO: 680994 - DNA, 657 bp, Homo sapiens
tgaacaacgtgcttaccacaagtgtgtgagctgatgcatctgtggaccctgataacacagaggagacccagaagctctgggctttccaggaagtgtccggaggagggtcaatgagagagcctactcttatagggagtctcagctgactgtgaaccctgcaggcctagtctttcacctagccctccaccaattatgcctggctgctcatctttcattttccaagasaagaacctggaataaaaaaaaagatgtgcattgcctttctttttcattgcaaacaacttagcaaaagcagaaaaaaaatgatttttttaagcttacgtaacatatttcagaggctgacatgtataatttagaaagaaacctatttattcataacagcaatggcagaagatcaggacgtctaacaacttgctatggagcaaatggacaaaacagattttcatggtatgatactattatacattggagaagaaagaaagaaatctgttctccttcaaggctatccacatttccaaggtctataaagtagcaactgttgtaaatgtgttaactctatcctcacaacaacctaacgaagaagctgctactatgagctcattttactgatgaaataacagaggtcagagaagttaattgactcacccaaatccatag

SEQ ID NO: 680995 - DNA, 3182 bp, Homo sapiens
tatgaaatatgtgtagaaaataggggataagttcaacatagagagtagttcacatgttcttgctgctaaagctttatcatttattttatggtataagtccttttttattgtttggtaacacttctgttttgtaacaaactctttcagaagcaataaggttttaaaaatgcatttttaatgaaaaagtaagtattgagcttctatttcttaagacagctgatgaacatataacttgagtcaatatttgttgatatttacaatcctactgtgaaggccatggcgatatcactgaccaaatgaaacaagtctgtttatagagggatctagcatttatcttaaaactcagtagttcttaaacaatttttttttgttgttttttgaaacagtcttgccctgttgcccaggctggagtgcagtggtgcaatcttggctcactgcaacctccacctcccaggttcaagcagttctcctgcctcagcctcccaagtagctgggattacaggcacacaccatcacccccagctaatttttatatttttagtaaagacaaggtttcgccatgttgcccaggctggtcgcaaactcctgagctcaggcaatccacccgccttggcctaacaaatttataagaaaaaaacaaccccattaaaaagtgagcaaaagacatgagcagatacttctcaaaagaagacattcatatggccaactaacatacaaagaaaagctcaacatcactgatcattagagaaatgcgaatcaaaaccacaatgggaaaccatctcatgccagtcagaatggcgattattaaaaagtccagaaacaacagatggtggtgaggttgtggataaaagggaacgcctttacaccgttggtgggagtgtaaatgacttcaaccgttgggaagacagtgtggtgattcctcaaagatccggaggcagaaataccatttgacccagcaattccattacagtgcatatatccaaaggaatgtaaatcattctagaataaagatacatgcacacatatgttcacttgagcactattcatgatagcaaagacacagagtcaacccaaatgcccatcagtgacagactggataaagaaaatatagtacatatataccgtaaaatactgtgtaaacataaaaaggaacaagataatgtcctttgcagggacatggatggtgcttgaagctgttatcctcagcaaactaacgcaggaacagaaaaccaaacactgcatgttttcacttataagtgggagctaaacgatgagaacacgtggttgggggacaacacacacaggggtctgtcagggggaggtgggaggggagggagagcattaggaagaatagctaatggatgctggtcttattaccaaggtggtgggttgatctgtagcaaaccaccacggtacacacattatgtagcaaacccatacatcctgcacatataccctggaacttaaaagttgaaggaaaaaaaataaaaacttagtaattctaagaatgctaggcccaaagccaacaatttatcacatgcaactgaagaaaatgcatttaaaatatcactctgtgaagtatgactttccctttagatcaaatggctattctaaatttattttgctcatattcaattgtgagttttgttatgcacctaagcaaaatgaagctggtactgttaatgtgctggcttcattagcagaagacctttgcagatagttaaatgttgccagttttgtatcaatatcatcacataatttagaaagataatcagttaagtcaattccagtagtagctttgtttcttttttactctcttcgaaatttcatagggtttttttctgtcaaagatgcaacttctttgtgaatgctactgtgaattcagtttggcattgccaatctgtgtgcttatgcattactttggtgggccacaacatcatgctaaaaattaatattcttmttaaaacctatggagcagaaatgcacttgaaatttaatgttatacccatataattcataattacctccaaacaggctgtagtgtccattgaaacagacacttgtcaaaataattgaattttgttttgtttttttttttaagagagagacttgctctgtcacccaggctagagtgtagtggtctgataatagcttactgcagccttgaacgaactcctgggctcaagcagtcctcccatctcagcttcccaagtagctaggactgtaggaggtactcaccaccatgcctggctaattttcttttttaaaaaaatagagatggggtctcactgtattgcccaggttggtcttaaatgatcctcccagctcagcctcccggagtgctgggattacaggtgtgagccaccccatacctggccactttttttgtttttttttgagacagactctcactctgtcgccaggctggagtgcagtggcgcaatttcggctcactgcaacctccgcctcctgggttcaagcaattctcccgcttcagcctcctgagtagctgggactacaggcgcatgctaccacgcccagctaatttttgtatggggtttcaccatgttggccaggatggtctcaatctcttgacctcatgatccacctgccttggcctcccaaagtgctgggattacaggcgtgaaccaccgtacccggccttctttttaaaatatacacagaacagatgaactgcaaactatttgtgttgaagatgactgaatgcaaaaaaaatgcttctgcataacagtacactttctttgcttgtccatcagttgggttttaaagtgtaagccttcaaagaattactctgtaaatcagccaaagtgtcctagggtggtgctataaactttaccaaaaaaaagttgcctaattttgatggcattttattcagaatatactggaaatctataatcaaaggattcaacaaatgaagtgccaaaatacattagcttttgaattttttggtgaattacagttgttaaagctggcagcaggaagacattgatcatctttccctaaaaacacgaagaaatgaacaaatattgaaagctcaacaatgcacaagacttaattatgaaattctataaatattctttggatatggtatggaaagaatctcctgatgactttccttattgtaattggataaatttgtagtctagaatggaatggaatga

SEQ ID NO: 680996 - DNA, 1967 bp, Homo sapiens
atagtcagtctataccacagaggtgcaatacactcgtgccactcaatgcccttgtggtcatgtcagagacagaaaaccatgctgcactggcccagggatgaaaatgcttgtgttcttatgctatgaaatattaatgatgaagaaattatgaggcattcattacatgctaaatgtcattactccatgatttaatgggacttattaattagtgccctacatcaattggtattaatatgctttatatccttcctctaggatgacatctgtaaaggtggtataaggctcttgctgggatttattttcattgctgtttgtgtttagcatcttcagagggtacatttccagtgaagatcgtgtgcctattctgagcggttcagttcatagatagatcacttaagcaaatctttcagttatatcagacccgcattcccatttctgctgacctgacagtgtgaattattgcttggattttctcacagtttcagcaaggtctatggtgagctctagtctaattaaggaagacaaagaattataattttagtgttcctctcacctataagcttttccttcacagcaaacactgagctcatcaaaggagtcttagctggatttacacaaaaatgataagacttagaagctttctttaatttatactctacaatatgtataaaatcctagatcttaatagatgcacagagagaatacctttaactgtgagtccacagttgacatctgaaattcactcaagtcatcatgtgttcttttatttttagaaatgcatcttgagataaagttatcaaaaccttggaagccccaagggttgtcaagcctttagcaagtcctcatccccttttcaagtcttcacctcatgtattacaagaaataaatattcagccacattccagagtcacctaatcatcttcacacaataaccctgtcttcagctggagctagacagaagaaagcctctttttaaggcacttctgtttaaattaaaagaacttaccattctgtctcattttcctagctagaactctttgatcatactctttttagaaaatagcattattcttcaagttcatttatgtctatgtttaagaccattctcagcatataatccaaaggttactatatgatggattgcccttgacagtatttcataaaaaatgtcacacattacaaatatgggccagcagtatgtaatgagagcgctgcctctgctggtgcagcattaatggcgccagcagggatgtggcatatgatgtgtacacaggctttgttrcagcaactgcacattgctccatctatgtttttaaaattccccttttggatacttccaacaatgaactatcacccagtagccccctactctgttaggggagtgaaaaatatgaagatgagtaagtggtgcccatcttcaagatactcccagcctagtggcgagaaacagatgtattgacagaatgagaggcaaatgctgtagtaaaaaaataaaagagaacaaagggtcatgggaacatggacaatgaagagactaactgccgtggggagtcaggtgggctacatagagacagtaactgttgagttagttcttaaaggatgagttaaactttgccaagaggatatcagaaatatttgtattgcagtcagagaatacctctttggcctagtgtctacttcatacatttggaggcttcagtgtcttaggccactgtaaaataagtattttttgtacatttttaagtcataaagttaacatgttctaatgactgactacaagctggatagctgtagatgagtggaaggaaaagtctatacctgaatataatcagtgtaggaggccatttagctcagcatggagtcaagatgatgggagatcaaatatccagccagaacacctggcatatcttagctgtggctatgctatgaccttgatgttttcaaacttagcttgttttttatttgtc

SEQ ID NO: 680997 - DNA, 934 bp, Homo sapiens
tctagaaagccagctgccctgcacgtgggaaacttgacggacctagtgatcttggggacacatgatatgttacagtctccctgccagggagaggcaaggggaaaaccaccagttgtatgggaatctgagcttgaatgtagtcagcccctttttctgagaaaagaggtgcccccaaattcccagctgctcattgtccatttaatccactctgagcacccagggtcattcgtggaaaccctcctcctttcaaaatcattcccaagagaggatttcttctgtcagcaaacacaacaagaaaccattgaattaagaggtaagactgccacccaattattttgggtccttgattccactggacagaaacacataaacaggttgaattatgtgggctggagtgtttgttcctagtaatcagagagaggtatgtctagaacccagtgttaacctaggttcttaccaagacccgagatgagacgaaggtttttttggagataatttattttgggagctggggactggaaggagtaaaagagaaatagggaaaaaggtaatccaaggatgcactgttgagctgatcaccactgtgagaagctgggatctgatcctgtagggcccctctgaagacctgtataggatgcaacccagaattgtctgcttaaggagcaaaagaggagaatatccaccagctcctgtctcccattggtcaagagtaggatgactttcaactccctcccaatttaagacttccatcgcatagtttaaaccctaacttacagaatrtcagatggaactagaggaggaatggaagccacccagaaatcatgttcttgacatggatgtgttacccttgtcagaaggggagaggatgagcaggtttttctgtcaagtataattgcatattttacatgcgaatattggttggttggaggaagtt

SEQ ID NO: 680998 - DNA, 1067 bp, Homo sapiens
tgacacaatgtatgcctcagtaaaggcatgtgaggccaattgtctctcactgtgagaaatttttcctctgtaatgcaaccttctgtaattatctgtaaccattttctgaatgttcttcagtttcctggtataatttaaacctaattacctattatcaaccatccatatttcagattgtccaagctcatttgtgccaagcccaaggatgaacctggatcctaattatccatttagtgctaagatgattcctatgacaacatgtaaacagcacatttgtttctcatatacttttacttatttacttgagaaacatttactatgcatgttctgtttccaagtcatatgttaagtaagttgtatgttcatagaaacagacacttaacctagtacccatgataaaatgcacaaaaaaagaatatatatatatagctctcattacataatatttttaaaatttatatgtcaataaaaccttaggaatagtaatattccctcaaaatctgaaactttctggaacaaaagatataactattccttacctatagtctaaacaaatgactatatccttaaacaaattaaaaggcatatggaaactaaacaaaaaaacctcactatatgcctgtctttaatattcttaatgtatcaggagactttactagttaatacaaaaatgtttttgtttgtttgtttgtttttgttttttgagatggagtttccctcttgttgcccaggctagtgcagtggcrcgatcttggctcactgcaacctccacctcttggtttcaagctattctcctgcctcagcctccggagtaactgggattacaggcgcacgccaccaagcccagctaatttttgtatttttagtagagatggggtttcaccatgttggtcaggctggtctcaaactcctgacctcagatgatccaccttcctcggcctcccaaagtgctgggattacaggtgtgagccaccgcacccagacaaagaggtttttaaaaatctacaatttacaaaaaatgcaaatgaccaataaatacaatgttcagtaccctcataataaaaatg

SEQ ID NO: 680999 - DNA, 1067 bp, Homo sapiens
tgacacaatgtatgcctcagtaaaggcatgtgaggccaattgtctctcactgtgagaaatttttcctctgtaatgcaaccttctgtaattatctgtaaccattttctgaatgttcttcagtttcctggtataatttaaacctaattacctattatcaaccatccatatttcagattgtccaagctcatttgtgccaagcccaaggatgaacctggatcctaattatccatttagtgctaagatgattcctatgacaacatgtaaacagcacatttgtttctcatatacttttacttatttacttgagaaacatttactatgcatgttctgtttccaagtcatatgttaagtaagttgtatgttcatagaaacagacacttaacctagtacccatgataaaatgcacaaaaaaagaatatatatatatagctctcattacataatatttttaaaatttatatgtcaataaaaccttaggaatagtaatattccctcaaaatctgaaactttctggaacaaaagatataactattccttacctatagtctaaacaaatgactatatccttaaacaaattaaaaggcatatggaaactaaacaaaaaaacctcactatatgcctgtctttaatattcttaatgtatcaggagactttactagttaatacaaaaatgtttttgtttgtttgtttgtttttgttttttgagatggagtttccctcttgttgcccaggctagtgcagtggcgcgatcttggctcactgcaacctccacctcttggtttcaagctattctcctgcctcagcctccggagtaactgggattacaggcgcacgccaccamgcccagctaatttttgtatttttagtagagatggggtttcaccatgttggtcaggctggtctcaaactcctgacctcagatgatccaccttcctcggcctcccaaagtgctgggattacaggtgtgagccaccgcacccagacaaagaggtttttaaaaatctacaatttacaaaaaatgcaaatgaccaataaatacaatgttcagtaccctcataataaaaatg

SEQ ID NO: 681000 - DNA, 592 bp, Homo sapiens
cagagaggaactaaggaaattaactcacccaaggccacagtctcacagagctgttgtgaggattatatgacatgattcaactccagtacttggcactatccctggcccataacaagcacccttttaataatggatattcctacagcttcatcaaagaaggaaggaaagagctgctgatgggcagaaagcaaagatggtgggaaagagggtgtaggttctgaaagtatcaaagtaacagagatttatatgagattaaaaatagatgtaggaaagtaaagttggagagtttagggtagatgattatacacagaatttaagtttttgagtttaaaattcagttatgggtttcccaggttctgggctgtggcaggcagaataatagaccctgaagtttcccacatcctactcctgagttcctgtgaatacratatgttacatggcaaaaggaacctctaggtgtgattaaattaaggatcttgagatagggggatcaccctggattatctaggtgggcacaatgctgtctcaaggtcctcatcagagggagacagaaaggtcagagtcaaaaaggagatgaggtgagggaagcaaa

SEQ ID NO: 681001 - DNA, 665 bp, Homo sapiens
tatgtgtatatataattcctatagcgtggtctaaaagagcttttttttttattatactttaagttctggggtatatgtggagaatgtgcaggtttgttacataggtatacacgtgccatggtggtttgctgaacccatcaatttgtcatctacattaggtatttctcctaatgctatacatcccctaccctcccaccccacacaacaggccccggtgtgtgatgttcccctccctgtgtccatgtgttctcattgttcacctcccacttatgagtgagaacatgcagtgtttggttttctattcctgtgttagttttctgagaatgatggtttccagcttcatccatgtccctacaaaagacatgaactcatgcttttttatggctgyatagtattccatggtgtataagagcttttaaaattcaacaggtaaaaggtataccaactgaagaaaacagaaaaaaataaacaggcaacccacaaaattgcctgattgcagtaagatgcaataaatatatacaaaagtttaatttattactaagaaaagtgaaaaaaccactaggagttttagaaatttttcatatcaaattttaaacattctgggaccattatttccctgtgttgtggaggtgacaaaaaattgggattcttttttcaagtgtggg

SEQ ID NO: 681002 - DNA, 1594 bp, Homo sapiens
gcatccagccagggcctgctggggcagggcacactgtactccaaaatgttacctctcccgacaggactgtgggtggaaatgctttcctccccttccccgcctcttttctcttctgtgactttctagtatttcttccctaaaggcagctgactatgggagaggtcttcagctcccctccaggctcccagctctctgccaaggcctactcctctgcggctggcccaaggaattcttccatgacacggccccccaacccatctcttcctccttctgtccagtcagtattttaaggcacctattctctgggtgaataaggacaaggggtccagccccagggagttctccactctggtggaggacacagcaacagccaacatcagccaacaacaatcaacaaaaaggataagattacaggcagggccacggctgaaaggcagtgatcagggcgcctcctctacgccgtagggtggaactgccgcctccactctgagacctccctgctggtgcccagctcaaccccaggccctttccaagaagccttctcagaaccacatgctatagttgaattaaatacgcccgtgtctgtctccctgcatttctggagggcaaggtctggttccaccgcacctcttgccctgtcccccgcatgggccctgcagacaggatgcctcctgctggaccgtcagctccctgagggcaggcaggctcggtctccttgcatcctgaagaggaacagctgtcgctgtaaaccttaaagaccacagcaagaacaagaatggtcaacacaaaatcttgtaacgcaggtgccaatactgcaacaaagcaaccaaaagccagaaggctgcacaccactgtgtgtgactgtgtgagaaggcgaccaccagtgattttttttttttgccctgtattttgccaattttctgatatgttcttacatcactcttataattaaaataagtgttttatgcagcccgttgtcccagggctctggcgttctgccccactgacctcgaggactcagctgagactggggattcragactcgggggacttaggatgccctgaaggaaggaaggagcctgcagcatctggagcactgcaggcagcagaagcaagagccgctgcctgtggggaagcaggcgggccgggccaggccacccgagctccagggccagccagccatgagactaggggacagaggacttggccaggacggactttcccagaggcccaaaggataaaaacagacctcctgacccaaatgcatcataaagccaaccccgcagaagcccctgtgatggccgggttgtctggcccagaagttcccaaagaccctgagttccaaagatttgaccttggtaagatccttggggctaaagtggacaggtcccagtgtgggggctgagcctcccactgcatgaagatggcataaacctctgggggtggtgctggtggcctgggctgggctgctgtggggggcctgtctgttccagaaggctgaggagcaggtgagagggggcagctgctcgaggctggacggtggaggctgaggaaccccagcacctcaagaatagagaagactttcatccttgcc

SEQ ID NO: 681003 - DNA, 1041 bp, Homo sapiens
cctacctaccatgatggaaagactactcatattataaacagtttagttattttattttatatttctgtaattatatataaatggaagaggtctgtagatttttaaatcttattatattactatctttctcgtttttttggtatcagagtgatgctaacatcataaaatgaattttgcagttttcagtatttgtytatatttaggaataatttaaaattaattggcctttgaagatcccaggatttgttttgttttataggtaatatttttaacactttaaccacttttaatatcttatttaaaagttacataattttgtctttggctaccactttagttatttctttccaattgttctcagataattttgtcaatttatatttttccaaaatattttcatttcactgaggtttcaaacatactgcaacataaggacacaattatcttataatttttattatccctgaatctactctaaaactcatattaccatttctaattttatttgtgttatcccctccctttattgtaattggcaaggttttatcaattaataaaatagctgacaaaataaataagttaataacattattatatataatatatatcacatattataaatacaaatatataataaataaatataatttatatgataaatatatcaaagtgaaatttaaaataaaatagattttccttatacccagagactgattcatcacttttactatctttacatttctcatttctgtttctatctttagtattttcttcctgattattttatgtttatttaatttcgagagttttacttttaatttatttgtagttatcctttctttattcccccaaagaaataaaatatttaaggctattacttcacctctgaatatagcattggctgagtctcatagtcttgatatgtagcattctcatgtttattgcttattatatattatatattatttattgtacacattttattatatattgcttgttgtgtacgttattcctcatgccctttgaacaatacgttagcta

SEQ ID NO: 681004 - DNA, 599 bp, Homo sapiens
taggtggtcacgaaagtaaatattatattttgctgaatctgtatcatagattgcaagaggtaccattattttatgtatcataaagaaggaaaaaaacgctacggattaaactaaggcatactatcagttacaaaacataataatttaaaaaatattaaaatatgaaaaaaatttgctttgggtcacagaatcacccatcaacactgcagaacatttaaaaggaaacaacaaaatttgtatataatactgcatttttatagttgtctgatgcccattttttgacttcaacacttttgaaactggaagctatcttataattgatatcaaatggaagatcagcaagctgagttgtgggtactctgggatactggggtataaatccacataaatgtgtttcagatcttctcctaagataattgtgtracagtgaggcagtaggacacaaagctgctgtgggtgcagaacactgcccaggacagaccaggcaatgcaactgaaacctagtgtgatgaatttttatgttaggaaacatttccctttggtgccaaacatctatcttgcaaagctttcagctcacttttcagtaaagttgtttacct

SEQ ID NO: 681005 - DNA, 1937 bp, Homo sapiens
ttctccctttgttacaactgcgttgactgttttattcctggggaaattgcagtctggtggtagatgtcacccatccgaagggattgccatcacagtccatctccagcgctaagagtatgataggactctgtgctcggttgcttaagagtagtgggtaagctctggcctccatgagtgctaaatcagggtgggctggtcttgctacacccactttttccccccaccccatccccgttggtttgggctttctgctttgtcgtgtgctgtggaccattctggcagaaagctgaccatgggggacattcagatattcttcctttcttcccgccccaagcactttaggctttcattcatttcttcagagtccttcttatcatctcaatctctctgttctttcttcttcctccccctcccttcttccctccctactcctctccctcctcccctccctactcctctcttgttttatacattaacaaaaattatttatgttgaagtgggcagatcacttgakcccaggtgtttgggatcagcctgagcaacatagtgagaccctgtcctacaaacaacaacaaaaaaaacttagccaggcatagtggtgtgtgcctgtagtcccagctactctgagggctgaggcaggaggattgcttgagtccaggagctggaggctgcggtgagctgagattgtgccacgacactccagcctgtgtgacagagcaagaccctgttgtcaaaaaaaaaaaaaaaaaaaatttttggtaaaatacatataatttaccatcttaactattttgtaagtatgcagttctgtagtgttaagtgcatttacattgttgtacaaccaacctccggaactcttttcgtcttgtaaaactgaacctctgtaccgattaaactccctactcctccttccatgagcctctagcaaccgtcattccattttctgtctctgtgaatttgtctactctagatacctcttctatgtggaatcagacagtatctgttttatttattctggcttatttcacttagcttgctttcaaggttcatccatgttgtagcatcttcttctctctctctttttttttttttgttttgagacggagtcttgctctgtcactcaggctggagtgcagtggcgtgatctcggctcactgcaacctccgcctcctgggttcaaacaattctcctaccttagcctcctgagtagctgggattacaggcatgcgccaccatgcctggctaatttttgtatttttagtggagacggggtttcaccctgttggtcaggctggtctcgaactcctgaccttgtgatctgcccaccttggcctcccaaagtgctgggattacaggcgtgagccacgatgcctggcccacttctctcttttgtaggtcctagttcacatttggcaggtgagatcttagaaaacagtccttttcttaatttatttctcattgagatccacagaaagttcagctggtgaatacaggtgtgtgtcttggcggaaccttccagggtcttggtttataatccaggtggttctcacaatggttaaggttcctgggtatagagaacacatgatggatcacgtcatcttgctaagagccaccctcaggctgtccgacctgttgactcaggatatccccttgggagctggaggtagtgcagctcagagtgtgggatccgggaattactgagggctgagtctctggcagccgccgggtatgctgttcaggatggtatcactcacctcttgggatttgcaggctcagcgctgctcttaacgatcagctggatcaatgttctcaaatgccaggtcgcactccaccttgctggccggcaaggtcctcttaacctgttggtctgctttctttgttacaaagttggtctggcttatactgctgaaggtcatgggatttttgctagcatatta

SEQ ID NO: 681006 - DNA, 1937 bp, Homo sapiens
ttctccctttgttacaactgcgttgactgttttattcctggggaaattgcagtctggtggtagatgtcacccatccgaagggattgccatcacagtccatctccagcgctaagagtatgataggactctgtgctcggttgcttaagagtagtgggtaagctctggcctccatgagtgctaaatcagggtgggctggtcttgctacacccactttttccccccaccccatccccgttggtttgggctttctgctttgtcgtgtgctgtggaccattctggcagaaagctgaccatgggggacattcagatattcttcctttcttcccgccccaagcactttaggctttcattcatttcttcagagtccttcttatcatctcaatctctctgttctttcttcttcctccccctcccttcttccctccctactcctctccctcctcccctccctactcctctcttgttttatacattaacaaaaattatttatgttgaagtgggcagatcacttgatcccaggtgtttgggatcagcctgagcaacatagtgagaccctgtcytacaaacaacaacaaaaaaaacttagccaggcatagtggtgtgtgcctgtagtcccagctactctgagggctgaggcaggaggattgcttgagtccaggagctggaggctgcggtgagctgagattgtgccacgacactccagcctgtgtgacagagcaagaccctgttgtcaaaaaaaaaaaaaaaaaaaatttttggtaaaatacatataatttaccatcttaactattttgtaagtatgcagttctgtagtgttaagtgcatttacattgttgtacaaccaacctccggaactcttttcgtcttgtaaaactgaacctctgtaccgattaaactccctactcctccttccatgagcctctagcaaccgtcattccattttctgtctctgtgaatttgtctactctagatacctcttctatgtggaatcagacagtatctgttttatttattctggcttatttcacttagcttgctttcaaggttcatccatgttgtagcatcttcttctctctctctttttttttttttgttttgagacggagtcttgctctgtcactcaggctggagtgcagtggcgtgatctcggctcactgcaacctccgcctcctgggttcaaacaattctcctaccttagcctcctgagtagctgggattacaggcatgcgccaccatgcctggctaatttttgtatttttagtggagacggggtttcaccctgttggtcaggctggtctcgaactcctgaccttgtgatctgcccaccttggcctcccaaagtgctgggattacaggcgtgagccacgatgcctggcccacttctctcttttgtaggtcctagttcacatttggcaggtgagatcttagaaaacagtccttttcttaatttatttctcattgagatccacagaaagttcagctggtgaatacaggtgtgtgtcttggcggaaccttccagggtcttggtttataatccaggtggttctcacaatggttaaggttcctgggtatagagaacacatgatggatcacgtcatcttgctaagagccaccctcaggctgtccgacctgttgactcaggatatccccttgggagctggaggtagtgcagctcagagtgtgggatccgggaattactgagggctgagtctctggcagccgccgggtatgctgttcaggatggtatcactcacctcttgggatttgcaggctcagcgctgctcttaacgatcagctggatcaatgttctcaaatgccaggtcgcactccaccttgctggccggcaaggtcctcttaacctgttggtctgctttctttgttacaaagttggtctggcttatactgctgaaggtcatgggatttttgctagcatatta

SEQ ID NO: 681007 - DNA, 1417 bp, Homo sapiens
gctcttaaatctaaagactctttcttacttgggttttgtaatagtatttatctcaatgtagatcattatcctgtgggcaaaattgtcattatactgagagccttagttaggaaagaaatgctcctgggaatttctgttttacattttagaaatctgaagttggtgatagcgtatttcaagagaaatagtattctttgtaatctgtatgaaatttcttttcttgcccatctataccccctctgttgccttaagccatttttttaggaagaggatgagaatgaagaggtctcaagtacctaacttagccatagttgtgggtagatccmactcattgaaaatacactgcctcgaggatgctgtcagtctgctgatgactatggcgaagcaatggggctacagctttctccactctggattttactttaagctcctgttcctaaagtgaatacacagaatattaagggaaacttaagaaattcatcgtaggcttcaggtagttgtcctaaatctatatatacaagatttgcatagatgtaggcaagatagcttagctacctgactgcttcttgtcacatcaggattgatgacttggagtaggtcttggatgtggaataggtgggtgtcgcacatgaatatcttatgcttcattctctccattctctgcctctttccttcagtcctttctctttaatctctttcctcactaaccatccacacaaatacacatgatttcccagcccctctgttgctaatcatcccatgtctttccaattttgtagctgaaagcatctgctaaaagcactcaaattttttttcattgacttgatggttttccactggtttcgcagagagatgaagggatatgccagagtttttctatcttctggatgtgttaggggaatataatgacaattgtgtttcccatttagagaaaataactagttgatagggttgggtaggtgcttttactctagacaatagcttattttcacccaaagtattctgaaagcaaacacccttcccactgtgatgattcatttatttctaaaggtccccatctggcctctgtgagaaattcatattctttctattaacataactttgaccttatttgtaacaaataaataactaataactctggctttattgtaacacaagggtatccgcctttccctgccctgggctatgttaaaaattgtcttttattaacaggcaatgaaagatgctatgcctatttgcttctctatgattcctagatttctgtctgaacaataggagcgatgggaaagaaattcaattcacgaaatcacttcttacacaataatttgtccaggagtgtcctgaaattagtaagttagaagacatatagcctgtaagagagcctagctttcctcattcctattctaatcagtatagg

SEQ ID NO: 681008 - DNA, 2857 bp, Homo sapiens
cgcaattataatagcctatgtttaattaaaccacaaattaccttaaaatgtttcacaaatactttcaatattatgttttattataccaattcatgaaacccagtgacttctgatgtcctctttgaaagtggatatttagtcttaccctatgcatcatcaatgtagttcattgggtacccacaatgtaccagacctaacttgccattagctgtggaaatagaatgattactaagataaatggttgccaccatcacagaatttatagttaagtacagaaaacgaagtaccatagatcctgtgacatatggtgctacagaagtacatacagaggccctaacctcctctctttgggccgagagctgggttaagggcaggcagcaggacagaaaagcttccaagaagagagagttcagcagaagagtaaaagagaaatagaagttacccaagtaatgaggaagtgaagcgtgttctaagcagaggaaatggcatttcaaacttcaaagtcatggaatcttactacagtaaaacaaaactgcatttcaattagtttgttgtttacctggatatattaactggatatatgctgcatctataccatgtgtattcttggcaaaacaggtaaatggatgtttataaaatctactttcaatttccgatatattaagcactgtgatgagggtactccttcttttgtttgcaggattttccacactattcgagagagagagtaaataaacttgtgtaagttaattgcatcaactacaaataagacctgtataccctgtgtatttccttatttgtgacaaaattgccactgaaataatcaccctgcccaatcacagtcacaacattcagactgctggcaacactaatctgagattttataaccccaagaccactgtcagtaacaggctcagtagcagagaaagcaaaaaaattaccacttccaagaagaaaaatgtagacaaatgcattgtgttctccatggggcacagaggagacactaaacaagaggagattggggcagatgacaaagtgctttgcaggtgttgtgaaggagaggtcatgggaagccaggagatccttgtcccatagatgagcagtaggaaaccagtagaggctttcgagagcagtggattgcctgattcttgagctcattaatgagtctcttctaagctacttgaggaatatgaagaataatgaaagataattgcttcgttgaaatgttgcaacatgtataacgtaagagaaaggcttctaagtggtctgtaatttgcaccacaatgacaagtattttttaccttaaatgtacaagatcttataaattctacttagcttagcaaaaaaaaaaaaaaaaaaaaaaaaaggcagcaaaggttaggagcaactaacacttgcttttaaactgaaccgacaaggttatataaaatatcacgtgggatttaacaycaaaatgtgaataactcttagcatacatacctgtaatagtcttcccctagcactgggtcatcttcatcaattactgacccattccacttccagtaagcaatgtcactcaactggccggtgacattacagatcaattgtatctgggatcctgcaaagaatgtatttttaatcttaacattaattgattttttctgatctatctagattaataaatggctattgaattaaaattttagatatagaaatgcacaaagaaaaaggaaaattaccctaaacccaccacccagagaaaaccaccattagtaaccttatgcgtctcattccttatcttctctgtgaacatgtgcagtttttgaaatggggtctttttgcctactattttgtaattactgtggattgggaatttgggcccacatgatttgtcttccaaaatagactctgtcatggctgcttagcattccataatacatatacactatgattaactatttcctattgatgaacacaatttcctaatttttcactattatgattaatattttaatgaatagccttatttgtacacatcctgaagtattaaaatctagaagcaagattgaattaaagaaacatattttaaaagctaaccccctctctttagtgaggctgtgtcagtctaccctctctccaatagtgtatgtgagcacgattttccccaaaaccaccagataacaagtgtttttggttagacattgccttttgagagaagaaaatgtcacttaagttttcatctacatttcttgaattcacggtgaatcaacatgcttttcattagcttggtgctcatcggccttcctttttaaaaactgttatccctctatccattatttaattccatttttaaaaatgagacacagtctcgctctgtcactcaggctggaagtgcagtggcacaatctcggctcactgtaaccttctcctcctgggttcaagtgactctcatgcctcagcctcttgagcagctggaactacaggtgtgcaccaccacacccagctaatttttgtatttttagtagagatggtgtttcaacatcttggccaggctggtctcaaacacctggcctcaagtgatctgtccaccttggcctaccaaagtgctggaattacaggcttgagccaccacgcctggctggatgcatgctttaaatttcagtttttctgagattaatattcagggttttggtttttttagttttttcctctcttataaattccacatattttcaaagtttttctaacatattttatggacacttctaagacatttactggtgcaaatggcatttgtttcctattatgttttctagctggttattgctaaacaagtcttatattttagaacattaattctaaatgttaatttattatc

SEQ ID NO: 681009 - DNA, 612 bp, Homo sapiens
taaagcatctcctatggcccatgtggcaggacattttgaaagactgtccattataaacattaaggctaggcttgaaagaagaagtattttatgttttttttccttgaacctccaaagccaaagtattggacaacttagaccataaggtttacatcataaaccacggagtacagaagaatgtatggtaatgtaaagctatttgtttttgttcccactccaaggaacagagttgaccagcaggtgggaaggggagaagcagagggagggagctgctctttactagaccctgaaaggtttctgaggagtgactcagagcttccactcttcagcaccacctaataagagaaatcctggtgtgttaggccattcctacattgctataaaaaaatacctgaaactgggaaatttataagaaaagagatttaattctctcatggttctgyaggctatacaggaagcatggcactgccatctgttgggcttctgaggaggcctcaggaaactaacaatcatgacagaaggtgaaggaggtgcaggtacgtcacgtggccagagcaggaggaagcgagagagaggtgcgggaggtgccactcacttttaaatgaccagatc

SEQ ID NO: 681010 - DNA, 1090 bp, Homo sapiens
aaattcagagcaaaagcatccagttctctcgctctctcagcagactttctgagagacatcaaaagaggtcaaagtcctcagaaattaggttggcagaagttactgtaagaggtgactgctttggcaatgagtaaccaaaaaagacgagaggctgaacccaaaggggcagaactggaaaccagcagattttgcaaagggtttccttaaggtaaattaagacaacaaaatatacctttgcctattatcagagtagcacacttttcttttatttattrtgatactttaagttctagggtacatgtgcacaacatgcaggtttgttacatatgtatacatgtgccatgttggtgtgctgcacctgttaacttgtcatttacattaggtatgtctcctaatgttatccctcccccctcctcccaccccacaacaggccccggtgtgtgatgttccccaccctgtgtccaagtgttctcattgttcaattcccacctacgagtgagaatatgcggcgtttggttttctgtccttgtgatagtttgctcaggatgatggtttccagcttcatccatgtccctacaaaggacatgaactcatcctttttcatggctgcatagtattccatggtgtatatgtgccacattttcttaatccagtctatcactgatggacatttgggttggttccaagtctttgctattgtgaatagtgccacaataaacatacgtgtgcatgcagagtagcacacttttcaaaaaattataaaacccaatgctgatgagagagttggaaaatgttcatacagtgctggtgggcacataaattaattaaactttcctaggattaatttagcagcagggatctagagtttttaaaatgcccatgccctttgacccctaccattctacctctggggatttatctcaaggaaaactcgttgagataacctttgcatcaaggagatgcaaaggtttagctacaagggtgttagttgtagtactgttaataagagaagaacatagttgtagtactgttaataagagaaaaacaatcaactacctgccaacaggatttaataaactatctatgcaat

SEQ ID NO: 681011 - DNA, 1090 bp, Homo sapiens
aaattcagagcaaaagcatccagttctctcgctctctcagcagactttctgagagacatcaaaagaggtcaaagtcctcagaaattaggttggcagaagttactgtaagaggtgactgctttggcaatgagtaaccaaaaaagacgagaggctgaacccaaaggggcagaactggaaaccagcagattttgcaaagggtttccttaaggtaaattaagacaacaaaatatacctttgcctattatcagagtagcacacttttcttttatttattgtgatactttaagttctagggtacatgtgcacaacatgcaggtttgttacatatgtatacatgtgccatgttggtgtgctgcacctgttaacttgtcatttacattaggtatgtctcctaatgytatccctcccccctcctcccaccccacaacaggccccggtgtgtgatgttccccaccctgtgtccaagtgttctcattgttcaattcccacctacgagtgagaatatgcggcgtttggttttctgtccttgtgatagtttgctcaggatgatggtttccagcttcatccatgtccctacaaaggacatgaactcatcctttttcatggctgcatagtattccatggtgtatatgtgccacattttcttaatccagtctatcactgatggacatttgggttggttccaagtctttgctattgtgaatagtgccacaataaacatacgtgtgcatgcagagtagcacacttttcaaaaaattataaaacccaatgctgatgagagagttggaaaatgttcatacagtgctggtgggcacataaattaattaaactttcctaggattaatttagcagcagggatctagagtttttaaaatgcccatgccctttgacccctaccattctacctctggggatttatctcaaggaaaactcgttgagataacctttgcatcaaggagatgcaaaggtttagctacaagggtgttagttgtagtactgttaataagagaagaacatagttgtagtactgttaataagagaaaaacaatcaactacctgccaacaggatttaataaactatctatgcaat

SEQ ID NO: 681012 - DNA, 1707 bp, Homo sapiens
ttggagtggccccctctggtcctcatgaccaggaatcctgatgtttttgacattgttcctgttcgttcataaaattggctgaggtccaaacctcagccttgagtacagtccctgagaggaagttgttcttcatacacaaagctctggtttcctaacatgcttagtgattagaaaaattttaaaactcttaacaatctctgagagtacccagccagcgaggttacagcgaggctagcagctctcatttgcactgaccgagcaacagtctacaacatctcccagcaacaaatagctcagtgaagacagccctgctgatggcatgctcgcttgaaatatttaaaaaagagagagaaagagaaatactatggcacaataagactctctgtctccagggcgtttgttctgttttgttttgtttgatgaagcagtttgaataagaaaaatcaagaaaaccactacttccgttatcacctacctcatgttaagtgcatggaattatcatgacactattcctaagaaactacttttactttatgctgattctgaagttcttataccaagtaaattaatgatgtttgaaaacaaaaagaaagcaaatgtcccacctcaatccaaaacattccaagatgcactatacatccttggctttagaacaaacaagataatcctttttgagaagattatcagcaatttttttctcttgtgtttttctaacaaacaaaatggatcacatggcaaatatatctccagaaataatatttaaattaaaggattagatttatcctttaatttatcctttaatttatatttatcctttaatttaatctaaattaaaggattaattaaggcaatgtataggaagggaagcagagacaaagatagttataaagccaagaaggaacaggagaacatttgaagaaggaaagggaggacgaggaaatgaagaaaacctggaagtgaatgccaaggtgttaggttatttgcccacatcaactgacttagcagctccagaggtgggacctaggaatctgtgccctccaggtattctgaggcaggctaacatttgataaacaataaacgaaaatgctctgtagcccatgttttaacttctttaaaagtagaactgcctttactctctttcaytcttccaaagcatcccaggcaaatgggccattgataatgatgactgatgactgggtagttcatctcacagccaccaacgtaatcaagagaggaagccactggagttgctcaaccattaagcccaaatccactatcaaactgaagccattaggacttccagtgtagcctgcaacacatgtgtttctctgatattcagatgagaatcaagtcgccattcaggcctaattcgccttcgccttctaaacagggtgggggcaaatcccctagcccttttctttgtcaggaagctggatattcactgatagatggggtgcttttcaaaccactgaccccaggacagggaaggagctgttatttcctgtcccttgtacagttagtctaactcaatcctcattcgtactctagaatgaaaacttgatcatttgtagagcaatgcctgaaaccaccgtggagccaggctggtagatgccctggtacattgcaggttggaagattatttccatggatcttgggagagcaccagatgcaggccattgggtgtggttcaaactcttccatcccagg

SEQ ID NO: 681013 - DNA, 1646 bp, Homo sapiens
ctcttaatataaaactcaaaaacaggcaaaaataaattgtattattaggactatcagcatagatagaaaatcaaagaaacgactttcctaaaagttggggggatgattatcaggaggggaggatcagggaagaacatccaggagtttttcaggcaatgcatttttcttaatccaggtggtagtttcatgagtgtttgctatacaatgacttgttatgtgatgtagaaattctgtgttcctttaccatatatgtgcatatgttataacacatatatgcattatattccacaataaaaaagtataaaagaaaattccagctgattcttacaacagtcgtggaaggaagtcgctatcctcctcatttcccagatgaggagacatgggcacagagaggttgagtgacaatgctgtcctcacccagctcctaagtggacaagataggatctgagcctgaaaacctgaccttaaagtgtagggcaggagtcaccctaccatccagctcgttagtgggaatgggcaggaggggaggaatccacagagcttggcaactcattgggtgttggcatgagggaggataagggaaggcataaaatgaccccagattttgagcctgaacaacgtggaagatacaggagtcccactaacaaaggtaagaaaaaacagaaccaggaggttggagagtttaaacatgctttctgacatcagccagtgtatctgcagtcccttacacagctggaaacgcagagctgtcatgggggaagacagtatacagctcaatatatggaacctgtttgcacctgctcaggaatgacagttgatgccataaaggggaaagagatttgagggatgaggacacagaaagaaaagcagcacagatgatgaacctcttagaggtaccagagagagaragatggcaaacacaagactgactgggggaaagtgatggagaaggatgctttatgacaaagaaaagccagtgagaagagaaaaaatgggcagtggtgacagatgaacccaagggtccttccacatgttgcaacccaagaaggattccccatgtgctcagggtgagtagagggtgctgtgctcactcacagttaaggcagctgaggccagaacgacactggccttcaggacacagaagtgaagcagagaatgtgcacacccagagctgcaagctgccacgcacagatccctattcactgcaattctaagggaggtaacgggcacttaggaggccaggagcttggcaggggcaaaggcacgattgctaactccatacagcaaccactgtgttttctgttaggttctagaaaaatatttggtggggctttagcttgatgtatgcaagcataggtttaactgatcattaaaggacatcagcaaattcaagtcctctctcttgcatgtagctagccacacacgtgcgtgtgcaaacacacacacacacacacacacatacactaatgatattaatagaatcaagaacaactgtcttggtaaaccacacagcattttgcaaggtatttcacacacctcccctgataggttacgaatttaaagttgttctcctgattctggcttcaccctccactatcttttcactgactttattacttccaatgcataatcaattagttctgtac

SEQ ID NO: 681014 - DNA, 1646 bp, Homo sapiens
ctcttaatataaaactcaaaaacaggcaaaaataaattgtattattaggactatcagcatagatagaaaatcaaagaaacgactttcctaaaagttggggggatgattatcaggaggggaggatcagggaagaacatccaggagtttttcaggcaatgcatttttcttaatccaggtggtagtttcatgagtgtttgctatacaatgacttgttatgtgatgtagaaattctgtgttcctttaccatatatgtgcatatgttataacacatatatgcattatattccacaataaaaaagtataaaagaaaattccagctgattcttacaacagtcgtggaaggaagtcgctatcctcctcatttcccagatgaggagacatgggcacagagaggttgagtgacaatgctgtcctcacccagctcctaagtggacaagataggatctgagcctgaaaacctgaccttaaagtgtagggcaggagtcaccctaccatccagctcgttagtgggaatgggcaggaggggaggaatccacagagcttggcaactcattgggtgttggcatgagggaggataagggaaggcataaaatgaccccagattttgagcctgaacaacgtggaagatacaggagtcccactaacaaaggtaagaaaaaacagaaccaggaggttggagagtttaaacatgctttctgacatcagccagtgtatctgcagtcccttacacagctggaaacgcagagctgtcatgggggaagacagtatacagctcaatatatggaacctgtttgcacctgctcaggaatgacagttgatgccataaaggggaaagagatttgagggatgaggacacagaaagaaaagcagcacagatgatgaacctcttagaggtaccagagagagagagatggcaaacacaagactgactgggggaaagtgatggagaaggatgctttatgacaaagaaaagccagtgagaagagaaaaaatgggcagtggtgacagatgaacccaagggtccttccacatgttgcaacccaagaaggattccccatgtgctcagggtgagkagagggtgctgtgctcactcacagttaaggcagctgaggccagaacgacactggccttcaggacacagaagtgaagcagagaatgtgcacacccagagctgcaagctgccacgcacagatccctattcactgcaattctaagggaggtaacgggcacttaggaggccaggagcttggcaggggcaaaggcacgattgctaactccatacagcaaccactgtgttttctgttaggttctagaaaaatatttggtggggctttagcttgatgtatgcaagcataggtttaactgatcattaaaggacatcagcaaattcaagtcctctctcttgcatgtagctagccacacacgtgcgtgtgcaaacacacacacacacacacacacatacactaatgatattaatagaatcaagaacaactgtcttggtaaaccacacagcattttgcaaggtatttcacacacctcccctgataggttacgaatttaaagttgttctcctgattctggcttcaccctccactatcttttcactgactttattacttccaatgcataatcaattagttctgtac

SEQ ID NO: 681015 - DNA, 950 bp, Homo sapiens
tgaaccccaggtacaagaaacatgaataaaattgcaccaacaaacatgataatcaaattgcttaaaatcagtgctattccttggatatgaatgatctatcaatctgtcccataacttgccctttggacaggaaaggactaagctaaagacacagtatctctggaattttgccaggatatgaagtttagtgtctgctccattccagactttttatttttttcttttttgagatggggtcttgttctgttgcccaggctcaagtgtagtggtgcaaacatggctcactgtagcctcgatctcctagactcaagcagtcctcctacctcagcttcctaagtagctagtactaaaggcacatgccatcatacctggctaatttttactttttttgtagagacaaggtctccctatgttgcccaggctggtcttggactccagggctcatgcagtcctccggcctcggcctcccaaagtcctgagatcacaggtgtgagccaccatgcctggctaagactttttaaatgaatcagaccagccctaacacaagggattcagtcctagacaatagcagctgtaaccagctttcatccagatggcctgccagttactgtccagagttgttccatttctcttctttgcctgcctggcttgatgatccccttgaattagaatctatgctcttgtccttgcaccatcttacttccataacccatttggacaggattttctagctttgggtcttagcactctctttagacattatttggtaaatgtcctctgccccagacctcaggacatataccacatggaccccaccaccattcctacccatttttctgtgaaaattttycagaaataaatttctgatcatgtggccaatcaacccactacaatctcaaccaagactgcatatgcaaaaccactttgttgttttagattttgtcactttt

SEQ ID NO: 681016 - DNA, 673 bp, Homo sapiens
ttcctcttttcctaattgaataccctttatttctttcaataacttctttttcttaatttgaagtcacagctgatatgttaccaaatatgtaaggaaataaaattgaagaccatataagtaaagatcaaaatgagtttgaaaaagaaaaataaaaatttatgtatgtatgtatttatttatttttacctgttcatacataaatcctgttggatgaggacataatgtggcatcttctgttgaagaggacttaygctcatctaaggaatcttgattatctggcttcaaattcaaaatatttaaaaagattgacaattttattatgaaagtaactttataccttatatttaattttcttcatttagaataaacttctaagaaatgcaaaaaagctggcatctttaacatcttcacaactcctgcaaatgatgtataagtcagggaaaaatctgaattattctagctgtgtaatttctagaccatttcacatcagtcatttccaaaagaaaacctactttttaaggtcaaagaaaccaatgttaaccatttaataaaataaatatttttaagggaaatattaatacataaacattggcttacacatttaaaaatgacttctctttttcccagatttatctgcttcctttgggtgcttcccctcgtcccctcatgtgga

SEQ ID NO: 681017 - DNA, 1779 bp, Homo sapiens
tgaggatattgtggaaatttgaggcagatgcagagcctgctttgtgggggtggggcttccttaggccaggacactaagcttctttagggatcattccctgggcaacctcaatcccttcttaaagagaagaggaagagattttttatggactaatgagatttttaccttctgtttaagtttattaaatctgaaaaactttcaattttagagcaaagatggattctctttcatcacctcttctagggattttttttttaaatttgacattacctgaccatatagaagatattctcaaatgctcttgtgaaggggagagagagaactgttcactttctaggctggaaaaagagcagctgccaacacaagtgcattaaggtgcctgcccatggttatttaacctgcgacaatttctttaaaaactcctggaaatgtgtggtgagaaatggcgaaacctgtcattactcaaaccaaaaatgaaccatgattccatcttctgagggctgccaaacagcaatagtagcgaaataaaaatggatgtcagagctgggagccttggctaaggtgttcagagggaggataataagatacccaggaagaaagaggaaggttagacttcttgacttattgtttccttacacatygtggtgccagcaagtacttgtgatcttaggggttcataaaagtattctagaatacactttttattcccagatagtgcagtaaatgtcccaggagaattgataaatgtcaaattgggcagcatttgaagctcagtctctagggaacattttctttttcaaattcatatagggacacaatacagatttccatcttctgtctctctctttctccccgtttttctccccagtaattccaaggagaaaaatccttgatagaatgcaataagttaatgttctgagcttgaatagtgcttcgatttgcttttccctccctcagtcttgtcttcggagttatataaaacctgacataatcatttttgttcatcaagctttaaattaagtgcaatttatggataattgcaataatgtctctgattcctttgtgctgaaatcaccagagtgctgcccaatagccaatcctgaagattttggattgctccaaagatcttttctcctgccctgtttccttaaaaggatagataaagagaaatcctgactatttactggattccatgccatatcctcctacccctcagtgaattcaaaacccagcaacagtctagcaactttgcaaatttttacttgccacagttacctcaaccaagtaaaacttgatgctggaggatgggtgaggaaggaatagagaagattcttagattaattgagttcaacctactaaagcacccaagcttacatggtttttgaattattatttgcaaatctataccccaccaagcaaccataactatattatcaagatggaagcccagcagttccaatcctaagcaagtacttgtgcttttttaaaaaaggagaagtggattatttgtttggttaattagctgttgcctcctcaactgcttagaattttctcattgcactaattcaattatctaattaacaccaagacgatatggttctgcaatgcatttcacttatgcttcatgtgtattctctcatttctttatcgtaactgtacataggctagctttcctattatcttattatccctattttctacatgagaaaaacaaggttcatagcagtaatgcaaattaagacagagaccaaagtttaggctttgacatttgattctaca

SEQ ID NO: 681018 - DNA, 1676 bp, Homo sapiens
ctggtttccagaggtacagtgctgttcagtgctcttctggaggttgtagtatgaagaaatgacaaagccaaaaaggcattctgacctagggagactatctttaaagcaaaatataaatgtagggcaaaaactctgcggtctcaggaggattggatccaggggaaaatgtttaaaaggcaaacgtttagaatcaattatacagcttcagcaatggtttgctattgtcttgctgtctttttgttttgctttgtgtagtgttcagaatatctgcatcatgtagcatctttctatttttaggagtctttaaactcctttattctgaggccccagaatattctcatccaccacgtactttcacgtggagatgactgacttcatctttgacaatggcagttccctaaccttgatccagcacgggagcaggaattayggcgaaaatggccacccaaactgcacccagtgggaaaacagcattaactcagcttttaaaaaagtgtcaacttggaaaatccaagacctagatctgatgcttagggacccacaatgccaggcagcagtctgggagatgtcacttctggagcttctaatgagatgcaaatcacctagtgaactactggggagctgggaaacaatgtcctgggtaaaagcagataaaaatggaatgaaagaatttctttgaagattggaacgacattttaagtgcttgcggatatgggacaccagatagtgttggttttactaagctaattgtgacggggtctttgattccctgcagcaggggaccctggggcactcgtctccagctctgcctcactctttgaggagctagttccagttctactgtgagtgtgcaaggggctggtcagctgtagcaaaaccagcactggacatgggggatcagaagaccccggcacacatagttcaagttgtgacacatattggtatgtgaccttaagtgaatcccttacccctctgctgccatgttttatgtgtaaaatgataaagagaggggtggactgaggtagtaatttttaatggagaacattggtgtggcaaattacacatgttctggcctgaagattctgagctgctctccttggagtcacattctttcccagtgtgtgaacatctgtgtgcagtgagagacatgcctgatggggatctgttgcctgaagccagtgtgaaggcaggaaaagggtaagaaccattagcccagaggccctttaaagtcccttccaactttaagatgctgtaactccagagtaatcgccagttaacctcttggagcctcatctgtgaaactgacataaatgcttttgcttttcagcttgttggaatttaaatacgaccaatcaaaatgtgtttaggcttcaaaggaaaaagttctccataaatacaccagaatttcattctaacatgattcattcattcaaagagcacagctgcacaaggtaggttcccctgaaccactttctgggtcatttggttactgatgggctaaaggacatcattaaaacctcacctcagcctttgcccagctgttagcaaaacctgcagtgtatagattaatattgcacagctgtacaaatccccacccaggtccataaattataaaatatttttacacatagagagggcagtcattagtatgaatgacatgatttgggggaggttat

SEQ ID NO: 681019 - DNA, 617 bp, Homo sapiens
tttggaaacacattaaattaacttattctctatttagaaacacattaatctttgaatctagccagtctcaccatgcttaccagttatccacagcactaggcccacaggatgccaacaggtgccagttacaagaactaggaaatgagaagtatcaggtataggtacaaaacttctttggggtcggcatgatggctcacacctgtaatcccagcactttgagaggccgaggcaggtggatcacctgaggtcaggagttggagaccagcctggccaacatggtgaaaccccatctctgctaaaaatacaaaaattagctgggtgtggtggcgcacacctgtaatcccagctacttgggaggctgaggcatgagaatagcttgaacctgggaggtggaggttgcagtgagccaagtctctagctcagtgcactgagctagatgcgctctagcctaggcgacaaagagagagattccatctcaaaaaacaaacaaacttctttgtggttggcatgatggctcacacctgtaatcccagcactttggaaggccaaggcaggaggattggttgaaaccaygaatttgaaaccagcctgagcaacatagtgaaaccccttctcta

SEQ ID NO: 681020 - DNA, 642 bp, Homo sapiens
atataatcttttgtgatggtgttttgacaatatatgtaaaaatttaaatctatatgaatttgacctcaaaattttacttctaggaaaatatactaagggagtaattgcttatttgttaaaataccaatcacaagtggtccagagcccttaatatgtatcattgtttatatttattaaaagttgataataccttaagtatttattaattaggaattagcttaataagctttggtacatgcatataattattattaactcattaaaaatgagtattagatccacatctattgacatggaaacctaggtacaacatttgttcagtgaactaggcaatttataaagattgcaaaacaatgactatactttgcttttatgtatcatatgatgcaatgtttttgtgatttttttgtggagggaggtgtcagtatgggtagtgtgggatcaggcaggtataggaagaattctagaagggtgctcaccaaaacattctatggtgatcataccttggcattagggttgcaaatgcttttaactttttttatgcttttctctactgaatgattttgactttgtatcaagtatgtttttmaatcagaaaaaaagtttcattttgaggtaattacatatactccttaaaggtta

SEQ ID NO: 681021 - DNA, 1882 bp, Homo sapiens
ttatcacatacaaataaatctagccttttattacttaccaaaacactttttattctagtgtccacctgtttcttttctatttttctgtacttcatataaggaatattttctgattttcttacttctcttgaatccatgcttcgttataagtaaatattaatataagcatctagtagtttcttaggtcttccaaatatgttatgcccaaggatttatattttgatatatatacttttttttttttttttttttgagacagagtctcactctgtcacccaggctggagtgcagtggtgtgatctgggctcactgcaatctccatcccccaggctcaagtgattcttgtgcctcagcctcctgagtagctgggattacaggtgtgcaccacaacacccagctaatttttgtatttttagtagagacgggtttccatgttgctcaggctagtctcgaactcctgatctcaagtgatccgtctgccttgtatatatatacttttaaaatatatatatattttaaaatataaattacttcttttaaaatgttttttaatgttacagctggagcattgtattgatttttaaaattacatgtgtggtagattatgccatctattaatttcctttcataaaagtagagagatggctacaaatattagttataaaaaaagaaagcattgagacagatgagttgtgaaccacttttctaaattatttacatttatgttgtttcaaaatttcctattttccgttagatggttggcctgttagaaataatttaattgattatttatacttgcccatttggcttagtttttaattcccctagcttattctcatccttctttgttctgtcccactggaaaacactccacatgtgaaggctgwggttgaggccggggagtgtttgcgggtctgtggaaggagaagcagtgggtgagaccaccgactccagccagattggccagtttgaaccctgggttcattactcactaactgcgggttctctggctcttaacctctctgcccttcaggttcctcacctctaaaatggcaacaataatttatatgaataaagtgcttagaacagtgcctggtacacaggaagtgctacacaagtgttagcgggcattattattgtgaaatcttgttccttgggggagtcagcagccagttcttttgagaacagcactgcagagggaggtgcctactgtaaaacgccccttgtggactcctctcagctggaaaagtgagaactctcaagcatcgatacgttctgaacccagctctctgaggagctcaattaaggaacagttagcacccagctggcatattttctaagcatagaacccttggcattcattccatgatgcttaattctgttacttagactgcttagtgagcagttaaggttcttcagtttcggtctgtagtctgaataaagtatagtatgacttccttgaatttccccaggaggtgacgaggtgattgtatggtttatttaatcagaagcgtcattaaaaaaaaaaaaaaggctggatatggtggctcacgcctctaatcccagcactttgggaggccgaggcaggcagatcacttgaggtcaggagttcgagaccagcctggccaacatgatgaaaccccgtctctactaaaaatacaaaaattagccaggcgtggtggctcatgcctataatcccagctactcaggaggttgaggcaagagaattgcttgaacttgggagacagagattgcagtgagccaagatagcaccattgcactccagcctgggtgacagaggggactgcatctcaaaacaaaccaaaaaacagaatatggctattttgtgatatctagaaaacaaagaaaacagtttgctttg

SEQ ID NO: 681022 - DNA, 1040 bp, Homo sapiens
tcagggagagtcttgataggcaactttcagaaaaagttactgtcccaagcagcagagtcagggcaaaccagtttctcagtcccaatcatgtggtgatcatttgccttgccaggccttacccgagttaccttttgctagtggtgacgtgcacgtcttgcttatgtcatttgccttgatttgatggctaacatgatcttcttaaaggcttaactttttcatgtctgtttctgcacttacccaaatatccagaggaactttcagaaggtaattgtttttatttcctagatataccaaatagaactatgtttaagatctttcagtgcctcaaaaatgaatacttgactggataatgtttaagatgaagatacggaatttgttgttgtttatggttttcccctcatatttacattttttcccgaggaaacacacttccaaactaagtttgtgaggttctccaaggatatgacattttgtgggtgaaatcaatgattaaatattcagtttcatagacaacatttaaaagaacaataaaaataattaagctttatgaatgtatccccaagaaaacatttccttttaaacttactgacatatctaagtgagaaaatatacttacttaccagaagatggaattgatattggtgtgttttctttctatgtattttaaaacacttaaaaaaaaaaggttaagaraaaaggttgcatatgtcagttcattctattaacaaatgctctttatattttatatatatgtttatatttgagacgaagtctctctctgttgcccagactggagtgcagtggtatgatctcagcttactgcaacctccatctcccaagttcaagtgattctcctgcctcagcctcccaagtagctgggactacaggcacaagccaccacacctggctaattttttgtatttttagtaaaggcggggtttcaccatgttgggtaggctggtctcgaactcctgacctcaagtgatctgccaccctcggcctcccaaagtgctaggattacaggcatgagccactgcacc

SEQ ID NO: 681023 - DNA, 605 bp, Homo sapiens
agaggcccccacctgtcacataggaaaagaaaagagccaacagttttttttgttttgttttttaacctgaaagatgtctctgccactgccaaaataactataattcaaacatcagactatgtctattcacatatattagggtaaaactggcattttgtttattagaaattgttacgacattaacaaattagatattgggaagtttttaagtgagtaattggaatgattatctaaagtagtgagttaatataaatgtctstattcatagtagagtgaaggcaactggaattaatttaaaaattaccttccttctgtggttattttttactgtatcctaagtatactttttgctataaagaatcatttgtagttttatgattcttaacagattctaaattatggggattaattagtgattgatagacaaaggttaaaaccttccaaaaattattcatgatatttaggagtagattgaccatatatccattatgtttattttaatgttttctttagaaatgtttatttttacacgacagcactttataatttgagaaaggctacgattcttgctgagaatactttgactttgtgtgcctgtgtgtttc

SEQ ID NO: 681024 - DNA, 1141 bp, Homo sapiens
taaaggagtaggtgatgatggtctagtcaagttgagtagttgaatgatgactacagacacttgcaagctttccttttactttcctgtgatggaaaacaagattgggtggaaactctgcagaaagacgtggtgaagagtttttcttttgcactggaaaagatgatggccataattagggaaaatgtggcgattaatccaggccatgacagaaaatcaaaggaaatttgaagttctgtttatcacctatgtttcaatcaataaaagcctacagttgtgttactggaaaggggtcctaatccagaccccaagagagggttcttggaccttgtgcaagaaagaattcggggcaaatacataaagtgaaagcaagtttattaagaaagtaaaggaataaaagaatggctactctctactcagagcagcagcatgggctgctcaactgattrtacttacagttacttcttaatcatatgccaaggggtgaattattcctgagtttttggcaaaggggtgggcaattcttggaactgagggttctccctgtttagaccatacatgttaacttcctgatgttgccatggcatttgtaaactgtcatggtgctggtgggagtgtcttttagcatgccaatacattataattagcatataatcagcagtgaggaagaccagaagtcactttcgccaccatcttggttttggtgggttttgaccagcttctttaccacatcctttcaccagcaaggcctttgacctgtatcgcgtcctgtgactaagaatgcctcaccacttgagaatgcagctctgtaggtctcagccttactttacccagcccttattcatggatggagttgctctgcttcaaatgcctctgacaattatacacttaaagttagaaaattagatatggggcaatctgtatatgtattttttagtacccaattacagttttttatgtgtactaacttctgtacttagacacatgacccataaagtcaagaaagaatcattaagagcctttactcattttaatgaattaacctcataaccacacacccaaaatgtaagatcaatatataaaagtaagtatagatagttccccataaacttgggatatagtattcagttagcaaaatcttaca

SEQ ID NO: 681025 - DNA, 645 bp, Homo sapiens
tctactaaatatgtaggacacttaccgtgagactggggattagggattcacaacattataaagggtaaaaaaaaaatcctttctatacagccaactattgatctctacaaattgtccgtatagcctctctgttaaatacgcctataaataggatcaactttgaaatagaaatattttaggttaagcttcaggycatccctgtgaactttatttacacacacacactcaaatatatgtataaaaacctgcaaaaaatatatagccacatttgtgtaaatatgtatacacacatatatacgtatgtatttatatacacatttctaagacagtgtgataggtgaacacttacgtttcctaaactttagcttcattatgttatcctttgttccctagattcactaaatatttcacagcaggctcaaggtcttaagcaattttcttatctgattttattcctatttaatagttttatctaacacacccgttatttgggtatttggattctacttgctttttgatttatttacttttttctaagtcatgttgtttattaaaattaacagaatgttttagagttctctttgttttgcacatcaccaaaagagcattgttcactttgcgttatttgatttggtccaagcttct

SEQ ID NO: 681026 - DNA, 645 bp, Homo sapiens
tctactaaatatgtaggacacttaccgtgagactggggattagggattcacaacattataaagggtaaaaaaaaaatcctttctatacagccaactattgatctctacaaattgtccgtatagcctctctgttaaatacgcctataaataggatcaactttgaaatagaaatattttaggttaagcttcaggccatccctgtgaactttatttacacacacacactcaaatatatgtataaaaacctgcaaaaaatatatagccacatttgtgtaaatatgtatacacacatatatacgtatgtatttatatacacatttctaagacagtgtgataggtgaacacttacgtttcctaaactttagcttcattatgttatcctttgttccctagattcactaaatatttmacagcaggctcaaggtcttaagcaattttcttatctgattttattcctatttaatagttttatctaacacacccgttatttgggtatttggattctacttgctttttgatttatttacttttttctaagtcatgttgtttattaaaattaacagaatgttttagagttctctttgttttgcacatcaccaaaagagcattgttcactttgcgttatttgatttggtccaagcttct

SEQ ID NO: 681027 - DNA, 645 bp, Homo sapiens
tctactaaatatgtaggacacttaccgtgagactggggattagggattcacaacattataaagggtaaaaaaaaaatcctttctatacagccaactattgatctctacaaattgtccgtatagcctctctgttaaatacgcctataaataggatcaactttgaaatagaaatattttaggttaagcttcaggccatccctgtgaactttatttacacacacacactcaaatatatgtataaaaacctgcaaaaaatatatagccacatttgtgtaaatatgtatacacacatatatacgtatgtatttatatacacatttctaagacagtgtgataggtgaacacttacgtttcctaaactttagcttcattatgttatcctttgttccctagattcactaaatatttcacagcaggctcaasgtcttaagcaattttcttatctgattttattcctatttaatagttttatctaacacacccgttatttgggtatttggattctacttgctttttgatttatttacttttttctaagtcatgttgtttattaaaattaacagaatgttttagagttctctttgttttgcacatcaccaaaagagcattgttcactttgcgttatttgatttggtccaagcttct

SEQ ID NO: 681028 - DNA, 645 bp, Homo sapiens
tctactaaatatgtaggacacttaccgtgagactggggattagggattcacaacattataaagggtaaaaaaaaaatcctttctatacagccaactattgatctctacaaattgtccgtatagcctctctgttaaatacgcctataaataggatcaactttgaaatagaaatattttaggttaagcttcaggccatccctgtgaactttatttacacacacacactcaaatatatgtataaaaacctgcaaaaaatatatagccacatttgtgtaaatatgtatacacacatatatacgtatgtatttatatacacatttctaagacagtgtgataggtgaacacttacgtttcctaaactttagcttcattatgttatcctttgttccctagattcactaaatatttcacagcaggctcaaggtcttaagcaattttcttatctgattttattcctatttaatagttttatctaacacacccgttatttgggtatttggattctacttgctttttgatttatttacttttttctaagtcatgttgtttattaaaattaacaraatgttttagagttctctttgttttgcacatcaccaaaagagcattgttcactttgcgttatttgatttggtccaagcttct

SEQ ID NO: 681029 - DNA, 635 bp, Homo sapiens
attgaatggatttgtacattatagtcacttaaaaattctattataaaaaatggaaaagggtatttgtaagactcatccaatcattagcagaagttgggagttagcctttgattcaaaattacaagtacagtagtttgaaaataaatacatttcccaatgtaattttcaaactatatttcccattcmtatttttctcagtctgtcatgaacatctttttcctttacactacagaacttatgatatgtctatatttaatttataataatctgtgctttaaaaaaattgtagccacatttgcataattaccaggaacaattttgtatggcacagatatttaatcttacagatcctaatacatacaaggctgacatttatgagctccagcactgtcacctgatctcaataggttggcacttttaagtgaatagaacagtgccttacaaatagtaagtgctaagtaaatttagggtaatttgtgatgttagccaagtgataataggatgttagaattccaagtgacttcttagaattccaagtgacttcagagatgattaatccagaagttcccaaagagttactgacaacttgagttttaagttcatggtgatgttcatagacatgtttataggtgatg

SEQ ID NO: 681030 - DNA, 572 bp, Homo sapiens
gattggttcacttccctcaaaacctctcttyactgataaatgtccttccttatcaaacaaagtccttgaaagaaaacttcaccacattctccctgcccatgctgatatgtaaggcttggacagaacaaatgctgtactgtgccttccagctctttcctttatttgtgctccctggaggttctggctggggaagcccctgtcacatgactgtgagcagacagctgtgtggtgcagggcaaaagaggaaccagccttggaatcacaagatgtgggtttaagtcctagttcctccatctcctcctactagggtctgaatcttgcatggtcttggaagagactgagctataacagcagagaagctaggaaggaaatgggaatctgaggtctggggcagaaaatccttacctaaaagaacagaagaaaaatggctaaagctggaggtgaagccaaaaaccatgcaggtcccaagtgccaataagaatagcaggtctgagcctcagacaagacacagcattgcttaaatatcctgtggcaagggagtcactccacaggcccagcctgaagacattacc

SEQ ID NO: 681031 - DNA, 598 bp, Homo sapiens
ccccatctctaccaaaaatacaaaaattggctgggcatggtggcacgcatctgtggtcccagctacttgggaggctaaggaaggaggatcactcgagcccaggaagtggaggagccaagatcgctccactgcactccagcctgggtgaaagagtgagactctgtctcagaaaaaaggtgaccgtgaggatccaatgagatttctgtaaagatgctttgcaaactgtgtttattcaaatataagatattgactttaaaggaaataaaggcagccatttcaaagtacaaatcaccaaccttatggtgttgcacatctctcatggaatctctctcttaggacctggagggaggtctctatattctaaactaaaatgggctcagagcagacagagtccatatcctatgtaggtaggacagtaactgttttgtccttgcacataaatagaggaagaaaaacttgggggctgggtttggaaaataaaatttcaacaaactacagaagacccacttctccttctagaacccaccctggaaatcccacactcaacccagtctgatctccrtaaatttcaactgttctttagaacttctggaaatga

SEQ ID NO: 681032 - DNA, 2973 bp, Homo sapiens
ttgtgcataatactatagacaaacttctgatacatagctcaagcactaagagtatcatccccacttcagcccaacccataatctaactccgaaccaaaaatatctcaatgttccctggacagtatttttctgtcccagcaacttcactcaagcatttgcctccatttggaaagccccttccctcctctcagtctgtacctgaaattatatcttctctctcaagatgtctcttctataagcttgtcttgatccccaaatcaagtctctcttcctgctttgtagcactatttgtgttctcttccagcattttatcttattctatcctatgtgagactcagttgagtactgtcatatgtggaggtccttggggatagataggcttttactcatcttcattaggctgtggtaaacaatggccagggctgccaatctcagccctcttgggtcttgaacagactggtcatcattggaccattgcagcccatgtgtaacgcttactcatcccttcataacatacaatgaagcaagatggagctggtggtgtagttaagataccatacttggaatctggttgttggatccagaagagcttgtgaaaggaagcttttgcagctacatgagataacaatgctaatgctttagagtgacttgcaatgtgattctaaaaggatgggtaagcccccatgcaaaattttctggaaactggcaggacctcattgtgagtggggagaatacaatgtctccaaccaaggggatgtttggaactcatcatcaatttattaccaggcttcaatttatttgatagagaaaaatgagaacaggtcaagctgcctgagtttaagcaagatgtaagattttaatgcttcagcaataactgagttcagagaccaggtctcaacttcaggtagtacgaagaagacctatggcttagcctcacttctttttaggtatctaaaccatctgatgtcacctttagaggaactggatgtctaacttcatgcaacagcagtcaggaaaacaggcattcyttctcctcaaggttttgatcaaaggaataaaaagtggctcaagaaacaaccccatctattcaagagaatagcatactatcaatcatgctacactactgcaataaaatatttaggagacgttctcttaagttcatctagacaagattggcttaaattaaatttcaacttggcaggtgtatttgctcagtttacacaacagattctccattgtaactaaagggccaaacttggccctttgggagatatctctattcaaagtcagaaattgtacataacactagggatatataaagttcttaaaattacttttatatagcattcattttctgtaaaaagcactacctgctttttgctctaagaaaatctggaaaatagagaaaagtagagaagaaaataaaaattccccacttgcttcagtctcatcaccatccctggtacctactcatctgtcccctagtttctcatctcttgcctgggtcctcgttctaggttcctttacattcctggtgatggcccaggttaaagggatagactcattctacatttaggctgaatgatagccagcacgtttacagaaagcctaggcagacagcaactgatatagtgtctcctctgggggtatagctttgtgctatatacaacttgtctgtgctaccacatattttattaatagctacatcacggagcacaaccttataattacttaccagattaaaataatccagctttataattatttgccagattaacataatccagccatggcttagaaaagaactcaagtataaaatctgaactatggggtttcaatagcataccatggccaaggttttgggtgaaacttttgcgctgcttctatgttttccaaccagaaagggagctccagacagcagagggagatctacatgcccccattcctcagccccagcaggtgctcagtaaatgctgaaggagttacttttttcatttaactcttgattcaaagttgtggttattgttgcagggaatttggttcactcactagatagtattcaagcaagagactgtcaggtacctactcttttaaacaatctcattgactttgaaaactacttttgaaagctgcaagtaaaaacaaacaaaaaacacagatatataagccaaagggaagataaaaaggaagttcaaggaaaaaactcaagaatttcacaagtagataaggaagctttggttcccatttctaaagtcacatgactaaagaaactcattaccctgggaagcatttttaaaccttggagttaagtaactatgagaggatttttcaattacatttttaaaagtatacaaatatacatataaattattcatttcttcaacttaagagttcactgcagaagatacaaattatcatgagtatgcagatgaaagtggtatcaagtggtgtagcttctctctttcataataagtactaaatcaccaaagatggcaacccagtatcgagaataagagaaaaataatgtagaagatgtttatctatttgggccaaaaacttaaatcgccaaaaaaagaaagtggctagaagtggagaccatcagaggaacataaatacagaacaagtgtagaaaaggaagcaattttcacaggagaatcacttgaacccaggaggcagaggctgcagtgagcagagatagcaccactgcactccagcctgggtgacagagtgagactctgtctcaaaaaaaaaaaaaaatgtagctgggtgtggtggcacacacctgtagttccagctactccagaggctgatgtgagatgactgcttgagcctagagttagaggctgaagtgagatatgatcaccactgcactccagcctgggcaacaagcaagacctcatctcaaaaaaaaaaaaaaaaaaagaaaagaaaagaaggccccaccttgaatcttttttagaaaaaagcaggttg

SEQ ID NO: 681033 - DNA, 2973 bp, Homo sapiens
ttgtgcataatactatagacaaacttctgatacatagctcaagcactaagagtatcatccccacttcagcccaacccataatctaactccgaaccaaaaatatctcaatgttccctggacagtatttttctgtcccagcaacttcactcaagcatttgcctccatttggaaagccccttccctcctctcagtctgtacctgaaattatatcttctctctcaagatgtctcttctataagcttgtcttgatccccaaatcaagtctctcttcctgctttgtagcactatttgtgttctcttccagcattttatcttattctatcctatgtgagactcagttgagtactgtcatatgtggaggtccttggggatagataggcttttactcatcttcattaggctgtggtaaacaatggccagggctgccaatctcagccctcttgggtcttgaacagactggtcatcattggaccattgcagcccatgtgtaacgcttactcatcccttcataacatacaatgaagcaagatggagctggtggtgtagttaagataccatacttggaatctggttgttggatccagaagagcttgtgaaaggaagcttttgcagctacatgagataacaatgctaatgctttagagtgacttgcaatgtgattctaaaaggatgggtaagcccccatgcaaaattttctggaaactggcaggacctcattgtgagtggggagaatacaatgtctccaaccaaggggatgtttggaactcatcatcaatttattaccaggcttcaatttatttgatagagaaaaatgagaacaggtcaagctgcctgagtttaagcaagatgtaagattttaatgcttcagcaataactgagttcagagaccaggtctcaacttcaggtagtacgaagaagacctatggcttagcctcacttctttttaggtatctaaaccatctgatgtcacctttagaggaactggatgtctaacttcatgcaacagcagtcaggaaaacaggcattccttctcctcaaggttttgatcaaaggaataaaaagtggctcaagaaacaaccccatctattcaagagaatagcatactatcaatcatgctacactactgcaataaaatatttaggagacgttctcttaagttcatctagacaagattggcttaaattaaatttcaacttggcaggtgtatttgctcagtttacacaacagattctccattgtaactaaagggccaaacttggccctttgggagatatctctattcaaagtcagaaattgtacataacactagggatatataaagttcttaaaattacttttatatagcattcattttctgtaaaaagcactacctgctttttgctctaagaaaatctggaaaatagagaaaagtagagaagaaaataaaaattccccacttgcttcagtctcatcaccatccctggtacctactcatctgtcccctagtttctcatctcttgcctgggtcctcgttctaggttcctttacattcctggtgatggcccaggttaaagggatagactcattctacatttaggctgaatgatagccagcacgtttacagaaagcctaggcagacagcaactgatatagtgtctcctctgggggtatagctttgtgctatatacaacttgtctgtgctaccacatattttattaatagctacatcacggagcacaaccttataattacttaccagattaaaataatccagctttataattatttgccagattaacataatccagccatggcttagaaaagaactcaagtataaaatctgaactatggggtttcaatagcataccatggccaaggttttgggtgaaacttttgcgctgcttctatgttttccaaccagaaagggagctccagacagcagagggagatctacatgcccccattcctcagccccagcaggtgctcagtaaatgctgaaggagttacttttttcatttaactcttgattcaaagttgtggttattgttgcagggaatttggttcactcactagatagtattcaagcaagagactgtcaggtacctactcttttaaacaatctcattgactttgaaaactacttttgaaagctgcaagtaaaaacaaacaaaaaacacagatatataagccaaagggaagataaaaaggaagttcaaggaaaaaactcaagaatttcacaagtagataaggaagctttggttcccatttctaaagtcacatgactaaagaaactcattaccctgggaagcatttttaaaccttggagttaagtaactatgagaggatttttcaattacatttttaaaagtatacaaatatacatataaattattcatttcttcaacttaagagttcactgcagaagatacaaattatcatgagtatgcagatgaaagtggtatcaagtggtgtagcttctctctttcataataagtactaaatcaccaaagatggcaacccagtatcgagaataagagaaaaataatgtagaagatgtttatctatttgggccaaaaacttaaatcgccaaaaaaagaaagtggctagaagtggagaccatcagaggaacataaatacagaacaagtgtagaaaaggaagcaattttcacaggagaatcacttgaacccaggaggcagaggctgcagtgagcagagatagcaccactgcactccagcctgggtgacagagtgagactctgtctcaaaaaaaaaaaaaaatgtagctgggtgtggtggcacacacctgtagwtccagctactccagaggctgatgtgagatgactgcttgagcctagagttagaggctgaagtgagatatgatcaccactgcactccagcctgggcaacaagcaagacctcatctcaaaaaaaaaaaaaaaaaaagaaaagaaaagaaggccccaccttgaatcttttttagaaaaaagcaggttg

SEQ ID NO: 681034 - DNA, 651 bp, Homo sapiens
ggtgacggagtgactctgtctcaaagaaaaagtacctgcacaaaccaaagccaattactctgtcttcagaatagacatccaaaaccaaggctacaatccaagtcttcaataatgaaagttttctggccaggtgtggtggctcgtgcctataatcccagtattttggggacagaggtgggaggatcacttgggcctaggagtttgaaaccagcctgtgcaacaaagtgagatccctccatctctacaaaaaataaagaataaaaaaaatccgggcacggtggtacacacctgtggtcccagctacttgggaagctgaggygggaggacagcttgagcctgggaggtcgagactacagtgagccgtgattgcccccctgcactccagtctgggtgacagaatgagactatctccaaaaaaaagaaagttttctaacatttagacttgcaaaagaaaaagaaaatcagaattgactgtgtcagaaaacacggtgtttcctgtttctagaatgacaggtggagaccaccgattcctgtgctgggcaggaggctggaggttatagccaatgattcgtttgaggtctaagaaccaacaaaaactctctgctataatgaaagtgcatccaggggcacagggaatactagttttttcct

SEQ ID NO: 681035 - DNA, 651 bp, Homo sapiens
ggtgacggagtgactctgtctcaaagaaaaagtacctgcacaaaccaaagccaattactctgtcttcagaatagacatccaaaaccaaggctacaatccaagtcttcaataatgaaagttttctggccaggtgtggtggctcgtgcctataatcccagtattttggggacagaggtgggaggatcacttgggcctaggagtttgaaaccagcctgtgcaacaaagtgagatccctccatctctacaaaaaataaagaataaaaaaaatccgggcacggtggtacacacctgtggtcccagctacttgggaagctgaggcgggaggayagcttgagcctgggaggtcgagactacagtgagccgtgattgcccccctgcactccagtctgggtgacagaatgagactatctccaaaaaaaagaaagttttctaacatttagacttgcaaaagaaaaagaaaatcagaattgactgtgtcagaaaacacggtgtttcctgtttctagaatgacaggtggagaccaccgattcctgtgctgggcaggaggctggaggttatagccaatgattcgtttgaggtctaagaaccaacaaaaactctctgctataatgaaagtgcatccaggggcacagggaatactagttttttcct

SEQ ID NO: 681036 - DNA, 1984 bp, Homo sapiens
tgaggatttacaatgtaacttacagcagaaggatgaggaaggaaattttcagcactacaataaggtcaagttaaaactatgtgttagaaatctcccatcaaaaatgtttacgctataatagcactatccaattggaaaatagtacaaaccacgtatgcaacttaaagttttctggtaaccataattttaaaagtaaaaaaaaaaacagtaaaattcattttaataagtctaaatgcaatatatccaaagtactattatttcaacatgtaatacaaatttttaaaaatatattgagatgattcaaaattcagtgtgtgttgtacacccacagcacatcttaatgcattctacctacatttgaagtcctcagtagtcacatgttaccatactaaacagcataactctataatatagtattatgcccctcagaaagcttttaggtaaacctcagtctacagtcctgaaaaatattatgagtggcagagctaatgctgaatcaatatttacattttatgtaatacttagcatgcaattagagaatatattgattatattatttattcaacaaatatttatcaagtcattaaaatatgctatgccaggtaagatgttggtagatcctttgaagggtactgtcaacacttacttcctgattgttttacaaaagagtgatcagctttgcccctttgaagtatacagacatgatacaatttagtctcctttgttcttctgtgtagaaagaaggaccaggaggccgggcgcggtgactcacacctgtaatcccagcactttgggtagccaaggcaggcggatcatgaggttgggagttcaagaccagcctggccaacatggtgaaatcccgtctctactaaaaattaaaaaaattagctaggcatggtggcatgcatctgtaatcccagctacttaggaggctgaggcaggagaattgcttgagcccgggaggtggaggttgcagtgagccaagattgtgccactgcactccagcctgggtgataaagcaaaactctgtctccaaaaaaaaaaaaaagaaaaagaaagaaggacctggagccaacagggtgtcaccttagaggcaggcacctgagagcaggcaaaggaataattccgtctgctgaaatactaggagaggttgcaagaacactttgaacagtgcctcagggctgagactaaacacaaaacaataacatttataacatgctgacatttttaattgtgaaagaaactgtatatgacttggaaattacagaaaacaaagaaagaaatcactcataattcaacaatttctatgtatttccattgcacattttgatgcatttccttccatccagtctttttgcccagtcctcaccatttatgtcccagacctgacaagtctgagccatgagagaatgttatgcttgcctttgatatctaacttgtgatgatgtgagcccccacccccactcccaccagcttgattcccaggaactagctggcccccaggggtctcctggctgcagtctcccaggtaggactcctgctgtctcaggaatgccccacaacccccgtttctctaagctggctggcttcttaccttgcacctcactgtgcccctgtgcctaccatcctcacaacatcaccgctcttcagggacaccagtctgcagctaatctaacttcacctagcccagtgaggggcttctgcaggttccactctgaagctcttactaagggtctacagacccaaactcacagcattctgccagtgattagggctaactcagctcacactcatcagaactctctaggcatttctgtaccttagagtatagscctgactcaacccctaaatggaggccgcttcattttcagagccagaattagcctcttcccaggatgactggacagcaggagcacatgttcctttatggaaacatctctcacaaacaaggctgtggtctggttctgtggccttagcacgatca

SEQ ID NO: 681037 - DNA, 624 bp, Homo sapiens
tccttgcaaaggtttttaatgaaggatggaaaaatagtagctgaggataaaggaataaatgggttatgaagtcagggaaatccaatattacattaacacctcaaaagaggctcagagcaagagatatcattgtcgcttagctcagtggtaacagatgcctgaaagggtgaagcttcgtttgcggagatcactcctgtttttggaacatggcaagattgaacggaagmctgcaaacctgagtggccttgccctgggagacacattcttaggacataatgatgggctggactaatgactaatgtgactgaatgggagtctgataatgtgccagtatcttttgagttgtgtgttgttttgatggaaggaatccagggttacacaaagaatgataaagtgaagtgccttttaccccgttttgtgtcttcttaactatgtggccttaggtaacttagtttactcttctgagttgttcatctgtaaaagaggaatagctataataatttctacttcatagggctttggagaagtgatcccttctttcctcagggaattaatctgaccccttcaaaggtgggtgtagaacagaactctcagacttcctacagcacagatattggaccaatc

SEQ ID NO: 681038 - DNA, 624 bp, Homo sapiens
tccttgcaaaggtttttaatgaaggatggaaaaatagtagctgaggataaaggaataaatgggttatgaagtcagggaaatccaatattacattaacacctcaaaagaggctcagagcaagagatatcattgtcgcttagctcagtggtaacagatgcctgaaagggtgaagcttcgtttgcggagatcactcctgtttttggaacatggcaagattgaacggaagcctgcaaacctgagtggccttgccctgggagacacattcttaggacataatgatgggctggactaatgactaatgtgactgaatgggagtctgataatgtgccagtatcttttgagttgtgtgttgttttgatggaaggaatccagggttacacaaagaatgataaagtgaagtgccttttaccccgttttgtgtcttcttaactatgtgrccttaggtaacttagtttactcttctgagttgttcatctgtaaaagaggaatagctataataatttctacttcatagggctttggagaagtgatcccttctttcctcagggaattaatctgaccccttcaaaggtgggtgtagaacagaactctcagacttcctacagcacagatattggaccaatc

SEQ ID NO: 681039 - DNA, 603 bp, Homo sapiens
agccaagatcgtgccactgccctccagcctgggcgacagagcaagactgagtctcaaagagaatgagggcacaggctggctccagtgttggggcagggccacagcctgagccagtcttttgctgttcctcccttccccaggacttccacagtcacctgacacggagtgaggtcgtgggttacctggggggccgctgggacgtcaacagccagagtgggtatccagggccrggtgggcgggggcgttggaggaccggggtcacggggtcacagctgcccctccccacagtgctgacggtgctcagagccttcccttgtcggagccggctcggggacgcagagactgcagctgccatcgaagaggaggtgaggggctacctgggaggtggcattctggggagggttgggaagggacatagctgtcctggcgactgcccagtggctggcagtgtcatcacccagcaaccgtgcaggtgagcatgcccgtctgtgtgcttgggaccccatggtgaagggtgaagaacactgctttttttttttttttttgagacggagtctcgctctgtcacccaggctagagtgcagtggtgcgatctcagctccc

SEQ ID NO: 681040 - DNA, 603 bp, Homo sapiens
agccaagatcgtgccactgccctccagcctgggcgacagagcaagactgagtctcaaagagaatgagggcacaggctggctccagtgttggggcagggccacagcctgagccagtcttttgctgttcctcccttccccaggacttccacagtcacctgacacggagtgaggtcgtgggttacctggggggccgctgggacgtcaacagccagagtgggtatccagggccaggtgggcgggggcgttggrggaccggggtcacggggtcacagctgcccctccccacagtgctgacggtgctcagagccttcccttgtcggagccggctcggggacgcagagactgcagctgccatcgaagaggaggtgaggggctacctgggaggtggcattctggggagggttgggaagggacatagctgtcctggcgactgcccagtggctggcagtgtcatcacccagcaaccgtgcaggtgagcatgcccgtctgtgtgcttgggaccccatggtgaagggtgaagaacactgctttttttttttttttttgagacggagtctcgctctgtcacccaggctagagtgcagtggtgcgatctcagctccc

SEQ ID NO: 681041 - DNA, 603 bp, Homo sapiens
agccaagatcgtgccactgccctccagcctgggcgacagagcaagactgagtctcaaagagaatgagggcacaggctggctccagtgttggggcagggccacagcctgagccagtcttttgctgttcctcccttccccaggacttccacagtcacctgacacggagtgaggtcgtgggttacctggggggccgctgggacgtcaacagccagagtgggtatccagggccaggtgggcgggggcgttggaggaccggggtcacggggtcacagctgcccctccccacagtgctgacggtgctcagagccttcccttgtcggagccggctcggggacgcagagactgcagctgccatcgaagaggaggtgaggggctacctgggaggtggcattctgggragggttgggaagggacatagctgtcctggcgactgcccagtggctggcagtgtcatcacccagcaaccgtgcaggtgagcatgcccgtctgtgtgcttgggaccccatggtgaagggtgaagaacactgctttttttttttttttttgagacggagtctcgctctgtcacccaggctagagtgcagtggtgcgatctcagctccc

SEQ ID NO: 681042 - DNA, 603 bp, Homo sapiens
agccaagatcgtgccactgccctccagcctgggcgacagagcaagactgagtctcaaagagaatgagggcacaggctggctccagtgttggggcagggccacagcctgagccagtcttttgctgttcctcccttccccaggacttccacagtcacctgacacggagtgaggtcgtgggttacctggggggccgctgggacgtcaacagccagagtgggtatccagggccaggtgggcgggggcgttggaggaccggggtcacggggtcacagctgcccctccccacagtgctgacggtgctcagagccttcccttgtcggagccggctcggggacgcagagactgcagctgccatcgaagaggaggtgaggggctacctgggaggtggcattctggggagggttgggaagggacatagctgtcctggcgactgcccagtggctggcagtgtcatcacccagcaaccgtgcaggtgagcatgcccgtctgtgtgcytgggaccccatggtgaagggtgaagaacactgctttttttttttttttttgagacggagtctcgctctgtcacccaggctagagtgcagtggtgcgatctcagctccc

SEQ ID NO: 681043 - DNA, 605 bp, Homo sapiens
actgtaaattcctgataatcagatagacatcagatgccaatcaatgtcatgtagtagcatctaaggagattaaaaaaaattttttttttgagacgtagtcttgctctgttgcccaggctggagcgcagtggtgtgatcttggctcactccaacctctgcctcccaggttcaagtgattctcctgcctcagcttcccaagtagctgggattacagtcacctgccaycacacccagctaatttttgtatttttagtagagatgggtttcatcatgttggccaggctggtctcaaactcctgacctcaagtgatctgcccacctcggctcccaaagtgctgagattacaggtgtgagctaccacacccggccctaaggtaagtaagatttttactttaaaaaggccactctcctcttaaccccttagtttagctctggattactggtgaactgactcacaggatggtgggcaggtgagcagcaggctcctgccctcacgttcctgtgcagctgagaacataacagaggctcatcttatacctgcagagaggaggcagaagtccccactttagtggggctgctagatatttcatataccctctcctcct

SEQ ID NO: 681044 - DNA, 605 bp, Homo sapiens
actgtaaattcctgataatcagatagacatcagatgccaatcaatgtcatgtagtagcatctaaggagattaaaaaaaattttttttttgagacgtagtcttgctctgttgcccaggctggagcgcagtggtgtgatcttggctcactccaacctctgcctcccaggttcaagtgattctcctgcctcagcttcccaagtagctgggattacagtcacctgccatcacacccagctaatttttgwatttttagtagagatgggtttcatcatgttggccaggctggtctcaaactcctgacctcaagtgatctgcccacctcggctcccaaagtgctgagattacaggtgtgagctaccacacccggccctaaggtaagtaagatttttactttaaaaaggccactctcctcttaaccccttagtttagctctggattactggtgaactgactcacaggatggtgggcaggtgagcagcaggctcctgccctcacgttcctgtgcagctgagaacataacagaggctcatcttatacctgcagagaggaggcagaagtccccactttagtggggctgctagatatttcatataccctctcctcct

SEQ ID NO: 681045 - DNA, 956 bp, Homo sapiens
tcttctagaggttggcagtttcaattttgttgttgcttagtctctctcctagaaccaaagaatcgcagggtgggccaattgtctagcacaagcttttccaatctgcagtccacacacagcccaggatggctttcaatgtggcccaacacaaatttgtaaacttaaacattatgagattctgggccgggcgcagtggctcatgcctgtaatccctgcactttgggaggccgaggcgggcggatcacgaggtcaggagatcgagaccattctggctaacacagtgaaaccccgtctctactaaaaatacaaaaaattagccaggcgtggtggtgggcgcctgtagtcccagctacttgggaggctgaggcaggagaatggcatgaacctgggaggcggagcttgcagtcagctgagatcgttccactgcactccagcttgggcaacagagcaagactctgtctcaaaaaaaaaaaaaaaaaaaaaaaaamatgagattctgtgtcttaaatgtcttaaaatattataagattttttgtgtgtgatttttctttcttttcttttttttttttttttttgctcattagctatcgttagtgttagtatgttttatgtgtggcccaagacaattctttttcttccaatgtggctcaaggaagccaaaaaattggacacccctggtctagcacaaaacttagcacaaaatctgctactacatggacaaatgcaaggtggacggatgaggggaacagatcaatgaacagttcagccagagcttgacagcatctctcttatagccccaactggtcctggggcatgtgtgtgagactctctgaatgtggcccccaccccgccctgtgtctacatcccctctggaagaggcttctctgtagaaactgcctgcctgcacctcccatccctggcctcaaatgggctccttgctcactccaatcccctcc

SEQ ID NO: 681046 - DNA, 1196 bp, Homo sapiens
tacatcactctgaccccgcctgcagttagtgttaggttactttctttctcaaatagcataccccaggaaagcagcactcctttcttattgtgagacaagagcaagaagcagcctgaacagagagagatcataggctgtgtgaatacattgttaccagtaaaaagctggctggctttcaccttgactgagttctgttagaacttgccaaacaagctacttgtgatttgaaggaaatctgaatatagtattctgctcaaagaatcaaaggagttaggcgtgtgtgtgtgtgtgtgtgtgtgtgtgtgtgtgtgtgtgttgaattatagcttacaaagtatccaggaaaaaaaatctaacaaatctgtgttcatagcacaacacagaaaaaaaaattaactgtattcatcataactggttttgtgatttggctcttcttaatttggagctctgctaattgggtgctgttcctccatcagttcctaagtgcagttcctaatcagttaattagatcaagaaactttatcctgcagtttttaaatcttttattttttcctttaccttcttcataagaacatgagtgtatgtgttataaattcargttgtgtatgtgtgtgtatagagtgtttcttttataatatataagtatatatatttgacaaaatagccttttgaataattcataattttaaaattattgcacacatttaaaaatatttggtataattatgttatttataatataaaataatttataccacaatatttgtaagtcaatataatcttaaagaaaatatagatgttgtaaacataatattataaaataatataaatacaaaggatactttatttcttagacaaaatttcatctcaaagcatagtttttcctgaatatgtttaatacatcattggatatgatcaggggaaaatgtaaatttaaaatgcttttatcatttttataatttggtaaatgttcgatatgaagcaataattataatccctataacctaaacagcactaaaagtcacttaatttatcagggcataaattttctcatctataaactagaagagatagattttatgtctaaggctttgaatcgacaaatttcataacattttgaaatagataagatacggtgaggatcattcaactcttagtaaattgttagtgcaattccaggataaaatgaggtgcca

SEQ ID NO: 681047 - DNA, 1634 bp, Homo sapiens
gtggcaactccgtatctataaagtaaaaataaaagatataacatgtaatctccatcaacactgtaataatgttctttatttcctttttaatatgtcctgattttaaggaaaagtacaataaaacatactaagaaactataaaaagttattcagttatcaaaatggtagataaagttaataaattcaccaaatgaaacacaacttctagactcttgttagggaggtattgcttaaatcgtaccaaccgaactgggagggaattgagtagtagttgtaaggcaacttcattcaagtggatgtgtccacaatagacctcttttaactcagctaatggacagttctttgaatttctctccctaacccacacttgtgtcactttttacacataaaacaaccctttaaaagcaacagcatattcacattcacatatatatatacacacacatatgtatataacactatattaaaccattttccctaattataaaaatttatgtgtttgatgttctgaaaaatatacttcatggtgctttttattttaacttaccataccatgcttgggttttaataatgttgaaataatgtaaataatgctttctatgttttaaatagaatgaggcaattcttttgacttcacgttatatattttttctttaaatatttaactcctaattttcataacagaattttctatcctgggaatggacatagaaataggggaaactcaactagattttttaaacattttatttttttcaagtccaataaaattaatagaagcctaatgttaagtaaagtctatttgtttaccagtaaagatagacactgaaaattgtgggtggtgcaaccaaaagaataatgacaaaaatgccatataatacttcttgaatattttctgcatattgagtctatgtattttctatgtctttggcaattgatttattaatctcttatggggaatattgaaacctataaatgaccgaaaccaattttgcctctagagggcagcagtattatattgaattaaacagatgagtataaatatcttgaaaaaaagtgttttcatgcattctaaaatagtttactttgaacaacaacaaaaaaagaatgagactttaatattttcacataaaatatttttaaagcataaaatacaggataagtttttggagtatgattgtctyaaaagaaatcagttttaaatttcctgtaatttcaaaatgtgaattttttgaaacagaaaatatgtgtgtaataaaagttaaattagataattttattaattgcactccacccataatatattattattctaataatcaattttgaattaatagcaagtattagtcttattttagtaatgttaaaactttttgtaacaaaatgattgaaatgatattgttaattttttatatgagtcataaaattgtaagtagcctttacaatcttggaaggattaaagatacagctttctatacataagttggcattttcatgctgtttgattcatgtgacactaattatttttgaacacgtaaattttatctcaactactaacactgctttcaatttttaaaaatactagttaaatttacataataccatctcattattttgatctatttgataagtta

SEQ ID NO: 681048 - DNA, 627 bp, Homo sapiens
gttctgatccacctgaggcaaaaggcgcccctgtggagcccagcacgtctgtgtgggaggaaccgcctggaggagcagagagcaaagcaaaggggcttggggcggaacacgacgggagtggcaggagcagccagcgggaagccagggagagggtttggagatcagccagtcgcgggcaggggtaggcaaaacctgtaggttcctgtggacgccctggaattgtgcagttacttctgagtgaggcatgaaaccagtgagttctgaggagacaactaacgctgcaatttaatttccagttaacctgtggagcttcagaagctctcactcacaactgggatattaacaaggtcggatccggagggaagtccctcagcacatagagcatgaagtgtgcacccccccgtgcagcaagtccacgctcgctcagagatggagggaaataggtaggaggaagtcctcactgrgaacattgtatgggctgcaacctggctgctcaaaacaaggtttataactgaagtgtagtttacacaatgctgacctgttggaagtaatggaagaggttcatatgcacacatggataaaattaaatgtttaagtctgagtttaaatcttacaaaaaataaaaaa

SEQ ID NO: 681049 - DNA, 600 bp, Homo sapiens
ctcaagggttaagctaactttctccatttgtgctaacrttttccatacattctttatttatttaattttttttattttttgagacagaatcttgctctgtcgcccaggctggagtgcagtgttaccgtctcaatctaggctcactgcaacctctgcctcccgggttcgactgattgtcttgcctcagcctcctgagtagctgggattacaggcccgtgccacccccccgcccccactggctaattattgtattttttagtagagacggggtttcaccatgttggccaggctggtctcaaactcctgatccacccacctcagcctcccaaagtgctgggattacaggcatgagccaccacgcttggatttccatacattctggccattgggacgagctgtgcacccaggtgtcacattccctgggtagcttggaggatcacagcccctctgttcaggtggtgggactgggctagcccatgctggtgtcctgctcccaacactaaacctggttgtctcatccacgcagggcccccacaggacctccagtccatgcagggcccccacgagaccttctggtctgcacagggcccccagagacca

SEQ ID NO: 681050 - DNA, 600 bp, Homo sapiens
ctcaagggttaagctaactttctccatttgtgctaacgttttccatacattctttatttatttawttttttttattttttgagacagaatcttgctctgtcgcccaggctggagtgcagtgttaccgtctcaatctaggctcactgcaacctctgcctcccgggttcgactgattgtcttgcctcagcctcctgagtagctgggattacaggcccgtgccacccccccgcccccactggctaattattgtattttttagtagagacggggtttcaccatgttggccaggctggtctcaaactcctgatccacccacctcagcctcccaaagtgctgggattacaggcatgagccaccacgcttggatttccatacattctggccattgggacgagctgtgcacccaggtgtcacattccctgggtagcttggaggatcacagcccctctgttcaggtggtgggactgggctagcccatgctggtgtcctgctcccaacactaaacctggttgtctcatccacgcagggcccccacaggacctccagtccatgcagggcccccacgagaccttctggtctgcacagggcccccagagacca

SEQ ID NO: 681051 - DNA, 600 bp, Homo sapiens
ctcaagggttaagctaactttctccatttgtgctaacgttttccatacattctttatttatttaattwtttttattttttgagacagaatcttgctctgtcgcccaggctggagtgcagtgttaccgtctcaatctaggctcactgcaacctctgcctcccgggttcgactgattgtcttgcctcagcctcctgagtagctgggattacaggcccgtgccacccccccgcccccactggctaattattgtattttttagtagagacggggtttcaccatgttggccaggctggtctcaaactcctgatccacccacctcagcctcccaaagtgctgggattacaggcatgagccaccacgcttggatttccatacattctggccattgggacgagctgtgcacccaggtgtcacattccctgggtagcttggaggatcacagcccctctgttcaggtggtgggactgggctagcccatgctggtgtcctgctcccaacactaaacctggttgtctcatccacgcagggcccccacaggacctccagtccatgcagggcccccacgagaccttctggtctgcacagggcccccagagacca

SEQ ID NO: 681052 - DNA, 600 bp, Homo sapiens
ctcaagggttaagctaactttctccatttgtgctaacgttttccatacattctttatttatttaattttttttattttttgagacagartcttgctctgtcgcccaggctggagtgcagtgttaccgtctcaatctaggctcactgcaacctctgcctcccgggttcgactgattgtcttgcctcagcctcctgagtagctgggattacaggcccgtgccacccccccgcccccactggctaattattgtattttttagtagagacggggtttcaccatgttggccaggctggtctcaaactcctgatccacccacctcagcctcccaaagtgctgggattacaggcatgagccaccacgcttggatttccatacattctggccattgggacgagctgtgcacccaggtgtcacattccctgggtagcttggaggatcacagcccctctgttcaggtggtgggactgggctagcccatgctggtgtcctgctcccaacactaaacctggttgtctcatccacgcagggcccccacaggacctccagtccatgcagggcccccacgagaccttctggtctgcacagggcccccagagacca

SEQ ID NO: 681053 - DNA, 604 bp, Homo sapiens
tggctagcaaacagaccttccaagcatttaaacagtgcttgtaaatctaataaattaagctaaaaatatgaagcacgtttaattctctggattttaatatactttgtgagcttagtaacatttttctattcctcttaaacttaaaaaaaaaaattgaaaactaggccagtttcagtgggtcatgcctgtaatcccagcactttgggaggcctaggcaggtggaacacctgaggacaggagttcaagaccagcctggccaacatggtgaaaccctgtctctattaaaaatacaaaaattagcygggagtggtggcacatgtgtgcctgtaatcccagctactccggaggttgaggcgggagaattgctcccaggaggtggaggttgcagtgagccgagattgtgccactgcattctagcctgggcaacaagagcgaaagtctgtctcaaaaaaaaaaaaaaaaaaaattggagactaatattaaagagcacaatctaaagtgtagggctggaatgaatgaatgagctctctaggcgagcaaagcctttcagggctgatgtccctcggtcccacgagccaggcctccgcaggctgagcactgagcg

SEQ ID NO: 681054 - DNA, 1128 bp, Homo sapiens
ccgacatctctcaaggggtttgctcttctgtgctgcttttttattcagctccacaaatatttgtcaaggaagctgctactgtgctgacatcagtgtcctgggaggttggggggatgggcaggccattctgaagagagggaatacagagaggagcggtacttaatccctgtccccagggactttgctttctcaaagcaaaggtgtttgacgcctgctctatgaacgcccttccacagggcagccagctgtgcccttcatttctaaatggttctaaggatggaaaggaaagacccaaaacgctatcagtcattttcttatgggagaaagacattctcatccttttcttcattttccaattttgcaccaggagtcattactacttttgaaattggagagtaaagatttatggrcctataccttttaaaatatgggaatgattattggaggtggttataaaaattattctgctcattgtaactattcagacaatacccaagaaatgaatgaaaatgaaaaaccacacataatcactgattgagcaggaaatatcttgtccttctttttctgacctgcagcgatgtgaggctgaaagaggctttgggagccagggtggctgggcttggatgtaaacgtccacccactttggcggtactgggtccacctgcagtctctgacctgggccaggagctaccataagcctataccacattccagggaagattgggagctcccatcaagagaggagtttagcaaatgctggtccatgcacatctcagtgtgctacggaggtagatgctcccagatattgaccaccacagaaagtcaaagtcagatttggtgaattcgtatgatagtgccaatttttaaaatgggctttaggccaagaaaggacatttataaaggaaatcagcaactattccttatcactggaatttcagaaaagaatggacatttgaacaccaaaaatcagaaaaactctgcaaataaaagctttgtgaaaaactcagtaagcggcccttgcttgctgtagggaattcaagctctcaatgaagggctgcagctctgagccaggctggaaggcagtggtttctcctctcattgggccttggtttcctcatttgtctagca

SEQ ID NO: 681055 - DNA, 1128 bp, Homo sapiens
ccgacatctctcaaggggtttgctcttctgtgctgcttttttattcagctccacaaatatttgtcaaggaagctgctactgtgctgacatcagtgtcctgggaggttggggggatgggcaggccattctgaagagagggaatacagagaggagcggtacttaatccctgtccccagggactttgctttctcaaagcaaaggtgtttgacgcctgctctatgaacgcccttccacagggcagccagctgtgcccttcatttctaaatggttctaaggatggaaaggaaagacccaaaacgctatcagtcattttcttatgggagaaagacattctcatccttttcttcattttccaattttgcaccaggagtcattactacttttgaaattggagagtaaagatttatggacctataccttttaaaatatgggaatgattattggaggtggttataaaaattattctgctcattgtaactattcagacaatacccaagaaatgaatgaaaatgaaaaaccacacataatcactgattgagcaggaaatatcttgtccttctttttctgaccygcagcgatgtgaggctgaaagaggctttgggagccagggtggctgggcttggatgtaaacgtccacccactttggcggtactgggtccacctgcagtctctgacctgggccaggagctaccataagcctataccacattccagggaagattgggagctcccatcaagagaggagtttagcaaatgctggtccatgcacatctcagtgtgctacggaggtagatgctcccagatattgaccaccacagaaagtcaaagtcagatttggtgaattcgtatgatagtgccaatttttaaaatgggctttaggccaagaaaggacatttataaaggaaatcagcaactattccttatcactggaatttcagaaaagaatggacatttgaacaccaaaaatcagaaaaactctgcaaataaaagctttgtgaaaaactcagtaagcggcccttgcttgctgtagggaattcaagctctcaatgaagggctgcagctctgagccaggctggaaggcagtggtttctcctctcattgggccttggtttcctcatttgtctagca

SEQ ID NO: 681056 - DNA, 1939 bp, Homo sapiens
cacacagcctggaagctgtcacttcccagctgctggacctcagggaaggaggcccagagagtagcccagggagggtacagcaggcggcgactgtttatggactgggtgttaaatggctgcagaacatggcagcttcaggcctcggggcccagggaaaagttcgttcctgcttctacccagagttttaggtggtggagaggcttgaaatggggagttactggcgtctcttaaccaggccttctggggggtaaatattgtgaatattactcctgcctggaataacccttctagggtttccaactagaggcacctggcctggtcagacttcctcattcagccagtgtaatggtggtgttgctttcagatgggcttgaatgtgttaggcactctccagtttgccacaagcaccaccactccctactgtctcagttcagtcctgtgatcagttttattgctgccagattgtaggacccaccctgcccctggaagaattgaggttgcgagctcacaagcaggcggtccccattgcaactcctgcctctttggccagaagcagccatgatcagccattgtgaaaaccgagactgtggtcccaataggggccaccttccaagcctaagtgcctctccaccatagtgctgatccctgccatcccaggacttcagattgatccttgaggccaaatgtagattcctttgtgaaagragatggccgtattacctcactaacagcttagcaccaattggttaataaaataccaggagagagaaagagaggaaattggcatctattaagagttcactccgtgctaagtcctggatataccatcccacttagcctcccagcaccactgtaagacaggtggtatccccattgtacatattggaaaaccaaggttagcttcccttaaattgcacagacagtagagcacagccagtttttgaacccggatctgaatgtgagactgtgctttttcctctatccacactgtgtcgccataagcaccttctgtgtgccaggcacaggactgggcacagtctgtccttgcccagctcccagtctggcaaaaaggacttcgtatgtgcactccgccctcatccctctcccaaagctcaagccaagtttccaaagaatggcagctgccactagggggatgggaggttttaggtgaaatgcaacatgaattactttgtttcaatagttatatatttaatataaaattgggaggccgaggcaggcagaccacgaggtcaggagatcgagaccatcctggccaacatggtgaaaccctgtctttactaaaatacagaaattagctgagcgtggttgcgtgtgcctggcgtaatagctggcgtaattagctggtgtaatcccagctactcgggaggctgaggcaggaggattgcttgaaacagggagtcagaggttgcagtgagccaagatcacaccattgcactccatcctgggcgacaagagcaaaactccgtctcaaaaaaaaatacagtgagttcatcaaatacatgatttcacagactgtgataattgtgatataataaaaagtatatattttgggttttgtctccagcacctagccagaactcctaaaacccgtgtaatttcctgagtggtagggatgctagatatatcttttggtcttataaagttagccctccatatccatgggtcccgcatccatggattcaaccaatctctgattgaaaatattcagaataaaaaatgggctaggtgtgggtgtggtggcccacacctgtaatgccagcactttgggaggccaaggtgggaggattccttaagcccaggagtttgagaccagcctgggcaacaaagggagtcctcatctctataagaactaaagaaattggctaggcgtgttggcacatgcctgtagtcccagctacttgggaggatgaggtgggag

SEQ ID NO: 681057 - DNA, 1939 bp, Homo sapiens
cacacagcctggaagctgtcacttcccagctgctggacctcagggaaggaggcccagagagtagcccagggagggtacagcaggcggcgactgtttatggactgggtgttaaatggctgcagaacatggcagcttcaggcctcggggcccagggaaaagttcgttcctgcttctacccagagttttaggtggtggagaggcttgaaatggggagttactggcgtctcttaaccaggccttctggggggtaaatattgtgaatattactcctgcctggaataacccttctagggtttccaactagaggcacctggcctggtcagacttcctcattcagccagtgtaatggtggtgttgctttcagatgggcttgaatgtgttaggcactctccagtttgccacaagcaccaccactccctactgtctcagttcagtcctgtgatcagttttattgctgccagattgtaggacccaccctgcccctggaagaattgaggttgcgagctcacaagcaggcggtccccattgcaactcctgcctctttggccagaagcagccatgatcagccattgtgaaaaccgagactgtggtcccaataggggccaccttccaagcctaagtgcctctccaccatagtgctgatccctgccatcccaggacttcagattgatccttgaggccaaatgtagattcctttgtgaaaggagatggccgtattacctcactaacagcttagcaccaattggttaataaaataccaggagagagaaagagaggaaattggcatctattaagagttcactccgtgctaagtcctggatataccatcccacttagcctcccarcaccactgtaagacaggtggtatccccattgtacatattggaaaaccaaggttagcttcccttaaattgcacagacagtagagcacagccagtttttgaacccggatctgaatgtgagactgtgctttttcctctatccacactgtgtcgccataagcaccttctgtgtgccaggcacaggactgggcacagtctgtccttgcccagctcccagtctggcaaaaaggacttcgtatgtgcactccgccctcatccctctcccaaagctcaagccaagtttccaaagaatggcagctgccactagggggatgggaggttttaggtgaaatgcaacatgaattactttgtttcaatagttatatatttaatataaaattgggaggccgaggcaggcagaccacgaggtcaggagatcgagaccatcctggccaacatggtgaaaccctgtctttactaaaatacagaaattagctgagcgtggttgcgtgtgcctggcgtaatagctggcgtaattagctggtgtaatcccagctactcgggaggctgaggcaggaggattgcttgaaacagggagtcagaggttgcagtgagccaagatcacaccattgcactccatcctgggcgacaagagcaaaactccgtctcaaaaaaaaatacagtgagttcatcaaatacatgatttcacagactgtgataattgtgatataataaaaagtatatattttgggttttgtctccagcacctagccagaactcctaaaacccgtgtaatttcctgagtggtagggatgctagatatatcttttggtcttataaagttagccctccatatccatgggtcccgcatccatggattcaaccaatctctgattgaaaatattcagaataaaaaatgggctaggtgtgggtgtggtggcccacacctgtaatgccagcactttgggaggccaaggtgggaggattccttaagcccaggagtttgagaccagcctgggcaacaaagggagtcctcatctctataagaactaaagaaattggctaggcgtgttggcacatgcctgtagtcccagctacttgggaggatgaggtgggag

SEQ ID NO: 681058 - DNA, 1939 bp, Homo sapiens
cacacagcctggaagctgtcacttcccagctgctggacctcagggaaggaggcccagagagtagcccagggagggtacagcaggcggcgactgtttatggactgggtgttaaatggctgcagaacatggcagcttcaggcctcggggcccagggaaaagttcgttcctgcttctacccagagttttaggtggtggagaggcttgaaatggggagttactggcgtctcttaaccaggccttctggggggtaaatattgtgaatattactcctgcctggaataacccttctagggtttccaactagaggcacctggcctggtcagacttcctcattcagccagtgtaatggtggtgttgctttcagatgggcttgaatgtgttaggcactctccagtttgccacaagcaccaccactccctactgtctcagttcagtcctgtgatcagttttattgctgccagattgtaggacccaccctgcccctggaagaattgaggttgcgagctcacaagcaggcggtccccattgcaactcctgcctctttggccagaagcagccatgatcagccattgtgaaaaccgagactgtggtcccaataggggccaccttccaagcctaagtgcctctccaccatagtgctgatccctgccatcccaggacttcagattgatccttgaggccaaatgtagattcctttgtgaaaggagatggccgtattacctcactaacagcttagcaccaattggttaataaaataccaggagagagaaagagaggaaattggcatctattaagagttcactccgtgctaagtcctggatataccatcccacttagcctcccagcaccactgtaagacaggtggtatccccattgtacatattggaaaaccaaggttagcttcccttraattgcacagacagtagagcacagccagtttttgaacccggatctgaatgtgagactgtgctttttcctctatccacactgtgtcgccataagcaccttctgtgtgccaggcacaggactgggcacagtctgtccttgcccagctcccagtctggcaaaaaggacttcgtatgtgcactccgccctcatccctctcccaaagctcaagccaagtttccaaagaatggcagctgccactagggggatgggaggttttaggtgaaatgcaacatgaattactttgtttcaatagttatatatttaatataaaattgggaggccgaggcaggcagaccacgaggtcaggagatcgagaccatcctggccaacatggtgaaaccctgtctttactaaaatacagaaattagctgagcgtggttgcgtgtgcctggcgtaatagctggcgtaattagctggtgtaatcccagctactcgggaggctgaggcaggaggattgcttgaaacagggagtcagaggttgcagtgagccaagatcacaccattgcactccatcctgggcgacaagagcaaaactccgtctcaaaaaaaaatacagtgagttcatcaaatacatgatttcacagactgtgataattgtgatataataaaaagtatatattttgggttttgtctccagcacctagccagaactcctaaaacccgtgtaatttcctgagtggtagggatgctagatatatcttttggtcttataaagttagccctccatatccatgggtcccgcatccatggattcaaccaatctctgattgaaaatattcagaataaaaaatgggctaggtgtgggtgtggtggcccacacctgtaatgccagcactttgggaggccaaggtgggaggattccttaagcccaggagtttgagaccagcctgggcaacaaagggagtcctcatctctataagaactaaagaaattggctaggcgtgttggcacatgcctgtagtcccagctacttgggaggatgaggtgggag

SEQ ID NO: 681059 - DNA, 335 bp, Homo sapiens
ccacccaccttggccactcaaagtgctgtgattacaggcatgagccaccacgccgggccccaacaatggattttagacccagcactaaactggtggctttagatattttcttttctagatctgtggcctttaaaatgtctttttatttatttgttttccctagcaggagaacctactcattcattctacaaatattgaatgagcatctgcagtttgccaagcactagtctagccacaggggacagagctgtgaacaagatgggcaggattcctgctcttctgaracttacattctaatgggggaaaaccaacaataaacaaatgaaaaactatat

SEQ ID NO: 681060 - DNA, 2166 bp, Homo sapiens
tgacatgtttttagacatgttatatatgtaacttgccaaagctttctgggaaaataataatttcaagtgacgagcaaagaataagaaaattatagttgcaaaattgcccattctagtagttatttgttacttataaaatcagtcaatctacaaaatcaaatcattatgggtttattattttactttttagtaatctattgtgattttatggcattctattatttatttacaacatcaaaacagcatttgagtgttttttgtttttcgagacagggtctcattcccgcggcctgggttggagtgcagcaacacgatcttggtttgctgtcaccccaacttcccaggctcaggagattttcccacctcagcctcccaagtagctgagactacaggtgtgcaccaccacgcccagctaattttttgtatttttagtggagatggggttttgccacgttgcccaggctggtcttgtactcctgggttcaagtgatctacccgcctctgycccctaaagtgttgggattacatacatgagccactgtgtttggcctacacttgagtgtttcaatcaaattatgaatcaaaaatttgctattacagggcattttcagtgtggttttcttagcaatagtggtctagaggagctattacttgttctgcagcctaaaacaattcatttacccttttagggcctcagttttctcatgtgcgaaatgaaataattgaaccagatgattattgccaagttgttggctgacatagtctctacttccaatagaaccctttgtctctaaataaagaaaatcagtgaaagaatatgattctttaagaaaattgtttagtaacattgttgaaacttatttcttctcttgagcttaacaatgttcgtttattttatggtatctttgttattgcacaatttcgtaattttaattggtggcaattatgaaggattaaaaaataatgaaatgaaatcctaagctctctcttgaaagccacagtgctttaaaagctaggtaaaattttgcctcctttttgactcatttataataattcataatgccatattatgatttttttaaagtgacattgatgtttgggtaccagaaccagaccactcagaagttcctgctgagtggtgggattttgatgctgataagtcactccttattggagtttttaaacatggtaagtaagaagtaaggtaggtgagatccccttctatgtataaggcagttctgtcagttctcagttcattgatttccacttacagctttattccagtaacatctatgttatatatacagaattaaaagcatacactaccaaactatgtctgtcagtcaccacattacctcgtgggagggtggcatgtgtaacctacccttcctggatgtaaatctaagacaacttcctctctcaggaagagttctcatgtgagatatgtttgtgtgtttgtgtgtgggtatgatcagtttatcctatttctcatattaactgataaatgtaactgaaattttactttagtagatatctattaccagatcatttaatgtttgtgataatttctagaaaacatacttaacctatatcattttaatgtattatccctttagtccagaaatatcatccactgtaaatacgaggaatgcttatatgtatacacctttcttctttttatcttttttacttttgtaattggtgatgttttcaggatatgaaaaatataacactattcgagcagacccagcattatgcttcttggaaagagtgggaaaacctgatgagaaagcagttgctgctgaacagagagcgaatgattatatggatgggtatgtgtgtttcagagtcatgaattttctatatatctctcttctattcaatatcagcatattctatgtcacactatttatctttaaatgaggtagcagtaagggaattggagtttacaatctgaaagagctaaagataccctaataggttagcacttatccaacagaatgtgatcgaggaagaggttggacctgccccacacccattcttttgatgagtttttcatttctttcattttaacagctatatcatggccactgagttcataaacttctaggggcatagggggagaaaaaggcaagaatgttatagttgatgagacatatgatgaca

SEQ ID NO: 681061 - DNA, 2166 bp, Homo sapiens
tgacatgtttttagacatgttatatatgtaacttgccaaagctttctgggaaaataataatttcaagtgacgagcaaagaataagaaaattatagttgcaaaattgcccattctagtagttatttgttacttataaaatcagtcaatctacaaaatcaaatcattatgggtttattattttactttttagtaatctattgtgattttatggcattctattatttatttacaacatcaaaacagcatttgagtgttttttgtttttcgagacagggtctcattcccgcggcctgggttggagtgcagcaacacgatcttggtttgctgtcaccccaacttcccaggctcaggagattttcccacctcagcctcccaagtagctgagactacaggtgtgcaccaccacgcccagctaattttttgtatttttagtggagatggggttttgccacgttgcccaggctggtcttgtactcctgggttcaagtgatctacccgcctctgccccctaaagtgttgggatyacatacatgagccactgtgtttggcctacacttgagtgtttcaatcaaattatgaatcaaaaatttgctattacagggcattttcagtgtggttttcttagcaatagtggtctagaggagctattacttgttctgcagcctaaaacaattcatttacccttttagggcctcagttttctcatgtgcgaaatgaaataattgaaccagatgattattgccaagttgttggctgacatagtctctacttccaatagaaccctttgtctctaaataaagaaaatcagtgaaagaatatgattctttaagaaaattgtttagtaacattgttgaaacttatttcttctcttgagcttaacaatgttcgtttattttatggtatctttgttattgcacaatttcgtaattttaattggtggcaattatgaaggattaaaaaataatgaaatgaaatcctaagctctctcttgaaagccacagtgctttaaaagctaggtaaaattttgcctcctttttgactcatttataataattcataatgccatattatgatttttttaaagtgacattgatgtttgggtaccagaaccagaccactcagaagttcctgctgagtggtgggattttgatgctgataagtcactccttattggagtttttaaacatggtaagtaagaagtaaggtaggtgagatccccttctatgtataaggcagttctgtcagttctcagttcattgatttccacttacagctttattccagtaacatctatgttatatatacagaattaaaagcatacactaccaaactatgtctgtcagtcaccacattacctcgtgggagggtggcatgtgtaacctacccttcctggatgtaaatctaagacaacttcctctctcaggaagagttctcatgtgagatatgtttgtgtgtttgtgtgtgggtatgatcagtttatcctatttctcatattaactgataaatgtaactgaaattttactttagtagatatctattaccagatcatttaatgtttgtgataatttctagaaaacatacttaacctatatcattttaatgtattatccctttagtccagaaatatcatccactgtaaatacgaggaatgcttatatgtatacacctttcttctttttatcttttttacttttgtaattggtgatgttttcaggatatgaaaaatataacactattcgagcagacccagcattatgcttcttggaaagagtgggaaaacctgatgagaaagcagttgctgctgaacagagagcgaatgattatatggatgggtatgtgtgtttcagagtcatgaattttctatatatctctcttctattcaatatcagcatattctatgtcacactatttatctttaaatgaggtagcagtaagggaattggagtttacaatctgaaagagctaaagataccctaataggttagcacttatccaacagaatgtgatcgaggaagaggttggacctgccccacacccattcttttgatgagtttttcatttctttcattttaacagctatatcatggccactgagttcataaacttctaggggcatagggggagaaaaaggcaagaatgttatagttgatgagacatatgatgaca

SEQ ID NO: 681062 - DNA, 1499 bp, Homo sapiens
cattcattcccttattccttcagtgatcaacatttgctttggctacagtggtcaaggaaaacctcttttggatgtgacatctcagatgaaacctacagataaggatagtcttataaagattgggaaacatgtattccaggcagaagaaacagcaagaacaaattctctaagatgcaaytgagcttggtaggcctgaggaataaaaaagtgagcacagctagagtgtgaaggaggcagaaggtgaaattggagaaactgatgggagccaaattctacagggctcaagggtaagagtttgccattttaagtgtaataagaaaacatgagaagattttaagcagaaggatgaaatgatgatttacaagaaggaagaagaaagggaggaaggaggaggaggaaagtagagtgattagaaggttgatgcagcattccaggcaaaggatgatggtgatttaagctggagttagagcagtgaatatgctgagtacagtctggaggtagaactgacaggattgctaaggaattagatacagaatagagaaaaatgaagacatcaaaatagcagcctagttttatgtgtgagcaacaggaaagacagaactgccatttactgtgacaggcaaggcttgagtgctggagcatggggaaaggacttcagcggatggcagagtataggtgggtagaacaacattctactctattttggacacagtgaatttgcgatgctgagagtaccaaaattttaaaaattgttaaaagccgtacagtgcggatatcccagttgtgtgctactgaattccaactaagctcagtctgtagtcgctgtgagccaggaactcaagggagaggttggagtttgaaatataaatgagtcataattttatagatcatatttgaagttcttcaacaaaatacccataaaacttttgtgctgggaagagacaggaaagttctaattctcaagaagcttagttggggtggacagacaagtgacgagtttgtactttcaataaagtatgatgacaggtaaatactgagtgctttaggagtacataggcggaaggagaaaccaaaacagtttgtgtgtaggggtatggcggcagtaataagcctccaggggagcttctaggcgttaataactgaggttatttggtggatttcaataacattcaactgagagagccatactgtaaaaattttaacaattttgaaaattgtgatagcctaggaaagtataatctctgaaatgtggggaaaagcgatttacatttccccttaccttcccccagctccacaatttgccaggggtctgcaacccgcgtccaggtgcgaccccagtagcaccggagccagggatctgcgcgcatatgtgaggatgcactggggccagccggtggctttgccgacctctgtcagacaccgctccagggtccgtcagcgccaggcccgcggggctatggctgtccgcaactcccgacacaagctgcaagcaaggcaag

SEQ ID NO: 681063 - DNA, 618 bp, Homo sapiens
gagtttcacttttgttgtgcagggtagagtgcaatggcacaatcgcggctcattgcaaactctgcatccctggttcaagcgattcttctgcctcagcctcccaagtagctgggattacaggcatgcgccaccaagcctggctaattttgtatttttagtagagacgggatttctccatgttggtcaggctggtcttgaactcccgacctcaggtgatccacctgcctcggcctcccaagttggtgggattacaggcgtaagcaactgcrttcagcctatactcctcttttattaacacttctgttcttaattatcttgtgcatttatccacacgtggttgtacactatattcatgcaaagcaacctttattggaatattggaataatcacaaattatacattacagtattcaaaataatgcaattctgctgcaccattctgaaatgggaggcagagagacctaaaactgaagagttgtgaatttctaccaactgagggccaacctgaagtaaaaatatctttaaaaagttagcttgattgtcagtaatcatttcataatttatacatatattaaagcatacgttgtataccttaaagatacataatttctatgagtcc

SEQ ID NO: 681064 - DNA, 618 bp, Homo sapiens
gagtttcacttttgttgtgcagggtagagtgcaatggcacaatcgcggctcattgcaaactctgcatccctggttcaagcgattcttctgcctcagcctcccaagtagctgggattacaggcatgcgccaccaagcctggctaattttgtatttttagtagagacgggatttctccatgttggtcaggctggtcttgaactcccgacctcaggtgatccacctgcctcggcctcccaagttggtgggattacaggcgtaagcaactgcattcagcctayactcctcttttattaacacttctgttcttaattatcttgtgcatttatccacacgtggttgtacactatattcatgcaaagcaacctttattggaatattggaataatcacaaattatacattacagtattcaaaataatgcaattctgctgcaccattctgaaatgggaggcagagagacctaaaactgaagagttgtgaatttctaccaactgagggccaacctgaagtaaaaatatctttaaaaagttagcttgattgtcagtaatcatttcataatttatacatatattaaagcatacgttgtataccttaaagatacataatttctatgagtcc

SEQ ID NO: 681065 - DNA, 516 bp, Homo sapiens
  misc_feature 2, 3, 4, 5, 6, 7, 8, 9, 10, 11, 12, 13, 14, 15, 16, 17, 18,19, 20, 21, 22, 23, 24, 25, 26, 27, 28, 29, 30, 31, 32,33, 34, 35, 36, 37, 38, 39, 40, 41, 42, 43, 44, 45, 46,47, 48, 49, 50, 51, 52, 53, 54, 55, 56, 57, 58, 59, 60,61: n = A,T,C or G
  misc_feature 62, 63, 64, 65, 66, 67, 68, 69, 70, 71, 72, 73, 74, 75, 76,77, 78, 79, 80, 81, 82, 83, 84, 85, 86, 87, 88, 89, 90,91, 92, 93, 94, 95, 96, 97, 98, 99, 100, 101: n = A,T,C or G
annnnnnnnnnnnnnnnnnnnnnnnnnnnnnnnnnnnnnnnnnnnnnnnnnnnnnnnnnnnnnnnnnnnnnnnnnnnnnnnnnnnnnnnnnnnnnnnnnnnatctcagtctttcaatggctttaaggcgaccagaagtgcctgttcccgagtagacctctgggcaggatgyccctgccctttgggacatacactgggctttcagctatgatgatgacttcaaggattctacacccatgactcctcctccatcggacatgggcagcatcctctggaagtcagtgattccagatcacaagtatcagcaccttaccaaggtagaggacccacccatgacactatcaccggccattgacagtacagagaaggtcctgctagtgaaaactaaagctacccattcatcagaaattatttgatcacaaaacagacacagaagagcacttaacattttgagcaataggcagggctacataccctccaagagacttaccctcaagaagaccaagcacctttgagt

SEQ ID NO: 681066 - DNA, 630 bp, Homo sapiens
cgtacttgttatcaatcgagatttcctcatctgaaaattacctgattataattttttacttttcatctttcatgtttcttgttcattaaaaaaatagctccttgtatattctagatattgacattgtaaaaattatctgccaaccggtgtcccttggatggctatgtatgtgatatactttgttaaacagaaatccttaattttggtttctgcyttcctaccctaaatttacaaagatgttttcataggttttcttcaattatcttaatatttcacctttcacattcaggtctttaatccatctggagttaggtcttgtttatgatgtgagttagaaatccagtcttatttttttccacatacagaagtcagcaagtttccccaaaacacctattgactgatccatcttttaccatttatttgtggtattatctctgtcatataaattgtcccatatatatgtatatacatatatagcaattattcataagtcagaagagagtaaatgtaaagtgttttaatgtctttgtattatcctagagaagaacaaaataataattttcagattttaataaattaaaaattcatgatataacggcaacatattgcacaaatacatataaattccaa

SEQ ID NO: 681067 - DNA, 667 bp, Homo sapiens
tagattccacatataaatgagatcacgtggtatttttcttctgtgcctggcttacttcacttaacgtgtgtcctccaggtttatccatgttgctgcaaatggcagactttccttcgtttgaggctgaatagtgttccactgtgtatacataccatgcttcctctatcaattcatttgccaattaacacttaggttgatttcatatcttggttatcgtgaataacactacaacgaacatgggaatgcagatatctctyagacatacagacttcatttcttgtagatatatacccagtagtgggattgatgaatcatatgataattctacttttaattttttgaggaaactccatagtgttttccataatgtcaattggatatttttaaattaagttgtttacaaaagagatatctaaaactaagaataaagaaagttaacatgtttttctgccctttatttttaaaagggcagaaaaaatacatcatacaatcattaaattttaaaatacattaggatcagccaaagtagactttaaggctaaaagccttattataataaaattttcaattcttcccagagatatagtaactagaagtttgtgtgcaccaataacatagcctcaaaacatataagcaaaatttgacaagatacaaaggagacaagtac

SEQ ID NO: 681068 - DNA, 667 bp, Homo sapiens
tagattccacatataaatgagatcacgtggtatttttcttctgtgcctggcttacttcacttaacgtgtgtcctccaggtttatccatgttgctgcaaatggcagactttccttcgtttgaggctgaatagtgttccactgtgtatacataccatgcttcctctatcaattcatttgccaattaacacttaggttgatttcatatcttggttatcgtgaataacactacaacgaacatgggaatgcagatatctctcagacatacagacttcatttcttgtagatatatacccwgtagtgggattgatgaatcatatgataattctacttttaattttttgaggaaactccatagtgttttccataatgtcaattggatatttttaaattaagttgtttacaaaagagatatctaaaactaagaataaagaaagttaacatgtttttctgccctttatttttaaaagggcagaaaaaatacatcatacaatcattaaattttaaaatacattaggatcagccaaagtagactttaaggctaaaagccttattataataaaattttcaattcttcccagagatatagtaactagaagtttgtgtgcaccaataacatagcctcaaaacatataagcaaaatttgacaagatacaaaggagacaagtac

SEQ ID NO: 681069 - DNA, 667 bp, Homo sapiens
tagattccacatataaatgagatcacgtggtatttttcttctgtgcctggcttacttcacttaacgtgtgtcctccaggtttatccatgttgctgcaaatggcagactttccttcgtttgaggctgaatagtgttccactgtgtatacataccatgcttcctctatcaattcatttgccaattaacacttaggttgatttcatatcttggttatcgtgaataacactacaacgaacatgggaatgcagatatctctcagacatacagacttcatttcttgtagatatatacccagtagtgggattgatgaatcrtatgataattctacttttaattttttgaggaaactccatagtgttttccataatgtcaattggatatttttaaattaagttgtttacaaaagagatatctaaaactaagaataaagaaagttaacatgtttttctgccctttatttttaaaagggcagaaaaaatacatcatacaatcattaaattttaaaatacattaggatcagccaaagtagactttaaggctaaaagccttattataataaaattttcaattcttcccagagatatagtaactagaagtttgtgtgcaccaataacatagcctcaaaacatataagcaaaatttgacaagatacaaaggagacaagtac

SEQ ID NO: 681070 - DNA, 610 bp, Homo sapiens
ggaggctgaggcacaagaatcccttgaacacaggaggcagaggttgcagtgagctgagatcgtgccactgcattccagcctggtgacagagcaagactccatctcaaaaaaaaaaaatttgatgaagccaacgtgaggacagctgcmcgggaaacactttcaacttggcttgggcagtgttccattcagcccaggttacagtcaggtttcaaaaggcaaaagggaacaaggggtgggcggatacaaagttgtctgacaggaattctcattggcttaggaaataacattgattagtgattagctttaaatgttgaactacagggtatgagttttggtgtctagcctacggcactgtgtggttaattttatggctgcttggcatcaatctagagcccacatagcaagtggttccaagaggtggttacttgattcaaggcaggagtgagaggtgactgccaccacacttcagtgccctctgggtctgataatttggaggggctggcattcctcaggtacagtagataaggtgcctgcattctctccccacacacatataccctgaggggaggcactgcttggagcagaaaagcatctatcaaggacaaaactc

SEQ ID NO: 681071 - DNA, 1699 bp, Homo sapiens
gaatttacaaaaatcacagacccctgaaactaacttgtttattttcatggatcccaggcccaaggacccctggtctggaagctcttacttttctcaacttcttactctgaattccacatatgtgaaatttctgtgaaatgaagttttcctctttaattttagccccttagattgagatattgcgtgaaaaccttggggacacctgtttttttattatcatcatgatacaagctcttccccttgagcaaggtcattggagtgaacatcagtccttgcgctgggctgctggcacaagatgatgtgtgggaaaccccagcccaggcctggtttcctctcttcaagccagataccatgtactggctttcatttcttctttccagttgtgggaataaagccaaagttcccttgtacattcactttacatgtttgaatatgcccttttgtataagtttgtgttcctctttttgccttttgcaaaatctgctgactaccacatcttggccattcagagaagaacaggtggatgctcaccagtgtgggctgcctccatttcccctgctgaggagcagtgattctagacagtaaagtggtgacattagttatgaaattctttgtttgtgaaattcacttgctaatgtggtagcctgtataatcacccccaagagaagtttatgtcctaatcctggaatctgtgaatatattactttacataacaagagattgtgcagctgtttagaatagtacggatattgaaataaggagattatcctgtactgtctggataggccctatataatcataaggatctacataatcataaggcagaaagttcaaagtaagagtaggcgacctgatcatgaaaacaggggttggagcaataaggggaagtgagtatgtgccgggaacaaaggcagcctctgaaagctggaaaggcaaggagacggattctctcccagagcctgcaaaaggagtacagctctgcccacgctttgattttagcctgcaagtcccattttgtgtttctaacctccagaactataagatagtaagtttgtatttcttgaagttactaagtttgttgtgatttgttacagcagcaattggaaactgatacacttattaaccattccattcaaaaagaacaaagggttaaagtagaagcaagatcaaatttcccaatctacttttgctctgtcctctgcaatatctgcaaggaaggataggctggagatcatttagatgtaagtggttgtttctcttcactcactggctctagattgttatgctttcatagttcttgtgtgtgctttttatattctgcctgtctcctccctcactgtcctcttgtagacaacatgcatrcctccctgctcccatttgctatctttaatctgctaaaggctaaaaaccaaagaaattataattgactttttaaaaaagagaaaatgggctttgaatgaaagctcaagggactctcctattaaggaaccccataacctctcggggttttactgtggcatctattttgaccctaaagacgctttatttatttatttcacctacatttcctttttcatctgtgttcagcattgttgggcattctgggtaagcattccccacataaatgggattgtcactgtgttattagatctaaatcttacaagtttttttgtatcaatcaataattcaataatgagta

SEQ ID NO: 681072 - DNA, 1208 bp, Homo sapiens
attttcccttataaagttaactactgaaattcactcatctgtgtcctactcattgtcagacaagtttagagggagtatggtgctggctcctgcactgggagtgtctgctctttaacctgtggtggcaccaggcaggcggttgtccatcccagtctgagatctcatgtagaagtgcgtctttctcgaagggattaaaaatgtcatgttcttattaatctgtgtaaatctaaatggaatgttttgatggggtgataggaaaccaatttcagcacagtctgctttgaatccctatttttaagcacagagccagtcaccagatttcaaatccatttaccaaataccaaaaagccttcctttctgcactcggaaggatgattttgtattaaacacagatggtcatgctccctagggagctcaactcataaatttataatctagatgctaatatttttttgttcaggggtagttcatttttagaaaattggaaaaatttatagatacgggactaacattttttaaacaacaacaacaacaacaacaacaacaacaacaacaacaaaccctgtagttaatacatctagaaacaggattattctgatacaacctacccacttcaacctagtcagggaagtctcatgacgcagtagactagaaggttaaattggtgctaggagctaggttgtgagggactctagctgggcagcagyggaggcaatgggtgtctatttgccatttcccatccccaaaacttctgtgccctttgcccaatgtcaagtaagtaaaaatcttataaatcatctttatgggggcaatatatcccaaacattgatttttccaaaggcaataaagacatcagggcatacaaccgactctctgactaaatgagctcctggatcccctaatcctgtcctcccactttacagatgagaacttggggccttgagaggtcatgtgtccttcctaaagacacctaggtggttatttaaagaactgagaagcctggcaccaagtccactcactctggctcactgcttttttcctacacaatcttaaagaacagcagtagctcccttgttttgctgtttcttgttgctacattcataatcacctctcttcctcatgatagccttgggagacaggcattgctatccccatttcggatggggaaattgcccaaggtcacacagctggacaggtgtagaggcaag

SEQ ID NO: 681073 - DNA, 1194 bp, Homo sapiens
tagcagggcatccagcaggtttcaaaatatctgccaaagtttctcctgggccataactggtgttcttagtatagctgctaatgcctgtgcttgctcctgcctcttcttcaatctctttgcctcttcccaaatcttacttttcagttttatgctctggctgtttgcttctaggagagtgtggtatgaagactctagctgtgcaatcagcagcatgtcaagagagcaagaaaacagtcaagggtgctttacttgtccaggaaagaaacagctagacatgtttcccacctgttgggtctactcttttgacatccatttgaatttgacattttgaggttagaatttatagagacaattcagaaatctgccttgagaaattatgtaagtgatgctaccctatcttagttcactgttacttatatccacatataaaataactctgtcctagaagagaagcagtgtgggagatttgacaataagggccatccatgctggaagctccaagatcaaaccaaacagtgagtgccagctctcctacagcaaggggagtcattaaaaggaagggtcctggagctgtggagtttgaatccttgctcttctgtgactttgggccagtttcttagccctttagtgcctctatttcctaatctgtacactgggcacaatcctagtagttacttcttagggttatggtgaggataaaatgctttataaagtaatgcattgtaacaggtattggccagaacatagatccrgaagtcagaagactagagtttcagaagcacctggcacatggtaggctcatatacgtgtcagctattgttgacaccaccactagcagtttttgtggcactaaatagcaaagaatggctcttcatttctgtggctcttctggtaattgtggactttgattctctctgggtgtgcatgggaaccagaaacgacctggactgctattcctgtcctgagtacaatgctgcatggcctacccgtaaaccaacaccatgcccttgtgattctccagggagcgggccactgtttaccctatccaagtttggagtgtccccagaaacaataccttgcctccgccgggcattgagtttcctaaagcaggtcccttccacaaggcggttcaggcgttgctgtttgatcagctctaagatttctggctgaatcttctcctttagttccctgtta

SEQ ID NO: 681074 - DNA, 1625 bp, Homo sapiens
agactgtgtggggagctctcccttgaagggaacgtgccctctgggaagagccagtgaggaggcaggcaggggagcagcaggtcccacactggacagggcaaggcctgtttgaaggccgccatgactgctgcttttagaaaaggacaagtacaatggtacgaatgagtgtggtacaggtgtcaagttggttttgcagccagactgcctgggtcaacttctgagctccttaacttgcaagcccttgctgttaggcaggcgagctcacccactgaagcccctgattattcccccatgtgtaaaaggggatgcggagaggacctaccccattgctatgagggtttgtgtgagggttgcatcagtcattccagataaggcacgtatccaggcctggtacagagcaaatgctcagtcaaggtcaatttcattattaatataattttattatagaagcctgttctgtgtggtgtttacctaccttcagaacgtcctatgccatctggtgccagtacttgaagaggttttcttctttattttacatggtcattgctagactcgttcggaataacttcttcccattctgtgcagaaattgatactgtttcctaaaatgaaacaaaaataaaaataaacacaaacactttggaatgagttaaaatttccataatgcacttttcataaattctttcaatggataagattgaactgaaggggaaggtgcagaaaagataattaattccataagatgaatatacaactctgaacttgagaaataatcaactcgccctcagtgtgctttacagggtggaggctgagaaggagctcaggtgtcttgttttgttgtttgtaggggtagaattcaggctgtaggaaaagaagaaatacatgacaaattttaacttttttcatgctcatcttccttgcctttgtaaacagtaatatgagtataatttaattttatgtgataattcaaagttaatgttggcgtgtcagttgcagttaggaccacctttcctagaagacccttgaaaggggaagggacttctgagatctccttggtatttctatctttaagcttatgtcttttcgttttagcttccctttgccctattgccttctcctcattggatggagaaaataatgttagttcattttgtatgcaaatgaaatattgaaagattctgaaagaagactcaaagttctctcctmtgagaaaagtgaaagaacttgaggacatgagctgtattttttcccttttcccaggagttatcagacagctcagagccaagtttatgacccatttctatccaatatacagaacttccaggcatgattttttttagttaacctcaagcctggttttatttttatctttcctgtttctttcctctcattcacattgcattttattttattctgcatgtagttttgtaagctgacttaaatcctttctggaacaagttggagagtaagtgacagtggccattggcaaaggatctaacgcttctgaatttcctttttttttttcattatgaaatagagataatatcttcacccaacaggttctcatgaggctggatgaggtttcccttgtaaatcccagatggaatgaccaaggtgtctctttct

SEQ ID NO: 681075 - DNA, 1012 bp, Homo sapiens
tgcttagaacttaattgacctgaaccacagtctatgccttctgtaatcaaatctggggctgccatcacccttgctcccttgctgcatctacactggcctccctccatttcttcaaacatagaattatctcactgtgtctgaaatactcctcccacatggttcatgtgtggcagccatctcttcattcctcaagtgccagattataaatgactgtcttgaagacactgctattttctttaataaaattacatcttatttgcttgctgcttctttatccccctacttcctctccagactgcaaggctcatgaaggcaaggatgctgtctcttgttaacaaatggagatacacccaacatataccaaagtgtctggcatgtgatgtgtttaagaatttgttcaatgactgaatccataaattctagcagaccaggtctccagtacttttttgactcctatttcagtgtctatgcagttcagaagtatgattatatagattagagtgacagttccatgttaattattactttgtgttttctttcttttttctttttttttttttatgatacaaaatcttgctctgttgcccaagctggagtgcagtggtgagatcatggttcactgcagcctcaatttcctgggctgtagtgattctctcacctcagcctcccaagtagttgggactatagatatgccccaccatgcccagctcatttaaagaattgtttttttatagaggtgggatctcactatgttgckcaggctggtgttgaactcttgagctcaagcaatccttgtgccccagccttggaaagtacagagattacaggcatgggccactgcacccggcctactttgtgttttcttacacataactataccatttgtcaaggtgagtaaaaaaaaaaaaaacaaaactctattccttgaccctcaaagagcttaactaaaataggttcctcatactatgcctacctgtcccacgaactcttgaaattcttagcatatcaatca

SEQ ID NO: 681076 - DNA, 651 bp, Homo sapiens
tcagtccatcagaaagaagacaagctgaagtcctgggtaagagatatctcacaaggtaaatgaaattaaattattcctctggcaagagcctaaacacaaggtcacatctagctgcaagagaggccacaaaatatagtcccagtctggatccagacagaactccattactagggaagaagatgagagagaattggggtggacatagagcagcctctgctacgtgcctaattcctatattaggtttcagactattaaacttttcaattactgaattatcatcacagttctaagagacaattactacaatgttcattctacagatgtgaaaactatgtcccaragagctgaagtaaaacacatgaagtctcacagttaaaagctgagctaagcttcaatttcaggtctgctggtcagtgctttctctaccataagtactaaattgaaatatttgcatagcaaataatcattagcataaatctgcatgaataaaaagaacaacaaggcattattgtgaaaggtaagaggaacagctaaagcatgcagcagatctaggactgactccaagtgttaagaggtctccaaactgaaagatggccaaataggaacagctccggtctacagctcccagcgtgagcaacgcagaagacgggt

SEQ ID NO: 681077 - DNA, 651 bp, Homo sapiens
tcagtccatcagaaagaagacaagctgaagtcctgggtaagagatatctcacaaggtaaatgaaattaaattattcctctggcaagagcctaaacacaaggtcacatctagctgcaagagaggccacaaaatatagtcccagtctggatccagacagaactccattactagggaagaagatgagagagaattggggtggacatagagcagcctctgctacgtgcctaattcctatattaggtttcagactattaaacttttcaattactgaattatcatcacagttctaagagacaattactacaatgttcattctacagatgtgaaaactatgtcccaaagagctgaagtaaaacacatgaagtctcacagttaaaagctgagctaagcttcaatttcaggtctgctggtcagtgctttctctaccataagtactaaattgaaatatttgcatagcaaataatcattagcataaatctgcatgaataaaaagaacaacaaggcattattgtgaaaggtaagaggaacagctaaagcmtgcagcagatctaggactgactccaagtgttaagaggtctccaaactgaaagatggccaaataggaacagctccggtctacagctcccagcgtgagcaacgcagaagacgggt

SEQ ID NO: 681078 - DNA, 675 bp, Homo sapiens
tttttaaaaacagccccattggaccacttttaatagtttgctgatataactaaacagtgatcattctcttaattcatgtttccattaagtttttcagattaagtactccaagactacacgctgttgaaactgtcataggcacagcctcagctccctgcagggcagaaacacgagcagaatctccgtggggcatctttctggagcatcaatattactgcaggctttggaagaaacaaatataaataatttctaaagtaaaatatggaacakttaagacaaggctggaaaagtcatccacctttaataactgtcacctgtgcctcacatggcagactttctccaagaaaaatactctaaggagaacctatttccattcttataaataacaaaaatgataaatcatatcaagtaaattgaaagtcctgccctgctagtttcctaaatcacaacatggcctgggcatcgttttatttgtatttttgcagggggcaggaggtggacctttggatataaaaatttgggtttttgaacaatttttcgaagtcttcaggtattccttgttgatttacttgtgtacaccatctaattcttctgtctctcttctctcctcagactcaatcattccacaggtctctaaggctctgtttattttctgtaaattttgttgatttactt

SEQ ID NO: 681079 - DNA, 652 bp, Homo sapiens
taatttttgcattttttttgtagagactgggtttcaccatgttgcccaagctggtctcaaatttctgagcttatgcaatccacctgcctcggcctcccaaagtgctgggattacccatgggcaccacaacacgttcagctacacttgttttttgttttttttcaagatggagttttgctcttgttgtccaggctggggtgcaatggcgggatctcggctaactgcaacctctgcctccctggttcaagcgattcttctgcctcagcctccygagtaggtgggattacaggcatgtgccaccacgcccggctaatttttgtattttttttttagtatagatggggtttctccatgttggtcaggctggtctcaaactcctgacctcaggcaatttggctgcctcggcctcccaaagtgctgggattacaggcgtgagccaccgcgcccagcctatgcttatttttaagtcactagcttgttctttaaaaagccaccattaccatcaacaaaaacaacaaaatttccaattgtatcaataattagttctaaaaagagaaatctaaataaaaatttgtctcatctcaccctttaaatttatatcatttgacatactcacagttcctaataagtaaatatgagttaaactattagg

SEQ ID NO: 681080 - DNA, 656 bp, Homo sapiens
gattcaggcacacattaacaccatgaaaggaaagcaaatgatcccttttccccccatattttacaactgctattacaatgaccaatataataccaaagtatatgttttttaaccttcgtactcaaccccatcccaagttgggcccaataaccaccctgggtgaggagacatttcagttcttccctctcctcccttctctcgtccacctcctcctcctctcaacttaaacagactactgtttttcctacgtcagtcccagacttgttattctctatgacttattccaagattggatgtaactgataaaggctaaacattcattatgagcttctcttttataaggcaacatgagacagatttgctttagggctggagaggtggttccgcagacacccagtggctgttatcttgacatttcaaagacaccagaagacaagggggtcttgtttgagtgtgctaggggaaccttctcttgggtcaggtgrgttggggatagggatgggagaagccacactgcatcccatgtggcctctatttctttaggtacctggagatgacaatgacagccaacagaaacccagccagagctagataaggcaacaaaaagcttcaatctcttctccaagtaaacaaaacttgtacagtatattattttc

SEQ ID NO: 681081 - DNA, 1879 bp, Homo sapiens
gcacagggtggagtccctcaaacaaatgctgtaatagggttgaaagcagatccaaccttcatgatctacagatgaggaaactgacaatcagagaggcgaaggcctagcccaaggccacagagctggttattggctaagttaacactcacacgcatctctcctgttttccagacaaataaatattcttgagtgcaaatgccatctacttacaagtgttttttaatctgtcccttccttcaggaagtctcagatttcttaaaggcatctggattccttcagttttttcatttacatttgcattagggaagagaacaaatctgtgctcaaggacatgttggtaatatttgtggcataaaattaagcacgtggcataaaattaagcacatggcatgacttcctttctggattcagaacattaactgcacttacccatactggacaacacccatcagtggaccggcagggccaatgtcaagagcttgggcaacatcagccaggagctgcttctggattcggaatcgccgtttgccaatgctggtgctcccatcaattaaaaacgacaagtcaattttgcagtctgcggaacggaaaaagactctattattctcatgatctctcactgcatttacctgggcatcctcttgttcctctttctccatcagagccccctgagaaatgaaaagaaagggaaaaagaggtaggaagatgcagggtatatttatttacatcccacaggggtttccctgagcaccagggtcttggacacttaggctagtccttatttccataactgtttaaaactctatgtatctgccacaattatgggtttcagaagcagcgacgtcctagccaagctagggaaggctgtcaatggtttcctaggctaagatcttgtaagtgcagactccccgttgtgagaattcatcaagactgagtcgcaagagcgtgtggctttttgctctcatcctaactttttagaaaccagtgttggatttttataaggtgtgagagatctgcaaggccagcactgagggagggcaggaattatagaataagaaattgatatcaatcttctccttcatttccctgggcgagggaaccaaagaaattatctacatatatgtataggatgtcagcccttgttcgtagctatccgagattttttttctttctttcttttagttgtgatgaggaccaggatagttattctgccttaggatctctggatctctgtggatatatgaaggttataagagaggtaaagggatggatgggctgcaagctcttttcacccttwcaaacatcaaaaggaactagtgaaaagccacacaggctaatggaaattagtgtttcctttgcggtagacaggaatgatatcatctcagtataaaactgactattcagtgctgatcagaggttcttattgggagctatagatccctttgattagtaaaaagtgaaaaataaattatttaacagttgcaatttagaagacaaaaatgtttcaaaacagagctccatataggaaaaaaaaaaaagagtgagtaaagttggaaatttctaggctggtgtatccgagaggacactggggcactgcccattgtgggtggggagcagcggccagacggacctgcacctctctaatctgcacacaaccacccatgttctccacggtgcattgttgccacagagctggagtcttcccattcttcaggaggagaagctctgtaggtggagagggttgttgctggttttaaaaaattgttttaaagatgaaagcaataaatgaacatgagttgacaaagttttgagcagaagaattgatgagaaatatttattgctgagtgctactgcagaactgtgattaggagaaaagtta

SEQ ID NO: 681082 - DNA, 1862 bp, Homo sapiens
tagtaatttgtgagagagtcttttcttaagcttagcctaaagcctggcacagtggacatttggtaaatgttagatgaagaaaaaacaggggtattggttttatattaaatttgcagtggcagaggtacattttgaatgctagtcagatgatgagattcattcaataaaaatatatttctcctatactccagtctgacctaatgccttaaatgagtggagcttcatctaatctctcctgtacagtgcgcaccacaacgcctctgtaagatttgtcccagttggcagcagtgacgaggcctgctggggacaaaccagggagctctccatccagcgccagtgaccaccagcacagtattgaatttgatgagcattatgttattaaataattattaacaaaaatagctactgttgtttatcattttcagaggctgcactaacctttctacatacattatctcatttaattctcacagtaacaccacactgcaggttctgggtctatcccctttttacagatgaggaaattgaggcttaagcaagttgctgaaagtcaaccaaccaacacatggtcaagctagaagttgaaaccctgtctgtcccaggactgtctgactccacagtcagtgtttgcaggcatgtcagaaaatgttgcccacagtttgctaagttacatgttaagtagtctcaaaatactctttgttttgcttctctggtttctctgcaaaagaactaacaggtactaatggtataaaatggtataaaagcggccaaactcataatgaagacttttttctttttcttttttttttttttttaccgttaatgtagaaaagatgatttctgatgaagggtgcctttacttcagtctcatagcacaggctctccctcaggtgggagggtgagtcagaggcggatgactatgctttgctggagttatttgcagtgtgtgacagggacagaaagtgtgaatgcatgcagcctcacatctgatgggtacatccctaagctgcacaactgtggcagcctcagatgaatcatggcattttaggatccgcatgtgtcgtcaacatacgtgggttgaattagcatggaagcatagtagtactctagaaacacaaataaaacacaccattgaagtacctgcagtttttcacatagaagccaaatgcttgtgaaatcagtacattttgagctttttgtttttagagctaatgctcttgtttactagataagaccatcttagcattttctatttaagtgtttaaaattcagtcataaaatttcactctaagctaaagctgtttatagtaacttaggctgtatgtgggtgtattaagaaggaaaaatagaatatatttctaaaaagatatattaaagtttttctggttcatgctgcttgattgatgatagatagatgattgattgctagatagatagatagatcaccataagtttgtttccatctgagtttgtttttagaaatgtgccttggcaaagaatcttctttagacagttaagtaaagtgatatttacagtaatataaattagaaaatgaaaaccagatcttgaagtagaagatatatagattccagtctgggctttgctgcttggtggttgtgtcatcttgagaaagttttctctgagcctcgctcagttcctcaggtgtaaaacagaatagtagctggtgcttggggtcttggggatggggaacaaataagatgatgatgtcagcgtgctttataatctgtaaatgctatacagttttttaaagtactgtaattatccaagtttwaaattatccacagccagcagatggactgatctgtcaccattcttcatccatgaaggtgataatgtttatt

SEQ ID NO: 681083 - DNA, 1791 bp, Homo sapiens
tatgaaatttcaattggacactgttaaaagatgaatgcagactagatgtccaagataagtcactagaaataatattcaattacgtgtctgaacttgaaggaggcttccaagaataagtcactcctccatccaacatttattcaaaattacatattaagtgtgtgcttgacaactgacatagcagtctcagaaactcacatatacaaggcatgttggttgttgctatttgatggtaatcctggacctcctgcactttatcttggtctaccagggacagatttggcaagaggaatatagggtcagttggccttgacctcacattcacaaaggacctcaaatttcagccaacatcatacatgcagtcatagagaaacattggcaggattgaaagatgatattcattatgccactttaaaaatttctcccattagtgggcaatggtaaagatagtgttcatattcttttcttcttctggaaactcagaaaattcacttctcaactctgttgcagttacaaacaaggctttttgacttgatctaaatgatgaaaagtgagctaacatatcttctggactctccggtagccttccactcttgcatagtagacagaggctgcgtgttcctggcagggacaaaaaggtggaaaaatgaagccttaattagcctagattgctgaatcactggtaacccctggagaatcatctagatctgcagtggacttttcatgaagaaaaataataaattttgtttgtataaaaccactgacattggggtttgtttgttgctgcagcatactttaccctatccttatacattgaccttaatatttagtgttctaaacaaatgctaagattctattttgcacaatgatacagtattacgggattgttaagggggttgggtgtgtatgtgttgaggataaaagaagtgactgtaaaacgttaatgtttacttgtaaacatttaaaatgtacatttcagatgtaacattggaaacatgacaatttaggggtcctgttttagggtgcttccttttttttttcttgataatttttctcaacatacatgaaagtcctggtccttcctcyacccttgagaagccctgcttttgactgaatgacttgaaagcataaaaaaagatgcgcgcgcgcgcacacacacacacacacacacgtcactagtctgaatgtcagagatagtagtaccttgcatcaactctgaataaaggttgttgatctctttggcctcagatccttaactggtgtaatggagacaagtgctgtctctgtcccatgatagccatgtgttcaaagattcaaagaagatttagaaaacaatattcctgagtaggttccaactctttagatccagaattaaagacaatggttgtcaatttcacaaacaacactataaaaatatgtcataattcactaagccagcattcagcacttaagccagagtagagacccagcacaggtttcagtggacagtctttgaacctagaaataaactgggtaaacctcaggttaggaaaatgtgtcagggaggatttgttgcccacccaatattcattctccccttctgttgtcgtaataaccttgcatttgtttaaagaggcaatgtgctcagctaaaagcttttatttcccaggctactctgcatctagatgtgattatgtgactttgttttggccaatgagaagttaacaaagaaggccttttaatgatttgacagacacttggagactgtcctgcttccccctttctttcttcctgcctgtatacaacagctgg

SEQ ID NO: 681084 - DNA, 1791 bp, Homo sapiens
tatgaaatttcaattggacactgttaaaagatgaatgcagactagatgtccaagataagtcactagaaataatattcaattacgtgtctgaacttgaaggaggcttccaagaataagtcactcctccatccaacatttattcaaaattacatattaagtgtgtgcttgacaactgacatagcagtctcagaaactcacatatacaaggcatgttggttgttgctatttgatggtaatcctggacctcctgcactttatcttggtctaccagggacagatttggcaagaggaatatagggtcagttggccttgacctcacattcacaaaggacctcaaatttcagccaacatcatacatgcagtcatagagaaacattggcaggattgaaagatgatattcattatgccactttaaaaatttctcccattagtgggcaatggtaaagatagtgttcatattcttttcttcttctggaaactcagaaaattcacttctcaactctgttgcagttacaaacaaggctttttgacttgatctaaatgatgaaaagtgagctaacatatcttctggactctccggtagccttccactcttgcatagtagacagaggctgcgtgttcctggcagggacaaaaaggtggaaaaatgaagccttaattagcctagattgctgaatcactggtaacccctggagaatcatctagatctgcagtggacttttcatgaagaaaaataataaattttgtttgtataaaaccactgacattggggtttgtttgttgctgcagcatactttaccctatccttatacattgaccttaatatttagtgttctaaacaaatgctaagattctattttgcacaatgatacagtattacgggattgttaagggggttgggtgtgtatgtgttgaggataaaagaagtgactgtaaaacgttaatgtttacttgtaaacatttaaaatgtacatttcagatgtaacattggaaacatgacaatttaggggtcctgttttagggtgcttccttttttttttcttgataatttttctcaacatacatgaaagtcctggtccttcctctacccttgagaagccctgcttttgactgaatgacttgaaagcatwaaaaaagatgcgcgcgcgcgcacacacacacacacacacacgtcactagtctgaatgtcagagatagtagtaccttgcatcaactctgaataaaggttgttgatctctttggcctcagatccttaactggtgtaatggagacaagtgctgtctctgtcccatgatagccatgtgttcaaagattcaaagaagatttagaaaacaatattcctgagtaggttccaactctttagatccagaattaaagacaatggttgtcaatttcacaaacaacactataaaaatatgtcataattcactaagccagcattcagcacttaagccagagtagagacccagcacaggtttcagtggacagtctttgaacctagaaataaactgggtaaacctcaggttaggaaaatgtgtcagggaggatttgttgcccacccaatattcattctccccttctgttgtcgtaataaccttgcatttgtttaaagaggcaatgtgctcagctaaaagcttttatttcccaggctactctgcatctagatgtgattatgtgactttgttttggccaatgagaagttaacaaagaaggccttttaatgatttgacagacacttggagactgtcctgcttccccctttctttcttcctgcctgtatacaacagctgg

SEQ ID NO: 681085 - DNA, 1791 bp, Homo sapiens
tatgaaatttcaattggacactgttaaaagatgaatgcagactagatgtccaagataagtcactagaaataatattcaattacgtgtctgaacttgaaggaggcttccaagaataagtcactcctccatccaacatttattcaaaattacatattaagtgtgtgcttgacaactgacatagcagtctcagaaactcacatatacaaggcatgttggttgttgctatttgatggtaatcctggacctcctgcactttatcttggtctaccagggacagatttggcaagaggaatatagggtcagttggccttgacctcacattcacaaaggacctcaaatttcagccaacatcatacatgcagtcatagagaaacattggcaggattgaaagatgatattcattatgccactttaaaaatttctcccattagtgggcaatggtaaagatagtgttcatattcttttcttcttctggaaactcagaaaattcacttctcaactctgttgcagttacaaacaaggctttttgacttgatctaaatgatgaaaagtgagctaacatatcttctggactctccggtagccttccactcttgcatagtagacagaggctgcgtgttcctggcagggacaaaaaggtggaaaaatgaagccttaattagcctagattgctgaatcactggtaacccctggagaatcatctagatctgcagtggacttttcatgaagaaaaataataaattttgtttgtataaaaccactgacattggggtttgtttgttgctgcagcatactttaccctatccttatacattgaccttaatatttagtgttctaaacaaatgctaagattctattttgcacaatgatacagtattacgggattgttaagggggttgggtgtgtatgtgttgaggataaaagaagtgactgtaaaacgttaatgtttacttgtaaacatttaaaatgtacatttcagatgtaacattggaaacatgacaatttaggggtcctgttttagggtgcttccttttttttttcttgataatttttctcaacatacatgaaagtcctggtccttcctctacccttgagaagccctgcttttgactgaatgacttgaaagcataaaaaaagatgcgcgcgcgcgcacacacacacacacacacacgtcactagtctgaatgtcagagatagyagtaccttgcatcaactctgaataaaggttgttgatctctttggcctcagatccttaactggtgtaatggagacaagtgctgtctctgtcccatgatagccatgtgttcaaagattcaaagaagatttagaaaacaatattcctgagtaggttccaactctttagatccagaattaaagacaatggttgtcaatttcacaaacaacactataaaaatatgtcataattcactaagccagcattcagcacttaagccagagtagagacccagcacaggtttcagtggacagtctttgaacctagaaataaactgggtaaacctcaggttaggaaaatgtgtcagggaggatttgttgcccacccaatattcattctccccttctgttgtcgtaataaccttgcatttgtttaaagaggcaatgtgctcagctaaaagcttttatttcccaggctactctgcatctagatgtgattatgtgactttgttttggccaatgagaagttaacaaagaaggccttttaatgatttgacagacacttggagactgtcctgcttccccctttctttcttcctgcctgtatacaacagctgg

SEQ ID NO: 681086 - DNA, 655 bp, Homo sapiens
ccctcttccaggctctcataagcccctgagtatctagcactgattttggtgcatataattatcaccatctcttcatgagctgattttcccctcttgacaatatacaacttgatggtagragtatgtcttctttgtgttcataatcatagcaccaagaacactgattgttcctatcatttgttactaagaattaacaaattaatctggaagtaatcaaattaaaatcaatctcaccccatgtttattttcttttgttttaaaatgtcccttttaggcaggtaaatatcaccatgcaattggattgatttgcctgtacagatatagtaagttaatacatgagtgagtcgctacagccctattgctcctcctgtgctagggttggtgggcacaccattccaagagggtatacacggagattgagaattgattaaggtattagcctaagtgatatcaaatgaagagtgtactggaaatcaagatgatctttaaaataagttactgctttttatttttccttaactgtcaatgtagtttcatcagttgtaacaaatataccacttcagtggggaatgttgataatgggggaagctatgcatgtgttagggcaagggggtatatgggaaatctctatacatctcaattttgctgtgaacct

SEQ ID NO: 681087 - DNA, 456 bp, Homo sapiens
atatatacatatttatatgaaaaccataaagctatcatatacaacatccactttcataatgagttctccagagttttgttaaatagaaaagagcaatgccaatttaaaggaaattcttaaaagaattaagataaaaggtgatataagaacatggcaaaaactttcgctacaatrcacaaatggctaaggtttagaagtcaccaaagtaattttatgaaatgattttaaaatgtgatagcttatatcaaaggtggtatttcccttttatcttaattataactattattgagataaaggagagatcaaagaagcaaagcggttgagattttagcgcaaggcaggaatcttgggggttaggcgtgaaatcaagttttggactgcagtagactctatacagttgcaggatgatggcatttcctgggtgagtttcctttggctgtttttggaacagctaac

SEQ ID NO: 681088 - DNA, 456 bp, Homo sapiens
atatatacatatttatatgaaaaccataaagctatcatatacaacatccactttcataatgagttctccagagttttgttaaatagaaaagagcaatgccaatttaaaggaaattcttaaaagaattaagataaaaggtgatataagaacatggcaaaaactttcgctacaatgcacaaatggctaaggtttagaagtcaccaaagtaattttatgaaatgattttaaaatgtgatagcttatatcaaaggtggtatttcccttttatcttaattataactattattgagataaaggagagatcaaagaagcaaagcggttgagattttagcgcaaggcaggaatcttgggggttaggcstgaaatcaagttttggactgcagtagactctatacagttgcaggatgatggcatttcctgggtgagtttcctttggctgtttttggaacagctaac

SEQ ID NO: 681089 - DNA, 581 bp, Homo sapiens
ttttgttataacacacttaaaaattctagagcctattgattcaatgattaatattctcaggggcyctgcaatactcaacacaatgaattaacaacttgcttctgatagaactattttggtattgaaggaattctttaattttaattattttaatctttttttttttttttttaacaaggtcttgctctgacacccaggctggtgttcagtggtgtgatcacagctcactaccgcctccacctcctcaaactcaatcaatcctcctgcctcggccttctgatgtttatctttctttaataaaaatgggatccttttaaatctcaggaagcttcagccaatttagatgacccatagattttagtacctgcaccactcctgtaattatattaatttactgtcttatcgtactctccaattcttccacatatctctatcgtaaacacttgaaggagaagagcctgatgtttgcggttcttcagtgcctgggcaactgtcctggtccaggtgagacagctttgcgtagagatcacaaaactgtatgcctgcaggacctaggcaggtagcatgtgtgggtgggaagg

SEQ ID NO: 681090 - DNA, 762 bp, Homo sapiens
ttttgtaagatgaagttaaacccttcttccccaagtttgagtgaaaagtttaaatatttatgcatagtgggcaatatgggagaaagaaaaatttttccctggggaaagcaaagtaaatgaaacaatgcccgtgagcttcttgagaacaggtaccatggtttgcccattttggagtatccaataccagcaacatgcctgacacatggtaggtactctgtaaatgmagaactaattaattgaaagacaccagagatctagaaattaatatttattctcagtctcatctaggcatttcccagttgcttatagcatgtttgtgtatgggcctacattggtaccaggaactaaatctaaacatgagaacttgttaagcaatagctgcaaatgtggtacagccatggaaattttaaagcagaaactgatgactgttcattaaaattaaaagctatattcagcttcccaggatagtaggaagagtcacaatgaatgaacctaaagcttatgtgcatgaacattacagctcaaaatattttgatgtgtcctacttcccgtggtccttccaacagttccgaacacatattaggacagattcttcccttgtatggtttagcaaggtggctgaattctagccaacggatgtcagtgaacttataggtatcatttctgcatacagcttttgagaaatattccatttccatattttcttttcactgtcctaccagcagtgatgagagcagtgaaactgtagggaatgtcagagcc

SEQ ID NO: 681091 - DNA, 608 bp, Homo sapiens
tgcaccacttactctttggggaaaaaggaacagtttctaaattattgggtactgagggactaccaaaaccaggaaattcatgttttatgagttttccccaaatcaaagcaacagggttatggtcaacatcatcctttcactcccactgggtcctttctgggaggtgctttcaraggcaaaagaaactttttgccgtgaaagtcacatccactttatggctttgtttcctgctgaaaatctagatctgattgttctaaatctgactgtgattcaaacttcctacataaatttaggaaaaaccacttaaggtctttatttcagtttcagatacatacacacatagacctgtattacctagctacagtatgtatctttcataaaacaatagtaaatgtctgataaataagtaatattttttgtgctttttcctataccaagtgtatgctaatgaatttctgtgcttacatccaatagtgtaagttgggttttattatacacaatttacaggtaaaaagaatagcatcccagaaggatctaaaccttcccaaggtcatcacctcatgcagtggctctctaatctgggcaatcgtacccttttcacccgctac

SEQ ID NO: 681092 - DNA, 1543 bp, Homo sapiens
cttcttcttttttttcttttttttttttttttttgagacagagtcttgctctattgccaagcttgagtgcagtggggcgatcttggctcactacaacctctgcctctgggttcaagcaattctcctacctcagcctcctgagtagctgggactacaggtgcatgccaccatgcccagctaatttttgtatttttagtagagacaggatttcaccatgttggccaggatggtcttgatctcttaacctcgtgatctgccaaaaatggcttctttttgctgcatcctcacatggaggaaagaacacattctttctggcttcttttataaggtcactcatctaacttatagggacatagtcttcctgatctaagcatctccaaaaagccccacctcttaatactatcaccttggcagttacatttcaacatatgacttttagggtgacacaaacattcagactatagaactctatggcggagacagccaccacattgtgccttcccttcagtgcagaaatggaaatagtacaaatcttagggttaggtgaccgagattcaagatacctacctactgtttactggttgtgtgatttcaggtaaccacagagccacctctgggcttctgtttcctcacctggaaaatgatgacataaaataattcagcccctaattcactgaatttttaataggaatcaattgagaccaagaataggaaaatcaagctgtaaattatgaagtggcctttaagtatatggtttgattatyaatcctacagattgttcctgttggcagataaatattaggtgttagttatcaaacatcacatcacctagacagccctggccttagaaatgttggcatctgctcgtttcactgtatgatggaaaaaaagaataaataaatcataaatgattaatttagacttccctccacgtctcccgttaacagctcaaagcccccaccacacagcaggcttagtgatgaactggtgtggtagaaccttcaagacggcagctaacccttctccaagtacaaccagctgtgaaaacaaatttaactccaccaacactgcaaaggagcaaagctttttcataggttagagatataatgttcacctcattcagagggatccaaaccaaataccaatgacttctgggggtaaggctattaagcataatagatagattatctactagtttactaaatgtgaaggaagaaacatttgtcatagttttgctagaaaatgagactttatcaaagggagagagggtgaaaggttaccagttctattggtgcgattattatctttacatagctggagtggcaaaagaaatgatcccaaacagagtaaaacaaaacagaccgcaccgaagcacttcaagatgagccccaagaagccatcataccagacccattggcttcatcttaatttatcatcttggcccttgttgacaagagtttgattgggttatccatctatttaagctgcagcaagttttatcacagcaaaccacatgacagatgttgaagatggttatttcttg

SEQ ID NO: 681093 - DNA, 677 bp, Homo sapiens
aaaagataagagtccaaaatcagaacctgttttactcaagccagttgatgtagtcataactaacaatgacacaagagacctgggagctcacgttagaaaggatgcattttcaattgcctgtaaaactttttcaacatatcatcgtcaaaaagatttcattctttctactttatgtacactatttttggccaggtttctctaactaagcactattgacatattgggttggataattcgaggctgtcttgtacattgtagaatgtctagtagcatccctggtctgtcttcactagaggccagtagcaccaccccatccccgacccagttacgacaatcaaaaatgtcttcaatattgtcagatgtcccctggcaaacaaaattatccctgtcatttagaacgcatattaatactaatcagtacaayaaattggctgaaatgggataagttaagaaaaaaaaaagcagaggactaaactctcttttacattggtcttgctttaaagaaaataataaagttgtaaagcaggccaacaaggacaccccttcacatgaaagacaggcttttttaaaagaataattgggagtttattttcaatcagccaattttgtggccaaaggatagcctgttcatcttttacatcccttcaacccttctcactgtgggtttctggtgatga

SEQ ID NO: 681094 - DNA, 651 bp, Homo sapiens
tctattttccactcctacagtaataaaattttcatatgggcatatggctatccagaataaagactacatttcctgaccttttttgcaggtaagcagcatcactggatgacaaagtactggccaatgagatataagtgaacatatccataaagcagctcccaaggacctccttaaaagagatggcacatgtaccctaaaacttaaagtataaaaaaaaaaaaaaaagagatggtacacacacactttgctctttttttctgttcctttgtctacctttctgcctagactatgagtacataaggggcaagaaggcatcataagatgagagcagagagcttgagagagcctagatctctgaagactgtatggagcagagctcccayaccactccagattgcctggcttgagactttcacatgagagaaaaaaataagctttttttcttgtttaagtcactattattttaggtctctattcctcactgtcaaaccaaatgctaactgcaatttgcaatgacatttcgtctctccttatttgattttctttttttaaaacctgaagttctgatttctaatctccttacttcaaaataagtgcaagagagaaaagcagaatacatggaaataattttatagaaacattcatttttaa

SEQ ID NO: 681095 - DNA, 2021 bp, Homo sapiens
cttctcaatgcagaatgaacacatgctgaattagcgtttcttcctctccatcttgggatcttttcacatagggctttttactaagaagagaggtgatatggttacttactcagcccaatgccatttgagtagtgaaagaagtatggagctgttagagattcatgttcttccgatagataaactcctgtctttcagtaagccaatagggctctgttgaaatatggattcagttcttaatttccttgcctttatataactttttaaaacaataagctctcttataatcatacctttaaccagctaatctagttttctttcatctcttgctgaaattcttctccagccaatgccggacttcttgaaggttgtaggagaaggggccctttcctcccagataagcaattttctgtctctgcacaatgcacacacgttcaaaggctaccccgtaagctatgttggcgttattgtccatgcggtcagccacaactcggcactggggcggcaaggagaaacgctccagaagctgctgggctgctgcacatcgatcttcctggttctggtgcttcttcacctcaaaagacaaagaggagtcccccggtatcgcccagccatctgatggatgagcctcatcaatgtagaccagcaggaagtcagccactgaggagaactcttccaccagtttgcggaaggctggcagctggctcgtgaaaggaggtcaagtggctgagccaaagttgaccactagtgggcgctcagggctggcaaagtcaagaaggtggcatgtggctccctcagctatcttctcctgggtaccattgccactgttgtcacctccttctgtactggagacatgcaccacactggaattgggggcatcctcacccaatttcacctgacggtaaaaaaaaaaaaaaagaagaagaagaagaaggtgagaatatcacattaaacacattgccacttgaattcacattaaatagttacaattggctctaatagagtgtggtatttccttcagagcatttggtaaacatttattgatttgagtaaagaggcatgatggcaggtaatgtaaagaatggcccaaaagacaataaaagtctttttcattctgtatagtcactgaagataattattttcatcactgaaggcactggagttaactctttttaaaattaagccaaggctgktattctttactatccttattttgctgtcaattcttaacatgcattctataacaaatgattaattgacttcattttaaaaattagaagcaaatggtctactttaagacaaattatcagggtcttgggacatggtccctctttctgaattctgaaacaccaggcaggaccttcattttcttgcatgatactaagtcatttaatctcaaccaatggccagtgataccagtgggctctattcttggccagatctagaaaacctgaggtctaccacttataagaagtgttacttccacttaacctctttagtgattcagctttcccacctgtaaaatggaaataataatgcctgtcttccacatatggcaactggaggacaacatgagaaaaagagctctttgtgcactgtaactctatgggtgtgtgttgtccttatcagatgctaccccaccatgtgaaacagaacatcatcattcttgggcaattctgtgtttgtttttgtttttttaaatgccctgagcaaagctttgcactctcctcaatatggcatcctccctggaggcttctactgccactgcttacaaggtggttcttaccactccaatcttacaatttccatttaaaaaaaaaataaaaacagacaaaaaaacaaaaatggttactccagaattctactttaagtcaatttctcattttccatgtgtgcttgtttccttctttttatctaggaagtcacattaaaaagtacttttctaccccacaatttgttaacaagctcctctgaattataaaatattggggcagaagaagtagagataaaaattgtttcatgtg

SEQ ID NO: 681096 - DNA, 620 bp, Homo sapiens
gacctgccccaccaaccaccaagatggcagagtgaccattttgcagggagtgtgaatcagtgcacagacggcagtgacaaggtgcccctgatggcatgaatcttgtcatcctgttcatcactgcattgccagtgcctggaagaggctgggaacgtagttggcactcaataaatatacgtaggatggatgagtgaaggaatgagtatggragggagaaatgtgagcaggtggagccaatactacattagctctctagggggtgtgaaggcagaaccacagtaaagtcctcccaatctctgctcaagaacccaggctgttgcgcagctatcagcgggtcactgcagttggcggttggacattgcagggcatggattcagcactgctgcctgcatggatgtcatattggctttgggacccagtcaggagggggcacttgtgttgtccctactcccttatatgccccagaggtctggtcctctaggtttcagaaaacacacagcagtgcctccaccggagtcagtcagatgcgcagggatggtctgggaattgcacccttatattctggtcatctccactcctcagccttagctcaccactgccccccatgccctgccactgac

SEQ ID NO: 681097 - DNA, 620 bp, Homo sapiens
gacctgccccaccaaccaccaagatggcagagtgaccattttgcagggagtgtgaatcagtgcacagacggcagtgacaaggtgcccctgatggcatgaatcttgtcatcctgttcatcactgcattgccagtgcctggaagaggctgggaacgtagttggcactcaataaatatacgtaggatggatgagtgaaggaatgagtatgggagggagaaatgtgagcaggtggagccaatactacattagctctctagggggtgtgaaggcagaaccacagtaaagtcctcccaatctctgctcaagaacccaggctgttgcgcagctatcagcgggtcactgcagttggcrgttggacattgcagggcatggattcagcactgctgcctgcatggatgtcatattggctttgggacccagtcaggagggggcacttgtgttgtccctactcccttatatgccccagaggtctggtcctctaggtttcagaaaacacacagcagtgcctccaccggagtcagtcagatgcgcagggatggtctgggaattgcacccttatattctggtcatctccactcctcagccttagctcaccactgccccccatgccctgccactgac

SEQ ID NO: 681098 - DNA, 625 bp, Homo sapiens
tattggagcatgtgtgttgagacataaatttggagcatatatgtggaagtgttttgtaatgtattaagcactaaataaatataagatttcattctttccaccatatgcattttcttcaagtagatccagtggtctatgggctaagaggtctccatcctattcctcttttgacttagagcaggagagttggcccaaatatgagcctactctcattgaaattatgacaactgcacccaaagctgctcctgttttcgtgaggatkgtcactatttcccaaggcttccatgcaggctaagaccaggcagtttcaatgattcaagctgtccacaaaattcctgggagacctgccacagtgatagttaggccataaagaactccctaggatagtcccccccaaaaaaaccatgggctttggacacacatatctggctctgccactccctgtgaccttgaacaagtcagcctggttttctaagcctcagtttcttcatccatacactaaagataaaaacacgtactttgccagacttttgtaaggatgttgtaagatgatgtgtgtaggctgggcatggtggctcatgcctgtaatcccagcactttgggaagccaaggtaggcggatcacc

SEQ ID NO: 681099 - DNA, 1470 bp, Homo sapiens
tcagtcactgactcatatattcaagcatttaaactctatctatatgcaaggaagctttatataatagaaagagcatagacagttttaatctccagggttttaatctgaagagctaacttttaatctccagggttcctcagtgctctaggattctagaatgtgccatgtttcagtgtagaaggggagagaagaataccccagagcaggatcaaccttgagtgtcaccaaatcagggaagattgttcccttgcttagggaaaaagccagaattggaggcaaaaagaatggaagaaaagggagcaccagagagccccacttcacagagagtcaaggataactcaatctctaggacagagcccataacatagtccctcaccccaaaccagggtaatgtttgatgtatattcttcgagcagcctgaaacctaccagaagttgggataaggccttcagcagtaattctcaaacacagttacctagagagattgtaaaataaacagattactaggttctagctctggagaatctgattcagtaggtttgggaatttgcatacttaacaaatgtttctgatgcaggtggaaaaaagtctgcaatggaaactgaaatccagttcttcctctgattccacatccttttttttaatttattttttatttttatttttatttttttgagacagggtcttgctctgtcacccaggctggagttttgcagtggtacaatcacagttccctgcagccttgcctttcaggctcaagcaatcatgcccgactaatttttgttttttgtttttttttatagagacagggtttcgccgtgttgctcaggctggtctcgaactcccaaagtgctggatactggcatgaaccaccacgcccagccccaaatcctattatttttctatcatattaaagaaccctagatgatggatggatggatgaatttacaacaaatatatgacagtttgcctcacctaagtccacagggctataaataggcaatagatgctggggccctcaatttgtttgtctctaccgtctcattaccacagttcctgagaaggggctgagctttagagtgctgactggataattctgggacactgattaaagccaacttagcatggtagaaagggcaagagctatgcagtcagaagacatgagcttgggtctaagtattggtactccctcgttgtgtgaccatgcgcaattcttgactttattaaacttttattttctcatttgtataaagaagataaaagtgtccaacgtacaagattgttaactactaaagtataataaatgctatcttatttctccagctaaggacacatccccagtctcactccatttccsctcatgatcagaaatccttaagggggatctactaactcctcacatttatgtacacattgcttttgggtacatagtcccatttgagtcttttttgtggtaagtgggggtgtgat

SEQ ID NO: 681100 - DNA, 635 bp, Homo sapiens
ttatccaaaaatcattgccaagaccactggagattttctcctatgttttcttttaaggatcttatatttttaggtcttargtctatacctttaatctatttatagttgatttttggtgtatggtgtgagataaggatctgattccattgtttttggtttgtttggtttgatttctcaagtggatatccagtttccccaaagccatgtattgaagagactatcctctctccattatatattcttgctacctttgtcaaagattagttgatcacatatgcatgtgtttattcctgaactttctatcctgttccattgatctatgtgtctgtttttatgccagtgccaaactgtttgattgctatagctttgcaatatgatttgaaatcagaaagtgtgaagcctccagctttgtttctgctcaagattactttggctatttggtgtcttctgtggtttcataccaattttaagattattttttctatttctgtaaaaaaaatgccattggaattttgatgagattgcattgaatctgtacatcacctcagtagtatgaacattttgacaatattgattctcctatgaatttgtctgttattattaactgttatatttgtctcttcttggataaatgc

SEQ ID NO: 681101 - DNA, 624 bp, Homo sapiens
ctctaaaagagctaagcccaagtagctcatccatagaaraacatcaaaaattcataatattcttggcaacttcattaaaagctaaaacaaaacattttaaaatgttaatttctagtgataggattatgggtgactttttcttcatttctgcatttctcaaatttgcaataattagcaagtattactttaatatgcaggaaaatgggccaggcacaggggctcatgcctgtaatcccagcactttgggaggctggggtgggtggtattacctgagttcgagaccagcctggccaacacggtgaaaccctgtctctactaaaaatacaaaaattattcgggcgcggtggcatgcttctgtagtcccagctactcaggaggttgaggcaggagaatcacttgaacctgagaggcagaggttacagtgagccgagattgcaccactgcactacagactgggcgacagagcgagactccgtctcgataataaacataataatatgcaggaagatgctttaaaagaatatacattatcctaaagcaatccacattgtatttagtgagaaagaacccatggaatataaactggctaatacggactattattccttctggcaatttatgatg

SEQ ID NO: 681102 - DNA, 624 bp, Homo sapiens
ctctaaaagagctaagcccaagtagctcatccatagaagaacatcaaaaattcataatattcttggcaacttcattaaaagctaaaacaaaacattttaaaatgttaatttctagtgataggattatgggtgactttttcttcatttctgcayttctcaaatttgcaataattagcaagtattactttaatatgcaggaaaatgggccaggcacaggggctcatgcctgtaatcccagcactttgggaggctggggtgggtggtattacctgagttcgagaccagcctggccaacacggtgaaaccctgtctctactaaaaatacaaaaattattcgggcgcggtggcatgcttctgtagtcccagctactcaggaggttgaggcaggagaatcacttgaacctgagaggcagaggttacagtgagccgagattgcaccactgcactacagactgggcgacagagcgagactccgtctcgataataaacataataatatgcaggaagatgctttaaaagaatatacattatcctaaagcaatccacattgtatttagtgagaaagaacccatggaatataaactggctaatacggactattattccttctggcaatttatgatg

SEQ ID NO: 681103 - DNA, 624 bp, Homo sapiens
ctctaaaagagctaagcccaagtagctcatccatagaagaacatcaaaaattcataatattcttggcaacttcattaaaagctaaaacaaaacattttaaaatgttaatttctagtgataggattatgggtgactttttcttcatttctgcatttctcaaatttgcaataattagcaagtattactttaatatgcaggaaaatgggccaggcacaggggctcatgcctgtaatcccagcactttgggaggctggggtgggtggtattacctgasttcgagaccagcctggccaacacggtgaaaccctgtctctactaaaaatacaaaaattattcgggcgcggtggcatgcttctgtagtcccagctactcaggaggttgaggcaggagaatcacttgaacctgagaggcagaggttacagtgagccgagattgcaccactgcactacagactgggcgacagagcgagactccgtctcgataataaacataataatatgcaggaagatgctttaaaagaatatacattatcctaaagcaatccacattgtatttagtgagaaagaacccatggaatataaactggctaatacggactattattccttctggcaatttatgatg

SEQ ID NO: 681104 - DNA, 624 bp, Homo sapiens
ctctaaaagagctaagcccaagtagctcatccatagaagaacatcaaaaattcataatattcttggcaacttcattaaaagctaaaacaaaacattttaaaatgttaatttctagtgataggattatgggtgactttttcttcatttctgcatttctcaaatttgcaataattagcaagtattactttaatatgcaggaaaatgggccaggcacaggggctcatgcctgtaatcccagcactttgggaggctggggtgggtggtattacctgagttcgagaccagcctggccaacacggtgaaaccctgtctctactaaaaatacaaaaattattcgggcgcggtggcatgcttctgtagtcccagctactcaggaggttgaggcaggagaatcacttgaacctgagaggcagaggttacagtgagccgagattgcaccactgcactacagactgggcgacagagcgagactccgtctcgataataaacataataatatgcaggaagatgctttaaaagaatatacattatcctaaagcaatccacattgtatttagtgagaaagaacccatggaatataaactkgctaatacggactattattccttctggcaatttatgatg

SEQ ID NO: 681105 - DNA, 581 bp, Homo sapiens
tcatgggattttcctgcctcagcctcccaagtagctggattacaggcgtgtgccactatgcccggctaatttttgtatttttagcagagacggggtttcaccatgttggcccggctggtcttgaactcctgacctcaggtgatccacccaccttggcttcccaaagtgctgggattacaggtgtgagccactgtgcccgtcccaggttgccagggttctgtctccctctccctctctcaccttccgtgaggcaggaagccccagctcacaggccagcagctgagataagaagtcatgtcctttttcaatgacatcagcagactataccagggagggtctggctaactgggcctgggtcattagcagccctgcctcaggagaggagctatctactatgcarcacagggcagtacaagcctcggttcctccctgtccacctagtcatgaaaatgaggatggttttggtggttagcatgttccctcttaacttgcctcagcatcatctgcaaaaactagaaaatataagtgtgcatatttttagctgtttttaaatttgtaaaactggaaactgttaagatatt

SEQ ID NO: 681106 - DNA, 581 bp, Homo sapiens
tcatgggattttcctgcctcagcctcccaagtagctggattacaggcgtgtgccactatgcccggctaatttttgtatttttagcagagacggggtttcaccatgttggcccggctggtcttgaactcctgacctcaggtgatccacccaccttggcttcccaaagtgctgggattacaggtgtgagccactgtgcccgtcccaggttgccagggttctgtctccctctccctctctcaccttccgtgaggcaggaagccccagctcacaggccagcagctgagataagaagtcatgtcctttttcaatgacatcagcagactataccagggagggtctggctaactgggcctgggtcattagcagccctgcctcaggagaggagctatctactatgcaacacagggyagtacaagcctcggttcctccctgtccacctagtcatgaaaatgaggatggttttggtggttagcatgttccctcttaacttgcctcagcatcatctgcaaaaactagaaaatataagtgtgcatatttttagctgtttttaaatttgtaaaactggaaactgttaagatatt

SEQ ID NO: 681107 - DNA, 955 bp, Homo sapiens
gagtggattttgaatgttctsaacataaagaaatgataaacatttgagaagatgacttgatcattatgcgttatacacatgtactaaaacatcacactatacctcataaatatgtataattattatgtgtcaattaaaaaaataataaaatggtgccagaagtgtcactgtgggagttaattgggataacagatgcaaaggcagccaagatggtgccaggcacagaaaacctccttaggaagaaacccactcaattccctttctcccatcccaaccctctgcaaatcttgggcagttgttaacagtgtccagcctgaagcgagaaactttactctgaggaattctcgacttggtaaccaaatgcaacacattacaaagaactcttggtttagaaccatacataacctgaatgtttccaggtgacttatttagaaacctccttagaaaagaatcaaactaaaggaaaactaattttatccattcctaattttttccagtaaataaagagatctgttcaagagaatttataggcaatgccacattcaggaaaaaaagcaaagaaagctcccttttagttctccaaatgtgcttctttaagatgctgtcttgctcctttaaccttaaagatgagtaaatcagcccaggcatggtggcttacagctgtaattccagcactttgggaggctgaggcaggcggatcacgaggtcaggagatcgagaccattctggctatcacagtgaaccctcgtctctactaaaaaatacaaaaaattagctgggcgtggtggtgcacacctgtagtcccagctactcaggaggctgaggcaggagaatcgcttgaacccgggaggcggaggttgcagtgagccgagatcatgcccctgcattccagcctgtgtggcagagtgagacgctgtctcaaaaacaaaaacaaaaacaaaaacaaaaaacaaag

SEQ ID NO: 681108 - DNA, 955 bp, Homo sapiens
gagtggattttgaatgttctcaacataaagaaatgataaacatttgagaagatgacttgatcattatgcgttatacacatgtactraaacatcacactatacctcataaatatgtataattattatgtgtcaattaaaaaaataataaaatggtgccagaagtgtcactgtgggagttaattgggataacagatgcaaaggcagccaagatggtgccaggcacagaaaacctccttaggaagaaacccactcaattccctttctcccatcccaaccctctgcaaatcttgggcagttgttaacagtgtccagcctgaagcgagaaactttactctgaggaattctcgacttggtaaccaaatgcaacacattacaaagaactcttggtttagaaccatacataacctgaatgtttccaggtgacttatttagaaacctccttagaaaagaatcaaactaaaggaaaactaattttatccattcctaattttttccagtaaataaagagatctgttcaagagaatttataggcaatgccacattcaggaaaaaaagcaaagaaagctcccttttagttctccaaatgtgcttctttaagatgctgtcttgctcctttaaccttaaagatgagtaaatcagcccaggcatggtggcttacagctgtaattccagcactttgggaggctgaggcaggcggatcacgaggtcaggagatcgagaccattctggctatcacagtgaaccctcgtctctactaaaaaatacaaaaaattagctgggcgtggtggtgcacacctgtagtcccagctactcaggaggctgaggcaggagaatcgcttgaacccgggaggcggaggttgcagtgagccgagatcatgcccctgcattccagcctgtgtggcagagtgagacgctgtctcaaaaacaaaaacaaaaacaaaaacaaaaaacaaag

SEQ ID NO: 681109 - DNA, 637 bp, Homo sapiens
aaatgccagttaaagctgaattcaacttaggcaatactggccactgacaatcagtatgtgtgtgtgttttgagacagagtctcactctgtcacccaggttgtagtgcaatggtgtgatcttgactcactgcaacctccgcctcccaagttcaagcaattctcttgcctcccaagtagctgggattacaggcacctgycatcacgcccggctaatttttgtattttcagtagagaaggggtttcgccatgttggccaggctggtctcaaactcctgacctcagtgatccacccgcgtcgacctcccaacgtgttgggattacagacgtgagtcaccgcgcctggcagacaaccaattttaaagcactctttctttgagctctttttctttagtaccagtacacactgtgtagatatttttgttttacttactaaactgtaggttagtaatcaattttagtacctaccagactgtaagctccttgaggacaaggaatttggacatttcccttttttgaagacctagcacaggacccttatgaaaataaccaccaaacagtcttatcaccaagttctagaactagagtagcatctgtcctattaaaaactactgatggcataaatataaacctaaactta

SEQ ID NO: 681110 - DNA, 1864 bp, Homo sapiens
tggattagggccccaccctgaagatctcattttatcttaattgtcctcttaaaggcgctatctccaaatacagtcgtattgggggttagggcttcaatatttacactttgggagacataattcagtccacagcctaaggctcctttcagtaaacaccaggggttgttgagcagcaactatgtgccaggctttcctctgggtgctagggacactgtggcttctcaaaaatgcccgttgtctgcagccatacycacctgaacatgcccaatcttgcctgatctcagaagctaagcagggtcaggcccagttaccacttggatgggtgaagtggcccttgcacttgaggagctcactgtccaaaaggtgagctccattaacggatgactggggcaaaacagaaacccaaaaaagataagaacagttcaggaagtggctcccagggaagcaacctaagatgaaatgatgaaatgtgaaacatgaacaggtgttcaccagttagaaaactggaggaagggcttttccagcaaaaggagcaaaggcccagaggtggagcaaaggcccagaggtagaacacatccagggtgctggagtgcagtctgaggtgggaaaccccagaggaggggctggagcagggagaggccacaggaggcctcattagctgtgctaggcagttatgcatattcagtagaaggtatcactgctaaaaagttttaagctgggctgggctcggtggctcatgcctgtaatcccagtactttgggaggccaaggcgggtggatcacttgaggtcaggagttcaagaccagcctggccaacatgatgaaaccccatctctactacaaatacaaaaatttgctgggcatggtggcgcacacctgtagtcccagctacttgggaggctgaggcaggagaatcagttgaacacgggaggcagagattgcaatgagccaagattgcaccactgcactccagcccaggtgacagagtgagactccatctcaaaaaaaaaaaaaagttttaagctgaagaacaatctatttatttctgcattttagaaagccccaaaattctaaaattctatttagcagtctctggctttccatgactgccacgtcatttgtggctaaccagtgtcagccagctggtgatgtattgcacagctactaaatgccttaattcttggttacttctctcacagggccgtgggtgtgtgtgcttatgtgtgtgtgttcattagatcttgggtataaattgccttctggactctgcagtccgcttccctttggtctagagaggaagcatacatcatactcaaatgtcttatttcattacaataaacacccataaggataattaggaccaggactattacatttgtggtaacaaaggcatgtaaaacttcatgatcctgaactctctgcctgctaaagattcactaagaccataggttcacatgctgagaaacgaaagcctcacagcttcctggaggagagaatgcacttaaggttttaaagagctgtaccttaccacaatatcactgaaacttacagagtatttagaagaaaggggaacatcacttgggtttttatagataattgttagtaatctacttattaaacacactgattctagtgctttctgagaaatttgcaaaagacaatcctttctattgtaaattccttgctaaaagaggattaaataaagcattaaataaagcaattagatgcacaaacacagatatatcaatatactttgttcaggtaatataattaatgacaacatcttctcccaacccagaaaacctttccataaaggtagtagaaaaagaaaaggtgtattactgaataagaattaaaccagaatg

SEQ ID NO: 681111 - DNA, 604 bp, Homo sapiens
tcacctgttttctggtgtctccaacgaactgtgagctctgtgatggtaaggactattaccgagttcaccgttcactctccagtgcctggctcatggtaggcacccaatataaagtttattagtggatgttcgctggagattcctgttgtgggaaagaaggggttttcttttctttaaatgggtactcatttgagtttcagcctcatccctttctctcccagtgactggcatcttgcttgttgcctaatgaccaagctcccaaggcgtacagcaattccaatgaacaagtcaaccttgatgttacgctcagcycactatagtaaacaagagcactgggctctgaggcaaaacacctgggttcaagttccagctctgccattggctttgaatgagaaacttctctgtgtttattttcttcactcggaagtgggaattatgatactaagcaagctcctaggcctgctgggagaagataaaattagggaagtatgaaaaagcactgtgtaactgacaaagcccagttacacactgtaagacatcatcactggtaggattatccttccactttgtctaggtgtgaccattaaatgagatcctagccttg

SEQ ID NO: 681112 - DNA, 628 bp, Homo sapiens
ctcaggcaatccgcctgccttggcctcccaaagtgctgggattacaggcgtgcaccaccgcacccggcctgtctctccaatttattttccatgaaattatcaaggggctttctctacartgcaaatctgattaaaccatttctttctttaaacaccttcaagggcctgaggccttctgggtagagtcaaagtccctagcgtgttgtataaagtgctacacatcttgccacttcttcaaattccatttatgcatataaaattttagcacttattctacttgactgaaataatctataatttgtcattcttctactctcttcccaaggtaccagagactgaaaatccctagagataagaactgtgttttatggaagaatacttcctcagtgctggctatatagtagtatttatgtaaaagtttactgaatgaatgaatcaataaatgaagactcaactctctaccttcatgctcatagaacttcagaacaataaacaaaataactccacagctcgactgctccaatttcccatgctcacctgagctgcccagttaacacaaatcatgtgtttagtttctttcatctgagtctaccttgtctccatcttttctctgcccagcttcagccag

SEQ ID NO: 681113 - DNA, 1234 bp, Homo sapiens
tttgaattactgagatccagtgttaaaaatccagggcactattgttatttctttagtacttgtcgcagaattcccagctgttgttctataagactacttttaaaaattaaccactttaaaggtgaagatagaacatccttctaaacatcatccctatgcttctgcagagacacatttagtatctctcctgttagataacgggcatgacattggctgcagyggggctgagacagagggagcctatttatatgtcatgtaatttaattctactctgaatctactttctatcacacggaccaggtaaagagttgttgagtagagtcaggaggagacagaaacatagctaaatagatagattgtatatacatgaattgggctggctaagcaagtttaaagtctgtagagaaggccatcaataagggaagctcatgggcagcctagaaccccacaggcacaggctgaagctactgtccacaagcaagaatctcttctttctccaaggaaagcctcagccttccttaatcagttagaaggccttgaaagccttctaactgattaatccaggccccccagtacaatctctaacttaaggtcaactgattagggagtttaattacattggccaaatcccttcacagcagcacctacattagtgtttgattgaacaaatgggggctgtagcctagccaagctgacacatcagaaagctatcacagtccacttggcattcgtacacatctccttaaatcatacttcatctccaagtaatgactaaattatattccacctaacatgatagaacgatccagaggacaactgagaatagctgtgaaatttggacacctctctgcttactctgccacttttcaactctacaaccttttcatattctctcattattagcacatcatttgttaattttcacttttcccaaatctctacctcttgttgaagccaatattcctcttagtttctttccactgtccattgtttttgttatagagaaccagcttaataagacagtgcccaactttttgatggctctcttccttgaggcatttttccttgggaatatacctatatgtggaatgcttataattaagaggcccggtgctaaacattgtttatacaatatttcatttaatattcataacaaccataagatataggtattattatcttcattctctaggttaggaaacgtgagccttagggtggctaaataaattgccca

SEQ ID NO: 681114 - DNA, 639 bp, Homo sapiens
gatggtgaaaccccgtctctattaaaaagacaaaaattagttgggcatggtggtgggcgcctgtaatcccagctactcaggaggccgaggcaaagaattgctagaacctgggaggcggaggttgcagtgagccgagattgcaccactgcactgcatcctgggcaacagagcgagactccatctcaaaaatatatatatatataaatatatatatatatayacacacacacacacacatatagtacacgggggtaagaaaacagaaaagggtatataaaacaggaagcctaaaacaagatgacagaaaggacaagaatcccagttatcataacagatagaaatgagttaaacatttctttggaagaaaaagcctcagaatgaatcaaatggcacaattcaacttttataataagtgatagacctaagaaaaaagggatactgaaagccctcagaaccaaacagtatatgggaattttaacctaatatctgtgtttaacagataaaaagtgacaaataagtatttacaatatcaaaaacaatataattaataagattgttttaccatattttctcaatagtaagaaacacatttctcatacctaaatatttgtaaaattgaaatgtcttttaatggaaaag

SEQ ID NO: 681115 - DNA, 639 bp, Homo sapiens
gatggtgaaaccccgtctctattaaaaagacaaaaattagttgggcatggtggtgggcgcctgtaatcccagctactcaggaggccgaggcaaagaattgctagaacctgggaggcggaggttgcagtgagccgagattgcaccactgcactgcatcctgggcaacagagcgagactccatctcaaaaatatatatatatataaatatatatatatatatacacacacacacacacatatagtacacgggggtaagaaaacagaaaagggtatataaaacaggaagcctaaaacaagatgacagaaaggacaagaatcccagttatcataacagatagaaatgagttaaacatttctttggaagaaaaagcctcagaatgaatcaaatggcacaattcaacttttataataagtgatagacctaagaaaaaagggatactgaaagccctcagaaccaaayagtatatgggaattttaacctaatatctgtgtttaacagataaaaagtgacaaataagtatttacaatatcaaaaacaatataattaataagattgttttaccatattttctcaatagtaagaaacacatttctcatacctaaatatttgtaaaattgaaatgtcttttaatggaaaag

SEQ ID NO: 681116 - DNA, 2025 bp, Homo sapiens
aacttgcttcttttcagtgactttgcatatctctaaactgaaacaagtgacaaagatttcatagtgtgatgtgagaatcctccaatttcatttcttttcatactctaggcacagcatgtaccacttcaccaactactcagtcaatatgcatctcacccctgcccccagctgtgaagatagaggctacaaacaacgagaggtgctgaggttgggggagggactcacggagcatggcgagagctcagagcaatggacttggggtatctgaaaagtactgactgaatgaaaagatttttttagcagcattgtgaacacagctgaggttggaagtcataaatttgttctggaaccactcaacctggctgtggaattttctatagctgagttcgactagagaaaataaatggtagggctgattcaggactgggagatggcctgacactgacaggtgcgcagggagagaaaggtgggattcattgatgagaatgtagctgaaaaagctagtgggtcccaggctgggtaaggaaggaagggaaacccagaaggaactgataaacagtgtcccatctctgccagtgaaccagtgatcacctcaataggatggaatgtggggcaatccaggaaaggcaaggtcagaacaatggagacctccatgcccgttccagctcagtaacctcaacagccccatcctctcccacaagcaaggcagctgggtgctacacattcccctctggctaagccataccccacccatcagagatccccaaatatcaggggctactgaaggctaagtgtcccaggaatgcatcagaacctccagctgaatctctccaatttcatgttttactagaatgacactggggtatctcacagcatcaaatgaataactgaagaattaagcctcaagaaagcaggaaccaggaattctccagagacctcaagcacaagaaccaggaactgaaacaccattagaactgtctcttcaccttccttctgtcctttgttctgcatgttaccttcactttcttttactaaagaaagttaagaacatggtctctggaaccagtgcctgagatttgaatcctagctctgctcttccaactgaatgaccttgagcaagttacttaccctctctgtgcctcagtttttttatggagataacactagtgcctactttgtatgattgcttgaggaataaatgatttttctaaagcacttggaagaatccctcccacacccccaggctctgccttatctaagagaagagtttggacaacaagagtattaatcagcaatctagcctgcgaggctgaagataataaactgaggtcccattcaggccaatggttggatccaatgccatggatggggtagggggcagcaggagccatggtgctactcagggtcaggcaggagacatatcatttagtgaggagcaggggaacctattcccacatgtggcatttattctcagacccttactctaccattgctccctttactggcaacagatgacctcatctactacgtcaaggcaaaactagacatcttgccctctaccctacccctacattctttcagagatgtctgctctgaagcccatccacattgcctttcctccccctctgtgaattatctgtcctttctgcagattatttaagaataattccctccactgtcctttcatgcccccaacgctcttcctcaagaccatgtcagccgtggtgttcttcccaytctccgcatatcttccacccactctcctcatatcttccacctcatcctcctcctggctctttccattagcattgaaacaagctcgggtctctcccaccctaatcacaaatggcactcctttgactccccttcccagctagcagctcaaaaagttgtcttcactccctgcctccacttctgccctcccattctctcctcagccctatgttctctagttctcattctcacttcttctgagaagctgacaaatgcctgggcctctgctatattagacatcactgctatccc

SEQ ID NO: 681117 - DNA, 605 bp, Homo sapiens
gttctaatatgtactaactgcttgctataccaggcactgttctaaactctttaaatatattgacatttcaacctaagaacaaccctttgaggtaggtactaagagatgagtaaactgaggcacaaatacatgaaataacttgccccagaaatatagccagtaggtggcagagctggaagttaaacccatatggtctggttccttagtccctagtgattagaacacactatactgcctcactktccctttctctgtcaaataatcgttgtccattttccctttggggtctttttttttcttttcaagataatactaagcaaggcagttacctttttttggaaggaagcagtaaggactctagactttcagcataattttcctttaacaatttacatgactggtaaaaattttatgtaagtagttctgtaaaaggaaaagcataaaaggaatgaaaattctcttggggagagtttaattaacattttctcttgtggcttgttttctgtggttcttggttgtcttagtctgtttgtgctgctataacaaaataccataggctaggtagcatataaacaacagaagtttatttttcatagttctggaga

SEQ ID NO: 681118 - DNA, 1507 bp, Homo sapiens
ccaagttgagtgaacacctaaataccaaaagaagaaaaaaaaatacaatgtgttaagtaggttttaagtttcctaatcatttacatcaatgatttagtcatgtcacaatagaggtaatatttcagagagatgtgttccttacccaagccactctccagcagtctataagaatcmtaacctactagttattaagcataatctaaataagaaatgaacaatgcacaatttggtttcctaatgataaattatgattaacaaatgaaaataaaagatttggcatctgataaaaacaatgattcagattatggagtctaaaaaaagaccaaggaaataaaatgtacacagccttgatttgataacatctctaggtctaggaagtaatctcatctttgagatgatgagaactctaacctcaaagaaccaaatctgaatggtactgaaaacctgactgcttaactcgggggtctgccacattttcaatctatatttagctacacattttttcactgttgtaaacatgcaagggaaaaaggaaaatactaatattttaccaatcttttaaggctaaaaaatcaatagcaaaagcataaagtgtatcaacattatttttcatttgaatttaatttctactggtgatctgcctccaattaatacttttgagatatgaatatgcacatccagactgataatatgaacaagatgatttttccaaatttagttttgagatcgaaatacaaatggaaaaacttcccaggagaaattccttcagaaggtaacatcaaaaataaaacaggtctgacacttctctggctatttgctttacaaccctttaaattctttggcttttaggacttcttatgactcagtctggaaaagcatccttcatacattttaagggctctggaatcaacttttaaagtacttgaacaagagaatatgatttgaggtccttattaaatattttatattcaaatgaccttgctgaaaaacataaaatagagccctggaaatttaaattcgtgattttgttttctttcttcacccaaataatcaagattcttatttgtcatatgtttatatattttatatattttttaaatcctttaatttctaatttaaagcaaaaaccataaagcatcaagaaatttaaatttatattgagtatgtgttggtgttttttggttttttttttgagacagggtctcactttgttactcagaggcataatcacagctcactgcagcctcaacctcctgggctcaagcaatcctcccatctcagcccctcaactagcttcgaccacagacgcatgctaccacgactgggtaatttttgtattttttgtagagatggagtttcaccgtattgcccaagctgatcttgaactttgggagcctcgaactcccaaagtgctgcgattacaggcatgggccactgcgcccagccatgtttgttttttacattgaattgtcaagtacatataaaataaactcaaaaacactaatga

SEQ ID NO: 681119 - DNA, 1507 bp, Homo sapiens
ccaagttgagtgaacacctaaataccaaaagaagaaaaaaaaatacaatgtgttaagtaggttttaagtttcctaatcatttacatcaatgatttagtcatgtcacaatagaggtaatatttcagagagatgtgttccttacccaagccactctccagcagtctataagaatcctaacctactagttattaagcataatctaaataagaaatgaacaatgcacaatttggtttcctaatgataaattatgattaacaaatgaaaataaaagatttggcatctgataaaamcaatgattcagattatggagtctaaaaaaagaccaaggaaataaaatgtacacagccttgatttgataacatctctaggtctaggaagtaatctcatctttgagatgatgagaactctaacctcaaagaaccaaatctgaatggtactgaaaacctgactgcttaactcgggggtctgccacattttcaatctatatttagctacacattttttcactgttgtaaacatgcaagggaaaaaggaaaatactaatattttaccaatcttttaaggctaaaaaatcaatagcaaaagcataaagtgtatcaacattatttttcatttgaatttaatttctactggtgatctgcctccaattaatacttttgagatatgaatatgcacatccagactgataatatgaacaagatgatttttccaaatttagttttgagatcgaaatacaaatggaaaaacttcccaggagaaattccttcagaaggtaacatcaaaaataaaacaggtctgacacttctctggctatttgctttacaaccctttaaattctttggcttttaggacttcttatgactcagtctggaaaagcatccttcatacattttaagggctctggaatcaacttttaaagtacttgaacaagagaatatgatttgaggtccttattaaatattttatattcaaatgaccttgctgaaaaacataaaatagagccctggaaatttaaattcgtgattttgttttctttcttcacccaaataatcaagattcttatttgtcatatgtttatatattttatatattttttaaatcctttaatttctaatttaaagcaaaaaccataaagcatcaagaaatttaaatttatattgagtatgtgttggtgttttttggttttttttttgagacagggtctcactttgttactcagaggcataatcacagctcactgcagcctcaacctcctgggctcaagcaatcctcccatctcagcccctcaactagcttcgaccacagacgcatgctaccacgactgggtaatttttgtattttttgtagagatggagtttcaccgtattgcccaagctgatcttgaactttgggagcctcgaactcccaaagtgctgcgattacaggcatgggccactgcgcccagccatgtttgttttttacattgaattgtcaagtacatataaaataaactcaaaaacactaatga

SEQ ID NO: 681120 - DNA, 1507 bp, Homo sapiens
ccaagttgagtgaacacctaaataccaaaagaagaaaaaaaaatacaatgtgttaagtaggttttaagtttcctaatcatttacatcaatgatttagtcatgtcacaatagaggtaatatttcagagagatgtgttccttacccaagccactctccagcagtctataagaatcctaacctactagttattaagcataatctaaataagaaatgaacaatgcacaatttggtttcctaatgataaattatgattaacaaatgaaaataaaagatttggcatctgataaaaacaatgattcagattatggagtctaaaaaaagaccaaggaaataaaatgtacacagccttgatttgataacatctctaggtctaggaagtaatctcatctttgagatgatgagaactctaacctcaaagaaccaaatctgaatggtactgaaaacctgactgcttaactcgggggtctgccacattttcaatctatatttagctacacattttttcactgttgtaaacatgcaagggaaaaaggaaaatactaatattttaccaatcttttaaggctaaaaaatcaatagcaaaagcataaagtgtatcaacattatttttcatttgaatttaatttctactggtgatctgcctccaattaatacttttgagatatgaatatgcacatccagactgataatatgaacaagatgatttttccaaatttagttttgagatcgaaatacaaatggaaaaacttcccaggagaaattccttcagaaggtaacatcaaaaataaaacaggtctgacacttctctggctatttgctttacaaccctttaaattctttggcttttaggacttcttatgactcagtctggaaaagcatccttcatacattttaagggctctggaatcaacttttaaagtacttgaacaagagaatatgatttgaggtccttattaaatattttatattcaaatgaccttgctgaaaaacataaaatagagccctggaaatttaaattcgtgattttgttttctttcttcacccaaataatcaagattcttatttgtcatatgtttatatattttatatattttttaaatcctttaatttctaatttaaagcaaaaaccataaagcatcaagaaatttaaatttatattgagtatgtgttggtgttttttggttttttttttgagacagggtctcactttgttactcagaggcataatcacagctcactgcagcctcaacctcctgggctcaagcaatcctcccatctcagcccctcaactagcttcgaccacagacgcatgctaccacgactgggtaatttttgtattttttgtagagatggagtttcaccgtattgcccaagctgatcttgaactttgggagcctcraactcccaaagtgctgcgattacaggcatgggccactgcgcccagccatgtttgttttttacattgaattgtcaagtacatataaaataaactcaaaaacactaatga

SEQ ID NO: 681121 - DNA, 1507 bp, Homo sapiens
ccaagttgagtgaacacctaaataccaaaagaagaaaaaaaaatacaatgtgttaagtaggttttaagtttcctaatcatttacatcaatgatttagtcatgtcacaatagaggtaatatttcagagagatgtgttccttacccaagccactctccagcagtctataagaatcctaacctactagttattaagcataatctaaataagaaatgaacaatgcacaatttggtttcctaatgataaattatgattaacaaatgaaaataaaagatttggcatctgataaaaacaatgattcagattatggagtctaaaaaaagaccaaggaaataaaatgtacacagccttgatttgataacatctctaggtctaggaagtaatctcatctttgagatgatgagaactctaacctcaaagaaccaaatctgaatggtactgaaaacctgactgcttaactcgggggtctgccacattttcaatctatatttagctacacattttttcactgttgtaaacatgcaagggaaaaaggaaaatactaatattttaccaatcttttaaggctaaaaaatcaatagcaaaagcataaagtgtatcaacattatttttcatttgaatttaatttctactggtgatctgcctccaattaatacttttgagatatgaatatgcacatccagactgataatatgaacaagatgatttttccaaatttagttttgagatcgaaatacaaatggaaaaacttcccaggagaaattccttcagaaggtaacatcaaaaataaaacaggtctgacacttctctggctatttgctttacaaccctttaaattctttggcttttaggacttcttatgactcagtctggaaaagcatccttcatacattttaagggctctggaatcaacttttaaagtacttgaacaagagaatatgatttgaggtccttattaaatattttatattcaaatgaccttgctgaaaaacataaaatagagccctggaaatttaaattcgtgattttgttttctttcttcacccaaataatcaagattcttatttgtcatatgtttatatattttatatattttttaaatcctttaatttctaatttaaagcaaaaaccataaagcatcaagaaatttaaatttatattgagtatgtgttggtgttttttggttttttttttgagacagggtctcactttgttactcagaggcataatcacagctcactgcagcctcaacctcctgggctcaagcaatcctcccatctcagcccctcaactagcttcgaccacagacgcatgctaccacgactgggtaatttttgtattttttgtagagatggagtttcaccgtattgcccaagctgatcttgaactttgggagcctcgaactcccaaagtgctgcgattacaggcatgggccactgcgcccagccatgtttgttttttacattgaattgtcargtacatataaaataaactcaaaaacactaatga

SEQ ID NO: 681122 - DNA, 365 bp, Homo sapiens
gaattcactgcagtctacagccttgtcctcagattcataggctcgaaattcaatcagtatcacagcagcggacccacataatctaagcctgcaaragttatataagaaccaaaattgtcagcatattaattttcatggaaacatacctgctaaacaagtcctaatcctcatcttggcctgagactcatattcctcctccagaaaaagttacatgagtaacccctttataataagattctttacagccacagaattagctcaaggagagttagttgtttggccatttggggccttgagaatcatggtttgggctgtgatgaacaggtacatgcagcagatacaaggaatgctctctcatgacacca

SEQ ID NO: 681123 - DNA, 606 bp, Homo sapiens
agcacatttatgtcagctggtttgtcagccaggtaccatggctctttctaagtcatggcttccaaaccatgggaacataaaaccacaacggcagccaagatagcaataagaaccctttctttgtatgccgcactagtggctctgcaaaaaggtatgtgacatacttttgtgcagtgtaactggcagttcagagcagcaaatcccttctgacctgatgcgtctcctctccagcttttttgaattcactttctgtagacaaaagtagagtgagtgacaaaatgaaggatactttgatatttgttaagagagactacagccaagttctctcccaaatcattttgkagccctgtccgatgggcaaaagacacatcaaattaactcaactctaagagtctagttctcttattggaaattcttaatttctcagtattgtactaaagggattttttttttcagttaaccagttatcagataaaattatatatgcctacaaagagtaatgagaaaagattgttccactttgacttaaaatgtgattttataacttctagtcacagtatatgatacagtaactggtactagacttacttgcccactataaactat

SEQ ID NO: 681124 - DNA, 1183 bp, Homo sapiens
tcgcttacctactgtaatggacgtttgttgctcttgcttgtacggcactctttttctagatcttcctttggacaaccgcctcctccctgccttcattcctgtggtttggtgaagctgacacttctcccagctatagggaggggcrtgagccacaggccaaagtcaatcagtgcattccatccaccagcccagagactgaatcagcaaaggtcccagagctccacttgggccaatggcagtcaggccaaggactttgtggaactgttgctcagaggacaggtactcaccttgcactgaaactggagtgatgggagtatgaacctggggctactaacagccatcttgccccagaaggaagtacttccctaagtttaatgcctacccagaggagggcagagcagatagacaagagacagggttctggggtcaactgtgtctgaagtcagagacatgaaataaatttcgttttttgctcaggtaagtttgaattttctgtcacttgcaaaccaatggaatcttaagtgatccatcctctctggatcttgatagctaaacctttaaaatgagaatgttgaaaactactcagtgctgtggaggcaccattggcttttggggtgagacaattctctagtgtgcaaacagtcctgaacattcatttttgcccctaaccactaaattccagaagcacccctcagtcttcatgacaaacattcaccacccattccactacataagcacagaaaggcatacacacacacacacacacacacacacacacacacaccacatattttcaaatgccccctgggtgtagctgaaaaccagtaagccagtgaagtagaaaatctctaaggtcccctctaatcgagctgaaatcagccatgtcatgtatgagaaattaagttccctagagtctagtcttagcatcaactgagaataatttaaactctgtgttcacttatttgtaaaatgaggatgctaatatacagctctatgggtaaacctatgaaaggatgatcacaatcagttacttgatacggaatcattctaacataacctaaaatggagctttaacattctcgaggaaaatatcctaagtgcttttgaataccattgttgcttacaattttcctcattaaataaagttttaaaactgaagttttaaagttatcttttcctagca

SEQ ID NO: 681125 - DNA, 562 bp, Homo sapiens
tcacagtttctctatccacttgttgattsatgggcatttgggttggttccacatttttgcaactgcgaattgtactgctatcttaatactttaaaattacattcttgtctgtcacacccaaatccaagtctcagacaggagaaccatgcctgaaaaatgagaagtctgcttcttcacacaacatctgtgaattaccacaatttaacttgaattttcttatctcagttctcttcttagttttggcagataaagcccaacactgaagtagattcaaagccaaggtcataaccaaataaatctatgaatatcattatttatagtctgtctaataggactattcttattagaaagactccatccattgaaagaagaaagaaagaagggaaggaaagtggatgacaggaagagaaggggaggggagggaggggagggcagggcagggcagggcagggaatgtgtttcctaaagtatatgttaaaaagagaatataaattaacaacaccaaaaagctgaaacagggccatagaggagccaagctcaagcatactctatagaataagtc

SEQ ID NO: 681126 - DNA, 689 bp, Homo sapiens
tcattactcaggtagtaagcttagtacctattagttattttccctgatcctctccctcctcctaaccctcyaccctccaacaggccccagtgtgtgttgttcccctctatgtgaataaaaggacacttctattgcattttatttcttttgaaaggtcaaaagaggacgggcactgtggcacacacctgtaattccagccctttgggaggctgaggtgggcagatctcttgatcccagaagttcaagaccagcctaggcaacatggtgaaaccctttctgtacaaaaaaataccaaaactagctgtgcgtgatggtgcatgcctgtagtccaagctacttgggaggccgaggtgggagaatcacctgagcctgggtaggttgaggctatagtgagccatgattgtaccattgcattccagcctgggtgacagagtgagaccctctttaacagcaatacccaatttcaaaaaaagtaaagaaaaaaaaacatccagaagaaggtatagcataataaaaataattgttacatttggtaattatcaaatatggtgtttattttattttattattattatactttaagttttagggtacatgtgcacaatgtgcaggttagttacatatgtatacatgtgccatgctggtgcgctgcacccactaactcgtcatctagcattaggtatatctcc

SEQ ID NO: 681127 - DNA, 695 bp, Homo sapiens
tagtagtgatacccagactgtatgtgtgcttgaaactaagaacacttaaagaaggcaagaagtaaagaactcccatcatgcctagaggtagcacagccttcctgcatggatatttcaacagaaagttcacagttcttgtaggaattggtgccactctgtatttctatgtcttataattgctaaaaggaatagataagcagtgcagtggatgggtttattttcaagtgttcttagtgcataggatagggtttgtaatgataagataatgttaagaaaaatccataaaataggagaatgagagagtgaggggagaaggtaaaactcattctgttcttgttctctgaggtgaagcttgattgaaattttctgtgggtgagttgttacgtgaagcatagttctagaaggtggtgagaagttaggaatatacgcatctctgtttcactycagcccagtaagtcttgactgtacagctataagaaaactctgtattatatatgtaaaaccccatcgcccaaagataacttccaaattaaagaaatatttttcttctctctttaactataggagatcttgaaacctttttgcgatgcatttccttctactctgtcctctagcagtcactaaataatacgcttttacctacagatggaagcaagtttgattttaaatgaggacaatttagataaactttggga

SEQ ID NO: 681128 - DNA, 611 bp, Homo sapiens
cataattgattaaagatacaaattaaaatatttgttattctgcaattgcagcatgataagcaatgtattagataaattgtagtagcatcattcccatctcgttcaataaaaggtgtattagatttttgttttaaatccagttttcaagaatttgtaatactacaagcaaaattttaaaagagaatgatcaaattcagaaaaattagacaaatataatttctaataatcataaataagtattatagaggtagttcagattcagcctttttaccacttcttattttcaactacaatattaagaaaaaaytaataaagataaaataatggtaaggaaaagttattctatcattacttgaagctctctcaaaatgtctctacagatacttgaatatcatatatttattacatattaactattatgaattacttcaaaatgtcaactgtgcataaatagatgctcagctatatcatatcttcctgaatattatttcatatgggctattttatggtacactttcatagaaacagtttcagtggttccaataggagagttggatcatgtggataagatttttgttatggcaacactaggcctcaacgtaccaataaga

SEQ ID NO: 681129 - DNA, 1335 bp, Homo sapiens
atcttcctttttacctcaaggatttcccaaaagtcagtttgcagagggatcagtatagacaacttaaataagcaaaatctgcctttatttttctcttgttcctactcagcatctcctctctaaagatagtctaataatttttattccatgtgctatttctctgtagaaatttatgaatcttgtggtaaagtttctcccctaaagtcacataacatatgtgagggttaaaacactgacttcttgattggacaactttttgaattaaataaccattactgaagtcctggtatttacacagtgatatgatggacatagtagaatgagtttccaattgcatagagaccaagacatacatatccagaagacagaagttaagcaaggctgtataatacacttaactcactgccgaaattattggcaaacttgtcatgtgaatgccaaaagaaggacagatcactaaagggaggaataatcagggaatacattttttgtgaaccccaaagcagaacacactctagatatgtggaacagagtggggggaaaagccatggcagaagaccccaataaagttgatacatggaaatagaatcctaatagtatatttgagaaatagtgacaagactgcatggtctgtctgaagtcaagggttgctgtttctatacagcagaatcaggactgctgattattaaagacaaggagccacacactttgctaaaggttttgctttttcgcacagtccctacaactctatgaggtagatacatccttcctcagagataagaaaatggagagggtttcagtatcttgctaaagtctcttgaactgataaatggcaaaggccaggaatgaatctgatttggagaatatcctatgccaggtaagagatgtgggacttaattccttagacaatttgtgtttcctaattgcctttaaacagattttatggctttataaatattagtgtttcaggaagattgatatgaatgtttgaaaaaaagttttctaatttgttcatgttagcaaaaaagaaaattatattttaaaggaacttttcatgtctttttcaaataaaatgactgaatccctttgcagaaatatttatttccatgtcatctcagcttctcctaattatgttgaaagtcgactgatttatagaaagattttttcaggttgataaaagcccccaaccctggaaagtaaaaacgaaaatataacaaaggaaccaaattacttttttggttctcatgcccaaacctcaayaccacagaggacagataaggtgtaaataaggaaattttactgtcctgacctctgttgaaggtgtcattttactaa

SEQ ID NO: 681130 - DNA, 1512 bp, Homo sapiens
gaaagcaaccagaggtaaaatctgaaagctgtagctgaggaagcactaaaggtatggtgatatcctgcctggaggacggtagagccagaagtatctttcctatcacaattctgaagaattgtgatgcagtaggggaattagtgtggcctatccacataggaaccaggaacaaacagacacttcttacttccacaagaaggcaaaaactcttacaattagtgtagccaaacagtaagaccatgctgctaagaatatgcaatcacatatttaacaactatcctggaagaatattacacatgggtgcccactttggttgggatttaaacatttctatgaaaactataaatcaaatttcatatgattttatgagaatccatacaaaaaggaaaggaacttctataattgttttaaattcatgaaacatcataggttaaaagtgtatatatgctttagcaaactctagaatttttctttaaccttctaccagttttgtcttgggagtcaaacatgaattctacataagcaacccagcaaggtttggttgaaaagaatactagatttagaatcagaagttttgtggatttttatttattcttttaccttttgcaaattcatatctcggaatattgtttctcatatataaagtggcaataatatcatctgccttacagattgctgtgaaaatcaaatgaaaccacatttatacaatcaggttgtagactatgtgacactgaatattataaagggttgttttcattccttttttttgtttcaaaataagtctctctgtctactatttctttccacaaatctcttagttattaaagaactcatctgtccccactttagttttccccttcttttcttttaaagttctactacaggttcattatcatgagaacatatgtaataggcacacaaatacctttgaaaaatggatgctctgcagtaatggcatctccaaaagataattatcatccaaactttagtatgcatgtcagatatgacctcacagyatcaaagggaagaaaagcaataatttcttgctacttggtgaatatgcaaattgcattatactatcataatatataaattctaatggatgtctaaattgcaatggcatggcacagaaggctagatgaaacatagcttcacagatttcaggtttccaccaactaagctgtatcatcaaaacgtgacatcgagattaagaaataattcaatgtgaatcttcctggagaaacagtcaccaaacaagaacatcatgtaactgctttgtataactgtgcaattctgcccaaaagacaatgttacaaagtgagtggtgctttacatttcaccaactggagtaagactacactgagaactgccattatgcaaacaaaacggtgtactcaatcccaataaaactgcagggcttttgcagggaaaatacctagaggggttaccatgttccaccactacacctcaaaacattagagttatctatacttactaagagataagacaata

SEQ ID NO: 681131 - DNA, 1008 bp, Homo sapiens
aggcattcccttaagtgcacaattaaggaatcatccctcagatttaaaacatgatgcactaaagaaatgttaatattgtagagaggaacaacacttgggaaactgttagtcgtttataccattctgtgaacccgactaaggaacacgagttccgtaaccgtcatctccaagcttcacaacaactccatgctataggcattattgtctccattttgaaaacaagcatcatgagggtgagaggtaagagctagataagcggagagctgaggatccggagaggaatgattgaagaaagggaccaccagttgtgaaagccaagttaaagacaaaaataaacaaacacttgtctttatctcaaacttttatgctttcaagcaactatttatggaagcacctactatgtgccaggtactctgttgggaataaatatcatacagagttcaaaaattctgtcacattcactcttaacagcttgctttctctcatgctctttctccgcctggaacatcctcctttcccctgcttctcctccccactccactataccgatgtttagagtctatactttaacatcatctcctctagaaaactttccctgaaatacctgagcttcttgaaatacactctctttgcatgccagtagcaaccacttaccctaccatgcaataattgctttttttgaattgttycctaatccttggactaagaaactgtaccttacactgccgcaaaaatgccacatctgtgtttatttaattaataaattcacatagcaaatgaatgaatgacaacagaattaagggtctaacaaaaagaatgagaaaagttagcatttcaagtaaatgtaccctttaataacaatctaatgtatgatttcatttaatatgtgtcttagctagagtatattataagaataattgtttaatattgctttaaagtgcaaattgtttctttagaattcaataaataaatgctgaactaggaaatgaaagtgttgtttaatttaat

SEQ ID NO: 681132 - DNA, 606 bp, Homo sapiens
aaaaggagtattcaagtatttcagtggttttgtttccaaatgtgataactgtctactaaatgaaattaagatacttttgtccaaggtaaatattttaatggcatacccaaaattaggactgaaattttgaagtatttgttttarctcttcacctgttttactcatatcactgcacttttcagtaacccctagacatcatacatctttgtttgaatcatttctcttcctattttctccaccatttcaaatggtgtcatgtcactgggagctaatgcccactatcagctgagcacattcagcttctgtctacattaccactcggcttcagttccaatttcctggtattcctcattcagatcagacctcttagatggtgtgctatgagaactgacagccccccatcctgctctgcttgcccagggcctagtcacacacactccactgtgccaagcgtggccacccccacacacctttctgttcaggattttgtataacttttaattgacatttatgtctgacattgtagatgtacttctcattgtagaacatttatctacataggaatagttgaaaactgcttttcacttaactattacatggattaat

SEQ ID NO: 681133 - DNA, 1570 bp, Homo sapiens
tatgaaagtatcataatttactgaattattcctttgtcgagcatatatgtttccaatattctattttttttttttttttttttttgagacggagtctccctctgtcgcccaggctggagtgcagtggtgcaatctcagctcactgcaagctccgcctcctgggttcacaccactctcctgcctcagcctcccgagcagctgggactataggcgcctgccaccacactcggctaattttttgtatttttaatagagacaggtttcaccgtgcttgccaggatggtctcgatctcctgaccttgtgatccgcctgcctcggcctcccaaagtgctgggattataggtgtgaaccactgcacctggcctccaatgttctattattgtaaataaaactgtgataaacatcttgatgcatgagtctgcttttgaattagtttcttaatatttctatatatgtaattattggtgcaaacaatgtgaacattttaaaaaagtattacatattgccaaactactgtctagaaatgttttgctggttgcatatgttgaacagggtggatctgctgtaaatgtatttgttttccaatctgtttcccagctatatcctgtaacacttcataagtgctaggaaaaaaaaagtttaatttgaggttgtatttatcttttctggaaactttaattatcccccacatcaaagtgacagatcaggctttatttaaattttcagatatgtaatcaaagggacatactaattactgaaaatattccataaagacataatcagaaaatcctaatggtacctttctctgcatcctcttagtatcctgtgcaaacttacagcattgcagttttcacactggtataatggtttgcttctgtctccagctagcctgaaaactctttggggtagggctacacaaaaacaaatgaatgatggaccctcagccaactctggcaaagatctgaattgcaattgggatataaggatgtcatccttaatactatattaaggtgacctgggctccattcctgatgcctatttgccagttaaaacaactttatacagaagctatatgtcatcatctagctttgctacaggagggctaacaaatacacatcctatgggtgaaatcagccttaaaaggtcctcagagaaggcccattttatgatgttttttgagtgtgaaagactcatttatatctaagatgaaactaatgtatactcatttcaaatataaggcaaagttctccatgctgtggcctaagatgatccacaaccctgtcactgagtgtcttctctcagcttggaacaccttctgcttccctacaaactagtaaagatgataagtttatttctagactactgcataaacaagttgccccggacaccccgaatcgataattcttggaactcccacagcactctgtatagacatacctctgttagcacttctcttgctgcattttacatacttacatayacagctcttttcccaccaaaaaggacagtggaaggcaggtactgtgtcttatatatgtattgttggtttttagcattgtaaatggggca

SEQ ID NO: 681134 - DNA, 1009 bp, Homo sapiens
tccccgccgtcctgatttagaggagcctggattcaggtttctgttgtaaactctatttttaactaaaccgagtggagatcaggctgagatggctgtaacttatgggcatgaggtgaccaatgcaaaggtaacaggatgcattctcactggaactgctgtgcaagtgtggacgtgcccgacaactccgtctgaggatcccacatgggcacagtgacctgggatggagcaggagtgccccctcgtagagtccagatgcacatgtccaatgggaaggcgagggcagtctcctagaatgcctctgtggtgggcggtayggtgttcatggggaccacttgtcagtgtctgcccttatttgtcagcattggttactagttattgtaaagatattgccttacatttatatttcccaaatgcattgatccctataatgaccttgaaaagcaataatagcgttataataatatgtaataatagtattaatgaccagcaacttctgcttattgatcccttaggatgtgtcgtgctctgtgccaagtgccctcctacattatcactcattaataaaccaggtggggaggctgttactgggatttccatttttcagattcattcattcatttgacaaatttttattgagaataagttctaggcacagggaattcagcagtgaaccacccaggctgaaatctctgccctcaatgaggaagctgagcctgttgaggtcacctgagttgctcagggtgatagagcccatagagtgaggctggggatcaacccccatcactccagacctgctgagttcctgggccaccacatttatcagcaaggataaccgaccagccattggcctctattatatggcagcttatccagggctgtgttaacactaagccttccatttattttggttgatcttccaggggctgatggaggagtgacaggctttagggacagacagacctgggcttacatcccagctcagcgactccctgatggaaggagggcatgg

SEQ ID NO: 681135 - DNA, 1328 bp, Homo sapiens
cagatttctctcttagaaaaatggtttgaggatggttagaggtctctctctctctctctcttttcccttctaacctccctttcttccctcctgggtggttctttttaggatgcccccaccctgtctgtccttataaaatgcagctctgtaaacatttgtctaatttcacaagctcagggaggtgcccccatcagttaaaaaaaaaaaaatctcctagtgcctgatgcctgtttgaaattctaaagtggaacttaattgctttcgcgtaaggatttgattcgggcaaactgcccatacctctgggagtagaagcaggatctgtcatttacactttagtctgaatgggtgcctgaacctgggagaaaacagctttgtctttccctggtctgccttggatgtcagaggcttcttaaagacagcgttattgaggggcatggtggctcatacctgtgatcccaccccttggggaggccaaaatgggaggatcacttgaggccaggagttcgagagcagcctggccaacgtggcaaaaccccatctccttaaaaaaaaaaaaaaaaagtttcccacttcatgtaagagagttcctcaaaattctctttcctgtggagagttctagattctcttttaccatatggtctccacttagcttgtcttgaattgggaagcatagggcagagtcaggcttgcgtcagcatcagaattaccagagacctgggtaaaaacgcagttcctgggcaacacccactgagaccatgttaggagctggcagagcccagggatctgcatttttgacaagcccttcccccatgagagattctgctgcaggaccatacccagaagcattggtctaggagcacacttggccctcarccccaccttgatatattgtctaggagcatccataaataaatggtcgccaggttatggtggccaattggaaaaactctttgtaactaaagcctgatgaaacacttgctggttcatggttggcgcctgacttttagaaggtttctcctcacatttcaaggtcaagggttggccagcgcatccctgagctgaaaaggaaagaagagcacctttccagttgagaaattggctcccctctggcaaatgccgccaacgtagcttaatattaatttagggaatgcagtcttgtgcagttccatggaactagattggaaatctgatagtgccatttctgttatctgattcctcacacacctgagatcactccccgccccccacccaactccccccagccccaaaggtggctgcagaggcgcaggtgtgagctggctcactaagtcgctttccccctcctgatt

SEQ ID NO: 681136 - DNA, 637 bp, Homo sapiens
tcagcctcctgagtagctgggactacaggtgcctgccaccatgcctggctaattttttttatttttagtagagacagggtttcaccatgttagccaggatggtctcaatctcctgatcatgagatctcatgatccgcctgcctcggcctcccaaagtgctgggattacaggcgtgagccaccgtgcccacccaaagatgctatttctaaatgaagtcacattcacaggtaccgagtgttaggacttcaatgtatcactcagggggtgggacacaacttgacctctaacaggactctttcatgaagttgcagtcaagacgttggcttgacttcagtcatctgaagccttgactaggactagaaaatctgctttcttggtggctgattcacatgactggtatgctgacgcagattgtggcaggaggcctcagttattccccatgtgggcctccctactgtgacacgtaccataactattatttatggcaatgacctctggtgctttgmttctgtacaggaagaaaggtttcttttttcacccatcactaggttcatctctgagtccacaacaaaggacagatcaacaagagaaaagcatataagtatatttaatatagattttctatgacacaggatcc

SEQ ID NO: 681137 - DNA, 1988 bp, Homo sapiens
aagatagttcaagaagagaaatttaccctcaatatctaggaaatgttctctctgtatttctctgaacataagaaagtctaagtgagacatttcaagacatccttcatttcatttcctccctgcattcctatccaaaaggccaaaacaccaaaactagcttattattcctgctattctttcatagacttcatcagctgaatgcagaaaaagtaagatttgctgtaaatggaggagctaagctactatcagaaggtactaataaccttgattaggatattagagtctatagatagtggtcaaagggcttgtcttaggcgagtacattgccgacaataccagaactagaactcaagccaactactcgatttccaagtagtacatttatatgttacgctgagaaggaaaattgctatcttccttacaacattgaagctaaaaaaaaatttgttccatgtacgggtataagtactgcatgcttgatacagcaaacagaggtttccattgactattttcattgagtccaaatttcccttaactagcagacggctcttactcatctcagcaagctcctagcagattgactttttactgtgcaaggagtagaagtcagcagggaactcggatcctgaaacaataagaaaattgagttgagatggatatgtaagaaccttctgttatagtaaacaacgttcacaagacttgactttcctcttcaacgaaatgtgaaatagcatttcctgtatcttaatttaatctgcctaataaaatgtttataaatggattacatcatctgcaactgcacagaatttaaggcaaactcacttaactctagagatgcactctttgaaattgtatttagagactatgtgatatccygtattctctgtcctggccagtatggaccagcacctaggactgcaggccacctcttcttattcatgctataccatcttctggcccaaagtgaccatgtgaggttccaagaaaaaggaccattgagggagtacaagccacgtcacagagatccccactgatggaaggaagcaatggagtagatggccaaaaactctttgaatgttatttcaaatctgcctcggattatacattggacctattataagggaatttatttcaaattaagtagtgaagctacattgcaaaagcacagatagctcctagtccatgctgctgtttctgagtgaataactaaataagtgagcctaaaggggtttcagcacagtccaagttttccctctctctgaccttctcctccagccccatggcagcgtcttgaggagatgtaactcaaaacagaaacccaaggtgaaattcttcttgatcaaagcctgttaagctcaaaacttatatagagaagagaaaagaaatattttctttttaaaaggtctctctttcctcttcagcctctactgagaaccaccaccccaaacctgaaagccccaaacagacagtgtctgctcggctggctttagtgaggttagacaaagataaaccacatggtggtggctgccccaagccccagcaattccaagaattactaactgaatccatggccacatcagcccatcttctggtgaagctaacgtcatctggcttgtgtcctgaataataccttagtgattatctgaagatcactgatactcagccctgctctctctttgccttgaatctgcccaattacctcatcaaattccttaacgtattaaatgaaaccatgactggggggcttaaatctttagtcttctgcccttccccattctaccccaacttattttacacatctcaagcaaatgagagcatccattctatgcttaataccctcccacttcctttttcctataaagatgcccagcggtcatctcacgtttttgttaatcactacacaacaccaaagccaagaaaaggacgagattcactgcaacactcattcacggaggcaaacctacttcactatgaatctctgttcattg

SEQ ID NO: 681138 - DNA, 3472 bp, Homo sapiens
gctctcactcagagcatccaggtgttcrtttgtagtgctttcttgcaaagccctttttcttgttattcttttctcatgtatctgctggtgcctccataggacttcttatgagatagcatggaactaagtgggaaatattgcagcctaccagggaagggaaaagcatcattgtaacatatttttcttctcatcagaggaatgacgccagcagaagcagagatgcatttcttggaaaatgccaaaaaattatcaatgtatggggtagatttacatcatgctaaggtatgcatctttttaaaccctaaactttcaatttaatattatgtaacttgatgttgttattactgtaagctggtgatttttacttcagttaatgtaaatgaaacctctgagaattcaaatctctgcttgtcttttaagccctactccacgatacaacaaatgtagctttctgatatttactgaggggtttgctctttgtgtctcaaacttgcattactcctgggcacagccttctgaaagcccgtgataggcaaagcctctgattgccttttgatgcagttagaaacctaccttgacataacagacttttacttcaccctgcctccccatcacagtcgtatttcccactctgtgccgtcacataacctttgctcccatcagactctgtttctacgctttccctgactatgtccgtctctggactatcctcctctttcctatctgtctgtccgaactcagccgattgtccaagactcaagcatcacattcattaagtgccagacactgtgtgtggccctaccttcatacataccaggcagtcagtaaattcatattgaatttaagaagtctacctctaaagtttaggcactctgacaaataatcagagctctgaaataaggttgttgttttaaagttcacctaggctaaggtttgcttcgttgactggtgatcgatgaaatgttaaaggtgtatcttgggaatggagtcttgggtacaaagaatttgggttgagactgtaggagggttacagtcgtgaggatacacagagcagctttgactctgtgtcatgcttttcctggaatcttcgtacttttcagtagtggtagaatgaagataggactactagtctttttaaacagcccagaataaaagtcttgtggaaatacaaggaagcttttatgaaaacttttattagcaaaacatgtaaaatgtgttaggatcctaggtttggattctgatgcattagcagtgttaaaaaggtcaatgttaaggtcagaggttgtttcttctgactgggtccaacaggatgacattgttcctgtttagggatgtgtgtttgacttttatggacagagttagtcaccgatttcatggtctgagactcacagaatgtgcagttacaggtttccaggccaacgagtgtcttaaacagtcaggtttagggcctggaaatgaagagaatttcagctggctccattcgagcaaacacctcagcacccctgcggacccattgcagggagctctgtgatctgtaggttctgttgatactggaagttgggctgcactttggttagcttttggagagcagactaatccacagggatttggggagaatagtggcccttgaatctgtgcaggtttgattggttttgccgcggatcactctgcacgtcatgcaggatgagctctccaaggcctgagcactagcaaaatctctgtgacttggcggaggttcacaccagggatgtgctgttatgttgaatgccaagctctttgacatttgtgtataattacaacagcaggtgtagctctgtttacttgccagttcattattacactttttcacctattttgcactcagataacaaagatgttttctattatatgttaggtacaaggtagagtgagaatttcaaaatgaaaataagaacagacattaagatttttaaatttctcttagtgtttccccctaagaggctaaaagataaggaaacaagaaggaaatgaagggagcctgagaatttgagtgaatctgaagctatttttgagttacatcacacactttgattctcttactgcccagaaataaataaataaataagtaaataaaagattaggatatgcatttcaggaagtgcacctcaggatgtatcagtgtttctatcagtaaatataaaatcacttaacattgctatagctacagaattaaaatagatggctgccttttcatttaataatgtgatttcaaattatgccaattaaaaagaaagaattaagcaagcgcaactgtagcattataggaatttttctgaatattaagtataacagataattcagttatagactccattttcccatgcagccaaactccatcatttgaagaagcaaatttactgaaacaaattggaactaatctccggttatgagcgagatgcctcgcttctgttgacggtgtgaaagaccctgagctttacaatccatttaaaaattctgatctggaatcctgtatgaagaataaatacccatattacacaaaggtcctatgttttggaaaacccaaatgctttgttttttctttgtacatctgtctctgcttgtttgtcacttaatgtgcatcttgataggctttgtcagagtcatttattttatgtaagattctgaaatgtagatataagtccatataggatataccacagagcaggatggcaaagttcaaacactgatgttgaattaaagaaatcgtatgcccctttattttcatgatgacagagactatttgggtacaccccagtgctccttgctaaagggagtgcacatgtatttattgatagtggaatgcacatgtccttaagaaatcctgttgtcataacttttaaaaccaaagatttctcaggcccagcaaggtggctcacacctgtaatcctagcactctgagacagggggattgcttgagcccaggtgttcgagacctgatagaataaatgtagcagaacccgatctctaccaaaaaaaaaaaaaatgtcgagtgtggtggcacgtgcctgtggttccagctactcaggaggctgagggaggagggttgcttgagcccctggaggtggagggtgcagtgagccaagatggcaccactgcgctccatcctgggcaacagagggagaccctgcctcaaaaaaaaaaagaaaaaaaaaaagatttctcaaactaacctcaatactgtgggctgtggcagaaaatttgagatgaaaagtatcatttttttttgccgtgcgattaatgaaatggagacttgcatccaatttaaaactgcactcgtttgtgccgttttcatttttcattaacctctatttcaacaaatgtgtaatggcttcatgcatgcaaggtaggcagtgcgctggccgtgagattacaaagataaacagagctcctgctctcaaccagcttttgtctccaggagaaggaagacaagtgg

SEQ ID NO: 681139 - DNA, 1265 bp, Homo sapiens
cctcccattttcatttttgttttcaaaatattaatcacagatatttgatcaagggaactttattaatgattagttgatatctgtggagggaaagtcagttaatattagggcatttagatgtccacagctctactctactcgagagaaaacagtttttaagccataaacccctgtgaaacagattaaaaaccagtcctgaaattactgttctcattctcctcaaaacctaggctctgtcaaatgctgtgctttgttttatttgtttctaagtagatgtttctctctttctctttctctgtctattgttttaacaattcttcttcttatttgcttcatttgaatggtatttttggagcaagatgttcaaayacatactttaatatacttctttatattggagggtggggcaaaataaacataacatttagtcttaaaaaatacctagttagcgacgctacttgaaaattgagttatgtttttcccataaaaaatatatgcctgtgagtcactggcatgtgccttttataattgacaggtaatgcagacagcctgatggccctagatggatataaattatcataatggtataaatgagaggctgaaagtccagtgactgttacagtagctttttctgtaaattgacattttcatttacctttcaaatatgaaatattactagaataaaatatatataaacatcaattttatttgcattaaacattttaaggagatgttgcttgaggtttttagttaaaagttggaggaagggtgtggggatgacaaatcggtttccctgagacatagaaccagacaggtcagtgtggctccccagctcctgcaggctgagtgtgcctcaggtattcctatgagttggctctgttgatgacacctagctctggcccttctgttgctttgcttgaacttgtgttcttgtgagaaggtagtgtgacacagagaaatcacagagaaagaaaatgacctgtctgacctgtgccagagcgtgtttaaccagatggtttactttctgtccctgccttcctcctggaacctgatcacttctgtggtcaacagactgacagtgagcgcacggacaccgcagccgacggggagaccactgccactgaggttggtattttggctgagagtggctggtagtggcataccgaaaatgccttgtggggtggctctgtgtttaagaactccacatatgagctgttgtaatggagatcagttctaactttaacagttggagttaaatatgtatt

SEQ ID NO: 681140 - DNA, 660 bp, Homo sapiens
ggcaatggtcatcagtgactgctaatgtcacacatgtaaaaaaaaaatcaggcagtcacgtagtgcttcctaatgaagtatcatttatggaaaacaaaccggaacctgacgaagtttctagatgtaactcccacttcaggggcgattcaggagactgggagagctggtaaattacaccataaagatgcaaacagsagaatctacactgaaagaactccacaggcaaatgacatagtttcttaggcaagttaatttcaaggggaaaaccaagataagtggagaattatcaggttaagttttgaattttctaaaatgtcgattcaatgaaaattttaagtttgtatttactcatgataaaagtaaaatcatttggaggttaacttttttttttactaacctttttaattaattattttattaacaatttaaactaagaatgtatttttgtctttctctttttagttagtagatgtatgtttttggagcagttttaggtttatagaaaaacttgagcagaaagcacagagttcctatataccccctcacactcttcccctcaccccccccagtttctctatttttattttttgctatttcttacaggaaggatcccctatttttaacattttgcattagtgtggcacatttgttacaactgat

SEQ ID NO: 681141 - DNA, 640 bp, Homo sapiens
gttgtcatttcaacaatgttcacagaatcttcatcaggaatagatttcaactcaagaagtgactttctttgctaatttataaaaagcaattcctcatccatttaagttttatcataaaattgtgacaattcagtcacatcttcaagcttcacttctaattataattctcttgctatttccattacatctacagttacatcctccactgaagtcatgaaaccctcaaggccatccatgatggttagaatcaactctttgaaactcctgttgatgttgatattttgacctttcccacaaatcataaatgttcttgatggcatctagaatggttaatcctttccagaaggttttcaatttactttgctcagattcatcagagaaatcactatctgtgacagctatatcctaataaaatgtatctcttaattaataggacttgaaaattgaaattattccttgatccatgaactgtagaatgtatattgtgttagtaggcatgacaacaacattaatatccccgcacatctccatcagagttcttgggtgattaggtgtgttgtcaatgagtggtggtcctgagacctacctcagcagcaggtwggtctactgcatgtggtccttggatgtaccacactgctgg

SEQ ID NO: 681142 - DNA, 1267 bp, Homo sapiens
tgaatatgcagagcttgtttcttttgtcatatacctacaggcaagcaattaaacaggactaatattcatgagaaaggttttgggtggagctgcagacttggaaagggatattaaagactgagaagtgagtgagatcacttaaggagagcatgacagatgtgaataagacaggcattagagaatgtggcatgcaggagttaagaagtagaaacatgcaataacaaatagtcaatgaaagaaagttttaagaagaaagtaattataaacaatgccaagggctatgcagagaggtcagtaaaatgaagatacaaagcatgcccaatgaatagagcactggaagaagcattggaagatacacagcatatccattgaattgacagctgtggaagaagcactttgcataaaattgtgatactgagagtctgactaatgagttgaggtagtagggaagtgaagatagtgaatgagagaaggaacagttgaaggaaccgtttggttttgaaagactacagatatctgagcatatttacagtctggatggaaggatctcaaagagaaaggggatggaggagggagagagattgcatcattggtagagcttgaaacaaagccctgaatgaggtatgaaagagcagagctggaaaaattgtcttaggaaaggagaatgaataccttgtacctgaatgatggcaaatatgaatgcttttgtaatgagaagttgaggcatttttctctgacacctctgttttctctgagatgttagagataaggtcatgtgttaaaattgcatgaagtagggaatatgcagaggatttgaggagagtttctttttaaaattaatatgctattttataaacaaagttatatgtgtaatatgtatgtaagttatgatgtagaataagaaggtgaacaccaggaatccaccatccagcgtatgctctagaagactatatgtttattccccatcttatcacccagcctctattacaggcaaaataaaggtttgcgatgccagtggaaaggaatggaaaagaaagataaccragcacaatgggataattgtcaagcaaccctgtgggtccacctatgacttgctacagtaaatttgtagtggcacagatattcgtattcatggttgtcagattttgttaagctacattgataattctagtaagaagccagcttgcaggattgcaggagaataaggaggctaggaagctgatggtacattgagagaatacttcaaataattttccatggatttgca

SEQ ID NO: 681143 - DNA, 1267 bp, Homo sapiens
tgaatatgcagagcttgtttcttttgtcatatacctacaggcaagcaattaaacaggactaatattcatgagaaaggttttgggtggagctgcagacttggaaagggatattaaagactgagaagtgagtgagatcacttaaggagagcatgacagatgtgaataagacaggcattagagaatgtggcatgcaggagttaagaagtagaaacatgcaataacaaatagtcaatgaaagaaagttttaagaagaaagtaattataaacaatgccaagggctatgcagagaggtcagtaaaatgaagatacaaagcatgcccaatgaatagagcactggaagaagcattggaagatacacagcatatccattgaattgacagctgtggaagaagcactttgcataaaattgtgatactgagagtctgactaatgagttgaggtagtagggaagtgaagatagtgaatgagagaaggaacagttgaaggaaccgtttggttttgaaagactacagatatctgagcatatttacagtctggatggaaggatctcaaagagaaaggggatggaggagggagagagattgcatcattggtagagcttgaaacaaagccctgaatgaggtatgaaagagcagagctggaaaaattgtcttaggaaaggagaatgaataccttgtacctgaatgatggcaaatatgaatgcttttgtaatgagaagttgaggcatttttctctgacacctctgttttctctgagatgttagagataaggtcatgtgttaaaattgcatgaagtagggaatatgcagaggatttgaggagagtttctttttaaaattaatatgctattttataaacaaagttatatgtgtaatatgtatgtaagttatgatgtagaataagaaggtgaacaccaggaatccaccatccagcgtatgctctagaagactatatgtttattccccatcttatcacccagcctctattacaggcaaaataaaggtttgcgatgccagtggaaaggaatggaaaagaaagataaccaagcacaatgggataattgtcaagcaaccctgtgggtccacctatgacttgctacagtaaatttgtagtggcacagatattcrtattcatggttgtcagattttgttaagctacattgataattctagtaagaagccagcttgcaggattgcaggagaataaggaggctaggaagctgatggtacattgagagaatacttcaaataattttccatggatttgca

SEQ ID NO: 681144 - DNA, 1267 bp, Homo sapiens
tgaatatgcagagcttgtttcttttgtcatatacctacaggcaagcaattaaacaggactaatattcatgagaaaggttttgggtggagctgcagacttggaaagggatattaaagactgagaagtgagtgagatcacttaaggagagcatgacagatgtgaataagacaggcattagagaatgtggcatgcaggagttaagaagtagaaacatgcaataacaaatagtcaatgaaagaaagttttaagaagaaagtaattataaacaatgccaagggctatgcagagaggtcagtaaaatgaagatacaaagcatgcccaatgaatagagcactggaagaagcattggaagatacacagcatatccattgaattgacagctgtggaagaagcactttgcataaaattgtgatactgagagtctgactaatgagttgaggtagtagggaagtgaagatagtgaatgagagaaggaacagttgaaggaaccgtttggttttgaaagactacagatatctgagcatatttacagtctggatggaaggatctcaaagagaaaggggatggaggagggagagagattgcatcattggtagagcttgaaacaaagccctgaatgaggtatgaaagagcagagctggaaaaattgtcttaggaaaggagaatgaataccttgtacctgaatgatggcaaatatgaatgcttttgtaatgagaagttgaggcatttttctctgacacctctgttttctctgagatgttagagataaggtcatgtgttaaaattgcatgaagtagggaatatgcagaggatttgaggagagtttctttttaaaattaatatgctattttataaacaaagttatatgtgtaatatgtatgtaagttatgatgtagaataagaaggtgaacaccaggaatccaccatccagcgtatgctctagaagactatatgtttattccccatcttatcacccagcctctattacaggcaaaataaaggtttgcgatgccagtggaaaggaatggaaaagaaagataaccaagcacaatgggataattgtcaagcaaccctgtgggtccacctatgacttgctacagtaaatttgtagtggcacagatattcgtattcatggttgtcagattttgttaagctacattgataattctagtaagaagccagcttgcaggattgcaggagaataaggaggctaggaagctgatggtayattgagagaatacttcaaataattttccatggatttgca

SEQ ID NO: 681145 - DNA, 967 bp, Homo sapiens
tggccagctgctcggtcctgctacatgctcagtggcaccatgtccacttatggcaggagacaaatcatcctctgaaaatgggaatcaaaaaatttggcagaggagaacgactaaatgctttattccatcttacaaatttgcgatcacattacacattattctttagttttctcagtcagggaaatgatgaggatacagaaccagactgagataagtactaagataatggaaggtaatatgagcggtattattccacttatttaaaaacgtaaaggcaacaactgggctagtcttccagttacaacatatggcttagagacatgatccctcatcaagaacatggaatagaacttgtcatcatggacagattgtyaggggaaaaaatgatggcgataggcatattatgagataagaacagctagtaccgctacatttggagtgcgccaaaagctggggtagcatttgttttgctccctggattggttccatctgtctagtactgctgagaatattttgacagtggaaatttgtgagatgaggcaacctccaccatgtactgacatttatgagtcagaatatccatgatggaaggaggaataatctgagatattggtttgaggtaactgaaactgaaatatagtgaaggccacactaatgggctttaagtagaccttgggtggtggagactttgatatcaattgctggggtttgaaattggggcaggtgatctctctttggttccgattcaacagcaagctgtcaagagagctgacaggtgagataattgttagctctctggcttgctaattaaaggagatgggaagtaatagggacattcattttgttcactcaccagaatctcctttggaaaaggggattccttttgaatcctaaaagagatcaattcactgcttgacatgcacccaagtgagtatgaaaaatatgccttcaggctgagtgatatatg

SEQ ID NO: 681146 - DNA, 2353 bp, Homo sapiens
aaaattgtccccatgtctactaaccctcttgccccagatgatgttggcacaagcccagaaaagactttcaaattcaatgaatgattaagattaataactgctcacatgtatacagtacctatagtttctaacttgtgaacccatttgattacctacacaatagttcagtaaaatagataggactaatatattgttactctctttaaggtgagaaatctgtggcttagtgaggctaagttactcacccaaaggtaagcataactagcacaagtcaaaaccgaaacttggacacaygttttctgagccctaatccagtgctttcttcacttacattgcattgccactaggggcagaggaaggacaataaattcccatatctcaaagaacagcaatgtagatccccctagcaaactaatttgggaataataattaagttatgatctatatcaaatggtttcacctccaaagagaataaaacttctaatagaaatacactaagtgaggtgcccagagcaaaatgcagatgagagttctgcttggcttggtttgcatcatctcctttcagatgtctctcttttcccatctggtttttaaagatacgaagctgaggtgtctctacgccagctggtagagtcagatgccaatggcctcaagcagatcctgaatgtgctgaccctgggcaaggccgacctagaggcacaagtccagtctctgaaagaggagctcctttgcctcaagaacaaccacaaagaggtgagacaaagaccaatagagtaatcacaagctaagtccctaaaagtagcatcagttcctttgagttgcacctgacaaagggtgtgcccgcttgtattagttcgttctcacactgctataaagaaataactgagagtaggtaatttataaaggacagaagtgtaactgagtcacagttccacatggctggggaggcctcaggaaacttacaatcatggcttaaggggaagcaggcacatctcacttggcagcaggagacagagagagaccaaagggggaagagccctttataaaactatcagatcttgtgagaactcactcactatcctaagaacagcatgggggacaccacccccatgatccaatctcctcccactaggtccctcccttgacacatgggaattatgggaattacaattcgagatgagatttgggtggggacacagagccaaaccactgctacgtactactctggtttagccctgaaaatacctactgctactagcactggttcaaggtagtatttcaaatccactggctccaacacaatatctggagccataaggggaagaaaggcctccaacatcccctccagcttttctacaagaaggaacccaatttttctgtccttacagtcttcccatgtttgtaggcatccctatacaggcttctgccacctcccattggtacaagtcaatattggtgcaagtcaatattggcacaatcccgtatttgcaccatagagactataatctctcatgatcaattccacctttatcctgtttcacccattatccagccctggaaatgatctaaattttttggaactctggtcttgctactcatttttttttaattttgcacacatttaaacacacagtcctacctgaaagagtcttaaatcattttatagcatctcaataacacctgtaaatcatgtattcctttgttgtgggctatattttagacacaattaagctaaatcgtagcagttagagtgaaacaagaacacaaaggggttatctgttcaccaagtgacttcacagtctttttctttccttaggaaatcaattctttacagtgtcagcttggggagagacttgacattgaagtgactgctgccccttctgctgacctaaaccaggttctacaagaaatgagatgtcaatatgagcccatcatggagacaaaccgcaaagatgtggaacagtggttcaacacgcaggtgggggatatagaaaagtcaaaaacaataagctgatgctgcatttctagggccctttaatcaaagtcatgttttcctcccataatattctcagtctctggctgtgtgtttcagatagaggagctgaatcaacaagtggtgaccagctctcaacagcagcaatgctgccaaaaggagatcatagaactgagacgcagtgtgaacactctggaggttgaactgcaggcccagcatcgaatggtactgagcaagctgaccaagcctagctcagcaaagatggaaacagtcccttacacctgtgtgctgcagtatttcccaaactgtgtctttcagaacaatagttcctcatttgttaaagcgtctatggctgaaaaa

SEQ ID NO: 681147 - DNA, 637 bp, Homo sapiens
tgagtttcttttccatccatatactgaattctatatctgtcattttagacatttcattttctggttaggattcattgcttgggagctagtgggatactttggagatgatgaaacactcttggctttttgtattgcaggagttcttattatgattccttctcatctgagagctgacacttctttttttcttgaatttgctattgtttggatggggattttttattttcttattctttttccgctaggggtatgactgtggtgtatattgtgtatgattggttggcttcatttctgtgtgctttcaggggytaaggctctgtataggtttcttggctgcagacaggtttgtgcagcggctttctcaggcaatgcttgtagagatataattttgttttgtggtgtaattcaggctgcattccagtagatggcacttaagagcaagagcctacaggtaggggcaggagtgggggcaacggacaagtgagaaagggcccttctttagtatgcattcatcttcagtggggggtggagcctctggagaagcccaagaagtggtctcttttggcccacactccccaggccagaatgggaagaacttgctgaatttgtaacagtgcactgaggaagagtgtgggga

SEQ ID NO: 681148 - DNA, 637 bp, Homo sapiens
tgagtttcttttccatccatatactgaattctatatctgtcattttagacatttcattttctggttaggattcattgcttgggagctagtgggatactttggagatgatgaaacactcttggctttttgtattgcaggagttcttattatgattccttctcatctgagagctgacacttctttttttcttgaatttgctattgtttggatggggattttttattttcttattctttttccgctaggggtatgactgtggtgtatattgtgtatgattggttggcttcatttctgtgtgctttcaggggctaaggctctgtataggtttcttggctgcagacaggtttgtgcagcggctttctcagrcaatgcttgtagagatataattttgttttgtggtgtaattcaggctgcattccagtagatggcacttaagagcaagagcctacaggtaggggcaggagtgggggcaacggacaagtgagaaagggcccttctttagtatgcattcatcttcagtggggggtggagcctctggagaagcccaagaagtggtctcttttggcccacactccccaggccagaatgggaagaacttgctgaatttgtaacagtgcactgaggaagagtgtgggga

SEQ ID NO: 681149 - DNA, 1202 bp, Homo sapiens
taattcattgtgacccctcagaccatcctccggataaacagcattgagattgctctgtgtttgttgtagtcaccgagttagtatttgcagaaatataaaaataaactcttgctttccaaggaaaaaaagaatcttgggtatggccacccccaataatgtgtaatgggctagtgtaaaattatactaatgagcaactagtgagcacatgctgtacttaacagctcttgttcaggattcagttagacttagatctctttagctgcaaaactttgggaatgttatttatagtttccaagcctcattgataagattgttgtgaagattaaatagaatgcatataaaatgcagctcagttggtgaaggcactttcacctttgatccttcatcaccatctgcccaaaagaagccctgtcatggagcagccagattctcattttaggtaaacagaaaaggataaggcacttctggccttgtattttctcccagagcactcagatgctgattatattacagacaaatcaagatttctcaaccctcttcaattctttcaatcaattatccatttagtgtaactatgtgataatgtctaacacataaattatcatgaaaaatgtgaaagctactaaactaaaaaaaaaaaaattctttttagtagcaaggattttgtatggggaagcctggctttgtgggaaatgatttgataaacttacactggaaactgaaccttagggaatggattccattccagtcaaatcttcaaaggaaaagaggaagctactctggataataagagtgaagaattggaagttcctgggaggaaatcctggaaaggaaaagaaattggtactgtgtagaggaaagagaaaactctcccctctccatgatggtgcagctgaggcagaactttggaaaaagaaaatctctggaatrctgacaatcgtgtttccctaaaaaaccctccgacaccttcagaaactattctgaattgctgagtattaatgcttttgtgtgagtatgttattttgaggagttaagctctatgtcttgataagaatgtatcaaaaatagacctcgcacatcaacccaggagtcagaggtcacaaaggagactgacaaatgggtcatggtgagaactatgaccacccgtgtccatatagcttaactagcagaactgaagctgaatgccaccttggtcaagatga

SEQ ID NO: 681150 - DNA, 1202 bp, Homo sapiens
taattcattgtgacccctcagaccatcctccggataaacagcattgagattgctctgtgtttgttgtagtcaccgagttagtatttgcagaaatataaaaataaactcttgctttccaaggaaaaaaagaatcttgggtatggccacccccaataatgtgtaatgggctagtgtaaaattatactaatgagcaactagtgagcacatgctgtacttaacagctcttgttcaggattcagttagacttagatctctttagctgcaaaactttgggaatgttatttatagtttccaagcctcattgataagattgttgtgaagattaaatagaatgcatataaaatgcagctcagttggtgaaggcactttcacctttgatccttcatcaccatctgcccaaaagaagccctgtcatggagcagccagattctcattttaggtaaacagaaaaggataaggcacttctggccttgtattttctcccagagcactcagatgctgattatattacagacaaatcaagatttctcaaccctcttcaattctttcaatcaattatccatttagtgtaactatgtgataatgtctaacacataaattatcatgaaaaatgtgaaagctactaaactaaaaaaaaaaaaattctttttagtagcaaggattttgtatggggaagcctggctttgtgggaaatgatttgataaacttacactggaaactgaaccttagggaatggattccattccagtcaaatcttcaaaggaaaagaggaagctactctggataataagagtgaagaattggaagttcctgggaggaaatcctggaaaggaaaagaaattggtactgtgtagaggaaagagaaaactctcccctctccatgatggtgcagctgaggcagaactttggaaaaagaaaatctctggaatgctgacaatcgtgtttccctaaaaaaccctccgacaccttcagaaactattctgaattgctgagtattaatgcttttgtgtgagtatgttattttgaggagttaagctctatgtcttgataagaatgtatcaaaaatagacctcgcacatcaayccaggagtcagaggtcacaaaggagactgacaaatgggtcatggtgagaactatgaccacccgtgtccatatagcttaactagcagaactgaagctgaatgccaccttggtcaagatga

SEQ ID NO: 681151 - DNA, 1616 bp, Homo sapiens
tcaatatgacaccaaaacatggtccattaaagaaaaaactattatattgtacttcataaaatgtaaaatctcttcaaaagacactaagataataagaaggtgtcatagatatctgtcatccaggttggagtgcagtggtgcgrtcttggctcactgcaacctccacctcctgggttcaagagattctcctgtctcagtctcccgagtagctgggactacaggcatgcgccaccgcgcctggctaatttttgtattttttcttgagatggggttttgccatgttggtcaggttggtctcgaactcctgacctcaggtgatccacccatctcggcctcccaaagtgctgggattgtaggcgtaagctaccgtacctggccaaattcttatatattctcccttgtatacaaatatattaatgttaaatatagtcataagaattctgcatgctcagaaacattctgatcttatgatttttatgccctcaagtctcccctctccctgctacttgatctttatttccagaagtgggaattaggaacagaaacgaacacaacagtcctcaacacaaaagcttctttcttatgaagacaaaacaaagccagtcaactaaaactaaataaataaaagaaaaaactaattcaacaacttggtcattgacaaattcatcatttggcaattgttctggagcaggcacatggacagttttttaagtatattaaaggaaaggaggaatggggtgggaggaaaaggaaaggaatgaaggaaggaaaaggaaggaaagcacgaggtctcagccatttgacgaatatccatcaagtgcaaatccataccctcaaaatgtggcaattatttatttcatcacctttatcaaatagtaatgagtgacacaatgttgcctatgaacaggaataaaaaagaataaatggaaaggaggtggataggaccagttgctcaccatgagcattttatttttatatctgaattttgaactatctaaaacctagaaatgttcaatagtgggctggtgatatgaatgtcaaaagagttgtactgttatctgcagccagtaatcataaagttccatgcaaatgaactgcaagtgaaatagatattgatcatctctagctgacaacatgtgatccagtaactacttccgggttataccagagttcatctttaagtttttctttctggtgatacaaaacaacacccaccaaggataactcaaatataatccaggtaatgagatttggtaatatagtacataagtattccatcattggaattgcaatatttccccaacccaaatactcctattaaacctaccagggaaggctactgtaaattttaaaggaataatttagtactttgctcttgatatgtgaaaattttcacctaattcagcatgtaatcaacaaatccaaccagagtcataccctatttggtaaaatataattatctgaaaaaaagttaccatcacaaattaaaatgtctttgcaactttagcagagtaagcatcttttaataactctggtatccattaaaaattgtcaacagaaataaaacaggtacactgataagagcatttaaaaatcccatgcacaagctaacaatt

SEQ ID NO: 681152 - DNA, 1616 bp, Homo sapiens
tcaatatgacaccaaaacatggtccattaaagaaaaaactattatattgtacttcataaaatgtaaaatctcttcaaaagacactaagataataagaaggtgtcatagatatctgtcatccaggttggagtgcagtggtgcggtcttggctcactgcaacctccacctcctgggttcaagagattctcctgtctcagtctcccgagtagctgggactacaggcaygcgccaccgcgcctggctaatttttgtattttttcttgagatggggttttgccatgttggtcaggttggtctcgaactcctgacctcaggtgatccacccatctcggcctcccaaagtgctgggattgtaggcgtaagctaccgtacctggccaaattcttatatattctcccttgtatacaaatatattaatgttaaatatagtcataagaattctgcatgctcagaaacattctgatcttatgatttttatgccctcaagtctcccctctccctgctacttgatctttatttccagaagtgggaattaggaacagaaacgaacacaacagtcctcaacacaaaagcttctttcttatgaagacaaaacaaagccagtcaactaaaactaaataaataaaagaaaaaactaattcaacaacttggtcattgacaaattcatcatttggcaattgttctggagcaggcacatggacagttttttaagtatattaaaggaaaggaggaatggggtgggaggaaaaggaaaggaatgaaggaaggaaaaggaaggaaagcacgaggtctcagccatttgacgaatatccatcaagtgcaaatccataccctcaaaatgtggcaattatttatttcatcacctttatcaaatagtaatgagtgacacaatgttgcctatgaacaggaataaaaaagaataaatggaaaggaggtggataggaccagttgctcaccatgagcattttatttttatatctgaattttgaactatctaaaacctagaaatgttcaatagtgggctggtgatatgaatgtcaaaagagttgtactgttatctgcagccagtaatcataaagttccatgcaaatgaactgcaagtgaaatagatattgatcatctctagctgacaacatgtgatccagtaactacttccgggttataccagagttcatctttaagtttttctttctggtgatacaaaacaacacccaccaaggataactcaaatataatccaggtaatgagatttggtaatatagtacataagtattccatcattggaattgcaatatttccccaacccaaatactcctattaaacctaccagggaaggctactgtaaattttaaaggaataatttagtactttgctcttgatatgtgaaaattttcacctaattcagcatgtaatcaacaaatccaaccagagtcataccctatttggtaaaatataattatctgaaaaaaagttaccatcacaaattaaaatgtctttgcaactttagcagagtaagcatcttttaataactctggtatccattaaaaattgtcaacagaaataaaacaggtacactgataagagcatttaaaaatcccatgcacaagctaacaatt

SEQ ID NO: 681153 - DNA, 1616 bp, Homo sapiens
tcaatatgacaccaaaacatggtccattaaagaaaaaactattatattgtacttcataaaatgtaaaatctcttcaaaagacactaagataataagaaggtgtcatagatatctgtcatccaggttggagtgcagtggtgcggtcttggctcactgcaacctccacctcctgggttcaagagattctcctgtctcagtctcccgagtagctgggactacaggcatgcgccaccgcgcctggctaatttttgtattttttcttgagatggggttttgccatgttggtcaggttggtctcgaactcctgacctcaggtgatccacccatctcggcctcccaaagtgctgggattgtaggcgtaagctaccgtacctggccaaattcttatatattctcccttgtatacaaatatattaatgttaartatagtcataagaattctgcatgctcagaaacattctgatcttatgatttttatgccctcaagtctcccctctccctgctacttgatctttatttccagaagtgggaattaggaacagaaacgaacacaacagtcctcaacacaaaagcttctttcttatgaagacaaaacaaagccagtcaactaaaactaaataaataaaagaaaaaactaattcaacaacttggtcattgacaaattcatcatttggcaattgttctggagcaggcacatggacagttttttaagtatattaaaggaaaggaggaatggggtgggaggaaaaggaaaggaatgaaggaaggaaaaggaaggaaagcacgaggtctcagccatttgacgaatatccatcaagtgcaaatccataccctcaaaatgtggcaattatttatttcatcacctttatcaaatagtaatgagtgacacaatgttgcctatgaacaggaataaaaaagaataaatggaaaggaggtggataggaccagttgctcaccatgagcattttatttttatatctgaattttgaactatctaaaacctagaaatgttcaatagtgggctggtgatatgaatgtcaaaagagttgtactgttatctgcagccagtaatcataaagttccatgcaaatgaactgcaagtgaaatagatattgatcatctctagctgacaacatgtgatccagtaactacttccgggttataccagagttcatctttaagtttttctttctggtgatacaaaacaacacccaccaaggataactcaaatataatccaggtaatgagatttggtaatatagtacataagtattccatcattggaattgcaatatttccccaacccaaatactcctattaaacctaccagggaaggctactgtaaattttaaaggaataatttagtactttgctcttgatatgtgaaaattttcacctaattcagcatgtaatcaacaaatccaaccagagtcataccctatttggtaaaatataattatctgaaaaaaagttaccatcacaaattaaaatgtctttgcaactttagcagagtaagcatcttttaataactctggtatccattaaaaattgtcaacagaaataaaacaggtacactgataagagcatttaaaaatcccatgcacaagctaacaatt

SEQ ID NO: 681154 - DNA, 1371 bp, Homo sapiens
ccgaactatatcagataggttctattattgttcccactttatagatgaggacactgagacagagaggctaatgaaccttctgaagattgcacagtgagccagtgtcagatgcagattgaacccaagttgtagtttggctccaaagtccacatctgtcaagcttttttgagtcacaagtaacagaagctcaactcaaaataggcagaaaggaggatttgtttccaaaccttgaaaagaacgggaagtctctctgaaactattgaagctggaaacttgagtgacctcgggactttatctgtgatctstttgtgtcccccagaaccctgaggctggcttcttcctgaaggctgaagtcagggtcaccaattactctttagctgaccctcccagccttacattgaaaatgaggctcttgctcccaagctccaattaacaaagaaatagaaaaagaaagagaaaaacaggaaagaacaggttgcatgcccaggggctggatcaaccactatggccaggaggatgaagtattaggattggttcagcctgggttaattgcctgtccttaaataagttattgtggaggagataaagtagcctccagcaaatcacattttaaagtcatgaaatttaaataataataataataataataataattattattattattattattccctaaaagatggaggatggcacagctttgccactggagtaattactgcaagctgaacagccaccctgaagaaatagaaaactcagagaaaaacaaagggtaagataatgactgttcctgaagcaaatgaacaggtgcacagattcggcgacaccagaccttcaggtcaactgtcagccagtgctgaggactgggatccccctgcaggtgggacagcgacagtccactttgccaaagttcccatacggcctgctttgctcatttatgtcacctgcctggcccccacaggcatctgagtttgagacctgtggcttagtgtgttgccaaatagcacagtcaatcattgggaagaccaactagagcgtccgtttcctccttcacatttggccaacagccagtgaatgcttcgaagacaaaatagccaagacaaaggatccagtcattaaaaacagagttttcttgacagaatggcttatggcatttgacagaatttttcaaggcgcagaaaaacacatttgacagcatgtgttttaagcagagatgcgtatatgacacgtaaaaagtcaatcactgccagcctttatgtggggagagatcgggaagggagcgagaggggcttcatttcttcctccttccttctttccacccagagcctcagtctgccctctgtagatggttgtatgaaataggcaaaccca

SEQ ID NO: 681155 - DNA, 613 bp, Homo sapiens
aactttcactactggtgatgtcattggctgttgtgttaatcttatcaacaatacctgcttttacaccaagaatggacatagtttaggtactgagataatatattgcatgcaaaataaccaaatatggagattattatacttccaggatggtagttgtatttattatgtgattctcctttatagatggatgcctctggaaatggtttctttctttttcccagacagaagctgaggaaatggtgaatatttatattcaccctatttatattctgtgaaggccatctatataatacatatatgtataggagttactgtagaaataatccccacactgagatacttattctagaaatagaaatgccaagagttttctactttaaataaaaygctacacagtataatctaattctctgggtaacaggtgctaagaaaaaggggcagtcagttgttaggatagtgtggggaatagtaacaaaggaagggaaagcttgatgccacaagcatatgaagggcatcaacacactcaaaggtcagatctgctaacaaagatggctaagttggtaactacaagtttgttctatggaaggaagcagaattaaacaagcaaacagtg

SEQ ID NO: 681156 - DNA, 3586 bp, Homo sapiens
gggaaaaatgaaatttgaaactacatagatttaccccaaaaaaggagtaataaaatgtgatgaggcaaggcatttgtggaaaccccacctacattttcaaattgtgctgggcagaacgataactcataaaatataaaattatcccattggtatcttattgcatataatcatatttaattaatattagtgaaattaagttaaatattaaggttaaaaaaatactactttaagaacacagagcactctcctttactgttctgttagagtaccctctagtgacgatgacaggttattacaagccaatcaaaacaaatcgcctaattgcatgcagtaaagctgctgttagtcaaagtggaaacactcatgagaattttcgaacagcaaagcattctgtagaaagaggtgtgtaggtgctggtcctyggctgtttgcaaccacttttctgatgcggttgacgacacatgacaaactcagctatatggaaacagaatctaggtttatttttttatgttctccaaaggcattaaataataaaacccaaaccaacaaatacatataaaataaatatgaaacatcctacagtcttttaaaaataaccactataattacagtttgtgttacccatacaagacgttctgttcttatagtagctacttttatataaagcaaatataagaaagggaaaatcaagaaaggaaaatcaagggaaccacgacacttattacacagagataacactgttagctcctaagagaggcataggcttgtgtgccttgaataatgactgctccttagccactggagtttctaaaggaaacatacagttgtttctttcctcctccaattaacgcaaggtatggaatccagccaacatctggcagttacctttttatgcccaagcaaataaaatttaaaaacaaaacaaaaacccttagggtaagataagaataattttaacttgctttccatttgaccactgcaattctgaaggattctgttggcctttgtgggatattagatttcggaggtccaagatgtctgagcctagctgaacctgcactgtaccccattgtgacggagcacttttacattttgcggaaaacaatgatatgttctttcacagatggggagaaagttgcagccagtctaagccaaacatctttgacatttaacaattctttacttcacttagatttgtcaccatgtagctttgtttgaattggccatttttaaaaccttctattgttgtttccaatggtaaacttttataacaaaacatctgggctttataagtatgtaaagaataatgatatggagtggccatatttgcatgtgtctgtccccggaagggtggactgtaattttattggatgtctgcagctattaccttgaaggatgaattttcatttttcatctattcttccccatctagattgtatcaggattaactgtaattccagtaagtgcctattcaaaatttttaaaatgttattcctccattatgatgtaagctagtcaagaaaaagagagagagagagcaagagaaatgtgtttataaaactcatgagctcacttttaaagtataccagtccatcatctgggttgtaaaaattcatttttaaatttgtacagctgaagactttcccactgcagttcctacctctatatggaaaaagaggtgacaagtgttttgtaacagaatgtgccagcaccttatagacatttagatactgcaagtggcatttttagactccagttgttctcttcataaccaaataggagaaaatattgtgggtcttattttcttttgtctttatcttttaactcaaatacaaaaaaaaatacttaattcctcttacttcgagagttactattaaacccatctaaagttttacatagacatagaaaattactcgtctaaaacgttcttccttgatcattaagaatgtttatatgatgaatttttacatcctaatcatatctctgcaaaaataaccaaaacccttcaaatctgtgacatgcatgcaaactgatgagtctgaaaagatgcatggactgagttttctttgaatttggatgaaaatctgaaaggatataaggactgtgattttattttgagttgtggcattatcttaagtgtaaacttatttatttctgtacataaatgctcaggttttttctttccaggttttgctgatcacattaagaaatctccaatgatcacaacacaaagtcatcagcaatttaaataaaatggttctaacaaatttctaatctctcactgtcacagtaaagaatttttttctattctcaaaacaatgctgaatgtgagttgatggagtctactccccacagcattggccatgttttcaagtggcaataaggcatcctctgaggaacaaatagaggtcttaaacttgcgaaaacaagactattttcctaataaaatacgtactgtttcaaacactgtgcctcttacaactcataattctatccacatatatttaatattcttttaaaaataacattaaaatgagtttgttcaatcagaccaataaaaaagtaacagaatgatgacttattaaaaattaagttaataaattataaccaatatcccaggcatttaaaaagatctcgaacaaaatagttcctgaaaataacctgtcaaagctctcacgtaagcggaatttttcaaatatatgtaatctcctctccaactctatctcctccatgcattcctaaaaggatatacattttgcacatctaataccaggtccagtttgctttcagctgggggcatagatgcaggcaaagtggcaactcacaaaatattctttgccaaagccagatctgtgcctcactctggctgtaggttttcttgatccctcctgcatcttagaaaatccttgtggggaccaatattcctttctagacctctaccttatgtactctttttattttatttatatgaagcatgcaacaaggcatgaatttttgaatttacaaaatataactatgcaaagtatagcaattaatgaaaattattcaaatgacatgtgattctgtattctgtggctatatcaatgattttttaaatgtatgtttatagtataattacccttgttagactcgtttgccatttggcttatatcatgagactctggtattgaggacagtcttatttttcctctggatattccacagaataatacctttgaggacaaaggtttttgctgtttagtgaattgttttccctttttaatgagtatgtgatacttgaattcaattaatgattgtgagcctccagtgtacacatcggacaggactgcacattccttaacttgacagcagtcactggaaagaacattcaatgaacaggtaacattttcatttcctttgcctctgttttatttggggaatagggagcaggtgtagtaagaaacccaagttccataaaaaagactcacctttgaggaaagggaggaatttacattccagataatgcaaacctaacacacagtgattaaatgagcagtgatttctacctggagtgcattttgtactcaataaaaactaaattaacaat

SEQ ID NO: 681157 - DNA, 3586 bp, Homo sapiens
gggaaaaatgaaatttgaaactacatagatttaccccaaaaaaggagtaataaaatgtgatgaggcaaggcatttgtggaaaccccacctacattttcaaattgtgctgggcagaacgataactcataaaatataaaattatcccattggtatcttattgcatataatcatatttaattaatattagtgaaattaagttaaatattaaggttaaaaaaatactactttaagaacacagagcactctcctttactgttctgttagagtaccctctagtgacgatgacaggttattacaagccaatcaaaacaaatcgcctaattgcatgcagtaaagctgctgttagtcaaagtggaaacactcatgagaattttcgaacagcaaagcattctgtagaaagaggtgtgtaggtgctggtccttggctgtttgcaaccacttttctgatgcggttgacgacacatgacaaactcagctatatggaaacagaatctaggtttatttttttatgttctccaaaggcattaaataataaaacccaaaccaacaaatacatataaaataaatatgaaacatcctacagtcttttaaaaataaccactataattacagtttgtgttacccatacaagacgttctgttcttatagtagctacttttatataaagcaaatataagaaagggaaaatcaagaaaggaaaatcaagggaaccacgacacttattacacagagataacactgttagctcctaagagaggcataggcttgtgtgccttgaataatgactgctccttagccactggagtttctaaaggaaacatacagttgtttctttcctcctccaattaacgcaaggtatggaatccagccaacatctggcagttacctttttatgcccaagcaaataaaatttaaaaacaaaacaaaaacccttagggtaagataagaataattttaacttgctttccatttgaccactgcaattctgaaggattctgttggcctttgtgggatattagatttcggaggtccaagatgtctgagcctagctgaacctgcactgtaccccattgtgacggagcacttttacattttgcggaaaacaatgatatgttctttcacagatggggagaaagttgcagccagtctaagccaaacatctttgacatttaacaattctttacttcacttagatttgtcaccatgtagctttgtttgaattggccatttttaaaaccttctattgttgtttccaatggtaaacttttataacaaaacatctgggctttataagtatgtaaagaataatgatatggagtggccatatttgcatgtgtctgtccccggaagggtggactgtaattttattggatgtctgcagctattaccttgaaggatgaattttcatttttcatctattcttccccatctagattgtatcaggattaactgtaattccagtaagtgcctattcaaaatttttaaaatgttattcctccattatgatgtaagctagtcaagaaaaagagagagagagagcaagagaaatgtgtttataaaactcatgagctcacttttaaagtataccagtccatcatctgggttgtaaaaattcatttttaaatttgtacagctgaagactttcccactgcagttcctacctctatatggaaaaagaggtgacaagtgttttgtaacagaatgtgccagcaccttatagacatttagatactgcaagtggcatttttagactccagttgttctcttcataaccaaataggagaaaatattgtgggtcttattttcttttgtctttatcttttaactcaaatacaaaaaaaaatacttaattcctcttacttcgagagttactattaaacccatctaaagttttacatagacatagaaaattactcgtctaaaacgttcttccttgatcattaagaatgtttatatgatgaatttttacatcctaatcatatctctgcaaaaataaccaaaacccttcaaatctgtgacatgcatgcaaactgatgagtctgaaaagatgcatggactgagttttctttgaatttggatgaaaatctgaaaggatataaggactgtgattttattttgagttgtggcattatcttaagtgtaaacttatttatttctgtacataaatgctcaggttttttctttccaggttttgctgatcacattaagaaatctccaatgatcacaacacaaagtcatsagcaatttaaataaaatggttctaacaaatttctaatctctcactgtcacagtaaagaatttttttctattctcaaaacaatgctgaatgtgagttgatggagtctactccccacagcattggccatgttttcaagtggcaataaggcatcctctgaggaacaaatagaggtcttaaacttgcgaaaacaagactattttcctaataaaatacgtactgtttcaaacactgtgcctcttacaactcataattctatccacatatatttaatattcttttaaaaataacattaaaatgagtttgttcaatcagaccaataaaaaagtaacagaatgatgacttattaaaaattaagttaataaattataaccaatatcccaggcatttaaaaagatctcgaacaaaatagttcctgaaaataacctgtcaaagctctcacgtaagcggaatttttcaaatatatgtaatctcctctccaactctatctcctccatgcattcctaaaaggatatacattttgcacatctaataccaggtccagtttgctttcagctgggggcatagatgcaggcaaagtggcaactcacaaaatattctttgccaaagccagatctgtgcctcactctggctgtaggttttcttgatccctcctgcatcttagaaaatccttgtggggaccaatattcctttctagacctctaccttatgtactctttttattttatttatatgaagcatgcaacaaggcatgaatttttgaatttacaaaatataactatgcaaagtatagcaattaatgaaaattattcaaatgacatgtgattctgtattctgtggctatatcaatgattttttaaatgtatgtttatagtataattacccttgttagactcgtttgccatttggcttatatcatgagactctggtattgaggacagtcttatttttcctctggatattccacagaataatacctttgaggacaaaggtttttgctgtttagtgaattgttttccctttttaatgagtatgtgatacttgaattcaattaatgattgtgagcctccagtgtacacatcggacaggactgcacattccttaacttgacagcagtcactggaaagaacattcaatgaacaggtaacattttcatttcctttgcctctgttttatttggggaatagggagcaggtgtagtaagaaacccaagttccataaaaaagactcacctttgaggaaagggaggaatttacattccagataatgcaaacctaacacacagtgattaaatgagcagtgatttctacctggagtgcattttgtactcaataaaaactaaattaacaat

SEQ ID NO: 681158 - DNA, 1513 bp, Homo sapiens
ggaagcttgtttcaaatattctagagtcacaactcaggtgctcactgaggtgctacccagcatcttcattcttgtgtgcatgacctctttaggttggactttttttttttttttttttttttgctatttctgtgccagtctggaaattgttctatagctcccatggcacagaggagtacggaacgttgtgtgagactgtctaaggtctcaggttatctaagtccaccatgcagccatttcttttcagagctctcactgctccctcttagttctcctgaggaaatgcacagaggtttgcattactccttgaaacttacctgaggttttgagattcaccagagctcagtccttaaattagaaatcagcaccctctttgacatttgccaatgactgtacttgcacaactaggttcttccaactttatctcctgcttgactgaaagaggagtaggaaagctttacttttcttatgtaaactccaatgtattctatttcattcctcgaagagtctaggatttttagacttaaatacagaaagctaattttgtatctttgatttctgattcatatcctttctctgaggcaactaaaacacaatggcctgaaatttaagtgagagcaaaaacaaaggacagaatggaaatatggaagaaaaatcaaataattcttcaaaatagtatcccctctctgaccaaaaccatgctgtcttttaatattaagaatgatggttaatagtcagtagactttgctttatgtaaaaggggggaagtaaatacatccagtactttcaatgcaaattatatagttataaaacttaagttttagttaggtcaaggacctaagttctcagtttttaacgttgaatgactttgagtatgccacatgattcctctatttcaatttattcatgagtacagttcaagagtgttatatctgtggtttgattttaccctacatacaaattaataggttagcttattactgtttaatgggtgcctgcagaagacagaatatttctggatgggagaccaaggaatttgttactcacagctcaacagtctgtgtatcagttctccttgttcccaagtctcgtgaagacaacacagaaggacccaggtgaacagtaagattgcaggatttttgtgttacactggggaaaatgtgccaagtgacatcaagttgaatagaatggttaacatgagaaagaaagttcaaatgaaaatgaaagttgaagaagtagataaaaagagtatgttacagaacttgtagactggagctatagcagcatattactgaattttgagctcaccttccttatgttccacattgattaaatgtttactaaagtcasttagttatgtttattgaatattatccagatatggtaaataatctgaaatagaaaaagaaacagaatccaacatagattgtaatctctttttttttttaagtaatagtccataaagttggggaatctcaaacctagagagaaaaagttaaacaaagctaagcaa

SEQ ID NO: 681159 - DNA, 665 bp, Homo sapiens
ttttttcattcatttactcaatgaatatccatgcagtaaatagtagtgtccttattactattgttagttggtaaactactacctgtcctacagagtcttgtcatctggtgaggtaaacaaggcattcacattcttatttaaacatcgtttacacagtcaagtatagtggtatgctggggctggctcatacaggctcctgagaaccaattctacgtattcctttccaaatttagagtagcttacaccactgaaattagaaaatgctacaaatcagaagacacacacacacacacacacacacacacacacacacacacacacgccccwcagaggctattactaaacattaaccagcatgccactggttatgtgacaacaaaagttgaatcataaaccatgaactgtgagtaatactcaaatgacgagtaaaacaatgagcataaaaagaaagcccaactagcattggcccctctacatggtaggtgctcaatacaaaagtgtgctagatggtctgattgaggaaggagggagaaaatgagctaccaagaaaatttagggggaaaagtggcatttgagctggatattgaagaatgggtggaatttggatagtcagagaaataggagagggctgttcatggagaacaggatgaagacaaatcctgagg

SEQ ID NO: 681160 - DNA, 631 bp, Homo sapiens
gcattttggccatcttttccctggccaccyctcagacctttgcaccatcccaaagcacactgccttctaaatgtgagatgtgccttgtttactttttacttctgatttgattcctaattttttgttttattgtgtggatactatgcatataaaagaatataaagaaagtgtacatgtatataaaaaatataagcatgtcacccagcatagtaaaaacacttttatccgagatttggaggccacatgtgatcattcccaatgcaaaacctcaacctcagtaccaaagataagcatcactttgaatattttactattattctcctgcattctttctagtcttattatttccctaaataatttagtgttgtgtgttagaattttatatgaatggttatcataccgtatggatgtcttcttctgtgtctcgtatttacattcaatgccgtgtttgttatttggccatgataatgttatcaacacaagtaattcatttttgcagctgagtttttcattctatggacacattgtataagtatataacgatatatttctctattgtcctgtcattggacctttgcatggtttacaatttttggctattagaaataatgctgccatgaacattcttgct

SEQ ID NO: 681161 - DNA, 631 bp, Homo sapiens
gcattttggccatcttttccctggccacctctcagacctttgcaccatcccaaagcacactgccttctaaatgtgagatgtgccttgtttactttttacttctgatttgattcctaattttttgttttattgtgtggatactatgcrtataaaagaatataaagaaagtgtacatgtatataaaaaatataagcatgtcacccagcatagtaaaaacacttttatccgagatttggaggccacatgtgatcattcccaatgcaaaacctcaacctcagtaccaaagataagcatcactttgaatattttactattattctcctgcattctttctagtcttattatttccctaaataatttagtgttgtgtgttagaattttatatgaatggttatcataccgtatggatgtcttcttctgtgtctcgtatttacattcaatgccgtgtttgttatttggccatgataatgttatcaacacaagtaattcatttttgcagctgagtttttcattctatggacacattgtataagtatataacgatatatttctctattgtcctgtcattggacctttgcatggtttacaatttttggctattagaaataatgctgccatgaacattcttgct

SEQ ID NO: 681162 - DNA, 631 bp, Homo sapiens
gcattttggccatcttttccctggccacctctcagacctttgcaccatcccaaagcacactgccttctaaatgtgagatgtgccttgtttactttttacttctgatttgattcctaattttttgttttattgtgtggatactatgcatataaaagaatataaagaaagtgtacatgtatataaaaaatataagcatgtcacccagcatagtaaaaacacttttatccgagatttggaggccacatgtgatcattcccaatgcaaaacctcaacctcagtaccaaagataagcatcactttgaatattttactattattctcctgcattctttctagtcttattatttccctaaataatttagtgttgtgtgttagaattttatatgaatggttatcataccgtayggatgtcttcttctgtgtctcgtatttacattcaatgccgtgtttgttatttggccatgataatgttatcaacacaagtaattcatttttgcagctgagtttttcattctatggacacattgtataagtatataacgatatatttctctattgtcctgtcattggacctttgcatggtttacaatttttggctattagaaataatgctgccatgaacattcttgct

SEQ ID NO: 681163 - DNA, 1702 bp, Homo sapiens
attgatcatcgtctccttaacaaggagctcctgttcagtggagtgatgggaaccaaagcccagtagaaatgacctgagatgaaaatgaaaggcaaagcaatagagaagcaagtgtagacagaagyatagaaagaagaatgcaggctgctgggctacagattccatgcggggtcacaatccatgtgtaattagaagttggggagggcattgatgggctctgatttgattagctgatatatattcccacagcgattatcgtgccatgtggaaaattgatgataacaggaagcaagattgggagcagaggatgacagaggttgtgaaaagtggcctccttcgagctgtattttggaggtggagccagtaagatgtactaatgtggagtttgagaaaaatagaataattattctcaaggaattatgctgtctaggagaaaagagaaataaagcggtagtcagagggatatgtggacaacacagcaagaccccatctggccaaagaataaaaaaattatccaggcatggtggtgtgcaactgtagttccaactactcaggaggctgaggtgggaggatcactagagcccaggaggtcgaggctgcagtgagctgtgatcatgccactgcactccagcctgagtgacagagcaagaccatgtctcaaaaaaaaaaaaaaagaaaagaaaagaaaagtattgaaaatgttctgtactactaggaatgatccagtagaagaggtaataatagtgatgtagaagacagggcaccatttcaagagcagagtcaaaatttacagaacaggatgaaatctcataaccaggagcagggtctgttcattcgttataaatggagagtatgtaaatgtgagcacaggtggattcacatgctccacactggcatggctcagtaggtgttgcacagtgatggagggatagacagagtgatgaatggatggatggaaggacagacaaatggatggatgaatgtggctacattttctaactctcaaaaaattttgtcttaggatttgtctcaatgaagcaaaagacttccccagttatgagtccccaattagcaaatatcttcaaacaaagaagttttgaaagaggattctttttaagagatttctaaaacagaaaaatgttatgtgtttcctgaggtttcaacttcatctcttctgacagggaatttaaaaatataggtgaaaagaggagaaagagtaatcagaatggaattataaacacaataaaactgtaaaaaaaagagaaaatatgttgagacttcagggctaggtgatttttgtgtaccattgttctgaatggaatattatacaattagatgtagtgccaatacatttcccaactacagctttgaaaaaaaagttagagtaaaaatgaccaaattagcattttatgattatttccaagagggagaaaaattgtgttatatggttttgtggaataaattttaaaagtgtttattgagttttaagatttagtttcaaaataactgagttaatggacaagttgggaaatataaaattttgttcaggaaagtttttttgaattagccaatagcaagagtaacctgaagggaatttctcaaacttttaatgatttatttggaaaaaaaaattaaataaaatcaacatactgaacttgaaacaacaggtaaactatagtaataatctagtcataattatcca

SEQ ID NO: 681164 - DNA, 1702 bp, Homo sapiens
attgatcatcgtctccttaacaaggagctcctgttcagtggagtgatgggaaccaaagcccagtagaaatgacctgagatgaaaatgaaaggcaaagcaatagagaagcaagtgtagacagaagcatagaaagaagaatgcaggctgctgggctacagattccatgcggggtcacaatccatgtgtaattagaagttggggagggcattgatgggctctgatttgattagctgatatatattcccmcagcgattatcgtgccatgtggaaaattgatgataacaggaagcaagattgggagcagaggatgacagaggttgtgaaaagtggcctccttcgagctgtattttggaggtggagccagtaagatgtactaatgtggagtttgagaaaaatagaataattattctcaaggaattatgctgtctaggagaaaagagaaataaagcggtagtcagagggatatgtggacaacacagcaagaccccatctggccaaagaataaaaaaattatccaggcatggtggtgtgcaactgtagttccaactactcaggaggctgaggtgggaggatcactagagcccaggaggtcgaggctgcagtgagctgtgatcatgccactgcactccagcctgagtgacagagcaagaccatgtctcaaaaaaaaaaaaaaagaaaagaaaagaaaagtattgaaaatgttctgtactactaggaatgatccagtagaagaggtaataatagtgatgtagaagacagggcaccatttcaagagcagagtcaaaatttacagaacaggatgaaatctcataaccaggagcagggtctgttcattcgttataaatggagagtatgtaaatgtgagcacaggtggattcacatgctccacactggcatggctcagtaggtgttgcacagtgatggagggatagacagagtgatgaatggatggatggaaggacagacaaatggatggatgaatgtggctacattttctaactctcaaaaaattttgtcttaggatttgtctcaatgaagcaaaagacttccccagttatgagtccccaattagcaaatatcttcaaacaaagaagttttgaaagaggattctttttaagagatttctaaaacagaaaaatgttatgtgtttcctgaggtttcaacttcatctcttctgacagggaatttaaaaatataggtgaaaagaggagaaagagtaatcagaatggaattataaacacaataaaactgtaaaaaaaagagaaaatatgttgagacttcagggctaggtgatttttgtgtaccattgttctgaatggaatattatacaattagatgtagtgccaatacatttcccaactacagctttgaaaaaaaagttagagtaaaaatgaccaaattagcattttatgattatttccaagagggagaaaaattgtgttatatggttttgtggaataaattttaaaagtgtttattgagttttaagatttagtttcaaaataactgagttaatggacaagttgggaaatataaaattttgttcaggaaagtttttttgaattagccaatagcaagagtaacctgaagggaatttctcaaacttttaatgatttatttggaaaaaaaaattaaataaaatcaacatactgaacttgaaacaacaggtaaactatagtaataatctagtcataattatcca

SEQ ID NO: 681165 - DNA, 1156 bp, Homo sapiens
gaaagtgaagcaccccaccaagccccccaccaaaatcaaactcactgaaacttaccttccttgctaaaaacttcaggttcctttctctcctcatgccaaattgttcacaaaatctaaaccaaggaaacaatgagattttaaactgcattacatgttttgtgaaactctcttctcctccttccccaagctatccacttctttgtctctaaggtagaatataytgaaaataaaatgcaaggatgcacttaaattcatataaattttagcactggaaaaatctttggtttaatccaactctgttacttttttattttattatttgtcccagattaccaagatattttataatagatgtgaattacctgaaaattctctgacaagcatggataataaaaacaaaatgaaagaaggcggaatgtttattcatacccatacctaatatgttgcaatcatttctatgacatatatgccctcatttctttcacatagcttatttcatttaccctttagcacaggtgtgcaaggtggccactattaccttcattttaaagatgaaacagaaggtcaggagagctatgtgactttcctgagttcaacaaataagctaaatgaggaaccatgtcagtgctgagatttgaatccacatctgatcccaaagtttgtggacttgctcttttaccaaagagatattcagtaagtttaaaacatttagtaactacattgttaaattctaaaggaaactcatttttttttctgtatattcacttcccagagctttttaggatattaaccagtctctaacacacagtaggctttggtccaactagtgtaaaacatggtgcataaattcaccagagataaagaaaatattaatacacgagtagctaaccattggtggcaagtgacaggagagggaaggtttacagatttaggtaaagtgttttatttatccgaagttttctcttgggtattttcagactaccataactccttctgaacatgagagactggacacatctctctgttctttgtggttactccaaccacagacacgtccagagaaaaagtctgcacgccttgtgcaacttgtcagaagatgtcaccaatacacagtggtatgccgctaatgtctaacaaccaggtctttggagaaaaa

SEQ ID NO: 681166 - DNA, 647 bp, Homo sapiens
attttggtgattttcactatgtttttgtttctacaatgccagcaaattacaggcagctaccaatttggagtgaaaagaatactgagctttaaaccactgcatttggttttaattctagctgcaggatggtgggcaaatgacctcacttctccaggccccagtcttgtcatccatgaaacaaaaggtttcagtcatatcaccaagattctcaacaattctaaaataattttattttctttacttctttgacaaagcatgtattgggttccttctatgtaccaaggaataacctagagtttttgagatacaaagaggtcattttttaaggaatttactgagtataccagtatatttcagaaattgtgcttcatgttgatggaactatgatgagtaaggcctagtctctaagctcaggagtgcaayatagggattagctaagtagatagcatattttgatattctgtgacaatttgttccatggagcggtactaatgcactatcaagggggagaaaaggggtagcctgcccagtgcaggtctggggatatgtttaagaaaggctttctggataagtagtaataaacagtaacaaatgttgctcttgtctaggagcatatttgcactgtttcctgtgcatttgttccttct

SEQ ID NO: 681167 - DNA, 573 bp, Homo sapiens
ggacagccgtaaacagagttgcacagcaatcaagattacatagggtaggaggggaaggcatggcagcagcaatcagatttttaaatgattttgaaaacaaggttcctgtacattttcataccaattaaccccatccatgcccttgcccctccatgaacatgtgctcaaaaaacagaaggataaacaaacatttgcagatatgcttgacagctggaaaatattattaaactcagatattaagcraactctgtgtgctgggtgccacggcagctcatctgtctttgtactcagcccatcagatgagtagcccatctgtctctgggtcctcttttagctaagaaataaatgccaaccaaacaatcctaaatgtgcttgatctaaatttaatctatacttaactttttagttatcatacttgcatctatcgccatcattttatatcacttgccctattcacatagcactctctctcatttttttacattctcatgttcacaatctatccatattatggttctagttcttctctctggtgcttagttgcaagccaacaaaagcaaggatgtatacaca

SEQ ID NO: 681168 - DNA, 863 bp, Homo sapiens
aacaaacagaccagaattaaatgagtagtcacttaagaggacataaagtagcaatagaatcttaagaagactataaaagcttctatgtaaaatatatttgggggaaactccatgggtatttcatatataaatgcatacatacatatgtactataatatgtatattacatatatacagaatatacatatatgtatttatgtataatacaggtatrtagaatcatatattacctgtaatatatataatttatgatgtataatagtagccactattgatcagtgattcaactgaatccctgtgacggctttctcttctacttctgaaattttgataacagattctattcagctatcagatagctaaatcctggtaaaattatgggctctggaaccagagagctcaggttgaatcccattgattacttatgtgacctctgacacaatggtttaagcttcaatgtctccattccttcactgctaaaattatagtggctatctcatagggttatgatgaaattaaattaattaacacatgtaaaatgcttggaagcatttaatgtggtatttaatatgtactaaatatataccagtctttggtgactgaagtaatagtagtgccacaaaagtgagcatagcaagtatattttaaaacatgttcatttcagtcgtcacagagtttaaaaagtaaaagacagctttacctctcctccacattcctgggagattggctgccatggttgctgttcccaatgaaatttcgaatttctgtgaagtaagcatcttctttgtcatccagaatcgcacctgtactttccagttcagaatgaggcgacgatgttgctgtacctgtgtggagcagaaagc

SEQ ID NO: 681169 - DNA, 649 bp, Homo sapiens
ggctcttagcagatcgttcccatgattttatgcagtgaatcactctatgtcctatgctgccctggagctaaccctgagaagctgaataaacttgcacaagttatttgaccacaatgtgtctctcttttatcatctagcagcaagagataacagyaagttattatgagggtcaaagggaagaatacacggaaagcccatagaacagtggttaacacacaggaagaaatcagcaaagctggctatgcttatttatgacacacctcactttacctgcttagaacaagtctcaattacaaaagaaaatcaactcaagattcataaggtgcttcctatgtagctgcaaaagtgctggccatggggtatacatagagaagagactcacactctgtcctgagaagttgctgatcaattgagttactgggagacaaaaaacagcctaaattcttttctgtcctgtgagcagccatttcagattctacaggaggctgtttttctctgtttcaaaagacagctgggttttcgggtgtcaagaagagttgaaactcaaccatttggtgagaggctggagggggtctttataaatagaaaacaagtgggaagaggttttattgaggaaataaaagcacctgtatattttcaaaatagtgca

SEQ ID NO: 681170 - DNA, 1284 bp, Homo sapiens
attttctcccattttgtaagttgcctcttcactctattgattgtttatttactatgtagaaaccttctagtttgatgataacctatttgtctatcactgctgttttgcctgtgctttagggatcgtatccaaataataataattttccataccaatgtcctgactagtttctgtatgttttcttctagtatttctataagttttaggtcttactttaatacgtttttgggcttttttttttttttttgcctgtggatatccagttttcccatgaacatgtattaaaaaatctatcctatagctttcyccattgtgtgttcttggcatctttgtcaaaggccaattgactacaaatgtataaatgtatttctagactctctttttgttccatttggtctacgtggctgcagttttctctgtgggttcttccatcaatacactctttatcattatccaaaactgtgttatttctcacatggtaaaatttccaccttcatccattctcttaactggtttattttatacattttctttatactttgatatactttatttatttttttctatgcttccagattttttaatcttaaagtatattaggaggaacaggaaataaatacatttttgagatctgccatcttgaaccagcagtagtttttggtgttttgcttggttgattggttgggttttttttgtttatttgtttgtttgtttggggctcttaaaaattatttcttgtctatatttctaattgattaataataaaatagggcattaaaaatcaaaactaacaacaaaatccatcacatttctccatgcactaaaaatgttcctctacctatgtgtcctttgtatccatccctcagtggttcttatcctggataaacttaaaagtatttggagagagaaaaaacaccgagaaatacaatgtagtagtcctgtgattgagattgtacccagggttagggactcacaagagcagatagagataagagtcagctttcagaaggtgagggctggagcacagtctgaagggagcccagagctgagaccaacaaatataggggaagagggtcttggcagagagtggcatgaaagagtgttgtgtggctgttgatccacccatcgttatgtcctgttgtttctccttccaacatgccttttcagtccttttattctccattcacagcaccaatgtggggtaggctgatagacctcatctactaaaaaagaatattcaggcatgctgacttgggccagtggtcctagctacttgggaggttt

SEQ ID NO: 681171 - DNA, 1284 bp, Homo sapiens
attttctcccattttgtaagttgcctcttcactctattgattgtttatttactatgtagaaaccttctagtttgatgataacctatttgtctatcactgctgttttgcctgtgctttagggatcgtatccaaataataataattttccataccaatgtcctgactagtttctgtatgttttcttctagtatttctataagttttaggtcttactttaatacgtttttgggcttttttttttttttttgcctgtggatatccagttttcccatgaacatgtattaaaaaatctatcctatagctttctccattgtgtgttcttggcatctttgtcaaaggccaattgactacaaatgtataaatgtatttctagactctctttttgttccatttggtctacgtggctgcagttttctctgtgggttcttccatcaatacactctktatcattatccaaaactgtgttatttctcacatggtaaaatttccaccttcatccattctcttaactggtttattttatacattttctttatactttgatatactttatttatttttttctatgcttccagattttttaatcttaaagtatattaggaggaacaggaaataaatacatttttgagatctgccatcttgaaccagcagtagtttttggtgttttgcttggttgattggttgggttttttttgtttatttgtttgtttgtttggggctcttaaaaattatttcttgtctatatttctaattgattaataataaaatagggcattaaaaatcaaaactaacaacaaaatccatcacatttctccatgcactaaaaatgttcctctacctatgtgtcctttgtatccatccctcagtggttcttatcctggataaacttaaaagtatttggagagagaaaaaacaccgagaaatacaatgtagtagtcctgtgattgagattgtacccagggttagggactcacaagagcagatagagataagagtcagctttcagaaggtgagggctggagcacagtctgaagggagcccagagctgagaccaacaaatataggggaagagggtcttggcagagagtggcatgaaagagtgttgtgtggctgttgatccacccatcgttatgtcctgttgtttctccttccaacatgccttttcagtccttttattctccattcacagcaccaatgtggggtaggctgatagacctcatctactaaaaaagaatattcaggcatgctgacttgggccagtggtcctagctacttgggaggttt

SEQ ID NO: 681172 - DNA, 1284 bp, Homo sapiens
attttctcccattttgtaagttgcctcttcactctattgattgtttatttactatgtagaaaccttctagtttgatgataacctatttgtctatcactgctgttttgcctgtgctttagggatcgtatccaaataataataattttccataccaatgtcctgactagtttctgtatgttttcttctagtatttctataagttttaggtcttactttaatacgtttttgggcttttttttttttttttgcctgtggatatccagttttcccatgaacatgtattaaaaaatctatcctatagctttctccattgtgtgttcttggcatctttgtcaaaggccaattgactacaaatgtataaatgtatttctagactctctttttgttccatttggtctacgtggctgcagttttctctgtgggttcttccatcaatacactctttatcrttatccaaaactgtgttatttctcacatggtaaaatttccaccttcatccattctcttaactggtttattttatacattttctttatactttgatatactttatttatttttttctatgcttccagattttttaatcttaaagtatattaggaggaacaggaaataaatacatttttgagatctgccatcttgaaccagcagtagtttttggtgttttgcttggttgattggttgggttttttttgtttatttgtttgtttgtttggggctcttaaaaattatttcttgtctatatttctaattgattaataataaaatagggcattaaaaatcaaaactaacaacaaaatccatcacatttctccatgcactaaaaatgttcctctacctatgtgtcctttgtatccatccctcagtggttcttatcctggataaacttaaaagtatttggagagagaaaaaacaccgagaaatacaatgtagtagtcctgtgattgagattgtacccagggttagggactcacaagagcagatagagataagagtcagctttcagaaggtgagggctggagcacagtctgaagggagcccagagctgagaccaacaaatataggggaagagggtcttggcagagagtggcatgaaagagtgttgtgtggctgttgatccacccatcgttatgtcctgttgtttctccttccaacatgccttttcagtccttttattctccattcacagcaccaatgtggggtaggctgatagacctcatctactaaaaaagaatattcaggcatgctgacttgggccagtggtcctagctacttgggaggttt

SEQ ID NO: 681173 - DNA, 661 bp, Homo sapiens
gatggctgcaagacaatgcccctaagctttttgagtccttctggctatattgaggggatctatgacccacatccttaatctcttcaaagagctttttctgtgcctgagtactatcatcatttgatctttatgaaggtttagtaacagattgtacaatcacactctgtattttttatgccacattttctgaagcatcctcttaattttgctgtctttggcatctgtatagggtgagaatctcccaactcatcaagtgtgggttctctttcattgaacaagtttggrttatcttttgtttaacaatttctctttcaacttatctttctcttctcacatgttactgtaagtagcaagaaaaaaacaaaaagccacttctttcaactatctgcttgaaaatctcttcacctaaagatccaagttcatcatttaaaaagaccactttccacataactagagggcactattatactaagtgttttgcctgcttataacaaggatctcccctctccacttttcaataacatgtttcttctgagccctcagcagcagtgcctttaaaatctgtatttccaccaacagttgtttgtttggggtgatgtaagtagtctctaaggcaagttagatttttccctataatactcctcagtatcttctgaacgct

SEQ ID NO: 681174 - DNA, 619 bp, Homo sapiens
ctggggcctgattctgtttctgcatgttaacgtcaatagttaaaaatggggttgaactcctgaaccaggtgaccagtgcttcgctggacttttgcaaatgtttctggaaagttatttataaattaaatcaaatcagaaactctctagaggaaattgttatctaaagaaattttataagaaaattttaaaaaggaaggtatctggtaaaagaaaatgtcctcggatttgatgttcatgtatacattttgtttttcttattttggacatgcattaagcaaagtatgtctagagttctcctttttgaaagtcatcagaaatcaaatgacattgaggtatcagaccactctaaagtagtgtgccagagcaggaggatgttggacctagttaactgaggactgtgcctaagtgaaattaaagccttttyctcttccctttttgagccagatttataatatttggattgaaatatttttatatatagggataacatatttattttcataaagaagttcttttttaagttagaagaaaggagaaaaaaagctctcatctggtgagttttgaactcattctttggcaggtgacagaaagccaattcaaactagtttgagagaaaaaa

SEQ ID NO: 681175 - DNA, 654 bp, Homo sapiens
tgtaatacataaaaacatatatcataaataactataacaatatggatctaggtatcaagaaaacctttctacatcttgcatttgcattgattccacttggtggaatagtctagtatgcttgagattaattactaggtgttcttcatcagtctctgcacagtactacacagcaagtatcacaaaggaaggaattctgggcagacaaaaaatacatgatagccctttgcacagaatttcccgtgtgctttctgtatcatttgatcattccgcactattagcaatcaggtaagaaataaaggagcctaaacagaagagacactgcctattaaattttgagctatacctaagtttctgtaaatggtaagcagtgaattcaaccaatgcagaacataaagttttggaaatatctgaatcaataattcaccaactttactatttttgcattattctcagcattctgtgtcacatcattttaaagtgatgttatgacatgcgtcratagtggccacatgataaataatattttggtttcctgttaccatgtaattaaactactgaataatctgatttttttaaaaaattagaaaagcaattcttgtagatttttttatgtttgagtttttcatcttttaattcaatgttgttttgttcaga

SEQ ID NO: 681176 - DNA, 1400 bp, Homo sapiens
ctattcccccgaccatgctgccctcatgaacacagtagacgcttggcacattgccttgctttcgttgccattcatctcctaccaattttctttatattagctaaaataatctttttaagcctgtaaatcaaattctattgcctttctgattcaatatcttggatgagttcccaatgcatttagaatataatctggatacctgcaaggctctaaatgagaaggcctttctcttcagtttagctaaatctcgttcttgtccttactttctatccatcaagtaaatgcttatcaacattctccatcatagttctctgttcatttcctacataaggcatgcaaattgcacctgaaaaatatatccaggtcctaatccctgaaacctgtgaatgttgccttctttagtaaaaaaggaatttgcaaatatgattaaggatcttgagatggggaaatgagtctggattattcagatgggccctaaatacaatcacatatgtccctataacagaaaggctgagggcaatttcaccaaagaagaagagggggcaatgtgaccagagagacaggaattggaatgatgcagccacaaaccaaggaatgccagcagccatcagaggctgaaagaggcaagctctctcctcaagcctcctgtgtgtgcagccttgctgacatcttgattccatcccactgatactgatcttaaatgtttggtcttcagaactgtgagagagtacatttctgttgttcaagccaccaagtttgtggtcatttatcatggcagtcacaagaaacggatccagtcttcataattgatgattattttatctacttatttgtttacttatgttttccctttttggtttgtaaacaatgtaagagcagggactacatctgtgactagtgctcaccattatatggccagtactctgctgtttgtaagagatcaataaatattttgaaggaayggattaatttctctttttcaataaggtgctgctgtttaaaagactagacaagataacctgtacattatgtataagcatgttcacaatatgtattaaatgtagcatgtgaagcagtgtgctaaacattacaaatgcattaaaggcctttaatttgctcttgtgtctaaaggctgagatctttagtaacgttcaataaagcaggcaacttttcttcctaccttatctccttccagcccaaatcaaatccatcatgacttcttcgtccccaatctgtgaattcttctccaatgccactccatctccaccctattacaaactactagaatctcttctagtactagcaaaaacccttcctaactggtttacctgcttctcttcttgcccatttctaatataataattgcacagccattagaataatgttgtaaaacagatttg

SEQ ID NO: 681177 - DNA, 589 bp, Homo sapiens
tggtcacttaacacacatcaactgagcaccattagtgtgccagcaacatgtgctaggcactggggatgcagaatgcaataatacttaggccttcagagtttaccacccatagaaaagatgaaggaggaaaccaatgattacagtagggtgcaggctagtctaagggcagagatgtcttcccagaagagaagacaccttagctctgttttagaggacaattgccaggcagagtagtgaaggatagtccaggagaagggaaccgcatgaggataagcaagaaatrgcaggtgcatgctagaaacaacaggtctatatgtctggagtgctctttagcatatgcaggctgaccttttatcctgtgttgaaggtttattgtttgaacctcatctatccctggcatgctgcaatgatgggttaattaaatctagaaggtctttacagctttaagagccacagagaatattcctggaagggatattcttaaggggttcaaatcagtattaatattaacacatttttactgagtgcctactataagccaaatgggtgctcagctggcagacatagaaggcaggatgtggggaagtta

SEQ ID NO: 681178 - DNA, 597 bp, Homo sapiens
gtttgctttacaatcttcatctcttactcctcactatagggttccattcatcttaccttggctatattagatctttcctaagcatacactatacttccctgcatctgtggttttgtaacaactgttcattttgattggaatgctcattcactgcacttttctgagtcagaaattctatatattcatcctagcaaaactcaaaggacaattcattttgattcttccagttgaaattagactcttcttccctctgcattctttttgttctagttgtttttcccctttaaaccaaataagtttgattattatttaaatttttattgcattcattcattcacttcctcaatcatccaataaatatttactgaatgttaagttcatgtgtgacttcttgatagtgttcaattccattccatttcrctacatgcatttgtagaatgctatacctatcaaatgtattaggcttcatcctgttgtagttaaaagctgaacaaggccgggcgcgtggctcacgcctgtaatcccagcgctttgggaggccgaggcgggcggatcacaaggtcaggagattgagaccatcctggctaacacagtgaa

SEQ ID NO: 681179 - DNA, 648 bp, Homo sapiens
atgaagttgatttttggataaagtaaaaataaaatattgtaatgtggacccaacagagctactcctaggtataggcagagtaggtttgggcttaaggccacctaccttggatatcacctctactcactttggagatagccactggattctgaaaaagttcctattctaatacaaatgttgacacatatagtccttaggttattagattaatgtagagcagaacagggtgtgaggagtggaatcagaaagagaaaaggaagacagaaaagctctggggcttgagtcctgcaaggaaaagagaggtgaatgtgtacccaatgcggagacctatgkctctaaaaggtattgggtgtttaacaaaatgctcaggtttaacttcatctatgtcacaatgttccttgatctagtcaattctgactgaaggtaagtgcctttcggaagcctacaaaacaaattccaaccagtttccttaatctctgaagtgagaacacatttacattttgaatgttagcataataatttctgttttccaggttgctttttttttttttgagacggagtttagctcttgttgcccaggctggagtgcaatggtctgcctccagggttgaagcaattctcctgcctcagcctcccaagtagctggaa

SEQ ID NO: 681180 - DNA, 622 bp, Homo sapiens
caaacaatctacccyatgtgtatttacgtgtaggaatatgcatatctgtgaataatagcagacagcagagagagggaatgaaaaaattgagaagtatctcttagagccattggagaatttctcctaagtgttaaaaagccatttaaaacagtattgagaactcgatgctgccaggttcaaagtgttcagtttcaaaaccctcaaaaagacaaatattaactctttgtcttaggatactagtccacatttttttttaccagtaagagtaatcttgttgctggaattatttaagctacatatttctttagcacggcaaaatgaaagtgaatcctaggcacctgtgtgtgggaaagtagtctacagcaaagcccagaggagctgggtgaaacaccaacccaaagagatagcgaccaggggcaagctagacacaggggtttgccaacttgaaatatgggttctctcaaactttgtgtttgccttatggcctggggcttttattcagtataacattcaaattcctagaaaaacagctcactccagttctgcacctcagtcctgtgggggttaaaaaaaaaaagatgaatgtagctatgaactctgttcatcttcaacctaatggact

SEQ ID NO: 681181 - DNA, 967 bp, Homo sapiens
tgacttcaagagtgagcttcaactatgattccacctgactactgggctctaccccaaggaaatggtttctcacaggagtgggcaaattataaaactggtctttccccagcaattccattgccgggtatatgcccaaaggattataaatcattctactataaagacacatgcacacatatgtttattgcagcactatttacaatagcaaagacttggaaccaacctaaatgcccatcaatgatagactggataaagaaaatgtggcacttacacaccatggaatactatgcagccataaaaaaaatgagttcatgtcctttgcagggacatggataaagctggaagccatcattctcaacaaactagtgagaaactaacacaggaacagaaaaccaaacaccacgtgttctcattcataagtaggaattaagcaatgagaacacatggacacagggaggggaacatcacacaccagcacctgtcgggagtggggggctaggggagggagagcattaggaaaaatacctaatgcatgcggggcttaaaacctagatggggaattgataggtggagcmaaccaccgtggtacgtgtatacctatgtaacaaacctgcacgttctacacatgtatcccagaacttaaaataaaataaataaataaaaatttaaaaactaggtctttcttaaggccttccctgcttgcatggcatatattgccaaagaattttctgttccttcagacactcagaaaaagtaaacctaatttattctacttcaagctctctcagagacttagagaagagccttagtttcattgcaaattattgatgcagccagataatttataacatttctaagtttttaattaatacccattttgactactgtgtttagcaataaagttgtttttattgccatagttgatagtctatcataatctgtccactattaaaggaaatactctctc

SEQ ID NO: 681182 - DNA, 2206 bp, Homo sapiens
tggaatcacccctagatctttcttgaagacttgaattagattacagcgatggggacacagaaggtaagaatgatataattactggttatttttgcttgtttgggatacactcagaaaggcaaatattaatggtaatctccttgttctattttctcctaagtcaccaagctatcttaaggccttttcatttcgtctctagcctgcactgctgccgcttcatcagttctctttgaatgtcatacagttctgttcaccttatcataggaaagtcacccggagaagttgtgtttgcttctcaggtttattttaggtaaccatatgccactgaggacgagatggttgagtgtttagaggatcgggctgcttggttgtatggattacaagtgtgggtctcagagccagtgtgaagacttctctggaagcattagaccttgaaaaggtctgtgtttggaggcacaggccagggtctggccatctgtttgtcctataacatatggggttcgtggatgctaaggagaaagaattccagttgtccttcctattagggttaaaatcgtgagtgcaggacatactaaaatattgagtgttgtatatgcattatttgcagggagaaaggcttttcttttttttctgattgagttttactcttgttgcccaggctggagtgcaatggagcgaccgcagctcaccacagcctccgcctcccgggttcaagcgattctcctgcctcagcctcctgagtagctgagattacaggcatgaaccaccgggcccggctaattttgtatttttagtagagacrgggtttctctatgttggtcaggctggtctcgactcccgacctcaggcgatccgccggcctcggcctcccaaggtgctgagattacaggcatgagccactgcgcgcagcaagaaaggcattttttaccaagataaatttaactaaaaataaggggccaggtgtggtgggtcacacctataaccccagcatttgggaaaccaaggcaggaggatcacatgaggcctggagtttgagactagccttgggcaatatagtgagatcccatctctacaaagcagaaagaaagaaaatgtaggaaaataagaaagggatggaaaattatgagactaaagaagaaaaggctctcaaagatagtgaatgatgagaggagacagaagagatttttactaaacggaaaaagatttaacagagcattgcactggcagggccctccggggtaccgatgcttagctgggactgagacatctgggaggctgcaggcaaggtcacttctcctgctgaagctcccagcctgctgcctaatctgcccgacctgaaaggaaaggagtttaagatatgaaaggttgaagggattttgggtggtggggtgggggggaatggcgtagaagttggcctcaggtataaaaattgagctgccccaaggtagaaatggaaaatgtctcgcccggctgaattattccaggcaaggtgaagatgaccggttctccccactaagaaatgtctcttatatgttgggttcgcccttatatgttgggttcagagtaagtactttcttcccctgcgcgggagttagggatagcagaactgtatttaataaacgaagactgaaatggggccaggatgcagtgagtagatccagtaggttacatggtcctgagagataagagactcaaagagccacccagcagtgaagacacaaactaccaccccctccaccaccaccagtgggcttccgtggagtctggggtacagatcagactgcactgtatttgtttccagaatggtcaattcttagtaatcctacccgagactgtctttttctctgccctcccagttcgtgagtggaattctatgcctacatttgcctgatgcaagtttttaaatatttccaaactgaccaacccagtttctcttaacttcttccttccccaattttctttcatttttaccaagttaacttcacattcttatctccagataagttctttagtataatctattcctttgtcttccccattaattacctaaatctcattggatgttcttttcataccactcataactcaaattctcctaatacagctccataattaataagaaacagtcatcaatcacaagttttaaggactattctctcctctgtcttccctccctccaggtcaccccagctctgatatttgccat

SEQ ID NO: 681183 - DNA, 854 bp, Homo sapiens
accctgccttttgggccttttatgcagacttaattggttctccatgattgaagcatggacaactgttctgacctgtgattggacaaaaagggaatgatctgaacccagctgggcctgtctgcttagatgatttgttggcctctctgtagcgtttcttcctctagggtgtggggcaggaccctctctgaaatgagggttttatgacccacagtcagattagcgtcctgccaagtgggagggcaggagaaagtcagagaagaattctgttatctgaggcctgctcctgaggcctgaagcatcccaacattatgacaaaagactctaccaagggctatggggattttgagccaggacctgtgaatggcacacaatatgtatgtatataaaatcataaatcayaggaggggtatccataacaagtgtcctgctgttggtaaggcagatttcaagtagctcagatgctgttttcatggaaaggaaaactgaagtttcatgtcatattcttcttccagctatttctggtggaaagggcaggaagaaggactctgcatatgataggccttggagggatggctttttgttccacgctcatgactgtttctttgttattaaaggtaggtgctctttgggtgaaaaaaaagggagggggaaagaagagaggttacagttgacttctgtgacacaaggggtgggttgttaaggttgcagtttgtcaataaagtcagaggagagaagcaggatgcccagagtttaagaaacatgggtcgtcagagaactggaggtaaactgttagaatccttacatttatagaacattattatagcttataaaataaattatctaatttaattctt

SEQ ID NO: 681184 - DNA, 854 bp, Homo sapiens
accctgccttttgggccttttatgcagacttaattggttctccatgattgaagcatggacaactgttctgacctgtgattggacaaaaagggaatgatctgaacccagctgggcctgtctgcttagatgatttgttggcctctctgtagcgtttcttcctctagggtgtggggcaggaccctctctgaaatgagggttttatgacccacagtcagattagcgtcctgccaagtgggagggcaggagaaagtcagagaagaattctgttatctgaggcctgctcctgaggcctgaagcatcccaacattatgacaaaagactctaccaagggctatggggattttgagccaggacctgtgaatggcacacaatatgtatgtatataaaatcataaatcacaggaggggtatccataacaagtgtcctgctgttggtaaggcagatttcaagtagctcagatgctgttttcatggaaaggaaaactgaagtttcatgtcatattcttcttccagctatttctggtggaaagggcaggaagaaggactctgcatatgataggccttggagggatggctttttgttccacgctcatgactgtttctttgttattaaaggtargtgctctttgggtgaaaaaaaagggagggggaaagaagagaggttacagttgacttctgtgacacaaggggtgggttgttaaggttgcagtttgtcaataaagtcagaggagagaagcaggatgcccagagtttaagaaacatgggtcgtcagagaactggaggtaaactgttagaatccttacatttatagaacattattatagcttataaaataaattatctaatttaattctt

SEQ ID NO: 681185 - DNA, 648 bp, Homo sapiens
agcccaggagttcaagtctaacctgggcaacacagtaagacctgatctcttaaaaagagggaaaaaagccagaaagaagcactgagtgacaaggagagccttgtagctatgattttgaaagtaagaaaataaaatttgagacgaggaaaggaaaagaaaaatttatttaggacctccaatatattacatatcatactaaatgttatttaatccacaaaattatctctattttataggcgagtgcrctgaggatctgaaaggttaggccaggcgtagtggctcatgcctgtaatcccagcatcttgggaggccaaggctggtggatcacctgaggtcaggagttcaagaccagcctggccaacatggtgaaatcccgtctccactaaaaacacaaaaattagccaggcaccgtgatgcacgcctgtaaactcagctactcaggaggctaagacaggagaatcacttgaacctgggaggcggatgttgcagtgagccaagatcacgccactttactccagcctgggtgacagtgtgagactctgtctcaaacaaacaaacaaacaaacaaaaagtctttcagccagaactgccatcttccagtaatttgccaaaatgatgaacacaaagggaaagaggagaggcacccga

SEQ ID NO: 681186 - DNA, 583 bp, Homo sapiens
ttctgcttacaaaaaaaggacaaaaacctttccttttaacagttatcatctaaacactatgaacttgttgtaaacttgagactcgatatttgttctcagaaaccacagttgtgaaaatatttgttacaatgaattgtttttgttcacttaaaggtgtgacttatgccacaggaggttgaatttgttcatcaaccttgtgaaaatttatcaaccatggctttgaacttaccatagttaacccaaccaagaaaaataacaatatagacattctaagagtcagaaacacatctcaaagtctttatccttacaaaaattctctgcaagtgaacattttaaacttaaaattaacagatcrattctaaaacaccaagcagaatctcttttttccacaacccaaaccagaaaggaatgtaaaggagaggctgagcagtccagagcttcccccatgccatctttggtgtccttgccattgggtggtggctttgagaatgtccttgtcattgggtggtggatttgagaatgtctttgccactgggtggtggctttgagaagatgatattctagttcccttgtaataaaccac

SEQ ID NO: 681187 - DNA, 1807 bp, Homo sapiens
cagcaaataatcacatatagcaaatattttcatttggaattagcacagtgttcacaaggacgcaaaaatcaaattaagaacccttcccttttctctaggtgtttctaaacccttccgggtggccccttctctccctactgatccctttaggcactagcaaatcttttttttttctttagcagtgagtgacgtggcaggaggcagaaaatgaccctggaggcgccgtggctagcactgagcttggcacctcctccctccgctccacgttgtacacccagcactccccccactcccgaagggctccagaatttctatgtaagaagggtttaggacaggcgatctgattggaagtgggagctggggggtcggtcttgaagctgcgtgtgcagagcaggcagtttttatttagactgggaggcagtgacggcacggatgggtgctccagccctccctgtcacccctgggcgcsgccagcaccctctccattcccacttttactttaggttaggcgtggagatacagccttcctacccaggaagagctatgggggtgtccactgggaaaaagtcttgtgtgcctgaacccaaaagggaggtttagcaacaggtcaggagttggcagggcgaggaagcccggtacccaagcccctccgctgcatccctctcccaggctgctgatgcccctcaccttcctcctccgcccccaaccccgaacccccagatgctaagaagtcaggcggaggctttccaggggtgcgcaagctccaatcgcggcggggcagtcagcgacgtataaggaggagtagccccagaagcgaacctccatccgcccccaacttcgtcccgcccctccccctttcccgctggggcctcgccaaggccccgctgggcagccaggccgggcactgggaggtgaggggcaggggcgccgacggcagagggcgacggaggagggcaggaagccgggactgcgcccctgccctcgcatcccgactcactcaccgccggggtcgcggccagcgctagggctggggccgggcggagtgagcgggccggcgcagaggagagctgaggcggcctgggcggcagcggcggccggcacaaccccgggcagtcgcggctccagaggcgtcctctcaggatgtggagctggaagactgtggcggcggtggtggaggcggaggcctctggctgcggacgtggcgcccgacgcgacccgccccctccgccgcctcctcagctcccgcctcctcccgcggctccagttccgacgcgcacgcgcgctcgtgcagcccgggcccctcccgcgcccaccgggcacacgcccacccgttctcgcagggtccggccctcccagcagtccccagccggctgtgtcccaattgcgcacgcgcgacgctccgaggcccgctcccgccccttcgccccctggacgcctccgtgggaacccccggccggcctgcgcgcccctcctccgggggtctccccgccttcttcccgccaccatccaatcaaatcgggcgaggggcgcgaagcccgggagacgcgtaggccgcggcccccaggcccggtgttttgacgtcggcggtgcccgcgttccgcgccgagtaacggtcttcggaattcagagccttcgccttagggaaggtgggacggtcgccagtttctccagcactttcttcgtccagggacgtcaacctcccttgcatgctgtcctcagggactgacagcggggcctgctcagaagttctcgtcgggactctctacaggcctttgtgattaagtgctaggggtgaggagagacgtgg

SEQ ID NO: 681188 - DNA, 1807 bp, Homo sapiens
cagcaaataatcacatatagcaaatattttcatttggaattagcacagtgttcacaaggacgcaaaaatcaaattaagaacccttcccttttctctaggtgtttctaaacccttccgggtggccccttctctccctactgatccctttaggcactagcaaatcttttttttttctttagcagtgagtgacgtggcaggaggcagaaaatgaccctggaggcgccgtggctagcactgagcttggcacctcctccctccgctccacgttgtacacccagcactccccccactcccgaagggctccagaatttctatgtaagaagggtttaggacaggcgatctgattggaagtgggagctggggggtcggtcttgaagctgcgtgtgcagagcaggcagtttttatttagactgggaggcagtgacggcacggatgggtgctccagccctccctgtcacccctgggcgcggccagcaccctctccattcccacttttactttaggttaggcgtggagatacagccttcctacccaggaagagctatgggggtgtccactgggaaaaagtcttgtgtgcctgaacccaaaagggaggtttagcaacaggtcaggagttggcagggcgaggaagcccggtacccaagcccctccgctgcatccctctcccaggctgctgaygcccctcaccttcctcctccgcccccaaccccgaacccccagatgctaagaagtcaggcggaggctttccaggggtgcgcaagctccaatcgcggcggggcagtcagcgacgtataaggaggagtagccccagaagcgaacctccatccgcccccaacttcgtcccgcccctccccctttcccgctggggcctcgccaaggccccgctgggcagccaggccgggcactgggaggtgaggggcaggggcgccgacggcagagggcgacggaggagggcaggaagccgggactgcgcccctgccctcgcatcccgactcactcaccgccggggtcgcggccagcgctagggctggggccgggcggagtgagcgggccggcgcagaggagagctgaggcggcctgggcggcagcggcggccggcacaaccccgggcagtcgcggctccagaggcgtcctctcaggatgtggagctggaagactgtggcggcggtggtggaggcggaggcctctggctgcggacgtggcgcccgacgcgacccgccccctccgccgcctcctcagctcccgcctcctcccgcggctccagttccgacgcgcacgcgcgctcgtgcagcccgggcccctcccgcgcccaccgggcacacgcccacccgttctcgcagggtccggccctcccagcagtccccagccggctgtgtcccaattgcgcacgcgcgacgctccgaggcccgctcccgccccttcgccccctggacgcctccgtgggaacccccggccggcctgcgcgcccctcctccgggggtctccccgccttcttcccgccaccatccaatcaaatcgggcgaggggcgcgaagcccgggagacgcgtaggccgcggcccccaggcccggtgttttgacgtcggcggtgcccgcgttccgcgccgagtaacggtcttcggaattcagagccttcgccttagggaaggtgggacggtcgccagtttctccagcactttcttcgtccagggacgtcaacctcccttgcatgctgtcctcagggactgacagcggggcctgctcagaagttctcgtcgggactctctacaggcctttgtgattaagtgctaggggtgaggagagacgtgg

SEQ ID NO: 681189 - DNA, 1807 bp, Homo sapiens
cagcaaataatcacatatagcaaatattttcatttggaattagcacagtgttcacaaggacgcaaaaatcaaattaagaacccttcccttttctctaggtgtttctaaacccttccgggtggccccttctctccctactgatccctttaggcactagcaaatcttttttttttctttagcagtgagtgacgtggcaggaggcagaaaatgaccctggaggcgccgtggctagcactgagcttggcacctcctccctccgctccacgttgtacacccagcactccccccactcccgaagggctccagaatttctatgtaagaagggtttaggacaggcgatctgattggaagtgggagctggggggtcggtcttgaagctgcgtgtgcagagcaggcagtttttatttagactgggaggcagtgacggcacggatgggtgctccagccctccctgtcacccctgggcgcggccagcaccctctccattcccacttttactttaggttaggcgtggagatacagccttcctacccaggaagagctatgggggtgtccactgggaaaaagtcttgtgtgcctgaacccaaaagggaggtttagcaacaggtcaggagttggcagggcgaggaagcccggtacccaagcccctccgctgcatccctctcccaggctgctgatgcccctcaccttcctcctccgcccccaaccccgaacccccagatgctaagaagtcaggcggaggctttccaggggtgcscaagctccaatcgcggcggggcagtcagcgacgtataaggaggagtagccccagaagcgaacctccatccgcccccaacttcgtcccgcccctccccctttcccgctggggcctcgccaaggccccgctgggcagccaggccgggcactgggaggtgaggggcaggggcgccgacggcagagggcgacggaggagggcaggaagccgggactgcgcccctgccctcgcatcccgactcactcaccgccggggtcgcggccagcgctagggctggggccgggcggagtgagcgggccggcgcagaggagagctgaggcggcctgggcggcagcggcggccggcacaaccccgggcagtcgcggctccagaggcgtcctctcaggatgtggagctggaagactgtggcggcggtggtggaggcggaggcctctggctgcggacgtggcgcccgacgcgacccgccccctccgccgcctcctcagctcccgcctcctcccgcggctccagttccgacgcgcacgcgcgctcgtgcagcccgggcccctcccgcgcccaccgggcacacgcccacccgttctcgcagggtccggccctcccagcagtccccagccggctgtgtcccaattgcgcacgcgcgacgctccgaggcccgctcccgccccttcgccccctggacgcctccgtgggaacccccggccggcctgcgcgcccctcctccgggggtctccccgccttcttcccgccaccatccaatcaaatcgggcgaggggcgcgaagcccgggagacgcgtaggccgcggcccccaggcccggtgttttgacgtcggcggtgcccgcgttccgcgccgagtaacggtcttcggaattcagagccttcgccttagggaaggtgggacggtcgccagtttctccagcactttcttcgtccagggacgtcaacctcccttgcatgctgtcctcagggactgacagcggggcctgctcagaagttctcgtcgggactctctacaggcctttgtgattaagtgctaggggtgaggagagacgtgg

SEQ ID NO: 681190 - DNA, 653 bp, Homo sapiens
tggagaggctgagaagacgcagtaaaaagtctgcactagttcatctcgaattagctcaagatcatagaagacactattaatcattgtttatgaggcatcattgaggacagaagtgttctcattacttatattaatcatatatgagtataattrgggtatataaggcacacttatgttttaaattaaataattaaaccctgatttagtagtttgggttttgttttgttttttttcttgttttgttctggtttggttttcattatttgtaaggtacttctaggtcttattatcataattccctatctctcttgaagggctattgatttctgatggataacacatccaaaaaaaatgtctgtttttctcacaaggcctgacacctttctgctgacaagtctctgagcaaacgctgaatatttctgtgacaggcttaggtgttaacatcaattgaagtcatgccattgacctcagcctatagaatatacagtttttactattaatagtcttctccacttgaacatgctgtctatgaagacaaaattgaataggaaagttctcactgagatgttcttccctgcttagaaacaatcctttctaatagttaaggaaatagcaaactgtagcctgtggaccaaatttacccactgcctttt

SEQ ID NO: 681191 - DNA, 290 bp, Homo sapiens
aagctactatactattaccaaaggttataattaactgacttacccagatctagtagacatcagttattgctgacaagtgaccctatggcagaaaacagagtgaagacattctagtacagattatcagattattaaaggaaaatattgaaattcaaatgtatctaaaacttgcggtgcttgattttagtagcaccactaatatgaagcactattgtaggatggatggatagttgcatggatggatggatagatggatgggtggrtggatggatggatggatggatggatgg

SEQ ID NO: 681192 - DNA, 1842 bp, Homo sapiens
atagttgactaaatctgcctatacggcttccagcagaattaaaaatctaaaacttgtgcaagaaaccctgatatgaaagagtataaatatgaaagaaagaatgaaaatcccaatttattaattcaatataatcttattttgtttaagtcagtgggaaataaattttggtatatggctccttttacttacatgcagaggaagttgtaccaattcagattacataatttctactgtgtataatcagtttccagtgcgaaaaggtttaaaattcatatcatatcaccagttctgtatgaatccttaaaatcttaatgggactctaaaaaacaccttacagcatagataagctgtaaacaacattgttctccattgattcatgttcctccttggagtaattccacaattttatgtatccaaaaggccaaaaagttaataagatgaataaagattaatatttattgatactctggtttaaacattctcaaactctatgaggtatataattttattacctatatcttagcaatgaagtaaccaaggtaagaattttaattaaattataaagcataaataaacccccatgctaataatgagtagagtcaggatttgattccaggtagtccaaaaaaagaatgtgtgttctttccaccaagcaatactgtcttaaatattagagacactgaaggtcaaagcagcaccttaascttttagttgaattatcaattcttgtgtgtgccaacattcaaatttaataaatgcattttattcatctatacgttctcactatttttctctatatggtatttgttacgtatccaaattttttttaaaaaaagcagggccaagtgtggtggctcatgcctgtaatcctagcactttagaaggcccaggcacgtggatcacctgaggtcaggagtccagagaccagcctggccaacatggcgaaacctcgtctctactaaaaatacaaaaattagctgggcgtggtggcccacaactgtaatcccagctactcaggagcctgaggcaggagaaatgcttgaacccgggaggtggaggttgcagtgagcccagatcatgccacttcactccagcctgggcgacagagtaagactctgtctcaaaaaaaaaaaaaaaaaaaaaagaaagaacagtaaagaaggtctcatgtaaatgagaaatgttctctacaatattattttagggggctacaacagcctggcagggtgcttaccaggatatctcgatgcttagcacagtgacttgcccatagtgtagattaaaggtcccaacactaggcttccagtcccaacactgcatctaaatatatgaccttggccattctctggctttactttatttattaaatgagcactttggactaggtaatctctaaggtcatttccatttatttatttatttattttatttattttttatttttgtttttttgagagcttgtctcactctgttgcccaggctggagtgcagtggcacaaactcggctcactgcacctctgcctcctgggttcaagcaattctcctacctcagcctcctgagtagctgagattacaggcacctgccaccatgcctggctaattttctttgtattttagtagagacagggtttcactatgttcgtcaggctggtcttgaactcctgacttcaaatgatctgcctgccttggcctcccaaagtgctgggattacacgcgtgagccactgttcccggtggtcattttcatttctataattagatattatatgcttctaagtgacaagagactaaagacatttccgtactgacctttgtatgtaatcagctgacaccacaatttaga

SEQ ID NO: 681193 - DNA, 1842 bp, Homo sapiens
atagttgactaaatctgcctatacggcttccagcagaattaaaaatctaaaacttgtgcaagaaaccctgatatgaaagagtataaatatgaaagaaagaatgaaaatcccaatttattaattcaatataatcttattttgtttaagtcagtgggaaataaattttggtatatggctccttttacttacatgcagaggaagttgtaccaattcagattacataatttctactgtgtataatcagtttccagtgcgaaaaggtttaaaattcatatcatatcaccagttctgtatgaatccttaaaatcttaatgggactctaaaaaacaccttacagcatagataagctgtaaacaacattgttctccattgattcatgttcctccttggagtaattccacaattttatgtatccaaaaggccaaaaagttaataagatgaataaagattaatatttattgatactctggtttaaacattctcaaactctatgaggtatataattttattacctatatcttagcaatgaagtaaccaaggtaagaattttaattaaattataaagcataaataaacccccatgctaataatgagtagagtcaggatttgattccaggtagtccaaaaaaagaatgtgtgttctttccaccaagcaatactgtcttaaatattagagacactgaaggtcaaagcagcaccttaaccttttagttgaattatcaattcttgtgtgtgccaacattcaaatttaataaatgcattttattcatctatacgttctcactatttttctctatatggtatttgttacgtatccaaattttttttaaaaaaagcagggccaagtgtggtggctcatgcctgtaatcctagcactttagaaggcccaggcacgtggatcacctgaggtcaggagtccagagaccagcctggccaacatggcgaaacctcgtctctactaaaaatacaaaaattagctgggcgtggtggcccacaactgtaatcccagctactcaggagcctgaggcaggagaaatgcttgaacccgggaggtggaggttgcagtgagcccagatcatgccacttcactccagcctgggcgacagagtaagactctgtctcaaaaaaaaaaaaaaaaaaaaaagaaagaacagtaaagaaggtctcatgtaaatgagaaatgttctctacaatattattttagggggctacaacagcctggcagggtgcttaccaggatatctcgatgcttagcacagtgacttgcccatagtgtagattaaaggtcccaacactaggcttccagtcccaacactgcatctaaatatatgaccttggccattctctggctttactttatttattaaatgagcactttggactaggtaatctctaaggtcatttccatttatttatttatttattttatttattttttatttttgtttttttgagagcttgtctcactctgttgcccaggctggagtgcagtggcacaaactcggctcactgcacctctgcctcctgggttcaagcaattctcctacctcagcctcctgagtagctgagattacaggcacctgccaccatgcctggctaattttctttgtattttagtagagacagggtttcactatgttcgtcaggctggtcttgaactcctgacttcaaatgatctgcctgccttggcctcccaaagtgctgggattacacrcgtgagccactgttcccggtggtcattttcatttctataattagatattatatgcttctaagtgacaagagactaaagacatttccgtactgacctttgtatgtaatcagctgacaccacaatttaga

SEQ ID NO: 681194 - DNA, 1842 bp, Homo sapiens
atagttgactaaatctgcctatacggcttccagcagaattaaaaatctaaaacttgtgcaagaaaccctgatatgaaagagtataaatatgaaagaaagaatgaaaatcccaatttattaattcaatataatcttattttgtttaagtcagtgggaaataaattttggtatatggctccttttacttacatgcagaggaagttgtaccaattcagattacataatttctactgtgtataatcagtttccagtgcgaaaaggtttaaaattcatatcatatcaccagttctgtatgaatccttaaaatcttaatgggactctaaaaaacaccttacagcatagataagctgtaaacaacattgttctccattgattcatgttcctccttggagtaattccacaattttatgtatccaaaaggccaaaaagttaataagatgaataaagattaatatttattgatactctggtttaaacattctcaaactctatgaggtatataattttattacctatatcttagcaatgaagtaaccaaggtaagaattttaattaaattataaagcataaataaacccccatgctaataatgagtagagtcaggatttgattccaggtagtccaaaaaaagaatgtgtgttctttccaccaagcaatactgtcttaaatattagagacactgaaggtcaaagcagcaccttaaccttttagttgaattatcaattcttgtgtgtgccaacattcaaatttaataaatgcattttattcatctatacgttctcactatttttctctatatggtatttgttacgtatccaaattttttttaaaaaaagcagggccaagtgtggtggctcatgcctgtaatcctagcactttagaaggcccaggcacgtggatcacctgaggtcaggagtccagagaccagcctggccaacatggcgaaacctcgtctctactaaaaatacaaaaattagctgggcgtggtggcccacaactgtaatcccagctactcaggagcctgaggcaggagaaatgcttgaacccgggaggtggaggttgcagtgagcccagatcatgccacttcactccagcctgggcgacagagtaagactctgtctcaaaaaaaaaaaaaaaaaaaaaagaaagaacagtaaagaaggtctcatgtaaatgagaaatgttctctacaatattattttagggggctacaacagcctggcagggtgcttaccaggatatctcgatgcttagcacagtgacttgcccatagtgtagattaaaggtcccaacactaggcttccagtcccaacactgcatctaaatatatgaccttggccattctctggctttactttatttattaaatgagcactttggactaggtaatctctaaggtcatttccatttatttatttatttattttatttattttttatttttgtttttttgagagcttgtctcactctgttgcccaggctggagtgcagtggcacaaactcggctcactgcacctctgcctcctgggttcaagcaattctcctacctcagcctcctgagtagctgagattacaggcacctgccaccatgcctggctaattttctttgtattttagtagagacagggtttcactatgttcgtcaggctggtcttgaactcctgacttcaaatgatctgcctgccttggcctcccaaagtgctgggattacacgcgtgagccactgttcccggtggtcattttcatttctataattagatattatatgcttctaagtgacaagagactaaagacatttcygtactgacctttgtatgtaatcagctgacaccacaatttaga

SEQ ID NO: 681195 - DNA, 604 bp, Homo sapiens
catacctttttgttaaatttagctcaaagctgtctccttatatattcaaagcttggcctcgtggtttctctgtgcacrgtaactgtaacctaactggatatataaacagactgtaatctgttcttgttccaatcactgagttttggccaatcaaagacagccaactattcaaattgcgttcaaataaggcaaacccagagctataaccaatctggctgtttccatatctcacatacttgttttccataggttgcttccctttttctctccataaatgttcttccaccacgtggctctgctggagtctctctgcctctactctggcctgagaggctgcccaatgcaacaatcctcctctgctcaattaaactctgttatatttaatttgtctaaggtttttcttttaacactctgtgtaaccctattgaggctgtgattcccatggtccaattaaagaactacagagcaaataaattgaaacataactaaaacctaagttcaagataatcacctgcttatggtatttctttaacatctcaaagtaaacacgcagtccacagcaataacttttagaatcccctttcttctttttcctatgataaaa

SEQ ID NO: 681196 - DNA, 602 bp, Homo sapiens
caaactaaggcatccatttttctaatattttgtttttccaaactacatcacatcagttgcataaacacatgataaatggagcgctgagggtttaatggctaagcacacacccacatatatttaacatagcatatattttcattctaaacaaaataagaacagtggaattatttggttccccctctaatttttattctctttgatatgtaatttctcatccttaagcagaagaaatgtatatacaacttccaatttccattaaacaaaaaataartcacctagaaaattgtctctcaacctaaacacttcatggaatctttacttgattgggcatcatagcatgttgaagttaaaaaggagtcaggaaaagaaatcaagacaggtaactgaataccccaaggaagacgggaagacaacgtttttggacttgagacaataaaatgataaaaaaaatgatgtcttggagagagagagacagaagacctatatttggaaggagtaggtctcatacacaaatctacttggcaacctgctgatacttatgagaattttacacacacacacaaactcttctttagtcttctgactgtgttatagaataa

SEQ ID NO: 681197 - DNA, 602 bp, Homo sapiens
caaactaaggcatccatttttctaatattttgtttttccaaactacatcacatcagttgcataaacacatgataaatggagcgctgagggtttaatggctaagcacacacccacatatatttaacatagcatatattttcattctaaacaaaataagaacagtggaattatttggttccccctctaatttttattctctttgatatgtaatttctcatccttaagcagaagaaatgtatatacaacttccaatttccattaaacaaaaaataaatcacctagaaaattgtctctcaacctaaacacttcatggaatctttacttgattgggcrtcatagcatgttgaagttaaaaaggagtcaggaaaagaaatcaagacaggtaactgaataccccaaggaagacgggaagacaacgtttttggacttgagacaataaaatgataaaaaaaatgatgtcttggagagagagagacagaagacctatatttggaaggagtaggtctcatacacaaatctacttggcaacctgctgatacttatgagaattttacacacacacacaaactcttctttagtcttctgactgtgttatagaataa

SEQ ID NO: 681198 - DNA, 1197 bp, Homo sapiens
ttttgtgtattttttgccccagagctggaatcggtcatttctctaaagaatccaaagctcttttagtgggaaatatttcttagaaaccacaatctgggcattatgcctgctccctgcactggggttatcattgcttttaggcctttttaacaaccagaattaagaaatacatatttttaaagaataaaatatgaattccactgatatttcccattcagatttagtatttcttaacctctttgattttataattgtatcttttctctcttattctaaatatctaacaatattaacataattctgtgctttattccatggtaaaaatgtaatacttttaaactagtaatagtttactttaaattttactaacaataaaatggctaaatgaaatttaagattctttcgcagtttttagtccttaagttgcatatggctagggatttacagtcattattgttctaaggtcatgtagagtaaatcttttatctgtaaggtttttctagcagcctactatatagtaatattcactggttacagttggttttcaatttttaacattctctcttctttcacttttttgttctatttggaccctcaatgaattggatgatgcctgctcatattagtgagggtagattttctttactcagtctactgattcaaacgaatgatctcttctagaaatacccagaaagaatgttttaccagatacctaggtatctcttaacccagtcaagttgatacctaaaattagccatcacaagcttttattaaaaagtctgtcttttcatttatgattatgagttttaaaatttattatatacagaattactatatttatgattgatttctaatttctttattccattagttygcatattcattcattatattacatcttttgattgtagtgaatttatattatgttttaacatattatggaactaattcccctcattcttttctactataatatttttctggttactcttaatttacttttccatacaaactttagaaccaatttgtatggctcaaaaaaaaaagtatcagtatggttattagaacattaaatatttaaactagaaagagtttaatatctttatgacattacatctctggtttgtactcaagctatattacaaagtcatataattaaaatagtatggtactagaacagatcagataaaccgacca

SEQ ID NO: 681199 - DNA, 1197 bp, Homo sapiens
ttttgtgtattttttgccccagagctggaatcggtcatttctctaaagaatccaaagctcttttagtgggaaatatttcttagaaaccacaatctgggcattatgcctgctccctgcactggggttatcattgcttttaggcctttttaacaaccagaattaagaaatacatatttttaaagaataaaatatgaattccactgatatttcccattcagatttagtatttcttaacctctttgattttataattgtatcttttctctcttattctaaatatctaacaatattaacataattctgtgctttattccatggtaaaaatgtaatacttttaaactagtaatagtttactttaaattttactaacaataaaatggctaaatgaaatttaagattctttcgcagtttttagtccttaagttgcatatggctagggatttacagtcattattgttctaaggtcatgtagagtaaatcttttatctgtaaggtttttctagcagcctactatatagtaatattcactggttacagttggttttcaatttttaacattctctcttctttcacttttttgttctatttggaccctcaatgaattggatgatgcctgctcatattagtgagggtagattttctttactcagtctactgattcaaacgaatgatctcttctagaaatacccagaaagaatgttttaccagatacctaggtatctcttaacccagtcaagttgatacctaaaattagccatcacaagcttttattaaaaagtctgtcttttcatttatgattatgagttttaaaatttattatatacagaattactatatttatgattgatttctaatttctttattccattagtttgcatattcattcattatattacatcttttgattgtagtgaatttatattatgttttaayatattatggaactaattcccctcattcttttctactataatatttttctggttactcttaatttacttttccatacaaactttagaaccaatttgtatggctcaaaaaaaaaagtatcagtatggttattagaacattaaatatttaaactagaaagagtttaatatctttatgacattacatctctggtttgtactcaagctatattacaaagtcatataattaaaatagtatggtactagaacagatcagataaaccgacca

SEQ ID NO: 681200 - DNA, 1197 bp, Homo sapiens
ttttgtgtattttttgccccagagctggaatcggtcatttctctaaagaatccaaagctcttttagtgggaaatatttcttagaaaccacaatctgggcattatgcctgctccctgcactggggttatcattgcttttaggcctttttaacaaccagaattaagaaatacatatttttaaagaataaaatatgaattccactgatatttcccattcagatttagtatttcttaacctctttgattttataattgtatcttttctctcttattctaaatatctaacaatattaacataattctgtgctttattccatggtaaaaatgtaatacttttaaactagtaatagtttactttaaattttactaacaataaaatggctaaatgaaatttaagattctttcgcagtttttagtccttaagttgcatatggctagggatttacagtcattattgttctaaggtcatgtagagtaaatcttttatctgtaaggtttttctagcagcctactatatagtaatattcactggttacagttggttttcaatttttaacattctctcttctttcacttttttgttctatttggaccctcaatgaattggatgatgcctgctcatattagtgagggtagattttctttactcagtctactgattcaaacgaatgatctcttctagaaatacccagaaagaatgttttaccagatacctaggtatctcttaacccagtcaagttgatacctaaaattagccatcacaagcttttattaaaaagtctgtcttttcatttatgattatgagttttaaaatttattatatacagaattactatatttatgattgatttctaatttctttattccattagtttgcatattcattcattatattacatcttttgattgtagtgaatttatattatgttttaacatattatggaactaattcccctcattcttttctactataatatttttctggttactcttaatttacttttccatacaaactttagaaccaatttgtatggctcaaaaaaaaaagtatcagtatggttattagaacattaaatatttaaactagaaaragtttaatatctttatgacattacatctctggtttgtactcaagctatattacaaagtcatataattaaaatagtatggtactagaacagatcagataaaccgacca

SEQ ID NO: 681201 - DNA, 610 bp, Homo sapiens
cttggtctccccgggcactagtctctgccttcttagaacagcctggaatataactactgtttagaagagctgagcctctcctgtgatcccattctcttccttcttttttcgccttcccagctctatacctcaccccaacctctttcccattccactggagccctctttgtcccaggagagctaatagtaaattctttattgctgtagctttattgcctttagctctggaaactgtgtgcttccaggctgtaattacgttccatttataaatattatctctaagagaatagctaatagcttttttgtaacgctatctgtaattctgttgctgctaaattaatgtgtcagccagaatcttgaagtaaacaaagtttataaattgattcctgtagaatgatgtaagatcttactaaaccctaatactgctcagatgagaacagctcagttaatyagctaataagccagcagtgaaattaaaaatataattgaacattcagagcagtctccaagaaccatgacaaattaaaaataaaacccaacatgcgaatatcagttgctttgtgaaaaagtcaggttacccagcctccagaggttcatgtagttaggttca

SEQ ID NO: 681202 - DNA, 1471 bp, Homo sapiens
tacactcatttcatttcacctccaattctttaaatcatgtgctgcaaacagccccaaacaaaccacagtagactgcaaaacagttgattcagaggctaagtaaaagcagagcctaagagttaattatattacagttgttgaaaacagaacatctattttcatttcacgttgtgattcaagtgttagtggattagcttttaaaataaaccttttccttgcttatacctatattagatgtagggcaaatagtaatttcttccatttctaagtgtcctcagttactgtctgcctagcctaaaaagtattttgaataacgaattgcrtatgttacatgtatatacagcagtcattctcctctctctctaaaatatggctaataccaccattcttcacccattttcaaaaatggaaaagaaagttaaaaaaactgcacaatacagtgaactttggaatcttcttaatagtacatcttataattgcaatgtattaggataagaaaccaaatatatttatattaagaataaatttcaaaaaaaaagtttattaacatttaacaaacttaagtaaacaaacttaacttatttaacttgttttattattgggttaattttaacacattagtccacaccttttaacatcacactgaaggaattccttgtaatgaggtagggcagtcaaatcatccctcagaatctccaagggaatcgttgtgctagatcacatgctaagttggaaagtttggtccaaacatgttcagcaagagaagctgcctcacgagggaaaaactgtagacagtaactttttgctctactcgagtatttttattttggtagtggatttacattagaaaatctctaattttccagaaagaaaatctctaatacttaaagaagtgagagaaaagacattgaagaagttattatttttatcacagttaacaagcagtaaaaagtattcattcaaaataccaataatattttaattaaaagtagcactgtatgtgaaagaagtgtaagtaatcttattgacagttaactagaaaaagaccatatatatatatatacacatatacatatatacatatacttatatacactgtatctctaggtttttgttttctttggaagcaatcactgtactcattgatttatttatgattgataaataaaattagtttctttacattttaatattaagtaagattctaaatagtcatatactttaacccaaatattatatatacacacatatatttatatattacccaagagaaacacataaatacacaaatacccctaaattccagtctaaatgactagcctgtgctacctctagtatttcatcagcagctacaactcatgcctgatgtgaaagagccaaatttagagggaaattaacaagcctttttgggatctcttcaaaccctaaaacagcgaaagaaacagccatggatatatttattttcttttca

SEQ ID NO: 681203 - DNA, 607 bp, Homo sapiens
agtccaagttacttaatacagcacaaagtgcccgtaatctccctacttatcttttactcacctatcccttccccatgctctcagcttcctccctacttccttaaagcgtcatgcaaatttatgccgctgtgtccttatttatgctactccctcggaatagaatttatcacttctccatagaggtgggaaacatctactcatcctcaagatttaaccggaatctcaactttccttagctttttttttttttttttttcctgagacggagcctcgcagtgttgcccggcctggagtgcagtggcccaatctcggctcactgcaacttccgcctcccaggttcaagagattctcctgcctcagccttccaagtagctggaactgattacaggcacctgccaccgcggccggctaatttttatgtttttagtggagacggggtttcaccatgttggccaggctggtctcgaactcctgacctcgtgatccacccgccttggcttcccaaagtgctgggattacaggtgtgagmcaccgcgccccctcagggcttattcttattcatatttccttgccccaacacagtgccttggaatgaataaatgaatga

SEQ ID NO: 681204 - DNA, 2658 bp, Homo sapiens
tttttttgcatttcttcttttctcctcagttcattttcgattctttgtttttaaaataacaccattggcctggcgtggtggcgccacctgaaatcccagcattttgagagtttgagatgggtggatcacttgagcccaggagttcgagactagcttgggcaacatggtgaaaccctgtctctaccaaaaaaatacaaaaactagcaggacatggtggcatgtgcctgtagtcccagctacttgggaggctgaggtaggataatgacttgagcccgggaggtcaaggctgcagtgagccactgcactctagcctgggtgacaaggcaagaccctgtctcaaaaattaaattaattaaataacaccataatttatgggtgtgtatttatttatagctttagccacatataaactcttaaaatgttatagtgtattttattacttctaagtaacctatgattttatttttacttcatcttaactcacttattgaagaggttaatattttaggtagttgaaatgttttcctgttttaattgtcagtattaatttctagttataaatttggactaaagaatgtgacctgagcaatttcttcattttggatattactgaagttttatttgtgaccaatatttgaaaccatttcatggttcctgaacaagaaagcatggtatgtgcttcaaaatacaacattcaacttatagctgtattcagtgttgttaattgtattttgaaagtaaaaactaaccattggtttttgtctacctgatatatatgtgcctgatagtatcttgttgtcccctgctatgtttttgtttctgtcaatgtatcatattttaaatcatagttattttataaaatgtgattgtgagttattatttaaaccatgccttctttagaggttggaccttttatcagtgtgaataactctttttgtcccttggatatcaattaaattgaattctaatttttttttttaaccttacctcaggtgctgtttggctcctgcagccaartacactgatgatttaattaaaatgtttatctcccccaaattttaagaactttatttgggttatttggaataatgtataaaatatctatatagattattatataattcagggggaagcaaattatcagaacaatttcatgttatacaaataacatcagaaaaatatcttaaattatatggcatattctattgattcatccacaaatttataagtccttaccacctttcattatattggtactaggcattatagtagtgctaggcactatagtaatgctggggtataaacaagaataaaacaaaataagttccttatttcaggtaacttacagtataggtcagtggttcttagcttgctttttaattatgaattcctttgaaagtctagtaaaataatccaacaccattattccccattgcacatacccccagatgttttagacatattttcaattgctccatggaccttaagaaaacttggttggtgtgcagtttggtgtattatgggtaagactggacctggtgttagaaaatctgcatttgaggctttgttctgacagtgtctagtgtaaacatgggcagaccacttaaacctctctttagtcttctctgtagaatgatgataataccatctaattagcaggattgttgttttattcagtgagacagcatatgtaaataacttagtaaaataaaaagcaacgtgtttataatggtctaagttatcttcgtgctttatttatgattagtgaaaagactaaattcaaatctcttttatgtgtcataacttttatgcaacgaatacagatatagttcttccacttccttgtatcaagatttactagtgaaactgacattttttcctttggtatagtcagattgagtattaagtttatctttcatgtctatcattattctaagttagctgaacattgactagtatattctatttttcaaggtctgtgaatagttagagccacattacaaagtcagtacaagatgtaacttactcatgcaaccaaaggtcaaaccaggactattaagggtatcactggagttacagtgacttgacacagttgtggcaaatggaaaaccaagagtttgcaatctggtttggaggtccttggtaaaatttccaagtgtgacagatgtgtccttgacatttctctctttctgtacctattctcttccatccttcaagcacccaacactttcacactttgtattggtctgttctcatgctgttaataaagacatacccaagattgggtaatttataaagaaaagatgtttaattgactcacagctccacatagctggggagacctcacatcatggtggaaggtgaagaaggagcaaagtcacgtcttatatggcagcaggcaaagagagcttgtgcaggggagctcccatttttaaaaccatcaaatctcatgagacttattcactgccacaagaacagtatgggggaaaccacccccatgattaaattatctccccctggcctcaaccttaacgtggggattattacaattcaaggtgagatttgggtggggacacagccaaaccatatcattccaccctggcccctcccaaatctcatgccctcacatttcaaagccaatcatgccttcccaacagt

SEQ ID NO: 681205 - DNA, 2658 bp, Homo sapiens
tttttttgcatttcttcttttctcctcagttcattttcgattctttgtttttaaaataacaccattggcctggcgtggtggcgccacctgaaatcccagcattttgagagtttgagatgggtggatcacttgagcccaggagttcgagactagcttgggcaacatggtgaaaccctgtctctaccaaaaaaatacaaaaactagcaggacatggtggcatgtgcctgtagtcccagctacttgggaggctgaggtaggataatgacttgagcccgggaggtcaaggctgcagtgagccactgcactctagcctgggtgacaaggcaagaccctgtctcaaaaattaaattaattaaataacaccataatttatgggtgtgtatttatttatagctttagccacatataaactcttaaaatgttatagtgtattttattacttctaagtaacctatgattttatttttacttcatcttaactcacttattgaagaggttaatattttaggtagttgaaatgttttcctgttttaattgtcagtattaatttctagttataaatttggactaaagaatgtgacctgagcaatttcttcattttggatattactgaagttttatttgtgaccaatatttgaaaccatttcatggttcctgaacaagaaagcatggtatgtgcttcaaaatacaacattcaacttatagctgtattcagtgttgttaattgtattttgaaagtaaaaactaaccattggtttttgtctacctgatatatatgtgcctgatagtatcttgttgtcccctgctatgtttttgtttctgtcaatgtatcatattttaaatcatagttattttataaaatgtgattgtgagttattatttaaaccatgccttctttagaggttggaccttttatcagtgtgaataactctttttgtcccttggatatcaattaaattgaattctaatttttttttttaaccttacctcaggtgctgtttggctcctgcagccaaatacactgatgatttaattaaaatgtttatctcccccaaattttaagaactttatttgggttatttggaataatgtataaaatatctatatagattattatataattcagggggaagcaaattatcagaacaatttcatgttatacaaataacatcagaaaaatatcttaaattatatggcatattctattgattcatccacaaatttataagtccttaccacctttcattatattggtactaggcattatagtagtgctaggcaytatagtaatgctggggtataaacaagaataaaacaaaataagttccttatttcaggtaacttacagtataggtcagtggttcttagcttgctttttaattatgaattcctttgaaagtctagtaaaataatccaacaccattattccccattgcacatacccccagatgttttagacatattttcaattgctccatggaccttaagaaaacttggttggtgtgcagtttggtgtattatgggtaagactggacctggtgttagaaaatctgcatttgaggctttgttctgacagtgtctagtgtaaacatgggcagaccacttaaacctctctttagtcttctctgtagaatgatgataataccatctaattagcaggattgttgttttattcagtgagacagcatatgtaaataacttagtaaaataaaaagcaacgtgtttataatggtctaagttatcttcgtgctttatttatgattagtgaaaagactaaattcaaatctcttttatgtgtcataacttttatgcaacgaatacagatatagttcttccacttccttgtatcaagatttactagtgaaactgacattttttcctttggtatagtcagattgagtattaagtttatctttcatgtctatcattattctaagttagctgaacattgactagtatattctatttttcaaggtctgtgaatagttagagccacattacaaagtcagtacaagatgtaacttactcatgcaaccaaaggtcaaaccaggactattaagggtatcactggagttacagtgacttgacacagttgtggcaaatggaaaaccaagagtttgcaatctggtttggaggtccttggtaaaatttccaagtgtgacagatgtgtccttgacatttctctctttctgtacctattctcttccatccttcaagcacccaacactttcacactttgtattggtctgttctcatgctgttaataaagacatacccaagattgggtaatttataaagaaaagatgtttaattgactcacagctccacatagctggggagacctcacatcatggtggaaggtgaagaaggagcaaagtcacgtcttatatggcagcaggcaaagagagcttgtgcaggggagctcccatttttaaaaccatcaaatctcatgagacttattcactgccacaagaacagtatgggggaaaccacccccatgattaaattatctccccctggcctcaaccttaacgtggggattattacaattcaaggtgagatttgggtggggacacagccaaaccatatcattccaccctggcccctcccaaatctcatgccctcacatttcaaagccaatcatgccttcccaacagt

SEQ ID NO: 681206 - DNA, 2658 bp, Homo sapiens
tttttttgcatttcttcttttctcctcagttcattttcgattctttgtttttaaaataacaccattggcctggcgtggtggcgccacctgaaatcccagcattttgagagtttgagatgggtggatcacttgagcccaggagttcgagactagcttgggcaacatggtgaaaccctgtctctaccaaaaaaatacaaaaactagcaggacatggtggcatgtgcctgtagtcccagctacttgggaggctgaggtaggataatgacttgagcccgggaggtcaaggctgcagtgagccactgcactctagcctgggtgacaaggcaagaccctgtctcaaaaattaaattaattaaataacaccataatttatgggtgtgtatttatttatagctttagccacatataaactcttaaaatgttatagtgtattttattacttctaagtaacctatgattttatttttacttcatcttaactcacttattgaagaggttaatattttaggtagttgaaatgttttcctgttttaattgtcagtattaatttctagttataaatttggactaaagaatgtgacctgagcaatttcttcattttggatattactgaagttttatttgtgaccaatatttgaaaccatttcatggttcctgaacaagaaagcatggtatgtgcttcaaaatacaacattcaacttatagctgtattcagtgttgttaattgtattttgaaagtaaaaactaaccattggtttttgtctacctgatatatatgtgcctgatagtatcttgttgtcccctgctatgtttttgtttctgtcaatgtatcatattttaaatcatagttattttataaaatgtgattgtgagttattatttaaaccatgccttctttagaggttggaccttttatcagtgtgaataactctttttgtcccttggatatcaattaaattgaattctaatttttttttttaaccttacctcaggtgctgtttggctcctgcagccaaatacactgatgatttaattaaaatgtttatctcccccaaattttaagaactttatttgggttatttggaataatgtataaaatatctatatagattattatataattcagggggaagcaaattatcagaacaatttcatgttatacaaataacatcagaaaaatatcttaaattatatggcatattctattgattcatccacaaatttataagtccttaccacctttcattatattggtactaggcattatagtagtgctaggcactatagtaatgctggggtataaacaagaataaaacaaaataagttccttatttcaggtaacttacagtataggtcagtggttcttagcttgctttttaattatgaattcctttgaaagtctagtaaaataatccaacaccattattccccattgcacatacccccagatgttttagacatattttcaattgctccatggaccttaagaaaacttggttggtgtgcagtttggtgtattatgggtaagactggacctggtgttagaaaatctgcatttgaggctttgttctgacagtgtctagtgtaaacatgggcagaccacttaaacctctctttagtcttctctgtagaatgatgataataccatctaattagcaggattgttgttttattcagtgagacagcatatgtaaakaacttagtaaaataaaaagcaacgtgtttataatggtctaagttatcttcgtgctttatttatgattagtgaaaagactaaattcaaatctcttttatgtgtcataacttttatgcaacgaatacagatatagttcttccacttccttgtatcaagatttactagtgaaactgacattttttcctttggtatagtcagattgagtattaagtttatctttcatgtctatcattattctaagttagctgaacattgactagtatattctatttttcaaggtctgtgaatagttagagccacattacaaagtcagtacaagatgtaacttactcatgcaaccaaaggtcaaaccaggactattaagggtatcactggagttacagtgacttgacacagttgtggcaaatggaaaaccaagagtttgcaatctggtttggaggtccttggtaaaatttccaagtgtgacagatgtgtccttgacatttctctctttctgtacctattctcttccatccttcaagcacccaacactttcacactttgtattggtctgttctcatgctgttaataaagacatacccaagattgggtaatttataaagaaaagatgtttaattgactcacagctccacatagctggggagacctcacatcatggtggaaggtgaagaaggagcaaagtcacgtcttatatggcagcaggcaaagagagcttgtgcaggggagctcccatttttaaaaccatcaaatctcatgagacttattcactgccacaagaacagtatgggggaaaccacccccatgattaaattatctccccctggcctcaaccttaacgtggggattattacaattcaaggtgagatttgggtggggacacagccaaaccatatcattccaccctggcccctcccaaatctcatgccctcacatttcaaagccaatcatgccttcccaacagt

SEQ ID NO: 681207 - DNA, 2658 bp, Homo sapiens
tttttttgcatttcttcttttctcctcagttcattttcgattctttgtttttaaaataacaccattggcctggcgtggtggcgccacctgaaatcccagcattttgagagtttgagatgggtggatcacttgagcccaggagttcgagactagcttgggcaacatggtgaaaccctgtctctaccaaaaaaatacaaaaactagcaggacatggtggcatgtgcctgtagtcccagctacttgggaggctgaggtaggataatgacttgagcccgggaggtcaaggctgcagtgagccactgcactctagcctgggtgacaaggcaagaccctgtctcaaaaattaaattaattaaataacaccataatttatgggtgtgtatttatttatagctttagccacatataaactcttaaaatgttatagtgtattttattacttctaagtaacctatgattttatttttacttcatcttaactcacttattgaagaggttaatattttaggtagttgaaatgttttcctgttttaattgtcagtattaatttctagttataaatttggactaaagaatgtgacctgagcaatttcttcattttggatattactgaagttttatttgtgaccaatatttgaaaccatttcatggttcctgaacaagaaagcatggtatgtgcttcaaaatacaacattcaacttatagctgtattcagtgttgttaattgtattttgaaagtaaaaactaaccattggtttttgtctacctgatatatatgtgcctgatagtatcttgttgtcccctgctatgtttttgtttctgtcaatgtatcatattttaaatcatagttattttataaaatgtgattgtgagttattatttaaaccatgccttctttagaggttggaccttttatcagtgtgaataactctttttgtcccttggatatcaattaaattgaattctaatttttttttttaaccttacctcaggtgctgtttggctcctgcagccaaatacactgatgatttaattaaaatgtttatctcccccaaattttaagaactttatttgggttatttggaataatgtataaaatatctatatagattattatataattcagggggaagcaaattatcagaacaatttcatgttatacaaataacatcagaaaaatatcttaaattatatggcatattctattgattcatccacaaatttataagtccttaccacctttcattatattggtactaggcattatagtagtgctaggcactatagtaatgctggggtataaacaagaataaaacaaaataagttccttatttcaggtaacttacagtataggtcagtggttcttagcttgctttttaattatgaattcctttgaaagtctagtaaaataatccaacaccattattccccattgcacatacccccagatgttttagacatattttcaattgctccatggaccttaagaaaacttggttggtgtgcagtttggtgtattatgggtaagactggacctggtgttagaaaatctgcatttgaggctttgttctgacagtgtctagtgtaaacatgggcagaccacttaaacctctctttagtcttctctgtagaatgatgataataccatctaattagcaggattgttgttttattcagtgagacagcatatgtaaataacttagtaaaataaaaagcaacgtgtttataatggtctaagttatcttcgtgctttatttrtgattagtgaaaagactaaattcaaatctcttttatgtgtcataacttttatgcaacgaatacagatatagttcttccacttccttgtatcaagatttactagtgaaactgacattttttcctttggtatagtcagattgagtattaagtttatctttcatgtctatcattattctaagttagctgaacattgactagtatattctatttttcaaggtctgtgaatagttagagccacattacaaagtcagtacaagatgtaacttactcatgcaaccaaaggtcaaaccaggactattaagggtatcactggagttacagtgacttgacacagttgtggcaaatggaaaaccaagagtttgcaatctggtttggaggtccttggtaaaatttccaagtgtgacagatgtgtccttgacatttctctctttctgtacctattctcttccatccttcaagcacccaacactttcacactttgtattggtctgttctcatgctgttaataaagacatacccaagattgggtaatttataaagaaaagatgtttaattgactcacagctccacatagctggggagacctcacatcatggtggaaggtgaagaaggagcaaagtcacgtcttatatggcagcaggcaaagagagcttgtgcaggggagctcccatttttaaaaccatcaaatctcatgagacttattcactgccacaagaacagtatgggggaaaccacccccatgattaaattatctccccctggcctcaaccttaacgtggggattattacaattcaaggtgagatttgggtggggacacagccaaaccatatcattccaccctggcccctcccaaatctcatgccctcacatttcaaagccaatcatgccttcccaacagt

SEQ ID NO: 681208 - DNA, 493 bp, Homo sapiens
tttaaaagttaaacatttcaaaatggtgacagcaaagcattaaacaaattcagattccttctaagtgtgggtccctatatgactgcacaggtcccatgcccatgaagctagcacatctggaaggctatacaaggtggtctctgggaagcgagctgaggctgggggaattagtcggtgtttgacgatttatttatcaccctgcttgtatctgaattttttctaccatatgcgttcattactttttttttttttgagacmgtttcactcttgttgcccaggctggagtgccatggcgcgatctaggctcaccgcaacctctgcctcccgggttcaagcgattctcctgcctcagactcccgagtagttgggattacaggcatgcgccaccatgcccggctaattttttgtatttttagtagagacagggtttctccatgttggtcaggctggtctcaaactcccgacctcaggtaagccactgcacccggcctgc

SEQ ID NO: 681209 - DNA, 612 bp, Homo sapiens
tttaaacaattggctactcatttaggggaggtccgagggagaggaaaatgtactcaaactttacagatttgaaaagatgtgtaacttttcaaaatataaagtgatagaactgtcataggtaaactgagtcctttccttattttatatcacttgcaaagaaagaacaccaaaattggaaaaaaaaaaaaggccagctggatttattctctggccagagaaggagaaggagtgacctctcactccagaaacacctcctcctccccaagctgtggaaagctggagaattttaaagagttagatatggggtggaaaggtttgtaagtctgtgcagggaggaactttagatgcgcaggcacaaaccataaacatgtstcttcatacgatgcatggtcagaaaatagtaattttcttctatgggtggggattttagtattataataataagttaatgatctaaagataacaaggagtccctgattctggtttgctctggtttccagcaggccttaccttcctctgataattggtgaaacattttgaagctcccagggcatctagagtccttgtaaactagcatacctagaggtaaagagactgaaagaaactgtttaa

SEQ ID NO: 681210 - DNA, 2693 bp, Homo sapiens
catagcttcatttatttctttgaatgcataggtttcatggtcattaaaataatcacagactcatcagttctccccatgcttaaataagatcaatacgaaccagaacaagaggcttccttacttctctattcaccaagatttctctcttccttctctctttcactctccctctccccctgcttctctaatcccttccctcatttccaccctcaaaccccacgtaaagaagaatacaataattttttaaataccgtagttctttctgtagtgaatcataacatttattcagctgttatccaagacacagtgaagtgttgccttatatatactgtcagaggcagctgtagcaattttggagtttgctagaggaaaaaaacctgctggtcctgccttacaagccagttcagcaatgaaatggttaataggatgagtaaaggctatttttaagtctggctcccctctctgatacactcttgaaaattcaccctgtactgcagaaatcctaaattgcagtgccctgcaccccactgaaactcttcagtctgctgtaagtaagcctcagcatgggcaagattgggggtgaacagctggaggaggggctcaagccctgggcctttgtaatggaggggcgaaacactgagatcctgcagagaaggaacacagaaaccctcaaggcacagagaaatagacccagacaaaagccccgttacatggttgcaaatcaccccactgctgttattttatttactgtggtctgcaggaggattgttttctctttgcaaaatttttaagcttcatgggcttttctcctccacaacagcggtcacttataccacagtgccacatagagacagtcttcaccttcagctttcttaaggaaagggggaaaaattcttgcctagtcaggttgcaatagacatagaatgaaatagatgaatttccagtcttacagttatttcccagggatacaagattgaaatatggcttctattagtggttttgttttacatttttgtcttggttttgttttagttttatatgattatttttcttaaagatgacacctacattcattcctttgaacttaaatttatttaggtgtgggaaggaaagaaaaggcaacgtaacttgtgtttgaaccaattatacacacacacacacatatgcataaacatttttccccagtaaaataattcttttcaaaattgatagaaatatcatcttattactgtgacaaatcatatgctatgactttgagattttcctttgggaagttaggatagaaggatggctaacagaaatatttattttaaaatctgaagggacagaaatatctgtaagtgtaagttcttttttgtataagtttcttagggtatttgtaaaaatacgttcctgcctcactggggaaagaggaaaagatagagagagagagaaagagacctggaggaagaaaaagcaacttacttctctatagaaatatgtggcttactttggtaaacttttctctacagctgagcctgtaagctatgacttagggtagctgaggagsaataagaatcacttcccagtgaccagaggagcaagggctcctctacttagaaggcgtttattgtcacgactaggaaggtgaaagggaacttgtgataaatgtgctcaatttaaggaaaataaaaaagtgaaattttcctatgacaaatccacagaggtatttactaggtgtttgagcaggtaattagcacccaaaccaggtttcaggaaatagttctggtcacctcaaatgaagaatatataatgagctgaagagcttgattttcaatggatgatttactcaggacaatagcccaaacagaactgggtaaagggtttacaaatggtaacttgagaagcagtgggcttccttcccagaagcttaatactgtctcctcctcttcaaactctcccctgtcttcttccagcacctccaaaaaatacacacatactataaaacttttctcgaaaaaatgaacatagtccttaaataaattctatcaaagaaacatacagaagatcaaaaaaaaaaaaaaaatacagaataaatgtgcctgttggcatctagacctaacctgggttagttcaggctgaaacttttgtgatcgcattttagcttgctttatgaggctcagttatggagccttttcttactggagttgcttatactagatgataagcaatgattaaaacattgcccattcttttccaagtctattccagaagactgacaacactaaggaccaaagatggccacgtaaaaaatagttcaacatttttgaactcacaatgttgcatgtttctgttgatttaagaaagccttcctacccagagccactatgatttgctgtgttgtaagcactaatatttctagttaaaaaaaaaaaaatcacctgccatattaactctggtaacaaaatacatgatagtcgttaactttcaccagctgaatctcttgatatatattgaaagatgatttttatttcctcataatccaaaatgtttggtcatttataattaagccccctgacccccatcccattgcattcagtatacacttaagctaaaggtaactggctgggcgtggtggctcacgcctgtaatcccagcactttgggaggccgaggcaggcagatcacctgaggtagggagttcgagaccagcct

SEQ ID NO: 681211 - DNA, 1326 bp, Homo sapiens
atggagtactattcagccataaaaaagaatgaaatcctgtcatttgtgaccacctggatgaacctggagggcatcatgttaaatgaaataagccaggcatagatggaaaaatacctcatgatctcagtcatttggaagctaaaataaaaagtcgacatcatagaaggagaaagtagcatagtgattaccagagactgggaaagggagcagagagggaaggaggaaggggagagattggtcaatggggccaaaatgacagttaagagaaataagttctggtgttctgttattgcacagtagggtgactatgggcaacagtaaattactgtatattataaaataggtagaagagaagcttttgaatgttttcaacacacaaaaaaatgataaataatgtatgaggcgatgggtatttgaactaccctaattagatcattacacaaaatatatatgcattgaaacatcagactgtaccctagaaatatgtaccattataaggtgctaattaaaaaaagaaattttcaaaaaagcttaaaagttgaccatatattaaagaaaagacattttctattttaaaaccttagagattatttatttcataattaaatctatattaactctagcttatttagttcagcctttgtaaataatatttttctttattaacacatacagatcatgccaaaacagaaacataaaagccatttgctgaaagttcaacgtataaatatatacatgtatagtacatatattcattctctctccaaacatgcacatacacacrtaataggcagatactacactgaatgaaaaggaaagagaagaagaattaagttaaacttactaagtgcctaactacaatttcagtaaaaaactaccaaaagcccatgctacatagtcatatatatatatgttaaaaactacaacttggcacttgaggtcaggagttcgggaccagcctggccaatatggcaaaaccccatctctactaaaaatatgaaaaattagctgggtgtgttggcaggcgcctgtatttccagctactcaggaggctgagccaggagaatcacttgaacctgcgaggcggaggttgcagtgagctgagatcgtgccattgcactccagcctgggcaataagagtgaaactccacctcaaaacaaacaaacaaacaaacaaacaaacaaaaaactacaacttggtacctgaaatcccagcaataattcatggtattgagagaaagctgaggttcaatgaaccttttttaatgaaagtagatgcctactacgtgcaaggtactttgtgggaaatgttcagtggactatggg

SEQ ID NO: 681212 - DNA, 2037 bp, Homo sapiens
attctttgctgaaattgtccctaaattcactactatctggttcatatatggaaaatgattattttcctctgaacccattttcagcttagattgtctgaggcaggagaatgagcatctgttagagtaaggattctagattgtaccctctgccactcagctttactactgaaggtccgtctcttagcttttcctggagctcattttcctctgaactccataatgatcttttcattcaaatcctgctctgagatggagagatgggctctttgggtggactgagagtcaccaaaacatccttggtgggcagatgtaggtatcaaattcatcaaaatgaacccagcatctgagtcaagaggttgactataaatataaacaaataagaaataaatgaggtcgagggtatggtggtgtctgaagataagtggagggaggaatttggaggacctaccttgccttaagaaaggcttatggcttgctttcctgttccaactgaaatggtgggtgtgcctggatcaatcctcaagtagaacaaactcttttcactcttaatgttcttctttgtgtttttgaatttgttttattctccaacctagaaagtgtttcttcagctttaacgtggggcattttagatattttctggctccgttagttctatatatggaagaatatcaccagacagaaggaacactaatattcgtttaggtgaattggcaagcaaattagctcacagcgtttgaaagttgagaaatgaaattacatataaatttttctattttccacaatactaatgagcactttattaaaaaaaaaaaaaaaaagctcgattctgggttgtatcagataaattccattgactaaatctgctagtttgttgtcatgacaaccttcacatggagctaattagaagttaagtaggacacttctaaaagagatcaattctggtctggaattggacaggatttcatagcttccataatctatttatttctattaacagtatagattgttggtgggttattgaatataagggtgcagaaaatgtgtctttggttgacatggggggaaggtagtgaatcttgttttcttcttcactcccttttatgtatatccccccaaaaccctagggtccagaataagccaagaacttcagaacacatatattaatttaagatgtattgggaggactacagaacaggtgttccaatcactgttggcttgaaaaccttgtgtatccttttttctaaagtgaacaacactggctgtgaatggctgagttattttaatctgtcattcacagttaacgggagtgttcagagcctgtcaggtgttctaaagcatatggaagatgcaaaacaccctgattttaagatgcatacaccttatttggaatgatagcatactgatatgaaaagtttagaatatgtttgccaagtcacctaaggttagttcagcaaacatttatgaaatgcctgattgtaagactattaaaattaatatatagggagtatatcccaactattaaagtactgtgagaacacagagcaagatacaattggaaattagcatcaattcacaaattctttttgaggaackattatgtgcaaactatttccaggcttgaggaggtgagaatatacagaaatcaatataaccaggtccctgtcacagaggagcttaatcaatgtacgagtatggccataggtacccagatgtcattcctaatgagcccagccacccagtagctctgtcgtaagaaagtgtggcagtcagtctgatgtcccaaaccattgaaaataatctaaatctttcctgtctcttataggaacatcccagggggaatcctttagaatacacagaaaagtttcttgtaaatcctcttttccccagctgtcttgctctcatagctctctggcatccatagcagctctctaacatctgtctcatttggctcaaactccaacaccttttcctccaactcagtctatgtagagatttttgtttcttttctccttcccagtctggctcagcaatttatta

SEQ ID NO: 681213 - DNA, 2037 bp, Homo sapiens
attctttgctgaaattgtccctaaattcactactatctggttcatatatggaaaatgattattttcctctgaacccattttcagcttagattgtctgaggcaggagaatgagcatctgttagagtaaggattctagattgtaccctctgccactcagctttactactgaaggtccgtctcttagcttttcctggagctcattttcctctgaactccataatgatcttttcattcaaatcctgctctgagatggagagatgggctctttgggtggactgagagtcaccaaaacatccttggtgggcagatgtaggtatcaaattcatcaaaatgaacccagcatctgagtcaagaggttgactataaatataaacaaataagaaataaatgaggtcgagggtatggtggtgtctgaagataagtggagggaggaatttggaggacctaccttgccttaagaaaggcttatggcttgctttcctgttccaactgaaatggtgggtgtgcctggatcaatcctcaagtagaacaaactcttttcactcttaatgttcttctttgtgtttttgaatttgttttattctccaacctagaaagtgtttcttcagctttaacgtggggcattttagatattttctggctccgttagttctatatatggaagaatatcaccagacagaaggaacactaatattcgtttaggtgaattggcaagcaaattagctcacagcgtttgaaagttgagaaatgaaattacatataaatttttctattttccacaatactaatgagcactttattaaaaaaaaaaaaaaaaagctcgattctgggttgtatcagataaattccattgactaaatctgctagtttgttgtcatgacaaccttcacatggagctaattagaagttaagtaggacacttctaaaagagatcaattctggtctggaattggacaggatttcatagcttccataatctatttatttctattaacagtatagattgttggtgggttattgaatataagggtgcagaaaatgtgtctttggttgacatggggggaaggtagtgaatcttgttttcttcttcactcccttttatgtatatccccccaaaaccctagggtccagaataagccaagaacttcagaacacatatattaatttaagatgtattgggaggactacagaacaggtgttccaatcactgttggcttgaaaaccttgtgtatccttttttctaaagtgaacaacactggctgtgaatggctgagttattttaatctgtcattcacagttaacgggagtgttcagagcctgtcaggtgttctaaagcatatggaagatgcaaaacaccctgattttaagatgcatacaccttatttggaatgatagcatactgatatgaaaagtttagaatatgtttgccaagtcacctaaggttagttcagcaaacatttatgaaatgcctgattgtaagactattaaaattaatatatagggagtatatcccaactattaaagtactgtgagaacacagagcaagatacaattggaaattagcatcaattcacaaattctttttgaggaacgattatgtgcaaactatttccaggcttgaggaggtgagaatatacagaaatcaatataaccaggtccctgtcacagaggagcttaatcaatgtacgagtatggccataggtacccagatgtcattcctaatgagcccagccacccagtagctctgtcgtaagaaagtgtggcagtcagtctgatgtcccaawccattgaaaataatctaaatctttcctgtctcttataggaacatcccagggggaatcctttagaatacacagaaaagtttcttgtaaatcctcttttccccagctgtcttgctctcatagctctctggcatccatagcagctctctaacatctgtctcatttggctcaaactccaacaccttttcctccaactcagtctatgtagagatttttgtttcttttctccttcccagtctggctcagcaatttatta

SEQ ID NO: 681214 - DNA, 1293 bp, Homo sapiens
tctccaaaaccagctttttaagtggattctgcaatagttttgtttatttgttgattttctaaaacacatataaaaggcctatctgagcaaaagcacatgtcatattttgtgtttataatgttcatgtccacagcctttaatcaaatatttagggtatatggggaaagcagtacatatatatactaataaatgcagggaccacatatttcttgcctctgagtaactaaaagtctggaatacctatagatagtatttagcatgtttctgtaggtattctcactatctactaaaaaatttttcagttacatgagatttcatataggtttttatgggcatgtgttccataattaatagtctgtttccggaccagatagttgaggaagtcaataaataaatattaagcaataaattttgatgatgatggtgacattaaaaggaaataaacgtcttatcttcccctgtgtttatctttggaaaactgatcctattttttatrccctaaaatcataattttaccctagaacactaaaaactagacaaccaatatgaatattatgttgtgatgctattaaaaatgcagccttcataggctgaagaagaaaacatctatattctatcattatacacaaagatcatcaaaaataaaatcacctcatgaacaattattaaaagataattaaatctgtcagaatataaataagcagtactgccacttctcaggctaactcataatttctttgtggtttaatatgctaaatgctgccatgatatattggctttataagaaatactctttaatgggtatgcttgttagacatactcatataggaaagacattttataaattcactcattcttgattctgtgatcaaaaatctgagtaacatcaataacaaagcattgtattaaataatataaaattagacctttaaaatattttcttaatgtataaaatcgaatgactcattattatgatcagtaatagtaaatgaattttgaatcttgacaaggaatttggcactaaattaagaactctacaaatgtatacatgacttattccctagtgaattggaatttaaatagaaggaacctaaacggaggcattttaaagccatcagaaggccccttgtaaccaattatgtataattttgtctgaaacattctaaaggaatgttctgggaattatcaacagcttagattgctatctcattgtttcttatcaagcacaaataaaaaatggacacaaacaaataaaacaactctcatttaaaattacttttttacatcatttta

SEQ ID NO: 681215 - DNA, 661 bp, Homo sapiens
ttttaaaaatggaatggcaatgtcagttttattcagtcctcggcctctatacatggccatctaaagtgatggttccctttgaagtaaatgcgtctgatccactgaagayaccagtgtccagtggggaagggtcagctttgatggtgctggggggaatcattgaagaaaggaacaatgtggagcccagagaatcgcctcgtgagaatcttactccagagggtccaagagagaaggaagcaatatgacagctttaaatctctgagctccacaatttgattttaaaccacttgttggagaggtttatcagacagaacagtatgatgaaagcatgtaagagtttctgatagctccttaattgggctgtcccatagacactatagtctttagttgaaaacagtgttgtgaaaatcattttgccaggaggtatactgacagataaatataaatgattccataacgttccctgcctgtctggcttcctctgcacttgaataaacagcctcagatagtggatttacaaatgaagccctatcccaccttatgcaaccaaatcacccttagccaaagcatctataaaaagtaaaatgagctgataatatttgggagtgatatttccttttgtttgtttcactccattttggatataaataataaggtttct

SEQ ID NO: 681216 - DNA, 594 bp, Homo sapiens
tgctataaagaggaataaaaasagattttttggtgcctttttaaaaagagcccctcttcatttagagacggcatcatgccacacttcctgtcgtacatagatggccctcattatgtgcacaagaggttttctggtattataatgtggatggctaaaatattcatattttatatatgtattacagttcatattttttaaataaaatcttggatagttaacatctcatcccaagatttctggagtctgcagtcattatttgcattctgctcatcctgacatctcttcctcccactcttgatgtttggcagttttagagtgcaagtgaaaaggcctattccagttgatgccagaggagggtgggggcgtggctgttataccacattggcaagcaaggcaaacaagaaacaaacttggctaccacacagacttcaggaatgaaaatagattcaggatataatagtagttggacaacagtttggctgatccaatcacaactctagaatagcctcctcagaaacagaaatccatcattacatgctttagaactcccttctacagggaacccacgtgacttctgcttcatcctgcaaaact

SEQ ID NO: 681217 - DNA, 1992 bp, Homo sapiens
ataagagaatagcttaaaattcctgcagtatatgtggcccttcctttgtacattcttgttgtacctgacaaatcagggacatgttaattttctatataaatgataacatgtcaattaagcttacttaaatccagcagaaaatatgttatttgaaagaagtacggaccacataattttgtgaagtaaatcattctgtaaaatgtttctgttaagtcttgatattttacatccaaattttatttcaaaatgtgtttgtaagttttccctggaattgttcaaacttgtgcctaatgatccaacacaagctgaaatgtgaagggatatatgttgttctcagtactgtcaaaatgacagtcgatttgttcatagaatgattttaaatggcccattatgctttgggtccacagtaatatattgggatatttacttcatcttagattttaagcatctagaggtcggagactgtgacgctttcttatcacagagccaacaaccacaccacacccaattaaacaacacataaatgcatgcttagagataatgcttctcattccaacagaaaagaatcaccctggataaactgagagacatttacataaaaaagttgacttttaaacaagagattataagagaccaaaatgttaagacaaaagtaccagcatatcaatgctgtggcaaaggtctttctgtggatgaaaaacattttgatcttcctttcaatttattcattaagtgaatatttgggaagacttctgtttgtaattgatagcaaccacctggacagaacactgagcgtgtcctctaataaattatctctcgtgtctttaaaggcccaataagtagttacactctttatagttttgtttgttatctgcaaagtcataaacaggaacttagggattctcaaagcatgtgttagtggaataaaaactctaacatttgcttgctaacaataatagttattttccagatcataatagaacatagcagtgcgagcacatttgaatagaatctaaattcatcagtgagtccagaaacacaaatctaaggaaaagatgaggctttcccaggggaagaaattgttagartggcacagaagcaaggaaaatacagtgttgctgagattttgactgtcctcttaggccccacaggataccgagagaacaattctgtctgctactgttagagaatcatattcaactgggaatgctgtatattaactgatagacagtattatttgaaggcctggatggagattgaaatgcaggataggagatattcttaccacacagtaaatcagaccatcttggagctatcatgagacaaattatagtgttggtttacattctttctaatttgtgcttaaagcaaaggatggagtagagcagtaggaatgcaaagttcttgggcttaagaattaatatactagtggtaaagacaaggcaagaaaaataatatatgtaatcagtatgaataagtagatgcataaagttttgtttgttattgtttaattggtttattttagatcatagggatatagtttagaaattcgattggtgattgggatgggaatagaaatgtatatgtggtataataatttttatcataacaagcatttcataaatggtaagaaaaaatttatggatgagaagcaagtgatacaaccagattgtccagacacatttaaaaggaactagaacttgagtcattgaaactcaaattcagtttaatggtctgctttttcaagtagtgattcctataaaagctaatattatgtcatgaaatacatattaaatgcatagtctagtcaattgattatttatataccagttcccttcatatttaatatttgtataaagtataccatacatttagtagaatttgcatgaacattattttataaaacatactttcaagggtgattcacaatcagctaatatacagcctcagaaataaatatatgcatttttactgtgtcatatacacagaacc

SEQ ID NO: 681218 - DNA, 1706 bp, Homo sapiens
agagcagcctgtaatgaatttctcctgtggtaatcattcaccagtgcattgtgacccgtgtgtttttgctgtgctacacatttccagacttttgcagtgacttgtcagcacctagtaaaaatgaattggacgcgacccatcacttcgtgctatgccctcccagctgtctttcattctgttgagagaaggagtaggtgggaccacctggaacaccactgcagactctggggctgtggcaggatgctgagcccatctcacaggcaggttgatgcaggcacaccaagtttgtggcacttgttatgcagagtcatgttctttggtccaaatggctccaaagtggcctttgccttttgcacctgttgtttcgtgctgcacaatgagctgttcaggcggtttctttctttgagaaggcatgggtgcaaatgctggtacaattaggcatctgggcaccccatgggttcttaccaactctggtgtgaagatccattgatggcaggggacaaggctatcgtctgagtcgcacgcatgagcatcgccatctgcaactgtaattctagccacgtggtcaatcgtaagaaggggtttataaccagcttttacagcatttgtggatcatgatgattaaacaacagatgggaaaccaaccaagatttctaatctctacctcttcattgatggagtgagcaagggctgagggagtcactttgtggcctctctctatggttcaatctataattagggtaggcacgactcctcctgactttctgcaactgttttctacactctttattatcaaatcttaagcacaaatttttggtttgggaaatayggccctgaaattttggtaaggtcccaggaatcccatggtgaagagaaagctcttcaattaggattatcaggtaaaatatagggcatctcatcaaatttacatttcagataatgagcaatttttcagtttaagtgtgtcccaagtattacaggggacttaaaaaaaatcaagatgctctttaaaaaattgtggtaaaatctacataacatttaccattttaacccttttgaagtatacattttaggggtgttatacatattcacagtgttgtgcaaccattaccactatccatttctagaactttttcattacctgaactctatacccattaaaaaacaactcccggttctttcttttccccagcccatggtaacttctaatctactctttgtctctagaaattttcctattctaggtactttctataagtgtaatcatatcatatttgtccttttgtgtcggtttattccacttagcatgatattttcgaagtccatctctgtggtaacatgtatcagaatgtcattcattttcaggatgaataatatttcattgtatgtgcacaccatattttgttcattcatctgttgataggtatttgtgctgtttcaaccttttggctattgtgaataatgtgtctatgaatatcagtgcacagatatctgtttcagtccctgctttcaattatttttggtgtatatacctagaagtggaattgttggatcatatggtaattctatgtttaacattttgaggaactgctgtactgtggctgcgtgggacatttttatgtgctaaatctggcaactttccaactgtttcaacagaattttaatctgaatattatatttagcctaaattatcatatttaagcaga

SEQ ID NO: 681219 - DNA, 476 bp, Homo sapiens
cacctggtagctctttgctgggggctggggacataggggtgaacaaggggctttctagtgtcactatgcttacagtccagtggaggatacaaatgtgcaaatgcaaaatcacaatycagcatcctgagccctaatagggagagagagggatgtaaaatatgggaccagcttgaaccatgaaaaaaacctaaacccccaattatatgaaaactcccaaattataaagtcaatgactacagcaagaacacctctctcttatctaaatctgtggatggggaacctaggaaaacataggcagcctgtcagctataacttggaacaagcgtcaggagtggaatggtccaagtgtggagcagctggatttgcttctctgaattcctaatcatggttccagcctacatcacaccaggctgagctggacttggatgtgattctagggaacacgtgagccttggccctcaggaaatgtctctttt

SEQ ID NO: 681220 - DNA, 1107 bp, Homo sapiens
gcacttgttgaaggttagttattacttcttctctatcctaattaaacagttattgaacatctaccacgtaccttgctgatatggtttggctgtgtccctacccaaatctcattttgaattgtagcttccataattcccatgtgtcatgagagggacccagtgggagacaattgaatcataggggtgggtctttccaatgctgttctcatgatagtgaataagtctcatgagatctgatggttttgcaaagaggagttcccgtacacaagtgctcttgcctgctgccatgtaagatgtgtcttgcttccccttcaccttccaccatgattttgaggcctccccagccatgtggaagtgtgagtcaattaaacctctttcctttataaattacccagtcaggtatgtctttattaggagtgtgagaacagactaacacacttgccatgacataggattgatagtgggaacttttcatgctggtacatcaacactcctttagaattggctaacagctcaggacccaattagaatcactcccagtggctcttcccaggctggataaatggtgactaatattcaggggactctggtaaatgaggtgatggcactttttctccagcatccctcacccctcagcttggtggccactaacaccggtggtactgctggagttggcaccttttttgactctgcatcttcagggatttttctcctctgaggagagtagagaaaaggtatgagtagttccaggctgggaaattcagaattctgcctcccagttcagtcagggaataaggcagcttgtggtgcacaaagccatttttttcttttgtcaggagcaatttgataactcacaccagaaggaaagctatggaaaaaccaatcccagatgtggagaaaatactggtgaggatgtcaattggtataatcacagtggaaaactagtgaatttccaaaactgaatctggaccagtgaccaaataattccattcccgkttacaatcccaacagaaattgtggcagccagactctaagatgaccccctgtgatatccacttcctggcattcattctcttgtgtaatcctgtacctctgagggtggatggg

SEQ ID NO: 681221 - DNA, 633 bp, Homo sapiens
caggtgtgagccaccgtgcctggccaaggcaggcattatattaaatgccctggttgatgaagccgtagaggctctgtaatttctgtctgaaatggtctcttcttgtattaggcaaatcaggcgmgccctgttggcaggcttggatttcctgtctgtctcttggggacgttgcttgagtggaagtcacccacctgacagctcccttctactttgctgctttataaatacattgacatatcatgtctattttagtactctaaagctgagggtcggcagggggaccagtgaggaagttgtaggatgtaagtgttcagtcttctgtttgtaaccagaagctgtaaaccagcagagacctcagacaaatcatatccctcttggggtgaccaggtgcagatcttccagggagccgtctaatggaatttcctggttaatggacacagagaaccactgctaagaacgatttccttttctctttcaatctgcagcactttttatgaagactggtcttttgtgatggatgaagaaaggtccagtatgcttcctaccatggcagcaggtaagcctggcccagaccagggtgcagggccttgtgacacttggcagaggggctgccttggggcagttccacagcgc

SEQ ID NO: 681222 - DNA, 627 bp, Homo sapiens
accttcacacttatggtaccttgaaaactgctgccttgtgagttatcactgttgcaaagcatgaatttttttctttttactttttggtcaactattttttttgggggagagggggagggtcccgttttttctgtcctgtatgttttccttccctttgggttgcttatgttaatgaccaagaattatttgttctatatttttccatgcrtacacaattatttacagataaaatagccatgtatatatacacatatatgtagccttattgccattgttttacaaaaatagaatcatacataatgctgtgcatttttattttttatcttggtactcctgcactgaaacatttccaagttatagttctttttttttaattttttatattttttggagatggtgtctcactctgtcgccagattggagtgctgtagtgcgatctcagctcactgaaactctctggttcaagtgattctcctgcctcagcgtccggagtagctgggattacaggcacgcaccaccatgcctggctaatttttgtattttagtagagatgtagtttccctatgttggccaggatggtcttgatctcctgacctcgtgatctgcccgcctcagcctcccaaagtg

SEQ ID NO: 681223 - DNA, 1742 bp, Homo sapiens
aattattaaagcaatataaaggatatttagcattaaatgagaacaatgaactaaaaatataaccacaatagttgctggagttcaatatctggtttaacaaaaagtgtctctcaaaacatctataatttcttacaacataatggagagttttcctcagtctaagctgaatccaatgtttttcctgcagtatgattagaaatgtaagaatgaaaggcacacataatagccagttttaaagagctgtggggatggcaagcagatgttcctgaaatactggtgcaagagaacaaagtccacacaacgttttcctctttgtttaacattggcattgatttgctatttacagtagtttgcaaaaatacattataaaaactgaatgaggttctgtttctaagtttaacttagtaacatacatacatacttcatctgcaaaaatatttgcaggatctgaagtactaaagtgacactaatactgaaacacaggtaatcaaaagtaccaaagcactgataatgagtcaccatcatcaagataatccaggtaaatattgcacacttcttgtcagttgctgctatgacctttacatatccaaccgcaaaaggaatcctttatggctttttgctgtatcacttattcgaagaaaggctattttaagtcccataacaatgagtgaagattgtcattgaacatgaggcctaggtttcaaaattagttttcctgtctgcaaaaatgaaaasacagaattttttcaatacacagttctagtaaaaataccactgcttatttataaaccttaaagggtatgtgcaaggaataagaacgcttctctatagtcaagattaaacaattaatagttatgctttcagagcttcctttgtgtggagcttccttctgagctctttattttaaaatactacatacatctttttttctcctcttttcattttttgtagagacggtgtcttgctatgttgcccaggttcatctcaaactcctggactcaagcaatcctcctgccttggcctcccaaagtgctgggattacaggtgtgaaccaccatgcctggcctctttattctaatttctgtaatgaataggtattacttgtttaatgactttttaaattgaaggctaagacacttttataaataaaataagcaaatcaaaatagaagctacctatcaaaattgtgagacacccttattacacactggtacatgatagtttttaatttacttaaagacagggtctcactgtcgtccaggctagactgcagtggtatgatcacagctcactgcagcctcaaattcctgggctcaagcaatcctcctgcctcagcctcccaagcagctgggactacaggtgtgcaccacctgcctggctaatttttacatttttttgtagagatggggtcttgctaatgttgcccaggctggtctcaaactcctggactcaagagatcctcctgcctcagcttcccaaaatgctgggattagaggcatgagccaccatgcccagtctcccatcatctacttttaaaaacacaataggttcatatgtccatagtccacaaattaatctatgactctatatttacaaataacatatatagcatatcacttgataaataacagtagtttataaaaccaatatccgctgagccatttttggtcaataacaaacaaccactgtacttcactgaatctaagatgcatcagttataagatgcatcatgattttatgtc

SEQ ID NO: 681224 - DNA, 1742 bp, Homo sapiens
aattattaaagcaatataaaggatatttagcattaaatgagaacaatgaactaaaaatataaccacaatagttgctggagttcaatatctggtttaacaaaaagtgtctctcaaaacatctataatttcttacaacataatggagagttttcctcagtctaagctgaatccaatgtttttcctgcagtatgattagaaatgtaagaatgaaaggcacacataatagccagttttaaagagctgtggggatggcaagcagatgttcctgaaatactggtgcaagagaacaaagtccacacaacgttttcctctttgtttaacattggcattgatttgctatttacagtagtttgcaaaaatacattataaaaactgaatgaggttctgtttctaagtttaacttagtaacatacatacatacttcatctgcaaaaatatttgcaggatctgaagtactaaagtgacactaatactgaaacacaggtaatcaaaagtaccaaagcactgataatgagtcaccatcatcaagataatccaggtaaatattgcacacttcttgtcagttgctgctatgacctttacatatccaaccgcaaaaggaatcctttatggctttttgctgtatcacttattcgaagaaaggctattttaagtcccataacaatgagtgaagattgtcattgaacatgaggcctaggtttcaaaattagttttcctgtctgcaaaaatgaaaagacagaattttttcaatacacagttctagtaaaaataccactgcttatttataaaccttaaagggtatgtgcaaggaataagaacgcttctctatagtcaagattaaacaattaatagttatgctttcagagcttcctttgtgtggagcttccttctgagctctttattttaaaatactacatacatctttttttctcctcttttcattttttgtagagacggtgtcttgctatgttgcccaggttcatctcaaactcctggactcaagcaatcctcctgccttggcctcccaaagtgctgggattacaggtgtgaaccaccatgcctggcctctttattctaatttctgtaatgaataggtattacttgtttaatgactttttaaattgaaggctaagacacttttataaataaaataagcaaatcaaaatagaagctacctatcaaaattgtgagacacccttattacacactggtacatgatagtttttaatttacttaaagacagggtctcactgtcgtccaggctagactgcagtggtatgatcacagctcactgcagcctcaaattcctgggctcaagcaatyctcctgcctcagcctcccaagcagctgggactacaggtgtgcaccacctgcctggctaatttttacatttttttgtagagatggggtcttgctaatgttgcccaggctggtctcaaactcctggactcaagagatcctcctgcctcagcttcccaaaatgctgggattagaggcatgagccaccatgcccagtctcccatcatctacttttaaaaacacaataggttcatatgtccatagtccacaaattaatctatgactctatatttacaaataacatatatagcatatcacttgataaataacagtagtttataaaaccaatatccgctgagccatttttggtcaataacaaacaaccactgtacttcactgaatctaagatgcatcagttataagatgcatcatgattttatgtc

SEQ ID NO: 681225 - DNA, 1742 bp, Homo sapiens
aattattaaagcaatataaaggatatttagcattaaatgagaacaatgaactaaaaatataaccacaatagttgctggagttcaatatctggtttaacaaaaagtgtctctcaaaacatctataatttcttacaacataatggagagttttcctcagtctaagctgaatccaatgtttttcctgcagtatgattagaaatgtaagaatgaaaggcacacataatagccagttttaaagagctgtggggatggcaagcagatgttcctgaaatactggtgcaagagaacaaagtccacacaacgttttcctctttgtttaacattggcattgatttgctatttacagtagtttgcaaaaatacattataaaaactgaatgaggttctgtttctaagtttaacttagtaacatacatacatacttcatctgcaaaaatatttgcaggatctgaagtactaaagtgacactaatactgaaacacaggtaatcaaaagtaccaaagcactgataatgagtcaccatcatcaagataatccaggtaaatattgcacacttcttgtcagttgctgctatgacctttacatatccaaccgcaaaaggaatcctttatggctttttgctgtatcacttattcgaagaaaggctattttaagtcccataacaatgagtgaagattgtcattgaacatgaggcctaggtttcaaaattagttttcctgtctgcaaaaatgaaaagacagaattttttcaatacacagttctagtaaaaataccactgcttatttataaaccttaaagggtatgtgcaaggaataagaacgcttctctatagtcaagattaaacaattaatagttatgctttcagagcttcctttgtgtggagcttccttctgagctctttattttaaaatactacatacatctttttttctcctcttttcattttttgtagagacggtgtcttgctatgttgcccaggttcatctcaaactcctggactcaagcaatcctcctgccttggcctcccaaagtgctgggattacaggtgtgaaccaccatgcctggcctctttattctaatttctgtaatgaataggtattacttgtttaatgactttttaaattgaaggctaagacacttttataaataaaataagcaaatcaaaatagaagctacctatcaaaattgtgagacacccttattacacactggtacatgatagtttttaatttacttaaagacagggtctcactgtcgtccaggctagactgcagtggtatgatcacagctcactgcagcctcaaattcctgggctcaagcaatcctcctgcctcagcctcccaagcagctgggactacaggtgtgcaccacctgcctggctaatttttacatttttttgtagagatggggtcttgctaatgttgcccaggctggtctcaaactcctggactcaagagatcctcctgcctcagcttcccaaaatgctgggattagaggcatgagccaccatgcccagtctcccatcatctacttttaaaaacacaataggttcatatgtccatagtccacaaattaatctatgactctatatttacaaataacatatatagcatatcacttgataartaacagtagtttataaaaccaatatccgctgagccatttttggtcaataacaaacaaccactgtacttcactgaatctaagatgcatcagttataagatgcatcatgattttatgtc

SEQ ID NO: 681226 - DNA, 594 bp, Homo sapiens
tctcttatggtagggttaccctagtacatcagcatcctgattagggatttcagatgccatgcctccarcaggtaagcttattaaacaattgcttctcaggaacatgcctactcgtctatacttccttctgtgatgtggggctgagactctgcaaatgaattccttctttgccagatagcttcctgttaggagccactgatgtggaggacacttgagggagattggaaagctggaggagggaaaaataacttgctcttttctgttttgcactgtcctgttggcatcactctggtgatggccctccactgcagcagcaacatgtaacagcaccagctggcagcatacccttctgagttctcagtcccacttccatagggcccatcctccaagaatctaggttccaaaaaccccatctttgtaactttgtttctcaagccctgtcttagtctaatcaggctgctataacaaagtatcttagactgggtaattaagaaataatacaaatttatttattacagctctggaggctgagaagtccaagatcaaggtgctggctgatttggtgtctggtgagggctcactctctgcttccaa

SEQ ID NO: 681227 - DNA, 662 bp, Homo sapiens
tatgaatatcagcagatttctcaacagaaaccttgcatgccaggagagtaggatgatatattcaaagttctaaaagaaaaaaaattgccaaccaagaacattatacctaacaaagcactcctgcagaaagaagagaaataaagactttcccagaaatacaaaagctgtggaagttcatcactgttagacctgccttataagaaatgctaaaaggagttcttcaagttgacacaaaatgatgctaactaacaatataaaaatataaaactcaccataaaggaagacccagtggtagtcttcctttccacagtgaagattgatcraacctcaaaatctgttttataagaagaaaaaaaaaaacagtattttttaaacactgtcctaaaaataattttgttcacctcttagtaactttaagtctttaataaaatatttcaggcccagcatggtggctcatacctataatcccagcactttgagaggctgaggccagcagattgcttgtgctcacaagttcaagatcagcctgggcaacatggtaaaaccccatctttacaaaaaatacaaaaaattagccaggcattgtggtatgcacctgtggttccagcttcttgggtggctgaggtgggaggattacttgagcccaggagattgatgctgca

SEQ ID NO: 681228 - DNA, 1295 bp, Homo sapiens
tttttgggagacgagtctctctctatcttccaggccggagtgcaatggcatgatctcggctcactgcaacctccgcctcccgtgttcaaaggattctcctgcctcagcctcctgagtagctgggactacaggcgtgtgccaccacgcctggctaattttttgtatttttagtagagacagagtttcactgtgttagccagaatggtctggatctcctgacctcgtgatccgcctgtcttgrcctcccaaagtgctgggattacaggcgtgagccaccgcgcccggcctcatttctttatattgctgcatagtactcttctgtgtggctgtgccatagattattcaaccagttccttcttggtggatgcttgagtttctcacgttatgctatcactagcagtgccgcagtgaaaaaccctgtgtgtctgtgatctggggaatggattcctcgttcccctcaggggattttaaatcctaacttatgatacatgttatgcaggagaggttcgtggtgctgtgggatttcataacaggggctctgccctatcagagtagtcactaacagcttttcttgaagaggagctggtggtcacgctgagatctgaaggaaaaataggaggtgattagatgaagagaggaagaagcaggcagtagcatgtgttaaggctccgctgccggagtgagcctgatacattcgagtaactgatagaaagctggtgagtttgcagctcaggaagtgagggaagggatggaggggaccatgtctttgcatgggttggggtcggtggagatgaaaagaagtagatggccgggtgcggtggctcatgcctgtaatcccaccactttgggaggccgaggcgggtggatcacctgaggtcgggagtttgagacgagcctgaccaacatggagaaaccccgtctctactaaaaatacaaaattagccaggtgtggtggcacatgcctgtaatcccagctgctcaggaggctgaggcaggagaattgcttgaacccgggaggcggagtttgcagtgagccgatcatgccattgcattccagcctgggcaacaagagcgaaactctgtctcaaaataaaaaagaagaaaagaagtagatgaattgaggtgaccagcacgaggcaaaatgcacagaacttggtgattttattagttgggacactggttcacctgccattttgaagacttaaaataactggtttaaacaacaaacgattgtttccttttttttttttttttttttttttgagacagtttcttgctatgttgcccagcctgga

SEQ ID NO: 681229 - DNA, 2398 bp, Homo sapiens
gtttccaaggtggcttagtctcacagctggccagctggtgctggctgttggctgaaggtttcaacacctctccacatgggcctcttcatggggctacttgagtgtcctgacaacatggcggttggcttcgcctgagcaaccagcccaaaagggaacagggcagaagctagagggcccttgttgctgtcccctgggaagtcacacaccctgctgcattgcctcacttctgtaatgtcctgttagtcacacaactcagccctggtcagtgtgggagggaacaacacaagggtgtggagaccaggagccaagcatcactgggggccatggtgaggactggagaccacaggtgccattacagaaggaagcagacctggaggcaaggcaggcaggaatgacagatactgaccacaatgatgatgtctttggagctcacagtctagaggaagacagaagaaaacaatgccctcgttaattcataattactcacctaagaacaccctagtaatggggggaaaaaaagagggtaggacccaagaaggggcagcaactgaccttctctggaggagtcacaggggtacttgcagaggtggtgacatttgcattggaccttgtagggaaataaaaggtgggatgagggcaccccaggcaaaggcgggagatgggaagtgggtggaatctagctttgctgagtggttgaatggggacagcacaggagagtgggcagaaaaagactctcaagcttcccaagccccacctgcctgtgggggacctactcccaggccctcctctgcttcctgcccccacaactcaagatctctggctgccaagggagaatgggcctggtttctctgcaaccaggacccatcttccccagtgaactggccctctaggaggacaagttatgggccctgcccttctgggagaaaggcctgactcctgctgggccctgccacccaccccagctgagagtcaggggacaggggagtggagctctctgtttcccrgagtcactgggtcttggccagccccaccattccgtgcccctttctgggattggtaacagccagtcagggtcctgccattgcacttggccattcctgagctcccccaatcccctgctacaacacacacacaaattcctacccgctccaggccagctgggatcagcttcagcagggccggctcgagccactttgcttaaggcatcagcctccccagggtgcattaggcaggcttcactggccagagaaggaccaccttgtagggaaacgggctccaggggttcaaatccccaaagggaaggggctgcctggccccagctgtagaaacaacaaaggagtgcagcacacagtggcccctccctcctcacccatgcaggcagtgatgccacgctgcatcctaaatgttcaaggccagagtcacgtgcatgcctcccatgggcagggctcagtacccaggacctcaggccccctccccacagggccccagcagtggagaggctgccaccctggacccaggcaggaggggaggagcagctgcccactcccggcatgcaccctctgggccccgcactgaacaccagcctgctagcatcccccaaaccaacccgaatccaagataaaattccccctggcccccaagctcaggagggcagtctgtgtcccagagccttcaaaagctccagaaaagtgaaacctctgcttgaacagctcccagccctgcagcagagaaaaggggagaaatcacaccaataatcaccactggcagcgtttgcctctgagctacaaaatgttttcacttattttccaccatcagatgcccactgcaactctgcaaaaggaaagattttatccttattttactgatggggaagctgatgcccagagaagggaagggacctgtccaagtgcacagttaggaagctaccgagccagcattaagccaggcattttgatgataaacctgggtcctctttaaatcactcatttactcaagcattcagtcaacttgcagcaaacatgcactgagctcttcccacaggacaagggatgggctcaccaccccactgcaatgatgagcaaagacagacatggttccataagtttacagcttagttggggaaacagtccttaaataagcctttaaaaatatgtaattgcaagtgaaagagcactgtgaagaaaagaatgatttaagtcattaaaaaaaaatcagaggaggagtgacttcccccaaagggtaaccagaaaagagtattctgaggaggtactttgaaaccatatcaaggcacagcagaaatgagtatcaggattgattaataatgtctgccatggtcactggattcagaagtggtggcatgcatgccagatacttgtttatctggtttatgccctcacta

SEQ ID NO: 681230 - DNA, 2398 bp, Homo sapiens
gtttccaaggtggcttagtctcacagctggccagctggtgctggctgttggctgaaggtttcaacacctctccacatgggcctcttcatggggctacttgagtgtcctgacaacatggcggttggcttcgcctgagcaaccagcccaaaagggaacagggcagaagctagagggcccttgttgctgtcccctgggaagtcacacaccctgctgcattgcctcacttctgtaatgtcctgttagtcacacaactcagccctggtcagtgtgggagggaacaacacaagggtgtggagaccaggagccaagcatcactgggggccatggtgaggactggagaccacaggtgccattacagaaggaagcagacctggaggcaaggcaggcaggaatgacagatactgaccacaatgatgatgtctttggagctcacagtctagaggaagacagaagaaaacaatgccctcgttaattcataattactcacctaagaacaccctagtaatggggggaaaaaaagagggtaggacccaagaaggggcagcaactgaccttctctggaggagtcacaggggtacttgcagaggtggtgacatttgcattggaccttgtagggaaataaaaggtgggatgagggcaccccaggcaaaggcgggagatgggaagtgggtggaatctagctttgctgagtggttgaatggggacagcacaggagagtgggcagaaaaagactctcaagcttcccaagccccacctgcctgtgggggacctactcccaggccctcctctgcttcctgcccccacaactcaagatctctggctgccaagggagaatgggcctggtttctctgcaaccaggacccatcttccccagtgaactggccctctaggaggacaagttatgggccctgcccttctgggagaaaggcctgactcctgctgggccctgccacccaccccagctgagagtcaggggacaggggagtggagctctctgtttcccggagtcactgggtcttggccagccccaccattccgtgcccctttctgggattggtaacagccagtcagggtcctgccattgcacttggccattcctgagctcccccaatcccctgctacaacacacacacaaattcctacccgctccaggccagctgggatcagcttcagcagggccggctcgagccactttgcttaaggcatcagcctccccagggtgcattaggcaggcttcactggccagagaaggaccaccttgtagggaaacrggctccaggggttcaaatccccaaagggaaggggctgcctggccccagctgtagaaacaacaaaggagtgcagcacacagtggcccctccctcctcacccatgcaggcagtgatgccacgctgcatcctaaatgttcaaggccagagtcacgtgcatgcctcccatgggcagggctcagtacccaggacctcaggccccctccccacagggccccagcagtggagaggctgccaccctggacccaggcaggaggggaggagcagctgcccactcccggcatgcaccctctgggccccgcactgaacaccagcctgctagcatcccccaaaccaacccgaatccaagataaaattccccctggcccccaagctcaggagggcagtctgtgtcccagagccttcaaaagctccagaaaagtgaaacctctgcttgaacagctcccagccctgcagcagagaaaaggggagaaatcacaccaataatcaccactggcagcgtttgcctctgagctacaaaatgttttcacttattttccaccatcagatgcccactgcaactctgcaaaaggaaagattttatccttattttactgatggggaagctgatgcccagagaagggaagggacctgtccaagtgcacagttaggaagctaccgagccagcattaagccaggcattttgatgataaacctgggtcctctttaaatcactcatttactcaagcattcagtcaacttgcagcaaacatgcactgagctcttcccacaggacaagggatgggctcaccaccccactgcaatgatgagcaaagacagacatggttccataagtttacagcttagttggggaaacagtccttaaataagcctttaaaaatatgtaattgcaagtgaaagagcactgtgaagaaaagaatgatttaagtcattaaaaaaaaatcagaggaggagtgacttcccccaaagggtaaccagaaaagagtattctgaggaggtactttgaaaccatatcaaggcacagcagaaatgagtatcaggattgattaataatgtctgccatggtcactggattcagaagtggtggcatgcatgccagatacttgtttatctggtttatgccctcacta

SEQ ID NO: 681231 - DNA, 2398 bp, Homo sapiens
gtttccaaggtggcttagtctcacagctggccagctggtgctggctgttggctgaaggtttcaacacctctccacatgggcctcttcatggggctacttgagtgtcctgacaacatggcggttggcttcgcctgagcaaccagcccaaaagggaacagggcagaagctagagggcccttgttgctgtcccctgggaagtcacacaccctgctgcattgcctcacttctgtaatgtcctgttagtcacacaactcagccctggtcagtgtgggagggaacaacacaagggtgtggagaccaggagccaagcatcactgggggccatggtgaggactggagaccacaggtgccattacagaaggaagcagacctggaggcaaggcaggcaggaatgacagatactgaccacaatgatgatgtctttggagctcacagtctagaggaagacagaagaaaacaatgccctcgttaattcataattactcacctaagaacaccctagtaatggggggaaaaaaagagggtaggacccaagaaggggcagcaactgaccttctctggaggagtcacaggggtacttgcagaggtggtgacatttgcattggaccttgtagggaaataaaaggtgggatgagggcaccccaggcaaaggcgggagatgggaagtgggtggaatctagctttgctgagtggttgaatggggacagcacaggagagtgggcagaaaaagactctcaagcttcccaagccccacctgcctgtgggggacctactcccaggccctcctctgcttcctgcccccacaactcaagatctctggctgccaagggagaatgggcctggtttctctgcaaccaggacccatcttccccagtgaactggccctctaggaggacaagttatgggccctgcccttctgggagaaaggcctgactcctgctgggccctgccacccaccccagctgagagtcaggggacaggggagtggagctctctgtttcccggagtcactgggtcttggccagccccaccattccgtgcccctttctgggattggtaacagccagtcagggtcctgccattgcacttggccattcctgagctcccccaatcccctgctacaacacacacacaaattcctacccgctccaggccagctgggatcagcttcagcagggccggctcgagccactttgcttaaggcatcagcctccccagggtgcattaggcaggcttcactggccagagaaggaccaccttgtagggaaacgggctccaggggttcaaatccccaaagggaaggggctgcctggccccagctgtagaaacaacaaaggagtgcagcacacagtggcccctccctcctcacccatgsaggcagtgatgccacgctgcatcctaaatgttcaaggccagagtcacgtgcatgcctcccatgggcagggctcagtacccaggacctcaggccccctccccacagggccccagcagtggagaggctgccaccctggacccaggcaggaggggaggagcagctgcccactcccggcatgcaccctctgggccccgcactgaacaccagcctgctagcatcccccaaaccaacccgaatccaagataaaattccccctggcccccaagctcaggagggcagtctgtgtcccagagccttcaaaagctccagaaaagtgaaacctctgcttgaacagctcccagccctgcagcagagaaaaggggagaaatcacaccaataatcaccactggcagcgtttgcctctgagctacaaaatgttttcacttattttccaccatcagatgcccactgcaactctgcaaaaggaaagattttatccttattttactgatggggaagctgatgcccagagaagggaagggacctgtccaagtgcacagttaggaagctaccgagccagcattaagccaggcattttgatgataaacctgggtcctctttaaatcactcatttactcaagcattcagtcaacttgcagcaaacatgcactgagctcttcccacaggacaagggatgggctcaccaccccactgcaatgatgagcaaagacagacatggttccataagtttacagcttagttggggaaacagtccttaaataagcctttaaaaatatgtaattgcaagtgaaagagcactgtgaagaaaagaatgatttaagtcattaaaaaaaaatcagaggaggagtgacttcccccaaagggtaaccagaaaagagtattctgaggaggtactttgaaaccatatcaaggcacagcagaaatgagtatcaggattgattaataatgtctgccatggtcactggattcagaagtggtggcatgcatgccagatacttgtttatctggtttatgccctcacta

SEQ ID NO: 681232 - DNA, 595 bp, Homo sapiens
gtagatgtgtaccatttactaatacatccttttggaaaatgcgtattaataacatattaaggagtaaattgacgttgtgcaaagtgagcctgtgagtttaaatgtatggattgtacaccttgctcttcctaattgcagatttaacaggatttgatgacctaatgagtttatttctgaatgatttatatttctttgtcagttcaatgatttagtattttaaatttttttaaatcacattttattgagataatgctattagtgtttctttcccatcacttaacaaagttaagtcactcctctcccaccccacttttgtacctaccaatgtttttttcacagttacaggctgattggcttgacgtgtcttaggataccacccaaagagagcttcattttataaataccaagctcattttcctaaatattttcaaaaagatagatttatcctcatatagtawattcagattaataattttggaaagggtcatgtgaccatggtattacatggctgtggaagaccctccaagatcttgttttgggatagaaggactcagacatccaaacttttaaattaatgaacttattaaattctaaa

SEQ ID NO: 681233 - DNA, 588 bp, Homo sapiens
cccctgcctcagcctccagagcagctgggaccacaggcacacaccaccacacccaactaattttatttatttatttatttattttgagacagagtttcgctcttgttgcccaggctggagtgcgatggcgtgatcttagctcaccacaacstccgcctcccgggttcaagcgattctcctgcctcagcctcccgagtagctgggattacaggcatgcaccaccatgcccggctaattttgtgtttttagtagagacgggatttctccatgttgctcaggctgatctcaaactcccgactgcaggtgatctatccgccttggcctcccaaagtgttgggattacaggcatgagccaccacgctcaaacttaatttttaattttgtagagacaaggtctcactatgttgcccaggctggtctttaattcctgggctccagcaatcctcctgccttagcctccccaaaaggcatgaagccaccgcatccagcctcccccaggggattctaaggtgcagcgtggggtctgaggacagtggccctggccctgtcgtacaggattcagtaagaatctttcccatctggaatcat

SEQ ID NO: 681234 - DNA, 1197 bp, Homo sapiens
tattttataatatttaacacaagttgtataacaactttccccctttaatatacaattttgtctgtttttatatgtaatttatttttatttagattccatttggttacttatggaaatgtatttatgactataacagaaatcactggagttttatttcttgaaattcactctatatccaactctgcacaaatacggtgtatcaatgaagtatgctactgaataagttatgtttaagaactgtaagtctatttttatgttaaagtgaacaggtagggcctgtttcaactaagagaacaacataaagtctgtataaaaccagtatttgccattaattacttaaaaggaaaatgttttgtttcgatttttattacttgtacacttcaaaatttgtgcctagccagagaatcctttttttaagattatttttacgtgattatattaaggatcttcttctgcttcccagatgatttttctcttcaacttcccaaacatgatcctgggttctaggtcagtcatactgacactgactatatcccactcagaaaaaaagtgataatcgctcacacacacaatttttttctttctacccatgggttattttctgctggcagcaatagtttcatctgctactgctactgctgccctaaaacacccactcccaaggcctgcatcaaggcccacagcaggggatggggctccaggaggaagcggggggtcccactcagagaggcacaactccattttaaacattttcttttacaaagagaaattatcagggaaaggaaaaggatcccatagctatggggtgcttaacaggcctgttgagtgaggagagggatttagttttatttggttgggctagagctcaagttcaaattctcagtttatggaaaggatataatcaggtgagaagtttacttttattaaactacaagcctgacttaaattttttccctccaayaaaactgaagaaacaggcaacaagatataccgaaatgcctttcaatagagccctaaacacaggctttcaataacaggaaaaaaaccaatcaaaagggaaaaaaggagactatcatatctgcaagcaaacaagaactccttagactttgactgcctcaatgctacacagattaaagcaactttatctcataagctgtgggttaagataaacttgatagaaattctgagctctggtat

SEQ ID NO: 681235 - DNA, 616 bp, Homo sapiens
ggtattcttgttgtagcagcctgtaccgaccaagacacctccctggtctgcctcttggaaactgcctttaggtaataagctgggaaaatggtagggcttgttttccttctttcagggatcaaagtcctgtgctgcctgttatacagtatcggaaatgagtgtttcatatatttttgtctggttttctagttgtttattattgcataatagcagttaatccttcatgtgcagaggcagaaatccttaaaaaaatgctttttaatccatatttttctgtccgataccagtttttccattttacttataagaccctcctgccarcagcctttaattggtcattcatttctgcaacatattgataagcacctgctaagtgcctgatgtggtcagacagtgcaggtacaaaaaatagaagacatagttgctgccctttaggaccttattgttttgtgagcaatttagacaggtaagtattcacaataatatcatattagtaacactggccacatgtcccaaagagtagataaacatggaggagataattattaatttggcctgggaatttggggcaggcttcctagaggaagtagaattcagctgagctttgagggatgaa

SEQ ID NO: 681236 - DNA, 616 bp, Homo sapiens
ggtattcttgttgtagcagcctgtaccgaccaagacacctccctggtctgcctcttggaaactgcctttaggtaataagctgggaaaatggtagggcttgttttccttctttcagggatcaaagtcctgtgctgcctgttatacagtatcggaaatgagtgtttcatatatttttgtctggttttctagttgtttattattgcataatagcagttaatccttcatgtgcagaggcagaaatccttaaaaaaatgctttttaatccatatttttctgtccgataccagtttttccattttacttataagaccctcctgccagcagcctttaattggtcattcatttctgcaacatattgataagcacctgctaagtgcctgatgtggtcagacagtgcaggtacaaaaaatagaagacatagttgctgccctttaggaccttattgttttgtgagcratttagacaggtaagtattcacaataatatcatattagtaacactggccacatgtcccaaagagtagataaacatggaggagataattattaatttggcctgggaatttggggcaggcttcctagaggaagtagaattcagctgagctttgagggatgaa

SEQ ID NO: 681237 - DNA, 662 bp, Homo sapiens
aaatgatttaaaagttctatctcttccaatattacatacattaattttaaataatattatttcattttgcaaaatattgatgtataaatacataaattaaaaaattgtmcatcctccaaagagctatccagggttaatattttgtgctgcgcttcccttaaaactcacattgaaggacaaagagtataaatttgcataaatatatagtttaggtatttatttgtgactttcaagtatcgtattataagtagtttagaattaccataagtcatataatattggcataagtaatcgttttatataaaaatattattaaatctatgaagtgacacaggagcaaatataaatgacctgaatacaagtaaaaatgagatatggaataaacaaaaggtcagaagaagatgaacatttattgaatgtttaatgttaatatattaaagaaagtgtgtttttttcacattgcttaatacaacaaactccgtgacatgagttcacctgtataacaaacctgaacatgtacccagaacctaaaataaaagttaagataaataaataaatatatatattaaattcttcgaaatattctaacagatatttttatcatcacttgtttcataaataaacaggtgtttgtttaattaaaggaatgaattcattattct

SEQ ID NO: 681238 - DNA, 662 bp, Homo sapiens
aaatgatttaaaagttctatctcttccaatattacatacattaattttaaataatattatttcattttgcaaaatattgatgtataaatacataaattaaaaaattgtacatcctccaaagagctatccagggttaatattttgtgctgcgcttcccttaaaactcacattgaaggacaaagagtataaatttgcataaatatatagtttaggtatttatttgtgactttcaagtatcgtattataagtagtttagaattaccataagtcatataatattggcataagtaatcgttttatataaaaatattattaaatctatgaagtgacacaggagcaaatataartgacctgaatacaagtaaaaatgagatatggaataaacaaaaggtcagaagaagatgaacatttattgaatgtttaatgttaatatattaaagaaagtgtgtttttttcacattgcttaatacaacaaactccgtgacatgagttcacctgtataacaaacctgaacatgtacccagaacctaaaataaaagttaagataaataaataaatatatatattaaattcttcgaaatattctaacagatatttttatcatcacttgtttcataaataaacaggtgtttgtttaattaaaggaatgaattcattattct

SEQ ID NO: 681239 - DNA, 633 bp, Homo sapiens
agccttgaactccagcctcaaactcctgagatcctctagcctcagcatcctgagtaactgggactacaggtgcatgccaccatgtccagctaacttgtatttatttattttttttgtagagacagggtctccctatgkttcctaggttggtcttgaactcctgggctcaagccgtcttcctgtcatggcctcccaaagcacagggatgttttaaactgttagtggaggggaggtttcgctaaactcccccaacctagggtgatctgaaaggacttcttggaagaaataagacctcagttgtatcttaaggaagagtaagagtaagccaatgaagatgggagttgggatggaaaaggggaaggggaggctgaaaagggagagtggaggttcctgccatggtaaacagtgtgtgcaaatggggcatggaagaagggagggagggagagagggaaagaaattaatacagagagaaaaacaccaagattcaaagacaccaagatgttttggtctggaacgtggatttcaggtccttatgctgatctgtctcccttaaatacaatgagtgccttagaaaggaaaccatattatttattactcccttaatagaaagtgcttctttacagtagtggatat

SEQ ID NO: 681240 - DNA, 633 bp, Homo sapiens
agccttgaactccagcctcaaactcctgagatcctctagcctcagcatcctgagtaactgggactacaggtgcatgccaccatgtccagctaacttgtatttatttattttttttgtagagacagggtctccctatgtttcctaggttggtcttgaactcctgggctcaagccgtcttcctgtcatggcctcccaaagcacagggatgttttaaactgttagtggaggggaggtttcgctaaactcccccaacctagggtgatctgaaaggacttcttggaagaaataagacctcagttgtatcttaaggaagagtaagagtaagccaatgaagatgggagttgggatggaaaaggggaaggggaggctgaaaagggagagtggaggttcctgccatggtaaacagtgtgtgcaaatggggcatggaagaagggagggagggagagagggaaagaaaktaatacagagagaaaaacaccaagattcaaagacaccaagatgttttggtctggaacgtggatttcaggtccttatgctgatctgtctcccttaaatacaatgagtgccttagaaaggaaaccatattatttattactcccttaatagaaagtgcttctttacagtagtggatat

SEQ ID NO: 681241 - DNA, 634 bp, Homo sapiens
ttctctgaaaataaaataagaattttatcaaattcttctagtaatggaaatggttatatagtattaggcacgtatattgaaatgaaacttttgcctttttaggtaaagatgaagaagagagtgaaatattatacaacttaagaattcattcatttacacacatacatacgctttctttcactttggaaatttaaactgttatacagaaacattttcactattggagatacttcttaatgtatacaactctagacttaawgagttaagtttgggaatgggccctaaaactaagactttttacaagggagtttgagagcacatattggccagagacgccacgaatttgctggtctctgaagcttccactgatttcaaccgtcttctgcataccagaataaacttcagaaatattagatacagctgtcgaatttgttttctttaaaattctgagcgttagttccacccagcacatcctttcggctctgaagttatggaaccctatccttttcttttctttctttagccaagttttagctatttctcaccgtctgtcacagtgatcacttccttcccttttagcagttaattcttatatatttaattccctttattaacgctcttctatttgaaaagc

SEQ ID NO: 681242 - DNA, 634 bp, Homo sapiens
ttctctgaaaataaaataagaattttatcaaattcttctagtaatggaaatggttatatagtattaggcacgtatattgaaatgaaacttttgcctttttaggtaaagatgaagaagagagtgaaatattatacaacttaagaattcattcatttacacacatacatacgctttctttcactttggaaatttaaactgttatacagaaacattttcactattggagatacttcttaatgtatacaactctagacttaatgagttaagtttgggaatgggccctaaaactaagactttttacaagggagtttgagagcacwtattggccagagacgccacgaatttgctggtctctgaagcttccactgatttcaaccgtcttctgcataccagaataaacttcagaaatattagatacagctgtcgaatttgttttctttaaaattctgagcgttagttccacccagcacatcctttcggctctgaagttatggaaccctatccttttcttttctttctttagccaagttttagctatttctcaccgtctgtcacagtgatcacttccttcccttttagcagttaattcttatatatttaattccctttattaacgctcttctatttgaaaagc

SEQ ID NO: 681243 - DNA, 1910 bp, Homo sapiens
aattaacaaatagagacagattgagaaatgacagaactatggagtagtcataactgactctttaatctcagctcctggcattactagctgtgtgattttgggtgaattcctgaatgcctctttatgtctagggtgattagacctactgcatagagccatcattgaattgaataaaacaattcaccagtgtagtgcctttcatatagtgggtgtttgagaaatgttagatgtcttctattctttcaaaacatacaggcatttttcaaaaagtctatttgtgtcttgtttattttgtgcctacactcaacaaatctgtggttctaagttggagcacatttgtcttccagagcacttttggtaacattgggagacatctttggctgtcaccactgaggagagtctcctggtattaagtgggtagaggccagggatattgctgagtaccccatgttacacacagtagcatttcctacacccatgccccaacaaagaactatctggaaccaaatgcacatatgactgaggttaagaaactctgctctaactaaacagcaaatagaactttttgagagtagcatctgtgatggttaatattgactgtcaacttgattggattgaaggatgcagagtattgttcttgggtgtgtctgtgagggtgttgccaaaggagattaacatttgagtcagtggactaggaaaggggggcccaccctcaatctgagcgggcaccatctacacagctgccagcatggctaggataaaagcaggcaggggaatgtggaaagactagattggctaagtcttctggtctccatctttctcccatactggttgcttcctgcccttgaacatcagactccaagttttacagcttttggattcttggacttccaccagtggtttgccagggactcttgggccttcagccacagactgaaggttgcactattggtcacagactgaaggttgtcctgtcggcttccctactttcaaggttttgggacttggactggcttccttgctcctcagctagcagagggcctattttgggacttcaccttgtgattatgtgagtcaattctccttaataaactccccgtcacatatacatctatcytattagttctgtctctgaagaaccctaatgacagcatctattatccataaacttgatcattttaaaattattttagaatttaaaaacccagtgccacactatgaattctatatttgcaaaaattttaattttaaacttttctgcttaaattcttttaccaaatacatcttcacttgcattgtccagttctagatctcacactttatatagtttaaattcatctcttctgggattcagttccacataggttttttccaatgtactcatttggatgagttactaataatgcttatttttttgcttaaaaaatctcatgcataaaaattatttttaactttagccataggatttttaaaacattttcttaaacttttccaagagacaggatgacaaattcaaaaatggcaaaattaaattctgagacatctcttataatcaaatgagggaagatcatatgcagtagagtttaatgatccattacagttttaacagcagcatcacttacaatcagtgttttaaatatttcctcggattttccttcttttcaccaaggatcttccattaataggaggcagaagaagatgccaagttggtgtttctaaggacctactcttccaacatgatttagattgagattgaaattatctctttatagacttatcaagaaagcaggggtaagttccacacacttattaagtcttaaacacagttgaaagtttacttaattgctaaatagcacattgctccttaaattaacttgcaagattaatttaaaagcattattagttgtcaa

SEQ ID NO: 681244 - DNA, 1910 bp, Homo sapiens
aattaacaaatagagacagattgagaaatgacagaactatggagtagtcataactgactctttaatctcagctcctggcattactagctgtgtgattttgggtgaattcctgaatgcctctttatgtctagggtgattagacctactgcatagagccatcattgaattgaataaaacaattcaccagtgtagtgcctttcatatagtgggtgtttgagaaatgttagatgtcttctattctttcaaaacatacaggcatttttcaaaaagtctatttgtgtcttgtttattttgtgcctacactcaacaaatctgtggttctaagttggagcacatttgtcttccagagcacttttggtaacattgggagacatctttggctgtcaccactgaggagagtctcctggtattaagtgggtagaggccagggatattgctgagtaccccatgttacacacagtagcatttcctacacccatgccccaacaaagaactatctggaaccaaatgcacatatgactgaggttaagaaactctgctctaactaaacagcaaatagaactttttgagagtagcatctgtgatggttaatattgactgtcaacttgattggattgaaggatgcagagtattgttcttgggtgtgtctgtgagggtgttgccaaaggagattaacatttgagtcagtggactaggaaaggggggcccaccctcaatctgagcgggcaccatctacacagctgccagcatggctaggataaaagcaggcaggggaatgtggaaagactagattggctaagtcttctggtctccatctttctcccatactggttgcttcctgcccttgaacatcagactccaagttttacagcttttggattcttggacttccaccagtggtttgccagggactcttgggccttcagccacagactgaaggttgcactattggtcacagactgaaggttgtcctgtcggcttccctactttcaaggttttgggacttggactggcttccttgctcctcagctagcagagggcctattttgggacttcaccttgtgattatgtgagtcaattctccttaataaactccccgtcacatatacatctatcctattagttctgtctctgaagaaccstaatgacagcatctattatccataaacttgatcattttaaaattattttagaatttaaaaacccagtgccacactatgaattctatatttgcaaaaattttaattttaaacttttctgcttaaattcttttaccaaatacatcttcacttgcattgtccagttctagatctcacactttatatagtttaaattcatctcttctgggattcagttccacataggttttttccaatgtactcatttggatgagttactaataatgcttatttttttgcttaaaaaatctcatgcataaaaattatttttaactttagccataggatttttaaaacattttcttaaacttttccaagagacaggatgacaaattcaaaaatggcaaaattaaattctgagacatctcttataatcaaatgagggaagatcatatgcagtagagtttaatgatccattacagttttaacagcagcatcacttacaatcagtgttttaaatatttcctcggattttccttcttttcaccaaggatcttccattaataggaggcagaagaagatgccaagttggtgtttctaaggacctactcttccaacatgatttagattgagattgaaattatctctttatagacttatcaagaaagcaggggtaagttccacacacttattaagtcttaaacacagttgaaagtttacttaattgctaaatagcacattgctccttaaattaacttgcaagattaatttaaaagcattattagttgtcaa

SEQ ID NO: 681245 - DNA, 1461 bp, Homo sapiens
aagtaggagcccagaaaaagttcatgaataataaaaatatgttttatgtaaaagatacatttgggcatagtttttgagtaagtttccaatatatgttggctttttaaacaaagtatttatttatttattttagagactgtctcaatctgtcactcaggttggagtgcagtagtatgatcataccttactgcagccttggattcctgggcacaagcttctacagtagctgggaccactattcccagctgtttataaattttttgtagaaatgaggtcttgctaggttgcacaggctggtcctgaacacctggcctcaggcaatcctcctgactcagcttcccaaattaccacaggcatgagccactgcctgagagcctatgttgtctttttaagttgatctgtgatatttctcttcaaattcacctttttgcctttccttccaaacacacagttctaaaagtttttttttgtttttctgtttttttttttttcttttttttcttttggctttatattgccattagaattgatgttcatggacttttggcacacaatttttaaaaagtaatttagattcaatgctgaattattaagcatttcatatttacatttggaaaactccttccacgatcttcacttgtttttgttatatatcattgttatttgattttatttctgttactgccactctctttataacctgttaaaattatttgtgttttattttgaaactgatgatgcaaacatatgaatgttcattacataagtagactacaaattttaatttaactcagtactgaaaataaacactcacaaaatatatatttaagttgccatattactcaatattgatttttgaatcctcaatactaatttgatttcctgttatttgcacaaagtattttattatgtatgagaaatattttgtatctggatatttgttcttagactctaataaatagagtaaaagtctgcttttgtaaacacacatctactttcataaagattcttttttttcgtgtaactgcttataactctactccattctaggtaatcttaaaatgggtgtactatttcatcaaaagtcttataaacaaaatakaattgaatgtgattttaatggaaatcatatattatgttaataagttttattttaattttatttcacaaattccaaagcttttgtgatctcatttcaatataattatgattatgcttataagggatgaaatattttataattcaagttatttttgcatggcatgtatgtatgtgcttatctaaaatttgcattcaaatttaggcaaatttatgttataaatttaggaaaaacaaatgctaataagatatgacctatgcctttgtgactgatgctaatatagtagttctcaaagtgtagcgcacagacagcaagagcatcacttatgaaattgctagagatgaaaatttcataatatcacc

SEQ ID NO: 681246 - DNA, 792 bp, Homo sapiens
tatttctcttcatttttttatctgcttatatttgtatcaaaacatggaatgacattttcaaatgttggctgtcgtgatttctgggcaagtgagggtagaatgttgggtattttcactcttttccttctgcttttctgcatggcttktctcattaaaaaaaaaaactcacttttttttaaaatttgtgttttatgacagaaattgtggttcttcaacataaataattttacaaatgtgcattccttgatatattttagcagaaatataatattaaaaccttagctagataacagtaaatcaataaattcttcatgattatcttatgctagttggaaaattaaaaatataatctgaataataataaaaggtttattttctttaattgtatataattatatgtaaaatatatatatatatctaatatatatatatacacacacacgtgtgagtgtgtgtatatatgtatatcacccagttttccactttgtttgacatcaagcagggagttgagcaaaaatataaacaactaaaatgcttccaataaaatgctctaaagtttggatgcttgacatttttcaccttttatctgtacgttaattaaagtaattttattgctctaacatagaaatgagtcattttgtttttttttattttcatagtaccaaatatctgtctttactatgtatcgtactttttaactaatttttttagtatcattgggacaatagctgatgtgtagctaaacatatggtgggcacttataaagatacacaactcattttgggatttggg

SEQ ID NO: 681247 - DNA, 792 bp, Homo sapiens
tatttctcttcatttttttatctgcttatatttgtatcaaaacatggaatgacattttcaaatgttggctgtcgtgatttctgggcaagtgagggtagaatgttgggtattttcactcttttccttctgcttttctgcatggcttgtctcattaaaaaaaaaaactcacttttttttaaaatttgtgttttatgacagaaattgtkgttcttcaacataaataattttacaaatgtgcattccttgatatattttagcagaaatataatattaaaaccttagctagataacagtaaatcaataaattcttcatgattatcttatgctagttggaaaattaaaaatataatctgaataataataaaaggtttattttctttaattgtatataattatatgtaaaatatatatatatatctaatatatatatatacacacacacgtgtgagtgtgtgtatatatgtatatcacccagttttccactttgtttgacatcaagcagggagttgagcaaaaatataaacaactaaaatgcttccaataaaatgctctaaagtttggatgcttgacatttttcaccttttatctgtacgttaattaaagtaattttattgctctaacatagaaatgagtcattttgtttttttttattttcatagtaccaaatatctgtctttactatgtatcgtactttttaactaatttttttagtatcattgggacaatagctgatgtgtagctaaacatatggtgggcacttataaagatacacaactcattttgggatttggg

SEQ ID NO: 681248 - DNA, 792 bp, Homo sapiens
tatttctcttcatttttttatctgcttatatttgtatcaaaacatggaatgacattttcaaatgttggctgtcgtgatttctgggcaagtgagggtagaatgttgggtattttcactcttttccttctgcttttctgcatggcttgtctcattaaaaaaaaaaactcacttttttttaaaatttgtgttttatgacagaaattgtggttcttcaacataaataattttacaaatgtgyattccttgatatattttagcagaaatataatattaaaaccttagctagataacagtaaatcaataaattcttcatgattatcttatgctagttggaaaattaaaaatataatctgaataataataaaaggtttattttctttaattgtatataattatatgtaaaatatatatatatatctaatatatatatatacacacacacgtgtgagtgtgtgtatatatgtatatcacccagttttccactttgtttgacatcaagcagggagttgagcaaaaatataaacaactaaaatgcttccaataaaatgctctaaagtttggatgcttgacatttttcaccttttatctgtacgttaattaaagtaattttattgctctaacatagaaatgagtcattttgtttttttttattttcatagtaccaaatatctgtctttactatgtatcgtactttttaactaatttttttagtatcattgggacaatagctgatgtgtagctaaacatatggtgggcacttataaagatacacaactcattttgggatttggg

SEQ ID NO: 681249 - DNA, 1272 bp, Homo sapiens
aaaataaattttaaatatttaaatattaatattaaattttagtaaaaattatttttgtaagacataaagctaatatgtcagtaattttatttaatatcctgaacacatactrtaaatattttgaaccaatatttctttgtaaatactcactagtgatagtttaaatattgtaacattctctaacatgtatgttccaattttgtagtaggaaaatccatatgtcaccatccatcatttgttcacatcatattcttctaagtgagattttaaaaggaactaatgcaattaaccattgggtatttattttcaaccatgccattttagatttaagtattaactacaaatatttaaatagtagatatcatttatcttaatgtaagtatgttatgtaaaatataatttgtggatcatttataatgtagtaaaaatacattatgtttgcaaaacatacttaacagaaaaaaactcttcaaaaatcaacataataaacaatttgtaatattttgacaagttcgaaacccgtttgggaaaacttaacactctaacaattgttaaactaccaattctgttttcgaattggaattttttgtcggggggtggtgcagtaaatagattgaaagacatgaactactaccgataaactatatccaaaaattggttttctcacaaatctgctatgatcaaaccgaaactgttgataggacatataatttctaatttgcatagaataaattacataaataattgctaatctaaatttatataatcattaatttaaaagactcatttttcaacagagaacatcccatcacacttcaaacacatatagcaaactttgtttctagagtcttttttaaaataattttatttacaattctttgtaaattgtttccatggacatttttgctgaagttgtcaaatctttgttttatgatgaaacttttatctctctgttgtagtgcacaaagggatttcaaatgcaatgttttattcatttttcaaagtcccacactcctgagaatctctacagtttttagtttttttcttcttctcctagaatttagtaacagtggcatgttgggaatgagaccctgtctcctccctcaatcttttcattccctacttcactcactcccctgcccttaacctctccctctaactccttgccttttagaaaatccagcttccaaatgggacttcacactgacagggagaaaaagaaaaatttattgcttgaagttgtctttctctttaaaggcttttttagtgaca

SEQ ID NO: 681250 - DNA, 1272 bp, Homo sapiens
aaaataaattttaaatatttaaatattaatattaaattttagtaaaaattatttttgtaagacataaagctaatatgtcagtaattttatttaatatcctgaacacatactataaatattttgaaccaatatttctttgtaaatactcactagtgatagtttaaatattgtaacattctctaacatgtatgttccaattttgtagtaggaaaatccatatgtcaccatccatcatttgttcacatcatattcttctaagtgagattttaaaaggaactaatgcaattaaccattgggtatttattttcaaccatgccattttagatttaagtattaactacaaatatttaaatagtagatatcatttatcttaatgtaagtatgttatgtaaaatataatttgtggatcatttataatgtagtaaaaatacaytatgtttgcaaaacatacttaacagaaaaaaactcttcaaaaatcaacataataaacaatttgtaatattttgacaagttcgaaacccgtttgggaaaacttaacactctaacaattgttaaactaccaattctgttttcgaattggaattttttgtcggggggtggtgcagtaaatagattgaaagacatgaactactaccgataaactatatccaaaaattggttttctcacaaatctgctatgatcaaaccgaaactgttgataggacatataatttctaatttgcatagaataaattacataaataattgctaatctaaatttatataatcattaatttaaaagactcatttttcaacagagaacatcccatcacacttcaaacacatatagcaaactttgtttctagagtcttttttaaaataattttatttacaattctttgtaaattgtttccatggacatttttgctgaagttgtcaaatctttgttttatgatgaaacttttatctctctgttgtagtgcacaaagggatttcaaatgcaatgttttattcatttttcaaagtcccacactcctgagaatctctacagtttttagtttttttcttcttctcctagaatttagtaacagtggcatgttgggaatgagaccctgtctcctccctcaatcttttcattccctacttcactcactcccctgcccttaacctctccctctaactccttgccttttagaaaatccagcttccaaatgggacttcacactgacagggagaaaaagaaaaatttattgcttgaagttgtctttctctttaaaggcttttttagtgaca

SEQ ID NO: 681251 - DNA, 1125 bp, Homo sapiens
ccttcatataacacactgtacttattttgacttgttctttataatagataccaccactgttattatataattgttacgcatttttgatttattatctccgtcccccattagattgtggcatgagactatgaaggctatctgtacatttacaattatcccaagtcttacacagaacctggtacctagtatgtacccagtagttctcttataggatctgatactcagcaaatattggtgtacagaaagcttgaatgtatcagcctaatttttttgtcttgtatttgagcagccaaactatctttgtcaawgtttatttttaatttttttctttccataggctgcttaagtattatatttttaatagaatatttttagttaccacatttaaccaattcaaaatagaattatctttaaggatttactgcataatatatgtcaccagagcttgttataatattttcctataattaactcatataaagtaaatgtaaattgaatcttaaaatttttttatcttaacgtatatctataggataacttaggttgtggtacttggtattgatttttttaaatgcatgtcaataccattaataattcatctgcttgccgcatgtctgcatgaactttgtggtcactgactgatgggaggggtggagacagacaatttggttgagataattgaagtacataccatacaatttttgtcctgaggattatctgatttccaagtgaactggcaaatcttcattaaaatgaaatatagatgctaattttcatatttttaagtgagagtgaaaactgctattatgttcctcaaaaaatatgtatcaagaacctgacacatatttttatttatttatttatttatttatttatttatttatttatttattttttgagatggagtttcactcttgttgcccaggctggagtgcaatggtgcaatcttggctcaccacaacctctgccgcccgggttcaagcgattctcttgcctaagcctcccgagtagctgggattacaggcctgcgccaccacgcctggctaattttgtatttttagtagatttagtagatacggggttttagtagtattttagtagatacggggtttctccatgttggtc

SEQ ID NO: 681252 - DNA, 1125 bp, Homo sapiens
ccttcatataacacactgtacttattttgacttgttctttataatagataccaccactgttattatataattgttacgcatttttgatttattatctccgtcccccattagattgtggcatgagactatgaaggctatctgtacatttacaattatcccaagtcttacacagaacctggtacctagtatgtacccagtagttctcttataggatctgatactcagcaaatattggtgtacagaaagcttgaatgtatcagcctaatttttttgtcttgtatttgagcagccaaactatctttgtcaatgtttatttttaatttttttctttccataggctgcttaagtattatatttttaatagaatatttttagttaccacatttaaccaattcaaaatagaattatctttaaggatttactgcataatatatgtcaccagagcttgttataatattttcctataattaactcatataaagtaaatgtaaattgaatcttaaaatttttttatcttaacgtatatctataggataacttaggttgtggtacttggtattgatttttttaaatgcatgtcaataccattaataattcatctgcttgccgcatgtctgcatgaactttgtggtcactgactgatgggaggggtggagacagacaatttggttgagataattgaagtacataccatacaatttttgtcctgaggattatctgatttccaagtgaactggcaaatcttcattaaaatgaaatatagatgctaattttcatatttttaagtgagagtgaaaactgctattatgttcctcaaaaaatatgtatcaagaacctgayacatatttttatttatttatttatttatttatttatttatttatttatttattttttgagatggagtttcactcttgttgcccaggctggagtgcaatggtgcaatcttggctcaccacaacctctgccgcccgggttcaagcgattctcttgcctaagcctcccgagtagctgggattacaggcctgcgccaccacgcctggctaattttgtatttttagtagatttagtagatacggggttttagtagtattttagtagatacggggtttctccatgttggtc

SEQ ID NO: 681253 - DNA, 1125 bp, Homo sapiens
ccttcatataacacactgtacttattttgacttgttctttataatagataccaccactgttattatataattgttacgcatttttgatttattatctccgtcccccattagattgtggcatgagactatgaaggctatctgtacatttacaattatcccaagtcttacacagaacctggtacctagtatgtacccagtagttctcttataggatctgatactcagcaaatattggtgtacagaaagcttgaatgtatcagcctaatttttttgtcttgtatttgagcagccaaactatctttgtcaatgtttatttttaatttttttctttccataggctgcttaagtattatatttttaatagaatatttttagttaccacatttaaccaattcaaaatagaattatctttaaggatttactgcataatatatgtcaccagagcttgttataatattttcctataattaactcatataaagtaaatgtaaattgaatcttaaaatttttttatcttaacgtatatctataggataacttaggttgtggtacttggtattgatttttttaaatgcatgtcaataccattaataattcatctgcttgccgcatgtctgcatgaactttgtggtcactgactgatgggaggggtggagacagacaatttggttgagataattgaagtacataccatacaatttttgtcctgaggattatctgatttccaagtgaactggcaaatcttcattaaaatgaaatatagatgctaattttcatatttttaagtgagagtgaaaactgctattatgttcctcaaaaaatatgtatcaagaacctgacacatatttttatttatttatttatttatttatttatttatttatttatttattttttgagatggagtttcactcttgttgcccaggctggagtgcaatggtgcratcttggctcaccacaacctctgccgcccgggttcaagcgattctcttgcctaagcctcccgagtagctgggattacaggcctgcgccaccacgcctggctaattttgtatttttagtagatttagtagatacggggttttagtagtattttagtagatacggggtttctccatgttggtc

SEQ ID NO: 681254 - DNA, 1529 bp, Homo sapiens
tagcaaaccataaaagcttaataaatattactgaaaattatttaactatcaagctgatgatattgatgaagaagatgatgataatgaccatgtagtatagaaaaacccaaagaaggagtttgaagtatgccgatattttttttttcagacaaaaattgtaagtgttagacatatggctgggttctgaacatgccaacattgatacgagattttatcttcaagaaattacacagaatctatggaggagacagatattaaatagttataatacagtgtgagatattctgtttggagagatatatattcagcccttaggatagaaaaagaattcagtaataattgcagaatttttacacaagctggattgtgaaggacacataatgattttgtagtgaawaaaaaagtctttgtgatttgcttatcaaggtagcttgaaattcacattctaatctactgatttaataactaaaggattgtttcacatgggattgagcataattctcagaagtaattttcataaaatacatgttactaaaataatgttaatcaatcaattaaatgttcatcaaatgctaatttaattggtattaaaaaacagctctggtcattcactccaagattgagttcttaattttaggcttaaagactctggaaagaaacaagaaccaaggacagtcacatgatccagaaaggaaaacattgcttatgggccatatgcttttctaagcctcaggactttattgtggctaaagcaagaacacatcaatatgtgggataagaaacctctgaaagtgcatttcattatctgaaagaatcaaaacagtgaagaagagtgaatttatctacatattgaaagagattcagtgagtaatttgtccagtctctttcttatctaatttaatccaaacaccacccattgatggggagtttcaattttcagtattttagcctaatgctcaggaaggaatgccagtgaacatggacttgtggctttaagtgactaatcatagcaactgctatacaaacatgtaaggaaaagccaacagactatgatgaatgagaaacttccttatatttcattcctttggtgctttttttccttcttcctttctcttctctaaacattttttcttttttttttttttgacagagtctaattctgtcacacaggctggagtgcagtggagcaatctggcctcactgcaacctctgtctccgggttcaagccatcctctcacctcaccctcctgagtagctgggagtacaggtgtgcaccaccatgaccagctattttttttttttttttttttttttgtagagacagggtttcaccatgttgcccaggctggtctcaaactcctgacctcaagtgcctcccaaagtgctgagattacaggtgtaaactactgtgccctgccctctaaacatttttttctaagcgactccaagactgcatgttcaattgagatgacaggcagtggagttctgtgggccacacggatgttatttgtttgggggtagctgacaca

SEQ ID NO: 681255 - DNA, 651 bp, Homo sapiens
aaaaaaaaaaaaaagtatatcctcaagggagagtgtgggttattgctttcactcatagggaagtcagtttctaatcctgttccatcatcagtgattaaatgtggtgatgacttctcagttgagctctggttatgggcacattataaaaaaatcattgtgtaatttagcacggtctttgctgaggactcaaggacttcagtagcagtgagaaggccagtacaggtcagcccccgaggtaaattgggagccctgtcactggaactcagctggagtgagaggtcacaggaggttatgccggaactgccacagaggrtcccatggggcaaagcttgccccgtgcctgatccacccggttgtacttgtctttcttttcgtgtgtgctcacataaaacaaccgctcccagccaaatctgtaaactgttcatcaggattgctgttggattctctcttttttgaaaagggaacaatggtggggatagggagcattgtaatatttccatctcttgttcctcaaagtaggtaccaccttcccattatatccgtgtttcttatgctgattgaaaattacataagatacttggacatttttatttatttatttatttatttattgtttgagacagagtctctctctgtcgcccaggctggagt

SEQ ID NO: 681256 - DNA, 396 bp, Homo sapiens
ccttttgacactaagaacatgcaaacatgctatttcccgtgtatcaaatttcttcttctcaatatgattcagttatcacatgtaaattgtgaatgcacttgtcttcccagtgcacagtgacacaatgtcatggccagatgctgcatcccaaggcggtgacagggagcctctgtcttccagctggctgcttttctagtcctttcccactttgtttccaaagagttccagatgtgttttctcattgttctgcatcccagcacttagatgatcttttctaccccaataccccctacaccctctaaattccttcagaaaagaaggtagaggaggccgggcatggtggctcawgcctgtaatcccagcactttgggaggctgaggcgggcagatcaggagg

SEQ ID NO: 681257 - DNA, 646 bp, Homo sapiens
cattggtacctggggaggagcaggagcaaggcacctgaagggctggtgggttctggctgaggaagaggaagcgggagaagctctgggcaagggaaagcctgaaggggggctcgcaggttctccccaggtgttgctgctgagtgcaggggacagagctgaaacggagcctgagatctatagcagtggagttcagaaagggttccagtgaggctgccctcccatccatgtgcctgtccagggtcattggtctgcacatttttgctgtgcaaaattccccctaaattaattttaaaaaatcatggaccctctcacacatttttccttccttgtacattttctaagttggcatctacaatttttcataagtctacatagttgtaaacagtgttattccagtatgtcataaatgttgacatcttaaaataaaactgtaacactattctttaaaatgtatccaaccaaatataaatagcacagcagtttgatacccattatccmtttaaaaaatacataggccaggcatggtggctcacccctgtaatcccagcactttgggaggccgaggcgggcggatcacgaggtcaggagattgagaccatcctggccaatatggtgaaaccttgtctctactactaaaatacaaaaa

SEQ ID NO: 681258 - DNA, 1112 bp, Homo sapiens
tgaaaggtttattggttggtctttgtggagtcctgaaggttccagaatgctctgcattcctgtcattgtctgaggtggcactcagactcatgctgtctctggactccctgagggaggagcctagcaaacagcctccctcccgtgtccctgccctttctcagcctgctgtgacacttcatccaggaaagcttctccgcccatgtcagcaaattgtttgacacagggcaaggtgctctgaggatcagcaagagtgaggctgggccaagaagcccccaaactccagcccctgtctccatggcccagagactcattctgtgagagtttctctgcaaagatggctgccaacaattcctcccatctctgcatgcacatgccttcctcccttcaacaggtggggtctttttccccgtatccttgaatctgggctgcctgacttgatttgaccaatggaatgtggcaggagggatgtcttgagattactgagctcagacctgaagggaccttgtagcttccgcatcagctcagagaaaaacaaattgacgtgtaaatcagtccaagtcaccctgcaggaggagcggccacgtggagatagaggccaggagagtgaaaactgaggctccagccaacatcataggtaaagggacccagttgtcccaggcagcatacagatatttgaaccrtgccagctgcgtctgtgtgagagaggccagccgtgccccttaggcccctgtcaagccaccctagtcaataccacgtggaacagggatgacccatccccatgacctacagaatcataagaaataggattgttttaagccactaagttttggggtttttgtgatgcagcaatagattgttgagagacatagactttctgctatgtctctagacttctcaggggttaggttgtcctaatgagttgaggtcagaggtcatttggccagcccctgggccctgggggacacagagagaaaccagggttttcaggagactgtgtagctaagaaggacatgagctgtggtgacagtcacacccagcttcctggatctgccacttaccagctgtgtgacctagggcctcactgagtttctttccacctcggaaagtggaga

SEQ ID NO: 681259 - DNA, 1354 bp, Homo sapiens
cttctctctcactagagagagatggatgttctcatttctctttcttctacctattaaacctcaacacctaaactcctaaagagaaagaaagaaagaaagaaagaaagaaagaaagaaagaaagaaagaaaggagaaagaaagaaagttcagctgataaaatggatggtagaatgaaaaggcaaacatgtggtaaatggaatctccactaaagacagaaagaggatgacggaggaggcgtcaggagcactgtatgtaaccatcacgttataaatctgtgctacccaaatgagaatcactagcacctcataaaatagacaaggcagacacccagaataaccttaccagggtgatggacaggggctaccattttgcaaattgtcactacctttagctccctccaacacaacagtagacaccctcacgcatgacaaccaggcacagtggttaagagctttggcagtcagacctatctgggtctaaaccccagctctaacactgagtatgttatttaacccctcagtacctatttcctcaactgaaaaatggtgataaaaatcataccctcttcatagtacattgtaaggcttaaatgatattgttggtataaaaatcctagcacagtggctcatagcaaggactggagagatgtcagttctttcaatattatcattccagggcatttgaaggactcatggttacttttaatcacagcaacacaggttggctagaggtaaggtgagataaccttaacagcaacttctagattcatagacttagaaggcatgaaaagtcacctgccgtgttctgagaatagctagaaggggacacacttagaaatcactcacaaaccccagtggcccctaactcactacccaygagtggtctccaagctcagagctgtgccaaaaatcccaacgagaaccactgtccctagatcaattcacctccacgcttccctaaggcacactcttgcttctctggcaagaaatatgtagcatctttgatagtgatagtgataggtgaatgttggtggacaagtcagctctcaataatccttttcacaaatcatgggtccccagacatgttatctaaactgatattatttttaccaataccaataatagctttgggctggactcaaccggctacaggataatccattcaagtcaaatagtccactttcatccagacctgggtctgctacagataccagtttacctaagacatgaatcttccacaggaaagggtggtggcatctaaagccccttcttaagacatgccttcaaagtgcttgaaactctcacagccccgctgccaaaacccagccaccaggcatcttgggaatgcaattca

SEQ ID NO: 681260 - DNA, 1348 bp, Homo sapiens
ttgttttcatctgattcataaaactttttaaataaattttttcattatttttaagaataaacacactaataggctcacaaaactcaatacgtcctttttggttgagtaaaggcaaataattttgacgattgaaagaatcatagaaatgagatcgagagcatcctggctaacatggtgaaacgccgtctctactaaaaatacaaaaaattagccgatcgtggtggcgggcgcctatagtcccagctagtcggaaggccgaggcaggagaatggcgtgaacccrggaggcggagcttgcagttagctgagattgtgccactgcaccccagcctgcctgggcgacagagcgagagtccgtctcaaaaaaaaaaaaaaaaaagaatcatagaaatgatctattttttttctctctttttcagatggtatgggagattttagattcaagtgacttgctcaaagggacgttttttgtgataaaccataacagtagattccaggttatctgatccttggacattgctatttctactcttatacataactttatattctgtataaacgtatgaaattatatatgtacatctttatttttatagttataatttaagcggcaaatgatgttttctacaaataaatctgcctcaaagaaattaaaacacactttctatttactgtaaaaattcaaaagtatctgtttacttcatattagacctttgaaaactgtatccaagacagggaaggatccgattccacctgtaagacaaattcctttgccatcattactcatctactgacttctcgctctatggttatggaaggatgatcttattatggggaagtgagaaaattgccatctgctcagtttttttttttttttttcaagaaaaggcacaaccctttcttttctgtttatgatggttttagctatcattaatttttactgactgtttctaagtttaaacacctaattctgcacatatcaagaaagtaaggcacccactattttaaaatattatcttagaagttttaaatgagtaacactaaaattttacacatttaatattaattaatggaagatttttttctcctgtgaaaagagtatacactcaatacacagactattgagtgtgtgtggtgtgtgtattttctctactccaataagagattgctatattatcttatttatttttatcacaactggtcactggatctacttttacaaacatacattcatgcatacattttgctcatcacaggaaataaatgcaaaagacaaatggattaaaaacaattgaaagcaataatataaaaatctattagaccaatgggacaattgttctttgttaaga

SEQ ID NO: 681261 - DNA, 1348 bp, Homo sapiens
ttgttttcatctgattcataaaactttttaaataaattttttcattatttttaagaataaacacactaataggctcacaaaactcaatacgtcctttttggttgagtaaaggcaaataattttgacgattgaaagaatcatagaaatgagatcgagagcatcctggctaacatggtgaaacgccgtctctactaaaaatacaaaaaattagccgatcgtggtggcgggcgcctatagtcccagctagtcggaaggccgaggcaggagaatggcgtgaacccgggaggcggagcttgcagttagctgagattgtgccactgcaccccagcctgcctgggcgacagagcgagagtccgtctcaaaaaaaaaaaaaaaaaagaatcatagaaatgatctattttttttctctctttttcagatggtatgggagattttagattcaagtgacttgctcaaagggacgttttttgtgataaaccataacagtagattccaggttatctgatccttggacattgctatttctactcttatacataactttatattctgtataaacrtatgaaattatatatgtacatctttatttttatagttataatttaagcggcaaatgatgttttctacaaataaatctgcctcaaagaaattaaaacacactttctatttactgtaaaaattcaaaagtatctgtttacttcatattagacctttgaaaactgtatccaagacagggaaggatccgattccacctgtaagacaaattcctttgccatcattactcatctactgacttctcgctctatggttatggaaggatgatcttattatggggaagtgagaaaattgccatctgctcagtttttttttttttttttcaagaaaaggcacaaccctttcttttctgtttatgatggttttagctatcattaatttttactgactgtttctaagtttaaacacctaattctgcacatatcaagaaagtaaggcacccactattttaaaatattatcttagaagttttaaatgagtaacactaaaattttacacatttaatattaattaatggaagatttttttctcctgtgaaaagagtatacactcaatacacagactattgagtgtgtgtggtgtgtgtattttctctactccaataagagattgctatattatcttatttatttttatcacaactggtcactggatctacttttacaaacatacattcatgcatacattttgctcatcacaggaaataaatgcaaaagacaaatggattaaaaacaattgaaagcaataatataaaaatctattagaccaatgggacaattgttctttgttaaga

SEQ ID NO: 681262 - DNA, 617 bp, Homo sapiens
gacccctattccaactcctggattatggaaataataagattaaacctttaccaaagataaacaaacaaagcttttgttttcctccttgtacaaatctccaagggaagaaatctttacatgcctagctacctgcttagcatttttatgtgttttagaggtgagggagtagaaaaataatacacataaattaatgcaccaataaactatcttgccccagctctttttcttctatcaagatatcatttttgctcgctgttttgataaatatmcaacatattgctgcatatttgtatgcgattagaaacatcagattcagcaggggtcgactctgtgtaaaattgctttcctgctgctctgagtttttgttgtgaaaaaaagccaatgagtaaatcaattcattctaagtatctatgaatttaaaatgttcacccttttcaggaaatggacttgcacaatgaaagagggtaatgcttaactttaagaaatgaaactctaattgtggatatctggggaaacattgtttggagaaagctcaggactattagagaaataaaaccttttttaaaagatcagaagtctcaacacatccacctattttttaagtaggcctgagtctc

SEQ ID NO: 681263 - DNA, 1388 bp, Homo sapiens
tgcaaatgtcttcacaatctacccccaattcacatgcacatctgaacagttggtaagcttaacatctgttaaatacackatcttcattatgattactggtaagtgaagtatggccaggcatgatggtgtcggcctgtagtcctaggtacttgggaagctgagcgggggaggatctcttgagccttcccatctcaaggatgttcaagttcaaggatgtagtaagctatgattgtgcctgtgaacagccactgcactccagcctgggcaatatagtgagacccttagaccccatcttcacccccgacaaaaaagaaataaagaaatataatctttaaaacaacaacaaaaaaatctctcaaagctcagctcatttctacttaaacagtaaaaattttggaactgtttggttaccaagactaaataaataacaatatggccccttttggtaagctaccatgaatttttgaggttatcttttaatgtgaaagtgttttacaatcatataaataagcacagtgataaaaactgatagatcggttgattgattgagatgggggtctcactatattgctgaagctggtcttgaactcctggcctcaagcaatcctctcactttggcctcccaaagtaactaggattacaggcaatgagccaccatgcccagcaatgatataaataataagcaaataaatgttatctaatgggtgactagctaaaatatcagcattcttatcacttataactgaaaagtcagtaataacaagactcaaatagaatgcctctttttaatttattaattattattcttaagttttagggtacatgtgcacaatgtgcaggttagttacatatgtatacttgtgccatgctggtgcactgcacccactaactcgtcatctagcattaggtatatctcccaatgctatccctcccccctccccccaccccacaacagtccccagagtgtgatgttccccttcctgtgtccatgtgttctcattgttcaattcccacctatgagtgagaatatacagtgtttggttttttgttcttgcgatagtttactgagaatgatgatttccaattttgtccatgtccctacaaaggacatgaactcatcattttttatggctgcatagtattccatggtgtatatgtgccacattttcttaatccagtctatcattgttggacattcgggttggttccaagtcttttaaaaacaaaggccatgtgaaaccatactttctacaagatacctggaactaaaataagcatagaggggggtactaactcagggaaatgggacaaatgtgctcttcactagagctgggaaggaacctggatattattttagaaaaattttttattacaaaggcaacagatgt

SEQ ID NO: 681264 - DNA, 1502 bp, Homo sapiens
atttattttattatattatttttgttgagacagggtctcattctgttgtcaaggctggagtgcaatggcacgatcacagctcactgcagcctcgacctcccaggctcaagccatcctcccacctcagcctccaaagtagctgggactacagatgcacccccgccatgcccaactaatgtttacatttttttgtagaggcaggatcttgctatgttgcccaggttggtctcaaactcctgggcttgagtaatccttctgcctcagcctcccaaagtgttgggattacaggctctcacgagccaccatgtctggacttgcaaatttattttactaggcaagctacctttgagaagtccatgaaagagaccattttctacacatgtaaagctacaattcaattgttaaaattctgataaaaaccaaaacatgacatctaccctgttaaatttttacgtgtttaatccacattgttccccatgagctctgtcttktattttacacccatcaaacagcaagtccctattgtccccccttcttctcagtccctgggaaccaccgtcaaccaccccctactccacaaatcagagaagacacaggtctgcacacctgggtcttaactttcatctgaaacatttttagttctcaaggacatcacggagaatagattcatgctttcatgtctagttataaatgtctggctttgagccggctgcatactcagcttttaaaatccccttgggggcaatgtctcggaaacccactggctgaaaaacaattcataatgaatcaggaattgtgcggaggccgttttaaaatgagtgccttgaaaaaaggaaaaaaaaaaatctacaaaaggcaaagtttaaaaaatgatgtcattccagtaagtgaggaatgaagaaaggtaatttggtctacagagttcagagttcttgttattttacactgggcttgtttttaattgaactgatgaataatgaccagaatgcctgaacatctagagctggaaaaagctggccctggagaaggtacatcattcgttatttgtgaaagtcagctgcggtagtcagtacaggatacagtagaagtatccatttcactgtggacagatgtttagatgccttttcttttttcttgggatttttctttttcccacccaaccccactctaccttttttctaagaaaagtatctggtaacaatccaacatgggaaacttctgcttctttcaagaatataacctttaaaataatgggtgcttaacaagacattctccaagctcctatttttcataactttactgtggccacaatgagaaatatattgtgcatattttacagaaccatccggactcacatacatgcaaacgcacacacgcccctaaaactacagctgaacaagacaatccaaacttaacaatattaatagtgtagaaacagggttatcagatatgaatttattaatcatggttacacagagcactgtttcatttcaaattatttt

SEQ ID NO: 681265 - DNA, 1502 bp, Homo sapiens
atttattttattatattatttttgttgagacagggtctcattctgttgtcaaggctggagtgcaatggcacgatcacagctcactgcagcctcgacctcccaggctcaagccatcctcccacctcagcctccaaagtagctgggactacagatgcacccccgccatgcccaactaatgtttacatttttttgtagaggcaggatcttgctatgttgcccaggttggtctcaaactcctgggcttgagtaatccttctgcctcagcctcccaaagtgttgggattacaggctctcacgagccaccatgtctggacttgcaaatttattttactaggcaagctacctttgagaagtccatgaaagagaccattttctacacatgtaaagctacaattcaattgttaaaattctgataaaaaccaaaacatgacatctaccctgttaaatttttacgtgtttaatccacattgttccccatgagctctgtcttttmttttacacccatcaaacagcaagtccctattgtccccccttcttctcagtccctgggaaccaccgtcaaccaccccctactccacaaatcagagaagacacaggtctgcacacctgggtcttaactttcatctgaaacatttttagttctcaaggacatcacggagaatagattcatgctttcatgtctagttataaatgtctggctttgagccggctgcatactcagcttttaaaatccccttgggggcaatgtctcggaaacccactggctgaaaaacaattcataatgaatcaggaattgtgcggaggccgttttaaaatgagtgccttgaaaaaaggaaaaaaaaaaatctacaaaaggcaaagtttaaaaaatgatgtcattccagtaagtgaggaatgaagaaaggtaatttggtctacagagttcagagttcttgttattttacactgggcttgtttttaattgaactgatgaataatgaccagaatgcctgaacatctagagctggaaaaagctggccctggagaaggtacatcattcgttatttgtgaaagtcagctgcggtagtcagtacaggatacagtagaagtatccatttcactgtggacagatgtttagatgccttttcttttttcttgggatttttctttttcccacccaaccccactctaccttttttctaagaaaagtatctggtaacaatccaacatgggaaacttctgcttctttcaagaatataacctttaaaataatgggtgcttaacaagacattctccaagctcctatttttcataactttactgtggccacaatgagaaatatattgtgcatattttacagaaccatccggactcacatacatgcaaacgcacacacgcccctaaaactacagctgaacaagacaatccaaacttaacaatattaatagtgtagaaacagggttatcagatatgaatttattaatcatggttacacagagcactgtttcatttcaaattatttt

SEQ ID NO: 681266 - DNA, 1502 bp, Homo sapiens
atttattttattatattatttttgttgagacagggtctcattctgttgtcaaggctggagtgcaatggcacgatcacagctcactgcagcctcgacctcccaggctcaagccatcctcccacctcagcctccaaagtagctgggactacagatgcacccccgccatgcccaactaatgtttacatttttttgtagaggcaggatcttgctatgttgcccaggttggtctcaaactcctgggcttgagtaatccttctgcctcagcctcccaaagtgttgggattacaggctctcacgagccaccatgtctggacttgcaaatttattttactaggcaagctacctttgagaagtccatgaaagagaccattttctacacatgtaaagctacaattcaattgttaaaattctgataaaaaccaaaacatgacatctaccctgttaaatttttacgtgtttaatccacattgttccccatgagctctgtcttttaytttacacccatcaaacagcaagtccctattgtccccccttcttctcagtccctgggaaccaccgtcaaccaccccctactccacaaatcagagaagacacaggtctgcacacctgggtcttaactttcatctgaaacatttttagttctcaaggacatcacggagaatagattcatgctttcatgtctagttataaatgtctggctttgagccggctgcatactcagcttttaaaatccccttgggggcaatgtctcggaaacccactggctgaaaaacaattcataatgaatcaggaattgtgcggaggccgttttaaaatgagtgccttgaaaaaaggaaaaaaaaaaatctacaaaaggcaaagtttaaaaaatgatgtcattccagtaagtgaggaatgaagaaaggtaatttggtctacagagttcagagttcttgttattttacactgggcttgtttttaattgaactgatgaataatgaccagaatgcctgaacatctagagctggaaaaagctggccctggagaaggtacatcattcgttatttgtgaaagtcagctgcggtagtcagtacaggatacagtagaagtatccatttcactgtggacagatgtttagatgccttttcttttttcttgggatttttctttttcccacccaaccccactctaccttttttctaagaaaagtatctggtaacaatccaacatgggaaacttctgcttctttcaagaatataacctttaaaataatgggtgcttaacaagacattctccaagctcctatttttcataactttactgtggccacaatgagaaatatattgtgcatattttacagaaccatccggactcacatacatgcaaacgcacacacgcccctaaaactacagctgaacaagacaatccaaacttaacaatattaatagtgtagaaacagggttatcagatatgaatttattaatcatggttacacagagcactgtttcatttcaaattatttt

SEQ ID NO: 681267 - DNA, 1352 bp, Homo sapiens
tttaataggactgattaaatgtaaggcctctttatttattttgcaaatgcctcgggctggatcattttagaatctacttcagggttatgaggtggtgcctggggctcctgataaactctcatgttttcattttgtttcagaaaatccagaagtagaagtcaacctttatttctaattcatttcaattccatggcaggtctttccttgcatgtttaaaagacgtgttcttattttcagataatttaaatagctgaacatcatatttcacaatgagaaagtcttatgtttattttaattttattttttgagacagggtcttgttctgttgtccaggctggagtgcagtggtgcgatcgtggctcactgcagccttgacctcctggtcttaagtgatcctcttgccttagcctccccagtagctgggactataggcacacaacaccacgcctggctaatttttaaaattatttttgtagacatgatgggttctcactgtgctgcccaggctggtctcaaactcctggcctcaagcaatcttcttaccttggcctctctaagtgctgggattacagacgtgagccactgcgcctagcgttgtatgtttagctacaaatgatgggtatgaacttttaaagttacagataccctcagagcaaattgtcattgttggagagggaagatagaaccctaagcagactgcaatgcaacagtgtctggcttctagtttcttcagaaggccagtggtgaaatatttctcccagaccacagtggaatcattgtcatcgtaatgactggcttccaatagtttcctcagaaggccaacgatgaaacatctctcccagaccaaaatggtatctttatcataccctatggtactttaacaacaaaacaaaacagcgatagtttcagctcataaaagttgggttcccagataaaatacaggacacccagttaaatttgaattcggggtaaacagtaaatcttgttttagtgtaagtatatcccatacaacattcgggtcatacttacggtggtgggtaggctgtatttttatttgctacactgaaagccctacctaaagggcagtgttgcaaattgtttgtgacagatgaataagcagctagcgttccccatattcttttactaaaaaagaagactaaatacaattgacttaaagaaaacaaatgacaaatgttagcaaataaragaacatgcttcccatttattgagtggaaggattggcaaagagagaaattgtattttaaaatagcctaaagagtaacaagaaaagtagctgtgtccaggatgcctccatggtcgttggctaacagttacattcttccccgctaggg

SEQ ID NO: 681268 - DNA, 1352 bp, Homo sapiens
tttaataggactgattaaatgtaaggcctctttatttattttgcaaatgcctcgggctggatcattttagaatctacttcagggttatgaggtggtgcctggggctcctgataaactctcatgttttcattttgtttcagaaaatccagaagtagaagtcaacctttatttctaattcatttcaattccatggcaggtctttccttgcatgtttaaaagacgtgttcttattttcagataatttaaatagctgaacatcatatttcacaatgagaaagtcttatgtttattttaattttattttttgagacagggtcttgttctgttgtccaggctggagtgcagtggtgcgatcgtggctcactgcagccttgacctcctggtcttaagtgatcctcttgccttagcctccccagtagctgggactataggcacacaacaccacgcctggctaatttttaaaattatttttgtagacatgatgggttctcactgtgctgcccaggctggtctcaaactcctggcctcaagcaatcttcttaccttggcctctctaagtgctgggattacagacgtgagccactgcgcctagcgttgtatgtttagctacaaatgatgggtatgaacttttaaagttacagataccctcagagcaaattgtcattgttggagagggaagatagaaccctaagcagactgcaatgcaacagtgtctggcttctagtttcttcagaaggccagtggtgaaatatttctcccagaccacagtggaatcattgtcatcgtaatgactggcttccaatagtttcctcagaaggccaacgatgaaacatctctcccagaccaaaatggtatctttatcataccctatggtactttaacaacaaaacaaaacagcgatagtttcagctcataaaagttgggttcccagataaaatacaggacacccagttaaatttgaattcggggtaaacagtaaatcttgttttagtgtaagtatatcccatacaacattcgggtcatacttacggtggtgggtaggctgtatttttatttgctacactgaaagccctacctaaagggcagtgttgcaaattgtttgtgacagatgaataagcagctagcgttccccatattcttttactaaaaaagaagactaaatacaattgacttaaagaaaacaaatgacaaatgttagcaaataagaraacatgcttcccatttattgagtggaaggattggcaaagagagaaattgtattttaaaatagcctaaagagtaacaagaaaagtagctgtgtccaggatgcctccatggtcgttggctaacagttacattcttccccgctaggg

SEQ ID NO: 681269 - DNA, 1081 bp, Homo sapiens
aaataaaaccaaaaacaaatatgccagcccagttcttcttcaacccagattttgcaagacagtaaatgagacagcatttggaacctggcgaacttccccagtgaaccgatagcagcttagaaagagttaaatgtgcaaagaagatactcaatctccaagtcagggctactcatacagaaaagggaractgaggccagagtcccaggaaatatccagcttcacacaatgccttaaaatgcaaagaattggtgggctgcggtggctcatgtctgtaattccagcacgctgggaggccagggtgggtgcatcacttgaggtaaggagcttgagaccagcctggccagcgtgtcaggctgtgacacagcgtgaaaccctgtgtctactaaaaatacaaaaatattaaccaggcatggtggcggttgcctgtaatctcagctacatgggatgctgaagcaagagaatctcttgaacacgggaggggaaggttgcagtgagcggagatcgcaccactgcactccagcctaggcgacagtgagaccctgtcccacccacaccccgccccccctccaaaaaaaagcacagaattcaggcccagaaggagtttagatgttcagggagggggacatgatgggaaatgggattcagaagaaggaataagaggaacatgccataaaagcctggattcttggaaaaagccaaggaaaaaagaacctctaggtgactcagaatcactgtgtattagtaggttggtgtaaatgtaattgcggcttgtgtcattgaaaataatagcaaaaacaaagagaaaccaatagggtgagtgtgtatctatacctatatcatctatatctatatttatacctatatgtctacatctatatatcaataataaaataaaaatattaatttaaaaaattacacttaatttaaagaattgcactgtttaaaaccagtgataaaaccaacaacattctaagatatttatccaactcgtcgaagttttgtcattctacacgagggtttctcaatcttggcaccattgacacttgggccaaattattctttgcacaaatatcaatctgta

SEQ ID NO: 681270 - DNA, 1081 bp, Homo sapiens
aaataaaaccaaaaacaaatatgccagcccagttcttcttcaacccagattttgcaagacagtaaatgagacagcatttggaacctggcgaacttccccagtgaaccgatagcagcttagaaagagttaaatgtgcaaagaagatactcaatctccaagtcagggctactcatacagaaaagggaaactgaggccagagtcccaggaaatatccagcttcacacaatgccttaaaatgcaaagaattggtgggctgcggtggctcatgtctgtaattccagcacgctgggaggccagggtgggtgcatcacttgaggtaaggagcttgagaccagcctggccagcgtgtcaggctgtgacacagcgtgaaaccctgtgtctactaaaaatacaaaaatattaaccaggcatggtggcggttgcctgtaatctcagctacatgggatgctgaagcaagagaatctcttgaacacgggaggggaaggttgcagtgagcggagatcgcaccactgcactccagcctaggcgacagtgagaccctgtcccacccacaccccgccccccctccaaaaaaaagcacagaattcaggcccagaaggastttagatgttcagggagggggacatgatgggaaatgggattcagaagaaggaataagaggaacatgccataaaagcctggattcttggaaaaagccaaggaaaaaagaacctctaggtgactcagaatcactgtgtattagtaggttggtgtaaatgtaattgcggcttgtgtcattgaaaataatagcaaaaacaaagagaaaccaatagggtgagtgtgtatctatacctatatcatctatatctatatttatacctatatgtctacatctatatatcaataataaaataaaaatattaatttaaaaaattacacttaatttaaagaattgcactgtttaaaaccagtgataaaaccaacaacattctaagatatttatccaactcgtcgaagttttgtcattctacacgagggtttctcaatcttggcaccattgacacttgggccaaattattctttgcacaaatatcaatctgta

SEQ ID NO: 681271 - DNA, 636 bp, Homo sapiens
tcaagtttgatagccacccaggactctgccctccctgctcagctcagccctgatcagccctaagctggtataccctggactattcagcaagcccactaaccttggtgagaggggacttgactctgcgaccctcccctctgcacgccaggccagtttccatgaaaggaccccctggggtcctcaagctcagccctagaaccaccctcctcacgtccagcaccagggcaggcctggtggaggcaggaaggccagctgggggtgagggctgatcacagataagagcaacatgcaaacaaaacccacaggaaggaagccagcgaaggagaaaatcatttaagaatttcatattggctgggyacggtggctcacgcctgtaatcccagcactttgggaggccgaggtgggcagatcacaaggtcaggagatggagatcatcctggctaacatagtgaaaccccgtctctactaaaaatacaaaaaattagccgggcgtagtggcgggcgcctgtagtcccagctactcgggaggctgaggcaggagaatggagtgaacccgggaggcggagcttgcagtgagctgagatctcgccactgcactccagcctgggcgacagagccagactccgcctcaaaaaa

SEQ ID NO: 681272 - DNA, 636 bp, Homo sapiens
tcaagtttgatagccacccaggactctgccctccctgctcagctcagccctgatcagccctaagctggtataccctggactattcagcaagcccactaaccttggtgagaggggacttgactctgcgaccctcccctctgcacgccaggccagtttccatgaaaggaccccctggggtcctcaagctcagccctagaaccaccctcctcacgtccagcaccagggcaggcctggtggaggcaggaaggccagctgggggtgagggctgatcacagataagagcaacatgcaaacaaaacccacaggaaggaagccagcgaaggagaaaatcatttaagaatttcatattggctgggtrcggtggctcacgcctgtaatcccagcactttgggaggccgaggtgggcagatcacaaggtcaggagatggagatcatcctggctaacatagtgaaaccccgtctctactaaaaatacaaaaaattagccgggcgtagtggcgggcgcctgtagtcccagctactcgggaggctgaggcaggagaatggagtgaacccgggaggcggagcttgcagtgagctgagatctcgccactgcactccagcctgggcgacagagccagactccgcctcaaaaaa

SEQ ID NO: 681273 - DNA, 636 bp, Homo sapiens
tcaagtttgatagccacccaggactctgccctccctgctcagctcagccctgatcagccctaagctggtataccctggactattcagcaagcccactaaccttggtgagaggggacttgactctgcgaccctcccctctgcacgccaggccagtttccatgaaaggaccccctggggtcctcaagctcagccctagaaccaccctcctcacgtccagcaccagggcaggcctggtggaggcaggaaggccagctgggggtgagggctgatcacagataagagcaacatgcaaacaaaacccacaggaaggaagccagcgaaggagaaaatcatttaagaatttcatattggctgggtayggtggctcacgcctgtaatcccagcactttgggaggccgaggtgggcagatcacaaggtcaggagatggagatcatcctggctaacatagtgaaaccccgtctctactaaaaatacaaaaaattagccgggcgtagtggcgggcgcctgtagtcccagctactcgggaggctgaggcaggagaatggagtgaacccgggaggcggagcttgcagtgagctgagatctcgccactgcactccagcctgggcgacagagccagactccgcctcaaaaaa

SEQ ID NO: 681274 - DNA, 613 bp, Homo sapiens
ttcaccaaacctgggcatccccaccctgatccaagtccttgcagtctctggggtgggggagaattgggaggagtggaacagaaaagaatgggacaagggggtcctctcttcagacagttcaccgaccggccccaacccctattttctgtctggggaacacaggctccacctgcctgctgcccaagccaaagccctggcatcccttcttccaaccaagcaccaggcctggtcatgtgtacctcttaaatcactmtgatctgaaatcactcacctcctaccgttgccctaggtcaagccacagaagcctggcctagcctctcggggtacacatcccacccatcctccaggagtcctccgtaggcacagccatctttaacaaacacacactggccttgccatgtcccactgaaaaagcccgtaggccttggagagcctgtcgtgcccctgcaaggcagcccctctttccacactggaccaggtgaagtatgtgcttctaggaggcaccaacgggtacttcccaggtgctcgtctccccacgcagggggcagcatggtgtctagaacacggtggcactggctggtgacacctgggccaaggcaacccgtgggatttt

SEQ ID NO: 681275 - DNA, 613 bp, Homo sapiens
ttcaccaaacctgggcatccccaccctgatccaagtccttgcagtctctggggtgggggagaattgggaggagtggaacagaaaagaatgggacaagggggtcctctcttcagacagttcaccgaccggccccaacccctattttctgtctggggaacacaggctccacctgcctgctgcccaagccaaagccctggcatcccttcttccaaccaagcaccaggcctggtcatgtgtacctcttaaatcactctgatctgaaatcactcacctcctaccgttgccctaggtcaagccacagaagcctggcctagcctctcggggtacacatcccacccatcctccaggagtcctccgtaggcacagccatctttaacaaacacacactggccttgccatgtcccactgaaaaagcccgtaggccttggagagcctgtcgtgcccctgcaaggcagcccctctttccacactggaccaggtgaagtatgtgcttctaggaggcaccaacgggtacttcccaggtgctcgtctccccacgcagggggcagyatggtgtctagaacacggtggcactggctggtgacacctgggccaaggcaacccgtgggatttt

SEQ ID NO: 681276 - DNA, 596 bp, Homo sapiens
cccaggggccgcagtgactgtgtccagtccttcctcaccccgctgcagagtcagtccaggaggcctttacccacagcactgccacctccctccacgacccctgtctttctcttccccagattaaacgctcccacttctctccattcttctttctccacccccaggcccatttctgcctcggttgcctgcctccaaccacaatccagttttttggctcccagagacagacatgcccagatctgaacaccrcccacctgggtatgttctgccagtgtgcaaggtggggccctccaggccctctcctcccctccctttttctagatgccatttcctgctaaagccacctctcccatggctataaactaccttcaatcagggcacgaactctagagcacaagagaacctgagattctttaaaacattctagtttaatgtcctcgttttacagataaagaaaatgggtacggccaagaccatagacctagtgattgtcagatgaacaattagacccacagaaccatccaagctacagaggacgcattctgccttcccttggatcctgtggtttgaggatggaggtctaggaccgtggcagg

SEQ ID NO: 681277 - DNA, 596 bp, Homo sapiens
cccaggggccgcagtgactgtgtccagtccttcctcaccccgctgcagagtcagtccaggaggcctttacccacagcactgccacctccctccacgacccctgtctttctcttccccagattaaacgctcccacttctctccattcttctttctccacccccaggcccatttctgcctcggttgcctgcctccaaccacaatccagttttttggctcccagagacagacatgcccagatctgaacaccacccacctgggtatgttctgccagtgtgcaaggtggggccctccaggccctctcctcccctccctttttctagatgccatttcctgctaaagccacctctcccatggctataaactaccttcaatcagggcacgaactctagagcasaagagaacctgagattctttaaaacattctagtttaatgtcctcgttttacagataaagaaaatgggtacggccaagaccatagacctagtgattgtcagatgaacaattagacccacagaaccatccaagctacagaggacgcattctgccttcccttggatcctgtggtttgaggatggaggtctaggaccgtggcagg

SEQ ID NO: 681278 - DNA, 640 bp, Homo sapiens
gggctgctgggtcccaggccttgggctggcatggataatcccttcatgctccccttgtcactaaacccccccacctcacctgccaacacacacacaaccacctggagcccctgccagtgtttcctcttcctcccacttggcatgttgaagaccagaatcactcccctttcactccccacttcatcccacctgggaaaacaggaccctgccggccaactcagagccccacagggttgcattttaggtaccgtttacattttctttaagccctgttcacattctccattcacattgggaaaaatataaagggttagtatccccagcattgatgaggttctaaggcagagggtacgcaggtgggactacagcgctttttgggggacatttggataaaatccatcccattgccgggcgcagtggctcatgcctgtaatcccagcactttgtgaggctgaggtgggcggatcgcttgaggtcaggagttggaaaccagctggccaacgtgacaaaaccccatctctactaaaaatacaaaaattagttgggtgtggtggcgggcgcctgtaatcccagctactcaggaggctgaggcatgasaattgcttgaacccgggaggcggaggttgcagtgaacggagat

SEQ ID NO: 681279 - DNA, 615 bp, Homo sapiens
cagttggtttacgctcyccttttattcacctcccccaaccttcccctcctccgtaagaattggaaacagagagttgatagttgaggtctgatttatagctgaggattgaggtcaaatttgtagctgaagattgaagtccatttactgagtgcctacttctaccaagcattgttttagaggtgtttacatacatcattttatttcattctttttttttttatttgagatagcgtcttgctctgttgcctaggctggaatgcagtggcactatctcggctcactgcaacctccatctcccgggttcaagcgcttctcctgcttcagcctcccaagtagctggaactacaggcatgtgcccccacacccggctattttttacatttttggtagagacagggtttcaccatgttagccaggctggcctcaaactcctgacctcaagtgatccacctagtttggcttcccaaagtgctgagattacaggcatgagccactgtgcccggccttaattcttataagaccctttcaaagtaggtgtcattaccctattttcctgatgaagaaatagaggctcctagagactgaatggcttgcttacctttgtatagttactaa

SEQ ID NO: 681280 - DNA, 615 bp, Homo sapiens
cagttggtttacgctctccttttattcacctcccccaaccttcccctcctccgtaagarttggaaacagagagttgatagttgaggtctgatttatagctgaggattgaggtcaaatttgtagctgaagattgaagtccatttactgagtgcctacttctaccaagcattgttttagaggtgtttacatacatcattttatttcattctttttttttttatttgagatagcgtcttgctctgttgcctaggctggaatgcagtggcactatctcggctcactgcaacctccatctcccgggttcaagcgcttctcctgcttcagcctcccaagtagctggaactacaggcatgtgcccccacacccggctattttttacatttttggtagagacagggtttcaccatgttagccaggctggcctcaaactcctgacctcaagtgatccacctagtttggcttcccaaagtgctgagattacaggcatgagccactgtgcccggccttaattcttataagaccctttcaaagtaggtgtcattaccctattttcctgatgaagaaatagaggctcctagagactgaatggcttgcttacctttgtatagttactaa

SEQ ID NO: 681281 - DNA, 1823 bp, Homo sapiens
ttgagagcgcccagtaggagtcatgcctcaatgttaggaggttaatgccaaacgcagtgaaagattttgttctttcctattctagataagagcaacacgagtcttcggagaggttaagcgacttcctcagggtctcgcagtcagccggtagcagagaccgggtgtacagcacccgcatgttaggaccaaaagccggacactgctggattgacccctcgcggccaagcggggaagaggcatttaggggtccttgcgcagccgcgtggcccctcccactcggccctcgatccaccctccttgagagcaggcaggattctagcatcacccagtgccttcatcaagagtctttaaccccaagcccgctcgctagcgacctccaggccggtttggggcgcggtgtggccggtggcgagaggtggagtgggggcggagaccgacccagtcttcgcaactctatttgcatacggaggcgactcgcttccttcccgcccctccgccgcgctcttcttccttccttctccagtcccttccactgtgcgtcttctgtcccccgttcttccccagcggacccctctttcgagactccctagtggggtycccagctcccgggcgatcctgcccttgccgagcgcgttttctggagtcacctgggggaggggagtcctgggcagggccgggctggggaagacgcctggggcactgcccggcgttaacaaagggagccgataccgaccggcgtgggcgcggagcgggcggccgccaccgagcgtgctgagcaaccgcagcctccgcggccgagagtgcagcgagtgagtagggggtgcggtgggcggcggcgcggcccgggctatcccgggaggagtgtgatgcaaaggggcgcgggaggatagcggaggcgcggggcccgcggcgcgcgtagggcgcagggaatctctctccagctccgcctcagctgccttggctccggggctggccgccttttggttgggggtgtgtgcatttttgtcagggccaaagggccaccctggcttctctctggctccgcgagcctgcggatccacaacaaacccacgtgcgcacagccccggggaacacggatttctccacggcaccgtcagtatggggtggggtggcgtgggggcattgcgccttgcagagtctgggtttacggatcgacaaattgaggcccgcggcagcggagggggcacaggcaccataacaaacgcacgtgcgccctgcccggagagctggacgcactgcatacccttaggggccgccctgcggtgccgggccattgtctcagcctcgggggagggagtggctctagaggcgccacttgctggaagagggcgagagagacatttaaaaggtaccgcttgggcatcagactaaactgccagacttaaaaagggaaaccaaaacaagaaagcagctacaaaaaggttactccaggctgagtcggtccccggccgtggcgcattcttttgggtgaagtggaccacccctcaccttcacctcctggaggtctcttagagatgtgggttgggttaagggtctaagggtgcccctcaaaaaaagagagtgctgggtgcactattgtccccgcactccggcgattgcctctgtggggatattttggtcgcctcctcagcctgcgggaagaatgtacgagtcgcccagtgcggtcttgctctttgcctctgaggcccgtgtccgtgtgcccagacaccccagatgtcactagccccttttggcttgttaatgcattttcgcaagcaaggccagccgagacctcgtattctagctggggacgtacaattttc

SEQ ID NO: 681282 - DNA, 1823 bp, Homo sapiens
ttgagagcgcccagtaggagtcatgcctcaatgttaggaggttaatgccaaacgcagtgaaagattttgttctttcctattctagataagagcaacacgagtcttcggagaggttaagcgacttcctcagggtctcgcagtcagccggtagcagagaccgggtgtacagcacccgcatgttaggaccaaaagccggacactgctggattgacccctcgcggccaagcggggaagaggcatttaggggtccttgcgcagccgcgtggcccctcccactcggccctcgatccaccctccttgagagcaggcaggattctagcatcacccagtgccttcatcaagagtctttaaccccaagcccgctcgctagcgacctccaggccggtttggggcgcggtgtggccggtggcgagaggtggagtgggggcggagaccgacccagtcttcgcaactctatttgcatacggaggcgactcgcttccttcccgcccctccgccgcgctcttcttccttccttctccagtcccttccactgtgcgtcttctgtcccccgttcttccccagcggacccctctttcgagactccctagtggggtccccagctcccgggcgatcctgcccttgccgagcgcgttttctggagtcacctgggggaggggagtcctgggcagggccgggctggggaagacgcctggggcactgcccggcgttaacaaagggagccgataccgaccggcgtgggcgcggagcgggcggccgccaccgagcgtgctgagcaaccgcagcctccgcggccgagagtgcagcgagtgagtagggggtgcggtgggcggcggcgcggcccgggctatcccgggaggagtgtgatgcaaaggggcgcgggaggatagcggaggcgcggggcccgcggcgcgcgtagggcgcagggaatctctctccagctccgcctcagctgccttggctccggggctggccgccttttggttgggggtgtgtgcatttttgtcagggccaaagggccaccctggcttctctctggctccgcgagcctgcggatccacaacaaacccacgtgcgcacagccccggggarcacggatttctccacggcaccgtcagtatggggtggggtggcgtgggggcattgcgccttgcagagtctgggtttacggatcgacaaattgaggcccgcggcagcggagggggcacaggcaccataacaaacgcacgtgcgccctgcccggagagctggacgcactgcatacccttaggggccgccctgcggtgccgggccattgtctcagcctcgggggagggagtggctctagaggcgccacttgctggaagagggcgagagagacatttaaaaggtaccgcttgggcatcagactaaactgccagacttaaaaagggaaaccaaaacaagaaagcagctacaaaaaggttactccaggctgagtcggtccccggccgtggcgcattcttttgggtgaagtggaccacccctcaccttcacctcctggaggtctcttagagatgtgggttgggttaagggtctaagggtgcccctcaaaaaaagagagtgctgggtgcactattgtccccgcactccggcgattgcctctgtggggatattttggtcgcctcctcagcctgcgggaagaatgtacgagtcgcccagtgcggtcttgctctttgcctctgaggcccgtgtccgtgtgcccagacaccccagatgtcactagccccttttggcttgttaatgcattttcgcaagcaaggccagccgagacctcgtattctagctggggacgtacaattttc

SEQ ID NO: 681283 - DNA, 594 bp, Homo sapiens
ttaaggaagttgctcaacttcacatagtcagaacatgactctagggagtagaggctagcgaagtggggtgcaagaggtcatccaaatttcttgaaataccagatctttttacctcatcatatatgttagattgtcagttttatcgttttcttcccagctttattatttgacaaaaaattatatatattcaaggtgtacaatgtgatgactggatataattatacattgtgtaatgattaccaaaatcaaattaagtaaaacatccttcactaatttatgtagtagttcggkgggggggcacttaagcaaatttgtcttagcaaacttcaagtaaacaatacagaattattagctatagtcaacatgttgtacattagattcccagaacttgtcttaaaactgaaaacttgtaccatttgagagagaagttttagtgttactgaaatcacagacttctgacagaatttgcaggatgctatacacaactacacaaaagtgcaaacaatagtttcttggaccaagagtcaaaaaggtcacttttttaatatattagtcaagcagacagggctatactttataaataaatacacatta

SEQ ID NO: 681284 - DNA, 594 bp, Homo sapiens
ttaaggaagttgctcaacttcacatagtcagaacatgactctagggagtagaggctagcgaagtggggtgcaagaggtcatccaaatttcttgaaataccagatctttttacctcatcatatatgttagattgtcagttttatcgttttcttcccagctttattatttgacaaaaaattatatatattcaaggtgtacaatgtgatgactggatataattatacattgtgtaatgattaccaaaatcaaattaagtaaaacatccttcactaatttatgtagtagttcggggggggggcacttaagcaaatttgtcttagcaaacttcaagtaaacaatacagaattattagctatagtcaacatgttgtacattagattcccagaacttgtcttaaaactgaaaacttgtaccatttgagagagaagttttagtgttactgaaatcacagacttctgacagaatttgcaggatgctatacacaactacacaaaagtgcaracaatagtttcttggaccaagagtcaaaaaggtcacttttttaatatattagtcaagcagacagggctatactttataaataaatacacatta

SEQ ID NO: 681285 - DNA, 589 bp, Homo sapiens
agacttatacaaaagttgagcgagtccactgagctgagaggacagaaatgaagtcacctgtgctggggcaggggcagggacactgggggcagggagtgtgtgggcagagaagccagagaagtccaggcctgtggaagccaaacaggagagcgtgggccggaagggcggtcaggatcgggggacgaggtcgctctccctggagaacgaaccctaaggtgcgtagcctgggattccctccctgggggtcctgtcccccgacatttcacgggccttctgagctgcyttccaaggaggactaacacggcaacaaaagaaccatttctgcacaaaaatccttctgggaagaaaaagaagaaagccaagaatggagtcaaaacgctacccagtgctgactaagcctctcaaaccctgttctaagtggactgtggtttctaagtcagggaaatggaagaggccccacccacacagggacagggccatggcccccacaggatgaagcagcagcgtttattcaagatacaacagtgagggaatccggtcacgttcccttctccccagagagggcgcttcttgacaagtgattcagtag

SEQ ID NO: 681286 - DNA, 589 bp, Homo sapiens
agacttatacaaaagttgagcgagtccactgagctgagaggacagaaatgaagtcacctgtgctggggcaggggcagggacactgggggcagggagtgtgtgggcagagaagccagagaagtccaggcctgtggaagccaaacaggagagcgtgggccggaagggcggtcaggatcgggggacgaggtcgctctccctggagaacgaaccctaaggtgcgtagcctgggattccctccctgggggtcctgtcccccgacatttcacgggccttctgagctgctttccaaggaggactaacacggcaacaaaagaaccatttctgcacaaaaatccttctgggaagaaaaagaagaaagccaagaatggagtcaaaacgctacccagtgctgactaagcctctcaaaccctgttctaagtggastgtggtttctaagtcagggaaatggaagaggccccacccacacagggacagggccatggcccccacaggatgaagcagcagcgtttattcaagatacaacagtgagggaatccggtcacgttcccttctccccagagagggcgcttcttgacaagtgattcagtag

SEQ ID NO: 681287 - DNA, 670 bp, Homo sapiens
ttgttttgtcttggagaggaggtcaaagtgggagtaaaaatagggagtttggtgtaaggtgggaaaagcaaaggaaccccgcatggatgggctgaagggtgtgatgggagaacggtgagaagtacgtttggggaagcaattggaaatagtagctaagcttaatcacaatctatcaaaagggacttgttgaagaattaatgtgtgactaggaacagggaggttatgggcttgtcagctcgacagygggcactcagttccactaatgaatgatgcccgtgtggacagacagaatgatggacaggcagatgaatgcgtgggctttatgtgaaacaggtcctcttggttgttgacaagatactgttttaaagttccattttgccatacttcgaacagcttgtcattagctcaatttagccacatgtaaaatcactaaggcggacttccagagttcccacatgaaaatcaaatgtaaaccagcagtgacctgcttcaacaccatcatcggaagtcagaagttgaactcttttttgatgtttaaagcctgcataatattcgctgtattattattcagcatattactatttccttcgtgatggaaatttggtttatcccaattttctattccatcaaaacaccgctacatagaaaatccccatgcacatatttctcc

SEQ ID NO: 681288 - DNA, 670 bp, Homo sapiens
ttgttttgtcttggagaggaggtcaaagtgggagtaaaaatagggagtttggtgtaaggtgggaaaagcaaaggaaccccgcatggatgggctgaagggtgtgatgggagaacggtgagaagtacgtttggggaagcaattggaaatagtagctaagcttaatcacaatctatcaaaagggacttgttgaagaattaatgtgtgactaggaacagggaggttatgggcttgtcagctcgacagcgggcactcagttccactaatgaatgatgcccgtgtggacagacagaatgatggacaggcagatgaatgcgtgrgctttatgtgaaacaggtcctcttggttgttgacaagatactgttttaaagttccattttgccatacttcgaacagcttgtcattagctcaatttagccacatgtaaaatcactaaggcggacttccagagttcccacatgaaaatcaaatgtaaaccagcagtgacctgcttcaacaccatcatcggaagtcagaagttgaactcttttttgatgtttaaagcctgcataatattcgctgtattattattcagcatattactatttccttcgtgatggaaatttggtttatcccaattttctattccatcaaaacaccgctacatagaaaatccccatgcacatatttctcc

SEQ ID NO: 681289 - DNA, 2061 bp, Homo sapiens
tttaatttcttcagttgtaaaaggtgtattttaaacctatataaaggtacatggagatcgtcattcagaataacaaaataaaaagcaatataaagacacaaatagatatagtacaatattaaatactacaatattcaagatgatattaaaattatatatatctacatctatatgcatgtaaggatctcagtaaatgatattgtctaaaattaaactgtggtaatttttgcagacctctgtgaatatattagaaaccattgaattgtgtgtacactgtgtgtgggtgaaatttattgtatttgaattatatctcaaagttctgttaaaaaatgaatggcttgatattctagtgctaagggatggttttatttaaaacataaactaatagtttccagcagagtcccttaaaaatattacagcagggatttccagatcacactcactcccacctttttagaatttttgactattttccaaagtattgaattcaatgaggtgcaggtggaagaaagcgtttacaaagtcagtgggttacgggagagctggtgtgggttgaggcagagtggggagagaggctcctttcaaatggaagcctctggaacccacagacggcaagcgtaaggcagggcaatcttctggagacctaccagagaaaggctttagacccaacactcccattcacaaacatggacaggggcatctcagtgtttccttaacttcactctttctatattgacacaaggaaataattaaaagggggtaattctggtttagtttatttcattaaattatcaacaaacaacttttgaaacaaaaactattaaagtggaactcaataaaattactaggtttaataatctgtatctgtgactcagatacagatcaggcaaaccagctgtggatgaagctcccagctgtggatgatgcccccagacatggatgaagcccccagctgtggatgatgcccccagatgtagatgaagccacaaatgatgcctgtgtggacagacagaatgatggacaggcagatgaatgtgagggttttatgtgaaacaagtccacttggttgttgacaagatgctgttttaaagtttcattttgccatactttgaatagcttttcattagctaaatttagccacatgtaaaatcactaaggcagacacctggagttcccatatgaaaatcaaatgtaaaccagcagtgacctacttcaatgtgatcatcggaagtcagaagttgagctcatttttgatgtttaaagcctgcataatattcactgtgttattattcagtgtattactatttccttcatgatggaaatttggtttgccccaactttctattctatcaaaacactgctacatagaaaatccccatgcacatatttctcctaattgtggaaatattttacataaaagactctagacatgggatgaaattcccaggttattggaattttaaaatagataggtactcccaaattgccgtcttacaaattatatgaattcgtaagcttccaactgttatggagttacccattttgagaaatctgtgctaaaaggacccaaacaatgctgatgacaatgatcaggataataagtacgctgggaagacaacaaaatgatttaaatcttagacaagtcattctaggtgtctccactgtttcagttcttgcattcattcttgtggtatcttttcccttttaccaataaaaaagctccctgacatcacattgtggcagtccccatggtttgccgcagttactgcgggactgaacgaaggaggacgaatgaagaaatgmaaaccaaggaaaaaaggagctgtttaaagaagggtccagggaagaagaagagggctcccagcttctagtgagcaagggcagcagccctgagcttctacagcccttcatatttattgagtagaaagagcagggagcaggaggtaatgattggtcagcttctcaattgatcacaggttcacattattgctaacaggtttcagatgtgcctaatctcaagaaacgccgcgcctggggcatgactgccctcagcattccctc

SEQ ID NO: 681290 - DNA, 2061 bp, Homo sapiens
tttaatttcttcagttgtaaaaggtgtattttaaacctatataaaggtacatggagatcgtcattcagaataacaaaataaaaagcaatataaagacacaaatagatatagtacaatattaaatactacaatattcaagatgatattaaaattatatatatctacatctatatgcatgtaaggatctcagtaaatgatattgtctaaaattaaactgtggtaatttttgcagacctctgtgaatatattagaaaccattgaattgtgtgtacactgtgtgtgggtgaaatttattgtatttgaattatatctcaaagttctgttaaaaaatgaatggcttgatattctagtgctaagggatggttttatttaaaacataaactaatagtttccagcagagtcccttaaaaatattacagcagggatttccagatcacactcactcccacctttttagaatttttgactattttccaaagtattgaattcaatgaggtgcaggtggaagaaagcgtttacaaagtcagtgggttacgggagagctggtgtgggttgaggcagagtggggagagaggctcctttcaaatggaagcctctggaacccacagacggcaagcgtaaggcagggcaatcttctggagacctaccagagaaaggctttagacccaacactcccattcacaaacatggacaggggcatctcagtgtttccttaacttcactctttctatattgacacaaggaaataattaaaagggggtaattctggtttagtttatttcattaaattatcaacaaacaacttttgaaacaaaaactattaaagtggaactcaataaaattactaggtttaataatctgtatctgtgactcagatacagatcaggcaaaccagctgtggatgaagctcccagctgtggatgatgcccccagacatggatgaagcccccagctgtggatgatgcccccagatgtagatgaagccacaaatgatgcctgtgtggacagacagaatgatggacaggcagatgaatgtgagggttttatgtgaaacaagtccacttggttgttgacaagatgctgttttaaagtttcattttgccatactttgaatagcttttcattagctaaatttagccacatgtaaaatcactaaggcagacacctggagttcccatatgaaaatcaaatgtaaaccagcagtgacctacttcaatgtgatcatcggaagtcagaagttgagctcatttttgatgtttaaagcctgcataatattcactgtgttattattcagtgtattactatttccttcatgatggaaatttggtttgccccaactttctattctatcaaaacactgctacatagaaaatccccatgcacatatttctcctaattgtggaaatattttacataaaagactctagacatgggatgaaattcccaggttattggaattttaaaatagataggtactcccaaattgccgtcttacaaattatatgaattcgtaagcttccaactgttatggagttacccattttgagaaatctgtgctaaaaggacccaaacaatgctgatgacaatgatcaggataataagtacgctgggaagacaacaaaatgatttaaatcttagacaagtcattctaggtgtctccactgtttcagttcttgcattcattcttgtggtatcttttcccttttaccaataaaaaagctccctgacatcacattgtggcagtccccatggtttgccgcagttactgcgggactgaacgaaggaggacgaatgaagaaatgaaaaccaaggaaaaaaggagctgtttaaagaagggtccagggaagaagaagagggctcccagcttctagtgagcaagggcagcagccctgagcttctacagcccttcatatttattgagtagaaagagcagggagcaggaggtaatgattggtcagcttctcaattgatcacaggttcacatkattgctaacaggtttcagatgtgcctaatctcaagaaacgccgcgcctggggcatgactgccctcagcattccctc

SEQ ID NO: 681291 - DNA, 673 bp, Homo sapiens
tttttcaggggagaacctacaaattataaggctgtgcagctccccttactagtcaagtgattacacttttgttttcttttatttttttttagagacaggatctccctctgtcacccaggctggagtgtggtgccgcagtcacagctcactgcagcctcgaacttgtgggctcaagtgatcctgcctcagcctcctgagtagctgggactacagacacactccaccatgcctgggtaattgtttctagttttgtaragatgaggtctccttgtgttgcccagaatggtcttgaactcctcgcctcaagcaatcctcccaccttggcctcccaaagtgctgggattataggtatgaaccaccatgcccggcctcatgtgactactcctacagaggccctcgatggcctggaatgattgattccaggaccctgtcttctcatcccaaagcaccaaaccctactgacaaggaaagagcccccatttcagaacttccatggccaccccccaaccctgggattggcaactttgcaacctgggcttctccgataatcagatttacggtaagaccccaaagaggtccaggcgcttctaaaacaagttagacagagaatccaaacccaaatcctcaagatgtgagcccacatcacatcccccaaaatagagcatccgtgacc

SEQ ID NO: 681292 - DNA, 643 bp, Homo sapiens
gtaacacggtgaaaccccgtctctactaaaaatacaaaaaaaattagccaggcgtggtggtgggtgcctttagtcccagctactcgggaggctgaggcaggagaatggygtgaacccgggaggtggaggttgcagtgagttgagatcgcgccactgcactccagcctgagtgacagcaagactccgtctcaaaaaaaaagtgcagtgttaggctcacaggatcgccgccccaacactgggctcaaggcatttggggaagactttttcatggaaggggatggggtgtagctgtgttagaactggatgcagattgtcccaaccttgtggagtgatgctgggagaacccaggtggggcaaagaaggcttttctggggaaggagcataatagctaggaccataaaggatgaataggagttcttcctcctggggcaaagcagtctaggaagaaggcagaagtatgtggagggctgtggcaaagggacaatacttgaaggaatatgagcaggacattgaggggagtctagagggtaaaacaaggcctgagagagggaccccaaaatctgaaaaagaagcccctctaggccttgatgtgtggctcccactgggcaaaggggctcacaagcaggtcagttaccccaaggcc

SEQ ID NO: 681293 - DNA, 963 bp, Homo sapiens
caccatgatattgtgtcaaacagaatactttgactaccctaaaagtctccctgatacagatacttttgtggtctcaggatcttgctcataatcccagttttcctgagttatatgcaagaaaaaaattaaaagttaatggtaacaatatatgctatctaacaatcttattaaccatgtattctctgggggtcaatctaacatgcacagaagaacacctttaagagggttgtagtcatgataactgtgtgcatttaacttcaatgcaaaaagttacagagtggagaccctgaattaacccacaatatttccaagtgtggctaatgtatcattttataatttgactctccgaggtccagattaagatctatatgctgctaaaactatggtgtccccagctactcaggaggctgaggctggaggattgctcgagcccaggaggtagaggttgcagtgagctgagatcacaccactgcactccagcctgggtgacasagagagagaccctttctcaaaacaaaatgaaacaaacaaacaaaaatattatggtgttcatcctcatatttaattcaaaatacaaacaacaataaaccacagaataataataataagtaagtccgatcggttttttattgatgatgactacctgaatgttcctttgaaaatatctgaaacagcacacccttaaaaaacaaaacaaaacaaaatctttctcttactctacatttgctgatacctgaagcacacatttggccagcttgctgtataatctagaactatttttttctgtatttcctattcttgtaaattgtttgtgttcttacttttgctaaataaaaaacttatttttttaaatacagtgtttttactatttttgtgcaaatttattctttaaatttggatagaatgaagagaaaaggcaaagggggaaagggaggagaattgtaaatatctgtgaaaatcctc

SEQ ID NO: 681294 - DNA, 1964 bp, Homo sapiens
atgtctcctgcgtttcggagagctgcatattcatgtcagtcataacctttgtccctgtaacctgtcagttaactagaaagaattatacattgcatagcacttaaaaatttgcggccgcttttcctttcttgttgcgttggtagctgacgtttagtggtaaacaaagaaaatgcactgggtgaaaaggccttaggctttttttttgtagggtgagagtgggggagagatctcttgctctgttgcccaggctggtctccagctcctggcctccggcagtcctcccacctcagcctcccagagtactaggattatgggcatgagccaccacacctagccaggctttttatattgagttggttatatatgcttcatagccacactttataatattggagtatagtattaaattacagcttgttgtcaagtcagtgtttctgtaagacagtatatccaatattggttagagtaacacctatttggtgatacagatcaacagggtgtctctgattaatttagctcctacatagccagaagcaagttcattatgayttagaatattgtacatggttatgcaggaatcatcccaacctatctgtgtttataggtcagatgatgttcagtttatatctgctgatagtgtatatgcaggaaaacctataaaaccacttcagacttgttaaaacagtgagaaagccgtgattgaaatattaatacaactgtgtggtataaattttcatttacaatggaatgtaaatgctgtcatttgaatcttgtcaaagcctgctactaaaactctgaaataccttgtctagggaataagtcttcagtccagaaacaatatagatgtgatgtgtgtgattatacaagtacaacatatgttggtgtcagaaaccacaggcgaatccataactctgataagccgtacaggtaagtgttatgattctagaattttaatgtttgtattaaaatattttatattaaagaaataaaatgaaataaaaatgtatagcacttactgaaacacaggttaagaagtaagaaattttcactaattggttttatattttgttgttttatatatttacttatttattttttgagtcagtgtcttgctgtattgcccaggctggagtgcagtggtatgatcacagctcactgcagcctcgaactcctggcctcaagggatcctcccacatcagcctcccaaagtgctgggattgcaggcgtgagccactgcacctggctggtattatgtcttgtttgatttgttaagatgtgaactttaagcttgaatcttaggacagtaggcattttgtctagttgatacataggaaattgtctttatctgtcaattttatgttttcatttcatatgggtataaatttcatagcaattttcaatgccttagagttcatttcagtaatttggcagtaaggtactcagtattcagcaaaagatccttaaaacttaaaggcaataaaattttctatgaaagagtccatttttcaaaattaagctagtatgtgtagaataagtcatttaatttcattacttgatttttcccaaaagcaaattcagatatatatttcagaaaatataggcattctcagtgatagtgctaggcaatgcgcatgaactttcacccccttgtcaaaacttagcaggtttaactctctccccagattctgtagatatgatacaagtgagtgtgggaaagttattgtattaatctcaatgaaaacctgacagattgtgccataaaaggtcattgtttaatcccaaagtgtggtgatctgtgtatggtttcgaatatttaatatgtgcttaatttgcaaaccagcagacttacttataatcactcttcagaaagtacatctgtttgcagagtcttaaaactctgtggaaggtgtttgaccttgcctcagtcctcctcagtgtcttccttccttccttctttccttcct

SEQ ID NO: 681295 - DNA, 642 bp, Homo sapiens
tgggattacagtcgtgcaccaccacgcccggctaatttttgtatttttagtagagatggggtttcaccatgttggccaggctggtctcaaactcctgacctcgagtgatttgcctgcctcggcctcccagaatgctgggattacaggtgtgagctaccacttctggccaaggtttagctgtttaatttgggtctttgggcccataatttgttggggctagggactcttattttgggatctctgggtgctcaaaggagcatcatagggaagaygaagggtgcccatcagggttcctgcccatccttcctgcaatcccagaggtcactaatcattctttttccctctttgcagatgtttggttccagcagatacttgggttcctctgaacagcccagagctaattcactgggtcccagtgacaggtaagggcttgccccatctcccttatagccccagccactctcattgaataataataacaaaaacatttgctgagcatttaccgtttgctagactctttgccaaacattttgtttgtatgataactgttaatccatacaacaatctcatgaggaagttgtgtacaaagatgcctaccattttccagatgagagtactctgaggtgatcggcaaagatcatt

SEQ ID NO: 681296 - DNA, 629 bp, Homo sapiens
tgcttatggaccaaaaccctcagtgacggaagaggctaagtcagaatgtcagtcaatgatgtcgctaagcacactgtgtagttcagcaaacattgttcagcaagatttcttgctgcagcagttgcttgatgtacgtactggcaaaagcttgtgatctcatcacagataagcagaggaagtagccctaccttatacctctttgtataccaaaaatatttcatgagkgttatgaggtttacaaaaattctgataatgaaaatatgtaaatatagccgcctgtaataccagctactcgggaggctgagacaggagaattgtttgaaccctggaggtgggggttgcagtgagctaagatcacaccactgcactccagcctgggcaacaaagcgagagtccgcctcaaaataaaataaaagaaaataataaggagtacagggctgggcacagtggctcacgtatgtaatcccaacaatttgggaggcctaggagggcagattgagcctaggagttcaaatccagcctgggcaacatggagaaaccccatctcttcaaaaaaatacaaaaattagtcaggcatggtgacacatacatgcctgtagtcccagctacttgggaggctgaggtgggtg

SEQ ID NO: 681297 - DNA, 2627 bp, Homo sapiens
ttctattgcttataataaactgtttttaattcaccctttgatatggacctaattaattcaagtgttttaacaaacaatttttgttctatatttgtctctatagggtttctccatcttggtgctattgatattttgggcaggataattcattgttgcgagagctgttctgtgcattgtgaaatgtttggcagcattcctggaaaccactatcttgtgactcattagataccagtatcactgcaccctgagttataacaaccaaaaatgtctcccaacattgacaaatgttccctttctgaagataaggggcagcattgctcccagttgagatccactgctatagactttacaaatacaacaattaaacactaatcttattactcatcccccctcaccctatgactcttacatattcattctctgttatagttaatgagttcactgattcaccaaatctctaagacgtgaaacctcagagtcatataacactactttcttctttctaagtcttaycccttcagaagccctattggtcctccattagctgtcactctattcttccacttctttctacctgcatttccactacttcagttcaatttgttggctttttcctagatgctttcaacaggctttgtcttaatttttctacctctctctgtctctttagtttattattctcttactggcaaacttacactcttgataattcaaatttcatgaaatcatgcagatttcaaacaaaaacaacaaattttaaaagcaattgaagatgaagtttattgactgataatttccattaaaaaatcaccaaattaatttcatgataacacaagccatgtttttgcttatggtgggaaaagatcaccactttgatagtctcagtaacatctcaaaaaagaaagatcaaggaaaagactatttgtaaagttgagtgggaaaggttggtttaaggcggaccatcaatgcatagatctgattgggatcaagcaaggttcataatacaatactttaaggttggtagatccagaagacaaaatgatttgtacaagctcaaacacttgttggatgagtctagtgctctgagaaggtaccatttaccctgactgatgcaagctgttcagataaatgaatttttaggaagctcctaaagcaattacaatgacttgcaactttttccctcagagcaagaattttctgaaatagcaaagtcaagcttatgcagtgaaccttaaactgggtgactagacatagtttcaattcccaagtccaaagttctatgacaagtaagacttttgacaaatgaaacaatctagcccttcccaaattttgattatcatgtatagaccctacctggcttgctccctcctggtccagccatgggaaaactattcttccataaccacatgctttctgacctcctaatctttttccaggaaagagagagaaatcatcatgttttaaaactttctcagaaggttattctacattatatcagtcatcttcaaagcaactcattccttggaggtagtaattactgttgaatttttcagatgaaaacattaaggtagagattgggatttttttttctaggtcacataaatgttacattgaaagaattgactaagaggtcaatttgattccatgcccaagttctttacagaattacacattcttgtttattttttacctgaattccccaaagagaaggtgtcattctccagtctcagctctgaggacacttgaccatttctaatactacaacatttagacacattgaaagataattttaatgtaacagggtacatctcatcttcattattgatgatgaatagtgttattattgtgggtatcaccaacaaatattaatagcatacagtctgatatttagtaagcatcaaatgtatattgggtctgttatgatttaggctaaatgagtgaatactgtgcatcataacttttgatgttgcttataactaactgactagttttacccgggcctatgtgtgtgtatttatgtgcatgcatgcaacataaaacaggagaagagagagaaaaggagagatagaggctatatatttatcttctaatctgaattcacaaaaaaattatagctgtatatgttccaaaatggaacaaattatttaaaataagagtgtatgatatacctaataacaaaaacattagctagatgtatttgacataaaaataaaaatcagagtgctttaaaaatattagcttattggataaaaacattatgtccctaaaagctctaggtgaggagaagtagtaatgaggttgagcatagtgcacaataagtaatcccaactttatcctattttgtttatatcttaacagttttcatcttaaaacctacatgtattgacaactcagtaagtaccattgtcatcagcagcagcagttagtagaatactattattcttatttatcacactcaagcaaacagaatattgtattccattttattcagaacttttaagttatatttgaaggcagaatggattatggctttaaaaaaaaacctcctctgggtcaaagatatttctggatcaggattttgcaagacagagtccaaagattaaagagagatcaggctgttctcggtc

SEQ ID NO: 681298 - DNA, 2627 bp, Homo sapiens
ttctattgcttataataaactgtttttaattcaccctttgatatggacctaattaattcaagtgttttaacaaacaatttttgttctatatttgtctctatagggtttctccatcttggtgctattgatattttgggcaggataattcattgttgcgagagctgttctgtgcattgtgaaatgtttggcagcattcctggaaaccactatcttgtgactcattagataccagtatcactgcaccctgagttataacaaccaaaaatgtctcccaacattgacaaatgttccctttctgaagataaggggcagcattgctcccagttgagatccactgctatagactttacaaatacaacaattaaacactaatcttattactcatcccccctcaccctatgactcttacatattcattctctgttatagttaatgagttcactgattcaccaaatctctaagacgtgaaacctcagagtcatataacactactttcttctttctaagtcttatcccttcagaagccctattggtcctccattagctgtcactctattcttccacttctttctacctgcatttccactacttcagttcaatttgttggctttttcctagatgctttcaacaggctttgtcttaatttttctacctctctctgtctctttagtttattattctcttactggcaaacttacactcttgataattcaaatttcatgaaatcatgcagatttcaaacaaaaacaacaaattttaaaagcaattgaagatgaagtttattgactgataatttccattaaaaaatcaccaaattaatttcatgataacacaagccatgtttttgcttatggtgggaaaagatcaccactttgatagtctcagtaacatctcaaaaaagaaagatcaaggaaaagactatttgtaaagttgagtgggaaaggttggtttaaggcggaccatcaatgcatagatctgattgggatcaagcaaggttcataatacaatactttaaggttggtagatccagaagacaaaatgatttgtacaagctcaaacacttgttggatgagtctagtgctctgagaaggtaccatttaccctgactgatgcaagctgttcagataaatgaatttttaggaagctcctaaagcaattacaatgacttgcaactttttccctcagagcaagaattttctgaaatagcaaagtcaagcttatgcagtgaaccttaaactgggtgactagacatagtttcaattcccaagtccaaagttctatgacaagtaagacttttgacaaatgaaacaatctagcccttcccaaattttgattatcatgtatagaccctacctggcttgctccctcctggtccagccatgggaaaactattcttccataaccacatgctttctgacctcctaatctttttccaggaaagagagagaaatcatcatgttttaaaactttctcagaaggttattctacattatatcagtcatcttcaaagcaactcattccttggaggtagtaattactgttgaatttttcagatgaaaacattaaggtagagattgggatttttttttctaggtcacataaatgttacattgaaagaattgactaagaggtcaatttgattccatgcccaagttctttacagaattacacattcttgtttattttttacctgaattccccaaagagaaggtgtcattctccagtctcagctctgaggacacttgaccatttctaatactacaacatttagacacattgaaagataattttaatgtaacagggtacatctcatcttcattattgatgatgaatagtgttattattgtgggtatcaccaacaaatattaatagcatacagtctgatatttagtaagcatcaaatgtatattgggtctgttatgatttaggctaaatgagtgaatactgtgcatcataacttttgatgttgcttataactaactgactagttttacccgggcctatgtgtgtgtatttatgtgcatgcatgcaacataaaacaggaraagagagagaaaaggagagatagaggctatatatttatcttctaatctgaattcacaaaaaaattatagctgtatatgttccaaaatggaacaaattatttaaaataagagtgtatgatatacctaataacaaaaacattagctagatgtatttgacataaaaataaaaatcagagtgctttaaaaatattagcttattggataaaaacattatgtccctaaaagctctaggtgaggagaagtagtaatgaggttgagcatagtgcacaataagtaatcccaactttatcctattttgtttatatcttaacagttttcatcttaaaacctacatgtattgacaactcagtaagtaccattgtcatcagcagcagcagttagtagaatactattattcttatttatcacactcaagcaaacagaatattgtattccattttattcagaacttttaagttatatttgaaggcagaatggattatggctttaaaaaaaaacctcctctgggtcaaagatatttctggatcaggattttgcaagacagagtccaaagattaaagagagatcaggctgttctcggtc

SEQ ID NO: 681299 - DNA, 612 bp, Homo sapiens
cagctatgttgtctcccaaggttatggcaaaacttaaactattttttgttaatagtaaatgcccctygttctcttataattagtcactgtggaattttagaaaggtcatttggttgaaatatgaggctgcaatttgtttaaaaaggaaaaaggcagaggaaattatccttccatgatgcattagcccaggtcacagttaccccaggcattccgagtctatgttgtaaacagtctagtaccatcatagccaaaatgcatgtttcatcctgagacaggcacaaactcattaaactgacattcattcatgtgaaccacacattatctcattatacctctccaataccaaaacacttgattaaaaagttaaaaaactcctccacttcactacaaatgtgggctcaggtgaggctgggcacaccatatttgtaaatagctgggttattgagaaaagtagtttacaacatctggggagttgataaactacaggcaagatctttattcttgcttctattttattcttattggtcattcaaatcaaagacctatgtttagccctttctaattctatctagggaacaatcagttttgcagactatctaggcttgattatta

SEQ ID NO: 681300 - DNA, 612 bp, Homo sapiens
cagctatgttgtctcccaaggttatggcaaaacttaaactattttttgttaatagtaaatgcccctcgttctcttataattagtcactgtggaattttagaaaggtcatttggttgaaatatgaggctgcaatttgtttaaaaaggaaaaaggcagaggaaattatccttccatgatgcattagcccaggtcacagttaccccakgcattccgagtctatgttgtaaacagtctagtaccatcatagccaaaatgcatgtttcatcctgagacaggcacaaactcattaaactgacattcattcatgtgaaccacacattatctcattatacctctccaataccaaaacacttgattaaaaagttaaaaaactcctccacttcactacaaatgtgggctcaggtgaggctgggcacaccatatttgtaaatagctgggttattgagaaaagtagtttacaacatctggggagttgataaactacaggcaagatctttattcttgcttctattttattcttattggtcattcaaatcaaagacctatgtttagccctttctaattctatctagggaacaatcagttttgcagactatctaggcttgattatta

SEQ ID NO: 681301 - DNA, 1375 bp, Homo sapiens
atagtaatatttgattaccgtgtttgtaatgctctttaaacayagaaaaattgcatgtattgaaaatttcttttcatttacattaatatttaggttcaagaatctaagaaaaagtacatgtatatgcacacacacccacacacacaggaagggctacttgaatggctcttgatcaatataatgcattatgttttgaatacccatttagagataaacacaaaatctgattgtccttaatgactacttttcagtatagagtgtctttaaaactcataattcaatgaaagttaaactcaaggatcacattcattttaacatttatttacaggagtttcgataaccctattctcccacgccattgccctagcacaaagtcgctctgattctcacataatggtggtttccctttgtaatgaggaaggagggaagttaaggagaacctttcagctttactgactgtagtacaatactagaaggaatactctggagaacataaaaatgattgggtctattgaaattgcattattagctgccagtctttaaaattaaaaaaaaaatgcttaatctcaaggattttacctaaataaaagctatgtggaagttttcaaagaacttacatttttcagagaatgctgtgatccatgttctgaaggcatggcataagaaaatcacataggaaagtcattcattttaattatgctttaagtatttaaaatgtacctaaacaatgaagaaatattatcatactaccttcatccaaaaaagacaatcacttgttcagcaaccagacaaattgcataactgttgtttgaaatacgaatgattatacttctgggaaaagtattatggcatatgtatcagcagtgctgaaatattcatgtttgtttttatcctagatttgcattactataaaataatttgaaattctctaaaagattaatacctaaaaaaattagaaacaagtaaaattaaggttatagttatgtaaattatggcataggcatagataaaatattgctaacccattacaatcatgttttggaagttttctttaaggttttattgatatatagtacacatatcaaaaattcacatctgggtgaatttttacaaattaaacacatatgtgttctcatgccttgaccaagaaaccaaacattaccctcatttcagtatatgaaaagtttaaaaacctaggtcctgtaatcatgctcctcagaccaacagcatcaaactcccatggaaatttgctcgattttctaacttacaaattctccgattctacccctgacctaccaaattagaagttctgtgggtaaggcccagcagtctgttttaacaaagcctgcaggtgattctgaggcacaataaagtt

SEQ ID NO: 681302 - DNA, 1375 bp, Homo sapiens
atagtaatatttgattaccgtgtttgtaatgctctttaaacacagaaaaattgcatgtattgaaaatttcttttcatttacattaatatttaggttyaagaatctaagaaaaagtacatgtatatgcacacacacccacacacacaggaagggctacttgaatggctcttgatcaatataatgcattatgttttgaatacccatttagagataaacacaaaatctgattgtccttaatgactacttttcagtatagagtgtctttaaaactcataattcaatgaaagttaaactcaaggatcacattcattttaacatttatttacaggagtttcgataaccctattctcccacgccattgccctagcacaaagtcgctctgattctcacataatggtggtttccctttgtaatgaggaaggagggaagttaaggagaacctttcagctttactgactgtagtacaatactagaaggaatactctggagaacataaaaatgattgggtctattgaaattgcattattagctgccagtctttaaaattaaaaaaaaaatgcttaatctcaaggattttacctaaataaaagctatgtggaagttttcaaagaacttacatttttcagagaatgctgtgatccatgttctgaaggcatggcataagaaaatcacataggaaagtcattcattttaattatgctttaagtatttaaaatgtacctaaacaatgaagaaatattatcatactaccttcatccaaaaaagacaatcacttgttcagcaaccagacaaattgcataactgttgtttgaaatacgaatgattatacttctgggaaaagtattatggcatatgtatcagcagtgctgaaatattcatgtttgtttttatcctagatttgcattactataaaataatttgaaattctctaaaagattaatacctaaaaaaattagaaacaagtaaaattaaggttatagttatgtaaattatggcataggcatagataaaatattgctaacccattacaatcatgttttggaagttttctttaaggttttattgatatatagtacacatatcaaaaattcacatctgggtgaatttttacaaattaaacacatatgtgttctcatgccttgaccaagaaaccaaacattaccctcatttcagtatatgaaaagtttaaaaacctaggtcctgtaatcatgctcctcagaccaacagcatcaaactcccatggaaatttgctcgattttctaacttacaaattctccgattctacccctgacctaccaaattagaagttctgtgggtaaggcccagcagtctgttttaacaaagcctgcaggtgattctgaggcacaataaagtt

SEQ ID NO: 681303 - DNA, 650 bp, Homo sapiens
ttcgtaaggtttttgtgaagctaaaatgagaatgtgtgcaaacatgcaccactatgccaggcatatagtaaattgccaataaagacgacataagttttaaattacatgcagtcaaatccgtctgtctttttccctgtcgcttcatcctactcaccgccactcatctttcaaaattcaactccaacatctccttggagacatcgtctctgacctgccctgtcttcttgctcccctggtggcttttacatcccccactggaacacacagcacttgccacacagtcaggacccatctcctagtctgtctctggttccacccactggattataaactccttaaaggtagggcatttcttccactttgtgccctggcacctagcgcattgcctagcacgtaccaagcaagcactcgacacacatatgtctccttttccgtaatcaayaaatctcggtttaagttccatccatccgagaagtgttccttgtcaactcaagcttccactggctttgacatggtctattcaactgtgtatatccccactgaccagcatacaatgggtgcctaaataatatcacacgaaaaaaatgaatgaatggctgtatgaataactatcccagggttccagaaagatggaagactatgataaagag

SEQ ID NO: 681304 - DNA, 1136 bp, Homo sapiens
acgcatgagccactgtgcctggcctggtcttgaacttctgacctcaggtgatctgcctgcctcagcctcccaaagtattgggattacaggcgtgagccacggcgtctggccatgagcttgttttttttttttttccaggagatgttattagtttgactcttattttttttccaactgctgaagtttctccaaattctgcaaacatggcttaaaattaaaattgtcccaacccatcttatgtattcctttttatgtatttatttatttttgagatggagtctcactctgtcacccagggtagagtgcagtgggatgatctcagttcactgcaacctccgcctcccgggttcaaatgattctcctgcctcagcctcctgagtagctgggattacagatgtgcactgccatgcccagctaatttttgtatttttagtagagacagggtttcaccctgctggccaggctggtctcgaactcctgacctcaagtgatctgctggcctcggtctcccaaagtgctgggatcacaggcatgagccactgcacctggcccatcttatatattctgtcctattgacagacctgctattacatgaagtcccaattgttgacttcggaaaacgctgagttgcacgccatacacagaggctgggattgaagtgagacagcagagaaagccagcaatggggctactgattggtggtgggactctgcttgacatcatttaggttctttagacctcagtttctctccccgcaaaatgcaagtaataaaaaataatgtccctagctcacgagagtctttgcaagstttacagagtggtcagctcgtccatggaacataaatatctattcaaagggaatggaagaaagcattatgcatagacttttacacttggaggaaatggccaaccagaaaaatcatttggggccagagtgttgtatttatgtgcatatgcattgttgcattaaagcatttagttctgctccgtgagtacgtaggaaatgaatactctatggtctgtggtttccacacaggaaccttcaaagagactgttacactgacgtggccctccctctttatgaaaacctcaacattgtggagcagccggtgaacttgagcagccttgcccagaag

SEQ ID NO: 681305 - DNA, 1136 bp, Homo sapiens
acgcatgagccactgtgcctggcctggtcttgaacttctgacctcaggtgatctgcctgcctcagcctcccaaagtattgggattacaggcgtgagccacggcgtctggccatgagcttgttttttttttttttccaggagatgttattagtttgactcttattttttttccaactgctgaagtttctccaaattctgcaaacatggcttaaaattaaaattgtcccaacccatcttatgtattcctttttatgtatttatttatttttgagatggagtctcactctgtcacccagggtagagtgcagtgggatgatctcagttcactgcaacctccgcctcccgggttcaaatgattctcctgcctcagcctcctgagtagctgggattacagatgtgcactgccatgcccagctaatttttgtatttttagtagagacagggtttcaccctgctggccaggctggtctcgaactcctgacctcaagtgatctgctggcctcggtctcccaaagtgctgggatcacaggcatgagccactgcacctggcccatcttatatattctgtcctattgacagacctgctattacatgaagtcccaattgttgacttcggaaaacgctgagttgcacgccatacacagaggctgggattgaagtgagacagcagagaaagccagcaatggggctactgattggtggtgggactctgcttgacatcatttaggttctttagacctcagtttctctccccgcaaaatgcaagtaataaaaaataatgtccctagctcacgagagtctttgcaagctttacagagtggtcagctcgtccatggaacrtaaatatctattcaaagggaatggaagaaagcattatgcatagacttttacacttggaggaaatggccaaccagaaaaatcatttggggccagagtgttgtatttatgtgcatatgcattgttgcattaaagcatttagttctgctccgtgagtacgtaggaaatgaatactctatggtctgtggtttccacacaggaaccttcaaagagactgttacactgacgtggccctccctctttatgaaaacctcaacattgtggagcagccggtgaacttgagcagccttgcccagaag

SEQ ID NO: 681306 - DNA, 1053 bp, Homo sapiens
tggatggagaccactggcttatttgatatgatgattaggaggttaagagagtttccaaagtatagaatttttggtcagaactctacagattttttttcaggttccaaaagatgaaactaagtggcaattcttggttttgggtaaagaactctgtgctttcttaaaatatattaaacttttkttaatcgcttttaacagcccatcctatgaaactaagtcgattgcagacatttgccagaaacaagtagattgtattcttaggcattgttgctaggaaaaatttagagtggaaatgtaattttttcttttgctgccagtggaggtgctggttcattctttgttgtatgcccagtagtagagatcttgctatcaaaagtgtaagtttctttgaaaggtttaactgaaggaagatgtagaattataaatagaattggctggaaaatttgtgataaaaaataattttaattagatctacaaagagggataaccagcaatcttgctctgctatagaagataaatagttggtacaaagaggaatttgaatttcctccataatatggaagaggatttagggtcttttttctttcatctttttttttttttttttttttttttttttgtgacaggatctcactctgtggcccaggctgaagtgcagtggcacaatcatggctcactatgaccttgacctctcaggctcaagtgatcctcccacctcagcctccggagtagctgggaccacaggtgtgcaccaccacaccctgcaaatttttaaattttttttgttgagacagggtctcactatgttgtccaggctcatcttgaacttctggtgcctcaagcagtcttcccacctcagcctcccaaagtgttgggattataggcgtgagccactgcacccagacatctcagctgccactttaaactcctgtgggtttttagtagggcagttggaagagaagaggaataagatagagatccagggtgaagttcctggaactctctaaactattctaaggcattttagttgctatactaattgttctaaggtgc

SEQ ID NO: 681307 - DNA, 658 bp, Homo sapiens
tttatttatttttttaagacagagtcacccactctgttgaccaggctggagtgcagtggcactgtctcagctcactgcaatctctgcctcccaggttcaagcaattctcatgcctcagcctcctgagtagctgggattgcaggcatacgccaccacacccagctaattttsttatttcttttagtagagacggggttttgccatgttggccaggctggtctcaaactcctgacctcaagtgatctgcccgtcttggcctcccaaagtactgggattacaggcgtgagccaccatacctggcctcagtctgcgttttaaattgattcaataaaccacataattcaggcatctttacttaatctgcatggctttttgtacgatgacttctgtgatagcttgcatggtagtatacttaggggctactattgagtcaaagtaatttcccacatgacaaatgtggatgtaaggactggcactcaaacagccatctgggacccatggggtgaaaggttcatgctgaggatggaatagcagcaagacggaagaaacgagcaacaatttagtgggagcctgaatctcttatgatggggtgtcccagccctggattggctccctctatttttttatgtgtgagaaaataaactgatatatttttaaa

SEQ ID NO: 681308 - DNA, 603 bp, Homo sapiens
ccactgagagagaattgatatctggcctcttttagcttcttctgggagctatctggcatttcttggcattccttggctcacagccacatctctctgatctgggcctccgccttcatattgcctcctcctctgtgtgcgtctttctaatcttcccctgcttctctgttttaaggatatatgtaattgtatttaggagaataatcaaggacataataatccaataatccaggataaatgcttcctctgaagatccttaacttaatcagatattctgccatacaaggtaatattcactcttttgcaatataaagtagtattttcaggttctggagattaggaaatgaatatatgggggcatttttttctcctaatatatatatatctttagaatttagtccaaagactaaataatggcaaagaataaataaagaatawtatatatatatatatatatagaacctagaataaagaataataaagaataaagaattatatatatatataacctaggaaattatatatatatatgtgcgtgcgtgtgcgtgtgtgtgtgtgtgtgtgtgtgtgtgtatttatttatttttgaggtggagtattgctttg

SEQ ID NO: 681309 - DNA, 611 bp, Homo sapiens
ggatcacagaaagtaagaaacctcccaaagaggttatagctattcrtgtagaagataatcaggccataaaaaaatgctgcagacaagataatagatttgaaactgatgaggggtaaaacacagtaagatgtgaaaaaagttggagaggaaaattgtgcaaaagtgttccctacaccaaaatttgggagaagttagtggtgggaaacaatgtagaaaataagttctgtgtattttatatcaatttccagattttagcagtagtacataaaaatgcagaagttcctatagacaatgaaagacaaatattaaaccacaaaaaagagcagttagggtgaaaaatctgacttaagtgtcaactaaatgaagacattacaagaatgaaatctatctctaaattgagagtgcaagtatacattcctaagagatcttcctcactagccgggtgtggttagaagccctctaagaggaaccttttctccccgttaatgtgaaagatttcactctttcatctttcatgtccacttcatcctccatataaatgttcttcccctgtgttcttccctcactgcccctgcctataatccaaatcctggtccctctgtcactcaacc

SEQ ID NO: 681310 - DNA, 573 bp, Homo sapiens
tgaaatgcagataaatttacatacctctatggatgtttgaaagggttaaattggtcaattcatggaaagcactaagcacagaacctgtaggtgctyacaacaaagtagcagccatccattaaacatctatggtgtgccagcattctgttaggcacacaccaggacatgagggtggatgctgtttctccccttgagaaattcacatcgggaggtgggatggatagagacacgatagcagtcctttcacatcccagggtgggctatgggagcaggaagaggccagtgattccagtctgtgggcgacaggaagacctggagctgaggatccctgagctgaaacttgcaggcatgaggggaggtggggagggcactgcagtcagagcaagaggcatgagcaaaggcctggagtgtaaatcagcctttcacagtatcccttgcccctgcctgtgtcaccatctccatctctttacttcttggatcatgtaaagataaaagataagcctggaaaaaacagtttcacacataaagctagaaagattagttttgctctcctttctgacaagtatttatcta

SEQ ID NO: 681311 - DNA, 630 bp, Homo sapiens
tgaagctcatactactgagaatttaattttaaatttatttaattttaactaatttaaattgaaatctaaatagccacatttggctagtggctactgtactggtcactacaggaacttcagagcattgagaggtcctagattcttattttctagttcttcttgtctatgaatgttattttcaactcttcccttaagtttcatctctttgattttttaaacctgtatttaaacgttgatctcatttttctagattttgtttatactgtatctttgtcttaagatatgtaaaattcaccttttataggtcaaaaacagtacaatatcagcaatcttatatgattcaactttatataatgtatcataggcttctccaatrtgacctagatgtagcacaatgctatacacataggaaccatcagtggccgaataaatgaaagaatagatgactaaatattggttgaataaatgagtgacaaagtcagataggcagcagacatttgcgcaatactcagggtacttttcctcagatgaattcaatgtattggtactgagattcagccatgaagcaaaaacctctgagagtatgtttcagtcctgaattcagtaaaggcatcattcagaacagacaag

SEQ ID NO: 681312 - DNA, 700 bp, Homo sapiens
tgggattttaatcaatggaggtaatgacagggagatgccaatgccattgaaatatgtttaatgtcactcacagtttckgtagaaattagaggcacagaatgtgaagcaggggcatgtggggaagccccaggtgtgatcaggagacagaggcaggagtgagcaaaaacctaggccagagcccttatgatgtgttctgtgggaaaggcagaacagggcaggagatgcagctcacaactggtcagtttgaataatattggcagggtgtgaaatatagtggcagcctctagttgtctggtacctggccctgggttgacttagggcagagaaaatgttggcttggtgtgtaagagagataaaggagatggttcagagcgggggctctggatctcgggggagatgcagatacctttggccatgagttaaaccccgtagttaatggataccaaatagagaaatacagactcaagaaaacacaaagcactatcccagttgggagagcacaaaggagacattatcaaaagtaatgtgggattctggattggatcctggagcaggaagtggacaggaggggactaccaacaaaactaaaataaagcctgtagattcaacattcatttcctactttcaataattgtattaggatcatttaagatgttaacattagacgaagttgggtgaaagatcaaaactctgtactggc

SEQ ID NO: 681313 - DNA, 1186 bp, Homo sapiens
catccaccacgaagtttccaacccagagtcaggatgcagctgagcttgacgggcgtggtgcagacgtcggtgcagcgaaagctgaggagccgtgggcgttcacccgggtgccggtgtttctaaatcgcgggctgcgacctgcatactcaggtgccagctgggagcagaggcggatttgcgaggccaaaacctgggtgtgacttggaatctcagtcgcgctatgggggtgcacgctggctcaaatccccgtggaagatgcacctgtgacctgcccaggctgcaaaaccaggtgcgctgccatgggcacgactcactgggctccattttcaccacagggaacttggaccgcctgacattgaaaaagactgaggtagctcgggggcagccaaaagaaaccagaggcggggatcctagtatcattcaggaagtggacccagccgcaaactcaggagcgttccaagtgtccagagcgtctggtagtcgcaatagccagtgatcagtgacacccccaagaaagtgatagcgacagaaacatggcgactacttacactgccgcccccgtgcgcccctgcgcgagctctgctggaggcgcccgcgggagcgcctgcgggagcgctccactgcggaatccgccgctctcttctctgagcagtctcctactgccatctagggaggaatacggggataccggctggagtaccctctctatcttcttgcctgcaggggtcgcaggatagatgtttcgagagcctataaaagtcatacagtgctatggtgggtgcacgctaaacgtgcctttgacactgtgattaaatcayataacccatataaaaagtaattggaaaagacaacccccagaatggagagaatgtttaaaaatcgtatttctgataagagattaatatccagaatatataaataactcctgaactcaacaacgggaacaaataactcatttaagagacaagagaaggatttgaatagacatttctctaaataaaatacataaatggccaataattacatgaaaagatgcgcaacatcattgatcattagggaaatgcaaatcaaaataacatggagatagtacttcactccaactagcatggctattaacaaaaaaacagaaattaacaggtgtgggtaaagatgcggagaaattaacaggtgttgtgcattgctggtg

SEQ ID NO: 681314 - DNA, 599 bp, Homo sapiens
attattgtatccactagttcttgccagtataaaggaatacaattgacttctgtgtgtttcatacgctacaacctttctaaattcacttatcaggtccagaactcttctactaacaatgcacttttataaagccctaacacctctcctgatctctgtctcaccctcccacctatctcactgtgggatgggaaggaagtcaatggaaaacacaggagcgcattctaataatagcccacatggtatccagtgacacaaataatagtgatggtgacaataaaataacagtaagaaacacagaaggagcgtttccttggacaaagcactccagaaacaacaacaaaaargggctgcctttccatctattctatgaatcccagatgtctattttatcactgtctgttccttttctgttctccctggcagggtttttacagcccctgctctttttctagattatgctgcatcttcacagtttcccctaaatgactctgaagaattatagacagtgctgtctacaattataataatggatatggtggtccatttccaagacaaagtacctcagataggctgaggcccacaaactatggaaggacaga

SEQ ID NO: 681315 - DNA, 599 bp, Homo sapiens
attattgtatccactagttcttgccagtataaaggaatacaattgacttctgtgtgtttcatacgctacaacctttctaaattcacttatcaggtccagaactcttctactaacaatgcacttttataaagccctaacacctctcctgatctctgtctcaccctcccacctatctcactgtgggatgggaaggaagtcaatggaaaacacaggagcgcattctaataatagcccacatggtatccagtgacacaaataatagtgatggtgacaataaaataacagtaagaaacacagaaggagcgtttccttggacaaagcactccagaaacaacaacaaaaaggggctgcctttccatctattctatgaatcccagatgtctattttatcactgtctgttccttttctgttctccctggcagggtttttacagcccctgctctttttctagattatgctgcatcttcacagtttcccctaaatgactctgaagaattatagacagtgctgtctacaattataataatggatatggtggtccatttccaagacaaagtacctcagataggctgaggcccacaaactatgraaggacaga

SEQ ID NO: 681316 - DNA, 762 bp, Homo sapiens
tttgttgcatgaatgcatctcattgaaacctcwgccaccatcgccaagcgggtacagtcagaagccccatttacaggtgaagaaacgaggctcagagagagaaggtgacgtgacatggaaaggggattcagaacgttagaaccagattcggaatcctaaaagctgagggccagacagcggctgcttctgtatgtggtgatgtggacccgaggctcgggccttcgtgacctcatgggaacacttaggatcagagcgcctgagtcttggaaacaaaatgttgaagttggagtctttgataaaatcttgaactggaagggctgggaatacctttggacacttctagacttctctgggtgggttttgtgtgtgtgtgtgtgtgagacacagccttaggaggtcctgagaacatgtgtcccctgggtggggtctattgaagtggtctctggggacctgcatgttcctccaataagctctgcaggagattctgatgcttacctgggtctgagagcctgcaggattgaaagttccctccctgtggaaaccgtcaggctggactgcagcccattctaaggaggaggtagctggtaggcgtggccccggacctgcttcagcctgcttcagccggcaccccttacagtctgttctccccacagcagccagagggagtctcttgtacctacactagccctggtccctgctctgcggggggaagcctcccatggctcccatctcggagtaaaagctacagtcctcactgtggtc

SEQ ID NO: 681317 - DNA, 762 bp, Homo sapiens
tttgttgcatgaatgcatctcattgaaacctcagccaccatcgccaagcgggtacagtcagaagccccatttacaggtgaagaaacgaggctcagagagagaaggtgacgtgacatggaaaggggattcagaacgttagaaccagattcggaatcctaaaagctgagggccagacagcggctgcttctgtatgtggtgatgtggaccygaggctcgggccttcgtgacctcatgggaacacttaggatcagagcgcctgagtcttggaaacaaaatgttgaagttggagtctttgataaaatcttgaactggaagggctgggaatacctttggacacttctagacttctctgggtgggttttgtgtgtgtgtgtgtgtgagacacagccttaggaggtcctgagaacatgtgtcccctgggtggggtctattgaagtggtctctggggacctgcatgttcctccaataagctctgcaggagattctgatgcttacctgggtctgagagcctgcaggattgaaagttccctccctgtggaaaccgtcaggctggactgcagcccattctaaggaggaggtagctggtaggcgtggccccggacctgcttcagcctgcttcagccggcaccccttacagtctgttctccccacagcagccagagggagtctcttgtacctacactagccctggtccctgctctgcggggggaagcctcccatggctcccatctcggagtaaaagctacagtcctcactgtggtc

SEQ ID NO: 681318 - DNA, 762 bp, Homo sapiens
tttgttgcatgaatgcatctcattgaaacctcagccaccatcgccaagcgggtacagtcagaagccccatttacaggtgaagaaacgaggctcagagagagaaggtgacgtgacatggaaaggggattcagaacgttagaaccagattcggaatcctaaaagctgagggccagacagcggctgcttctgtatgtggtgatgtggacccgaggctcgggccttcgtgacctcatgggaacacttaggatcagagcgcctgagtcttggaaacaaaatgttgaagttggagtctttgataaaatcttgaactggaagggctgggaatacctttggacacttctagacttctctgggtgggttttgtgtgtgtgtgtgtgtgagacacagccttaggaggtcctgagaacatgtgtcccctgggtggggtctattgaagtggtctctggggacctgcatgttcctccaataagctctgcaggagattctgatgcttacctgggtctgagagcctgcaggattgaaagttccctccctgtggaaaccgtcaggctggactgcagcccattctaaggaggaggtagctggtaggcgtggccccggacctgcttcagcctgcttcagccggcaccccttacagtctgttctccccacagcagccagagggagtctcttgtacctacactagccctggtccctgctctgcrgggggaagcctcccatggctcccatctcggagtaaaagctacagtcctcactgtggtc

SEQ ID NO: 681319 - DNA, 611 bp, Homo sapiens
tcaagattttcaaagaataatttcgctaggacctatggagcaaatcacctttcaaacatgccaaaggtagttatttgaatacatttaagcccctaatcacagaagtcttttgatgaacttttcccactttaaatacatcaaacgaagcaaagagagtagagaaagccattagaaaatcattataataaataccaacattgatctacttcttccctctcctttggaacctcccctttccttgtttttaaaccttttagttgrgctttatatagcaaagtaatcaaactctcacaggccattataaaagaaatttaaatgatttttacgaaaaccattttccttgtttaagatttcagggaacctggtcagtactgtgagggctcagtttttggttgtgactttcaagttgaacctttttgatggtaaatagcctcctgcttatgcctgtgtgttttgacttaaaaaaatcaatctctgagaaaatgggcttccatcttcctttcagccccgtctcctttgatgattgatgttaattcagtaagctgctgacccaagaaaaaaagaattgtttgtgctgttgttttgaataaataaacttacaaagaatcaat

SEQ ID NO: 681320 - DNA, 1226 bp, Homo sapiens
caattataacaatatgctgttaataatttcacagatttgttcttaccttagatcttagtaacctcagcatatgattttattttctttccrtaagttaagaacttttaccttttcacttagcagaaaagccgggtagatactatactttttaaaaattaagagagaggcaggcacggtggctcatgcctgtagtccaagcactttgggaggctgaggccagtggatcacttgaggtcaggagttctcaagaccagcctggccaacatggtgaaactccatctcttactaaaaatacaaaaattagccaggtgtggtggtgtgtgcctgtaatcccagcaattcaggagtctaaggcaggagaatcacttgaacctgggagacagaggttgcagcgagctgagatcatgctgctgcactccagcctcagtgtcagaggaagactccatctcaaaaaataagaagaagaataattaagagagattatttctaaaattataaatgtactggaactgctagttaaattctgtctgcttctagtagaaactatagttactaaacaaataaaaatatagtagttcctccttatccacaattttgctatctgtgacttcagttacccatagtcaattgtggtccaaaaatattaaatattaagaaagcattttatggcttatttttggtatatccaaattgccagcatcactacttttggactctggggccattattaagtaaaataagggttacttgaacagaagcactgcaatacccgtctgagagttgacttcataatcgagatggctacgaagtgactaatggacaggtagcgtaaaacgcacggatacactagacaaaggaatgattcatatcctggatgagacagagtgggacagcatgagatgtcatcacactactcagaatggtgtgcaatttaaaatgcatgagttgtttatttctgaaatttttcgttttatatttttggaacacaattgactgcagataactgaagccacagaaagcaaaactgtagataaggaggaattactgtattttaatttgtttattaaacttcgtttctactagaagcagacagcatttaactagcagttccagtgcagttataactttagaaataatctctcttaatttttaaaaaaagtatagtatccacctgccttttctgtcaggttgtgtataaacttccctcccagcgagtttgaattaat

SEQ ID NO: 681321 - DNA, 1226 bp, Homo sapiens
caattataacaatatgctgttaataatttcacagatttgttcttaccttagatcttagtaacctcagcatatgattttattttctttccgtaagttaagaacttttaccttttcacttagcagaaaagccgggtagatactatactttttaaaaattaagagagaggcaggcacggtggctcatgcctgtagtccaagcactttgggaggctgaggccagtggatcacttgaggtcaggagttctcaagaccagcctggccaacatggtgaaactccatctcttactaaaaatacaaaaattagccaggtgtggtggtgtgtgcctgtaatcccagcaattcaggagtctaaggcaggagaatcacttgaacctgggagacagaggttgcagcgagctgagatcatgctgctgcactccagcctcagtgtcagaggaagactccatctcaaaaaataagaagaagaataattaagagagattatttctaaaattataaatgtactggaactgctagttaaattctgtctgcttctagtagaaactatagttactaaacaaataaaaatatagtagttcctccttatccacaattttgctatctgtgacttcagttacccatagtcaattgtggtccaaaaatattaaatattaagaaagcattttatggcttatttttggtatatccaaattgccagcatcactacttttggactctggggccattattaagtaaaataagggttacttgaacagaagcactgcaatacccgtctgagagttgacttcataatcgagatggctacgaagtgactaatggacaggtagcgtaaaacgcacrgatacactagacaaaggaatgattcatatcctggatgagacagagtgggacagcatgagatgtcatcacactactcagaatggtgtgcaatttaaaatgcatgagttgtttatttctgaaatttttcgttttatatttttggaacacaattgactgcagataactgaagccacagaaagcaaaactgtagataaggaggaattactgtattttaatttgtttattaaacttcgtttctactagaagcagacagcatttaactagcagttccagtgcagttataactttagaaataatctctcttaatttttaaaaaaagtatagtatccacctgccttttctgtcaggttgtgtataaacttccctcccagcgagtttgaattaat

SEQ ID NO: 681322 - DNA, 1240 bp, Homo sapiens
ggatcctcctttgacttatgctcatggaagagctccaggtgaacacattttactgatggctcaggatgagctattattaaccttcaaatttgttgcttcatttttgtttcttcccttgttatcttgtccttccactcctcttttaatttattgtaaggagataattgagaaaggtactttttttctcttgttttgttttctaaaccaagagactacctcaaaataaatagtagattattgtagaattcattgttatttaggagctagaatgtactcagttgttgaactacaaaaaaaaatatgatttttatttgtttatgagaattattttatggtcattagccaaaaatctaggagagagtcttacttgaagcaaaactccgattagttatttccattctagcagtctactgacatggacgtttccaacacacgtaagatactgcacatacacgtgacatgctgttctttttacttcaaaacatatgagagatgtccttctcacaataatccatcattaggtactcctaaatttagattctctgtcttgacattttgcctatacctgtgagtgactctagggaggaccaaaaggatctttcctttctcctctgggttgagatccttggaatttcccttatttccttcatttctctggagccttatggccacctttttaaggccctacctcttaatactgttgcatggcaatcaatgtgagttttgaaggggacattcaaaccatagcttttttctgtgttgtgaggaaactgcaagacrttgtttgggtcttggatgattagaaatgtggaaatgatctgtggtaacagtaacagaagcaagaaaggtctgttgactattttcttttgtctgtctgtctgtctgtctgtctgtccatccatccaataaagatagggtctcactctgttgcccaggctggggagcagtggtgcactcatggttcactgcaaccttgcactcctggactcaagctatcttcctgcctcagcctcccaagtacctggaactacagttgcacctcaccatgctgggctaattttttaattttgtgtagagatagggtcttgttacattgcccaggctggtctgtaactcctggcctcaagtgatcctcccatctcggcctcccatagcgctggaattaagggcatgagccgtcacacctggccgattttttttcttcttttgtaggagaaacagaataggtggatttctgtca

SEQ ID NO: 681323 - DNA, 1240 bp, Homo sapiens
ggatcctcctttgacttatgctcatggaagagctccaggtgaacacattttactgatggctcaggatgagctattattaaccttcaaatttgttgcttcatttttgtttcttcccttgttatcttgtccttccactcctcttttaatttattgtaaggagataattgagaaaggtactttttttctcttgttttgttttctaaaccaagagactacctcaaaataaatagtagattattgtagaattcattgttatttaggagctagaatgtactcagttgttgaactacaaaaaaaaatatgatttttatttgtttatgagaattattttatggtcattagccaaaaatctaggagagagtcttacttgaagcaaaactccgattagttatttccattctagcagtctactgacatggacgtttccaacacacgtaagatactgcacatacacgtgacatgctgttctttttacttcaaaacatatgagagatgtccttctcacaataatccatcattaggtactcctaaatttagattctctgtcttgacattttgcctatacctgtgagtgactctagggaggaccaaaaggatctttcctttctcctctgggttgagatccttggaatttcccttatttccttcatttctctggagccttatggccacctttttaaggccctacctcttaatactgttgcatggcaatcaatgtgagttttgaaggggacattcaaaccatagcttttttctgtgttgtgaggaaactgcaagacgttgtttgggtcttggatgattagaaatgtggaaatgatctgtggtaacagtaacagaagcaagaaaggtctgttgactattttcttttgtctgtctgtctgtctgtctgtctgtccatccatccaataaagatagggtctcactctgttgcccaggctggggagcagtggtgcactcatggttcactgcaaccttgcactcctggactcaagctatcttcctgcctcagcctcccaagtacctggaactacagttgcacctcaccatgctggsctaattttttaattttgtgtagagatagggtcttgttacattgcccaggctggtctgtaactcctggcctcaagtgatcctcccatctcggcctcccatagcgctggaattaagggcatgagccgtcacacctggccgattttttttcttcttttgtaggagaaacagaataggtggatttctgtca

SEQ ID NO: 681324 - DNA, 585 bp, Homo sapiens
tagcagaatattattctcagtgttcacaggtatgtgatatttttatacagatgcatgtttgttcttaatgagctaaagcctatgtagacattttgaaagatgttagtgattagacagcctagcaaataatgttgtagatcacatattattcatgcatgggaggaaatatagacaccttgttgcatttttatgaaacacagccatttttccccctatgctcagaattatgaaaaaatattgctagttttcagtctgcctgacctgtaaggtctgtgaagtgctgagtggttggtatacatagatttcaaaccctgtatttgagtaacttcttttgaattaatattataaatgttaaatgctataaaccttcaaaccacctaacttttggagattaaaaaatttcattctaaactttttttacttttatattttcaaaatgtatgacatatggctaaacaccgattgcaactaactgggcggttttatactactgaataaaatggagagccagtcaagrtatcaacccatgtatctatgcacatttcagcagtttctaaagaggtgaggcatcccaatctagttagc

SEQ ID NO: 681325 - DNA, 585 bp, Homo sapiens
tagcagaatattattctcagtgttcacaggtatgtgatatttttatacagatgcatgtttgttcttaatgagctaaagcctatgtagacattttgaaagatgttagtgattagacagcctagcaaataatgttgtagatcacatattattcatgcatgggaggaaatatagacaccttgttgcatttttatgaaacacagccatttttccccctatgctcagaattatgaaaaaatattgctagttttcagtctgcctgacctgtaaggtctgtgaagtgctgagtggttggtatacatagatttcaaaccctgtatttgagtaacttcttttgaattaatattataaatgttaaatgctataaaccttcaaaccacctaacttttggagattaaaaaatttcattctaaactttttttacttttatattttcaaaatgtatgacatatggctaaacaccgattgcaactaactgggcggttttatactactgaataaaatggagagccagtcaagatatcaacccatgtatctaygcacatttcagcagtttctaaagaggtgaggcatcccaatctagttagc

SEQ ID NO: 681326 - DNA, 1383 bp, Homo sapiens
aaacttctgtatatgaggttttcacaccctctatttatgggtgacaatcttgttcctcaagagagagatatagtcagcttagatggtaaaatagctgatagtgtatttccaagatgaatcaagaatgtatggggattaacaatatctcctttagctgtacatgatatttttattctcagataccaaggaaaggtactttccaatgttatatttagcaagaaatcaaactgccatttcacataatgccacaaaatgccatcagattactctggaagcacatttcatactttaaatgatttttcttgtttttaagtgctgttaattaaataataaaagtgaaagatcctactcataatttaaaaagttacttctctttcaacttctacctaaggctctgagttagttacatgtctatgtttgataattagcttgagaactgccaaatccccagtcatagatcaagaaagacaagttttaaaataaaactaaattccaaaaatttacagttttccattacatcacgaaagctataagctagtagaataattatgaggcccatgcctttgattcttgagctaagaaaagagaaataatactctttacttacctgccaattgtgaaaagtcgtaagttctttttgtaagatataagttcgtttacatccattgataaaaatttctattaaattttaaaaggaatcatagaattatagatagtatggcatttagaggctctcacctgagtaaagaagggtagaaatgtgatatgcaagaaacccaatataatggttgcttaaaaaatgattttaaggaatctgaagcagactcatccaggccatgctgaaaagtcctagggaaatacaaataattagtttagaatatacaggaagcattaactatgaccattgaaataacttttgatttttacttaggattcagttaatgattttttttgtttgtttctttgtttggagacagagtyttgctctgtcgcccagtctggagtgtagtggtgcgattccggctcactgcaacctctgcctcccagggtcaagcgattctcctgcttcagcctccctagtagctggggttacaggcatatgctgccacgtgtggctgattttttttttttttttttttgtattttagtagagatggggtttcaacatgttgtccaggctggtctcgaacccctgaactcaggcaatccacccgccttggcctctcaaagtgctgggattacaggcgtgagccactgtgcccggctcagttaaagatttttacacaaaatggtattgtgctagaatggacaatgccgctacttcatccgcttgggatttatgttaataggtggctcaggggccaggtgggcaagtcagcatag

SEQ ID NO: 681327 - DNA, 965 bp, Homo sapiens
tgcttacgtggaaggggagggttactgagaagcacaggcagagaccattgcatagagagcacaggagtaatcagaggataaaaaatgcatcagacatcttttccaggcattcagtataaaaaaaatgaagagaacctaacataagttaagtacctactatgttccaggcaatgcactgagtactttatgtttatttaccctttaaagctcaaaatgaattaataaggtcaatattagtaccccatttagaaatgagaaaatgagagtttagagagatcaatgaataaaacagaattgtcatataaaatgaacaggcctgcaatcattcaacaaatacttttttaaagcatgttctatgctgtcagtaccagtctaatgtgtcatgaaccaggccaggcactggggataaaatggtgaactatccctcccctcctaaaactcacagtggctgaagtagacatkaaataccaattacgtcaattaacatttcacttaaaattgtgacaaaaagaagtacagtgggacctcacccagccaggatgatcagggatgacttcctaggaagtaacatttatgctaaaaggtgactaacagatgccaggtaaacagagacaagaaatggtctaggcataaaaaaataaataaaaacaacatttcaaaggctctgtagcaggaaagaacttggcatatgggacaattgaaaaggcactggtattagagcagctgcccctttcttcaagtgacttctgcagggagtttgctattataaattacaaatctatgatgcacaacctaaaccagagaatgcatgaccctgtgttggagcatactatgctgggggtgagtaggatgagatgagctggacaagttggccacatctagagcatgcaggggattgttggtgttgcaaggattagggctcttactctaaaagcattgggtagccactatcagtttttagcaag

SEQ ID NO: 681328 - DNA, 965 bp, Homo sapiens
tgcttacgtggaaggggagggttactgagaagcacaggcagagaccattgcatagagagcacaggagtaatcagaggataaaaaatgcatcagacatcttttccaggcattcagtataaaaaaaatgaagagaacctaacataagttaagtacctactatgttccaggcaatgcactgagtactttatgtttatttaccctttaaagctcaaaatgaattaataaggtcaatattagtaccccatttagaaatgagaaaatgagagtttagagagatcaatgaataaaacagaattgtcatataaaatgaacaggcctgcaatcattcaacaaatacttttttaaagcatgttctatgctgtcagtaccagtctaatgtgtcatgaaccaggccaggcactggggataaaatggtgaactatccctcccctcctaaaactcacagtggctgaagtagacattaaataccaattacgtcaattaacatttcacttaaaattgtgacaaaaagaagtacagtgggacctcacccagccaggatgatcagggatgacttcctaggaagtaacatttatgctaaaaggtgactaacagatgccaggtaaacagagacaagaaatggtctaggcakaaaaaaataaataaaaacaacatttcaaaggctctgtagcaggaaagaacttggcatatgggacaattgaaaaggcactggtattagagcagctgcccctttcttcaagtgacttctgcagggagtttgctattataaattacaaatctatgatgcacaacctaaaccagagaatgcatgaccctgtgttggagcatactatgctgggggtgagtaggatgagatgagctggacaagttggccacatctagagcatgcaggggattgttggtgttgcaaggattagggctcttactctaaaagcattgggtagccactatcagtttttagcaag

SEQ ID NO: 681329 - DNA, 573 bp, Homo sapiens
agttaggttgatccacttacctaagtactggcaaggacaaggaccataaggattacacataaaaccagctggtgcaactagaggacccacttcccatcttggttgttttsagtgagacaagctatgtagtggagcaagagtgccctcacgcaatcaaaaaaggagaaagctaaggaaaggtggtctcaccccaaactcccaggaaacaattcacagagctcctattctcccttgccgtagtactcaacaaaaacctttacctcgaatttgtagcagtaactctcattctgagagagtcctcctatgtcctagccaaggaggaaatcagattcaataaaccggaacttttactaagacaagaagttaattgatttcaggaggaactcatttgtagacctagcaggtgcatccaagctcaaaaatgcaatgggttcattgccagttcctgcccaaaggttggaagctgctccaggtggtccagggaggtcactctgaaatcctgccaactatgccattttgtcaaccaaaattaaggttgttgaggctttggaaggcttgacaaaggcttactgg

SEQ ID NO: 681330 - DNA, 573 bp, Homo sapiens
agttaggttgatccacttacctaagtactggcaaggacaaggaccataaggattacacataaaaccagctggtgcaactagaggacccacttcccatcttggttgttttcagtgagacaagctatgtagtggagcaagagtgccctcacgcaatcaaaaaaggagaaagctaaggaaaggtggtctcaccccaaactcccaggaaacaattcacagagctcctattctcccttgccgtagtactcaacaaaaacctttacctcgaatttgtagcagtaactctcattctgagagagtcctcctatgtcctagccaaggaggaaatcagattcaataaaccggaacttttactaagacaagaagttaattgatttcaggaggaactcatttgtagacctagcaggtgcatccaagytcaaaaatgcaatgggttcattgccagttcctgcccaaaggttggaagctgctccaggtggtccagggaggtcactctgaaatcctgccaactatgccattttgtcaaccaaaattaaggttgttgaggctttggaaggcttgacaaaggcttactgg

SEQ ID NO: 681331 - DNA, 933 bp, Homo sapiens
cccatcacaaacaactgctaagttgtattcaaacatttgtgcaatattaggtcactttatgtaggatcacggttcagttggctcactctctcataaccaaactgagatgcaaaataatcagaatacaaatacaactttgtttttcattgtatgtcagcgtggtgcatgtatgtagacgaacacatggtgccttggtcagcaagatcagaatcgcaagagcctttgaagaaacacatgcagtgattaaagtgatagtttcaaaggatcttaaaagtggcaaaaattgtacagagctgaatgtggtggtcgggacttagggaagctgataaatggggtgtgtggcacagagcccttcagtctccctgtctctgcttctctctgggcgctcacgaaccacaatagcacacactcagacttcctcaatgcsttcttttgctgccacatttgttctctcttttctgagctcgagccagctcttttgactttttgaacttttgtctttattcacaaaggtaatttcaagagctcttgtgggttccacttctggcatcccgctcctcagatacctactattaggcaagagcagagaagtaaagtgcatttggcagcagtctctgcctttcaaagcagagctaaatcatgtaaaataggttattttccatccaggcattctcttgagaaagaaaaccctgtgtgtgtcttcccccatactctcacttcttgccagttcagttgaaaagtgttcccttaatgttattaaataggtattttcactcactgaagtggattatttgatttctgcacggtcttaagaaaaagtgagacaataggagtcttacaaacaaaccctatgtggtatctgtgagctcatagatctgtagtttttaggatatagtcataactttagtatctgccatgatgttctccatgctg

SEQ ID NO: 681332 - DNA, 642 bp, Homo sapiens
tttcaccatgttgtcctgacttttaggaaaaaacctgctcaactatccaattagcagccctgctggcagcccaggcaatggttctcagaagccaacagcaggaaatctggagagaagccactgtttatgtagcagaataaaggatgcaacttgtctgtttataactcatgaccttggcaggtagaacagaatttgtgttggccacattaatttaatcttcttacttcttctgaataactcatgaatcccaatgtatttcttttgagaaaatgctcagaattcttcattggagcagccattttctaggtttttagcgtactgtgaaagtaacttcaggtgtatgagagagagacgggtgtggggagacagaggagaatggttcatcagtgacttttcacctctrgaaactctgatctgtggtcctcctttcatgatttccaaaccatattttgggtactctggaactttaataattttctgtgctgtatcagtattgtttgcagtctgaatgagacctcagtagggaagttattccaatttttatttccccatactccagctattcctttccccagccccaatgcctaacttgattcacccaggagaggcagaaaaagaatgacatgtctttttgtcagctat

SEQ ID NO: 681333 - DNA, 561 bp, Homo sapiens
tccatgggctactctcttcatataccagttctaattctgataagcttgtatcattatcttctttttaaaargcatgaaaacagaggctcacagagatcatattattttccccaagttgcaatgatggtaaacacagatgacagctggacatcaactaggtctgggtggcttccaactccagtgactcaatgctgctccacacggccttcttacaaggaaaaatgagaacaggccgcgggccggcttctgtaaatcgcgtgttgttggaattcctgtccttccttgacccagatttgtaaacagaggctgtggaagccaaggtacacatgggcagatgcaaacgagccgtctgctgaggagaaagtcgaatgtgctcggggtgggtgcgcgtctgcctgaagcacgtgtccctgaggcctcctgctgtctccccagccggctgacgggcccggtggtctgcagatggccacgaagtgtctccgggctgtccagctgcagcctgggcgggctggcggttttttttttttgtggggggagtgattctgagggtgctgggtggcc

SEQ ID NO: 681334 - DNA, 1684 bp, Homo sapiens
atgtgatctggctgtgattatttctttcattatttaaaaatatcaacaattgcttttcaaagcactttgattttttttttttttttttttttttggccagattttgttagggtgtttctctctttctaccgccactctttttcttgagcacttactatatatcaagtcctgggtcaggtgtcttatattcattgttttatcattattcctaatatcctcctagcaactctatcagataggttttgttatttccatttcacaactgaggatcttgaagctcagaaagtgtgagtcatctaagaccacacacctggtcagtggcagagaaagaatttgaacctacatctccctgcttattaaagcagagtgtgagggcagggagtaatttatacatctttggtcttgataattgagctcactccttccaaaaaaaaaaataactgtttacttcctatcaatactagagaacttggagcacttcatgttttcttggcactgagctacattcattatacactatcttatttaatcctattaatgaccctgcatgataggtaacaattattaggcataaatttcagagaaggtagttattgacaagcaggttaagtaataagcctgagtaactgggatttaaacttaggtagtctgactccagagtgagctttcctcttaagagtgatccattgattttattcacgctcacgagattatgtggtcttcatgcacttggggagcgtgattgtggcttatctagaacttaacttccgctctttttggaagtgaccatcacctccttctctgccctgggaataaacaatagaaattgaggatacagaagctgtagaaccataggccaatagagtttaaaacttgaaagacttcttcaagagatcatctagtctaatagtttccaactatggggcattgcttgtttagtggcttataaaatcaatttagtagttcatggctgaccttcaaaaaatgaagtgagtagaatagaaaacatgagattttgttgtacttagggtgaagtagtcttgagagcagtagtttcagttatctatatgtcagtgtctcctgggtcactatgtaaaatgcatttcttactgagggttaagtttgaaaagtttgaaaaatgttgatttcatccagtgtttttcaaattttattccatggcatctgaggaggcctcagatatcttatgggagataaggatggaaaaagttaagtagaaagaatttcagaaatgtcttcttatgtttatctgcctttcatgttggactttcataaaatattttatcttaaaaagaagaactttactgaaaaaaaaaaaataattcaagaaccactgatttaccccattggaattgtgttgttttgggtattgattcattcttatgtaacttcgtgaggtaaccgaggaccagctatgtgctcagaacagtgatggctgccataggatatgcaggaagwctaaaaaatgtggttatccctgtccttaaattgttgatagaaccaatacgatatcaatttatttcttacatcaactatgataagaaaatacatgaagaagttattcggaatatggcaattgatttaaacaggaatcaaaagattgctacaagaggagatatgaagggatcaaagctggctgaagcaatggagatgaaattgaatacga

SEQ ID NO: 681335 - DNA, 648 bp, Homo sapiens
atttaaaaatttaaataccgaggtatttaaaagtacacgaagtatacatatcctgtgggcatgtcccttgatcccaaaatttcacttacataaattgacagagacacacacaaatatttctgtataaaaattttcatcaaagtatttccaccaataatggaaactggagacaatccaaatgctgaacagttagagctctattaaatgctcaactttaaaacgaaaaaaataacataaagtacaaggaaaaaataaaaatcagtcacaatttctgtattcakaaataaccacaaggacattgctgtgtatatctttccagctgttttctattttttgtttctgatacaaacttggggtcatactgtatatattgttttatgacctgacttttctatgtagataatgttataaatagttttcaagtctttagtttttcttttaccacttattttaatagctttatggtattctattacttgtacatgtcatgatttatttaacaaacctttatcattgaacccatgctcgtttagccattagttcatggtgcctcaattgatgataacccatcattcacaggaagtagcccagactctctaacttagagttcgagaccttccatgatctgcccttactattccaatttaa

SEQ ID NO: 681336 - DNA, 648 bp, Homo sapiens
atttaaaaatttaaataccgaggtatttaaaagtacacgaagtatacatatcctgtgggcatgtcccttgatcccaaaatttcacttacataaattgacagagacacacacaaatatttctgtataaaaattttcatcaaagtatttccaccaataatggaaactggagacaatccaaatgctgaacagttagagctctattaaatgctcaactttaaaacgaaaaaaataacataaagtacaaggaaaaaataaaaatcagtcacaatttctgtattcagaaataaccacaaggacattgctgtgtatatctttccagctgttttctattttttgtttctgatacaaacttggggtcatactgtatatattgytttatgacctgacttttctatgtagataatgttataaatagttttcaagtctttagtttttcttttaccacttattttaatagctttatggtattctattacttgtacatgtcatgatttatttaacaaacctttatcattgaacccatgctcgtttagccattagttcatggtgcctcaattgatgataacccatcattcacaggaagtagcccagactctctaacttagagttcgagaccttccatgatctgcccttactattccaatttaa

SEQ ID NO: 681337 - DNA, 2119 bp, Homo sapiens
taatgataacaccttcattctgaaaaattttgagcaataattatgaaaaatataacaaataaaaargtttgtaaataatgttaggtgaaaagaagcagaacgtgtaattaaatgtatactagaattttagctattttcaatatctaagtctgggggcatcaaaaaacagaagggagctttggaagagtgtgaggggagtgatgtttagtttgagtaaacatagtgggtaaatattttttcttaatttcttctaatattcttttaaaaagctagtgcattaacaaactacatataccaatatatttatgactttgagataatgttactggagaacgggacataaagagtaagttttttcttaagtaagatgtttcaaatgttttttatattactggaagtagtataattatcaaaaacatctaatgaagtaaataccagcatagccgccattttagaacattgaggcacaggttatgaaatagcttgcttaaggccacacagctaggaaatgtctgagtttggacctgaggtccagtctgttggactcctaagctcatgtgattcaccatcatggagtaacaccaaatatattaagattggctaggacccaacaagaaaaaaatcagcttatcaataaaaacaaaataagaacctactttcaagagacttaaggttttgtttttgaatcagtacctacatgtatgaaatactactgggaggaaaagtgtgataatttcttcatagcaccctccctcttccacctttcattgtccagtgaatttctgcttattctgtaatactcaaatgtttcctcctagaaaatagttatccatatccccctggctcatgctggttcttagagtttcctgttaaaacttccactataatacttaacattatgctattgtgttccctggaggtaagcttctctatgttagggatcatcttcagtctctatgtttttgtgcccacctggtggcacaatggccagcacgtatgcatttacatttcttttcagtgagttcttttattacccctttaccacaagcattctttcgaaaaaccccaaaccccaaaatgtggcatagcaatttatcggtgctaaacaaatatgtaaatacgatggctataattaccttactgctcctcagaagcctttctttcttaaacacaggcaaacactctgatttgtcacatttctagaacacttaattgtcacaatgtccttgtgccacatttgaactcatgacagcagggacaggatgcttccttcctaagattttctttaccagggtcttttctgtctcctgaaatcaccataaagtggaatacagcattttgttcaaataccttctccaggtcagatgtgcaagtcctgtttctctggtataatgattctcaatttgttttcttacaattttgagagtacaatcccttaccaaggtctccgtctctctcccttatctttttcctatcccctcttccttgcttcctctcctggatgatgtggtccttcatttgtcttctctgtatcaattttctctggtgtctaccttagagactgccttctgctgcttattcatgcctcagtatggtctttagctgagtctccaaagctctaatattaatatccaggattttccaggatatggacaattaagtctttatgcctttatttaagatgtcccaggaaagaaaatctggcccatttggggtcaggtgtctatctctggtaactaagctgatgcttgcttggagagggtcgcatgggacatggcacttgatgacctcaaaaagcaggctggaagtgaccactaaattgacagaacacttacagcgcttttaaattcttacttcctgctcctctagtcctatctaatattctaaatgtttctcacatccattcccatttacccctctcttcccactgtcttggccctcatatatccttgcttagattactgtgatagtctctgacttgatttccttggttctgatctctccccctaagctaatatacactccacacaacagcctttgaaaaacataaagtgataacatcatttccctaattcagtatcctcaatgacctctcaatgcttacgaaataaggttcaaa

SEQ ID NO: 681338 - DNA, 634 bp, Homo sapiens
taagctttgacagcagctgtatgagacaaaatttcaagttgagaagcctgagaggtaagtaaaagttgttcagagttttggattgaaaggatcctcatgctctggagaactgggatataggttgtaaaattcacattttgaaatgaaaattaagcagtatgacttaatccaaccagtgcgcacctcttcatacaataattattctttctagttaaatgaaagatttataaaaatgacaaaatcattctttttttagtgattgaaaatttaaaactactgcaaagaagcctgtttatgttacctccaagattttcatacctcatgtataactttattgtgctatatgaatacattttagaaatcaagtgcttatttaaaaaaattgttttgactttcttaaagctgtaattttcatgttatataaaatatgtagtttggtggcatcaggacataaataattgtgtttaatatctatctcttytttaattacttttggtaaaactttctttatgggttttatattgtgcctactatattttaagcaccatgataatctatggtaggttgtttttgagggtgatctagctctgatttccttccttccactctcccccatgttggaaatgcatatatg

SEQ ID NO: 681339 - DNA, 582 bp, Homo sapiens
cttgataagaacactgagtcttccaagtgtttactacacagatcctgtacccctagtcagacagcctaattgaaaccagcctcaytgcaatgtgatcatgtttttaagcagcctgttctgttccacgcactcctttatctggaagcagtaaacaagaatatgcacgcgcagtggaccacttctgaaggtcaacatataactttctcatccctgacatcaactgtcatccctgtgagcagaaccaactaccaaaggagagaggtgggtcagaggagaagagatgggggggctcctggacacacatctcccctgccccctctaaatactgcagccacatagaaacccacggggaacagttggggctttttataatctttatttgttaacagttcaggctattttttttccatgctgcaagagatgctaatgcctcatgaaaaagttgtgaaaaaaaaccaagtttattttggggtgatcagcctcctcagagcttctcactcccagctctgcagggcttaaggaatgggacctgccctctctcaggaggtctgcagcttggtcaaggagaaggagtcttagacc

SEQ ID NO: 681340 - DNA, 582 bp, Homo sapiens
cttgataagaacactgagtcttccaagtgtttactacacagatcctgtacccctagtcagacagcctaattgaaaccagcctcattgcaatgtgatcatgtttttaagcagcctgttctgttccacgcactcctttatctggaagcagtaaacaagaatatgcacgcgcagtggaccacttctgaaggtcaacatataactttctcatccctgacatcaactgtcatccctgtgagcagaaccaactaccaaaggagagaggtgggtcagaggagaagagatgggggggctcctggacacacatctcccctgccccctctaaatactgcagccacatagaaacccayggggaacagttggggctttttataatctttatttgttaacagttcaggctattttttttccatgctgcaagagatgctaatgcctcatgaaaaagttgtgaaaaaaaaccaagtttattttggggtgatcagcctcctcagagcttctcactcccagctctgcagggcttaaggaatgggacctgccctctctcaggaggtctgcagcttggtcaaggagaaggagtcttagacc

SEQ ID NO: 681341 - DNA, 633 bp, Homo sapiens
ggttgtagggttggtcaaatcaccttcttggcaagtcattcttttaaaaacatttcacaaggaaagcatctgtttccactagaatttcaaatttgttgcaatgtttcatgtgtaattttctctagattttcaaattaaccattagagttgcaaagtaatttaataagctttagagttgcaagtataaccagataagaaatacaagaatatcttcaaaaaatccagtttctttatgcacatatttatatgtacttttacataagtgcctctgtaggatgacatacatcatattgagtgtttcyggcaggggaactgtgtgaatgagggcccctagaagggaagaggccctggaaggtagaccatgtggctgaggcatagttggtaatgaggaggaacagcatgagatgaggttggtcaaccaagcaggggccagagacacctgcaggtaaggatttgggattttatcttgagggcaaaagacacaaaagtaaatagaatattttatcaaatacaaacatgccttacatgtagggctgcatgcttttatgacatataactaatcaaaatccattaatagttaagttgtatcagttttgcatcttaatatgaggaatatctgtgtatatagttttg

SEQ ID NO: 681342 - DNA, 633 bp, Homo sapiens
ggttgtagggttggtcaaatcaccttcttggcaagtcattcttttaaaaacatttcacaaggaaagcatctgtttccactagaatttcaaatttgttgcaatgtttcatgtgtaattttctctagattttcaaattaaccattagagttgcaaagtaatttaataagctttagagttgcaagtataaccagataagaaatacaagaatatcttcaaaaaatccagtttctttatgcacatatttatatgtacttttacataagtgcctctgtaggatgacatacatcatattgagtgtttctggcaggggaactgtgtgaatgagggcccctagaagggaagaggccctggaaggtagaccatgtggctgaggcatagttggtaatgaggaggaacagcatgagatgaggttggtcaaccaagcaggggccagagacacctgcaggtaaggatttgggattttatcttgagggcaaaagacacaaaagtaaatagaatattttatcaaatacaaacatgccttacatgtagggctgcatgcttttatgacatataactaatcaaaatcyattaatagttaagttgtatcagttttgcatcttaatatgaggaatatctgtgtatatagttttg

SEQ ID NO: 681343 - DNA, 603 bp, Homo sapiens
tgcctttgaaaatgtgtttttttctacttttcatgaaaattaaagaagcataaatagcttggatgaatattcatctaggttggcacctggcagagaaaagagaatttgaagtatggaccaaaatctaatcgggaaaatattactctccctcttggtagtgmcaggagcaataccaccattcatgaaggtttgaggcaatttctcactaagaactgtcttcctcagtagacagctgtgttacacctgcactgtgcctttatttaaatatagtgatgaccctttacaaacctttggcagagagtatggctttttaatcatttaaaaaacctgtgaggttagaatttagtacctccattaccacttttgctctgtttttttctgcctattcaaccaggaacaaatcaagtggactgtggaggctgcacattaagacctgttaactgtgtttccattagccatggtccatgatgaaaacatgagcacatgcccttgactttgtggctaagaagtgtcatttgggtaaaaactccaggtatgaagttgaggaagaagagaggtgcaattgttaagaaaaaaagactgagatcattatacaagtagact

SEQ ID NO: 681344 - DNA, 893 bp, Homo sapiens
ctctaaatctattagtcttcgaggaacaaggtacaaatatcaaattatgccactttcaaataaattaaaattcatagttaacatgtttcttattacaaaccacatctgcctagaagtcaaagcaatgtctctgattcattctaaactaaatttatactactattctacaatgcaaggacactacccttggaaatgaattcaatcagccactttataaaataggggtctttcatagtgaagatatgccctagaacttggacatgagcagtcatccctgaaagttaggtccagtggattttttcattattttcatggtgacatcagtccgtcttgcctgagagacaacaaagcccaatggagaaataaaggggaaattcaatactggttccttttcattgatatatatatagatatggatcctgtaatagtgaattatgttatgagtcagcatgtgtacacacatatatgtgtacacacatgcacaaaggtgcatgtatatatatatatgtgtgtgtatatatatgtgtgtatgtgtatatgcacccacacacacaaacacacctgtatgactcttcaagggcctcaaccatgcagaatttacaacatcataaaaaatccatgtgtttaaaaattggtctaatttagaatgggctctacgtaaattttagtagaaatacacaccacacaccagcaattcttctgtctgactttttctttttcaccttttagctgctgcccccacatcatagaggtaccttcttgagagtttctggacttttccaccagaaagtcacaggatctagagacttcaacaagtatgctaggmatatagttgtcatggctgtcaataaaagcaaagtccctctgtgttacccatatagagtaaataattc

SEQ ID NO: 681345 - DNA, 2761 bp, Homo sapiens
tcagaaaaaaatataagtccatttaattctgtttcttacccatctcattaatactgtaataaacaagcccactatcctttgtcttcgacagcaagactgctctgtgtggcaacccatttcatattctgaacaactttcactcatttgttcaacaaatatttatgggccagacacacttctaggaagttgaaatatagcaatcaacaaaacatgtaaaatgtttgtctttacaagacatattatttggggaaaaagcagattaataataaataagttaacattatgtatgtcagaaactgttatgtgctatggagaaaaatcaagtaggggagagggaaaaggaatgttgagatggagaggaggagatgttagctggttaaatagtgagggatggatattcccagaagcaattgaagaggcaggagtggggattttaggaaaattttacttggccatagattgaaatttgctttctggaatcataccaaataagtttaatttatttataattaggtatttttctatgtctttcattttccaggtggaatatcttcagttctttcttcattttccatgtgctgtgattcttaggtcctctgtatctcaggtctttttcccctggacataccccagccagggaacactatactcgggaaacagagtagaatgtgaaaattgcaaccctcccgccccctcccgccattctgacttctaacgtgagcagcgctgctctcaggttaccctcctgacttccaaatctgagttatctgcctcctgtatgtattatctgtgctgtattatgctgtattgtaactcaccttaaacttgacagtctctagagagcattctaagccatgagctccacaataacagtcagtatattctacttcatcattgttcttgacacatagtgtgcttctagtagacttagttgcatgaattatctctcacaaatctagtaatccgtaagtttagattccactgattggttatgttaactccatgaggacagaaagttttattatgtttattaatatattggcagcacctagaatgggtatgggccatggtaggtgttgaaaacacatttgggctgggcatggtagttcccaccaataatcccaatactttgggaagccaaagcaaaaggactacttcaagcaaggagtgagtttgagaccagcctgggcacatagtaagcccttgtctctaaaaaaaaatattttttaaccaaagatcttacattggttgaaacatctttgtttcatctatgaaacagctagatgagtgtgcagtgacaacagatagggttgtgataattggcaaacaattctaaaaattcagacatgttaatatagtgcttttatatttgatcaagtgtttgtcatgtgtgttctcatgtcatctccaactccctggagtaaggaagatggaatgtttcatttccatcttataaaaggggcaattttacgaagctcacagagattaaaggaataatttgagacatagaagttgttaggcttaaatccacatcttccaattcaagtttttttctttactccacaatatgcgtgtgtaagtttactgcaaggttgtcatataaagtggacattttcttatatgaaagtcagaaggtcacctttggcagcacttggccttccataccactttgattcctccacttccatgccccatgtttacaattccccyggttcagacataggtcatgtttgttcatagtcaaccgcagtctcctcctctcctcctttcacaagcaggaagagttctctatcctaatgtgattgatgccctgccttttacatctattagatgatgcattgtagctggatgaacatattttaaatttcttacttctttaagatttgccagcatgatatagaaatatatgttttgaagttttgtcttagaaagtttttattaaaaaatggaccttgtcctatcttgccaaaggtagctgacgtttttactatttgtaatttcaaaaaatttgtttccatttattgcaattgcattaatcatttcagatttcctgtcaactttatttccttgggttacatgaatagggtatttccagacagatgcctgaggtcagtaacttcttattttaatgaggggtgtgcttcctctatatgactgatggagaaacattatttttaggcagcaaaagcaagtcagtgtgcttagcttacggtttattactgtctcactccataggatcaggggtgggaggtagtacgcccctatttcacagggactgaaagtgtgctaatgccatgagagtttagacattgatggatgaggtcatctattccagcctcatatggtgatagagaattaagtaagatgttttctgtgtgattgtcacacaggcttgtcaggtaggactttcaaggtagaaaagaaggaaatgcagctgaggtggaaaagcagtggtcaagcaggtaaagaacggacactgcagtaaaaaaaccctgggtccacggccctgcttaggagctgaatgacatgaagttttttcttccctataaaataaagttatcaatacttatgtcagagggtggttctaaagattaaattgcttcatatgtagtctccattagcagtggcagaggtttgctgtttcagaaaccaagccttcagtgaaaagcttccagcagccacttcagtgtaaaatcagcaatttcacagatgataaaaagcagcaagtcttcccattttaaaagctgggttgtagagctca

SEQ ID NO: 681346 - DNA, 611 bp, Homo sapiens
tgggtttatacttggaatgcaaggctagtttaacaaccaaatcaatcagtataaccattaaaaaaacataaaaaagagaaaaattatgttaacattttaatataggtaaaaaaataattgatacaactcaactctaatgcatgaaagctaggataaagaagaatgtccagatatcttataaaagaaattgaaaaaaatacttgtagcatatcagcttgagctactataacaaaataccatagactgagtggcttaagccataaacatttatttctcacagttctggagtttgcaaagtccaggaacatgatgacagcagattcagtttctggtaagggtcctcttccaagtttgaagatgacctccttcttactgtatcttyacatggtagggaaagagagagctctggtctctcttcctctagtaagaacactcatgtcatcttgagaatcccaccttcatgacctcatctgagcattacttccccaaaactccatcttcaaatatcatcatattgtaacattagggcttttatctgtgaatttgtggggtgtacatatattcaattagtaacagcacatcatgattaatggtacaagatggaatgttgt

SEQ ID NO: 681347 - DNA, 629 bp, Homo sapiens
ttggttttttgtccttgcgatagtttgctgagagtgatggtttccagcttcatccatgtccctagcgggggagggatagcattaggagatatacctcatgtaaatgacgagttaatggatgcagcacaccaacatggcacatatatgcgtacgtaacaaacctgcacattgtgcacatgtaccctagaacttaaagtwtaataaaaaaaattaaaaaataatttataaatcaaaactgaatatggtcatcaataattatataatcatcatgaactgtagctgcatttatatacaaagcaaaataactatataaaagtaaacaaaaataaatttctgagagttagtaattcctgaaagttattgagtactcaatatgtgcatctcaccacatgaagaatatgctgtctcatacaatgttcataatgtatttttatcattccggtgttagaataaaatagggtaaatctgacattgagcgaaggtagtctgactttagaactcttgaacttccaatcttttggaaataaattataatatgggtttcccaataggttcaaagaccaccaaaaatggaatactttgtcacattcagatagacaggtctatttttcattatctgagtcagattc

SEQ ID NO: 681348 - DNA, 2459 bp, Homo sapiens
cttttcttactgagacakttcaagtctactgcttacctgaccatttcagacacaacatagaactttcccaccctgcacctaaaaactgagctgccttattgttattgttgacatcgctttgtgttacgttccatacaaacagactttcttttctcaaatgaacaactactttaggcaaagtccattggctattcccttaatatgttttacgacaccaaattcaggtctgttaatatgggcagaacttagcacacctttattctgttaataaaactcgtgatctgaaatcagtccagaatactgtattagccatctttttctatcctgagtacctagtaggaaggcatgccatcaacttctctccagaaaaggaagaatttattttggcatttggtctcccttggtctataatgttaaaaggttaaattagttataatgaggtaatatggttcagattgctttcagtagagctgtgattttctgaaccaaaatgaaagctttataacttcatcatttaaaagaaggcaatgaaaagcagtgttatataacgaaggaaataaaacttcttaaaagccaagaaataaaaatgttaaaatgagcaaattaaaatatttttatattagaaaaatccaaataatgatttattacagtttcacgttcattcaaatctgtgtttcaggaaatgaggggaattttttaatatggaaaggagataaaatagtaaaattgctttaaaattgttctgagtatacatagaagcaaatacataaatactgacacaattggaagaaaaaactgaagtggttaaaaatatggcactgcaatttaaaatacgtggatccaatttcaattttccctttccagacactctccttatatccacctccgcccactctcccatgcataaccaaacatacattataaaaactgtaggtatctaattcaaatctctccattttatgagtcttcaaacaatttctataacataataaaagtaattttgtttccttttgtatttttcggaccctaaatgttattaatatatttctgaatgaaaggatgtctacacatagagccattcagtttttctcttcatgttttcctcttaacagtcaaggcctccctcttcaaagccctagtggggcgagaggaaagaggaaccatgacaattccgtgggcacccactttgcttttcagggatgcatttctgtgtaaccattgagctcctatttgcgaaaatgcagagctatgtctaagaatcacaatccctattttcccttacttcaaatgctaacttcctgatatagacatattttcatttaaaatgttttcagaggaaagatgggaagtgggagtgaaaaagtgtaatttattttattttattttgactttcatccacagttatatcctagctaaccaagttctctaccacctttacctcaatgatttactccctgtgttcaaggccttactatgacctcttagacatccagagcagaaaactctgggtaatacggtgcgttcagcatctcccaaatgctcttacttcctatcttaatctacggcttctacctccaatgtcaagattggcatgctctgttacagctttctcaatttgtcttctgtgatttgtggtaatgaatttcagaccaactatcatgttaatcattcctagaatatacattatcttacttctgtcacaaaggtatgtttgtgtttgtttgttttcagaaatcaacccaaggaggcactagtgaggcaaacaggccttttgatacactgaaagacccttcggaaagatatttcatcttacgtcactcagaagtaacaaatgtattatttttcttttatcacatcagtcagttgtgaaacatacagtcgaatttttacagttacagccaaatcaaggttttcatttgactagcataagaaaaaatggaccttattggtagtccctatgtctgaagaagatttaagaaaataggacatattaacttaaatttacatcataaatatatactttaaggatgtctgttcacagtaaatagtctatatccaggggtgaacggattgcacaaaacataacaatggttctccattcatttataacataaaatatatgctaatatatataatgttaaaggtatgtttacttaaaaaaaatcagacatacacaaaagtagagagaagaatatagaaacaccatagattcatcacctagatgtaataataattatttaggtttgctactcttgcccaatctctctttttttcaaatttttttctttcttctttggcctgaaatattttaaaatatcagacatcatgtcatttcactcctgtgtatttcagtatgtttctctaaaatagaggaatattttcttatataattacagtgccattatcacagtcaacaaacattagcagtaattccttgacactgtttcatttctaatgca

SEQ ID NO: 681349 - DNA, 2459 bp, Homo sapiens
cttttcttactgagacatttcaagtctactgcttacctgaccatttcagacacaacatagaactttcccaccctgcacctaaaaactgagctgccttattgttattgttgacatcgctttgtgttacrttccatacaaacagactttcttttctcaaatgaacaactactttaggcaaagtccattggctattcccttaatatgttttacgacaccaaattcaggtctgttaatatgggcagaacttagcacacctttattctgttaataaaactcgtgatctgaaatcagtccagaatactgtattagccatctttttctatcctgagtacctagtaggaaggcatgccatcaacttctctccagaaaaggaagaatttattttggcatttggtctcccttggtctataatgttaaaaggttaaattagttataatgaggtaatatggttcagattgctttcagtagagctgtgattttctgaaccaaaatgaaagctttataacttcatcatttaaaagaaggcaatgaaaagcagtgttatataacgaaggaaataaaacttcttaaaagccaagaaataaaaatgttaaaatgagcaaattaaaatatttttatattagaaaaatccaaataatgatttattacagtttcacgttcattcaaatctgtgtttcaggaaatgaggggaattttttaatatggaaaggagataaaatagtaaaattgctttaaaattgttctgagtatacatagaagcaaatacataaatactgacacaattggaagaaaaaactgaagtggttaaaaatatggcactgcaatttaaaatacgtggatccaatttcaattttccctttccagacactctccttatatccacctccgcccactctcccatgcataaccaaacatacattataaaaactgtaggtatctaattcaaatctctccattttatgagtcttcaaacaatttctataacataataaaagtaattttgtttccttttgtatttttcggaccctaaatgttattaatatatttctgaatgaaaggatgtctacacatagagccattcagtttttctcttcatgttttcctcttaacagtcaaggcctccctcttcaaagccctagtggggcgagaggaaagaggaaccatgacaattccgtgggcacccactttgcttttcagggatgcatttctgtgtaaccattgagctcctatttgcgaaaatgcagagctatgtctaagaatcacaatccctattttcccttacttcaaatgctaacttcctgatatagacatattttcatttaaaatgttttcagaggaaagatgggaagtgggagtgaaaaagtgtaatttattttattttattttgactttcatccacagttatatcctagctaaccaagttctctaccacctttacctcaatgatttactccctgtgttcaaggccttactatgacctcttagacatccagagcagaaaactctgggtaatacggtgcgttcagcatctcccaaatgctcttacttcctatcttaatctacggcttctacctccaatgtcaagattggcatgctctgttacagctttctcaatttgtcttctgtgatttgtggtaatgaatttcagaccaactatcatgttaatcattcctagaatatacattatcttacttctgtcacaaaggtatgtttgtgtttgtttgttttcagaaatcaacccaaggaggcactagtgaggcaaacaggccttttgatacactgaaagacccttcggaaagatatttcatcttacgtcactcagaagtaacaaatgtattatttttcttttatcacatcagtcagttgtgaaacatacagtcgaatttttacagttacagccaaatcaaggttttcatttgactagcataagaaaaaatggaccttattggtagtccctatgtctgaagaagatttaagaaaataggacatattaacttaaatttacatcataaatatatactttaaggatgtctgttcacagtaaatagtctatatccaggggtgaacggattgcacaaaacataacaatggttctccattcatttataacataaaatatatgctaatatatataatgttaaaggtatgtttacttaaaaaaaatcagacatacacaaaagtagagagaagaatatagaaacaccatagattcatcacctagatgtaataataattatttaggtttgctactcttgcccaatctctctttttttcaaatttttttctttcttctttggcctgaaatattttaaaatatcagacatcatgtcatttcactcctgtgtatttcagtatgtttctctaaaatagaggaatattttcttatataattacagtgccattatcacagtcaacaaacattagcagtaattccttgacactgtttcatttctaatgca

SEQ ID NO: 681350 - DNA, 2459 bp, Homo sapiens
cttttcttactgagacatttcaagtctactgcttacctgaccatttcagacacaacatagaactttcccaccctgcacctaaaaactgagctgccttattgttattgttgacatcgctttgtgttacgttccatacaaacagactttcttttctcaaatgaacaactactttaggcaaagtccattggctattcccttaatatgttttacgacaccaaattcaggtctgttaatatgggcagaacttagcacacctttattctgttaataaaactcrtgatctgaaatcagtccagaatactgtattagccatctttttctatcctgagtacctagtaggaaggcatgccatcaacttctctccagaaaaggaagaatttattttggcatttggtctcccttggtctataatgttaaaaggttaaattagttataatgaggtaatatggttcagattgctttcagtagagctgtgattttctgaaccaaaatgaaagctttataacttcatcatttaaaagaaggcaatgaaaagcagtgttatataacgaaggaaataaaacttcttaaaagccaagaaataaaaatgttaaaatgagcaaattaaaatatttttatattagaaaaatccaaataatgatttattacagtttcacgttcattcaaatctgtgtttcaggaaatgaggggaattttttaatatggaaaggagataaaatagtaaaattgctttaaaattgttctgagtatacatagaagcaaatacataaatactgacacaattggaagaaaaaactgaagtggttaaaaatatggcactgcaatttaaaatacgtggatccaatttcaattttccctttccagacactctccttatatccacctccgcccactctcccatgcataaccaaacatacattataaaaactgtaggtatctaattcaaatctctccattttatgagtcttcaaacaatttctataacataataaaagtaattttgtttccttttgtatttttcggaccctaaatgttattaatatatttctgaatgaaaggatgtctacacatagagccattcagtttttctcttcatgttttcctcttaacagtcaaggcctccctcttcaaagccctagtggggcgagaggaaagaggaaccatgacaattccgtgggcacccactttgcttttcagggatgcatttctgtgtaaccattgagctcctatttgcgaaaatgcagagctatgtctaagaatcacaatccctattttcccttacttcaaatgctaacttcctgatatagacatattttcatttaaaatgttttcagaggaaagatgggaagtgggagtgaaaaagtgtaatttattttattttattttgactttcatccacagttatatcctagctaaccaagttctctaccacctttacctcaatgatttactccctgtgttcaaggccttactatgacctcttagacatccagagcagaaaactctgggtaatacggtgcgttcagcatctcccaaatgctcttacttcctatcttaatctacggcttctacctccaatgtcaagattggcatgctctgttacagctttctcaatttgtcttctgtgatttgtggtaatgaatttcagaccaactatcatgttaatcattcctagaatatacattatcttacttctgtcacaaaggtatgtttgtgtttgtttgttttcagaaatcaacccaaggaggcactagtgaggcaaacaggccttttgatacactgaaagacccttcggaaagatatttcatcttacgtcactcagaagtaacaaatgtattatttttcttttatcacatcagtcagttgtgaaacatacagtcgaatttttacagttacagccaaatcaaggttttcatttgactagcataagaaaaaatggaccttattggtagtccctatgtctgaagaagatttaagaaaataggacatattaacttaaatttacatcataaatatatactttaaggatgtctgttcacagtaaatagtctatatccaggggtgaacggattgcacaaaacataacaatggttctccattcatttataacataaaatatatgctaatatatataatgttaaaggtatgtttacttaaaaaaaatcagacatacacaaaagtagagagaagaatatagaaacaccatagattcatcacctagatgtaataataattatttaggtttgctactcttgcccaatctctctttttttcaaatttttttctttcttctttggcctgaaatattttaaaatatcagacatcatgtcatttcactcctgtgtatttcagtatgtttctctaaaatagaggaatattttcttatataattacagtgccattatcacagtcaacaaacattagcagtaattccttgacactgtttcatttctaatgca

SEQ ID NO: 681351 - DNA, 2459 bp, Homo sapiens
cttttcttactgagacatttcaagtctactgcttacctgaccatttcagacacaacatagaactttcccaccctgcacctaaaaactgagctgccttattgttattgttgacatcgctttgtgttacgttccatacaaacagactttcttttctcaaatgaacaactactttaggcaaagtccattggctattcccttaatatgttttacgacaccaaattcaggtctgttaatatgggcagaacttagcacacctttattctgttaataaaactcgtgatctgaaatcagtccagaatactgtattagycatctttttctatcctgagtacctagtaggaaggcatgccatcaacttctctccagaaaaggaagaatttattttggcatttggtctcccttggtctataatgttaaaaggttaaattagttataatgaggtaatatggttcagattgctttcagtagagctgtgattttctgaaccaaaatgaaagctttataacttcatcatttaaaagaaggcaatgaaaagcagtgttatataacgaaggaaataaaacttcttaaaagccaagaaataaaaatgttaaaatgagcaaattaaaatatttttatattagaaaaatccaaataatgatttattacagtttcacgttcattcaaatctgtgtttcaggaaatgaggggaattttttaatatggaaaggagataaaatagtaaaattgctttaaaattgttctgagtatacatagaagcaaatacataaatactgacacaattggaagaaaaaactgaagtggttaaaaatatggcactgcaatttaaaatacgtggatccaatttcaattttccctttccagacactctccttatatccacctccgcccactctcccatgcataaccaaacatacattataaaaactgtaggtatctaattcaaatctctccattttatgagtcttcaaacaatttctataacataataaaagtaattttgtttccttttgtatttttcggaccctaaatgttattaatatatttctgaatgaaaggatgtctacacatagagccattcagtttttctcttcatgttttcctcttaacagtcaaggcctccctcttcaaagccctagtggggcgagaggaaagaggaaccatgacaattccgtgggcacccactttgcttttcagggatgcatttctgtgtaaccattgagctcctatttgcgaaaatgcagagctatgtctaagaatcacaatccctattttcccttacttcaaatgctaacttcctgatatagacatattttcatttaaaatgttttcagaggaaagatgggaagtgggagtgaaaaagtgtaatttattttattttattttgactttcatccacagttatatcctagctaaccaagttctctaccacctttacctcaatgatttactccctgtgttcaaggccttactatgacctcttagacatccagagcagaaaactctgggtaatacggtgcgttcagcatctcccaaatgctcttacttcctatcttaatctacggcttctacctccaatgtcaagattggcatgctctgttacagctttctcaatttgtcttctgtgatttgtggtaatgaatttcagaccaactatcatgttaatcattcctagaatatacattatcttacttctgtcacaaaggtatgtttgtgtttgtttgttttcagaaatcaacccaaggaggcactagtgaggcaaacaggccttttgatacactgaaagacccttcggaaagatatttcatcttacgtcactcagaagtaacaaatgtattatttttcttttatcacatcagtcagttgtgaaacatacagtcgaatttttacagttacagccaaatcaaggttttcatttgactagcataagaaaaaatggaccttattggtagtccctatgtctgaagaagatttaagaaaataggacatattaacttaaatttacatcataaatatatactttaaggatgtctgttcacagtaaatagtctatatccaggggtgaacggattgcacaaaacataacaatggttctccattcatttataacataaaatatatgctaatatatataatgttaaaggtatgtttacttaaaaaaaatcagacatacacaaaagtagagagaagaatatagaaacaccatagattcatcacctagatgtaataataattatttaggtttgctactcttgcccaatctctctttttttcaaatttttttctttcttctttggcctgaaatattttaaaatatcagacatcatgtcatttcactcctgtgtatttcagtatgtttctctaaaatagaggaatattttcttatataattacagtgccattatcacagtcaacaaacattagcagtaattccttgacactgtttcatttctaatgca

SEQ ID NO: 681352 - DNA, 953 bp, Homo sapiens
ctccccccgggtggggggataatttattatttactctagggtgttttctataggattacttccaaagattgacattattagaagtaaaatgaacacctcccaaggcaatacttgtggagaagacagattttggagtcgatttggaggcagacctgtattctaatctgcttttacccacttactggacacatggtaatgagcaaattacatgcactctctaaacttcagtatcttcatctataaaaatggagcactaagagttccctcacaggattgtggagatcagaggtatgtgtaaaatgctaggtacaaagaaggtaatcaacyagtaagtggtagttacaacagtgcagtttattttggtttgctgaactgccaaagttctcttgtgatcttaatttgttgattactttgtacatctggataccttgcatgtgttttgcaatgtgaatcttgggtctctagggtataaaaagtagctaaatataactaatattgaaaatgtgcctttcagaatgccttgctgcataaatctcttaaaatgaatctaaaatattctacaaagcttggagcaaagaccataatgaggtttgcagtatttgctttgtaaaattttggttgagtccttttgcaagtcagacggctgatagttacataggaaaagtctcaatggaagcctcctcctccggccccacccaagcaatttttgtaaacacacactgacttaaagctgaggaaccccatttttcaccatacaaagctcagtacagaacagtgtggggagtcagatgctcttggatttgaacccctgcttgaccacttccaggttgtgagaccttgaccaacttacttagtatttccaagcgtgggtatcttcatccataaagttggggatactttggggctgtccttaagattaaatgagacattgcatataaagtgtttatgcgcat

SEQ ID NO: 681353 - DNA, 953 bp, Homo sapiens
ctccccccgggtggggggataatttattatttactctagggtgttttctataggattacttccaaagattgacattattagaagtaaaatgaacacctcccaaggcaatacttgtggagaagacagattttggagtcgatttggaggcagacctgtattctaatctgcttttacccacttactggacacatggtaatgagcaaattacatgcactctctaaacttcagtatcttcatctataaaaatggagcactaagagttccctcacaggattgtggagatcagaggtatgtgtaaaatgctaggtacaaagaaggtaatcaaccagtaagtggtagttacaacagtgcagtttattttggtttgctgaactgccaaagttctcttgtgatcttaatttgttgattactttgtacatctggataccttgcatgtgttttgcaatgtgaatcttgggtctctagggtataaaaagtagctaaatataactaatattgaaaatgtgcctttcagaatgccttgctgcataaatctcttaaaatgaatctaaaatattctacaaagcttggagcaaagaycataatgaggtttgcagtatttgctttgtaaaattttggttgagtccttttgcaagtcagacggctgatagttacataggaaaagtctcaatggaagcctcctcctccggccccacccaagcaatttttgtaaacacacactgacttaaagctgaggaaccccatttttcaccatacaaagctcagtacagaacagtgtggggagtcagatgctcttggatttgaacccctgcttgaccacttccaggttgtgagaccttgaccaacttacttagtatttccaagcgtgggtatcttcatccataaagttggggatactttggggctgtccttaagattaaatgagacattgcatataaagtgtttatgcgcat

SEQ ID NO: 681354 - DNA, 828 bp, Homo sapiens
ccaccgtttgtactctctgctttgtaaatagaggtccgttctccctgtctgccttgttcacgtacctttgccgttttccttgctaggatgacatcgtttgccctgaagttctcattaaccataccatagatgtcctcttcttacctcaatacatccaaggctacctcaagttataacttctcctttagtttttccctagtgtctgagtccaaatggacttctctatatccagaatatctactacttgtcttatttttcctcacacttggcacgtgcagttccttccagctactttcataatgttgtattttaacggttcagttgtgtttatatttcactattctgtcaggcaaacaagggtattcgcatggctgaaawctatggtattttttaagtgtaataaaatgtaatgaataaacatacaaatgaatgagttaattaatatattatattcttggttaagtaataagcattatgaggacaaaaattgagtcttacaccttcttataatcctaaagacctcgtacaggacttggaatatagcatgcacttaagacatctttgtgactaatgaatttaaatatttttattaattctaagttgacatatgattgtaatttggggaaggtagtgaaatttcaaatggctttcaccacctgtgaaatgacccttttacataccacatgatttaccagatctttgtttaggtgaacctaggtgaaagcggattgtttcctctacttaggaaatactttgcgtattttagttgcttataaatgtgatgattttaatttgtacagttatagtttatgatattgacttgtacag

SEQ ID NO: 681355 - DNA, 655 bp, Homo sapiens
atatgttaactctttgtagcatattgttaagtagtattaaaaaacaagtaatttttggttgggtccattgagagaataacagtatttttagaatgatctaatggcacgataaacattttagcattttacctggaaaaacattatagctgtgccagtttctgttccaagaaaaaaatacattggtgtattctctaaaggaggaaattctgacctcaactatgttcagatagctgtggcagataatactctgatcaggtactaagtcatatatctttcacatttccctttgctagttatactcagcgtgtggttggaaatggaatcaaagcccagtctggaactcctgaagtcaaagtcaaaggaactgatcctgtgataaatcagattattgataaactgaagcatgttattcaggtaagtcctgatcctatattttttggtatagccaataataaataataagtggttactttctgttatacttgataaatttgttaatcctatcagataatcctacctaaaatattgtagcacattatttrcatcaggacttttggaaagatttagtttaatgatttttgtatgcagtcaatatgcagctgtaatttaatgttggacaatctgtatatgtgaaaagcaagcctcagcctcggcc

SEQ ID NO: 681356 - DNA, 655 bp, Homo sapiens
atatgttaactctttgtagcatattgttaagtagtattaaaaaacaagtaatttttggttgggtccattgagagaataacagtatttttagaatgatctaatggcacgataaacattttagcattttacctggaaaaacattatagctgtgccagtttctgttccaagaaaaaaatacattggtgtattctctaaaggaggaaattctgacctcaactatgttcagatagctgtggcagataatactctgatcaggtactaagtcatatatctttcacatttccctttgctagttatactcagcgtgtggttggaaatggaatcaaagcccagtctggaactcctgaagtcaaagtcaaaggaactgatcctgtgataaatcagattattgataaactgaagcatgttattcaggtaagtcctgatcctatattttttggtatagccaataataaataataagtggttactttctgttatacttgataaatttgttaatcctatcagataatcctacctaaaatattgtagcacattatttacatcaggacttttggaaagatttagtttaatgatttttgtatgcagtcaatatgcagckgtaatttaatgttggacaatctgtatatgtgaaaagcaagcctcagcctcggcc

SEQ ID NO: 681357 - DNA, 637 bp, Homo sapiens
gaagtgtttttttacaaggttgcaatggcaagattgtggtttttgcagtctttcgtgatagttcttgttatcaggcatatgtgcgtgagaattctcttttcatggccttctccagctgcatttggcatgctcttcctcctcctcctcttctttcttccctcctcctcctccatcaaatactttaaaatatacaaatttttattttgtgattcaacagaacataaaatgagattgttggacaggactttaagttggaatagagacaagattgaaactgtgttatgctcaaattctaatggctttttaaaacagtaattactacagagttattttcattaagaaaaagttatttaaaaatcttttcaarcttcatatttcttccacaggcccaggaacacagcttgtttgctattcaaagtagaagtaaatatggagagtgctgtgtgtgtgtgtgtgtgtctgtgtgtgtgtttattttaaaaatttatttagttcttatgttaatataccttgcatttaggaatactaactaatttgtttggtaaagtcaaaaagaagagcagccagagaggtgttcataatgaaagctaggaaaatcagcttttgactcatttgatagcctcccacccctgattca

SEQ ID NO: 681358 - DNA, 964 bp, Homo sapiens
aagatgtgatcttgccatgttgcctgggctaatcttgagctcctgtactcaaccagtccactctcctcggcctcccaaagtgctgggattatagacgtgagacactctgcccagtcttaagtgtttttattaattatactttttttcatagtagtatgaaaatatgtatatgggccagttatgttagcttatgcctgtaatcccagcactttgggagattgaggtgagaggattgcttgagaccaggaattccagaccagcctggaccatgtaacgatactctgtctctacaataaatacatttttaaaaaattagccaggtatgatggtgcactcctgtagtcccagctactyaagaggctgaggtgagcagatagctcaaacccaggagttccaggctgaggtaagccatgatcacaccactgccagtctaggcattagaatcagaccctctgagaaaaaaagaaaatttgtatatgaaaaaaataccagaagaaaataggtttaagtagtgcagtttttcccttactttctacaattttgtcgtgaacatattacttttataataaaaaattaatgtaatattttatgtttttaaaaattctcttgttaaattaaggattcataaaatgcttcaataccttggttacctgtgagattctgtggacaatgaaatataccaaagttcttgaaattaaatatttagggatccatttttcattttaaagccttgaagtatttgaaaaagaaaaaatctttgtctttcccattggattgactatagttctatttcttttttccttttttgagaaggagtctcactctgtctcccaggctagagtgcactgacacaatttccactcactgcaacctctgcctcccaggttcaagtgattctcctccctcagcctcctgagtagctgggattataggtgtgtgccactatgcccagctaatttttgta

SEQ ID NO: 681359 - DNA, 593 bp, Homo sapiens
tgtaagtatgtacaagactaacatagggaaaatactagcttatttatcatcwctaatttttggagcaaaggaattttgagagaataatactctgaactttttattgctctcataacaaatattttctgctgtctttatagcagaatctttagtttttgtcttattcgtgaagtggaaataacatgtggagcactgtgtgatctctcaatgtttgtaaattaagtttagtgtaaaaattctgtgtaagtgaaacatgttatgagggatggcagaactggcattcgaaacaggaaatagaattttaagatatactcatacataatgttttattgccttttgtattttgatagattttgtagtttattaccttgaattattatttcttttcctgaagatagagaaatttacattacttataaacttaaaaaaaacttgtaaaagaaagataggtttgagcagcacatataagccttttttttttttttttggtgggggacagggtctttgtcactcagactggagtgcagtggggcgtgatcatggctcattgcagcctccatctcctggactcaagcagttctcctgcctgagcc

SEQ ID NO: 681360 - DNA, 683 bp, Homo sapiens
tgaactgcaacatgagctcagatctgcaaaatattcagaggatataggcaaagagcagttttttcctccttatgagctaggttgttctccaaaagcaacaagtactacttgtcttttcagagcgctgtcatggagctgtaagtctctttgtggtttagacttaatgtgagtaagattcctctgcattctcagcctagaaaaacttgaccgttctcttggaatttggtgaaagtttcctaactttgaagctagagaatactctcatttcagattaggcaattattaacatttttttctgttctaatttcatgatgccaaaaaatcatgtatggttgatctatttggagaacaatatgtagcctcagacacttaagatcatatgtagtttagaaataatgtcaattgcatatgaatgttttgatgtttttcccccagcctttctgaattttttgatttcttcaaattgtacctggttttttatttttgtttctgtttttgtttttgactttcacataaactgtttatagtgtctggaacatacatatatatatatatayacacacacacacatatatgtatgtatgtatacatgtgtacatgtatataaacatgtatatgtatgtatattccagacaaattatataaatgtatgtatatatatacaaattatatatacatatacg

SEQ ID NO: 681361 - DNA, 683 bp, Homo sapiens
tgaactgcaacatgagctcagatctgcaaaatattcagaggatataggcaaagagcagttttttcctccttatgagctaggttgttctccaaaagcaacaagtactacttgtcttttcagagcgctgtcatggagctgtaagtctctttgtggtttagacttaatgtgagtaagattcctctgcattctcagcctagaaaaacttgaccgttctcttggaatttggtgaaagtttcctaactttgaagctagagaatactctcatttcagattaggcaattattaacatttttttctgttctaatttcatgatgccaaaaaatcatgtatggttgatctatttggagaacaatatgtagcctcagacacttaagatcatatgtagtttagaaataatgtcaattgcatatgaatgttttgatgtttttcccccagcctttctgaattttttgatttcttcaaattgtacctggttttttatttttgtttctgtttttgtttttgactttcacataaactgtttatagtgtctggaacatacatatatatatatatacayacacacacacatatatgtatgtatgtatacatgtgtacatgtatataaacatgtatatgtatgtatattccagacaaattatataaatgtatgtatatatatacaaattatatatacatatacg

SEQ ID NO: 681362 - DNA, 683 bp, Homo sapiens
tgaactgcaacatgagctcagatctgcaaaatattcagaggatataggcaaagagcagttttttcctccttatgagctaggttgttctccaaaagcaacaagtactacttgtcttttcagagcgctgtcatggagctgtaagtctctttgtggtttagacttaatgtgagtaagattcctctgcattctcagcctagaaaaacttgaccgttctcttggaatttggtgaaagtttcctaactttgaagctagagaatactctcatttcagattaggcaattattaacatttttttctgttctaatttcatgatgccaaaaaatcatgtatggttgatctatttggagaacaatatgtagcctcagacacttaagatcatatgtagtttagaaataatgtcaattgcatatgaatgttttgatgtttttcccccagcctttctgaattttttgatttcttcaaattgtacctggttttttatttttgtttctgtttttgtttttgactttcacataaactgtttatagtgtctggaacatacatatatatatatatacacacacacacacatatatgtatgtatgtatacatgtrtacatgtatataaacatgtatatgtatgtatattccagacaaattatataaatgtatgtatatatatacaaattatatatacatatacg

SEQ ID NO: 681363 - DNA, 1400 bp, Homo sapiens
tgtgagaaaggcttcttgaacctctttatggagctcctcagatacactgctggcttctcggagaattagtttaggatatttcagctgccactaaaacaaaaccaaagcaaaaacagacgttgatatatagctacaattgtattatttccaaaggtgtgtttctttgtaagcatttggggagttgtggggggactacctggtggctatttctaaataggagtcacatcttcctagcccaaaacagaaaaccaaataaaacaaatgtcatcaaactctaaagtcaagattttcaagttcaagctcaaattactaacaatctttaataaaaaacaaaaaataataatgtgkgtcctgatacaccaggattattctgtgaccactttttctcaccctaaatctcaacaccattttattaactgcttattatctaaaatatttattaagtgcttactacgtaccaggtactgttgtaagttacttgtgtgcattagctcattttaactctaggcatagtattattatctccagtttatagatgagaccactgaaacacagagacattaatctgaccaaagacattaatttgcccaaagtcacacagctggcaaatactggagctggaatttaaagcccctggacaccaacccctggcttccagggcacgagttcttaaccatgagaatgcattgtctcaataaatgacaaactggtttctgcttaacactttcacaaaaagagaactcacttctcttcaggagttagacattaagttccatgaacacaaaagccatggcaattttgctcatgactataatatgagtgcccagaatttactcagtaaatggtaaaggaatgaataaatggatttgtgcatggatgaatgaggtattattacattgtaattctacaaaattctaataattctactggtgtcactggaggagagtaatattggtcaattcccttccctaatacagaaatacatggaatgattaatgtaggttagggctgcattagcttttcggctaccactttccttaggacttggcatgtgaatcggtgtcagactggagtttcctgattctgtaaaatgcaactgatttatttgtaaccaaatcacaggattttacatttacctctgtaacgtttgatctgatttgttcctccctagttttaggctgtcttaaagaaagagtcagacatgatcaacacattaacctgtcctccctgtattgtgttgcccaccattgttaagataccttccttctctgtcttcatttagtaattaccattcacatgataggcagggcaagaccagtattcttccaaacgttttttttttcatgcagcatctgtttattgagcacctaccaccagatggaaacaaggtccctgttctc

SEQ ID NO: 681364 - DNA, 1400 bp, Homo sapiens
tgtgagaaaggcttcttgaacctctttatggagctcctcagatacactgctggcttctcggagaattagtttaggatatttcagctgccactaaaacaaaaccaaagcaaaaacagacgttgatatatagctacaattgtattatttccaaaggtgtgtttctttgtaagcatttggggagttgtggggggactacctggtggctatttctaaataggagtcacatcttcctagcccaaaacagaaaaccaaataaaacaaatgtcatcaaactctaaagtcaagattttcaagttcaagctcaaattactaacaatctttaataaaaaacaaaaaataataatgtgtgtcctgatacaccaggattattctgtgaccactttttctcaccctaaatctcaacaccattttattaactgcttattatctaaaatatttattaagtgcttactacgtaccaggtactgttgtaagttacttgtgtgcattagctcattttaactctaggcatagtattattatctccagtttatagatgagaccactgaaacacagagacattaatctgaccaaagacattaatttgcccaaagtcacacagctggcaaatactggagctggaatttaaagcccctggacaccaacccctggcttccagggcacgagttcttaaccatgagaatgcattgtctcaataaatgacaaactggtttctgcttaacactttcacaaaaagagaactcacttctcttcaggagttagacattaagttccatgaacacaaaagccatggcaattttgctcatgactataatatgagtgcccagaatttactcagtaaatggtaaaggaatgaataaatggatttgtgcatggatgaatgaggtattattacattgtaattctacaaaattctaataattctactggtgtcactggaggagagtaatattggtcaattcccttccctaatacagaaatacatggaatgattaatgtaggttagggctgcattagcttttcggctaccactttccttaggacttggcatgtgaatcggtgtcagactggagtttcctgattctgtaaaatgcaactgatttatttgtaaccaaatcacaggattttacatttacctctgtaacgtttgatctgatttgttcctccctagttttaggctgtcttaaagaaagagtcagacatgatcaacacattaacctgtcctccctgtattgtgttgcccaccattgttaagataccttccttctctgtcttcatttagyaattaccattcacatgataggcagggcaagaccagtattcttccaaacgttttttttttcatgcagcatctgtttattgagcacctaccaccagatggaaacaaggtccctgttctc

SEQ ID NO: 681365 - DNA, 616 bp, Homo sapiens
tggtgtgtgcctgtaatcccagctacttgggaggctgagacaggagaactgcaagagcctgggaggtgaggttgcagtgagccgagactgtgccactgcactccagcctgggcgactcagcaagactccatcccccacycccatccccaaaaaaaagacccatctttgggccaggcctagcggcttacactttaatcctagcactttgggaggccaaggcgggtggactgccagagctaagtttgaaaccagcctgggcatcatggtaaaaccccatctctactaaaaatacaaaaagctagctgggtgtggcaggtacatgcctgtggtcccagctacttgggaggctgagatgggaggatggcttgagcctgggaggcagaggctgcggtgaggacaccactgcactccagcctgggcaacagagtgagactctatctcaacaacaacaaaaaagagcccatcttcactgggctcataatgggcttctcttgacctaataattctctctagtctaggtctcagccttcatttcttcatacatctttcttcaataaatcccttccctaaggcttcaatcttaaatggatgcaaatgaagtcgtataattttaaaa

SEQ ID NO: 681366 - DNA, 616 bp, Homo sapiens
tggtgtgtgcctgtaatcccagctacttgggaggctgagacaggagaactgcaagagcctgggaggtgaggttgcagtgagccgagactgtgccactgcactccagcctgggcgactcagcaagactccatcccccactcccatcccmaaaaaaaagacccatctttgggccaggcctagcggcttacactttaatcctagcactttgggaggccaaggcgggtggactgccagagctaagtttgaaaccagcctgggcatcatggtaaaaccccatctctactaaaaatacaaaaagctagctgggtgtggcaggtacatgcctgtggtcccagctacttgggaggctgagatgggaggatggcttgagcctgggaggcagaggctgcggtgaggacaccactgcactccagcctgggcaacagagtgagactctatctcaacaacaacaaaaaagagcccatcttcactgggctcataatgggcttctcttgacctaataattctctctagtctaggtctcagccttcatttcttcatacatctttcttcaataaatcccttccctaaggcttcaatcttaaatggatgcaaatgaagtcgtataattttaaaa

SEQ ID NO: 681367 - DNA, 616 bp, Homo sapiens
tggtgtgtgcctgtaatcccagctacttgggaggctgagacaggagaactgcaagagcctgggaggtgaggttgcagtgagccgagactgtgccactgcactccagcctgggcgactcagcaagactccatcccccactcccatccccaaaaaaaagacccatctttgggccaggcctagcggcttacactttaatcctagcactttgggaggccaaggcgggtggactgccagagctaagtttgaraccagcctgggcatcatggtaaaaccccatctctactaaaaatacaaaaagctagctgggtgtggcaggtacatgcctgtggtcccagctacttgggaggctgagatgggaggatggcttgagcctgggaggcagaggctgcggtgaggacaccactgcactccagcctgggcaacagagtgagactctatctcaacaacaacaaaaaagagcccatcttcactgggctcataatgggcttctcttgacctaataattctctctagtctaggtctcagccttcatttcttcatacatctttcttcaataaatcccttccctaaggcttcaatcttaaatggatgcaaatgaagtcgtataattttaaaa

SEQ ID NO: 681368 - DNA, 616 bp, Homo sapiens
tggtgtgtgcctgtaatcccagctacttgggaggctgagacaggagaactgcaagagcctgggaggtgaggttgcagtgagccgagactgtgccactgcactccagcctgggcgactcagcaagactccatcccccactcccatccccaaaaaaaagacccatctttgggccaggcctagcggcttacactttaatcctagcactttgggaggccaaggcgggtggactgccagagctaagtttgaaaccagcctgggcawcatggtaaaaccccatctctactaaaaatacaaaaagctagctgggtgtggcaggtacatgcctgtggtcccagctacttgggaggctgagatgggaggatggcttgagcctgggaggcagaggctgcggtgaggacaccactgcactccagcctgggcaacagagtgagactctatctcaacaacaacaaaaaagagcccatcttcactgggctcataatgggcttctcttgacctaataattctctctagtctaggtctcagccttcatttcttcatacatctttcttcaataaatcccttccctaaggcttcaatcttaaatggatgcaaatgaagtcgtataattttaaaa

SEQ ID NO: 681369 - DNA, 616 bp, Homo sapiens
tggtgtgtgcctgtaatcccagctacttgggaggctgagacaggagaactgcaagagcctgggaggtgaggttgcagtgagccgagactgtgccactgcactccagcctgggcgactcagcaagactccatcccccactcccatccccaaaaaaaagacccatctttgggccaggcctagcggcttacactttaatcctagcactttgggaggccaaggcgggtggactgccagagctaagtttgaaaccagcctgggcatcatggtaaaaccccatctctactaaaaatacaaaaagctagctgggtgtggcagrtacatgcctgtggtcccagctacttgggaggctgagatgggaggatggcttgagcctgggaggcagaggctgcggtgaggacaccactgcactccagcctgggcaacagagtgagactctatctcaacaacaacaaaaaagagcccatcttcactgggctcataatgggcttctcttgacctaataattctctctagtctaggtctcagccttcatttcttcatacatctttcttcaataaatcccttccctaaggcttcaatcttaaatggatgcaaatgaagtcgtataattttaaaa

SEQ ID NO: 681370 - DNA, 646 bp, Homo sapiens
atcaagacaagaatatagccattcctgctcctcttaggagtatgttcaagaactagatctggttatccagcccaaggaatattttattttctgaatgttctgagcatatttttggatagaatcctctaactctatgaatgtratgtaactgttttatgccattctatttccaaagtgaatcgttagtgatatttaaaatataaaggtaggcttgaccataggaaaatgtttttgtaggtaaaaagtggtcaaatcttgtcaatctcatgtggctcaatctaacacagaatcatttgtaagtgggctatttaattctgtcatttctatgaagaaaatgaactgggtggattggaagccaaatttgtatctagatgctaatttaggcccttgagtcttcccttcccctactccatagctccccccacttcccattttcctcatgccataatgctgctttctgaaaaccatacacagtcatctaatctaagctcgctctacccacaggggtctgagttctcacaacccacttcacctctccttaataggtcaaccttggtcttgggaggatagtgatctgattggctcttctggctttcttgcactgaggatgtgaatgactgatagctttgtttaatgtttagtggta

SEQ ID NO: 681371 - DNA, 2193 bp, Homo sapiens
tgattttagaaaataataactattgtgtattttttccattgtaatagtaatagacatggaatatttggaaactgcagaaaagataaaaaagaattgaagggaaaaatctggcattttctgccatcaaatgtaactgacaatattttgttttttgtttcatttttttctctgcaaagtttaatttttcccaatgctttatttacccttgtatcctgtttttttcttaattaaacaaaagcactttttcatattgttataactgcttgataaatactgtttaatggctgtaaaatatttgagatgccatactacaattaaccatttccttttagtttttcatgtttttcaccattataaagagtggtccagggaacatctttgtatactttttaggttatttcctcaggataggttctggttgcttgagattcttttttgaaatgaaatgggaatataataaaaggaagaaagaattcttagaagtagaattatcaaaaagtgtgaacaattttgaaactcttgatatatagccaaatttcttgcaaaggttttgttttattttggtttggtttttgagacagggtctcaaaaaccctgttgcccaggctggagtacaggggcgtgatcttggcccaagcaatcctcccacctcagcctcccacgttaactgggactgtaggtgcgagccaccatgcccggcataatttttgtatttttttgtagtgacagggttctgccatgttgcccaggctggcctcaaactcctgagttcaagtgatctgccaaccttggcctcccaaagtgttaggatttacaggtgtgagcccaaatgtttttaaaaccaatttatgctcctgtaagcagtgaattaagagtatttcttttactacatgagtttcagttttgagaattcaggtttttatatgcatctttgctgatttgtaagtgaagagatgaagggcatttgaaaaaatacgcaaatttgtaagactttaaaagtacatagtttaggcctaaaataaatcagaacayagggacttggtgtaaatttaaaatgtgattgagactatttgtagaatctaggctatctgaaactgaaactcaaaaattcatcattttgagtaggtgagttcttaatattactaatttcacatctctttaagtgccaaaacttacaaacaattatttgttatgtaattcccctcttaatagagtatcactggatagaattttaatgttttcttaagcagttatggccttcaataggaaaatgaggaattagactactctcagtcattaaaatgggctgtaaaaattgtaatgttcatttattctacatgttttttgagtgcctactctgtgccaaaactttatgtaaattaactcttattagttagcaattctagcactgtaaaaaggttagctttttcaagatcccatagttaagtgatggagctgaatttgataatccaatttcatttgttttctttatttcactcctctatggctgtggctacagcttcaacaatcttgtatctaagctatgtaaaaaaagaaaaaagtactcatagtattttaactttaatgttcatagtagatggtcagtaaatatttattgagtggatggatggatgaagggaaggaaggatgagtgaatgaatgaatgtgactgctgtaaggtaacataactgacttaggtgtgtagatgagcttttatagcttttagtatttacattaaaagtttacagctttttatggccagagctgggaggatgtctttactacatttacccagttccacatgataccattggtagggccctaagaaatccaccagatggcatactgtaactgacactattttttttttctctctctagcacttatttgccaagcttattttactgtattgtaggcctacattattatttcagatatagctttctagtttaaatggataaaaataccacgatttgtctctaatattagtaaccatccagaggaaaatttaaatctttacattcttagaagaaaatagagaaatgcttgatggctggaataagatgagaggaaagtataaaatattaccttatgttggttttgttgccttcatcttttttttatatgctttttgtttcactacatcttaaggctctttgaagacagatgcatgccacttacttcctttataat

SEQ ID NO: 681372 - DNA, 637 bp, Homo sapiens
tgccaagttctttggctagtggctggttggtgtgaaatccttgcaagatgctgatgctcaagctgttgacatatgtatagactactttaacaactgtcagagaaacatgatatggggtaaagaggtgcttttttaaaatcgttcatagacttctgtaaaatacaagataaattaaagttattgtaacagtgaaaaaagaaagataatgaaaatattatgaacatgtaaaaaaaatagcttctcaaaattaactcaagaagaaatagaaaacccaaatagttctgtaatcattaaagaaattcaatcagtaatcagaaatctcaccaagtaaatacttgaccctgaagactccactggcaaggtctactgtaaagtcaaggaaaatattccaattttacataaacatttyagagaatcaaaaaagtggggccactttctctattagtttcttagagcaccataacaaattgccacaaaccaagtggcttaaaacaacagaaatctattctctcattgctctggaggatagaagtttgtaatcaagatatcagcagggtcattcttcttctgttttctttagggaagaatccttccttgcctcttctagcttcttatggtttctagcaatccttggcct

SEQ ID NO: 681373 - DNA, 610 bp, Homo sapiens
taatataatcctattcatgagtttggattgcctgtagttagtgaaaaatactgttactttaaaaggaggctgaacctctaaatggtagtcatagtctttatttggcataataggaaattgagtaatttttcaaaaaggtagctcattatctgtagcatctattactataagttagctattatttgtcctctttgttgcctatgctaaatttccttctctatacaggttaatctttgaaataaaagttttgtaggaataaattgttatttttaactttattcagatttgtagaaaaatgctacatcgccacatgcttatatttcgactgcctaacttacagatgttagatggaagtcctgtgaattcagatgatagggcaaaagctgaatttcacctcgctgamctacaagcaaagaaaaattcggtaataattatattatttacaattttccttttgaagcacattaatggttagtaaatgaacattatatcttttgatttaaatgtttaaacctatggcgtttttgataaggatgatcttagtatctatttagtgattactatcaaaggcagctggatttggtgaatagagcatgcgtgctcacacaca

SEQ ID NO: 681374 - DNA, 685 bp, Homo sapiens
tttacgttttatgttgctaaagtgagatttctaattgcttctctctgacctctcaaattacgatggtaactgccttcttttacaggaaatgcccatctgtctgtattaaacaccagacacatgccaggttttccaatttaaatgacagtgctttaaaacttgtcatagactactctgtcctacctccaacgtgtatttcaagtagatacatctacagatgctagctctgccacatcaaacaatgcacagtgaatgttcaaaatctacattaaaaacctcggttataaagagctagatactctgttttacatgatgtgattattacacattgcatgcttgtatcagaacatctcatataccccataaatatatacatctactgtgtawgcacaaaaattaaaattattattatttttgagatggagtcttgcccggtcaaccagaccagagtgcagtggtgcagtctcggctcactgcaacttccgcctccctggttcaagcgattctcctgcctcagcctcccgagtagctgggactacaggtgcccaccaccacacctggctaattttttgtatttttagtagagacaggtttcaccgtgttagccaggatggtcttgatctcccgacctcgtgctctgcctgcctcggcctcccaaagtgctgggattacaggcatgagccac

SEQ ID NO: 681375 - DNA, 596 bp, Homo sapiens
tgtagggttttattttattttgtattttttgttcctaatgcttagttttctcaggctttttactaaatgataatttgatttggtctgagagtttaccctttatttctagatgtcaggatttcagtggttcttttttttttttttttttttttgagacggagctcgctctgttgcccaggctggacggagtgcagtggcgcgatctcgctcactgcaagctccgcctcctgggttcacgccattctcctgcctcagcctcccaagtagctgggactayaggcactcgccatcacgcccggctaattttttgtatgtttagtagagatggggtttcactgtgttagccaggatgttctctatctcttgacctcgtgatcagccagcttcggcctcccaaagtgctgggattacaggcgtgagccactgtgcctggcctttggtggttcttttaaaaataatcagctctactgcttactctgtgattaattattttccctaggcctcaggatcattcagctcagcaaacaaatacagctggaagcaatgttactacatcatcaactcctaatagtaactctacatctggttctgctact

SEQ ID NO: 681376 - DNA, 675 bp, Homo sapiens
tactgaggaccaaatcttatgactgtctttgtaaataaagttttattggaacacaatcatgctaattcattaatgtctgctctgtggcagagttgggtggctatgacagaacagaatgttctacatacaaaatgtataaacttcaagaacaatgcctgacacagatattttgccaaattttgaaatatgatttatatttttgtctcagcaagtactcacaatgtacttacaagataaattacttacattaggacattgaaacacatgtatttaaaaaaatctgatctaagttacatactcattaaaatatttctgaggattttyttaggttctaaaattagatttattacagaaatataccgctttatacttaagagtataatatgggaaattttccctcttttattatactgttcaaataacactacagcacttggctgaccacagtgagtataattctgttagaaatgcactgggcggtaccacttgggctaagagaagcatatctccatgtaaaatggaatccaaatatattcatgttcatttgctttgtcatgttattgcttgttctgtgatgtggattggaaggaaatagaggaagaatacgtatgaaagtgatccaatagtcccataagtagtgttttcataaacatagaaattgtcccttcaagtctt

SEQ ID NO: 681377 - DNA, 934 bp, Homo sapiens
atttctatatgtagtcacctttatctatgttaagataaacatgagttcttcaactggtattttttaatctacactttagagaagataaaacacagctattaatagttaaataattgactcaagaacaaatgcacagtgaaagcgaaagtagactagaaaccaataattgtctaacttcaaaatctatgctcataatgacacctatcagtttcctggaatttttcaaataaaatatacatttctttgttggtttcagtatgtagtatatgataccaaccaagctgcagaaataagtgcccgaaggagacataattatactttctgttaactccacagacaaaagacatgcagtcggggtactgtagggtggcagagcaactttgctctctgtggttatttagagaccatgtctttattctacgtctctgcttcatcattctctagggtttgcctctgtcattaaatgtaatgtcatatatttaagcggcctcaccactccacccgaattctagactgtggaaaggagagacaggaaatctgtgattaaggggcacatcacaaagaagttccagaagttgcaattatcacttccacacacatcgtagtctaaacttagtcatatgaactgcactcgtctagataagacagaggggaatgtggtttgtcactgggaagccatatcaccaacyatgactgaaaacccgttgattgttaaaggtaaagaggagaatgggtactgggagtaattagtggtctttgctacgctctgattaacttccagttaaagaaaaattctcattatttattaaaattaatcagatattgatgttctatgacattggaggatcagcacagtaaatcccgtatgtttctattcataaatagaaacataaatacataatgtgcacttagatgtagaaaacaaagttgagca

SEQ ID NO: 681378 - DNA, 1566 bp, Homo sapiens
  misc_feature 1465, 1466, 1467, 1468, 1469, 1470, 1471, 1472, 1473, 1474,1475, 1476, 1477, 1478, 1479, 1480, 1481, 1482, 1483, 1484,1485, 1486, 1487, 1488, 1489, 1490, 1491, 1492, 1493, 1494,1495, 1496, 1497, 1498, 1499, 1500, 1501, 1502, 1503: n = A,T,C or G
  misc_feature 1504, 1505, 1506, 1507, 1508, 1509, 1510, 1511, 1512, 1513,1514, 1515, 1516, 1517, 1518, 1519, 1520, 1521, 1522, 1523,1524, 1525, 1526, 1527, 1528, 1529, 1530, 1531, 1532, 1533,1534, 1535, 1536, 1537, 1538, 1539, 1540, 1541, 1542: n = A,T,C or G
  misc_feature 1543, 1544, 1545, 1546, 1547, 1548, 1549, 1550, 1551, 1552,1553, 1554, 1555, 1556, 1557, 1558, 1559, 1560, 1561, 1562,1563, 1564: n = A,T,C or G
tctggctggcctctctgttgagataaggattgtctgtactcatttggtatgctcaatatataacacaatgcctgaaacacagtatttattaaatggaaaaagggatgtttctaaataacttatatgattttttgcaaatatgaggtaagtttttaaacatatacaaactcatgtaattatcagtattatccaactttgattcctacctgcattttctagttgaggaaactaaagcacagaaagattaaatactcacccaagtttacactgtaagtttcagagctatgttttgaattcaaagataaactcttgatatattatataaggttcaaaaacgtatacataaaaagtaaaatgtgtttttaaggtaactgatttagtttcagatactcaagtttggtatctcaaaaaaataccatgatctatcattattcatgagtgaaagataatattctagaaacttatgacgtttgtttcaatgacacaaaagatgcacgtggccagaaactttatgcctgttatagtaagtacagaccaaaggtatctctgtaaccatataagtaaaattatatggttacagggattattcacatttacttggacttcatataaaatgttcagagtatttagggagaaaataaaacaatattatcaagactctactactaacttgaagctattaagttagaaaatgaaggtaccaaagatgaatttgatttatagcagcttctaaattggttaataaatcagattctgactgcttttattcagcatccagccaaagccatccgcaggcgcctaaatggtacatgcgttggcacagggtatctggttgactgcatgggacaaccagctgtctctgggaagccttcctcaataaggaaggagagagatgataatagagaaagaattataatgttctgtagtgcctgatactatcccaaggaaaaactcataattattgttttagtaaagaataggtagatatagctgtaatgcgtatgtttttctttgtactttaattaaattctttgcaagtaaacctgttggctacagatcagatgagagcatgatgtatttacttttatgaaaacaccacaattaaaatagatcaagccactcctatgagtaaaatcatctagttctctccatggagttaagaaaaactccgaactcctcgtttttgataatgtgacaaatttgatcctgcctctctctccaacctcaactcttgacatttccaattcatcatgcctaaccacttttatttcttctagttttgtttcctgtcacrggacatttacatatgctgttccctcttctaaagctttctcctccagctcttcatgagattagctccttctcatgctgggaaactcagattatatgtgatctccctagagagtccttccttgatctcttgagccctccttcaacatttattgcagctctttgtttgaattcnnnnnnnnnnnnnnnnnnnnnnnnnnnnnnnnnnnnnnnnnnnnnnnnnnnnnnnnnnnnnnnnnnnnnnnnnnnnnnnnnnnnnnnnnnnnnnnnnnnnaa

SEQ ID NO: 681379 - DNA, 664 bp, Homo sapiens
tggagaacaccagattagcccaggcttgrgaagtgggggagggtgtcctgaggccggaagaccgccacgtgcaaggtcagaggggacattcttgcattcctcaaagtcatttctctttcctggaccccctccttgaagcgtatcagccccctggcattcctctctcaattcatcctcatgatgatcccttgacgtcagcagccctattcctattttagatgcggaaactgaggcagcatgtggcagggctaggattcaattccaggttctatgagtctagagcacataagcagtcttgcagaggaacttgcaggataagctgaacaatttcatccgtgcccaaagcagtccatggaaaacagggctggaggagacactctcatctgcccttgcagaggtttggaggttggttccaggtggataatggagcagactgatgggggccggttggagaggtgtatttcagaagaaagagctggcagtgcaggccaggggtgtctctggggttagggaaggagggtttcaagcaggaagggactttgggggaaagactggcaggcagcagacagggacagactgcatgctgaatgaaaagaatcacttagcacaggtgcagaacaggctccccgggatcttcaccaaaggcttgaactctatattcaaa

SEQ ID NO: 681380 - DNA, 639 bp, Homo sapiens
caagactaacgccagtcaggctgagccagaaccaccagggggcagagaagggcctgaaaatcaacaagacggagttcaatttggcagctggaaccaaagccaaacgcaagcgcagcaggggacagggcagttctcagacttggagcggctgtgctgtgccctgtcttgggggctcttagcctcaagggaccatggcgtggctccatggaggaggcggcctgtgaaacccctggaacggcaggaaaagcactgtctgagggcgcagggtattcttcaggggagagtgtccatagtgctcctggctaagtacagggctcagggtaagtgggggctccttcttcacaagtgaccagtcaggcaggagtaaaaggagaatccttaggtgcccctggactcaggcagccctctcctttgtgtcacctctgcccttgtcgaaggmagcatttaccgagtgcttactatgtatgcgtcacgcatcattccaagtacgatgcatatattaactcttctagccgtcactacagcacacagaggatcctgtcactaggtcctctttttgcacaggaggaaatcaagatacagagaggtggagtaatacagctagcaggcagtggggcacagttttaacccaggcaattg

SEQ ID NO: 681381 - DNA, 1832 bp, Homo sapiens
agatcgcgccactgcactccagcctgggcgacagaccgagactccatctcaaaaaaataaataaataaaataaataaaaaagaaagttattgatatattatagtctacaactagccacatacagaactcttattgtctctaatagaatttcagaaaattctaagacaattttcaggaaattcaaagcatacaatgttattatctgattacaatcatcattttgttccctcatttccaatatttatgtacttctacatctctcttatcttactgccttggttagtatctaccgaaaattttagatgactggtgatagtaagcaaccttgaattatctttgactttaatgggaatcgctggcttttgtttgtgacacatacacatcattaaagaagtctctgcacatgtatagtctatcaagagtttgttgttagaaagattgttaattgtgtcacatgtatgttctgtatctatagagataactacagtttttcttctttggcctgttaatatggtatgatagattatattccaaaatttcttaatattcatccattcttgggtggcataaattcacttagttgtgatgtacactactgttcttttaatttattgttgaatcctatgcrctaatattttgatctccaattttttttatttttatttatttatttatttatttatttgagacagtcttgctttgtcactcaggctggagtgtagttgcacgatctcggctcactgcaacctccacctcccgggttcaagtgattctcctgcctcagcctcctgagtagctgggattacaggcacccgccaccgcgcccagctaatgtttgtatttttagtagagatgggttttcaccatgttggccaggctagtcttgatctcctgacctcatgatccacccaccttggcctcccaaagtgctgggattacaggtgtgagccaccgtgcccggctgatctcaaatttttatattaatatttgatcatgggatcagtctttttttttccttttccacactttacatcatttattaatgcagtatacattagatctaaaatctgcagtttctaaacacaccatgttatatctttcggatccttctgcagttttaggttatttctacagaggtacctttaagtgagtgaataacacattctataattcctgaaaatatagtacaaagtgaaatgatttaaatataatttaggcaaatgttgattatgaaaatagataatctctcaatacaatacttctctgtcttggtaaaaataataaagcaaagaaaataattcatttctgaagttgctttccttcacttgtaaaggtctgatcttctcccactatgcatatgtgccctttactgtcaaagaaagctttgcatatgtagatatagaagaatacactacataaatactaaagatgagtcattctcccaaaggagacaaaagtggttttcaatgattccttgcctcatgttgatgagtctgtagaattcagaaccctgtggacacagctaacatccctgctcttggggtagatgtaaggacaccaggtcattggtagggagatacaggcccttcctctactgttgcagagagaaaatgactcaagaaaaacaggctaaatttcactaaaaaaaaaaacaaaaaaaaaaacaggctgggcgccatgactcacgcctgtaatctcagcactttgggaggctaaggcaggtggatcacaaggtcagtagatcaagaccatcctggctaacatggtgaaaccctgtctctactaaaaatacaaaaattagctgggcgtggtggtgtgcacctgtagtccca

SEQ ID NO: 681382 - DNA, 1334 bp, Homo sapiens
ttctgtctactttatttttctatctatatagaaaggttgtaagttacaaaaaagtacaaaacattaaacctagtatcattgccatcccagagggtagcactgtttttatgttaacgtatctaatgcatgtctgcaattaatcaagcaattccctgttgaagatttgtgtaaagttgtatatcttttcaaaatttacctacaatcctaaccaaattccactaaacacaatatttctagaacttgataaaatgatttttaaagttcatctttaaaacaaagggtttttacttcactttctaatatggcagctgataaatccatgtgtttgttgaacagctgaaatctgtcttgtctaattcttcagatacacacacacatacgtaattacatacagatgtcacttgatgatgggttatgtcacaataaacccattgtacattgaaaatattgtaagtcaaactgcatttaatacacctaacctttcctgaacatcatagcttcacctaacctaccataaatgtgctcagaattcttaagctagcctacagttgggtgaaatcgtctagcagaaagcctattttatagtaatgtgttgaatacttcatgtaatttgtagaatattttactaaaagtgaaaaacagaatggttgtatgggtacttaaagtgtggtttctactgaatgtgtatcactttcacaccactttacaatctataaaagtcataagtcaaaccatcacaaactggggactgtctgcatctagtcagtgtaaaacactggatttcaatygcagtgggaaaaagtgtaaaatatttcattgataattttatctttattataaattaaagtgataaattctaaagtacttgattaaatgaaatttattattaacattaattttatttatttctatttttaaaatgtttaaaaattttaaatatcactagggactttctaaaatgtcactagttcaaaatttaaaagtgcttatgttgctttttatttatttttattttttgagacggattcttgctctatagtccaggctggagtgcagtggcaggatctcggttcactgcaagctcttcctcccgggttcacgccattctcctgcctcagcctcccaagtagcttggactataggtgcccgccaccatgcccagctaattttttgtatatttaatagagatggggtttcaccgtgttagccaggatggtctcaaactcctgaccttgtgatccgcccacctcgacctcccaaagtgctgggattacaggcgtgagccactgcgcccggccccatatgttgccttttatatatattaagcaatatag

SEQ ID NO: 681383 - DNA, 1096 bp, Homo sapiens
tgaagcttattttaggtgaactaaaacctatctaccttcatacggtatcaccattctgctgtaagatacacattaatgtggctctctaattagcactgtgatattttctccttcttctccctttatataatagctaaatctaaacagtaaatttgccagtctactatcacagcataagttttatgagactttcagtaagccattattcttgattattcattcttttcatttcctctatcaccttctatctgtagagatcttagtcatagacgagtggcttatgctgacatattgagattttaaaaaacatttatcttgtgataggtgaaatggtctatatgttttaatatctgaatatatgctccaagtctgactcaattccccaagcagtatagaaggtgccatctaaacacttcaggtagaagtgaatcatttacatcaagaaatagttcttgctaatagcatctacaatgatttctactttactcacttctcagtgagatgaatgctttcctctactaatgaccttcatattatgacagggatcatacagaagccaaaagtgtaattgttaactgtaagttctccatgagcagaaatttagttctttttcattttatattataccattacctcctagcttaataattgttatatcgtagatggttattagcttttgaatgaataaatgagtgaattatatcagcaaattagtaactcaacaaacttactttggcctgaaacaattaactcggtagtaaaaacaagatgtagattagagtagttgagcggggttttagaatccatacctccactaactcttcctcaaagtcattttaaacaaatatgcaatytaagtgaaaacagtctgttatctttctaggcaaatctttcttcaaggtggctcccttggcatatccttccaacaagactacatcccaaccccaagcttatcttataatgtcattctagaattgcaattgaatcatcagctaagccaaatgcgtgctttttcctcatttcattttcctgccaaatatttttgttgaaatttccaaaattctgtacaagccagccatggcattacctttcttga

SEQ ID NO: 681384 - DNA, 560 bp, Homo sapiens
caaataactttcttataatccctgcctggaaggatactggggcaggggatttggttacattaactaccttttcacaaaaaaaaaaaaaaaaacacacacacacacaaaacaaacttttacgtaaagagaaattgaaattttcattccctggtctttgaatttctttagttcacaacaaaccctttcttattaaataattattggtaaatcaattacatttatttggaaccctagtttaatgacacatcatttsgacatcaagaagaatacattaacacaataaccagagtacaacaaagactaataataggctgtgtgtctctttattggccagagccttagagaccttattatttaatagagttgtcataatgaggaaactgaggacaagtaagtggttggcttatgctggttcgtagagttgcttactaatagagctgagcctagaattaaagtcacccaaacttccagatcattaataaatttgctacaggttatcaaaaatcgctgctgagtagacaccatgccaaaaataataaaataactgcctttcctcatct

SEQ ID NO: 681385 - DNA, 623 bp, Homo sapiens
gatggagcaagactccatctcaaaaaaaaaaaaaaaaaaaaaaatcaaagaagaaaagttgaagaactgcaattaatttaccaaatgtagagaaacaaaagacagctgtgtaatctggaagaaagcatagtctagagactcagtgtttcccattcgctttaaagagtgggcaaggaggaataagcttgcaatccagggaattttaatttgaktttaaggagtggaatttgtcataaaaatggcctcatagcagagattgtgattcagtagatcttgagcagaacccaggaatttgccttttatagccatcagtggtcctgatgcagatggtgatctacagactgcagtttgaaagctttctgagagaaatttattaataatagcaatctcttattagtcttcctctttagtacaggttgagcatcccaaatctgaaaatctgaaatccaaaatgctccaaaatttgaagctttttaagctctgatgtgacactcaaagggaatgttcatcgagcatttaggattaccgatgttcagatttgggatactcaactggtaaatataagccaaatatttcaatatttgaaatccaaaacacttgtcccaaggatttcagataacggg

SEQ ID NO: 681386 - DNA, 1480 bp, Homo sapiens
tagcttaggaacaatagactgtaccacatagcctatgtgtgtagtaggctataacttgtacatttatgtaagtataatctctgatcttcacacaatgataaaattacctaatggcacttttctcagaacttatcactgttattaaatggcacattaccgtaattgttttaaatataccaccttagtctttgctttctaactttgccatctactctttgatccttttttctcctttctgtcttccttaagattgactggatatttgttatgattttgtyttgtcttttttgctgatttattaaagacctatattgggatctaatttcttaatgataattttatgagtctagtttctagtgatgttatagtacttcacctatattacaactatgtactttatttctcttcaaactatgcccacaattcttattttatttcagttttattcaatttaaaggtatttaagcattaatcaaaaagcatttcatatttaccctcatagttacatatttctggtgctctgtattctgctatatagataaaaacttacatattctattatcctctgtctaaagaacttgctttaatatcttctgtagtttagatttgctgatgacaaattgtttagctttttcatatcaaaaaatttttactccaacctcatttttgaaagatatagttgcatgttgtatagaatcctaggttaatcaattttttgtttgtatgcatgtgtgtgtgtgtctgtgtgtgcttggtcattactttaaaaatgtttgactgtcttctcccttgcctgtgtctcatgataaatctgctttcattttaatcttatttcctctatacataaggtgtctgcttttagattttctctttatcactgttcttaggtaacttgattgctttggtgtagttttcttcatctttctttcactatagtcttactgaacatcttgaaactgtggtttcaactgcttgaagttgttttacagccgaacgatgctctgtgagcgtttttctctcttctctctgtattccactttgggtagactgcgctgcaaatctttaagttcacttatctgcaatgtctaatttgcaattactgtcttttagtgtatttttaaactcaaactttagtttccctacaaaagttgaatatgcacattaaagaaaatcatctatgtctctatttatatacttgatatttttatagctttttaaacacgaggaatacagttattaaaaaatgtcttattgttcttgattacaaatttcttcatctgtatatcatttagatcaattccaattgattgactttttcctcctgtttatattaacatttcttaattttgtgttcttagtaaatttttgttagatgccagtcattatgaaattgatcattttgtgtgctgcatatttttgtattcctatacatattcttaagctttgtacagcaatgtagttaagtcgctttggaacagtt

SEQ ID NO: 681387 - DNA, 645 bp, Homo sapiens
tttttctttatttttccctctctgttttttctgtttgtttgtttttgrgacggggtctcactttggtgcccagggtggtacaatcatagctcagtgcagcctggaactcccaggttctagtgatcctcccacctcagcctcctgagtagctgggactacaggtgcgcaccaccacgtccagctagttttttaaattttttgtagagacaggggtctctctttgttgcccaagctgctctcaaactctcagcttcaagcaatcctcctgcctcccaaagtgctaggattataggtgtgagccaccatgcccaacctcttttccattttcatacatgtttacaaataatagaatcacagactcacaggacctcaaactgaggtatctacctaaatgttcacaggagcagaccaggtacttttaaaatgaaaaatacaaagcactaaattagaacagacagacatgacattaatgtgggagaattataaataaaaagaaaagcatctctccatactgtaatatcatatgggattatgtactttaacggcatgagatcacaaagtcttttctccatcagttcgagaaagaaatttaccataagtgtaattgagcaaatgaagcacaaaagtaaggccagtgattgactt

SEQ ID NO: 681388 - DNA, 645 bp, Homo sapiens
tttttctttatttttccctctctgttttttctgtttgtttgtttttgggacggggtctcactttggtgcccagggtggtacaatcatagctcagtgcagcctggaactcccaggttctagtgatcctcccacctcagcctcctgagtagctgggactacaggtgcgcaccaccacgtccagctagttttttaaattttttgtagagacaggggtctctctttgttgcccargctgctctcaaactctcagcttcaagcaatcctcctgcctcccaaagtgctaggattataggtgtgagccaccatgcccaacctcttttccattttcatacatgtttacaaataatagaatcacagactcacaggacctcaaactgaggtatctacctaaatgttcacaggagcagaccaggtacttttaaaatgaaaaatacaaagcactaaattagaacagacagacatgacattaatgtgggagaattataaataaaaagaaaagcatctctccatactgtaatatcatatgggattatgtactttaacggcatgagatcacaaagtcttttctccatcagttcgagaaagaaatttaccataagtgtaattgagcaaatgaagcacaaaagtaaggccagtgattgactt

SEQ ID NO: 681389 - DNA, 1896 bp, Homo sapiens
cattgtttgaatttaagcaattcaaatgagaaacatgttactcatagttttcaacattgtaacaatacagagggagagtagtaaaaatgatatgaagatacatttatagggatatgttatacttgggtgaccataattaatgccctgtaaaatatacttttccctgagttcatggctttgtgtgtgtataaaccgataacatatgtttgtgtacatgtgcatttatatgtgtataaaatttgaccctaagaacatactaatatattgctttactcccattaaaactgtcatacattttattttgtaggctttattttccccagtaatagaaatactgccatttcccccatgattcattaatcgaattgaggaagctgcttattagatgaatcataaaatgaatgtatgttttacttttaatgtctacataaattcatcttaaatgccatttatgttttgaatatttaaaaatgtcatagtagctgggcgcggtggctcacaactgtaatcccagcactttgggagaccgaggcaggcagaccacttgaggccagcatggcgaaaccccaactctactaaaatactaaagttatccgggcatggcggtgcactcctgtgatcttccagccactcgagacactgaggcatgagaaccgcttgaacctgggaggcagaggttgcagtgaatcaagatcgtgccactgcactgcagcctgggctacaaagtgaaactgtgtctctaaaaattaaaaaaaaaaaattaaaaagtcatagtaaaataatctgcaattctatttgaattattagtttaaatatgtgtatttaaatgtgtagataaaaatttatacatgcatataaaagatattgcagaaaaaatgattaaaggggaaacttagtaactccttgttaaggatccatatcagtcacatctatctgctctagaaaactgagttttaagcagtagaaatctcctacatatgaacagttttagtgaaacaagtttttaatttttatcatgttgttattaacaatgtcccatgtctgtggattcggggtaatgtatacaagtagatggtccaaaacactttaagaataatggatttaatttaaagtctacagactaccatactggtgatacaaaacagtcattctcttagaatattcttttcaggctactgcctacatgattgaaaggcaggaatttcatagaaatttcagtgtttttcaagctgtgtagcatggatctctaaaagtttagwgctagtctatggtatgtgtatggtgggagggttgatgttgtgcaggggtggcaggggcttttctcttgtatatgttaggctcccaaacataggtttttctttattttccttttttctagaaagggttccaaagctaaaacaaatacaatagttcgaaaaaccgtttgtatagagaggtcatggaagcataaatgccttactagagaagtcaggcatttatccttatccagaagttggataatatggtcatgaagacagattcaaatatgaacattataatttattactaattagaatttcaataatatggttataaaaacaagactcagagaggaaatgttctgtgcagaattttctctgacctcctccacttgctggtatattgcccaatactgtcctttgagcttttgttgatagagacatcctgcacaggagattcattgatgctgtttatacacaaatagcagtagaaagaaacacaagggaatcataatgaaattaagcaaattgaggaggttctgggctagaattgcttcatttttctcttcaatttttagtccattaatcgcttgggcgaaatacatattttcagaattgatgagttctaaaatcttaagagtcgacaatgtgaaaaatg

SEQ ID NO: 681390 - DNA, 1194 bp, Homo sapiens
tgaaaataaattgtaatgaaacacagccatgcccattcttttgagtattgtctacagctattttcatgctacaatgrcaaagttgaatagttgtgacagagaccatatggccacaaagacaaaaatatttactatctggccctttataaaaaaaaaggttgccaacccctggggtagaagaaacaccacctgcagattaattttctcctggtttttgaaatggtagaaaggaactggagtttccctgtgatctctgttgcccaagacttgatgtggcatgttttaagttagaataagaaataagtattggtagctgggtgcggtggctcatgcctgcaatcccagcactttggaaggccaaggtgggcggatcacttgaggtcaggagttcaaggccagtctgcccaacatggtgaaaccctgtctctactaaatatacaaaaattagccttgcttggtggcatgggcctgtagtcccagctactcgggaggctgaggcaggagaaatgcttgaacccaggaggcggaggttgcagtgagccaagattgtgccactgcactccagcctgggtgatagagtgagactccgtctcaaaaaaataaataaataaataaataaataaataataaaaaaataaaaaaagaagaaagaaatatgtattggtggctattcctctcattctctccacccttccctcttcctctcctctttctttctgttcctttgaaaaattccaatcttctctcagtaaatgaagagaggagacaggacaggcaagagaatcagtgctctgctttttgccaggtacagagatccactttgcttagaagttaggaaagggtccacagagctggggcccatggtgggtggaaacctgccactgtcctgtgtgacttctatccatactttaatgtgcaagtaaatcacctgggacctagttacaaagtagattctgattcagtaggtccagggaggagcttgagactgcttttctcaattttatttatttattttttatttttgagatggagtttcactcttgttgcccaggctggagtgcaatggcgtgatctcggctcactgcaaactctggcctcccaggttcaagcgattctcttacctcagcctcccgagtagctgggattacaggcatgagtcaccacgcccggctaattttgtatatttagtagaga

SEQ ID NO: 681391 - DNA, 1194 bp, Homo sapiens
tgaaaataaattgtaatgaaacacagccatgcccattcttttgagtattgtctacagctattttcatgctacaatgacaaagttgaatagttgtgacagagaccatatggccacaaagacaaaaatatttactatctggccctttataaaaaaaaaggttgccaacccctggggtagaagaaacaccacctgcagattaattttctcctggtttttgaaatggtagaaaggaactggagtttccctgtgatctctgttgcccaagacttgatgtggcatgttttaagttagaataagaaataagtattggtagctgggtgcggtggctcatgcctgcaatcccagcactttggaaggccaaggtgggcggatcacttgaggtcaggagttcaaggccagtctgcccaacatggtgaaaccctgtctctactaaatatacaaaaattagccttgcttggtggcatgggcctgtagtcccagctactcgggaggctgaggcaggagaaatgcttgaacccaggaggcggaggttgcagtgagccaagattgtgccactgcactccagcctgggtgatagagtgagactccgtctcaaaaaaataaataaataaataaataaataaataataaaaaaataaaaaaagaagaaagaaatatgtattggtggctattcctctcattctctccayccttccctcttcctctcctctttctttctgttcctttgaaaaattccaatcttctctcagtaaatgaagagaggagacaggacaggcaagagaatcagtgctctgctttttgccaggtacagagatccactttgcttagaagttaggaaagggtccacagagctggggcccatggtgggtggaaacctgccactgtcctgtgtgacttctatccatactttaatgtgcaagtaaatcacctgggacctagttacaaagtagattctgattcagtaggtccagggaggagcttgagactgcttttctcaattttatttatttattttttatttttgagatggagtttcactcttgttgcccaggctggagtgcaatggcgtgatctcggctcactgcaaactctggcctcccaggttcaagcgattctcttacctcagcctcccgagtagctgggattacaggcatgagtcaccacgcccggctaattttgtatatttagtagaga

SEQ ID NO: 681392 - DNA, 652 bp, Homo sapiens
aacattatttcaaaataaaaagcttatttagaaaataacaaaaatttggcttgcaatttaggaaaacgagaaaaaactttttgagtgatattaaaaagttaatatataacaagtgaaaaaaacagagcaattgaaataaacacacatagatttgccacattttctcactgtatctttgcagaatacacctatttgcttagcaaacccaatggggcacaaggatgtcaaaaagccaaaaaaaaataaaaaaagaacaaaagcagcatgaagaatcrtaactgcagtgccagaaatttgatgaagatatattaggaacatgaaattaagacaaaatctcccttaagcagtttgactgtcctctccttgcaaatagctatcaaaagatgtttttaatagaaaaaggcagttaaaaatcatatacttaaaaggagctatatccatcatccatatatgaaatactccaattttattttattggtcaggattctgactggcaaacaatggaatccattctctggcaagtttaagctactgaaagatattcagtagctccagaatcactggtagggctggagaaataaatccacggcatcacttccaggaaaaatgccaaaaccatgcagcaaattagcctgatttgggggcgggggga

SEQ ID NO: 681393 - DNA, 877 bp, Homo sapiens
agaggttactgtgagccaagactgtgccactgcactgcagcgtgggcaacagagtgaatctctgtctcaaaaaaaaaaaaaaatagaaaagaaaagaaaacatacttgattgttcttccctttctcaaatgctaagtcaagctgatcctgaagctatggttcataaattactatggtgactaccctgcagtgtgagagacaggaccctgagtcctcacaggaatctggagtgaagaactaaactttttccccactgaaaacagcacggttatctcagggactcttcctagaaagatgctgttcaaacttgagttttaaaaaataaaagcactttcttcctagaaagatttcgtaattctgytccaaagaaccctagcccaaaatatcctatggaaaccatttcaagagagtcctacttaagagaattcagatgagtttatggtggcaagtgcaccatgcttctccaagtgtgtgcagcctgtaccagccaggcacattataataaaaggtgacttgccaatagcactggcatgtcccaaggagaattttgcctgaaagatctcaaaaaagcaaacttagcttccattaacctctccaaccctataaaattatcacctgcgtggacatctatttatttgtttgttttgttttgactgccaatatcacttcccctgtattttggctaagaatgcttaagcaatggacatgtgatcctagtttggacaatcagattttctcttcttgcaatttgactcttcagtgaagtgacaaaagaacaggaattgttgggtgcaatccttctaaaacagcccagtgaagaaacagctggttagttcctcctactgagatccttgtagttgtagttctcctggcctct

SEQ ID NO: 681394 - DNA, 411 bp, Homo sapiens
ccacgtgacatggatggktgagaaattttcttttgtcttgttttaaaggactgaaaggtaactggctgtgcacagtgaaatatatgctgtttcagcacatctcacggatctgatcctggaatgaataattccaggcagcgatgaaatgttgaacacctattgatcaaacaccattttgctcattttgctcaccattttgctgaattttgctctcatttttttgatagactttatttttcagagcagttactggtttacagaaaaggtaagcattgggagatatacctaatgctagatgacgagttagtgggtgcagcgcaccagcatggcacatgtatacatatgtaactaacctgcacaatgtgcacatgtaccctaaaacttaaagtataataataaaaaataaataaa

SEQ ID NO: 681395 - DNA, 1881 bp, Homo sapiens
gccattgaaatgtcacagagtggtttacctaacagtaaattatataaggcctgaaggtaggggtgggagaggggatattagtcaggaatttctagtaatttgaagccatgcaaaaacaacaatgttctcaggcattattgtgtttgttgctaacttttggccgagcgattttgagagtttttagctcttcccagtctgggcagtcacattgggcttgtcacttctgcctctcacttgtgctgtgttcatgccctggatgggtgctcttgattggctgctgccttacccaccccttggcacagctgccttgaggtctgccatgttcattggggcccactctgctaatttattttgccagctttgtgcttaaatttcttctagattcagagctttgattgaaggaatataatatgtcacaaaaatagctggtttcatttaccaaatactaattttttgcaagatgatagttctttagaaggagatatttcctgaatgctagttagttataaaatttgttttacataagtttgttgaatgttgtaatatttgtgaaaatagaggtgggtgcataatgtcatggtttgttaattgaatgctgacctaaataacgatacgatggtgtaatgggaggagtcctggactagcaggcaggaaaggttagctcttggtactgcttggttgtgacctttggcaattcccttgacctctcttggcctcagtttctctacagaactagataatgcataaggctccttctaactctataagcaaagttctaagtctatgtagctggaaagcttgcaaaatcagcaagggtgtgtgtttttattcacatatcttaaactcatctcctagaactttgggtcaaaattgaccttgtgaaaaataaaaccaaacagttgaaggctctagcttatctgacaccctaacttaattttgatcaaatgttgtttttatatgaaatagattactaagataataatatgcttgggtaaaaggtattggctctagacaaaggaattgttttttttagctctgccagttcttataagggaaagctgatattttcatcaggaatggggtacagtctcccttgggagagctcaatgccatgtaagccaacacatatattgccccaggacttaaacaattctatgctggagataatcagaaatatgcacatatttcttttttcttaagcaatacccaacaaattcagaaagttgtcatatttgaattgttttccttttcagaggagggatgtgcaatactgaataaggagagaaatacttttctaggaagtatttttcgttttttgtttttttttttttcagaaaaaaaccacttttgaggcacaattgtcataaaatgtcacttgtagcatgaagcaaatatagaaactctgtccctttgcagatargactgcctgttaagtgatggccggtcagacttacttgatgactcagtacagtgagagacaagcattagagctgttagttgttactaacactaagcagaataacagaaaacaggcaaaatagggtcaagtagaattgtcaatttttgcctttcagagtcattaaagggaagaactggggctgagtcgttagaataggttagttgtttgagttattccatcaatccgaaattagaattaccttcataccttccttgcctttccaaacttctgggccatgtcactgagagtggccaggactcagctgatctgcagcagggaaaccacccccaatctgtggctactcctatacttaggcttaaactggacataaggccatttcatacaatttcagatgtttgtgttttgtctttgcaacatgatatatatggttaaaataatataattaatttttaatattgtag

SEQ ID NO: 681396 - DNA, 720 bp, Homo sapiens
atggaacttcctctgaagtttatactgctgaatctagactatcgctttgttctcccctatctcgagctcacattataaatttccatttataattcttggttctctgtgtattctctcagaaacaactgccattgtatgagtaggagttacctgtctctcagtgaaagaaacccaagcaaagttctttctagtagcttctggcccagccgaataacaattaggcttaaatgagtggcacctgaaattcagagtggccgatctctacttcaaaaagcagctccagggagtccttagacctccagaaattacatgaagcattctgttcatacgtgcatctttctgagaagaaatgacttttccagaatccttaaggrgtctgtgatcccctaaagatcaagaatcactacttacacgtgactttgtccactcaggggaagaaaagtacttggtgatctcagcgaaagatgtctttaactgctaagctgctttttccaactggcagaagcccttgagaagagtttattaagaatgaaggaaaaaaataatccctgtgtagtttacacaactgttcctaaaattcatcccccacccatgcattaagcagtaccatgtgccgagagccgttctcagcctgggggtacagccctaaacaagtgcccaccgtcccggccctttggaagctgcattccacggggacatctgcagaccacaggtaagtaa

SEQ ID NO: 681397 - DNA, 610 bp, Homo sapiens
gggaggtagaggttgcagtgagccaagactgtgccactgcactctagcctgggcaacagagcgagactctgtctcaraaaaaaaaaaaaaggaaagaaaagcagcttagaggaaacctaaagtataattccatgattactgaggaccctcctttaaattgtttgaggcactcaaaggaagagtcatagaaaacatgagaagattctatatttaaatgaattgcttagagaagaacaaacaactagaagatacccagaggcaagaaataaggaagccacttttggggtgtccttcattttcgtcttatttacaaagtttttcttctctccattgcatattttcccacccaggggcatcagggagcctgtacccttcctgctaaagtataatatgatacctgttaaggacttaatctgtgactccttttggaaatactaaaataggtagaaaacctaaagtgaggtttttcttctgcttgtcctcaaattgaaggcagccattcccacagagtggggttatcttcactcaccctcccggtaattgacagagagtcttgaatagcatttggctctctctagtagcatttggctgtgtcaggtaatggcaggcc

SEQ ID NO: 681398 - DNA, 547 bp, Homo sapiens
aatgtgctagttctacagaaggcagacttattcatttcacatagctccrtttttatattttttaaatcattttttagaactaaaatatccttggcctaatgaaagtagaagtggggttcttaataaaaatattttggtcagaaaaggaaagaaagcaatgctgggttgattctccccaccttgtaaaacgtgctgccccatggaatttctaggactgagcagactccccagtgcatggctgtggggtggagcctgctgactaaaacgaagtgccagtaaacaatgcaaccaggccaggtgtgggggctcacgcctgtaatcccaacactttgagaggccgaggtgggtggatcgcttgagtccaggagtttgagaccagcctgggcaacacggtgaaaccccgtctctacaaaaactatgaaatttatcaggcgtggaggtgtgtgcctgtagtcccagctaccaagaggctgaggcaggaggatggcttgagccaggaggttgaggctgcagggagccatgatcgtgccactgcactccagcctgg

SEQ ID NO: 681399 - DNA, 547 bp, Homo sapiens
aatgtgctagttctacagaaggcagacttattcatttcacatagctccgtttttatattttttaaatcattttttagaactaaaatatccttggcctaatgaaagtagaagtggggttcttaataaaaatattttggtcagaaaaggaaagaaagcaatgctgggttgattctccccaccttgtaaaacgtgctgccccatggaatttctaggactgagcagactccccagtgcatggctgtggggtggagcctgctgactaaaacgaagtgccagtaaacaatgcaaccaggccaggtgtgggggctcacgcctgtaatcccaacactttgagaggccgaggtgggtggatcgcttgagtccaggagtttgagaccagcctgggcaacacrgtgaaaccccgtctctacaaaaactatgaaatttatcaggcgtggaggtgtgtgcctgtagtcccagctaccaagaggctgaggcaggaggatggcttgagccaggaggttgaggctgcagggagccatgatcgtgccactgcactccagcctgg

SEQ ID NO: 681400 - DNA, 547 bp, Homo sapiens
aatgtgctagttctacagaaggcagacttattcatttcacatagctccgtttttatattttttaaatcattttttagaactaaaatatccttggcctaatgaaagtagaagtggggttcttaataaaaatattttggtcagaaaaggaaagaaagcaatgctgggttgattctccccaccttgtaaaacgtgctgccccatggaatttctaggactgagcagactccccagtgcatggctgtggggtggagcctgctgactaaaacgaagtgccagtaaacaatgcaaccaggccaggtgtgggggctcacgcctgtaatcccaacactttgagaggccgaggtgggtggatcgcttgagtccaggagtttgagaccagcctgggcaacacggtgaaaccccgtctctacaaaaactatgaaatttatcaggcrtggaggtgtgtgcctgtagtcccagctaccaagaggctgaggcaggaggatggcttgagccaggaggttgaggctgcagggagccatgatcgtgccactgcactccagcctgg

SEQ ID NO: 681401 - DNA, 663 bp, Homo sapiens
agggtcttgctctgtcgcccaggctgcagacaatgccacgatcacggctcactgcagcttcaacctcctgggttcaagtgatcctctcacctcatcctctgggtagctgggactataggcacacaccaccacgcccggctaattttttatattttttgtagagacagggttttgccatgttgcccaggctggtcttgaactgctgggttcaagcgatctgttctgctcagcctcccaaagtcctgtgattacaggtgtgagctaccatgcctggcccctttttacagatttgaggatggttttatrtcacctcaatttctgagaacctcaagctatgaacttcgtttaaggtagttccaagtttaaggtagaaccagttccaggttcctaaccccactcccagatacctggcagaatcaaagatgaatctccggaggagggcaccttcttcctaattttcaagggtcaatgagcagtacagtcagaaataacaaagcgtacagggaaacaaaatgtgatgcgagaaacaacagaagcaatgaatagaataaaagaaaaccagactcacaaattctttatgtattatgagtacagagacaaataaaaacctatgcttattgtgttcatagaaataaaagtacccttataaataccttcatggaa

SEQ ID NO: 681402 - DNA, 663 bp, Homo sapiens
agggtcttgctctgtcgcccaggctgcagacaatgccacgatcacggctcactgcagcttcaacctcctgggttcaagtgatcctctcacctcatcctctgggtagctgggactataggcacacaccaccacgcccggctaattttttatattttttgtagagacagggttttgccatgttgcccaggctggtcttgaactgctgggttcaagcgatctgttctgctcagcctcccaaagtcctgtgattacaggtgtgagctaccatgcctggcccctttttacagatttgaggatggttttatgtcacctcaatttctgagaacctcaagctatgaacttcgtttaaggtagttccaagtttaaggtagaaccagttccaggttcctaaccccactcccagatacctggcagaatcaaagatgaatctccggaggagggcaccttcttcctaattttcaagggtcaatgagcagtacagtcagaaataacaaagcgtacagggaaacaaaatgtgatgcgagaaacaacagaagcaatgaatagaataaaagaaaaccagactcacaaattctttrtgtattatgagtacagagacaaataaaaacctatgcttattgtgttcatagaaataaaagtacccttataaataccttcatggaa

SEQ ID NO: 681403 - DNA, 841 bp, Homo sapiens
gttagaaagctcagcttcctaccgctatggtccagatcctcagggagcatcctgaagatgatggtgatggtaacagtgaggaggcagatgatggagatgatgatgataatggcagcacatcagagcagagcaagtatatctttgcaggcagagtgtccttggtttgaacttaactctgccatttactaattgtatggcacttagcaagttcctcaatttagctgagtaaagtcattttgaggattaaatgaattaacctacattaatatgtgctctattctacagcacacaataatacgtgatctagaaatattcaattctgttttcttctctgcctcccccttacccagtccatgatggttctgagtgtataaagagcttccatcttcaatgtagtagtcaggattctttccctgatggkaacccagctgaaacaaatgaaatgacagaaccttttgttcatgtaattgcaagagcaaggctaggcttgatccagcatgcaaatgacatgatcagagcccagttatcctctcctcatttattgactgctttctctgtgatttttcagttctcaggtgggctctactcctctctagctgctccagccaaagtcctagaattttatctaactggtttccattggcctggcttagatcacctgcccatccctgaaccaattgctgtggcctggaggaaatgatggcctgagtggccgagctgggggtcttatattttctctgagctgagggtgagaacagccccatccaatccacatgtactaagagaattgaagaggtagctccccaaggaaaatcagggaactgtgaccagaagaaggtga

SEQ ID NO: 681404 - DNA, 572 bp, Homo sapiens
ctgggcaacagggtaagactctgtctcaaaaacaaaacaaaacaaaaaatgtgtgtgtatggatatatatatatatatgtgtatatrtatgtgtatatgtatgtgtatacatgtgtatatatatgtatatatgtatatatatgtgtatatatgtatatacatatatgtgtatatatgtgtatatatgtgtatatgtatatatttcatatatatgtatatatgtgtgtgtatatatatggatatatacacatatatatatgcaggcagtggcaggctgccaggtctggggaaggagcatgggtttcagaagccccagttcctgcccactgcccacacactggctgtggaagctctgggggtaaggtgttcccttggcctgtctggctttcagctggattctcatttggcctctcatccagggctgcagccaagatctctgatggctcccagtactatgttctgctcatcatcactgatggggtcatctctgacatgacgcagaccaaggaggccatcgtcagcgtgagtctgaggaggagggcttggcagggaggagtaatgtcaatactgtg

SEQ ID NO: 681405 - DNA, 572 bp, Homo sapiens
ctgggcaacagggtaagactctgtctcaaaaacaaaacaaaacaaaaaatgtgtgtgtatggatatatatatatatatgtgtatatatatgtgtatatgtatgtrtatacatgtgtatatatatgtatatatgtatatatatgtgtatatatgtatatacatatatgtgtatatatgtgtatatatgtgtatatgtatatatttcatatatatgtatatatgtgtgtgtatatatatggatatatacacatatatatatgcaggcagtggcaggctgccaggtctggggaaggagcatgggtttcagaagccccagttcctgcccactgcccacacactggctgtggaagctctgggggtaaggtgttcccttggcctgtctggctttcagctggattctcatttggcctctcatccagggctgcagccaagatctctgatggctcccagtactatgttctgctcatcatcactgatggggtcatctctgacatgacgcagaccaaggaggccatcgtcagcgtgagtctgaggaggagggcttggcagggaggagtaatgtcaatactgtg

SEQ ID NO: 681406 - DNA, 572 bp, Homo sapiens
ctgggcaacagggtaagactctgtctcaaaaacaaaacaaaacaaaaaatgtgtgtgtatggatatatatatatatatgtgtatatatatgtgtatatgtatgtgtatacatgtgtatatatrtgtatatatgtatatatatgtgtatatatgtatatacatatatgtgtatatatgtgtatatatgtgtatatgtatatatttcatatatatgtatatatgtgtgtgtatatatatggatatatacacatatatatatgcaggcagtggcaggctgccaggtctggggaaggagcatgggtttcagaagccccagttcctgcccactgcccacacactggctgtggaagctctgggggtaaggtgttcccttggcctgtctggctttcagctggattctcatttggcctctcatccagggctgcagccaagatctctgatggctcccagtactatgttctgctcatcatcactgatggggtcatctctgacatgacgcagaccaaggaggccatcgtcagcgtgagtctgaggaggagggcttggcagggaggagtaatgtcaatactgtg

SEQ ID NO: 681407 - DNA, 572 bp, Homo sapiens
ctgggcaacagggtaagactctgtctcaaaaacaaaacaaaacaaaaaatgtgtgtgtatggatatatatatatatatgtgtatatatatgtgtatatgtatgtgtatacatgtgtatatatatgtatatatgtatatatatgtgtatatatrtatatacatatatgtgtatatatgtgtatatatgtgtatatgtatatatttcatatatatgtatatatgtgtgtgtatatatatggatatatacacatatatatatgcaggcagtggcaggctgccaggtctggggaaggagcatgggtttcagaagccccagttcctgcccactgcccacacactggctgtggaagctctgggggtaaggtgttcccttggcctgtctggctttcagctggattctcatttggcctctcatccagggctgcagccaagatctctgatggctcccagtactatgttctgctcatcatcactgatggggtcatctctgacatgacgcagaccaaggaggccatcgtcagcgtgagtctgaggaggagggcttggcagggaggagtaatgtcaatactgtg

SEQ ID NO: 681408 - DNA, 608 bp, Homo sapiens
ggatgggtgaatttaaaaatgcaaaacccatggatacagaggggtaactgyataggtattttcgttttaacaaaacatcagaatccatcctgtttaccaagaatctctactgagatgtctttttataagcagctctctattatggaatacagctatgattagaattcaaagtctgagggaactttagggagcacaggctattgcaatgtcttcataaagattacatataaacccatgcccccagattagacccacaaacagttaagagcccactgtaacaagcccatacaatacatattagctcattgcccaaaatgcagtatagaaagtggtttcactgaaaaccataaatgttctacaaactactaatgcttctgattccttccttagctgtgtttattaggcacaaagaagctaaatgagaaagtccctgttctttgaatatacacaccaagtctcgggaacctctgcatgcattcctaacttaacagccgtcaaccacatctgctcctcatccagaaaagtagacatcaaacaatctagcatatctgtaaatgcagggacagcaggtaacttgataaaatatgtaacaaatctcagactcacca

SEQ ID NO: 681409 - DNA, 3119 bp, Homo sapiens
tgaggtatgtaataaatactgcaggtttgtaaacagattcctgctcttgagagaacggaagccttacttcatttggtaattctgccgtttggtattttcaagagaagtcatccttaaactacagttagtaaagaaaagagtgagcaagaaaatgtccaatgtctttatgggtaagggaatagttacaagatacatgaagatagctgccacctgcccccatcgccaaatcaggacacaggtcagaacatcaagaaacacagaaaaagcataactcagtgccatttaggaatcatatcaaagcaataaaagcacggatacagaaaaggaatacagagctgtgatattcaacactgtgaaaaatttaacatccaatacacgaaaatgaagcaggcgycattgcacatggtatatcacatagtttatcacatggtaaataatattgctgttcaatgtaatactgaattcactaaacctgaggtccatgcacaataggttgaaaacaagtcacaagaactgtatcagaactgacagttgtgtgacttgccatgaagacaatctggaaagattgctgtaagaatataaggagctcatctgccttacattctcattcaaaacataatgtgcaaaacatgtacttgggattgttaaggactgacagacttgattatgcttaacttttaatttgttgcaggttaaagcaaataccaagggctgtatttcttagcctctttagtaggaaatgagattatgatgtcagttcgataaaattccaacagaccaggcaatgaagtaaatatgttcacaatgaatgccacgtcatcataaagtgatggaattataaccagccctttgcaccttaattgcctatggacttttacgcagtgctctccatatctcacctggacacccataatgacccaagtgataggatgtcaataagttattacggctaacacacaggacaccactcaacaagaactgccctgaaccaactggtttgcaagtaacttgatgaattttcaaaatcacacttagaaaatatgagaacacattctaagcagagttattccccctagctgtccttaaatatgactaattgttgccaagaacatcaatagcattctactcaactgtgctgtcttcttttctaatcactgtccaaaaggccacacagtctgacacagttccttggagaatggcaacaccgtgttgactggataggcccccagagtcttggcagtgagttctccaggaccagaacactccactgctctccacctccaggtccctcaatatctagtcagcataatattgagcttctcagaggctatttggtgatgttaagatcctaggtatttctggccgggtgctgtggctgacgcctgtaatcccagcactttgggaggcaaaggagggaggatctcctgagcacaggagtttgagaccagcctgggcaacgtggcaaaatgctgtttcttaaataaataaataaataaataaataaataaataaataaataaaataaaacaaaattagccagacatggtggaatgtgcctccagtcccagctactcaggaggttgaggtgggaggatcacttgagcctgggaggtcaaggctgcaatgagccgtgatcatgcactgcactccagcctgggcaacaagtaagaccctgtctcaaaaaaaaaaaaaaaagaacctaggcatttctgccgacctagatgaggaaagcgggtctgacaatgtacatttcagaaatatattaatctgggcaagttttcaggatacaagcaaactttaaatctgtaatcgcagtcctattcattctttgggatcttaacatgcagcctaggcaggcaaactgaaacaaaacacgtttctcctttttcactgcagtagcaaacatacctaaagctgccctgctactccacagaaaacttggttcacagtctcttcataaggttgtatatgcattccagctgataataataatgctgccataacacacaggaggtagaggccacacgtgataacaaagaacacaaaggagaaaacagaatctggatactttgtcccagaagccctaataccctgctaaatccaaatgcacagggggctcccacctgtcgtgagggatgcttccctttgaatttcctggtaagctattaagagagaagagtcagaaagaatgggacttgcagatggattccagagcccattctcaccaataacactgagaaaaatgtctaacacctaaatggcccaaatccttccaattcaacgtggaaataccatatttcaatagttgtcaaaagcaaaagctcgaattcattaacttcatttttggaattcaaagcaaactaatactctacacatatccaaataattggaggttagtgtctagggcaagaaaaccagtacacaacatacataaccagagagagttttaacagaggttataatccaagtctaaattgcacccaaaaacaacagatttctaaaattatctttaaatgcccaataaaagaacccgggaaaccactgcttacactgcaatttcgttcacctggctaatttcagtgatactaaaaaccccaagtgatcactcttactcttctcttacacagaacttttgagtataaaccatgtcgatcatttcaaaattacaaccccagttgtttcccttcctcgttggatagaacctcacttggacagcagtagtgttcttatctgcttcctttaatttagtcatttttctctatatcccaaattcaaaaccgttttcttttttaccatgaaatttcaactgtcacagtttgaagcacaaacaaaatacagaactgaaaggcatacagcacaaaattaatcaattcttcttcttgattgcttcactggtgcatttcagacaaaaggcaaactggggatgaaaagtgacattttggagaaacagtcgcttaaattttcaaaaactaaatttatgcattcacccatcctttttttttttactgtgttttttttttttctaaacagtataaggttttacaaattcaaaaattatagcttaagttgggacaaaatacacaaggcaagaataaccttccccacaaacctgacactta

SEQ ID NO: 681410 - DNA, 1413 bp, Homo sapiens
tatttaatgagttttttgagtttttgaatcttgctggtctccataaactaagagagtaagacagtatgtccaaattcaggcaaaaagaggtggagaaagagtgcttcaaagataagattcaaaagagtaaaagctgggaggcaaagagaaatgccaaccaaggtattcttctgcccgctggaaactaagagttttgctctcgtaccttcctcaaacatgagcactattaacctcctccactacatccttagcttccaaatttggagactttaatatacatagaaatgacttttcaacccactgacctgatattttttcagcttcctcaaaaaatccttcagcttagacgtacaacaaatttaattttcagttgagttactcaaaacttactgtctttaattctgaaattattcccctttcacaatgactgactttgcttccacctctcttattccctttgttccactcaacacatgtactgttcttagggcagctgccagtcagtccactgacatttctttcttggtctaccacctctattctggcttcactatttgcccatgcaaccgggaccccagatttgtcactgaagaaactgattcattacgcatggacttcctttcatgttctctgtttgcagctggtcatgggttggtctttcagagaagtgactaaggtaaagaatgggagagactagaaatgagccttcttcttagaaagttttagtgtttcccaattgcctagtgaactaggaaaatccccctcactcttcagttcaaagttctccattccatggtcccattttccctgtccagtgagttcccaactgtgctccaatgaggactaaaggttccgaggagtaacatctgggtttctaggaaggccgaagtggaggctaagcagtcaacactccaggtttcacccagagcagctccacttttatctatcaaataacaataagaaattgcttaataaattatgttgaatacaaaaggcagaacattattcagccattaaaaactacatttcagaaaaatgttcagtgacataggaaaatgttcatgaggcttaacaccatctatagcattatctaaatgtttcaatatgttaaaaagcctagaaaaaaataatctcgaggaaaacacacactggtgtaaaccatggttatatcagaaagacagattgatgggtgtcttttaaaccttcttctgtctgttrgtaatacttttaaagacaacaacaaaaacatgtctatgtaatcttttaaaagattaaaaaatattttctttttaaaaaaattatcttagaaaagactgttccccaaggccctggctctacattttctcttccctaaaccccaggcagtgattgatcaaaccttactcacctttgccagagtcttccagactaaca

SEQ ID NO: 681411 - DNA, 2192 bp, Homo sapiens
ttcccaatcatgagccttaaactgtgccagcctatggggtgtccagaatgagtcctctaaaacttagcaacacaactaccatggttgtatatttccttcaaagatacttgtcagttttgtctttgaagatagttatcaaacacagacttcataggccaagattttagaagtattaatgtaatcttggaaatcaaagaaataatttctctaatagttaagaagggggagttgtggtataaaaaaaatgatgatgacaacaataaatgcagctttggatatctttccatctcagcttaacacaatactcctggactgcaagtttatttccttctttaaggactttgacttctgcatcatatgctttgcatttcccatagcacccggcacagtcttgctcacaatgactgtaaatcattgtggaatggactgcagtatgaatgaatgctaacatttaaaacttcagaggaagaaacaggttgcattggaaaacgggcatgtcattgggcattctatatactaacaagtttaactcccttgtatctgcaatcttcacaggctaccatctaccctacacagagctgtgtgcacaatctctgtaaagctctgtaaagcactctcatttctgcttgttaatcaagaggagctccttatagctcatctcaattcatttaaatatgtcatctttgcaccatctacacaactcctggacatggatactctccaataacttattccctccccagcccatctctccactcatctgcttactgtccctgcacaggataggacaagttctgcttacatgcctttgctaatgttttccttctacttagggaggtcagtcaaaagaactttcgttttaaacaaaacactataacattctaactttaaacaggaaaatgcattcatgcatttcttgagctagcaaatattttttcacatgtgaaatgccttgctcctctcaattatattaaatttggtagattaagagcttgccttaatattaggtatatatatcaagttccctaaccccaagattaaacaagattattttttaaaatagaaaaaaaaaaaagaccytaaaagagaggaaaaggaaaataactgaacagaaatatgtattaaatttaccattttttaaaaccttttctaatggagatcaaatcgttacttactaggaagtcaaagaagataaaaatatcactcaaaaggatgcttttttagcattggagccgaagcctaaaacaaattagtgtcacgaatgaattgacttcatttgttacaattattttacttgaaaagaaatcagataacacatctggaattttaaaatatgtatcttttcctttctttgtgcttttatgtgtggttttcatgaaactgtgaatatagtggatcaaagctgtgtctgatactaatatctgggtcctgccttcctctccccactttttttttctcgctggtaacaacagagacattatgtccctgaccttcaatgtctttttccgtataatggaacaacagaacttactatatgggtttgttgtgtgaataaaataaggcaaatgatgccaagcacctggcattcggcaggtccctgcactagtgttgtttcattttgtttttaatataggaaatgatgcaagccaggacaggaagagcctgacattatggcatcatgggtgacgctagggcaattttagaaaaattaaagtagggtgtattcctaatgattataaaaaatattttacaaagctgtcatatttggaattcatgtgagttcacattcactattcaaagacttgtgacttcctaactttctcaaagacttgaagtttttaatagcgaacgctctcctctatcacttctcttcaccaaaaaggggaatagaaaatagccggcagtaatatttcaggaactaaaggaagagaaacatgaggcagccagtgggagctggggtaagggaactgtcacgactgttaatgcccatctcttgcttgttaaaatgtccaggaggttaaggatgaaaatgcagacttaagaattcctttgaaattcccttggagttcagagaagcaaaacaaaagaaaatctatacaccattatgtcagaaaaggagtatctcccttctctattaagaagatgtgagaaaacacaggttgggttttgtggctgtacagtgaaaggaggaa

SEQ ID NO: 681412 - DNA, 2031 bp, Homo sapiens
attgtatgaaagggaaaaaagcatgattactcccttatgggtgttattctttttgtggttttctttttttgttttgttttgttttgtttttgagatagagtcccgttccattgtccaggctggagtgcaatagtgcgatcatggctcactgcagcctcaacttcctgggctcagttgattcttccacctcagcctcccaagtagctgggactacaggcacacaccaccacacctggctaatttttgtaattagcgcccttataagaagaggaagagaccctaaagtgctgtctttctctgccatgtgaggacacagtgagaaggtagctgtctgtaagccaggaggagggccctcaccagaacctgaccatgctgacaacctgatcttgtgcttccaaactccagaactatgagaaaataaatgtcagttgtttaagccatccagtttataatatattgtgatagcagcctgagctaagacattatgtatacctaattttgtattcatgattttctattgttttccttaaatatgggtcctcaaattgtatgagattcaggaccccaaatcctggctccaattctggaaataggaatgattattgtcatcatattagggaagcaaaatggaggttcaggcagttacctcaaatcacagagcttacagagttcaaactcagatcygtaattccaaagtcagtttaaagatcaatatgactgtctcctttaaggggtttgggttccttatttctaaatcctgtctttatgaggaatgtagtttgtacctgcagagcatttgcatgatcagtttcaaatttcaacttaaatttatatacaagtgtaaattccttaataaaaatattaagtaataagtattggtgagaaaggaatataaattattctatcataaagacacatgcatgcatatgttcattgcaccgctattcacaatagcaaagacatggaatcaacctaaatgctcatcaatggcaggttggataaagaaaatgtggtacatatacaccatggaatactatgcagccataaaaaaggtcatgtcctttgcaggaacatggatggagctggaggccattatccttagcaaactaatgcaggaagagaaaaccaaatacagcatgttctcacttataagtgggagctaaataacaagaacacatgaatacaaagagggggaacaacagacactggggtctacttgagggtggagggtgggaggagggagagaatcagaaaaaacaactattgggtactaggcttagtacctgcgtgatgaaataatctgtacagaaaacccctgtgacatgagtttacctatataacaaacctgaacatggaaccctgaacctaaaataaaagtttaaaaacaaaacaaaaaaacctccaggtattgatgagggtgtggagaaatttgaactctcatatactgctggttagaaatatacggtgcaggtgccaaagccctcatcgactatgagaactcaaacgaagctctggataaggcctggttaaagagcaaagatgtcaagttggctgaggtacaccagcaggagtgctgccagaaatttgaacaactttccaaatctgcaaaagaagagctgataaatttcaaacggaagagagtggcagcatttagaaagaatctaattgaaatgtctgaactggaaataaaacatgccaggaacaatgtctcccttttgcagagctgtattgacttgttcaagaataactgataggccttcactcagaagaaaagaaatgaatgtgaaagaaagccaaacatcacttgcacttaaatcattgccatggaagatttattagcttcaactttagtttaaaattatgtgaataaatattttgatttctacaaaaaaaaaaaaaaaagaaggaagaaagaaatatatggtgcaggtgttttggaaacagtctggcagttcctcaaaaagctaaacataaaattaccatatgaccccacaatatatacccactgtacatctgagaaaattggaatca

SEQ ID NO: 681413 - DNA, 2031 bp, Homo sapiens
attgtatgaaagggaaaaaagcatgattactcccttatgggtgttattctttttgtggttttctttttttgttttgttttgttttgtttttgagatagagtcccgttccattgtccaggctggagtgcaatagtgcgatcatggctcactgcagcctcaacttcctgggctcagttgattcttccacctcagcctcccaagtagctgggactacaggcacacaccaccacacctggctaatttttgtaattagcgcccttataagaagaggaagagaccctaaagtgctgtctttctctgccatgtgaggacacagtgagaaggtagctgtctgtaagccaggaggagggccctcaccagaacctgaccatgctgacaacctgatcttgtgcttccaaactccagaactatgagaaaataaatgtcagttgtttaagccatccagtttataatatattgtgatagcagcctgagctaagacattatgtatacctaattttgtattcatgattttctattgttttccttaaatatgggtcctcaaattgtatgagattcaggaccccaaatcctggctccaattctggaaataggaatgattattgtcatcatattagggaagcaaaatggaggttcaggcagttacctcaaatcacagagcttacagagttcaaactcagatccgtaattccaaagtcagtttaaagatcaatatgactgtctcctttaaggggtttgggttccttatttctaaatcctgtctttatgaggaatgtagtttgtacctgcagagcatttgcatgatcagtttcaaatttcaacttaaatttatatacaagtgtaaattccttaataaaaatattaagtaataagtattggtgagaaaggaatataaattattctatcataaagacacatgcatgcatatgttcattgcaccgctattcacaatagcaaagacatggaatcaacctaaatgctcatcaatggcaggttggataaagaaaatgtggtacatatacaccatggaatactatgcagccataaaaaaggtcatgtcctttgcaggaacatggatggagctggaggccattatccttagcaaactaatgcaggaagagaaaaccaaatacagcatgttctcacttataagtgggagctaaataacaagaacacatgaatacaaagagggggaacaacagacactggggtctacttgagggtggagggtgggaggagggagagaatcagaaaaaacaactattgggtactaggcttagtacctgcgtgatgaaataatctgtacagaaaacccctgtgacatgagtttacctatataacaaacctgaacatggaaccctgaacctaaaataaaagtttaaaaacaaaacaaaaaaacctccaggtattgatgagggtgtggagaaatttgaactctcatatactgctggttagaaatatacggtgcaggtgccaaagccctcatcgactatgagaactcaaacgaagctctggataaggcctggttaaagagcaaagatgtcaagttggctgaggtacaccagcaggagtgctgccagaaatttgaacaactttccaaatctgcaaaagaagagctgataaatttcaaacggaagagagtggcagcatttagaaagaatctaattgaaatgtctgaactggaaataaaacatgccaggaacaatgtctcccttttgcagagctgtattgacttgttcaagaataactgataggccttcactcagaagaaaagaaatgaatgtgaaagaaagccaaacatcayttgcacttaaatcattgccatggaagatttattagcttcaactttagtttaaaattatgtgaataaatattttgatttctacaaaaaaaaaaaaaaaagaaggaagaaagaaatatatggtgcaggtgttttggaaacagtctggcagttcctcaaaaagctaaacataaaattaccatatgaccccacaatatatacccactgtacatctgagaaaattggaatca

SEQ ID NO: 681414 - DNA, 640 bp, Homo sapiens
tgggtttgtttccttgtctataaaaagaagatattgctactgagcaaaagcgcttgctgccagatgtgctagaagccagtactatgatgccagttttttgagaaaacaaaagctttttattgcagggtgagcaacaaagaaacaggagtctagcttggatctatctccctgtgataactttaaggtagtaattttattagaaaaggtttaggccagrcgcagtggctcatacctgtaatcccagcactttgggaggccgaggtgggtggatcacgaagtcaggagattgagaccaccctggccaacatggtgaaaccccgtctctactagaaatacaaaaattagctgggtgtggtggtgcgtggctgtaatcccagctactcaggaggctggggcaggataatcacttgaacctaggaggcagaggttgcagtgagccaagatcgtgccactgcattccagcctggtgacagagtgagactccatctcaaaaaaagaaaagaaaagaaaagaaaagaaaaggtttaggggtgcatttggagattcataggtgattggtggaaggaaagggtagaggtcaagaaagtcctcaggcatgcacagttatctcttcatgctacctcatggatcatatatgcaa

SEQ ID NO: 681415 - DNA, 689 bp, Homo sapiens
ttacaatcatggcagaaggtgaacgggcagcaggcacggccgacgtggccagagcggaggaagagagagagtggggggcggtgctacacacttttaaacaatcagatctcatgagaactccatcatgagaacagcaccaaagggatggtgctaaaccattcatgaaagacccacccccacgatccaatcatctcccaccaggacctacctccaacactggggattacgattcaacatgagatttgggtgagaacacagatccaaatcatatcagatattatgcaaatacaagtacatgcagtaatattttttaaaatgcaagttctaaagcaaatacaagtacaggcagtaatattttttctctttttatgtaaatggtaccatactaaatatggaggggaaagtattgaagttcttctgtgatcagaattgcaatttggragaaaatgcactgtttggtactaaatataatcagataaaggactaaagtgtgtgtatttgtcatagataagctccttgaggaaaaggttctgggtctctgaggcatgtgtgtgaattgttctagccacttggtcttgtagtgcctcttccttggttgatgttctctggtggataacatgtcttgactactccagtctttctgtctacaaacctcttcctcagattttctttttcccagtgttccagtc

SEQ ID NO: 681416 - DNA, 653 bp, Homo sapiens
ctgtctccattaaaaaaaaatttgctaggcatggtggtgcgtgcctgcagtcccagctactcgggaggctgaggtgggaggattccttgagcccaggaggttgaggctgctgtgagctatgatygcataggcagtccaaaccgccttattcctttcaccttcaatagattcatcagcaccctctcccctctcacatataaggccatgtggaagttctcataggaccagctacaggaggagggaaaagactgaacttggtttatagatgaggtgggtctgtatgtagatgcaaactgaaaattggtgaggtggctttgaaagacagtggagagggagaatcttcccaatgggaagcagtgtacctggtcatctactttgcaaggaagaagtggcctgggtaagcatatttacagttcctgggcagtgatcgatggtctggctatctggccagaagcctgggaggaaaaggactggaagacagggtcgaagaggcctggggtagaagcttgtgggtgcacatatgggagcaggcacagactgtgaaaacttttttttttttttgagatggagtcttactctgtaacccaggctggagtgcagtggtgcaatcttgattcaccgcaacctctgcctcttggattcaagcgattctc

SEQ ID NO: 681417 - DNA, 607 bp, Homo sapiens
tactcattttagactttttccttttaagtaagttggaaaaacaggacctctgtcccattattaaaaagtggtgatagtatttcaactatgaactgagaaatggagaaaaagtccccaaatagtcacctgaattctccaaactcctctcattggaatgattgctacaagttatcacattaccatgtctccaaaaggcttctagtaaatatgcatgtttctttcttagcaaagaagtgatgataacacaatgggagtyatgaacacctaagcttatgtgcaagatcccaaagggaaggagctataagggagttgtggaaggagaaaaagcttaatctaaaatcttatttagaaatgattcttctcaaacccctgcttactactactggaaaataacaccaccaagactgagaacatttcagtagaggagacaccacggaagccgtacactgattttcaacactaatcattagatcacagataactagcctgcttcattaatttgcataaacattcagagggtgccactgacacacactcacagatatttaaggaaggccttaactgagccaggttctaggctgagcgcaccactagttaaatgtatggg

SEQ ID NO: 681418 - DNA, 1167 bp, Homo sapiens
agacaggtcatgggaagatgaacaatgtgcaaaaggctctgagaaaatagcaccttagggtagagtcaacagatgaaggtgacaaaagactggcagaatgattgtaccatgtaaaaatacctttggtgagtctcaggaataacgggaaaaccatgtttgatggagggctcaagtccatcaaactcaacaatttgttcaagactttcctggtttgaggactgagagccctgcatatcagggaaacttagttctaaaaacagagggatggttggtccttgtaccttctgcagatgttgtgacttacttattctgggctaggaaaacaagaactgaggattactgatatatgcagatacagctagatgagtggtgttggggctggattgtggaggcccttgaatttcaggcaaaggagtctgtgcattgtttgagaggattcagtgctattaaagagcactaggttattgaatggccaactcaggaatggtagattagagggaagtaggaagagaggccgtttgatcattacacattctatgcatgtaaaaataatgacatataccccataaatgtgtacatatattatatatcaataaaaaaaaagaatcaggcagttaaagtgggcttagataagagtggttgtgggaatgtgaatgtcttccaaagggatgagtttcactgatcaccttgtataaagagtagaacaaacagtatagattatcttttcccctttttgtttacaaaatgaaaaagacctgggtcaggtaatcattattatataatgttctctaacttcaggttatgtgacaggtagaccatcttagagacatagaggaaggcttctatgacctttcatggcctgcccttgcattgtatgccataaaagtgtacaaaaatcacattycctattatgaatttcctttgcccttggaaggcaaagatttgctttgtatgtgcacatttgtggttgactggtaaaaatatttgcaggagggtcactaggctgtgtagagcataagggaacaggatatttggaatatattttagagccagaaaatatactcatagattcagaaatacacagcacagtgttctccactcacacacaagtatatacactcacacgttcttacacatcgtcatccacacacacatgcacatgcttag

SEQ ID NO: 681419 - DNA, 1495 bp, Homo sapiens
ttgggtttaaatttgtggcttttatgtattaagatctctccaaaatattaagatttgtttccagtcataaaccagctttttttttttttttcagcaaagcttccctttccaagcctgagagagatagctaaagggtagaactcagaagtggttcgttttctgctatttattattcaggaatgcttgttaaaatagtaacctttcctattaatgaaaagagttgatacaagggsaacaagtggcaaaaattgctcttgttcagctgtagaaggtagcatcttagtaacccagagggttaattcatcaagaggatattcagaatggtttgtatacacagatgcattttgcaaaaggcagaaatagatctgtcgtttccttctattttctccaagactccagtggcatttgaggaaagcaggagaaactaatttaatgttttatttaaatatttcggtatttttatttgctcaaagcaaaatatctcattcaatatcttattcaataaaggcatgtcaggccctagaactgatgatagccaggtgaaaagtttgtctggataggtaataaggctcaaagtcctgattttcctgctgcagattcaaaagactaataggagaaaagaacaggggttagaatccataataacattcagttcttcccttgtactgacatctctgggttacagagctctttgaaaaggagttctcactttacaggggttttttggtttgcatctaaagaagttgagactaagggctgggcaaagtcttagtcttgaagaggctgacttcagattatgcacaaacacacactttagagtagagaccagataggtttgcaagtgaaatattctctggctttattcaaaaagtaattttcatgagatgctgtgcttacttatacaggaagcagaatctttttttgttcagcaaaatactttggtttgttggtttcagatgacccaacagaaacttgcttacaggaattaggggaaacaatcaggtgattattcggctcttatgtacattgaggtcaacaaagtgtggtctaatagcctaataacagtttgctcctgagcatgactatccaaggacaatgttagagaggcagtattgcattacaggtatagggtataggaaggaatagaaacaagagatcaagagttgaaaagattagaacacttggtgaatatcgtacaatgcagcatgatcctaaattatttgggacataattaaataacaaagttaaggtgccatacatttattcttattgtgtgctggtcaccctatatacagatagtctgatggatttaaaagcagagagacaggttagaaatagataggaaagaaagctgaaaaagaagtttctaccagttttctgcagaaacaagtctaaaatctagagtgttatcagaattttactctagctacttctgccaagtagctagagctactttaacttcttaccttcctgtgctttattccccagccaaaat

SEQ ID NO: 681420 - DNA, 1646 bp, Homo sapiens
ttccaattctgaggcactctgaactcttccataaaaagtggctattttcatggcctcttcgcaaagtgtaattctgtcttctctttcaagtaatattaatraaactagtttttaaaatttctttgacaaacattgttgctaaagccaaacaaatgatcaacaagctttcacaagcccttgctaatgtgacataactctgaggcatttacacaggttatgaaacttgtcctagtacattggcctcagaagacaggcataaagcactctttgtgaactgcttagctttgtaaggtctatctggcacctgaacaagcaacattttgcaaaacatcaggctctgcatgaaaattcagattcccacactgagagtccattgagagatctcccactcattagcatgctacaaggccgctgaaagatcaggaagatgtcaaaagggcaaaccttcacataaacagaactcagagaaacaaactgaacttaacttggcatcagccaactgtaagtatgaaaaaaaaatgtgtttattgggatgagaagaaggaaaattcactaatttgtctacatgcaactaagtgatatttttccttggtaaaattaattgcaaaggcagccagatgcagtggctcctgcctgcaatcccagcactttgggaggccaaggtggacagatgacttgagctcaggagttcgagaccagtctgagcaacatggcagaactccatctctacaaaaaaatacaaaaatcagccagaggtggtggtacacatctgtggtcccagctacttgggagtctgagccagaaggtttgcttgagccccagaggtcgaggctgcagtgaactgggatcatgccactgaattccagcctaggcaacagactgagattctgtctcaaaaaataaaaataaaaataatctcaaaggcattagacctaaagcgattgtctattaaattatctcttgtggaaagtaacatttccctcaatatccacctttattcaaattgtcctatgccttaaaataattggtaccccctctcctctctttgcaagaactagttgtcccttttttcccttaattcttttgtggttgctgaagagttttatttagccttcaatgacttcaggcagtataatgagccaaggaattccaatgataatgaatgcaggttgtctggcagctcctgggcagccagggttgtccctgggaaaagatgccttctgagctggatgatggttcccttaactgagtaaacagtcaggaagagggccttgcagtcctaagtcaggacccagatcccctttcattaaagtcctgctaaaaatcatcctgggaaaatagagagtcatacaaaaaataaacatgaggaaattataagccagccagatactgatttcggttgacatcacttccatggatcacttcatccatccattcatttattgatccatttattcaacaactattcacagaaagccaacaagggacgaggactggtaggtactggggtatggtgctaaacaaaacagtctttgctccattcgagctgtattctagtggggagacagccagtaaacagtaaaatgtaacttgtagactgaactgtgtccccctccaaattcatacagcgaagccctaaatgcaac

SEQ ID NO: 681421 - DNA, 787 bp, Homo sapiens
tggggatgtgtttggggattagagtaattagcaccatcaggaagtgttgggattcattggcacagggcagtcacttagtttggggatctcttagcttttatacctcatttgtcttgcaactaaaagactttataactcacaaatattccccatacagttataattgataaatccataaatttaagattaatttacaacaaacaatccaggtagataaaatacatcctgataatcagtgcctagataccagctataataatccagttatcttccagctagtacatttcatcagctgaaatttacaaggaattctggttagagycaaatactgccctgggtgtttcaaggaggaagaaacaaggtactaatctgttataagctctcattcccaacagggtacattgaaagaggggagaacataggcagtttggggagacttgaacaggagcttccaggggcctaagaaggttccatgcctggtagtcaccaagccgccaggtcctgctggaggtggtggccaagtgtggggaggggatgtgtagatgtatatgagaagcacttaccttgcagcagggtagattgtttgtttttcctctgccatgaaatttcacacaaaatcaaatggaataaagttattgtaattgaggatagctctatgtccacagggggcccactactgtcccaggaacacagccacacaatttcccgtgaaataagaagagttaaactgagctttacagtttacaggtatccttcaaaataattagcctgtaatcatatggattta

SEQ ID NO: 681422 - DNA, 2657 bp, Homo sapiens
cacattgaattctttttttttttctttttttgagataagatgtaattctgtcacccaggctggagtacagtggcacagtctcagctcactgcaacatcaacctcccaggtagctgggaccacaggtgcaggccaccacacctggctaatttttgtgtgtgtgtactttttgtagagatggagttttgccatgttacccaggctggtcataaactcctgggctcaagcaatctgcctgactcagcctcccaaagtgctgggattacaggcgtgagccactgcacccaacatgtttcttttttctttttttaaagtcttcttcactctgtcatatctagaagttctgaccttatgggctgttttggagatgctctgaattcaatatatttcataatcacataaaatgagattattgagattaaaactgatattggcacccctcctgaggaaatctcaactgcacaacccctactatgccccaattcagcaggaagcagttagagcggtcatcggcaaacctccccaacagcacttgggttttcctgttgagagcggggactgagagacaggactagctggatttcctaggccgactaagaatccctaagcctagctgggaaggtgaccgcatctacctttaaacacggggcttgcaacttagctcacacccaaccgatcagagagctcactaaaatactaattaggcaaaaacaggaggtaaagaaatagccaatcatctattgcctgagagcacagcgggagggacaatgatcaggacataaacccaggcattcgagccagcaacagcaacccactttgggtcccctccctttgtatggaagctctgttttcactctatttcactctattaaatcttgcaactgaagaaaaaaagactgatattgggacttagcgggggaacccacccctgataattcaatgttatttcaatgttatttcacatgggttcttttctatttccgtaagtgtcagccggtctaagaaataaagggaaagactacaaaagagagaaattttaaagctggctgtccaggggagacatcacatgtcggcaggttctgagatgccccccaagccgcaaaaccagcatctggaatccagtaaatatttacattattaattaaataataaattaatgagtgttttaattagtggctgagtgagcggttgagtgagagaacaggagaatctagagatagaaatattttcaagaaaggggagggagttttgaggatgtgccagtccctcattttgcctctgccttctgccacaagagaagctgattgcaaaggtgataggagaaaagagtacttattagactagagctgatgacatgctggcaatgagaatgcatcaagatagaaagattttgatcacaggaactgtgagacaggattctttcattaaaaacttttcacttgacagtggcaattttaatcacaaagtttgctgacctgaggatacctttaagagctctttcgtatgcatgtattttcctcccagtgtgtagcacttgacttttaaacccctttactttaagaaaagaagctctaatacactggagccattaaatactggctttttcctgtaactgaagtttttcattcaaaccctaaagaagaattattaaagttttagaatttaaaattcaagtaaattgctaagcttattttcttcacttgagcctctgattccattaggtagattgctatgtaaggggaatggttgtgaagtatgattggaaaagggggtataatttaatgatagtgaactggggggaacttagcaaggccagcttgttcagattctcctttgtgtttctgtgtctccagcatggaggaggttccttttctctgggtatagggtgagggcctctcacatgtgaatcttttgatctactgaaggagaagatcagaaattattttctaggttttatggcctgcttcaggggagaagggcagggagtcatgctccttctgtggttttctcaaatgccaaggagtcacattttagggtagcatgtcttgagccccatctgaaagaaattggaaagaatgcttcaaaaattgataaggatgatcaatgaggctttttactttctattaggagcaaaagagtggtcagatttccagggtggatccttcaggcagtgtagaaaacttgcctatcaatgtgcaattgtctttttaataaagaaaaatgagcaataagtgattaaagggcyacaaaaatagatatggggatctgagaccataggtgagtggggagattttagagagcccccagctgccttgaaatatttcaagtttcttaggacatagtaagagaattggcaaatcagagagctaaacagttgccaaagatatctgaaactttcatgaaatagaagagagaggatgagtaacattttgtggacatctttgagataagctccagatatcagttgaaagaccgaatgccatctaggtgttcaaaatggaggaacaagtacatgatgcaaagtatttcttagagtttgatatttacttagggttctgtacgttgttaaagacatggtttgtgagcacccagaaagtaaagctgcaatcacagggagccactgcaggaccactgatgacaagcgacaacattaaatta

SEQ ID NO: 681423 - DNA, 1222 bp, Homo sapiens
gatgctttgatttgatttgcatattccttaaaatatttatactcattatattgaagacattctattttattctgtattttaaatttacacaaattacaatataagtttatcctgaaaccattgtctttacctttggtggaagcaacaaagttttggcttgtcttaaaataatattctatctggataagtgtggtattttctgtactctgtaccttttcaaaatattgaacattgtttgccaaacagcataattggtggaattatgaaaagaaacaggataagcatgatgttctcctttttcccttttttgagagatttaaactatagccataagttgagctatagattagratttaagtgtgagagtgcccagtgaaataaaatagatgcctaagaaaacagataaaatgaataaataaataatattttatttatactgagtatattctaagtatgggattttagccttatactgactgtgtccaatacagttaaaagcacgattaaactttggaaaattcatcagagtaaattatcattataaacagccctatagtgtcttctagctcactgcttgaaataggccagttgttaccaaactgattaatctacagtttattaacataatttcttcaaaaaatacccccaatgagttctgacttaacattgtaccctcaagttttattgaggctttgatataaaaaataaatatatagaaaaacctccaccatctaccactaagtgattgtgatgatgcttatctactatatacacaagctcagagtaaaattcttgtagaatttgagctagggaaaaaattatcttcttataaactgatatgtgatgtttatacattcaatgtaactaaaacatttacgtcttcttgttttggatttatcatttgcaagcaatagaaaccaaatctggcccacttaagcaaatgcaatgtttaacttaaaataacaacagaaagactggctctttaaagacatgaatttatttgggaataagtagaggattataatctggaatatatgtatgttatgacaaatcataggcatatttgaagaggttgagtgaggaagacttttaaaaggcaaaaacagaggcctgtgtaagttttgaaacaaaacattattggtaccaggggtctgttgtagaagttgatgttaactcattggtggaaacagttgttaagcaaatgtttttgcgaggacagctt

SEQ ID NO: 681424 - DNA, 1222 bp, Homo sapiens
gatgctttgatttgatttgcatattccttaaaatatttatactcattatattgaagacattctattttattctgtattttaaatttacacaaattacaatataagtttatcctgaaaccattgtctttacctttggtggaagcaacaaagttttggcttgtcttaaaataatattctatctggataagtgtggtattttctgtactctgtaccttttcaaaatattgaacattgtttgccaaacagcataattggtggaattatgaaaagaaacaggataagcatgatgttctcctttttcccttttttgagagatttaaactatagccataagttgagctatagattaggatttaagtgtgagagtgcccagtgaaataaaatagatgcctaagaaaacagataaaatgaataaataaataatattttatttatactgagtatattctaagtatgggattttagccttatactgactgtgtccaatacagttaaaagcacgattaaactttggaaaattcatcagagtaaattatcattataaacagccctatagtgtcttctagctcactgcttgaaataggccagttgttaccaaactgattaatctacagtttattaacataatttcttcaaaaaatacccccaatkagttctgacttaacattgtaccctcaagttttattgaggctttgatataaaaaataaatatatagaaaaacctccaccatctaccactaagtgattgtgatgatgcttatctactatatacacaagctcagagtaaaattcttgtagaatttgagctagggaaaaaattatcttcttataaactgatatgtgatgtttatacattcaatgtaactaaaacatttacgtcttcttgttttggatttatcatttgcaagcaatagaaaccaaatctggcccacttaagcaaatgcaatgtttaacttaaaataacaacagaaagactggctctttaaagacatgaatttatttgggaataagtagaggattataatctggaatatatgtatgttatgacaaatcataggcatatttgaagaggttgagtgaggaagacttttaaaaggcaaaaacagaggcctgtgtaagttttgaaacaaaacattattggtaccaggggtctgttgtagaagttgatgttaactcattggtggaaacagttgttaagcaaatgtttttgcgaggacagctt

SEQ ID NO: 681425 - DNA, 1062 bp, Homo sapiens
cagagtctgttccttaatcaggaaaaaagaacattaattttctaaagataatagttttattttagaaacataaaaaatattcaaaatctaattcacagccaaaaaaaatgctacatttctgtaccataaatataataggataaaaaacaccagccaataatatggttttgtctagttgaggggacagatctaggcaaaaggtaacataattaacaaacttctgtgcccactcttctgcttctgaagcagccagaaacctgcccgtggtacacagggcctatcccaacttccacagcccrgtcaccccatctaatcaatgacacatatttctgaagagccacttcctcctccctgctgtccagggaaattcctattatctcagctagttgtttgaaggatataatctgattaacttcatgttaacaagtgaatgaaggaaagactgcttgagcaggcacctacacaggagtatgcttgttaaaactaaagaatctgtaaaggctcaaatttcagcctgagtgataatgtgaaagggaataatttctggtagtgtacaaagataattttgattagaggaatctccttgttgaaactgaaagtcatgctgaacaacatggacagcctttccctgcctatgtgagatccagcataatgccaacttcacagcaatatgtcactgtaaaggcagcagagctgagcaggaagacaaagggctctggaatcatgcacatctggattcacaccccacactgccccttgctagagctatacatttttggcaagttgctgctattattttttgacctctcaaatatctatcctcacatgtctaacaggaatgttatgggaattaaataaaatagctatacaaagtgcttggcacatagtaggggcttaagaatacaatcattattacttatgtgatttctttcagtctttatacaacatttaataaactgggatttccccagagtcttccgtaaagcaattgttgatggaatggctaaggacagtccaactactggccaatacggaagattatatctcttattgtattgtgtc

SEQ ID NO: 681426 - DNA, 1062 bp, Homo sapiens
cagagtctgttccttaatcaggaaaaaagaacattaattttctaaagataatagttttattttagaaacataaaaaatattcaaaatctaattcacagccaaaaaaaatgctacatttctgtaccataaatataataggataaaaaacaccagccaataatatggttttgtctagttgaggggacagatctaggcaaaaggtaacataattaacaaacttctgtgcccactcttctgcttctgaagcagccagaaacctgcccgtggtacacagggcctatcccaacttccacagcccagtcaccccatctaatcaatgrcacatatttctgaagagccacttcctcctccctgctgtccagggaaattcctattatctcagctagttgtttgaaggatataatctgattaacttcatgttaacaagtgaatgaaggaaagactgcttgagcaggcacctacacaggagtatgcttgttaaaactaaagaatctgtaaaggctcaaatttcagcctgagtgataatgtgaaagggaataatttctggtagtgtacaaagataattttgattagaggaatctccttgttgaaactgaaagtcatgctgaacaacatggacagcctttccctgcctatgtgagatccagcataatgccaacttcacagcaatatgtcactgtaaaggcagcagagctgagcaggaagacaaagggctctggaatcatgcacatctggattcacaccccacactgccccttgctagagctatacatttttggcaagttgctgctattattttttgacctctcaaatatctatcctcacatgtctaacaggaatgttatgggaattaaataaaatagctatacaaagtgcttggcacatagtaggggcttaagaatacaatcattattacttatgtgatttctttcagtctttatacaacatttaataaactgggatttccccagagtcttccgtaaagcaattgttgatggaatggctaaggacagtccaactactggccaatacggaagattatatctcttattgtattgtgtc

SEQ ID NO: 681427 - DNA, 1062 bp, Homo sapiens
cagagtctgttccttaatcaggaaaaaagaacattaattttctaaagataatagttttattttagaaacataaaaaatattcaaaatctaattcacagccaaaaaaaatgctacatttctgtaccataaatataataggataaaaaacaccagccaataatatggttttgtctagttgaggggacagatctaggcaaaaggtaacataattaacaaacttctgtgcccactcttctgcttctgaagcagccagaaacctgcccgtggtacacagggcctatcccaacttccacagcccagtcaccccatctaatcaatgacacatatttctgaagagccacttcctcctccctgctgtccagggaaattcctatkatctcagctagttgtttgaaggatataatctgattaacttcatgttaacaagtgaatgaaggaaagactgcttgagcaggcacctacacaggagtatgcttgttaaaactaaagaatctgtaaaggctcaaatttcagcctgagtgataatgtgaaagggaataatttctggtagtgtacaaagataattttgattagaggaatctccttgttgaaactgaaagtcatgctgaacaacatggacagcctttccctgcctatgtgagatccagcataatgccaacttcacagcaatatgtcactgtaaaggcagcagagctgagcaggaagacaaagggctctggaatcatgcacatctggattcacaccccacactgccccttgctagagctatacatttttggcaagttgctgctattattttttgacctctcaaatatctatcctcacatgtctaacaggaatgttatgggaattaaataaaatagctatacaaagtgcttggcacatagtaggggcttaagaatacaatcattattacttatgtgatttctttcagtctttatacaacatttaataaactgggatttccccagagtcttccgtaaagcaattgttgatggaatggctaaggacagtccaactactggccaatacggaagattatatctcttattgtattgtgtc

SEQ ID NO: 681428 - DNA, 1062 bp, Homo sapiens
cagagtctgttccttaatcaggaaaaaagaacattaattttctaaagataatagttttattttagaaacataaaaaatattcaaaatctaattcacagccaaaaaaaatgctacatttctgtaccataaatataataggataaaaaacaccagccaataatatggttttgtctagttgaggggacagatctaggcaaaaggtaacataattaacaaacttctgtgcccactcttctgcttctgaagcagccagaaacctgcccgtggtacacagggcctatcccaacttccacagcccagtcaccccatctaatcaatgacacatatttctgaagagccacttcctcctccctgctgtccagggaaattcctattatctcagctagttgtttgaaggatataatctgattaacttcatgttaacamgtgaatgaaggaaagactgcttgagcaggcacctacacaggagtatgcttgttaaaactaaagaatctgtaaaggctcaaatttcagcctgagtgataatgtgaaagggaataatttctggtagtgtacaaagataattttgattagaggaatctccttgttgaaactgaaagtcatgctgaacaacatggacagcctttccctgcctatgtgagatccagcataatgccaacttcacagcaatatgtcactgtaaaggcagcagagctgagcaggaagacaaagggctctggaatcatgcacatctggattcacaccccacactgccccttgctagagctatacatttttggcaagttgctgctattattttttgacctctcaaatatctatcctcacatgtctaacaggaatgttatgggaattaaataaaatagctatacaaagtgcttggcacatagtaggggcttaagaatacaatcattattacttatgtgatttctttcagtctttatacaacatttaataaactgggatttccccagagtcttccgtaaagcaattgttgatggaatggctaaggacagtccaactactggccaatacggaagattatatctcttattgtattgtgtc

SEQ ID NO: 681429 - DNA, 625 bp, Homo sapiens
ttactttatgtttctatagctaagaggaaaattatttataacaaataatcaaatgcatcccaaagttcaataragattttatacaacagggataaactatgaactagctcaatccaatttatcaaattaattagacttaattaaattagacggtattccctaaaatgtataatgtgtcactttttaaatctgaaagtcttctgatgatcagaatactttatttttctataaataaaatccacatctattgtgggttcagtcctagactgctgcaataaagcagatattgcaataaagcaagtcccatgaattttttggtttcccagtgcatataaaagttatgtttacaatatacagtagcctattaagtgtgcaatagcattatgtctgaaaaaaaccaatgtacatactttaattaaaaaatattttatttctaaatgctaatgatcatctgagccttcaacgagtcataatctttttgctggtggtgggtcttgccttgatgttgatggcttctgactgatcagggtggtggttgctgaagactggggtggctgtggcaatttcttaaaataagacaacaatgaagtttgctacatcagtcaggattcttcctttcttgaaa

SEQ ID NO: 681430 - DNA, 2508 bp, Homo sapiens
tgcattatagttggccatcatgtctatgggtataaatttattctaatcatgttgaaaatatcaatatttcaaaactgtcttgaaccttattaaaatgttttaaaatgtagatttcattattattcaattgtgaatattattcatacttatattatgattcaattgtatataatttaattatggtgaggccaacagatcaggagacaactgccagactgccattgtaaagatagctattgctcacagctcctggtggagggggcatgccacaccattcacggccacatgggagagcactagggcaagtcaggaggcagaattggtgaggggaatagtgggcgaggacctttatcctggtttccctggtggggtgggctaagcaggcttaggattggctagtttgaataattccagtgagctctggggtggagggactgcgtctggttgtctagtatttggccctggggtgattagggcaggggaatattggcctgagtctgagggccctatgacagatgctaaaggaggtggctgggtgtgggctctggggtcgttgcttggcatctgaaaggtgcacttgcaggtgagtcctttactatctctagaaattggctggcctgattcaggcagtctgtctagagtcagcaaggtcctagatgtcaaagcatcagaataaaaagacacacttaatacaagtgcggaaactgctgcccaacatatagaacaatcagaataggaacggctaacacgcccagaacatgtgatttgtgcctggcctcgtgccatgtgctgtgcacctgtgaacccagttcattccccacgaccctcggagttgtgctgttttaacttgcccagcagtattctgctggtaagtttctaaattagaaatttagaaatttctagacagtctgtctctcaagaaccaaaaggaaacagatcttttttttttgagaccaagtctggttctgtcacccaggctggagtgtagtggtgtgatcttggctcactgcaacctctgcctcccgggttcaagcaattctcctgcctcagcctcccaagtagctgggactacaggtgtgtgccaccacgtctggctaattttttgtatttttagtagagacgtggtttcaccatgttggccaggctggtctcgaactcctgacctcaggtgatctgcccgccttggcctcccaaagtgctgggattacaggcgtgagccactgtgcccggccaggaaacatttttaatgcaggtggcatggggcggttcaaagaacatagcatcatagagaggatgagcttagcgagaaggtgagtgcagagtggactatgcattcatccgaatggagagaagaatgaaagaatatgtttctaatgaatgaaatgtatgtacacacaaaatttcattaagctaaaagaagtgtatactcttaatgatactccattctgatgtttgttctccatttgtccaaatgaactcaaattaattgccttacattaaaatgtacttttcatttatttatttttaatttttaaaatttttttattttactttttgagacagagtcttcctctgtcactcaggctagagcacagtggcacagtctcggctcactgcaacttccacctccaagattcaagtgattctcctgcctcagcctcctgagtagctgagattgcagacacgcaccaccacgcctgactaatttttttgtgtttttagtagagacggggttttgccatattggccaggctgatctcaaacacttgacctcgtgatccgcctgcctcggtctcccaaagtgttatgattacaggcatgagccaccgcgcccggccaaaatgtactttttcttaaagaaaaatggaagggggttggcttcagcagtggrtgggttttgccggtttccccagccaaaagtctcaaagtgttatggccacttgcaggtcagagaggatatcccttctgaggggtcagagtagggacaggatgcgtggaggtgatgtgatggtgggaggtccactttaagccaggccacctgcaattctgtcattgggagcacaaagatggagaaaatgaggctggcacccaggccactgcaactggccttaaagaatccctaccatttgtggtaatttgtcacaaggaagccaattttagaccatctgcatcttggaaaatttcaagaccatgtcttattggagctatatccaagccagtgtagtctgagaccatgccaggaacccactcaagagtccatcttgttctagaagactaaaacacgtgtcgaagtaaccccgcaaggtctatatcaaaaccaagaatccttgggcttcctgtagcatagcattcagtaaatatttacccaattaattccgtttcattgaagaaatcttgacctgcacagggaaaaggtgtcacacatccacaatgtacactctcactgttttaatgagtatttgcaagttcccagggccttgggtgcatctgtagtaaatgagcggggta

SEQ ID NO: 681431 - DNA, 1356 bp, Homo sapiens
ctatcccagctagactcccactgcactaattcagtacctctcttagtatttatcacatctcaaggttaagtgcctttttcccactgctaggttagattccaaagaatctggaggttttattcctcaatgtttctcctaccgagcctttgagcataagaggtgcttaagcaagatttgttgaatgagcacatttattctaaatggtattttagggaaagctggaggtaataaagaggcacttagtatcaactcatggtagtaaatggaggtcacagctaatgttcaacagctcatcaatattctccaatggcaaatggtaatatccatcagcagttggtcaagcctgtaacttagtggattaaacattgatagttcctactttaaggtcaaaagagaggagacattccttcagttgatatcatgggttatggtcattattttaaaaattatttctgcacaaatcactggtaaagcactggtaaaccactgctaatcaggctttttccacctcggggctttgttccttccatctgaaatattcctccccacactctttcaggctggcttcagattagatgtcactgcaggttcagatcaaatgttactttttaaaagacattgacccttcacatcttatataagcagctccagttcccagctgagtacatggcatgccgtaattgccttttctttctttctttttttttttttgtttttagatggagttttgctcttctcacccaggctggagtgcagaggtgcgaactctgctcactgcaagctctgcctcccgagttcaagcgattctcctgcctcagcctcctgagtagctaggattacagatacccgccaccatacctggctattttttgtatttttaatagggacagggtttcaccatgttggtcaggctggtctcaaactcctgacctcaagcaatccacctaccttggtctcccaaagtgctgggattacagscatgagccactgaactggcctgcaattgctttttaaatattttgtttccttcatgcacagctaaggtggggcaaaaacgaggctttgcaccctggatgccaaaggcgaaccgggaaccatgtccacagctgcctgggctctggagctctgtcagccctccccctccctcacttgcacctgctccttctccattcccaaggctgcacttttcttgctttcctattagctttgtgcagagctggatgcccagtttgcctgatccaggacgaagtgaaaatgtagggctctttgttaaaaaatcagaacacttttttctgatttaaaaagagaatacttttttccctggtctctcttgagctgccgtgttgtgttttattc

SEQ ID NO: 681432 - DNA, 1872 bp, Homo sapiens
ttaccaacagaattaactagcacaacatgtgtttagtaactacyataaaaagtcctatccttccaatgtccaaaactcacgttctggccaaagtctactatttgtggttcaggaactcctctgcatgtttttacctcttgttgctctattctctggaatgtctcccatctccccctgcaacagatacattaagcgcagttcacgtaccacctcctccatgaaatctcttctgatggctccaagtagatgcaattttcctttctttaattgccccacccccagtatttcattggcagtgtttattttctccatctcatttggcgtcagacgggtctatttccgctgctagataatgcctgcctctgtagagggcggaactctgcatcattctcttgtagtttttcgttaatgtttggagaacgaacatgggtttggagtcaagagagagattcatagtctccctactcctgcaggtctcttagggctcatgtgcctaagtcttggacattcagtaaaatactgcatgcggagtgcttcccatagggcctggcacaggaaacatgtatgaaataaagttttcaagcatgggtagaaaatggtctttccaaaaaaagagaaaacaagttttgtaaatatggctattttccaaggaattagaggttcttggactagtgaacacctcagaatatctaaaacaagtgttgagttcagaaccctctgaaagctagagtcattctgagaaacgagctgccactaactcttgacaacatgtgcttggaataacacggtctggctgggagcagaaactcccagctcctctccccaaacacactttccaaggatctgaaacggcagaatcatccacatcctttttctcccctccccctcctccatacgcctggatattttacctgcatgttaccagatgacagttatactttcctcctaattctcttcagaaatacttggtagagacaattcttgattgtttaattcacagaaagacttggcttatgatttgcgtatgtgttacctaatttgcatatcatttataagtctttcttttattagcctgaatgattgaattgaatctgtatacatttttatccctctaagggtacgcaaggcccacattttatcagaattcaatggattcttagggatataggcatttttttgtgatttaaactgtaaagattaaatcactttcttatttaaagggttagaagattcactgactttgtaaccagcatgcctggtctccaattcagctggcaggagctctctgcaaaatgacaatcattccaagacttagaagccaaatattatgtgggcagcctccagttatctggaaaaaagagtttagaggttacttttgagactgataaagttgttctgccagaaggccaagatcatgtaatttgatcttttgcaaacttatgggacgtgcaccaaaataagtttgcaaggaaaggaacattcaaggatctccatctatcctttattgttaatgagtaataatgaaacaatgatatgaataaggactatcacagagcaagggcttatcttctcccagaccttagactaagcagtttatactctttctcctagaaattctcaacagtatttctatcttagtcacatttttaagatgagaagcccaggcttaaagattttaaatcacttgcccaaagccacagggttactaagggactggatcaggatttaaaactgagtttctttgactaaaagctgtgtcttaaccactgtgatctcatatattgcattttctgaactacttttaaaaaaagactttaaatttattaaattacttcatcccccttgctttcttttcttttctttctttctgaa

SEQ ID NO: 681433 - DNA, 1872 bp, Homo sapiens
ttaccaacagaattaactagcacaacatgtgtttagtaactactataaaaagtcctatccttccaatgtccaaaactcacgttctggccaaagtctactatttgtggttcaggaactcctctgcatgtttttacctcttgttgctctattctctggaatgtctcccatctccccctgcaacagatacattaagcgcagttcacgtaccacctcctccatgaaatctcttctgatggctccaagtagatgcaattttcctttctttaattgccccacccccagtatttcattggcagtgtttattttctccatctcatttggcgtcagacgggtctatttccgctgctagataatgcctgcctctgtagagggcggaactctgcatcattctcttgtagtttttcgttaatgtttggagaacgaacatgggtttggagtcaagagagagattcatagtctccctactcctgcaggtctcttagggctcatgtgcctaagtcttggacattcagtaaaatactgcatgcggagtgcttcccatagggcctggcacaggaaacatgtatgaaataaagttttcaagcatgggtagaaaatggtctttccaaaaaaagagaaaacaagttttgtaaatatggctattttccaaggaattagaggttcttggactagtgaacacctcagaatatctaaaacaagtgttgagttcagaaccctctgaaagctagagtcattctgagaaacgagctgccactaactcttgacaacatgtgcttggaataacacggtctggctgggagcagaaactcccagctcctctccccaaacacactttccaaggatctgaaacggcagaatcatccacatcctttttctcccctccccctcctccatacgcctggatattttacctgcatgttaccagatgacagttatactttcctcctaattctcttcagaaatacttggtagagacaattcttgattgtttaattcacagaaagacttggcttatgatttgcgtatgtgttacctaatttgcatatcatttataagtctttcttttattagcctgaatgattgaattgaatctgtatacatttttatccctctaagggtacgcaaggcccacattttatcagaattcaatggattcttagggatataggcatttttttgtgatttaaactgtaaagattaaatcactttcttatttaaagggttagaagattcactgactttgtaaccagcatgcctggtctccaattcagctggcaggagctctctgcaaaatgacaatcattccaagacttagaagccaaatattatgtgggcagcctccagttatctggaaaaaagagtttagaggttacttttgagactgataaagttgttctgccagaaggccaagatcatgtaatttgatcttttgcaaacttatgggacgtgcaccaaaataagtttgcaaggaaaggaacattcaaggatctccatctatcctttattgttaatgagtaataatgaaacaatgatatgaataaggactatcacagagcaagggcttatcttctcccagaccttagactaagcagtttatactctttctcctagaaattctcaacagtatttctatcttagtcacatttttaagatgagaagcccaggcttaaagattttaaatcacttgcccaaagccacagkgttactaagggactggatcaggatttaaaactgagtttctttgactaaaagctgtgtcttaaccactgtgatctcatatattgcattttctgaactacttttaaaaaaagactttaaatttattaaattacttcatcccccttgctttcttttcttttctttctttctgaa

SEQ ID NO: 681434 - DNA, 2294 bp, Homo sapiens
gtaaaggatgggagtttctcccagttgagcagtgtgtgctgtatgtttttaacttgtctggaaagaactctcgatgtttgattctggaaagattgctagagggcctcttacttagagacactccacccccctcaaatgtgagcccatggacctttagggtgcatgatactgtgtgtggatgwtgggggtaggagggtaccagggattaactattccttagaggaatacgtagggaataccctatatatttcccacatgtgatgaatcttttccatcccaaccaagcaccttctaaattcttgtggttgttcatctaaccaaataggagctacaggcagtttacttcaagataccagtgagaacttccgggttgcatttttctatttcacttcaaaacttccatcttttaacagactggtcactggacccttgagcttgtttagaggttatgatctcagtccttcaaccttgggcttcagatttagtttgttatcagcatccccccgcccccatgcccccaagcctatgaaattatatagttatataagtcaagttttatattttctagggattggttagaaaaactggcaataaagtcaacttcatgtatctttagtgtggttatgcatatttttcttaagtgacttattctttcagtgaccttttaaaatatagagtcatatgaatgtttgtgccaactaagcaaacattgacttaggttttgttacagataggttattattttagccacagagttggtgaaagttaaaatataatggtagttgatcatttacttagtgcacagaatgtgccaggtactgaaggtctggtatagttttagtacatattatcaaacagttttccgaatatctgtaccagtttatacttccaccagtaaagtgtgggaatcacagtttctccacatccttaccaaaagtggctgtggagagaataattttaattttagtcattctggtagatgtatagtggtattttattgttgttttaatgtacatttttccctgatgactttttatatgctgttggctatttggatatcctgtcttgtgaaatacctgttcaaatattttggccatttttctgttggattgttccacattgacttgtaggaattctttccatattctggatatgagttctttgacagttacatgttttgcacatatcttctcccaggcaatggctttcttggtttttcactctatggtattcttttgatgaagagaagttttaaattttaatgcagtccaatatatcaatcttttctgtaatcagtgtttctgtttcttgtttaaaacatttatgcctttcctaaggtcatacaaataatctcttctgttatcttctggaaggctgattgcttcacctttcacatgtaggcccatgaactatctggagcttatttctgtataagatgttagaatcagatattttttttcctgcctgtgtggttatccagttaatccagcatcatttgttgaagagtctatcctttccccaccacactgcagtggcatctttatcacaagaccatgtgactttaaagcaagtcttgatatcaggtagtttaagtcctccaactttgtttttcttgagaaactatttttaaatggccaaatagtctcagacagttgttggccccattccttccttctgccttctcaagcccatcttgccttttgaccccagagcttacaacttacagactcatcatctcttcttttccatgaccatttcagactagaggttagaattccataagcaagtgcagcttctcttttggtggaagattaatacagaatcaccttcacctgttgtatgccctgccatcctggctactaatctggcttggggcttaggttccattgctgactgctattgggcttctaaactgtttccctgacccctttatattggaccttctatgccagaattcccaaacccaaaaccctctgattttcctggttcgtagccctgaaagtcggcttcagtttgcacttctattaattatttttattcacctatattgtcccctaatctcctgataaggatgtgatttctcatagataaatctccaaagtacaggaagcccacccaaattctctatctctatgctctgactactaggatatcctgtttgctacccaattatgagaccctcctgtcaactgtttttgtatacagtggcttgcaagacaatagcggcattatttatttgctcccctctaacaggtcttagaataagtagacataaaaatggcaagttacacaca

SEQ ID NO: 681435 - DNA, 2294 bp, Homo sapiens
gtaaaggatgggagtttctcccagttgagcagtgtgtgctgtatgtttttaacttgtctggaaagaactctcgatgtttgattctggaaagattgctagagggcctcttacttagagacactccacccccctcaaatgtgagcccatggacctttagggtgcatgatactgtgtgtggatgttgggggtaggagggtaccagggattaactattccttagaggaataygtagggaataccctatatatttcccacatgtgatgaatcttttccatcccaaccaagcaccttctaaattcttgtggttgttcatctaaccaaataggagctacaggcagtttacttcaagataccagtgagaacttccgggttgcatttttctatttcacttcaaaacttccatcttttaacagactggtcactggacccttgagcttgtttagaggttatgatctcagtccttcaaccttgggcttcagatttagtttgttatcagcatccccccgcccccatgcccccaagcctatgaaattatatagttatataagtcaagttttatattttctagggattggttagaaaaactggcaataaagtcaacttcatgtatctttagtgtggttatgcatatttttcttaagtgacttattctttcagtgaccttttaaaatatagagtcatatgaatgtttgtgccaactaagcaaacattgacttaggttttgttacagataggttattattttagccacagagttggtgaaagttaaaatataatggtagttgatcatttacttagtgcacagaatgtgccaggtactgaaggtctggtatagttttagtacatattatcaaacagttttccgaatatctgtaccagtttatacttccaccagtaaagtgtgggaatcacagtttctccacatccttaccaaaagtggctgtggagagaataattttaattttagtcattctggtagatgtatagtggtattttattgttgttttaatgtacatttttccctgatgactttttatatgctgttggctatttggatatcctgtcttgtgaaatacctgttcaaatattttggccatttttctgttggattgttccacattgacttgtaggaattctttccatattctggatatgagttctttgacagttacatgttttgcacatatcttctcccaggcaatggctttcttggtttttcactctatggtattcttttgatgaagagaagttttaaattttaatgcagtccaatatatcaatcttttctgtaatcagtgtttctgtttcttgtttaaaacatttatgcctttcctaaggtcatacaaataatctcttctgttatcttctggaaggctgattgcttcacctttcacatgtaggcccatgaactatctggagcttatttctgtataagatgttagaatcagatattttttttcctgcctgtgtggttatccagttaatccagcatcatttgttgaagagtctatcctttccccaccacactgcagtggcatctttatcacaagaccatgtgactttaaagcaagtcttgatatcaggtagtttaagtcctccaactttgtttttcttgagaaactatttttaaatggccaaatagtctcagacagttgttggccccattccttccttctgccttctcaagcccatcttgccttttgaccccagagcttacaacttacagactcatcatctcttcttttccatgaccatttcagactagaggttagaattccataagcaagtgcagcttctcttttggtggaagattaatacagaatcaccttcacctgttgtatgccctgccatcctggctactaatctggcttggggcttaggttccattgctgactgctattgggcttctaaactgtttccctgacccctttatattggaccttctatgccagaattcccaaacccaaaaccctctgattttcctggttcgtagccctgaaagtcggcttcagtttgcacttctattaattatttttattcacctatattgtcccctaatctcctgataaggatgtgatttctcatagataaatctccaaagtacaggaagcccacccaaattctctatctctatgctctgactactaggatatcctgtttgctacccaattatgagaccctcctgtcaactgtttttgtatacagtggcttgcaagacaatagcggcattatttatttgctcccctctaacaggtcttagaataagtagacataaaaatggcaagttacacaca

SEQ ID NO: 681436 - DNA, 435 bp, Homo sapiens
ataayatataatatatataataaataatatatatattatatatatcatataatatataatatatataatatatatataatttccttttacatcctgcatccttcaacgttccatcccccaccccacagattaagttattccccaggggagaatatggcagagtctattttaatgcagtttttaacccaattaagaacctacgaaatcattactttccaaaactttggaacaaagccgcagtagtatggatccgttggaggcttttcacacaataaaatgtacctctctttgtttttaacatgtttctcccttcctctcttctttttttgtgaaatgtgtatttactttatttgtagtaagtcacttccatgcacatattaattttttaaagtaataagtatgtgtattgtctacgtgtgaaataaaacacacatt

SEQ ID NO: 681437 - DNA, 435 bp, Homo sapiens
ataatatataatatatataataaataatatatatattatatatatcatataatatataatatatatmatatatatataatttccttttacatcctgcatccttcaacgttccatcccccaccccacagattaagttattccccaggggagaatatggcagagtctattttaatgcagtttttaacccaattaagaacctacgaaatcattactttccaaaactttggaacaaagccgcagtagtatggatccgttggaggcttttcacacaataaaatgtacctctctttgtttttaacatgtttctcccttcctctcttctttttttgtgaaatgtgtatttactttatttgtagtaagtcacttccatgcacatattaattttttaaagtaataagtatgtgtattgtctacgtgtgaaataaaacacacatt

SEQ ID NO: 681438 - DNA, 435 bp, Homo sapiens
ataatatataatatatataataaataatatatatattatatatatcatataatatataatatatataatatatatataatttccttttacatcctgcatccttcaacgttccatyccccaccccacagattaagttattccccaggggagaatatggcagagtctattttaatgcagtttttaacccaattaagaacctacgaaatcattactttccaaaactttggaacaaagccgcagtagtatggatccgttggaggcttttcacacaataaaatgtacctctctttgtttttaacatgtttctcccttcctctcttctttttttgtgaaatgtgtatttactttatttgtagtaagtcacttccatgcacatattaattttttaaagtaataagtatgtgtattgtctacgtgtgaaataaaacacacatt

SEQ ID NO: 681439 - DNA, 435 bp, Homo sapiens
ataatatataatatatataataaataatatatatattatatatatcatataatatataatatatataatatatatataatttccttttacatcctgcatccttcaacgttccatcccccaccccacagattaagttattccccaggggagaatatggcagagtctattttaatgcagtttttaacccaattaagaacctacgaaatcattactttccaaaactttggaacaaagccgcagtagtatggatccgttggaggcttttcacacaataaaatgtacctctctttgtttttaacatgtttytcccttcctctcttctttttttgtgaaatgtgtatttactttatttgtagtaagtcacttccatgcacatattaattttttaaagtaataagtatgtgtattgtctacgtgtgaaataaaacacacatt

SEQ ID NO: 681440 - DNA, 665 bp, Homo sapiens
tggttgcaaaaggtgaaccactagggatgaacctggagagcaaagaagcgaagatctagagatgaggtgggagaaatcagcaggatggatctcgcgtgaccttggtagagagtttgaattttattctaagtaccatttcatcattggttttcttccctctccatcataatttcaacaagtatctagcatcaagaacctgctggctgtcatccagttttgcagaaattctaaggaatacactccaaggattagggaataaataccaaggtggcagaaaagcacatcctgctctgagggtaaggccctggagcctgcagtgagggtctacttcttaagcatttgtggcactaactcacaacgggtccgagctgcaggggcctggaactcccctagtcttacccccctgatttgatagacagggcaagggatctgtataaagcatggtgttaagggaactaggagaaagatttaagtgcttacttattgataatcttctgttttctagaaaggtttctggatactttcctgttaaacttctttaatcttcataactgtctgtaagttagtcattgtagccaggctttgtgtgtgagaaaactgaataaactggcaaagaaastgacctattcatgcaagtgctttgaaaaattatggttttattctgt

SEQ ID NO: 681441 - DNA, 1144 bp, Homo sapiens
gaaataagtgcttaatagcagcagattaatgtatacacgtgaactctctttcttaaaggactttcattcattcagcactcttgttggattagtctgcctggattgccataagaaaataccacaggctgggtggcttaaacaacaggaatttattttctcacagttctggargccgaaagttcaagatcaaggtgccagcaagttgggtttcttctgaggcctctctctggctcgaggacagccaccttcttgccccgtcctcccatggactcccctctgtgtgtgcacatccctggtgtctctcctcttcctataaggacatcggtcatatgatactaggccccactattttgacttcatttaacttaattacctctttaaaggccctatctatctccaaatatggtcacatcgagggtgagggcttcaacacatgaattttggggttggggacacaattccatccttaacacctttatggagtacttttcatgtgatggtcactgtagatacagaagaaaatgacagtaacctcgcctttgggaaattgggagtcttacagacatgaaaaaaatgccatatgatatgcaatttatacacatgagggcactgagggagagaattgacttggttttggggaatgtgggagaagaattaaaagaaggcttcaaagacaaggagctgggtgagttaagttttgaaagaaagcctggcataagtgtgatagcaggaaaaagaataaaggagacatcctcatcatacacatgaaataagctgagtctctctcctgagttttgaaagattctatctaaaaatactgaccgaccctaacttcaaaagcctacaattagagataatttttttttacaattagagatgagtttttacccttaagctattgtttccttaaaaaataataaagatttaaaatattgtattgtttgaattggtcttagttataaacatcagaaaccatgacacaagctggtttgaacaatgggagcttcagttatttttgtccgagcaggcgatcggggtggggtgggttccaggcagtttgatcgcaactgagtgatggctcaaagattcaggctctttgtgtctctccatttgccttcctttccgctggccttagccaaaggca

SEQ ID NO: 681442 - DNA, 1144 bp, Homo sapiens
gaaataagtgcttaatagcagcagattaatgtatacacgtgaactctctttcttaaaggactttcattcattcagcactcttgttggattagtctgcctggattgccataagaaaataccacaggctgggtggcttaaacaacaggaatttattttctcacagttctggaggccgaaagttcaagatcaaggtgccagcaagttgggtttcttctgaggcctctctctggctcgaggacagccaccttcttgccccgtcctcccatggactcccctctgtgtgtgcacatccctggtgtctctcctcttcctataaggacatcggtcatatgatactaggccccactattttgacttcatttaacttaattacctctttaaaggccctatctrtctccaaatatggtcacatcgagggtgagggcttcaacacatgaattttggggttggggacacaattccatccttaacacctttatggagtacttttcatgtgatggtcactgtagatacagaagaaaatgacagtaacctcgcctttgggaaattgggagtcttacagacatgaaaaaaatgccatatgatatgcaatttatacacatgagggcactgagggagagaattgacttggttttggggaatgtgggagaagaattaaaagaaggcttcaaagacaaggagctgggtgagttaagttttgaaagaaagcctggcataagtgtgatagcaggaaaaagaataaaggagacatcctcatcatacacatgaaataagctgagtctctctcctgagttttgaaagattctatctaaaaatactgaccgaccctaacttcaaaagcctacaattagagataatttttttttacaattagagatgagtttttacccttaagctattgtttccttaaaaaataataaagatttaaaatattgtattgtttgaattggtcttagttataaacatcagaaaccatgacacaagctggtttgaacaatgggagcttcagttatttttgtccgagcaggcgatcggggtggggtgggttccaggcagtttgatcgcaactgagtgatggctcaaagattcaggctctttgtgtctctccatttgccttcctttccgctggccttagccaaaggca

SEQ ID NO: 681443 - DNA, 620 bp, Homo sapiens
gtatgtatgtatgtaaatatatggatataattttttcctggacaaccttttgttaaacatttattagcaccactccttcaatctttttgtttcactgggccaacctagtttatatgtctattcctgtgtctggaatttattccttccggtgggttcttggtctcgctgacttcaagaatgaagcagcagacccttgcggtgagtgttacagctcttaaaggtggtgtgtccagagtttgttccttcagatgttcagatgtgtctggagtttattccttctggtgtgttcgtggtggtgctgacttcaggagtgaagcctcagacctttgcagtgagtgttacagctcttaaaggtggcacttctggagttgtttgttcttcctggtgggttcrtggtcttgctgactgcaggactgaagccgcagactctcgtggtgagtgttacagctcttaaaggtggtgtggacccaaagactgagcagcagcaagatttattgtgaagagcaaaaaaacaaagcttccgcagtgtggaagcagacctcagcgggttgctgctgctggctcaggtggctagcttttattcccttatttgtccccgcccacatcctgctgattggtcc

SEQ ID NO: 681444 - DNA, 601 bp, Homo sapiens
gattgtttattttatctttcatcagaatttcttaacttttattgtcactaccaatagtgtaattgcttggctgcatgtcattgctgaggggagcaacattgaattgacaatcaagacacccagattcaaatctagctctgccataaatcataaatcatctttgttagggtttccttacttgtgaagcgggtgactcggcccggtaccatcttgctgactaaacggttttacagrtaatgagacaatcaactgaagagtactagatagatcccaccacttgccaagcattttgctgggatctttacatagtttatttctgtagctcactcttggctatgagatagactccatcattatcctcattttactggagagggctccaaggtacagagggtctccaaaggtgaggcgttgcctaagtagcagaaactgtgaaactgtcttccaaagtggtggtatcagtttgcattcccaccagcagtgaagcagcattcctgttggcccacatctttgccagcatgggtgtcagtgttttggatttcagccattctgataagtgtgaagtggcatctcgttttgcatcagggtgtgtagcagggtg

SEQ ID NO: 681445 - DNA, 600 bp, Homo sapiens
tgcttgtctccctattaatcatcggacaccttgtaggactttggtgacatcctggtgtgaaagcattagaccgatgtttcaaagcctgagaaaaagaagctagaaaagatctctgaagctctttccacagataatctgccttcctcttcatttctttctttcgatatcttaagaatagaagagcagaacagtgagtggaatatctaattctactcatagccaccatttgttgagtgtttgccatgggctgggcatggtgacaggtactttattttctattttcaatatagcagctcatcacaaccatccaacaaggcaggtactatgttatcaccatggagaaaatggtgcctacagagttacatgaattcatccaaggctattcagagaataagtggcaggarattagctaagtccaatggcaggtgttcttcctcatcttcatcttgacctgtcagcagcattgggcactgctgacttctcctcctcaaaacactttacttggcttccggacacctcctgccttgctggtggcttcttttcagactctttttttttttttttttttggagatagggtcttactttgtcacccagcctg

SEQ ID NO: 681446 - DNA, 652 bp, Homo sapiens
tggacgctttctttgggataatcatttaccagtgagaaataacacaaatgaaaccaagaaatatcagtgactgatccgtaattcttctagccagctctacatagcaggaatatttgagaggaggagactaggtaatgtgctgagaaaaaaatatgaagttataagcagctgaaaaatacttaaattgagcttgaaatagaaaacaaaatgaagattggggacccaatgaatatttaaagctacaagaaacttttccagagataagaacatttgaatccatgcattaaaagggcccatagagacatggtggctcacacctgtaattccagcactttggaaggccgaggtgggaggatcacttgaggcccaggagtttgagaacagcctggccagcatggcaaaaccccctctccactaaaaaataaaaaataaaaaaactagctaggcagggtggcaggcacctgtagtcctagctacttgggaggctgaagcgtgagaattccttgaaccagggaagcagaggttgcagtgagcaaagattgtgccmctgcactccagcctcggtgatagagactctgtctccaaaaaaaaaaaaaaaaaaaaaaaagtccctacagaacacctattaaatgtaaccaaaacttcccatagt

SEQ ID NO: 681447 - DNA, 575 bp, Homo sapiens
ggtgaaagatagggacctggtttcattcttctttttacagatacccacttttcccagccccatttgttgaagagagggttctttccccaatgtatgtttttgatacttttgttgaaaatcaggtgtctgtaaatatgtggatttatttctgcattctctgttccattggtttaattttctatttttataccaagaccttgttcttttggttactgtaaccttgtaatatattttgaagtcaggtggagtgatgcctccagctctgttcttttccctcaggcttggcttgtatagtctagcttttttgcagttccatatgaattttaggattgttttttccatttctgtgaagagggttattggtgtttttttgttgcaagttataaagggcattttatttttatcttattctttctctttcttaactttcagattcagggagtacatgtgcaggtttgttacayaggtatattgcataatgcttaggtttagggtgcagttgaacctatcacccaggtaatgagcatagtacctggcatgtcatttttcaatcattgtccaacccagtccccctt

SEQ ID NO: 681448 - DNA, 1895 bp, Homo sapiens
tacatgttctccatggcatctatctcctctctctttctcttaattgtatttgcgcatattagttggtggagtggggagttttacctggattattgtataactatattaaaaactataggagcatgcttgaggacatacaaaggcataacttgtgaattttttcatatggagccattattgacacttaaagctgctgagaacatctaaagatctcttgcagaatatccacagatgtcatctacaaagttgtttttctcatgttcaagagcagcacttaaactacttattcttcagttttgttattttataatcaacctactttaaatatggagtgtatttcagatttatgtgttttttagtaacaycatttaaacattaattgtaaataatgtatttaaaatatacaaattactttttgtaactccagttctaatttagggactaattttaagatatctatttatctatctatcatctatctatctatcatctatttccagatatatatccattagatatctatcttatgaatatgtacatatgtaatcttatgaatatatatctagatatataatatatatctagatataaatagcacacatcttatgaatacatatatataatatataacattcatttagtatttaattctgttttctccaaaatctaatacttaaaatatatttttgaaaaagagctaagttttcttagatttgataaacgtccaagttggatacaacccattaggcaaaaatcccaacttgtaaaacagatgttagggagaaatgctctgcttttctgctttaccttataggtgtgtgtgtgtgtgtgtgtgtgtgtgtgtatatgtgtatatatatatatatgtgtgtgtgtgtgtatatgtaaatatatatgtaaatatatatgtaaatatatatatgacacgcttgttgacaaactgttaaaaatcatttgaatttctaagcaaattagaattgataagacttgtaattggtatcttttaaaaaccttctactagaaaaatgtaaccaatatttcttatcaataattatagataagacatgggtgctcatacacatattttgggcaaaggataattttgtataaaaataagggaatactgttcttagggattgttgtggggtctcaaaattaattcttaatgtgcaattataaggtgaactaaaagtccttgggtgttttgatttcaagatttttataggattatgaagttgctttcctgacacccacaactattgttttatgtgaagatgcttttcctttcaaggtgcatctttcatatgttttcaaattagctttattaaaatgtggtttacattcatcacaattcacccatttcataactataattcagtgaatgttgacaattacgtagtcatgcaaccaccactacatcaagactgagaacagttcctcaccctaaaagttattttgtgctctttgcagctgcctctcctctcaatcctaatccctggccatctctgatatgtttttactatagtttcgccttttcaagaattttacataaatgaattttttcacttcacatggtggtattgtcaatccttttaatttcagccattctggtttgtgtgtagtggtatctccttttggttttaatttttatttttcttatgaccgaagatcatgagaatcttttcatgtgcttattggcaattcatagatcttctttggagaagagtatattcaactattttgtgcattttgtattgtttctcttattactgacttgtaaaaatttggattttttaaaaaaatattctggataaaagtccccgatacatgttttgcaaaccttttctccagtttgtggcttgccttttcattttcctgacagtgtctacaaaaaa

SEQ ID NO: 681449 - DNA, 1895 bp, Homo sapiens
tacatgttctccatggcatctatctcctctctctttctcttaattgtatttgcgcatattagttggtggagtggggagttttacctggattattgtataactatattaaaaactataggagcatgcttgaggacatacaaaggcataacttgtgaattttttcatatggagccattattgacacttaaagctgctgagaacatctaaagatctcttgcagaatatccacagatgtcatctacaaagttgtttttctcatgttcaagagcagcacttaaactacttattcttcagttttgttattttataatcaacctactttaaatatggagtgtatttcagatttatgtgttttttagtaacaccatttaaacattaattgtaaataatgtatttaaaatatacaaattactttttgtaactccagttctaatttagggactaattttaagatatctatttatctatctatcatctatctatctatcatctatttccagatatatatccattagatatctatcttatgaatatgtacatatgtaatcttatgaatatatatctagatatataatatatatctagatataaatagcacacatcttatgaatacatatatataatatataacattcatttagtatttaattctgttttctccaaaatctaatacttaaaatatatttttgaaaaagagctaagttttcttagatttgataaacgtccaagttggatacaacccattaggcaaaaatcccaacttgtaaaacagatgttagggagaaatgctctgcttttctgctttaccttataggtgtgtgtgtgtgtgtgtgtgtgtgtgtgtatatgtgtatatatatatatatgtgtgtgtgtgtgtatatgtaaatatatatgtaaatatatatgtaaatatatatatgacacgcttgttgacaaactgttaaaaatcatttgaatttctaagcaaattagaattgataagacttgtaattggtatcttttaaaaaccttctactagaaaaatgtaaccaatatttcttatcaataattatagataagacatgggtgctcatacacatattttgggcaaaggataattttgtataaaaataagggaatactgttcttagggattgttgtggggtctcaaaattaattcttaatgtgcaattataaggtgaactaaaagtccttgggtgttttgatttcaagatttttataggattatgaagttgctttcctgacacccacaactattgttttatgtgaagatgctttycctttcaaggtgcatctttcatatgttttcaaattagctttattaaaatgtggtttacattcatcacaattcacccatttcataactataattcagtgaatgttgacaattacgtagtcatgcaaccaccactacatcaagactgagaacagttcctcaccctaaaagttattttgtgctctttgcagctgcctctcctctcaatcctaatccctggccatctctgatatgtttttactatagtttcgccttttcaagaattttacataaatgaattttttcacttcacatggtggtattgtcaatccttttaatttcagccattctggtttgtgtgtagtggtatctccttttggttttaatttttatttttcttatgaccgaagatcatgagaatcttttcatgtgcttattggcaattcatagatcttctttggagaagagtatattcaactattttgtgcattttgtattgtttctcttattactgacttgtaaaaatttggattttttaaaaaaatattctggataaaagtccccgatacatgttttgcaaaccttttctccagtttgtggcttgccttttcattttcctgacagtgtctacaaaaaa

SEQ ID NO: 681450 - DNA, 2253 bp, Homo sapiens
cagaagttctagacattctggcaggctggtggagatgatatttttaggtagctaagagtttctatgttcctgtattgcacacattgggctaggtcctagggccctttctttagggtcaaccccatcaacagataacttgcttttggtttctcttcattattaaaaattaattggcttccatttctaaatttctctgtatttctttgaaaatgacaacaagtaaaataatgtcattttccctccatctttattagtcaaagagaaatgacggcagttaaccacagcacttaagagctttggtgtagtttttggtttgtaaatatccttgctttatgtatttgaattttgaaagtagttatctgaaacctgtgaggtttttcaactaattgaacctagtctaattttacaaatatgaaagtgacattccactaacctccaaaaatttgtggatggggcagactgctggaaatcaaatcaataatgcaaagtgaaatgggaagttagcagttagtaatctattgaaagttcgtaagaatatatattagctgaacaatttgacaatgtcctgcctgaaatttatgagtaaatgccaatttttcacttttgtgacaatcaagtcatagaaaaagaggggagttgggaagttatgactaacatttcctaaacatatccctcaggtgtggagtatgtagagaatactgtggctgtgtctttggtgttggggaataggaacgtaaaacagcagaagtagagacacagtcctgtcctcaaataatttataacctatttcagtcagttccaaagaaaggtatttcattaacccagcaagaaaataaaaacatgaaaagtgaagcagcatacaatatttttactggttcatacccctaggtcttcccattcttacccatgagagagtgagtgatgatgtcgttaatgttaatttacaaatcaaaccatggagtgcagatttttcagatctcaggtctgcagctttcattgcatcatmtgaactgaagttccactgtaataaaagacaagggttattgtgatgagccaacaactccatggatgagggagtctggtgaaagggtcctatatttacacaagtggttctgccttatgatctcatcttcagtgtggtgatgttttacttatttcaaagcaagaatatctaccttatccaataaaagaaaaatctctgtttcattttgagaaaatgttcatttaagtatataaactgtataaccaatatgaagaatataatgcatttctcttatatgagtattagatactaatggtatcctaattatttatatgggcaagagattttcaatatctaaaactaactatagatttacagatagtcaaacagttgcataactttctattgtaatttattatttgctgttggaaagcaaattcatttattgtaaccaaaagatgtgttacagggttatttcatacatgggagattttcaaagtcctgcaatgatgacattgatatagtgccactactctgttataacctttgtatattatttaagtgtaacaaatacttcattcattgcttgccctaaactttgcatttggtgacattcttgctgctgtgttaatatcaggtctattaagctggacctcatggtccattaccctttctttagatttgaccccatgaagtttaggggtcttgagcacagtgtgaaaaagcaaagggtttcactctcacccaaggagctcattaggactttatagaaacacaataaatactcacacagtactaacatttgcactgagggatgctcaccagacacacagcctggtgtcagaaggtgtccattgttccctttatttaggcctgcacactgatttagcctgctaactaaagagagtgctcatttgtaagctggcattttttttctttgtaagaaagattcatttactggtatcttagctttgtgggatttttttccacctttctctgtcttgatccatttcttaatgcttctacttaaattttgaattgcataatttaaatcaacctccacaatccatgaaggaattccagtgagaactgctgacagcaatatctgtactggagacctttattctctcataaactacaatgtattataattcatcaaacccatttgccttattaaatacagtcttataatgcaagtaaatattactaggttggtttagaggagaactgccgccaacaaagctactttagctttaattttaaagtccagt

SEQ ID NO: 681451 - DNA, 2253 bp, Homo sapiens
cagaagttctagacattctggcaggctggtggagatgatatttttaggtagctaagagtttctatgttcctgtattgcacacattgggctaggtcctagggccctttctttagggtcaaccccatcaacagataacttgcttttggtttctcttcattattaaaaattaattggcttccatttctaaatttctctgtatttctttgaaaatgacaacaagtaaaataatgtcattttccctccatctttattagtcaaagagaaatgacggcagttaaccacagcacttaagagctttggtgtagtttttggtttgtaaatatccttgctttatgtatttgaattttgaaagtagttatctgaaacctgtgaggtttttcaactaattgaacctagtctaattttacaaatatgaaagtgacattccactaacctccaaaaatttgtggatggggcagactgctggaaatcaaatcaataatgcaaagtgaaatgggaagttagcagttagtaatctattgaaagttcgtaagaatatatattagctgaacaatttgacaatgtcctgcctgaaatttatgagtaaatgccaatttttcacttttgtgacaatcaagtcatagaaaaagaggggagttgggaagttatgactaacatttcctaaacatatccctcaggtgtggagtatgtagagaatactgtggctgtgtctttggtgttggggaataggaacgtaaaacagcagaagtagagacacagtcctgtcctcaaataatttataacctatttcagtcagttccaaagaaaggtatttcattaacccagcaagaaaataaaaacatgaaaagtgaagcagcatacaatatttttactggttcatacccctaggtcttcccattcttacccatgagagagtgagtgatgatgtcgttaatgttaatttacaaatcaaaccatggagtgcagatttttcagatctcaggtctgcagctttcattgcatcatatgaactgaagttccactgtaataaaagacaagggttattgtgatgagccaacaactccatggatgagggagtctggtgaaagggtcctatatttacacaagtggttctgccttatgatctcatcttcagtgtggtgatgttttacttatttcaaagcaagaatatctaccttatccaataaaagaaaaatctctgtttcattttgagaaaatgttcatttaagtatataaactgtataaccaatatgaagaatayaatgcatttctcttatatgagtattagatactaatggtatcctaattatttatatgggcaagagattttcaatatctaaaactaactatagatttacagatagtcaaacagttgcataactttctattgtaatttattatttgctgttggaaagcaaattcatttattgtaaccaaaagatgtgttacagggttatttcatacatgggagattttcaaagtcctgcaatgatgacattgatatagtgccactactctgttataacctttgtatattatttaagtgtaacaaatacttcattcattgcttgccctaaactttgcatttggtgacattcttgctgctgtgttaatatcaggtctattaagctggacctcatggtccattaccctttctttagatttgaccccatgaagtttaggggtcttgagcacagtgtgaaaaagcaaagggtttcactctcacccaaggagctcattaggactttatagaaacacaataaatactcacacagtactaacatttgcactgagggatgctcaccagacacacagcctggtgtcagaaggtgtccattgttccctttatttaggcctgcacactgatttagcctgctaactaaagagagtgctcatttgtaagctggcattttttttctttgtaagaaagattcatttactggtatcttagctttgtgggatttttttccacctttctctgtcttgatccatttcttaatgcttctacttaaattttgaattgcataatttaaatcaacctccacaatccatgaaggaattccagtgagaactgctgacagcaatatctgtactggagacctttattctctcataaactacaatgtattataattcatcaaacccatttgccttattaaatacagtcttataatgcaagtaaatattactaggttggtttagaggagaactgccgccaacaaagctactttagctttaattttaaagtccagt

SEQ ID NO: 681452 - DNA, 2253 bp, Homo sapiens
cagaagttctagacattctggcaggctggtggagatgatatttttaggtagctaagagtttctatgttcctgtattgcacacattgggctaggtcctagggccctttctttagggtcaaccccatcaacagataacttgcttttggtttctcttcattattaaaaattaattggcttccatttctaaatttctctgtatttctttgaaaatgacaacaagtaaaataatgtcattttccctccatctttattagtcaaagagaaatgacggcagttaaccacagcacttaagagctttggtgtagtttttggtttgtaaatatccttgctttatgtatttgaattttgaaagtagttatctgaaacctgtgaggtttttcaactaattgaacctagtctaattttacaaatatgaaagtgacattccactaacctccaaaaatttgtggatggggcagactgctggaaatcaaatcaataatgcaaagtgaaatgggaagttagcagttagtaatctattgaaagttcgtaagaatatatattagctgaacaatttgacaatgtcctgcctgaaatttatgagtaaatgccaatttttcacttttgtgacaatcaagtcatagaaaaagaggggagttgggaagttatgactaacatttcctaaacatatccctcaggtgtggagtatgtagagaatactgtggctgtgtctttggtgttggggaataggaacgtaaaacagcagaagtagagacacagtcctgtcctcaaataatttataacctatttcagtcagttccaaagaaaggtatttcattaacccagcaagaaaataaaaacatgaaaagtgaagcagcatacaatatttttactggttcatacccctaggtcttcccattcttacccatgagagagtgagtgatgatgtcgttaatgttaatttacaaatcaaaccatggagtgcagatttttcagatctcaggtctgcagctttcattgcatcatatgaactgaagttccactgtaataaaagacaagggttattgtgatgagccaacaactccatggatgagggagtctggtgaaagggtcctatatttacacaagtggttctgccttatgatctcatcttcagtgtggtgatgttttacttatttcaaagcaagaatatctaccttatccaataaaagaaaaatctctgtttcattttgagaaaatgttcatttaagtatataaactgtataaccaatatgaagaatataatgcatttctcttatatgagtattagatactaatggtatcctaattatttatatgggcaagrgattttcaatatctaaaactaactatagatttacagatagtcaaacagttgcataactttctattgtaatttattatttgctgttggaaagcaaattcatttattgtaaccaaaagatgtgttacagggttatttcatacatgggagattttcaaagtcctgcaatgatgacattgatatagtgccactactctgttataacctttgtatattatttaagtgtaacaaatacttcattcattgcttgccctaaactttgcatttggtgacattcttgctgctgtgttaatatcaggtctattaagctggacctcatggtccattaccctttctttagatttgaccccatgaagtttaggggtcttgagcacagtgtgaaaaagcaaagggtttcactctcacccaaggagctcattaggactttatagaaacacaataaatactcacacagtactaacatttgcactgagggatgctcaccagacacacagcctggtgtcagaaggtgtccattgttccctttatttaggcctgcacactgatttagcctgctaactaaagagagtgctcatttgtaagctggcattttttttctttgtaagaaagattcatttactggtatcttagctttgtgggatttttttccacctttctctgtcttgatccatttcttaatgcttctacttaaattttgaattgcataatttaaatcaacctccacaatccatgaaggaattccagtgagaactgctgacagcaatatctgtactggagacctttattctctcataaactacaatgtattataattcatcaaacccatttgccttattaaatacagtcttataatgcaagtaaatattactaggttggtttagaggagaactgccgccaacaaagctactttagctttaattttaaagtccagt

SEQ ID NO: 681453 - DNA, 1318 bp, Homo sapiens
gtggtagaatcatcttcacagaagtattattaaaactgaaagtcgtagtagatgaaatcatccagggagagagggacagggatcacagaaagattttatgtcgcttatcatctccaaatgattgatagctttctcaggtgctgtgttgggaaagaatttaaggctaccatcaggcagagtgggaaggagttccatgaatgatgagtagtatctgccattggctccagagagggaagtgattgcacctatatcagatgttagatactggaagaaacttcagcgcaaacttctggaaaacaccaatccttaagggatggtgggaaagttgtgctggcaaaagagaataaaaagagcagtctgagtcagcagagaaacagaccgctatatggttcctgtggatctcatattcagtaaatatttactaaaggaatggatgagttaataaaatcaagtgttgacagttgtactgcaattggagcaacagaataagccagcagcatgattcataacaaccagcaattacttaaagagtgtaattggattgtttgtaactcaaaggataaatgcttgaggggacggataccccattctccatgatgtgcttatttcacattgcatgtctgtatcaaaacatctcatatgccccataaatatatacacttgctatgtacccacaaaaaaattttaaaaagtaacataaaataaaatatccagtaattataataaatatggtgagataagaaagtccagagaaggaagaaatcacatctatttttattgcagaagggaagatcagaaaggactctttggaaaaggtaggatttgcattgacccttagaggaagaacacatacaattttagtcagccagtgggcagtagaagttaggcagtacagataactcgaacaagggtgaaggagggaaagttgtggcaggttctgggacagaatatgaaccaattgtatmatagaagacacttggggaatcttgagtctctgactcttcttgtcagcaccctgtcttactcagcctcacccctctgtgtctccttggctttgggtcaggcattggccacttggagttctgccaacagagaaagaagcatcccggtgccccccgtgtctgtttctatctcttatgcttcataatgctctatgatgatgccagcaagaggtttaggaagccagcttccccagctgtttgaaggaagaatttgctgatgtaagtctgaaaacctcagaggacctgaaacaaaagaatgatcactaaaaatgggaaggcagaaattagttatttagcctgtgttgtgaggaggtgct

SEQ ID NO: 681454 - DNA, 1318 bp, Homo sapiens
gtggtagaatcatcttcacagaagtattattaaaactgaaagtcgtagtagatgaaatcatccagggagagagggacagggatcacagaaagattttatgtcgcttatcatctccaaatgattgatagctttctcaggtgctgtgttgggaaagaatttaaggctaccatcaggcagagtgggaaggagttccatgaatgatgagtagtatctgccattggctccagagagggaagtgattgcacctatatcagatgttagatactggaagaaacttcagcgcaaacttctggaaaacaccaatccttaagggatggtgggaaagttgtgctggcaaaagagaataaaaagagcagtctgagtcagcagagaaacagaccgctatatggttcctgtggatctcatattcagtaaatatttactaaaggaatggatgagttaataaaatcaagtgttgacagttgtactgcaattggagcaacagaataagccagcagcatgattcataacaaccagcaattacttaaagagtgtaattggattgtttgtaactcaaaggataaatgcttgaggggacggataccccattctccatgatgtgcttatttcacattgcatgtctgtatcaaaacatctcatatgccccataaatatatacacttgctatgtacccacaaaaaaattttaaaaagtaacataaaataaaatatccagtaattataataaatatggtgagataagaaagtccagagaaggaagaaatcacatctatttttattgcagaagggaagatcagaaaggactctttggaaaaggtaggatttgcattgacccttagaggaagaacacatacaattttagtcagccagtgggcagtagaagttaggcagtacagataactcgaacaagggtgaaggagggaaagttgtggcaggttctgggacagaatatgaaccaattgtataatagaagacacttggggaatcttgagtctctgaytcttcttgtcagcaccctgtcttactcagcctcacccctctgtgtctccttggctttgggtcaggcattggccacttggagttctgccaacagagaaagaagcatcccggtgccccccgtgtctgtttctatctcttatgcttcataatgctctatgatgatgccagcaagaggtttaggaagccagcttccccagctgtttgaaggaagaatttgctgatgtaagtctgaaaacctcagaggacctgaaacaaaagaatgatcactaaaaatgggaaggcagaaattagttatttagcctgtgttgtgaggaggtgct

SEQ ID NO: 681455 - DNA, 1701 bp, Homo sapiens
tgtttgaggatgacaactccgtagcaatgtaatgatggattggtgaggcaagagtctagaggcagggagtcagctaagtagaatgatggcaattattgccaaagaggaattgtgctcatgattttaataaaaattaaccactgtctctttaatgtattgaacatcctattttctggttttgaagtggagtaagagccacttcaataccccttctgtttttgatcctagccactgaggtcacattggcccaagcctgcatttctctccctgtagctggctgctctgtggattgcaggctacagcattctcctacatgtctaagaagtgcacaggacgcttcttgggataccaaatatccctgtacccatatagattgagaactcgaacttaccactatgttcccaaagtaaaaggaagtgcatgattgtgatgcttacaggaactgggggaagcatgtataaattaatcaccaagaacttgcatctgtagatttctgatttggggttcttgctagaaatgacaattttatgttactattaaaaatataacctcaggtcatgagcggtggctcatgcctgtaatcccaggactttgggaggccaaggcgggcaaattgcttgaggccaggagtttgagacaagcctggccaacatggtgaaacccccgtctctactaaaaacacaaaaaattaggcttgatggcacatgcctgtaatcccagctattcgggtggctgaggcacgagaatcgcttgaacctgggaggcagtgcttgcagtgagccgagatcatgccactgcactctagcctgggtgacacagcaagattctgtctcaaaaaaaaaaaaagaagataacttcagagtaatggtaatgttgtctttatttaaactgagtttctttgttgaccacatttgtatctgtaattcagagagataaaacaaatcaatacccataattataactaaaattcattaactgttatttaatactgaagattttctagtcagtgtattcagcattttatgtgacttatttaatttttccattgaccatatgaaaggattagagatgttattaagaggcaatacataaagaagaacaatgaaagaatcataaacattattaaaattataaaatgtgtcaaaagcatgcccattatttttttaaaatgccatttttacttaataattttgtacagattaataagtgataacatcaaatattagttctgatatagtcccatgtacttttgggaagataaaaattagcaagacttctggaaggccatttttaaaataacttaaatgttcatgccccaatgatctagaaattatttgtgagggaatttgtaccagagaaataattagaaatgtacacwtagattcttaactaaggatgttgattataatattattattgggaaataaaaaagatctgaatgtttaacaataagagttttgtgaatcatgttttaatttcattttttaatcatttgtgaagatgatgattttgtattcattcttcatatttccttggaaaaataatactaaaacatttaaaaaatggtcttcacgtaattaagacattacagaatataatattttaaagaaattattcaaatttctttagtttttttctttatattatatcgatacattggaagaatcaatatggctttaaagtttagcagttaactgtctc

SEQ ID NO: 681456 - DNA, 655 bp, Homo sapiens
agcactggatctagcacatgggaagcatttaataagtatcacacatcatcatcatcattgatactgataatagatttatagcaacattactctggggccggacacgaaagaggaagaatcagaaggataggatttttgtacctaaaatggaaacagaaagcctagaaagagaaaagcaagtcaatgtaaaccataggaatgtgcccacatatatgtaaatggtaaaaaaatatggcactgacccaaaccttgggaaagattcttttagtcatccagttcccggggaccttagagtcccatagtgaaataatttttaagttgatrtttttgtctctttgattctgttttcatccacaagaattgaaagggagtgggacacaaaaaagtttgaagaagtctccaaacatttgtaagttaacatcccattattattagagtcgtggctatattgaaattttattcaataaaatatacactcaaaaggagagtgacaccctgctttctgttcatcacacagggagaaaagaaagctaaaattcagggaaagggctcagtgtattagaaagactgtcagctttggaagcctggagagagggattccaccagatactctattactttctaatgatactcccttgagaaaattacattgaat

SEQ ID NO: 681457 - DNA, 644 bp, Homo sapiens
tgtaaaagattctaaaagctttatgaaaatcttgtgtagtcaaaagctgactgatattggatatactcataaggtttattaaaatttattttagtattgataatacactaatacaaaggtaaaatttkgtttcctcttttaaataataattttatgtaatataataagaaacagtaaaaataattttactcaccttttgagtaaactccaaaaaataacagggaaaaggagagatggatatatatatatataaaacacatatataggtgtgtgtgtgtgtgtgtgtgtgtgtgtgtgtgtgtgtggtgactgttctaaattgctaacatggtttatgaccaatgtttggtttatcaaacccatattcctgggaagtctcaatcaaaacttcaggtacatttttgctacctgataggccatttgaacacttatagaggagtttcactcaactgtcatttccagtgcatgttttatggttgtatagaagctttctcaagcaagagggctgttgttataacagtagctaaaaggttatacagaaatgtgttttcctcataggacattcctggataaatctccaatgatagaggtacttgtttcactggacaagttgtaaaattgttgaataagatattacagataca

SEQ ID NO: 681458 - DNA, 644 bp, Homo sapiens
tgtaaaagattctaaaagctttatgaaaatcttgtgtagtcaaaagctgactgatattggatatactcataaggtttattaaaatttattttagtattgataatacactaatacaaaggtaaaatttggtttcctcttttaaataataattttatgtaatataataagaaacagtaaaaataattttactcaccktttgagtaaactccaaaaaataacagggaaaaggagagatggatatatatatatataaaacacatatataggtgtgtgtgtgtgtgtgtgtgtgtgtgtgtgtgtgtgtggtgactgttctaaattgctaacatggtttatgaccaatgtttggtttatcaaacccatattcctgggaagtctcaatcaaaacttcaggtacatttttgctacctgataggccatttgaacacttatagaggagtttcactcaactgtcatttccagtgcatgttttatggttgtatagaagctttctcaagcaagagggctgttgttataacagtagctaaaaggttatacagaaatgtgttttcctcataggacattcctggataaatctccaatgatagaggtacttgtttcactggacaagttgtaaaattgttgaataagatattacagataca

SEQ ID NO: 681459 - DNA, 644 bp, Homo sapiens
tgtaaaagattctaaaagctttatgaaaatcttgtgtagtcaaaagctgactgatattggatatactcataaggtttattaaaatttattttagtattgataatacactaatacaaaggtaaaatttggtttcctcttttaaataataattttatgtaatataataagaaacagtaaaaataattttactcaccttttgagtaaactccaaaaaataacagggaaaaggagagatggatatatatatatataaaacacatatataggtgtgtgtgtgtgtgtgtgtgtgtgtgtgtgtgtgtgtggtgactgttctaaattgctaacatggtttatgaccaatgtttggtttatcaaacccatattcctgggaagtctcaatcaaaacttcaggtacatttttgctacctgataggccatttgaacacttatagaggagtttcactcaactgtcatttccagtgcatgttttatggttgtatagaagctttctcaagcaagagggctgttgttataacagtagctaaaaggttatacagaaatgtgttttcctcataggacattcctggataaatctccaatgatagaggtacttgtttcactggacaasttgtaaaattgttgaataagatattacagataca

SEQ ID NO: 681460 - DNA, 1890 bp, Homo sapiens
gaggcttccagtcctgcacatggcaaatgattactaggctgagattgactccagagacaaagatgattctgttttctctaaaggcttttcacatggtgttaagggaactatagattgttaatggaaaaagtatattcattaatatttaattttcttgagctgtagctccttatgaagagctcccttatgtcaagcatgctgggttgtttggagatagccaagtatgcttagactgatgacctttgtacattaagtgttcctggtgctgtgacattattacaaatccatgatactcaactcaactgcattttctttacctgaggtctctcaattatccatggcccttatttttgaggcttcaactctgctgcttcaatcatgacatctgaaaaagaatgcataccctggttttctagttccttaaaatatatttaatatgtatccattatgagttaggcattgttatagttggaagggacccagatgtataagacacagtcccaaaatagaggtaaaataatttgaatatctacaactttaatcttgctgaaaatacatcctttcagacttcttttacaactaagagaaagatataatcgttttcctcctttttttgcatttttttttcattaagcttataaataagaacctattctgtccaggtactgttctagtttcttgggatgcaagagggaaaaaaggaaaattctctgcttctttagaaattaaactctaaatataaaaagataagcctttaaaaacaaatatatacataagataattttatataatgatgagtattatgaagataataatgtgtatatatacatacgggtaggggggaaccaggcgcaagtaaagggattggcctttgatgaggataagggtatttatttcattgcaactagaggagaggcagagatttggaagtagatgcaagtaaatgacagaatagtgatagaaacttgagaagtttttgtctgttcctatttcataagtgaagtttggggccatgtcatcatctgagattaaggaaggtaaaagggtaaagtaagtttaaagagataattatgaaattatcatttcaaaaagtggaagtgtaaacgcactatggaagagaggttggacaatgttaagagcccattttaaaatttgacatcataagtcaaaagtgggaccaataggattttactaatatttggtggtatggtaagtgaatataatagaaaaagtggaggttcaggaagttatggttgtttgcaagagtggttataataatgactatagaatttaagttgggtgagaaggaaaatgagagagggaagggaataatagagtcaagagagtgaacagtggacaaataggtgtggttgaaatattgttggattaggcatctcagagaaagcaaactcctttaaggcaaagtcctccaatcatgcccttgatttgatctcatagccatctcatctggaatattccaccaattaaaacttttctcaattgaacacttagtatttcctctccaaggtctacttcatctacactcgccaacattacctaatggcacaataagaaattcatctttgatcttgttctcccaaactcccaacaagtctctcccttcattctacaccagtttcttaccctcagcactattgayattagggccaaataagtctttattgtggggggctgtcttgtgtgttacagaatgattaacaccatcattgggctctactcaataggtgtcactagcagacactgtaccctgccattgtgatagccaagtacatctccagatagtgccacatatttcttggaagcaaaatcacctccagttaagaactattgttcttcactaattatttctatgtactctccacccactta

SEQ ID NO: 681461 - DNA, 1590 bp, Homo sapiens
ttgttttaaacttgtcattttacttgatttttggctgcagtgaaagaatttcaaagagtcttaccaaatggcggaaagtaatatctttcaatgaaggtatggtgggccaaaacaaagacgtaaaggagagatttgagttaagattacttattgaaaaatcttcccacgtttcagtttattcatttaaaacaaacttttattttttaacttgaacactgtcacatacatccatgaaagttagatgtcactggatatcacttttgatgtaacgaactttggaatgatatgtgttacaattcccacaggcatctggagaaaaagataaaaacaatgaacaacagagtcttctttcttttcctcccractgtgggatgaaatgagagatgataaacaatagtacaacattaaccagcaccagtgactttctaaatagaagaaaatggccagctctgtgtatatctgcaacatttgtgtgctatatcttaaacaagtagagaagcccatcttttccttttgtaactcacgagcttggatatcagggtgcttgtggaactgaaggtttcagtcaaatgatcacaccaaccttgtctgcctagcactagaaaagcttgttgcttttgtttttacatgaggggccattctgggatttaaataaatctctcaagcttcaacagcctgtgctggttccacaaataatactcccttaccctcccagacccttggtttccgtatctaccatgtgggaaagaagccgttacgaaatatacggctgtgaaaatgcaaaataaataaataaataagaaagaaagaaaaatgttaaccatttaaatacactcaaagatggatataccttaagacttcattaccaattcagtgataaacacacattcttttcatctgactgtgacataaaataccaaaatatatagccaaataaatatctaggtattaatcattcattgtggtcctacttgaaattcttagctttttgctatttttaagtagtcactttgtaaaaggcattgagttgtctcctagttactacgggagcctgcatttctgtggtcaagtaacgaaggcccaactaatgcgtggcccagccaagttagcggctgtgtctggcaactgttttctacacaaatattggtcctggtagtaggtctgatacatctgccacttgttagtagtcttgcagctagaggacaaaagacctcaacatgaacaaatgagtagccaagaagtatatttcagaacacactgcagttcatattactaggtacatgaatattctcgtaacattttaagtaagttaaattgaatttttaaactaattttaaactttttcttacttaacttactgagaatttttgttgttgttcaataaaactgtctgcaacaggtaaatgccaggaatagttgagtgattctcaaagctatacacagatacctggattttcttggcttcacctctgctgcgtctaggtccctttggagttcttcaccttgttttctgcatccttctctttttcttgttctttctcttcctcgcctgcagcatcttgggcctcttcatcccacttttcgggctga

SEQ ID NO: 681462 - DNA, 693 bp, Homo sapiens
tcaaatctctaccaatgggagaatggttatagtcacacaatggaatattaagatatataatgggacattacagcaactaagtgactgataggtagatagacagatagatgataaayagatagatgatagctatgataaacgagtactccctgtttgactcaaacacgtaatgaatcaaatatcaatcacagaagactgcatagatataccacgtttttaaagttcaagaactaagcaaacataaccatgttatctagtaatatgtacattgatgacaaaactctaaaatccccaagtaatgacaaacacaaaattcaggatattggttgtgtctagaagacaagcagagggatggcaaagggtggcagcacagctgttagtaatattctaattctgaagtgagatgatgggctcaggggttcattttattgctatgctttattacttgcaaatatgttacttatgttatctaatatcaaatattacctcataaaataataattaaaaaatgaattgactagtaaaaatatattggggtgtttttcaggtcaatgctcattaaagagaaataacctcataaaatacatgattagtaatactgacttaaataaatattcattttttattattttattaataagttcaatatattgcatatgaaatcatttggattcattaaatagtaattcattg

SEQ ID NO: 681463 - DNA, 693 bp, Homo sapiens
tcaaatctctaccaatgggagaatggttatagtcacacaatggaatattaagatatataatgggacattacagcaactaagtgactgataggtagatagacagatagatgataaatagatagatgatagctatgataaacgagtactccctgtttgactcaaacacgtaatgaatcaaatatcaatcacagaagactgcatagatataccacgtttttaaagttcaagaactaagcaaacataaccatgttatctagtaatatgtacattgatgacaaaactctaaaatccccaagtaatgacaaacacaaaattcaggatattggttgtgtctagaagacaagcagagggatggcaaagggtggcagcacagctgttagtaatattctaattctgaagtgagatgatgggctcaggggttcattttattgctatgctttattacttgcaaatatgttacttatgttatctaatatcaaatattacmtcataaaataataattaaaaaatgaattgactagtaaaaatatattggggtgtttttcaggtcaatgctcattaaagagaaataacctcataaaatacatgattagtaatactgacttaaataaatattcattttttattattttattaataagttcaatatattgcatatgaaatcatttggattcattaaatagtaattcattg

SEQ ID NO: 681464 - DNA, 630 bp, Homo sapiens
cagataactgtcagcccggttttcaagagcacacaccaaaaatgcaccaaagcttacatccatacaaacacccgcacatggatgtttatggaagcttatttgtttttattcataatcacccaaactcagaatcaaccaagatgtccttcagtagatgaatggataaactgtggtgtgtccaggcagtggaatattattcaacgcaaaaagaaatgagctatcaaggcatgaaaaaatatgggggaamtttaaatgcataaatgagtgaaagaagccagtctgagaaggctacaccccgtgtgcttccaactacaggacatcctggaaaaagcagaattaccaacacagtgaaagataaggcctggtggtgtggggaaggatgaacaggtggagcacagggatctttaaggcagacgatctactctgtgtgatactgcaatgatgagttcatgccactatatattttcccaaacctatagaatgtacagcaccagtggtgagccctgatgtgagctgtggactctgggtgacaatagtgtgtcaatggaggttcatggactgtaacaaatgcatcactctggtgggggatgttgataatgggggaggctatgcatgcggggaggtgggtac

SEQ ID NO: 681465 - DNA, 630 bp, Homo sapiens
cagataactgtcagcccggttttcaagagcacacaccaaaaatgcaccaaagcttacatccatacaaacacccgcacatggatgtttatggaagcttatttgtttttattcataatcacccaaactcagaatcaaccaagatgtccttcagtagatgaatggataaactgtggtgtgtccaggcagtggaatattattcaacgcaaaaagaaatgagctatcaaggcatgaaaaaatatgggggaaatttaaatgcataaatgagtgaaagaagccagtctgaraaggctacaccccgtgtgcttccaactacaggacatcctggaaaaagcagaattaccaacacagtgaaagataaggcctggtggtgtggggaaggatgaacaggtggagcacagggatctttaaggcagacgatctactctgtgtgatactgcaatgatgagttcatgccactatatattttcccaaacctatagaatgtacagcaccagtggtgagccctgatgtgagctgtggactctgggtgacaatagtgtgtcaatggaggttcatggactgtaacaaatgcatcactctggtgggggatgttgataatgggggaggctatgcatgcggggaggtgggtac

SEQ ID NO: 681466 - DNA, 630 bp, Homo sapiens
cagataactgtcagcccggttttcaagagcacacaccaaaaatgcaccaaagcttacatccatacaaacacccgcacatggatgtttatggaagcttatttgtttttattcataatcacccaaactcagaatcaaccaagatgtccttcagtagatgaatggataaactgtggtgtgtccaggcagtggaatattattcaacgcaaaaagaaatgagctatcaaggcatgaaaaaatatgggggaaatttaaatgcataaatgagtgaaagaagccagtctgagaaggctacaccccgtgtgcttccaactacaggacatcctggaaaaagcagaattaccaacacagtgaaagataaggcctggtggtgtggggaaggatgaacaggtggagcacagggatctttaaggcagacratctactctgtgtgatactgcaatgatgagttcatgccactatatattttcccaaacctatagaatgtacagcaccagtggtgagccctgatgtgagctgtggactctgggtgacaatagtgtgtcaatggaggttcatggactgtaacaaatgcatcactctggtgggggatgttgataatgggggaggctatgcatgcggggaggtgggtac

SEQ ID NO: 681467 - DNA, 594 bp, Homo sapiens
gacttcatctaattctaatcacctcccacagactccatctccaaataccattatattggaggtcagagcttcaatataggaatttggaggccaggcgtgacacactttagagcatcactcatcctctagactcaaggatttttttgtttgtttttgttttagttttttgaggcagtgtctcactctgtcacccaggctggagtgcagtggcacactcatggctcactgcaacatcaaactcctgggttcaggagatcctcctgcttcagactcctgggtagctaaaastataggtacatgccaccccgcgcagctagttttttaatttttatttttcgtagagacagggtctagctatattgcccaggctggtcttgaacccctagcgtcaagtgattctcccaccttggtctcccaaggattggtttcctggattacaagtgtgagccattgtgcccagcctggattcatgtttctatttctttctttctttttttttttttttgagacagagtctcactctgtcgctcaggctggactgcagtggtgcaatctgggctcactgcaacctctgcctcccgggttcaagcaatt

SEQ ID NO: 681468 - DNA, 597 bp, Homo sapiens
aaacagtggcttccgacaaagacaacaagggaaacctccagcttcacagacagggtgggtgtggctcgccaccttgttgtagcctctcctactgctctgagacatttctggtgtgaaacacctagacatccctggcttcacaaagcacaaagaaacccaggctctgtgaacgttttccttcctggagtggacagtggtaatgttcacgaggcctcatcttcctctgggaccagccccttcctgcccctgtgcacagctgcctggtcagagggcctaatacacctgagctaggctggaccmacagaatcctccccgaaaagctttcaaaattggatcactgaagggagattcagtccctcaccgtggcagaacttgcagctgtgaggagaggagctggggctacactatttctgggcacactgacaaagtcagcatgagaagaaagtcacagaagcgccgggtgcagtggctcatgcctgtaatcccagcactttgggaggctgaggtgagcggatcacaaggtcaggagattgagaccatcctggctaacatgatgaaaccccatctctactaaaaatagaaaaaattagccaggcg

SEQ ID NO: 681469 - DNA, 597 bp, Homo sapiens
aaacagtggcttccgacaaagacaacaagggaaacctccagcttcacagacagggtgggtgtggctcgccaccttgttgtagcctctcctactgctctgagacatttctggtgtgaaacacctagacatccctggcttcacaaagcacaaagaaacccaggctctgtgaacgttttccttcctggagtggacagtggtaatgttcacgaggcctcatcttcctctgggaccagccccttcctgcccctgtgcacagctgcctggtcagagggcctaatacacctgagctaggctggaccaayagaatcctccccgaaaagctttcaaaattggatcactgaagggagattcagtccctcaccgtggcagaacttgcagctgtgaggagaggagctggggctacactatttctgggcacactgacaaagtcagcatgagaagaaagtcacagaagcgccgggtgcagtggctcatgcctgtaatcccagcactttgggaggctgaggtgagcggatcacaaggtcaggagattgagaccatcctggctaacatgatgaaaccccatctctactaaaaatagaaaaaattagccaggcg

SEQ ID NO: 681470 - DNA, 597 bp, Homo sapiens
aaacagtggcttccgacaaagacaacaagggaaacctccagcttcacagacagggtgggtgtggctcgccaccttgttgtagcctctcctactgctctgagacatttctggtgtgaaacacctagacatccctggcttcacaaagcacaaagaaacccaggctctgtgaacgttttccttcctggagtggacagtggtaatgttcacgaggcctcatcttcctctgggaccagccccttcctgcccctgtgcacagctgcctggtcagagggcctaatacacctgagctaggctggaccaacrgaatcctccccgaaaagctttcaaaattggatcactgaagggagattcagtccctcaccgtggcagaacttgcagctgtgaggagaggagctggggctacactatttctgggcacactgacaaagtcagcatgagaagaaagtcacagaagcgccgggtgcagtggctcatgcctgtaatcccagcactttgggaggctgaggtgagcggatcacaaggtcaggagattgagaccatcctggctaacatgatgaaaccccatctctactaaaaatagaaaaaattagccaggcg

SEQ ID NO: 681471 - DNA, 597 bp, Homo sapiens
aaacagtggcttccgacaaagacaacaagggaaacctccagcttcacagacagggtgggtgtggctcgccaccttgttgtagcctctcctactgctctgagacatttctggtgtgaaacacctagacatccctggcttcacaaagcacaaagaaacccaggctctgtgaacgttttccttcctggagtggacagtggtaatgttcacgaggcctcatcttcctctgggaccagccccttcctgcccctgtgcacagctgcctggtcagagggcctaatacacctgagctaggctggaccaacagaatcctccccgaaaagctttcaaaattggatcactgaagggagattcagtccctcaccgtggcagaacttgcagctgtgaggagaggagctsgggctacactatttctgggcacactgacaaagtcagcatgagaagaaagtcacagaagcgccgggtgcagtggctcatgcctgtaatcccagcactttgggaggctgaggtgagcggatcacaaggtcaggagattgagaccatcctggctaacatgatgaaaccccatctctactaaaaatagaaaaaattagccaggcg

SEQ ID NO: 681472 - DNA, 2461 bp, Homo sapiens
gcagtgttcataagacaaagtgaatttatatataaaatatatgctaaaaataaatgagaaagacaacccctaaagaaatataggcaaaggtgataaacatacaaagcaatcttatacactgttcatggctacactcctgtctagtaaataaacaaaaacatagatatatagcaattttggccagacacagtggctcacgcctataatccctgcactttgggaggccagggtgggtggatcacttgaggccaggaattcaagaccagcatggccaacatggggaaaaccctgtctctactaaaaatacaaaaattagccaggtgtggtggtgggtgcctgtaataccagctacttgggaggctgaggcgtgagaatcacttgaactcaggaggcagaggttgcagtgagccgggattgtactgctgcactccagcctgggtgacagagtgaaactccatctcaaaaaaaaaaaaaaaaaaaaaaaaaggcaagcatcaaaagcaatcctgaatactaaaagaaaaatacatacattccatagatcccactgactcaaaaaataaaattagaaaataaaaagaatgcaaaaaaatatttaaaccactaaatacactaaatatgaaatgaatccatactcaaaagtattcccaaagaaataccaagcctgtatgttttttaggaattttatcaaactctcttcaagacttttgcgacatgtgtaagtggtttatttgggttttgtatatgtcagtcaattttagcaatttacaattttctacaaatgtgtcttaatttcagatttatgccattaaatgatttatagtaacatctcactttttataaacatctactgaccaggtgcggtggctcacacctgtcataccagcactttgggaggccaaggtgggtggatcacctcaggtcaagagtttgagaccagcctcgtcaacatggtaaaaccttgtctctactaaaactacaaaaaaaaaaattagctggacatggtggcgcatgcctgtagccccagctactcggggaggctgaggcaggagaatcgcttcaacccaggaggtggagattgcagtgagccaagatcatgccactgcactccagcctgggcgacagagggagactccatctcaaaaaacaaacaaacaaacaaaaggccaggcatggtggctcatgctgtaatcccagcactttgggaggctgaggcaggcggattgcctgaagtcatgaggctgaggtgggtggattgcctgaggtcaggagtttgagaccaggctggccaacatagtgaaaccccatctctactaaaaatacaaaaaaattagccgggcatggtggcgtgcgcctgcaatcccagctactccagagggtgaggtaggggaattgcttgaaccagggagatggaggttgcggtggagccaagatcacgccactgcactccggcctgggcgacagagcaagactccgtctcaaaaaaaaaaaaaaaaaatctatctactgtatctgaaatcatctcttccattctaaaatagccgatttctattctccctcgaccagtgcagactgaagtttgtctaaatttattcattttaaatacaaccaaatttttgtttgtktttaacaaatcctttccaataagtaattttagctttttctttttaactttttacttgagtgacttgagactcaaaagaaagtctcaagaatagtatgaagaatttccaaatacccttctcatctacatctcccaaatattaacattttaccacatttatgcaggcggctgatgaaaaaggtcccaccacaaggtggcagagtacacacctgggcgaggctttgtgcaggcaggaaggccctcaggttagaggccatcccagggctgtggcatgggggccattacccagaaggagagggggcagggacagctcctgggtatctctgagagccttagggtctttttttttttttttttttttgatatggaatcttgctctgtcacccagtctggagtgcagtgacacgatctccaacctccgcctcccgggttcaagcaattcacctgcctcagcctcccgagtagctgggattacaggcccctgccatcatgtctagctaatttttgaatttttgtagagacggggtttccccatgttggccaagctggtcgtgaactcctcacctcaggggatccgcctgcctcagcctcccaatgtgctggggttaaaggcatgagccaccgtgcccagctagccttggggtcttgaaagccacatggtttgtcttatacatggccagcagatgttgggtgcagtttcccaggtatgtacagcaagagatctctaaatcactacaaatctgcatgtacttcggctatgattcaaacaactggggccaggcataatggctcacacctgtaatcccagcactcagggaggccaaggtgagaggatcc

SEQ ID NO: 681473 - DNA, 688 bp, Homo sapiens
ttgagctcaggagttcaagaccagcgtgggcaacatggcaagactccatctctaccaaaaatacaaaaacattagccgggcatggtggtatgcacctgtggtttcagctactagagaggctgaggtgggagaatcgcttgagcctgggggaatggaagttgcagtgagctgagatagcaccactgcactccagcctgggtgacagagcaagaccctatctcaaaaacacacacamaaaataaataaatagataaatacataaataaaataaaaaataaaaagctagacactaataaacacatgcacgtgcacgcacacacataccaaaagtcaggatagtagttgccttcggggaggtagaaagacataaattaaaaatcagtgagattggtcatgtttactttacaactatgtctatttcatgtaacagcagtcaggatagtttaatgcctatgatcatatcaaccaatacattttaatgcatttacaagataatcatatagcaacccaaggaactgaatttcagacggagatagagacaaggatgaaaaacaaaacaaaacaaaacaaaccttaactgactggccgaattctaatcagatgtaggtgaattccgtatggcaggtgccctgtggctagcactttcaccagtgggatgctttcatggatttttcatttccctctacct

SEQ ID NO: 681474 - DNA, 688 bp, Homo sapiens
ttgagctcaggagttcaagaccagcgtgggcaacatggcaagactccatctctaccaaaaatacaaaaacattagccgggcatggtggtatgcacctgtggtttcagctactagagaggctgaggtgggagaatcgcttgagcctgggggaatggaagttgcagtgagctgagatagcaccactgcactccagcctgggtgacagagcaagaccctatctcaaaaacacacacaaaaaataaataaatagataaatacataaataaaataaaaaataaaaagctagacactaataaacacatgcacgtgcacgcacacacataccaaaagtcaggatagtagttgccttcggggaggtagaaagacataaattaaaaatcagtgagattggtcatgtttactttacaactatgtctatttcatgtaacagcagtcaggatagtttaatgcctatgatcatatcaaccaatacattttaatgcatttacaagataatcatatagcaacccaaggaactgaatttcagacggagatagagacaaggatgaaaaacaaaacaaaacaaaacaaaccttaactgactggccraattctaatcagatgtaggtgaattccgtatggcaggtgccctgtggctagcactttcaccagtgggatgctttcatggatttttcatttccctctacct

SEQ ID NO: 681475 - DNA, 616 bp, Homo sapiens
cgcctctgaaataccaccagtgtgtctctgtgcagatactaggtctttggccaggagctaaatcaaaccgctgtgacgccagacagcagttctcctgagggttccccccctatatttccccttcctattttgatttttacagtctgtaaacacattcacagttttctgaaaactgctgtatccagagtaacacccctacgatccatcttccacaggtgctgaagaaggaattattggaggaggctgatgatagagaactcttaactatttttttttccaaaaaggttggagcaaagagaattagggtatgctcttgttcgtattatttgtctcaataacagattttaaggaggtaaatgatttggaagccatctcatggctgttcccttgaccatttgtgagaagaatgtaccacaaacagyagcacccatctgattcccagagctcttctgagtatagcatttggctaaaacaaagcattggatttatattttcctctttggttataaaaattcagtgttgagctagtcacacaaaatatctaaaacattccatttatgcattcttaataattaaaatgttttcagctgctgaaggtcctttagctttttgtcaa

SEQ ID NO: 681476 - DNA, 2085 bp, Homo sapiens
aagctagtagagatagataccctgtaagctttacattatatttaattacttcaaaatgcaatcaaatgaaataaagcaaagcacaagaagttgcaatggtgtgtggcaagtaaaggataggagggaaaaataagatgtttggaggggtggtaacaacagtaaaactcagaaatataagcaaagatagattttcagaagtagaagtccccaccttgaagaggaaaggatgaagaaaatacacaggaagggaaaaaaaaggataggcataagaaaagtgagccaaattaaacagggctcaaattaaaaatataaaaccttgtactgtgccgaggcagagatacaagactcagaaattgcacaggggtataacaaatggcagatctccacatgtctaaaagtatacggacaactgtggaaggcaatattgttgacaaagagaatagatctaggagtcctggggatggtggtaggagaagagacctggctatagaccagggtcatattttaattaaacaacctatttttcttccaaaagaagaagaaaagatcaggatgcaaaatcgtgaaaattaccctggacagtccaacacgcaaatctaccatgagcagtgttttaggaaaaatctaactcattccaatcaaataacagggaaaaaaattgtaccaaacattgttattacatataaagataaatagtgaaaattttccacagttaaacgaactcatcagtcaaatgttgccagaaagcaaataaaagtgctggcaggaaaaacaaacaaacaaaacaaaaccttcataatgcaattgcagctataaacacacacacacacacacacacacacacacacacacagagccaaaatacaagaagtcaagaagaaaatgaacaaacaaaaggagaaaatggccaactaaaggggtgaaatcagaaactgtaaactcaaaaaaggtatggaggaaaaatatttaggaataaagattaactcataaagttaacaagggaggctggaatcaaagaaagcacagtaagggtcatagtggataaacttgagaaactgaagcaaaaagagaaagaaggaaaagataggaaaaaaattatttctatcaggagtgagcaaagtataccttgtgggctaaattcagcttgcagcctctctttgtatggtcttatatctaaataacttttatttataattttcaatgtgttttttaattaaaaaaaaaagtacaggtgacaaagaccatatgttgcctggaaaacctgatttagtatctggccctttatttagtatctggccctttacagaacatgttttctggcccctcacctatgcaatattgaagaaaattaaagcagatccaatgtagatacaattggagcccttgaagaataaaacaacacagcagactagaacacctacctaaaaatgaaaatcaaatcttctaatggaaaaataatttgagtgatattaatctttttatagtaacatttcataacagaagaaagtgtaatataacttcaagatactcaagatatagactcttaatgaagcattttatatttacttcttattcaaacataaataatgtaggcagttagttttsagcatgcataaggtcaataaatttggttcctatggacttttcttaaagaaactgttaacaatttaatttcaggccccccaaaagtgaagagagaacatctcagcaaaaataattcaagacaaaaagaaaatagtatatatgcataaaataagaaatggcaaggggaaaataactatagacacagaagacttttttttttttaaattttgggactactttgtacagaaaatttcctggaaaatataagaaacaaaaacatccaaataattttccaaaagaattctactaaattttgacaagcagatagttttaaacgttatttaaaattatatagagtgtaggaaaaaaacaatggcaactattaaatatgcttaatgattatgcacactcacataaacacacacaaactatatagtgatgtctcgaactatgtaatgatcttccttgctcttatctacctgagtgggaataactgacata

SEQ ID NO: 681477 - DNA, 623 bp, Homo sapiens
tactttaatattaacaacaaaagagatatgtaagatacttagggatagggatacttaatatcctaaagatgtcggttttacctcaattaatttattagtgttgtaattccaaatacaataacaaaagacgtgtcttctgaaatcatacaagctgattttttcaacattattaaactataattgaggggaagtaaactacaaatattttaattgctcaattggatgaattcygaaatacatatacatatgaaaccatcactaccatcaagatacgcttttttccaaaagtgtctttgtattcacttgcaattcatctcttctagtccccaatcccagaaagccatttatttttatttgtttttgtattttttgcatattttagagttttaaataaatggagtcatacagtttatactatttttgtctaactttatcataattattttgagattcatacttgtaaaatctatcaataggtcatccattttcaatgctgagtagtattccattgtgtgggtatatcataatttgtttatctgttaacctattgatagacatattaattacttccagttattggctactacaaatagagctgctattcacatttctgtgtaactttt

SEQ ID NO: 681478 - DNA, 615 bp, Homo sapiens
taagtccatattgtctaatgcaggacttggtatatcataaagttacaatattgttcaattaattgaatgggatatgaaattgaagagtaaatattaattctgagattaaaattaacctaaaattagaatgttttccctgctccataccttatttattttgtaccagtcacatgyctgttactttgaaaaatttttacagaaatatacatcaatcagcatcatcccaacttgcatatgaaaagtaaaaaactaaatttgtgaaccagatgtttatctattcaacgtcaaacatctggttgtctacataattagcagtgattggttaattttgttttaatttttcatcagggtgtttagtagaatgtagaaacaacttttatgtttaatataataaaacatgttttatacacacataaaagaaaaatatacttatattaagtaaaatatcagctggcctcattgtctttttatattttcacttctataatttttttctctcaaggtgttttacatagaatacatccacaccctcttcacacacctataaattagtcattttcaaccacattttacaaatgaggaggttagagaaatcgtcccagggcataaaataac

SEQ ID NO: 681479 - DNA, 615 bp, Homo sapiens
taagtccatattgtctaatgcaggacttggtatatcataaagttacaatattgttcaattaattgaatgggatatgaaattgaagagtaaatattaattctgagattaaaattaacctaaaattagaatgttttccctgctccataccttatttattttgtaccagtcacatgcctgttactttgaaaaatttttacagaaatatacatcaatcagcatcatcccaacttgcatatgaaaagtaaaaaactaaatttgtgaaccagatgtttatctattcaacgtcaaacatctggttgtytacataattagcagtgattggttaattttgttttaatttttcatcagggtgtttagtagaatgtagaaacaacttttatgtttaatataataaaacatgttttatacacacataaaagaaaaatatacttatattaagtaaaatatcagctggcctcattgtctttttatattttcacttctataatttttttctctcaaggtgttttacatagaatacatccacaccctcttcacacacctataaattagtcattttcaaccacattttacaaatgaggaggttagagaaatcgtcccagggcataaaataac

SEQ ID NO: 681480 - DNA, 1748 bp, Homo sapiens
caaagtcacatcttacatggcagcaggcaagagaacgtgtacagaggaactgcccctttgtaaaaccatcacatcttgtgagatttattcaatatcatgagaaaagcacaagaaaaaccagcccccatgattcaattacctcccatggggtccctgccatgacatgtggtgattataggagctacaattcaagatgagatttgggtggacaatagccaaaccatatcaacatggaaggtcttattttttttttaagttttggatgtgattttcaaagctacaaacattaattaaggtcatattgtacatacatttttgtggcttctatcaattttaataccagtagccacaggacataatttaaactcttgcttcatttaccttacctatattctgtttgtctcaaagcttaatgagaaccaattatattatttagtcatctttaattataacatacataaatgccatttatacttatttaaccttatctagctacttagtatkaaattagaaaagcacaaaatgattatttaaaaaatgagtatgttccaaatacagctttatctttattctaagttgagattactttcttaattcccactacactctgattataatttaactttttctaatagctgcattcactatgtcagaaaacattactgatctaggttagagagaagattggtaggatgtaggaaatgcacagctctgaccctttaggatagccctaaggttttctagtcagcaacttcctgaagtaggagaaacagaaactaatgatgaagacacgtattttaatgacgagcactttaccatttatgccctcttcatcacctctctagtgtgggccttctgtatcacttgcctggaccactgtaatgtgtcctaatggggccccctaacttcagccactgccctcccaagcctacccacacaaggttgttccagctacctttatgtttcattaaattatacagataaccataataacctattccttgaaataatttaatggctctaaagcctttaaatgcaaagggactagaatctgcctcctcagcctagcacttcaagcccagcacagtctgagtaaatagttctaaaaattattcaactcctatcttacttttctctcttatttcttctgatgcacacttgatatttccagcacaatagaataatttctagtcatcaaacctaccttggctctgcagcctaacaccttttatgcctgctctcccttcctcttgaattacccaaactatcattcccacatctgtctagccattccaagtggagctctgtattctccaaatttataaaaatttcccacgtcttctttgagttctacagacctcaagaatgactgttttatttctctctagcacaatgaagagcaacacagatttcagattaaacaattatagtagatattcactgcatatgggaatttgtgaactgaaagtattattaaccacagattattcctcttcaaaacattttgtaaaatggatattataatttatattttacacaaaggaaagttgagatttcagtaaagctgaaaaaccttttccggaaatacacagaagtttattttctaaataataattgccataatttttgtgacatttataaacaagggtaaatgaataagtgttcacaaatgcaccatatgatgaaaatctaaattaagcctagttcatgtgaagaaaatacaaaaggatgaagtttttgttaactgt

SEQ ID NO: 681481 - DNA, 1748 bp, Homo sapiens
caaagtcacatcttacatggcagcaggcaagagaacgtgtacagaggaactgcccctttgtaaaaccatcacatcttgtgagatttattcaatatcatgagaaaagcacaagaaaaaccagcccccatgattcaattacctcccatggggtccctgccatgacatgtggtgattataggagctacaattcaagatgagatttgggtggacaatagccaaaccatatcaacatggaaggtcttattttttttttaagttttggatgtgattttcaaagctacaaacattaattaaggtcatattgtacatacatttttgtggcttctatcaattttaataccagtagccacaggacataatttaaactcttgcttcatttaccttacctatattctgtttgtctcaaagcttaatgagaaccaattatattatttagtcatctttaattataacatacataaatgccatttatacttatttaaccttatctagctacttagtatgaaattagaaaagcacaaaatgattatttaaaaaatgagtatgttccaaatacagctttatctttattctaagttgagattactttcttaattcccactacactctgattataatttaactttttctaatagctgcattcactatgtcagaaaacattactgatctaggttagagagaagattggtaggatgtaggaaatgcacagctctgaccctttaggatagccctaaggttttctagtcagcaacttcctgaagtaggagaaacagaaactaatgatgaagacacgtattttaatgacgagcactttaccatttatgccctcttcatcacctctctagtgtgggccttctgtatcacttgcctggrccactgtaatgtgtcctaatggggccccctaacttcagccactgccctcccaagcctacccacacaaggttgttccagctacctttatgtttcattaaattatacagataaccataataacctattccttgaaataatttaatggctctaaagcctttaaatgcaaagggactagaatctgcctcctcagcctagcacttcaagcccagcacagtctgagtaaatagttctaaaaattattcaactcctatcttacttttctctcttatttcttctgatgcacacttgatatttccagcacaatagaataatttctagtcatcaaacctaccttggctctgcagcctaacaccttttatgcctgctctcccttcctcttgaattacccaaactatcattcccacatctgtctagccattccaagtggagctctgtattctccaaatttataaaaatttcccacgtcttctttgagttctacagacctcaagaatgactgttttatttctctctagcacaatgaagagcaacacagatttcagattaaacaattatagtagatattcactgcatatgggaatttgtgaactgaaagtattattaaccacagattattcctcttcaaaacattttgtaaaatggatattataatttatattttacacaaaggaaagttgagatttcagtaaagctgaaaaaccttttccggaaatacacagaagtttattttctaaataataattgccataatttttgtgacatttataaacaagggtaaatgaataagtgttcacaaatgcaccatatgatgaaaatctaaattaagcctagttcatgtgaagaaaatacaaaaggatgaagtttttgttaactgt

SEQ ID NO: 681482 - DNA, 1173 bp, Homo sapiens
ttattactattctatcctttattattttatttcacaaaaaaagcctgaaaattcagccagtgttagaagcattccaatttatttgattggacaataaatgattctatggctgatattttaaagaccagcacaaatatcacaagctacaaccagctcactcctgataagcagaataacattttcttaatttgtgcaagccactgaaaaaactgaaagatgccaatttagaaatcatttcaatcttgtagctgcagagtatattaaaatatatggaacttggaatcaaataagagcatttgtgaataataaaggtttggaatatcctaaggtaggaaacaccttattaaaataaggattcctctctacaaatttaagcaatgaaaaaaaacaaaaaatataaaacaaagtgataatagattggattgttttaagccaaagcttaacaattaaccctgtgtctcaaagcaaagcattttgtaaaggctagccaccagtaatgtattatgtcaagtcctagaaaagcattaaactaattcaaatccttggcatttggccttcttaattaaacatttcatttattcatatcccaattaagtagctttaaccacctctctgggtattattcatcctttaataatgatacaagaagagcagagcaaggaagattcttattcatagtaataaatatacacacatgtgacgtctttcattaatgaatgccagtagtaatgttcatcactgatgtagggtacacagttaatgctgatctatgttaagtttcattttggtcaaggatttacataaagtyccaggagtgccttctctttcagagaagaaactgtttttcattcacggcagtattttcagcctccagcatggaaaagtggttcacatattgacattgctgtcagagtcagaacacagaaggtgagtcccgtgacagaatacttctgttaataaaggtccctacatcatgagttttttagtataaccccaaatatatttatatgcatgaaagcctaatccaaatattagtgaggttgcagaattaaagttcattcaccatttttccctttagtggcccatgtaagcctatctttagaacagttattctcaaccagaagcaattttgccctcccaggggacatttggcaatatttggagacattttgg

SEQ ID NO: 681483 - DNA, 2842 bp, Homo sapiens
gcattaactacagagaacaacctctcatttctttttcccttctgcctcccccatcctgtctctcatagctcactactttctctatttcccattttttttacatttctaagaaaattggcaaaaccttgtttttaataatccacagaattaaaaaaattatagttgggtatatatctagtcacaataagctaaataacaaattcaaaataaatagcagtttccttttgctcacttggaagctaagaatgattgtgtaaaggaaacatttgagtaggaattcactgcctgctgctgaaagccaggcttgctgtaaacatgtacacaatttaacaaatgaagatatatttgtccaaacatgacctctacaggggtctcacaattctgctgttcccatttcatttccttgagaagtaaaagttactttaaaacctatagacagatcctcatcttaagaacactgcttgatttctgctctccatactccacagaaatattgaagacctaaactgattatgaaaacctcagttaccatatttctaaatatattgcattattaacagatgtcacctggaaaatagttcaaacatttgtggtctccttatttttaagttgctatcaagcttaatatatgcctactgatgctaaatctgcagatataagcaaaacctccacaaaagcttaaaacaactatttgaaacaaccacaaaaatatggaaactttgtaaataaaacttttgtgagataaaaaaaaatacaaaaatctgctccctcaccccagaacccagggaaatgctattcatgaaaaaggaaagaaaatacttcctcactttacccttgtcagggagacaaaattttacctctaccctcctagggttttagacagaacctaataattaaattgacataagtcagattaaccagagaaaagcatagaaatttaatataaattttatgtaatacgggagccctaataaggaaaagaagacccaaaaattgacaaaacctaaaagctaatatattaggttgaaaacagagaggcaattgtggaaaagtaactaaattctgtggggaagctaaaagatgacaagaattattttgacaaggtctgtttgcacaaaattctctgggctatgactccccactgaagaatgtttacctcctcatggtgtaagggaactttcacaagggagtttttaatctcctgttttcagaaaaggggagattaggacgcctctcatgcatttgctgtttttcaagtgcatttagatcaaagttacctttacgccaaagtggcatatttcggggtggcatattttgccacacttacccttgttccctcagtcgggtggtattgagaaatgtgtaacatgtgtccagattttcaatatgcactattccacttaccgcagctactctgggagagcctgagggaacacatcagcagatgagtcacagctgtgagctgcctggcctatgccagcatgtaacaggctgtctcacagggacaggagtgaactgtggaggycctggaggctccccagcttcccacaaaacaccaaacatttcagattcagaactcaaagacctgtgccccatcaggggctagggaatccgtattcccaaaataacaatagaagctgataaaaaccaaagttaatggacaataaagatacttcctcatacatgcacaaacattgctaatttcatggctcccaaaagggagacttaaaaaactgcaaattccagtgttttcgacaacaagtagtggaaaacaaaaatcaccacactcatgtcctactatcttattagaggaagagaggaaaagttgaagtctgtatatcattcatctgaatatcaatgtggaaagaaaactgcctttttaagtcttctactagcaaattttatcagaaagtttgtacctggtctaggaaagtagccattttgacttatgataacctcataatgttacactaggaaagatggccaagcagcgaacaggcctaccttctcacctagtacaatcatctgtctgcacacttctttgagagcatggagcaacgcatgctcttctatagcagtaggggatggtatttaaaaatatataagctccaaatggataaattaaagagcaaatattgagatttcaaattacttgcccaatatcatagtatcagaataagactcaaaccaaagctgcatgttgctaaagctcattctcttattctctataacttgctgtatcacatctatacatcccacctgaagtgactgcaagtgaaaaaacactagaagagtatttttttttctaaatagaagggaaaagttagatgtttcattgtgggttgaaccagaaactaaattacattaacctttataaagcagaattttcactggacttactatttaaacagctttaaatcttggtccatagtgttcaagatcacaacaataacaaatattaaataataaatgtcagactttattactaccataaaattaaattagaaattaatttttaagtgcttatataacatttagaaacaaatataaacttctattactcagattaattaggatattacaatgaaaacaataacacatttaaacctaaagacttgcatagtattataagtttcctataacaaactggctaaggtcttaatcagaggtaatataaaatcctaaatgtatttattacataataagaaatattaaaattggtcaaatcttcaactcagtgagtcaaaataaaattaacaaaataaacctagaaagaaatagaaatacttaaagcaaaaccagaaatcaatgaaaatacagaaaaacactagagaagattaat

SEQ ID NO: 681484 - DNA, 1375 bp, Homo sapiens
ttataattgaatttttggtatagtctagagtctggaaaatcagtgtatcccaactaatcttttcctcagcatgatctgttccagttcattgctaaccatgttcaaaagtctgtgttttttaaacacaaatttgaacaaamctcttaaacagccttctctaaccagtcccttgggtgatttttccatttcagtgacagaatagaaaatgcaattttatcttggaaaaaaatgataaagtgacagtttttatgataatacagatacgcacattttcaagcaataggctgaaaagataatgtgctttaggcaattatttctagaatacatctcattgaaatttttcacctgctccacaaacacacttaagttgttaccatggtatctctttgaaagtctctgtcatttcaatattccaagaaattggaattacaattcttatgtaattggaattacataagacaattacatattgtcttatgtaattactgatagcaaccccttttactctcaaaagagtcttggttggtctgtgtattaggtggtaaggtggtattaggtctaggtggtatggtggtcctatttagagtcagactaagatttcttgatatatttgaccatggaatccatgtgatattcagtcaagaggtgttcttggctgagttatcttttcaaaattaatatgttcagtaaactctagcccctcagaataggattgtatttggagatagtcttttaaaagccaatgaagttgaaatgaaggcattggggcatttcccaatcaaccatgactggtgttctaataaaaagagattaggatacagacagacttgggggggccatgtgaagcacgaacaaaatatggttatctacaaggccaggagagagccccagaaagaaaccacccctgccaataccttcatcttgaacttatagcctccagaattttgaagacataaatttctattgttttaagcatctcactcagtattgttctgttatggcaaccctagcaaactaatacaaaaacaaacaaacaaacagcttctttgactttatcatataaagtacagaagaaagatttacaatttttcagcatgctcctattttcaccatcttctagaagaaaaacaaagaaatgctgactgtagcaactattagatgtttcactagtctctgttcctgattaggtgtaagtaacctgttttggttaatgctttgatattcatttggacaagttagtataacgagtaagagcctagcaaactacgatgagagtggtgtatggaaaccctgcctaataattcagttctgttcttctccttcacagaacaaactgaactttcacagcttttacactagtaaagcaattaatgag

SEQ ID NO: 681485 - DNA, 1375 bp, Homo sapiens
ttataattgaatttttggtatagtctagagtctggaaaatcagtgtatcccaactaatcttttcctcagcatgatctgttccagttcattgctaaccatgttcaaaagtctgtgttttttaaacacaaatttgaacaaacctcttaaacagccttctctaaccagtcccttgggtgatttttccatttcagtgacagaatagaaaatgcaattttatcttggaaaaaaatgataaagtgacagtttttatgataatacagatacgcacattttcaagcaataggctgaaaagataatgtgctttaggcaattatttctagaatacatctcattgaaatttttcacctgctccacaaacacacttaagttgttaccatggtatctctttgaaagtctctgtcatttcaatattccaagaaattggaattacaattcttatgtaattggaattacataagacaattacatattgtcttatgtaattactgatagcaaccccttttactctcaaaagagtcttggttggtctgtgtattaggtggtaaggtggtattaggtctaggtggtatggtggtcctatttagagtcagactaagatttcttgatatatttgaccatggaatccatgtgatattcagtcaagaggtgttcttggctgagttatcttttcaaaattaatatgttcagtaaactctagcccctcagaataggattgtatttggagatagtcttttaaaagccaatgaagttgaaatgaaggcattggggcatttcccaatcaaccatgactggtgttctaataaaaagagattaggatacagacagacttgggggggccatgtgaagcacgaacaaaatatggttatctacaaggccaggagagagccccagaaagaaaccacccctgccaataccttcatcttgaacttatagcctccagaattttgaagacataaatttctattgttttaagcatctcactcagtattgttctgttatggcaaccctagcaaactaatacaaaaacaaacaaacaaacagcttctttgactttatcatataaagtacagaagaaagatttacaatttttcagcatgctcctattttcaccatcttctagaagaaaaacaaagaaatgctgactgtagcaactattagatgtttcactagtctctgttcctgattaggtgtaagtaacctgttttggttaatgctttgatattcatttggacaagttagtataacgagtaagagcctagcaaactacgatgagagtggtgtakggaaaccctgcctaataattcagttctgttcttctccttcacagaacaaactgaactttcacagcttttacactagtaaagcaattaatgag

SEQ ID NO: 681486 - DNA, 2308 bp, Homo sapiens
tgagatgtactcatttctccgggtatctctcatatataatgacgtatacatgctactaacattctttgtttttctctcattaatcttttgtctcatattttgcaacaagaggtcccagctaagactcactaagcaagagtagagagaaaaacatttttccttcctacacatccaaatgcattagtaccttatatatggtaaagcactcactataaatcaaattgtaaaatgagtcagtaaattcatttggactaatattcttttttgctccaaaaagcctagaatattcacaggaatttcatttctttaaaaaaaaatgtatgttatatagttatctatttttctcccaagagcaatgtcaagtccaggccatttttcttttttaattcaagtattcagtaattggaaaaaaaaaaaaacaaaacaaaaaaaacagtgtgcttcacactggctttagcacataagttactcttgataatcatacatttcctttctctctccaggggaggctctcttgaagaatgaatcacattcctgaacttccctgtttattttctatataccactactctatgcttgcctcatctccttggttcttatttcattcctttggatgaggttgtagtgggtttttgtacttaccatatactttcttgcaaaagcaatgatataaacagcagttgtattctcaagcaagcccacaaaaacctataataaacctgaaatactacatatttgcaatagcaattcttctgctattgttcattgcaagtcatttagcaagtcatttaacctctgtgggcctcaatttcctcttctataaaattagggggctgaactacatgatatccatggccctttcagccctaaccatctgtgatgacatttcaactctattataatttagatggtggaataaactgagagcccaagcatcatctctaacattatttcaagtttcattatytgaaactgtgattcgcttcattttgataaatgaggcatgagccaaattaaaaatttggcacctaacagtctggttttttctttgtttgtttgtttttagttgcctctgtctatataaagcttaggtgagtgaagtataggtagatcaaaaggctactaatactaagtaccttgggcagattcaaatttaagtccatagtacgaaaagcacaatgctcatgtaagcacagactttgaggcaaacctgagttcaaggttctgtgtcaccacttataagctccgtgaccttgggcaagtttttaatctcatgccttgtctataaaaggaggataatgacagcacttactgaagagggttttcattagaattaaacagggaagtaaatttaaagtaactgatgaacactcagtaaactatagctatcattattatttaagataatacttaagaatttaccttctggttaagttaaaacacacagatactcgcacacacacacactaagtccaccatattttaacctattgacttttccttcaaacttacgcactacaacatgtttaatacaaatgacttattttgacatttgtcttagattcaaattttcttaagagtgttgcaggtaggtagacaggcacgagcacacaggagagagctctccctgcacccactatgagcgtcaggtgatatttcggcaattagcattgccgctctaaaaataataattgggcagtcagggagagacaaatctcctgatggtccacacctgttaacattcgtgttaattgaacgcagaccccagggaggagcagcttcttgggcatgcacgttaagaggcaaaatggggaagtatgaggttctgggggcacacagaaaaaggaaaaaagcctcagatgggcaggcatgtaacactccctaaacacactgcgctgcccatttccaaagggtaaggaaagcactgcacagcagaaagcgcatcctaggggaagaatcatgggaaaagaggcgagcctatgaagtcccaggatcaagattgaataaaagggcttttggccgtctttcctttttctctctttgaccttcaggctcccacttggatctctcccaagcaaattttcctttctttcctattctaaaatcttttaaaataaacctcctttcctgctttggaacttgcctaggtctcgtttcctgcttcatgcccctccgtcgaattctttcttttggggaggcaagggctgaaggtgctgtggactcatatggatatgctgccagtaacctggagtaactgaaatacattccaccactaacaagagtaaaagaataaacaaaaattacttat

SEQ ID NO: 681487 - DNA, 2308 bp, Homo sapiens
tgagatgtactcatttctccgggtatctctcatatataatgacgtatacatgctactaacattctttgtttttctctcattaatcttttgtctcatattttgcaacaagaggtcccagctaagactcactaagcaagagtagagagaaaaacatttttccttcctacacatccaaatgcattagtaccttatatatggtaaagcactcactataaatcaaattgtaaaatgagtcagtaaattcatttggactaatattcttttttgctccaaaaagcctagaatattcacaggaatttcatttctttaaaaaaaaatgtatgttatatagttatctatttttctcccaagagcaatgtcaagtccaggccatttttcttttttaattcaagtattcagtaattggaaaaaaaaaaaaacaaaacaaaaaaaacagtgtgcttcacactggctttagcacataagttactcttgataatcatacatttcctttctctctccaggggaggctctcttgaagaatgaatcacattcctgaacttccctgtttattttctatataccactactctatgcttgcctcatctccttggttcttatttcattcctttggatgaggttgtagtgggtttttgtacttaccatatactttcttgcaaaagcaatgatataaacagcagttgtattctcaagcaagcccacaaaaacctataataaacctgaaatactacatatttgcaatagcaattcttctgctattgttcattgcaagtcatttagcaagtcatttaacctctgtgggcctcaatttcctcttctataaaattagggggctgaactacatgatatccatggccctttcagccctaaccatctgtgatgacatttcaactctattataatttagatggtggaataaactgagagcccaagcatcatctctaacattatttcaagtttcattatttgaaactgtgattcgcttcattttgataaatgaggcatgagccaaattaaaaatttggcacctaacagtctggttttttctttgtttgtttgtttttagttgcctctgtctatataaagcttaggtgagtgaagtataggtagatcaaaaggctactaatactaagtaccttgggcagattcaaatttaagtccatagtacgaaaagcacaatgctcatgtaagcacagactttgaggcaaacctgagttcaaggttctgtgtcaccacttataagctcygtgaccttgggcaagtttttaatctcatgccttgtctataaaaggaggataatgacagcacttactgaagagggttttcattagaattaaacagggaagtaaatttaaagtaactgatgaacactcagtaaactatagctatcattattatttaagataatacttaagaatttaccttctggttaagttaaaacacacagatactcgcacacacacacactaagtccaccatattttaacctattgacttttccttcaaacttacgcactacaacatgtttaatacaaatgacttattttgacatttgtcttagattcaaattttcttaagagtgttgcaggtaggtagacaggcacgagcacacaggagagagctctccctgcacccactatgagcgtcaggtgatatttcggcaattagcattgccgctctaaaaataataattgggcagtcagggagagacaaatctcctgatggtccacacctgttaacattcgtgttaattgaacgcagaccccagggaggagcagcttcttgggcatgcacgttaagaggcaaaatggggaagtatgaggttctgggggcacacagaaaaaggaaaaaagcctcagatgggcaggcatgtaacactccctaaacacactgcgctgcccatttccaaagggtaaggaaagcactgcacagcagaaagcgcatcctaggggaagaatcatgggaaaagaggcgagcctatgaagtcccaggatcaagattgaataaaagggcttttggccgtctttcctttttctctctttgaccttcaggctcccacttggatctctcccaagcaaattttcctttctttcctattctaaaatcttttaaaataaacctcctttcctgctttggaacttgcctaggtctcgtttcctgcttcatgcccctccgtcgaattctttcttttggggaggcaagggctgaaggtgctgtggactcatatggatatgctgccagtaacctggagtaactgaaatacattccaccactaacaagagtaaaagaataaacaaaaattacttat

SEQ ID NO: 681488 - DNA, 2308 bp, Homo sapiens
tgagatgtactcatttctccgggtatctctcatatataatgacgtatacatgctactaacattctttgtttttctctcattaatcttttgtctcatattttgcaacaagaggtcccagctaagactcactaagcaagagtagagagaaaaacatttttccttcctacacatccaaatgcattagtaccttatatatggtaaagcactcactataaatcaaattgtaaaatgagtcagtaaattcatttggactaatattcttttttgctccaaaaagcctagaatattcacaggaatttcatttctttaaaaaaaaatgtatgttatatagttatctatttttctcccaagagcaatgtcaagtccaggccatttttcttttttaattcaagtattcagtaattggaaaaaaaaaaaaacaaaacaaaaaaaacagtgtgcttcacactggctttagcacataagttactcttgataatcatacatttcctttctctctccaggggaggctctcttgaagaatgaatcacattcctgaacttccctgtttattttctatataccactactctatgcttgcctcatctccttggttcttatttcattcctttggatgaggttgtagtgggtttttgtacttaccatatactttcttgcaaaagcaatgatataaacagcagttgtattctcaagcaagcccacaaaaacctataataaacctgaaatactacatatttgcaatagcaattcttctgctattgttcattgcaagtcatttagcaagtcatttaacctctgtgggcctcaatttcctcttctataaaattagggggctgaactacatgatatccatggccctttcagccctaaccatctgtgatgacatttcaactctattataatttagatggtggaataaactgagagcccaagcatcatctctaacattatttcaagtttcattatttgaaactgtgattcgcttcattttgataaatgaggcatgagccaaattaaaaatttggcacctaacagtctggttttttctttgtttgtttgtttttagttgcctctgtctatataaagcttaggtgagtgaagtataggtagatcaaaaggctactaatactaagtaccttgggcagattcaaatttaagtccatagtacgaaaagcacaatgctcatgtaagcacagactttgaggcaaacctgagttcaaggttctgtgtcaccacttataagctccgtgaccttgggcaagtttttaatctcatgccttgtctataaaaggaggataatgacagcacttactgaagagggttttcattagaattaaacagggaagtaaatttaaagtaactgatgaacactcagtaaactatagctatcattattatttaagataatacttaagaatttaccttctggttaagttaaaacacacagatacwcgcacacacacacactaagtccaccatattttaacctattgacttttccttcaaacttacgcactacaacatgtttaatacaaatgacttattttgacatttgtcttagattcaaattttcttaagagtgttgcaggtaggtagacaggcacgagcacacaggagagagctctccctgcacccactatgagcgtcaggtgatatttcggcaattagcattgccgctctaaaaataataattgggcagtcagggagagacaaatctcctgatggtccacacctgttaacattcgtgttaattgaacgcagaccccagggaggagcagcttcttgggcatgcacgttaagaggcaaaatggggaagtatgaggttctgggggcacacagaaaaaggaaaaaagcctcagatgggcaggcatgtaacactccctaaacacactgcgctgcccatttccaaagggtaaggaaagcactgcacagcagaaagcgcatcctaggggaagaatcatgggaaaagaggcgagcctatgaagtcccaggatcaagattgaataaaagggcttttggccgtctttcctttttctctctttgaccttcaggctcccacttggatctctcccaagcaaattttcctttctttcctattctaaaatcttttaaaataaacctcctttcctgctttggaacttgcctaggtctcgtttcctgcttcatgcccctccgtcgaattctttcttttggggaggcaagggctgaaggtgctgtggactcatatggatatgctgccagtaacctggagtaactgaaatacattccaccactaacaagagtaaaagaataaacaaaaattacttat

SEQ ID NO: 681489 - DNA, 3028 bp, Homo sapiens
caatgcacatgtgtcaagagcaggaagccagagtgctgagtcccacaatttctgatatgagctggtacaaggacagaaagcacacagaatggcaaatgcaagacgtgcatttaacctgcttgtgggatttgggttcatccacaaggcacagggatttcaataagctctagtaggtgatggtacattaatatatttttcaactgaataagaattcacaataggagatttcacagtattaccatttaaaagtaatagatttacccatgcctctctaaaaatagcctgcagatagttcacactattagcctttcttaagggttatgtcttgcagacatgcattttaggtacgtcaaatctaccttcccatatgtggcattccttttatgtgatggagatcctaaggatgtagaaatctgtcagtcagaaactggagagttattgatacaaagatctgatcatactctatatgactacttgattaagttcttgtttaaggtgagtgattgtaaaaggcaagaatagaaagatagagtccatgttggggtgagtggtagcaataaacgttgagatgcttgtttccatctgaacaccccttcgccaatttctgctccagaggtacatcagagcaagaactgcattaaaaagtgagtcctacaagaaagctgccaaattatgttcctgagaagtgagagttacagctacagtcaccagtcaaccagacagtgcatgaactctttgtatcctttatggactaaattgtatcacccaaaatttatagactgaagccatgtgatagttaatactgagtgtcaacgtgattggatcaaagaatacaaagtgttgatcctaggtgtgtctgtgaggatgttggcaaaggagattaacatttgagtcagggctgagaaaggcagcccacccttaatctgggtgggcacaacctaatcagcttccagcaaatataaagcaggcaggaaaatgtaaaaaagcgagactggcctagcctcccagcctacatctttctccaatgctggatgcttcctgccccttgaacaccagactccaagttcttgagttttgggactctggctggctctccttgctcctcagcttacagactgcctgttgtgggactttgtgatcatgtaagttaatacttaataaactcacctatatatgtgtgtgtgtgtgtgtgtgtatgtgtgtgtgtgataagttttttccctctagagaaccctaatacagccatcacctccaatacctaaaggcagggcttttaaagagataattaaagataaataaagtcataaatatggggccctattccaataggattggtgcacttagaagaaggtatcagagtacacactcacagagaaaagggaatgtgaggacacagagagaagacagccatatgcaagccaaggagagaatcctcacgagaaaccaaactaccaacagcttgatttggactccaggctccagaactgtgaacaataaagatgtgaacttaggaggttattccacttctgaggaataaatttctattgtttaagccacccagcctgtggtattttgttatggcagatccagcagactaatgcatactcctgtctatgccaaaatggtgctttggttgctccagaaactacctaaattcctggctcttcttttcactgccacttggcccgttttcttcccttctaattgcctgctaactcttcccactgtctctcctccacctaagcagccctcactccatgcctaccttcccaactcagtgcttatcttgtctactaagtttggtctgtagatgaagatcagcaaggctttgagaggaactcagagacccaatggttatttcctagtgccccagccttcctcaactggggatgactttcacattcagtgaccacaaatcctggtgaaatggatgtgtcctcaccatatctgtccatgtaggtcagatcgtcttcaaacaataatagctaatatttattaagttatttctttgtgtaccaaattattttcagagctttacatgtattatctcagtaaatccttataatcactccacaaggtaagtgttcgatacatgtgaaaaataaggcacaaagaagataagtaacttgcccgaggtcacacaagtaggaaactatctgaccttccagcatattgtttccagaatctgaacccagtctggaaaggtctcaatcgagtcaaaatctagattgtaaccaccactctttacttagtgtagaaagatgtctgtgatgaacagaaatggaaataaattttggagttaaaaggcttaacttagaatagcattagtctttattctttgtcaaacctttgggaaaacacttaactttagttacgtcattttttatcatggaaattgctatctgagaaggcatgcatgagtagtaagtgaaataacatgtgggaaatactttgtaaagactaaaacacaaatctgattggattattagaaagtattgtgctaaagttaaagcaatatgcaatctggaattctaagaccaggttttgagtttgctcttttttctaaatttcatcgttcataaaattttcactaatgttcttgttatctaatgccatgtaccaaactatatagtatgacttagtgtcttaaccattttaatttactagtgattttaggggttgggatttaggaaaatttcagctaggaaattggtctgggatccatgtggtgtcatctaragcatctggggctgaaggatagacttccaaaacaggttcttcgtgatggttaatattgagtgtcaacttgattggattgaaggatgcaaagtattgttcctgggtgtgtctgtgagggtgttgccaaaggatattaacacttgggtcagtggactgagagaggcagacccaccctcaatctgggtggaaaccatctaatcagctgccagtgcaggtagaatagagcaggcagaagaacatggaaagactagacttgctgagtcttctggccttcatctttctcctttgc

SEQ ID NO: 681490 - DNA, 626 bp, Homo sapiens
tatattcttttttaaaatgctttttaaaataagtacattgatttcattaccctatgacactgccacctgctacttaaaaatgtagccttaaaactttatgcagagtgtgctaaactccttgctcctaccaccttctcccacgactccaacataagaaaatgggtaaaatctagcaagtctattctaagtacagaccttggcataaatgtgagacaccccaggttcctctgaagtccctgcaacattgtgattattccaactggcagacaggatacatttgctgaaaggtttctccakccagactacagaagcagaaaccttttctgttgccttatcagtgatattgctaaattctgcacttgacaatgtggaccaggtttactactgctccacaagccaattcttccaagaaataaaacaggattccaatataataggattctaataccagacccttacattttttgaatacttttcatacacattattccgttgcattctccccctggcagtctgttagaaaagtagagaagctgctcttcttcctttcactaatgaaggaattggagctcagaggggttacgtggcttgccagaaacaacacggctaatgaagaatacaacgca

SEQ ID NO: 681491 - DNA, 626 bp, Homo sapiens
tatattcttttttaaaatgctttttaaaataagtacattgatttcattaccctatgacactgccacctgctacttaaaaatgtagccttaaaactttatgcagagtgtgctaaactccttgctcctaccaccttctcccacgactccaacataagaaaatgggtaaaatctagcaagtctattctaagtacagaccttggcataaatgtgagacaccccaggttcctctgaagtccctgcaacattgtgattattccaactggcagacaggatacatttgctgaaaggtttctccagccagactacagaagcagaaaccttttctgttgccttatcagtgatattgctaaattctgcacttgacaatgtggaccaggtttactactgctccacaagccaattcttccaagaaataaaacaggattccartataataggattctaataccagacccttacattttttgaatacttttcatacacattattccgttgcattctccccctggcagtctgttagaaaagtagagaagctgctcttcttcctttcactaatgaaggaattggagctcagaggggttacgtggcttgccagaaacaacacggctaatgaagaatacaacgca

SEQ ID NO: 681492 - DNA, 651 bp, Homo sapiens
cccaagtagctgggtttacaggtgcccaccaccacgcccagctaattttttgtatttttagtagagacggggtttcaccatgttggccaggctggtctcgaactcctgacctcaggcgatccaccctccttggcctcccaaagtgctgggattacaggtgtgagccactgcgcccagcctaggtttttatatataaattgtgaacagtcataaaaataatttgtcctacacaagtttttgtgcctactatagactttcacactgatagaaaaaaaaatgcttacaaagcctttttctcagaggatctcatttggcagttttgaaatttacttttccacaaatctttatcagtggtaagaatgtttctgaggctgtgctgtcaatcacttatgtcaccactttccttcccacttcattaggaaccacactgtactttatttcttaaaggagaatctgaaactgatttggggaagaaggacttttagtccagagtatgcagcattgtataaaatatgtattgatataaagcctaaaaatacacacagtaggtacagcattcacatacgcaattatttagcaggttcagctggtgwgattttacaccacagtgttcttcttacgaataccagagagaaaatcaaagtttcttga

SEQ ID NO: 681493 - DNA, 1356 bp, Homo sapiens
aactgagtcaacagccactgccatgcaatcagagatgtccacatcaattatggagactaccacgaccctggctactagcacagccagaagaggaaagcccccgacaaaagaacccattagccaggtgagcctgtggattttattccttcattttcatcctatattatttatgatagtgggcttttctgcatatgygtcttttctaaattggaacatttttctgatcttaggcactacagcttcctttgaaactagcttaacataatgcattccgtttgaatatgaaatgtgtgtatgttgttcattagaggtttgtggacttttacaaaagattttgttttggtttgttagatgctaaatgatagtcttgattccataaccctcctctggcccaagctgagtagatcgtctgctaattacataggattttcactttttagtttaaatgaacaagttaatgaaatatttgaaaaccttgtctgtttaagctcagcacttcaaaataaaatcaaggcaaatttaatcttaaaagagatattttaatagtacaatacttctatagtattttgaagtttaaagttttgaattgatagccagccatgtggctttcttggtgaatgatgggtatactctttcactatttatttaaaaataaaaaaacattctattggtttatctgagcacacaaacccaaaatatgaggtattttgtgtatgtgattaattgccctcacctacaattaactctaattagcttatttcaatcttgtgcctaaaatttttgaagaatatgatttttaaatgtggcatttgcacaacttggaagtatgttaattcaatcaggacataattattgattgcctactacatttcaggcactggtttgaatattggtgttccatcagtgaagaacacagggaaaaaaaaaccttattcgaaatgctgttagatgctgttcaaatgccattagattcctgttggtatttgcagcctttgtatgtatccagttgttaattttttcagaattgtgtattatccttggtccaaaattaattgtttcgttttgttctgttttactgatagtgagtatattcagtaggtgccatttaaagcttttccaaatacacgatccctacttttccagaaaaatgcattctgaagaagcaagaatgataattatatttaaatttgcttttacttcttgcatttgaaacagacctgcatccagtttggaaggaaaataatagaaggcaaattctgtttgtatcagcaccccaaatatgaattaacatgtttcccagaaaatgaagaaaattgactctgatttttactttgaatggaaaagggtgagaggaac

SEQ ID NO: 681494 - DNA, 1356 bp, Homo sapiens
aactgagtcaacagccactgccatgcaatcagagatgtccacatcaattatggagactaccacgaccctggctactagcacagccagaagaggaaagcccccgacaaaagaacccattagccaggtgagcctgtggattttattccttcattttcatcctatattatttatgatagtgggcttttctgcatatgcgtcttttctaaattggaacatttttctgatcttaggcactacagcttcctttgaractagcttaacataatgcattccgtttgaatatgaaatgtgtgtatgttgttcattagaggtttgtggacttttacaaaagattttgttttggtttgttagatgctaaatgatagtcttgattccataaccctcctctggcccaagctgagtagatcgtctgctaattacataggattttcactttttagtttaaatgaacaagttaatgaaatatttgaaaaccttgtctgtttaagctcagcacttcaaaataaaatcaaggcaaatttaatcttaaaagagatattttaatagtacaatacttctatagtattttgaagtttaaagttttgaattgatagccagccatgtggctttcttggtgaatgatgggtatactctttcactatttatttaaaaataaaaaaacattctattggtttatctgagcacacaaacccaaaatatgaggtattttgtgtatgtgattaattgccctcacctacaattaactctaattagcttatttcaatcttgtgcctaaaatttttgaagaatatgatttttaaatgtggcatttgcacaacttggaagtatgttaattcaatcaggacataattattgattgcctactacatttcaggcactggtttgaatattggtgttccatcagtgaagaacacagggaaaaaaaaaccttattcgaaatgctgttagatgctgttcaaatgccattagattcctgttggtatttgcagcctttgtatgtatccagttgttaattttttcagaattgtgtattatccttggtccaaaattaattgtttcgttttgttctgttttactgatagtgagtatattcagtaggtgccatttaaagcttttccaaatacacgatccctacttttccagaaaaatgcattctgaagaagcaagaatgataattatatttaaatttgcttttacttcttgcatttgaaacagacctgcatccagtttggaaggaaaataatagaaggcaaattctgtttgtatcagcaccccaaatatgaattaacatgtttcccagaaaatgaagaaaattgactctgatttttactttgaatggaaaagggtgagaggaac

SEQ ID NO: 681495 - DNA, 1515 bp, Homo sapiens
tttaatttttttttaagttgatgcatcttagttaccgtttgcagctctggtttgtctagctgttggctactggtatttacttgataattgacactgtctagtaattgagttaccagctgttgaggtatgactgcatgcctctgattctgtgggtctcacttttctcttytttggatgttttcactggccaatagattcgttttgtatttttactgtgatcttctgggtagatgctagggaccctaatgatttttaagtaatcctgaagaaaattaccgtaagcctaaaggtggttgaaaatgacagttttttgcaaataatcaaaatgccatccatagggacatggttaaatacactatcataagctagacaatgtaatcatatttagccattaaaaatgatgtataatagatcataatgctacataagtgtgaattagggtgacaaccatggtctatgctttgcctaataaagtataatttaaaaaacaaacagacaaaaagaaatgtaattacataagctaatctggaaaaaatgtgaaagacacattactaaataaaataagcatcttttatatacacatatgattcaatttttgtaaaaagaaaaacagttatatgtgaaaaaatgaaagagtctgagtctagtagttatatatggttatattaagagagagactggatgaatgccaaagggagaggagaaggggccacagtgtttacacttcctacctaatatagatattttttttaacttttagacatttacttatttaaaaaattaacttggaacctcttactaagtgagactcgtagcctatctcaaagagcgataatgtgatatttaaagattttgctgatttggacagaaacagaaacaagaagtgatagagaatttattagatgctttactttagatacattttctcttctttttttttattattaataatgttggcagggaggcagtgaacttgcccattagagtttggcaacctgcttgagtttcctaggcatcccatgagtcctctctgtttcttgccacacagcattgactcagatctattcctttacatgcaggcagctgtacgaaaacctatgcactcttatagcctcatctggtttcctttgtcaagatattacattatgaaacattttgggaaattagcagcttttgacagtaaatacgaatgatttgtgattccactaagccactgcttaattttaggctgctgaatggtgaacactttaaggagcgtgggaacaggccatattttgttttgatcttacacagtctcatttgaaggaaggttatccatttgaagatgggctataatttacagaaaggcaattatattgaagactaataatgagcatttagtaatacatatcaaaatgtagaatatgaataacttcagaatttcaagatcttttattctacataattaatttttacagctgaaatgtgcctatctttttggcgatcagataccccctgccctccaaaatacagggt

SEQ ID NO: 681496 - DNA, 1435 bp, Homo sapiens
ggtatgagtgtatgcatcttaggtctctagtggattctgggtcaagcatgtgccatgggtcacatgtcaggtggcrcaggtatgagtgtgcacatttttttttttttgagatggagttttgttcttgttgcccaggctagagtgcaatggcgtgatcttggctcactgcaacctccgcctcccgggttcaagtgattctcctgtctcagcctcccaagtagctgggattacagacatgcaccaccacacccagctaattttgtatttttagtagacatggggtttctccatgttggtcaggctggtctcaaactcccgacctcaggtgatctgcccaccttggcttcccaaagtgctgggattacaagcatgagccaccgtgcccggccacacatcttagctctctagtggattctgggttaagcatccttgcacaccaccaccacctgcctccgctctccccagtgcctaaaaccatgctttgcatagagagggggtctaaataaatattgttgactgaataaatgaatgaatgtatgaatgaatctaattctgtcaatgtttgagcacctgatgtgcttagcaccttgagaggagccagggatacagaggcaggacctgcccttattcaggagctcccaggcaggtgaagctgaccatcacccaaaggaccgtagcccagcggctcaagactgatacaaagaataggacctataaatagaaaattaccagtggaggctgggcgcggtggctcatgcctgtaatcctggcactttgggaggttgaggcaggcggatcacgaggtcaagagatcgagaccatcctggccaacatggtgaaaccctactaaaaatgcaaaaattaggccaggtgtggtggctcatgcctgtaatcccagcactttgggtgatgtagccagggtgacgcagcccctaggacagagggtcagagaaagcccccctcgctggagactgcatctgaatggagtctaggttttgcctagtggtaggagtggagggaaggactctcattttaggcagagggactgcacgaagaaagtgagtaaaaagtgcgtggtgcctttggaaacgactaacgtggccttgctgaggagaagggcgctttgcagagtgtgagagcagcctctgaaaggtggttaaaatggattaggaagggctcggaggccgtgggggaccatggaagattttggaatcaggaagtcacatgtgcggatagatctatgatttggagaaatacctctggtggttggtgtcggggagggctcagaagcttagtggccatttgagttacactgtggtcatccaggccacagagccacatgcctgagtgagggccgggcatggtggtggggatggtgagaggacagtggggagaggcacgctgaaaggagaactcttccacctagtcacttccc

SEQ ID NO: 681497 - DNA, 1195 bp, Homo sapiens
gacagcatatcctgtaaacacaggaagaaacatgggggatcgactgcatgagactcaactctttcctgggcagacagacctgtccctagacaggtaaccaccaccagcactgcttccaggagggagctccaaggggccacatgccrctcctgtttgagcactgcactccaataaataggagcttgattgagcaacctgggcataaagaatgcacgattcaattggtcccacttatgtcagggaagacagagtaaaaatgatctctgctgctgggacagttaggattctataaattgtgccccagggctaggatttattctaggtccaggtacctacaaagaccagagaggtacaaagcttacttacaaagctcacagaactattagtgttctttcttaagactctggatgcaaaccagtttcatctcagaaaagcaaaaccaaaacactttacagatgtgagtagtttccctctatccttgagcgggccctgcttcctattcttgggttcaatgtcatgccctcagaggtcattcctatctccagacaactcatctgggacttacaggaaacatccaatcaattccagcaaaatgataagctatccattgacctcaattaagaaataaaacttacaggtgatttttttcccttaaatttgttttttttttctagttgaagcaaagaatactcattatttacaaaacctgatatatatagacaagtagaaaaaaaagttttagtcatagagtcactgtatatggtacatattcttatagtgttcccttgcactcattcaacaaatatttatatactgattgattactgaatgacaggcacttaggacacaaatataagtaaaaataaatcatttcagtccttgtggagcttaccgtgtaatataagaaatatgactgtatatctggaaggcctaaagaaaataaaacactgttactgctgagaaattaactttaaaatggctaactttcataaaagaattcatatttatgtgaaataagctaaataggtacacgaaatctgtggaactcttgtaacagacaaacaataacaagttagaaagtataaaaagagatatcagtcaaaatagcatgaatatgtaaagacttatagaaaatattttaatgagaaaattataatccacatggaaacactgagatatacttaacgcaatgtgc

SEQ ID NO: 681498 - DNA, 1195 bp, Homo sapiens
gacagcatatcctgtaaacacaggaagaaacatgggggatcgactgcatgagactcaactctttcctgggcagacagacctgtccctagacaggtaaccaccaccagcactgcttccaggagggagctccaaggggccacatgccactcctgtttgagcactgcactccaataaataggagcttgattgagcaacctgggcataaagaatgcacgattcaattggtcccacttatgtcagggaagacagagtaaaaatgatctctgctgctgggacagttaggattctataaattgtgccccagggctaggatttattctaggtccaggtacctacaaagaccagagaggtacaaagcttacttacaaagctcacagaactattagtgttctttcttaagactctggatgcaaaccagtttcatctcagaaaagcaaaaccaaaacactttacagatgtgagtagtttccctctatccttgagygggccctgcttcctattcttgggttcaatgtcatgccctcagaggtcattcctatctccagacaactcatctgggacttacaggaaacatccaatcaattccagcaaaatgataagctatccattgacctcaattaagaaataaaacttacaggtgatttttttcccttaaatttgttttttttttctagttgaagcaaagaatactcattatttacaaaacctgatatatatagacaagtagaaaaaaaagttttagtcatagagtcactgtatatggtacatattcttatagtgttcccttgcactcattcaacaaatatttatatactgattgattactgaatgacaggcacttaggacacaaatataagtaaaaataaatcatttcagtccttgtggagcttaccgtgtaatataagaaatatgactgtatatctggaaggcctaaagaaaataaaacactgttactgctgagaaattaactttaaaatggctaactttcataaaagaattcatatttatgtgaaataagctaaataggtacacgaaatctgtggaactcttgtaacagacaaacaataacaagttagaaagtataaaaagagatatcagtcaaaatagcatgaatatgtaaagacttatagaaaatattttaatgagaaaattataatccacatggaaacactgagatatacttaacgcaatgtgc

SEQ ID NO: 681499 - DNA, 678 bp, Homo sapiens
acaagaggcaggctgggcctcagggaggatcatgggggcctcctgggtagcagaggggtagcatgtgactgacaggggtgaggcaggcgggcactgccagagactggctggaccccctccgttctgctggcatctgcagggtatacagaacctttcaccaggcacctgggggccacctggcatgatggttccgattaaggtgtatgataggacttgggagaaattactcacgggtgactatgatgtgcacccgattaagaaacactgtatcccagcactttgggaggccaaggcaggcagatcacttgagaacaggagttcgagyccagactgaccaacatggtgaaaccctgtctcaactaaaaatagaaaaattagggccaggcacggtggctcacccatgtaatcccagcactttgggaggccaaggtgggcggatcacctgaggtcaggagttggagaccagcctggtcaacatggcaaaaccccatctctactgaaaatacaaaaattagccaggcatggtgatgcatgcctgtaatcccagctactaggcgggctgagacaggaggatcacttgaacttgggaggcagaggttgcagtgagccaagactgtaccactgcactccagcctgggaaacagaacaagactctgtctcaaaaaaaaaaaaaaaaaa

SEQ ID NO: 681500 - DNA, 649 bp, Homo sapiens
tttttttttttttttttgctaaggctttggaaaaaagagtccttggagatgcaaatccttcactacctgatcaaagagacagagcactaaggaccayaggacccagcttttgcttccatagatgaacatagttcaactcaaaatcttgattgagtccagagtagggaattcaggagtggattatgcagtggagaggatcatgcagtggagaggaacatcagaagaagaattaaatagagacaaacatgggactgagaagtcaacgatggcccccccagggaaaaggaaatatgtgagttgagccttgagagagaaggagatcatttcccaggaatgctaaggaaccattttcttccatttcattttactctggacatcttgactgaaaatgtagccaaaaaagtccattttgtctcaatgatgtagtttaaaggacaaaactgcactgttgatttactgcactattaatgaagaaaatgctcagttactttcaccaaatttgctaaactataaatgggctcgaggtaatttttcattctgacatgagctcagtgcatgatttttccccatttaacaaacaatggtcatttataacctatgatttttagtccattttctgttgcttccttaaaactaggtagtttatttt

SEQ ID NO: 681501 - DNA, 649 bp, Homo sapiens
tttttttttttttttttgctaaggctttggaaaaaagagtccttggagatgcaaatccttcactacctgatcaaagagacagagcactaaggaccacaggacccagcttttgcttccatagatgaacatagttcaactcaaaatcttgattgagtscagagtagggaattcaggagtggattatgcagtggagaggatcatgcagtggagaggaacatcagaagaagaattaaatagagacaaacatgggactgagaagtcaacgatggcccccccagggaaaaggaaatatgtgagttgagccttgagagagaaggagatcatttcccaggaatgctaaggaaccattttcttccatttcattttactctggacatcttgactgaaaatgtagccaaaaaagtccattttgtctcaatgatgtagtttaaaggacaaaactgcactgttgatttactgcactattaatgaagaaaatgctcagttactttcaccaaatttgctaaactataaatgggctcgaggtaatttttcattctgacatgagctcagtgcatgatttttccccatttaacaaacaatggtcatttataacctatgatttttagtccattttctgttgcttccttaaaactaggtagtttatttt

SEQ ID NO: 681502 - DNA, 1087 bp, Homo sapiens
tgggctccatgaaaggtgtcctgacttttctagccaaaatggatttaagagaaagctggaggcctctcatcctacccacaagtccctcggtctccctccagggaagctgtgaaggacttcattaaaattcctgagggttcttagagcacaatttgagacaagcagtattaaggcatgctaaactctgaaaggtaacgtttatgatgtgggaatatctccctatgatatattcttattyggcaattgcttaaaattattacttgaacatctctggttcaaaagtagaaatatctaaagaaaaacatggcattataaacagatttgcctatcagattgtatgttaatatttcagagaggcttagaaactaagtaaaaactatatctcatttccacattgagctatagcctatttaaatagcaatggtaaaatgcagttggtttccaaaagtatcagttcaactgtggttctcctaggacaaatgtacaaggacaccacatgctaagcagcagatcctcttgcggaaagaagttttgcacctggttttattttggcgccacataccactggtaatttccatcattcttataaatgtcatcttcctggagatcaccagagagaatgaatgatgggtctacttctatgattcaaatagcactaattaagttttagtctttttgtagacaagctttgtctttaagtcaaaatttccttcatttaagttagcttctttcactctgacaggaaaaatgtggttttcttattagggtttcaaaaaatttaacacattttcttcctatcatttgcttttttctatgtttgttttaagacagggtatcactctgtcacccaagctggagtacacagacaagatcacggctcactgtagcctctacttcctgggctctattgatcctcctgcctcaatctcctgtgtagctggaactacatgggtatagctgcgcaccaccaaacccagctaattttttttttttttttagagacagggtcttgttatgttgtccaggttgatcttaaactcctggcctcaagtgagcctcctaccttgacctcccaaaatgctggaat

SEQ ID NO: 681503 - DNA, 1087 bp, Homo sapiens
tgggctccatgaaaggtgtcctgacttttctagccaaaatggatttaagagaaagctggaggcctctcatcctacccacaagtccctcggtctccctccagggaagctgtgaaggacttcattaaaattcctgagggttcttagagcacaatttgagacaagcagtattaaggcatgctaaactctgaaaggtaacgtttatgatgtgggaatatctccctatgatatattcttatttggcaattgcttaaaattattacttgaacatctctggttcaaaagtagaaatatctaaagaaaaacatggcattataaacagatttgcctatcagattgtatgttaatatttcagagaggcttagaaactaagtaaaaactatatctcatttccacattgagctatagcctatttaaatagcaatggtaaaatgcagttggtttccaaaagtatcagttcaactgtggttctcctaggacaaatgtacaaggacaccacatgctaagcagcagatcctcttgcggaaagaagttttgcacctggttttattttggcgccacataccactggtaatttccatcattcttataaatgtcatcttcctggagatcaccagagagaatgaatgatgggtctacttctatgattcaaatagcactaattaagttttagtctttttgtagacaagmtttgtctttaagtcaaaatttccttcatttaagttagcttctttcactctgacaggaaaaatgtggttttcttattagggtttcaaaaaatttaacacattttcttcctatcatttgcttttttctatgtttgttttaagacagggtatcactctgtcacccaagctggagtacacagacaagatcacggctcactgtagcctctacttcctgggctctattgatcctcctgcctcaatctcctgtgtagctggaactacatgggtatagctgcgcaccaccaaacccagctaattttttttttttttttagagacagggtcttgttatgttgtccaggttgatcttaaactcctggcctcaagtgagcctcctaccttgacctcccaaaatgctggaat

SEQ ID NO: 681504 - DNA, 607 bp, Homo sapiens
cacagcattccacctctgattctccaaaattcaggttcttctcatacacacaaaatacattcattccttcccaacagccccaaatgtctcaactcattctagcataatacctaatatctaaagtcctaagtctcatccacataccatctaaatcagatatgaatgaaacccaaagtgtgatttatcctgaggcaaaattcctctccacacatggacctgtgagatcagacaagttatatgcttccaaatacaatggtgggacaggtgtaggatagatattcccattccaaaaggaagaactaggaaggaaagaagaggtggcaagtcccaagcaagtctaaaactctagcaaggcaaaatccatcagaacrtaacagctcaagagcaatcctctttggtatgatgctgtgccctccaggcccctggtgtggcagtgtcaccccacagctttgcagggcagccctgccccagagacactgggcagttattcaggcccattgaaatctgggaggctgtcatacccttagaaacaaaggaggaagccttgtccccagacctggagtagaggtgggattataccatctctgtagtgggagttacagccccg

SEQ ID NO: 681505 - DNA, 608 bp, Homo sapiens
aggaatacagggttatagaagagaaaaatggagagagacttatcttgaagcctgcagccaagacttcctgagaaaagggacatttaatagaggcctgaaacaacagagatctgggagtagttacccaagcaaaaaggagacagggaggaagtattgtccaagcacaaggttgagagggtggatcctgtggcagatgagagatcaagctattacagaggcaaaaggtaaaggtggctgaaaccagggcaagggagacatgggggtgagatagggctggaaaagcaggcaaaagacatatcctggtgcagaatgaggccaaggatttcaatcgttgttcaaagagcaatgtgaagaagaagtttaagcagaaaagcaactacatcagaatctcactgcgaagrgatgccctgcagccacgtggagaatggagggtccgggcatggatgaggcaaaggccgatgcccactttgacatgagaaccctggctctagtgtgcagcagggtcaagaattgttggaggaacagcaggaggccatctcagcagcacaggcaaggggcaaaggccactagcctgaaggtgttggcagtggggctacagagggtggagg

SEQ ID NO: 681506 - DNA, 620 bp, Homo sapiens
cataggaatctatggaatataataakttaaaacttttagcaagccaagaaattgtcttccaggatgcttttattcattctgcttctgtatagagcacttcgatgtccttgcccacctgaaatataaaaacaacttatatttcaagactgatgccaactaataacctccttcctgaagtctctttttgtatcattttcttaggaaatgcctacctttcccttttttgaagcatcgggttactttacgtgaatgtgtaaaatagaacccttgacagtattgtactcattagtgaatgtgtgcatctcacttttgaactgtgaaccaattaacagaccattcaaattcatcagaaaatcccatgcaatgccttctctataagttcagatttcaagggatatcctcagaattagttagtgagtgcaggagtaagttagtagattaatggaatgaaccagtgagtgaacaattgctctatgtagctcacttaacatatgtaaaatttaggtttcgttaaacaaaatgtttttcactaaattaccaactaaataaaaatcgaataccttatgtaaaaatgaatcatggaagtaactcttgagcctgactggcaaaacaatatgctt

SEQ ID NO: 681507 - DNA, 578 bp, Homo sapiens
tgataaataaagtaacttgttgaaggtgagaaaatggagatgaagctgtactaggaattgaaatgtattagttcattctcatgctgctatagggacatacccaagactgggtaatttataaaagaaagargtttaatggactcatggtttcacgtggcttcgaaggcctcaggaaacttacaatcatggcagaagaggaaccaaacacatccatctacacgaggtggcaggagagagaggtgccagcaagggaaatatcagatgcttataaaaccatcagatcttgtgagactcactgattatcatgagaacagcatagtggaaaccacttccatgattcaattacctctacctggtcccgcccttgacacgtggggattattacaattcaagatgagaattcgttggggacacaaaaccaaaccatatcattctgccctggcccctcccaaatctcatgttctcacatttcaaaacataatcatgcctttccaacagttccccaaagtcttaactcactccaacattagccccaaagtccatgtccaaagtcccctctgagacaaggcaagttcctt

SEQ ID NO: 681508 - DNA, 578 bp, Homo sapiens
tgataaataaagtaacttgttgaaggtgagaaaatggagatgaagctgtactaggaattgaaatgtattagttcattctcatgctgctatagggacatacccaagactgggtaatttataaaagaaagaggtttaatggactcatggtttcacgtggcttcgaaggcctcaggaaacttacaatcatggcagaagaggaaccaaacacatccatctacacgaggtggcaggagagagargtgccagcaagggaaatatcagatgcttataaaaccatcagatcttgtgagactcactgattatcatgagaacagcatagtggaaaccacttccatgattcaattacctctacctggtcccgcccttgacacgtggggattattacaattcaagatgagaattcgttggggacacaaaaccaaaccatatcattctgccctggcccctcccaaatctcatgttctcacatttcaaaacataatcatgcctttccaacagttccccaaagtcttaactcactccaacattagccccaaagtccatgtccaaagtcccctctgagacaaggcaagttcctt

SEQ ID NO: 681509 - DNA, 578 bp, Homo sapiens
tgataaataaagtaacttgttgaaggtgagaaaatggagatgaagctgtactaggaattgaaatgtattagttcattctcatgctgctatagggacatacccaagactgggtaatttataaaagaaagaggtttaatggactcatggtttcacgtggcttcgaaggcctcaggaaacttacaatcatggcagaagaggaaccaaacacatccatctacacgaggtggcaggagagagaggtgccagcaagggaaatatcagatgcttataaaaccatcagatcttgtgagactcactgattatcatgagaacagcatagtggaaaccacttccatgattcaattacctctacctggtcccrcccttgacacgtggggattattacaattcaagatgagaattcgttggggacacaaaaccaaaccatatcattctgccctggcccctcccaaatctcatgttctcacatttcaaaacataatcatgcctttccaacagttccccaaagtcttaactcactccaacattagccccaaagtccatgtccaaagtcccctctgagacaaggcaagttcctt

SEQ ID NO: 681510 - DNA, 214 bp, Homo sapiens
aagagtgatttctaccagttttcttggcacagactcaaagtttttactktcattttacttacttcaagagtgtaaagaggtgcttagtatagcattttcttctctcctaaactttgacatcctaactgacagttttcctcagagccagccttgaaatttgtcacattgtctttttccattcttttgtcttccctccatctccctccctccctcc

SEQ ID NO: 681511 - DNA, 646 bp, Homo sapiens
ttcatccgcgagtcgcacccttctatagaggtaaaattgccttgctgagaaaattctttgagcgctagttcttctttttggcaccaaagaaccagcatttgtttctaagagagccttattgtcaaaggaaattaagaaaaagcattacacttattcatacatgtgcatatatgtacatatacatattgcagaaaagtatgatagggtgagcaaaaaaaaaaaaaaaaccctcaagcaaaacaatggggtaattcggtgggaaaagtgaaatgaaaatcaaattcaaagaggaaaagaaatgagtaaaatttcccattgttgaagagttttattttaaatgaagatggtggatrttaaatcactaccctatttatattccattgcataaatctcagagtgacttaatattttcatttataaatatcaatattttcaacaagccagacattacaaacttggcaactacttaaacttaggatgaaacaaaaattagataacaatttcattcttttaagagctacaaagaggtctaaaaaaaggtttgacctctgaaaaattaaccttaaaccatctaagtgtccttcctaaaactcaagtcaagcccaggtagcttcagtggcaagcaacgagaccactagttaaaaga

SEQ ID NO: 681512 - DNA, 1105 bp, Homo sapiens
ggcacaggggctcatgcctgtaatcccagcactttgggaggccgaggcggttggatcacctgaggttgggagctcgagaccagcacaaccaacatggagaaaccccatctctactaaaaatacaaaattagccgggcgtggtggcgcgtgcctgtaatcccaactactcaggaagctgaggcaggagaatcacttgaacccgggaggtggaggttgcagtgagctgagatcgcgccattgcacaccagcctgggcaacaagagcgaaactccatctcaaaaataaataaataaaaaataaaataaaaattaaaaaaaaaagaacatagcatgactttgaacataaggctgttatttaggaaatggcaggtgacttaagaaaaatccaggtgctacctacagagtgaggtggaaaaaatcagggtttacaaacagtttattatttaactaattaaaaaaatacacagatgtcctctctttataggtttccatttacaaactcaccctatttttcatccatctctccctcctccttttcatgttcaaacactttcatactcgctatgagctaggcctggccttggcacagaggatacaaaggtaaattaagacagaatcactatcctggaagaacatacatcctaatggaaaagtctacatggaaataaaaatatataaaatgtgacagaaatataaattaagtatgtgggtacaccaagaaaaaaaattgttttagaaaggcaagtctttaaaaagaaggtgacacctgaagcagaacttgaagcatcagcaggagttcatgtggaagaaggaggggagggtggattgcaggcaaagaggacagaatgaggaattaattaaataaaggcttttatagaagaagaatgttctaaggctgtaactctcaacgttttactgtgctccaaaaaacctacaggatataatatattctcaccaaaaacagtagctcaygaccgcaagatgtctcatggggtaggggagtgggtgcagagcagcagctgtagtatatttgggaaaggagggggaatcaattctgaaaaagattaaaccatcccaggagttcaatcaccaaagccaaacatcat

SEQ ID NO: 681513 - DNA, 665 bp, Homo sapiens
gaaactatcctagaaacctaaaaagaaggaggctaaaggaaaaaaaggtataaattgtaagctgtcttcggtaaacttgcatgcctttaattcttttcaaaaatttccacatggaaagatattccaccaagcagaaaattctgaagatcaaatatgatctacattctattaagcataaaatcaggaaataaattttattgagcattttttccattcactaggagaatcactttacataactagccagttaaagataggaatgatattcatccctttaaatcctcaatttacgtacaaatcctgaaaatagcaggttctcaataagtgttttaaacaaaattaataaatggatgaatgaacgaatgatgatgtcaagttatgcaattcaaaattactgaaaaatttcttttccaaactcttgttcattcacaaatttttggttaacaatgttcacctagagttacacactgtcaagggactagaaccttctctcttaccttcagttgttggaaatacttctcctttatttttagcctctgccaattttccagttctcagcaatacttctgcaaagctttccactggaacatgctgataggtgtcataggtcccttcagactacacaaaagaagcagtttcactatctagyagggtgccttttgtcc

SEQ ID NO: 681514 - DNA, 663 bp, Homo sapiens
ccccgtatctaaaataaataaaataaaaattacccagggatagtggcatgcgcctgtagtcctagctacttggggggctgaggcagaaggatcacttaagccccggagttcaatgatgcagtgagttgtaactgcaccacactgcactccagcattggtgacacagccaaaccctgtctctaaaaaattttttaaaaatcaatattaagcatactatttcaggggatttagaggccaaacccttcttggatgtcctagaattcttagatccagattatgaaacctacattctggaaaaaatagaggtgtataaggtatatttttttttccatgcccaatttttaaaattacttttgataaatgactttgggttctagatgaacccacaaagtaagtttactgaacacataattwggcatgcctactatgtttaagacccagcgctaggcaacaggattactatgacaattaaggtatgacccctattcctaagaaactcatggtacagtagggaagaagggaaaataaggcaatttgccttatttcaccaatgaactgagaaattatcaaatagggtcccattcaactattcctccccatttcacagcagaacttaccccactcatcacatccatatcttactttcctcatttactcattcat

SEQ ID NO: 681515 - DNA, 644 bp, Homo sapiens
ggtattttatttattttattttaatttttttgagatggagtttcactgttgttgcccaggcgtgagtgcaatggtgcaaccttggctcatttgaacctctgcctcctgggttcaagtgattctcctgcctcagcctaccgagtagctgggattacaggtgcccacaaccacacccggctaatttttgtatttttattagatacggggtttcatcatgttgaccaggctggtctcgaactcctsacctcaggtgatccgcctgcctcggcctcccaaaatgctttgattacaggcgtcagccctcactctcggcctgcattttattttgaatgaatgataagatgcacacaaccagagatgggctctaggaactaggcacatagagacacgaacacaaaaaggcagatttgtagaattgaaaataaaacaaaaaaattaaaagtggagaaaatataatacaggggtaaacaatgaagtttgaactgtacattaagagataaaactggaaacgtagattgagttagaatctttggatggtctgaatgtcatggtaagagagccagatgccattaactagacaatgccagcttgtataattcaccagacagctgataatctaactctaccccacatcacttttatta

SEQ ID NO: 681516 - DNA, 485 bp, Homo sapiens
gtataaaaatattaaacataagaacactgaaaaatctgtacttattttataattaattaatgatttatagaaagtataacaatccctctgagtaaattaatttcaaaaaataataattacagaaagtatagggtggagttcctgacttattttcattttcccatttgaaaaattgtcatcgtcattatagatgtctatgaaaaaaattttttataataaccctagtcccatcaattcaaagtcacaccactataaacattttackactttttaaactgcactgacttgttgttttctccatgaaaatccatattgagatttgataaaagcaagatattttgatctacttgatttccaaatttgattatttgacatctctacttttgcaagcatgttaggattttcaagttttaacaatgacttaccaataattatttcagcagcattgattaaaacaggggcaaatcttggctgagaaagattcc

SEQ ID NO: 681517 - DNA, 646 bp, Homo sapiens
ttgataaattttaactttgaataacagatttgtatatattttacagtagcaaatgayttttaaaagactagtatatacatacatcttatgcatccatgacatatcttcatcttaattttttggtatttctagtctacttggttcatctgcgagtgtttttgaattgttgcaaatctccaaaaaaatttttaatatatttagttcaaacctgtgttgtccaagcaacaactgtacttcaatttctcctcttgcagaataggggtaatattcatttcctgtgccttcataggaaacaatgcattgtgaaattttataaagcaatgacccctaggaactttcatttaatgtactcttcactccataactcagctctcacattttcccacttaaggttgttttttgatatcatgaagccattgaatccttaaccctgtttttgataatggcacaatggattgaggagagggacaaagctactgatatattttacaaacgaatccacattaccttttcttgagacgagaacatacaaacataaagtgggagatttccaagtgctaacatgggtctttagtggggagcatactcacctgtttagagatattaaaagtccatattgaattaaaatagaggacagagagtggct

SEQ ID NO: 681518 - DNA, 646 bp, Homo sapiens
ttgataaattttaactttgaataacagatttgtatatattttacagtagcaaatgacttttaaaagactagtatatacatacatcttatgcatccatgacatatcttyatcttaattttttggtatttctagtctacttggttcatctgcgagtgtttttgaattgttgcaaatctccaaaaaaatttttaatatatttagttcaaacctgtgttgtccaagcaacaactgtacttcaatttctcctcttgcagaataggggtaatattcatttcctgtgccttcataggaaacaatgcattgtgaaattttataaagcaatgacccctaggaactttcatttaatgtactcttcactccataactcagctctcacattttcccacttaaggttgttttttgatatcatgaagccattgaatccttaaccctgtttttgataatggcacaatggattgaggagagggacaaagctactgatatattttacaaacgaatccacattaccttttcttgagacgagaacatacaaacataaagtgggagatttccaagtgctaacatgggtctttagtggggagcatactcacctgtttagagatattaaaagtccatattgaattaaaatagaggacagagagtggct

SEQ ID NO: 681519 - DNA, 646 bp, Homo sapiens
ttgataaattttaactttgaataacagatttgtatatattttacagtagcaaatgacttttaaaagactagtatatacatacatcttatgcatccatgacatatcttcatcttaaytttttggtatttctagtctacttggttcatctgcgagtgtttttgaattgttgcaaatctccaaaaaaatttttaatatatttagttcaaacctgtgttgtccaagcaacaactgtacttcaatttctcctcttgcagaataggggtaatattcatttcctgtgccttcataggaaacaatgcattgtgaaattttataaagcaatgacccctaggaactttcatttaatgtactcttcactccataactcagctctcacattttcccacttaaggttgttttttgatatcatgaagccattgaatccttaaccctgtttttgataatggcacaatggattgaggagagggacaaagctactgatatattttacaaacgaatccacattaccttttcttgagacgagaacatacaaacataaagtgggagatttccaagtgctaacatgggtctttagtggggagcatactcacctgtttagagatattaaaagtccatattgaattaaaatagaggacagagagtggct

SEQ ID NO: 681520 - DNA, 823 bp, Homo sapiens
tagttaattttatgacaatgtacctcaatctttttttaagttaatcgctcattttgaattttaaacatcatatgtatcttctgatttattaatttctgactatactgtgattgaaaatatgttataaagttagaatcttgaaaggtgaaaattacattagtggtatgacaagttaaatataaatctccaaaataaaagttgaaggtatgttggccacgtgtggtgactcacacctgtaatcacagcactttgggaggccgaggtgggcagaccacttgaggtcaggggttcgagaccagcctggccaacatgctgaaacttgtctctattaaaaatacaaaaattagccaggcatggtggcagatgcctatccagctccttgggaggctgatgcaggacaaacacttgaactcgggaggcagaggttgcartgatctgagattacgccactgcactccagcctcaaaaaacacacaaaaaaagaaaatatgtcacattgatatcaggtatccaagaataaaactttggcatagcctgttagttattccctaaaccctggctactttgcactgaacaatattttggcttaaccaagtattgtttcacttagagaaaatttccagaagcatatgaattgtcttgtttcttaaaagcctttaagcctctcaaaacggtttagccatgtaaaactgtgagtgattgtatttggacagcattttcatattttatatatactgaatttagttatgggaagttcaaatatagatttaaattatgactctaagttgattccacttaattgcctggttaacaaattttagtt

SEQ ID NO: 681521 - DNA, 823 bp, Homo sapiens
tagttaattttatgacaatgtacctcaatctttttttaagttaatcgctcattttgaattttaaacatcatatgtatcttctgatttattaatttctgactatactgtgattgaaaatatgttataaagttagaatcttgaaaggtgaaaattacattagtggtatgacaagttaaatataaatctccaaaataaaagttgaaggtatgttggccacgtgtggtgactcacacctgtaatcacagcactttgggaggccgaggtgggcagaccacttgaggtcaggggttcgagaccagcctggccaacatgctgaaacttgtctctattaaaaatacaaaaattagccaggcatggtggcagatgcctatccagctccttgggaggctgatgcaggacaaacacttgaactcgggaggcagaggttgcaatgatctgagattacgccactgcactccagcctcaaaaaacacacaaaaaaagaaaatatgtcacattgatatcaggtatccaagaataaaactttggcatagcctgttagttattccctaaaccctggctactttgcactgaacaatattttggcttaaccaagtattgtttcacttagagaaaatttccagaagcatatgaattgtcttgtttcttaaaagcctttaagcctctcaaaacggtttagccatgtaaaactgtgagtgattgtatttggacagcattttcatattttatatatactgaatttagttatggraagttcaaatatagatttaaattatgactctaagttgattccacttaattgcctggttaacaaattttagtt

SEQ ID NO: 681522 - DNA, 1287 bp, Homo sapiens
tgcagtgagatgtgtacaggaatggagagagtgagcatttagagtgatttgacagaattctttttcgtctgttgaatctaataaataaaaatgtgagtttggcttttttttaggcagagtctcgctctgtcacccaggctaggaatcagttctatttgtggcgtaatcatggctcactgtaacctccgcctcccgggttcaagcgattctcctgcctcagcctcccgagtagctgggactacaggcacccactaccacgcctggctaatttttgtatttttattagagacgaggtttcactatgttggccaggctggtctcgaactcctgacctcaggtgatccacccacctcggcctcccaaagtgctgggattacaggcgtgagccaccgttcctggccaggtttgacttttgtctgtcttggttttagatcttattttacttttctaataattcatttccgttgaattttacaaaagcattgtctgcaatggactagcagttttttgtttttttgagacagagtctaactctgtcgtgctggctggagtgcagtggggcgatctcggctcactgcaagctctgcctcctgggttcacgccattctcctgcctcagcctcccgggtagctgggactacaggtgcctgtcaccacgcccggctaattttttgtacttttagaagagacggggtttcaccgtgttagccaggatggtctcgatctcctgacctcgtgatccgcccgcctcggcctcccaacgtgctgggattacaggtgtgagccaccgcgcccagccttagaagtttcaaaaattaatccttcctcacagtttgagagaagcactggttctagaatatcctatttgacacaactgcccctagaacattcagggacaccctcttccctaggaatattttaaatagctcatcgtgaaccgtgttctttcttcatccacaacattccattctaccattctggaattctccttgggaagagaccccttcccgccctccccccacccttctcacccccgccccccgcaagaatcccctctaatctaccacatgacaagctctgtgacctccagccccagccccakctccagcccagccctgggcccacacacaccttgcggtcactgagcccagacacagtatccacgtactcctcctggatcatgaaggcggccaggttggctgtgtagctggcgaggaagatgacggcgaagaaggcccacaccagcaccatgattttgctggtggttccccgggggttctccacgggc

SEQ ID NO: 681523 - DNA, 1243 bp, Homo sapiens
ttcaaacttctaacacagcttaaactaagctcatgcccaacctgcagagtccctttcctctccatgatcaagaacaagatgagctctggatgacccttcctcgccaccctgtatctgtccctacttttcctttacctggcactactcaactgactcagatgctgcaagcatgcctgtggcagttatatgacggcttggggacacaatctccttagggagaaagtagggctatggtcaggaggggagatggatatggggtaccctccacacctggttagcattctctgcctcacktcctctccccttccctgatggtcgttttcccattgtccaaaagccacacaggaaccctagtgtgcagcacacgagccggtcaagtagaaagttacagtcagtgcaactggaattttaccatgcatttaattaactagattttttaaaagttcattgtaaaaatgaagttgccactttgggtatttaattcattcttgggtgagatcgtcctttacttgattggattgcagtataatttaagactcttattatttcacttaagctatttattcttctggaaatgaacacaaacactatgccttttgtgaaactatactaaaagtttctattttagattatgagatgtatttcttttatttaagttttcctacatttttcatatgtgttcatgttagagaaaatgtagcttattggctaacccaactttctgttttgttaagagttaagcagagatctcttctgttcaactataagctgttgaaaatttgtcttaaattttggcatagtgaatctaatgggttatttcttttcaaagtagcaatgtggcaagtgtgtggaatcatccttgaaatcatgaatgggcactaatggaagacaagacttgcttaattgtgttgtgtcatcttagaaactgttctgttaatagcattttaagaaatactttcaatggtaatattcataggacatgttcaaatgtaaggtctgcttgatatgttccaataagctccctagaaattattcctatttaaaagctttttagttcctggattcttgaaaatggctctgcataatgtgtgtgtgtgaggaagagaagattattgtttatttttaataaagtactcttaaatttatccttttaacctattaaaatattaagttaaaatatccttcattttttctgtggttgtaaaaatttcagaaactcatagtcccatagctatccaaagaa

SEQ ID NO: 681524 - DNA, 747 bp, Homo sapiens
tgaaggtctgtatgtctattctattttcctgagatgcactaaatttcttggctaaccccaagtatacaaggaaatacggtgcacaccaagaagaaagaatgactcctgtctagctctgggaagagctataatccctctggacatttattttatactcataacagggttgtgcaaatattttaatgggcatttgctatattttgaggtgtacagtcttgttgccaggcatttatttttttgaaaagatgacttttggtattatttttattttcaagccattgcttttgttcctattctactctcacaatgtcttttctctttgcaactacctcttcagtagagagacatagacaactgtttcctgtgtgtggggaggcggttacaggtgcattagctgtgatgatggctagcaagaggtgcctgtagtttatgatctgcaccttatccttcttttccttcttttatccaagtcgagatattatatttctacctgcaggcaggaacttcctctttctccattccctttccccacctgcatccctcaagcccattatctctgtgggcacggcccaggcacaagcctgcttcactttacagtgtttgtcaatgcactctrtgaaggacatgccacagctgtggttcaacttcttggaatcttgagtggtgagagcccacctttgccacctccccatgaatgtaaagcctagagcctgctggtctacagcccatagccgttgagctgtgtca

SEQ ID NO: 681525 - DNA, 918 bp, Homo sapiens
gctttaagacttctcaatggctactcactgagcttagaatcaagtccaataaggtctaacaggagtgggcccctcggtctctttgcaaccacctggggcctctgtccctctcacatgctgcagccagactggctttctttcagcttaagttcaagtcttcttggacccaaggtcttcatgcttgctgctccctttgcccaaaacactcctccccyactcctttgccttctgtcctccctttctcccactcccccatagctgcctcattcttttccataggacttaacttaaactgtgcatcctcagggacacctttcttgaccaccctataaaaagtaggccctgatggcagggaacatcacacactggggcctgtcggagggctgggggctgggggagggatagcattaggagaaatacctaatgaaaatgtcgagttgatgggtgcagcaaaccaacatggcacatgtatacccatgtaacaaacctgcacgttgtgcacatgtaccctagaacttaaagtataatactaataataaaaaaagtaggccctgacccttcatgccccagctggtccactagagctcttggctaggcccctccgtggcatttattgcagcttggactagaattttatatgtaggtttttgttatgttttattttcataaggcctacctcctccacaagactaagcatcttcagggcagagcacagctgtcttgctcaccactatatatccagtgtccaaacagtttctgacatatagtagctgctctataaatatacatggactatgtgttgtgacactgggtaaatcacttcccttcaccacgcatctgttttcccctctaacaaatgagagggtggacttgatcagtgtgttttgtttgtttgttttttggagacggagtctcact

SEQ ID NO: 681526 - DNA, 918 bp, Homo sapiens
gctttaagacttctcaatggctactcactgagcttagaatcaagtccaataaggtctaacaggagtgggcccctcggtctctttgcaaccacctggggcctctgtccctctcacatgctgcagccagactggctttctttcagcttaagttcaagtcttcttggacccaaggtcttcatgcttgctgctccctttgcccaaaacactcctcccctactcctttgccttctgtcctccctttctcccactcccccatagctgcctcattcttttccataggacttracttaaactgtgcatcctcagggacacctttcttgaccaccctataaaaagtaggccctgatggcagggaacatcacacactggggcctgtcggagggctgggggctgggggagggatagcattaggagaaatacctaatgaaaatgtcgagttgatgggtgcagcaaaccaacatggcacatgtatacccatgtaacaaacctgcacgttgtgcacatgtaccctagaacttaaagtataatactaataataaaaaaagtaggccctgacccttcatgccccagctggtccactagagctcttggctaggcccctccgtggcatttattgcagcttggactagaattttatatgtaggtttttgttatgttttattttcataaggcctacctcctccacaagactaagcatcttcagggcagagcacagctgtcttgctcaccactatatatccagtgtccaaacagtttctgacatatagtagctgctctataaatatacatggactatgtgttgtgacactgggtaaatcacttcccttcaccacgcatctgttttcccctctaacaaatgagagggtggacttgatcagtgtgttttgtttgtttgttttttggagacggagtctcact

SEQ ID NO: 681527 - DNA, 918 bp, Homo sapiens
gctttaagacttctcaatggctactcactgagcttagaatcaagtccaataaggtctaacaggagtgggcccctcggtctctttgcaaccacctggggcctctgtccctctcacatgctgcagccagactggctttctttcagcttaagttcaagtcttcttggacccaaggtcttcatgcttgctgctccctttgcccaaaacactcctcccctactcctttgccttctgtcctccctttctcccactcccccatagctgcctcattcttttccataggacttaacttaaactgtgcatccwcagggacacctttcttgaccaccctataaaaagtaggccctgatggcagggaacatcacacactggggcctgtcggagggctgggggctgggggagggatagcattaggagaaatacctaatgaaaatgtcgagttgatgggtgcagcaaaccaacatggcacatgtatacccatgtaacaaacctgcacgttgtgcacatgtaccctagaacttaaagtataatactaataataaaaaaagtaggccctgacccttcatgccccagctggtccactagagctcttggctaggcccctccgtggcatttattgcagcttggactagaattttatatgtaggtttttgttatgttttattttcataaggcctacctcctccacaagactaagcatcttcagggcagagcacagctgtcttgctcaccactatatatccagtgtccaaacagtttctgacatatagtagctgctctataaatatacatggactatgtgttgtgacactgggtaaatcacttcccttcaccacgcatctgttttcccctctaacaaatgagagggtggacttgatcagtgtgttttgtttgtttgttttttggagacggagtctcact

SEQ ID NO: 681528 - DNA, 918 bp, Homo sapiens
gctttaagacttctcaatggctactcactgagcttagaatcaagtccaataaggtctaacaggagtgggcccctcggtctctttgcaaccacctggggcctctgtccctctcacatgctgcagccagactggctttctttcagcttaagttcaagtcttcttggacccaaggtcttcatgcttgctgctccctttgcccaaaacactcctcccctactcctttgccttctgtcctccctttctcccactcccccatagctgcctcattcttttccataggacttaacttaaactgtgcatcctcagggacacctttcttgaccaccctataaaaagtaggccctgatggcrgggaacatcacacactggggcctgtcggagggctgggggctgggggagggatagcattaggagaaatacctaatgaaaatgtcgagttgatgggtgcagcaaaccaacatggcacatgtatacccatgtaacaaacctgcacgttgtgcacatgtaccctagaacttaaagtataatactaataataaaaaaagtaggccctgacccttcatgccccagctggtccactagagctcttggctaggcccctccgtggcatttattgcagcttggactagaattttatatgtaggtttttgttatgttttattttcataaggcctacctcctccacaagactaagcatcttcagggcagagcacagctgtcttgctcaccactatatatccagtgtccaaacagtttctgacatatagtagctgctctataaatatacatggactatgtgttgtgacactgggtaaatcacttcccttcaccacgcatctgttttcccctctaacaaatgagagggtggacttgatcagtgtgttttgtttgtttgttttttggagacggagtctcact

SEQ ID NO: 681529 - DNA, 918 bp, Homo sapiens
gctttaagacttctcaatggctactcactgagcttagaatcaagtccaataaggtctaacaggagtgggcccctcggtctctttgcaaccacctggggcctctgtccctctcacatgctgcagccagactggctttctttcagcttaagttcaagtcttcttggacccaaggtcttcatgcttgctgctccctttgcccaaaacactcctcccctactcctttgccttctgtcctccctttctcccactcccccatagctgcctcattcttttccataggacttaacttaaactgtgcatcctcagggacacctttcttgaccaccctataaaaagtaggccctgatggcagggaacatcacacactggggcctgtcggagggctgggggctgggggagggatagcattaggagaaatacctamtgaaaatgtcgagttgatgggtgcagcaaaccaacatggcacatgtatacccatgtaacaaacctgcacgttgtgcacatgtaccctagaacttaaagtataatactaataataaaaaaagtaggccctgacccttcatgccccagctggtccactagagctcttggctaggcccctccgtggcatttattgcagcttggactagaattttatatgtaggtttttgttatgttttattttcataaggcctacctcctccacaagactaagcatcttcagggcagagcacagctgtcttgctcaccactatatatccagtgtccaaacagtttctgacatatagtagctgctctataaatatacatggactatgtgttgtgacactgggtaaatcacttcccttcaccacgcatctgttttcccctctaacaaatgagagggtggacttgatcagtgtgttttgtttgtttgttttttggagacggagtctcact

SEQ ID NO: 681530 - DNA, 592 bp, Homo sapiens
tatttgaatatagacacactgttttttgtttgtttgtttgtttgtttgttttgcaatttgaacctaaagtttgaacttaatcattgggttcctactggagatttatcttatcgttatctgcacagaataaacaaataacttttcaactttcatattttgtcatgacatcacaacttgaaagatttgtcagtataggctattaagtattgactccattttgtttattttattttattattattattatttttgagacagagtcttgctctgtcacccagctggagtgcaatggcacgatcttgactcactgcagccttcgcctcccgggttcaagggattcttctgcctgagcctccggagtagctgggattacaggtgcccgccacgatgaccagctaatttttgtatttttagtasagatggggtttcaccatgttggccaggctggtctccattttgtaattaaccaaaattgactaaatgaaacgttacacaattgcacaaatatcataaataaaaatttttctgtaactaatgaactttttttgcttcttacctgagctctttgaaatcacgtatttttttttttttt

SEQ ID NO: 681531 - DNA, 653 bp, Homo sapiens
ttctgtcgcccaggctggagtacagtggccatgatcttggctcactgtcacctctgcttcccatgttcaagcaattctcctgcctcggcctcccaagtagctgagattacaggtgcatgccactatgtgcagataattttttgtatttttggtagagacgggcttttgccatgttggccagggtggtctggaactcctgacctgaactccacttgcctcggcctctgaaagtgctgggattacaggcatgagccactgcttctggcctaattgacagcatcttaatagctactggtgatcataggctttgagaaatgccataatggttatacaatgttaaagttagttcaaatttccatggataagaacataatattaattcagcagactgagggacttttagtkggtcttggtgggtgagctctttctgattctgtcaattttgtaaatgattcatagagaagaattaacatgctatttaaaaagtgtatagacactgtattgcaagatgacatcaatattactaaaggcagaaaataaaataaaaaaatgatttggagcttttagaggtgttacaagtactattgaaactaaataatgttcatcatagaaaataaaagctcataaacttataaaagctaagacttactagc

SEQ ID NO: 681532 - DNA, 663 bp, Homo sapiens
tgccccattgcagagacattctgagggtgagacttgacaaggcacggggctggcataggacgggcactccactcccttttcctttaaaaaattgctcagtagatgcacactgtttttgacttcacatgraagtttcttttgttgttctctttcagtaatcacatagaggcataaaactgctacagaggcttttgcaaactggaaattttatttgttctgcaatgggccagacattcttctaggagtagggaaaactgcaggaaaatctatattcctgtcccatagagttctcaatccagttgcaggtgacaggcagccagcaccggtaagcatggcaaacagcaggtgctgggaagggctaggaaaaaaagccagggagaagggatggggtcaggcagcctctgacaaggccacaaaggagctaaggcctgtgtgaggtcaggggctgagcatctggggtattccagggcattccaagtctgagtctacagtgtctttaccatcccaaagcccagctgtttaatttggccactagtgaccaagtcactgatatgttcacataggttctggcctgaggtttctcagccacctggcaagaaatgcagctattgatcaaggccccctgcctgcaggacccagtgctaagagtggggtcaccaccat

SEQ ID NO: 681533 - DNA, 663 bp, Homo sapiens
tgccccattgcagagacattctgagggtgagacttgacaaggcacggggctggcataggacgggcactccactcccttttcctttaaaaaattgctcagtagatgcacactgtttttgacttcacatgaaagtttcttttgttgttctctttcagtaatcacatagaggcataaaactgctacagaggcttttgcaaactggaaattttatttgttmtgcaatgggccagacattcttctaggagtagggaaaactgcaggaaaatctatattcctgtcccatagagttctcaatccagttgcaggtgacaggcagccagcaccggtaagcatggcaaacagcaggtgctgggaagggctaggaaaaaaagccagggagaagggatggggtcaggcagcctctgacaaggccacaaaggagctaaggcctgtgtgaggtcaggggctgagcatctggggtattccagggcattccaagtctgagtctacagtgtctttaccatcccaaagcccagctgtttaatttggccactagtgaccaagtcactgatatgttcacataggttctggcctgaggtttctcagccacctggcaagaaatgcagctattgatcaaggccccctgcctgcaggacccagtgctaagagtggggtcaccaccat

SEQ ID NO: 681534 - DNA, 607 bp, Homo sapiens
tgctctgaaagctatggtgaccaactggagaagttaagagtagaaaagtaaccatttatccctaaaccatttttataatgggatggagatggagagaaggaggttttcacaattagcagatgagacccagggaggaactggatcaaggcagttatgggggaacgggctggaggctaaaggtgttgtggaggtggactcagcaggacctcatggctgaccacaatccataaagtgaaaggggcccaggttcactccagggatctggcattaagaaaatagtgtcattcaccaagataggcatcagaagaagggtctgttatctagaaaagagatatccaaaaggcagcctgaggttgtatctggagctcaggagagaggcttaggttggagataggtacatctgggagtcattagcttagcgaggatttggggagctacagatgtctacaaggcaaagttgacagatgacaggaccttgggggatgtgggcatttgagatgaaaaatagtcctgctttattgcatttgccaatttccatggtgtgaatatccccaccacgastgaccgcaagctacccgtgtgaagttgctgaacacagggcttgaaa

SEQ ID NO: 681535 - DNA, 1906 bp, Homo sapiens
gaagccccaaccctcagtatctgagaacataacctatttggagataagtcccccctgacccaggcttcattaaggagtagctgacaaataaaagtagtatatgtttactgcatgtactgtgatattttgatatatgtatatagcatgaaatgattaggtcaatctaattaacatattcatcacttcacatcgttattattttgtgcagtgagaacatttaatatctactgtcttagcccttctcaagtgtacaatgtattattattaaccatgattattatagccactatgggggacaataaagctccagaactcagactccttgtccaccacttctccatttcctccaccgcctaggtctttaaagaagtaattagcatagattggggccccaatctaataggactcgtgtcctgataagaagagacaccagggccatgggtgcatagagaaaaggccatgtgaagacagaggcggaggacagccacctgcaagccaaggaagagaccttcaaaaaaaccaaatgtactgatactttgtgcttgaacttccaacctccaggactgtgagaaaataaatttctgctctttcagtcacttaatttgtcatattttgttatagcagccctagcaaactatatatgccataaatcatataggttatatttcatatggcaataaaaactggaatagggcagtgatatggatccctgcaaaggagagcagagagcagtaagaacagcaaatcgatctcaggaagcccctgggtgaggcacatggtggaagagagagaagcaagagcaggagrtggccaagaaaagggggatcagagagaaaggagagggcccagattcgtgcagaatcctgcaagttgaggggaactattcccatgccgatgaccttcatcagttcttatttttccatttccctgctactaatgaataacctttgctcatgccactccctttacattaaatactccatcaagacttcttagctttgctatttttcatgaaagactctctagagacgtttattcgatacacaatttgttaaaaaaattaaactccataaagatggcctgccatctgggaacataataaaactagtctttaatctgaaattcattcttttctacagcagagagaagcatccagtgtgtgtgtattgtctgcctgcttgtgaatttccactgagccattatgcaatctttttaatttttttcttttctaaaaatgagtccttatttctgaaaaaagctacaatagtcatctttggcaattaccaacatttccccgcattaagacattcgtttccacatctggcaaggagaaaacagcaggaagtcacatgtgccctggatcgtcattgtaaccaatgtcattactctattttctggaagggtttccagtggtctgatggcggggacacagcagtgtttgtcttgggggtatgtgatctatatgggtaaccttgggtatcaggctcactagatgggatgctgaggcatgaagctccataaaccgtgactgctacgcaaaggcattgttctttgacttcagaatatattgcataacatttcacatttttcatattattttagaattttagagctgggaaaaattctgaaaatccttcatcagccccttcatgtggattaattgatttatttttagagctagtgtagcaagatggttaaaaatgttcatggtaggttgagacacacttgggtgttaattcttcctcagccactgactagttgtatagcctgggacaagccatccaagctctgagttttctgatctacaaagtgggaataatgaaaggatctgtgccagggatattgtacagagtaagtgtgataatgcaagtaagagagagcccaggacactgtgtatgtctagaaa

SEQ ID NO: 681536 - DNA, 1906 bp, Homo sapiens
gaagccccaaccctcagtatctgagaacataacctatttggagataagtcccccctgacccaggcttcattaaggagtagctgacaaataaaagtagtatatgtttactgcatgtactgtgatattttgatatatgtatatagcatgaaatgattaggtcaatctaattaacatattcatcacttcacatcgttattattttgtgcagtgagaacatttaatatctactgtcttagcccttctcaagtgtacaatgtattattattaaccatgattattatagccactatgggggacaataaagctccagaactcagactccttgtccaccacttctccatttcctccaccgcctaggtctttaaagaagtaattagcatagattggggccccaatctaataggactcgtgtcctgataagaagagacaccagggccatgggtgcatagagaaaaggccatgtgaagacagaggcggaggacagccacctgcaagccaaggaagagaccttcaaaaaaaccaaatgtactgatactttgtgcttgaacttccaacctccaggactgtgagaaaataaatttctgctctttcagtcacttaatttgtcatattttgttatagcagccctagcaaactatatatgccataaatcatataggttatatttcatatggcaataaaaactggaatagggcagtgatatggatccctgcaaaggagagcagagagcagtaagaacagcaaatcgatctcaggaagcccctgggtgaggcacatggtggaagagagagaagcaagagcaggaggtggccaagaaaagggggatcagagagaaaggagagggcccagattcgtgcagaatcctgcaagttgaggggaactattcccatgccgatgaccttcatcagttcttatttttccatttccctgctactaatgaataacctttgctcatgccactccctttacattaaatactccatcaagacttcttagctttgctatttttcatgaaagactctctagagaygtttattcgatacacaatttgttaaaaaaattaaactccataaagatggcctgccatctgggaacataataaaactagtctttaatctgaaattcattcttttctacagcagagagaagcatccagtgtgtgtgtattgtctgcctgcttgtgaatttccactgagccattatgcaatctttttaatttttttcttttctaaaaatgagtccttatttctgaaaaaagctacaatagtcatctttggcaattaccaacatttccccgcattaagacattcgtttccacatctggcaaggagaaaacagcaggaagtcacatgtgccctggatcgtcattgtaaccaatgtcattactctattttctggaagggtttccagtggtctgatggcggggacacagcagtgtttgtcttgggggtatgtgatctatatgggtaaccttgggtatcaggctcactagatgggatgctgaggcatgaagctccataaaccgtgactgctacgcaaaggcattgttctttgacttcagaatatattgcataacatttcacatttttcatattattttagaattttagagctgggaaaaattctgaaaatccttcatcagccccttcatgtggattaattgatttatttttagagctagtgtagcaagatggttaaaaatgttcatggtaggttgagacacacttgggtgttaattcttcctcagccactgactagttgtatagcctgggacaagccatccaagctctgagttttctgatctacaaagtgggaataatgaaaggatctgtgccagggatattgtacagagtaagtgtgataatgcaagtaagagagagcccaggacactgtgtatgtctagaaa

SEQ ID NO: 681537 - DNA, 1908 bp, Homo sapiens
cactgctactctccaggttatggtcttcagcatcgtcaacaccaagtgttttccaaaatcaaagtgggagcagactcaatattcccattaaataggattcaggccaactcatctggatttgaaatatgtgtccacctaccaaaaagctatagatttcaagacccctggtgacagatctctagagttaacctggcaaggaggcaagggcaactgcaaaaagaaagaagcagaactggcaggaatttttggtatcagatagctaccactgctttctctttttcttctgtaagattttccttattgtacacttcccttttcttaaactgcaactcttccctgagtactgtaaactagtattgtgttttaatttccactgtgtcatacaggagattctgcatggcscataaaaatgcattgtttgttgctatagttcattctatcctcagcatttatatattagtagtgatattatacagaactttctaataaggcatctcaatttccaatgtattccactgggaaacatgatgcatcaatcactgactatttctttgttgcttaccttttgtataaaagagtcaaccatctctgcaggtgcagtggttcacacctgtaatcacagcactttgggaggcgaagatgtaggatcccttgaaaccagaagttttggaccagccctggcaacataatgaaaggcaatgctgtctctacaagaaaataaaaaattttaaaaatgcccatagtcctagctacttgggaggctgaggtgggagtatcacttggggcggggaggtcaaggctgcagtgagccataattgcaccactgcactccagcttgggcaactgagatctgtcttaaaaaaaaaaagagtcaattacatgctaattactcaaaaagtattgttagatgaatttagactgtttccaaaatttcaatacttagaattgtttatgtgtacatgatttcatgatttgggagcctaaggtaccaaggactgttgtacttccacaattatgtaaaacacatcaaaattatcagaagaataagaataatataaattgtttttaatgcatcttttttaagacatagaaataaatgtaactaatttgccttattcttcccatagtttgtgactctttttcaaagatacttcacattttacacctacatcattgtcattgctcctgcagaggcaaggaaagaaaaaaatgagagattagaacagaaagttttgagcatgcttttaattataaaagcctgtgataaccctattgaggaattgtttattttataaagtgaacaacattcaaagctaactcaatatactaatgttaaaaattattcacatggcaattagttcatttctgaggttttctattttgcttatttcaatatgaattcactgatgatatctgcatctaagtaaaaatgaatttatcagaagtactatggagtctcaaacaattagtaggaggctggaggacaaaacatggaaattgtcagaaaccaagaagaaagatgcacagtgatcattttgtaactgaaacaatgtgatcaggatgttggatgacatataaggttgaatgacctacatatattcctttctctttggttcaccagagcctcagtgatcaaaagcgtttaagctacaagctggccccctagatctcttggggcaggagatgagtaaatggtctcttgaattacaacttaagccatttttattttattttattttattttattattattattttttgagatggagtcttgctctgttgcccaggctggagtgcagtggcgtgatctccgctcacttcccagattcatgccattctcctgcctcagcctcccaagtagctcggactacaggcgcccgccaccacgcccggctaattttttgtatt

SEQ ID NO: 681538 - DNA, 1908 bp, Homo sapiens
cactgctactctccaggttatggtcttcagcatcgtcaacaccaagtgttttccaaaatcaaagtgggagcagactcaatattcccattaaataggattcaggccaactcatctggatttgaaatatgtgtccacctaccaaaaagctatagatttcaagacccctggtgacagatctctagagttaacctggcaaggaggcaagggcaactgcaaaaagaaagaagcagaactggcaggaatttttggtatcagatagctaccactgctttctctttttcttctgtaagattttccttattgtacacttcccttttcttaaactgcaactcttccctgagtactgtaaactagtattgtgttttaatttccactgtgtcatacaggagattctgcatggcgcataaaaatgcattgtttgttgctatagttcattctatcctcagcatttatatattagtagtgatattatacagaactttctaataaggcatctcaatttccaatgtattccactgggaaacatgatgcatcaatcactgactatttctttgttgcttaccttttgtataaaagagtcaaccatctctgcaggtgcagtggttcacacctgtaatcacagcactttgggaggcgaagatgtaggatcccttgaaaccagaagttttggaccagccctggcaacataatgaaaggcaatgctgtctctacaagaaaataaaaaattttaaaaatgcccatagtcctagctacttgggaggctgaggtgggagtatcacttggggcggggaggtcaaggctgcagtgagccataattgcaccactgcactccagcttgggcaactgagatctgtcttaaaaaaaaaaagagtcaattacatgctaattactcaaaaagtattgttagatgaatttagactgtttccaaaatttcaatacttagaattgtttatgtgtacatgatttcatgatttgggagcctaaggtaccaaggactgttgtacttccacaattatgtaaaacacatcaaaattatcagaagaataagaataatataaattgtttttaatgcatcttttttaagacatagaaataaatgtaactaatttgccttattcttcccatagtttgtgactctttttcaaagatacttcacattttacacctacatcattgtcattgctcctgcagaggcaaggaaagaaaaaaatgagagattagaacagaaagttttgagcatgcttttaattataaaagmctgtgataaccctattgaggaattgtttattttataaagtgaacaacattcaaagctaactcaatatactaatgttaaaaattattcacatggcaattagttcatttctgaggttttctattttgcttatttcaatatgaattcactgatgatatctgcatctaagtaaaaatgaatttatcagaagtactatggagtctcaaacaattagtaggaggctggaggacaaaacatggaaattgtcagaaaccaagaagaaagatgcacagtgatcattttgtaactgaaacaatgtgatcaggatgttggatgacatataaggttgaatgacctacatatattcctttctctttggttcaccagagcctcagtgatcaaaagcgtttaagctacaagctggccccctagatctcttggggcaggagatgagtaaatggtctcttgaattacaacttaagccatttttattttattttattttattttattattattattttttgagatggagtcttgctctgttgcccaggctggagtgcagtggcgtgatctccgctcacttcccagattcatgccattctcctgcctcagcctcccaagtagctcggactacaggcgcccgccaccacgcccggctaattttttgtatt

SEQ ID NO: 681539 - DNA, 604 bp, Homo sapiens
ccttttccaaaattaagtagagtttgcatctcttgctcttattttgtgaccttagtttctactttttggggtaaacccatatagtattgcctggctagatatttgaagtcatagctgttcggatgctatttttacatatgcccaaagcccatgctttgtaggcttacttacttgggtatgaagccctaggcttaccttgcaaggatgaaaatttaggcacatattttttattctttttggaaacttcgttgaaatcttctttattaaatctatcactcaatgtgtgctttctaccaagcacagaataagaatagtatcaccaatctctatgctgactttctttctaactaactgaagaaatatgatggccatttatgtaggtaaagtctcaagttgaatagaccgaagacatataagagggaaggtttcaygtggcagtccatataatgcccccccaatggtataagatcttaacgtctagaatctgtgaatgttgttttatatgggaaaatggtctttgcagttgtgatttggttaatgattttcatataggtagattatcctagattatctgggtgcatcctaagtgtaatcacaagtgtcc

SEQ ID NO: 681540 - DNA, 614 bp, Homo sapiens
ataaatatatcgtatggcttgcatttcattgttaaaaggcacggattgaggccgagagtggtggctcacgcctgtaatctcaacattttgggaggctgaggcaggtggatcacctgaggtcaggagttcgaggccagactgggcaacatagtgaaaccccgtctctactaaaaatacaaaaataagccaggcgtggtggcacatgcctgtaattccagctactttgggagcctgaggcacaagaatcgtttgaaccttagaggcggaggttgcagtgagacaaaattgcatgactgtactccagcctaggtgacagagtaagactctgwctcaaaaaaaaaaaaaaaaaaagaaaaagaaaaaggcagggttgagtagttgcaaaagagaccatatggtccacaaaacctaaatatttactatgtggccttctaagaaaaagatgctgactcctcacctagagaaactctgcatgttgtttacaagacatgaataagtatgtttatcagagctgttttctttttgaagtactttaagttttagggtacatgtgctgtttttaactgaaaaattagaatcaacttaagtgtccatcaactagggaggagataaac

SEQ ID NO: 681541 - DNA, 614 bp, Homo sapiens
ataaatatatcgtatggcttgcatttcattgttaaaaggcacggattgaggccgagagtggtggctcacgcctgtaatctcaacattttgggaggctgaggcaggtggatcacctgaggtcaggagttcgaggccagactgggcaacatagtgaaaccccgtctctactaaaaatacaaaaataagccaggcgtggtggcacatgcctgtaattccagctactttgggagcctgaggcacaagaatcgtttgaaccttagaggcggaggttgcagtgagacaaaattgcatgactgtactccagcctaggtgacagagtaagactctgactcaaaaaaaaaaaaaaaaaaagaaaaagaaaaaggcagggttgagtagttgcaaaagagaccatatggtccasaaaacctaaatatttactatgtggccttctaagaaaaagatgctgactcctcacctagagaaactctgcatgttgtttacaagacatgaataagtatgtttatcagagctgttttctttttgaagtactttaagttttagggtacatgtgctgtttttaactgaaaaattagaatcaacttaagtgtccatcaactagggaggagataaac

SEQ ID NO: 681542 - DNA, 592 bp, Homo sapiens
taactgccattactaccatgtgtaacattgaataatgctatttctagaggaaaatgaattcaaagtttgaaattgggatgtcaggaacatttcatctccttttattgctctagtataagagttttcttccttaccttaccattactgcccccactgctactctttgccaagcaattaaagtggaaattccctgcttctaarctactgggagggctctaattttgggggggtccagggtttaatgattagaaatgagaacaaaattcagatgaaaaaaagagcagagtttcaggaagtcagaggatgaggagctatctggggaatagtctgatcttttaacggctccctttccctaatcctaaagcaagcacaaaatatttttagagctttatgatctcttattgttagtaaagatgaaaaaataaatcagaagtgagcaggctatcctatgcttgttattttttcacatgtatttttaacagtatacatactcttcatccactcaacaaataattaattgctactagatacctgggacagtgcttgtatagttatgaagaagaaaaagcttgttgttcagaagctcatagtc

SEQ ID NO: 681543 - DNA, 952 bp, Homo sapiens
aaggcattaaaatttaaatttttttatcatattctttttgttctactttcctccttatttttggtgcttcatccacaccatgattcgttgacacgctaaaacaagccacactccctcctaccctgggtcctctgcatgtgatctgttttacccagaacactcatcctctactcctcccctttgcctagttaactcctatttactcttcaagtctttactcaaacagcacttcccaagagagctcttccaaacctccagagtatatcatatctctctgttatatatatttacagcaccttgtacccttctttcatggcatttgtcaattttacctttattatttctgtcattatttgacagtgtccctgactaaactgtaaggtccaagagagcatagaacaatgtctagttttgctagcactgtattccccagcatctattgcaagtaactaacatagtagatggtcagtaattttctttaaatatgttgacatcttcacttacgttagtgtcaaatctttgtggtcttagattcattttgtctctaggttgactttatgtatrtatatctattcttgtggattccattaaattctatagcatgattttcagatggtactaattattcttatatttctggattactgagtgctacctcacttttgccagcatataactgatactagtttattgatggaaatgttgcatataaattaaatttttaagtcacattttttaaatgatctaggaaagcttgatgtttaaagaaattacgttaggaatcattttgtaatttaattatccactgttaggtcagatttttaatgtataatttttattttagatatttttttcctagaacaagcatataggtgtttctataaatgaccgtgagaaattcttttatttctttaattttgtggtggtatttttataaagtgactgctttgtg

SEQ ID NO: 681544 - DNA, 550 bp, Homo sapiens
tttttttttttttctttttaaatgtgtcttagagactctacataagaagattaattattcagcatgtttattatttcacatattgacatgtaaaagtagaacatctgtgaaaatactatagaaaggaagtgatattactgtttaggaaatttgaaagctgatggtgaactatagtttagtaagaattcaagtttattaaataaacctaagtaatatcaaatagataaataaacctaataaaatatcaagtttwttcaggattgttacagctgaatttttatcagattatgaactcggatcctaggggtatgtttaaattatccgtgtattttcctgagagatgatgctcatacatgaatatgtgatcagaggaagggatatatatatgagtatcttatctgtaattacatcttactaggaagtgattttggttcatagaagcatctggtctcctgtctgactgaaaaaattagaccctgattttagtattctacctatttcatcctttgcctactagaacagttttttaaaagtcatttaaaaaattgaa

SEQ ID NO: 681545 - DNA, 1349 bp, Homo sapiens
tgttcattttgattttgttttttaagctatgactgttgccatcctaaataaaattggctttctatcaataaaggagaaagagataatggttgttgggtaggaaggagcagcatctgcaaattagattcattaactagatcaaaaagcagctaccasattttctgtcagctactcttccttgcccacttcggctcagggactggagttgtgttctgaatactctaggagcaggtctatactgaataaatcagtaatggttgttagaaatgtctttaaaacatgttctcaagacttatcagttaggaaaatcataccaaacacaatgaaactgaaaaattttctacatattctaaaaccaaaacataattagatgctgcaaaattaaaaatttaaagagataaagaaaagctcataaaataagagcatatatatacaattgagatttgggttatttaaatattaagaaaatagaatatttattcttaaacatttcctgtttatttgtaggactatgtgggcctatgttaaaatatagttccttattctttgattcatacattcattcattcagtgacaaatttactttgtatttctgtcttgggcagcactgtactggtatgtgttcatattttcttgcctctttcatttcttcttgattctttcttgctcagaacctacacaggcaaggtctcttttctaagtgacctgtgatttatactgtactgtgtagactgcccataagacaaaccctcagtgccttacctgaaatcttcaggggtagatgtatgtgagggttcagaattctttttaattttaggaaagtactgtgcatatgtggcatattattgcacagtctcctttgaaatttctgaatgttccgatcaaaaaataaagattctataaagcttcatgtcagttctgtttagatttactaccaaatgagttataaaaaagcttttgattttttcagagctttttggatttcacagtttagagattgtagttctgtagagtattggtttgggcgaattatgaaattgcttaaaataattagcaagcttcctaaaaagatgcattatagcagaaaccattttgattcttctaaatggcattgattgttactatcatccatacttgggtgcctcagcttttctttgttctgattcccatcatttcaaaaatctgttcaaaaatgtctgtctcttaagaaatctttgctagctgagcagtgcttttcacccttttgtaccacattctctaaacatgtaggtatttaggtgttgactttttttttctttgcgagaattcattccttgactttactgagtgttgtagcttcctaattatac

SEQ ID NO: 681546 - DNA, 1349 bp, Homo sapiens
tgttcattttgattttgttttttaagctatgactgttgccatcctaaataaaattggctttctatcaataaaggagaaagagataatggttgttgggtaggaaggagcagcatctgcaaattagattcattaactagatcaaaaagcagctaccagattttctgtcagctactcttccttgcccacttcggctcagggactggagttgtgttctgaatactctaggagcaggtctatactgaataaatcagtaatggttgttagaaatgtctttaaaacatgttctcaagacttatcagttaggaaaatcataccaaacacaatgaaactgaaaaattttctacatattctaaaaccaaaacataattagatgctgcaaaattaaaaatttaaagagataaagaaaagctcataaaataagagcatatatatacaattgagatttgggttatttaaatattaagaaaatagaatatttattcttaaacatttcctgtttatttgtaggactatgtgggcctatgttaaaatatagttccttattctttgattcatacattcattcattcagtgacaaatttactttgtatttctgtcttgggcagcactgtactggtatgtgttcatattttcttgcctctttcatttcttcttgattctttcttgctcagaacctacacaggcaaggtctcttttctaagtgacctgtgatttatactgtactgtgtagactgcccataagacaaaccctcagtgccttacctgaaatcttcaggggtagatgtatgtgagggttcagaattctttttaattttaggaaagtactgtgcatatgtggcatattattgcacagtctcctttgaaatttctgaatgttcygatcaaaaaataaagattctataaagcttcatgtcagttctgtttagatttactaccaaatgagttataaaaaagcttttgattttttcagagctttttggatttcacagtttagagattgtagttctgtagagtattggtttgggcgaattatgaaattgcttaaaataattagcaagcttcctaaaaagatgcattatagcagaaaccattttgattcttctaaatggcattgattgttactatcatccatacttgggtgcctcagcttttctttgttctgattcccatcatttcaaaaatctgttcaaaaatgtctgtctcttaagaaatctttgctagctgagcagtgcttttcacccttttgtaccacattctctaaacatgtaggtatttaggtgttgactttttttttctttgcgagaattcattccttgactttactgagtgttgtagcttcctaattatac

SEQ ID NO: 681547 - DNA, 2836 bp, Homo sapiens
caaaattcttttagattttatttgtgaaagtaattaaacagatagattgcatttaaagttatattttttatttttatttcttgaaaaataaaggcagagtagcttaatgttctgagaccacctgctaaattgcctggttagtctgtgttttaattgattttgtttatattttaagtcaaactttcttaattaactaattgcatggttctagtttattgtcagattattatacagtgaattcagtttgcaaagtgtgttttaattgtgtgttttgtgtggtgagattaaacttattttgcttgtttcttataaataacatcttcatccatcaaggaccataatcagaaaatgcaaatgatggggaggaaaaacaggtgctcatatatatagaattatgatgaggtattttgatatattaaaatatgaaggcagaattgtcatggaaagtaccatgtataatggataaaggattataataatttctagttaagatatttggaaatacataactgtatgtaactgaagaaaaactttgaaaagaagacgaggtggtgtcaaagaatagctggtgttagttttggtgtgtttgctagataatataaattttgaatgattctgttttgctattgctgtagcaccaacacttgaagttgtataaagtactgtgaaaatgttaaagtaaactaaatatctggagtatgagtgatttttaaaaaatgatttctattggggtgggagtaactgatggttacgtgagattacttcagtagcttattgttttcagtttcttgcaaacttagttctctgtccactttccacttcttttcctcccagtgtccatcatgtcttctgaaatagtaacataaagctaattattaacccaaagcagttcagaacatagactaaagtgatgtggcatatttcaaagtcttccactcttctgaactagattttttttccttctaaatgcagattaataaagcgtgcacaacaagaggaacaaggaaaaggattttagtgaaggtatcctgatcctgaaaaagtcagggagggcttcaagcccatcttggacttcagaacacctcacaactttgtggtaaaagaaacattttaaatagagcctttggacttatttatttcatccttattcagagagtagcgctttttttaaaatttttattttttttaggcaagacaattgtatgtgaaatcgcgttacttttcaaactgaaacatagggtttcagatttgttgtaggtacttaatatatactcaaaatattacaggtagttggttggcttgtgtgtttttctttgaaatgtgttcttttatcccttgtgacattgtgtttgcattcactgtgagtgatgttttctctagtgttttgtatctttaatcggttcattgggttgtatagtagggagtctttcctaggaccaatattgtttctaaaaatactttgaaagtagaaagtggtttgtgttttattgttttcatattttttaccagtcatatgatggcttactaatgtgaagagatgtagcactagtaaaaatttgttgttttctcctctattcacctggaaacctcacacaggatagatttcatttgtcaacacagatatagacagtgaatacaaacatctttgccatttctgtccttaacaacaaaacagtcttattttactttgttaactttttaaggtcctttttatttgtgaaaattaggttgtttatgtactatgtgttcttccaaagttacagagttatattcattggagaaatgaattttcttccagtagatgaaaattacattttgattgaacatcattccttatgcagtcacccataaatataatgtcttttgctgtcttttcagaaaatggctacagatgtgatttctgaattgacaaggaaatagaacatcttaatgttttaggtaaaacagatggtatttttgtttgaggcaaaactcagagaaagcaacttaattggtgacaagactcttggggtcagccaaattatatacaatttgtgtttgtttttgttgctttaatatcaaaagttttagaatacttggaatatttattcttttatttgactttactattttctgttgtgtactggaaatagttgtaaaatttttcaatcttttctttacaaaaattgtaagtccacatatttattctgcttcggttacatttatggtcttagaaatgctttttgcattgtgaaaagttcctgaaatttgtagttctacttttgagggttaacattttcatttgtagttttaagttgcatttgcaactacaaattctgtggacattgataccaactctgttctttccatgcctttgagctctaggcagatctcactgtcagatgcctggaatttccggagcacagtgttgtgaagggacccttgcatgagagtcagaggactgattctagccccatctctgtcactaaccagctcatatttttggaacttcagtttcatttgctctctatatttggcgggtattaataggtaatccccgaggtcacatccagttaacatttggttttcttgtctaagtattaatcatttataaagcawtcatttggataaacaccaggaaaggaagttttgaggaagagactactgtggacaataaccaagtgtttccagtaactgggacataagataatctgtcttccaaaatatctccagtattccaaaatgaagacctattatgtagcaaattttctttttaccacctcttacagaaattcagaactgggtagtgaaacaaccgcttgtgttgtcatcatagcaaccaggggaagtagcctaa

SEQ ID NO: 681548 - DNA, 1021 bp, Homo sapiens
  misc_feature 249, 254, 255, 256, 257, 258, 259, 260, 261, 262, 263, 264,265, 266, 267, 268, 269, 270, 271, 272, 273, 274, 275, 276,277, 278, 279, 280, 281, 282, 283, 284, 285, 286, 287, 288,289, 290, 291, 292, 293, 294, 295, 296, 297, 298, 299: n = A,T,C or G
  misc_feature 300, 301, 302, 303, 304, 305, 306, 307, 308, 309, 310, 311,312, 313, 314, 315, 316, 317, 318, 319, 320, 321, 322, 323,324, 325, 326, 327, 328, 329, 330, 331, 332, 333, 334, 335,336, 337, 338, 339, 340, 341, 342, 343, 344, 345, 346: n = A,T,C or G
  misc_feature 347, 348, 349, 350, 351, 352, 353: n = A,T,C or G
cccagccatgaaagttttttaacatgtttattaatttataaaatataaatgaatttgtatggaaaatgggtaaagtaaaaagaaatcaaaatgtttataacattcaaaattgaaatctgtgatacataattttttaatgattacaggaaactgacacacccatgaaaagtgggttaaattattgtttggattgattctctttattcatgctgaacttygctaatactatctagcatgaggtagctacgngcttnnnnnnnnnnnnnnnnnnnnnnnnnnnnnnnnnnnnnnnnnnnnnnnnnnnnnnnnnnnnnnnnnnnnnnnnnnnnnnnnnnnnnnnnnnnnnnnnnnnnactgccaggcgtttgtatcaggatgatgctggcctcctaaaatgagttagggaggattccttctttttctattgattggaatagtttcagaaggaatggtaccatctcctccttgtacctctggcagaattccgctgtgaatccatctggtccaggcctttttttggttggtaagctattgattattgccacaatttcagagcctgttattgttctattcagagattcaacttcttcctggtttagtcttgggagggtgtacgtaacaaggaatttatccatttcctctatattttgtagtttatttgcgtagaggtgtttatagtattctctgatggtagtttgtatttcttttgttgttgttgttgttgtttatactctttaattgaattgataagggacatagatctatttaaaaacaaaaccaaacagctatttctgtctagattaagaggtggccccaggtgagggattcgcattttgagtggccacttgtggtgcgacctcgatgatcctgggtttgtctatgattctggctgtgcagttgcccttctccacaatcccaataatccatgcttggtggccttcaccatatttgggggactttatctctgcacagaaccgagctgtttgctcacgtggcagtttgtatttctgtgggatccgtg

SEQ ID NO: 681549 - DNA, 632 bp, Homo sapiens
ccctcccctccctgcacgcaaaattttgctgttagatttcaccacattaaaatgtaatttcatcttattcaatgcctgcctttgttacttctaagagtctagcttcctttcttcccacactagtagggaagaaggcacaattttttattatttatttttaaaaacatatgtgtttttttaaattttattttattgtggtgagaatgcaacatgagatctattcttttcacacatttttaagtgtacagtatattattgttgacagtggttacagcagatctctagagcctgtttattttgcttcactgaaactctgcgcattttattgacagtgggcagaaccatagctgccctggtaagatactgccagtaagcactggcaattaaattgggcagtgcaatatgtcccccacaagagttctgaaagcctgttgtaaagatatctaagatggtagartgtgtttaggaaagatcacctttcctggttctcttctttctcctatgagaaagactctgtcagcggaggagccagacacacaggccaaggagaggttttttttatttaaatcggtgcaatatgttctgagcctctcaccttgtgccttgcacagagattttgccctaaggaatct

SEQ ID NO: 681550 - DNA, 583 bp, Homo sapiens
tgcaattagtactttatgacctagaaatgtaaaaagtgctttgtcacctgagcaaagtataggaactccttggcttatggtataaagttgtggagggctggaagctttttccttagtcaaagttcaaagtaaggcgggcatggtggttcatgcctgtaatcccagcactatgggaggccarggaaagagacttgcttcaacccaggagcttgagactagcctaagcaacatagggaacccccatctttgcaaaaaatataaaaattaccaagataatggcttgtgcctatagtcctagccactctgggaggctgaggaggggaggatcacctgagcccaggaggttaaggcctcagtgactgtgattgcacccactgcactccagcctgggcaacagttatatcttatctctaaccaaaagaaaaaaaaaaaagtaagccaggagcggtggctcacgcctgtaatcccagcagtttgggaggctgaggcaggtggatcacctgaggtcaggagtttgagatcaccctggccaacatggcgaaaccctgtctctactaaaaatacaaaaattagccaggcatgg

SEQ ID NO: 681551 - DNA, 606 bp, Homo sapiens
tactgatttaaatggtttttctatttgactgtttatctaaatggtcacagttctttactcttttcatatattgatgctctttgcaatgtgactttgtatctcctcttattaagaggtggagtctttgaatctgggctggctttgtgacttctttggccaacagaaagtagcagaagtgagagttttccagttttcagtctaggcctcagaggtcttgtttgcttcctctttttttcctggacctttgcttctgccatgtcaacaaacctaagctaacctgctgcaggactagagaccacatggaagagagcaatgaatcacccactgagagccagccagccaactcctaaacatgtgagtgagcccagcccacatcaacagagctgcctaccccatgaaaaactgactatagaagcatgaatgagcccagttgagatgagaaaacccaytataaactgacttacagagtcatgaacaatagtaactgcttattgtttaagccattgagatttgaggtagtttgttacacagtaataggtgtgataaatatttcaaactttgtaccctacagaaaatacctattctttttaaatggctgtaaaaatt

SEQ ID NO: 681552 - DNA, 2717 bp, Homo sapiens
gtcctcgatgtagtacctgggtgtcactgctggttattcagcgcttttcagttagtaggtggcaaatactgccaggactgggttcctttcttcaaggcagtgggttcccttctggcccaggggatgtctggaaatgtcttttgggagctaggacctggaatggaggcctcacaactctaactggcaccctatcctgtgtggttgtgctcatatcctagatgtaagacaaagtcttccrcacgtttccctctcccctcctcaagcacaaggaaggagtctctttggagccaccagctatgcagcctgaggttaggggaggggtgatgccagaactcccttggccatcctagctggtgtctcagtatattgtgtgtacctcctagtccactgtctctagcacttgcctaagagttgcagtccttatggcctagcctgcctttcaagttttcttggaggctcagagtgctgtagcctcagtatcaaggtttataggctgccctccctattctcattttataggaaaaaaaaaaaaagagacaggaagcggaaagatttttaagaaatacacaagggatgatgtgattcccactatgccattttgcataccaggagaccctggacccttgactctacagccaatttatatattgcttggattactgcagtttattgccttctctgtgtcttcttgatttccgtctaaccctctcataatctagtttccaatttttctaaaaggtgcattttctgggattcttcacaacttcagagtaaaattcatactcttcagctaggcgcacaacaacctgaatatggtaagtagattaagtgcaccaaaatcacctggagatcaaagttaaaatgaagatttctggatcccatccagatgcactaagtcagagttactgaggccgggacccaagagaatcagcattttaaacatggaccccgaaatgtgatttttgtgcatatttagagaaacatctgagtttatagagatctttcatttctatccctatgtaccatactccttcctgcctctaagtctcctggttttcttcaaaactttctcttcttttcctttaaccttctcatcctccaagacttagtgccttagggaagtccttctgaaccccctggatgctactttccctaagcctttccaagctattgctttgtagtgctaccattgcattttgtgcatgtggtgttacacactagggagcctagtaaaatgctggatataaagtttcttcacgttaattccataaatattatttactgcatgccataccctggacacataaatatgagtaacgtcagcctctaaagacaaaaatatgggaagacacaatcttctttgtgaaacctaagagagtaagatgacatttcaatgataggaaagataaacaatgtttgtaaacaccttgaggaagaatttgtttccactaattattattatttggacaataattattcagagtcttactctgttaagagttgagataaatacattttttccaccagatattttgctatccagttgtatgtatttggacgagtcatttctctgccaattggagtagatacccatgattctgagattcatttacatgatttctaatgagtctgaagttgtaaaattgttgtattttattatctcattttctaaatctgcatggttttctcttatctgctgaagctcatcgctcaggaccctaagtctcagctctgaatgagagctcaccttttttctatctcctgtgatgccagctccatgccctaatttgtctcttctctgaactccatgaggttttcccagtgatactgtgaatgagatggtcactgtagtgatatattttatatgcttatagctttctattttatagccttctagaatggaatccagttttctcttttacaaaggaaaacatctttgaaggaagagattttcatgcgggctgtggcattattagattgcttaaatattgcagtaacaaaatagttgctgtaggaattttcttgagttctgactatcaaaaaatagttttaatatgaccagtgattatttactctaggttttagtaaattttatttgataatcaaaatgtaatagtttgttaaaagcaaaatttttaccgagagcacagagtatacatctaggtgtacctttaaacccatgtaagtgtgcatgttcccatttagagatcaaataaatatgaagattcatttccatattaaaaatgtcatcctagtagctaacatatttcacatttaatatatgaattagatattgcaataagcaagttacatatacatgctcacatattcctattcatatacaatttttatctatacaacaaataagtagaaaagtaagtttttgtcccacagtcccaaagctagtaagtagcaaatccaagatttttatctatgcattttgaccccaaagaattggtttaacatcccccagaaatgttatcttccaatgtccacctaagctctctatacttcgtctagcttctagcctataggatgaaggaaggaaagtaggagcaagcaattttctttaaagggtgacccaaaagttttacatactagttctgttcaaattccatgttttactactcagtcacataattacactcagttgaacagtagactgagaaatgtttctgggtgcatagccacacatctaaccaaaaagcagtggttga

SEQ ID NO: 681553 - DNA, 1239 bp, Homo sapiens
agcctggacaacatggtgaatctctatccctactaaaaatacaaacaaattagctgggcatggtgacacgcacctgtaatcccagctacttgggaggctgaggcaggatgatcgcttgaacccaaaggcagaggttgcagtgagccgagatggtggcactgcactccagccttggcaacagagtgaggccctgtctcacaaaaacttataataaaataaaaataaaataraatctacctacaaaaatactaggctctgatgatttttgtagttgatttctatgttccaaagatggattatttcaatgttatacaaactattttagaaaatagaaaatggagggattaaaactgtataaatgtcttactaaatcctaagaggacagagtaaaatagaaaaatgataagcccttctttattaggaaagaaattaagaaagtcaaaaccaaatattagcagatattatcttacaatgctttttttttttaaataaccaagtacggttattttattgcaggtttattccagaaatgcaagagtagtttaacattagaacattttaaaatgtaactatatattccaattaaagataaaaaccatatgatcatcttgtttggataaagaaaatgcctttcatacgattcaaacacattcatgataaaaactcttggcaaagtagggaaaagtaggaactttattaaccagtagaagtcacttacaaacacttgtaaatatctttccttttaaacagtggagcattaaaagcattcctttcagaatcagaaacaaggaaacaattctgctaccaccacttctattcgacaatgcactgaaaattttaggcattacaataaactagataattgtattatctacataaagaaaaaacagattatagaattaaattatgagaaatagtaggagagtttaattggtggttagatatcaaatcaatatgcaataaccaattgcattttattttggtaataggcagtaagaaattaaaacttgtttattttatgtaaaatatgaaatatattgaaatatatctaatgacaaatatgtaagacatatggacaatattatagactatattacaattcattaaagaagaccttgatgaagagatacactctactcatggtctgaaagactaagtatgatacaaatgttcatttccctcaaactgatctattaatacaatgcattccattaaaattctaacgagagttttgaagga

SEQ ID NO: 681554 - DNA, 1202 bp, Homo sapiens
cttggaggggtggcttcggcttcagatccagcatcctggaagttacttggtttagcaaggcattgttgcctggtagatgatctgatatggttgaccacagtctgaaggcatagaaatgctgttttattataaagtccgggccaggaaagaaatagaggatattgataattaggcctctgccctgtgggagctgtttttctatgcattcctaaaatacttgagtgcttgtgaggtgtatagtactgaagtaggggaagactgggctccaaaggggtttgtgatctgttggggtgttgaattaagccatacttgggagaagttcaatagtgcaaggtgtcgtgtggttaaaaagtaaatcttttactccgagtactctggctgggtattctgctgccatttcaggttcagccatgtctccatttcagttcccaatatcatagttttccttgtcagggtcagaacctgtcgcgtcacttttttctcctcttcctcaaatccatttgctctcattatgtctcttgtgtccgcctttcctttccattcctccttcaggcaccctgatttctgccccaacttactacagctctgaattatggcaggtgctcctcatctggtctccctggctctaccgtcatctatctacagaataccaccctgtttatcttcctggtgtagcacttcctgaaatagatcagcttgcctcagaaactgtcagtagttctctggggcctgcagcaggattttttgttttgttttgttttgcttttctgttttgttttgtttaacctaaggtctctgattgtagagagtacatgccccttgaaatgcgatataaaatgttataagcacacaacttttgccgggtcaccagcggtcccatgagccacaacagataagaacggctaacctgcaggtcatgtccagctctgacttgactgtcaaggccttccctccccartctgccttccttctcactactttcccctccaggccctagtggtgtgggcccttgttcttgacctcattagctttacttggtttttcctgactctcactaccctattacattcattaatttagaaaacaacttagtaaatacactctcccgtgaaaattccttctgctttcttgcctcagttcacccattctctcttaattctttctgatgctttctctttcagtgcccagctggcaaatcctag

SEQ ID NO: 681555 - DNA, 1200 bp, Homo sapiens
tgagggaccaggcgatctgcaggaagccccaggatggtgcctcagccagcggggttattctaggccagaagctcatggaagtggacacctgcaggtggggcccagaggacgaagggtggtagactagatgccctttatcctccactgttctccagccctgggctccttgcctgcacttgctctttttgtgaagacagcggtctagacgaatggagataacctttccagaccaatccccgcaacctttcgccaggacatttgcatgcaattcttatgaaaggtcacccagaaaactccgtggtcaaacagcatccttccaaacaacaaatgtgacagttaaaacaaagcacccttctcatttgatggcgcggaagcagctgggtttcagtacaacttggccggcctaggcttgtggcatttgttacctgagggaaacaatagcagctctgtaggcatttctgtctgaaagggcaggagctgcatgcctgcttctcaggttcaggccaacaagaaaggggcatcaggagacttttcatcaaggctgcaaggaagtttcacatcgtcccagcacccagtctcccaccgtgtgtgtctgtgcacacggacatacatgatgaagacatattgttttgattccagagcagggcttgacagggtatttctctttcattcaattctgaaattgctagattgtccatggccttgtcctggaattgaaaatgtatgctggaccatcggagttatttatgtatgttggagtgttatttttctccttctcctaggttttcctatggaaccaggacttttgtggaaatggtggcttatgggtagcttatggttctaaaaatactctctaatgcccatatatgctgtctatattgacgggtgtgtggtgcctgcttggatcacactttaggcaaaggaaatctggcccatgtaaagcccttgctgtttaggtggtctaattttgacccattcctttccatccacaccccacccacacagctcattggatcagggattgtagacctaactcacaatgaaccaattgaaaactttcaatgactcgtgacacacacatttaaaaacaagcaaacaaaaaaaaaaggaggaggataaagaactgaacaaattaaattccctrtcatgtgaacgattaatcagaaaagaatctcctattggcaaaagtaaacctagaac

SEQ ID NO: 681556 - DNA, 2452 bp, Homo sapiens
ctacctcctgaacagctgtagcttgagctcaccatccatgggccattttatttgttttcttcttactgtgtgctgtgtagctcttccttctttttctgtacttcctccaaatgaaaccatttgggaaagagacagaaatcaggtaagggaccccagatccaacccctccagaacacagagagactctcgtgttctctgttcctcctcccactttcctgaatcacttctgttgaacagacttctgagctgagttctctcaggaaaaaataggacattttcctttaagaaaagagagtcagcagcagaagccttcagtccaagctcacagactaatctggggatggtagaggactccggggtaaaattttaaaaactgtgactctgtgtccttggaacggattgttgagagagtgtaggatttgtctgggagcacagagtcacacatcccccgtcacatgtcaggtatckctgggcccagcccctgtttcacggctgatctgaagagcaaaaccaagtctctggaagcctctgatcagatgctaaaatctgagctctgtcttcagggaacagagtcctacctgatggggcacatacactcctgtgggctagacattccacacctgtcctcggcagaggaacactgaccagaatctcaatagaagatcatgcacaaaaagcacttctttgagttttccaaaaagggacaatgaaaaatgatttttactctcctaaaaagagtaacaggaaagaaacacagagttgtgtgaatttcagggagaaagttgcattattcaagaataatggtggactgagttttgtctaaggagaagagcatgagaactgggtcccagtctctgagtccttcagggtccaggggagacaagggaaagatgtcttcacctgaccccatgccctcgcccagaatcactcatcaacctcagatccatggaatcaccccttaccagcagcccctccactgccccgctgaaccaaccaccttgctgctgactcagcctggccccttccttttctatggaactctcccagggatctcatctccagagttcctgtcggtggcctcttctgcccccacatttgcaggtcgggaagactcatgtctgcccatcacagccttctcctggaggcagggatcaggcaggggtttgtccctcctccttctcacactgtgttctccatgtagagtgtgcttcttttcatcacttactggcctctctctagggttaagctgcaacctgtcatgtggtggttagacatttttttatccttcaacttgttggtcatgagcagctggagatgggcaataaagagggtgcacattcagatgtggttggagaagagaaaggattatgtccagaacaaccgagcagggctatgaggtgcattctgtgaacaacttaccattactcggcattgggcaggacaccccagcccccatgccttccaggggagtgaggacaaatcagtgcagttcaacagttcatggagtccactgctcccaaaacaagtcaagacacctccagagagccagtgaccatagacgctcccaaaatgcaaatggagaattgagcaatctagggctccaggtgctgaagaatgatctgtaccttcgagcctgctgagacctaaagatctggcaaaccatacctgaaggaccatcttgtaagagggtcaaagctccaactggaagaagatctgccagcccagcctcattgttttgacattgaaatgcccttgacccaaatactttttcttcttagaacattgagtcccaggcccaaaatatgtacagaggagatccatattttgtatctttgtattttggccacttcccaaggtcacaacatccactaagaggacaggattgacctgggtcattgggagcacaggatccctaagtctcaggtcctagggaccagggccagaacactgccttgacccaaatgtagaaaaagagaaccctgagtgatttaatcagaagagcaacctgaagtggattcaggattaagaccctccctcattgtagagctgtaacggtggaaacacaatattaaatactcatattatgcatttgttaaaacccacagaactatacaacacaaagagtgaatcttaatgtaaagaataggctacagttaacaacaatgtatcaatattgattcattaattgtaacaagtatatcacactaatacaaaatgttaatctgttaatcgtgggggaaactgcatgtaagtgacagggggctgggagaaaactggcaggtgtgagggcttgagagggaatacaggagttctctgtatccttggtttaaatttttttaaacctaaagttgctcaaaaatcaaaatctattatttttaaaataatatagagtatgttctctaagcacaataagattaacttaaaaatcaataacaatttaactcagaaagat

SEQ ID NO: 681557 - DNA, 2452 bp, Homo sapiens
ctacctcctgaacagctgtagcttgagctcaccatccatgggccattttatttgttttcttcttactgtgtgctgtgtagctcttccttctttttctgtacttcctccaaatgaaaccatttgggaaagagacagaaatcaggtaagggaccccagatccaacccctccagaacacagagagactctcgtgttctctgttcctcctcccactttcctgaatcacttctgttgaacagacttctgagctgagttctctcaggaaaaaataggacattttcctttaagaaaagagagtcagcagcagaagccttcagtccaagctcacagactaatctggggatggtagaggactccggggtaaaattttaaaaactgtgactctgtgtccttggaacggattgttgagagagtgtaggatttgtctgggagcacagagtcacacatcccccgtcacatgtcaggtatcgctgggcccagcccctgtttcacggctgatctgaagagcaaaaccaagtctctggaagcctctgatcagatgctaaaatctgagctctgtcttcagggaacagagtcctacctgatggggcacatacactcctgtgggctagacattccacacctgtcctcggcagaggaacactgaccagaatctcaatagaagatcatgcacaaaaagcacttcttygagttttccaaaaagggacaatgaaaaatgatttttactctcctaaaaagagtaacaggaaagaaacacagagttgtgtgaatttcagggagaaagttgcattattcaagaataatggtggactgagttttgtctaaggagaagagcatgagaactgggtcccagtctctgagtccttcagggtccaggggagacaagggaaagatgtcttcacctgaccccatgccctcgcccagaatcactcatcaacctcagatccatggaatcaccccttaccagcagcccctccactgccccgctgaaccaaccaccttgctgctgactcagcctggccccttccttttctatggaactctcccagggatctcatctccagagttcctgtcggtggcctcttctgcccccacatttgcaggtcgggaagactcatgtctgcccatcacagccttctcctggaggcagggatcaggcaggggtttgtccctcctccttctcacactgtgttctccatgtagagtgtgcttcttttcatcacttactggcctctctctagggttaagctgcaacctgtcatgtggtggttagacatttttttatccttcaacttgttggtcatgagcagctggagatgggcaataaagagggtgcacattcagatgtggttggagaagagaaaggattatgtccagaacaaccgagcagggctatgaggtgcattctgtgaacaacttaccattactcggcattgggcaggacaccccagcccccatgccttccaggggagtgaggacaaatcagtgcagttcaacagttcatggagtccactgctcccaaaacaagtcaagacacctccagagagccagtgaccatagacgctcccaaaatgcaaatggagaattgagcaatctagggctccaggtgctgaagaatgatctgtaccttcgagcctgctgagacctaaagatctggcaaaccatacctgaaggaccatcttgtaagagggtcaaagctccaactggaagaagatctgccagcccagcctcattgttttgacattgaaatgcccttgacccaaatactttttcttcttagaacattgagtcccaggcccaaaatatgtacagaggagatccatattttgtatctttgtattttggccacttcccaaggtcacaacatccactaagaggacaggattgacctgggtcattgggagcacaggatccctaagtctcaggtcctagggaccagggccagaacactgccttgacccaaatgtagaaaaagagaaccctgagtgatttaatcagaagagcaacctgaagtggattcaggattaagaccctccctcattgtagagctgtaacggtggaaacacaatattaaatactcatattatgcatttgttaaaacccacagaactatacaacacaaagagtgaatcttaatgtaaagaataggctacagttaacaacaatgtatcaatattgattcattaattgtaacaagtatatcacactaatacaaaatgttaatctgttaatcgtgggggaaactgcatgtaagtgacagggggctgggagaaaactggcaggtgtgagggcttgagagggaatacaggagttctctgtatccttggtttaaatttttttaaacctaaagttgctcaaaaatcaaaatctattatttttaaaataatatagagtatgttctctaagcacaataagattaacttaaaaatcaataacaatttaactcagaaagat

SEQ ID NO: 681558 - DNA, 2452 bp, Homo sapiens
ctacctcctgaacagctgtagcttgagctcaccatccatgggccattttatttgttttcttcttactgtgtgctgtgtagctcttccttctttttctgtacttcctccaaatgaaaccatttgggaaagagacagaaatcaggtaagggaccccagatccaacccctccagaacacagagagactctcgtgttctctgttcctcctcccactttcctgaatcacttctgttgaacagacttctgagctgagttctctcaggaaaaaataggacattttcctttaagaaaagagagtcagcagcagaagccttcagtccaagctcacagactaatctggggatggtagaggactccggggtaaaattttaaaaactgtgactctgtgtccttggaacggattgttgagagagtgtaggatttgtctgggagcacagagtcacacatcccccgtcacatgtcaggtatcgctgggcccagcccctgtttcacggctgatctgaagagcaaaaccaagtctctggaagcctctgatcagatgctaaaatctgagctctgtcttcagggaacagagtcctacctgatggggcacatacactcctgtgggctagacattccacacctgtcctcggcagaggaacactgaccagaatctcaatagaagatcatgcacaaaaagcacttctttgagttttccaaaaagggacaatgaaaaatgatttttactctcctaaaaagagtaacaggaaagaaacacagagttgtrtgaatttcagggagaaagttgcattattcaagaataatggtggactgagttttgtctaaggagaagagcatgagaactgggtcccagtctctgagtccttcagggtccaggggagacaagggaaagatgtcttcacctgaccccatgccctcgcccagaatcactcatcaacctcagatccatggaatcaccccttaccagcagcccctccactgccccgctgaaccaaccaccttgctgctgactcagcctggccccttccttttctatggaactctcccagggatctcatctccagagttcctgtcggtggcctcttctgcccccacatttgcaggtcgggaagactcatgtctgcccatcacagccttctcctggaggcagggatcaggcaggggtttgtccctcctccttctcacactgtgttctccatgtagagtgtgcttcttttcatcacttactggcctctctctagggttaagctgcaacctgtcatgtggtggttagacatttttttatccttcaacttgttggtcatgagcagctggagatgggcaataaagagggtgcacattcagatgtggttggagaagagaaaggattatgtccagaacaaccgagcagggctatgaggtgcattctgtgaacaacttaccattactcggcattgggcaggacaccccagcccccatgccttccaggggagtgaggacaaatcagtgcagttcaacagttcatggagtccactgctcccaaaacaagtcaagacacctccagagagccagtgaccatagacgctcccaaaatgcaaatggagaattgagcaatctagggctccaggtgctgaagaatgatctgtaccttcgagcctgctgagacctaaagatctggcaaaccatacctgaaggaccatcttgtaagagggtcaaagctccaactggaagaagatctgccagcccagcctcattgttttgacattgaaatgcccttgacccaaatactttttcttcttagaacattgagtcccaggcccaaaatatgtacagaggagatccatattttgtatctttgtattttggccacttcccaaggtcacaacatccactaagaggacaggattgacctgggtcattgggagcacaggatccctaagtctcaggtcctagggaccagggccagaacactgccttgacccaaatgtagaaaaagagaaccctgagtgatttaatcagaagagcaacctgaagtggattcaggattaagaccctccctcattgtagagctgtaacggtggaaacacaatattaaatactcatattatgcatttgttaaaacccacagaactatacaacacaaagagtgaatcttaatgtaaagaataggctacagttaacaacaatgtatcaatattgattcattaattgtaacaagtatatcacactaatacaaaatgttaatctgttaatcgtgggggaaactgcatgtaagtgacagggggctgggagaaaactggcaggtgtgagggcttgagagggaatacaggagttctctgtatccttggtttaaatttttttaaacctaaagttgctcaaaaatcaaaatctattatttttaaaataatatagagtatgttctctaagcacaataagattaacttaaaaatcaataacaatttaactcagaaagat

SEQ ID NO: 681559 - DNA, 618 bp, Homo sapiens
caaaactactgccatacagttctgaaaacatttttacccttaattcaaatcttcatgtcatcttttcaaacaaaaaataaatactgccgtttaagtagagaatgcaatactaattaatgtctgttccaattactcagaacaatattaaaaagagaaacgatgtgggtaaacaaaagtctatggcagaaaacamgaggttaattacaaatagaattcataaatgatgattctgagaaagaataagacagaaaaggtacaataaaagtatcactagaaagtattgtgtttgtcaaaaccactttgggcaaagaaacaaatctcaaatactgctagttaagagttcaaattgggcggggtgcagtggctcgtgcctgtaatcctagcactatgagaggccgagtcaggttgatcacctgaggtcaggagttcaagaccagcctggacaatatgatgaaaccccatctctactaaaaatacaaaaatcagctgggtgtgatagcaggaacctgtaatcccaactactcaggaggctgaggcaggagaatcgtttgaacctggggggcagaggttacagtgagcagagatcacaccactgcattccagcttgggcgacagagc

SEQ ID NO: 681560 - DNA, 649 bp, Homo sapiens
actaggtgaagggggatcagattctaggcaggtgaacctgcaggctagttcccaattcaattatttaggtagctgcatgatttaggtaaataacttaatctttttaggtcttagctttcccacttgcaaaacaaggaagttgtaatgggcaatcttgcttagactcccttccaaatctcaaatttggtaatagatgggtagcatccaaagctggtgagtgggtggtagaatgaggacttygtgcactgttggtgggaatatgcatcttttgggaatatagcctcattatctaataaaatcataaatttgaacactttgatccagcacccccagaaaaaagtgccagaatataaagataagtagttctattttttctttttgctatttcatatgagtatatatttctatatatacatctgaatctttgcagccatattatgtatatatgacacatgtatgtcacagtagctcacctctgcaatcccagcactttgggaggctgagtaaggaggatcatttgagcccaggaattcgacctgggcaacagagtgagactctgtcttttttaaaaaaaattagctgggcatggtagcatgtgcttgtggtcccagctagttgaggggctgaagtgggcagatcacttgagcca

SEQ ID NO: 681561 - DNA, 649 bp, Homo sapiens
actaggtgaagggggatcagattctaggcaggtgaacctgcaggctagttcccaattcaattatttaggtagctgcatgatttaggtaaataacttaatctttttaggtcttagctttcccacttgcaaaacaaggaagttgtaatgggcaatcttgcttagactcccttccaaatctcaaatttggtaatagatgggtagcatccaaagctggtgagtgggtggtagaatgaggacttcgtgcactgttggtgggaatatgcatcttttgggaatatagcctcattatctaataaaatcataaatttgaacactttgatccagcacccccagaaaaaagtgccagaatataaagataagtagttctattttttctttttgctatttcatatgagtatatatttctatatatacatctgaatctttgcagccatattatgtatatatgacacatgtatgtcacagtagctcacmtctgcaatcccagcactttgggaggctgagtaaggaggatcatttgagcccaggaattcgacctgggcaacagagtgagactctgtcttttttaaaaaaaattagctgggcatggtagcatgtgcttgtggtcccagctagttgaggggctgaagtgggcagatcacttgagcca

SEQ ID NO: 681562 - DNA, 614 bp, Homo sapiens
cgcgcccggccaccctggtacctttacactctagcttgtggctactttcccggcctcatctcccagccccaccttgtacatcagcatcccagaactgttagcactgaccccaatacatcatgctcgttcacttcctcccgttttcacccaagttgttctttggccccacaagcctttctcatgcctttcatcaaccagaagatgcccactcatttcttcaagacccagaatgggcatcatattctccaggaagcctaccccaagtgctgctcactcctggcagttggtcactctgtccaccgtgtgccacggtacccacggtggtccgggttccagcaccgattgccctgcctggatggcggtgtttgatgacaataaactgcttgagagcagggctagagtctgtttcacccctggggatctggatcctaacacacttcctggtaccttagcagatggccaaaaatggcaatgggtgagtggctgaatgaacgagtgacagacacatgagtctctaagccccacggctttctcctgcacaccagacaccatgwctatgcttcagcatctgtgtaattacgtgcttcctcccacaagagtgtgagctccaaggg

SEQ ID NO: 681563 - DNA, 630 bp, Homo sapiens
tttaaacctacatgtattctagatagggtgatttaggctagttgtctttctgcctcttcgactaactattgtaaatacattgtactgcctaaaggtatagatagtttttttttttttaatttttatagattttcatactagtggcttaaaaggctatcttttgcttgtgttgcttataagtgatcctggatcatcttaaatatatgacagtaccaaggcaataaattattttyacatatatgaaatttcaggtgttactagcactgcaaatatgcagataatcattagaaagagataatgaacccattgagacaaacatatatcaaagcataattagcctggaataacctccccaaatgaaagttactataaataacatcccttatttctgtttatgtgtagcacaaatgagttcttgcaagcaggttctatcttgagtagtacatatggggaattggaggagattcataattatagctatgtgagaaggaaagggactgataacaggatcttaccttccatttcctatcttgcaatgggaaagttcaatataaggaattctaaactagaacaaagaagtagagtaacaagggattggctaggaggaaataaagataattacacagaata

SEQ ID NO: 681564 - DNA, 630 bp, Homo sapiens
tttaaacctacatgtattctagatagggtgatttaggctagttgtctttctgcctcttcgactaactattgtaaatacattgtactgcctaaaggtatagatagtttttttttttttaatttttatagattttcatactagtggcttaaaaggctatcttttgcttgtgttgcttataagtgatcctggatcatcttaaatatatgacagtaccaaggcaataaattatttttacatatatgaaatttcaggtgttactagcactgcaaatatgcagataatcattagaaagagataatgaacccattgagacaaacatatatcaaagcataattagcctggaataacctccccaaatgaaagttactataaataacatcccttatttctgtttatgtgtagcacaaatgagttcttgcaagcaggttctrtcttgagtagtacatatggggaattggaggagattcataattatagctatgtgagaaggaaagggactgataacaggatcttaccttccatttcctatcttgcaatgggaaagttcaatataaggaattctaaactagaacaaagaagtagagtaacaagggattggctaggaggaaataaagataattacacagaata

SEQ ID NO: 681565 - DNA, 977 bp, Homo sapiens
tatatatatatwattttatatgcatataaaataatatatatatatatatatataattccctaggaaactaggtggaaagagaaggatgaagaagaaaaagaagctgagattgaagacaggaccctagagaatgcccactttagagagctgaggagcaaaacagaaggagaggacaataagccgtgtgttctctcaaagctggcttactcaatttctcaatactgtttcacatttctggaattttcctccaaactaccatttatttgcatgcttatatcaaatgtaccacttgcattaacacttctcttaccaacctaacccagtgacatttcttccttctcagagagcctctagcagtttttatctatcattattatttttttttttttgagatgaagtctcactctgtcgcccaggctggagtgcagtgtcgcgatctcagctcactgcaacctccacctcccgagttcaagcaattatcctgcctcagtctcctgagtagctgggattacaggcacatgccatcacaactggctaatttttgtatttttagtagagacagggtttcaccatgttggtcaggctggtcttgaactcctgacctcgtgatctgcccatctcagcctaccaaagtgctgggattataggcatgagccaccacatccggctatctatcatgactctgacccttcgccatattctactatttagtagggacgtgcccaacatgactaaaagcactggagctatagcaacaaacaatgctgaacagaaatcagctatcactgagtttacatccaagtttgcacggtacctgatgcagacagacaataatcaaacaaatgaataaataggaaaacttcataagaatttgagagctgtaaagagaagtaagagtagtattactcgtggaagggtaacactacttctgagaaagtgactttgggcagaatctgaatgacaagaaaccagccaag

SEQ ID NO: 681566 - DNA, 977 bp, Homo sapiens
tatatatatattattttatatrcatataaaataatatatatatatatatatataattccctaggaaactaggtggaaagagaaggatgaagaagaaaaagaagctgagattgaagacaggaccctagagaatgcccactttagagagctgaggagcaaaacagaaggagaggacaataagccgtgtgttctctcaaagctggcttactcaatttctcaatactgtttcacatttctggaattttcctccaaactaccatttatttgcatgcttatatcaaatgtaccacttgcattaacacttctcttaccaacctaacccagtgacatttcttccttctcagagagcctctagcagtttttatctatcattattatttttttttttttgagatgaagtctcactctgtcgcccaggctggagtgcagtgtcgcgatctcagctcactgcaacctccacctcccgagttcaagcaattatcctgcctcagtctcctgagtagctgggattacaggcacatgccatcacaactggctaatttttgtatttttagtagagacagggtttcaccatgttggtcaggctggtcttgaactcctgacctcgtgatctgcccatctcagcctaccaaagtgctgggattataggcatgagccaccacatccggctatctatcatgactctgacccttcgccatattctactatttagtagggacgtgcccaacatgactaaaagcactggagctatagcaacaaacaatgctgaacagaaatcagctatcactgagtttacatccaagtttgcacggtacctgatgcagacagacaataatcaaacaaatgaataaataggaaaacttcataagaatttgagagctgtaaagagaagtaagagtagtattactcgtggaagggtaacactacttctgagaaagtgactttgggcagaatctgaatgacaagaaaccagccaag

SEQ ID NO: 681567 - DNA, 977 bp, Homo sapiens
tatatatatattattttatatgyatataaaataatatatatatatatatatataattccctaggaaactaggtggaaagagaaggatgaagaagaaaaagaagctgagattgaagacaggaccctagagaatgcccactttagagagctgaggagcaaaacagaaggagaggacaataagccgtgtgttctctcaaagctggcttactcaatttctcaatactgtttcacatttctggaattttcctccaaactaccatttatttgcatgcttatatcaaatgtaccacttgcattaacacttctcttaccaacctaacccagtgacatttcttccttctcagagagcctctagcagtttttatctatcattattatttttttttttttgagatgaagtctcactctgtcgcccaggctggagtgcagtgtcgcgatctcagctcactgcaacctccacctcccgagttcaagcaattatcctgcctcagtctcctgagtagctgggattacaggcacatgccatcacaactggctaatttttgtatttttagtagagacagggtttcaccatgttggtcaggctggtcttgaactcctgacctcgtgatctgcccatctcagcctaccaaagtgctgggattataggcatgagccaccacatccggctatctatcatgactctgacccttcgccatattctactatttagtagggacgtgcccaacatgactaaaagcactggagctatagcaacaaacaatgctgaacagaaatcagctatcactgagtttacatccaagtttgcacggtacctgatgcagacagacaataatcaaacaaatgaataaataggaaaacttcataagaatttgagagctgtaaagagaagtaagagtagtattactcgtggaagggtaacactacttctgagaaagtgactttgggcagaatctgaatgacaagaaaccagccaag

SEQ ID NO: 681568 - DNA, 977 bp, Homo sapiens
tatatatatattattttatatgcatatamaataatatatatatatatatatataattccctaggaaactaggtggaaagagaaggatgaagaagaaaaagaagctgagattgaagacaggaccctagagaatgcccactttagagagctgaggagcaaaacagaaggagaggacaataagccgtgtgttctctcaaagctggcttactcaatttctcaatactgtttcacatttctggaattttcctccaaactaccatttatttgcatgcttatatcaaatgtaccacttgcattaacacttctcttaccaacctaacccagtgacatttcttccttctcagagagcctctagcagtttttatctatcattattatttttttttttttgagatgaagtctcactctgtcgcccaggctggagtgcagtgtcgcgatctcagctcactgcaacctccacctcccgagttcaagcaattatcctgcctcagtctcctgagtagctgggattacaggcacatgccatcacaactggctaatttttgtatttttagtagagacagggtttcaccatgttggtcaggctggtcttgaactcctgacctcgtgatctgcccatctcagcctaccaaagtgctgggattataggcatgagccaccacatccggctatctatcatgactctgacccttcgccatattctactatttagtagggacgtgcccaacatgactaaaagcactggagctatagcaacaaacaatgctgaacagaaatcagctatcactgagtttacatccaagtttgcacggtacctgatgcagacagacaataatcaaacaaatgaataaataggaaaacttcataagaatttgagagctgtaaagagaagtaagagtagtattactcgtggaagggtaacactacttctgagaaagtgactttgggcagaatctgaatgacaagaaaccagccaag

SEQ ID NO: 681569 - DNA, 977 bp, Homo sapiens
tatatatatattattttatatgcatataaaataatatatatatatatatatataattccctaggaaactaggtggaaagagaaggatgaagaagaaaaagaagctgagattgaagacaggaccctagagaatgcccactttagagagctgaggagcaaaacagaaggagaggacaataagccgtgtgttctctcaaagctggcttactcaatttctcaatactgtttcacatttctggaattttcctccaaactaccatttatttgcatgcttatatcaaatgtaccacttgcattaacacttctcttaccaacctaacccagtgacatttcttccttctcagagagcctctagcagtttttatctatcattattatttttttttttttgagatgaagtctcactctgtcgcccaggctggagtgcagtgtcgcgatctcagctcactgcaacctccacctcccgagttcaagcaattatcctgcctcagtctcctgagtagctgggattacaggcacatgccatcacaactggctaatttttgtatttttagtagagacagggtttcaccatgttggtcaggctggtcttgaactcctgacctcgtgatctgcccatctcagcctaccaaagtgctgggattataggcatgagccaccacatccggctatctatcatgactctgacccttcgccatattctactatttagtagggacgtgcccaacatgactaaaagcactggagctatagcaacaaacaatgctgaacagaaatcagctatcactgagtttacatccaagtttgcacggtacctgatgcagacagacaataatcaaacaaatgaataaataggaaaacttcataagaatttgagagctgtaaagagaagtaagagtagtattactcgtggaagggtaayactacttctgagaaagtgactttgggcagaatctgaatgacaagaaaccagccaag

SEQ ID NO: 681570 - DNA, 831 bp, Homo sapiens
ggcacaaagaatgcctgctgcttccctttggtcagaacatccaggacctaaaacacaccataatagaatgcattaggatttcaaagctgtcatatttaaatactattcccatgtttacataattcaattaaaatgtgatgagttttacagtgaataacaacagtagaaagtgacaacatccatatttacatgcaaagtttttttttttttggaaacaaggtcttgcactctgccacccagactggagttgcagtggtgggatcatggctcaytgcagctttgacttcctgggctcaggcgatcctcctgccacagcctcccaagtagctggtaccataggtgcacctggctaactttttaaaaattatctgtagagacagggtctccctatgttgcccaggctagtctcaaactcctgggctcaatcaagcttcctgccttggccttccaaagttctgggattacaggtataagccaccacgccccgcctcaacatgcaaaatttaggacagcatttttaattgcttcactgagtaagtgattcagtttctaaaatgttccagaaagacacattcccttatgaaaatgacatcacgaaaaagcaaaatgtacgctccacacttaatttctaagcaaagccaacttttgaaacagattcttttttataaaattcataagcaataatctaatttccatcttttaggattaagcatagaataaaattaattttatgcaggcaaagtcagaaagaatttcaggtcagatgagtaatttatcttttaatatattatttaggaatgacattttagaaagttattttaagtgtatgtt

SEQ ID NO: 681571 - DNA, 773 bp, Homo sapiens
tccggagatgcatggtggtgatcactgaacaacaatataaatatacttacattggactatacatttaaaagtggttaagatagtaaatccttctttgtattttaccacaatgaaaataaatggaawaaaaaacaagaacaaagtaggacttgcagtgcctgatggcaaaacttattaccctaaaacttaaaatataataataataaaaaaaaaacaagttaccactttacatcccttagttttgctattgtaaacaataaataaataaattgcgaataacaaaaaaaaaaaagtttcagtaatcccaacaattaacgtcagtctagcagtatatagagccaccacatgtgtacattctcatttaatttttctaaaggagtacagagcaacccaatccaaagtggaaagtgcttttaccaaaaggtactgaaacactggatatttatgtggggaaaaaaattcctcaacttctaccatgtactcttcacaaaaactagttcacattgggtcataagcctaactgtaaaagctaaaacggaaaagtacagacttatggttgttttctgttagaaaaccgtctctctttttccatttggtcatggtgagcttgccattctattattcatgataccctataccatgctgaatgggtggacatagtactcagctgaccttgcagaatacccacgtctattgcaaagcgatttgttcattgagtagtacgtgacttaaactttgtctaactttatctctcccttctcaattttcctcaa

SEQ ID NO: 681572 - DNA, 773 bp, Homo sapiens
tccggagatgcatggtggtgatcactgaacaacaatataaatatacttacattggactatacatttaaaagtggttaagatagtaaatccttctttgtattttaccacaatgaaaataaatggaataaaaaacaagaacaaagtaggacttgcagtgcctgayggcaaaacttattaccctaaaacttaaaatataataataataaaaaaaaaacaagttaccactttacatcccttagttttgctattgtaaacaataaataaataaattgcgaataacaaaaaaaaaaaagtttcagtaatcccaacaattaacgtcagtctagcagtatatagagccaccacatgtgtacattctcatttaatttttctaaaggagtacagagcaacccaatccaaagtggaaagtgcttttaccaaaaggtactgaaacactggatatttatgtggggaaaaaaattcctcaacttctaccatgtactcttcacaaaaactagttcacattgggtcataagcctaactgtaaaagctaaaacggaaaagtacagacttatggttgttttctgttagaaaaccgtctctctttttccatttggtcatggtgagcttgccattctattattcatgataccctataccatgctgaatgggtggacatagtactcagctgaccttgcagaatacccacgtctattgcaaagcgatttgttcattgagtagtacgtgacttaaactttgtctaactttatctctcccttctcaattttcctcaa

SEQ ID NO: 681573 - DNA, 605 bp, Homo sapiens
ccaatctgttattttggaaagtcatattttacccttttgttctgtggagtaagattttggtattaatttggctaaaaagacacgggtggtgccgaggcatgcctgaacagtttttcctccacttctcttgctagttcatgggtgcatctgtgaccaaacttgtaaggtctctggcttggctattcctctcccaagtcctgctgagatgatagtgatgaattggagactgtattcatttccatggcaacaaacatcactgtcctagagccactcctcaaaccctttgcaaataccactttttcattaaccctaacctctgagacatgtggaaatccatgcagaagcagcaagacctaccccacagggccactcaaactggagcaagactaggcttcaggggagcagcaagctccaggtacacatgaacagcaggtgaaacaaagacaattaactaaattggtttttytacaattgtttcctctgttgcaaagtttgcccctagtgtgaaagtctcactttcaacttacattccacacccaagcagctttctatctagagtttgaaaattgcttggacaaggaaaaattgcacctcacattttccaa

SEQ ID NO: 681574 - DNA, 1287 bp, Homo sapiens
ggtctgaagccagtccgaggcagggctgaggtggcaggattgttaaagcttcccaggtgattctaatatgtagacaagattgagaatcattatgtctagccagtagtactgaaacgtatttttctcctctgaataacagcattgtgtgaagttagaggggccaatttctggggaatgtgggatatatgaatcataattaggccctctaagtgtcaaccacagtctgggcagggaacacctgtggagcaaggaattaaaaatgaatgataccctttgtattgtaacgataatacattctactctccgggaagctattaaaatattccccttaagattttttttttcaaatctattttaaagtgtcacaagagaaagtaatatgggatattcaagaaggctctgtatacttaacctggcagagctttctggaaaatattttgttgttttatttatgtgttcatcatgcagtgatagaggggagaatgtgagttggcctgagaaaagagagaaagagatttcacatttgcattacatcaaggaggttcaacttggtctaactacctcttattccacttttsaaatcttgagatctgtttgatgcataaatttcataaatgttcacctcatttaaatgataatttatgtccttagaatatcatttctagctttgttcttctgcacacccctggagctgatcagagtgtgttgatccctttgttttcaaaggaaactttatgttcacactctcgctacaggggttagcagagtaagacgagaaaatagtcccatagtgtttctgccagctaatgaggaaaatttttcctcctatatatatcatgataggtaattgaattagtactccagtaggaaagggtttgctatttcatacttctatagtcttttcttaacaccatgaaattaaagacatgccagcatggagctgcctattcctgatcgatttcaaataagcaatgtagtatattattgcttttatgtgcttttacagcacatgctgtgcaagataattgactccatgacagatgtctatatttcagaggaaaatttatttgttaaagaacaaacatgtattactttaacatggggctattcattatattgcccacaaggtgctttttgatgacttctaaattgaaattaatattttctcttgtcgttctgaatatgcataagcaaatttgactgtttgatataaccattttgaagcttattctgctacttgaatgtaaccttctgtactcttagatcatgtttgaagtgctgggaaat

SEQ ID NO: 681575 - DNA, 1198 bp, Homo sapiens
agaaggcaaacacacttcttatcaaatcccccctttctttatactcaggtgcaacctctgaatcaggaaatgttgctttacccagattcgtgaagtaatcaaggaaactatataataatgtttatttgctcatgtggtacacacacattaactcagctggcgttgtttgcgactgagccttatatgggagacaaaaacctttgcttgatttaaaagtacataggtctcatcctagaactgtgattgtcagtataaacatgtatttctatatccacttcttcaccatgtccaatcccaaattcctttctgcatattttgcaatatactctgtcgtgattttttatttcccaaattcagttgcatatgaccttccatctatcagtaaaataacagatctatttagcctgcatttatggtgatgtatggatcatgctggcattggtattttaatggttctcattttcattatttgaacttttataaaacaygatcatgatcacaatattcaaattatgaaagtatcactatactgatagcataacattttatgtgcaggcaatgtcaaaggactgttaacaccaaggattacaatgcacttaaattgtgcacttaagtctcattacttatagtgatgcaacagtggatgatccgttattgcaagacacaaattaccttcccaacatcatcttttaaagaacaaaacagcaacagtaactatgcaagatggaaaatccttgccctatccatttaatactgaaaatatgttacttttagctcttgttttggggctggctactgtatgggttttgtattctctctactccacgtcctacctccccacacacctccacaccactgcattcatacctcaaaatgggtacattttgaatcccagttagggatatgctgtgacactgaattttcagtgctaagacaaaatcattcctgggaaaaccaagaaaattgttctccctgttctccctaccttatgacaagtatacactgcaaagggtcctctgcagataagatatctttctctaagcaaatattagtattatgtttttccagagatctgattgacataaaaattgtacttggttatctgtctcccttctacttcattgagaatccctctatgtaaaggtcttgaatgaatcatagtgcagctcctttagctccttcctctttatatggagat

SEQ ID NO: 681576 - DNA, 745 bp, Homo sapiens
ttcagaaaaattgtatggataagaaaacccttgccaaataatatttgtgatagcaatagcactgaaacagagatatatagatacaacttactttgaaatgaggacagctgtcaaaattaaataaaaagagaaagtacatttttgagttctttgatattttctgaactccaaatgcccttacatgttcccatttctgtcatatgtgtacttcttcagcagcaaataaattggccaacataaggaagtgcttggaaaaacatgacatgtctattctgagcattagttaggaggacagctatttccaaacagaaaagatggatttgaaagtttttgtcttgaatcatagaatgcattatgtgtctatttagaagcgtttcaatttaattgtctcaaagtctgaggaaaaaaagaaaacattattcaaacatatatttaaaatgctctaattttattttctttagcacattcctaaaatgtgtatgcatcctatcttaatcatctcactttctttttatttcattttatttttttggagacaagttctcatgctttcatccaagctggagtgcagtgctgtgatcatagctcactataacctcaaactcatgagctcaagtgatcctcccacctcagcytcccgagtaactgggactaaaagcccacaacaccgtacccaaatacttgtgggtgtgtgtaaagagagggtctcactatgttgccccaaatggtcttcaactactgccct

SEQ ID NO: 681577 - DNA, 1500 bp, Homo sapiens
atataaatataatttttttaaaaaatgcaagcagtctatagtaaagctgrcactcttagtaaagcaataaattagatctacgtcaacatgttcttcctgaagtcaggtataacattgatgaattttggcatatttattgatgtcttcaagggatagaatctttgacttacatgaaagctgttctcaactttaacaattaaattcattcacatttttaatatagcaatttttttccagataatgataactatttacaaggacctgctacactacataaaagatggagttttcaaaggcatggttcactctcaccattgttaatcaattcaaatggaaaaaatccttttatttgttacaagtgaattaaagaataacatatttactgaagctgatagttatttatcaaggggaactgcatttgcctggtaactgagataacgtgtagtaattaaaagataaattggtatttatattgaattataaagaaatctatacctcatttagtatttcattacaacttgctaaaagcaacctaactgctccatgtattttcagatttacataaaattatataataaataacattttaacatttattcgcttttaaattttgatgattttattttcaaactaaataattattctatacaaatctggctttgtttctagtaaaaataatttacagattcaattttccaatatactagaaaatggtatattggaaaatatggtagtattaactgtaaattctggtagtatcaactgcaaattccacatactttatcatatttaagtagatgggactttctgtctgacaaaatgcatagttttgccttggagttctgtcatccttgaaggaatagtcaacgtgaaatctttggttactcaagggataaacaataaggccatttttataatataatatcttatttagaagtcaccatgttaaagagttttttctgctttccagtgaattggctcactatgacaaaggaaataccagcctaaatcgcagagagtagaataagaatacagaatgggaataaagaaactgtaaagaggcaagagaaacaaaatttaaaagcaagaaaagttgtgtttcatgtttaataatgcaaatgaatgttatctagcttgtggcaagtgtgacatacgttacttgatgattgcatagttagaatgttgtacctatttatgtttgtgattcattttatacttcagtgttgatactctgaggattattttcaggaacaaagctttatactatgaacattccctgtcatgttctgaaaatttgcaaacattgctattttgaaataataatatcagtaatgaacaattaggaaaaaaagtgtcaaaaatctctttgataagacaatgtgattaatatctcctttattttccttgtgtcaggattttcaagtcctttgctaaattttctatagtagcatggcacccttagctatatgtattttttgtatgtgtgaccgttggatttaa

SEQ ID NO: 681578 - DNA, 1180 bp, Homo sapiens
cactttcctggtttgtttgcaataatccagcttaaatatgccatttcttctcagtcagacctccgattgaaaaatagtgtcctgcagtgactaggggtccgcactatatacacagagaaaatactggaggatgaaaaaaaattatgaattctaatttaatcctacagcttcttttcaactaacactctgcatttatttttctgtctgtccataaccattctggttctaagtgaacaattcaactttggaatgaaatgaaggatctattccctttccaccataaaatattgcaatgatcctttaccatattaacatttgctaaaaaggtagaagatctattgccatactagaatttccccagatgctggattttattcaaactgtattattttattacatagcccagcaacaaagaaatcatctcactagactcatatttcttttatatagaagtataattatcacttaatttacatgccatggcataattttacttctactaaactaaataaagaaccatattaacatctaaatataatcaaaatatagattattagaagtttttatttttaataactttactttcacttacatccaatactaataattttaaaaataaaagtgctattgtgcatctataaatatagaaaactaggttccatatatatattatatatatatatatatatacaattttttttttttttttgagacaggagtcttgctctgtcacccaggctggagtgcaatggcgcaatctcagctcactgcaacctccacctcccaggctcaagctattctcctgcctcagcctcccgagcagctgggattacaggcacccaccaccacgctcagctaactttgtgtgtgtggatatttttagtagagacggggttccaccatatgggccagggtggtctcgaactcctgacctcctgacccgcccacctcggcctcccaaaatgctgggactataggcgtgagccaccgttcccggccccatatataagtttttagaataacagaaatataaatgtatctggatgtcttaaggaatattttatttctgtctcttaataggtacattcttttaagatttacctatatattgattcaaacattagcatattataaattgtgatccataattagaaacatatagctcctaagctcaaamata

SEQ ID NO: 681579 - DNA, 646 bp, Homo sapiens
gctggagtgcagcggtgcattctcggctccgcctcccgggttcatgctattctcctgcctcagccaagctaattttttttttttttttaattttttagtagagacrgggtttcactgtgttagccaggatggtctcgatctcctgacctcgtgatccgcctgcctcggcctcccaaagtgctgagattacaggcgtgagccaccgtgcccggcctccttatcatattttgtggttgcatagtgctttatgtctgtgtcatcagatattcagctgatatcttattgatgggcatttggtgttttttagtctcttgatagtatagataatgcctcagtaaatcactttatgcatatgttgtttctcatttgtgaagtaactttgggtaaagtcctagagttggattactgagtcaaagggtaaatttgtttagctttatccatatttataaccaccctctcaatgaactattatgtttaatttaatttataatgtgaaataaaaatacataagagaaatagaagaatattatatctgaaaactaggaattccttgaattggctgtttcctgtgatcttcattgccattttcccagttaccatttttttcttttctttttttttttctttcttcctgggttcaagtgat

SEQ ID NO: 681580 - DNA, 645 bp, Homo sapiens
tttgcaaattttacaaaagaatatgaccatgtgaagatatattgctcaggttcttcctggggcttggaaaggatccacaagaaaagagtcttgaagcttgagcttcatcagctttatggtaaattggcctctggtgtgctattcctggtttgtctctttctgaaataaattctctcagaatagttatcctagaatacaagtcagatcatggcgctcaatgctttgaattctttgagaactttcttctttgcctcttattttgcaaaatttcaaacctaagaaagttgacaagaataagacattgaaccctagattttataaacacacacacacacacttttttttggctgaactatttgagagtgaattgtaaacattatgagatttctttattcctaattactttagcatgtatcatctaagaacaaggccgttatcttattaagcctaatacaatcatcaatcaagaaatctaacatactattacatttttactattatttaagatataatctggccaggcgcagtggctcacgcctgtaatcccagcactttgggaggccgacgcgggtggatcatgaggtcaggagatcgagaccatcctggctaacacggtgaracccggtctctactaaaaatatgaaa

SEQ ID NO: 681581 - DNA, 863 bp, Homo sapiens
cctgtctcaaaaaatgcccttttcagcttacttattcaaattaggatccaagttaggtcaagtgtttcatttggttgatatagctcttaggtctttttaaataactaacatcccgttccctatttttgcatgtcatttatttgttgaagaacatgaatcatttgtcgtgcaaaatttctttcattctgtatttagctaatcatcttcttatggtgccattccatatgttttgctgcttgcctccttccgttacatttcttgtaaattgataggtaaattagaggcttgtttaarttcagtttttttattttggggcaagatactacatagatggtgtggggtatgtcttgttatatgaaatcacgaggcacataatgtctagagataagggaaaatttaattcaagtaataataactaacacatgtaccaatgtatccaaggcactattctaaactctttacatacagcatttattttaattcttacaaaaaccctttgaggtagatcttattgcccccactgtaaaaataaggaatgtgagacactaacttgctgaggtctgcaagcctggatttggtcctgggaactcagactgctgagtctgtggccagagcaccctgtcattctgcctgttaaagccactgccacttctgaattaaactaaaaagagttaggtatgttccaggtacctcaagtaaacatgttgtcttaattctgtaagtaaataaatgttaagagtattaataaaatgtacctttaaactatattgtttacctcatctaccttctttgaaaataatcgctagcaaatcccatattgtcttactatggtatttactctcacattgacaaactgtgatatt

SEQ ID NO: 681582 - DNA, 604 bp, Homo sapiens
gacttgataatggactgctaagaaaatcttagcgaactccccagcttttatttctgagaacagccttctaggtgtggtccccatggccaaacgtagcagtggggcatgggaggagcactgtagtcagagccaggaaacatggaaaccactccttttgtttccaatctcaagtcttgattataatggaagtgctgccagacccttaattatgaaagtacaacagggcattaatataattcatcacctgttagarggagcacttctgggctatttactagaaatctattaaatatgacatgaagacagattgcactccatttcttaacatgacattataatcaggatgtatgctcagtaaaatggtttatagaactcttggctgtgtgtcctatcaattaacctaaaatctccataaatgaagtgtagctaagcagcacctttagcaaatggttgcatgtttttcctctggttctcagtagcggaaagttttgttctgaaatatcattgttatttttatagcaagttcattgctatgtggttttttttgttttttttttaaagcattgagaaaagcctcataaagcaaagagtactcacttcatag

SEQ ID NO: 681583 - DNA, 633 bp, Homo sapiens
taaataaataaaaagtattttatacgaggcctgggaaactattcatatttattttacattattatacaaaacactrtttgagattgagacttgaagaccagtgctacagccagactgttattgacaagtaccatgaagatattagcaaagctcaataacttattctttggggttaaccctgacctaacgtaatattagcattagcatatcaatagcctaaggaaataaggtccaattatgttctttagttcttcaattagaaaattctggtatattctagaagttatcatttctcacagagatagccttagctcagtttttgtttttagtcttcgtgaacatgagagaaaaagtgcatgtctttgttttaacagctctaatatggtatgaataagctgttgacacatttatatgtgaccatttgaaagggatttaaatacaatggaattacagtaatcatgaaaaggcaattacaaaatcttaaagcaatttagttaagggtgctcagtaatggggaagtggtattgcctcattcagaagttaggtatcctacaagatactcttcctaaaatttcctaattccatgccacttaaagctcaagctttgtctcacctaaaacaaatttaaaatca

SEQ ID NO: 681584 - DNA, 633 bp, Homo sapiens
taaataaataaaaagtattttatacgaggcctgggaaactattcatatttattttacattattatacaaaacactatttgagattgagacttgaagaccagtgctacagccagactgttattgacaagtaccatgaagatattagcaaagctcaataacttattctttggggttaamcctgacctaacgtaatattagcattagcatatcaatagcctaaggaaataaggtccaattatgttctttagttcttcaattagaaaattctggtatattctagaagttatcatttctcacagagatagccttagctcagtttttgtttttagtcttcgtgaacatgagagaaaaagtgcatgtctttgttttaacagctctaatatggtatgaataagctgttgacacatttatatgtgaccatttgaaagggatttaaatacaatggaattacagtaatcatgaaaaggcaattacaaaatcttaaagcaatttagttaagggtgctcagtaatggggaagtggtattgcctcattcagaagttaggtatcctacaagatactcttcctaaaatttcctaattccatgccacttaaagctcaagctttgtctcacctaaaacaaatttaaaatca

SEQ ID NO: 681585 - DNA, 687 bp, Homo sapiens
ggcgcgcgccaccacacccagctaattttcatatttttagtagagacgaggtttcaccatgttggccaggctggtcttgaactcctgacctcaggtgatccacccacctcggcctcccaaagtgctgggattacagtcgtgagccaccgcgcccggcctggaagatattgctagattctgcaaagactttttggccagtaggaaaggaaaacacaatctgtttgcagctctgcccccagcatggccagtttccacctggtgtctggaattgcggggtaatttcccatggatgccaggaatggcaagggtgtccttcccgctcaggggacggacatgttgcaaagtcctttcctctttcggagctgagtgagagtcccaggaccttggagttctcagattttgctaccagagataagctaagggctaatgttgacctcgatttacgacttcagcaaacacggcagtgaccactctcttctcctctctctcccgttgatttgaggatccggtggayggttctgtggttcgcgattttgagcacaggcccaaagctcctgttgtagagtgcagcatcaccggcgacagcagcaggtgacctttccctcgtcttacactgggaagagggagggtgagcaggcatgccataaataggtatgcctgtgacatttttgtttttgttttaagtaa

SEQ ID NO: 681586 - DNA, 687 bp, Homo sapiens
ggcgcgcgccaccacacccagctaattttcatatttttagtagagacgaggtttcaccatgttggccaggctggtcttgaactcctgacctcaggtgatccacccacctcggcctcccaaagtgctgggattacagtcgtgagccaccgcgcccggcctggaagatattgctagattctgcaaagactttttggccagtaggaaaggaaaacacaatctgtttgcagctctgcccccagcatggccagtttccacctggtgtctggaattgcggggtaatttcccatggatgccaggaatggcaagggtgtccttcccgctcaggggacggacatgttgcaaagtcctttcctctttcggagctgagtgagagtcccaggaccttggagttctcagattttgctaccagagataagctaagggctaatgttgacctcgatttacgacttcagcaaacacggcagtgaccactctcttctcctctctctcccgttgatttgaggatccggtggacggttctgtggttcgcgattttgagcacaggcccaaagctcctgttgtagagtgcagcatcaccggcgacagcagcaggtgacctttccctcrtcttacactgggaagagggagggtgagcaggcatgccataaataggtatgcctgtgacatttttgtttttgttttaagtaa

SEQ ID NO: 681587 - DNA, 687 bp, Homo sapiens
ggcgcgcgccaccacacccagctaattttcatatttttagtagagacgaggtttcaccatgttggccaggctggtcttgaactcctgacctcaggtgatccacccacctcggcctcccaaagtgctgggattacagtcgtgagccaccgcgcccggcctggaagatattgctagattctgcaaagactttttggccagtaggaaaggaaaacacaatctgtttgcagctctgcccccagcatggccagtttccacctggtgtctggaattgcggggtaatttcccatggatgccaggaatggcaagggtgtccttcccgctcaggggacggacatgttgcaaagtcctttcctctttcggagctgagtgagagtcccaggaccttggagttctcagattttgctaccagagataagctaagggctaatgttgacctcgatttacgacttcagcaaacacggcagtgaccactctcttctcctctctctcccgttgatttgaggatccggtggacggttctgtggttcgcgattttgagcacaggcccaaagctcctgttgtagagtgcagcatcaccggcgacagcagcaggtgacctttccctcgtcttacactgggaagagggagggygagcaggcatgccataaataggtatgcctgtgacatttttgtttttgttttaagtaa

SEQ ID NO: 681588 - DNA, 687 bp, Homo sapiens
ggcgcgcgccaccacacccagctaattttcatatttttagtagagacgaggtttcaccatgttggccaggctggtcttgaactcctgacctcaggtgatccacccacctcggcctcccaaagtgctgggattacagtcgtgagccaccgcgcccggcctggaagatattgctagattctgcaaagactttttggccagtaggaaaggaaaacacaatctgtttgcagctctgcccccagcatggccagtttccacctggtgtctggaattgcggggtaatttcccatggatgccaggaatggcaagggtgtccttcccgctcaggggacggacatgttgcaaagtcctttcctctttcggagctgagtgagagtcccaggaccttggagttctcagattttgctaccagagataagctaagggctaatgttgacctcgatttacgacttcagcaaacacggcagtgaccactctcttctcctctctctcccgttgatttgaggatccggtggacggttctgtggttcgcgattttgagcacaggcccaaagctcctgttgtagagtgcagcatcaccggcgacagcagcaggtgacctttccctcgtcttacactgggaagagggagggtgagcaggcakgccataaataggtatgcctgtgacatttttgtttttgttttaagtaa

SEQ ID NO: 681589 - DNA, 643 bp, Homo sapiens
tctataaaagtctccycccatcctccaacaagagaaatcacaaaagcagagcctcgcctgatcttcaggcacctcaactgtgcctgccacttaacaggtgctcaatagccaggcacaggggctcactcctgaaatcccagcactctgggaggctgaggcaggaggatcacttgaggccaagactttgagacaagcctgtgcaacacggtgaaaccctgtctctactaaaactttaaaaaattcaattagccaggtgtgctggcacgtgcctgtagtcccagctatttgggaggctgaggcaggagaaccacttgaacatgggaggcagaggttgcagtgagccaagattgagccattgcattccagcctgggcaacaagagtgaaactccatctcaaaaaaaaaaaaaaggtgctcaatgaatccatgaataggtaaatcaattgttgtccactcctaggaaagccatacaccatcaaggctgcccacctgcccccttggccacagagcaggcctgtccaagggtcaaccagaaccctaggccacaaaacataccacggccttcccagcacatgacagggagtcccaaaatcgggggcctctctcacgtcacacagatgacatgagttgctctctgctatggg

SEQ ID NO: 681590 - DNA, 626 bp, Homo sapiens
tgattttctataaaagaaataaagaatcctaccagtctcaccactgccatcgcagaacaaagccaatgctattggccaggctcagctgccaggacctggctttgagagtcaagcaccaccactggaaaatatatattcataggcatcctgaaccaattgatatttcaaactcccttctttcccaccccatgaaagcctcacttatattttagtttaattgtggggaccgataatactctaggatggaagccaagttaaaacattgccctaatgagcaggcatggagcccktttccggataatttatatattaggaagtattttcaaagtaatatctccagctctaaatcttttatggtcagtcttgaacagttttttggggtccaggtctccacagatgccaacagggcacattagagtatgggaagcaattttccaagagtagcgagttctgctgtggctgccagatgacccgactgggcagcaggcactctgctgggtggcagggaaggccaagagctggcaggatgactgctgcctctgcaaagcaactgcacagtgagttgagggactaaatacacgaaagccattgccatcgccatgctgaagtggtaaatgacagtcaaa

SEQ ID NO: 681591 - DNA, 626 bp, Homo sapiens
tgattttctataaaagaaataaagaatcctaccagtctcaccactgccatcgcagaacaaagccaatgctattggccaggctcagctgccaggacctggctttgagagtcaagcaccaccactggaaaatatatattcataggcatcctgaaccaattgatatttcaaactcccttctttcccaccccatgaaagcctcacttatattttagtttaattgtggggaccgataatactctaggatggaagccaagttaaaacattgccctaatgagcaggcatggagcccgtttycggataatttatatattaggaagtattttcaaagtaatatctccagctctaaatcttttatggtcagtcttgaacagttttttggggtccaggtctccacagatgccaacagggcacattagagtatgggaagcaattttccaagagtagcgagttctgctgtggctgccagatgacccgactgggcagcaggcactctgctgggtggcagggaaggccaagagctggcaggatgactgctgcctctgcaaagcaactgcacagtgagttgagggactaaatacacgaaagccattgccatcgccatgctgaagtggtaaatgacagtcaaa

SEQ ID NO: 681592 - DNA, 626 bp, Homo sapiens
tgattttctataaaagaaataaagaatcctaccagtctcaccactgccatcgcagaacaaagccaatgctattggccaggctcagctgccaggacctggctttgagagtcaagcaccaccactggaaaatatatattcataggcatcctgaaccaattgatatttcaaactcccttctttcccaccccatgaaagcctcacttatattttagtttaattgtggggaccgataatactctaggatggaagccaagttaaaacattgccctaatgagcaggcatggagcccgtttccggataatttatatattaggaagtattttcaaagtaatatctccagctctaaatcttttatggtcagtcttgaacagttttttggggtccaggtctccacagatgccaacagggcacattagagtatgggaagcaattttccaagagtagygagttctgctgtggctgccagatgacccgactgggcagcaggcactctgctgggtggcagggaaggccaagagctggcaggatgactgctgcctctgcaaagcaactgcacagtgagttgagggactaaatacacgaaagccattgccatcgccatgctgaagtggtaaatgacagtcaaa

SEQ ID NO: 681593 - DNA, 1408 bp, Homo sapiens
acccagaggggagccaccattacccacaccctccatgcctgagttcacagtcaggactgccagcacagagggcagagggcctggagatacctgaggggagccaccactacccatgccctccatacccaagttcatagtcagggtggtgcagtgcatgggaatggacaactggttaggagtcaggacaacttgctccagcccaggtctgcaactmagttgccagtgtcttccactctccatcaatgcacacaacctagacagttagtttctccctcctttccactcactaagcctttcacctctgatataaaggtcatctcattattttaatttaattttgagtgaaaaactaaaaactcattgagtgcctgccatgtttcagcactggaccatatggtgggaatacttcaacaaatataacaggtgtagtctttattctcatagtgtttgcaatcattccattctcctcctaagcaaggttttcttgtcttggtgtggattgttcctctctttttgcacagtggctagcaggaagctctgaatctaacaagtgtcaggcaaccagattaggctatgcagtggtcaagaagctgaagagagaacaagtgacatcaggaagtaggagatcccctgtttcttaagagaagagtgctcaagtagctctgagctttaatttctttgttctccatcaggatcctgctatgagaattgcaataaatatctctgaaatgcattatatacagcacgtttgttctctgtaattgaaggatctcatttttgcatgcctaaatcaatagtggcactgacaatatttaaatgtggtgtggaatactgggtcagaagaccacagtaagatatcatttgcccttgcagcttaacattccaagatggacagtgctggctaagggatgggagacatggactcatctggctctcatctccacaccattgagatctagacaccagtttccagtttcttttgaggctcaataaaaagaggaatgctttgtgtagtatatcccctgtgcttgcatggtcagaccagctagttggtacagactgggtcacaatgacagtaatagcatggacttcctagctcaggtagccacatgctcacatggcccagctccttgaaaagttcccgtcatagtccttggagttttgacaggttgtctattttgaatacaccaacattctcttgcctgcttcttccttctctcactaacggttactgcagtttcagtaggcactgtggtctcttcccaactgcatcactaggaggctgggtccctgatgcagcccagtcttgggggtggtgtgtgaagaaatggatggattcatcttctttgcggtcctctctagccccatcttaatcctgcttgcgtgcctgtatctcacatgatcctca

SEQ ID NO: 681594 - DNA, 1115 bp, Homo sapiens
tagcagcattctggctgaatctggtacactgcacatggagtwcatccacctcagctacttgacagaagacctggtttactacaacaaggtcatgtacatgcggaaactgcttcagaaaatggattgtccaaacggtctttatccaaattaaacccaagaacagggtgctggggtcggtatcacacatcatttggtgatcgggagacagtttttatgactacttactgagagcacgtttgatgtcagataaaacagaccatgaatggagaaagatgtgtggtgatgctcttgaggctgcaaaaaaacaagaactcccatggatgtcttaatctttagtaaagaatggatcagtgggcacttggaaaacaagatggggcatctggcctgctttgctggggtaatgtttgcactaggagaagatggttccagaacagataagtctgtcattatttagagctggggtggaaattgcatatacatgtcatgagtcatatgacagactgcattaaagctaggtcctgagtcagtcaagtttgatggtgcagtggaggttgtggctgtcaggctgaaaagtattatatcctgtgtccagaagtaattgaaaccgttggtacctacggtgattctctcacaatccaaaatacaggcagtggggcagggaacagcactggccattgaaaagtattgctgagtcagtggtggattttctggagtcaaagatgtacatttctctactcctacacatggtgatgtagagcagggtgtctttcttgctgaaacacttaaaatatttgtatgtgctgttctccagtggtgaccttttacctttagactactaggtgtttaatacagaggctcaccctctgcctgtgttacatttagccaacaccacactttcaggtaattctgctgttggataaaagcagttccgaggaccaggaccagtctcacctgttttgttttacgtggaccactatagaatgtagtctgaaaacctagacctctaagtcaacatgatagtggtcatataagaatgatgtgtgttacagcaaagatcgcaattacttttacaccaccaagtactctacaaaccatatatattttaaatatatgta

SEQ ID NO: 681595 - DNA, 600 bp, Homo sapiens
tgtcttggaaaaacaataaatcaataaaaataaaataaattacccagtccgaagtattcctttatagcaacacaatattgactaatacaaaccacatatgatatggaaatatatcaatccacttactctggctcaagaacattggtgaagatgattttgtgttacttcagctcattcagattatgatgaagatgctctttttaatttacaactagtcagaaagcttttctgcaaagggcagataataaatattttaggttatatgagctatacagtctttcttcttactcagttctgctgttgaagtgtgaaaacagatacrgatattatgtaaatgaatgagtatagctgtgttccgataaagctttatttacataaacaggtaaaggactgcatttgacccacaggtcataatttttaccccaatcccaagattaagtagtgtaaaaccctttagccttctttctgcctcttttctctgtgctgtaatttacataattcattttaaagcaaaagaagtgactgtggaatataaaacaataaaattgagttcttagaaataaagtagaatggtagttgataaggtctaggggcgggtca

SEQ ID NO: 681596 - DNA, 600 bp, Homo sapiens
tgtcttggaaaaacaataaatcaataaaaataaaataaattacccagtccgaagtattcctttatagcaacacaatattgactaatacaaaccacatatgatatggaaatatatcaatccacttactctggctcaagaacattggtgaagatgattttgtgttacttcagctcattcagattatgatgaagatgctctttttaatttacaactagtcagaaagcttttctgcaaagggcagataataaatattttaggttatatgagctatacagtctttcttcttactcagttctgctgttgaagtgtgaaaacagatacagatattatgtaaatgaatgagtatagctgtgttccgataaagctttatttacataaacaggtaaaggactgcatttgacccacaggtcataatttttaccccaatcccaagattaagtagtgtaaaaccctttagccttytttctgcctcttttctctgtgctgtaatttacataattcattttaaagcaaaagaagtgactgtggaatataaaacaataaaattgagttcttagaaataaagtagaatggtagttgataaggtctaggggcgggtca

SEQ ID NO: 681597 - DNA, 931 bp, Homo sapiens
tcaagaagaatctattcttcttgaagaatagatttaagatctattgaagaatagactsaagattctgctttagtaaagtagagttttttctatgtgctaagtgctaggactagagaggaaagaatgtatttgctagcttctaggagctctgggtgatgagtaaatataccattatttctctgtggatctccctcgttgtcctataacagtcacaaccagcattagaacatttaagcccacagaatcatataatgagtcagtgtagacctgggaatctcacgtagttctctctgaccttctctttcaaagagtattgtgtctacttctgaaatctttatatgctctggggctctagaaatcaccctgagtgagataaagaaatggaattaaatgaccctcgaaagtgggtttgatttttgaaaatagcccaaataatttgaagccaagctgggtgaataaattcgtccatgaacttggataatgccattttggtcatgtatctggctgtatatgtactacctggactaatttgttcgcatagttttgccatacagcaacaacagaaaacttttttttttcctgttacctgcttacttcatctaagtaatgcagagaaaaactgtaatccatctaccacagtgaaaggccagcaaggtttataaagtaatgcctataaaaagttcccatgagtaaggcactgtgcaaatagaagagatgattattgttactgctgggctatatataagcactcattcatcacttatgtgcttcttggcagggcttcccaatttgccccatgtagctccatgctaggtcttccacataattacacaaggaggcaactcctagaaccttcaattcaattacatttgcctggttttgtttttatgaaacatgaagcctaaataaataataaacatctttagaggtg

SEQ ID NO: 681598 - DNA, 931 bp, Homo sapiens
tcaagaagaatctattcttcttgaagaatagatttaagatctattgaagaatagactgaagattctgctttagtaaagtagagttttttctatgtgctaagtgctaggactagagaggaaagaatgtatttgctagcttctaggagctctgggtgatgagtaaatataccattatttctctgtggatctccctcgttgtcctataacagtcacaaccagcattagaacatttaagcccacagaatcatataatgagtcagtgtagamctgggaatctcacgtagttctctctgaccttctctttcaaagagtattgtgtctacttctgaaatctttatatgctctggggctctagaaatcaccctgagtgagataaagaaatggaattaaatgaccctcgaaagtgggtttgatttttgaaaatagcccaaataatttgaagccaagctgggtgaataaattcgtccatgaacttggataatgccattttggtcatgtatctggctgtatatgtactacctggactaatttgttcgcatagttttgccatacagcaacaacagaaaacttttttttttcctgttacctgcttacttcatctaagtaatgcagagaaaaactgtaatccatctaccacagtgaaaggccagcaaggtttataaagtaatgcctataaaaagttcccatgagtaaggcactgtgcaaatagaagagatgattattgttactgctgggctatatataagcactcattcatcacttatgtgcttcttggcagggcttcccaatttgccccatgtagctccatgctaggtcttccacataattacacaaggaggcaactcctagaaccttcaattcaattacatttgcctggttttgtttttatgaaacatgaagcctaaataaataataaacatctttagaggtg

SEQ ID NO: 681599 - DNA, 931 bp, Homo sapiens
tcaagaagaatctattcttcttgaagaatagatttaagatctattgaagaatagactgaagattctgctttagtaaagtagagttttttctatgtgctaagtgctaggactagagaggaaagaatgtatttgctagcttctaggagctctgggtgatgagtaaatataccattatttctctgtggatctccctcgttgtcctataacagtcacaaccagcattagaacatttaagcccacagaatcatataatgagtcagtgtagacctgggaatctcacgtagttctctctgaccttctctttcaaagagtattgtgtctacttctgaaatctttatatgctctggggctctagaaatcaccctgagtgagataaagaaatggaattaaatgaccctcgaaagtgggtttgatttttgaaaatagcccaaataatttgaagccaagctgggtgaataaattcgtccatgaacttggataatgccattttggtcatgtatctggctgtatatrtactacctggactaatttgttcgcatagttttgccatacagcaacaacagaaaacttttttttttcctgttacctgcttacttcatctaagtaatgcagagaaaaactgtaatccatctaccacagtgaaaggccagcaaggtttataaagtaatgcctataaaaagttcccatgagtaaggcactgtgcaaatagaagagatgattattgttactgctgggctatatataagcactcattcatcacttatgtgcttcttggcagggcttcccaatttgccccatgtagctccatgctaggtcttccacataattacacaaggaggcaactcctagaaccttcaattcaattacatttgcctggttttgtttttatgaaacatgaagcctaaataaataataaacatctttagaggtg

SEQ ID NO: 681600 - DNA, 400 bp, Homo sapiens
aaaaawatatatatatatatatattatatatatataatatatataaatatatatatattatatatatataatatatataaatatatatatattatatatatataatcactatatatataatcactatatatatatatatataatcactaacaagctaaaaaagggggaaatgacatttaaaaaatttttctttctttctctttctttctttccttccttccttccttttttttatgatggagttttcactcttgtcacccaggctggagtgtaatggcacaatctcagctcactgcaatctccacctcccaggatcaagcaattctcctgcctgagcctcccaagtagctgggattacaggcatgcaacgccactcttggctaatttttttttttttttg

SEQ ID NO: 681601 - DNA, 662 bp, Homo sapiens
cagcacctcccaaatgaatcagcaacatgaccagctgcccaaaccactagaccctatattgtgtaaagggaacctagaacaggatatcckaaaaagagcaacagagcttaccatgggacaaatcagcagctgccatcccgcgaggtgagaacgtgtcagaaccctcctttcattgatgtcaccatcacttcaggacacctcattaatctaaatggacagtggcaatctccattcctctttaaacagggttattgggattcctgttggtattaatcaataatcaacaagcagtacttaatcatcagccatcaaacatatacaccggctggggcagtagctcatgcctgtaatcccagcattttgggaggccagggtgggaggactgcttcagcctagaagtttgagaccagcctgggcaacatagcaagaccctatctctaaagaaacaaaaataaaaataagtaaacaaacaaaaaaaaatgaagtggtaaaccagaacctgaatgcaagtacaagttttgcacacacacatagaaaaaataatctcacaatacacttttaagtattgggtagcctcaactgggccttgattggaaacactcaaatcaaatctgcatccccagctcacactgtcagagaggcaaggccaaaccactctgtgc

SEQ ID NO: 681602 - DNA, 662 bp, Homo sapiens
cagcacctcccaaatgaatcagcaacatgaccagctgcccaaaccactagaccctatattgtgtaaagggaacctagaacaggatatcctaaaaagagcaacagagcttaccatgggacaaatcarcagctgccatcccgcgaggtgagaacgtgtcagaaccctcctttcattgatgtcaccatcacttcaggacacctcattaatctaaatggacagtggcaatctccattcctctttaaacagggttattgggattcctgttggtattaatcaataatcaacaagcagtacttaatcatcagccatcaaacatatacaccggctggggcagtagctcatgcctgtaatcccagcattttgggaggccagggtgggaggactgcttcagcctagaagtttgagaccagcctgggcaacatagcaagaccctatctctaaagaaacaaaaataaaaataagtaaacaaacaaaaaaaaatgaagtggtaaaccagaacctgaatgcaagtacaagttttgcacacacacatagaaaaaataatctcacaatacacttttaagtattgggtagcctcaactgggccttgattggaaacactcaaatcaaatctgcatccccagctcacactgtcagagaggcaaggccaaaccactctgtgc

SEQ ID NO: 681603 - DNA, 1473 bp, Homo sapiens
tgcctatgcaggattccaagggctgcagtgaccagccccaggttttaagggtcctagaaactcctcgcaccctaaacatactcactgtcatctcctccactcatagtgcattaatggcacttcttgaatatgaatttatctcagcacaaccagactaggagatctcttttttttttgaaatggactcttactctgttgcccaggctggagtgcactggtgcaatcttggctcactgcaacctccacctcccaggttcaagcaactctcctgcttcagcctcctgagtagctgaaattacaggcacacgccaccatgcccggctaattttttgtatttttagtagagatagggtttcagcatactggctaggttggtctcgaactcctgacctcatgatccgcccccttcagcctcccaaagtgctgggattacaggcatgagccactgtgcccgcccaagatctcatcttatttccatctatttgagcgcattgctcagcacattccagacatctgatcaatgctgataaacaacttaaaggacacttttttttttaatttttttgagacggagtcttgctgtgttgcccaggctagagtgcagtggtgcaatcacagctcactgcagcctcaacctccagggctgaagtgatcctcccacttcagcctccaaagtagctgggagtccagtcatgtaccactttgcccagctaatttttaaattttttgtagagacggggtctcactatgttgctcaggctgatcttgaactcctgtactcaagcaatctgcctgcctcagcctcctaaagtgctgggattatgggtgtaagccaccatgcccggcctgggatgatttccaagttagcacctccctatatgggtggccccaacccttggggaaattcaaatggggattcagtccttgagtgacactttatttgctttaagaagcctggagaccggagcttgcagtgagccgagagcatagcactgcactccagcctggcaacacagcgagactccctctcaaaaaaaaaaaaaaaaaaagaagtctggagacaactctgcctagagggaaatgtgtctacctggtggatgcaagtatgtcactatgtataagaatacagctgctttttacctgataacaatctgttaggcagtcagccactattcttcctgctggtgtcttttcttcatgaaggcaaactgggtccccagaaagataatgtcctgtaagaaaatgaaggcaagagaaccccgagctgaccataatccccacatccacctacctagaggtcattacctcctagtatgaaattcccatatattcctgcaaaatcaggaaaacacacataaggccagttgcagtggctcacatctgtaatcctagtgctctgggaggttgaggtggraggattactttaggcgagaagtttgagatcagcctgggcaacacggtgagaccccgtct

SEQ ID NO: 681604 - DNA, 666 bp, Homo sapiens
ccgcgcctggctaattttttgtgtttttagtagagatggggtttcaccatgttggccaggctggtcttgagctcctgacctcaagtgatccacccacctcagcttcccaaagtgctgggattacaggcaggagccactgggcccagcttctagttattttttaatgatactaaagagaaagaaaggaacaaaatgatgcagtctgataccatttgtatcaaacacacacacacacacacacacacatatatatataaagtgaaaaaatgtataaagtaaaggaggctgggcggggtggctcatgcctataatcctagcactttggggaggcagaggcgggaagattgcttgagctcaggagttccagagcagcctggacaacatggcaaaacctcatttcttctaaraaatacaaaaattagtgggccaaggaggtggaggttacagtgagctgagatctcacctggcactatggcccgagtgaaagccagactgtttatttttttctttttatttatatcatgtaattttattttttgaaacggagtctcgctctgtcgcccaggctggagtgcagtggtgtgatctcagctcactgcagcctccacctcccaggttcacaagattattctgcctcagacaactgagtagctgggattacaggtg

SEQ ID NO: 681605 - DNA, 594 bp, Homo sapiens
tgccgtagaactctctgttccaaaatgtgttatggggactcatgttaaaacttcttcaaagacagcttgttctctaacagtaaaaaatatttcttttatttttcctttttttcttggagagcttgctttagtgagaattgattttcccagctctttggaattcagaaagaaagtatggattttggggttcaaattctggctgtaccccttattagctgtaaaatcttaaccaagttacttaatctctgtaaacctcaggtttctcattggtaagactgtcataattataggatcttcctcacatgattgttgtaagaattgagacaatgtgcctgaagtaagcgctagtcactattaatgactgtgcaagaacctagataaaaaatttgtgtcctgaatttataaagtctcyaaattcaagagtaaaaaacaaacaaacaaacaaacaaaaaacacttaaaaataggcaaaaggttagaacagacacttcatgaagtaaggtatacagatggagaatgagcatataaggaggttttcaacatcaatattcattaggaaatgcaaatcaaaaccacagtgaggcaccacttcaca

SEQ ID NO: 681606 - DNA, 594 bp, Homo sapiens
tgccgtagaactctctgttccaaaatgtgttatggggactcatgttaaaacttcttcaaagacagcttgttctctaacagtaaaaaatatttcttttatttttcctttttttcttggagagcttgctttagtgagaattgattttcccagctctttggaattcagaaagaaagtatggattttggggttcaaattctggctgtaccccttattagctgtaaaatcttaaccaagttacttaatctctgtaaacctcaggtttctcattggtaagactgtcataattataggatcttcctcacatgattgttgtaagaattgagacaatgtgcctgaagtaagcgctagtcactattaatgactgtgcaagaacctagataaaaaatttgtgtcctgaatttataaagtctccaaattcaagagtaaaaaacaaacaaacaaacaaacaaaaaacacttaaaaataggcaaaaggttagaacagacacttcatgaagtaaggtatacagatggagaatgagcatataaggaggttttcaayatcaatattcattaggaaatgcaaatcaaaaccacagtgaggcaccacttcaca

SEQ ID NO: 681607 - DNA, 1779 bp, Homo sapiens
tttataggctttccacaagcgtcgcattccattcccagagctatgaacatctgcttttctgggataggaatcttggtgatgtgaaacttccctgactgcacgtccattcataggctctctgcaggaggaagcacatcatgcgctgttggctcattctggcrgtccaacctggcattgtctttacacaatcctgcatgcaattttgtatttaaaataatcaggagcatttcatcttttattccgtagcaatagtttcagggggtctccctacaatcaacaaagcttcaaagttgctttacagcattttaaaaaaaaaattaagcctaaccttttctgtctcagctgttatggacacacagattcaaaattcaatctctcaagatttccaccacagtccagcctatccagaccatctgccataaatgccaatagtcacaccaagaaaaccttacttctctgacataagagagttctgcggtgaccttaactataatggcaatggcaggatataaagagcctcagactggaagagagaaggtgaaggcccttgtttctgtaggttggctcagaatctggtgtgtgcagatggcagatggccgaataagtcacaagtttccaaacctgaccctgtgtcatattcactacgtgatcttgttaaaagaattccctcagcagattactagatctcagcgggtgccctgaaattaagtacctcagggtgatttttatgcatcccgtggattttggagtcatggttctaagttataagccttctcagaacccatatcatgttggtcctccatgtgacagaatctccaccttggttcctgatttgcacccctattccctttctgatattgggattctgtactgaacccgagcttactgggctggagctttgaccatacatacatcaatccctttgttctgagaaatgaatcctgtctcctgagctctcagacacgtgacaccttgtgattcagaggaataccactctttgaggaggccctgctggaactcattgtggtacataattttgcgatacaggtaaccctgcaatctcttctcagagaagaagcctccactcaccagcccctgttgaaggggtgagtcaaggtaggtgtgttttattatagcatgggatccactggaagttatagcccacttaacacacacaaaaaatccaatacaaggaaagccaacctactaactgcctaacaagctaatgttctaccttgaaagtttgaacaaagaaaagaaaaatccctgatcagagactagcgaatatttatactgaaagttacatggaatcggggataaaacagtcattctcagccatgttcttactgagaagttatctcagaaagttaaatgccagagaaagcctattaacattttttaatacagccagagagagagacaaaaacagacagaagaggaaattctatccttagaacattttaagcaaaatatacaatttttgacgcagggtgtatactgtttcatttttgtgaagtgcccctgtaaactttcaaaacgctcctttccttgaactagcatgaatggggttggtttctcacaaataaaaaatttgcctgcgttgaattccctcaaatgatgaacatgggtcttattctagcctggagttaccacttggacaaattgaacttttacccaggatcaggccagcctttccctccagcctgggccactaaagccccaaattcctctcagctgagtcaatcctaattaagttaatatttcaacaagattgcttat

SEQ ID NO: 681608 - DNA, 1779 bp, Homo sapiens
tttataggctttccacaagcgtcgcattccattcccagagctatgaacatctgcttttctgggataggaatcttggtgatgtgaaacttccctgactgcacgtccattcataggctctctgcaggaggaagcacatcatgcgctgttggctcattctggcggtccaacctggcattgtctttacacaatcctgcatgcaattttgtatttaaaataatcaggagcatttcatcttttattccgtagcaatagtttcagggggtctccctacaatcaacaaagcttcaaagttgctttacagcattttawaaaaaaaattaagcctaaccttttctgtctcagctgttatggacacacagattcaaaattcaatctctcaagatttccaccacagtccagcctatccagaccatctgccataaatgccaatagtcacaccaagaaaaccttacttctctgacataagagagttctgcggtgaccttaactataatggcaatggcaggatataaagagcctcagactggaagagagaaggtgaaggcccttgtttctgtaggttggctcagaatctggtgtgtgcagatggcagatggccgaataagtcacaagtttccaaacctgaccctgtgtcatattcactacgtgatcttgttaaaagaattccctcagcagattactagatctcagcgggtgccctgaaattaagtacctcagggtgatttttatgcatcccgtggattttggagtcatggttctaagttataagccttctcagaacccatatcatgttggtcctccatgtgacagaatctccaccttggttcctgatttgcacccctattccctttctgatattgggattctgtactgaacccgagcttactgggctggagctttgaccatacatacatcaatccctttgttctgagaaatgaatcctgtctcctgagctctcagacacgtgacaccttgtgattcagaggaataccactctttgaggaggccctgctggaactcattgtggtacataattttgcgatacaggtaaccctgcaatctcttctcagagaagaagcctccactcaccagcccctgttgaaggggtgagtcaaggtaggtgtgttttattatagcatgggatccactggaagttatagcccacttaacacacacaaaaaatccaatacaaggaaagccaacctactaactgcctaacaagctaatgttctaccttgaaagtttgaacaaagaaaagaaaaatccctgatcagagactagcgaatatttatactgaaagttacatggaatcggggataaaacagtcattctcagccatgttcttactgagaagttatctcagaaagttaaatgccagagaaagcctattaacattttttaatacagccagagagagagacaaaaacagacagaagaggaaattctatccttagaacattttaagcaaaatatacaatttttgacgcagggtgtatactgtttcatttttgtgaagtgcccctgtaaactttcaaaacgctcctttccttgaactagcatgaatggggttggtttctcacaaataaaaaatttgcctgcgttgaattccctcaaatgatgaacatgggtcttattctagcctggagttaccacttggacaaattgaacttttacccaggatcaggccagcctttccctccagcctgggccactaaagccccaaattcctctcagctgagtcaatcctaattaagttaatatttcaacaagattgcttat

SEQ ID NO: 681609 - DNA, 649 bp, Homo sapiens
ggatgggaacccacatttggctccaaagtctgaccctattcactgtattctgtgctgatagggtaggggagccgaaatattttccagcctctgataaagaaagacctggaatcctgagggctgggatgcaaatttttgcctgggtctttctcaggcagcaatacgccttccaaagaggagaacctgtaggcagagaaggaatttcagagaggagtgaggagatttaagccctcatcctttatgaaacactgttcatccctctttggttgctttcaccaatgctctggaagttcatagcctttgataaataaaaagaagataactatgatttttaaactttaaattgtagagagagagaaaatgcaataatctttcactcttctccagtgctactctttaaggttaatttatgttccataaaggaactagaytgaataagaaaaaataaatgtaaaaccgatctcaaaaagctgtaagttatatattccttctcctgaaaggtaatttctatttctgcttgattcctatgaggtgaagatgaataaccccaaggtttccttttctcaaaaaatggtattgagccttccacatgcagcttttgattgaatctgtgatttgtctcttgttaacttgagccccagaaaacacc

SEQ ID NO: 681610 - DNA, 653 bp, Homo sapiens
taaaaagacataaaccaagcagagggtgaggtactagaaaggcacacaccttgccatttctgtaaccacttagcctggggacctcaaggatgacttcaatggcctttcagaagtgcttgaataagttggtggaggttcagaagaaaagaagcatttaattgagaggccaattatattaaccatcttaaagccttttagaatcactcattagtacagctctatttaggtgaacagagtaacaaaacagtgccattacccttaggaaagtgagaagagtcaggggaatgcattttaaaggcaatgaaagctcagtgagattgatgggcttcacaactacttcaatwtgttcacttcactactttatagttttcaatgagtgtcccccaactccattatgtttattggatgagtgccaatggacactggaggtaagggataataagaattatgttactattatccttaatattaaattgtataatgctgcatcatcaaaatatgaagaaaattatatttaatatataatcacttttaatcactatttttcaaagcctaagttagatgaaaagctattcatctaccatgaatcactggaatctttcaagccagataatatctacattatgcttctctgagcttgtaactaactataa

SEQ ID NO: 681611 - DNA, 1078 bp, Homo sapiens
tagtatctgtatcaaatgatctgatagaataaattatgagagataggaaagaggaaacagagttgcttataataaacatcaatagaggataatgccagaagtaggacttagaacctagttttattaaacagctaatatttaacatccatattcttctatgtttagatacyatcctggggtcattactaatttaacttgtttaatccccactagaaacaaaaacaaaacaaacactaggagatgtatgtgattcttaactgcattttgtctattaggaaatgaaggcctagagagataaggaccctgctagagtcatgagacagtatgtgttggagctgagattcacacagactctgtctatctttagagctgtttgtcttaaccactgggaattcaaaataaggaattcaagaatagtacaatgaatcaaagaacactgtattatcagaaaaaaattaagtcagtaatattagagaaataattgattaaacaggttatagaaaaatatttaacattactgaggttatatcagaattttcatcatgaatatcaagttttgaaaatttaattacctattatttctaatacgagagctttgatcagggaaaaaacattatttgtagacaggcttcatgggtatgcaacctgcgaagtaacatggtgctctgtgcttacaggagcctcatgctttgtttaatgctttaataccatcagaacattattcttaataaattttgaacaaggagctttgcactttcattttgtgctagaccttgtgaattatgcaactggtcctgtatgtagataatgaaatatttcacaaattatcccaacatgccaatatacttaaatttcatctgattttagccaaagtgaaagtgatgaaaaactttatgggtgaaaatttagaatgtattattaaaaggtaaaaaaatgaagtttattacatgtgccatgtttaaaacaaaaccaacatatctctgatttttaaaacagggaagttgatgcaactaattaattaatggtaaggtagtttggaaggatatgtcaattatccataatgaaaggcttgaaaggg

SEQ ID NO: 681612 - DNA, 1780 bp, Homo sapiens
aaaataccaccacaaaattaaagaaataaaagaatttctcacggtcatttatagaaacacctatatgcttgttctaggaaaaaaatatctaaaataaaaattatacattaaaaatctgacctaacagtggataattaaattacaaaatgattcctaacgtaatttctttaaacatcaagctttcctagatcatttaaaaaatgtgacttaaaaatttaatttatatgcaacatttccatcaataaactagtatcagttatatgctggcaaaagtgaggtagcactcagtaatccagaaatataagaataattagtaccatctgaaaatcatgctatagaatttaatggaatccacaagaatagatatacatacataaagtcaacctagagacaaaatgaatctaagaccacaaagatttgacactaacgtaagtgaagatgtcaacatatttaaagaaaattactgaccatctactatgttagttacttgcaatagatgctggggaatacagtgctagcaaaactagacattgttctatgctctcttggaccttacagtttagtcaaggacactgtcaaataatgacagaaataataaaggtaaaattgacaaatgccatgaaagaagggtacaaggtgctgtcattatatatatcagagagatatgatatactctggaggtttggaagagctctcttgggaagtgctgtttgagtaaagacttgaagagtaaataggagttaactaggcaaaggggaggagtagaggatgagtgttctgggtaaaacagatcacatgcagaggacccagggtaggagggagtgtggcttgttttagcgtgtcaacgaatcatggtgtggatgaagcaccaaaaataaggaggaaagtagaacaaaaagaatatgataaaaaaatttaaattttaatgcctttttctgcgattcttagatggcattcttgccttttctacttgcaagttacagtgaggccactgcatgattgcccccacataattaatactaatatattaatggataaagttgcaagtaaattttattttttaagtcaaattttaaatggtctaagtagggaggaaacataggaaagaccagttaggaggctaatgtattaatataagtgtgagacagtggcactatgcactagggaagcagtgacagagataaaagaagtggagacatagaggtaaatctgatcgggttcgctgacaggatatggggagtggaggaagaggtctggtgtggagtattactcctacrttccttagctcacacaattcaataatgatggtgctactcctcacagagataggtaatactgagggaggatgaaggttttttgctgcaaggtggggtagtaaagagggcttaggaggaacagatcattaattatgttttgaatatgttgagtaatattaaagtgcctttttttttttttttttttttgagacaaagtctcgccctgtcacccaggctggagtgcaatggcgcaatctcggctcaaacgattctcatgcctcagcctcccaagtagctgggattacaggcgcccaccaccatgctggttatgttttgtatttttagtagagacagggtttcaccatgttggttaggttggtcttgaactcctgacctcaggtgatctgcccacctcagtttcccaaagtgctgggattacaggcatgagccacagtgcccggccattatccccattttatagataaagagatggaggcacagagaatataagtaacttgttttca

SEQ ID NO: 681613 - DNA, 1780 bp, Homo sapiens
aaaataccaccacaaaattaaagaaataaaagaatttctcacggtcatttatagaaacacctatatgcttgttctaggaaaaaaatatctaaaataaaaattatacattaaaaatctgacctaacagtggataattaaattacaaaatgattcctaacgtaatttctttaaacatcaagctttcctagatcatttaaaaaatgtgacttaaaaatttaatttatatgcaacatttccatcaataaactagtatcagttatatgctggcaaaagtgaggtagcactcagtaatccagaaatataagaataattagtaccatctgaaaatcatgctatagaatttaatggaatccacaagaatagatatacatacataaagtcaacctagagacaaaatgaatctaagaccacaaagatttgacactaacgtaagtgaagatgtcaacatatttaaagaaaattactgaccatctactatgttagttacttgcaatagatgctggggaatacagtgctagcaaaactagacattgttctatgctctcttggaccttacagtttagtcaaggacactgtcaaataatgacagaaataataaaggtaaaattgacaaatgccatgaaagaagggtacaaggtgctgtcattatatatatcagagagatatgatatactctggaggtttggaagagctctcttgggaagtgctgtttgagtaaagacttgaagagtaaataggagttaactaggcaaaggggaggagtagaggatgagtgttctgggtaaaacagatcacatgcagaggacccagggtaggagggagtgtggcttgttttagcgtgtcaacgaatcatggtgtggatgaagcaccaaaaataaggaggaaagtagaacaaaaagaatatgataaaaaaatttaaattttaatgcctttttctgcgattcttagatggcattcttgccttttctacttgcaagttacagtgaggccactgcatgattgcccccacataattaatactaatatattaatggataaagttgcaagtaaattttattttttaagtcaaattttaaatggtctaagtagggaggaaacataggaaagaccagttaggaggctaatgtattaatataagtgtgagacagtggcactatgcactagggaagcagtgacagagataaaagaagtggagacatagaggtaaatctgatcgggttcgctgacaggatatggggagtggaggaagaggtctggtgtggagtattactcctacattccttagctcacacaattcaataatgatggtgctactcctcacagagataggtaatactgagggaggatgaaggttttttgctgcaaggtggggtagtaaagagggcttaggaggaacagatcattaattatgttttgaatatgttgagtaatattaaagtgcctttttttttttttttttttttgagacaaagtctcgccctgtcacccaggctggagtgcaatggcrcaatctcggctcaaacgattctcatgcctcagcctcccaagtagctgggattacaggcgcccaccaccatgctggttatgttttgtatttttagtagagacagggtttcaccatgttggttaggttggtcttgaactcctgacctcaggtgatctgcccacctcagtttcccaaagtgctgggattacaggcatgagccacagtgcccggccattatccccattttatagataaagagatggaggcacagagaatataagtaacttgttttca

SEQ ID NO: 681614 - DNA, 1000 bp, Homo sapiens
tgaattttaggcacactaaaccyacccagcatttcaagaccatctcataccccaaaccatgtgccttgcaaaaatatgaatctggtataaaacaagattgtttatttccatccttttaattctgtctcttaatttattttattttatttttttttagagaacatgtctcactgtatcacccaagctggaatgcagtggcgtgatcatagctcactgcagcctcaaacttctgacctcgggagatccttcaaccttagcctccccagtagctgggactacagatgcatgccaccactcccatataatttttttattttttgtagggatgggattttgctatgttgaccagactggtcttaagcccctagcctcaaaagattctcttgcctcaacctcctgagtagcttccttctttattttctaccttggtaagttggggcccatcctagatgaatggcaagattcacaggactcactcaagcgggtgtaaggctgggcccatctctaaggtttctctcctgagcctgaggatgctacacagtgatacaatcaatccacaggctctaggactcattgacatgatttccaccattggcatccatgttgctaaaggacctaaggacctcagagaggggtagggtttgtttttgcagggctggggggttgtttttttgagacagagtctcactctgttgcccaggctggagtgcaatggcacaatctcggctcactgcaacctccaccttcctggttcaagtgattctcctgcctcagcctcctaagtacctaggattacaggcacgtgccaccacacccagctaatttttgtacttttagtagagacaaggtttcaccatgttggccaggctggtctcaaactcctgacctcaagtgatccacccacctcagcctcccaaagtgcagggattacaggcatgagccaccacgctcggcctcctgcccagttactaccgggggccctccatccccatgtgcccat

SEQ ID NO: 681615 - DNA, 1000 bp, Homo sapiens
tgaattttaggcacactaaacccacccagcatttcaagaccatctcataccccaaaccatgtgccttgcaaaaatatgaatctggtataaaacaagattgtttatttccatccttttaattctgtctcttaatttattttattttatttttttttagagaacrtgtctcactgtatcacccaagctggaatgcagtggcgtgatcatagctcactgcagcctcaaacttctgacctcgggagatccttcaaccttagcctccccagtagctgggactacagatgcatgccaccactcccatataatttttttattttttgtagggatgggattttgctatgttgaccagactggtcttaagcccctagcctcaaaagattctcttgcctcaacctcctgagtagcttccttctttattttctaccttggtaagttggggcccatcctagatgaatggcaagattcacaggactcactcaagcgggtgtaaggctgggcccatctctaaggtttctctcctgagcctgaggatgctacacagtgatacaatcaatccacaggctctaggactcattgacatgatttccaccattggcatccatgttgctaaaggacctaaggacctcagagaggggtagggtttgtttttgcagggctggggggttgtttttttgagacagagtctcactctgttgcccaggctggagtgcaatggcacaatctcggctcactgcaacctccaccttcctggttcaagtgattctcctgcctcagcctcctaagtacctaggattacaggcacgtgccaccacacccagctaatttttgtacttttagtagagacaaggtttcaccatgttggccaggctggtctcaaactcctgacctcaagtgatccacccacctcagcctcccaaagtgcagggattacaggcatgagccaccacgctcggcctcctgcccagttactaccgggggccctccatccccatgtgcccat

SEQ ID NO: 681616 - DNA, 643 bp, Homo sapiens
gttccactgcccctcggtgatatagtagtagtagtcatgttcacggctcgttataaaacgtcatgttctgaagcatccatgtttaaagtgtcctctccagtaatttcaagtatcagcaatgagaaacacttattaaatattagtaactggacctcaaaaatgtaataaaatagaaatatcctgtacctttggggaccataaaattatatgggccaccctaataaatctgtcttttagttagatgattacaatatctatcaactcgagttttcctttggatttggagccaacagcctataaattgtctttattaatttcatcataaatgctggcatatttcgtgatttaactctttgaatttctgccagcgtctttcatttttcttttgatttaccagtgaagtgtcctatatctttcagttttattttcttactccttgttttcagttctttttcctttctgaaaggcaggcwaattgtgagtttgcagagttaaacacttcatatgttgaatggtctttactagacctgcatttatcaacaaacaataacatgtttgttgatagcactaaactttcaatatttaatgcagatatcaatgaatgtgctttggatcctgatatatgtgccaatgggatttgtga

SEQ ID NO: 681617 - DNA, 1468 bp, Homo sapiens
taccctcacctctacctagaaaactcctcctcatgcttcaagaatgagctcaaatatcccccgttgagagaagcatcatctgactcccacaggcaaaatgtagcagtccttttgagttccctactatacctgctccccatccctgccgcagcacagactttactgcactgcctttacccaatgacttatgtctccatctgtcccctccacccactacaccaactccagcagagtaagaactcattcagtgatcactaaggaagaatggctaagtacattctggttggagatggggaarggagatggtcttaggtttgcttttccccaagcagatcatgggaaactggtttgaaatgaacttcttcacatttctgagagtgaataaggtataagcctggaactgctaggtgcaggtttggagctgaggggaagatgacagttcatctgttagtgcccttggaacattaaatggaagctgtcctgcttcctgtccccatgaggaaaacactgcctgagaatggagccaaaacaaaggaagacggtgttaggagcttgagtgagaacaagttctgatggcatctgagcccacagaggtggctgttcctgaagtcagtcatgactcttgaactttttagttgtaagccattccctgtttttgcctaagccattttgtttttgttttgttctgttttgtatggggtttttttggtgttttgttttttgagacggagtctcaccgtgttgcccaggctggagtgcaatggcgcatctcggttcactgcaacctccgcctcctgggttcaagcaattctcctgcctcagcctcccgagcagctggaattacaggcacccgccaccacgcccagccaatttttatatttttggtagagactgggtttcaccatgttgcccaggctggtctcgaactcctgaccttaggtgatctgcccaactcggcctcccaaagtgctgggattacaggcgtgagccaccacaccaggctctgcctatgccattttgaatgcagactttccatctattgcgagcaagagaatcttcatgctgctaaagcatgttgaaataagaatatccttttgagagaaaaactttaaaactcatatgtcctgaatcaaaatagaagtatgagatcaacttgaggcagaatagccctttggaaggcaagactggattgcaaagacttattgagagcatatctcatgccaagactctaagttacctgacatagaatgtgtccaacagaagaaaggctggtcagacatgagtgcctgcacaaaagagggtcatggagaaagagttggcaaggcccacgaaagcaccagccaggttaactgttaagtgaacacaggtatagagtctccacctggcgccccagggctggcttcctggagctttatgaacctcctaaaattgtatgtgtaattaattctgcattttttttttgagatga

SEQ ID NO: 681618 - DNA, 1468 bp, Homo sapiens
taccctcacctctacctagaaaactcctcctcatgcttcaagaatgagctcaaatatcccccgttgagagaagcatcatctgactcccacaggcaaaatgtagcagtccttttgagttccctactatacctgctccccatccctgccgcagcacagactttactgcactgcctttacccaatgacttatgtctccatctgtcccctccacccactacaccaactccagcagagtaagaactcattcagtgatcactaaggaagaatggctaagtacattctggttggagatggggaaaggagatggtcttaggtttgcttttccccaagcagatcatgggaaactggtttgamatgaacttcttcacatttctgagagtgaataaggtataagcctggaactgctaggtgcaggtttggagctgaggggaagatgacagttcatctgttagtgcccttggaacattaaatggaagctgtcctgcttcctgtccccatgaggaaaacactgcctgagaatggagccaaaacaaaggaagacggtgttaggagcttgagtgagaacaagttctgatggcatctgagcccacagaggtggctgttcctgaagtcagtcatgactcttgaactttttagttgtaagccattccctgtttttgcctaagccattttgtttttgttttgttctgttttgtatggggtttttttggtgttttgttttttgagacggagtctcaccgtgttgcccaggctggagtgcaatggcgcatctcggttcactgcaacctccgcctcctgggttcaagcaattctcctgcctcagcctcccgagcagctggaattacaggcacccgccaccacgcccagccaatttttatatttttggtagagactgggtttcaccatgttgcccaggctggtctcgaactcctgaccttaggtgatctgcccaactcggcctcccaaagtgctgggattacaggcgtgagccaccacaccaggctctgcctatgccattttgaatgcagactttccatctattgcgagcaagagaatcttcatgctgctaaagcatgttgaaataagaatatccttttgagagaaaaactttaaaactcatatgtcctgaatcaaaatagaagtatgagatcaacttgaggcagaatagccctttggaaggcaagactggattgcaaagacttattgagagcatatctcatgccaagactctaagttacctgacatagaatgtgtccaacagaagaaaggctggtcagacatgagtgcctgcacaaaagagggtcatggagaaagagttggcaaggcccacgaaagcaccagccaggttaactgttaagtgaacacaggtatagagtctccacctggcgccccagggctggcttcctggagctttatgaacctcctaaaattgtatgtgtaattaattctgcattttttttttgagatga

SEQ ID NO: 681619 - DNA, 1468 bp, Homo sapiens
taccctcacctctacctagaaaactcctcctcatgcttcaagaatgagctcaaatatcccccgttgagagaagcatcatctgactcccacaggcaaaatgtagcagtccttttgagttccctactatacctgctccccatccctgccgcagcacagactttactgcactgcctttacccaatgacttatgtctccatctgtcccctccacccactacaccaactccagcagagtaagaactcattcagtgatcactaaggaagaatggctaagtacattctggttggagatggggaaaggagatggtcttaggtttgcttttccccaagcagatcatgggaaactggtttgaaatgaacttcttcacatttctgagagtgaataaggtataagcctggaactgctaggtgcaggtttggagctgaggggaagatgacagttcatctgttagtgcccttggaacattaaatggaagctgtcctgcttcctgtccccatgaggaaaacactgcctgagaatggagccaaaacaaaggaagacggtgttaggagcttgagtgagaacaagttctgatggcatctgagcccacagaggtggctgttcctgaagtcagtcatgactcttgaactttttagttgtaagccattccctgtttttgcctaagccattttgtttttgttttgttctgttttgtatggggtttttttggtgttttgttttttgagacggagtctcaccgtgttgcccaggctggagtgcaatggcgcatctcggttcactgcaacctccgcctcctgggttcaagcaattctcctgcctcagcctcccgagcagctggaattacaggcacccgccaccacgcccagccaatttttatatttttggtagagactgggtttcaccatgttgcccaggctggtctcgaactcctgaccttaggtgatctgcccaactcggcctcccaaagtgctgggattacaggcgtgagccaccacaccaggctctgcctatgccattttgaatgcagactttccatctattgcgagcaagagaatcttcatgctgctaaagcatgttgaaataagaatatccttttgagagaaaaactttaaaactcatatgtcctgmatcaaaatagaagtatgagatcaacttgaggcagaatagccctttggaaggcaagactggattgcaaagacttattgagagcatatctcatgccaagactctaagttacctgacatagaatgtgtccaacagaagaaaggctggtcagacatgagtgcctgcacaaaagagggtcatggagaaagagttggcaaggcccacgaaagcaccagccaggttaactgttaagtgaacacaggtatagagtctccacctggcgccccagggctggcttcctggagctttatgaacctcctaaaattgtatgtgtaattaattctgcattttttttttgagatga

SEQ ID NO: 681620 - DNA, 575 bp, Homo sapiens
tattagcaggtctggccccttttagaggttcctggggagaatctcctgggcagaatacattccttgcctcttccagcttctagaggccactgacagtccttggcccttggctacttccattgtcacatcagcacctctcatccttcctctcgtgatttcttctttctcttacaagagcccttgtgattacactgggaccacccagrtaatctagtttaatcccctcatctcaagaactgaattcaattacatttgcaaagccccttttaccatgtaaggtaacacagtcacaggttatgggtatttggtcattattctctcttccaaattacccttctgttgttagttgggttcaaccaacaggaagcacatgcaggtgaccacagggtagaaggagagagatggcctcctatgctccctccctgccaagacagatttgggtgtggctacttcctctatgaacacacctcttctctatctgccctttaaccccagcttacatgaggttccttccagcaccccattccttcctcttgcccaccaccgtgcccggccaagaacactttaaaacactg

SEQ ID NO: 681621 - DNA, 704 bp, Homo sapiens
tcaaacatataatcatagtacactaataggtttaagagaatgagatcctcagttatcatgggaagttgataaatgttgctgagcatggagaaaccaagaatcaagcagcataagccttgattcctataagtgatttttataagaaatatggaagtaaataccagaagcagcagacagaagagctaaatgtggctctgggaagcgagattgagaggatggtgggagtcygctgtgttttgcaaccttttaatatttgatttttaaaaaaactctatccatgtaatatattgattaaaaaacaagtaatacatacataagaaactaataatgttaatatagatacatgctaaaagaattaagactggagagattatatgcttccagaaagaggggaggagaaaacgctttttggagttgtgattttttagtcctccttgaaagattattacagtgtctagtatagtaatttccagcttcttccccccagcatggggagatgtttaaatgaataacaaacatcgatccacagatgtctacaaaattgggaaggatggtgaaaatactacatcctttgtggttatgtttcctttttgactgctcagtttgctgtaactggtgagcttgcttttagaagttggagctagaagcatcttaaagatgatctaattttgtaacccccagacttggtaaatcatgatactcac

SEQ ID NO: 681622 - DNA, 2527 bp, Homo sapiens
aagatgaagtgttctttattttgctaacatgaaagatgctctcaatatactctgagaaaaacaacactgttcaaagataaagctacaggatactgttacagtatgacattttgcctgaagagagtgtgtgtgtgtgtgttagtaaagaaactggaaagacacagattgaaacgctatctgaatatagggatttcagtgtaattttatttcttctctttctttttttttattaatttatttgttgtgttcatatattaatcataactaaaatgttgaataagggctaactctaggcctagaaagcaagctgtgtatgtgacattccctttccaggtagcaggtgctcttactctgttttgcaaataagaaaacatgctcggcatcacacagttagtaaacaccacaggtataacctgaagttccactgccagattccaaaactcgagctctgctaataaaaattaacaagactgggccaggcgcagtggctcatgcctgtaatcccagcactttgggaggccgaggcgggcggatcacgaggtcaggagatcgagaccacggtgaaaccccttctctactaaaaatacaaaaaattagccgggcgcagtggcgggcgcctgtagtcccagctactcgggaggctgaggcaggagaatggcgtgaacccgggaggcggagcttgcagtgagccgagatcscgccactgcactccagcctgggggacagagcaagactccgtctcaaaataaataagtaaataaataaaaaataacaagacgaagggtgagtctcagaacaatctggaacacagagcaagctgtgctagagatacagaaggtgaaatgagacaagagggacatctgaagcaggcaaaaggcatgggggctttagcatatttgggaccttcagttatctatgtgttggtgcaaggatattcaatagacctgggaaatccatggctgcttaataaagaggcaattaagtgtttcaaagtcggctgggtgcagtggctcacacctgtaatctcagcatttgggaggctgaggcgggtggatcacccgaggtcaggagttcaagaccagcctggcaaacatggtgaaactccatctctattaaaaatacaaaaattagctgggcatggtggcaggcacttgtaatcccagctactcgggaggctgagccaggagaatcgcttgaacctgggaggcggaggctgcagtgagctgagatcacaccactgcactccagagcaagattccatctcaaaaaaaaaaaaaaaaaaaaaaaaagtgtttcaaagtcattaatacaaatgatttactgagcttgctgggtgtgaggatggagatggggttaggaggacgggactgaaaccccgaaaatgtgtcactatctggaaaaccattaactccactgattgttccagccttacacgttgagatgtcagagccaaatacatttattcgctccaagcatcagtaatgtgacagacatgtggataccctaccaggacacaatgctgattccacttgcagtgaacacagacactgtgcccaagagaaataaagcagagggaggcaagaggacccaaagctagaaggagagggcaaaggagagagaaacactttgggtttgatattctcattcccctttgatgcgatcacaggggaaatgccagagggctgactgactgatatcctgactcccagagctcttccatgggaaacaaggaagtgcctatggaaggctatgcaacttacaagaaatctggacagcaagattctctccggaacaaatgccaagagggagatgaattattcagtgtgtagagatgtgtcattcaggatgaagagatgtgtttttggctgcacaaagatttaaacagacacactcacacatacatacatgcacacactcactcttcctggcagttaaggagaggaattgtccatttaaaccagccaccccccgtcccccaggaactgtgggtgctccactggcctgaaatgtttcaccttgggcaagtgctaaggatgcaacctgggaagaaatgtccactttcagatgtggccaggacttgggggcctgcctggaactcccagcccccaccctcgggtgaagcaattcaccaccatccagcctggttcagtcggtccctgcttccagcctccacaactcgggctgccgaaaaccccaattgtgaaatcaaatgacccagatgctggaggggcaagaagggagggtgccagacaagaacgagttctgcctcttcttaattacaaatctctaaaggagcacaaacattcctgaatgtttctcaacaggccctcctggaaaaacggccagatgtgtcgctgtggagacaggtaggttctgccaggagcaccctacaaacagcacacaggcacacctgtcggggagagccaccccgggggctggaagcctcccttaccctcctctcaggggcaaccaccagtgggtaactggtagttactttcctacgggctgtgaggacatgagaccacgg

SEQ ID NO: 681623 - DNA, 1100 bp, Homo sapiens
agctcacagtcttgtaagtcagaagtcttggtggctacctgtagaggttctctacccagggtctcacagggctggaatsaaggccccagcctgactggagttttacctggaggctctgggaagaatccacttccaagctcattctaattttgcagaatccggttccttgcagctgtgggatggaggtcaccttcttcttgctggttgcctgcttgtgatttcctctcagatcctgggggctgctctcagatcctccccacaagacctcctgcaacttcaaagcaggcaatggggtatgtctcttgcatcaaattcttctcacattgtgaatctctctaacttctgccaccggctggagaaaactctctgctttgaaagaatttatgtgattgaattaggcccagccagacaatctccctatttcaaagtcaactgattaggaacctcaatgacatctgcaaaattattttaccatgtaaccacaggagtaacaccaaggggtgagcatcatgaggtcatcttagaattttgcccatcacaccctgttatgcaacctagggtgaaacagcaagtaagagataaactgaagttggtaggttattcatttgtaggtgatggaagaattcaaaagggagttagaattttaaatccacggacaagtttcaaaaaaagatgttcatctgaggaaaaccatgctctttgatccaagttatttaccaatcataattgtaagagcagctatcatttattaagggcctactatgggtcagtcacttttgaaggtggcagtgcactgctggcattattttgaattttaacaaaaatactccaaattaagtggcatgaaagaagaaaccgagacatgtagaagttaaataacttgcacagatggtagtgacagccaaaattcaaacccatatctggagagtgcaaggcctgtgttctttccagagccaccagcttcttcactggcaggacagcccgcagatcaggcatgggattatctgttgacggaacaccattgtaaatgcaacctgttcaatgagatgattcagacagcattttctgataaaattcagtgttacctagatggtactatg

SEQ ID NO: 681624 - DNA, 1100 bp, Homo sapiens
agctcacagtcttgtaagtcagaagtcttggtggctacctgtagaggttctctacccagggtctcacagggctggaatgaaggcsccagcctgactggagttttacctggaggctctgggaagaatccacttccaagctcattctaattttgcagaatccggttccttgcagctgtgggatggaggtcaccttcttcttgctggttgcctgcttgtgatttcctctcagatcctgggggctgctctcagatcctccccacaagacctcctgcaacttcaaagcaggcaatggggtatgtctcttgcatcaaattcttctcacattgtgaatctctctaacttctgccaccggctggagaaaactctctgctttgaaagaatttatgtgattgaattaggcccagccagacaatctccctatttcaaagtcaactgattaggaacctcaatgacatctgcaaaattattttaccatgtaaccacaggagtaacaccaaggggtgagcatcatgaggtcatcttagaattttgcccatcacaccctgttatgcaacctagggtgaaacagcaagtaagagataaactgaagttggtaggttattcatttgtaggtgatggaagaattcaaaagggagttagaattttaaatccacggacaagtttcaaaaaaagatgttcatctgaggaaaaccatgctctttgatccaagttatttaccaatcataattgtaagagcagctatcatttattaagggcctactatgggtcagtcacttttgaaggtggcagtgcactgctggcattattttgaattttaacaaaaatactccaaattaagtggcatgaaagaagaaaccgagacatgtagaagttaaataacttgcacagatggtagtgacagccaaaattcaaacccatatctggagagtgcaaggcctgtgttctttccagagccaccagcttcttcactggcaggacagcccgcagatcaggcatgggattatctgttgacggaacaccattgtaaatgcaacctgttcaatgagatgattcagacagcattttctgataaaattcagtgttacctagatggtactatg

SEQ ID NO: 681625 - DNA, 603 bp, Homo sapiens
aggatggtctttcagcattgttcaaaattgaggcaagagggcccagcctctgtatctctaaagtgatcagcagatggaggctgtttcttggaaataagttgccagtcagatttctkcaggtaattcattgagagggactcagctgtgagccattcagaacaccagctgtgagaataaagacttcggtcttatctgatcagggcaatacaggaacccctataaaatgatacatactaatgcagtttatggtcaattgtaccccctattagtttcatttcccataaagaacaaatcaaatgtggaattactgagtaatatgccttgaaagaaacttaacatcacatcaagttcaatactcttggtttttaggtaaaaacccagaggtgccattaagttctttgctcaggggcacagtgtatgctgatgttgggtctggaagtcaggttttctgcctgcagcctggtgctctttcacttttagattcttttttttattattattatactttaagttttagggtacatgtgcacattgtgcaggttagttacatatgtatacatgtgccatgctggtgggctgcacccactaactcgtcatctagca

SEQ ID NO: 681626 - DNA, 603 bp, Homo sapiens
aggatggtctttcagcattgttcaaaattgaggcaagagggcccagcctctgtatctctaaagtgatcagcagatggaggctgtttcttggaaataagttgccagtcagatttctgcaggtaattcattgagagggactcagctgtgagccattcagaacaccagctgtgagaataaagacttcggtcttatctgatcagggcaatacaggaacccctataaaatgatacatactaatgcagtttatggtcaattgtaccccctattagtttcatttcccataaagaacaaatcaaatgtggaattactgagtaatatgccttgaaagaarcttaacatcacatcaagttcaatactcttggtttttaggtaaaaacccagaggtgccattaagttctttgctcaggggcacagtgtatgctgatgttgggtctggaagtcaggttttctgcctgcagcctggtgctctttcacttttagattcttttttttattattattatactttaagttttagggtacatgtgcacattgtgcaggttagttacatatgtatacatgtgccatgctggtgggctgcacccactaactcgtcatctagca

SEQ ID NO: 681627 - DNA, 603 bp, Homo sapiens
aggatggtctttcagcattgttcaaaattgaggcaagagggcccagcctctgtatctctaaagtgatcagcagatggaggctgtttcttggaaataagttgccagtcagatttctgcaggtaattcattgagagggactcagctgtgagccattcagaacaccagctgtgagaataaagacttcggtcttatctgatcagggcaatacaggaacccctataaaatgatacatactaatgcagtttatggtcaattgtaccccctattagtttcatttcccataaagaacaaatcaaatgtggaattactgagtaatatgccttgaaagaaacttaacatcacatcaagttcaatactcttggtttttagrtaaaaacccagaggtgccattaagttctttgctcaggggcacagtgtatgctgatgttgggtctggaagtcaggttttctgcctgcagcctggtgctctttcacttttagattcttttttttattattattatactttaagttttagggtacatgtgcacattgtgcaggttagttacatatgtatacatgtgccatgctggtgggctgcacccactaactcgtcatctagca

SEQ ID NO: 681628 - DNA, 642 bp, Homo sapiens
gaaagctacaccgaggaagccattccgactttcagaacatcacaaattactgtccatgtggtgtcaaagtaagacttaagggtaacagaatagctttgagatggagaaagamtcagacttgctggggaccatttgaattcccaggcccccaggttttgggacacttctgacttaagcttgtggagacagccttagttaatgtcatcacctcaatgtcctaggaactagcccagcacctggcctctcgcctgtcgtggagaagctcctgagaacaggacctaggtcaaggcagcacccaggaagcctgcgggtttgctggaaggccctgctgtggaggggatgcctgaggaaacgttcaacagcttcagctcagcagtgagcggctggaagaccagtccacgtgggcgggcagcatctgttaaggatgtccagactcattcactcgctaaaatactccctgaacagctgaagcagaggcgatctagcagtgatgccagaaatctgggtcccgtaagcttaaatgggagaaaggatctccccacatccctgcccccagagccaccactttctctgccttccttattctgggccactctggttcctcttctgccaccagacctgccacatggcctctcccagact

SEQ ID NO: 681629 - DNA, 642 bp, Homo sapiens
gaaagctacaccgaggaagccattccgactttcagaacatcacaaattactgtccatgtggtgtcaaagtaagacttaagggtaacagaatagctttgagatggagaaagaatcagacttgctggggaccatttgaattcccaggcccccaggttttgggacacttctgacttaagcttgtggagacagccttagttaatgtcatcacctcaatgtcctaggaactagcccagcacytggcctctcgcctgtcgtggagaagctcctgagaacaggacctaggtcaaggcagcacccaggaagcctgcgggtttgctggaaggccctgctgtggaggggatgcctgaggaaacgttcaacagcttcagctcagcagtgagcggctggaagaccagtccacgtgggcgggcagcatctgttaaggatgtccagactcattcactcgctaaaatactccctgaacagctgaagcagaggcgatctagcagtgatgccagaaatctgggtcccgtaagcttaaatgggagaaaggatctccccacatccctgcccccagagccaccactttctctgccttccttattctgggccactctggttcctcttctgccaccagacctgccacatggcctctcccagact

SEQ ID NO: 681630 - DNA, 642 bp, Homo sapiens
gaaagctacaccgaggaagccattccgactttcagaacatcacaaattactgtccatgtggtgtcaaagtaagacttaagggtaacagaatagctttgagatggagaaagaatcagacttgctggggaccatttgaattcccaggcccccaggttttgggacacttctgacttaagcttgtggagacagccttagttaatgtcatcacctcaatgtcctaggaactagcccagcacctggcctctcgcctgtcgtggagaagctcctgagaacaggacctaggtcaaggcagcasccaggaagcctgcgggtttgctggaaggccctgctgtggaggggatgcctgaggaaacgttcaacagcttcagctcagcagtgagcggctggaagaccagtccacgtgggcgggcagcatctgttaaggatgtccagactcattcactcgctaaaatactccctgaacagctgaagcagaggcgatctagcagtgatgccagaaatctgggtcccgtaagcttaaatgggagaaaggatctccccacatccctgcccccagagccaccactttctctgccttccttattctgggccactctggttcctcttctgccaccagacctgccacatggcctctcccagact

SEQ ID NO: 681631 - DNA, 615 bp, Homo sapiens
tgagtacccataaacagaatattagaaaatcaagaatactattacccctccctcaccttttttaattttttctttttttcccagaaatattcttacccacaccttccttgtttgcttgctttttttttttctgcatatctgaaygtagtggataaattctaccttccaacacacacacacaccaaatagctgaaaacagaatctaagaggtgttatccctactaatatcatctgagcctaaaatactctgtcacaggccccctgtgaagacattcagcctgggtatggtgaaattttgcaggcctggggtccatttggcccccttcagttgtatttctatgcattcactttgttgtgggactgtgggagacagcctgtctcctcaattctaagctcccaggggcacctcacaatgaagtagtagttccctgataattacagtagaatcactccaaaaaaggagcttccagccataatctgtgtctgtgtctccccaagggtcatcactgggtctgagcttgaatcactgagtcctggcatgatctcagccaataaccaggcaaaactggctatcttcaatgaatgcctttccctcatcagcactaatggctcaca

SEQ ID NO: 681632 - DNA, 615 bp, Homo sapiens
tgagtacccataaacagaatattagaaaatcaagaatactattacccctccctcaccttttttaattttttctttttttcccagaaatattcttacccacaccttccttgtttgcttgctttttttttttctgcatatctgaatgtagtggataaattctaccttccaacacacacacacaccaaatagctgaaaacagaatctaagaggtgttatccctactaatatcatctgagcctaaawtactctgtcacaggccccctgtgaagacattcagcctgggtatggtgaaattttgcaggcctggggtccatttggcccccttcagttgtatttctatgcattcactttgttgtgggactgtgggagacagcctgtctcctcaattctaagctcccaggggcacctcacaatgaagtagtagttccctgataattacagtagaatcactccaaaaaaggagcttccagccataatctgtgtctgtgtctccccaagggtcatcactgggtctgagcttgaatcactgagtcctggcatgatctcagccaataaccaggcaaaactggctatcttcaatgaatgcctttccctcatcagcactaatggctcaca

SEQ ID NO: 681633 - DNA, 656 bp, Homo sapiens
tctggtaatagagtaacagaaactttaagtttcttgcccaaggttacacatctaagaagctgtgaatctagatttgaacccgaggcatctrgggatagcatctgggttcttaggcactgaaccatgctgcctcctttttagttttcttattttaagtaattgtcgtccatgcaacacttgtgattttaaaaagtacatgtcatatttgaacacattttctttaaacttatcccatataacctctttttcccccttttaaaccagggtgatcaactaattgtatagaattaactcagaagggtataaatcatgaaatgactgttttcttctctactcactgtctccaattctactaaatcccatcatttttctctgttagtgacctctaaacataagtctccaatcactctttgtttttaaaagaccactcagtttaaaagttgaatcacatatccgtctcagttagttaccgtaaattctccttgtgcttagccttaggcctaagtgagcagggtcttttacttgtagaaagaaacaccatctatgcccctaaacagactgaatgctgctctggagattaaatcaatgttgaaaatactagtaatatgttaccatgtttattcaaaaacacatttccttacttgctgactcagaaa

SEQ ID NO: 681634 - DNA, 1127 bp, Homo sapiens
tgaaggcattgctgagctagagagacaatgccattcatagccaggatagttgccaagatgtgagagcctgaaccaatctgacttaaggagccaaggcatgttgtgaattatagcaacaggaatcaaaagcaaggagtgaggataaaacacaaggaaggtggggcagttcaggaagctacgtttctgcaattttgactgcattctctatgggcccagcaccttaagtatgatgtatcacattgaacactgagaaaattgaagcagctcaagtggtaggaactattccacaaaattatttttaatgagtaaggtttaatgattttctttagtaatctgaatgatgtagaaatactgcatgactgcaattcaggatgtgttgtgaccatttttttctgaagcttccaaccagatgactcaaagaaaaggttttgagttgttcagtttgtaaaaggttttgagttgttccagtttgtccaaattaccccaagaaaagagtatcatgaattgtgaatcaagttatgcattgcattaaggccaaggccatgagatgagggacagctgaagctctcttcttgctctgcttaccaagttgtataccctcagggttgttgtcactctgagagtggattttctaatcccatgctcaaagtgggggaatttttctaatttctgaaaatatatcacagtggcaaactgtagcccaacactagagaattgttttcaaggttgaacagcatgatggtgtttcagtagccaatgttatctagttttcctttaggaaaaaaaaaaaaagccccagagcaaagttaccatcacagaacaatataattattgtgttaaaaaacaaaaacacatgaggagttggtggtagaagtagagcattagctgcaatctgtaattgcttgtcctgtaatttgtcatcaatatctggatttatacagctaaaagatcacctaattagaaattcagcaggactagcatctttggtggaatttgaagtaatatgttgaatagtaagacagctgtgaatccttgataaccagtctcctccttcatttgtctaacatttctatgtacgaacttcttccttgagctagggtgagtgaggatscagtttcagaagtgag

SEQ ID NO: 681635 - DNA, 595 bp, Homo sapiens
tgacagagtctcactctgttgcccaggctggagtgcagtggcacattctctcatcactgcaacctctgcctcctgagttcaagcgattcttctgcctcagcctcccgagtagctgagattacaggtgcccgcaccacrctcagctaattttttgtgtttttagttgagacggggtttcactatgttggctaggctggtctcgaactcctgacctcgtgatccacccaccttggcctcccaaagtgttgggattacaggcatgagccaccgcacccagctgctttgtccatttattgtcaaccaaggattatggcccattcctgtgagtggcctgacccagccagcaagacccccggcattaggaggcaaagacatcaggccttgaaccatgccctcagcccacccccaccctgataataacttcttctcctccccgccttggctttgttcacacggcatcctcccatctcttcttccctttgctgtccctcctctgcctccttctctggctctaggaggctcggccttctctgggagagaggatttagtcctagccgccatcctgcctcccaggtctttctcagtaccctctggt

SEQ ID NO: 681636 - DNA, 691 bp, Homo sapiens
attagtgactatcatctgcactgtgcccctgacttctgttgttgcctgcctttggatccctgagacctagttttcctttctagggtttcaacccaaagcctggaattgagtttgggacaaaaagctgcctcaggagggttcataaactcattaagttccaggtggccctcatcaaactccagtaagttaccagtggtgccccctgctgaggtccagctgacactttctccctatcataatcagaatgctaaggtgaagctgtggaaccaggtcctcttaaaacaagggaaagaaagggagtcctgagaattggggacctctcatagaaaatctccctgtatttgcaggactatgtgaactcctgacatggtagaaaagagggaaaataraacagcttaagtgcagggaggggaaggtgtctggtgtcttgctctatgcaaatgggtttcttcaacagaaaaaaaaaaactcttaatcactgcatcctctttgcctctaagaatagacagaaaccacattgttctaaattgcatagctgattgctgggtcagatgctcattctacccagtaatatctctgtagttagcaacaacacccttaatattatatacgaagaagagataggtgccatgaaagagagaaggaaaatgcaaaagaaaagactggattggaggccaggtggggtacctca

SEQ ID NO: 681637 - DNA, 691 bp, Homo sapiens
attagtgactatcatctgcactgtgcccctgacttctgttgttgcctgcctttggatccctgagacctagttttcctttctagggtttcaacccaaagcctggaattgagtttgggacaaaaagctgcctcaggagggttcataaactcattaagttccaggtggccctcatcaaactccagtaagttaccagtggtgccccctgctgaggtccagctgacactttctccctatcataatcagaatgctaaggtgaagctgtggaaccaggtcctcttaaaacaagggaaagaaagggagtcctgagaattggggacctctcatagaaaatctccctgtatttgcaggactatgtgaactcctgacatggtagaaaagagggaaaatagaacagcttaagtgcagggaggggaaggtgtctggtgtcttgctctatgcaaatgggtttcttcaacagaaaaaaaaaaactcttaatcactgcatcctctttgcctctaagaatagacagaaaccacattgttctaaattgcatagctgattgctgggtcagatgctcattctacccagtaatatctctgtagttagcaacaacacccttaatattatataygaagaagagataggtgccatgaaagagagaaggaaaatgcaaaagaaaagactggattggaggccaggtggggtacctca

SEQ ID NO: 681638 - DNA, 515 bp, Homo sapiens
aatttagaagtcctttggaagggaggttgccgaaatttcatacaaattttcctttccctcagattcagtggaagaaggagagaaggttgtgaagacagccctggatgcttttggaagaataggtgatgtttctttgtgttatggctcttgtggagcaacttctaccttcctaatgaaatatttttaagttgactttcatttactaaacagatacctctttcctcataatcacattttaaaatttgatttataagttaattattgtacttatttcataaagggtttaattgaggtggcaattttatggatatagtgttgagtttgtttttttgcaccttaagtgctttaaaaaacttacgagcgtttactcagtgccctttttwaaataattcagttaaacctcaaagatgtttataagattaaaaaataaaccaatattttggcaatagagtacccagtggattcttttggataattataataatttggattaaaataatccaatatcttgcaaa

SEQ ID NO: 681639 - DNA, 554 bp, Homo sapiens
taactttctcctttcctctttcacatgacttcatggctattaccttgtctgggataaaattttaaatatagtcttaaaatagayaggaaatgaaaataatttataaagaaaacaaactgaaaagaaaagaaaaattgtaactaaattgttataactcataaaccagccctgtattaaataatgttataatcctactgaatgtctttgttttctgtgtaatatataagcagaccttaacttataactttggaatgctgaccccatttctctgaagtctgtttcctggatggcattctcaacttttcacttgagcaaagctttttaagttggattccaattcttccaattatttcaggttgacagcaccctcagattagggttagggttagggacagatcctatggaatgcatcctccaccctcaactcccattcatggacctactttcttgtttctttgcatgtcttgtaattttttatagaaaactggacatttaaataaaatattgtggcattctggaagttggattctcctctcttcccagggcttgctgct

SEQ ID NO: 681640 - DNA, 554 bp, Homo sapiens
taactttctcctttcctctttcacatgacttcatggctattaccttgtctgggataaaattttaaatatagtcttaaaatagacaggaaatgaaaataatttataaagaaaacaaactgaaaagaaaagaaaaattgtaactaaattgttataactcataaaccagccctgwattaaataatgttataatcctactgaatgtctttgttttctgtgtaatatataagcagaccttaacttataactttggaatgctgaccccatttctctgaagtctgtttcctggatggcattctcaacttttcacttgagcaaagctttttaagttggattccaattcttccaattatttcaggttgacagcaccctcagattagggttagggttagggacagatcctatggaatgcatcctccaccctcaactcccattcatggacctactttcttgtttctttgcatgtcttgtaattttttatagaaaactggacatttaaataaaatattgtggcattctggaagttggattctcctctcttcccagggcttgctgct

SEQ ID NO: 681641 - DNA, 554 bp, Homo sapiens
taactttctcctttcctctttcacatgacttcatggctattaccttgtctgggataaaattttaaatatagtcttaaaatagacaggaaatgaaaataatttataaagaaaacaaactgaaaagaaaagaaaaattgtaactaaattgttataactcataaaccagccctgtattaaataatgttataatcctactgaatrtctttgttttctgtgtaatatataagcagaccttaacttataactttggaatgctgaccccatttctctgaagtctgtttcctggatggcattctcaacttttcacttgagcaaagctttttaagttggattccaattcttccaattatttcaggttgacagcaccctcagattagggttagggttagggacagatcctatggaatgcatcctccaccctcaactcccattcatggacctactttcttgtttctttgcatgtcttgtaattttttatagaaaactggacatttaaataaaatattgtggcattctggaagttggattctcctctcttcccagggcttgctgct

SEQ ID NO: 681642 - DNA, 554 bp, Homo sapiens
taactttctcctttcctctttcacatgacttcatggctattaccttgtctgggataaaattttaaatatagtcttaaaatagacaggaaatgaaaataatttataaagaaaacaaactgaaaagaaaagaaaaattgtaactaaattgttataactcataaaccagccctgtattaaataatgttataatcctactgaatgtctttgttttctgtgtaatatataagcagaccttaacttataactttggaatgctgaccccatttctctgaagtctgtttcctggatggcattctcaacttttcacttgagcaaagctttttaagttggattccaattcttccaattatttcaggttgacagcaccctcagattagggttagggttagggacagatcctatggaatgcatcctccaccctcaactcccattcatggacctactttcttgtttctttgcatgtcttgtaattttttatagaaaactggacatttaaataaaatattgtggcattctggaagttggattctcctcycttcccagggcttgctgct

SEQ ID NO: 681643 - DNA, 2145 bp, Homo sapiens
taaaccaaccagttcacttcatgttgtcgccaaactgagcacagctgctttyaaggtatggtcactatgcctatagtaaatttatttttctgggtttttctttttttttttttttttgagacagagtcttgctttttgctttcaaggcatggtcactatgcctacagtaaatttatttttctgggttttttttctttttttttttttgagacagagtcttgctttgctacccaggctggagtgcagtggcacgatctcggctcactgcaacctccgcctcctgggttcaagcagttctcctgtctcagtctccccagtagctgggactacagccgcccgccaccatgcatggctaatttttgtatttttaggagagatggggtttcaccatattagtcaggctggtctggaactcctgacctcaggtgatccacccacctcggcctcccaaagtgctgggattaccagcatgagccactgcgcccagcctatttttctggtcttaatgaactataagctaaattgaagatgagatctatccaatatttctgttctaactcctcagagcacctactacactgctatgaacttgatgtgaacatcaaaaaataattagttaagtattaactgtgttcaaatcctggctctgccacttgctagctgtgtgatctcaggaaaattacttaacatctctaggctttaattgcctcatctgttatataggtgccaggtgttaaaatagactctgccttataaaacttgttatgatccatggtagactggataaataaaatgtggtactacatatacaccatggaatactatgcagccatacaaaagaatgagaccatgtcctttgcaggaacacagatggagctgaaggccattatccttagcaaactaacccaagaacagaaatccaaatactgcatgctcacatttgtaagtaggagctaaatgatgaaaacacatggacacatagaggtgaacaacaggcactggggtctatcagagggtaaaggatgggaggagggagaggattaagaaaaataatgggtactaggattaatcctgggtgatgaaataatctgtacaacaaacccccttgactcatgcttacctatgtaacaaacctgcacatgtacctctgaactcaaaagttgaaaaataaactatatccacactagtacacaaatggaggcatgctctgtcatacatcctgctgcatttaatgtataagaaagaaccattggtccttgttgctcacttctgtgaacaaaaagtgcactaaggccatgggagtcatccactttcaggtcaaggtctatcctttcccttgtggtaaataccaggccagagatgaatcagcaccaaaccaaaggccctcatccaaatatgagaatgctgactccttctcatttaaagaaaaaaaaaaaaaagagattcttttattttcaataatcctttattcttgggaaaacccagtttaaatgtgacctaattttttattttatttagcatattacatctatgatcataagtaagataaacccataattttcatttctaatatcttctttatctgagttaggtagcgaagttatactagtttcataaaaaacaggaggtgtccctctctttgattctccaggaaaaactgaagtaaaaataaaattatgtttattgtgcagccataaaaaaagagtaagttcatgtcctttgcggggacatcgatgaagctggaaaccatcatcctcagcaaactaacacaggaacagaaaaccaaacactacatgttctcactcataactggcagttgaaaaatgagaacacatggacatagcgggggaacatcacacacaggggcctgtcagggattagggggaaaggaaaggaagagcattaggactaatatctaatgcatgcagggcttaaaacctagctgatgagttgataggtgcagcaaaccaccagggcacatgtatacctatgtaacaaacctgcacattcagcacatgtatcccagaacttaaagtaaaataaaattaaaaagaaaagaaattatgtgtattgactctttgatttaaattacctctgaatggcatttgtgtgagtaaatttctaatcttgattaaatttatataa

SEQ ID NO: 681644 - DNA, 644 bp, Homo sapiens
attactaaaattagtttgcttttaatagaggttcagataaaataataaatagaatatttgtaggttttcttcttttagggacataattttgcttttgacaattgcctaaaatttcctgtgattatattggttagtttaataggcttagtagataaggcaaggtgggaggagaagttgagtataaactttaccagttttttacttgaaggacttaaacatttttacagaattatatctgtttatccttaaaacttgatcctgtaaaactgaataattaaaaacatgatgaaatttttttctgaagactatacargatctttctttagcatgagtttgttttttatttttttgagaccaagtctctgtctgtcacccaggctggagtgcagtggtgctatctcggcttactgcaacctcagtgcctcccaggttcaagcgattctcctggctcagcctcctgagtaactgggattacaggcacccgccaccacgcctgacccagcatgagtgcttttatgattaagtgaaattccatggagttactccagagaatttgtttagctgtcttagattgttataatttttttagggtgagtaattttgccattaagtattaattgtagcagttctaattatatagaata

SEQ ID NO: 681645 - DNA, 596 bp, Homo sapiens
gtcattaagttgaaatgaggttattagaatgggctctaatacaacattaatggtgtctttataagaagaggaaattagactgtacagacgcccataaggaagaccatatgaagacagggagaaggtagccaaatacaagccaaggaaagagtcctcagaggaaaccaaccttatagacacttggatcttgaacttctagcctctaatgaaataaaacatatttgttttaccacgaaaagataaatttctgctgtttaagccacccagtttgtggtactttgttatggtagccctagtaaatttaatatagacttcaataaatgaaattttgggggcaaaagtccaccaatttgcttttcaggtgttttcaccaattttcactcccaccagcaatgtaaatggctgttcatttcactatgtgtatattcaccatcactttaacatatcacaaatgttactgctggtaatactttcaaacactcagacttcgttctagcactcaggatatagtttattgtaaaataatactaaagggtcaataaaaakgtattagtatttttattataactatctttttgttttttgtttttgagaca

SEQ ID NO: 681646 - DNA, 659 bp, Homo sapiens
aaacaatgtcacctctggaagatactcgagaaccaacacattattctgaatcgtgaagggaaagaataaagcatttatctcgcctttctaaacaatctgtctttcagaacaaccacatactttatgaaggcaagtttctctaagaagtgatacagctagtaatgaagaaataatagaagaatcaatttatgaactcctaattattaatagctctaatcaaggaccattcatggctgttgaaaccagaaggtaaaaagctggacgaagctttatcatggatggataaggctggcaacactcaaacccctgatggctcttagcacaaaaagagagatggtgagacatcacccgcctcctgatggaaggacacaccaccaactatgtagtcttgccaaaaaaaatcaaacctgaataagatcgagcttttaacacttgtaaactccagcgtacaggaaacacwggggacagaggaagatggtaaatgacaccaggggttgcactcagcaaaacccagacaatgggaaactcatcaggacaaaagacctagtttcttacacacacacacacatacacaaaggagccctaaaagtagtctacaagctatgcttaccaaagaaacatagggtcattgtgtttatttatttatttattttgagaca

SEQ ID NO: 681647 - DNA, 815 bp, Homo sapiens
agagcaagactccgtctcaaaaaaaacactctcattctatcaagagccacacccacacgtgactgcctgaaaatgaacacttaaactcctggtgcaaaggtaaagagagaaaccatcaaggtctaaggctctaaaagacgtatatccagccagatcctagggaagaaagagaaagaaagatggcaagccactgtactggaaaaaatattttaaacaaaactttgtataaaagtrtacaaataacttcgtatgctttgtataaaagtgtacaaataacttcgtatgctttgtataaaagtgtacaaataacttcgtatgctttgtataaaagtgtacaaataacttcgtatgctttgtataaaagtgtacaaataactttgtatgctttgtataaaagtatacagagctttatacaaaattttgtatagaaatatatttttttgtataaaaagtagaaacatggagtgacaagaagtaaaaacggccctatcctgtctccgagagatcaacactgcttccattgtagcattaaccaaccaacaatgcatgacgcatgtgtgtttatatttatgtgtgcatgtacatgtttgtttaaatataattattttatttccaaaatgggtagtcatgtaatctagtcattaaaaccaatggcccaccagttaggcttgaggtggactcggggcctctgtcacttgccagacctgtgcccgtgggcaacatacataaccccctggagttcctgtctcaggttccgcctctgtaaacagaaaagagctgtgccttccccagaggtctgtcatgattatcgcatg

SEQ ID NO: 681648 - DNA, 623 bp, Homo sapiens
gtgctcaaagaaaatgtcgacaagaacctgttgatttctctgtctcagstctgctctcttctgtcttggcttcattctcaggaaatgctctaaccttggggttccaagagtagtcaccagcagccccatatttacagcccaccagctcagcaacctctgtgggaaagagcttctcaatagttccaggaaaagtcccagggctggctcccattggcctagatagggttctgtgttatgctgtgaggtgctggttctggggacggaggagtgttctgccttaacaaccgaatggactgtatttgtggggaggtgtgggaaaccaaggagctcttaccaggagaatggatgttgggccagcagaaacaaaatatgttactgccttcttcaagtacacaggtttctgtaaagcctaacatcacactgaggcaccacttgccccaaactccagcctgaaggattatgaggagttcgagcttgcctttgcagggcgcctgcttcctgttaggactgtgctcattgtacatggaccttcttctgaacctctgagattggttctgttatctttattcccattttacagatagccaaccacaaacttactgggtggagtaacagtgttgccc

SEQ ID NO: 681649 - DNA, 623 bp, Homo sapiens
gtgctcaaagaaaatgtcgacaagaacctgttgatttctctgtctcagctctgctctcttctgtcttggcttcattctcaggaaatgctctaaccttggggttccaagagtagtcaccagcagccccatatttacagsccaccagctcagcaacctctgtgggaaagagcttctcaatagttccaggaaaagtcccagggctggctcccattggcctagatagggttctgtgttatgctgtgaggtgctggttctggggacggaggagtgttctgccttaacaaccgaatggactgtatttgtggggaggtgtgggaaaccaaggagctcttaccaggagaatggatgttgggccagcagaaacaaaatatgttactgccttcttcaagtacacaggtttctgtaaagcctaacatcacactgaggcaccacttgccccaaactccagcctgaaggattatgaggagttcgagcttgcctttgcagggcgcctgcttcctgttaggactgtgctcattgtacatggaccttcttctgaacctctgagattggttctgttatctttattcccattttacagatagccaaccacaaacttactgggtggagtaacagtgttgccc

SEQ ID NO: 681650 - DNA, 1405 bp, Homo sapiens
atgtaaaagcacatggcagaaaacacactgaacatctagacctaatatgaacctcaaaagcagtaataaggtttattttcatgccttatgtggtgagtaggaagtcacaggctgtcctaatcagataaatgatttggttgaagtcgagtcaacctcatctttgtcctggaattcttgtaccttttggggcaacagggcttcaatgttttgactcagagcagaacgagaattgtcaggaggaaaccccatggctggattcaccactgtccaagggaagtggcctgagggctcagctgggtggtcatgaaggcaagggtgatggattggtataggcactccttcctgttgctgaacactgctctccttgcactacctcctggtaggaacacctgtctcgatcgttatcttggcagccacctcataagcatatatgctacatctataaagacaaagtactgctctcaaatatgtcctggagaatacaaattcagaagcttatcaccacctgtgtgacttccatagcaatgactagtgttaaagcaaagaactaagtcttttgaatataaacacaaaccaaactggggattaactgagtggtgtcgtgattagtaacagcagccctcatgttggcatcaccagttggaattacctgattccagggaaccctggttcccgtgggcttccaaaccaaagggacagatcggagttctaacctcattgctcagtctgggttcctccagccgctcaaattttggatgctttcagagccacctcttaaggatgactttgggggccatgaacagacaactaactatgcccaggaaaatcatgagttcgtctgggtcaatagaataaatggcacacagaatgtgagaagactagaacagaacaaggtaactgcatctgagcaattgtgagataacttggtacatagtaaaacaattgggaagggtggggggtaacttctggaagggaggatccatatgcctcagataacacgtcagcatggaatttataaagcaaacggccaaaagccacattgtggcaattcaggattggtgtagactcctggcatgggtggtcatctctattctgaatggagtagccttgggtgtgtccatagggatctacaagctgacttccacatctgaacttactccagtacttaagttgtagttttaacccaaaacttctatactgctggcttgtgttgtgatgcagatgccaaggtgtggggttagatgctcaagaactttggggtggggaaagttctgtgagggaaactgagggagctggragagtctgggaagaggactatgatgcaggcctgactctgaaggaaagatgttaggtaggaagtgggctgagactgaggtgtgtgacattgttttggcaaggataaata

SEQ ID NO: 681651 - DNA, 1015 bp, Homo sapiens
gagctgtccttaccactaccccttccaggcatcctttgccatgtgcctgtccttggaatgtgacacctcttgatttgcaggtttgagcgggggcttcatcccaagaaggccattttttcaaagtagccttgttacatcatttgacctaaggcccaactgaaggtcttagatacttatgtgggaattgttaggagattggaatgaaacctcagaaatggcctgtatttatttttttacctcttcaagtcataaaacacactgcactgacaatatacagcctttggctgcagtggtcctgtgttgctttgtgtcactttaaactcctgtgtgtgtatgcaagatgtttctttcagcgaatctcttctagaaagggaaagaagttcttgagaatggggttatcctaaagatgcttctgcccttggcctccatttcatgttacaacagcagatagactagcatgtttaactggacaagtgaatttcatgttkctgtagctgtcaaaatggaggggtcttccaggaagcagatcctcaggcggaggtaaacctcaggaaactcaccagggagcggtctggggttccacacctgtgaaaggaagcaggaccagggagaggaaggagctgagctgtgatgcagcttccacagaagctctggccaatcctgtggggagttgtgatacctagatgaccttttagagctgagttgggatgagaggtcttgggttttattcccagattgacaagcactggaaggcagctacctgggaggggatgtggccttaggtgagattctcttcagctgagctaaagcttaggaggggccgacagctaatagactcctggggcatccagtggttgcagaacaaatccttccttcctgaaaggggaaatagtggctgcatcctttcacctactatgtcaaagaatcacagcataaaaatgaacacatgaacgtttagacctagtatggatcaaactgtcaggatatttccttatggtgtcctgaaggggtgaac

SEQ ID NO: 681652 - DNA, 1015 bp, Homo sapiens
gagctgtccttaccactaccccttccaggcatcctttgccatgtgcctgtccttggaatgtgacacctcttgatttgcaggtttgagcgggggcttcatcccaagaaggccattttttcaaagtagccttgttacatcatttgacctaaggcccaactgaaggtcttagatacttatgtgggaattgttaggagattggaatgaaacctcagaaatggcctgtatttatttttttacctcttcaagtcataaaacacactgcactgacaatatacagcctttggctgcagtggtcctgtgttgctttgtgtcactttaaactcctgtgtgtgtatgcaagatgtttctttcagcgaatctcttctagaaagggaaagaagttcttgagaatggggttatcctaaagatgcttctgcccttggcctccatttcatgttacaacagcagatagactagcatgtttaactggacaagtgaatttcatgtttctgtagctgtcaaaatggaggggtcttccaggaagcagatcctcaggcggaggtaaacctcaggaaactcaccagggagcggtctkgggttccacacctgtgaaaggaagcaggaccagggagaggaaggagctgagctgtgatgcagcttccacagaagctctggccaatcctgtggggagttgtgatacctagatgaccttttagagctgagttgggatgagaggtcttgggttttattcccagattgacaagcactggaaggcagctacctgggaggggatgtggccttaggtgagattctcttcagctgagctaaagcttaggaggggccgacagctaatagactcctggggcatccagtggttgcagaacaaatccttccttcctgaaaggggaaatagtggctgcatcctttcacctactatgtcaaagaatcacagcataaaaatgaacacatgaacgtttagacctagtatggatcaaactgtcaggatatttccttatggtgtcctgaaggggtgaac

SEQ ID NO: 681653 - DNA, 1156 bp, Homo sapiens
aagaagtgtgtgtaaacacagttgggcttgggtgtacacaagtcctgccttctagccccctgtctgagtgtgccaatwtgtatccaaagtcaattctattccacaagattcctagaggacgggaaagtctgagtggtggggcctggcccatccactatggcagtcacctggatgttgcaggggagcggccactgagccacacgtgacgttcctggtttgggaatagtatatcattggtgttacttctgtggcacagctctacattctacaagcttaagacccatctacatcttttcaggtctcacagaagatgcagtaggactgatcattttgtaaatcactttcctctgaggactgtactggcctggagatgaatattcaactcttcatttcccactaccagtagagtggttgagtgtggatcctccctggcatcacactgcatgtataaagccagttcttgcactctaggcttttgaacccatagtggatggtgctttctaattttagaaggtagaaccaactctggattaggtgtgttgggttggataaataagccatgtggaaagtgctcttggtgaggagccacacactaggcaagaagccatgctagaggtaagatcactggaatctagtgccataacaagtgggagagttagggtgtagttacagaaatgagaggaatccataaccatgacaggtcagggttgccagcatagggcagaacatgtcacttgggagttgaggaagactgctatattctggcattccaggcacagagaggatttgcattcaaggacctatttagaaacaggttgaagtggaatttgacatggagtaggtatgtagaaatcaaatcctatctaaggatgagaaaggaagcaggattgggtggcaggaacacttaactacagtgtggacccagaaattccttggccagtatggtcaagtgtgtggcccatcacagttgtttaatggtggcctgggatcactggccttcactgacctgctgtactcaatgattggatgagggatgctaggggaagggcaggcccttggagctgaggcaaaccctgtaggaggtggtggctggaggctgctggctgtgctcccagcacctgaggcaataagtccttattgaagagagatctggaaa

SEQ ID NO: 681654 - DNA, 1156 bp, Homo sapiens
aagaagtgtgtgtaaacacagttgggcttgggtgtacacaagtcctgccttctagccccctgtctgagtgtgccaatatgtatccaaagtcaattctattccacaagattcctagaggacgggaaagtctgagtggtggggcctggcccatccactayggcagtcacctggatgttgcaggggagcggccactgagccacacgtgacgttcctggtttgggaatagtatatcattggtgttacttctgtggcacagctctacattctacaagcttaagacccatctacatcttttcaggtctcacagaagatgcagtaggactgatcattttgtaaatcactttcctctgaggactgtactggcctggagatgaatattcaactcttcatttcccactaccagtagagtggttgagtgtggatcctccctggcatcacactgcatgtataaagccagttcttgcactctaggcttttgaacccatagtggatggtgctttctaattttagaaggtagaaccaactctggattaggtgtgttgggttggataaataagccatgtggaaagtgctcttggtgaggagccacacactaggcaagaagccatgctagaggtaagatcactggaatctagtgccataacaagtgggagagttagggtgtagttacagaaatgagaggaatccataaccatgacaggtcagggttgccagcatagggcagaacatgtcacttgggagttgaggaagactgctatattctggcattccaggcacagagaggatttgcattcaaggacctatttagaaacaggttgaagtggaatttgacatggagtaggtatgtagaaatcaaatcctatctaaggatgagaaaggaagcaggattgggtggcaggaacacttaactacagtgtggacccagaaattccttggccagtatggtcaagtgtgtggcccatcacagttgtttaatggtggcctgggatcactggccttcactgacctgctgtactcaatgattggatgagggatgctaggggaagggcaggcccttggagctgaggcaaaccctgtaggaggtggtggctggaggctgctggctgtgctcccagcacctgaggcaataagtccttattgaagagagatctggaaa

SEQ ID NO: 681655 - DNA, 1156 bp, Homo sapiens
aagaagtgtgtgtaaacacagttgggcttgggtgtacacaagtcctgccttctagccccctgtctgagtgtgccaatatgtatccaaagtcaattctattccacaagattcctagaggacgggaaagtctgagtggtggggcctggcccatccactatggcagtcacctggatgttgcaggggagcggccactgagccacacgtgacgttcctggtttgggaatagtatatcattggtgttacttctgtggcacagctctacattctacaagcttaagacmcatctacatcttttcaggtctcacagaagatgcagtaggactgatcattttgtaaatcactttcctctgaggactgtactggcctggagatgaatattcaactcttcatttcccactaccagtagagtggttgagtgtggatcctccctggcatcacactgcatgtataaagccagttcttgcactctaggcttttgaacccatagtggatggtgctttctaattttagaaggtagaaccaactctggattaggtgtgttgggttggataaataagccatgtggaaagtgctcttggtgaggagccacacactaggcaagaagccatgctagaggtaagatcactggaatctagtgccataacaagtgggagagttagggtgtagttacagaaatgagaggaatccataaccatgacaggtcagggttgccagcatagggcagaacatgtcacttgggagttgaggaagactgctatattctggcattccaggcacagagaggatttgcattcaaggacctatttagaaacaggttgaagtggaatttgacatggagtaggtatgtagaaatcaaatcctatctaaggatgagaaaggaagcaggattgggtggcaggaacacttaactacagtgtggacccagaaattccttggccagtatggtcaagtgtgtggcccatcacagttgtttaatggtggcctgggatcactggccttcactgacctgctgtactcaatgattggatgagggatgctaggggaagggcaggcccttggagctgaggcaaaccctgtaggaggtggtggctggaggctgctggctgtgctcccagcacctgaggcaataagtccttattgaagagagatctggaaa

SEQ ID NO: 681656 - DNA, 655 bp, Homo sapiens
tgaagggaggcagcagggatcaatatatcagtgaagggctagagcacctattgctcgcataacaacaattaaagraaaaaacttaaaagtgggaaggaagggagaatggagaaggtagaaatttaagtcgtttaaagaatcttccagacttttcacaatggttcttcaataagtctgccattttaagaaagaacagaaggagatatagttaggaaaaaggcagccagtgttgtaaggtgtggaatgaggatgctgggcagacgctccagagctgtacgagagacagagagagagagagagagagagagagagagagagagagagagagagagagtgtgtgtgtgtgtgtgtgtgtgtgtgtgtgtgtgtgtgcgcgcgcgcgcgcgcatgcgtgtaagtggaaagttgaacctccttcctgtgtgctccaagagtctgcacaaagagcaaatcacctgtcttacagggccctgggccttcctgacccttctttctcccccggggttggaagcccacagacccaaagggctgagtcatagtgtgcggaggtgcctggcccctggcagaaggcaacagggctggcaaagagcccaggctttcacaacggtcgggtgcccgtgtgctccaagtcggggaagtcactagcccaggaatt

SEQ ID NO: 681657 - DNA, 655 bp, Homo sapiens
tgaagggaggcagcagggatcaatatatcagtgaagggctagagcacctattgctcgcataacaacaattaaagaaaaaaacttaaaagtgggaaggaagggagaatggagaaggtagaaatttaagtcgtttaaagaatcttccagacttttcacaatggttcttcaataagtctgccattttaagaaagaacagaaggagatatagttaggaaaaaggcagccagtgttgtaaggtgtggaatgaggatgctgggcagacgctccagagctgtacgagagacagagagagagagagagagagagagagagagagagagagagagagagagagwgtgtgtgtgtgtgtgtgtgtgtgtgtgtgtgtgtgtgcgcgcgcgcgcgcgcatgcgtgtaagtggaaagttgaacctccttcctgtgtgctccaagagtctgcacaaagagcaaatcacctgtcttacagggccctgggccttcctgacccttctttctcccccggggttggaagcccacagacccaaagggctgagtcatagtgtgcggaggtgcctggcccctggcagaaggcaacagggctggcaaagagcccaggctttcacaacggtcgggtgcccgtgtgctccaagtcggggaagtcactagcccaggaatt

SEQ ID NO: 681658 - DNA, 1002 bp, Homo sapiens
aaaatgagtaggatagtaccagttaaagggagacaacctctgttccaagcacagggaacagcagagatgaaacctggaagtgagggagaatggcagactgcaagaacggaaaaatgtccagtgtagcggaggcagagagaatatggagagtgtggcaaaagaggaagaagcagatggattttgagggcactttctgaagtgctaaggaatttagactttaacctgagggcaatcagaagcagcctggtggagaacgatatatttcaaaacatagggtccttgaaaacaagtcaaccaaatgtatttaaaaggctgctgatgaaaagattgggaagtattgttttcattctcattgttttcactgtcatgctctttgtgccaatggttagacctcctttgaaagctcactgcagcatgaaagcccttcttaatgccagggcaggctccccaagcctccccaccccactgtccatgtcatcagttttgtactcctgttttgtatggctcaggctttccttatactcttaggaatgaaaagccacagacaccaccactgagagactgtcaaagatccttgttaaayaggtggacaactgagatcagagaaggaaagtaattttattactttccgtagcaatccaggggtagcatctcaggtctctggctccttcttgtctcccctaaagaaatagaccaccagggctgggattaaggtgagacaagtgagacatagagggtgcaaaatgtagagagatgcccgctgccaggtgccagcctgcacttgtgtgaccctaggtgccttcccttccctcaccctgctggtatctgctggaaacacctttgagagcaggactttggcttttagacaactctttagcatctctcatggtgttaacatgttgctaggtgcctattttgagggtcactagatgcctactgatactaatgaacaatggatttctgacaaactgatgtgcacacagatgtttatattttagggta

SEQ ID NO: 681659 - DNA, 1002 bp, Homo sapiens
aaaatgagtaggatagtaccagttaaagggagacaacctctgttccaagcacagggaacagcagagatgaaacctggaagtgagggagaatggcagactgcaagaacggaaaaatgtccagtgtagcggaggcagagagaatatggagagtgtggcaaaagaggaagaagcagatggattttgagggcactttctgaagtgctaaggaatttagactttaacctgagggcaatcagaagcagcctggtggagaacgatatatttcaaaacatagggtccttgaaaacaagtcaaccaaatgtatttaaaaggctgctgatgaaaagattgggaagtattgttttcattctcattgttttcactgtcatgctctttgtgccaatggttagacctcctttgaaagctcactgcagcatgaaagcccttcttaatgccagggcaggctccccaagcctccccaccccactgtccatgtcatcagttttgtactcctgttttgtatggctcaggctttccttatactcttaggaatgaaaagccacagacaccaccactgagagactgtcaaagatccttgttaaataggtggacaactgagatcagagaaggaaagtaattttattactttccgtagcaatccaggggtagcatctcaggtctctggctccttcttgtctcccctaaagaaatagaccaccagggctgggattaaggtgagacaagtgagacatagagggtgcaaaatgtagagagatgcccgctgccaggtgccagcctgcacttrtgtgaccctaggtgccttcccttccctcaccctgctggtatctgctggaaacacctttgagagcaggactttggcttttagacaactctttagcatctctcatggtgttaacatgttgctaggtgcctattttgagggtcactagatgcctactgatactaatgaacaatggatttctgacaaactgatgtgcacacagatgtttatattttagggta

SEQ ID NO: 681660 - DNA, 1341 bp, Homo sapiens
gtggtgtgttaaaagaaccccgaatgtcaatcagaaggtctgcgtgcagatcttagctctgctgtgtatacatcaagatgagagacttacgcaaaatactcaacctctccaagcttcagtctcctcatctataatagaggaataagagctgtcaagtgttgagagatgaaaggaagatgtatgagaaagttcctggcctatagtaaaattagattgcttgttttgcttctttcaaagactggaaccgcaaaccgatttgaaagtcatactctgggcagcaatgatgatgttatgttatcagtggaagagttgcctctttcatagtcttggccatctgcaaacacgaatgaacgtctttgagttaaggaggaaggtttcaatggcagtatgatttctctggctaatgttgcctatcctcttgctacatacactgttgagaggggcctaaagtgggtgggctttgttcagcaaaactgtctcccacatgctccttgcaggaccttggcatcttgcaataattgcccttgagcaccaaaaccctaggctgtatcactggctttcgtaccaaagaaaccactggaataaggaaaagcacaacagcaataaggctagcaaggatttttgagctcttactgtgattcatgtctttaaacacatcattttgtgtcatctttatcacagctttctgcagtgggtaccagagtcacctcagttttgcagacaggtttaccgaggctccgtgatgaatccatggattgtagatccatggtttggacctataatatctctggttctgtatcctgtatcaatattgccatcagtgtggctaatcttttgagcagtcaccatgtgctgacccctttacctgctctatttcactgcaggctggtggagtgggttagcaccaacagatcaggtacatgcaaaaatccttacaagcctgcatctcagctgggccagcaggggctgtaactgaaacatgcatcagaatcacctgactgcttattaacctgcagatttctaggtcccacccccagaggttctgattcagtaggtctaggcagcggccagagaatttgtatctctagcaagttcccaggtgctgctgctgatctggcaaccacactttgaaactattcaacyaaggggaaagtaaaggcaaaatattttaagacagaatggattgcagtttggtcctccaagctgtcaggtgaattagggaggacttccagagaggcagtgaatccctgaactatcttacccttcgtcaccctctaattccagggcaagaaccagctctccacagcacgcagctagggcaaattatttgtctttcaaaaa

SEQ ID NO: 681661 - DNA, 1341 bp, Homo sapiens
gtggtgtgttaaaagaaccccgaatgtcaatcagaaggtctgcgtgcagatcttagctctgctgtgtatacatcaagatgagagacttacgcaaaatactcaacctctccaagcttcagtctcctcatctataatagaggaataagagctgtcaagtgttgagagatgaaaggaagatgtatgagaaagttcctggcctatagtaaaattagattgcttgttttgcttctttcaaagactggaaccgcaaaccgatttgaaagtcatactctgggcagcaatgatgatgttatgttatcagtggaagagttgcctctttcatagtcttggccatctgcaaacacgaatgaacgtctttgagttaaggaggaaggtttcaatggcagtatgatttctctggctaatgttgcctatcctcttgctacatacactgttgagaggggcctaaagtgggtgggctttgttcagcaaaactgtctcccacatgctccttgcaggaccttggcatcttgcaataattgcccttgagcaccaaaaccctaggctgtatcactggctttcgtaccaaagaaaccactggaataaggaaaagcacaacagcaataaggctagcaaggatttttgagctcttactgtgattcatgtctttaaacacatcattttgtgtcatctttatcacagctttctgcagtgggtaccagagtcacctcagttttgcagacaggtttaccgaggctccgtgatgaatccatggattgtagatccatggtttggacctataatatctctggttctgtatcctgtatcaatattgccatcagtgtggctaatcttttgagcagtcaccatgtgctgacccctttacctgctctatttcactgcaggctggtggagtgggttagcaccaacagatcaggtacatgcaaaaatccttacaagcctgcatctcagctgggccagcaggggctgtaactgaaacatgcatcagaatcacctgactgcttattaacctgcagatttctaggtcccacccccagaggttctgattcagtaggtctaggcagcggccagagaatttgtatctctagcaagttcccaggtgctgctgctgatctggcaaccacactttgaaactattcaactaaggggaaagtaaaggcaaaatattttaagacagaatggattgcagtttggtcctccaagctgtcaggtgaattagggaggacttccagagaggcagtgaatccctgaactatcttacccttcgtcaccctctaattccagggcaagaaccagctctccacagcacscagctagggcaaattatttgtctttcaaaaa

SEQ ID NO: 681662 - DNA, 1944 bp, Homo sapiens
ttatcctgcacgagactctcacaccagtgctttgggtgtaagaacaccccaaggattgtgttcccttttctcgaagagtctgtggtctaaggggattcaatggggtccactttccaaaccaagacagcaaaggaacactaggagagaagtattctgtgcagagattcagttatatgatagctaagaggtggaccttccatttaatactttgccttgggcaagtcactctcctcagtttcctcacctgctaagtgggcataacaatagtactgacttcactgggctgttgcgaggactgaatgagatgacatggaaggtatctggctcacagtcagtgctcaataaatggtgattactaaagaaaacccatgaggaaaggctaaagggtctggaattcaatgggacagctaattttgcttgctttttttgtttgtttgtctcaaaattttgcttttaaattgaacattttgcacagttattaaatgtgtgcactggtcttgtttatacctgtgatctagttgaatcctcaaagcaacttcttggagcaggcattgttaatttcttctcatcttgcrcatgagaaaactaaggaccagtgataggaagttctccaaaatcacacagcaagaaaggatgtgagccagcgtcctgggctgcttgtctccaccctgggctccctcttgttacatgatggatgggatttggttgatatttggttgtagattgggcaggaaaactaaggttcaaatggggcagtgaatggctcaaatgtgataggaaagccctgatgggaagggtcgttaaaccttggaatgggcgactccaacagaagcagaagccctagccaggacgacttccccatcatcttcctggatgagtcacaattcactgtggtcctacctacatgcagcaggcatgtggatgaaaaagatgaccagccaccatctttactttccccaagttccccaaatgttgtcccccttcattattattcagccaatgatgacaaagctactggtgttgccattgctccccacacccctcctcccactcccgcaaaggaactctatcctgctccatctatgcaccattttatgctgaatcactcggtgatggagtgatctggtgtctgtttacacagaggaagccccaccctgaagacctggtcaatccaagtcaaacacattctatccttagcacgtgccctgtcatgtggcatcccttgcccactcaggcataggatctaccagggcgcttcttcccatcgagctgagaggccactggattagtttcttagatctgccttaacaaactgtcataaactgggtggcttgaaacacagaagtttattctgtcatagttctgaaggccaatgtgtcaacagagccaagctccctcctgaggctccacggggagttgttcctggcctcttccagcttctggtggctcacagcattctggctcatggctgataactcccatctctgttcctgtcatcacgtggccttctccccttctctgtgtccgtgtctcatcttctctgtttcctaaaagcacgtttgtcattgattttagggtccacctgggtaacccagataagcacatcccaagatctttaccttagttagatctgcaaatgcgagtgttcacattttccaattcttaaactaaaataaggtcccattcacaggcttccagggttagggcatggacatatgtctgggggccacctccagcccactgcaaccacagaatctttctcagcacagttctcaaattagttgatgcacacacacaaaaagatgatggcccatgaaatgcaggccttttatttatttatttatttttgctctctgaactttttattggcctcctgctccccagagtggaccctgcttctcctggcttaatgtctcagaactttggagtcattggtctcagaca

SEQ ID NO: 681663 - DNA, 1944 bp, Homo sapiens
ttatcctgcacgagactctcacaccagtgctttgggtgtaagaacaccccaaggattgtgttcccttttctcgaagagtctgtggtctaaggggattcaatggggtccactttccaaaccaagacagcaaaggaacactaggagagaagtattctgtgcagagattcagttatatgatagctaagaggtggaccttccatttaatactttgccttgggcaagtcactctcctcagtttcctcacctgctaagtgggcataacaatagtactgacttcactgggctgttgcgaggactgaatgagatgacatggaaggtatctggctcacagtcagtgctcaataaatggtgattactaaagaaaacccatgaggaaaggctaaagggtctggaattcaatgggacagctaattttgcttgctttttttgtttgtttgtctcaaaattttgcttttaaattgaacattttgcacagttattaaatgtgtgcactggtcttgtttatacctgtgatctagttgaatcctcaaagcaacttcttggagcaggcattgttaatttcttctcatcttgcgsatgagaaaactaaggaccagtgataggaagttctccaaaatcacacagcaagaaaggatgtgagccagcgtcctgggctgcttgtctccaccctgggctccctcttgttacatgatggatgggatttggttgatatttggttgtagattgggcaggaaaactaaggttcaaatggggcagtgaatggctcaaatgtgataggaaagccctgatgggaagggtcgttaaaccttggaatgggcgactccaacagaagcagaagccctagccaggacgacttccccatcatcttcctggatgagtcacaattcactgtggtcctacctacatgcagcaggcatgtggatgaaaaagatgaccagccaccatctttactttccccaagttccccaaatgttgtcccccttcattattattcagccaatgatgacaaagctactggtgttgccattgctccccacacccctcctcccactcccgcaaaggaactctatcctgctccatctatgcaccattttatgctgaatcactcggtgatggagtgatctggtgtctgtttacacagaggaagccccaccctgaagacctggtcaatccaagtcaaacacattctatccttagcacgtgccctgtcatgtggcatcccttgcccactcaggcataggatctaccagggcgcttcttcccatcgagctgagaggccactggattagtttcttagatctgccttaacaaactgtcataaactgggtggcttgaaacacagaagtttattctgtcatagttctgaaggccaatgtgtcaacagagccaagctccctcctgaggctccacggggagttgttcctggcctcttccagcttctggtggctcacagcattctggctcatggctgataactcccatctctgttcctgtcatcacgtggccttctccccttctctgtgtccgtgtctcatcttctctgtttcctaaaagcacgtttgtcattgattttagggtccacctgggtaacccagataagcacatcccaagatctttaccttagttagatctgcaaatgcgagtgttcacattttccaattcttaaactaaaataaggtcccattcacaggcttccagggttagggcatggacatatgtctgggggccacctccagcccactgcaaccacagaatctttctcagcacagttctcaaattagttgatgcacacacacaaaaagatgatggcccatgaaatgcaggccttttatttatttatttatttttgctctctgaactttttattggcctcctgctccccagagtggaccctgcttctcctggcttaatgtctcagaactttggagtcattggtctcagaca

SEQ ID NO: 681664 - DNA, 642 bp, Homo sapiens
ataataatctgctatctcgttttttctgtttccccttcctcctctccacagctctattattgacacattttagtacctagtggctttccatgttgtgccatggccattaagcaactttcttagggataccttgcacttggcatcacttcataccacaaatactcttctctcttcattaagcagatttgctgggcaatagggtctcagttagcaattaataaaaacacttcaagctccgtctccttaagatctgcgtgacaaataactctaatggcacatgcatttaaaaactggacaggtgaccgggtactgtggctcacgcctgtaatcccagcactttgggaggccaaggtgggcagatcacgaggtcaggagatcaagaccatcctggctaacacggtgaaaccccgtctctactaaaaatacaaaaacattagccaggtatgctggcacgtgtctgtaatccctgctactcaggaggctgaggcaggagaatcacttgaacstgggatgtggaggttgcagtgagccaagatcgcgccactgcactccagcctgggtgacagagtgagactctgtctcaaaacaaacaaacaaacaaaaactggacaggtaaatgtgaaagactgaatgagtgatagt

SEQ ID NO: 681665 - DNA, 1129 bp, Homo sapiens
ccagggctgtgggttaggggagctgggtttctgtccagaatcttgtcatctgtagggcagctgaggggcattattacccagaggtccctggaaacctgtgctaaattggtttggatcagtgtccgtgaaaatgttggacaaaggagagtcgattttagctgacacctggacacgactttaaataacactgtatcacggagcaacacaatgtcctcccaactctttttcggtctttccgattatgttagggacaaagtctcagtttggtgctgttgtggtcgaactatcttctcatctctgttttttaaagwcaggcagatcaagccttactcctagggctttagaaggtaatagtttctgatttggatttaatcacattgttttatttcctttttaacatttttatgacaacttttgctttatagcagttttaaaggtaggaaaaaattttcgtttgaaaacaagttggtttgagatgtttttcactcttacataaaagacccaccttcacagcgtatgagcttctaaagttggggaagcagtggcttaggtgggcaggcaggaaattcaagcaggttggtttctgccaaagtcagagatgattgccacttactggaaggctgtgttggaacagagtgggcacaggcattgggagcagagctgatttccaatcttcctgctgccctcgctgcctgtgtgtgccgtggccttcttgagctttagttttctcacctgtggaacaggtttcatgagcagttggaaggaagcaaatgagcttcattttctacaacagggtgggtggtgtagttgatattcaccccaaaggtgcaggatccccacttctgtttattgccagcgctccgagtttgcttctgcatggaaggggaagatggactagagctgatacctcctgcaccctggtgaagaaatgcaccctgaggccagaaaatagtacaaacccatctggctgcaacagtccagcagcatgaagatcaaagtcacgtgtgagttttgtgcacgggcagcctttcctcttctcaggctgcaaatctttggcaatcggaggcaggctctgaattaagcttaattaaaattcactcttaattagggccattacttaaaatcaatt

SEQ ID NO: 681666 - DNA, 627 bp, Homo sapiens
caagatcctttagattcctggtccccatgtgagcttatttgttctgacctgtgtctggtctaaacttgtggttaaaagtctattcagtcatttgacaaacacttatctgtacctgctgtgtgccagaccctgtgctgagcactttacatgtatgatttcatttcatcctctccacagtcctgtgaaatggatattatccataatttagagaggaggaaaataaagctcaaaaggttagttagttgtctctcagagtcatgtggccagtaggtggatgggccacattcagcctcagggatrtctgactcccaagtccatgctcttgcccatcttattcctcgcgctgcctccccagtgagtgggacagctcctgagcatggagctaaacactggtgagggagacagaatagcaagtggcctggtgagtgccaagacatggagggtgtacaggatacaatgagagcacagacggaaactgggaacctgcccagcccgtggtgggggtaagggggatcacagaaggcttcctgaaagaggtgatgcctgagcagagtcttagaggaggattaggaatgaatcatacttcgaagtgagagaagagtgttccaggcagatggtccagcacat

SEQ ID NO: 681667 - DNA, 654 bp, Homo sapiens
gaaagttttaagtaacttgcttagggttacccgcaagttaagacgcgaagtgtgatgggaactagaatctacctagaaaccatggtgctgcaaccatttttcctgtcctgcttctcaaaaatatagcacacacaaagcatttgggacacaggaaactctgggaatcaaactgcctgagttcttaccccgcctccactactcactggctgcatgaacttggacaagttatttaatttctkgtttaatcatctataaaaacaagcacaataacacccacctaatcggttactgaaaggattaaatgagataacgaatgaaaagcaattagggtagaatctgacacacggctggggcagtgctgtccagcagaaatataacgcgagtcatgtacgtgattttaaatgttctaggagccatcatgatttaaaaagtaaacaaagatgaaaaattaatttacatatttaaacaaatacactcaaaacatcatttcaacatgtaatcattataaaaattattaatgagatattactccttatgcgctatctctgaaacccaatatgtatctcccatctgcaccatttcttagttcgggctagaggctaccgtaccgcacagcgcagatccagtggcggttataattttgaggacccggca

SEQ ID NO: 681668 - DNA, 622 bp, Homo sapiens
tctttagagaggtgcattcaagctgagtcctagagagtaagaagacaaaggtgggaagggagtagataggataacaggggtgtgaagagctttttctaggctatctataggattgactgtttgttggagacagagaaagcagcctaaaccacccaatagggactggcctgttggttttctctctttacgcaatgctgacagattggtagtggcttcccagattgttgtgttgaaaagaattttgagatccttaatggcttactagaaaagtggtccataaaaattggtcatgtatgccatgggagtggagggttccaggggcatatttactcttctggctctatttgtccattggccagaagtccaakaagtgagctgggaagacaatggggatgatgtccaagccctctgctatccaccttcatcctttaacagcagaagggtcaacaactcattcagaaaacaattagccatgagcctcaggtttgaatatacctgaccccatcttactattctgtgtcactattccatagctctcctatgcgtcactcacagcagatagacaaatccctagagaagagagagatgaggaatgagacctgctttcccatttttagaatct

SEQ ID NO: 681669 - DNA, 648 bp, Homo sapiens
tattcagttgacaaatacttatcgagggtctgctctgtgccaggcattctttcaagccttgggatacagctgtgaacaagacagacaaaaatccctgccctcttgggaagagtcagacagtggcccaagyaggaactaaatcataggtcagatgggctaagtgctatggaggaaaaacaggtcaggcaagggggaaaggcacactgtgggtggatggcaatttccaatagggtgatcagggaaggtgtccttgaaaaggagacgtgtgagttaagttctgaagctagtgaggcagtgagtcttgtgggtgggggtgggtgggggaggactctaggcagagggaacaacagctcaaaggcccttagtcctttccactgaaaaaataatcatcaaagaagggaccaggtgaggtggcacatgcctacaatcccagcactgggaggccgaggcaggaggattgcttgaggccaggagttcaagactgtcgctaaaaagcataaattagccaggcatggcggtgtgtgcctatggtcccagctacaggctgaggtgggaggatcgcttgagctcaggagttcaaggctgcagtgagctgtgattatgccactgcactccagtctgggcaatagagtgagaccctgtttctgt

SEQ ID NO: 681670 - DNA, 648 bp, Homo sapiens
tattcagttgacaaatacttatcgagggtctgctctgtgccaggcattctttcaagccttgggatacagctgtgaacaagacagacaaaaatccctgccctcttgggaagagtcagacagtggcccaagcaggaactaaatcataggtcagatgggctaagtgctatggaggaaaaacaggtcaggcaagggggaaaggcacactgtgggtggatggcaatttccaatagggtgatcagggaaggtgtccttgaraaggagacgtgtgagttaagttctgaagctagtgaggcagtgagtcttgtgggtgggggtgggtgggggaggactctaggcagagggaacaacagctcaaaggcccttagtcctttccactgaaaaaataatcatcaaagaagggaccaggtgaggtggcacatgcctacaatcccagcactgggaggccgaggcaggaggattgcttgaggccaggagttcaagactgtcgctaaaaagcataaattagccaggcatggcggtgtgtgcctatggtcccagctacaggctgaggtgggaggatcgcttgagctcaggagttcaaggctgcagtgagctgtgattatgccactgcactccagtctgggcaatagagtgagaccctgtttctgt

SEQ ID NO: 681671 - DNA, 648 bp, Homo sapiens
tattcagttgacaaatacttatcgagggtctgctctgtgccaggcattctttcaagccttgggatacagctgtgaacaagacagacaaaaatccctgccctcttgggaagagtcagacagtggcccaagcaggaactaaatcataggtcagatgggctaagtgctatggaggaaaaacaggtcaggcaagggggaaaggcacactgtgggtggatggcaatttccaatagggtgatcagggaaggtgtccttgaaaaggagacgtgtgagttaagttctgaagctagtgaggcagtgagtcttgtgggtgggggtgggtgggggaggactctaggcagagggaacaacagctcaaaggcccttagtcctttccactgaaaaaataatcatcaaagaagggaccaggtgaggtggcacatgcctacaatcccagcactgggaggccgaggcaggaggattgcttgaggccaggagttcaagactgtcgctaaaaagcataaattagccaggcatggcrgtgtgtgcctatggtcccagctacaggctgaggtgggaggatcgcttgagctcaggagttcaaggctgcagtgagctgtgattatgccactgcactccagtctgggcaatagagtgagaccctgtttctgt

SEQ ID NO: 681672 - DNA, 654 bp, Homo sapiens
gggattatctttctgtgtgtttgtgtgggttctgctttctgtcctctcccctgaatggtggcattccctaaccagtgcttytcaaagtgtggtccctggaccagcaacactggcatcactggaagctgggtagacatgcaacttgtgaggctccaccccgggcctcctggatcagaaattgtggataggggccagcatctgtgttttcacagtctttcaggtgattctgatgcacgctcaagtttgccctaaacttcagttctctttgctccctaagcattctgtagtgcagagcttacccatcctttcttaagttcatttttctctccagaatgatgactcttccccagtctgcctccagccctggctgtgtccctcacctgactcccagtctcaacaggacagttcctcttccatgtctgcctctcagcaccagcacactgccctcatcaaaaccgaactcctcaagattcaggcctgattcaggcatgtttcacccagcctccagtcttcccatctccctcctctctgtaggctgtggtggagggctagtggatcacgctgccctctctacagcccttccctgatatctgccaggaactcttatttaaaaggaagtgaatacagggaggcaatgtagaactgcgaaggaga

SEQ ID NO: 681673 - DNA, 1716 bp, Homo sapiens
gatttgtcatatgccatgttttggtttgggaggctttttggaatcctggacctaccatccttcataagttttaagtgtcacaggtacagccttcttagaactttttgagatttcccagtccagagacttttaacctggagtctcacgatgagcttggtggtggtggttgggtggggtgggggttggggtggaggtccaagtgccctgagctcatgcaccactttttatgtataagtgcattcctctagagaggaagtgtgagcttgcatcagagtctcacgaaggggtacatggccccataattaggttaagaaccaatgatcaaaacccactatgtcattttgcatatggagaaactaagacctacacaagggactttttcagaaccataatctttgaccagagattctatttctcctctcaacagaggactgattacggtgagcagcaacctcagctacgtcatcgagcccctccctgacagcaagggccaacaccttatttacagatctgaacatctcaagccgcccccgggaaactgtgggttcgagcactccaagcccaccaccagggactgggctcttcagtttacacaacagaccaagaagcgacctcgcagggtgagttttgaggctctcagtgcagaaatcaacctggggacaggcttgtcccctctgaggttgcttactttgaatccaggagtatttctaaattgaaggtgatgcctaagaaaaaggaaatagtgtttttcttttattctgtcattgttgagtgtgaaataccctcatcatagaataactgcttttgggggaaaacactactacctttaaaacactcagatgctgacttcagaaagcttaaaaagtgaaaagaaggctgggcgccatggctcatgcctataatcccagcactttgggaggctaaagcaggcagattgcttgaggccaggagtttgagtccagcctgggcaacatggcgaaaccccatctctactaaaagtacaaaaattagctgggcatgatggctgggtgcctgtagtcccaactactttgggaggctggggcacgggaatcacttgaacccggaagcctgggtgacagagcgagaccctgcctcagaaaaataaataaaaattaaaaagtggggaaaaaaagtatgctttccctattggagtagacactacaccatatgcacacagtcctcatattgattcatactgaaaatggcatggtgtttcgaggtttcgaggttctgtgggaacgtggtggttagcacactccctctcatatgctggcctctgtcctgcctgtgctcatcagctcatctcagtattttctgagaataaaggactgaatccagggtcccagagcagcctccagcaataaccaaatggcagtggaaggtgttatatgagtgayggccaccacagccaagaacatctctagtgccgaatgacaaaatcattacggaggtagctgctgcttatccagcagctctgtttcttagcagttttttaaaaatgaggccaagtccactatttctacagcgctgatctgtttctctttcttagatgaaaagggaagatttaaactccatgaagtatgtggagctttacctcgtggctgattatttagaggtaagggggaggcaatgggtcttgcagaaaaactgctctcttgatagcttccattccaggctccagactgctttggggaa

SEQ ID NO: 681674 - DNA, 1444 bp, Homo sapiens
gaaacttgtaagaaattacaccctattctatatgtgtcttctaaatctactccagagacccagtgccctcaacagtaaagacttktctttaataagagtacggtgccacttgcctcaaaagttactatggtgcttaagattgtcttgatctgacatatatcaccttctgggttatttactcattgtgccaggacctggcattttcatgtgcctttgaccaagtgttcagaatttgcttgactctaacctggagagcttcttaagtgatgccccttcatggagcttctatgacagtgaataaactattaattgaaggaaaatgttataattaatgtatctatttgctgcattgtatatggattaaatgataaaaaacaagtaatctaccctcagagccatgtatttgagaatgcttcaatcatattttcctatgtacttttttttataaacttagttttagactatgttgtaaaaatgggaaggttgtaaactatgttgtaaaaataggaaatgtggcttaaaatatatacattatattgtttcaggattttgtcagtgtttaaagaaccaatgttatctttgtattatatacatgatttaaattttgtctaaaattttaaataaaactgcagtgatttatccttaaatttcttactctctataggtaacaggatgttatcaaaagggagtaaaaagcactttgggaggctgaggcgggtggatcgcttgagcccaggaattcgagaccagcctgggctacatggcaaaaccccatatctacaaaaaaatacaaaaaattagctgggcatgatggtgcacacctgtagtcccagctactctggaggctgaggtgataggatcatctgagcccagtaaggaggtcgaggctgtagttgagctgtgatcatactactgcactccagcctgggcaacacagcaagaccctgtctcaaaaaaaagtgggggaaataaataagaggaaaaaagaaacctcaggaattcttaattcccttatgtatattttatatatattttatggttaattatatgtacatatacagatggtctctgacataacaatggtttgacttaatgatttttcgacttttcagtggtacaaagacagtatgcattcagtagaaactgtacttcaagtacccatatgaccattctgtttctcactttcagtacagtactcaataaatcacataagatattcaacactttatgacaaaatagactttgtgttagatgattttgcccagtagtaaaccaatgtaagttttctgagcacatttaaggcaggctaggctgagctataatgttcattaggttaggtgtatttataatgccacttttctgatcttaataatatttgcaaactctattggtgtatatcgaattgtaaccccgttgtaggtcaaggagcatctgcatatataca

SEQ ID NO: 681675 - DNA, 602 bp, Homo sapiens
gctcacatgtcattgggtgcttctgatgcaccccacacttgccaagtgctttattttacacagcttttctcatctgatcctcaaagtcacttatgagttaagtaccaataattttcttttcttttttttttttttaaagagacagggtctcactctccaggatcttgctttccagggcaacacctattgcccaggctggagtgcagtggcacagccagctcactgtaaccttgaactcctggctcaagcgatcctcctgcctcagcctcctgagcagctgggaccacagtcacatgccaccatgcccagctaattttttatttgttaattttttgtagagatggggtcttgctatgttgcccaggctggtcgtgaactcctggcttcaagtgatcctcctgccttgtcctcctgaagcactgggattagaggcatgagccactgtgcctggctgaattaggtaccattcttttaatttttcttttctttactcagagatccttgttttgaagaattaggtaccattcttatctccactttactgaggygccagtggtcacagcactccctcctggttacacagctagtaaagattggctcca

SEQ ID NO: 681676 - DNA, 788 bp, Homo sapiens
cagggcagggcagggcagggcaggaggggcctcacctgagaagagcgccaggaagccctgggtgcgagagttgatgacgtcgatctcgtgcagggacacggtgtgcaccacctccttgcgtttctggagctccccatctgggcactgcacgaacttggtctatggggcgggggtgggggaagaacggcggagacagggcagggaagggcatgaagggggcccctaaagccctctgtctgggggagactggagctccaggaaatggagctgggaggctaaatggggtcatctggaaaccccaggcccaggaggtagtcaggactagggacattccagagcgctgagggtcacgggggctcccggaggacctyagaagccacaggccacatgtggccatgcgaagctatagtgccaggctgaggggccctgctgtcctagggttacagggaagacccaggagtaccaggacaaacagtcagggtaacaggaagatccagaccccatgggtcaagggggtgatggaggagatgaaaacaccccagtgctgggggcgaggggatcccgggagtcccggccgcacctgggagcccatagcgtcgtagtcgcgggcgcgtgtgaaggagcggcccagcttggagatcttgcccgtcgccttgtcgatggtgatcacgtccctacagggggatggggggtagggtaaggaaaggaatgggcccaagctcgcccatccccctggctgcctggcatggcccctgactgctcacccggcctggaccttgtccttggtc

SEQ ID NO: 681677 - DNA, 668 bp, Homo sapiens
tgattttctctttgcaactgcttgccaatcgataccagccgagatgaactcaaagtcatgaataaggtgattatgtggcttttgtgctcgcctgcttatgccgctcccctccagggaaaacctgacatgcctgaggttcctacattctttgccacatcgtrtccctgagttttgatttggctgatttactactgaatgaaaatcacagagacctctctgcttcctcccaacagcctattcttgtggtaagtcagtttagcagaatgtgacatctgttgacaagctttccttctgcttagaggccctagtcagccagtttggaagccaggctcagtgatttcatttaaggaattactccatgtaacaacaaagtaaatgaatataatacatgtcatataatcataaaaacaattatatgatgttttatgtatattattttcattattcttcacttttcaaatccctttctgtaccgggaagccttttacaatgatagttccaaacttttctgatgttttttgcctcaaactcttacaaaatttaaacattttcatagaatcctatagtacatgtgttattgttttctgtttgttgtcaatcacttgtccttatttgagggaaggagccatatcttttcgtttaaatctctaccatattgcactttgtga

SEQ ID NO: 681678 - DNA, 613 bp, Homo sapiens
ttatcaagagtttcatgtgatcactgcagtgttgtcacagctcataaatagcaacagtgtytcatgatttaatggctcagaaatagttattcattagtttttaatttttaatttctaaggtacagagatctataaaaccttgattatttgttagttttgcaattcaaaacagctaatgtctggttatttctcaaagtaagtattttaaacagcctgttaattataagaaactcagaataatgagtgtaaatgtgttatgttatccacccaagtgtacatatgtacctatttttttttaaaaagcagaaatagaaatacaagactggtaaacatgcctttaaaaatatatatattttcaactagtattgtctataatgctgaaatattacttattggtgatttttctgtttcacacactctaaaatataagtaaagccaaccttttttttaaggctgagattcccaaaatgagaatactactttataccatttgtttataagtatgaactgttcttataaatattaatatttacatattcactaatttaacataaatgaaaattaggattaaaaattgcaccaaagcatcggcaaaaacaatactatattcttt

SEQ ID NO: 681679 - DNA, 582 bp, Homo sapiens
caaaagcaggggaaaaatcagagtataagatctggtcatgaaacagaaagagtcaatgttaggtgactaagagatagaagcaatgtctgtgttagttaagaatatgaacttggggatgggcgcggtggctcacgcctttgggaagctggggcaggtggatcacgaggtcaggagttcgagaccagcctgatcaacatggtgaaagcctgtctctactaaaaatacaaaaattagccgggcatggtggcatgcacctgtaatcccagctactcaagaggctgagacaggagaatcacttgaactcggggggcggaggttccagtgagctgagattgcaccactgcactccagcctgggtaacagagcaaaacttcatctcaaaaaaaaagaatatgaacttgggagtcaggtaaacttaaatttaacttttatcctttgccacttgttagttgaatgaccttaaacaaattacttactagtccaagcttattttctcatttagaaagtgggtctaataatagtacctacctcatatacttgtgataaggattagagataatgcmtgaaagtacttggcacgct

SEQ ID NO: 681680 - DNA, 621 bp, Homo sapiens
cagtcatttttctcatacacagtaaagcagtgtatatataaaacaaagtaacatgaatggaaatgaaatagccaagaagggaaaagggaatagtggatacaatcatcttcatagttcaattaatattctaccatgccaagaattttgcatatattatctcaactcttgcctgtaagtagataccatcatctccatgttacacaggaagaagaaattaaggcttacagaggttaagtaatttggccaaggtcacagacctgtgaagtgcagaacactgccctcttttaatgtctgcttttcttgttttgttttcttggatggttgagtggaactggccactctgagttaccctctgtgttgacagaacatgaggtgaagtgacatttagagcattcgatgactcagtctcttcttgaactggcaaaaattcaagaatgagtttgtgccattgatactcattgtctgtggratcccatacagttcttccctagctgtagatcagggtcaatctgcagtgacagaacattctacttctctaacataccatcagttttctcttatcactgtaatgatctgttgggtgaccttccatcaatcagtctgctgttcagtttccttcat

SEQ ID NO: 681681 - DNA, 618 bp, Homo sapiens
ggggcggtggctcacgcctgtaatcccagcattatgggaggccgaggcagatggatcacaaggtcaagagatcgagactatcctgaccaacatggtgaaaccctgtctctactaaaaatacaaaaattagctgggcgtggtggcgcatgcctgcaatcccagmtactcaggaggctgaggtaggagaatcacttgaacccgggaggcaggggttgcagtgagccaagctcgtgccactgcactccagcctggcaacagagcgagactctgtctcaaaaaaaagaaaaaaatacaaaagtaaccaattagactttgattatctactaaattcactgaacaataattgccttcaaatgtccagcccattaaatattaaaacagtcactaaaagttttgatgggagaataccatagcaagttttaaatacctgattcatttgaaatgtgctttatatagtgtttgcatgatttatactacgtttctgagtacaacaactttggccctgactgatttcatatcaccacattttgattctgacaatgtcaataaatgaaatgacttcaagcatccacttagaatatacaaagaaaaaaaaaaggaagctgaggccacccaaac

SEQ ID NO: 681682 - DNA, 604 bp, Homo sapiens
tcatagcctcctctagtccaaagctggccggtgctaagaagaggaagcctggaactcagaacctctgtccttgtgccaacatgttagttgcagtctatctgtgagcttcacagtcccattgactcttgtacagaaatcagcaagcagtggtcttcagtcaaactgggacctcaacaatcgactttggtcctgtcagggttcctttcccttactcttcttaagagcacccrgagtcaccatgaaagaaccacaagtggaaaaggaatacgtgggctcagacgtgtgtccatccttgcatgacccttggctcctcatctgttcatgggtttaaaggtcatccttcctgccctgcctaccttattgagtattcacaacagaaaatgaatgtaggagattgaaaattgtataatgcactctaagttattattacctctcccaaattgtcagcatttcatccttgctatctagcagcagaatagtgtagggtaggagtttacaaactacagcccacaggccaaagccagcccaaggccagattttctaaataaagttttattgaaacacagcaatgtaaatatgtaaactcatttgtttacatattgtc

SEQ ID NO: 681683 - DNA, 352 bp, Homo sapiens
gccagcagcattcttttagcagatcacttcggaggaatgcttctggggttcaaatagccacctttgaagggctgccggaagagaggaggggaggagattgtaggttagagaagacaacttataggcaaggagtcaaaacaaaacaaarcaaaacaaaacaaaaacaaacaaacaaaaaaaaaaaaccttgttttttgtccagatgccccttttagctggctctgtattcttggacaactctccaatcctcagtttcctcatctgtcaattgagaacaataattcctactctacctactcatagtgtcactggggagaccaaatatgttgccaaagtgcaccatgctttaaaa

SEQ ID NO: 681684 - DNA, 746 bp, Homo sapiens
gcagaggagaaagacaggaacctaattaatggagtttggctgtcaggaatatgacaaaaaccaagagatgtgggcataagaataagatgatcaggctaacctgatgctgagacacttgagtcactgaattagaattccttaaacccctaataaattacaacaataataacaatggcaataacttccacaattgactgattgctacattctagacactatgataaacacttaaatgcatgtcaattaaaccttcccaatagcccttgaggttgatattatcctcagatgaagaaacagagcttcagaaaggttgacttttccacagtcacaaaacatataaagtgatggagctgcacttctcctcagggccatggaatcccaaaatttgtgttcttattaccgtgccatgtgagtgctggrcagggagagttggggaaagagtcaggaaagagagggggttgtcctggacaagacagcttgagtttaaatcttgtctacagtagcagcaatagatctgacattccaacccaggctctcaaattcccattggacatctgtctcaccatttactccatggtttaggtactcatattggcaatcgcagtggcactgaagcattcacttgttagtgctgcattttccaaactggctctacagacacaccacagaggtccacaggtcctctgttttgagaaacactcatttggtctaagatttgcttctggtgagtcacaaaggtaagaact

SEQ ID NO: 681685 - DNA, 746 bp, Homo sapiens
gcagaggagaaagacaggaacctaattaatggagtttggctgtcaggaatatgacaaaaaccaagagatgtgggcataagaataagatgatcaggctaacctgatgctgagacacttgagtcactgaattagaattccttaaacccctaataaattacaacaataataacaatggcaataacttccacaattgactgattgctacattctagacactatgataaacacttaaatgcatgtcaattaaaccttcccaatagcccttgaggttgatattatcctcagatgaagaaacagagcttcagaaaggttgacttttccacagtcacaaaacatataaagtgatggagctgcacttctcctcagggccatggaatcccaaaatttgtgttcttattaccgtgccatgtgagtgctgggcagggagagttggggaaagagtcaggaaagagagggggttgtcctggacaagacagcttgagtttaaatcttgtctacagtagcagcaatagatctgacattccaacccaggctctcaaattcccattggacatctgtctcaccatttactccatggtttaggtactcatattggcaatcgcagtggcactgaagcattcacttgttagtgcygcattttccaaactggctctacagacacaccacagaggtccacaggtcctctgttttgagaaacactcatttggtctaagatttgcttctggtgagtcacaaaggtaagaact

SEQ ID NO: 681686 - DNA, 1329 bp, Homo sapiens
tgaccaagatgaggctcagagaggtccagtgactcacaagttagtgacagaggcactcctaaccctttgattgcactgacctgagagtgatggttgtgatgatggaggtgatggtagaaactaacattgagtgactttgtagcaagtccattaagtaagtacagttgttattcccatttacaggtgaggaaactgaggctcagagaaatggatgaacttaccccaaggtgacacagcttctaggtgataaagaaaagattcaaatcctggtaatgtgactccaaaaccaaagctctatttttttttttttttttttgagatggagtctcgttctgtcatccaggctggagtgtgatggcacatctcggctcactgcagcctccacctcctgggttcaagtgattctcctgcctcagcctcccaagtagctgagattacaggcacgcgctaccacacttggctaatttttgtatttttagtagagatggggtttcactgtgttggccaggctggtctctaactcctgacctcaggtgatccacctgcctcagcctcccaaagtgctgggattacaggtgtgagcccctgtgcctggccccagagctcttttttttgagaccgggtctctctctgtcgcccaggctggaatgcagtggtgcaatcatggctcactgcagccgtgactttcccgggcccattctatcctcccaccacagccccccaagtagctgggaccacaggcatgtgccaccatgcccagctaatgttttaatttttttgtagagatgaagtctccttatgttctcgaactcctgggctcaaacgatcctcctgtctcagcctcccaaagtgctgggattacaggtgtgagccaccacacccagcccagagtcaaagctcttaaccaccggctcttctggctgaggaatcctccctgccaagatgccagtgacataggtgcttttctccagctcaccttactccatttacccacactgagaaactgtagctccatcagtgagtgaagcccacacccgcattactactctsagagactcactcactctctgctgtgtgactttggatgaatttcttttcctctctgagcctcagtttccacgtctgtgaaatacagagtttaaactagttgagagctgaggtcctgcttttccatagtctatgaatctgtgagtttataacaatacaggcttaagaatttctcccctggctgggggctgtggcttatgcctgtaatcccaacactttgagagggctagacatggggatcacgaggtcaggagatcaagaccatcctcaccaacatggtga

SEQ ID NO: 681687 - DNA, 1329 bp, Homo sapiens
tgaccaagatgaggctcagagaggtccagtgactcacaagttagtgacagaggcactcctaaccctttgattgcactgacctgagagtgatggttgtgatgatggaggtgatggtagaaactaacattgagtgactttgtagcaagtccattaagtaagtacagttgttattcccatttacaggtgaggaaactgaggctcagagaaatggatgaacttaccccaaggtgacacagcttctaggtgataaagaaaagattcaaatcctggtaatgtgactccaaaaccaaagctctatttttttttttttttttttgagatggagtctcgttctgtcatccaggctggagtgtgatggcacatctcggctcactgcagcctccacctcctgggttcaagtgattctcctgcctcagcctcccaagtagctgagattacaggcacgcgctaccacacttggctaatttttgtatttttagtagagatggggtttcactgtgttggccaggctggtctctaactcctgacctcaggtgatccacctgcctcagcctcccaaagtgctgggattacaggtgtgagcccctgtgcctggccccagagctcttttttttgagaccgggtctctctctgtcgcccaggctggaatgcagtggtgcaatcatggctcactgcagccgtgactttcccgggcccattctatcctcccaccacagccccccaagtagctgggaccacaggcatgtgccaccatgcccagctaatgttttaatttttttgtagagatgaagtctccttatgttctcgaactcctgggctcaaacgatcctcctgtctcagcctcccaaagtgctgggattacaggtgtgagccaccacacccagcccagagtcaaagctcttaaccaccggctcttctggctgaggaatcctccctgccaagatgccagtgacataggtgcttttctccagctcaccttactccatttacccacactgagaaactgtagctccatcagtgagtgaagcccacacccgcattactactctgagagactcactcactctctgctgtgtgactttggatgaatttcttttcctctctgagcctcagtttccacgtctgtgaaatacagwgtttaaactagttgagagctgaggtcctgcttttccatagtctatgaatctgtgagtttataacaatacaggcttaagaatttctcccctggctgggggctgtggcttatgcctgtaatcccaacactttgagagggctagacatggggatcacgaggtcaggagatcaagaccatcctcaccaacatggtga

SEQ ID NO: 681688 - DNA, 1689 bp, Homo sapiens
tacaggcgcccgacaccacgcccagctaaggtttttgcatttatttttttattttttttgtagggacgggctttcaccgtgttagccaggacggtctcgatctcctgccctcgtgatgcacccgcctgagcctccsgaagtgctcggattacaggcatgagccaccatgcacggcccagaaatggagatttttgagcaaacacattaaagaaaagaaacgcaaatagacgaaactcattttaacatttttatttaacccaaggaatacagatataatcaacaccaatacaattgatgtcacaatgatgactaagatacatgctacaatccttcattctcagatgcaaaatctagtatgtgttttacagcaaacgtcagttggaaactgaacgtcgatcacacatgcttgatgtgcatgtcaatttcatgagagttacaatctcaggagaagtctcacatagcgtaagagtccaaacataccttcaagtgtttcgacaagttcttcactactcattcttagaactgaatttaccaacaacaatcccagcctattcattgctgaactgcatcccattgaaagaatgggtcacagttcctctctctagacactgtggaacgacattgaaggcccttccatcttttggcgattgtgaggacaggtgctagaagcctctgccctcagccttgtccacgtgagttctaattcctttagaacaactatctcagggtgggaaagatggttccaatgctaagtgcctattgcattgattatgaatcaatgaaactctttctccctgggggttgtcccagttggattccaagcagcactgtcagagtgttccagcttctccacatgctccgcagcccttgggatggtgagtgattgtcacggtggcttctgggagagcttcttggttgttgttgaaggtgtatttgacgtgcatttccccaggggagggacagtgaacgctttttgaagtggttctttacatcccctttgaggaaatgtctgctcaagtctctggctgggttttgaacagaatcatttgtttgtcccattggagttttgacaactctgtgtattctgagtatgagcagtccttgcacgtatatgagatttgcaaatattttgtgccccaatctcaaggttgctctttgatacaaatcaagagcatctgaggcagagcaaaggttcaggtgagaggacggagcatttctccacctctccagcatgcgcagcatctctctcctccgagatgccgagacatgtgtgcagggagacaccatgaaaaagcaggtgtgcttcattctgaatagagcgtctctgattcccgtctggtgcctgagggtgcatggcccatgagccttagaagagacgtcttcgggccttgcacgttggcctccatagaaacttgtggcaaattctgggctccggactgggtgatggaggtagaggtctgagggcagaggtgggcaggggctccaggccgtggagatccaagtggaattcttcaggcagagcctgtctccagggactaggcttgggcatttgggatgagccctgggggacggccgctctgtagtcaggtttgaggtagaggacacgccaggaagaagggctgactccatgcacaaggtttgctgggggtcccatcaggggcaggaagccttggggagcctcaccctctt

SEQ ID NO: 681689 - DNA, 1689 bp, Homo sapiens
tacaggcgcccgacaccacgcccagctaaggtttttgcatttatttttttattttttttgtagggacgggctttcaccgtgttagccaggacggtctcgatctcctgccctcgtgatgcacccgcctgagcctcccgaagtgctcggattacaggcatgagccaccatgcacggcccagaaatggagatttttgagcaaacacattaaagaaaagaaacgcaaatagacgaaactcattttaacatttttatttaacccaaggaatacagatataatcaacaccaatacaattgatgtcacartgatgactaagatacatgctacaatccttcattctcagatgcaaaatctagtatgtgttttacagcaaacgtcagttggaaactgaacgtcgatcacacatgcttgatgtgcatgtcaatttcatgagagttacaatctcaggagaagtctcacatagcgtaagagtccaaacataccttcaagtgtttcgacaagttcttcactactcattcttagaactgaatttaccaacaacaatcccagcctattcattgctgaactgcatcccattgaaagaatgggtcacagttcctctctctagacactgtggaacgacattgaaggcccttccatcttttggcgattgtgaggacaggtgctagaagcctctgccctcagccttgtccacgtgagttctaattcctttagaacaactatctcagggtgggaaagatggttccaatgctaagtgcctattgcattgattatgaatcaatgaaactctttctccctgggggttgtcccagttggattccaagcagcactgtcagagtgttccagcttctccacatgctccgcagcccttgggatggtgagtgattgtcacggtggcttctgggagagcttcttggttgttgttgaaggtgtatttgacgtgcatttccccaggggagggacagtgaacgctttttgaagtggttctttacatcccctttgaggaaatgtctgctcaagtctctggctgggttttgaacagaatcatttgtttgtcccattggagttttgacaactctgtgtattctgagtatgagcagtccttgcacgtatatgagatttgcaaatattttgtgccccaatctcaaggttgctctttgatacaaatcaagagcatctgaggcagagcaaaggttcaggtgagaggacggagcatttctccacctctccagcatgcgcagcatctctctcctccgagatgccgagacatgtgtgcagggagacaccatgaaaaagcaggtgtgcttcattctgaatagagcgtctctgattcccgtctggtgcctgagggtgcatggcccatgagccttagaagagacgtcttcgggccttgcacgttggcctccatagaaacttgtggcaaattctgggctccggactgggtgatggaggtagaggtctgagggcagaggtgggcaggggctccaggccgtggagatccaagtggaattcttcaggcagagcctgtctccagggactaggcttgggcatttgggatgagccctgggggacggccgctctgtagtcaggtttgaggtagaggacacgccaggaagaagggctgactccatgcacaaggtttgctgggggtcccatcaggggcaggaagccttggggagcctcaccctctt

SEQ ID NO: 681690 - DNA, 1444 bp, Homo sapiens
tggttgggggcgggtcttgctgtgttgctcaggctagtctcaaattcctggcctggagcgagtctcccacctcggcctcccgcagtgctgggattacagctgcgcgttgtaaatgcttactgtctgcctcctcatccccccactctgctgttgctctaggacgtgtatcctcttctaactgcatggcttattttttgtggttattttgtgagctcctggagtcgggggtctttgccgccttccgtctgctgacagaccccatgtactcagcgatggcctgcagcagggatcaggaaatgtctgttaaataaattagcctgtctggtgtggcrcagcctcccctccgtccctgtcctcccgccgtcctctctccttctctccggccgggtctccctcccacctggcaccaccctctctgtgatgtgttttgccttctctcgccccagccactctgcaaataaactccatctggcgctcagatcccagtgctgctgcgagtctgtctgctcgggaacgagaaggggagtgtgcatcagaggacgtgtggaggagggaggggggtgcagaggtagagagacagagacacagagaaacagcagggagagatggagagagacagagacacacacacagagaaacagagacgggggagagaaaaagaaggagagatgcagatagaaaaacagacacacaaaaagaaacaggtggaggaagagagagagagaaacagacacagacacatacagagatagaaagagaaacagacagagacagagagagaaacagagatggagagagacaaacacaggaagagagacacagacagaaaagagacagagaggaagggagagagagagacggaggggcgaggatgagctgcctgagctcatggtgctgcctgagcctccctgctgtcctgcagggggtcctgatggcagagctgtgggcaggagggagtgagccacctgcttctaagaatccctctcctttaccaaaccaaagtttgtgtgctaacaatggaatgaaagatatggttctcaaagcttccatcaaggaactctatatgcatgtgtgcatgagtgtgtgtgagtgtgcatgtgtgtgagtgtatgcgtgtgcatatgagtgtgagagtgcacatctgtgcaagtgtgaatgtcgtgagcatgagtgtgtgccagtgagtgtgcacgtgtctgagtgtgagtgtgcgtgcatgcgagtgtgcacattgtgcgagtgtgtgcgcgtgtgtgcaattgtgagtgtgtgcatgtgtgtgcaaatgtgtgcaagtcagtaatgtgtgagcatgagtatgtgtgccagtgtgcgtgtgtccatgagtgtgagtgtgcatgtgtccatgagtatgcgtatgtgtgccagtgtgcatgtgtgtccatgagtgtgagtgtgcatgtgtccatgagtatgcgtatgt

SEQ ID NO: 681691 - DNA, 616 bp, Homo sapiens
ccaaaacccataatctctcccctggaacccacagctcagtttacggtaatcagcttgctaaagactatttcagggaactagctagtcattttacttgtgttcctaatcgcacacactctgcagagagatccaggggatggtggtcgtagcttcctgagcgaaccaactgactagatatttgatcagttgcccaagccaatgatattttttttgcagaagtgtgacttggatagacaacaacataacttttttcttcctttcattaggatggcaaatttgagttacatcaaaaacttcaggtttagcagcttggcaaaggatgaactgggatactgcctgacctcattcgaagctgccattgaatatattcggcaaggaagcctctctgctaaaccccctgtaagatctcacccctgccctggccttcctttgtgggcatcatggttcccttgatagggtgctggggttggtatgtgggcagacggattcttaaattgcctcccaggaatggggcctcagctgtttgagggctgtgagtyttaaaaatcactcagtgaagagaacaccaagccctcaattggtggtaaaaattggtgggttatcattgggatttaca

SEQ ID NO: 681692 - DNA, 616 bp, Homo sapiens
ccaaaacccataatctctcccctggaacccacagctcagtttacggtaatcagcttgctaaagactatttcagggaactagctagtcattttacttgtgttcctaatcgcacacactctgcagagagatccaggggatggtggtcgtagcttcctgagcgaaccaactgactagatatttgatcagttgcccaagccaatgatattttttttgcagaagtgtgacttggatagacaacaacataacttttttcttcctttcattaggatggcaaatttgagttacatcaaaaacttcaggtttagcagcttggcaaaggatgaactgggatactgcctgacctcattcgaagctgccattgaatatattcggcaaggaagcctctctgctaaaccccctgtaagatctcacccctgccctggccttcctttgtgggcatcatggttcccttgatagggtgctggggttggtatgtgggcagacggattcttaaattgcctcccaggaatggggcctcagctgtttgagggctgtgagtcttaaaaatcactcagtgaagagaacaccaarccctcaattggtggtaaaaattggtgggttatcattgggatttaca

SEQ ID NO: 681693 - DNA, 597 bp, Homo sapiens
caaggttaagtacagtggtcatgtcacaggtgaggagaccaggctcagaggctaagtcacttgcctgagccactgaggactaagtggccggcctcctccagacccgcattctcatctcccagcagcccccatggctcacaggggccaaaactccagtcacagtgacctcccagcctcccactgctcccaggtcaaagggtctggctcctcctctacccagatgatgacacagcacaggagtggggccaggacccaacgaggyaccaggcagcaccccaggtgtttcccatccaccaaccctatcactaaaaccaggtatctgactgccagaggttaagacagatcccacaaaagacactgtttatagtcactgatataaaataaaaagaacagctgaagacattttatgcatcttaaattagaagtaatgaatattacacaataaatatccatttactatctcttgctcactaaaaatgctaggtttttcatcaattgctggtacaataaaatccacatgaatttattttgcagcgccgcagcttttatgcaaacgaagaggcaggtattattactgtgtaagggttcccctgcaca

SEQ ID NO: 681694 - DNA, 2845 bp, Homo sapiens
  misc_feature 649, 650, 651, 652, 653, 654, 655, 656, 657, 658, 659, 660,661, 662, 663, 664, 665, 666, 667, 668, 669, 670, 671, 672,673, 674, 675, 676, 677, 678, 679, 680, 681, 682, 683, 684,685, 686, 687, 688, 689, 690, 691, 692, 693, 694, 695: n = A,T,C or G
  misc_feature 696, 697, 698, 699, 700, 701, 702, 703, 704, 705, 706, 707,708, 709, 710, 711, 712, 713, 714, 715, 716, 717, 718, 719,720, 721, 722, 723, 724, 725, 726, 727, 728, 729, 730, 731,732, 733, 734, 735, 736, 737, 738, 739, 740, 741, 742: n = A,T,C or G
  misc_feature 743, 744, 745, 746, 747, 748, 832: n = A,T,C or G
agtgtgtgagagtgtgtatgtggtcatgcatgtgggtgtgtaagtgtatggctgtgcatgtgtgtgagtgtgtggttgtgtgtggttgtacgtagttgtgtgtggttgtgtgtgtgtgtgtctgggcagcctggtgtcctggtacctgtctgcgctccttccctgtcctgctccttggtgagattttggggaggagattagaatgccctggaaatgccaggttggaaaagcgaggtggcgaaagggtgcccaggccagcccccagtcaggagcgtgctcacacccaggggttctcgggcactgtcttagctcccaccccagtggatgacggccatgagaaccagggagaccacgccccaggggcgggctgcagggccgggtgtgaatgagggctgcatcgtgggtgcagtttcatctctaacttggaaatatgtaggcctcccgggtgaggggcttgcatgtgtgtttgcgcccttggcccaccagtgcaagggttgaacatggttgttgttggggaggtccagggagggtgcagagaggaggcaggaaatgcagggcaaggccagagaaggtggggagagagaaggaggcaagcacgacagaaacaatgtccagggctgagaatccatgagacagaagcagaaaggannnnnnnnnnnnnnnnnnnnnnnnnnnnnnnnnnnnnnnnnnnnnnnnnnnnnnnnnnnnnnnnnnnnnnnnnnnnnnnnnnnnnnnnnnnnnnnnnnnntatgttcccaggctggtctcaactcctggctcaacgatctcccccatcactcccaaggtactgggattacaggcatgagccagngtgcctggccttaggtagaacttaactgggggatgcaattgcagggaagcaagagtaagggggaaaggaagtgaacagggatggcatgagagccaatatgagggtgagtttcagagttggccaccacttggtgccaaaggcagctgatgctgaatcttgtagtaacatcttccaagaggtttttataaggaatatgattcataagggtccatctgggatgaggtagagggaagaatttatccactgactcccatctgccatttatccatctgccattgtccaagtgagataggagaacagggaaaatgaggcaggaaagtagcaaagggaattgaaagttggataaagggcagaataagtaaaagcagagagcagaagaagcaaggtgaaggggcaggtgagcaagaagccagacaaaaagcagaggttcagcagccaaaacaaaagtaagataaaaaagtgagcagggccgggtgccgtggctcatgcctgtaatcccagcactttgggaggctgaagcgggaggattacctgaggtcaggggttcaagaccagcctggccaacatggtgaaacccactgtctactaaaaatacaaaaattagccgggcgtggtggtgggcgcctctaattaccagctactcaggaggctgaggcaggaaaattgcttgaaccgggaggcagaggttgcagtgagccaccgagattgcgctaccgcactccagcctggatgacaagagtgagactccgtctcaaaaaaaaaaaaaaaagcgagcagtatcccatggccggcaggatcctgaccaaaccagtaaggggctgcgcttcagagatgggcatgtgcattggagagaaaaggtatccttaacataaccccgttatgataatcagctacttaaggttcatgcatatgagctgcatatcatgtatgtacttaggattatgggatggaggcaaggtgcaagcgcacgggggccaaagtaactaagcaacacacctgtcaatcaaaaagatagacactggctagagattaggcagccttgggaagagggggaaaaaaacaacatatagaaagacccaaagtacaccaaactaatgccgatctcatctcacaaagatcagtccactcttcctctccaagagtggaatactgcacttaatacactttttgctatctgtatatgtctcttccaattctttgttcaagtcgcccagatcctggaactgtgtggcaccattcagtaacacaaggataggcccgagtgtgctaactctcctgcatttctgattgcaagtttgtgggtgccagattggtcccttattatctcattcctcaggggcatcagagaatccctgagggtgatggggggtgctggcaggttgtacctgcacctgaagtgggaggaaaggtggcaaagccttgacaccaaggtgaggctaggggctggggaggtggcgtgatatccaagaggcatctaatacagagtggagatgctggatttggaggtactgccaaatggttttccaaactggtggtaccaactccacatccttgccaacattgggtgtgtaattttcaccattttggtggctactcagtggtatcttattctcgttttaatttgcatttccctgatggcccatgaggtttgagtgcctgttcaggagtttaacagtcattggacatcctcttttgggaagcacctatttaaagtcctttgttttttttttttttttttttttttttgagatggagtctcgctctgttgcccaggctagagtgcagtggcatgatctcagctcacttcaacctccgcctcgcaggttcaagcgattctcctgcctcggcctcctgactagctgggaccacrggcactcaccaccacccccggccaatctctgcatttttagtagagacagggtttcaccatgttggccaggctggtctcgaactcctgacctcaagtgattcacctgccttgcccttcccaagtgctggggttacaggcatgaa

SEQ ID NO: 681695 - DNA, 644 bp, Homo sapiens
tctagcaatatcttccaggccgggcgcggtggctcacgactgtaatcccagcactttgggaggccgaggtgggtggatcacctgaggtcaggagttcaagaccagcctggccaacatggtgaaacctcgtctctactaaaaatatgaaaattagctgggtgtggtggcgcgcgcctgtagtcccagctattcatgaggctgaggcaggagaatcgcttgaacccggaagtcggaggtttcagtgagctaagattgcgccacttcattccagcctgggcgacagagcgagacaccgtctcaaaaagaaaagaaaatgatcgtcttgggttgtgggatccaggcccctgcacgcactctgggcgggccggggccaactgagggcagcgccagaatgatcagtgtccgtggggctgcgcagttttagactcgacagtgacaccaagtggccaagagcaggaacagcggctgtgcagagatcggcccactccctccacactgggcatttagaagcacgascccatccctgtggacccagacaatttaaaggggaaatactggttagacttcaaatgaacgagggaaagggggtctaataaacagttggaaaataaaggagatgtgacaatatttggcgtctacgttta

SEQ ID NO: 681696 - DNA, 644 bp, Homo sapiens
tctagcaatatcttccaggccgggcgcggtggctcacgactgtaatcccagcactttgggaggccgaggtgggtggatcacctgaggtcaggagttcaagaccagcctggccaacatggtgaaacctcgtctctactaaaaatatgaaaattagctgggtgtggtggcgcgcgcctgtagtcccagctattcatgaggctgaggcaggagaatcgcttgaacccggaagtcggaggtttcagtgagctaagattgcgccacttcattccagcctgggcgacagagcgagacaccgtctcaaaaagaaaagaaaatgatcgtcttgggttgtgggatccaggcccctgcacgcactctgggcgggccggggccaactgagggcagcgccagaatgatcagtgtccgtggggctgcgcagttttagactcgacagtgacaccaagtggccaagagcaggaacagcggctgtgcagagatcggcccactccctccacactgggcatttagaagcacgaccccatccctgtggacccagacaatttaaaggggaaatactggttagacttcaaatgaacgagggaaagggggtctaataaacagttggaaaayaaaggagatgtgacaatatttggcgtctacgttta

SEQ ID NO: 681697 - DNA, 623 bp, Homo sapiens
tctatgaccataagacttttatgcttaaaaataaatgttttcttgccaggtggagtggctcacacctgtaattccagaactttgggagtccaaggcagacagatcacctgaggtcaggagtttgagaccagcctggccaacatggcaaaaccccatccctactaaaaatacaaaaattaactgagcatggtggcaggtgcctgtaaycccagctactcagagggctgaggcagaagaattgctcgaacctgggaggcagaggttgcagtgagctgagttcacgccactggactcaagcctgggtgacagagctagactccacaaaaaagaaaaaaaattattttcctaattcaggaatttaacatgattttcacagcctcacattttcaaaaatggtttattctaaaagagaaatgtgattaaaccattttttccccaaaaagagtagagtgacaaattataatctagtgtacagttaataaatacaatataaagatgtggccatttattttagctgcatacttggggataagacactttttgggctataaaccaagggttttcagagacgttaggtcataaaacgtggggcgaccaggtataaaaacattcacctctgtacc

SEQ ID NO: 681698 - DNA, 1506 bp, Homo sapiens
ctttattagcagcataaaaatgtaccaatatagtctgtatgtatatttttgtaccacgaccatgttataccgattactgtagcttgtagcacagtttgaagtcaggtaattcgaggcctccaggttttattttgtttgtttgtttaatgttgccttggctattttggctttttttattcttccatataaattttagaatagcttttttccctatttctataaaaatggcactgatagtttgataggaataaaaatctgcaggttgctttaagtggcatggacattttaattatattaaatcttcaaattcataagcatgaaatgcttctccatttatttgtgttttgtctgatttctttcagcagtgtgttttctttgtagcgatattttacctccttcgtttaatgtattcctaagtatgttattttttgtttttggctattgtaaatagaattctgttcttttattttttacctctgaactttttattggcctcctgctccccaaagggtaccctgcttctgctggcttaatgtctgagaactttggtgttgttggtctcagacaccattttgccatccaccatctggcgggttgtggtcttttggatggtttgcttggagttgctgctgtccaggacatcaccaagattgaagtcctcgccatcttccagcaggcggtggtaggtggcgatctcagcctcctgcttgactttgatgttcagcggggccttgtactcctgggcctggtactgcccctctgccagggtctgtaccagctctgactccaggtgcagcaggatcctgttgatctgctccatctgcagggcttaacatgcctccacctccctcaggctgttctccaagctggccttcagatttctcattgagtccaggtcgatcttcaaggactggactgtacatctaagctctgtgagcatcatctcagcagctacaaccttggtggactgcgtggtgaccactatatactctcctcaatctgctgagactggtacttgtccagctcctctcggttcttctgagctacctcgtcgtattgggcctggatgtytgccatgatcttggcaaggtcctgagctttgggggcaactacctccctggtcaacccagagctgtcgaccttggcttgtagtccttttacttcctctttgtggttcttcttcataaagagcagctcctccctgagaaccttgatctctgtctccaaccgcagccgagtgacattggtgtcatcaatgactttgcaaagccatggatgttgctctccacagactggcacatggccagctctgtctcacacttgggtctaaagtcatcagcagcaagatggactgaagggggccagcccctccacacctgtgggtatttcttgtcaggtgggatgagagactgagaaaagaaataagacacagagacaaagtacagagaaagaacagtgggcccaggggaccagtgcttagcatacagaggacccacactggcgcca

SEQ ID NO: 681699 - DNA, 1506 bp, Homo sapiens
ctttattagcagcataaaaatgtaccaatatagtctgtatgtatatttttgtaccacgaccatgttataccgattactgtagcttgtagcacagtttgaagtcaggtaattcgaggcctccaggttttattttgtttgtttgtttaatgttgccttggctattttggctttttttattcttccatataaattttagaatagcttttttccctatttctataaaaatggcactgatagtttgataggaataaaaatctgcaggttgctttaagtggcatggacattttaattatattaaatcttcaaattcataagcatgaaatgcttctccatttatttgtgttttgtctgatttctttcagcagtgtgttttctttgtagcgatattttacctccttcgtttaatgtattcctaagtatgttattttttgtttttggctattgtaaatagaattctgttcttttattttttacctctgaactttttattggcctcctgctccccaaagggtaccctgcttctgctggcttaatgtctgagaactttggtgttgttggtctcagacaccattttgccatccaccatctggcgggttgtggtcttttggatggtttgcttggagttgctgctgtccaggacatcaccaagattgaagtcctcgccatcttccagcaggcggtggtaggtggcgatctcagcctcctgcttgactttgatgttcagcggggccttgtactcctgggcctggtactgcccctctgccagggtctgtaccagctctgactccaggtgcagcaggatcctgttgatctgctccatctgcagggcttaacatgcctccacctccctcaggctgttctccaagctggccttcagatttctcattgagtccaggtcgatcttcaaggactggactgtacatctaagctctgtgagcatcatctcagcagctacaaccttggtggactgcgtggtgaccactatatactctcctcaatctgctgagactggtacttgtccagctcctctcggttcttctgagctacctcgtcgtattgggcctggatgtctgccatgaycttggcaaggtcctgagctttgggggcaactacctccctggtcaacccagagctgtcgaccttggcttgtagtccttttacttcctctttgtggttcttcttcataaagagcagctcctccctgagaaccttgatctctgtctccaaccgcagccgagtgacattggtgtcatcaatgactttgcaaagccatggatgttgctctccacagactggcacatggccagctctgtctcacacttgggtctaaagtcatcagcagcaagatggactgaagggggccagcccctccacacctgtgggtatttcttgtcaggtgggatgagagactgagaaaagaaataagacacagagacaaagtacagagaaagaacagtgggcccaggggaccagtgcttagcatacagaggacccacactggcgcca

SEQ ID NO: 681700 - DNA, 1506 bp, Homo sapiens
ctttattagcagcataaaaatgtaccaatatagtctgtatgtatatttttgtaccacgaccatgttataccgattactgtagcttgtagcacagtttgaagtcaggtaattcgaggcctccaggttttattttgtttgtttgtttaatgttgccttggctattttggctttttttattcttccatataaattttagaatagcttttttccctatttctataaaaatggcactgatagtttgataggaataaaaatctgcaggttgctttaagtggcatggacattttaattatattaaatcttcaaattcataagcatgaaatgcttctccatttatttgtgttttgtctgatttctttcagcagtgtgttttctttgtagcgatattttacctccttcgtttaatgtattcctaagtatgttattttttgtttttggctattgtaaatagaattctgttcttttattttttacctctgaactttttattggcctcctgctccccaaagggtaccctgcttctgctggcttaatgtctgagaactttggtgttgttggtctcagacaccattttgccatccaccatctggcgggttgtggtcttttggatggtttgcttggagttgctgctgtccaggacatcaccaagattgaagtcctcgccatcttccagcaggcggtggtaggtggcgatctcagcctcctgcttgactttgatgttcagcggggccttgtactcctgggcctggtactgcccctctgccagggtctgtaccagctctgactccaggtgcagcaggatcctgttgatctgctccatctgcagggcttaacatgcctccacctccctcaggctgttctccaagctggccttcagatttctcattgagtccaggtcgatcttcaaggactggactgtacatctaagctctgtgagcatcatctcagcagctacaaccttggtggactgcgtggtgaccactatatactctcctcaatctgctgagactggtacttgtccagctcctctcggttcttctgagctacctcgtcgtattgggcctggatgtctgccatgatcttggcaaggtcctgagctttgggggcaactacctccctggtcaacccagagctgtcgaccttggcttgtagtccttttacttcctctttgtggttcttcttcataaagagcagctcctccctgagaaccttgatctctgtctccaaccgcagccgagtgacattggtgtcatcaatgactttgcaaagccatggatgttgctctccacagactggcacatggccagctctktctcacacttgggtctaaagtcatcagcagcaagatggactgaagggggccagcccctccacacctgtgggtatttcttgtcaggtgggatgagagactgagaaaagaaataagacacagagacaaagtacagagaaagaacagtgggcccaggggaccagtgcttagcatacagaggacccacactggcgcca

SEQ ID NO: 681701 - DNA, 1194 bp, Homo sapiens
ggatacaggagggatgaaaaattgctaccatatttgcaatcagtatccttctgcttttttttttttttttttttttttgagatggagtctcattctgtcaccaggctggagtgcagtggtgtgatattggctcactgcaacctctgcctcctgtgttcaagtgattcttgtgcctcagcctcccatgtagctggtattacaggcccacaccaacacacccagctaatttttgtatttttagtagagatggggtttctccatgttggccgggatggtcttgatctcctgacgtcgtgattcacccaattcagcttcccaaagtgctggggttacaggcgtgagccaccatgcccagtccattctgctttttctgcatatgtagtctgtagaactcttccacatcaagaaattgtccaaacactcacagcttctaagtggctgggccgggactcaggatcaactctgtctgacttcaaagcctatgtacctccatggatcacactactcaagtagctgccctagactcttaaaaccctggagagtgacacttctaaaataaaaaccagattgcttgtagatttgtgcccataaagtactatttattattggaaataatctcgagaaattactgaagcacatggtggccttaaatccttaattccaatactttgggaggcttgggaggctgagatgggagaatcatttaagctcaggagttcaagtgcagcctgggcaacataataagatcctggctcaataaaagaaatttaaaaaattaaccaggcatgatgatactcaggtgtctagggcaggaggattgtttaagaccggaaggtggaagctggattaagccatgattgattacacgactrcactccagcctggttgatagagtgagactctatttcaaacaaaatgaaaaaacaaaaaagaaattgcaaaagcattttgaaagaacatagaataatttggaaaaaatagctgacatagctgatatagagtaatttggaaaacataacttattttagataatcaaagccctacaacacatcacttattttttatcatagaacaaatttgaggccgggcgtggtggctcacacctgtaattccagcactttgggaggctgaggcgggcagatcacgtgatgttgggagttcgagaccagcctgaccaacatggtaaaaccccgt

SEQ ID NO: 681702 - DNA, 3083 bp, Homo sapiens
tcccactgtgatgaatgagtgggtgacaatgaacaggttctcaccgtggtaaatgagtgggtaagagtgaagaggttcccactttgataagtgaatgggtgacactgaagagactcccactgcggtgagtgagtgtgtgatatggaattggttttcactgtgaagaattagcgggtgacagtgaacaggttcctcctgtaatgaatgacttggtgacagtgaacaggttctcaatgtgattaatgagtggatggcagtgttgtggttcccactgtggagaatgaatgggtgacattcaacaggttcccacagtgatgaatgagtgaatgacaatgaacaggttcccactgtgatgactaagtgactgacagtaaacagattccactctgatgactgcgtggctgacagtgaaaaggtttctacagcgatgaatgagtaggtgacagtgaaatggttcctgctgtggtgagtgagtggctgatggaaaacaggttcccactatgatgaatgagtgactgactgtgaaaaggttcctactctagtgaacaggtcagtgacagttatcaggttcctcctgtaatgaatgagtgggtgacagtgaagaggtacccactaggaggaatgagtggctgtctgtgaacaggttctccctgggatgagtgagtgggtgacagggaacaaatttctgtttcggagaacgagtgggtgacagggaaacggttaactttggtgaatgagtgcctgacagtgaacgggttcccactgtgatgaatgagcggctgacagtgaacaggttcttttttcaatgaatgaatgggtgacagtaaacagaatcccaatgtaatgattgagtgggtgactgtgaagaggtaaccacgttggggagtgagtgggtgacagtgaacaggttccactgtgatgaatgtgttggtgtcagtgaacaggttccttctgtaatgattaagtgaaagtgaacaggttcccctgtgatgaataagtgggtgacattgaacaggttcccactgtgattaataagtgagtgacagtgartgggttcccactgtgatgagtgagtcgctgacagtagacaagttcccactctggtgacagactggctgatagtgaacaagtttttaatgctgtgaatgagggggtgacagtgaaattgttctcactgtggtgattgagtggctgaaagagaactgtttcccactgtgatgaatgagtggctgacagtgaacaggttcccactgtggtgagtgagttggtgacagtgaactggcttctactgtgattaatgagtggttgacaggatcaggttcctcccataatgaatgaatgggtgacaatgaacaggtacccactgtgatgaatgagtgggggacagtgaacaggttctcgcctgatgagtaagtgacagtgagcaggtttctactgtggtgaatgggtgggtgacagtgaacaggttctcacttgatgagtgagtaagtgacagtgagcagatttctactgtggtgaatgagtgggtgacagtgaacagtttcccactgtggtgaaagagtggctgacagtgaacaggttcccactgtaatgaatgagtgggtaacagtgaagaagtttctcctgtaaggaatgagtgggtgacaggaataagttcccactgtaatgaatgcattggtgacagtgaacaggttcccactgtcataaatgactgggagtgaaaaggtccccactgtgatgaatgattgggttcaagtgaacagcttcctactgtgataagttagtgggtgagagtgaacaggtttccactgtggtgagtgggtgagagcgaacaggttccaactgtgatgagtgtgtaacagtcaacaggttccaactgtcaggaatgagtggatgagagtgtacaggttcacactgtgatgaatgattgggtgccagtgaacaggttcccactgtgatgagtgagtgggtgacactgaacaggatagcactgtggtgagtgagtgcctgacagggaacagtttcccactgtggtgaattagtaactgacagtgaacagtttcctagtgtgatgaaaaaggagagacagtgaaaagtttcaaactgtgaagaatgagcgagtgacagtgaacaaattcctcctgtaatgaattattgggtgactgtgaagacgtttccactgtgatgaatgagtggatgacattgaacaggttcccactgtgatgagtgagtggtgacaatgaataggttgccagtgtgatgaatgaatgggtgacagtaagcaggtttcctctgtgatgaatgagtgggtgacagttaatagattcctcctgtaatgaataagttggttacatccaacagattcccaatgtaatgagggagcggctgagagtgaacaggttcccactgtggtgaataagtgggtaacagtgaagacgttccctctgtgatgagtgagtgggtgacagtgaacaggttcccattgtgaagagtgagtgggtgatagtgaacaggttttcactgtggtgaataagtggctgagagagaagaggtaaccactgtggtaaatgtgtgactgacaatgaacacgctcccagtgtgagaaatgagtgggtgacagtgaacaggttcccactgtgatgagtgagttgctgactgtaagcaggttcttaatgtggtgactgagaggctgacagtgaacaggtttctactgtggcaaatgagtgggtgtcagtaaactggttcccaacttggtgaatgactggctgacagtgaacatgttcccactgtgaaaacgagtggctgaaggtgaacaggttcctcctgtaaagaataagtgggtaacagtgagcaggttaccactgtggtgaatgtgtggattatagtgaagaggtttccactttaaagacagagcgggtgacagtgaataggttcctcctgtaatgaatgagtgggtgacagtgaacaggcttccactgtgatgaatgcgtgggtgacagtgaacagggtcccactgtgttgaatgagtggctgacactgaactggttcccactgtggtgaatgagtggctcacagttaacagg

SEQ ID NO: 681703 - DNA, 633 bp, Homo sapiens
tctcagctcccctggctccaggtaacgtcaaagaatgagccccttttcagcctgaggatagataccaaggaaacagcaaacaaatttaacaagatattttacttgcttcaggtctttccaaaccttgtcgggagtgcaagaccacagtggatttgggaggagacgcagagaatagcctttgagccactgggaaagaaattgctgagaatcacaggttataatcttccaagtcctatcttctccctggaggtccagacagccccttttgttgcatggtgtgattttatttctattaatctccctcagctgctggggagatcccacatctagtttaaaggatgctcccaggctattattcagcaactcactcactctggctcsgcacaaacgtcagttcttacgcagcataactcggtttctgcaaaatgggactaatttcctcatctcatctaccttcgtaacggtgctctgagggacctagtgagatatagatgagtgtctcagaactagatgatattgccaaagtctgccaaagccaatctctcaactccaggcctgattgctctaggatcgttgaattttagagccctttgcttattttccaaaggaggaaataaaggcccagtgaggcca

SEQ ID NO: 681704 - DNA, 633 bp, Homo sapiens
tctcagctcccctggctccaggtaacgtcaaagaatgagccccttttcagcctgaggatagataccaaggaaacagcaaacaaatttaacaagatattttacttgcttcaggtctttccaaaccttgtcgggagtgcaagaccacagtggatttgggaggagacgcagagaatagcctttgagccactgggaaagaaattgctgagaatcacaggttataatcttccaagtcctatcttctccctggaggtccagacagccccttttgttgcatggtgtgattttatttctattaatctccctcagctgctggggagatcccacatctagtttaaaggatgctcccaggctattattcagcaactcactcactctggctcggcacaaacgtcagttcttacgcagcataactcggtttctgcaaaatgggactaatttcctcatctcatctaccttcgtaacrgtgctctgagggacctagtgagatatagatgagtgtctcagaactagatgatattgccaaagtctgccaaagccaatctctcaactccaggcctgattgctctaggatcgttgaattttagagccctttgcttattttccaaaggaggaaataaaggcccagtgaggcca

SEQ ID NO: 681705 - DNA, 1992 bp, Homo sapiens
agggaaggagggaaggagagaaagagaggaaggaaggaagggtccaaacccactgcctgaagcaacacctgctgcctgctgcagggtccatcattcaatcgttttaacagtgacactaaaactagatggggaaagtgtgacagtcagtatgtagaggtaattcaaactcaaacgcaacagctcaaattgatgagcagagaaagcacaccaagtaggtacacaggtggtctcaatgaattcatttagataatatacgggactttggaacaggtccaaggtcatgatgcttgcacattgctccatgartcttaaagatgtagccttctaagttgaacatctgatatcaacctataatatgttccaaaaccttcccaagacctactcttctggggccaactttatcacctagtgttgaaatagtgtttttcaatgaattctttattaaacttgtttcttgacatatgacctgtcaaccaagcgggctgctgtctcctaaaatatagatctggcttttctaagtcccacaccttgactgggcactgctttgggaaaggtttctcttttgatggatatttttttgctgaaatagatcaagtcctttcagtctgtcttcttgtcatccctgaagcatttatgccttgcttaagcccttcattataatcagctgtccttagcttgctatttcctgcaagggctttgcctcaatcatagatgcattagaacaattgcccttttagctgtggaccaagttatctttggggtgccctatgtaaatgagaacacttgaaaatgctaatttataatgagccaaaaattgataacaatatctctatgagtgaactggtgagaaggccaaatggatggacgagagagaacgtggctgggaaaaaggagtgagctcatcaaaagcacggacaggaaaaaagtgaagacagagaaacatgggcaggtcatgattgccactggggggtggttcgaggcaggagagcaagagaaaaagaataatgttttgttactgtcctgacagccatgtaacgaatataagacttgaagtccccaaggggaaaaagtggatctgattagaataactgatgtgataaaggatggggaaaaattgtgtacataagaaaagcacagccgagcgtggtggcttgcacctataatcccagcactttaggaggccgaggtgggtgaatcacctgaggtcagaagtttgagaccagcctggccaacatggtgaaaccctgtctctactaaaaatgtaaaaattagctgggcatggtggtgtgcccctgtaatcctagctacttgggaggctgaggtgggagaattgcttgaacctgggaggtgagcctgcagtgagctgagcctgggcgacacagcaagaccctgtctcaaaaaaaaaaaaaaagaaaaagaaaagcaggccaggtgcagtggctcactccagtaattccaacactttgggaggttgaggcaggtggatagcctaaggccaggagttcgagaccagcctggcccacatggtgaaaccccatctctactaaaaatacaaaaataaaaaataaaattagtcggccatggtggcagatgcctgtaatcccagcttcttgggaggctgagacacgagaatcacttgaacccaggaggcagaggctgcagtgagccaagatcataccactgcacttcagtctgggcaacagagcaagcctctatctcaaaaaaaagaagaaaagaaaatagtacaaaattaaaaggaagaagacattaaggcaattagaaatcctggggagtgtgagagaaggaaagctttcaagaaaaaaatataatcataatacatctgttggctcttcggtgaacaatatttaccagtgacataattataaataaccgtatcattgtatgagaaggatgggagacaggcagtataagagagctaaatccaccaccattgtttcagaatgtaaatagataatatctgaaactgatgca

SEQ ID NO: 681706 - DNA, 1992 bp, Homo sapiens
agggaaggagggaaggagagaaagagaggaaggaaggaagggtccaaacccactgcctgaagcaacacctgctgcctgctgcagggtccatcattcaatcgttttaacagtgacactaaaactagatggggaaagtgtgacagtcagtatgtagaggtaattcaaactcaaacgcaacagctcaaattgatgagcagagaaagcacaccaagtaggtacacaggtggtctcaatgaattcatttagataatatacgggactttggaacaggtccaaggtcatgatgcttgcacattgctccatgagtcttaaagatgtagccttctaagttgaacatctgatatcaacctataatatgttccaaaaccttcccaagacctactcttctggggccaactttatcacctagtgttgaaatagtgtttttcaatgaattctttattaaacttgtttcttgacatatgacctgtcaaccaagcgggctgctgtctcctaaaatatagatcyggcttttctaagtcccacaccttgactgggcactgctttgggaaaggtttctcttttgatggatatttttttgctgaaatagatcaagtcctttcagtctgtcttcttgtcatccctgaagcatttatgccttgcttaagcccttcattataatcagctgtccttagcttgctatttcctgcaagggctttgcctcaatcatagatgcattagaacaattgcccttttagctgtggaccaagttatctttggggtgccctatgtaaatgagaacacttgaaaatgctaatttataatgagccaaaaattgataacaatatctctatgagtgaactggtgagaaggccaaatggatggacgagagagaacgtggctgggaaaaaggagtgagctcatcaaaagcacggacaggaaaaaagtgaagacagagaaacatgggcaggtcatgattgccactggggggtggttcgaggcaggagagcaagagaaaaagaataatgttttgttactgtcctgacagccatgtaacgaatataagacttgaagtccccaaggggaaaaagtggatctgattagaataactgatgtgataaaggatggggaaaaattgtgtacataagaaaagcacagccgagcgtggtggcttgcacctataatcccagcactttaggaggccgaggtgggtgaatcacctgaggtcagaagtttgagaccagcctggccaacatggtgaaaccctgtctctactaaaaatgtaaaaattagctgggcatggtggtgtgcccctgtaatcctagctacttgggaggctgaggtgggagaattgcttgaacctgggaggtgagcctgcagtgagctgagcctgggcgacacagcaagaccctgtctcaaaaaaaaaaaaaaagaaaaagaaaagcaggccaggtgcagtggctcactccagtaattccaacactttgggaggttgaggcaggtggatagcctaaggccaggagttcgagaccagcctggcccacatggtgaaaccccatctctactaaaaatacaaaaataaaaaataaaattagtcggccatggtggcagatgcctgtaatcccagcttcttgggaggctgagacacgagaatcacttgaacccaggaggcagaggctgcagtgagccaagatcataccactgcacttcagtctgggcaacagagcaagcctctatctcaaaaaaaagaagaaaagaaaatagtacaaaattaaaaggaagaagacattaaggcaattagaaatcctggggagtgtgagagaaggaaagctttcaagaaaaaaatataatcataatacatctgttggctcttcggtgaacaatatttaccagtgacataattataaataaccgtatcattgtatgagaaggatgggagacaggcagtataagagagctaaatccaccaccattgtttcagaatgtaaatagataatatctgaaactgatgca

SEQ ID NO: 681707 - DNA, 1664 bp, Homo sapiens
aacagaaaagccaaccacctgagcccacccctaattgccaaatcccagaattatgcatgaggtagtaaaagatgccaattcattttatcacattctcataaaggtcagcatctttcataagcagagctgtgttgtagcttcatttgacaaatatttattaagcctattattacatgctaggattgtctaggcactgatgaaataaaatgaaaaaaataaaaataaaaaaaagtttctgccctcatgaagcttacattctagaggtaagagacagaatgttattttgtttttttgagayagggtcttgcattgtcacccaggctggagtgcaatggcacaatcatagctcactgcagcccccacctcccaggctcaggtgattttcccagctcagcctcctgagtagctggaagtgcaggcccactccactgtgcccagctgattttttatttgtttgtggtagagatgaggtcttgctatgttgcccaggctggtctccaactcctgtgctcaaataatcctcccacctccacctcccaaagtgctggaatgacaggcatgagccaccatgcccaaccacagaatttttttttttttaattactaagtgtaacagattgagcaagagtgatgagtgctctggagaaaaagaataacactatgtataaccctatgatccaggaacttttcaaatgagggtgtagagtgttgagaggggctgtaatagtaaatgagaagaccagataaaacctctataaggagatgatcaagtgaagatctgaagcaggtaagggaatgagcctcattgatatctggggaggagtcttccagggcaagggaacagcgagaacagtttctgaggatgcgctggggccaacaagtgtataggattcaaagacagagaagtaaaaggggggcctgattgcgtagggtcgtgtggtgactctaaggaatcttttgtaaattcttgtgtagatttaatattttaacgacgcgtgtggttgataattttaaaaaacatatacagatcaaaaacaggctgggcacagtgactcacgcctgtgataccagcactttgggaggcccaggtgggtggatcacctgagtgtcaggagttcgagaccagcctgggcaacatagtgaaaccccgtctctactaaaagtacaaaaattagccaggcatggtggcgggcatctgtaatcccagctattcaggaggctgaggcagtagaatcgcctgaacccgggaagcagaggttgcagtgagctgagatcgcgccgttgcactctagcctgggtgtcagagggagactctgtctcaaaaatatatatatacgtgtgtgtgtgtgtgtgtgtgtgtgtgtgtgtgtgtcaaaaacaaatagcaatcctgagctgcacccgtggattgcagtattagtggactctacatgaattttattataatccctggccccatattcacagagcttgctggagacagcaagagtgatgtcatttttgggcacaaactgccctctgctgttcacttttggattaacagccaccattatcacctgaagaagcaaacgctgtcctggtagaaaacagataatcagttatcaggacaccccgtcttccttgccaataagtttgactatttccagaagctcttaaaaaacaata

SEQ ID NO: 681708 - DNA, 1664 bp, Homo sapiens
aacagaaaagccaaccacctgagcccacccctaattgccaaatcccagaattatgcatgaggtagtaaaagatgccaattcattttatcacattctcataaaggtcagcatctttcataagcagagctgtgttgtagcttcatttgacaaatatttattaagcctattattacatgctaggattgtctaggcactgatgaaataaaatgaaaaaaataaaaataaaaaaaagtttctgccctcatgaagcttacattctagaggtaagagacagaatgttattttgtttttttgagatagggtcttgcattgtcacccaggctggagtgcaatggcacaatcatagctcactgcagcccccacctcccaggctcaggtgattttcccagctcagcctcctgagtagctggaagtgcaggcccactccactgtgcccagctgattttttatttgtttgtggtagagatgaggtcttgctatgttgcccaggctggtctccaactcctgtgctcaaataatcctcccacctccacctcccaaagtgctggaatgacaggcatgagccaccatgcccaaccacagaatttttttttttttaattactaagtgtaacagattgagcaagagtgatgagtgctctggagaaaaagaataacactatgtataaccctatgatccaggaacttttcaaatgagggtgtagagtgttgagaggggctgtaatagtaaatgagaagaccagataaaacctctataaggagatgatcaagtgaagatctgaagcaggtaagggaatgagcctcattgatatctggggaggagtcttccagggcaagggaacagcgagaacagtttctgaggatgcgctggggccaacaagtgtataggattcaaagacagagaagtaaaaggggggcctgattgcgtagggtcgtgtggtgactctaaggaatcttttgtaaattcttgtgtagatttaatattttaacgacgcgtgtggttgataattttaaaaaacatatacagatcaaaaacaggctgggcacagtgactcacgcctgtgataccagcactttgggaggcccaggtgggtggatcacctgagtgtcaggagttcgagaccagcctgggcaacatagtgaaaccccgtctctactaaaagtacaaaaattagccaggcatggtggcgggcatctgtaatcccagctattcaggaggctgaggcagtagaatcgcctgaacccgggaagcagaggttgcagtgagctgagatcgcgccgttgcactctagcctgggtgtcagagggagactctgtctcaaaaatatatatatacgtgtgtgtgtgtgtgtgtgtgtgtgtgtgtgtgtgtcaaaaacaaatagcaatcctgagctgcacccrtggattgcagtattagtggactctacatgaattttattataatccctggccccatattcacagagcttgctggagacagcaagagtgatgtcatttttgggcacaaactgccctctgctgttcacttttggattaacagccaccattatcacctgaagaagcaaacgctgtcctggtagaaaacagataatcagttatcaggacaccccgtcttccttgccaataagtttgactatttccagaagctcttaaaaaacaata

SEQ ID NO: 681709 - DNA, 1664 bp, Homo sapiens
aacagaaaagccaaccacctgagcccacccctaattgccaaatcccagaattatgcatgaggtagtaaaagatgccaattcattttatcacattctcataaaggtcagcatctttcataagcagagctgtgttgtagcttcatttgacaaatatttattaagcctattattacatgctaggattgtctaggcactgatgaaataaaatgaaaaaaataaaaataaaaaaaagtttctgccctcatgaagcttacattctagaggtaagagacagaatgttattttgtttttttgagatagggtcttgcattgtcacccaggctggagtgcaatggcacaatcatagctcactgcagcccccacctcccaggctcaggtgattttcccagctcagcctcctgagtagctggaagtgcaggcccactccactgtgcccagctgattttttatttgtttgtggtagagatgaggtcttgctatgttgcccaggctggtctccaactcctgtgctcaaataatcctcccacctccacctcccaaagtgctggaatgacaggcatgagccaccatgcccaaccacagaatttttttttttttaattactaagtgtaacagattgagcaagagtgatgagtgctctggagaaaaagaataacactatgtataaccctatgatccaggaacttttcaaatgagggtgtagagtgttgagaggggctgtaatagtaaatgagaagaccagataaaacctctataaggagatgatcaagtgaagatctgaagcaggtaagggaatgagcctcattgatatctggggaggagtcttccagggcaagggaacagcgagaacagtttctgaggatgcgctggggccaacaagtgtataggattcaaagacagagaagtaaaaggggggcctgattgcgtagggtcgtgtggtgactctaaggaatcttttgtaaattcttgtgtagatttaatattttaacgacgcgtgtggttgataattttaaaaaacatatacagatcaaaaacaggctgggcacagtgactcacgcctgtgataccagcactttgggaggcccaggtgggtggatcacctgagtgtcaggagttcgagaccagcctgggcaacatagtgaaaccccgtctctactaaaagtacaaaaattagccaggcatggtggcgggcatctgtaatcccagctattcaggaggctgaggcagtagaatcgcctgaacccgggaagcagaggttgcagtgagctgagatcgcgccgttgcactctagcctgggtgtcagagggagactctgtctcaaaaatatatatatacgtgtgtgtgtgtgtgtgtgtgtgtgtgtgtgtgtgtcaaaaacaaatagcaatcctgagctgcacccgtggattgcagtattagtggactctacatgaattttattataatccctggccccatattcacagagcttgctggagacagcaagagtgatgtcatttttgggcacaaactgccctctgctgttcacttttggattaacagccaccattatcacctgaagaagcaaaygctgtcctggtagaaaacagataatcagttatcaggacaccccgtcttccttgccaataagtttgactatttccagaagctcttaaaaaacaata

SEQ ID NO: 681710 - DNA, 615 bp, Homo sapiens
aaaaaaaaaaaaaaagagacacataaaggtagcagtcccaaaccaccttgcccatctctctctcttaagtacgcccactcccttttctcaagtgtggacttttcccttaacaaaaaaatctccgaacttttcatgattttctgattcctccttgaattcattcttgcgatggtgttaagagcctggacaccagctggggtcgaggccccaccagcgtctggggagacccctcctagcccaacagtatcagggtcacaaaaatgccaggcttcctggcctcgcatattttatgcccgatttctttccaatctgacttatttgcccgcccccctcctccacctctgcctacatatatccgaatccctagaggggctgtggggaggaaagrcgactagggacactttttttttttttttttttttgagacaaggtttgctcctgttgcccaggctggagtgcaatggcacgatctctgctcactgcaacctctgcctcccgggttcaagcgattctcctgtctcagcctcccgagtagctgggattccaggcatgcaccaccacgcccggctaatttttgtatgttttagtagaggtggggttttgccatgttggcca

SEQ ID NO: 681711 - DNA, 814 bp, Homo sapiens
  misc_feature 5, 6, 7, 8, 9, 10, 11, 12, 13, 14, 15, 16, 17, 18, 19, 20,21, 22, 23, 24, 25, 26, 27, 28, 29, 30, 31, 32, 33, 34,35, 36, 37, 38, 39, 40, 41, 42, 43, 44, 45, 46, 47, 48,49, 50, 51, 52, 53, 54, 55, 56, 57, 58, 59, 60, 61, 62,63: n = A,T,C or G
  misc_feature 64, 65, 66, 67, 68, 69, 70, 71, 72, 73, 74, 75, 76, 77, 78,79, 80, 81, 82, 83, 84, 85, 86, 87, 88, 89, 90, 91, 92,93, 94, 95, 96, 97, 98, 99, 100, 101, 102, 103, 104, 145: n = A,T,C or G
acatnnnnnnnnnnnnnnnnnnnnnnnnnnnnnnnnnnnnnnnnnnnnnnnnnnnnnnnnnnnnnnnnnnnnnnnnnnnnnnnnnnnnnnnnnnnnnnnnnnnnaggggctagagggatgagtttatgctgctgaggttacatgncggagtgaggtatttgggagcaggatgttgtgccagcctgttgtctgtgattagtcatctctcagaacaattgttttccccaacctgggaccccttcctttttgcttacttattttgtcaggactccacgcatattaatacaatgatgtttctaagtgtagatttctttatacttatgattcattaggcttcttgaatctttgaattagattctctcctcaattttggaaaatttgaaaaatccgccattattttcttaaatattctttctgccatattctctttatcccctcttttgggactcagaatatagrtaagactctctgtcttatctacactccatgccacttaacctcttttacatgtttcctgctttgtctcttatggtgaattgtggataacttctgttgatctatgttccaattcactatgtctctactcagctgttgcttttacttttaatcctcttttagagtttttgtcattttcaaagtacctagataattttttatagtttctcggtcccttgccattgcaaaacaatggcaatcttatattttatatgaacaaaccacactgttttatgtccctctgatagttctaaaatcacaaggattagtgggtctgtttacagtgtctcttatttctgctagttcttgctcctggtac

SEQ ID NO: 681712 - DNA, 814 bp, Homo sapiens
  misc_feature 5, 6, 7, 8, 9, 10, 11, 12, 13, 14, 15, 16, 17, 18, 19, 20,21, 22, 23, 24, 25, 26, 27, 28, 29, 30, 31, 32, 33, 34,35, 36, 37, 38, 39, 40, 41, 42, 43, 44, 45, 46, 47, 48,49, 50, 51, 52, 53, 54, 55, 56, 57, 58, 59, 60, 61, 62,63: n = A,T,C or G
  misc_feature 64, 65, 66, 67, 68, 69, 70, 71, 72, 73, 74, 75, 76, 77, 78,79, 80, 81, 82, 83, 84, 85, 86, 87, 88, 89, 90, 91, 92,93, 94, 95, 96, 97, 98, 99, 100, 101, 102, 103, 104, 145: n = A,T,C or G
acatnnnnnnnnnnnnnnnnnnnnnnnnnnnnnnnnnnnnnnnnnnnnnnnnnnnnnnnnnnnnnnnnnnnnnnnnnnnnnnnnnnnnnnnnnnnnnnnnnnnnaggggctagagggatgagtttatgctgctgaggttacatgncggagtgaggtatttgggagcaggatgttgtgccagcctgttgtctgtgattagtcatctctcagaacaattgttttccccaacctgggaccccttcctttttgcttacttattttgtcaggactccacgcatattaatacaatgatgtttctaagtgtagatttctttatacttatgattcattaggcttcttgaatctttgaattagattctctcctcaattttggaaaatttgaaaaatccgccattattttcttaaatattctttctgccatattctctttatcccctcttttgggactcagaatatagataagactctctgtcttatctayactccatgccacttaacctcttttacatgtttcctgctttgtctcttatggtgaattgtggataacttctgttgatctatgttccaattcactatgtctctactcagctgttgcttttacttttaatcctcttttagagtttttgtcattttcaaagtacctagataattttttatagtttctcggtcccttgccattgcaaaacaatggcaatcttatattttatatgaacaaaccacactgttttatgtccctctgatagttctaaaatcacaaggattagtgggtctgtttacagtgtctcttatttctgctagttcttgctcctggtac

SEQ ID NO: 681713 - DNA, 1029 bp, Homo sapiens
atgtttgcagaacactaaaggcaaagagatctatcagcagctagagaaaaaagacagatgtcctttaaaagatcaatagttggagggccaggtgtggtgtctcacatcagttatcccagcactctgggaagcctctgtggcaggaggattgcttaaggccaggagtttgagaccagcctaggcaacatagcaagactgtctctacaaaaatttttttaaaaacttagccaggcatggtggcacagcctgtagtcccagctactcacttaggaggctgaggcaggagaatcatttgagcccaagaggttgcggctgcagtgagccatgactgcaccactgcatcctagccttggcaatagagtgagaccttgtcttaaaaaagaaattcactgcgagttgttatacaacctcttactgctaaattggactggcttttaaaaaaataaataatttgcataacaactgacattgttacatcagtaacaatggaatctagaataagatcaacgtgctgatagaaaataactgtcaatttaatatccagtaaaatatatatataatatatatatttaatatccagtaaaatacatawaatatataaaatatatattatatattttatatattatatatattatattatatataaaatatataatataatatataatatatatatattataatatataatatagagagagagagagagagagatggagtcttactctgtcacccaggctgaagtgcaatggcatgatcccagctcactgcaacctctgcctcccgggttcaagcagttctcctgcctcagcctcctgagtagctgggactacaggcacgcgccaccacacccagctaatttttgtatttttagtagagacaggttttcaccatgttggccaggctggtcttcaactcctgagctcaagcgatgcaccagcctcggcctcccaaaatcctagaattacaggcatgagtcaccatgcccagccagtgaaaatatatttcaagaatgatgtcgacatg

SEQ ID NO: 681714 - DNA, 1029 bp, Homo sapiens
atgtttgcagaacactaaaggcaaagagatctatcagcagctagagaaaaaagacagatgtcctttaaaagatcaatagttggagggccaggtgtggtgtctcacatcagttatcccagcactctgggaagcctctgtggcaggaggattgcttaaggccaggagtttgagaccagcctaggcaacatagcaagactgtctctacaaaaatttttttaaaaacttagccaggcatggtggcacagcctgtagtcccagctactcacttaggaggctgaggcaggagaatcatttgagcccaagaggttgcggctgcagtgagccatgactgcaccactgcatcctagccttggcaatagagtgagaccttgtcttaaaaaagaaattcactgcgagttgttatacaacctcttactgctaaattggactggcttttaaaaaaataaataatttgcataacaactgacattgttacatcagtaacaatggaatctagaataagatcaacgtgctgatagaaaataactgtcaatttaatatccagtaaaatatatatataatatatatatttaatatccagtaaaatacatataatatataawatatatattatatattttatatattatatatattatattatatataaaatatataatataatatataatatatatatattataatatataatatagagagagagagagagagagatggagtcttactctgtcacccaggctgaagtgcaatggcatgatcccagctcactgcaacctctgcctcccgggttcaagcagttctcctgcctcagcctcctgagtagctgggactacaggcacgcgccaccacacccagctaatttttgtatttttagtagagacaggttttcaccatgttggccaggctggtcttcaactcctgagctcaagcgatgcaccagcctcggcctcccaaaatcctagaattacaggcatgagtcaccatgcccagccagtgaaaatatatttcaagaatgatgtcgacatg

SEQ ID NO: 681715 - DNA, 1029 bp, Homo sapiens
atgtttgcagaacactaaaggcaaagagatctatcagcagctagagaaaaaagacagatgtcctttaaaagatcaatagttggagggccaggtgtggtgtctcacatcagttatcccagcactctgggaagcctctgtggcaggaggattgcttaaggccaggagtttgagaccagcctaggcaacatagcaagactgtctctacaaaaatttttttaaaaacttagccaggcatggtggcacagcctgtagtcccagctactcacttaggaggctgaggcaggagaatcatttgagcccaagaggttgcggctgcagtgagccatgactgcaccactgcatcctagccttggcaatagagtgagaccttgtcttaaaaaagaaattcactgcgagttgttatacaacctcttactgctaaattggactggcttttaaaaaaataaataatttgcataacaactgacattgttacatcagtaacaatggaatctagaataagatcaacgtgctgatagaaaataactgtcaatttaatatccagtaaaatatatatataatatatatatttaatatccagtaaaatacatataatatataaaatwtatattatatattttatatattatatatattatattatatataaaatatataatataatatataatatatatatattataatatataatatagagagagagagagagagagatggagtcttactctgtcacccaggctgaagtgcaatggcatgatcccagctcactgcaacctctgcctcccgggttcaagcagttctcctgcctcagcctcctgagtagctgggactacaggcacgcgccaccacacccagctaatttttgtatttttagtagagacaggttttcaccatgttggccaggctggtcttcaactcctgagctcaagcgatgcaccagcctcggcctcccaaaatcctagaattacaggcatgagtcaccatgcccagccagtgaaaatatatttcaagaatgatgtcgacatg

SEQ ID NO: 681716 - DNA, 1029 bp, Homo sapiens
atgtttgcagaacactaaaggcaaagagatctatcagcagctagagaaaaaagacagatgtcctttaaaagatcaatagttggagggccaggtgtggtgtctcacatcagttatcccagcactctgggaagcctctgtggcaggaggattgcttaaggccaggagtttgagaccagcctaggcaacatagcaagactgtctctacaaaaatttttttaaaaacttagccaggcatggtggcacagcctgtagtcccagctactcacttaggaggctgaggcaggagaatcatttgagcccaagaggttgcggctgcagtgagccatgactgcaccactgcatcctagccttggcaatagagtgagaccttgtcttaaaaaagaaattcactgcgagttgttatacaacctcttactgctaaattggactggcttttaaaaaaataaataatttgcataacaactgacattgttacatcagtaacaatggaatctagaataagatcaacgtgctgatagaaaataactgtcaatttaatatccagtaaaatatatatataatatatatatttaatatccagtaaaatacatataatatataaaatatataytatatattttatatattatatatattatattatatataaaatatataatataatatataatatatatatattataatatataatatagagagagagagagagagagatggagtcttactctgtcacccaggctgaagtgcaatggcatgatcccagctcactgcaacctctgcctcccgggttcaagcagttctcctgcctcagcctcctgagtagctgggactacaggcacgcgccaccacacccagctaatttttgtatttttagtagagacaggttttcaccatgttggccaggctggtcttcaactcctgagctcaagcgatgcaccagcctcggcctcccaaaatcctagaattacaggcatgagtcaccatgcccagccagtgaaaatatatttcaagaatgatgtcgacatg

SEQ ID NO: 681717 - DNA, 1933 bp, Homo sapiens
ctctgagcgggagagtctgtgtgtatgtgtcttccccggaatccacaccaccccaccctcctcctgtcccgtggtttcatcatatctctttgcataccccatgtcttccccagttgtcccctggagtttggggggacatcccgcctcaggcatccttctcaaggggaagccaagagaggcatcaggatgggtgggtttctgattgtggcaacgtttgcaaccgttcacgattcaataaatattggatgaatttaacygaatgtgcctgtgaggagtgtatcttgttttacccctgtgcctcctccctccaggaccccgtcccagaaattagcaaccacgtgttgagtgctcagtgcaccaaccctctgtagggaagcaccttactgcaatgctgaggttgttattttttaagacagtcttgctctggagtgcagtggtgcgatcccagcttactgcagtgtccctctcctgggttcaagtgattctcccgtctcagcttcccgagtagctaggaccacaagtgtgaactgctatgcctggctaatctttttctttttctttttctttcttttttttttttttttttgagacggagtcttgttctgtcgcccaggctggagtgcagtggtgcgatcttggctcactgcaacctccgcctcccggttccagcgattctcctgcctcagcctcccatgtaactggaattacagatgcccgccaccacacccagctaattttttgtatttttagtagcgatggggtttcaccatgttggccagactggtctcaaactcctgaccttgtgaccctcccgcctcggcctcccaaagtgctgggactacaggtatgagccaccgcgccggacgtaatttttggattttgtaatagagacagggtttcaccatgttggccaggctcgtcttgaactcctgacctcaggggatcctcccgccttggcctcccaaagtgctgggattataggcgtgagccaccatgcccggctgtttttgtaactattgatagccatgaagtgcatggacactttcctcaaatcaggtacaattctaaactgtttcactctcaaaccttgacccactcattctgggaggacagaaataaaattgttcctcccccaagtcaaatgctgcgactcctgaaacccaccacattccatggatctctgctcagtgacatctgggaaacacaagacagccatcaacaatagcaacaagaggccgggtgcagtggctcacgcttgtaatccggcactttgggaggccaaggtgagcagattgcttgaggccaagagttcaagaccagcctgggcaacatggtgaaaccccacctctactaaaattagcccaagtgtggtggcaggtgcctgtaatcccagctactcgccacctgccactaggttgagaaccgcttcaacctgggaagcagaggttgcagtgagctgagatcgtgccactgcactccagcctgggcgacacactgagacactgtctcaaaaaacaaaaaaaccccaaaccaaatgaacaatagcaacaagaaacaagcccccacatggcttcatttctaatgattctgaggattttcttagtatgacagtcctttggtggtatagttctttattttttttctaagacaggttctctgtcacccaggctagaatgctgtggtaggatcatggctcactgcagcctcgacctcctgggctcaagtgatcctcctgcttcagcctcctgtgtatctggaatcacaggcacatgccatcatgcctggctcttttttttttttttttttagagatggggtcttgctattttgcccaggtggtctcaaactcctggcctcaagtgatcctcctcctttggcctcccaaaatgctgggattacaggcgtgagccacggagcctggcctggtggtgtag

SEQ ID NO: 681718 - DNA, 1933 bp, Homo sapiens
ctctgagcgggagagtctgtgtgtatgtgtcttccccggaatccacaccaccccaccctcctcctgtcccgtggtttcatcatatctctttgcataccccatgtcttccccagttgtcccctggagtttggggggacatcccgcctcaggcatccttctcaaggggaagccaagagaggcatcaggatgggtgggtttctgattgtggcaacgtttgcaaccgttcacgattcaataaatattggatgaatttaactgaatgtgcctgtgaggagtgtatcttgttttacccctgtgcctcctccctccaggaccccgtcccagaaattagcaaccacgtgttgagtgctcagtgcaccaaccctctgtagggaagcaccttactgcaatgctgaggttgttattttttaagacagtcttgctctggagtgcagtggtgcgatcccagcttactgcagtgtccctctcctgggttcaagtgattctcccgtctcagcttcccgagtagctaggaccacaagtgtgaactgctatgcctggctaatctttttctttttctttttctttcttttttttttttttttttgagacggagtcttgttctgtcgcccaggctggagtgcagtggtgcgatcttggctcactgcaacctccgcctcccggttccagcgattctcctgcctcagcctcccatgtaactggaattacagatgcccgccaccacacccagctaattttttgtatttttagtagcgatggggtttcaccatgttggccagactggtctcaaactcctgaccttgtgaccctcccgcctcggcctcccaaagtgctgggactacaggtatgagccaccgcgccggacgtaatttttggattttgtaatagagacagggtttcaccatgttggccaggctcgtcttgaactcctgacctcaggggatcctcccgccttggcctcccaaagtgctgggattataggcgtgagccaccatgcccggctgtttttgtaactattgatagccatgaagtgcatggacactttcctcaaatcaggtacaattctaaactgtttcactctcaaaccttgacccactcattctgggaggacagaaataaaattgttcctcccccaagtcaaatgctgcgactcctgaaacccaccacattccatggatctctgctcagtgacatctgggaaacacaagacagccatcaacaatagcaacaagaggccgggtgcagtggctcacgcttgtaatccggcactttgggaggccaaggtgagcagattgcttgaggccaagagttcaagaccagcctgggcaacatggtgaaaccccacctctactaaaattagcccaagtgtggtggcaggtgcctgtaatcccagctactcgccacctgccactaggttgagaaccgcttcaacctgggaagcagaggttgcagtgagctgagatcgtgccactgcactccagcctgggcgacacactgagacactgtctcaaaaaacaaaaaaaccccaaaccaaatgaacaatagcaacaagaaacaagcccccacatggcttcatttctaatgattctgaggattttcttagtatgacagtcctttggyggtatagttctttattttttttctaagacaggttctctgtcacccaggctagaatgctgtggtaggatcatggctcactgcagcctcgacctcctgggctcaagtgatcctcctgcttcagcctcctgtgtatctggaatcacaggcacatgccatcatgcctggctcttttttttttttttttttagagatggggtcttgctattttgcccaggtggtctcaaactcctggcctcaagtgatcctcctcctttggcctcccaaaatgctgggattacaggcgtgagccacggagcctggcctggtggtgtag

SEQ ID NO: 681719 - DNA, 667 bp, Homo sapiens
ggaggaggacactttcctccccagaatcttctggactagagtcaggcttgagcagggaactttccagacctcccgaccccctttccagtccttcccgctccctccaggactcacctaggcccaggagagcagtgaggtgtggagacatggccccggtcccagaactctgcagcagacacaagcagacaggatgtrctggccgggggcctcctgcccgtggggtttccacagcaactgcctcacacaagagggagagctttctgttctgttctttccacccttcccactagtgagatgagagggagggccttggtttctgaaaaatgtcgcttacccgcatgatcagatgaccttaaactagttacccgatgtgtcagcctctttctaaatctatgggacaagacagaataaaggtcgtgcaaccaactgacttggatgtcatcccaactccacacattaacgaccaccgctcttgggcaagatgttacaaaactagaagtcgacatgtccttgtatttaaaatgagagtcatagaaatccttccccaagtttttaatattgtgatctctgctaaaatctcagcaaggtatataatgcattaaaaaagatcctacagtgcgccgggcgcggtggctcacgcctgtgatcccagcactttgggaggctg

SEQ ID NO: 681720 - DNA, 667 bp, Homo sapiens
ggaggaggacactttcctccccagaatcttctggactagagtcaggcttgagcagggaactttccagacctcccgaccccctttccagtccttcccgctccctccaggactcacctaggcccaggagagcagtgaggtgtggagacatggccccggtcccagaactctgcagcagacacaagcagacaggatgtgctggccgggggcctcctgcccgtggggtttccacagcaactgcctcacacaagagggagagctttctgttctgttctttccacccttcccactagtgagaygagagggagggccttggtttctgaaaaatgtcgcttacccgcatgatcagatgaccttaaactagttacccgatgtgtcagcctctttctaaatctatgggacaagacagaataaaggtcgtgcaaccaactgacttggatgtcatcccaactccacacattaacgaccaccgctcttgggcaagatgttacaaaactagaagtcgacatgtccttgtatttaaaatgagagtcatagaaatccttccccaagtttttaatattgtgatctctgctaaaatctcagcaaggtatataatgcattaaaaaagatcctacagtgcgccgggcgcggtggctcacgcctgtgatcccagcactttgggaggctg

SEQ ID NO: 681721 - DNA, 667 bp, Homo sapiens
ggaggaggacactttcctccccagaatcttctggactagagtcaggcttgagcagggaactttccagacctcccgaccccctttccagtccttcccgctccctccaggactcacctaggcccaggagagcagtgaggtgtggagacatggccccggtcccagaactctgcagcagacacaagcagacaggatgtgctggccgggggcctcctgcccgtggggtttccacagcaactgcctcacacaagagggagagctttctgttctgttctttccacccttcccactagtgagatgagagggagggccttggtttctgaaaaatgtcgcttacccgcatgatcagatgaccttaaactagttacccgatgtgtcagcctctttctaaatctatgggacaagacagaataaaggtcgtgcaaccaactgacttggatgtcatcccaactccacacrttaacgaccaccgctcttgggcaagatgttacaaaactagaagtcgacatgtccttgtatttaaaatgagagtcatagaaatccttccccaagtttttaatattgtgatctctgctaaaatctcagcaaggtatataatgcattaaaaaagatcctacagtgcgccgggcgcggtggctcacgcctgtgatcccagcactttgggaggctg

SEQ ID NO: 681722 - DNA, 667 bp, Homo sapiens
ggaggaggacactttcctccccagaatcttctggactagagtcaggcttgagcagggaactttccagacctcccgaccccctttccagtccttcccgctccctccaggactcacctaggcccaggagagcagtgaggtgtggagacatggccccggtcccagaactctgcagcagacacaagcagacaggatgtgctggccgggggcctcctgcccgtggggtttccacagcaactgcctcacacaagagggagagctttctgttctgttctttccacccttcccactagtgagatgagagggagggccttggtttctgaaaaatgtcgcttacccgcatgatcagatgaccttaaactagttacccgatgtgtcagcctctttctaaatctatgggacaagacagaataaaggtcgtgcaaccaactgacttggatgtcatcccaactccacacattaacgaccaccgctcttgggcaagatgttacaaaactagaagtcgacatgtcctygtatttaaaatgagagtcatagaaatccttccccaagtttttaatattgtgatctctgctaaaatctcagcaaggtatataatgcattaaaaaagatcctacagtgcgccgggcgcggtggctcacgcctgtgatcccagcactttgggaggctg

SEQ ID NO: 681723 - DNA, 1671 bp, Homo sapiens
caacaaatgtcagaagacaagaagctgagacacaaacctttatcttgtgactacaatgtagtgttgagtctgctaagaggaatgaattctaaaggagtactctacggattcccctgagaatacagaactaaatccctcaagagacactaaagccgtcctctgtaaaatagcttctccgtacaatgaatactggtaggtggaagggctagaagcaaactgcccaggccaagcaggctacagagggagaaagatttgtttgattttgggcttcaccgggaaggtaagtgtgctaagggaaactgacaataataaaagcaattgctaccactattaatacctgggctaacattaatccaggctggaattcatttgcaaatgtaaaaaaatgaaatccagatatattactatattttttcttgaggcagagtttcgctcttgttgccaggctggagtgcaatggcgcgatctcggcttaatgcaacttccgcctcccaggttcaagtgattctcctgcctcagcctcctgagtagctgggattacaaacatgcaccaccatgcccagctaattttatatatatatatatatatatatatatatatatatwttttttttttttagtagagaccaggtttctccacgttagtcaggctagtctcgaacttccaatctcaggtgatctgcctgcctcggcctcccaaagagctgggattacacgtgtgagccatcgtgcccggccagatatattactattaatagtccaagagtggcatggagctaagcaggcaaagaaaccggaaggatgtgatgggaaataacagacattttaataagttcagtaattagtactgttggtgagctcaaagggatactacagcttcaggctgctataaaaaattttttttaaataatttaaaaactgggtatcggccaggaacggtggctcactcctgtaattctagcactttgggaggccaaggtgggcagatcacctgaggtcaggagttcatgaccagcctggctaacatggtaaaaccctgtctctcctaaaactacaaaaattagccaggcgtggtggcacccgcctgtaatcccagctactggggaggctgaggcaggagaatcacttctacttgggaggtggaggttgcagtgagctgagatcgcgccactgcactctagcctgggtgacagagcaagactccatctcaaaaaaaagataccaaaaaataaagttcttagaaattaaaaatataacatatacaataaaagtttaaatagaaaactaaatcaagatggcagactgggcaatttgattctgttccttcaaactgaaatttcatgaaaataaaatattttaagagtgcatcgaggctgggcgcaatagctcacgcctgaaatcccagtactctgggaggctgagaagggcggatcacttcaggccaggagtttgagaccaatctgggcaacaggtgaaacaccgtctctactaataatacaaaaattagccaggtgtggtggcatgtgccagtaatcccagctacttgagaggctgaggcaggagaatcgctagaacccagcaggtggaggttgcagtgagccgagatcacatcactgtactccactgtactccagcctgggtgagagcaagattccacctcaaaaaaaaaaa

SEQ ID NO: 681724 - DNA, 1199 bp, Homo sapiens
tcccacctcagcctcctgaggctggtactacaggcatgtgccatcacacccagctaacttttcttttttggtagagatggggtctaactatgttgccaaggctggtctcgaactcctgggctcaagtaatcctcccaccgtggcctcccaaagtgctaggactacaggtgtgagccactgtgccaagcctgcatttcttttttctttttttgagacggagcctccctctgttgccaggctggagtgcagtggcgtgcgatcttgcctcactgtaacctccgcctcccaagttcaagcaattctccctcagccccctgagtagctgagactacaggcgcacgccaccacacccagctaatttttaaatttttagtggagacgaggtttcaacatgttgaccaggctggtctcaaactcctcctgacctcaagtaatccacctgcctcggcctcccaaagtgctgggattacaggcatgactcaccatgcctggccccagcctgcatttctattggactggcagagatggggactggggaacctagagttgagcgggtgggcatgagtatttcacgtaggatggcaaggaaggcccctttgaagaggtgatacctcagcagagacctcaaggaggggaacaagaaagccatgaggcaatccgagggaacagtgttccaggaggagagaacagcaaatgcaaaggccttgaggcagaaatgaagtttgagggatgagggcctggccctcagcaggtgctccccactccagtctcacctgtggccagtcaagaaatccagctgtcatctgccctgtctggttacagtcatcatcgatggcctgaatggggagagacagaagactgtatgacaatcagtggagctcatggaccattcaggcctctgtctagaacaggggttggcaaactttttctttcttttttttctttttgagacggagtcttgctctgtcacccaggctggagtgcaatggtacaatcttggctcactgcaacctccgcctcttgggttcaagcaattctcctgcctcagcctcctgagtagctrggattacaggcacccaacaccacgcccagctaatttttgtattttcagtagagacagggtttcaacatgttggccaggctggtcttgaactgctgacctcagatgatcccccaaagctctgggattacaggcatga

SEQ ID NO: 681725 - DNA, 2164 bp, Homo sapiens
ggctgcaatcagctatgactgcaccacagcactccagtctgggcaacaaagtgagaccctgtctcaaaaaacaacaccgtaggcccagcacggtggctcctgcctgtaatcccagcactttgggaggccaaggcaggtggatcacttgaggtccagagttcaggaccagcatgaccaacatggtgaaaccccgtctctactaaaaatatacaaattagccaggtgtggtggcagacacctgtaatcccagctacttgggagactgagggaggataattgcttgaacccgggaggcggaggttgcrgtgagccaagatcgcgccattgcactccagcctggttgacagagcaagaccctgtctcaaaaagaaaggaaaagaaaaagaatacaccagaaggtacccagagaggccagtgtggatgtacagccagcacataagatgctggttagggacaggcgcagtggctcacgcctgtaatcccagcactctgggaggcccaggcagggggatcacctgaggtcaggagttcaagaccagcctggccaacatggcgaaaccccgtctgtactagcaaatacaaaaattacttgggcgcggtggcacgtgctataatcccagctactccggaggctgagggtggaaaattgcttgaacccgggaggctgaggttgcagtgagccgagatcgcaccactgtactccagcctgggcaacaagagcgaaactccgtctcaaaaaattaaataaataggccgggcgcggtggctcacgcctgtaatcccagcactctgggaggccgaggagggcggatcacggggtcaggagatcaagaccatcctggccaacatggtgaaaccccgcctctactaaaaatacaaaaacttcgccctgtatggcggcacacggctgtattcccagctactcgggaggctgaggcaggagaacggcttgaacccgggaggcagaggctacagtgagccgggatcacaccgctgcactccggcctgggcagcaagagcaaaactctgtctcaaaaaacaaaaaacagaaaaacaaaaagaatcaagtaagtcgaagccacactgataacagccaatttttgtgaaccaagggagtgtcaattcaagaatttacatagatgtctacttttgctatctcctatgtgccaagcaagatacaggctctgggcaatcagaaacaaaagagactcactcgttcctctcacagtactcagtccttactgagataaggacaaaagaaaatgtcctgtctggaatgcagggaaaccagaacttcaggtcaggggacatttccattgaattgtgtggagttgaagctgaaaatacttttttttttttttttttttttacatcacggcatggtttattacgtgatttttttactatacaaacaaaaaatacagaaatgcaatatgtgaatacagctaaatgcagaatggtgacttttttctcttcaagaggccatgattcccatttctagtaaaataaagagaccgcatacaggttggttgtgagattcacaattttgcctagaaatgatctataaatgcatttttcccccctgctacctaccgtaaatcgtaaaaagggagttaaagcaaagtttccttgttggttcctaccatatggaagatgctatattctattttagcagggtcaatatttggaaaatatctaaattaaatattattacaaaaatgaagctgtaatgagattctggctaaagagggcactaaatgagaataatatatatttaaagaatccaaaacaaacaaacaaaaagaggttattataaaaagctctaggtgcactgtaagcatatagggtttttttttcatgtgtttttttttaaacaatggaagtgtcaaaaatagggtcaactgtgttagactaaattacattattgtatatgctgcattgaatggaacctttgtattataattatcatagagaagcacagtttgcatcatattatggcaattcatcgtcaatgaaaaccttccagagtccttttattttggaatctcctgtaaactatcaaaccaccagaacatgactgtacaacagtaaaatgttctcttgcattaaactgaagagacctgtttaataaaaaaagaaaaagaaaatgtaggaaaggtactta

SEQ ID NO: 681726 - DNA, 1528 bp, Homo sapiens
ccgctcccagccgtaagtttttgtatttttagtagagatgtggttttgctatgttggccaggctggtcttgaactcctggcctcaagtgatttgcctgccttggccttttttttcttgagacaagttcctgctgggtcacccagtggcgtaatcatggttcactgcagccttgaactcctgagctcaaaggatcctcccacctcagccccctgagtagctttgattagaggtgtgtgccaccatacctggtgtgtgcgtgtgtgtgtgtgtgtgtgtgtgtgtgtgtaaagaaagcaattttcctaactcagcctgtcaaagtactgggattacaggcgccatcccctgcacccagcctaaactttgattgcatcactgcactccagcctgggccacagcaagatcctgtccaaaaaaaaagcaattggagtttgaacccaggcagagtaattctagattctcactcgaatcacagtgacctccaatgcaattggtgagccacgatggtccccttcaacagacaaggaaattttttttttttgagatggagtctcactctgtcacccaggctggagtgcagtggtgtgatcttgggtcactgcaagctccacctcccgggttcacgccattctcctgcctcagcctcctgagtagactgggactacaggcgcccgccaccacgcccggctaattttttgtgtttttattagagacggggtttcgccattttagccaggatggtctcgatctcctgacctcgtgatccacccgcctcggcctcccaaagtgctgggattataggygtgagccaccgcgcccggcctcagacaaggaaattatccaaggtcacacagccagtagatgacatagctaatatgtggcctcatctgtatgccccctaattgcatacaccagtgcataacgtatttgtccatccagcttatctaccctcatgctcccagcccaatgtccagcctcctccagaaagaactggtcatcatccctcaccagaggactcggagtttgcagccaggatggctcagccgcttgcaaagcagtcggacacctgtgtcccctagggcgttgttggtcaggtaaaggtcggtcaaggtctggttgatccccagggtgaagtaaagattctcacaagccttggctgtgaggccacagctatccagcctggtgaagataaggagttggttaaggtaacaccaggggctacttatgttattcggaggcagtgtctcaccctgtctcccaggctggagtacagtggtgagatttctgttcactgcaacctccgcctcccaggttcaagcgattctcctgcctcagcctcctgagtagctgggattacaggtgtgcaccaccaccaattagcatggctaattttgtatccttttatttttgttttgtttgagatggagtctccctctgttgcccatgctggagtgctgtggcatgatctcggctcactgcaacctctgcctcccgggttcaagtgattctcctgcctcagcctcccca

SEQ ID NO: 681727 - DNA, 1528 bp, Homo sapiens
ccgctcccagccgtaagtttttgtatttttagtagagatgtggttttgctatgttggccaggctggtcttgaactcctggcctcaagtgatttgcctgccttggccttttttttcttgagacaagttcctgctgggtcacccagtggcgtaatcatggttcactgcagccttgaactcctgagctcaaaggatcctcccacctcagccccctgagtagctttgattagaggtgtgtgccaccatacctggtgtgtgcgtgtgtgtgtgtgtgtgtgtgtgtgtgtgtaaagaaagcaattttcctaactcagcctgtcaaagtactgggattacaggcgccatcccctgcacccagcctaaactttgattgcatcactgcactccagcctgggccacagcaagatcctgtccaaaaaaaaagcaattggagtttgaacccaggcagagtaattctagattctcactcgaatcacagtgacctccaatgcaattggtgagccacgatggtccccttcaacagacaaggaaattttttttttttgagatggagtctcactctgtcacccaggctggagtgcagtggtgtgatcttgggtcactgcaagctccacctcccgggttcacgccattctcctgcctcagcctcctgagtagactgggactacaggcgcccgccaccacgcccggctaattttttgtgtttttattagagacggggtttcgccattttagccaggatggtctcgatctcctgacctcgtgatccacccgcctcggcctcccaaagtgctgggattataggtgtgagccaccgcrcccggcctcagacaaggaaattatccaaggtcacacagccagtagatgacatagctaatatgtggcctcatctgtatgccccctaattgcatacaccagtgcataacgtatttgtccatccagcttatctaccctcatgctcccagcccaatgtccagcctcctccagaaagaactggtcatcatccctcaccagaggactcggagtttgcagccaggatggctcagccgcttgcaaagcagtcggacacctgtgtcccctagggcgttgttggtcaggtaaaggtcggtcaaggtctggttgatccccagggtgaagtaaagattctcacaagccttggctgtgaggccacagctatccagcctggtgaagataaggagttggttaaggtaacaccaggggctacttatgttattcggaggcagtgtctcaccctgtctcccaggctggagtacagtggtgagatttctgttcactgcaacctccgcctcccaggttcaagcgattctcctgcctcagcctcctgagtagctgggattacaggtgtgcaccaccaccaattagcatggctaattttgtatccttttatttttgttttgtttgagatggagtctccctctgttgcccatgctggagtgctgtggcatgatctcggctcactgcaacctctgcctcccgggttcaagtgattctcctgcctcagcctcccca

SEQ ID NO: 681728 - DNA, 1528 bp, Homo sapiens
ccgctcccagccgtaagtttttgtatttttagtagagatgtggttttgctatgttggccaggctggtcttgaactcctggcctcaagtgatttgcctgccttggccttttttttcttgagacaagttcctgctgggtcacccagtggcgtaatcatggttcactgcagccttgaactcctgagctcaaaggatcctcccacctcagccccctgagtagctttgattagaggtgtgtgccaccatacctggtgtgtgcgtgtgtgtgtgtgtgtgtgtgtgtgtgtgtaaagaaagcaattttcctaactcagcctgtcaaagtactgggattacaggcgccatcccctgcacccagcctaaactttgattgcatcactgcactccagcctgggccacagcaagatcctgtccaaaaaaaaagcaattggagtttgaacccaggcagagtaattctagattctcactcgaatcacagtgacctccaatgcaattggtgagccacgatggtccccttcaacagacaaggaaattttttttttttgagatggagtctcactctgtcacccaggctggagtgcagtggtgtgatcttgggtcactgcaagctccacctcccgggttcacgccattctcctgcctcagcctcctgagtagactgggactacaggcgcccgccaccacgcccggctaattttttgtgtttttattagagacggggtttcgccattttagccaggatggtctcgatctcctgacctcgtgatccacccgcctcggcctcccaaagtgctgggattataggtgtgagccaccgcgcccggcctcagacaaggaaattatccaaggtcacacagccagtagatgacatagstaatatgtggcctcatctgtatgccccctaattgcatacaccagtgcataacgtatttgtccatccagcttatctaccctcatgctcccagcccaatgtccagcctcctccagaaagaactggtcatcatccctcaccagaggactcggagtttgcagccaggatggctcagccgcttgcaaagcagtcggacacctgtgtcccctagggcgttgttggtcaggtaaaggtcggtcaaggtctggttgatccccagggtgaagtaaagattctcacaagccttggctgtgaggccacagctatccagcctggtgaagataaggagttggttaaggtaacaccaggggctacttatgttattcggaggcagtgtctcaccctgtctcccaggctggagtacagtggtgagatttctgttcactgcaacctccgcctcccaggttcaagcgattctcctgcctcagcctcctgagtagctgggattacaggtgtgcaccaccaccaattagcatggctaattttgtatccttttatttttgttttgtttgagatggagtctccctctgttgcccatgctggagtgctgtggcatgatctcggctcactgcaacctctgcctcccgggttcaagtgattctcctgcctcagcctcccca

SEQ ID NO: 681729 - DNA, 1528 bp, Homo sapiens
ccgctcccagccgtaagtttttgtatttttagtagagatgtggttttgctatgttggccaggctggtcttgaactcctggcctcaagtgatttgcctgccttggccttttttttcttgagacaagttcctgctgggtcacccagtggcgtaatcatggttcactgcagccttgaactcctgagctcaaaggatcctcccacctcagccccctgagtagctttgattagaggtgtgtgccaccatacctggtgtgtgcgtgtgtgtgtgtgtgtgtgtgtgtgtgtgtaaagaaagcaattttcctaactcagcctgtcaaagtactgggattacaggcgccatcccctgcacccagcctaaactttgattgcatcactgcactccagcctgggccacagcaagatcctgtccaaaaaaaaagcaattggagtttgaacccaggcagagtaattctagattctcactcgaatcacagtgacctccaatgcaattggtgagccacgatggtccccttcaacagacaaggaaattttttttttttgagatggagtctcactctgtcacccaggctggagtgcagtggtgtgatcttgggtcactgcaagctccacctcccgggttcacgccattctcctgcctcagcctcctgagtagactgggactacaggcgcccgccaccacgcccggctaattttttgtgtttttattagagacggggtttcgccattttagccaggatggtctcgatctcctgacctcgtgatccacccgcctcggcctcccaaagtgctgggattataggtgtgagccaccgcgcccggcctcagacaaggaaattatccaaggtcacacagccagtagatgacatagctaatatgtggcctcatctgtatgccccctaattgcatayaccagtgcataacgtatttgtccatccagcttatctaccctcatgctcccagcccaatgtccagcctcctccagaaagaactggtcatcatccctcaccagaggactcggagtttgcagccaggatggctcagccgcttgcaaagcagtcggacacctgtgtcccctagggcgttgttggtcaggtaaaggtcggtcaaggtctggttgatccccagggtgaagtaaagattctcacaagccttggctgtgaggccacagctatccagcctggtgaagataaggagttggttaaggtaacaccaggggctacttatgttattcggaggcagtgtctcaccctgtctcccaggctggagtacagtggtgagatttctgttcactgcaacctccgcctcccaggttcaagcgattctcctgcctcagcctcctgagtagctgggattacaggtgtgcaccaccaccaattagcatggctaattttgtatccttttatttttgttttgtttgagatggagtctccctctgttgcccatgctggagtgctgtggcatgatctcggctcactgcaacctctgcctcccgggttcaagtgattctcctgcctcagcctcccca

SEQ ID NO: 681730 - DNA, 612 bp, Homo sapiens
atttatttgtttatttatttatttattgttgagacggagtcttgctgtgtctcccaggctggagtgcagtggcgcgatcgtggcttactgcaacctcctcctccttggttcaaccaattctcctgcctcagcctcctgagaagctaggattacaggcatgcaccaccatgcctggctaatttagattccattttggatgctcccatcaggactgtgtccctgtactggaactcaggtgaacacttggttcaaaatccgtcgcttttctctagacatccagctcagttctcggtaaagataaggtatgtgtagtaggcattgctttttccctttagagacaaaactcaggaggattgccccttggtgaacaaggctaacttgcagattctytgaagcaaggaactggagatggtccttttaggggtttatgttctggattccagaaaacatgcaaacagggacaatgaatgcatctttatttttgtgtccgttttgacctggtcaaggaaaatttcaacaagaaacccagagtgccggagcaagaagatctcaagctgtgactgcaaagggaagccctttctgttgtctaaaagaaaagaaagtgcttccctt

SEQ ID NO: 681731 - DNA, 612 bp, Homo sapiens
atttatttgtttatttatttatttattgttgagacggagtcttgctgtgtctcccaggctggagtgcagtggcgcgatcgtggcttactgcaacctcctcctccttggttcaaccaattctcctgcctcagcctcctgagaagctaggattacaggcatgcaccaccatgcctggctaatttagattccattttggatgctcccatcaggactgtgtccctgtactggaactcaggtgaacacttggttcaaaatccgtcgcttttctctagacatccagctcagttctcggtaaagataaggtatgtgtagtaggcattgctttttccctttagagacaaaactcaggaggattgccccttggtgaacaaggctaacttgcagattctttgaagcaaggaactggagatggtccttttaggggtttatgttctggattccagaaaacatgcaaacagggrcaatgaatgcatctttatttttgtgtccgttttgacctggtcaaggaaaatttcaacaagaaacccagagtgccggagcaagaagatctcaagctgtgactgcaaagggaagccctttctgttgtctaaaagaaaagaaagtgcttccctt

SEQ ID NO: 681732 - DNA, 1311 bp, Homo sapiens
cttctctcttctcctcgtgctgcacacctgggcaagctgaaaaagtctgggagcaggaaattcaaaccacagaagctcctgcccttgagcaggtactctcttgtagccccacccccaaactacaataaaaacccaggccaggaggctttctttgctctctgaagctatgtcacacctgcttgggcagcctgccctgctttccccaagacctcaatgatcacagtagtgagtcttttcataccctttggtgtctgttctccacgctgttattagtgtcaacattggaacgacacaggaattgttaccatgagcatggtgttcagacattgactgtcaccccatgggtctgtcttctcttgcactgaattgctacctgctctgttgcctgatggccagcatgcactttcagctgctgctttctgggaagctactactttgagttgtgctactctgtgctgcatgttgagccctgccaagtctgggttctatgtttagccaactggagttggcmgttttgataattccttggcttttttgaagaggaatatgagatttgatactccttaaagtggtcctgggtagtgtttcttggcctggacttatctgtgtgttttagagtgaagctgtgactgctgctgacctggcatacaaggtgctcatgggaaagactacctgccagagcagtcatttttgaaaaagagacaaaagagagggggaaaggcagctgttagatggtgggccgagtccacactcctaatagcacagggctcccaaggacccttaagtgttgctgctgttgctctattgcagcaaggatgctgaccctcaggattatagggcacactcatgtttcctctgcagcattgcaaagggttcattcaaagccagcttaaggcccaggtgcttaaactttataaagcaaccatgagggacaggcccctaagcctgataatagtgatttgtggctctctggagggaaaagaacacccctcccctgtagagaggattttgctgtcaaaatatatccagggacaaaaacaaaaacaaaacaaacatgttaggaaggaaaggaacaaaagaaaaaaatgctgaaaaagaggtccacaatttgacccaattggaaattccaaatagactaaaggaatttagacggcaaaaaagataaaagagcctctatatcataggttctgtattaattttaacatcttatgtaatgtattaattaacacactataggattagccaatacaagggctcaaattatggttatacctgggagacccactaaaatttaagcaaggtatcccctga

SEQ ID NO: 681733 - DNA, 975 bp, Homo sapiens
agctggattacttgaggccaggagttcgagaccagcctggccaacatggtgaaaccctgtctctactaaagacacaaaatcagcagggtgtggtggcatgtgcctgtaatcccagaattactcgggaggctgaggcaggagaatctcttgaacccaggaggcagaggtggcagtgaactgagatcacgccactacactccagcctgggcaacagagtgagaccctgtctcaaaacaaacaaacaaacaaataaacaaacaaaaagcacaataatttagtcgggtgcagtggcacgcatctgtagttccagctactcgggaggctgagacaggagaattgcttgaacccgggaggcagaggttgcagtgagctgagattgcgagattgcaccactgcacactccagcctgggcagcaagagcgaaactctgtctcaaaaaaaaaaaaaaaaaaaaaaaaaaaaaggccctcctatggctccactgccctcaggacaggggcctggtcacttggctcagtgttcaaggccctttcactataagacagaccatgaagcacatctgaaagctgtccctgctggactcccccaacacagacttcccacgggccctgtctgcccatcactgggtacctggggctgtggccacggaagtaggcgtggacatactcygtgaaggctgtggctatgggcagggcatcctgggagcccaggaccacagggctcggaccccgggagactcctgggggtggtggagagggaatggggaacaacggatagacagtgtgaatataggctccaggctcgagactccctccgcccaaccacacctctgccaacagagaagccacccacccagaccagagaaggtgacactgaggcccaaagccaggcccaggaccgccctcacataccgtgtcctgtctgggataagaagctgggccgttccaaggcagtgctggcggctgaagagcccag

SEQ ID NO: 681734 - DNA, 975 bp, Homo sapiens
agctggattacttgaggccaggagttcgagaccagcctggccaacatggtgaaaccctgtctctactaaagacacaaaatcagcagggtgtggtggcatgtgcctgtaatcccagaattactcgggaggctgaggcaggagaatctcttgaacccaggaggcagaggtggcagtgaactgagatcacgccactacactccagcctgggcaacagagtgagaccctgtctcaaaacaaacaaacaaacaaataaacaaacaaaaagcacaataatttagtcgggtgcagtggcacgcatctgtagttccagctactcgggaggctgagacaggagaattgcttgaacccgggaggcagaggttgcagtgagctgagattgcgagattgcaccactgcacactccagcctgggcagcaagagcgaaactctgtctcaaaaaaaaaaaaaaaaaaaaaaaaaaaaaggccctcctatggctccactgccctcaggacaggggcctggtcacttggctcagtgttcaaggccctttcactataagacagaccatgaagcacatctgaaagctgtccctgctggactcccccaacacagacttcccacgggccctgtctgcccatcactgggtacctggggctgtggccacggaagtaggcgtggacatactctgtgaaggctgtggctatgggcagggcatcctgggagcccaggaccacagggctcggaccccgggagactcctgggggtggtggagagggaatggggaacaacggatagacagygtgaatataggctccaggctcgagactccctccgcccaaccacacctctgccaacagagaagccacccacccagaccagagaaggtgacactgaggcccaaagccaggcccaggaccgccctcacataccgtgtcctgtctgggataagaagctgggccgttccaaggcagtgctggcggctgaagagcccag

SEQ ID NO: 681735 - DNA, 1202 bp, Homo sapiens
cctgtaatcccagtactttgtaagcccaaggcaggtggatctctgaggccaagagttcaagactagcctagccaacatggcaaaaccccgtctctactaaaaatacaaaaaaaattagctgagcgtggcggcacaagcctgtagtcccagctacttgggaggctgaggtacgagaattgcttgaacccaggaggcggagcttgcaagatcatgccactgcactgcggcctgggggacagagtgagactctgtctcaaaaaaaaaaaaaaaaagtgcataggtacaacttgctttgcagatggaaatacactgcacataaaacctacaattgtggccaggtgcagtggctcatgcctgtaatcccaacactttgggaggctgaggcaggcggatcacctgaggtcgggagttgagaccagcctgaccaacatggagaaaccccatctctactgaaaatacaaaattagcctggcatggtggcacatgcctgtaatccctgttacttgggaggctgaggcaggagaatcgcttgaacccaggaggcggaggttgcagtgagctgagatcgcgccactgcactccagcctgggtgcagtgcaagacgtcgtccaaaaaaaacaaaacaaaacaaaaaaaaccctacagttgcctagaactcaacgaayacctcttgaatggcagcatgatgagatctaagatgatctcatcttagatgatatggcagcagagagatctaagatgttagatctaccttaccgccctctcaacagcccatcctactccaagtgactgccaggaatcagatgatgcgcctccccctgctaaaaattcatcagtggttacaacataaaccacactcctctctctgcaccactcccatggccctgcatgacctgccgcgcaccatattcgctttctgacctccacaccccgcctccactctgctccagtggtgccctggccacctcgctgctctttgaccaaaataagcccgtcctgccccactccaggacatcaccaccagctatccggtagagccccctgctcctcgggctttccaccagctcactccttgatcatctggagacagctccgaagtcacctcctcagagtggcttccctgacccatcacttcgacatttcattgtttccttcattgctctgaataggacaaaagattgttttgcacttgttgatttact

SEQ ID NO: 681736 - DNA, 1202 bp, Homo sapiens
cctgtaatcccagtactttgtaagcccaaggcaggtggatctctgaggccaagagttcaagactagcctagccaacatggcaaaaccccgtctctactaaaaatacaaaaaaaattagctgagcgtggcggcacaagcctgtagtcccagctacttgggaggctgaggtacgagaattgcttgaacccaggaggcggagcttgcaagatcatgccactgcactgcggcctgggggacagagtgagactctgtctcaaaaaaaaaaaaaaaaagtgcataggtacaacttgctttgcagatggaaatacactgcacataaaacctacaattgtggccaggtgcagtggctcatgcctgtaatcccaacactttgggaggctgaggcaggcggatcacctgaggtcgggagttgagaccagcctgaccaacatggagaaaccccatctctactgaaaatacaaaattagcctggcatggtggcacatgcctgtaatccctgttacttgggaggctgaggcaggagaatcgcttgaacccaggaggcggaggttgcagtgagctgagatcgcgccactgcactccagcctgggtgcagtgcaagacgtcgtccaaaaaaaacaaaacaaaacaaaaaaaaccctacagttgcctagaactcaacgaacacctcttgaatggcagcatgatgagatctaagatgatctcatcttagatgatatggcagcagagagatctaagatgttagatctaccttaccgccctctcaacagcccatcctactccaagtgactgccaggaatcagatgatgcgcctccccctgctaaaaattcatcagtggttacaacataaaccacactcctctctctgcaccactcccatggccctgcrtgacctgccgcgcaccatattcgctttctgacctccacaccccgcctccactctgctccagtggtgccctggccacctcgctgctctttgaccaaaataagcccgtcctgccccactccaggacatcaccaccagctatccggtagagccccctgctcctcgggctttccaccagctcactccttgatcatctggagacagctccgaagtcacctcctcagagtggcttccctgacccatcacttcgacatttcattgtttccttcattgctctgaataggacaaaagattgttttgcacttgttgatttact

SEQ ID NO: 681737 - DNA, 679 bp, Homo sapiens
gaacccactgcccgcccacacagtccctggaaggtagggccaggactggtaatggggaggcaggttagggtgggaaacaggcggagcccctcggagccagccttggccacctgtctccacttctctgtccttcatccctaccaggcaagctcttccgctgctcagccctgagctgcaccgagaccttccccagcatgcaggagctggtggctcacagcaaactgcactacaaacccaatcgctacttcaagtgagaccctgacctcttgagctccgccctgccctagcctcaccctatgtgtgggctccaggccttcctcccttcctggtcagggtgttggagggcgggacttgatgtgggtgggcctttggggaagccccgccctcaactccctggatggggcggggcatacgtgggcgtggccccacccagccaggctttacctcccaagtggaaaaccggccgcctaacttaaaattgagacttctttccgggtttccccgggtttccccaggttcccacccgaagtggtcaggaagggtcgctgccacagttgtacaggagcggggaggtgattagtgcccaggctccgttcccacgctcgaagggcgggtggcattgcacaggacactctccctggtscccctggaggcccagcccagcccaggcctctgccca

SEQ ID NO: 681738 - DNA, 643 bp, Homo sapiens
catcttggagaggaagggacagctgtgacattggcagtaaggctggatgttgtggaagtaggttcctcatcttgaaattgcagacatggtggtgtgaccttgaggtcaaaagtctagctgagatctccaattctgctcctccagtctttccaatcatttttttaaaaagctgtagtgtaaatagtwcattttaaacggtataatcaccctataacttttatttctgttttttaaaaatagtgtgcacctataattataattaagttaatttagtgcagactgggaaatataacaaaaattaagcacattctctgggactggtataatattaactctggaaatttggcacccatccccacctgctagaatttgctggcatggaaacacattcctactcctggcacagtgcctaatgcaaaacaggagctcagttcatgagcactgaacagataaataccagtagaagtaataaacagaagttttataccaaaataatgtataaaaatgagctttaagaaaaataggagtcatgtaaggaagtttgggaggggtataaagggagtttaatattttaatacaaagcaacttccaattatttttaagcatctaaatctttgtattaaggcccttcctgtttgaaata

SEQ ID NO: 681739 - DNA, 589 bp, Homo sapiens
cggtgctgggattacaggcatgagccaccgcgcatggccaagagagctcatttctgagctacactggtttccgtacatctaccaccctatttggtgcgctctttctgagcattttatttaagttatatgagcagcagacagcaggactggaaggaaaagaatgctgatggccttgaaaatgttatgagcaaaagcaaaaaagcaggggaaatagttgaattttttaaaaaataagcacttttactactcttgaattgcatgaaaataatgtcaaagccaacatgcttttcaggaatttgttggaccttgacttttactctctgtagcactttggcccttttcaagttctctgtccatattaatggctcttgaaacctggagaagtcaagtccataaaacactagagcacctcttgtagtggaacctgccacgcacatcagcgcagcttagctcccagggttctatagagcaacggtgaggccgacactaaattctgtaactagctagccacataggccgactcaggaggsccctatgaccacagattccagccccgcctcctacccaacccaatgttctcacatgttcc

SEQ ID NO: 681740 - DNA, 605 bp, Homo sapiens
aggcaggagactgacagagtataggaagttatgagtgaaacctgaagtcatgtgacccatgcttaaacaaatgatggccctggaatgaagaactgtgaattatgcaggtcaaggagacggctcagcaaacccttgtagtgttgtcaagcaaaagcccctttgtgcactgagatcacttctttgtctgggtgttctttatacctacaactctggccaatatccttcattattttcttgggcgaatggaaccaaacagtagagacacattctggtacaggtgaatgagtgatatgcatgacatcccccaatcagtgcttcaggcagtacatgcagtaccactttcaacatgctgctgagctcattcttagaggctagagaggtgagtaaggtctatgtatatatcccacattggtttaggactggtaggaacaattagtgtgattaaacatttcagcctgacatcccttgaaagtatttacrgaactcaaaaaagtcacagaatgagctgagatttattttctaaaaatgtcttcaacccatggcactacagttataatcatgctgttccacaatgatatcatggttctaccaaagaaaaattctca

SEQ ID NO: 681741 - DNA, 2663 bp, Homo sapiens
acagcaagttgaaggatgtattttctaaattagatcttgtagcgggggaaggaggaatgtctgggagggcaatggcttcatagttattgttaacaaaggaattttgatttttagtctgtatgagatacttgattttttaattggagcgtagtgctgcttgtgaagaaaggaaagatttgtttaaaggctaactgacctgagagagattttttttttttttttttttttaagacatgggagtcttgctgtgttgcccaggctggaatccagtggctatttgcaggtgcaataatagtgcactctggcctttttgcattggactcctgggcttaagcaaccctcctgcttcagcctcctatagctggaactacaggtgcatgtcacctcatctggctagtattatattttattaggaataatttaaaacatacaagatgcaagagaaaagtataatgaactctgaactatcacttagcttcaactgttttcagaagcatttctgtaatatcatcaaatacctagtcaatgtttacatttttctcattgtctgttaaatttattttagtctgtttgaatttggatccatgtgaaatctatacattgtgattagttgatgttgtttaagtctctttaatctgtaggttctcactccatttctcctttttttcccttgcaaacatttgttgttgaagaaattggattatgtgtcctgtagagttcctacagtgtagtctgagttttgctgattgcaactttctggtgtcatttaccaggtacttctgccccttgtgtttcctataaattggtagttagatctaaaactgcactgcccagtatcactggttgcatgtggctatttaaatttaaattaattaaatgaaattaaaaattctgcctctcagttgccctcaccacactttgagtgctcagtagacacatgtggctactgcccattacaacagcacagataataggatatttccatcatcatagagtgttctgttgaatagcactgaccagatttaagttcagtttttttgcaagatattttcatagctggtggtgaggactctctttatttgtacgtgacattattggtcactgatggatcgttatgtagacccagggtctgccaaaatgatattcaaattctgtctttcttcatttattacttaaaatacttttggaaaaggatcttttcctcatcaactatttgattaccctgagatgaagatcctgtgggacagcaccaaaaattactcatttgatttattccataacatacaacaagtagtcccagattagcaatttaacagcaccaccaccaatatggtgatggaaaatagttgcttgtttgtttgggagtacagatggtctttgacttacaatggggttacatcccagtaaacccgtaaacccagagtaggttgaaaatatcataagatcataagttgaattttcagtttatgataggtttattgggacacagcatatcatcagtcaagaagcatactgaattaatattgtttacatgtcattgtaaagtcaaaaaatcgtaagtcttaccattgtaagttggggactgtctgtgttcatttttgtctttgattatctatagctgtatctcactggggatttacactcaattttctgtatcccgtggttatgccacaaactggatacacagaattcatttgtttcattttacttttgattttaagagttccattgactgactgacagattgattgagtcagggtcttgctgtgtcacctaggctggagtacagtgacactgcgatcatggctcactacagccttgaacttctaggcccaacacatcctcccacctcagcctcccaagtagctgggaccacaggcatgtgccaccatgcctggctaatttttcaattttttgtagagatggggtctagttttgttgcccaggctcgtctcaaactcctaggttcaagtgatcctcttgcctcggccacccagagtgctgggattacagacatgagccactgtgcctggcctaggttccttttaaaaatgaaagattgttttataattatgtaaaatgtttacatgactctgyaatcagatttacagggtcaagtgtactttttttaagtctaacttctatctctgttgcttgtatccttttcttgccacccaccccggacaggtaactatcttttaaaaatggcttgacctggctacgcacgcagtggctcacgcctgtaatcccagcattttgggaggccgaggtgggcagatcacctgaggtcagtagttcgagaccagcctggccaacatggtgaaacgctgtctctactaaaaatacaaaaaattagccgggagtggtggtgtgtgcctgtagtcccagctacctgggaggctgaggcaggagaatagcttgaacccaagaggcagaggttgcaatgagccgagatcacgccactgaactccagcctgggaaacagagtaagactccataaaaaaaaaaaaaaaaaaaaaggcttaatttcctatttttatgaaagcaaatatatatgtgtttttctttgttttcctctttcttgtatgaatggtggtatcttacacttttctctactgagattttgttcacttaacaatgtgtctggaccaggtgtgatggct

SEQ ID NO: 681742 - DNA, 1324 bp, Homo sapiens
attccttattgtctggaaaatctctttgatgttttaagattattcttgtattttaatcaggaattgttttcaacaggaacatgatgtaaatatcctagcatgcaattttcagaaacaagtagtttcccacaattgaatctttgctcctacagggccaaatcctactctttctcttggcatgctctgcacttaagcgcatactacttgtggcatggaatccataaatgttgataaagaactacgcctaattctgtcagaacaattaatcatttttagaaatttttgcttagaaacctggtaaagtgctctgcatgtagcaagtatacgaacacacaaagtttgttgaatagctgcataaaacaaatgggctagattttacttcatatttcaaaattcagagaaagagagtagtattaaaagacataagccaaaaatagatcattgcagactgagtacaaagaaccattctatttcttctcttaaaaaattaaaatttcaaattaagtaccaatgaccaaataagtaacaaacacattcagaaacatactatatgtctacaaagaatacttcaaaatgtgcctccaaacttcaggcacataattccaatttttattgaatrtagagattttatgaaaacaaatccaaagctgtcccatcatggaacagccctctaccatttggttattttaagactgttcaattacttacatggcagaatacatacactatatttagaaaacataaattgggtttgatatgcaattgttttcatcttacaccatttcaataaatttcacaaattataacaggttgccattttattgaatatctgcgacactttacattgttcaggaagtagctacttccagaaggctgatattctcctccaaattgtctttggctaagtactacagatgtgattcagtccaaactatatgcccaaactgattaaaattctcagtctctcctagcttgagacctcagatcctgagttataactttgacttgatcttcaagttgagatgcttcataaatatttttcttaaaacagggctatttaacataatttctttttcttgaaatatatgagtgtttttgatacaaaaacatatattacacatgagaatgtttaaagcatcaaaataatgattaaattttttacataacttaaatgacaggactacaatatgccccccacttttttgctgtttgaagtaaagaggaaagctctgtaacaatttcaaatacataggatttaacttatgttaatatcctgttataaaaaataactaccatataaagaatttaaaatatgcaaaagtaa

SEQ ID NO: 681743 - DNA, 644 bp, Homo sapiens
tttcatctccctgatgaaaacttttcatgatctgtctggaggttacacaggtgaattcctatggaacttggctctgtacagctaaagatcacaccaaaccccagaatataattactgatgaacatgtcatctcatctttaaattgtagtcgactgaaattggattgatacattatttttttccccttagggaggggttggactttggtattcaatcaatttttatttcttaaatgagtggataaatgaacaaaggaaacagataataagtgtccaaagtataaagtaggttaggagtaccagaactgagaagtggggaaatagacaggactccatagatagagtcaaaggacagagtattttattactgtaaagaggtcatgaaaagtttcatctaggtacagaacaacaaaatgaggttttggtcaatgcaagaaatggaataactctttggtctcaagtcacattttgactgtagtgtgtggtgagmttttgtgcattagttgtttttttacatttaatgggaactgggcacataattctataaaccctaaaaggagaactgggcccataaaatattctaattaaaaactgtattctttgtggttttattcacatgttttctttgtattataatctaatatg

SEQ ID NO: 681744 - DNA, 651 bp, Homo sapiens
tttgctagtgaatcattagttatcacacacccaaaggtcaagtgtcgtctcacagtttaaactaacccttggtacctccaaaatccaaaatgatcagggaactcaatgtaaaaggaagcagagctttagacttgaaaggcacccacctaccactcttggggctcatttaggaagacaggggactcagaaagggagttagtggcatgtgttctgtgttcctcaaggagtatcagagttgcaagagtctcatttaagttccaccatatggtagccagaactctgatgttctcaatccaacagagagcacagaggccttgaaaaatgtatagcctgaatatcagcttttaattaagccaatgctacagcttaaatttttgtccccgtaggccgggcacgtggttcacacctgtaatcccagcactttgggaggctgaggcgggcagatcacctgaggtcgggagtttgagaccagtctgaccaacatggagaaaccctgtctctagcaaaaatacaaacttagctgggtgtggtggcacatgactttaatcccagctacttgggaggctgaggcagaattgcttgaacctgggaggtggatgttgcagtgagccgagaacacgccattgcactccagcctggccmaaaacagca

SEQ ID NO: 681745 - DNA, 613 bp, Homo sapiens
tgtcctcttgttccccttcctaaaatctcattttgtatgttatgtgggttcacaatactcagacaagcttttggataactgcttgttttggaggcttcactaccctaatttttttttgttttatacagcacacttacacttttatccaaaaggcctaaaaaccattgttgctttagaactgttgacaaaaaaaaaatcaaactccataaaatatttaaaaaggtttattctaagacaatataagtgaccatggcccagggaacagtctgaagaggccctgagaaagtgtgcctgaggtggtcaggttacattttggttttatacattttagggagagtgaagttacaggcaaagacataaaccagtacatgtaaggaatacattgcttcaacccaggaaggcaggacatctcaaagtggacgcttataagtcataggtggattgaaagattttttgattggcaactggttgagagagttgrgctttgtccaaagacttgaagtcagtagaaaaaaaaaaatgcttgagttaaggtgtgctgtggaagccaaggttcttattatgtcgatgaagcctccaggtagcaaccctgagagagaataaatggtaaatg

SEQ ID NO: 681746 - DNA, 1012 bp, Homo sapiens
tcagttgtgcctaaactccaaaagggaggggggataaggaggggtgtctgacctcccttcctgtcatgatgggtgattcagttttcctggtttctcttgggtccccttggcccagagggggtccgtttagtcagttgttgggggaggggaaggcagagcttaggattttatttttggtttacataacctagagccgcaacagaaaattcatataataaatgagataacctgactgtcactaaaactttactacatctccagatatattatcctggtcccaaagatggggatatgacactaaaaactgccaatgcagagagcagtgtactacttatcgtgtgtgtgtgtgtgtgtgtgtgtgtgtgtgtgtatgcagaggaaggcagmacaataatgataacaatcactgagatccattttaaaaggcacagccacagtctcaggtgaggtgcattaagatgcagattactctctacagggggtacagtgctactagctatagctgaaaccaagttcttattatctcattacacctttgtttcttactgccttggttgcaggaactctagctaaacacattggggcatctgttattaccccatggaaagttagaatgctgtgggaacctagggtgtgcttgagaaggtcatacttttttaaaagctgctgctgctgccaatgtccaaaactttaccttatgacacccagatttgtacaacacattattcagaacagtcctttagcaagagagcagcagtctccattctgcaaactctgttgctagaattttccatatcaataaagttcctagtagaaatctctgccttggaactcaggacccaccatcaatgagaaagcttgcaattatgaggtattcaggcaaatactagattttaattgcatttagtcaataacataaaataaatcaattaaatattatttgatcaataataggtaatttccattttagatttaaatttgatcagtaataggtatttaatcaataatgggg

SEQ ID NO: 681747 - DNA, 668 bp, Homo sapiens
ggcccctactcaccccctccctggtgtcagtggaccatatcagggaagtgaggttattttttcacttggaggaaacaaagatatgtaactcagtaccctacttttgccatgaggttgccagtgggtggagggagaagacaaacttccacctaaccagtctrcaagaaggaagtataagttagtactctacttttgataggatggtattagtaggtcccatcaggaagataaacatgcacacccacccagctctcaggttacacatcaatagggaaccatctacgaaataataagagagaaaagattctcataatataaaaaaatattcaggacacaataaaaatcacttataaaacaaaagaactaggaaatcataacctgaataagagaaagacaacagacaccaacacagacatgaaaaaggtgttggggctgggcgcagtggctcacacctgtaatcccagcactgtgggaggccaagatgggtggatcacttgaggtcaggagttcaagaccatcctgtccaacatggcgaaaccccgcctctactaaaaatataaaaagttagccgggtgcattggcacatgcctgtaatcccagctacttgggaggctgaggcaggagaatcacttgaacctgggagatggaggttacagtgagccaagatc

SEQ ID NO: 681748 - DNA, 622 bp, Homo sapiens
tttagcaagttgcaacagaaagaggtacttgcaataaacctcagttgattgaatgagtgcacagaaaaagacccagtacttgcccttagtggctttcaggctgcttagggagacagatacatgtccaatatatgattagtcttgtaataaaagatgtcaatgagccgggtgcagtggctcaygcctgtaatcccagcactttgggaggccgagtcaggcagatcacttgaggtcaggagtttgagaccaacttggccaacatggtgaaaaaccccatctctaccaaaaaaaatatataaaaattatccacacatggtggcatgcctgtgatcctggctactcaggaggctgaagtgggataatcacttgaacccaggaggcagaggttgcagtgagccaagatcgcgctactgcactccagcctgggtgacagagtgagatcctgtctcaaaaacaaacaaacaaaacaataacaacaacaacaacaacaaaacagaaaaaaaatgtgaatgactacacagaagaggtagtgatacattttgactgggtgattaagaattgcttcccaaagtagggtccatttgaattagactcattttgacaaaaaagaagaaaggacaaa

SEQ ID NO: 681749 - DNA, 637 bp, Homo sapiens
attcaaaagttttttattttaaaattagtgtttttctccattatgattcacaactcttccatatacattttagaatcaactaatcaagttccacaaaattccaatcagaacttgactggaattgcattgattttatcagttggtacaccgtatagtaattgatattgtagcgtattgrgttagaatttgattgacattgcactggatttattgatgtggagagaattgatatcatttagatactgagtcttccttttttttttttttttttttttttttgagacggagtcttgctctgtcacccaggcttgagtgccggggcgagatctcggctcactgcaagctccgcctgctgggttcacgccattctcctgcctcagcctccccagcagctaggactacaggcgcccaccaccatgcctggctaatgtttttgtatttttagtagagacggagtttcaccgtgttagccaggatggtctggatctcctgacctcatgatccgcccacctcggcctcccaaagtgctgggattacaggcgtgagccactgcgctcggcctagatactgagtcttcctactcatgactttggcatggcatagttctttgtttatttaggtctttaaaaaaaatttt

SEQ ID NO: 681750 - DNA, 609 bp, Homo sapiens
aatttgggaaattcacaaattgtggaaattgaacagcatactcttaaataaccaatgggtcaaagaagaaatcacaagaaaaattagaactactttgagtttacttaaagcagtgcttacagggaaatgtatagctgtaaacacctacactaaaaatgaagatctsaaaaacctaactttctaccttagacgatagaaaaagtaaagcaaactaaacccaaggcaaacaaaagttaaccagttacttgttggcttgtctgcagattttgtgctcaatttaacagcttctgaccttgtaaacaaaagtcataatgaagttctaatagaggtctatacagttgttactgaaatgcaaaagaaggaaggatttgctgtgcctggagattctgagaaggctttgagtaaggggtaatgtttggcagtcattaagaaggcaaaaacctttctaagtagaggaagtaagctctctagagcaaaaatataaattaagcttttccatcttcatctttactgaccatacatgtagcatgttacctgtaaatggagttggacttgagtcaatctggatttttcatacttcctatcttggtgaactgatctcaaattcca

SEQ ID NO: 681751 - DNA, 609 bp, Homo sapiens
aatttgggaaattcacaaattgtggaaattgaacagcatactcttaaataaccaatgggtcaaagaagaaatcacaagaaaaattagaactactttgagtttacttaaagcagtgcttacagggaaatgtatagctgtaaacacctacactaaaaatgaagatctgaaaaacctaactttctaccttagacgatagaaaaagtaaagcaaactaaacccaaggcaaacaraagttaaccagttacttgttggcttgtctgcagattttgtgctcaatttaacagcttctgaccttgtaaacaaaagtcataatgaagttctaatagaggtctatacagttgttactgaaatgcaaaagaaggaaggatttgctgtgcctggagattctgagaaggctttgagtaaggggtaatgtttggcagtcattaagaaggcaaaaacctttctaagtagaggaagtaagctctctagagcaaaaatataaattaagcttttccatcttcatctttactgaccatacatgtagcatgttacctgtaaatggagttggacttgagtcaatctggatttttcatacttcctatcttggtgaactgatctcaaattcca

SEQ ID NO: 681752 - DNA, 609 bp, Homo sapiens
aatttgggaaattcacaaattgtggaaattgaacagcatactcttaaataaccaatgggtcaaagaagaaatcacaagaaaaattagaactactttgagtttacttaaagcagtgcttacagggaaatgtatagctgtaaacacctacactaaaaatgaagatctgaaaaacctaactttctaccttagacgatagaaaaagtaaagcaaactaaacccaaggcaaacaaaagttaaccagttacttgttggcttgtctgcagattttgtgctcaatttaacagcttctgaccttgtaaacaaaagtcataatgaagttctaatagaggtctatacagttgttactgaaatgcaaaagaaggaaggatttgctgtgcctggagattctgagaaggctttgagtaaggggtaatgtttggcagtcattaagaaggcaaaaacctttctaagtagaggaagtaagctctctagagcraaaatataaattaagcttttccatcttcatctttactgaccatacatgtagcatgttacctgtaaatggagttggacttgagtcaatctggatttttcatacttcctatcttggtgaactgatctcaaattcca

SEQ ID NO: 681753 - DNA, 609 bp, Homo sapiens
aatttgggaaattcacaaattgtggaaattgaacagcatactcttaaataaccaatgggtcaaagaagaaatcacaagaaaaattagaactactttgagtttacttaaagcagtgcttacagggaaatgtatagctgtaaacacctacactaaaaatgaagatctgaaaaacctaactttctaccttagacgatagaaaaagtaaagcaaactaaacccaaggcaaacaaaagttaaccagttacttgttggcttgtctgcagattttgtgctcaatttaacagcttctgaccttgtaaacaaaagtcataatgaagttctaatagaggtctatacagttgttactgaaatgcaaaagaaggaaggatttgctgtgcctggagattctgagaaggctttgagtaaggggtaatgtttggcagtcattaagaaggcaaaaacctttctaagtagaggaagtaagctctctagagcaaaaatataaattaagcttttccatcttcatctttactgaccatacatgtagcatgttacctgtaaatggagttggacttgagtcaatctggatttttcatacttcctatcttggtgaactkatctcaaattcca

SEQ ID NO: 681754 - DNA, 653 bp, Homo sapiens
aatctgccttttgattttgtacttgattttggaattctttattattattattattttttgaaacgaagtctggctctgtcacccaggctggagtgcagtggcgtgatctctgctcactgcaagctccgcctcccgggttcacgccatcctcctgcctcagcctcccaagtagctgggactacaggcgcccgctaccacgcccggcaaattttttgtatatttagtagagacggggtttcaccgtgttaaccaggatggtctcgacctcttgacctcgtgatccgcccgcctaggcctcscaaagtgctgggattacagtcgtgagccaccgcgccgggcctggaattcttgatgctttaaacaaaacttaacatcttgcctgacatgtttttgtagcccaacaggataactaaaacgccagcattaaaactcagtccctggcaagatgttgtctgtgatctccttcatcttcacgacaagatcatctagggttgtatgctgaggttagcagcagagtctcagtggagtcgaccctgcaggtgggaagccacacttggaattcctccatcgtgcttagttcaccttgaggactaggtagctatctaatggcagaatggtttcaaaacccaagtatctgtgaagagctttctctt

SEQ ID NO: 681755 - DNA, 894 bp, Homo sapiens
catttattgagtacttgctgtgtgctgagccccatgtcgaaggctttacctgtaatttcttcacttcacagccacaacctaatgaaaggragacactatgtttgtatttcccttctagagatgaagaaaccgaggcttagagatatcactaattgctcaaggttttgcagctgttgtgctgtggatctgggattcaaacccaggtccggttgacttttgagctaagactatcgctcttttgcctcctgaatttctagtcatttaaaaatcaaggctgaggctatcaagctgcgcaaaagctgttttggcttataagacaatcaggttgggagactgagactacttgggaggaaaaagggggaaatacaagttgcaagtgtgcaagttgctacactggccctgtgtatctttgagtttttgcaggtactctattcaccatctgtctctcctcatctcttgtgaaatggagttggtggcctttaaaaagctgccagctttgagaaaggggggctcagtttcccaatcttggcccagaggacttctctccatctggatgagcattgagatcaagggtgagctagtcccaaggttaattggatgaaccgatcttttcttttgttggcttgtggaggtcaattagtaatgtggatgattggattcagttaaatgccttcaatgaactaggtctataggggacagtgattggttcccaaatggggtgagggacccatttggactaaacgtttcaccttgccctggctttggtggcttcaaaaccaaatgaatggccctttaagccattaagcagtcgcaaagaagcaggtctaccagcactcctgttcattggtttgtttttatttatttgagcattttatttttatttatttatttatt

SEQ ID NO: 681756 - DNA, 894 bp, Homo sapiens
catttattgagtacttgctgtgtgctgagccccatgtcgaaggctttacctgtaatttcttcacttcacagccacaacctaatgaaaggaagacactatgtttgtatttcccttctagagatgaagaaaccgaggcttagagatatcactaattgctcaaggttttgcarctgttgtgctgtggatctgggattcaaacccaggtccggttgacttttgagctaagactatcgctcttttgcctcctgaatttctagtcatttaaaaatcaaggctgaggctatcaagctgcgcaaaagctgttttggcttataagacaatcaggttgggagactgagactacttgggaggaaaaagggggaaatacaagttgcaagtgtgcaagttgctacactggccctgtgtatctttgagtttttgcaggtactctattcaccatctgtctctcctcatctcttgtgaaatggagttggtggcctttaaaaagctgccagctttgagaaaggggggctcagtttcccaatcttggcccagaggacttctctccatctggatgagcattgagatcaagggtgagctagtcccaaggttaattggatgaaccgatcttttcttttgttggcttgtggaggtcaattagtaatgtggatgattggattcagttaaatgccttcaatgaactaggtctataggggacagtgattggttcccaaatggggtgagggacccatttggactaaacgtttcaccttgccctggctttggtggcttcaaaaccaaatgaatggccctttaagccattaagcagtcgcaaagaagcaggtctaccagcactcctgttcattggtttgtttttatttatttgagcattttatttttatttatttatttatt

SEQ ID NO: 681757 - DNA, 1153 bp, Homo sapiens
tcagaatattctagattagctgtgtatttgctgggcagccttagtactgatgccttaaaagaacatgtcacctgcccctgtcttastaggcactttccaaataataataataatactttgtgttctgaaacctaattttctttctttctttccccccaacttttattttaggtttagggggttacatgtgcaggttgttttccctgcagcaggtaaattgtgtcactggggtttggtgtacaaatcattttgtcacccaggtagtaaatatcatacccaattggtacttcaaatctctccctcctcccaccctccatcctcaagtaagccctggtgtctatcgtggaacctaattttctatttctctttttttttttttaatattacattttgactcttcacctggacacagccacattgagattaaggtattctctgaattaaatctgttctgggtattttgtgagtacgtttagaatttcaggtcaggtgcagtgcctcatgcctgtaatctcagcactttggaaggctgagagagaaggatcgcttgagcccaggagttcaagacagtctctctacaaaatataaaaataaattaaaaagccaggtgcaatagtgtgtgcctgcagtcccagttacttgggaggctgagatgagaggatctcctgagcccagaaggtcaaggctgcagtgagccatgaccatgccactgcacttcaacctgagtgaaagagcaagttttagaatttctatcttggaatagaagccaaattgggaaccaagaggcgaatcacttaaagtcacctgacaaatcaaaaaccaaccttaaatcaagtcgtttctctttcttacttgctgcaatgatatttaaaatatatgttgccctggttgagactgtttgtcttggatcaacatcattctaaagaaaaagggtaaatttgacagggatgcttattttacatttcttcctttcgctttttcaagtttttacaactaaaataaatgaatagtgtagcagctggaatagaaatctcttactgattgggccataaaagtgggagctttcagaaacagcctattctccacaaaataaaataacctagacattgtccaaactgttcaatgctagacttgagaactatagttttaaagc

SEQ ID NO: 681758 - DNA, 1153 bp, Homo sapiens
tcagaatattctagattagctgtgtatttgctgggcagccttagtactgatgccttaaaagaacatgtcacctgcccctgtcttactaggcactttccaaataataataataatactttgtgttctgaaacctaattttctttctttctttccccccaacttttattttaggtttagggggttacatgtgcaggttgttttccctgcagcaggtaaattgtgtcactggggtttggtgtacaaatcattttgtcacccaggtagtaaatatcatacccaattggtacttcaaatctctccctcctcccaccctccatcctcaagtaagccctggtgtctatcgtggaacctaattttctatttctctttttttttttttaatattacattttgactcttcacctggacacagccacattgagattaaggtattctctgaattaaatctgttctgggtattttgtgagtacgtttagaatttcaggtcaggtgcagtgcctcaygcctgtaatctcagcactttggaaggctgagagagaaggatcgcttgagcccaggagttcaagacagtctctctacaaaatataaaaataaattaaaaagccaggtgcaatagtgtgtgcctgcagtcccagttacttgggaggctgagatgagaggatctcctgagcccagaaggtcaaggctgcagtgagccatgaccatgccactgcacttcaacctgagtgaaagagcaagttttagaatttctatcttggaatagaagccaaattgggaaccaagaggcgaatcacttaaagtcacctgacaaatcaaaaaccaaccttaaatcaagtcgtttctctttcttacttgctgcaatgatatttaaaatatatgttgccctggttgagactgtttgtcttggatcaacatcattctaaagaaaaagggtaaatttgacagggatgcttattttacatttcttcctttcgctttttcaagtttttacaactaaaataaatgaatagtgtagcagctggaatagaaatctcttactgattgggccataaaagtgggagctttcagaaacagcctattctccacaaaataaaataacctagacattgtccaaactgttcaatgctagacttgagaactatagttttaaagc

SEQ ID NO: 681759 - DNA, 1406 bp, Homo sapiens
tgcatcttatttttctgtctcaatatgtacaatcaagcatacttgaacaacctatatagctgcttattaggtttaactttgtcacattttattatcagagatagttgggttggaaaaatgcaacttattttctatgaaaatttttaatggtggaagctaagcagatatgatgacctagaaaaatgaaaaagagaacataaatttataaaataagcaaactggtgttttacttgtgttggtaaacagattgggaatggaggagaccattatttttctaataatttttactagccttctctacttgtttttaaaggtttactctttaacagcatctctcctatttatttaaacttttccttacttatttccagtacatacttagaaggatttctatttctcacaagtagacatgactatgcaggtagataatgatgaaaataaaaaccagtgtgtgtgtgtcctccgtcttgctctttgttgatggatacctggagggaggtgagaagggaggcaagggaagtggattcttaagccaggacatgtggctgctacattgtgtctattatctcttggctctacaatcatttttctatgtcttctctaccactggagatgggagcctacaaactgtgtttctccaactcctttgacagtgggctttttgttagattagaaggtgggatgaagcaagaaaccattagttctgctttgttggaattccctgtggtgatggcagcaatagtggtggctggtgcctgtcacttcttgggttcctgctcatgcagcttgcttttatgagcttgtctcaggatcatggtaactgtggactctgatcatgtccactttgcttgagctctccttgctgctgtatagaagagaatagatttttttcagttcctgatcttttgaataaactcgccttctccttttagttccatcaattctccaacaccttagtaaccaattcctttatcaaattccctgtatttaaaatgcctatattcactttcatgtacatcttctacaaaaagastaagaaaaaaggtgcattaacatttattttgccagcttcccacatcttcttcttgaatctctttcccacttttagtgttctccaaacctcaaaactccctctgatctccagctaaccagaatttattatcatactccttctttgctcatgatgccttgatgggagtccatagttccgatgctcatattatctttcatatcaaaagatgtatatcttaggctgaggcaggaggatctcttgaacccaggaggcggaggctgcagtgagccaagatggtgccactgcactccagtctgggcaacagagcgagactgcgtcaaaataaaaaaaaaaagatgtgtatcttttacttaatttttccagaaagttccaa

SEQ ID NO: 681760 - DNA, 1406 bp, Homo sapiens
tgcatcttatttttctgtctcaatatgtacaatcaagcatacttgaacaacctatatagctgcttattaggtttaactttgtcacattttattatcagagatagttgggttggaaaaatgcaacttattttctatgaaaatttttaatggtggaagctaagcagatatgatgacctagaaaaatgaaaaagagaacataaatttataaaataagcaaactggtgttttacttgtgttggtaaacagattgggaatggaggagaccattatttttctaataatttttactagccttctctacttgtttttaaaggtttactctttaacagcatctctcctatttatttaaacttttccttacttatttccagtacatacttagaaggatttctatttctcacaagtagacatgactatgcaggtagataatgatgaaaataaaaaccagtgtgtgtgtgtcctccgtcttgctctttgttgatggatacctggagggaggtgagaagggaggcaagggaagtggattcttaagccaggacatgtggctgctacattgtgtctattatctcttggctctacaatcatttttctatgtcttctctaccactggagatgggagcctacaaactgtgtttctccaactcctttgacagtgggctttttgttagattagaaggtgggatgaagcaagaaaccattagttctgctttgttggaattccctgtggtgatggcagcaatagtggtggctggtgcctgtcacttcttgggttcctgctcatgcagcttgcttttatgagcttgtctcaggatcatggtaactgtggactctgatcatgtccactttgcttgagctctccttgctgctgtatagaagagaatagatttttttcagttcctgatcttttgaataaactcgccttctccttttagttccatcaattctccaacaccttagtaaccaattcctttatcaaattccctgtatttaaaatgcctatattcactttcatgtacatcttctacaaaaagactaagaaaaaaggtgcattaacatttattttgccagcttcccacatcttcttcttgaatctctttcccacttttagtgttctccaaacctcaaaactccctctgatctccagctaaccagaatttattatcatactccttctttgctcatgatgccttgatgggagtccatagttccgatgctcatattatctttcatatcaaaagatgtatatcttaggctgaggcaggaggatctcttgaacccaggaggcggaggctgcagtgagccaagatggtgccactgcactscagtctgggcaacagagcgagactgcgtcaaaataaaaaaaaaaagatgtgtatcttttacttaatttttccagaaagttccaa

SEQ ID NO: 681761 - DNA, 603 bp, Homo sapiens
cagagactccatctcaaaaaaaaaaaaaaagagataaggtatttcttcaatgttgtgccttactcttacacatagagagcagttcttctcagctgctggcccatagtgaatttttatcagtttactgccaaagttccttgctttttaaaacgtatacatttttaaaattgtcttttaacagacaaggaattacaccctaatatgtgatcaatgtaagttatgtgtgatattttttaaaagaaaaattgaaaatatgtttaatctatttttaaaattaaatatatattaaattacatataattttcaacagttttgtaaagactttaaatatatatcagactgcagtatatttgggtggaaaacactgagttcaattttggcccatacttctagggatgtacagaaatggggaaagagagaagaatgacagaagtgatttaaataatagaaaacaagtccaacaagaaggagcttttgtaccttggaaagtaagctgagtraatgactgtcattattaggttcaagagaaattttgtgcaagggacatgctgttccactattcacctgaataagtgaactgaataaaagtaaataggcataaaa

SEQ ID NO: 681762 - DNA, 648 bp, Homo sapiens
tgtttctgactcccagacctctctctgggaagaagcccctcaagcgtacagctctatcactaaaggctgcaagctgcgtttccgatttctgagcgagcacagctggcatctgctctccttcttgagcctgttggactcctcaccctctctacttagctacttttgcttacaatgcttgagcatggacatctaatccttactgtcttgtggctcaggaggcagagtagtagcatggtgctactagtgtgctttggacctagatggatggtttgggttcaagtgctggctccatcatcagctcactccactggtgacatggggcaagtgtcttcacctctctgccttaatttcaccctttctgagttgtggacatgatcatctttcctatctacttcagggctatggggaagatgagatgagctatagacacacaggactcagaacagagcagggaagaggggaagagattcatggcttttaattgttagcaagaccttaaatcctatggrtctgcctagaaaccatctgggctctgggcaaagcctgggagagggggtagacagctgttctagttcctagatatgagagctagagctagggtgacggtaggagggaggaagaaaatgaacatttctcgatgcctgttgg

SEQ ID NO: 681763 - DNA, 1511 bp, Homo sapiens
ttggataagtcttcacttcctgctcccaaatcttgattcttctgagatacttaacaataattccttcttcccaaatcccaaaattaaattctcctgccattctggaaataatgttgtgattaaaaatctatttacatttggtcctcacacttcagtgttgacataaaataaaaccactgatcactgttgtagcgttaggatgtttaaaatatttcacatcctgtccacaaggtaagcagtttccagatatagtctgttttgaggcttggyttccagggtggagatggtgggcaaagtgaggaagaagtggctggtgaatggaagggtctagaggggatagaagggattctgaacctctccttttggctagaaccaagcccaggtcatttcctgaccccctgctgctggggtccggtggcaagacatagacacagtgccctgactctgggctctcatttccacctcttgaacacagctctctgctgtgttctggtcctggcttcctgacttgcgatttatcttggtagtatgacatgcagaaatattatgtatgctgggttggctcttcaaaagtgaccaagacattgccacattttgaccttctgttctatttgggttgaggctaaagaaaaagtgagagaaaaaaatcatctgccttcagtttctaggactagtagctttatgttgtgcttatacagacattaacctgtcaggagtattactgagtcctaccaataatttcaataaactgtaaattattggggaaaattagtattagttaacctaattaactctaaggatactaatcaattatatggctgaattagaaaaaaaaaaaaatcaaggccaggcacagtggctcctgcctgtaatcccagcactttgggaggccaaggagggtggatcacctgaggtcaggagtttgagaccagcctgaccaacatggcaaaaccccatctctactaaaaatataaaatttagctgggcatggtggcacatgcctataagttcagctacttgggaggctgaagcaggagaattgcttgaacccagtaggcagaggttgcagtgagctgagatcacaccattgcactcccgcctgggcggcaagagtgaaacgccatctcaaaaaaaaaaaaaagaaaaaaaattaaatatgtttgctttaattagcttacatgtgtagacatagaccaagtcagggctcagcagatgcacagggagtgcagtgaccttctcgtgtcttctgtttacttgagaactataaacagaaactctgactagatgaggcattttagggatgggagagaggtgggagttggtggtgtgttttatggactattctttcaacatcacttatcagaaaccaagaaaattcatagttttctgaacgtcattagccttggctttgatgatttgcaggtaaccattaaaagtcagtagaaagtcattcattgctggctttttccatggagtgttgttaagcaagatttgttgtcctttaaatatta

SEQ ID NO: 681764 - DNA, 669 bp, Homo sapiens
atagaatgaagaatacttaaatttcaaaatagcagccagagccagtgggatgatgtttgaggttgaataagagacttttggcctccccaaatcattgtacttaggcaaccacctacactcycaggaaatgttctgcagatgaagaatgttttgtagatgtgacttccacccttccatccacctatctattcaacaaatacttgctgagtgtccaatatatacaaggtacaattcagtagggacagaaaagatgacctcttcccctgtattcatgttctgtgtgccaggtcttgcaccaagcacttcctttgccttgtctgacttaatcatcacaacaatcacatgaagcaggtatcatgtcccccattttacagacagggaaactagagctaatagaagttaagtaaatgcccaaagtcttgaagtttagtaagtaacacagctgaaatttaagcccagtctgctgtactccacaacctctgctttccctccttcctgatgctgtctctccagcaggtaggtgcacagctgacctttgtcaagaaagtattgtgaaacccacattagaaaatgcacgtgaagcaggcagcacaatgcttggcatatagtaaatgccttctctttttaaggttggacaggacaaactgtttcataaaacttttgtttagt

SEQ ID NO: 681765 - DNA, 616 bp, Homo sapiens
atctcttgccttgaagtaaattttttaattttaacattcctccaaaatattttatatttcataaaataatacatggaacttttggttttcagtccagcatataagaagctggaagttgccactctgtcctgacaagtaaaaaactgaacaaactgaagggtcaacaattattcttagatacatcagtgggttgtggtcacagggcaaaccactgctcctaaattggagagcccaacattcaaattcagagaattgtggcttgctagaacagaaatccataagcacaaacttccgctgaaatcagtgccaaggtggagaaacctgaactataagkgataaattgctggaggcttagcatggacaagtctgacagataaaaaattccaggggtacccagtcatcagagtctcctcgcacttttgtaagtttgacctccaggagctcaatcagtgtattagtccattttcacactgctgataaagacatacccgagactgggaagtttacaaaagaaagaggtttattggactcacagttccatgtggctggggaggcctcacaatcatggcagaaggtgaaagtcacatctcacatggcagcagacaagagaagagag

SEQ ID NO: 681766 - DNA, 616 bp, Homo sapiens
atctcttgccttgaagtaaattttttaattttaacattcctccaaaatattttatatttcataaaataatacatggaacttttggttttcagtccagcatataagaagctggaagttgccactctgtcctgacaagtaaaaaactgaacaaactgaagggtcaacaattattcttagatacatcagtgggttgtggtcacagggcaaaccactgctcctaaattggagagcccaacattcaaattcagagaattgtggcttgctagaacagaaatccataagcacaaacttccgctgaaatcagtgccaaggtggagaaacctgaactataagggataaattgctggaggcttagcatggacaagtctgacagataaaaaattccaggggtacccagtcatcagagtctcctcgcacttttgtaagtttgacctccaggagctcaatcagtgtattagtccattttcacactgctgataaagacatacccgagactgggaagtttacaaaakaaagaggtttattggactcacagttccatgtggctggggaggcctcacaatcatggcagaaggtgaaagtcacatctcacatggcagcagacaagagaagagag

SEQ ID NO: 681767 - DNA, 1411 bp, Homo sapiens
atatatatacacacacacaaatgcactcataacatagatataaatgtttacacaatatgtatatgtgcgtatgcatgtgtattcatacatatatatgtatttgtgtacatgtgtatggttaaatatgtgtgtgcttgtgtatatattatwtattacatattatatattatatatttttatatattgtatattgtatatatataaaatcatcatcatcacggatccttcagacttccccatgacaattggatggtagattggaatctatttattgggatgttttaattatatgcaattatgtaaacagtaaccactctattatgatgattttactcagttcttgtcatacacatttgtcaaggactaaagaagcagagttgtcaggtatactgttgggcaattttatatttctgtacttgtaacatttgtatgctctcctctacagacatttcattttatatatgcaaatcccttccccatgtcatttttgtgtatttaaaagaaatctctgctcagagtgtcattataatagtgtggtccagttgtttcttaaaaaactgatagaaaataaattcctgcaatataatgaggagccacgacactatcaaaactatcaaacgaaaatcattttcacttgctattggttttcataataatccttgactaattccattgcagaaacatcagagtggcaaaatgtaaaacttctcaatgtatttcaaaatgacataataccttaggagaattgacttagtttaaagagaagttcaagtgtttgcaataaaagtaatcaattaaaggtggttcgatattaataatgaaacagaattctattctcctacccacttattaattcagacttttcttattgttacatattactaaccatcattataatttgtaaatattttaaatcgagtgaaataaggtttgcctttgtactatatactatgctaatcctatatataccttcttcctcagactatttcactaatctaaagattagtaaattatatactctaacctcacaaatacaaattaaatttagtttaaaagattaaaatacagactttaagagataaagttaactaggtttttggcatgtaactgctgtgtttagagttgcccaaattgacatgaagtatattcaaaacagtttcctgtaacatgtttagataattctattttctagttaaacaatatttttccctctaagcaacactttcctctgtgatttcttttgtctgtgcaattgcctatggtgatccttttatgtgcaattctctctcctcccatctttctctgtctcaaagcccaactctaagttgactgtttttttttaaatttttttttttacctttttcttgttttaaggaaaataaaattcaccactttcttttggaatctaaca

SEQ ID NO: 681768 - DNA, 591 bp, Homo sapiens
tgtttgatagattgtaaaatgagaaagccaactggctattttggataaaaatgagcaggtcarcaaggtcctaatgggtttactacagtttagtcagactctcagtttaacatttacagaaatccaatttgaaaatttattcaattattattaacttcttaaggtctgactttagtttaactgtgagcacttgaacttaaaagacactgaattgtaaaccatgatgtccatttatttattcacgaaatatgcgtcatttacataggatgctccttccttgtgctcaaaactacacagggagaatactgtgtggtgagcatcaagttaaaataagtaaaatgagattttgaattgttatcaaactagctgaactggacaagatatcattctgtagtctaaagataattttacctatacacccaatattggctgaatttctagagcccatttcaaatacagtggatcaggattaccagggatgggaccaaaaatcttttaacagtgtctctgattattctttccatgacataaataataagctttgaaaacactggcatgatgaatcagctcttctccttgattcttcttttc

SEQ ID NO: 681769 - DNA, 908 bp, Homo sapiens
catggcggggacccagtgggaggtaattgaatagtgagggctggtctttcctgagctgttcttgtgatagtgaatatgtctcatgagatctgatggctttataaaggggagttcccctgcacatgatctctctcctgcctgctgccatataagacgtgattttgctcctcttttgccttccaccatgattgtgaggactccgcagccatgtggaactgtgaatccattaaacctctttataaattaccctgtcttgggtatgcctttattagcagtgtgagaacaggctaatacatcttcccttttcataagaaaattaaaaatatatttagctgtaaatgatgataaattttttagtgccaagttagacagtcaacatctaagtaaagcatttattttaggatttttaaaagagagatgytatatatttccttgttagtattttatgctatttttagcaatattttaaaaagttttgttttaccatacacatagtataagcatgtttgtactatgtccagccaaaaattttgaagtttattcctctgaagtttatagataccataaatgtgattctaacatagcacatattgaatatgtaatttgaacctgcctaatggtaatagtcatctgctgcataatgctattttgatcaacaaaggaccacatatacagtagtggtcccataagattacaatgctatatttctactgtacctttttcatgtttagatatatttagatacagaaatacttatcatggtgttacaattgcctatagtattcagcacagaaacgtgctgtacaggtttgtagcctaggagtaacaggctataacatacagcctcagtgtatagaaggctgtaacatctaggtttgtgtactccttgaggttcgtaaacaacaaaa

SEQ ID NO: 681770 - DNA, 613 bp, Homo sapiens
tggttattgatagcgtattcaaagtagacttttttgatataaaattttaggaagctaaaataggttatataattggaacaatttttaatttaacktatttattaagttcttaccataatgcaaatgtctagataacaaacttaaatcttttgcattacctatttgtcactgtgacttctttcagcttgaggattgaaattgacctctaagcactgcccccgcaataagaaccttggctgaaatctctgacattggaactctgctcactctttctctgggacctttgagactgaaagctgctgtatgatgtgaactagagtcagttatataccaaccagtttttttcaccagggatcaagactgagtagctttgtagacttctgaaattaatagccaccttgacaagggttgtttatctttttctcttattttaattgatgaatgcttattggatctttagagaactgtaagtgactggctgaggctggttggcccataatacaagatttagccactgcgttttagcacttcagttttcttttccctctcggcttctaaaataagagttgaacaattaatactgtctattttttaatatgtaatttttcatatg

SEQ ID NO: 681771 - DNA, 622 bp, Homo sapiens
gttaatttacattttgtgtacaaatccaaagttattaatttaatttatttaacagacattagatttttggtgacttcttacttgaaagcttttagcagcatatattagtttcagaacagggaatagtatctgtttgcaaagcgataaaccaaaaaatttgttagcaatgcagagaaaaatattcatgaaaatagaatagatcacactggagaaaagaaatggtgataaaattacttaaatatcatctgccatagatgagcacwgattatctctaaagatgtagattctacacatacacaccattggcaaggtgtatgtggaatataattgattctgcatattagagagtatattaaaaagtcatataattttaagaatacctaacataccatttttttctcttaagtaatctatatcatctagtgcaaatatagtggttgataaacaagggattatattgttaaatggacttacaccaatcactgatctcacctaactctgaaatatacaaatgatttgtgtattactttcctgctgcttcagtagtaaactaccacagactcaggagcatcaaaaagaacaaatgtgttacactcttgctgtgagaaatccgaaatgggtt

SEQ ID NO: 681772 - DNA, 622 bp, Homo sapiens
gttaatttacattttgtgtacaaatccaaagttattaatttaatttatttaacagacattagatttttggtgacttcttacttgaaagcttttagcagcatatattagtttcagaacagggaatagtatctgtttgcaaagcgataaaccaaaaaatttgttagcaatgcagagaaaaatattcatgaaaatagaatagatcacactggagaaaagaaatggtgataaaattacttaaatatcatctgccatagatgagcactgattatctctaaagatgtagattctacacatacacaccattggcaaggtgtatgtggaatataattgattctgcatattagagagtatattaaaaagtcatataattttaagaatacctaacataccatttttttctcttaagtaatctatatcatctagtgcaaayatagtggttgataaacaagggattatattgttaaatggacttacaccaatcactgatctcacctaactctgaaatatacaaatgatttgtgtattactttcctgctgcttcagtagtaaactaccacagactcaggagcatcaaaaagaacaaatgtgttacactcttgctgtgagaaatccgaaatgggtt

SEQ ID NO: 681773 - DNA, 649 bp, Homo sapiens
tttttgagacggggtctcgctctgtcgcccaggctggagtgcagtggcgccatctcagctcactgcaagctccgcctcccgggttcacgccattctcctgcctcagcctccagagtagctgggactrcaggcgcccgccaccacgctcggctaattttttgtatttttagtagagacggggtttcaccgtgttagccaggatggtctcaatctcttgacctcgtgatccacctgcctcggcctcccaaagtgctgggattacaggcgttagccaccgcgcccggccgtgttatgcttttttaaaatatcccttatataaggttatcagaaatgcaatgaatgccatttttatttggaaacaaacttttaggccaatctgaaatgtccacagttattgcgtcttttgtaatggttactttatttctgcacatgcgtttcatgtcaggtcagagaatctattcatctcataatttcttctcttcaataatatatttttatttattttagggtcattgatgaggtataacatacacaaggaaaacagacttgcccaaatacttgatatgaatcaagtatataacttgattaatattcacaaattgaaaacactcatataagcattatgtagaacaagaaagaaaatattaac

SEQ ID NO: 681774 - DNA, 605 bp, Homo sapiens
attatctctatttttttctcctttgaattcatcaactaattattattttattttctactcactggtaattacttacttaaaaaattttggggccgggcacggtggctcacgcctgtaatcccagcactttgggaggctgaggcgggtggatcacaaggtcaggagatcaagaccatcctggctaacacggggaaaccccgtctctactaaaaatacaaaaaaaattagccgggcrtggtggcaggcccctgtagtcccagctactcaggaggctgaggcagaatagcgtgaacccgggaggtggagcttgcagtgagccaagatcacgccactgcacgccagcctgggcaactgagcaagactctgcctcaaaaaaaaaaagaaaaaaaaattttgtggtggaatatctggagactacaacataaatgatttaaaaaagaaatagttatattttatcttattttgcataatgctaaaactcaactaaccagttgagttttatttatgctaccattatatttggtattattgttctcatgcatttctgcattattttacatttttatagagtcaacattcatttttaatgtatttatatatttcta

SEQ ID NO: 681775 - DNA, 605 bp, Homo sapiens
attatctctatttttttctcctttgaattcatcaactaattattattttattttctactcactggtaattacttacttaaaaaattttggggccgggcacggtggctcacgcctgtaatcccagcactttgggaggctgaggcgggtggatcacaaggtcaggagatcaagaccatcctggctaacacggggaaaccccgtctctactaaaaatacaaaaaaaattagccgggcgtggtggcaggcccctgtagtcccagctactcaggaggctgaggcagaatagcgtgaacccgggaggtggagcttgcagtgagccaagatcacgccactgcacgccagcctgggcaactgagcaagactctgcctcaaaaaaaaaaagaaaaaaaaattttgtggtggaatatctggagactacaacataaatgatttaaaaaagaaatagttatattttatcttattttgcataatgctaaaactcaactaaccagttgagttttayttatgctaccattatatttggtattattgttctcatgcatttctgcattattttacatttttatagagtcaacattcatttttaatgtatttatatatttcta

SEQ ID NO: 681776 - DNA, 676 bp, Homo sapiens
tggaatacacctctataagttgaataaatatttctagtgtctagtttattcaataattttaaagtaatgtaaatgtcacatcctagataacaatttcaatcaccactgaccacaccatattactgatccaaaaagaaaactgtacattgaaaacaaggagaaagctgagaaaaacacagtaatataaaatagttccctgtaaaacgtttaactgcatgaactaatttaaaaacacgattagttgctttaaataaaaagcctctatataaatgtaatcagaggctttattaagtggtgttgattataataactggaaatattgttaccttaaattatttaataattacaagaaaaaaagtgtcctaaattccacaaacatattaaactattactttgcacaaggcacaacaggtcttcttaaaacagggtatgatatataattcaggggctggcaaagtttttattaaggggcctgacagaaaatattttcaactttgtgggctaataagatctctaagcaactactctstatcctgctgcagaaagaagtcatagacaatatgtaaatgaaaggacatggctgtgtttcagtaaaactttctttataaaaacagagagaggctgaatttggcccaagggctgtaatttgcagacgtatgctataactgattcttct

SEQ ID NO: 681777 - DNA, 614 bp, Homo sapiens
tgtgaaaggtggccatctgagtaacaggccttacttatactctacaagtccaaattatgttgatatcctatggcagtatgagacagtttaagatacattcatattcataatactattaaaattgcctttatcctcaaatgttgcatcaatgtatgtattagcattcccttttttttttwagaattattggggctttctctagtatattttctatctcatgacgtacatttttctttgtttctaaagtttccattccctgtgagatcagaatttttttgacatgcttgttgtattaaaatctagaagttagactttttaaatatcatctttgtcaagaggttgttttttaaaatatctctcccagctatttctttatataagtaaaagttatttaaagggtagatgttagaattttatgtttttctcttcattcaggagatctctttaaccagctgatgagagatgatccttcaaccgttaatggtgcagaagttttaatgttgggagaaatgctgactttaccacagaattttgggtaagaatgacatattcacataagaaaccttgtaaagccattacaaattatgttttcaaaacagaaccatgggatgggg

SEQ ID NO: 681778 - DNA, 1473 bp, Homo sapiens
ccatttatgacataacattcaaattataataataaaggcatctcactgtggtcactctctttatcttatatctggtttctttttccgcttatgtgctccagygaaatcaaactactcagtttttctcaaatgtacctattatatttccatttgaatgctttgattcaccttgttttctcatgaggaagggtttctttcctccttatctttactgttgaaattctgttttcaagacctagttgaatgtcatcttctctatgtagcttttttcatttcaccaaacataaacaattattttgaaatccacactattataaacacttagtaccactcattaacactcagcagattctcactttattatcatgagatactcagtaaattttgaactaaatggcaatatttcttatgaacacttaagaataaacctaagcaatttttaatcctctcacctcaaaatacaaaaaaatatatttaaaagaacagggctaacttttcttcatcatgttctcacagttcctaactgcttagggaagaaagggaggtcaattgtatagccacattgattgaacaatcatgtttttcttcagtgatagccaaggcagagtttgagtgtaattgttcagggactgtgtgactattgtattgggtcagtcatctgtctaagaaatgaactggacaaccttcaaatggcaatgacttcaattcctttgagatctgaatcggccagaaaactaacaataaatggttgtgtatgtagtgatttcctgttggcaagttgcatgtactctacaaatatgtctcaacttagatggaaaagatcattattactttgatctaaagttcagattgagaaactctaacaccaagccattaaatgtatcaagcaaggtcagagactgaaaatgataatatctcagaggttccaagttttggtttatctgccagaagacataatttcttggtaaaagtttattgctgtgccccagtgttctgagagccacaggcaagctctttcaaaatgatgttatgtccctaaagtaaaaaccttgaaattaatctataatataccagtataatatttttataaaagttactctctagcaaccaaaacttactggagcacttctgagaaaccaaaaaaagcatcataaaaataatacactgaagtccaaaccctacttaaaaggagtccctcaaactatcattcagtatccatgttagatagttccaaccatctgataatcttaatatatatagtatagtatatatatagtagagactactatatagatatatatagtagagactactatatatatatagtagagagactactatatatatatatagtagagagactactatatatatatatagtagagagactactatatatatatagtagagagactactatatatatatagtagagagactactatatatatatatagtagactactatatata

SEQ ID NO: 681779 - DNA, 999 bp, Homo sapiens
tccatatctatagagttattttccttaaaggaactttcagaatatgttacaagtctgtgtccatgaaaatactgggcagccaggtaatgatgcccacacatttcttttagtcatattttcttttgagctcataaactatttcggagttatgggaagaaagctttaaagctttcagcttctcattttcaaagaaaatgaaatcaaagaacaaaaatgaaatttaccaaaggtcaccaaggtggtgacctttatgtagatacagacttgggtctgtttcccaacttaatatccagggattttttttctaattagactttaagcatgttgactagtaaactataagtaacaatgatcacrtggaaaattaatgtgaattatattcctttgaagaacccttttcagtcaccaaatttaataccttgttagagaaatacacatttttatcacagcatattaaaatgtagttctaaaaaatacaaagactataaatgtactaaaacatctatggtacaaaagttttttatttgtcttaccatttaaatggatttccaaactggaaatatttatgaatgtatatgaaatagcagaaataaaaaaattatcaaaggtaatacatatatttagaagataaatgtagaaatcaaaaatataagttggaatatagggttttttttaagattgggagtaattaaaaatacaaaatatactaacacataagtatatgtatatatcaagtgcataatacattatatagttcatataactgacttaacaactgactagcttatgtgtgtgtatatataactatcttatattaattccaaaattattaattatattagtaaatatggtctatttatataatttgttgataatatttgtgcaatatattgatctggtcaaggtcatgaaaatattaatattcaagccaaatatttgtcttctggatctccagaaaagaaactgtttagttgaaatctaccacattctgaatttata

SEQ ID NO: 681780 - DNA, 951 bp, Homo sapiens
taaacctgactcctgtttaattttttttttttttacattagaatgccacacagttgtctaaggaaggggcccatggaatgatacaggtctgtggcctgttaggaactgggccacacagcaagagggagagcaaacattatggtttgagctctgcttcctgtcagatcagcagctgcattagattctcataggagtgaaaaccttattgtgaactgcgcatgtgagggatctaggctgcgcactcattatgagaatctaatgcctgatgatctgagtgatctgaagtacaatggtttcatcccgaaaccattgcccccaccccaactcccacctccatgaaaaaattttcttccacctttcaggaaactggtccctgatgtcaaaatggttggggaccaatggtctaagatgtctaaaggaagaaagaaatttttctgcgtaaaacatttggtatatttttaggtagacctagtgtaagtccagattgagaggctttgctgtgtttcacagttgcctttttgtgtgtgtagacaccgtgtatgtgtgtgagtatatgagtgcatcaaataatgaatagtaatataaaacaaattgcctttcttattgtctaatgttaattaaaaccaaatgtccctttcacaatgcacctaatgtgctttaattattctgtattgtgcggatgtgacaaaagggaacatgcaattattaagcggaaaaagtacagcattgtaccaataattgtccataacgtgaaatagtattgcttttcccctgtgaataacttgaatccttgccaaataatccactccacgccctttaaataatgtaaattattctttcayaataatatgtatttaaaattaccttttattgagtttaacagaaacatgttcatttccattttccttctttccatagtttgaaataatacaaagccataatatgttttta

SEQ ID NO: 681781 - DNA, 1393 bp, Homo sapiens
tgtgaagatgaggggaagaaaaccaaaataatgtatataaaattatttacagttgaggtctgtttgggggtttaaacctgtcaggggatactataatattgcatattaatggctcttttgtgacttgttaaaaatggagttatttgcaatacaaataactaaggattcccagaagttcagaatgtaaagaaagtcctttaagatgctcaaagctgtgaaagcagtgcytgttaggaaaaaatgtgcaagtaaaatcatcaccttcataagctacatatgtctttaaagtgcaaacatttctcaggttatgtatttctctgtgacccattttatttgcattttgggtgagttcacggtgaaataagaaggttctcaacgttactatcatcctgggtattaactgaccatcagtctgtttgatcatgacgaaaactaacacaacattaaaatacagtaataatgatcatattgaatgatcattactgaatgactctgaaaagactcgttataactatatttaaggaagaagaaatttccacaagttaaattgttcagagatctgattttttttgtctgtttgttttcactgtctctgacatcatgatgccaaataaacagtttttctcaattattattatatataaagtttaaaagccagtataaatcatcccatgcgttctttttatgtacaaaaagtctttatcgtgcattaaatagacatctgggtacttgtgctttgatagtttaaacttctttttacattaatcgtaataagaaatgttagtttttaagaaataatatttaaaacatcaaaatcatttagcgtttaatattacactccaattttcttagttgaggaaagtcctgtttgagctgaagattatatgttgtccctgaacttacttctgattttgtgatgagcattgcatttttttgagcattttagaaaatcttataatgcatatataacatttgcagtagtatttgattgtttaaagtaaccatgattgcaatatggataatttttttaatgcataagcctggaaaattgctcatgagtttacatctctctctctatatatatcaatataatctatgtcccatcatagaggactgcctcagtttcaagccactgtactgaatccctagagttactaggcaagaaatgtgaatgtaggaactgggcaatgttcaagaaaaataaagcagccctctcagtctatcttaggttttttattttttcacttcagataaagatatgggtattgaaactgttatgagttgaattacatgcctcagaaaggatatgtcaaagtcctacctaccccagtacctcagaatgtgcccttatttggaaatagtgtcatcatatagttagggtaatgtgtgatca

SEQ ID NO: 681782 - DNA, 1393 bp, Homo sapiens
tgtgaagatgaggggaagaaaaccaaaataatgtatataaaattatttacagttgaggtctgtttgggggtttaaacctgtcaggggatactataatattgcatattaatggctcttttgtgacttgttaaaaatggagttatttgcaatacaaataactaaggattcccagaagttcagaatgtaaagaaagtcctttaagatgctcaaagctgtgaaagcagtgcctgttaggaaaaaatgtgcaagtaaaatcatcaccttcataagctacatatgtctttaaagtgcaaacatttctcaggttakgtatttctctgtgacccattttatttgcattttgggtgagttcacggtgaaataagaaggttctcaacgttactatcatcctgggtattaactgaccatcagtctgtttgatcatgacgaaaactaacacaacattaaaatacagtaataatgatcatattgaatgatcattactgaatgactctgaaaagactcgttataactatatttaaggaagaagaaatttccacaagttaaattgttcagagatctgattttttttgtctgtttgttttcactgtctctgacatcatgatgccaaataaacagtttttctcaattattattatatataaagtttaaaagccagtataaatcatcccatgcgttctttttatgtacaaaaagtctttatcgtgcattaaatagacatctgggtacttgtgctttgatagtttaaacttctttttacattaatcgtaataagaaatgttagtttttaagaaataatatttaaaacatcaaaatcatttagcgtttaatattacactccaattttcttagttgaggaaagtcctgtttgagctgaagattatatgttgtccctgaacttacttctgattttgtgatgagcattgcatttttttgagcattttagaaaatcttataatgcatatataacatttgcagtagtatttgattgtttaaagtaaccatgattgcaatatggataatttttttaatgcataagcctggaaaattgctcatgagtttacatctctctctctatatatatcaatataatctatgtcccatcatagaggactgcctcagtttcaagccactgtactgaatccctagagttactaggcaagaaatgtgaatgtaggaactgggcaatgttcaagaaaaataaagcagccctctcagtctatcttaggttttttattttttcacttcagataaagatatgggtattgaaactgttatgagttgaattacatgcctcagaaaggatatgtcaaagtcctacctaccccagtacctcagaatgtgcccttatttggaaatagtgtcatcatatagttagggtaatgtgtgatca

SEQ ID NO: 681783 - DNA, 611 bp, Homo sapiens
tgtaactgctttcagaatcttttcaatgtccaatgatgataaatttttgtgctgtgaaggtgcatttaattttgagaagtagccaaaagtccatgaaagcaaaactgatcagtataaagtgtgagctatttgggtagcactgtttttatgcaaaaatgagatgtaatttgtaaaasatcaatacgatttccttgcatgggttttaaacgtttcagaggggaagtccagtgatatttgaaataaattcagtatttctagaatcgatactggtttctaaaattactcctttgaaggacatctattttgactgtttaaatccctttgtgtctggttaaaatgtacacacacagagtcagcattcatcactttatgtcactcctaatagaaccagagatggtgacatttctcacatctgtaatacaccaagtaataaaaaatgtgtgaaaaatttagcaattagaaatgcttgctatggagtggatcaaacttcttattttcatcagctcgagatgtgcattttatatgttgtgtgacaaagtaattatggccttatggaaacctcttggtcataaagctggttaacaatacttgcaaggcgtgtgaaggtagac

SEQ ID NO: 681784 - DNA, 1425 bp, Homo sapiens
tttctgatggctatcacggccccaggtgatccagctacgtctctaacctcatttgctgtgactccttcctttatcaccttcctttatcactggcctctggccattccccaaacacaccaaactggttccactctcagtgttgtctttgctgttcccctgcctaaaatgctcttcccctagagagcagaatggcttgcccccactgcttcatttgtgtctgcccccatcagagaccctgtctgaagctgcatcctccatcaccctgtctactctgctgtgttttccctcctatcacttctcaggacctgacactctctttatatttctaagttgagttgcttattgtctgtatcttccatggaggcagagactttattttttgcactgctattcctgaccaccagaaaaaaaaaattgatgaatagacaaataagaaatgtatggtctggtttaatactcacaactccttaagtgtattgtttcacaggtgagacaaataaggtctagcaaggaaaagtggtttgcatggttggctctgttgactcctggggtcttcatcatgatgatgtcccattctgtgtttggctacacacctaccagttcatatccagcccctcctagacaactgaatgaagctacaattgtgcacagtgcatgatgaagttactaaagcttgtcaccacctggcagggaaagggagagcagccctgggcgcctctgtcacttcacaccgcccctcccagattgacttctgcattaaacctgtggcaggcacagctctgcctcgcccctcccttcatcagacatccatgccactcctcagtcacatcagcacctgctgagcagaggctttctccccactccctgctctctttcctcttgatcttttctgggcagactcaaagatgcaggccacagcggaatgagggagttgtgaatagacaatctcctttgatgtctttccccagctgcctacattcttcaataaaaaggctacctcattctgccagtaaacctcttggtggtacctgaccttctgtggtttgatcttttctcagcctgtctttgcaattccctcaaacctagtttccctttcagtgcctagaatgctgatttactttgaaagagcaccatcagctgtggtttttctgtgccgcragttaaccaataactgagtccaggccagcagtgagtagaccaaccaatgttcccattctactcaccctcagccttccagcaacaccgttccctgagttttgggtgaaaggcataccaagaagcagaaatacaacagcagatccgtcagtttgcagaaaatcgagtaattccaacttatttttgaaggaaaaccttttagcagctcttacaaaaggaaatacagaaaataaaaatcacagggcttcccctcccctcatttttatgtac

SEQ ID NO: 681785 - DNA, 1425 bp, Homo sapiens
tttctgatggctatcacggccccaggtgatccagctacgtctctaacctcatttgctgtgactccttcctttatcaccttcctttatcactggcctctggccattccccaaacacaccaaactggttccactctcagtgttgtctttgctgttcccctgcctaaaatgctcttcccctagagagcagaatggcttgcccccactgcttcatttgtgtctgcccccatcagagaccctgtctgaagctgcatcctccatcaccctgtctactctgctgtgttttccctcctatcacttctcaggacctgacactctctttatatttctaagttgagttgcttattgtctgtatcttccatggaggcagagactttattttttgcactgctattcctgaccaccagaaaaaaaaaattgatgaatagacaaataagaaatgtatggtctggtttaatactcacaactccttaagtgtattgtttcacaggtgagacaaataaggtctagcaaggaaaagtggtttgcatggttggctctgttgactcctggggtcttcatcatgatgatgtcccattctgtgtttggctacacacctaccagttcatatccagcccctcctagacaactgaatgaagctacaattgtgcacagtgcatgatgaagttactaaagcttgtcaccacctggcagggaaagggagagcagccctgggcgcctctgtcacttcacaccgcccctcccagattgacttctgcattaaacctgtggcaggcacagctctgcctcgcccctcccttcatcagacatccatgccactcctcagtcacatcagcacctgctgagcagaggctttctccccactccctgctctctttcctcttgatcttttctgggcagactcaaagatgcaggccacagcggaatgagggagttgtgaatagacaatctcctttgatgtctttccccagctgcctacattcttcaataaaaaggctacctcattctgccagtaaacctcttggtggtacctgaccttctgtggtttgatcttttctcagcctgtctttgcaattccctcaaacctagtttccctttcagtgcctagaatgctgatttactttgaaagagcaccatcagctgtggtttttctgtgccgcgagttaaccaataactgagtccaggccagcagtgagtagaccaaccaatgttcccattctactcaccctcagccttccagcaacaccgttccctgagttttgggtgaaaggcataccaagaagcagaaatacaacagcagatccgtcagtttgcagaaaatcgagtaattccaacttatttttgaaggaaaaccttttagcagctcttacaaaaggaaayacagaaaataaaaatcacagggcttcccctcccctcatttttatgtac

SEQ ID NO: 681786 - DNA, 680 bp, Homo sapiens
tgctggtgtgctgcacccattaactcgtcatttagcattaggtatatctcctaatgctatccctcccccaccccccaccccacaacagtccctagagtgtgatgttccccttcctgtgtccatgtgttctcattgttcaattcccacctgtgagtgagaacatgcggtgtttggttttttgtccttgcragagtttactgagaatgatgatttccaatttcatccatgtccctacagaggacatgaactcatcattttttatggctgcatagtattccatggtgtatatgtgccacattttcttaatccagtctatcattgttggacatttgggttggttccaagtctttgctattgtgaatagtgtcgcaataaacatacgtgtgcgtgtgtctttatagcagcatgatttatagtcctttgggtatataccctgcaaaaacaataaacttattggctaagcaggtttaaaaaaaaaataccctgcagaagcaaattattacatttattatctaagttccaaaatcaaaagttggttaatttgtgtcatgaatcatactggaggcttattctaaattctaaatatcctgtttatagcaacttaaaatgccagctcattgtattataattttgacattaatcaacctgacatttttcttttataaaggtaaggcatgaac

SEQ ID NO: 681787 - DNA, 680 bp, Homo sapiens
tgctggtgtgctgcacccattaactcgtcatttagcattaggtatatctcctaatgctatccctcccccaccccccaccccacaacagtccctagagtgtgatgttccccttcctgtgtccatgtgttctcattgttcaattcccacctgtgagtgagaacatgcggtgtttggttttttgtccttgcgakagtttactgagaatgatgatttccaatttcatccatgtccctacagaggacatgaactcatcattttttatggctgcatagtattccatggtgtatatgtgccacattttcttaatccagtctatcattgttggacatttgggttggttccaagtctttgctattgtgaatagtgtcgcaataaacatacgtgtgcgtgtgtctttatagcagcatgatttatagtcctttgggtatataccctgcaaaaacaataaacttattggctaagcaggtttaaaaaaaaaataccctgcagaagcaaattattacatttattatctaagttccaaaatcaaaagttggttaatttgtgtcatgaatcatactggaggcttattctaaattctaaatatcctgtttatagcaacttaaaatgccagctcattgtattataattttgacattaatcaacctgacatttttcttttataaaggtaaggcatgaac

SEQ ID NO: 681788 - DNA, 636 bp, Homo sapiens
tctactaaaactacaaaaattagccaggcgtgatgatgggtgcttgtaatcccagctactcaggagactgagggagcagaagcttgaacccgggaggtggaggttgcagtgagccaagattgtgccactgcagkccagcctgggcaacaagagcgagactctgtctcaaaacataaataaataaactcaattaaaaaaaaggtataattaaaaatcaagtaaagcttacctgaaagttccgaaaccatatcctattatccaaaatggtgaaagtaaacacgtggtccacaaatggttggcttttgggatgataccgtggtgtactaaagatctagttaaaaaagtgtatgttagttccttattccaagatatatcatgtatattttggatagctaattttaaagatatttacctgaattaagagttcttttaacaaagcataatgtggtaattcatcaaaagcctataaaaataaggtaagcatattatttaacagtagactgccttgtttaaaactgtttgctcatttgtttctataacttggctataacctcattataaatgtacctgaaagaattgataatccataaaaccaaggtgggggtgaaactacattgaataacacaactatatcta

SEQ ID NO: 681789 - DNA, 636 bp, Homo sapiens
tctactaaaactacaaaaattagccaggcgtgatgatgggtgcttgtaatcccagctactcaggagactgagggagcagaagcttgaacccgggaggtggaggttgcagtgagccaagattgtgccactgcaggccagcctgggcaacaagagcgagactctgtctcaaaacataaataaataaactcaattaaaaaaaaggtataattaaaaatcaagtaaagcttacctgaaagttccgaaaccatatcctattatccaaaatggtgaaagtaaacacgtggtccacaaatggttggcttttgggatgataccgtggtgtactaaagatctagttaaaaaagtgtatgttagttccttattccaagatatatcatgtatattttggatagctaattttaaagatatttacctgaattaagagttcttttaacaaagcataatgtggtaattcatcaaaagcctataaaaataaggtaagcatattatttaacagtagactgccttgtttaaaactgtttgctcatttgtttctataacttggctataacctcattataaatgtacctgaaagaattgataatccataaaaccaaggtgggggtgaaactamattgaataacacaactatatcta

SEQ ID NO: 681790 - DNA, 541 bp, Homo sapiens
gttatttttaaagatgagtttgttaggtactaaattctgcgtaccagatgtgtaagttctactattctattgctttgtgtatgaccgccaagtaaatgacatcaacatttagttacacaaataattagaactctaggctgagcacattcctgtccattcctttggtcagatatcaacgaatgtgcccagaacccactgctgtgtgctttccgctgcatgaacacttttgggtcctatgaatgcacgtgcccgattggctatgccctcagggaagatcaaaagatgtgcaaaggtaaggcctcagactcrggagtagttcgaactttatttgtcatgctggagatacatcttaatgattttatagttctcaactaatttcttctagagctttacagaaatatatatatgacagcattttgctagtagatttccatacctagataacaagacacatgatggtatttttgtaaaatcaagtccgagataagatgggttgagaagcccactattctcacactcttggattcttattaaggcaaag

SEQ ID NO: 681791 - DNA, 619 bp, Homo sapiens
agcagccatactactttcttcataggaagacagttgcatccatttcctaatcattctagactatcttactatagaattgctaaatagtgggatcatagctaattcttactgatagacaccaaattaatgccactaastatcgctcatatcactagccttctttttatttgctactatttcttatggcaattccttattactcagtctctatccctgttagttagagttaccatttggttagtggaaattgttatggcaatttgtataaaagagttgtgctatatactttaacagtaaatgtcattgtgtctaaagaaacattgtgccaactcttaacctgatgggggtttttttctgtgttagttgtgctttcacctctgtctttaaatataaaatcattccaccattttttccctgtaattggaagtttcaccatgacagtcaattgactggctatcagaagccatgtgacttatcttattctgggcacccaaaacatatgctaacataaatcagaagcagggcggttgacattaaagagtaaggggcagagtatcaagatgggctatattgcatctagtctgttcttagtaacatgtgtccaggaaaattatttcgg

SEQ ID NO: 681792 - DNA, 633 bp, Homo sapiens
tgatttcaaaatttgtttattttattaggctacactgcctctctgggtataagaataagcatagttcatcaccttaaggaatttatrgtcaattgtaaacaattaactatatagggtgaagggaagtaaatgttgaatagactattctgattaatgtctggctccttgggatgtgatcctgtattaatagtcttgaagactttcatattcagagatttgagcacacagtaggttccatatcacagtattttgaaaagaatgtacaccacaagtaccagcttgcctttttagccagcatatttggaaaagttgagcattttatgtctgacctgaattcaaacacaggtgtaacaaaactgtgtaagtaaactagtctaacaggaagaaggtagagatgtttggtcatgtaatgactccttaaatctacatttttttcagcaagtagaaaagtatttgggtagctacaaatggagagatttttctttaggcaactaaaaatatatacatagaatatatacaactacaatttgccaatttacaattaaaaaataaaaattaaaagaaacatacagatagaaatacatctttcctcttgagttatttaggtggagctcaccgtgatttttttttttt

SEQ ID NO: 681793 - DNA, 621 bp, Homo sapiens
ccacaggctctggaatcaggatgcccaaattcaaatactggcccttccatttactagctttgttaccttgcgcacactatctgacatctctgtcacttaatttcctaatctaaaaacgggataataatatcttttaggatttctgtgaggacaaaatgagctgtaatacatagactgcttagaaaagtaaatgacaaataataagtgctcaaaaaatgatagtcattattacgtggttttttggccmcaggcaacttacacctagtaaaaagaatgcatatataatcgggccactttgctcaccagggtttcttaatcttttcattaataagctactgaattaataaagaaggtatatggctccttcctcctctggccatacattctctttggtcatcactactttgtaggcctccttggctctttctcttaaaattcccaattaataccttgataatatcatgtttcttataaacatatatgcaaatatacttataaagccattttgattttcaagatatttaaaaactaagtgtgtacaacaggaagacagacccctatcatttgaaagcaacattacactaagtgaagaagccagacacaatttagaataagtgatca

SEQ ID NO: 681794 - DNA, 621 bp, Homo sapiens
ccacaggctctggaatcaggatgcccaaattcaaatactggcccttccatttactagctttgttaccttgcgcacactatctgacatctctgtcacttaatttcctaatctaaaaacgggataataatatcttttaggatttctgtgaggacaaaatgagctgtaatacatagactgcttagaaaagtaaatgacaaataataagtgctcaaaaaatgatagtcattattacgtggttttttggccacaggcaacttacacctagtaaaaagaatgcatatataatcgggccactttgctcaccagggtttcttaatcttttcattaataagctactgaattaataaagaaggtatatggctccttcctcctctggccatacattctctttggtcatcactactttgtaggcctccttggctctttctcttaaaattcccaattaataccttgataatatcatgtttcttataaacatatatgcaaatatacwtataaagccattttgattttcaagatatttaaaaactaagtgtgtacaacaggaagacagacccctatcatttgaaagcaacattacactaagtgaagaagccagacacaatttagaataagtgatca

SEQ ID NO: 681795 - DNA, 722 bp, Homo sapiens
ctgtaagaacatttagattgctagccataagaactgtaatttgcaacacagttattacctaggcttcactaacttattccccaatagaaaaaaaaatcagtaagaaactttatttgtagttttgcaattaatttgtcttatcaccttagggtygctttgcttgaagcaaagctaaaatggatgtggggcagagactgctaccagtatggtcattatttaagcattttatttatttttaatattcatttcaatgagaggatgagaggtatttgggtacaaagctagcttaagtactgtaaagattgagcatcaggagttttttttttttttgaggcagttttactctgctgcccaggctggagtgcagtggcacaatctcagctcactgcaacctccacctcccaggttcaagcaattcttgtgccttaacctcctgagtagctggaattacaggcatgcaccaccatgccgttaatttttgtatttttagtagagacaggatttcgccatgttggccaagctggtcttgaactcttggactcaagtgatccacctgcctcagcctccctaagtgctggtattacaggcatgagccaccatgcccagcctgtatcatcaggagttctgatcaaagaggcaagccaaaccaacctagaaagcccaccattctgctccaaacatgtaacaatgcaggaggaaaaaagtgttatgtcaacagcaac

SEQ ID NO: 681796 - DNA, 1064 bp, Homo sapiens
ggagaaagccaatctctaaagatcctattagaatcctcatccagctttgcctcttcatttacctaatgggttgcttccactcagctcaaccacaaaggccttttctgtcaatggagatctccaaagaacctagaggaagagaatcctgtgaatataccactattgttaatggagttgacagtggtagggcttaagggagccccaagaatggatgaactcccaacccaaaccttgtgccacattttcttcaccctcagagttagaggcctccctggatctttgagtccacccagtggaaggatattgttaagtgggcaccctgccctttgcagctcctctccctggggcctcatccacatacaagagaggattaggtgtttatgtgagcatcttagctcatggagatggagtagtttacctctctggtttttcttccatttcctgacattcatttctggaaaagtaaggggctttcctgccagtaggagtttgccacaaaatgtcttttctctctcttaacaaaatcatacttcaaatcaggwtgtcctatgtatgttcttacatctcataaattgtccaaagctaccacatgtcttgtttatgattcagcatattccgagcttctttctgaagtagccaatattaaacaatgcattttcctccaaaggctatattatctatctcaaaatggtttccatacatttactcttaatacaaatggaatttccaaaattagcaagagttttagcagattccacaagctcctcctatccctgcacaatgcactctacagtttggaagtcatggtaaggctgtactcctggttcagtacagtctcttaattcaaatgatactggacagaacccccaaataaaacagaggtgtcaaatgagaattttgaaatctgtttaaatttggacaactgcaaattctgtaggactgtgaaaggcagaattctgcgattcctgccagggctcaggagtggcttccttgggcttctgccttgcactgcaacacatcaatccaggaaggaagccaagtctggtcactggtttctgcaaaaa

SEQ ID NO: 681797 - DNA, 834 bp, Homo sapiens
atttttatctacttaactgaaatgctcagggaggagtaagagatagaaaagaagagcctatattttccactccggcaaatcttttagaattttaggaaatatttttctaattctatcacagagttctagttaatctttaccccttcccaaaactcctaaaggctatcagtggttctcaacagtaacctttaatagagagagtagagacagagtaggacaaagcagaatttcatggaaaatgctcccctgtgtggcactcctttgagaaccctgggatcaaaacatatgtgagagattgtggtccatacggtgatcagtcagagattcctaggtatcaaatgtttatgtccatgctgtagtttgaaagttcacaagggaaggaagagtaaactgtaccagaagctcattcctgagggtctcagagattaatgagccaggggcattattgtctacaggctctccaatctagagaattcttgtgcagcaccaaataacagaaattgctagcaatgagaagcatatcaagggctagagaattgtgttggcaccagagataagacagcaaaatcccataatatggtggaggctccatggccccactgggtaggactttacctaggacattctgagctgttccaattgggactccaaggcttcaattcaacaaaatggcacygagagaaccatgtgctttcagcaagaaaattccctggaaatggcttgtgcttaaggagagaaccgcttcaaaactcaggcaaagaataccagaggcctggtcctaagagaaacccctgcctgtgagcagacagtagataccacatgtttgtggatcac

SEQ ID NO: 681798 - DNA, 1954 bp, Homo sapiens
ctctagggactcagttaagggagtttatctctgagaattctttgtctttcatacattcttgtggtctagcactgccatttccaaaagaaagatttgcagttgcccattttcctgatgagggaaaagaatcatagagccaccatccagaggaacactaactcttctagggactggccctgaacagaatcatgaaggagctgaagctcagatttgacatctccagcttacctcatctctacctctctctttcaccttgaaatactcttacctccctcctttggtgcctactctgtattctaaagagttttatctcagatggctgtcaatttatcatttcagtgattctagaacttcactgggtataagaaccactctggctcacccatcttcccaactagagattctaggggtatctgggttggggtccctacatcagtgtttttaacagagcttccagatgattctgatagagatgattcacagatggagaaactgcaccagggagtttgttgatgattaaacaatttgttgataatggctcaggttttaacaaataactcttgatggaaagtatgtgacgctgaaggtatctaactcaatggtggaatgttgaccagagaaggatatttgaaaggcagaagattatctctggtgctctctcattcaatgtcatttatcctaaaagaagaaaataagtctttctgtgtcgcaaacaaaaatattttgcatcattcctctgattgtacagttttaaatgcaaccaatgtagtcatcaaaaatcatgtttttgatatatatttaatcacagagaaagctgtttacagcatgttagagtgaaagtagaattacaaaaccttttttaaaaaatcattcatcctataaacaaatagggctcaaatcaaactctgtaagagacagttactcaccagttcataaggttgacccttagagcttccttccctgcccctacctgcagctctcatggtgcgaagacatctttctgccttgattgccaagacaaatccacagcatcatctgaatatttccaaactatccacaaaattatatagcaaacaaaatttatttagtttaaatgtaaagatattgccatttttctcaacgtcacggtcaaaaccaaacatcaaaaccgcagtcagtgatcatagctctgtttttcataggtttaattatagtgcctatgctttttctttttactttattaattttactttgagttatgacatttcttttttgtgtttgtgtatgtgtgtgtgtgtgtgtgtttgtttgtttttttgtttgtttgtttgtttgtttgttttgagactgagtctccctccrttgcccagtctggagtgcagtgatgcaatcttggctcactgcaatctccgctttctgggttccagcgattctcctgcctcagcctcttgagtagctgggattacaggcgcaccccagtacacctggctaatttttatatttctagtagagatgtggtttcaccatgttggccaggctggtctcaaactcctgacctcaagtgatctgcctgcctcaacttcccaaagtgctgggattacaggcgtgagccaccatgctatgccaagttatcacatttcttacacatttataactacattgaaaacacagctcttaataacataagctgatattcaaaaggaaagtaaaatgataaattgaattctataggtctcttttgaccttgactttatccactttaaattgtcattgccatttccatcactgcttcagagaaatttgagaaacaatataattttcatgcaacccttgatcctaagacaggtctctcttgaaacccccccccaaggcctaaaatttaataagcatcattagaaggcagttttccaggttcttgcaagcttagaattaatctgggggctgacttctcatcggttaatcttcctttttcaaa

SEQ ID NO: 681799 - DNA, 1954 bp, Homo sapiens
ctctagggactcagttaagggagtttatctctgagaattctttgtctttcatacattcttgtggtctagcactgccatttccaaaagaaagatttgcagttgcccattttcctgatgagggaaaagaatcatagagccaccatccagaggaacactaactcttctagggactggccctgaacagaatcatgaaggagctgaagctcagatttgacatctccagcttacctcatctctacctctctctttcaccttgaaatactcttacctccctcctttggtgcctactctgtattctaaagagttttatctcagatggctgtcaatttatcatttcagtgattctagaacttcactgggtataagaaccactctggctcacccatcttcccaactagagattctaggggtatctgggttggggtccctacatcagtgtttttaacagagcttccagatgattctgatagagatgattcacagatggagaaactgcaccagggagtttgttgatgattaaacaatttgttgataatggctcaggttttaacaaataactcttgatggaaagtatgtgacgctgaaggtatctaactcaatggtggaatgttgaccagagaaggatatttgaaaggcagaagattatctctggtgctctctcattcaatgtcatttatcctaaaagaagaaaataagtctttctgtgtcgcaaacaaaaatattttgcatcattcctctgattgtacagttttaaatgcaaccaatgtagtcatcaaaaatcatgtttttgatatatatttaatcacagagaaagctgtttacagcatgttagagtgaaagtagaattacaaaaccttttttaaaaaatcattcatcctataaacaaatagggctcaaatcaaactctgtaagagacagttactcaccagttcataaggttgacccttagagcttccttccctgcccctacctgcagctctcatggtgcgaagacatctttctgccttgattgccaagacaaatccacagcatcatctgaatatttccaaactatccacaaaattatatagcaaacaaaatttatttagtttaaatgtaaagatattgccatttttctcaacgtcacggtcaaaaccaaacatcaaaaccgcagtcagtgatcatagctctgtttttcataggtttaattatagtgcctatgctttttctttttactttattaattttactttgagttatgacatttcttttttgtgtttgtgtatgtgtgtgtgtgtgtgtgtttgtttgtttttttgtttgtttgtttgtttgtttgttttgagactgagtctccctccattgcccagtctggagtgcagtgatgcaatcttggctcactgcaatctccgctttctgggttccagcgattctcctgcctcagcctcttgagtagctgggattacaggcgcaccccagyacacctggctaatttttatatttctagtagagatgtggtttcaccatgttggccaggctggtctcaaactcctgacctcaagtgatctgcctgcctcaacttcccaaagtgctgggattacaggcgtgagccaccatgctatgccaagttatcacatttcttacacatttataactacattgaaaacacagctcttaataacataagctgatattcaaaaggaaagtaaaatgataaattgaattctataggtctcttttgaccttgactttatccactttaaattgtcattgccatttccatcactgcttcagagaaatttgagaaacaatataattttcatgcaacccttgatcctaagacaggtctctcttgaaacccccccccaaggcctaaaatttaataagcatcattagaaggcagttttccaggttcttgcaagcttagaattaatctgggggctgacttctcatcggttaatcttcctttttcaaa

SEQ ID NO: 681800 - DNA, 1954 bp, Homo sapiens
ctctagggactcagttaagggagtttatctctgagaattctttgtctttcatacattcttgtggtctagcactgccatttccaaaagaaagatttgcagttgcccattttcctgatgagggaaaagaatcatagagccaccatccagaggaacactaactcttctagggactggccctgaacagaatcatgaaggagctgaagctcagatttgacatctccagcttacctcatctctacctctctctttcaccttgaaatactcttacctccctcctttggtgcctactctgtattctaaagagttttatctcagatggctgtcaatttatcatttcagtgattctagaacttcactgggtataagaaccactctggctcacccatcttcccaactagagattctaggggtatctgggttggggtccctacatcagtgtttttaacagagcttccagatgattctgatagagatgattcacagatggagaaactgcaccagggagtttgttgatgattaaacaatttgttgataatggctcaggttttaacaaataactcttgatggaaagtatgtgacgctgaaggtatctaactcaatggtggaatgttgaccagagaaggatatttgaaaggcagaagattatctctggtgctctctcattcaatgtcatttatcctaaaagaagaaaataagtctttctgtgtcgcaaacaaaaatattttgcatcattcctctgattgtacagttttaaatgcaaccaatgtagtcatcaaaaatcatgtttttgatatatatttaatcacagagaaagctgtttacagcatgttagagtgaaagtagaattacaaaaccttttttaaaaaatcattcatcctataaacaaatagggctcaaatcaaactctgtaagagacagttactcaccagttcataaggttgacccttagagcttccttccctgcccctacctgcagctctcatggtgcgaagacatctttctgccttgattgccaagacaaatccacagcatcatctgaatatttccaaactatccacaaaattatatagcaaacaaaatttatttagtttaaatgtaaagatattgccatttttctcaacgtcacggtcaaaaccaaacatcaaaaccgcagtcagtgatcatagctctgtttttcataggtttaattatagtgcctatgctttttctttttactttattaattttactttgagttatgacatttcttttttgtgtttgtgtatgtgtgtgtgtgtgtgtgtttgtttgtttttttgtttgtttgtttgtttgtttgttttgagactgagtctccctccattgcccagtctggagtgcagtgatgcaatcttggctcactgcaatctccgctttctgggttccagcgattctcctgcctcagcctcttgagtagctgggattacaggcgcaccccagtacacctggctaatttttatatttctagtagagatgtggtttcaycatgttggccaggctggtctcaaactcctgacctcaagtgatctgcctgcctcaacttcccaaagtgctgggattacaggcgtgagccaccatgctatgccaagttatcacatttcttacacatttataactacattgaaaacacagctcttaataacataagctgatattcaaaaggaaagtaaaatgataaattgaattctataggtctcttttgaccttgactttatccactttaaattgtcattgccatttccatcactgcttcagagaaatttgagaaacaatataattttcatgcaacccttgatcctaagacaggtctctcttgaaacccccccccaaggcctaaaatttaataagcatcattagaaggcagttttccaggttcttgcaagcttagaattaatctgggggctgacttctcatcggttaatcttcctttttcaaa

SEQ ID NO: 681801 - DNA, 1835 bp, Homo sapiens
atggctccttrcatgtgtgtagtgaaaggtcatggaagctgtcaaacaactctgatccaattgagtgacagcatcactgcaagtaaagacatagtgggaaaaaaaaaaacattcaatattgaaataattacctgaaagactgttcttagttctttggccttcagaactgctataagtagtaatttctgacttaaatatgttaagaggcatatttaagcataaaacactaagctaaaacatagtaagcaactttcaatatattgcgggtttgctaccagagagttgaacttttatgctattttcaatctttctccctctgagatgactgagcaatccaatattcttaagtaggcagtttgtctaacatgacagtatgaacatcttactgcttttattttctttgcaaatctgcattccctccaaccaccccacccttaggagggcagggactctatattgtacaactttgagacatcaacacctagtgtgatgcctacataatgtcaatggatgataaatgctttttaattaaattaaacaaatgactctgcagagctcttctcaattaaaaaaaaagtttataaaactgagcaaaagatatgaccaaaaatatataaatctccactaaacacataaaaagaatttcacctatactatatatcagggaaatgcaaaccaaaacaataaaatatttttcatctatcggacatcatttaatttaaacaattattgaaatgttacatcttgacaagtagaaaggacactcatagtataaattgattcaatttgacattgtctatccaaacttgaaatgtgcatactctttgatctagtaattccattttgaagaatccatatgggaaaaaaactcaatatgtgcacaaaagtagaagattcaataaagcatggtttgttattgaaaaaaattgagaaagcaaatgtccattaataaagaaatggtaaataaataatagtgcatccatatgatgcaacactgaggcaacatcaaaaagaatgaggtagactttttactcattttggaaaatcttctacatctaattaaggagaagagcaagttaacaaataacaaagacataatcccatttgttttcttttcttttttttttccagaggggccatatatgggtatatgtgtgcaaagtagactttattaaagagtactcaggttggacacagaggaaggggacattatagcaacttaaatgattttgagctaaatgttattcttctctttatgagtcttagtaggatgtttacactgactgccttaccttgtgtagtggcccccagccccatgccttctcagtggtttttctcgtttctcagttttttttttaagttaatgcgtgtatatatgaagctatgaaatgcaattatctttttttaatttttttctttctactgtttttgtttggtaaattagaagattttaatttgccttgctcatcagattcactcagcttgtcatagtgactggaaatactcaataatggctacataaatggatggatagaggaacacaaacaggctccctttttttcttagttgccagaatctctaaaggtgtttattgaagatggttttcacaccttagccacggagaatgaagaggaggtatctgcattttaataaggaattatgaaagacagaaagaaaggaattttagcatggagttttgtttgcaagacaccttcagtaaaatattcactgaatgaatgacaaatttctggtgttggaattgatataaaggagatatttagggagattgagtctttccagtatcttaaaaataattattggaacaattcaggagg

SEQ ID NO: 681802 - DNA, 591 bp, Homo sapiens
ttgagtagccaggagactgaatagtgcagaatgtgggtagtttaggctacccataacctaaacatcaactagagaatctgattaaaatgcagattctcaggtttgaagccaagaaattctgattcgccggggtgggggaagagcccaggatttcatatatttaataggcattcccaggagtttcagatgcagatgatttgagaaccacactggcaggaaggacaccctcagggattgtgatggccacagcacagcagtggaactacattgtttgccttcactctaaggaaaggagcctttttccacctgacttacagcagaagaatcttgcgaaaaaaawttttttttttttttgagacagggtctcactattgcccaggcaggagtgcagtggtgtgatctcagctcactgcaacctccaccttccaggttcaagcgataatcctgcctgaagcctcccgagtagctgggattacaggcaagcaccaccgcacacagctaatgtttgtatttttagtagagacagggtttcaccatgttgcccaggctggtctggaactcctgagctcaggtgatccacttgcctcggcc

SEQ ID NO: 681803 - DNA, 1903 bp, Homo sapiens
ttctgctattttttagatattctttcattttattcaacaatattttgttcttttcagagtataagttttgcagttcttttgttaaatttacttgtaaatattttactatttttgatgcaaatgcaaatgtaattttcttaatttttttgattgtttattacaagtgtacagaaatgcaattgatttttatatataggtcttgtatcttgcaaccttgctgaacttgcctcttagttctaattgttttttagtggattccttaggattttctttatacactctctttcattttataatcttactttacataagtagaactgtcttgacataaactccttgaagcatgtgacagtcatttgctttaaggttttcatgtcagggtctcctggagttctgaatcaaaagagcttctttggaaatacagtcaccatttacctcccagctgtgaaaagccaaaaaaacccaaactaggctgatactcctgtgttgacctgaggtcattctgtgcctgtcaaaccaaataacacattcaatcttttgtatattttgaagactcagaaacccagaaatttttagaacctctttctcactctaattaaaacctactgctctgtcaatgggaaagaatgagtccaaacattctgaaaaccgtacaaatgtgtttacattttagtgggggcttcctgcatctttaacctctttaaattgacataggtaagatcttgtgtaataacacatttgcaaatatgcagatgcattttcaaatgaatataatctgatttagagaatattaactgactatcatagtagactatggataatactctaataattaattacaggttaacatttttaaaactcaaagcatatgctttaagtttatgctttaagccacgttatgttctacttcagcctaatacaagggagaaatttggagggggccctcctagctttctagtctcattattcccaaattagaaacattaccagcctaacactaactctgrggtctaaaatgaagttattttggcagccctagagttttcttgtcattgataactgaagattggcctttgtgcaggttaaataatcaaatcttagaggaaattgacatgcttttaaattatctacaaatattagcccttaaaagattatatagcagtatatattatgttaaccaatccatgtgcagctgatggactttgtgattcagtggataataagcattagtttttcctgctttgatcttatgtatatccatacagaaaaacaaaaaaacgatggagagagagatagagagagagagagaaaagaaaaagaaagtgttgaaaaagcttaaaagtccaacatttcaaagctaatcattttgttgaattgttgctatcaccttgatacttgatatattctgttagtgattttatcgtatgggtatttagaagctcatttcatgtaactacttccagcttactcatcccatttacttttgcatacatttattacttatacaccattttgacccagatagcaaggtaatgtgaaaacatttacaaatgttgaacttttgtagtaaaataacaacaacaacaagaacaaaaaaccaaaagagcagggagtgctgctcccaaatggacaaaggaaattatgaattagtttataagaactgattttcagaccaaacagtgcagtatagtagagctataagcactaatgaacagaagaaacataatcatgtatcacatcacccagcaaatatactctgctacaaaactggtaagatctcagctttgactgccacagagagcagcccatctgctgcagtcaggaaagaattgtgtaattatctgtgattaagtcctcctttcaccttggtgattgcaagaattgtcagtgggggagaaatatc

SEQ ID NO: 681804 - DNA, 650 bp, Homo sapiens
tctttgcttgtgtctctcagttccttgtttaggagttgggaactggttacttacactcgaaatagacaggaaagyccccttgaatatcctgaatgccactgaaagatgccgagttgacctgtggagggtgattggggcaaggcaggattgtcagaccacagccaacaaaggcagagcaggtgtggtagaaagcagatgggcctgaaatcagaaaatgtaggattaggccggcgtggtggctcacacctgtgatcccagcactttgggaggccgaggtaggtggatcacttgaggtcaggagttcaagatcagcctgaccaatgtgatgaaaccccacctctactaaaaatacaaaaataagctgggcatggtggcgggcacctgtaatctcagctactcgggaggctgaggcaggagaattgcttgaacctgggaggtggaggttgcagtgagctgaggtcgtgccactgcactccagcctgggtgagagaacgagactctgtctcaaaaaagaaaatgtaggatcagaccccaacatgtccatccagtaacttagggacttttgacacccagcccctgagatttagttttctcagataatgtagctggctcccaactggacctaagatggtggttaggatttggtgctg

SEQ ID NO: 681805 - DNA, 1271 bp, Homo sapiens
cactgacattttagggtctcttaagctaggtaatagtgtttacctagttattagtcttccataaaggttctgatccctagatactctcaaaatggaatagaattaaaatttataaaattagaataccaaaatggtgaggaattagatacctttctaatgtatgtgttggtgctggatgctttgtcagggcactgattaagttggcttgctctgttactatgacaaaaaaagaaattagcattctctactgatttaaattctctaatggtctaatcatttcattatttrtaatctcttcctggagaaaaagaatcacccaaaaaccacttctaaaaggcattgtttaaggtgaatgcgggaaatagttacaaaaccactgagggctaagcctaactaattcaatccctgcaggaaattccttataacacaatggctcagatgctgtcaggtaagtgatacttgaatatacttcccaggaaattcacagaatatcctgtcttggccatttgtgtaatggatctgaatcaaatttcagtatttgtctatcacagaaaaacagtaaaccctaatgtgcaaataagcatatgttagaactccaaaaagtaatagtggccagttacaatgtgatttacacaccagcaactcaacagaatatagttagagaaccataccatttttttttcaactcagcaagccttgatgctaaaagaatagatgtatgtactacagttgtgtttatgtaattgctgagttaatctaagcatatacattctttttcctctagaatagttatcttaattatgcccagtttgtaagcatactctatatcatgctctaggccaggttcaacaaactgtgtcctacagaccaaatcctggcccacgtacctggcttatgtaaataaagttttatgggaacgcaatcatatcctattatttactattgtctgtggccctgagacctgcttttgccataccatgatagagtcaagtagtcactacagagcttgtgtggccagcaaaagctaaaaactttattatctctgactcttcaccaaaaataggttgtctgctcatgctctaaatttcactgaagcaaacttttaaaatatgtatattataatttgcatatgcaaagatacatatttataaatacgttatatctttataagtctgtactatcttagtttcctattcttaaactaatcaaaggcaagaaatagggtaacattctggtagatgaaataaatgttattctgactgcattatttt

SEQ ID NO: 681806 - DNA, 644 bp, Homo sapiens
ttgaatttcttttgaaaagaaagtagcttgttgtgaatttcaaccttgctgagaatttgctgcgtcaatttgcagctagagattttataacaactcaaaaggaaagtccattgctgggaagtatttactactcaacatattgaagatttaattgtaatataatttcctagaaaggttaattggctttctttcctacaaacagcaataagcttgtgaagcttgtcttcaagctcgggcttggtggcaatctgtgggagactggagtagatagatgatctttaagatcttttttttagtctgtaggtggttactagatttcttccgttaagtttggatgtgataaagagatcatatgctaaatccttttaagggtatatatataaaacagtattacctagggacttgcttgttggaaacacagaaggtcctagaggaagaaccttcctcagaaggcaacatgcttcaccatgaattcacatataaacaaccttgatgtccatataatgttttttttttttgatattttgagatttaaacttcaaaatgtttccttttatttttctttttgcaaytccccccactaaagaagataaagcctacatctctctagtatcataacttttatatgagactacatgattaga

SEQ ID NO: 681807 - DNA, 1452 bp, Homo sapiens
agcacccagatatataaagcaaatattattagagctaaagagagagataggccctagtacaataatagctggagacttcaacatccaagtttcaagcactggataaatctttcagacagaaaatcaacaaagaaatatcagacttaatctgcactacaggccaaatggatctaatagatatttataaaatatttcatccaacaggtacagaatacacgttcttttccttagcacatggattattctcagggatagatcatttgttgggtcacttttgaggccaaatgagaaatgtgggcctgaattaaaattcagtcttagttcgcaacatgaattgtgtgtactattttataatgtgaggtcttcaggactgttctgtaaactggccttatttaggtaataggatgagaactatggtaaaaatattataggctggagactttggtccttttcctcttgcaaacatcattagtcattctagagatatgcttttgtttacatgatttaaacaayacttcatttgtttacaatcctgatggaaatgatgagtaactgaatttctggagtaaagagtttgctgttttgtaataagagaaaatagatcctttttttcccatgcaaatattgaatttttttatttgacagattattcttttcttttattcttcatcatcattagaacctgtgaatcaataaccattcagattaatttgcattcttcattttcccttcttgtttcaagcctggcttagtcattgcagagatattgctatagctgtcccagcagctgcagtgatttgcatcaattgacacccaagcagctagctctccttcatagtctggcagctgctattgttgttaatacctgtatccaaactctgttattgttgtaaatcttacagaaatcttactctccaccctcaaattcattttatctgtaaagcctttatatatatatacacatatataaaaagccttttacatatatacattaatgtatatgtgtatatataaaatatataatgagcatatatctgtatacattgattttatacatatatctgaaactactagtactaggcagagagaaatctagtttggaactttccagctgtggcctaggggcaagtgactcattttacctctcatcacttatcctcaactttaaacctaagataacaataaggacctcacagggtttttttgttttttggtttttttttgttgttgtttttgttgttttttggtttttttgtaaggaatagatagtacacatgtaaagcatctcacacagttattgatgctataagtgaatttaaaaatggagagtagttttgttatttgaagtatcagctctatctctccagttataaggagctgggcatgggttggagagtagagaatgggatgtgcagcaagagggaggatgggaaagtagttggaaaaagtgct

SEQ ID NO: 681808 - DNA, 653 bp, Homo sapiens
aaaattagatgtgcatgcccctataacaataaaattgtttcctctgcagagtgacatggaatatggaatgggacataattattttcagaatctcaaccctaattgttttgactacattcatgtttactttataatgcccaaatgcaaaccaatggattacagaaatgacagcttaaaattttcctccacaattggttagctaaccgttatgtggcaattaacatgcaatttgactagaattgccagccattgggctagaaagaggcattctccaaaaaaaggtatagccattctgatctaagtatctgcacttcgcatgtttaccaggaataagtttttgaaataaaggtttagctttggaagtctggcttccctccagctattcaattaaattagcttatttattaagcactactttcaattctattttagacattttaaaactacattaatattttcaatccacaaacattttttgagcttacagtctaaactcaatctagactctagagttgtagtgtcartgtggtagccactagccacatgtggctattgagcacttgaaacatggctaatgcaataagaaattgaattttaattttatttaatgtttcttagtctaaatttaaatttaaaaattgagacttgattca

SEQ ID NO: 681809 - DNA, 658 bp, Homo sapiens
gaaactatttgttaaaactgaatatgatcaaaagttgacactgtgctattttacatgtttcactacttaaaataataatacaaaggaatacaggctgtacgtgtaaaattatacagattaaaatatgaccccaaaatatcatcgatgcctaaaacctgccattctttgctgcaagtattttagaaattatattcacycaaaataagacaaattattttttcttaatttctggcaaaagattagcccctgtgttcttatctatcatatcttaataaaaagaagacattctattcagatgtgaattttccatttattttcacaaaagaatgacaatcctaccctgtctcaaaatgtctctgaaggcattagttcctaaactttaggatttgacagttttaaaaaatgaggataagaaggggacaggaaatgataaacttattactagttactaatctaaaagacataaaaaaaccaaaaactgtcatctaagtatctttttacaaaagaagataaaaatctcaggataaagggggcctttatattagataaagctatcattatgaaaaattcacattatccttttctcctcaaggagaaagcctggactcgtgcatactttttttgtagaccaacaatgaacagcagactggccatcgcc

SEQ ID NO: 681810 - DNA, 1669 bp, Homo sapiens
ttacatttaaaacagaggggaaatttactattgttattgtttaaaaacatatggcagtaggcattttccaaaatgatgcataacaatataatgaatttgattggatgttggatttttagtcatcttaaaaaaatgatgccatctgttgatttatttgcggtggagaagaatgccctatataaagaagtatgttttaaaagttaattaatgcagacaaggtttttttccccagaaaaataaagtattattttactacaaagaaaagtactgtgatttacttaggttaaaactacttgcagataaaatatgctcttagtttaataaattcttcttcttcttttttttttttgagacagagtctcacactgtggcccaggctggagtgcagtggcatgatctcggctcactgcaaccccgcctcctgggttcaagcaattctcatgcctcagcctcccgaatagctgggattacaggttcctgccaccaccccgactaattttcatatttttagtagagacgggggtttcactatgttggccaggctggtcccgaactcctgacctcaggtgattcacccacctcggcctcccaaagtgctgggattacaggcgtgagccactgcgcctggccagtttcaataattcttgataaatacttgtagtctaagctaagtaatgctttccttcttcagagttgcaaaggtacaaataaccatctcatactttagtacatgrctgttcctcagtattgttttcatgtagctgcgtggttgaatgggtcatgataaaagtaaaaacaaaagtgagatcagagttacataaacaagatcagtttgctgccttccccaggggtcaagtctaccagatgaaggtttaagtaatagcccctaacccgcggaagatgttgaaatactgttctttctcattactggattatatctttgtttatgtagcattttttcaagatctatggaccattttgatgtgttagacatttaagaactctgtttgttatacaaaccattaaaaccaaaccaaaccaaaacaaactaaacctttcctccagtgggaaaataggcttatttttaaggtttccttttggttttccttctaaaatactcctctcctttttctctgtctgcatcctaatctaggtccccataagtttcagggttacatcagggtcattttggaagttctcacttcttctagattccttcttccagctccatcccccaattctaggcagctctctacttaaagatgtacagtagttgttcattgccaactggatgaaattattaatctcaatttggactttccatttcaggtcagctattcacagaaactggcttgtgacaaagtttttactggtccacagtaacatgataaagttagggttgtataaagctaaaattattcaaaattaaaattccaatattattttagctttttgtgataaaatattcttcataaaattgagttgatagttgatggaagaattttaaaaaaattttccttgggaaaagtgagttggcaactttgaggattgatttctttccactatcccacccgtcccacttctctccaacacacacacacacacacacacacactctctctctctctctctctctctctctctctgtctctgaaaatgtttgctgatc

SEQ ID NO: 681811 - DNA, 1870 bp, Homo sapiens
tgtatcttctcctcaggtatgtcataaacatagaattatagacctgacatagatattaggggcctctaatcaggtcctctgatgtataagtgaaggaaatgagacccggagaagctggacagcttgcctgcccaaagccatctggttatggctgagcttagcctagaatttaggtcttggcttccagcccagaactttctccactacacagcactgcttgtcagagtacttaatgtctaccttgctttccatttttaaagtttacattttgttgtaagattatctactttccaatttggtcactaactagaagacttacccagtcccaaacaattatcagattatatggaaaattgaagatacttaattttgtctgtcaacatgttccagaagaatattttttggggaaaatggatttacaatcaacaaataaacaaaaatgatggcatgtttccatgttttctttttaattggatccttatcagagtactcccaatcagattcttctccagtttagagttttcccccaagagattcagctcatccaagaaaaaggtgagaaggtcctaggcagtactagagtgaagcctgcctgattctcagctgattggccaaactcagaactctctcggtgttctgggtgcttttgacagacagtgggacgcacctccccaccccagtactgctgacacagtgtcttccctctctctctctggaccttactcccaagaattagtgagaagcccacagatgtgtggagaacactaagcataccctgggcaaacagccattcgcacatcagaaaatattagaaacttattgtgaggaacagagggggaacaaaaaagaaaaaggaaaaaaagcaggtctgtccttgcatatatacaatgtctgtggaagtctcacttttaatgccaactattatgaaactacttctactctgatcaaattatatactaggtgccaaataaatggtgttaaattgaaaacaaaataatgagttgattaaccattattttctttcaagccagaatacaagctacagcattacatttaagcataaatgtgaatttatattttatagttttcaactatctaaatttcctttttaacttaaatactattattgttgttgacagattaggctactattaccatgattttttttaaagtacttccacctaattttaatggaccaattattaagacttatcttccartctggtaaagagatatgtaacggtaaaaaaaaaaattaaatagcatttcaacagtgatagagataattagagaaactattctgaaagtgctggctgttcccactctaagacaggtggaatgataaatgacagccaaaatactcttaactggagcattttagcccattaaagattaaaataagtgcaggctattgccctttacctagctgtgttagttctcacagagtcaaacggcacaaattgctttctcttctcatttaatataactaggtcaaccacagccagcaatggagggtgactgcctctgtttaatactctcctgagtggtataatccacataaatcagcatagtctctcttggaacttagggtaaagctgtatgattagaaagaattcagtaagcacttcaagaaacatttgccagattctgctttttgacattaaacatgaaaatgtatttcacatttggttttgtgttgttgttgttctggtttagtttttgtttgggttttttgtttgtttgttttttgcttaagcatgaagaaagcgtgtaatattacaaccctggtaatattaatagtaagtaaggttacttagttgtttaaccagccatgcatgtattgaatttatttaattttagtgcaaactgg

SEQ ID NO: 681812 - DNA, 649 bp, Homo sapiens
tttcactgttctacatccttgtttacacttgttattgttaggcttcttaatatctgctactttaatggatgttaaaatggtatctcactgtgttcttaatttgaattgccatcaatttctatatgtatatgcattttacattctgatacattgctaaattatattgttaagaggctacattgctttgtatttctgccaacaatgtttggtcttgtgcttatttctcaactagctcaatattttttatctttgtcaatccaaaaagtaatacaatgtcattatatctcaatttaatttgcatttgagtacaattaagtatactttcatgtacgtaaarttattagtgttactttttctatgagctgttatttttctgggccattattctaaaagactgctactgcttaagtgaatttctagtttgacagatgtacaaaatgggagggaaaagaaaagtcaagtatctttcctggcattctgcaggcagaaattctgcttaacaacattaaataactaaaatgatgccatgcttttctaacaaagtatatcagtttcataaatttacctctaaatgatacattttcaagagttcaatatttaacggtaattaaatgcttgattgcttttaataatacacgacaatgtacaa

SEQ ID NO: 681813 - DNA, 800 bp, Homo sapiens
acattcagggatagacttcaaatggagtggggcctacatggtactggacaaaccccctcccctacaacccaaaatgactcttatactaaagaatccgtgtagtctctaggccaaaattctatcacatagcacttaacagcttcgaagtattcataataccaacattaaatattcaaaaaatgcaggaatggatggatggataggtagaggaagaaagaaaagaatgaatgaatgaacatatacacacccatgagattttaccaactatcttctctgcggggattagttgataaagaaaaaaaaagtaaggtcctttgtaccttaacatgggatggccaaaagaaagttgaactctgggaagacaggttagaaaaagccaaagagaaaaccaaggggcggcatttgtgatgttatcaaggattaaatgattaaatgaaacaataagctcacttcagccggcttatatcaacttcaaaaygtaacaagagtggagtattctattctctatcattacataggcttaaatttgcaaagttaatcctcgggaggaggttcccttcttcccaagtttcctcctagaattcagatagtaccaaaaggtaaatggcagcatctgaatacaggtttgtaggataactaagtcagactcaaagatacacacctcaacctttttacatttctttgagttgacagcaatcattaacaacatttgacaacagtattggaaactatctttggggccagattctgcttgcctaagaatactgttaatctttagaaaagataatctctctgagact

SEQ ID NO: 681814 - DNA, 800 bp, Homo sapiens
acattcagggatagacttcaaatggagtggggcctacatggtactggacaaaccccctcccctacaacccaaaatgactcttatactaaagaatccgtgtagtctctaggccaaaattctatcacatagcacttaacagcttcgaagtattcataataccaacattaaatattcaaaaaatgcaggaatggatggatggataggtagaggaagaaagaaaagaatgaatgaatgaacatatacacacccatgagattttaccaactatcttctctgcggggattagttgataaagaaaaaaaaagtaaggtcctttgtaccttaacatgggatggccaaaagaaagttgaactctgggaagacaggttagaaaaagccaaagagaaaaccaaggggcggcatttgtgatgttatcaaggattaaatgattaaatgaaacaataagctcacttcagccggcttatatcaacttcaaaacgtaacaagagtggagtattctattctctatcattacataggcttaaatttgcaaagttaatcctcgggaggaggttcccttcttcccaagtttcctcctagaattcagatagtaccaaaaggtaaatggcagcatctgaatacaggtttgtaggataactaagtcagactcaaagatacacacctcaacytttttacatttctttgagttgacagcaatcattaacaacatttgacaacagtattggaaactatctttggggccagattctgcttgcctaagaatactgttaatctttagaaaagataatctctctgagact

SEQ ID NO: 681815 - DNA, 605 bp, Homo sapiens
gggagaaatccacctggataggtttggcccacctcagtaatctccctatctgaaactcaactcattagtaaacttacttaaatctgagaaattccttttatcacatgacataattgccagggagtaacaccaaaatgtattaatagattaggagtgccatcttagattctgcctactgtatttggtctcatgactccaaattccatgctatattatctgtcataccacactgtcttccaaagcactttgtccagagttccttaaaacaggggtttccaactcctgggccatggacaggtaccagtttgtggcctgttaggaaatggggccatgcagcattaccaactgagctctaccwcctatcagatcagcggtggcattagattctcctaggaatatgaaacctattgtgaactgcacatatgagggatctaggctgtgcactccttatgagaatctaatgcctgatgacctgaagtggaccagtttcatccccaaaccatcacccactgccctgtccatgaaaaaattgtcttccagtaaactggtccctggtgccaaaaaggttggggactgctgccttaaagaacacctacaacagctca

SEQ ID NO: 681816 - DNA, 651 bp, Homo sapiens
ttttccatgttaaattctgactctatttaccaaagcaaacaaattaaggtactgaaagactttagtaaacacaaatatttttacttgtggttacagaggctttgcaagagctcttgttcttagcagtgattatgttgagccattcatttcattcacgtaatagtctgacaaaatgtgaatgcctaccatgtgtccagtactttctaggtgatggagacgcagcagggaacaaagtttctgcactcttggatctcatatctactgcaagaaacagacaagcaataaacaagtatagccataatatgtcagatattgatatgtgccatggggaaaaagaaagtgagaaagtaggtgagtgggtaccagactgcagcagtaaggaagggtggttgctaatgtcatayataagatggactcactgataaacagacttgaaagaaatgaggaagcaagcgttgtgtacatctggaggaagccgtttccaagcagagggggaacaaaagtaaaggcctgaagtaggagtggcatattcttggaacagcgagaaggccagggtgaccagagcagagtgagcgaggagacagtggaaggagatgttgtcttgaggcccagttgtgtggggctttgtaggacattgccggggcttcagct

SEQ ID NO: 681817 - DNA, 601 bp, Homo sapiens
catttcagttactgaagaatgggtaacatcggaagatttgcttactttggggtaaccaacacagaactagtgaagagaggtaacttatttctaagtacagtcatgcgtcacttaacaaggacatgttctgagaaatgtgttgctaggtgatttcattgttgtgtgaacatcattgagtgtacttacacaaacctagatrgtatagcctattgctcctagtctacaaacctgtacagcatgttattgtactgaatacgtagtcatttgcaacacaatggcaagtatttgtgtatctaaacatagaaaacatacctgaaaaatacaatataaaagatattttatatctgtatagggcacatatgaatggagcttgcaggattggaagttgctgtgggtgagtcaatgagtgagtggtgagtgaatgtgaaggcctcctacattacagtgcactactgtagactttacaaataatgtacacttaggctacactgaatttataaacaatatttttctttattcagtgataaattaaccttagcttactgtaacctttttactttatagactttttaattttaaaaacttttaaattctttcgcaa

SEQ ID NO: 681818 - DNA, 1389 bp, Homo sapiens
tttggatgtatcattataaataaccaataaattttttccttctgaaaggtaaacttgcacattattgtgtatgcagttagcattcaaagaatacttacaaattatctactaatctgagtgatatgaaatttccattttcatgaattgaatgtaattttatcaacaatctcacatgccaaagctcatatctaattcttggcagtcaccttttctaaatcaactagcttatattttatttgtgaatatcttttaaaaattcaggtttgtctgttcatgtcacaaaagtttagcgaaattttttctcttcttagtgtaaacatttgctctttatgacaagtaaatcatatttcttcatagtataattatttcaagtatttaaaaaatattttcctttataagttgtgtgtgtgtgtgtgtgtgtgtgtgtgtgtgtgacagagtctcactctgtcacccaggctggagtacagtggcatgatctctgctcactgcaacctccacctcccaggttcaagtgattcccctgcttcagtctcttgagtcgctggaattataggtgcctgccaccatgcccagtgaatttttgtatttttagtagatacgaagtttcgccatgttggccagtctggtctcaaactcctgacctcaagtgatccacccacctcagcctcccagagtactgggattataggtgtgcaccacaacacccagcctcttataagtcttaacacacttttctgtaagtcactgattttaattatattcatttaatgttaaagaaaaaaagtgtgagtaggtgaattaaaccagaatatttcagctttgtgttttcttagactcgatatactatctatatgcatataaatcacaaattagctaacaatgttatttttaaacactattttaaaattgagtttatccaaacataaaaaggcaaattccttatgttaccattgcaccaggggcttagttaggttttttaactatttcagtaacagtcaatcctagaacatttttctttatcctactctctttctttccctcttacaayagaatatttcacaatgagaaatacaaatctccctgtatgctacaaatagaaatcacgaatgttgataatgtctaataaaagcatacgtaagatgactgtacatgtttcatcactgattaaactgttatattttttctctcccacaaaccaacaggatgtccacaaataatacataacattataaagatgacacactcagattgtcactgtgttctctttactgccttttctattctcttttctataatgtagttcactttgcaagatcgtttgtctactaaaatgtggacatagctatgctttcaaaatgttggtatcccagagcacctgcatttccc

SEQ ID NO: 681819 - DNA, 649 bp, Homo sapiens
cctgggcttagccagtcagatattcaaacacaaccttgaattggaaatagtgcaatgaagcaaggacagaagagaaggcactgtggcttcccaaggaacaaaaaggcagtattgtggtgctgggaatgccagctgttcaatagcaatagcagtaatatgttcaccagatggattcattttgcatttggttctgactgcttagtgtacttgttttccaaatgtggttcgatagttttcctttgaactattttttatgttttgtcaaaattaaccagagtctgacttatcctattgtttaaaatcaagtactatgatcattacatggaagtcctgacaaataagaacttamattagatattagagagaaacaaaaatcttcattaattgcaacttatgtgatttcctacatagaaaagcctggaatatcagtagaaaaactattggaataaatgaaataatttaagaaagtggccagttataagacaaatttacatcttttttaatttacagaaataaatgacaaatacttattttaaaatttctctaacaaagataaaataagggtatacttataaatttatttaactaaagttgtgaaggaaaagttaaaattttctaagatccaataaaatggcaaggtattacaaga

SEQ ID NO: 681820 - DNA, 602 bp, Homo sapiens
gatgaaactaaaatattaaacaaaaatggaaagtggagaaggtgattagaactaaagagttctaaagttcattgttttgttcacaaaaatgtagatatattaacttttggctttttacgggtatgcttttttactttttttttttttgtagaggtggagtcttgctatgttgcataggctggtctcaaattcctggcctcaagtgatcctcctaccttggcctccaaaagtgctgggaatataggcatgagacactacacctggcctgtttccttttctttttttttttaagccagattttatttgtrttaaaaaaaaaatcctcaggagacttaaaagttccaaagacctgaagatatcaaggttcaatgtacagctacagcgaggtgcttgcgattagtaactgagtcatggaaggttctatagtgcctcggggacttccactccttcaaatcactcctagtcttggtcttgtggttttctgcaagttctcatcgactgtaactttgtaactttatacagggctgtcactccagtaaggaaaaaacaaaacaaaacaaaacccctatggctatcattgttaatccagtagagaaactaca

SEQ ID NO: 681821 - DNA, 672 bp, Homo sapiens
atatgtgaaaaatctaagcataaattagactggttccttatatgatagaagtattttctacttcactaaaatatttgcagtgtttacatattagcattttcttatattttttaccttaactttttaatatatattgagtcactataagcttatagttataattctgccaatttccttgagaattgtgttttcagttaagttcccaaamaaacaagtgttttaacagacacttgggctaagagattggctagtagttctttttgtaagttgagaattttaatgaggttaaaatataaatttaaaactgtttcatctctgcatgaataaatggacttactcttccaccattttatagtgatggtaaacaatgatagcatgttgatttattcagaatttgtagtgtaaatttctactgcgtaaagtatacacacaatttgtaaaaattaaggataaagaggactaatggagtagccatcttccttcccctcctcctatatgcccaaagtaatttagagttgatttgaagccacttctctagcaattggacttgcatagaatcgtgggggttcacacatcaccagcccaggaaacttcaggctgtcctttgttactctgtttactgaaattgacatatcagcaagttcaaaattatcctgaatagtagttttggca

SEQ ID NO: 681822 - DNA, 646 bp, Homo sapiens
gttttggaatttactcttttccaatttatgaaaattggacaccggctccatgcactgttctaagcctttttctgtgttctctgtgattccttagagcttactaactgtgaccctccagtcaaaaccatgtttaaccaagtgctgatgggcttgagtccattcccaagtgactcggaagttgcttacttccctacctttgagtgggtctcattttatctcygtgatgttttccttgtccttctaagtcatattcactctgctcattgaagaaaaatggttggtaattgtagtggataactactccattctgtatgccttctatgtcttttcttgatgtgtgcacctctttctttatccttatttttaaacttgtgcttattagataggtttctgtacaaccatatctgtgtaggtttctcaccctagaagcctccttttaaatagggcaaagaagctacctaaagatttctctttaatatagggaggaaaccactttcgaacttgtgcccaaagatttatcttcaccaatggtctaggacagaggtcggaaaacttttactgtaaagggccaaataatacatactttcagctttgcaggccagctggcctgtgttgtgactactacacaaaagtagtaagagtctaa

SEQ ID NO: 681823 - DNA, 646 bp, Homo sapiens
gttttggaatttactcttttccaatttatgaaaattggacaccggctccatgcactgttctaagcctttttctgtgttctctgtgattccttagagcttactaactgtgaccctccagtcaaaaccatgtttaaccaagtgctgatgggcttgagtccattcccaagtgactcggaagttgcttacttccctacctttgagtgggtctcattttatctccgtgatgttttccttgtccttctaagtcatattcactctgctcattgaagaaaaatggttggtaattgtagtggataactactccattctgtatgccttctatgtcttttcttgatgtgtgcacctctttctttatccttatttttaaacttgtgcttattagataggtttctgtacaaccatatctgtgtaggtttctcaccctagaagcctccttttaaatagggcaaagaagctacctaaagatttctctttaatatagggaggaaaccacttycgaacttgtgcccaaagatttatcttcaccaatggtctaggacagaggtcggaaaacttttactgtaaagggccaaataatacatactttcagctttgcaggccagctggcctgtgttgtgactactacacaaaagtagtaagagtctaa

SEQ ID NO: 681824 - DNA, 642 bp, Homo sapiens
aactccgtagtgtgtcctgggctactatttgaaaaacacccagttccaaggtaatgaaatttattttaaatcaataataccctccctgcttaacaagtatatcctcagctcagagtttagagcactgtccagggtttggaaatacgaagaagtccccaaccagcgactccaaccctccatcccttacagcagytaagccaggtggggaaggtggaataggtggctcactcaccttgaagtggaaggagtttgccggggacccgctggagctataccgctcactttttgttaggttgctgtagtacttattaaccttggaattgacattctggttcgagcttgggtcatccgtgatggggcagatgaagtaaccttcctcatcgtcgctgtccccatcagaatcaccatcatggccagctcggggggactggccgccatcaacgccttccaggcggaagatgagatcttcgtctgccatgttcctggggtgcccgttttacccaagcagtatccggcacagccagagttactggacaaatgcagaggcgaaggtcctacaaggaaagcaagggccagagagtgggtgctggggcccagggctgcgaattcgcccgaccctcaccccaaatgctgcaggctatc

SEQ ID NO: 681825 - DNA, 684 bp, Homo sapiens
tcctcagccagacccaaatcatgatgctgacagggcccaggtaggggacaaatgaacaacattagctggggtaaaataaggtggggtaraagtccaaagtcagatggaatagaggcccagtgaggggacagagagtggggaagggggtgtggagctctgcttacagacacagccagaactcctcttcacccagcagtcccccagatttgccaaatctgattatttcagaagctggagatctgggtactttttaaaatctcctaattttaatttgactttgtatttttggtctcttttttaaagttttgttttacttttattgaaaaataatgactgtatgtatttatggggtatgatgtgatgttttgagccacgtatacattgtggaatgatcaaatcagtctatcatgcccatcacctccaaaacttaccaattctttgtggtaagaatatttaagatcctctcttttagctcctttgaaatatacaatacattattattaactatagtcaccttgttgtacaataaatcagcagaacttattctcctgaatctgcttttgaaatgttagcaaactttcaacaaaaatataagctctatgcagatgaaataaaacaattctatgggttagacttcaactctgggccatcagtcagagatctctgctctgggcatttatattt

SEQ ID NO: 681826 - DNA, 684 bp, Homo sapiens
tcctcagccagacccaaatcatgatgctgacagggcccaggtaggggacaaatgaacaacattagctggggtaaaataaggtggggtagaagtccaaagtcagatggaatagaggccsagtgaggggacagagagtggggaagggggtgtggagctctgcttacagacacagccagaactcctcttcacccagcagtcccccagatttgccaaatctgattatttcagaagctggagatctgggtactttttaaaatctcctaattttaatttgactttgtatttttggtctcttttttaaagttttgttttacttttattgaaaaataatgactgtatgtatttatggggtatgatgtgatgttttgagccacgtatacattgtggaatgatcaaatcagtctatcatgcccatcacctccaaaacttaccaattctttgtggtaagaatatttaagatcctctcttttagctcctttgaaatatacaatacattattattaactatagtcaccttgttgtacaataaatcagcagaacttattctcctgaatctgcttttgaaatgttagcaaactttcaacaaaaatataagctctatgcagatgaaataaaacaattctatgggttagacttcaactctgggccatcagtcagagatctctgctctgggcatttatattt

SEQ ID NO: 681827 - DNA, 684 bp, Homo sapiens
tcctcagccagacccaaatcatgatgctgacagggcccaggtaggggacaaatgaacaacattagctggggtaaaataaggtggggtagaagtccaaagtcagatggaatagaggcccagtgaggggacagagagtggggaagggggtgtggagctctgcttacagacacagccagaactcctcttcacccagcagtcccccagatttgccaaatctgattatttyagaagctggagatctgggtactttttaaaatctcctaattttaatttgactttgtatttttggtctcttttttaaagttttgttttacttttattgaaaaataatgactgtatgtatttatggggtatgatgtgatgttttgagccacgtatacattgtggaatgatcaaatcagtctatcatgcccatcacctccaaaacttaccaattctttgtggtaagaatatttaagatcctctcttttagctcctttgaaatatacaatacattattattaactatagtcaccttgttgtacaataaatcagcagaacttattctcctgaatctgcttttgaaatgttagcaaactttcaacaaaaatataagctctatgcagatgaaataaaacaattctatgggttagacttcaactctgggccatcagtcagagatctctgctctgggcatttatattt

SEQ ID NO: 681828 - DNA, 644 bp, Homo sapiens
ttttttttttttttttttttcctgagacagggtcttgctttgtcgcccaggctggagggccatggtgtgattttggctcactgcaacctccacctcccgggttcaagtgatccacctccctcagcctcccaagtagctgggactacaggtacctgccatcatgcccagctaatttttatggggtttttttgtagagacagggtttcatcatgttggccaggctggtcttgaactcctgacctcaggtgatccgcccacatcggcttcccaaagtgctgggattacaggcatgagccactgcacctggcctgaaagggagctatttctgagttgctttttgttaraaggaaagttttctgctggggactgtctttaccctgtctacctaaataatttctttctgcctcctgtaacactcatatttttcctcctgtcactgaagtgccaacccttgaaggaagagtttttttgttttgttttgttttgttgaagaggaaacttaagctcagagaggtaaagtagattgcttggagtttcacagctaataaaccaacaagccaggatttcaacccacactgcccgatgcagaagctgacttgctccacggtaacaagtgagcctctgtgtcaatgcgggagccccca

SEQ ID NO: 681829 - DNA, 633 bp, Homo sapiens
ggaagagatttaaagttcattgaagagtaagaagtaatatatttttttttttttgatggagtcttgttaccgatgctggaggctggagtgcggtggaacaaacatagctcacttgcrtcctcaatcctcctgcctcagccccacaagtagctgggactacaggtgtgtgcaaccatgcccaggtaatttattttaatgttttgtagagacagggtctccctttgctgcccaggctggtctcaaactcttggcttcaagtgatactcccatcttggcctcccaaatggttgtgattacaggcaggagccactgtgcccagccagaagtagggtctgatattcccttcagttctaacttaaaataacataggtaatgtgtttgtagtaacagaaaatggaatggacttcaagttaataggaacaatgtttctcaaactttttctcagtattccactcaacaaaagtaacacatggagctaaatggtgtaaatagacccatgaatgaatgaagcaacaagtccggggctctgctcacctcaagtcagccaggtctccttgagggatcagcttcttggtatgcctgtcacccagagttggcttgactgaggtgctgatgaagttcatactgcaggag

SEQ ID NO: 681830 - DNA, 2257 bp, Homo sapiens
tatttttgcaagccttgagagtctgggattgtttgttactgcggcaaaaggtggccaatacgccatccttgtcaatcgactgagaaaatttctaaccacaaaattcaagtcatagctttatgtttcacttaagttacataattcaaaacattcaactataacagcactagacctgtaacaagtaaattctcaccaaacaaataaaaacttttttaaaaaaagattctgtcaaaaaataaacaaggaagagactatatccaccattatctgtaayaataaagcttcaacatttcaaacggtcaccagtgagacaataacggtaagaagacaccagtaacattacaaagtatttattgtatgccagacactataatgtgtgccacatatgttcacgtatttcctcaacaatccagggatatgggtcctatttgtttttgttttctttcttttttttttttttttttttgagacggagtctcactctgtcacctaggctggagtgcagtggtgcgatctcggctcactgcaacctccgcctactgggttcaagtgattctcctgcctcagcctcctgagtagcttgggactacaggcacgtgccaccaagcctaatttttgaatttttagtagagacggagttttgccatgttggccagactggtctcgaattcctgacctcatgtgatccacccgcgtcagcatcccaaagtgctgggattacaggcatgagccaccgtacccggccttcgttttcttttttaataatttcaacttttatttcagattaagggggtacttatgcagatttgttacatgagtatattgcattatgctgaggtttggggtatgaatgatcctgtcacctagatagtaataggtcctatttttgtccctcttttataaacaaagaaatagaaacacagagaggctaactaacttgcctagaaaataaatggataaccgcatctttgtcattctttatataattccaggtagtgcctcatccaattttagtgttctctgtgtgtcatactttcaatgtaatgaaaatagattaatttaaaaatattccaagtacaggcattccatccatcactcctgaggaaagttactcctatgatcaaatatcctgtaaattctgagaactgttctaataattattccagttcatttttccacacagcagcgcctcccactctgcaatgccattctcaaatcccctctcagataagaatctcttccgaggatcaagaacctgccttgttctaaatcctcacccaaaaccttccccatgtgggaaatctatgttaattccaccaaactggagctataaaacagcaatcatgtataggagagggaaaaaagaccgaaactcataaaaaggaattaacatattcacacgggatgctatatataatatgtacaaaacaggtatccaagattttttaaatgcaacttcctaaaacgttgggaccatacattgatatattgtggcggcatatttttcaaagcccaaacaaatatagtagaaactcattacgatgctattttctattggcagatttatgtttttttacctttcctacctatgatcaaagaaaaattcccaagccttgttgctccaacttagtagctcaatggtccaaaagcaaggtagggctaaatcccagcctgcaccctgttcaccaggctgggtgcccaggtggaggagctgtgggccccaagaggagggggcatcttttcttaattctcacaaaggtgtgtgtggctggcgggcttggccttgggaggctccaggggctctgtggtctagcggtccagctggatccagtggtccagcggcatcatcttgcctggtctagtcctcaacactgcggttggaaagagggctcataaagtagattttctcttaacaaggggatggagaatgacacaagtcaccatcaagctggtatgtggacattgtggaccagaggtgcaagactcaagtaaaggtccttgagaaagtcacacaatgatcagatgactgataccctgggtcccaaaaaaacaacaaatggggattggcaggatgatataatgggaactaaagtatagcgaacccatgacatgaaaagcagcctgtccagcattctccattatcacagcagtcaactttacaacttgatgaagtatgcagcgtcatctccaagattaattatctggctcaggttggacatccacatagaaaatgagctgggtttcataccaagtggtt

SEQ ID NO: 681831 - DNA, 2780 bp, Homo sapiens
ttctttctttttttttttttttttgagacagattctcgctctgtcacccaggctgaagtgcagtggcgcaatctcggctcactgcaagctctgcctcccaggttcatgccattctcctgcctcagcctcccaagcagctggcactacaggtacccgccaccatgccctgctaatttttgtatttttagtagagacgggctttcactttgttagccaggatggtctcgatctcctgacctcgtgatccacccacctcggcctcccaaagtgctgggattacaggcgtgagccaccacacccagtgagaacctttgctttctttatcactgccatatcactggtgctcagtgctctacctgacccagagaagaaggttgacagcgatgtgctgaacaaaagaaggaagggagggcaggagacaggaaagagaagcccaggaaagctttgtgggaaagatacccttgaacagagactcacaggatacagaggcagatgtggggaggaaaagcttagctgagacccttccaagcagaggacatagtctgtgccaagatgcagagagacaggaaggtttagcaacagcagtgagtttgatatggttggaacaagaaagagaatggccagacaggagcctagacaggtaggcagagccccaagcatttcttttcttttctttgccagcacttggaaagcacacgctaggtaccaccgcaagtactcgggtaccatcatgaacatttcacattagcacttcagttcatcttcacaacaatcttgtgatccaaatactgtcatcatccccaagttacagatgaggaaactgaggcaataagaacaagtgaaggtcacatggttttcgcaagtggcataaaccggatttgaacttgggaaggctaaattccagatgcgttgcttaggcccccataacacattttacagctcaatcctttcagactgatgacgttagcaagtttttgcagtccttcgtaagtggagcctggtgcggaaaaggaactcgcggaggctaaaagagtcctttccaagggccatcatgttgatggggtgggctatttattctccttaaataaagaccttccatacctccagtttatccacttatacatctaaaatatatactatctctaaaaaaatctatatttaattatacagcatcagtgaaatttcactcagggaacaataatccaacataaatgaatgcttccaatagaaaaagctgtaatttaaaataaattcctgtgttcctcagaaaaaaacaaatttactctctttatagcaagaaaaaaatattatctggtattaagtaaccccagtcaattagaaaatttcgtcaatagcaaagaaccaaattaccaccctaaattcctcctctcccagcgtagatttcactgtggatcccagccacggagtgtgccacccgctccggccttagtttcattaaggcttaaagtcaattaagccacgaattggaacaatcattcctcctttgcaaagtattgatatttttttcctggccgctttaggggcttttccagagctcacgaagagatttatgttagacaatttctttctgattaaaacaaatcatagctcaacaattctaatttcctcctttctaagcaagaaatgatcagagaacactgaaaacagtgatcaacacccccacacacacaccgtcaccacgatgcaaagcccagcactaaaaacctcataaaaacaccgctagacaggttctctctctctctctccttctgtctctctctgtctttctgtccctcctccgtgtctccacctccccttcgtgtgtctgcgtgtctctctttctctgtatgcctgtctctcctctgtgtctttctctttcagtatacatttatctcgacaggcttcaggacaattacttatgaaacaaaaaggaagaaggatattagaagcaaagccaacccaagctgggttttcagctttaagtagtagaaaacaagaaggtttttatacttacctccaaaaccctaccatcatctcaggccttttaatttttaaagcctttactaacttcggatcaaccttctctctctcgatgacaccctcaagcacagtccggacgtctgctggatttacccactagcactcatgtatacacctgctctggggtgcagctgggtttacctgctagccctaacatatgccccctactctcgtgtacagctggatttacccactagtattcatgtataccccatatctcagatggagctggatttacccactggccctaacatatacccacaactctcsggtgcggctgggtttacccactagccctaacatatgccccaactgccaggtgcaactggatttacccacaagccctaacatatacccctactctcaggtgcagctgggtttacccactagccctaacatatgccccttactctcctgtgcagctggatttgcccaatagcactcatgtataccccatatctcgggtgcagctgggtttacgcactagccctaacatataccccctactcttgggtgcagctggatttacccagtagggctaacatatgcccccaactcttgggtacagctggatttacccatatgccccctactctcaggtgcagccttttaagctgttcattctacctaaaggcccaggtttctgtccctcaaaatcaagctggattatgagtccactctgcatcacagtcggctcccactgctccagaatgaccaggcaagttagagattttccaaat

SEQ ID NO: 681832 - DNA, 2780 bp, Homo sapiens
ttctttctttttttttttttttttgagacagattctcgctctgtcacccaggctgaagtgcagtggcgcaatctcggctcactgcaagctctgcctcccaggttcatgccattctcctgcctcagcctcccaagcagctggcactacaggtacccgccaccatgccctgctaatttttgtatttttagtagagacgggctttcactttgttagccaggatggtctcgatctcctgacctcgtgatccacccacctcggcctcccaaagtgctgggattacaggcgtgagccaccacacccagtgagaacctttgctttctttatcactgccatatcactggtgctcagtgctctacctgacccagagaagaaggttgacagcgatgtgctgaacaaaagaaggaagggagggcaggagacaggaaagagaagcccaggaaagctttgtgggaaagatacccttgaacagagactcacaggatacagaggcagatgtggggaggaaaagcttagctgagacccttccaagcagaggacatagtctgtgccaagatgcagagagacaggaaggtttagcaacagcagtgagtttgatatggttggaacaagaaagagaatggccagacaggagcctagacaggtaggcagagccccaagcatttcttttcttttctttgccagcacttggaaagcacacgctaggtaccaccgcaagtactcgggtaccatcatgaacatttcacattagcacttcagttcatcttcacaacaatcttgtgatccaaatactgtcatcatccccaagttacagatgaggaaactgaggcaataagaacaagtgaaggtcacatggttttcgcaagtggcataaaccggatttgaacttgggaaggctaaattccagatgcgttgcttaggcccccataacacattttacagctcaatcctttcagactgatgacgttagcaagtttttgcagtccttcgtaagtggagcctggtgcggaaaaggaactcgcggaggctaaaagagtcctttccaagggccatcatgttgatggggtgggctatttattctccttaaataaagaccttccatacctccagtttatccacttatacatctaaaatatatactatctctaaaaaaatctatatttaattatacagcatcagtgaaatttcactcagggaacaataatccaacataaatgaatgcttccaatagaaaaagctgtaatttaaaataaattcctgtgttcctcagaaaaaaacaaatttactctctttatagcaagaaaaaaatattatctggtattaagtaaccccagtcaattagaaaatttcgtcaatagcaaagaaccaaattaccaccctaaattcctcctctcccagcgtagatttcactgtggatcccagccacggagtgtgccacccgctccggccttagtttcattaaggcttaaagtcaattaagccacgaattggaacaatcattcctcctttgcaaagtattgatatttttttcctggccgctttaggggcttttccagagctcacgaagagatttatgttagacaatttctttctgattaaaacaaatcatagctcaacaattctaatttcctcctttctaagcaagaaatgatcagagaacactgaaaacagtgatcaacacccccacacacacaccgtcaccacgatgcaaagcccagcactaaaaacctcataaaaacaccgctagacaggttctctctctctctctccttctgtctctctctgtctttctgtccctcctccgtgtctccacctccccttcgtgtgtctgcgtgtctctctttctctgtatgcctgtctctcctctgtgtctttctctttcagtatacatttatctcgacaggcttcaggacaattacttatgaaacaaaaaggaagaaggatattagaagcaaagccaacccaagctgggttttcagctttaagtagtagaaaacaagaaggtttttatacttacctccaaaaccctaccatcatctcaggccttttaatttttaaagcctttactaacttcggatcaaccttctctctctcgatgacaccctcaagcacagtccggacgtctgctggatttacccactagcactcatgtatacacctgctctggggtgcagctgggtttacctgctagccctaacatatgccccctactctcgtgtacagctggatttacccactagtattcatgtataccccatatctcagatggagctggatttacccactggccctaacatatacccacaactctccggtgcggctgggtttacccactagccctaacatatgccccaactgccaggtgcaactggatttacccacaagccctaacatayacccctactctcaggtgcagctgggtttacccactagccctaacatatgccccttactctcctgtgcagctggatttgcccaatagcactcatgtataccccatatctcgggtgcagctgggtttacgcactagccctaacatataccccctactcttgggtgcagctggatttacccagtagggctaacatatgcccccaactcttgggtacagctggatttacccatatgccccctactctcaggtgcagccttttaagctgttcattctacctaaaggcccaggtttctgtccctcaaaatcaagctggattatgagtccactctgcatcacagtcggctcccactgctccagaatgaccaggcaagttagagattttccaaat

SEQ ID NO: 681833 - DNA, 2780 bp, Homo sapiens
ttctttctttttttttttttttttgagacagattctcgctctgtcacccaggctgaagtgcagtggcgcaatctcggctcactgcaagctctgcctcccaggttcatgccattctcctgcctcagcctcccaagcagctggcactacaggtacccgccaccatgccctgctaatttttgtatttttagtagagacgggctttcactttgttagccaggatggtctcgatctcctgacctcgtgatccacccacctcggcctcccaaagtgctgggattacaggcgtgagccaccacacccagtgagaacctttgctttctttatcactgccatatcactggtgctcagtgctctacctgacccagagaagaaggttgacagcgatgtgctgaacaaaagaaggaagggagggcaggagacaggaaagagaagcccaggaaagctttgtgggaaagatacccttgaacagagactcacaggatacagaggcagatgtggggaggaaaagcttagctgagacccttccaagcagaggacatagtctgtgccaagatgcagagagacaggaaggtttagcaacagcagtgagtttgatatggttggaacaagaaagagaatggccagacaggagcctagacaggtaggcagagccccaagcatttcttttcttttctttgccagcacttggaaagcacacgctaggtaccaccgcaagtactcgggtaccatcatgaacatttcacattagcacttcagttcatcttcacaacaatcttgtgatccaaatactgtcatcatccccaagttacagatgaggaaactgaggcaataagaacaagtgaaggtcacatggttttcgcaagtggcataaaccggatttgaacttgggaaggctaaattccagatgcgttgcttaggcccccataacacattttacagctcaatcctttcagactgatgacgttagcaagtttttgcagtccttcgtaagtggagcctggtgcggaaaaggaactcgcggaggctaaaagagtcctttccaagggccatcatgttgatggggtgggctatttattctccttaaataaagaccttccatacctccagtttatccacttatacatctaaaatatatactatctctaaaaaaatctatatttaattatacagcatcagtgaaatttcactcagggaacaataatccaacataaatgaatgcttccaatagaaaaagctgtaatttaaaataaattcctgtgttcctcagaaaaaaacaaatttactctctttatagcaagaaaaaaatattatctggtattaagtaaccccagtcaattagaaaatttcgtcaatagcaaagaaccaaattaccaccctaaattcctcctctcccagcgtagatttcactgtggatcccagccacggagtgtgccacccgctccggccttagtttcattaaggcttaaagtcaattaagccacgaattggaacaatcattcctcctttgcaaagtattgatatttttttcctggccgctttaggggcttttccagagctcacgaagagatttatgttagacaatttctttctgattaaaacaaatcatagctcaacaattctaatttcctcctttctaagcaagaaatgatcagagaacactgaaaacagtgatcaacacccccacacacacaccgtcaccacgatgcaaagcccagcactaaaaacctcataaaaacaccgctagacaggttctctctctctctctccttctgtctctctctgtctttctgtccctcctccgtgtctccacctccccttcgtgtgtctgcgtgtctctctttctctgtatgcctgtctctcctctgtgtctttctctttcagtatacatttatctcgacaggcttcaggacaattacttatgaaacaaaaaggaagaaggatattagaagcaaagccaacccaagctgggttttcagctttaagtagtagaaaacaagaaggtttttatacttacctccaaaaccctaccatcatctcaggccttttaatttttaaagcctttactaacttcggatcaaccttctctctctcgatgacaccctcaagcacagtccggacgtctgctggatttacccactagcactcatgtatacacctgctctggggtgcagctgggtttacctgctagccctaacatatgccccctactctcgtgtacagctggatttacccactagtattcatgtataccccatatctcagatggagctggatttacccactggccctaacatatacccacaactctccggtgcggctgggtttacccactagccctaacatatgccccaactgccaggtgcaactggatttacccacaagccctaacatatacccctactctcaggtgcagctgggtttacccactagccctaacatatgccccttactctcctgtgcagctggatttgcccaatagcactcatgtataccccatatctcgggtgcagctgggtttacgcactagccctaacatataccccctactcttgggtgcagctggatttacccagtaggrctaacatatgcccccaactcttgggtacagctggatttacccatatgccccctactctcaggtgcagccttttaagctgttcattctacctaaaggcccaggtttctgtccctcaaaatcaagctggattatgagtccactctgcatcacagtcggctcccactgctccagaatgaccaggcaagttagagattttccaaat

SEQ ID NO: 681834 - DNA, 652 bp, Homo sapiens
aagacagtggaagcactgaatatccttttagaaacaaacaattacaaattagctgggcatggtggcgcacgcctgtagtcccagcaacttgggaggctgaggcaggagaattgcttgaacccrggaggcagagattgcagttagccgaaatagcaccactgcactccagcccggtgacagagcgagactccatcttaaaaaaaaagaaaagaaaagaaagaaaaagaaaaacagctacagatattcattcctttttaatttcttgataaataatagaccagtaagaatcacataagaagcagtctacatttttcaaagagtttttacagatcccatttgatcttcaaaagggcctccattaggaaaaactaaattcaagtttaaaactatccattttatttctcccataaaaatatattcagcccctggagataatctccaaattcctcagattttaaaagttaatttttcttatcttgacccaaaatctgtagaaacaaggatttttcaccaacagtgagctcccttttcataaaatccttatctaccaagatttacctctgcaaacctctacagtccctggttgtgagcccctgatggaagaagctagcataaagaagttcacaactactggggagggaacgacctgaca

SEQ ID NO: 681835 - DNA, 1152 bp, Homo sapiens
aatgcagtctggaaatgacatctgccttggccctccccgcagatgccactcccagcacttgaccgggcacagagcgaggcttcacgggtttaaataaattggttgattccaaactcaggattaacaaaatgaatgagctgcttagaaagagctcattcaggagtgtgctgttattcctcccaacaggatggtggcatgtacagtggaaggggccccaggcacagactcaattaccctttgatctatcctgcaggcacccgccgcccaagacctgtatgatctcaagcacgttacctcacctcccttctctttcctttcgacattatcacaagacagctgtaagcacggtgctgagaattaaatatgacaagtacggaatcttcataaattttaaacggctatcaatgtaatacaacatgataatcaataaatacgaatctgtaacaattaagtacattgtagaggtaagggtaaaaatgaaaaacattgtattagctttaacttcagtttctgtgcaactacagaagaaatttgattctgattttgttcctctttatatgaaataaacttcatacaaaaggcttagctccgttcatctggctagttatcctccacctaggtagaaatagtagagacactgaaataggtttcctccccgcccccatctctctgtctcagatctcctcttagagtctagtgaagaaaccttgtcttgctttcagagagcaccatatgactatggcttctaacatgaaggctccaaaaatcacaaaaagtaaaaccatcaagcacagcctggtgagcaaataactcaaagacttaaaacaattagatttaaaccttgtcacacaatgcaacccttcctatgyaccccattcagttaggcttgtgtagactgagaccagctcttcatgaaatgtaccgttatttatgaagccaaagggagatcacaaatttaggcaagaaactaaaagcgagctattggaacctgctttttgatccatctactggtgccttaatttaagacatctttccaagaaggcctcctagtgaccccaaccttattttggagaaggctgaggattcatatctactcatgtataggctacaaaagtccaagaaggtctgtgtcataccaaacaggcaacggtc

SEQ ID NO: 681836 - DNA, 1152 bp, Homo sapiens
aatgcagtctggaaatgacatctgccttggccctccccgcagatgccactcccagcacttgaccgggcacagagcgaggcttcacgggtttaaataaattggttgattccaaactcaggattaacaaaatgaatgagctgcttagaaagagctcattcaggagtgtgctgttattcctcccaacaggatggtggcatgtacagtggaaggggccccaggcacagactcaattaccctttgatctatcctgcaggcacccgccgcccaagacctgtatgatctcaagcacgttacctcacctcccttctctttcctttcgacattatcacaagacagctgtaagcacggtgctgagaattaaatatgacaagtacggaatcttcataaattttaaacggctatcaatgtaatacaacatgataatcaataaatacgaatctgtaacaattaagtacattgtagaggtaagggtaaaaatgaaaaacattgtattagctttaacttcagtttctgtgcaactacagaagaaatttgattctgattttgttcctctttatatgaaataaacttcatacaaaaggcttagctccgttcatctggctagttatcctccacctaggtagaaatagtagagacactgaaataggtttcctccccgcccccatctctctgtctcagatctcctcttagagtctagtgaagaaaccttgtcttgctttcagagagcaccatatgactatggcttctaacatgaaggctccaaaaatcacaaaaagtaaaaccatcaagcacagcctggtgagcaaataactcaaagacttaaaacaattagatttaaaccttgtcacacaatgcaacccttcctatgcaccccattcagttaggcttgtgtagactgagaccagctcttcatgaaatgtaccgttatttatgaagccaaagggagatcacaaatttaggcaagaaactaaaagcgagctattggaacctgctttttgatccatctactggtgccttaatttaagacatctttccaagaaggcctcctagtgaccccaaccttattttggagaaggctgaggattcatatctrctcatgtataggctacaaaagtccaagaaggtctgtgtcataccaaacaggcaacggtc

SEQ ID NO: 681837 - DNA, 916 bp, Homo sapiens
tttgggaggccgaaacgggtggatcatgaggtcaggagttcaagaccagcctggccaagatggtgaaaccccatctctactaaaaatacaaaaattagccagacgtgttggcaggtgcctggactcccagctactcgagaggctgaggcagaagaattgcttcaacctgggaggcgaaggttgcagtgagccaagaatgcgccactgcactccagcctgggcaacagaggaagacttcatctcaaaaaaamaaaaaaaaaaaacaaaaaaaaaaaaaacaaaacaaaaaacaaagaaaaaaacatagggtcaccaaggcgttcaaaatgaaccttaaacagaggtattaatacttaaatattacaatttccacttaggaaaaaaaaatcatattattgctaggccagcacactcaaaagcaataatgtcatgaaaacacatgcccttgtgtgatttggcagaacaggctgctccctgaacacaatgggcctttttattaagtggatcccttcatccctggcattttatacaaacaaaacaaaagagagagaaaaagaaacaaacacgacactagtaacagtcttcagtttgaacttcatcacagagaattagaagacctaaaagatatgttagaaaagtaaaagacattatttaaccaaaatgaaagcaagatggactgagaggaacagaactatattgcaatgctgcctcttttgtttaattatatcaaagggcaacagagccctctagtggaaaaaaataaaaatatataaagatggttctgcttttagattaaaggaaatatgtacaacacccccgggcatggtggctagtgtctgtaatcctagcactttgggaggccaaggtgggcggatcacttgagttcaggagttcaagaccagcttggccaacatgg

SEQ ID NO: 681838 - DNA, 916 bp, Homo sapiens
tttgggaggccgaaacgggtggatcatgaggtcaggagttcaagaccagcctggccaagatggtgaaaccccatctctactaaaaatacaaaaattagccagacgtgttggcaggtgcctggactcccagctactcgagaggctgaggcagaagaattgcttcaacctgggaggcgaaggttgcagtgagccaagaatgcgccactgcactccagcctgggcaacagaggaagacttcatctcaaaaaaacaaaaaaaaaaaamaaaaaaaaaaaaaacaaaacaaaaaacaaagaaaaaaacatagggtcaccaaggcgttcaaaatgaaccttaaacagaggtattaatacttaaatattacaatttccacttaggaaaaaaaaatcatattattgctaggccagcacactcaaaagcaataatgtcatgaaaacacatgcccttgtgtgatttggcagaacaggctgctccctgaacacaatgggcctttttattaagtggatcccttcatccctggcattttatacaaacaaaacaaaagagagagaaaaagaaacaaacacgacactagtaacagtcttcagtttgaacttcatcacagagaattagaagacctaaaagatatgttagaaaagtaaaagacattatttaaccaaaatgaaagcaagatggactgagaggaacagaactatattgcaatgctgcctcttttgtttaattatatcaaagggcaacagagccctctagtggaaaaaaataaaaatatataaagatggttctgcttttagattaaaggaaatatgtacaacacccccgggcatggtggctagtgtctgtaatcctagcactttgggaggccaaggtgggcggatcacttgagttcaggagttcaagaccagcttggccaacatgg

SEQ ID NO: 681839 - DNA, 1863 bp, Homo sapiens
gtattttcagtagagacaggattttaccatgttggccaggctggtctcgaactcctgacctcaggtgatccacccgcctcagcctcccaaactgttggagttacaggcgtgagattctgtgcttggccaaaagggatttttaaaaggatatgtggaattatatggtgagaaagaggctgcactgaaaagttctgatcaggctgtgtccttagtaaagagtttgaatttcattttgcaaccaaagttgcatctgttgtttctgaacagctgtaaattctaatcagttgatgtgcagaaagatgattcaaaaatcagtatgtagggagggcaagtccactgctgaagtcattaaaatataagagtaagaaaagctggtttctaaaaaagggagattgttatttcctatgtcctcttgttataggttagttgtttttaattactaaaacaaaaatttaaaaattatcaacttarataagttacccgggttggggaggtgtatctctcatgtatctagattttaccaaaggatacctgtttgtgatgttacaaaacagaaaaatagaaaaacaatctgtacaaactttgggttggtgtgtaaggaagagccatgcatttcatccgttagtcaacatcgaactgcatagttgggtcaactggtatcatgaaaagaaattagtatagttaaagtatgaggctttcttataccactggaggatgtgtgtgtgtgtgtttgtgtgtgcacgtgcacgtatgtgtgtgacagagatcatatctccatcaaattcatctttccactggatttaaaaaatctaaatactgtagcaatgttattatcagacagaacatcctttcccaataattgctctgcaagaattaaatgctagatcagcaaacttctagagtattccgtcgatttgctattatgcaagattatgcaatttctgttaagtggttcccagaggcttacaaaacgggttaacttagtcctgaatgtggattaatttatgtttcccagcctcatttagcctttttagtgtataacatgattagttcacctaatatttttatatgatttaaatatcaagaaaattaactttcagaaaatgctaatgcatttcatatgttttaggagctacagcagtagaggttttgatattgacatttgccattttttgttcttttacctacaaatctactttgatatgtgtgtatgtatgtatacacacatatatacacaaatatataaacacacgtacatatataggtatatatacatgtacatatttgtataattgctgatgacatgtaggaaagattacttcatgttgctaaggaagagtttctcctgtgaataaaggaaatttgtttaaggaaataaaaaacactacaaatgtggcaggggcgttcagttggagtatcctgttaagcaatatgggtgctttatttgggctgtgctttcttggtatatggttctttaagaatatgagaatatagcaacatcagctagtccaggagcaatgctattaacctgaatggtcagtgcagttgcagacctgggagcagttaatcaactaatggatatttctgtagagagaaactatctagtgaggtcatatgagttgtacaacacaagtggtcagcatcatgagtcctccactccagaactaaaatccctttctctgtgttaccttgctgcctatctgcatctaccttttctcctcctgtgccaattcactaccatccaccatcgacttactaaatatattgtttacaaagtgacctaatataactatggaatagaggatgtttatgaagaagacaaacaattttattttaaaatgttttactcatattcatgattca

SEQ ID NO: 681840 - DNA, 1423 bp, Homo sapiens
ggctgctaattacataaaaattgcactggactttgagaggtagacatcacaatttaagaaactgttgataatacaagcattgctgacctctcagatcactagggtagaaactctaagaaattccttgcagagtttattagaacacaatggagttcatagttctgccatatcatccttattaaagtctcaggtactatattgtaagttctggacaccacattctaagggacaatctaaggaagttgcctataggcaatctggtattcaggaaaaatggattagagtttggggggattgtgatgtaaacatgtgtcataagaactgcaaagttttatggacataycctgaacatcttccattatgaataactagtacgcagcagctgtatcatgaaattgtatgcaagtatttatcaacttccgagtcatctaaattaactggtacgaatacatattttctaattaagtagaagttgaaattagttaaaaataaatttcactaatttttggattgtgagaaagtaccttctttatattttctaaaaatgtttaagcaaatgcaagaacctcaggtactattttagttgctttaagaaaatgaagattattttccaatgaaacacttattataataataaaatatattttaaaaaagaagatacaattaaggaaaaacaaacccttggttcataactatcacattgtagcccataagtatacacaattattacttgtcaatgaagagataaattaaaaagcccagaggaggccccaaaaccaaccaactgaagaaaacaaccaaacaaacaaaaccccccaaaacaaaacagaggtgtcaaaacattccaaaggactgaggatcctcttggtggtatctatgctggtgttggagcatttaagtatcactacaacatccagcatcattcagatatgaatgttatgcctccagaccaccctcatacatgtagctggaggtgcttataagcatggagagttccaggctctacccagacaagcaatgtcaaaatctcaggaatccaggttcactttcaaaatcactgtaatgttttccaaacccagactgtttctaatgatatttttagggtactcatgaagaacaatcaatccatttcttgtcttttttcaacctaaaatatagaaaatattttttcccaatagctgcagtggccaatggtggcaaaatatcttactgtatttcatactaacctaaagcgatcattcaaagttatcaggctatctcaccatcacctctccaatctagaattttcaataataataaaagtgtgcatagcagatttaaaatatctcaaaagaaaaagtgcaatggtattgtccacaactgctggtgatgtagagtgtttatatttagacatgggaaaggatcagtcttgctccaagtagtt

SEQ ID NO: 681841 - DNA, 622 bp, Homo sapiens
tgcatttagtgttaggctgattccaaaatgaaaaaagacaaaacttgtattttcaggtttatatgagcaaacacttaaagcaacattgggcgtttttcttctctatttggatagataatttaagcataatttaggtttctgaatycataatggcatgagaaagcatttgaataaatgactttccttcactggaaatagtagaaaataccacaaaataaagagaatctgaagtcaacatgtgactacgttatgtgtaggcaatttataaccagtacagtggggaagaaattgatattttcatttaacagatgatatttcaaccattctagatggcacattatttgttaaagagaaaaaaagaaaaacactgtaaattgacttacattacagattatgcctgtctatatttgccatctatattgcctgacttaaattgacatatgtcttctttcatctgtgaaaggacttattaccttgtcttttctaggctcactctttgaattttatttatagatagtgagcagaatttatggaagaggcttataagtaaaaaaatgcaattattttgagagctgtatctgttatcaagttggtgctagagataggatttataaagttcctg

SEQ ID NO: 681842 - DNA, 858 bp, Homo sapiens
  misc_feature 401: n = A,T,C or G
cctcctggattcaagcaattctcatgcctcagcctcccaagtagctgaaattacagatgcatgccaccatgcctgggtaatttttgtattttttgtagagacaatgttttgccatgttggccaggctgctctcaaatttctggcctcaagtgatccacccacctcagccycccaaaatgctgggattacaggcatgagccactgcacctggccttattcattataaaattattattttgcttaagacagagactggacataatgcataatcacaaatacttgctgagttgacctaaggaaaagcattattctgataaaggatatctgcaaaaatcaaactaacaaataatccacaccaaaaattatacttaatggtgaaatatttaaagcattccattganattgagaataaaacaagaatgtcccctattgtgacttctatgtaatgttgcatcacagggttcagtaagtgaaggaatacaatttttagaaatgcaacaataagaaataaaggaatgtaaccatcgttagcagacaattaacattactgaaaagtagaaatctaaaagcatctacaaataaaatataagaactaagaaccgaatttatcaaggttgctaaatacaaagtcaatgtgcaaaaatcagttgtatttctatatgcaaataactagaaaataaaattaagacaacgatggcattaacaatagcatcacacacattaaattattagaaatagcctaatgaaagatgtgtaagacttctacacagaaaactataaaatatcgttgaaataaattgaggaagacttaataaatggaggcatatagcaatatgttgattatttccaaaggtacct

SEQ ID NO: 681843 - DNA, 591 bp, Homo sapiens
tctgggggatccagatgatggaagactacgcaggccttaaaaaacaaattttctcctaatgaattaatctgaaatataaacaaaatattaaaagtatgagacaaccatatrtttgtcatgatcccaattttataagaatatgtaaatatgtacatttatgcattaacatagactaaaatggcacacagcacatcaaagaggcaacggtagatctctctggatgacatcactacgagcgaccttctatttttttctgtgtatctttctttctgagtttggcatgagaaacaggacattgagtgtctctgggagcatcaagagagctgcttgatgcaatgcaaggagcagactctccaactcagtcagccttgagtctaaatcctggccccctcatctttgagctatgtgaccttcagcaagtgcctttgcccctctgcatctctttctttctgaatttggcatgagaaacaggacactgagtgtctctgggagcatcgagagacctgcttgatgcaatgcaaggagcagactctccaactcagtcagccttgagtctaaattctggccccctcatctttgagctatgtgacc

SEQ ID NO: 681844 - DNA, 591 bp, Homo sapiens
tctgggggatccagatgatggaagactacgcaggccttaaaaaacaaattttctcctaatgaattaatctgaaatataaacaaaatattaaaagtatgagacaaccatatgtttgtcatgatcccaattttataagaatatgtaaatatgtacatttatgcattaacatagactaaaatggcacacagcacatcaaagaggcaacggtagatctctctggatgacatcactacgagcgaccttctatttttttctgtgtatctttctttctgagtttggcatgagaaacaggacaytgagtgtctctgggagcatcaagagagctgcttgatgcaatgcaaggagcagactctccaactcagtcagccttgagtctaaatcctggccccctcatctttgagctatgtgaccttcagcaagtgcctttgcccctctgcatctctttctttctgaatttggcatgagaaacaggacactgagtgtctctgggagcatcgagagacctgcttgatgcaatgcaaggagcagactctccaactcagtcagccttgagtctaaattctggccccctcatctttgagctatgtgacc

SEQ ID NO: 681845 - DNA, 607 bp, Homo sapiens
ctagccagcagctagcatttccctatgtaacacaccctgtaatgaccctgccccgaaggagtctccttataagccctacccctcattttctccagaattaaatgacaagtcacatccccgcaggccccaggggccaaatctaggagggtactgaatcatcaaaaaactccagggggaagatactgmatcaccaaaagaaactaaagattttgctaattgatattggcttactcacagtacatggttggctaaaaaatttttttaattgatattggcaaaaatctgggaaggtgatctgagaatgaattctgagggtgcaggatgggtgagggaggaaggggatgctagatagggatgaatgtaccgatattgaggattccacagggacagcttgagaagctgggattataggcgtgagccacagcgataatgtagtactttcagtgctgaaatcaggatagtgccaggcaaactcggacaattggtcaacctagctgttaagtaactaacttgctctaaatcacagttattaagtggcagggcctgtattcaaatgcaggtgggctgacttcagattcaaattgtttgcttttgccagtggttctca

SEQ ID NO: 681846 - DNA, 607 bp, Homo sapiens
ctagccagcagctagcatttccctatgtaacacaccctgtaatgaccctgccccgaaggagtctccttataagccctacccctcattttctccagaattaaatgacaagtcacatccccgcaggccccaggggccaaatctaggagggtactgaatcatcaaaaaactccagggggaagatactgaatcaccaaaagaaactaaagattttgctaattgatattggcttactcacagtacatggttggctaaaaaatttttttaattgatattggcaaaaatctgggaaggtgatctgagaatgaattctgagggtgcaggatgggtgagggaggaaggggatgctagatagggatgaatgtaccgatattgaggattccacagggacagcttgagaagctgggattataggcgtgagccacagcgataatgtagtactttcartgctgaaatcaggatagtgccaggcaaactcggacaattggtcaacctagctgttaagtaactaacttgctctaaatcacagttattaagtggcagggcctgtattcaaatgcaggtgggctgacttcagattcaaattgtttgcttttgccagtggttctca

SEQ ID NO: 681847 - DNA, 607 bp, Homo sapiens
ctagccagcagctagcatttccctatgtaacacaccctgtaatgaccctgccccgaaggagtctccttataagccctacccctcattttctccagaattaaatgacaagtcacatccccgcaggccccaggggccaaatctaggagggtactgaatcatcaaaaaactccagggggaagatactgaatcaccaaaagaaactaaagattttgctaattgatattggcttactcacagtacatggttggctaaaaaatttttttaattgatattggcaaaaatctgggaaggtgatctgagaatgaattctgagggtgcaggatgggtgagggaggaaggggatgctagatagggatgaatgtaccgatattgaggattccacagggacagcttgagaagctgggattataggcgtgagccacagcgataatgtagtactttcagtgctgaaatcaggayagtgccaggcaaactcggacaattggtcaacctagctgttaagtaactaacttgctctaaatcacagttattaagtggcagggcctgtattcaaatgcaggtgggctgacttcagattcaaattgtttgcttttgccagtggttctca

SEQ ID NO: 681848 - DNA, 948 bp, Homo sapiens
agtcaacttaaattcaggttgaaatagacaaaaagtagaaataaaaataagattttattttaaaaatgtgctggggggtgtggatagtgatggggaggatctactccaagaaggtgaattgccttgagggattgcaatccctgggagagggcacttggagaactgcagccccggtgtcaggataacttgggtggggtccagtctccccacctcctttgctttgtgactccacayttgtcaatctgtgtgacactttcccaggcaactgacactggtggtgatgtcagtgggatttgactgtagaaggagggggtgggaaagttttctcctcctcctccatgaattattaagcctgggtaattctcatagtcaattctgggtctaagcttgattgattggaaagtaaatttcagattcagttattattattcagattattgagcagaactttgtatcagaaggggtgctagggactggcagatgtatcctatgtagggtcattctcccctccagactggcaggccagctagcatcctccagcatttccctagcaggctctatttccctcttcaagtctcagttgcaatatcgccactcatgcagggagatcttagcagaatagattgtcttctcccttaatctaaatcatagcaatctgcttattatcatttgagtacttcactaatttataactctagatttatacatttgtttacttatttatggctcatctgtcctagctagactttaagcttcatgcaggaagaagccatgtccatttcatgctccattatatacccagtgcctagggtagtgacgggtaaactaagacatgagaagttgaattaatccatcttgaaagtggaagcaccaggatttggacacacatcagtctgtctccaatatccaaactctatcctctatccaaatactgataattgtcatcta

SEQ ID NO: 681849 - DNA, 638 bp, Homo sapiens
tgcttttctattttttcccacaatcaattgattttttttccataggattgccttcctatgggattccattctcagtttaatgattactctccatcctcactctgatttctctgtttaaacatcgtatgtgtgccttgtgtatatatatatatacacacacacgcataggtttttgtatgtgtgtatatatatagatatatacayacatacatatattgtgtatatatatacacacaaacacatacacatatatatttttaaattgtacgtgtattatataagtatatatagattatatatatatatatataatttaaaaatctggactactataacaacttcttaactggtgttttgtttactcctgtctataataacttctcttcatccttcacaaaggcttccagagtaagaatgatttcttaaatatcatctgattgttccagcacctccatgtccatttcacacatggtgatttcttgtgtcttaggagagtaagaaaaactctggagcaacaagagccttttaatgtcattctcaacatcctcacctgaccttattccccatcaccaccccttatactccaaagactccagctctgctgaatttcctaacactttctacacagcccagaccct

SEQ ID NO: 681850 - DNA, 601 bp, Homo sapiens
tcaagtctactttgtttcacaaataaaaattcctgttctatcattttgtagtagtatgtcaagctttggctttctcaaaataatagctgattaaaatcctgagcgatgaatgacaacaaaaacagcatttattatatttcataaactgaatacatcgcatacgttgttttacttattcttaatttaaaaaaataggtaacatttccagttgaggaaatgagtgttcagatggcttacataatttaatcgagtatayagcttgccagtttatataatttactccagggtatacagaggcaggatctgaagccaggtcactgtgatccatgctcagcccaccttctcccaactatgttagtctttgtgcctcctctgaagctttctgtaacaaatttggaacctgaaagatttaagctaggagataagagaggccagaatatgagtattaacattatcgtagatgaaaccctgggcaacccagggggccctaggcagcttgtctgaggttcaggtatctcatccaggctagctcttaaagcacatagcttcactctttaatggaacacacccaaaatgcccttcggtgactttccagcgagta

SEQ ID NO: 681851 - DNA, 644 bp, Homo sapiens
ttcagaaccaacaaaacacgaagtgaagtgggaaaagaggtccctgtcgcaatggctcagatgtctggattggaaaggtcacagccagcatcttgctgtatggatraagccccacaagaccaaagagaaaagcgtgcaatttcagtgtgcctgcctctctctctctcacacacatacatacatgcacacacacacatgcttacccagtaaatgtgtagacctccaaagcaaatttctgtagtaggctggtcttggtagaattcgacaggatgaggaccacattcatgtggcctggcctcagacgtaccaagttactggtgtatgttacatctgtgagttcagttacctccacaaagccttttttaggaatcttgctgtggagaaatattgaggagttaagatgctgtcaggatagggggaaagccgttactttgaaaagaaacagctgaaagaaaatgctatgttctaaccagactaggtatgttattcactattcttgagtctaacacattggtaggatggggatggcctgacttggtaatccctgacctacaaacagcctttctgtgctgcttttctttttctttttgagataggttcttgctctgttttccaggcttgagtgcagcgacatgatcatggct

SEQ ID NO: 681852 - DNA, 606 bp, Homo sapiens
ggtgacagagcgagactccctcttaaaaaaaaaaaaaaaaaatggccagggataacatgcacagctatccaggaggccgagatgggaggattgcttgagcccaggagatcaagaccagcctgggccacatggtgagaccctgtctctacaaaaaatacaaaaaaattagccaggcctggtggcgcacacagctacctgggaggctgagtgggaggatcgcttgagcctgggagttcaaggatgcagtgagccgtgatcatgccactgcactccagcctgggccacagaagaccttgcctcaattaaaaaaaaaaaaaagacacaatttttcaatttcttttttcttagagataggatctcactaagttrcccaggctggctgtgaattcctaggctcatgtagtcctcctgcctcagcctctcaagtagcttgtcctacaggctcacaccaccacacctggctaaaatgacatatttttgaagtataagttggtagcatctatcggacaggaacaagtaccctttaacacacaattccatttctagaaatatcctgcagtcagaactagacgcacatgcaaggctaactgcagaaacaacacaatg

SEQ ID NO: 681853 - DNA, 606 bp, Homo sapiens
ggtgacagagcgagactccctcttaaaaaaaaaaaaaaaaaatggccagggataacatgcacagctatccaggaggccgagatgggaggattgcttgagcccaggagatcaagaccagcctgggccacatggtgagaccctgtctctacaaaaaatacaaaaaaattagccaggcctggtggcgcacacagctacctgggaggctgagtgggaggatcgcttgagcctgggagttcaaggatgcagtgagccgtgatcatgccactgcactccagcctgggccacagaagaccttgcctcaattaaaaaaaaaaaaaagacacaatttttcaatttcttttttcttagagataggatctcactaagttacccaggctggctgtgaattcctaggctcatgtagtcctcctgcctcagcctctcaagtagcttgtcctacaggctcacaccaccacacctggctaaaatgacatatttttgaagtataagttggtagcatctatcggacaggaacaagtaccctttaacacacaattccatttctagaaatatcctgcagtcagaactagacrcacatgcaaggctaactgcagaaacaacacaatg

SEQ ID NO: 681854 - DNA, 646 bp, Homo sapiens
tgtgatgggtaaaaagtgctgttttctttcaacaaaaattcaccaaaactcattcatattgttgtgcatatcagtagttcattctttttaatttctagatggcagcagttcctgttctgaataatccacaatttatttaaccattttcctattgatggacatgtgggttgttttcagttggggctttgttcccatggcagcgtgtggagctctagcacttcctgtttcatgggtgcctggtggaccattgcatggtatcagagttaatattcataatagtaatggtgaacattattgagtacttgctgcataatggtgatttttgggcaatccactaaagcagagaaacagacaaacatgataagggtaggaagctgcatttgcttgaagtgtaaggaagaagactggttctggaattggccatgtgcattacyatcctgtaaaggaggcaggcagaatacaaagctcatctgttgttatttggttctgggaaatgtcaacgtgagtcatttaggaccaacagtcagaatttgaaacttcctgtttttttggaaggtgttttatttcctgtttcttgtgaatatttattcctagtaggagcttaattctgaagggtaaataacaacagcaatagtaagatcactta

SEQ ID NO: 681855 - DNA, 1290 bp, Homo sapiens
tgtgttcttaaaatattgtcaaaggctatgccttgtccaaaagaatgttgttaccttatgaatttgctgcagatttatatatcctgctttaaacataaagaggcaagagtctgaaatgatgtagaacataaccttggtataaagagtccctggaaggaggtcatgtataattagagattgcttctttggcatccaattctggatttctcatggaatatggtctaaaacatttattttaaaaatatattttcaatgatctttacctttatttcaaccagtttaatgctaaaatatacctgttcactgaagcagaacagtgtcaggcgcagtcacgcatgcagtctgtaycatgcatcacctcaatgtggcagttttgcttctggataacttcctactcgcattcagctcctccccagccaaccattagcccactcacccttactcatgcctagatgtgtaaatgattaaaaaacaataaagcaatggactactgatgcagagggtcaaactacggaacccagaggtaccacagatttaccaactctaagcctccatcttctcatctataaaacagagacactggccgagcatggtagctcacgtctgtaatcccagcactttgggaggccgaggtggacggatcacttgaggtcaggagtctgagaccagcctggccaatatggcaaaaccccgtctctactagaaatacaacaattagctgggtgtggtggtgcacgcctgtagtcccagctacttgggaggctgagtcaggagaatcccttgaacccaggaagcggaggttacagtgagccaagattgtgccactgcattccagcctgcgtgacagagcgagactccgtctcaaaaaaaaaagagatactgatatcctccttcataggctcattataaggtttaaatgagataaaaagtatagaaccaggagattagcatgtagtaggtgctcagtgatggtacctgtcccaaactttcttccattcctcatggttggtacagccagcttggagtcacctctgtcctttcctccttctgctgctccccctccatctatataatccaacacttctgcttctttggcatggccaaggcattggtggaagaaactgatgatatttgtccaaagttttagatttattgctaccctgctaattgctatcctgataactacaggcaaaattacaagttttctgtaagttatttaatttagagacgggtctcactctgttgcccaggctggagtgcagtggtgtgatctagactcactgcaacctc

SEQ ID NO: 681856 - DNA, 594 bp, Homo sapiens
attttattttatctatttttgagatggagtttcactctgttgcccaggctggagtgcagtggtaygatctcagctcactgcaacctccgccccccgggttcaagcaattctcgagcctcagcctcctgggtagctaggactacaggcgcctgctaccacacccagctaatttttgtagttttagtagagactgggtttcactatgttggccaggctggtctcgaactcctgacctcaagtgatctgcctgccttggcctcccaaagcgcttggattacaggcgtgagccaccgtgcccggctctgtccagggttttaaatgtgggctggggctggcaggagactggggttatgtctgtgacaggaggagccaatcccattgctcttgtccaggtgagtgagggtgggggccccgacccaaggcagtggtgtggggctgggtggagcggacactttagagagagattccatgggaaggacggccagggcttgccggctgctgggaggtatggaaggaggaggaggcgataaggttcctggattcctggcttgggctgagggagggtggtgggtggtgggaccctccctgggccat

SEQ ID NO: 681857 - DNA, 594 bp, Homo sapiens
attttattttatctatttttgagatggagtttcactctgttgcccaggctggagtgcagtggtatgatctcagctcactgcaacctccgccccccgggttcaagcaattctcgagcctcagcctyctgggtagctaggactacaggcgcctgctaccacacccagctaatttttgtagttttagtagagactgggtttcactatgttggccaggctggtctcgaactcctgacctcaagtgatctgcctgccttggcctcccaaagcgcttggattacaggcgtgagccaccgtgcccggctctgtccagggttttaaatgtgggctggggctggcaggagactggggttatgtctgtgacaggaggagccaatcccattgctcttgtccaggtgagtgagggtgggggccccgacccaaggcagtggtgtggggctgggtggagcggacactttagagagagattccatgggaaggacggccagggcttgccggctgctgggaggtatggaaggaggaggaggcgataaggttcctggattcctggcttgggctgagggagggtggtgggtggtgggaccctccctgggccat

SEQ ID NO: 681858 - DNA, 594 bp, Homo sapiens
attttattttatctatttttgagatggagtttcactctgttgcccaggctggagtgcagtggtatgatctcagctcactgcaacctccgccccccgggttcaagcaattctcgagcctcagcctcctgggtagctaggactacaggcgcctgctaccacacccagctaatttttgtagttttagtagagactgggtttcactatgttggccaggctggtctcgaactcctgacctcaagtgatctgcctgccttggcctcccaaagcgcttggattacaggcgtgagccaccgtgcccggctctgtccagggttttaaatgtgggctggggctggcaggagactggggttatgtctgtgacaggaggagccaatcccattgcycttgtccaggtgagtgagggtgggggccccgacccaaggcagtggtgtggggctgggtggagcggacactttagagagagattccatgggaaggacggccagggcttgccggctgctgggaggtatggaaggaggaggaggcgataaggttcctggattcctggcttgggctgagggagggtggtgggtggtgggaccctccctgggccat

SEQ ID NO: 681859 - DNA, 594 bp, Homo sapiens
attttattttatctatttttgagatggagtttcactctgttgcccaggctggagtgcagtggtatgatctcagctcactgcaacctccgccccccgggttcaagcaattctcgagcctcagcctcctgggtagctaggactacaggcgcctgctaccacacccagctaatttttgtagttttagtagagactgggtttcactatgttggccaggctggtctcgaactcctgacctcaagtgatctgcctgccttggcctcccaaagcgcttggattacaggcgtgagccaccgtgcccggctctgtccagggttttaaatgtgggctggggctggcaggagactggggttatgtctgtgacaggaggagccaatcccattgctcttgtccaggtgagtgagggtgggggccccgacccaaggcagtggtgtggggctgkgtggagcggacactttagagagagattccatgggaaggacggccagggcttgccggctgctgggaggtatggaaggaggaggaggcgataaggttcctggattcctggcttgggctgagggagggtggtgggtggtgggaccctccctgggccat

SEQ ID NO: 681860 - DNA, 652 bp, Homo sapiens
ggagactgaggctcagagagcctaagaggcttccccaaggcctcagctggtgagagggtgctggggagtccaggcctggtctttctcactccagggtctgggctgtccacctggcaggtggacaagaggggaagcagggctagggatgaacccaggggtgggctggctgtgggcactgacatgatccgctctctcctctcctgcttcaggaccccggctgtgccaaccaagctctgatcagcaagaagcttaatgattatcgcaaagtgaggtgaggcctagccctcatggagcagtctcctytgtgggggtggtagggggctgaaggcagaggatgtcttcctggaccacctccagggctgccctctgctggggaaaggggtatccagggtatccagggtctccaggctgcagtttggcatggaggcattgcctcagggtggaggggatgtcccgaggggcaggaggccagggtgggtggcctgcttggccaccccaagtgaagacctctcctctccccctttttcctacacagccatagctctgggcccaaagctgattcctcccccaaaggctctcgcggcctggggggcctcaagtctgagttcctcaagcagagtgcggcacgtggcctcaggactcaggacctgcc

SEQ ID NO: 681861 - DNA, 652 bp, Homo sapiens
ggagactgaggctcagagagcctaagaggcttccccaaggcctcagctggtgagagggtgctggggagtccaggcctggtctttctcactccagggtctgggctgtccacctggcaggtggacaagaggggaagcagggctagggatgaacccaggggtgggctggctgtgggcactgacatgatccgctctctcctctcctgcttcaggaccccggctgtgccaaccaagctctgatcagcaagaagcttaatgattatcgcaaagtgaggtgaggcctagccctcatggagcagtctcctctgtgggggtggtagggggctgaaggcagaggatgtcttcctggaccacctccagggctgccctctgctggggraaggggtatccagggtatccagggtctccaggctgcagtttggcatggaggcattgcctcagggtggaggggatgtcccgaggggcaggaggccagggtgggtggcctgcttggccaccccaagtgaagacctctcctctccccctttttcctacacagccatagctctgggcccaaagctgattcctcccccaaaggctctcgcggcctggggggcctcaagtctgagttcctcaagcagagtgcggcacgtggcctcaggactcaggacctgcc

SEQ ID NO: 681862 - DNA, 1424 bp, Homo sapiens
gacacggctgtgtattactgtgtgaaacacacagcgaggggaagtcagtgagagcccaggcacaaacctccctgaaagggtcccagagaccaccagggggcgccaggacactgtgcacggggctgtctccagggcaggtgcaggtgctgctgagggctggctttctgtcatggcctggggcagcctcatcgtcaaatttccccagggaacttctccagatttacaattctatattaacatttgatgtctctaaatgtaaaacgtttttttttgttcctttgtttttgtaacaagaggaaacaccctcacctccacagaagccagggtgtcactttgggggcagaaataatcctttcatggtcaggatgagagtcctgaggaatctcagggaaacctggagagtgttttccaattagactcagagcagagacctccatgggaatctctgattagaacaggccttgagctctgatgggagccaagagagaggctcacccagggtcagggtccttaaaacctgatggttttcacagctgtcccctctcaacttgtaaaactgtgcccatctgactcagactgattcagctgaccctctttctgctgatccattttccatctctgtagacttgattctcacagttccctttcttcttctcttccctgaaaacagaagatgtgttttctgtagtcaaaattccagggcttgggtctgcaggacctgggtaggctgaggggactttctcactcaccattgtctggacactcctgttgtcttctgtgcatggaggcatttggaaaatgtagtggacattagccatgaagagaataatactagttttctccaatgggatattgatgtagagctgatcttgtgcttctcacactatctgagtttggactctcacctgtgactttgagaagagctgrggatgggcactccattgtgctgtgagctctgggtaacaataattgtagaatctggctaggcagtttaaggtcaatactactggccttcgggaaagacaggctggaattcctgggaagatctgcatctgccgtccaccacggagccccatcgtcttctgttatgctgtctttgaatcagtcccaactagattatctagaacactcttcgtgacttaggaaaaaataatggcaggctccactaacacctgtattatgccatgggagcaacacctaggctactgtgtgattgaatagatgagactacggtctagtcaaggtgacaggtaaaattgattgttgccattatgatattttattttatatttggcaatataatcatgctcatattataaatattttttgagacggagtcttgctctgtcgccaggctggagagtgcagtggcacgatctcagctcactgcaacgtcttccacctcccaggttcaagcaattctc

SEQ ID NO: 681863 - DNA, 1424 bp, Homo sapiens
gacacggctgtgtattactgtgtgaaacacacagcgaggggaagtcagtgagagcccaggcacaaacctccctgaaagggtcccagagaccaccagggggcgccaggacactgtgcacggggctgtctccagggcaggtgcaggtgctgctgagggctggctttctgtcatggcctggggcagcctcatcgtcaaatttccccagggaacttctccagatttacaattctatattaacatttgatgtctctaaatgtaaaacgtttttttttgttcctttgtttttgtaacaagaggaaacaccctcacctccacagaagccagggtgtcactttgggggcagaaataatcctttcatggtcaggatgagagtcctgaggaatctcagggaaacctggagagtgttttccaattagactcagagcagagacctccatgggaatctctgattagaacaggccttgagctctgatgggagccaagagagaggctcacccagggtcagggtccttaaaacctgatggttttcacagctgtcccctctcaacttgtaaaactgtgcccatctgactcagactgattcagctgaccctctttctgctgatccattttccatctctgtagacttgattctcacagttccctttcttcttctcttccctgaaaacagaagatgtgttttctgtagtcaaaattccagggcttgggtctgcaggacctgggtaggctgaggggactttctcactcaccattgtctggacactcctgttgtcttctgtgcatggaggcatttggaaaatgtagtggacattagccatgaagagaataatactagttttctccaatgggatattgatgtagagctgatcttgtgcttctcacactatctgagtttggactctcacctgtgactttgagaagagctgaggatgggcactccattgtgctgtgagctctgggtaamaataattgtagaatctggctaggcagtttaaggtcaatactactggccttcgggaaagacaggctggaattcctgggaagatctgcatctgccgtccaccacggagccccatcgtcttctgttatgctgtctttgaatcagtcccaactagattatctagaacactcttcgtgacttaggaaaaaataatggcaggctccactaacacctgtattatgccatgggagcaacacctaggctactgtgtgattgaatagatgagactacggtctagtcaaggtgacaggtaaaattgattgttgccattatgatattttattttatatttggcaatataatcatgctcatattataaatattttttgagacggagtcttgctctgtcgccaggctggagagtgcagtggcacgatctcagctcactgcaacgtcttccacctcccaggttcaagcaattctc

SEQ ID NO: 681864 - DNA, 628 bp, Homo sapiens
aggtagggagcacaaaaataagcactgtaaatttatttgcaatcaaggaataatataaatggtcactgttgagatgtaattacagtagaaaacatactgttccaaaatcctcattgggtctgattgaacaggtgccaagggcacattttatagaacccacatggagcaggaaggctcactccaacagcagcctgtggccactttaacctcactgccacacctgaggggaatggggggcgaggaggctggacttcataagtagaaaacaggaatagtcacagagttaagaaattttaagtaaaaaggtgaattctttcagcttgaatttccttccccagtgataagatgtcttgccacagttccccagtgggaattgccagatagcatagtaggtggtgtatgtgtgttgcggggaagctagagagctggggatasagtgcagaaaaagaaggcaggaaaagacacagctacatatgcaaaaaagttaggaaaagagacaaagaaaggaagaagaaagaaacagcgagggaaagagaaaaagggggatagataaggaagaaaataaagacaggagacagagatggggagagggagagagagaatagagaataaagatagaatgatactg

SEQ ID NO: 681865 - DNA, 628 bp, Homo sapiens
aggtagggagcacaaaaataagcactgtaaatttatttgcaatcaaggaataatataaatggtcactgttgagatgtaattacagtagaaaacatactgttccaaaatcctcattgggtctgattgaacaggtgccaagggcacattttatagaacccacatggagcaggaaggctcactccaacagcagcctgtggccactttaacctcactgccacacctgaggggaatggggggcgaggaggctggacttcataagtagaaaacaggaatagtcacagagttaagaaattttaagtaaaaaggtgaattctttcagcttgaatttccttccccagtgataagatgtcttgccacagttccccagtgggaattgccagatagcatagtaggtggtgtatgtgtgttgcggggaagctagagagctggggatagagtgcagaaaaagaaggcaggaaaagacacagctacatatgcaaaaaagttaggaaaagagacaaasaaaggaagaagaaagaaacagcgagggaaagagaaaaagggggatagataaggaagaaaataaagacaggagacagagatggggagagggagagagagaatagagaataaagatagaatgatactg

SEQ ID NO: 681866 - DNA, 658 bp, Homo sapiens
agcagtacacacttgatgtttgtctactctggatgtcattaaccttgggtccactaagtcctagtatctataataaacaaaacctgggattatttaacttagtgttttagtaagctgacaaaacacattctgggaatgaatgaacgactccaaggtcagtaatgagaatgcatcctttattctccattattagcaacatctctgaccttgtctcctgcaggcacactccggcccacgtgcttctcctggctcccaaaccactgcactgaccygcctttatgaacactgtgttcataaagttgatgttcactgaaacttccttaattccctgagtgtgctgccccttgtagttgccacctatgagataggtaggtactatcattatttccattttacagatgagggaagtgggggttagacagggtaacaaattttcccaacatcacacagctagcagtatatactggaaaatacatacagtgtttcggagctgatggcctgtccttccacaggaatgatgcagtccttatccaggaaagccaagagaaaggaagagatgcattctgccctggtcttctctgtcttcttcccacttttgaggctccatttgtcccatgctgggatctctgcttctttatccagagatttgcagatttta

SEQ ID NO: 681867 - DNA, 2073 bp, Homo sapiens
aatatctagcttaaaagcttgtattctttcctccacagcagggttcagcaattgttttctgtaaagggccagctagcccctagtctagcctttatgggccactcattcattgtgacaacctctcaactctgctgttgtggtgagaaagcagccataggcaatatgtgaatagatgggtgtagttgtgttccaataaaactttatctacaaaagctggcagcaggctggattcaggccttgggctattgtttgtcaaccctgatctacagcatatctttatttaactctagcatttctcaagacactttgaaagtgattattctggacaacccaacagtcatcattgtatgcataaatctcagaatgagatgacaaaggcttaaattttgagacagctcagataaataaaaaaactcactgaagtccattcttttaaatagtatcttacctaatccttgagggatgtggtgtcttcctatcctcagacctcaccagcaggtgttagattctcataccttcaccctgtggtctaaactgagtgttcagtttgtacctattctatcatacatgttcagcgcatcctcaatctgagtgttctggcctctcagttatccaaaggtacaactacccagaagaagtgaaggtcctcctctgagagtcaaactgtaaatcaagatacaggaactggagcaacgatctatgaattcatcttaaagacccaaaatgactcacaggccctaacattaaaatatgcccgacttgttggcaggatggatggatgattgaaagatgataaatcaattatgacagattgttggtagatagatggttgatagatgattgataatcaatagatgatagatcaattgatgatagatatatcgttggtagatagtgcatagatgatagayacaaagattagattagattagatagatgaaagagagagaatacttaacactaaacacgagtgctcagcaacagagagaagagagtcacggggcagtattggagctttccatctcagtgtcatctaaggagcaggctgccctttcaactatcacaaaaatctctgctttgaggctagacacagcagacctaagcagtaaacttccagtcatacaaccagcttcactttattctcattcccagtcatcttctgattatgctttggtttcccatgaagtttttttgaacaaaagaatgtcctaatcaagccttggcagctgccttatctccccaacatgtttcttattataaaccaataaacgagtatctgttcgacgctttggtctccgacagccttgttcatatggcctgtgatcctaggtcaagctatctccggtacaaactctcacttcttagtctgcaaagatgaaggagagatccaatggggacttgaagaaatttaccaacgtcaatgaagaacacttcagtggcctagctgtttatttctagcaggagagttttttggtttctgtacactttccttgatccgagaacaactttagaagcaagagaaaaacaaaacaaaaaccctgtttcttttccaagtccccatttttctctgcctctgttcttggaagactctagcaaaacacttttctagagtagtcctaaaaatgggtccacctgccccctggtggcagacataaatggatccccatagacttacaaaccctccttcctgaactttccctgccaggggaattgttttctaccctcctcagcactggggggctcatttacttgaataagatgagcactggttcccccaaagatggccttgggcttcctgacctgacttagagggcctggcttatctgagatctgcactgagagcaaccatgggccttacgaagaaccaggaaagtgagaggctggaatgccttgcgaaaagaatgaaaggatttggagtccactgagaaaagcttctggaagacacttctcaaatttaccagaaaaaaaaacatggtctcagggcaagaatttggagaagaatgataatcagcatagaccgcgttacaatggtgtaatgactcaatgggacctttaccagtcctacaatatgcg

SEQ ID NO: 681868 - DNA, 1267 bp, Homo sapiens
ctgaatctgctattcttactcattgtatacagcacatctacacataatagaaaattgccagaaaattgcatacaaaatagttttggctcacgaaaatgttcttctattcttatagaattctaacaaacttcataaaatagatgtactacccaatttcgataatgtgccctttcactataaagttaaggtatatttagctatcaactttttaaggaatatgtattgttgatgttagaaagtcaccaaagcacacacaattgacttgcaagttcatcagcttaagaaaaggatgttaggagaagcagtgatatgtggaggcatagactgtaccacgtggaatactcaatcccagaagcatttcaatagaccatacatttctagggtatttctgggttgccattataacaagaaaacaatgggacttttctcccaaggggaataatgaaatgttcccgataagatggattattttcactttttgaaaaattagataagcagagatagagtggtggttgcaaagggaaggcatagtttatgagacgtgtcaaattatattctgatatcatttggctgtgtccccacccaaatctcatcttgaattgtagttcccataatccccacatgtcatgggagggaccaggtggagataattgaatcatgggggcagttttccccatcctgttctcatgatagtgagttagttctcatgagatctaatggtttcataaggagcttcccccttcgctgggcacccattcttctccttcctgtcaccatgtgaagaaggatatgtttgcttccccttccatggtgattgtaagtttcctgagggctccccagccctgtggaactgtgactcaactaaacctccttcctttataaattacccagtctcaggtgtgtccttatagcagtgggagaactaatacacatgcctcctccatagtcttctgacacacaaccacaggcactrtaggtatgagttctccacatggctcaagatggggctctcagcatcagatcctttctcctcaccttgagaatgacctctaaagccttccaaagcagtctcttgggtctcagaaaatcaccaagattacatttttgttacacatgtctactcttagctattcttgacatctcacaggaattaatttcagaagtaaaatacaattcaaggaagaagaatacttaattatgaacacaatgtcttccaaatttttatccttcttaccattaacaataaagaataaaagaaaaatgagca

SEQ ID NO: 681869 - DNA, 2862 bp, Homo sapiens
tgcaaattatacatcagataaagggctgatatctaagatatattaaaaaatcaagctgctcaataataagaaaacaaataaccctactaaaaaatagacaaaaaacctgcatagacatttctcgtagaaagacaaagaaaaggccaacagatatatgaaaacatgttcaacatcactaatcttgatcaaaatgcaaatcaaaaccagaatcaagtattacatcacacctgttagaatggctataattaaaaagatgaaagattaataagcattagcaaagatgtggagaaaagggaccttttgtatgctgttggtggaataagaaagtgaggtgatggatatgttaattagccggattcactcattccacgatgtatacctgtatcaaaacatcacattataccccataaatatgtataattattgtcaattaaaaataaaaataacttttaaaaaaagatttgctggacaaagatatccagaaagccaatatttgtacacagaatagttgagagaaataaattaataaaataaaacttctcaaccttatctaggccactgctttcacaacctattagtccaaagaaacctcccttacacgttaacatcccagggtacacattctgtaaaatgctgctctagactcacagacttaataacagaggttgggggagttagaaaatattttgacatgctcagtttctttcatttttctttcggcttcctcaaaaatacctatttgaatatgtaaatagtatccatgaacattatttctggtaagaaagggtttcaggtaattaaaagcccaggataattatattatggtctatgtttaattagtgcttcatagtaattaaattaacttttcttttacttgaaggcatggctttgatagttgattatctaaaagtaattttctaggcaataattctgtccctgttgaaatattagtttgagaagtaggtgaacttggtttccttaatcaggctgcactgtgcttcactcacatcccgtgtctcctttcacaggtaaaggatgagcagagacatcacaatttacacattaattagattgtaaaatgaactctgggagaaataaaaatctcgagccctctgcagacttaggagacagatcagcatttagcacggtctcctactgtgtttagastggactgcttgattgagaaatgatgtcaagcattgttctgatgctgctattctctggtttctttcttttcccaggctggattctataggtttgcacccaaacaacctataggcatgacacagcaaaccctcacacaaacactggttttgctttatgaattcaatccaagacagggaaaacagtctcaattttctggcactctccctcttgagccctggaactggagaaattctatgacaggctattcctatgttgaagtaagagatgcacagtcaagaaaagccaagaaactcaagtaagtattgtatgccggcaccagaagcacaggactgctctgactgaaagtggcaataaaggaaagctgagacacgtgggaaaagggacaagagccagaagaaatacaaaaggaaaaaaacaggcagagtaaaggacagcacagaatagacatggtggtgtggaaaacaagcagcaagccgtctgacagctgagaagagcagcaaagaaacttagagcagttctgtcatgtggagagaggggcaaatagcccccaaccccaaaaagcgtggtaattaaggcattcactcattcactcattcattcaacaaacttactctgtgggaaaagcttaaacttgattcacttctaaacacccacttctattatttttacattttattatgatttaaatgttattattaaaaaatgttttggccttatatactcaggatcatgaaatctggcagaaatgacatagataaaatattgtttttatgagaaaggatgctaacatggacaaatgctgagtgtggacagatccgtgtctccaacctctcccatctgtgtgtaatattcagtgccctccccacctccaggtagtacagaaaccctgatgtctccatcagcaggtggctttgggcctcaaagtagaagtcagacatagaaaagaaaatttaaatacaatttttacacatctaggtttctagcctaggaaagtacgttcttaggtttgatttgaaagaaatgtttttaaaaattccattccccacattttctagttaaaatttaagggcaggatatagtctccctatttaacaataacaaaaatggtataattttccataaatttagtactttcctacttttgaaagaacaagattttagatgcgaagtcctatattcaaggctgacaattaaaatagacttttcaaaaaatcattttaaaatcccgtagttttaaatttagctttacaatgttcagatggtaatgtgaatagaaatggtgactcaattacttttcaaatgaagtacgttgatgaatatattcattttctcttggcagggaattattattgccttaaatttaatcttacttctgcacatgctacaggaattttcatggctaaactgttttaaattaacttatgattcatccaccatgaaaaatgagtgtactctacccacaatgaggcaaagtgacaagtagactgtagacgactttaaatttgattttctcagacattttattaaaacccttctcttgggttgctagaaatcatgcccctggattcactccaggggcaggcttgggagactggactgagctggcaggacatgcacttgtccatttattcaacaaatgcagaattaggcacataagggatcaaggccagagactctgctaaaacagaaagaata

SEQ ID NO: 681870 - DNA, 2862 bp, Homo sapiens
tgcaaattatacatcagataaagggctgatatctaagatatattaaaaaatcaagctgctcaataataagaaaacaaataaccctactaaaaaatagacaaaaaacctgcatagacatttctcgtagaaagacaaagaaaaggccaacagatatatgaaaacatgttcaacatcactaatcttgatcaaaatgcaaatcaaaaccagaatcaagtattacatcacacctgttagaatggctataattaaaaagatgaaagattaataagcattagcaaagatgtggagaaaagggaccttttgtatgctgttggtggaataagaaagtgaggtgatggatatgttaattagccggattcactcattccacgatgtatacctgtatcaaaacatcacattataccccataaatatgtataattattgtcaattaaaaataaaaataacttttaaaaaaagatttgctggacaaagatatccagaaagccaatatttgtacacagaatagttgagagaaataaattaataaaataaaacttctcaaccttatctaggccactgctttcacaacctattagtccaaagaaacctcccttacacgttaacatcccagggtacacattctgtaaaatgctgctctagactcacagacttaataacagaggttgggggagttagaaaatattttgacatgctcagtttctttcatttttctttcggcttcctcaaaaatacctatttgaatatgtaaatagtatccatgaacattatttctggtaagaaagggtttcaggtaattaaaagcccaggataattatattatggtctatgtttaattagtgcttcatagtaattaaattaacttttcttttacttgaaggcatggctttgatagttgattatctaaaagtaattttctaggcaataattctgtccctgttgaaatattagtttgagaagtaggtgaacttggtttccttaatcaggctgcactgtgcttcactcacatcccgtgtctcctttcacaggtaaaggatgagcagagacatcacaatttacacattaattagattgtaaaatgaactctgggagaaataaaaatctcgagccctctgcagacttaggagacagatcagcatttagcacggtctcctactgtgtttagactggactgcttgattgagaaatgatgtcaagcattgttctgatgctgctattctctggtttctttcttttcscaggctggattctataggtttgcacccaaacaacctataggcatgacacagcaaaccctcacacaaacactggttttgctttatgaattcaatccaagacagggaaaacagtctcaattttctggcactctccctcttgagccctggaactggagaaattctatgacaggctattcctatgttgaagtaagagatgcacagtcaagaaaagccaagaaactcaagtaagtattgtatgccggcaccagaagcacaggactgctctgactgaaagtggcaataaaggaaagctgagacacgtgggaaaagggacaagagccagaagaaatacaaaaggaaaaaaacaggcagagtaaaggacagcacagaatagacatggtggtgtggaaaacaagcagcaagccgtctgacagctgagaagagcagcaaagaaacttagagcagttctgtcatgtggagagaggggcaaatagcccccaaccccaaaaagcgtggtaattaaggcattcactcattcactcattcattcaacaaacttactctgtgggaaaagcttaaacttgattcacttctaaacacccacttctattatttttacattttattatgatttaaatgttattattaaaaaatgttttggccttatatactcaggatcatgaaatctggcagaaatgacatagataaaatattgtttttatgagaaaggatgctaacatggacaaatgctgagtgtggacagatccgtgtctccaacctctcccatctgtgtgtaatattcagtgccctccccacctccaggtagtacagaaaccctgatgtctccatcagcaggtggctttgggcctcaaagtagaagtcagacatagaaaagaaaatttaaatacaatttttacacatctaggtttctagcctaggaaagtacgttcttaggtttgatttgaaagaaatgtttttaaaaattccattccccacattttctagttaaaatttaagggcaggatatagtctccctatttaacaataacaaaaatggtataattttccataaatttagtactttcctacttttgaaagaacaagattttagatgcgaagtcctatattcaaggctgacaattaaaatagacttttcaaaaaatcattttaaaatcccgtagttttaaatttagctttacaatgttcagatggtaatgtgaatagaaatggtgactcaattacttttcaaatgaagtacgttgatgaatatattcattttctcttggcagggaattattattgccttaaatttaatcttacttctgcacatgctacaggaattttcatggctaaactgttttaaattaacttatgattcatccaccatgaaaaatgagtgtactctacccacaatgaggcaaagtgacaagtagactgtagacgactttaaatttgattttctcagacattttattaaaacccttctcttgggttgctagaaatcatgcccctggattcactccaggggcaggcttgggagactggactgagctggcaggacatgcacttgtccatttattcaacaaatgcagaattaggcacataagggatcaaggccagagactctgctaaaacagaaagaata

SEQ ID NO: 681871 - DNA, 2862 bp, Homo sapiens
tgcaaattatacatcagataaagggctgatatctaagatatattaaaaaatcaagctgctcaataataagaaaacaaataaccctactaaaaaatagacaaaaaacctgcatagacatttctcgtagaaagacaaagaaaaggccaacagatatatgaaaacatgttcaacatcactaatcttgatcaaaatgcaaatcaaaaccagaatcaagtattacatcacacctgttagaatggctataattaaaaagatgaaagattaataagcattagcaaagatgtggagaaaagggaccttttgtatgctgttggtggaataagaaagtgaggtgatggatatgttaattagccggattcactcattccacgatgtatacctgtatcaaaacatcacattataccccataaatatgtataattattgtcaattaaaaataaaaataacttttaaaaaaagatttgctggacaaagatatccagaaagccaatatttgtacacagaatagttgagagaaataaattaataaaataaaacttctcaaccttatctaggccactgctttcacaacctattagtccaaagaaacctcccttacacgttaacatcccagggtacacattctgtaaaatgctgctctagactcacagacttaataacagaggttgggggagttagaaaatattttgacatgctcagtttctttcatttttctttcggcttcctcaaaaatacctatttgaatatgtaaatagtatccatgaacattatttctggtaagaaagggtttcaggtaattaaaagcccaggataattatattatggtctatgtttaattagtgcttcatagtaattaaattaacttttcttttacttgaaggcatggctttgatagttgattatctaaaagtaattttctaggcaataattctgtccctgttgaaatattagtttgagaagtaggtgaacttggtttccttaatcaggctgcactgtgcttcactcacatcccgtgtctcctttcacaggtaaaggatgagcagagacatcacaatttacacattaattagattgtaaaatgaactctgggagaaataaaaatctcgagccctctgcagacttaggagacagatcagcatttagcacggtctcctactgtgtttagactggactgcttgattgagaaatgatgtcaagcattgttctgatgctgctattctctggtttctttcttttcccaggctggattctataggtttgcacccaaacaacctataggcatgacacagcaaaccctcacacaaacactggttttgctttatgaattcaatccaagacagggaaaacagtctcaattttctggcactctccctcttgagccctggaactggagaaattctatgacaggctattcctatgttgaagtaagagatgcacagtcaagaaaagccaagaaactcaagtaagtattgtatgccggcaccagaagcacaggactgctctgactgaaagtggcaataaaggaaagctgagacacgtgggaaaagggacaagagccagaagaaatacaaaaggaaaaaaacaggcagagtaaaggacagcacagaatagacatggtggtgtggaaaacaagcagcaagccgtctgacagctgagaagagcagcaaagaaacttagagcagttctgtcatgtggagagaggggcaaatagcccccaaccccaaaaagcgtggtaattaaggcattcactcattcactcattcattcaacaaacttactctgtgggaaaagcttaaacttgattcacttctaaacacccacttctattatttttacattttattatgatttaaatgttattattaaaaaatgttttggccttatatactcaggatcatgaaatctggcagaaatgacatagataaaatattgtttttatgagaaaggatgctaacatggacaaatgctgagtgtggacagatccgtgtctccaacctctcccatctgtgtgtaatattcagtgccctccccacctccaggtagtacagaaaccctgatgtctccatcagcaggtggctttgggcctcaaagtagaagtcagacatagaaaagaaaatttaaatacaatttttacacatctaggtttctagcctaggaaagtacgttcttaggtttgatttgaaagaaatgtttttaaaaattccattccccacattttctagttaaaatttaagggcaggatatagtctccctatttaacaataacaaaaatggtataattttccataaatttagtactttcctacttttgaaagaacaagattttagatgcgaagtcctatattcaaggctgacaattaaaatagacttttcaaaaaatcattttaaaatcccgtagttttaaatttagctttacaatgttcagatggtaatgtgaatagaaatggtgactcaattacttttcaaatgaagtacgttgatgaatatattcattttctcttggcagggaattattattgccttaaatttaatcttacttctgcacatgctacaggaattttcatggctaaactgttttaaattaacttatgattcatccaccatgaaaaatgagtgtactctacccacaatgaggcaragtgacaagtagactgtagacgactttaaatttgattttctcagacattttattaaaacccttctcttgggttgctagaaatcatgcccctggattcactccaggggcaggcttgggagactggactgagctggcaggacatgcacttgtccatttattcaacaaatgcagaattaggcacataagggatcaaggccagagactctgctaaaacagaaagaata

SEQ ID NO: 681872 - DNA, 2862 bp, Homo sapiens
tgcaaattatacatcagataaagggctgatatctaagatatattaaaaaatcaagctgctcaataataagaaaacaaataaccctactaaaaaatagacaaaaaacctgcatagacatttctcgtagaaagacaaagaaaaggccaacagatatatgaaaacatgttcaacatcactaatcttgatcaaaatgcaaatcaaaaccagaatcaagtattacatcacacctgttagaatggctataattaaaaagatgaaagattaataagcattagcaaagatgtggagaaaagggaccttttgtatgctgttggtggaataagaaagtgaggtgatggatatgttaattagccggattcactcattccacgatgtatacctgtatcaaaacatcacattataccccataaatatgtataattattgtcaattaaaaataaaaataacttttaaaaaaagatttgctggacaaagatatccagaaagccaatatttgtacacagaatagttgagagaaataaattaataaaataaaacttctcaaccttatctaggccactgctttcacaacctattagtccaaagaaacctcccttacacgttaacatcccagggtacacattctgtaaaatgctgctctagactcacagacttaataacagaggttgggggagttagaaaatattttgacatgctcagtttctttcatttttctttcggcttcctcaaaaatacctatttgaatatgtaaatagtatccatgaacattatttctggtaagaaagggtttcaggtaattaaaagcccaggataattatattatggtctatgtttaattagtgcttcatagtaattaaattaacttttcttttacttgaaggcatggctttgatagttgattatctaaaagtaattttctaggcaataattctgtccctgttgaaatattagtttgagaagtaggtgaacttggtttccttaatcaggctgcactgtgcttcactcacatcccgtgtctcctttcacaggtaaaggatgagcagagacatcacaatttacacattaattagattgtaaaatgaactctgggagaaataaaaatctcgagccctctgcagacttaggagacagatcagcatttagcacggtctcctactgtgtttagactggactgcttgattgagaaatgatgtcaagcattgttctgatgctgctattctctggtttctttcttttcccaggctggattctataggtttgcacccaaacaacctataggcatgacacagcaaaccctcacacaaacactggttttgctttatgaattcaatccaagacagggaaaacagtctcaattttctggcactctccctcttgagccctggaactggagaaattctatgacaggctattcctatgttgaagtaagagatgcacagtcaagaaaagccaagaaactcaagtaagtattgtatgccggcaccagaagcacaggactgctctgactgaaagtggcaataaaggaaagctgagacacgtgggaaaagggacaagagccagaagaaatacaaaaggaaaaaaacaggcagagtaaaggacagcacagaatagacatggtggtgtggaaaacaagcagcaagccgtctgacagctgagaagagcagcaaagaaacttagagcagttctgtcatgtggagagaggggcaaatagcccccaaccccaaaaagcgtggtaattaaggcattcactcattcactcattcattcaacaaacttactctgtgggaaaagcttaaacttgattcacttctaaacacccacttctattatttttacattttattatgatttaaatgttattattaaaaaatgttttggccttatatactcaggatcatgaaatctggcagaaatgacatagataaaatattgtttttatgagaaaggatgctaacatggacaaatgctgagtgtggacagatccgtgtctccaacctctcccatctgtgtgtaatattcagtgccctccccacctccaggtagtacagaaaccctgatgtctccatcagcaggtggctttgggcctcaaagtagaagtcagacatagaaaagaaaatttaaatacaatttttacacatctaggtttctagcctaggaaagtacgttcttaggtttgatttgaaagaaatgtttttaaaaattccattccccacattttctagttaaaatttaagggcaggatatagtctccctatttaacaataacaaaaatggtataattttccataaatttagtactttcctacttttgaaagaacaagattttagatgcgaagtcctatattcaaggctgacaattaaaatagacttttcaaaaaatcattttaaaatcccgtagttttaaatttagctttacaatgttcagatggtaatgtgaatagaaatggtgactcaattacttttcaaatgaagtacgttgatgaatatattcattttctcttggcagggaattattattgccttaaatttaatcttacttctgcacatgctacaggaattttcatggctaaactgttttaaattaacttatgattcatccaccatgaaaaatgagtgtactctacccacaatgaggcaaagtgacaagtagactgtagacgactktaaatttgattttctcagacattttattaaaacccttctcttgggttgctagaaatcatgcccctggattcactccaggggcaggcttgggagactggactgagctggcaggacatgcacttgtccatttattcaacaaatgcagaattaggcacataagggatcaaggccagagactctgctaaaacagaaagaata

SEQ ID NO: 681873 - DNA, 618 bp, Homo sapiens
aaaacatataaagatgctctttactatccatttccatcacccaccgtcagtggtccagacacwctttctccatgcttccgcttaagcttctcagcaccaagtattgtgttgcttctgtctctcatccctctccatttccctctcccttgccatgtgtgtgtgcatgtatgtatatttgtagacatcagtttagctcccctccaacacggaagaatctatcatttggtgtgcatactggcagtagagggtgggagttaaaaagaaaatttggccagcaattaccagatcattttaggccagcagtgtaaattcctgtgttattttttgtcacatcatgcttataatcatctcaaaagataaagtaatcatcattactctgtgtttataagtgagaaaactgatactaagggacagatttgcccaaagtcaccaagtcagtgagaaaatcagtacttaaaatttgtcttctaagtccaatagttattcaattatatcacagctagttcctagttttaagaaaagtcccccatcaatcttcccctaaaggtcctagattttgaccaactctcttctgacaccaaagggccctgtagtattaaaataataaattactgaaaa

SEQ ID NO: 681874 - DNA, 618 bp, Homo sapiens
aaaacatataaagatgctctttactatccatttccatcacccaccgtcagtggtccagacacactttctccatgcttccgcttaagcttctcagcaccaagtattgtrttgcttctgtctctcatccctctccatttccctctcccttgccatgtgtgtgtgcatgtatgtatatttgtagacatcagtttagctcccctccaacacggaagaatctatcatttggtgtgcatactggcagtagagggtgggagttaaaaagaaaatttggccagcaattaccagatcattttaggccagcagtgtaaattcctgtgttattttttgtcacatcatgcttataatcatctcaaaagataaagtaatcatcattactctgtgtttataagtgagaaaactgatactaagggacagatttgcccaaagtcaccaagtcagtgagaaaatcagtacttaaaatttgtcttctaagtccaatagttattcaattatatcacagctagttcctagttttaagaaaagtcccccatcaatcttcccctaaaggtcctagattttgaccaactctcttctgacaccaaagggccctgtagtattaaaataataaattactgaaaa

SEQ ID NO: 681875 - DNA, 618 bp, Homo sapiens
aaaacatataaagatgctctttactatccatttccatcacccaccgtcagtggtccagacacactttctccatgcttccgcttaagcttctcagcaccaagtattgtgttgcttctgtctctcatccctctccatttccctctcccttgcyatgtgtgtgtgcatgtatgtatatttgtagacatcagtttagctcccctccaacacggaagaatctatcatttggtgtgcatactggcagtagagggtgggagttaaaaagaaaatttggccagcaattaccagatcattttaggccagcagtgtaaattcctgtgttattttttgtcacatcatgcttataatcatctcaaaagataaagtaatcatcattactctgtgtttataagtgagaaaactgatactaagggacagatttgcccaaagtcaccaagtcagtgagaaaatcagtacttaaaatttgtcttctaagtccaatagttattcaattatatcacagctagttcctagttttaagaaaagtcccccatcaatcttcccctaaaggtcctagattttgaccaactctcttctgacaccaaagggccctgtagtattaaaataataaattactgaaaa

SEQ ID NO: 681876 - DNA, 618 bp, Homo sapiens
aaaacatataaagatgctctttactatccatttccatcacccaccgtcagtggtccagacacactttctccatgcttccgcttaagcttctcagcaccaagtattgtgttgcttctgtctctcatccctctccatttccctctcccttgccatgtgtgtgtgcatgtatgtatatttgtagacatcagtttagctcccctccaacacggaagaatctatcatttggtgtgcatactggcagtagagggtgggagttaaaaagaaaatttggccagcaattaccagatcattttaggccagcagtgtaaattcctgtgttattttttgtcacatcatgcttataatcatctcaaaagataaagtaatcatcattactctgtgtttataagtgagaaaactgayactaagggacagatttgcccaaagtcaccaagtcagtgagaaaatcagtacttaaaatttgtcttctaagtccaatagttattcaattatatcacagctagttcctagttttaagaaaagtcccccatcaatcttcccctaaaggtcctagattttgaccaactctcttctgacaccaaagggccctgtagtattaaaataataaattactgaaaa

SEQ ID NO: 681877 - DNA, 625 bp, Homo sapiens
cctggctaacacggtgtaaccccgtctctactaaaaatacaaaaaaattagccgggcgcggtggcgggcgcctgtagtcccagctactcgggaggctgaggcaggagaatggtgtgaaccccggggggcggagcctgcagtgagcccagatcgcgccactgcactccagcttgggcgacagtgagactccacctcaaaaaaaaaaaaaaaaraaaagaaaagaaaaaaatgccttcaacttggtgataaaaaagcatcaagtaatcatctttaaaaaaaaaatcttatagcaccaatagtggccactaaatgatagaatttatataaaccagtagttttgtatttcagaaagcttttatatttgttgattacatcaactttctattttcacctcagagtaggttaaaattttatgcttattttcttgctaacattttatcatcagtaggagataaaacacaaataatttgcagagtaaaagcacataaaatatttttataagagttcggcagagaaaaagatttaatacattgagtactgaaagcagttcagagattattgtgttataggacttaaaattgtcataagaaaaaagtttttctttcataaaactttttcttcattt

SEQ ID NO: 681878 - DNA, 625 bp, Homo sapiens
cctggctaacacggtgtaaccccgtctctactaaaaatacaaaaaaattagccgggcgcggtggcgggcgcctgtagtcccagctactcgggaggctgaggcaggagaatggtgtgaaccccggggggcggagcctgcagtgagcccagatcgcgccactgcactccagcttgggcgacagtgagactccacctcaaaaaaaaaaaaaaaagaaaagaaaagaaaaaaatgccttcaacttggtgataaaaaagcatcaagtaatcatctttaaaaaaaaaatcttatagcaccartagtggccactaaatgatagaatttatataaaccagtagttttgtatttcagaaagcttttatatttgttgattacatcaactttctattttcacctcagagtaggttaaaattttatgcttattttcttgctaacattttatcatcagtaggagataaaacacaaataatttgcagagtaaaagcacataaaatatttttataagagttcggcagagaaaaagatttaatacattgagtactgaaagcagttcagagattattgtgttataggacttaaaattgtcataagaaaaaagtttttctttcataaaactttttcttcattt

SEQ ID NO: 681879 - DNA, 600 bp, Homo sapiens
atccacacaaacatatacatatatatatakagagagagagagagcaagagagagagggaggtgaagaaagtaaaggagtaaagagttaacatgtatctaggtaaaggatatatagtaatttgttgtgttattcttgtaacttctctataagtctgaaattgtttcaagataaaagaattttttaacggtatccatccagggtcaatcaagttgcagcatcttgtttctaataatattcttctatagcattaagctgacaaacaggttccaaatctaactcagaagaagacaactgagtctctcatcattctcggaaatcacctaaattcttttgtcctcagctccaaccaaatgctaggcactattgtaatctagtagcagttgcttaggttggagttgatttcaagccagtaaccagaaattaccatcatatcaaattacaaaatatgagaatgttaaagtaattacatcgtcacctttactgagaataaccaaggtttaaagcctccttaatcctactgggaagatgggggcagggagtataagtcaacttcataggatacacagatgcagctgaaatattttagcaatagtggtaag

SEQ ID NO: 681880 - DNA, 683 bp, Homo sapiens
gaagaagaagaagagagaggaagagagaagaagagagattgattctaaggattttgctgatacaattgtggggactgacaagtccaaaatttgcagtgcaggctggcaagctggagaaaycaaggaagagtcaatgttttcatcttgagttcaaaggcagtctggagtcagaactccctcttcctcagggtacctcaatcttttctcttaagaccttcagcggactggatgaggcccagctacattatggaggataatcagatctacacaaagtctcctgatttaagtattaatcatactaaaaaatagcagcagcatatagactaacatttgaccaaacatgtgggtgccatagcttagccaagatgacatataaaattaaccatctcaatgttctataaacacttttaaattcaacaggctccaaaagaaactgccacattcctcacattcctcacaaactcaatctccttttgggttccctttttggtttccttcctgtgggcacacgtaggggaagggcaggcctgggcattcaggctgatgggacccagggggaagcacaggataaaggcaagagcaggggcagagtatcctttatctatgaccaggtactgtggtcatgtcctagacctagaaggagcaccaacatcaaagcaaggaaacctaagagctcagtgaaa

SEQ ID NO: 681881 - DNA, 1008 bp, Homo sapiens
ataaataaataaaaagagatgagctactcagagggaacacggaatagggtccacctcctgccaccggatccaccactgttttcatccagtgctgagcccaatcacctgggtcacctcgggctcctgtcaacagtctttccttaaacaactggtggctgaaatgaaggatcccccaccaaccaccagcactgggagacgatgccaccagtccccattgcaragaaggaaactcaggtctgtttctatgtccaaaacatttatttcaggaaatatttgtgcctgcacaacaggggaactttgtggggtgtctgtggcttgctacagtgacatctggcaggactaactgggtcatcagagccacagaataaggactgggaaggtggccacaactgcaaggactggggccatgtggggggaggactctgagactgaccacttggctggtaacttggctgtccagtgtatgggaatctcagtgagttcctggcctgaagtcagactctgtctctgacgcagacgtgagaggtcggagtggcaggaactgctcagctgctcatccgggaacttgtcctccaaggggctttgccatttgttttcttcctgtacctagaggtggcagtcggtgctcagcttccacagctctccttgatacacttgctcagacccctcggctactctcttgcccagcccagagtaccttttccacttgtctgaagacccgcagcaggtttccacgaaggacaccctgaagctcttcctcactccagccacgactcagcaactcctctatcaggaccgggtatgtggacacgtcttccagcccctgagggaatctgtgtggccaccagctagtgggtttcagacctgattccctgatcatgactcagaaccacagtccagggtctatgaaaccccagccctggtcaggtatgggaagtggagacttggagagagtaggtaattctcctctgctctttatccttcagaaggaggcctcaaaacctcctt

SEQ ID NO: 681882 - DNA, 628 bp, Homo sapiens
agttccacatggataaactatacagaaaacgcctaccttagatctggaagttcctggagatgataatatgagaacttgagtatgaataaactatagagtgtatgggatacatcaagaatgcagtatttcctggttattactgttattgctgattttatttagtataatactattataatttctattattataactgcttagctttccagactgtaagcttcgtgagctggagctttagctttctttatatatgccttactcaatacccaatttaaggtcataatgtataaggtgaccaaaagtgttggcaacttggaagacagacaatttgaaaagaaagtctaagatacattggcaatatgaggaaaaggatgtcagagagctttaatgcagatgaaaacacatttagcctttctctaagaaaatgttgggagaggtctgctattatgaagtaaatattccatatctcaaaaattatgtggcataaacacaaatactttaaataataatatttaaataatactttaaataattaaaacaaaacttataaaatatgaacagstggctaggcatggtggtgcacatatgtagtcccagctactcaggaagcttaagtatgagaatccct

SEQ ID NO: 681883 - DNA, 591 bp, Homo sapiens
tttaataccaaatattcttgttgtcaaaaactcttagtacatgagtcctaacatggacagtgcttcaattctgatgtcactgccaaattactctagtttaagacaaggagattcagatatttaagccctgatgcctactgaggcttgaatttagagatatgctttctatattctgaaaaattgcttttgaaatgtagtttctctaaatttatgtttaagatacaggaagcatttagtattttggttctattaacctcctttgaaaccacaatttgttttaatttcaagtgctcttacaatgacaagtcaaatgagtgctttcttgaggaaagtgtttagcataatagtagayggtgttgtcataatcagaagggagaattttctgtctcatttgtcaacttcacactgtgaacccccaaagagttgtcttcaaaataattgcccttgttgcttctctttacagagttctccccacattattaatggtatgggaattaggagaaggtcatctgactcacatggatcaccatataattccttctggagaacaggtaagttcttggtcaaagaattcagggacacttgtctaga

SEQ ID NO: 681884 - DNA, 623 bp, Homo sapiens
  misc_feature 319, 320, 321, 322, 323, 324, 325, 326, 327, 328, 329, 330,331, 332, 333, 334, 335, 336, 337, 338, 339, 340, 341, 342,343, 344, 345, 346, 347, 348, 349, 350, 351, 352, 353, 354,355, 356, 357, 358, 359, 360, 361, 362, 363, 364, 365: n = A,T,C or G
  misc_feature 366, 367, 368, 369, 370, 371, 372, 373, 374, 375, 376, 377,378, 379, 380, 381, 382, 383, 384, 385, 386, 387, 388, 389,390, 391, 392, 393, 394, 395, 396, 397, 398, 399, 400, 401,402, 403, 404, 405, 406, 407, 408, 409, 410, 411, 412: n = A,T,C or G
  misc_feature 413, 414, 415, 416, 417, 418: n = A,T,C or G
atttcatgatctgcttgtctccctctctttgaatatgagctccttgagggtgggtctgttttgttcattgctgtacttctagggcttgggctcagaattctgcccagcatagaggaggtcctcagatatttgaatgactccacacagctatttctgtattcattacaaatacatctatatcaataactactgaaatatgcctatagaaatgtttcatacagttagatttatgtgtatackttttttcaaaatcatgctcttgctcttcctacttcaatgtctgttggctgctttctgattcctttgaggcagcacatgnnnnnnnnnnnnnnnnnnnnnnnnnnnnnnnnnnnnnnnnnnnnnnnnnnnnnnnnnnnnnnnnnnnnnnnnnnnnnnnnnnnnnnnnnnnnnnnnnnnntgagacaggtctcactatgttgcccaggctggtctgagctcctgggatcaagagatcctcccgcttcagtctcccaaagtgtggggattataagcatgagccactgtgcccaacctgcacatgtaatttcataattaaaatattttatccatgggctgggagtggtggttcacacctataatcccagcactttgggaggccaagg

SEQ ID NO: 681885 - DNA, 623 bp, Homo sapiens
  misc_feature 319, 320, 321, 322, 323, 324, 325, 326, 327, 328, 329, 330,331, 332, 333, 334, 335, 336, 337, 338, 339, 340, 341, 342,343, 344, 345, 346, 347, 348, 349, 350, 351, 352, 353, 354,355, 356, 357, 358, 359, 360, 361, 362, 363, 364, 365: n = A,T,C or G
  misc_feature 366, 367, 368, 369, 370, 371, 372, 373, 374, 375, 376, 377,378, 379, 380, 381, 382, 383, 384, 385, 386, 387, 388, 389,390, 391, 392, 393, 394, 395, 396, 397, 398, 399, 400, 401,402, 403, 404, 405, 406, 407, 408, 409, 410, 411, 412: n = A,T,C or G
  misc_feature 413, 414, 415, 416, 417, 418: n = A,T,C or G
atttcatgatctgcttgtctccctctctttgaatatgagctccttgagggtgggtctgttttgttcattgctgtacttctagggcttgggctcagaattctgcccagcatagaggaggtcctcagatatttgaatgactccacacagctatttctgtattcattacaaatacatctatatcaataactactgaaatatgcctatagaaatgtttcatacagttagatttatgtgtatactttttttcaaaatcatgctcttgctcttcctacttcaatgtctgttggctgctttctgattcctttgaggcagcacatgnnnnnnnnnnnnnnnnnnnnnnnnnnnnnnnnnnnnnnnnnnnnnnnnnnnnnnnnnnnnnnnnnnnnnnnnnnnnnnnnnnnnnnnnnnnnnnnnnnnntgagamaggtctcactatgttgcccaggctggtctgagctcctgggatcaagagatcctcccgcttcagtctcccaaagtgtggggattataagcatgagccactgtgcccaacctgcacatgtaatttcataattaaaatattttatccatgggctgggagtggtggttcacacctataatcccagcactttgggaggccaagg

SEQ ID NO: 681886 - DNA, 642 bp, Homo sapiens
ttcaagtgaaactggtaatttgaaagaatgtcggatgtctcttaatctgcttcctaaaattttaagtaaaataagcatcactcttcttatggggctgctttgaagaataatatggatgacatctgtgaaatacctttaaagcatggtttgcaatggaatcaaaactttgccaactagtggcaagcattctgctctttctgtttccattggaggaaaggattatgcaataygcaatttgagaacacaaatgagctaaaatagtaaacaaggaataagggtgaaaggtggcaaatcataacattaagagaaaacaagtaagcaaaaacaacaataataaaaacagtcacttccaattactgtttactgacgcaaagtgatttctagttaccaatcataatttaacttgctgtcaaaagattagaaagaccccataataactaatatggtttccctcttgttatgaacccaatgttgacagaaagcctcttgagtactatgaggcaggcacaaagatattcgtttcagaattgctttagtagtgaaactctggaaactaaatgcctatcaaaagaggaatagaaaaaatataattgctatattactgtattgacagctacatggtgggcaaaagccatgggttag

SEQ ID NO: 681887 - DNA, 611 bp, Homo sapiens
gagtgcaatggtgcgatctcgactcactgcaacctccgcctcccgggttcaagtgattctcctgcctcagactcccaagtagttgggattacaggtgtgcgccaacacacccagctaattttgtatttttttagtagagacgggtttcaccacattgatcaggctygtctcaaactcctgaccgcaagtgatccacccgccttgaactcccaaagtactgggattacaggcatgagccactgcgcctggctgaaagttatagtattcaatgttattaaatggctgagctgggatttaaacaaaactttcactcttaaccagtctggtacagctatcatggtatttttagtatctgctttgattttgttatacagttttttctttgaataggttcagatttacaatatatgatctttactgatatgtatctttaagaaatctgactgtggggtcctttgagatctagggtatcttctagaataggaagcatattcacagagtataaagaacgttcccaaaacacaaaataaaaattgatgcttagtatgttccttaagtctaatgaaaaataaatgaagaaataaaaaacaacaacaacaataaggtcgtca

SEQ ID NO: 681888 - DNA, 645 bp, Homo sapiens
taaactctgagttttactctgcatcttgcttcttatgtggttttatctacgttatttaccacttacagcttcaattctctcagctgtaattttattgtgagtgatcacatgtaaacacaatgcctaacattagataagtgttcaaaacatattatctgaagttcacagaataggtctgcaaattcggctcatcccttgtctctgtttcacttagatttgagtcctacctgcctccatctgttgaaagacatccttggtgtcttgtaggtgccagcagccctggagaatggaaaagacagggagccccatctctaggagtaggaagtaagacacayatatctcatattttgcattaatttcccattttaatcccactaaaatgtgcatagagacaaattaatccattcacgtgggaaattggatcatttgccttgacttcctcttttcaatagcactgttgccctcatgtcagatatctgtacctcccgaggataggaatcctcgtttttttacaaggactttaaggagatgaaagttgctacagagctgtaaaacgtgctgcagagtaagtcagatctcatccaaacagccacagatagacgttgatggatttggcaattatatcatctgagcatctaatatgta

SEQ ID NO: 681889 - DNA, 645 bp, Homo sapiens
taaactctgagttttactctgcatcttgcttcttatgtggttttatctacgttatttaccacttacagcttcaattctctcagctgtaattttattgtgagtgatcacatgtaaacacaatgcctaacattagataagtgttcaaaacatattatctgaagttcacagaataggtctgcaaattcggctcatcccttgtctctgtttcacttagatttgagtcctacctgcctccatctgttgaaagacatccttggtgtcttgtaggtgccagcagccctggagaatggaaaagacagggagccccatctctaggagtaggaagtaagacacatatatctcatattttgcattaatttcccattttaatcccactaaaatgtgcatagagacaaatkaatccattcacgtgggaaattggatcatttgccttgacttcctcttttcaatagcactgttgccctcatgtcagatatctgtacctcccgaggataggaatcctcgtttttttacaaggactttaaggagatgaaagttgctacagagctgtaaaacgtgctgcagagtaagtcagatctcatccaaacagccacagatagacgttgatggatttggcaattatatcatctgagcatctaatatgta

SEQ ID NO: 681890 - DNA, 614 bp, Homo sapiens
ccacttgcgcattctcaccaagtaacaatctccagttgactcatgttgaaattgccccagcagtttacattagttttatagatcttcatgaatgggtggtgaagacgcaggttgcaacataccctccaagtcacatgaggtggagctgagacagttacagttagagaggaaagttagaatccagtaataaagaatttcgctgctctgttgcttgggagcacatttgttctctcattaaaagcagcttcaagatggcttttttgttgttgtttttcataagtaatcattaataagtaatcattggaaagccccaccacacccaaccaattagctgcgtgtggtggcaggcatctgtaatctcagctactcaggagactgaggcaggagaattgcttgaacctgggaggcggagtttgcagtgagttgagattgcaccgctgtattccaacctgggcgacagcgccagaccctgtctcaaaagaaaaaaataataataatataaagtgaccaggtgtgttgactcacgcctgtaatcscaccactttgggtggaagcaggaggatcactggagcccaggagtttgaaaccagcctaggcaacatagtgagaccctg

SEQ ID NO: 681891 - DNA, 1071 bp, Homo sapiens
ggaaacgctccctgggccggggccttccccgacgcgcacagccctgtagcaaatcgcaagtgcggcggcctcccggtcgtgaccatcgcaggcacagccggctcgactccggtcctcgcggccgggccggctaagttcccgcgagggaccgcctacccactctccccgccccgggaagaactgcgccgctcccgggatttttcggactcgcccagcagcttgcgagcgggcgggcagccgccggggcagagcgcaggcggaaaacgaaagcgcagcacgagtcgcggccgctttgtctcgggcgccgcgggcctgacgggggcgagtgagaacccgctggcccagaggcgacccagaccgcacaggcccctgaayaagcggcgtgctcagtcactcacccgtgcgcgcacaccctcgcgctcttgtccacacattagcacacacatacatgtcttgatgcacatgcaaacccggtaaattacgcaaacagacgtgtaaacacacccatgcgtgtgtgcacactcatatgcagagggcgctcaggcatgtgcgcacccactaatgcactcgttgacacggaagcttaaggcccacaggagcttaagttcgcactcactcccactcacgcgtacacacgccacgctcggatctgaactcacacgtagttcagttgccctcccccacccccaacacacactgaaaacccgcctatttggccccgcggccccgttttcaaagcgcaggttccgatttcccgagagatggcaaaggccctggcaggaagtttacagggtttaacgtaaacaagttctgggggattctttaataataataatagagaattccgcgtgcgcagggcgggaggggggagttggcctaatgcccctgtgggctcggcctgccgccgccgcggggcactctgacactgcgcgccaggccaggttcctgagagcagacagcgcgggctgggagcgccggcaagggcggccctcgcgcacctggctgccagcccgcagggggctcgcacgcagacctgcccttgccacctcagcgctcgggtgcgggctgggg

SEQ ID NO: 681892 - DNA, 1071 bp, Homo sapiens
ggaaacgctccctgggccggggccttccccgacgcgcacagccctgtagcaaatcgcaagtgcggcggcctcccggtcgtgaccatcgcaggcacagccggctcgactccggtcctcgcggccgggccggctaagttcccgcgagggaccgcctacccactctccccgccccgggaagaactgcgccgctcccgggatttttcggactcgcccagcagcttgcgagcgggcgggcagccgccggggcagagcgcaggcggaaaacgaaagcgcagcacgagtcgcggccgctttgtctcgggcgccgcgggcctgacgggggcgagtgagaacccgctggcccagaggcgacccagaccgcacaggcccctgaataagcggcgtgctcastcactcacccgtgcgcgcacaccctcgcgctcttgtccacacattagcacacacatacatgtcttgatgcacatgcaaacccggtaaattacgcaaacagacgtgtaaacacacccatgcgtgtgtgcacactcatatgcagagggcgctcaggcatgtgcgcacccactaatgcactcgttgacacggaagcttaaggcccacaggagcttaagttcgcactcactcccactcacgcgtacacacgccacgctcggatctgaactcacacgtagttcagttgccctcccccacccccaacacacactgaaaacccgcctatttggccccgcggccccgttttcaaagcgcaggttccgatttcccgagagatggcaaaggccctggcaggaagtttacagggtttaacgtaaacaagttctgggggattctttaataataataatagagaattccgcgtgcgcagggcgggaggggggagttggcctaatgcccctgtgggctcggcctgccgccgccgcggggcactctgacactgcgcgccaggccaggttcctgagagcagacagcgcgggctgggagcgccggcaagggcggccctcgcgcacctggctgccagcccgcagggggctcgcacgcagacctgcccttgccacctcagcgctcgggtgcgggctgggg

SEQ ID NO: 681893 - DNA, 1456 bp, Homo sapiens
gcaccaaaggaatgttgctctcctccagcctgtgaaaatcatctctcctatggttttcctaagatcccctgccgtgtgtagcagcttattttgcttttggtttcgtgttcaaacggttggatcatctcaagagaggaaacacggcaacaaaaagatgaaatggatcccagcctgcccgggcaggaggactgcagaaatcagccccaggagccttctgttctcgacagaattctctaacatgagcagcactgtttgttcgtgtttttgttgctgcacagagaagtcatgagtggagactagaggttaygtctgtatacagccataagacttagcatgtattgagtgttttctgtatgccagacattttacaaacatcaactcatttaactctgatgaggtctcatgcaggaggagagattatgcttcctgctttacagatgagaaccagggcaggctgtggtcatgaatgtataaccatcatttaatttatgcccattacagctctatgaagtagttactaatgttatttgtacccatgccaggagttaagggacaaaagagttaggtcactgccaatgtcaacagcaagtgaaggctcagctgcattattagcctctgtctcatgggctccgaggccacactcttatccaggttaaggaaccctcttccggggccacctcaccctgactagatcaattactgaggggtaaggaatcaataagatgcaattacagcaattgttcccattgttgggtgtgttggagtggacctggaagaggtggataggagatggtgaccagctacctgggagagatgagaagccgagagatgagaagccaagagctctgggtggcgtgaggttcataatactttccgctgcacattgcaaaggcatgagctgttccttaaagttcatgctgtcgaagtccatgtgacctcgcaaactccagggtgttgttcctcacccttccaagtgggcttaacacggacactgccctggggtggagacccttttatcgtcccaacttcttctggattgggcttgaggatgccctcaccaacatgtggtccacacattctaaaagggcaggacagcgtcagccacacaacccagtgaaggctgagccctgtggctcacccctgtaatcccagtgctttgggaggctgaggtgggagagtcacttgaggtcaagagttcgagaccagcctgggcaacatgccagacccctctctgcaaacataaaaatttgtgaaataagccaagtgtaatagtgtgcacgtatggtcccagctactcaggaggctgaggcaggaggctggcttgagcccaggagtttgaggctagtgagctatgactacaacactgcatggcaatccagcctgggcaacagagtaagactcagcctcaaaaaaaaaaaaaaaacagaaaaaagaaaaatagaaatagaaaagaaaa

SEQ ID NO: 681894 - DNA, 1456 bp, Homo sapiens
gcaccaaaggaatgttgctctcctccagcctgtgaaaatcatctctcctatggttttcctaagatcccctgccgtgtgtagcagcttattttgcttttggtttcgtgttcaaacggttggatcatctcaagagaggaaacacggcaacaaaaagatgaaatggatcccagcctgcccgggcaggaggactgcagaaatcagccccaggagccttctgttctcgacagaattctctaacatgagcagcactgtttgttcgtgtttttgttgctgcacagagaagtcatgagtggagactagaggttatgtctgtatacagccataagacttagcatgtattgagtgttttctgtatgccagacattttacaaacatcaactcatttaactctgatgaggtctcatgcaggaggagagattatgcttcctgctttacagatgagaaccagggcaggctgtggtcatgaatgtataaccatcatttaatttatgcccattacagctctatgaagtagttactaatgttatttgtacccatgccaggagttaagggacaaaagagttaggtcactgccaatgtcaacagcaagtgaaggctcagctgcattattagcctctgtctcatgggctccgaggccacactcttatccaggttaaggaaccctcttccggggccacctcaccctgactagatcaattactgaggggtaaggaatcaataagatgcaattacagcaattgttcccattgttgggtgtgttggagtggacctggaagaggtggataggagatggtgaccagctacctgggagagatgagaagccgagagatgagaagccaagagctctgggtggcgtgaggttcataatactttccgctgcacattgcaaaggcatgagctgttccttaaagttcatgctgtcgaagtccatgtgacctcgcaaactccagggtgttgttcctcacccttccaagtgggcttaacacggacactgccctggggtggagacccttttatcgtcccaacttcttctggattgggcttgaggatgccctcaccaacatgtggtccacacattctaaaagggcaggacagcgtcagccacacaacccagtgaaggctgagccctgtggctcacccctgtaatcccagtgctttgggaggctgaggtgggagagtcacttgaggtcaagagttcgagaccagcctgggcaacatgccagacccctctctgcaaacataaaaatttgtgaaataagccaagtgtaatagtgtgcacgtatggtcccagctactcaggaggctgaggcaggaggctggcttgagcccaggagtttgaggctagtgagctatgactacamcactgcatggcaatccagcctgggcaacagagtaagactcagcctcaaaaaaaaaaaaaaaacagaaaaaagaaaaatagaaatagaaaagaaaa

SEQ ID NO: 681895 - DNA, 606 bp, Homo sapiens
ctcctgaggggctgagattatgggtatgcaccatcatgcacagctgatttttgtatttttcgtagagacagggttttaccatgttggccaggctggtcttgaactcctgacctcaggtgatccacccgcttcagcctcccagagtgctaggattacaggcatgagccactgcacctggcctcttcaacagatgcttattaaatacttttgaatgaatgggagctttttaaagttctactggtttcttaagataaatatgtagttccaaatcattcattctgttccttaagatcctatatctggaagattccacttrccttgccaccagttttactgcctcccctcatgcttgctttctccaacatgctttttcaaattaattggaatatgtccatttatgcagctcctatcctgtgatgtgccatttgtactttgctttacctgctaatagagacattcgatttaggagactctgatattatagaaagagcctgacttaggagtcatgacaacaaacattttttgccagcttgcttgccatgtgaccttggacaaatcttttagccttttttgagcctcagtgtcttagtctgtagaagaggggga

SEQ ID NO: 681896 - DNA, 1333 bp, Homo sapiens
gacaaggagaagccggtgatgctgctgaatcacttcacttccagttccgccagacccacggcccaggttctccctgtgcagaatgaggccagctccaatccatcaggccaccaccccctgcccccgcagatgctgagcgcagcctcacacatcacacccatccgcatgctgaattccgtgcacaagccggaaagagggagcgcggacatgaagctcctctcgtcttctgtgcactcacttttgtctctagaagaaaggaataaaggatctggaccaagaagcagcatgaaagtggacaagagctttggcagcgccatgatggacgtgctgcccgcgtccgcaccccaccagcctgtgcaggtcctctctgggctttcggagagcagctccatgtcacccacagtctcctttggtccccggaccaaagtcgtgcatgcatccacgctggacagggtgctgaagacagcacagcaaccggccctggtcgtggagaccagcacggcygccacggggacgcccagcacagtcctccacgccgcccgtccgcccatcaaactgctgctgtcgtcatctgttcctgctgattctgccatttctgggcaaacttcctgtcctaataatgtgcaaataagtgtgccccctgcaataataaacccccggactgctctgtacacagccaacaccaaagttgccttttctgcaatgagcagtatgccagtgggccccctgcagggtggcttctgtgcaaacagcaacactgcctctcccagcagccacccctccacgtcctttgccaacatggccacgttgcccagctgcccagcccccagctccagcccggcgctgtcctccgtccctgaaagcagtttctatagcagcagtggcggtggcggctccacaggaaacattcctgcctcgaatccgaaccaccaccaccaccaccaccatcagcagcccccggcacccccgcagcccgccccacccccgccaggctgcattgtgtgcacgtcctgtggctgcagcggcagctgcggctcgagtggcctgactgtcagctacgccaactacttccagcacccgttctccggtccgtccgtgttcaccttccccttcttgcccttcagtcccatgtgcagcagcggctacgtcagcgcccagcagtacggcggcggctccaccttccccgtcgtgcacgccccttacagcagcagcgggaccccagaccctgtcctgagtgggcagtccacgtttgccgtgccacccatgcagaacttcatggcagggacagcaggggtgtaccagacccaaggactggtgggcagtagcaatggtt

SEQ ID NO: 681897 - DNA, 988 bp, Homo sapiens
gaatgggtcagcatccagtgatagaatctaacatttatggaacaattactatgcacaatgaaccgggcaggagattatagayccccctcacacggtatccctttgatgtgttccgcctgcagtctgggagctggcgcaggatacctctctggagtgtgtacatcatgtcatgtctgtgtgaaatcagctgggctggtggcattcacaccacagcaattggcaaatgctgcgaatcagggttccctgacttaaaagccggctgttgaacactggcctgcacaccactgcgtcttcccagagtagtatcagctgagcctcttgattttgtggaaggaaagctgaagcagcatgagaagttcaagttcagtgtaaaacctgcctgtgaccatttcaaggtatttttttaatcaacaaggtaaaattaatttcagaccctttccttgtcaaagacaaagaaaaaaaagaaaagtggtcatgtatgttcttagtctttcacttttatttgcctagagtgaccctgtttttttttatttctcgagaactttattatatattttaatagcaaaaaatatgactttagaacaatggggaaatattgaaagcatatcataaaaatattaagttgtccttaggggcaaatttgcacacatgtggattagtagttttataaaatatataatgtaactattttttttgatgctaattaaatacaccagtcactgaaaaacttttttttttaaataaagagattagtcctttatgtgaactcactttacctaggtttctaatttggaaagcaagaaaacgggaagatataagagaaaaaaaggtgaaaacattacttttcctattgatgtaatgctactgagcttcaacatcatctttggaatcagagaattctgcttgcacattttgttttctttctagtcatttattcaacaaatatctgagtcagactttgtgctaggaactggggaaaccccagaga

SEQ ID NO: 681898 - DNA, 988 bp, Homo sapiens
gaatgggtcagcatccagtgatagaatctaacatttatggaacaattactatgcacaatgaaccgggcaggagattatagatccccctcacacggyatccctttgatgtgttccgcctgcagtctgggagctggcgcaggatacctctctggagtgtgtacatcatgtcatgtctgtgtgaaatcagctgggctggtggcattcacaccacagcaattggcaaatgctgcgaatcagggttccctgacttaaaagccggctgttgaacactggcctgcacaccactgcgtcttcccagagtagtatcagctgagcctcttgattttgtggaaggaaagctgaagcagcatgagaagttcaagttcagtgtaaaacctgcctgtgaccatttcaaggtatttttttaatcaacaaggtaaaattaatttcagaccctttccttgtcaaagacaaagaaaaaaaagaaaagtggtcatgtatgttcttagtctttcacttttatttgcctagagtgaccctgtttttttttatttctcgagaactttattatatattttaatagcaaaaaatatgactttagaacaatggggaaatattgaaagcatatcataaaaatattaagttgtccttaggggcaaatttgcacacatgtggattagtagttttataaaatatataatgtaactattttttttgatgctaattaaatacaccagtcactgaaaaacttttttttttaaataaagagattagtcctttatgtgaactcactttacctaggtttctaatttggaaagcaagaaaacgggaagatataagagaaaaaaaggtgaaaacattacttttcctattgatgtaatgctactgagcttcaacatcatctttggaatcagagaattctgcttgcacattttgttttctttctagtcatttattcaacaaatatctgagtcagactttgtgctaggaactggggaaaccccagaga

SEQ ID NO: 681899 - DNA, 988 bp, Homo sapiens
gaatgggtcagcatccagtgatagaatctaacatttatggaacaattactatgcacaatgaaccgggcaggagattatagatccccctcacacggtatccctttgatgtgttccgcctgcagtctgggagctggcgcaggatacctctctggagtgtgtacatcatgtcatgtctgtgtgaaatcagctgggctggtggcattcacaccacagcaattggcaaatgctgcgaatcagggttccctgacttaaaagccggctgttgaacactggcctgcacaccactgcgtcttcccagagtagtatcagctgagcctcttgattttgtggaaggaaagctgaagcagcatgagaagttcaagttcagtgtaaaacctgcctgtgaccatttcaaggtatttttttaatcaacaaggtaaaattaatttcagaccctttccttgtcaaagacaaagaaaaaaaagaaaagtggtcatgtatgttcttagtctttcacttttatttgcctagagtgaccctgkttttttttatttctcgagaactttattatatattttaatagcaaaaaatatgactttagaacaatggggaaatattgaaagcatatcataaaaatattaagttgtccttaggggcaaatttgcacacatgtggattagtagttttataaaatatataatgtaactattttttttgatgctaattaaatacaccagtcactgaaaaacttttttttttaaataaagagattagtcctttatgtgaactcactttacctaggtttctaatttggaaagcaagaaaacgggaagatataagagaaaaaaaggtgaaaacattacttttcctattgatgtaatgctactgagcttcaacatcatctttggaatcagagaattctgcttgcacattttgttttctttctagtcatttattcaacaaatatctgagtcagactttgtgctaggaactggggaaaccccagaga

SEQ ID NO: 681900 - DNA, 666 bp, Homo sapiens
tagaatatgatgctggtttctaatgccattaagatttttataatcaccttagcaaattctcagttaaggccaaacacttgtgacaagactcgccagtgctgtgtcaaaattctggacctgccatcagttgcggtacaaccttgtcagatacctccatttcattyataaagtgtagaaaatcattcctgtttttttttttaacttgtaaagattaaatgagacaaacatggtaagtgcccaacaaatgttagttcctgttgatattgttcaatcattattctctccaggtttctactaatgaggttttatccagtttcaacttcttcttatccttcttcctgttacaatcttagatactatttaagacccagatctggttctctctgctcgaagcagagtaccccaggataagcactctacatttattctttgattttttccagaattgcgttcatgctagtgattcccaaagatgcctttgaagcaggagctcttaaggatgtgattaacttttcttaacacagctttgtgttgctccacttgttataaagaggtactatgtggggattaaagaagtatatgtaaataaagtatgtatattatctgtgagaagggcaaaagagactaccttccaaatctgttctgaaggataaaaaaagaaaacaa

SEQ ID NO: 681901 - DNA, 3268 bp, Homo sapiens
ggaaagttagaaaaatttcaaccctgccacttgctttaaaatacttgtctttctgggatgctttgctacaaattcagtgagtatacataaaaattccatttcagaaggctctcatgccatatacaacccttctatcacttactttaaaaccaacctgtactttctctgaaacgctgtcattttatttgtaaaagtatttcatattctaaggctgagatgatttgcataggtccagggttcttattttgtacagatctgacagcttttcaacaaaaatatttcaaagccattatgtagaattattattttatggcttttctaaaggatcattttgacttttaaaagttttacagtttcgcatgtttagaatttaaaccttcaaatagatacatcaaaagaatcagtggaatttttgattctatgcagaaagttttaaaatataatgtatttgaaataaaagtagcatgacccatttctgtaccagagaacatggcaccaggtcagtttcactataggaaagcatcatatataatttttcccttaatacatttttcaccttagtcaagtctccacttgttgctccagttaaaaccctggattttgaatatcatatcattttaaaaatttataaaatatagtatctgaaatcatttagtagttgatgatttttaactcaaagatatttgactcttagaaaaagatacttggtaataatccaaacacagtacttttttataggatccaagttaaattcttctgaattcagcccacaaatacttggcactacttaagtctccgggtggaatgtaaaaactggcttatccatcagatatttatttggtactttctgtattccaggcattgtgcttgaccttggtggtacaaagaagaatgtcagacttgtatcacttgttttcttgggtttaccagaaatcattgtgaattgaaggaggcaggtccttagagaagtggctatggctcaatgagaagtcaataggaactgagtgttacaggaatacagagaatggagggatggactgagagagagtcagagagattattcagttaaattgagaggcaccagtgggagattactcatggaatctgagagctgagacttacagacacaggaaatcatgctgaacagcatgcaaaacagagaagtgaactcccatgtactttgagacaacattggactttaaactccagaagtaagtggctgtgtatagttcatgttccattttagcctagtgtctagcacagtgtgtagcatatttttattggacatgaaatactaaatgcaagagtaaatgaatgactaaactacagcttttgtcctgtgatagtgaaagagatatgagtcctcaaactaaaaattttggccaggcatagtggctcaaacctgtaatcccagaacactgggaggcctaagcaggaggatcacttgaggccaggagataaagaccagcctgggtaacatagtgagacccagcctctacaaaaataataaattagcttagtgtggtggtgtacacctgtagtcctagctatttaggaggctgaggcaggagaattgctggagcccaggaagttgaggtttcagtgagccgtgattgtaccactgtactccagcctgagtgatagagtgacaccgtgccttaaaacacacacactcagacacacacacacacctacctcactaggttgggagtttgttggagtacgtattatgataattatttaggactttatcctgcaggatatgaaagatcattatggctaaatattaaatcaagctaaactctgaactgattaatacattcttctttcaaataaatatttattgagcatctactgtgtamaattgaagtgcaactaaactctgcctactgtcctcctgaagtagtcattctaattagtattatgacaataaacaggtataaaataacaaatgttccaactataatttgtaataagtattatgaaccagaaagtcagtcaattacctctgcttgctgaatcctaccagcttcctgttttgtgaataaaatgatattgttacacacccatggtttttctttacatagtgtctgtggctgctttcaggttatggcgacagagttgaatgattgtgatagacaccttagggcctgtgaagcctaaaatatttctagctgggtttttgcagaaagaggttgccaacccttgacataaatgaaacaaatgaggagcagaaatgaaaacaaatgaagagtagaccacgccagacaggattccagaaatgaccttggtaagcaggtgacatttaggcaagggtgtaaaggatgagtagaagtcagccacatggagatagggaggcggccctggaacaggcaataatgtgagcaaaggccaaaggctggaatggccttagcatgtttggtgtcctcagatatgagcaatgtaacttggggacatggtcaaacagagaaaggggttgttattagattatgttagagataaaccagattgatctgtctatcaatctgtccagctacttctctctggagataaaccttgatgggatttaaaaaatcagtttaaaaacaactcatgcagaccttagcctatcagtaaacacctcttggattttcactatgaatattgttaatagacctaaagggtatattgatgacaaagataggctcttctccaaccgtgacaataaagctggcatgaagaaggttatttgtgaggcaaagccaattaaatctgcatttacgctgattttgcagtgattctagagtgatttttttttcttttgaatggcagagctggcaaaatgctaacaaattcaatgtaccatgcaccacatgaagcccagagagtatttctagaaaatgatgatggttttctaaactagtcgaaaaggggagggttattttagccctaatgcactccactatatcaagttgtttgcttgaattatttatgtgtgtattgcgatttttaaatgggagcatcagagacacttaagccactgagaagttaaagaccttgtaggtcgttcaaggagaatgttaactagggcaagcggcagtggctggagaaatatgtccaatccacttcacaagtcacaggggcttggctgtcagacagaaccagatatgaagatggattcagttatttttcaactccatgaactgaggcacttactacccttaccccaagcctcagtttccaaatctctaaccttgggatcatacattctggattagagtttactatg

SEQ ID NO: 681902 - DNA, 605 bp, Homo sapiens
aacactgtctttgttcccgctgagcccaagtgcagcctcagaatccttctcaacacagcactccagccaaccccaggtgtgagatgaaacttgtcacatagcctctccaccctaaacaccatacccytccctgaattatgatgatcttgttgaaagagacaccaaggagagttcttgagagtaggagggctcttgaacatctgcaggtgttcagacaatctgtttgggaaattgcaacgttaacagcatgcgctcttgccggcacctatgaggaagcatctgtctccctaacccctatatttctttataactttattagtgtgtttggctctcaccatatgctgctaattgacatacaaaggaagtatgcacagttgtgttcctcatttggtgcagactaaaaacttcaccttcttcttgagcttgctaggatctccctcttgagcccaaaacatgagataattatgagaacatgaactatgattcatgaagccgatgggacaggaatgagagcacgctcagcctgtagcgtgaagaagctagggccagcagcccctgcttgagctctgggcacgacgaatagtggcatgtacaattaaatgccc

SEQ ID NO: 681903 - DNA, 1292 bp, Homo sapiens
gaatgagaatccatctcaataaataaataaataataaaaaatatatgttgaagtcctcacccccatatcagtaaatgtgactttattttgggaataggaattttgcagatgtcatcaattcaagaagagcycattagggtgggctctaatccaatatgactggtgtctataaaagggaaaatttggccacagagacagccatgcacagaacgaagagagcacggtgacacacagcagaagaccgtgtgtgacgatggaggcagagatcagactgacgcagctgcggccaaggaaaccaccagaaattaggaagaggcaaggaaggattctcccctagagccttcagagggagcgtggccctgctgacaccttgattttggatttctagcccccagaactgtgagagaataaatcgctgttgttttaagccacctagtttgtggtgttttgttacgacagccacaggaaaggaatccagtgcttctgacacaagagtcggggagcattgtccagaagcgttcctgtctggtaacgcacctgccattggccagagtaaagcctgcacacagagcccgtccatgaggaggttctacaatgcacagcctggtaaattctggagccgatgacccagcctcggttcctgtctgtaaaaggaggggccgggatggaattagccctcttcaaattctaacttgtttcagttttgtaagacctcctattcctagtcaggacataaagacccaagggactgtcaaccattgagagcttgcttgccctatactgggcggggtcctaggggactgatgggggcgtctgtctcatgggaatgcagcctgtgggctcccaggacacctcctctacctgcactggaggaagctggcagcatccaagtgatattttggtggcttggctgctctggaactaatgacaaaatagaattcccaacattaaaccagtccctgctgagctggactgtcctatggagctttcctgtataaatatcccttctgatcaaggtgcggtggctcacacctgtaatcccagcactttgggaggccgaggcaggcggatcgtttgaggtcaggagtttgagaccagcctgggcaacatggtgaaaccctgtttcaacaacaacaacaacaacaaaaattagctgtgtgcctgtagtcccagctacttgagaggctaaggtgggaggatcacttgagcccaggaggccgaagctgcagtgagccaagatcgtgccactgcattccagcctggacgacagagtgagaccctgtttcaaaaaa

SEQ ID NO: 681904 - DNA, 1292 bp, Homo sapiens
gaatgagaatccatctcaataaataaataaataataaaaaatatatgttgaagtcctcacccccatatcagtaaatgtgactttattttgggaataggaattttgcagatgtcatcaattcaagaagagctcattagggtgggctctaatccaatatgactggtgtctataaaagggaaaatttggccacagagacagccatgcacagaacgaagagagcacggtgacacacagcagaagaccgtgtgtgacgatggaggcagagatcagactgacgcagctgcggccaaggaaaccaccagaaattaggaagaggcaaggaaggattctcccctagagccttcagagggagcgtggccctgctgacaccttgattttggatttctagcccccagaactgtgagagaataaatckctgttgttttaagccacctagtttgtggtgttttgttacgacagccacaggaaaggaatccagtgcttctgacacaagagtcggggagcattgtccagaagcgttcctgtctggtaacgcacctgccattggccagagtaaagcctgcacacagagcccgtccatgaggaggttctacaatgcacagcctggtaaattctggagccgatgacccagcctcggttcctgtctgtaaaaggaggggccgggatggaattagccctcttcaaattctaacttgtttcagttttgtaagacctcctattcctagtcaggacataaagacccaagggactgtcaaccattgagagcttgcttgccctatactgggcggggtcctaggggactgatgggggcgtctgtctcatgggaatgcagcctgtgggctcccaggacacctcctctacctgcactggaggaagctggcagcatccaagtgatattttggtggcttggctgctctggaactaatgacaaaatagaattcccaacattaaaccagtccctgctgagctggactgtcctatggagctttcctgtataaatatcccttctgatcaaggtgcggtggctcacacctgtaatcccagcactttgggaggccgaggcaggcggatcgtttgaggtcaggagtttgagaccagcctgggcaacatggtgaaaccctgtttcaacaacaacaacaacaacaaaaattagctgtgtgcctgtagtcccagctacttgagaggctaaggtgggaggatcacttgagcccaggaggccgaagctgcagtgagccaagatcgtgccactgcattccagcctggacgacagagtgagaccctgtttcaaaaaa

SEQ ID NO: 681905 - DNA, 1292 bp, Homo sapiens
gaatgagaatccatctcaataaataaataaataataaaaaatatatgttgaagtcctcacccccatatcagtaaatgtgactttattttgggaataggaattttgcagatgtcatcaattcaagaagagctcattagggtgggctctaatccaatatgactggtgtctataaaagggaaaatttggccacagagacagccatgcacagaacgaagagagcacggtgacacacagcagaagaccgtgtgtgacgatggaggcagagatcagactgacgcagctgcggccaaggaaaccaccagaaattaggaagaggcaaggaaggattctcccctagagccttcagagggagcgtggccctgctgacaccttgattttggatttctagcccccagaactgtgagagaataaatcgctgttgttttaagccacctagtttgtggtgttttgttacgacagccacaggaaaggaatccagtgcttctgacacaagagtcggggagcattgtccagaagcgttcctgtctggtaacgcacctgccattggccagagtaaagcctgcacacagagcccgtccatgaggaggttctacartgcacagcctggtaaattctggagccgatgacccagcctcggttcctgtctgtaaaaggaggggccgggatggaattagccctcttcaaattctaacttgtttcagttttgtaagacctcctattcctagtcaggacataaagacccaagggactgtcaaccattgagagcttgcttgccctatactgggcggggtcctaggggactgatgggggcgtctgtctcatgggaatgcagcctgtgggctcccaggacacctcctctacctgcactggaggaagctggcagcatccaagtgatattttggtggcttggctgctctggaactaatgacaaaatagaattcccaacattaaaccagtccctgctgagctggactgtcctatggagctttcctgtataaatatcccttctgatcaaggtgcggtggctcacacctgtaatcccagcactttgggaggccgaggcaggcggatcgtttgaggtcaggagtttgagaccagcctgggcaacatggtgaaaccctgtttcaacaacaacaacaacaacaaaaattagctgtgtgcctgtagtcccagctacttgagaggctaaggtgggaggatcacttgagcccaggaggccgaagctgcagtgagccaagatcgtgccactgcattccagcctggacgacagagtgagaccctgtttcaaaaaa

SEQ ID NO: 681906 - DNA, 1292 bp, Homo sapiens
gaatgagaatccatctcaataaataaataaataataaaaaatatatgttgaagtcctcacccccatatcagtaaatgtgactttattttgggaataggaattttgcagatgtcatcaattcaagaagagctcattagggtgggctctaatccaatatgactggtgtctataaaagggaaaatttggccacagagacagccatgcacagaacgaagagagcacggtgacacacagcagaagaccgtgtgtgacgatggaggcagagatcagactgacgcagctgcggccaaggaaaccaccagaaattaggaagaggcaaggaaggattctcccctagagccttcagagggagcgtggccctgctgacaccttgattttggatttctagcccccagaactgtgagagaataaatcgctgttgttttaagccacctagtttgtggtgttttgttacgacagccacaggaaaggaatccagtgcttctgacacaagagtcggggagcattgtccagaagcgttcctgtctggtaacgcacctgccattggccagagtaaagcctgcacacagagcccgtccatgaggaggttctacaatgcacagcctggtaaattctggagccgatgacccagcctcggttcctgtctgtaaaaggaggggccgggatggaattagccctcttcaaattctaacttgtttcagttttgtaagacctcctattcctagtcaggacataaagacccaagggactgtcaaccattgagagcttgcttgccctatactgggcggggtcctaggggactgatgggggcgtctgtctcatgggaatgcagcctgtgggctcccaggacacctcctctrcctgcactggaggaagctggcagcatccaagtgatattttggtggcttggctgctctggaactaatgacaaaatagaattcccaacattaaaccagtccctgctgagctggactgtcctatggagctttcctgtataaatatcccttctgatcaaggtgcggtggctcacacctgtaatcccagcactttgggaggccgaggcaggcggatcgtttgaggtcaggagtttgagaccagcctgggcaacatggtgaaaccctgtttcaacaacaacaacaacaacaaaaattagctgtgtgcctgtagtcccagctacttgagaggctaaggtgggaggatcacttgagcccaggaggccgaagctgcagtgagccaagatcgtgccactgcattccagcctggacgacagagtgagaccctgtttcaaaaaa

SEQ ID NO: 681907 - DNA, 1292 bp, Homo sapiens
gaatgagaatccatctcaataaataaataaataataaaaaatatatgttgaagtcctcacccccatatcagtaaatgtgactttattttgggaataggaattttgcagatgtcatcaattcaagaagagctcattagggtgggctctaatccaatatgactggtgtctataaaagggaaaatttggccacagagacagccatgcacagaacgaagagagcacggtgacacacagcagaagaccgtgtgtgacgatggaggcagagatcagactgacgcagctgcggccaaggaaaccaccagaaattaggaagaggcaaggaaggattctcccctagagccttcagagggagcgtggccctgctgacaccttgattttggatttctagcccccagaactgtgagagaataaatcgctgttgttttaagccacctagtttgtggtgttttgttacgacagccacaggaaaggaatccagtgcttctgacacaagagtcggggagcattgtccagaagcgttcctgtctggtaacgcacctgccattggccagagtaaagcctgcacacagagcccgtccatgaggaggttctacaatgcacagcctggtaaattctggagccgatgacccagcctcggttcctgtctgtaaaaggaggggccgggatggaattagccctcttcaaattctaacttgtttcagttttgtaagacctcctattcctagtcaggacataaagacccaagggactgtcaaccattgagagcttgcttgccctatactgggcggggtcctaggggactgatgggggcgtctgtctcatgggaatgcagcctgtgggctcccaggacacctcctctacctgcactggaggaagctggcagcatccaagtgatattttggtggcttggctgctctggaactaatgacaaaatagaattcccaacattaaaccagtccctgctgagctggactgtcctatggagctttcctgtataaatatcccttctgatcaaggtgyggtggctcacacctgtaatcccagcactttgggaggccgaggcaggcggatcgtttgaggtcaggagtttgagaccagcctgggcaacatggtgaaaccctgtttcaacaacaacaacaacaacaaaaattagctgtgtgcctgtagtcccagctacttgagaggctaaggtgggaggatcacttgagcccaggaggccgaagctgcagtgagccaagatcgtgccactgcattccagcctggacgacagagtgagaccctgtttcaaaaaa

SEQ ID NO: 681908 - DNA, 1292 bp, Homo sapiens
gaatgagaatccatctcaataaataaataaataataaaaaatatatgttgaagtcctcacccccatatcagtaaatgtgactttattttgggaataggaattttgcagatgtcatcaattcaagaagagctcattagggtgggctctaatccaatatgactggtgtctataaaagggaaaatttggccacagagacagccatgcacagaacgaagagagcacggtgacacacagcagaagaccgtgtgtgacgatggaggcagagatcagactgacgcagctgcggccaaggaaaccaccagaaattaggaagaggcaaggaaggattctcccctagagccttcagagggagcgtggccctgctgacaccttgattttggatttctagcccccagaactgtgagagaataaatcgctgttgttttaagccacctagtttgtggtgttttgttacgacagccacaggaaaggaatccagtgcttctgacacaagagtcggggagcattgtccagaagcgttcctgtctggtaacgcacctgccattggccagagtaaagcctgcacacagagcccgtccatgaggaggttctacaatgcacagcctggtaaattctggagccgatgacccagcctcggttcctgtctgtaaaaggaggggccgggatggaattagccctcttcaaattctaacttgtttcagttttgtaagacctcctattcctagtcaggacataaagacccaagggactgtcaaccattgagagcttgcttgccctatactgggcggggtcctaggggactgatgggggcgtctgtctcatgggaatgcagcctgtgggctcccaggacacctcctctacctgcactggaggaagctggcagcatccaagtgatattttggtggcttggctgctctggaactaatgacaaaatagaattcccaacattaaaccagtccctgctgagctggactgtcctatggagctttcctgtataaatatcccttctgatcaaggtgcggtggctcacacctgtaatcccagcactttgggaggccgaggcaggcrgatcgtttgaggtcaggagtttgagaccagcctgggcaacatggtgaaaccctgtttcaacaacaacaacaacaacaaaaattagctgtgtgcctgtagtcccagctacttgagaggctaaggtgggaggatcacttgagcccaggaggccgaagctgcagtgagccaagatcgtgccactgcattccagcctggacgacagagtgagaccctgtttcaaaaaa

SEQ ID NO: 681909 - DNA, 647 bp, Homo sapiens
tgttctggagtattaatgtgctgttggggcctggtgctctagtggatagggatgagggaagccagcaggctcccctttaagtttttggaagagctcccgcaccagcctttgcctcatccataaaggaagtgcactcagcctactgctcccaaagcccttaccagctgcagagtattcactctagtgcttggcctatgtggacggagcagaggagcagttgtcagagatgacccagaggtcccttgcaacccacaacctaaggtgagcacccaggaggatgaccagggttggcctgggggtgcttttccccatcacagcttagggtccatctctgaaagtgcctgggttgggaaaggccgaattaccctggagtagagcatggtgttgccattcgartgtggtgggaaaggcctgctgtcaagcacgtagggccctctgaccccgcactggggcccggctgcctgtgtgtgattgccaaagggagaggcgggatgctggcttcacccgaccccctgggaccatgcaggagagaataacttagaagttacgttaggtctcttgggtgcaagtgacagaaaccgaactcagactgatacaaagagaggaagatggggtgtccctggccagcacagtggacacagggccat

SEQ ID NO: 681910 - DNA, 593 bp, Homo sapiens
tctttccccctcactgtgtgggcctcagcttccccatccctacaagtgggcatgttagtcacgcccacctccccccttccctcccttccttccacccttgtggcctgatggtcagaccatgaaaaacatctatgggagcagaagggcaaagtgaccaacagcaaggatttgcagtgggasattccagcactttctagccctgtgacagcctctctgagcctcacccttgtggcctgtaagatggaatccacacctccttaatgaggacgctcacacgctcctccaccaagtacttggtagccaatgcctggcacttcggtgagcccttggtcacttttgttaacattgagacagactggtgggctgggtgcggtgtttcatgcctgtaatcccagcgctttaggaggccaagacaggaggatcatttgaacccaggagttggaggatacagtgagctgtgattgcaccactgcactccagcctgggtgatagagtgagaccctgtctctaaaaaaaaaaaaaaagaaaagaaaagagaaaagacagactaggggacagaaattgagtctgctaaggccccacgggctccccag

SEQ ID NO: 681911 - DNA, 989 bp, Homo sapiens
cacattataaattgggtggagaagcatgtggttcagagcatctctgcacagtaggaaaaaggagacaattcccaagtgcattacagacctaaagctgctggcaaagaaggctcaagcacagccagttatgtaaaggtatctatcccaattgagacagctagaaacagttgactgactaaatggaaggtagtctatgtgacaaaatatttctgtattggtgtctactgaagttatagtttacctctcctaaaaatgaaaagtttatttcatacagtgagagaattaatatatcagccagttagatgtttctcatccttcttactctgcatttgagttgttccctgatcacttctgaataagcagtttgcctttattaaaacttgctgcctgactaaagattaccaggttatagtttaaatttgtaattcaaccatcttgcaataaagcgacaattgaatgaaaaaaaaaagaagttatcccccctgaagagactgctcagttagattttttttgctagggcttttctgaataagtgtgggatatttctaaacctctgaggtaagactatctaggttgaagctattagttaatgatttaggtagcttttctgggagaaatagggctattagaaagatgtattcagaggacaggtaaatattaagtgagcactgatcttggagattatatgtttkccccaaagaggtatgaggtatttagacattaccaaggaccagtgggagaatggtaattggtcccttaagtaataaaaaggggtgttaatcttttatttgaggggaagggatgccatttgccctacccaacaggcttagccctgttcttcctcttctgctctcagttatgaaagactgaagaggctaatctgaggacttcctgcacaggggcactgggttccaaggctgacttttgtaattttctcctagttcatttataagccaaacagtttaaggtttggggaaattaaacttttc

SEQ ID NO: 681912 - DNA, 2373 bp, Homo sapiens
tatagagaaacttgcacgcaaagagcacaggaagcagaagcgaacagaaaagggcctagatccacgaggtggaatctaagaaggtttcaaaaaggtggcctgtgtgccaataccttatttcacactgcatgcttgtatcaaaacatctcatgtaccccataaatatgcacacctactatatacccacaaaaaaacaaaaataatttttttaaaaatttgaaatgagcatgaatttgtctggtgtacaaaagtaagaaaaatttcaaggcagaatggtgtgaaagcaaaggctgaaagaatgcatgtgatctgagggactgtaagttgtttctataagcayaagactttccctgcagttctaaaatagaaacggatgtacttctactgtatcactcgtaatgattcacggtatattgttagaaatgaactttttgtgtaagttaaggataattttaaaaattattcctgaaaccacttttgtgttttcagacaagcttgaaaacatgtatgattgggggtgagggcgaacttaaaagccagggtcgagaccacttagttctccccctgcatgtgagggagtttttgacaaacgaacttggagataaatcccgatggagtatgatcgctgtgctgtataacaaaagagatggcctcgaaggagatgtgatcagaaaataaatttgaaaacaaaagcctgatttgatgcaagaacatcaggaaaccaatcagcgtgggattctcttaatagccatcaccaaaaccctgcattcctcattcctttgatgcccttgtctgataacactcagggcacccccagctggctcttccgtgagctgatcaaacccagttccaacagccagtgatgagcacagctcagattcgacaaactgcaagcctgctcaccccacacctgagagcctagacagattccaaacaaccagctaattaaacctggagcaccaagctatcatcattcgagattcatgggcatccaacgagcagaagaactagcaacacggcattcggcaacagctgtcacctgctataatgttctttaattatcttaaaatctgtaagaactgacaaatgggtgacaaaatgcaattttctgtgtcaggaagcgagagtcaagcctgcgttactttgatgagaggaaatactgtaaaatcatctctctcagctcttcttattggggttgggggggactgttgtcactcaattctagtctatcaacactctcattacaggactcttggagggacaggtttccttctttataaagattgagtaggagaggttagaatgtgcactgggctgtgccaagcttgtccccatagcctcagtacttcttccaaagtcagcgccagctccagccctagccccactttcaccacgctacatatgtacccccgccccaagatgcattcctggggtgggccattagcaaagaccctccaggttcccaggaatcatgtcatgcctcttgccatcaatttctccaggtccctgtccaaacagtggcctgattcctttaggctgcggtgatgtttatgacctccataaggatttccattaatccctaatttctgtcggtcatgacactctaccaaatgtgcatgacagaatcctttgttcctttggggcaagtttacgtctatcatttgcacaattttaccagcctttatgggtcaaaaatgttcactagaacacaaaataaactgcagaaagaaaggtcactgtgtagtaaatagctcttaacaacagcagctagaaaaccacatcctctgtacagagtagtagagcactcataagccaagagcattgcaccactcatggtcccagaaggtcaaacagagaaaaatatgggctagctcacattggctgcgagcacagggatagcccttagagtaggaggaaaacatatattaacagtgtgctacaacagattatatacaatgaaaacatatgtgtatgtgtgtgcgtgcgtgtgtgtgtgtgtgtgttagagagagagagagtttggttttaaaggtttggaggtttttttttgttttgtttttttgtttttgtcttttgagagagaaatggcataataaatcagcatgctagtgtctgctaccagagtgctcacagtctaaagggatcactaataattcttaagacatggcaatatttgttcttaaaatgtgcatgacaatattaatgcaggtaactgatgacaagccatggttacatttttgaaccatcttaacagaattttatgtgaagatttaaatttgagtgacaataggtgctcagtggacctttctgcccactaattatagtaaaaccatttaaattttgtatgtaaagtcattttatgcaattaatgca

SEQ ID NO: 681913 - DNA, 2331 bp, Homo sapiens
cttcagtttccaaagaagaggctggaacactctggactccaccccttggcagtgctgcctctgactcccacccctgcaatagtccacacagaagtccagccagaaaggtgccctgccctggacaggcaaatagagactgtcgtggttcagtctctttctctttctccagcagccaggcataaagaacatttcaatttatgatttctgtggacactggaaataatttctttttccatttcagagcattttaatccagagaaaactgtggttgtcaacaccttgccttttacacagagaagttgctttggccattcatccattcatccatcaaatatacatatctgtgtgtgtgtgtgtgtgtgtgtgtgtgtgtgtgtgtaaatatgtatagcaaagttttctaccctggctccacatttgaattatccatgggggttctggaaaattctactgtgcagctcaaacctacattaattaaattagaatcttgggaggaccctgcccaagcaacagaatgtttcaaggaacccccaggtgattccaacatgcagccaagcttgagaaccacacactagaamagtgcctgtcaaacttcagtttgcatgagtcacctggagaccttgttaactgcagaatatgattccgtgggatggggtggggcctgagatgctgtgtttctaacaagctcctcggggaggctgatgcttttggctcaaggtccacactttgagtggcagaaggactggtggaactaccctgaactactggggaggaagaacaaaatacagaactcagaacggcccccgcccagctggaactgctgagctagaatcccgcatgtcgatggcagcaatcacacatcccaagggctgtcttggggattcaggaaccctctctgccccaccagccttcaagccatcagaaacgatatctgtttgtctagtcacagaatgcccggggttagaaccatgcctggcacaaagtgggccctccatacatttctgttagctaaatgaatgaggggtggtaaacaacaaagttacaaaatagccaacagtatctaagagaccctggtaccgcctcctatgtatgtgagctcaggcgagtcacttcactgctgtgaccaacttcctgggccatcaaatggggtcacactgcctgctcataacattgctatgtggcttgagtgacagcaggagagcagtgcgtggtcccccaaggtacttaacatcattaaggtacaggctggcagctataacaaagagaccccaaactagaatagttttaagccaaatttttctcttgtgcaatagtcccaaggtgagggatgtaggtgagtatcgacaactcttattccagattctcccgccttgatgttccctcctcccctggggcgctggtccagtcctctcttcttagctgggttgcaggcccatttgtgctgtcccggctcacaggaaggatggaaagagtgtgcaagagttagatccagaggtggtttgcatcacttctgtttccagtccggaggtgaggacttagtcatatttggccacacctagcggcaagggaagccagaaagaacagtctctgacctagccgatctgctgtgtacccagccacaactggaaaactgtgtaaaaggaggttctggtggacgactaagtttacagcacaaagctcatgggcatgaagtcgtcccccgatttccagcacagttgcaagtccactctctaccccgcgttgttgcctcttctccccgcagggcgaatgctctcggaagtgctactatattttcatcgtggagaccatctgcgtggcctggttctccctggagttctgcctgcggtttgtccaggcccaagacaagtgtcagttcttccaggggcccctgaacatcatcgacatcctggccatctccccatactacgtgtcgctggcggtgtctgaggagcccccggaggacggcgagaggccgagcgggagctcctacctggagaaggtggggctggtcctgcgtgtgctgcgagcgctgcgcatcctctacgtgatgcgcctggctcgccactcgctggggctgcagacgctggggctcaccgtgcgccgttgcacacgtgagttcggcctgctccttctcttcctggccgtggccatcaccctcttctcccctttggtctacgtggccgagaaggagtccgggcgggtgctggagttcaccagcatccccgcctcctattggtgggccatcatctccatgacaacggtgggctacggggacatggtgccccgcagtgtgccaggccagatggtggccctcagcagcatcctgagcgg

SEQ ID NO: 681914 - DNA, 598 bp, Homo sapiens
tcactgatagtaagagaaaagtcaggtttcgaaccatgtttgctggttccagggcctgtcctcttgttatcaaactgcactgctgtattagcccgttttcacattgccaataaagacatacccgagactgggtaatttataaagaaaaagaggcttaatggactcacagtttcacgtggctggggaggcctcactatcatggcggaaagcaaaaggcacgtcttacgtggcagcaggcaagagagagaatgagaaccaagcgcaaggggaaaccccttataaaaccatcagatctcatgagacttactcactaccatgagaacagtatgagggaaactgcccccatgattcarttatctcccaccaggtgcctcccacaacccatgggaattatgggagctataattcaagatgagaattgggtggggacacagccaaactgtatcaactgctatacactgtgaggctgttctcttcccttcctggtggcagagactgcaatgggtttgccaatacctggttcttcttcctctgtcccaaccactgggccacggttccagcctccctgcaggtaggggttctggtcagtggggtgtgt

SEQ ID NO: 681915 - DNA, 612 bp, Homo sapiens
aaatgtatgcgttcataatgatactgaaaaaaagaaaggtttcactgtcaccatgagaggttgccaggtttcaattcattttactgaaaattgataaataaccagcctgagcaatatggcaaaacccatctctacaaaaaatataaaaattagctggaygtggtggtgcacacctgtgctcccagctacttgtgaggctaaggtgggaggatcgcttgagcccaggaggttgaggctgcagtgagccatgattataccactgcactccagcctgggtgacagagcaagaccctgtctcaaaaaaaaaaaaaaaaaaagaaagaaagaaagaaaaggaaaggaaagaaaagaaaagaaaagaaaaatgataaataaaagggtcaaacattgatcctggccttttctgcatgaactgcatgaaccactagttggcgaatgaaagctctttgtagaagtgtagaagcattctagctaacagatgctgagagagtgagaaaactggaaagttgtcattgtgtgactcatcattaaataattaatctaggcaatgttcatcagtgactgctaaaataactgggagaaggactgacggggaacttcataatggctaga

SEQ ID NO: 681916 - DNA, 862 bp, Homo sapiens
tgcctggctaacctttatattttttggagagaaggggtctcgctacattgtctaggctggccttaaattcttggtctcaagtaatcctcctgccttgccctcccaaagtgctgggattacaggtgtgagcaatcatgcctggcctcctttaattttttttttttttttttttttttttttttgagacggagtctcgctcttttgcccaggctggagtgcagtggcacaattgtatttttagtagagacggggtttcaccatgttagccaggatggtctcgatctcctgacctcgtgatctgcctgccttggcctcccaaagtgctgggattacaggcgtgagccaccrcgcccggccggcctcctttaatttcttaaccataaatatcctccccccacttttattatggacgttctgaagcacataaaaatagggagcatagtataataaatttgtacatatttaacactcagcttctataattagaaacaaatggcccatctggtttcatctaggcctctttgctatcctttcatctccaactggattattttaaagcaaattctagatgacattctgctgagcatttctgccagaattacacctctctttgctaatgtgaaaaaatgcccatgataactgtaaaatacgtgtgtcctatttaggtgtctaaacactttaatgtcacagtattaaggccttaaaatatagcttagatatatttttctaaattaaaagacttcattttttagatatacagaaaattgagcagaaaacagtgagttcccatataccttcttcatcccaacagtttccccctcattaacatattgtgttagtgtggtacatttattacaaagga

SEQ ID NO: 681917 - DNA, 862 bp, Homo sapiens
tgcctggctaacctttatattttttggagagaaggggtctcgctacattgtctaggctggccttaaattcttggtctcaagtaatcctcctgccttgccctcccaaagtgctgggattacaggtgtgagcaatcatgcctggcctcctttaattttttttttttttttttttttttttttttgagacggagtctcgctcttttgcccaggctggagtgcagtggcacaattgtatttttagtagagacggggtttcaccatgttagccaggatggtctcgatctcctgacctcgtgatctgcctgccttggcctcccaaagtgctgggattacaggcgtgagccaccgcgcccggccggcctcctttaatttcttaaccataaatatcctccccccacttttattatggacrttctgaagcacataaaaatagggagcatagtataataaatttgtacatatttaacactcagcttctataattagaaacaaatggcccatctggtttcatctaggcctctttgctatcctttcatctccaactggattattttaaagcaaattctagatgacattctgctgagcatttctgccagaattacacctctctttgctaatgtgaaaaaatgcccatgataactgtaaaatacgtgtgtcctatttaggtgtctaaacactttaatgtcacagtattaaggccttaaaatatagcttagatatatttttctaaattaaaagacttcattttttagatatacagaaaattgagcagaaaacagtgagttcccatataccttcttcatcccaacagtttccccctcattaacatattgtgttagtgtggtacatttattacaaagga

SEQ ID NO: 681918 - DNA, 862 bp, Homo sapiens
tgcctggctaacctttatattttttggagagaaggggtctcgctacattgtctaggctggccttaaattcttggtctcaagtaatcctcctgccttgccctcccaaagtgctgggattacaggtgtgagcaatcatgcctggcctcctttaattttttttttttttttttttttttttttttgagacggagtctcgctcttttgcccaggctggagtgcagtggcacaattgtatttttagtagagacggggtttcaccatgttagccaggatggtctcgatctcctgacctcgtgatctgcctgccttggcctcccaaagtgctgggattacaggcgtgagccaccgcgcccggccggcctcctttaatttcttaaccataaatatcctccccccacttttattatggacgttctgaagcacataaaaatagggagcatagtataataaatttgtacatatttaacactcagcttctataattagaaacaaatggcccatctggtttcatctaggcctctttgctatcctttcatctccarctggattattttaaagcaaattctagatgacattctgctgagcatttctgccagaattacacctctctttgctaatgtgaaaaaatgcccatgataactgtaaaatacgtgtgtcctatttaggtgtctaaacactttaatgtcacagtattaaggccttaaaatatagcttagatatatttttctaaattaaaagacttcattttttagatatacagaaaattgagcagaaaacagtgagttcccatataccttcttcatcccaacagtttccccctcattaacatattgtgttagtgtggtacatttattacaaagga

SEQ ID NO: 681919 - DNA, 1476 bp, Homo sapiens
aaaaaaaaagagagagagagaggaaaaataaattagccaggtgtggtggtatgcacctgtggtcccagctactcaggaggctaaggcgggaggattcccagagcccaggaagtcaaggctgcagtgagcagtgattgcaccactgcactccagcctgggcaacagagcaagagcatatctcaaaaaagaggaaagaaaagaaaagaaaaacataaaaacaaatgttcctttagttttaatttttattttttagtttattatggctgttttactctcccccaagtaaaacagccatacacaatttgctgaaattttccttagtgtactttgaaatctgtggaacagaactggcaatcgctaarttctatttgactctagttccatttaatattagactggtgtggaagtaactgcggtttttgccaaaaccgcaattacttttgcacctacctaataggtataaaatatgtaacttcacttaattttatcctttatgtatctccctatattatgtacctatggacatcaaacttagtacagactgataaaaggctgaatagacaactctggtttcaaaaatccagcttctcacaacatcagacatactagtatacagcttttctaatttcacaacacatttccattttttggtctttcacaatagagaagatgtgtgtacttttgaatactctgatctgtctacaatctaccaaaattggaaggtgtttttattatacagtttcatccttttagaaatatagaaagatcctaagtttgggcacagtaagacactcaatatagatctactactaaacaagtaagaccaattacacaattaatgtcctaataccccgagtggagaagtaaaatctacttgttttctgttgacttgaacgccttctcttctttgttgaattaatcaatctatttgactccaatgtcaaattaataaatgtcactttagaatattaaaatgtacaattatgaattacacatttaattttaaaacacatcattctgatctctgtcttgattgatactagaagattatcttccaaactaaggtggaaaaaatgacagactttagctattggcaatgataggtcatttttttagggaagaggagtaaagagggccacctccataggtcagatatccctttgttctaagaagccaccacccctgtttcttcatatgaaaaaaaccagaggcatccagtggttcccaaaaccttctcaactttacgcttgaggaacccacagatttcaaataatacaactgacctaagacactcatttgtttaaccattctttttttaactttttattttttttgagaaggagtcttgctctgctgcccaggctggagtgcagtggtgtgatgtcgctcactacaacctctgcctctcaggttcaagtgattctcctgcctcagcctcccgagtaactgggattacaggcatgcaccaccacatcc

SEQ ID NO: 681920 - DNA, 1190 bp, Homo sapiens
taccctctccaaagaggaagtggcctataacataaaatattctaccatcatgagatgttaacatatcaaagccagcttttctttcttcctttcctgggcacctcgcccaccgtaatggatatagctggcaagttagaaatgcagaaactcccaggaacttggggcactacraggaagcagaaattcctgggcatcggtgagttttggcttcaggtctgctgattggtctgaagttgcagggctgataactaggaaaatgcacacggccatgtgagcgctcgcttctggatcagcaaagacatgtgagttagtgaaatctgggaagcaactgattgttattcctaagctgcaggggtgtctttcttcctcatctttctgaccataacatctcactttggaagtcatctctgggctatttctgaatccaccgtcctctttgcatggactgattgcccggtatcttaccagggcaatgaccacctaactgatgtttgtgaacagatttctgttgctctccttcataatgatgtattgacccaaacttgggctttcttcttatctgacaccattacctagtaagagaccccttcctccaggctcccctggtgaattgcttccgtcctgaggactctgaaattgcccagcttacacccaccttcctcccacctggccaccccgcctcatgttggcagctcatgccgctgctgtgaggtgagcttggctctttctctccgatcttgggccatttttcctaggctgcttttttttttaattttttattttattttatttgtggtctctgtcattctgctggggcaagggggtaaagagatctgacagtaagtgcagggaaatgctgaatctggaatctatcttccagacggcacaagaataaaaattcatagcaggacagcagctactgacatgctcccaaagacatattgcaggtagcattatttattgtggcaaggagttcatagaagtgctacctcaaagcaccctgagagatcctaaaaagcccatctcccatcaggtgaggcagatttatggaggctgctcttagagaggtcaggcggtgggctcaggaagcaggctccttacagaacgcctggattcccttaacatatttagtgcagtttgattggttcaaaggagggcttgagtctgtaatgttggccataaaattgcag

SEQ ID NO: 681921 - DNA, 1448 bp, Homo sapiens
cataatattctatagccattgtcctataaatagttggctcgcaaccattagtggaaacactccaatgcctgactgcaaattattaaagaaayagtatctttacatttactaattttttaaaaatctttggtactttttttactccactattagcagtaatttcaattttctcacttttctctttttgtcttcaatactcagaaagaagctgcactaatagatacactgctacagaagctctcaaatttgttaggaatcagttggccccaaaaaacctcatctgagcaagcagccacgacagcagtgggcagtgacactgaagttttagatgaactaccttaatcctgttatctcctacttggcttagtatttattagcgtattactacttatctttgcatggcatagctttaaaattataatatactttgtttttaattctgtaagttaggaatcaaaatccccttggtcccaagttcttatggatcttggcactgtcaagataggattaacaatgcaagaatactacgagacaaactagctctgctgccaagcagcaagtaacagaactcaccacccatggcccaggatggctgcgggaaatgaagcagtcagaagtgagctcactgcaacttactaaaaataaacatccaaggatgaggcatggcagatgcggagccctgccactgaggaagaccaaggaaattcacagatgctatctgggctatctaaatacagagatcaaaatgagctctgtactgctccaggaatcctgaaactaagggctggtttacatggatcacttggttaaaatattctccactaaaatccagatttatacttcatcatctgaccaaacagtagagaaagcaggacacaggatctttaactttattagcagctactgagctacagaatacaaaccaactgaaaacattaaagaaaggctgcctgaaacaagtatgtacaggtatactacacagaagcaaaagctgtatcatccaatcccaaagccacccctgtggggaaggatgaccttagctatgggccaaaggagtaacagaagttatgacataagagtcccatccatccaggaaagcagtgaacaactacagctgcatgggcaccaaaaatttttctgagattagttttaaaggttccatgaatcaaagttttcaaatgaaaacaggtacccctcttttcctgtaggctttccagctcactacccaaaagacttgagtacttctattaaggcagctggaagcccaccctaggacttgaatggcaccttgtcctttctctgccagtaatgcaatccaacacaatatgctacagggaaaacagaatttccacggtgccgccctctggtacaagggaaacagcacgcaaagcaaaaggccacagagggctccctgagaatccagtacaactaagcgaggccttcaactg

SEQ ID NO: 681922 - DNA, 1448 bp, Homo sapiens
cataatattctatagccattgtcctataaatagttggctcgcaaccattagtggaaacactccaatgcctgactgcaaattattaaagaaatagtatctttacatttactaattttttaaaaatctttggtactttttttactccactattagcagtaatttcaattttctcacttttctctttttgtcttcaatactcagaaagaagctgcactaatagatacactgctacagaagctctcaaatttgttaggaatcagttggccccaaaaaacctcatctgagcaagcagccacgacagcagtgggcagtgacactgaagttttagatgaactaccttaatcctgttatctcctacttggcttagtatttattagcgtattactacttatctttgcatggcatagctttaaaattataatatactttgtttttaattctgtaagttaggaatcaaaatccccttggtcccaagttcttatggatcttggcactgtcaagataggattaacaatgcaagaatactacgagacaaactagctctgctgccaagcagcaagtaacagaactcaccacccatggcccaggatggctgcgggaaatgaagcagtcagaagtgagctcactgcaacttactaaaaataaacatccaaggatgaggcatggcagatgcggagccctgccactgaggaagaccaaggaaattcacagatgctatctgggctatctaaatacagagatcaaaatgagctctgtactgctccaggaatcctgaaactaagggctggtttacatggatcacttggttaaaatattctccactaaaatccagatttatacttcatcatctgaccaaacagtagagaaagcaggacacaggatctttaactttattagcagctactgagctacagaatacaaaccaactgaaaacattaaagaaaggctgcctgaaacaagtatgtacaggtatactacacagaagcaaaagctgtatcatccaatcccaaagccacccctgtggggaaggatgaccttagctatgggccaaaggagtaacagaagttatgacataagagtcccatccatccaggaaagcagtgaacaactacagctgcatgggcaccaaaaatttttctgagattagttttaaaggttccatgaatcaaagttttcaaatgaaaacaggtasccctcttttcctgtaggctttccagctcactacccaaaagacttgagtacttctattaaggcagctggaagcccaccctaggacttgaatggcaccttgtcctttctctgccagtaatgcaatccaacacaatatgctacagggaaaacagaatttccacggtgccgccctctggtacaagggaaacagcacgcaaagcaaaaggccacagagggctccctgagaatccagtacaactaagcgaggccttcaactg

SEQ ID NO: 681923 - DNA, 597 bp, Homo sapiens
gtacacttgttaatttacatgtatgtcttgatttatatacattgttctatacctttccttttcccataattttatggattacatttattttcatttctgtatatttagttaattcttttaaaaggctgcctgttatcccattgtctgtcttcaccatcatttacttaygtaataaatctgttaaataattttaatataaatctattcatctatccatctattaaaagagatttaagttatttctaatctttgcatattataagttgcatttcagcttataccttgactttctttgacatatacatcaataggtagagtatattcctagaaattcaattgtggaccaatgagatgtacttcaaatttttaacagatatttcagtattgacctcccaaaatgtattcacacacccaccaaatctaagtgtctgtgtaacacacagatgctgatttggagtattaccattttaaaaaaataatatagctatcagtcgtgtaaaaaaaatcctcaccattatttcttaattttacattgtaattgtgagtgatgttgggtagatttttgtacttttattgaccattcacatttcttctttt

SEQ ID NO: 681924 - DNA, 597 bp, Homo sapiens
gtacacttgttaatttacatgtatgtcttgatttatatacattgttctatacctttccttttcccataattttatggattacatttattttcatttctgtatatttagttaattcttttaaaaggctgcctgttatcccattgtctgtcttcaccatcatttacttatgtaataaatctgttaaataattttaatataaatctattcatctatccatctattaaaagagatttaagttatttctaatctttgcrtattataagttgcatttcagcttataccttgactttctttgacatatacatcaataggtagagtatattcctagaaattcaattgtggaccaatgagatgtacttcaaatttttaacagatatttcagtattgacctcccaaaatgtattcacacacccaccaaatctaagtgtctgtgtaacacacagatgctgatttggagtattaccattttaaaaaaataatatagctatcagtcgtgtaaaaaaaatcctcaccattatttcttaattttacattgtaattgtgagtgatgttgggtagatttttgtacttttattgaccattcacatttcttctttt

SEQ ID NO: 681925 - DNA, 618 bp, Homo sapiens
tactcacaacgtgactccctatcccaaagggcatgaataatgtgccccctgagagatggggaccacaggctctgggaagcaggcagtacccgaggctgtaccactcggggtatgctagatccagcagcttatcaaggtccacaagcctctcacttgcctcttttcccccarggtagatctgcaccactgagaaacctcactgagtacaaaggaaagaagtcttctacttccattttttaagaaagatctataacagaaaaaaaagcaatgagaacaggcaggctaaaaaaagaaccactttcagctgggcgcagaggctcactcccagcactttgggaggccgaggcaggtaggccacaaagtcaggagttagagaccagcctggccaatatggtgaaaccccatctctactaaaattacaaaaattagctgggtgtggtggcccatgcctgcagtcccagctgctcgggaggctgaggcaggagaatcgcttgaacccaggaggcggaggttgcggtgagccaagatcgtgtcaccgcactatagcctggccgacagagcaagactccatctcaaataaaaaaagaaccaccgtcctttttagggtttccctaaaac

SEQ ID NO: 681926 - DNA, 1537 bp, Homo sapiens
ttttaataaagatggggttaatccacgttggccaggctggtcctgaccttaggtgatctgcccgccttggcctcccaaagtgctggaattacagacatgagccaccgtgcccggctgcctagggattcttgacaccatgaaagtccttctgcctttgcacatgacagcctaggagtgtctgaacattagcatccctgaaagcaatttggaaacaatgtctgatggccatgggcaygtaaacacccaagctcacgttacttgggcaggatgattctgtgtgtgtgttcaacactgtctcccaaagtttccctgcagcatgaaactccagccgtgcatagtggtagctgacatgatatcatactcttcttagctgctttgccttccttattgaacctcccaccccctcccagtattctcttcatttctcacatcctaatctccgagcctctttctggaggaaccatagtcagacaggtttctacctgaaaatttcaaactctatgctaccagaggccagacaggaaataaaatttaataaataggggaagaatcgaatcttccatcctttcaatatttgtgtcttctatgaccctgatcagcgttcaaaactaaagttcaaatcgcagcaagattcttgaccattaagaataaatttagttatgatgaggaaacctagcaacaatagatttctaaaggcaaaaggatgtgaactaggagatgtgacacaaacttaccaaaaacgcttcaaacacaaagtctcctggaaaatgtgtatatgttgctgttaactagaaattgcctttgccggaaacaacttcccatatattctgagtattatagacctcattctctatgctaatattggtgttccctggtgaaaacacaaattaggatgcagggttctagaaagatacatgacaatcccaacagcctcacatataatcagttttattgccaggtaagaaattcatattaatatagtgaatacatatgtttacaaataaacattcttagaaaacaaacaaatgtgtttttttcttcattgtaggaagaattattcgtatcataaactctgcagttgttgacaagtattaacacaggtttacttgcagaacatacggttactaaaatattcgcacataaaatatgctccatttacacaaaaaactgggaagagttagatggggaggccaggcggagcccaaggcagatggaggctgagacactgtgaaagggcaaagggaagtcagactctggtcccattgggttggaaactgggggacagctaaaggcaaaaaataggggctgatgtcagggcatggaattaggaagaggacagcctgtctgctttgttctggtttctctcttctaggtctcactaccctagctatagcgtccttgtcttggtacatggaagtcacagatagttccataggttgtcccgtctttccatattgtgaggtctgtctaccctcccaagaggaagccaaaattgacaaatgggatctaattaaactaaagagcttctgcacagcaa

SEQ ID NO: 681927 - DNA, 612 bp, Homo sapiens
ggtagtaactgctatttctgtcgtcatcagaaaatataaagattataaaattaggataatgttatatataccttgtggatatacaccttgtggtgtgtgtatrtatatatatatatatatatacatacacacacaccttgtggagtgcagtgtagaagtaaacgagacaaggcttgcgaaaactcagaacattatgcatagtgcatggtacatctcctgaaatgtacattcccatcagagaagatgctgtggctgcctgcttcttatctcccagatcagatttagtctaccttctttttcttggacacatggtcactcaactcagaactagatttaccagccttcctggaagccacatttggccatgagactgatatcgcaccagtgaaataatagcaaaagtgatgtgtcctatttctgctttacctgacttgctttaaaaaaagaaatccttgttctaggtctcctctcttccctcttcccccaggccagaattacacagtgacagcaaccaactataacaatgcagatgaggacaagatggtaagagtcatagtgcaacaaggttggaggaacctgggtcctggagtgaccactcggagtagagctgcc

SEQ ID NO: 681928 - DNA, 592 bp, Homo sapiens
taaaaatagaagtggggcattgatggagagacacatagcaaaggctragaaaccctcacctcctaggaccaaaaagccactccggacagctccttccctgcctctgctagccctgcacccagctcaaccctcacaccttcctccactccaataaccaaaagggctcctaaatctttctacctatcccatctacacaagaagagattcttatagtagccaaccattgtcaagactttcctgaccatgtttcatcctgcctgaaggcagagggatggatgaattgaacctcccataagcattctgagctgaagaagggacattcttccagtcaagaaggctctggtacctcctagagggtgcactgaatttggggtgctatggaggcagggaacgggagaacgtgcccctctgtgtgatgctatgtgaaacttctccctgagactggcctgaggaccaggctatatagaggtctctacccactttagttcccttctcattctgagaacctttggtgaccattctaggctgcaggacagaaaaggcttcacaaacccccatgtgatcaagttgcctctgagcaggttggtggagg

SEQ ID NO: 681929 - DNA, 396 bp, Homo sapiens
ccactgcactccagcctgggcaacacagcaasactccatctcatacaaaaaaaaagtttttataatgttttgaattgttttaattatgtttgattctacgagtccacctcaatttaaaaaataagtaaagtaaaacactaaaagaaacagagtggtgtgaaagggaacaccggggaaaatagagctccagaattgtgttcgaatttggtggcatgtttaaaaaatcatccccatgcatatctctcccctcctccctcacccacaccatgaccatttgccaggccaccatcattccccagtggatgactgctacttcctcctagtggtgacccagctttcagccttgattccctcccctcctcatcttcaattccacattttgcaactaaattatcc

SEQ ID NO: 681930 - DNA, 1417 bp, Homo sapiens
ctagaatatattctctgtctacagtgctggatatatcaatgcagaattgtgtgcaagtgtgtgacttgctagcagtcagccacagtcccatgcactttgcatatggtatctyttttaattcttacgatcacctcattcataagaggtaggcaccattctcatcctcattttccagataaataatctgatgctcaaggagattgtataacttccttgaaattacacagttgcatagagtggagtggagatttaagtccaggcctcttctgccttcaaacattttagtaaaatcttctccttaatatatgtaggtatgcaggctgaataatttagatcaataccagtgcacagtatttacttttgacaggaggtcttagttttctgtccaaataacagtactcaccccagggcccagagctgctggtggattgtcagagtgcacaactgcacgtgatgctgagtatgggtgactggccaacactgatgactgagccttgctgatggccaaaaacacattcctctgaactccaagcacactgccatctggagaaatgcttcccttatgttttggaggatagctaaacacagcagaccctccatagcagcaaatgtaccttccacatgcctatatgttgatttagagcaaattcagccaactagaacacagccaattcaagaaagcaggaagagagcacgtgtgttcaaagagcacctatatttgcaatccccataaatacactctctagcttaaaccagagagtttaatatagctacttaaatggtcaatagtataccagtgcaagctttctcaaggtcagctgggcattgcaatattttacaatccagacaactgacacgaaccaaatggcccccttcttcttttataacaacgtgtttacttcttctcatcctccttctgacatttatggagtacctggtcagatgagcaaagaaaaataagacaaggctcatctgctattgaagctgatgcaatctcattccttccagaactgcttattatggatctttgtgtattgcctgaggctttacctttctctttctgttcttttcttctgtttctgcaaactcctccttgctctcctcagggataaacacaaattaatgggtgtactggaggccagcacatggttacatcagaattttaaggaagccagttttctctgtgtagaaatgagaggctcagctctccatgattccttgacttctaatcaaacatgctaattagaaccccataaacaagccaaggctcagaagagggtggtttcaaacagggtaagtgtggaaagctattctgaattccactaacactgtgggttaatacttattaccctttttttctcataaaaaaatactattctgctctttaaacctgcattctcttagctactatacaaga

SEQ ID NO: 681931 - DNA, 862 bp, Homo sapiens
tcagataaggagccaaataaggcttcttctgtttatttgatgtttctgaggtctctcttaatcgatttagtccctgtccccgagcccagccccaacattttgttggccatgccatttaaatggctgaagaactggttattcatcctgtaaccttttttataatctgaatttggctgattagttatttgtgattactttttaattgcatttctatgccacagatttcccatagattggtaggtagatttgcagaattgattgctttttgcaagaatagttcgtgagggtggtgtgtactttcttttcatcacttcacaagcacaaaatggctagctgcttccctcagttatattaaggttaatcagtttagatattgtcaacctgatccatcaattaaattttctatctttcacttaataggtttagcatccactgaatattgatactagctctatttattaagggttgcaagcagtgttttcctaaccaggttccttctgtattaactgaactttaatgaagatgaattcatcaacyattttttttctgaagtagtttaggaaaagctggacagatgtttaatttctttaacctttatcaattttcagaaagataagtttgtgtcttaccaaccttgaaaggtgaccaatgagatttcgttgttgtggttgtggttgtttttaaactctctaggaactcatggttggttgtatactggatacattttaatcaattatgactattcttacttgatgttcaaattactcaaatttggcttgggtgggtaggggaagggctccttcatgttgatgcctgtgtcattttttaaaatgtaattcaacagtctgatagctttcacaca

SEQ ID NO: 681932 - DNA, 1067 bp, Homo sapiens
tgggagtcccatttattcatggtagagaaggtttcagtcttccatggctcttgataactctggcagttacagttgccagtagcgtaagttaagactgtttattaagggttttgtggcagggtgcagacattgatatagaccaaattggtcagaaagacgaagaacacacagaaaaacatggcctgtattccactttatgtggatttaggtttgtgtcctcatctttacctcggctctcaagaggtatgcatgagcatgggtgtgcgtgcgcgtgcacacacacacacacacatcagccactgtgttcttccactagacttcaattttgccctcattaatggaaccactaagaatattttgaaatgctttttttttctttctttcttttttttttttttgctgttttatttgcggcatgactacttttcttagtgcagataggcaatatttaacaaacagtctgcaacattgctattattctgttttaatttttgtttctccttttttttrgttctattcctgtatgggggagttctttttctttttttttttaaatcgtaacataattttagattttgccttgttcattccccaccaaaagtcagtccttcagttttcaaagtcatcatcatctctggagggtcaagagctaggactaaatcagatcacggtcatcactggctgccattaacccctctgatatatccatctgcttttctaatgaggccagaggcctgacgactcatcaaagcctcaggcttggtcttaatgggaggataagggtaatggggtgcttttaagtttgactttcttgtttcctcctaatatccatcccagtccatttatgaaagatcactgactccgtgtcagccaatttctggcccccacatgattgtcaccacatctggataatgaatctgcagacagccatgcatccctctgtcggcacagggcaagattgccaggtgggaactttgtaatttataaaatgccttcatgtccatgacctccctcgaacttacaaacattttggaatgggaaaggcaggtatgattagacttatttca

SEQ ID NO: 681933 - DNA, 632 bp, Homo sapiens
gcttggcttgggtcatgtgctgtgttctgaaccatatagctagggaggtgcaatactgggataggccactcctggattggagtgaggggtttccttagggaaacccatgacattgtttccagcaagaggttggggggatggatgcaggatagtaaaaaccaataaatatctgcgaaattattctttttttaaatgaagatatctttgagaaggaaaatgtaatgaacagatcagtgattcagctgtcaatccagtcattcaacaaatatttattgactctatgccaatcactatgcaaggcatgtataacagcaatgaacaagctggttgagatctctgacctcctgaagcttgctctctggtagggaaggaagacataaaaatttagttacatatttatatcttatgtgaaaagtgcattgctgtgaggacatataagaaggggatgtcagwgaggtcaagggtctaggaagccttcagagaaaggatttctagattaagtgctgtttcagctgagatctgtgggatgagtctaagcatggacaagggaacaggatggaagaagaaagttccaggcattttacccttaaacagtttgatcaaaggaaacagggagagcccagacagaggag

SEQ ID NO: 681934 - DNA, 632 bp, Homo sapiens
gcttggcttgggtcatgtgctgtgttctgaaccatatagctagggaggtgcaatactgggataggccactcctggattggagtgaggggtttccttagggaaacccatgacattgtttccagcaagaggttggggggatggatgcaggatagtaaaaaccaataaatatctgcgaaattattctttttttaaatgaagatatctttgagaaggaaaatgtaatgaacagatcagtgattcagctgtcaatccagtcattcaacaaatatttattgactctatgccaatcactatgcaaggcatgtataacagcaatgaacaagctggttgagatctctgacctcctgaagcttgctctctggtagggaaggaagacataaaaatttagttacatatttatatcttatgtgaaaagtgcattgctgtgaggacatataagaaggggatgtcagagaggtcaagggtctagraagccttcagagaaaggatttctagattaagtgctgtttcagctgagatctgtgggatgagtctaagcatggacaagggaacaggatggaagaagaaagttccaggcattttacccttaaacagtttgatcaaaggaaacagggagagcccagacagaggag

SEQ ID NO: 681935 - DNA, 632 bp, Homo sapiens
ccaatgtcagtaactccaacagtctgggtctttggccggctgccaggaattccacattgatggggttcaggacacaccatctgaaaatatgactgtaggagaccagcacgtgccacctcaaaatatgcctctttggtataaggataatttcgacctgttactttgagaaactgcagacacaggagaagccgtcagaaagttaactcttttgtcagagaaatttacatttagaaaggaaatctccatttgtaagggtgtctccttctctgtaccagggagagagggaaaactaatcactgaagacttaatcaatggagaaggcaatgacttacttaaatctgcataacaaaccttacctttgttttaccgtgatttggtgaattcctagccaccttgtcttaatcaggcttccctctacctttcccacaactttctttgtttcagaaagtgttttatttttatttatttattttttttttgagacggactctctgtctgtcgcccagactggagtgcaatggcatgatctcggctcactgcaacctctgcctgccaggctcaagcaattctcctgcctcggcctcccgagtagctgggactacaggcgygtgccatcatgcccggttaatttt

SEQ ID NO: 681936 - DNA, 649 bp, Homo sapiens
taggcacaacacaagaagtagtcacagaaattgctaagtctaggtttatgtgtgcatgctgtggagtgtctctgtggtggatttctttttaagaggcagaaaaaaattctaatttaaatgtattaaattataagttctaatttaaatgtattaaaattaaattataagttgataggattattattgacacacaaggagctccaaaagagatcgtatttttattagagacaagccagttgggattgaaacaaaaatggaggggggtatagccctgtgtatgttgcacagaaaaagtatctgaatgataaaggcctaagtgataactctggacaaggratttggattttgggagtagtgcagaggtagaggcatttttgtgatttattgttctattttttcttctagaaaaatgtaagtagtcatatataattttaaaatataaaggagaagaggcaaaatgttgaatggcacctgaggatcctatattcatattggatcagtattaacatccaggttttgattgttgtactatggttacctggtagattccctttgtatataggaaatagacactggaatagtaaggagtagtgggtcaagatgtctgcaacttattgttcagaatcactcacaaatgggaaatctgata

SEQ ID NO: 681937 - DNA, 1369 bp, Homo sapiens
ggagaattgagaacaaatggacttgctaatactccttaattagtcacatttacccaccagtccaaggcatccctccagtactctagggccctccctacacaggctgtggctgcttctgtaagtttctgacatatgtcagtgtcctggaaataggagaggtccaagaaagacagttaagcagatttacttccttcttcaatcaaaggccaggagggtcgggcaccatggctcatgtctgtaatcccaacactttgggaagccaaggtgggcagatcacctgaggtcaggagttcaagacaagcctggccaacatggtgaaacccsatctctactaaaaatacaaaattagccaggcatggtggcgcatgcctgtattcccagctggtgtgtgcctgtattcgcagctggtgtgtgcctgtagtcccagctactcgagaagctgaggcaggagaatggcttgaacccaggaggcagaggttgcagtgagctgagattgtgccactgcactccagcctgggcgacagaggaaaactcagtctcaaacaaacaaacaacaccaaaaacaaacaaacaaacaaagaaggccaggaatgtgacgatggctgttacaccaaaggcaattcactacgaaaacgtaagtacacaggcactccatacagcaaccaattaaattctatcaaatgtcccaccaacagctatcatatggtccaaaggtcgataagctgaggattccctaagtgattcaaatttaccttgtaatacagatatgaaacaaaattttaggattcccatgaggttttatagatttgtttggccttatgtgggacaaaggtaagtttttccttaagcactcgaactaagccagaacgcttgaaaatgggtatgttgcttatttgggttctctgattaagaagacaattctttcatctatgccttccagagccccccagacaagctcagatctatctatggcttctattagttagagcaagaatattgtaaagtctctgttctgtttcaaaccagacttggctgagagcctttgtaaaatgcatccattcactttgctcccgccatgagtacattaaatgcaatttcatatttctttgatgatttatgctctttgagagcctcacatcatcatttacatcaatgctcactgtttgggcctaaatacacagagatagaatatacaaacaattggattaagtgtgtcctaaccataagacaaactgtggctgaccaggaagacctctgaaatatatatatgaaagatgataggaatacattaaaaaatgatgatggtggtggtgattagcacttactatgtgccagacactcttctaagccctttaggtacattcaatca

SEQ ID NO: 681938 - DNA, 1369 bp, Homo sapiens
ggagaattgagaacaaatggacttgctaatactccttaattagtcacatttacccaccagtccaaggcatccctccagtactctagggccctccctacacaggctgtggctgcttctgtaagtttctgacatatgtcagtgtcctggaaataggagaggtccaagaaagacagttaagcagatttacttccttcttcaatcaaaggccaggagggtcgggcaccatggctcatgtctgtaatcccaacactttgggaagccaaggtgggcagatcacctgaggtcaggagttcaagacaagcctggccaacatggtgaaaccccatctctactaaaaatacaaaattagccaggcatggtggcgcatgcctgtattcccagctggtgtgtgcctgtattcgcagctggtgtgtgcctgtagtcccagctactcgagaagctgaggcaggagaatggcttgaacccaggaggcagaggttgcagtgagctgagattgtgccactgcactccagcctgggcgacagaggaaaactcagtctcaaacaaacaaacaacaccaaaaacaaacaaacaaacaaagaaggccaggaatgtgacgatggctgttacaccaaaggcaattcactacgaaaacgtaagtacacaggcactccatacagcaaccaattaaattctatcaaatgtcccaccaacagctatcatatggtccaaaggtcgataagctgaggattccctaagtgattcaaatttaccttgtaatacagatatgaaacaaaattttaggattcccatgaggttttatagatttgtttggccttatgtgggacaaaggtaagtttttccttaagcactcgaactaagccagaacgcttgaaaatgggtatgttgcttatttgggttctctgattaagaagacaattctttcatctatgccttccagagccccccagacaagctcagatctatytatggcttctattagttagagcaagaatattgtaaagtctctgttctgtttcaaaccagacttggctgagagcctttgtaaaatgcatccattcactttgctcccgccatgagtacattaaatgcaatttcatatttctttgatgatttatgctctttgagagcctcacatcatcatttacatcaatgctcactgtttgggcctaaatacacagagatagaatatacaaacaattggattaagtgtgtcctaaccataagacaaactgtggctgaccaggaagacctctgaaatatatatatgaaagatgataggaatacattaaaaaatgatgatggtggtggtgattagcacttactatgtgccagacactcttctaagccctttaggtacattcaatca

SEQ ID NO: 681939 - DNA, 1369 bp, Homo sapiens
ggagaattgagaacaaatggacttgctaatactccttaattagtcacatttacccaccagtccaaggcatccctccagtactctagggccctccctacacaggctgtggctgcttctgtaagtttctgacatatgtcagtgtcctggaaataggagaggtccaagaaagacagttaagcagatttacttccttcttcaatcaaaggccaggagggtcgggcaccatggctcatgtctgtaatcccaacactttgggaagccaaggtgggcagatcacctgaggtcaggagttcaagacaagcctggccaacatggtgaaaccccatctctactaaaaatacaaaattagccaggcatggtggcgcatgcctgtattcccagctggtgtgtgcctgtattcgcagctggtgtgtgcctgtagtcccagctactcgagaagctgaggcaggagaatggcttgaacccaggaggcagaggttgcagtgagctgagattgtgccactgcactccagcctgggcgacagaggaaaactcagtctcaaacaaacaaacaacaccaaaaacaaacaaacaaacaaagaaggccaggaatgtgacgatggctgttacaccaaaggcaattcactacgaaaacgtaagtacacaggcactccatacagcaaccaattaaattctatcaaatgtcccaccaacagctatcatatggtccaaaggtcgataagctgaggattccctaagtgattcaaatttaccttgtaatacagatatgaaacaaaattttaggattcccatgaggttttatagatttgtttggccttatgtgggacaaaggtaagtttttccttaagcactcgaactaagccagaacgcttgaaaatgggtatgttgcttatttgggttctctgattaagaagacaattctttcatctatgccttccagagccccccagacaagctcagatctatctatggcttctattagttagagcaagaatattgtaaagtctctgttctgtttcaaaccagacttggctgagagcctttgtaaaatgcatccattcactttgctcccgccatgagtacattaaatgcaatttcatatttctttgatgatttatgctctttgagagcctcacatcatcatttacatcaatgctcactgtttgggcctaaatacacagagatagaatatacaaacaattggattaagtgtgtcctaaccataagacaaactgtggctgaccaggaagacctctgaaatatayatatgaaagatgataggaatacattaaaaaatgatgatggtggtggtgattagcacttactatgtgccagacactcttctaagccctttaggtacattcaatca

SEQ ID NO: 681940 - DNA, 1369 bp, Homo sapiens
ggagaattgagaacaaatggacttgctaatactccttaattagtcacatttacccaccagtccaaggcatccctccagtactctagggccctccctacacaggctgtggctgcttctgtaagtttctgacatatgtcagtgtcctggaaataggagaggtccaagaaagacagttaagcagatttacttccttcttcaatcaaaggccaggagggtcgggcaccatggctcatgtctgtaatcccaacactttgggaagccaaggtgggcagatcacctgaggtcaggagttcaagacaagcctggccaacatggtgaaaccccatctctactaaaaatacaaaattagccaggcatggtggcgcatgcctgtattcccagctggtgtgtgcctgtattcgcagctggtgtgtgcctgtagtcccagctactcgagaagctgaggcaggagaatggcttgaacccaggaggcagaggttgcagtgagctgagattgtgccactgcactccagcctgggcgacagaggaaaactcagtctcaaacaaacaaacaacaccaaaaacaaacaaacaaacaaagaaggccaggaatgtgacgatggctgttacaccaaaggcaattcactacgaaaacgtaagtacacaggcactccatacagcaaccaattaaattctatcaaatgtcccaccaacagctatcatatggtccaaaggtcgataagctgaggattccctaagtgattcaaatttaccttgtaatacagatatgaaacaaaattttaggattcccatgaggttttatagatttgtttggccttatgtgggacaaaggtaagtttttccttaagcactcgaactaagccagaacgcttgaaaatgggtatgttgcttatttgggttctctgattaagaagacaattctttcatctatgccttccagagccccccagacaagctcagatctatctatggcttctattagttagagcaagaatattgtaaagtctctgttctgtttcaaaccagacttggctgagagcctttgtaaaatgcatccattcactttgctcccgccatgagtacattaaatgcaatttcatatttctttgatgatttatgctctttgagagcctcacatcatcatttacatcaatgctcactgtttgggcctaaatacacagagatagaatatacaaacaattggattaagtgtgtcctaaccataagacaaactgtggctgaccaggaagacctctgaaatatatatatgaaagatgataggaatacattaaaaaatgatgatggtggtggtgattagcacttactatgtgccagacactcttctaagccctttakgtacattcaatca

SEQ ID NO: 681941 - DNA, 1377 bp, Homo sapiens
tggagctcgtttaaagtcaaaccagacacattattttcccacagctgctgtaacaaattactacaaacctagtggcttaaacattacaaatttattatcttatgataaaatcaaggagtcagcagggtcatgctccttctggaggctctaggggagaactagttcccttgacttttccagcttctagaagccacctgcattccttggtttctggccccttcctctatcttcaaagccacctaggtaccatcttccagtttctctctgactctgaccctcatgcctctttcttataaggacccttgtgattgcatcagattcatccagaatatccaggataacctcctcatctcaagatccttcactcaatcacatgtgcacagtaccatttgccacgtgaggtaacaggctcacaggttgcagacaatgggacgtgtatgtttctggggacccattattctgcctcccagaccagctgcctactcacaacagcctgagatagtttcttcagggttatttactctgcagcagtgaataactggaacagagtcatcaattccagctcagtttttcctggctggtgcaaagttccatgataaatctatgccaccaaaattcttgtcactcagaaggtgacagaggtgccagactcaagacaatctggtgggtcagggcaaccacgtgcttcttctggagcccttattagtgactgactgcttctctccctccatgcaccttgcttcaaaatgaaaataacagcaatraactcccagataagcatgtttccaaagttactattacattaattttgccaaagatatatcaacaagtcagcatcacattggatgttaatttctgtggatttgttggttatatattgccttttacacatactttgacttttctaatccttgtgttacattctagctttttcttttccggctcaaaatcttttctattgtttcacaaaactctccagtaagtgctagagagcccctcactgtgttctctgctgaattcccctgtcccttatcaattacagtgttatggactgaattgctccccccaccacccagaaaagtttatatgtggcagtactaacctccagtatcttggaacgtgactgcatttgaagatagaacctttaaaaagatgattagggttaaacgggatcataagagtggtgccctaattcagtatgactgccattcttataagaagaggaagagacaccaggggtgcaacagacagagagatgaccatgtgaggacacagcaaaaaggtagtcatctgaaagccgaggagagagagctcaggagaaaccaaccctgccgacaccttggtcttcgacttccagcctccacaactgtgagaaaa

SEQ ID NO: 681942 - DNA, 1377 bp, Homo sapiens
tggagctcgtttaaagtcaaaccagacacattattttcccacagctgctgtaacaaattactacaaacctagtggcttaaacattacaaatttattatcttatgataaaatcaaggagtcagcagggtcatgctccttctggaggctctaggggagaactagttcccttgacttttccagcttctagaagccacctgcattccttggtttctggccccttcctctatcttcaaagccacctaggtaccatcttccagtttctctctgactctgaccctcatgcctctttcttataaggacccttgtgattgcatcagattcatccagaatatccaggataacctcctcatctcaagatccttcactcaatcacatgtgcacagtaccatttgccacgtgaggtaacaggctcacaggttgcagacaatgggacgtgtatgtttctggggacccattattctgcctcccagaccagctgcctactcacaacagcctgagatagtttcttcagggttatttactctgcagcagtgaataactggaacagagtcatcaattccagctcagtttttcctggctggtgcaaagttccatgataaatctatgccaccaaaattcttgtcactcagaaggtgacagaggtgccagactcaagacaatctggtgggtcagggcaaccacgtgcttcttctggagcccttattagtgactgactgcttctctccctccatgcaccttgcttcaaaatgaaaataacagcaataaactcccagataagcatgtttccaaagttactattacattrattttgccaaagatatatcaacaagtcagcatcacattggatgttaatttctgtggatttgttggttatatattgccttttacacatactttgacttttctaatccttgtgttacattctagctttttcttttccggctcaaaatcttttctattgtttcacaaaactctccagtaagtgctagagagcccctcactgtgttctctgctgaattcccctgtcccttatcaattacagtgttatggactgaattgctccccccaccacccagaaaagtttatatgtggcagtactaacctccagtatcttggaacgtgactgcatttgaagatagaacctttaaaaagatgattagggttaaacgggatcataagagtggtgccctaattcagtatgactgccattcttataagaagaggaagagacaccaggggtgcaacagacagagagatgaccatgtgaggacacagcaaaaaggtagtcatctgaaagccgaggagagagagctcaggagaaaccaaccctgccgacaccttggtcttcgacttccagcctccacaactgtgagaaaa

SEQ ID NO: 681943 - DNA, 630 bp, Homo sapiens
tttgcaagctttagtcctaggcatggaaaaagaactttgaagaaaacctgagagatatsagtgtaaaacaagagaatgattccctctggggtgctggtagtgggggcttaatttcctaaaggcttactgggtatcagggctgctttcctttataatcttttacccgtcttatgggggatgaacagaaacacactttagtgctagaaaagctgggcctaaaagaccagtctcctgtcccatacttggacatttattgttctttttgggcaaggtgaaaacttgaaaccaaaagtctgttgagtttggaagacttgactcccaggatgtacaaagtacttctgcatgtgcgcaaagtcctgtaggcccaggcatcaatgacacatgcagtgtgggcccaggcatcgatgacacacgcagggaagcaacccaagctgggtcagtccttacaaggagaccggcacctgggctcacaccttgccgtatatgacttcatgggaacctcataacagacctgtgggctcagaattattctctcactttgcagatgaggaaatggaagtgcacagaaggaaagtaagagtgtttgagatcctgtagtgggttcattgctgagaataaacccggagttgc

SEQ ID NO: 681944 - DNA, 630 bp, Homo sapiens
tttgcaagctttagtcctaggcatggaaaaagaactttgaagaaaacctgagagatatcagtgtaaaacaagagaatgattccctctggggtgctggtagtgggggcttaatttcctaaaggcttactgggtatcagggctgctttcctttataatcttttacccgtcttatgggggatgaacagaaacacactttagtgctagaaaagctgggccyaaaagaccagtctcctgtcccatacttggacatttattgttctttttgggcaaggtgaaaacttgaaaccaaaagtctgttgagtttggaagacttgactcccaggatgtacaaagtacttctgcatgtgcgcaaagtcctgtaggcccaggcatcaatgacacatgcagtgtgggcccaggcatcgatgacacacgcagggaagcaacccaagctgggtcagtccttacaaggagaccggcacctgggctcacaccttgccgtatatgacttcatgggaacctcataacagacctgtgggctcagaattattctctcactttgcagatgaggaaatggaagtgcacagaaggaaagtaagagtgtttgagatcctgtagtgggttcattgctgagaataaacccggagttgc

SEQ ID NO: 681945 - DNA, 772 bp, Homo sapiens
tcccagctacttgggaggctgaagtgggaagatatcctgagcccaggaggcagaggttgcagtgagctgagatcgtgccactgtactcccacatgggtgacagagtgagaccctgtctcaagaaaccgaaaaacgaaagaaaaacaagttcatgagataccacatacgtgaatatatgctaacacagcagcattattttttggttaatcaatgattatcaatgcttctgtgattttaaaaaggagagtcagctattccctcttctgcccgctgatatctacagcctctaccagatggtacctcacttaattgaggtttgccttttttcaggctcttctaatgatcttctggccaactctaaatcacctttaaacttcatggaatttatgcattcttgttaatttatatccatgtaatatcagggtatttctctttgtagctgcatcttctaagataatggtttttcatggagactggcattgtcccgtccctatgagggggacatttgggaatggcatttttagtactcacaaggtaactggggcactcttggtcttggggaggggaggtggctggggacgcagagggtcctgcrgtgggtggatacttacaacatagaaatgtcctggctcttgatgctggctacaccctcagtaagagatactgtcctagggtcatttttttcaacccacactagttacgtggactgtcttagtcagtccaggctgctataacagaataccgttgactgggtggcttgattttttttttt

SEQ ID NO: 681946 - DNA, 1491 bp, Homo sapiens
tataaactttgtctgtctgtgtctgtcagtctcacacacatccttcaacacatctcttatttctttccagagccaggctaaagcacccttgccatcttctctctctgctgttaaattagatgccttctccaggaatctctctgggggcatcctgagccttcccgattccatttcagatttctttctgtaatcaagagctccatctctgttgctttcctggggctcttcctctcctctttttgaagcttttcatttccctttatattctttcattcgtcaactacaaagaagctgcaggcaggaacaagagagctcagcacacttggtgcagtctctctggcttggtaattggtcccaagaaaatagtttttttccaattatggcaacattgaaaacttatccaggagaggawaggctctttcagctgctctttctcgatccttgcagtttcccttttgacctgtgggtacacatggtactgacgcaattggcacctcagatggttcttcctgacagctacccttgcaactgactcaggatacaaactacctttttttttggagacagatctcactttatcacccagtctggagtgtaattgacgcaatcctggctggctgcagccttgaccttctgggcccaagcagtgttcccgcctcggcctcccaaagtattaggattacaggcatcagccgtcatgcctggcacaaactgcctttggaagtgaatcagtcagttgcctagtaggcctaaggagaccatgatccatgtaaaccatggaatattttaagcagaaaagaacgtattccccttcaaggacaaagtgctggaataattgacatccaggttatcacagagccttcctatagtgttgattctgatcactcaaataatcttagtgttaaagggtttatttttatttttctaccttcttttaccaccccttactcccatcagagcaccatcagtcttttgggaataaaataattcctcagatatattaaaaagctatagaagcagaagttaacgtacatgcaaaaatctctacatttctcaacaattgtgtaaccactaaatatagggaaagaagtgtgcaaggtataagacattggccatgcgtccttgtctgtgccacctcaccaggagcattgctcctttttatgcacaagcatcagaggttctggacatcttcttgggctagttggtatagcttccttctcagctcattctgcaaggtttgctttggaaaagtctgtgcatctgagctctctcttgccatatcaggaaccgaagtcagaaataaaggctacagatgctcaaaatctgcagtattcaatctttttaaggcccagcatggtgtctcatgcctgtaatcccagggctttgggagactaaggcgggtggatcacttgaggtcaggcattcaggactagcctggccaacatggtgaaaccccatctctactaaaaatacaaaaattagcctggtgtg

SEQ ID NO: 681947 - DNA, 1491 bp, Homo sapiens
tataaactttgtctgtctgtgtctgtcagtctcacacacatccttcaacacatctcttatttctttccagagccaggctaaagcacccttgccatcttctctctctgctgttaaattagatgccttctccaggaatctctctgggggcatcctgagccttcccgattccatttcagatttctttctgtaatcaagagctccatctctgttgctttcctggggctcttcctctcctctttttgaagcttttcatttccctttatattctttcattcgtcaactacaaagaagctgcaggcaggaacaagagagctcagcacacttggtgcagtctctctggcttggtaattggtcccaagaaaatagtttttttccaattatggcaacattgaaaacttatccaggagaggaaaggctctttcagctgctctttctcgatccttgcagtttcccttttgacctgtgggtacacatggtactgacgcrattggcacctcagatggttcttcctgacagctacccttgcaactgactcaggatacaaactacctttttttttggagacagatctcactttatcacccagtctggagtgtaattgacgcaatcctggctggctgcagccttgaccttctgggcccaagcagtgttcccgcctcggcctcccaaagtattaggattacaggcatcagccgtcatgcctggcacaaactgcctttggaagtgaatcagtcagttgcctagtaggcctaaggagaccatgatccatgtaaaccatggaatattttaagcagaaaagaacgtattccccttcaaggacaaagtgctggaataattgacatccaggttatcacagagccttcctatagtgttgattctgatcactcaaataatcttagtgttaaagggtttatttttatttttctaccttcttttaccaccccttactcccatcagagcaccatcagtcttttgggaataaaataattcctcagatatattaaaaagctatagaagcagaagttaacgtacatgcaaaaatctctacatttctcaacaattgtgtaaccactaaatatagggaaagaagtgtgcaaggtataagacattggccatgcgtccttgtctgtgccacctcaccaggagcattgctcctttttatgcacaagcatcagaggttctggacatcttcttgggctagttggtatagcttccttctcagctcattctgcaaggtttgctttggaaaagtctgtgcatctgagctctctcttgccatatcaggaaccgaagtcagaaataaaggctacagatgctcaaaatctgcagtattcaatctttttaaggcccagcatggtgtctcatgcctgtaatcccagggctttgggagactaaggcgggtggatcacttgaggtcaggcattcaggactagcctggccaacatggtgaaaccccatctctactaaaaatacaaaaattagcctggtgtg

SEQ ID NO: 681948 - DNA, 1491 bp, Homo sapiens
tataaactttgtctgtctgtgtctgtcagtctcacacacatccttcaacacatctcttatttctttccagagccaggctaaagcacccttgccatcttctctctctgctgttaaattagatgccttctccaggaatctctctgggggcatcctgagccttcccgattccatttcagatttctttctgtaatcaagagctccatctctgttgctttcctggggctcttcctctcctctttttgaagcttttcatttccctttatattctttcattcgtcaactacaaagaagctgcaggcaggaacaagagagctcagcacacttggtgcagtctctctggcttggtaattggtcccaagaaaatagtttttttccaattatggcaacattgaaaacttatccaggagaggaaaggctctttcagctgctctttctcgatccttgcagtttcccttttgacctgtgggtacacatggtactgacgcaattggcacctcagatggttcttcctgacagctacccttgcamctgactcaggatacaaactacctttttttttggagacagatctcactttatcacccagtctggagtgtaattgacgcaatcctggctggctgcagccttgaccttctgggcccaagcagtgttcccgcctcggcctcccaaagtattaggattacaggcatcagccgtcatgcctggcacaaactgcctttggaagtgaatcagtcagttgcctagtaggcctaaggagaccatgatccatgtaaaccatggaatattttaagcagaaaagaacgtattccccttcaaggacaaagtgctggaataattgacatccaggttatcacagagccttcctatagtgttgattctgatcactcaaataatcttagtgttaaagggtttatttttatttttctaccttcttttaccaccccttactcccatcagagcaccatcagtcttttgggaataaaataattcctcagatatattaaaaagctatagaagcagaagttaacgtacatgcaaaaatctctacatttctcaacaattgtgtaaccactaaatatagggaaagaagtgtgcaaggtataagacattggccatgcgtccttgtctgtgccacctcaccaggagcattgctcctttttatgcacaagcatcagaggttctggacatcttcttgggctagttggtatagcttccttctcagctcattctgcaaggtttgctttggaaaagtctgtgcatctgagctctctcttgccatatcaggaaccgaagtcagaaataaaggctacagatgctcaaaatctgcagtattcaatctttttaaggcccagcatggtgtctcatgcctgtaatcccagggctttgggagactaaggcgggtggatcacttgaggtcaggcattcaggactagcctggccaacatggtgaaaccccatctctactaaaaatacaaaaattagcctggtgtg

SEQ ID NO: 681949 - DNA, 590 bp, Homo sapiens
atgctaccgtgcccagctaattgtttaattttttgtagagataggatctctccctttgtggcccaggctgatctcaaactcctgagctcaagcgatcctactcactcggcctcccaaagtgctgggattacaggtgtgagccaccatgccaaagcctaagggaccttagaattttttctcctttcttttcacattttgttttgtgcttgcttatttattgaaatctggaccacaaataacttacatgtttgtcaaggccagatttcaggacctaaccaacacccgacaggcatcttagaaagtggagggtgtaagttataaagagagattacttccaacacgtttctttaaagcctgctggctaaattaggtgggrccttctttgtgtcctctctgttcttgctagtctggcctttgtataatagggaagcagatatatctggaagcctctaagtgtgcatcatggaaattgtttgaaatgttcaaagtgatgtggatgtatatatacgttaaaaaatatcactttcccttttgaagacatttactatttctatggtttgtttagcaacagcctggctgaatagttcttc

SEQ ID NO: 681950 - DNA, 590 bp, Homo sapiens
atgctaccgtgcccagctaattgtttaattttttgtagagataggatctctccctttgtggcccaggctgatctcaaactcctgagctcaagcgatcctactcactcggcctcccaaagtgctgggattacaggtgtgagccaccatgccaaagcctaagggaccttagaattttttctcctttcttttcacattttgttttgtgcttgcttatttattgaaatctggaccacaaataacttacatgtttgtcaaggccagatttcaggacctaaccaacacccgacaggcatcttagaaagtggagggtgtaagttataaagagagattacttccaacacgtttctttaaagcctgctggctaaattaggtgggaccttmtttgtgtcctctctgttcttgctagtctggcctttgtataatagggaagcagatatatctggaagcctctaagtgtgcatcatggaaattgtttgaaatgttcaaagtgatgtggatgtatatatacgttaaaaaatatcactttcccttttgaagacatttactatttctatggtttgtttagcaacagcctggctgaatagttcttc

SEQ ID NO: 681951 - DNA, 629 bp, Homo sapiens
cctggcatacgaacttccacacaaaacgggtgaccatggctgaagggttattctggggagccttccctgtggaagccccattaaccatccctgctcattcctcccgtgagaccaccatttgctaaatcttctrtcaggtgatgtgggatccaagaagaaacaataatcagaagcttgccttacaggcatgcacaatttcgggtggactgtcacatgtgcactgaaaaagtcgagaaatgttatgatggccctggaaggaggagtgtctagatgaaatgcgaataaataggagacaagtgtgtcgttaattaagaaggagaagggggactttaaggttaccttaaaagaaaagagacccctcaatgctttggaagagcctttttaataagctagtcaggtaagttagattgctctgtcttacactggtttagtaattttcatatatacttatttcctctgaaatgtattagtaacatttgtaatttaccaaatggaaaatatcacttaactttaagcttcatcaagttaagaatgaatttgtaaccagggggtattatgttttctcttattataacaaacaccaatcaaaaacaaacaaatacatgacgggaaagaaagaaaacccagca

SEQ ID NO: 681952 - DNA, 1116 bp, Homo sapiens
atgagaacaacatgggaaagacctgcccccataatacaattaccccccaccaggtctctccaacaacatgtgggagttcaagatgaaatttgggtggcaacacagccaaatcatatcacagaactaccacaatacctgttacaaaatgggcactcaataaatactggataggtggattcattggtacctgtcttcttaaaagaagaaaggcaggataatcaatgagaggttttctcactcatggttatgaccttgcatttggatggaaagtcatctacaaatatgttttcaccttctcagggcaggctgaacaaagcctgtctgaaggttgtcagataactatgttctccaaagtatggggagtttattaaaaactcagatgcctaaacyatactccgaacctactgaataaggatctctttctgtggggcccagggaatctgcattttaacagattcctaggtacaattcagtttgggaatcctacaaaggctttaaaagggcaaagatttcttaaagtgtgatcagtgagaatccctgagactttttcaggggcttcatgaggtcaagactattttcataaaaatactgaggtgttttgtgcgttcatccctctcatatctcatgtatatatcatggagcttccagaggcttcctggtgtacatcattgaaccagactcaaagtagcagataagagaatccagcggattcccttaagtcaaacgtgaaagccctgcaatagccactctttctactatattttcttttgtttaggaaaatacagtttttaatttaaaaatatttttatgttaaaaagctatgagtttatttttttagtaatttggtaatctttttaggttttgtagaaatataaaggatcctgaaaccaaaaaatttgagaagtttgtttgctattgggcaacaaactaaataaatgtatttaaaaagtagatttcctatctttattcagtgaaatgctatatcaagtagttgatcccatgtcaacttaatttgttaaaattatgatttctattgataaaaggtctcatagttcctattctccaagaaggccaaggtgtttttgcagtattgcagcatgagcaggaatcaggcgc

SEQ ID NO: 681953 - DNA, 1632 bp, Homo sapiens
gatatttaccaggaattaggggagaaacagtggatactaccatggttcctgcttttaaggagctcatagtctaagagtggagtcagataagtcaayaagattacaaaataaatgccagaagaggaaaaagtgggagacgccaaggaggcaaggagggacaccaagcccagccacaataagagtgggaatgtcagagcaggtgacacagtgaggttgctttagcttcatgtgacagatatctctaactcagactgatctaaacttcagtgagaaaataaatttcatcaaactgggaggtcagaggaagggcagacttccaggtgcagtcactacagttgctcaaaaatctcatcaaggtattcggttcttttcatgtctctgatctatcatggctgctgtcatttccagtccaacagtagctctgtttcagtatcatgatggctccagcaattgcccacatgatggcatcagagagacaaggggcatctcttttatctgtcatctttgggaggagaaggaaggaaaagagaatttcctatgttcttttcagcatgggccagtgttggggccaagggaaagcttccccttcaccttccgaaggttcaccttctgccctctgaaaaagaactaatgttaggaagatgaataggagaaaaggcacacaaatttatttaatgtgtattagcctagaaaatcaaaggaggatgatcacgcaataacccagtaggtccagatgcttatacaactttcttcattggggaatgagagattgagtcaatgtgtctgtcaatttgaaggggagtaaataacttttagggggaatgaataagcccagtgctgagacaatggttagtaaataatgttctctttgggaattgaacaggattggagacaaagtttgtctgggctgtaggtgtgatgtttaatttccaggctctttgtcataataggagttttaatcttctggttaatgaagttacagggagggggttgaaggccatttgttccttttgctgggtatggtttgtaggtagataaggaaacttcaacgaacagccttatcctgtgctttgggagtgaaaggtgattgaaagatgaaggaatagggggaaggtcagagaaaccttgaggctactgcttcagtttagcatatctcaaagagccatattttggagtgttgtgttctgatccccaataccagaattaaatcatctacccacccttaaactacaccttggcaagggcacaggattctcatgacaggcttagtggggcatcttgggtgacaggtgcattgaggggttgacctccacaatgaccagggaaggttttcccaggggatctcagactttgcctatctgataggatgaattgggctttttctagtctctatgtgttagaggtagacagagaaacatcccagggtgtgcaatggtattgagcataaaatattttaattattcatggaattccaagtacttttatttgactagactatgggggtagcgcagagtccaaactagtaataggagataaggctggagaggtaggtgagggctggattatgaagactcttaccagccataagaaatgtgggttttatcccacagaaactgggaacacgctgaaata

SEQ ID NO: 681954 - DNA, 628 bp, Homo sapiens
ggggccggttaatgtcctgagtgctgtttatgcttcttggtctaagcatgcagagacagtgccagagatgagcacgcttgccttccattcccgtgggaggcccttaggagaagcttctaatgagaagtgccgggtctcccgccttctatctctaagaccttcagagagtttccttctcctatctgagcctcggtttcctcatctgcagcacgggacacagtagtgcctgctttgcagggtctcagtaaaaagaccatagakcccacagttccctgactggcacagaactgcattccctacatgtgcactacggacagatttaaaaacccattccaggccgggcacagtggctcacagtggctcatgcctgtaatcccagcactttgggaggccaaggcaggcagatctcctgaggtcgggagttcaaaaccagcctgaccaacatggagaaaccccgtctgtactaaaaatacaaaaaaaattagccgggcatggtggcgcatgcctgtaatcccagctactcgggaggctgaggtaggagaattgcttgaaccctgggaggcggaggttgcggtgagccgagatcgtgccattggattccagcctgggcaagaagagcgcaactcca

SEQ ID NO: 681955 - DNA, 628 bp, Homo sapiens
ggggccggttaatgtcctgagtgctgtttatgcttcttggtctaagcatgcagagacagtgccagagatgagcacgcttgccttccattcccgtgggaggcccttaggagaagcttctaatgagaagtgccgggtctcccgccttctatctctaagaccttcagagagtttccttctcctatctgagcctcggtttcctcatctgcagcacgggacacagtagtgcctgctttgcagggtctcagtaaaaagaccatagagcccacagttccctgactggcacagaactgcattccctacatgtgcactacggacagatttaaaaacccattccaggccgggcacagtggctcacagtggctcatgcctgtaatcccagcactttgggaggccaaggcrggcagatctcctgaggtcgggagttcaaaaccagcctgaccaacatggagaaaccccgtctgtactaaaaatacaaaaaaaattagccgggcatggtggcgcatgcctgtaatcccagctactcgggaggctgaggtaggagaattgcttgaaccctgggaggcggaggttgcggtgagccgagatcgtgccattggattccagcctgggcaagaagagcgcaactcca

SEQ ID NO: 681956 - DNA, 628 bp, Homo sapiens
ggggccggttaatgtcctgagtgctgtttatgcttcttggtctaagcatgcagagacagtgccagagatgagcacgcttgccttccattcccgtgggaggcccttaggagaagcttctaatgagaagtgccgggtctcccgccttctatctctaagaccttcagagagtttccttctcctatctgagcctcggtttcctcatctgcagcacgggacacagtagtgcctgctttgcagggtctcagtaaaaagaccatagagcccacagttccctgactggcacagaactgcattccctacatgtgcactacggacagatttaaaaacccattccaggccgggcacagtggctcacagtggctcatgcctgtaatcccagcactttgggaggccaaggcaggcagatctcctgaggtcgggagttcaaaaccagcctgaccaacatggagaaaccccgtctgtactaaaaatacaaaaaaaattagccgggcrtggtggcgcatgcctgtaatcccagctactcgggaggctgaggtaggagaattgcttgaaccctgggaggcggaggttgcggtgagccgagatcgtgccattggattccagcctgggcaagaagagcgcaactcca

SEQ ID NO: 681957 - DNA, 634 bp, Homo sapiens
aaggtcacttgcatgtatgtgttttcttttcaaaagcttcatgcaaagccagaaggaaaatctcacagagctgtgtgcctgccaggactggtaagatccaagtgacagaacagacccaggcaagatcgaggaggcgaaactcagatcagccaagaagccccaccactaatccagtgctccatccatctggtttaaatcgtggtttgaagcatatttatgtgataaagaattaaagctgtttctcttggccacctaaataattgggacactctcttttgaaaagtcattgacatcagtacaagcatattcaaaactgaatttagaattaaagaggcttgagtgtgcttaacttttttaaagtatgccagagcctctttccaaagttttttttaagcgacaatataagtaataacttagcaaggtcctaagggatttattcttgttttaaaaaaagaaaagcgatgtttgagggaaaaagagagacacagagaaaccagacagagagcaaatggaaaggttgctgctatcgagatcaagaaacaaactcagaatattcctgaaaagactacctccmaatcatctgaaacgtggcaagtaactctcccaaataagtaccattattttaatcacgaaa

SEQ ID NO: 681958 - DNA, 2167 bp, Homo sapiens
ccatttccaggggaaagagctgggctcctggaagatgtatagggtcagcctggtggtgagatggtgatgagcaagggtgcacatccatgaggaaccaatcatgttggaacaactaagtgatatcgcctctggctttattaatattaaagaccacaggctaggcggctgccattttactgccctgttttcaagccacccagcacgattgattcctagctcccaaaggcttcccctctgttatctctttaggttttaatattgttaaagccttaataatcggtgggctaaacacacatgtaatgaatcctattagtcataaatggctccctgcacacaagaaaatgaagtaggaagccttctcttgcacacaggcaaactcccctaattcagactacctgaaagcaagactgatctgaattacacatttctttaaaagaaaaacgtgaggcccggtgcggtggctcacacctgtaatcccagcactttgggaggccgaggcgagaaaagatcacgaggtcaagagatcgagaccatcttggccaacatggtgaaactccgtctctactaaaaatacaaaaattagctgggcgtggtggcatgcacctgtggtcccagctactcaggaggctgaggcaggagaatcacttgaacccaggaagtggaggttgcagtgagcccagataataccactgctctccagcctggtgacagagctagactccgtctcaaaaaaaaaaaaaaaaaaaacaaagaaaagaaaagaaaaagatgcggtcgggtgtgtgcagaaaccctcttgagaaaaccaacttttatctagcaaagtccttaggcgagctgctttaacgaagaggtaagaatatccttgagtcagtaggagcttctaaattgcccgagggtactttaaaactgctctcttgcaaagggcacagttcccccagattgttctggggtgttctttgcttagtaaaccctctctccaagatgactgcacaggctaagcctcaagccaagagccaaatccgaagatcataaatcccagattcctgaagtccacatgaacaaaaattgggtagaatgaacacccagtggggaagctggtatatgttgctactgcctggcagccttcaaattcatctgtgctcacgaaagcagtgaaagagcttcaacacaggaatgagattacaaaaaaatttcatgcactgggatcagcatatagcaaaaggtgagaaaaaaaaaagcagcattaaaataaaaatgccccaactactacttagttttttgtttttgcttttgttgttcacattgtttgttttgttttataggaagaggaaaaagtctgggggaaggatgtggttatggtggctggtcactgggcagaaccaaataaaacctcgagagcctccctcgctcaatcagggtaaaatccagtctttctaggcctggagcggtggcttgtgcctataatcccagtactttgggaggccgatgtgggtggatcacctgaggtcaggaggttgagaccaggctggccaacatggtatctacaaaaaatacaaaaatttgagctgggtgcggtggcatgaatgcctgtagtcccaacttcttgggaggctgaggcaggacaattgtttgaacccaggaggcaaaggttgcagtgagctgagatcatgccgctgcactccagatgtctcaaaaaaagaaaaacaaaataaccaaaacagagtctttctaaaaaccaacaaggcagggcatggccaagcctcctcagtctctcctcctggccttggtggcatgcctgggccccgccgagcatgtgcctcactcgggaccttgatacttgccgtcccctcctcccttgcaccctgcacctcttcggacaggaatctgtccacaggccactcatcacagaaccctgtctagagccatacagcatcgtcttcctgtcctcagccctctaaacaggaatgaattatctttacagcacttatccttgcttgcatgtcttgatttctttcacgtctctttccccaagtagmatgaaagctccctgagggcagggatttcctttgttcactgctgtatcactaggtattgcacatagagggccctccagaaacgtgagataactgaatgaacggatgaatgaatgaaatatataactata

SEQ ID NO: 681959 - DNA, 659 bp, Homo sapiens
ccatccatggatgcgtcctgcaacccaggagcaacctctcccttgggcaaattggctgggcaacagctagctaagttactttctgtgatcggaaaaaaatcccagtacaaccttgctcctccccgagctctccggacaaggacaaagcactcagaagaaggtctaagagtgtcaggttccctggctgacaagtctagggggatctctgtggttctagttatcccaatgatctgtgactcttttgcagggtagctggggaggggttgatgatgagggtgggaactaaagcaaaactgatctgttttacagtcatgattttcctgagaaaagtgagaaagaaatgacaaaaattatcaactcaggccaggcccagtggctsatacctgtaagcccagcactttgtggggccaaggtaggtagatcacctgagctcaggagttcgagaccagcctgggcaacatagtgaaggcttgtctctaccaaagatgcaaaacaattatctggccatggtggtgcatcctgtggtcccagctgctcatgaggctgaggcaggaggatcgcttgggcctgggaggcagaggtggcagtgagctgagatcgcaccaccgcactccagtctgggcaacagaatgagaccttgtctcaaaaaaaaaaaaaaa

SEQ ID NO: 681960 - DNA, 659 bp, Homo sapiens
ccatccatggatgcgtcctgcaacccaggagcaacctctcccttgggcaaattggctgggcaacagctagctaagttactttctgtgatcggaaaaaaatcccagtacaaccttgctcctccccgagctctccggacaaggacaaagcactcagaagaaggtctaagagtgtcaggttccctggctgacaagtctagggggatctctgtggttctagttatcccaatgatctgtgactcttttgcagggtagctggggaggggttgatgatgagggtgggaactaaagcaaaactgatctgttttacagtcatgattttcctgagaaaagtgagaaagaaatgacaaaaattatcaactcaggccaggcccagtggctgatacctgtaagcccagcactttgtggggccaaggtaggtagatcacctgagctcaggagttcgagaccagcctgggcaacatagtgaagscttgtctctaccaaagatgcaaaacaattatctggccatggtggtgcatcctgtggtcccagctgctcatgaggctgaggcaggaggatcgcttgggcctgggaggcagaggtggcagtgagctgagatcgcaccaccgcactccagtctgggcaacagaatgagaccttgtctcaaaaaaaaaaaaaaa

SEQ ID NO: 681961 - DNA, 1478 bp, Homo sapiens
acacccaccttccttgagcagagcctgcaggctgcctgcccggctcagggccgtgtgtcggcaggagctggaggccatcaagatgaaggtgtgtgccatggagcaggccgaggggacgccacggcctccaggagtgcagcaacaggccgaggaagaggagggcaccgcggccgggcagctgctgagccctgagaccgtgggtaggaaccaagggcacaggccgccccccactgagcaagggtcccacagtttccattaaggttgggcctggcaggctccaaggtgtcacctcccctataagcctgggcgaccttccccgtgagaggagtgaggaaggaaccaagggcctgcgggcctgagctgtgttctccgcaggctgccccctctctgggacccccgaggagaaggtggaggctgaccacagatccgtctacgtgggcaacgtgagtggtgggcggggtgaaggggcaggcagcgaatggggccccatctctaccagrgggtctggcgcccggccatgggccaggcagccttgctgggaagggggtctgaccctgggggcagccccgtcaccttgaggaaacactggcctgggcacatattccagtttttcaacatgagctggaattcggggttgcacatgaaatctccacttttgagaagctttttaaaaggctccagctctccagaaggaagcgctccatacgagatatcctttcctctcttccctccaaccccagcgggggtgtggggtggaggcctggggccatccccgccacggggcccagccttggggtttctttcctcacctctaacaagaaggccccgagtcagggccaggcgtctccctcacatgctggtctgggcctgggtgcaggtggactacgggggctccgccgaggagctggaggcccacttcagccgctgtggggaggtccaccgagtcacgatcctgtgtgacaagttctctggacaccccaaggggtcagtgtggggcctggtgggggcactggccatgcggacagggcccagcctcacccctcccctccctgcccctcccctcagttatgcctacatagagtttgccaccaagggctccgtgcaggccgccgtggagctggaccagagcctcttccggggccgggtcatcaaggtgcgccggtgctccccaggtccaggaacatgagcgcagaggggctggcccactggccctgggacacacagcagccccagctggctcctctctgcacagcgtgtctcaggcacggtgcttggctgggcctggacaggatgtggcgggaccctcggacctgaagctgggtttggtctgccagtggcatggtggggaagtgtcccctctcgggcgggagccccctctgcaggggtgctggccgtgacccccccctctgcaggggtgctggccgtgacccccccctctgcaggggtgctggccgtgacggggtgtcatatgacagcta

SEQ ID NO: 681962 - DNA, 1478 bp, Homo sapiens
acacccaccttccttgagcagagcctgcaggctgcctgcccggctcagggccgtgtgtcggcaggagctggaggccatcaagatgaaggtgtgtgccatggagcaggccgaggggacgccacggcctccaggagtgcagcaacaggccgaggaagaggagggcaccgcggccgggcagctgctgagccctgagaccgtgggtaggaaccaagggcacaggccgccccccactgagcaagggtcccacagtttccattaaggttgggcctggcaggctccaaggtgtcacctcccctataagcctgggcgaccttccccgtgagaggagtgaggaaggaaccaagggcctgcgggcctgagctgtgttctccgcaggctgccccctctctgggacccccgaggagaaggtggaggctgaccacagatccgtctacgtgggcaacgtgagtggtgggcggggtgaaggggcaggcagcgaatggggccccatctctaccagagggtctggcgcccggccatgggccaggcagccttgctgggaagggggtctgaccctgggggcagccccgtcaccttgaggaaacactggcctgggcacatattccagtttttcaacatgagctggaattcggggttgcacatgaaatctccacttttgagaagctttttaaaaggctccagctctccagaaggaagcgctccatacgagatatcctttcctctcttccctccaaccccagcgggggtgtggggtggaggcctggggccatccccgccacggggcccagccttggggtttctttcctcacctctaacaagaaggccccgagtcagggccaggcgtctccctcacatgctggtctgggcctgggtgcaggtggactacgggggctccgccgaggagctggaggcccacttcagccgctgtggggaggtccaccgagtcacgatcctgtgtgacaagttctctggacaccccaaggggtcagtgtggggcctggtgggggcactggccatgcggacagggcccagcctcacccctcccctccctgcccctcccctcagttatgcctacatagagtttgccaccaagggctccgtgcaggccgccgtggagctggaccagagcctcttccggggccgggtcatcaaggtgcgccggtgctccccaggtccaggaacatgagcgcagaggggctggcccactggccctgggacacacagcagccccagctggctcctctctgcacagcgtgtctcaggcayggtgcttggctgggcctggacaggatgtggcgggaccctcggacctgaagctgggtttggtctgccagtggcatggtggggaagtgtcccctctcgggcgggagccccctctgcaggggtgctggccgtgacccccccctctgcaggggtgctggccgtgacccccccctctgcaggggtgctggccgtgacggggtgtcatatgacagcta

SEQ ID NO: 681963 - DNA, 1478 bp, Homo sapiens
acacccaccttccttgagcagagcctgcaggctgcctgcccggctcagggccgtgtgtcggcaggagctggaggccatcaagatgaaggtgtgtgccatggagcaggccgaggggacgccacggcctccaggagtgcagcaacaggccgaggaagaggagggcaccgcggccgggcagctgctgagccctgagaccgtgggtaggaaccaagggcacaggccgccccccactgagcaagggtcccacagtttccattaaggttgggcctggcaggctccaaggtgtcacctcccctataagcctgggcgaccttccccgtgagaggagtgaggaaggaaccaagggcctgcgggcctgagctgtgttctccgcaggctgccccctctctgggacccccgaggagaaggtggaggctgaccacagatccgtctacgtgggcaacgtgagtggtgggcggggtgaaggggcaggcagcgaatggggccccatctctaccagagggtctggcgcccggccatgggccaggcagccttgctgggaagggggtctgaccctgggggcagccccgtcaccttgaggaaacactggcctgggcacatattccagtttttcaacatgagctggaattcggggttgcacatgaaatctccacttttgagaagctttttaaaaggctccagctctccagaaggaagcgctccatacgagatatcctttcctctcttccctccaaccccagcgggggtgtggggtggaggcctggggccatccccgccacggggcccagccttggggtttctttcctcacctctaacaagaaggccccgagtcagggccaggcgtctccctcacatgctggtctgggcctgggtgcaggtggactacgggggctccgccgaggagctggaggcccacttcagccgctgtggggaggtccaccgagtcacgatcctgtgtgacaagttctctggacaccccaaggggtcagtgtggggcctggtgggggcactggccatgcggacagggcccagcctcacccctcccctccctgcccctcccctcagttatgcctacatagagtttgccaccaagggctccgtgcaggccgccgtggagctggaccagagcctcttccggggccgggtcatcaaggtgcgccggtgctccccaggtccaggaacatgagcgcagaggggctggcccactggccctgggacacacagcagccccagctggctcctctctgcacagcgtgtctcaggcacggtgcttggctgggcctggacaggwtgtggcgggaccctcggacctgaagctgggtttggtctgccagtggcatggtggggaagtgtcccctctcgggcgggagccccctctgcaggggtgctggccgtgacccccccctctgcaggggtgctggccgtgacccccccctctgcaggggtgctggccgtgacggggtgtcatatgacagcta

SEQ ID NO: 681964 - DNA, 903 bp, Homo sapiens
ggattacaggtgtgagtcactgcrcccagcctgtccatcttatttgatgcattttaaagtgtcagacatctgttattcctaaacacttctgcatgcatgtcattgactagagttcgatatttgctgataatttggcttttaaataaatttacataccataaaatacacaaatcttaagctaccctcagattttgataaattcatacacttatgtgacccaaacctgtcatgatctagaccatttctatcaccccagaaaattgcctcgtgctccttccaagtcagttcctgccccaacctgcaactagttttgactgaagaaatacattatgtttgtttaatgtgtggtgtggccaggtgtggtggctcacgcctgtagccccagctacttgggaggccgaggcagggagatcgcttcagtccaggagttcgagaccagcctgggtaacatggtgagatgccgtctctacaaaaaaacaaaaacaaaaaagaaagatttagccacgcgtggtggctcacgcctgtagccccagctacttgggaggccaaggcagggggattcctttagcccaggagtggaggctaagctacttcactccagcctgggtgatcaaaaaaaaaaaaaaaaaaaagcacgtgtaccaaaacaaaacttttcaacaaaacgtagctttaaaaaatgtgggtctcagtcttccatatttatttcttgacccactaaaaatttgctaccagctgcttgcaaaacacaggtctaggtgctgatcccctatatacagatggaaaacaaatgcctcaccacgccctccccatccccccacttatgaacgtcctcacttttgaggtgttttgttttggagatggagtctcgctctgttgcccaggctgctggagtgtagtggc

SEQ ID NO: 681965 - DNA, 903 bp, Homo sapiens
ggattacaggtgtgagtcactgcgyccagcctgtccatcttatttgatgcattttaaagtgtcagacatctgttattcctaaacacttctgcatgcatgtcattgactagagttcgatatttgctgataatttggcttttaaataaatttacataccataaaatacacaaatcttaagctaccctcagattttgataaattcatacacttatgtgacccaaacctgtcatgatctagaccatttctatcaccccagaaaattgcctcgtgctccttccaagtcagttcctgccccaacctgcaactagttttgactgaagaaatacattatgtttgtttaatgtgtggtgtggccaggtgtggtggctcacgcctgtagccccagctacttgggaggccgaggcagggagatcgcttcagtccaggagttcgagaccagcctgggtaacatggtgagatgccgtctctacaaaaaaacaaaaacaaaaaagaaagatttagccacgcgtggtggctcacgcctgtagccccagctacttgggaggccaaggcagggggattcctttagcccaggagtggaggctaagctacttcactccagcctgggtgatcaaaaaaaaaaaaaaaaaaaagcacgtgtaccaaaacaaaacttttcaacaaaacgtagctttaaaaaatgtgggtctcagtcttccatatttatttcttgacccactaaaaatttgctaccagctgcttgcaaaacacaggtctaggtgctgatcccctatatacagatggaaaacaaatgcctcaccacgccctccccatccccccacttatgaacgtcctcacttttgaggtgttttgttttggagatggagtctcgctctgttgcccaggctgctggagtgtagtggc

SEQ ID NO: 681966 - DNA, 568 bp, Homo sapiens
gagcagggtggggccacgtgaccagagggttcttgctacaggatggctggtgggtctgcaggtgcagggttgtattgtgaatgagtgcaggtgggtgacagctaaggaatgctggcatcagtgtaactgatgcaggcagagggcatgcagagggaggggtgagtggatgagaattggagrgatggagtcacagccaggggacactggggatggacagatggatggaggcttcctgggtccctctctcccccacgtgacgtgccttccggcttgcatctccctcaccccaccaccggcccacaccagctgtgcccacaactctctggcacctgggcaggcaccagggaaggatcagaccctcaaagggcccagccaggcagcgggatgggggggctccaccaggcaggcccaagtgagaaggaggcccaggggagggaggcaccccacacttacccgtggttgtcaggctgcccaaaggcaaaactggtgaaggcctggtgctcccctgtggcccagcggaaggagtccttggcggtcttgtaggtgagccctgggccggggtagtcaa

SEQ ID NO: 681967 - DNA, 568 bp, Homo sapiens
gagcagggtggggccacgtgaccagagggttcttgctacaggatggctggtgggtctgcaggtgcagggttgtattgtgaatgagtgcaggtgggtgacagctaaggaatgctggcatcagtgtaactgatgcaggcagagggcatgcagagggaggggtgagtggatgagaattggagggatggagtcacagccaggggacactggggatggacagatggatggaggcttcctgggtccctctctcccccacgtgacgtgccttccggcttgcatctccctcaccccaccaccggcccacaccagctgtgcccacaactctctggcacctgggcaggcaccagggaaggatcagaccctcaaagggcccagccaggcagygggatgggggggctccaccaggcaggcccaagtgagaaggaggcccaggggagggaggcaccccacacttacccgtggttgtcaggctgcccaaaggcaaaactggtgaaggcctggtgctcccctgtggcccagcggaaggagtccttggcggtcttgtaggtgagccctgggccggggtagtcaa

SEQ ID NO: 681968 - DNA, 639 bp, Homo sapiens
agaaggaaaatcagtctctgaacgtcccagcgcatggtaccaacccaagggtaaccatcaatgacagccaaacttcacccctctgaaggaatcctccttccctccgaggccctgagctcagggcctgattagaggcactaaaatgaatcacccaagccccaggatccccagaggaggagagagaaagccagagcactatgcatcatctatatttttctgccctgtagctgtgagttgctgagaaaacagcycagggaagtccctatatcagaggggctgacggcctcacgtccctctggttcccagggaaatcatgctttggttgatcatgggattttcttggaacatgagcctaggcataaatacacagcagaaaggccatcctggaagatgtacagcattttcctggggctagcagctgagcagatctctcctctcccccgaccccagcactcagctgcacagggaggaggcccgaggctcagccgggctgagacacaggattggaattgtggctgttaaggccacacgttctctgacatgtcgtcagtgcattcttactgcctgcctcccgccagagccaaggccgcctgggggcatagcctgattggtaccccaggatctaacatgatgtttggc

SEQ ID NO: 681969 - DNA, 639 bp, Homo sapiens
agaaggaaaatcagtctctgaacgtcccagcgcatggtaccaacccaagggtaaccatcaatgacagccaaacttcacccctctgaaggaatcctccttccctccgaggccctgagctcagggcctgattagaggcactaaaatgaatcacccaagccccaggatccccagaggaggagagagaaagccagagcactatgcatcatctatatttttctgccctgtagctgtgagttgctgagaaaacagcccagggaagtccctatatcagaggggctgacggcctcacrtccctctggttcccagggaaatcatgctttggttgatcatgggattttcttggaacatgagcctaggcataaatacacagcagaaaggccatcctggaagatgtacagcattttcctggggctagcagctgagcagatctctcctctcccccgaccccagcactcagctgcacagggaggaggcccgaggctcagccgggctgagacacaggattggaattgtggctgttaaggccacacgttctctgacatgtcgtcagtgcattcttactgcctgcctcccgccagagccaaggccgcctgggggcatagcctgattggtaccccaggatctaacatgatgtttggc

SEQ ID NO: 681970 - DNA, 627 bp, Homo sapiens
caaagtttgaagacttcctagattgttctatagacctcaacaccaagaatacatatcacaaatttaatagatcatgctgtatcaaaaggtcaaatatgaagcacttagaatttttcaactatacaaatgtattctctgggttctgctatggcccggacagtgttaacttcctttttctattgtgggttttggtcccctccccaggaaattaattcagtttgatgtatccaagtcttaagtttctcaataaagaaaaatatctccattaaaaaaagatagtgagacttttcggttcttaaatgaaaaaaaaaatcattagggattcagttatcagaacaatgccaacctagtcagcgcaaactagaacagggaataaaatggttaaaaagtattttgaaaagccagctttaggcaaatcagcagggcctgatgacatacttcgaagagtacttaaggaattggcargtgttattacatagctgcaagtgattatttttgagaactcaaaaggataaagaaagtccctgtagactgaaaaagggtaaatgaagtgctcatctttttaaaaagggaaaaaggacaatcccggtaattatagacctgtcagcttaacttcaatacaaggaa

SEQ ID NO: 681971 - DNA, 618 bp, Homo sapiens
ccagatcattcccacactgttcctgcacacacagcgctatgccctgtcccctgctgtcctcttgcatgtgacaagccacagtgactttatttcctatgtgtctaaccacaaggctcttacagaaattttccctggctgccaagactcwttcaacatcataggtggcccagactagagggtaggtaacattatcatctcagaatgttcttatggtgtgttgggaccggaggtctgtacctggaggaaaaagagaaatcctgaaacatgttttagccaagtagtaagcacataacatctcttccaagcaaatataaaactatagtagacctcaatctgtcttctttattagctaggattaaatttgactaagtgacttaacagggattaaagcacacaaggtcccagcctgggcaacagagtgaaaccccatgcctacaaaaaatacaaaaattagccaggtgtggtggcacacacctgtagtcccagatgctctggaggctgaggtgggaggatcacttgagcccaggagattgaggctgcagtgagccatgatcatgccagtgtactccagcctgggtgacagagcaagtgagacctcgtctaaaaaattttttttta

SEQ ID NO: 681972 - DNA, 873 bp, Homo sapiens
tgatacagggaatgttcagattcatagaattcttcttttctgtcattctcttcaagaagaagcaacgttgacagacatagagcatctggggtcaggtgggaacctgagagacagaaaactttatgtgttaaataaaagcaggtcccttcagttcaacaaaagttggaatagcaatgatgtgagcatttaaaataaaagcagcatggaaaccatataatrtattggtatctataatattttcttccttcttttttgacaggccataatatgcatgtgtatattcagagaacatctttgtcatcatcatcatcaccatcatcaccatcattaatgtaaatctgcctgataataaaacaattttcttctccatcacacaacaaatgtttagaagtatgtgattgataactttgtgttgcagaattcttctacagaaaaggcaaactctgtcagtgttgtgtatcttaagagaagattgttgcccctgcattaagtgtgtaagcagtacacacacacacacacacatgaattttttcctaagaattaaacctagtttatttccattgtcaaccttcattattccaccatggtagcagaaacttaatctcagtctttttggggcttttctttttaatttttggcaggaaggctggatgtctgagtctcaactcaggagagctgtgcatagcttagtttagggctaggaagacagatggcccttattctccagtttgtgcacatagatccctattcacatatgccagaatattcctcccctttcagtactgaaggctttcttcaatacatgagtctcccacttggaggcactagaatactgtattgcttctgtgtcctgctgggacacaaatacttcca

SEQ ID NO: 681973 - DNA, 1542 bp, Homo sapiens
taaatatttatttttatatcatcattaatatcaaacaaatttataagccatgtaaaaatctagtttactaaaaattaatgtatgaggccaagaaaataaaagaatattatcaataatttgattataattctaattataatttttttagtggtttccaacatcgaatttacttctaaggagtaaatatttgactgcagtcagtataattcctaggcagtatgcacagaagttatgccttactttgctttaaaatattatgtgttgcacatctcttttatctgagagttctgctagattctaagaaaacagtttataattttattttctttgcttagctctccagcaacaggattgacaaytttgatgaccagcttagttgctttttccaaaatgattttattggtctttgcggaaatggtgtgtgaaattttgcctagtaaaaaatgtttcacatcagccacatttcctgttatttattattggtaccagcaagtgctagaagctgctggacacattttcttccttattttgttgcttttctaatcaacattggactttaaaatctggtgcttgatttttttccccctgcctgccttcatcaaagcctaattttgacatattgatttgactgatgtcagatgtactttctgtcctttatatgatgttagattttaaaagagacttaaatccagccaggttttcaggtaagacatagtcaccaactccaaggatggtacaagggaagataaataaatggttttgagtaacttaatttgtgcattgtatattaataatagtatgaagagagtttttaatattgtttcccaagattactttgtacaaccatctactgatgaaagtttaagatgttttcaaagagagaactctgaagataattacatgttctcaaatatttcccaagtatttacttacattatcttgaagtcattccccattgacacagggatagtgacattttagggaaattagccctctctttttcatggctggttttggctgtgtgtacaattcaaagatatttatgacatagcaccaataaataaatatgtatgaatgttcatcacttgctagatacatatgagaatcaataacaatgaaaacagcatggcttctaatagcatcttgataatatgcccaagacacctttgctaaaactattacgcttcttaaaaagttgctgtgtttacattttgttagtatagtcagcaagactctggtctccttgaagtatttaagcacttaagagtcccagtagttaatgtaaacaagaaaacccaagcaagggaaattgcatgtaattcttgatcgtaatatgtcctaggagaagatatctactgaggcctgtcaaactagggtctatttaccaccagtgctatatgcaatcttttgcttgatcttcattttagcaacttgattctaaaactttgtcttcttttgaatatttgaataactaattatcctcagccagactacttcatgatcttgttcaactacaaaatttaaattcttaaaaatcccaca

SEQ ID NO: 681974 - DNA, 632 bp, Homo sapiens
ttgttactagaaatattagcaggctactcaaagattctgtgtgtgacacaagctaaaagctattcagcatctggtcacgacaatggctgatctattgcttgtgcctattgaatagtcactgtgagaatgaaaatcagaagtgtttctggcaggaagtgtggtgagtggggttggggactatgggtgttgaagaatggggcatcaggaatatgctaggggaagattccttacaagactgtcacttcataagtagaatgtgtagggyttcactggtgaaattgatcggtgttttagaactaccaatcggaatctgtaggggacacactcatcattatctttgaacttatttaaactttcattttatcaagacagtaatgttcccaggttaaaattccttctctctttaatttactgggagccccttttttttccctcactttctacactgaaaatgagcagggttcctgatgggatgtcaggcaaccaggaagtactggaaagaaagatacacactaaggatgtaaagaaaatagaaggaacatagctcttgttgacatcattgcagcaccatatcagctctagacttttcactctaggattttttgtcacacgcaataaataaattccttatt

SEQ ID NO: 681975 - DNA, 684 bp, Homo sapiens
ggccgagatgcaccactgcactccagcctgggcaacagagtgagactctgtcaaaaaaaaaaaggagaaagaaagaaaaaaaaaaaaagaaagcagctaaatgcctgatacatagcaagcactcagcaaagattcatttttactattgatgtaataaaatatactcagaagtagatttaaaaagttatgggagcatagaattttctgtcatttcagtatatgtatacagagtatccatcttctacaatatgatggcaatttttctaggcactgtggatggaatcataactgagatccatgtcctctttcacctcaatgttcatcttactggaaatataatttcaaaaaagagtagcagggagaataattataaaggtggaaaggatgtcatgctctacaaatgaatgagtgatgtcagcaagatggtggaagagggggtcctaatgctcagtacccaataaaaatgatcaaactccctaccaatgggaatccctctggaagagctccagtgtatacaacagtgaaactgcagcaaccaaatagagcacaaagaccaaagaagccacacagaaaaatgtagaaagcrtttagtctgcatcatcttctgggtgccaagaagacacatcacaactgtgacttctttgtgcggggtaagaggagagcaggaagaccccagaagccttc

SEQ ID NO: 681976 - DNA, 1347 bp, Homo sapiens
tacagacgtactatgtccctactctgcatgggttttgtcatgaccaatgggaagcaggaccattggaagaaatcaggaagtcccacttcactatctgcctcactgatagcatgggaagtctcaagatccagaagaaaacacggggcagcatgcgaaatagattctttcctttaggttgtatcctagatttcctgtctcctatttggtcctgctttctactaaagtgacattttctctttccaaggggcctcactcctgaaaatgcagaagcaacagcaataacaattgggaaccctttctacagatattagtaagactggtaatcctaactactgtctcactgggtgagaatattaaccaagtattgcttctcggccttttggctaagatcacgtgagaatattagccaagttaaatattctctcttggtgaaacaagcaaaagttacattttttaaatagtatacacacagacattttttaaagtacacacacacacaagtggcagaatttggccagcacccatggagggggtatgtgggccagcactagccagggaggaatcatccatcccactgtgtgtatgtgtgtgtgtgtgtgtgtgtgtgtgtgtatgtgtgtgtactttttaaagtggccgggtgcagtggctcatacctgtaatcccagcactttgggaggctgaggcaggctgatcacgaggtcaagagatcgagaccatcctgggcaacatggtgaaggctcgcctctactaaaaatacaaaaattagttgggcacggtggtgcacagctgtagtcccagctacatgggaggatgagacagaagaatcgcttgaacccaggaagtggaggttgcagggagccgagattgtgccactgaactccagcctggtgacagagtgagactccacctcaaaaataaataaataaataaataacttttaacttttgcttgtttccctagagaatatacacatayacattataatatatatacttatataacctctctaattttataaatacaaaagcaagataacaacatttaagaaaatcacccagagtcatatcgttggaaagtggtgaaatcatattcaaatcaaggtcattgcaatactacagcttgtgatcctttgctaccctatgctatttctcccatgccaaacaacttcttgtcctgaaaaactgtcagcattgcactacttacccattccaatcttcccaggattatatttctagctgtgaaggactgagtacaacaaacgctttaaaagaatgactactaatatattaatatgcaatccttccagaaaatcattatgtctttactttggagttaaatttgtca

SEQ ID NO: 681977 - DNA, 1491 bp, Homo sapiens
ataatcttaatttcagtatgtaattgtttgtttctgccttaactaagcattgtgaaatgtatctgtatttctctgggtggttttatatcattgatttctcattgccacactttttattatgacagttgatacactcatgggtctattacattaaattctcattcaaaatgaaatattgggcaaatttatttacttcttrtacattgttgtacctttcttatgtatgcatatctaacccacacagtacagggtaaaatgccttttatgatccttatgctcttgaagatttaagatatctacattctggatacaaagttaacttagagccacgctcccttctttccaggcaagccatcttctggcaaaagatagttttatattttgatattactttccctatttactttgcagaattgttaggagaagcaacaattattatggatcataaaatacttttacagttgaaccgtgtttcactccattgtcagatgagtgaatagaataaagggaaatataaattgcttgtgcatggaaattcatttggttgatggtgaaaataagatctcttaaattcatagaaggcaagtgtattttcctctcctttgtcattcattcatttcagcatagtgctaggcatgccattgactagatcatttcaaatgactaaactgaaatccagtaactttgggttgatagatgtggtaggctaaagaatggccacctaaagatgactgcctgctaggtgccagagcctgtgaagaggtcatgttacgtggcatgatgaattaagattgtagatggaattaaggttgctaattagctgaatttgagatgggaggattatcccggactgttcaagtagtccctatgtaatcacagtggcctttatgaatggaagagtcttcactgatagcctctgaaagcagaagaggaggtcagagtcagagatttgaatatgttatgtttctggctttgaagatagaggaagagggaaaaattaatttttcccctagggtcactaaaaggaacacgtaccaactgccgccccgattttagcccagtgagaccccactttggatttctgactaccataactgagagattgtaagttgtgttgttttaagccagtaactttgtggtaatttgttatagcaagaatagaaaactaacacaaaatgtgtggataattgattaacaaaaagtccttttcctggatccaagagaaaatacgagtgaaggggtggacaagagataaatcttcttctttctcagaatctgattactattttaccttcttccacaaagcaagtagcagatgattctttagcaattttttgccttaatttctgaataagatggcatttttataaatcaatgcaaatctacttctgtcttagcaggaaaaatgtatgcattgcttgaaagtcaaatgtggacataggcaaaaggaagtttcttgtttgtttgtccttgccccaaagaagcattttc

SEQ ID NO: 681978 - DNA, 558 bp, Homo sapiens
  misc_feature 286, 287, 288, 289, 290, 291, 292, 293, 294, 295, 296, 297,298, 299, 300, 301, 302, 303, 304, 305, 306, 307, 308, 309,310, 311, 312, 313, 314, 315, 316, 317, 318, 319, 320, 321,322, 323, 324, 325, 326, 327, 328, 329, 330, 331, 332: n = A,T,C or G
  misc_feature 333, 334, 335, 336, 337, 338, 339, 340, 341, 342, 343, 344,345, 346, 347, 348, 349, 350, 351, 352, 353, 354, 355, 356,357, 358, 359, 360, 361, 362, 363, 364, 365, 366, 367, 368,369, 370, 371, 372, 373, 374, 375, 376, 377, 378, 379: n = A,T,C or G
  misc_feature 380, 381, 382, 383, 384, 385: n = A,T,C or G
cattggcccacagccttttcctagctccctagtctggtctaaaatgttaacattctccaatctgatagtagtttgccwgctcagagagaatagtcataccttggtttcattataattcaaggtagaatagttcccaaatctagatcatttatttaaagtactggttctctggcctcacctcttaggcattctgattcagcatgtctaagagaaagcttgacaatctatttttttaaattaaaagaaaaactgcagttgattcaaatatagctcacccatagatcannnnnnnnnnnnnnnnnnnnnnnnnnnnnnnnnnnnnnnnnnnnnnnnnnnnnnnnnnnnnnnnnnnnnnnnnnnnnnnnnnnnnnnnnnnnnnnnnnnnacaatcagcgtgaactgtttcaggtataccatctaaacaaccaaagtccaacttactcagccaacttgagagtttattctaagcttttttctgaatttttttttcatagaaattactgggggtttttttgttttgttttgtttttgtttttgttttttttttatgagaccagg

SEQ ID NO: 681979 - DNA, 558 bp, Homo sapiens
  misc_feature 286, 287, 288, 289, 290, 291, 292, 293, 294, 295, 296, 297,298, 299, 300, 301, 302, 303, 304, 305, 306, 307, 308, 309,310, 311, 312, 313, 314, 315, 316, 317, 318, 319, 320, 321,322, 323, 324, 325, 326, 327, 328, 329, 330, 331, 332: n = A,T,C or G
  misc_feature 333, 334, 335, 336, 337, 338, 339, 340, 341, 342, 343, 344,345, 346, 347, 348, 349, 350, 351, 352, 353, 354, 355, 356,357, 358, 359, 360, 361, 362, 363, 364, 365, 366, 367, 368,369, 370, 371, 372, 373, 374, 375, 376, 377, 378, 379: n = A,T,C or G
  misc_feature 380, 381, 382, 383, 384, 385: n = A,T,C or G
cattggcccacagccttttcctagctccctagtctggtctaaaatgttaacattctccaatctgatagtagtttgccagctcagagagaatagtcataccttggtttcattataattcaaggtagaatagttcccaaatctagatcatttatttaaagtactggttctctggcctcacctcttaggcattctgattcagcatgtctaagagaaagcttgacaatctatttttttaaattaaaaraaaaactgcagttgattcaaatatagctcacccatagatcannnnnnnnnnnnnnnnnnnnnnnnnnnnnnnnnnnnnnnnnnnnnnnnnnnnnnnnnnnnnnnnnnnnnnnnnnnnnnnnnnnnnnnnnnnnnnnnnnnnacaatcagcgtgaactgtttcaggtataccatctaaacaaccaaagtccaacttactcagccaacttgagagtttattctaagcttttttctgaatttttttttcatagaaattactgggggtttttttgttttgttttgtttttgtttttgttttttttttatgagaccagg

SEQ ID NO: 681980 - DNA, 558 bp, Homo sapiens
  misc_feature 286, 287, 288, 289, 290, 291, 292, 293, 294, 295, 296, 297,298, 299, 300, 301, 302, 303, 304, 305, 306, 307, 308, 309,310, 311, 312, 313, 314, 315, 316, 317, 318, 319, 320, 321,322, 323, 324, 325, 326, 327, 328, 329, 330, 331, 332: n = A,T,C or G
  misc_feature 333, 334, 335, 336, 337, 338, 339, 340, 341, 342, 343, 344,345, 346, 347, 348, 349, 350, 351, 352, 353, 354, 355, 356,357, 358, 359, 360, 361, 362, 363, 364, 365, 366, 367, 368,369, 370, 371, 372, 373, 374, 375, 376, 377, 378, 379: n = A,T,C or G
  misc_feature 380, 381, 382, 383, 384, 385: n = A,T,C or G
cattggcccacagccttttcctagctccctagtctggtctaaaatgttaacattctccaatctgatagtagtttgccagctcagagagaatagtcataccttggtttcattataattcaaggtagaatagttcccaaatctagatcatttatttaaagtactggttctctggcctcacctcttaggcattctgattcagcatgtctaagagaaagcttgacaatctatttttttaaattaaaagaaaaactgcagttgattcaaatatagctcacccatagatcannnnnnnnnnnnnnnnnnnnnnnnnnnnnnnnnnnnnnnnnnnnnnnnnnnnnnnnnnnnnnnnnnnnnnnnnnnnnnnnnnnnnnnnnnnnnnnnnnnnacaatcagcgtgaactgtttcaggtataccatctaaacaaccaaagtccaacttactcagccaacttgagagtttattctaagcttttttctgaatttttttttcatagaaattactggggktttttttgttttgttttgtttttgtttttgttttttttttatgagaccagg

SEQ ID NO: 681981 - DNA, 1401 bp, Homo sapiens
gatccttgtcggtgtcgagtttacacgttcttcccatgtctacgtgggtttttttccaggyactgtggtttcctcccacatcccagagctgtgcccatttggtgaaccggcatgtctaaatggtcccaggatcagtgattgtgggtatgtgtgagtgcaacctatgatgggagggcatcctgtccggggctggttcccactttgtgattgacagctgggtatttacactcagctgtaaatgggcaaatcaatccctgagcttctgggataggctacagtgatccatgacttggctggcataattgggtacataattctctcacttgtttttattaatctttcttacacgtatgtatatatcacatttatttcactatttaatattagacgtgttttgggtcttgatttagaaatttagtgatgtttttgtgaccagaaatatgccataggagctcaactcttatttatgtcaattaggctatggtaaaactggttttcttatgcattattttgcctaaagatccagtttccaagaacctatcaatgacattaagtgaggacttactattaatatatatgtctcagtcagcacacactaggttctgctagcagtaacaaacaacccccaaacgtcttttaaacagacttacatcttatttctgattcatgtccattacaagttgactggggacactgctccacttctccttactccagctgatggggtcactggtggaggagaagagttctgagtggtttcctacagacaggtaaagcctacctgggaaaagactcacatcacatctgctcatatttccatgaccagagccagccacatgacttcatacaaccctaggaaggcaaggtaatgcaatataaccacattcccagaagccaacaagccagacattttggtgaatatcattaataactactacagacacttgcagaaaaaagaacaaagcagcagctaacccacaaaaaaccctattaagtataagaataccatatgtgatggcatcatgtcagaggaagaatgcagaattaggtaataaaaaccactgaaaaaactggttaaatacttagtgaaaaaaattggtttcttactttggcccataataaagttcagatgctaactaaacaaacaaacaaacaaaaacctttaagaaggtaggagaaactctatatatgtatctatttgtatatacactatataatcaattatatttatataagtaaacacctctctctatgtgtgcatatatacagatcatatttatatgtgattaagaaacagaaggaatgactaaccttaaaagtaatgtaataaatatcaaaagaaaaaaaaggatttgatcagacatattaaaatttctcaacataaccacacaggtgtatgtg

SEQ ID NO: 681982 - DNA, 604 bp, Homo sapiens
tcattttctatacagatatttggtattgcatagacataaaagggcagagaaagccaaccatgtgatatagaaggaacatggcagctcagatcaactacacgttaggtgaggtcatgatttttgaaatcacattatcttggcaattaagcacttaatgtgaaacgtgttattttctgaagacttggaagccagcagcttgagctcaaagcctagattgtcaatactgctctattacactgggcaagcttctctctcatagactaagttctataaaatgaaacaaatcataaccactttttaggtagaaaatatagttaaattgcaaagtccacaggtgcaaagattttgtcttgctgacgctaaatctccaattgctaactcagtgttctttaataacaagcactcagtagatgtttggtaaagggatgaatgaagggtaaattatacataatttaaaagtgctcaaccttgtggttagaaccttttgcgtattccatcaacattaagcccctttcccaaattattatggtgttagataagtkattccaggatgatctgaaaatgtttaactcatgagctgtagcctgctgagggcaggaacctg

SEQ ID NO: 681983 - DNA, 604 bp, Homo sapiens
tcattttctatacagatatttggtattgcatagacataaaagggcagagaaagccaaccatgtgatatagaaggaacatggcagctcagatcaactacacgttaggtgaggtcatgatttttgaaatcacattatcttggcaattaagcacttaatgtgaaacgtgttattttctgaagacttggaagccagcagcttgagctcaaagcctagattgtcaatactgctctattacactgggcaagcttctctctcatagactaagttctataaaatgaaacaaatcataaccactttttaggtagaaaatatagttaaattgcaaagtccacaggtgcaaagattttgtcttgctgacgctaaatctccaattgctaactcagtgttctttaataacaagcactcagtagatgtttggtaaagggatgaatgaagggtaaattatacataatttaaaagtgctcaaccttgtggttagaaccttttgcgtattccatcaacattaagcccctttcccaaattattatggtgttagataagtgattccaggatgatctgaaaatgtttaactcatgagctgtarcctgctgagggcaggaacctg

SEQ ID NO: 681984 - DNA, 620 bp, Homo sapiens
tccccattttaccaaggaagaaattgaggcacagagtggttaagccactggttaagcaactgtgcccaaggtcacacggccagtaccagtggccatactgggatttgaaccagacccttagctaccaccccatgtgccccctccccaactgtactcctgaattctcttttcctctccctctagaatccacagtatgaatttaaggaggctgcagggagttttacatccagcctggcacaaccaggagcctattatccctatgagcggactctggggcagtaccaatatgaacggtaaggagtgaagggccttggtgactggcactgtgagtctttcctcccccactgccaaggtagggtggatggcggcaggggagagggagggagctgaaccacacttccacgccacagactgtcctctgcctgcagttccttgttcctcttctataatgtgagccaggttctccccyacaggtatggcgcagtggaattgagtggcgccggtcgccgaaagaacgcgacccgggagaccaccagtacactcaaggcctggctcaacgagcaccgcaaaaacccctaccccactaagggtgagaagatcatgctggccatcatcaccaa

SEQ ID NO: 681985 - DNA, 657 bp, Homo sapiens
aaagcctttggaaaccccaagtttgccctgcagggactaccgctgaactgtgcgccgtgcccgcggaggagcgagcctgtagtgcagtgccagtacccgtctggagcagaaggtagtgggcccccarcggcgctgggagtatctatgcaaaagacacccacctaccgccccgcccggcaattgcacaccctctgccattccagtctgcccaggtctcccacagacctgacgggagattgctttacagcgctctttcagacggaagcgtagagataggttctagtactcccttatttaaaagtcaaataataataaactcacaggcagactgtaatttacctagaatcacttagaaagccgttcgagagatggacaaccaggatctctgcattcgtgtggtccagtgtactgccaaatccaccaggtgtgcatcaccatgctcctctagcacaatcgcccttgtcccctgcctgcctttcagaggagactcgctggtcccctgctgtgctgctcagagggtttactagggttgggcaggcaccagggcttttagagaagtctaagactgtgggccagacgcacaccacagatttaaggtcagtgcttaagtccagcttgcagccctgtctgtgtcccaccaaaacccctggaaagttg

SEQ ID NO: 681986 - DNA, 657 bp, Homo sapiens
aaagcctttggaaaccccaagtttgccctgcagggactaccgctgaactgtgcgccgtgcccgcggaggagcgagcctgtagtgcagtgccagtacccgtctggagcagaaggtagtgggcccccaacggcgctgggagtatctatgcaaaagacacccacctaccgccccgcccggcaattgcacaccctctgccattccagtctgcccaggtctcccacagamctgacgggagattgctttacagcgctctttcagacggaagcgtagagataggttctagtactcccttatttaaaagtcaaataataataaactcacaggcagactgtaatttacctagaatcacttagaaagccgttcgagagatggacaaccaggatctctgcattcgtgtggtccagtgtactgccaaatccaccaggtgtgcatcaccatgctcctctagcacaatcgcccttgtcccctgcctgcctttcagaggagactcgctggtcccctgctgtgctgctcagagggtttactagggttgggcaggcaccagggcttttagagaagtctaagactgtgggccagacgcacaccacagatttaaggtcagtgcttaagtccagcttgcagccctgtctgtgtcccaccaaaacccctggaaagttg

SEQ ID NO: 681987 - DNA, 558 bp, Homo sapiens
tcatgtcatgtgtggatgaggccgtgctgttccgagggctattaggacgctgcggtcatgttgtgtgtggatgagtccgtgctcttctgagggctattaggacgctgcggtcatgttgtgtgtggatgagtccgtgctgttccgagggctattaggacgctgcggtcatgccgtgtgtggatgagtccgtgctgttctgagggctattaggacgctgaggtcatgctgtgtgtgggtgagtccgtgctgttctaagggttattaggacactgtggtcatgttttgtgtagatgaggccgtgctgttccgagggttattaggatgctgtggtcatgycgtgtgtggatgagtccatgctgttctgagggctatggagcagggcacctctggttctgtggaatcgctgccttgatactccatggggaatcccagatcaatgaacacagacagccccctgcttctcaggctcttccaggccgctggcccgggagggttcacttcctgaggctgcatcttccaccagtcgtctgctgccatttacttcttgaggatggtgtt

SEQ ID NO: 681988 - DNA, 3067 bp, Homo sapiens
ttaatgatctcagcattttttatttttgaggtcaaccattattctgaatgttttcttcaacaatctatcatctctcataatgtatttggaacagattttagtttagatgcaacttttaaagaattcatctactacatctgggttacgaggtcagtttaaaaagaatgaactggaggactttatctccttgggtagaggagtcatgagggactactgaatgagaaagtaattatagtcagtgacacttgtttaccagttttgcttggtgccaagaaacttgtctgagcacgaggctgtttcagaatgacatcaatatagggataacccctgggttttaaaggaagtctctgagattactttctatcatgagtaaaggagccccactgatggtcgtcttagttgtcacctagactgttctatgaaacagggcttatttggggtaagcattttgaggttttgattggctactgtccattttgatcttgtctcagcccactccttggtggataagcaggagagaaggtaatgccttatgacagatctgctgacaggaactgaaatacattaacactctgtcactcagatctttagagggctgcctttgcctgaaatatatttgactttacttgctaacaaaggcatcttcagatttatttcttttccttaaatgttagagaagaggaagagcgtcccattgaaagatactgggaagagaaaagcctggctcgacagcccaagcaaatgatagttagcattcttgggagcagcagaattgctgatcgtgcgagattactagtaggagccagatgagtgtagacagagaactgctgtacttaggaaatttttgaggttcttatcctaagcagtttttgccctatgtggatgttgcagctctggcttaggatgctccagtgagaaaatgaagagagagaaacaagactatctcagcttcaaagtttaatggccatttaagattaacatttcaagtaaagcagctgcttttcttcatgcttttcaaggatcctgccctactcaaaaacttgtgtgtacttaatcttagcatagacaatctcagatgggctggtgaaacctgatacatctcttataacaagagtgacatgacacagtgaaagaatttccaccattgaaattttaataaaatgaaatgattaatatttattcgacacctgctttgtgctattgctagacaaggtgatgtggggatacagaataaacttaaagcaagactycttcttctcaggaatttagtagggatcaattaattaggaaaccggaattcctcacacctacaaatccaagaacagtaaaggacactttataattgagtactgaatgtgatggtttagaagattttcactataagagctgaggagagagacacagaaggctggaggattcaagagagaccttaggcaagaagtgggccctgagtcactgtaggatgtgtagaaacgaagaaggcagaggagaaaagtgacctgaacaacagtcacaatgtaagcaaagacacaaaaggtaaaactgaccatcgcgtgttcttgagacagtgagagtctaaatgagtgaaggaatgaaaggagaatgagaaataaggttaacgggggcacaaaactctaccagggaggtctcaaactgaacacaccagtttacttttgaagtgaaaatgatacagaatggtgaaagtttttagagaaggtgcatgttcaaatggatgcacttttaaggagcactgggccttggcagttcagacaggattaggaggcagagagcctggggtcccagaggcagctaaggcagggatccactagttccgctctgaaggggagacagaaagttttatgtgtttctctccagaccaaagttttgggtgatgacatcatggctgcctgagattcagtgagccacaacggtgtgctgagcttagcatttgtcatcagtcttttgaattattgtcctagttgaccacactaccccaacagtctgactttctcggataaatattgcacttctgaatctctgtgagggtgttccctgctgagccctcaaaggcatgaccaaatggggttcatcctcacctctgtgtccacaggagcagccatcttggctttagcacactcacgtttgtttaaagatgaagctgtacatttctcattcattgcttttttagacacacaggagctctgtcagttaaagtcctgctttggggaaaaggcagcatgcagccagttcattaacaggttatctatgtcattatgtcctttttggattgtgcatattggaaatacagtcttttgaggaggaaaaaaaaagccatctaggcttctagtttccctttctttttcttcttcatttttatctccttttttcccctttatagttacagctattcccctgatggatggtcatatctgtagagtccagaataccctgagtattcacttgcaaatagctacaaagtcaaatacagataactacacttaaatgagagctattctctacctctcctcactgcacacacactacttctctttgccccatttcaaccacaggagcttaattgcttcttccttttttttccacaaacatttcggaatttgttgtccccttggtcatttcaaggtcaaggctgcctatcaggcactcgcagaagtgctccggtgaccttgcttgctgtgtttgcccatggcttctgacgctttaccagagtgagcagcctgcccgagcagagagtaggctggcctgccagttaatttcttgcctcgtgaagaggaggagtacacttttcttccagcctttcaaaatgttgctttagagccaaaagaaatcttcaacacatagtaggcacttacttgctaaatgaataaaatgaaaattgccaacagctatgttaaagtgtggcctctagcttacgtgtttaggggtagggtacgtaaaagcaaacctctgttgtttgccaaggaaaggagtatcaaatatttgtgtttgtaaaaaataaactgtttatttcagagaagttatagatttatcaaaattgcaaagacagtac

SEQ ID NO: 681989 - DNA, 1056 bp, Homo sapiens
tgcagcacaccaccacggcccgtgtatactgatgtaataaacctgcatgttctgcacatgtagcccagcacttaaagtatgataataaaaaaattaaaaaaactttcttgtactgtcttcttattgaatatcaataatatcatcaatgaattaatttaaaagtcaataatacaaaacaccaattgcagcaacaataaataattgtattggctgacaatttaaccttttccatgagctatgcattcttctgagcatttggcatatataaacttttaatcctcacaaccaccctgcgtggtaggtactattattacttccatttgataggcgaaatacagaggcacagaaggctgggaactggatggtggtcagccaactagcaaggtagaacctgaaatgaacccagacccgctgttctgcagtctattttcctagtcattacactgtctctctaaagcatgtgaagcatttttcaggtttcctatttcctctttaattccattgcctcttctttgggctgaagactgagacagagctagtgcttttcacatgtgcactaccactttatgctctgtggcctttgccacgttattaactttcctgaacctctgtttcttcatctgaaaggcagagaatctaattcaacagaattgttgygactgactagatgagctgtgaccataaagtcccttgcacagagactatgtattaatactttactgagtattttctttccagtctaggtccttgttactttgtgtcaaggtcactgcaacagactcctatctgattatggtagagtgagttgggtaggagaaatgaggactggctgcttgctacagaatttgtaggacaactggttaggtgggcagcatctgtatttggccagaagggcaactgatatgtactggaaaggatgagtgaagggattcacttgatcaaaaaacaagagtgcaaggcctatacagagacaccatgcaagatactgcagacaggtgtgtggaaaatgacataataacttctggaagctaagagttcagagcagtgatttctccc

SEQ ID NO: 681990 - DNA, 1040 bp, Homo sapiens
tacctatctatccttcattatatatcacatataatttagtattttattatacattcttttcttccctaattgtttcatgtcttgtgaaccagattataatttgytcccattattagctttcttagagaattgctatgatcttttccacaagcccagagagatttttttgaacctaaggaaggaaatcagagggataactaatggttttcaagttcataacaatggtttttcattgctactgatgctgaaaacaggggtaactgttcttttgtgacagtaggaatgctacaaattaaatatcaggaagaatatatttttaattaaaaggaaacactattaaagattattaagagtttcaaattgctctactttaaggatctttttaaccacaagatagactaaccaagatctggaatttccttgaggaacatgatcttatcattctaggttttcatgaacatcaaggctgacacataatctgagccatgcattggtagtcctagtggctgcgtcccttcatcactttcattctctctgttggtctgactacacaaaggtctaggaggctatttccatgatgcatgttctcatctcttgacaaactcagagatgatccttttggaaattaggctattgaagcaatttcaccaattggaaccaccatcaggctcaaacgttactttgcttagcccctaacagaagctctacctgtaagctgcagtgcaggtgtccttgtactcctggagcttcacgcacaccatgttgaggaattgatctgaatatgcactcaagtcatgcatcaggttcaggaggtcttgaactgtcttctccacaatgattgtgctctggaaatgaacaacaaagagaggatatgagatttctgtagtcaatgtgttggacaaggaaggacaactccaagtatgtcataatttaaggtacctgagctctcctgcaagaatgtgacattttgaaatatgaactcaaaacagggggaggagccaagatggccgaataggaacagctctggtctacagctccca

SEQ ID NO: 681991 - DNA, 1040 bp, Homo sapiens
tacctatctatccttcattatatatcacatataatttagtattttattatacattcttttcttccctaattgtttcatgtcttgtgaaccagattataatttgttcccattattagctttcttagagaattgctatgatcttttccacaagcccagagagatttttttgaacctaaggaaggaaatcagagggataactaatggttttcaagttcataacaatggtttttcattgctactgatgctgaaaacaggggtaactgttcttttgtgacagtaggaatgctacaaattaaatatcaggaagaatatatttttaattaaaaggaaacactattaaagattattaagagtttcaaattgctctactttaaggatctttttaaccacaagatagactaaccaagatctggaatttccttgaggaacatgatcttatcattctaggttttcatgaacatcaaggytgacacataatctgagccatgcattggtagtcctagtggctgcgtcccttcatcactttcattctctctgttggtctgactacacaaaggtctaggaggctatttccatgatgcatgttctcatctcttgacaaactcagagatgatccttttggaaattaggctattgaagcaatttcaccaattggaaccaccatcaggctcaaacgttactttgcttagcccctaacagaagctctacctgtaagctgcagtgcaggtgtccttgtactcctggagcttcacgcacaccatgttgaggaattgatctgaatatgcactcaagtcatgcatcaggttcaggaggtcttgaactgtcttctccacaatgattgtgctctggaaatgaacaacaaagagaggatatgagatttctgtagtcaatgtgttggacaaggaaggacaactccaagtatgtcataatttaaggtacctgagctctcctgcaagaatgtgacattttgaaatatgaactcaaaacagggggaggagccaagatggccgaataggaacagctctggtctacagctccca

SEQ ID NO: 681992 - DNA, 1040 bp, Homo sapiens
tacctatctatccttcattatatatcacatataatttagtattttattatacattcttttcttccctaattgtttcatgtcttgtgaaccagattataatttgttcccattattagctttcttagagaattgctatgatcttttccacaagcccagagagatttttttgaacctaaggaaggaaatcagagggataactaatggttttcaagttcataacaatggtttttcattgctactgatgctgaaaacaggggtaactgttcttttgtgacagtaggaatgctacaaattaaatatcaggaagaatatatttttaattaaaaggaaacactattaaagattattaagagtttcaaattgctctactttaaggatctttttaaccacaagatagactaaccaagatctggaatttccttgaggaacatgatcttatcattctaggttttcatgaacatcaaggctgacacataatctgagccaygcattggtagtcctagtggctgcgtcccttcatcactttcattctctctgttggtctgactacacaaaggtctaggaggctatttccatgatgcatgttctcatctcttgacaaactcagagatgatccttttggaaattaggctattgaagcaatttcaccaattggaaccaccatcaggctcaaacgttactttgcttagcccctaacagaagctctacctgtaagctgcagtgcaggtgtccttgtactcctggagcttcacgcacaccatgttgaggaattgatctgaatatgcactcaagtcatgcatcaggttcaggaggtcttgaactgtcttctccacaatgattgtgctctggaaatgaacaacaaagagaggatatgagatttctgtagtcaatgtgttggacaaggaaggacaactccaagtatgtcataatttaaggtacctgagctctcctgcaagaatgtgacattttgaaatatgaactcaaaacagggggaggagccaagatggccgaataggaacagctctggtctacagctccca

SEQ ID NO: 681993 - DNA, 1040 bp, Homo sapiens
tacctatctatccttcattatatatcacatataatttagtattttattatacattcttttcttccctaattgtttcatgtcttgtgaaccagattataatttgttcccattattagctttcttagagaattgctatgatcttttccacaagcccagagagatttttttgaacctaaggaaggaaatcagagggataactaatggttttcaagttcataacaatggtttttcattgctactgatgctgaaaacaggggtaactgttcttttgtgacagtaggaatgctacaaattaaatatcaggaagaatatatttttaattaaaaggaaacactattaaagattattaagagtttcaaattgctctactttaaggatctttttaaccacaagatagactaaccaagatctggaatttccttgaggaacatgatcttatcattctaggttttcatgaacatcaaggctgacacataatctgagccatgcattggtagtcctagtggctgcgtcccttcatcactttcattctctctgttggtctgactacacaaaggtctaggaggctatttccatgatgcatgttctcatctcttgacaaactcagagatgatccttttggaaattaggctattgaagcaatttcaccaaytggaaccaccatcaggctcaaacgttactttgcttagcccctaacagaagctctacctgtaagctgcagtgcaggtgtccttgtactcctggagcttcacgcacaccatgttgaggaattgatctgaatatgcactcaagtcatgcatcaggttcaggaggtcttgaactgtcttctccacaatgattgtgctctggaaatgaacaacaaagagaggatatgagatttctgtagtcaatgtgttggacaaggaaggacaactccaagtatgtcataatttaaggtacctgagctctcctgcaagaatgtgacattttgaaatatgaactcaaaacagggggaggagccaagatggccgaataggaacagctctggtctacagctccca

SEQ ID NO: 681994 - DNA, 1040 bp, Homo sapiens
tacctatctatccttcattatatatcacatataatttagtattttattatacattcttttcttccctaattgtttcatgtcttgtgaaccagattataatttgttcccattattagctttcttagagaattgctatgatcttttccacaagcccagagagatttttttgaacctaaggaaggaaatcagagggataactaatggttttcaagttcataacaatggtttttcattgctactgatgctgaaaacaggggtaactgttcttttgtgacagtaggaatgctacaaattaaatatcaggaagaatatatttttaattaaaaggaaacactattaaagattattaagagtttcaaattgctctactttaaggatctttttaaccacaagatagactaaccaagatctggaatttccttgaggaacatgatcttatcattctaggttttcatgaacatcaaggctgacacataatctgagccatgcattggtagtcctagtggctgcgtcccttcatcactttcattctctctgttggtctgactacacaaaggtctaggaggctatttccatgatgcatgttctcatctcttgacaaactcagagatgatccttttggaaattaggctattgaagcaatttcaccaattggaaccaccatcaggctcaaacgttactttgcttagcccctaacagaagctctacctgtaagctgcagtgcaggtgtccttgtactcctggagcttyacgcacaccatgttgaggaattgatctgaatatgcactcaagtcatgcatcaggttcaggaggtcttgaactgtcttctccacaatgattgtgctctggaaatgaacaacaaagagaggatatgagatttctgtagtcaatgtgttggacaaggaaggacaactccaagtatgtcataatttaaggtacctgagctctcctgcaagaatgtgacattttgaaatatgaactcaaaacagggggaggagccaagatggccgaataggaacagctctggtctacagctccca

SEQ ID NO: 681995 - DNA, 2950 bp, Homo sapiens
tttctttaaaaccagacataattcatcttccaagagagagcttaaaacagaaaaagaacacaaatttatttggcatctccaagtagatgccataagatattcacccttaaaaacaagaagttatcaaaagagagaaaagaaaattgtaagaaatgtctcttcaaatttaaaatgtttgctgcaattgagtattgaataaaagttttagaaaaatctacaattgatgtcatctctttaaaagcaataaaatgactattaaattatgggaaaatagatgatgagataaaaagcaataattagaaagttaatatcccatttatagccattatagtagagaagtaaagtgaaagtcagaaagaaaaataatttgagaaaattaatctaaagtacaacacagagcttctaaaatgattctcctagaaagcaatcaatcagaaaaacaatgagtgacaaaaaaacggattttatgtgtttcaaattttgtatcctatttcagaatatcatgggtaaaaagatgattacaatatctcccatactgagggaaaagaaaacaaaacctaagctaatgagaacaacaagcatgaatgagcagcaatgaaacagcaatgaaattcctgtcaactaaaaggaatgagaatcagatggatatgaggcttttgagtatcaatcctaggtgctagaaaataatgaaagcatgcttcaaacttccgacaggcaaaggttttcaacttacttacttcctagtcaagctatttctcaagtatgaagaaacaaaaagacattttcatgcattgtgggttctgccaatcttagcaagaacatgaacctcaaaattccttctcatgaacttgatatttgacaaaaaaaaaaaaaaaaaaaagaaagaaaaaaaggagtctctcaagaagcatattctagtgttaggattcaaagacctcctttccttttcaggaaaggtagaggaaaaactgttgtacattcacagagttcttgacattatgggagacatagtcagtatatggtctctgtcaaaaagcaaacacagactgtctccccctgcaagatttgggcagtcctaatgtatcacaaaattgccttcatcctcattgcttagaagaagtctgattctacttctggtctgatatattaygctggaagaaacttacttacttactaaaataatctggggatgcttcagttagatcagggggtgcaacaaaggtggagtggagaaatctgccgctttgtatccagaaatgctcatgtgtcagggaaacagaatcaatgaggtttcataaaccacatgggggaaatgtgatgttaaaatatgaaatagtattttcaagacaatatgaagtacttgaagtaatatttcttaaatatatatgttatatataaatgtgtgtgtatatatatatatgtatatatatatgtatatatatatatatacatatatatatatacatatatatatatatatgaagaaagagaattcagagtgaaatttatcatcagtcttttccttggcttttaaaaaccatatatataacaatgagtaatgaatagacagactgaaaaaaaatcagcataatacaatccttgtatatatttgtaatataactcgttagactagaaaatcaaattttaggctgtcagctttcattgtcttgaaaggagtacttgttttagtgcagacactatttctctaaatatatcatatgtgtgtgccctcttcatgtctcttttacttaagaaatcacatttcttactaaaccaagacaatatgtttctttaaaaggattctctcttcaaagttttgtaagttttcacaaggaaacaaaatttaaatatatccactcaatacaaggtatcaaacattttaaaaataatgccacagtgaaaacaacaaaaaggaggtaagttggagatgcaaataaaaagttaagtctctcaataatgcatgcttgtatccacatactcaaatcacatacacaaatatacacactgacacacagttttctatacttatggatatctgattgataaaatagaaaaaatggctgggcacggtggctcatgcctgtcatcccagcactttggaaggccaaggtgggtagatcacccgagatcaggagatagatagagacaagcctggccaacatggtgaaaccctgtctctactaaaaatacgaaaattagttgggtgtggtggtgggtgccagtaatacttcggaggctgtggccggagaatcacttgaacctggcaggtggaggttgcagtgagccgagatcgcaccattgcactccagcctgggcaacagcaagactccgtctcaaaaaatataaaataaaataaaataaaataaataaaaaataaattttgcataggaaataaaacaagtttttggagcagataactttaccatcttcacttccagcataaatattgactgcacagaaaatcataataatgttacatttcttactactaaggcagatttgataaagatatagacatatgtgtttacaatttcaaataatattttggaattattgttcattttctctcattttatcagtttctgttagaaatatagacaccattagtaatcccagaaaaagagaaataagaaaaaaagagggaaagaaaaggaaaaaggacaggaaagaagggaaaaggaaagcaacagtaaaaggaaaacaacagtaaaaggaaaggaaagaaggagaaaggaaagaaggaaaaagggaaggaaaggagggaagaggggaggacaggggaggagaggggaggggaggaaggaaaggaaaaaagaggagggaaggaaggaaggaagaccttttttaacagaatgcaatcttatatactctgatttataaattgtaaaacttaggaaaaccctcattatatacttggtcttctgtggccttttgaattcgtaagttaggt

SEQ ID NO: 681996 - DNA, 2950 bp, Homo sapiens
tttctttaaaaccagacataattcatcttccaagagagagcttaaaacagaaaaagaacacaaatttatttggcatctccaagtagatgccataagatattcacccttaaaaacaagaagttatcaaaagagagaaaagaaaattgtaagaaatgtctcttcaaatttaaaatgtttgctgcaattgagtattgaataaaagttttagaaaaatctacaattgatgtcatctctttaaaagcaataaaatgactattaaattatgggaaaatagatgatgagataaaaagcaataattagaaagttaatatcccatttatagccattatagtagagaagtaaagtgaaagtcagaaagaaaaataatttgagaaaattaatctaaagtacaacacagagcttctaaaatgattctcctagaaagcaatcaatcagaaaaacaatgagtgacaaaaaaacggattttatgtgtttcaaattttgtatcctatttcagaatatcatgggtaaaaagatgattacaatatctcccatactgagggaaaagaaaacaaaacctaagctaatgagaacaacaagcatgaatgagcagcaatgaaacagcaatgaaattcctgtcaactaaaaggaatgagaatcagatggatatgaggcttttgagtatcaatcctaggtgctagaaaataatgaaagcatgcttcaaacttccgacaggcaaaggttttcaacttacttacttcctagtcaagctatttctcaagtatgaagaaacaaaaagacattttcatgcattgtgggttctgccaatcttagcaagaacatgaacctcaaaattccttctcatgaacttgatatttgacaaaaaaaaaaaaaaaaaaaagaaagaaaaaaaggagtctctcaagaagcatattctagtgttaggattcaaagacctcctttccttttcaggaaaggtagaggaaaaactgttgtacattcacagagttcttgacattatgggagacatagtcagtatatggtctctgtcaaaaagcaaacacagactgtctccccctgcaagatttgggcagtcctaatgtatcacaaaattgccttcatcctcattgcttagaagaagtctgattctacttctggtctgatatattatrctggaagaaacttacttacttactaaaataatctggggatgcttcagttagatcagggggtgcaacaaaggtggagtggagaaatctgccgctttgtatccagaaatgctcatgtgtcagggaaacagaatcaatgaggtttcataaaccacatgggggaaatgtgatgttaaaatatgaaatagtattttcaagacaatatgaagtacttgaagtaatatttcttaaatatatatgttatatataaatgtgtgtgtatatatatatatgtatatatatatgtatatatatatatatacatatatatatatacatatatatatatatatgaagaaagagaattcagagtgaaatttatcatcagtcttttccttggcttttaaaaaccatatatataacaatgagtaatgaatagacagactgaaaaaaaatcagcataatacaatccttgtatatatttgtaatataactcgttagactagaaaatcaaattttaggctgtcagctttcattgtcttgaaaggagtacttgttttagtgcagacactatttctctaaatatatcatatgtgtgtgccctcttcatgtctcttttacttaagaaatcacatttcttactaaaccaagacaatatgtttctttaaaaggattctctcttcaaagttttgtaagttttcacaaggaaacaaaatttaaatatatccactcaatacaaggtatcaaacattttaaaaataatgccacagtgaaaacaacaaaaaggaggtaagttggagatgcaaataaaaagttaagtctctcaataatgcatgcttgtatccacatactcaaatcacatacacaaatatacacactgacacacagttttctatacttatggatatctgattgataaaatagaaaaaatggctgggcacggtggctcatgcctgtcatcccagcactttggaaggccaaggtgggtagatcacccgagatcaggagatagatagagacaagcctggccaacatggtgaaaccctgtctctactaaaaatacgaaaattagttgggtgtggtggtgggtgccagtaatacttcggaggctgtggccggagaatcacttgaacctggcaggtggaggttgcagtgagccgagatcgcaccattgcactccagcctgggcaacagcaagactccgtctcaaaaaatataaaataaaataaaataaaataaataaaaaataaattttgcataggaaataaaacaagtttttggagcagataactttaccatcttcacttccagcataaatattgactgcacagaaaatcataataatgttacatttcttactactaaggcagatttgataaagatatagacatatgtgtttacaatttcaaataatattttggaattattgttcattttctctcattttatcagtttctgttagaaatatagacaccattagtaatcccagaaaaagagaaataagaaaaaaagagggaaagaaaaggaaaaaggacaggaaagaagggaaaaggaaagcaacagtaaaaggaaaacaacagtaaaaggaaaggaaagaaggagaaaggaaagaaggaaaaagggaaggaaaggagggaagaggggaggacaggggaggagaggggaggggaggaaggaaaggaaaaaagaggagggaaggaaggaaggaagaccttttttaacagaatgcaatcttatatactctgatttataaattgtaaaacttaggaaaaccctcattatatacttggtcttctgtggccttttgaattcgtaagttaggt

SEQ ID NO: 681997 - DNA, 3064 bp, Homo sapiens
actaggcaaagctagttctgagttaaaaatgaaacagcattcagggctcaccaagaatgagtggccctggtataaacattgaaagccaaacaagagtaaggcagtcctcacaaacgctaactctttgtctcaaatcatccaattcttgtttggaagaaggcaattttctgttactctaagtgtttgcctaaaataaagtaaattatgtcttacaaaacttaatgttatccagagcatctatgtattttcttatgcaatatccatcattccttcaaacattgccaggtgtgttatgctacctactagatatttacagcagacttctgaagtattaacgtaatttcatttaaaataaagaaaatgacaggattgtaccataggctgttactactgaccaaacaatgctcaagaaactgcaaaaaaaatgcaataattagaagagaggtattaatatatcagtattcattattatatatgtgattaaatacataaaaaattaaatacaaaaatttcaatttcactactaagaagggaaatataaatgtaatgatgaacacttggggattgactatacgactctttatattttgttatgttaaaacttactcatataaaaaggttttttaagacaaaatttttttgacaagacagtaagactggcactctgtataacttggtaatattataaattcttatatatttttgaaaaagaaattagcttatacctcacaacggcttttctttcccacccactaatttttcatctaggtgtatatttaaggaaatactcagagattaggataaacttttatgtatgtgggtgctaatggtggcattatttataaaaaaattattgaatcccagcaaagtgtttaataatagggttaagctcaagtaaactgtgacatttctgtgtgaataataattagtaagcaatttgaaatgtctttcaaaaatttaataacataatttcacacacacaatgtaagtaatgattacaagcaacaaaagtaacaacttcaagaatgttagtaaatctaaatatacctatacttaggtacctagctatataatgtccgagagaggaaattgaatacaatcataaataggtatatttgtatataaatatgtatagatatatagttatactatatatatacacatacatctctctctmtatatatatgtgtgtgtatatatatatatgtgtatatatatatgtgtgtgtgtgtgtatatatatatatatatacacatatatatatagatctcatattttttgaagtaaacatcaaaatcaccatccagattctgtcttctgggaaagagactaccccagatggaagacattttattgtgttttaaagaagtttctaaggctttccttcttcaataatagtatattctaagctttagtaccttctcccaggaccaatattgtcttttatgagtgcctatattcatccatgtgatgacaaacattttgcccttttattctcttgatttgctatgtacttataaaataaatcttatttctttaggcttctgcattttcatatttacaggaattgctcttttccaaaaataaactatgaaaaccatgtaacagccataggatatccttttgacagacaacaaatgagaatgtgtcattctctattgattacatcagtttttttccctgcagctacaattttgaaatctcagttcacagtgattgaaataagttttttttttgttctgatttatcttaataacaattttaaaaaagatgttggatatttggtcatattctattgttgccaattccagctttttaaataaatacttgaaatattttatggttaattatatcatttattagaaacaaacatgaaaattacactttttgcatattatttttcttgtgtacttattcaggaaaattaagacagacataagaaaatctgaagaggacaaatttttggagatttttccaataactctaaaaacgtaagaataaaatcttcaaatgcatatgtttagtttttaaacaaataatttattttcttttgaaggactaaattagtaaacacaattaaacttataaattataactttcaccattcttatacttctttataattgtctatttatttatctggcttctacatgatattctcaacttctcaaagacagagattcttttcataattgagatcccagcaagaatttgccttgcatttcacatttcttggcattgaaatagcattctcaatatatccaacaaattgtttggcttgtgttaagtgattcaaatctcttttttattttatatgaactcttgtacataagcacaagaaatgaataaggaacttaaagatgaataagaagcagacagcagctacaattaaggagatatttaatttctcccttaatcttaaattacaataattaaagctgagtttatgtcattttttgtagtatcaccattacaatataaaagctgcaacacggtataacacaggatgtatagttatataaatccagaattaaatacctttgttgttatccattcctcctacagcatacaaagttccgactgtagattttctgggtttagttctcggactttgcattaaagttcttctttctggcaatagatggtatttcattgcttctagaatcagcttttgacattccagatcattcttaaataatgcatgattttctaggtcagccaatatctgtgaataatacacaatagctgttaataatgttttcaaagagatgaacattatgtcattccttaaaactagaagtttaatgtctgtgatattatccttatattgagcaggatgcagggtgtagtaagaattcattacagtaacaaataaaaatgtataaaatgaatggctttcaacagagacagaatggatattatttttgattcaatattatttatcattttaccacacagagtaaaaaaaacacttatagtgatcagcttttctattcattttctttttatgaaagctgtctgaaaatcaagtatagttacttgtgttggccataaacatgtcagg

SEQ ID NO: 681998 - DNA, 606 bp, Homo sapiens
cactcccagttgtctttctcatttttccagcatttctttttatttctaccacttctacttcctaattgctatgtctacaataattctcacatattctttttgttctccacactggagatttttaaaaaatatatatgttttatttcatgttattaataaaatattttatcttaaaagtaaacctgatcatgtcaccaaaacagaaaccaaaacaaacaaaacttccctattccttccactttcagttaaaaacacttcttataagtcttaggacaaggaccaagttcctcaccatggcccaagagtctgtgatgttttgccctcacctacttctgtaatctaattgtgtaatatttctctcctgctcatcccctactatatgcctccacttcagctgcattatatttcaggtatattagtcttcaacttcwacaatcccccttattcctcctccacagagctttaacctatgctgtttttctgaatggagcactgattgctcctcttctcctctcaagttactatttgctcttcgggtctcgattcatcattatttttttaagaaattaatccctaatattgcttactaggttacatttctctaca

SEQ ID NO: 681999 - DNA, 618 bp, Homo sapiens
ttacctcttttcaatatccttcctccacataaataccaaggacattaataatattattgtcaatgcaggaaagagattaagctatatttatcagtttagcattcttaggtcacttatatttctggaactagaatatcaarcatctatactctaggataagtttagtgaaaggctttcaagcaggttaattgatgtaatgactgaaaatctttacattgctcaatttactggctcaggaatttattgctaacgacaatagaataattagaatgtcattttaaagtttattattggccaggcatggtggctcatgcttgtaatcctagtactttgggaggccacagcaggcagatcacttgaggttaggagctcaagaccagcctggccatcatgatgaaaacccatctctactagaaatacaaaaattagccaggtgtggtggcacacgcctatagtgccacctgctcaggaggctgaagcaggagaatcgcttgaagctgggaggctgaggttgcagtaagcagagatagcgtcattgagccccagcctgtgtgacagaggctcctcctccaaaaaaaaaaagcttcttattgataactttatcctctctctgggcac

SEQ ID NO: 682000 - DNA, 618 bp, Homo sapiens
ttacctcttttcaatatccttcctccacataaataccaaggacattaataatattattgtcaatgcaggaaagagattaagctatatttatcagtttagcattcttaggtcacttatatttctggaactagaatatcaaacatctatactctaggataagtttagtgaaaggctttcaagcaggttaattgatgtaatgactgaaaatctttacatwgctcaatttactggctcaggaatttattgctaacgacaatagaataattagaatgtcattttaaagtttattattggccaggcatggtggctcatgcttgtaatcctagtactttgggaggccacagcaggcagatcacttgaggttaggagctcaagaccagcctggccatcatgatgaaaacccatctctactagaaatacaaaaattagccaggtgtggtggcacacgcctatagtgccacctgctcaggaggctgaagcaggagaatcgcttgaagctgggaggctgaggttgcagtaagcagagatagcgtcattgagccccagcctgtgtgacagaggctcctcctccaaaaaaaaaaagcttcttattgataactttatcctctctctgggcac

SEQ ID NO: 682001 - DNA, 649 bp, Homo sapiens
ttgacattattaaaaaagcggcaagtctgaatcctctcagtgctctgtggaagcgcacgctcatgctccccttgggtggtgccacattattcattagacaccttctccgggctctccgtcagtgtaggctgcagggaatggtaagctattaacttccagtgacaagaagcttaaattacaatgcaaactctgcaaggcgcaaaatttgcaagttgaattccttgagaggaacccctttgtctggctgaatgctgctggagggattggtggggaatggagcctgaagtctcatacagccttttggaatctttataaccttcttctgctttgtgaacctcaggaccagccactgaaggaggggctctccttcctggagttcttcccttatctttccccaacatggctgggtagccatgaygacggggaggacctgtgggaagaacaaagccagccgggtgttttattctgtcactaccttccactcagtggccaaaagctttaaaatcaaacactatagttggagacatcaagtcaatactggctgcaccgactgtctctggctgaaggcagcttaaggggagtgaaggtaatgcttgttgactcaagaagaggctgaaaatctgcccaggaatcacccagtggagaaaac

SEQ ID NO: 682002 - DNA, 649 bp, Homo sapiens
tgattaaggcctgttcctcracatagaggcccacaactgtcctgtttcacaattttactcaaaacaaatgtgtactacacatactttacccaaagctagatgtagaaaagctaatattgatacgtgacctcatgttctctaatatcgaacttccacagagctctggaaacgatcaaccactcaacctgtatttgcacaatttttaaaactaacatttagaatactgaccactatgcagaatctcctattttcatacgcaaatgataggtctcaccacgtccatgtaatgttttaggcctattaaaactccatttttttttctaaatgtgaacctagaaaattagatggagccttgaagacatatagaaataaaaatagaatatgtctattatgtatctgaggaatatatctatttcctcagattatatattaccttgttggcttctacatcatacatgaaatcatttactcattaagcaaataatcacgtgtgtctaccacatttcaagcagaagccctggccttccagggtttacattttagggtgtgtgttttgtgggggatggctaatacaaccaacaatataaagtaagttagatagtgatgagtgatataggtaaaaagattaaagtagacaagagtcaaaata

SEQ ID NO: 682003 - DNA, 643 bp, Homo sapiens
gggataacttctcatcaattaagccatgccaagcagttcaataggccaaccaggagccatggagggtgcwgtgaggtcatgttaagtagtgactaatgagaacaagctggaataacaagactcctaagtactcaaaggacccttccttcccagtgaggggagtgctgagtcggagaaaaacagtgcctccaacaaatttggtcatgttctatttggcctgggatcaggcctgtctgcagcttctgttggccatttttgcatttatcgcctgataaaaaacctcacatggttgttcccaagcaagaagaaatattactagaataaaatgtacataataaaaacagcatatcactaaagaaacatggtcataattaagatgagaaaaagttagataaaatggccaaaagttacagagttacagaagctctgagtcaagagtcactgaattcatcctccctcccagtggaggggactccctgtaaaacaagggttgaaaagtcgcattcctatagggactaggcatgtaatttaaaaagtaaaggtaccgggcaataaggaatggcgaagactgtggcaaacaagaaaacacatgcctttctacatcaggccacccttacacagctctattcaattgttatcttca

SEQ ID NO: 682004 - DNA, 1856 bp, Homo sapiens
tcacatttctgatcagtttaaaacaatctttatttaaaatggttgcttttccttcctgaacacatgcaatccttaagaaaactgtcttttgaaaaaaaataagattagaatttggtttttcaacccgaaggtgagaattatcaaaataactattctggatcgtatagtataaagattgtaagatgagtactctcagtgagatgattatcctaaagcccagcagcaaatccccacatattcagaaataaatgtattaattattctagttcagtttgactttcaacatgtgaatttaagtactttgatccagtaagttctgatatactactgaagtggcaatcaaatttaaaaacaaccttcatctcatagaaagcatacctcaaaaaatttttttcagctctcaaaaaaaaaattcttataaaatgwcatacgtatttgggactattatggattagaatgtaactctgtcttaaagcaaaaggaatatatttagttctattagccaagaagtactatttctttaaatagtagaaatcttaggcaatttctattttaggcattattaccactcaaaaataaaagctttcctcttttttgagacggagtctcactctgtcgcccaggctggagtgcagtggtgcaatcttggctcagtgcaacctccacctcccgggttcaatcaattctcctgtctcagcctcccaagtagctgagattacaggtaaatgtcaccacctccggctaattttttaattttttttgtatatgtatatgtgtatgtatatgtgtgtgtgtgtatatatatatttatattttagtagaaatggggtttcaccatgttggccaggctggtctcgaactccttacctcaagtgatccacacgccttggactcccaaagtgctgcgattataggcgtgagccaccacacgcggcctttttttcctttttaaacatcgattccctctaaatttatcagtacaaattacaattctttttccttgtttcaaaaactgatgaccatatcatacctacttctcacccattttaataatagtaataataggccaggcatggtggttcacgccagcaattccagcactttcggaggttgaagcagacagatcacttgagtccaggagctcaacaccagcctaggcaatatggcgaaacccagtttctacaaaaaaaaaaaatacaaaaaatagccaggcatggtcatatgcacctatagtcccagctactcgggaggctgaaatgggaggatcacttgagctgcggaggcgcaggttgcgccgagatgagattggatcactgtactccagcctgggtgacagagtgagaacctatctcaaaataataacaataataataataatactaacaacaataataaaatgaattattaaaatttacccttaaaagatttgatagcctaaataaggaactctatcacagaacatgtgacatggtgtgtagaaattttctacatataaaataatattttaagaagtatgctattttattattcataagaataaggttatttaaatgtttaccattgagaagggttaaaaaataaattcaaaaaatatgctgttttaacaattaccaaaaaactataactgtttaattgtaattaacacttagtagtaactgtttcctattttgcacagttactgagatttgctcttttgattgatagcttcatgtactttcctgatatattatggtagaacaagagatttggaattgcaagtaaaggtttgagaacagattctatagattaacagctatttgagaatgcactttgtgcattcaaagacattgaatatatcttaattattatttctacta

SEQ ID NO: 682005 - DNA, 685 bp, Homo sapiens
atccactttgtacccattgcccaccaatttgtctcctctaaagctcctgttatatacagatggactgcaagctctctgctgactttaccaagatgaatttgtctccattaaactagatatttatttccagcagaacttattactcctgtgtactctttaatcttctgaccctcattcttttctccaccttgtcttcaaatagttttctcctgttttatgcctaattcgttttgacttgaggctataaccttactcattactgtgaaatgtatccttgttcaagtaaccttccggccaacattttatcatatttaatacttttttaattaaatgatttgaatgcatgagtctactatatgtgaagaatattarggtctttcgaaatactcttctattccccatcacccttagactagctgtatgcctatttttcatcaaggacataattattttcaccataaccattttaagcactctataatagataatataactttatcttggcttaatccatgtagtaaaagtcagtttattattttctaggtaaggtaaataatgtctgtgatttctaaattaacagcgttgcctagcccacttttatattcttgagaagccaagcagaatccatacttatgattagttgctttgctgtacctgtgattgtcttcatcttactgcatttgca

SEQ ID NO: 682006 - DNA, 748 bp, Homo sapiens
ccgggacggagccgcggggcctgcgacttcccccggagctggcctgaggtggggcccggggaggcctacgggcctgggggtcgcggagcccagggagggctgtggcagggccaggggggcgcgccccggaggaaaggcccgctttggcccgaggacgacacgggagtgggtagccgggcctgttgaagcgcctagggcgccaaggatcccagtttgttgggtgactcggctcagcttttagaaaggggccgagcgggatttgaacactccctgagcccaaaggcckggctctcaacggtaaccgtcttcctcagcctcagtttaccttttcatccctcagggattctcctgtccatggctgccaccaaaactgcgagttatgatgaacatttcaggccagaaaagttaagagaatggccggagcccgagtccgtttctttaatggaggtgagataacgtggcgttttgagacgtcattttggcggggggacccctcgagtttgggaactgtttatcttaatttcgcttctgttctcaggattgtgacagtgcctgctttaaagcaggcgttgaaggggaatgttcgggctcagatttggccgagagtgtggccaagagtgtttccagtcgccagcctgggggctggcgcaccgacgggggcgggcagccgggcgggtgaaggcagccaccccagctccccggcagaagccaggtctgggcttgccagtcaattctgcatacttcagcg

SEQ ID NO: 682007 - DNA, 748 bp, Homo sapiens
ccgggacggagccgcggggcctgcgacttcccccggagctggcctgaggtggggcccggggaggcctacgggcctgggggtcgcggagcccagggagggctgtggcagggccaggggggcgcgccccggaggaaaggcccgctttggcccgaggacgacacgggagtgggtagccgggcctgttgaagcgcctagggcgccaaggatcccagtttgttgggtgactcggctcagcttttagaaaggggccgagcgggatttgaacactccctgagcccaaaggcctggctctcaacggtaaccgtcttcctcagcctcagtttaccttttcatccctcagggattctcctgtccatggctgccaccaaaactgcgagttatgatgaacatttcaggccagaaaagttaagagaatggccggagcccgagtccgtttctttaatggaggtgwgataacgtggcgttttgagacgtcattttggcggggggacccctcgagtttgggaactgtttatcttaatttcgcttctgttctcaggattgtgacagtgcctgctttaaagcaggcgttgaaggggaatgttcgggctcagatttggccgagagtgtggccaagagtgtttccagtcgccagcctgggggctggcgcaccgacgggggcgggcagccgggcgggtgaaggcagccaccccagctccccggcagaagccaggtctgggcttgccagtcaattctgcatacttcagcg

SEQ ID NO: 682008 - DNA, 618 bp, Homo sapiens
tctcagaartcaccactaaagaatttatccaagtaaccaaaacccacctgtaccccagaaactattgaaatgagaaattaaataaaatagataaaataaaaatagtctagtttgaatgacaaatcgtatgattttctctgcctccagtaatgtaaagtgattgtatgatgattggagctcaatcattgaactattgtatgactatgaagataagtgccaataaagaatcagatctagagccaactgattctggaagttcagtggctctggatttgatggtgaaagtaaagacttgtttttctcatttactttcagaagaacattctgttacttgtaggaagggtaggaaggaaaggagaaacaggaataaggcctttccatgaacttttactcagcagtagacagaccatggttcttctatttttttaccattctcgttcaaccaaatgtaatttccagaattcctaaagaggaaacatggagaaaataataaaaaatataaatcagaaatcttacccaaaatgattcaaaatctgccattactcctgcaaagtgatgagtcagtatcacccctgcccctgttgtcaccagatgggtctggggactcaataatttgac

SEQ ID NO: 682009 - DNA, 765 bp, Homo sapiens
aggaggcctgcgttttcattttgcactgaccgcacaaattatgcagccatccctggctgtagctgttatgttttgccagcagatactatcacgccctgtgaaggtactgacagggtgtttcagagtttttgacaagtacccattttccaaatagaagaggcatcctatgaattgcctgtacaataaaagacagcctgaaataaaaatgtgtttcttagattagacagtcttcttgcaacagtcctacaatcctggtgagaatcttttaatgatgaagagcttaaatgctytacaattttcccaccatgaattttttcccatgttgtacccttctcttccacccaagtcttaggagagttcccaaaaatttcaccttcctttttgttttaaaaggatagataatctttccacagcctttactgattgcaaactccttgagaaaagagttgcattttctagccttttgcatcccacactgctaagggtcatattacacacacagagatcaatcaataatactatggtcttataattgcatccctttgcatgttaaaaacacacttatataaattgtctcatctgatgattacaataatcccatgggttttcagggcaggtatttattctctttctccagattaggaaaccaaaaattagagcaacgtttaataaccgcctctacttacacttgtgacttctagatggaggtttctaattctgaaattgaaaaagaaaatcatttactctctatgtatttatgtattc

SEQ ID NO: 682010 - DNA, 689 bp, Homo sapiens
aattccaaaccccatgatcttcctaacaaaaacaaaaaacaaacaaaaaaaagtcttgtggcccagaagtgtacaagtatgtacaagtctgcctcaacaacaatattacagtttttgtgttttaagttcttccactttcctcactcttaccccagtacttggtaaacacttaaaattgtttacctattggatgttctttgtctcctaaccctcagagcttcgaataataataatagtattaactaatgtttactaacctctgtgcacaaggcactgttatcagcagtggattgcaaatgaagaaaccgagtattagagagattaggagattagaaaagttgtcctgtgaactgaaacaccaatctagctatagttggaattctaaacttggttgataatataaactctcaataaacattagcgaatttgtaactaatgagtggttccttgtcagatactactacctgtattctttctcatttagtcctaaatacaactttttttactctcttattactattactattttatgtatgtaattactattttattcccattttaggaagaagaaaatgagtttagagagattaatgaacaartagaaggttgaagcagattttcaccctgcagctaactcctcacttttaactgtacttctccatggaaaactaataagcatctcttaaggc

SEQ ID NO: 682011 - DNA, 645 bp, Homo sapiens
tctatttgaattcccggccattcaaagttccttgtcattttaaacaaagcaccatatgaagttcaggttaggttttaccaaattattttgagctaatcttattttattttgaaatttgataatcacatacacaaaagtaactttccaattgagggttagttgttctacgtgcaagcaaagtctmatttcaaatagacattattaaatgccatatagggaaagacctaagttgcttctaaggaatatgagattataggttgtttcaatatgttgagtgatttccttttttttctttaatctgtaaagaataaatgtgtaaattcgtgagagtgatatttttatgccttgaatgccattgtttacaatgaaatagaatcggccatttaaatattatattttccttgatagggttctgtattctaatcctgctggacccccttattactcttggtcaagtaacttctctaggtctgtttccccaaaggaagaaagttgaacttagaaaatgatttccaggatcctttccattctaacactccaaaatttcttccatgacttcagacaaggtgttattagaatctccttcaagactggttatgctaagaggcactacatactagactgaaaataaaaatgccatcagcc

SEQ ID NO: 682012 - DNA, 645 bp, Homo sapiens
tctatttgaattcccggccattcaaagttccttgtcattttaaacaaagcaccatatgaagttcaggttaggttttaccaaattattttgagctaatcttattttattttgaaatttgataatcacatacacaaaagtaactttccaattgagggttagttgttctacgtgcaagcaaagtctcatttcaaatagacattattaaatgccatatagggaaagacctaagttgcttctaaggaatatgagattataggttgtttcaatatgttgagtgatttccttttttttctttaatctgtaaagaataaatgtgtaaattcgtgagagtgrtatttttatgccttgaatgccattgtttacaatgaaatagaatcggccatttaaatattatattttccttgatagggttctgtattctaatcctgctggacccccttattactcttggtcaagtaacttctctaggtctgtttccccaaaggaagaaagttgaacttagaaaatgatttccaggatcctttccattctaacactccaaaatttcttccatgacttcagacaaggtgttattagaatctccttcaagactggttatgctaagaggcactacatactagactgaaaataaaaatgccatcagcc

SEQ ID NO: 682013 - DNA, 624 bp, Homo sapiens
gagaggatatatgattagttacaagaatcacagtgtcactaaggtaaaagcaaaccgtcactcacaagaatcacagatattcctgggagtgagacttaaagcaaattctcacatgggctcacaaagggagtgttcaggtatgtagtaaaccatttgttttcatctygaaaaacaaaataaactttaaaaactggataaatcttttccaaatttaatttcataaaaaatgtaaagaaatttcaatagacagaaaaattgttctggctgcaggggacaagggctccatgctatgttcaggatgccaaagtatcccataacctcactcccgaaacagctcagtcagactgacttggtactgcatgagtcactgtttccaaacctgcgagagggtgtaagtcccctggagggcttgttaagcacagggagcccaaggccccacggcaaactgactgcatcagaatcttggagagggggaacgggcatggtctgtagccccaggtgacccaaggccagctttggcaaacctgccacagacaaacatctcaatcgtctggctgaactagatggtaaaaacccattgaaattaccaaactctgtcctgggtgtgtggcattcatcataagg

SEQ ID NO: 682014 - DNA, 624 bp, Homo sapiens
gagaggatatatgattagttacaagaatcacagtgtcactaaggtaaaagcaaaccgtcactcacaagaatcacagatattcctgggagtgagacttaaagcaaattctcacatgggctcacaaagggagtgttcaggtatgtagtaaaccatttgttttcatcttgaaaaacaaaataaactttaaaaactggataaatcttttccaaatttaatttcataaaaaatgtaaagaaatttcaatagacagaaaaattgttctggctgcaggggacaagggctccatgctatgttcaggaygccaaagtatcccataacctcactcccgaaacagctcagtcagactgacttggtactgcatgagtcactgtttccaaacctgcgagagggtgtaagtcccctggagggcttgttaagcacagggagcccaaggccccacggcaaactgactgcatcagaatcttggagagggggaacgggcatggtctgtagccccaggtgacccaaggccagctttggcaaacctgccacagacaaacatctcaatcgtctggctgaactagatggtaaaaacccattgaaattaccaaactctgtcctgggtgtgtggcattcatcataagg

SEQ ID NO: 682015 - DNA, 624 bp, Homo sapiens
gagaggatatatgattagttacaagaatcacagtgtcactaaggtaaaagcaaaccgtcactcacaagaatcacagatattcctgggagtgagacttaaagcaaattctcacatgggctcacaaagggagtgttcaggtatgtagtaaaccatttgttttcatcttgaaaaacaaaataaactttaaaaactggataaatcttttccaaatttaatttcataaaaaatgtaaagaaatttcaatagacagaaaaattgttctggctgcaggggacaagggctccatgctatgttcaggatgccaaagtatcccataacctcactcccraaacagctcagtcagactgacttggtactgcatgagtcactgtttccaaacctgcgagagggtgtaagtcccctggagggcttgttaagcacagggagcccaaggccccacggcaaactgactgcatcagaatcttggagagggggaacgggcatggtctgtagccccaggtgacccaaggccagctttggcaaacctgccacagacaaacatctcaatcgtctggctgaactagatggtaaaaacccattgaaattaccaaactctgtcctgggtgtgtggcattcatcataagg

SEQ ID NO: 682016 - DNA, 624 bp, Homo sapiens
gagaggatatatgattagttacaagaatcacagtgtcactaaggtaaaagcaaaccgtcactcacaagaatcacagatattcctgggagtgagacttaaagcaaattctcacatgggctcacaaagggagtgttcaggtatgtagtaaaccatttgttttcatcttgaaaaacaaaataaactttaaaaactggataaatcttttccaaatttaatttcataaaaaatgtaaagaaatttcaatagacagaaaaattgttctggctgcaggggacaagggctccatgctatgttcaggatgccaaagtatcccataacctcactcccgaaacagctcagtcagactgacttggtactgcatgagtcactgtttccaaacctgcgagagggtrtaagtcccctggagggcttgttaagcacagggagcccaaggccccacggcaaactgactgcatcagaatcttggagagggggaacgggcatggtctgtagccccaggtgacccaaggccagctttggcaaacctgccacagacaaacatctcaatcgtctggctgaactagatggtaaaaacccattgaaattaccaaactctgtcctgggtgtgtggcattcatcataagg

SEQ ID NO: 682017 - DNA, 1589 bp, Homo sapiens
ggcccgacacaaattcctaaactttcttgaaacatgatgagatttttgtttgtcattttattaaagctcttcagctatagttaatgttagtgtatttcatgtgtggcccaagacaatgcttttttctaatgaggcccagggaagccaaaagattgcacaccactggcttaggtgatattatttattcaacaccatagatgtgtgtgtgtatatatatgtatatgtgtgtatgcatatatatatatatatatatatatatgtatatgtgtgtatrtatatatatatatatatatatatatatatatatatatataaaatatttagctcctgctgctaagatggaggatcttttccaaatagaaataacatagacaaaatgtaattcttttcctaaccatgaacaagcaagcttgtggaatttttaagtggatataattttctattcccatttatcaaaattggccacagagaatattaccctctagtaaacttcttttgtagcttgcttttcaaaaacagaaaaaaattaacttatttgtgactatcccatttttgtctccaatttagcgaaatggagaatttggggaagaaaaacacttatttcttcctcctgtttgttcttaatttataacatattatcctttagaaacaagccctgggaaagtccactttgtaggcagttgattgcagcaatgcatggccacacatttcctttcctctattcaccaccagggctttgaattcatcaagagtttaaagccatcctgtaaatatgttgtactgggatcaactttggaaatgaaaaggaaaaggaatttacaaagcatttcagggatggcactattctatactttaccaaacctaaaggttgggttggaagagtagcccatttctgaagcttttcttgttttctttgcaggatttgggagacatattgaccaagtaagtttggtctcaatgcaaactggggtagcatgagagctattaagtggatcaagccatttctaacaaaatgaagacacaacttatggaaactcaattgttggcatatgcatacatatgggttcaactggctataatttcctgttctcctttatgaaaaattaacctttttcctccctgtggctattgaataagtgtgcttccagactcaatacagcagtttttgaagcacagctgtttatgattgtggatttcaagtcataaaaatgtttaggtgcatgaactagttttttcccaggtggtaggtgagtgaagtaagaaaagaatataagaaagattccctacaaatggctcaatcctatctcatgaatgtggagatacattgctatatcaggaaagggttttaaaggtgaatttccattgaatgattatttgtttttaaatcctgtgatgaaatagttggtattagaaagcgcaattgtattttcctctttaaaggagtgagtcagagcagtggcacatgccccagtgtgtgagctcagagatccgtgctcaacccatccactggactaatggacagattccaccacctccaggtgagtgtcaacctgctgaagtgatgagcacacagtgcccttcaggcatgg

SEQ ID NO: 682018 - DNA, 1589 bp, Homo sapiens
ggcccgacacaaattcctaaactttcttgaaacatgatgagatttttgtttgtcattttattaaagctcttcagctatagttaatgttagtgtatttcatgtgtggcccaagacaatgcttttttctaatgaggcccagggaagccaaaagattgcacaccactggcttaggtgatattatttattcaacaccatagatgtgtgtgtgtatatatatgtatatgtgtgtatgcatatatatatatatatatatatatatgtatatgtgtgtatayatatatatatatatatatatatatatatatatatatataaaatatttagctcctgctgctaagatggaggatcttttccaaatagaaataacatagacaaaatgtaattcttttcctaaccatgaacaagcaagcttgtggaatttttaagtggatataattttctattcccatttatcaaaattggccacagagaatattaccctctagtaaacttcttttgtagcttgcttttcaaaaacagaaaaaaattaacttatttgtgactatcccatttttgtctccaatttagcgaaatggagaatttggggaagaaaaacacttatttcttcctcctgtttgttcttaatttataacatattatcctttagaaacaagccctgggaaagtccactttgtaggcagttgattgcagcaatgcatggccacacatttcctttcctctattcaccaccagggctttgaattcatcaagagtttaaagccatcctgtaaatatgttgtactgggatcaactttggaaatgaaaaggaaaaggaatttacaaagcatttcagggatggcactattctatactttaccaaacctaaaggttgggttggaagagtagcccatttctgaagcttttcttgttttctttgcaggatttgggagacatattgaccaagtaagtttggtctcaatgcaaactggggtagcatgagagctattaagtggatcaagccatttctaacaaaatgaagacacaacttatggaaactcaattgttggcatatgcatacatatgggttcaactggctataatttcctgttctcctttatgaaaaattaacctttttcctccctgtggctattgaataagtgtgcttccagactcaatacagcagtttttgaagcacagctgtttatgattgtggatttcaagtcataaaaatgtttaggtgcatgaactagttttttcccaggtggtaggtgagtgaagtaagaaaagaatataagaaagattccctacaaatggctcaatcctatctcatgaatgtggagatacattgctatatcaggaaagggttttaaaggtgaatttccattgaatgattatttgtttttaaatcctgtgatgaaatagttggtattagaaagcgcaattgtattttcctctttaaaggagtgagtcagagcagtggcacatgccccagtgtgtgagctcagagatccgtgctcaacccatccactggactaatggacagattccaccacctccaggtgagtgtcaacctgctgaagtgatgagcacacagtgcccttcaggcatgg

SEQ ID NO: 682019 - DNA, 691 bp, Homo sapiens
tggtgaagtatttgcatgtagcctaagcacatcctccaatgtactttaattatctctagattacttaaaatacttaatgcagtgtaaatgctatgtaagtagttgttacactatatgacttagggaataatgacaagcaaaaaaaagtctgcacatgttcagtgaaaacgtaatcattcaattcttttcctgaaatttttaaatccatgatgagttgaatccatggatgcagaaccctatcatatggagggccaactgtatatcaaatatcatatttaatggtgtattttctagtatttaatttaattactgacaatatggcacacaacaaacatatcaaaagtttctgatatgtgttttttgaatttatttaaagcaagaaaataatgcctcctttaatgaggattgctgaggacaaagtctaaaaaaggctgactccatctataaggagtaactctgatctamaagtttaatgacagagaggatctctgagttgttagtccactgaatgtgggacataattgtcaacttcctgatctgtgaaaacagtctccaagccacacacgcattgaatggtaaaggataaaaatctaactaactaggaaggcttaggcacaacttttcaaatacagatttaggtagaaatagagaaaaatagacatgaatattgctgagtttcatgtttagctga

SEQ ID NO: 682020 - DNA, 609 bp, Homo sapiens
tggaagaacatttttcaaatgctattgctcaaagaacagtaactggccatcctggaaatctatacccagcaaaaatgtcttttaaaaaatgaagggtaaattaaggcattccaagttaagtaaaaattgtgagaatatatcattagtagatacattccacaagaagtactgaacaggtaaaatttcccatgtgggaaccacattctgggaatagawcttttcccatcacaggagctgtgggatctcttagcatctcaggccagagtcaggaccagtgatctgaaaggaaaggaatttcatgttcttaattaagtagttctggttcccatggttctcatggtcaggaaagacttggaaggtaggagaagaccaagctacttggccaagtggggacttgacacatgcccaagtgttactgtggtagcaggcccctcactgcatagctctgggaatattctcctttgagcgctcagtgacctgtttgattcccccttggtcaggggaacgaatctgtcttcatgcccccatccccttacaaggtatatccaagtccccatctgttctgccagaggtctgcaagtatctagtaacattgaacaggcaatggaa

SEQ ID NO: 682021 - DNA, 630 bp, Homo sapiens
ttgtagagatctttcacctctctggttagctgtacccctaagtattttattcttctttgtgrcagttgtgaatgggattgtgttcttgatttggctctcagtttggctgttgctggtgtataggaatgctagtgatttttgtacattgattttatattctgattatttgctgaaggtgtttatcagcttaaggagattttgggccgagactgtggggttttctagataaaattcaccccttcatgttaaaaactctcaatgaactaggtattgatggaatatacctcaaaataataagagccatgtatggcaaacccacagtcaacttcatactgaatgggcaaaagctggaagcattcctcctgaaaactggcataagacgaggatgtcctctcttaccactcctatttagtgtagtattgggagtcttgggcagagcaatcaggcaagagaaagaaataaaaggcatgcaaataggaagagaggaagtcaaactatccctgtttgcagatgacatgattttgtatctagaaagcacacttttaatcgtatgtaatcctgtcatctttgggcacaaaaagaattttatctttgttcctggttcatacctttgttatagcacttatcaca

SEQ ID NO: 682022 - DNA, 586 bp, Homo sapiens
attgaatgtttctttacaggtcaaagcttctttgttaggttttttctttctgttaaaaaagtttcaaatttacaaatgaattcctttttgattacacagaagtgctttcatgctatctcattaaagatgaatatttattcctttaaattttaaatgtaactggaggatgagctgccagaaacctgaaatactgttacagaagcagatttctttaaattcagcrtaaaatagaaaatgttaccttttttttcctaaaaaaagacttttattcaagttaccagttataattaattttattaaggtcttcactaatggggatactcttggcaactaaaatatttcaataagaatatgtaaagagtagaaggaaaactgagggtggtaagagggaaaagcctgtgagagctttctgccaatgctaaaagtattggaatgaactgtaaacttagtaagagcatagattagaagatattatttaaaaagctataattacttcctgtctttgatgccatggtcaatgtagtggctacagtggttcaatgtaacttgattggaattagcaaaggtatggtttaaagtaactaaa

SEQ ID NO: 682023 - DNA, 586 bp, Homo sapiens
attgaatgtttctttacaggtcaaagcttctttgttaggttttttctttctgttaaaaaagtttcaaatttacaaatgaattcctttttgattacacagaagtgctttcatgctatctcattaaagatgaatatttattcctttaaattttaaatgtaactggaggatgagctgccagaaacctgaaatactgttacagaagcagatttctttaaattcagcgtaaaatagaaaatgttaccttttttttcctaaaaaaagacttttattcaagttaccagttataattaattttattaaggtcttcactaatggggatactcttggcaactaaaatatttcaataagaatatgtaaagagtagaaggaaaactgagggtggtaagagggaaaagcctgtgagagctttctgccaatgctaaaagtattggaatgaactgtaaacttagtaagagcatagattagaagatattatttaaaaagctataattacttcctgtctttgatgccatggtcaatgtagtggctacagtggttcaaygtaacttgattggaattagcaaaggtatggtttaaagtaactaaa

SEQ ID NO: 682024 - DNA, 1906 bp, Homo sapiens
tggcaaagaaaaaggagagactgagggggaatttgtagattaagagatttaaatgacaaaggagaaaaaaaactgaaatgtggtgtttagaaatgcacacaggtgataaaactatacgaaaagcaaaaaagtcattaccataaatgttaggatggtggttacatttagaggaaaaaagatttcaattggagtagagcacaggcagcacttttggattgtctaacaatgttattttctgtacctgagtagtggttacatcttataaattcatgattaacctatacatttgtttcaagcagttttccatgtatgcgttatattttataataaaaaggtgttaattcataaataaatatttgatggaaaaaattgatgttattagatattaatttcctaaacttcacaacagcccactgtacccccaaacttaccatctctatctatacccccagtttctgatctgctggaataaaatactcttattcaagaccaacactccttctagtctcttttggaatcttgacccattaatatcactcctctttcccatcttcaatctccatctttctatcaaggcaatataggacagtggtaaataactaggctcttttgtcagaatcccagggttcaaatcctggttatgctatttaactagctgtctcatcttcagcaagtaaaaatctctctgtgactagctctcctcattagcagaagggtgataatagtatctaattcatagggccgatatcaaaattaaaggagttaacagatgcaaagccctttaaagaaggcctggacattttcactaagtgttagtcgctatcattattctcaccacccctaccatctccattctctcaatgtatgaacatgctcagttttttcacttttatcaaaatcctttcctaaaccctgtgtccctgtctagttatgttctctctccttccctttttcctcaaagcaacaaagatcacccaattgccacatctcctagcagcattttagtacctatcttactgacctgcactggagcatttgatactgttgtccattttgaacataaaatcgtctcctcaagttccgtgaccccactgttttggctgtcccacttttgagaaggtatgattagtctcaattgctagacaccctctacctgctgcttaaactttgctgtttctctatttgccattttcatttcacttcaaaagctgcctaagtgatctgattcgtgctcatggtttgaacaatcatttataggtagctaaccttaaaagcctccagttctgaaccctcttcaagctttagatatatttatctaaatgtgtgctgcacctggatgccaaaatgtccaatactgtgttcactacagattgggtcctccctctcaaattcattctcagttaacatccaatcacccaggcagaaacctaagagcaattccaggccccttctttaccctcatccccaacatccaatcactgaatcctactgattctacctctaaatttcctagaaatgatctctttctcaccatccctactataccttccccagtcccggcctatagcatctctcacctggaatataggaacaatatctaaagtctttactgacctctaatgctactttcttccttactttgctttattctaaagtacacagaaacacycatagttgcctaaacttgtttgcctgtttctatgcctttctactgtttcccctgcctggggtgttcttccctgatttttattgcattctttcattttttgagatgccgttaagataacttatcctcaggggggaaaaaagccttccatgcattactaggttgggtcaagttcctgtattagtctgttttcacattgctataagagaattacccgatactgggtaacttatttattta

SEQ ID NO: 682025 - DNA, 1106 bp, Homo sapiens
gcagatagccaacacttctttatcaaacgggctggagctgagactgtcagacggagacatggacactacttggtcacagagactagccccgccactgactgcaatgtgtggatacaggaaggactcaagaccaggactcacagggcccaaggcctggcgggtcactggcctataaaactaccacctggcccagcctccccagcttacccctaaaatcaaaagataaaagtcaagtcccttcagccctgatatgctgtggtgcaataaaacagggctacgggataaagctaaacccacactttgaacctggctcacagcagaaaactgaggcagtggctagaaaaaaggcaaaagacaaagtaactctcaagttcttcttgtgcmaacaactagactgcaaatagttaccgggcctccacaggacagggtatgcatgtagaacgtgggtagggactcatgtgtatgggggttggtgtgtgcacgtgcctggaggggagggccagggctgaccgtgcctcatggctgtgtgcactacagacagcagctgtgtttgctgacagttttaaattgcacatctaccaactggcaaagagcagtgctcctcaaactttgaagaagtgtgcgtatgagtcactgctggtgcggattcaaatggcctgcgtggggcccgagactgtgatttctaagacgctcccaggtgatgccagtgctgatggtccactggctataccttgagcagcaagaacagaaagtcacccacacgtaatctgctaagggagctcaaaacacaccacaggttgcacctgagccccaagggacctggtctgcaccaggcatcccataccttaaagccagtcggccagtgaataaggtagaggtccaggtagtccagcttcaggtcgctgagtgtcttctggcaggctcctttcaccaggcccttctcatggtacgtgcaccacagctaagccagcgagagggcacatgtcatcattgccagccacaaggcagcttcctggctggaaagacagagcagtctcctctccccaaaacccatttgctttaccatgatgctgtgaatggttgtgagggcatttccactgcgtact

SEQ ID NO: 682026 - DNA, 599 bp, Homo sapiens
acaaggtgctttcacatgtatgcacaaagatgttcatactagtgctggttagaaaagcaacaacacgggaaacaaaaatattttcaaaactttttgcaggccgtatcatagcataaaaaaatcctcatttcttaaaaaaaaaaaggaaaaaatgcctgattattacagggttacaggtatgatagggtcacaattttggaggataagaatgcaaggaaaaataccaacatgtgaacgcttggttatttctggttgtgagataatgggtgwtatcatatagtttatacattttctacaataaatatatattacttttataatcggggggcaagtcacatcaaaagttgttacaagaaacatatcgggttgcagatggtcatgtgcagtcgcccagagcatccccatccccctactgagttggttggtgggaaggtgggatgcttttcggatgggagtaatattgtttattgcatcctttgtttcagaataatcctcaggtctgcccctacaatctctatgctgagcagctctcaggatcggctttcacttgtccacggagcaccaataagagaaggtacaaggattagatgaattctgac

SEQ ID NO: 682027 - DNA, 440 bp, Homo sapiens
ttcacagaacaagatatctagaggtagttggtcattatgtggctcagttgtgcctgcattctgggtcagcttctctgaagctctctaggtcttgccccctggttgccacatggataaggcagctctaaacaccatgtcctcacttgacaatgtctttctttttttctttttttgttttgttttctgagacagggtctcgctctgttgttcaggctggagtgcagtgatgcaatcacagytcactgcagcctcagcttcctggatcaagtgatcttcctgtcttggcctccctagttgctgggactataagtgcacaccaccatgcccaggtaattaaaaacatttttttagtagagacaaggtcttgctatgttgcccaggctggtcttgaactcctgagttaaagtgatcctcccaaagtgctgggattacaggcatga

SEQ ID NO: 682028 - DNA, 627 bp, Homo sapiens
ttctcaaagctctagggaacttcactttccaaacaaccattttccatggacttttagccaagaaatttcctccagcaagacaggtggggagccatggggaatggcttctctgcccctctgcacgagggggcggtgtctaccagcctcctcctctaatttaggccagcggtgtccagtctcaggagggcactttgacaatcaccttcagcccttgcgtggtgatggcttcaattggggaggcaaatgtagagtctttcctctgccttcctagaaatttctggacatgttagaggtgagctagaatgcaaagggtaagaaaataatcctttttcaggaagaaaggaatttgagaacttcttctacaaaaactataaataacacacgtgccattcatgccttgtgtagtttgttttattattartaaacagtaatatcccagcagtgacatcagctaaccagaatattactttgtgtgtgtgtgtttgtgcactcacgtgtgtgcaagtgcttgaatttagctaatagtgtgggacagatcctttttttggccttgttcgagaatcttgtagtccatgcaccaatccttatatctctagtgttattactgttattaactctgtcactcca

SEQ ID NO: 682029 - DNA, 653 bp, Homo sapiens
tgggttaataactcaagaaagcctctgaatatttcacagctgacagtcctgatgaaaacttaactcatagcaaagttgttttttatttatgggcttctaggggcatccatggtgctccacaaagcatgggaaagacaagtttatgctctgggccttctgtgagtgcttagcatttagatagcagtgacagttacgagcatgagtggctttgtgagttatttggaatgatagcctcctggtaggaatgacaggcagtcctcccttgggaaagatgattatactgggtatggtcatatggtcaccagtcacggcaktgggagtcacttttttagaagtaatgataagcatttaagggacagaaggactggggagggtagcagggaaaaataaaggcattcaaaatgaggaaagcagcatgacccaggcacaaaggtgctgtatctggagtgttcatgtgacatattttggggacagaattcaacgaggctgagtagcagggtggacccaaaaggtgaaggatctggacaggcagaccttggcattccgacaaatggaaaacagaaggttttatattgaaggtgtttgaataatgatttttttttggaatgattaccatacacaggtaattatagaagttctcctacattgactca

SEQ ID NO: 682030 - DNA, 653 bp, Homo sapiens
tgggttaataactcaagaaagcctctgaatatttcacagctgacagtcctgatgaaaacttaactcatagcaaagttgttttttatttatgggcttctaggggcatccatggtgctccacaaagcatgggaaagacaagtttatgctctgggccttctgtgagtgcttagcatttagatagcagtgacagttacgagcatgagtggctttgtgagttatttggaatgatagcctcctggtaggaatgacaggcagtcctcccttgggaaagatgattatactgggtatggtcatatggtcaccagtcacggcattgggagtcacttttttagaagtaatgataagcatttaagggacagaaggactggggagggtagcagggaaaaataaaggcattcaaaatgaggaaagcagcatgacccaggcacaaaggtgctgtatctggmgtgttcatgtgacatattttggggacagaattcaacgaggctgagtagcagggtggacccaaaaggtgaaggatctggacaggcagaccttggcattccgacaaatggaaaacagaaggttttatattgaaggtgtttgaataatgatttttttttggaatgattaccatacacaggtaattatagaagttctcctacattgactca

SEQ ID NO: 682031 - DNA, 653 bp, Homo sapiens
tgggttaataactcaagaaagcctctgaatatttcacagctgacagtcctgatgaaaacttaactcatagcaaagttgttttttatttatgggcttctaggggcatccatggtgctccacaaagcatgggaaagacaagtttatgctctgggccttctgtgagtgcttagcatttagatagcagtgacagttacgagcatgagtggctttgtgagttatttggaatgatagcctcctggtaggaatgacaggcagtcctcccttgggaaagatgattatactgggtatggtcatatggtcaccagtcacggcattgggagtcacttttttagaagtaatgataagcatttaagggacagaaggactggggagggtagcagggaaaaataaaggcattcaaaatgaggaaagcagcatgacccaggcacaaaggtgctgtatctggagtgttcatrtgacatattttggggacagaattcaacgaggctgagtagcagggtggacccaaaaggtgaaggatctggacaggcagaccttggcattccgacaaatggaaaacagaaggttttatattgaaggtgtttgaataatgatttttttttggaatgattaccatacacaggtaattatagaagttctcctacattgactca

SEQ ID NO: 682032 - DNA, 2579 bp, Homo sapiens
atcttttatttatatattttaattgtaaaattctgggtaagacaaaaattgatcttacatttggactctgctttgctaagcacttagtatatttgtagggtaatgtaacactggatggcagcaaaagtggagtggagagcaattcctaccagcagtagctactgtaaatcaaggttagagaaatctctggtaactggggaagcaatcctgtctaaaggattcaggaaaataggcaatgtttctagtgcctattataattcagtgcctcacatattatgtgtcaaaacaaatttgttaatagtgagggactacctttagtgattccacaaacaacacaaaaagcccatgacttttccagaatatatttcatttattttataactctgaaattggtcatcaaaactgtcactgatccttgtgatcattacactccatcacaatgtattacatactaatacatcttgctatcactcataaggttctataaaaagaaagtgttttacaagtgacagttcaaaaaatggaaatgaaaataactctgtagaaatgaatatagtttggaaataccaaaatccacaaaacacagatgacaaggaaaaagatcaacagacttgactacattatttaaaatattcataaagccacaagtgcactgaccatataatcgatagtaatatccagagatgtagctcaacagtattcactgtaaaattttttaaatcatagcaaaaaaacccctgaaaacaattatccatcattaagagaaccattacaaaattgtaaccatgaaaaaaaattaatatattgacacattgtaaaatagagccccatttatttttttaaaaaagtaaaacaaattgttgtaaaggtttatgcatgcaaaaggtgtgcaagattaaacactaaactataagcagtagctctgaacagagaaacagaattttgtagaactgtacagaatgactttcacctttaactcttcacatatttcagtattttaatattgacttaagtatctttcttcccatgagaatggattcaggattacttggataattaaaacaaattttaatatcagaagacatatataacactttaataagccaaaactatactttaatcatgattttgagatgcatacaaagttttttaaacaccagatacttttttatatgaaattaccatttttgtttacattttgcctattcaccctgtatttctaaattataagaaaacttaaaaattatcaaataactctggttattatcaaataatcaaattatcaaataataactgattaattcactgagttatattttgcaaactgtggtcttttaaactcaaaataagaaagacatcaaatgtaacaaacaacaacaacaaaagtttacctgggcccggcgcgatggctcacgcctgtaatcccagcactttaggaggccaaagcgggtggatcgcctgaggtcaggagttcaagaccagcctggtcaacatggtgaaacctcatctctactaaaaacataaaaactagccgggtgtggcagtgggcacctgtaatcccagatactcgggaggctgaggcaggagaattgcttgaacccaggagacagaagttgcagtgagccaacatggtgccactgcactccagcctcggtgtcagagtgacactccatctcaaaaaaaaaaaaaaaaaaaaaaaagtctacctgtaagttatccgtaattttcatcttgaagaaaatggcatataaaaacaaaaaactagtttcaataacaataaaataaaataaacaaatgaatacactcaatgacagtaatgagtcaaagtattaagagcagacattcacagccgggcgcggtggctcatgcctgtaatcccagcacttkgggaggccgaggcgggtggatcacctgagatcaggagttcgagatcagcttggccaacacggtgaaacccggtctctactaaaaatacaaaaaattagctgggcgtggtggcaggtgcctgtaatcccagctacttgggatatttgggaggctgaggcaggagaattgcttgaacccgggaggcggaggttgtagtaagccgagatcgcgccactgcactgcagcctgggtgacagagcaagactgtcttaccaaaaaaaaaaaaaaaagacattcacaattttttcttcattttctccccctgtaaaccatcattttatctagaataaagataaatacaaatgtatcatacctcctttgtagacagggtatacacaaccatttttgaaagactttattccaagccacatttttaaagctatgctgtcatctggtatgcgtagttttaccctaccatttgattaaacacaatctaatgcacagattgaccatttctttcatttttatttacaacacattgagactacttaatcttttttgacatttaaggtatagaacaccattacaactttttgttttagaaaatattactccattacaataaaggaacaaagccattagtgaatccaagtaaattttagttacaaagacatactcaaaatgtttttcatcctcttccctccacaactcga

SEQ ID NO: 682033 - DNA, 2579 bp, Homo sapiens
atcttttatttatatattttaattgtaaaattctgggtaagacaaaaattgatcttacatttggactctgctttgctaagcacttagtatatttgtagggtaatgtaacactggatggcagcaaaagtggagtggagagcaattcctaccagcagtagctactgtaaatcaaggttagagaaatctctggtaactggggaagcaatcctgtctaaaggattcaggaaaataggcaatgtttctagtgcctattataattcagtgcctcacatattatgtgtcaaaacaaatttgttaatagtgagggactacctttagtgattccacaaacaacacaaaaagcccatgacttttccagaatatatttcatttattttataactctgaaattggtcatcaaaactgtcactgatccttgtgatcattacactccatcacaatgtattacatactaatacatcttgctatcactcataaggttctataaaaagaaagtgttttacaagtgacagttcaaaaaatggaaatgaaaataactctgtagaaatgaatatagtttggaaataccaaaatccacaaaacacagatgacaaggaaaaagatcaacagacttgactacattatttaaaatattcataaagccacaagtgcactgaccatataatcgatagtaatatccagagatgtagctcaacagtattcactgtaaaattttttaaatcatagcaaaaaaacccctgaaaacaattatccatcattaagagaaccattacaaaattgtaaccatgaaaaaaaattaatatattgacacattgtaaaatagagccccatttatttttttaaaaaagtaaaacaaattgttgtaaaggtttatgcatgcaaaaggtgtgcaagattaaacactaaactataagcagtagctctgaacagagaaacagaattttgtagaactgtacagaatgactttcacctttaactcttcacatatttcagtattttaatattgacttaagtatctttcttcccatgagaatggattcaggattacttggataattaaaacaaattttaatatcagaagacatatataacactttaataagccaaaactatactttaatcatgattttgagatgcatacaaagttttttaaacaccagatacttttttatatgaaattaccatttttgtttacattttgcctattcaccctgtatttctaaattataagaaaacttaaaaattatcaaataactctggttattatcaaataatcaaattatcaaataataactgattaattcactgagttatattttgcaaactgtggtcttttaaactcaaaataagaaagacatcaaatgtaacaaacaacaacaacaaaagtttacctgggcccggcgcgatggctcacgcctgtaatcccagcactttaggaggccaaagcgggtggatcgcctgaggtcaggagttcaagaccagcctggtcaacatggtgaaacctcatctctactaaaaacataaaaactagccgggtgtggcagtgggcacctgtaatcccagatactcgggaggctgaggcaggagaattgcttgaacccaggagacagaagttgcagtgagccaacatggtgccactgcactccagcctcggtgtcagagtgacactccatctcaaaaaaaaaaaaaaaaaaaaaaaagtctacctgtaagttatccgtaattttcatcttgaagaaaatggcatataaaaacaaaaaactagtttcaataacaataaaataaaataaacaaatgaatacactcaatgacagtaatgagtcaaagtattaagagcagacattcacagccgggcgcggtggctcatgcctgtaatcccagcacttggggaggccgaggcgggtggatcacctgagatcaggagttcgagatcagcttggccaacacggtgaaacccggtctctactaaaaatacaaaaaattagctgggcgtggtggcaggtgcctgtaatcccagctacttgggatatttgggaggctgaggcaggagaattgcttgaacccgggaggcggaggttgtagtaagcygagatcgcgccactgcactgcagcctgggtgacagagcaagactgtcttaccaaaaaaaaaaaaaaaagacattcacaattttttcttcattttctccccctgtaaaccatcattttatctagaataaagataaatacaaatgtatcatacctcctttgtagacagggtatacacaaccatttttgaaagactttattccaagccacatttttaaagctatgctgtcatctggtatgcgtagttttaccctaccatttgattaaacacaatctaatgcacagattgaccatttctttcatttttatttacaacacattgagactacttaatcttttttgacatttaaggtatagaacaccattacaactttttgttttagaaaatattactccattacaataaaggaacaaagccattagtgaatccaagtaaattttagttacaaagacatactcaaaatgtttttcatcctcttccctccacaactcga

SEQ ID NO: 682034 - DNA, 975 bp, Homo sapiens
tggacaattttttttttaattttttatttttttctgagacggagtctcactctgccacccaggctggagtgcagtggtgcaatctaggttcattccaacctctgcctcccaggttcaagcgattcttctgcctcagcctcccgagtaggtgggattacaggtgcgcaccaccatgcccagctaatttttgtatttttagtagagacagggtttcaccatattggccgggctggtctcaaatgcctgacctcacgatcagcctgacttggcctcccaaagtgctgggattacaggtgtgagccaccacggccggctgatatggayaatttattacatgagaaaggtgacattgcaaatcaacaggataaagacaaattgcttaataaatggaggaacagctaggtagaaacctcgaaaaatgtgaagttggagcccttatactaaaataaattctagatcgctgaaggatttaaatatgaaagtctttgaagaaggaagagatgttttaaaagttttacactataaaatgtttttctgaatatacacaacccagaagcaaaagcaaagccattaaatgttttttgaaacttttatacagcaaaaaatagcacaaacaaatctggagagggctccaggttttcccacccaccaccttagcagagcagctctgcatttatctgttttatatattggtgccctatgtaagattccatttgacaaaatgttccattgctagaataagagtgagaataagaataagaagttaaacagcgttctctctgtacactgaggaccaaagtagtaaatgacttaaagtcacaaaggtagcagcataaggtttccagactttttgtgctgcttttttttttctttttactacccttttgggaagattaaatgaaacattggactagccattgaaataaatccttttttacactaaccaaattaacagcatattgggtttttgttttg

SEQ ID NO: 682035 - DNA, 608 bp, Homo sapiens
tccatggattcaaccaacgtttacatctgtactgaacatgtacactttttcttgtcattattcccaaaacaatataatagctatttgaatagcatttacattgtattaggtattataagtaatctagagattatttaaagtgtatggaggatgggcattggttatatgcaaatactaggctattttacattagagacttggtgcgggggggtggggagcggtggggggaggtcctgaaaccactgccccaagggtactgagggatgactrtactcagaagtgaagttgacagatcatttagtgtcttacttagttgggggtgttctaacaaattaccatagattgagtggcttaaataacagatattcatttctcatagttctggaggctggaagttggagatcagggtgccagtgtgattgggttctggttagggcctggttctgtgttgtagactgctggcttcttgttgtatcctcgcatagcagaaagaaagctaagagttttctggagaccctttgtaataagggcactaatctcattcatgaggcttccaccctggatgtcaacatatgaataggaaggagggggcacaaatattcagtcca

SEQ ID NO: 682036 - DNA, 673 bp, Homo sapiens
ttgaaccaagtgttcaaaagatttgagattctcttaatttagattttcaactcacatatactggttcttatgtcttgttcccattgttttgaaatatgtcatttaaaaaatgttctatatatggtgatgaatgactttttaagcttttcttatttaaaatgttaagttaaagcaaaacaaaacaatagcaaacctgaatatttttttcccaggcatggtattttgtttatatgcaccgtactccatacaaattacctgtatagaatacattattctttctagagatgtttgttttgttttgcctttttgtttgatgcattagacttgtgttgatagatgtgcattttgactgaaagaaaatagccaaaaaacaataaccattccatctaccttccaaaaaaagcacatatatccttctcacctgtttgcttagaaaaatatgcrtgtatttttccaagcgatatttcttctttgctaggcaatatttctcttactgagccttgtaaaagaaggattaaagaaattgttgttataaagctgttagttctattcgaagttctgtaagtttactttgataaggtagatgctggagaacaaattacaattttaagtactgtaatatatatagtatgtatattaaaaataagcatttaaaatagaatatttgctacag

SEQ ID NO: 682037 - DNA, 1471 bp, Homo sapiens
gaagaagtagtgccaggcacatacaacatgctggagattttaaaaagagagagagattgagattaagacaaaccccggccattgaagagtcaattcaggtgaggaattatgaagctcccagaggcattttatgacagaggcttgcctgaggtcatgcccatcagacagagctgagccccatgcccctgacctagctgggggctcctcccacaaagccttggctgcctcacatggttactcagagacctcttcctatggacatctaggcatcttggtgggtcttgcatcaagaggtgggccgggacttcagaggaagccagacaaaggcagcaaagtcagagatcagggttcgagcccaccaagacccttgactagcactttggactgttctctgtcctcctccacaccctgtgggggtcccttatctcttccaggtgcagagcaaagtctactttaagatggctgcgtgggaccagggacatttyagccagatgctgtgactcttcagccaaagagcatggctttatttccaagtggctgcgggtctgggctttcactctgtctgccctgaagccttcctgattactagtctcaggggaagactgtgattaccctgctcctcctctgtggagagaggggaagatggtggagaaaagccatgtttctgtgctcacctgataacacaccagagacaagtttgggggcgggagagatattaacactcccagcaggaaaataaacctgaggaatgtccaactcctttcctgtggagcagcctcctgaggaagagggctaaggacttgggagctcggggcctgatccttactcacctccatattcttgtacctagcataagacccagaaatggcacctgacaacaagagatcccaaataaatgtgaggaaatgaaatcgacatcaagccagcatagccagattcacattaaatgtgttctggaaaagttggatctaattaaaattttgcacatcaaataatattttaatggcagcaagggagctcactgcttaaaggaaccctatgaggaatcttactgtagacagaattacccccttcctcatcctttagtttttaattttctattttcataaactaggttatgttcatcccaagcctgtgcacattctttagttctttcagatgtaatatctcctcagcgccgcaaaggatcttattagaccctgagatcttggtctatatatttggagactctcaagatgacctttaactcctttttttctttgtctgagaaaacacatgtttatggccctctggtccatagaggagtcttgtttgatctctactcagcaggaatgggtggcatcttggaaccaaccaaatacctatgggatgtgaactgatgagcacagtgccaggataactatgcacacatcaggctgccatgcttatcaggacccatggttggctacgctgttcctcaaggagactttcc

SEQ ID NO: 682038 - DNA, 1471 bp, Homo sapiens
gaagaagtagtgccaggcacatacaacatgctggagattttaaaaagagagagagattgagattaagacaaaccccggccattgaagagtcaattcaggtgaggaattatgaagctcccagaggcattttatgacagaggcttgcctgaggtcatgcccatcagacagagctgagccccatgcccctgacctagctgggggctcctcccacaaagccttggctgcctcacatggttactcagagacctcttcctatggacatctaggcatcttggtgggtcttgcatcaagaggtgggccgggacttcagaggaagccagacaaaggcagcaaagtcagagatcagggttcgagcccaccaagacccttgactagcactttggactgttctctgtcctcctccacaccctgtgggggtcccttatctcttccaggtgcagagcaaagtctactttaagatggctgcgtgggaccagggacatttcagccagatgctgtgactcttcagccaaagagcatggctttatttccaagtggctgcgrgtctgggctttcactctgtctgccctgaagccttcctgattactagtctcaggggaagactgtgattaccctgctcctcctctgtggagagaggggaagatggtggagaaaagccatgtttctgtgctcacctgataacacaccagagacaagtttgggggcgggagagatattaacactcccagcaggaaaataaacctgaggaatgtccaactcctttcctgtggagcagcctcctgaggaagagggctaaggacttgggagctcggggcctgatccttactcacctccatattcttgtacctagcataagacccagaaatggcacctgacaacaagagatcccaaataaatgtgaggaaatgaaatcgacatcaagccagcatagccagattcacattaaatgtgttctggaaaagttggatctaattaaaattttgcacatcaaataatattttaatggcagcaagggagctcactgcttaaaggaaccctatgaggaatcttactgtagacagaattacccccttcctcatcctttagtttttaattttctattttcataaactaggttatgttcatcccaagcctgtgcacattctttagttctttcagatgtaatatctcctcagcgccgcaaaggatcttattagaccctgagatcttggtctatatatttggagactctcaagatgacctttaactcctttttttctttgtctgagaaaacacatgtttatggccctctggtccatagaggagtcttgtttgatctctactcagcaggaatgggtggcatcttggaaccaaccaaatacctatgggatgtgaactgatgagcacagtgccaggataactatgcacacatcaggctgccatgcttatcaggacccatggttggctacgctgttcctcaaggagactttcc

SEQ ID NO: 682039 - DNA, 901 bp, Homo sapiens
tttttgaagcaagaagtgttgcaaataactaacataggcatttctttgctgctccagtaattatatgggatgttgttcagttattcagcttcccaattgattcagctgctttcttttctttcatattctagcaagaaggcgtgctctacttctgatattatctggaagactgttctaaatgaagccaccgggtaatctgttctcctctcttaacaaatgttacctcctttctctgagagataattgctaaaacaataccaagttcaggcatgccagcagtcacacaatgataacagccagcaggctttggcactgtatcttttatgtagtctgagaaagggatggagaattccctctacaattaggactctgtctcactatctccactgaagaaattaccattggcattgaggcaacagctgcccccactgtgtaaaccaaagttcttctggggtcctcacagtctctccaggaaataatgggatccagtatttgtgcttgcctctcctgaaacactgagcctatttggccctggctatccccaaccaccccctcaccacacactcaccaaataatatgtgagcacagtccatcaccacactcttcctagaggttggtggagctcatggacattgtctgagcatgtgtgtcatgggtttgctcaccccaggagccacacatggtgttcaaacatggtgtccctttagagaatatgtatggcagggsttagaggtgcagaggcagagggattgtttcacatgctgtgtctggctgatgactgaggtgggtgggatacatagggagctggcaatatattcttgatctttaattcttttcatactcactagagaaattccttttcccactgcttatcttcttgcatccctaaatcacaggctag

SEQ ID NO: 682040 - DNA, 636 bp, Homo sapiens
tgtgaaatgctctactctatgcattacacactgcccaccaccaaaaaaatatctaaagtaactaataggatactaattttaagcaaagagagtctaccttatagatgtctttaaatatttattattctaaggtacttataaaaacaagataccaaggaaaaaagcatttacaaaaatacaacatgaagctttaaactttaattattcaagtttttattacttcagaaacaagactacagcayatgcatcaaacccttaaaaccaaatggtggtgctcatcatccaaataacttaaaataacacttagatgagatgggttgaagaaagaacaaaattaaggggttaaatgcttcatccctaagggaaacaggattgtttttcagaattaaatgttaaaagtttacaggacagatagaatgagacagaagggagtacatacgttatgagcccatttatattgcattctagaacagagataaataatttatggcaacagaaagcagatcagtggtagcctgaggctgggggtggggaatggactgcaagaggacacgagagactctggagggtgatggaaatgttccacagctggattggcagtggtcatgtgactgtacgcatttgcctaaacacatc

SEQ ID NO: 682041 - DNA, 2584 bp, Homo sapiens
gacactataagatgtacaaatattcattttgacagatattttacatttgcaagcctctataattaaaatcaaattttaaagcatctttaaataatatttcaaaactcttgagtgccttgctttccccctaaccatgtaatataggaaacaaggtcaatgacatagcagcttaataatttttattttatagaactgtcttcttacaaaaaacaacaaatataagaataaaaatctatgtttttttttctgttggaatttcttgatatctctaatttcaaatacatgtgaacctttaacatataaaattgtttgttaaaaaaaaaacctattgaagcagtggcttatacttaggtaataggaaatgttattctatagtttgtcccccttttgtgttagatctatttgtctacagtcaataatcttagaatgtgtacatttttatgatggactgtttaccaaaatgaagggaaagagagagggagaggaagaaaagaagtagaaatttgagtgagccagttagagacagacatgaagataattaaagttcaatatttgagattgattttttctttctttgcatgatgacaagaaggcacatggaaagcaaaattaattttgatgagagagaaacagagagagaaggagagagagactgtagctgatttaaacaataatttggatccttcacaattatgcaaaggtttcatgttaaaagttggtgcttattcatcttcccagtaaagaaaaagaaagagggaggtcttccctattaaatcaagtaatttttattttatgttaaccagacacatatgtccctatgggtttattttcttcacattttgttttaaagtatgtttcaaataaacaattttggttatatcaaaaagttctaagaagtggctactgcaaatttaaatgttcttggtgcagtcatgctgattagaaagaaaagttcaagagtaataacacaaaagcaagtgctggaaggtaacacaaatttattagcaggttatccattagagactggctgacgaccagtcaaaagcaaaagtatctcttgtgcccatctttgattctcaatgtaaggtcaagctgcccctgtctgctgacctgagaaatcgatggttcccatggcaagtagaatttgtggacagaaaatatctttaaaagccaatcttgcatacataaaccaaaccaagataagtgttgataacatgttgatgaataatacaacaaaatttatcctgaaaagacaatgtgtaaggagagctttcattcttcaggctcagctggaaagacatttattataactacatttgtcttgaacttcctctagtaaacaggtcagtaccaaaaaacagaaacaaaaacaaaatacagagaggatatttaatggccaatcaatgatttgtcagtcagggaaaattaatataaacwtatcatgtggctgaagagtcttaggacctctattcataaggcagaaatagaagaattttgaagggctcaataagatatttggagcacagatttgtattaacttgccttattatcattgttgagtttgcctctagtatgtgtacacacaagtgaaagtattacttctgtattaagaatattagtctgtggcagcaaaaaaatgtctcaacagtatctcaatggaagctccaggattgttaaagtccaccagcagagaccaagaacacacttatatttagataaagaaaaaagtttgcatttatttagcttgctgaactaagaaagcacccaaggggaacatcagtggcagacgagtctgagaggtcttctcaaaagttttgggtgtgtactagaagaatctgaaaagggattaggaaagtaggggcaagttctggattgattgctatcaagaaatggtgggaaatttggtgactgaatatatcaataatgtgatagagctccaatgcccctggtatatccccatgtttaccctgtgtttcattatatcagcataccccccatgtttttatttcagtaacctccataatataaagaagcatcatattacttctctttattaacaaagtaaatgagcctaacactgaaatcaaatcatataatttggtattcactttcaaaataaatgactgaaaatagaaataaaagttctttatattgttgttgcttttttacaagttgcttttaatatggacacagccacatctttgggccaaaccttgcagttagcaagccagtggtggccaacaagttgggaagttttatccctgcaggaatggggtttgcttctggaaagtattgccctccatcaatgtatcacatgaagtcaaagacccatctgaagcaggcatagacgggtagagaaaggccagaaaagtaacacagtggagaaacacttatagaagtcattctaaattagaaggaaaagcaaaaagcatggagtgtttttccctcaccaatatcaaactgagtttcttgaaaaatatgactgtaaagaataacatatatatatttatatatatatatgacttctataactgaagatgaaaattcatctacatgttaacacaatatattccatcctttgaaa

SEQ ID NO: 682042 - DNA, 1961 bp, Homo sapiens
tcttagaagaaaaattattattctgcagcaagctctctaggtttatctacaagatgctacttgtcctaggaataggatcagtttttcatctgatttctattacacttagcattcaaatagatttgagatcattcttgaaataattttcaaaaatacataccagaaggtaatctgattcattaagtttggtaattatcaatctagcagtttacagacaccttattgtaaaaccagcttctttctcactgtgtaaccacaggatgcgggtgcatgtgaggacagtgaagccctcatgtgccagcccagttagtgaactagctcccaccttgacacttgtttggatgctttcaatgttctgtcrtgggtttgcaggggggagtaaactccccacggtgttccaggtgtgggagttattcattttagaacctctgaaaaaggacaaatgtttgtgatttttgaatcctagaaagggaaaatgaaagaggcagcccagaggtaccagtatgccttaagaaagtttcctcgagaaggattcggagaggacatgagacccttcaatgaattaagggtttccctctatctcaatttgtcgcgatgccgaagaaaaacaaatgtaagctgtgcccctttattccaacccagtcttccagcaacagagcccttctccagcagtgaaggccagcccttctccagaccagatcctgggccctcctgtccaatttgcttgcacatttacatgaacctggcatgtgggaaacagctcctatccgtgactatcgtttggtcacggctgctacgctcctcgcatgatgttgaaggaatgcacttgggtttcgtttccttggcctcagtaatgagaagcaaatgcagtctgctcctctgcagcttcccaacactgttgctgctggcactgccgtccccggattcaggagagtccaacccaagcctattgtggtgggcctgccttctgtgttaggtttgctcagagggtctgccagtaactaatttgtaaccggtcgtggggaactcatagtcgatttgtaactagtagatctgtttcagtagtacttcctaccttttttttaactgtgtcctcctgccccagtctgttgagctgcttgcttctgtgccctgctgccggaatagatgcagtgtctgcgctcctctctgaggctgcccctccaccgggctgtgaggttccaccatctggccttcttggggcactgttactaccactgttttcatagtggattcttctcctaatgatattaatcaaccatcattatctcctcactttaaaacaagatagaaaacggaactttcccttcctccctctctggctgtgcctcagagcgctgctaccctttagaacaaaactagacgggcttcccacaatcgtgtgtccaggctgcttctgactcctgtatttcttgtcgacaccaggactttggcatggcagaggaatttgcttccaaggctctcgaattgaagcccaagtcctatgaagccttttatgccagagcaagagcgaagagaaatagcaggtaccgtctgtggttatctttgtgtctagagctttttttcttgtgggatcaaacctgcctgttgaatttggggaggttttgctgcagaagtgttgctcaggtgcctctcatcctttttagtagtgaattagtattactacctgcttccaagaggcatagtagtggacattatcagtgatgagtaaacttctattttctcctgacgtctcaataatcattccttcccacccctccccccacgtgaaacttactgcaacatgaacttcctacctagtttagtccatatttcaaggaaactgccaactagggacattaggaagttcagaggtggggaagagtgatataagcctgttgactgagagatgggcacagtgttaccatgggatggtaacaatattaaaaagattctggcgccca

SEQ ID NO: 682043 - DNA, 1961 bp, Homo sapiens
tcttagaagaaaaattattattctgcagcaagctctctaggtttatctacaagatgctacttgtcctaggaataggatcagtttttcatctgatttctattacacttagcattcaaatagatttgagatcattcttgaaataattttcaaaaatacataccagaaggtaatctgattcattaagtttggtaattatcaatctagcagtttacagacaccttattgtaaaaccagcttctttctcactgtgtaaccacaggatgcgggtgcatgtgaggacagtgaagccctcatgtgccagcccagttagtgaactagctcccaccttgacacttgtttggatgctttcaatgttctgtcgtgggtttgcaggggggagtaaactccccacggtgttccrggtgtgggagttattcattttagaacctctgaaaaaggacaaatgtttgtgatttttgaatcctagaaagggaaaatgaaagaggcagcccagaggtaccagtatgccttaagaaagtttcctcgagaaggattcggagaggacatgagacccttcaatgaattaagggtttccctctatctcaatttgtcgcgatgccgaagaaaaacaaatgtaagctgtgcccctttattccaacccagtcttccagcaacagagcccttctccagcagtgaaggccagcccttctccagaccagatcctgggccctcctgtccaatttgcttgcacatttacatgaacctggcatgtgggaaacagctcctatccgtgactatcgtttggtcacggctgctacgctcctcgcatgatgttgaaggaatgcacttgggtttcgtttccttggcctcagtaatgagaagcaaatgcagtctgctcctctgcagcttcccaacactgttgctgctggcactgccgtccccggattcaggagagtccaacccaagcctattgtggtgggcctgccttctgtgttaggtttgctcagagggtctgccagtaactaatttgtaaccggtcgtggggaactcatagtcgatttgtaactagtagatctgtttcagtagtacttcctaccttttttttaactgtgtcctcctgccccagtctgttgagctgcttgcttctgtgccctgctgccggaatagatgcagtgtctgcgctcctctctgaggctgcccctccaccgggctgtgaggttccaccatctggccttcttggggcactgttactaccactgttttcatagtggattcttctcctaatgatattaatcaaccatcattatctcctcactttaaaacaagatagaaaacggaactttcccttcctccctctctggctgtgcctcagagcgctgctaccctttagaacaaaactagacgggcttcccacaatcgtgtgtccaggctgcttctgactcctgtatttcttgtcgacaccaggactttggcatggcagaggaatttgcttccaaggctctcgaattgaagcccaagtcctatgaagccttttatgccagagcaagagcgaagagaaatagcaggtaccgtctgtggttatctttgtgtctagagctttttttcttgtgggatcaaacctgcctgttgaatttggggaggttttgctgcagaagtgttgctcaggtgcctctcatcctttttagtagtgaattagtattactacctgcttccaagaggcatagtagtggacattatcagtgatgagtaaacttctattttctcctgacgtctcaataatcattccttcccacccctccccccacgtgaaacttactgcaacatgaacttcctacctagtttagtccatatttcaaggaaactgccaactagggacattaggaagttcagaggtggggaagagtgatataagcctgttgactgagagatgggcacagtgttaccatgggatggtaacaatattaaaaagattctggcgccca

SEQ ID NO: 682044 - DNA, 1961 bp, Homo sapiens
tcttagaagaaaaattattattctgcagcaagctctctaggtttatctacaagatgctacttgtcctaggaataggatcagtttttcatctgatttctattacacttagcattcaaatagatttgagatcattcttgaaataattttcaaaaatacataccagaaggtaatctgattcattaagtttggtaattatcaatctagcagtttacagacaccttattgtaaaaccagcttctttctcactgtgtaaccacaggatgcgggtgcatgtgaggacagtgaagccctcatgtgccagcccagttagtgaactagctcccaccttgacacttgtttggatgctttcaatgttctgtcgtgggtttgcaggggggagtaaactccccacggtgttccaggtgtgggagttattcattttagaacctctgaaaaaggacaaatgtttgtgatttttgaatcctagaaagggaaaatgaaagaggcagcccagaggtaccagtatgccttaagaaagtttcctcgagaaggattcggagaggacatgagacccttcaatgaattaagggtttccctctatctcaatttgtcgcgatgccgaagaaaaacaaatgtaagctgtgcccctttattccaacccagtcttccagcaacagagcccttctccagcagtgaaggccagcccttctccagaccagatcctgggccctcctgtccaatttgcttgcacatttacatgaacctggcatgtgggaaacagctcctatccgtgactatcgtttggtcacggctgctacgctcctcgcatgatgttgaaggaatgcacttgggtttcgtttccttggcctcagtaatgagaagcaaatgcagtctgctcctctgcagcttcccaacactgttgctgctggcactgccgtccccggattcaggagagtccaacccaagcctattgtggtgggcctgccttctgtgttaggtttgctcagagggtctgccagtaactaatttgtaaccggtcgtggggaactcatagtcgatttgtaactagtagatctgtttcagtagtacttcctaccttttttttaactgtgtcctcctgccccagtctgttgagctgcttgcttctgtgccctgctgccggaatagatgcagtgtctgcgctcctctctgaggctgcccctccaccgggctgtgaggttccaccatctggccttcttggggcactgttactaccactgttttcatagtggattcttctcctaatgatattaatcaaccatcattatctcctcactttaaaacaagatagaaaacggaactttcccttcctccctctctggctgtgcctcagagcgctgctaccctttagaacaaaactagacgggcttcccacaatcgtgtgtccaggctgcttctgactcctgtatttcttgtcgacaccaggactttggcatggcagaggaatttgcttccaaggctctcgaattgaagcccaagtcctatgaagccttttatgccagagcaagagcgaagagaaatagcaggtaccgtctgtggttatctttgtgtctagagctttttttcttgtgggatcaaacctgcctgttgaatttggggaggttttgctgcagaagtgttgctcaggtgcctctcatcctttttagtagtgaattagtattactacctgcttccaagaggcatagtagtggacattatcagtgatgagtaaacttctattttctcctgacgtctcaataatcattccttcccacccctccccccacgtgaaacttactgcaacatgaacttcctacctagtttagtccatatttcaaggaaactgccaactagggacattaggaagttcagaggtggggaagagtgatataagcctgttgactgagagrtgggcacagtgttaccatgggatggtaacaatattaaaaagattctggcgccca

SEQ ID NO: 682045 - DNA, 1961 bp, Homo sapiens
tcttagaagaaaaattattattctgcagcaagctctctaggtttatctacaagatgctacttgtcctaggaataggatcagtttttcatctgatttctattacacttagcattcaaatagatttgagatcattcttgaaataattttcaaaaatacataccagaaggtaatctgattcattaagtttggtaattatcaatctagcagtttacagacaccttattgtaaaaccagcttctttctcactgtgtaaccacaggatgcgggtgcatgtgaggacagtgaagccctcatgtgccagcccagttagtgaactagctcccaccttgacacttgtttggatgctttcaatgttctgtcgtgggtttgcaggggggagtaaactccccacggtgttccaggtgtgggagttattcattttagaacctctgaaaaaggacaaatgtttgtgatttttgaatcctagaaagggaaaatgaaagaggcagcccagaggtaccagtatgccttaagaaagtttcctcgagaaggattcggagaggacatgagacccttcaatgaattaagggtttccctctatctcaatttgtcgcgatgccgaagaaaaacaaatgtaagctgtgcccctttattccaacccagtcttccagcaacagagcccttctccagcagtgaaggccagcccttctccagaccagatcctgggccctcctgtccaatttgcttgcacatttacatgaacctggcatgtgggaaacagctcctatccgtgactatcgtttggtcacggctgctacgctcctcgcatgatgttgaaggaatgcacttgggtttcgtttccttggcctcagtaatgagaagcaaatgcagtctgctcctctgcagcttcccaacactgttgctgctggcactgccgtccccggattcaggagagtccaacccaagcctattgtggtgggcctgccttctgtgttaggtttgctcagagggtctgccagtaactaatttgtaaccggtcgtggggaactcatagtcgatttgtaactagtagatctgtttcagtagtacttcctaccttttttttaactgtgtcctcctgccccagtctgttgagctgcttgcttctgtgccctgctgccggaatagatgcagtgtctgcgctcctctctgaggctgcccctccaccgggctgtgaggttccaccatctggccttcttggggcactgttactaccactgttttcatagtggattcttctcctaatgatattaatcaaccatcattatctcctcactttaaaacaagatagaaaacggaactttcccttcctccctctctggctgtgcctcagagcgctgctaccctttagaacaaaactagacgggcttcccacaatcgtgtgtccaggctgcttctgactcctgtatttcttgtcgacaccaggactttggcatggcagaggaatttgcttccaaggctctcgaattgaagcccaagtcctatgaagccttttatgccagagcaagagcgaagagaaatagcaggtaccgtctgtggttatctttgtgtctagagctttttttcttgtgggatcaaacctgcctgttgaatttggggaggttttgctgcagaagtgttgctcaggtgcctctcatcctttttagtagtgaattagtattactacctgcttccaagaggcatagtagtggacattatcagtgatgagtaaacttctattttctcctgacgtctcaataatcattccttcccacccctccccccacgtgaaacttactgcaacatgaacttcctacctagtttagtccatatttcaaggaaactgccaactagggacattaggaagttcagaggtggggaagagtgatataagcctgttgactgagagatgggcacagtgttaccaygggatggtaacaatattaaaaagattctggcgccca

SEQ ID NO: 682046 - DNA, 634 bp, Homo sapiens
aggtgggaggattgcttgagactgggagtttgagaacagcctgagcagcatagtgagaccttgtctctttaaaaaagaaaggaaggaaaggaaggagtttgcactcacctggaaacatctttaggaaaaaacattctatcttagtatgtttaaatatatttgaaacacagcattttctactctaggaaaaacggatgacttaataaaatcatcaaacaaaatacaaagcccattttcatgtcaaatggtcctaataagctgtgtgtcaggtagaataagttcttaatgagtaagcttcctattgctaaatcaacatatcgtttaggggaaagctcatttacccacaaacaatatctgcgttaagggaaaaaaaaccttcagataaattagagatgattrttataacaggatccacgctttatttctttgatttaggggtaaccataatttatttaggtttgcattaatatatttctagctactagggcaagttttgaggaggggctagaaagtttttagtctcataagtcattgctctgtgaagatcaatctcaaaatatgatgaaactttttttaaatgatatcttcatgtcagtcagtgacgaaacttttttcctggcagtctgactaagca

SEQ ID NO: 682047 - DNA, 2332 bp, Homo sapiens
taattattgcccagattcaataattatttggtagttgcaaatgatgatattttaattctaccatttttcctttaccattaggtggagaacttctatgaaggattttttttcttgtcaaatatttggtaagacaaatattgtagatgaggcaggataggtactcgtttctttttccctgtttatagcttttaaaagtaacaagttggtttcctagcagcctctgaaggtgactaccttaggtagagttctggcaaaatcagacttggaaacagggatccgaaggtgcaggaaacaccaacaaggggagtggagaagtacgaccaggaagggaaggcagcccaaccagaacacgttactgagccagctagcacaaagggtgatagcgttaaagctgcctgggacactctaagggctagtgtagaatgcttccatgttatcccttttgagggacgtaggttgatggatgtgcaaaamcctacctcttctgtcctgatatgggccctggaggccagagaaagctcccgggcaaagaagcacatgtgctggcagagggaagttgggccactgacccctgacatagtaagaggggatgtgggtgaggcactgacaaagactgctatagcccaccgttttccctgctaaatgccccacagtaagtttactttattccatcattgacacttcaaggtggcagttagcgacaattaaaaaaaatagacttgccacatgaatagtcataggacaatctacatccctcccctttgccatagcagtccagagactgcaactatgtttatcatctcactcctcttttgtccattctgcattctctatcaccttggctagcttgtctagggtatatgaccagtgggataacccagaccttcatctctgagggatcagaacctctggtcgttttgcccttgttggactgtggttgctgtagttgcctacttactggaatcactagcaagcttcaaggggtaatccactgtagcaaaggaggccataacttccagcccctattgtgcagcagcaatctcaacccttcagataatcagggtcagttgctcaagctgatatattaatcttgcttgttgaactactggaatggaagtcctaaataaccaagtggctgctgtatgtttagtagaatcctatgtcccctagtggaaggatcccactccttggaaacataacgtctagtctagcagaatctaaagtggcagcacaaatttctcaaatgggtcatttggaatggtggtgagaggggctgctcttacttcttctccttagtttttagatccaattattttacctttcagctaccaagaaccatagatatattcttagttcaaaataggtaccacattttgaaggatagaacttctaaccttaggtgtcacttctaagctggtgccatagctgtatctgtaagagaccattccaacatactattagacttgctgcttctgagtgattcaatatatggtaggatcctatgatcatggacccattttcacacctcctttgccacaatgtgagtcccttggtttgatgtgatgttaggtagtatcgtatgtcagtaaattagatactgtatacgttcttagatgatggtgttggcaagaaaatgaataccatgaaggcatatcatcccaggaaggacatataactttccctccaggatgagagggctccagtgtaatcacctagccccaggttgctagtgggtctctttgagggatgacaccatatggagagctcagttggtctttgttgctgacaggtaggacattcagtggcagcattagctagatcagcctggcaaggagtacctggtctgttggactaatgcatagccttcgtccctgcctccatggctactccatttatgagcttattgtataagcactgggggactgaagtcagaagctggctgaccttcactggaaaagccactctgttcacctggttgttcagagcctccttaattgtgagtgcttgctggtaggcattgacaggagttacaaagatatacactttgttgggctgactcccatatgtctacccacatgctgcttcttagaactctttgtctcggatctttttccctccaggtccatgaccaatcagcaatgccatttgccaccgctaggagttcacatctattttaaccttatgcctcttcacactaagttaaagactagttgtactgttaacattttccccatctgtctttcagggtcacctgaaaggcagggctgtagtgtgagagcagcactaacaatggaaccatcccatttgtgaaccacatctagattttttttca

SEQ ID NO: 682048 - DNA, 914 bp, Homo sapiens
ggaacataaagcccctggctcacagggtaatcagagccatgccagtgacaggtgatgggagaagagatttaaaacattccttcctgggctttaaaacccagcacctacaaccctttagattcaccttgggatcataactctagatacgctctttccacttgtttgtgagagataggccaagttacgtcatcaaatctgttgaatgccctctagatacaaagcaatttgtgaagatgaagatgggacaaggagccagcactgaaaatgatcagtgttgctcagcaaaaccgacatgtaagcctgttagcaatgaatgaccagtgagggttttccagcaggagagtgcctgattagatccacatttcagaagggtcatcctggaatataggtgacctcagaaacatgatgattatgttagacacaagaactgatgttatttggattaacacagcaccagaagcgatggatgggtggaggagactgttgagacattttggggataaactgaacataytgagtgaatcactgaaagtgaaagtaaaagagagggggagttggttgagctttctagccatggtgtcatactccaagatgatgagcacagagggtactgcccgtttaggaagggaattttgattttgatgtgactacaggatatctaggtaataaacagatggaaataataattccagtaaacagatggaaataataacttagagcatagcagaaagttgagggtgagagagaaagatttaggagtcatcagtataagagtagatcaatgaaacatgcaagtttgaaactgttgttactagagtgtcttcccaagatggtggctgtgctggtacatctttttgctcctgccaacagctacctctttccacagagatcttgaaaaagaggaaacaaaccaa

SEQ ID NO: 682049 - DNA, 610 bp, Homo sapiens
gtgtcagcagggctacagcagccagggctgcaggctccacctcttctctctgtggggaagggagggagggagaaactggcagagcctctcagccctttaaaggcctgtgtagcctgcagtgggcccagggctgccscacccctgcagtgcagcagaacctcccccaggttagcaaaaacatcccacacagcacacattagcgggagcattaatggaaggcagcaaatgtctgcagaagagcacgcctgtctggaacacttacatccacgtccccaacagcaccgaggagagagaaaagaacattccgttagagaagggtctttggcactaaaactcacacgtgtgcaccatgcacacatccccatccacacacactcacacacagacacactcacatacacacatgtagacacacacatgctcactcacttcccatgctctaaacctcaggcagctcctcctgctataatcagaaggacactgcccagaggccacactcaaaatgcaattctctctctctctctctctctctctctgagaggacaaaaaggatgactgcttttaaaaattatgtcctacatgcttgattttaaaagggggggagggacac

SEQ ID NO: 682050 - DNA, 2217 bp, Homo sapiens
gatttaagggccacgcagtcaccagacagacattgtggacatagattcccacccttctcaccacagcgaggcagaagtggtgatccagaaccgtcccccacccccccaccatcagtcctgggcagctgctgtgctcagcccctgagacccaaggcccctggcatcctcccaaggagcagcctgggaaactgtgtgcccccaccctccatgagcctgaaacccgtgctggtggatccgatgtcggggggtcccaaacacggctgcatctcaatgaaaatcacacttctgggtctcaccccagacctactgaagcctctgcggatgggcccaggactttgcatgtttaacgaggtccccaggtcagtcccaataccagcaatcccacgatgggcgtgtgacaccagagtcagacattggaggcagaggtgtggttactgtaaggtcctggtcaccacaggaacaagaactcagagctagcatggcccttggtatgcagaggctgggggtggtgtgaggtacatragaggtcagagatgagaaggagacagcagagtgagagagaggacaggcaatattcaggcagggaagagggcccgtgagagcagtaagccccgggtgagaagacaacacttaggtatcaacaggtatgcctccccggagtctgagaagacaacacagaaggctcccggggcccaggtccagttgtgcctgctgcctccaggctttgcctagacactagcccccaactacccccaattccccagacaatcatatggaggaaaggggaccctttggtgcaggtgacctagccctgtccctgatcagtcaccaggctggtttcctggccgggcctgaggggtgctccgccccttggctgacctggcatgatctgatggacaccccgttggtggcaggtccgtggggccagggccaggctgcatgccacactgcggactgggcctctctcaatgaaagcgaggcccaaggagtgggaaagaggggaagtaaagtgacacctacctgagctgctagcgctctcagaagcactcctggacatcttaggctggccgtgtttgccgctggcccgcccagaccccggtggtggggggcccgagggagcaggggcgccgtctcccctgatggtggtgaggtcctgcatgctgaagctccgcagtctctccgataaggcaccctgtccctggatacaacacaggaggggcacacgtcagaggtcctgctccacaggtcacactcgacaaaggccaagagggagctctgatggtcagccaggtggaaatcaagacctggatcaactctgaggcgcaggtgcccagacatagctgctggaaacacagagagggtcaaatcccggaattttccagggcctcctctggggctcagtaattgctcctttggctccaggatccctccctaccctcagacaccactatgatgatacgatgatacgatgatgatccggagcctcagacagacccagggccaagggcgtgactactgcctgcagctcctactccttccaggccacctgctgcttctcttgctttgcataaataaaaatccacatgtatctccatttttctcagtacatgagaatctggtcaggcaatcaaaacctaatattctatgtgcttggttcttattattttcaaaggacacaaaatacagacaatatttttctaaatgtttgacaacagaaatttcttttatttgtatagcatattactgtctacgaggcacatttacttctgctggtgcatttcagcttcataaaatacccaaaaggtaatgaatcagaaaggaaaaaaatgatttaaaaaaaccctgctgattgtaaccatttcatattctgagggagacagagaattaatctcggggggaattgttcttttatttagaaagcaagatcaatccattttacttacgaaagagcagctcctcactgtctggatgagagaatgtgtcagagtgaaaatgatcacagtgaaggctcagggatggtggcattgctttaagtgtgcctcaggggctgcagagagaggttatggaaacctgagagtgggaggagactggggaaattgagaatcggctaggatttggagcaagaagtgacaggcaagtaactaccaggcaaatgaatgaactcagacatcttcagaaagaagaaagcctggagggtgtgcagggttccctcgggtg

SEQ ID NO: 682051 - DNA, 3523 bp, Homo sapiens
cattttcctaggccaaattaatatggattttgaattatctcctgttgttcagaaagatcctccctgcattggtggttttgacatttcccaggctccaagagccatggatctyctctgagagctgcactggagaaggttctgaaagtcttctttacatctctaaccagacaggtccttaggaaactcctccagcaagcactgaccccttcacagccagtcctgtgtcggactctgaggtaaagacaccacccagttgctgccctcagaatcaacctagcccttgcttctctcacaagagtgaaacttggaggcattaatatatatttttgttctgcaaaactttaaagaataaaacattagaaataaaactataacaatcatccatgtgcctgccacccagatttattgttttttaaagaagtaaaacataaatatagttaaaattccttgtgtatccctcccagtcccaatcctccctcagaggcaagcactgtggtgaagcttgttactgttctacatgtatttcacagttttattatatattcatatgcacatagcacataaacttaaaagacataaactcatactgtatataaattaaattttacacttaatataaatataatttatatattacacattacaaaaagttgtttatgtactgcataagctttacatttaaatattatacttagtcaaaaataaactatatatttacataaatataaactaacatttatataccgtatgtctaacattaacgtttatactgtgtatagtgtgtataaattaaaatgtacaaaattagcttcaaacccttcacataatgatggtctaacttgccttttgtccaacacaatatatttttatttctattcattttgatgcatcttgattcccttcattcattccaactgcagtggagttttccattattggaatatgtcacaaataatttatgactgtcctatgatttgcaaagtacacttgtttgaaatttcctatgactacaaacaatgctgccacacattctgtggctgttttcttgtgtacacatgcgagtgattttaggacagatacatagaagtggatgcttcccctttaccaggtattgtcagttgtttttaaaagatgtctgcgtgtgcactgtcacaccagcagcataagaggctcctatttctctgcattcttgctgccaccaggccatgttgatcttgaactttgttgttaattggatggaagtgaaatggtatctcattggtgtttcacttgtttcccgactattcatgaagttgacaatcttttcatggatattgaccctccgggtttctgcttctgtgaaatgccttttcatagtttttgcctatttttctctcttgggttatttatctttcccttattaatctgtaggagttcttaaaatattcaggtttttaatcctttgttggttgtgagcattcaccatgcttctcctggtctgtgacttgtctttgaattttgtttataatgtcattgattatgtaaaagtgttaaattttgatgtagttaaatttattgctatttttcttataatatatgcatcgtgtgtcctgtttaaaaaatccatcatctgcttctggctactgacatttctccatttgaaaggtggcatctatgactatgcgtgggacagggaggaggtgctttttattgctttctaagttcttaattacaacaacaaccccaccattaggtaaattcaggttcacactaatgattccagattattttctaccatggagtgtagtatagtgctgaaaagtgtgagttctgaagcgagactgcctggatttggatcactcactttgggcaagttacttaaactcacttgggggaattatactctggtatctaccttgtagggttgctgtagagattaaattagtttataaatgcaaagcccttagaacagtttcgggtataatgtaagagccaagagttctctcttgctattgttattattgttattagcattatttttatcatcgttagtactcggatttccgttgggctgggtttctaggggccaccttcagacattagagctgctgtcctctacatgcttctcagtgcctaaactgaaatcatcttgttctgcatggtccaacatcaccttaggacacttgtcttctaggtttttttttttgagatggagtcttgctctgttgccaggctggagtgcggtggtgcaatctcggctcactgcaacttccgcctcccgggttcaagcaattcccctgcctcagcctcccgagtagctgggactacaggcatgcgccaccaagcccggttaaatttttgtattttagtagagattggctttcactgtgttggccaggatggtctcgatctcttgaccttgtgatccaccttccctggcctcccaaaatgctgggattacaggcatgagccactgtgcccaaccttatttagctttcaaaaaaagtagagaattacagttttcaaggggtcaagtcctatctgaattcagagagagtcatcatcctcttaaatctccaaagcaagacagatgcattaacacaggtgacttgtgagaacttaatagtctgtctgttgtgaacgtttccccactgccccattgcctttctctggtttagtcacccctcattcttgtgcttctcagacaggctgcgaaagcatcacccctctctcctctctctctcccatccacaggggtgggcatgttacccaagctggattacccatctgactttactaattcttctaagaggtgggcatatgacccaagctaggccaatgacattttctttttgcccttgactgacttgagaaaagttatttctttcctggtggcaagctggaaagatgagtctgaggtgctggctaagttctttaatggtcagccttgtctagtagattctaggcccttgtcggggagtcagggaccatgtccaccttgcgtgctcttttatctcttgcatcaaataggccaggccctgggaacgtgataaaaatagttgaagaaaattgtgctttccttccggaaaatttccaggccacatgctgatcaactatgcctattgctgctcactctgcaccttcctgggtcctgtggttcagggcctcagctcctgtggttcaaccagagtatctcgttgagcatatttggatttgacctttgaacttcaaccttacatacctcccagcacatgcttttggtgtcgacccttcttttccatccagagggcctacagagaaaagtgtccttgactgtgtgacatgctttaggttcttctggagtgagcagctagtttcaccccactcccatccatcctcagccagagcaggagatgtattcagtcaacttcagctcatcctccttgtttgtgatcatagattctgcatttgtggtctatgcaaaaggaggaaggcacacagttaagacagcagatagaagaaaaatatttttgtactatgtttcttttaactcatagcttttcaa

SEQ ID NO: 682052 - DNA, 3523 bp, Homo sapiens
cattttcctaggccaaattaatatggattttgaattatctcctgttgttcagaaagatcctccctgcattggtggttttgacatttcccaggctccaagagccatggatctcctctgagagctgcactggagaaggttctgaaagtcttctttacatctctaaccagacaggtccttaggaaactcctccagcaagcactgaccccttcacagccagtcctgtgtcggactctgaggtaaagacaccacccagttgctgccctcagaatcaacmtagcccttgcttctctcacaagagtgaaacttggaggcattaatatatatttttgttctgcaaaactttaaagaataaaacattagaaataaaactataacaatcatccatgtgcctgccacccagatttattgttttttaaagaagtaaaacataaatatagttaaaattccttgtgtatccctcccagtcccaatcctccctcagaggcaagcactgtggtgaagcttgttactgttctacatgtatttcacagttttattatatattcatatgcacatagcacataaacttaaaagacataaactcatactgtatataaattaaattttacacttaatataaatataatttatatattacacattacaaaaagttgtttatgtactgcataagctttacatttaaatattatacttagtcaaaaataaactatatatttacataaatataaactaacatttatataccgtatgtctaacattaacgtttatactgtgtatagtgtgtataaattaaaatgtacaaaattagcttcaaacccttcacataatgatggtctaacttgccttttgtccaacacaatatatttttatttctattcattttgatgcatcttgattcccttcattcattccaactgcagtggagttttccattattggaatatgtcacaaataatttatgactgtcctatgatttgcaaagtacacttgtttgaaatttcctatgactacaaacaatgctgccacacattctgtggctgttttcttgtgtacacatgcgagtgattttaggacagatacatagaagtggatgcttcccctttaccaggtattgtcagttgtttttaaaagatgtctgcgtgtgcactgtcacaccagcagcataagaggctcctatttctctgcattcttgctgccaccaggccatgttgatcttgaactttgttgttaattggatggaagtgaaatggtatctcattggtgtttcacttgtttcccgactattcatgaagttgacaatcttttcatggatattgaccctccgggtttctgcttctgtgaaatgccttttcatagtttttgcctatttttctctcttgggttatttatctttcccttattaatctgtaggagttcttaaaatattcaggtttttaatcctttgttggttgtgagcattcaccatgcttctcctggtctgtgacttgtctttgaattttgtttataatgtcattgattatgtaaaagtgttaaattttgatgtagttaaatttattgctatttttcttataatatatgcatcgtgtgtcctgtttaaaaaatccatcatctgcttctggctactgacatttctccatttgaaaggtggcatctatgactatgcgtgggacagggaggaggtgctttttattgctttctaagttcttaattacaacaacaaccccaccattaggtaaattcaggttcacactaatgattccagattattttctaccatggagtgtagtatagtgctgaaaagtgtgagttctgaagcgagactgcctggatttggatcactcactttgggcaagttacttaaactcacttgggggaattatactctggtatctaccttgtagggttgctgtagagattaaattagtttataaatgcaaagcccttagaacagtttcgggtataatgtaagagccaagagttctctcttgctattgttattattgttattagcattatttttatcatcgttagtactcggatttccgttgggctgggtttctaggggccaccttcagacattagagctgctgtcctctacatgcttctcagtgcctaaactgaaatcatcttgttctgcatggtccaacatcaccttaggacacttgtcttctaggtttttttttttgagatggagtcttgctctgttgccaggctggagtgcggtggtgcaatctcggctcactgcaacttccgcctcccgggttcaagcaattcccctgcctcagcctcccgagtagctgggactacaggcatgcgccaccaagcccggttaaatttttgtattttagtagagattggctttcactgtgttggccaggatggtctcgatctcttgaccttgtgatccaccttccctggcctcccaaaatgctgggattacaggcatgagccactgtgcccaaccttatttagctttcaaaaaaagtagagaattacagttttcaaggggtcaagtcctatctgaattcagagagagtcatcatcctcttaaatctccaaagcaagacagatgcattaacacaggtgacttgtgagaacttaatagtctgtctgttgtgaacgtttccccactgccccattgcctttctctggtttagtcacccctcattcttgtgcttctcagacaggctgcgaaagcatcacccctctctcctctctctctcccatccacaggggtgggcatgttacccaagctggattacccatctgactttactaattcttctaagaggtgggcatatgacccaagctaggccaatgacattttctttttgcccttgactgacttgagaaaagttatttctttcctggtggcaagctggaaagatgagtctgaggtgctggctaagttctttaatggtcagccttgtctagtagattctaggcccttgtcggggagtcagggaccatgtccaccttgcgtgctcttttatctcttgcatcaaataggccaggccctgggaacgtgataaaaatagttgaagaaaattgtgctttccttccggaaaatttccaggccacatgctgatcaactatgcctattgctgctcactctgcaccttcctgggtcctgtggttcagggcctcagctcctgtggttcaaccagagtatctcgttgagcatatttggatttgacctttgaacttcaaccttacatacctcccagcacatgcttttggtgtcgacccttcttttccatccagagggcctacagagaaaagtgtccttgactgtgtgacatgctttaggttcttctggagtgagcagctagtttcaccccactcccatccatcctcagccagagcaggagatgtattcagtcaacttcagctcatcctccttgtttgtgatcatagattctgcatttgtggtctatgcaaaaggaggaaggcacacagttaagacagcagatagaagaaaaatatttttgtactatgtttcttttaactcatagcttttcaa

SEQ ID NO: 682053 - DNA, 648 bp, Homo sapiens
taattgctgagagggaagagatgtgaaaggaaatgatcttatttgctttcggaggctagataactcatttcaatatgcccagctttgggcttttattcataggtatatgtatcagtttatgaataaaagagatacatattttgatttggaatgaggttgggatggaaggtgcaatttgaatttttcaagacttggattttatttccaatgctgtttgtgaggatttttttagtttttattttataagaactttttaataccaggcaatgtcattttagtaacacataacacaagaattgaattacatctgttgcatatcctctccctccctccartattcagcctagagaatttaaagttttagcctttaaaaaatttacaggctgtgcttgtctttatagcagctgatgtgaaatcaactcttagcttccattttcaaccttaagctttcttcattctgggtaaactcaaggcttcccaatccgtactggtgataagtgcatgatccaatcaagctagctggtggctcaaggttgttgactaaagagttgttccaaattgcaggattgtaaagggtgtcccatgcagttagcctgggcctggtaagacattctgtgccaccaacatttctgtggtcaaacttttgaa

SEQ ID NO: 682054 - DNA, 1027 bp, Homo sapiens
tgagaaggagggggaaaggaagacacagagaaggggaaagggggagaatccaggttttgctttgcctgaagtttatacaatttatagaaccctctttaggaaaaagaatacaaaattataaatagaaaattgctggggtccctcccaggccttgaaagggtcctgggcaaatgaggggccctgaagtataagattcccataaacttgcctctgagaagagaccctggaaaactgagtaattactgaaaagagactgtttgaacctgcagaggtgagggtgtgcgtcatagccagtgcatactgccatcagtgggaatgaagtctccagagtacaatgacattggtcgtagaaaataaagtgaaaataggagtcatagtgtgtaaattcctaccacctgctacattttctatgttcagagatttaaaagtcactttgcaaattgctcaaaaaggaacaagctgctggaagtcaaatttgagttttattactacgtgagtttaacctgatgcatgcccataacaacagggaggtaaaccgctgaaaagtaataaatgtgaagatgattaggatcaccagatatctggcttcccatggagatttttcacttgtcctggaattgctttacatacactgagttaaaagctactctatgacagtgggttcccagaggaacatgagatcctcccttttccaactatatagctgtgtgaggatggattttttaaaaatatacacttcaaccaaaacaacgtttcatgacagattgaatgcaggagcagacatscaaatccagctgtctcctattaagccagacagtaaagagatttgcaaaagtgtaaaacaatgtcactctcctcactagttggttctgttttaaaaaataattaaatataaatctataatatgtaaatatatagttatgttgcttatgttaacagtaataaaacatcacatttttcaataaattaatatgttaaaatgtctctaatttcaaatacagtatatcttaatataatccacataaac

SEQ ID NO: 682055 - DNA, 1073 bp, Homo sapiens
gtaagtgatgagttagagggagaaagagcagtcatttttctgtacagatttgtagaattgccaatggattgggcagagagggtggaaatctagttgtcaaaaattcaagaaaaaaaactgtcagtatcactaatatgtccttgacatgtttgttcttcaataaaacccaacagtagggaatagttaagtaacttatagttaatcgatacagtggggctgggcgcagtggctcacacctgtaatcccagcactttgggaggccgaggggggcagatcacgaggtcaggagttcaagactagcctggccaacatagtgaaaccccatctgtactaaaaatacaaaaattagctgggcatggtggcgcacacctgtagtcccagctacccaggaggctgaggaaagagaatcgcttgaactcaggaggcagaggttgtggtgagcggagatccrccactgcactccagcctgggtgatagaacgagactcgacctcaaaaaaaaaaaaaaaaaaaaaaaaaaacgatacagtgaaatgtgacgcaaccattaaagggtttttaatgacctgacttttttaaaactatatcatgtaaacttacctacataaatgtggaaatagatagaaatactgaaataaaatatgccaacattttaatttgtctatcttcaggtaaaaactttagggtgtgtagagaattttttcttgcattttctagattatctactgtgaaacatacattattttgataattagaggaaaaacagagtaaactaaagtgggaaaataaatttcaattagacaaaacaacccttctgtttctctcagttatctaatacagtatcttggtgtaagtgaatagagttaattaaaatgtattggtagaagaacttgatagtttgctctgtaacatgaaattgtttctttctaaaatgcttaattctacttgtaaaatagcatgattagaatataggtgttttaatgaaattgaaatgtgcatttatcagagttaaagcaaaatataaaaacaattatcctgcagaaaaagttaccctaacaaccaaatattctacca

SEQ ID NO: 682056 - DNA, 1681 bp, Homo sapiens
ccccaataataagaaaaaggattgcaaaatacattttatatttcacaaatcttcccaggcatctaaatgtctatagccccaatttgcactaagaaaatgtcgttcacgtggaaatatagttagttcatggtataaaagcctcaaaagatgcattttccacagacaaattatttttgggacacaatcttacatttttctctagccttgtattcagtgacacttctcttgatttagtgataggttatttgccaaacagctgtattttttattcaggttattttaacatggaattctacatcaatggacatcgctgcatatgcactggatcaaagacaaagctgaaaaaataatacattaaataagatattaacaatgatattgtaatataataagttcatgtgaagttgtgggactttatctgagattaaaagatagaaaatttagtgatgctagtatttcataaatgaataatctcaactgtaaattataatgtttacttgtggtttgtttttgaaaaacaaaatcataaaaaatgttacatttaaaaaagtaatcagcattatyggttcccatgaaacaatgccaactcctacaaactagatgatgtacatttcttaaataatagaatgctaattaatcactcttcctttaatgtgatatagtcactagagtgctaatattatggtgcaattttcagatctttcatcctgagacttaattgtgaatcataacacagactatgcatgtcaataacaatttttaaagaaataaaaacagtagagataagaatatgtttagaatattcaaagtaatttttgtgcaatatagcaaataaccctatgatgtagatgaatattttagttctaggtcaaaataggatatgtttaggaagtgggaatctggtaattttttactaattaaatgatgtagaattctgtttatgcacatacaactaactgtacctactaactgttttcattttactggaactgaggtctaacgacatgacagaaatcatactcttggctttttttatgttgttaatgctcatatgtagttagttttctattcttccacatttcttcagttcctctatgaaggtaattttttctatgctattgaagatgcctgtataaaaacctgacacacatgtgaatactatttgagacaaaatcttgcttttctatgtttattattaccagagtggaatttgagaatggaatttgataaaaatcgatgaccatctcagtgtaactggctacttggtaattaaatcttgtattagagtaaaacttttagcagcatcaatcaggtgccaatgttataaaaaggactgacagccatccagtacagtcttaactgcatattactgtggagttaatctcacttattccctgataatgttctctcttctggttgcagcttatttctaatttctcattaacctctctatattactccagtgttctgtagaaaaaacatgtttcccaggctgcattatataatttgattggaaatgaacccatacctgtcacacttggaaataaatgacaatcccaaaccacaagcaaccaacgcaatttttaaaagtctactctattataaatatactctttcttaacctcacaagagcaacactctggtaaaccccatttttcctgcctcagcttcatgtagtcat

SEQ ID NO: 682057 - DNA, 1468 bp, Homo sapiens
gctatccaattatagttatcagctattaaatcttactgccaatcagagaatgtttaacacttcaagaagtaatgaacatttaattcatgctaaagggaaaaatgtgaaattttggatgataataaaggttcccagttaaagttatataaaggagccagaacaaaatgaaacacaacaaaaacaaccttggtagcagggaaagctgggtttctatataacatacctggttaaagatgatacatgaaatgcatttatatataaaataaacagaattgcattagataaatatctacttagcagaattcaagctaaggccctcacaaacctgccacatgtttacaaaatacaaaaagaaaggatagcgcaaagtggtgactacactcaacaataatttatagtatattttaaagtaactgaaagagtataattggaatgtttgtaacacaaagaaatgataaatgcttgaggtgatggatacccccatttactctgatgtgattatcacacattgtacttcatgtatctcataaatatatacacctgctatgtacccataaaaattaaaaattaaaaaattataaaaaataaaaaagaaagaaggaagaaaagaaagaaataaaggaaggaaagatgaaggaaggaaggaaggaaggaagggaactgtatctatagaaatatatcctcagtaagcctggcatggtggctcacacctgtaatcccagaactttgggaggttgaggctggatcatcacctgaggtcgcgagtatgagaccagccggaccaacatggagaaaccctgtctctaccaaaaatacaaaattagctgggcatggtagtgggcacctgtaatcccagctacttgggaggctgaggcaggagaattgtttaaacctgggaggtggaggttgcagtgagctgagatcgtgccattacactacaacctaggcaacaaaagcaaagctccatttcaaatatatatatatatatgtatacacacacacagacacatatacacatatatacatatatataaacacacatattttatatatatattatatatattatatatattatatatatatatatatwatatatataatatatatataatatatatatatctcctcaggcaagaataaatgaatattgaattcagaagtgaaataaacttttatttaaatcaaacattctgttctactcttggaaattttagacaagaaaattgttttcagaaccataaaatttagcagatttccaaaatagaaaagaatgaatgaatgaactgagaacaaatcaaaacaaacaaataggtctttgaaaaaattgtgtcacacaatgaaagagaagagtattaagcaaagtatcacatgggttttgcttaggagtgaggcaaaattagtcctaaactaaatgctgctgtgcttcagccaaacaaagtttagaggcaagaactgatagaataaa

SEQ ID NO: 682058 - DNA, 1468 bp, Homo sapiens
gctatccaattatagttatcagctattaaatcttactgccaatcagagaatgtttaacacttcaagaagtaatgaacatttaattcatgctaaagggaaaaatgtgaaattttggatgataataaaggttcccagttaaagttatataaaggagccagaacaaaatgaaacacaacaaaaacaaccttggtagcagggaaagctgggtttctatataacatacctggttaaagatgatacatgaaatgcatttatatataaaataaacagaattgcattagataaatatctacttagcagaattcaagctaaggccctcacaaacctgccacatgtttacaaaatacaaaaagaaaggatagcgcaaagtggtgactacactcaacaataatttatagtatattttaaagtaactgaaagagtataattggaatgtttgtaacacaaagaaatgataaatgcttgaggtgatggatacccccatttactctgatgtgattatcacacattgtacttcatgtatctcataaatatatacacctgctatgtacccataaaaattaaaaattaaaaaattataaaaaataaaaaagaaagaaggaagaaaagaaagaaataaaggaaggaaagatgaaggaaggaaggaaggaaggaagggaactgtatctatagaaatatatcctcagtaagcctggcatggtggctcacacctgtaatcccagaactttgggaggttgaggctggatcatcacctgaggtcgcgagtatgagaccagccggaccaacatggagaaaccctgtctctaccaaaaatacaaaattagctgggcatggtagtgggcacctgtaatcccagctacttgggaggctgaggcaggagaattgtttaaacctgggaggtggaggttgcagtgagctgagatcgtgccattacactacaacctaggcaacaaaagcaaagctccatttcaaatatatatatatatatgtatacacacacacagacacatatacacatatatacatatatataaacacacatattttatatatatattatatatattatatatattatatatatatatatattwtatatataatatatatataatatatatatatctcctcaggcaagaataaatgaatattgaattcagaagtgaaataaacttttatttaaatcaaacattctgttctactcttggaaattttagacaagaaaattgttttcagaaccataaaatttagcagatttccaaaatagaaaagaatgaatgaatgaactgagaacaaatcaaaacaaacaaataggtctttgaaaaaattgtgtcacacaatgaaagagaagagtattaagcaaagtatcacatgggttttgcttaggagtgaggcaaaattagtcctaaactaaatgctgctgtgcttcagccaaacaaagtttagaggcaagaactgatagaataaa

SEQ ID NO: 682059 - DNA, 650 bp, Homo sapiens
tctggtttgaatttacaaatttgaagttataattcactgacatatatttaaatttgaatctttttttattaattatacatgattcatgtggtcccttttaagctgataattcttcccttcgggtatatatatgtatattttttcattagttctttttcttctctatgtgctgtattatttcttttaaaagtaacatatggtcacctgaataatttatctaaatattttatcttttctttagtaaagtgtttgcatttttgttccagattctggtaagatttttcagcttgatcttccagttccccagttcaatatttggtgaagtgcattatgtgtgtctcacatattttattgtgttactgtattcacaatcttgttaatttttaggaattatttagccatcttcaactttcctttcacagtagaattctagtaatattttatttatgcaatttttttcttttttttgagactgagttttgctctattgcccaggctggagtgcagtgatgcaatctcgctcactgtaacctccacctcctgggttcaagtgatactactgactcagcctcctgagtagctgagattacaggtgcttgccaccacgcctggctaacttttgtatttttagtagaggcrgagtttcatca

SEQ ID NO: 682060 - DNA, 2320 bp, Homo sapiens
gaagaaataaaatttaaaaggaaaaaaagaggccgggtgcagtggctcatgcctgtaattccagcactttgggaggccaaggtgggcataacacctgaggttaggagttcaagaccagccaggccaatatggtgaaactgtgtctctactaaaaatacaaaaaattagctgagcgtggtggcaggtgcctgtagttctagctactcaggatgctgtggcaggagattcacttgaacccgggaggcagaggttgaagtgcttgaacctgggaggcagaggttgaaataagccgagatcacgccattgcactctagcctgggcaacaagagcaaaactccatctcaaaaaaaaaaaamagaaaaaagaaagaaaggtatgcaggaggccataactccagagatgaggaggcctaagcaccaattatcttggagtataaagtcctaaactattataaaagggagggtgtgaaccataataacatcaacagtaataattctgccatatagtttgactgttaagtagacagaaattttaatcaactgatgtggaatacatatatacctgcaaacacacacataaagggacagaaatatttttaaataccgtacaattgacactgctttgtcagatttgggcattatatggggaatgccacattataaaaattagtataccttatttctcagagtattgaatcttttttatagataaacaacttctgtcacccaggctggatgatctttcaaaacttactgcagcctcatactccttggttcaggtgatcctactgcctgagcctcctgagtaactgaaacaacaggggcacatcactatatccggctaattttttatttttatttttctgtaaagacagattgggctttccttcccaggctgtcagagtatttgtatctcaagtttttgttgttgttgttgttgttgtttatgttttgcaatttttgagttgagtttgtttgccttcgagatatcaaaacagataaaaacttcccccttttaataatttaatctttgtaacatttcacaagctgtaataacttctcgttacaatggatatgatagcatttcttttgtgttcctgatattgctaaagagacacctgattgtttccaaaactgaagtgctttaaatgagaaaatactataataaaatgatcacttttcaaccctaaaagaaataaaacttcagaagataatatgggttcaaaaagaaaatatcagaaggaaattagtaaaataactatcaagatataggaaaaataattcatctgaaatttttattcaagcaaaattaatacaaacatttatattctaaaaatgtgtcctgtcatttaggacaatcaaagaagataagaaccagatattcttagcttggtggagattgtatgattcaatggaaactccttttgattgctaacctaaactggaaatttagggagtgccatatcaaagtgatacaaagggatgacaactttttgagataagtgagaagtaattcctgaaaggttaggcaaagcaaaagaaaatatacaagtggtaaatttaaagttttgtcagtaaatggattagaaaagccagaaaaactataaatgtgagaatgaaggaaagacacaggttctattgggaagaacattgtattctgtgattagaggaagcagtgtatccaaacaacaaaatagaataaagatcataagtgagaagctagttgtctcttttcctagactcagatatacaattgtatataaataaatgcatagcacacacagtatatcaggtacctactataaaccagatgattatttcattggtagaattcatgttatccaccactaaatgactcatttaacatcaaatagcctaaattcaggcatctcttaaatcccatattagtttcattgcaagcaacaaagatccaaaccaaaataatttgatcataaagaatttcatgtaataaaaataataaaaaagacaactgcagcttgatgtagatggccaatgaggctacttatgtcttggcttacagactctccctttgcagaatgtttgcaagatctccagcccttacttgccatctagttcatatgtcatggggaagaagttctgactctgttccataattccaagccaaatcttgtaactttatggctccagtgagaaacagaccctatacggatatgatacacagacgggcttaaggttgggatgcattctttccacctaagccaggcctctctcagctgaaattcattaacttggagttgagcagataaagataaaaggtctccaaattaaacatacaggta

SEQ ID NO: 682061 - DNA, 655 bp, Homo sapiens
ttctgcctcccaggtacatgcgattctcctgtctcagcctcccaagtagctcggattacaggcatgcaccaccatgtctggctaattttactactttctaagaaattctttttaaagtaagtattattaaattgccttttyagtttatcttattatttttattttatttatttctttttttgagatggagtctcactgtgtcacccaggcttgagtgcggtggcacagtctcagctcacttcaacctctgactcctgggttcaagcaattctacccactcagcctcctgagttgctgggattacaggtgcccaccaccatgcctggctaattttttgtattttttagtagagacagggtttcatcatgttagccaggctagtcataaactcctgacctcaggtgatccacccacctcggcctcccagagtgctaggattacaagcgtgagccactgcacccggccttattatatctaaaattattattgttttttttaaaacatggggtcctgctttgtcacccaggctagagggcagtggcgccatcatagctcactgcagccttgaactcctgggcccaaggaatcctcccggctcagccttcctagtagctgagattacaggcatgtgctaccatgccctactaagcttttc

SEQ ID NO: 682062 - DNA, 678 bp, Homo sapiens
ggacaaagaggtaacattaaattccaaactgttgatattaacaaaagaatgattgtcaggaatacaagatcaagatttgtaggatggaactcatgatttgagtgccacaatggaagagtatagcttttaaaagatcaaagggaaagacctgatagaaaaaatggtacacacttgtatggcaatctgttatcctaaggatgggaggaaaaaagggcatttgcgygaagataactagacagagacacaaaagtaatgggacaatctgctctaaaacacaataatgattcttttaaaattcagaaacacagaagttggcacaaaggtggtcctgatagtaacaggacatttgctgtacatttaagttctcctaaaataaaacaatgaaacactattgatttgtcttcatgataacggtatctcagaaatccgagaaagaaaggaggggagtagttaatctctacatcgtccttatcctcaaagcagctctatctggtggaatggaagtgatggggaaccttggagatgctttcatgtcaagtaaaggggttctgggtagaaccaacaaataacctggaagttttaaaataatggaaatgggaaaatgccgagaccagctcggtcggggagaccctaacccagcagcgctagaggaattaaagacacacacacacagaaata

SEQ ID NO: 682063 - DNA, 1327 bp, Homo sapiens
aaaaaaaaatcaccctcctttcctcatacaagttgtcctagataatagaataatagaaaaggccaaagtgccttaatcattctttgatactcatgaaacagtaattatttttacttgataaaaatattgtctataaaaaattatagaacaaatttatttataaatttgtgtgtaaaaattctacgaaaatcattagatcacacactaaaatattatttgagaaaagaaaaaaacatgatgaacatgtatgatttacctcagtaacataaggaggatwtcatatcagaagctctatcaatgtaacagtagtaatttactaaggaaacaaatcatatgtttagctcaatataagtagaaaaattattaaataaaatgtaatttctgtttataatacaacttttcacaaaatcaggcataaatgagaaccttattaactagttaaaggctgtatatgaacaactttcagtaagtattttttaaagaagaaacttaaggtatatttaatattagacaagaaaacattatgtcgccactactagttaacctagtactagtgggacataaccaaatataatgaaacaagaaatacaatgagatatcactgctggaagatgaaagagcttcagatgatttaatcatttatggaaactaacagtcttctccaagattttgtatacaactagtaagagtatttctggataaaatatattaaacaaccaacaatattttctaccagtagtaaattagtaagatatatccatcaagtataatataccagcaaaactttaagatataaatatattaacctattaagaagtctaaagattgttttggagaaactaccatctctatcaaaaggcatacaagatctgaatgaatacagagataaaccatgttcatggatggggcaacttagtattttaaagaggtcaaattttgccaaattaaataaaaaatgtatagaattccaatcaaaacttatacagagaaacttaggtctaaaatatattgtgaaaaacaaaagtccataagtaaatgataattttggaagagcaaaaaggaataccttccctaccctctattattatataaccataaaagaaaaaaaaatagcctgccacatgatcagacaagtaaaacaatgggataaagaaccataaaccgtcccttatggaatatggtataaaattaaggtgactattttaatttgcctgtgaaaattttactgcatttatgcctattggcctagcaaaattaaaaataatgtcctcttttacttttcagtttggaatatattgtatgatgtcttcatatataatcaattgat

SEQ ID NO: 682064 - DNA, 607 bp, Homo sapiens
tgtcttgttagacattacttttgttcctgccatcctttcttacacacatctctgtttggtgtcgacatatatgtcaggccctgtgctggctgagaacagtcctgagggcaacaggcaggtttctgctatcgatgtgagcccaggctaggaccgagtcccagcgtastgttgtgcttatgagcaagggctgggtcagattgtccaggttcaatcctagctctgccatgtatcaacgtctttgagtcttggtggttctgtcatctgtagaatggggaaaataatgacctacttaactgggaacagcaaagattaaatgagataattcatttgaaaacttgacccagtctcaagtgtagagtaagctcaaacagatatcaactgttagtgttttctgactttctgggcttaccctcttttaatgacagccaggggttcctggtttactggccctgcctcttgaatctgtgtttgattgatgatcctctaacaacatggtcttggtgttaaacttgcccaggttaacagtacaggactttgcaggatctcacaatacccagctagtccacaacttggggcagctgacctgggtactcctgcatccagaccc

SEQ ID NO: 682065 - DNA, 666 bp, Homo sapiens
ttgggttcaagcgattcttgtgcctctgcctcccaagtagctgagattacaggcatgtgccaccatgtctggctaattttttgtatttttggtagagacagggtttcaccatgctagccaggctggtcttgaactcctggcctcaagtgatccacccgcctcggcctcccaaagtgctgggattacaggcgtgagccaccgtgcctggccagaagggttgcctttttcatttctgtctcctagatgtcacatcaggttttaagaggctgtggctccattctttatcccacacagcaagaaggtagcatggctaaacatcctggtgcaatttcaacctctcaggaccaytctctagtttcaaaccccaaaaagcacctggccacataggtgagttgctccgtcactatcactcatttagttggagacactcatctcctcttaagcacctcccgtgctgtatgtatttttaaactattgtgacttattttgctttggaaatttaggagatcattgggtcactctttgaaacaaccagagatgctcaggaagaaagggatgtcacaaaaccaggtttggataccactgttctggggttcggcttcctgtgacttaagagatctgttcagattttaaacaggacagctgatccactatctcactgggtcc

SEQ ID NO: 682066 - DNA, 657 bp, Homo sapiens
caattacaaagagcaaggaggacactggagccaaatagcctgggttcaacacttgtctatgccacaaatgagctacatgtctttgacaagttgcttcaactcttagtttcctcaattgtaagtttcatatgaaatttagaaagaataaagggaatgggatctagcaccaaattaaaaagtaaacgtgatgtgaacttgaggcattaaattacaaataagtggtttccaaaagagagtatgctttgtctcatcaaaggaagaagcagaggaaacagcaaaagaggaggagaaaaagaacttgttcaaagcacaagccttcataagttatgtcttagtccatttggtgttgctatratagaatacttggggctaggtaatttataaagataagaggattatttggctcttgattctggtggctgaaagtttcaagagcgggcagttgcatttggcgagggcttcatgctgcttccactcatggaggaagacagaaggggaggtagtatgtgcaaaaagatcacttggtgagagaggaagcaagagagagaaaccaaagaatatagactctttttaacaacccactctaaagggtactgatctattcccatgtacaaagagaagtcactaacccctgcctgagggcattaatctatttat

SEQ ID NO: 682067 - DNA, 1423 bp, Homo sapiens
caaccagcgtgatctcttagaaccctcagtctgaattcctggcataaatctgactgcccttattattattattatttttccagataagccctagcttgttggctgtccgtggatggctgccctgggtttaggtaccgttcgccagttcagttaactgtagctgggattgggaatagctgggaatcatttaattggttgcctactccttagggctgtgggtgtcttcatctttggaaaagtgtgatgagacgtgccatgtttcccagcattgattagcagttgtgttatatttttgggaataaaattatgtatagaacagcggacttgcaattgattataagagagtccaagctcattatttcttatttcagatcaccctgagactataatggaagaagtgaaaataaagccacctaaacagcaacagacgacagaaattcattctgataaattatctcgtgagtgatttcaaacctacctagatttgctgctctctgataatttcctaaaagaaggaaatagtcatcagatattaaatatttctaaagcatggaacattaccccaaagaaatatttttctttttccttttcccttagaattttctcttatctattgataagctattttccttccaaagactttttygttttcttaagtttagaaattctaagtgcattctttgttcctagaagggtgaaaagaagggggagaggaattagctgttgctagtggagacttcatcttgatgtcctaacatgtgtaagacatgcctgctctgtttcatagaggtagtcccaactccagcttttagaaaggaataaaagtaaattcctatttctgttgccaggttgtttctggtaggcaaaaatcattaagtttatgatgaacactcattaaagtctgtatttttcatgatttctgtttcatgccaagattattgtgatgtttatgttttaaaaatatttgttttatagagattgtatgtttgtttttcctataatgatgtcttgttttgttttgtttttaataggatttaccacttcagcagaaaaagaggcaaaattagtttatagcaattcctcctctggtcctactgctactctgcagaaaattcccaacacccatttgtcatctgttacaacctctgacctctctccagggccttgccaccattcttctttatctcaaattccttcagctatccccagcatgcctcaccagccaacaattttactgaacacagtctctgccagtgcttctccctgcctacatcccggggcacagaacatcccaagccctactggcctgccacgctgtcgatcaggaagtcacaccattggtcccttttcttccttccaaagtgctgcacacatctatagccagaaactgtctcgtccctcttcagcaaaggcaggtgagtga

SEQ ID NO: 682068 - DNA, 2248 bp, Homo sapiens
cctgtttcccttttgagctttctaagtattatggatgatttgacagtggatgccacagactgttgacaagtacagttacataacaagaaaaacaagaattataatgagtttcaaatatgtattttttattcagtaagattagcaaattataggattggtattccccactacatataatgaaaattcttctttgtgaagctttcattataagcaaaaacatattaataaataatgcatgtggcagtttggtaataggaagagtttctaggttatggtaaccatttatttttgtgatcatttgaagatagtttatttctcctatattattaaagatccttagggttcagtaaagtatctgttgacctgagatttctgtcattatcctaatttttttcaggcctttttttcctaaatgagtgaaaacttttctccgttttagcaggatcgtgctatctaaacaagcatcattcaggaatagccaaaacacaaaaagagggagaagatgcttctttatatagcaaacggtacaaccaaagtatggttacagctgaacttcagcggctagctgagaagcaggcagcgagacagtattctccatccagccacatcaacctcctcacccaacaggtacggatggtctggggtgtccaagagctctttggacctgaggatagaattaatgacagggtactttgtctttccctgtctttactattcccatatactgatgcctcttgaatgagtattattaatagttggtttcaagctaaattatcaagtttttcctcttcaaatttaaagaaaataactttctgttacaggcattgtgaagtaagtctgctactggatatgatgtacctatttsatggataaacagacttgaatgttcatctgtaaatataattttaaaggatctttaaaaataagttcttttctttggtaaaattttccagtgagttctagtcttataaatctttttaccagaattttataacattaccctttaaaaaaatttttttctatactgcctcttatttcatgatctcaggatgttttatgggtaactgattaatttcatatttcattatacccttatccaatataatatcattctccccattttacagatgggggaacctgaggctgaaataagtgatgtgatcaaggtcattcaacaagctgggtggatagaaataaataacaggatattgtccttatgctatatagatattaacaatcttgcaacacagtgaaggtagatgacactttcaagagctttgtgaattctctttgtccttcttgctggttatccctatggtgtttaattgaaggaaaagccatatctcttattccttaatgttaaatggcatcaaagtcctccaaaggaattatcataatttaactccacagttatattttgctatgttgctgatgtgccaaattccttaattggtagtaactctgtagtgataatcaagtctcgaaaaaagtgaagctgaaaattactttaagtacatgctaaaagtaggcaacacactgctccctggtggtaccctacttatctgtataaaatttaggaccaaaactaaagctaagcctctcatggaattagttttacttcagcctcatcccagcgtgtgaagcagtaattattttctttctcaaatccttagttgtttgaagggagtaaataagaaggcctaatgtgaaataggaagcaaagaatattataagaacaatgttgattcttggagggagttgggtagttagattttagtgatagaattatgggaagagggaataggatactaagatatgatgggaaggaattttcaaattaaataagtggctatgagacgggaaaggccagtgctctgctacacttttatcattgggtcactaactagattatatgtttccggtttataaatgggcagctagaagcaccaagacattgagattttgtgattgtagtaaaaaaaaaaaaaaaatacccaaaatagccaatattagtgcttacctatctagctcctatcgttcactagactgcaaagcctacaaagtgaaaagatcctaatcctgtaggaatccaaggtgactgtatcctgattgggaagtcatcccccttcagttcatttttttcgtctataaagaacttcagtgccagcgaattaaaagtccattagactatggtttgtagggatctgaacttgccattagatgtcagtgttaacttttagagtcttgg

SEQ ID NO: 682069 - DNA, 2248 bp, Homo sapiens
cctgtttcccttttgagctttctaagtattatggatgatttgacagtggatgccacagactgttgacaagtacagttacataacaagaaaaacaagaattataatgagtttcaaatatgtattttttattcagtaagattagcaaattataggattggtattccccactacatataatgaaaattcttctttgtgaagctttcattataagcaaaaacatattaataaataatgcatgtggcagtttggtaataggaagagtttctaggttatggtaaccatttatttttgtgatcatttgaagatagtttatttctcctatattattaaagatccttagggttcagtaaagtatctgttgacctgagatttctgtcattatcctaatttttttcaggcctttttttcctaaatgagtgaaaacttttctccgttttagcaggatcgtgctatctaaacaagcatcattcaggaatagccaaaacacaaaaagagggagaagatgcttctttatatagcaaacggtacaaccaaagtatggttacagctgaacttcagcggctagctgagaagcaggcagcgagacagtattctccatccagccacatcaacctcctcacccaacaggtacggatggtctggggtgtccaagagctctttggacctgaggatagaattaatgacagggtactttgtctttccctgtctttactattcccatatactgatgcctcttgaatgagtattattaatagttggtttcaagctaaattatcaagtttttcctcttcaaatttaaagaaaataactttctgttacaggcattgtgaagtaagtctgctactggatatgatgtacctatttcatggataaacagacttgaatgttcatctgtaaatataattttaaaggatctttaaaaataagttcttttctttggtaaaattttccagtgagttctagtcttataaatctttttaccagaattttataacattaccctttaaaaaaatttttttctatactgcctcttatttcatgatctcaggatgttttatgggtaactgattaatttcatatttcattatacccttatccaatataatatcattctccccattttacagatgggggaacctgaggctgaaakaagtgatgtgatcaaggtcattcaacaagctgggtggatagaaataaataacaggatattgtccttatgctatatagatattaacaatcttgcaacacagtgaaggtagatgacactttcaagagctttgtgaattctctttgtccttcttgctggttatccctatggtgtttaattgaaggaaaagccatatctcttattccttaatgttaaatggcatcaaagtcctccaaaggaattatcataatttaactccacagttatattttgctatgttgctgatgtgccaaattccttaattggtagtaactctgtagtgataatcaagtctcgaaaaaagtgaagctgaaaattactttaagtacatgctaaaagtaggcaacacactgctccctggtggtaccctacttatctgtataaaatttaggaccaaaactaaagctaagcctctcatggaattagttttacttcagcctcatcccagcgtgtgaagcagtaattattttctttctcaaatccttagttgtttgaagggagtaaataagaaggcctaatgtgaaataggaagcaaagaatattataagaacaatgttgattcttggagggagttgggtagttagattttagtgatagaattatgggaagagggaataggatactaagatatgatgggaaggaattttcaaattaaataagtggctatgagacgggaaaggccagtgctctgctacacttttatcattgggtcactaactagattatatgtttccggtttataaatgggcagctagaagcaccaagacattgagattttgtgattgtagtaaaaaaaaaaaaaaaatacccaaaatagccaatattagtgcttacctatctagctcctatcgttcactagactgcaaagcctacaaagtgaaaagatcctaatcctgtaggaatccaaggtgactgtatcctgattgggaagtcatcccccttcagttcatttttttcgtctataaagaacttcagtgccagcgaattaaaagtccattagactatggtttgtagggatctgaacttgccattagatgtcagtgttaacttttagagtcttgg

SEQ ID NO: 682070 - DNA, 2248 bp, Homo sapiens
cctgtttcccttttgagctttctaagtattatggatgatttgacagtggatgccacagactgttgacaagtacagttacataacaagaaaaacaagaattataatgagtttcaaatatgtattttttattcagtaagattagcaaattataggattggtattccccactacatataatgaaaattcttctttgtgaagctttcattataagcaaaaacatattaataaataatgcatgtggcagtttggtaataggaagagtttctaggttatggtaaccatttatttttgtgatcatttgaagatagtttatttctcctatattattaaagatccttagggttcagtaaagtatctgttgacctgagatttctgtcattatcctaatttttttcaggcctttttttcctaaatgagtgaaaacttttctccgttttagcaggatcgtgctatctaaacaagcatcattcaggaatagccaaaacacaaaaagagggagaagatgcttctttatatagcaaacggtacaaccaaagtatggttacagctgaacttcagcggctagctgagaagcaggcagcgagacagtattctccatccagccacatcaacctcctcacccaacaggtacggatggtctggggtgtccaagagctctttggacctgaggatagaattaatgacagggtactttgtctttccctgtctttactattcccatatactgatgcctcttgaatgagtattattaatagttggtttcaagctaaattatcaagtttttcctcttcaaatttaaagaaaataactttctgttacaggcattgtgaagtaagtctgctactggatatgatgtacctatttcatggataaacagacttgaatgttcatctgtaaatataattttaaaggatctttaaaaataagttcttttctttggtaaaattttccagtgagttctagtcttataaatctttttaccagaattttataacattaccctttaaaaaaatttttttctatactgcctcttatttcatgatctcaggatgttttatgggtaactgattaatttcatatttcattatacccttatccaatataatatcattctccccattttacagatgggggaacctgaggctgaaataagtgatgtgatcaaggtcattcaacaagctgggtggatagaaataaataacaggatattgtccttatgctatatagatattaacaatcttgcaacacagtgaaggtagatgacactttcaagagctttgtgaattctctttgtccttcttgctggttatccctatggtgtttaattgaaggaaaagccatatctyttattccttaatgttaaatggcatcaaagtcctccaaaggaattatcataatttaactccacagttatattttgctatgttgctgatgtgccaaattccttaattggtagtaactctgtagtgataatcaagtctcgaaaaaagtgaagctgaaaattactttaagtacatgctaaaagtaggcaacacactgctccctggtggtaccctacttatctgtataaaatttaggaccaaaactaaagctaagcctctcatggaattagttttacttcagcctcatcccagcgtgtgaagcagtaattattttctttctcaaatccttagttgtttgaagggagtaaataagaaggcctaatgtgaaataggaagcaaagaatattataagaacaatgttgattcttggagggagttgggtagttagattttagtgatagaattatgggaagagggaataggatactaagatatgatgggaaggaattttcaaattaaataagtggctatgagacgggaaaggccagtgctctgctacacttttatcattgggtcactaactagattatatgtttccggtttataaatgggcagctagaagcaccaagacattgagattttgtgattgtagtaaaaaaaaaaaaaaaatacccaaaatagccaatattagtgcttacctatctagctcctatcgttcactagactgcaaagcctacaaagtgaaaagatcctaatcctgtaggaatccaaggtgactgtatcctgattgggaagtcatcccccttcagttcatttttttcgtctataaagaacttcagtgccagcgaattaaaagtccattagactatggtttgtagggatctgaacttgccattagatgtcagtgttaacttttagagtcttgg

SEQ ID NO: 682071 - DNA, 587 bp, Homo sapiens
aaacatttaaactcagtggaaaccaactcttggactyctaaagggggaaatattaggataggtagctgggcagacatgagccgggcatgagagggcccccgctaccaccaaggagtgtcaggtgatcatcaggtgatggtcaggcagttgttaaactggtctctctaaaataataattggtagcagcagatgccagggaaaggcaggcacctgaagctggtgatcagccatttcccagtaagatctcaggagttgggcgagtaggctcaagcatgtgccctaagaagcaaaatgatggagtttaactggtatatgaccttcctctaggaacactcgactggtaaggcaaaaacacttcaaatgagcacgtgcacagctgcagccaacacactgtgtatgaggcccctctcaagtgctggcaggccactgcacatgcagacagcttaccccatggaaaaatcaagggaggagagatgcaaaaccccggaagcatgccaacatataaaaccccaagtctaaggtgaaacaggcacttgggtctctcaagttgtcggcttggccctcttccacgtgtactttacttcctt

SEQ ID NO: 682072 - DNA, 1525 bp, Homo sapiens
gacgtttcttgttcatgttctagccgtagtgcctaaggtgtgtgtatgtagtacgtcgtaaatgagtaggctaaatgtctttctcctttccctttttaatatttagggatcttctagcagctgcaaaaacaggcagtggtaaaaccctggcttttctcatccctgcagttgaactcattgttaagttaaggttcatgcccaggaatggtaagcgttcatctgcttgtttctgccattatttcactagaggtttattgtagctgttacggactcagtggtgacagccacatttagacttctaccatatatcatttttaggaacaggagtccttattctctcacctactagagaactagccatgcaaacctttggtgttcttaaggagctgatgactcaccacgtgcatacctatggcttgataatgggtggcagtaacagatctgctgaagcacagaaacttggtaatgggatcaacatcattgtggccacaccaggccgtctgctggaccatatgcaggtaagagatgtagtgcttgtctcattgtcttgtatgaaacataaactgacaactaatggttgttctttgtcctttgttttgttagaataccccaggatttatgtataaaaacctgcagtgtctggttattgatgaagctgatcgtatcttggatgtggggtttgaagaggaattaaagcaaattattaaacttttgccaagtaagtaggtagcatctgcatttggtttgcaaagtatctgttggaggtagataagagttgttcctatagaaaaactgtactaatgccagaactttaccatagccaagtgaggtagttgtgccaattaacccgaaaggtaatttggaatacaagcatcaaatgtattataacttgatataatagttttgctgttttagaagttataaggcacgttaagcagtcttcacataggtcctgtcctccacctcttgcccattcttacctcatctaacatcccccaagaagccgcagattttttgccttacttgtacataccttggttatagtacttgcaacattatgaactggttataactaagaccatggtttcsttcattatataatttatttttaaaagctttgtcaaagtataattatatctacccatttataatgtacaatttgatgttctttgatttgtttaccactgtgacatcatcgctgcaatcaagaaaatgaacatgtccatcacagtcaaaggtttcctcctgccccttttcaatttctccctcccacccctccttacacgtataccttgtccccaggtgagtattgatctgttttctgctgctagattaggttgcattttctggaaataaagttgctgtgaacagtcatctacaactctttgtagaggcatatatctccttttctcttaagtaaacctaggagtgtcctagttggtatatgtttagtgtatgtttaactttttaaaaaactgccagatgttttccaaagcggctgtaccatttaacattcctatgagca

SEQ ID NO: 682073 - DNA, 780 bp, Homo sapiens
agtgtgctaacatcgaatatagagaaaactggtaaagaacattccagtaggaaaagaaaagaacaatcttccatttctgggcttggccaccatcaccctggtcggacctgtcctggacttccaaccttgactgctgagctcctggcttagcttcttgggttcctaattcctggtgtttaataattctctccacgatcatgtttttctgattttttttttcagaaataatgttttttaaaagacaaaaacaaagggaagaatatttaattactgagcagaagtaaatactgttggcattttgtacataatctaatttttatatgcatgttyatgctttttaatttttttatcaaaaattaagtcatctacctactacttgtaaccagcttgtttcataacatgttattttcctgtgtcattaaataattacttcaatgttgtatttcgtttatggatgctttgttgacccttgtttggtctgccaggatttaggttcaagatacctacctgaatgtgccaaactggctgtccctatctcagtatgtcttgtgctcagtagtcttgagattgtttacctctagtatgagtcagtctctagaggttttgtgagaaaagcatataaacaaagtggacagggttggccctgctgtatgagaacttacttcaggtccattagcagcctcatctatgatctccattacctgtagtcacaataagatactttgagaggccacatttacatgactttttttacagtatattataattgttttatgttaa

SEQ ID NO: 682074 - DNA, 659 bp, Homo sapiens
ttcattcattcatgtgagtttattaagcctaatccaggccttgggtgaggtggaagtggggtgcatggcagggaaagctgagagacacttggtgcccagccatatcctcggggagcctgccagggaaagctgagagacgcttggtgcccagccatatcctcggggaacctgccagggaaagctgagagacgcttggtgcccagccatatcctcggggagcctgccatctagtagagaggcagaagtgcatccctgtgtcagcactcgcttctggggccagtcacagcaggggcaccagctaggactgggactggggcagatgtagggatcaagaccaccttctcgaaagcggtaaygcttgatctgagactcaatgagcaaatagaaataaaaaagccccgataaaacaatattaaaaatcatctggaagaacacacaagggaaataatattgaagaatgaatgttttttaataacagcaaaaaaggtaactatgggagatacatggaattactacaggcaaggaatcagctgagtgaaaatgatagaaatgttctacgtatactttctttaaaatcaaaaattgacaagcctgaagtgaatgaacagccatctagtcaacattgggtactcactgattattcttatggttttgttttg

SEQ ID NO: 682075 - DNA, 600 bp, Homo sapiens
tgtgtgtgtatacaaatatgtatatatgtggtttgtgcaagcttttttcttcytttatttaatatcatgtgagcattttctgagataaataagaaatctaggcaaattttgtgtttttaaaaataatcactttgcatagctgtgccaatatttatttaactaatttatattatttagcaatagctttctattcttcaggttttccttactataaatcaagcaacactaaatgtctataaatttttgtgtacaagagttactcttttatctctcctatgacaattccgattattacaaatttgaatttatgaaaagcaattcaatatattttatttatagatacagtggtttcattttaaaatataagtgggtccaataaaatgttaatgaataacaaaaatcagagcctaaataaaattcaatttattaaaataggtttttaaatttttgatgagtgttgaattaatcatgagtttttcatccaggtcttttattttgagaaaattacaaaattttataaaccggatctctcgtcttcaattatttgttccccattaaaaaaaattactgtgccctggaaactataaaatttttaaggca

SEQ ID NO: 682076 - DNA, 600 bp, Homo sapiens
tgtgtgtgtatacaaatatgtatatatgtggtttgtgcaagcttttttcttcttttatttaatatcatgtgagcattttctgagataaataagaaatctaggcaaattttgtgtttttaaaaataatcactttgcatagctgtgccaatatttatttaactaatttatattatttagcaatagctttctattcttcaggttttccttactataaatcaagcaacactaaatgtctataaatttttgtgtacaagagttactcttttatctctcctatgacaattccgattattacaaatttgaatttatgaaaagcaattcaatatattttatttatagatacagtggtttcattttaaaatataagtgggtccaataaaatgttaatgaataacaaaaatcagagcctaaataaaattcaatttattaaaataggtttttaaatttttgatgrgtgttgaattaatcatgagtttttcatccaggtcttttattttgagaaaattacaaaattttataaaccggatctctcgtcttcaattatttgttccccattaaaaaaaattactgtgccctggaaactataaaatttttaaggca

SEQ ID NO: 682077 - DNA, 1411 bp, Homo sapiens
taaactctcaaaaaaagcagcacaacaacaggagtctggaactagccttgtttttaagcattttagagttccatttcagggaaggaaggcctgcagagcctgtttccattagctgttgtatttctagctctgtaagacagtaaacagtcagtcttctcaggtgctattttttgggaaaatttcagacttgattaaaaacaataaaagaaaaaaaatcttaccacctcaaccaccaatctaaagtagcccccacttctagggattttatccctacattctaattcattcatggtgcttataactgtcaggaaatatttgtgtacatgtttattttatatctcccccattataaggtaagttcaatgagagctggaaccttacctgctgtacatcccactcccttgccacttataggtgttcaacgaatatttttaaatgaataaataaatgagtgagtagaatttctgttcctagagtaatagaaattatagtcaagtcttgctcgaatcttacgttaccattacatttcagtttactgttttacttcttgacattgaaagtcttggctgtggcagacttattggtgtgttataattttggtgtatgttacataaactcttcccatcctcctagtttagctgctgataacccttccagatttgaactgatcagaggaggaataataagtacattttattctttgtgtttaagttcaaaaggcactctcaggtataaggaaacaaaaattgaaaatgagaataaatgtgatagatccaatttccttccacctagatccctgaataaagccacttaaaaatcttctagccaagatcgtgttactgcactccagcctggtgacagagcgagactccatctaaaaaaaaaaaaaaaaaaaaaaatcttctaatcagggtaaggaggagattagcaggtaggtcatttattgggtttgtgacactgtgtgcatgaacccccacctcggcaatattgaggctgagaatgaggttgacaaatatgagcaggaatgkagtgtagctgagctttgcttgtccagcccagagtccctatgataggcaggggacacgtgatgtgtctcttgtctacaaggcggcaggaattatagagatgctcagaggtttgcatctctataaaaatgagatgcaaagtgagtttatgtttgtaactcaaagccttctacagcatcaggatgagctgtcctaatagactaaccatcccagtgctcgtaagtaagatacagaagggctaagggagggctgaaaaagctcaaaaggcctgagaatgtgagcaaggaagaatccaagtaagtgtatgaggctacaagctaaatactaggcaggggtttggatacctcagtgaagttacaggaacagagttcatcaatcaaaatcct

SEQ ID NO: 682078 - DNA, 1912 bp, Homo sapiens
atatttgttgatagttccttctcttcttttatttatttatttagagacaaggtctctatcactcaggctgcaatgcagtggcaagatcttggatcactgcagtcaacctcctgggctcaagcgatggagtccctaatagctgggactacaagtgcacaccaccacccctggctaattctcatagtgtgttaatataatttatcatccttctttttaccttcttttttttgtttttagagtctcactctgtcacccaggctggagtgcagtggaaccatcatagctcactgtagcctcaacctcctgggctcaacagatcctcctgcctcagcctcctgtgtagccgggaacacaggcatgtgccaccacacccagctaacttttttgtagagacaggatcttgctatgttgcccaggctggtcttgaactcctggactcaagcgatcctccggccttagccttccaaaaagtactgggattacaggtgtgagccactgtgcccaccctaatttgccatcttaatgaaaagaataaaaactccaaggaaggttctggatcccttcaaatacaagtgtctgatggcccaaagaaaatgactgttttctcttaattatgtaaaccttgctgacattttgcactggaagcatggtatagtggaaggcacactgggatagaagcccaggaactgccgactactgctgccaacctggccccaggttaatcaccaatgggctctgtgacatcgttaagtcattaagccttttttcctcattgctcatctgtacaatgaggagaatgaactttgtgttctccattctacaagtccgcaagtccactaagtgctgtaaagatgtggaggaacaagatagtactttttttttttttttttgagacggagtctcactctgtcgccaggctgcagtgcagtggtgcaatcttggctcactacaacctctgcccctggggttcaagcgattctcctgcctcagcctcccaagtagctgggatcacaggcattacacctggctaatttttgtatttttagtagagatagtgtttcaccatgttggccaggatggtcttgatctcttgacctcatgatctgcctgccttggcctcccaaagtgctgggattacaggtgtgagccactgtgcccggcctgatttttttaaaaattaaagtcatttaatttaaatgactttaaataaataatttactttaaatgattgtttaacaatgtgcacattgttaaaacatcagctagtacagaagagctcatactttagacctcaaaaaaaaaaaacaactttattttttgttttgttttgtttttgagatggagtttcgctcttgttgcccaggctggagtgcaatggcgcagtcttggctcactgcaacttctgcctcctgggttcaagtgattctcctgcctcagcctyccagatagccgagattacaggcattctgaccttaagtgatccgcccacctcagcctcccaaagtgctgtgattacaggtgtgagccattacgcccggctttttttttttttttttgagacagagtttcactcttgtcacccaggctagagtgcaatgacccgatcttggctcactgcagcctctgcctcccaagttcaagcgattcttgtgtctcagcctcctgagtagctggggttacaggcacccatcaccatgtctggctaatttttgtatttttagtagagacagggtttcaccatgttgcccaggctggtcttaaactcctgacctcaactgatctgccagtctctgcctcccaaagtgctgggattacaggcgtgagcccgtcacccagcgagttatttgttttttttttttaattaaagtcatttagtttaaatgactttatttactttaaatacttgtttaac

SEQ ID NO: 682079 - DNA, 680 bp, Homo sapiens
aactgctagtcaagtatctaaaatttctatatttataagaaagttgcacttacagaatgctgtggtaaaaattgcaaactatttgctttttcatcttattttattggggatctttttttttttttttttttttttttttgagacggagttttgctcttgttgcccaggctggagtgcaatggcatgatctcggctcaccacaacctctgcctcccaagttcaagcgattctcctgcctcagcctccctagtagctgggattacaggcatgtgccaccacacctggctaattttgtatttttagtagagatgaggtttctccattttggtcaggctggtctcgaactcccaacctcaggtgacccacccgcctgggcctcccaaactgctgggattacaggcatgagccactgcgcctggcctagagatctctcttactgtagatattaggttggatcgcacagaaaagcatagaacttttttttatatacgttttatttatacgttaagtttcaagccttaaatatattccttaaaacacttggttrcctgaaagtgtggagatgttgatgaattgtcttaatagttacaaaaaaaaaaaagaaacctcacacatcatggatactcatttgccagtttacagtgttaaagtaaccatgtagcaatgaatctgtgtgtgaa

SEQ ID NO: 682080 - DNA, 649 bp, Homo sapiens
ggggcgaaggttgcagtgagccgagatcatgccactgcactccagcctggcgacagagggagacaacgtctcaaaaaagaaaaaaagaaaaaaagggacacaacagtgagtgtcttcttgcagagccacacagaagggtctatagagagtcatttagggttttcttaggaaaggggtggcagaagggcagaaaaatcttccgtgcagtgttaaaagcagaagaaaatgaggagaacccctcaaaggttgccctcctcggagagttgagaagtctattttgtagctggaggacagtgtattgcgggagagctgtgaggccagcatgagagtggggctcaaagcagrgaggggatcttatttgtcagccatgggagtgtgacttttatttcacactggggagagacatgaaaagcacggttacagaaaattaaatgtatatttttagaaagaagtctttcatgacaccataacacatagcatcattacagaaacaaaacaggtttagtttttacgacacaaaatgcagaaacataaaatgtatcctctggaggccactggaccttctcaaatgaggtgtttgtaatgattgcagaaaacatatctagttcatataatgttaccatatcagtggaactgtgagtttaagata

SEQ ID NO: 682081 - DNA, 649 bp, Homo sapiens
ggggcgaaggttgcagtgagccgagatcatgccactgcactccagcctggcgacagagggagacaacgtctcaaaaaagaaaaaaagaaaaaaagggacacaacagtgagtgtcttcttgcagagccacacagaagggtctatagagagtcatttagggttttcttaggaaaggggtggcagaagggcagaaaaatcttccgtgcagtgttaaaagcagaagaaaatgaggagaacccctcaaaggttgccctcctcggagagttgagaagtctattttgtagctggaggacagtgtattgcgggagagctgtgaggccagcatgagagtggggctcaaagcagagaggggatcttatttgtcagccatgggagtktgacttttatttcacactggggagagacatgaaaagcacggttacagaaaattaaatgtatatttttagaaagaagtctttcatgacaccataacacatagcatcattacagaaacaaaacaggtttagtttttacgacacaaaatgcagaaacataaaatgtatcctctggaggccactggaccttctcaaatgaggtgtttgtaatgattgcagaaaacatatctagttcatataatgttaccatatcagtggaactgtgagtttaagata

SEQ ID NO: 682082 - DNA, 649 bp, Homo sapiens
ggggcgaaggttgcagtgagccgagatcatgccactgcactccagcctggcgacagagggagacaacgtctcaaaaaagaaaaaaagaaaaaaagggacacaacagtgagtgtcttcttgcagagccacacagaagggtctatagagagtcatttagggttttcttaggaaaggggtggcagaagggcagaaaaatcttccgtgcagtgttaaaagcagaagaaaatgaggagaacccctcaaaggttgccctcctcggagagttgagaagtctattttgtagctggaggacagtgtattgcgggagagctgtgaggccagcatgagagtggggctcaaagcagagaggggatcttatttgtcagccatgggagtgtgacttwtatttcacactggggagagacatgaaaagcacggttacagaaaattaaatgtatatttttagaaagaagtctttcatgacaccataacacatagcatcattacagaaacaaaacaggtttagtttttacgacacaaaatgcagaaacataaaatgtatcctctggaggccactggaccttctcaaatgaggtgtttgtaatgattgcagaaaacatatctagttcatataatgttaccatatcagtggaactgtgagtttaagata

SEQ ID NO: 682083 - DNA, 567 bp, Homo sapiens
gaggtcaggagttcatgaccagcctggccaacatggtgaaaccccatctctactaaaaatacaaaaattagctgggagtggtggcaggcacctataatcccagctactagggaggctaaggcaggagaatcgcttgaacctgggaggcagaggttacagagagctgggattgtgccactgcactccggcctgggcaacagaatgagactttatctcaaaagaaaaacaaacaaacaaacaaaactcatattggcttggggagatagaaattactcttcatattatacctgctttgtatttgaatatttattattgatattataygtccagaatgctcaccttaacctatcacctcacctcaatggtttcaacagtctactcccaagggatttttacaatgatttttggtttagagttttgtgtgaaactttaaaaacatttttagagaggaaatacttgttcttataattcgaatagttacatttaaacctaacttgttaagttcttaattcctactttccacctaacatctatggctttgattaaatagccattccaattgatttg

SEQ ID NO: 682084 - DNA, 1517 bp, Homo sapiens
tgtctccatacattggcagggtttggagtggaatataagcaaaaagaagagttcctgcaccrcctcaccccaaagcctgacctcctaggttccttaagaaggagggagagaaactgaaaaccagtcatccaggtcagagcccctccctagtactaagttgtcacttcaatttccgcctggggaagaagagaaagggtgactcacttgactcctacagcctgggaagataattagaagggaaaaagaaattaaatccttagaacactgaggtgcccatgatttaaaagtctcattcctacaactggccactgtggcctcttgagcttctgaaagaaatattcaccttagtttccatctctgagagaaactaatgagagtaagaacaagatatgaaacctcctgcaggcccatgtcaatctttctgactcgactctttcttcagttttgttttttgagacagggtctcgctctcttgcccaggctggagtgtagtggcaagatcacagctcactgcagcctcaaactcctgagctccagtgatcctcccaccccagcctcctgggtagctgggactacagatgcacaccaccacgcccggctaattttttgtagagacagggtttcaccatgttgcccaggctggactcaactcttgagctcaaagcgatttgcccgcctcagcctcccaaagtgctgggattacagacatgagccaccatgcccagccagtttcatttttaagcaaagcaactcagtttcttggggatcctgccaacctatccctggatgatgaactttaccctacaaccttctggatatcaacttggtccagataaagtgtgtaatcctggaatggaattccagtatctgttgccaaaataaagtctgcccccacagtgccagaatctagaaatgatgcaaataacaacttcatggacaatatttgctcctagattcacagaaccattgcttccaatcagcactataagggaacaccccaccaaggagaggcatgtgtgagcagagcccgttcttgccatatcccaaattctgcttgatttaaggagaggctttccgttgctatggtactttgccagattcctaggtgaccaccccaagtggcctgtctgaatctgttgcctttgatggaagatgaggccagagctcagaacaggagatgttggggctcgtccttagactatggcaataatcataaagctctaaaagcctagggagtggtcacagcccagaaggctggctgactcattgacaggactaccagacctataccatctcaggtagaacgggttcttctgcccatccattcagcactcctgttttcaagaccaaataaaattggcagagtggggccaggtatggtggctcacgcctgtaaccctagcactctgggacaccaaggtaagtggatcacctgaggtcaggagttcgagaccagcctggccaacatggtgaaactctgtctctactaaaaatacaaaaattatccgggcgtggtg

SEQ ID NO: 682085 - DNA, 459 bp, Homo sapiens
tgagtagctgggactgcaggcwtatgccaccatgcccagctaacttttttaaattttttgtagagacagagtcttgctatgttgcccagggtggtcttgaactcctgggctcaagcaatcctcctgcgttggcctcccaaagtgctgggatcacaggtgtgagccactgcgtctagtctatgagttgttcactttatctgcctagggttccttaagtacagggagaggacaaggtaggaatagatatacccttcgctgaaatcaagacttttaaagactcacaccagcccagaattcagggtgggtaaatgcaccaaaaaggttctgtgatgttctctggtctgcctagaggctgaccattttcccggcaaaagtcccattcactgccaatagctaaatggcctctcttctctttcagttgcaaagtagcacaagtaccaactgttgggtgtttaaagt

SEQ ID NO: 682086 - DNA, 615 bp, Homo sapiens
cgggttgggtcaaatgataagagttggcttttctgacgtacatgcctcaggagtcttgagtcagggcttcacagactcacttcctgattctgagatctcccaagaccctgaccactgctcttggaatgctctcccccaactctaatggactaagctttgaccctgtcggcgggagcccatggtcatgagtcccaagccattgctttcttcccacctggctttatggcttggccattaacactagtatcacataaayccaaagagagaacagaaagatggaaaagatatgaggtagagtgataagaagatgaaaacgaagtaacaatggagtctgccaacaataccaatcttcccagccatgccgcagttctttggcacagtttcaggcatttctggtcttacaactcactccccacatccttgccaccatccccaaatgaaggctaggaaacgccacccactcccacctagagaacaacttcagtttgttctgctacatagatcagactacccaagaggataattagacacttggctctatgaagtggcctgtactttgagtgtttttttgttttttccctccagaaaataatgaggagagaacaactgttacga

SEQ ID NO: 682087 - DNA, 967 bp, Homo sapiens
ctgggaaacacagcgagaccctgtctttatgttttttaaatttttcttaataaaaaaaaaaaagataactattgaataactattgggtactgggcttaattcctgggttataaaataaataatctgtacaacaaacccctgtgacatgagttacctatgcaacaaaccttcacatgtaccccagaacctaaagtaaatgttttctttaaaaaggttattttaaactggagatatctgagattcaaaaaatgcagaaagaagacttatcagagctcttataatctgactaaaagcagaattttctgagaaataagaactgctataaattttctcttcaagttgtctattcctaggagagagatcaaaagtaatcccaccataaatcccttctccagggattttcgtggccctgaagaagacagaccagtctgcataaataagcatcagaagttttcttatctctcatttgttctaaaaaccsatttgtctttcttaaaggaacctatttgttcttcccataggaaccttttctccctactccctttcccctcctaagttagatatatcaacatcaaattctaatctcccctctgagttactcatcattgagcactcctgtctgcatccacattgcacacataaatgaacttttttccttgcaaacctgtcttgtcagtttaattcacatgcccccaattacttaatgtaataaggtagagggaatttttccccctccacaacttcagtaaactcataagccagaaggattcatggtccacaggcagaaagaccctggcaagtataacagatttacgtgaatgataccaaagagctacgttctagggtaactgaactataactagaccagtcctcaaaggaactgaaaaccaaattcgaatcattcagtcctgattagagtgtggtgaactgctttgattgctagtgccatagctagctgcacaccaga

SEQ ID NO: 682088 - DNA, 655 bp, Homo sapiens
gaaaaaaagaggaaaaaattaagtgctgcagggaagatttacattcttcttgcaaaaaaggatttcagaaaaaaaaaagtattgctgagtaaaatcacgaaagtttctatccttaaaagaaatgtaagaacaaggctggtttttttcatggctttctgggacattttaggtttggctcactataaccgctcaaagatgtagctgatgcctttgcaagtttccgtccagccccactgccctgtgagtgcagcaggcaccatggaaggacgggagcatgcacaagcctccatgcccctctcccagtctaaatgggccctggcaggcccaggcaagggctgtgggcctgggctgatagcacttcctcctccatttctgagcagcactcacagtttgaaagtcctggcacttagcaagcttcctgctgagctgtaaagtcattccagacaaatccctgtgtttacagagattccagagcagcagggaacatctcagaataccagtctggacgtggaaattagtgtatctgtgctaagctgctctccacacctgccctggccatctccccckccttccacaacccctcctctcctttcttctctacatctgctgtggtttccttcacactgagtcatcctggatgttaatagtgaagtcc

SEQ ID NO: 682089 - DNA, 1867 bp, Homo sapiens
ttagagtataataacaaaaaaaaaacattaaaaataaaaaaaataaaaaaaaagaagaaaacatagataagattgcgggaaaattggaagctaattcatagtgtggcttgtatattatttgaagcagaaggacagaattaaagctgcccaaaccaaattaagccaaaaccaaaacccaaacaaagtaacgctcaattgaaccattttagttgttactgtccatcttaagaatacattcattatagctttcttctcagaagaacctctggacagtgtttttggttctaatataattgtagaaagaatgttgtaaatatacagtgaatatcccacagaccttcctattttagtcccagaggccctctctgccccaggctgggtcctcctggtcaggctctggatagtcctggtaatagtaatgccactatttctgttatgttgtaaaatagcaataaatttaaagagttaaatttgaatctgattcactgatttgttttttgagacagggtcttactcagttgcctcggctggagtgcagtgggttgatgagagctcactgcagcctccaactcctaacctcaagggatcctcccacctcaggctccagaatagctgggactacaggcatgccaccacaactggctaatttttatatattatttttggtagagactgggtcttgctgtgttgctcaggctggtcttaagttcctagcttcaarcaattctcccaccttgttctcccaaaagtgctgggattacaggcatgagtcacggtgtcctggcctaaagtctttcttttaagaaagaaagagagagtgaatattctcacttgtgtgctaaatactttgtataagagaccttacctgtatgtatgaatatatatgtcttttcaatgaccttatcgtgtttgttctgtcttgaaattattttcctttcctctggtcatgcacacaaatctgtacagcaatccaaaagaatgcttgtctgaagagaggttcatgcaaactggtgtagagtaaagtatcaggaagtggagacaggtttttggaatcaatgaggacatgaatgtgaattaattactataaattagcacaggctcatagaccaggactcaaataaatcaagctgatgcaatgaggaatttaatagaatataaaatatgatccgcaatggtagtatgtatggtatttgtttggctcctgattttatatcatgattttatgatataaaggcctggaagggctggttaaaaagttttgaacttgtgtgaatttttgctgagttgaagtttctggactaattcacaatggcttctactagaacattctttctggagtataatgatgtttgcagataaatactgcttctccttacacttgtgaatgctagtaagcctgacaagagagtcccttatttaggtgcctatcatagtataccaaatgtcattctagaaaccctgggtactctataaaagccttatgtccctcaaaatgtcaggagattctgtgtgggattaattgaattaagcatgaggctaaagacagctatttgatactaaaattgaagtaaatattaaggactatttttctcctttattaatctttgttccctgcattctcagggaagccaaacacatccctcacagggtcaggtactattttataaggtaagagtagagggaaaatatgtatagattgaggcttggagtcatgagaataaaattgcaatgcgaggcagaggtagtgaacctttattttcctctgcgttttgttagcagcaagttgtcaaggggcacgttcaagacacattagtttgagaaagaacaaatcagacgaaaagatctagtgtcagatataaattaaaag

SEQ ID NO: 682090 - DNA, 1195 bp, Homo sapiens
cagtattctagctgcagtcagttgcggggcggggtggggggtgtttgttttaaatgaatatgtcttttctctttgcaggatcaaggacaaacacctatagtcacaaaaaacaattcattctggaaagcctgagtgagcaggagagatgatagaatcctccgtggaaaggaaggactgttgctatggaaaccagatgatccttcagtgggggccccagtgcacttgccaggctgcctaaccctgtgtattaacatcatggggctggaaggctgcctgcatctctttgaaaagagatttttcagatattggtgtgatgagactttatgcaccttgagaaaagtaaatcagcatctcctgggaggggctaagttgcctagaaccttaaaacactagaggcccacacaccacagccgactggggtgactatattggctactcttgacatttctccagagggcatccaagaaggcrtgtcttaaggattctctctctctctcttttttttttttttcgagatggagtcttgctctgttgcccaggctggagtgcagtggaacgatctcagctcactgcaacctctgcctcccaggttcaagcaattctgcttcagcctctcaagtagttgagatttacaggcacgcaccaccatacctggctaatttttttatttttaatgtttattttttggtagagacagggtttcaccatgatggccagacagctctcgaactcctgacctcaagagatccacccgccttggcctcccaaagtgctgggattacaagcgtgaatcactgtgcctggccaaggattctcttaagggcaggtttatggagggctgtttctgaggtaaggaacacagctttccaagagaggaagaagacatcccttgagcagaggtttgattagaagaataagtttagtggcacttgggggaaggtggtctgggtattctgtgtgacatttaaactctaactaccataccaataccactattactacaactatccctaattacactattaactaattttaaagtctaagccagagatgaggagctttctccaaataggtttctcagagtgaaattctctttctacttctcccaagagcactttgtcctttccatgctttacaaataacattatattgataagatgtgttttctattaaggaaaaaataactctattaagt

SEQ ID NO: 682091 - DNA, 1195 bp, Homo sapiens
cagtattctagctgcagtcagttgcggggcggggtggggggtgtttgttttaaatgaatatgtcttttctctttgcaggatcaaggacaaacacctatagtcacaaaaaacaattcattctggaaagcctgagtgagcaggagagatgatagaatcctccgtggaaaggaaggactgttgctatggaaaccagatgatccttcagtgggggccccagtgcacttgccaggctgcctaaccctgtgtattaacatcatggggctggaaggctgcctgcatctctttgaaaagagatttttcagatattggtgtgatgagactttatgcaccttgagaaaagtaaatcagcatctcctgggaggggctaagttgcctagaaccttaaaacactagaggcccacacaccacagccgactggggtgactatattggctactcttgacatttctccagagggcatccaagaaggcgtgtcttaaggattctctctctctctcttttttttttttttcgagatggagtcttgctctgttgcccaggctggagtgcagtggaacgatctcagctcactgcaacctctgcctcccaggttcaagcaattctgcttcagcctctcaagtagttgagatttacasgcacgcaccaccatacctggctaatttttttatttttaatgtttattttttggtagagacagggtttcaccatgatggccagacagctctcgaactcctgacctcaagagatccacccgccttggcctcccaaagtgctgggattacaagcgtgaatcactgtgcctggccaaggattctcttaagggcaggtttatggagggctgtttctgaggtaaggaacacagctttccaagagaggaagaagacatcccttgagcagaggtttgattagaagaataagtttagtggcacttgggggaaggtggtctgggtattctgtgtgacatttaaactctaactaccataccaataccactattactacaactatccctaattacactattaactaattttaaagtctaagccagagatgaggagctttctccaaataggtttctcagagtgaaattctctttctacttctcccaagagcactttgtcctttccatgctttacaaataacattatattgataagatgtgttttctattaaggaaaaaataactctattaagt

SEQ ID NO: 682092 - DNA, 962 bp, Homo sapiens
  misc_feature 670, 671, 672, 673, 674, 675, 676, 677, 678, 679, 680, 681,682, 683, 684, 685, 686, 687, 688, 689, 690, 691, 692, 693,694, 695, 696, 697, 698, 699, 700, 701, 702, 703, 704, 705,706, 707, 708, 709, 710, 711, 712, 713, 714, 715, 716: n = A,T,C or G
  misc_feature 717, 718, 719, 720, 721, 722, 723, 724, 725, 726, 727, 728,729, 730, 731, 732, 733, 734, 735, 736, 737, 738, 739, 740,741, 742, 743, 744, 745, 746, 747, 748, 749, 750, 751, 752,753, 754, 755, 756, 757, 758, 759, 760, 761, 762, 763: n = A,T,C or G
  misc_feature 764, 765, 766, 767, 768, 769: n = A,T,C or G
tgagataccatgcttggcttaccataaaaacacagatgtttctggattccagtagggaggccttttgttcacagcatctgttttggttggccagccagatgacttctgtggattttttcactccttttgaaggacacttgacaaataaacaagtttataaatgaaagagttaacagcattttgtaaatttattttattactttagctatatcgttctgtatattttgaactatcagwtcattttagctcaattttatcacttcctaaataaccttgagacgatcagtcctttgttacatgttctttggattgtttattctgcagttgagacagatttttattgatctataaatttttgtgttcaacaaacatttaatgagtattcactgtgtactaggccctgtactaacactgggaactacatatgtgagcaagatatagtctcagtctttgagaagtttagtgtcttatatacagtgcaaacatgtagacagaataaaattatagttgagtgcttccatttgaagtttatttcatcagtttagtggggaggggtaggtgtctaggaatgccttccagaaaaagtagtgtctaagtggagaattgtagaatgagtgggagttgtccagggatggaacaggggttagtggcggagattataggggtcctnnnnnnnnnnnnnnnnnnnnnnnnnnnnnnnnnnnnnnnnnnnnnnnnnnnnnnnnnnnnnnnnnnnnnnnnnnnnnnnnnnnnnnnnnnnnnnnnnnnncaccctagccctgtccattcttgaggtttgggtttgccacaatttgtagaaaatgaacagtgtttacagaattgtgactatataaatattattcaccacagagcttaataatgtgctgtgaggtcaggcatggtggctcacgcctgtaatcccagcacttcgggaggccaaggtgggcggatcacctgaggtc

SEQ ID NO: 682093 - DNA, 592 bp, Homo sapiens
ccacctcagcctcccaaagtgctgggattacmggcatgagccactgcacccggctatcccatcacttaatcccaccctgccaatctttgctctcttgaatcttggcacactgccagtaagcctctcatgggtcacttaaaaagcaaaaatcccataattctactttattttaattctactctgtagttcttttaactcatttcaaactagcacccttttctctcttctctttattaccaaatctctcaagtctcccttccttgccttccatgttctcatcctatggctatcttcttcaaccattctttgaaatcctttccagcagccactttactgtaactgctgtcttcaaaatcaccaatgactaaatgccaaattcagtggtacctccttctcctcagtattcactttttcatttgtttgtcttgctatgttcctcatctgttaataccatcattatcctttcaagtcattaaattcaagatttcagggtcattcttcccttcactgcctatccctggaatgcacacataaacaatcaagagtctactaagtctactgcactgtcacgtggatgtgcctcccttccagc

SEQ ID NO: 682094 - DNA, 662 bp, Homo sapiens
cccttaaatatcttgttatttgggattccattctttgcccatgacatttttcaatgtctaaacattccctttgggccattaaatccattctgatsgcctgaactacaataaattgtgctgatatctttcaaatttgtctaaccaaagtttcactgactaattgtctactgcagttggatggcatgctaaactcagtaagaacagaagataaagctatcctcttcttctacaaaatctacttctccttgtatagtattgaactgagttatctggaacaaccaaccacccacttaaaccaagtcagaaactcaggatgatgttacctcacatattcaagcctaccattttcatttttaaaatatttattaaatataccatagagtgaatacatgattaccatacgagcctacctctatccctggccactactgattagttcaaacgtaggtacctgacccaattcacatcaacctgagccattccacaggaatctgaaatcaggtctaaatgggcttatctaaaactaagaaatgggaaggcattgggagaggccatttctgtcatgagaaatagaaatcagcaaaaattttttaaaaactagaactcagggtaggggaaatgaaaaatggcaagaaaattgcaaaaaccattcacaattctaa

SEQ ID NO: 682095 - DNA, 678 bp, Homo sapiens
gaatgacacacagattatttactatttttgagtagacaagaccataataaatattataagatttttctatgattcactgtgatatagcaagtgtttttcttttctttcctttttttcagtattctggagtttcactcaactaattttttctcttcctcatcaatcttcattaacaactgtctactataattattctagtcagaacctcttggtacctgcatatttatgcactatgaaattgaaaactgtattttcagtttttataaagcacattaaatttgatttctatcttcaacaatctgttatgcagtctacaatatggttaattttaaaacatgtacaaggataaaacttaccttgggtttgttttttttccacttaaaatgttttccctttaaactgcaaatatataattatgtgacatcgtccctccatctaacccttccccctaccaaaaaaaaaaaattctggaaacagaacatatatgaattcatccgtccaagacaaaacctaagtctcaaatgctactgaacagtataaggactcagtatttttcatatgcagtaatatttcatttttcccttaaatttaacaacagaaaagggaattaaatgctaayagtagagttagtgagaaaaaaataatgagcatttgagggaatagaagcaaactgaggaa

SEQ ID NO: 682096 - DNA, 605 bp, Homo sapiens
gaagaggagaggatatggtgttacatagaaaarggggtgatgtgaagatggacactgagattggaatgatttctctagaagccaaagaaatctgtggacacaagaacctggaagaggcaaggaaggattttctcctaaagccttcagtggaagcaggccctgctggcactttgatttcagatttctaacctttggaactacaagagaataaatttctgttgtttgagacactaaatttgtggtaattgatgagggctgccctaagaaactgatgcacacaccagtcacttctgttactgtcagttttacatttttagtttgtgtcatattcctttcttgccttcattttctgacccgatgtggattgtattagattcccatggctactgtaataaatcactacatgcttggtggattaaacaatgttcatttattcttacaggttttgaggccaaaagtctgaaatcaaatttactgggccaaaatccaggtgtttccaggactgtatttcttctggaggctgtaggggaaaatctcttctcttttctttctcaacttctagaggtcacctactttccttagctcatggccccttccttccttca

SEQ ID NO: 682097 - DNA, 605 bp, Homo sapiens
gaagaggagaggatatggtgttacatagaaaaaggggtgatgtgaagatggacactgagattggaatgatttctctagaagccaaagaaatctgtggacacaagaacctggaagagkcaaggaaggattttctcctaaagccttcagtggaagcaggccctgctggcactttgatttcagatttctaacctttggaactacaagagaataaatttctgttgtttgagacactaaatttgtggtaattgatgagggctgccctaagaaactgatgcacacaccagtcacttctgttactgtcagttttacatttttagtttgtgtcatattcctttcttgccttcattttctgacccgatgtggattgtattagattcccatggctactgtaataaatcactacatgcttggtggattaaacaatgttcatttattcttacaggttttgaggccaaaagtctgaaatcaaatttactgggccaaaatccaggtgtttccaggactgtatttcttctggaggctgtaggggaaaatctcttctcttttctttctcaacttctagaggtcacctactttccttagctcatggccccttccttccttca

SEQ ID NO: 682098 - DNA, 2707 bp, Homo sapiens
tcttttatgctctcctattttttgtggtttttagctatgtttatacaactctactttttatttggtataaccaaacatgtattttccacagtcctcaattatttattgtttattcagtttaaaaacagaataatatctcacctaaaacaaaagctactatgctaaacatccccaccattgttgggcattcaggagttttagagaatttgctctttcagttactgctggagtgaacagatggaggatctttttattgttttcagtatgtgcctgtaaataatccataagtcttgccacccagtgaggctgagtgcatttctcctgtctgtttaaccatgatgctgccagtgtgacctcactacaggagacgggtcttgataagcccttcaccatctgtccagtagaaggtaatctcgaattccactgaataaatataaaatgcttaatgctgtataacatagagctccatgcttctcaggagaataagctttaaaaagtaatctctgctccataaaaataaaacaaagaaatataataaatagaagtaatataatatataccatatcatatatattttgtatttatcaagagaataaaaatagaaatataatcttagatctataaagtataacaacataaactggtaaattggtggatacttagatcacaaaataaaagatataatggatacaataagaacaaaatatcttatttttaaaatgagagtgagaaatatttttacagttacatggaagtcaagtggatataaactccagttttcttgcttccaatcctaaacaaatttgtcataactgcatttgtattttgaccaatccaaatctacttttcacctgtattactagatgtcagatatcataacttcttgctcagttaggcaaagactacctatattataattaggtcaaatgcttatttttattttctttacagcatcaacatttatggcttattcagaaaaaatcaactttttaaagttttttttttgaatcagggcaatgcaaataagacacataatgtaacactctttttcattcataaaaaatggcaaaaatgaatgtctattaaagttatgtattagaatgaggactaataaaatcctttacgcatgactttttgaaattatttggcattatctactaaagttgaaatatgcacactctataaaacagcaatgtcatttttaggtggatatccaaaacaaattattgcacatgtgcagcagatataagacaatgcatacatcaaaacactcaaaatagcaaaaaactgggaacattccaaatgctcattaacagtacaaaatgttattaaattatattttacagaatcaatacaacagaataacacattccatctcaaatgaatgatcttcatcttcatacaccgacaaataacttttcacaatatggtattaagtgaaaaaaaaagtccggaagaaaagaaacaaacaaaaaatcccacaatattcttttaataaaaattaaatgcaattaaaacaaaattacatattatttgaacacatagttgtgcttaacagatattaatatatatacatatggtgtgtatgcacatatatatgtgaatatgtgtgtatttctatatatcaaataattaaaaatagaaaattgagaatattaattattgaggtgaaaactgataaggaaatcattctcttggtaatcaataaaaaatggacgtcgcataatctaaaaaaaaaacgaactatctaaactagcgaagggattcttaacattttactccctttcacactcactacactccttttacagatattccatgttttaaattcctaggacaattttgtaacccttttatagatctgatatggtttgggtctgtgttcccacccaaatctcaccttgaattgtaataatccccacatgtcgtggtagggacccagtaggaagtaactgatcatggggggcgggttgttcccatgctattctcgtgataatgaataagtctcatgagatctgatggttttataaagaatggctccccccgcacacggcctcttgcctgcggccatgtaagatgcgagtttgctcctccttagcttgtcgccatgatcctgagccctccccagccatgtggaactgtgagtcaattaaatccctttccttaataaactgcccagtcttgggtctgtctttattagcagcatgagaacagactaatrcaagatcctaaatgttttattggacaaatgctggaatctcctttaaatatatatcttccttatttcttctaaatggccttttggaagttttctagccaatgataagcggctttcccctcccttgctgctgtcaccaggtctcgccgcctccttgtagtttcacaagagatcaccttcctgtctaccctgagacaactgtggaggtctgcttgacccacatctaaaagaaactcatcattttgatgtgtcggggatatacggtgtggtgggcctcagtgtctagctggtaagccctctcctccccacaatttctgcaatgcaatttgcaaatttgtaggtgtgtgtataatactacgtgtgtgtgtgtgtgtgtacatatatgtatatatacacacatgaaattatgattatggttctcttcttcctcataaaaaaagaagtggaatgagaatgcatagaaatatgcaagttgatataaattttttt

SEQ ID NO: 682099 - DNA, 620 bp, Homo sapiens
ctcaattgatgattctgtatttaattttttaaagacaaactagaaactcttttcttttctctctgatctaaatattttttctcaaaaaaggaaatgacactggctacaaatctgctatcatgctttgatgactaattctccttattcatctcatcgtattttaaagtaatatctcctacaatttgcatagcctttgtgcctcggctcaaacgtctttggagatgaataacttaccaattcattttgctggtggtcattggtaatgcttagctggtttccctttaaaataacagtaagtctgaccaagctaaagtaattccytgcttacatggtttgaaacatgctccacagcctttcaattcctacctctgtcaatgcttccaattggctggagttaaatgtagatgttttccaaatgttagctataagctgttaagcagcttcaaatatcatgaaaataaaataacataattagggcattatgcacagatggtcaaaacagtgtccaaggaaatgcctctggtgaatacaaaccggtggtgttactaagatacttgccatgtaaacaggtgcttatgaaaatactaagtcatttaacatctctgatcagataagtgaca

SEQ ID NO: 682100 - DNA, 661 bp, Homo sapiens
tcattcctttattccaatgaggattttaacacagaatatttatattttaccacaattagaaaaggacattttatagttcctacttaagagtgactctttcaatggcatgaataatctatttagattcatattttcataatgcctggcacaatgtgaaktctcaataaattgaattatcaggaactgatattaatttggcagatggtctaggagaattttaaaaggtgcacagcacccttttaaacacagcctgagagatgcttgcacttttagaatccctatgccttcctagtgtcccctgggacctccccctgcagtagcttttgtctgaccactgggctaccccactcatggctcagcctcctccttccagcatttccctctggactcctcttggaagaaacctcctgatgattagcagcatgaagagcataaccgataactgcagggatacagttcagctgaggaggaaagtggtaattattccttgaaacataaaagaaaaaaatcattcctacactgcttttgtccttcacctgaccttgcccttgctctcccttctccccactcacacttcctctcctcagtcacctcctcctcgttcttcccactgactcatttccttcaaatatcccatgtagctctgactttaatcacgttc

SEQ ID NO: 682101 - DNA, 2451 bp, Homo sapiens
gctaacccaaacctctcctgctagtatctcagccctttgtcctatatgatgtgatagatcaaggtcagaagctttcagtagcagctttgaattcctccctcccctgctactgcccccaccaccttgaagtcacaggccagaagggctatcccctctggaggccaggtgaccatttcccaacaaaaatcagttcagggtcgaatctcaggctctcagcacccacatgtagaaactcacccctgaagccctctgcttagayacaaggggcacatgtatcactccccaggaaccttggactatttccctgagttatctgggaccacctgcaatcctgtactcccctctcttgctggtttctcccacgtcttactcaaaagttcagaaggcaagaatgtcagaacctgagaaaatacatcaagggcaaacagcgtggtgcacacgagttctctcccacagccccacccagagtgagcactgggactctgctccccactgctgaaatctctcactctcaaacctggaggacaccttctcaccactctcccatccggcctgggccccaggagatgaagggagacagggctacacaggcccggggctggctggaaggcagaactcatgggctttttcctgttctaccatccagggatctgaaactcggcctccctctctgtgagcaacctttccaggctaatccaggcacctcttctaaagctggaaagagatcaggccatacagcctaaagcattttgggctacagatgaagatcataaaatgttaagtagcagtgcaaatccctgactggttgcagacccaccacgttggaatcctgccttcaccatttatccagaagacttcgttggacgaagtccttaacttctctgttacttgcctcagtttcctcatctatcaaatgggaacactatttgtgaccagatgttaacgtgaaagtacttgggtctcagttgtaaaagaggcctgaggacaaggaatgacacatttcaaaagtaaggcagaagaccaccatgcaggccttgcagaagagatgactgacatcaagaagtgaaaagaccactcacagaatgggagaatatatcggcaaattatatatctgctaagggacctgttgccagaatataaaatgaatgcttacaactcaataatgaaaagacaaaacaaaaatttaaaaaggaaacagaggatgtggatgggcagttttctaaagaagatccataatggccaattaacacatgaaaagatgttcaacatcatcaattcttaggaaaatgcaaattgaaaccacaatgcaataccctttcacacccactaggatggctagcatccaaaagatagaaaataaatgtgggtgaggatgcggaggaagtctcatacattgctggtaggaacgccaaatggtgtagccactttgggaaacactctggctgttcctcaaatgatgacacaggtgatccagcagttccactcctggctatctacccaagagcaatgacaacctaagtccacacaaaaacttgcacatacatgttgacagcagcattcttcacacaagccaaaaagttgaaacaatgcaaatgttcatcaattgatggtgatgtatggataaacaaaatatggtatggcctacaatagaatatcattcagcaacaaaaatgaataaaatactgatacatgttacaacgtgaatgaaacattgggtcaagtaaaagaaaccagacacaaaagaccacatattgtatcactccatttacgtaaagtgtccagaatagacaaatctacagagacagaaagtagattagggttgggagttggtggcagaagtgggagtggctgctgctagttataagatttctttgggtgggggtgataaaactgttctaaaatgagattacggtgatggttgtacaagcctaaatatactaaaacccattgaattgtatactttaaagaggtgaagttgtggtattaaattatatctatacagctattaagtttttaaaaagagagtgatggctgaaaactgctttgtggctccaaactataccgccatacacaccatgcacacacatacatatcaaaggtgtaaaaagattagaaagtggaagattgtaagaggaattgtggagagcacggtgtttggtggcaggtcccacctttctagaggcttctccctcatctcagtgagtctgctcagagactcagcaggtacctgcgggcgcatggaggatgtgaaagacaggggcctaactgtgctgtgggaacaggggtgggggcgcactggccacctcaacccgggtctttgcgggggccaggagtgctgactttttactttggaccaaggtgagagagagccagcccctgggctgcctcaaatgctgtccatgagggccacctgcaggggtgagagatttcagcaggaggaggctggaggga

SEQ ID NO: 682102 - DNA, 2451 bp, Homo sapiens
gctaacccaaacctctcctgctagtatctcagccctttgtcctatatgatgtgatagatcaaggtcagaagctttcagtagcagctttgaattcctccctcccctgctactgcccccaccaccttgaagtcacaggccagaagggctatcccctctggaggccaggtgaccatttcccaacaaaaatcagttcagggtcgaatctcaggctctcagcacccacatgtagaaactcacccctgaagccctctgcttagatacaaggggcacatgtatcactccccaggaaccttggactatttccctgagttatctgggaccacctgcaatcctgtactcccctctcttgctggtttctcccacgtcttactcraaagttcagaaggcaagaatgtcagaacctgagaaaatacatcaagggcaaacagcgtggtgcacacgagttctctcccacagccccacccagagtgagcactgggactctgctccccactgctgaaatctctcactctcaaacctggaggacaccttctcaccactctcccatccggcctgggccccaggagatgaagggagacagggctacacaggcccggggctggctggaaggcagaactcatgggctttttcctgttctaccatccagggatctgaaactcggcctccctctctgtgagcaacctttccaggctaatccaggcacctcttctaaagctggaaagagatcaggccatacagcctaaagcattttgggctacagatgaagatcataaaatgttaagtagcagtgcaaatccctgactggttgcagacccaccacgttggaatcctgccttcaccatttatccagaagacttcgttggacgaagtccttaacttctctgttacttgcctcagtttcctcatctatcaaatgggaacactatttgtgaccagatgttaacgtgaaagtacttgggtctcagttgtaaaagaggcctgaggacaaggaatgacacatttcaaaagtaaggcagaagaccaccatgcaggccttgcagaagagatgactgacatcaagaagtgaaaagaccactcacagaatgggagaatatatcggcaaattatatatctgctaagggacctgttgccagaatataaaatgaatgcttacaactcaataatgaaaagacaaaacaaaaatttaaaaaggaaacagaggatgtggatgggcagttttctaaagaagatccataatggccaattaacacatgaaaagatgttcaacatcatcaattcttaggaaaatgcaaattgaaaccacaatgcaataccctttcacacccactaggatggctagcatccaaaagatagaaaataaatgtgggtgaggatgcggaggaagtctcatacattgctggtaggaacgccaaatggtgtagccactttgggaaacactctggctgttcctcaaatgatgacacaggtgatccagcagttccactcctggctatctacccaagagcaatgacaacctaagtccacacaaaaacttgcacatacatgttgacagcagcattcttcacacaagccaaaaagttgaaacaatgcaaatgttcatcaattgatggtgatgtatggataaacaaaatatggtatggcctacaatagaatatcattcagcaacaaaaatgaataaaatactgatacatgttacaacgtgaatgaaacattgggtcaagtaaaagaaaccagacacaaaagaccacatattgtatcactccatttacgtaaagtgtccagaatagacaaatctacagagacagaaagtagattagggttgggagttggtggcagaagtgggagtggctgctgctagttataagatttctttgggtgggggtgataaaactgttctaaaatgagattacggtgatggttgtacaagcctaaatatactaaaacccattgaattgtatactttaaagaggtgaagttgtggtattaaattatatctatacagctattaagtttttaaaaagagagtgatggctgaaaactgctttgtggctccaaactataccgccatacacaccatgcacacacatacatatcaaaggtgtaaaaagattagaaagtggaagattgtaagaggaattgtggagagcacggtgtttggtggcaggtcccacctttctagaggcttctccctcatctcagtgagtctgctcagagactcagcaggtacctgcgggcgcatggaggatgtgaaagacaggggcctaactgtgctgtgggaacaggggtgggggcgcactggccacctcaacccgggtctttgcgggggccaggagtgctgactttttactttggaccaaggtgagagagagccagcccctgggctgcctcaaatgctgtccatgagggccacctgcaggggtgagagatttcagcaggaggaggctggaggga

SEQ ID NO: 682103 - DNA, 637 bp, Homo sapiens
gaaggaactcccgacgtccatccccgacatgccctgaactcctccctacagttccaattttccaaagtaatgatcttggtgggtaagaaactcatcctgtcctcaccgcctcggccttggagggccagtccagccggctccctccgcctctccccgttgaggactccaggcaggtaacaggcctgagcgcttccctccccatgcacagcggacaggcragaccaggaggactggaaggacttgtgtccctgtcaccagcagcacaaatgaagccgccagaggtaataacagggcaagggcgcgctcaccagctctcaggccgtgctagagcacgggccctggaggagtggggttccctgtgtgccagactggtggtgcctcctgccctccctaaccagcacactctcctctgactcaaacgccccctaactgtttgctcccctccactcccttccgggagctgtaagaggttcctgccagggttctcagaagccttgtgtagggacctctgtggggccaccacagccctcaggccacagccctgtaagagaggtggtaggtgctggagtcagggcagaggggctgagagctgccctggctgagtttcatgcccaggtggggaggaagcgttccctaa

SEQ ID NO: 682104 - DNA, 660 bp, Homo sapiens
atctcctttcttgcatggtcacccaggaaaaggacctgttttacctactatgtgctttctcacactttatttaggcatgagattgtaacgatgtaaaaattaacatatatgtgtgtgtgtgtgtgtgtgtctataacatactttatatgtatatattcttttacatgtataaaattctacattttgaaagatagtactagaaaaataacttgaggatgattctggaatccatcccaagctaatggtggctgtacacaatttgctcttctcactgggaccccttctctttctcctgtcccctccccttctcctcagggactctcctccttcttctcacagatttctggccattttctagcaagcctgtttctcaactcattatttttgcctatttattaggcttcagtcccctctctttattcttgtccacaacactcccttccccacaacttgcattctttctccttttttgagaccgtgggtttcacagcctgcactgggagtggtggtcattccccaccactgagaagcttgacygcttttctctagaggaatgacaggtgagggggcctgagacaagggtgtgggtgtgggttcagagtggacctgggattctgccaggccccctgctaaccttgaacagtattctattgtgctccc

SEQ ID NO: 682105 - DNA, 645 bp, Homo sapiens
tctgtcaagcactggtttccaaggagattccgtgggtaacctatcatgtcatcagtctcaagaatgtggagatctacccaagtatccctaacatttctttctttttcttttctttyttttttttttttttttttttgagacggagtcttgctctgtcacccaggctggagtgcaatggcgtgatctcagctcactgcaaactctgcctctggggtcaagtgattctcctgcctcagcttcctgagtagctgggattacaggcacccaccaccacgcctggataaattttgtattttttattagaggcggggtttcaccatgttggccaggctggtctcgaactcctgatctcaggtgatccacccgcctcagcctcccaaagtgctgagattataggcatgagccaccatgcctggcctatccctaacatttctagataacctgatatgatctgtcatccataaatttcctatcctatttcccaggctttttatatttttagactgcactccaccatgtcattggacactgtctcagtctgctcaggctgctgtaacaaaataccatagactgggtgacttaaacaacagacatttatttttctcatggttctggaggctggtaagtctaagatcaagattctgg

SEQ ID NO: 682106 - DNA, 645 bp, Homo sapiens
tctgtcaagcactggtttccaaggagattccgtgggtaacctatcatgtcatcagtctcaagaatgtggagatctacccaagtatccctaacatttctttctttttcttttcttttttttttttttttttttttttgagacggagtcttgctctgtcacccaggctggagtgcaatggcgtgatctcagctcactgcaaactctgcctctggggtcaagtgattctcctgcctcagcttcctgagtagctgggattacaggcacccaccaccacgcctggataaattttgtattttttattagaggcggggtttcaccaygttggccaggctggtctcgaactcctgatctcaggtgatccacccgcctcagcctcccaaagtgctgagattataggcatgagccaccatgcctggcctatccctaacatttctagataacctgatatgatctgtcatccataaatttcctatcctatttcccaggctttttatatttttagactgcactccaccatgtcattggacactgtctcagtctgctcaggctgctgtaacaaaataccatagactgggtgacttaaacaacagacatttatttttctcatggttctggaggctggtaagtctaagatcaagattctgg

SEQ ID NO: 682107 - DNA, 688 bp, Homo sapiens
tagtgtgggaaattgtacaataaataaaataattctaatagtagtaagtgctatgaagaaaacacaatagtatgctaacatgataaacatcatgataaaaggcctttaagtagcagtggagattatttgtcagttaataaagggatttaaaacaattacatttactgaaatagctgatatgtgtatgatcttacatcagttatcttattttaggttttctgaggttttgtttccatttagtttgtagtcyatttagtttttagttccatttagttatgagtaatatcttgctttatttgcttgttttcttctcaattggtttggaagatgatgttatttttatttacataagtggatatttttacattcactgaaaacattctctaatctaaattttgcctttttatcaaatcaaacaattatatcttttgctttcttcctgtaacatgagaaatttaatcatccacggtcttgctattttatggtctttattaatatagtcttaaagattccatttaattaattgtattaactgtacttaataggttttcttagctacaataattataccgacttccatatttaacagcttttaatgcttactgtcaatttgtgtacaataatttaacctttctgaatttcttaattttagtggtaaacgtgtttacatattactttataaatgtct

SEQ ID NO: 682108 - DNA, 688 bp, Homo sapiens
tagtgtgggaaattgtacaataaataaaataattctaatagtagtaagtgctatgaagaaaacacaatagtatgctaacatgataaacatcatgataaaaggcctttaagtagcagtggagattatttgtcagttaataaagggatttaaaacaattacatttactgaaatagctgatatgtgtatgatcttacatcagttatcttattttaggttttctgaggttttgtttccatttagtttgtagtctatttagtttttagttccatttagttatgagtaatatcttgctttatttgcttgttttcttctcaattggtttggaagatgatgttatttttatttacataagtggatatttttacattcactgaaaacattctctaatctaaattttgcctttttatcaaatcaaacaattatatcttttgctttcttcctgtaacatgagaaatttaatcatccacggtcttgctattttatggtctttattaatatagtcttaaagattccatttaattaattgtattaactgtacttaataggttttcttagctacaataattataccgacttccatatttaacagcttttaatgcttactgtcaatttgtgtacaataatttaacctttctgaatttcttaattttagtggtaaacrtgtttacatattactttataaatgtct

SEQ ID NO: 682109 - DNA, 648 bp, Homo sapiens
gactatggctgttttatataaatacactggtaaagttcagctcctatgatttctgacaattaaattgttctgtcacttggggactctcattaatctcaacttgtcatccttgtttatgcaggttataatgggctatrtgtataagtgaaatgagatgctaaaaggctttggctttttacctctttgatgaaagtaaaattgaaataatttattaaagtggtgactttgaattgcacagtttgaaggaactgtattctggacagtggcctatgaacttcaccataacccacagcaatctttgtctttattcgcaattaagaaattagaaatatgtgaactagctcctgacacccccactagattcttagtatttgtatgtctggagaagaaaacctcagagaagaaatcaaattgtgttgctttccgtgctctccatctttaccaatcaacttttaaaagttctggatataactattatataattaagtaaaagaaaagagacatcctagtggtcaaaaaggtcctgggaaaaatttagatgttaagtgccatcgacaaggatttgatcaatggcagggctttaaatacggggagattttataaagagtacttcgggattagtattaagatgtaatttactgagcatca

SEQ ID NO: 682110 - DNA, 2079 bp, Homo sapiens
gacaaataggttcttccccacccccgatttctgcaactcctatttatagactagaatgagactaacagtttgtcttcaaccctgccatagtagttgtctttaaagagtaatacataatacacatatgttaaaattctaaaaacaataggatagagtttaatgatttgaattttacaagtcattaaaagaataatacctcatgaaatagttgtattcactctggggaagggggaaaatattaggaaatctattaatatattatatacataggccaaattggtataaatggaatgatttcaacagcatcaaagacatttggtaatgtttaattcctcattattgatgtttaacaattagaatacaaaggacttagtatgatttttgtaaccctttcaaatcagcatattaataaacaccagagttacttcctttaaaatcaggaaaaccacggaaagccagtataaccattattatttaacactattctggaagctccagccattgagcatggcagggagtcagagacttaatttcaaatacatagacataaaatatctataagtattttaaaaacagcaaacaaccaaaatgtcccataacaggaaacattaaaaattaaaaaattagttttcattcttattccagaaactatttttttttgcattttaaaaatttatttactataatttaagttctgggatacatatgcagaatgtgcaggyttgtaacacaggtatacatgtgccatggtggtttgctgcactcattcacccgtcatccaggttttaagccccacatgtactaggtatttgtcctaatgctctccttcctttgcccctgaccccctgacaggccccagtgtgtgatgttcccctccctgtgtccctgtgttctcattgttcaactcccacttatgagtgagaacatgtggtgcttggttttccagaaattattaataaatatttattaataaatacaagtaatttgtaaaaatgactaaattaggataatgcctatattcctgccttgtttattatccgaagaagcagttatctctttaaacatcagtttgcaggccagggggacaacaaggctcaactctgtggtggtgtgggaggactcacacaccttacacttttctatctccagcaccctgcaagacacctggaagtaacatgctggctagacacgtttgttgattgaccacgtgtttgctaatccaacaatccaataaatatgaagaagaaagctctggaataataagaataattttatttcaaaactagctctgcttcttgacatactacacatattgatattcagagaaactttagttccctttgaacagaaagaggttctgtgtaaatagcaacaatgactgcattatgccattcattataagttaacctttgctggattatagactgagaagctttctcgccattgtgatgctaggactgatgctaccgcttggcttaatttgaacaggatgtcagaacagtcgttggcgacatggcattcacattaatttctgaaacactgcatcaggatttataggctttgccatgacaatcagtggcacctctgattacttttgagatgctgctcaaaagtaatgggattttctttgaaaatcgacttggcttcctgtagagacacttgagaaaatacaatcagtgcaccaaacggatatatctctcagtgagaagcatggtaagaaaaacaatatagtaggaatttatactagggaacagagagaacatatgacacctggactctaataaacagtaaacccggccgggcgcggtggctcacgcctataatcccagcactttgggaggccgaggcgggcggatcacgaggtcaggagatcgagaccatcctggctaacacagtgaaaccccgtctctactaaaaacacacaaaaaattagccgggcgtggtggcgggcgcctgtagtcccagctacgcgggaggctgaggcaggagaatggcgtgaacccgggaggcggagcttgcagtgagccgagatcgcgccactgcactccagcctgggcgacagagcaagactccgtctca

SEQ ID NO: 682111 - DNA, 648 bp, Homo sapiens
acagtaccctgtgggccaaacaaaacacatatgtacaaaaaaaaamacacacaacgtacagcttttggctttaataattactataatatcagggttctccttagatgcttagatgcaaaggggtatggccttaagtatcttatttaagactactttgtttttgcttcacaaaaacagttgtaaactgttctgcataaatgtgtttatcccccacacacataataaagaactgtataatagttctatgataatcaaagttaagataaagaacccataaaaggtaagaatgagctaaagtaagtacagggcatggccaaattaaatcttatgattcattaaaatcacccaccaaggctaagcaattggggtggtcacagatgaatttgtattcaacctatggcttctaagaaaataaattcttttctttccaaataatagcatcgaacctctactgttgtctaatggagagtatagaggcagaagggacctgagaccatttttcttttcattcatgttaggctcacttaaccactagatggcatatcatgcatgaacagtacatactcacgcgggtttgttctgcccaaaccttttgccaagggtgagtcccagtacagaaaacacttgatctacaggttatacccctca

SEQ ID NO: 682112 - DNA, 602 bp, Homo sapiens
tatttgagaatgctacaggaaaatacaaaattcaaacacgtgcaaagcagccaaatactggcaacattaaattatttaagcagtgaacacctcctgaatgaatggcagaggaatccagagtagagagacaaaagttccttaatttcccaatccctgcaattactgaaaaagcagggaatagggaggagcaaaccagaaaggacactggagccccactctcaggccttagyctgccattagccagctgggtgacactgagtaagccaattctcccatctggctgctcatgtataaaattagaggctggaccaaataatttctagaattacttcaagccctaaatttcaccaccaccatttttctcccaaaagacaaatcctggtttgtcatgctgaccgtggtactgaccgaccccacgaatggaaacttgacatcatagggagacctcccttttccttttttttggtaataacccaatttatccagtgtaatttagacttttgaatcactgataatattaagccacttttattaaacacaatcagggcattattcgtaatcaggacaataaaaagctcattttgtgcaattctgtaatgttg

SEQ ID NO: 682113 - DNA, 1489 bp, Homo sapiens
tgaacaaaaaaacctttgatctagttaggattaatgtgggggacaaaagtaagatttcatttttagctttcataattaatttggaaaaaatgtgataaaggattttgtttcaaagagagagacagaaagtttctgagtttccaggaagacgcctcagcagtccctcaaaccttttatgcccttaaagaatcctgtgtaaggtaatagtaaattatatcccaaactgctcctcaaagtgacaataatatgtaacagctaccaaacttgagggcaagttgaaacttgaacttatagtatatttctttccaacaattaaagaaaaagcatatatggtgcagaattctgactttttatatgctacagaataattacataagtcaattatattagtaatcagaataatcataaggaatacgatgctctgacacaaaagaggcaccatatattcaattatcttacaacatttaacatttcttcatgttactaatattctcactggcatatgaacttcaagttattaaggtccagaaaattataagaaactgacaagcatattaagaaccagattctcagacatattcaaaaaaatcgaaacacttgtttttttggtttccatttattctacttaatgacagttgtggtttgtggaatgaaatattctcaagtttcaaaaattttcaacttatgctacaaaaggagtaattaatggacagaaagatttgtgatatgctcttaccacatagctctgggagtatatggagaagagtgtcttttagtaacactaatgtgaattactccaatggaaaatcataatgagtaattgagtataaatgacgttcattattgagttaagggaacagagatgatgtacaggagttgatcattattaaaaaaatgtactttaactacaacttccttttgtctcaggcatactggtgattggattttttttttttttctttcttaattgcttgtgtttgcctattgtcttcactgtgctgagagcttatggagtaaacacaaaatacaatgtggtgatacaaggtttggatatgttgaggaaggggaaaagaaaatacattcagttcratgggtgcataccatgtggtttcagtaaccacaaaaagagaaaagataatatttatttatataaagacaaactccagtttgatagtccatatgcttcttatgttaatgaatatgtttatattttaagaaatttgaacattgatattccattggatcagtgatatatttggtggttgcattgctgaacaaatttcaaatagccacaaaaagaatgaggaaatgttaacaaaaattggatttgggagtaaaaaatcgttacaaacaatgaaacctaatgataaaacaaataaataaagcataaacttctttcactggatgaaaatggtgtactgtttctatgccacaaagtgctaaaaaatccaaaatgatttactgatgatttttatttatctccttaaaa

SEQ ID NO: 682114 - DNA, 1152 bp, Homo sapiens
acaaaatactggcaaacaatctagcagcccgtcaaaattgaatctaccaccatcaagtaggcttcatcgccaggatgcagggttggttcaaaatatgcaaatcagtaagtgtgattcatcacacaaatataactaaatacaaaaaccacatgattatctcaatagcttcagaaaggcttttgacaaaattcaacatccctttatgttaaaagctctcagtaaactaggaattgaagaaacatacttcaaaataataagagctatttatgacaaacccagggtcgctgtttagatacaaagcaaggcactacttaacacccaacatcaccacctacctgtttaagcactgattattgcccctatgcattamtgctaccctcacccaccctagatggcctggctgaagctcatttgacaggacctttctatgttgtaattggatgagtctcaggatccagctcttacaacctgaatcagcctctgagaaacgttcacccatatttttagcttccctctttgggcaccagcgtgccacagaattgccaacacagttcttaacagaagatgttgatacttttgttatgaactgcttttagtactcagggaatataatcacagagcagggtgtcattctataaaatcttcctatttgcaagctttttaggaattatttagaagaagtaaattccaaagtgacaagataaataaacctattttgtttactattaagcaaaattttatttcctttttctttttttaaaaaaagaaatgtcctttataattcacagctagaatctctccaaaaattcaactaagttatagttaagttgttctgagatttaactacatatagggtgataggttgataagctaggcttattaacacagttgtcaaggcactctctggctctttctcttgtcctctcagttgtatcaattagccctctcaataactcatacctagtcttaagtagatttagagcctttctattcatgaggccattcaggtagctgcccaagtgacattttctgaaagagcccagaaaactgatctaactggaatcatctccagccagccctccaatgtatctgtaatcaccattaagtagtattgggaacaaaaacctatgacttatttagctaatagggttg

SEQ ID NO: 682115 - DNA, 1898 bp, Homo sapiens
tcttaacaagattaaaaagcaaaaaaatggatgaaagcattaaaaggaaatacagaaaaacatttttagcattgtttcataaggaccatcttcagaggcaagaaataaaacaaagccattatgaaatatattgacatatttgacttcatgatgattaatattctctgtgtagcaaaagacaccataactgtcattaaaagacaaatgagagactggaaacaaactatttgctataaacccaaggaggttcaatgaatgactaaggggactcaattttctatctcagaaacagtatatgtaaaaaaggcattaatattgatagaagtacatcataagcactgggaacacaaaggaaaatgaggcagagttattgccatctaggagcccataatgcagtggcagaacgtttgagtaaacgaactgttaccagagaaagtggactgctataatgaagttttacacagaaaggtactttgaagtgagaggacctaatatcagttagggtcagtgagatgtgacatagagaagaaaacaaaacgtgatgggtgagcagtgatgctgcaaagaaaaggaaacgtgtcaacaatttctcaaaagcagaagcaaaaactaggcagacaagaaattggaaggagtctgggacaaggtaatgatgtatgaggtgggcaagaaaaaacattttaggcagagaaattctacacatgttgaatttctacaattttagtttatgcatagttttcttaagtttcctctgaaaacccacacatttctacatgtgtagtagaacttctacatatgtaaaagtgtttgggttttcagaggaaacttaagaaaactatgcataaattaaaactgccatccacaaagaaagcaaatttccatatcctgattgtaggagtatgggcattcggcattgtaccacgccactggtggtgagcagtagggtctgatggctactttgcatatgcctgagatgggctgactcaggcaggtcacaaattgatgagggttaatttctgatataacttcaagttcatgaagtcattatgtctgatgttacatttctttttgctcaagtactgacccattacctgtctccttaaatctttagctcctgctctcttttcataaatgaagtctcaatactacgccatttaccatatgcctggaatccacatccctgtcagagtagattattctttcaaataaccacagcaatactagcttgtttatataaatgcaacaagctgcattagaaaaacaggaggatagcaattatagaatctttctcttcattttgtttcaaaataagtgactcagcctatccaatatgtggaccccggaaaaacacaatgagtcattggtgactatccaatggagaccattaagctgtcagcacctcctcctaccattctctgctggyatgaagttctctaaagttaaattcaacattatggaatcccagttattttgtggaatctaattataattgctgaccaacagattaacaaccatgcaagccctctgcaaacatagctaaattatggctgctaccaaatttttattggattaaattatctatgacattttctaaattttgcatctatgccatgaaagaaatagtaattagaagaccattaaatcttaaaatgacctaaattattggtaaaaacttaaagaacaaaaattgattcagtcaagaaatatttgtgaatttccttcaaattgttaaaaaataaataccctagaatagatattacctataagaataataaacaaagttcaaatagactttctcttttctaaaaacacaatcaatttcttaacattatatatgtaaagaattgaagttggctaaattttacacttttaaaatgtaaatgttttattttgattta

SEQ ID NO: 682116 - DNA, 1898 bp, Homo sapiens
tcttaacaagattaaaaagcaaaaaaatggatgaaagcattaaaaggaaatacagaaaaacatttttagcattgtttcataaggaccatcttcagaggcaagaaataaaacaaagccattatgaaatatattgacatatttgacttcatgatgattaatattctctgtgtagcaaaagacaccataactgtcattaaaagacaaatgagagactggaaacaaactatttgctataaacccaaggaggttcaatgaatgactaaggggactcaattttctatctcagaaacagtatatgtaaaaaaggcattaatattgatagaagtacatcataagcactgggaacacaaaggaaaatgaggcagagttattgccatctaggagcccataatgcagtggcagaacgtttgagtaaacgaactgttaccagagaaagtggactgctataatgaagttttacacagaaaggtactttgaagtgagaggacctaatatcagttagggtcagtgagatgtgacatagagaagaaaacaaaacgtgatgggtgagcagtgatgctgcaaagaaaaggaaacgtgtcaacaatttctcaaaagcagaagcaaaaactaggcagacaagaaattggaaggagtctgggacaaggtaatgatgtatgaggtgggcaagaaaaaacattttaggcagagaaattctacacatgttgaatttctacaattttagtttatgcatagttttcttaagtttcctctgaaaacccacacatttctacatgtgtagtagaacttctacatatgtaaaagtgtttgggttttcagaggaaacttaagaaaactatgcataaattaaaactgccatccacaaagaaagcaaatttccatatcctgattgtaggagtatgggcattcggcattgtaccacgccactggtggtgagcagtagggtctgatggctactttgcatatgcctgagatgggctgactcaggcaggtcacaaattgatgagggttaatttctgatataacttcaagttcatgaagtcattatgtctgatgttacatttctttttgctcaagtactgacccattacctgtctccttaaatctttagctcctgctctcttttcataaatgaagtctcaatactacgccatttaccatatgcctggaatccacatccctgtcagagtagattattctttcaaataaccacagcaatactagcttgtttatataaatgcaacaagctgcattagaaaaacaggaggatagcaattatagaatctttctcttcattttgtttcaaaataagtgactcagcctatccaatatgtggaccccggaaaaacacaatgagtcattggtgactatccaatggagaccattaagctgtcagcacctcctcctaccattctctgctggtatgaagttctctaaagttaaattcaacattatggaatcccagttattttgtggaatctaattataattgctgaccaacagattawcaaccatgcaagccctctgcaaacatagctaaattatggctgctaccaaatttttattggattaaattatctatgacattttctaaattttgcatctatgccatgaaagaaatagtaattagaagaccattaaatcttaaaatgacctaaattattggtaaaaacttaaagaacaaaaattgattcagtcaagaaatatttgtgaatttccttcaaattgttaaaaaataaataccctagaatagatattacctataagaataataaacaaagttcaaatagactttctcttttctaaaaacacaatcaatttcttaacattatatatgtaaagaattgaagttggctaaattttacacttttaaaatgtaaatgttttattttgattta

SEQ ID NO: 682117 - DNA, 1898 bp, Homo sapiens
tcttaacaagattaaaaagcaaaaaaatggatgaaagcattaaaaggaaatacagaaaaacatttttagcattgtttcataaggaccatcttcagaggcaagaaataaaacaaagccattatgaaatatattgacatatttgacttcatgatgattaatattctctgtgtagcaaaagacaccataactgtcattaaaagacaaatgagagactggaaacaaactatttgctataaacccaaggaggttcaatgaatgactaaggggactcaattttctatctcagaaacagtatatgtaaaaaaggcattaatattgatagaagtacatcataagcactgggaacacaaaggaaaatgaggcagagttattgccatctaggagcccataatgcagtggcagaacgtttgagtaaacgaactgttaccagagaaagtggactgctataatgaagttttacacagaaaggtactttgaagtgagaggacctaatatcagttagggtcagtgagatgtgacatagagaagaaaacaaaacgtgatgggtgagcagtgatgctgcaaagaaaaggaaacgtgtcaacaatttctcaaaagcagaagcaaaaactaggcagacaagaaattggaaggagtctgggacaaggtaatgatgtatgaggtgggcaagaaaaaacattttaggcagagaaattctacacatgttgaatttctacaattttagtttatgcatagttttcttaagtttcctctgaaaacccacacatttctacatgtgtagtagaacttctacatatgtaaaagtgtttgggttttcagaggaaacttaagaaaactatgcataaattaaaactgccatccacaaagaaagcaaatttccatatcctgattgtaggagtatgggcattcggcattgtaccacgccactggtggtgagcagtagggtctgatggctactttgcatatgcctgagatgggctgactcaggcaggtcacaaattgatgagggttaatttctgatataacttcaagttcatgaagtcattatgtctgatgttacatttctttttgctcaagtactgacccattacctgtctccttaaatctttagctcctgctctcttttcataaatgaagtctcaatactacgccatttaccatatgcctggaatccacatccctgtcagagtagattattctttcaaataaccacagcaatactagcttgtttatataaatgcaacaagctgcattagaaaaacaggaggatagcaattatagaatctttctcttcattttgtttcaaaataagtgactcagcctatccaatatgtggaccccggaaaaacacaatgagtcattggtgactatccaatggagaccattaagctgtcagcacctcctcctaccattctctgctggtatgaagttctctaaagttaaattcaacattatggaatcccagttattttgtggaatctaattataattgctgaccaacagattaacaaccatgcaagccctctgcaaacatagctaaattatggctgctaccaaatttttattggattaaattatctatgacattttctaaattttgcatctatgccatgaaagaaatagtaattagaagaccattaaatcttaaaatgacctaaattattggtaaaaacttaaagaacaaaaattgattcagtcaagaaatatttgtgaatttccttcaaattgttaaaaaataaataccytagaatagatattacctataagaataataaacaaagttcaaatagactttctcttttctaaaaacacaatcaatttcttaacattatatatgtaaagaattgaagttggctaaattttacacttttaaaatgtaaatgttttattttgattta

SEQ ID NO: 682118 - DNA, 1451 bp, Homo sapiens
tttccagaataaacagtaacaaagtagaaaaaaaaaacggaaaaaaactgcacagaaaggatatatgatgaaagtggcatatctgtaatgtctggagatgactaagagtaaagaagtgtgatggctatccatgtcagccacatgttgggttccactgcagactccaatggcctgatcagcagaggatactggcacctttcatcactgaggtaacaaatagccatcaccactgcagacccccatagaggaagatgtggttgcaccatggccacccagaagtcaaaactgtgctactctaggactgaagctgccatccctcccaaccctgtgcatgctgctcccccccaccaagcaccacagagatgtagccacttcaccagtgtccacattctagaccatggctctgtaatctctctgtgcttaccagtgaacatccacatcttaaacactggaactaccatagttaaggactagcaccatcataggccctaaaccctacagttactctgtttttgcataaactacaggtcattgccctgtagccaccccatgaaagtaatgtatctggtgtttgagccacactcacagctaacccattctccagtccctaaggctactatagccattcatgtgctaacactccaaactccagccccattgctgtactgcacacacctgcacctaaaactcagaaacaatgttactatgagatagtctgcacagaaaactgcattgctattgttgtcctacacacatttgtgctccatacttcaattccccaactacttcacaaacacctatacctcacacattattaccaatatggcaatgagggtttctgtacatgaggcaccattgtcatggcagcccaggaccctagagtcttgatctttccatgtgtgcccatgcttcagatccaagctccatggctgcttcttaggcaatgttcatgagacaccaggggaaacatgccattaagctggatccrgtgctaataaagatcatcagggccatgacttctctggtagaaaaaaaaaaatgatgagaaagacccaacagccttcaccattaaaaactttaatggccttcatcaccactgcagatactttcagccttggctgttaaaaaccactgcaatctttgccaacgtcaaacttagctgggagatttgcatggaaactatgctgctgtgcccaaaccagagccagaacctccacaaccactcaaacagtgtcctttcaactacctaccgaggaaagactttcctcatggaaagtatttcaataaactctggaagaggcgactactccatcacatgtgcagatatcaatgcaaggcagtaagaaacatgaaaaaccaaggaaacatattactactaaagaatacaataatttcccagtaacagaccacaaaaaatggagatctttaaattgcctgaaaaataatccaaa

SEQ ID NO: 682119 - DNA, 606 bp, Homo sapiens
cacaaaattgaatatccaaccatgatctaaattctcaatagtttaaggaagaagggaacttaaacctaaaaaagattacctgcagaaagccaatagttagctattgttatctagtagccaatatctggttattgtttgttgatggttagccaatagttagctatatatcacaattactggtgcgagactgaatgcttttcccttaaaattgaaagcaactcaattrcagatctcaagtctaaatacccctatttagaataatattttaagttatagctagtgcaacaagaaaaggacataaaagacatactgttcagaaaagaaggaaaacaaaaactctctattcaccaacagcataattgctatagagagtcattttttataaactacaaaaaccactcttagaactaagaagtcattgtggaaaatttgcaggatacaaggtcagtatacaaaagtcagtcatattgctatataatgacagtaaacaattggaattggaattttaaatatcttaaaaaagttggaactccattttatttcacatgcaaaaattaactcaaaatggatcaaatcctcaaatgtaagagctaaactataaaaccc

SEQ ID NO: 682120 - DNA, 606 bp, Homo sapiens
cacaaaattgaatatccaaccatgatctaaattctcaatagtttaaggaagaagggaacttaaacctaaaaaagattacctgcagaaagccaatagttagctattgttatctagtagccaatatctggttattgtttgttgatggttagccaatagttagctatatatcacaattactggtgcgagactgaatgcttttcccttaaaattgaaagcaactcaattacagatctcaagtctaaatacccctatttagaataatattttaagttatagctagtgcaacaagaaaaggacrtaaaagacatactgttcagaaaagaaggaaaacaaaaactctctattcaccaacagcataattgctatagagagtcattttttataaactacaaaaaccactcttagaactaagaagtcattgtggaaaatttgcaggatacaaggtcagtatacaaaagtcagtcatattgctatataatgacagtaaacaattggaattggaattttaaatatcttaaaaaagttggaactccattttatttcacatgcaaaaattaactcaaaatggatcaaatcctcaaatgtaagagctaaactataaaaccc

SEQ ID NO: 682121 - DNA, 606 bp, Homo sapiens
cacaaaattgaatatccaaccatgatctaaattctcaatagtttaaggaagaagggaacttaaacctaaaaaagattacctgcagaaagccaatagttagctattgttatctagtagccaatatctggttattgtttgttgatggttagccaatagttagctatatatcacaattactggtgcgagactgaatgcttttcccttaaaattgaaagcaactcaattacagatctcaagtctaaatacccctatttagaataatattttaagttatagctagtgcaacaagaaaaggacataaaagacatactgttcagaaaagaaggaaaacaaaaactctctattcaccaacagcataattgctatagagagtcattttttataaactacaaaaaccactcttagaactaagaagtcattgtggaaaatttgcaggatacaaggtcagtatacaaaagtcagtcatattgctatataatgacagtaaacaattggaattggaattttaaatatcttaaaaawgttggaactccattttatttcacatgcaaaaattaactcaaaatggatcaaatcctcaaatgtaagagctaaactataaaaccc

SEQ ID NO: 682122 - DNA, 606 bp, Homo sapiens
cacaaaattgaatatccaaccatgatctaaattctcaatagtttaaggaagaagggaacttaaacctaaaaaagattacctgcagaaagccaatagttagctattgttatctagtagccaatatctggttattgtttgttgatggttagccaatagttagctatatatcacaattactggtgcgagactgaatgcttttcccttaaaattgaaagcaactcaattacagatctcaagtctaaatacccctatttagaataatattttaagttatagctagtgcaacaagaaaaggacataaaagacatactgttcagaaaagaaggaaaacaaaaactctctattcaccaacagcataattgctatagagagtcattttttataaactacaaaaaccactcttagaactaagaagtcattgtggaaaatttgcaggatacaaggtcagtatacaaaagtcagtcatattgctatataatgacagtaaacaattggaattggaattttaaatatcttaaaaaagttggaactccattttatttcacatgcaaaaattaactcamaatggatcaaatcctcaaatgtaagagctaaactataaaaccc

SEQ ID NO: 682123 - DNA, 643 bp, Homo sapiens
tgtcacccaggctggagtgcagtggcacaatctcagctcactgcaacctccgcctcccaggtacaagcgattctcctgcctcagcctcccaagtagctgggattacaggcacccacaaccacacctggctaatttttgtatttttagtacagacggggttttgccatgttggccaggctggtctagaactcctgacctcaggtgatccacctgcctcggcctctcagagtactggaattacaggcgtgaaccactgcgcctggccgtaacctttttaatgttattttgaaagctgatatttcctctatctttgttgattttgccattaacgtgggaaatgatttcagtttgtctaaagaactttaaagttttctcatcaaggtggaaatattgttttagtacaagcttgtcaaatgaaaagtgtagtggaaaggattgtttctcaaactgaattcatgagagtttctttgtgcttaaggctcaccttgtatgtgtcrcctctgatttcacactctggcttcagactaacatcttaccaacttatgaaggtcatttttctctcctctaagatattaattaacaaaccatccatttcagctccctaaaagtataacaatatgttttcaattctttcatcaggaaa

SEQ ID NO: 682124 - DNA, 1427 bp, Homo sapiens
tgaaaaagaaatcttgaaactcagctaagcctatgtatcattataaaatagagagatatatttgaacaatagtttaagactatctttgaccagattaatcctccactaatataatctatgtgggccaattatggtcattgtcctaggatagctgtaacagtcattcaaagagcataaaacttggtagctatcctcaaagagtacatgaatatatcctcaagaaaaatgagtctcttattttaaaaaagtagtaccttatccaagagccctacaataggcttattataaataggttcattatgttgcttttcatttggacatggagaaagaattctgcaatacttcgagaatgtgaccttgaagaagaagctcgactttgtttcctcatctataggatgaggataataacagttaccacccaatggagttgtgaaccttaaaaagcgtgcgtgtaaagctcttagcacactgtctggctcatagtaagcagtcaatagaagctggcccttgtggtggtggttacacttgtgagtgacaatatgcttagccaagagacctggctaattctgccactctaagccataatacagcaatagagcattctagcctggctctgaggtagaacaggcagtgtaacagcaagataaattcagtcacaggggaaaatctaagagatcaacaactttgtccttccaaaaggaaaaataaagtagattgtagctttttttaaacaacaattcttgtggaatctgttagatcagatttcagattttccttccttaggctaaggaccaaatactttcagttatttttgttgttcatctatgaatcatctgcacatttttaacatttcccattttattttgtgaagacaatagatccaagaaggtctgatctgaagcaaccacagtggaacaatactggtctggcatagagtacatattttactattttattatttggttttattctgtctcacaatccttgtcattttccagtgtatcttcctccattctaaaccatgccaatggtttggttgatgagattgacactattctcagtcatggactgggcctttattgcattattgatatctcatctttgtggcccccatgattagttcagagttaggcatgtgacccaacctggaccaaggagatcctgaaccaaagatttgtctttgacttttgaagtctttcttttcttggttggtgtgttataaagacgtcaggcttgcagctgctgcagatgaagccactaggggcaaatatacggcgttgaaggataaactcaacaccaaggaaggtaaaatgtagaaaatacagataaactggctcattggtaaaatcaatgaagctgttaaatccagcyttcccgaagaaattcaactccttaagccttacacatttcttttattatttaaggca

SEQ ID NO: 682125 - DNA, 601 bp, Homo sapiens
cacctgtagtcccagctattcaggaggctgaggtgggaggattgcttgaccccaggaggtcgaggctacagtgagctacaatggcaccacttcactccagcctgggtgacagagcaagaccttgtctctaacaaagaaaagaataactagcatgcctaccacaaaatggttaatcaaggattgaaaggggctgatgaacattgacattacaaactgaaaaatgtaaattaaagcaatgccagaggccaaaggatgtaaaaggtaaacatgaaagtagatattgaggttaattagatttgactgcttccaagaaaccagcacatgcctcatgataactgatagcattagactggaaatctgtgtattagmaaaattgctcataaggcctggtttggcccccttttgagtaaggcagtggacagattactggtggtcaggagactccgtgataaactgactgcctctcagttctgcccttaactagctggcaaatcccctccggccctgacccgtttgccacctcatctgcctttgcatctgtcagatggtgatagtcatgcctaacctgcctcctaatggagaaagtgagaaagagatgccg

SEQ ID NO: 682126 - DNA, 605 bp, Homo sapiens
cattaaactataaattacaraaaccaattaaacttatatgacaaatagaaaagtaagcaaagcatttttatatgtgcccctttgaccattttcttgatctgcctggcacatagtagatggtcgatacatgtttattcaagatgaattgaatgtgtacaacaggcattcatataattcccactttatgggtaaggaaattgagctcagaggagttaagcaagttacccgagattaggcaactaatcagtccttccttgtaataccgcactttgtcctttcttccttacttagctttaaatcaattctttctgctctgtattctgactctaaggccattcttcattgccccctataggaaaagggtcttgggctccatattattaaaccaggtacatgtagaaaaattgaatgtgatatacaaggaagcccttgaccttttaattctaatctgctgagtctgctggacttctatgtccccagtttcccaaccagatatacttttcaggcaacttaagggcttgaaaaatttctgcttctagaatcttattttaatggaataatcagacataagggcaaagatgaatctataaggaggtttatcaaag

SEQ ID NO: 682127 - DNA, 605 bp, Homo sapiens
cattaaactataaattacagaaaccaattaaacttatatgacaaatagaaaagtaagcaaagcatttttatatgtgcccctttgaccattttcttgatctgcctggcacatagtagatggtcgatacatgtttattcaagatgaattgaatgtgtacaacaggcattcatataattcccactttatgggtaaggaaattgagctcagaggagttaagcaagttacccgagattaggcaactaatcagtccttccttgtaataccgcactttgtcctttcttccttacttagctttaaatcaattctttctgctctgtattctgactctaaggccattcttcattgcccccyataggaaaagggtcttgggctccatattattaaaccaggtacatgtagaaaaattgaatgtgatatacaaggaagcccttgaccttttaattctaatctgctgagtctgctggacttctatgtccccagtttcccaaccagatatacttttcaggcaacttaagggcttgaaaaatttctgcttctagaatcttattttaatggaataatcagacataagggcaaagatgaatctataaggaggtttatcaaag

SEQ ID NO: 682128 - DNA, 592 bp, Homo sapiens
tggctgagccttatataccccttgtcaaactagacatttggtttgaatcctgtagattrggggagccattaagaaattttgagtagacgattcacctggccctgtgtgcttgttagaaagataatctggctggcagtgtgcaggattaattggaggcagggaagcagggagacagatcagttatgagcctcttgcaaatacccaggcaagagagaatgaggttctgacagggttgtggtagtaaagaggaagagaagaaaaagcatgagtgatgctgagaaggtagaaactgatacaaattgataggagccgattattatttgagtttaggtgtgcagatcatgcacagcattgacagaaatttgatgtgtgcatctgagaactcctgtgatttgagatgggatatagaccacagcatgaactcttgttggtttcatctgggagaccaatgttgtcccgcccatattagctacttgagattctaaatggaccagagactcccttcaaggtcaaaccttgttgattgatatgtggttgcatcacctgcaatgtgggccagtctaagttaaggttaaggagcacacactgtttg

SEQ ID NO: 682129 - DNA, 592 bp, Homo sapiens
tggctgagccttatataccccttgtcaaactagacatttggtttgaatcctgtagattgggggagccattaagaaattttgagtagacgattcacctggccctgtgtgcttgttagaaagataatctggctggcagtgtgcaggattaattggaggcagggaagcagggagacagatcagttatgagcctcttgcaaatacccaggcaagagagaatgaggttctgacagggttgtggtagtaaagaggaagagaagaaaaagcatgagtgatgctgagaaggtagaaactgatacaaattgataggagccgattattatttgagtttaggtgtgcagatcatgcacagcattgacagaaatttgatgtgtgcatctgagaactcctgtgatttgagatgggatatagaccacagcatgaactcttgttggtttcwtctgggagaccaatgttgtcccgcccatattagctacttgagattctaaatggaccagagactcccttcaaggtcaaaccttgttgattgatatgtggttgcatcacctgcaatgtgggccagtctaagttaaggttaaggagcacacactgtttg

SEQ ID NO: 682130 - DNA, 585 bp, Homo sapiens
gctaatctaatcttcatttgggtgataagcaatgtgtccttcaaaatcaggacaagatggctcaagattttcaaagcttcagcattttgtggtttcactctcctattaaagttttgtaccctggccagttacaygtgagtttcagaacggtaatggcactagtgaggccactggtaccctagagcagagggacacaactgctaggggaacatcggtgacactggccaaggtgtcttcataggttcagcctggatcaatcatgtaaagcagggttttaaaaactgtgttccacagaaaacagtttgaattcagttggtcctcgaaaggtggagttgaaagggtttatacagccttatggaattatctctgattgttggtttttttcttttttttttagagacaaggtctcactctgtcacccaggctggagtgcagtggtacgatcctggctcactgtagcctcaactcctgggcttaagcaatccttttgcctcagcctctcaagtagttaggattactggcatgagccatcaattatctgaatttttaatgttttaagtttgtatgaggatacataatttctta

SEQ ID NO: 682131 - DNA, 1111 bp, Homo sapiens
tgatgaaagggtacatgttagcagcaaaacgaaaaatgtgactttactgcatgaaagtagcactaattatagtcatttattagaacatcatatgaaccatttgtccctaattacagtgctgtccaagaacgaatatgtaaatcataaaagatgccagatcatttttattgtggctgtatttgattgtaatagtaaactctttaaatgtgttcataattatagtttgttacacatgtggcatgattatttktttacaacactaactccttctattattaataataaatcatattatccagtaaaagatctggatttttcagatacttatgaacttgtgtaagaaggaaaatgcccagccaacaggaatcatctttaaaaaccaatgtaaatgtacaaaaagtggcactgcatttctgggtgggccaagattagttaatgaaagagaataatccagtcattcacatggaagtggacctaatgagttttaatcaaagaaagggatcaaagagtgattactgacatctcctggaagacctgtgtgctaagcagattcagaaagcacgtgcttgtgattcactgttagcaaccctgggtttagaacataactaggacaagtaaataaagagcacaaaagtttgataaggaaataaacttctgtcttcccccagactgtgagcagccttagcacagcaaccacatctgacgcacagcacctggtaccaaagcacacgcttggttattcacatactcgttcaacaaacatactgaggatttaatgaatcattggtccttaaacaaactcatttcattttaaaataatgttttagctgggtgcggtggctcatgcctgtaatcccagcactttgggaggctgaggcaggcggatcacttgaggccaggagtttgagaccagcctggccaacgtggtgaagccccgtttctactgaaaatacaaaaattagccaggcctggtggcaggcgcctgtaatcccaggtactcgggaggctgaggcaggagaattgcttgaacctgggaggcagaggctgcagtgagccaagattgcgccactgcactccagcctggatgacagagcaagactccatctcaata

SEQ ID NO: 682132 - DNA, 1111 bp, Homo sapiens
tgatgaaagggtacatgttagcagcaaaacgaaaaatgtgactttactgcatgaaagtagcactaattatagtcatttattagaacatcatatgaaccatttgtccctaattacagtgctgtccaagaacgaatatgtaaatcataaaagatgccagatcatttttattgtggctgtatttgattgtaatagtaaactctttaaatgtgttcataattatagtttgttacacatgtggcatgattatttgtttacaacactaactccttctattattaataataaatcatattatccagtaaaagatctggatttttcagatacttatgaacttgtgtaagaaggaaaatgcccagccaacaggaatcatctttaaaaaccaatgtaaatgtacaaaaagtggcactgcatttctgggtgggccaagattagttaatgaaagagaataatccagtcattcacatggaagtggacctaatgagttttaatcaaagaaagggatcaaagagtgattactgacatctcctggaagacctgtgtgctaagcagattcagaaagcacgtgcttgtgattcactgttagcaaccctgggtttagaacataactaggacaagtaaataaagagcacaaaagtttgataaggaaataaacttctgtcttcccccagactgtgagcagccttagcacagcaaccacatctgacgcacagcacctggtaccaaagcacacgcttggttattcacatactcgttcaacaaacatactgaggatttaatgaatcattggtccttaaacaaactcatttcattttaaaataatgttttagytgggtgcggtggctcatgcctgtaatcccagcactttgggaggctgaggcaggcggatcacttgaggccaggagtttgagaccagcctggccaacgtggtgaagccccgtttctactgaaaatacaaaaattagccaggcctggtggcaggcgcctgtaatcccaggtactcgggaggctgaggcaggagaattgcttgaacctgggaggcagaggctgcagtgagccaagattgcgccactgcactccagcctggatgacagagcaagactccatctcaata

SEQ ID NO: 682133 - DNA, 662 bp, Homo sapiens
attgagctcaagcagtcagcttgcagtctccttgctggtttactcctacgatgtactgccgtaatacagtttcctcagaaagtgtaaagagaaatctctgcccataaacacaggttctaccctaactcccctaatcactgatttttcaaaagccttaataatgataagaaaaaaagcattttatcaagtgcttactttttgtcagacgtggcaataagaactttccatggattatgctatttatttttcacaataacttcgtgaagtgaatatttttcatctttatcgtgaaaataataaaactaaagaatagtsaaattagaaacaatcaaaatatacattatacaaatggttaaaataaatgacgctgcaccagaattaaggactattttgccaccattacaaataatgcttcatggaagacttaagaaataaggtaaaaattattacattaaaaacctaatagcaagggtattctttctcaccattcctattgactatcataccggaagtcctaccttgtgcaacgagacaagagaaataaagaaaaagcacacagattgggaggaagaaatcaatctgtctttacttgcagatgacatgattgtctacgtagaaaattccaaagaactcctggaactaatatgtaagtataaggtcat

SEQ ID NO: 682134 - DNA, 1100 bp, Homo sapiens
aaaaggattaaatagggctgggcgtggtggctcacacctgtaatcccagcactttgggaggctgaggcaggtggatcgcctgaggtcaggagttcgagaccagcctgaccaacatggtgaaacccagtctctactaaaaaatacaaaaattagccgggcatggtggtaggtgcctgtaatcccagctacttgggaggctgaggcaggggaattgcttgaacctgggaggtggaggttgcagtgagccgagattgcgccatcgcactccagcctgggtgacagagcaagacactgacgcaaaaaaaaaaaaaaaaaaaaggattaaataaaatatagttattttttctactattacaaaattacctcactccttcaaactttattaattagaaatttgtgactaggctagaaaaattaatttactcgaggaaaaaggggattattaacccatttagtagtgtaagaaactgtaaaaagaatgattaaactaattaagagaataaattgtttcaagcaggccatagccatttaaagtcacctattgatatagaaataatttgtgaactaagttacaaataacatccctctacctattcattaaattaggtccctgaggatgtctattaaataatgctttgttagcctggttcacttagctgtttttacttgaaatattacataaatcaaccttttattaatttaaaaggtgaaacctgaaagcatatacagagttaacttataaacataaatgatcttaaatmtataacatataataggggccaaaacaaacctgataaaattcttgctgatttatgtctcactatttcatttctttcagacacattttaatttcattcatgccccgggcatgtcctactcagtgcaaatccctatcatctatctcattatcactctctagtctaatgtttatcattattagctattgactgcacccaggtacggtgcaaaatctaattacacttcattcttggatactgcccagtacagtgaccttgaaaccaggtctccaaactcactctactctcatccttccctccctcggttgatggcagttgcatccttccacgtgttcaagccaa

SEQ ID NO: 682135 - DNA, 1316 bp, Homo sapiens
gtggaaagttaggaattgctaccttcccgtgctcaaaattgaaatcttcctctgactctcctggctagggcactgcctcagagagttgtaggtagtccttgggtctcaaaarctcagttaatctatcccatcatcacacccctggaggcttgcagagaaggtgaggagggatggggaggagttggagttaggattaagacagcatccacaagggctgtctcactcacatcacgtatttccttcatctcaaaagcacacatgcaagcgcacgtgcaagcatctgccctgtttgccccgaagtgcaaaaaaagctcaagtaagcattgaataagaaagagcttggaaaaaccacattgggtcataagtcagagcttgtgactcaagtccatctcctgctgtttctcttcctccgtctgcctgaaggtcttagcctttcagcgtgatcaccaccgccactaagagccatagaagcggggcaaggttcaaattaaccaaaagattgctgctgggagttctctacagcaaaaggtttagtgaaatcctgggttgactctaatgcctcatatttggattacaggagttcaaagctcaaggagtgactactttccgtattaatttccaccaacgaacaaacaatagttgtggtcgtgggaaaaggcactgggctaagagctaggaaggcagtttccaggctaggctctgtctctcacctgctgtgtggctatggctgagtcactcaacttctctgtttttcagacctaaagaggagcactagacaaggaagtctttaaaaaaaaaattatgtagtaaaatagacacaacataacatgtaccatcttaaaccatttttaagtgtacttcattggcattaagtacatttacactgtcatgcaaacatctggacaaggcagtcttaaagtctctgccagttttatcattctgggattctgtaatacccatctctcccttttttgtgtgctcactcacattctattataatctatagaatacatagtcttctgcgcctatagctaatgttctacaaaaacaggaaggatctacatgtgctaatctggaatggagctgattaaaaacaaatctcttttgtccttttgcgtttcctaatctaaggtggcaggtggagctggcccacgagacttactagctgtcgagatgtgacggaggtgaaaaggtgaaacccaaggggcagaggaaaggaggaggaaggcggggatctcgaaccacaggcaccgtgagttctctccacagcttcctctacccattctcacccagcgcaagccagactcctcatctcc

SEQ ID NO: 682136 - DNA, 1316 bp, Homo sapiens
gtggaaagttaggaattgctaccttcccgtgctcaaaattgaaatcttcctctgactctcctggctagggcactgcctcagagagttgtaggtagtccttgggtctcaaaagctcagttaatctatcccatcatcacrcccctggaggcttgcagagaaggtgaggagggatggggaggagttggagttaggattaagacagcatccacaagggctgtctcactcacatcacgtatttccttcatctcaaaagcacacatgcaagcgcacgtgcaagcatctgccctgtttgccccgaagtgcaaaaaaagctcaagtaagcattgaataagaaagagcttggaaaaaccacattgggtcataagtcagagcttgtgactcaagtccatctcctgctgtttctcttcctccgtctgcctgaaggtcttagcctttcagcgtgatcaccaccgccactaagagccatagaagcggggcaaggttcaaattaaccaaaagattgctgctgggagttctctacagcaaaaggtttagtgaaatcctgggttgactctaatgcctcatatttggattacaggagttcaaagctcaaggagtgactactttccgtattaatttccaccaacgaacaaacaatagttgtggtcgtgggaaaaggcactgggctaagagctaggaaggcagtttccaggctaggctctgtctctcacctgctgtgtggctatggctgagtcactcaacttctctgtttttcagacctaaagaggagcactagacaaggaagtctttaaaaaaaaaattatgtagtaaaatagacacaacataacatgtaccatcttaaaccatttttaagtgtacttcattggcattaagtacatttacactgtcatgcaaacatctggacaaggcagtcttaaagtctctgccagttttatcattctgggattctgtaatacccatctctcccttttttgtgtgctcactcacattctattataatctatagaatacatagtcttctgcgcctatagctaatgttctacaaaaacaggaaggatctacatgtgctaatctggaatggagctgattaaaaacaaatctcttttgtccttttgcgtttcctaatctaaggtggcaggtggagctggcccacgagacttactagctgtcgagatgtgacggaggtgaaaaggtgaaacccaaggggcagaggaaaggaggaggaaggcggggatctcgaaccacaggcaccgtgagttctctccacagcttcctctacccattctcacccagcgcaagccagactcctcatctcc

SEQ ID NO: 682137 - DNA, 1506 bp, Homo sapiens
cctccttatagggctctatctccgaaaatataatcatattgggggttagggttttgtgataagaatttgtggtgggtcacagttcagtccataacaaacagttactctgctttgggactctgttactatagacatcacaggggctgtgtgtatcattgccctcagaattgataatcgagttgaggtacataatatttgcataaagtaattctactgcaaagccaacagtagatactacaattaattatcaaatataaaataaatgaaggcagggaatgttatttgccattttatccttgagaataccccttggcacagagtagggcatatatgtgtgtgtgtgtgtgtgtgtgtgtgcatatgtgtgtgtgtatatgtgtgtgtgtatatatgtgtgtgtgtatatatatgaatacatataatatatatgtattcatatatatatattcttcttccatatatatatatattcttctatatatatacatatatattttcttctatatatatacatatatatattctatatatatacatatatattctatatatatacatatatatattctatatatatacatatatatattctatatatatacatatatatatattcttctatatatatacatatatatatatattcttctatatatatacatatatatatatggaaaattcagagaagaagaagaatcttgccagccaggaaaacaaggaaggaacacttttgaactggccttgaaatttgagtagactatcagcaggtcaagatagaagagtgtttctaagagaagatagtgcgccaagccctggaggcaggaagacacaggtctgctgagataagaaacagcagttaggtctgtctgaggtagagacagaagctgcagagaacaaacacaaggctgtagtcagaccatgaaaacatgtagttattgaaataaaaccctaggacttcactcctctagccagatgctcccgtggcttctagatgaaagatccttatgagccagaaatcacatggggtggtagaaagtgcagtagactggaagctgagctagttgaattgtattcttcttttatacacttgtattagttatgtattgctacataacatgttatcccccaaaacttagtggcttaaaaaaaatcatcatctctctgggtcaggaatccagtcatagcttagctaagtcttttgcctcagaatcwttcacaagcatgtaatcaaggtgtaggccaggcccgtgctctcatctgaaggctcaacaggggaaggatctgcttccaaggtcactcatatagttactagcaggattcagattcttgaaagttgttgaactgatggtttcattttctccttggatgttggctgaaaaccactctcagttcctgaccacatgggcctctccataggtcagcccacacatggcagcttgctttatccagggcaaatgtgagaagaaccagagacagagtataaaccaaatagaagccacaccctct

SEQ ID NO: 682138 - DNA, 613 bp, Homo sapiens
tctttccctctctctctctacccattaaggaaactctcttcttacaacctgacacaatgaatacagaaactccttggtgtccggtcagcaggactcagatgcctcaatgaagtggtttctggcctgcaccacccctataccaggatcaagagtgaaatactagggaaactgcctcctcraagccctgcatcctcagaggcctgacttttcaaggcaaccagtgactggcagttttcccatgagagctggtgactgaggcttccggtgagacacaaataggtttgtttgtttttaaggttgcccacatggccactttccccaggagtgagaaaaacatggcgccttgaaatcaaatgaaaggagaagggaaggggaaacgaaggcagtgctcaaagctcagcctaggacgaggatggaactatggctcaggtttaaattatttttttcagtatactatttgctgttttcttaacaaactccatctaacaatgtattctgttttgcttcagttttgtgaccatttgtcctgccatcatggagcctagtaaatgaaaagctaagttatcatcggttggtgtgttagcttcccagggctgccgtaacaaattattac

SEQ ID NO: 682139 - DNA, 2204 bp, Homo sapiens
taccattgtggtatcatgtgcaagtttacctgactaaagacagttttagggggtctgcatgatatgattaggatagttaacttacctaatttaatccatgaaacactatcttaatcattcagtattctcaattgcaaacaaaataaaaccaactctgtctaaattagaagcaaaaagattttttttttggaaagatatcacacagaatagttcataaaaagtttggagaaaaaaaccttgaaaaatgggtgggaatcaagggagaaaaggctgagaaaacatcctatcataaaaataatctacaaaggacacttattgtattgttgcagataaacttactcccattctgctgattcttccttctgttgccactactaaagaaaatcatgatacaaagccccagttatgtttcctgcgaggagccgaaaagaaacaaaacaacaaagtcccagttgactaaacctcaatccaactgatcaagccttgatcacatgtatacttctagcttctagggaatggggagagggaatatttgttctttggtgtttgcagagggaagcaaggtcctgtttccccatatcttgggattctcccaatacaggaaggatatttagatgtttagctgccaaaaatagcaagtgtccactctgtccttcaaataacccttcctaagtattatttatctcggccaagattttgatctgtatcagacagtatgagttcaagattgtatttactgacaactacctggagtgctgctagtcagtgttgccaattaaataacagacagttgaattgtttaacagagagttgaattgggagtaggattaatagcctcttataaaagttaagttttctgaagtagacataggtctgactagaaggccaccactggtgcaaagcaagttgtgggagcatccatttgcatggccaagagtccacttttaaaaatgtttatgaactttaaaaaatgatcatgaggcttggcgtggtggcttacgcctgtaatcccagcactttgggaggccgaagcaggtggatcatgaggtcaggagattgagaccatcctggctatcatgatgaaactccatctctactaaaaatactaaaaattagccgggcatggtggtgggcacctgtagtcctagctactcgggaggttgaggcaggagaatggcgtgaacctgggaggcagagcttgcagtaagccgagatcacaccactgcactccagcctgggtgacagagcgagactctgtctcaaaaaaaaaaaatggtgatgaatttgctctaatatacagacaggggaacatttatgtctcatttagcaaaaccataataatattagcctagaaaaattcaagacagggataattgatacctccttagccattacaaaaaaaaaatcagtaaaggtcccatagaacagcagtccccaggcttttttggtaccagggtccagtttcatggaagacagttttcccatagatgggagtggtggggtgggggtgcagggggtgatggtttcaggatgaaactattccacctcagatcatcaggcattagattttcataaaaagtatgcaacctagacccctcatatgcacagtttacaatagggcttgcactcctatgagaatctaatggcactgcctatttgacaggaggcagagctcaagtggtaatgcttgctcacctgcctgctgctaacctcctgctgtgtggctcggttgctaaaagcccacggaccagtactagtccacggcccaggagttgggcacccctgccatagaatacaatgcctagctttgaaatttgctactgagtattgctactgtttggtatatttgtaaaaaaggtgaccaagaaacgtactccaaagtaattgaaagtggaaagtttcatgagattttttcttttgataaaaatggatgtggaaaaaattttatgtgaaagttgtattttgtatagataatgtggttacatagctaaaaatagtactgagtgcaaaatttcctcatatcccacctgtccagtgctttccccaccatagttaactacttaaattgatttttataatccttccagtcacttttatgcaaacttaagcaaayatatacatatagtcttgtttgcccgttttatttattcatttattttatgtacttattttaaatttatttatttttagttttcatggttaca

SEQ ID NO: 682140 - DNA, 2204 bp, Homo sapiens
taccattgtggtatcatgtgcaagtttacctgactaaagacagttttagggggtctgcatgatatgattaggatagttaacttacctaatttaatccatgaaacactatcttaatcattcagtattctcaattgcaaacaaaataaaaccaactctgtctaaattagaagcaaaaagattttttttttggaaagatatcacacagaatagttcataaaaagtttggagaaaaaaaccttgaaaaatgggtgggaatcaagggagaaaaggctgagaaaacatcctatcataaaaataatctacaaaggacacttattgtattgttgcagataaacttactcccattctgctgattcttccttctgttgccactactaaagaaaatcatgatacaaagccccagttatgtttcctgcgaggagccgaaaagaaacaaaacaacaaagtcccagttgactaaacctcaatccaactgatcaagccttgatcacatgtatacttctagcttctagggaatggggagagggaatatttgttctttggtgtttgcagagggaagcaaggtcctgtttccccatatcttgggattctcccaatacaggaaggatatttagatgtttagctgccaaaaatagcaagtgtccactctgtccttcaaataacccttcctaagtattatttatctcggccaagattttgatctgtatcagacagtatgagttcaagattgtatttactgacaactacctggagtgctgctagtcagtgttgccaattaaataacagacagttgaattgtttaacagagagttgaattgggagtaggattaatagcctcttataaaagttaagttttctgaagtagacataggtctgactagaaggccaccactggtgcaaagcaagttgtgggagcatccatttgcatggccaagagtccacttttaaaaatgtttatgaactttaaaaaatgatcatgaggcttggcgtggtggcttacgcctgtaatcccagcactttgggaggccgaagcaggtggatcatgaggtcaggagattgagaccatcctggctatcatgatgaaactccatctctactaaaaatactaaaaattagccgggcatggtggtgggcacctgtagtcctagctactcgggaggttgaggcaggagaatggcgtgaacctgggaggcagagcttgcagtaagccgagatcacaccactgcactccagcctgggtgacagagcgagactctgtctcaaaaaaaaaaaatggtgatgaatttgctctaatatacagacaggggaacatttatgtctcatttagcaaaaccataataatattagcctagaaaaattcaagacagggataattgatacctccttagccattacaaaaaaaaaatcagtaaaggtcccatagaacagcagtccccaggcttttttggtaccagggtccagtttcatggaagacagttttcccatagatgggagtggtggggtgggggtgcagggggtgatggtttcaggatgaaactattccacctcagatcatcaggcattagattttcataaaaagtatgcaacctagacccctcatatgcacagtttacaatagggcttgcactcctatgagaatctaatggcactgcctatttgacaggaggcagagctcaagtggtaatgcttgctcacctgcctgctgctaacctcctgctgtgtggctcggttgctaaaagcccacggaccagtactagtccacggcccaggagttgggcacccctgccatagaatacaatgcctagctttgaaatttgctactgagtattgctactgtttggtatatttgtaaaaaaggtgaccaagaaacgtactccaaagtaattgaaagtggaaagtttcatgagattttttcttttgataaaaatggatgtggaaaaaattttatgtgaaagttgtattttgtatagataatgtggttacatagctaaaaatagtactgagtgcaaaatttcctcatatcccacctgtccagtgctttccccaccatagttaactacttaaattgatttttataatccttccagtcacttttatgcaaacttaagcaaacatatacatatagtcttgtttgcccrttttatttattcatttattttatgtacttattttaaatttatttatttttagttttcatggttaca

SEQ ID NO: 682141 - DNA, 689 bp, Homo sapiens
attcttatgcctttgtgtccttatagcttagctcccacttatgacacttatgagtgagaacattaaactttattcagtccaatttattttttcttttgttccttgtgacattttcccttttttttcttagcttatcatttgttcttttcaacttttttactgtttgccctagagttttcaatatacatttacaactaattcaagtccacattatttatttattcagttagttagttatagacagtgtctcgctttatcacccaacctggagtgtagtggtgcaaacacgactcactgcagcctagacctcgtgagctcaggtaatcctcctgcctcagtcccctaagtacctgggactgcaggcccatgccaccatgcttggctaatttttgtattttttctagagacggagttttgccacattgcccaggctggtctagaactcctgagctcaggcaatccgctcacctcagcctccgaattggctgsaataacaggtgtgagccattgctcctggctccaagtccactcttaaatgacactataccactttatgggtagtatgagttattatagtaacaaaataatcctaatacttcccctccatcccttgtgtcattgctgtcagttatacaaaacatatatgtatatgtatacccccatatatatatatattcataacatacaca

SEQ ID NO: 682142 - DNA, 289 bp, Homo sapiens
aagctttgctttctgaacgggaatctgagcaaacactcaaatttcccaggtygtagcattattttttctgctcattttagacatctaactaaagaaggtgggatcacaaagaaagggaaaagcggccaggcacggtggctcatgcctgtaatcccagcactttgggaggccgaggctggcggatcacgaggtcaagagatcaaggccatcctggccaacatggtgaaaccccgtctccactaaaaatacaaaaattagctgggcgtggtggcccgtgcctggagtccca

SEQ ID NO: 682143 - DNA, 705 bp, Homo sapiens
ttcatcaatgctagactggataaagaaaatgtggtacatatacaccatggaatactatgcagccataaaaaagaacaagatcatgtcatttgcagggagctggagacaattatccttagcaaactaacacagaaacagaaacccaaataccacatgttcttacttataagtgggagctaaatgatgagaacacatggacacctagaggggaacaacacacagtggggcctttcagagggtggaaggtaggaggagggagaagatcaggaaaaacaactaatgggtagtagacttaatacctggacgatgaagtaatctacaacaaacccccatgatacacatttacttatgtaacaaacctgtacttatacacctgagcttaaaataaaagttaaaaaaagtcttttaaaataaaaatgtaaaattgaaagattaaggaaawattgacatttacatttttaaatttataacataaagtagttcaataccagtcattttaaaaatttacattttacatgttaaatatgtttttcagttctctcactatatcttaatagatttgggtactatattcattttatgcacagatgaattataaattgcagttttattcaattaaaatttaaacattttagtaatgaagcaacataatattaatatatctgtattttccgttttaagaaattttaccttattgtattttat

SEQ ID NO: 682144 - DNA, 705 bp, Homo sapiens
ttcatcaatgctagactggataaagaaaatgtggtacatatacaccatggaatactatgcagccataaaaaagaacaagatcatgtcatttgcagggagctggagacaattatccttagcaaactaacacagaaacagaaacccaaataccacatgttcttacttataagtgggagctaaatgatgagaacacatggacacctagaggggaacaacacacagtggggcctttcagagggtggaaggtaggaggagggagaagatcaggaaaaacaactaatgggtagtagacttaatacctggacgatgaagtaatctacaacaaacccccatgatacacatttacttatgtaacaaacctgtacttatacacctgagcttaaaataaaagttaaaaaaagtcttttaaaataaaaatgtaaaattgaaagattaaggaaaarttgacatttacatttttaaatttataacataaagtagttcaataccagtcattttaaaaatttacattttacatgttaaatatgtttttcagttctctcactatatcttaatagatttgggtactatattcattttatgcacagatgaattataaattgcagttttattcaattaaaatttaaacattttagtaatgaagcaacataatattaatatatctgtattttccgttttaagaaattttaccttattgtattttat

SEQ ID NO: 682145 - DNA, 705 bp, Homo sapiens
ttcatcaatgctagactggataaagaaaatgtggtacatatacaccatggaatactatgcagccataaaaaagaacaagatcatgtcatttgcagggagctggagacaattatccttagcaaactaacacagaaacagaaacccaaataccacatgttcttacttataagtgggagctaaatgatgagaacacatggacacctagaggggaacaacacacagtggggcctttcagagggtggaaggtaggaggagggagaagatcaggaaaaacaactaatgggtagtagacttaatacctggacgatgaagtaatctacaacaaacccccatgatacacatttacttatgtaacaaacctgtacttatacacctgagcttaaaataaaagttaaaaaaagtcttttaaaataaaaatgtaaaattgaaagattaaggaaaaatwgacatttacatttttaaatttataacataaagtagttcaataccagtcattttaaaaatttacattttacatgttaaatatgtttttcagttctctcactatatcttaatagatttgggtactatattcattttatgcacagatgaattataaattgcagttttattcaattaaaatttaaacattttagtaatgaagcaacataatattaatatatctgtattttccgttttaagaaattttaccttattgtattttat

SEQ ID NO: 682146 - DNA, 705 bp, Homo sapiens
ttcatcaatgctagactggataaagaaaatgtggtacatatacaccatggaatactatgcagccataaaaaagaacaagatcatgtcatttgcagggagctggagacaattatccttagcaaactaacacagaaacagaaacccaaataccacatgttcttacttataagtgggagctaaatgatgagaacacatggacacctagaggggaacaacacacagtggggcctttcagagggtggaaggtaggaggagggagaagatcaggaaaaacaactaatgggtagtagacttaatacctggacgatgaagtaatctacaacaaacccccatgatacacatttacttatgtaacaaacctgtacttatacacctgagcttaaaataaaagttaaaaaaagtcttttaaaataaaaatgtaaaattgaaagattaaggaaaaattracatttacatttttaaatttataacataaagtagttcaataccagtcattttaaaaatttacattttacatgttaaatatgtttttcagttctctcactatatcttaatagatttgggtactatattcattttatgcacagatgaattataaattgcagttttattcaattaaaatttaaacattttagtaatgaagcaacataatattaatatatctgtattttccgttttaagaaattttaccttattgtattttat

SEQ ID NO: 682147 - DNA, 705 bp, Homo sapiens
ttcatcaatgctagactggataaagaaaatgtggtacatatacaccatggaatactatgcagccataaaaaagaacaagatcatgtcatttgcagggagctggagacaattatccttagcaaactaacacagaaacagaaacccaaataccacatgttcttacttataagtgggagctaaatgatgagaacacatggacacctagaggggaacaacacacagtggggcctttcagagggtggaaggtaggaggagggagaagatcaggaaaaacaactaatgggtagtagacttaatacctggacgatgaagtaatctacaacaaacccccatgatacacatttacttatgtaacaaacctgtacttatacacctgagcttaaaataaaagttaaaaaaagtcttttaaaataaaaatgtaaaattgaaagattaaggaaaaattgamatttacatttttaaatttataacataaagtagttcaataccagtcattttaaaaatttacattttacatgttaaatatgtttttcagttctctcactatatcttaatagatttgggtactatattcattttatgcacagatgaattataaattgcagttttattcaattaaaatttaaacattttagtaatgaagcaacataatattaatatatctgtattttccgttttaagaaattttaccttattgtattttat

SEQ ID NO: 682148 - DNA, 658 bp, Homo sapiens
cttgagatcagatttcatggtctaatcagactcaccattaacaatcttcccctggacaggaacagagttaatatagtgtgatgagagagtgttggccggtggctcaagcagctctgcaagtctgcacatgtggattttattttcaaacctatgattgatttactttcagactgtggcaaaccctccrctctcccacatgatgcttatcaacaaatggtgtctgcttaactcatttattgagaaaatgtaactgcatttcagaaattttaaattatttcccatggacaatttttgtttctcctaccacagtgtagttctgcatgtgtaatacaccacctgatcaaatagttacattaggacatgttttttaaaattttgaaagttcaacatttcctcttaatgaagatattgacctgtgtttacaatttgatattcttatctcaatttatgttacttatagctgtaaaaataatcgctctgaaaatccattgtttttgaacattctctaagtagtttcttatggattgtaaactactcagatagggatgaatgaatattgaacatacatttgttgatttgacttaatgacacttgaatttgatacaataatcatcagttcacatattcatataagatgatacatatgtgtgtatcattt

SEQ ID NO: 682149 - DNA, 1337 bp, Homo sapiens
gagggggagatatagacatatccatcacagcagttacaagggctaaaagaggtaatgagagtagagtgcttaacaacaatgcttttactatgaaggccatgaatatcatgtttctcaaccaccaatctagtttggggtttcatcatctctgagtaaacttgtgcttatttttgttttattttactttatctcatttttcagggaaacacatgtaaactgtcagagaatggcaaatgattcctcctaaaactgctggttcttaacaaacttaaaggatagattttcctcttctgcatattattacatgcagcatttgactgctaagggttaaggttcctcctgtgtgtggtgttcatagtttcaaatcttcagtgcagtaggcttagccatgcctttcccataaccaattagtaactaagtgacctatgcagatcatagtttcagtcagtatctcccaggcaacttattagcttcctgtagttcactgtaaatcagaataggcaaaattttccctgctaaccaaatataatgttcaacctaaacttagagtttcaaaacatttcaaacaaatgcagagtgaaatgttcggtaagtgtagccagttttgacaattacattttgaatggctgattacatgttttacagctgtttaaatttaagtgtttcaatttggatgcttagttaccttctcccctgtgagatcaccttgactactctctgtatttacccttccttgtagcaatgagttctttggaagaagtcaaatctcattctcggtagcagaaataaagtgagcagtgaaatgtaaacaacgtctcttgacttgacaagatgttcaaaatccaaatccctcttcacagtgtaatagctgttgacacagtttaaacatatatactcttagcaatcatgttgctcctcatttaatgctgaattatttgcctctataaatcaagctgcaacatttgtgggcatctattttcaaatgattgttttagctttggagaagacttcactgaaactttcatctcactttcttttccctaaatttgagatacttttgaatttgcaaagtaaactgttttctgaaattctattcctggcataggaatgtatttagatgacagagggaactgatgagatgtgaagagaaaaagagggttattaatccaagtaacagttatattgtgtttgtcgtaggtaatttatcattatgtgttatctcaactcttagaaaactggcttactatgccttagagtggcatcrtctccaacactccgatttaccttcagctgtgtttggatgacctgtcttaaacttcaaggaaagattaacacta

SEQ ID NO: 682150 - DNA, 586 bp, Homo sapiens
tcatattagaagatacaaagactttcacaggtgggaaactgactgtggtatgatcagaggaaaataagagatctgagtttttttttaaaataagtgacgtattctatttccatatttctaaaattataaggtgttcattgaatagaacgttctttgtatgaaggtctggtagctagaattaatattcttattatttttcttaccaatagaaaattgtaaattgttaataggtattctacctcttgtttttgtgatatgatgcctctaatgacattgtcatagtttaggatctggataattgacacaatgtggcttaataaaagtcagggctgggcatggtggttcctgcctataagcccagcactacagtaggctgaagaaggaggattgcttgagtctaggagttcgagaacagcctrggcaacatagtaagacctcatctctccaaaaaataaaataaaataaaataaaagccagacatgatgaaacatgcctgtagtccgagatattcaggaggctgaggtggaaggatcacttgagcctgggaggttgaggctgcagtgagccatgattgcaccactgtgat

SEQ ID NO: 682151 - DNA, 625 bp, Homo sapiens
tttatattttccctgttttaacttgcwatattttaaacacaatgtagaattatgttggatcattatttaaaaaatacccacgtgtttgtggctcttcactgtgataccacctctattctctgcttgaatcaatagcatttcaacacttttactgctttgagaagaaattattccagtctgttcagtctttgagccaaatctctcagtctgactttgagatcctcactaaaagctctagttccctcatgaggcaaaactgtttctagagtatgtttcaaagcaaagttgtgtaaccaacaattaaacaattaacaaactaaaatagtttaaagttaggcttagtaactttacacatttacttgttacattatatattacaactattttttatgaattaaaatttcgatctcagctaaataatttcagtttcttcatctttgctgtcccattaattattattgctatatccagaaggtttcatttatttatttatttatttgcccaattctcttggcatagagtttatatgaatcagaatgtaaagaagcctgtagatcatcttgtaccactattttgttttgtggaagagaatatttaagccagatgtaaagtaatttgtaggagt

SEQ ID NO: 682152 - DNA, 1347 bp, Homo sapiens
ttacaagtccagtttcaactcttgcctttgtctaattccttgataaattcatgctgttacagcatatgctttggaagaatcacagaacagaatgtaaaaattaaaaaaaaaaaaccttaaagtcatcaaattaattcttcttattatatatgggagaactgaagagtcaaagtaaataagtgacttgctcaaggtcacagagctggtaagtggtaggggccaggtctctaagaccttggcttctgtgccacagaaaatgcattgtttaagcttcaaccctgatttgcagacatcctgatcttgccaggtgtggtcaaggatttgttcgatttctttctaatatcttggtgggcaaaatatcattgtatataaaatatcctagaaccctgtccctcaaagtatggttcataaaacaactgcatcccaatctccaaaatattatgtaacgattgctggagttagagctgaagaatttgcatcttaatcaagaatctgggtgattttatatgttgaagtttgagaatcactgttctaaagcaaaattgatttcatccacaatgttttgtttttgagcctcaggtagatcatatagcaaaaatgatttaaatagtcaccagtttgttatttatgtgggttgaagaagtagggattctgcatttttagtgttaatgcataatactcatgtatttaatcactggaatcctatgggggagaatataaaaatgtgaattattttttactcacacagctgcaggctgaaagaggacacatgtctgaaatatgtgtgagtgtgagtgtgtgtatatatgtgcgtctgtgtttacattatggcatagaccatacccagtgaagaaattgaattgataatccgtgatctccgtgtattccacaagtccctgatccagatgtttttacaggtgagagttatcatattttcaaataagagataatctttggcttatatatgttgtttcagaaagaaaaaagctatctaaattttatggatttaatataactatgacttgaaaattggataagaaaagtacaagaaaagtagaatcatttcacttataaatagatgcaaagatcttaaataaaatgttaattaaccaaatagaatcaaatccccaaaatatattatgatcaagaggcatttattccgggagtaaaaagatagtttaacatcagaaattcaccacattaatagacaaaggaagaaaaaccattgattatctcaatagctatagataaagcattttatatagttcaatrtggtgataaagcctgatgacagtgattaatcctgggcagaggaatcaggttggattggtgtgtgtgcgtttatag

SEQ ID NO: 682153 - DNA, 1806 bp, Homo sapiens
tggcttcctctatgactctatgacaggcattggttggatttttttgacgaactaatatctaaattccctttctaactggggggcacccactgcaggagtagagaagcccagataattgttctccaagagccctggcagccaggggagggctcatgacctaagcttagcagatcagatgatccatccagaactctgttcctggagcacggaaagcaagaaaccgtttaacatccactgtagtcggggaagtgggtctataaccggtgtctggaacagtggcggccatggagtcaggaaaccagcagcgcccactggggaggtcgtcataggggtttctgatcagacaattcctgcagcacaatcagctgtgttctcaacatctttcattgctcactgcccaaggctgtttctcagtcttcttgtggattctctgagtgaccaagtcaacgtccaataagggcctttacaacttaagtgaatcaagtttttgtttgcaaacaaacaaataaaaaaatccaaactcacctgcacaaaatcacacgccacctcatgtgctgaaagaaatacctccttattagagcaatttgggcgtcttcaatgtctttctcaattatcttccatctacattttctactctccagccagattgaactagtcaacattctctgatcacactttttcccatccaggtgcctcaatttgaatcaattttcttgtttataagaagtccacctatcattcacatctacattatctggctgggagtggagccatgtttaatatctgctgtagcgacaggtacgagaggtttcaaattcctccagatgccagctccactcccccccaatcagactttcctgttttcctgattgccccaaaccccagaaaacagatgtgaccttgatcttctttgacctctcataacattttgcatctttcttatgtcaaataccacattccacattggaaaaaaatggtcatttgtttttgtattcaatctattctagattgtgagttcttagtaatatagtaaaggttataacttgttttatatctatatattttttagcagtgatcttgcatgttggttgaaaaacaaaatggatatgcatagatctttcttgctgaaatgaagattattataatgcttctaatatacaacttcctatgtctctaaaattctacctacccactgtttaacttaaaaaaaatgaattattatgcaatcaaaaattatgttctatgatctctactttaaaaagaaaataatacattacacagtcaaacatttaataattaggttttttaggaagtgaataagtaaattaaytactttattgtggcatatttaactggatatttcagatatttagcaaacaattaatgtgtctggatatggttttgggtgcagacagtctatgtaaatagaaaagcattgtttttcatggcaaacattcctcattataagtttgttcctagacagaaaatgtaatacattctttgatgtacacagagtttcagagaaaggaataaaggaatttagataaaacttacgggggaaagtcagttatttatacttctgtgttttatttctcaaggaaatagatttgaagaaagcatagttttacaccattaacagctgatacggataagatagagttgcttgatagcaaagaacagataggaaaagaatccatctgtctagaaagatcttcatggaaatggataagtagtgcctattcgggaaaaaattactacacatataatatatttctggaaggtttatgtgaaaaacatatttcctgt

SEQ ID NO: 682154 - DNA, 599 bp, Homo sapiens
atatatttttatatatatatcctaatctgctatatatattatatatatatatatcctaatctgctatatatatwatatatatatatatatcctaatctgctatatatatatatatcaacatgggttgatactaaaacatggtggtgagtaagaaatgctgggaacagaataaaatgtataccataataccatttctataaattgaaaatttatatacatagaaaacaacattaaaattttataagaataagtatgtgtataagaacatgtatcagatacatttgggtacgtgtggtgtggaggggagaaaatagaagtgtggaaatgtggagtggggagaggaaataataaagttggcaaaaagctttttactaactgacaatattctgtgaactggagagtggaataaatttaactgtaccccagtgtacagtctgttctcacatggctataaaggaatacctgagactggctaatttataaagaaaagaggtttaattggctcagagttccacaggctgtacagaaaacatggctgggaggccacaggaaacttacaatcatggcagaaggtgaaggggaagcaggcacatcttaca

SEQ ID NO: 682155 - DNA, 599 bp, Homo sapiens
atatatttttatatatatatcctaatctgctatatatattatatatatatatatcctaatctgctatatatattwtatatatatatatatcctaatctgctatatatatatatatcaacatgggttgatactaaaacatggtggtgagtaagaaatgctgggaacagaataaaatgtataccataataccatttctataaattgaaaatttatatacatagaaaacaacattaaaattttataagaataagtatgtgtataagaacatgtatcagatacatttgggtacgtgtggtgtggaggggagaaaatagaagtgtggaaatgtggagtggggagaggaaataataaagttggcaaaaagctttttactaactgacaatattctgtgaactggagagtggaataaatttaactgtaccccagtgtacagtctgttctcacatggctataaaggaatacctgagactggctaatttataaagaaaagaggtttaattggctcagagttccacaggctgtacagaaaacatggctgggaggccacaggaaacttacaatcatggcagaaggtgaaggggaagcaggcacatcttaca

SEQ ID NO: 682156 - DNA, 641 bp, Homo sapiens
gtgatcatccccagcaaacagcagtagccaatctctgaactttcatcagcttatatagaaagggctttatgcaaacctctcgttccagattgaacttttgaaggctttcaaatcaccactaacacgtaagcattgctgcttgccagcaatggtccaccaaccttgtgcctcagatttctaatggacttccatcgtttacagtgaaagtcatggttattattcagccacaatttagttttttcaagcatgattatttgaggtgttgggaatcaacataattttcatgcttcttctgcttaaatatctgtatagctttccagatacatatgcatacrtctctcatatcattgtaaaataagatgcttgagagaatgaactatatccagagacagaagtaaccataaagggagtagggatttttcttaaataacttctttttggggtatagaaaattttcatctctactccaatgatcacctttccttttcttttttgtattatttatcaaacatgtattttctgggcactggttctcttcccagatttatggaggcataattgacaaataaaaattatatatattaaaggtatacgatgtgataaattgatatatatatatatatatatatagtgaagtgatc

SEQ ID NO: 682157 - DNA, 1529 bp, Homo sapiens
attttaaattctatttttgcaaagattacactgatactgaaaaagagagctttatcccatatttgcctctacagagtagtaataaagcaactctgacctaaaaaaaaaaaaaaaaaaaaaaaaaagataaatttctgatcgttgtttttaagtggttaactgcaatccaagagaaaaagtatctaaacagctgaggcctatcccgctggatttctgtctcccagtaaggtatatcttttaatggtgttaagttaaaaggtaccaaccaatgttcagattttgttaatttgtgttgaatccggaaatatcttaaaccacactggcattttattttccatttgttgagacatgatgttgtccatgcttatgattgactgttaaatcctccataaataaaaatgtattttgatgaaacataacagttaattctatgtggagtaccttgtgtattaattgttactcatagggagatgtcagtggtatttatccaaggttctattattgagttattacattgtttgaggttatcagtaattagaagaccaggatcatcaatgtttttgtaatctgtcaaattgtttttctcttgaatcttaataccatacctttactttcacaatcttagtctaattccaaagtcttttatgtagactgctggtactgttagggtgaagccaggaatctcaatatctgggtccaaaagtttgactttttacaaaggactggatacaaaattggaaccacagttacattgggaacattaacaaaatctgttatggggtagactaaaggtctacttatatcatgacagatcaaggtttttggtaacaaatccaacagtcagtaatgccgcctccttgtaatagattggaaagtgcaaattagagcattgtctttccaggaaaataaaggcatataagaagagatcaataataaaagggaaagaatacagtgacctgatctaggcatcctgaaatagggatctactgtagacatcatctgcttcaattccaggtaaattttagtcttaaatcacctgttggagagttgcttcagtcagaagtagggaccatttttwaaaaagagatgtaaatccaagagtcaatgtctttgagtctgatagcatagggactggtgaaaaggaccgaatatgggcccttccaatgtggtttgagagaatccttatgtaggtgccttttttagtagacaaagtcactaggttacagatcacggtactgtaggtccttgtctcccaggagagtactgtgggaagactgttctaccaaagtatgatttttatccatcactttaataatgtctttgcaatactgaagtatgtctctttgctgttaactgagagtcaaaatagagggagtgaagtatataggagagcctgtgattatttcaaaagctaaaagtttctgagctctaaagggagtggctctaaaatttaatatcaaaggaagaactctaggccaaggaaggtatatggtttccataaatttggccaactgtattttaatagttcc

SEQ ID NO: 682158 - DNA, 1529 bp, Homo sapiens
attttaaattctatttttgcaaagattacactgatactgaaaaagagagctttatcccatatttgcctctacagagtagtaataaagcaactctgacctaaaaaaaaaaaaaaaaaaaaaaaaaagataaatttctgatcgttgtttttaagtggttaactgcaatccaagagaaaaagtatctaaacagctgaggcctatcccgctggatttctgtctcccagtaaggtatatcttttaatggtgttaagttaaaaggtaccaaccaatgttcagattttgttaatttgtgttgaatccggaaatatcttaaaccacactggcattttattttccatttgttgagacatgatgttgtccatgcttatgattgactgttaaatcctccataaataaaaatgtattttgatgaaacataacagttaattctatgtggagtaccttgtgtattaattgttactcatagggagatgtcagtggtatttatccaaggttctattattgagttattacattgtttgaggttatcagtaattagaagaccaggatcatcaatgtttttgtaatctgtcaaattgtttttctcttgaatcttaataccatacctttactttcacaatcttagtctaattccaaagtcttttatgtagactgctggtactgttagggtgaagccaggaatctcaatatctgggtccaaaagtttgactttttacaaaggactggatacaaaattggaaccacagttacattgggaacattaacaaaatctgttatggggtagactaaaggtctacttatatcatgacagatcaaggtttttggtaacaaatccaacagtcagtaatgccgcctccttgtaatagattggaaagtgcaaattagagcattgtctttccaggaaaataaaggcatataagaagagatcaataataaaagggaaagaatacagtgacctgatctaggcatcctgaaatagggatctactgtagacatcatctgcttcaattccaggtaaattttagtcttaaatcacctgttggagagttgcttcagtcagaagtagggaccatttttaaaaaagagatgtaaatccaagagtcaatgtctttgagtctgatagcatagggaytggtgaaaaggaccgaatatgggcccttccaatgtggtttgagagaatccttatgtaggtgccttttttagtagacaaagtcactaggttacagatcacggtactgtaggtccttgtctcccaggagagtactgtgggaagactgttctaccaaagtatgatttttatccatcactttaataatgtctttgcaatactgaagtatgtctctttgctgttaactgagagtcaaaatagagggagtgaagtatataggagagcctgtgattatttcaaaagctaaaagtttctgagctctaaagggagtggctctaaaatttaatatcaaaggaagaactctaggccaaggaaggtatatggtttccataaatttggccaactgtattttaatagttcc

SEQ ID NO: 682159 - DNA, 1529 bp, Homo sapiens
attttaaattctatttttgcaaagattacactgatactgaaaaagagagctttatcccatatttgcctctacagagtagtaataaagcaactctgacctaaaaaaaaaaaaaaaaaaaaaaaaaagataaatttctgatcgttgtttttaagtggttaactgcaatccaagagaaaaagtatctaaacagctgaggcctatcccgctggatttctgtctcccagtaaggtatatcttttaatggtgttaagttaaaaggtaccaaccaatgttcagattttgttaatttgtgttgaatccggaaatatcttaaaccacactggcattttattttccatttgttgagacatgatgttgtccatgcttatgattgactgttaaatcctccataaataaaaatgtattttgatgaaacataacagttaattctatgtggagtaccttgtgtattaattgttactcatagggagatgtcagtggtatttatccaaggttctattattgagttattacattgtttgaggttatcagtaattagaagaccaggatcatcaatgtttttgtaatctgtcaaattgtttttctcttgaatcttaataccatacctttactttcacaatcttagtctaattccaaagtcttttatgtagactgctggtactgttagggtgaagccaggaatctcaatatctgggtccaaaagtttgactttttacaaaggactggatacaaaattggaaccacagttacattgggaacattaacaaaatctgttatggggtagactaaaggtctacttatatcatgacagatcaaggtttttggtaacaaatccaacagtcagtaatgccgcctccttgtaatagattggaaagtgcaaattagagcattgtctttccaggaaaataaaggcatataagaagagatcaataataaaagggaaagaatacagtgacctgatctaggcatcctgaaatagggatctactgtagacatcatctgcttcaattccaggtaaattttagtcttaaatcacctgttggagagttgcttcagtcagaagtagggaccatttttaaaaaagagatgtaaatccaagagtcaatgtctttgagtctgatagcatagggactggtgaaaaggaccgaatatgggcccttccaatgtggyttgagagaatccttatgtaggtgccttttttagtagacaaagtcactaggttacagatcacggtactgtaggtccttgtctcccaggagagtactgtgggaagactgttctaccaaagtatgatttttatccatcactttaataatgtctttgcaatactgaagtatgtctctttgctgttaactgagagtcaaaatagagggagtgaagtatataggagagcctgtgattatttcaaaagctaaaagtttctgagctctaaagggagtggctctaaaatttaatatcaaaggaagaactctaggccaaggaaggtatatggtttccataaatttggccaactgtattttaatagttcc

SEQ ID NO: 682160 - DNA, 2541 bp, Homo sapiens
ccacaaattctcatcacttactgcttcatttccaactttctgaaaataattcttccactcttcacctcctgaatggtaaaggtataaattcaagctatcaactacttttcaaaattatcatctctacagtgttttcttaatttaacacactatgttcacgaggtaaaaagaagaatttcaagaccaagtaacaagtcatctatcatagctatatacttgttccttgcaataaataaaaatattatcattagaatttctgttttaagtgagaaaattggataaaaccacaattgaatttcaaggtcacttataagaaaaattttttttaaaaggagagctttttaagagacagggtctcgtttcattgcccaggctggaatgcagtggcctgatcatggctcactgcagccttgaactcccagcctcaagcaatcctcctgactcagcctcccaagtagctaggccaccgtgcgtggcttaaaaagctctttaaacccctaaaagctaagtaacatgaaacatgcttaacaccagcacgcagatctcaaggattaacagtagctacatacaaccataggaaggcaagatgacacagaggtctgggtggcttcgagtctagccctgtgattatgtggaaggtaattaaactcactgagcctcagtttccactttaaggaaatgggattaataacatctacctcacagagatgttgtgagcattaatatgaagtgacacctcaagttgtgactacaatacctgacccagagtaagagctcaagaaatgaaaaccatcattatgaccccctatgtagagaaagaagtttgcttaccatcagagtaaaaattagaacaaaatgccaagatcctttcaaaagtcctttctcaaccactcagaacacgactgcttaagtctgtgggccatccaggtccttttgtctcctctttccccttcatctacttgccttctgccatgtccctacgcattaacttcccctagggactaggaaggggagaaggggaaaggttagaaaatagaggtagtcattgttgcaacctatgcccagctctaagaaactccaaaagcaaagatgcaaaaagcaatttaaactgttggccaaaattaaatggggagttgggggggagtgtgaatagacgtacagttttctttcttgcactattcccaggctctactacaacatcaaccacagaaatgctccaaaaatggtaaacattggctgagaggagaagggacagctcagcaaacgctaaggctgacaactgcaattccatctctgccaggagacacttgtttattaaagtctctctctcagccttgctgtattcacacatggaacaggaggactcactccaactccattttcagagctaaagtgcagggcaatggaaaagactagagaaagctctggaaatggagaaccttaatgaacmaactgctgcaacagtggtcagttcctgcaagttatcactgattaaagggaaagcaagcaccctcgatctcacaagctttttttttttttttttttgagacaaagtctcactctgttgcccaggctggagtgcagtggtctgatcttggctcaccgcaacctccccatcccggtttcaagcgattttcctgcctcggcctctcaagtagctaggactacaggtgcccaccaccatgcccagctaatttttgtattattagtagagacagggtttcaccacgttggccaggctggtctcgaacctctgacctcaggtgatccgcctgcctcagcctcccaaagtgctgggattacaggtgtgagccgccgtgcctagaggtctcacaagcttttatgtgtgaagagttacatcctgacaatttgtgagatcaaacccacgttcagaccatcaggcagtgttgcacacttggcctacagagcaaaacatttcttttttaccctctgatggtcatatagcacccactatcttctccagagtgcagaaggctttataaaatctctcaattggccgggcgcggtggctcatgtctataatcccagcactttgggaggccaaggcaggcagatcacgaggtcaggagatcgagaccatcctggctaacacagtgaaaccccatctctactaaaaatacaaaaaaaaattagccaggcatggtggcgggcacctgtagtcctagctactcgggaggctgaggcaggagaatagcgttaacacgggacgcggagcttgcagtgagccaagattgggccactgcactccagcctgggcgacagagcgagactctgtctcaaaaaaaaaaaaaaaaaaaaactctttcaatcccagagttcctgctatttaagattctggatcactgcactattcagtccctgggaaaagtgaactgctctacatttgacccctttatcaaagtaaaatactgatacatcccaaagcagtctccgacaaaggtgaatcaaagtagatgtgaaattctgcatagccagaggccaaaatctggttttctttctcaaggttccaaatttcttcca

SEQ ID NO: 682161 - DNA, 1337 bp, Homo sapiens
ggtgataagcatgttaattgccttgtggtaatttttaaattacctcaagttaatgctgaaattaaaatagacttttgtggtaatttttaatttcttgtttcactggatatttcctccttacaatttcttaatttgttcatttgtgctctttccttatttcttcttgatcaagttaggtaataaattgcctatatttgtatttactttttaaaaaataacttctatgacttggcttactgttctactaccacaataatttttgcttttaactttttttaaccttgtttcttatgttttcttctgatttaatttgttgttagtttactagattattgagctgctatttaactttactagattattattattattattaatatatatttttattatacattaagttctggtgtacatgtgcacaatgtgcaggtttgttacatatgtatacatgtgccatgttggtgtgctgctttactagattattgagctgctatttatttatacatattctttcatttttactaataaaagtgttttatgtatttaattttcttctgatcattgcttaaaatatattcaataaattctgataggtagtgtttctcttgtcatttatttttaaagaaattctgtacttttttgttttcccttgtcaccaaagagttgtttaataggagattaaaattttttgttaataatttttgatcttattgaattgtgataggagagtactatatctctactttacaaaattttctgactttttattgtgaactttgattttgaactttatgtttgatcatttttgtgaatttgtgtattctagggtgtacattttgatacatatccatatgtagattgtttatgttctttagtttttctgtcttctttttatttattgaccaattgctctgctttgtactgagaatggtacattagcctctcattattttatttctaattatgtcatattgaatatcctatagtttttgcttcacraaagtggttgatatgttgtttagtgcctagagatttgtaggcattataccttcattgtgacttgtggtgtttagcattaaaaagtactctctctgtcacaactgatgtacattggctaaaattctacactttctgatttcagcattgcacccctcattttctcattgctactgctattatatcattcatctttggtctttctaaatcatttagtttaacatatacagcattcagttatttcttgttttgtgtaataaattgaaaaattttttactaggtaagttaagctattcacatttattagtatgattaatatgatttgactcagtctgccatac

SEQ ID NO: 682162 - DNA, 596 bp, Homo sapiens
gtggaaaacaggggaagtgaaaaaaacaaggcatttattaaatccatgaaaaacaaaaattggattaactataaaatggttaagctatgaaaattaaaaataattagtactgttataaatggttaagctatgaataatgtaaataattaatacttaaattgattaaaatgtttaaattaatattttaaatatrtattatttatattaacaatataggcaaagggaaaaggtttgtgaaggaaggtggcaggatacagtaagaaacctaaatgctaatctcagattgtgaaaatttaattattattatttattaataatttattatttattaatttattaaataaataaagtattaataaattaaaaccaaatggtgccaaaacacatcattttagaattggataataaatatttgtaacaaaatacttaaagagttgaaaattgttgtctcaagaaattggactcggagataatgtgtggcttaggtatgacagaaaagtactgatttctatttcgattttatagtactacttgacttttaaaattaagttcatttattacttaaatagaaagaaatataaaattaaacaagtaca

SEQ ID NO: 682163 - DNA, 1320 bp, Homo sapiens
ttattcatactaaaacatataaaataatttactttgtaataaagctggcatttaaaagcagtagggatataatattcaatgagtgatattgagatagctctctattttgaagaaataaagttttatctttcccttataccataatgtcctactgaaataaatattccatgctataaaagaaagaattattattacaactatggataagttatataattttgaaacataatgattgcagatatcataatatttaggttgaaaatattttattattcaattattaraagttatgtaatattgccttcaaattgcaaaattatcccatgtgaactaatatacaaagattctaatggagttggcatataattcgctatgtagattatacacagccttgcattttacattctcaaaagatgaaaatcagtgttcactgttaaaaatcctgtggattattacctgatatattcaaagtatatgtcattatatccactttaaagctttaaaggtactcaaattaatcacagtccttatttttggaactcaaaaagaagtcgttttcatttttacagggaatgttcctacaggattaacatcctcctatgagtatgtcctaatgcagaattttggcagagttctgtagatgagcttctaaaatagaaaactttctaaaacttgcagatctgggatcagaaaaacacaaccttgaatctacctgatcattaagccaggcccttctctaactgagaactcgtaattttggtttgaaaattttctcatattcactgtgtcctctctccttacagccaatactttggttcaaacactctttatttttgcctggattaacataacaactctttaactcttctttcacctttgttcattttcctttcctcattctagttcctcttctgtgcttcacctctgctcttgagggatctttctaaacttcaaatgtgacccctaaggaattccaattttccaaagactaaagtccagttcctcagtatgatactgaaagttcttcccaaaataatttaagcttacctttctcactcctacaccacaccctgcacacttggtatgttgactgtgtttttcctctttcacaggttggtgctttactcgtggtttcccatcagcccagattgcaaatgtacctctttcttgctgttgctaaatctttctatgcttgtaaaatcaaaccacagcctgcctaaagccatctttgggtctgtatcggttacattttcttctccataatccccaagcacttcagactagtctcatggtccttgttacacgttaatttatattgca

SEQ ID NO: 682164 - DNA, 640 bp, Homo sapiens
tattttgtctgcaatttaacatccaagacagactctagactgtggaggagcagacttaaaaataataataaaagtatttctctgaagcttagtcagcatttactggatcaatcaacatggataaatcactttctaagcctttaatttgaaatctttcaaactgactcaaaagttacaaacaggtagccttggttctttgttctttcatggtttgttttttagcattcactacgagagttaagaccaggttcatgtgtcacacatttctcggtgacactgtttaattttcataaaagagagcatgaaattgactttgaaaagtagtgaaggaaattggcaataggagcaattccaagctttcctgagggaaaaaaaasagactagagaaaggatttgttgacagtatcacaaaataatttttttaattttgaaaaatagtagaataaaagcagattattgccacttactctaaatccaattgtacagaatggattgcaagagggaaaatcattagtcataaatattgtacttttccatcttcatgccatgaaaatatgcagaaatagcacagatatttcttttactaatagatatgatagaaatagtacagtcttttaggacatagagccctggtttaagt

SEQ ID NO: 682165 - DNA, 621 bp, Homo sapiens
taatttataccttaactgagaagttgtatgtcttctcaatggagcatccactttgatgcagattcaaatgataaatggatcatcagataataccatatggtcattttctttaaataacagaatgaggactaaatttggatctcagattaccaaattaatttatttttttcaattccaataatactgacactttaataaaggatctcagatgctaaacaaggaagcacactaaagactggtggttccacattttaaaatatgatgggctgagagaaagggccccagactctgtgatgtattaaattaacacacaaaatagccccccaaatagtggccttttggagttcagcaaccctactctgaattccagaaattctttttgccacttttgagctttacaaccaggaaaaaaaataattaacatttaataaggctcacttacaccattcatcgaataggctattaagattcatcttatgagattttaaggattacattagtagtttaggtgctaacaggtatccaataaatgatggatgttacttcgtatttgttaccatttttaagtttctagttatattggtcttctttgagataacttcatgtggaggasagaaaaca

SEQ ID NO: 682166 - DNA, 614 bp, Homo sapiens
caagactccacagtttttgtgacttaaaacaatcaccattttattttaactttaaattttatgggctaggaattcaggcagttgctggctgggtatttcttctgcttcatgtggcatggactgaagtcactcagtgttattcagctgatagctgggtcatctgtagggtccagggaagcttacwttgtatttctaataacttttaagtgatgacaggaagagatccactgagtacttcctctggtccatttagatgaaggaccacaaggtctctccaacaggatagtcaggctttttacatggcactaagagatccacaggttagaaagtagaagacgtcaggccaattaagggctatgtccaaaactggcacaatgtcagttgcaacatcttctgttgttcagagtggtcacatgaccatctcagatttgaaatgttacagaaacagatgatagcccttgatggggaagcggcaaagtcactttgcagagcaatgtgcagaacaattttctacatctgaaaaggcacatgttggaagttttattcagactgagttgcatctataaatcatcttggactgaattaacatcttaacaatagtgggtttcctaatt

SEQ ID NO: 682167 - DNA, 1856 bp, Homo sapiens
ccacactcatttaattttgtatttttagtagagaccggatttctccatgttggtcacgctggtctcaaactcctgacctcaaatgacccacctgcctcggcctcccaatatactaggattacaggcatgaggtactgcacctggctttattattatttccttgaattcagtatgttcttaaaatttttgtctgtattttgcttttattctgctgtcccttttctgtttatcctttttaaacaaattattttttaaaattcattttcatgaaacttttaacaccttatacattcataacaatattttcagtagttttagagaattttcagctattatttttctcttctttttctaaaatcgtaattaaaagtatggcggagttttgtactgcatcctttatatctcttttattctattttcttcattggctttttttgttctctgatttggtctgcatattttctcctagtatttcttgcaatttactaattctctaattttttgtctctaatttgctgttaaattcaatcattgagtttttgattcatcattgtatattttagttttcaattcatttggtttattttattatctctcttgtgttttgatatttgtacatactaagtttatctaaaaatgcttatttttcattatttggatcatctatgtttgtttttattgcacttcccatcaatcaggtcatgtgttctatactttgttactttttttgatttccaattttgcatatggaatgtaaaaaaggcaattcaagaatttttttggatcttttttaacagggaatttcctatgtttctacttgagagttggaattggagaagtaaaataatcccagatcrtcttaaatcaatcaagaaattagataatgcaagttggacttcagttcctttgaggactgcacctatgtctgtgcattcctactccaagagtaaatccccttgcggtctcaaatgaaagccttgttgtttacaaaggacttttttctttggtagaccttcaatttttacatgttttcacttagggtaatgcatctacagaaattttcccccagctttttaggctatcatttatggcttttagaattatttcatagttttagagaaaagagactccaaatgcgaggttctgctctctagctttctttctcttttttgagacaaggtcttgctattttgaccaagctggactcaaactcctggggtccagggattctcccacctcagtcttaaaaatagctgggactacataacatgctgattggtttggctatgtccccacccaaaactcattttcaattgtaatccccataatccctttgtgtcctgggagggaccaggtgggaggtaattgaatcgtgggggcagtttccacatgctgctctgatgatcttgagcaagttctcatgagttctgatggttttataagtgtctggcatttcctcggctggcactcattctctctcctcctgccctgtgaagaggcatgaatgtaagttacctgaggacccctggccatgcagaactgtgattcaattgaacttcttttctttataaattaccagtctcgagtatttccttatagcaacgtgagaatggactaatacatatgcatttctccttttataaagaaatatacattgtatctatatttaacattctaatttggtaatagatagggactgcagagaattactattgactatgggatatttttggcaatttctatgttagttgatatttttgatgtattttttattattggagctaattaattcagattctgggctgttgtaggcatcatctgatctaacaaatatttttgtgtcatttagaaaagtg

SEQ ID NO: 682168 - DNA, 1856 bp, Homo sapiens
ccacactcatttaattttgtatttttagtagagaccggatttctccatgttggtcacgctggtctcaaactcctgacctcaaatgacccacctgcctcggcctcccaatatactaggattacaggcatgaggtactgcacctggctttattattatttccttgaattcagtatgttcttaaaatttttgtctgtattttgcttttattctgctgtcccttttctgtttatcctttttaaacaaattattttttaaaattcattttcatgaaacttttaacaccttatacattcataacaatattttcagtagttttagagaattttcagctattatttttctcttctttttctaaaatcgtaattaaaagtatggcggagttttgtactgcatcctttatatctcttttattctattttcttcattggctttttttgttctctgatttggtctgcatattttctcctagtatttcttgcaatttactaattctctaattttttgtctctaatttgctgttaaattcaatcattgagtttttgattcatcattgtatattttagttttcaattcatttggtttattttattatctctcttgtgttttgatatttgtacatactaagtttatctaaaaatgcttatttttcattatttggatcatctatgtttgtttttattgcacttcccatcaatcaggtcatgtgttctatactttgttactttttttgatttccaattttgcatatggaatgtaaaaaaggcaattcaagaatttttttggatcttttttaacagggaatttcctatgtttctacttgagagttggaattggagaagtaaaataatcccagatcgtcttaaatcaatcaagaaattagataatgcaagttggacttcagttcctttgaggactgcacctatgtctgtgcattcctactccaagagtaaatccccttgcggtctcaaatgaaagccttgttgtttacaaaggacttttttctttggtagaccttcaatttttacatgttttcacttagggtaatgcatctacagaaattttcccccagctttttaggctatcatttatggcttttagaattatttcatagttttagagaaaagagactccaaatgcgaggttctgctctctagctttctttctcttttttgagacaaggtcttgctattttgaccaagctggactcaaactcctggggtccagggattctcccacctcagtcttaaaaatagctgggactacataacatgctgattggtttggctatgtccccacccaaaactcattttcaattgtaatccccataatccctwtgtgtcctgggagggaccaggtgggaggtaattgaatcgtgggggcagtttccacatgctgctctgatgatcttgagcaagttctcatgagttctgatggttttataagtgtctggcatttcctcggctggcactcattctctctcctcctgccctgtgaagaggcatgaatgtaagttacctgaggacccctggccatgcagaactgtgattcaattgaacttcttttctttataaattaccagtctcgagtatttccttatagcaacgtgagaatggactaatacatatgcatttctccttttataaagaaatatacattgtatctatatttaacattctaatttggtaatagatagggactgcagagaattactattgactatgggatatttttggcaatttctatgttagttgatatttttgatgtattttttattattggagctaattaattcagattctgggctgttgtaggcatcatctgatctaacaaatatttttgtgtcatttagaaaagtg

SEQ ID NO: 682169 - DNA, 623 bp, Homo sapiens
tgacaaacttttagtgagctcgttacatgataaagaccttagctggttcagataagtatttatgggactctttctctaaggctcttatgacccagaagatctgatatttaactaaacgtatgctgagatgaaggtgttcaatgaagccaatggtaagccaagtaatgaatatagcagtggaagctcttaagtactgctccctattgccaaaaaaaaattctttattgaagaaacagttactgaattgatactagaataaaattaaaggattgaattaatggactacagattattataattatatctgacattgattcaggycttgaacaaaagtctgtattttaacttaaaactgcagaactgtgattacctacctttcaaagaatcagaatgtcaacttttgttcttagtctctgtgcctctgaggctcagggctcattgggttgtgctttctaacaggaagggtaaggccctccttgctgtgaaaatgcttagggaagagaacttgggactgcttctccctttattctggctgaagtattacttgccttacttcagtatttcataatatgacactgataatttattattcaatttactttagaatttttctttgcacatga

SEQ ID NO: 682170 - DNA, 661 bp, Homo sapiens
aggctaatgtttagatatttgccattctgaaacactgtactgtgagctcctagaatccaggaataactcgctcaaagaaccagacacattgtgagtgctcactaaatgtttattaaattttattaaaccaaatttcaaagctcagagagcaagtatgtggaaataaatgtattaaaatcttgccagccatgaaagtccaatgaaagcaaagttttatttgaaaagaaactacacacacacacacacatatacacacacacacacactgaattttcatctattacaacgtaggtcattagaggaaaaaaacaggtaatacaaatcaaagtcggggggcaatgcagagacattttccccacttttcgcatttgtttaagactgatcatggctaattacagattaatttggaatgtcaaaaataaagactccaggcaaaatcatggtgtagtagaaataattctatactaaaaatctgaaaayattagttgattttgagcttagtcatctcaggaaaatcacatcccaccttataattccttactggaaatgtaatgatccttccagataaatgagtttctggattcttatcattgacacctgtatcctagacaacatgatgacatttttgctggtagaccatttttatataaaccaggtttag

SEQ ID NO: 682171 - DNA, 1516 bp, Homo sapiens
taaaaaaattcatcaaaaatatcaactaatgtagaaattgcaaaaaaagaaagagccttagttcatagtaattctctgccatccatacctattactaaactagaaagttaaatgtacataaaatatgtatttatttttytgaaaggagaaatgcggctgggcatggtggctcacgcctgtaatcccagtactttgggaggcaaaggcaggcagtcacctgaggtcaggagttcgagaccagactggccaacatggtaaaacctcgtctctactaaaaataccaacaattagctgggcttagtggcaggcgcctataatcccagctcctcaggaggctgagacaggagaatcgcttgaaactgtgaggtggagattgcagtgagccgagatcattccattgcacttcagcctgggcaacaagagtgaaactccgtcgcaaaaacaaacaaacaaaaaaagaaatgcatatgtattactctcttctcacattgctataaggaaataccaagctcgttaatttataaataaaagaggttgaattgactcacagttccgcatgattggaaggcttcaggtaacttacaatcatgtctcttcacagggcggcaggagagagaataagtgccagcaggggaaatgtcagacacttataaaaccatcaggactcacgagaactcactcatgatcatgagaacagcatgggggataccattcccatgattcaattacctcccacctggtccctccatgacacataggaattatgggtattacaattaaagatgagatttgggtggggacacagccaaaccatatcagcatgttatgtagtcccagctatttttaagattgaggtgggagaatcccttgatcccaggagttttgagtccaagcttgctgtccagcttgagtcagcaataccctgtcacaaaaaagaaaaagaaagctagagagcaaaaccccacatttacagtctcctttctctaaaagtgaaataattctaaaagccgtaaatgaaagcctgaaaagctgtgtgaaactttctgtatatgctttaccctgagtgataacatgtaaaattcaaggtctaccaaggaaaagagtcctttataaacaacaaggctttcacttgagaccacagaaggatttactcttggagtaggaatgcacagacattggggcagttctcaaaggaactgaagtccagcttgcatcatctaatttcttgattgaattaagactatctgggatttttttacttctccaatccctactcctcagtagaaacacaggaaattctctcttaaagaaacaaaaacatccaaaaaattcatgaattgccacttttcatatgcaaaatcgggcactcaaaaaaagtaacaaagtatagaagatatagccttattgaaaggcaagtgcaataaaaacaaacatagatgatccagataatgaagaataattatttttaaataagcttagtgtgtacaaatattaaagcacaagatagatcataaaa

SEQ ID NO: 682172 - DNA, 657 bp, Homo sapiens
aagggtagagaaagagcaggtgaaaggaaagacatgtaagtcaaagatatgtataatgtagccttatacattacaagatatatgacacgaatatattttctttctagatgactatatttgttcagaatgatttcacgattatctatgactaataatattgctggcaaaaaataatgaacacttttatacaaggctttttattctctttttttttctttttggtttcttcagcacagaaaggtaaattacaaatttttaaattttcaaattttcttctccagtattatatgggttatgaacaattcttactttctcttgaaaaatgttgtcaattatgctgtcaggttttaaatctccaaaaatctgcatatgattattttcatatcctcattttgatttgtcttttatcacagtcattaacaaagggtcttaattaagagcttaaagtaccaaagtactaaaaagctgattagatagayaatgcttcctttaaatgtttccgtataaacagaataccttattctaaaagatgcatatggtaacagcattttatagacctcccacaatatattaaaatcaaagtgtgttctaaaataaagcttcctgaacttcggccttttttcttataactcattatttggcttatgtacataattg

SEQ ID NO: 682173 - DNA, 600 bp, Homo sapiens
ccatcacaaccaagagactgcttcctggacacagagttgacttcctggaaagggaggactgcgagcctgctcactgctccctgctgcatcggctctcctgccctcttggctctcaaaaggctgaaagccaggcttgcaatgcgcgaaattatctggggcatatgttgaacccatttaaccaagaaactcctgtttcttgcttagatatttggagatctasaatagagatttctttctgagaaactgaactgagacctgcacagactaatgggaaggggccacacaatgaccctagccaggaaaacctgccagacaagaagctccttgaggggtacagaacttccaagagatgtttagtcagtcacacttcaaatattaatgatcaactaagaaatcccagatctttcaggaaaacctttcatataaaagacaaagataagggccgggcgcggtggctcacgcctgtaatcccagcactttgggaggccgaggcggccggatcacgaggtcaggagatcgagactatcctggctaacacggtgaaaccccatctctactaaaaatacaaaaaattagccgggcgtgttggcgggcgcctgt

SEQ ID NO: 682174 - DNA, 1717 bp, Homo sapiens
tccaaccactgtttgaatgacagctgcctgcttgaaaatttatgtaagcaagatatctacttctacttgagtgtgtgtgtgtgtttgtataaatatatatagacacacataattacatatatacacttgtgtttatagatatatgtgtgtgtgtatatatgtaaacacacacacacacacacacacacacacacacacacacacacacacatatatatatatatatatatatatatatatatatayatatagtctaagtcctttttgtggtgctataagagaatagttgagactgggtaatttaaaagataagaatttatttcttacagttctagtggctgagaagtccaatgttgaggggcgagggctttcttgctgcatcatctgatggcagttggtagaagggcaaaaaagcatacttgtgggagagaaaggatgccaaattcattttttttttttttaattaggaactcactcctgtgacaacttactcctgggacaaagacgttaatccatttctaaggattcctcatgacataattacctcttaaaggccccacctctcaacagcattgcattggggattaagtttccacacctgaactttggggaacacattaaaaccttaatatgtatctatagagtatatataaataatatatataaataatttatgactatatattgagtactatataagtatatgaaagcaaattatatataaatgtacatataatgtatttttaagttatgtattatataattatataatattatataattatataattatataagaatgccgtggtaacatcaaccctagtgacctgaaattgtcgaggtatgagattcttttctcctattcttcagcatgttagggaagaagattttcagaacttttctgtgtagcctgtcggtatgtccataccgaaattcaaggcattcccccataatatctaactccaatccttccttttaagtctctacttgttctgccttccttttctcctctctattattcagcaatagtaaggcagtcctctcaacaaccatgccctattcaaatatattccctgcttcccttgaaaaagaatgctacaatttgaccacagaagggaagcatcatacattttacatgtaaaatatcccatcttcataattttaatttttttgtcttgtaccaccaatattgaagttcaactaaggagcattagagatttggagcgtgggttacatgttactgacttttgctgaacttttgggatagagagagtggaggatgtcttcagctcaagttatgcaatgatattgagctccatgctcagatacaggaaatagaggaagaaaaagctacccagaaaccaagagcagtcattgggctaggtgggttacttagggacacagctgctaagtaggagaaaaacagcacaaaacaagtcttctaattctttggcctgttctccaatcctcttcatagaggaagtggcaaggatcccaggaactgcttttgctaattactaggcattttctctcaggctgtgttcattttgccagggtgatataactaagtgtatgactttgttcttgcttatttatctaggttacttgttagcttttcatttccttactatttcctagtttggattccaaaacacctttctaatgccatttccttgcttaataagcttcagcgactctctattgcttataaaataaa

SEQ ID NO: 682175 - DNA, 1717 bp, Homo sapiens
tccaaccactgtttgaatgacagctgcctgcttgaaaatttatgtaagcaagatatctacttctacttgagtgtgtgtgtgtgtttgtataaatatatatagacacacataattacatatatacacttgtgtttatagatatatgtgtgtgtgtatatatgtaaacacacacacacacacacacacacacacacacacacacacacacacatatatatatatatatatatatatatatatatatacatatagtctaagtcctttttgtggtgctataagagaatagttgagactgggtaatttaaaagataagaatttatttcttacagttctagtggctgagaagtccaatgttgaggggcgagggctttcttgctgcatcatctgatggcagttggtagaagggcaaaaaagcatacttgtgggagagaaaggatgccaaattcattttttttttttttaattaggaactcactcctgtgacaacttactcctgggacaaagacgttaatccatttctaaggattcctcatgacataattacctcttaaaggccccacctctcaacagcattgcattggggattaagtttccacacctgaactttggggaacacattaaaaccttaatatgtatctatagagtatatataaataatatatataaataatttatgactatatattgagtactatataagtatatgaaagcaaattatatataaatgtacatataatgtatttttaagttatgtattatataattatataatattatataattatataattatataagaatgccgtggtaacatcaaccctagtgacctgaaattgtcgaggtatgagattcttttctcctattcttcagcatgttagggaagaagattttcagaacttttctgtgtagcctgtcggtatgtccataccgaaattcaaggcattcccccataatatctaactccaatccttccttttaagtctctacttgttctgccttccttttctcctctctattattcagcaatagtaaggcagtcctctcaacaaccatgccctattcaaatatattccctgcttcccttgaaaaagaatgctacaatttgaccacagaagggaagcatcatacattttacatgtaaaatatcccatcttcataattttaatttttttgtcttgtaccaccaatattgaagttcaactaaggagcattagagatttggagcrtgggttacatgttactgacttttgctgaacttttgggatagagagagtggaggatgtcttcagctcaagttatgcaatgatattgagctccatgctcagatacaggaaatagaggaagaaaaagctacccagaaaccaagagcagtcattgggctaggtgggttacttagggacacagctgctaagtaggagaaaaacagcacaaaacaagtcttctaattctttggcctgttctccaatcctcttcatagaggaagtggcaaggatcccaggaactgcttttgctaattactaggcattttctctcaggctgtgttcattttgccagggtgatataactaagtgtatgactttgttcttgcttatttatctaggttacttgttagcttttcatttccttactatttcctagtttggattccaaaacacctttctaatgccatttccttgcttaataagcttcagcgactctctattgcttataaaataaa

SEQ ID NO: 682176 - DNA, 1717 bp, Homo sapiens
tccaaccactgtttgaatgacagctgcctgcttgaaaatttatgtaagcaagatatctacttctacttgagtgtgtgtgtgtgtttgtataaatatatatagacacacataattacatatatacacttgtgtttatagatatatgtgtgtgtgtatatatgtaaacacacacacacacacacacacacacacacacacacacacacacacatatatatatatatatatatatatatatatatatacatatagtctaagtcctttttgtggtgctataagagaatagttgagactgggtaatttaaaagataagaatttatttcttacagttctagtggctgagaagtccaatgttgaggggcgagggctttcttgctgcatcatctgatggcagttggtagaagggcaaaaaagcatacttgtgggagagaaaggatgccaaattcattttttttttttttaattaggaactcactcctgtgacaacttactcctgggacaaagacgttaatccatttctaaggattcctcatgacataattacctcttaaaggccccacctctcaacagcattgcattggggattaagtttccacacctgaactttggggaacacattaaaaccttaatatgtatctatagagtatatataaataatatatataaataatttatgactatatattgagtactatataagtatatgaaagcaaattatatataaatgtacatataatgtatttttaagttatgtattatataattatataatattatataattatataattatataagaatgccgtggtaacatcaaccctagtgacctgaaattgtcgaggtatgagattcttttctcctattcttcagcatgttagggaagaagattttcagaacttttctgtgtagcctgtcggtatgtccataccgaaattcaaggcattcccccataatatctaactccaatccttccttttaagtctctacttgttctgccttccttttctcctctctattattcagcaatagtaaggcagtcctctcaacaaccatgccctattcaaatatattccctgcttcccttgaaaaagaatgctacaatttgaccacagaagggaagcatcatacattttacatgtaaaatatcccatcttcataattttaatttttttgtcttgtaccaccaatattgaagttcaactaaggagcattagagatttggagcgtgggttacatgttactgacttttgctgaacttttgggatagagagagtggaggatgtcttcagctcaagttatgcaatgatattgagctccatgctcagatacaggaaatagaggaagaaaaagctacccagaaaccaagagcagtcattgggctaggtgggttacttagggacacagctgctaagtaggagaaaaacagcacaaaacaagtcttctaattctttggcctgttctccaatcctcttcatagaggaagtggcaaggatcccaggaactgcttttgctaattactaggcattttctctcaggctgtgttcattttgccagrgtgatataactaagtgtatgactttgttcttgcttatttatctaggttacttgttagcttttcatttccttactatttcctagtttggattccaaaacacctttctaatgccatttccttgcttaataagcttcagcgactctctattgcttataaaataaa

SEQ ID NO: 682177 - DNA, 1717 bp, Homo sapiens
tccaaccactgtttgaatgacagctgcctgcttgaaaatttatgtaagcaagatatctacttctacttgagtgtgtgtgtgtgtttgtataaatatatatagacacacataattacatatatacacttgtgtttatagatatatgtgtgtgtgtatatatgtaaacacacacacacacacacacacacacacacacacacacacacacacatatatatatatatatatatatatatatatatatacatatagtctaagtcctttttgtggtgctataagagaatagttgagactgggtaatttaaaagataagaatttatttcttacagttctagtggctgagaagtccaatgttgaggggcgagggctttcttgctgcatcatctgatggcagttggtagaagggcaaaaaagcatacttgtgggagagaaaggatgccaaattcattttttttttttttaattaggaactcactcctgtgacaacttactcctgggacaaagacgttaatccatttctaaggattcctcatgacataattacctcttaaaggccccacctctcaacagcattgcattggggattaagtttccacacctgaactttggggaacacattaaaaccttaatatgtatctatagagtatatataaataatatatataaataatttatgactatatattgagtactatataagtatatgaaagcaaattatatataaatgtacatataatgtatttttaagttatgtattatataattatataatattatataattatataattatataagaatgccgtggtaacatcaaccctagtgacctgaaattgtcgaggtatgagattcttttctcctattcttcagcatgttagggaagaagattttcagaacttttctgtgtagcctgtcggtatgtccataccgaaattcaaggcattcccccataatatctaactccaatccttccttttaagtctctacttgttctgccttccttttctcctctctattattcagcaatagtaaggcagtcctctcaacaaccatgccctattcaaatatattccctgcttcccttgaaaaagaatgctacaatttgaccacagaagggaagcatcatacattttacatgtaaaatatcccatcttcataattttaatttttttgtcttgtaccaccaatattgaagttcaactaaggagcattagagatttggagcgtgggttacatgttactgacttttgctgaacttttgggatagagagagtggaggatgtcttcagctcaagttatgcaatgatattgagctccatgctcagatacaggaaatagaggaagaaaaagctacccagaaaccaagagcagtcattgggctaggtgggttacttagggacacagctgctaagtaggagaaaaacagcacaaaacaagtcttctaattctttggcctgttctccaatcctcttcatagaggaagtggcaaggatcccaggaactgcttttgctaattactaggcattttctctcaggctgtgttcattttgccagggtgatataactaagtgtatgactttgttcttgcttatttatctaggttacttgttagcttttcatttccttactatttcctagtttggattccaaawcacctttctaatgccatttccttgcttaataagcttcagcgactctctattgcttataaaataaa

SEQ ID NO: 682178 - DNA, 1717 bp, Homo sapiens
tccaaccactgtttgaatgacagctgcctgcttgaaaatttatgtaagcaagatatctacttctacttgagtgtgtgtgtgtgtttgtataaatatatatagacacacataattacatatatacacttgtgtttatagatatatgtgtgtgtgtatatatgtaaacacacacacacacacacacacacacacacacacacacacacacacatatatatatatatatatatatatatatatatatacatatagtctaagtcctttttgtggtgctataagagaatagttgagactgggtaatttaaaagataagaatttatttcttacagttctagtggctgagaagtccaatgttgaggggcgagggctttcttgctgcatcatctgatggcagttggtagaagggcaaaaaagcatacttgtgggagagaaaggatgccaaattcattttttttttttttaattaggaactcactcctgtgacaacttactcctgggacaaagacgttaatccatttctaaggattcctcatgacataattacctcttaaaggccccacctctcaacagcattgcattggggattaagtttccacacctgaactttggggaacacattaaaaccttaatatgtatctatagagtatatataaataatatatataaataatttatgactatatattgagtactatataagtatatgaaagcaaattatatataaatgtacatataatgtatttttaagttatgtattatataattatataatattatataattatataattatataagaatgccgtggtaacatcaaccctagtgacctgaaattgtcgaggtatgagattcttttctcctattcttcagcatgttagggaagaagattttcagaacttttctgtgtagcctgtcggtatgtccataccgaaattcaaggcattcccccataatatctaactccaatccttccttttaagtctctacttgttctgccttccttttctcctctctattattcagcaatagtaaggcagtcctctcaacaaccatgccctattcaaatatattccctgcttcccttgaaaaagaatgctacaatttgaccacagaagggaagcatcatacattttacatgtaaaatatcccatcttcataattttaatttttttgtcttgtaccaccaatattgaagttcaactaaggagcattagagatttggagcgtgggttacatgttactgacttttgctgaacttttgggatagagagagtggaggatgtcttcagctcaagttatgcaatgatattgagctccatgctcagatacaggaaatagaggaagaaaaagctacccagaaaccaagagcagtcattgggctaggtgggttacttagggacacagctgctaagtaggagaaaaacagcacaaaacaagtcttctaattctttggcctgttctccaatcctcttcatagaggaagtggcaaggatcccaggaactgcttttgctaattactaggcattttctctcaggctgtgttcattttgccagggtgatataactaagtgtatgactttgttcttgcttatttatctaggttacttgttagcttttcatttccttactatttcctagtttggattccaaaacacctttctaatgccrtttccttgcttaataagcttcagcgactctctattgcttataaaataaa

SEQ ID NO: 682179 - DNA, 1331 bp, Homo sapiens
tggctttgattttaacttcgcatgattggttataattaaggtttttctattctcagtttccaaagttgaaaactgagagacaatgttggtctatacttacatacataaggcagaaaaaaataattgtctagagaagctacaataacaagctaattccccaactttaacttaggccatctctccagctcaactgcctttctaaataaatcaaatccaatttgacaatgacattagcaaagcttgaactttctttctttgtcagtagcagtggttgtactcgggagcgggatataatctttattaacttgggttttccagaaaaataagtctgtatgacatcaagaaaggtgaacaggaatgtccatgctaataatcttgcatgccagaggaccaaccacatcaatcatggtaccttataagacagggtgattaatgtccccgaatccttttaagaagaaaagccttcttggaaaggcagtcctcataatttacatctagactgtagaaaatcacatgcataacttgatgcacaagaggatttgacaaaaatctgaagagccaggactggatgtttagacaccttggccttcttttcaaacttcaaggcaattttcagtggacctgtaaaaaccattttctttccctgaaggggttcatccaggaaattgaaagaattaaaatgagtgctctggacaaataaatcaatcttattaacgaattccatgggcttttctcatcctagtgaattgccaacaaataaatagttacccaaggatttctgttggcagccattatttcagggggtataataatcaatagttctttaatgagtaagatcttaggtaatttctctagtaattctttaaacgtataccttaataaacattattccatgcccataaaatgctctatttttttagctcctgccctggtactgatttatctracgaattattatttaaaaataaaatgatttactcattatctcttctgcaaagcttctctgacaccttccgttttctcaatagacattcttctctcctacctatttcctcttcacattgttttatttactacattgccttgtgatttcatctggtcatttagttattcattccataaatacgtattgagtacttactgtctactgggtactgttccactcaatgagatgaaacagcatctgagataggtaggtctgagaactcaggagttttctttctaagagaagaaagagattactttacatgattttctttatctgaatctgtttacacagtgactttacataaatggtgcacagtacatattggtggggctgagtttaatga

SEQ ID NO: 682180 - DNA, 632 bp, Homo sapiens
cctcaggggcattcttttcagcctgattggataaataacaccccttccccaatagtctagcctgcctacaggtgcagctgccagctaacatgcagcatgcccagtgaaatttgaattttaaataaatgatgaaaaaattttaattatatttaaatatgtaataaatgacaaagcctgaaccaagatatgagttcattttgtgggtcatgggacacacttaaaccaaaaaattatttgctgtttatctgaaattcagatttaactgggcatcctctatttttatgtgctagatctgatgaccctacccaaggcagccatgatggatacccatgtggggttactaggacttagttaggttttccttkatgccaccaaggtgggggatagggagaaggaggcctctctgtgcccaccctccacctcccatttcctgtacataaaatgctggatgccacacttagtaggtcttactcacaggcaagcattgcccccagtgttacccacaccaccctcccttctaggagctgcagctttctccctggctcccacagtgggaagggaagctttgggatacaattgcagttggtgactatttactgagcacctgcctatcacactgggctgaaccctgg

SEQ ID NO: 682181 - DNA, 648 bp, Homo sapiens
ctttggtcacccagccttcaaggaactctgcttctagcttttggttggacaattccctggggactagctggactctgggattccttgcccagttatggtctggttcagatacctgggtgtttcctggagatctcagcatgcctgtgtgtgccaggcctaccctgcccagcctctgcagggtcagggagaaagagcatcctttaggaatctgatgacttacgtgcctcacaccaactattcttcctttgctggatttgaagtctgagatatgggcctcatttttattatcttattcctttgtgttaatcaatgcctgcacaattatgcagttggcatggatgctagttttattgtcttgaacacaaaagcagctttgaaaatgtggtatttctagggagcggctrggggtgagcctctcactggagaaggcaaactttagccaatcatttccccctccaatgggaacagaagcaggtggattaaactgctccattaggcgatcttttgtttctaatagaataatcatcaacaacccttgatggttgaaggtcagggaagggagctagacctggctgagcatttgctgtgtgctcagctctgtgttggagcttctttcacatcaagttcagttgtctctatcactctgtg

SEQ ID NO: 682182 - DNA, 648 bp, Homo sapiens
ctttggtcacccagccttcaaggaactctgcttctagcttttggttggacaattccctggggactagctggactctgggattccttgcccagttatggtctggttcagatacctgggtgtttcctggagatctcagcatgcctgtgtgtgccaggcctaccctgcccagcctctgcagggtcagggagaaagagcatcctttaggaatctgatgacttacgtgcctcacaccaactattcttcctttgctggatttgaagtctgagatatgggcctcatttttattatcttattcctttgtgttaatcaatgcctgcacaattatgcagttggcatggatgctagttttattgtcttgaacacaaaagcagctttgaaaatgtggtatttctagggagcggctgggggtgagcctctcactggagaaggcaaactttagccaatcatttccccctccaatgggaacagaagcaggtggattaaactgctccattaggcgatctttygtttctaatagaataatcatcaacaacccttgatggttgaaggtcagggaagggagctagacctggctgagcatttgctgtgtgctcagctctgtgttggagcttctttcacatcaagttcagttgtctctatcactctgtg

SEQ ID NO: 682183 - DNA, 1123 bp, Homo sapiens
aaaagctgtcctcaaaagggaaaaggatcaataaatggcaaaaagtcacacaaatatcaaaccaaaaggatttcctgactgggaatcaaatgcaggccatggcagtgaaatcacagaaatttaactattagaccacaaggcagagtggcttttattgttattccctcagggcagcttaagtaatcagtttgagcttacaaaggattttaactttgctttaggtcagatttttgatctttaatttactcaagagaatttttaaggttaaccatgagactattacgtgtcctttaaaaaaaaatggctgggtgcggtggctcgcgcttgtaatcccatcactttgggaggccgaggcggggcaaggtgggtgggtcatgaggtcaggaattcaaaaccagcctggccaacatagtgaaactccatctctactaaaaatacaaaaattaaccgggtgtggcctgtaatcccagctactcgggaggctgaggcaggagaatctcttgaacccgggaggcagaggatgcagtgagcacagatagcaccactgcactccagcctgtgcgactctatcttggaaataataataataataatctcccatggttcttaagyatgtaagccaatgggatcttttatggtggctgagaagagactgtcccttcagaactaagggttctctatcccttagacctaaagttctctacaactgcactcactttaactaggagtcccttagagtgcccttagccttacagaccagctgtgaccaactggactgggaagcacccctaaacctggggctgacaggggagagctcctcaagggtccagatggtgggaaccaagaaggctacaaaggccccctcccaaaactggagtcaacaaagacgttccctctgggatatggatggtgggaagcaggacagattgagtcgggactggaaagaaagaaagggaaggggtagagagaaataaagtctgtgaaatcttcaacctaaaagcaggagatcttggacctgaggaaaatgagccagcttcctcccagaacagtgagggagacaactgagcagcagacgtgggtctgctgacttcggatcatgctgggggaaactggggttctccat

SEQ ID NO: 682184 - DNA, 1324 bp, Homo sapiens
aaaagaaaagaaaagaaaagaaaatcccagccaaaagggccatcaggaggactaggtgacccccaaaaagcagtctatgcaggacagacttcaaaaagtcagacccccttcatagggggatgcacctgtaccaggaaacagtgggaaagagacctccagtaatgggattctctgacaatcccacagaactgcttcatgagaaaaagattagctttgggacatctgacaccctccagagatatcaggtcacaagtcaggtgtttttttttttttttgtttttgtttttgtttttgttttttggtgtgttttatttgtttgctaactctggtaaagccagaggagacttaggggattgaggatggggaaggacgtaattaaagcatgatcatgatgttttttccactgcagctttcccagcctggatkggattcacttggggaaggggagaaactttggattggatgagagactaaattttatatatgagactggtctacacttttattaccagaaaaatggcagtattcattggtagctgaaatgacttgataaaaccatgtgatctacccaggacttcatgcagaagtagggaagaaggtgtcaatagagcttgcctaaaggcaatagtgtgcaagaataaagctactttctgctcatatccttctcagttgagctcaaagaagagcctgcacagttccatgggcttcctcccacaatgatgccaggtttggactctgcatatctatggtgaggttcttgcttgggttcacagcttaccctcacagtcacatcctggggaaaaaccaggcactgtaatgctagccaccgtgtccgggttgaagtgaccctaactgcagtgcccagagtcactgtctgtcttacctcttcagggctaagtcattctcttcagccaatcaaattcagtaaggacttcttacactcatctcctaagacaagatgaccagctccttacaaacacagaactaaaagagactctcaacatgatctaattgacttaatgttgcagaactaaggtgaggctgccatatgacacttttcggtataagacctattttgagtgacctgtgatgttcactgtggacatttaaagaatgtttctcaacgggcacactgtttaatttctccttgaataggctacctgttacactcacaattcatttaagcaggagaaaaaaatatggattttagttgagggatgacagtttgaataaataagaagagatagccttaataaagaaaataaatgggatctggacaggctaggaggggagacaggagagggagaaaagaagagatcaaatc

SEQ ID NO: 682185 - DNA, 645 bp, Homo sapiens
tcaaattcctattattataccaaatacactgttcccatggaaccagataaaataacctctgtggaatttaaatggtttaaacaagtagaggtgccatgactatgcacaacatcaaacttttctccacatttgcaaatgttattaataatgttatgattaacaaaagaactgaaagcaatatctaccaactagttttggcacttggcattcctgatagttattcccactttcctctacttatttggaagttgctaaatttttgcctgttgaaaactttagaaagcatgtccattttattaagtaagatacaaaagaaatagtggtgattgcggaggaggccattttcctagacccttaaaactgatctatcttaaaggcctgacaagtgtgctctctacattgaatctttgtttccatttgctstgctatcatcctaagaacgatctttattagctctttcacaggatattaaagtaattctgtttattatttttatcctttctccaatcagtctctacctcaacaaatccttttattatagtcattttactatgtatttatttgataacaattgagagggaaacttctaatggctctctgataccctccataataaaatatttctctaaagttttattacttcca

SEQ ID NO: 682186 - DNA, 645 bp, Homo sapiens
tcaaattcctattattataccaaatacactgttcccatggaaccagataaaataacctctgtggaatttaaatggtttaaacaagtagaggtgccatgactatgcacaacatcaaacttttctccacatttgcaaatgttattaataatgttatgattaacaaaagaactgaaagcaatatctaccaactagttttggcacttggcattcctgatagttattcccactttcctctacttatttggaagttgctaaatttttgcctgttgaaaactttagaaagcatgtccattttattaagtaagatacaaaagaaatagtggtgattgcggaggaggccattttcctagacccttaaaactgatctatcttaaaggcctgacaagtgtgctctctacattgaatctttgtttccatttgctgtgctatcatcctaagaacgatctttattagctctttcacaggatattaaagtaattctgtttattatttttatcctttctccaatcagtctctacctcaacaaatccttttrttatagtcattttactatgtatttatttgataacaattgagagggaaacttctaatggctctctgataccctccataataaaatatttctctaaagttttattacttcca

SEQ ID NO: 682187 - DNA, 643 bp, Homo sapiens
gatctaggtctctaggtggaaattaagagaacccaacctaagaaactctcccctaccccaggcaaaaacagtcacagtgtaaatctaaacctcaaatagatattacaagcccaactctgaggagtgttttctctcctctaagtatacaaagagaaaaggaaaaagaaaaaaaaaatcagctaaccaaacactgaaatcttaacagaacaagcactggaacattggacaactatccatgtcttgtaaatgtccaaacattcttaacttaaaaaatctggctgtgtttatcatggaaaatatagaattaaggtatttccaagccttcctggatttaatcataaagtaccccagacctcctgtatgactcacccatcctaatgatgatgatggaaatgaaagyatgtttcttggtggattagctaacagtgtccaagtgaacaacagcaagtccagaattattatcaaggcatcacgttcatccttggcatgacaaacattcaacactaagagtaaatggcattttgtgaaaaagaaagtcttgcctaaagaacaagtgagttcttcccgatgaatggaaaagcatttttatagtttatgccaagtaaacaataatctattttttaaaaagacatagtgggaatca

SEQ ID NO: 682188 - DNA, 627 bp, Homo sapiens
cctgacaccaataaatatttattgactgaatgagtaaatgaatacaaagatgaataaggctagaaagactggatcatgtctcaccaaaggacagctctaaatgctcaccyatcaattctgttctttactgggttgtgtcttagttggggcagctataacaaattacgaatagacttggtggcttaaacagcaagcatttatttctcatggttccagaggctgcaagtctgagatcagggtgccagatgctcgggtgcttggtgagggctttcctcctagtttgcagatagttatcttggtgtatcctcacatggcagagaaagcaagagtgagagagggcacttgtgcacacactggtctctttatccgcttataaagacaccaattcaattgtgggggctcttttctcatgacctcatctaaacctaattacttcccaaaggctctatctccaaataccatcgcatatcgcattgatgatcggggcttcaacacatgaatctcaaacattcggtccacagaagagcttttggaagtgctgggcaaagaatgataggtaaagtgagtctttgtgaccacaaatctggcagtggcttccaggatgggttggagagtgggaaaggacct

SEQ ID NO: 682189 - DNA, 627 bp, Homo sapiens
cctgacaccaataaatatttattgactgaatgagtaaatgaatacaaagatgaataaggctagaaagactggatcatgtctcaccaaaggacagctctaaatgctcacctatcaattctgttctttactgggttgtgtcttagttggggcagctataacaaattacgaatagacttggtggcttaaacagcaagcatttatttctcatggttccagaggctgcaagtctgagatcagggtgccagatgctcgggtgcttggtgagggctttcytcctagtttgcagatagttatcttggtgtatcctcacatggcagagaaagcaagagtgagagagggcacttgtgcacacactggtctctttatccgcttataaagacaccaattcaattgtgggggctcttttctcatgacctcatctaaacctaattacttcccaaaggctctatctccaaataccatcgcatatcgcattgatgatcggggcttcaacacatgaatctcaaacattcggtccacagaagagcttttggaagtgctgggcaaagaatgataggtaaagtgagtctttgtgaccacaaatctggcagtggcttccaggatgggttggagagtgggaaaggacct

SEQ ID NO: 682190 - DNA, 668 bp, Homo sapiens
tacatctgcagcccctttgtcccgtgtggatgtggctctagctccctcattttctcttggttttagaagcggctgctgcctgtgatcttgctgccagggatcagtcccttatcagagctggacaaggctccccttagaaggaacctgtaagggtgggtggggcccgcgtgtgtccactcctgcccctcacactggctactgctttaaaccagacccaaaatccccaaagaaaggcagaatgggagggaaatggtgtctcacacggtgtaccacaaccccacacctacacatgggggcctcggggctgtcatctcagagcctcaccatgaccttgacaggcagctgtttccacttcccttgagaaatgaaggaattgggccatggaggggttgagcaactgccccaaatctctgagccagactctttacctctggagtctgtgcgccttctaaccacccaggtgtagagaattagcaccttgagactgcaggccgtcygcactgggactttttattattgcagataaaggaaggaaacttggaatccaagaagtgggtgtgagttctggctctaccagttcctgtgtgaccttgcaaattactttacacttctttcatttgccctatctgttgctaacctaaactggatttggcctgaggatgcctcca

SEQ ID NO: 682191 - DNA, 828 bp, Homo sapiens
gttagaaccaactctgaaataatcacaggtatgaaaacccattaaaccactaaatttttgtttggttttgtttagtctctctcacccctatcccatcctcggctgtttggtttcaacagtttcacacataggcacacaagaatcacaggattcctatacttccacgactaccttcaaccagtctcacctcctcctctgagctgatatgcaaccttctagctacattattaaaaataacgctgtggccggagcacggtggctcacgcctgtagtcccagcattttgggaggccgaggagggtggatcacctaaggtcaggagtttgaggccagcctggccaacctggtgaaaccctgtttctactaaaaatacaaaaattagccaagtggatggcgggtgcctgtaatcactgctactcaggaggctgaggcaggagaatcgcttgaacccagctagtggaggtcacagtgagcctagatcatgccactgcactccagcctaggccacagagcaagactccgtctcaaaaaaaaaaaaaaaagttgtatacttatcaaatatacacatttgcctattaaaatggtaacacctttctaattaaaacaaggcctctacaaactacactattaaaaataatggtgtatttatatgcttatcaaatatacacatttgcctattcaaaatgatatcacctttctaattaaaacgggccmtctacacatttaaaaatactaaggtgctttgaatgtagtgtctgaatatcactttgcattgtcttacaatttaactgcattaaaactttaacagaattttccaaaattaagaata

SEQ ID NO: 682192 - DNA, 598 bp, Homo sapiens
cttaaaccagaaaccttgcacactgttctagtcatttgtttgtgtgatttcaaaacacacctagcctaactataggagaagcagtgttgatatggtatatcaactggtagttttaccgattactgtcatttgaagtaacagctgatggtatgagagcattagaaaagcasagcagccaggaccatttactatatgggcaaggggtacttcatctctttttagccatgaaaatattaacctatttacagtctaattaaacataatattcacatcaatggctttaaattatgaaaaaagagtgaaattatatgtaatataatctgtttaagaaatcaaaaagaaaccttgtattttagaaaaattatttaaaaatggctgaattcaaaaggttcactgcttttaataggttcaaattaatgatctgaaaaattatcttatgtatttgaaacataacgctccaataagtccagataaataaagctgttacaagaataccttcctttctcatggttcaatcacctgagtatgacatgtgataccaaggtccttttctctcttaattaatttgggaccttactacactgcctatctagcttga

SEQ ID NO: 682193 - DNA, 1773 bp, Homo sapiens
tgtggaaattttaaggaccaagaatagaaaaggtaatcataaagaacacgagagtttaaagatttctacaacaaggtcaaaggactgattacaaagttacagtaactaagacasaatactacaaagacagacaaatggccaaatggaataaagcaggaattccacaaatatggacacttaactgatgataaagaggtaaatggagagcagtggcaaaggcaaccggtgctatgtaaggagacagctatatggacaaaaactgaatcttaaccccaacttcacaccatacacaaaaatcaattttagacagaccataaatctaaatacataaagtaagacaatataaaacttctagaagcatagtttcatgaccttgcaatgaggaaagacttttaaacaggacaccaaaaaagcattagccaaaaaggaaaagattaataaagaaaataaatattaaaaataagaagtctagccatcaaaagatattattaatgaatgaaaatggggatgggagtggtggctcacacctgtaatcccagcactttgggaggccaaggcaagcaggtcgcttgagctcaggagtttgagaccagcctgggcaatgtggcaaaaccctgtctctacaaaaaaaaaaaaaatacaaaaaattagctgggcatggtggcacatgcctgtaattccagctactcgggtggcttgaggcaggagactcacttcaacccaggaggcagaggatgcagtaagccaagatcgtgccactgcactcctgcctgggagagtaagaccctgtctcaaaagaaaaaaaaaacagagaatgaaaatgtactttacattgtgggcagacagacttgcaacacaactaaaagtgaaaagccaacccacgtttttggggaagatattaacatctaactagcaaaggcctcatatccagaatatataaagaattcctacaaaccaataagaaaaaaagacaacctaataatgaagaagagactcaaaacccactttcacaaaatagcatatctaaagaccaaagaccaatacatacataaaaagtgcaaaacctctttagtcatccaggaaatgcaaattaaaaccgtaatattacaattacttttgcaccaacctaatactactactattcatccccatttagaatggctaaaatttaaaagattgataatgccaagtgctggtgaagacgtgaagcaataattatcctcgcatactgatagcggaagtgttttccacattggaaaactatttaatatgctcatatcctatgactcagcaattccactcctcagtaaacgttatcttacacatccacactaaaagacacaagttcagagcagcattattcatgataaacaagaaacaacccaaatgttcatcaacaacagtacaaataaataagatgtggtattttcaaataactgaatcccatacagcaatgaaagttagtaaaatacatctactgcaacaacagggatgaatctcacaagaacaaaactagaaacagaaaatatatattttataaggccatttatagaaagattaaaaatatgcaaaacaaaataacagtattggtagtaaaaaacaaaaagaaataaaagatatgattaccacaaaaatcaaggtaacagttacctttggagaagcaatgatgggggatctagggacttctaaggtgacagcaatattctaaatcttgaccttgataataattgcacacctgttccctttttagtcaatcaaataggcagtacattt

SEQ ID NO: 682194 - DNA, 651 bp, Homo sapiens
ttcacatgtataaatatgtaactaacctgcacattgtgcacatgtaccctaaaacttaaagtataataataataaattaaaaaaaataaaaaataaaaaaataataaaataaaatatttacctgtaaaaataaataaaataaaattaaattttaaaaaatgagaggatgtaagcataccatttctcttcttgacaaccataagagtggaattgctgattggtttgtgtagagaacagagaaagtgattggaagggaagggaggtgatttatgagacgtgttattattattttcttggtatttttaaaacaacttaatttacaaatagtagttgtgtctatttatgggatacaaggtgctgttttgatatatgtaaatattgtagaaagatgattgttttagtgacaggattctatctacctcacactctgattatatttctgagagttgtccatcccttcctcccagctcttggtcttagtttatatagagaaaaataagaaggaaaaaataggaggaaaggaatgaccaaggctatttatatttaatgtgatcacaagtgtcatttgggtggccttagcttccatttcttcatatataarattaaaaaatataaaaataataataatagtgatatatgcctacttagatt

SEQ ID NO: 682195 - DNA, 641 bp, Homo sapiens
tatccatgtggcctgattcttcctggatgctggacaagaacccaggtaccaagagggcactgagctggttaacacttaagccatctgtggactgcagagttaaaagagcactgtagcatgcccactggggctttgggagtcacaggcacccagccctagatgctaccayggggccggagcccagaagcactcgccctggctcctgcacctgcccatctgcgtgctcctcctcccataaggggtttgagcacacagctgccaaacagatgagccacacccctgtcacacgtcctgcgagggcagtcagggaattctccagtttcacttcctttgtacactaacataataatagttatcccctacaatttaaataaattagtttaaaaagctggtgcacttggcaaagagcttgtccattggctctaatctggctccttggtgtagaaacagggctgccttcctcttccctgggtacctggcagttggggtctgttgatggtactgcaacctgagcacccggcacacagcaggcactccgtatatgtttctgaatgaatggatggatatcaaaaccatactcacattttctccatcacacaccagctacttccctggtacccttttgtccattactgatgcta

SEQ ID NO: 682196 - DNA, 1264 bp, Homo sapiens
ttttaccctgtgtcataagcgagagcaaaagctcactagttaaaaatactgtgaaaaagacatgatgttactggcagatgatcaggttaaccaatcacgcgctccctatattccaacacaaacacctcataagcacaaataactacaaaattattagttaatagatcaagaatcaaaaacctacatttaattatgttactgagaatagcacagcctaaagtttacctctttaccttctctcataacccaatttaatttaaaaaaaaaagagctcaacaataaaaatactacagtttatgcctggaattcaggaacttttaacgtgtatgtatatctacctaaactaatattcttttgaaatcaaattagatttttatgttctggcttaccaagctactaacacacttcaatagttgactttgtgatacttgcaataatgatatggtcagaatgacattataaaagttagaaagaagctactgcatgagctggttattgtctaacctagaggcagtagatatacactgacagccctacattccatatgagaggaagatgataaaaactttctattcccaaatagcagagctctggaagcagcagacatgctattatagctgatgctttatgataaatcacaacatgcaaatgaaaatgttggtcctgaaatggaaatgggactaaaagtgcctccttcactggtggaacatttattcaactgtcctggtaaatagtgtacaagaacatttgagctttacattccttcaatccagaagacaccagctcagcctgcagaggagctgggcctacattccccagaaatctgtgcaggatcatagcccatttcctctactaacatccagattatttttgataatacaaaatagcactctagtagtgaagatgaaatgggtatgaaatgggtagctatgtggaaaatgggctctgatggctttaagaagaggatggtgggaagtatcagttactctgctctgttcactagttcattctactggaaaacactaycagccttatcctggggtggggagatactgggttgaagaaaaactaggctattggcattagaactgcattcatgtgacacgatgtccatcaggtccagctcaagggaattctagtgaattatttttagaataaaagaaatgactgatgtctgaaaatccatgttccataatttgttcttatttctttgtaaaataatttgatgcctatggtggagtgacaaatattttttatttccaaa

SEQ ID NO: 682197 - DNA, 518 bp, Homo sapiens
tgtctagggataagctttcatactagaattaatctctcaataccttcacaagtaactgctatagtacattttgttaaatgaattaactaagcaatcatattctgttgaagctacaaaatcaattttaaaaataaggaaatagaaatgtgcgtggaaggattttccttaaaaggagcacttgatgtaaacaagcatctcttgtcacccagcaactgctcctctggagttgtctttaatggggtaatttcagctggcagctccccaaccttaaaaaaacctgtttatttttcctcctccccgatgtgtagaggtcactgctgataataatgtgattgctattcattattrtctggatatgataacatggcagaactacctcaaaatgctctttttggaaatcttgacattgactgtgcagatacagttgggtcacactagacatacattttgaagtcaaagatatttacattttagaaataaaaatgacccatagggtgacattaagggctgtatgattt

SEQ ID NO: 682198 - DNA, 518 bp, Homo sapiens
tgtctagggataagctttcatactagaattaatctctcaataccttcacaagtaactgctatagtacattttgttaaatgaattaactaagcaatcatattctgttgaagctacaaaatcaattttaaaaataaggaaatagaaatgtgcgtggaaggattttccttaaaaggagcacttgatgtaaacaagcatctcttgtcacccagcaactgctcctctggagttgtctttaatggggtaatttcagctggcagctccccaaccttaaaaaaacctgtttatttttcctcctccccgatgtgtagaggtcactgctgataataatgtgattgctattcattattatctggatatgataacatggcagaactacctcaaaatgctctttttgraaatcttgacattgactgtgcagatacagttgggtcacactagacatacattttgaagtcaaagatatttacattttagaaataaaaatgacccatagggtgacattaagggctgtatgattt

SEQ ID NO: 682199 - DNA, 464 bp, Homo sapiens
aactatttacttaagtgcagccaaagtgggagcccaggcagaggaggcaccaagagtgagcgagggctgcgagggctgccagcatgctgtgacctctcaataggatacatgcaactattttacttagtttgtcttttckttgaggagatgattaatattaagatttttgggtaaacatcactagacttgataatccaatatccctttggcatgactattgatctaacaagatgtagtggagactgtcagtggtcagccaatatccccttggttccctttatcactttatgcatgccagcttgatttgaaatgggcaagatctgtgtctttgggctgttggaacacactttgccagctcatgctatggctgagcaacagctggtcgttaatgcccactccaggtagactttaattgataatatgggtgtggtggtataattaccccatcccttggggtaattata

SEQ ID NO: 682200 - DNA, 652 bp, Homo sapiens
atagtttcagactcctcggggatggaaacatggggagacgagagaggaaaggaaggtgtggtggtggtttccaaacacgaacacaaatcctttgctgttctccttcagaggcaggatatgtgtgccagtaccttaggatcttggtggacttgtgactgtttttcccaagagggcatagtggaagtgacatcatgggactcgtgaggctaggtcataagaggctgtgctgtgtcttcttggtgctcttgggatagattattctgttagaatgctgtctctcagaatacagtcatcatgaggagaaaaacccaaggtacatgaaaaggttgactgtaattgcttcacttaagtgtcctagctaaasccagcttttgagcaacctgatgagaccccaggaccaggactatgtccaggaaagtgaggcactaaaggcacacaatttagggtgacattcacttttagagtcttccaagtgtagcgtcgacccttgcatgaaagtcagagggagtgcctccttaaattttgcaccctgggcatcctacttgctttatcctggtctggtcttgcccagctcctatctgtttgaaataccctgagtcattccagttttcctggatgaaggtccagataccatggagcaaaaatgccatcc

SEQ ID NO: 682201 - DNA, 652 bp, Homo sapiens
atagtttcagactcctcggggatggaaacatggggagacgagagaggaaaggaaggtgtggtggtggtttccaaacacgaacacaaatcctttgctgttctccttcagaggcaggatatgtgtgccagtaccttaggatcttggtggacttgtgactgtttttcccaagagggcatagtggaagtgacatcatgggactcgtgaggctaggtcataagaggctgtgctgtgtcttcttggtgctcttgggatagattattctgttagaatgctgtctctcagaatacagtcatcatgaggagaaaaacccaaggtacatgaaaaggttgactgtaattgcttcacttaagtgtcctagctaaagccagcttttgagcarcctgatgagaccccaggaccaggactatgtccaggaaagtgaggcactaaaggcacacaatttagggtgacattcacttttagagtcttccaagtgtagcgtcgacccttgcatgaaagtcagagggagtgcctccttaaattttgcaccctgggcatcctacttgctttatcctggtctggtcttgcccagctcctatctgtttgaaataccctgagtcattccagttttcctggatgaaggtccagataccatggagcaaaaatgccatcc

SEQ ID NO: 682202 - DNA, 623 bp, Homo sapiens
cgagcatatagaamaaacttgcaaagaaaaatgaagaaacgcctgctcattagccatctgccacttcaccaatgccaggaaattccgggcagctgttttttataaagtggataattcacataattgtgttggggacttccagctatgaagaactgttagaacatttgaaaattagtgttcccaagttgtactgtgatacaaaagcccagtgaattcttcaaacttccacctcttacaggaatctgagaaaaccagataatgtttacatctacgcatggggaaggaaggcttggcagattattggtatcgaaaggaattctttttagttagtttttaaccctacctgtcttgtgaatgtgctatgtacaggctctttgtaagtcttcaaccatgcagcaaaatccatctagccactcaaagattggtaatagcataattgtctaatgtgtgtcttttcaggaaattgaaattgatatgttgtatctccctcatgccaaaattttataaaaatcatttctaagcctaatgacatgtaaactgaattaccccctccaaatatttactctaaaagcaagtggacaatttctgtagaattcctaagataatcatctcctgctaaaaac

SEQ ID NO: 682203 - DNA, 655 bp, Homo sapiens
tcaccctgttgtttttcttcttttttgcagacatctctttcttaccactagctagttagctagctagggtatttctgctgtggtttattaaaagatcccatagctccaaagggttaaggtatttccctgtcggcctactggactcagtgagggtagaggataaaggtcayggatgtttgacactgctgcctctgatcacccttgccgctcctggttctttttcaggtgactatttgttgtttacccaaagaaatcaggagacagagtaggtctgtgcaaattatcatgacacttgaggacgaactcagcccctgcgtaacttagcaccatgctggagagattaattcagctgtcgggagcctagagttcagtagcaaccttttcccttagttttgcttttttatattcttttggcatgcatcaatttcagcttgttaagcacctgccctttgtgccctgtttttttatactttgtaatttttatgacagttataattgagcttcataaattctactccctcaatcttgtggactcctggacattatctctctgtttaaggttggattgctaggagcttcttccacataaattttttactttaggagttgtttgaaatttctctggaaaccatgcactgagtgagaatgaaggcat

SEQ ID NO: 682204 - DNA, 1741 bp, Homo sapiens
tgcatgtatattttctttcctgcacctggaataaggaggatgctcaaaaagcgttagcatttctctccattgctttctctttaggattatatttttgtgtaaattgtgcagtctctttattttaaaaatattttgagacctataacaacaacacaatcacacatgtgattaatatatagggctcactatgggtcaagcagtattttatttattttacttacgttggcttagttaccaaaattgattagagctttgtgttgggagtgttaccctttgatggtctggattaactctccaagcgttgaaataataaactatttttaaaaatattaccttcagttccagcgatcacatgagaagccagagatcccccatgaatggatggatgagcagtgttgttttacacaacatagagactaaacatatactttagggcatcggaaaagcctcaatcaccaagaaaaaaaagttttttgaaaattgatactacttaaaagaaatcattgtcgaagtgggtaatagtcacgggggaatcttggrtagctattggttggactttgtttttatttgcaaatacttggggcagggcgggagagagaaagagcgacaccaaaatctgttcagtgctttaaagttctcgtggtgttaactggccctgcccgttgccacccacaggaatttctcaaacagaatttgaagatgaagagctgagagtgaatctcaggcgaggccttccacccagaacctggaagattccttaaggatgttataggaaaaatgtatttctgatgtggtaccagcagcctcacccagagctgttgtgataggcatagctagagctcctttcttgcaaaaccaagaagcttgtggtttcctaaatcctgttctccccttcttcctccttgcagccatttcgttgcttgcttgctgcagacagttcgttggctgcccaacaaccagccatcccacttcttccctgctaacagaacgtccatcagtagaaatccattcgcctcagggagggaggcatccactcctgtagcaggagtgtttgctctaaatcttcatgttgttccatctcttttgacagtgctgtgttagagatcagcacgtgagcctgttctggctaaagagatataggaagaagttggctggggaaatccccttctcagataaatgacagaaactcagagggataaagtccttatgtagtactcctgcttcttcattttaccttggaaagctgatatgaaggcaaaatacctaaggctacagcagccatctttagaccatgaggcaatgagaacaagaatagaagccactagctgagcatgtcctccttcggacaaggcagggatccttggtgacactgtggagcctcagaacaaaccccagagccacctcctggcttcttgttcagcaaaattaaatgctctttgagtttagctgccactaactggttttgctgctaacttagccaaaaacctttctaaccaatgcattttcttccctatagaacttcccatgttgttatttgtaaaaaatggaaggtcgggaacattaggatgatgagattttaaagatttttttcatttttcccccttcatttgccctgttacatggataagaaaaagctgtgatgtgccgggtgtggtggctcatgcctgtaatcccaacactttgagaggccgaggcggatcgatcatttgaggtcagaagtttgaaaccagccttaccaaca

SEQ ID NO: 682205 - DNA, 640 bp, Homo sapiens
aggtaagtattgcatatgatttatatggaatgaacattaaaggttgaaaaaactgagattaatttccatataacttctgcttgaaactcgagaaaaaaatatttgcaactatttcaaattcygtttacaaatgctgtcccatatagctgcacaatgagttgattaaaaaaggtaatgtttgctatctgaaagatttctcagacatcaattataaaaactattagcaatcattataaatgtatactaaaatatttaagtgaaaatgacttgaattctttaattattcataactgaaaggcagaaacttcactgggtctattaacaaagtatttctattagtccctgaaaataacttttgttactattttacaaaacaatttatatttcttccaaaaaaaatgggatacatgtgcagaacatgcaggttacatagatatacatatgtgatggtttgctgcacctattgacctgtctgctaaattccctcccctcacccccagccccaaaaaggccctggtgtgtgttgtttccctctctgtgaccatgtgttctcaatgttcagctcccacttacgaacaagaacatgtggtggtttcctgttcctgtgttagtctgctgaggatgatggcctccagcctca

SEQ ID NO: 682206 - DNA, 599 bp, Homo sapiens
ttaaaagtcctactggtatgataaaacagtataatgaatcacctttattaaataaacttcaaaaaaccattatcaacttatagttacttcaaaaaaccattatcaacttatagtacagaaaaatatccaattaaaccaaattattaaaaaataacatttgaaatactgtttcacaataaacattcatcttatgcatcaataatttcctgtttcattaactgcaacatttatatgtgtgtgtgtatattacagaccaaatttttaaatcctgtaccttccaaaaactcaactatgttctttagtgtaaaataagccaagggtgtracaatgactataaaatcattatttagaaacattatggtgtttctaggaatggaagaaaagaaattaggtcatctaatgtacaggtaaggtttttttctataatactgtcctggtactataaatgatgcctacaccataggtgcattaacttaatgttgtcatgggacttaatgtttagccaacaggaatgagatcaactgcaggagagtaagctcaagcaacatcagaaaggacctagttcaggaaaaaaaaaaaaaaaaaaggaaaaatgaaaa

SEQ ID NO: 682207 - DNA, 1019 bp, Homo sapiens
tgtaatcccaacgctttaggaggccaaggtgtgtagatcacctgagatcaggagtttgagacccrcctggccaacatgatgaaatcccatctctactaaaaatacaaaaatttgccgggcgtggtggtgggcacctgtagtctcagctattcgggaggctgaggcaggagaatcacttgaacctgggaggcggaggttgcagtgagccgagatagcaccactgcactccagcctccatgacagagcaagacactgtctaaaaaaaaaaaaaagaaaaaaaaagtttctaaaaatgaaaaaatgtttatcttcagagactttggattttggaactgcagttgaaggatcatgaaccatatcttggcttttaatctgttctttacttttgtcagaattgtcttcctcatactcacatggcatggcaccttcgttgtataaaaaccttcatggctttccactacttccctcttgaagcttcttttaagacctcccacatctgtgccctatcaatttttccaggcatttctctaaaatgtgtgtgcttcaccacagccaaactcaccttaccagaatttcctgagtgttccttctcctttgttcactgtgctacagactggaataccttctttcagaaacctccagtccacacttcactgcaatgccagggtcctaatcatcttcacgtgtctcaatttctacctttatgggagtcttactccagtcctcagacagaataagcttaagtactgcctgctcctctaaccagagcactaatttaacacattttccatgtggattgacattcatatgacaattccctgtcacccattagatttgaaaccctgcagcttctttcgctgtacttggcgtatagcatgtattccagagacatttgtcacacgaaggaatgcatgttttagttcatctctcttgttctcatcactctgacctcccacaggaatccttataaccctttgccattgcccttatcctgaccttgcccaagttgaagaacagag

SEQ ID NO: 682208 - DNA, 611 bp, Homo sapiens
gacctcgtgagccacccgcctcggcctccaaagtgctgggattacaggcgtgagccaccgcgtccggccaacagtgagcaactattaatagtctgtgctttaatgaattctgtgatctgattttaaatattcatcatggcatcactttgaagaaaacaaagacaggcaaacattttccttgcataattctcctaggatttagtgttgatttttttttaactttctgggggaaaaaagcccagattttgtggaacgtgttgattttatataaatctgtctgtggtattctaatacactcacctaagtctttagtctaacttgtgctctacttcttcagtttgattctaaattgataagcccaggaatggcgtctctttcattattatattcgtaggctgtttcaggcttactttctttaaacaaaatccctattttcctaggtttagatttgatcctcratgtcttagatactgtccactgatgccaataccccttttttaaatttttattccaagggactattcagaaccttgccagatagtagctaatttagccatgctgcaaggaatagaaccaacaatattctttatccaagaatcagaaaaaaatat

SEQ ID NO: 682209 - DNA, 1785 bp, Homo sapiens
atggcacgatcttggctcattgcaacctctgcctctcaggttcaagcgattctcgtgcctcagcctcccaagtagctgggattacaggtgctgtaattagccaggtacacctggctaatttttgtattttagtagagatgggatttcaccatgttggccagactggtcgggaactcctgagctcaggtgatctgctcaccttggcctcccaaagtgctgggattaaaggcatgagccactgcacctggccaagaacattttaatttacaaaactcagttcaatttatattctaaagaccttaattttctttttatgggtcaagatcaccttttaaatagagacttgtgatagttgagaaacataaaatttatatgtaaaaactgatgtgcaagagtatccttgattttcaatacataaaaaataatttataatgttatttaaaaactagtgatttgttagtgtaagttgctgtcatgatcttaatgttaagcaagtatccaatgattctaaccaatcattttgaacttttgatccaatattgaaaaagttaaaatacagatctctgtgttacattcttatcaaataatgcaaatacataaaataatttttatacctttgattaattattatgtctaccaagaaaatattattctatatgaacacatttttttttaaaaaaaaactatgtttctttgtgaaacataaaagtttagaatataggtctatttaaaatggcaatataataaataagggctattaaataattctgagacctgaaagaataattattgttagtcaaatgcagttcaaatatttcaagatagtaaatagctgtgagaaagggaagggtattagtttattgtttcttaatagttataaattgaaaatatttttatccttacctctaacttcataaataatacatttacctggtttgcaaagaaccacattgtttatacctgaactacaatatccaagaataaataatttcatatcatcattgattcaaatttcttgcttgtagctatctagccatttataaggccactagaagaaaattagacaattattatttaactcctttttgtaaggcctactcttcaaatttttgactatgcatataaaagtcttatgtaacatgtattaatttaggctaatttgtatttatatatatatatacaaataagtaaaattatgttgctatgataaatagctaagagtcattccatgtgaaagtcatattgaaattatttaaagcccttcctcactaagcatgactttttattgcaaagcactgttgaatattacactctgtattatgtcatcagaggtaatttaccactccctacaatctatcagtttaagcaatttggcaaagatcctttcaaagaaatagtcctgaatattcacaagatggcagtagtgtaacactaatgttaataatgcctgtcattcaaaaacaaaacaaatatcttgagctcctaatcttgaaaatatcttcaaatactaaacatgagacgtaagtgtaactatagagcatatcgtaaaagtagatgaatttgatataaatttaatacattatgcctacgggaggcagcttaagtgcaatcattttttcttgtgtcaatttcttttctactgactttcttttcatgggagagtgatgcaaaagagtactttggatctttagcctctaatgcaagcgtggtaaaagagagtwaaatcctgaatacattttcacaaatttatttttataatttccaacagcagagtaaattttatat

SEQ ID NO: 682210 - DNA, 601 bp, Homo sapiens
gctgcaaagctcctcaggaggaagacagaaagcaacttttccatctgtccgacctgcgtccctcacccttcacacttgttgctcctgagatcacgccccaaaaacctcctgcaaatctctttgtcagagtctacttcctgcagaacctgacctgtgggcctctaccccaaattgtgggtttttaacttacttgtttatttcctgtctctccaacaaagacgtaagttctgtaacagcaaggaaaggtctatcttactcccctctctatcctggcccagacgcctagacagtgcctggaatacgtggaagttcaataaatattgaatgaataaatgaatgcaccccccaatctatataatagataatagggaaactgtcttcctgaaattgtttgtgtgtcaggggcactcctccctctgtcactcctctacccaccgctggagaagtacccagggcacctcagcakcaccttcaggcagagtcaattttagaatcaggaaagcaagattcatagccaggttccatcactagcaagcccttcccagtatctcctggagtcagtattgggccttgcaggctctttagcttgttcgactgcgac

SEQ ID NO: 682211 - DNA, 629 bp, Homo sapiens
taagccacccagtctgtagtatttttatggtatttattatagtattaaagtattatgatattaaattattatggtatttatttgatggtatttactatggcagctccagtagactaatacagtcacagtttgaaaagaatgagcatgggatatacaaatggatagtaagacaagagaaagaaataggaactcatccatgtaaastggcatatagaaagtgctcaataataattattattatataagatagatgaataagtcgtatcagactaatggtaatgccgggaagtagaagaaacattttaaagataaaatcttccatgttactagaaaaattaaagacaatgttagttttgaaatgagagttcatagaagaaagtaaatgaagaagagaaaggttgtgaaggaaggaaacttaccagagaatttgacaattttggaccaagtcaagctatttaattgtaaaggacacagacagataatctcagacacaaaagaattcagtgaatagaagaaccaagcatctttcttgaaaaatatacataatgaaatctaaacaatattgaaaaaattccttgacttgaaatcagaaaatacagtctcatttttaacatgtttggaatattaaa

SEQ ID NO: 682212 - DNA, 629 bp, Homo sapiens
taagccacccagtctgtagtatttttatggtatttattatagtattaaagtattatgatattaaattattatggtatttatttgatggtatttactatggcagctccagtagactaatacagtcacagtttgaaaagaatgagcatgggatatacaaatggatagtaagacaagagaaagaaataggaactcatccatgtaaagtggcatatagaaagtgctcaataataattattattatataagatagatgaataagtcgtatcagactaatggtaatgccgggaagtagaagaaacattttaaagataaaatcttccatgttactagaaaaattaaagacaatgttagttttgaaatgagagttcatagaagaaagtaartgaagaagagaaaggttgtgaaggaaggaaacttaccagagaatttgacaattttggaccaagtcaagctatttaattgtaaaggacacagacagataatctcagacacaaaagaattcagtgaatagaagaaccaagcatctttcttgaaaaatatacataatgaaatctaaacaatattgaaaaaattccttgacttgaaatcagaaaatacagtctcatttttaacatgtttggaatattaaa

SEQ ID NO: 682213 - DNA, 634 bp, Homo sapiens
tcaacaatttttacatatgttgcagttaggattttctttaaaacagaaaataatctatagtctagtctattcaccstaccaatctactaaacacctaatggttttcccttcatgcagcccactgatgctttggcgtacccttaggttacttcccaaaatgtaagaaagccttctcaaaaaatttcaggaacacgttattacccatagaacaaaatccaaattctgaatgtggagtcgttccgtgagtatacagtttcagttttgcagtctgaaaaagttcgagatctactgcacaacaggatgtatagagttagcactactatgctgcacacttaaaaatggttcggatggtcaattttatgtcatgtgtttttaccagaaggaaaaataaaatctaaataccaagcctagcattggaggggaattgtgatctggcccctcaactatctttctggcctcatcttttgcctatccattcaacaaatcttaagtacctattataggcccaaaacatataaagcacagcaatgaacaagacaggcacaaccccatatgtagaatttaaaataaactattgctagagtggaaagggaaactatatttgttgttgctccttatgcttttgccatagata

SEQ ID NO: 682214 - DNA, 1200 bp, Homo sapiens
ttgaattaatctacaggaaatagtcgaacaacatttaaactttgtgcaaaatgatgcatattgtagcattttctgtgacagaagtgaatgaacattacttaatttccgatattaaattatgaggcatcaacttgatgaactattatgcagacatttaagtactagcgataactatagaaacctaaggcmatattttgatacatggcaagtgaacaaaatagaaaatgcaattgaatgcactcaacgattataactaggcaaatctgtagacttacggacatagattagacaagaaaatatgaaaataataagaattgtgttagctttgggaattaaaggtaattttattcatttgaaatatttcacttagatgttattatgtgatttttttacagcaaatatgcagtttttagaaggagtgaagaaaaaaagtatagccaaatataggacatctcaattctctcacagatcaggtgcttgcagagttgtcatactccctggtgagagattttcaatgtgatagtgaaagggaccatgtttaaaccatatcttttggaaagagagagagcattttgaagggatagctttagcagaggaaatgaagctggatcacttatctcgttttctttttcatttttatcgttgttcacaggtttaatgtcttctcatgcccagcccctgaagctgatttcaccatgcccatattccctttcctcaggtatgctttagcctctaaaatgcacgcttcactcagtttaatgacttccatgatatcttccttaactttctaatcaattttctttccccattatatctcccaatttaaataacatttcttgtcttcttttgagccctgcctaaatgcttgttttcctgaagaagctactcagtgtggcctcatcccacactctgtcctgccttataatctattataccaactcatatatcactcccttctcttaatgatcctagtttttcttatgattttgctaatatccatttgaacattttttttaaattttggtacatgtccttgggttggtttaatatacatttaccctgattcttcattctcattttattgacaagtgtaggtaccttgtaccttccttttccttgcctatttgcacagtcctcagagcagtgatctgtatcgagtatgtatcaggaaatattgtcaattgatttagaagctttgat

SEQ ID NO: 682215 - DNA, 1200 bp, Homo sapiens
ttgaattaatctacaggaaatagtcgaacaacatttaaactttgtgcaaaatgatgcatattgtagcattttctgtgacagaagtgaatgaacattacttaatttccgatattaaattatgaggcatcaacttgatgaactattatgcagacatttaagtactagcgataactatagaaacctaaggccatattttgatacatggcaagtgaacaaaatagaaaatgcaattgaatgcactcaacgattataactaggcaaatctgtagacttacggacatagattagacaagaaaatatgaaaataataagaattgtgytagctttgggaattaaaggtaattttattcatttgaaatatttcacttagatgttattatgtgatttttttacagcaaatatgcagtttttagaaggagtgaagaaaaaaagtatagccaaatataggacatctcaattctctcacagatcaggtgcttgcagagttgtcatactccctggtgagagattttcaatgtgatagtgaaagggaccatgtttaaaccatatcttttggaaagagagagagcattttgaagggatagctttagcagaggaaatgaagctggatcacttatctcgttttctttttcatttttatcgttgttcacaggtttaatgtcttctcatgcccagcccctgaagctgatttcaccatgcccatattccctttcctcaggtatgctttagcctctaaaatgcacgcttcactcagtttaatgacttccatgatatcttccttaactttctaatcaattttctttccccattatatctcccaatttaaataacatttcttgtcttcttttgagccctgcctaaatgcttgttttcctgaagaagctactcagtgtggcctcatcccacactctgtcctgccttataatctattataccaactcatatatcactcccttctcttaatgatcctagtttttcttatgattttgctaatatccatttgaacattttttttaaattttggtacatgtccttgggttggtttaatatacatttaccctgattcttcattctcattttattgacaagtgtaggtaccttgtaccttccttttccttgcctatttgcacagtcctcagagcagtgatctgtatcgagtatgtatcaggaaatattgtcaattgatttagaagctttgat

SEQ ID NO: 682216 - DNA, 1253 bp, Homo sapiens
tacctcaaaaccaaccaaccaacccaccaaccaaacaaccctgaggcttctctgagaggaaattctgctcaagactatagcatcagctcctgccaagagtttccggcttataggcctgtcctgaagacttcaggcttgccagatcttacaatcacataagccaattccttgaaatctccacctgtatctatatctccatttctatatatctcctgctggttctgcttctctggagaatcctgaccaacatatccctccaattaggacacaagctgtaggagaataaaattctggtttgctcaattcgctgttgcatctccgggacctagaacagttcccgacacacagctgatgctcaagaaacatttgctgcatgaacagatatttatttacccaaggacctagcactcctccctgcctccacatggtcaagtctcattcatgcactcttcctgaatctctgtcacattcgggacttttcttctctcagcgtggctccctcctgcattggctcatcatcattttctctgtgtcacttcartggcatcgaaactgctctccacactgccagtcttttcttgttctcttcatcccactcattgttgccagatttatcttcctaaaatatagcactggttacgtcacccccgtgttccattctgttctgtgctgagagctgggtacaaagatgaataagacaaggccctgccctttaaggcagcatcacagtcatttagcgattcactgttaacgacaatggaaaggttgcactcctggatctgctggggtttttttttgtttgctttaattgtcctaggcaggctaccttagctctgtaagattcagctcctcatcagtgaaattttgtcttataggtatgggcttcatgagtgaatgagtctgtgtgtgtgtgtttggggtgtggggagagagagaaggggcggggaaagggaataaataatactcacaaagcttaaaacataagtcctggtactccttaattgtaaactaccataaatcttattaatagcattgtattacatcttattttaaagatattatgtgattattatgatttctactcttttgtgtaaccttcctaacatggaaagcagataactacaaattttaaaaaaatcagagggagaactaagggcaaaaaagaaaaactgctgaaatgccacacagggcagtcaggcttattattaattcacaatcatttctttttggtagcatattgatcatcaaatatg

SEQ ID NO: 682217 - DNA, 1034 bp, Homo sapiens
ggttcatactcaaaattgcatcaaatgtgggggaggcactatctcagtttagcatttaggaactgttttagtttaaagacctgtcatcattttaggtcttatatagagatggtgtcgttgcctggttttgctgctacaacagaatatctagtattgggtaatatgtaataaacagaaatgtattggcttacagttctgaaggctggatacttaaggccaaggtgccagcatgttaggtttctctgctttcaagactgtactttgcacactacatcctctggatgggaggatcctcacatggcaggragtcagaaaggccaagagagacagctcattacccaaaacctttttattaagtcattaaactcacccatagaggtggcatcctaaaggcctaatcatctcttaaagtcccaacctctttgttctgttataatgacaatggagtctcaacataagttgtggaggggataaacattaataccatagcagatatttataaatagtaggacaagtagtcaaagcttatctagtcctacacagatagaatattttaagctgactgatccaagaagacagcatgactcttagccaagggctctgtaaggtcaaaggtaattttcagagaggactgatgctgaagacataaccacaaccaacttcagcagctggaggaatctttattcagtctaaaaaggagatctgggtttagcaacatacaatgttttagaatgaaacttaatattcataaacacctgttcacttatgcctaaactggagaaaaattgctataagcttgtataagctataaagaagtgtgctgcaggttgtgtgtgggtggctagggggtgtagggtaaataaggaaagcatctgattgatttaaatagagttgaactctacaaaactttaaaattaacagctaattctactgagaaatgaagttagttctcaaaatatttgaaaataaaggtaacgatttaaagattcaagaaacacgtatttctgattgaaagaataaaagggaatatttac

SEQ ID NO: 682218 - DNA, 1034 bp, Homo sapiens
ggttcatactcaaaattgcatcaaatgtgggggaggcactatctcagtttagcatttaggaactgttttagtttaaagacctgtcatcattttaggtcttatatagagatggtgtcgttgcctggttttgctgctacaacagaatatctagtattgggtaatatgtaataaacagaaatgtattggcttacagttctgaaggctggatacttaaggccaaggtgccagcatgttaggtttctctgctttcaagactgtactttgcacactacatcctctggatgggaggatcctcacatggcaggaagtcagaaaggccaagagagacagctcattacccaaaacctttttattaagtcattaaactcacccatagaggtggcatcctaaaggcctaatcatctcttaaagtcccaacctctttgttctgttataatgrcaatggagtctcaacataagttgtggaggggataaacattaataccatagcagatatttataaatagtaggacaagtagtcaaagcttatctagtcctacacagatagaatattttaagctgactgatccaagaagacagcatgactcttagccaagggctctgtaaggtcaaaggtaattttcagagaggactgatgctgaagacataaccacaaccaacttcagcagctggaggaatctttattcagtctaaaaaggagatctgggtttagcaacatacaatgttttagaatgaaacttaatattcataaacacctgttcacttatgcctaaactggagaaaaattgctataagcttgtataagctataaagaagtgtgctgcaggttgtgtgtgggtggctagggggtgtagggtaaataaggaaagcatctgattgatttaaatagagttgaactctacaaaactttaaaattaacagctaattctactgagaaatgaagttagttctcaaaatatttgaaaataaaggtaacgatttaaagattcaagaaacacgtatttctgattgaaagaataaaagggaatatttac

SEQ ID NO: 682219 - DNA, 644 bp, Homo sapiens
atgttttaacttcagtataataaaaaacttttaaagagtgttactcagcagaatatttttgtattctacaaatatttattatttactgtatgctaaaccttgttctggaagtcaaggataaaaactggccaaaattaggcmaaaaattaaaagacctaatttatgtccttaaaagactcccttggctgagttatagcaaatggattttagggtattaagaatgaaaaaacaaaagacgtcatttgaaagatttttcaaaaggtaagttaagagagccaatggtggtcttctgggagtggtacagataagaaagcttaataaatgtaacacatattttagatggatttgataggattctccttggaactctggggaaacacagcaataccttcttagatggtttgaagaatgaagagaccactgacttgctaggatcagtgtatgtttttcttccttgcacaggtagcaactttctgtctctttcatgcatcaggggtttacttttcaagtttacttatttaaaaggtttctttcagattaaaaaaagcataaggacaaataagtttatatatatacatatctacatatatgtatatatacatataaatatctacatatatgcatatatacatataaatatatgt

SEQ ID NO: 682220 - DNA, 644 bp, Homo sapiens
atgttttaacttcagtataataaaaaacttttaaagagtgttactcagcagaatatttttgtattctacaaatatttattatttactgtatgctaaaccttgttctggaagtcaaggataaaaactggccaaaattaggccaaaaattaaaagacctaatttatgtccttaaaagactcccttggctgagttatagcaaatggattttagggtattaagaatgaaaaaacaaaagacgtcatttgaaagatttttcaaaaggtaagttaagagagccaatggtggtcttctgggagtggtacagataagaaagcttaataaatgtaacacatattttagatggatttgataggattctccttggaactctggggaaacacagcaataccttcttagatggtttgaagaatgaagagaccactgacttgctaggatcagtgtatgtttttcttccttgcacaggtagcaactttctgtctctttcatgcatcaggggtttacttttcaagtttacttatttaaaaggtttctttcagattaaaaaaagcataaggacaaataagtttatatatatacatatctacatatatgtatatatacatataaatatctacatatatgyatatatacatataaatatatgt

SEQ ID NO: 682221 - DNA, 1005 bp, Homo sapiens
tctacagttggttcaccaaatagtatatatctttttacttaacctgaaacttgtattcaactgtaagaaacaattgtctttattctacaactcatatgctatagaaataatttcattgctagacttttactttcttcataaagttgaaaaataaatgatacaatagcttatttagttgaatctaatatatatatgtgaacatatatatatgtgtgtgtatatatatatatattgaaacttccccaaatcaacacttaccttacagtcagtgtaaaaagggaatttttaccagccatttaggtattaaattgcttcattccttgaaaatatctacagtctacacttaactcacctttgaagtgcaaagactttttatttttgagagagagagagagggggtcttgctctgttgcccaggctggagtgcagtggcgtgatcttggatcactgcaacctctgcctcccaggttcaagcgattctcctgccttagcctcctgagttgctgggattacaggcgcctgccaccatgcctggctaatttttatatttttaagtagagaccggatttcaccatgttggccagggtggtcttgaactcctgacctcaagtgatctgcccacctcagcctcccaaagtgctgggattacaggcgtgagccaccatgcctagccataatatttctattcaacaaaacttttcacatagtcaatactgccttctcaaagcagaatttcttcttctgcttgattccccatgtgttgcttgcagctggagtggaagcaygtaatctgggatccctcaatcagggaagtctatgctttatatttttggacttgagaaacataaagaaacaagatatatgaggaagaaagtatacacagttttgatcatttctgtatatggggtttaaaatagcatctctgcagccagtaacagtaacagagtttgtgtccagtctccagtatcagtactacatgtgtcatctcccctaattcactggggt

SEQ ID NO: 682222 - DNA, 604 bp, Homo sapiens
tatatatatgcttacattgttctagacgggttaaattcaggacagttactcccacagataagaagggcaaaaagcctagttttggagcctctttagttgaaattagtgatctttgctcacagtgtagtgcaataggttactaaaacttattcctacagtctaacgaaaactttgtaccctttgatcaacatcttctctttcctcatccattccaactccctctaggctctggtaaccacctttctaatytctgtttctatgagagcaacttttttagatttcacatataaatgagatcatttagtacttgtctttctgtggctggcttattgcaccttgcataatgtcctgttccgttcatgttgtcatgaatgaaacattttcttctttctgaaggctgtatagtattccaatgtttatatatactacactttccttatccatttattcgttgatggacacttaggttgctttaatatcatagttactgtgaatactgctgaaatgaacaaggaagtgcagatatctcttcgacatattgattgcagtggatatatactgagtagtggtattgctgggtcatatggtatttctatttttctct

SEQ ID NO: 682223 - DNA, 942 bp, Homo sapiens
ccacaaataaggcccagattttcagtctttaaattatgtttaaatatagtccaatttaatagtgaattataaaggaaaaaatgtaaacacaaacttaagtatatatattttagccatgcgctttatgactgaagatataaaaatagaattcagatcttttaatagctatgtagttttctcaattatatgccacacactgctatatttgtaatgagtgccttggataaaaggcatttgttttgaagcaaaatagggtagatgctaggttttaataaatctgatgggaaaaaataattcattgagaatactagttgccaaaatgagaaggattatttttataaattactataagtacctctgaaatatgtagattatcggaagaaactttggacaatagggagaaactcatttttgaaagaaatatttgaaaatagttaatgaatttacttttcaagagtttatgattattactttctttttaatgttttgcttttttatttttgaggcaaggtcttgctctgtcaccaaggctggagtgcagtggtgccatcacagctcactgcagcctcarcctcctgggcttaagcgatccttccacttcagcctcccaagtagctgggactgaaggcacatgccaccatgtccagctaatttttgttattttttctagagacaaggtttcaccatgttgcccaagctggtctcaaactcttgagcttaagggatccacctgccttgatctcccaaaatgctgggattacagacaggagccacagtgcctgggccgagcattattttcttaataaaatttgtctatgtggagaattcatctaactttatagttccttctgtattcttaggagatacactggtgctaaataatatgcgtagaaaaggcgttaattattttatatatattattacagccaatagcagtatcaa

SEQ ID NO: 682224 - DNA, 1425 bp, Homo sapiens
attacaaatatatataatatgatttttcccaatagctgtgttaataactatcctgtaaaatttctgaaaatttgccactggatgcttgtaagcaggttcaagtcagctccagcacaccactggatgttgtgtttatagaatacacacatgcctaaatctttagcctaatgtatagatgaagaaagagaggatcagtaaaattaactagttatttcaaggtcatttcagaactaagtgatgaagctaagatttaatcccaatctgcctgatttccaaagacttttgggggtcaggraattcatagcgttttctccaattgagtaatttttttcccaggtttctaggcactgaggatcaccccaaagatatgctttttctgcaccatgatatgacccagattgttttgatttctgtaactaactttaaagtacatctgcatggagtaatataagtaaggggcaatcagctgttctaagcaaaaacccacactccaggggtggtcagccagcattgtgccagctagcattgtgtcataaagggcacacagagacaactactgctactgttttgttataccgaccttaaataatattacacattttgctgagtaaaatagtgaaaatcagaaaaggattttgcattggagaaattagaagtttattggcataaggatatgagaagtgtgatctcacaggggaggttacatggacagctaaatgcattctacattcacccctaggtgagccaaggacaagaatactatggtgcccagagcttgctccttaatagttatctggatttctggaagcctaatgctactctaagcagaacagaaggctgctgctgggatatttctgcatttgccttcaatgaaaagtttttcaacatggtctttgaagcactgaacctagagaacaggtcttataactgttttatgactcgttactaataaatgtgttttttaagtgtatatgagagatgaaatttggtttgagatttgtgttcattaaggattgaatgtagtaaggggtatctgaccctcttttaactcagacttacaaatggctactgttctctatgaaaaagaacacagaaattggcttaattggttctcaacacgggctttttggattttgaaagtattggaatttcatggtaaagaaattcattgtgtgagagtcctgaggtgcatgtaggccactacaagcactccagtgtggttcaacaggggttacgcagtctttggggtgatggagagcatgttaggacacacagacagtaggatgttggggcatttctctgaattcgtgccagtgccagacctaaattctggaatgtaacaaaccagttaatttagttattttcaatttgtgaaaatacttttttggtagagaatttttaggtgtgtctccacaagagttattt

SEQ ID NO: 682225 - DNA, 1425 bp, Homo sapiens
attacaaatatatataatatgatttttcccaatagctgtgttaataactatcctgtaaaatttctgaaaatttgccactggatgcttgtaagcaggttcaagtcagctccagcacaccactggatgttgtgtttatagaatacacacatgcctaaatctttagcctaatgtatagatgaagaaagagaggatcagtaaaattaactagttatttcaaggtcatttcagaactaagtgatgaagctaagatttaatcccaatctgcctgatttccaaagacttttgggggtcaggaaattcatagcgttttctccaattgagtaatttttttcccaggtttctaggcactgaggatcaccccaaagatatgctttttctgcaccatgatatgacccagattgttttgatttctgtaactaactttaaagtacatctgcatggagtaatataagtaaggggcaatcagctgttctaagcaaaaacccacactccaggggtggtcagccagcattgtgccagctagcattgtgtcataaagggcacacagagacaactactgctactgttttgttataccgaccttaaataatattacacattttgctgagtaaaatagtgaaaatcagaaaaggattttgcattggagaaattagaagtttattggcataaggatatgagaagtgtgatctcacaggggaggttacatggacagctaaatgcattctacattcacccctaggtgagccaaggacaagaatactatggtgcccagagcttgctccttaatagttatctggatttctggaagcctaatgctactctaagcagaacagaaggctgctgctgggatatttctgcatttgccttcaatgaaaagtttttcaacatggtctttgaagcactgaacctagagaacaggtcttataactgttttatgactcgttactaataaatgtgttttttaagtgtatatgagagatgaaatttggtttgagatttgtgttcattaaggattgaatgtagtaaggggtatctgaccctcttttaactcagacttacaaatggctactgttctctatgaaaaagaacacagaaattggcttaattggttctcaacacgggctttttggattttgaaagtattggaatttcatggtaaagaaattcattgtgtgagagtcctgaggtgcatgtaggccactacaagcackccagtgtggttcaacaggggttacgcagtctttggggtgatggagagcatgttaggacacacagacagtaggatgttggggcatttctctgaattcgtgccagtgccagacctaaattctggaatgtaacaaaccagttaatttagttattttcaatttgtgaaaatacttttttggtagagaatttttaggtgtgtctccacaagagttattt

SEQ ID NO: 682226 - DNA, 1425 bp, Homo sapiens
attacaaatatatataatatgatttttcccaatagctgtgttaataactatcctgtaaaatttctgaaaatttgccactggatgcttgtaagcaggttcaagtcagctccagcacaccactggatgttgtgtttatagaatacacacatgcctaaatctttagcctaatgtatagatgaagaaagagaggatcagtaaaattaactagttatttcaaggtcatttcagaactaagtgatgaagctaagatttaatcccaatctgcctgatttccaaagacttttgggggtcaggaaattcatagcgttttctccaattgagtaatttttttcccaggtttctaggcactgaggatcaccccaaagatatgctttttctgcaccatgatatgacccagattgttttgatttctgtaactaactttaaagtacatctgcatggagtaatataagtaaggggcaatcagctgttctaagcaaaaacccacactccaggggtggtcagccagcattgtgccagctagcattgtgtcataaagggcacacagagacaactactgctactgttttgttataccgaccttaaataatattacacattttgctgagtaaaatagtgaaaatcagaaaaggattttgcattggagaaattagaagtttattggcataaggatatgagaagtgtgatctcacaggggaggttacatggacagctaaatgcattctacattcacccctaggtgagccaaggacaagaatactatggtgcccagagcttgctccttaatagttatctggatttctggaagcctaatgctactctaagcagaacagaaggctgctgctgggatatttctgcatttgccttcaatgaaaagtttttcaacatggtctttgaagcactgaacctagagaacaggtcttataactgttttatgactcgttactaataaatgtgttttttaagtgtatatgagagatgaaatttggtttgagatttgtgttcattaaggattgaatgtagtaaggggtatctgaccctcttttaactcagacttacaaatggctactgttctctatgaaaaagaacacagaaattggcttaattggttctcaacacgggctttttggattttgaaagtattggaatttcatggtaaagaaattcattgtgtgagagtcctgaggtgcatgtaggccactacaagcactccagtrtggttcaacaggggttacgcagtctttggggtgatggagagcatgttaggacacacagacagtaggatgttggggcatttctctgaattcgtgccagtgccagacctaaattctggaatgtaacaaaccagttaatttagttattttcaatttgtgaaaatacttttttggtagagaatttttaggtgtgtctccacaagagttattt

SEQ ID NO: 682227 - DNA, 595 bp, Homo sapiens
accttgggccacacagtaaatgtataatattgtttgcctcaaataaatgcaaacaacttgtgatccttttttctgatagggatggaaaagaaggcattcatcagatcagtgacagcgtgtcatatggcagaatctttgttaatctacattagcaaagataccacattcagcatagctgcaattgagggtactatctaattaagtaaatggaattccattgtcatccatcatgacctatcacgtttctataaaggccagactggttaattaaatgagaatagaatacagaccaccctgcattctgtggcatttacttctgcctttccctcccaagatgcagtattggtttactgtcttagagagaaagagacagtttcagaggctttcccacttcaattaccccaggtataacaattgagaattctgtcaactaccaaatatgcgcattccattagacattgtaaaaatgaccacatggtttgtctgtgaacacagtggctccactgtgagcaggacctragccaggattccacttgttccctggccgccccatgccctcattctaacaggagggtcatgttgggactttgtgtcc

SEQ ID NO: 682228 - DNA, 625 bp, Homo sapiens
catactctcatagagatttaaaatattacttaccccagaaaaaatataattgggctatgaaaattttaccaactaaacaaaggcagtggcaaaatacaaatggaaaggtggcacccacatatcctaatttgaaattttgggcccagaccaaagaaaacaagaaagaaagcctaaaccaaaggcccaatatgtttatgttttgaattttatttccaaaataaacaaacaaaataacagtgatggtaatgtgggtcagtgaaacattagsagactgccatgactacaggctttctctgcatgagagagccaccactgcaagaaacatcagtgcacccaccaggtctgggtcagcgtgaagacagcctccagcatcaggggcttttctttctactttcttttgagtggcagctgctttggctggacgagcccgatagccacctccactgatgggcggtggggcaggcctcaggctgggagcctcttctctcttcttgtcaaggggtcgatgaccacgggcactgaagaaaccctacaaggaatgaggcagaaatataatacagagtgttatagaagatttggaatgtaactattccaacaccctcattttataatttaggttatcaca

SEQ ID NO: 682229 - DNA, 2881 bp, Homo sapiens
caaggatgtcttgctatttttattatttcaacatgacagcaagtttgcaaacagcaaaatcatatgcataagtttttatcaatattgtgatttaattttagagtgtcacccacacttctacacatatttatcttgtaatcatagccctttaaaaacaaacctatgataactatatatattatttatgtcactagtttaactagacatgtcattaaaatactttaaactctcaatgtataaattgaacattctgccaagagtatactaaaaataataagaagagaaagccattgaatttccctttattcttgcttgatcttcttcctattattatgttgaaaaaaagtttcagttacttatttacatttcactcatgaaatagtttttatacactttaaaaatctacgataagaatagagctaatgccattctgtccctctcacttgcctagaggcatctaagtggtatatgaggactggtatctctaaaagcctcatcacatctcaggacatcacatcagataagcagcaggaaataaacataaacaaatagttcctctccaatttcacagaagggggtttatcaagacatgttttctctattgagattgctatggaagtgaggcgctatagtgagatctaatcctcaatgctaacagcctgcgctttccttccccgcctcagccatgtgcctctcctaagcatgctgagccggaaaagggtcagcctagacatggccctcttttctaaagctgtgacactgcatgggcacaagacaatcaggctcctctgtggaatttaagatacttcttaattctgaaagctcacaaatactactactactgtattagtcagagttctctagagggacagaactaataggatagatgtacatatgaaggggagtttattaggagaattgactcacacgatcacaaggtgaagttccacaataggctgtctgcaaactgaggagcaaggaagccagtccaagttccaaaacctcaaaagtagggaggccaacagtgtagcmttcaatctgtggtcgaaggctggggggccctggcaaaccactggtgtaagtccaagagcccaaaagctgaaaaacatggattctgatgttcgagggcaggaaacatccagcacaggagaaagatgaagctcagaagactcagcaagtctgctctttccaacatcttctgcctgctttatcctagctgcactgacagctgattagacggtgcctacccagattgaacgtgtgtctgcccctcccagtccaccgactcaaatgtatctcttttggcaacactcccacagacacacccaggaacaatactttgcatccttcaatgcagtcaagttgacactcaatattaaccatcacaactactaatttttaaaaaaaccagtctcacataggttgataaaatcttgactgtcattttggggaaaattaaaagacctttttattatcatttgttttttccacagggaattactgccaaatccatatcatgaattccccaaaaaagtatttaataagacagcacttaaatataacagaaaatatatgttagagctaaactcactaatagtataatttacacttctgcaaaagatcataatttaatttttttattcaatgtggtagaagaccaaattaataattataaaattctctactcactgatttttctggatgtagcctctgttatggaagaataaaatataatactgttttaaaagatacttgagattaaaaaaatacttttgaggaagaaattaattcacaaaattatttcacttgtctagatatgcattttataaatggaaacattgaaggagaaaggttacatgacttgttaaagtttctttgtttttttgtttgtttgtttgtttgttttttgagacggagtcttgctctgttgcccaggttggagtgtagtggcgcgatctcagctcactgcaacctctgcctcccaggttcaatcgattcttctgcctcagcctctggagtagctgggactacaaatgtgagccaccacacctggctaatatttttgtatttttagtagagacggggtttcaccatattggccaggctggtctcgaactcctgaactcatgatcctcccgcctcggcctcccaaagtgctgggattacaggcgtgagccaccacgcctggctgacttgttaaagtttctaaagttgatttgtgaatggagaaagaaatagaatgtctttcttgcaatgtcaattcaatatcgaattcaatattttttttggtgctcatcttcttttaagatctgtaagactgaaatgtttatgtgcgcactgtaaaaaaggttctgtctaaagcctgaaaaataatttttttttgcaaagagtttctatgttcatttcaaacctttggcagtattatatctagaatttttttttgttctctttttctttttcttttttccttttttcttttgattaagatcctcacttctcacagggggaaaaagaggaaaagcgaaattttataaaagggcagttctgacctaggaagaggaaagaaggttttaacatagaggaaagctgaggtatatctttaaagtagagtaggaggttctcactacatcattttgctttaagtggatgtaaaggaaaagttaccaagtgttttcttgcttgaacaaagataggtattttctcatgaagctttgaaaggttttctagttgaaaagtaatgtgaaaaacaataacttctgccactgaatgattgttataagcctcagtaccttcaataaaaagatgcttctgttcaatttccagtcacatcaaattctcattacgagaagctaaatcccatctctccatgagccagactgta

SEQ ID NO: 682230 - DNA, 625 bp, Homo sapiens
gatgtcctgtaaggggcaaaattggccttggttgagaaccactggtttatataatcaagaaaggctattggataattttgcctaatcacaactatcacaccactatgccatggttgaaacactataaagtgttgtcaaagaaaacttgaactgtgtggagttaaacaggcagcaaaactttttacaagactattgtaagccgggcgcagtggttcatgcccgtaaacccagcactttgggaggccgagggggcagaccactcaaggtcaggggttcgagaccagcctggccaacatggtgaaaacccatctgtactaaaaatacaaaaattagccaggcatggtagcatgcacctgtaagtcccagctacctcgggaggctgaggcaggagaatcacttgaatctsggagcagaggttacagggagccaattgcgccactgcactctagccttggagagtgattaaattcaactctgctgaaacaagaggcagaggggtttttaaacactggactagctagtggaaatgtgctaaaggattgtaggggcaaggctggtcaaagtgattaggccatctgtgtttattactaattggagctcgtggaagttaggctcctaccctcat

SEQ ID NO: 682231 - DNA, 656 bp, Homo sapiens
aaactcagatttaaatagcagctcactcacacttactctaattttatataaatttcatctttcaagatttcatttccctcagagaattatagtgatgataaaatgagtaatgtgtgtgatcatatttgtaaactataaaatcctaaaccaatgctattgttaatgatttgtatggtataaacccaaataaatacgtctgttgatcagattaaagtatgctctctctgatgytaatttttcaaagtggtctttgtggatcaattgtatcagtaataaccgacacttgttttaaaatgcaaagagctcttcccttcctcagacctcatgctcaatctcaggaaggggaatacagaagtttgcatatttaatgacctagcaatgtagcgcaattgctttatgagctaaaagaggaatcccataagctaaactcattcctgttaccactattccagctagtactagcatagttgttggacctccaacttctatgacctcttactttacataatatgggaccattcgtttaactcacatactgtgtccttttctggattagtcatactctaggtatgaaaaagtacatggaaaggactaattgaacaactgagtttgagttgattctcataagtctatgagtactcataagttgacaaaaa

SEQ ID NO: 682232 - DNA, 641 bp, Homo sapiens
caattatgctcccaaatttcaattcccttgccctaaaatttaaaaaaaaaaatgttttttcctcctgacccagccaagtagacttaaaagttatgatttataatatctatgaacatatatatacttactgctattttgattcaatcataatctcttaatatataattttagatgacatgttggaaccacctactatacctgccacctaataggtgttatctaagttaaatttcacaataaactaccaaagagttatagctttcctgccattttcctagctgaaactggtagcttagctagcttagactcaaaaatgttaagtaacttgaaagtcatagtgaggataaccagcatggttccaaatctccatgatactttaaattggatacatctttataaaaataaagctttatttcaaaatattcatcaatagagattcttaagcacccacctttgaaagtagtttgtccctaaatattatgtaattagaggactggcacttcccatcatagcctctgctactgtgtgatactaaaaagtattgggccgggygcagtggctcccgcctgtaatcccagcactttgagaaaccaaggcaggcagatcatgaggtcaagagatggagaccattctggccaatg

SEQ ID NO: 682233 - DNA, 1646 bp, Homo sapiens
aagttatttgagaaattcaagtctatttgcaaacagtcaagaatagaatggaaactctaagaaattggataggtactcagtaccctgaagcctataagaaataagacaaggtaagtgctagaggctgatgaaggaatgtaaaacgggcctgactgaggatttrtcggcaagagatttacaactttattatccccagtgccaaagtgagctttctaaagcaccaacccaaaaacatcagtttctttcttataactgtttgtagattctgttgtcactgcagtgatttaaaaacttttcctcacaacagaatactcattttccaaataaaatattatgtggaaccttagggaatataaaacagacaaaagtagggacaggtaggaggttgggggtatcatagatctgacttctcagaatttgctcatgtatgtggtagccctgattcagcctcctggactccagagaacagagggtcatcacctcaaacctatagaggtattgacttagattagcatctgaagccctgacagtttggctccaaactacctttccagtcttctctgtcactgccccaacagtaaaacccaagttccaaccattccaaactcttagtagtattccacatcttggcactgtttcatctgtctagaaaattcttgcttacaataccagtaggagaactgctcttcctagtttatccaagcagaagtgcctttcccttcctgggacttccccttcaagggatttacatatattctgctataaacgcatttaacatacagcactgtaattgtgacccaactaagtctgtgacccacttaagttaccctcatcctatggccagtctcagcatggtgaaactgcaaaagaaactaaatccataaccaaatgtcttaaagaacgttgtacatctttattgagattatcaagacacactgaggtaaggtcacataaaaccagcatcaaagctttcccaaaatcccatgtagctaatttttccttttcctctaatcctatttttgctgtatcagtgtaaatatcttcccttctatctttaaaatctccagtatgcactgggttctttctcactatgttatttcttttctagagatggttcaagccctttcatatgacaatcagcttatttaaattattaaaaatccaaccattattctgctcagtccaacaaagacccaacaaagagtccagcttagaaggtaggagagaaggaaaagccataaataagtattctttagtatttttgtctacaatgtatgcgtcaatctgtattccacaagactgtgctccctaaccatgtcttcattttcatttccaggttgtcttatattttttatatcaccaatacttagcacaatgcctgagacaaaaataggtattcagtaaatactggttgcttgaataagtaaatgagtaataaatgactgaatgaatgaatggaatgctcattttccacaggaaattcatgtaattgcaaaaatacctaattcttacaacagtaaacccattatcactgcgttctcagagaactatgctataaagttatgtagaaataaagtaaattttttgaatcatttaacagtaatgtttttcactcaaagacatcattgctcatctattgaaacaca

SEQ ID NO: 682234 - DNA, 1936 bp, Homo sapiens
gaccatcctggccaacatgatgaaaccctgtctctattaaaaatataaaaattagctgggcgtcgtggtgggcgcctgtaatcccagctactcaggaggctgaggcaggagaatcacttgaacccgggaggcggaggttgcagagagctgagatcgcgccagtgcactccagcctgggcgacagagcaagatgccatctcaaaaaaaaaaaagaaagaaaatcacccattttcacaactgagcagtgtgctccatgtacggaattaagtacgcgtgtgtgcacacatgcacatatatagccaagtaaattggaacacttggaaagaatttcatttacaaaaaataatgaatggcatccagtaaaatgctattatgggctgcaaagcacagcagcattttgagaaagatgaaggcagcccctgagcgccgagagctggcctggcactcacagtggggctgggaggatctgccatggagcataagcatttcacagaacccctgatcaggcaaggccgccttatgaccaagatggagtgagagaaaaacaagaccattcaccccataatcatgtccaaacacagaccaaaacaagaacatcgtccaaaccactaaaaagaccaaacatccctcatctggttagtatgagcaactgctgcttcttggccaatcacagcttggcctcgctatgtcgttcccatcttccagctaagaattaagatgcccagtcatagaagtacttccgctctttggcagcatcccatccagagcgaagcctgcttccttaagtcctccrtaaatcacctaactcaagaactcaagcccaactcctagaattagccctctttgataccctctgactgagatgccccagaatccatggtggccaagcttcctcattgcagtgagccagtaagctcaattgtgttttgactacaggtgtgttcctggaggtctgtgggcaatcttattcaccatagtcttccttcccctgccctcatgtctggcacacagcaggtctcaaaaacatgttgagttaactgaaactaagatggagacaatgtttctggtacagtgtctgctggtgatcactggacaaactgtcagttctgttgggaatttagcagctgctccctgaggacctgcattctggagggtggcaagaagtccaagacatgggccatgtcctcactggcaagctaacatagaaaaacacaaagggttaaatctctgggacaatggtcaggacaggggctgtcacaagacagcacacagttaaatgcctggtgagctgaaagtgctgtcagatgatggcgaggattcagacaggcgaagagaaaaggaaataagtcattcctgaccttgaaaggtggggctggggagctcagggcagctgagctggagagtgatctgggcagagctgtgcctcaataccaccaactgggacagtgcacagaatgagccaaaaggagagagaatatttccagaaaaccagggagtctgggtcccaggtcatatgaagggagggggacaataggcaaggcaaggaggtggcaggaaggtagatttgaaattgggcagaactgagttgcaatcccggttgtgccattttctgtgaccctgaccttcaaggtcattaacgtctctgaacctcagcttccatctccttctatcgcacagggtctgacacaaagtcatgccacagatccagggcaggcgttttggccacagcaagtaccctggcgcagtatgattgaatgctcatctcagggaaaaatcacagttgcattctctgaacctaaggctgagtcaggcctcaagaggtggagtggggctgggacctgtgctgccttacttctctgagccttggtttcctcaccggcataatgacacctcccccaggagctgctctggggattacacctgtgaaagtaccagc

SEQ ID NO: 682235 - DNA, 630 bp, Homo sapiens
cccgagaatccagtgtcggcgattcgcgtcgcgcggcctccagccctggagacctcagagcaccaccaacttgagcaaagtttcaccgcggcatgagataagggagagattccagaggcgaagcgcagggaggagcaagacgaggttccccggcggagtggtagcccgcaccgcagtcggacacctgctccggtgccccgcattggtgccgccagagccaccgggaggcgtcgcagcagcccaactctccaccccctccctcctgtccctactcacccctccccaacaccccgccccgggcgccagtgactccgcctctccctgccgggcggctcttcggctggagctgagaaaggagcgcttccccggactcggctcggctccgaggctcygaagccgacgccgccagctcagccccgggggcgggagcaggactgcccgcacagcccgcacctaggaggcgccgatcccgaacgcctcatgggacgcccccgggggctctctccacgccttgctgccgcgtcccggtcctaggcgcccgggatccacggcccaccccgcccgcagcccgcggcctgtctggagaggagtatgaggcccggggccccgcggacgccggccaccgggcgg

SEQ ID NO: 682236 - DNA, 605 bp, Homo sapiens
taaggagtttgcccaagagtcacatagcaagtcatagtcatgctctctgaagcagcaataacttggcaataaaataaaaatgaagcatcttctgtatgtgttaacttttcagtgactgtttatgccttccagtattctttgtaaaccttgaattctttttttcacagatgattaaagtttatcaattgtaaaggtggaggaatttgggaactagacagtgcacacataaataataaataygttcttcaaatattgggtgggctaatgtgggaggagtttgagaccagcctgggcaacatagtgagaccctcgtctctaaaaatatgaaaaataaaaaaaaaattttttaaatgtgtgatatgtttagatggaaatgaaacaatttgtcactgtctaacatgacttttagaaaagatattttaattactaatgggacattcacatgtgtttcagcaaggtgaaaaaattattcaggagttcctgtccaaggtgaaacaaatgccctttactgaaatgtcagaagaaaacatcacaataaagttaaaacagctaaaagctgaagtaatagcaaagaataatagctttgtaaatgaaatcatttcacg

SEQ ID NO: 682237 - DNA, 906 bp, Homo sapiens
cacacagtatcacagtatgaaaagttttaatattcctataattgggatatttggcacacaaggccagtcctctctcagggaagtccaaaatggcttgaaagtgcctggaaaagagtgggtctgggtttttattgtggttagtggtggggccaggatgaggtttcacagaggagggggcatgaaacgttaactctcacctgcaccaaaggraggagtatgaaggcctttttatcagcttgaccagatgtggggcacacagggaagaagggaaagtgagattttaaagctttattagttacatatcaaaaaattgaagtcagacaccacatacaaatagtgattgtaaaaccttggcaatacagactagaaaactgattttctacttgtcaccagatacaaaaggcactaaaatgaaaaccaaaatattttatctgtccataatgttgtttctattttgagcttgaatttcgaggctaaaacataatataggaggttatttttagtcttttgttttaatataatttaaactaacttcataaacagtggttatataatgataatatagcttacactcttattatatttcgcagtcagttatgtaacatatagtatttctagtttatggagcaatctgaaatttataaaggaccattaagataatttagaatccattacatacttatatttaatattgttgtctgctaaattattcttgttacctattaatattcttatttatccatactaaaataacagctataaaaatctattctttgaactataaactatccattattacttttctcttttgtgttaatagggctaagggctttatcagatgggtacccatttatctaggaatctatactttattgttttctatccatcacctcaagcatttatcat

SEQ ID NO: 682238 - DNA, 1014 bp, Homo sapiens
cataaaaacacacaacagtatgatactcattggtagcaggtacgtaaatgagaaaaagaaaggaattaagcaacttcattgcagaaaaccaccaaaccacaaagataaacaacaagagaatgaaacaaagaagatgaacaaaacaaacagaaaccagttagcaaaatgacaggagtctgtttttacctatcaataacaactttgaatgtaaattgttttaattcactaatgaaaaagtatagactaggcacttgagcctagcagttcaagaccaccagcctgtgcaacataccaagactttgcctccacacacacacacacacaaagttagccatgcatggttgcacacacctgtagtcctagctgctcagagttttgaggtaggaggaatgcttaagcccaggacttggaagttgcaatgaattatgattgcactactgcactccaacctgggtggcagagtaagactctgcccataacaacaacaacaattatagcctggcttaacgaattaaaacaacaacaacaacaaagagaaaaaactacatactgcctacaagacgctcactcgcactttacctgtaaaggcacacatggactaaaaatgaaaggatggaaaatgatatttcaggcaaacagaaaccaaaagcaggaaggaatagttatacttatatcagacaaaattgactgtaagtgaaaaaactaaaaataaaaagatacaaagaaagtcactacataataaagasatccatttagcaagaggatataacaattgtaaatatatatgcaaccaacatttgagaaaccgcatatacaaatcaaatattgttagagctaaagaaaggccccaacacaataatagttggggacttcaacaacccattttcagcattggacaggtcatctatacagaaatcaacaaagaaacatcagatatcaactgcactatatacctaatggacctaagatatatttagaaaacgttttaatcaatagctgcagaatacagattct

SEQ ID NO: 682239 - DNA, 1014 bp, Homo sapiens
cataaaaacacacaacagtatgatactcattggtagcaggtacgtaaatgagaaaaagaaaggaattaagcaacttcattgcagaaaaccaccaaaccacaaagataaacaacaagagaatgaaacaaagaagatgaacaaaacaaacagaaaccagttagcaaaatgacaggagtctgtttttacctatcaataacaactttgaatgtaaattgttttaattcactaatgaaaaagtatagactaggcacttgagcctagcagttcaagaccaccagcctgtgcaacataccaagactttgcctccacacacacacacacacaaagttagccatgcatggttgcacacacctgtagtcctagctgctcagagttttgaggtaggaggaatgcttaagcccaggacttggaagttgcaatgaattatgattgcactactgcactccaacctgggtggcagagtaagactctgcccataacaacaacaacaattatagcctggcttaacgaattaaaacaacaacaacaacaaagagaaaaaactacatactgcctacaagacgctcactcgcactttacctgtaaaggcacacatggactaaaaatgaaaggatggaaaatgatatttcaggcaaacagaaaccaaaagcaggaaggaatagttatacttatatcagacaaaattgactgtaagtgaaaaaactaaaaataaaaagatacaaagaaagtcactacataataaagagatccatttagcaagaggatataacaattgtaaatatatatgcaaccaacatttgagaaaccrcatatacaaatcaaatattgttagagctaaagaaaggccccaacacaataatagttggggacttcaacaacccattttcagcattggacaggtcatctatacagaaatcaacaaagaaacatcagatatcaactgcactatatacctaatggacctaagatatatttagaaaacgttttaatcaatagctgcagaatacagattct

SEQ ID NO: 682240 - DNA, 639 bp, Homo sapiens
aacccaggagacagaagttgcagtgagctgagatcgtgccactgcactccagcctgggtgacatagcaagactgcatcttgaaaaaaaaaaaaaaaaaaaaaaaggttacctgattagcamccctaatttcatctgcaactgtaattcttctttgccaggtatcctaatatattcacatgttctgggaattagaatgtgaagatttttgggtaggggagcattattttgcctatttgaagtgctaattattattggcaggttcttcggtttctatttttaatctgtggaaacaacaatagtatcaatttcaatttcatagtgtatttgtgataattaaataaactagtggacataaaacatcaaagagatcttttagtaaatgatagctattacttagtagttagagtctagtttttcacactagtaaaataataattgatatattaagaaatttaatattgtgaaaattagagagaatatgtgtatagttcctaacacttcttggttgtacaaactcagtttagttacttaacatttttggtccttatatttctcatctgtagaatatgctcaataattgcatagccctcgtagaatttttgaaaagataaaatttaaaaatggacatagagctttta

SEQ ID NO: 682241 - DNA, 623 bp, Homo sapiens
taacatataggtacatatagctattacgtaagttatagaattaagttaaactatctaggaaattgaggagtaaagaagatctaaacaatactcagagcttttaaagttttaacaaggaagaaaccagagaaagggtcccatatgaagcagraaacagtcttctttgatggcattaacaagagcacttggtgcactttttgaaacaggaaattcagtgaagttagttaaggagaaaacgggagggacagaagtagggacagcaagatatagtttttttctttaagctttgttctaaaggttcactgtaagaaaataattgtagttaaaaggggatataagcaaaagtgagaacttctttactcttgttttatgatagaagacattaaagcatcttggcacgtgaggggattgatcaagtacaatgagagtatttgatgctcttcagaggagataattagatttaggaagtttctagcatagcaaaagggaatatgatgctgataaggcacatagatttgaaagcagaggcaaaggattcattgtaacaggaaggagggcaaaccttgattgttgtcatttaaatgatatattggtttcttgtgatttttcctcttttattgaag

SEQ ID NO: 682242 - DNA, 666 bp, Homo sapiens
ataactaattttattgataggtgttagtttctactttccgacaatttaaattcttcccaaatatttatggagttgacctcacaccttgaagaagcttgaatgtatctcataccttgaagaagcttgaatrttatcaaaatcccctgggtcctgacagatgactttagtgtatggctttgctatcagcattgtagggcatatatgcaaaacaaaagaacattagcctgtgaagtgaagatgaaatgctatctgaattaagaggcagtgtgatttgcagacaagcaatgtgttaaatcccggatttaagcaggaatgtattttcaaccaaaagttaactttgtaagacaaagaatttaaaaaatgctaaacgtgtatttccgctgtcagactaaactatatgtaactcaaaagatacctatttctaagctcagtttttaatgtataaaatcttacgaataagccataacattttactttaatctatgataaataatatattaacatgtatatatttttgaagtgttattacaggtattattatctatcttaatacacatgcaatcctcaataaaacaatgtatttttaatgtatagtcaactgactataaattgtaaacatgtaaaattagattctaaaataaagtgtaccaatgaaggtaacaacta

SEQ ID NO: 682243 - DNA, 659 bp, Homo sapiens
atatcctctgtttcttacccaagcttagaaccactggagatataagcatatgagtcgtctgctagaatttaaaatatctgctttaaaattaataaagtctagagttaaggcctctatttgtagagtcacaatgggattactagtaatttactgctgaattatacatatttactcattttgtcactgtacacctggacagccacaggtgtagaacagaaaattcttgttstttctaaaataacaggaatgcagaaggggttgagccatacatgtccagtagtcctcagccttaatcagataaatcagataaatctttcctcttctggaaaatggaagctttcatattgtttcggcttagcagggcaactaacctttaaggaactgccaggtgtccagttttagtatatcagtgaatatccgcaattatctgaaaaggctgttaaaatactcacgtgttttccaactacgtatatattgagactaaattttcttcatctattcaaaccaaaacagcatattaaccaagattgaatacagaagaagatacgagagtccagtcatcttctgttgaaccacattatggagattttttttttttccttttttttttttaagagatagggtcttgctctgccacccaggttagagtgcagtggagc

SEQ ID NO: 682244 - DNA, 659 bp, Homo sapiens
atatcctctgtttcttacccaagcttagaaccactggagatataagcatatgagtcgtctgctagaatttaaaatatctgctttaaaattaataaagtctagagttaaggcctctatttgtagagtcacaatgggattactagtaatttactgctgaattatacatatttactcattttgtcactgtacacctggacagccacaggtgtagaacagaaaattcttgttgtttctaaaakaacaggaatgcagaaggggttgagccatacatgtccagtagtcctcagccttaatcagataaatcagataaatctttcctcttctggaaaatggaagctttcatattgtttcggcttagcagggcaactaacctttaaggaactgccaggtgtccagttttagtatatcagtgaatatccgcaattatctgaaaaggctgttaaaatactcacgtgttttccaactacgtatatattgagactaaattttcttcatctattcaaaccaaaacagcatattaaccaagattgaatacagaagaagatacgagagtccagtcatcttctgttgaaccacattatggagattttttttttttccttttttttttttaagagatagggtcttgctctgccacccaggttagagtgcagtggagc

SEQ ID NO: 682245 - DNA, 659 bp, Homo sapiens
atatcctctgtttcttacccaagcttagaaccactggagatataagcatatgagtcgtctgctagaatttaaaatatctgctttaaaattaataaagtctagagttaaggcctctatttgtagagtcacaatgggattactagtaatttactgctgaattatacatatttactcattttgtcactgtacacctggacagccacaggtgtagaacagaaaattcttgttgtttctaaaataacaggaatgcagaaggggttgagccatacatgtccagtagtcctcagccttaatcagataaatcagataaatctttcctcttctggaaaatggaagctttcatattgtttcggcttagcagggcaactaacctttaaggaactgccaggtgtccagttttagyatatcagtgaatatccgcaattatctgaaaaggctgttaaaatactcacgtgttttccaactacgtatatattgagactaaattttcttcatctattcaaaccaaaacagcatattaaccaagattgaatacagaagaagatacgagagtccagtcatcttctgttgaaccacattatggagattttttttttttccttttttttttttaagagatagggtcttgctctgccacccaggttagagtgcagtggagc

SEQ ID NO: 682246 - DNA, 610 bp, Homo sapiens
attaagaaaatgtggcacatatacgccatggaatactatgcagccataaaaaagtatgagttcatgttctttgtagggacattgatgaagatggaaaccatcattctcagcaaactatcacaagggcaaaaaaccaaacactgcatgttctcactcatatgtgggaattgaacaataacaacacttggacataggaaggggaacatcacacaccatggcctgttgtggggttgggggatgggggagggatagcattaggagatatacctaatgtaaatgacaagttaatgggtgcagcacaccaacatggcacatgtatacatatgtaacaagcctgcacattgtgtacatataccctagaacttaaagtataataatacaaaataaataaataaagtgctgggattacaggcattagycaccatgcctggcctctttccagttttattccttacaactaggatgatattcatcctggtttgtccaggaacagtcccagtttatgcccattgtcacagtacaattattgataatgccgccttctactttcaaagcgttctggtttaatgatgagttaaatgattgccctactcagagtgttttcgtaaca

SEQ ID NO: 682247 - DNA, 584 bp, Homo sapiens
acagcctcatgcttaaataacacaggaaactaaattctgaaagtcaggaagcatacacggattctagctaacaggatgcctctatgttttcctaagatgaccttataaagagcatttaatctgactgggatgcaatcttctcatctggaaaacaaagtgacaatctgaacttgtgcactgcagtgtgaaaagtgagggtaagacagaaatagctaaggtcaggcctccttgagtatctttgcttttgctgtgataatgctgtataataagcaccctcccctcatccctccctacctgcycacccactgaaaatctctcaatagcaaacctatatccttgcccttgagtctgtagatcagcccttcagcagcactactccaggctaggtccagcactgtgttgtgtctttccattttaggccctaggaagctggagcctgttctcatggtgaagggaaggagcacagctctggtcaggagtggtactttaacatctgctcccatttcattggccaagcatgttacattgccacactcatggatggtgtggggaagagcactccttccctggtgccaggaagcaga

SEQ ID NO: 682248 - DNA, 676 bp, Homo sapiens
tgatcataaacatcctgactgtcacaaacaakggggttttgaaggtatttagaaacctccagaacctcaaaccatttttatttctctcctttcaagtttcaagtggttacaaaaggcagttcagaatttgttcctgttgatgactaactcatggattacaaaaagctacagaatgtatagcaaactgtgaattctctgtagtggtatgttttaaaaattcaatataatttattaatttttcacattcatattacatattttgcttctatgcccatgcaggcagaagatcataagtaattgtttttcatttatacaacagaactccattgggtttccataatggggcctgtaatgctatatggtatagatatacacaactaactaaaaaacaatgtcataacagctgttaaaagaagtgtgtcttcagtatcatggaagaagaacgttaaactactcagttaaaagtagctaccaagaggtggctcactgaatctcaggactggagaatatgtttaatcccagcactagcacaataaataaaacatttattttttgtgatcacaccaccgtgaagttttagaacactgggaaaaacagaagatcttaaaagcttctaaaaagaaaaatcaggagtattcacgggccagaatggccctggacattttaacactaagac

SEQ ID NO: 682249 - DNA, 1291 bp, Homo sapiens
ctgcactctagcctgggtgacagagggaaactctgtctcaaaataaataaataaataataataaaaaaacaaaataaaataatatgggtttcaatgtgaccctgatatcaatggagaaataactactaaatcatttaaagtagggaaaatgtatgattggtttgggtttttagaaagagctctttgtgttttagaaaatgcatcagattacttgcatggtcagcctgcataatcctggctacctacccccgttacccaattttattgtgccttgccaaggtagtaaaaccctaatgtggtcgttgtggaatgttttccttcatattaatacctgttatctgttcctcagagttctctattttatctgccatgccagtgacccagaacacagctgttagatatttacttcctggagtgaacaatttcttccccttttttcaaaatcgatttttaagaacccattattacaaacttaattcaattcaattcgtggtttgttaagatgctgatacattggcagkcttctctagaatatgaaggagaggccaatcatgctccagagtccttagaatgaaggcaggctctacagtgcacaacctctccttttgggtcaagacagagccagcatgcgctcccccatcctggagtactgagaatgccagcactggccgacttcccactgggcccataattgctgacctggctgccacagcttgttttctgagaaagacagagttctggaggcatatgctggcatatttgatggatgttggtagcttgtcaacaaaccagctaaaaaaagggcttcactgaatagaagattccaagcttgaatccccaagtgggccagctgggctcctgagtgggccagggacaaagagtcagcttcctcacgggccagaaagccgaagctcaacattgacaggagaagctatcgattcaccctgagacaatcagtcccacttggactcttcagttgttcacagtaaacatgattttcaatacaattacattttgaagcttatgtcatgatacattatataagaaaaatgattattattcagaccatactcttgcactgaagactcaagggctttggctagcaatccacaaaccaccagggtttccacagcagctcaaatttgcacagattcctccaccaattctgtgactgccaggccttatcagtaactctgattacctcagatgaactatgaaaatgaggaaagtttccaaagctaactgtgacaactcctaacatagcttttctttcaaaatttctgacattcct

SEQ ID NO: 682250 - DNA, 608 bp, Homo sapiens
tgccttggggtccacagtcaccaaatttttgttgccaatttgtaaccaattgttaccaattttttttttttgagaccgagtttcactcttgttgcccaggctggagtgcaatggcccagtctcagctcactgcaacctctgccttccgggttcaagcaattctcctgcctcagcctcccaagtagctgcgaatacaggctcccaccacaatgcctggctaaatttttgtagttttagtagagacaggtytttgccatgttggccaggctggtcttgaattcctgacctcaggtgatccacccacctcagcctcccaaagtgctgggattacaggcgtgagccaccgcacccggccaattgttaccaatttttatgatcaacttattagtctatgcttacccttaaattaggaaaagagttagaaaatcatagtctctgcccttgaggagtctatggtctgtttggggagaggatacatggcacacatgcatacacactgacccacacattatcctacacactcacacatgcttcacacccatgtgcccgcacacacattccttaccactcacacacgcacactcacacttcttttacactgtcacatt

SEQ ID NO: 682251 - DNA, 608 bp, Homo sapiens
tgccttggggtccacagtcaccaaatttttgttgccaatttgtaaccaattgttaccaattttttttttttgagaccgagtttcactcttgttgcccaggctggagtgcaatggcccagtctcagctcactgcaacctctgccttccgggttcaagcaattctcctgcctcagcctcccaagtagctgcgaatacaggctcccaccacaatgcctggctaaatttttgtagttttagtagagacaggtttttgccatgttggccaggctggtcttgaattcctgacctcaggtgatccacccacctcagcctcccaaagtgctgggattacaggcgtgagccaccgcacccggccaattgttaycaatttttatgatcaacttattagtctatgcttacccttaaattaggaaaagagttagaaaatcatagtctctgcccttgaggagtctatggtctgtttggggagaggatacatggcacacatgcatacacactgacccacacattatcctacacactcacacatgcttcacacccatgtgcccgcacacacattccttaccactcacacacgcacactcacacttcttttacactgtcacatt

SEQ ID NO: 682252 - DNA, 617 bp, Homo sapiens
tgtgatctctgctaataatctgtcaatttaatttgagatttatttttttttagtattgttatttggattttaatattgctgtttccaaacaagttagaatattgtgctcccaaacttcatttagataacattgcccctcattctttttgatgttgatttggtctttttcttaaaatcatctgagaggaaagggctacacagagtgaaagatattttaaaatgatatttaaaaaaatgacttccctctgtcatccagcactttgggagaccaaggtggaaggaccacttgaggccaggaatttgagaccaacatagccagactctrtctctacaaaatacaaaataaaaatttagccaggagccatggtgcacacctctagtcccagctactgggagactgagctgggaggattacttgagcccaggagctcaaggctgcagtgagttgattgtgccactgtactgcagcctgggtgtcggagtgagaccccatttctaaaaaacaaccaaccaaacaataaactacttcccaaacagtgtcaggatagcagaagaaccagaccagtactataggggtctctgccagaactccctgacccaaagcatattctctacca

SEQ ID NO: 682253 - DNA, 666 bp, Homo sapiens
gaatttcaacctgtggaatctcagcgagatgtggctggaccattggagaaatggggtgaggaggaatagcggattctggggacactaacaaaatggtctagatttcaatacgctgggtgggtgcagcagtttaaacaccaaatgatgccaagtagccatggaagtcattgaaacaccatcttgttggcagtcctggtggctgcactttagacattgccagattgaactgtgttattcagccaccgatctgttgaataatggattatttcgtccattattgcaaagcatgtctttattcaattcaattcaattcaattcaattcaattcaattcwattctattctattctattctaattttttagatatttttcagcctaatattttagttcttgccatgagagagtctggaaagcagccccatggcgccgggttctatgacctggggaggaaagcacacagagacacaggctttgctcctaggttgaaacagaaagcattcctgtgctgaagaagcagtgtgtgctttgctgaggacagagcgccaccacagtccctggcgtgagttatgtcatccctggcaacttgctgtggagctcaattggaaattgctttctggatagaatgccattagaaaggaagcgaaaaacctcatggataaattcat

SEQ ID NO: 682254 - DNA, 1538 bp, Homo sapiens
tttgatacttctttctttactagagaataaaacattttgggactgcaggcattttgttagctgacagacttagagaaagggctgaaaggtaaaaccacgagaacgaaaatatacctccggacttytggaaacaccagcaaaaacaaattcatcttttcccttaccaatcctttttttactctgcctcctggaattgttaattctttcaaatttctggtctttaaagaattttttttttaattctactgaggttcaaattgctaagtacatgtgaagaagtccaagaaaccacatttactaccatgcttaagaaagaaattacggaattctgaatcagttgttcagggcagagctggtagtaaaaaccattactgaatgcacaagaataattcgccttttgaaggcaaccaggttgggagtgagcagattattggatattcctacctgtggattctttttgcccaagcactgctctgacaaaatttagaatgctcccagagagacagcagacatatgtgtctatctgaaaatgtgtaaggtaactcatacgaatgtaattttgccaattgttggagggaatggaagtgcagaaggaaggtgaatgtgacctgccatgcatgggaatctggctaggtgtattcaaaactatttctacctgtctgataaaactatccagtgctggtagctggaaatgaaaagcacaattagaatttgaggaacaaatgctacccatgctggacacgcaatgaaacccaagtagatgatgggaaccatgctatttgatgtgagcatcaggttgtttaacctgtacaatttcagagacacactatggaacacacaaagggtatgcatttttaataagtcgatagtcatctagttaaatgaactggattcacaaataagcttgaaagacacaataactaattcttggtggtactgccttctaaagactctgctgcttgtattcaactgcaatttcccaacagttagcaaatatataaaatgtcactgatatgtttttaaattttgttgcaaccttaaaatcattaacagtaatctcaaatataccaacttcttaagtcagtactgctgagactatccttatcagagttgttgggaagcagctgtttggttcactgtttcttctttagcatctacaacaattcctggcactcagtactcaacaaataatttgttccatgaaatgcccaagagttagtatatgtcccaataggttaattacacatataaagcaagcttcctataatcttcctaaagttcttcagaacttaaaaatgacatcttcttgaagtatcccaatccttggaaaccgcgcacattaaccactgtgatctaaaactagcatgacaaatttgaactgtggaattagaaaaaaaatagcatgcaaattccaacagcaacttaccaatttgcaatcctgagcaagtttaatgaccttcagagccttcatatttaaaatggaggtaataaaacctcccatataaatgggaggattaaataatataatatgaatagaa

SEQ ID NO: 682255 - DNA, 1047 bp, Homo sapiens
gtgtgtcagactgaggaatacatcagtggatagtcactgtggactgtgattatgatgtgacataatccatcagaacagtgctcaggaagagacagtggggagtaaggcagaagtgatgtcaggtgcagataatagttttgccataatccaggaaaaaggaaatgaagaactgagcaagatagggacatcaagaataaagaataagggttcagcatgggagatgtgtagaaataaaattgagcaatgcagctgctggttggatgtgagaaatagaaaggccaaaatgttggtaagaatctgctgtcagagataaggtggggccatgaaccagtatgacgaagaggaggagaggagtcaaaaggaagatgattaagttcaattttgaacatttttctttaatgtatgaagagaatgtaggtgaatttcagagggaaagagaagaccaaattgttcaccaatatgccatatcttattaaacaaagctgcaaatatttactggattcctactttaggtcaatcctctgctaagtgtctaaagtctgggagaaaarctgagttaaacaggtatttaggatcactgcaaagggtaattgctaaatgcaatgagagctgagagaaataagcattaaacaatttccatcattcttggtatctcgagaaagaaatctggagaacaaaagtaccagagaatgggaaagggctcggtgttactgaactctccaatcttatgatgtcagaagaccctgaccttgtttcactcctattcagctttgttatcaatgctagaatgaaggcactgaagacagcttatcatatatggagctgttccttagtttggcagggtggaagacggctggaaaaacaatattcaaaattatctcaagcaactaaaataaaagaagctcaagagataaatgtttagaaactttgtttggtattattttatatgaaaaatcaacctgagatttttattgaaccccaagttcaataaaagccaaaatataaatcaaaataaaaattaaattttggaatcttggccaaaaaaaa

SEQ ID NO: 682256 - DNA, 1056 bp, Homo sapiens
tttatccctctctcccttctttccttcccagcctctggtagccactattctactctctaaccctatgagatctactttttttattctgataaacaaattatatttggaaaatacttatgtcatctgctatatgcttttgactgtgcacttcatttagacttctagaagtaagctaagtattttcaatagaaataaaaggtagagtagtaaagaaaacaggatgacttacattttcacttctctttaagaataatatatttgaatatatttgactataaagtaaataataaacccactaccccatgtgttkgcattttattatcagtctaaagccagttctgccaaatataaaaccatttgatcagagtagggccacttagcctagttcatgtaaagccattttaatagcccttgagcagaagagtcaacttctgattactgacatataaaccagcaacaagtaggaaaatgaatatatttcagtgtgggggttctgttgctataaagcaaacagaatttcaatcaattttgaaacagactgacttcctcaccaatcattacgttagtcaaggtaaatcaatggccttttccagctctagctgtgacagtgggcacaggtggctctaattggtactacttttttagggggcagcttctaaaacaattccagaacaaagacgcagagaatgaattcacttttaaacgattcagagatggtatttcaattcaccaatattaatggtttttagcactctccagagtcttcctatatttcagttatgtaatcattacaaagtaaaactattccatgtcatgatttaggcaagaaaagtgagaaaaatctcttaaatcgtaaattgaaacttaagagccgaaatgttcttaagacaataatgtggaagacattcctcctttggtttacaatggatatgcccctagctatttggggattctgtttagatttcagaaaaatattagaacatcgttgaaatcttcgttccctccaatcttccaattgaaagaacctctacttctttcaagtatgagaggcagata

SEQ ID NO: 682257 - DNA, 1056 bp, Homo sapiens
tttatccctctctcccttctttccttcccagcctctggtagccactattctactctctaaccctatgagatctactttttttattctgataaacaaattatatttggaaaatacttatgtcatctgctatatgcttttgactgtgcacttcatttagacttctagaagtaagctaagtattttcaatagaaataaaaggtagagtagtaaagaaaacaggatgacttacattttcacttctctttaagaataatatatttgaatatatttgactataaagtaaataataaacccactaccccatgtgttggcattttattatcagtctaaagccagttctgccaaatataaaaccatttgatcagagtagggccacttagcctagttcatgtaaagccattttaatagcccttgagcagaagagtcaacttctgattactgacatataaaccagcaacaagtaggaaaatgaatatatttcagtgtgggggttctgttgctataaagcaaacagaatttcaatcaattttgaaacagactgacttcctcaccaatcattacgttagtcaaggtaaatcaatggccttttccagctctagctgtgacagtgggcacaggtggctctaattggtactacttttttagggggcagcttctaaaacaattccagaacaaagacgcagagaatgaattcacttttaaacgattcagagatggtatttcaattcrccaatattaatggtttttagcactctccagagtcttcctatatttcagttatgtaatcattacaaagtaaaactattccatgtcatgatttaggcaagaaaagtgagaaaaatctcttaaatcgtaaattgaaacttaagagccgaaatgttcttaagacaataatgtggaagacattcctcctttggtttacaatggatatgcccctagctatttggggattctgtttagatttcagaaaaatattagaacatcgttgaaatcttcgttccctccaatcttccaattgaaagaacctctacttctttcaagtatgagaggcagata

SEQ ID NO: 682258 - DNA, 660 bp, Homo sapiens
tgaatcaatatttgtttgttcactgccataaacaatgaaatcttcagacttttgtttttgtttgttttttcttacatacatagtttttctacttgttgttttggcccttcctgtttagttttctcctattttattcaattctagtgagacagctttacctacacaaagccaacctgctaaacatttgaaaatattttgttgggtatagtgaataaatgaccaagtgaatcttttatctattatstatgtatgtatgtatgtatgtatgtatgtgttatctatgtatgtatatatctgttatgtatgcatgtatgtatgtatctatcatttatgtatgtatgtatgatctatgtatgtatgtatgtatctgttatgtatgtatgtatgtatgtatgtatgtatgtatctatctatctatctatctatccatctacctatctatctcatctatcttttatagttttctggcacttgacattcaaggccctcaatcaaccttcttcctacatgtaccgtatttccatttctcttctttccaccaactcctctctggcaagaatactgttcatcaatctcagtgtgcatgatacccttgtttccccaaatgctggctcacaaggcttccaatgcctttcacccaacttatctccataagtttta

SEQ ID NO: 682259 - DNA, 660 bp, Homo sapiens
tgaatcaatatttgtttgttcactgccataaacaatgaaatcttcagacttttgtttttgtttgttttttcttacatacatagtttttctacttgttgttttggcccttcctgtttagttttctcctattttattcaattctagtgagacagctttacctacacaaagccaacctgctaaacatttgaaaatattttgttgggtatagtgaataaatgaccaagtgaatcttttatctattatgtatgtatgtatgtatgtatgtatgtatgtgttatctatgtatgtatatatctgttatgtatgcatgtatgtatgtatctatcatttatgtatgtatgtatgatctatgtatgtatgtatgtatctgttatgtatgtatgtatgtatgtatgtatgtatstatctatctatctatctatctatccatctacctatctatctcatctatcttttatagttttctggcacttgacattcaaggccctcaatcaaccttcttcctacatgtaccgtatttccatttctcttctttccaccaactcctctctggcaagaatactgttcatcaatctcagtgtgcatgatacccttgtttccccaaatgctggctcacaaggcttccaatgcctttcacccaacttatctccataagtttta

SEQ ID NO: 682260 - DNA, 1578 bp, Homo sapiens
ggctctactcgcaaagttctgcttgcatctgccaagcagtggataaaagttggcagagccgaccatcctcttggatgaccatgatacactatttctcttagcccagctccccactttctgaaattcaygcccacctaccattaccacctcccgtgagactatagttgccttcctggggttcccatggaaagaaaacaggagcttgtacattattttaagaattcaaaaagtctagtagaattcacacatttacctgaaataaggatacttaaacagactaaaatgtaattttttgcagatatccgctcatatgactcacttcaagatcaaccccaacagaaagttttctctgattcccccaggagctcattctctctttgggtgcctctaatattgtttactttcattatttattcatatgtctgtcccccaaccagaccgtaaattttgatttattcatctttctatcaccaattggcatatatagtagttgctcaataaatgtttgttggatgagtgaaaactacgtgatgactaccagaaactagacaaattatgcatacatctgatgaataaaattataaactaaactactacttaatgcacaaagtttgatagacaatacttggggtatgtgagaaaatgaaggtgttctttttgttttgttttgttttgagatgagttcttactctgtcacccaggctggagtgtcgtggtacagtctcagctcactgcaacctctgcctcctgggctcaggtgatcctcccacctcagcctcccaaacagctgtaaccacaggtgtgcaccaccacacctggctatttttttatttttttgtagagacagggtttctccatgttgccctggctggtcttgaactcctggactcaagtgatcctcccaccttggcctctcaaagtgctagaattacaggcgtgagccaccttgagtggcccaaaggaattcttaacagcaaaaataccagagcttattgaatttttttttttttttttgagacggagtctcgctctgtcacccaggctggagtgcagtggtgcgatctctgctcactacaagctccacctcccaggttcacgacattttcctgccacagcctcccaagtagctgggactacaggtgcccgccaccatgcctggctaatttttttgtattttttactaaagacagggtttcactatgttagccaggatggtcttatctcctgaccttgtgatctgcccgcctcagcctcctaaagttctgggattataggcatgagccaccgtgcccagcccagcttattgaattttaacattacctagatgggaaaggttgtaataaattagactagttcatcttcgtctggacctttcagaggtcaagggagcccttgaccactttttatttttttgagattattcctgcattaaaaaaaaaaagaattacaagattacaactgtggcatatggtacatgtgtatatttccaaaattgacaattttaacagaaaaaggggcagtatacacaattgtgctacttacaagataaagttttataaaaatgtcaaatattatttc

SEQ ID NO: 682261 - DNA, 2142 bp, Homo sapiens
ttattcatgtaacataatcattgagtattttattcacattcccaaatattcttcaagcatgtcattttttatttctttattcttaccgtgatcattttaaatgtgtaatcttgaagttattaaaacataaatatgtgatgtgcacaggaaaagatttgagggtgttcatgctaaagtgtcaccgctagttatggacagctaaatgtggtgtacatgacttttttaaaaacagatttacaatgcatttattacttttgtaacaaaaagtatgacaagtatagaacaaagaattattaattttctatctgctaagagatttgacacaggagattctataacttttaattaattgactaaactgaataaatacgcattgtgtaaaagcactttaaaggactagaacaatgatcatgcaataatctacaagtaagaatgtcattttttaaattggctgcttctggctgggtgcggtaatcctagcactttgggaggcacaggtgggaggattgcttgtggctaggagttggacatcagtctgggcaacatagtgagattccatctctgcaaaaaattagctgagtgtggtggcacataactatagtctcagcttctggggaggctgaagcaggaggatcccttgaccccaggaggtcaaggctgcagtgaactatgattgtgtcactgcacctcagcctgggcaacggagcaagaccttatctcttaaaaaaattgctgcttcatattcctttatttgtatacaacctgattagtactagattattggagatttgttttctctgatttttgtaaatatttatgttatctgcaatcaatagccttgataaatacatttttgaggacatttttgaccatttccttaggaaaaaaatcctataagtgaaattgctgggtcaaaggctatgtacaattgaaaagtatttttaaaaaatatgtgttgctaaattgccttccaaaataattgtacaaatttaaattctcaccagcactgtatgagactgcccatggaaaactttttaatggagcaaggccagttggtctgtagcactttggttgctgtcaatatttaagtcaagtatttcacaatggagtgctttgtgacccagacrcacccatttcgtctttgttatgttgttgcttactttattcccaggtctgctttggattttcagggtccaaggtggtgttgctcaattttttctggagctactttctcccttaactctctctgtgtaaaccttacttatccttctagatgagcttgggtctctctacgtatttatgagacaaagaacacaggttcaccattttccctcagcagttactaagtttccttatacctttgtccaattccaggaattccagttccatagtcacagatatcaggactttcagtgctgaaagggactttggaggtcaccaggcccatcggtccatccacagcagactgacacttgaccaaggatcatcaaatagctggatatggccgggcatggtggcttctgcctgtaatcccagcacttggggaggctgaggtgggtggatcacctgaggtcaggagttcaagactagcctggccaacctggtgaaatcccgtctctactaaaattgcaaaaaaattagctggtatgatggtgggcacctgtaatcccagctactcaggaggctgaggcaggagaattgcttgaacccaggaagcagaggttgcagtgagctaagattgcgccattgcactccagcctgggcaacaagggtgaaactccatctcaaaaaaaaaaaaaagaaaaaagctggatgttcatctctctaggatgtgtctggttccagtgttgggtcattctttttttaaatttatttttaatgtatttttaatttagagacataatcttgctattttgcccaggctggttttgaactcctggactcaaagtgatcctccttccttggcctcccaaagtgctgggattacagacctgagccactgtagctggtcccattgctggatctttcaagctgttatattgagagcaagtctagtttccttagatattaaaaaattatgaagtctttcaaaaacacaaaaatgcagaaaataatacaatacctgtgttcctaccacttgga

SEQ ID NO: 682262 - DNA, 630 bp, Homo sapiens
cctcaccaggcaattgtgagaattcaaaacagtgcagaaactggctgagcaggacctactgcagaggtggcactgaacatggagaaagtccacctccctttccaaggttggagcctggccactaaccagctgcttgatctgggtctcccagtcccccaagacacaagagaggatttggggctggggatgtccttcaggcagtctttctagctctgtcatgctgcaatctcctggccttctcaggcattacttcaggttttgtgctgtttataatgagcaccctgaaaccaggcactttatccagtacaacaggaaactggaaataacgtgggaggcttactggaatgctctgttaaagaaattattgcagcagtcaacacttctgatcaaaataaattaaactgacaacaatgtgattaagatgtttatgcacaaaggaagtgttgttgttgttcatggaaattccttgatatggggtttttgatgaatctgattaasctctgtttaggtcttacttgtttttgaggttatttcttaatgccctcccttcccccagctttgtaacccatcaaccactgtattgacagtcgaatttgcagtgtatggtccagttacttgaaagtagaatgc

SEQ ID NO: 682263 - DNA, 1004 bp, Homo sapiens
catccttctcttcatcatctgggcctcagctcaaatgccactcacctgcaaggggcctacctcactcctcctctctatactcaccctgttttcttcattgcatttaccaccagaaggatttttaaagaaattgtttgctgcctgtcttctctcttaaatgttaagtcccacaagggcaaaggctgtatattcctgtcagttgctgtacctgcagtgcctaggatatgctcggcatatgacaagtgtgtaggaaatatctactgggtaaatgaatgaatgacctgataccatgtgttgtttgaagaaagtagcccagtctaataatacagcagttctcaacatattctttctgctctgatatttgactggagacattcacatcgctgatacttctctaggacatcctaagaatgtgtcacagacaagaaagtctgccgtttatgtgtgactcctaccacaccaacttctgtttcccatccaggaaatgtgtaaaaggatattacaggtggtgtktcccttatccaaaatgctggagaccagaaatgttttgaattccagattttttttggggggtggtgggtggcatttttggaatggacaatgagagatcttgaagataggaccagagtctaaaaccaaaattcatttatgtttcatctgcatcttatacacatagcctagaggtaattttatacagtattttaaatagttctgtgcatagactggtgtgattgccaggtgcgacagcatgactgtagtcccagctacaacggatgctgaggtgggaagatcgcttgaggccaggagttagaggctgcaatgagctatgatcgcagcactgtacaccagcctgggcaacagagccaaactctgtttcaaaaaataaacaaacaaattttgtgcatgaaacaaagtctgtgtacatggaaccatcagaaagcagaggtatcactatctcagccctcacccccatgtggacaatcaggggttgtgtggcatcaccc

SEQ ID NO: 682264 - DNA, 1004 bp, Homo sapiens
catccttctcttcatcatctgggcctcagctcaaatgccactcacctgcaaggggcctacctcactcctcctctctatactcaccctgttttcttcattgcatttaccaccagaaggatttttaaagaaattgtttgctgcctgtcttctctcttaaatgttaagtcccacaagggcaaaggctgtatattcctgtcagttgctgtacctgcagtgcctaggatatgctcggcatatgacaagtgtgtaggaaatatctactgggtaaatgaatgaatgacctgataccatgtgttgtttgaagaaagtagcccagtctaataatacagcagttctcaacatattctttctgctctgatatttgactggagacattcacatcgctgatacttctctaggacatcctaagaatgtgtcacagacaagaaagtctgccgtttatgtgtgactcctaccacaccaacttctgtttcccatccaggaaatgtgtaaaaggatattacaggtggtgtgtcccttatccaaaatgctggagaccagaaatgttttgaattccagattttttttggggggtggtgggtggcatttttggaatggacaatgagagatcttgaagataggaccagagtctaaaaccaaaattcatttatgtttcatctgcatcttatacacatagcctagaggtaattttatacagtattttaaatagttctgtgcatagactggtgtgattgccaggtgcgacagcatgactgtagtcccagctacaacggakgctgaggtgggaagatcgcttgaggccaggagttagaggctgcaatgagctatgatcgcagcactgtacaccagcctgggcaacagagccaaactctgtttcaaaaaataaacaaacaaattttgtgcatgaaacaaagtctgtgtacatggaaccatcagaaagcagaggtatcactatctcagccctcacccccatgtggacaatcaggggttgtgtggcatcaccc

SEQ ID NO: 682265 - DNA, 1004 bp, Homo sapiens
catccttctcttcatcatctgggcctcagctcaaatgccactcacctgcaaggggcctacctcactcctcctctctatactcaccctgttttcttcattgcatttaccaccagaaggatttttaaagaaattgtttgctgcctgtcttctctcttaaatgttaagtcccacaagggcaaaggctgtatattcctgtcagttgctgtacctgcagtgcctaggatatgctcggcatatgacaagtgtgtaggaaatatctactgggtaaatgaatgaatgacctgataccatgtgttgtttgaagaaagtagcccagtctaataatacagcagttctcaacatattctttctgctctgatatttgactggagacattcacatcgctgatacttctctaggacatcctaagaatgtgtcacagacaagaaagtctgccgtttatgtgtgactcctaccacaccaacttctgtttcccatccaggaaatgtgtaaaaggatattacaggtggtgtgtcccttatccaaaatgctggagaccagaaatgttttgaattccagattttttttggggggtggtgggtggcatttttggaatggacaatgagagatcttgaagataggaccagagtctaaaaccaaaattcatttatgtttcatctgcatcttatacacatagcctagaggtaattttatacagtattttaaatagttctgtgcatagactggtgtgattgccaggtgcgacagcatgactgtagtcccagctacaacggatgctgaggtgggaagatcgcttgaggccaggagttagaggctgcaatgagctatgatcgcagcactgtacaccagcctgggcaacagagccaaactctgtttcaaaaaataaacaaacaaattttgtgcatgaaacaaagtctgtgtacatggaaccatcagaaagcagaggtatcactatctcagccctcacccccatgtggacaatcagkggttgtgtggcatcaccc

SEQ ID NO: 682266 - DNA, 560 bp, Homo sapiens
  misc_feature 3, 4, 5, 6, 7, 8, 9, 10, 11, 12, 13, 14, 15, 16, 17, 18,19, 20, 21, 22, 23, 24, 25, 26, 27, 28, 29, 30, 31, 32,33, 34, 35, 36, 37, 38, 39, 40, 41, 42, 43, 44, 45, 46,47, 48, 49, 50, 51, 52, 53, 54, 55, 56, 57, 58, 59, 60,61, 62: n = A,T,C or G
  misc_feature 63, 64, 65, 66, 67, 68, 69, 70, 71, 72, 73, 74, 75, 76, 77,78, 79, 80, 81, 82, 83, 84, 85, 86, 87, 88, 89, 90, 91,92, 93, 94, 95, 96, 97, 98, 99, 100, 101, 102: n = A,T,C or G
aannnnnnnnnnnnnnnnnnnnnnnnnnnnnnnnnnnnnnnnnnnnnnnnnnnnnnnnnnnnnnnnnnnnnnnnnnnnnnnnnnnnnnnnnnnnnnnnnnnnctacccttgtcatttcagtctttagagctgtctttgtgcttagtgtggcctcaagcatgtggggcaataataatataaaggtgaacagccaggcgcagcagctcacacctgaaatcccagcactttgggaggccaagatggtcggcctgctttaggccaggagttcaagaccagcctggtcaacatggtgaaacaccgtctctacaaaaaatgcaaaaatcaggggggcatggggggtgcrcctgtcatcctaactactcacgaggctaaagtgtgaggatcgcttgagtccaggaagttaaggctgcagtgagctgtgatcgcaccattgcactccagcctaggccacagagccagaacctgtcccatattacatatatgtaaagggtggacatctgggctttgctgtcagacaaatgagagtcgcttctgtcgcttccctgtggggtgacctgcgc

SEQ ID NO: 682267 - DNA, 560 bp, Homo sapiens
  misc_feature 3, 4, 5, 6, 7, 8, 9, 10, 11, 12, 13, 14, 15, 16, 17, 18,19, 20, 21, 22, 23, 24, 25, 26, 27, 28, 29, 30, 31, 32,33, 34, 35, 36, 37, 38, 39, 40, 41, 42, 43, 44, 45, 46,47, 48, 49, 50, 51, 52, 53, 54, 55, 56, 57, 58, 59, 60,61, 62: n = A,T,C or G
  misc_feature 63, 64, 65, 66, 67, 68, 69, 70, 71, 72, 73, 74, 75, 76, 77,78, 79, 80, 81, 82, 83, 84, 85, 86, 87, 88, 89, 90, 91,92, 93, 94, 95, 96, 97, 98, 99, 100, 101, 102: n = A,T,C or G
aannnnnnnnnnnnnnnnnnnnnnnnnnnnnnnnnnnnnnnnnnnnnnnnnnnnnnnnnnnnnnnnnnnnnnnnnnnnnnnnnnnnnnnnnnnnnnnnnnnnctacccttgtcatttcagtctttagagctgtctttgtgcttagtgtggcctcaagcatgtggggcaataataatataaaggtgaacagccaggcgcagcagctcacacctgaaatcccagcactttgggaggccaagatggtcggcctgctttaggccaggagttcaagaccagcctggtcaacatggtgaaacaccgtctctacaaaaaatgcaaaaatcaggggggcatggggggtgcacctgtcatcctaactactcacgaggctaaagtgtgaggatcgcttgagyccaggaagttaaggctgcagtgagctgtgatcgcaccattgcactccagcctaggccacagagccagaacctgtcccatattacatatatgtaaagggtggacatctgggctttgctgtcagacaaatgagagtcgcttctgtcgcttccctgtggggtgacctgcgc

SEQ ID NO: 682268 - DNA, 560 bp, Homo sapiens
  misc_feature 3, 4, 5, 6, 7, 8, 9, 10, 11, 12, 13, 14, 15, 16, 17, 18,19, 20, 21, 22, 23, 24, 25, 26, 27, 28, 29, 30, 31, 32,33, 34, 35, 36, 37, 38, 39, 40, 41, 42, 43, 44, 45, 46,47, 48, 49, 50, 51, 52, 53, 54, 55, 56, 57, 58, 59, 60,61, 62: n = A,T,C or G
  misc_feature 63, 64, 65, 66, 67, 68, 69, 70, 71, 72, 73, 74, 75, 76, 77,78, 79, 80, 81, 82, 83, 84, 85, 86, 87, 88, 89, 90, 91,92, 93, 94, 95, 96, 97, 98, 99, 100, 101, 102: n = A,T,C or G
aannnnnnnnnnnnnnnnnnnnnnnnnnnnnnnnnnnnnnnnnnnnnnnnnnnnnnnnnnnnnnnnnnnnnnnnnnnnnnnnnnnnnnnnnnnnnnnnnnnnctacccttgtcatttcagtctttagagctgtctttgtgcttagtgtggcctcaagcatgtggggcaataataatataaaggtgaacagccaggcgcagcagctcacacctgaaatcccagcactttgggaggccaagatggtcggcctgctttaggccaggagttcaagaccagcctggtcaacatggtgaaacaccgtctctacaaaaaatgcaaaaatcaggggggcatggggggtgcacctgtcatcctaactactcacgaggctaaagtgtgaggatcgcttgagtccaggaagttaaggctgcagtgagctgtgatcgcaccattgcactccagcctaggccacagagccagaacctgtcccatattacrtatatgtaaagggtggacatctgggctttgctgtcagacaaatgagagtcgcttctgtcgcttccctgtggggtgacctgcgc

SEQ ID NO: 682269 - DNA, 614 bp, Homo sapiens
tataaaaattagccgggcagggtggctcatgcctgtatcacagctattggcggggtggttaggtagaaggatggcttgagcatgggaggtcaagactgctgcagtgagctgtgatcataccatttactccagtctgggcaacacagccagaccctatctcaaaaataaataaacaggctgggcacagtggctcatgtctgtaatctcagcactttgggaggccgaggcgggcagatcacgaggtcaggagatcgaaaccatcctggctaacatggtgaaaccccatctctactaaaaatacaaaaaattagccgggcgtagtggcgggcacctgtagtcccagctactcaggaggctgaggcaggagaatggcaagaacccraaaggcaaagcttgcagtgagccaaaatcgcaccactgcactccagcctgggtgagagtgagacttcatctcaaaaaaaataaaaataaaaaataaataattaaaaattatgtaaactcactatcactatggcagtatacagcaagcccacttaaaaactatcctaattaggaaaactcacagctgttgttaaatcttggctcgagatcttcaataatggctctcttcttct

SEQ ID NO: 682270 - DNA, 3670 bp, Homo sapiens
  misc_feature 1122, 1123, 1124, 1125, 1126, 1127, 1128, 1129, 1130, 1131,1132, 1133, 1134, 1135, 1136, 1137, 1138, 1139, 1140, 1141,1142, 1143, 1144, 1145, 1146, 1147, 1148, 1149, 1150, 1151,1152, 1153, 1154, 1155, 1156, 1157, 1158, 1159, 1160: n = A,T,C or G
  misc_feature 1161, 1162, 1163, 1164, 1165, 1166, 1167, 1168, 1169, 1170,1171, 1172, 1173, 1174, 1175, 1176, 1177, 1178, 1179, 1180,1181, 1182, 1183, 1184, 1185, 1186, 1187, 1188, 1189, 1190,1191, 1192, 1193, 1194, 1195, 1196, 1197, 1198, 1199: n = A,T,C or G
  misc_feature 1200, 1201, 1202, 1203, 1204, 1205, 1206, 1207, 1208, 1209,1210, 1211, 1212, 1213, 1214, 1215, 1216, 1217, 1218, 1219,1220, 1221: n = A,T,C or G
ggttattgagttctcagaaaatggaaattagccctgttcagagagtctcaaggagctgcccttaataaaaatagcggaaattatgggtttttttcttgccttacaaatatttttttttttgagacagagtctcaccctgtcacccaggctggagtgcaatggtgtgatctcagtccactgcaacctccgcctccttggttcaaacgattctcttgcctcagcctcccgagtagctggaactacaggtgcccgccaccatgcccagctaatttttgtatttttagtagagacgggggtttcaccacgttggccaggctgacgtcgaactcctgacctcgtgatccacccaccttggcctcccaaagtgctgggattacaggcgtgagccaccacgcccagcctcagatctttattccatatgagggacagtgagctgcattcgtggaattgctgcctggacacctgggaggcaagaggctcagcgcctgcccaagaagatggtatggttacaagtgcagggaggggcatatgaggcttgagggacttctcgtttgtttgttttctgttttcccaaatacacagtacatagtatagcagtctttagaaaaccaacctgccttaaattggtttactgtttctcgaggacaagctggcagtttacatcaaaagctgtgaattatgtgtctccattatatggcaattttactttcagcaatttatgctaaggaaataataaaggatactgaaggatctacattttagagttgtttagaagaaaacaaacaaacacactggaaatgacacacatttccaacagttggagagtggatgagtcaattatggcagactcagtggaatactacgcatccattaaaagttctgttgtaaaaaaggcataaacagacacttctcagaagaagacatacaagcggccaacaaacatataaaaaaaatgctccacattcctaatcatcagagaaatgcaaatcaaaaccacattcagataccgtctcacagcagtcaggatggctattactaaaaagtcaaaaaaacaacagatgctggcgaggctgcagagaaaagagaatgcttatgcactgttgctggaaagtaaattagtgnnnnnnnnnnnnnnnnnnnnnnnnnnnnnnnnnnnnnnnnnnnnnnnnnnnnnnnnnnnnnnnnnnnnnnnnnnnnnnnnnnnnnnnnnnnnnnnnnnnnaaatataaaaatatatatttatattttatataaatataaaaatatatatttatattttatataaatataaaaatatatatttatattttatataaatataaaaatatatatttatattttatataaatataaaaatatatatttatattttattttctctatatatggagaaaataaaatatatatatatggagaaaataaaatgaaaataacaaaaagtagattatttgaaagacttatttctatttttttttaggttattgtaaatcagaaacaaagcaaatttacaaatcaaaggccaggatgagcatgggtctaagtgaagggcaagacgcctggccttggaatgtattttaactctggaaaatcctctttgggacattccttacttgccatgactgctatcaggtttgttttagtcaaaatatttgttcattgtctctacttatcccaatccaataggacttcaaagatttgagggcatttttggttttcaattttaaaaagtcacatctaaaaataaaaaatttaaaaatttataaatgaaaaattctgttgtaaaaagatatttcttgatatgaaaagatgttcactggctggacccagtggctcatgcctgtaatcccagcactttgggaggctgaggtgggtggatcacgaggtcaagagatcaagaccatcctggccaacatggtgaaaccctgtctctaccaaaaatacaaaaattagctgggcgtggtggtgcacgcctgtagtcccagctactcgggaggccgaggcaggagaatcacttgaaccctcgaggtggaggttgcagtgagctgagattgcgccactgcactccagcctgagcaagagagcgagactcggtctcaaaaaaaaaaaaaaggcaaaaatgttcactatattcttacattaagagaggtcacaaatataataatacagaatgagccattaaataattgcatattttcatgagattatgcctcatttttcttgcctgtctgcattttatatcttccctctggtatctacactgtttttttttttctttttaaaaaggggcgaaaagaaaaccaaactgcttagtgatagtttgtgaaaagcaagaagtgttgtgacatttcttggtgcatgcgtggaagaaccatgggatgaatgtgtaggaagtgggggaggtggggagttcctgggttagaagagttggacagaagggaggtcagcacacgagtgtgagctaagctgctcttacaaaaagaccccaaatacggtgggataaagagcaaaggagtttgtcttgcatgtctcaggtaagcattcctggaccrtgggcagtgctgtctacttcctagaggaccagattccttccatctcaaggctctgcccttctccagcgctttgccattcactgcctggatggccaaggctgagtcacagccacatgtggaaagagagtatggagggggtcaggtcacacggttggagctgcaggctgcaagtcgtcctggttgcaacacatcccactggtaagagcttcatccacggcctcatctaactgtaagggaagctgagctggcaatgtagcatggctagacagccccatgtctggctttgattctactcctgtggaaaaagggaagagcggattttggtggactaccagcatcctctactgttggtgttttaagagccaagtggagacacagcaagcagtgggacgaggaagcagagcagagagaggaggtgaagaacggcagccactgttagcagctttcaaccagggtgacctgtttgatgcatcagatgatggtccccaaagcatggatggatgatgtggttgtgggctgaacacttctgttcatactgctgatgtgcgggcattgctgctgtctctcccactcaggaaagagtgtcagaattcaagttaatatgacatcattaggaggaacctggacttcagcagcagcctcctaactcatcactcaccaccaccaatctattatccattccacagccagatgaaccttctaaaccaaatcaaagcagctcccttccctgcttccagccctttagaggctctctgttgttctttggataaggttgaagacctttcccttgagtcatgctgtcctttgtaatagggcctctgcctccttcagcagcccgatggcttgccattctccagccgtgctggttgtctcagctctccggaataaagaatctttctctcctgcctcagggccaccttgagcagtcttccccgtgctcttctcctggataactgctcctcatccttcaagatctttgagtaaacatcacttccatgcaggacttcctgtatcccctcaaacaggggaacacacctgtgctatacatttccataccccttgcatgttcataaagcctacaaaacatgcggctcctcatgggataacatcatcttcatttg

SEQ ID NO: 682271 - DNA, 597 bp, Homo sapiens
atactgtgttgaataggagtggtgagagagggcatctttgtcttgtgccagttttcaaagggaatgcctccagtttttgcccattcagtatgatattggttgtgggtttgtcataaatagctcttattatttcgagatacgttctatcaatatccagtttattgagagtttttagcatgcagggctgttgaattttgtcgaagccttttctgcatctgttgagacaatcatgtggtttttgtcattggttctgtttatgtgattaattacgtttattaatttgcatacgttgaaacttggatcccagagatgaagccggcttaatcatggtggataagctttttgtatttttagtagagatggggtttcaccatgttagccaggctggtcttgaactcctgacctcaggtaatccacccacctcagtctcccaaagtgccrggattacaggtgtgagccactgtgcccatccatgtgattctgccattttttctgcctgaagttcttgactctcagatggcctgaatggctcaagtgtcactttataagatgccttctctgaccagtcagtggaaaatagcaccctctaaaccaccc

SEQ ID NO: 682272 - DNA, 633 bp, Homo sapiens
gttcctgctagtgcaacggtaaccacctccttataaagggcagtagtaagaagctaatcaacaggaccgcgaaacgtgaaagtgcttcatgaactggaaagccaacgcagaccttagttattatattagatgttagctttagattctttctgtggaaacaaagatcctctctttttctaactgctctcctggacacctggtcatttgttgtggatgaacattagtacattacaggcactactcttcatctttgcacttaacacatcagcagccacaaaaggcattctgatgagagcttaaagattcaacaacaaatctcttgctgasagacccttctaagtttacaacccctgaaactgttcttctataatgacagaaaaaaaggctacagggagttctaaaaatgggattagaagtacctgcaatttttcacaagcttgtgacccatcaaaccttctggttcctaccaggatctgcactttcaaatcatgactcattaagttctcaatagagataaagagctaagatacaacaagtctaatttaaaaaatacatgtattagaactttggaaatgtgtgtgtcagacaaccagcttagattgactaaacgcagccagtctcttttcctttaaa

SEQ ID NO: 682273 - DNA, 1392 bp, Homo sapiens
ctccatgttggtcaggctggtctcagamccccctacctcaggtgatacacccacctcggcctgccaaagtgctgggattgaggcgtgagccaacgcgcccagcccaaagctcaatttcttaaattcgtgggactggtaaggaggaggatggagttggggtgtgggcaaatggatgggtacaaaggaagcagagctgaaatttgtttttaattctagagcagtggaaggaaaagatatttctttcttttctcactgctagggtgaccagtagagtatgctggaaagaaaaggggatgaatcaaatgcaatgaggcattacattataattcagatttttctaccagcaggagcttatgtgttccagagttccaagcccccagcagagggcaggatgccctttcccatagaagctgaaggcatctttgagttataattaaagtgatcatacctgggtttgcccaggacagttgttttggtacaattagtcactgcaacccctttcactcacctaagtgtcatgcttgtatggtacatgggcagcctaagtgataatggaaatcaaccacagtatagaacatcttttctatggagaaaaaaaaaatgctccagtttacatatgaacttggacacaaagtgtataattagagattgtccatgtgtgctaatatctatctgggtccagtaacattgctttctagccctccccctctttattttgttttactgttctgcctctgaaaggattctgaaacatccctagagttattatgcctttcaataaacaatatgctataattcttcaattttgacactattttggaagtgtcacagtgaaaacaagaaactgtattaaagagttactgcttctttcactcgataaatactcagtacctactgtttgttcgtatcggtctaggcactggtgattcagcagtgaacagaacaaagtccctgttctgagtttcccattctagtgacagtaaaaacaagcaacaacaaactagtatgtatttatatattgcctggtagagagaagtactatggagaaaaatatatcaaggtaagagaatacaggataagaggaggttgctattttgcatcaggaaatcagtgaatgcttctctagtaaagttatgttttagcagaaatctggagacagtaaggaaacaaatcacatagctatgtggtgataccaagagcgaaggccagaatctgcttagtgcatttgaggagtaattagacagtctaaagttaagagagttagtgacagaacagtgggaaataagaccagagaaggagctggaagctagatcacatgtgaactttgtagcttttgtgacaaagtagacagggaaactcttaaaggatgggggtctgaacagaattataata

SEQ ID NO: 682274 - DNA, 1392 bp, Homo sapiens
ctccatgttggtcaggctggtctcagaaccccctacctcaggtgatacacccacctcggcctgccaaagtgctgggattgaggcgtgagccaacgcgcccagcccaaagctcaatttcttaaattcgtgggactggtaaggaggaggatggagttggggtgtgggcaaatggatgggtacaaaggaagcagagctgaaatttgtttttaattctagagcagtggaaggaaaagatatttctttcttttctcactgctagggtgaccagtagagtatgctggaaagaaaaggggatgaatcaaatgcaatgaggcattacattataattcagatttttctaccagcaggagcttatgtgttccagagttccaagcccccagcagagggcaggatgccctttcccatagaagctgaaggcatctttgagttataattaaagtgatcatacctgggtttgcccaggacagttgttttggtacaattagtcactgcaacccctttcactcacctaagtgtcatgcttgtatggtacatgggcagcctaagtgataatggaaatcaaccacagtatagaacatcttttctatggagaaaaaaaaaatgctccagtttacatatgaacttggacacaaagtgtataattagagattgtccatgtgtgctaatatctatctgggtccagtaacattgctttctagccctccccctctttattttgttttactgttctgcctctgaaaggattctgaaacatccctagagttattatgcctttcaataaacaatatgctataattcttcaattttgacactattttggaagtgtcacagtgaaaacaagaaactgtattaaagagttactgcttctttcactcgataaatactcagtacctactgtttgttcgtatcggtctaggcactggtgattcagcagtgaacagaacaaagtccctgttctgagtttcccattctagtgacagtaaaaacaagcaacaacaaactagtatgtatttatatattgcctggtagagagaagtactatggagaaaaatatatcaaggtaagagaatacaggataagaggaggttgctattttgcatcaggaaatcagtgaatgcttctctagtaaagttatgttttagcagaaatctggagacagkaaggaaacaaatcacatagctatgtggtgataccaagagcgaaggccagaatctgcttagtgcatttgaggagtaattagacagtctaaagttaagagagttagtgacagaacagtgggaaataagaccagagaaggagctggaagctagatcacatgtgaactttgtagcttttgtgacaaagtagacagggaaactcttaaaggatgggggtctgaacagaattataata

SEQ ID NO: 682275 - DNA, 621 bp, Homo sapiens
ttatattttcccttgtctttatagatacagctatagcctatctttcattctgcctttcagatgaatttatctttctgtgttttgggtccagtttcagctacgaggtaaaacggcttaaacacatacacatttatcctgtggttacctaatacttgtaagggtttctggttagataggatggtgaagagggataaacaattcaggctgatagagactctccaattttcttttttttttcttttttttttttttttttttttgagacggagtctragtctggctctgtcgcccaggctggagtgcagtggtacaatctcggctcactgcaagctccgcctcccaggttcatgccattctcctgcctcagcctcctgagtagctgggactacaggcacctgacactacgccgggctaattttttgtatttttagtacagacggggtttcaccgtgttagccaggatggtctcgatctcctgacctcgtgatccgcccgcctcggcctcccaaagtgctgcaatacaggcgtgagccaccgtgcccggccaaactctgcaattttcaatacatgacttccgagttcactgaggtcacttccattcagttggtggaaggaaaaaga

SEQ ID NO: 682276 - DNA, 571 bp, Homo sapiens
tgcaaaggatatgattttttttatggttgcattgtattccgtggtgtatatataccacattttctttatccagtccagtgttgatggacatccaggttgattccatgtctttgcttttgtagatagtgcagcaatgaacctatgagtgcatgtgtgtttttggtagaacaatttattttcctttgtgtatacacccagtagtaggattgctgggttgaatggtagtttaccagtttataattatctttcaaaaatctagaaaataatttgtagttaccacacttgtgtcattcagactttgtaataatgtactttttctgacaataacaaaaaaaccccacaaatttcaagtgaaaactatctctacattcatgaagaataayctgcaattcactgtgagaaagaagattcatttataaaaggtgcctgtggcctctttctcctccttcctctcctccttatcctcccttttgtgtaatacagaagtgggctggtaagctaggtctcctccagcctacgtttaaagtacactttacatgaaagtgcacctccttcatttaaaatctcatca

SEQ ID NO: 682277 - DNA, 1283 bp, Homo sapiens
cataaaattgtaattttattttatatatgtatttgtacctctctaatatattaaaaaaatttttgagcatctatgttatggcttgcactgtgtcaagtcctgaagatttcrtagtaataaatattcatgtggttcctggctttactgaaccaagaggctaaatagctctacatgtgatgtgtgtttcaaaaagggacgtatacagtgttaaggaagttttggactcacaggatacaagttaggtctcttgtatgtatttgtgtgtgtctgtgtgtgtgtgtgtgtgtgtgtgtattacttattatgatctatacatttcctgtaatataaagaataatttgacaacattttaataaatgaatacaaagctcaaagcctatctctccctacactttttttcatgaatattttttcttaaataaatttctgaagcaaacctctattgaatatctttagcttttgccttttttcttttttcaattaaaaaatagctacttagcattcataaaccatatgtctaaggccttttaaacccccacaatcataaatagagaatgtttttacacagctgtatacattttcctgagttaaaaatccaccaaaagtctctaatgtgataccatagatccacaccacaaattaactttttaactataactatatattttttcttattctgtaggcaattttcatattgtctggttgcttattgaaacagttgcacaatatcttttctgacatggccatctcttgcaaaagaaatatttttgttattctgggtttaatgataaatagagaaaaaataaatagaacatactaccatattgggaataaactctggccttgactacaagctgttactcatgctatctactataggcccctgtaagtcacaaattaaagataaaaaatttgagaaattaatttaaaagactgaaatgtgtaatatattagaaatcacgagagttaagtttgtgaattccaaagtttactgtggtaacatgctttcttctcattaggatatgagagtaataagttagatattcagaccatgactatagaaatagaatgctacaatagaataagaaataggatgctacagtagaaataagaaagtactttaagactaaaagttaccctctacttcaaatccaaacatttataattaggattataaaatcacttattttctctgggtcttagctttctcatgcattaaatgagtacaatagatattgttgtgtcttgttatttactgactttcagtgctggctagggcttca

SEQ ID NO: 682278 - DNA, 585 bp, Homo sapiens
tcaaaaaaaaactcacgtttactcaygtgtaagtgcacgttgtagcaacagtgggacaaggacatttttaatctttttctgtagctgctctcattctattttctgaatttgataaagaaaaagcatgttgttattgttttgttccaagatggcagataagaggcttttagcatacctcagccacttggaaatagcaagatggtgcacaaagatcaactctgtggggtttaattcaagaaggaaaataggagtctaccaaaattgtgaaggatattccagattccagggagcaaaacatgagcaaacagtccctgtgacagtatctggttgataaaagtgagtgaagccccagtacataagagcacaaggattctgctcataaaaatttgaacgtagtggcaccacaaaaggattacactagctctccagcaaagatctctaacaaaaatggaaactcagagatgacagataagggattcaaagcatggattgtaaggaagctccacaggatccaacacaaggttgcaaatcaacacaaagaaacttccaaagcaatccagaaaatgaagagataaacatctttta

SEQ ID NO: 682279 - DNA, 648 bp, Homo sapiens
agtcctatactaatcttttggagtaggtaaatgaataagacatatttctactttcatggagcaatctgagtttggataaattaacatgtaaataaaccataacaaagtgatcaaagtaaaacaagaaacaagaacatatgtcttaggaaggatggagtaattatttgaacctggaatggaagagtactttcaggaaggtatagtggaagaggtttcatattatctgagatttggaggaataatagcagttttcatggcagacagagaggaaaaggacatttctgggtaaggaatcatatttgcaaatgtacattatataatccactaacagctgctctgctaattgaagagagagagagacaatcatctctttctctctctcgtgtgtgtgtgtgtrtatatatatatatatatatatatagatatcattgagaatgatatctatagctattactgagatacatcaagtaatacaggataatatagggaatagagcagtgtctcaaaaaagaaaaaccagtgaattctgtttgggtttaaagaaataacaaaacctggaaatgggttgtatcaatcacagtcatggcagaaaacaaattacacaccccaattaggcaattcacagagagttggtataaaagaaaaaaa

SEQ ID NO: 682280 - DNA, 648 bp, Homo sapiens
agtcctatactaatcttttggagtaggtaaatgaataagacatatttctactttcatggagcaatctgagtttggataaattaacatgtaaataaaccataacaaagtgatcaaagtaaaacaagaaacaagaacatatgtcttaggaaggatggagtaattatttgaacctggaatggaagagtactttcaggaaggtatagtggaagaggtttcatattatctgagatttggaggaataatagcagttttcatggcagacagagaggaaaaggacatttctgggtaaggaatcatatttgcaaatgtacattatataatccactaacagctgctctgctaattgaagagagagagagacaatcatctctttctctctctcgtgtgtgtgtgtgtatatatatatatatatatatatatagatatcattgagaatgatatctatagctattactgagatacatcaagtaatacaggataatatagggaatagagcagtgtctcaaaaaagaaaaaccagtgaattctgtttgggtttaaagaaataacaaaacctggaaatgggttgtatcaatcacagtcatggcagaaaacaaattacacaccccarttaggcaattcacagagagttggtataaaagaaaaaaa

SEQ ID NO: 682281 - DNA, 661 bp, Homo sapiens
tatattttatataaaataaagttatttaattctgaaaaaaacarcaaaataaataggtcaatgaatgttgtaaaggaaaaaaattcccctcttcatagcccttatagtaaggattctgcacttatacttacagataattgcactactaaaactaagagattattaaactaaaatgtggaaaatgtccctgttttttatttatttatttatttatttatttatttatttatttatttattttttgagacagagtttcgctcttgtcactcaggctggagtgcaacgcacgatcttggctcactccaacctccgcctcacaggcttaagagattctcctgcctcagcctcctgagtagctgggattataggcacctgccaccacacctggctaattttgtatttttagtagagatggagtctttgccatgttggtcagaacatgaactcctgacctcaggtgatccacccaactcggcctcccgaagtgctgggattatagttgtgagccaccgtgccgggcctgttttttgtttgtttgtttgtttttaattaaatagagatggggtctcactatgttgcccaggcttgtcttgcccctgggatcaagtaattcatctgcctcagcctcccaaagtgctgggattacaggcgtgaactcttg

SEQ ID NO: 682282 - DNA, 584 bp, Homo sapiens
aaaagtatttatgcatatgcaatatgcatatattattcaatctataaatgattcctggtatgtatatgaacattttacaatattttgcaataactacagacacatactggcactcaataaatattatttgaatgaatgagaaaattaaagaatgaacgattcatttcatcatctttccccacattgtctaaggcccacacttggtctttttagcatatgattttgaggtgtttattgcctctttgtctgtgcactagaaggtacttcagattacttgaggataaatctgttccagtagttgtgtgtgtctttatcttgctcttctatggacgtggggtgatctgttcaggcagaactctgtgcrtcaagaacatacttagaacaaatgatattgccactgtgggaaaatgtggaaacaaattattcaaaccgtaagtagagaaggaatttgtttttggagtggggaatagattgagctctattactgagccctgtagctggcccaagacaggacaaagagacaaaacatattctctcctcaccctctgagaaatggctttcattctgccagtccagcagcagag

SEQ ID NO: 682283 - DNA, 586 bp, Homo sapiens
tagtgagctgtaatccaatattattggctccccttgaagggaccccatatcaacttaatcatctgcaaaagccctatttcaaataagttcacactcacagataaggggcttaggatttcaacatctttttgagggacacgatttaatccataacacatattaaattatttcaggccattttaaaataaaagaaaactggggcacagagaagacaacaattttttttctttttttaaatttattatactttaagttctgggatacatgtgcagaacgtgcaggtttgttacataggtatacatgtgccatggtggtttgctacacccatcaacccatcatttactttaggtatttctcctaatgctactcctccccttgtcccccagcgctcaacaggacccagtgtgtgatgttcccctccctgtgttcacatgttctcattcttcaactcctacttatgagtgagaacacgtggtgtttggttttctgtttctgtgttagtttgctgagaatgatggtttccagcttcattcatgtccctgcaaaggacatgaactcatcattttttatggctgcawagtattcc

SEQ ID NO: 682284 - DNA, 629 bp, Homo sapiens
tgctacattatgagggctatgatgccactagacgataggaatttgtcagctccattataatcttatggggacaccatagtgtatacgacrgtccatcattgaccagtatgtccttatgtggtggatgactatcataccgaatctatgcaaactcattcaaagtatgaaagacaatggatactataagaaaaccacagaacaatagcatttgtgcacatagatgcataaatcctcaaaaattcttacaaataaaatccagcaatatgtaaaaatgctaatatgtcatgatcaagtatgtttggctggctcgaaatctgaaagtcagtcaatgtaattcatcttattaatagactaaagaagagaaaatggatcatctcatggatacagatagaacacccgattaaattaaacatatattcatgataaaaatgcaaagcaaattaaaaattgaagagaacttctccagtctgaaaagggactctaggccaggcgcggtggctcacgcctgtaatcccagcactttgggaggctgaggcaggcggatcacgaggtcagaagatcgagactatcctagctaacatggtgaaaccccgtctctactaaaaatagaaaaaattagccgggcatgg

SEQ ID NO: 682285 - DNA, 1656 bp, Homo sapiens
tggtgcacgtaactagaagttatagaaaataaggaattgtaggtgagggcatactgcagcctgctctgaagcctgtgtaaagaggtttaagtgtctgtcaatggattttgggaagcagagttgcatgactagacctaaactttaccaagcccctcctagatgcagagggtacatgtttagaggctgcagaggtatcccaggtgatacatgaaaagttctcaatttagtgagtgggataatatgggactagaagtgggaaacaggcatccttctggagaggcagtttgaggttcttaagtgtccattcaccttataaacattactgtgcactgtgctatcagcaggcactgcactttcagcactgtgctaggggctgggtgtatatgcagtgaagaagctacagtggctgccttcatgatgcttacactgcattagcatcctatttactggaaaaaattgtcacacatgtgatggcttcaaacaatacaaatttatgatcttatagttctggaggttagaagtgtgaaataggtcatagaaggctaaaatcaaggtgtgagcagggctgcgtccttctggaggctccagagaagaactgataacctttatttccagcttccagaggctgtctgtatggctggcttgtggtccctgcctctgtcttcaaggtcagcaatgggggtgagtctcacaccacgccactctaacattgactcttctgtcttctcccatccacatttaaaggatgcctgagattccattggctttgcttagatgatattgggtaattttcttatcttaaagtcagtggattactaaccataattccatttgcaaacttaattcccctttaccatatgtcatcatatgttcacagattctgaggataatgcatggacgtctctgaggaggcactcttctgcccatcatgcactgtgctgagggaagccagatgacaagataaacagatacatgaattgcatgcatttctgtatatatgtgcatttgtatacatacataacttcacatcaagaaatgcatattgacagaagcaaagaaaatgctgtaatggagaataaaatggagaacaagtctgttggaagaggagacatctgtgctgagaactgaaagagaatacaatctctcttccaatttctcttctctaagaaaatagctttatggtttatactcataagattgttttgaggattgaatgatgtgaatgatgtaaatgatgtaacaatttttacagaacatctagtagtatcactgatgattccccaatgcttacaatagtttcttcacagcggtggctgcagaacagcggtggctgtagaacagcggattttggtgacccgcaaatgctgctgcctgatcattcctctggaagttttgtctcagaggagtacccagccgtgtgaggtgtcagtctgcccctwctggggggtgcctcccagttaggctgctcgggggtcagggatccacttgaggaggcagtctgcccattctcagatctccagctgcgtgctgggagaaccactgctctcttcaaagctgtcagacagggacatttaagtctgcagaggttactgctgtctttttgtttgtctgtgccctgcccccagaggtggggcctacagaggcaggcaggcctcc

SEQ ID NO: 682286 - DNA, 1501 bp, Homo sapiens
tcagctccttgtgagaccagctagcatcagtgggttccgtcacatcggctgagtctgtagtttcatcagtatgcaggacctgaaggaacaatctcaaatggaaaacttaacgcttgaccatgctcaaagttgttagataacaactagagcagttaagggagctataatcttgtgactgggtctgtatgattctggggcaatagggaccaaacaactgtgaggaaggggtcagagagcagctgaccccatgacgaatgctgatgtgctgcaacctgggtttatttttatttctcctcatccctgtttcctggttaattttaaaaagtttataggaatggtttcaacattctccagggaaaatgtccttagaccacgtggcccacacatctgtcctgcgtggactggcagagcccagctgctgtccccagcctaacttcagggggaaggcatgctgtgtgcttgctgggcatttctcaccttagccacaggggattggaagacacaagacgagccagctgctacaaataaacccagccttgggacccactgctggagcagtgctttccttgcttgcatcactggcaggtgcagttctagtggctctcttgtgtggctcttctccaagcaatgtttaagggtcccatgcagctccatatttcattttcccaaacccagaaaacttcatttctataaatgtgattgagagaaagagagggagagagagaagaaagcgtaactgttcttgacatccatgggcattttccactggtaagaatgagtgatatgactccacccagtgccagggctggaaaatggagaggagcactgggccattaggtgagaaccagtggtctcttttacattacctagtgctgcattttagaattgtgggcaaaggaggcaaaacatgaaagttcatttcttgtaggttatcttcaagttgaaaattattcctccaattcctatttaattttttaaatttatgtagatttttggagacaaggtcttgtctgtctcccaggctggagtgcagtggtataatcatggctcactgcagctcaacatctcaggttcaagccattctcccacctcaacctcccaagtagctgggagtaaaggcaggccaccactcctggctaatttttttcatttttttgtagagacaaggtctcactatattgcccagactggtttcaaactcctgggcttaagtaatcatcctgccctggggcctcccaaagtgttagtgttaccggcatgagccactttgactggcccacattcctattttaaattgctgagtggaaaacatcactctataggtgatacctcacaattaaaataagaatcataaagaactcctcactaattgatatcccaagtctagtacgtcacaaaagtgcccaaaatgtacattcaaaawcacatgctcttccacttactgttgaataaaaaaaaatctcttcaacacagtaatagaagggcattatatagaaaaaat

SEQ ID NO: 682287 - DNA, 596 bp, Homo sapiens
agtcttctaatattgtggattactttgatatacaaatgttgaaccagacttacatcactatgtttcactcatttataattctacaaatagttatcacttttaacatagcaagattacggctttgcttaagttttcctctgtctgttttattcaaaaggtacataattttaggaaacgaaaacatgaagtgcctattcagagtgtgatcttcttaaactgggttgttaagtttcttattgttgtattttgtgttaaaaaaagtatttatatattctgcatatacccatattttttaatgtgggataacatatattatgtatttctttttttattattatactttaagttatagggtacatgtgcacaacgtgcaggtttgttacataggtatacatgtgccatgttggtttgctgcacccatcaactcgtcatttacgttaggtatttctcctaatgcwatccctcccccagtcccccacctgctgacagcccccagtatgtgatgttccccttcctgtgtccaagtgttctcattgttcaattcccacctatgagtgagaacatacggtgtttggttttctgtccttgtgatagtt

SEQ ID NO: 682288 - DNA, 953 bp, Homo sapiens
aacatttgggttttatgaataatacagagatgaaaccacctcacataatttagtattaaatcacttaatccataaacatttgtacctgatttctcataggaaggtaatgattcaaaataacctctcaggcaaagttaaaactgttattttggaagcatagggatattctgatgatgagccatagtcagataatatacaggggtctgggatactaaattctgttcttgtattttagaaaggccagaacaggaagcagtgtgatgtaaaggaaataacactcaactaggagatargacgtttggactttgatgccttctacaaccaaatagtcagatgaccttggatgagccacttaaatgctttgtgacatagttacttctgtaaaataagaaggtttgagagatgatctcaaagtccattccagctctgtaattccacgactccttacatgtaaatgtgattagcatgctgcttagaccatggaaaataattttaaaatgctactatatcttctttctttccttttctttcttttttatcttaatcctttttatgaatccaaccacattcccaatccatattgatttctgtatctccaatacacatctagtacagaagctggcaaaaactgttatctattaaaagggtagtatctgttgtcaaggaactcagtctaacagggcaaatgtgtaagtaaattgcattactgtgattgaagtccaaaaacattagtaatttatgttccttacaaaacagtacatcaaagagactgatgagctattctttaaggtaggccagagacaattaagcagagaacatctcaatatctgaaatatattttttaaatgattaggagctagtcaggcgatagagaaatcagaatagtcgttggaggtgtgacgcagtagtgtattcaacttaggtgcaaatacaaaaattgtggttagttgtca

SEQ ID NO: 682289 - DNA, 1221 bp, Homo sapiens
tccagccacataccatggaaaggaaaaacaagaagaatatgtaatagtgatggttgccaaaacctcaagaaaaaagaaaaaaaacatacttaatattttcgtttcttctgattttcaacataagacctccttaaccactttcctgtcaaaagtcttcaccaaagtaaaacagaaataaagctgttgctttgcttttaagtaccattaaatcaaaccacacatttctgatatgtcacagtcaattgtccatgttaactgaactaatatttattcattgcttacttaaaagaagatacttttttggactagaataaagttaactaagcaaacactgctctaggctggcctattctgtgatggaaggaagagaagcaggcaggaatttggacaaatcataccctgtctctttcttccttccatgcaacatgtttgtaaaagtgcaacttctggaatagaataaagttaactaagcaaacacttttctagctaggctgtcctatcctgtgacagaagtaagggaaccaggcgggattttggacaaatcatacccagtatctttcctccttccatgtaacatgtttgtaaaagcaccacctctgaatatcaaggattgacttaatcagggggaacacagaaaacgaaactgaggagcagcaacaaatttacatgttgctactggacatgcaaagagtggcaacccacaatctgagaaacttctacagaagggaagaaagcgggaagggcaaggcagctaagtcttctcttgcacacgctgccttctcaatgctggagatgggagcatttcaatgctaatgacacaaatactcctcagctactacatcatggtccgaccttctcctggagcagcaaaacccggcagaaggaacaacacccattggaatcaggagacctaggcttatgtattactagttgtgtcactgtaagttaagtgttttaacttctctgatctagcgtttttacaagtaatatggagataatattttttctgtctacttcacaggcctgtggctaccaaacagaatgatgcatgtgcaaatattatgttacctgtagcataataacgawgcatgggcccattgctattggaatactagaatattgaaaatggagccctaggatgcccttccactttttctgtgagtcataactaaacatatgcttaacttcacagtagtaattgaaaaattaaatctctcacct

SEQ ID NO: 682290 - DNA, 582 bp, Homo sapiens
aacccaagttccatttttakcaccaccaataatttgggagaatttacttcctcccttgattcctcaattgcaaaatgagaggtttcactaagtggtttctaaggtcattatgagcctctgatttgacgttagttctaatatatgcttcatgacagagaaaagcaaataaaacacacaatggataattcacggagagatgtaaccagagacaacttcaagagattataaacatcattctgccatatgttcaagacagaaagctgttcagacaggaatgtaaaattagaaatgggtaaaaacaaaggtgtataaatataccatgaagatctgacaaatgcttacatcagcaacgttaccaagactttgctttcactacggaaaaaaattatatgaaaaaactcacaagacatgatgtacaaaatgttctgaagtccagagagccagtttctgcaagggtgatgatattctgaaagacatgaagtttgacctattaccacattttattggaaaatgtattatgcatggttatacaccattctcacagttctcgctccaaactgaagtagttagaaaagcaatttg

SEQ ID NO: 682291 - DNA, 593 bp, Homo sapiens
tagtagtattgcttgagcccagggggtcaagactgcagtaagccaagattgtgccactgtrctccaccctgggtgacagagcaagaccttgtctcaaaaaaaaaaaatcagtaagcttgtagattggaccatatttgagttttagcacactggcgggtacacaaaagacagtaagtttttgttgaataaaatcctgtgatgggatgccatttggttatcagctcaaattctgtctctgctttagcctctgaaaggcatcttgggatagagaaaagtgcttacacccccctgcaaggcattgctaacagggaactttactgtcaagaagccatgcacctggacattaaagctcagtgaaagaaaccaagaagtccaggcatgtttaaggagtttatttgggtgtattagtccattctcacactgttataaagatgctacctgagactgtgtaatttatgaagaaaagaggtttaattgactcacagttctaaatggctgggaggatctcagcatactaacaatcatggcagaagtgaaggggaaacaagacacaccttcacatggcagcaggagagagagagtgcgaagtggga

SEQ ID NO: 682292 - DNA, 593 bp, Homo sapiens
tagtagtattgcttgagcccagggggtcaagactgcagtaagccaagattgtgccactgtgctccaccctgggtgacagagcaagaccttgtctcaaaaaaaaaaaatcagtragcttgtagattggaccatatttgagttttagcacactggcgggtacacaaaagacagtaagtttttgttgaataaaatcctgtgatgggatgccatttggttatcagctcaaattctgtctctgctttagcctctgaaaggcatcttgggatagagaaaagtgcttacacccccctgcaaggcattgctaacagggaactttactgtcaagaagccatgcacctggacattaaagctcagtgaaagaaaccaagaagtccaggcatgtttaaggagtttatttgggtgtattagtccattctcacactgttataaagatgctacctgagactgtgtaatttatgaagaaaagaggtttaattgactcacagttctaaatggctgggaggatctcagcatactaacaatcatggcagaagtgaaggggaaacaagacacaccttcacatggcagcaggagagagagagtgcgaagtggga

SEQ ID NO: 682293 - DNA, 1056 bp, Homo sapiens
gaataaacagaaaaatacacatccacataaattcacagtttagcagcttattaagaaagacttacatacaaataaatgtatccttaaagaaatagaaatttcagttacatataaggtaaagtaacactcctctctctgcccctctcactgaaggtaactgagaatactggacaatatgcatgcaacattaatctgaagactccagaaaacaaatgctagcaggyagtgtgatgaactgcaagtatcactgaactggcagtatctttaaatcctcaaacccagaagtacacactaggtgcagacagaaagagctcttagagaggccctctctttctggttgaaggagcaggaaattgggcccctaaagaacaaaaagagtgtcaaaattcccttgaattttgtagttttgttgcttgttttgcttatttgtttgtttgtttgtttgtttttccatcctctctcagccccaaggcaaacccattgtagcagcagtggcagtaatagcagagccaatggcggatgtggtggcaacactagtagaacagatgcccaaaactctgagccaagagcacaggagaaatcctcattgcctttctttcccctttctgaattctttcaccatttgaactggctggcagaactaataacaaaatataaacagcagagtagacaattcaaagcctcagttttctcagcagaagatgagaaaggaaaatctttgaagctggaaagttccaggaaaagtattcagctgaggaagctgcggaaatccatcccaaaacattatttataaactcctgggcttaccctcaaccttcacacgcatatatttgaacataaacaatacagcaaaagctttgagaaatcatctataaagtagaccactgtgcaggtctaatactggttactgggtggcacagaagcaggaggattcaaatagcacttcaaagtctctgaaaactaaattgacatttgagccagctggaacttgtggtctaaattcatcttaatcaattgcttcctttaaaaagttaacatcaatattttccatgactt

SEQ ID NO: 682294 - DNA, 1056 bp, Homo sapiens
gaataaacagaaaaatacacatccacataaattcacagtttagcagcttattaagaaagacttacatacaaataaatgtatccttaaagaaatagaaatttcagttacatataaggtaaagtaacactcctctctctgcccctctcactgaaggtaactgagaatactggacaatatgcatgcaacattaatctgaagactccagaaaacaaatgctagcaggcagtgtgatgaactgcaagtatcactgaactggcagtatctttaaatcctcaaacccagaagtacacactaggtgcagacagaaagagctcttagagaggccctctctttctggttgaaggagcaggaaattgggcccctaaagaacaaaaagagtgtcaaaattcccttgaattttgtagttttgttgcttgttttgyttatttgtttgtttgtttgtttgtttttccatcctctctcagccccaaggcaaacccattgtagcagcagtggcagtaatagcagagccaatggcggatgtggtggcaacactagtagaacagatgcccaaaactctgagccaagagcacaggagaaatcctcattgcctttctttcccctttctgaattctttcaccatttgaactggctggcagaactaataacaaaatataaacagcagagtagacaattcaaagcctcagttttctcagcagaagatgagaaaggaaaatctttgaagctggaaagttccaggaaaagtattcagctgaggaagctgcggaaatccatcccaaaacattatttataaactcctgggcttaccctcaaccttcacacgcatatatttgaacataaacaatacagcaaaagctttgagaaatcatctataaagtagaccactgtgcaggtctaatactggttactgggtggcacagaagcaggaggattcaaatagcacttcaaagtctctgaaaactaaattgacatttgagccagctggaacttgtggtctaaattcatcttaatcaattgcttcctttaaaaagttaacatcaatattttccatgactt

SEQ ID NO: 682295 - DNA, 588 bp, Homo sapiens
gcattgtcaaattgtcctccagaaagcacttaattatctctagtagcgtatgagagtgcttgagtattactatttttcaaaattgtcatctatatgaaaactaaaaatggatatccaaggttttatttggagttttaaagttatgcataatgttaactttttcaaatatttttcaacagtttgaaccttttttatagattgttatttacatttacctgtttactgattgattttcttgcttatttttacaaggatatactctaaaccaataataacagaatgccaagactcaacttttctccagtgcatattgtttaaaccagctcaatatttcctcaccacctacagctctttctctgtaggatgtacacttccaaagatatcatcagccatcatcaacctctatctccacctctatagtccttgcactccccactatgcccctatactatgcacttaaacatcatacccagttttgttgctttctcaaagtttctgtctttaaattcagtgcagaaagatgcttggaaagtagcgtgtgtgkgtgtttgtgtgcatgcacacccatgtatgacataggaagctctg

SEQ ID NO: 682296 - DNA, 588 bp, Homo sapiens
gcattgtcaaattgtcctccagaaagcacttaattatctctagtagcgtatgagagtgcttgagtattactatttttcaaaattgtcatctatatgaaaactaaaaatggatatccaaggttttatttggagttttaaagttatgcataatgttaactttttcaaatatttttcaacagtttgaaccttttttatagattgttatttacatttacctgtttactgattgattttcttgcttatttttacaaggatatactctaaaccaataataacagaatgccaagactcaacttttctccagtgcatattgtttaaaccagctcaatatttcctcaccacctacagctctttctctgtaggatgtacacttccaaagatatcatcagccatcatcaacctctatctccacctctatagtccttgcactccccactatgcccctatactatgcacttaaacatcatacccagttttgttgctttctcaaagtttctgtctttaaattcagtgcagaaagatgcttggaaagtagcgtgtgtgggtgtttgtgtgcatgcacrcccatgtatgacataggaagctctg

SEQ ID NO: 682297 - DNA, 622 bp, Homo sapiens
tctcgttctgaaggttgtgctcttaaagatttagcagcagaatgctgaagcctctcttcacacactcacctcttcagtctgtctattattctaaatacgtagrtcccttgtgtcatcctaaatttcttcatgtctttcccaactagatggtaagttccagcagtcaaataatgtgtcttattggtctcaggatccccagcactgagcacatcaacactcagtgggcatgcaataaatctgcataaaatgaaagatgtaaacgaccagctgttgtttgggttgacaagatggccatgagatatgagggtgtcacaaaaaggtttgcttaggaaaaaaaaaaaaaaggaaacatatctttttcctccagcctaccactgcttgttgcatcaaatctctggcaagtcccggagggtaatattcatcctcttgaaaggggactggtgagtcctttaatatctattgctacattggtgtggaatcatttctttaaagattcagaaagtgtaacagaggttttctttggagcatggtttaggaggtgcattttgagggagcagaggcagtggtgtagtctgttgcaaccagccttcccatacagaggggactgagagtgtaaaattgg

SEQ ID NO: 682298 - DNA, 1474 bp, Homo sapiens
taactaaacactagttccaattacataaaataaattagcttttggcatactgaattccttaacagcttcctgcaaattcaataatgtaatttaacttaggatttcagcttttgctcttatatttccattgctatttaccctgcaaccaggaacccagagcaatatcggcttgacttagaatcatgaaagcactgaatgttagtgttagaaaggtcctgagagatccaggtaaaccaatacctttattttacttacttgtgaatccctctgatatattgtcttatctgcagcccagtgatttaacaataccagagtcaggttctaaaagtaaagtaaagcagaaaacttcagtcctaccacagatgccacacaaatgcaactaacaataaaaaattatgaaggtattgaaattgacaaaatgaagtctttatctgataatgtgagtgtgcatgattttaaggcagttcatactctatggcccgccgtacccttttgaagtgggcgtactgggcagtttgtgcgactagagggaatggtcattggttaaccccagatctcaagagaaagagatccaccttgaattggaatcatttcttaagtttctgatatcttcccccaaattacaaacaaatagtcttccagacagactgccttgagtccaaagggttcaggccctcaacagatgttgaccaatttgtttctttgactgctttgaaatgactaattcccaagaagggagattgaggggaaggggatggaaaagcaggcaagaaatctgaacttcaggctttgtctccttgttgtagcattttgttttgacctttcttatgtgacacttttgtgtcagacttcccccactccgggttcttgagaccttatttgtttctaatatggtggcttcagccggccacagtggctcacgcctgtaatcccagcactttgggaggccaaggtaggcagatcacatggtcaagagttcgagaccagcctggccaacatgatgaaaccccgtctctactaagaatacaaaaattagccgggtgtggtggtgcgtgcctgtaatcccagctactggggagggtgaggcaggagaatcgcttgaatccaggaggmggaggctgcagtcagccaagatcgtgccactgcactcagcctgggtgacagagcaagacttcatcttgaaaaataataataaggtggctacacagtgcatgaggcatgacactggcacccatcagtgcttgtcagttggaacagacagaagagaataaagaaggataagcatgaggtccacacctcatgctgtaactagttgctgagattgaaatcattctcctgaattgggatcaatgttttttgttgggggaaaaaatcataaaaccaaagtaatattttcacaactacttttccatagtcttcaaacaacgagccaccatcctctgagctgatcattcctactgttctaagttcttta

SEQ ID NO: 682299 - DNA, 631 bp, Homo sapiens
cagaatggccaaatgttgcagtggctattggctttgccccctttctggcctgcctgaaagagatcgttaaaaactcacttatctgttgacctggctctcagctgcgggatgccttctgctaccaggctcataatggcagctttgaagtccagcacaagtgtgaatttattgttttgtaaagaccagattcctgaacaggtcataaattaccttgttagacaaaggcttctggggaaatgtaatgtgttgaaatccttcagtgggtgattatcctaacacattgctggcagagcaaataactggcacacagacaccaaagtccaacagctgccaaactccggagcagtgcagccaggytaggctttgaaatcttagttaaacatttctcctaggtgagaaagagcaagaatagcatttaaaaaaaaataataaaaaaaaaaataaaagacttcccattcctgatcttgtttaggagaattctgtttttacattccattgcaatatagctaattaccattatatggattttggtggcataattctctttggttgcaagaagattccttcttattgcagactcatcatctttcctgggctcacacctttcctacctgtctaggtgactcccaga

SEQ ID NO: 682300 - DNA, 1286 bp, Homo sapiens
ttataatccatatatatataatatatatatatagaagtcaatatatgtgaagatttagcttagttcctatcacataataagtattgaataaaggttagataacattaactttacttgaattatwtttgcccttcagaagttttacatagtcaaatacattaatcttttcctttattattttattaattattgttttctattgtctagtacctcttcttcttgcattaaagaagttaaagcacctggaaatttgtttatatatgtgtaacttgagatttaatattttcccccaaatgaagagtcaattgtttccatgcatttattaaataatttattcttacagtgttctctaaaagcaccattgtcaaggaagtcttctaggtcaagggaaaacatttctgctataaggattataaatcgtgtatctgtgacatagaagcatactccagataagctgtttcatgtttcttgtgctaacaacctagagggaaaggaaatgaagacatattcctatttttcttgttcacacacctgcctgtgtaaaatgcaagatgataaatctaattggtgtcctaaaagccatttagtagttaaacataatccaggcaaacaaaggcaggggaaagatattgattttgtgtcacacaaatgcaggtggaacagctaagccttaaataatgctcccagggcactttttggtgtgatcagtcaaggctgtatttaatgatgtgagaaaactcgtttctctcaggtcaatggtatgtgcttaacctttaggctttcgcgtggctgcctgccccactggtttatgaagtggaggccgacatgattggggatttagggcagtgatgacttgatctccctgacgcttgctgctcttacccaggaatggtgaacaaatccatctccgtggctgccgcctgggcctttctgagcagcccacacctctctaatttcacatctacctcctgaggcagagagaacgcagtcacctttggaaaacagggtttgtcacatgatcgtgagaaaaaaaaatggtttcatttagcttttaatgccttaaacagcccacaaaaggcaaacatgaagtcttggtgacttttgtttttatttctcagttggcaagtttacactttgtgattttagcattttccaaaggtgttctaagaaatgctagtcctctgagactctgctggaaagaaagggaaggagggaggagagctagctgaggttaaccctgtttgggggatgggatacctcctttggagactcagtgtgagatgtgt

SEQ ID NO: 682301 - DNA, 591 bp, Homo sapiens
ttcaaaataaaaaactatggacacactcctggagagcagcacggaggagggatctatgatggtgtaataattgtgagtttgggctagatatgactgaacaagtaaaggttgccccaggcatctcacagcgggatgcagaaaagcatcctgatgctacccagttgaggaatccaagacatctcctcccctcctatcagggagggcacgaaggggcttcactctacagggagggtggaagcacagcagccttacattgcagctagggtgcagcaagccacagccaaggccagaattctgcagagtgtcccaggaagagaaaagtctaggtagaaatcagccaataacagagcagaagctaaagagcagacaatgcaacttccaagacaaagacttagcagaaaggactctgaagctagaagcagctgtaacaggggggatgagatggtaatggttaggaataaagaagtagaacatgaagaggggcctttcgccatgctgatagtgataaccatttctttactgaggaggaaccagacacgatgtggtaatctgctttatatactttaaatgtaatgggccatarccaggtac

SEQ ID NO: 682302 - DNA, 539 bp, Homo sapiens
tttaattgctcctgggcatgcaagtagaccacatttcccagacttcgttgcagctggctgcataatagttatatgactgaaggagtaaggaggagtgatgtgtgcctcctccagaacagcttcgawaagcaaaacctcacataagcagctctccgcacccctttcctttctcagctgtctggaatttggatcccaaagatggccttggaagccaaggttgagactgaggatttataaagtagaaggcgtctgggtccatgaatacttctctttgggagtgagttgcttgcctatctgaaatacccatcttggacttatgtgaataagaaataaacttctatatgtctggcattatacatttgagggtccatttatctgttagttaattcttttttttacaatccttgaacattaagaatcattttgattcccctcaaaactgcaattcttaattaaaatttctttaaacttacaaaataatgtggaaagaattgtaatttatatgacactcagtcttcctactgcaaaaacattatatt

SEQ ID NO: 682303 - DNA, 593 bp, Homo sapiens
aggttctgaaagtttcttgtctttccccactgattttcacatggagccctcatgtgggatgaatgggtagagccaggaagctggtaaggccagccctccctgccagcatttaggaaacacaaaaccttccccaagtggtgttggcttcttctttagtgattggaaatgtattgtcctttctctaaatcttcctttccatttaggctagagaaatgctctatttattgaactaacattaggtaggccaatttacactgtttccttttcagggataaatctgtgagagcaggaatctggccaaatcsctgtctcacactacgtgaacggcatgtcctaggcagggctgtggcagtgtacgtatcctgctctcagttttggattttgctcaaggacaaaccatgtgcttttgaatggcttctctgccatatgccttagtttactgtttctcttgctgagcactgtatttcaaacacctttttttctgatcagtaaaaatcttttaaggagtgttctctaccagggacccttctggggaacagataatagtctatgccataatctgggcagtggtttcacaggtgtttacaaatgta

SEQ ID NO: 682304 - DNA, 1415 bp, Homo sapiens
ttttccgcattagttattaaccattaatattgttcacctgtgcacggtgctgtgtttagacacagatccccagatacgatgctgggtattcagacttccactagggagacagaggcagatttgagaatctcatctggatgttagcttagtgttgttacctacactgttttttagggacgcctttattgctgtaatgtttttctaagtctctggtggaaaagtcactggcatttgttctagcagcattgattcattgccaagttttaaaaaaggaaataattaagagaatgcaatgacctttagagaaaacaggtcacccatgtaagtcctgctttcaaggtggtgtgctttcttctgcttttagagtttcttttctcttttgggctatgaaccgtacctggaggccaggcaggccttattctggagcagatagtgagtgaggttcctagagtactgcatagcctgagagtgcctcctaagtggatgccctccacacctcctgcacttggccctggccctgggtcctaagctcattgttgatcttcttagatctgggttccttgcattgcaggacctacctcagcctgctcttgtctgcctttgctgatgcccctcaattcacctctttcctgcctgtactgtgatatggtgtgaacttgacttatactgcttgtgaaacctgagtcatgtgctgaaatcctgccccgccaccgcattcctcccttaactggatccttagccttggactccaaggctacagctctgtctcgtggccactcaagccccacccaaaggaggtgctactcaaaagtttgaggcaggagtgatttatygtgaatgacaatgttatagtttctaattctagtgtttagcatggtattattccttatttattttaaaatcttagacaatttatctaaaatgtcaatttttagaaggtatcagcacaattgtggcagccttttttctgtatgtgttatatgtattatttaaaaaagcaggttcattctatgacaggtattggtttcggtattcacaatataaattgtcttttcaagggaaaggatattttctttggaaatgtcattgaatctatgttctctttattgaaattgttctaattgactttgaactgtttctcagacacctggtgcccagtttctggccatagaaactatgtgaggctgagtaattcatgttttgggtcactaccagtcacgaatgcttctctcattccaaggctatgcatatggatgtcacattcccatgtcaatcatctctggaaggtattattcgcccagttttttaagcatgggaaactgaggcttagagtcttaaaaaataagtagctggcagtctctcagcaaataatgatggtgctgcactacagacccagatctgtgactccaaagtca

SEQ ID NO: 682305 - DNA, 1536 bp, Homo sapiens
tttcttttcatggttttgggattttatatcataataagaaaaggcattcccttacctcaagggtataaatgaattcacacatatttttcttctggcacttttgggttttatttttcacatttaaatctttgatactttaggaatttagccaggtataagacttccaacagcacataagttttcccaatagcacatattgactagtccattttccttccttttttgagatgctacatttatcatatacaggggtacatttctggagtactttttattgatgtttgtctatttatgtgccactatgatactgtttcaatctctgaggctttttcactttcttttaacatttaataaggctactccctctcgttgctcttttttcccattattttcccaatctttttatttattttctatataaaccttagaatcacctactccacttataaaaaacaaaacctgttggtctttttattgggtcatattaaaatggtacagtaatgtggatcttatgatgctgaatcttcctttctaagcacatggtgtttctttccacttattatagttgactcctaggtatgtagtatttttctgttgatgatattttgggaattttttgtatattgaaacctctttgtatattatatattaattttatatcctctgtgtgtgtgtgtataaaattttataccctgctacaaataacaaattctttacttgtttgtagtagtttttctttcatcatttcatgttcacttgagctttccaggtatacaatcatatagtttgtaaacagtgatagttttacatctacctatgccatgtttaaacctatatgtttatttctcttgtttggccagtatgtgaagaacaatgttaaataataatagtgatagctggcttccttgttttgctcctgactttggtgagaatgctttgaatatgaataagattattcttaccataaaaatttccctttaggtaataaatttcattctgtgataaaattttctcagtttatttaaaatgtaattctattgataaagaacactagatactctaatatctttaggcactagccactgagggaccactctgagcctgccatgcctccctatctccaagcaactgagataatgacttactgatagttcctgggtgagctgtcgaatcttctgtctcatctcatcatagtctccatacattcgctttctcaccttttccaaagtggctctcacctgtagcccacaaagatactagttagagatcaagccataacattttcatacaagatttctaaaacttttaagaaactctaaagaaagaaggaccccrgccaggtgcggtggctcaagcctgtaatcccagcactttgggaggccgaggcaggcggatcacaaggtcaggagatcgagaccaccctggctgacatggtgaaaccccgtctctactaaaaatacaaaaattagttggggggtgtggtggtgggcacctgtagtcccagctactcgggaggctgaggcagaagaattacgt

SEQ ID NO: 682306 - DNA, 613 bp, Homo sapiens
ttaaaatccttcagtcttgtaatgttgagcataaaataatactttcttaattcgtctcttaattttctaattcctgcttaactttctggttttataccacatggtttgcagttcccagaactgttcatattccttcacattttgataatttgctcttttctatctacacctttggcatccacttaccaacgcttttacctaaccccagtttagttgtcactttgaagaacactagtaaggtcctacatccagactgggtaaggttttctatcctatgtgctccttgatatgatgtgagcacccatgtacagcttatattgatctatatacctatctgtgcatcttatctgttttaaacattgtgagamcttgtgctttttatccttcaagtcttgttaaaatgcctggtgctcattcaatattgaaaaacaaaataaaagagaaaagaaaaaaactggtgatggaaaaggggaggaaggaaaaacaaagcagtggttattaggaactttgatgataatgtctaattatccaaaacagataactgtggatagtatgtagagaattgtgacccttaatttgctttctttatagtagtggatgacagctactgcta

SEQ ID NO: 682307 - DNA, 613 bp, Homo sapiens
ttaaaatccttcagtcttgtaatgttgagcataaaataatactttcttaattcgtctcttaattttctaattcctgcttaactttctggttttataccacatggtttgcagttcccagaactgttcatattccttcacattttgataatttgctcttttctatctacacctttggcatccacttaccaacgcttttacctaaccccagtttagttgtcactttgaagaacactagtaaggtcctacatccagactgggtaaggttttctatcctatgtgctccttgatatgatgtgagcacccatgtacagcttatattgatctatatacctatctgtgcatcttatctgttttaaacattgtgagaccttgtgctttttatccttcaagtcttgttaaaatgcctggtgctcattcaatattgaaaaacaaaataaaagagaaaagaaaaaaactggtgatggaaaaggggaggaaggaaaaacaaagcagtggttattaggaactttgatgataatgtctaattatccaaaayagataactgtggatagtatgtagagaattgtgacccttaatttgctttctttatagtagtggatgacagctactgcta

SEQ ID NO: 682308 - DNA, 657 bp, Homo sapiens
atttacaatattgaaatctctaaggaaaaaactacttataagattataattttaaaaattagacactttaatataacaaactaatcatatattaatataattagttatatttatattaaatatgtcatattgataaattaatacatatttacactcaaaatatataatattaatatgcagtaataatttaaaatctatactgatatttttactataaattgatccaaaaactaaaagcatgtgagtaggacaaaccacctaaataatcaatagaaatgattctctttttctccatatttgttgttattttagctgtcatttttattataatttttrtccacatccattaaattgtggaactttgcaaagacaagataaaagcacttttcagaaagtttttattctcaattataaatgttcccaccaatgcagttatcaaaaaagacaaagaaattcgacatcacatatggccagagaaaatttcttatgccataaagttctactatactttctgaattttactatcatctgaggcatgatgtgtcttacggcaatcagcatccatagcagaacagtgttaatgctttgattcacattttcagtttaattaaaattcttccttgtcttcagacgggtttcctttctatctgaagttaa

SEQ ID NO: 682309 - DNA, 1653 bp, Homo sapiens
atgtagccccagctacccgggaggctgaggtgggaggattccttaagcctaggaattccagactgcagtgaactatgattacaccaccgcactccaatttggatgacagagaaagaccccacttctaaaacaacaacggcaacagaaaacaacctcatagaaatgtattactagttatagattttggtatatttatatctaaatatatgtttagatataaaaatgtttagatataaaaatattttttatatatgtacacatgcacaaccatctggcaatatctataacccattcacatttctccagaaaactatactctaatgcccagatcaaaggggtcagataatacaagggcttaaagaacagtttaagaatgttgaacttcatcttaatgacagtgaaaagccactaaaaggttaaaaagtagttgtgtaagatgactgaatatgagtttggggaatattattgtggctatatggagattgtatggaaggagcacatatatagttataaaagctgtaggaagcccagttaagaggccatcacaagatgccaggaaagaaagatgtgtccctagcggaaggcagctcctgcagagttgaacagacttgaagagaattcagagcaattcagctgcaccccagcctctctgtgctctctgattgcatagagatcattgcttgtgcaattggttaaatcggagaccatcttctcaagctgctttcttccatattacagaaggactggccgagaaattattctccctcttcctctgagaccgttttcagtgaactatagggcagcaactaaagattaagtcagaaacgcatgtctcccattacaacttcatataccagataggatccagtgacataggtcataaatggtaaagaaaaaagcctttaagtctcataaaacactttatattcaaggagtaatatatgttaaatttccttaacttctgagacttcttgcctaaaaaatgaagatcccatacttcataagatactgtattaaatgaaaaaaaaataaatggaatatagcacctggcacaaagtaggtgctaaataagtactaattcccttctttccacttcaaccccttcttagttaacagacaggaagtaacagatgtcttaaaaatatatattgttaatccctaaatatattattaatggcccagaatagagattctaaaaactgcaatccatgcatygattaacagtggggatacattctgagaaataaatcattagggaattttatcattgtgcaagcatcatagagtgtactcagacaaacctagatggtgaagcttgccacacaactaggctacatggtatagtctattgctcctaggctacaaacctggacaatatattactactgaatattgtagacaatggtcacacaatggtaagtgtgtgtatttaaatataaaaaagtacagtaaaaatatggtatcataattttatgagaccatcatcatattataatcttataggaccaccttcatatatgtgatctgtcactgaccaaaatgtcatatggtttatgactgtagatcttttcagcttgccttggaagtacctaatttatcatgctaaatagatttagattatttgttgtggccatatataaagttaatattctt

SEQ ID NO: 682310 - DNA, 1653 bp, Homo sapiens
atgtagccccagctacccgggaggctgaggtgggaggattccttaagcctaggaattccagactgcagtgaactatgattacaccaccgcactccaatttggatgacagagaaagaccccacttctaaaacaacaacggcaacagaaaacaacctcatagaaatgtattactagttatagattttggtatatttatatctaaatatatgtttagatataaaaatgtttagatataaaaatattttttatatatgtacacatgcacaaccatctggcaatatctataacccattcacatttctccagaaaactatactctaatgcccagatcaaaggggtcagataatacaagggcttaaagaacagtttaagaatgttgaacttcatcttaatgacagtgaaaagccactaaaaggttaaaaagtagttgtgtaagatgactgaatatgagtttggggaatattattgtggctatatggagattgtatggaaggagcacatatatagttataaaagctgtaggaagcccagttaagaggccatcacaagatgccaggaaagaaagatgtgtccctagcggaaggcagctcctgcagagttgaacagacttgaagagaattcagagcaattcagctgcaccccagcctctctgtgctctctgattgcatagagatcattgcttgtgcaattggttaaatcggagaccatcttctcaagctgctttcttccatattacagaaggactggccgagaaattattctccctcttcctctgagaccgttttcagtgaactatagggcagcaactaaagattaagtcagaaacgcatgtctcccattacaacttcatataccagataggatccagtgacataggtcataaatggtaaagaaaaaagcctttaagtctcataaaacactttatattcaaggagtaatatatgttaaatttccttaacttctgagacttcttgcctaaaaaatgaagatcccatacttcataagatactgtattaaatgaaaaaaaaataaatggaatatagcacctggcacaaagtaggtgctaaataagtactaattcccttctttccacttcaaccccttcttagttaacagacaggaagtaacagatgtcttaaaaatatatattgttaatccctaaatatattattaatggcccagaatagagattctaaaaactgcaatccatgcatcgattaacagtggggatacattctgagaaataaatcattagggaattttatcattgtgcaagcatcatagagtgtactcagacaaacctagatggtgaagcttgccacacaactaggctacatggtatagtctattgctcctaggctacaaacctggacaatatattactactgaatattgtagacaatggtcacacaatggtaagtgtgtgtatytaaatataaaaaagtacagtaaaaatatggtatcataattttatgagaccatcatcatattataatcttataggaccaccttcatatatgtgatctgtcactgaccaaaatgtcatatggtttatgactgtagatcttttcagcttgccttggaagtacctaatttatcatgctaaatagatttagattatttgttgtggccatatataaagttaatattctt

SEQ ID NO: 682311 - DNA, 1884 bp, Homo sapiens
tataaattaattcttatcataggtatgtataggataaaaatatagtgtttatagggttaatactatctatggtttcagacacgcttggggctcttggaatgtctccccttcagatcagagggactaccgtaaatttttattagaagggagccatggtccatttacatgttgtctatggctgcttttgtgctacaatggcagagttgaatagttgtgacagacatcatatggcccacaaagcctaaaatgtttattatttggccctttatttaaaacatttttccgacttcactttggaggaaagaataaatcaggtattgctggacaactagctaactcagccataccaaagtggtaaaattgattggaaaagggggtgggctttgaaaggggttkcaaatgagctgtatttgtttaaaagcctttaatatagtagcattgtttatccatttatgcattgaaaattaccccaaaacttagtggtttaaaacaataaaagtgtattattcagtttctgtgagtcaagaattcaagagtggcttatttgggtggccctggctcagattctctcataaagttgcagttaggatgttggcatgggataaagtctcatgtgaagggttgactggggctggagaagcaacttccagattgatcattcacgtggaagctagcaggaggcatcaggtgcttgccacatgggcttgtcctgcatggctgctagcttcttccacagtgaattacgagacagagagacagagtaagcagtaagccacagtgccttttatatcatcttcaaagtctcatgttgtcactttcattatattattttcattagaagaaattcattaagcctactccagcccacactcaaggtaaggagaattatcttccacctactgaagggaagaatgtcaaataatttgggggcatttaaaaatcatcacaacagtatttgagattgttttaaaaagcagataatttgtcttcagataatgctacagacatgaggctagtgattatgaaataagcctaagttatttgaccaggagaaaaggatagaggcttatgttagagatggcaatcaggttttagctctctcacctaccacaattaattggtagtagttgcttagagtactatgttgataaggattctgattagtagctatcaaatacacatattttctatcagagtaaaaaaacaaaagttcaaataatgagaatttggagaaaaagcaatttatgaagcatgtcaaagtctccagaaagcttataaaaccatggctcttgggcagcttgtccaggatgtttctctggagtcctggtttcccaggagagattccctttctccttccctcccttccttccatcaaaccatccttccttcaacaagcacttattgagtacctatgttttagacataggtattctcagctgggtgcagtggctcacgtttgtaatctcagtgctttgggaggccaacgtgggaggattccttgaggccaggagtctgagaatagcttgggcaatatgatgagaccccatctctaaaaataaataaataaatttaaatttaaaataagtcataggtactctggctgccagagatagaataagaaactagataaatatctccctctcatggtaaaatacaaatttctgtcttctgtaaaatgtctgaaattttattttccttttaagaagccatacatattatttctgattaccatctcattacactagatattttagattaacattaaataatagtggtgataattcttgcttccaatccctctattgcagggtttaccagaatatgcatcatgtaacagcatttccactgggtgttaatagacctcatttgaatagaagggtttca

SEQ ID NO: 682312 - DNA, 2284 bp, Homo sapiens
aaaaaaacaggctctcttaggtgaaagaccagaattagcagtttttcaaatgtgatccagaaacctcacatcttaaagatgctataaaacctaatataaaaaaagcaaacaaaaagaaacctaaagcaataattatcattccagagtgtttttgtctctactcttggtagcaagcctcattctttaaaattatttaattcctggggcagatttccttcaatctgggctcaaaatttagcaaagcctgtactcaaaacactaaatctctgttccccttcactcacccaaattagacctacagaaatgctgaacattgctttgaaagtctctgccagctttcttttcaagaaagtcaaatcgagatccaggagttgctctccaagatcttacaaataggtaaggttacgatggattcattgaactatgacaacagctaagaaaaattaaaattggcggtttttgatcatacaaagggaattcgtaggttcataacagtactaaccatttactgaatgcctattacaaatgattctacattactaaacagtgcattctgactacaggctactcagaaaagcataaagcaaaaaattaaaatgatggataaacagcccattgtcaaaagaccatctctatttccttttaatattttatgttgtgtgtgagtcacatgacagttctttttattttatgtaaatgtaaagattagaattaagctattaaaatacgggacatgaagaattttcccatgtaattaagtatactttgaaaatgtgatttttaagttgctgcccactggccccctgtttaaccaacataacatgtggggccctttctattgtgtctgatttgtcagttatagacaaggaggcagagggggaggtrgaggaggacggttagccctaaggcagcaggtactatactgagaatttacatttactatttcatttcatcatcataatccaataaggcaacaatgaaaattaaccccttttatgcattaggaaaatacaatcagagagtttacataactcaccacagataacccactagtaagtatcacattggtgttttaaaagagtgcaacgagacacatgaaaactgaaacatggctcccactctaggtttctgaaaaaggttttctagcacacaccaggaacagcgtagaatcagcagaaccttctagctatacagtggtggaaagaacaggttcccataagcagtgctaaaaacaaatgaatgcttctggtagacattcatcattattttaatggactaaataactccatctaaaaactttattcattcagtaacttgggagtattttttcaactaattgattctagcagcctcgtcagatataaatctgggtaaaagtaagacccttgcctcccaggagagtaacagctatgtggaaacttttcctggccacagcattgctaacttggctgagaacatgagaaaaagcccggcagtgaaaggcagcctttgctcttgttgaggccccactgaagcagccagtaaggaataaggaatatccaggtatctccgggggaaatgtgatacatgaaaattaggaatgcctacaactttctgtgcccctcaccaaagccaaccagaagtcaacagattaatgtattaagaatctcactctggtcgtcccagttaccccaaaatcaacaaagccaacctgaacaggccgcgaaggaagcatagcagtagaaaggagggtacagaatggagcagaaaggcagtgcggaagcagcggaggcccaggagaagggagcacctgagtagcgaggcagaccggcagcaccagaaatcagctatgtatagggttaaaaaacaaacaacaaacaaatattaactataatgtaaggtagagttcatctcctcatagaagggaggtatgaacaaacatgggaaggttaaaagctaaaattaaccctgtgaggtcggatcagaattggaattggtggtattagtgtgacctaatggttgtcaacacattaagacagacttagaaatacacacagatgtaaatgtgtgcaaacctcgcagctttgtctactaagaggtcccagaaacagtgacatccaagcaggcataaggatttcttagcatctgatgttggtttctaaatgccattatctactaaaaggaaacagacagctggagaaagagacaattccagggctgagacaaagaaagaacaaaataggcctatgatttcagcaaagaaagaagtgcttcaagaataatggagacacatcaaaaggacaca

SEQ ID NO: 682313 - DNA, 2284 bp, Homo sapiens
aaaaaaacaggctctcttaggtgaaagaccagaattagcagtttttcaaatgtgatccagaaacctcacatcttaaagatgctataaaacctaatataaaaaaagcaaacaaaaagaaacctaaagcaataattatcattccagagtgtttttgtctctactcttggtagcaagcctcattctttaaaattatttaattcctggggcagatttccttcaatctgggctcaaaatttagcaaagcctgtactcaaaacactaaatctctgttccccttcactcacccaaattagacctacagaaatgctgaacattgctttgaaagtctctgccagctttcttttcaagaaagtcaaatcgagatccaggagttgctctccaagatcttacaaataggtaaggttacgatggattcattgaactatgacaacagctaagaaaaattaaaattggcggtttttgatcatacaaagggaattcgtaggttcataacagtactaaccatttactgaatgcctattacaaatgattctacattactaaacagtgcattctgactacaggctactcagaaaagcataaagcaaaaaattaaaatgatggataaacagcccattgtcaaaagaccatctctatttccttttaatattttatgttgtgtgtgagtcacatgacagttctttttattttatgtaaatgtaaagattagaattaagctattaaaatacgggacatgaagaattttcccatgtaattaagtatactttgaaaatgtgatttttaagttgctgcccactggccccctgtttaaccaacataacatgtggggccctttctattgtgtctgatttgtcagttatagacaaggaggcagagggggaggtagaggaggacggttagccctaaggcagcaggtactatactgagaatttacatttactatttcatttcatcatcataatccaataaggcaacaatgaaaattaaccccttttatgcattaggaaaatacaatcagagagtttacataactcaccacagataacccactagtaagtatcacattggtgttttaaaagagtgcaacgagacacatgaaaactgaaacatggctcccactctaggtttctgaaaaaggttttctagcacacaccaggaacagcgtagaatcagcagaaccttctagctatacagtggtggaaagaacaggttcccataagcagtgctaaaaacaaatgaatgcttctggtagacattcatcattattttaatggactaaataactccatctaaaaactttattcattcagtaacttgggagtattttttcaactaattgattctagcagcctcgtcagatataaatctgggtaaaartaagacccttgcctcccaggagagtaacagctatgtggaaacttttcctggccacagcattgctaacttggctgagaacatgagaaaaagcccggcagtgaaaggcagcctttgctcttgttgaggccccactgaagcagccagtaaggaataaggaatatccaggtatctccgggggaaatgtgatacatgaaaattaggaatgcctacaactttctgtgcccctcaccaaagccaaccagaagtcaacagattaatgtattaagaatctcactctggtcgtcccagttaccccaaaatcaacaaagccaacctgaacaggccgcgaaggaagcatagcagtagaaaggagggtacagaatggagcagaaaggcagtgcggaagcagcggaggcccaggagaagggagcacctgagtagcgaggcagaccggcagcaccagaaatcagctatgtatagggttaaaaaacaaacaacaaacaaatattaactataatgtaaggtagagttcatctcctcatagaagggaggtatgaacaaacatgggaaggttaaaagctaaaattaaccctgtgaggtcggatcagaattggaattggtggtattagtgtgacctaatggttgtcaacacattaagacagacttagaaatacacacagatgtaaatgtgtgcaaacctcgcagctttgtctactaagaggtcccagaaacagtgacatccaagcaggcataaggatttcttagcatctgatgttggtttctaaatgccattatctactaaaaggaaacagacagctggagaaagagacaattccagggctgagacaaagaaagaacaaaataggcctatgatttcagcaaagaaagaagtgcttcaagaataatggagacacatcaaaaggacaca

SEQ ID NO: 682314 - DNA, 615 bp, Homo sapiens
ttacactccagacattgatttatgccaaacttgtatttctagctaacaatgattatatccaaaatatttgttattatttatctacaccaactccagcagttggattcttttgacaaaactgttttgtttttaatcacttcttcagatattctagaaacatacaatgagtaaagaaaaataaacaatactgagatccacattctgggttctctcactagttaagagctctgtcacagtggtctctgaacacgcccaaytcaaaatactttacagaaatttaagttgcatgtcttaggaatcgacaatgttatggatgttaaatctacaaaagtcaatagcaaataagtaagagaggagagctgcatatataaaagatattttctttaatctgatgaagtgcctcatagattctgtaagacgtggagaaactgctccacaattgacgtgtctttgtgaccctcttccagcttcaaccagagcagcctggcttttattgatttcacacagttatgttccacgtaagttttaaaattgtttttcgtttcagctaaaggaaaaagagttaatgctaagaaaaccaacaataaagaaattagtttgaaaataaagaagaag

SEQ ID NO: 682315 - DNA, 615 bp, Homo sapiens
ttacactccagacattgatttatgccaaacttgtatttctagctaacaatgattatatccaaaatatttgttattatttatctacaccaactccagcagttggattcttttgacaaaactgttttgtttttaatcacttcttcagatattctagaaacatacaatgagtaaagaaaaataaacaatactgagatccacattctgggttctctcactagttaagagctctgtcacagtggtctctgaacacgcccaactcaaaatactttacagaaatttaagttgcatgtcttaggaatcgacaatgttatggatgttaaatctacaaaagtcaatagcaaataartaagagaggagagctgcatatataaaagatattttctttaatctgatgaagtgcctcatagattctgtaagacgtggagaaactgctccacaattgacgtgtctttgtgaccctcttccagcttcaaccagagcagcctggcttttattgatttcacacagttatgttccacgtaagttttaaaattgtttttcgtttcagctaaaggaaaaagagttaatgctaagaaaaccaacaataaagaaattagtttgaaaataaagaagaag

SEQ ID NO: 682316 - DNA, 615 bp, Homo sapiens
ttacactccagacattgatttatgccaaacttgtatttctagctaacaatgattatatccaaaatatttgttattatttatctacaccaactccagcagttggattcttttgacaaaactgttttgtttttaatcacttcttcagatattctagaaacatacaatgagtaaagaaaaataaacaatactgagatccacattctgggttctctcactagttaagagctctgtcacagtggtctctgaacacgcccaactcaaaatactttacagaaatttaagttgcatgtcttaggaatcgacaatgttatggatgttaaatctacaaaagtcaatagcaaataagtaagagaggagagctgcatatataaaagatattttctttaatctgatgaagtgcctcatagattctgtaagacgtggagaaactgctccacaattgacgtgtctttgtgaccctcttccagcttcaaccagagcagcctggcttttattgatttcacacagttatgtyccacgtaagttttaaaattgtttttcgtttcagctaaaggaaaaagagttaatgctaagaaaaccaacaataaagaaattagtttgaaaataaagaagaag

SEQ ID NO: 682317 - DNA, 481 bp, Homo sapiens
aacattgtatccagcttacagttgtgtcatcatactctcacaaatactgttccgacctgagcagcaaaagatgggtgtgaagggtggagtggaatagataatactgacatgggacaaaataggtaaagaaaaactaataataatccaagtagaaaccttccagcaacaatcctagcagacagaaaggataaataattattttacaaagttttgataaacaacttcatatctaattttatgttgaaggtttatccttttatctatcacacttttattttttaattgtgaactgttctttttcttagcttctttcttgaaaaaagttaagacttggaaaagttgaaaagacaatacatgaaatacttgtaccctctccaaaccggctcaccactaacgttttgggatgcctgcttccttgctctctctcactaagaatgtattaataygtactttttctttattttaggtcatcttaaagtaa

SEQ ID NO: 682318 - DNA, 1498 bp, Homo sapiens
ggaaaagagaaacaatgccccctcgatatctgtttaatctggtgattatgtatcattgtaacagtcaagatttaactaagaagaaactaacgacactatgtacctcaaagagaggaaatgtaacatgaaaaatcagttacccaagtgatggagaatgggaagctaagcagyaaatggcaaggcaggaggccactaccaccccacagctggagggataaaagaaggagacacggtctccacagcccaggaagtgggaccacatagtagacctggaactttggcagccatcctctgcaaggggggctcagcagagacagaagacgtgtgccagaagctagagctacagaagaggagaagtggtcactgacagtgagattgcccaaggtagagaaagacacaggggaatactttggtttctctcttcctctcactcttgtcttccaccagtgcctccccttcctcaccataagcaagttggcaagacatctggaggacgtagtttcccaccttacagagctaagtaacagaagggtagaaatagatctgacaccaaacaggcaaatgaatgacactatcatttaacacatttcatcacatctaggatgccatcaattataagactcatcctgatttaagagatgttattatttttcaaaagccatcttagaattgatgaaatatggtatacctgcagagacaggatcagatggtacaatgcttcacggcctatctattgttccagacatgtggggttttctttgcataagactgtcgtcaaatcccgagtctacagaatcacacaccgaccacttagaaggagcacagagctgccaggtgtgcttctctgcaggttcccagttgatctcccttcccccagcccacctggtacatcatggccagccacattttcatgttcattataccaccctggacataaatcaaatttattttattccttgatgtcctaccaaattctataatggatttcagtcttttgtacagaaatgcatggtgtgcctcaaaagaaaagtaatcactgaggcagaggaaggagaaatacagacaacagaaaggtaaagctaaaaatgaatgagcacacaaaactcacctcacacctcctgacaagggctagtggtgggcacatacaccttgtggctgataagccctcccaagagtggccagcaatattcttggtgtttgatgactgtggagacataggagacatcacaatggggcaaatgttctggtggctgtacccctgccaaggggcaacaatgtatccaggccacaaatcaagcaggagcagggatttgctctgactggcctcctgtatgagagttggcccctagtttctccttttgaaggagagcaagcagccaggcaccctggctaagccctgtgttgttgagctctgacttcatctgcaggatggatcaatatcaaaccgggggcctcacagctgctttcacacaggcagtaactcagcaggaaaagagaa

SEQ ID NO: 682319 - DNA, 628 bp, Homo sapiens
aaacccctgcccctgacatatgcttacccaatgcctacccacccatcaacatcccttttactttctccataagtctttcctgacctctattgttgccaacttcttcctttcctgcaaggcttcggggggtctgtgatgcacaatctatgattttcccataagtcaccaagttctgcaatagtttgtgtgatgtgtgatgtgcagtgtttgccctagacagagtgtgaactctttgataattggaacttgcttttatctttttgttcccctcacagagaataayaggaggctgagaaatagtaattggctgaaaaggctagagaacaggacctagtgcatgtctggaagggctaactctcattctaaccattctcctctgaccaatactccctctggcctactgcttgtttctttcccaaatctcagagcatgatcctctgtcctacacagtgccaggatcttcagctcagtgctcttccccagctcaggcctccccatggtctaccctcaaaacctgtctttcccagggaaccatttccacagggtccaattagtcatgggttagataacagctaataaaacaatcatcgatttcaagctgttatttgaatatcatagcttcagttac

SEQ ID NO: 682320 - DNA, 979 bp, Homo sapiens
atatcttgaggcaaggctctggagataccaggagagtcagaatgagcctctagcactggtctttgagccctgaggactagagtcagacaaggaaacacaggcatgcaggaaagagaggcaagtcactcagaagtaaccagcctgggaaggttccttatggaaggccaaatcttgagtaacagtgaaaattgggctgaggaaggtgacctactagcttgatgcccagagaatccaagagaggtaaagggcacattccggtccaagaaccacaggcgtttcaggatggcagcaggtcagagtacactttctgatgcattgctgagggctttttggcatttgtgcttcagttggaaaaatgactctgttataccactagaagacacctgctacttacccaaagatgacttagaacaatccaccataaaaattccacactacctttgcccctgcaggaagttctgcagtgtgcaatctggaatattcaaggatggtttttgaatctgtgggagagagaatgaggtgactgctctaagcgagaacattggtttccatggtgagagcaaggtccgtttccctcacctcacctgcatgcccttttaaacagccttagacactcatactgtgctcttctgtgggcaggaccacaagggctcctgggtaactcaaagatgcaaacagctcagcttccttgtggtccctagacctgctttcaaaaccactgggaagactatctgacaaatagggggcactgggtatagtgacctttatattctcatcccagtgccacaccctctagctggaggtcttggcaagttcatttaccctctcatagaatttgtttcttcatctgtgaaatgggstaacactggctctgcatgtgttgtaagagttagagattgcccatgtaatgggattagcaacagtgcctgtgacatactaaagagggactccatacactgaaattactacaattacacca

SEQ ID NO: 682321 - DNA, 1084 bp, Homo sapiens
cacacctgtaatccaagcactgtggtaggctgaggagggcagatcacaaggtcaggagatcaagaccatcytggctaacacagtgaaagcccatctgtactaaaaatacaaaaaattagccgggtgtggtggtgggcacctgtagtcccagctacttgagaggctgaggcaggagaatggtgtgaacctgggaggcggaggttgcggtgagctgagatcgcaccactgcactccagcctgggcgacagagttagactccgtctcaaaaaaaaaaaaaaaaaaaattcattctgaaatgcgatagatgttgaagctcttctggcagatggttataaagaggaatatataatcattctattgagaaaatataatcaataatgtgaatacctaaggtagtttattttacatatatatctcggtatttatttatttttgagacagagcctcactcctgtcacccagggtggagtggagtggcacgatcatggctcattgcagcctcaacttcttgggcttaggtgcttatctcatctcatcgcagccacctgagtagctgcgactacaggtgtgcgccaccatgcatggctaattttttgtatttttagtagaggtttccccatgttgtccaggctggtctgaaactcctggactcaagtgatctgcccgcctcggcctcccaaagagctgggattacaggtgtgagccactgtgttggccttatgttttataatttttaaatgatactttttattctattacaaaacatatataattgtaaaaaacttgtaaaatataaaagaggacaaagacaatagaaaaattatttacaatataattcccaagtaaacactgattaccttttttttttttttagagcctgttgctcaggctggagtgcagtggcaccatcatagttcactgtaacctcatacatctcatacattttgatattactacttctggttttatacataatgtgttcactttgaagcaagagagtataattttataacgattattttcatttaatgatcatgatctcattgcaattattgatcatttagtttattcctgaacattttgt

SEQ ID NO: 682322 - DNA, 3028 bp, Homo sapiens
cacaggaaggccccagaattgcctgccgaatagaacagtgatagtgctgaatttggttcctcctttaacctgtgtgaccccagacgtttgttttctatgaagcctcaaaacatggttatgtttcctaatttacaacgaacacatggaaacccatgttttgaaaacgggggtggggaggatgaactgaaggcagcctcttcagccaagttccaaaggccaggtggcccactgtgaaccttgtttaaccacacagaacatatgaatagctacaacaagggatctaacagttaccagaatgttttcagaaaggtgacttcagaagtgccaagcttcaggaagacctggactgagaagggatcagacaactttaggaaagcaggyaccaaacagcccttttacagtttacacacaggccttggtgtcagaaaaatactggtttgagtactggttatgcatcagagatgccactctggacaagctccttatgctctctgggactctgctttctcatctaaaaaatggggatcacctgaggtcaggagtttgagaccagcctggccaacatggcaaaaccccatgcctgctaaaaatacaaaaattagatgggtgtggtggctcgcacctgtacttgcagctacttgggaagcagaggcaggagaattgcttgaacttgggaggcagaggttgcagtgagctgagatcgcaccactgcactccagcctgggcaacagagtgagactctgtctcaaaaaacggggcgggggggggtggataataatagtgcctacctcaagaggttgctgtgaacaccagaagaagcaatacacaccaagtgcctacagatagtaagcacttggtaaaaatgtaactgccattaacaataaatatgatgctcacagggtcagtggaaaaagtagtggaaagtaggagtggtgggaacagaataggagggaacaaagcacctctgagtagacctttctgtatagctccgactcttattatgtttcaccgtaataattcattaaaactaggataggaaggctgagggtgtttttggaatacaaacactaatgaaccaaactgcattataaatagtggccacactgaaagggatgaagaagaaaataactaattttggaaaacagtattttgactggatactgtaaggcaagcttgtccaacctgcagcccaggatggctttgcatgtggcccaaaaccaattagtaaactttcttaaaacattatgaaatttttttgtgatttttttttttagctcatcagctattgttagtgttagtgtatttttatgtgtggcccaagacaattcttctttttccagtgtgacccagggaagccaaaagtttggccacccctgctgtaaggcttaggacaaaaatatttctccacaaacaatggactccagttaatcaatctgtcacaggcatatggaactactttatgatactagggtcaaacaaataagtgaataaagtgtacataacaagagccacacttcccactgttgaaaaggctaaaaagaaggaagagggggaggctaggatgaaatctgtgcttggattaaagcggaaacattcgttatcaactcatgtttattttaatatgtatacagacagatacagaaacagatgtagatgtgtgtatatgtgtggttagtatgcatgttttatttcctaatcctatccactgggaggacctacaaaaaatttacaaattttttatatgacactccaatagaaatcggcatgcctagtaccacatcctggtttctaacagcattctccaatatcagaaccagggctccttgaagtaatggctgattctgggtcagggtagagaaaacacaagatgagccttgtagtgccagagtgtattgtagtgccagaaaatagacacactcaaaaaagggtagtggcataacaagaggacacggggcgatcggaagatgcggggcaaaaagttccaggcagaggaaaaaatttccaagtttgacagagggcaaaaatttccagccacatgaaaaataatcaaacctttgacttatgttcagagctctcagatattgccatcattaaaggaacagaaaaaaatgttgggaaaggaagttctactgaaaagctaccaagtttgaatgtcacttcactcatgaatcatgatgagaaagtccattatgaagtacatccatattgtgtaaagagaaaacttgaaactttctttctttctgtttgtttgtttgtttgtttttgagacagagcctcactctgttgcgcaggctggagtacagtgaaacaattttggctcactgcaacctccacctcccgagttctagagattctcctgcctcagcctcctgagtaactgggattacaggcacccaccaccacacctgggtaatttttgtgtgtttttttttttagtacagatgaggtttcatcattttggccaggctcgtctccaactcctaacctcaggtgatcttcctgcctcagcctcccaaagtgctggggttataggcataagccatctcacctagctgatttatttctattataggttgaattacatacatttctgatgctatgccactgcactccactgcactccataaccttaaaaaaatggcaatttcatatgtattagcctaacacattacctagggtctccagtgccatgttcagtagatacagcgatagaaggtacccttgtctatgtcctaactttgacgaaaagcacttctaaaattttactattaagtatgataattgctttacattaaggaagatagggccgggtgtggtggcgcacaggtggaacctcagcactttggaaggctgtggggaggattgcttgagctggggaggtggaggttgcagtgagccaagatgttgacactacaccccagcctgggtgacagtgagaccttgtcttaaaaaaaaaggaagctagcttgctaatagtgcattatctgatgttgactctgcccttgcattattgtaataaaacctaatt

SEQ ID NO: 682323 - DNA, 592 bp, Homo sapiens
ctattgattattttcctcatagacattcctttaacaatgtaaagcttctgtatttgggttttgtttctggtagggggagcaaaattgtgaaagggacacaagaaaatgtcaatagtttatatgaaagaaatgcaaattttatgatttaaaataacagaagacatgctatcacggggaagggggcatctgtcactatagctctaaaattatatgtctctgatgttcagttaaatggaatatttgtgcttcaggaaactttaatttgggttaaacctgtggccatattatcaayatatatgagccttccttattggcttctggtggtgattaaatgagaaaggtaagggataaagttctctccagattcatttaaacgactgtctcaaaaactgctctccagagcactactccaggaagagatcagggcgttttccacagaaaaaaaactgatttggtgatcagaaaagtatagaaaagcccacttaacatatctccttcctaaagattcacaatgaacattattatttaagagctttttgaagtgcaaatccatgagctttttaaccctgagcaattgctaccaagctaactc

SEQ ID NO: 682324 - DNA, 1399 bp, Homo sapiens
tttatttatatttttaaaaatttatatgtatatatgtgtgataaaaaagaatgattattattagtgctctaaaggtggccagattagtggtagagtgaagagatagaaaagtgtgtgaatcagaaattaatcttattttacatctcgggtggaaaatatctgcttctgtagtcagtggcttctgaaagcctccaaggaatccttggtcaggaagcagtgaagtatgtcttttatgtgaatctgaagatcaaaaccttgaattttcctgatacgtcagtcattcacagtacctggtgagatctttttcaytgaggctcaaggacagcttatatctgacaccttcacagtcttgccagggtcgcaccgttggcgggcagtgtgtgccttggaaacattgtctgcaatgcatcttgcagtgagcccaccaatgtcaggccatcagtctctgctcttgtgaaaaatattgtgaaacatctttgctaaaattcgattttcagaatagccaacttcttagataatcttaatgcatatcaaggctttttaattgtccatttattttagagaggtttttggagatgtcaggccatttcttggtttctgaagcaggttgaagatattgacacatctaaaatcatgtacctactggccaggtgcggtggctcacacctgtaatcccagcactttgggaggctgaggtgggcagatcacaaggtcaggagatcgagaccatcctggctaacacagtgaaacccatctctactaaaaatacaaaacaaaattagctgggcgtggtggtgggcgcctatagtcccagctactcgggaggctgaggcaggagaatggcgtgaacctaggaggcagagcttgcagtgagcggagatcaggccactgcactccagcctgggcaacagggagagactccatctcaaaaaaataaataaataaataaaataaaataaaatcatgtatctactatcaataaaagtgtgtgtgtgtgtgtgtgtgtgtgtttcaggaggtctggaaagtggtaaggacatttttgtgtgttgatagattatttaacgattctccttcagtcagttgttttctgtattcagttacttaattctcatccatatattctggtcttacctacgaaatctgagaaaaggacaggttctggaaagatttcttaagatatagacatattcagtaaagaaacagacttgggatgaccaggctgaattgttaataagacatggaatggctagcttaagagcaaatatacagaagttaatacagaggggggataataggattggctttattactagggtaatataccagggatatgagttgatgtctcagtttatgtagtttacttgttttttattgttttctttaaatctcttggtgg

SEQ ID NO: 682325 - DNA, 1399 bp, Homo sapiens
tttatttatatttttaaaaatttatatgtatatatgtgtgataaaaaagaatgattattattagtgctctaaaggtggccagattagtggtagagtgaagagatagaaaagtgtgtgaatcagaaattaatcttattttacatctcgggtggaaaatatctgcttctgtagtcagtggcttctgaaagcctccaaggaatccttggtcaggaagcagtgaagtatgtcttttatgtgaatctgaagatcaaaaccttgaattttcctgatacgtcagtcattcacagtacctggtgagatctttttcattgaggctcaaggacagcttatatctgacaccttcacagtcttgccagggtcgcaccgttggcgggcagtgtgtgccttggaaacattgtctgcaatgcatcttgcagtragcccaccaatgtcaggccatcagtctctgctcttgtgaaaaatattgtgaaacatctttgctaaaattcgattttcagaatagccaacttcttagataatcttaatgcatatcaaggctttttaattgtccatttattttagagaggtttttggagatgtcaggccatttcttggtttctgaagcaggttgaagatattgacacatctaaaatcatgtacctactggccaggtgcggtggctcacacctgtaatcccagcactttgggaggctgaggtgggcagatcacaaggtcaggagatcgagaccatcctggctaacacagtgaaacccatctctactaaaaatacaaaacaaaattagctgggcgtggtggtgggcgcctatagtcccagctactcgggaggctgaggcaggagaatggcgtgaacctaggaggcagagcttgcagtgagcggagatcaggccactgcactccagcctgggcaacagggagagactccatctcaaaaaaataaataaataaataaaataaaataaaatcatgtatctactatcaataaaagtgtgtgtgtgtgtgtgtgtgtgtgtttcaggaggtctggaaagtggtaaggacatttttgtgtgttgatagattatttaacgattctccttcagtcagttgttttctgtattcagttacttaattctcatccatatattctggtcttacctacgaaatctgagaaaaggacaggttctggaaagatttcttaagatatagacatattcagtaaagaaacagacttgggatgaccaggctgaattgttaataagacatggaatggctagcttaagagcaaatatacagaagttaatacagaggggggataataggattggctttattactagggtaatataccagggatatgagttgatgtctcagtttatgtagtttacttgttttttattgttttctttaaatctcttggtgg

SEQ ID NO: 682326 - DNA, 1399 bp, Homo sapiens
tttatttatatttttaaaaatttatatgtatatatgtgtgataaaaaagaatgattattattagtgctctaaaggtggccagattagtggtagagtgaagagatagaaaagtgtgtgaatcagaaattaatcttattttacatctcgggtggaaaatatctgcttctgtagtcagtggcttctgaaagcctccaaggaatccttggtcaggaagcagtgaagtatgtcttttatgtgaatctgaagatcaaaaccttgaattttcctgatacgtcagtcattcacagtacctggtgagatctttttcattgaggctcaaggacagcttatatctgacaccttcacagtcttgccagggtcgcaccgttggcgggcagtgtgtgccttggaaacattgtctgcaatgcatcttgcagtgagcccaccaatgtcaggccatcagtctctgctcttgtgaaaaatattgtgaaacatctttgctaaaattcgattttcagaatagccaacttcttagataatcttaatgcatatcaaggctttttaattgtccatttattttagagaggtttttggagatgtcaggccatttcttggtttctgaagcaggttgaagatattgacacatctaaaatcatgtacctactggccaggtgcggtggctcacacctgtaatcccagcactttgggaggctgaggtgggcagatcacaaggtcaggagatcgagaccatcctggctaacacagtgaaacccatctctactaaaaatacaaaacaaaattagctgggcgtggtggtgggcgcctatagtcccagctactcgggaggctgaggcaggagaatggcgtgaacctaggaggcagagcttgcagtgagcggagatcaggccactgcactccagcctgggcaacagggagagactccatctcaaaaaaataaataaataaatwaaataaaataaaatcatgtatctactatcaataaaagtgtgtgtgtgtgtgtgtgtgtgtgtttcaggaggtctggaaagtggtaaggacatttttgtgtgttgatagattatttaacgattctccttcagtcagttgttttctgtattcagttacttaattctcatccatatattctggtcttacctacgaaatctgagaaaaggacaggttctggaaagatttcttaagatatagacatattcagtaaagaaacagacttgggatgaccaggctgaattgttaataagacatggaatggctagcttaagagcaaatatacagaagttaatacagaggggggataataggattggctttattactagggtaatataccagggatatgagttgatgtctcagtttatgtagtttacttgttttttattgttttctttaaatctcttggtgg

SEQ ID NO: 682327 - DNA, 585 bp, Homo sapiens
tgaaattttataagaacagtttataataacaagaaaatcaaatttctagaaataaacttaatgaggaagaaatgctgtgttctgctatgtttatggattaaaagtttcaacatgtaaagctatcagttctaaaatttatctataaaaccaatcamattctaatctaaattctagcaagttttctgttatttcttttgtagataataacaagaaattttttttttttttgttacagatgacgttcttgctctatcactgaggctggagtgcagtagcgcaattgtagcttattgcagacttgaaccccctaggctcaatcaatcctctcatgtaggtgagattataggcacaagccaccaggcctggctaagaactttcaaatgtttatagagtactgatgaagggtcccaagtaaccaagactaatcttgaagaagaaaacaaaattgaaatcttacaacatcaaatactaagacttaatattaaaccacatgacacttaaaaatggattacagactaatggaataatacataatttagatatagatgatatacacaaggttgttttatgatatgctgtgacata

SEQ ID NO: 682328 - DNA, 632 bp, Homo sapiens
agaccaataataatagtcaataggtagttagtatttattaagtgacatgaactggtttaaatgtttacstgtgctatttcatcattaaatttctctacgagatatgctgtattattcacagagtagagttacagaaacacaagattaattaacttgagtaaggagtggcagggccaaaatttaaatccgggtaatttaattccagaactcgtttgcttaagaggatccactacactagtctggcgaatagaagaactcttttatttgcacatttattcattcctcagttgttggacatttgggttgtttgcaccttttgactattataggtaatactgctaggaaaattcattttacaagtttttgtgtggacatatgtttttatttctctttgtatgtatctgggaatggaagggataggtcgtaaggctggttcatggttgacattttgcaaagaatcagttagggaggaatcctccttatgttttaggaatagtttcagtaggattagctctttggtatttattagctcttctgtggtataaacacttctttgtacatgtgttagaatttggatgtgaatctatagggctcagtaatctaatcttccaccttaataaactggaaaaaga

SEQ ID NO: 682329 - DNA, 632 bp, Homo sapiens
agaccaataataatagtcaataggtagttagtatttattaagtgacatgaactggtttaaatgtttacctgtgctatttcatcattaaatttctctacgagatatgctgtattattcacagrgtagagttacagaaacacaagattaattaacttgagtaaggagtggcagggccaaaatttaaatccgggtaatttaattccagaactcgtttgcttaagaggatccactacactagtctggcgaatagaagaactcttttatttgcacatttattcattcctcagttgttggacatttgggttgtttgcaccttttgactattataggtaatactgctaggaaaattcattttacaagtttttgtgtggacatatgtttttatttctctttgtatgtatctgggaatggaagggataggtcgtaaggctggttcatggttgacattttgcaaagaatcagttagggaggaatcctccttatgttttaggaatagtttcagtaggattagctctttggtatttattagctcttctgtggtataaacacttctttgtacatgtgttagaatttggatgtgaatctatagggctcagtaatctaatcttccaccttaataaactggaaaaaga

SEQ ID NO: 682330 - DNA, 962 bp, Homo sapiens
gctccaaagcagctacgtcagtgatgagaacagagaaaatacgtagcaacatttcattaagttgaattctaatacttaaaaggctccttttagtactgacattctggattttaaaagttatgttgaccgcatgttctcactcacaagtgggagttgaacaatgagaacacacggacacggggaagggaacatcacacaccagggcctcttggggtgtgtggggctgggggagggatagcgttaggagaaatacctaacgtaaatgacgagttgatgggtgcagcaaaccaacatggcacatgtatacctatgtaacaaacctgcacgttgtgcacatgtaccctagaacttaaagtataataataaaaataaataaataaaagttgtgttgaattcacttattcattttttcattcattcattcaatagttattgctaagcacctagtgcccaccagccattaggctagacccctaagatacaatgatgcccctgtagagtgtacagctgagtctgtgaggaagttatatgttcttttacacacatacgcaattagaaactgtaatgagtattgcggccgggcgcggtggctcacgcctgtaatcccagcacttgggaggccgaggtgggcggatcatgaggtcaggagatggagascatcctggctaacacggtgaaaccccgtctctactaaaaatacaaaaacaaaattagccgggcgtggtggcgggcgcctgtagtaccaactactcaggaggctgaggtgggagaatggcgtgaacctgggaggcagagcttgcagtgagccgagatcacaccactgcactccagcctgggcgacagagcgagactccatctcaaaaaaaaaaaaaaaaaaaaaaaaaaaaagaaaagaaaagaaaaaaagaaactgtaatgagtattgcaatggaaaactttaggggggtttgaaaaaaaccctt

SEQ ID NO: 682331 - DNA, 962 bp, Homo sapiens
gctccaaagcagctacgtcagtgatgagaacagagaaaatacgtagcaacatttcattaagttgaattctaatacttaaaaggctccttttagtactgacattctggattttaaaagttatgttgaccgcatgttctcactcacaagtgggagttgaacaatgagaacacacggacacggggaagggaacatcacacaccagggcctcttggggtgtgtggggctgggggagggatagcgttaggagaaatacctaacgtaaatgacgagttgatgggtgcagcaaaccaacatggcacatgtatacctatgtaacaaacctgcacgttgtgcacatgtaccctagaacttaaagtataataataaaaataaataaataaaagttgtgttgaattcacttattcattttttcattcattcattcaatagttattgctaagcacctagtgcccaccagccattaggctagacccctaagatacaatgatgcccctgtagagtgtacagctgagtctgtgaggaagttatatgttcttttacacacatacgcaattagaaactgtaatgagtattgcggccgggcgcggtggctcacgcctgtaatcccagcacttgggaggccgaggtgggcggatcatgaggtcaggagatggagaccatcctggctaacacggtgaaaccccgtctctactaaaaatacaaaaacaaaattasccgggcgtggtggcgggcgcctgtagtaccaactactcaggaggctgaggtgggagaatggcgtgaacctgggaggcagagcttgcagtgagccgagatcacaccactgcactccagcctgggcgacagagcgagactccatctcaaaaaaaaaaaaaaaaaaaaaaaaaaaaagaaaagaaaagaaaaaaagaaactgtaatgagtattgcaatggaaaactttaggggggtttgaaaaaaaccctt

SEQ ID NO: 682332 - DNA, 962 bp, Homo sapiens
gctccaaagcagctacgtcagtgatgagaacagagaaaatacgtagcaacatttcattaagttgaattctaatacttaaaaggctccttttagtactgacattctggattttaaaagttatgttgaccgcatgttctcactcacaagtgggagttgaacaatgagaacacacggacacggggaagggaacatcacacaccagggcctcttggggtgtgtggggctgggggagggatagcgttaggagaaatacctaacgtaaatgacgagttgatgggtgcagcaaaccaacatggcacatgtatacctatgtaacaaacctgcacgttgtgcacatgtaccctagaacttaaagtataataataaaaataaataaataaaagttgtgttgaattcacttattcattttttcattcattcattcaatagttattgctaagcacctagtgcccaccagccattaggctagacccctaagatacaatgatgcccctgtagagtgtacagctgagtctgtgaggaagttatatgttcttttacacacatacgcaattagaaactgtaatgagtattgcggccgggcgcggtggctcacgcctgtaatcccagcacttgggaggccgaggtgggcggatcatgaggtcaggagatggagaccatcctggctaacacggtgaaaccccgtctctactaaaaatacaaaaacaaaattagccgggcgtggtggcgggcgcctgtagtaccaactactcaggaggctgaggtgggagaatggcgtgaacctgggaggcagagcttgcagtgagccgagatcacaccactgcactccagcctgkgcgacagagcgagactccatctcaaaaaaaaaaaaaaaaaaaaaaaaaaaaagaaaagaaaagaaaaaaagaaactgtaatgagtattgcaatggaaaactttaggggggtttgaaaaaaaccctt

SEQ ID NO: 682333 - DNA, 663 bp, Homo sapiens
tcagctacaagagaggtggcgccaaatcatttcttctcatggccgtgcgttctgtgaaatcttgatggtggyaatgaggagttctgtacttacatagaaaaaagtggagaatggctgcttagagaccattagcagctggtgtagtgaactgcgacagagagagataggagtagcatttggctctcagtgaacttcctaagcaaagctgtggccatgttggggaaaacaattacatctcaggttcttaacttccttatatacttttgaatgcacggtaataaagaatgcacagatatgtgttaagtaaatacatttttattttcccttaattattatttatgataattatagcaactaatttcatgtatagtcaatatataaaccaacctactagtaaaagctactgaacatttttgtaaagctttaggcatttaaacatactggtttattctctaatctaagcccccaaatgccatcatatccagaggaaattcaagaagccagttctggagcattttcctcctactgccatgatgagctgtttgattttaacctgctatttttggggtatgtttctatgtatatgacactctatgcaagacaaatgaaatctgtagtaatagaaaggagatcagaggttgctaagagcaggagtggaaattg

SEQ ID NO: 682334 - DNA, 663 bp, Homo sapiens
tcagctacaagagaggtggcgccaaatcatttcttctcatggccgtgcgttctgtgaaatcttgatggtggtaatgaggagttctgtacttacatagaaaaaagtggagaatggctgcttagagaccattagcagctggtgtagtgaactgcgacagagagagataggagtagcatttggctctcagtgaacttcctaagcaaagctgtggccatgttggggaaaacaattacatctcaggttcttaacttccttatatacttttgaatgcacggtaataaagaatgcacagatatgtgttaagtaaatacatttttattttcccttaattattatttatgataattatagcaactaatttcatgtatagtcaatatataaaccaacctactagtaaaarctactgaacatttttgtaaagctttaggcatttaaacatactggtttattctctaatctaagcccccaaatgccatcatatccagaggaaattcaagaagccagttctggagcattttcctcctactgccatgatgagctgtttgattttaacctgctatttttggggtatgtttctatgtatatgacactctatgcaagacaaatgaaatctgtagtaatagaaaggagatcagaggttgctaagagcaggagtggaaattg

SEQ ID NO: 682335 - DNA, 663 bp, Homo sapiens
tcagctacaagagaggtggcgccaaatcatttcttctcatggccgtgcgttctgtgaaatcttgatggtggtaatgaggagttctgtacttacatagaaaaaagtggagaatggctgcttagagaccattagcagctggtgtagtgaactgcgacagagagagataggagtagcatttggctctcagtgaacttcctaagcaaagctgtggccatgttggggaaaacaattacatctcaggttcttaacttccttatatacttttgaatgcacggtaataaagaatgcacagatatgtgttaagtaaatacatttttattttcccttaattattatttatgataattatagcaactaatttcatgtatagtcaatatataaaccaacctactagtaaaagctactgaacatttttgtaaagctttaggcatttaaacatactggtttattctctaatctaagcccccaaatgccatcmtatccagaggaaattcaagaagccagttctggagcattttcctcctactgccatgatgagctgtttgattttaacctgctatttttggggtatgtttctatgtatatgacactctatgcaagacaaatgaaatctgtagtaatagaaaggagatcagaggttgctaagagcaggagtggaaattg

SEQ ID NO: 682336 - DNA, 663 bp, Homo sapiens
tcagctacaagagaggtggcgccaaatcatttcttctcatggccgtgcgttctgtgaaatcttgatggtggtaatgaggagttctgtacttacatagaaaaaagtggagaatggctgcttagagaccattagcagctggtgtagtgaactgcgacagagagagataggagtagcatttggctctcagtgaacttcctaagcaaagctgtggccatgttggggaaaacaattacatctcaggttcttaacttccttatatacttttgaatgcacggtaataaagaatgcacagatatgtgttaagtaaatacatttttattttcccttaattattatttatgataattatagcaactaatttcatgtatagtcaatatataaaccaacctactagtaaaagctactgaacatttttgtaaagctttaggcatttaaacatactggtttattctctaatctaagcccccaaatgccatcatatccagaggaaattcaagaagccagttctggagcattttcctcctactgccatgatgagctgtttgattttaacctgctatttttggggtatgtttctatgtatatgacactstatgcaagacaaatgaaatctgtagtaatagaaaggagatcagaggttgctaagagcaggagtggaaattg

SEQ ID NO: 682337 - DNA, 682 bp, Homo sapiens
ttgagtcttcaaaacttagatgagcttttgtgcaggctttgtaaaactgttgaagaaatccaggaagcttggcattgttcccacaggcctggtccctgggaggctgtgctctcagcagagattctcagcagggattgtgctgccatttctgctttctactcctggtcttttttcttttcttttcttttctttttcctggttctccctttcaataaagatgctgtaactcagggcagtgcgcttcaaaacaaagccagagaggatttcaggcatcatgttggggtgggttttctggctccttcctccttaaaagtagggcatgtcactcctcctccatctgcagcctttctccaaccaagtgagaccttatcatggatgggaatataggtcacttcaagactcacgtaaaggtaggcttatttttaatctgggagtattagaagtgccctttcagatccagaatcttctctaaaattttaaaaattggcacttgagataaagatggtaaattcaccrtttcagggactctgaattttatacacttggtcaattagggcatttatagtttagtgacttaattcatttactcactaaatagtttttgaggttggggcttggatggaagtggggatgtgtaatgggtccaaaaaaagagaacgaataagatctagtatttgatagc

SEQ ID NO: 682338 - DNA, 584 bp, Homo sapiens
actctttctacttgttatttattagttttaaaattatgatgttagagtaacaaactcaactagttaatatcaaaaggcaaatagaaaattagtagatttgcttagcgtgatgtagtttgcatatttattgggcatgaagttctcacttaatcaactcttacaagaactaccatggtgcctgtgtttctgctaaaattgggattatggtttcctggccaccctctccccctccmtgctaaaatgtgtgaaaatcgacttcttgtcttgtgtgtagaatagaacatgggaaagaacaaaaacgcttatggcaagaaacacatagataagaagctgaattccagggcaaagaaaatagaaaatgatattataactcagctaaatatggtggcaggttcttagccagcatagtagacaaactctttaaagtgtattaacaaaaaacatataccgaaaatcagaactttggacagtgactaagagagtaggaattctttgtagtaaggagcttaatataaagaaacaattatccatgcacaaaaccatgtgaaataaaaaagcatgtagtaggccagaaaaggatcaac

SEQ ID NO: 682339 - DNA, 1514 bp, Homo sapiens
catctggagtccaagcatggcttagctgggtcctctgcaccagggtatctcaaaaggctgaaatgaagatgtgggctgggcctgaagtcttacctgaaggctcaactggggaagaattatttccaaagcctacacagttgctggaagacttcaggtttttgtggactgggaaactaagggcctccgttctttgctggttgtcagtctaaaggctctctcygtgcttgccacatgggcctctgcatacagcagtgcacaacatggcagcttgttttattaaaatcagtgagagagagagagagagagagtctgctagcaaaaccaaacttacatcagtgatctcatcatctttgctgtattctattatttagaagcaagtcacaagtcccatctgcactcaagggaagaggactacacaggggcatgaatacctggaggtgagaatcactgcaggtggtctaagacggagaccccagacattagtcaacccagaacctgagggggcttgcagaagggaatagacggccagtcatatttccactttcattactacatccaataaacagaattttcttcagcacagtggacagaaatagggatttattaaatagaactgtttggattcaggggtatggctaactgcttcgaatgccagcttgcctagggtgtcccaaggagtttagagacagaaatactgcacccattatccaagagcaaatagacccaatggaacttcagacccttgacaacattaaaggtctttaatctattaagtatgtgtaggactttcaaattctttatggttttccctttttcctctgcaggaggaacactattgcctgattctatcattatggtctgtttctctcttcgcatcccattggtggggactatctctaacagtggtgattccttttcattcaaccatttgcaccctgtcatctgagctccattgcaattaaaagtagaagttggtgagatgtgtggcctaaaaataatggccataaaatcaaatgaaactaactggccaatgtatagattgaactaatagttattattatgtcattattagctccatgttgttgaaaatacatcatcagagccaacgaagacaaatagtaagtaataaaagaaaagggggtgaggaccttcaaactcttgcctcaaagaactttaaatgttataatttatccttactttaattcaaatgccaaacatacggaattcaaacaatcctacagattggcttgtctgataatcttgccaagaactaaatacagaagaatcaattttgaaatttaggaatagaacagagaggtgtctcagaccacaaagactgtagagccatactttggtcctgttggcaagactttaactgtgtaatattgtttctttcttttatggctagtgagatccttcattttctatctgaatcacatcttctctatgtgagatacatggcacctaatcaatctgtgtctaccaaagcccaagagatatggtgtcttcctaga

SEQ ID NO: 682340 - DNA, 670 bp, Homo sapiens
ctttcctggagctggactagccctctagagtcggagctggactagccctctagagtctgagctttcgagacayccctctctccagggagtgtagtcatcactatgccattttctgatccctccatgcccaaattacagctgtgctctggagtctttgctgccactgaacctgtcctcacagagtctcagctactgccccccacccccaccctagagtctagagtcactactacatggtgtttcaaaccctgggacccaagacgccactgagccctattggctcacattcccaaactgcagccatatctgctcttctggcccaaacctccagagaattccttcttccccagagtcaggccagggttgtgccctgcctcccaagggcaaaatcacaggtactactcagtccccaggcttgtactactaagaggtacctcagaggcacagatcctggctctgtgagcaacctacatttaaccctgctagagacagcaaacctgtacccccaagattccagtgtcacaataagtttgtgagaccctgaggctagaaatctggccccaccgctgagccaaacacttgcacctggaacacagcactccagcagctgtttacaggcagtctcagacctgaaatcaagaaggaatcttctcagctaagtttccccaat

SEQ ID NO: 682341 - DNA, 868 bp, Homo sapiens
actgcagttctactggtctctgctcaactctcttctttatttcagtattacagctcaaaagaatgcctcacctgagacaggtaagacatgtcatttttcctcaatctaaaatagctgttctcaaccagaggttatgttgccacccagatccaaatttgattagaggcatatgtgtgacttttgcagctctgagaatatagtttgcttctgattctgaaggataaatttggtaaaccactaacaacgaagataaattttccctctaattggctaattgagcattttgttcatatgattgagaactttctgaataagtagataaatgtatagaggagaaagaggcaaagaaaaaataccaatctgaaatatctattgtctccagttaatctttagttacaagaaaataaacaacactaatgtctgaattaaggaagaacaggggggaacataataaaacaaatccaagcagaggataatagattatttcgacagaatactctaaaatttcttgtgcaaaagaatttaccaagccaatatattcaatcaattcatagaatcttcaaataggaagattcatatgcacagttccaaagtatttgtactgatattgtattacactgattttgtagcatatttaccatrgaaattaagttttcctcaagctaatggtaaaactgacttacattattccaacataaagaccccaaaaatatatgttagatgataaaacctcaggctgggataaacattgtactgtgtagagtccatagaaagtttatccatgtagatttgaatttaattttctttctcaaagcagagtctcagattaacatttataagtctttaagtttagaatattatatattat

SEQ ID NO: 682342 - DNA, 645 bp, Homo sapiens
ggaaatgcgtttaatacccttcagtctactgaacatggtaacatagcctcacctaccttaagtgcgcttggaatgggtaaatgttagccgacagttgggcaggagcacctggcagtgcaggttgccatgaagtaccgacgtccaccctggagatcgcggggctgccgctgccgggcctgtggagggagcagctcactgctttctgctgactgcctgtggcttcctcacctggtaaagttgaaaaagtgtaagtcaaactttcctaagttggggaccatctacagtaaaatacaaacaaaaataaagaacgggcaatggaataataggtcgcgatgaagggaaaagctggatcacatatgtacgtcttaggattccctcccrttggtagatgtgaaccaaaacttaggatgtgagctttctggcacctaaaacaaaaagcaaaacatggccgttgatgtgttgcactgactctcaggaaaaaaaggcatcagttctcccatgaaggaaaagcttcttttagcattagcgctaaagtcaacttctaaacgttgactttaatactggttgttttaatacaggctgtatattcttacatagacagtgccttcaataacattcttaaggcaaaagctattgtagcttttg

SEQ ID NO: 682343 - DNA, 645 bp, Homo sapiens
ggaaatgcgtttaatacccttcagtctactgaacatggtaacatagcctcacctaccttaagtgcgcttggaatgggtaaatgttagccgacagttgggcaggagcacctggcagtgcaggttgccatgaagtaccgacgtccaccctggagatcgcggggctgccgctgccgggcctgtggagggagcagctcactgctttctgctgactgcctgtggcttcctcacctggtaaagttgaaaaagtgtaagtcaaactttcctaagttggggaccatctacagtaaaatacaaacaaaaataaagaacgggcaatggaataataggtcgcgatgaagggaaaagctggatcacatatgtacgtcttaggattccctcccgttggtagatgtgaaccaaaacttaggatgtgagctttctggcacctaaaacaaaaagcaaaacatggccgttgatgtgttgcactgactctsaggaaaaaaaggcatcagttctcccatgaaggaaaagcttcttttagcattagcgctaaagtcaacttctaaacgttgactttaatactggttgttttaatacaggctgtatattcttacatagacagtgccttcaataacattcttaaggcaaaagctattgtagcttttg

SEQ ID NO: 682344 - DNA, 1433 bp, Homo sapiens
tgtagactgggcgcagtagctactgcctgtaattccagcactttgggaagctgaggcaggaggatggcttgagcctgggagctcaagacaagcctgggcaacatggagaaaccctgtctctacaaacgaatgcaaaaattagctgggtgtggtggtgcacgcctgtagtcccagctactcaggaggctcaggtgggaggattgcttgaggtcgggaggcagaggatttactgagccaagatcatgccaccacactgcagcttgggtcacattgagaccctgtcaaaaaaaaaaaaaaaagtaaagaaaagaaaatgcagtaactccatatttcctctcaggtgaaaatgacttcatattgtaaaaacattatggcaaatttatgtctccaggttatttattgtttatgatggaaacaaagtgccatcaccctcatggtcttaagattttcccaccattgcctttcatttttgaagacccggcttttgatagtgatgataccaatatgaaaggtaacagtcgtgattgatgtttgtccaggatattttccatttaggtgtatgtgtatagcccatgggcatttaagcagcttactctatcattttcagaaactgttttttgactgcagttttaaaaattcaattgcaccaatgtttcttgaccctggtagggactgtgctagtttccaggataattaatttttaaaaaaattttactttaagttctgggatacctgtgcagaacgtgcaggttctgcattacatagttagaatggcgatcattaaaaagtcaggaaacaacagatgctggagaggatgtggagaaataggaatgcttttaccctgttggtgggagtgtaaattagttcaaccattgtggaagacagtgtggcaatccctcaaagatctagaatgagaaataccatttgacccagcaatcccattactgggtatatacccaaaggattataaatcattctactataaagacacaggcacaggtatgtttactgcagcactgttcacaatagcaaagacttggaaccaacccaaatgcccatcaatgatagactggataaagaaaatgtggcacatatacaccatagaatactatgcagccataaaaagggatgagttcatgtcctttgcaggcacatggataaagctggaaaccatcattctcagcaagccaggagaaatttttaaaaaatagatactagaaattccaaagtttaagaaggctatcatcttgactggatctcaaargtgtgatgaggcaggcttgttccttttaccaagcacactgacgtatgtggtataggaaagatctatagtgttttatgagcccctgcaaaagggaaataattttcccattaaaggaatttgagagcacttcatggaagaggtagatttcaaaattttcaggatgactaca

SEQ ID NO: 682345 - DNA, 1433 bp, Homo sapiens
tgtagactgggcgcagtagctactgcctgtaattccagcactttgggaagctgaggcaggaggatggcttgagcctgggagctcaagacaagcctgggcaacatggagaaaccctgtctctacaaacgaatgcaaaaattagctgggtgtggtggtgcacgcctgtagtcccagctactcaggaggctcaggtgggaggattgcttgaggtcgggaggcagaggatttactgagccaagatcatgccaccacactgcagcttgggtcacattgagaccctgtcaaaaaaaaaaaaaaaagtaaagaaaagaaaatgcagtaactccatatttcctctcaggtgaaaatgacttcatattgtaaaaacattatggcaaatttatgtctccaggttatttattgtttatgatggaaacaaagtgccatcaccctcatggtcttaagattttcccaccattgcctttcatttttgaagacccggcttttgatagtgatgataccaatatgaaaggtaacagtcgtgattgatgtttgtccaggatattttccatttaggtgtatgtgtatagcccatgggcatttaagcagcttactctatcattttcagaaactgttttttgactgcagttttaaaaattcaattgcaccaatgtttcttgaccctggtagggactgtgctagtttccaggataattaatttttaaaaaaattttactttaagttctgggatacctgtgcagaacgtgcaggttctgcattacatagttagaatggcgatcattaaaaagtcaggaaacaacagatgctggagaggatgtggagaaataggaatgcttttaccctgttggtgggagtgtaaattagttcaaccattgtggaagacagtgtggcaatccctcaaagatctagaatgagaaataccatttgacccagcaatcccattactgggtatatacccaaaggattataaatcattctactataaagacacaggcacaggtatgtttactgcagcactgttcacaatagcaaagacttggaaccaacccaaatgcccatcaatgatagactggataaagaaaatgtggcacatatacaccatagaatactatgcagccataaaaagggatgagttcatgtcctttgcaggcacatggataaagctggaaaccatcattctcagcaagccaggagaaatttttaaaaaatagatactagaaattccaaagtttaagaaggctatcatcttgactggatctcaaaggtgtgatgaggcaggcttgttccttttaccaagcacactgacgtatgtggtataggaaagatctatagtgttttatgagcccctgcaaaagggaaataattttcccattaaaggaatttgagagcacttcatggaagaggtagatttcraaattttcaggatgactaca

SEQ ID NO: 682346 - DNA, 662 bp, Homo sapiens
tgaaaaagaaagttaatgagtcaagagagttccagaaaatatacagagaactctgaattaccaaaatactttatgctgttctatttgagcagttacttagtttttacacttcttaatttcaagatgatggcctaaaattatatgagaagttctttagttctgaacatacgttattgaaactttctgaaactaaaatttctgaaagactagtgataaacttattcgttgtagaaaaagttctattgtaaaatccttaattatactccacgtatgaaacataactttcaataatacattttcagcatttaaaacacatcctttaagctcattcgtgtaccttataattgttcacatatgcaactgattkaaatcccctaagcatcagaatgaacctaaagatacacagcttttggcaagcctagtaatttctatctgtatctcaaatatagtacatatatgaaactaagcttctttcagttagctttaaacagtgatgaaattacttgagatgagacagaaaaaattacatttataggaattctttgtgaaaaggaatttgactgtgggaggaaaacaacagacataccacaggttgaatatacctgaaatcaaacctaaatgatggtaatgagattaaaacaattgttagtgtacaagggtaa

SEQ ID NO: 682347 - DNA, 1206 bp, Homo sapiens
tagccctgttgttccgatgttacttgttcctgctgccttgagtactgctaaactctcagtccaatgcgggtggggaaacagctgaaaaggacctttgtttcccgttcctggttccacaggttataggtctacttgttgatctcacactggttgacatctacctcatgctartccacaactggacagttactatctttcttcttttaaatttttatttggtgtacaaagagttagcatggttgctttcattgggtggattccttggataatccattcagagaagatcacttagtccagcttaatgaaacccacatcctttgcacactgatggagatactggccacacataaaaataggaacactcacaaatgtgcgcgtcatccttgcatagggaccatactaatcttctctgaataggtccaattttagtatatgtatggccaaagccagcactggttaccatctcttagtacaaactgtgttctgtgtcttatttgagttatttaaatttaagtcttcaaagttcagatggctttagtcccagctatatagagtttatcatggaacttccattactattgtttttcagttcttgtagcattttacacatcaccttatatgtacaactctagagatgggactttatctgaatatgaatgccctctgcagatgccttttgcaaaatactgctgtcactgaattatttccacagaatgtttcctcagccagattgggaagttgtgtgtgtgtctgtggggtgagggcggggtccagttctcatcctttctgaggttaccagggtgtcacccaccaggttcagtgccatcttgaagattccccctgccttcagtgtctcagatgttctttcaccgtgtctgtttcctgtatctctctaacacatgcctcttgactatgaaaattaagttagaaaactctctatttagagtttcatgagaatttactgggtttgtgcctttacatgggggttttacctgcagactcgcagaagagcttgtcctggggcagaccactcttcatcattttctagggatgattctgagcatgatctctcctcaggagccaaaaggtgcttagttactgccttcttagacattgagaggcattggaatttaatcagcaatgaatgattccaaactacttactgcgatgatgtccactgaaaaccacaattactatctctatgaa

SEQ ID NO: 682348 - DNA, 1206 bp, Homo sapiens
tagccctgttgttccgatgttacttgttcctgctgccttgagtactgctaaactctcagtccaatgcgggtggggaaacagctgaaaaggacctttgtttcccgttcctggttccacaggttataggtctacttgttgatctcacactggttgacatctacctcatgctaatccacaactggacagttactatctttcttcttttaaatttttatttggtgtacaaagagttagcatggttgctttcattgggtggattccttggataatccattcagagaagatcacttagtccagcttaatgaaacccacatcctttgcacactgatggagatactggccacacataaaaataggaacactcacaaatgtgcgcgtcatccttgcatagggaccatactaatcttctctgaataggtccaattttagtatatgtatggccaaagccagcactggttaccatctcttagtacaaactgtgttctgtgtcttatttgagttatttaaatttaagtcttcaaagttcagatgsctttagtcccagctatatagagtttatcatggaacttccattactattgtttttcagttcttgtagcattttacacatcaccttatatgtacaactctagagatgggactttatctgaatatgaatgccctctgcagatgccttttgcaaaatactgctgtcactgaattatttccacagaatgtttcctcagccagattgggaagttgtgtgtgtgtctgtggggtgagggcggggtccagttctcatcctttctgaggttaccagggtgtcacccaccaggttcagtgccatcttgaagattccccctgccttcagtgtctcagatgttctttcaccgtgtctgtttcctgtatctctctaacacatgcctcttgactatgaaaattaagttagaaaactctctatttagagtttcatgagaatttactgggtttgtgcctttacatgggggttttacctgcagactcgcagaagagcttgtcctggggcagaccactcttcatcattttctagggatgattctgagcatgatctctcctcaggagccaaaaggtgcttagttactgccttcttagacattgagaggcattggaatttaatcagcaatgaatgattccaaactacttactgcgatgatgtccactgaaaaccacaattactatctctatgaa

SEQ ID NO: 682349 - DNA, 1206 bp, Homo sapiens
tagccctgttgttccgatgttacttgttcctgctgccttgagtactgctaaactctcagtccaatgcgggtggggaaacagctgaaaaggacctttgtttcccgttcctggttccacaggttataggtctacttgttgatctcacactggttgacatctacctcatgctaatccacaactggacagttactatctttcttcttttaaatttttatttggtgtacaaagagttagcatggttgctttcattgggtggattccttggataatccattcagagaagatcacttagtccagcttaatgaaacccacatcctttgcacactgatggagatactggccacacataaaaataggaacactcacaaatgtgcgcgtcatccttgcatagggaccatactaatcttctctgaataggtccaattttagtatatgtatggccaaagccagcactggttaccatctcttagtacaaactgtgttctgtgtcttatttgagttatttaaatttaagtcttcaaagttcagatggctttagtcccagctatatagagtttatcatggaacttccrttactattgtttttcagttcttgtagcattttacacatcaccttatatgtacaactctagagatgggactttatctgaatatgaatgccctctgcagatgccttttgcaaaatactgctgtcactgaattatttccacagaatgtttcctcagccagattgggaagttgtgtgtgtgtctgtggggtgagggcggggtccagttctcatcctttctgaggttaccagggtgtcacccaccaggttcagtgccatcttgaagattccccctgccttcagtgtctcagatgttctttcaccgtgtctgtttcctgtatctctctaacacatgcctcttgactatgaaaattaagttagaaaactctctatttagagtttcatgagaatttactgggtttgtgcctttacatgggggttttacctgcagactcgcagaagagcttgtcctggggcagaccactcttcatcattttctagggatgattctgagcatgatctctcctcaggagccaaaaggtgcttagttactgccttcttagacattgagaggcattggaatttaatcagcaatgaatgattccaaactacttactgcgatgatgtccactgaaaaccacaattactatctctatgaa

SEQ ID NO: 682350 - DNA, 865 bp, Homo sapiens
ggaaactgagtacagtctcatcacaagtatactgtggaggaagttcattcatcaataccactttgatctagatgaattaatcctttctgtgtgaaggatttcaagattcagtccctgttcacatgcatagagtggctctaaagaaaggtaggcacgttcagacagttactaggacagacgttaccacacactcaataaacaatcggaaataacaaggatgatataagaagagcggcttcctctacaattcaactctaaggaatcaatttaatatttcttacatatgctttcgttattatatctttatactttctctgcctgccttcacttatcattgctatggtgaaaggtatgcaagtaactagcctatttatctgaactcatagtctcctttttaatcaaaatttcctttaccaagcttccttccagaggtcataactcccacatctcagtctagtaaattaccttcacctcccttctaccttttatttcttttgcttttagattttgtctctgttaagtgccaactcttttgtctctggctgtagagtgycccagaagctattatgtagagctctagacatgtaacttgataatctccaccttttaaaacaaagtctgattccttttttttttctttttttcagatgaagtctcactctgtcacccaggctggagtgcagtggcacgatctcggctcactgcaacctccgtctcctgggttcaagtgattctcgtgcctcagcctccagggtagctgggattccaggcacccaccaccacacacagggctaattttttgtaattttagtagagacggggtttcaccatgttggttaggctggtctcgaactcctgacctcag

SEQ ID NO: 682351 - DNA, 647 bp, Homo sapiens
aaactgctatgtgctcctcatgagaggggacagtgctcagagaccagatcagtgcctggcactttgggggcactcaaaaatatgagaagtgtggggctttggggtcagagagaggcacagagtgtggagagagctggggaagaatctgcaggacacggtgacacactggatgtggggatggggagatgacaagacaaagaggaccccaaggttctggcctgagcagctccagggagggagcagaggagccagggagaaagggagaaaagaggttgagttgscatggctccctgtccccgagagttcaccacctaagctgggggtgcggggagggaaggtatagggatgacagaaatatctcattcaattctctcttataaataggcaacgaggaacatgggagagggaacatgtatagttttaaattgctgaactctgagcagttaaatgatttgctcaagagacacaaaagttggtggcagcacttggatttgaacctggggacgatccaaggcctgtccagagggtggaggggacagaagagggcagaagatgcagagagagagagagagaaagagacagaggcagagaaaggacagagagagagaaaggacagggagaaagaagcagagaaagagagatttaca

SEQ ID NO: 682352 - DNA, 962 bp, Homo sapiens
taagagaaatgagaaaagaaattgaaaagagagacagcagagaactgattctctactagagcctccagaaggaatcaactctgccaacaccttgattttggacttgtggccttcagaacagtgaaatgataaacatctgttattttaaggtacctagtgtgtaacattccgtcatgacagccctaggaaatgaatacagcgaggaaaatcctaccagcacaaaggcatggaggtgccaggatgtctcctctgcgtgaagagtagatgtagatgaggctggaattatctatcctagctgcccagacccatgtgcctttgttttatgtagttacagcacctatgatacatatttgttaccatgtatgtcactatgaacctcctctggaggayggagaagtcaaataccttaattattccaacacaagcttgcgtgaacagataatcatcactacgagtatattgtgtgcctgctaagcaccacacctgagataagcatttgctgtggtttgaatgtcccctccaaagctcatgctaaaatttaattgccattgcaacagtgttgcaaggtgagaactttaagagatgatcaggtcatgagaactctgccctcgtgaatggattaatacccttatcgcagtagtggaccccccttttctcttgctgtctgtctctcatgttagcttgtgcttcctcctttcaccatgggataacacagcaagaagcccctcaccagatgctggcaccttgctattggacttccggcctccagaactgagaaatacatgtcttttccttataaattacccagtctgtggtattctgttatagcggcagaaaatggactaagacggcattttgcatacattatctgtcttattaaaaataatgtttttgcccaggaacatagattcaagttgccctgaatatacattatctccctacattatctcttttaatcctca

SEQ ID NO: 682353 - DNA, 962 bp, Homo sapiens
taagagaaatgagaaaagaaattgaaaagagagacagcagagaactgattctctactagagcctccagaaggaatcaactctgccaacaccttgattttggacttgtggccttcagaacagtgaaatgataaacatctgttattttaaggtacctagtgtgtaacattccgtcatgacagccctaggaaatgaatacagcgaggaaaatcctaccagcacaaaggcatggaggtgccaggatgtctcctctgcgtgaagagtagatgtagatgaggctggaattatctatcctagctgcccagacccatgtgcctttgttttatgtagttacagcacctatgatacatatttgttaccatgtatgtcactatgaacctcctctggaggacggagaagtcaaataccttaattattccaacacaagcttgcgtgaacagataatcatcactacgagtatattgtgtgcctgctaagcaccacrcctgagataagcatttgctgtggtttgaatgtcccctccaaagctcatgctaaaatttaattgccattgcaacagtgttgcaaggtgagaactttaagagatgatcaggtcatgagaactctgccctcgtgaatggattaatacccttatcgcagtagtggaccccccttttctcttgctgtctgtctctcatgttagcttgtgcttcctcctttcaccatgggataacacagcaagaagcccctcaccagatgctggcaccttgctattggacttccggcctccagaactgagaaatacatgtcttttccttataaattacccagtctgtggtattctgttatagcggcagaaaatggactaagacggcattttgcatacattatctgtcttattaaaaataatgtttttgcccaggaacatagattcaagttgccctgaatatacattatctccctacattatctcttttaatcctca

SEQ ID NO: 682354 - DNA, 606 bp, Homo sapiens
aagcccttttctcttcatgggcggggactctttgtcacattctcatagacccaggaggtttccaggacaattctgttctcagtctaaagggaattaagaaacttctgctgagccccaggctctactctggccactctttcattcctgctgctgagggacccctgcctgagcccccggtcttccagtgtgtctctgccttgcccttgatcttgcccgcccctttctgtgtccccagatactgttgtctggctgccaaagctgattgagagctggggcttakctcctgactccaggcttgctggtccactgctgggctgtcttttgcttctgaaatgtcctggctgtctgtgattgccttaccctgtgacttcttagtccacctgactgacacatactaccagtcaccctattttcctcagccaccactctgtcagtcaggtggctctggggtcctccaggggaagctgggtttggcacataactctgtgccttggtgggtcctgggatgcagcagacagctaacttgcttcccacaccaaagtactagactgcagccaggttttatcgtaggggaattccaaggaggagcaattggcttcttagaaa

SEQ ID NO: 682355 - DNA, 620 bp, Homo sapiens
ttttttatgctaakatttattcatcgttaaatattcaggttaatattgctatttaaaaaaaaatccttaaaagtcacttcccaaaagaaaaataaaaagtaataatggtctatctgtagtttaattgtacacctctagagtagggctcatcctagaccaactctctctttcactttcattaaaatttgtcatatctctattgctgcctccaggatagaaattgcatctctccatctttattcagggcctagcatggtacctaggacacataatagatgctcaccagggtgttctaagttgaatcaagttaagttcaagtaaattctaaaatcaatgaaatttaaatgttgactttaatagaaagaggcagctcaggtctaattctgacttgtttgcatatgttattatcataagcaattcttgaacattctgagatttttgactattttttaattttacatgaaacatacatacattgtagataaaaatcagaaatgcaaatgaaccaaaagaaaaataatagaaccatgtaaaattctaccacccaagggtaactactattaaaattcagtgtatgtctttccagatgttcttcccaaggtatattacacatgtgttct

SEQ ID NO: 682356 - DNA, 620 bp, Homo sapiens
ttttttatgctaagatttattcatcgttaaatattcaggttaatattgctatttaaaaaaaaatccttaaaagtcacttcccaaaagaaaaataaaaagtaataatggtctatctgtagtttaattgtacacctctagagtagggctcatcctagaccaactctctctttcactttcattaaaatttgtcatatctctattgctgcctccaggatagaaaytgcatctctccatctttattcagggcctagcatggtacctaggacacataatagatgctcaccagggtgttctaagttgaatcaagttaagttcaagtaaattctaaaatcaatgaaatttaaatgttgactttaatagaaagaggcagctcaggtctaattctgacttgtttgcatatgttattatcataagcaattcttgaacattctgagatttttgactattttttaattttacatgaaacatacatacattgtagataaaaatcagaaatgcaaatgaaccaaaagaaaaataatagaaccatgtaaaattctaccacccaagggtaactactattaaaattcagtgtatgtctttccagatgttcttcccaaggtatattacacatgtgttct

SEQ ID NO: 682357 - DNA, 1376 bp, Homo sapiens
gaacatacaaacatcaggctaggctttccatacaacagaagatcttcatctaactaagccaaggtgatgctcttgtaggtctgcataagtcctaagaaatgactgtctgttttcctactgtctgtgtgattgattacactggaaaatagaacaggtctccagtaagtaattaccaaacatatgagtgacatttgatgtatatgggtttatttgtttgttgtgcttaaagtcaacatccagagtataaatatgaactaaattgtgtgccatattgtgagaaaactcaaatgagaatgttaatttataaggaagaaaccataaatgttactattaatttttttgaaaaacaaagcatagtattattaaaataagtcatatctcctagtacatttaaaacgtttttcaacattcagcaactcttggccatagtagtgccaataaatgtgtgttgaattgaatgtttgatcaagagacactaaacatggatggaatactgtattgggattcaaaccatcttttccttgaacaaataatacacaaataatttcctctcagttcaatttctgtgaacatttatttgaaccacaacaacactaaaattactttcagttagaatgttactaattttattgacaattttcaattaaaatatgtgaatttaaaaaatttaaaaatatgttaccaatatcctttgtattaactaatgtggttcataaattacttactgctgcatgctgtttaaaaagaggaggagtagaaataaaccacttagaagcaaagtttaaacttttacttcctctgtttcttgttaacaattattattttatttaaatgttattaaaagaaacagtttttctgagatacttggctttttaattatacatatatatacatgtatatgtatataatctccagagaatgtaacctttaaccatgagaactatgaagactctagagttttctttttaatacgaaattcaattagtccattttactgtagcatggcttttgacttcactctccagcaatatggatgctgtctgaattctgttttcatatctacagcaggatggcaattttgtttgcaaaacttttagtttaattttcatatctagccaactttaattcatgcagttattcaggtctgagattgcacatttctcaaatctcactttctggcctgctctcaccctaaacaggtgcagttcgggagaaataacagactttaytatgcactgttaatataatcccttttagttccccatctctcctctgaactacgatttttgcagctcccaagatgtcattcctcaccacaacttcctccctaaatgcatgctggcttgtgttttctgagtaatctctctcctgatgag

SEQ ID NO: 682358 - DNA, 663 bp, Homo sapiens
agttcctaaagaactaattaattccttattttatttcatgttgaatgcttccaaatagcagatatttgtgtccaaaatagaaaatacagaaggattacagctttctccctctctagacaattctgcttctgaggaatagagtgaggagggtcagctggaggaatgaaataatgggatgtggcaaacaaggctcagtaaaagattcraactgtgtccaccatgagcttattttttggtgcctctcatttgaccagtggtatgataacagagaattttttaaagtgtggatgtcccatactgtggccatatagtactataatctgcagtctgccctttcttccataaagtaaaagattatttgctcagttcttcttcagaaatgaaacttctagacttatgctgtctaatatggtggccactagattcatgtggctacttaaatttaaattaattgaaatgaaataagttgaaaattcagttcctcagtcacattagccacatttcaaatcacctgtgttcacatgggaatagaagctactccactggacagtgcagatttatggcacgtctccatcatcataggaagatcttctggacagctctgtaattcagacacctggattttgttatgtaccttcagtgcatcagtctaagctggggaag

SEQ ID NO: 682359 - DNA, 663 bp, Homo sapiens
agttcctaaagaactaattaattccttattttatttcatgttgaatgcttccaaatagcagatatttgtgtccaaaatagaaaatacagaaggattacagctttctccctctctagacaattctgcttctgaggaatagagtgaggagggtcagctggaggaatgaaataatgggatgtggcaaacaaggctcagtaaaagattcgaactgtgtccaccatgagcttattttttggtgcctctcatttgaccagtggtatgataacagagaattttttaaagtgtggatgtcccatactgtggccatatagtactataatctgcagtctgccctttcttccataaagtaaaagattatttgctcagttcttcttcagaaatgaaacttctagacttatgctgtctaatatggtggccactagattcatgtggctacttaaatttaaattaattgaaatgaaataagttgaaaattcagttcctcagtcrcattagccacatttcaaatcacctgtgttcacatgggaatagaagctactccactggacagtgcagatttatggcacgtctccatcatcataggaagatcttctggacagctctgtaattcagacacctggattttgttatgtaccttcagtgcatcagtctaagctggggaag

SEQ ID NO: 682360 - DNA, 1426 bp, Homo sapiens
tttctcatttttgaataactgtcattctggccctttgggtttgctgcttggttggcttaatgctaagccctgcctggaggcaggccctggaaccgtatacctgtttccgcttgcatataaggcagggagatgagcagcactggccctgggctaaatggattgctcaggtgccgggaccagttcatctgcaccctgctggagtagccctgcagggtggtggtggcaggagactatctggggtacttcacccttttggaaaaggacaaaactctaagtctccacagatcccctaaaagccctagaaggaggaatcccgagatgtaattactatgctacccatgatcatttgagaaaggggctctttccataaccatcggctttatgatgatcagctaagaagcgcgatattcttcaaggagccaatggctaaaaggtacagagtatgcaaatttagctaacattcttggattaataactattatgtaactgttaggctgagcctcttgcacacattatctcatttaatctataggatgcagactttgtaaatgaatttatcatacctactgcctaatgcattagagtatgtaaaagagaaatctagaaatagcactgtaggactgaactaaaaggttttgattcatggcaaaggaaatttaattaaagcatgtaatgtcaattactgtcattcataatcatattatacctccccagaaataatacagatataaaagtctagagttacctgcatgtttgatataaataggataaaattatctaggttctgaaaatatccagatatcagacagaaaaaaaaaaaagcatctctacctagcctcatgtgtcatcaaatttcattaggtagggacgtgagtatccagcagcaggaaaacccttccctcctctgagagcaagtcataaggctttcgaaggtgcctgaaaatctggggtttaacatactcatgagcttttagctgctagagatgagatgctctccttgttttgacaagccccaggagaaaccagagaactctcaataaacttccactagtttggggaccctgtatagtgataaggaccagatcctctcatggggcagttttgaggtctagtggaaagaaagagccacaggaaagcatcagggcaagaaaaacacagcacactgaccaagccacagctaggcctcaactggtccttccagggtgtgatggttaacatagagtrtcaacttgattggactgaaggatgcctagatagctggtaacatattgtttctgggtgtgtctgtgagggtgttgccagaggagattaacattttgagttagtggactaggagaggcagacctgccctcagtctgggtgggcaccatctaaatgagctgccagcacagctagaataaagcaggtaggagaagatggaagagca

SEQ ID NO: 682361 - DNA, 846 bp, Homo sapiens
agtcctctgaaaggacactccatcactgctggaagcccaccccatgctgcctgccacccacctgcccttggttgaggagctcaaaaagcctccttccattggcatttaattgtgctcggcctccaattattaagactttcccacttaaccccccattttccccccagttacacccatatagtggtgtaatgcaaagcgtggcatagtgatgcctaaaggatcactttttgccttaaataaagtcatattattgcctgcagttaaagaatattggactcaggggttgaagatttccaaccagaaaatattaagatttttaagagtgagctcaagcaacccctcaatgcagaattttactgcctaggatgctgtgggcaggtcagctttgtctctctcctgtccaccctgtagtacccaccaagatgtacctgccattgacccagggtaggttttctcaaagagtgcaggaactggaaccacactcatagcagagaagcagcatagtatcaagagcacaagctttaaagacacatcattgaggtttaaattgcactgagtgatttttttgctgtgtgactgatatggtttggctgtgtccctmcccaaatctcaacttgaactgtatctcccagaattcctacgtgttgtgggagggacccagggggaggtaattgaatcatggggactggtctttcccatactattctcatgataatgaataattctcatgagatcccatgggtttatcaggatttcctcttttgcttcttcctcattttctctgccaccaccatgtaagaagagccttttgcctcctgccatgattctgaggcctccccggccatg

SEQ ID NO: 682362 - DNA, 1521 bp, Homo sapiens
cagtatcagtaaatgagttaatatacgaaagctatttagaacggtgcttagtgtactctgtgtttgttaaataaataacaaataagtctgtagcttgacgcatgtggctgtgtctctgaagaagccacaggttgtttcctggcagatggcaggagcctcccagcagccccttctgtgagcatacaaatacgctcattttttcaaatgggttttatttcctgcatgtactatgatggggacattttatcctaacctgagtcttaagcttcttggggaatgctgtgaggttgtaaatctcctgcagccatttttcaggtggactttcttagagctgcagccctctggggtgtcctggggctcagtgcaacccaggggtctcttgcacaccttcccttttcagcgcctccatgcaaccctgcagctgacttgcctgttgtygacaaggctcagtcttggatggagaagcatcaatccaattcttccttccctggggacacattgccagcagggcacacaccctgggacagcgctacaccaggggatgcctccgacagtcaaacatcactcctggggagttggagggcagcttctctctagatccctacagcgaaggatgggtggagaaaacactctcaccccacaggcaggagtctgaggtctaagatttctctgggacaaagagagaaatgtaaccaagaacccagctggcctgacctccttcctcctggtagccgtacactaaaggccttcaggcacagatgcctgaacagcgtctataatgaagccagtcgagggtggggtaaggggccacagtgtttcccaggtttcaagagtgagaatggggggtgaagagggtttgaggaccacaacaacttggagcgaggggtcgctccctgtggccaatacgaatcataggggcattgatgattatctaatagataattgtcatccaaaatgacccctcctttttctcttcctacccaatcctaaatcctagccatccttcataaggcccagcccaaatgccagcttctccaaccaaaccctgttaaccaacatctcaagattacacagagctctcagggtctctgtgtccagcttctcccacagggcaggagccctctacaccagcgctttccagccagcataccccaagaaggtgtaagtgtgcagacagcggtgtccttggccccggatgtggtttgcagagtctggagcagcaagggctccccggctggtctccgggcgtaagcagcctggtggcttgactatcattttctatgcgtgctgacataaaaaatgtgacacgccggcctgcaaggccaccatcgttcagtgcatagccctttgctctgacgggtaggaaggcgtttctgctgaacacgtggccacccttcaggcactgtgttttctaacatattgtcaatcctattcatcataggtagcatttctatctccattttataaagaggaaagcaatatcagagaagttcattaacctgttccagatcacacagtaag

SEQ ID NO: 682363 - DNA, 1521 bp, Homo sapiens
cagtatcagtaaatgagttaatatacgaaagctatttagaacggtgcttagtgtactctgtgtttgttaaataaataacaaataagtctgtagcttgacgcatgtggctgtgtctctgaagaagccacaggttgtttcctggcagatggcaggagcctcccagcagccccttctgtgagcatacaaatacgctcattttttcaaatgggttttatttcctgcatgtactatgatggggacattttatcctaacctgagtcttaagcttcttggggaatgctgtgaggttgtaaatctcctgcagccatttttcaggtggactttcttagagctgcagccctctggggtgtcctggggctcagtgcaacccaggggtctcttgcacaccttcccttttcagcgcctccatgcaaccctgcagctgacttgcctgttgttgacaaggctcagtcttggatggagaagcatcaatccaattcttccttccctggggacacattgccagcagggcacacaccctgggacagcgctacaccaggggatgcctccgacagtcaaacatcactcctggggagttggagggcagcttctctctagatccctacagcgaaggatgggtggagaaaacactctcaccccacaggcaggagtctgaggtctaagatttctctgggacaaagagagaaatgtaaccaagaacccagctggcctgacctccttcctcctggtagccgtacactaaaggccttcaggcacagatgcctgaacagcgtctataatgaagccagtcgagggtggggtaaggggccacagtgtttcccaggtttcaagagtgagaatggggggtgaagagggtttgaggaccacaacaacttggagcgaggggtcgctccctgtggccaatacgaatcataggggcattgatgattatctaatagataattgtcatccaaaatgacccctcctttttctcttcctacccaatcctaaatcctagccatccttcataaggcccagcccaaatgccagcttctccaaccaaaccctgttaaccaacatctcaagattacacagagctctcagggtctctgtgtccagcttctcccacagggcaggagccctctacaccagcgctttccagccagcataccccaagaaggtgtaagtgtgcagacagcggtgtccttggccccggatgtggtttgcagagtctggagcagcaagggctccccggctggtctccgggcgtaagcagcctggtggcttgactatcattttctatgygtgctgacataaaaaatgtgacacgccggcctgcaaggccaccatcgttcagtgcatagccctttgctctgacgggtaggaaggcgtttctgctgaacacgtggccacccttcaggcactgtgttttctaacatattgtcaatcctattcatcataggtagcatttctatctccattttataaagaggaaagcaatatcagagaagttcattaacctgttccagatcacacagtaag

SEQ ID NO: 682364 - DNA, 1521 bp, Homo sapiens
cagtatcagtaaatgagttaatatacgaaagctatttagaacggtgcttagtgtactctgtgtttgttaaataaataacaaataagtctgtagcttgacgcatgtggctgtgtctctgaagaagccacaggttgtttcctggcagatggcaggagcctcccagcagccccttctgtgagcatacaaatacgctcattttttcaaatgggttttatttcctgcatgtactatgatggggacattttatcctaacctgagtcttaagcttcttggggaatgctgtgaggttgtaaatctcctgcagccatttttcaggtggactttcttagagctgcagccctctggggtgtcctggggctcagtgcaacccaggggtctcttgcacaccttcccttttcagcgcctccatgcaaccctgcagctgacttgcctgttgttgacaaggctcagtcttggatggagaagcatcaatccaattcttccttccctggggacacattgccagcagggcacacaccctgggacagcgctacaccaggggatgcctccgacagtcaaacatcactcctggggagttggagggcagcttctctctagatccctacagcgaaggatgggtggagaaaacactctcaccccacaggcaggagtctgaggtctaagatttctctgggacaaagagagaaatgtaaccaagaacccagctggcctgacctccttcctcctggtagccgtacactaaaggccttcaggcacagatgcctgaacagcgtctataatgaagccagtcgagggtggggtaaggggccacagtgtttcccaggtttcaagagtgagaatggggggtgaagagggtttgaggaccacaacaacttggagcgaggggtcgctccctgtggccaatacgaatcataggggcattgatgattatctaatagataattgtcatccaaaatgacccctcctttttctcttcctacccaatcctaaatcctagccatccttcataaggcccagcccaaatgccagcttctccaaccaaaccctgttaaccaacatctcaagattacacagagctctcagggtctctgtgtccagcttctcccacagggcaggagccctctacaccagcgctttccagccagcataccccaagaaggtgtaagtgtgcagacagcggtgtccttggccccggatgtggtttgcagagtctggagcagcaagggctccccggctggtctccgggcgtaagcagcctggtggcttgactatcattttctatgcgtgctgacataaaaaatgtgacaygccggcctgcaaggccaccatcgttcagtgcatagccctttgctctgacgggtaggaaggcgtttctgctgaacacgtggccacccttcaggcactgtgttttctaacatattgtcaatcctattcatcataggtagcatttctatctccattttataaagaggaaagcaatatcagagaagttcattaacctgttccagatcacacagtaag

SEQ ID NO: 682365 - DNA, 636 bp, Homo sapiens
tgacaatggtgtaagagtgcccctgatcatgactggggtttgcctggagccagacaagagagtttttattgaaaattttaaaaagtttccctgcacacaccctgccatctctgtcccacagaggtccttctttctgacgtatggccaaaacaaggagggtggggttctcttgaattttgtctgctcattactactgtgccgttcagagatttgagctgctcagccagaggatamcagtgaacataaataactgaaacaggaaattcaccactgtataggtaattcttctagtgtttattttggtccccaatttacttgttattatttattttcagggccctcagatagttgctctgtgtattctaccttgggtttttatttgtaattagtggcataggtagaagcagtgtgcttagtccattttagccagaactagagctgcactgagatggaccccacactcatccccagccaataactttttattgaagagggtttttaaattattattctactttaagttcttgggtacatgtgcacaatgtgcaggtttgttacataggtatacatgtgccatgttggttttctacacccatcaactcgtcatttacattaggtatttctcctaatgctatc

SEQ ID NO: 682366 - DNA, 636 bp, Homo sapiens
tgacaatggtgtaagagtgcccctgatcatgactggggtttgcctggagccagacaagagagtttttattgaaaattttaaaaagtttccctgcacacaccctgccatctctgtcccacagaggtccttctttctgacgtatggccaaaacaaggagggtggggttctcttgaattttgtctgctcattactactgtgccgttcagagatttgagctgctcagccagaggataccagtgaacataaatarctgaaacaggaaattcaccactgtataggtaattcttctagtgtttattttggtccccaatttacttgttattatttattttcagggccctcagatagttgctctgtgtattctaccttgggtttttatttgtaattagtggcataggtagaagcagtgtgcttagtccattttagccagaactagagctgcactgagatggaccccacactcatccccagccaataactttttattgaagagggtttttaaattattattctactttaagttcttgggtacatgtgcacaatgtgcaggtttgttacataggtatacatgtgccatgttggttttctacacccatcaactcgtcatttacattaggtatttctcctaatgctatc

SEQ ID NO: 682367 - DNA, 1195 bp, Homo sapiens
ttggaccttctgacaactaccccatgcttaattgctttgctagagacctctgtgaaattgttgtctccaaggtcagcatttttctggagctttgactgaaagcactgatctcacctctgtaatgggtccctcctccctctctctctctctctctcctcaaagtttgttcactgccttctatctcccaggaatatctcaatgtttctgacccaatgatgatataattttcccactctgccactgttatgaataaatttcttaaaactaatttctatcttgacttttaaatgggattttggtagtgagtcatgagaagtaaaaacacaagaatttcattagccaaactgaaccaaaatattttgattgcttctttttccagaaaaatcttatttacatatcaccttcagaataatatatgtaaaaccgaagtacagttgctgcattttctggaagagaaagcgttttttcttcgggttagtcttgagggcgtaagaaagaaatctagggatataggatgtacatattcaagtttatcctcagggtagcgaccacttttacaagaaaacattggaagcttagataactggatatctttgagtttgggggagtcgaaagttatttttatttgcttattttcctttgtgtggccagaacttagttgaatataaattgatgtagcttttttggaaaaaaaaatttacaatcaatatattttactttagaaaataatctggaacatgaatagaaaaatgttcctgctaaaacaaataaaaatatatagttgttaaggttttctctttggttttactctatttccaactatttttggtgcaataagctccattttaaaaggttcggctttctgaaatacaaagtgaaattaatagtgatatacatcgcyggtggagaccctgagtatcagcgccacaaatttcattgccattcacgtggtaatcttgtgcactggggatcatcaatacaggtacaatgatgtggaagcctgggcaaattatttagcaggtgagattttgtgcggtcgatcaatgagtgacaagaaacctagacttaatagaaagtaccagcaaggaatcactgttaccaatatccatctcgtgactacatcatgcacgcccttgctaagtcacttaataggcattacctctgtgagaagaattaagtgacagaatgatgctgc

SEQ ID NO: 682368 - DNA, 1020 bp, Homo sapiens
atttgcattaaaccagcaactatcaaaaatctagaaaatttgtcttcactatttcagtgtttcaaaatatttcagtgtttcaccatatttcactgtttctctatttaaagagaacaaataaaatatttgccactgcattatttgcttttrgcatctctttgagctttgccaagaagcataaggtttattatattcaccacgggcctttttatgctggcaaacatacaaactacattagaagaacaaatttaggttgagtgaaaaatagccatagccataaaaggctctaataattattcagtgtcaatgttggaagtgattcaaaagagagaaggagagatgtattgattcatggccttcatctttctttttcccaagaagtccacaaaacttcatcattttcatccaaatattgttctcaggatttatgtccctgtgtttaaggcttttcttcttcgtggtgtctgaataggttttgtaggttatgttctttgactttggaaactcttttttgtgcaagtttcttgtgctcttcatttccattcgctcaaaagaactctccaaggaaatagcagtgaaaaacaaacacaaaacagcacttgtgtgctacaaaaacccaaaagtgcaacaaatttcatattgttctaactctaaagagctcatcttgatctactgtgtctccagttaaatgaatgaatatttggattcaaaacagataaatatatatgatctgctttcagttttcctgccctacacatgacttttaaaactgttgacaatgatgctttattcagtgcaacaagcaggagagtttggctctgaacagggagaactttgtaaaaattagtgctttacaataatgagatggactgcctccatgattcataaattctatgtctccaggggagatcaacagcctcttactgggaaaattgtcgagtcaaaagaggatgatcattaagtaccctctaaatcatttccagtatacattaaccatgtgttcagtgggaattggagaag

SEQ ID NO: 682369 - DNA, 1020 bp, Homo sapiens
atttgcattaaaccagcaactatcaaaaatctagaaaatttgtcttcactatttcagtgtttcaaaatatttcagtgtttcaccatatttcactgtttctctatttaaagagaacaaataaaatatttgccactgcattatttgcttttggcatctctttgagctttgccaagaagcataaggtttattatattcaccacgggcctttttatgctggcaaacatacaaactacattagaagaacaaatttagkttgagtgaaaaatagccatagccataaaaggctctaataattattcagtgtcaatgttggaagtgattcaaaagagagaaggagagatgtattgattcatggccttcatctttctttttcccaagaagtccacaaaacttcatcattttcatccaaatattgttctcaggatttatgtccctgtgtttaaggcttttcttcttcgtggtgtctgaataggttttgtaggttatgttctttgactttggaaactcttttttgtgcaagtttcttgtgctcttcatttccattcgctcaaaagaactctccaaggaaatagcagtgaaaaacaaacacaaaacagcacttgtgtgctacaaaaacccaaaagtgcaacaaatttcatattgttctaactctaaagagctcatcttgatctactgtgtctccagttaaatgaatgaatatttggattcaaaacagataaatatatatgatctgctttcagttttcctgccctacacatgacttttaaaactgttgacaatgatgctttattcagtgcaacaagcaggagagtttggctctgaacagggagaactttgtaaaaattagtgctttacaataatgagatggactgcctccatgattcataaattctatgtctccaggggagatcaacagcctcttactgggaaaattgtcgagtcaaaagaggatgatcattaagtaccctctaaatcatttccagtatacattaaccatgtgttcagtgggaattggagaag

SEQ ID NO: 682370 - DNA, 1020 bp, Homo sapiens
atttgcattaaaccagcaactatcaaaaatctagaaaatttgtcttcactatttcagtgtttcaaaatatttcagtgtttcaccatatttcactgtttctctatttaaagagaacaaataaaatatttgccactgcattatttgcttttggcatctctttgagctttgccaagaagcataaggtttattatattcaccacgggcctttttatgctggcaaacatacaaactacattagaagaacaaatttaggttgagtgaaaaatagccatagccataaaaggctctaataattattcagtgtcaatgttggaagtgattcaaaagagagaaggagagatgtattgattcatggccttcatctttctttttcccaagaagtccacaaaacttcatcattttcatccaaatattgttctcaggatttatgtccctgtgtttaaggcttttcttcttcgtggtgtctgaataggttttgtaggttatgttctttgactttggaaactcttttttgtgcaagtttcttgtgctcttcatttccattcgctcaaaagaactctccaaggaaatagcagtgaaaaacaaacacaaaacagcacttgtgtgctacaaaaacccaaaagtgcawcaaatttcatattgttctaactctaaagagctcatcttgatctactgtgtctccagttaaatgaatgaatatttggattcaaaacagataaatatatatgatctgctttcagttttcctgccctacacatgacttttaaaactgttgacaatgatgctttattcagtgcaacaagcaggagagtttggctctgaacagggagaactttgtaaaaattagtgctttacaataatgagatggactgcctccatgattcataaattctatgtctccaggggagatcaacagcctcttactgggaaaattgtcgagtcaaaagaggatgatcattaagtaccctctaaatcatttccagtatacattaaccatgtgttcagtgggaattggagaag

SEQ ID NO: 682371 - DNA, 607 bp, Homo sapiens
tttctttttgagacagaatctcactctgttgcccaggctggagtgcagtggcgcgatctcggctcactgcaagctccgcctcccggattcacgccattctcctgcctcagcctccggagtagctgggactacagacgcacgccgccaagccctgctaatttttttttttttttttttttttgkatttttagtagagacggggtttcgccgtgttagccaggatggtctcgatctcctgaccttgagatccgcccgcctctgcctcccaaagtgctgggattataggcgtgagccaccgcgcccggcctctcagttgtactatttcttaaataacacattgagctctatattgatgtggtcacttgtgacttactcagatattactggaaccctctcaattgaagcagaatttttttgtgtgtaattacttctcaaatctacatccccaacactaggaaatgagtaagttaaagtcccaggcattgtttactaggcaacagatctctttgcattttgtaaattatttgccacctgtcgcatatcgcaagtacgagtgagagatatcaatgtggagaaatacatttcattcaggaccatgctgatgagt

SEQ ID NO: 682372 - DNA, 524 bp, Homo sapiens
acaaagcttaagcaggtaacaggacaagaaaacgcctcatcctggaactttctctgcaatggaaatcaataygattcaacaaaattaggtactccgtataggggatcttaaccagaaccccacattacaatacacaggggagcttaaaaattatactaaaaataagaataacactaatactgatgcctatgctatatccccaagattctgatttaattgatattaaatctggtttatgtgatttaaatgatatgatattcagctagggttgagaactactgttttagagcactgcttctcaaactagttgtgagaaaggaccagctgtttcttatttcccaaagtatcaaaagataataaaaattaatgaccagaaaaaacacaagcacaccctacaaaatacaagacccaacttttaattattaaactcaacagatagacaactgtcttgtgcaattacatttctttttcttagcctgggcaacctagtgagacctcatctctatgaaatatttttttttttc

SEQ ID NO: 682373 - DNA, 658 bp, Homo sapiens
ggtctcaatctcctgacctcggggatccacccgctcggccttaccaaagtgctgggattacaagcgtgagccaccgtgcccggcccattcttaatatctatatgccagtgatctcagagtacctctagctacgatctttcctgacctatctatccaacagctattggaacatttccacttggatgtccaacaggcctttcatactcaactgtccaaaagagaattctttactttttctccccaaactcttcctccacaaatcttctccatcactatccaycaaatggtcaatgctttttgattgtaaatggtaaatgatctacctcttaactgaagcaaaaaaacagatgttgcccttgattccttgttttccccttactctacatctaaaccacgcagagttgctcttctctaccatcaaaacatacccccaaatccatccatttttctctgtattcactgctacactcttgtctagttcaagccaacatcatctctcatttggagtaataaaatgacacctcaaaggtgctttttgtaacttaagaaatccttctcagagacatttaaaaaaaaagttctggagatagatagtagtgctggttgcacaatgtgaatgtcactgaactcaacaactcaacatggttaacatgataaa

SEQ ID NO: 682374 - DNA, 613 bp, Homo sapiens
caaaaggcaatctgtggcaagatgaaaaaaaagtaagaattctgagctttttcatggagctaagtgcattttatatatataatatgtataaatctgttatgaggttgtaactttatttttgggtttattcttttgtttaaattcttgtagctgtgtttttgccttttaaatttttaattgaagaattaaaagataacaatattaccttagttcccaaaacatctagagagattttactggtccatgaaaaaaaaaatgcttggaaccactgctctggggtaaggcttgacacagctcaaagcagagtctctgtcagtctgaagaatgttttccatgaaagggagagatggcggctagggaggagctaatgtgagctttgaaaacccatcagtaatttccattatcactggataacctgagtgtgggtgtggtgagtggatgagtaatttctaaaaatggaatgaaatcttgtataaaacatgtttcccagaaatctgcacaatctcttttttatacaaatattactctagataraactagaatctacagtaacacatggttcgtttgttcacccatggttaaatatttaggtagtaaccatctaagggttgga

SEQ ID NO: 682375 - DNA, 656 bp, Homo sapiens
ttcaaccaaaatactgcttatattgaaagaaagcgcacagatactgtatgtgtgagctcttagcagacaatgctcctggcatgtaggatggtcttgctttgaacaaagatactccagggtgttggaaaggtaaaagattcactgaggatcagggtaaacattcctgagcatatgggcaaatgaacctgagaaagggttttgtggaatgctaaaatatttatttctccttgcctataaacaatgtcagctcctaacctctccccaaataaacaattgatgttgggaataactggagctcattaagaaggttaggaaaggtatatggcatttgaaagaactggcattcaagagtgcattgaggttgtgtttacttcaaaagacagattattaattttgactgaattggctagactgatgatttcttatccaaaacaaaatctcaaccatcctatttattagactggtgcttttttaaatgacttttttcccccctcaacaaactggtcaatatagtgaatatagtgacactggtttgtgtatctatagaaaaactmaaaaaataaaagttaacttcattatcatttattggttatgtgattgagcaaattacttgatctctttaggcctaagttttgccatttgtaaaatggtgctaa

SEQ ID NO: 682376 - DNA, 991 bp, Homo sapiens
tgtattttatgaaacctattctaatccctctagtgacttttagaaggctaatgttcatagctaccagggtggtatgcctgtcggttgtcaatgttactgcagagctgggtagaggacatgggtagagggtaagttaaaatgccacaaagctcactgttcttaccaagagtcagccattttcttgagtaaaatgcttcagattgttgcaaatcttggggtagtttccccagttccatattaagaaaaagattttcagaggtcttctttccaaaagcactttcctgcagtgtattcctaagtacacaaataaagtagaaaaaaaattatatatgtgattttgatcatgacatcacttttatagttacatggatatcctcagtaatatggattttacttaaataatacaacgaaatgtcaaaatttttcaacaatttgcatccttaccatagctactcaaggatgaaaaggtttttcatttagcgtctcctgaaatcctcaaaattgtgcactttgcctataagaactatacaattttatctaaatctcagaaatctcagatgtctaccatttaaatattactgtcctaccccaactccccaaaactaataaattatctactattttgtgagcagttactttgtgccagacacaattttaaaatcttgtgtataattttcccagcaaccctgggataattactcccattatatagatggtatcagtacattcaacaacttggcagatatttcagagcttctgagggttaaagtcgtgatttaaacccataaaggtaagtagctacaggtagattgtggcaacagctatctccaataaaaatatatccaggagaaaaaaaacctttaggtgggaaaggcrctggtgcattttacacataagtaaccagtcagaacattgctttcttccgccacgtaatataactggtaattatggtcctaatagaaataggcttgacaaatgccagcagtatgtg

SEQ ID NO: 682377 - DNA, 541 bp, Homo sapiens
caaaatgagctaaggctcatgaaaaatatggagggcaataktaacagcgcttcttagaggcatagaaagtgaggagaataagggtgtggtaattgtttaaaaaataaagctaggtaagaggatagagaggtatattttatttttattcttttgagacagggtctcgctctgtcacccagactggagtgcagtggcatgatctcagctcactgcaacctccgcctcccaggctcaagagattctcctgcctcaacctcccgagtagctgggattacaggcgcgcgccactatcgtctggctaatttctgtatttttagtagagacagggtttcaccatgttggccaggctggtcttgtactcccgacctcaaatgatccaccctcctcggcctctcaaagtgctgggattacaggcacgagccaacgcgcccagccccgagaggtgtactttagctagtcagtgatagcctttctgagaaggtggcatttgaatgcagacctgaattaaatgagggtgcaacccatgggagaaagaccctgc

SEQ ID NO: 682378 - DNA, 541 bp, Homo sapiens
caaaatgagctaaggctcatgaaaaatatggagggcaatattaacagcgcttcttagaggcatagaaagtgaggagartaagggtgtggtaattgtttaaaaaataaagctaggtaagaggatagagaggtatattttatttttattcttttgagacagggtctcgctctgtcacccagactggagtgcagtggcatgatctcagctcactgcaacctccgcctcccaggctcaagagattctcctgcctcaacctcccgagtagctgggattacaggcgcgcgccactatcgtctggctaatttctgtatttttagtagagacagggtttcaccatgttggccaggctggtcttgtactcccgacctcaaatgatccaccctcctcggcctctcaaagtgctgggattacaggcacgagccaacgcgcccagccccgagaggtgtactttagctagtcagtgatagcctttctgagaaggtggcatttgaatgcagacctgaattaaatgagggtgcaacccatgggagaaagaccctgc

SEQ ID NO: 682379 - DNA, 541 bp, Homo sapiens
caaaatgagctaaggctcatgaaaaatatggagggcaatattaacagcgcttcttagaggcatagaaagtgaggagaataagggtgtggtaattgtttaaaaaataaagctaggtaagaggatagagaggtatattttatttttattcttttgagacagggtctcgctctgtcacccagactggagtgcagtggcatgatctcrgctcactgcaacctccgcctcccaggctcaagagattctcctgcctcaacctcccgagtagctgggattacaggcgcgcgccactatcgtctggctaatttctgtatttttagtagagacagggtttcaccatgttggccaggctggtcttgtactcccgacctcaaatgatccaccctcctcggcctctcaaagtgctgggattacaggcacgagccaacgcgcccagccccgagaggtgtactttagctagtcagtgatagcctttctgagaaggtggcatttgaatgcagacctgaattaaatgagggtgcaacccatgggagaaagaccctgc

SEQ ID NO: 682380 - DNA, 2527 bp, Homo sapiens
tttatgagcagtttgacatacactaattatttatagtgctgtggattccatttgctgctaggtgacaatgtggagagttgggatgcaaaactgtgattaagaagctattagttggcctggcacgatggctcatgcctgtaatcccagcacttcgggaggccaaggcgggtggatcacctgaggtcaggaactcaagaccagcctggacaacatggtgaaaccccctctctacttaaaaaaaaaaaaaatttagccgggtgtggtggcacatgcctgtagtcccagctacttgagaggctgagacaggagaatcacttgaacccgggaggtggaagctgcagtgagtcgagatcatgccaccacactccagcctgggcaagacaagaccgaaactccatcttaaaaaaaaaaaaaaaaaaaaaagagaagaagaagctattagatacagtcaggatgactggatttcagcttttgtgtggctagactcagagtgtaggggggctttcagagtgcttgttaaatgctctgggttaaatcagaaagaaggaaagctagcaaaaattgcttaatcagaatagttcggttgaactcatacaagcttatctttttagatgttgtggaattctttgcaactctataattaattccagattgttcagatgtatttctagtgccagagatagtgttgtggctgcctccatagcaagcctaaaagtaccccagagctggcctctttatggtacttgcaagtagaggataaaagatgtatctttttgtatcttggatactggtggcccttggcaacaaacaatctccatctctcttgagggagtcaggatgccaagcaaattttgaggaacagataatagaataatgatatgaatcaaaataggggccaagaatcccaaattcacttcttccttccattctccagaacccatgattgcagtttccacatttttttttcagttttaacagtctcctttttcataatcatatgatgggaattcatgtgtgtcaaagagattacttggacattaccacctccaagagaggtcatggtagattgtcttactgttgaaaatgtggtccatggatcagcagaagcagcagcagcattacctgggagtttgttaggatttcataatctcaggccccactctagacctactgaatcagaatctgtattttaacaagatcctcaggtggtttgcatgcatgttaaagtttgaggagcattggtagagggaactgtggctatttattttattggtcatgtgcatactaatttcccgacctctcttgattattaaaatgactgtgaacttactagaactacaacatattgatgtgagggaggtgtttatatgtgaaggtgattggcttccatgcagaaaccatgtaacacccagcctgaacagtttctgatgaggttgcccttaacctaggaaactgaaagataatgttgtcgtgtttttgatatatgactgctgtcctgctcaactttataaacatgtccaggaggtggggagcagtttgctactcttcatttgcaaatcaattatctttatataagtagcaaatagtctattttaaaagctcaaaagataatttttaaatgagaatttgctttgcatgaagtgtgtagatgttggaaaaaggtgactttgtctaattattctaatatatgaagtttaaaggaattaagagaatgtaaaaaatggaggcagtaaaacgtagagtcttctttaagtcacaactgtgacagggtctcttcaagaggcatcagaagtgacaaatgaccattggtgaggaaatggtacatttgcagtttgggttcatagttttctaactctgtggataaagaaagactcaaggctctgacagaaactaagtcatagattgcttttctgcttatgtctctctctctcttttttttttttttttgagacagagtcttgctgtgtcgccaggctggagtgcagtggcatgatctcggctcactgcaacctctgcctcctgagttcaagtgattctcctgcctcagcctcccaagtagctgggactacaggcatgcaccaccacacccagctaatatttgtatttttagtagagatagggtttcaccatgttggttaggatggtctcgatctcttgacctcgtgatctgcccgccttggcctcccaaagtgctaggattacaggcgtgagccactgcacccggccttgtatcccttttagtagagagtatgcttcctgttcattgaagagtcaggtgacagagagtaacataatcattgaagcttggactttttatttagttttttgttgttgttgtttagtttttttttttttkttttgtcactctgaacttttgggagcatggcattactttctggctgctttaggcatttggctcttgctgatgcacataacacagggtcaggccaggttcatgctgctgcaggtcctttctcccagactttaagaagatgacattttacattaggatgcagtaaacatgtca

SEQ ID NO: 682381 - DNA, 2527 bp, Homo sapiens
tttatgagcagtttgacatacactaattatttatagtgctgtggattccatttgctgctaggtgacaatgtggagagttgggatgcaaaactgtgattaagaagctattagttggcctggcacgatggctcatgcctgtaatcccagcacttcgggaggccaaggcgggtggatcacctgaggtcaggaactcaagaccagcctggacaacatggtgaaaccccctctctacttaaaaaaaaaaaaaatttagccgggtgtggtggcacatgcctgtagtcccagctacttgagaggctgagacaggagaatcacttgaacccgggaggtggaagctgcagtgagtcgagatcatgccaccacactccagcctgggcaagacaagaccgaaactccatcttaaaaaaaaaaaaaaaaaaaaaagagaagaagaagctattagatacagtcaggatgactggatttcagcttttgtgtggctagactcagagtgtaggggggctttcagagtgcttgttaaatgctctgggttaaatcagaaagaaggaaagctagcaaaaattgcttaatcagaatagttcggttgaactcatacaagcttatctttttagatgttgtggaattctttgcaactctataattaattccagattgttcagatgtatttctagtgccagagatagtgttgtggctgcctccatagcaagcctaaaagtaccccagagctggcctctttatggtacttgcaagtagaggataaaagatgtatctttttgtatcttggatactggtggcccttggcaacaaacaatctccatctctcttgagggagtcaggatgccaagcaaattttgaggaacagataatagaataatgatatgaatcaaaataggggccaagaatcccaaattcacttcttccttccattctccagaacccatgattgcagtttccacatttttttttcagttttaacagtctcctttttcataatcatatgatgggaattcatgtgtgtcaaagagattacttggacattaccacctccaagagaggtcatggtagattgtcttactgttgaaaatgtggtccatggatcagcagaagcagcagcagcattacctgggagtttgttaggatttcataatctcaggccccactctagacctactgaatcagaatctgtattttaacaagatcctcaggtggtttgcatgcatgttaaagtttgaggagcattggtagagggaactgtggctatttattttattggtcatgtgcatactaatttcccgacctctcttgattattaaaatgactgtgaacttactagaactacaacatattgatgtgagggaggtgtttatatgtgaaggtgattggcttccatgcagaaaccatgtaacacccagcctgaacagtttctgatgaggttgcccttaacctaggaaactgaaagataatgttgtcgtgtttttgatatatgactgctgtcctgctcaactttataaacatgtccaggaggtggggagcagtttgctactcttcatttgcaaatcaattatctttatataagtagcaaatagtctattttaaaagctcaaaagataatttttaaatgagaatttgctttgcatgaagtgtgtagatgttggaaaaaggtgactttgtctaattattctaatatatgaagtttaaaggaattaagagaatgtaaaaaatggaggcagtaaaacgtagagtcttctttaagtcacaactgtgacagggtctcttcaagaggcatcagaagtgacaaatgaccattggtgaggaaatggtacatttgcagtttgggttcatagttttctaactctgtggataaagaaagactcaaggctctgacagaaactaagtcatagattgcttttctgcttatgtctctctctctcttttttttttttttttgagacagagtcttgctgtgtcgccaggctggagtgcagtggcatgatctcggctcactgcaacctctgcctcctgagttcaagtgattctcctgcctcagcctcccaagtagctgggactacaggcatgcaccaccacacccagctaatatttgtatttttagtagagatagggtttcaccatgttggttaggatggtctcgatctcttgacctcgtgatctgcccgccttggcctcccaaagtgctaggattacaggcgtgagccactgcacccggccttgtatcccttttagtagagagtatgcttcctgttcattgaagagtcaggtgacagagagtaacataatcattgaagcttggactttttatttagttttttgttgttgttgtttagtttttttttttttgttttgtcactctgaacttttgggagcrtggcattactttctggctgctttaggcatttggctcttgctgatgcacataacacagggtcaggccaggttcatgctgctgcaggtcctttctcccagactttaagaagatgacattttacattaggatgcagtaaacatgtca

SEQ ID NO: 682382 - DNA, 640 bp, Homo sapiens
ctgatttaaaatgttgatcaagaaggtttacatagagaaccctagagacataacagaaaatgtcctcttaattaatactgatccacttaattatattagcaatcagtccatatttttctatctggccatcaaaacccttataagacaaggtaaaatgtcctgctcagttttggtttagctttgcttgttgcatttccatgatctgccaatctacwaagcttttcaaagaagtgagatagaagtgagatagtctgacatcacttgattttagtgaacacatggtagcatcaaacaacttgtacatcttctctcagatgctcacaaaccactcaaaaaattttaagtaaattctgaaaaattagcacaagttacagaagagaccaaattatagagactccacacattcataacataattattatagtctctatgggaaatatataactattgaaaaaacatgtccacaatatgcaggccagaaaatttctttaaaatctatcattcacagaaaaagaactggtaacgctaagaaatggagccccctggggtggagaggaatatggggagagtgataaatgtaaaaggataatagagttcaaaaacattactttgatagtttaaattaagagaaggcagacag

SEQ ID NO: 682383 - DNA, 580 bp, Homo sapiens
tgggaaattcaggggaatgtgtagagaatttcgtgagcactattgtttctgccatagtgaatcatttctttttttagttctaaaagttagaaaatataaaactttggttattctttaatgaatattttataccttttgttattgcatttggaaaatgaaaacaactttaatttctttgaaattatagaaataaatgtttaatgctaggcatggtggcttacgcctataatcccagcactttgggaagccaaggtgagggggatcacctgcggtcaggagttcgagaccagcctggccaacatggtgaaaccctatctctgctaaaaatagccrggtgtggtggcgggcacctgtaatcccagctacttgggaggctgaggcagaggttgcagtgagccaagactgcgccactgcactccagcctgggtgacggagtgagactccatctcaaaaataagaaaaaaaaaaaaaaaaaagaaagaaaggtttaaaagaagcatgaaagatttctaattttgttcatatcaaccattttaatattttatgtagcattgttgatgggatgaagaatgtcaagtat

SEQ ID NO: 682384 - DNA, 648 bp, Homo sapiens
acaaaaggaaagaaaagaaaagaaaaaagatctcagaaggaagacgttttcaaatttcataaagttgggaaggattctaggcagatgccatgagaagctcaaggcaagaaagtcaggcagtttttacccaagtgggaaaaaaatagcaagctgtgacccacctgagggcaaggctgggggcagccgggcagccatacatgggctggtggagtcttgacttatccctggctctgagctggttgcagatattaagaaataagacaggtggagaaatcagcactcacacccagttctcagggtgccggaggctggaagggaaggagctggctgtttcctgaatcaacagtccagggcttcagccagacaatggattttctctccaaaacacacagtgttgtgctgagagagaacattgtgatttaggagcacagccagatgactgggtagggacagatggaaaaagcctagctatttatgaccttgaggacaggagagaacgattccataattgaagaccacaggtaactaaaaaaaccatgtggccagtaactttaactaattctgcctttaaaaatctttcacmatttgctaataatatattatttccttcttttatctccttcctgcctcattttccatatatttatt

SEQ ID NO: 682385 - DNA, 638 bp, Homo sapiens
ctgcatctttgaacttctgggctcaagggatccttctgtctcagcctcctgagtagctggaactacaggcacacgccaccatgcctggctaatttttgtgttttttgtagagatggggtctcaccgttttgcccaggctgagctggaactccgggcacaagcagtcctcctgcctcagcctcccaaagtgctgggattacaggcatgagccatgcacccgtccttaactgatagttttagagcagtccattagagtggacccatgtcatctgacgaagccatgtgtctgttttgtattttctaagagatttggtgctgagtaaagaaaaagaaaattcttcatatctgatgagaaggtagtgctgttgagagagaccaaaaaaggacaattagtgatgagggtatttaaggcagacagttcatacctcctgagtttttggaacatgtgtctctctttggtaaaatattttggggataatccctattatatgtgtatttaattattttaatattatatacatatrctattataaacttcctaagataaacacaaaattatagattttgctgaagagcaaaataaaaataaaattgttctccccttttcttccaacaccaaatgaatcagcccactgggg

SEQ ID NO: 682386 - DNA, 274 bp, Homo sapiens
aaataatagagttgggattttcagagaaagaccttaagttgtaagactgttaatttgtggccattaatatatattcattgtgatatataatgagaatgctgtttctttggatatagttgaagagagctggccagcttttgcatgccctgataatatgaccttctcttgtcyaaaaatacacaccttctttagcacattcctttatgtatgattttaaactccctctccattttcccactcttctatatgaatatttttgggccgggcgcagagg

SEQ ID NO: 682387 - DNA, 1935 bp, Homo sapiens
atttatgctgcagatttgcgaatgagctactgttatgcgaagtttgaaggaggaaagtgttcatcacccaaatccagaaatcactccaagcaggaatgctgctgtgccttgaagggagaaggctggggagacccctgcgagctctgccccacggaacctgatggtatgtctgtcatctgcatttctctctgggccatgcagggtgcagactggccatgatgtaagtaagactgtaggccttaaagacagtaacacaatttaatttaattgtaagtctaattagaatgttcattaaaaattattttatctcaggagcttggtagttattttctttttaattatgtcatgaatcacagatgcccaaggagtagacacaacatcttagggagtctcgttaaataacttcctctggtttctgggcttgttttttccatcatttatcaatatgcacagcatgtagcaattttctacctcaaaatrcttgtggagaagcttgtaatgaattgctattgttctatctattaatgagtgtctccaccacagaggccttccgccagatatgtccttatggaagtgggatcatcgtgggacctgatgattcagcagttggtcagttgcctgtgctggattctcagcatttctcagtattctcaatctgcttcttctctagttattcttatttttctccatctatcttggaaaattaagtgctacttttttgtcccttcatttagatagcaattatattattgcattattagataatcttttgattaaacactgaaatgatcataatttatcttcacgtttaaaaaataccttgttattcactattttttttctcttgcttaagatatggacgaatgcaaagaacccgatgtctgtaaacatggacagtgcatcaatacagatggttcctatcgctgcgagtgtccctttggttatattctagcagggaatgaatgtgtaggtgagtaataagttttcttccataggaactttacaaattaaaaattaagctatacagtattcactgtatagccatgaatataggtaccaagatggcactgaaataagttttatccatccactcatacatcattcatttagaatactagtgagtcaccatcaggtcccaggcactgtgctaggctctggagctgcagcactgaaccacaaagacaagttccttcctttcatggaccttacagcctaatggtgaaggcagacactggacatatcagaagagatactagaaaggacaacatcataatgaaagtctttgtgaaattttttaaaaattgttaatggtcataatcttattcccttatcaaataaaaattttatctggattcttttacatttagtaagatgaaaggctatataaccagtacacaatcttttttttgtaaccctgtttttaaaatgtcaaataatggctcctctggctggcctttgacccttaatcaacactaactctaacttaaatccaaggatcatatttagttatctaagaattccagagtgattcaatataacataattaatactagcataaatgctgagagtttgtctgtgtgaattagaaagtactttttccatacaagaaatcaggttatgaagatttcagctccagctatggctgtgggagtttaagcagtttttttagcttttctaggccttagaatataatattatgcaagtaaaataacatttctaattacctttgcagctctaaagatcaatggtatcgggatttttattaacttgaaacagaaataatattcttgacagtaattgaatattatagtagaacaaaagcaaatatttcaatgttttctcctcagaatcttcagttagtgctaatatgtgcatatgaaatgagcctcttcgcctaggagctccccaccatagcctcttgcctttacttttgac

SEQ ID NO: 682388 - DNA, 1935 bp, Homo sapiens
atttatgctgcagatttgcgaatgagctactgttatgcgaagtttgaaggaggaaagtgttcatcacccaaatccagaaatcactccaagcaggaatgctgctgtgccttgaagggagaaggctggggagacccctgcgagctctgccccacggaacctgatggtatgtctgtcatctgcatttctctctgggccatgcagggtgcagactggccatgatgtaagtaagactgtaggccttaaagacagtaacacaatttaatttaattgtaagtctaattagaatgttcattaaaaattattttatctcaggagcttggtagttattttctttttaattatgtcatgaatcacagatgcccaaggagtagacacaacatcttagggagtctcgttaaataacttcctctggtttctgggcttgttttttccatcatttatcaatatgcacagcatgtagcaattttctacctcaaaatacttgtggagaagcttgtaatgaattgctattgttctatctattaatgagtgtctccaccacagaggccttccgccagatatgtccttatggaagtgggatcatcgtgggacctgatgattcagcagttggtcagttgcctgtgctggattctcagcatttctcagtattctcaatctgcttcttctctagttattcttatttttctccatctatcttggaaaattaagtgctacttttttgtcccttcatttagatagcaattatattattgcattattagataatcttttgattaaacactgaaatgatcataatttatcttcacgtttaaaaaataccttgttattcactattttttttctcttgcttaagatatggacgaatgcaaagaacccgatgtctgtaaacatggacagtgcatcaatacagatggttcctatcgctgcgagtgtccctttggttatattctagcagggaatgaatgtgtaggtgagtaataagttttcttccataggaactttacaaattaaaaattaagctatacagtattcactgtatagccatgaatataggtaccaagatggcactgaaataagttttatccatccactcatacatcattcatttagaatactagtgagtcaccatcaggtcccaggcactgtgctaggctctggagctgcagcactgaaccacaaagacaagttccttcctttcatggaccttacagcctaatggtgaaggcagacactggacatatcagaagagatactagaaaggacaacatcataatgaaagtctttgtgaaattttttaaaaattgttaatggtcataatcttattcccttatcaaataaaaattttatctggattcttttacatttagtaagatgaaaggctatataaccagtacacaatcttttttttgtaaccctgtttttaaaatgtcaaataatggctcctctggctggcctttgacccttaatcaacactaactctaacttaaatccaargatcatatttagttatctaagaattccagagtgattcaatataacataattaatactagcataaatgctgagagtttgtctgtgtgaattagaaagtactttttccatacaagaaatcaggttatgaagatttcagctccagctatggctgtgggagtttaagcagtttttttagcttttctaggccttagaatataatattatgcaagtaaaataacatttctaattacctttgcagctctaaagatcaatggtatcgggatttttattaacttgaaacagaaataatattcttgacagtaattgaatattatagtagaacaaaagcaaatatttcaatgttttctcctcagaatcttcagttagtgctaatatgtgcatatgaaatgagcctcttcgcctaggagctccccaccatagcctcttgcctttacttttgac

SEQ ID NO: 682389 - DNA, 757 bp, Homo sapiens
agatatttttaagtaaatataacatcattaattgtagtccagtattaacaataactgtcattttattgatttattacaagcactctatgaaaaagatcaggcctttctattttaattttgggtcgttcaactagacccaactgttttgtaaaacaatttgaaacttggcaaatcccaaagcacaactggcaggctcagcttggcagagcttaccagcccagcacttacccttatgcttctctgcccatggccctcacagtgaccagcatgggcctggcagccagccgtttgaaacatgtttgagttgttgacactgccaggcatatattcgttttacccctgtagccacctaacctctgcatgctgaatttaagagtctgatcctttttgatggagtctaatgtgcagcatctcscgaacatataattagctacatgcactacaataatacacatgtgcactgatgataatttggagggagtccaccctcactaaagaaaaagtattaatgatcaatcagcatggtgaaggaagagtctctgtcctgctcaggatgacagcagcattctctgcaggtaataatgatattagaaatatttcaaaactctctgagtggaaaggatatctaacttagggtacactagcttgagtatcaagtagacaagacatatagtcatctgaataattatttctcactcaaaatcagctctgctccttgcagtcctgtctatgatagcagggattgcatcatcttcta

SEQ ID NO: 682390 - DNA, 757 bp, Homo sapiens
agatatttttaagtaaatataacatcattaattgtagtccagtattaacaataactgtcattttattgatttattacaagcactctatgaaaaagatcaggcctttctattttaattttgggtcgttcaactagacccaactgttttgtaaaacaatttgaaacttggcaaatcccaaagcacaactggcaggctcagcttggcagagcttaccagcccagcacttacccttatgcttctctgcccatggccctcacagtgaccagcatgggcctggcagccagccgtttgaaacatgtttgagttgttgacactgccaggcatatattcgttttacccctgtagccacctaacctctgcatgctgaatttaagagtctgatcctttttgatggagtctaatgtgcagcatctcccgaacatataattagctacatgcrctacaataatacacatgtgcactgatgataatttggagggagtccaccctcactaaagaaaaagtattaatgatcaatcagcatggtgaaggaagagtctctgtcctgctcaggatgacagcagcattctctgcaggtaataatgatattagaaatatttcaaaactctctgagtggaaaggatatctaacttagggtacactagcttgagtatcaagtagacaagacatatagtcatctgaataattatttctcactcaaaatcagctctgctccttgcagtcctgtctatgatagcagggattgcatcatcttcta

SEQ ID NO: 682391 - DNA, 642 bp, Homo sapiens
tcaaaagacagactcacagaagaattttaaatggtgacattaaatatgaaatatacaatcaaggaaaaaaataactctggcagaaatttggcttagatggaaacactcctacatcaactttagtctccaaaccaaagaaaacaacatctgaggaacattttttcttccaagagattacccaaattgcctcctttccttcattcctaaatttggtcctctgcttacaaaaaaacaaaaaaaaaaacatttttcttaacaaaaccraggatttttgtcatctttgagtatttttaagcatttctaaaaagttgaatcttaaaataataggaataacagttattgggtattcaaaacagtagattatttgtcacgttttcattacatttaagcctcattgagtccatgataatcttccatttgctaaattattttagactctactaaaagcccttgttaccgggattgtactacaaaaaaatttccttttcctcggacctgtttaagagcagaccctctctccatttagcaccgatactgatgaaacctattggatgccagggcatctcatctcatctatccatttcgtttggtatggatgcttatcacagaaagactagctcatgtagaaaagagcaccccttt

SEQ ID NO: 682392 - DNA, 452 bp, Homo sapiens
gtattttaatctatgtgtaatgataatttattgaagagttttaagtagaacaatattgcttgattcacatttataaaaaaaactatgttggcttttagaataactgaattttatggctgtattatgattctcttacaattacaaaatggttaaaaatatatatgcctaccttgacaaacctttctgaccccaaatggttttattaaaactaaaaattctatttctcctaaataggaggaatatatgtcccgaattcatttcctctctcctctctaggatttccaaacttagcctggtaaacttttgyactaggtaaaactggtcacttcttttttgatattgttcaataaggcaatgttttatgtaggaggtaatgctttcagaaatatacaataatataaagtaatgtattggtaaagaatattaacaatttttaaagcattatctttaac

SEQ ID NO: 682393 - DNA, 616 bp, Homo sapiens
ttttttttgactcaatcttttggtttaattagcttctttttttttaaattcctaaattgaatttacattatacttgtacaagtccaccctgcagatataatgaatgcaataatggatctatttgtagataagaattactctgtgtatgcttttaagatttattcaagatagttagaaaattgctgagaaagaaaaaggaaaaattacaaaaactattagaaaagtgaacttatatagtgcgtacgtgtgtgcatgtgttcatatgtgtggrtgtgtgttattgtatatgaagaggttctttttgtgatttaattgtggaatttaaaggtaatatagcattttagatatatttggctgcttgtttttttcaactagtagtttgggaaatttttcaatttattcagatttaaaaattgggcttaaagtgacttagaatcttcctattataatttgttattcatttgataatttattgtttaaggtggtgacactgttttattatattaattatcataggaactaattttactactacaatatagaaaccagccaaaaaattactgatttaatgataagtaaaatatttagtttcattactgaggcactaagcctttta

SEQ ID NO: 682394 - DNA, 664 bp, Homo sapiens
tggacacctctacacgggcacaccagtaaccttaagtacaacatgttcacagtggagccctgcccatgtctggtcttccacctccggattttatcttcagcgacaccatcacgtcgcccagtctaaatactgtgtgccatcttttgtccctccctctctctcaatccccatatctatcctttaagcctctaaattttattgatatcctaataagttttccaatctgtctccttctttctatcctcatcgacattctcttatttggagacttggttattattcacctggatgcgtgaactrgctgcctgactgtgccccggcacccttctctccactcaacacaatggcgagttttaatgtatattaaaactttggtcatgtctattaattagttgtgaaagataattttacggataagataatgtttaaactccatctccaagcatacagaatgttacgtaatttgaaaccttgctagcttttgaccctcactctcgtgcttcctatgtttctacacacaccattgtttcttgcctctgtcatttggcttctattgtttttttcaccctggactttaccccgttcatatggtcatactcttggcacataaatagtttcaaccaatatttattggaaaagaaagagaaataaaggggaaaaagta

SEQ ID NO: 682395 - DNA, 664 bp, Homo sapiens
tggacacctctacacgggcacaccagtaaccttaagtacaacatgttcacagtggagccctgcccatgtctggtcttccacctccggattttatcttcagcgacaccatcacgtcgcccagtctaaatactgtgtgccatcttttgtccctccctctctctcaatccccatatctatcctttaagcctctaaattttattgatatcctaataagttttccaatctgtctccttctttctatcctcatcgacattctcttatttggagacttggttattattcacctggatgcgtgaactggctgcctgactgtgccccggcacccttctctccactcaacacaatggcgagttttaatgtatattamaactttggtcatgtctattaattagttgtgaaagataattttacggataagataatgtttaaactccatctccaagcatacagaatgttacgtaatttgaaaccttgctagcttttgaccctcactctcgtgcttcctatgtttctacacacaccattgtttcttgcctctgtcatttggcttctattgtttttttcaccctggactttaccccgttcatatggtcatactcttggcacataaatagtttcaaccaatatttattggaaaagaaagagaaataaaggggaaaaagta

SEQ ID NO: 682396 - DNA, 1807 bp, Homo sapiens
tgtcagcatgggctgcccggtgagcatagctgagatgcaccaaggccacataagtcacctactttgccttggctgccccatctgcatctatcaaaggaagccttggacacccaccagaggagccagcatgagggagtgtatgcctttatacaaattcactccaacttcagaaaaacgtccgcagctcatgctccccctgccagagcagcagtgtgagcagctgtgtaggtttggaagcaccccagtcacttgggcattgatatggtttggctgtatccccacccaaatctcatcttgaattgtaagtcccgcagttcccaggtgtgtgggaggaaccttgtgggaggtgattgaattatgggggcgggtctttcctgggctgttctcgtcatagtgaatgagtctcacgagatctgaagattttaaaaatgggagcgcttgttgcacaagctctctcttggcctactgccatccgcttaagatgtgacatgctcctccttgctttacgccatgattgtgaggcctcccaaccatgtggaactgcaagtccaataaacctctttcatttgtaaactgcccagtctccggtgtgtctttatcagcagtgtgaaaatggacgaatacaggcatatttctcgtttgtgatctccctttacccttgcgtacataccctacagagacagtcccagtgtgcctattcccagtcaactcctgccttccttgacggttttgttggcaaagcatcaaaagtaagacccagtacaaaatgtagttgctaccctgaggcttgaccactggcctactggcctttacctgggaaattaaccaactcataaacaaacaaaaaaaagtaatcatataggaggcagggtggacatagatttacttgatatttctagttaagggacttgggcatagacatctataatctgagcctctgtttcctcatttataaaattgggttaataatgccatacagaagtgttattagcatgataaattaaggaaagctcctggcctatagtgaatgttcaatagaggagcatttcataagtgaagccacagaaatgtgtttccaatttccatcgcaaaggaaatttttaattggttttatccctgaagccaaaatattttaagattgtacttataaagctgatcacatctattaaataatcattcattcgtccagttataaataatcaaagataaaatggttagaggttctgatcagcataaattagccagtgttaccactactaagtcaatgaagcctaaagcaaatcaaataaacattgacatttcatttttgccagcatgtattttgtgtgtaaatattttgttaggcttttggaaatattaaaaatgaagtaagaatccccatttctgctaccatagcccccagtgctcaagttcagtgtcagaatacacaagcacccgccttggtaaaaaaagaaaggaggcacgcagaccacctaggcatgggctagtgtatatttatccaataacatattcctcccccacctcttcccatgagccctaatgtatgtggtgtggagagactatatagtaggcaagacattatatactgsaggtcaaaagaagaaaaggaagatgaaattccatcatgtattattcatgcatacagttaatccttcctatttctgaaggtcactgaaaagcccagattattgaatatttattttttagtacaacatgaacgtttatttagaatgacaaaaatctcaaatacaaatttctaagagttgacaaatcccacaaacattaccaaatccagaaaaatcacaca

SEQ ID NO: 682397 - DNA, 2005 bp, Homo sapiens
  misc_feature 1198, 1199, 1200, 1201, 1202, 1203, 1204, 1205, 1206, 1207,1208, 1209, 1210, 1211, 1212, 1213, 1214, 1215, 1216, 1217,1218, 1219, 1220, 1221, 1222, 1223, 1224, 1225, 1226, 1227,1228, 1229, 1230, 1231, 1232, 1233, 1234, 1235, 1236: n = A,T,C or G
  misc_feature 1237, 1238, 1239, 1240, 1241, 1242, 1243, 1244, 1245, 1246,1247, 1248, 1249, 1250, 1251, 1252, 1253, 1254, 1255, 1256,1257, 1258, 1259, 1260, 1261, 1262, 1263, 1264, 1265, 1266,1267, 1268, 1269, 1270, 1271, 1272, 1273, 1274, 1275: n = A,T,C or G
  misc_feature 1276, 1277, 1278, 1279, 1280, 1281, 1282, 1283, 1284, 1285,1286, 1287, 1288, 1289, 1290, 1291, 1292, 1293, 1294, 1295,1296, 1297: n = A,T,C or G
atgtgtaaactccacaacttcccagaagatttggcaccaaaagatggagggtaagagacaaagaaaaaattcactaagttagagagagaggctcctgggcaccatggtaaaatcacgaatcccaaactgaagatttcaatatcagcaaggaaattccccactgccacggaagagagacctcataatgcctacaaggtaggactgtctcattgctattgaccacagactggtatgtatcccattcttttcttttccaaatgaggtattttattgcagtttttctcttctcgctcatcattagagtgtccgtgtttgtgtgtgtggacacacatagcagataagagagattgccttttaagttcataggtcactagatcatgagaagccacgtgcatcctgacagggaggactgtgcatgtgttggtgattctaaatctaaattgaggatagtaactacataggattttgggatgttaccgttgagtaggagtaaaatgtattcagtgtgaggagcaagggatttatagggatattaagtgtggcaaagacaaatgatttgtcaatcaaaaactcagcctccctgtagtgtgtagagttgtttctgggaggcatcacccacagtttctacatttcccagtatcccttgcatttagatagggccatgggactagtctcaccagaggactacgagtaaaaataatgcatgttacttccaggctgaaatgttcaagaagcaggtatgcctgccccattctttcttcttcagttcactggctggaagtaaatgattcgaaagctatagacaggggagctacaaggtagaaggatcctgaacaacctcatgaaaagctgctcactgaatacagcactacattcttgtgtgtgtaaaggaaaaaaaaactattgtgttaagccatgaatttcaggggtttatctgaattctctgctactcttactcaatgattacaaagaatacatagttataaaaattactttgtgggtataggagcaaaacatttgaaagccattgatctagttcagttctacacacacacacacaccacacacgaatttaggggcaaataaaaatttatgtaaatgtatacattaaattttaaataatggtatatcattagcatgaaattagggcaacctaaatgcaggaatttaccagtttatcctctttcgatttaaatcnnnnnnnnnnnnnnnnnnnnnnnnnnnnnnnnnnnnnnnnnnnnnnnnnnnnnnnnnnnnnnnnnnnnnnnnnnnnnnnnnnnnnnnnnnnnnnnnnnnnaaattttctctctctcctttttttgtgggggagggacagagtctcactttgtcgcccaggctggagtgcagtggcgtgttctcaattcactacaacctccacctcctgggttcaagtgattctccttcctcagcctcctgagcagctgaaattacaggcacctgccaccatgtccagctaatttttgaatttttagcagaaacagggtttcaccattttggccaggctggtctcaagctcctgacctcaagtgatctgcctgcctcagcctcccaaagtgctgggattacaggtgtgagccactgcgcttggccagaattttttctcttacttcgtcaatgtttcatactgaatctgatggttaggggyattttggtttgacttttaaggtttttttccctgcgttgttaatttatctgagtgtaaatgataacacttcttaatctgataatttacacaaagtttttcttttgccatgctagctaagaaaacaaaaaatggctcagtcttttttttttttttttttttttttgagatggagtttctctctggttgcccaggctggagtgcaatggcacaatcttggctcactgcaacctctgcctcccaggttcaagcgattctcctgcctcagtctctcgagtagctgggattacaggcatgcaccaccacgcctggcgaattttgtaattttatatttttagtgga

SEQ ID NO: 682398 - DNA, 641 bp, Homo sapiens
tacttcgctttaacatttgacactctttatctttacttctcgaaccattttcctgcctttagtttcatgcttctgcattctgtttcttgccccccagtttttagcctttttagggttctctgcaaggtcctcttctgttaacctattggtgttgacttctgtcarttccttctaggactttaacacaggctctcttatgttcacagtctacatcacatacactccctcaataagtatatttactcccatggcatcagttcttatgcttacattccatttatagttatcactttgcctttttcgcctctaactacccatctctagctgtcatggaatcaggtctcactcctgtattccatatctctgtgagttgtggcactatatccccactttcccaagtcagagaccatggtgatattctcactcttccttcatcttttctttttcttactgatgattcttcttatcaagtctattctgactctgcagtatcttcagactgacaataaaagcaatagttttatggacagtttctactaacaaataaccttaaacttacccattatagtagaaataatagtactgtatgataattgtctgttcatttgtccctttcacttgaaaaagtataaactccttaa

SEQ ID NO: 682399 - DNA, 641 bp, Homo sapiens
tacttcgctttaacatttgacactctttatctttacttctcgaaccattttcctgcctttagtttcatgcttctgcattctgtttcttgccccccagtttttagcctttttagggttctctgcaaggtcctcttctgttaacctattggtgttgacttctgtcaattccttctaggactttaacacaggctctcttatgttcacagtctacatcacatacactccctcaataagtatatttactcccatggcatcagttcttatgcttacattccatttatagttatcactttgcctttttsgcctctaactacccatctctagctgtcatggaatcaggtctcactcctgtattccatatctctgtgagttgtggcactatatccccactttcccaagtcagagaccatggtgatattctcactcttccttcatcttttctttttcttactgatgattcttcttatcaagtctattctgactctgcagtatcttcagactgacaataaaagcaatagttttatggacagtttctactaacaaataaccttaaacttacccattatagtagaaataatagtactgtatgataattgtctgttcatttgtccctttcacttgaaaaagtataaactccttaa

SEQ ID NO: 682400 - DNA, 669 bp, Homo sapiens
ctcttgaaagtcaatatatttagaattgtaatttattttatttcacctaaacttagagttttatatctcataatcatcgtttagtcttcctttcccattcacttgttctttccaagttattacagtcttgttattatctttctttttactttgttgtttggtttttatttttattttctaggattcataatttttatttgactgtccataacagaagagttaatgagtattactactgatttaaaaatgtaaataaacataaattaacayctgtttaaaaatctacttcatttctgtgaggttaaaggatccttctgataccagattatattcagatatatccattgcccttttaacttcattaattttattttattttggtaagaatatttaatgtgagatttattctcttaatgaaattttaagtatatagttgggtattttgatagatacaatatagcatatcttgagaacttacctttctcaattaaaactttgtgtttgttgattagcaattccccacttccctctttccctagacccaggcaaacacaattttactctttgattctgtgaacttgcctatattcgataccacatgttagtggagtcatccagtatttatctttctataactggctcatcccactgagaataatgtcctcaagg

SEQ ID NO: 682401 - DNA, 652 bp, Homo sapiens
atcactatttgcagcactgcctatgaattggggtactccacctgtccatccattaactatttactaatggcctgccatttgccaggcactgttcttggtggtggaataaaacaacttatcctctctgccaggcagatgtatccataagatagagatggacctaccagatcctcatagtgtgaaggcccaagtttttatagcattccatgtaattaactttgctctgattctctgctagctgagtgtcttctaattcactcttggactgtcttagatctcaggaagaaaatatgctgattccagcgtaagctttctaatccccgtgattccagcaacctgctttttctycttttcctccttctccttctttgttttcatcaccaccatcaagttcgtccttatagtcaccattcactaactaccaggctttgtactttatttatgtcttttaatattcatggcagttgcattttatagatgcaagtagtgagtcttagagaaatttagtaattttccctcatagtaagtaacggtgacggtggatcagaatccagctctgttgacatcatagcccaagttctgtctaccattataaaggaataaatttgcatctaggtttataggtcagtcccttgagaatttaaataaacac

SEQ ID NO: 682402 - DNA, 284 bp, Homo sapiens
tcaaccaggctggggtgccgtggcacaatcatagctcatgcagccttgacttcctgggctcaagtgatcctcttgcttcagcctccttagaagctgggactacaagcacgcaccaccacacttggctaatttttgtatttttattttgtagagatggggtctggttatgttactcaggctggtctcaaactggcttcaagcctctgcatcccaaagtgctggggtcaygggcataagccaccatgcttgacctaaaataattgtttttgaaaaagagagatttt

SEQ ID NO: 682403 - DNA, 620 bp, Homo sapiens
tgtttcaaaaatattctctccatgacatttgttttatcaaaaaataaaacaccttattttaaaactttatcttaacttcaaaggaatttattttatgttttttgtaactatctgcttaatagtgtctagtaatggccacttgaaggcctgcaaatttctgacacatattttggaaaacaaaatctcaactttatatttgacaactcttaagaacgttaccaagaactacgcagtgaagtcctatgtgctacaaatactgcttaatataaaagtatttcatgaatttcaagatctatattatttaagattatttttctyaaataaaatggatttgatgaaatagacttttaatgctttctgcagtgaacgatgatgcagtgcatgcattttacatgttgtattatatctataagcttaccactgtgatatggtttggctgtgtccccatccaaatctcatcttgaatcataactcccacagttcccacgtgttgtagtaggaacccagtgggaggtgactgaattatgggggcgggtctttcttgccctgttctcgtgatagtgaatgaggcttacaagagctgatggttttaaaaatgggagtttccctacacaagctct

SEQ ID NO: 682404 - DNA, 599 bp, Homo sapiens
ttggcaaaattcaatgtaagtatgttaaaaaggagctttgaattaaacacatttgaatatttgaatgtaagaaacaggaaaagtctatgaaacatcctgcagttcaaaaaattgtgaaaaaactataggtcaaaattatgttcactttctctcaatatttgtatgatatagcatacatgagtttggtttagagttttaaaatatatgacactatatgtttttatttgagttactagacatattaaacataagcttcttatgtcaacaatagagtaaaacascataagcatttgtatatataatttatagactatgtaagtatattataagaattatttcacgcctgtaattccagcactttgggaggccaaggcgggcggttcccgaggtcaggagatcgaggaccatcccggctaaaacggtgaaaccccgtttttcctaaaaatccaaaaaattacccgggcgtagtggcgggcgcctgtagtcccagctacttgggaggcttaggcaggagaatggcgtgaacccgggaggcggagcttgcagtgagccgagatcccacccctgcactccagcctgggggacagagcgagactccg

SEQ ID NO: 682405 - DNA, 628 bp, Homo sapiens
tttcaccaaatatttggacacccatctccagtctaactgacacaaaactaaccatcacaggtactataactgtgttgtacttatttgagtttatatccaattgtttatattttgtaattccattattatttgtaattatagaaacatatttgtcataaatattatatctctggtttttctcatctgtttctatagaaattaagttacagcatacatgcacataaagtcaactaaatatgtggccctaatgtttccagatatttaaaacccctcataatccaagcagattttaggagaaaaaaaaagattttttttcaactagtacaaatgtaattatcataaatgaaaatatatctgtggaaaataatctcaaaggcaattttttctcttaagctctccatttctttatcctccttcwagttagagatttattggaaaacatatccaacttatttgataaagattaatttcttatttaaatatgatgtcctttaaaaagtttagaatacagagtcttcttattctttttacagtaccaattcccaccaagataaaagaaaaccagtttaatagaggcttagttccctacttactttctagttttcatcattcatgatactcatataac

SEQ ID NO: 682406 - DNA, 892 bp, Homo sapiens
atttacttactgtgctgaggagacttagatggttccctgtatctaacactgcagtcttcttctggcttgtccatctgtcgtactggctgagggcttctgatatctagagcaatgctcagtacatcctcaatatccaataatgatttgtggaataagtaagtgtatgctgcctagattagcatggaaacatctccttttcactcacctagattataagcaaatttagagtaggaaccctatgtgaaaaaatctrcaatacttaaggaccaggcacacagttggaggttattaaatgcttactgatttactgcttggtaaataaacagaaaagcataaaaaagatattagagggtatggcctaccagccattccaactggggacttttggaggactttgggccagcttgtctggtattaatggtatatatttataattaggccgttgagtgaggaaactgggcatatgtgataagaaactgaataaagtgttattctaggagcttcgtgagcagagcacagactcacttcactataaggaaaaaagaatgatcttcttaaacctcattaactcaaactctactaatttagaattagcaatcactcagacccacagagctgaattttactgttgcactttgaaaagtgtatctgtaaagtcagtgagcagtgtcagaagggaaacaggggtgagggattcagctggttattgatcaccaatcataggtccagtacaagtgctcaggaaaccctccctgatctgcttgttatccttgttgagacccagggtgccttttgtgcatgtggccctccatcataacccttagcacaatgcatcgtaaataatcctacaacagatgggaactccttgaagatgatgcccccagttcctttt

SEQ ID NO: 682407 - DNA, 602 bp, Homo sapiens
attatatagaatacgacatgctgttaaaatgaacatatcaagagcagcttgagcaacacatctgagagtctaaacatcagctcagactgagaagaaagcggagaatggcctgaataaaggcttagataggggaatgactgcattctgttctgagcagaggaaagaaagcagctgatttagagaaaaggtctattaggaaaaagaagattgaattttttccttgtacctttttaaaaagaaattaaatagaatktactgatctcccacaaagaaggccagtccttcccttaaggagcttaatgtctattagtgggaagaagataataaacacatataatcagggctgaacataaaaaaaccacaggacatgagggcgggcatggagtgcacggtttcaggggaaaatagttctaaggaaggtcagaaaatgccagcatttaagagggtcttgatgtcaggatcatatcaaaaacacttttccaggactcgagaatgctgccccagggaatagcttctccgtgtttggcccccaaaccccaatgggctgtggaggaagcaggaaaaccattttcaggtaagatatccccagagtagctgcttca

SEQ ID NO: 682408 - DNA, 594 bp, Homo sapiens
taccttaaactaatatatgctactcaaattgtatrtactgcagaccctggcattcacagattctcttacgccatctttgactgttttcatgaaaccccaaatcatacgacataacagtaggttacccttttgctggagtctgatttccatttaggggctgatatagtaggctgaggcaggagcctagagagcaagcctggctgactgccccacactcatcgatcccccagtgtagcggttctcccctttggacaggcactgcacctctcgctagagatctgaaggtgccgcgtcagttcttatttgtgcctctataccttcataacatatctagaatacctccagttgccacttatgcccaccctggactatctcattttccttgggctgttacagcatccttataactcatcagcttatgtctgctttgtccctgatggactgctttgaacacagcaactaatatgatccttgaaaatcataagacacatcctgttgttccttcattcaaactctcccatgtcttcccagccttcccatcacacccaggaccctctgagggcagagactactgtgtcgaggacacagagggca

SEQ ID NO: 682409 - DNA, 1146 bp, Homo sapiens
ggtggtgaaactatagctactccatagacagagcagagtattcccagtattcccaaaagtaagaggaaggacgtgcctgccctaggtacaatgcttgtttatacataggacaacaacaacaacaacaaaaaccatggggagttgtgctctactacaagggtttgtgataaaggatacatttttctaattactgcattttgcaagaatcaatatgactatctttaaagcaaaattaggaatgcttttgttctgaagatatggagatatcaagacattcctgggcctgagtctgtttagtaaacattattaatctgttctcttaaccataaacatctaggagctaggaataaatacctaacctcctgggaatgcagcccagcaagtcccagcctcattcttcctagccctcactcaagatggagtcgctctggtttgaatgcctctgacatggtaactagccttgtaactttaggcaagtcaggttttcagttttgtggggggtaaaaggaagccaggatttgcattttactatttagaaatgttagctcaataaaatcattagattagataggtgatagatggatggatggagatagatcgacagatagatagatagataatcaatagatccatcttacttgccaaagaacaagagctttaaatagtcaaattattagagaggctgtagctttcaggtgactctctactatacaagaacttagctacagtatgaacaattttcaaaatcatttatttgttttgtgtacaatctgtttggcatggaagtatgaaatagatcagtatggttgtattgttaacagactgagcagtctgtgctctcgttagtttattttccatttttggcacttggctaagaaagacataagcatctgccactagtggatatactcaagagttccctataaacatagaataccatgaaataaaaacagaatggagaggctggacaagatacatagcttacagagtcactactaatccacagtcatttctcataagttacggtcttcttgcatttgtgttttytttttctctctctcttttagcagaggtgcaaacttgggcaagttagttaatatcacaaaatctgttatgtcctctgggaggtgagcatgaaattaattc

SEQ ID NO: 682410 - DNA, 651 bp, Homo sapiens
gaaagaaaattagtcattttcctttgaagtaactcaccaaaatattcagagaacaggccactcaccataggaatttataccaaaggaaagttgtttagtaaagtactaagtatattactaaaatgtatgccccatactaaaagcatatcataaatacagtgagcaagtatggctctttctcagcataagatcaggccatgccactgttggaggtttggtaatccttggctgggggaagcaatagaaatattgataaacatttttgtttcctataaaagtagtattaaattacattgcaattaaagtagcagtgaatatagtgaactttacttggcctgtatttttactatagcactcttacatcattrtatattttgattgtgttttagagattttcttaacccaatttatagattggcttgtttagtgaacctgtaaaactacacattggtgtcctagggaaatggtcctgctaaaagagcttgcctttcatttcaagcagcaacttctactctagaagagatcagtcaattgccatattttcttttcactcaatagttttgggtgttatagctcatgcaaagtgcctttgtattttggttcactgacttaaggtgctctgtgaattcaacttataaataactaatgtag

SEQ ID NO: 682411 - DNA, 1601 bp, Homo sapiens
cttcatcacatcaaaatttttattgctgctcgtttgcctttatattaatgttgtgtggatgtagacacatgcatgcaggtattcttatggatatatraagtagtccagaagaagaaaagcaatcaagatcttatttagaaatattctgtcatttatagtacccactttgtctttccagctactggggtattggggcagggaagcaggtagcttttcaaagacaccaagatgcacactcaccatctgaaacatctcaagaccttactattaattaaacactcaaaatccttagatgaagaatccctccatataatggttctgagtatcttgaaattttcaattcctttaacttgattggttgacatcaaaggatcttttcttcttagaatagtagtgcatttattttataattttttacaagtgttggtaattactataataaacacaaggattacaataataaacagaaggtattttaaaccattttataacattttatgtgtatatttatttaaatctcaagcaaaggttcatcatagaattaaacaaaattcttctaaattacacccactctaaattaccgcaacttagaaactcaaaggaaaaagtaaacaaatgagacacaatcaaaattctaatataaatcataccatgcccaggaatatatagcagttttcagctttctgacattttagtacaaattgttgcctttgcaatgagacaatcccattggaaaacagtttatttttttattctaacattttaattaatgaactaatgcctgagtacttattatatgcccaggaattataattatggatgttgcagaccatttaacgtatttttgaattttattgataaaattttattttagacatgttatttttctaggaataaagcaagtttaaatgctaaggaaattttataggcttttcatgtctgtctccaatcacttgatctcatggccatataattttacagtattctcaaagtgttaaaatcacacttttgctagttttcatttttccctacttttctttctcttgtggagtacaaagaataaatgctgtcatgggattaacatttgaaagaaagtgataatagaaatgaggaatatgtaatatttcatattataggtatttcagaggcaagataatcaatggaattaactgacaaaatgaaattcacctgtgctctaaatgattgaaaccaatgtattaagacagtgaagaagtaaactacccgaatccaggcatcatgatattaatgctactaaaagaaaattacctgattcaaaagatttccttacacagtgattactatacaatgattctcagaaactacatagagacaaataatacaaatctataaatattattctatagtatacctaaacagttaagagtaaagagacctgaatactaaatatataactacatattttaaagcatatatcagaaagtcaatttaagtagaatgccaggttcacctgcaaaagggtgtaagtagcaacaacattacctgaggcgctgcagagcttattgaatgtgttcacaaaatgactacaatctctctgggaagttgccgacagtacgaaggtg

SEQ ID NO: 682412 - DNA, 1680 bp, Homo sapiens
ctcaaactctgaaaaatcatcttgattattggtaagtcatgaggtttatttttataatcagtaagtttatgaatggccagcacattcttatcaagtaatctattctacataattgttgtccttgggctagaacttctgttaaacaactggaaattttctaagactcagggataaatctataatgtgtgcattcacagctctatttcactaatttaactacaagagtaaatatttaattaaatttgaaagtctccatgaagtatctacttgaataaatcatgacatatacttctaaaacattggctttcagtctaaactactacagtgattttttaaaaactcatttaggaatagaaagttatttaagactgatactaagctagtatcgtgcatatctctttagaataatagaaatgttctaaatttgacacactgtttatctcagggattatttaattatatattctttaaggtcaggggaaaaactccattaattttatttaaatgaaaacattcattctcagaagctagggaataataattactattattaattattaatagtaatgtggtaatgattattacaataacttgcaattgttttaatgcacttcatygcgtgctttataatttatgcatcttgtttaaatgttttaaaatagcattaagtaaaaaaagttcacaaaaggttatatcaactgctgcttagtttttattattactgaaaaatgagatgttcagcaacttttaaactagacttttagctgccaatttttttgataatccttatacttgggtagggctctttgactccttctgggcagtgggtcatgtactgaagcagtacagatcacctctgctctggggcatttaaacgcaaatgttaaaatctcaaatatctcttcctccaccacttttatcaaagatacgcttcagattgtcatgctagaagttgatggtgaaaaaaaatgttgatgctgccagaaacacagtggattgatgattactctgtagcacaatcctatcctccctattacagaaattaatatcagaagaggttcattgctataactcaagcctcaaaaatgtgagattagcctttagatgttgaataagttgaaataggacattaacacaatagcattatatgttatgtagtttctaagtatttgataaaatcatctatcacctgtggcacttgagaggtagataatatacctaataaactttaatatgtaattattgtaaaaacattaatagtgtatgttgactactgggggttgttttttgcaaggtattaaaagaaacagatgacctcaggaaaacaaaatagctgtgcaaacagaaatgtacagaaatagaggaagtctaaaaattttggggccttgggagaggcagattattctcagttccaaataataaattataaaactaagaatgttttagaattaaaaggcccctaaaaatttgtcctcaaggtaaggaccaaattaagggtatggccttcaccttattgtggaaacctgggaaaggactaaatggcctctacctaaggatcaaatcaaaggtgtggttctcagtcatgcctttcaattagaccacaaggctcaggaaaaaaagatttgaatcttgagactctcccacctaaacctgatgggattaaaacactttgaatttaat

SEQ ID NO: 682413 - DNA, 1680 bp, Homo sapiens
ctcaaactctgaaaaatcatcttgattattggtaagtcatgaggtttatttttataatcagtaagtttatgaatggccagcacattcttatcaagtaatctattctacataattgttgtccttgggctagaacttctgttaaacaactggaaattttctaagactcagggataaatctataatgtgtgcattcacagctctatttcactaatttaactacaagagtaaatatttaattaaatttgaaagtctccatgaagtatctacttgaataaatcatgacatatacttctaaaacattggctttcagtctaaactactacagtgattttttaaaaactcatttaggaatagaaagttatttaagactgatactaagctagtatcgtgcatatctctttagaataatagaaatgttctaaatttgacacactgtttatctcagggattatttaattatatattctttaaggtcaggggaaaaactccattaattttatttaaatgaaaacattcattctcagaagctagggaataataattactattattaattattaatagtaatgtggtaatgattattacaataacttgcaattgttttaatgcacttcattgcgtgctttataatttatgcatcttgtttaaatgttttaaaatagcattaagtaaaaaaagttcacaaaaggttatatcaactgctgcttagtttttattattactgaaaaatgagatgttcagcaacttttaaactagacttttagctgccaatttttttgataatccttatacttgggtagggctctttgactccttctgggcagtgggtcatgtactgaagcagtacagatcacctctgctctggggcatttaaacgcaaatgttaaaatctcaaatatctcttcctccaccacttttatcaaagatacgcttcagattgtcatgctagaagttgatggtgaaaaaaaatgttgatgctgccagaaacacagtggattgatgattactctgtagcacaatcctatcctccctattacagaaattaatatcagaagaggttcattgctataactcaagcctcaaaaatgtgagattagcctttagatgttgaataagttgaaataggacattaacacaatagcattatatgttatgtagtttctaagtatttgataaaatcatctatcacctgtggcacttgagaggtagataatatacctaataaactttaatatgtaattattgtaaaaacattaatagtgtatgttgactactgggggttgttttttgcaaggtattaaaagaaacagatgacctcaggaaaacaaaatagctrtgcaaacagaaatgtacagaaatagaggaagtctaaaaattttggggccttgggagaggcagattattctcagttccaaataataaattataaaactaagaatgttttagaattaaaaggcccctaaaaatttgtcctcaaggtaaggaccaaattaagggtatggccttcaccttattgtggaaacctgggaaaggactaaatggcctctacctaaggatcaaatcaaaggtgtggttctcagtcatgcctttcaattagaccacaaggctcaggaaaaaaagatttgaatcttgagactctcccacctaaacctgatgggattaaaacactttgaatttaat

SEQ ID NO: 682414 - DNA, 621 bp, Homo sapiens
tgtagagattaaaggctatcatgttaatcaatgcccagcaaaatataaagcacacacttttaaatttgagccttctattacatatcaggataatgtaataaaagttaaagttattttatagaaaactttaacaaaacttttaaggatttactatgcaacaggtgctgtcctagggaacaaagatagaattggcaacaacaacaaaaaattctctctcttcatgaagctcacattaatgttacatagaaagacaatatatttataaacaattacatatatcacaatcttatgcagcaataaatgatatatgcaaaatagcagagaaatcagatccagtataagggaatactaacttaggtaacagagccagtgaaatctttattgaaaagatggcatttaaaatagagwtgcaaattatgtgagtaagcaagtcatacgaatatgtcatctgaggattaaagaggaagtgcaagggacatgagacaggatgtatttgacatgtcattgccacacagtcagtaaagagaagagattaaattggagaatgaatgacagatgataatatatacgttttatatggtttcatagttttaaaatttttttctaattatagtgagaaat

SEQ ID NO: 682415 - DNA, 621 bp, Homo sapiens
tgtagagattaaaggctatcatgttaatcaatgcccagcaaaatataaagcacacacttttaaatttgagccttctattacatatcaggataatgtaataaaagttaaagttattttatagaaaactttaacaaaacttttaaggatttactatgcaacaggtgctgtcctagggaacaaagatagaattggcaacaacaacaaaaaattctctctcttcatgaagctcacattaatgttacatagaaagacaatatatttataaacaattacatatatcacaatcttatgcagcaataaatgatatatgcaaaatagcagagaaatcagatccagtataagggaatactaacttaggtaacagagccagtgaaatctttattgaaaagatggcatttaaaatagagatgcaaattatgtgagtaagcaagtcataygaatatgtcatctgaggattaaagaggaagtgcaagggacatgagacaggatgtatttgacatgtcattgccacacagtcagtaaagagaagagattaaattggagaatgaatgacagatgataatatatacgttttatatggtttcatagttttaaaatttttttctaattatagtgagaaat

SEQ ID NO: 682416 - DNA, 673 bp, Homo sapiens
ctggtctgaactataaaattagccttgtggtggtattactactgtttcccyaaacacctctttacaaaccttcagaaggagtcagagtggtgtatataaaacacattatagagatattttagatcaatcacttactttcaattgcttcaaatatcctgtacaacaccaactccatttcataaaccacttactaacatcagttattctgtccttttctatttctgttccagaatcctgaaggtgtttgatgtagattttaaaatttcttttattatcacttttaattcattccaacatgtgcaggttttccctaacgcacaaataggatctcttcatctcagggtctttttaacttaggagactttttatagagacaacttgctgttctctcagcctggactatttcttcccttatcccaaaagatctcaacttaaatattatgtctttaaattattttttcctcaaaagatgctgtaaggagaaaatcttgcaatcatatttaaaaaaaaaagtatttcctcaaactcggagggagctgagagatcaaagaatgacttggccaagttcagcttggagaggagatgagtttattaagacttacgaagtactcttgggtggcagcaggacggctctagagatctgggctgcttctcattcctaagctgcttttaa

SEQ ID NO: 682417 - DNA, 610 bp, Homo sapiens
ggctggcaaaatggctgagaaaaatcctgcatcaagaattttattcaatttttgggatggggcaaaggcaattcatttactgattttaattttctctatattttttccaaagacctaaagattaaagttgtgtccatgtactactatatatgtatttagggttagcagagataggccttttagttcttgaccctggaaattatatcttacttaaatatttactcttggagattttggacttattttttgacttttttttataggccacaccatgtgrtgaattaaaattatttgtgtatcatttgccaagtaggccaatctatctcccttaagtcttattaaccagaaactcttaccatttacatggtggcttatagagcttttctcttctaatgctgaagtgtcatgaagacatcagagaaagttacatcacatgttttagacaggcatttatttgcaaaaaagttaatacagtttgaaaaatttaaataccaataaactaccttcttgtttaaattgaatgcagtgccttacttagaaaatttaactcctcacttaagtttcctttcacggtaattggcaacaccataaatctaattgctaatgtcaa

SEQ ID NO: 682418 - DNA, 610 bp, Homo sapiens
ggctggcaaaatggctgagaaaaatcctgcatcaagaattttattcaatttttgggatggggcaaaggcaattcatttactgattttaattttctctatattttttccaaagacctaaagattaaagttgtgtccatgtactactatatatgtatttagggttagcagagataggccttttagttcttgaccctggaaattatatcttacttaaatatttactcttggagattttggacttattttttgacttttttttataggccacaccatgtggtgaattaaaattatttgtgtatcatttgccaagtaggccaatctatctcccttaagtcttattaaccagaaactcttaccatttacatggtggcttatagagcttttctcttctaatgctgaagtgtcatgaagacatcagagaaagttacatcacatgttttagacaggcatttatttgcaaaaaagttaatacagtttgaaaaatttaaataccaataaactaccttcttgtttaaattgaatgcagtgccttacttagaaaatttaactcctcacttaartttcctttcacggtaattggcaacaccataaatctaattgctaatgtcaa

SEQ ID NO: 682419 - DNA, 646 bp, Homo sapiens
gaccaatgagaattagacagaagtccctgtgagtaaacatccctttctaaagaaaaagagaaagtatccatgggaaggaagtttctgagctctccctttgttcttcctgcttgaaagtgaaawaagaggcaaaagtaacatgctaaggatggtggggaagcaagacattacctggatccctgatagtatcagttacctgtgaactaactgccttctgattcttatgagacaaataaaacactaactcatttaaattaatgtcagtaagattttctactacttggagccagaggcatttttaccgttaaaacagagatacttgagttagactctttatggttcctcctttcttaagctataatccagtccttactagctagaaaaaaaagaattttgaatgtacacttttacaattttctgtaatctgaattacttctataaacatggtcaaattcctccatataaatccatttgttgcatagttattacaagatttttattttaagtggaaccttcaatccctcaaatctattaaaataacatttttctatagtatggtatataacattcatatatataatacacacatataagtaaatagctgaaggttaggaagaaaggagaaaagaaggagaatggggggaga

SEQ ID NO: 682420 - DNA, 863 bp, Homo sapiens
cagaaaggcccaaggggaggctaattccaaaacctgaacccaagatagttcagctcacccttttgttattcctaaacatcctacacttctcttacataattttttcttttgagacagggctttactcttgtttcccaggctgtggggtgcatggtacaatcacagctcactgcaacctcaaactcctggacctaagttatccttgtgccttaacctcctgaataactgggactacaggctcatgccactgcactcagctaattttattttttgtagagacaggagtctagctatgttgaccaggctgatctcgaactcctggcctcaagcaattatcccacctcagactctcaaagtgctgagattacagatgtgagccatgggyccaggtctttcataatttggcactctttgccaaactaaaccttaagaaagaataaactatacatgttaacatatacgtggcatacatttgctatccaacaaatggttgttaaatcaatatacaaacaaatggaagaatgaacttgatacaaactattttactgggtctagcattttttctctggaataggccaaaatatatacttagatagatattaatagatatagatgtataaatatcttctttgatgatttgaaatttctttttatccctgaaatttaaattcatgaaataatatttgttgagttgatcccaattttattaatcctatttattggttctacattcatcattctttttacagaggaggggctgaaaaactcagagctcaagtaccttgccagggtcatataatcaggaaaggaaaaacaaccttaacctgggcctagctaacccaaggctcttcccttacccattg

SEQ ID NO: 682421 - DNA, 863 bp, Homo sapiens
cagaaaggcccaaggggaggctaattccaaaacctgaacccaagatagttcagctcacccttttgttattcctaaacatcctacacttctcttacataattttttcttttgagacagggctttactcttgtttcccaggctgtggggtgcatggtacaatcacagctcactgcaacctcaaactcctggacctaagttatccttgtgccttaacctcctgaataactgggactacaggctcatgccactgcactcagctaattttattttttgtagagacaggagtctagctatgttgaccaggctgatctcgaactcctggcctcaagcaattatcccacctcagactctcaaagtgctgagattacagatgtgagccatgggcccaggtctttcataatttggcactctttgccaaactaaaccttaagaaagaataaactatacatgttaacatatacgtggcatacatttgctatccaacaaatggttgttaaatcaatatacaaacaaatggaagaatgaacttgatacaaactattttactgggtctagcattttttctctggaataggccaaaatatatacttagatagatattaatagatatagatgtataaatatcttctttgatgatttgaaatttctttttatccctgaaatttaaattcatgaaataatatttgttgagttgatcccaattttattaatcctatttattggttctacattcatcattctttttacagaggaggggctgaaaaactcagagctcaagtaccttgccagggtcatataatcaggaaaggaaaaacaaccttaacctgggcctagctaacccaaggctsttcccttacccattg

SEQ ID NO: 682422 - DNA, 650 bp, Homo sapiens
aaacatacaaaaattagctggtgtggtggcgggcgcctgtagtcccagctacttgggcggctgaggcaggagaatcacttgaagccgggaggcagaggttkcagtgagccgaaattgcgccacagcactccagcctggcgacaaagcaagactctgtctaaataaaaaaaaaataaataaataaataaataaataaataaataaataaaagattaaatgacaatattaaagagacttaataaggtacaaaaaggaaggggagttttctggccattctggtgtatttgtttctccaagagagccttagtgtcattttcttaagttttcctcaaaatcttttgggtattttaattggcattgtattaaatctctggatttattaagggagaacagacagcttcacactacagagtcttcctatccaatatcaaggcatgttgttcttatgttgtcagtataactttttaagttttttcttatgttctaagtataattttttaaaatttatgtgtctgcacgtttctttaatgccaaactcttttttttagttaatatggtaattggaatcttttttccattatattctcttacctaatcttgtttatatataggaaagctataagggggatgaatcctactagatattaaaa

SEQ ID NO: 682423 - DNA, 650 bp, Homo sapiens
aaacatacaaaaattagctggtgtggtggcgggcgcctgtagtcccagctacttgggcggctgaggcaggagaatcacttgaagccgggaggcagaggtttcagtgagccgaaattgcgccacagcactccagcctggcgacaaagcaagactctgtctaaataaaaaaawaataaataaataaataaataaataaataaataaataaaagattaaatgacaatattaaagagacttaataaggtacaaaaaggaaggggagttttctggccattctggtgtatttgtttctccaagagagccttagtgtcattttcttaagttttcctcaaaatcttttgggtattttaattggcattgtattaaatctctggatttattaagggagaacagacagcttcacactacagagtcttcctatccaatatcaaggcatgttgttcttatgttgtcagtataactttttaagttttttcttatgttctaagtataattttttaaaatttatgtgtctgcacgtttctttaatgccaaactcttttttttagttaatatggtaattggaatcttttttccattatattctcttacctaatcttgtttatatataggaaagctataagggggatgaatcctactagatattaaaa

SEQ ID NO: 682424 - DNA, 650 bp, Homo sapiens
aaacatacaaaaattagctggtgtggtggcgggcgcctgtagtcccagctacttgggcggctgaggcaggagaatcacttgaagccgggaggcagaggtttcagtgagccgaaattgcgccacagcactccagcctggcgacaaagcaagactctgtctaaataaaaaaaaaataaataaataaataaataaataaataaataaataaaagaytaaatgacaatattaaagagacttaataaggtacaaaaaggaaggggagttttctggccattctggtgtatttgtttctccaagagagccttagtgtcattttcttaagttttcctcaaaatcttttgggtattttaattggcattgtattaaatctctggatttattaagggagaacagacagcttcacactacagagtcttcctatccaatatcaaggcatgttgttcttatgttgtcagtataactttttaagttttttcttatgttctaagtataattttttaaaatttatgtgtctgcacgtttctttaatgccaaactcttttttttagttaatatggtaattggaatcttttttccattatattctcttacctaatcttgtttatatataggaaagctataagggggatgaatcctactagatattaaaa

SEQ ID NO: 682425 - DNA, 2277 bp, Homo sapiens
gcctgtaatcccagctactcaggaggctgaggcaggagaatcgcttgaacctgggaggcggagatttgcagtgagccgagatcacgccattgtactccagcctgggcaacagagagagactcagtctcaaaaaaataaaaattaaaaagtaagcatgtcttattgtttatttttccccagtgctaaaaatgactattttgaaacaatgctgatagagtttacagttcaatttttactttgaggtactaattttgcatttggccggatgctcttaaaaattaaaaagtagacatgtcacctagtaatatgcctattttaattttctaagaagttttgttaaaaattctattaaaatatacatatcctagttaccaatcacattcatacagagaaaatgaacattaaacatattactgtacaaacaatttggacttcagttccagctttggagtcccctccattctattaattagggtgataaacatggcatttagcagggaattaactgtggataccagcacatgcctaagatctaaacaactgaaaaagtatttaagagttctactttggagcagagtaaatactgacactgggacattttaagtgactaatttctcataacacattagtgcaaattagaaaacttttagaagaatttagtcatggaaagaaggaagcataatctcatcttcattcactccttgtgcatatcgaactgatgagaaacccgccaggtgcaaacggtgcctttggaagaggaaccaaatcagtccgcccatgagaactaagatacttagtgtggcaactatgatagctattgctgtgtaatcagggcctggaacaggaaaaggtttgatgttggaggagagaatacaaaagtgatcattattgattttatacattatgggttgtgtcacacatgtaaacctgtaagctgtatacagacataataaatctgattgtttcatagcgctaacatagaattcaaactcatcgtcagatcaaaagaaacacttaagtgatttcttttcaaatgtaagtgttttcctattcattcaaatcctcttcattgtgataggaattttcttccaaagacattaatgcgctatgattattctcacattcccccttcctaacaccaatttgggaacatcactacytgtatattatcctactttgatagcaaattgctaaaagctataaatttttgtttttgacttacctggggctaaataaagtgttatttgcttcaaaatgatttaagtctctcagatgagttcatttagtgcagctgctgttccaagacccttatctgcatactgcccagatggattcgctctgttccatgactttaaataccattgctatgcacactacacatctcgtccctctatggataactcaaaatggccaacgtagaacttttgatttgcaacaccctaactctgctcccacccaaccccccaaatcttccagttgctttccattccactcagaataaaaccagaactcaagccttgcttccaaagctctgtatgtctagcacctgcctacctttcagttcttccctgagcgctcagccaacttgttctgccttaggctctttgctccaactggtacctctgtctgttatgccctttcccttgaagtttgcttggcttgattttttagatcttagcttcggtgtctcctgcttctaggcttcttccctggtttcctaatctagagtagctatccactgagtctccatcacatagagtttataactatttgatattttcctctctttaaaaaattgacctgtttacttatctttcttcaccagattgtaatctctgtgagaacaggtaccttatctgtcttgttctcaggtgcatcccagtgtgcaaaacagggcatggcatatagtagacactctatttactgtctcagtgtgtgtatacatggatactgattacctagaattgaggttttatctttaatatttatatacaagaagcaaaagttttatgcaagatctttaaaaatgttactgtgaaaaatttggagctctttctccagaaatgaagttaatataacattttaatggtaattttatgtatcaattcataatgaaatgtaagttcaaattatgattttttatagataccctgaatgttttcaataactaaatccagttttgcattgttttaaaattaaccatgagttttatgggattaggaagaaaggaagcaaattaactgcagaaatagacctttaagcttttatataatcaaa

SEQ ID NO: 682426 - DNA, 654 bp, Homo sapiens
tatttttagtagagacagggtttcaccgtgttagccaggatggtctcaatctcctgacctcgtgatccgcccgcctcggcctcccaaagtgctgggattacaggcgtgagccaccgcgcccggccagactaaccgtattcttatgctattattggtggtgttattgtaacactgttgcaagcacagtctgagaaaaagcaaatggccaggcccagtggctcacgtgtgtagtcccaacattttgagaggcccaagtaggaggattgcttgagctcaggagttagagaccagcctcggcaacgtggtgaaaccccaactttamaaaaaaattttaaaatttacccggcatggtggtacacacctgtagtcccaggtactcaggaagttgaggtgggaggactgcttgagcccaggagggcaaaactacagtgagccatgattgtgccactgcattccagcctgggcaacaaagcaagaccctgtcaaaaaataaatgaataaataaataaaaagaaaaaaatgaatatgttggtgtttttgggaaattaatttttgaattgcataaaaactctgtgatactgaatttaaaatgtatgtattagaatgaactcattttatattttatacttaaaaatacatcttacttgcatactg

SEQ ID NO: 682427 - DNA, 734 bp, Homo sapiens
aaaattctgtaagaattttacctaacaaatattcaataaacacgtgatattactattctttttaaaaaatcatttctacaacatttattctattaaagtattttggaatttgttcaaatgtatacccaacctcacatatgcagctgacccagatattctataattctttcaatagaatatatcaaagaaaaagagttggaaagaatcgtataktataggttttgtgttacctagtacctctaaacaaaacttgagatagtctttgctcggcaccctagaaatcaaaacaacttgaaattgaattttacaagtgaaaaagatcctaaagaaaacctggatcttctggcttatatgatacgtgatgtaattacacataaggttcagtgacttctaaaatcatttagctaattattgacatggttgtcactaaaatctagatatgctgacttctatattagtgttccttctaatggaattattgacaaactcaaataataaaagatttaacatgaaacaatggcaagggcaatggactagtaatcagaaaatgtgcttgtatcttacaatatttggttgagcctatagaatactaatttaacctctgtaccatatcttcatcaaataggaaattctactagataatctcaaattcttccacatttaaaagattcactggaatataaaaaagcattaagtagacttggaagttaacccccaaaaaagagtacaggagc

SEQ ID NO: 682428 - DNA, 734 bp, Homo sapiens
aaaattctgtaagaattttacctaacaaatattcaataaacacgtgatattactattctttttaaaaaatcatttctacaacatttattctattaaagtattttggaatttgttcaaatgtatacccaacctcacatatgcagctgacccagatattctataattctttcaatagaatatatcaaagaaaaagagttggaaagaatcgtatagtataggttttgtgttacctagtacctctaaacaaaacttgagatagtctttgctcggcaccctagaaatcaaaacaacttgaaaktgaattttacaagtgaaaaagatcctaaagaaaacctggatcttctggcttatatgatacgtgatgtaattacacataaggttcagtgacttctaaaatcatttagctaattattgacatggttgtcactaaaatctagatatgctgacttctatattagtgttccttctaatggaattattgacaaactcaaataataaaagatttaacatgaaacaatggcaagggcaatggactagtaatcagaaaatgtgcttgtatcttacaatatttggttgagcctatagaatactaatttaacctctgtaccatatcttcatcaaataggaaattctactagataatctcaaattcttccacatttaaaagattcactggaatataaaaaagcattaagtagacttggaagttaacccccaaaaaagagtacaggagc

SEQ ID NO: 682429 - DNA, 734 bp, Homo sapiens
aaaattctgtaagaattttacctaacaaatattcaataaacacgtgatattactattctttttaaaaaatcatttctacaacatttattctattaaagtattttggaatttgttcaaatgtatacccaacctcacatatgcagctgacccagatattctataattctttcaatagaatatatcaaagaaaaagagttggaaagaatcgtatagtataggttttgtgttacctagtacctctaaacaaaacttgagatagtctttgctcggcaccctagaaatcaaaacaacttgaaattgaattttacaagtgaaaaagatcctaaagaaaacctggatcttctggcttatatgatacgtgatgtaattacacataaggttcagtgacttctaaaatcatttagctaattattgacatggttgtcactaaaatctagatatgctgacttctatattagtgttccttctaatggaattattgacaaactcaaataataaaagatttaacawgaaacaatggcaagggcaatggactagtaatcagaaaatgtgcttgtatcttacaatatttggttgagcctatagaatactaatttaacctctgtaccatatcttcatcaaataggaaattctactagataatctcaaattcttccacatttaaaagattcactggaatataaaaaagcattaagtagacttggaagttaacccccaaaaaagagtacaggagc

SEQ ID NO: 682430 - DNA, 1469 bp, Homo sapiens
cttagtttcccatttgtaaaattgtcttaattttgccatcatttctgaaggatacttccactggacacagaattctggactgactgatttattgtttcaggttttaagatgatgttatactgtcttctggcctctatgtttcctgacgaaaaaatgttggccttcaaattattgttctttggtatgtaaagcaaacttttctctgtctgctttcataattttttctttatcttaggtttcagtttataagtgtgtctaggcctgcttttccaagtatagtactcacagttctaaactgcacctcaatatgcctcatcccttgattttgtcaggtcaaatacattgatcctttaaatctggtcctcccttactgcctactatcttcactcataagctgtcaaggttgatgttcagaactgctgacttactggttaatgttttataattcatttgggtcactggagctcctcgcaatactttcgttctcccaaagaaccatttcaaataaaaaaaaatgcatgcaagggtgatacatattaagacagaaaataattggtagctatacgggacataaataactaattctttctagaaggtactacctcaaatacttttcaaagtgaacccagagaggcaatgtttttaaaatgagtttaaatataaatatctcaattttaaaaataaaagaacatatcaggtacaacagttatttattgggacgatttcaccaattagacaaaaaataataattgccccatcctgctgaacttttcagaggcctggtcagtcaatgaatacgaactctttctgctcaggaatactcagtatattagtcaaactagcagaaatagtttatgtattcttagtaaataatctgatatatttatataatgaagaccaaacactagagatgcttaagctaatggcctttcagatttggatagcacgttgtttttccctctaatggccacttctcatggatatataatttttaatcatatcaacaaattcctttataaaacaactaatcctaactgtatgtaatattgttccacaactcttagaatagttctcttgggagccgctgaagaatacaaccatgttgtcaaactttagcatgacttgaaaattcttcacctcattttcatcccagaaacattttgcttcttttttcctttgtgtacayattgttatgttatattaggcattattatttcattttccatataaacattctaaacttttgtataaagtttatattaggcattactatttcattttccatataaacattctaaacttttgtataagacgtgagaatagttttctagttgcaacaaaataataattttgctttagaatataagcctgcttataatcaattgagacaattaggatttatggtacacatttcaaaaatgttgaagaggaagcggtgttaacaaccgtgaatgtacttaaggatttta

SEQ ID NO: 682431 - DNA, 1469 bp, Homo sapiens
cttagtttcccatttgtaaaattgtcttaattttgccatcatttctgaaggatacttccactggacacagaattctggactgactgatttattgtttcaggttttaagatgatgttatactgtcttctggcctctatgtttcctgacgaaaaaatgttggccttcaaattattgttctttggtatgtaaagcaaacttttctctgtctgctttcataattttttctttatcttaggtttcagtttataagtgtgtctaggcctgcttttccaagtatagtactcacagttctaaactgcacctcaatatgcctcatcccttgattttgtcaggtcaaatacattgatcctttaaatctggtcctcccttactgcctactatcttcactcataagctgtcaaggttgatgttcagaactgctgacttactggttaatgttttataattcatttgggtcactggagctcctcgcaatactttcgttctcccaaagaaccatttcaaataaaaaaaaatgcatgcaagggtgatacatattaagacagaaaataattggtagctatacgggacataaataactaattctttctagaaggtactacctcaaatacttttcaaagtgaacccagagaggcaatgtttttaaaatgagtttaaatataaatatctcaattttaaaaataaaagaacatatcaggtacaacagttatttattgggacgatttcaccaattagacaaaaaataataattgccccatcctgctgaacttttcagaggcctggtcagtcaatgaatacgaactctttctgctcaggaatactcagtatattagtcaaactagcagaaatagtttatgtattcttagtaaataatctgatatatttatataatgaagaccaaacactagagatgcttaagctaatggcctttcagatttggatagcacgttgtttttccctctaatggccacttctcatggatatataatttttaatcatatcaacaaattcctttataaaacaactaatcctaactgtatgtaatattgttccacaactcttagaatagttctcttgggagccgctgaagaatacaaccatgttgtcaaactttagcatgacttgaaaattcttcacctcattttcatcccagaaacattttgcttcttttttcctttgtgtacatattgttatgttatattaggcattattatttcattttccatataaacattctaaacttttgtataaagtttatattaggcattactatttcattttccatataarcattctaaacttttgtataagacgtgagaatagttttctagttgcaacaaaataataattttgctttagaatataagcctgcttataatcaattgagacaattaggatttatggtacacatttcaaaaatgttgaagaggaagcggtgttaacaaccgtgaatgtacttaaggatttta

SEQ ID NO: 682432 - DNA, 676 bp, Homo sapiens
aatggcgtgaagctgggaggcggagcttgcaatgagccaagattgctccgctgcactccagcctgggtgacagagtgagacttcatctcaaaaaaaaaaaaaaaaaaaaaaagatgttgaatgtgggttcatcccttttttatttctgactctgttaaaggkgacatgcttttttattgctgagcagtattccatagtatattatatactatatgtggtagtatatagaatggtatagtataaagtaaaatagcagagtttgtttatatattcatccatggaagaacatgtgggttattttctgttttgggtgattatgaataaaatggccaactaggttctcttctgttgaataatttttaaatgtaggtgatttaacattataagcctttcctaattttgacctttacacagaatgtgatatgaaaatgtaacttccaaaaaagtaataatttaaataaatcctttcaatgcctaaattagttcatcactattcaggaattggcattaagaagacaattattcatatttatatatgagaaaagtgaaataggaaaattaaacttcttttaagcatgaggatatgtaataatttacttaaaaacctaggaaggaaatgccaaatacttgggccaccattacctctttctctgcccagggcatacatcaaaaatca

SEQ ID NO: 682433 - DNA, 2567 bp, Homo sapiens
aaaggagtcacaggttagaggaagataaggctgagacacttcatggagaattgacacatgagctgccactgaaataagaatataccttaatcagtgttttagagatcatatcttcagatcgttttaatttataaagtataagaactacatgttttcacagcatgccaggagcaaaagatgaaaaaaagaactataagtgcttgacttgagtgttgattatatttttgtggacttattagacattttattttatataaatggtgtttcaaaaattaattcatttttatatattgtcgagttatttgttataagtagaaaacactatctgtagttttgactagaaataatacaaaagtgcatttctgaacctgtggttcaataattgccaatgatttataaaagtgtttcaggtgtcattcagtgtggtaatgcagttccatttcacttttttaaaattccataaggtaaaagaaaaagagcaataaaaggaaccagaagaaagtaaaaagggaaaaaagaagagaaagaataatcaaaatttgcaatttagagcctctgcccttttgactttcagtttgagttttattctggaaatgacttctgtgtcctctgtcatgtctctggcagcagagaggggaaggagggaagaaacctgcctttttatcctagttcactcattcaatgaatatttatggagaccttactaggtacctgtaactgtgctttttatcatatgccctctgcctggattttttttttctttttccttttatccgtggcaacttcctatttatccagtgagctgtagcttaaatattgcctactttttgaaatgctcacttattctacaaagttatactctccttctcctacatctcatagcattttacctatcctaccttcggaatatctgtttgtctgtccgactcttccatcagactgaccacttcaagtgtagaagacttttactctttttctcatcaccccttaacactaagcattatacctaacacataggagttgctcagcaaatgtctgatayggatgatgggtagatgggtgaccaactgttgacaacttgttgaaaagtataaaagatggaattttgcatctggctatcatggagtaggagactaacactcccattaagaacaactagaaaatctagattaaattccataagaatcgtatttgctggcatcagagagctgctaaggcagtttgctgaggtgagcccaacagtctgtgtattacttttctccttaggagagctggtaaaatcttaaatagctaaaagcagagcagagtttttggcaatctcatagtgttgaggaaagaaaaaacatgagtcttagctcaccaaagaggaggtggctctagttaatatccaggctttcaactggcaatccctacggatcaaaagtctacaaagtctagaacacctcttcacatagactcagtccctgctgatcagaatcctttctaaaggaagataacatcatttagagttactacaatttttcatacacagtgtttggcatttgatagaaaactaccagacagaacaaaaaaaaaaaacaggcctaagggggtgtgagggtgcagggtaggagagtagagaacagactaataactgacctagaaattagagttttcagaaatggacttcaaaataactacgataagttaaagaatataaatactaagattgagaattttaaaatataatcaaattgaaattttaaaaatataatcaagttgaaattctataactgaaaaatcactgacattataaactcaatagatggggtttaacagcatgaaaaactgaagtaggctgggcacagtgactcacgcctgtaatcccagcactttgggaggccaaggtaggaggattgcttgagaccaagagttcaagaccagcctgggcaatatagtgacacccctgtctctacaaaaaaaaaaatcaaacaaattagccatcctgtctactcaggaggctgaggtgggaggatcacctgagcccaggagttcaaggctgcaatgagctatgaccatgccattgtaccccagcctgggtgacagagagagatcttgtcttaaaaaaaaaaaaattggagttacccttaccccagttaagttacaacttaagagtgcattaataaaccaggaagaatgagattatattatggagagtattaacagtattgaaaagagcaaaaggatatacaggacatggtaaaaagtctaacatagatgtaattttggtcccagaaagggaagagagagagaatggagcaaaagtagcatctgaaatgataatggccaagaacttttcaaaagtgaccaatgaaaataagccacagattcagaaagtgcattgaattcttagcaggatttaaaaacactaaaacaacagcatgccactgtaaaactgctaaaaaccgaagacaaagaaaatcttgaaagcagcaagaagggggaaaagcacattactgtccaaaaagcaacagtgagactgacagttaacttctcagtagaaatgatggaagcccaagcaacaaaac

SEQ ID NO: 682434 - DNA, 2567 bp, Homo sapiens
aaaggagtcacaggttagaggaagataaggctgagacacttcatggagaattgacacatgagctgccactgaaataagaatataccttaatcagtgttttagagatcatatcttcagatcgttttaatttataaagtataagaactacatgttttcacagcatgccaggagcaaaagatgaaaaaaagaactataagtgcttgacttgagtgttgattatatttttgtggacttattagacattttattttatataaatggtgtttcaaaaattaattcatttttatatattgtcgagttatttgttataagtagaaaacactatctgtagttttgactagaaataatacaaaagtgcatttctgaacctgtggttcaataattgccaatgatttataaaagtgtttcaggtgtcattcagtgtggtaatgcagttccatttcacttttttaaaattccataaggtaaaagaaaaagagcaataaaaggaaccagaagaaagtaaaaagggaaaaaagaagagaaagaataatcaaaatttgcaatttagagcctctgcccttttgactttcagtttgagttttattctggaaatgacttctgtgtcctctgtcatgtctctggcagcagagaggggaaggagggaagaaacctgcctttttatcctagttcactcattcaatgaatatttatggagaccttactaggtacctgtaactgtgctttttatcatatgccctctgcctggattttttttttctttttccttttatccgtggcaacttcctatttatccagtgagctgtagcttaaatattgcctactttttgaaatgctcacttattctacaaagttatactctccttctcctacatctcatagcattttacctatcctaccttcggaatatctgtttgtctgtccgactcttccatcagactgaccacttcaagtgtagaagacttttactctttttctcatcaccccttaacactaagcattatacctaacacataggagttgctcagcaaatgtctgatatggatgatgggtagatgggtgaccaactgttgacaacttgttgaaaagtataaaagatggaattttgcatctggctatcatggagtaggagactaacactcccattaagaacaactagaaaatctagattaaattccataagaatcgtatttgctggcatcagagagctgctaaggcagtttgctgaggtgagcccracagtctgtgtattacttttctccttaggagagctggtaaaatcttaaatagctaaaagcagagcagagtttttggcaatctcatagtgttgaggaaagaaaaaacatgagtcttagctcaccaaagaggaggtggctctagttaatatccaggctttcaactggcaatccctacggatcaaaagtctacaaagtctagaacacctcttcacatagactcagtccctgctgatcagaatcctttctaaaggaagataacatcatttagagttactacaatttttcatacacagtgtttggcatttgatagaaaactaccagacagaacaaaaaaaaaaaacaggcctaagggggtgtgagggtgcagggtaggagagtagagaacagactaataactgacctagaaattagagttttcagaaatggacttcaaaataactacgataagttaaagaatataaatactaagattgagaattttaaaatataatcaaattgaaattttaaaaatataatcaagttgaaattctataactgaaaaatcactgacattataaactcaatagatggggtttaacagcatgaaaaactgaagtaggctgggcacagtgactcacgcctgtaatcccagcactttgggaggccaaggtaggaggattgcttgagaccaagagttcaagaccagcctgggcaatatagtgacacccctgtctctacaaaaaaaaaaatcaaacaaattagccatcctgtctactcaggaggctgaggtgggaggatcacctgagcccaggagttcaaggctgcaatgagctatgaccatgccattgtaccccagcctgggtgacagagagagatcttgtcttaaaaaaaaaaaaattggagttacccttaccccagttaagttacaacttaagagtgcattaataaaccaggaagaatgagattatattatggagagtattaacagtattgaaaagagcaaaaggatatacaggacatggtaaaaagtctaacatagatgtaattttggtcccagaaagggaagagagagagaatggagcaaaagtagcatctgaaatgataatggccaagaacttttcaaaagtgaccaatgaaaataagccacagattcagaaagtgcattgaattcttagcaggatttaaaaacactaaaacaacagcatgccactgtaaaactgctaaaaaccgaagacaaagaaaatcttgaaagcagcaagaagggggaaaagcacattactgtccaaaaagcaacagtgagactgacagttaacttctcagtagaaatgatggaagcccaagcaacaaaac

SEQ ID NO: 682435 - DNA, 2567 bp, Homo sapiens
aaaggagtcacaggttagaggaagataaggctgagacacttcatggagaattgacacatgagctgccactgaaataagaatataccttaatcagtgttttagagatcatatcttcagatcgttttaatttataaagtataagaactacatgttttcacagcatgccaggagcaaaagatgaaaaaaagaactataagtgcttgacttgagtgttgattatatttttgtggacttattagacattttattttatataaatggtgtttcaaaaattaattcatttttatatattgtcgagttatttgttataagtagaaaacactatctgtagttttgactagaaataatacaaaagtgcatttctgaacctgtggttcaataattgccaatgatttataaaagtgtttcaggtgtcattcagtgtggtaatgcagttccatttcacttttttaaaattccataaggtaaaagaaaaagagcaataaaaggaaccagaagaaagtaaaaagggaaaaaagaagagaaagaataatcaaaatttgcaatttagagcctctgcccttttgactttcagtttgagttttattctggaaatgacttctgtgtcctctgtcatgtctctggcagcagagaggggaaggagggaagaaacctgcctttttatcctagttcactcattcaatgaatatttatggagaccttactaggtacctgtaactgtgctttttatcatatgccctctgcctggattttttttttctttttccttttatccgtggcaacttcctatttatccagtgagctgtagcttaaatattgcctactttttgaaatgctcacttattctacaaagttatactctccttctcctacatctcatagcattttacctatcctaccttcggaatatctgtttgtctgtccgactcttccatcagactgaccacttcaagtgtagaagacttttactctttttctcatcaccccttaacactaagcattatacctaacacataggagttgctcagcaaatgtctgatatggatgatgggtagatgggtgaccaactgttgacaacttgttgaaaagtataaaagatggaattttgcatctggctatcatggagtaggagactaacactcccattaagaacaactagaaaatctagattaaattccataagaatcgtatttgctggcatcagagagctgctaaggcagtttgctgaggtgagcccaacagtctgtgtattacttttctccttaggagagctggtaaaatcttaaatagctaaaagcagagcagagtttttggcaatctcatagtgttgaggaaagaaaaaacatgagtcttagytcaccaaagaggaggtggctctagttaatatccaggctttcaactggcaatccctacggatcaaaagtctacaaagtctagaacacctcttcacatagactcagtccctgctgatcagaatcctttctaaaggaagataacatcatttagagttactacaatttttcatacacagtgtttggcatttgatagaaaactaccagacagaacaaaaaaaaaaaacaggcctaagggggtgtgagggtgcagggtaggagagtagagaacagactaataactgacctagaaattagagttttcagaaatggacttcaaaataactacgataagttaaagaatataaatactaagattgagaattttaaaatataatcaaattgaaattttaaaaatataatcaagttgaaattctataactgaaaaatcactgacattataaactcaatagatggggtttaacagcatgaaaaactgaagtaggctgggcacagtgactcacgcctgtaatcccagcactttgggaggccaaggtaggaggattgcttgagaccaagagttcaagaccagcctgggcaatatagtgacacccctgtctctacaaaaaaaaaaatcaaacaaattagccatcctgtctactcaggaggctgaggtgggaggatcacctgagcccaggagttcaaggctgcaatgagctatgaccatgccattgtaccccagcctgggtgacagagagagatcttgtcttaaaaaaaaaaaaattggagttacccttaccccagttaagttacaacttaagagtgcattaataaaccaggaagaatgagattatattatggagagtattaacagtattgaaaagagcaaaaggatatacaggacatggtaaaaagtctaacatagatgtaattttggtcccagaaagggaagagagagagaatggagcaaaagtagcatctgaaatgataatggccaagaacttttcaaaagtgaccaatgaaaataagccacagattcagaaagtgcattgaattcttagcaggatttaaaaacactaaaacaacagcatgccactgtaaaactgctaaaaaccgaagacaaagaaaatcttgaaagcagcaagaagggggaaaagcacattactgtccaaaaagcaacagtgagactgacagttaacttctcagtagaaatgatggaagcccaagcaacaaaac

SEQ ID NO: 682436 - DNA, 1007 bp, Homo sapiens
ataatgcttataatactgagaaaaatgtttagccttgaattccaatctagcaagtacatttgaagtggagaacagaacatgttttcagacatgcaaggtctcaacaaaacacaacgaccaaaaacactaccagaggaagctaaatgaacagcgtgtcctagaaaaatgggagtgtgaggcaggaaataacaagatatgaaacccaggaagcagcgataaaggggaacttaagggggatgctatgcagaaagcatggcaagcaaacaattcggactggagcaggacctcaggtagcagaagttstaagaaaagaaaaagcatcacatggaaactacatctcattggcatgtggtagagatggtggtacaacttgaaaaaactgtgtatatagaagaaaaggcaattttaaaaattaattttttaacttggaaaaacttagctgttcatgaaaggcatgattgttattaggtgagctctttaatatttacatagtcttaataatgtaaatatagactactgaatcaatttgctacatattgtgagatggaagtgggcagtggaaataagaatggtaggaaacaatgaaaaaccatgaaataacagtataagcacactgtttagaaaaatgaaagtatgtaagtcctaaaagaaatagctaaatagcagaggggcactgcctttgcaaagtgggactagagatggggtaaagggtaaggaaaaggactgctcttttccttagaagcaggatgaccatatttccccacttgcccagaacagtcccagtttatgtgctgaaaaattctaatttatgcttattatcccagaataattattaatagtacctacgctgtctcttaaaagtggcctcatttggatgataaagcatatggtcacctaacttagaaatcttttctaccatcggctttttacaaactatatacgtatttggtaagtccatacaaaatatttcattaaaaagaggtaaattctgaactggaaatttttta

SEQ ID NO: 682437 - DNA, 1167 bp, Homo sapiens
tgccttattcaatataaataggccagttgtgagttaggatagtgtggatgtgagctgcttagaacttggtgtacttgtaaagtggaaatggcctgaagaataatatttgggtgataaaggagatgaacggagtgtctttgtaggacatgatagctttcctcctgtactctaaaggctactgagtgaaagaggaattatttgaattctgaataatgccaaggatgatatcccttatatagaagaaaaacatatcaataaaaggaagactttctaacagagctacttgcaaccaaatgaactgtgttccctcttactagaagttttatatagagactgcatgataaaattataaaatcaatagaatattagtagaaaaaattaaaatgagagatccgtgattagattaaatggatttaaagcctcttccaggcttgggattctagaattctgtgatacatgacacatgaattcagtttcaccatgctagwtttaaatgttttcaaattgtcactataatattctataatatgaccattgatggaaaacaaccacgtttatatgagaaacagaggcactattgcttccagaaccatagagctatcctgctcttcctcatcctagggccttcaaatagtgtggctttgtcaggtgtgcaataactgaaaaaatctgagccttaatattgaatgcttcttctcaaatatgcaataaagaggtttttttctatttttaccttccaaatgttatctagagaataattatttaaaaaatattgacctgagttttacttagaaccttcacaagtttgtgaaaaacaattctcttcactatccttgtcttgatgcagctttgtacaactcttagtaccaaagcagagattgcgaagaaagtattgcattccatatttagtcagagactacagatgatgacaaatatattctgcctttgttgacctagaatgcatcaacaaatcaatcctccttagacttgaactcagcatcacactcacatattttggttaccatgtattcctaaaatgcagaaatgggtacactgacaaattttgcaattcaagatttttaccagttcagctcagaggtcaaaagaagacagagaagcagatgcatcacaggggggatttttcactgcaagaatggcgtgtctcca

SEQ ID NO: 682438 - DNA, 1167 bp, Homo sapiens
tgccttattcaatataaataggccagttgtgagttaggatagtgtggatgtgagctgcttagaacttggtgtacttgtaaagtggaaatggcctgaagaataatatttgggtgataaaggagatgaacggagtgtctttgtaggacatgatagctttcctcctgtactctaaaggctactgagtgaaagaggaattatttgaattctgaataatgccaaggatgatatcccttatatagaagaaaaacatatcaataaaaggaagactttctaacagagctacttgcaaccaaatgaactgtgttccctcttactagaagttttatatagagactgcatgataaaattataaaatcaatagaatattagtagaaaaaattaaaatgagagatccgtgattagattaaatggatttaaagcctcttccaggcttgggattctagaattctgtgatacatgacacatgaattcagtttcaccatgctagatttaaatgttttcaaattgtcactataatattctataatatgaccattgatggaaaacaaccacgtttatatgagaaacagaggcactattgcttccagaaccatagagctatcctgctcttcctcatcctagggccttcaaatagtgtggctttgtcaggtgtgcaataactgaaaaaatctgagccttaatattgaatgcttcttctcaaatatgcaataaagaggtttttttctatttttaccttccaaatgttatctagagaataattatttaaaaaatattgacctgagttttacttagaaccttcacaagtttgtgaaaaacaattctcttcactatccttgtcttgatgcagctttgtacaactcttagtaccaaagcagagattgcgaagaaagtattgcattccatatttagtcagagactacagatgatgacaaatatattctgcctttgttgacctagaatgcatcawcaaatcaatcctccttagacttgaactcagcatcacactcacatattttggttaccatgtattcctaaaatgcagaaatgggtacactgacaaattttgcaattcaagatttttaccagttcagctcagaggtcaaaagaagacagagaagcagatgcatcacaggggggatttttcactgcaagaatggcgtgtctcca

SEQ ID NO: 682439 - DNA, 1167 bp, Homo sapiens
tgccttattcaatataaataggccagttgtgagttaggatagtgtggatgtgagctgcttagaacttggtgtacttgtaaagtggaaatggcctgaagaataatatttgggtgataaaggagatgaacggagtgtctttgtaggacatgatagctttcctcctgtactctaaaggctactgagtgaaagaggaattatttgaattctgaataatgccaaggatgatatcccttatatagaagaaaaacatatcaataaaaggaagactttctaacagagctacttgcaaccaaatgaactgtgttccctcttactagaagttttatatagagactgcatgataaaattataaaatcaatagaatattagtagaaaaaattaaaatgagagatccgtgattagattaaatggatttaaagcctcttccaggcttgggattctagaattctgtgatacatgacacatgaattcagtttcaccatgctagatttaaatgttttcaaattgtcactataatattctataatatgaccattgatggaaaacaaccacgtttatatgagaaacagaggcactattgcttccagaaccatagagctatcctgctcttcctcatcctagggccttcaaatagtgtggctttgtcaggtgtgcaataactgaaaaaatctgagccttaatattgaatgcttcttctcaaatatgcaataaagaggtttttttctatttttaccttccaaatgttatctagagaataattatttaaaaaatattgacctgagttttacttagaaccttcacaagtttgtgaaaaacaattctcttcactatccttgtcttgatgcagctttgtacaactcttagtaccaaagcagagattgcgaagaaagtattgcattccatatttagtcagagactacagatgatgacaaatatattctgcctttgttgacctagaatgcatcaacaaatcaatcctccttagacttgaactcagcatcacactcacatattttggttaccatgtattcctaaaatgcagaaatgggtacrctgacaaattttgcaattcaagatttttaccagttcagctcagaggtcaaaagaagacagagaagcagatgcatcacaggggggatttttcactgcaagaatggcgtgtctcca

SEQ ID NO: 682440 - DNA, 1428 bp, Homo sapiens
gcaaaaatgtagccatcataaataacactttcacaagttaatataaggaaattttgtggttgtttctttcatgatagggatttcaggaacacactgagggaagtagtggagagtatgtacacattcactcctatccttacttgcacatatgcaactagcacaaagtagttgctaatcttgggggaaaagctcattttagaccctgggcatgcggagctgaagatagcaggatacccctcctcaagctttgtccacaaataggtctccctcttgtaaccataaaatgactatcatcctcaaagatgtcatcccaaagttctaataaataagaataataagcttttgcttaatttcttcctggcacctgccctaagtgccacaaagtcattttacttcaaactttgaatataagctttctacttccctttaacttactattaattataattacaagattcaaaaataaaggcyctgtcacaacattcctaagttaataagcttataagtagggtgaaaatcgtacaggaacacatcttacagattcaagaaaagacaatgtgggtgaatgctagtcctgcttcttaatcaagtcatgccctaatgaagtatccataaaatgttttgttaaacaatataccaggcatgttacataaaatattatgttctggcagagatttttttcgtttataataggacacatttcttataatagaccacatgatatatacttcaaaagctctcctttctaattgaaattgttctttccagtagtggcattacgagaggatattttggagggagtgtgtgtaggtgtatggtgaacactattaattatcagtagagtcagtgacataagaatccactgttagacttttcaaaagaaaagaatattaatccaaaaaaagattgtcacaagaaagactaattagatacccttgtcttccctttaggttattcaacattgtaaatgtttccttcacttcagttcacaggctctaattattgccacagcagaagatgcacagtgggtggaaaataaatccgtatcaaaatgtgtgccccgtgaacattagatgaccacttacctacctgtccttaaagacaatacacactcacagattacatatgcttttattcaggttgccagaacaaatacataaaaaggagttgtctgactgttgcttagctagtaactgcatcttatatcgtgatgtgcattagcatttatataaagtactttcacatggaatttttttattattccagcaaatatgtgtttatagcctatgatgtagcatgcaatacagaggcatcaccctcaggaaacttacttatgtgtaggggagaacagatcacaaaataactgaagaaaataagtcagctataaagaaaatgtagtaaagtgatataataatttgggggagaatg

SEQ ID NO: 682441 - DNA, 607 bp, Homo sapiens
atgtatttcgtaaaatgactctcatatcgtattcgtctgatgttttctcctgattaaaattagagatttctgagatgaataacataaagatgatgtgtcttcaatacatcctatcaggtgatgaaacatgtaatttaaaaaatattaactactaaawgttttcataatttaaaactggaggggaagaaaaatgcacttgttcaaaactttctgcagtttaatttaccttttttcaggtgaattcagatcatagtaatttttagcaaaatattgtaaaataatatagagtatgactaattttaataaaaatttttaaaattatatatatatgttttctatgtatatatctacatctatttccagctgccaacatgtaaagaaacaattctaagatccattttaggaaatattgattatagatattaacggatggtagagtttgttatgtattattaaattgtactttatcttttccactttttctatttaggttgttgcaaaggtaattgcgacagttacttttgcaccaacctaatatgtacttttctgttctgatttattttaatttgcttttagaaagatagagttattgtttaaacaaaaattc

SEQ ID NO: 682442 - DNA, 607 bp, Homo sapiens
atgtatttcgtaaaatgactctcatatcgtattcgtctgatgttttctcctgattaaaattagagatttctgagatgaataacataaagatgatgtgtcttcaatacatcctatcaggtgatgaaacatgtaatttaaaaaatattaactactaaatkttttcataatttaaaactggaggggaagaaaaatgcacttgttcaaaactttctgcagtttaatttaccttttttcaggtgaattcagatcatagtaatttttagcaaaatattgtaaaataatatagagtatgactaattttaataaaaatttttaaaattatatatatatgttttctatgtatatatctacatctatttccagctgccaacatgtaaagaaacaattctaagatccattttaggaaatattgattatagatattaacggatggtagagtttgttatgtattattaaattgtactttatcttttccactttttctatttaggttgttgcaaaggtaattgcgacagttacttttgcaccaacctaatatgtacttttctgttctgatttattttaatttgcttttagaaagatagagttattgtttaaacaaaaattc

SEQ ID NO: 682443 - DNA, 863 bp, Homo sapiens
tggataatggctgatttaagacatattatagtttgaaaacaatgttgatgttctatagtaaccatgaccactggtccaaatatcccaacataaaaataccattggcataatttttcttcccttaaagaaaaaccataattactcttttcaaaccagaattagatatgcacaatcacctaaaccaactactttgtcttgcaaatgaggaatccgagatccagtgaagctgactagattgatggagatcagaaagctactagtgttagagctatagcagggatgcagaacctgcttcctcttattttggggccagtactctcaaaactatcctgccttgctaaaatcggataatcactgccatttcatttattcayattctgaaaacatttgctattatctccccataactcttttttctttctcctcgcgcagtgtctccatgcaaccccacaaagacatcctagtctcctgtggcgaggaccgactctggaaggtgttgggccttccaaaatgcaatgtgcttctcacgggatttggccacactgactggctttcagactgctgcttccatcccaggtcagtgcacaggacccctagaaatagcctaatctctctaggaatgtgctcctttactctgtctgctcactctgctgtctttgatgatgtttttctttctgcaacaacacaccctgcactgaatttcaaagtgtatagacaaattcccctttggttttcagtatattgacttctgattgtttttgatatttggtacatgtaaaacttagtccacatgcttatgcatttaaccaaagtaataagcttctcaggacaagcattattaaaattccttgtgctcacgagcc

SEQ ID NO: 682444 - DNA, 863 bp, Homo sapiens
tggataatggctgatttaagacatattatagtttgaaaacaatgttgatgttctatagtaaccatgaccactggtccaaatatcccaacataaaaataccattggcataatttttcttcccttaaagaaaaaccataattactcttttcaaaccagaattagatatgcacaatcacctaaaccaactactttgtcttgcaaatgaggaatccgagatccagtgaagctgactagattgatggagatcagaaagctactagtgttagagctatagcagggatgcagaacctgcttcctcttattttggggccagtactctcaaaactatcctgccttgctaaaatcggataatcactgccatttcatttattcatattctgaaaacatttgctattatctccccataactcttttttctttctcctcgcgcagtgtctccatgcamccccacaaagacatcctagtctcctgtggcgaggaccgactctggaaggtgttgggccttccaaaatgcaatgtgcttctcacgggatttggccacactgactggctttcagactgctgcttccatcccaggtcagtgcacaggacccctagaaatagcctaatctctctaggaatgtgctcctttactctgtctgctcactctgctgtctttgatgatgtttttctttctgcaacaacacaccctgcactgaatttcaaagtgtatagacaaattcccctttggttttcagtatattgacttctgattgtttttgatatttggtacatgtaaaacttagtccacatgcttatgcatttaaccaaagtaataagcttctcaggacaagcattattaaaattccttgtgctcacgagcc

SEQ ID NO: 682445 - DNA, 863 bp, Homo sapiens
tggataatggctgatttaagacatattatagtttgaaaacaatgttgatgttctatagtaaccatgaccactggtccaaatatcccaacataaaaataccattggcataatttttcttcccttaaagaaaaaccataattactcttttcaaaccagaattagatatgcacaatcacctaaaccaactactttgtcttgcaaatgaggaatccgagatccagtgaagctgactagattgatggagatcagaaagctactagtgttagagctatagcagggatgcagaacctgcttcctcttattttggggccagtactctcaaaactatcctgccttgctaaaatcggataatcactgccatttcatttattcatattctgaaaacatttgctattatctccccataactcttttttctttctcctcgcgcagtgtctccatgcaaccccacaaagacatcctagtctcctgtggcgaggaccgactctggaaggtgttgggccttccaaaatgcaatgtgcttctcacgggatttggccacactgactggctttcagactgctgcttccatcccaggtcagtgcacaggasccctagaaatagcctaatctctctaggaatgtgctcctttactctgtctgctcactctgctgtctttgatgatgtttttctttctgcaacaacacaccctgcactgaatttcaaagtgtatagacaaattcccctttggttttcagtatattgacttctgattgtttttgatatttggtacatgtaaaacttagtccacatgcttatgcatttaaccaaagtaataagcttctcaggacaagcattattaaaattccttgtgctcacgagcc

SEQ ID NO: 682446 - DNA, 1246 bp, Homo sapiens
tgatggttttaatagcaagcaaaaaaatagcaaaaacaaatgaagtttatgtttttcacgtttacctgtgagaagccttcttcttgggaggagcctaggatagagtgctgaaccatagctgatagccaaaggagagctccaagcagcgagggctggggaatgctgaaaccaaggttgaatgagccccgctgattctgaacacaacatggactgtgttgcccgttgcgtgaccctttagactctcctcttcttttctgctggaggagagtacagcatcctggtttggtggcaccattcagcacctgcactggagatgagaaggaaggaggcatgggagtcaaagggagtccatcctcttgcactgggaaacccagctcagttccttggcctttagctgctgtgtttggaaattcacctttccttactgccacaccacttcatcagcatcagcacggccccctgttagtaccattgataaatgagactccagtggaaattaagtggacattctgaaggagaacttagtaagccctttcacttcttgaaggatgtgtaacaaaacaaacagagcttgtcttatctgaacctgttccttcattcaagaagcactcaccgagcacctgctctgtactttgtcctaatgacagagccctccacactcaaagggttctttatctggtgggaagatagacattgaaggcagtggccaaaatgtgttgcgacgaggatctctctatcgtagagatttgtctaaccttgggatgttctcaggaaagacctcacagagaacctgatgtgcarctgggtttggggacaagaattaggtgagggtgagtgggcagatgtgcacattgggccttctagctaaagagcatgattcaagtctcagcttgtcacgtacagggcaaatgaccagggtatgccatgcatgagaagggttggtgggagacgaagctgacaaagaaggtggagggcagtctattcagggtgggctattagtgcaaggcatgcaactaagaattgtgtcctagaggcaggatgtatgtattgaactttttaagccatggagtgctgtgaccgtgatttcattttagaatgcacaggctgacagtggtcttagaagattcgctggataggaatggtggcttgagactggaggcagaaaagctcagctctggatttggtgcaaaagtcatctcatccttgaatatgatgcttgggtaggaggcacatggaagggacttca

SEQ ID NO: 682447 - DNA, 1246 bp, Homo sapiens
tgatggttttaatagcaagcaaaaaaatagcaaaaacaaatgaagtttatgtttttcacgtttacctgtgagaagccttcttcttgggaggagcctaggatagagtgctgaaccatagctgatagccaaaggagagctccaagcagcgagggctggggaatgctgaaaccaaggttgaatgagccccgctgattctgaacacaacatggactgtgttgcccgttgcgtgaccctttagactctcctcttcttttctgctggaggagagtacagcatcctggtttggtggcaccattcagcacctgcactggagatgagaaggaaggaggcatgggagtcaaagggagtccatcctcttgcactgggaaacccagctcagttccttggcctttagctgctgtgtttggaaattcacctttccttactgccacaccacttcatcagcatcagcacggccccctgttagtaccattgataaatgagactccagtggaaattaagtggacattctgaaggagaacttagtaagccctttcacttcttgaaggatgtgtaacaaaacaaacagagcttgtcttatctgaacctgttccttcattcaagaagcactcaccgagcacctgctctgtactttgtcctaatgacagagccctccacactcaaagggttctttatctggtgggaagatagacattgaaggcagtggccaaaatgtgttgcgacgaggatctctctatcgtagagatttgtctaaccttgggatgttctcaggaaagacctcacagagaacctgatgtgcagctgggtttggggacaagaattaggtgagggtgagtgggcagatgtgcacattgggccttctagctaaagagcatgattcaagtctcagcttgtcacgtacagggcaaatgaccagggtatgccatgcatgagaagggttggtgggagacgaagctgacaaagaaggtggagggcagtctattcagggtgggctattagtgcaaggcatgcaactaagaattgtgtcctagaggcaggatgtatgtaytgaactttttaagccatggagtgctgtgaccgtgatttcattttagaatgcacaggctgacagtggtcttagaagattcgctggataggaatggtggcttgagactggaggcagaaaagctcagctctggatttggtgcaaaagtcatctcatccttgaatatgatgcttgggtaggaggcacatggaagggacttca

SEQ ID NO: 682448 - DNA, 599 bp, Homo sapiens
gcatccctgagacggctgagagggtaaaccctctccaccaccacccaccagggggtcagtgactgattgctcttggggatacagaagcccagcgctctttcctcaaagtgggacaactccatggcactgtttttgccccagagcccccctgtagaccaggccaaggccagagcttctctaagacaatatccctccttggcttcttccccttccttgagctaccaccctcacccctcacagttttcctgaagagsactccctccatgagtcactggcttgcaaatccctactttagcctccacttctagggaacccagcccaagagaagtagctactttacaggggtttggggtgaggatgctatgagatcatgttgaaatgccttttgcaagcatctggcactcagcaagtacccaataatgagtaatcgtgattcttacaaaccagtaacacctgacagaatgaatgtaacaggggagctcagatgcacagctacagtgggaggtgggagtcaaaaaccttggcttcaagttctggcatgggagacaatcatcccaggaaggtcccccaggggtcacatagcccaactctcctttgac

SEQ ID NO: 682449 - DNA, 641 bp, Homo sapiens
aatcctaaccttcaatgtgatggtattaggagatgaagtctttgggaagtgattagccatgagggcagagttttcatggatgggattaatgcccttataagtaagaggccccgagagagctcccttcccccttcgactatgtgaggacgcaatgagaatgtgccatctacaaaccagaaagcaggtcccccacctycccagcatcacatcagctgatgccttggtcctggacttcttagcctccagaaatgtgagaaataaatttttgttgtttttaagccactcagtttatggcattttgctgtagcaactccaagtctgtctctccaggatctataaatgtgcctggcacatattagtgctcaatacatttttgttaaataaatggaataattaattaatcagtccgtgtcttggcagatccatgaaactttacctccctgggtagaaaatctgtttaagggtatgtgatgctcaggcagatcttaaagagactgcagctacagagtttctagacacttagagattgcagaacactttactgttttcaaagactgttttcaaagtgtgtgtgtgtgtgtatgtgtgtgtctgtgtgtgtgttggttacctttattttttttaaccagtcagtatagtga

SEQ ID NO: 682450 - DNA, 917 bp, Homo sapiens
ggaggccatgtaacttgaatcttaattaccctaagccaatcatggatagtccatcctccttgccagtgtttggtggaggaatgtatgtgaagcagttctaacctctaagatattagaagaagggttctaggggggtggtcctctascaaaaaaaaaaaaaaaaaaaaaggtttttgctcctaggagagagaaagactcaaggtgataaagagttcatctttcttgaggctaatataaaaagttgttttcacataatttatttgccaattattattttgagacaaagtcttgcctgttgcccagtctggaatgcagtggccggatctcagctcactgcaacctccgccttctgggttcaagtgattctcattcctcagcctcccaagtagctgggattacaggtaccccaccacctccagctaatttttgtatttttagtagagatgggatttcaccatgttggccaggctggtctcgaactcctgacctcaagtgatctgtctgccttggcctcccaaagtgctggaattacaggcatgagccactgtgcctagcccaattattattaaatgtcaatctatataagacaaccaaagtatttcataatatcaagtatttcataaggtgttttagctatagcaattattatttaacagctaagaaatagagcagtgtaagaaaataatatttataaagttatgaaatatcaatactgatattaaggcttcattaggccagatgtggtgatcacacctataatcccagcactttgggaggcccaggctagagaattacttgaggccaggaatttaagaccagcctgtgcaactctatctctacaaaaaaatccaaaaaattacctgggcgtggtgacacatgcctgtagtcctagctactcaagaggttggggtgggagg

SEQ ID NO: 682451 - DNA, 633 bp, Homo sapiens
tccagcgtggccaacagagtgagactccatctcaaaaaaaaaaaaaaaaaaaaaaactatattaaagttacaatagctgagaactgactgggcagaaaaaaactaagatcatcaaaaatatagtgttwtttaacagggaaggtactttaccaaggacttttatgttacttatgtgtcaggaattcttctaagtacttaacattatattcactaatcctccaaactaccttatgaggagggaactactattattctcattttatatgagactatgaagctaaaattttatatgagactatgaaactaaaattttaaaaagattaagtaactctagtttatagtgttaccttttgaaatgtttgtacatcttaagtttcacaacctggctccaccaatataaaactgtatgctattatatgttcatctaagaatcaaaggcaaaccaaatgttgaatatgtccatgtactagaattaaatgttctttctgtattttctttcaaggaacttgtttttgcagtttatagcacaggaatcatacctcaatttgatgacagattttggcctccagggcagccatcttttcattatcaccattttcagccattgcggctatctgtaaaatttcccaaatt

SEQ ID NO: 682452 - DNA, 625 bp, Homo sapiens
tcataataacaacaatttatttgacaactgcagtgtgccaggctaagtgctatattatttacctacattgttctagtacttaccataatccctragatagatgttatccctatgttacagacgatgagcatgaggctcagagaggttaagatgcgtgttctgacttccacaggtcacaagtcggcttccaaagattgtgttctctccaccacaagattctctccgtgtgttatatactggaagctaccgtatttctcaggcacctgccatgctcccaatccaccaggctttgatgatgacctgctgtccatacctgggattgccataaagtggctgccagggccaggtccataggaggaggagggggctgggctgggttaagggggtgcccagaagctgcagtaaccacagtgtctgccccttttgctgaagaaagtcctgggaactgtcaaggcagatgtgtcttggagttcttggtgtatccaagccctcagtactctcctgcaaggtggaagtgtcccttgcacctccttctgtcggtcaccttgatatttgggcacaagggctgtgctgccttcactctcaatgtgtcactgggcttgagcccagccactcctacattatt

SEQ ID NO: 682453 - DNA, 3418 bp, Homo sapiens
aaaaattattttgggtggctttagacaaatgtgtggctagaatcaaccagcctatgaagaattcactttttttcccctctactcttccttcagactgagatttttgaatatcagattttagcctgaagagactttttctgtagtcaagttatagattctgacaggaatcagttaaccacagaactgatagatacttatctctaatactgcttgtgggtaccactgaaaatgccaaatcagttaaaatggcagcagcaaaacaacttactatatacaatctctttaccaagcttcagcagaagtaaaatgtgtagggctgttttccttactaagcagagcccataatcaaggaagcccacaggtaggtgtagggagacataactttctatatgctcaccactgaagcaggagctgcctgaggttccattgaataattcagtgtttggaactcctgggtggtgaatatcttccaatagaaacactcagcagaaagaactgggaactcacacgctgtagattttctttaatggtttagccaagtatcacacgcagcagacataacggtgtttaaacagtctgcccagcctactgggtctttgcctttaggtagcaaatattctcttagtcttgttactttttcctctccatataagaatatttaaggacacaaaccacacactcttttcagctacttgtccccatgtaggcttaaaatagcaccaatatataatgctaaaattttacaactgactatttgaaacataattgttctatgcattgatgtaaagataaatacaatgattttgcaatacgatgtgatgttatttactgtaacttgatccaacttaatacactggttaaatatgttgcaaccaagtggaattacctcatataatactatgtcaagtttggttaataatccacttaccgtaaagaaaaccgattctgtgaaattgtacaacaaaaaatctgcataatctcttagatatgtacagaaatcaatgagatttgggaaataaagaaaaataatgttatatttctcttttcttgtagttaaatacttcaaacaattaaaatcattacagtatttgctttctttgaaaaaagatttttaaaaaattttaaagtttttgtatagacagggtctcattatattgcccgtgctggttttgaacttctagcctcaagaaattctcctacctcagccttgcaaagtgctaagattacaggcatgagccacgctcatattaaaaaggtttttttttggttttttttgtttttttgttttttttgagatgaagtctcacactgttgcccaggctggagcgcaatggcgcaatctcggctcactgcaaccacccgctcccggattcaagtgattgtcctgcctcagcctcctgagtagctgggattacaggtgcctgccaccatgcctggcaaattttttgtatttttttagtagagatggggtttcactatgttggccaggctggtctcgaactcctgacctcatgaaccacccgccctggcctcccaaagtgctgggattacaggcgtaagcaaccacgcctggcctaaaaaaattttcaacttggatagctaacactattttgacaaaacctcttcaatcataagcatcctatccgattatcatttggatattcaataaattcttttaaagtggttgcgacttcctttcatattcaacaatagagtactatgttggcagtagagataaaagaatcagctaatctggattagtccagttgtatttctgatttgagtcctgcactttatgataaaagaatatttactgtaatttttaacagtaaagaatcagtcttaaggaaaggcagggtgattacctttattgtcaggaatgcgttgctgactgaaaatatcaatctctcctctctcatagtttttgcaagcctgtgctgttatatttttttaatcaggtaaatagtaaagataacagttctcctgtatccaaatgaaagtattagtatttacagtagagaatttcaatggagaagccaactgaaatcctttcttgttcaagacagggtacaaataatatgcataaacatcaatagggatttgtttgttatatgtgtgtctgagtgtggagactaagggaagaagcacgctgatattcggtgctaaagacatattgtttgattgatatggtgccctatgggcgtctcattaagttgtagacaacctatgctttaagcaggaatttcaacttgtttatttgcactgggcagactgaaatatctttaccactttaggtgagactcaaggcactgccacatgtgagcagtctgagagaaatggactaacaaatcacagaacagtatagagaaatgaagagtatagactttagtgacaggaaaacacacaataccaacaatctgggtttgattcgtggctctgtttcagcctagctgtttgtcctcagataagccattcaacttctcagaagctcattttcctcttttgtaaatgggaatagcaggttatcttggagaatctttctgaggatgagatgagacaaggttttgaaagtacctgagcatatattaggaattcaaaaagctatattcacagacatgattaagtatcttcaatcacataggttttgtttaccctytttcatactacacatagctatttcatttttctccctttaacttgattttacttcataaatctctcctccaccaccccaacagatgtgctgtttaatcaaactaaacctgtctaattccaccttatgttataaatcatacctaacctgtctaaaatcctttaacacataatggcttcccataagcttttcaaatgagtaaatccaagacactaatcgaaaacgaacttgtacaacagagtagatctccgctgcttcacagaaggggagggtgcaggtctccttgaagtgcaagctcttcatttacagtgagttttttaaaaaaactactaagaatagagtggaagtgtgcagagccatgtttctaaaagcttgggctatagagaatgcactgctgtctcggtgcagagttcggatgccagcaaaatgagccaggtcattgtactaattaggactgctcctgcatgcactaatatatcatgaaaaaatagcaaggattacaagagagctcatcttctcttctacacattctcagggcaaaagttacttctaaataatgacaaaggagtcacacaaactgacacagaagaggttctctttgttgggataaattggcttatatcctccttccctttcctgcaatctaaaggaatattgtgaaacaagttggataacaacaataatgacttgtttaatgaagagctcataatagtgtgaagtgacattatatattctttagtcaggcaacctggcatgtgttggcat

SEQ ID NO: 682454 - DNA, 596 bp, Homo sapiens
gaatgcttcatctttaaaacacagtgcttgaacttacaatggcttcctaggaatttgtatcaaacccattcagctgaattttgactccacattattataaatgattctgggttggatagggaatgtgaggaagatttctattagggggaggaatttgttgttactgccatttctgtrccaaaacatcactttaaaataagccacttatctagtgtctaccagtcttgctgcctcaaggcaaattcttgcttctgcacatgaattccaaacaccggtaataacctggaacacagatagaatggctaatctgaagcagccaccaaagccaaattatgtatggaagacttttcttcttggatcaggaactcaacagcccggattcttccatgtaaaatatcatgttcagaaaatatgagaagatatctagaacttttcttggagcagatttacttatgggaatcctcatatgccttattctagatgcttgtcaatctatggagtgaagacaggtgtcttttattaggggaggaaggtgtgtatgtgagcatgtgtctgtgtgtgtacatgcaagcatgctccatataaggcacagacct

SEQ ID NO: 682455 - DNA, 647 bp, Homo sapiens
gcattcaaaatttgggcatttttcaagtctgctcaagtatttcctttctactgagctctcttggttatcaattttacaaatacataggctaccacaaaatcagggacttgtggaatgcttattaagcttttcaatagctaactcatctccctataaagttcttattaatcttttgatctaccactcatcccaatcaggaccacaatcagcctcagagagctgtaagcttatctcctttgccattgggaacaggttttccattctctgttctaaatcaagttagcatcctccaccaacaaagctactagttttcatggttaattctgtctgataaaactactgtactgagcaacttagggtgtggtgtgggggtggctataggcaagaaaaccatagactcctacagttcttacctgaaattgtgcagtctttcacgaatatatgattctccatttgttttttctatttggttgatttctagagccccaaaatgattgtttttgacaattttgtccaacttyatagttgttttttggaaaaaggatttaattgacctccttattcttttataccatctccatttttgtatgcatcttgtctgttgattgcaggttcctcaaaacagaattgtcagagcaagtccttgg

SEQ ID NO: 682456 - DNA, 1481 bp, Homo sapiens
atggtatatgcagtgtgatgtctgtgtgtgtgtgcatgcgtgtgtgtgtgtgttccctttgatggctcataattaaagatgtttgaactaaaataggatattactgagtttactttagctgttttcatttgccttttgttttccaaatcatgccaaaattctcggtcttgaaccgataggaattctcatttcattcatttatttaacatccatcattgagtacccagtagacaccaaagatccaaacataaagaagccataaactctgtttcattaacatttttatagtgctacaatttagaaaagatctcctttaacccattgcccaatcctaagctgtgagccttgttgacgcccccatgtgacagggggtaactctaaggctggaagtgacttgcccacaagtgcacaatgaagactggcagaggaagtcccagaactgagaactcagctctctaaatcttgggtttttccttttttgtcttgctgggaggcataacggcataaatttacraaacactggctctgtcatcagagtcagattcccaggtccgcaatgtacaagatgtatgacaaaggcgaatttcatgatttctctaagcctctgtccctttagctataaaatggggataaaaacagtacctatcaccaggcatggtggctcatacctgtagtcccagcactttgggaggctgatgcagtagggttgcttgaggccggtgttcaagaccaaaactgtttctaaataagctacttatggcaaatgggatcagctaatcaataaagactccagggcctgttatagtcccagtattaagcaaagccctctgggagaggctaatcaaagcaacactgtgcttaacttttagagacttgattccttctttgaaagctcctttttgctttccatgggggtttggaaaaatcataatttctctgcttgatttttaatcttgaaaaatagggaaaataacatgtttttcccatgtcacaggtgttgtaaaaatcaactaggatgatgtattttagagccataagtgggctaatgccaatgttagctattgaaggcaagtaaaggagggcatcttcactttgcacagaaatgtttagcttcagtgtatttatacatatttaaaattaggaaaggactagaggtccatgtggtctctacagtgggacagctccatgactgctcctgcagagcagggctaccccataggcagagagtagcggctcagggtagttctgcagtagtacttatacttactcttaattgtttgcagattaaggagcagtttatgcagaaatttctagggaaaacatagtaacttctgggttgttggattattgccatggaaaggggtgggaactcccgggtgttgctatggcaatgataaactgacatggcaccctagtgggtgtgtcttatagaaagctgcttcagccccttccctgttttagctagtcctcaatttggtcca

SEQ ID NO: 682457 - DNA, 604 bp, Homo sapiens
tgatacaacctaacatataagcagttattaaaggtaacatgattttaagactgcgatagtgtgctattttcatttaattttatagcctaatatatatattgaattaaggacccatttaatcagccaacaaatatttttgcaggaaaggtattcccaaactgtgctagatagggtgcaaagctctataatacagacctgatgagtttactcagtctgatataaatctgaagcagtagccccagcccccaggaatattcattagtgaccacaagaagagaaatttgctgaaattttaagtgtctgtctctacattactggatcagaakgtcatttttattattctctttttactcttttgtatcttccaagtttttctagaatgaatttgcattactttgttagaaaaaaaaatcttttacaaatatgttcacttgggcaagctatagaaggagcaaaaaacccaattaatttgtggtacacctaaatgaacatttttgtattgttaagataatcttttataactaaaggtgagtgttttgagcgattttttgttcagcctgaatctaattgctaagttatttcttaacatttctcactcacgcct

SEQ ID NO: 682458 - DNA, 607 bp, Homo sapiens
tatatacaaataccatgctaatttataatagccttatattactttctaatatattgcaagacacaattttttttcccaagattttcttggcaattttcacacactattttattttatttttttcatttttgagacggcatcttgctctgtcacgaggctggagtkcagtggtgcgatctcggctcactgcaacctccgcctcccaggttcaagcgattctcctgcctcagcttcctgagtagctggaactacgggcgcatgccaccacgcccagctaatttttgtatttttagtagagacggggtttcaccatgtcggccacgatggtctcgatctcctgaccttgtgatccgcctgcctcggcctcccaaagtgctgaggttacaggcatgagccactgcgcccagccacatttattttactacatgaatttaaaataattttgtcctctttccccgaaaaaggtgaattttgattggctttgcattaggtttacatattcatttgggaaggggtagtttttttaaaaaggaaattaaaattttaatcttagactataaaatgcctctcaatttgttcaggtattggctttagggccatcaataaa

SEQ ID NO: 682459 - DNA, 1327 bp, Homo sapiens
tgagatggagttttgctcttgttacccaggccggagtgcaatggcgtgatcttggctcattgcaacttctgcctcctgggttcaagcaattctcctgactcagcctcccgagtagctgggactacaggcatgcgccaccatgcctggctaattttgtatttttagtagagacggggtttccccatgttggtcaggctggtctccaactcccaacctcgggtgatccgcctgcctcrgcctcccaaagtgctgggattacaggcatgagccactgcacccggcctctatctttgtttttaaattttaactcattcttattgactttcaacaatcttaaattctcatactcagtaaaccaaaagcctttgaagaaaaagtttgaaaatgaggaatagagttgaattaattagaatttttcattgggaattagtatttaacttgattccataaaattcattaaaaatctttaagagttaaaacactgaagtgtttcacatacagtgcctatttctgttgtgctgaaaataataacaggtaaagtgacttttttaaactaaaaattaatgttataataatattcgtggattatattatctaagttgtaaagagtaatagctattttctccatttttcagtgctagttaaaggaatgatcttggtctctcagcttgtacctgacaggtagttgatatgtttgctatgttgacaccccttgagacagccttggccaagcccttgttggattaacagtagggacccccatggcccactgtcccacatcagccacatctcttcatcacatccatatctgtgttcccatactgttacataaaattacagtgtcacaaatcacttccaaaatggagaaaagcactaatggttcatgaatctttagatgaacctaaatataaaatgaactggaagtatcactgtttcttttctttctattgctttttcccctttttttatttaaaagtctctacacctcagatcttgtttggttttcctccttcgtaatttttacatcattcttttctctcatttatttctttgtcttagcatagcacgttctgctactggtatccacccacattcatttcccctctcagaactactcctgtcagggactttcccagccaatgtcttgtcacgggaaattttggagctgtattgcagaatgaagtgttggaaaaccttgtctttaggtgacatttaatggtgtggttgtatgtaggttagcctagtaccttatggattaatatgtacaaaataattattaattattgagcacctggctttttagaatcacaagttaaaagacagcact

SEQ ID NO: 682460 - DNA, 1327 bp, Homo sapiens
tgagatggagttttgctcttgttacccaggccggagtgcaatggcgtgatcttggctcattgcaacttctgcctcctgggttcaagcaattctcctgactcagcctcccgagtagctgggactacaggcatgcgccaccatgcctggctaattttgtatttttagtagagacggggtttccccatgttggtcaggctggtctccaactcccaacctcgggtgatccgcctgcctcagcctcccaaagtgctgggattacaggcatgagccactgcacccggcctctatctttgtttttaaattttaactcattcttattgactttcaacaatcttaaattctcatactcagtaaaccaaaagcctttgaagaaaaagtttgaaaatgaggaatagagttgaattaattagaatttttcattgggaattagtatttaacttgattccataaaattcattaaaaatctttaagagttaaaacactgaagtgtttcacatacagtgcctatttctgttgtgctgaaaataataacaggtaaagtgacttttttaaactaaaaattaatgttataataatattcgtggattatattatctaagttgtaaagagtaatagctattttctccatttttcagtgctagttaaaggaatgatcttggtctctcagcttgtacctgacaggtagttgatatgtttgctatgttgacaccccttgagacagccttggccaagcccttgttggattaacagtagggacccccatggcccactgtcccacatcagccacatctcttcatcacatccatatctgtgttcccatactgttacataaaattacagtgtcacaaatcacttccaaaatggagaaaagcactaatggttcatgaatctttagatgaacctaaatataaaatgaactggaagtatcactgtttcttttctttctattgctttttcccctttttttatttaaaagtctctacacctcagatcttgtttggttttcctccttcgtaattttyacatcattcttttctctcatttatttctttgtcttagcatagcacgttctgctactggtatccacccacattcatttcccctctcagaactactcctgtcagggactttcccagccaatgtcttgtcacgggaaattttggagctgtattgcagaatgaagtgttggaaaaccttgtctttaggtgacatttaatggtgtggttgtatgtaggttagcctagtaccttatggattaatatgtacaaaataattattaattattgagcacctggctttttagaatcacaagttaaaagacagcact

SEQ ID NO: 682461 - DNA, 661 bp, Homo sapiens
ttcatctttttttttatacttgaagttctagggtacatgtgtacaacatgcaggcttgttacatatgtatacatgtgtcatgttggtgtgctgcacccattaactcgtcatttacattaggtatatctcctaatgctatcccttcaccctccccccaccccacaacaggccccggtgtgtgatgttccccttcctgtgtccaagtgttctcattgttcaattcccacctatgagtgagaacatgcagtatttggttttctgtccttgcaacagtttgccragaatgatggtttccacctccatccatgtccctacaaaggacatgaactcatcttttttatggctgcatagtattccatggtgtatatgtgccacattttcttaatccagtctatcattgctggacatttgggttggttccaagtctttgctattgtgaatagtgctgcaataaacatacgtgtgcatcctatctccgtttgattccactgttgctaccaggtcacaaattttttcttcaatggtgataattctagtaagttagttcagttataaatatgtatttccttttcaaacacatcttattttctattattttgtcatagcatgctaagtttatattatgtataaattaccttctctgatctcactgagactcaat

SEQ ID NO: 682462 - DNA, 661 bp, Homo sapiens
ttcatctttttttttatacttgaagttctagggtacatgtgtacaacatgcaggcttgttacatatgtatacatgtgtcatgttggtgtgctgcacccattaactcgtcatttacattaggtatatctcctaatgctatcccttcaccctccccccaccccacaacaggccccggtgtgtgatgttccccttcctgtgtccaagtgttctcattgttcaattcccacctatgagtgagaacatgcagtatttggttttctgtccttgcaacagtttgccgagaatgatggtttccasctccatccatgtccctacaaaggacatgaactcatcttttttatggctgcatagtattccatggtgtatatgtgccacattttcttaatccagtctatcattgctggacatttgggttggttccaagtctttgctattgtgaatagtgctgcaataaacatacgtgtgcatcctatctccgtttgattccactgttgctaccaggtcacaaattttttcttcaatggtgataattctagtaagttagttcagttataaatatgtatttccttttcaaacacatcttattttctattattttgtcatagcatgctaagtttatattatgtataaattaccttctctgatctcactgagactcaat

SEQ ID NO: 682463 - DNA, 661 bp, Homo sapiens
ttcatctttttttttatacttgaagttctagggtacatgtgtacaacatgcaggcttgttacatatgtatacatgtgtcatgttggtgtgctgcacccattaactcgtcatttacattaggtatatctcctaatgctatcccttcaccctccccccaccccacaacaggccccggtgtgtgatgttccccttcctgtgtccaagtgttctcattgttcaattcccacctatgagtgagaacatgcagtatttggttttctgtccttgcaacagtttgccgagaatgatggtttccacctccatccatgtccctacaaaggacatgaactcatyttttttatggctgcatagtattccatggtgtatatgtgccacattttcttaatccagtctatcattgctggacatttgggttggttccaagtctttgctattgtgaatagtgctgcaataaacatacgtgtgcatcctatctccgtttgattccactgttgctaccaggtcacaaattttttcttcaatggtgataattctagtaagttagttcagttataaatatgtatttccttttcaaacacatcttattttctattattttgtcatagcatgctaagtttatattatgtataaattaccttctctgatctcactgagactcaat

SEQ ID NO: 682464 - DNA, 619 bp, Homo sapiens
aaacgtaagtaagtgtgaggaaataggagatgttgaagaagtttctcatatatctaagtagcttgtaagtgtaattttcatgtcatttaagtacagcagaataacaggacttcctggctttgtatcttaaattcagggaacaatgtagctatgatggaaaatatagcttttggttagcaatttgaacaatcaatagcaagtataagaccaagtcaaattggtacttttaagatttacaatgttatttccacactggccagaatttgaattcaaatctgtaataaggtccttgtgtcagaatgtatctttaatttcactttttggtcagttaatccaagattatgtagattccaaagtttaatttcatacttataactattattatttaatttctctcaacaatgtagcaataagtttctgccagtgaattggcaaaatcacaatttttcttaatttgttgtgggttttctttattgtgggggggattttttgcttctcaaaaacttttcaacctggctctgtttctaagagytctgtgtcttactttttgtgggagggaagcagcttatttacacgatgcaataagatctggggatttgtaacatgggaaactgagtga

SEQ ID NO: 682465 - DNA, 1334 bp, Homo sapiens
aaaccagcaccccaagataaatgagaataagctaattcagtcttattgattccctgttttgtttaattactagagttctgatttgtttaattgctagagattgctttctactatttttactgcaaatgtgccttgacttagctacaatattgctgcagagaaatgtgctctacattccaaacaatcaactttacaaacttttgaaaccaaataaatttgataacaaagaatcagctgtatgcaattaatgacagaagccaataatgtaaaaattaggtgatgtaggcttgtagattaccagagacctcagatggaagtaagacttaagctagatgttgaaagatggagaaagaattaggagaacatgggaaagattgtataaccacaagcttccagtctgtcactggcataatataatctcaggtaagtgagtaaactaaattggctatggtagtgattaacatggggaggagaagaaggttaaagtaaggaaaacactggagttggagaatgcaatagaaaaccttaaacaacatgtagagaatttgggttttgtttgtttgtttgtttgtttgtttgtttttgagatagggtctcattatgttgcccaggctgatcttgaactcctgggctcaagtgatcctcccacctcagcctcccaaagtgctgggattataggcatgagccaccatgcccagccatgtagagaatttttgactcaacttgtagaacaatggtttacaattgctttctctcctccaatacacctgagagatgcaatcatttccagtaatagcagtggctcactattcaaaaggtcctcaactatgrggaagagatagtaagaatgttattgaaataactgagaggaagagatttcaaaaagccccactcaggattctgatatgcctcccttcaccatcctacccctccacacctccctgggaatgaaaagccacgggagaccttagaagacagtgcccttttgaaagtgttacgactgtatttcatggtttaatgacctaatttcctaaacattaggcaaatctgtttcaacactttccaaaatgtaattcatagtatactcatctcgtaagataccatctattaaaaattaagccagacatgacgacatgcacctatagtccaaactactcaaaaaactaaggtgggagaattgcttgagcactggagttcaggtgtgggcaagatagtgagaccttgtctctaaaataaaataaaataaaataaattcagtccacataagctgggaaagcccacatagcatagccccttctatcagaatttcaccaactatattaacatgcctaatg

SEQ ID NO: 682466 - DNA, 989 bp, Homo sapiens
tgcatgttcatgcactaaaatcagcctttccaggcccacatctagctcctctgatccaggaaccagccatgtggcacaagaccagaagccagacacctggggcagagaggtcaatagcacaggtctccctgatccgggtctttcttcctcctatgtaccaatgcttcagcttctgatacaaatggaagcccacagtggaaaggttcaggggctaggagtcatagagatagctgtctgttcacaattaaacagaaatgcctttgggattacttattagggatgccttgttctattctgtgagaacctgattcttattcctgtggccagattctaaaaaaactgaaaaatacttagactacatgcactaaatttattatttagagtttatgttagaaaccgagcacactaacattaagaayaaacaaacccatatttttagtttcccaagtctatctctgaaatatcaacagcacctttctatgaagatttttctttcttgtaaaggagttctctgtcagctggaaagaatcatagaggtaggccagcatgcctcggtctaggtccccatttacagagagaacacaaggaaccacattttttcgtccatctcggcccttcacagaaaaacagaagaaaaataatcatttcacagaactttttttgtttgtttgtttttgagacggagtctcactctgtcacctggccaggctggagtgcagtggcatgatctcagctccctgcaacctctgcctcccaggttcaagtgattctcctgcctcagcctcctgagtacatattttagacttacacaatcagaatacaaaagtaaagtttcattttacaaagcacccactctgtaccaggcctgtggtaggcactgggcccacgaagacgataaagatgcattctctgctctcactgagctcagtgtttcatcagcgaggcccaaatgtgaattttaaaactatggtgcttggttgggctctatc

SEQ ID NO: 682467 - DNA, 608 bp, Homo sapiens
gtaaattgcctgtccatttatttaataaaatgatatattaggagagctgtgctttataaaaacttgtctgaagtaaacataatcatatagaataaatgcctacctgaaaaccataagaaaaaataagtttccaaatcccttgctaaagcagtcaagtaaactcaggtatcaatgtgttaaytttatttttttaataatatgcttttgtctggattggagaacatatttctttcagaggatccaacctttaccatagttttaagagaataatgatttgtatcactagagggagacacagtttgccaaaaagctattaccaggcagaactgaaaactttccagtcttaagactaaaacaacaagaaataaagctactacatattgtttcccatattgcatatcattgtgaatttaacaaattcaaaactagaattagtgaaacaacaggttaatttttcccttctgaaataatattgaaactgtgaatcaaaaggtagaaatggacattgtcaaactttagtgaaacactaaaattcaaacacaatgatgttgaaatatcagaatttttcaactatctcaagacaataaaaatcagtacacaaagattgt

SEQ ID NO: 682468 - DNA, 1243 bp, Homo sapiens
aataaataccacatttgtaatcaatttatcattactttttwaaaaaataaactgggaaagatcttggtaaatagaacccactgctttatttccagagctttaaacagtcacaaaaggagtttgaatagaaaccatttgcaattaacttgcagacataatgatctttttcttctaaaaacacatttcagtgtgtatttctttaataaaaaggaacattgtctaacacagccacagcacaattataaaagtcaggaaattaacattgatacataatctaatataaagactttattcaaattttgaaaaaaattttaacccaatgtccaatccagactcatacattgattgcatttagttctcatttctcttcagtttcctttaatttataacttgcttggtctttctttatcttttatgaccttgacatttttcaaaagtataggccaattatttcgtggtctatctcttgatttgaatttgtctagtttatttatgattacatttggattatgaatttttggcaggaatgtcacagaagtaatgttctgtacttctcagtgcatcatatcaggaggcacatggtatctttttgtcctattatgggtgatattaactttgattacttggtaatggtagatagatcattgtaaaaatgctattttttcctcactgtacttattatatatcttgtggagagatactttgataccaaaaatatcaaacttttacccattaattttaacatttattgatgatttttttttttgagatggagtcttgctctgttgcccaggctggagtgtagtggctcgatcttggctcactgcaagctctgcctcccaggttcacgccattcttctgcctcagcctcctgagtagctgggactacaggtgcccgcaacaacgcctggctaattctttttaatatatatttttagtagagatggggtttcaccgtgttagccaggatggtctcggtctcctgaccttgtgatctgcccaccttggcctcccaaagtgctgggattacaggtgtgagccaccacgcccggctgatgattctttactgaataagttattactataattgctatcaagtagtatcttacttattcttacttatatcttacacattcatcttaccttgctgtattttcaaggaagaggtgctatgagaggaaaaacctgtagtaatctttcaagagaggcctaggtttgtgcagaacccaggtgggttgcaatc

SEQ ID NO: 682469 - DNA, 1243 bp, Homo sapiens
aataaataccacatttgtaatcaatttatcattactttttaaaaaaataaactgggaaagatcttggtaaatagaacccactgctttatttccagagctttaaacagtcacaaaaggagtttgaatagaaaccatttgcaattaacttgcagacataatgatctttttcttctaaaaacacatttcagtgtgtatttctttaataaaaaggaacattgtctaacacagccacagcacaattataaaagtcaggaaattaacattgatacataatctaatataaagactttattcaaattttgaaaaaaattttaacccaatgtccaatccagactcatacattgattgcatttagttctcatttctcttcagtttcctttaatttataacttgcttggtctttctttatcttttatgaccttgacatttttcaaaagtataggccaattatttcgtggtctatctcttgatttgaatttgtctagtttatttatgattacatttggattatgaatttttggcaggaatgtcacagaagtaatgttctgtacttctcagtgcatcatatcaggaggcacatggtatctttttgtcctattatgggtgatattaactttgattacttggtaatggtagatagatcattgtaaaaatgctattttttcctcactgtacttattatatatcttgtggagagatactttgataccaaaaatatcaaacttttacccattaattttaacatttattgatgatttttttttttgagatggagtcttgctctgttgcccaggctggagtgtagtggctcgatcttggctcactgcaagctctgcctcccaggttcacgccattcttctgcctcagcctcctgagtagctgggactacaggygcccgcaacaacgcctggctaattctttttaatatatatttttagtagagatggggtttcaccgtgttagccaggatggtctcggtctcctgaccttgtgatctgcccaccttggcctcccaaagtgctgggattacaggtgtgagccaccacgcccggctgatgattctttactgaataagttattactataattgctatcaagtagtatcttacttattcttacttatatcttacacattcatcttaccttgctgtattttcaaggaagaggtgctatgagaggaaaaacctgtagtaatctttcaagagaggcctaggtttgtgcagaacccaggtgggttgcaatc

SEQ ID NO: 682470 - DNA, 664 bp, Homo sapiens
tgaggcttttagataaagttgtttatcataatttaattatggaaagctgaagaataaggaagctgggagaccttttgttgccttagccataaatttggataaatgcatgctatgaaattgcaagacatttgaagggtgtgcctgagttactttgatatgccttccctccctgacaccagccaaacatcctcagaatttgcatgacaaatttctttatgataraatctagctgtgtgtggcatttccataatgtgcagcatggtgctttggaatgcactggaactctccctgtaggtgcaaacccaaaaaccaccttaaaaacattttcatctgtctgaaagtttgcgaaggggaaaaatgcacagaagcctttggcaaacctgtctcttcttcctgtttgttataagcctctgccaccagcgatttcccttgctgccttcttggcaaatgggccctgcttccgaaagagcagccttttctccaaggccttatcaagatgttttcccatgcatctactgctgccatcacccctcaagtgatagtctatcagctgacaactggtctctgtctacacaaaacggagatattccagggtcaaaaagaaaaaagaatgcctgcactgaaaagcacacagatctgccttcacagtttaactaaataaata

SEQ ID NO: 682471 - DNA, 664 bp, Homo sapiens
tgaggcttttagataaagttgtttatcataatttaattatggaaagctgaagaataaggaagctgggagaccttttgttgccttagccataaatttggataaatgcatgctatgaaattgcaagacatttgaagggtgtgcctgagttactttgatatgccttccctccctgacaccagccaaacatcctcagaatttgcatgacaaatttctttatgatagaatctagctgtgtgtggcatttccataatgtgcagcatggtgctttggaatgcactggaactctccctgtaggtgcaaacccaaaaaccaccttaaaaacattttcatctgtctgaaagtttgcgaaggggaaaaatgcacagaagcctttggcaaacctgtctcttcttcctgtttgttataagcctctgccaccagcgatttcccttgctgccttcttggcaaatgggccctgcttccgaaagagcagccttttctccaaggccttatcaagatgttttcccatgcatctactgytgccatcacccctcaagtgatagtctatcagctgacaactggtctctgtctacacaaaacggagatattccagggtcaaaaagaaaaaagaatgcctgcactgaaaagcacacagatctgccttcacagtttaactaaataaata

SEQ ID NO: 682472 - DNA, 672 bp, Homo sapiens
tcaaaacccatttttaggaataaagttatgagaagctttcattcaagacttagactctgaagaacgcagaaacgagagaacttcagtagtaaaacttacataatgtttgcccccttaacttttttttttttttttgagatggagtctcactctgtcacccaggctggagtgcaatggcatgatctcggctcactgcaacttcctcctctcaggttcaagcaattctcctgtctcagcctcctgagtagctgggattacaggtgcacaccaccatgccaggctaattttttgtattttagtagtgacggggtttcaccgtgttgcccaggctggtctcraactcctgagctcaggcaatccaaccacctcggcctcccaaagtgctaggattacaggtgtgaaccaccacacccggctgctcccttaatttttatatccctctcttgccaacaggttttttttttaaggttattttctttcccttcacaaggctatgtgatgtaatgcaaaggaaaatgagaagcatctgctgaagagttaaacacccataccaaaagaaccatttcgctattttgcatattatctattctaaaggtagttaagagatcctcaccctgaactcaaaggcaattcaaaaatttccttaaacaaaatcagagtgcaattattgga

SEQ ID NO: 682473 - DNA, 576 bp, Homo sapiens
agatagcgcctggttaattagcagctggtttgtctacctccccagaggaatattcagtcctagcccaaccacaaaagcacagcttcaaacagggaaggtgactttgttgtgagtctaataagatcacaaggggctatatttggggcttcaactacagtggatggcctaggcatccaggctgatagctgattgactcctaataatctgaattattctctcaaaacaacacaactcaatgggagctactgatttgctagggtatcataaacagaaagagaattaatagtagtctctgccctgatacaaatccacttccactgaattgaaacaaactcagtaatcataaactagccargaatggtgaagacctactttgacctaaattggcttattgacttgagtttttttttctgaagaaaatacctcttattgcttatgattataaatttccacagggattagataaattatattttatcattaattttgtgtacgtggcaacatgattggggaaaattatctagtgattaaatgtaactgtatttgctttgctagaaaattacaccaaagaagacc

SEQ ID NO: 682474 - DNA, 652 bp, Homo sapiens
tgatcaggagactttgggggagtctttggcgagagttggagcgaggttaagcccaagtactctctaggctgtccttacaggcaatctcctttctggagatggccttcttggagtgggagaagctcaaaggttcttgcagtagaaagaaggaaaaaaggaaaccgcatttgaggattgcgtggtgtaacatcaagactccagactttgagaataaacccatttggattagaattctgcttctatgtttactgctcatgagagcttgggcaggttatttaagcactcgaagtttcactgtcattgtggatagttctttttttttttttttttttttttttgagacggagtcttgctctgtcgcccaggctggagtgcagtggcgccatctcggctcactgcaagctccgcctcccgggttcacgccattcctgcctcagcctctcgagtagctgggactacaggcgccctccactgtgcccgggtaattwtttatatttttagtaaagacggagtttcaccgtgttagccatgatggtctcgatctcctgaccttgtgatccgcctgcctcggcctcccaaagtgctgagattacaggcgtgagccaccgcgcccggccgtatgattcttgtgtggttaaataagaccatgtat

SEQ ID NO: 682475 - DNA, 578 bp, Homo sapiens
caattaygtgagatttttttcaatgggctgtattatactttctgggagacaacatgattttctatgatactattgatgaagcatgaagtatggcacaagaaagaccagctacaccactatgtaaccctagaaaaatgatttaacctgtacatgaatttgctccttgatctataagttggtaatgttaaataattaatgcttaaaactgttgccatgtattaaatgaaataatgtatattaagcaaatagaggatataagcctcaacaaagatgaatcttatttgttttatgtagttcttacttataatgagactattatttagttatattttaaatttataccaatatataattttcaaagcacatttattactacagttgattccctcaaattaattctatgcagttggcagagttataatgacccctgattttcctaccaaacaatgttacagaaaaaatacagaaaaagtatacagaaaagttaagtgacttgattgtgattttatggtggcagatatgtcacttaaacgtaatcagtcttctacattaaagattgcttcttttgtattgcataa

SEQ ID NO: 682476 - DNA, 578 bp, Homo sapiens
caattacgtgagatttttttcaatgggctgtattatactttctgggagacaacatgattttctatgatactattgatgaagcatgaagtatggcacaagaaagaccagctacaccactatgtaaccctagaaaaatgatttaacctgtacatgaatttgctccttgatctataagttggtaatgttaaataattaatgcttaaaactrttgccatgtattaaatgaaataatgtatattaagcaaatagaggatataagcctcaacaaagatgaatcttatttgttttatgtagttcttacttataatgagactattatttagttatattttaaatttataccaatatataattttcaaagcacatttattactacagttgattccctcaaattaattctatgcagttggcagagttataatgacccctgattttcctaccaaacaatgttacagaaaaaatacagaaaaagtatacagaaaagttaagtgacttgattgtgattttatggtggcagatatgtcacttaaacgtaatcagtcttctacattaaagattgcttcttttgtattgcataa

SEQ ID NO: 682477 - DNA, 578 bp, Homo sapiens
caattacgtgagatttttttcaatgggctgtattatactttctgggagacaacatgattttctatgatactattgatgaagcatgaagtatggcacaagaaagaccagctacaccactatgtaaccctagaaaaatgatttaacctgtacatgaatttgctccttgatctataagttggtaatgttaaataattaatgcttaaaactgttgccrtgtattaaatgaaataatgtatattaagcaaatagaggatataagcctcaacaaagatgaatcttatttgttttatgtagttcttacttataatgagactattatttagttatattttaaatttataccaatatataattttcaaagcacatttattactacagttgattccctcaaattaattctatgcagttggcagagttataatgacccctgattttcctaccaaacaatgttacagaaaaaatacagaaaaagtatacagaaaagttaagtgacttgattgtgattttatggtggcagatatgtcacttaaacgtaatcagtcttctacattaaagattgcttcttttgtattgcataa

SEQ ID NO: 682478 - DNA, 578 bp, Homo sapiens
caattacgtgagatttttttcaatgggctgtattatactttctgggagacaacatgattttctatgatactattgatgaagcatgaagtatggcacaagaaagaccagctacaccactatgtaaccctagaaaaatgatttaacctgtacatgaatttgctccttgatctataagttggtaatgttaaataattaatgcttaaaactgttgccatgtattaaatgaaataatgtatattaagcaaatagaggatataagcctcaacaaagatgaatcttatttgttttatgtagttcttacttataatgagactattatttagttatattttaaatttataccaatatataattttcaaagcacatttattactacagttgattccctcaaattaattctatgcagttggcagagttataatgacccctgattttcctaccaaacaatgttacagaaaaaatacagaaaaagtatacagaaaagttaagtgacttgattgtgattttatggtggcagatatgtsacttaaacgtaatcagtcttctacattaaagattgcttcttttgtattgcataa

SEQ ID NO: 682479 - DNA, 1050 bp, Homo sapiens
tggaaaagaggacttttctgcctcctgaaagggtcatggtgacgctgacattttgaaaacgactgatttaggtgataatgatccaggacattctagaatattctttttgggcttttttagagtcccattaagattgttgaggtttggtgaatcttttgagagggtttagaattaacaacagagccatatatwtgagcagcatcttacggtttccaaatagtttaaaatactttttcctcagaacaataatgagaacagcactgagaatgaccaggcagatgtggagcttaccgtgctccttcatccaggaatacctgtggactttggtcagaaagagggaagaagcacaaacccctccagagttttgtaaaactgccacaatcatctggcttacggcaaagctgggcgatgatgagaattttacagattttttccccaacctacagtaactttgaaatgacagaatggaaattcattttaacatgaggcttgggccaggtttactgagcagtgaagctgcttccctttctcccttccttccttttttttgtgacattttaattctgcattcaaacctgttaaataaagttgagctttgacgggtctgaagtgatgaacatggtgtgtctgcacgcagttatttatggcaaggctacaaaacaggatgactgttttgtgaaacattttggggagaaaggcaaagggaaagttgtcttccagaggtgtggaggggagtgaagcaagtaagtggaaccacttttgctaaggaaacagcaaaacttggaaaccaataggggcaaggcagttagttactctgtttatagaatggagactgtctacctgtctgtctcactagttggttgtgaaaattcaggagaacattggtaataacttcatgaagtacattgattaaatatctggaaggtcagaagctgtaccagggaactagacacacaggtgtagagctcatgctgtgggtaggcctgtgaaaataaacttgccaaaaattgaaggaccgcttggcatgggggaccttctccatttctagga

SEQ ID NO: 682480 - DNA, 1050 bp, Homo sapiens
tggaaaagaggacttttctgcctcctgaaagggtcatggtgacgctgacattttgaaaacgactgatttaggtgataatgatccaggacattctagaatattctttttgggcttttttagagtcccattaagattgttgaggtttggtgaatcttttgagagggtttagaattaacaacagagccatatatatgagcagcatcttacggtttccaaatagyttaaaatactttttcctcagaacaataatgagaacagcactgagaatgaccaggcagatgtggagcttaccgtgctccttcatccaggaatacctgtggactttggtcagaaagagggaagaagcacaaacccctccagagttttgtaaaactgccacaatcatctggcttacggcaaagctgggcgatgatgagaattttacagattttttccccaacctacagtaactttgaaatgacagaatggaaattcattttaacatgaggcttgggccaggtttactgagcagtgaagctgcttccctttctcccttccttccttttttttgtgacattttaattctgcattcaaacctgttaaataaagttgagctttgacgggtctgaagtgatgaacatggtgtgtctgcacgcagttatttatggcaaggctacaaaacaggatgactgttttgtgaaacattttggggagaaaggcaaagggaaagttgtcttccagaggtgtggaggggagtgaagcaagtaagtggaaccacttttgctaaggaaacagcaaaacttggaaaccaataggggcaaggcagttagttactctgtttatagaatggagactgtctacctgtctgtctcactagttggttgtgaaaattcaggagaacattggtaataacttcatgaagtacattgattaaatatctggaaggtcagaagctgtaccagggaactagacacacaggtgtagagctcatgctgtgggtaggcctgtgaaaataaacttgccaaaaattgaaggaccgcttggcatgggggaccttctccatttctagga

SEQ ID NO: 682481 - DNA, 1050 bp, Homo sapiens
tggaaaagaggacttttctgcctcctgaaagggtcatggtgacgctgacattttgaaaacgactgatttaggtgataatgatccaggacattctagaatattctttttgggcttttttagagtcccattaagattgttgaggtttggtgaatcttttgagagggtttagaattaacaacagagccatatatatgagcagcatcttacggtttccaaatagtttaaaatactttttcctcagaacaataatgagaacagcactgagaatgaccaggcagatgtggagcttaccgtgctccttcatccaggaatacctgtggactttggtcagaaagagggaagaagcacaaacccctccagagttttgtaaaactgccacaatcatctggcttacggcaaagctgggcgatgatgagaattttacagattttttccccaacctacagtaactttgaaatgacaraatggaaattcattttaacatgaggcttgggccaggtttactgagcagtgaagctgcttccctttctcccttccttccttttttttgtgacattttaattctgcattcaaacctgttaaataaagttgagctttgacgggtctgaagtgatgaacatggtgtgtctgcacgcagttatttatggcaaggctacaaaacaggatgactgttttgtgaaacattttggggagaaaggcaaagggaaagttgtcttccagaggtgtggaggggagtgaagcaagtaagtggaaccacttttgctaaggaaacagcaaaacttggaaaccaataggggcaaggcagttagttactctgtttatagaatggagactgtctacctgtctgtctcactagttggttgtgaaaattcaggagaacattggtaataacttcatgaagtacattgattaaatatctggaaggtcagaagctgtaccagggaactagacacacaggtgtagagctcatgctgtgggtaggcctgtgaaaataaacttgccaaaaattgaaggaccgcttggcatgggggaccttctccatttctagga

SEQ ID NO: 682482 - DNA, 1050 bp, Homo sapiens
tggaaaagaggacttttctgcctcctgaaagggtcatggtgacgctgacattttgaaaacgactgatttaggtgataatgatccaggacattctagaatattctttttgggcttttttagagtcccattaagattgttgaggtttggtgaatcttttgagagggtttagaattaacaacagagccatatatatgagcagcatcttacggtttccaaatagtttaaaatactttttcctcagaacaataatgagaacagcactgagaatgaccaggcagatgtggagcttaccgtgctccttcatccaggaatacctgtggactttggtcagaaagagggaagaagcacaaacccctccagagttttgtaaaactgccacaatcatctggcttacggcaaagctgggcgatgatgagaattttacagattttttccccaacctacagtaactttgaaatgacagaatggaaattcattttaacatgaggcttgggccaggtttactgagcagtgaagstgcttccctttctcccttccttccttttttttgtgacattttaattctgcattcaaacctgttaaataaagttgagctttgacgggtctgaagtgatgaacatggtgtgtctgcacgcagttatttatggcaaggctacaaaacaggatgactgttttgtgaaacattttggggagaaaggcaaagggaaagttgtcttccagaggtgtggaggggagtgaagcaagtaagtggaaccacttttgctaaggaaacagcaaaacttggaaaccaataggggcaaggcagttagttactctgtttatagaatggagactgtctacctgtctgtctcactagttggttgtgaaaattcaggagaacattggtaataacttcatgaagtacattgattaaatatctggaaggtcagaagctgtaccagggaactagacacacaggtgtagagctcatgctgtgggtaggcctgtgaaaataaacttgccaaaaattgaaggaccgcttggcatgggggaccttctccatttctagga

SEQ ID NO: 682483 - DNA, 646 bp, Homo sapiens
tccctttttatgacaaaattgctttcagtactaatcgttatttcattaatttgtttcacagtttgaaacaaaggtttactttgtatacaaaaattttcatttaaaaatacttagtgaaataaatcatgtatgaactaaaattagtacttaccacaaaaatattacagctatttggtctgttgatcattgttttcaatttaaacacaaataaaactcaaaattatcagataaaatgagataatggaagtaattcaagttctgtttcttctttatcatcactgcactgtcattgttcatttcaaatctactcttttcaacgcaagcataggtagcaccatagggattggagatacaaatgcttccgaaagtgagcttgaatgcttccaaatctttaagaacttactcttgagacaaacataggtagctgaatccctttgtgttgaagtcaattatgtaactggaagatttccaagttagcctctctgtagaatccaatgtttgttacagaacaagcagtaaaaattacgcttatttgtgttggggtcaaccgtgtaacygggaaatttccaaattagcttcactgtagaattcagtgttgttaaagaataagcaggcagtaaaaactgtggtttttttctgatacaca

SEQ ID NO: 682484 - DNA, 610 bp, Homo sapiens
agacatttaatagcaggtgtcaagtatcctttaagttttctctttccaggtaagtcatgcttttcctccacttacccgtcatatgacatggattctaggatcttcacctagtcactctctggctctcttgttgttgagtgttcctaacatattgagtgttcatttacctccaatactctaatagacatagtgtctgtgtttacacttgaatgagaagactttgacagatggtatagatggatttaagttctagcagaagagaaagaacgccgctcacaagttgcccgcgctgttcttcttctctctctcttctttctaaagcttccaatttttctgcttgggtaataccattcaggacataagcacgggtaaagatttcatgacgaagatgatcaaagcaattgtaacaaaagcaaaaattgacaaataggatctaattaaactaaagagcttctgcacagcaaaagaaaccatcatcagagtaaacagacaacctacagaatggaacaaawtttttgtaatctctctgtctgacaaaggtataatatccaggatctataaggaacttaaacaaatttacaagaaaaaaaaaactccattaaaaagtggg

SEQ ID NO: 682485 - DNA, 589 bp, Homo sapiens
gaatcttctttatgaagtatcacaaatacccaagggataaatacacaagactcagttgaaatttgtgggaacttcaccattacaaagaaatctttttgattgcctctgttgtagagttgtagaaatttgggagggttttttgcacttttttttggcactctttaaaaaagtttatattttgcctctttttcattatttctaggtaactttattttcaatcattaaagtactatttggcttttgagtattctttacacatttaaccttctatctatctaaacttttactttctgatttccattttctcttatttctcctcagctctacagttttactgttttatttctctaaatcttttggtacatgyttacttcccttttttgtttggccaaaatttctttttaacttttcagttatcttcaggtattttaatcactttatctcttttctttatatatatatatatgcttacattgaagcattccatcattttgtttcttgtctttctaaatttaagactttcccccttttattcacttgattctttaggcctttaatttctaatttttttgtttttatcatttgtttt

SEQ ID NO: 682486 - DNA, 621 bp, Homo sapiens
ttagtcttgcttaacaaacatgctaggtgtggaggctgaggcctacatgtagtgttgagggcaagcagggacygcctggaaatgctgaaagcattctcttaaagtgaggccttcccatcatgattgctaggcccatgatgagaagatattgcaggaaagcacgacctggaccatagaaagggcagatcaatgtgtgggcctttatgtgcttatccctcccaccaccctgctgcagaccccacccacactcaagcttagcccctgtggcttggaacccaaggacgcttctgagctgaggcagacttcagggagtactagttaggataggtcagctgcaagtaacaaacaaacaaacaaaatacgcagcaaactctggccctcagggccaaattcagcccaccatctatttttataagtaaagttttattggaacataggtgtacccattcatttacacattgtctatggttgtttttagggttgtagtgccaacagagatctcatggcccacacagagcctaaaatgttttccatgtggccctttatggaaaaagttcgcccacccctggcttgaacaatgacaacattgaattatctgccatcacaagaactccagaggaa

SEQ ID NO: 682487 - DNA, 621 bp, Homo sapiens
ttagtcttgcttaacaaacatgctaggtgtggaggctgaggcctacatgtagtgttgagggcaagcagggaccgcctggaaatgctgaaagcattctcttaaagtgaggccttcccatcatgattgctaggcccatgatgagaagatattgcaggaaagcacgacctggaccatagaaagggcagatcaatgtgtgggcctttatgtgcttatccctcccaccaccctgctgcagaccccacccacactcaagcttagcccctgtggcttggaacccaaggacgcttctgagctgaggcagacttcagggagtactagttaggataggtcagctgcaagtaacaaacaaacaaacaaaatacgcagcaaactctggccctcagggccaaattcagcccaccatctatttttataartaaagttttattggaacataggtgtacccattcatttacacattgtctatggttgtttttagggttgtagtgccaacagagatctcatggcccacacagagcctaaaatgttttccatgtggccctttatggaaaaagttcgcccacccctggcttgaacaatgacaacattgaattatctgccatcacaagaactccagaggaa

SEQ ID NO: 682488 - DNA, 1152 bp, Homo sapiens
gtgtgtgtgtgtgtgtgtgagagagagagagagagatgaccctttaaaaatgtacactccattcttctcatgagccatagtttgtcaacgcctggtctggcactcttcacatgccctctccgtgcccatctccagcaaaggatagcgggcttacccttgctatcaaaggtgcttggcttagaccaatcacccaaaactgatgtttcagagatgcctgctggaggagtataggcagatattactgatgtcagaaaaacagtttgagcgccacttccttctctggcaggaaggagtgattggctgctggtcctgccctgtccgaggaggaggacggaacccacccaccaagctgtggagaggtggaccccacaaatcccctcgcaagccacgtctgagagtgagcagagggaagaaactcaagcgtttgtagtcctctttcttaacaaccaggcttaaagcgtcatcttgtgtcttgaaggcagaaggagatcaggatgtgtgtgctagaagcaggcagaggatcttcaccaatgtctcaaaaactagagaaggaaacatggcgatcctcaaggcccgcggcagccccagcccttcccgcaccctgcgatagtctggtgttgggagggtggcccacgtgtccaagcaaccacatcagggaggttccgggagaggagaaggcaaagctcatgccctcatgaggcaggcagtcccatccaggactggactggatgagcaccaataaataagaaaacacagctggcagctgactgtgaagggtctggacagggtgccgaagtgaagcgtaatgagctggatagtgaggacttcactacagagggacatctatctacacacagcctgaagggtgagaaagatggatccttgccctgagccagaagtgcacaccccagagagagcagctcctgcggaggtcctgtggggcaggcatggtaggaatattaaagagaagaagccaggtgtggctgcagccatgcaggaggaagggcgatggggttggggaggcagaggatgggactggcatgagaagatggagatgcagagcccagatcgtgatagccccaatagtccacgggtaggagtttgtattttctactaaaagcaatgggagggcggggcgcggtagctcawgcc

SEQ ID NO: 682489 - DNA, 1612 bp, Homo sapiens
agcaagctccccagtgatcccaccatgccaccatggagctaaactgtttccaggctcactgggcacgttctgtctgttagcttcactgtttgagaatgtgtttgatctagagaaacactctaaggtcatccagtgctgtcyggtaagtcagctgggggtacaagctgacggtcactttggataaaagatgaagttttaaaaatgtcatccctggttttctagaggtagaaaactttccaaagaaccttctcaaactggaaatccaaaaatatttccagcaatggcagtatcaccagaacaagttcatggtcttccagggtgacttgtcaggaagaaaataatcattgtgtctccgcagtgactttgagcaagtcacttgtcttctctgagctccaacttcttcgttagaaaaaaatgagagcagagcctgccatttgcaacaacatgggcaaatctggaggacattgtgctcagtgaaataaggcagacacagaaagaaaaatactgcataatctcacttatatgtagtatctagaaaaacgtttttaatccaatgcataaaaacagatggtagaagctgggcatggtgatgtgggcctgtagtcctagctactagggagactgaggcgggaggatcacttgagctgaattcaaggctgcagtaatccgtgatggcaccactgcactctaccctgggcaacagagcaagaccctgtctctaaaattgaattaaattaataaataaaaacaaaataacataaagagtagaatggtagttggaggggaaaaattagaagattttggtcaaagggtacaaagttgcaaatacgtaagatgaataattctagagatgtaatggacaacgtgaagactgtagttaatactattgtattgtatactggaaatttgctaagagaatagattttaggtgctcttaccacatccaaaaaaagaaaggcaactatgtgagatgacagacataaatatgcttgactgtagtaatcacttcactatggataggaatatcaaataatcatgttgtataccttaaacatatacaacaaaaaacaaaaaaaaatgagactgacaattcaacaattcagatcctgactctgataacattaccacggatttctgccaagggcgaacactaccctgaaagcccatctaacattcttttcaaccatgagatttttctgaccctaagctatgtatttaaattatatttatcaaatccttccttctgagccataccaagtttaccaatgctgtgggaaaaaatccttatacatttctaagactttaatccccaaacgagaaaacaaaagcgcttccatgacccagaggaggcattgcaatggcacaaggtttctatgtaggaagaatattaaatttttttaaaaaataaaattgattttggcaatggttgcataactctatgaacagactaaaccgttgaattccacatgttaaatgggtgaattatatgccatgtgaattctctcaataaacctgttacatacccagaaaataaaactccctcaagcttttactgtagaccctggcttggcagaatttcctgactcttcatcattagaagttctgcctcata

SEQ ID NO: 682490 - DNA, 649 bp, Homo sapiens
tatggttaattcaaagtgctaatagctaaaaaccagaagtcattccaaagtttgcatgaacaaaactcacaagaaagttataaaaatattttatttaaatggtacagaaaaaaatatgtatacttaaaaatgattaaaacttcacattaggaaatgctaaaaacccagtaatttacacaatgataaaatctaaagtgacgggaaaacataaaatattttcatttggtcctgtcacctaacaaaackatcataaatatgagattatagtaattactaaagctggttaaaggcacatgacaacgtaattcctttatacatatccagtcattttatacaaggaactgctatcccttaaatggaagagtgaactatttgtttaaaatattaagagtgcatcatgtacctataatgaaaccactttctccaaagactcaaacagattaacattgcaaaatagtatttctgtatcactgacttctgaaaattttaataatttaagaatatgcaagtgaaatataatttattctggtttcaaaaatagttatacaaagtcacaattttccccaggaaaccattcacttcatagctgcaaaaacacactgtagcttttctgttagggtctgtcatgctttcagctagctggatgttt

SEQ ID NO: 682491 - DNA, 649 bp, Homo sapiens
tatggttaattcaaagtgctaatagctaaaaaccagaagtcattccaaagtttgcatgaacaaaactcacaagaaagttataaaaatattttatttaaatggtacagaaaaaaatatgtatacttaaaaatgattaaaacttcacattaggaaatgctaaaaacccagtaatttacacaatgataaaatctaaagtgacgggaaaacataaaatattttcatttggtcctgtcacctaacaaaacgatcataaatatgagattatagtaattactaaagctggttaaaggcacatgacaacrtaattcctttatacatatccagtcattttatacaaggaactgctatcccttaaatggaagagtgaactatttgtttaaaatattaagagtgcatcatgtacctataatgaaaccactttctccaaagactcaaacagattaacattgcaaaatagtatttctgtatcactgacttctgaaaattttaataatttaagaatatgcaagtgaaatataatttattctggtttcaaaaatagttatacaaagtcacaattttccccaggaaaccattcacttcatagctgcaaaaacacactgtagcttttctgttagggtctgtcatgctttcagctagctggatgttt

SEQ ID NO: 682492 - DNA, 649 bp, Homo sapiens
tatggttaattcaaagtgctaatagctaaaaaccagaagtcattccaaagtttgcatgaacaaaactcacaagaaagttataaaaatattttatttaaatggtacagaaaaaaatatgtatacttaaaaatgattaaaacttcacattaggaaatgctaaaaacccagtaatttacacaatgataaaatctaaagtgacgggaaaacataaaatattttcatttggtcctgtcacctaacaaaacgatcataaatatgagattatagtaattactaaagctggttaaaggcacatgacaacgtaattsctttatacatatccagtcattttatacaaggaactgctatcccttaaatggaagagtgaactatttgtttaaaatattaagagtgcatcatgtacctataatgaaaccactttctccaaagactcaaacagattaacattgcaaaatagtatttctgtatcactgacttctgaaaattttaataatttaagaatatgcaagtgaaatataatttattctggtttcaaaaatagttatacaaagtcacaattttccccaggaaaccattcacttcatagctgcaaaaacacactgtagcttttctgttagggtctgtcatgctttcagctagctggatgttt

SEQ ID NO: 682493 - DNA, 649 bp, Homo sapiens
tatggttaattcaaagtgctaatagctaaaaaccagaagtcattccaaagtttgcatgaacaaaactcacaagaaagttataaaaatattttatttaaatggtacagaaaaaaatatgtatacttaaaaatgattaaaacttcacattaggaaatgctaaaaacccagtaatttacacaatgataaaatctaaagtgacgggaaaacataaaatattttcatttggtcctgtcacctaacaaaacgatcataaatatgagattatagtaattactaaagctggttaaaggcacatgacaacgtaattcctttatacatatccagtcattttatacaaggaactgmtatcccttaaatggaagagtgaactatttgtttaaaatattaagagtgcatcatgtacctataatgaaaccactttctccaaagactcaaacagattaacattgcaaaatagtatttctgtatcactgacttctgaaaattttaataatttaagaatatgcaagtgaaatataatttattctggtttcaaaaatagttatacaaagtcacaattttccccaggaaaccattcacttcatagctgcaaaaacacactgtagcttttctgttagggtctgtcatgctttcagctagctggatgttt

SEQ ID NO: 682494 - DNA, 649 bp, Homo sapiens
tatggttaattcaaagtgctaatagctaaaaaccagaagtcattccaaagtttgcatgaacaaaactcacaagaaagttataaaaatattttatttaaatggtacagaaaaaaatatgtatacttaaaaatgattaaaacttcacattaggaaatgctaaaaacccagtaatttacacaatgataaaatctaaagtgacgggaaaacataaaatattttcatttggtcctgtcacctaacaaaacgatcataaatatgagattatagtaattactaaagctggttaaaggcacatgacaacgtaattcctttatacatatccagtcattttatacaaggaactgctatcccttaaatggaagagtgaactatttgtttaaaatattaagagtgcatcatgtacctayaatgaaaccactttctccaaagactcaaacagattaacattgcaaaatagtatttctgtatcactgacttctgaaaattttaataatttaagaatatgcaagtgaaatataatttattctggtttcaaaaatagttatacaaagtcacaattttccccaggaaaccattcacttcatagctgcaaaaacacactgtagcttttctgttagggtctgtcatgctttcagctagctggatgttt

SEQ ID NO: 682495 - DNA, 817 bp, Homo sapiens
atggagattctaagcacgatgtccatttcacagaaagctaccaawttggtggcttattttcctttctaccttcagaagtggctatccctgccacccaaacagacccttgactctcaagtggacggggtcccatttgcacagggggagaccttacagcctacgttgagtctatacttaccacttagtgagcattgtgtctgctcaggggcctctgtgggcatccgtctcctctgcagcatctttcctccccactgctgggtctgcacatgaccccctccttgggttaggcctctgatcagtgatgaccttggtatggtggtgatggtcagtcttggcatcaaatgagccagtttatatcatcagctattcaataaaatactaatctaggtgtcaccgtgaaagtattttgtgacattgttatgtacgtgttgttacaaatgtgcatgatgcatttactacagcatagaattttgcctgggtgccagcgtgaagtctgtccgacagatcatagccatgttaatcccacagtcacgggggccaattgattaaattattttatctcccttgaaaactaaaaataaaatcctaagccccccacccgacttaacagaccccctgttggccaacggaacctcaaataaatcttaaaattcagttcttggccatgacaggacaggaggtcagacatacctccctgtacctccctccctcttatggtttagacccaacaactgaacagcattaatgttaaaatagagatcatgagactgacagaacagactctttgtggcaataagacctcaaattataaacagga

SEQ ID NO: 682496 - DNA, 817 bp, Homo sapiens
atggagattctaagcacgatgtccatttcacagaaagctaccaaattggtggcttattttcctttctaccttcagaagtggctatccctgccacccaaacagacccttgactctcaagtggacggggtcccatttgcacagggggagaccttacagcctacgttgagtctatacttaccacttagtgagcattgtgtcygctcaggggcctctgtgggcatccgtctcctctgcagcatctttcctccccactgctgggtctgcacatgaccccctccttgggttaggcctctgatcagtgatgaccttggtatggtggtgatggtcagtcttggcatcaaatgagccagtttatatcatcagctattcaataaaatactaatctaggtgtcaccgtgaaagtattttgtgacattgttatgtacgtgttgttacaaatgtgcatgatgcatttactacagcatagaattttgcctgggtgccagcgtgaagtctgtccgacagatcatagccatgttaatcccacagtcacgggggccaattgattaaattattttatctcccttgaaaactaaaaataaaatcctaagccccccacccgacttaacagaccccctgttggccaacggaacctcaaataaatcttaaaattcagttcttggccatgacaggacaggaggtcagacatacctccctgtacctccctccctcttatggtttagacccaacaactgaacagcattaatgttaaaatagagatcatgagactgacagaacagactctttgtggcaataagacctcaaattataaacagga

SEQ ID NO: 682497 - DNA, 817 bp, Homo sapiens
atggagattctaagcacgatgtccatttcacagaaagctaccaaattggtggcttattttcctttctaccttcagaagtggctatccctgccacccaaacagacccttgactctcaagtggacggggtcccatttgcacagggggagaccttacagcctacgttgagtctatacttaccacttagtgagcattgtgtctgctcaggggcctctgtgggcatccgtctcctctgcagcatctttcctccccactgctgggtctgcacatgaccccctccttgggttaggcctctgatcagtgatgaccttggtatggtggtgatggtcagtcttggcatcaaatgagccagtttatatcatcagctattcaataaaatactaatctaggtgtcaccgtgaaagtattttgtgacattgttatgtacgtgttgttacaaatgtgcatgatgcatttactacagcatagaattttgcctgggtgccagcstgaagtctgtccgacagatcatagccatgttaatcccacagtcacgggggccaattgattaaattattttatctcccttgaaaactaaaaataaaatcctaagccccccacccgacttaacagaccccctgttggccaacggaacctcaaataaatcttaaaattcagttcttggccatgacaggacaggaggtcagacatacctccctgtacctccctccctcttatggtttagacccaacaactgaacagcattaatgttaaaatagagatcatgagactgacagaacagactctttgtggcaataagacctcaaattataaacagga

SEQ ID NO: 682498 - DNA, 603 bp, Homo sapiens
taaacattattatgtaaataatttagtaccattccatttgcccttgtagatttaaaaatgtaaatggctttctcatattaggaaacatcacttttcaaaactcagataaacatagtacattgcaagagaataattattttctttattaaaaaagaaatactggatgytaagtccaaaagacataaattattttatactaataactactaatattttattcattaaaatataaaggtcaaagatttcaaaatgatctttaaatgactaataacatgttgatctttttcttctttctgtaaacctttttgagtcttaaaaatactaaactatacaagcaatattaaatagtatataaacttggattaaaatattcaaatttactagaatgtggacattggaaagaatgaaaataaacagaagcataaagcagcagatataaaattaagaaagcaactaagagtgtttaaagtacatattcatctgtagtctaatgtctaccataaacaatgactcttctcagtaaaacacaaattgttcatgaagggaaaaagcatgttgtattagagaatattcaacataatttttttagtactaacttgtgcc

SEQ ID NO: 682499 - DNA, 524 bp, Homo sapiens
caatgattaatgcttcttagacagaagagatggcaaaataatagggtatcaatgggaaaagtataaagtgatactaaggagagttcacatagaatctgccagaccatatatattccaaagattagaaaactgctctccttgaagaatgatcatcagtcagttgagatgcattattagcacaaagatttttaaaaactagtttgatgtagattttgtaagaaaataactggagtttctagatctgtttaatttttagctctgttacataaaaactattttattttagagggtatgaaacatctgaagactcagcttcctcatttgaaagctatggacaatgtctgccttcatagaatgctataggtrttaaaatagaaagtataaaatgagcccttagtgcactaacagacaaatggctagaatatgataaaagctcctctctttcctttgtgtgcatactctatgagtgactggaattggtagtattatagaacatatcaccatagacattttcaactttaact

SEQ ID NO: 682500 - DNA, 616 bp, Homo sapiens
aaaatagcaaggtgttgatttggagattagattacagaaagactggattccatctggctcactatcccctggagscttcaatctggaggaagatagctgccttgttttgagtaaacttacttaagagactatgtggcaaggcactgatacctccaaccaaatacactgaggacttcagattgtcggcatccctgtgagcgagcacaggagtagctcttgtaagaccatccaatatccacatgagtgaactcagattgatttctcccagtcaagccttgagatgactgcacctggtctacaccttgattgcagctttgtgggagatcctgaggcagaggacacaaattaagttgcacctgaatttccgaccctcagaaactgtgagataataaatccttgttgttttaagcagctacattttggaggaatttgttatgcatcacaaatatacatttgtaatgagaaatatcacataatattattcaacagggattcctcaaagaaggtctcagattctggaaatttcaggaatctgtactgacttactttcccacagatattaattttaaatgctgttcaaaatacatgttaaaaaactattcaattttttttaatt

SEQ ID NO: 682501 - DNA, 616 bp, Homo sapiens
aaaatagcaaggtgttgatttggagattagattacagaaagactggattccatctggctcactatcccctggaggcttcaatctggaggaagatagctgccttgttttgagtaaacttacttaagagactatgtggcaaggcactgatacctccaaccaaatacactgaggacttcagattgtcggcatccctgtgagygagcacaggagtagctcttgtaagaccatccaatatccacatgagtgaactcagattgatttctcccagtcaagccttgagatgactgcacctggtctacaccttgattgcagctttgtgggagatcctgaggcagaggacacaaattaagttgcacctgaatttccgaccctcagaaactgtgagataataaatccttgttgttttaagcagctacattttggaggaatttgttatgcatcacaaatatacatttgtaatgagaaatatcacataatattattcaacagggattcctcaaagaaggtctcagattctggaaatttcaggaatctgtactgacttactttcccacagatattaattttaaatgctgttcaaaatacatgttaaaaaactattcaattttttttaatt

SEQ ID NO: 682502 - DNA, 616 bp, Homo sapiens
aaaatagcaaggtgttgatttggagattagattacagaaagactggattccatctggctcactatcccctggaggcttcaatctggaggaagatagctgccttgttttgagtaaacttacttaagagactatgtggcaaggcactgatacctccaaccaaatacactgaggacttcagattgtcggcatccctgtgagcgagcacaggagtagctcttgtaagaccayccaatatccacatgagtgaactcagattgatttctcccagtcaagccttgagatgactgcacctggtctacaccttgattgcagctttgtgggagatcctgaggcagaggacacaaattaagttgcacctgaatttccgaccctcagaaactgtgagataataaatccttgttgttttaagcagctacattttggaggaatttgttatgcatcacaaatatacatttgtaatgagaaatatcacataatattattcaacagggattcctcaaagaaggtctcagattctggaaatttcaggaatctgtactgacttactttcccacagatattaattttaaatgctgttcaaaatacatgttaaaaaactattcaattttttttaatt

SEQ ID NO: 682503 - DNA, 616 bp, Homo sapiens
aaaatagcaaggtgttgatttggagattagattacagaaagactggattccatctggctcactatcccctggaggcttcaatctggaggaagatagctgccttgttttgagtaaacttacttaagagactatgtggcaaggcactgatacctccaaccaaatacactgaggacttcagattgtcggcatccctgtgagcgagcacaggagtagctcttgtaagaccatcyaatatccacatgagtgaactcagattgatttctcccagtcaagccttgagatgactgcacctggtctacaccttgattgcagctttgtgggagatcctgaggcagaggacacaaattaagttgcacctgaatttccgaccctcagaaactgtgagataataaatccttgttgttttaagcagctacattttggaggaatttgttatgcatcacaaatatacatttgtaatgagaaatatcacataatattattcaacagggattcctcaaagaaggtctcagattctggaaatttcaggaatctgtactgacttactttcccacagatattaattttaaatgctgttcaaaatacatgttaaaaaactattcaattttttttaatt

SEQ ID NO: 682504 - DNA, 1196 bp, Homo sapiens
gtcaaagtacagcactctttgaagacttagaaagttaaagtggcaattggtcatgkctgaaaaagaaatgaactaatgaagaccaatgggttgaaggtacagaaagggctgcatgttctgaagataaataggcatggaagtgaggtgagaggaaataaggtaaagcgcactgaatgaatgataatgcctgaataggtagcacgttgattactgaagtagttcacagcgctatagataaaaccaaaaggatattaaatcatttaatggctttctatgaattatagaagaaggtccattactgtggtatgttgttacataaaactacatgttccagagaagacatccacagccttctgcagccttcctcagggatttctttatccatttagaattctctcatgtgaaccaggtcaaatattaagtgtctctcggaggagtgacaaattttgtattcttcagaatggtgcaataaaatttagccactcatagacatattgattaatcactggatctgttaaatgtaaaaatcaaatttgtaagatgcaaatttagatgacctagaccttttttgcaaaataaaaaaagaagagcattgaagaattaaacataactgctgaatcagaggaaagtttccaaactaaccttttatatttttaatatctaaaataaaccacatataacaggaattatactttcacatttttgaaataagcattcatacatgagtatattgaatagtattaaatagcaactaaatttatgcaaaggaaatagaaactagctacatattgattatgcattaatttcattagaaatggtaattcggctgaaataacaccatatcatagatttaaggttttgaatttaaatttagggcttgcaaagaaaattatacaaagtcatatattttacttacttgggaccaataagagaaaattaaattttgataaacatacttattgttatctacatactagaaactaattagtatgactggctttaaaatagaaaataattttgtgctgataaaccttgaggattaattactgagatcaaatgacatagacaccggaacacttgtcattttatttttgtaaattaatccgtaaaccaaaaaaatgttaattgagcaataatgagttttctgggagcatactaagtaatgaaagaaatacaaaagaagaaaaatttgcaat

SEQ ID NO: 682505 - DNA, 1196 bp, Homo sapiens
gtcaaagtacagcactctttgaagacttagaaagttaaagtggcaattggtcatggctgaaaaagaaatgaactaatgaagaccaatgggttgaaggtacagaaagggctgcatgttctgaagataaataggcatggaagtgaggtgagaggaaataaggtaaagcgcactgaatgaatgataatgcctgaataggtagcacgttgattactgaagtagttcacagcgctatagataaaaccaaaaggatattaaatcatttaatggctttctatgaattatagaagaaggtccattactgtggtatgttgttacataaaactacatgttccagagaagacatccacagccttctgcagccttcctcagggatttctttatccatttagaattctctcatgtgaaccaggtcaaatattaagtgtctctcggaggagtgacaaattttgtattcttcagaatggtgcaataaaatttagccactcatagacatattgattaatcactggatctgttaaatgtaaaaatcaaatttgtaagatgcaaatttagatgacctagaccttttttgcaaaataaaaaaagaagagcattgaagaattaaacataactgctgaatcagaggaaagtttccaaactaaccttttatatttttaatatctaaaataaaccacatataacaggaattatactttcacatttttgaaataagcattcatacatgagtatattgaayagtattaaatagcaactaaatttatgcaaaggaaatagaaactagctacatattgattatgcattaatttcattagaaatggtaattcggctgaaataacaccatatcatagatttaaggttttgaatttaaatttagggcttgcaaagaaaattatacaaagtcatatattttacttacttgggaccaataagagaaaattaaattttgataaacatacttattgttatctacatactagaaactaattagtatgactggctttaaaatagaaaataattttgtgctgataaaccttgaggattaattactgagatcaaatgacatagacaccggaacacttgtcattttatttttgtaaattaatccgtaaaccaaaaaaatgttaattgagcaataatgagttttctgggagcatactaagtaatgaaagaaatacaaaagaagaaaaatttgcaat

SEQ ID NO: 682506 - DNA, 1201 bp, Homo sapiens
tatcaccccctttcatcaccacccaaccctcactgctgctctgcccccacggggcagggaggaaccaacaaacagactttcccaccccagggccaaggactctcgccaaggctgtccaagccagatgtgccacacccctctggctgagcggccygggcaggaaagctgggctgcatggaaggagggaagggagaggaagccccgagggccacgaaagccctctgatgctgggtgggctggtggcagggtgggggctagagctctgggcttggagggaggagaagaaggacttataggctggagcccttcccctttcctgggccctggctcttgagagaggtgggggttgaggggtgtgggtgtggagagaccaggcagctcccagctgtggctgtgtctccttttgcccctgagttttccctaagtaggttcctttgcagccagcaaaggaagggccccggggtgtgctccgtgaggccgtctgccacttgtcaggaaaagtgacgatcattgccctaacaagccactacccttgaaaagcactttgcactttttggggcttgtttacatcctctgcctgtacctgcagaacaacccggggggagggctgggtaggtaccaggcaccccgcttttcttcttagcccatatttttgcatctgattgttaagttttttttttccccactgagtctcattatgccttcttgcagtgcctgccccctggttttggttttgccttctgaacttcagatgatgtctggtgcctacttacaataactgttccttcatatatttgaggataggaggctcaccgaccgtagactttctcctctagcatcctgggaacatcaaacctatgggacagctgtttcaacaagaccagcgcagtgtccctgtttcacagcggaactaagtggatgccagcagagcctgggggccacttgcctggaggtggcagagctagtccctcgctcctaccagagtttcacagcctcctccttggaggagtgatgtctcctcattcattccactctctgaatcatctgcaagtcccacccccatcactttcagtcccttcattccaaagggaatgttgtgtcatttccccctctctctacactcagactgtctggtccaaactcctcattttcatgtggggactgtgaggctcaggaaaggtcactgatattttcaatgcca

SEQ ID NO: 682507 - DNA, 579 bp, Homo sapiens
tttctatttcacattgacttttcacaatgtgttatttttttttttatcatagcaaccatctgaaactcagatactaggcaaaaccatcaaaactagtggttttgcacagtatctgacaggtgttaacgagtttccttcaaaaatctaaattatcttgcagcattcctatgtgttcactgaggctcctcagagagcctcagcatgtagcttgagaagcatggtggtacaagtcgccatgctatgyctagatatggatctgctggaggagtaatgccttctcacctccctggcagccacttcctctgtccttcccaggttcctgtgtcatgtcaggaggaccgagggctgatgatttgaccagcaatttcccggctatcgttcctcagccaggaggaaccaagcttccccatccagtttgccttactccagtgagaagcctgaagcaaaacccaacccatttaaaaagtaaaagcgataatttgtaggctcctgcatacattctgaaattacctacattcctctcatcctgtgctcatgggcatataacatagacaagactgaaatcttgtctgaattgtg

SEQ ID NO: 682508 - DNA, 1337 bp, Homo sapiens
accaaatgaagccctattattatacccattttacagaggcaatcatcaagacttaaagggtgaatctggggggcggtcaacaaatgtttaggtgtttccaagtatgttccagtttaggggaccagctaattgaggagccccacccgcatccaggctgcagctcccagatggtggaccgcagaggctggagcaggccatgtgcagaggagggggcaggagccagagaagcgtcagttgcctcgccagagctaaggttgctttgttctccaggctgcttcctgcactgggcaattccattctggcctgcaggagggtggctgcgtcctcagttcttgcacaatcggctctgaaacatctagaatgacagttattatgtatttatgaactcaggctctttatggtttcacaaactaggtctccccctgaaagaaccacccatccccagctctcagtcttagccccccaaagggcccgctctgccctcagtctgtcattgcctgaagctgggcagggtgcaagcgttccccactggagacctgcagggtggccctggacagagagataggaatgccaagggacgcccctagccctgggacccgcaggcctggggtggagagagaagacacctcttatcctcctatcatctgggcctcctaagccaagtggctttacccgtttggaactcagttttgcaggctgtaaatgcggacaatggtcccagcactgcctacctaccgtgctaggggattctgaagaatgtgaaaattctaaagtgctgaacacayggcagggcagttatcctgattcctgtggggcagggacagccccccgccaccctcgctagagaaaaccacttccagtttttatcttgtagattatataggcagccattgcttagggaacaatttacattatactgatcacaatttccacttttgaaaaatcttgctccttgtagaattttctactttcttgttattaagaacaggccctagcttgcaagtgggagctcaatgtaatctttagggatgtagtttgaaagctagaaatgtatggtaatgaaaagacctttattactaacatttctgcaggaaaaataactttatttttgctggtctgacactctcacaaaaacagttacttgtagaatatgatttctgagatttcatattaacatcttgctcctgattttgcagaacagccttcttggcacccctcccagcagccccatgaggtagctactgtctccattctcctgctaagaaagccgaggcccagacaggagatgtaacttagccaagattgcatagttggtagaaaggaaggaatttgaaggc

SEQ ID NO: 682509 - DNA, 615 bp, Homo sapiens
ccagcccctgcacctgggtgagggatggagcgttctgattggccggcatgggcatgccccttctctgtgattgacagtgccaccagattggggagaggagcttctgaaaacaaaaacaaaaaacaaaaaccaaagcaatgttgggcaaagagctccagatggtccagacggtgaccagagcagtagggagccagtatgagttgttgacaagaagagtgctctggtcagagctaggctttaggaccatcagtcaagcagccatggaggatgcttgggaggcagagcctcccatcaggaaaccccaggagtcttgtgtagagatccaggagaggtgaccacctggcgtgaggccgtggggctgaggtggagggaggtgggactgaagggtttggggagggaagggccagaggtggacagtggggaccctgtggttgccaggccgcaggrcggggtggggcgggctgtgatgagttcacggttggccctggcaaggctgacacacacggtgaagtgctgtgtgagggagacagagctgacggctgcctgccaggcggcccagggcaggaaggctggagcggggagccgagggggccgggagtggggaagaggtgactg

SEQ ID NO: 682510 - DNA, 974 bp, Homo sapiens
tctgctaagcaccttcatatttacaatcctgtttaaccctaaaaagaaaccctatcacacaagactagttaccccaaatttgcagatgagatgaagtaactgagcatcaaaaacatttggtaatatgcctacctgagtgaagaagcagcattaggatttgaccttggatttctgttgctacaaagcctgtggccgtatcataagacatggacaagaggtattagaaaacccagagtccacaggcccaagaggaataaagcccctcctccttttccccaacctgagaaattgtgtgtgtgtgtctgtttgtctgtgcgtgtgtgtgtgtgtgtgtgtgtgtgtgtgtgtgtgtattttgagaggggaaggaagagctcccaggcacgagaaatgtgagcgtctctggagcttggttgatgtttggcatcatcagctttggaaggtgtagataaggacagctgggggtgaggacatggggaaaagtctgtggacagagcctggggcacacccacacctatggctggagagggctgacactggactgcacatcaggggccccagagtaagtcagcatgacagtccttgggtgagttttgtctcagttttcccagctgtacaatgggaaggtggccgaggaggtgaacgcaagtagggcttatgggatgggactgagagcatgtgggggagatatggatgctgtgaggttagtgggggctgagaagcagaaaagcgagacggggagtcggggtcctgtagctgatgctggtggtggcaggggccacacatgcatcctcaccacagccagcggcagggtcatgcttagagttcagtcagtgagcagttcttcaaactcagtaattatctggttttcgtcggctggcaaatgcctattgggcatctgcyctggccccggcattccacgagcagttgggctgcacaatgacaagattgggccctatcaaaaaggacaggca

SEQ ID NO: 682511 - DNA, 1169 bp, Homo sapiens
gctcacagttctgtgggctgtacaagcatggctctggcatctgctcagtttctgatgaggcctcagggagcttttacttatggtggaaagcgaagtgggagcaagagaaagagggggaggtgccacatactttcaaaggccagatctccccagtactcagtcactattggggggacagcaccaagccatgaggggtctgtcaccatgacccagacacctcccaccaggtcccacctccaacattgggagtcatatttcaacatgagattttgaaggaacaaatatccaaattttatcaccaacagagggtatgtatctaggcttgcattttgataacaggtcctctctctgcattctgagtcagaggcaactaatttaaaaatccattcacccacattgacgattaaatttctactcttacagattccatttgaaaaatatcctatgccttgtgytcttctttgccctttagctgtgttttgtacatttgtattctattttccctgtgacatgggcattttgatcattaatgatttcacttcaccagaagaacattattctttttatttcattgctgagaatgtttttgtccatagagagatattttcattatgggccacatgcaatttctgagtagttatttcctaatatgaagtgtattttataggtggtcagaatgttataacatattagagagcttatgtagagtttgggatagtgtatattacttgggagttattcttgcccgggctgctttttctgggagtgttgtatctattctgagaagtccttggaatgaattggtggtgcttggtgtgattgaactgttgctggtgttagtaacagatgcagcacattgactgtcaaacctaccccaatctttccctgctcatctgtgtgcatcttactttcctagacaacagagccgctgagtacaccccaacacagaggagccagcgctcaccgagagatttgccaagtggagtccttttgagacatccaaatttcactgtcttcaacttattaatgtgaaacaaagaataacgtatatgtgtgtgtaaacacgaatagtaacagcttatatttgtaaacaatgtgccgtgcgcccagcactacattaagcagtctccatgcagcacctccattaatcctggggagcactgtaccca

SEQ ID NO: 682512 - DNA, 1169 bp, Homo sapiens
gctcacagttctgtgggctgtacaagcatggctctggcatctgctcagtttctgatgaggcctcagggagcttttacttatggtggaaagcgaagtgggagcaagagaaagagggggaggtgccacatactttcaaaggccagatctccccagtactcagtcactattggggggacagcaccaagccatgaggggtctgtcaccatgacccagacacctcccaccaggtcccacctccaacattgggagtcatatttcaacatgagattttgaaggaacaaatatccaaattttatcaccaacagagggtatgtatctaggcttgcattttgataacaggtcctctctctgcattctgagtcagaggcaactaatttaaaaatccattcacccacattgacgattaaatttctactcttacagattccatttgaaaaatatcctatgccttgtgctcttctttgccctttagctgtgttttgtacatttgtattctattttccctgtgacatgggcattttgrtcattaatgatttcacttcaccagaagaacattattctttttatttcattgctgagaatgtttttgtccatagagagatattttcattatgggccacatgcaatttctgagtagttatttcctaatatgaagtgtattttataggtggtcagaatgttataacatattagagagcttatgtagagtttgggatagtgtatattacttgggagttattcttgcccgggctgctttttctgggagtgttgtatctattctgagaagtccttggaatgaattggtggtgcttggtgtgattgaactgttgctggtgttagtaacagatgcagcacattgactgtcaaacctaccccaatctttccctgctcatctgtgtgcatcttactttcctagacaacagagccgctgagtacaccccaacacagaggagccagcgctcaccgagagatttgccaagtggagtccttttgagacatccaaatttcactgtcttcaacttattaatgtgaaacaaagaataacgtatatgtgtgtgtaaacacgaatagtaacagcttatatttgtaaacaatgtgccgtgcgcccagcactacattaagcagtctccatgcagcacctccattaatcctggggagcactgtaccca

SEQ ID NO: 682513 - DNA, 1780 bp, Homo sapiens
gacagggtttcaccatgttggccaggctggtctttaactcctgacctcaggtgatttgtccaccaagcctctgcctgcctaggctctgcgaattatgtagtcagttctgttcagcattttcaaaaaatctctcctctcagaattctgaggacacgactctactgcctgctggatttttattctgtggaagtctgaagccaggcctgactggttgtttggggttacctgactttttgtttttattgcggttgttgctcttatttacttactgctcctatttactctgggtcccttctttgtgcctgaaacatccaagtgtcacaaagctaagtctcggtgtcccgctcttctaaataattggactttgttttaatgaacctttttaacatgaaggccaactctttctttaggtcaagagcgtttctatttgttcagtgtttcttttccatgtgttctgtactttcttacatgtacatgccacatccttaaactatgggtcttttttcctcccatcattttcacttcctcatctttttcatacccttgacttttatttttaggcagaagagtttgtcacatgtgtcatctacttcactgatcaggttttctgcagcctcgaatctgttgttgctgcttccatctgggattttaaattccactattgtgcttttttcatcttctcacattattgcctgatctcgctgttctttctctgcccatttgcctttcacaggtgcaatatctttctgcatgttttaaggaacgcatgatagaaaatttgtaacatctcctttttcttacataactgtactacatcggaagacatttgctctggtttgttttgaagtcccttatttcattaatgacatggtttgtctgtgtccccacccaaatctcatcttgaattgtagctcccataattcccacatgttgtggaagggacctggtgggagatacttgaatcatgggggcrgtttcccccatactgttctcatgttagtgaataagttccacaagatctgatggttttttaaagggttcccctctcacttggttctcattctctctcttgcctgctgccatgtaagacatgcctttgctcctccttcaccttccgccatgattgtgaggcctcctagccatgtggaatggcgagtccattaaacttctttttctttataaattacccagtcttgggtgtgtctttatcagcagcatgaaaacagactaataaaattgactagtgattttctctataatattgctttgccaagctattaattagctctctctttattacttcttgtaaacagtagtcactgattgtttattatcaggaatcaagatggattctgacacatattatctggatcccttccagcatcttttagactcaataaaatttaaagacatttatagagatttcgatagccagatcaggtatgcagcatgctgctgagactaaggagggaacctgattgtatgagttcattctcacactgctataaagaactacctgagactggataatttataaagaaaagaggattagttgactcacagttccatatggctgtgagggaggaaacttatgattatggcagaaggcaaagacaaagcaagccctgtcttacatggtggcaggagagagacaacatgcagggggaagtgccaaacagttttaaaccatcagatctcatgagaactcactcactatcacaagaacagcaagggggaaatccacttccataacccagttacctcccaccaagcccctcct

SEQ ID NO: 682514 - DNA, 626 bp, Homo sapiens
atggagtctcgctctatcaccaggttggagtgcagtggcatgatcttggctcactgcaacctcagcctcccaggttcaagcaattctcctgcctcagccttctgagtagctgggactacaggcacgcacacaccaccacgcccagctaatttttgtatttttagtagagacgaggtttcaccatgttggccaggatggtctcgatctctcgacctcgtgatctgcccgcctyggcctcccaaagtgctgggattacaggggtgagccactgcgcccagcctggtaagctttttctactaaacaaaccatagaattctcctggtccctaaaatgtttgaataatgaacacaaagtaacatagtttatttagttacagactttgcttcaagaaagacagacacacacacacacacagagttttgtatgaggaaaatcaagaaaaacaataagaagtccaagtgccctgtgacatgttggagggccacacatggacctctccccattggacagtcccagctgagtgccgtcttccacccattctcgaaaaagcaccaaataccagtgaccctcattatttgcagattctgtatttgcaaatttatctgctcattaaaatttattcaaaa

SEQ ID NO: 682515 - DNA, 626 bp, Homo sapiens
atggagtctcgctctatcaccaggttggagtgcagtggcatgatcttggctcactgcaacctcagcctcccaggttcaagcaattctcctgcctcagccttctgagtagctgggactacaggcacgcacacaccaccacgcccagctaatttttgtatttttagtagagacgaggtttcaccatgttggccaggatggtctcgatctctcgacctcgtgatctgcccgccttggcctcccaaagtgctgggattacaggggtgagccactgcgcccagcctggtaagctttttctactaaacaaaccatagaattctcctggtccctaaaatgtttgaataatgaacacaaagtaacatagtttatttagttacagactttgcttcaagaaagacasacacacacacacacacagagttttgtatgaggaaaatcaagaaaaacaataagaagtccaagtgccctgtgacatgttggagggccacacatggacctctccccattggacagtcccagctgagtgccgtcttccacccattctcgaaaaagcaccaaataccagtgaccctcattatttgcagattctgtatttgcaaatttatctgctcattaaaatttattcaaaa

SEQ ID NO: 682516 - DNA, 1539 bp, Homo sapiens
  misc_feature 194, 195: n = A,T,C or G
ctgagagccaaagaaattcatggacacattacccaggttcaggaaaatgataaactcttccatgctagtgtttccttataaagaaaatacttcatataactaattattttttaagaaatagatattcaataaggtatctttaaacaaaaacacacaaaaaccaaagttgcatattgatcagtcaacagaaatgnntcggctgaagctcacgggaatcgaatcttgaatttcctcagaagcagtggctccatttgagttaattcagtgcttgtggcagccactgcaagcaagaactgcctggacaacacatgagtgatgctgtctcgcaccctccagaccagtccacctccagctgagttccactgagcaatatcyatgggcacatgaggcacagaggagtcccctgaccgagccctgcctaaattcctgacttacagaatctgtgagatatgataaaatggttgctgttgaatccattaagctttggatcacctgagatgcagccataggtaatcagaatgtggtaccagaagtggtagctttgaacagatattctctcttttgttttgaggcataatactgcaaagtattgaactgcaaagccatagatattctcttttgttttgagccataatactgcaaagttactttgaacactttaagaaggaggaaacagattcagagagttcagaattggtggggtatcaattcaaacgccagcactgaggaattgacgaactcagccaggcttcagccttcctcactgtaccacagttcccactggcatcattaaagacagctgtttcatgggataatgaataggcctcttttgaccttcagtgtcagtcaagctgtgtggctgtgattgtgaagaatacaacagagttcatccatttccagagatcctttaatggagatttccagcagcacctgtagtcacatggtgatatgggatggttgtgtcctcacccaaatctcatcttgaattctagttcctgtaatccccaaatgttgtgggagggatctggtgcaaggtaattgaatcatgggggcagttacccccatgctgctgttctcatgacagtgagtgggttgtcacaagatctgatggcctttttccccttttgcttggcacttctccttgctgtcgccatgtgaagaaggacatgtttgcttcctcttctgtcatgattgtaaatttcctgcggcctctccagccatgctgaactgtgagtcagttaaacctctttcctttataaagtacccagtcttgggtatgtctttattagcagcttgagaatagacgaatacacatggggactacacagatggctgagcatgatatttggtgcatagattaagcagaaaagatttggaaattagggtcaggaattgtttaagctttgaagggcaaagatggcttgaggaatagctcctgaggcctgtgggaacaactatcatgaggaaagactcagaaaatgagaactgggcattgccatacaacctggccagctcttgtccacggaggggattcctgtg

SEQ ID NO: 682517 - DNA, 610 bp, Homo sapiens
ggaaggaatgatttgtaagttggtcaactgttatgttgaaatcttgaaaagggaggggagtctgccaacagtgtcaggccattggttgaaaccagcagagaagtcttccattcttcgttttccagggctagtttctgtttatctcttagagaataaaagtggcgaacagcagggacgacaacagttctcctgtcctacctcttcaggtttgtgaaaggaaaataaatcttggaaccccaaactcattaarccaaagtgaaaagttaagctgagatctgggtcatgcaaacctgcctcatcttttggttcctaaataaaatggctacaagatgaaaagctacacgcctcccccgtatttttcccacaaggaaattcctagtgagctccaacaactttaccctaaggtatttctgttaaaatttcaccatggcaggccaggcatggtggctcacgcctgtaatccgaacactttgggaggccaaggcaggcggatcacttgatgtcaggagttcaagaccagcctggcctacatggtgaaaccctgtctctactaaacatacaaaaattagtctggtcgggcatggtggcaggggcctatagtcccagctac

SEQ ID NO: 682518 - DNA, 610 bp, Homo sapiens
ggaaggaatgatttgtaagttggtcaactgttatgttgaaatcttgaaaagggaggggagtctgccaacagtgtcaggccattggttgaaaccagcagagaagtcttccattcttcgttttccagggctagtttctgtttatctcttagagaataaaagtggcgaacagcagggacgacaacagttctcctgtcctacctcttcaggtttgtgaaaggaaaataaatcttggaaccccaaactcattaagccaaagtgaaaagttaagctgagatctgggtcatgcaaacctgcctcrtcttttggttcctaaataaaatggctacaagatgaaaagctacacgcctcccccgtatttttcccacaaggaaattcctagtgagctccaacaactttaccctaaggtatttctgttaaaatttcaccatggcaggccaggcatggtggctcacgcctgtaatccgaacactttgggaggccaaggcaggcggatcacttgatgtcaggagttcaagaccagcctggcctacatggtgaaaccctgtctctactaaacatacaaaaattagtctggtcgggcatggtggcaggggcctatagtcccagctac

SEQ ID NO: 682519 - DNA, 610 bp, Homo sapiens
ggaaggaatgatttgtaagttggtcaactgttatgttgaaatcttgaaaagggaggggagtctgccaacagtgtcaggccattggttgaaaccagcagagaagtcttccattcttcgttttccagggctagtttctgtttatctcttagagaataaaagtggcgaacagcagggacgacaacagttctcctgtcctacctcttcaggtttgtgaaaggaaaataaatcttggaaccccaaactcattaagccaaagtgaaaagttaagctgagatctgggtcatgcaaacctgcctcatcttttggttcctaaataaaatggctacaagatgaaaagctacacgcctcccccrtatttttcccacaaggaaattcctagtgagctccaacaactttaccctaaggtatttctgttaaaatttcaccatggcaggccaggcatggtggctcacgcctgtaatccgaacactttgggaggccaaggcaggcggatcacttgatgtcaggagttcaagaccagcctggcctacatggtgaaaccctgtctctactaaacatacaaaaattagtctggtcgggcatggtggcaggggcctatagtcccagctac

SEQ ID NO: 682520 - DNA, 612 bp, Homo sapiens
ttcaagtttttgactaataaaaaagtatagctatctgtgttctatagaacattgtagacagcagatggtagagatcattatatacccagcctaggcaacatggcaaaagtccatctctactaaaaatacaaagaattatctgggtatggtggtgcttgcctgtagttgccattacttggcagtctgaggcgggagaatcacttgagcccaggaggcagaggctgcagtgagctgtgatcacgccactgcactccagctagggcaacagagtgagacctcgtcttgaagatttaaaaaatttwaaaaagaaatcattatatacattcaatttataggcatagagaatgttttgcctcatcttttctcaagaagataaatatatgactacatatattcggtccataaagcccatctattaagtgaaaacttcacatttcttgtctccctgcattttaaaagtgaaggtaaagaaaatgtagaaaatagaatcccaggttaaagtgaccccattgcaagaacagtatctctgggaataaactgacaatccacagctggcagtctgaggtgggagagtcactatgttccagtcactattaccagaaattgagagca

SEQ ID NO: 682521 - DNA, 612 bp, Homo sapiens
ttcaagtttttgactaataaaaaagtatagctatctgtgttctatagaacattgtagacagcagatggtagagatcattatatacccagcctaggcaacatggcaaaagtccatctctactaaaaatacaaagaattatctgggtatggtggtgcttgcctgtagttgccattacttggcagtctgaggcgggagaatcacttgagcccaggaggcagaggctgcagtgagctgtgatcacgccactgcactccagctagggcaacagagtgagacctcgtcttgaagatttaaaaaatttawaaaagaaatcattatatacattcaatttataggcatagagaatgttttgcctcatcttttctcaagaagataaatatatgactacatatattcggtccataaagcccatctattaagtgaaaacttcacatttcttgtctccctgcattttaaaagtgaaggtaaagaaaatgtagaaaatagaatcccaggttaaagtgaccccattgcaagaacagtatctctgggaataaactgacaatccacagctggcagtctgaggtgggagagtcactatgttccagtcactattaccagaaattgagagca

SEQ ID NO: 682522 - DNA, 612 bp, Homo sapiens
ttcaagtttttgactaataaaaaagtatagctatctgtgttctatagaacattgtagacagcagatggtagagatcattatatacccagcctaggcaacatggcaaaagtccatctctactaaaaatacaaagaattatctgggtatggtggtgcttgcctgtagttgccattacttggcagtctgaggcgggagaatcacttgagcccaggaggcagaggctgcagtgagctgtgatcacgccactgcactccagctagggcaacagagtgagacctcgtcttgaagatttaaaaaatttaawaaagaaatcattatatacattcaatttataggcatagagaatgttttgcctcatcttttctcaagaagataaatatatgactacatatattcggtccataaagcccatctattaagtgaaaacttcacatttcttgtctccctgcattttaaaagtgaaggtaaagaaaatgtagaaaatagaatcccaggttaaagtgaccccattgcaagaacagtatctctgggaataaactgacaatccacagctggcagtctgaggtgggagagtcactatgttccagtcactattaccagaaattgagagca

SEQ ID NO: 682523 - DNA, 612 bp, Homo sapiens
ttcaagtttttgactaataaaaaagtatagctatctgtgttctatagaacattgtagacagcagatggtagagatcattatatacccagcctaggcaacatggcaaaagtccatctctactaaaaatacaaagaattatctgggtatggtggtgcttgcctgtagttgccattacttggcagtctgaggcgggagaatcacttgagcccaggaggcagaggctgcagtgagctgtgatcacgccactgcactccagctagggcaacagagtgagacctcgtcttgaagatttaaaaaatttaaaaaaraaatcattatatacattcaatttataggcatagagaatgttttgcctcatcttttctcaagaagataaatatatgactacatatattcggtccataaagcccatctattaagtgaaaacttcacatttcttgtctccctgcattttaaaagtgaaggtaaagaaaatgtagaaaatagaatcccaggttaaagtgaccccattgcaagaacagtatctctgggaataaactgacaatccacagctggcagtctgaggtgggagagtcactatgttccagtcactattaccagaaattgagagca

SEQ ID NO: 682524 - DNA, 410 bp, Homo sapiens
tgacctttcttccttgcaaatatgatggtcacagaccttgtttgcctgatcttgtggcaacttctagcaaataggacaaacattatttccttgtcaatcctccaccaacctgggaaagcttagacatcatgtccacttaggtaaaactgggctccctcctaaaacttgctattccatggcccaatcatccacctcttctatactcrcgctcctcagcttctccacccagggtgccatgctccagggaggcgttcgcctctcctttctctcctgcctggaagacttagggcatgtactctcggggtcctgccagtgagtgcctctcacagtgttgcagcccgcgcacatcacatgcctcatcctgcttgtttccttcacaaatttgaaagcaaccagaggctgggctcctg

SEQ ID NO: 682525 - DNA, 501 bp, Homo sapiens
tggcctttccatgaggactcagagtgtgggtcacctccacttcttccagctctgtgtattctttactccctggatctttctttctgcatgtatttccccatttttgtttcatgtttctgtttctatcttctccattagattccctgggtaacaggaagaatgttacttctgtcaccaatggcggaaagatagaaacaacccatcattaactgatgaatgaataaacgaawtgtggtagagatgtatgatggaatattattcagccatcaaaaggacttgagatactaattcatgttaccacgtggcaaaaacctggaaacatcttattaagtgaaggaagcccagacacagaaggccacatattgtgtgattccattttcatgaactgtccagagtaggcaaatttgtagaggcggaaagtagattactgattgccagggattaggggcagagggaaattagataattggttaatgggcatagggtttccatttgggatga

SEQ ID NO: 682526 - DNA, 621 bp, Homo sapiens
agacagagtctcaactgtcacctgggctggagtgcaggggcacgttcttggctcactgcaacctccgcctcctgggttcaagtgattcttctgcctcagtcttccgagtagctgggacttcaggcacccgccaccacgctaattttttgtatttttagtagagacggggtttcatcatgttggccatgctggtcttgaactcctgacctcgtgatctgcccgcctcggcctcccgaagtgctgggattacaggtgtgagccatcacgcctggtccccatcttcttttccctcaatctgacctccccaaaacttacccttgtttctcactagtgctccttactgccagatgctctgaagcgcagtctctattcattgcctccgcttccagtcacactcactactcaaacaaatttaaaaatcttccacacttataacatactgaaattactctaaggttatcaatgacctaattttaaaaacccarttttgtagctattttctcattacaaaagcagtggttatttaatgggggaaatggcaaaatatatagaaaaagcacacacaaaaaaacaaattttaaaagcctcctaaatacagcactcagaggtcatcactgatga

SEQ ID NO: 682527 - DNA, 631 bp, Homo sapiens
aagggttcaaggttgcaatgagccatgattctaccactgtactccagcctgggcaacagagcaagaccctgtctcaaaaaataacaataaataaataaaatgtataatttttaaaaaagaaaataataaggataagagcagaaataaatgaaaacaggcaatacagaaaaatcaatgtgamaatcattctttgaaaaggtcaataaaattgacaaacctcttgaaaagttgttttaaaaaagagaaaagacacaaattaccaacatcaagaataaaataggagatagtgcttcagaccctacacacattaaaagcataataaggaaaccaatccatacacataaatttggcaacttagataaaatagatgaatttttattttattctattttatcaaagatagaattatcttagatatcaaaattatcttagataaaatagaacacaaactaccagaactcaccaaaatgaaatatatgctgatagactgataagtattaagaaaattgacttcgaattttttaaaactctccaagaagaaatctcttcaggcttagatggtttcattcaagaattctaccaaacattaaagaagaattaatgccaactctacacaatctcttccagaaaa

SEQ ID NO: 682528 - DNA, 1053 bp, Homo sapiens
gttgggtagcagccatatgtctgggagctaattgatccatgagtagtggagacagaagaaaggaggaatgggctgaaggagggcacccattgcctggcaggagaggaaagagatggtgggtcagacatctctatggcaagagtgaggtactgctgttagtcaaggacattttggtgattttctgaaaagcctcagggtgggtaggagttggggaaagtattttcacggtggccatgttaagtagaagctcttttgaatatggtgcttctcaccttgggcgattctctggtgagatgtcatttgcagtctgtgataatagtggcttctgcttcaaaatttccattccatcttcttctgcactgactttcactaacactgaacgtctctttcctttttgcagactctttaaagccatagcttttcttttcatttctttcccatgtctttaattttcatgaggtctcaacaaataatttcctcatctttagtgtcctgtctagaaactccaagtaggtacacagctgcagatttcagctcagattctgttctgcatggctacaaaaatgttccataccacagtagctgtcctttcagattcccagtgacctgatagatatacccrtctattaatggatcccactaatcatgtagaccaggactctgggataaccagctcttagctgatttcaggtctatggcataaagcctgcagagcataatttaaatgcatttttaaagcaaactggtttgcagagaaccccgtgttgtgatgtgtttccataatggcaccagtgtctgctcaagtctgtaatgaaacatgcaataatgctcccacaaaatccaccaggaaagattcccataagtggaagagttttattgccagcaggttttatatcttaattctctcacccccatttctctgaaatacaatttaaatagtcctttaaaaaatttttgactcctcagaagtcaaatgtactctgtggagatgaggctgttggttgagatgattccagttaggaagtatttttggtgggttgcacaagggccctg

SEQ ID NO: 682529 - DNA, 637 bp, Homo sapiens
gagaatgaagctgctcagatgagatttttggagaccctgggcccaagcacatctgctttagggtcctgggagmaccatggggcactggttgtgggcaggactggtcaccttgcctcagcgccagaaccagatggcatggtagtgagaaagctccaccaaatgaccttgtgggcaatgtcctggccaggaggaggggtggctggggcaggaagtgatgcacaggtgggacagaaactgcagtggatcagcaggcctgagaggacaccccatgtgactcctagaagtagcaggttgaaccacagggttgctgatagccagtggtcaagatgatggggcttgggtctttaccatgtggttataaggaaggagggcatcattttgaggccataggctggtgaaagtgctattgatttaatccaaaatgctttggcatagaaaatccagaaaagacaagcaaaatgtttctttcttcaaatgatttacaatgactccactttgttatcttgcctaatatagacttggccagaacttctgtttagctagctagtgccgcagaacaaatcacctcacaatttagtgccttacagtttcgtaatctctcaggatttctgtagataaggagtttgggaaaggcttg

SEQ ID NO: 682530 - DNA, 1483 bp, Homo sapiens
tgctccagccactgcctggggaaaagagcataaccatgtgccagggtgagatctctccccggctcacagaattgcaagtactgctcccctctcagcatcttcagcaagaaacagggggttgggggtgaggggctgtgcctggtgatcccagttttcctccttctcatcatcttccagggttccaggctgaggagctcagaggttgtgtggaggagggaggggaataacagatgggcccgcatcagggctgcgcctcctcttggacagtcccagaactgagagttggcggcggtgaggaggatcgctgccctccttggacaccccgactgtgatctactctaaaaatcctcccttcacctgaggagaagattgcaggcatgttccacctccagcacggtcctgagatgagttgtccccatttccccctgccctttccttcctcagtaaagggattactgttcattcccacccagaggatcttggagcatccccctgagaaggaagagcttaggactccttccccgctccacaaagagcagttacaaaataaaaaataaattaaaaacacaaacaaaggctactctgggcacactgcctacggggtagccttgctccacagggggcagttaaaaaaagcaaaacaacaataacaacaaaaaacaaaaagaactactgggggcagtggtctgagacccacccctctctttaataaatgcctatttcattttatttttacttttaagacagagtctcactctgtcacccaggctggagagcagtggcgcgatcatattttaccagtgaggaaagcaaggcccagtgactggcccagacctgggaccatatccttcctggtttttggttagctgcactttccttgcaacatgagacatctcaagtgtaaacacctctgcccagctttcccaccttctataaaccctactagggttctcacaccttcctcaaaaacctctttctccctagtcctgctggcctcactcccaataacttgtccttcatcacaccccctggagttcagccattcaagcccctgccattccaggcagattgcctgagcccaggrgttcgagaccagcttgggcaacacagtgagacccagtatctattttaaataaataaatattttaaataaataaataaatagaaaaaataacaagtaagatgaagacaaactatttttttaaaaaaggaaaaaaattaatagaagaaaaaatttttaaaaattgccatttctttctttctctagaacatataccttttctttgctaacccactagaaagaaggttgaggatatcatgacactccactcctaaatactttagcaggcagacattccattacacaaccacactccgatcttcacacctaaaagaagaataatcatttcatagcatataataccccaaattctccaataacctctttaaaaaaaatttagggtccaatctagctttgtacata

SEQ ID NO: 682531 - DNA, 1483 bp, Homo sapiens
tgctccagccactgcctggggaaaagagcataaccatgtgccagggtgagatctctccccggctcacagaattgcaagtactgctcccctctcagcatcttcagcaagaaacagggggttgggggtgaggggctgtgcctggtgatcccagttttcctccttctcatcatcttccagggttccaggctgaggagctcagaggttgtgtggaggagggaggggaataacagatgggcccgcatcagggctgcgcctcctcttggacagtcccagaactgagagttggcggcggtgaggaggatcgctgccctccttggacaccccgactgtgatctactctaaaaatcctcccttcacctgaggagaagattgcaggcatgttccacctccagcacggtcctgagatgagttgtccccatttccccctgccctttccttcctcagtaaagggattactgttcattcccacccagaggatcttggagcatccccctgagaaggaagagcttaggactccttccccgctccacaaagagcagttacaaaataaaaaataaattaaaaacacaaacaaaggctactctgggcacactgcctacggggtagccttgctccacagggggcagttaaaaaaagcaaaacaacaataacaacaaaaaacaaaaagaactactgggggcagtggtctgagacccacccctctctttaataaatgcctatttcattttatttttacttttaagacagagtctcactctgtcacccaggctggagagcagtggcgcgatcatattttaccagtgaggaaagcaaggcccagtgactggcccagacctgggaccatatccttcctggtttttggttagctgcactttccttgcaacatgagacatctcaagtgtaaacacctctgcccagctttcccaccttctataaaccctactagggttctcacaccttcctcaaaaacctctttctccctagtcctgctggcctcactcccaataacttgtccttcatcacaccccctggagttcagccattcaagcccctgccattccaggcagattgcctgagcccaggagttygagaccagcttgggcaacacagtgagacccagtatctattttaaataaataaatattttaaataaataaataaatagaaaaaataacaagtaagatgaagacaaactatttttttaaaaaaggaaaaaaattaatagaagaaaaaatttttaaaaattgccatttctttctttctctagaacatataccttttctttgctaacccactagaaagaaggttgaggatatcatgacactccactcctaaatactttagcaggcagacattccattacacaaccacactccgatcttcacacctaaaagaagaataatcatttcatagcatataataccccaaattctccaataacctctttaaaaaaaatttagggtccaatctagctttgtacata

SEQ ID NO: 682532 - DNA, 1316 bp, Homo sapiens
ccaagtgattttcatcagaacaatgtttttcttttttttttctttttttttttgctagaacaactcagcaaaataaaattcctgtttattgttggacaacattgtttcacacatacatcaaacaggccaaaaaataaaaataaacagcaacttcatagacaaaaaaggaaaaaaaagaaaccttttatctttggcctttttaaccatctcatacaaaccaactacttatagtacagctaagtacatacacaaaaaagttactggaatgctcggaataagatggtttttctgttgtcatttttgcattttttacaagttttttttttctcctttgagattataatgaacatggccacaccacaagtaaagtgagaagtaggacagagaacgctccgaaggctggtttggtcatccgagatcattaaaaatggccgaccctaacaatatgtacaaaaatataaaatgtaaataaaaaatacaagtttcctttttaaastacttttaagaaaaaaaaaaagcagggccttggaagttttggttctttttccctcccctgttgcaaattctcatggtttgggttgggtggtggagagcgcgtgtcatctgcgggtggcactgcccacggtgggcgggcgggcccctctactcgaaggtgaccacgtttagattctgagacgggaagtggagggtgaataggtcacggcggccttttttttttagtttaacttttccttttttgccgtctggtcatcctcgtcggtcttctgcttctgggtatcgacatcgttatcctcatcatcttcagctgcccgcttgcccgtagctgactcagctccctcatcttcatctccatcctcttcctcaccatcaccttcttcctccccaccttcttcctcttcttcatctacctcgttgtcagcctccggctccccattttcctcattagcattcccgtgagcaggggcgtctcttccattttccgcctcttccacaacttccttcttctcctttaagtcctcggtggtgatttcggagctggtgtctacggctgcgtctgacatggtggggcacgccggtgacgcgatgcaggggataaaaaagaaagcgacagttcagggactctggcgataaagctgccggagtccgcggcggcggaggcggctgcggcgagcaaggaggctgacgacgcacaatgcaaagacggcttttcagagcagccagtggggcaggacaatgtttttcatcaaatgtccttagatttggaggagggtaagagttgttttttttttctctctctctctcagagaaaagcatgc

SEQ ID NO: 682533 - DNA, 608 bp, Homo sapiens
tttcacagccaatatggttttttcttaattttagacattatatatgtcagttctgaaatttctattttataatattttatagttcctttttctgctgagaagttttttcccattcttttctgctgagaagttatttcyctctttattttggaaatgttcacatttacctcagaaaagatggctataagagctgctttaaagtctgatcatttccatatccaagttgtttcaaggttgtcatcccttggttgcatgcttcatgaagaattggtcaattgtttacggtttgtaaaagtatattgagtagttttctattgtattcctcagataggcattttctcagtttacaatacatgaaaagttcaataaggcaagctttggacattgaagggtgcaggcactcaggctgcattgtgatccacctactggctccactggcagatgggttagtcccactgacattattctacttggagcttctacgtggatgattccccttggctcttatgagataaaagcataagtatttcacataatacacacttataaaattaaaaacaatagaaaagtgcactgaatgagtcccaagagccctatccacaacatct

SEQ ID NO: 682534 - DNA, 3143 bp, Homo sapiens
agtccacatgtatgcatatttatcatcttggaaattgtttttaaaatgtgatcacaacagaatcattcatctaatgttttcttcttacaatggtaccttgacatcctctcttgaagggatgaggtctgtttttacccccttggagcttgggtagaactgcattactgccatgaccagtagattatatcagaagtgatactttgtgacttttgagtctgtatcatagaaatgccatgcaattccaaattgttctttatggaacctgacacatgctgtgaggaagtccatgctgtgtgacagagatagaacattcattttaaaaatgattggatacaaaattgtctctaaacaatattcaataactgactttgtttcagtgacccaattgctacctatatcatatattatatttctacacatgcatggctacatagctaaagatttatggattattcctttctaccttgcatagtgatgtttctgatgccttagctcttctagtacttacaatagcactttgaggattttttgcatttatgttcacttttcaaaggtagaaataaaatcttaatgtgattgactttccctaagacatgcacatcatagggaacagcataagacaaagaaaggaaagagacagacagagagagagacagagagagagaaatgagtgaatgaccttattcatgagaacaatataaaatacctaggatcaaatagcaagaaatgcacaggattcagttgaagaagaatgatcaaactttgatgcagaatatgcactaaaatgtatatacatgtaaatttctgcacatgaaaatgccatattcaaataggactaattttccagctgttctggtgaaaattgcacaacagtcccctcttcatgtctgattttggctttgctcattcacaaactctattatttttctatttgtcattccaattccacagttttgtttacatttattgtttattgtcatctcttctttcattctccccatcctttggtattaatttcctctctgcttctttattgtaattttgttgggacattgggaaagagcagaaatcagtccatgtgttcaatacactgtgcattccaatacccttagtatggagacaaattccttatcacagtttataacaggtcctacagatgatcttttagtttatgcctctttcaatataagtgtgttcaagtgactttacaaggcagactgctattacctgtgttcctaattttatctgaagaatatgctgctgtcttttcttccctggctgcattaaatgtaacatgacaatgacttgataatcacatggttattttttacaacgttattgagtaaacatctagaaacaattttaaatgttgaatacatttttatactctaatactctaacaaatgtaattttttaaaaacaaatgtacattgtttcaagtctattacttatccatctttggaactgccaaagcaaatctctccatattataaaaaaaaaacttttgtgacttctagtaaacagacatagaaacagaagtttatgatatgatacataaaagagtttgcatttatcttacatttttactaactttattttttagctaagcttttgtctatatttgcatattcttgattgaaacatgcctttgtacatttgtattgagcaattaaaggcttttttaactagtcaacctaacaacattgacatatggcttttctcagattggaatgatctacaaagcttctgaagcttgaactttggggtccttcatgtgcacaggccctttccaagaccctgtttagagtgaatagaatacagacatttagaaggttcatgaactagcagtggtcttctttatgccaactcctttactcaagcctttatgtatttttctgtcttccactgacccatggggatcataagatttcaggaccttctcctccctaaaacaaactccaatcatttgagggatatctgaattttttctgaaaagaagactggggaatgcctatagaaacaaatttctaaataatctgattcttatgtctacaaataatggctatcttcctgcactgctgtaaatgtactgtgggactgcagattatacatggaggtatctaaagagtgtactgtagtggtgactgaagggcctattgaaacgatgtatggctatagattcttgctcttccactagtttttcccttgaagaacatactccctgcagaatggcaccttcccttagtatttgtagtgtttctacctttaagcatggaaggaatggtcaatgttagcaatgctgtctttcctctacaacttacggcggggtaaggacaattctcatgtttgactacaaaagcaagcgcagcttcatggccctaatccatttgggcatttctgctagtgtcctggatccatcagtctccacaccggtgtttccagagatggtgctgactgtggcaattaccaactcatggatgttctttgatttttaataggaagagtgatttccccagaggttttctctgtaaatgaagacattccttgcctgatttctagggcataccactgttgtttattccgaagagtccatgactggaacaccatgtaaggccatagatttttgtattctatctttgttccggctctttggttttccttgggagggattctacgacagacttactaagtgagactctgcaactctgcccccattttgtacccttctcccccaggcatcttgttcacttagctgagtacacwcttggggagaagagagaatatggtggtagctcatgaggacacatccagttttcattcacagcctacgactcaactgaataaactcctgaactttaagtctccctaaatgtgtgcaacagctttgggggatctttaaccatttacctcctgctatctttggaatggaggaaaaactaaaagtgttacatgggaagtttgtttcaattctaccatctggtactcagtttacaaccatttcccaatcctgctttttaatgagctataaaaaggagaagatttattgaccgtttgtcatacattttggtcaacatgtcagctattgatatgtattttttacattattaactgaagaaaaatggatgccttttacaaactgttta

SEQ ID NO: 682535 - DNA, 647 bp, Homo sapiens
atctctgggtgttggattatgagagtcctttttttcccctaactgcttatttgtattttctatttctcctgcagcaaagttgaatttcctgtgtaattaaaataataaaagcaaatataaaatagacaraaaagtaaaactagatttgtccccttaaaaatatgtcaggattaggcaggacacagtggctcatgcccataatcccagcagtttgggaggccgaggtgggcagatcactggaggtcaggagttcaagaccagcctggttagcatggtgaaaccccatctctactaaaaatacaaaaaattagtcggcggtggtggcaggcacctgtaatcccagctactcgggaggctgaagcagaattgcttgaaccctggaggtgaagaaggttgcaatgaattgagatcgcacaactgtactccagcctggggcaacagtgagtctccatctcaaacaaacaaacaaacaaaaaaggtgtcaggattaaagaaggggcagttatctgcccagtgatgtgctacctggtaagtaatagagctgaacccaggtctccttgttctcatactgaatccaataaaggaggccactatccactggaaaaaaagaaagtcatggcacatgaacacctgctcaacatcaataa

SEQ ID NO: 682536 - DNA, 647 bp, Homo sapiens
atctctgggtgttggattatgagagtcctttttttcccctaactgcttatttgtattttctatttctcctgcagcaaagttgaatttcctgtgtaattaaaataataaaagcaaatataaaatagacagaaaagtaaaactagatttgtccccttaaaaatatgtcaggattaggcaggacacagtggctcaygcccataatcccagcagtttgggaggccgaggtgggcagatcactggaggtcaggagttcaagaccagcctggttagcatggtgaaaccccatctctactaaaaatacaaaaaattagtcggcggtggtggcaggcacctgtaatcccagctactcgggaggctgaagcagaattgcttgaaccctggaggtgaagaaggttgcaatgaattgagatcgcacaactgtactccagcctggggcaacagtgagtctccatctcaaacaaacaaacaaacaaaaaaggtgtcaggattaaagaaggggcagttatctgcccagtgatgtgctacctggtaagtaatagagctgaacccaggtctccttgttctcatactgaatccaataaaggaggccactatccactggaaaaaaagaaagtcatggcacatgaacacctgctcaacatcaataa

SEQ ID NO: 682537 - DNA, 647 bp, Homo sapiens
atctctgggtgttggattatgagagtcctttttttcccctaactgcttatttgtattttctatttctcctgcagcaaagttgaatttcctgtgtaattaaaataataaaagcaaatataaaatagacagaaaagtaaaactagatttgtccccttaaaaatatgtcaggattaggcaggacacagtggctcatgcccataatcccagcagtttgggaggccgaggtgggcagatcactggaggtcaggagttcaagaccagcctggttagcatggtgaaaccccrtctctactaaaaatacaaaaaattagtcggcggtggtggcaggcacctgtaatcccagctactcgggaggctgaagcagaattgcttgaaccctggaggtgaagaaggttgcaatgaattgagatcgcacaactgtactccagcctggggcaacagtgagtctccatctcaaacaaacaaacaaacaaaaaaggtgtcaggattaaagaaggggcagttatctgcccagtgatgtgctacctggtaagtaatagagctgaacccaggtctccttgttctcatactgaatccaataaaggaggccactatccactggaaaaaaagaaagtcatggcacatgaacacctgctcaacatcaataa

SEQ ID NO: 682538 - DNA, 647 bp, Homo sapiens
atctctgggtgttggattatgagagtcctttttttcccctaactgcttatttgtattttctatttctcctgcagcaaagttgaatttcctgtgtaattaaaataataaaagcaaatataaaatagacagaaaagtaaaactagatttgtccccttaaaaatatgtcaggattaggcaggacacagtggctcatgcccataatcccagcagtttgggaggccgaggtgggcagatcactggaggtcaggagttcaagaccagcctggttagcatggtgaaaccccatctctactaaaaatacaaaaaattagtcggcggtggtggcaggcacctgtaatcccagctactcrggaggctgaagcagaattgcttgaaccctggaggtgaagaaggttgcaatgaattgagatcgcacaactgtactccagcctggggcaacagtgagtctccatctcaaacaaacaaacaaacaaaaaaggtgtcaggattaaagaaggggcagttatctgcccagtgatgtgctacctggtaagtaatagagctgaacccaggtctccttgttctcatactgaatccaataaaggaggccactatccactggaaaaaaagaaagtcatggcacatgaacacctgctcaacatcaataa

SEQ ID NO: 682539 - DNA, 647 bp, Homo sapiens
atctctgggtgttggattatgagagtcctttttttcccctaactgcttatttgtattttctatttctcctgcagcaaagttgaatttcctgtgtaattaaaataataaaagcaaatataaaatagacagaaaagtaaaactagatttgtccccttaaaaatatgtcaggattaggcaggacacagtggctcatgcccataatcccagcagtttgggaggccgaggtgggcagatcactggaggtcaggagttcaagaccagcctggttagcatggtgaaaccccatctctactaaaaatacaaaaaattagtcggcggtggtggcaggcacctgtaatcccagctactcgggaggctgaagcagaattgcttgaaccctggaggtgaagaaggttgcartgaattgagatcgcacaactgtactccagcctggggcaacagtgagtctccatctcaaacaaacaaacaaacaaaaaaggtgtcaggattaaagaaggggcagttatctgcccagtgatgtgctacctggtaagtaatagagctgaacccaggtctccttgttctcatactgaatccaataaaggaggccactatccactggaaaaaaagaaagtcatggcacatgaacacctgctcaacatcaataa

SEQ ID NO: 682540 - DNA, 594 bp, Homo sapiens
aaaaattgaaagcagggactcgaagatatatttgcacacccatgtttatagcagcacgtatcacagtagccaataggtgcaagcaagccaagtgtccattaacagatgagtggataaacaaaatgcaatgtatccatgtaatgaaatagtatttggccttagaaaacaaggaaattctgacacgtgctaccacatggatgaactttgaggacaytacgctgagtgaaataagccagacataaagagacaaatactgtgtgattccacttataggtgggacctagagtcatcaaactcgtagagatagaaggtagagtgctggttgctaggagatgggttggagagtggatgaaagcttattgtttcatgggtgaaagtttgagttttataagatgaaagaagttctgaggatggacagtgatggtgttgacacagcagtgtgaatgtatttaatgctactaaactgtatatacacctaaaatggttgagatgataaattttatattaaatgtgtcttacaacaatttaaaaaaataaggtgaggggaaattaagcaatgggtcaatgaggtgtatgttttagattttgtgtgaa

SEQ ID NO: 682541 - DNA, 594 bp, Homo sapiens
aaaaattgaaagcagggactcgaagatatatttgcacacccatgtttatagcagcacgtatcacagtagccaataggtgcaagcaagccaagtgtccattaacagatgagtggataaacaaaatgcaatgtatccatgtaatgaaatagtatttggccttagaaaacaaggaaattctgacacgtgctaccacatggatgaactttgaggacactacgctgagtgaaataagccagacataaagagacaaatactgtgtgattccacttrtaggtgggacctagagtcatcaaactcgtagagatagaaggtagagtgctggttgctaggagatgggttggagagtggatgaaagcttattgtttcatgggtgaaagtttgagttttataagatgaaagaagttctgaggatggacagtgatggtgttgacacagcagtgtgaatgtatttaatgctactaaactgtatatacacctaaaatggttgagatgataaattttatattaaatgtgtcttacaacaatttaaaaaaataaggtgaggggaaattaagcaatgggtcaatgaggtgtatgttttagattttgtgtgaa

SEQ ID NO: 682542 - DNA, 594 bp, Homo sapiens
aaaaattgaaagcagggactcgaagatatatttgcacacccatgtttatagcagcacgtatcacagtagccaataggtgcaagcaagccaagtgtccattaacagatgagtggataaacaaaatgcaatgtatccatgtaatgaaatagtatttggccttagaaaacaaggaaattctgacacgtgctaccacatggatgaactttgaggacactacgctgagtgaaataagccagacataaagagacaaatactgtgtgattccacttataggtgggacctagagtcatcaaactcgtagagatagaaggtagagtgctggttgctaggagatgggttggagagtggatgaaagcttattgtttcatgggtgaaagtttgagttttataagatgaaagaagttctgaggatggacagtgatggtgttgacacagcagtgtgaatgtatttaatgctactaaactgtatatacacctaaaatggttgagatgataaattttatattaaatgtgtcttacaacaatwtaaaaaaataaggtgaggggaaattaagcaatgggtcaatgaggtgtatgttttagattttgtgtgaa

SEQ ID NO: 682543 - DNA, 923 bp, Homo sapiens
atgcagcctttcagtgaatcctaggattctcttcctacgagctggaagggacccttaaggacatttttgtctcaggccctcaatttacaagtgaagcaagtgtgctcgacacagcagcacctactgtgtgcaatgccccgtgcccaggctgctgcagggacagacaggaccaagaccccatcctgcctttccaaagaggcctccttccaaaacttagatttatggaccattcactgtgggcgacacacttttctaagaactcgacatacaatttgttaacactgcaactcccatttcacagacgaagaaaccgagtcacagttgattatctcaaggttacattggaggttcatgttctttcaaacccaggaagcctagctccaaattctctcttttctttttytttttttttttttttgacacacacagagactcgttctgttgcctaggctggagtgcaattgtgcaatcttctctcactgcaacctccgcctcccgggttcaagcgattctcctgcctcagcctactgagtagttgggattactggtgtgcgccactgtgcccagccaattttgtatttttagtagagacagggttttgccatgttgttcaggctggtcttgaactcctaacctcaaataatccacccacctcggcctctcaaagtgctgggatttacaggaatgagccaccactcccgcttccctttttgatgtatagattggacggtccacttcccttccatgatcctgtagaagactgggacatgagtgacctctggcagttggggtgaaccactcgtgagctgagcccagttcatagtgaaatggcagcagccagcaaggcttcgtttgaacctgctgcaatcaagcacctttgtggcccgtgagcctgacacagacaaaagtgaatggggtcccgc

SEQ ID NO: 682544 - DNA, 923 bp, Homo sapiens
atgcagcctttcagtgaatcctaggattctcttcctacgagctggaagggacccttaaggacatttttgtctcaggccctcaatttacaagtgaagcaagtgtgctcgacacagcagcacctactgtgtgcaatgccccgtgcccaggctgctgcagggacagacaggaccaagaccccatcctgcctttccaaagaggcctccttccaaaacttagatttatggaccattcactgtgggcgacacacttttctaagaactcgacatacaatttgttaacactgcaactcccatttcacagacgaagaaaccgagtcacagttgattatctcaaggttacattggaggttcatgttctttcaaacccaggaagcctagctccaaattctctcttttctttttctttttttttttttttgwcacacacagagactcgttctgttgcctaggctggagtgcaattgtgcaatcttctctcactgcaacctccgcctcccgggttcaagcgattctcctgcctcagcctactgagtagttgggattactggtgtgcgccactgtgcccagccaattttgtatttttagtagagacagggttttgccatgttgttcaggctggtcttgaactcctaacctcaaataatccacccacctcggcctctcaaagtgctgggatttacaggaatgagccaccactcccgcttccctttttgatgtatagattggacggtccacttcccttccatgatcctgtagaagactgggacatgagtgacctctggcagttggggtgaaccactcgtgagctgagcccagttcatagtgaaatggcagcagccagcaaggcttcgtttgaacctgctgcaatcaagcacctttgtggcccgtgagcctgacacagacaaaagtgaatggggtcccgc

SEQ ID NO: 682545 - DNA, 923 bp, Homo sapiens
atgcagcctttcagtgaatcctaggattctcttcctacgagctggaagggacccttaaggacatttttgtctcaggccctcaatttacaagtgaagcaagtgtgctcgacacagcagcacctactgtgtgcaatgccccgtgcccaggctgctgcagggacagacaggaccaagaccccatcctgcctttccaaagaggcctccttccaaaacttagatttatggaccattcactgtgggcgacacacttttctaagaactcgacatacaatttgttaacactgcaactcccatttcacagacgaagaaaccgagtcacagttgattatctcaaggttacattggaggttcatgttctttcaaacccaggaagcctagctccaaattctctcttttctttttctttttttttttttttgayacacacagagactcgttctgttgcctaggctggagtgcaattgtgcaatcttctctcactgcaacctccgcctcccgggttcaagcgattctcctgcctcagcctactgagtagttgggattactggtgtgcgccactgtgcccagccaattttgtatttttagtagagacagggttttgccatgttgttcaggctggtcttgaactcctaacctcaaataatccacccacctcggcctctcaaagtgctgggatttacaggaatgagccaccactcccgcttccctttttgatgtatagattggacggtccacttcccttccatgatcctgtagaagactgggacatgagtgacctctggcagttggggtgaaccactcgtgagctgagcccagttcatagtgaaatggcagcagccagcaaggcttcgtttgaacctgctgcaatcaagcacctttgtggcccgtgagcctgacacagacaaaagtgaatggggtcccgc

SEQ ID NO: 682546 - DNA, 923 bp, Homo sapiens
atgcagcctttcagtgaatcctaggattctcttcctacgagctggaagggacccttaaggacatttttgtctcaggccctcaatttacaagtgaagcaagtgtgctcgacacagcagcacctactgtgtgcaatgccccgtgcccaggctgctgcagggacagacaggaccaagaccccatcctgcctttccaaagaggcctccttccaaaacttagatttatggaccattcactgtgggcgacacacttttctaagaactcgacatacaatttgttaacactgcaactcccatttcacagacgaagaaaccgagtcacagttgattatctcaaggttacattggaggttcatgttctttcaaacccaggaagcctagctccaaattctctcttttctttttctttttttttttttttgacwcacacagagactcgttctgttgcctaggctggagtgcaattgtgcaatcttctctcactgcaacctccgcctcccgggttcaagcgattctcctgcctcagcctactgagtagttgggattactggtgtgcgccactgtgcccagccaattttgtatttttagtagagacagggttttgccatgttgttcaggctggtcttgaactcctaacctcaaataatccacccacctcggcctctcaaagtgctgggatttacaggaatgagccaccactcccgcttccctttttgatgtatagattggacggtccacttcccttccatgatcctgtagaagactgggacatgagtgacctctggcagttggggtgaaccactcgtgagctgagcccagttcatagtgaaatggcagcagccagcaaggcttcgtttgaacctgctgcaatcaagcacctttgtggcccgtgagcctgacacagacaaaagtgaatggggtcccgc

SEQ ID NO: 682547 - DNA, 923 bp, Homo sapiens
atgcagcctttcagtgaatcctaggattctcttcctacgagctggaagggacccttaaggacatttttgtctcaggccctcaatttacaagtgaagcaagtgtgctcgacacagcagcacctactgtgtgcaatgccccgtgcccaggctgctgcagggacagacaggaccaagaccccatcctgcctttccaaagaggcctccttccaaaacttagatttatggaccattcactgtgggcgacacacttttctaagaactcgacatacaatttgttaacactgcaactcccatttcacagacgaagaaaccgagtcacagttgattatctcaaggttacattggaggttcatgttctttcaaacccaggaagcctagctccaaattctctcttttctttttctttttttttttttttgacasacacagagactcgttctgttgcctaggctggagtgcaattgtgcaatcttctctcactgcaacctccgcctcccgggttcaagcgattctcctgcctcagcctactgagtagttgggattactggtgtgcgccactgtgcccagccaattttgtatttttagtagagacagggttttgccatgttgttcaggctggtcttgaactcctaacctcaaataatccacccacctcggcctctcaaagtgctgggatttacaggaatgagccaccactcccgcttccctttttgatgtatagattggacggtccacttcccttccatgatcctgtagaagactgggacatgagtgacctctggcagttggggtgaaccactcgtgagctgagcccagttcatagtgaaatggcagcagccagcaaggcttcgtttgaacctgctgcaatcaagcacctttgtggcccgtgagcctgacacagacaaaagtgaatggggtcccgc

SEQ ID NO: 682548 - DNA, 923 bp, Homo sapiens
atgcagcctttcagtgaatcctaggattctcttcctacgagctggaagggacccttaaggacatttttgtctcaggccctcaatttacaagtgaagcaagtgtgctcgacacagcagcacctactgtgtgcaatgccccgtgcccaggctgctgcagggacagacaggaccaagaccccatcctgcctttccaaagaggcctccttccaaaacttagatttatggaccattcactgtgggcgacacacttttctaagaactcgacatacaatttgttaacactgcaactcccatttcacagacgaagaaaccgagtcacagttgattatctcaaggttacattggaggttcatgttctttcaaacccaggaagcctagctccaaattctctcttttctttttctttttttttttttttgacacacacagagactcgttctgttgcctaggctggagtgcaattgtgcaatcttctctcactgcaacctccgcctcccgggttcaagcgattctcctgcctcagcctactgagtagttgggattactggtgtgcgccactgtgcccagccaattttgtatttttagtagagacagggttttgccatgttgttcaggctggtcttgaactcctaacctcaaataatccacccacctcggcctctcaaagtgctgggatttacaggaatgagccaccacycccgcttccctttttgatgtatagattggacggtccacttcccttccatgatcctgtagaagactgggacatgagtgacctctggcagttggggtgaaccactcgtgagctgagcccagttcatagtgaaatggcagcagccagcaaggcttcgtttgaacctgctgcaatcaagcacctttgtggcccgtgagcctgacacagacaaaagtgaatggggtcccgc

SEQ ID NO: 682549 - DNA, 1137 bp, Homo sapiens
catgccctgagaataagttggaagagctcagccatctagaggccattgggggaagaggcaagtggtctgagctttggcatgtatcaaacttgagcttttcttagaagggagctccctcccaggagcacataccccagaaaaaagtcaagttcgaccaggtatggagcttagctacaagtagagctcaagagaagcttgtgaggtcaacaagtctctgaagagcagaacggaaaagcagaagcagtggccctttcaaaccagaaaatgcactgggaaggcctctggactatccactgatcacgtgctgtttgcacagtgcaccctgctttggggtctatggggtaagtacctagtgtacatgtcctgtttcttccttctgacctcagtgacagtgagggtcccattcattcccacacccctcagtaccatagttggtcaaggaccctccattgctactgtattccatctccaatctttttcaaagctttgaatctaaagatgacgtctagttgtatttccatacattctagtgcaccatgacctcccttcaccatggtctctttttcacccaagttatgtagtccattcagaagggttacttcagagaaagaaataggttctgtgagcaacagcaggtgagatccagtcattttggaggctcttttgccaagwggtgctttctgcttccaagttgccccttttaagaaaccctgctcaaatgaagtcactttatttttgttctattatttcagtgaaattgttcagaacatagagtattctcttcattgctttcaacctgcccaaactcaggggctcttctgttctagtttgcagtcaagaccagtgaagactttggcttcctggtatatgaaactgacttcacatttcatttgtggcataggtttttgggaataggatacagagaggaaagattactactggcttcagccaagatcagcacaagtactatatatatatatatatatatatatatatatatatatatatatatatatatatatatatatatatatattgcacaaatacttgctggcatagataataccttttaatctacccaggtttataccagcaaggctcaagtgcactcaaacctcagggtgactctggagttaa

SEQ ID NO: 682550 - DNA, 665 bp, Homo sapiens
ttgaagggaagacagaagggctagggaacaaggcttaaccattttctgggcatgatcttaggatgttaaacccctggagctggaagatcaaagaataagaattcagccatcatttgaactatgagttcagttcaawtcatagttcagatgatggctagagaaatataaaggtaggaccgtataaatgttacatttaggtttttctgccttctattagaaaacagtgcttatctagacattctgcaaggaacaatggttggaagtagacttgacatttgtgtttgatttaggaatttaatagttcatgacgcatcggtaggcagaagggattgtgtaaggacaattaagtttaaaatgcctgccaacaagacaacattgaggtttgagtgcttcatatcttgtcaagattccaattccctgggcgattctccctggtaacattctgcctcttagagttaatgagaggggaaccattggtgtgaaggtatgttttttggaaagcaatttaacagctagtaagaactatacctggcactcttaaaatcagcaccccactcctgaaagtctaccccatatagatatccgttcaaggatttgtgtagtgaggtttattcaatggttagggactaaaacccccaagaaagtttaggtcagggaatgggcat

SEQ ID NO: 682551 - DNA, 2622 bp, Homo sapiens
gacaaggttaggcagcacacaggccatgtcctcactcttgagatagccacttcagccttggattggccatgggccaatccttcatagcatgtaaccaagttagaggcctctaaaggtcaccctaggggtgttaaggtttgtagcttaaacaccctgaataacattgggtgtcttgagctgcttcctagagccctttcctactctaagagtgtacactttcatttcagtagatctgcactgttttgccattcttttgctttatttgtacattttgttcaatgctttgatgtgccaagaacatggacaatcggtaaagactttccatccagtaacgttttggtgagccagcaggaggtaagctcagttgtctggggttgtttccttttatctttgtcaaagctgccatttgcaggcatgggtcaggcagttaaaagccacaacaccacccaccaactcagtctcccatgacagctcagttatggaccaagacatctaggtcctgccaggcacaagaggcatctatgcaacagtcaggtttgtgcgtggtgtccaagatttgatcacctaacttctatccttgccttgttggtgctttgtggggacgagggaatgaaattgctgcatttgagagccctattacaccatctgcatgccccttgtttatactaggaaaatgcagagaaagacaaacttaaagaccccacatcttcgttcttacctttttctgtctagaccccagagtaagttaacagccacagggattcataccttctctggcctctctggttatgagaagtactaaccttaaagttttgggctagaatgcaggaagatatggcctgtctaaattggtgggatactaaaagcttgggattatatccaggaacaaatgggaaggtcataggctacctatgaagggaaaacaaagtggtaccagtgcccacctaaggtcagatgtctgacaccaagactgaaccctgaagggggacacccctggggatccagtgctaactccaagacttccccaccacaacaccctaggtggaagctttgggtcaacaaataagccctccttaggatctcttttccagactactatgggaaacactgttctgattctccaactcagctgcatctttggccattagaatcaattatgaccttgataatcagaggaaacattcaatttttattgtaaagctgtttggccacaataccagctagacaggagcagtggccagaaaaatggaaggcttaatcacagggtagatggtcaggaatactatgtgttcaagcctttatggttttgtatcagaatccttcgatctgcagaagtcccaatattggccctcaaaaagaaagtcctaagattgagccagacattgatgacccctcctacaagggccactcatctctcaggggtaactatggccgcccccacataactgcttgccaagtgctccaatcatgcaaggccagagggacaaattacactgaacccaacacacccagagtagaataccctactcagcagctcccctggcactaagaggttgtgaaagtactggggatgctggcaagtttgtkgatgggttccagtctttggctctagcttttgctttatcatggagatgtccaattcattttggcaacctggtgcacccctatggaaaaagaatgaggctgcctgctgcaaggcagatggcatgtctgcctgaaatccccagggcagtcacccggggcccagacatggtgccgaccaacaactctaattgagatgatatccctgtggaaatgaacaggtgagcaaagtttgaggcactcccttggagaaatagaaaaaaaaataaacaaggccctaagttataaggtcccggaaattatacaagggaaggaagaaaacccagctatgttttatgggagatacatgaggccatcagaaaacatgcaattctagacccttcctctcaatggttatgctaatggtacagcattttatcagccagtcggccctgacatcaggtgcaaactcaaaattgcaagtgggaccacaaactaaaatcagtgtcttgataccccatttatgttgtaacagtcatgacctggagggaaaaaggtaagaacagcaagtcaaaaatcatggcagccatcattagcaacacctgaaaagcatccgaggacaacccataaggatcatgccagagtctcttgcctcaagtgcaagaaaaatagacactgggtaaaggactgtacactaagcccctgctgtctgtgtgaaggcactagtcacaactcctgacagtggagaatcaactgccccccacactcccattgagggactcagttgagactggtagtgcaaagggaggagctaggttaagactgaaggggcctagggcttcctcacagcccctgtccaggatcattactctgaggaggcccaggtaactctggacatgacaagttccatttttcagtatgggggcaagttactgtccttactgcttatgcaggaaaactgtccactaggaccatgactgttataggaatgggggtgggggaaggcatttcacccctcctttagcctgacaacttgagacaagctttccaggagctcagtaa

SEQ ID NO: 682552 - DNA, 2755 bp, Homo sapiens
ttcaatgcaccaagaacctggaaaacaggcaagacttcatctggcaacagattgagtggctccagctcatgtaccttgggtggacagttctacaatgcatctgtgkacttcctgcatgaccccagtggaaagcctcagctgtttacagaaacaactttaggagtacacccttcttggtctagccacttatgccaccaagatcacctgcttaataagctacctgtctccccaccctggacctcgttatcaggctctaaatttcaagtgagcccaagacagctcagtggggtttatgcagagatgacaggacttacagaagccagaatcccagcccaagtggagtacaactttgccttgtgggaatgctgcttgtaacttgggagggcacaggtgacctcattttatgagatgtaattagtatccaaagaacatcttgtggtgatgaacagtgtgatacttaatactgagtgtcaacttgattgaaggatataaaatattaatcctgggtgtgcctgtgtgggtgctgccaagagagattaacatttgagtcagtgggctggggaaggtagatccactcttaatctggtgggcattatctaatcagctgccaggcaaatataaaacacgcagaaaaacatgagaaagtgagactggcccagcctcccagcctacatctttctcccgtgctggatgcttcctgcccttgaatatccaactccaaattcttcagttgagactcggactggctgtccttgctcctcaaagcttgcagacagcctattgtgggaccttgtgattgtgtaagttaatacttcataaactcccatcgtattagttctgtccctctagagaaccttaatacaaagaagcacatctactatttaacaggttgtgttgtcccagagaaacgattgaggtggtatggcattaaaactggggagagaagttcaagattagggcagtcagaaagtcacacacctgctgtgccagacagttctgggggtatgttagtgaaaatgagactcagcccgtagtacacatggactgaggaagttagaccctggggaccatctaaggatggcagagtgagggttgaaagttatctaccaggtacagtgtttatttgggtgatgtgtacaactagaaagtccagacctcacaatcatgcagtatttccatgtaattaaaccatgtcatcacagatgttgctgtgacaccccaacttagttacaggacttatcctctcagccaggtatgctttctgctgcaccttttacaaccaaataacctgtacccaatgagttaaataagagactcagcccatagaaatacatttttcttcaatcatggaaaaaatgactttaggtgatcatgtagtgtctagtatcactcagaataagcccacttttataattggagcaagtgttaggacagtagttacccgcctttgcctcagcttttgtaagggctatgatttccctttagaagactcgttcatttttgcagaggaggttgtcagcagcagctcatgcctcatgtccaccacgcacatagggtgtgccagccacctgaccctccctgcagccctggtgggagaagtataccttcttattcttaacccaaacctaccaggactcccagggactaactcagcctcatttgcctgagagtttacactaagggcttgtccacacccttcttgcatctcacattttagcacttcagcatcattaactaagccttcaagagccacaattaaagtagagtgttttcaccggaagatgaccagttgaggtgtggcaggtgctcaactaggaacaccccacaggggaaagcagtgagctaaatactaagaggagaaaacataccggctgagaggataagtcttgtaggtaagttggggtgtcacagcaacatctgatgacatccatatgctcatgacaagtcttttttaaacaaaaattcaactcagagggtataacttagcattttggccagagatgtgtagagaacagcaggagcccagaaggtgcttgagcagggttaatgccacctgaagatgttaagccagctcatcaatgcctcctttcatctgaaaatgtctagcacaaatgagacgcctcccaacagcagctggtactttgagcataaattgagcccaacacttgacatcgagaaagcccagtgctagaggcgagtctactcccaggtgcttgaacagagctaatcacagcacgagggcttaagacaaggcttcttggaggactaccacatggaataagtataccggtcccactgagcgtccccaagcccattctctttaggctcccacttggcacaagctgtcatggacttcacatagcattaagagcttatgaagttttagctctttgaagagctaggacacaccaggcacccccacccccaaccttctattccataaggagctgagttcaagagaaagccaaaattcgagaagcagcaaccatagggatgcttgggacccagccgaggtcccctgccagcagccaacacttacagagaagctagctctacttgtccaggcctggaggatacgatagccaccttctggttttaggctcagcctttctgaaagtaatctccccacctaggttgccctgttgtgggagctttctttaaactcatgtctaatgcagagctttgaccagctgaacagcagagtcttaatgagagaactccatagatacaacacctcccacatcagcggtaaggt

SEQ ID NO: 682553 - DNA, 2755 bp, Homo sapiens
ttcaatgcaccaagaacctggaaaacaggcaagacttcatctggcaacagattgagtggctccagctcatgtaccttgggtggacagttctacaatgcatctgtgtacttcctgcatgaccccagtggaaagcctcagctgtttacagaaamaactttaggagtacacccttcttggtctagccacttatgccaccaagatcacctgcttaataagctacctgtctccccaccctggacctcgttatcaggctctaaatttcaagtgagcccaagacagctcagtggggtttatgcagagatgacaggacttacagaagccagaatcccagcccaagtggagtacaactttgccttgtgggaatgctgcttgtaacttgggagggcacaggtgacctcattttatgagatgtaattagtatccaaagaacatcttgtggtgatgaacagtgtgatacttaatactgagtgtcaacttgattgaaggatataaaatattaatcctgggtgtgcctgtgtgggtgctgccaagagagattaacatttgagtcagtgggctggggaaggtagatccactcttaatctggtgggcattatctaatcagctgccaggcaaatataaaacacgcagaaaaacatgagaaagtgagactggcccagcctcccagcctacatctttctcccgtgctggatgcttcctgcccttgaatatccaactccaaattcttcagttgagactcggactggctgtccttgctcctcaaagcttgcagacagcctattgtgggaccttgtgattgtgtaagttaatacttcataaactcccatcgtattagttctgtccctctagagaaccttaatacaaagaagcacatctactatttaacaggttgtgttgtcccagagaaacgattgaggtggtatggcattaaaactggggagagaagttcaagattagggcagtcagaaagtcacacacctgctgtgccagacagttctgggggtatgttagtgaaaatgagactcagcccgtagtacacatggactgaggaagttagaccctggggaccatctaaggatggcagagtgagggttgaaagttatctaccaggtacagtgtttatttgggtgatgtgtacaactagaaagtccagacctcacaatcatgcagtatttccatgtaattaaaccatgtcatcacagatgttgctgtgacaccccaacttagttacaggacttatcctctcagccaggtatgctttctgctgcaccttttacaaccaaataacctgtacccaatgagttaaataagagactcagcccatagaaatacatttttcttcaatcatggaaaaaatgactttaggtgatcatgtagtgtctagtatcactcagaataagcccacttttataattggagcaagtgttaggacagtagttacccgcctttgcctcagcttttgtaagggctatgatttccctttagaagactcgttcatttttgcagaggaggttgtcagcagcagctcatgcctcatgtccaccacgcacatagggtgtgccagccacctgaccctccctgcagccctggtgggagaagtataccttcttattcttaacccaaacctaccaggactcccagggactaactcagcctcatttgcctgagagtttacactaagggcttgtccacacccttcttgcatctcacattttagcacttcagcatcattaactaagccttcaagagccacaattaaagtagagtgttttcaccggaagatgaccagttgaggtgtggcaggtgctcaactaggaacaccccacaggggaaagcagtgagctaaatactaagaggagaaaacataccggctgagaggataagtcttgtaggtaagttggggtgtcacagcaacatctgatgacatccatatgctcatgacaagtcttttttaaacaaaaattcaactcagagggtataacttagcattttggccagagatgtgtagagaacagcaggagcccagaaggtgcttgagcagggttaatgccacctgaagatgttaagccagctcatcaatgcctcctttcatctgaaaatgtctagcacaaatgagacgcctcccaacagcagctggtactttgagcataaattgagcccaacacttgacatcgagaaagcccagtgctagaggcgagtctactcccaggtgcttgaacagagctaatcacagcacgagggcttaagacaaggcttcttggaggactaccacatggaataagtataccggtcccactgagcgtccccaagcccattctctttaggctcccacttggcacaagctgtcatggacttcacatagcattaagagcttatgaagttttagctctttgaagagctaggacacaccaggcacccccacccccaaccttctattccataaggagctgagttcaagagaaagccaaaattcgagaagcagcaaccatagggatgcttgggacccagccgaggtcccctgccagcagccaacacttacagagaagctagctctacttgtccaggcctggaggatacgatagccaccttctggttttaggctcagcctttctgaaagtaatctccccacctaggttgccctgttgtgggagctttctttaaactcatgtctaatgcagagctttgaccagctgaacagcagagtcttaatgagagaactccatagatacaacacctcccacatcagcggtaaggt

SEQ ID NO: 682554 - DNA, 2755 bp, Homo sapiens
ttcaatgcaccaagaacctggaaaacaggcaagacttcatctggcaacagattgagtggctccagctcatgtaccttgggtggacagttctacaatgcatctgtgtacttcctgcatgaccccagtggaaagcctcagctgtttacagaaacaactttaggagtacacccttcttggtctagccacttatgccaccaagatcacctgcttaataagctacctgtctccccaccctggacctcgttatcaggctctaaatttcaagtgagcccaagacagctcagtggggtttatgcagagatgacaggacttacagaagccagaatcccagcccaagtggagtacaactttgcmttgtgggaatgctgcttgtaacttgggagggcacaggtgacctcattttatgagatgtaattagtatccaaagaacatcttgtggtgatgaacagtgtgatacttaatactgagtgtcaacttgattgaaggatataaaatattaatcctgggtgtgcctgtgtgggtgctgccaagagagattaacatttgagtcagtgggctggggaaggtagatccactcttaatctggtgggcattatctaatcagctgccaggcaaatataaaacacgcagaaaaacatgagaaagtgagactggcccagcctcccagcctacatctttctcccgtgctggatgcttcctgcccttgaatatccaactccaaattcttcagttgagactcggactggctgtccttgctcctcaaagcttgcagacagcctattgtgggaccttgtgattgtgtaagttaatacttcataaactcccatcgtattagttctgtccctctagagaaccttaatacaaagaagcacatctactatttaacaggttgtgttgtcccagagaaacgattgaggtggtatggcattaaaactggggagagaagttcaagattagggcagtcagaaagtcacacacctgctgtgccagacagttctgggggtatgttagtgaaaatgagactcagcccgtagtacacatggactgaggaagttagaccctggggaccatctaaggatggcagagtgagggttgaaagttatctaccaggtacagtgtttatttgggtgatgtgtacaactagaaagtccagacctcacaatcatgcagtatttccatgtaattaaaccatgtcatcacagatgttgctgtgacaccccaacttagttacaggacttatcctctcagccaggtatgctttctgctgcaccttttacaaccaaataacctgtacccaatgagttaaataagagactcagcccatagaaatacatttttcttcaatcatggaaaaaatgactttaggtgatcatgtagtgtctagtatcactcagaataagcccacttttataattggagcaagtgttaggacagtagttacccgcctttgcctcagcttttgtaagggctatgatttccctttagaagactcgttcatttttgcagaggaggttgtcagcagcagctcatgcctcatgtccaccacgcacatagggtgtgccagccacctgaccctccctgcagccctggtgggagaagtataccttcttattcttaacccaaacctaccaggactcccagggactaactcagcctcatttgcctgagagtttacactaagggcttgtccacacccttcttgcatctcacattttagcacttcagcatcattaactaagccttcaagagccacaattaaagtagagtgttttcaccggaagatgaccagttgaggtgtggcaggtgctcaactaggaacaccccacaggggaaagcagtgagctaaatactaagaggagaaaacataccggctgagaggataagtcttgtaggtaagttggggtgtcacagcaacatctgatgacatccatatgctcatgacaagtcttttttaaacaaaaattcaactcagagggtataacttagcattttggccagagatgtgtagagaacagcaggagcccagaaggtgcttgagcagggttaatgccacctgaagatgttaagccagctcatcaatgcctcctttcatctgaaaatgtctagcacaaatgagacgcctcccaacagcagctggtactttgagcataaattgagcccaacacttgacatcgagaaagcccagtgctagaggcgagtctactcccaggtgcttgaacagagctaatcacagcacgagggcttaagacaaggcttcttggaggactaccacatggaataagtataccggtcccactgagcgtccccaagcccattctctttaggctcccacttggcacaagctgtcatggacttcacatagcattaagagcttatgaagttttagctctttgaagagctaggacacaccaggcacccccacccccaaccttctattccataaggagctgagttcaagagaaagccaaaattcgagaagcagcaaccatagggatgcttgggacccagccgaggtcccctgccagcagccaacacttacagagaagctagctctacttgtccaggcctggaggatacgatagccaccttctggttttaggctcagcctttctgaaagtaatctccccacctaggttgccctgttgtgggagctttctttaaactcatgtctaatgcagagctttgaccagctgaacagcagagtcttaatgagagaactccatagatacaacacctcccacatcagcggtaaggt

SEQ ID NO: 682555 - DNA, 625 bp, Homo sapiens
tcctctcagtcatccaggcaagaagcaggtggattaagtttatgattgggctaaacacggaaaaatacaatccaaggtgaaagcagaacccgctgttctctgtgtgtcttattctgagtattaatgttaaacacccttaggtttgggatatcaaagcctactactgagaaaaaaaaaactgctgatggcccacgcacacttggttagtgcaacactgccatttatctccttcaatgagctaagcagccatcaggttaagaagagggcaggggagaggcgggcacagccttattgggatgatgctgtcccgctgctgactcccagctggtacggcagtgacctctgctggcaggattttcctctccagtgtgcacagagagtaggagttccctcggagtctgtgtggttcagtagtgttcttcagagagatgccccaagactgatgctcacggagagggccgactgggctttcctgctaaaactgtcactaaaggctggggttacrcagtcaggagttgagacagattcttacccttgcttcagtgaactttctctcaaacacatatggcttctttacgttactcattttcagatctaaacatatttctttaaaaatatgttctca

SEQ ID NO: 682556 - DNA, 1117 bp, Homo sapiens
  misc_feature 974, 1012, 1017, 1076, 1081, 1082: n = A,T,C or G
aagagtgtgtggcacctccgtccccactaccccctccccactctctccctctcctgctttcaccctgtggrgtacctgttccccattcactttcctccatgactgtaagcttccggaggtcctcaccaggagccaaccaggtgctgatgacatgcttttacagcctgcagaaccatgatccaattaaacctcttttcttataaattacccagtctcaggtattgctttacaacaatgcaagaacggcctaatacacaggacaatctttctaagatcagttgggcacagtggctcacgcctgtagtcccagctacttgggtgcctgaggctcaagaatcgcttgaacccgggaggcagaggttggagtaagacaagatcatgccactgcactgtagcctgggtaacagagtaagaccttgtctcaaataaataaagaaagaaaattttaaaaatgtatttatcagagagaataatgccacaatttttgtcacaagaggtgatgaaatttaaaatacatttgataaaacttgcacatatatagttattgaatataaccaaaatcccacaggaaagaacaattaagagatgactgtgtttgtgtatacttattagcctcaagcgaactatatattccttcctttttcagacctgcttttacattcaaataggctactatatgaaaataaagattaaaacaattcagtttttaaaacagtaaatgcaaaatcctgtattgtgttccgcaggaaatgcaacgtacacttaaaaagatcaatttctaaaacgaaagctatgacaactatagacattcacatttatactgtggaatacaacacgatttgcagctgagaaatcaaggaaaggtttcatggagttgatatttaggatcagtatcgagagacagataggatttttctagaaaaggaggaagttgtgagtcacttagacagtagaaacaacaggggtataggcanagtgcatgaatttgcacagaaagggaaacagaaatggnctagnttttttgactgaatctcaattctgggagtaggatagataaagtagaaagactgattgangctanntatgagggcctgctatttaaagaaatggtttgttt

SEQ ID NO: 682557 - DNA, 609 bp, Homo sapiens
gaggcctgctccagagactgtgggactctaatgctgagctgtttgsggggggggtgggcatttcttaacagcaaccctggtggttaggaatatcctcacacctggtttcctccagtgaaggcccacaaggccggaattgattccaacctttatctgaagttgtttatagcctcaatcttgcacaatgagatctcacttagatctttgagtggcagccccctccctctaacgcccccatggctgcattcccatgatcctcaagttaaagacagtgtgtcttccccacttagcctttgtcttttccaggtcaagtgttataccctatttggccttttctcaaatggcagccctcatccccagatttcgtgagtctttagggctgtgaacctgaggttcttgagacttgagccaagtatgatagccctagaacaaggggccacttgaagctatcaggaattcctcagcagagaagggcactggggccaggcacagtggctcatgcctataatcccagcactatggaaggctgaggtgggtggatctcttgaggccaggagttcaagaccagcctggccaacatggtgaaagcctgtctctactaaaaataca

SEQ ID NO: 682558 - DNA, 637 bp, Homo sapiens
ctctgttgtccaggctggagtgtagtggtatgatcttggctcactgcagcctgtttcccaggttcaagcaattctcctgcctcagcctcctgagtagctgggattacaggcacgtgccaccacacctggctaatttttttgtatttttagtagagacagggtttcaccatgttggccaagctggtcttgaactcctgacctcaaattatccatctgcctcagccttcaaaagtgccgggattacaggtgtgagccatcgcacctggcctcacaccctgttaattaaaaaaattttttttttgtagagatgggtctccttgggttgccgaggctggtctcaaactcctaggctcaagttctcctcccacctgggcctcccaaactgccgggattacaggcatgagctcctgcgctgggcctagagtttgcaagtttgaagcctagggagcatgtagccggctttcaaatgtagatcttatttatattcacatatggtgaggccaggagatcaggatctgattgctatygaaagaataattgttactcacagttcccaagtagagagggcgggtcataccaggcagggccaggagtggaggcctcagggtggtcagaaggcagagtcagggaggggaaa

SEQ ID NO: 682559 - DNA, 883 bp, Homo sapiens
aatccaaagaattagaaaagagaagatacataagaagcatgagaaaaggaaacaatcataaaataaatgaaatcagcaaaagccaaagttactttgaaaagactgataaaaatataccatgattatgcatgaaatttaaaaaaaagagtatccacaaattctaaatatcatgaataataacaaggaaatcattatagattctatagtcatgggagagaaaaagagaatgtaataagtaactttaagtcaaaaattttgaaataatttgatgaaatagatacatttctagaaaatcattaatagtgacacaagaataaatagcaaatcctaatagctctatatctattaaaaataaaattacaattaaagctttccaaatgtagtgagtctaaatcaaataaaatattaaaaatctgaaatgtttccaggaagaaacattgaattcctaatataaaatgtaacatatcatatgcaatccctttactgaaaattgtgaaattttactgagagaaattaaagatattcaacagaaataaagstgtactgtgagtcctatgtcattcctggtattagaagaaagattcagtattttaaataaatctatatttgtaatacactgaaaatcacaatactgtgattagtaatagcataatttgtctgcattatatttggtggcaactgaaaaactgactataaaatgcaaataaaaatgcagtgtatagataactttgaagaaaaaatataatgtgaagacttacactattagatataaagtttttataaatgtatattaattatgacattatggaaaaggtgcaagtatagatatttcaatgaaacagaatagagagctcgtaaagagaaccacacaatatatttagct

SEQ ID NO: 682560 - DNA, 883 bp, Homo sapiens
aatccaaagaattagaaaagagaagatacataagaagcatgagaaaaggaaacaatcataaaataaatgaaatcagcaaaagccaaagttactttgaaaagactgataaaaatataccatgattatgcatgaaatttaaaaaaaagagtatccacaaattctaaatatcatgaataataacaaggaaatcattatagattctatagtcatgggagagaaaaagagaatgtaataagtaactttaagtcaaaaattttgaaataatttgatgaaatagatacatttctagaaaatcattaatagtgacacaagaataaatagcaaatcctaatagctctatatctattaaaaataaaattacaattaaagctttccaaatgtagtgagtctaaatcaaataaaatattaaaaatctgaaatgtttccaggaagaaacattgaattcctaatataaaatgtaacatatcatatgcaatccctttactgaaaattgtgaaattttactgagagaaattaaagatattcaacagaaataaaggtgtactgtgaktcctatgtcattcctggtattagaagaaagattcagtattttaaataaatctatatttgtaatacactgaaaatcacaatactgtgattagtaatagcataatttgtctgcattatatttggtggcaactgaaaaactgactataaaatgcaaataaaaatgcagtgtatagataactttgaagaaaaaatataatgtgaagacttacactattagatataaagtttttataaatgtatattaattatgacattatggaaaaggtgcaagtatagatatttcaatgaaacagaatagagagctcgtaaagagaaccacacaatatatttagct

SEQ ID NO: 682561 - DNA, 1835 bp, Homo sapiens
aaaaattaaaaagttaatagctcatcaatttttgtatttgtatatttagcattttatacataatctctctggatatttgactgtagttttggttttgtggttgtttaattgtctcaaaatttgggttttttatgatgctaaacttgtaaacgtttattttataatttattctttaaatgtaataaaggcaaggagatagaatatattacactttagtgcaatgccatcatttatcatttataatgttcaattagaggtacagagtgatttaaataagatgaagagtaacctttcaattgaataccattattttattcccttcataaaaaatgttcatataattaaaggtagctaattgataatgtttttttttctcagatccatatacgtcaaacagtcatttaagtatctatttagtgtaagacataactttgcctcttgttgtacttgtgtattttgaaataagatgtattttatgtttgaaatgaggattataactaggaaataagttattgaacatattgaatatattgaaagttgatcaagatgtgttaaagtttatctaaagcaagtttatattaatcacctaacatgagtagcaaaattacgcgrttagttattatcataataaaatattattatgttatgcatatattaaaatgcatattactatgtattttcttcttatatctttaattatgtggttgtgtgtgtggttgtatgtgtgtgtgcatgtgtgtgtgtgcgcttgcgcatgtgtgttatgcttactcagggagttgtgagaatgagggaatgatatatgatacgggtgctttctcacaatgataaacaaaacaactctaaaaggcttactttgtgttagtatatattctaagtatttaatttacatagcttaactcaaagttaccctatggaatatctccattttaaagatgaataaactgagggtttaggtaacttgcccaaaattatacagtaataaatagcaaaactctgatttgtctccagacagcgtttttctatagaacggttcccgtaagccctgtcaatagtaccttgaaaatgtgaacgtaatttttaaaattagatatcatagttatcactttggcactgaatcctgaaattcaaggaactattatgagataaattagacatgttgctatatttagatatatattacatctatgtgtcttttagataagaaaagctaattattttaatatatcccccaagaacctaagattgctttatttttctttctttttaaatctaaataatatatttttttcaacttttagattcagagggtacatatataggtttgttaccgggtacattgcatgatgctgaagtctgcggtaaaaatgactccattacccaggtagtaagcatagtatttaacagcttttcaacattttccctgcctgccaacctccctattactttctagtttctattgttgccatttttatgtcctcgagtacccaatgtttagtttacacttatacatgagaacaagcagtatttggttttaatttattggtatatagtcgctcatagtatccactaatggtcctttgaatttctgtagtatcagatgtattgtctcctttttcatctctgattttgtttatttggatcctcttgttttttctttgaatgggtaaaggtttgtcaatttcgtttatcttttcaaaaaaactcatttcattttgttggtgttttgcattgttttcttcacttcaatttcatttatttgtgctctgatcttcaattaattcttttattctactaattttgggtttgattttcttattctttaggatgatgca

SEQ ID NO: 682562 - DNA, 640 bp, Homo sapiens
taacaactcaaatgagagctaccatccactctgtcatacactatgccagatgttttgtatccatttttaatcttctgaatagccctacaagttgcagcctgttatcatttacatattagaggtttgaggatctgagacatgaaaaaaaatcacaatcagtaaggaatagaactgagattcaaacctgcaactttgtaattacaaaattatttgtttcattctatattacaaatgctcctaggatttattaagtaatggcagaaatatgaaccaaaggttgataacacacataggtcattgcctaaacttctgtgtctataatcttcatagggagattattcttcaagttattctgagataaatagataataaacacatatgaatttttcaccccaagccatgccaagactatgtgctaagattttagatttttaaattcaagttttaattcttttttcctccaaatataattttgtgattgtattcggtataaaacaatgacttatgggatacatgagttaatctcatrttgctctgattttctgagcatgctgacgtttctgagagccttgggctcattaatgcctaagtattagtaggtcactgggagtaggggtcttcatgtcttcctgactcaaaa

SEQ ID NO: 682563 - DNA, 1470 bp, Homo sapiens
tgaatcagaagagatcatatattccgtattgcgactactctgagtcatatcagtaacacaaacatttgataatcatttcttaattaaacttctgaacattttttgacattttataaaacaatgcttttcccaaactaattctattttgagctatcagaatgtatatcctgttttcttgcattttcaccaccagatggcagtgataacctattcattcatttctytctcttttttttttttttttaatcgttctcttgtttaatgttattctagaaatgaaccagtagctctaaattaaaagtgatggccaaaaattcccactttattttctacgacaagtcagcatgctagagtcacagttcccttgtgcaaagaagtgaacaaaacgtgcatggagggaagcacaggaaatatcgtgattttgtgtgagagctggaatgccactaagtaataaatgactctggtaaattgtaaaagactaccttgggttgtgtatattaaaagtatataaatttccgtgtgtgtttgtgtcagagagagagaggtctttgggtttggggtagaggttgtataaatgtgacttcaaaatgtcgcctgtcataggctacccttgtcacattctagggttaaccctgttaagggtgaaaaagtgaagttatcaaaaaatgaagtgggcccttacacagcacagatgtacatgacctcggtctttactccacttaatcaccacttccttactcagtttgtcttaatattgcttatttcatttttcagatattttctgcaagaatagttttcttgtttaactatcctggatttacaaatacatgtttcagcttggaaaacaaaattttttgtttaactttttgtatttcgtagcaatagcaatgaaaatcttctaaagattgggggaaaaacctataatttttttggacacacttctttaaactttgcttgatgaggctgtttttaaatgaaacattcacatgcaaaattcaagagaccgggaaaaatagtctgaaattgataaagttgtttgtccattgtatttttagtcaggattatctggaccattttttaacatcttggagtcgtcagttgatctggttttagtttcagctgaaaaggacaattttctgttctccttcagttaaccaagacgtggtcacagaccaggcaacacaggttttgtcagtgagataccatggaaaggaaaagaggccttataattataatcaataggtctgggtttgatggtgtactttcaaagaccacacatatggctgtgggcatgtttttatcatgatctataaaatggggataataacgcctatatggggttcattgagataaagtctatgatcttttggcatgcacgcaatagtcaatagagagttttctttctctctcagtttaccccctggataaaagtaggttgattctggcttaagttacaaagaggaaaagctg

SEQ ID NO: 682564 - DNA, 652 bp, Homo sapiens
cagaacgtttttagccagctgagccttctgacctagatgtggagaggcggcctcggacatgcagcatcgctttactgtgctgtctgttatctggagggcaacctgagccacagttacagcagacgcttaattcattctccaggggccatcagctgcaggaagaggccaaacaagccttttgaattgcccactgtatggtatttctgccacagcagaaagtggcctgtgatcacaactattaccaatttgcctagctctgaaaagattttgagtgtgctggtagcaaatggctcagatacaacaaaactrttcatacaatggtgaaatgactagagctgtagaagagtaaaagagtaccaggtaaaagaggaccaagcagtaaaagaagaccaagggaaagaataactttgccaggaaaattaaggctaaaggggttcttgcaaataagaacaaaattcagctctgggctagcaggcagcaaaggcaaaaagggaaaccctaattcgaaagctctcattatgtaattaaagaaacaaaccagagcatccggggatacaagtgttttctgagcctgcagctttaggagttatcagatgggctactgttatataagagatgttgtgctaggaatttattatttattgagtgccta

SEQ ID NO: 682565 - DNA, 558 bp, Homo sapiens
ggcaatttcagttatttttatttagttacaccatgttgtcactgggattagtattgacatattacccaaygtatagagtaaaagacatatgagctcaagaagcaacatccttgactcttagttcggtgtaaacctcacttcaaaaaaatcactgagaaataaacaacaaataatcttgtttcttatatgtaactcagaaatttaattatcgtaaactatctgagtaccttgaagatacacaccttgtaaatgaaaaccactatacttagatctttctccattttcccttgaagttttctaaaattgaaacatttccaaacaatgaccaagaaaatcagttttacaataattttagtaccttcccttgtgtagtttagtttatctataaagatatcacaggttaagggagaggtttatttggttaagttaccatatgaatgtacaactattttctacaattttagtaaattctagaatgggttaaatttgaatgcctgattcatgatttccccttcatagtggaggcaaatggtagagaataaaaaagttgggcattga

SEQ ID NO: 682566 - DNA, 601 bp, Homo sapiens
ccatccattgaatttgctctgtgtaaagggtgatttaagctacatgctttctcttagaaaaatctagaccgtcctggactttggagccaacagaataaattccagtctccaattttgtgaaatgcgtgcattagcaattcagacatatggtgcttttgattgcataggtcttttcaatgcattcatacctgcctgcatgtcacacacgtgatccatgagcttagccagtgaatgaagaaagctatcttgaatgtyaggataaaagcactcaggatatttcctagaattttcttcttaaaatcaagtagcaggattaagacaatgtaccaagaaatttgaattgagcagatgttttcatccaaactaggaatctgataatgtgctatacaattgatgcagtatctattatacattgattgttgcaatgacagtagtggtatgaactctcatcatcatggagtgatgtaaactcctacaacttattaccaaaatgtttgaaaaatgtcagaaaccaataatccaacaggcattatgtagtatgggtgagtgcctaattttttttttttagatttttataaatatgtatcttgaatgatttatg

SEQ ID NO: 682567 - DNA, 1122 bp, Homo sapiens
aaaattgttttttaaaactcctttttttttttgagatagagtcttgctctctcacccaggctggagtgcagtggcacaatcgcataagttagtgaacttattaatataatattcactacagctgtatggagctgccatagaatagaaaggaaaattcatctacattttgaatttaatacatcagatgtgaaattaacttgggtcttaaatcaagttcagcttccttgaaagcctgcagatcacttccaacatccctcatttatcctgaactgtctttgggaggttggtgggtctggctacccatgaagacaaagtgttccttcctgtctggtagggatttagttttgtatttttgtattagctaatttgtaaagtgttaccttattccagtgggtcttttaataacagctttattaaagtataattccataccataccataaaattctctgagttgtgcagccatcaccactatctaattttagaacatttacttcactccaraaggaaaccctgtaccctccagtgggttctctgatttgcttatgttttaaaggtacataatcatatcatttgaaaaataaatttttcccattttaaattataaacattaggctgggcatggtggctcacgccagtaatcccagcactttgggaggctgaggtggacagatcacttgagttgggagtttgagaccagcctcgacaatatggtaaagccccatctccactaatacaaaaaatcagccaggcatggtagtccagctacttgggaggctgaggactgagaatcacttgaacctgggaggcagaggttgcagtgagccaagatggctccactgcactccagcctgggtgacagagcgagactccatctggaaaaaaaaaaattataaacattatttttaaattgtaagtaggccgggtgtggtggctcacgcctataatcccaacactttgggaggctgaggcaggtggatcacttgaggtcaggagttcgagaccagcctggccaacatggcgaaaccctgtccctactaaaaatacaaaagttagctgggagtggtggcacgcgcctgtagtcccacctactctggaggctgaggcatgacaattacttgaa

SEQ ID NO: 682568 - DNA, 656 bp, Homo sapiens
ttggcctcccaaagtgctgggattacaggtgtgagccactgcgcctggccaacttttttttttttttttttttttttttaattttagagactgggcctctcactctgtagctcaggctacaatgcagtggtaccataatagctcacttcagcctccaactcctgggctcaagcaatccttttgcctcagcgtcctgagtggctggcattacaggtggacaccaccacatccaggtaattaaaaactttttttgcgtgtgtagagatggggtttcaccatgtttcttgggctggttttgggattctagcctcaagtgatcctcctgccttagcttcccaaagtgctgggataactggtgtgagccactatgcccagcccatamtaaagttgttctagtcttagaatctttgtaatttatattctctcatgatggtaactccaccttttttttttttttttttttttttttttttgagacagggtcttgctctcttgcccaggctggagtgcagtggtgtgatcttgactctctgcaacctccacttcccatattcaaatgattctcccacctcagccattgagtagctgggattataggtgcgggccaccatgcccagctgatttatttgtatttttagtagagatgaattttcatc

SEQ ID NO: 682569 - DNA, 1408 bp, Homo sapiens
tcctgacctcgtgatctgcccgcctcggcctcccaaagtgctgggattacaagcgtgagccaccgyttatggaaagactagccacattaaatacaacatttgcattgttttattatctgactcccaggtgacaaataacttgagtttctaagaccctgcctttttaatgccatttccttccctttgatcatataaaatacggtcattaatcttcagagaagaaatcctacatactttagtatcaagcaatcaagagtgtttctggaaaatatctatataatagtggtttaaaagttcttaccttaatttgttcaatataatagataaagaaagggagaatactgtacaaatagtctttatatacaccctagcttcagaagtttggaaattagcctgtgaagaagttaagcactatgaagaagttaagtggtatggaataaaagacaactacaggtttggtcttcgcagagtgagttatgtgttttcttgcctatacatattcctggcagtgcaaatttctcttgtgttggggacacaagtgtctctgggcacaggagaaaagccagatggagcagaaggtttttcgtgtggaaagaaggaggagtttaggcagagagaaaaagcattgctgagaaggcaaatttatattgttataagcagcttctattaggtggagataaatatatttctgaattgcctgagaccagccttcctgtgcctcagaacaagtgttatgcatatggttggaagatttttctaagaaatagattcagaataaagaatcaactcactgtgcccagatttacataaacagtggtgaataatttgtaaatattgggaaatatataggcagcataaagtttttgtgtcaagtagcttctaagaaagcccaaataagatctagtattgcaaaggatcttgatactgcaccagcccaccctttgcttcaggagaggagctttttgtgcttatgaggtagtaatcattacccaccagggcttcagcaaccggggatagattgaatgcccaccatgtgccaagctctttatcgcctcatttaattttcactttttttaaatagtggctattatccttattttacagaccaaaaaacttttataaagaagtctcagagagattatcttttctaaaattaacagtattcttaggcaagcagaatctggccccaaagatagtttccaatactgttgtcaaatgttgttaatgattgctgtcaactcaaagaaatgtaaaaaggttgaggtgtgtatctttgagtctgacttagttatcctacaaacctgtattcagatgctgccatttaccttttggtactatctgaattctaggaggaaacttgggaagaagggaacctcctcccgaggattaactttgcaaatttaagcct

SEQ ID NO: 682570 - DNA, 1408 bp, Homo sapiens
tcctgacctcgtgatctgcccgcctcggcctcccaaagtgctgggattacaagcgtgagccaccgcttatggaaagactagccacattaaatacaacatttgcattgttttattatctgactcccaggtgacaaataacttgagtttctaagaccctgcctttttaatgccatttccttccctttgatcatataaaatacggtcattaatcttcagagaagaaatcctacatactttagtatcaagcaatcaagagtgtttctggaaaatatctatataatagtggtttaaaagttcttaccttaatttgttcaatataatagataaagaaagggmgaatactgtacaaatagtctttatatacaccctagcttcagaagtttggaaattagcctgtgaagaagttaagcactatgaagaagttaagtggtatggaataaaagacaactacaggtttggtcttcgcagagtgagttatgtgttttcttgcctatacatattcctggcagtgcaaatttctcttgtgttggggacacaagtgtctctgggcacaggagaaaagccagatggagcagaaggtttttcgtgtggaaagaaggaggagtttaggcagagagaaaaagcattgctgagaaggcaaatttatattgttataagcagcttctattaggtggagataaatatatttctgaattgcctgagaccagccttcctgtgcctcagaacaagtgttatgcatatggttggaagatttttctaagaaatagattcagaataaagaatcaactcactgtgcccagatttacataaacagtggtgaataatttgtaaatattgggaaatatataggcagcataaagtttttgtgtcaagtagcttctaagaaagcccaaataagatctagtattgcaaaggatcttgatactgcaccagcccaccctttgcttcaggagaggagctttttgtgcttatgaggtagtaatcattacccaccagggcttcagcaaccggggatagattgaatgcccaccatgtgccaagctctttatcgcctcatttaattttcactttttttaaatagtggctattatccttattttacagaccaaaaaacttttataaagaagtctcagagagattatcttttctaaaattaacagtattcttaggcaagcagaatctggccccaaagatagtttccaatactgttgtcaaatgttgttaatgattgctgtcaactcaaagaaatgtaaaaaggttgaggtgtgtatctttgagtctgacttagttatcctacaaacctgtattcagatgctgccatttaccttttggtactatctgaattctaggaggaaacttgggaagaagggaacctcctcccgaggattaactttgcaaatttaagcct

SEQ ID NO: 682571 - DNA, 1018 bp, Homo sapiens
ggtcccacagtaatagttaatgatactctctttattgtatctaaatgtaaaatctaaaacaatacacttttaggaaataaacatttatgatcatcaattaggcaaagatcttttaagatataactgaagaagcataatagcaaaatgacaaattaacraattggacgtcataaaatcaaacacatctgctttttgaaaggcactctgaagagaaagaaaagaaaagccacagactaaaagacaatatttgcaaatctaatatctgataaagcccttgtgtccagaatatataaagaaccctcaaaactcaacaataataacataattcaagtttaaaaagtttaaaaaggactatatttagtttttaaattatagttagccatttgacatttttaaagattttttttcatttttcttatatgttgtcatttccaaaatcaactactgggtcagaaataagaatctacctgtatttctcatgattccagtaactggcaacagaacatctactgaaaattccatctttcccttaaaatgctcagtgaagacggaagaatatggatcaggcatttgaagtctcagctttgtgactcaccactgcttttccttagtttaaaagtgtaaggtgtcgtattagtctgtttttatggggctgataaagacataccagagactgggtaaaatacaaagaaagaggtttattagacttgtagttccatgtggctggggaggcctcacaatcatggcagaaggcaaggagacgtggatggtggcacgcaatgagagagcttgtgcaggggaactcccattattaaaaccatcaaatctcatgagactgattcactaacatgagaccagcaacggaaacccccattattcaattacctcccaccgggttcctcccacaacacgtgggaattgtgagagtacaattcaagatggaatttgggtggggacacagccaaaccatatcaggcatattcaaacaaaatatgtttcaatttccatggacaatttc

SEQ ID NO: 682572 - DNA, 612 bp, Homo sapiens
tctagaatgggggaaatgacagtgtctacctcaggagtgacaagctgggatccctataggagccaggcagatgatgcaaatgagtgagccagactgggcatttaacattagtgcattgggcagacaatggtggcaatggctccatccaaataaagtaattgtgctcagatcaaacagattgtcaccacatggaaacatgagcccagatcttcagatctatcccccaaatggggtaaaggtctagattttgtacaaaataatattttaaaattctactcagctatctggcttaagaaaatttcatgcttagcacatatatggtcatggatacatataatgagacaatgtatataaggtaattggcacaatgcctagcacatgatatgcaaagaatgaatgttagctcctgctatttctaagagtagcagaatttccttattgcgtatttttwaaaaaatagttgatttcctcctgagctctttacatgtgaagggaatattgattacaggcagaattggagaaagtgttaaggatgagttattgaaaaagaacttatgaaacccctaaggaagcgtagaagaaaagctcgttttcccattaggaaaatgtaag

SEQ ID NO: 682573 - DNA, 612 bp, Homo sapiens
tctagaatgggggaaatgacagtgtctacctcaggagtgacaagctgggatccctataggagccaggcagatgatgcaaatgagtgagccagactgggcatttaacattagtgcattgggcagacaatggtggcaatggctccatccaaataaagtaattgtgctcagatcaaacagattgtcaccacatggaaacatgagcccagatcttcagatctatcccccaaatggggtaaaggtctagattttgtacaaaataatattttaaaattctactcagctatctggcttaagaaaatttcatgcttagcacatatatggtcatggatacatataatgagacaatgtatataaggtaattggcacaatgcctagcacatgatatgcaaagaatgaatgttagctcctgctatttctaagagtagcagaatttccttattgcgtatttttaaaaaaatagttgatttcctcctgagctctttacatgtgaagggaatattgattacaggcagaattggagaaagtgttaaggatgagttattgaaaaagaacttatgaaacccctaaggaagygtagaagaaaagctcgttttcccattaggaaaatgtaag

SEQ ID NO: 682574 - DNA, 1230 bp, Homo sapiens
agcagtacagtgaagggccaaggagaattaagtggctttgagagggcataagaaaatcagtgattctgaatttataatatctaattcccaagttgtcttagtccgttttgtgctactataacagaacaccactggggatttataaataacagtggtttatttggttcacagttctgaagtccaagatcaaggggctccatctggtgagggccttcttgctgcatcatcccatggcagaaagcagaagggtaagaaagtatgtatgagagagaggggaaggtggccaaactcattcttttatcaggaacccactcccacagtaactaacctactcccctaaataatggcattaatctattcatgagggccctcatgacttaatcacctcttaaaattcccatatcttaatgctgtcaaaatggcaattaaatttcaacaggagttttggagcgggcattcaaaccatagcacatgttcatgttcagataaaagtgagacaagaatgaacctcgtatcatatttatggcaccttattagaagaaacaacactgaagtggggttagtttctatttttactctgtcattaacccctgtgcaaagagacgattattatcattaaaaactcattgggccaaaagtgtagtagagttgaaaagggaaggtaaattgcctcgacaaggctctgctaaatcagttctccagctgattctgtaaggggcaatttaaaattctttcaaaaatgggctgtrtgtcttccatcatatagctccagggctcaatgtataattccaggggccaagagctaagaatttttgccatattcagacattaattatttctgccctggtgtttttaccaagaaacatctcaagtaaggaagcaaacagctaatgcttatggaaagcttctagttggcataggctaaagctaatcatactaatgagtagctttatatttcgaaattccaaatcccatttcaaatatgcatttccgaggaagatggggttgacttatgcatgcaaaactgttacaagtgtcaaatcagtggttcatccagcatagtgaatacttttcttcctccctccttctagcaaacatttattaagcatcctgtcagcatgtgtgatgcactatactaggcattgtgaccaagatgataggtaaacacattatctaaagggagagtcatatttcacgtttgctgcttccatgaacccagtatatagttcc

SEQ ID NO: 682575 - DNA, 1506 bp, Homo sapiens
atcaacagctctgagcgttacttggccgcgccttcatagcttcatttctatcgttgttttgttttatcttgtttttcattttaaaatgccttgagattccccagcttttcaggacactattctttttcaaccagcaacgtgagccgtggagacattgctggataaaatgccaggatacttgcttactgtgtgttcctgcattagtgaccctccaaccttcggaatcactccgcttgcggcatcagattgattttgacaatgaaatgatgaggctgggcaagttttagggattacttcgactctcacaatctaccacttctagtgtaaaagtcggtacgagtcttaacacggtacgaacaagggggtgcaagaaatgttacatttgttgttcrtaaatcaaactgtgactaagttcccatcctgccagattgatgagaagtgtactctgtcattattgaagctccgcccccccaactctccccaccccaattacaaaggtgccaaagagtccagaaggtgcctgttctgggagcctctgtccacactgggtaccgagggatgtccattgtccaagcctgtctggtctcctgagatcaagcacctgctgctgtgtttcttgcctgaaggacccttgcctgtgttgggagtctaggcccctgtttctccaggtatgtctccgagtcaggaagcctttgatcaacagcagcaaagatgtattagagacgatagcctttctctggctgtagtagtcccaactacttgggaggctgaggtgggagaatcacttgaaccaggaggcagaagttacagtgagccaaaatcgtgccgctgcactccagcctgggtgacaaagcaagactctgtctcaaaaacaaaataaaataacccagtttggggtatgtctttattagcagcatgagaacagactaatacgataaaagcccaaattttcactcaaaggagaaagaaggaagaagagagaatggggagggagggaatagaggagagctgtcctcagcgacctctactttacctttgcaaaaattcctaggaaaaggaaacacaaagggcctggctatcttcatggaagggagagagaaatcatgaaacaaaacatattgatgtttaaataaatagtgcccagccacttcataagtcaagagccttgagactaaaacagacagtgtcttgagctatatttatttttcacagtcttataaccaagattccactcaatgcctattggatggttaattttcttattcattctgaaagagaagaggaataataggcaggattagtttttgaaacaaaatgaccagtattgaagctgaaagcgaagcatagctgtgaatcctggtagcacagctttctggctgtgagaccttggagaatactgactcttccttcttcaacatggaggtatataaattctggatctagtttaaagggatttgctgattgcttgaaattgactcagtatccttattacctcccacccccagg

SEQ ID NO: 682576 - DNA, 649 bp, Homo sapiens
aggaacactgctcttcaagccctgagctccgcttcgtaagtccaactcccctaaggccatcatggcaggagaggccatatctgggcgcttcagtggatgttcttatctggacccagccttccagctatccccactgacatgcaaaccaagcctctagaccagcccgtccaccggccgaatgctgcctgtgaccgacctctgccattgccacatggaacagaagcacctcccagctgctccttgcccaaattcttgacccacaaaatgtgagacaccattaaaacttgtttcagatgacccctaaaaaataaaatcaacctcttcatctggtgctcttataaaaacttactacggaagcttcttgagagacagttcgttggtcttcctgaataatttttttttttcttttttgagacaatgtcttgctctgacacccaggctggagtgcagtggtgcgatcttggctcactgcaacctctgcctcccgggttcaatygattctccttcagcctcccaagtagctggaattacaggcgcctgccaccaagcctggctaatttttgtattttttagtagagatggggtctcaccatgttggccaggctggtctcaaacttccgaactcaaatgatccacctgtcttggcctc

SEQ ID NO: 682577 - DNA, 610 bp, Homo sapiens
taattccaccttcactgataccccagctcctaatatctctatttcctctgaaaaagagtgctgaccatctgtgtcacccagcacagcacagaagtatatactgagaggtcattctgctctgatctgaagtgtgttagtcatcattctccwtagctagactgcagactttttgaggccagtgataggttcttaatctccttatctaagctcctaccataatgtttagcaaaccacaagtcttgagaaattcatgttgatgtgttattctaagatacagttactgatttttaaaagtacacacttaatttgtatgatgaaatgacaaagtcatatttggcatggtttataaaagtagaagacttaaatttggtgttccatttagctacagactcttaaatccaatatataaattcccaaaggtcaagttttgatcactgtgagtttttttatgtcacttttttatgaatttgctctttcattcctgctggcttggacttacattttaattttgtgattaatacaatgaatcatgtctagtacagacattatctcaagttataggctgcctagcaacatgaggttggtccttatggtcctcagccttttatta

SEQ ID NO: 682578 - DNA, 655 bp, Homo sapiens
ctttaagtcctggatctttccccactgacttctgaaagcctgggtgacattactgattggaaaggccgaatgctgagaaattgattggaagtttcttgcagcccatttcctgcagagctggatgtacaatgcaataaatactagttgtcctgagatgtatttctttggagggtagttttatatcccagcttcctttgtgtttattcagccaaatggaaaattccacaatggtagactttgcattctaaaaaatcagtataatgagggcagtgagggaaagagtaaaacaaaccaaaataacacttgggcaccgtttagtttcccatcctctgagacattcctcaaatttttcatttttcttgtaatataaacttcttgaaatagagcttagtgcagatcattagaagcctttagtgtcacactttaaacactctttmcttagaagccctatgactgagaagagtcacttacatttagcatggatataattaaacatgtttctgttgaaaggggcattctcattatagctaaggaccactttagagtaaattgaaatggaaaggaggaacataaatgaggtataggtagcaagtagttatttgcagggaggcataaaatgccaaatgtataacaattatattttacaaccccacat

SEQ ID NO: 682579 - DNA, 860 bp, Homo sapiens
catcaaaatcttcacacttttctacagttgagaatttcattatgattacctttcagtgacaacaaaactttatttcctaaatactgttctgctttttaaatacagttctagatgaaacttcaataaagttatactctatcatcatattgccaatagatttttttyccaaataaaatatcagatcttcttcctacacctattcctgtgttctctatagaaaccaattgcatctcaatcctctgctgctaggattagacagctcagagacatgtgatactgggagtcccttcactatgcttctgttatgctcctatcaccctttctgctttctctttggtactgtcagttttatctgttccctccattgtattaccattatcctactcctacgttcaagacttctttatggattgtgtggattataatagcctaattggttttccagactcgaggatgagtaactccaaggcccattatatcaccattcggaatacagaatgaagtcaaactttcagtttggtatttaaattctttcagtactcggccttaatgtatctttctgctctaactgctctaatttaataatgcacttccatgtttaacattcagttctacatagaatcacctgaataaattttctacctcaatatctttgtaatatgtttgctttttaaaattctgtcattctaaaaagtttctcactccctttctttccaatcaaaaactatccaagttttggattttggtttttaaataccactaataatgaagcaggacttcttagagaaatggctgattacggatatgaggcagaaaaagtataaaccctgtgataatttcttatgccagaaaaggacaaa

SEQ ID NO: 682580 - DNA, 860 bp, Homo sapiens
catcaaaatcttcacacttttctacagttgagaatttcattatgattacctttcagtgacaacaaaactttatttcctaaatactgttctgctttttaaatacagttctagatgaaacttcaataaagttatactctatcatcatattgccaatagattttttttccaaataaaatatcagatcttcttcctacacctattcctgtgttctctatagaaaccaattgcatctcaatcctctgctgctaggattagacagctcagagacatgtgatactgggagtcccttcactatgcttctgttatgctcctatcaccctttctgctttctctttggtactgtcagttttatctgttccctccattgtattaccattatcctactcctacgttcaagacttctttatggattgtgtggattataatagcctaattggttttccagactcgaggatgagtaactccaaggcccattatatcaccattcggaatacagaatgaagtcaaactttcagtttggtatttaaattctttcagtactcggccttaatgtatctttctgctctaactgctctaatttaataatgcacttccatgtttaacattcagttctacatagaatcacctgaataaattttctacctcaatatctttgtaatatgtttgctttttaaaattctgtcattctaaaaagtttctcactccctttctttccaatcaaaaactatccaagttttggattttggtttttaaataycactaataatgaagcaggacttcttagagaaatggctgattacggatatgaggcagaaaaagtataaaccctgtgataatttcttatgccagaaaaggacaaa

SEQ ID NO: 682581 - DNA, 648 bp, Homo sapiens
ggtacctaatacatatatatatttacagtatacatgagatattttgatacaggcatacaatgtgtaataatcatatcagggtaaatggagtactcatcacctccaccrtttactctttctttgtgttacaagcaatctaattatcgtactttacttattttgaaatgtacaataagttattgttgaccgtagtcaccatgttgtgctatctaatactaggtcttatttagtctctctagctatatttttgtacctattaaccatctccacttcccctgcaacaccctccccagcctctggtaactatcattctactctctatctccatgagttcaattgttttaattttcttcgctcaattctaagactttagcatagtgcctgaaagatagtgcctgaacataatattcagaaaaaatttattaaaaaagttctacaactcaacttttgaaaccacagctgagcctaaaaacactttctcttttcttcgagagaaagtatggtatatatttggggtaaggaggcaggtggtgctaatattttgttaagaaaatacatatttggcattggaataagagctatatattccttagctcgctaaacattaagtctcattttacacctgaaaaaattgaggcttcagagaaa

SEQ ID NO: 682582 - DNA, 648 bp, Homo sapiens
ggtacctaatacatatatatatttacagtatacatgagatattttgatacaggcatacaatgtgtaataatcatatcagggtaaatggagtactcatcacctccaccgtttactctttctttgtgttacaagcaatctaattatcgtactttacttattttgaaatgtacaataagttattgttgaccgtagtcaccatgttgtgctatctaatactaggtcttatttagtctctctagctatatttttgtacctattaaccatctccacttcccctgcaacaccctccccagcctctggtaactatcattctactctctatctccatgagttcaattgttttaattttcttcgctcaattctaagactttagcatagtgcctgaaagatagtgcctgaacataatattcagaaaaaatytattaaaaaagttctacaactcaacttttgaaaccacagctgagcctaaaaacactttctcttttcttcgagagaaagtatggtatatatttggggtaaggaggcaggtggtgctaatattttgttaagaaaatacatatttggcattggaataagagctatatattccttagctcgctaaacattaagtctcattttacacctgaaaaaattgaggcttcagagaaa

SEQ ID NO: 682583 - DNA, 648 bp, Homo sapiens
ggtacctaatacatatatatatttacagtatacatgagatattttgatacaggcatacaatgtgtaataatcatatcagggtaaatggagtactcatcacctccaccgtttactctttctttgtgttacaagcaatctaattatcgtactttacttattttgaaatgtacaataagttattgttgaccgtagtcaccatgttgtgctatctaatactaggtcttatttagtctctctagctatatttttgtacctattaaccatctccacttcccctgcaacaccctccccagcctctggtaactatcattctactctctatctccatgagttcaattgttttaattttcttcgctcaattctaagactttagcatagtgcctgaaagatagtgcctgaacataatattcagaaaaaatttattaaaaaagttctacaactcracttttgaaaccacagctgagcctaaaaacactttctcttttcttcgagagaaagtatggtatatatttggggtaaggaggcaggtggtgctaatattttgttaagaaaatacatatttggcattggaataagagctatatattccttagctcgctaaacattaagtctcattttacacctgaaaaaattgaggcttcagagaaa

SEQ ID NO: 682584 - DNA, 648 bp, Homo sapiens
ttcaaaagacacatataaaatctcagaagtagtgttttcataagtatttctatggaaaacaactacagactgaagttcagccagacaaggcaaatattgaaaccatggcaaatgaatgggcaacaaacactaaagttaaaacaaatgtaggaattgaaggaacagaacagaatgtaatgtttacattctgacaatgtagaaatgatagaactaatggaaatttggggaggaagaaggatgaaggttgaaggtatagtaaatttgctgattacctcatacgtaatctctagagtcaaaggatatcatttcatgctggcagatcattaatagatgtttgagcatatttaacgatacaaaggtaaatatgaagaaagatagtactattgactaaagtcagttgggggagagagaggcggaagtatattacttttatgcttggttatactagagaacaaatagaaactgactaaagaaacattagatcagtggttctcagagtattgatatctgggagtcccagcaacagtctgaggaggttcatgagttcaraatattttgataataacactaagatggtatttactcttctaactgggtagatatttgcactggtactgccaaataatgtcttacattttcgcagaaata

SEQ ID NO: 682585 - DNA, 603 bp, Homo sapiens
tcttcagatataattaaaagattgaacgaaaatctataacattgaatgcttgaattttataatttctttggtaattactcacattttaccagaaatgttaatgagaatgtcatttccaaccatggaccagcctgggataaatacaagaaaagagaggccttgggaggacaacaagggtgaagaccaaaaacaaagggaatataaataagcatatataatataggattatcatcaacaacaaaacttcaactatgcaataagtactttggttataatttcatttttccaaatatcatctagacaaagtgcactcayaatgtgtatgctgactgaatatgctataaggtcatgcatgcaatagctcatttttagttttacctaaggatatttgagaatgggaaattcccaatatgtttaaagacagcattacaggatatcctcccacagaatcttgaatcactcattttattaagagagtttaaaacatttctgttatgtgttgtaactgaagttaacaaaagctagatttccttttgagaatttgctaaattacctctggccagatggcttctatatcctgaatttccttcctatgctgatctt

SEQ ID NO: 682586 - DNA, 2369 bp, Homo sapiens
  misc_feature 1614, 1615, 1616, 1617, 1618, 1619, 1620, 1621, 1622, 1623,1624, 1625, 1626, 1627, 1628, 1629, 1630, 1631, 1632, 1633,1634, 1635, 1636, 1637, 1638, 1639, 1640, 1641, 1642, 1643,1644, 1645, 1646, 1647, 1648, 1649, 1650, 1651, 1652: n = A,T,C or G
  misc_feature 1653, 1654, 1655, 1656, 1657, 1658, 1659, 1660, 1661, 1662,1663, 1664, 1665, 1666, 1667, 1668, 1669, 1670, 1671, 1672,1673, 1674, 1675, 1676, 1677, 1678, 1679, 1680, 1681, 1682,1683, 1684, 1685, 1686, 1687, 1688, 1689, 1690, 1691: n = A,T,C or G
  misc_feature 1692, 1693, 1694, 1695, 1696, 1697, 1698, 1699, 1700, 1701,1702, 1703, 1704, 1705, 1706, 1707, 1708, 1709, 1710, 1711,1712, 1713: n = A,T,C or G
tttttctaaccccattctttcttcttcatcataaatctttgctcctagagacagaatgttatgatggaaaaagctctgggaccagcatgaggtctggattggagtccctggtgtggcatttataaaacgtgaaccctagactgagacaggtaaacttattctgagtctcagtttctccatctttgagatgccctaagagtcttcctcagagctctagtgatgatgtttagagagtatcttatccaatacctagtacataataagtgcttaaataatactattattatgaccttgatttctccttggyactaacttgttgcacctgcttctagggttgccaacacagaaatgttaccttgtagaggattacttgtgtcgtgcacacactaggggaacttttctgctcttttactctcctctttcccttttccttaggcttagaaagaaagcccatcagtgaggacctgagcccagtgatgaggtgaagaaagggaagtggtcctcaagagaaaacagcagagcgagagtatgccggcaatgagattctcagaaacccccaatcctgcacagggaactaaatgaagtatggtgctgtcagcatttgtagcatctgttggtggcactgagtagaggaagtagatgctattatctttgccatatctgccttttcttcttgaaagttgacaaggtgaggtcggttggggacagaagttagagaaggattcccttgttaacattgtcttctctgtgttctgtgtcccctctgtgtactatagacacagagacctggtgaaatggtgaagagagaaagaatgctcaaagttctgtgtgtactgcttgtgcattccacaaaacctgttacccatctggtgtttcggcataatagaagtttctagtttcagaaatatcattgaatagggcctcgtggataggggtagatattttaacttttggcttggatcatggattccataaagacagaatttcttggaaattctcaatatatttcttaatgcagcagtgccaaagggctttaatagttttgatatagattttaaattgatggcttatgggcagaatttctctttcaaaatgtctacttcttatcagtattatattttaaaaatgaaatttctcctatgtaaacaaataatcaagcaaaagcaaccaagaaattttgcctttaaattcaaatttcaggctttttttttgaatagtccaaagacgtgacaatattggccgaggagcaggaattgaatgtaccagtttgtcacaggccccacccgctcattatgtttcttgcctggacttcagaggcattgggagctcagacttgagtaccagctctagactcagactgccctggtataagtacctgctcttccagttatcctatataactctgggcaagctagttaatctttgtgttattttttttgtctgcaaaataggataatgtcttagtcagtttgggctgctataacagaattaaaaaagaaaaaacttcccacaatactgtggtatatcttgaagaattacccagtgcctatactatgcacgctaggtagttcccaatggcggcggaactatggggtttccaagaagacccgtccnnnnnnnnnnnnnnnnnnnnnnnnnnnnnnnnnnnnnnnnnnnnnnnnnnnnnnnnnnnnnnnnnnnnnnnnnnnnnnnnnnnnnnnnnnnnnnnnnnnnaataggttcctgagtagtggctctgacctatactcggggagctacaagtgtacaactctatgagggcagatgtcaagagaatcagtacgctgactaaagaggaatgggggcaccaatggtgagccattgaaagaggcgcagcctaactgagagcacaattcgataaaacctatgcgcttaaaccttctttcttccaagaattgataaccagaaatattcgaaggctagagtccattgcctaatgtctaacatgttgggtcctgactgggaaaaaacaatggactgtgaaatgtttgactccataaacataccttccttctgactagttcacccagtaacgatgatcagctatctggcgcggatgcctttaggaatattgccttgtatggtaggatatttgtagatgaattgataatgataataaggacatttgggataatactccctccccattttaaaagcatactttgagtcataaaaggagttgtaaaagaaatacctatcagaaaactaagaaaccttaaaacatgaataagtacttcttttcttgtttccttttttctttttcttgttttaagattataaattcacagttatagtgaacccttgaaacaaattagtagatatttgaggtttaatatttaaaacctggtctc

SEQ ID NO: 682587 - DNA, 616 bp, Homo sapiens
gtttgatgattagaatctcatcctttggccaaggaacacagccacatttgaaaagctcctattgtgcaattcctgctctcttcgctggcacctaaacccagtcgccaggcctgttgatttttccctccagyatctcttgcattcatatgctcttctcccttcattctcccccaccctgtcactttcttttatttacaaatgttctctgagtgcctactgcatgctaggtaaggcgccaaaatggtctggagataaagtgtgagcacagcaggagacagagggagatagccattcttgagcagtagttggcaaacctttgctgtaaatgattaggcaataaatattttgagctttgtgggccattaggtctctgttgcacctcttggactctgccacagacaatgtgtaaaacaatagtggacgtgtgttctaataaatgcttaggcagtgactcagatttggcccatgtgttgtagttttccaaccctgttctagagggtgagggaggccgttaacaaatacacaatgtgtgtatgtgtttgtcaagttataactgctacgaagagaatggaaagctaggtatctttttgtgtgtggtggcggggggtgttctttt

SEQ ID NO: 682588 - DNA, 1523 bp, Homo sapiens
aggtctgcaaaaagatttaatcttcagtttaagctcacttcgctctttgtataaattccttattcctcagagttttaagataatcttgtgtgagtaatcctggatatctagcaagttacagtaatttacackcgggtctgtcttatctattttaaatcagaaagtggtggtcttatagaagaatatatcacttccagcagtagtagaaatagaagagaataaagacaattctacagattcgttagaaatgagcagagacatgaaacggtaagatgaagaaaagaagacatggtaagtagaagacatacaataaattggtggacctaaatccaaatataaccacactccataagaagagattcagcttatgttaaaagaaaagataggtttggccgggcacggtggctcacgcctgtaatcccagcactttgggaggctgaggcaggtggatcacctgaggtcaggagttcaagaccagcctgaccaacatggcaaaaccccttctctactaaaaatacaaaaatcagctgagcatgatggtgcatgcctgtaatcccagctactcgggaggctgagacaggagaattgcttgaacctgggtgatgttggttgcggtgagctgattgcaccactgcactccagcctgggtgacagagtacgacgccgtcttaaaaaaaaaaaaaatagattcttcacttgataaaattaaaattcagcagaatattatttactaaagacataggtaaacccaatgacacaaacatttaaaaataaaaataattaagaaatgtaagccgagtcaaaaaataataataaatggagctggtgcccgtagtgttaatttcagacaaaataaatcataaattggaaagcaagatcagaaataaggatggtcattacttaataacaaaagaacaatttatgcagaaactataactatctaacaatacaaagtggaattttaaagtcaattgtaaagtaaaactaagagaaaaaatggaaaaacaatcaatcataatgtgaaattttaatagacttctctcagaagcagagaaagtagacaaacataagaacataacagatttaaataaataactatggaatttgatctagttgtcatatgaataaccctattcagaacacattccttgattctcacgggaaatatttataacaaactcccattgttaagccataaaggaagtctcaaaaatgccaaaaataagataactttaaaacttcctttgatttcaatataagaacactttaaataacagaaaaaaatgtaccctgaagcttccatacatttggaaatatagaaccacaattctaaattattgatgggtcagagaatagagcaatggtgcctaattgtatctaaaaacaatatattgtgttcttccctccaaccccagaaccttgattctgaatgaagcttgcacttttcagcaaatatttcaggaagcacttatgagcacatttgcagtaattgcatggacatagatagagatttgtaatgcaag

SEQ ID NO: 682589 - DNA, 1915 bp, Homo sapiens
gtcctggttacgctctcctttccaccatcaccaacctcgcctccctacctggggcttgcgctgtactcaccaagccttggcaggttgaaagggccactgagcgagtttctgtgtgatcgcaaagagccttgatagaaacagaagtcctctggcggtaaagtctgcacagacttagtgcctgtctttcccaacgtctgcacaataaagccaggagccactaggctgctggaagtcctcagatccatgtggaagtcgtgcctggggcctttcagccgaaggtgaagagactcaacctcggacacggccactgctcttctccgccgctgatggtgcatgatttcatgggacacgtaatcgcccctgtggtcaacctcgtaggcagagaccaggtcatattctgaaatcaaaagagtgaggagaggctgagtcatttcggaattccgagaagaatcaggaagtcttaagatataatattattttaccacatgacctttccacccagtcaaaaatgatgaagaaaaatgcaacacctacccatactgaattcaaagtgtgcaatatggaacatcacagtttaaagaaaaaaattgtaacaagggccccataatgtgctattaccaagccaggaaattctccaacagtgatgcggtgatgttaacagctgtcatctgccctcccagccactcaggggcatgctcctcacctcccaccagctcctaccactgtagctgagtcaggggaaggatgacagaaagcaggatggcttgttccaaacagtggaaggttagcacattttattgtgtataaaaaggtgattactctttaagaaatcaaattattctcagatgaaataagtcatattcttatgacctttattttgaagagagaaaatattcgtcctttattgggggcacatataatatttatcatgcaaaataactactggtaagccatgtttacataaacacaatgctgtggtaataaacattcaacaacccgctgtctggagaagaacgacctggattttggcatttgccaatttccctggtgtaaatcttcccctcatggctgatttcaatgactgctgtgccatcactgaatattcagtgcacagagatacgcagcagcccccagtgtgtgatatttctaccatacagatgcaaaagaggccagtggcctcaagagcctagattattatcaaatatagtgaaataattatgaaatgatgagcttygagtattgcaatgtttttaatataattaatttcactgtaaatgtatgtattttaattattctcacagtgatttggtgtctttattaatacagtattttttccataaatgggaaagacgtatttgaaagacttcaaacacaataatcttgcaagaggaaaagtttgtcctatctaaaaactcatatatataagtggtaggctcataatctccgcgttcaggcaaactgaactccaagaagccctgcaaggctcccgtgaggccccagttgttttcggagagctcaattccaaaaggctgggggagacggacagagctccatgcctcgcccacccaacaggagcatctcccacgggctccacccttcccactctttccacagttggctgcttagatggcacctgactgcagcttgctccagactcaaagacagagcctgtaactctctaagagcagaggaatgttcacgagcaccctaagaggatagcagggaaggagaatccagaaaacagagacagaagggtgggacaggtggcaggagatgtatagccttctaaatagaaatcaatcgcattaacaaaaaatcagtccaccaccggccacctctttcaaacgctgctgatatcaggaaataaaaatgacactaccctcctaaagtcggctttggcaatgagttgcaaaat

SEQ ID NO: 682590 - DNA, 1915 bp, Homo sapiens
gtcctggttacgctctcctttccaccatcaccaacctcgcctccctacctggggcttgcgctgtactcaccaagccttggcaggttgaaagggccactgagcgagtttctgtgtgatcgcaaagagccttgatagaaacagaagtcctctggcggtaaagtctgcacagacttagtgcctgtctttcccaacgtctgcacaataaagccaggagccactaggctgctggaagtcctcagatccatgtggaagtcgtgcctggggcctttcagccgaaggtgaagagactcaacctcggacacggccactgctcttctccgccgctgatggtgcatgatttcatgggacacgtaatcgcccctgtggtcaacctcgtaggcagagaccaggtcatattctgaaatcaaaagagtgaggagaggctgagtcatttcggaattccgagaagaatcaggaagtcttaagatataatattattttaccacatgacctttccacccagtcaaaaatgatgaagaaaaatgcaacacctacccatactgaattcaaagtgtgcaatatggaacatcacagtttaaagaaaaaaattgtaacaagggccccataatgtgctattaccaagccaggaaattctccaacagtgatgcggtgatgttaacagctgtcatctgccctcccagccactcaggggcatgctcctcacctcccaccagctcctaccactgtagctgagtcaggggaaggatgacagaaagcaggatggcttgttccaaacagtggaaggttagcacattttattgtgtataaaaaggtgattactctttaagaaatcaaattattctcagatgaaataagtcatattcttatgacctttattttgaagagagaaaatattcgtcctttattgggggcacatataatatttatcatgcaaaataactactggtaagccatgtttacataaacacaatgctgtggtaataaacattcaacaacccgctgtctggagaagaacgacctggattttggcatttgccaatttccctggtgtaaatcttcccctcatggctgatttcaatgactgctgtgccatcactgaatattcagtgcacagagatacgcagcagcccccagtgtgtgatatttctaccatacagatgcaaaagaggccagtggcctcaagagcctagattattatcaaatatagtgaaataattatgaaatgatgagctttgagtattgcaatgtttttaatataattaatttcactgtaaatgtatgtattttaattattctcacagtgatttggtgtctttattaatacagtattttttccataaatgggaaagacgtatttgaaagacttcaaacacaataatcttgcaagaggaaaagtttgtcctatctaaaaactcatatatataagtggtaggctcataayctccgcgttcaggcaaactgaactccaagaagccctgcaaggctcccgtgaggccccagttgttttcggagagctcaattccaaaaggctgggggagacggacagagctccatgcctcgcccacccaacaggagcatctcccacgggctccacccttcccactctttccacagttggctgcttagatggcacctgactgcagcttgctccagactcaaagacagagcctgtaactctctaagagcagaggaatgttcacgagcaccctaagaggatagcagggaaggagaatccagaaaacagagacagaagggtgggacaggtggcaggagatgtatagccttctaaatagaaatcaatcgcattaacaaaaaatcagtccaccaccggccacctctttcaaacgctgctgatatcaggaaataaaaatgacactaccctcctaaagtcggctttggcaatgagttgcaaaat

SEQ ID NO: 682591 - DNA, 882 bp, Homo sapiens
ttaaccacctatattacatgtgtccctgatgtaacctgagcaaacttagcaagtcttttattctgggtgaatgccccgcttcacccaaatcatgaatgctctttgcttcatggaactctattgcttttgttcccagaaccaattatatcttagctaatctcttgcccctttaattatccttgatagttttccaaataaaatatgcaatctgtgaacactttattagtcccactctctggtttatccattcatgggtaaggatacagaattgtctgaatccagcttattataaattcattattctcaattgtgcccaatgacaaaattttccttgccctgggtcaacaayattctcagtcatctctactatttaactgtaaatctcaaactatgtgctgtttagaattatatgtgcctatcccattctgccggacgtacgtgttcttttctccatgagatttacatcctgtaatgctctgattcagaattttggggcccaatccctattcatttgtgtcttaacagtctttgaagggatgtttgacttcaaggattccttgaagtttccctctgagcaaaggtgagatgccttttgattcatgcttgcgtcattactagcccaggtttagctgacttttttagtgtaggatttgcaattaacacacaataaaggctctctgaactttagtctcttttcgagggaaataaccataaacatactgccactcagtacagatggagaggttagtgaaaataagcagcatttatgaaggcatgccagaaggactatgggccagccattttctctggatactggaaattcttcctgtaatgaagccagacctgcatagagtattaatactcaaccacacaaaattcaga

SEQ ID NO: 682592 - DNA, 882 bp, Homo sapiens
ttaaccacctatattacatgtgtccctgatgtaacctgagcaaacttagcaagtcttttattctgggtgaatgccccgcttcacccaaatcatgaatgctctttgcttcatggaactctattgcttttgttcccagaaccaattatatcttagctaatctcttgcccctttaattatccttgatagttttccaaataaaatatgcaatctgtgaacactttattagtcccactctctggtttatccattcatgggtaaggatacagaattgtctgaatccagcttattataaattcattattctcaattgtgcccaatgacaaaattttccttgccctgggtcaacaatattctcagtcatctckactatttaactgtaaatctcaaactatgtgctgtttagaattatatgtgcctatcccattctgccggacgtacgtgttcttttctccatgagatttacatcctgtaatgctctgattcagaattttggggcccaatccctattcatttgtgtcttaacagtctttgaagggatgtttgacttcaaggattccttgaagtttccctctgagcaaaggtgagatgccttttgattcatgcttgcgtcattactagcccaggtttagctgacttttttagtgtaggatttgcaattaacacacaataaaggctctctgaactttagtctcttttcgagggaaataaccataaacatactgccactcagtacagatggagaggttagtgaaaataagcagcatttatgaaggcatgccagaaggactatgggccagccattttctctggatactggaaattcttcctgtaatgaagccagacctgcatagagtattaatactcaaccacacaaaattcaga

SEQ ID NO: 682593 - DNA, 882 bp, Homo sapiens
ttaaccacctatattacatgtgtccctgatgtaacctgagcaaacttagcaagtcttttattctgggtgaatgccccgcttcacccaaatcatgaatgctctttgcttcatggaactctattgcttttgttcccagaaccaattatatcttagctaatctcttgcccctttaattatccttgatagttttccaaataaaatatgcaatctgtgaacactttattagtcccactctctggtttatccattcatgggtaaggatacagaattgtctgaatccagcttattataaattcattattctcaattgtgcccaatgacaaaattttccttgccctgggtcaacaatattctcagtcatctctactatttaactgtaaatctcaaactatgtgctgtttagaattatatgtgcctatcccattctgccggacgtaygtgttcttttctccatgagatttacatcctgtaatgctctgattcagaattttggggcccaatccctattcatttgtgtcttaacagtctttgaagggatgtttgacttcaaggattccttgaagtttccctctgagcaaaggtgagatgccttttgattcatgcttgcgtcattactagcccaggtttagctgacttttttagtgtaggatttgcaattaacacacaataaaggctctctgaactttagtctcttttcgagggaaataaccataaacatactgccactcagtacagatggagaggttagtgaaaataagcagcatttatgaaggcatgccagaaggactatgggccagccattttctctggatactggaaattcttcctgtaatgaagccagacctgcatagagtattaatactcaaccacacaaaattcaga

SEQ ID NO: 682594 - DNA, 882 bp, Homo sapiens
ttaaccacctatattacatgtgtccctgatgtaacctgagcaaacttagcaagtcttttattctgggtgaatgccccgcttcacccaaatcatgaatgctctttgcttcatggaactctattgcttttgttcccagaaccaattatatcttagctaatctcttgcccctttaattatccttgatagttttccaaataaaatatgcaatctgtgaacactttattagtcccactctctggtttatccattcatgggtaaggatacagaattgtctgaatccagcttattataaattcattattctcaattgtgcccaatgacaaaattttccttgccctgggtcaacaatattctcagtcatctctactatttaactgtaaatctcaaactatgtgctgtttagaattatatgtgcctatcccattctgccggacgtacgtgttcttttctccatgagatttacatcctgtaatgctctgattcagaattttggggcccaatccctattcatttgtgtcttaacagtctttgaagggatgtttgacttcaaggattccttgaagtttccctctgagcaaaggtgagatgccttttgattcatgcttgcgtcattactagcccaggtttagctgacttttttagtgtaggatttgcaattaacacacaataaaggctctctgaacttyagtctcttttcgagggaaataaccataaacatactgccactcagtacagatggagaggttagtgaaaataagcagcatttatgaaggcatgccagaaggactatgggccagccattttctctggatactggaaattcttcctgtaatgaagccagacctgcatagagtattaatactcaaccacacaaaattcaga

SEQ ID NO: 682595 - DNA, 882 bp, Homo sapiens
ttaaccacctatattacatgtgtccctgatgtaacctgagcaaacttagcaagtcttttattctgggtgaatgccccgcttcacccaaatcatgaatgctctttgcttcatggaactctattgcttttgttcccagaaccaattatatcttagctaatctcttgcccctttaattatccttgatagttttccaaataaaatatgcaatctgtgaacactttattagtcccactctctggtttatccattcatgggtaaggatacagaattgtctgaatccagcttattataaattcattattctcaattgtgcccaatgacaaaattttccttgccctgggtcaacaatattctcagtcatctctactatttaactgtaaatctcaaactatgtgctgtttagaattatatgtgcctatcccattctgccggacgtacgtgttcttttctccatgagatttacatcctgtaatgctctgattcagaattttggggcccaatccctattcatttgtgtcttaacagtctttgaagggatgtttgacttcaaggattccttgaagtttccctctgagcaaaggtgagatgccttttgattcatgcttgcgtcattactagcccaggtttagctgacttttttagtgtaggatttgcaattaacacacaataaaggctctctgaactttagtctcttttcragggaaataaccataaacatactgccactcagtacagatggagaggttagtgaaaataagcagcatttatgaaggcatgccagaaggactatgggccagccattttctctggatactggaaattcttcctgtaatgaagccagacctgcatagagtattaatactcaaccacacaaaattcaga

SEQ ID NO: 682596 - DNA, 651 bp, Homo sapiens
tgacacctgtctctctttcctaaatgaagaccactcaacagcaaacaaatcacaggatgtcaacatgacagagctgatgtcatagtctacacttaagctgtgactaagttcaagagtccattcctgttcttcaagtaacaaaaatgctactagatttcaacacagaaataatattcactcagtatttactgactttaaaataccttaccagttaccatgaggaaagaaaaaaaaatagctaagatattgactctgacatgaaggaaattattatatagtgggagaaagttgcttaggattagtaattaagcaatgtatcagaactgagatcttatgattctccaatttaaactcagctattaaagtttattgaaataatttataacatatctaggtgttagtattggaactggaggtagaaaaaaagttttatcttctttgctggaaagaaatttgcaaaacgtttgttgatgaaggaatggtataggcagaatataaagttttcctacaagttagtaataaaaagacaaaccacctaatcaaaagttrgatgaaatactcaaacagacgtttctcaaaagaagacataaaaaggtgagcacgttttcatgtgcttattggccatttctattagtcatcagggaaatgcaa

SEQ ID NO: 682597 - DNA, 611 bp, Homo sapiens
aaatgatgagttcatgtcctttgcagggacatggatgaaactggaaaccatcattctcagcaaactatcacaaggacaaaaaaccaaacaccacatgttctcactcataggtgggaattgaacaacgagaacacatggacacaggaaggggaacatcacacaccagggactgttgtggagttgggggaggggggagggatagcattaggagatatacctaatgctaaatgacgagttaatgggtgcagcacaccagcatggcacatgtatacatatgtaacaaacctgcacattgtgcacatgtaccctaaaacttaaagtataataataataaaatttwaaaaaaaaacagtttcttagaaagcactcagctttctattttggaattttattttaattaaacatataataacaatgtgcagagaattcgattagtcatcaccctgtttcatgacacactgttgccattggtccatgcacaaccctatttaatattaattacataataatttattaagtagataatccagtccaatgactcaaaaagtatctataagaaatacctaccaatgtactccttccctgtattgtgcaactgcttagcctcgtcc

SEQ ID NO: 682598 - DNA, 1456 bp, Homo sapiens
ttaaatttcaaaaattaactctctaaatattaagtcctattagtttttaaaagaataaaatttattacaaggaagtaccaaatattccaaataagatttgaaagtaccaaatattattggatatgggtcataccttgtgaatataaaagaaagaaagcataaaacatttttgctcttctttttcttctcctctccttctctccctttattgtctttctcctcctttcccttctctccttacctgtcttccttctactcctgctttattaaatataaagaaccttggcttcatcaacgaacagccaaatgatttgggagctcagaatatggtgatgttttgctaagtgaagcgatgtgaactttgccttcaagaaggaggagttcatcactccttcttgtccagataagaaagtaaaaaaaaaaaaaaaaaaaaaaaaaaatgcccagataagaagtaaaatggatttgggataaaggctgacatggtctgccatgcatggtagttacagattattttattaatattcttttttaaccttttgacagaattaaaaaggtgatgcatcagtcataaccatcaagactgaataagatgccttccctctttacacctatctgagatgccaactaagggagacttagagcatgagttctgaactgaaaagccaagagagaatgttcctctttatttcaaatgccttattttgacatcttcccatgatttagcctgaacccataatagggagactatctcttcctcttttttctacttgactgtatatctctccttatcctttccccaaagtcaatgtaagactcagcaacagcactgtcccaattaatattctagttgttaaatgaatactaaaactacttcaacaggtatatctgggactccatttagtttatgatattgtttccacaggaaaatgcattccagattaacaaaatagcaactttacaatagtttgggttagaaaaagtcattggtatgttgagcacttacttgtgtaaggagttaaaggacatggaattcaacagtggcactgttagycctctgatttgggttttccatgtcctctgtgacggcaaggacagttgggaggcaaacactgcttcaatctttttttttttaattttacagtagacaatgccaaaaggtagatggctattttaaatgtcatcttttgttgattggtttatagtgtaatcgttttataaaggtctaccaaaaagtaaggaaatggtatttgatttcacgctgagaggaaactgtgcagcacaaattatgaaagaaagtaaaaatgtttatagtccatgagaaacataaaactatactaaaagaacaatatgaatgcattgcatccactctctttgatcttttgaattagaagtttcaagtacctttaatacttggtaagaaagtgggattgtaattgttttactaataaaaatg

SEQ ID NO: 682599 - DNA, 1456 bp, Homo sapiens
ttaaatttcaaaaattaactctctaaatattaagtcctattagtttttaaaagaataaaatttattacaaggaagtaccaaatattccaaataagatttgaaagtaccaaatattattggatatgggtcataccttgtgaatataaaagaaagaaagcataaaacatttttgctcttctttttcttctcctctccttctctccctttattgtctttctcctcctttcccttctctccttacctgtcttccttctactcctgctttattaaatataaagaaccttggcttcatcaacgaacagccaaatgatttgggagctcagaatatggtgatgttttgctaagtgaagcgatgtgaactttgccttcaagaaggaggagttcatcactccttcttgtccagataagaaagtaaaaaaaaaaaaaaaaaaaaaaaaaaatgcccagataagaagtaaaatggatttgggataaaggctgacatggtctgccatgcatggtagttacagattattttattaatattcttttttaaccttttgacagaattaaaaaggtgatgcatcagtcataaccatcaagactgaataagatgccttccctctttacacctatctgagatgccaactaagggagacttagagcatgagttctgaactgaaaagccaagagagaatgttcctctttatttcaaatgccttattttgacatcttcccatgatttagcctgaacccataatagggagactatctcttcctcttttttctacttgactgtatatctctccttatcctttccccaaagtcaatgtaagactcagcaacagcactgtcccaattaatattctagttgttaaatgaatactaaaactacttcaacaggtatatctgggactccatttagtttatgatattgtttccacaggaaaatgcattccagattaacaaaatagcaactttacaatagtttgggttagaaaaagtcattggtatgttgagcacttacttgtgtaaggagttaaaggacatggaattcaacagtggcactgttagccctctgatttgsgttttccatgtcctctgtgacggcaaggacagttgggaggcaaacactgcttcaatctttttttttttaattttacagtagacaatgccaaaaggtagatggctattttaaatgtcatcttttgttgattggtttatagtgtaatcgttttataaaggtctaccaaaaagtaaggaaatggtatttgatttcacgctgagaggaaactgtgcagcacaaattatgaaagaaagtaaaaatgtttatagtccatgagaaacataaaactatactaaaagaacaatatgaatgcattgcatccactctctttgatcttttgaattagaagtttcaagtacctttaatacttggtaagaaagtgggattgtaattgttttactaataaaaatg

SEQ ID NO: 682600 - DNA, 359 bp, Homo sapiens
  misc_feature 88, 121: n = A,T,C or G
cccatctcatcaataacctctctgatatcccttccattttttaaaatcccataattatattattgaataaggtaaaaaaaaataccantctccttttggcaactatttttcaaatccaamntgagttttgcatgagttctaggctactttaaatattcaggacaattcaaggaagaggaggaaagacataaatttaaaaagaaggagggaaagaataagagaataaaagaaggagtgggaaacaataacgaaatgaaagaaacagtgagaagcattattaaaacacgaaataaaagtattaagaaaattaatgaatgatttatctttttagtgagggtaggagaaaagagctatgtcat

SEQ ID NO: 682601 - DNA, 1092 bp, Homo sapiens
tttaccatttatagctaattagaaaattctctgagcccaaaccttgtattattgttatgaaaatagagcccattttcccatagcaaaggaagaaaaatttcctttctaaacrggtagtacatcctgttgtgaattcacgaatgaccaggcccttgtggggctcatcatcccttgtacctgtgcccacctgcctgtacgctgctgttcatttgggcaagatgaagtatctgcatctgaaatagcttcttccaatgccattgtattctggagcaaatttttaatgtaaacaaagtaaaagtcagggaatataaaaagtatcttaattacaaaaagaaatgtgaatgcagtcatgtttcattgaataattcaacttcagggactattttcaaaagcagagttttccaagaattaatgtttctctttaaattagggcagtcttgaaggggaaatgtagaattttgtacagcttgacagtgaatctttcttaaaaaatatgattatcctgaagttctctatttcttttggggatattttcccccttcatcattcaaggtttaaaggagtttctaaaaaccaactagagaaaacactgttagtctaactctaatgtagaacttttaagttatgttaaattttaagcctaaaggtttaatttccatgctttctggttttctccagacagactccaaatatttgcttaatatgctttcttatggtttaatgtgtagtaattttagcgttttagaaatatattttcctgaaaaatgtgtttcactggcatttcagagtttaagagcaaatatgccaattacaagtataaagctcattagtgtaatttaaataaaaatttataaaatatttcataaaatttttttctatataggtaactctcatcccatatacggaacagaggaattaatagtaatgatagaaatgtgaatttgtatccaaaatgtaaattatgttaatataggcaaataaggaagccttatatatgtccaccaaagaaatgcaacatgatcttatttcagagatttcaatactgagtcacaggactgagaggccataggcctgggctgccagaggaggttt

SEQ ID NO: 682602 - DNA, 1092 bp, Homo sapiens
tttaccatttatagctaattagaaaattctctgagcccaaaccttgtattattgttatgaaaatagagcccattttcccatagcaaaggaagaaaaatttcctttctaaacgggtagtacatcctgttgtgaattcacgaatgaccaggcccttgtgggkctcatcatcccttgtacctgtgcccacctgcctgtacgctgctgttcatttgggcaagatgaagtatctgcatctgaaatagcttcttccaatgccattgtattctggagcaaatttttaatgtaaacaaagtaaaagtcagggaatataaaaagtatcttaattacaaaaagaaatgtgaatgcagtcatgtttcattgaataattcaacttcagggactattttcaaaagcagagttttccaagaattaatgtttctctttaaattagggcagtcttgaaggggaaatgtagaattttgtacagcttgacagtgaatctttcttaaaaaatatgattatcctgaagttctctatttcttttggggatattttcccccttcatcattcaaggtttaaaggagtttctaaaaaccaactagagaaaacactgttagtctaactctaatgtagaacttttaagttatgttaaattttaagcctaaaggtttaatttccatgctttctggttttctccagacagactccaaatatttgcttaatatgctttcttatggtttaatgtgtagtaattttagcgttttagaaatatattttcctgaaaaatgtgtttcactggcatttcagagtttaagagcaaatatgccaattacaagtataaagctcattagtgtaatttaaataaaaatttataaaatatttcataaaatttttttctatataggtaactctcatcccatatacggaacagaggaattaatagtaatgatagaaatgtgaatttgtatccaaaatgtaaattatgttaatataggcaaataaggaagccttatatatgtccaccaaagaaatgcaacatgatcttatttcagagatttcaatactgagtcacaggactgagaggccataggcctgggctgccagaggaggttt

SEQ ID NO: 682603 - DNA, 653 bp, Homo sapiens
cacctaacgagaattacaatgggacaagcctcttcctgaagggctggtgagtaggagattggggcatcccacgtcaggcctctctgctggcttagatgtctactttttccagaaggaggcagcgtgatgtcacagataaaggcatagccttcagagtcaggtagacttgggttcaaatcccacctctgtagactaagtagctttagaaaagttacctagcctctctaagctgcagttgtctcataggcaagttgggattatataaggattaaatatgagaacaagagtaaaaggagagagactagtttcaaagctattgcagtcacctaggagagaawggggggtggcatgagagaaccaagcaggagctggagaaggttctgagataaagacagatctgggtgccattagcatgtgagtgttggccaaatgggacagacaagggcatgtgcaagtgatttgagatgggtatctggaacagaaccctggagtcaccaacagttcagggacaggcagactaagaggaaccacaaagaagattcagacagagttgggccacaatcgcaaggaaaaccatgagactgtatatcatgtaagacaaaggaaaagaaggtccccttttacactcatttattctgtcagcaaatacattt

SEQ ID NO: 682604 - DNA, 553 bp, Homo sapiens
tttaatagggctgacatagttggtgggtggtttagactatgagtccatggtctaatgttctcaactgttgatctccaggctccttagaggttgctgacccatttcctgaagcataaccccaggagtgggaggccactgtgttggagtcactgtagtggattctgtagtggatgctgtagtggatgtggtgattgctgtggtggatccatgatgctgtagtggaggtagcagatgctgtagtggaggtagtggatgctstagtggaggtagtggatattgaggtggaggtagcggatgctgtagtggatgctgtagtggatgcagcaagagccacggcacatccactgtcgtggatgctgtcatgcaccacccagatcacctcttcagaaccaagtgctcactcttccaacttccaggaaagttgtcttctgggggcggacaactgagtccctcttctggaactttcccaggcttaagggagctattttgtccaaggttattcccccttcccagagagcagccgcatttgatggttgatggggtatgacaggtt

SEQ ID NO: 682605 - DNA, 608 bp, Homo sapiens
caaccagcctccacttcctccttagcctcctgtaattgaactttcaccttcactgaccatctcttatggtcacctgtgacctcctaattaccatcttcattggcttcttacgaaactttcttgaatgtaaaagttccccagctggtacctgacacagagtaagtccccttgtctctgttcccacaagtttgaggtcagattgtgtgaactaggttaaggaaatcacactttgccccaagggccattgaagggctttatcagacatgggttataggtaattctgtcaccatggggattagaagggagctgtgtaagtctgttttcattcctataaagaaatamctggccgggcgcagtggcttatgcctgtaatcccagcactttgggaggccgaggtgagtggatcacgaggtcaagagttcaagaccagcctggccaagatggtgaaacccagtctctactaaaaatacaaaaattagccaggtatggtggtgggcgcctgtaatcccagctattcgggaggctgaggcagagaatcgcttgaacctgggaggcggaggttgcagtgagccaagattgtgccactgcactccagcctgggcgacaga

SEQ ID NO: 682606 - DNA, 1026 bp, Homo sapiens
ctgtgatgtgccttgcaaagaaaatacatgtgttagataagctttgttcaggcttgagttttagtgctgctggctgagttcagtgttaatgaataaaaatatgtattgagtgagttgtctttaaacagaaacatacataaagcacatcgatgtattgatcagttgacaaaaaatgttgatccgtttggctagaggctttaagaaacctccttctgtatttcccttgggagaaatggtttaatatttgccaatgcagtgtttgcagtcactttatggaacataactactgcgagttataagaattgactgtgtactggtgctcatattcagccctttgatccttaatatgcttgatttggaaaaggggaagtggttcatygcaccctcaagttaacacttctgagaaatgtatcagtcagaagtcaagcagagaagcaacaccagtaggagatacatgttttaataaacgtatgacaaggaattggcttacataattgtggggcttggctaagtaagcctgaaacccacagggcatactatcaggaaggaagaatcacatgggcattgctgaagcttgtccacaggcagccaaatagggaaaatccagtgaaggaaaagcaattgtggatccacctgctgttggaatctcttttaccaggaaaagctcaatcccttttaatggctcacctgattgagttgggcccatcgaatatcatctccctagattagagtcaactgattagggcctttaatcacatctataaaatcccttcacagcagcacctaggttagggtttgattgaataactaggagaaggtgtgtgtcacaaaaaggttgatgcccatgtatttagccacatagacacatctaaagatcattgcaatgatgtatcaaatgtagattttaggctggatgtggtagctcacaactgtaatcccagcactttgggaggccaaggtgtgaggattgcttgagcccaggagttcaggacaatcctaagcaacatagtgaaaccctgtctctct

SEQ ID NO: 682607 - DNA, 633 bp, Homo sapiens
gttctgagatctacaactatatctacataacaccaatgacaatattttaataaacaggaggaatatatatatatagctttacaaaaaaagcctgatacatttgcatcgtataagatactgtagaatcaatttccaaagctcaaagaactaaaacacacacacacagacacacacacacaaacatcctaatacaagagtcaacatttctcctctttcctgggtccaggtatgagagtcatcactgtgtctgtgagctgagaccagaaataagacacccacctgtggcaacatccacatataaaagtcacaatacaaactgtgagctatatccwcaagtgagactcagaacctcagcagtgggctccgtccatgtgtgagggtgataatcctgtcagctgggtgtgcatagaagagtcacaatctcaactttgtactgggacctaatatgaaacccttggtgaaatgtaagggctttatattatatacatgagtgtggtaatcttctgagaactttctgcaagtagaagactcaggaccttacccattgccctaagcccagctacaagaatcaacacctcttctattggctaaatccaagtatgagagtcatcattgcacctgtgagcttgatcc

SEQ ID NO: 682608 - DNA, 633 bp, Homo sapiens
gttctgagatctacaactatatctacataacaccaatgacaatattttaataaacaggaggaatatatatatatagctttacaaaaaaagcctgatacatttgcatcgtataagatactgtagaatcaatttccaaagctcaaagaactaaaacacacacacacagacacacacacacaaacatcctaatacaagagtcaacatttctcctctttcctgggtccaggtatgagagtcatcactgtgtctgtgagctgagaccagaaataagacacccacctgtggcaacatccacatataaaagtcacaatacaaactgtgagctatatccacaagtgagactcagaacctcagcagtgggctccgtccatgtgtgagggtgataatcctgtcagctgggtgtgcatagaagagtcacaatctcaactttgtactgggacctaatatgaaacccttggtgaaatgtaagggctttatattatatrcatgagtgtggtaatcttctgagaactttctgcaagtagaagactcaggaccttacccattgccctaagcccagctacaagaatcaacacctcttctattggctaaatccaagtatgagagtcatcattgcacctgtgagcttgatcc

SEQ ID NO: 682609 - DNA, 998 bp, Homo sapiens
ttcagttcttttgaaaccatactgagtaggtggaagcagtagaaatgtcccctgttatacagttgagagagtccaggctcaaagaggttaagtgtcttgcccagggccacacagcacataaggagtagagctgggattggaaccttgcttctcatgcagggaggaatgaatgcaataacaacctccacatttaccctaaaaaatattaatagagcttttattgagcacttactgtgtgtgccagggttgactgtgtgacctctcatcaacaactctgtaagctgatgatagtaattataataagagctaatagttattaacttcttaattttttactaatttatgaactacatatcattatgactccccgtcttttttttttttagacagagtytctctctcttgcccaggctggaatgcagtggcacgatctgagctcattgcaacctctgcctcccagattcaagcgattcctacctcaccctggtcaagtagttgggattacaggcccccgccaccgtgcctggccaatttttgtctttttagcagaaacggggtttcaccatgttgaccaggctggtctcgaactcctggcctcaagtgatccaccttccttgaactcccaaagtgcacaaagtgctgggattacaggcgtgagccactgcgcccggcctgtaacactcattttagagatgataatactgaggctgagagagtaaaacagctgcctgagaccacaatgtagggagttttagggccctctgattcctctgccctctgtttcctaccttcaggaaaaggagcctgggcaggtatggaaaagactggggggcctcagtgccaccctaaacaagcctagctaagggtgagctttactggatgaattcagcctggaggctccttctcaggagacccctccacggacagagtccaccagctccatcattagaatgaggccagagaagcaaagtgacttgaaccaggacacccagcatcgg

SEQ ID NO: 682610 - DNA, 612 bp, Homo sapiens
ccagggccaggcacggtgtctcgtgcctgtaatcccagccatttgtgaggcygagacaggcaggtcacttgaggtcagcagttcgagaccagccgggccaacatggtggaacccccatctctacaaaaaaatacaaaaattagccgagcatggtggtgcacgtctgtagtcccagctactctagaggctgacgcagaagaatcacttgagccaaggaggcagaggctgcaaataagccgagattgcgccactgcactccagcctgggcaacagagcaagactccatctcaaaacaaaaataatttttttttcgtagaggcagggtctcattctattgtccaggctggtctcaaacaccgagactcaagggatcctcctgccttggcttcacaaagtgatgggattaaaggtgtgagcgccactgcacccacccctgaaggctctaattctacatctgtgttttgttaaaaaaaaaaaaaaaagatggcgtggtcgctcatgcctgtaatcccagcactttaggaggccgaggcaggtggatcatctgacattacgagttccaggcccgcctgaccaacatggtgaaaccccgtctctactaaaaatacaaaa

SEQ ID NO: 682611 - DNA, 612 bp, Homo sapiens
ccagggccaggcacggtgtctcgtgcctgtaatcccagccatttgtgaggccgagacaggcaggtcacttgaggtcagcagttcgagaccagccgggccaacatggtggaacccccatctctacaaaaaaatacaaaaattagccgagcatggtggtgcacgtctgtagtcccagctactctagaggctgacgcagaagaatcacttgagccaaggaggcagaggctgcaaataagccgagattgcgccactgcactccagcctgggcaacagagcaagactccatctcaaaacaaaaataatttttttttcgtagaggcagggtctcaytctattgtccaggctggtctcaaacaccgagactcaagggatcctcctgccttggcttcacaaagtgatgggattaaaggtgtgagcgccactgcacccacccctgaaggctctaattctacatctgtgttttgttaaaaaaaaaaaaaaaagatggcgtggtcgctcatgcctgtaatcccagcactttaggaggccgaggcaggtggatcatctgacattacgagttccaggcccgcctgaccaacatggtgaaaccccgtctctactaaaaatacaaaa

SEQ ID NO: 682612 - DNA, 594 bp, Homo sapiens
tgcctcccaggttcaaggaattctcctgcctcagcctcctgagtagctgggattacaggctcccggctcactgcaatctctgcctcccgggttcaagcaattctcctgcctcagcctcctgagtagctgggattacaggctcccggctcactgcaatctctgcctcccgggttcaagcaattctcctgcctcagcctcctgagtagctgggattacaggtgcccagcaccatgcccaactaatttttttttttaattttttatttttagtagagttggggtttcaccatgttggccaggctggtctcgaactcctgacctcaggtgatccacctgcctcggcctcccaaagtgctgggattacagacgtgagccaccatgcccagcctggaatgactgctttattttcccctctakaagttacgagagtcttcgtgtgtcatctccatgccaggagcctcatggcctcgttttcccggggggccactccccgtgtatatacctcagacactgctattctattagaaaaacatgtgaagttctctgattgggggaaagatccatttcctgctcatgttgatttcaacaaaagaaa

SEQ ID NO: 682613 - DNA, 594 bp, Homo sapiens
tgcctcccaggttcaaggaattctcctgcctcagcctcctgagtagctgggattacaggctcccggctcactgcaatctctgcctcccgggttcaagcaattctcctgcctcagcctcctgagtagctgggattacaggctcccggctcactgcaatctctgcctcccgggttcaagcaattctcctgcctcagcctcctgagtagctgggattacaggtgcccagcaccatgcccaactaatttttttttttaattttttatttttagtagagttggggtttcaccatgttggccaggctggtctcgaactcctgacctcaggtgatccacctgcctcggcctcccaaagtgctgggattacagacgtgagccaccatgcccagcctggaatgactgctttattttcccctctataagttacgagagtcttcgtgtgtcatctccatgccaggagcctcatggcctcgttttcccggggggccactccccrtgtatatacctcagacactgctattctattagaaaaacatgtgaagttctctgattgggggaaagatccatttcctgctcatgttgatttcaacaaaagaaa

SEQ ID NO: 682614 - DNA, 577 bp, Homo sapiens
caagagtgtctcctctccataaacaaattaacaggagaaactcagccccactaaaacacacacaaatttaggaaattgacaaaaacctaagagctgagaaaatatgggttctggagtctcagtgtttggcatcaagtcatggctccactttctcctcgctgtgcgactcctggaggggaacctagtgtgcctggtcctcagtttccctgtctgtagaatgggctgggaaaaactatgcagattcttggaaccagggtgacacaagcaaggcactggcctctggcataaaagttaaggcgtgccaaaaccgtcttcaagataagttatatatataaatatatatgtatatatggagagagagagacagagacagagagacagagagagacagagtcttactctgtggcccaggctggagtgcagtggtrcagtctcggctcactgcagcctctgcctcgcggtttcaagcaattctcctgcctctgcctcccaagtagctgggattacagccacccaccaccatgcccagctaattattatatttttagtagagacagggtttcaccatgttggcgag

SEQ ID NO: 682615 - DNA, 577 bp, Homo sapiens
caagagtgtctcctctccataaacaaattaacaggagaaactcagccccactaaaacacacacaaatttaggaaattgacaaaaacctaagagctgagaaaatatgggttctggagtctcagtgtttggcatcaagtcatggctccactttctcctcgctgtgcgactcctggaggggaacctagtgtgcctggtcctcagtttccctgtctgtagaatgggctgggaaaaactatgcagattcttggaaccagggtgacacaagcaaggcactggcctctggcataaaagttaaggcgtgccaaaaccgtcttcaagataagttatatatataaatatatatgtatatatggagagagagagacagagacagagagacagagagagacagagtcttactctgtggcccaggctggagtgcagtggtgcagtctcrgctcactgcagcctctgcctcgcggtttcaagcaattctcctgcctctgcctcccaagtagctgggattacagccacccaccaccatgcccagctaattattatatttttagtagagacagggtttcaccatgttggcgag

SEQ ID NO: 682616 - DNA, 1185 bp, Homo sapiens
ggtagcgatagataggtaaatagtatctcacaaatgtatcatatgtattttattttattttttcttagttgttagttgtggagacaggatctcactcttgcccaggctggagtgcagtggcgtgatcttggctcatggcagcctcaaccccctgggctcaagtgatcctcccatctggaggaggaaattttgcctgggcctcccttactgttctcctggcctgcaggctcctgttttgagatatttctatacccagaactgacctggtccctcccctgctctcaaccctctcatggctccccagcaccctccggggcaaaacccaaacacctcagtatggtgttcagggttgagactctccaatctcacacgtcccgatgtcacattcagacaccacatgtggcgggccacaccagggtctgtatctgccctatgcccctgcctgtcccctctaccagaatgccctttccccgttgccatggccaccattctggtctctccgacaaccccctctcggagttccagtggcttctcccccctctggctcagaggcccaggaaagagagagaagaccaaccaaggggtggctggagtcccaaggccatgaactttcaggaagtgaggaggggtctggcagggaagggaggcctggggctgggcagagggcagggaggggaagggtcctgacctctgatctcccccccagaatgtgaccctggccatggccttgttcaccatcctgacctccatctatttcttcaacaaggtgagcgggagaagagcggaggtgggggctgagtctctgtctcgctggtccagttctgtcatcttggtctctctttctctcccacatctctgtatatgtccctgttttcctctctcaggctcagcagtgagaagacacaggacctccccgcacaagagccctgcctctccctctgccatcgctctgaggccagataaatgtaactgaatccgcacatcctgctccgccgacccactgcccttgcgcccggcctcgggcctacaccacacctggggctctgtgtttcagaagggagtggggtgggggtccggastccagggtctgaggtaggagagtggtgaggacccaccctcgcaggtttgaggctaggagctgggaatctgcgctgggttttcagggatgagtaggagtctgtgggg

SEQ ID NO: 682617 - DNA, 666 bp, Homo sapiens
ttttgtagctcacataggtggtagagatgacattttgcactgagacaagcaggtcagacaaccagccgtagggttacctggttccagggacaagaaagggttcagggaggcctgagcttatcaaatcccgtgacatgtttgtaatgtctgcctctcccctcaggcactcctggctgcagaagcacttagggaacccacacagggaagtggagggtgttcaatcccctcattggtcttgaccccatccacaggttctctagcttgtggtgtgctgggactcttaagtgccattttttcagtcctttgatccgaggaccctggagaatctctaaagacaggatactgaggccatggcaggttatatgcaagtatgcccatttctgtcagccagtgtaaacactcttgtaagattaacccaggatttgctaccaggttgtgaaatgcttagagataaaaaggatcaaagtcagaaggtgatattaccacagttctactggctaccggcttcatctggttggaccttsgtgcacacactatgggttgagggaagaggaagaaatgtcagagataaggctcctgccataatccaggtgagggttagtggatcagatacgtggcaaatcacatgagtctggatacaggattcactttttgtaaagagacagc

SEQ ID NO: 682618 - DNA, 652 bp, Homo sapiens
agtgcagtggcgcgatctcggctcactgcaagctccgcctcccgggttcacgccattctcctgcctcagcctcccgagtagctgggactacaggcaccagccaccacgcccggctaattttttgtatttttagtagagacaggtttcaccgtgttagccaggatggtctcaatctcctgacctcaggtgatccccttgcctcagcctcccgaagtgctgggattacaggcgtgagccaccacgcccggcacattagtctgagaaacacggtctagaacatacaccctgcatctgctggcaccagcagttgaacaagagctaagatggttgagggcagtgaggggcccactcctgccccgttctgttctgtatctcygacaacataggatcttcttcctactttctcagcccccaacccagtgagaaacctccatatggagactcagaccaacagctccatcgccctatgctgggaagtccccgatggcccataccctcaggactacacctactgggtagagtacactggagacggtggtggcacagagacccgaaacacaacaaataccagtgtgacagctgagagacttgagcccggaaccttgtacacattctctgtatgggcagaaaaaaatggagcacgtggctccag

SEQ ID NO: 682619 - DNA, 588 bp, Homo sapiens
tccccaggtctcggttccaatatcaccttctcagcggggacttctgtgacccacttcccatttcacactccagctacaccctcacccccacctctggtccatattacctcctctgcatgcttctcttgattctttctgcttccactgtctggatcctgatgacaccaaggtctcaaggggagaatagagtcagaaggtgggggctatgctgggctgaccacatktgagtagagctaccccctggcttcatatgaaagtgctggggtactttgcagatatacctcttgtgcccccatccctgtcccagagattcccattcacacaggttgggacccaccctcgataatacagtgcccaacatgattctaatctatatccagccctgaacaccaaggctctgtgtcctctatttctgagggctgagcccagcctgggatccagagagggaaagggggctgtgctctgcatggggtttaatcagggctgggtctcctccccactgctgcagcatgtgtgtgagcttctccaggaggggagggagttctgaagaaaggggtcagaagactcatgtattggttttcctgtagg

SEQ ID NO: 682620 - DNA, 1429 bp, Homo sapiens
cagtctttacccaaaagtcatttggaagcaggttgtttaatttccatgatgactctaggccgggcatggtggctcatgcctgtaatcccagccacttgggaggctgaggcaggagaatcgcttgaatccaggaggcagaggtttcagtgagccaagatcacgccactgcactccagcccgggcgacagagtgaggctgcgtctcaaaaaaaaaaaaaaaaaaaaaaattgccccttcttaagtttgcatttagatctcttctcctttgaccacttttaatttatcttcacttctgatatgacatttaatttttcrttcattttctgtctattattgttccttttttaacttaaaaaaaaattctgtgctttatgaatttctgtttcaaggtgtttttcccatctccaaatgcttatttgaaaatgtttcctttcctcttggttcatttcttctggtgtgtgtgtgcgcgcgcccgcgtgcatgtgtgtactcgggtctcattttctgctttcttcctgcagtacctcgtttatgggagatgcacttcgcttttcttatttttttagtagagagggggtttcactggtttagccagaacagtctcgatctcctgacctcgtgatccgcccacctcgggctcccaaagtgctgggattccaggagtgagccaccgcgcccggccgtccactttgcttcttgcagaggctgatggtttgagtaatttccgagattcatagctcgagcgcgccctgttctgtctatgcagtgaagggcagctttttgcatccgcggctttttgttgccaaggaggaatgtgcagtggccagatttgtttcttccccttttgttgctgttgttgttgttgctgctgctgttattgttgttgttgttgtattttattttgtagcatcctaaagtgtcccctccttctatttcttatccttatccaggtagggtttagaaaagctaacttaaggggcaggggagagagagaaagagaggaagagaaaatgagaatgaatgacaatacatgaacccatgggtcaacctttatttcaaggcagcccaaaaggacggctctcccttctctttcactctcttctctaggtgtgaagctgatgcagcacaggcgagccccaaaattgaggcttagcccgggggggttcttggcttctcctagaaactaattcaagaagccgggcgcactggctcacgcctgtaatcccagcactttgggaggctgaggcggatggatcacttgaggtaaggagttcgagaccagcctggccaacatgctgaaaaccccatctctactaaatatacaaaaattacccgggcatggggacgggtgcctgtaatcccagctgttcaggaggctgaggcaggggaatcgcttgaacccgggaggcggaggttgcagtgaacagag

SEQ ID NO: 682621 - DNA, 1429 bp, Homo sapiens
cagtctttacccaaaagtcatttggaagcaggttgtttaatttccatgatgactctaggccgggcatggtggctcatgcctgtaatcccagccacttgggaggctgaggcaggagaatcgcttgaatccaggaggcagaggtttcagtgagccaagatcacgccactgcactccagcccgggcgacagagtgaggctgcgtctcaaaaaaaaaaaaaaaaaaaaaaattgccccttcttaagtttgcatttagatctcttctcctttgaccacttttaatttatcttcacttctgatatgacatttaatttttcgttcattttctgtctattattgttccttttttaacttaaaaaaaaattctgtrctttatgaatttctgtttcaaggtgtttttcccatctccaaatgcttatttgaaaatgtttcctttcctcttggttcatttcttctggtgtgtgtgtgcgcgcgcccgcgtgcatgtgtgtactcgggtctcattttctgctttcttcctgcagtacctcgtttatgggagatgcacttcgcttttcttatttttttagtagagagggggtttcactggtttagccagaacagtctcgatctcctgacctcgtgatccgcccacctcgggctcccaaagtgctgggattccaggagtgagccaccgcgcccggccgtccactttgcttcttgcagaggctgatggtttgagtaatttccgagattcatagctcgagcgcgccctgttctgtctatgcagtgaagggcagctttttgcatccgcggctttttgttgccaaggaggaatgtgcagtggccagatttgtttcttccccttttgttgctgttgttgttgttgctgctgctgttattgttgttgttgttgtattttattttgtagcatcctaaagtgtcccctccttctatttcttatccttatccaggtagggtttagaaaagctaacttaaggggcaggggagagagagaaagagaggaagagaaaatgagaatgaatgacaatacatgaacccatgggtcaacctttatttcaaggcagcccaaaaggacggctctcccttctctttcactctcttctctaggtgtgaagctgatgcagcacaggcgagccccaaaattgaggcttagcccgggggggttcttggcttctcctagaaactaattcaagaagccgggcgcactggctcacgcctgtaatcccagcactttgggaggctgaggcggatggatcacttgaggtaaggagttcgagaccagcctggccaacatgctgaaaaccccatctctactaaatatacaaaaattacccgggcatggggacgggtgcctgtaatcccagctgttcaggaggctgaggcaggggaatcgcttgaacccgggaggcggaggttgcagtgaacagag

SEQ ID NO: 682622 - DNA, 612 bp, Homo sapiens
tgaggtatgtaggaaatgcaaataaatgctctgaacgtcttctctatcctgggcactatattttatttaacttrtcagaacaattttgtgaggcaggcattgtttccatcatcttagagataaagttcagaaatgttaggttccattaaattaaaaaagttaagcatatggcaattcaatttgaatccccccggaggggttggttcagtaggaagtaacggcccaaaccctggcacaggctcaaccacttaccaaccatctgccctcagtttactctgctgtaaaatggagagagaacattaggatgtcaagtcctccccagtttgaatatcctaatattcttggaatgaaggaaactgcctgatagctttactttttttttttcttaaagcagcatttttcaaccattgttccttcatgagccattcaacctgtaatatttacctccccctccttagaacttgaattttttgttttgttactttgcatggttcctgatgaagtgattttaggcaaaggctatttgatttaaaaccagcatgttttagttaaatattacataactgttacaaagttcatttaattgaggctttaagaacagtcataacttta

SEQ ID NO: 682623 - DNA, 612 bp, Homo sapiens
tgaggtatgtaggaaatgcaaataaatgctctgaacgtcttctctatcctgggcactatattttatttaacttatcagaacaattttgtgaggcaggcattgtttccatcatcttagagataaagttcagaaatgttaggttccattaaattaaaaaagttaagcatatggcaattcaattygaatccccccggaggggttggttcagtaggaagtaacggcccaaaccctggcacaggctcaaccacttaccaaccatctgccctcagtttactctgctgtaaaatggagagagaacattaggatgtcaagtcctccccagtttgaatatcctaatattcttggaatgaaggaaactgcctgatagctttactttttttttttcttaaagcagcatttttcaaccattgttccttcatgagccattcaacctgtaatatttacctccccctccttagaacttgaattttttgttttgttactttgcatggttcctgatgaagtgattttaggcaaaggctatttgatttaaaaccagcatgttttagttaaatattacataactgttacaaagttcatttaattgaggctttaagaacagtcataacttta

SEQ ID NO: 682624 - DNA, 612 bp, Homo sapiens
tgaggtatgtaggaaatgcaaataaatgctctgaacgtcttctctatcctgggcactatattttatttaacttatcagaacaattttgtgaggcaggcattgtttccatcatcttagagataaagttcagaaatgttaggttccattaaattaaaaaagttaagcatatggcaattcaatttgaatccccccggaggggttggttcagtaggaagtaacggcccaaaccctggcacaggctcaaccacttaccaaccatctgccctcagtttactctgctgtaaaatggagagagaacattaggatgtcaagtcctccccagtttgaatatcctaatattcttggaatgaaggaaactgcctgatagctttactttttttttttcttaaagcagcatttttcaaccaytgttccttcatgagccattcaacctgtaatatttacctccccctccttagaacttgaattttttgttttgttactttgcatggttcctgatgaagtgattttaggcaaaggctatttgatttaaaaccagcatgttttagttaaatattacataactgttacaaagttcatttaattgaggctttaagaacagtcataacttta

SEQ ID NO: 682625 - DNA, 650 bp, Homo sapiens
aaggtggaaagaacccacatgtccgtgagcaaatgagtaaataaasaaaatatggtagacacatacaatggagtattattcagcattaaaaaggaacaaaatttgaatagatgccaccacatggatgcactttgaaaatactaggttaagtaaaataagccagacacaaaaagacaaatattatatgattctacttatatgaggtaactagaatagtcaaatacatagagacaaaaagcagaatggtggttgttaggagctggagggagggaggaatggggagttattatttaatgggtgcagagtttcagtttgggacaatgaaaaggctctggagatagattgcacaatttgaatgcattgaatgccactgaactgtgcactggttccagtatatagggaagatctcacgatgaagggatctgcatttattcagccagtccatcaacccactcatgtagacaacaaatatggattgaatgcctactatgtgcccagcctagtgctaggttctgggctacccaaaaagggagtggctgaaatggtagactctggactacagaaaccatgagattcaggtgggaatccaagatcaatggactcatcaggagttaagcttgtctttctctgaaatatggggattataattg

SEQ ID NO: 682626 - DNA, 650 bp, Homo sapiens
aaggtggaaagaacccacatgtccgtgagcaaatgagtaaataaagaaaatatggtagacacatacaatggagtattattcagcattaaaaaggaacaaaatttgaatagatgccrccacatggatgcactttgaaaatactaggttaagtaaaataagccagacacaaaaagacaaatattatatgattctacttatatgaggtaactagaatagtcaaatacatagagacaaaaagcagaatggtggttgttaggagctggagggagggaggaatggggagttattatttaatgggtgcagagtttcagtttgggacaatgaaaaggctctggagatagattgcacaatttgaatgcattgaatgccactgaactgtgcactggttccagtatatagggaagatctcacgatgaagggatctgcatttattcagccagtccatcaacccactcatgtagacaacaaatatggattgaatgcctactatgtgcccagcctagtgctaggttctgggctacccaaaaagggagtggctgaaatggtagactctggactacagaaaccatgagattcaggtgggaatccaagatcaatggactcatcaggagttaagcttgtctttctctgaaatatggggattataattg

SEQ ID NO: 682627 - DNA, 1812 bp, Homo sapiens
cacagtcgaattctaccagatgtgtaaagaaaagccggcaccaatcctactgaaattattccacacaattgaggaggagcaactgctctctaactcattctatgaggtcagagtcattctgataccgaaacctggcagagacacaacgaaaaaaggaaaataggtaaagtaatacatatgttaatgatcttgatttagccattctacggtatatacatatttmaaaacaatatgtacatgataaatatgtacaatttgtcaattaaaaatatataaaaggaagaggaaaaaattcaaatggcgtagaatttgaaaggagaagatacagaacaaactccagtgtcttctttattcaactatatatacacacgttcaatggaccgggagcagtggctcaagcctgtaatcacagcactttgggaggtcaaggcgggcagatcacctgaggtcgggagttcgagaccagcctgaccaacagagagaaaccccagctctactaaaaatacaaaattagccgggcatggtgacgcatgcctgtaatcccagctactcgggagggtgaggcaggagaatcgcttgaactcaagaggtggaggttgtggtgagccgagatggcaccattgcactccagcctgggcaacaagagcgaaactcagtctcaaaaaaaaaaaaaaaaaaaaaaaaaaaggatttaatgaatgaatgatgagaccgttggtgacatctcccaccttctccctctcactccactgcagccacacggggctcctcactgttcccgtagcagcaggcatgtgcccccacagggcctctgtactggctgttcccactgcccgaacaccctcatgcaccatctgcactgtccaatacggccgcctctggccacacatggctactgagcagttgaacatggctggtccaaaccaagatttccaagacgtcgtgtggtaaaaaaaacaacataaaattttgcaaaaatgtttctattgattatgttaaaattatgatgttttaggtatattaggttaaatcagctattttatcaaaatgaatctcgcctgtttgtttttgcttttttttttttttttttttttttttgagatggagtctcgctctgtcgcccaggctagagtacaatggcgtggtctcagctcactgcatcactgcaacctctacctcccaggttcaagcgattctcctacctcaccctcccaagtggctgggattacaggcgtgtgccaccacacccagctaatttttgtatttttgtagagacagggtttcaccatgttggccaggctggtctcgaactgctgacctcgtgatctacctgcctcggcctcccaaagtcctgggattacaggtgtgggccactgcgccggccatgtttctcgacttctgctggcaagcatgttccagtatttgcatggctcctagccctcatctccatttctctgcacagatgttatcttccccatgaggtctgccttatacatgaggcgtgtattataaagtgcaactgccaattcgccaaccccgttgtttcttctctccagaacactaggcaccatctgatctcctatgccttttccttattgtcagatactgaactctcagatacagttccccttcctccctccagggggcgccatggaacgcagggccctcactggccctggggactgggtgacgtcaggggtgagcctctggtgattggctccctcaccctgcgtaagatcaaagggcctaaaggtcagccccgacacccggagccattgtggctccggccggttgcgcgggccctcggaccct

SEQ ID NO: 682628 - DNA, 595 bp, Homo sapiens
aaggagaggatttctactctgttctgtgggacgacagcatcaaattgcatgttccgcccaggcagggctttgcatttcatattctagttcgcttcctctcccagacaattccagggcttttaaattaaaatactaaaattaactttaattgcaggaactatcttaggtccaatcactgtcccctactttgaccctctcatagagatcccaggtcccagactgcttggctgctggtcaccgatagggtctttcctcaaaaacctggagaacagacgcgcccagagacaggccgaaggcagcgcagaccccgcccctcaccgccccaccctctcttctctcgggtctcgcccatccctggcctcagctgcgcgcggtttcctggaaacccggaagtgaatcatggggcgtgaactcgcaagcgcagtttcctgaagacccggaagccgatcgcgtggggagccggtcttggagcagcgggtgagtttccctttgtctagattagatccgcttccagcgcttctgtacctggtgttggcggaggggttcttasggatcttaaaatcctcccgccgttccctccatcctaggtatatta

SEQ ID NO: 682629 - DNA, 357 bp, Homo sapiens
agtcttcactcaaaattctcaccttgcaaatcatcacagaatccacactggagagaaaccttacaaatgtaatgagtgtggcaaggtcttcaacagaaatgcacaccttgcacgacatcagaaaattcatagtggagagaaaccttacaaatgtaaggaatgtggcaaagcattttcagggggttcaggccttactgctcatcttgtaattcacactggagagaaactttacaaatgtaataaatgyggcaaggtcttcaatcgaaatgcacaccttaccagacatcaaagaatccatactggagagaaaccttatgaatgtaaagaatgtggcaaggtcttcaggcacaagttttg

SEQ ID NO: 682630 - DNA, 3171 bp, Homo sapiens
ggatccctcttctggtccccaacccctggcccagtaccagtccatagcctgttaggtactgggctacacagtgggtgagcagcgcttcgtctgtatttacagccactccccatcactcgcatcaccgcctgagctctgcctgtcagatcagcagcagcactgcattctgaaaggcatgcaaaccctattgtgaactgcccatgtgagggatctaggctgcatgctacttacgagaatctcatgcctgatgatctctcaccctctcccatcgccccctgaagggaccatctagttgcaggaaaacaagctcaggggctcccaatgattctacattatggtgagttgtgtaattttttccatgtagtaataatagaatgtacaaatgtaacacactttgtatctcaaaagcatccccaccccctacatctgtggaaaatttttcttatacataactcatccctggtgccaaaaaggttggggactgctgccacgtgaccttgcacatggccctgtatccaaatgtaagccacattctgcttctctaccatgggcctggggcagtaacttctcgagcttcccatctcccatggtgagaacaccaagaaatagatgaaatagtgatgcccagcctgacagcagtcactctgaaagcattacacagcaccttcgtccttactatcttccaggccatttccatcatcatctctggcattctaatgccagactgctttgatttaaaataccagatttcagaggctgaggcaggagaatggcatgaatgcaggaggtggagcttgcagtgagtcgagattacatcactgcactccagcctgggcaacagagcaagactccaccacgaaaaaaagattttgcaagcaacttcacttacattttggaagacttagtatgacaaatacacaaagaaaaatgactagaaaactatgtaactactgtcctaacagtggttatccacaaaggatgrgttgacaagctattctagttctgtgttcccctcccccccccaacaaacagtaaagcctttctcacttttttttaattcaccatttaacttgtgcttgtagaagagcaactacacagccagagcttgcagaagaaaagcctgaagcttaaaaatatcaggaacacagcagcaatgtcacagtgttattgaaagcacactcaaaatgtcatgaaaaaataatgctgggtttaccgaagggggatttacattcatctggtgacaggttgtgcgctcagtattttgagttctttaatccccaaaagccacagtgtctgtcctgtaggcatccatgtccccagccccgagtcttttgggttcttgcctgggagtcacacttacctcctgcttttctgggcacgcctgtcctgccctccaccttccaagaccatttctatttctggttgaaacgttgctcagtgtgattccttggggtctgtccatctgtacctctcataaagcagcaagcaacagctgccttgtcacatccccaccttgtgccaccacctaactagcatcttgggggctgggcttggatgcatttatatctagtcatcgactctgggctcagagtgcacacattcaacatcaaaaccaacctctgctcctgattagccataggatttaccctctgtgctttattttccatgcccttaagattaggatggtaattacagcacccatttcacatggccggcttaaggatgttatgagaattggtgttagtcctttagttcaagatttgacaagcagtggcttttttaatccttttaaaataaagtacctcgtggtgttgggatccggagaaccagacccagacctgccttcaaggaacccttgggtactgccagagccatttctggatcagttgtggatggtggaagtcttggagacccatttcaaaccaagaggtaggaggtaaaggccttgatggatgtcagcatagttcacagtggaattagatttcacggggcacccatcacgcagtcctgaggcccaggtgttgcctaggaatgaattcaaaggctattcagcctggcatgctctgatactgcccatcaggacccccgcagccatgcagtacagaaggcagagcaaggccactccctcccactccacagatccaaggggctaagacacagggagaacattctccatgatcttcacatcctggaggcagaactgggttttcaaagtggtgagactcacagacttatgagggagctaggtcgtggaagatgctggccacatccccgccacacacacagatcagtcctagctgggttgcagggatccagccctctaagcttcaaaggcagctcctagtaagtggagtattgaccggctcgccagacccagatcacaggtgaaacaaagtgaaaagttagtctctcctcgcagccattttcactgatgagcagttgaggctgtccgattaatgtcagccgcatgctggtgacaggacacaacgcagtgtaccccaagaggcttattaaaaagaacagccactcctggggccctctgagggtgccctcacacacagacccccttttccccaactccccagtgctgtgttaagttgctagcagcagggaggatggagatggagtttctgaaatgaacaccaaagcacatgtcaggaccacgcgtggcctggcagggggctcattaccgcagcttacatccttctccctgcaggggaggggaggcagtgccctggggacttatgggctgtctcctaggtgaccgtggcatcccaggagttccttctccagttgccttccaggtgagcttagagccaggtgcatccctgggggcatgatgtccccagagtgtctaccagcttggtgacaatggaccctgcaacccaggaggcctggcccctcatggatttagggatggaatcatctgtgccgttttccttcccgtgttttctgcccagtagtttgaaccgcatttctaaggccgttcactctcctgtgtgaccccaaaatggctctggcaataccaggtctgtggagtaagattgaggtctgacctgagcatagggttcacagaggagtgaaccctgctggaggtggccaagttcagaagtgaagggcgagggcattcactaagcagcatccccatgggccacgctctatcccagcatc

SEQ ID NO: 682631 - DNA, 3171 bp, Homo sapiens
ggatccctcttctggtccccaacccctggcccagtaccagtccatagcctgttaggtactgggctacacagtgggtgagcagcgcttcgtctgtatttacagccactccccatcactcgcatcaccgcctgagctctgcctgtcagatcagcagcagcactgcattctgaaaggcatgcaaaccctattgtgaactgcccatgtgagggatctaggctgcatgctacttacgagaatctcatgcctgatgatctctcaccctctcccatcgccccctgaagggaccatctagttgcaggaaaacaagctcaggggctcccaatgattctacattatggtgagttgtgtaattttttccatgtagtaataatagaatgtacaaatgtaacacactttgtatctcaaaagcatccccaccccctacatctgtggaaaatttttcttatacataactcatccctggtgccaaaaaggttggggactgctgccacgtgaccttgcacatggccctgtatccaaatgtaagccacattctgcttctctaccatgggcctggggcagtaacttctcgagcttcccatctcccatggtgagaacaccaagaaatagatgaaatagtgatgcccagcctgacagcagtcactctgaaagcattacacagcaccttcgtccttactatcttccaggccatttccatcatcatctctggcattctaatgccagactgctttgatttaaaataccagatttcagaggctgaggcaggagaatggcatgaatgcaggaggtggagcttgcagtgagtcgagattacatcactgcactccagcctgggcaacagagcaagactccaccacgaaaaaaagattttgcaagcaacttcacttacattttggaagacttagtatgacaaatacacaaagaaaaatgactagaaaactatgtaactactgtcctaacagtggttatccacaaaggatgagttgacaagctattctagttctgtgttcccctcccccccccaacaaacagtaaagcctttctcacttttttttaattcaccatttaacttgtgcttgtagaagagcaactacacagccagagcttgcagaagaaaagcctgaagcttaaaaatatcaggaacacagcagcaatgtcacagtgttattgaaagcacactcaaaatgtcatgaaaaaataatgctgggtttaccgaagggggatttacattcatctggtgacaggttgtgcgctcagtattttgagttctttaatccccaaaagccacagtgtctgtcctgtaggcatccatgtccccagccccgagtcttttgggttcttgcctgggagtcacacttacctcctgcttttctgggcacgcctgtcctgccctccaccttccaagaccatttctatttctggttgaaacgttgctcagtgtgattccttggggtctgtccatctgtacctctcataaagcagcaagcaacagctgccttgtcacatccccaccttgtgccaccacctaactagcatcttgggggctgggcttggatgcatttatatctagtcatcgactctgggctcagagtgcacacattcaacatcaaaaccaacctctgctcctgattagccataggatttaccctctgtgctttattttccatgcccttaagattaggatggtaattacagcacccatttcacatggccggcttaaggatgttatgagaattggtgttagtcctttagttcaagatttgacaagcagtggcttttttaatccttttaaaataaagtacctcgtggtgttgggatccggagaaccagacccagacctgccttcaaggaacccttgggtactgccagagccatttctggatcagttgtggatggtggaagtcttggagacscatttcaaaccaagaggtaggaggtaaaggccttgatggatgtcagcatagttcacagtggaattagatttcacggggcacccatcacgcagtcctgaggcccaggtgttgcctaggaatgaattcaaaggctattcagcctggcatgctctgatactgcccatcaggacccccgcagccatgcagtacagaaggcagagcaaggccactccctcccactccacagatccaaggggctaagacacagggagaacattctccatgatcttcacatcctggaggcagaactgggttttcaaagtggtgagactcacagacttatgagggagctaggtcgtggaagatgctggccacatccccgccacacacacagatcagtcctagctgggttgcagggatccagccctctaagcttcaaaggcagctcctagtaagtggagtattgaccggctcgccagacccagatcacaggtgaaacaaagtgaaaagttagtctctcctcgcagccattttcactgatgagcagttgaggctgtccgattaatgtcagccgcatgctggtgacaggacacaacgcagtgtaccccaagaggcttattaaaaagaacagccactcctggggccctctgagggtgccctcacacacagacccccttttccccaactccccagtgctgtgttaagttgctagcagcagggaggatggagatggagtttctgaaatgaacaccaaagcacatgtcaggaccacgcgtggcctggcagggggctcattaccgcagcttacatccttctccctgcaggggaggggaggcagtgccctggggacttatgggctgtctcctaggtgaccgtggcatcccaggagttccttctccagttgccttccaggtgagcttagagccaggtgcatccctgggggcatgatgtccccagagtgtctaccagcttggtgacaatggaccctgcaacccaggaggcctggcccctcatggatttagggatggaatcatctgtgccgttttccttcccgtgttttctgcccagtagtttgaaccgcatttctaaggccgttcactctcctgtgtgaccccaaaatggctctggcaataccaggtctgtggagtaagattgaggtctgacctgagcatagggttcacagaggagtgaaccctgctggaggtggccaagttcagaagtgaagggcgagggcattcactaagcagcatccccatgggccacgctctatcccagcatc

SEQ ID NO: 682632 - DNA, 3171 bp, Homo sapiens
ggatccctcttctggtccccaacccctggcccagtaccagtccatagcctgttaggtactgggctacacagtgggtgagcagcgcttcgtctgtatttacagccactccccatcactcgcatcaccgcctgagctctgcctgtcagatcagcagcagcactgcattctgaaaggcatgcaaaccctattgtgaactgcccatgtgagggatctaggctgcatgctacttacgagaatctcatgcctgatgatctctcaccctctcccatcgccccctgaagggaccatctagttgcaggaaaacaagctcaggggctcccaatgattctacattatggtgagttgtgtaattttttccatgtagtaataatagaatgtacaaatgtaacacactttgtatctcaaaagcatccccaccccctacatctgtggaaaatttttcttatacataactcatccctggtgccaaaaaggttggggactgctgccacgtgaccttgcacatggccctgtatccaaatgtaagccacattctgcttctctaccatgggcctggggcagtaacttctcgagcttcccatctcccatggtgagaacaccaagaaatagatgaaatagtgatgcccagcctgacagcagtcactctgaaagcattacacagcaccttcgtccttactatcttccaggccatttccatcatcatctctggcattctaatgccagactgctttgatttaaaataccagatttcagaggctgaggcaggagaatggcatgaatgcaggaggtggagcttgcagtgagtcgagattacatcactgcactccagcctgggcaacagagcaagactccaccacgaaaaaaagattttgcaagcaacttcacttacattttggaagacttagtatgacaaatacacaaagaaaaatgactagaaaactatgtaactactgtcctaacagtggttatccacaaaggatgagttgacaagctattctagttctgtgttcccctcccccccccaacaaacagtaaagcctttctcacttttttttaattcaccatttaacttgtgcttgtagaagagcaactacacagccagagcttgcagaagaaaagcctgaagcttaaaaatatcaggaacacagcagcaatgtcacagtgttattgaaagcacactcaaaatgtcatgaaaaaataatgctgggtttaccgaagggggatttacattcatctggtgacaggttgtgcgctcagtattttgagttctttaatccccaaaagccacagtgtctgtcctgtaggcatccatgtccccagccccgagtcttttgggttcttgcctgggagtcacacttacctcctgcttttctgggcacgcctgtcctgccctccaccttccaagaccatttctatttctggttgaaacgttgctcagtgtgattccttggggtctgtccatctgtacctctcataaagcagcaagcaacagctgccttgtcacatccccaccttgtgccaccacctaactagcatcttgggggctgggcttggatgcatttatatctagtcatcgactctgggctcagagtgcacacattcaacatcaaaaccaacctctgctcctgattagccataggatttaccctctgtgctttattttccatgcccttaagattaggatggtaattacagcacccatttcacatggccggcttaaggatgttatgagaattggtgttagtcctttagttcaagatttgacaagcagtggcttttttaatccttttaaaataaagtacctcgtggtgttgggatccggagaaccagacccagacctgccttcaaggaacccttgggtactgccagagccatttctggatcagttgtggatggtggaagtcttggagacccatttcaaaccaagaggtaggaggtaaaggccttgatggatgtcagcatagttcacagtggaattagatttcacggggcacccatcacgcagtcctgaggcccaggtgttgcctaggaatgaattcaaaggctattcagcctggcatgctctgatactgcccatcaggacccccgcagccaygcagtacagaaggcagagcaaggccactccctcccactccacagatccaaggggctaagacacagggagaacattctccatgatcttcacatcctggaggcagaactgggttttcaaagtggtgagactcacagacttatgagggagctaggtcgtggaagatgctggccacatccccgccacacacacagatcagtcctagctgggttgcagggatccagccctctaagcttcaaaggcagctcctagtaagtggagtattgaccggctcgccagacccagatcacaggtgaaacaaagtgaaaagttagtctctcctcgcagccattttcactgatgagcagttgaggctgtccgattaatgtcagccgcatgctggtgacaggacacaacgcagtgtaccccaagaggcttattaaaaagaacagccactcctggggccctctgagggtgccctcacacacagacccccttttccccaactccccagtgctgtgttaagttgctagcagcagggaggatggagatggagtttctgaaatgaacaccaaagcacatgtcaggaccacgcgtggcctggcagggggctcattaccgcagcttacatccttctccctgcaggggaggggaggcagtgccctggggacttatgggctgtctcctaggtgaccgtggcatcccaggagttccttctccagttgccttccaggtgagcttagagccaggtgcatccctgggggcatgatgtccccagagtgtctaccagcttggtgacaatggaccctgcaacccaggaggcctggcccctcatggatttagggatggaatcatctgtgccgttttccttcccgtgttttctgcccagtagtttgaaccgcatttctaaggccgttcactctcctgtgtgaccccaaaatggctctggcaataccaggtctgtggagtaagattgaggtctgacctgagcatagggttcacagaggagtgaaccctgctggaggtggccaagttcagaagtgaagggcgagggcattcactaagcagcatccccatgggccacgctctatcccagcatc

SEQ ID NO: 682633 - DNA, 691 bp, Homo sapiens
tttgtttgtttgtttttgagactaagcttcactcactctgttgcctgggctgaagtgcagtggtgcaatctcggctcactgcaacctccacctcctgggatcagtgattctcctgcctcagcctcccgagtttctgggactacaggcatgtgccaccacactcgactaatttttgtatttttagtagagatggggttcaccatgttggctagttggtctcgaactcctgacctcaggtgatatccccccacctctgcctcccaaagtgctgaaattacaggcataagtcactgcacccagcccaaatctagctttaagaacccagtctgggaggctaagcacattttaagggggaccatgggcccctcatggatgcacggctgggctctgtgctgggggatgagggtggagraacaaacacgtgatgtttgaagatgatcaatgtcatgattatctattatgcaaatactctgcacagacacaatggacagtgcagaagcatttggttatattctgccaagatttgctcatgtatcagtgctaaggtgtcaagaaggctcatgttaaccttaagggaaaggtactatattgtccccattttatagataaagaaactgagtctcagaaacaggacatgacctacccaaggccgcagaatcattgagtggcagagctagcaatggaacccagg

SEQ ID NO: 682634 - DNA, 1036 bp, Homo sapiens
tttttttttggcagaggtggggtctcgctatgttacccaggctgatctcgaactcctgagctcaaccatcctcctgcattggcctctcaaacagctgggattatagtcatgagccacagcgcccggccctgatacctttacgtcagcatttcccaacatactgtctcagggccacttacctgcaccagaactacctggaatatttaggaacagactcctggcccccaaccaaacctcctgagtcagtgtttcaggggaggggactgggatattttgttttgcaccgactccctaggtgattttgatgcttagccaaatgagaaccattgttcggagctaacatataacacagcaaacaactgtgtctgtgtcctctccttgggagagaactccagaagtaagttgctttgttgcatggggagggggagtgttggaaatcccactgggatgtgtcgtttcccccatatgtggcactaattgagctggaatatccagggagaggcagcagttctagggatgggagcaaggccagccagcctgccagagacacaggtgtggttttggtcggagaatgccatgactgagttaatccctccataccaggttccaccccasctccacaacatcctgtctgtctccccagacaaaccagcccagatcctcctgggccccagaaagatgacacagctgcccccgccccccccatctcctggcctggacccacttggcttcctatcttggaagacaatggttgagattccagggcagaagcatttttaaggctctacctaaaacggccccaccccagcttcattcctcctccatcttgtcccgcacttctgccggcagaccctggtaaagcgtgtcttccaccaggagccccgccttcttgagccccccacagttgccaagttcttctggcagcgcctctaagcggttgcctttgagctccaggcggctgagggctctgagggcacccacgtggggcgagagctggctcagctggttgtcgcccagaagcaacgtccgcagcttg

SEQ ID NO: 682635 - DNA, 1060 bp, Homo sapiens
gcttggagtagagggagtcgtactgatcgatgaggtgcagcatgaaggcgaagtcattcttgacgtcaggaatgtcccccatgccagtctcctcccgcacggaacggaaggagtactccttgaggggccggtggaagagccagtagagcgtgtagatgcaggtaagtccgtagatgcacacaaaggagatgtaacagaaggccagcttggagaagaggtgggccttggtgtggttgcagcagaagctggcgtagcccgtgacctctgacgtctccaccctacaggccaccaggaaactgatcttctccacatagaccaggttgtagaccaggatggccaggaacttacacactttcagcaccgtctgtcggatgtacatggtgtacaggatgtcgccctcttccacgtgcatgcggaacttcttcaccttctcaaacagggctttggcttgctcaccctccttcttgtccaacagggtgacaactggaggctcggtcaccaccttctccggttccgccagcactttctccttctcaccctcccctgccttccccggcccggtccctgccatggccactatggtggccgcagcccgtycggtggctgctgggcccttctggttctccccggatacctcggatagggccctggtggtccatggagagtcgaaacacttgcccaggatggagatgaagtgttcaatcttggagctggtgccagggaacttgaaccagaaactggtgcagaccatgaagatgagtgtgtgaatgaccacgaggtaagggaagtacttggcataccagtgcagggccgtctcataacacagctggttaataaagctgtattgctgcaggtccaaattgttcttaaggcctttaacctcctgcagggccccaatctgctcagggatcccccgaggcagcaattgctggcacggggcctctgataagttctcctggagctcatgattgggtagacagatgatcttgtcctgtgtcacctgaggagcaaaagagaatgagggctgtaatcctagcactttgggaggccaaggcgagtg

SEQ ID NO: 682636 - DNA, 1060 bp, Homo sapiens
gcttggagtagagggagtcgtactgatcgatgaggtgcagcatgaaggcgaagtcattcttgacgtcaggaatgtcccccatgccagtctcctcccgcacggaacggaaggagtactccttgaggggccggtggaagagccagtagagcgtgtagatgcaggtaagtccgtagatgcacacaaaggagatgtaacagaaggccagcttggagaagaggtgggccttggtgtggttgcagcagaagctggcgtagcccgtgacctctgacgtctccaccctacaggccaccaggaaactgatcttctccacatagaccaggttgtagaccaggatggccaggaacttacacactttcagcaccgtctgtcggatgtacatggtgtacaggatgtcgccctcttccacgtgcatgcggaacttcttcaccttctcaaacagggctttggcttgctcaccctccttcttgtccaacagggtgacaactggaggctcggtcaccaccttctccggttccgccagcactttctccttctcaccctcccctgccttccccggcccggtccctgccatggccactatggtggccgcagcccgttcggtggctgctgggcccttctggttctccccggakacctcggatagggccctggtggtccatggagagtcgaaacacttgcccaggatggagatgaagtgttcaatcttggagctggtgccagggaacttgaaccagaaactggtgcagaccatgaagatgagtgtgtgaatgaccacgaggtaagggaagtacttggcataccagtgcagggccgtctcataacacagctggttaataaagctgtattgctgcaggtccaaattgttcttaaggcctttaacctcctgcagggccccaatctgctcagggatcccccgaggcagcaattgctggcacggggcctctgataagttctcctggagctcatgattgggtagacagatgatcttgtcctgtgtcacctgaggagcaaaagagaatgagggctgtaatcctagcactttgggaggccaaggcgagtg

SEQ ID NO: 682637 - DNA, 3113 bp, Homo sapiens
  misc_feature 784, 787, 804, 828, 876: n = A,T,C or G
tgttcatttatcaaaaatctggtttgggaaataccaaagaggctttgattgaattcccttttgacccgtgtgtaacttcctctggtagttagaccccaggcagctccgaatttgtgaacctgcttcctgatgaattctcccttgttcccccttggctctgccattatttcgttttcagtgtaatttgccaagccgcagttttctgtgctggctgtgcctctagtcgcagctctgtgactgattccctcccgggtgctgagtcccctccccggccaccatcctgcgtgaatatcctgaaattcatgggcttcctcgggggcccgcccgcaggtggtgctgggtgggttccgccaccttctcctggaaggtgagccttttcctggccaagggcagctgccttaacctctgagagtctgcgcttggccttagtcctggagacccagcctccagggactgaaccgtgctgctgttgggagccaagaccggccctttggagccggcagcccaggggtccctgctggatcagagaaatagaagcacccgaagacggttagtggcaattccttgacccggtttgcttccaaatgaaggccatttgtccaccaggcattgaaaagacatgacttacccagtccggcatcggacttgaaaaatcgaaattgacatcactcagctgttacatttcacatccgattcagcccccttttatttccatgtgcttttcgcagccttcctgtgttggatgaaagagaataagaattcagctgacaggcaggcctcgtantcncgtggtttttccgcccncccatttctctatcgcccagcccnttgccagcctcaatcccctcccatcttccccagacctacctcagccgnttttaaaacgttaggacctgaggcagctccttatgcagagacccctggggtttagctgactckgggggtcaggggttcctgtccccaaacttcgcaagacagccctgaagtcacaagtgctttcttttaagtggcattggcaattggcgtgtaatgatggcagtagaatctgaatctcggatcccaggcagggttcacatttccaaacctttttgatttcccctgacctctaatggctggatcctatttttctacaacctttcagtgacatcgttcaggtttctttcttggccatttaaaaaaacaaattttttttttctcacttgtaagtcaccgccagtacctaagttaggctaacggagactttgacaggactggatttttcttccaccagaagagaagccttttccgttggtttggggccacctctttgaccatgaccatgtgatgttccgtttacagtgacttgctttgggggaggggaggctctcttaaccgattcccatgttgtacagtagatggttagaccttttgtatattagtgtgttttaagttattgatttgttttatataaaataatttatttttcaggtgccatttttcattttaactttgtttttacatgggtttgttttcaataaagtctgacactggtgtccaaaagtcaacaataaaatgaatcccattgtgttcttttgaagatgcctatgtaacttttaagctttttaaattattttcagaaaaaaaaaaagaaaagcccttatcagttttccatcagcccattgcctttttattttttttttttaatccttgtgaataaatgttctttagtgttttaggaggaaaaagcaaacctagattttgataacccagaagacttcagattaataaagaagctttgaaagaagaccatttttcaaaattttagtgaagtgtgaatattttttgtcaatggctttctcaaagagaatgaaacttttgcaccattttcagagtttttatagagatgccaaattgatatatttacatgtaatggaaacatgaaaaagttttattaaacaattgttcatagctgtgtagacattttaattcagtttccaaagctctcaaaaaatcgtatttttgaagtacggagtgatgcggtttggggcgtggcttacagttccaacgactcaattgtcccgatactcagttctttctacaggtatcaggttcgtgttaaacgctgtatgttaactatgactggaattctgtgatattttggtaataaatgaagtgggatcattgcgatgtgctggtgtaggggttgatggtgtatgacttgtgagcagcccacagcccagtaatagagtgccagggatggggacctcttccctccgaggtaagcctgtgccaggtcccgggagcccacgaggggacacccagttcgggtgtgccctgtgctggctgacccacggcccttcagctcccacccagatgcccctcttctccaggttcacaggtcagtgggcccaccgagtggcccctgggtatggcccccctccatctgcttcccacaccagtgctcccccaacagtgacccggggatcctgcctcttccctcgtctgtatgtggaaccatagtcactcccgagccctggggccatcctcagtgtcccctccgtgagactgatctcctttgtctcctttgggatgggaatggttaggggtctcaaggtcagagagtccaggttcaaatcctggctctgacaccactccccagcgtgccacccaggggaaagtccctggctctcttgagtctccgctctaccctctgtgaaatgggtccacgctgcccaccccctccagatcctcaggaaaatgagatcaagtagggatggtgacagttgctaccaagaatcagccaaggactggatggtcgcgcccagcacccagagagctgagctaacatgggcccgcagcccggtctctcggaaagcatttacggagcccgttttcaagttgctagtttctctattgcttgtgtgtcttgtgggtctgtgttcatcaccttctcttccagacgtgactaaatgatccctcggcttccaggaaaaacccatgttgtctgacaccacctggggccaaagggccagggctgtgctccagccagagccctgacagcgctcggggccatcccccaggtgttcagaccccaggggccgacagctggggctcctgcggcctctgggcagctc

SEQ ID NO: 682638 - DNA, 639 bp, Homo sapiens
ttgaccacaagtaatttgcattcttttcaaatacatgtgggatatttataaaaatttaacatgcattaagcctcaaagggaaatctcattttctaaccacaatgtaataggaacagaaattaacaaaaaacgatagtcaaaattaaaaacaaagaaacagtatacttgaaagttaaaaaatcaaaaaaaaacctttctaagtaatcttgggttaaagtagaaataaaaacaaatatttgcaactggataaaaatcaatgctaatgtaagcacatgttatcaaacttgtgagattagactcctgagaaaaaattatgaaaactgtgtcagaaatagtgtgacgagacagcagtctctgattctcttcaatctgcctcttcctcattattgtggagagtcttttttgaaaaatattgcacggtaatgatactatgaagttgtgaaagatgggttatataagtgagaaagagtggcatgtttaccttttaggcatgaagaatgtgtgggtctcaagcaggggtgtcccatcttctggcttccctgggccacattggaagaagaattgtcttgagccacacaggaaatacactaacactaaacatagctgataagcttaaaacaaatygcaaaaaaaatctcg

SEQ ID NO: 682639 - DNA, 1174 bp, Homo sapiens
gggtctaagacaggcacacaagaaacatcactactactgcatggccttctttagcagcatgtggaaatgttgcaaaccatgggaaggcttggattaaccccataaagggacaaagcaaggaaagaactggctgggattcccaacaatcttggagttcaaaggacccatggtagggctgttctggagtgttggatgggatgataattattaatagttccatctggttcctataaaaacaatcacttcaaaaacattgattattaaaagcctcatagaaaatttatttttaccacttctcggcctgggtaagatcaagtgtggtatctgtttatatcagtttaatatctgatacatcctctatcggaggataatatattgaatggatttttggagctaggagatggactagtaacttgccccactccacccattgacctggtattacagtacctccaggaatggtgcatcccctttggggtatagaatggttgcaacaaaaagtagatcaaggctgggtgtggtggttatgtctgtaatcccaacacttttggaagccaacgtggaaggatcgcttgagctcaggagtttgagaccagcctgagcaacatggtgaaaccccatctctacaaaaaaaaaaaaaaaaaaaaaaaaaatattagctgggtggggtgcaatatgtttgtagtcccagctgctcaggaggcagagtcacttgaatccaggaggtagaggttgcagtgagctgagatcgcgccattgcactccagctygggcaacaagagggaaactctatctcaaaaaataaaaaataaaaataataaagaattttttttaattactgggaggaacagtgtcaaagttttaatgttgtctttcagggataagatgacaaatggcttttcctcctgcctctctctatatttctatactttccaaatgagctacaagaatgtaatgtagatattcatactcagactgactggctccactatctaatacccaggtggccctggactaatttctaatctcactctacttccatttttttctgtaaatggggattctatgaataatgcctgctttcgtaaagctgttgtgagaattaaatgaggcaatacaagtaaaggtttaaacagagcctggcatatagtaactacacccacattttggctat

SEQ ID NO: 682640 - DNA, 638 bp, Homo sapiens
atcgcttctccctccttctccctccatccctttctctgtctcctccttccaaatcagaaaggtactaaaacccagcaaattcattgtctctttcaattataaagtatggtgctcatgtacattctctgatttgattctcacaagaacgtcagaattcccctaatttactaataaggaaattgagcatcagagaggctaaggaacttgcacaaagctacacaactaataaataacaaaagtgagatccaaactcaggttttgtggctcagatgctatyggcttctgtgcatcaaagatgctaaaataaaatattcttcagtgttggttgctggttaatagtaagaggccagctgcaggtttatgttgggtgagcacgctctgccgtaaaggtagtttgacctacacactatttccagtccatagcattcaccatcagtgaagagtctgggaaaaattcaaagattcagaactgagacaaaaaggcaaggccggggcgatgactcacgtctataatcccagagctttggaaggctaaagccggaggttcacttgaggccaggagcttgagaccagcttgggcaacatagtaagaccccgtctctacaaataatgaaaaaacaaattaaccaggcatggtg

SEQ ID NO: 682641 - DNA, 585 bp, Homo sapiens
ttgtattttcttcctttcactattttctaaattatgcattagctatataaatgttaaattcaaatataaatctattgttctatcttttgatttatttttctggtaagctggttaatttattatttattattattatttattattatatatttattctggaggctttactgtcctaaactataaacacacacgtacatgtatgtgaccttcagaggtgcttcttatattttttgccccctcctcttaggtgagacagaaagtctagagtaaactagaattgggtaatttccctatatgtagtcaaacaagctctggaaaaaaatgttttcctttgaaaatttatacytatgcacatatatgtataaatttgtatgtattatgcatatatacactctaaattgtgtgtaatattcatacaactcacacacccacgtatacagcttttgtgagaaatgattcacatgttatacaacatacttattttaaagtgtacaattcaatggccttcaagaaagatgatggatgagaaagaagaagcagtagttttgatgttaagcaactgaatggagctttttacaaccatca

SEQ ID NO: 682642 - DNA, 1199 bp, Homo sapiens
cagaatagctggcactcacatacactggtgatgggaatgcacaacacagccacttttgaaagtgtatgtaagttttatataagtgcatatgtaccctaaaacttaaagtataataataaaaaaaaaactaatcatacacttatctggctcagcaattccattcgtagtgtctaagggaaagaaaaccttaggtttgtggaaaatctgtatagaaatgtagcattttaaactaataatcatcaaaatctagaatcaaatccaacactctttatccagtaaatggttccaaacaaacaaaaatcctgtggcacatccatgttgttcagcaataaaaaaatgaacttttgatacacacaacatcatgttatcctctcagatgtgtttttgttaagtaaaaagagccagaggcaacctagtatatattttcatttctgtgactttctggatgagacacttaagtggttgctrgaggagagaagttgactaaaaggagcagcatgagggaaatttatggttatggatacattactttttgcgtatttcaaaactcatagaactgtacaccacaaagtaaaatttagcttatataaattcaaaaatgaattaagttatttttattttttactgatgtgaatattgaggctttggtgtatcaaattactcagatgtaaaagagttaatatccttttttaagccattctgttgtgaaacttcaattttttaaaaaaatgtttatcacggaaaatttagtgctgttttgtttttctttttaccactttgtatttttctgaatacttccaagtatattcagaacaaacgacattatatctttcaatttccctttccctttattagataaatgcaatgataaatactggcttactatcaagcaaattgaaatgatctctttattttactttcactcttgctttgttgttcgtattgcgattgctgcatttttgtttgattctttgtttattataattatctacatcagtttactttagtttctgggattattccttcaatatctttttaaaataattccaaaagttgtattttactttccacataaaaaacagaactctagccaagaataatgcacacatatttatcttaagaaaacatgttgctgcaaatgttctattattgattaatgttaaaaatcctatattcaaagtgattctctaaaatcttca

SEQ ID NO: 682643 - DNA, 589 bp, Homo sapiens
gaacaatagattgggaaattgtaaatcaaaatataagcctaatcaaatattaaaatctatcatcaaccctaaaaaaatcacacataggatttttggccagaatttggaattttgagtaattaaatttaattatcaattattatagccttctatgcagaaagtctattttatttattatgaaatatgctactgactgggtatggttgttcacgcctgtaatcccagaactttgggaggctgaggcaggcggatcacctgaggtagggagttcgagaccagtctgaacaacacggagaaaccccatctctactaaaaatatgaaattagctgggcgttgcttggttgctcatacctgtaaccccagctacttggggaggctgagggaggagaatggcttgaaactgggaggcggaggttgtggtgagctgaggctgttgcactccagcctgggcaacaaccatcaactgggcaactccatcaagaaggaaagaaagaaggaaagaaagagagagagagagagagagggagagagagagagagaaagaaagaaagaaggagggaaagaaagaaagaagagagargaagaaag

SEQ ID NO: 682644 - DNA, 688 bp, Homo sapiens
gatggttcccagagaaaggaacagctgtgagctgttagatctcagtgcccacagcagctgggagatgggtccctgggcccgtgatggggatcggggcagggtcacagtgtccactatggccccagagaaatgactcatgcaatgtgccacagacaactccaacccaagttttctgggtctcattcactcctccttctactacacaaagctgcctcttcagagttttttgttttgttttgttttttgagtttgtgtgttttctctttttcttcagaatttcagaacccgatttcattaattttatttccccaaggattggatgacttggtgaactctgataatctggaaagatctgaggccattttttaatccacctggaatagctcgatccttttaattatttttcaatttgaaccttatttactttatagtaaatggtaaatgctagacatgtcctggtgcctgyttcaccccaagaccttcctagaaaccgtgtcacatccacagtactttctgtaaatggacaacctgtagccagactgattagagtagaaggaggcacccgtcccatgaacaagcaattcgtaggagaattctctctgttttttcctttgtttgcatgttttgaacctcatgcaaaataaataaataaaaggtgtaagctgtgcaaataaaatttctcaaaaat

SEQ ID NO: 682645 - DNA, 711 bp, Homo sapiens
atgaatagccaatatttgtgaagcacttactctgtcaggcactttgctaggttctttatacccattatcttagctcacaacagttattcaggtggacattattacccacatttgacagatgagcaaactgagcattaaagagtgtcttagtttggatttttccaaaatcagaccacagagatgaagacttgggtgccaggaagcccaaggaagggtcggggtagagggtcagtaatgtgatgagtgagtcaccactgtgagcagctggggctcagcacagctgcagaccytctgagagcctgtagaacagcgctccgcactgtgggctaaggagctggactagttttccaccgattcctatccctccttggttgagacttgttcttgagatgttaactccccagcaagtccacctgccctgccacagtagccaagcacaagctgtcagccaggatatacccataagcagaggcgaggaagcttcagttttctggaactgtgccgataaccccgacaggatatgagcattgacagcacatgttacagaacagtgcagtgagcaagatttaaacccagtcttgttccaaaacccactatctgttcacctgacctcttactacttgctactactggagatagctctgtgctctaaccgatataagaatggattactgacctctctccgaaccatctggtccttttccttctcaa

SEQ ID NO: 682646 - DNA, 624 bp, Homo sapiens
tgcagactgaagagaaaggccaagctgtaaatgtatgtgatggctgctgatctcattcattctcagaaagcatttaattctccatgccacattcttctcaaatggtatcggcatctgccctgtactaatgagccctcaggcgtgtggttcctgctggagagtaaaagaaatcacagcctttatatcacaagcattgattgatagcattatttattgccattgcagtagcatccagaacaatasacaaatgaaagctctgttatttatttatttatttttactggttcttctgggagttcaaacaccagtttattcagaattcaaagtggcaaaacaaaccccagcaaaacgcaaatatatttcacttattaattatattattgcttgtttctaaactcatagcctaaatatcatcccacggacactttttcagaaattctagtagaaatatttccttaattctgcatcaactaagtgttgtttgcagacaagtagcctcactttccctttagtcattagaaagcgtggcagacctatattttaaacatgtatgaagcatacacaatgagcatacccggagtatactgcaccaaatgcagagcagactgttctggacctggtgga

SEQ ID NO: 682647 - DNA, 583 bp, Homo sapiens
ttcctgccattggcttctctgtaagaaaccactgggcctcttagtccaacatggaaaacacagaagctttccacaccatctttatttgtctgtctcttatgtaaagacaccaccctatcctcactaagtttcctccacctaagccagcagtacccactctttggatcctgcatcaagcggagatgggtctagagcaacttctgcccagtgatcaacatagagaaccatgtcttcctaggatatggattctgggacttagactttcctcaggattctagttcacagtgacctattcaaatacagttcttgaartgtgctattttgcgctggcttcctactggtccttagaggtgctgtttctgcactgatgctcagatgtattttatccccagcttattaggttataaactccctgaaaatggaactgtgcttacacttccgtggagcctcctggaatataacttttgtgatggatgcctggttgataatcattcatcatttgccaatggactagcccatggcagccacctatggggtttgatagtatcaagaaaagtgattgttcactaagattgagattggc

SEQ ID NO: 682648 - DNA, 589 bp, Homo sapiens
taatctatgtactatgtaaaaataaggaaaagctctaggaaaaatacagaaaaaattaataatcactcataaacttacccccaaagataatcattgacattttgatgtacttttttttaaaacacactttaaaatcaacattcgtattgtatggtataaaatattttataatatgatgttttttcacttggtaatagttacattaaatattgcagacatagtaaaagcttattgaagcccttcttccatgctcaagaccacttttttttgtcttttttctttaaaaactagtctattttccattttttattttyatctttggatttttaatttctatttgttttggggacagttctccaaaagagaagagaaaaggtaatgagagaaggtactgggtatgtggtcacatagtggcagcactgaggaggtgacggggaaggcttggtccactcctccaagtccactcatatgttcaaaggatgtaaagatcacttttggttttggataatttcaaagacttcttgaacatgcagttatgtgagtgagaccttcaattaagactgctggaatttttgagatgcacagatga

SEQ ID NO: 682649 - DNA, 1093 bp, Homo sapiens
aattcctgcattcatgtaatttttattctagtggaagtttacaccaatgaatgttaataaaaaaggtaacagacaaatttttatctatgtctaatattacatcacatacttgttttcccgtacaatttgctaatgtttcacatttatatatttgtgtcctagatagtggttgttctttttaacagtctagtcatgtgctccagggaactgaatcaagtggttgttgttgctgttttgtagtaaagaacaactgaaagtctccttgtctctttcttatttccttctataaaattattgccactgttttgagtaacagtcttgttttctgacaaggtaaaaacatcataatgagccaggtgagatggcatgtacctctaattccagctacttggaaggctgagctgtgaggctgaggcaggaggatcacttgagcccaggagctcaccagtctgggcaacatagcaagaccctgtctcaaaaaagaaaattaaattaaattaaaagtttttgaaagtgtttgggaaaaataagtgttatatattaataatatagaaaaaagaagtaaaactaaaaaaatgaaaaggaataatacaattagaaaatgtccattttgcaaaatgtaatatagtaactaatctagatagtaatcatcaatgccttctaaaaccattaggtaaaaggttgatggcaactttacaatagatggattaacctctcgatcaattttaatatcattaaaagtaggaaaatcagacattatgtgtctcttaatgtgatgtaataagggatacatagagccacttatgttttttccccaaataaaatatttccccaaataaaatacaataaaatgaaacctgactccttgaatttaattaagcatgtagattcgatcacttatatagaaaataaatccagaaaaatatgctaaatgagcatcccaaaataaaaatctataatagaacctgagaaattctatragacaaataacctagagtggagtggagggggatatttagaaagagtaggaaaaggaaacgtgttacggattagaagaaatttaagacaggtatcgatcaaatgcaatgtttaa

SEQ ID NO: 682650 - DNA, 1353 bp, Homo sapiens
agtgatacacaatataataggcatgaaaatcaaatgcattttgccaagtgtatgaagccagcctcaagagactacacactatgactccatttacatgacatcctaaagaggcaaaactatagctacagaaaactcatcagctgggtttggcagtagggaggaaagatttcttacaaagagtgcaagagaatttctgaaggatgaaactgtaatatatctcgatcctggctacatgactatatgcatttgtcaaaagtcagagctaacactgaaaaggatgctgtgagttcagaggaagaagaagaaatcccagctggtcaagaaaagttgcatggagcagtaggcaatgaaagttatggcaactcgtgtttggtaaagccctgagggaataaactgcagaatatatgcagggatcaaagtgaaaaagagcagtaaaacacctgaatgaagaatgctggctaggacgatactgtagaaggcttttagtgacatgccaaagaaattaaagccatctgtgtaacgtcatggtaaacactggagaattttaggttaraaaatacatacatctgtactaggaagaaggaatcattcaaggtttttcaagatgtcatgtgcatcagagattctgttactgatttagtaaatgaatgatggcccagaaatctgcatttttaacagaatctctaacttcatccccatttacagatttgttccttgaatattacaggccctatgagcagatggagccactgggtacttatgtgccatgatcacatatatattcattgcttacagctatttctgtatgtgtctgatatagtagaaagaacgctgaagtaggaatcagtgacttcagtcaatatcttgctggatactgtgtgactctggggcagcttcaaacttctcagagcctcaagttatcaccaatgtgcatgttaattaaaatgcctaccctctctgcctcagggtgacttagattcattagaatgttgtttgtgaaaagcctttgaagtaatctaccaagtgctatacaaatgtgagacactttcatccctttgggttaaatcattacatctccagacaaccccctttaaatgtaaatacgttgtataagtaggtgtaacattagcacatatattagaattttagctatatgttaaagtatgcagtttttttttctgaaaaatctgaaattgaaatgatggggagcaaggctgttaaatttgatgggagaggcagaaggaaccagaaagaaaggaagaagagaactgggaaaaattcaacccatggatctgaagatcagggctagggaagttacatagtgtgaggtgcaaaaatagacatgaaaggatc

SEQ ID NO: 682651 - DNA, 603 bp, Homo sapiens
tttatttagatagagtttcactcttgtcactcaggctggagggcagtggagtgatcttgactcgctacaacctccacctcctgggttcaggcagttctcctgcctcagcctcctgagtagctgggattacaggcacttgccagcatgcctggctaatgtttgtgtgtgtgtgtgtgtgtgtgtgtatacatatatacatatatatacatacatatacatatacacatacatacatatacacatatatatacatatacatatatatatatatatatatatwttttttttttttttttttttttttttaagtcgagacggggtttcaccacattggccaggctggtctcaaactcctgacctcaggagatctgcccgccttggcctccaaagtgctgagattacaggtgtgagccaccacgcccagcctgcccacaaggtattgctgtacgagcaaaactatgtgttaagtcaactagcccttcatatgtatgtgatatgtctaataagttaagaatattggtgttagatttagtccctaaagttccagccatttggtctggattctactgaggcttgtcatggctgattgtatccttagagtcc

SEQ ID NO: 682652 - DNA, 1462 bp, Homo sapiens
tcactttgggaaaggggtttcaaggaagaggagcccccttacaatgccttgacctggaaaacctccaccacagggatagcctaagaagtccttggttcctgcaaaactcacccatgactctatgggttactaggctgaggagctggagtcctcaggatgaggtcttcaccaaaatgtacaaagcaaaatatcccattgtgaaatacacagcccaaagaattcttaatgagaacaggagctccagcatggacttgaaactgaaagcccagacccattttgacataaaggatgagttctgctgttccattggcaggattaggttcttgagagggcagggcaggcaaacactcaggtgctaaatcttctgcaaaataggctgcctgaagcctctgaatcacctgaataaaacagttaattaaccttgaataaaagtaaaatgacwtaaaaaactctttacaagccaactgtcacattccttaattttaataagttaattcattttagccttcccactagtgacagtaatgcatatactcagaaatgtctggaatactaatattttgaaatatatttctaagtttagttgtacgttttaataattttattttgttccactctttccttcagttctcataattcatcaaaatagtgtttgaattttgatcagttttcacaacaggagattgattatttaaatatctaaggcagtaggacccaggacatgaataatgtgtggggcttataataaacaattctaattaatgatgacttttttcttatttaatccaaacgctttaatgacagattattctaatttttgatgattctgttatggagatttagactctgagtaacagaaaactgaatcaacagtggcatgaagccaataaatcacatacaataacaagttcagaggtagactgttgtagggatggtcagctcagcagttcaacagcttcatgatccaggttctttctacctctccaacctgctgttgaattgttcttttaacctgactcttccatagataaacgcccaagttctgggcatcaaatgaagtccacaaagttcagaagcaagaaagaaaggaaatctgccatatgtctcagttctcatcctggaaaatctttctgaatatttggaaagatgtgctttgccaccttaatgctcagaggaatcagaggcctcaatttaaatgaatcacttactgggtggaaaaatcgttggaatggttctcagatttgagtccctgggccagtaccatcagtatcacccaggaacttgttaaacatgcatgctctcagactacatctcaagcctattgtgtcagaaactcttggagctgggctttgcaagctgttgttaatgagctctccaagagatgcagctgaggtaaagactgattaactgctggcttagactgattacagttcaccctctgggcctggggacatgtatggct

SEQ ID NO: 682653 - DNA, 604 bp, Homo sapiens
tgggaggcygaggtgggcggatcacctgaggtcgggagttcgagaccagcctgaccaacatggagaaactccatctctactaaaaatacagaattagctgggtgtggtggcacatgcctgtaatcccagcaactcaggaggctgaggcaggagaatcacttgaacccaggaggcggaggttgctgtgagctgagatcgcgccattgcaccccagcctgggcaacaagagcaaaactccgtctcaaaaaaaaaaaaaagaagaagaagaagaaacccaaacacacacacaaacaaaataacaggtgcaggccagttaaacaaaaacaactcaagaactgtgccctgcaggggcgcattcatgtgcgggtgccccctagaggactctgagggtagaatgcattcatcctgaatggatgcaagaggatcatttttcttcatccaaagtgaattccctaccgtatgctatgcccaggggacatggccagtgaacaagacatgcaaacattattgctgctgctctgttcacacatgcaagagagagacaatgagtcagcaaacacacacataagttgtttttgtatagcaaaatgtaccagaacataag

SEQ ID NO: 682654 - DNA, 604 bp, Homo sapiens
tgggaggccgaggtgggcggatcacctgaggtygggagttcgagaccagcctgaccaacatggagaaactccatctctactaaaaatacagaattagctgggtgtggtggcacatgcctgtaatcccagcaactcaggaggctgaggcaggagaatcacttgaacccaggaggcggaggttgctgtgagctgagatcgcgccattgcaccccagcctgggcaacaagagcaaaactccgtctcaaaaaaaaaaaaaagaagaagaagaagaaacccaaacacacacacaaacaaaataacaggtgcaggccagttaaacaaaaacaactcaagaactgtgccctgcaggggcgcattcatgtgcgggtgccccctagaggactctgagggtagaatgcattcatcctgaatggatgcaagaggatcatttttcttcatccaaagtgaattccctaccgtatgctatgcccaggggacatggccagtgaacaagacatgcaaacattattgctgctgctctgttcacacatgcaagagagagacaatgagtcagcaaacacacacataagttgtttttgtatagcaaaatgtaccagaacataag

SEQ ID NO: 682655 - DNA, 597 bp, Homo sapiens
cagaggttgcagtgagccaagattgcgccatcgcactctagcctgggcaacaagagctaaactccacctcaaaaaaaaaaaaggaatgataagttgtggggatgtgacaagacaaagaggcttgggctaggggaagtgaccaggaaacagtggggaacttaaggaagataagggttagtagctgagttgtttagcatatggactcctggcccctgctgataggaacattcttctcttcctggcgcaggaagggcgttttcctcttgataaattttacaatctacttttacgtaggaagggggaggycagatgcatctgctttttcccacaggcttccaggtcgaaataatccatatgctgacgcgatgactttggggtgacatgccctgagccccttcaatatatactagccccttgctgactgagagttgagagagcaccattctctgcctggaatgtttgttgctagctaatccatcccgccgactgtggcctcccaaactgctggcgttacaaccagcactttgggaagccaggccaggaggatcatttgagcccaggagttcaagaccagcgtgggcaacatagcgagacccc

SEQ ID NO: 682656 - DNA, 581 bp, Homo sapiens
taagtgcactaatcccagcatatctggatgccactcttataatctcatttaactttaatcacttccttagagcccctatctccaaacacagtcacagtgttcgttagggttccagcatataaactgggggataggggtagacataatttagtccataatactaggtaatgattttcgctttgttccttctgaggggtgaggggtagaaacacatcattcaatcattcaaaagaaaatgwgggtaatttcaaacaggagtgacagtctgtcttctgtggatgaaatctacctgggatatagaatctacaagcaacccactctacttggtgttgcttcctgagaggggaatgataaggatttctaaaaggaatccaacactgtatttagatgccatttaaggcctagaaatttgtaagggctggctggaaaggcattgggggactatgggatgggtgcaaattaatcatgcttttaatgtatcttatgaggttttgatgttaaaaaatcctgctggccaaggggagactacctctcccagggctagccaattctcagagatggcaaagaacttggctggtagc

SEQ ID NO: 682657 - DNA, 598 bp, Homo sapiens
aattcttatactaattataggaatataaataaatgaattaagcattcaacttagtaagttagaaaaacacaacccaagaaagcggagcaaaggaattatttataataaaagcagaaaaagaagagagttgaaaataaaaaatctagcrtaaataaataattaaatgaacaacaatcacggctgatctttacaagtgtaataaatagctaactcacatcttacctaattaatttttaaaaaggagagtattttgcttaactgtatgccatgaacttcaatgctgtataaatttaatgatttttttacatcattgacacaaatagaaaatctaaacagatggcttgacataaaagaatttgaggctggccttgtggctcgcacctgtaatcccagcactttgggaggctgaggtgggaggatcatttgaatccaggaattcaagaccagcctaggcacatagtgaaactcttttctccaaaaaatgaaaaaaattgccagcctggcacatgcctgtagtcctagctactggggaagctgaggcaggtggatcaattgagcccaggaggtggaggctgcagtgagttgtaatcatgccgtt

SEQ ID NO: 682658 - DNA, 598 bp, Homo sapiens
aattcttatactaattataggaatataaataaatgaattaagcattcaacttagtaagttagaaaaacacaacccaagaaagcggagcaaaggaattatttataataaaagcagaaaaagaagagagttgaaaataaaaaatctagcgtaaataaatawttaaatgaacaacaatcacggctgatctttacaagtgtaataaatagctaactcacatcttacctaattaatttttaaaaaggagagtattttgcttaactgtatgccatgaacttcaatgctgtataaatttaatgatttttttacatcattgacacaaatagaaaatctaaacagatggcttgacataaaagaatttgaggctggccttgtggctcgcacctgtaatcccagcactttgggaggctgaggtgggaggatcatttgaatccaggaattcaagaccagcctaggcacatagtgaaactcttttctccaaaaaatgaaaaaaattgccagcctggcacatgcctgtagtcctagctactggggaagctgaggcaggtggatcaattgagcccaggaggtggaggctgcagtgagttgtaatcatgccgtt

SEQ ID NO: 682659 - DNA, 1324 bp, Homo sapiens
tttttttttttttgagacggagtctcgctctgtcaaccaggctggagtgcaatggtgtgatctaggctcactgcaacctccacctcccgggttcaagcaattctgcctcagcctcccgagtagttaggattacaggcatggctaatttttgtatttttagtagagatggggtttcaccatgttggcctcaactcctgacctcaggtgagccaccgcgcctggccttctcagggcttttcaacctgtgtattaagacctgggaagccaatttgctgtactgtggctggcattttttgttttgttttgttgtctgagttgaggtctaattctgttgcccaggctggagtgcagtggtgcgatcacagctccctgcagcctcaaactgctgggctcaagtaatcctcctgcctcagcctccatgtagctgggaatataggcacaagccacagcatctggctaattttatttttatattttgtagaactgggatcttgctgtgtttcccaggctggtctcaaactcctggcctcaaacgatcctcccacctcagcctcccaaagcactggtattataggtgtggacaactgggcccagcccatgtggctgacatttaaaaaaatgaaatcaacctgggcaacatagggaaaccctgtctctacaaatcattaaaaaattagccaggcgtggtggtgcaacctgtggtcccagctcctcaggaggctgaggcaggaggatcacctgggcccaggaggtagaggctgcagagagctgcgattgcaccaccacactccaacctgggtgacagacagagtgagaccctgtctcaaaaaaaaaaaaattaatttaaaaacaatgaaatagagaatcatagaaaatatcagagtatattgaatggcataagggttaaatataatttaatgatacttttatttgagagagagagtgtgtgtgtgtgtgcacgcgtgtgtaagaggctaccatataaaagatatctcttaactctggattgccatcaagaaagtttgaaacatacttggtaaaactaactttctaggtaaatggttaaatactttgtaagttctaaaactctgtgtgtgtgtgtgtgtgtgtgtgtgtgtgtgtgtgtgtttaaaatataattgtatgtatgtcctgagtcaccatataattaatttatttattaattaattwatttatttatttattttactgtgaatttaagttctttgggaaaacactacttagaatttacaaagaatttaccattgggaactgatcctgattaagggagactaatgaggtttaacaggtattaatagatgcg

SEQ ID NO: 682660 - DNA, 3531 bp, Homo sapiens
gaatgaccaccaagtgttggtcagaggcttgtcaagaaaaaagaaaccacatgaagtatttcaacaagaaaattgaatgtaaggatctacctttcaaagcaggtgagtctcgaaggcactggaatgtgtggctggagctctgaggagggggtgggctggggccaggcacagaagataccagggatgtattcattgcaacacagggagggtggatggacagctgagtaaagacaagacccctctctgggtacagctgtgtaactgaaggcagaggcatgtggagaatgggttgtcttaagagtgggtcagcctggggcacacatttccttttctgagcagtggcccagcaggctctagaatggggttgaggcatagtttccagaggttttttctttttagaagtcacctgcttattattttttgctttatgcactcataggagagtgaagatgaaaaagattatgaaagagagaaattgattcacttttgaggatccccagggttttggaacaatctttgaaaaccccttcagtcacaatattttgtggctctctcttaacttgtgcagttaatccataatggttggggtttcagcaggtttgccattatgacaagtgctgtggtggacatccttgttgctaaattcttctgtacacatgaaatcattttttttaattttaaaatttctttttttcctttattttttattttctttccttaaatactctcctattccagaataaaaccatctttttttttttttttctcgagatggagtcttgctctgtcacccaggctggagtgcaatggcacgatcttggctcactgcaatctctgccttctgggttcaagagattctcttgcctcagcctcccgagtagctgggattacaggcctgtgccactaggcatggctaattttttgtatttttagtagaggcgggggtttcaccacgttggccaggctggtctcgaacttcctgacctcgtgatccacccacctcagcctcccaaagtgctggcattacagacgtaagccaccacgccaggccgaataaaaccatttttaattgacttatttatcctccccaccccttttcaatgacttggaaatcaggatgtgtcttataaatgattatgtgtcatagtttaactggcagctgttttttctcccctggggatttgaagtgacaatgcatcttggctgggtgtggtggctcacccttgtaatcccagcattttgggaggctgaggcgggtgaatcacttgaggtcaggagtttgagaccagcctggccaacatggtgaaaccccatctctactaaaaatacaaaacttaggcgtggtagggcacacctgtaatcccagctaytcaggaggctgaagcaggagaattgtttgaacctgggaggtggaggtcgtagtgagctgagatcgcaccactgcactcccacctgggcaacagagcaggactctgtctcaaaataaaaataaaaaataaaataaaataaaataaaaaacaatgcatcttacctttgatggcttcttggatttgaatgattactgtaataacagtaatactcagcgtaaacacccacataacactgtgtgccaaggtaactcttataacaacgctgagaggcagatactattattgtctccattttccagaagagaaactgagccacagagtggttaaggaacttggcccaaagtcacacagctagaaagcaatgaaggggagcagaacccagaaagtggctccagggtctctgtatttttagggtttccagtagatagtacaagatgagcattatggttaagattcctccctcctgggccaggcgcagtggctcacgcctgtaaatccctgcgctttgggaggccaaggagggtggatcacctgaggtcagggttgaccagcctggccaacatggcaaaaccccgtctctactaaaaatacaaaacgtagccaagtgtggtggcaggtgcctgtaatcccagctactagggaggctaaggcaggagaattgcttgaacctgggaggcagaggttgcggtgagccaagatcacacccctgcacaccagcctgggggacgagagcaagactctgtctcaaaaaaaaaaaaaaattcttccctcctactccccagctttgtttgtacacaagggaccccttccaggccacagataactgaaccaaagtgatattaacccatccaaaggggcccttttgacatgcactatctcctacatggctgcacgttgaacatacctaaccatcccaggcttacaaatgcttttagagcaagtttcaaagtttggtccagggtttcctggaggtccctgagactttgtccacaaagttaaaattactttcttttttttttttttttttgagatggagtcttgctctgtcgcccaagctggagtgcaatggcgcaatctcggctcactgcaagctccgcgattctcctgcctcagcctccggagtagctgggactacaggcgcccgccaccacccccggctaatttttttttgtaattttagtagagacggggtttcaccatgttagccaggatggtcttgatctcctgacctcgtgatccgcccgcctcggcctcccaaagtgctgggattacaggcgtgagccaccgcgctcggccaaaattactttcataataattccaggactttttttgcgtatttcaatctcattcacttatgagcatacaatggctccatgacatgtgatgacataattgctctgccagtgtgtgcttgtggatggctggattttaatattgtcagttttagcctaggcaacacagcaagactgtgtatacaaaaaaatcaataaattagttgggtgtggtggtgcacacctgtagtcccaaccactcagaaagctgaagcgagaggatcacttgaggccaggagttcgaggctgcagtgagctgtgatcatgccactgcactccactctgggcaacagggtgagaccctgtctcaaaaatcaatcaataataaaaaatttgtttaaatggccagttttaagttctaatatggtaaatatcaatagctataacccacacaggccgggcgcagtggctcatgcctgtaatcccagcactttgaaaggccgaggcggatggatgacctgaagtcaggagttggagaccagcctggccgacacggtgaaaccctgtctctaataaaaatacaaaaaaattagccaggcgtgatggcgcacacctgtagtctcagctactcgggaggctgaggtgggaggattgcttgaacctgtggggcagaggttgcagtgagccaagatcacactattgcactccagcctgggcgactagaatgaaactccatctcaaaaaaaaaaaaaagttataacccacacaaataaaagctgtttggggtccttgatactattaagaatgtaaaagagtcctaagaccaaaaagttccagaacagttgcctatagcaacatttcccgagtcactgtgacagtccctaaaggat

SEQ ID NO: 682661 - DNA, 574 bp, Homo sapiens
tgaggaggaaatgagtaagtaagtgaaataagaaagaggccgggtgcagcagcccatgcctgtaattccagcactttgggagacgacgagaggagaatcccaggagttcaaaacttgcttagccaacgtggcaaaaccctgcctctactaaaaacacaaaaattagctgggcatggtggcaggcacccgtaatcccagctacttgggaggctgagtctggagaattgcttgaacccaggaggcagaggttgtagtgagctgagattgcgccattgcactccagcctgggttgaatgacagagcgatactctgtctcaggaaaagmcaaaaaaaaaaaaaaagaaagaaagaaaaaaaagaaataagaaaagggccttacaaagaagaaaggtgataatgtgtcatgaagttaggtgtattattaacttatttctgctttaaaaaaaaaagaaaagcagcagcagcagctatggccaagcacagtgactcaagtctgtatttccagcactttggaggccaaagtgtgaggatcacttgagcccaggagttcaagagtagcctgggcaacatggca

SEQ ID NO: 682662 - DNA, 560 bp, Homo sapiens
atcttttaggtcacacagctaatgctttgtaaagcatttcctaaatccagatcgccttactctaaatcttataatactgttactactatgccatgtgacttggcaacttggaatgtttttcatgggaaatgttagtgcaaattggaagagtccttcatgctatgatctttcctatttataaatgcaactgccatgttcatgagaatttagaggaaaacaaaagaacaagaaagcatcttattgatgataaagcctttatagatggtgcagagcatcagttcagatttgatgaattggtgcgtggcattttcatgtggaattaaatactgatgccaactgtggctgagtattctttctgataccagcttttgggcatagtacttcatcacctggggcttctcttccttaatstataaaatgaaaattttgaactagcttatctctaaaactccattgattaaaattcttgaactgtatgaaatttgataacttagacacaaaaaataggtagataatatgagaaaagttaacaaatgttttatttactttaatattttcag

SEQ ID NO: 682663 - DNA, 560 bp, Homo sapiens
atcttttaggtcacacagctaatgctttgtaaagcatttcctaaatccagatcgccttactctaaatcttataatactgttactactatgccatgtgacttggcaacttggaatgtttttcatgggaaatgttagtgcaaattggaagagtccttcatgctatgatctttcctatttataaatgcaactgccatgttcatgagaatttagaggaaaacaaaagaacaagaaagcatcttattgatgataaagcctttatagatggtgcagagcatcagttcagatttgatgaattggtgcgtggcattttcatgtggaattaaatactgatgccaactgtggctgagtattctttctgataccagcttttgggcatagtacttcatcacctggggcttctcttccttaatctataaaatgaaaattttgaactagcttatctctaaaactccattgattaraattcttgaactgtatgaaatttgataacttagacacaaaaaataggtagataatatgagaaaagttaacaaatgttttatttactttaatattttcag

SEQ ID NO: 682664 - DNA, 1844 bp, Homo sapiens
catgcttttcatccaccctctggtgtcctacatgacttcatattgctcaatgaggggacaggctagatgtggccaccctcaggtgctggccccatgttctcatgttgcacagtttttgggattctgggcttcacygagctctttatccttgtccagatggcagagcagaggaaatatctggtaaaatgttaattccacctcatttaatgcagcttacataggtgtggtgtagtcgaggcctctacaggaaaagctgatttcaagttctggcacaaggattagctgattcacaaaagatgtgagtctccgtttcttccctgcacatctgtcctgtctgcttttaatttggaagcaccagttttaatttagcggcaggactgtaaactccatttctgtgaatacagaatgacatactttgtggaacgggggcctctggccaagatctgactcctaagtaattgatggctagtgactggctgagaaatgctcaaatgcaaacacttcccatggcaaaaaccctgtcgtatcagctggattacaaacgagccttgctgggctgctgcccattgaaatataggccatgtctttaaccacagtctccaaaacctggagggagcctccagttcattctaaacatcgatgatctttccagtccacaggtttcctttgtcctcagactttgtctggagcctgtggcccaatgcacagatttcttcatatttggaagccaaccatatcgggaaggaggcttcagcattaagggttgttttgttctggtgaaaaggacactcttttcatcacatttaaaaaccaattttttaaaatctcactcatatccaatattttgtgtgtgtgagagagaaaacacaggcctaaagttacatcacccttgtggtttgagaaatctttttcacaatatgtagactgtttttggggctgggatttttggagaagggggaaaaatagtggggcaagaaggacagagatatgagacagaaaattaagtctttctgtaaacaagaaagaatggataagcaaagggaataaaatggacaaaacttccatgagtctgacatcttctagatacagagatagccgatacaaaatcccatgatgcctttaaaaaattaatttaagtccaccagtcttacatcaccattgaatccctatcacctgtcatggtgcctagcatatagtaagttttgatacatatttttaaatacatgaatgaggaaataagtaattattgcatgcttaccgtatgcccagcactgctgtactcaaagggcatgggaaacataactaatgccacagggaaacttatggggagtccagtgtagaataatggtaggaggcacagagcccggagttagctagtcctggatctgggtttgagccctgcctctaacacttaccagctgtgtggcctgggggaaaattatttaagctaattgttagtttcctttaattggaatgtggacaataataggacctatttcatgtggttgttgggaggattacttgtggtaaaggtgtaaggtgcttgtgctagaacatgggaaatactcagtaatggtaactattatataatttggaaatggtacatggccgccttatgcaatagttcttgctgtgagtctctccaaaatgtccttgaactcccaccttcgttttacatacaattgcttgccaattcctttctcaagacatagtgaggccaacattattcactcccgttggtcttgcttaagtgtgcagagtccttttgtcttggaactaatgtggattttgtaaaaaatcatttctccatggaggacagtggcactcagctccagtactaacaa

SEQ ID NO: 682665 - DNA, 651 bp, Homo sapiens
tctctgctgcaatagcatttcagccatttggagcctgtttggttttatttactgggatgagtactgaacaaactaatcgatcaccaatctaatttggttatcttatattactgaaataactctgccaaacaaaataaccagtcstagttatgatgacggtagaattggagtgcctgcggagcagaggagatgaaccattaacttgatcagctgtataaacaaagtttctgaccagtggaaaatgttagccaatatccaaggcaagggaaggactttagatgaaaaatcagagaggctgctaatagaatataacatatcctcagatccagagagaaaaagacagaaaatttcttcccacagttagtttagggatcagttgaagagtttgagtttgatgtggcatccgcctgaaaaacaatggaaggcatgcttcagagtgaggagctttctcatctgcttgccctgcttctgaaattatgtggattctgactctgagtcaccatgttagaaaggtctgttgttcatttctggagtggtatcagattcagcaaggaaagtacagagtgtaataaatatgtaataaacatctttctgaatcctgttactctagatatatccagaaattgtgaggtttgaaatagttcctaatga

SEQ ID NO: 682666 - DNA, 653 bp, Homo sapiens
atttgggtacaaatttaacaactaagttctacatcctcacatagaatttccaccttgagaagtaatatgagaaagtttagatagcaaaattgttaaatattctccactcaaacaagggctgattttcaaacaccttccttagtcatggggccaccatttcagaagtcactcctccctctcagtaataaccttgatgtttacaytataattttttctctcttgagggtgaagaactccgagacacacattttcctcaaagttcacagaaatcacacccagtacatcttgcctgacttctataatttcattgcagctaccagtctatggccaggggatcttctgccaagtcattaagaatgaatgtgtcagctgggcgcggtggctcacacctgtaatcccagcactttgggaggccgaggcgggcgaatcatgaggtcaggagttcgagaccagactggccaacatggtgaaaccatgcctctactaaaaatataaaaagttagctggacgtggtgacaggcacctgtaatcccagctacttgagaggctgaggcaggagaatcgtttgaacccaggaggcgggggttgcagtgagccaagattgcgccactgcactccagcccgggtgacaatgcgagactccatctcaaaaa

SEQ ID NO: 682667 - DNA, 653 bp, Homo sapiens
atttgggtacaaatttaacaactaagttctacatcctcacatagaatttccaccttgagaagtaatatgagaaagtttagatagcaaaattgttaaatattctccactcaaacaagggctgattttcaaacaccttccttagtcatggggccaccatttcagaagtcactcctccctctcagtaataaccttgatgtttacattataattttttctctcttgagggtgaagaactccgagacacacattttcctcaaagttcacagaaatcacacccagtacatcttgcctgacttctataatttcattgcakctaccagtctatggccaggggatcttctgccaagtcattaagaatgaatgtgtcagctgggcgcggtggctcacacctgtaatcccagcactttgggaggccgaggcgggcgaatcatgaggtcaggagttcgagaccagactggccaacatggtgaaaccatgcctctactaaaaatataaaaagttagctggacgtggtgacaggcacctgtaatcccagctacttgagaggctgaggcaggagaatcgtttgaacccaggaggcgggggttgcagtgagccaagattgcgccactgcactccagcccgggtgacaatgcgagactccatctcaaaaa

SEQ ID NO: 682668 - DNA, 653 bp, Homo sapiens
atttgggtacaaatttaacaactaagttctacatcctcacatagaatttccaccttgagaagtaatatgagaaagtttagatagcaaaattgttaaatattctccactcaaacaagggctgattttcaaacaccttccttagtcatggggccaccatttcagaagtcactcctccctctcagtaataaccttgatgtttacattataattttttctctcttgagggtgaagaactccgagacacacattttcctcaaagttcacagaaatcacacccagtacatcttgcctgacttctataatttcattgcagctaccagtctatggccaggggatcttctgccaagtcattaagaatgaatgtgtcagctgggcgcggtggctcacacctgtaatcccagcactttgggaggccgaggcgggcgaatcatgaggtcaggagttcgagaccagactggccaacatggtgaaaccatgcctctactaaaaatataaaaagttagctggacgtggtgacaggcacctgtaatcccagctacttgagaggctgaggcaggagaatcgyttgaacccaggaggcgggggttgcagtgagccaagattgcgccactgcactccagcccgggtgacaatgcgagactccatctcaaaaa

SEQ ID NO: 682669 - DNA, 480 bp, Homo sapiens
tgtgtgtgtgtatacatatatacctactcagtactaagcatgtgtgtatacacgcacacatgtatgtgcttagtactgagcaagawgcttttcatctgccctctgacttaaacatcaacacaattctcaaacccggtggtgccattcccattttatagatgagaaatcaggcccagccaggctatgtcgtttgcttaacatacaccctggaaagagagcttggattagaatctgaatttttctggttctgaagcgcttgacctttctcagtattaccaggtgtcatgtaattgaattcagattcaggcccctctctgaataatctaagctatcttatttcctctttgcatgtagaaaaatcatatggtgctaaattatgaatttgatgatcggtgggaaaccgttaagtgaaggaagctaatcgttctctgtcatagggcctcttatcaagtctaattatcagtagacaattctcatcta

SEQ ID NO: 682670 - DNA, 480 bp, Homo sapiens
tgtgtgtgtgtatacatatatacctactcagtactaagcatgtgtgtatacacgcacacatgtatgtgcttagtactgagcaagaagcttttcatctgccctctgacttaaacatcaacacaattctcaaacccggtggtgccattcccattttatagatgagaaatcaggcccagccaggctatgtcgtttgcttaacrtacaccctggaaagagagcttggattagaatctgaatttttctggttctgaagcgcttgacctttctcagtattaccaggtgtcatgtaattgaattcagattcaggcccctctctgaataatctaagctatcttatttcctctttgcatgtagaaaaatcatatggtgctaaattatgaatttgatgatcggtgggaaaccgttaagtgaaggaagctaatcgttctctgtcatagggcctcttatcaagtctaattatcagtagacaattctcatcta

SEQ ID NO: 682671 - DNA, 562 bp, Homo sapiens
ctgacaatcattcatgggattaatcaatcctaggaatcagctatatctggagatcccactaaatgtaagcaaggtacactgattgattgatggatggattgatggagtcttcttcctctgttgcccaggtgggagtgctgagacagactctcactctgtcgcccaggcagaagtgcagtggtgtgatctcagctcactgcaacctctgcctactgctgttgttcctgttggcacccacaacatcatttgggcttttttgatgttcaggaggtaacacagtcctttataaagtttacttaagcccatttatgctgtgacttgcaaattggtcatcattgcccggatatcgctaccacagaggctctagacactgtttaagttgccatayggcaggcactcctgttagtgcctccagagcactatagatgctctttttttcttttcttttctttttttttttttgagatggagtcttgctctgtctcccaggttggagtgcagtagcaaaatctcggctcactgcaacctctgcctccctggttcaagcaattctcctacctca

SEQ ID NO: 682672 - DNA, 1010 bp, Homo sapiens
gtgttataattttctataatttctaataatttattgtgagttctctgggcttgtattttaggggaaaaatggaaagaccaggatattgaagatgaacacaaaaaccagggaagaaatctaaggtgagttgcattcacaaataattatatagcccctgagagaatcttagtatttcataaatttcaaaagccaagcaagcaaaacaataagcagagtttcaggtttattcattcttagaaaatttttactgaaggtgtttcattgaaactgtcatgggcagccaggcgtggtggctcatgtctgtaatcccagcactttgggaggctgaggccagtggatcatgagatcaggagatcgagaccatcctggccaacatgatgaaaccctgtctctactaaaaatacaaaaaattagccgggcgtggtggcgtgcacctatagtcccagctactcgggaggctgaggcaggagaatcgcttgaacctgggaggtggaggttgcagtgagctgagatcgatccactgcactgcagcctggtgacagagcgagactccgtctaaaaaaacaacagaaactgtcattggctgggtaaggtagcgaatacctctaatcccagcctttggtaggtgaaggctggagaattgcttgaggccaggagttcaacaccagcctggtcaacatagygaaaacctgtctctacaggaaaaaaaaaaaagcaatagatgttcagggtgtgagaagaaatcactatgaaacagcatttaaaaatcctggctgggcgcagtggctcacgcctgtaatcccagcactttgggaggctgaggcgagcggatcacctgaggtcaggagtttgagaccccgtctctactaaaaaagatataaaattagcggggcgtggtggtgcatgtctgcaatcccagctacttgggaggctgaggcaggagaatcacttgaacccaggaggcggaggttgcagtgagctgagatcacgccactgcactccagcctggg

SEQ ID NO: 682673 - DNA, 1095 bp, Homo sapiens
ttatttgtgtattgagttttcattgtggaaacttactaaacatattgcatatgaggaaactacataaaacagttgcacagtcaactgaaacattgtaaagggaatgtcagtctcatgacagccaggccacgactttgaagacttctcaccacatgccccacttgaaatgattcctagaagccaaatcatccattctctttccagatggggccagtgttatagattataagataatttccttggcttttcttaacctgtgtactcaaccctatgtcaatatattttattttaagccagtcagttacatatttcatttttgaatgaatcttacgcaagtggcattatactgtgtgtactatggaatgtcaggtttcttttttcttttttttttttttgagacggagtctcgttctgttacccaggctggagtgcagtggcgcgatctcggctcactgcaagctccgcctcccagattcacgccaatctcctgcctcagcctcccgagtagctgggactacaggcgcccaccaccacacctggctaatttttcttttttgtagttttagtagagatggggtttcaccgagttagccaggatggtctttatctcctgaccttgtgatccgcccacctcagcctcccaaagtgcttggattacaggcgtgagccactgcgcctggcctttttctttttyttttttgtctttttgagaggaattgtcgctctgtcgcccaggctggagtgcagtggcacgatctcggctcactgctacctctgcctcctgggttcaagcgattctcctgcctcagcctcccaagtaactgggactacaggtacgtgccaccttgccctactcttttttttttttttttgtatttttattagagatggggtttcaccatgttagccaggatggtctcgaactcctgaccttgtgatccacccgcctcggcctcccaaagtgctggaattacaggcgtgagccactgtgcccagccagctttctttttttacactagaattttccatgaaaggttagtttatttgcttttttaattcatagtttacagaaaaatttgggagctattacagagc

SEQ ID NO: 682674 - DNA, 607 bp, Homo sapiens
gaaatacacagtatacataaccaagtactttcacccaggggctcaaaaattatcagaaaaatatatgcagctctatcttaacataaaacacagaaagcataaataatgcagcataaataattcatgcgttgctagtcaggtgaagtgccagtcagctttatttgcttctattcattcacggtagggcatgcccccaactcagcctgctattttactctttcttcarattcacaaacatctttgtttatgccctaactagtgcctaaaagcattctgaacagaaataggtaaagcaacatgttagaaactcaggatagaaagaattctggtcccactgtcaatccacccaagaaaacagagctgtgagttgttagtttaagtaatacattttcactttgcattaacttttaaaaagtggaaacatttttaaatggaaagagcttatagaccagttgcaatgtgctacttcaatttacaagttttaaggcaatcataatatgcccctgaaacaaaatgtttttaccttaacatcagtcactagtaaagcactcaccttgtgtcaaatcctcgaacaattgcacccatcgactttgctgcgcctgcagaa

SEQ ID NO: 682675 - DNA, 640 bp, Homo sapiens
ggggcgtccagtgaaggtctcctgcagttcccctcggcttgttaatcccttcatgggttccaggaaagatgatgcaggtgaatcccaaaactggggctcagcccaggagggttcttggcttcatgcaggaaggaattcaagggtgagccaacagagtaaagtgaaagcaaaccaagtttattaagagcaacagaatacaggaaaatggctgctccatagatagagcagggctaccccataagcagagtagcactcatggattgctgactaactctatttatagctactccttaattatatgctaaataaggggcaggttattcataaatttcctagaaaaggatgaggagttctcaaaaccaaaggttcctcctcttttaaaccatataatagcttctggacattgccatggcatttgtaaactgttatggcaccagtgtgagtatcttttagcatgctaatgtattataattagtgtataacacagatcaagggcaattagagatcwcattcgttgccatcttggttttagctgatttagctgatttatttaatgcctcctgttttgattagcaaggttgtgaccagtgtttggaaaacaagtcctgctgatctacctctatataagataattaaatta

SEQ ID NO: 682676 - DNA, 3208 bp, Homo sapiens
tgatagagttaaaatcttaatctgaaaccaatgtatgactcataataccacagcatcctgtgataacagtgaagaagaactgagctaaaactcagaaaactggaaaattgaggcctggagagattaaatgacttgggcaatgtcacatagattgttagaggcaaaattaagaacaaaagtgaggtatcgtgactccataccaagctctttctactaggccacattgcctcattttgttgaaaaccacatgattcttgatcattttttaaataatcatttttgaaaaaacaacatttattaagcaactctaatgagtgagctaaagactttcatatactatatctaatttaatcttgacaacgggcccaaaaattaccaatgagaagaaaaaagactcgaaaatgatgtaaacatgtacacataatcacagaaagacatggctagaacccactgtaagaatttatagaatttccatgtgatctccaaaatattaatttaaactgagaattctcagtatttttcacttagtaatcatagatttgctattgtttccattatattttcaaaactaaagaagtttcaattctactttcctattataagaaattttaatgtcatcaattataacagctattataggttatttgcttttgctttttttctttacctggtgtaataataatgctattagcttctcgaatcatgtcaattgcattgtcaaggttgatttccgtatgtgtgccagaaatttccatgggttttccaccagctgttgaagtggtgccatagcctccaagaatcacattagccagggagcgattcattgcctagaaagccaaattatcagctgtgagagtttaacacacataactttgtgagaatagtacaaatgttgtgtatatgatatttggaatcattttaaaaggtttatttgatcatttaaaacactttaatcagataaatttcagctggtttctgaaaatcacttcaaaaattgaaatgacagaagatatctgagaaccacattatctttttccctatcaaatcaattgcacactgatatattttcagtaaaaaaaatagaaaccaagaaaaaattatcaataaaattaataaactaatgaaaaaatcacatctatttattactgtctgaatgctgattgaacaattttatctctcagctgaattctgctacagattccatcttcacagataccagctgtgaagaagcaactggtaagaatcaaaacagtaaagatccatttcatctagaattttgctgccctctgtcatcaagaaaatagaaatatgggggttgatactgtcttattttccaaatcaattatagctccacaaagccccatacctaagttttaatagaagtaactgggttcatcattaggactctaaaatatttcacttccaaataggtagaagaataaggttatatactctttaaaatttatactcactcttttaactagaaaaataatctcaaaagaaaaataaaataaatgaacttctcatgctcatttataatcactcaagaatgtaccataggaatgccactgctgaaatatgttacagtaactggtctggttttgaaaacagttcatttgtagacctctggaggtggggtagtaaaagaaaggggaaaaaaaactagttgttctgagtaatcaaatgcattttaagaattcaaatcactgcatgtgattgaaactgtcattctacataatcataactgactttatcacttcagaacaaatttccaaaaacttactgaactctattttaagtgctgtaataaatatattattgcttcgttatacaacttaaaggctatataagtgtcaatctattgctttttttaaaaatacaacactttagtattaaaaaggtaaaaaagcaccaagatcttcaatgataagtaccacatcgagacaactatggccaccccacacaatgatggctcagcctgctaccagcttggtggagacatttccattatgctgagtagggcccagacaaaggcagggaggaaaaggtacacagaagataagcaagaagccatactttaataaagcctaaataacgtaaatttcaaagatgatgaatcaaaatgttgccagaattgtaattgttctttcaatctaaactcgtttatcagacrcaacattgacattttacagagcccaaagtctgacaaatttgtctaagattgttacatacaaaataaaacctgaaatgtctttacgtgtattattaaaggataagagggtgaaagaattaaagtgatgtcttttttttttttttttgagatggagtcttgctctgtcacccaggctggagtgcagtggaatgatctcagctcactgcaacctccgcctcctgggttcaagagattttcctgcctcagcctccagagtagtggggattacaggtgcatgccaccacacctggctaactttttatatatttggtagaaatgtggtttcaccatgttggccaggctagtctcaaactcctgaccacaagtgatctgcctgcctcggcctcccaaagtgctgggattacatgaatgagccacagtgcccagctaaagaaatgcttttaattaagttcacaatccctagctgacatggtgttttaaattcctaacacattcctcccatatttaaaaccaacgtttaatggaaacacaaatagccacatctgagacgtcccaaacattcaactcattgatctagattaatcctttctagttttgaattatacagttctgaaattgttatcaaaatatatgttctaccaaatttttgcccttaaaattgatttaaaggactatttcagacattaagatatttctgtcatagataacttttttaaaaaaagagtccagtgaggattgggttccaagatggccgaataggaagagctccagtctacagctaccagcatgagagacgcagaagacgggtgatttctgcatttccaactgaggtaccgggttcatcacgctggggcttgtcggacagtgtgggcaagacagtgggtgcagtccaccaagcgtgagccaaagcagggcgaggcattgcctcacctgggaagcacaaggggtcagggaataccctttcctagccaagggaagcggtgatggagggcacccggaaaatcaggtcactcccaccctaatactactgcgctt

SEQ ID NO: 682677 - DNA, 586 bp, Homo sapiens
tcatcattgtaaacaccataattggtccaagaataggaccataggacaataataattagaactgttttgacattgacatgtggacagagagaaggcagttctctccctgttggaaacaggtcagcctggagcttgtggcaaccattttcaataaccacatccaaaaaatctgtctacagaatgaagacgccaaatggtgtattggtagaggaggttccttattataacaaataatgcaaataaatttcctttcggctctctcagcagttcaccaccaggaatcctgattgagcagcttccctccatggagcaactttatgacttattttgcatctttttgatattgaaaagrttggatggctttctgttggggcataccacctggcatccctagacttcattcagatgtacagttgaatcaaagacaaagacagtgaatggagaatctaaaatgaggactcagagttctccattgtcctattattgcacaaaggatgtctaaagaaatgcctaacgtcaaggagcagggagttaacagctgggcactccctttctttatagctcttctccagctctccccttgctg

SEQ ID NO: 682678 - DNA, 598 bp, Homo sapiens
taaactgggatatataatgactgaaaacaaagactaaagtttgaatagcctggttcaaacttgggatccattagttattggctgtggggacttgagcatatgctttagcctttctaatcttcatttgaaaataggcatgaaaatgcatataatatacagggctatttggagttagaatgcatgtaaaactcttagcacaaagtctggaacatagtaagtgttccgtaaatgtccatcactgtattttaatgaagttattttatttatgaagtcaactatattctagtagaacgatgcttaatgaattattacacatccagaaatcacattttttcttagatgaatttttatgtaaatcaaggcataatcaaaataaatttttgtcaaaacttcttatcaattgtccccataaaatttattgactaatcaatccaaactcactgacataaaatttcctttatatttattaaataaaaacatgstctttatctgagctattctgctctgttgatctttttccacctgtaacacattaattaatgtgctttttttgttatttttaaaaagcgttttaatattttctaaagcagttctattc

SEQ ID NO: 682679 - DNA, 3070 bp, Homo sapiens
ccatcgattgatttatgacctataatacgctgtcattcagatacctctttagatccacatccacattttttggttcatctgagcttttctaataagatgcttcactttatctttgagttttattaagctaaaagaaaatacataattttcatctcctaaagagtacttaattttgaattttttgtaattatcttggagctttcttccttcctgtctgatgtttaaaactgagtcatttttgcttgggtcataacttcgatgtattgttagtcccgttcctatttgactctgtccattcttcctatttattcagttcatcttccctgagctcctagttgggatgttgctgggatcccagcagtcttaggtgaagaatcttcagcatttcctaggatagatttaaggaacaactcctgtctttcatcaaaattaaagcagttatcccaggtcactcttaaataagctctgccttccatatctcccatatttaagctcagcttttacctttctcaggtaaacttttctataaaaaaactggttaggattattttcatgataaaaatgtttgtatattcatcactgcttgagtaaaatctgtacaaagcgttttgcaattcattcccaattgagcttcccaagatctttgttttagttcatattccttcaatctgctgcttattttatcctctaatagtatttatctttcaatatccgaatccaatgttattctccaaagcctaacccagaatataaaattaatttatctttctccagtaataacttatatgtagcttattatgtcacagaacagattttaacaataactttcactttttctcaagcaagaatgtacatttttataaaactcatagcatctagcaaaataaaaatactgtgggtttttagtaaatgtctactgatagagcaaataaatccttgtgacaacagcaagaagataaaataatataattttccctactaggtcctcatattaatgtatgtttgttgtgtaaaatttgtgacacacattgtgggtacctcccaatagactttcagcacattgaatgaagagatgaagtctttttatttgtgtatgtgattataattgcataataagaaaataaatatcataacagaaaatccagaccaaaataggaaaaaaatggaaaataaactaaatgcagaaaattttctgattcaaatactgtaagatgttatttactagacagttttatctttccattcattgtttaatatccaataatgtgttagcaaactttgcattaattaccataaggtaatgcataggttattcatgtaatttcatggcagtggaatgatacttaactctgttgaatatttgttaaaatacttacacactgaaatgtaaagggatggaataaatagtggatgggtgtcttatgattcaggtacaatacaaataaattaaaatccaacatgctctaagcactcagtatgtgcaatgcactctgcctgcccttaagggacaatataagatcaagaaaatactctcttgcttacccagctgtaactccaccctactctaaaataatctattyattccatttgatgatgctacacagggcatctctaacgaaaaataccaaataaatgttttcctctgttcagttatttgttcttcatttctagcacaaaaatcaaacaaatattagaaggtaagttagactgtgtgtgtgtgtgtttatttgtatgttttaggcacatgtttactctttccatgtgtcagattgtttaaattcaaatcatttttgaatttttaaaagtatacgtagtacctcatttgataaatttcagctgctgtcttaattgcagatcctgcaatttcttatttattttgtctcaagtactattgtggcataaatgttgagctgtaggccgaacactgtggctcacgcctgtattcccatcactttgtgaggtcaaggtgggcagatcacctgaggtcaggagttcgatactagcctggccaacatggtgagaccccatctctactaaaaacacaaaaattagccaggcgtggttgtgggtgcctgtaatcccagctacttgggaggctgaggcaggagaatcgcttgaatccgggaggtgaagtttgcagtgagctgagatcatgccaccgcactccaggctgggtaacagagcaagactccgtctcaaaaaaaaaaaaaaaaaggaaagttgagttgtgaccaaatcttgtaaacaactttaggtgctaatctggataagggaataatgatagagaaagatgaaaaaagaaataatgaatctattatataaataggacaaatttaatgataaatgctgtcaagctataggaagcagaaaataactagcaatatgcaatcttagaatttacccagaaatagaaaaaacagatatcctctttcctctttcctctttcccctcaacttagcaatcgtgacacaaagagaaaatagaatgaaacttttaaaaaagagtgcttttagagctgaatgggccatttgttttttgtttttgttttaatcaatgggcattttgatgatggtgaaataaataatcctttatttttttaccctggcctcaccatttctctcatttattcttgagtatgtgttgagaaatgaaaagaaaattaaccttagagtcagagtcttttaccctcagaaaaagagaagagcctgaatgttagaaccttgtcaggagatttgtactggttctaactccaaagcacaaaataagaattttatgcttctttctgggttaaccatcctaatttcaaggttttaatagatcagcttacttgtaataaagcttcttaaaacatcttcttttcactattaatataattcttacctgatttcaatatttatggtgatttgtaattttatgagaactatattttatagaaaccagctttatacaaatacattaaatacatggaggaattagaagctcggcatttaatgatgcagttatcagggcatatgaatgtgaaccatttttgtcaacctaagcaaaatgcacttaacctgtaaatgtttca

SEQ ID NO: 682680 - DNA, 1979 bp, Homo sapiens
cagtattttaataatatgtttattgcttaaataattatgatgtttttacaaaccataattaagcagttaattactatatttctgttaagagttactgtgagagtttcattgctttaccaggatgttttggtaaaaagtgtaatgtccaattcttgacagcaaaccccaattatgaaaaatcagaatggccttgcactgcctcaagggtacaaattattcaaatgcaagactatggagaaagaacattacacagatcgagtccagttctaaagctgaaaatgtacacagtgaagaaaaatctggatgcaatacctaagagcaagaggagatgcagggcgtttctggcctcagaaggcaccatattgctgcacctggagcaggtcacctgtcagagagttagagcctcaaggtcaagttatgagagatctcttcctacagctattaatgcctagtaaatgtccaaaaaaactggaattacttgtacagaatattttctcataataagagttactgtctgttatgagccasgaaatattttgcacataaattacaactaatagtaacaacagtccatgtataattatccttagtttacagatgtggaaacttccctgggtgttcatgtagctgggaaagtgacatcataagacaaaattacagacaaagagttgcttgatgtgggatatgaagaaatggttattgatgctggagactcacaagaatatattaatattttcattattcttagaattaagtgccttggacagaaacatattgccatttgatgggattcttgtgttgtcagcaacatcttcaggaattcattaagactaccacagaaaatgaaatgctattttgctcctgaaattttaccagtaattttatttctgataaaaagaaaatgagtatagagttatatagactggtgtgctgttcgtgctttcccatttactacctaacaaacatcaggaaggttagctaacatctctaaggttgagtctcagcatctgtgaaatgattctttcctcacaggattggtgagtgttaattgaggtatgatacatggaagagtctagtgtgggaactgccatacccttttcataatacataagtggtttatcaattaatattgtattatatctttttggctaatcttactgttccaaatggattgcaagttcatggagaataacccatatctgaacattcttcaatatctctggggagacctaggatactgctggatataacgtaggcacgaaaaactcccagtgatcagaaagttcaaagaaaagacatcataacaactcttagtctgccctaataactcttgtatgccacattcctccttctacatcccatccatcgactcctaggaaattacagaaagaagttacagggccatgtatatgtctcaagggcaactcggaaacgggggattgggagagttgtagtattcaacaggccaggctgacattgtagctcctggaggaatgatgaaaagaaatcaggtgtcttaaggccttcaaggctggagaaggtggtgaaagggctccccagggttatactttgaatattacatgcatgcacccatgcaacctccaccctgctacagcaggctttgcagggcacaaaatgacagattctttccccagaaactcgctttttcttatgcataaccttccccaattattctcttaaagccagtaatagtagtcacttttcaagagatagttgatattcatggcacgatattttaaaggaaatgaagaatttgaggcaccctggtgttgctttccttcttcaagctcactgaacagttgagactagaacccagaaagcttcacatttctaggtcaaatttctcttaatccacttaagtataaggtattatttgttgacatatatacgtacccacatatatacatactcatgcatatatatttatacatatatacacatatatacatataagcata

SEQ ID NO: 682681 - DNA, 1979 bp, Homo sapiens
cagtattttaataatatgtttattgcttaaataattatgatgtttttacaaaccataattaagcagttaattactatatttctgttaagagttactgtgagagtttcattgctttaccaggatgttttggtaaaaagtgtaatgtccaattcttgacagcaaaccccaattatgaaaaatcagaatggccttgcactgcctcaagggtacaaattattcaaatgcaagactatggagaaagaacattacacagatcgagtccagttctaaagctgaaaatgtacacagtgaagaaaaatctggatgcaatacctaagagcaagaggagatgcagggcgtttctggcctcagaaggcaccatattgctgcacctggagcaggtcacctgtcagagagttagagcctcaaggtcaagttatgagagatctcttcctacagctattaatgcctagtaaatgtccaaaaaaactggaattacttgtacagaatattttctcataataagagttactgtctgttatgagccaggaaatattttgcacataaattacaactaatagtaacaacagtccatgtataattatccttagtttacagatgtggaaacttccctgggtgttcatgtagctgggaaagtgacatcataagacaaaattacagacaaagagttgcttgatgtgggatatgaagaaatggttattgatgctggagactcacaagaatatattaatattttcattattcttagaattaagtgccttggacagaaacatattgccatttgatgggattcttgtgttgtcagcaacatcttcaggaattcattaagactaccacagaaaatgaaatgctattttgctcctgaaattttaccagtaattttatttctgataaaaagaaaatgagtatagagttatatagactggtgtgctgttcgtgctttcccatttactacctaacaaacatcaggaaggttagctaacatctctaaggttgagtctcagcatctgtgaaatgattctttcctcacaggattggtgagtgttaattgaggtatgatacatggaagagtctagtgtgggaactgccatacccttttcataatacataagtggtttatcaattaatattgtattatatctttttggctaatcttactgttccaaatggattgcaagttcatggagaataacccatatctgaacattcttcaatatctctggggagacctaggatactgctggatataacgtaggcacgaaaaactcccagtgatcagaaagttcaaagaaaagacatcataacaactcttagtctgccctaataactcttgtatgccacattcctccttctacatcccatccatcgactcctaggaaattacagaaagaagttacagggccatgtatatgtctcaagggcaactcggaaacgggggattgggagagttgtagtattcaacaggccaggctgacattgtagctcctggaggaatgatgaaaagaaatcaggtgtcttaaggccttcaaggctggagaaggtggtgaaagggctccccagggttatactttgaatatyacatgcatgcacccatgcaacctccaccctgctacagcaggctttgcagggcacaaaatgacagattctttccccagaaactcgctttttcttatgcataaccttccccaattattctcttaaagccagtaatagtagtcacttttcaagagatagttgatattcatggcacgatattttaaaggaaatgaagaatttgaggcaccctggtgttgctttccttcttcaagctcactgaacagttgagactagaacccagaaagcttcacatttctaggtcaaatttctcttaatccacttaagtataaggtattatttgttgacatatatacgtacccacatatatacatactcatgcatatatatttatacatatatacacatatatacatataagcata

SEQ ID NO: 682682 - DNA, 649 bp, Homo sapiens
ccaaagttaatgtttcacatatgattaatttttctaggtttgttttggaaatgtaaaggcataatagaaaaagattttgaaatctagtatatagtccttattccattattaaataagcgactttggcaaagttatttttatgccttagctctgtttcctcatcttttaatcagaagatagatgttcaatctccctacattatcattataattttccagaacactactaattaataaattagttaattcaayagacacttagtgagtctttttggcaattaaaatacaacagtgaataaaaacagacaaactccttatggattttttaatactgtaattagtggacacataaataagtgtaatatgtaagcaaacatgatttgcttatacattatgttagctggtgataaagtgatgctgtaagaaaaaaattgaggaagttcgaagtggtaaggaaggtggagataggacaaggggttgcaatttaaatttgcccagtcagaagagaaagtcacatttgaaaaagacacagaactaatgtttagttagactggctacaaaaaatcagaacctgaaagaacaacattttcctcttttagatgctttgaaaaaaaatcaaatgcaagataactgatgagtagaatgaaagc

SEQ ID NO: 682683 - DNA, 649 bp, Homo sapiens
ccaaagttaatgtttcacatatgattaatttttctaggtttgttttggaaatgtaaaggcataatagaaaaagattttgaaatctagtatatagtccttattccattattaaataagcgactttggcaaagttatttttatgccttagctctgtttcctcatcttttaatcagaagatagatgttcaatctccctacattatcattataattttccagaacactactaattaataaattagttaattcaacagacacttaktgagtctttttggcaattaaaatacaacagtgaataaaaacagacaaactccttatggattttttaatactgtaattagtggacacataaataagtgtaatatgtaagcaaacatgatttgcttatacattatgttagctggtgataaagtgatgctgtaagaaaaaaattgaggaagttcgaagtggtaaggaaggtggagataggacaaggggttgcaatttaaatttgcccagtcagaagagaaagtcacatttgaaaaagacacagaactaatgtttagttagactggctacaaaaaatcagaacctgaaagaacaacattttcctcttttagatgctttgaaaaaaaatcaaatgcaagataactgatgagtagaatgaaagc

SEQ ID NO: 682684 - DNA, 649 bp, Homo sapiens
ccaaagttaatgtttcacatatgattaatttttctaggtttgttttggaaatgtaaaggcataatagaaaaagattttgaaatctagtatatagtccttattccattattaaataagcgactttggcaaagttatttttatgccttagctctgtttcctcatcttttaatcagaagatagatgttcaatctccctacattatcattataattttccagaacactactaattaataaattagttaattcaacagacacttagtgagtctttttggcaattaaaatacaacagtgaataaaaacagacaaactccttatggattttttaatactgtaattagtggacacataaataagtgtaatatgtaagcaaacatgatttgcttatacattatgttagctggtgataaagtgatgytgtaagaaaaaaattgaggaagttcgaagtggtaaggaaggtggagataggacaaggggttgcaatttaaatttgcccagtcagaagagaaagtcacatttgaaaaagacacagaactaatgtttagttagactggctacaaaaaatcagaacctgaaagaacaacattttcctcttttagatgctttgaaaaaaaatcaaatgcaagataactgatgagtagaatgaaagc

SEQ ID NO: 682685 - DNA, 698 bp, Homo sapiens
atctaatgaagttaasagcacctactcggtgccagacgctctcctagaagactggcattgtgtaattcaaattaatcctgagatcatggtgtgtggtagatgaatgggtccctttagttaatgtgaattctgtccacacacatctctgagcttcctgatttcagattatgccagaaaaaatcacttttcctaaggactgggaggaaaagtgactcttatagcaggcccaaattgaacagcaaacaggatgtgcaaagatttggaaggacaaccttgtcacggccaaatttccagccttattttccactggtccagaaaaatatatgcacagtgcaaagcagtctccaggctgagaacctggaggtgtcagtcagggctgggaggaaacagatggcatgctcaaattaggcaatttgaggaacgtttaataaaggagctatttacaaaggtatggggaacccacaagatacggtgcagttttctggggctggtaaaagctgagtgctgtcacctctcctaggtctgaggggacaggagacagagtgctgacctggaccctgagacagaaagcctggtgtgcaggacctgtggcctttggtggagggactcagccaacccatagtggcccagcaagtggaggcaggggaatgaatactccaacctcactttccgtctcctgccccgcccctgctgtttga

SEQ ID NO: 682686 - DNA, 698 bp, Homo sapiens
atctaatgaagttaagagcacctactcggtgccagacgctctcctagaagactggcattgtgtaattcaaattaatcctgagatcatggtgtgtggtagatgaatgggtccctttagttaatgtgaattctgtccacacacatctctgagcttcctgatttcagattatgccaraaaaaatcacttttcctaaggactgggaggaaaagtgactcttatagcaggcccaaattgaacagcaaacaggatgtgcaaagatttggaaggacaaccttgtcacggccaaatttccagccttattttccactggtccagaaaaatatatgcacagtgcaaagcagtctccaggctgagaacctggaggtgtcagtcagggctgggaggaaacagatggcatgctcaaattaggcaatttgaggaacgtttaataaaggagctatttacaaaggtatggggaacccacaagatacggtgcagttttctggggctggtaaaagctgagtgctgtcacctctcctaggtctgaggggacaggagacagagtgctgacctggaccctgagacagaaagcctggtgtgcaggacctgtggcctttggtggagggactcagccaacccatagtggcccagcaagtggaggcaggggaatgaatactccaacctcactttccgtctcctgccccgcccctgctgtttga

SEQ ID NO: 682687 - DNA, 698 bp, Homo sapiens
atctaatgaagttaagagcacctactcggtgccagacgctctcctagaagactggcattgtgtaattcaaattaatcctgagatcatggtgtgtggtagatgaatgggtccctttagttaatgtgaattctgtccacacacatctctgagcttcctgatttcagattatgccagaaaaaatcacttttcctaaggactgggaggaaaagtgactcttatagcaggcccaaattgaacagcaaacaggatgtgcaaagatttggaaggacaaccttgtcacggccaaatttccagccttattttccactggtccaraaaaatatatgcacagtgcaaagcagtctccaggctgagaacctggaggtgtcagtcagggctgggaggaaacagatggcatgctcaaattaggcaatttgaggaacgtttaataaaggagctatttacaaaggtatggggaacccacaagatacggtgcagttttctggggctggtaaaagctgagtgctgtcacctctcctaggtctgaggggacaggagacagagtgctgacctggaccctgagacagaaagcctggtgtgcaggacctgtggcctttggtggagggactcagccaacccatagtggcccagcaagtggaggcaggggaatgaatactccaacctcactttccgtctcctgccccgcccctgctgtttga

SEQ ID NO: 682688 - DNA, 781 bp, Homo sapiens
gtacacattatatacctcaggaatgtacaatgctcagtgcctggtgacggggattattcataccccaaactcagcatcgtacaatatccccaggtcacaaagctgcccgtggatcccctgaatctataataataataataaataaaaagtgactttgtcattcgcagggaaatgcaaatgacattcactctgcctctcaggcccttggattcccaaaatttgttttcatcacgcccaggggacactcagaatctcgttttcagaacatgggttgtttttcttagaaacactttgcaaaacaaaataggaagcaaaatctttctcactccttccactccgtaatagacaaaataaaatgaggggtcaggaatccagagactttgactgcagttggcagatttattgtggtacagacatgaaggcaaacagtgttctctctgattctacaaaccgtacagcccgggccggctgccttctgctttctggatggtgcaggcrtgagctccaagcccaaatttcaccggagctccaggaatcgagcctggcccaggcactcactgcacgggggccaagcgtgaaaccagtgatcactccagcaaggtaacaggagagcttggtgatccttcttgccggccacaaaaggttatagccagaattccaccgaatgtggtctttctgtgtctctccccagacagcgaagctggacaaacctgggggtgggggtggggggtgctgacctcagtggggtgtcctggaggggcaggaaccagggtttacaggg

SEQ ID NO: 682689 - DNA, 781 bp, Homo sapiens
gtacacattatatacctcaggaatgtacaatgctcagtgcctggtgacggggattattcataccccaaactcagcatcgtacaatatccccaggtcacaaagctgcccgtggatcccctgaatctataataataataataaataaaaagtgactttgtcattcgcagggaaatgcaaatgacattcactctgcctctcaggcccttggattcccaaaatttgttttcatcacgcccaggggacactcagaatctcgttttcagaacatgggttgtttttcttagaaacactttgcaaaacaaaataggaagcaaaatctttctcactccttccactccgtaatagacaaaataaaatgaggggtcaggaatccagagactttgactgcagttggcagatttattgtggtacagacatgaaggcaaacagtgttctctctgattctacaaaccgtacagcccgggccggctgccttctgctttctggatggtgcaggcatgagctccaagcccaaatttcaccggagctccagraatcgagcctggcccaggcactcactgcacgggggccaagcgtgaaaccagtgatcactccagcaaggtaacaggagagcttggtgatccttcttgccggccacaaaaggttatagccagaattccaccgaatgtggtctttctgtgtctctccccagacagcgaagctggacaaacctgggggtgggggtggggggtgctgacctcagtggggtgtcctggaggggcaggaaccagggtttacaggg

SEQ ID NO: 682690 - DNA, 781 bp, Homo sapiens
gtacacattatatacctcaggaatgtacaatgctcagtgcctggtgacggggattattcataccccaaactcagcatcgtacaatatccccaggtcacaaagctgcccgtggatcccctgaatctataataataataataaataaaaagtgactttgtcattcgcagggaaatgcaaatgacattcactctgcctctcaggcccttggattcccaaaatttgttttcatcacgcccaggggacactcagaatctcgttttcagaacatgggttgtttttcttagaaacactttgcaaaacaaaataggaagcaaaatctttctcactccttccactccgtaatagacaaaataaaatgaggggtcaggaatccagagactttgactgcagttggcagatttattgtggtacagacatgaaggcaaacagtgttctctctgattctacaaaccgtacagcccgggccggctgccttctgctttctggatggtgcaggcatgagctccaagcccaaatttcaccggagctccaggaatcgagcctggcccaggcactcactgcacgggggccaagcgtgaaaccagtgatcactccagcaaggtaacaggasagcttggtgatccttcttgccggccacaaaaggttatagccagaattccaccgaatgtggtctttctgtgtctctccccagacagcgaagctggacaaacctgggggtgggggtggggggtgctgacctcagtggggtgtcctggaggggcaggaaccagggtttacaggg

SEQ ID NO: 682691 - DNA, 1965 bp, Homo sapiens
cacactgacaggttggtaaaatattcattctcggactggactctggagccaaaataccctcggcccctgagctgctccagatactccctactctgccagtccaggctgaacctggaagaatctagacccttcttgttacagttttttgccctaggaggccttgaaggaagccagtcaaaccccctcattttacagatgggcagactgaggcccaggtctccccagtgctcaggcttcatccaagcggagcttccaaatggtggatggtagaatatggtgattaagaacaaatgttctggccaggcgcagtggctcacgcctgtaatcttagcacttcagaaggtcaaggcaggaggattgcttgaacccaggagttcaagactagccctggcaacacagggagccccttgtctctacaaaaaataaaaaaaattagccgggcatggtggcatgtgtctgtagtcccactgtgagcctgggaggtcaaggctgcagtaagccatggttgtgccactccactctccagcctgggcgacagagtgagactctgtctcaaagacaaaacaaaacaaaaaaaaacaacaaaagaacgagggttctgagtctgtctccttatctgtataatggtggtcctacctcacaggactcaagctgtgaaggtcatagtggtaacaaaattgccacacatgtagtataagcatgatcaggagccagtgtccaacccatcaggtagcaattacatagtgtcccaccatgagcctagacccccactccctgcgcccaggcatcagggactcccagaagtctaaagaggtccaggctggcacatccagaactctctccttcctgttccagccccttgcctctcctttgtctgtgaggctgggtctcctggaattcattgctgcccagtgggcatctgaggccctttctcctcctgcagggccagaagtttgcctggcactattgcccagagaacacagtggctggatgacatcatggagatgatggccttgccaaactggtttcccaacaggtcctcagtcccactccgagggctgctggccatgacctagggctcacccagttctgcacataaggaggaaggtcataccccttggatccagccaaccccaacaagaaccatccacttctagggactccattctccagcctcacctgcctgtctgttgcccaacaaggtcctcacaatcctacttccgttcctttgctaatgctgttcccatctccagaatgacagtgctgtcctggggagagaggcttagagagcccaaggcacagctcctccattgtgcatatgagcaagttgaggctccaagagggccaacccttacctagggtggagccaggggtaagacacccatcacccttcttgcctcctgacccaagcctgggttttccctgcaggacmctgactgggtggagggttagccaggtgacttagggatgcaatgcagacagcttggtaaaatagtcattctcagacttgggctctggagcaaaatattacccctagcctctgagctgctccagccacttcccattctgcctttctggggttgaacctggaagaacctagagtagaccctttctgtgacagccccttgccctaggaaggcctgaagcagaccagtctaatcacctcattttacaggggcaggctgaggcccaggcctctctggcgcccacaagatacattcatcctgctcacctggcattcagaatcctttgccaagagaagcacccacatttcctgctccacccacagcctatcctcctccttttcccagactattggtctttgctcacactgttcctctgccacaaatgccctttcatgcctttccccctcttctatgtgggatgaattttaaaaattagttgggcgtggtggtgtttgcctgtagtcctagcctcttgggaggctgagatgggaggattgct

SEQ ID NO: 682692 - DNA, 1849 bp, Homo sapiens
ccaccacacccagcctctcaattttcgttttttactgacaggcatgaaaaatcaaaatttcgaaagtagtcatctcacaagtagagagtttagccctgtcctcctagggaaggtgtctcttttgagatctacaggatctagatgtctctcatccaccctgtgcctgccacccatcctccccagagaactggttttctttgggatctgcaaaccagaccttctaacttcaccctagtttctcctctcttgttctctaggtctgacccttgagttcccaaggagaggagtcagtgtgtcctggccagctaccctaccaggcacagatgcactggcacctcttgctgactgcttgctccctggaccatttgcaagctctctgtggctcgttcttctcctgtttattcattttagaacaacatatttataattctatcacttaattcctcagataccccgtctctcctcccacactaatttttatttatttcaatggcaacattaaaacagcattttaaagaaaagaacaacttgtgattcgcctacactaattctccattaatttaatttttttatgttaagatctagtctgtgaccatgtgcctacagctctatcatgctaactcaacagatataattttttgtttccttctaatctatgttcatttgcaatatatatattttcagactgcctttgttgattcttttcattggaaaagattgttttaccatgtgcatgagatagaatggaaggacagtgagtgaaaagtttcctcagttcagacctccattcttttgtcactacaaccagctatacccygagcctcactctgttaccagtatctttccaaggattctctaagcatctacaagtactctgttaatgtcttttttacacaatggggcacatggtccacactattctgaatcttaaccttcttaaaaaatcttaaaaacccatcttagcacttgtttcaaatcagaacatgtcactttgtctctcattctttttaacagctgtatagtatcccactggaggttcctcatgtgatttatttgatcagtgaccaactggtgggtgtttttactgtatagtcttttttgctgtgtccagaattctgggctgggtgtggtggcccacacttgtaatcccagcactttgtgaggctgaggtgggtggatcacctgaggtcaggagttgaagaccagcctgactaatatggtaaaaccccgtctctactaaaaatacaaaaattagctgcgagtggtgatgtacacctgtaatcccagctactcaggaggctgagacaggagagtcgttcgaacctgggaggctgaggttgcagtgagccgagatcatgccactgcactccagcctgggggacagagcaagactctgtctcaaaaaaaaaaaaaaaaagaattctgcaatacattttatgttcatatgtctgtgtatatgtatgagtatatgtaatggatacattcgtagaagtgggatcctcaaatgaatcacattttaaatgtgttactcctattgcaaattgctttccccaagagattatactagtttgtatccccagtgacaatatacaaaagtgctgtttttctcgcagcttcacaaacaccacaggaattactttgaatcatactacgtgcagaattctctattatccttttcttacccacacaatgggtgggttcagtcacttgacaggtgacagcctgatgatgacagtgaaggaggatttggcaagggattttattccttgcaacaagtcaagtaaggagaataccagggatagctcccaatgcggtgcctccccaagctgggggctgggtccggtaatga

SEQ ID NO: 682693 - DNA, 1849 bp, Homo sapiens
ccaccacacccagcctctcaattttcgttttttactgacaggcatgaaaaatcaaaatttcgaaagtagtcatctcacaagtagagagtttagccctgtcctcctagggaaggtgtctcttttgagatctacaggatctagatgtctctcatccaccctgtgcctgccacccatcctccccagagaactggttttctttgggatctgcaaaccagaccttctaacttcaccctagtttctcctctcttgttctctaggtctgacccttgagttcccaaggagaggagtcagtgtgtcctggccagctaccctaccaggcacagatgcactggcacctcttgctgactgcttgctccctggaccatttgcaagctctctgtggctcgttcttctcctgtttattcattttagaacaacatatttataattctatcacttaattcctcagataccccgtctctcctcccacactaatttttatttatttcaatggcaacattaaaacagcattttaaagaaaagaacaacttgtgattcgcctacactaattctccattaatttaatttttttatgttaagatctagtctgtgaccatgtgcctacagctctatcatgctaactcaacagatataattttttgtttccttctaatctatgttcatttgcaatatatatattttcagactgcctttgttgattcttttcattggaaaagattgttttaccatgtgcatgagatagaatggaaggacagtgagtgaaaagtttcctcagttcagacctccattcttttgtcactacaaccagctataccctgagcctcactctgttaccagtatctttccaaggattctctaagcatctacaagtactctgttaatgtcttttttacacaatggggcacatggtccacactattctgaatcttaaccttcttaaaaaatcttaaaaacccatcttagcacktgtttcaaatcagaacatgtcactttgtctctcattctttttaacagctgtatagtatcccactggaggttcctcatgtgatttatttgatcagtgaccaactggtgggtgtttttactgtatagtcttttttgctgtgtccagaattctgggctgggtgtggtggcccacacttgtaatcccagcactttgtgaggctgaggtgggtggatcacctgaggtcaggagttgaagaccagcctgactaatatggtaaaaccccgtctctactaaaaatacaaaaattagctgcgagtggtgatgtacacctgtaatcccagctactcaggaggctgagacaggagagtcgttcgaacctgggaggctgaggttgcagtgagccgagatcatgccactgcactccagcctgggggacagagcaagactctgtctcaaaaaaaaaaaaaaaaagaattctgcaatacattttatgttcatatgtctgtgtatatgtatgagtatatgtaatggatacattcgtagaagtgggatcctcaaatgaatcacattttaaatgtgttactcctattgcaaattgctttccccaagagattatactagtttgtatccccagtgacaatatacaaaagtgctgtttttctcgcagcttcacaaacaccacaggaattactttgaatcatactacgtgcagaattctctattatccttttcttacccacacaatgggtgggttcagtcacttgacaggtgacagcctgatgatgacagtgaaggaggatttggcaagggattttattccttgcaacaagtcaagtaaggagaataccagggatagctcccaatgcggtgcctccccaagctgggggctgggtccggtaatga

SEQ ID NO: 682694 - DNA, 1849 bp, Homo sapiens
ccaccacacccagcctctcaattttcgttttttactgacaggcatgaaaaatcaaaatttcgaaagtagtcatctcacaagtagagagtttagccctgtcctcctagggaaggtgtctcttttgagatctacaggatctagatgtctctcatccaccctgtgcctgccacccatcctccccagagaactggttttctttgggatctgcaaaccagaccttctaacttcaccctagtttctcctctcttgttctctaggtctgacccttgagttcccaaggagaggagtcagtgtgtcctggccagctaccctaccaggcacagatgcactggcacctcttgctgactgcttgctccctggaccatttgcaagctctctgtggctcgttcttctcctgtttattcattttagaacaacatatttataattctatcacttaattcctcagataccccgtctctcctcccacactaatttttatttatttcaatggcaacattaaaacagcattttaaagaaaagaacaacttgtgattcgcctacactaattctccattaatttaatttttttatgttaagatctagtctgtgaccatgtgcctacagctctatcatgctaactcaacagatataattttttgtttccttctaatctatgttcatttgcaatatatatattttcagactgcctttgttgattcttttcattggaaaagattgttttaccatgtgcatgagatagaatggaaggacagtgagtgaaaagtttcctcagttcagacctccattcttttgtcactacaaccagctataccctgagcctcactctgttaccagtatctttccaaggattctctaagcatctacaagtactctgttaatgtcttttttacacaatggggcacatggtccacactattctgaatcttaaccttcttaaaaaatcttaaaaacccatcttagcacttgtttcaaatcagaacatgtcactttgtctctcattctttttaacagctgtatagtatcccactggaggttcctcatgtgatttatttgatcagtgaccaactggtgggtgtttttactgtatagtcttttttgctgtgtccagaattctgggctgggtgyggtggcccacacttgtaatcccagcactttgtgaggctgaggtgggtggatcacctgaggtcaggagttgaagaccagcctgactaatatggtaaaaccccgtctctactaaaaatacaaaaattagctgcgagtggtgatgtacacctgtaatcccagctactcaggaggctgagacaggagagtcgttcgaacctgggaggctgaggttgcagtgagccgagatcatgccactgcactccagcctgggggacagagcaagactctgtctcaaaaaaaaaaaaaaaaagaattctgcaatacattttatgttcatatgtctgtgtatatgtatgagtatatgtaatggatacattcgtagaagtgggatcctcaaatgaatcacattttaaatgtgttactcctattgcaaattgctttccccaagagattatactagtttgtatccccagtgacaatatacaaaagtgctgtttttctcgcagcttcacaaacaccacaggaattactttgaatcatactacgtgcagaattctctattatccttttcttacccacacaatgggtgggttcagtcacttgacaggtgacagcctgatgatgacagtgaaggaggatttggcaagggattttattccttgcaacaagtcaagtaaggagaataccagggatagctcccaatgcggtgcctccccaagctgggggctgggtccggtaatga

SEQ ID NO: 682695 - DNA, 1849 bp, Homo sapiens
ccaccacacccagcctctcaattttcgttttttactgacaggcatgaaaaatcaaaatttcgaaagtagtcatctcacaagtagagagtttagccctgtcctcctagggaaggtgtctcttttgagatctacaggatctagatgtctctcatccaccctgtgcctgccacccatcctccccagagaactggttttctttgggatctgcaaaccagaccttctaacttcaccctagtttctcctctcttgttctctaggtctgacccttgagttcccaaggagaggagtcagtgtgtcctggccagctaccctaccaggcacagatgcactggcacctcttgctgactgcttgctccctggaccatttgcaagctctctgtggctcgttcttctcctgtttattcattttagaacaacatatttataattctatcacttaattcctcagataccccgtctctcctcccacactaatttttatttatttcaatggcaacattaaaacagcattttaaagaaaagaacaacttgtgattcgcctacactaattctccattaatttaatttttttatgttaagatctagtctgtgaccatgtgcctacagctctatcatgctaactcaacagatataattttttgtttccttctaatctatgttcatttgcaatatatatattttcagactgcctttgttgattcttttcattggaaaagattgttttaccatgtgcatgagatagaatggaaggacagtgagtgaaaagtttcctcagttcagacctccattcttttgtcactacaaccagctataccctgagcctcactctgttaccagtatctttccaaggattctctaagcatctacaagtactctgttaatgtcttttttacacaatggggcacatggtccacactattctgaatcttaaccttcttaaaaaatcttaaaaacccatcttagcacttgtttcaaatcagaacatgtcactttgtctctcattctttttaacagctgtatagtatcccactggaggttcctcatgtgatttatttgatcagtgaccaactggtgggtgtttttactgtatagtcttttttgctgtgtccagaattctgggctgggtgtggtggcccacacttgtaatcccagcactttgtgaggctgaggtgggtggatcacctgaggtcaggagttgaagaccagcctgactaatatggtaaaaccccgtctctactaaaaatacaaaaattagctgcgagtggtgatgtacacctgtaatcccagctactcaggaggctgagacaggagagtcgttcgaacctgggaggctgaggttgcagtgagccgagatcatgccactgcactccagcctgggggacagagcaagactctgtctcaaaaaaaaaaaaaaaaagaattctgcaatacattttatgttcatatgtctgtgtatatgtatgagtatatgtaatggatacattcgtagaagtgggatcctcaaatgaatcacattttaaatgtgttactcctattgcaaattgctttccccaagagattatactagtttgtatccccagtgacaatatacaaaagtgctgtttttctcgcagcttcacaaacaccacaggaattactttgaatcatactacgtgcagaattctctattatccttttcttacccacacaatgggtgggttcagtcacttgacaggtgacagcctgatgatgacartgaaggaggatttggcaagggattttattccttgcaacaagtcaagtaaggagaataccagggatagctcccaatgcggtgcctccccaagctgggggctgggtccggtaatga

SEQ ID NO: 682696 - DNA, 857 bp, Homo sapiens
aaaaacaagaactttcaaacactgttagctaaattctgaattattaccatcttcctgataccaatgtggcaatatatgtacacagttgcaatgtgagccgcttcttggaatttatcataaggaaatcatcaaatagattaaaaacaatgtatgaataaagatgttcattacagcactctctataaaaagtccgaagttataacaactaaratcccagttaatggagatccataaagtaaaaggtattgataaggaacagagcaggtttcagagcaaagtgaatatggtacgacccatttttgcagatgtgtatgcagggggctgtcactaaccattgtcccagctggtgaggaaggagttggtggtggggtataatattaggaagtccaggccaggtacagtggctcaggcctgtaatcccaacactttgggaggtggggagatcacttgagaccaagagtttgagactagcctgagcaacatagtgagatcttgtgtctacaaaatatttgtttctaattagctgagtgtggtgctgcatgcctgtagcaccagctactcaagagcctgagatgggaagaaggcttgagcccaggaggtcaaggctgcagtgagctatgatcacaccatgcacttaaccttggacacagagtgagactctgcctgtataataaaatagatatttttattacatataataataaacttcataggtatacatgacaaacatatattataaacttcatatataatatatacacataataataaacttcatatataagtttatatatgatataaagtatatgtttatcatttattacatatatgttgctatatattattatacataatta

SEQ ID NO: 682697 - DNA, 857 bp, Homo sapiens
aaaaacaagaactttcaaacactgttagctaaattctgaattattaccatcttcctgataccaatgtggcaatatatgtacacagttgcaatgtgagccgcttcttggaatttatcataaggaaatcatcaaatagattaaaaacaatgtatgaataaagatgttcattacagcactctctataaaaagtccgaagttataacaactaagatcccagttaatggagatccataaagtaaaaggtattgataaggaacagagcaggtttcaragcaaagtgaatatggtacgacccatttttgcagatgtgtatgcagggggctgtcactaaccattgtcccagctggtgaggaaggagttggtggtggggtataatattaggaagtccaggccaggtacagtggctcaggcctgtaatcccaacactttgggaggtggggagatcacttgagaccaagagtttgagactagcctgagcaacatagtgagatcttgtgtctacaaaatatttgtttctaattagctgagtgtggtgctgcatgcctgtagcaccagctactcaagagcctgagatgggaagaaggcttgagcccaggaggtcaaggctgcagtgagctatgatcacaccatgcacttaaccttggacacagagtgagactctgcctgtataataaaatagatatttttattacatataataataaacttcataggtatacatgacaaacatatattataaacttcatatataatatatacacataataataaacttcatatataagtttatatatgatataaagtatatgtttatcatttattacatatatgttgctatatattattatacataatta

SEQ ID NO: 682698 - DNA, 749 bp, Homo sapiens
cacatgttgcagcttctttttggagaatgttttccaggccttttatgttctgtctctgattctcagaactctgcaaggtcagtgtgaccaccctgctccaaatctaagaaaacagaggtttccagaggaaggagaaattgtgcccagggtcacacagcttgcaagaggcagagtggaagttgattccagctctgcctgcaggaccctctcatttcccctctgtttcccttcttgacaaaggatcttcttcactctggaggtgccacccatgagaacaaagagctctggagagatgtggattcctgaagagctgcaggggaactgggagagggttttctgacagaacaatcttacctcaagaagtcagttrggcatggctgtaatatttcttttcactcccaggtaataccaaattgtaagtgcactaggacataaagaatacttttgtccatggaaaaatgaggtgggaattctaaacaaagcaagttttaaaactgtgtttcacttcaagtgtacaagtcccatcgcgtgtaatcataggactcggcagcttttgaaggtacagaggccacacaagaaccagcttagctgagcatcatttaaggccctcatttggaattgtccctgtgggtaataagttacattcactcttcactaatttacagtcagggcccatttgctattacaaatacggaacctctgacacttagaatattagatgggggccccactgggtggggatgaaggtg

SEQ ID NO: 682699 - DNA, 842 bp, Homo sapiens
tgggaggctgagatggaggatcgcttgagccagcgggaggtggagggttgaggctgccatgaactatgatcacaccaccacactccagcctaggtgacgagcaagaccctgtccccacccccctaaaaaaagtatggactttagttcataatgcatcaagctatggggtacatggaaactctctgtactgctttcaccatttttctaaaactgttctaaaataaaaaatttacttaaacatttatttaaaaaaaaaaacaaaccatttgagtaccaacagtgtcatatgctcaacttagcacatctttttcctggtttggtttgtgggcgtgaatgtgtactgagccatctaaaccttggttgcccgaccttcacygtagccactgacccaggttaacagacaaaaggcccaggttaaggttatgcccagtggccataaaatagcccagcatccagactgcactccttgatgtacccaaaaaagccaaggaataggacggatgggcggggagtggggggcaaactactgcccattgcccaactctggccagctgtctgttttataaataaagttttattggaacacagtcacacccattcatttattatcatctatggctacatttgcatgacaatggcagtgttgagtagttgcaccagagatcgtgtggcccacaaaatatttattatctagcactttacagaaaaagcttgtcaacctccaggacagtggccacaagttctgccatcatctcatcccttagcaagaagggaaaggaatgcccattaaggcacaaattgttttctgttgttgtttgtttgtttgtttgtttttgagacgg

SEQ ID NO: 682700 - DNA, 634 bp, Homo sapiens
tttgcccaatatacaatctaaaaaattaaccaaaagggcaaaaaggaaacttggtaacatgttagtttttttcaaaattgatttattgattttttttttttttgagactggttcactctgtcgcccaggatggaggcacaatcatggctcactgtggccctgacctcttgggctcaagcagtcctcctgcctcagcctctctagcaactgagaccacaggctcatgcaaccacacccggctaacttttaaattttctgtagagatggggtcgcactatgttgcccaggatggtctcgagtgatcctcacaccttggcctcccaaagtactgggattataggcataagctaccatgctgagccaggatttatttattttttacagtaaaaactgccttttccaggaaataataaaaaacataatacagagtcaaggagagtaaaaacgaaagtcaaaccccccagattatattccccagtaactactatttatgtgaggtattaaaattaaggagaagtacaaacatgctctcgtggcctaagtaaagaccagctctaaatgatgccagttcaatcaaytgaaaataaaaaaattcatcctgaaacaatttttttttcatgtgattatccggaca

SEQ ID NO: 682701 - DNA, 1446 bp, Homo sapiens
cttttagtcttacattccagttgaatggaagatttggcctcatttaaaactgtatttattttattttatgtatttatttttattcatttctttcttactatataaagtttttaattttttggggatgaggtcttgctctgttgctcaggctgaagtgcagtggtgcagttatagctaactgtaacctcaaactcccgggctcaagtgatcctcctgcctcagcctcctgagtagctgggaatacaggtacatgccactgtgcccagtgaatttttaaactttttttttttatagaaatggggtcttgctatgttgcctgtactggcagaactgtattaataactgctaaacaaggtcaggttcctcataggatattgtaggatttaattattctttaatgatctgttgacttggaggtgaactttttttcctttctaaattttatagcagtgaagtgacacacctgtgcccagcctaattctaggatttttctcctgacacacccaagactgttggaagagtcttacttcccatgctgtcatcagtcaggctgtgcctcagcttgcctttcaaactgcagattgtgttgataactagagggaaacaaagtaacaaatactccaggaataaaaaaaatggaaactagcaatgtagttcagctgtcacttctttcatgaactaagtgagcacagctcacttaaccctgcctctgattttcaattgtatgttttatcttaatagatcgattagatagttaaactagacatagtatcatttctctgaatgttaaaacttgagtatatgtgttaacattatttaaccaaactttttctacctttttttggtggattttttaaatgccagaaactaggttttatttttcttattgggaaaggagaaggtttggcttcaccctggaccttctcacatgctcagaagcactgtcccgagccatgtgttaggtggtggttgagaggctgcagtgagtcccatagcctgaaggtggttggtgtgaggacgtgctgtgggcatggcctgctgtggaatgtcctggcsgtggttggagtcctgcaaggcagattgtgctttggctcaaccaaaagcaccatttcactccagcagccctcctcagggtggtactttctaagttcctgacttctagatttaggtcctccatcctaagcccacatcacagatttgcagaattaattctggaaacaaagttaggttttatagactttgtggtttcttacagcttggattgtgtggtggatttcttggaatgttaacacttctttatctctttgtttctcgatgttgtagttaccagaaaaactcataagcaaatacaactggatcaagcaatggaaacttggactgaaatttgatgggaagaatgaggacctggttgataaaattaaagagtcccttactctgctgaggaag

SEQ ID NO: 682702 - DNA, 1402 bp, Homo sapiens
ttttatctttctaacaacctcattaggcctcattattaccataaattgcgcagacagacattcaaatacaattttatcttttgacttccaaacacccaattataatggcttggaaacctaggcctagaatcagggtttgggtttgagtttactctctcagaaccagtgggagagctggagaaacacacaccttttgggtgggaataatttttacatattatccctctaggtgggaaaaacaactcagaacagcaaacatctcccttccccagctctccacaaagggtgcaggtcctcacactgaagctctctccctcccccgcaaacacaggcagggttcccaaatggcacacaactgcattcgcaatttctgtaaaaaatgttcatcctctgaaaaaatggtctagttgcaatgttagcaaagggagttccggactctgagaaagttgtaaagaccagaagatttcttggactaattagtttggtgactgaggccgcagagaaaacatttctgcggctagatttcgtttttgcccaatcgttccaaaatgtactttgcgcttttctaattattttggttgtaattgtaaagaagacgtttcagcctcgtctccactgggaattctttttgaaaggacaccttgtaaatctctcatcgcgtcccggcctccccgccgcctgaacaaaatgggggctgatctttttcgatagtaagagacctgaaaggcagccgggccgctttctttcaaaactacaagaaaagttacagggaaacccgctctttgcttgtgcacacttgaggggcgtttactccccgcttctcctgcggggagcggggagatatcgcgggtgcttggaaattgctttatcccgcgggcagcgacccaggagggggctgcctcccagggccccgcgcccgccgcacaattcaccagccgtccgaagtttaagcaccgaccttgcagtcagaccaaggaaaatggatgatttggaccggcagacaggccaatgcccccgcggagaattaagtgtgcagccgcctgccccgacatctaacgcccactgggacgggagactaagaggacaccatttgttttaagccaagggacactgttttctttaatcctccattatgtaacgcaggaagaaaagtgcttttctttctgtgcaaatgaaatgaaaacttgggcaacttacaaaagtaaaatcaaacaccgtttcagacaccagcacattactgcaacttaatttttgtttaatctcaaattcgcactcacgccgtggagagacctctccatccctttggacctctattgttaagattattttgattgactctacyaggcttagaaggggtctgtctggcaaactcggatacaactatctcggagctgctaaagag

SEQ ID NO: 682703 - DNA, 596 bp, Homo sapiens
ttatcagtgacatcttctatagaattgtcaggtagcaaaaagtttaagtactctcagttaattcggataaacaaaaatgttttagttaaaagtatgtcctatgcaatatttgcggtatatttacactaacaattatttagttttgtttcaatattaaaaatattattcaggtgtatctgcaattcaaataaactgagcatcctgtattttgcctagcaaccctactcttcttttcccaaacagtgtgctttaaatgactcccacaaatattctttaaacccacccaaactttcagagrttaaaattgttaatctctttttttttttttttttgagacaaagtctccctctgtcacccaggctggaatgcagtggcacgatctcggctgactgcaacctccacctccctggttcaagtaattcccttgcctcagcttcccaagtagctgagattacaggcagtttagagtaataaaaatgatgctaaatctttactctctaaaaattaaactttttaatctctaaaagtttagagcaataaaaattatgataaatctttatggggcgtgtatagcacaatttataaataaaatactg

SEQ ID NO: 682704 - DNA, 596 bp, Homo sapiens
ttatcagtgacatcttctatagaattgtcaggtagcaaaaagtttaagtactctcagttaattcggataaacaaaaatgttttagttaaaagtatgtcctatgcaatatttgcggtatatttacactaacaattatttagttttgtttcaatattaaaaatattattcaggtgtatctgcaattcaaataaactgagcatcctgtattttgcctagcaaccctactcttcttttcccaaacagtgtgctttaaatgactcccacaaatattctttaaacccacccaaactttcagagattaaaattgttaatctctttttttttttttttttgagacaaagtctccctctgtcacccaggctggaatgcagtggcacgatctcggctgactgcaacctccacctccctggttcaagtaattcccttgcctcagcttcccaagtagctgagattacaggcagtttagagtaataaaaatgatgctaaatctttactctctaaaaattaaactttttaatctctaaaagtttagagcaataaaaattatgataaatctttatgggkcgtgtatagcacaatttataaataaaatactg

SEQ ID NO: 682705 - DNA, 631 bp, Homo sapiens
taagtaataaaaaacttaactttgaaatgttacttaagttctctgtaattcaagtatctttgtttttttgttgttgttgtttgtttgttttttcttaaagtactagtccccaaaactgagaagctgcatctaagataattcttgaatcaaacactactttgcactgttgaagtggtaaggggcaggaagccaaataacaggtccgggccaaggaaaaatttatagatgtgagtgaagtcagttttccctattctgctcttttttttcctttttcttccctcccaactatatcmatgtttaaccaacaaaatttatttattcgacatactgttactgggagcctattacgggtcaggcacttcatgaaatactggaaattcacaagaatgaataataaatacacaactcctacacggtggttcacagcttggtaggggagatagatacataaacaaatagctcagactacaacgtgctacaaaatggcactgaggtaagggcaaactggggtgggaacacagaggaagcaacaattaactctgcctgtgggaagcagagaatggctgcattagaaggtccctctaagctaggtctctagtgtgcaagagtttgccaaggagaggaaacagca

SEQ ID NO: 682706 - DNA, 631 bp, Homo sapiens
taagtaataaaaaacttaactttgaaatgttacttaagttctctgtaattcaagtatctttgtttttttgttgttgttgtttgtttgttttttcttaaagtactagtccccaaaactgagaagctgcatctaagataattcttgaatcaaacactactttgcactgttgaagtggtaaggggcaggaagccaaataacaggtccgggccaaggaaaaatttatagatgtgagtgaagtcagttttccctattctgctcttttttttcctttttcttccctcccaactatatcaatgtttaaccaacaaaatttatttattcracatactgttactgggagcctattacgggtcaggcacttcatgaaatactggaaattcacaagaatgaataataaatacacaactcctacacggtggttcacagcttggtaggggagatagatacataaacaaatagctcagactacaacgtgctacaaaatggcactgaggtaagggcaaactggggtgggaacacagaggaagcaacaattaactctgcctgtgggaagcagagaatggctgcattagaaggtccctctaagctaggtctctagtgtgcaagagtttgccaaggagaggaaacagca

SEQ ID NO: 682707 - DNA, 571 bp, Homo sapiens
gtctgtcagctcctgacttcttttatcatgattcttagctcctttgcattgggtgacaacatgttcctttagctgagtgaagtttgtttttatccatattctgaagcttacttctttcatttcagccatctcagcctcggcccaggcttgagcccttgctggagtgttgcagtcatttggtggaaaaggggaactctggctttttgagttttcagtgtttttctgttgattttttttcctcatctttgtgggcttatctgccttcaatctttgagggtgctgacctttggatggggtttttgtgrgttttttgtttttgttgttttctgtttttcttttaacagttccgcatgaatacatacaattacttgcccattaaaataattaattttttaatttaaaacgttcttataaattagaaggttaaaaaagagcatatgcttaataaggtattgttgacctttgctgttccagcatctcagtcagtctggcctgtgggccttggcgagcccaaactgatcaggggctaaaaggatccccaacagagcacagctgctctaccaaaagccag

SEQ ID NO: 682708 - DNA, 1619 bp, Homo sapiens
tggctttatttcctacatttacgggagcaaattccagcttcggtcaagtgaacggtctgcgaagaagttcaaagcgaagggaacgattgacctgtgaattctttgccgtctaaggcagttgtttatgacagctgaaaactggacactccctaaatgtccacctttcagtgaagagatagttaagccaattccatttatagaccacctccagccagtgacgctccgagttgaggatgttgaacaacatgggaaggtcgcagcgtactaagtgaagaagtcagaggacagaggaatttctctttctaggagattttcattttgtgtgactcccatggggaggaacagactggcaggaagcacaccggggttaacactggttgacttgaataggattattcgatttttaaaaatacttttccatgttttctgagtgctctatgataaatcagttgcatctgtgataatacagtacatatgtggacataaacagggatcaaataaaggaggtattgctgcagtccagccaggttgaaagggaaggggggtccccaaaggtccattggatggcaggtgtctacagaggcwcgcctttgggtggaactctgacccacctaaggtttactttgctatttcaggaaggttgaagaggattgaagggtgagttgctaagtgacttagggtttattcacttcaggaatcatagctggggtggaccccaggagcagagtactgcatgcagctgtgcccatgcatggttgccccagcgtagtgagatgggacctgccgcagcatgcccactcctgagctgccaggctgagccatggaggactgaaaggaggtcgcccggcatcacctcccgaggtgagacctgctgcaaaagccaagccagcagcattgacgccctttgatatcttcgccatttttgctgctgaaagacttggcttttcagtctgaccctggccctctgtgaccatgtgtctgtaaagccagtgggtcaggcccttccatgcagggccagaggaaaagcgggcccagggctgcagtgagagcggggcaggggaccagcctaccagatgggttggaaacatggctcagaaggaccaactaccccttccctttgaggagcaagtctctgccgatcagcaaggcaaggccaggagccctcctggcgaaaggcaggccacaaatctgttctcccccaggagaagtagcagtgccagggctttgcgtttctggtaacttccacccaaaccacaccagagagaaacaccgtagtggagaagggaagtgggagcgctgactgctgtgtgccaggagagtagaaaggcccaggtctgtgccaccacccctccccaaagctcagtgcacccagagtctcacagggaccaacacggtgcctcggtcctgcttccatccatgcaagtgtcctccgctcaccagggtgttctgaggcagctcaagtgctctcccccaagcagcacgcagtcaccgctgccagtgatgaacacacgcacgggctaggcacatggagcccaagcacactgccacctcggacacgggccccggcccagcgactgccttgtggtgtggccgtcctcatctgccacaggaagacagac

SEQ ID NO: 682709 - DNA, 1619 bp, Homo sapiens
tggctttatttcctacatttacgggagcaaattccagcttcggtcaagtgaacggtctgcgaagaagttcaaagcgaagggaacgattgacctgtgaattctttgccgtctaaggcagttgtttatgacagctgaaaactggacactccctaaatgtccacctttcagtgaagagatagttaagccaattccatttatagaccacctccagccagtgacgctccgagttgaggatgttgaacaacatgggaaggtcgcagcgtactaagtgaagaagtcagaggacagaggaatttctctttctaggagattttcattttgtgtgactcccatggggaggaacagactggcaggaagcacaccggggttaacactggttgacttgaataggattattcgatttttaaaaatacttttccatgttttctgagtgctctatgataaatcagttgcatctgtgataatacagtacatatgtggacataaacagggatcaaataaaggaggtattgctgcagtccagccaggttgaaagggaaggggggtccccaaaggtccattggatggcaggtgtctacagaggctcgcctttgggtggaactctgacccacctaaggtttactttgctatttcaggaaggttgaagaggattgaagggtgagttgctaagtgacttagggtttattcacttcaggaatcatagctggggtggaccccaggagcagagtactgcatgcagctgtgcccatgcatggttgccccagcgtagtgagatgggacctgccgcagcatgcccactcctgagctgccaggctgagccatggaggactgaaaggaggtcgcccggcatcacctcccgaggtgagacctgctgcaaaagccaagccagcagcattgacgccctttgatatcttcgccatttttgctgctgaaagacttggcttttcagtctgaccctggccctctgtgaccatgtgtctgtaaagccagtgggtcaggcccttccatgcagggccagaggaaaagcgggcccagggctgcagtgagagcggggcaggggaccagcctaccagatgggttggaaacatggctcagaaggaccaactaccccttccctttgaggagcaagtctctgccgatcagcaaggcaaggccaggagccctcctggcgaaaggcaggccacaaatctgttctcccccaggagaagtagcagtgccagggctttgcgttyctggtaacttccacccaaaccacaccagagagaaacaccgtagtggagaagggaagtgggagcgctgactgctgtgtgccaggagagtagaaaggcccaggtctgtgccaccacccctccccaaagctcagtgcacccagagtctcacagggaccaacacggtgcctcggtcctgcttccatccatgcaagtgtcctccgctcaccagggtgttctgaggcagctcaagtgctctcccccaagcagcacgcagtcaccgctgccagtgatgaacacacgcacgggctaggcacatggagcccaagcacactgccacctcggacacgggccccggcccagcgactgccttgtggtgtggccgtcctcatctgccacaggaagacagac

SEQ ID NO: 682710 - DNA, 1619 bp, Homo sapiens
tggctttatttcctacatttacgggagcaaattccagcttcggtcaagtgaacggtctgcgaagaagttcaaagcgaagggaacgattgacctgtgaattctttgccgtctaaggcagttgtttatgacagctgaaaactggacactccctaaatgtccacctttcagtgaagagatagttaagccaattccatttatagaccacctccagccagtgacgctccgagttgaggatgttgaacaacatgggaaggtcgcagcgtactaagtgaagaagtcagaggacagaggaatttctctttctaggagattttcattttgtgtgactcccatggggaggaacagactggcaggaagcacaccggggttaacactggttgacttgaataggattattcgatttttaaaaatacttttccatgttttctgagtgctctatgataaatcagttgcatctgtgataatacagtacatatgtggacataaacagggatcaaataaaggaggtattgctgcagtccagccaggttgaaagggaaggggggtccccaaaggtccattggatggcaggtgtctacagaggctcgcctttgggtggaactctgacccacctaaggtttactttgctatttcaggaaggttgaagaggattgaagggtgagttgctaagtgacttagggtttattcacttcaggaatcatagctggggtggaccccaggagcagagtactgcatgcagctgtgcccatgcatggttgccccagcgtagtgagatgggacctgccgcagcatgcccactcctgagctgccaggctgagccatggaggactgaaaggaggtcgcccggcatcacctcccgaggtgagacctgctgcaaaagccaagccagcagcattgacgccctttgatatcttcgccatttttgctgctgaaagacttggcttttcagtctgaccctggccctctgtgaccatgtgtctgtaaagccagtgggtcaggcccttccatgcagggccagaggaaaagcgggcccagggctgcagtgagagcggggcaggggaccagcctaccagatgggttggaaacatggctcagaaggaccaactaccccttccctttgaggagcaagtctctgccgatcagcaaggcaaggccaggagccctcctggcgaaaggcaggccacaaatctgttctcccccaggagaagtagcagtgccagggctttgcgtttctggtaacttccacccaaaccacaccagagagaaacaccgtagtggagaagggaagtgggagcgctgactgctgtgtgccaggagagtagaaaggcccaggtctgtgccaccacccctccccaaagctcagtgcacccagagtctcacagggaccaacacggtgcctcggtcctgcttccatccatgcaagtgtcctcygctcaccagggtgttctgaggcagctcaagtgctctcccccaagcagcacgcagtcaccgctgccagtgatgaacacacgcacgggctaggcacatggagcccaagcacactgccacctcggacacgggccccggcccagcgactgccttgtggtgtggccgtcctcatctgccacaggaagacagac

SEQ ID NO: 682711 - DNA, 646 bp, Homo sapiens
attcaataaagttacagctctggggacagtcatgtagtcaaagaatgaaggcgaaattcattacaattgcccatggtctttatttacatgccttctagtgaaaaattcctaagtgcctaaacagcaagtctgcaatgatagcagctgtttattaaaractacaaaaaagaaatggaggccgggcgtggttgttcacatctgtactccttgaattttgggaggctgaggcaggcagattgcctgaggtcaggagctccagaggagcctggccaatatggtgaaatcccatctctactaaaaatacaaaaattagctgggtatggtggcgggcacctgtaatcccagctactcgggaggctgaggcaggagaattgcttggacccagaaggtgaaggttgcagtgagccaaaatcgcaccattgcactccagcctgggtgacaagagaaagactcttatcttaaaaaaaaaaagaaaaaaaagaaatggcatcttcttcaagaattacatcgtgtttcatgataaagaagctctaattttgcatttgttcaagtattgatgagatttacccaatatgacacccatcttggataaaatgcaaacaacacaatttcattttgtcattaacaaaaccgattaagtagtcta

SEQ ID NO: 682712 - DNA, 646 bp, Homo sapiens
attcaataaagttacagctctggggacagtcatgtagtcaaagaatgaaggcgaaattcattacaattgcccatggtctttatttacatgccttctagtgaaaaattcctaagtgcctaaacagcaagtctgcaatgatagcagctgtttattaaagactacaaaaaagaaatggaggccgggcgtggttgttcacatctgtactccttgaattttgggaggctgaggcaggcagattgcctgaggtcaggagctccagaggagcctggccaayatggtgaaatcccatctctactaaaaatacaaaaattagctgggtatggtggcgggcacctgtaatcccagctactcgggaggctgaggcaggagaattgcttggacccagaaggtgaaggttgcagtgagccaaaatcgcaccattgcactccagcctgggtgacaagagaaagactcttatcttaaaaaaaaaaagaaaaaaaagaaatggcatcttcttcaagaattacatcgtgtttcatgataaagaagctctaattttgcatttgttcaagtattgatgagatttacccaatatgacacccatcttggataaaatgcaaacaacacaatttcattttgtcattaacaaaaccgattaagtagtcta

SEQ ID NO: 682713 - DNA, 604 bp, Homo sapiens
gtatccagagagttggagaactggtgtagaaactctgcacacacatttggtcagaagtctgtgagtagagagaaacgtgttgcaggaagtcagggaccccaaacggagggactggctgaagccacagcagaagaacataaattgtgaagatttcatggacatttattagttccccaaattaatacttctataatttcttaggcctgtcattactgcaatctctgaacataaattgtgaagatttcatggacacttatcacttccccaatcaatacccttgtgattttctatgcctgtctttaatctcttaatccggtcatcttcgtaagctgaggatgaatgtccccgcaggaccctgtgataattgcgttaactgcacaagttgtttaaacaatatgaaacctgggcacsttgaaaaaagaacaggataacagcaatttcagggaacaagggagataaccttaaactctggctgcctgtgggccgggttgaacagagccatatttctcttctttcaaaagcaaataggagaagtattgctgaattctttttctcagcaaagaacatccctgagaaagagaatgcatccctaaggggaggcctc

SEQ ID NO: 682714 - DNA, 604 bp, Homo sapiens
gtatccagagagttggagaactggtgtagaaactctgcacacacatttggtcagaagtctgtgagtagagagaaacgtgttgcaggaagtcagggaccccaaacggagggactggctgaagccacagcagaagaacataaattgtgaagatttcatggacatttattagttccccaaattaatacttctataatttcttaggcctgtcattactgcaatctctgaacataaattgtgaagatttcatggacacttatcacttccccaatcaatacccttgtgattttctatgcctgtctttaatctcttaatccggtcatcttcgtaagctgaggatgaatgtccccgcaggaccctgtgataattgcgttaactgcacaagttgtttaaacaatatgaaacctgggcaccttgaaaaaagaacaggataacagcaatttcagggaacaagggagataaccttaaactctggctgccwgtgggccgggttgaacagagccatatttctcttctttcaaaagcaaataggagaagtattgctgaattctttttctcagcaaagaacatccctgagaaagagaatgcatccctaaggggaggcctc

SEQ ID NO: 682715 - DNA, 936 bp, Homo sapiens
gaccatgtacttaattggaaacctagatgcaaaagactgaaactgaatcttcaccccaaaatgaaaacaaaataaaatgagtaacttgaggtttatggcatatagtttaggtaaacacacacacaaggagaagggggaagaggaaatggaaggtgtcggaagcaaagctgagtgacagaacacattcagtcagggcagatgtctatacagagtgtagtggaacctcaggaaaagcttcatatggattcatgcgcacgcgtctggaggcaccagatccctccatggcagatccaagaacagggagctgagggagaaggccattcccttcattccagttttaggagctccacatcgaagacgagagtggcgtgtggtgggatgatgcctgggtgcccagtggcaccgtaggcagaatctggagatatagtcagttgggctgtctgacccacactcatctaagcaaccctttcttcccagcctcggatcacctcctgctaaaaattaaggggcttgtttctgtcccgggaggaatcaaatttctttccatcttcaagcatcccggtgtagtgcaccacgcaggtctggccgtgcctcgggaaggtgcactcctctcctggggagatggtttccacctgcactcccatggcggcggccgatgctgggtgggcgggtagcgcgacgggcggtgtggaccaacagcgacctggcggcggttccacagctctggctagacccttggcttttatttatttatttatttatttattttttgatacagagcctctctttgtcacccaggctggagtgcagtggcacgatcttggctcacagcaacctctgyctcccggattcaagcgattctcctgcctcagcctccccagtagctgggattcatgcccagctaatttttgtatttttagtagagacggggtttca

SEQ ID NO: 682716 - DNA, 695 bp, Homo sapiens
gataggatcttgctctgttgcccaggctggagtgcactggcacaatcagctcactgcaactgcactctcctgggctcaagcaatcttcccacctcgttctcccaagtagctgggaccacagcactacactcagctaatttttttattttgtgtggagatggggtctcactatgttgcccaagctggtcttgaactcctgggctcaagtgatcctcccaccttggcctccgaaagtgctgggatccaggtgtaggccaccacaccttgcccatcctytaaggctgggatccaggtgtgggccactgtgcccggcctcgcccatcctctaaggctgggatccaggtgtgggccaccatgcccagccttgcccatcctttaaggccaagtgttcttctttgcttctcccagtgtgggtacaaaggagtcaaactaaatgtgatcatcaagctgccaaacataaaaagaaagataaatccacaagaaaaacgacaaagaaggaaagctctcgctgttgcccaggtactgctcatgctcagagaccaaacagagctcaccgcgcccgctcctggcccccttcccagtgcatggcctggagaggctggcgcccaggcccacaagggacccgtaccccgatgcacatcacagcctcaactgtgactgcccagggagtgggaggcaacgtccaactctaggag

SEQ ID NO: 682717 - DNA, 1323 bp, Homo sapiens
gcattaagctaagaaattcagggaatataaaaagatggaaatgtgttcccatgatcattgcagacatacatatttgttcacttagtaaatatgtattgagtatttacaatggactgcacagtcatgagcatatacagagtctaaagtaggaactgtacaaatgaaagagagagaaagagagaacaaatgtgaccatagtaccacagtactatccacagtactacccayagagtggtcaataactacctaaaaaatataccagtcttaaatgaccaatcatcagtattttgacaatgcctagaaatctcaagaaactcctcttgctactaactttatgaaagtatttggggttccctggaattggttactgtgcaactgggatgctttagtgatggagctgccattcggaaggcatgaagtacacaccctagctacactcagttcacaacagagggccctttccaatcaactgagagggcaagtcaatagttattgagctctgtagaaaagaagagattaaagattatttgccttgctcttaacttagtttttctgccaatctaatacacgtatctgttttatcatatcctgtctttacacatttctggaaataatatctctgagtggcaacaagcttacatgaaaaacataagaacaatattttaaatcccaagcaatgattactagatagctcagcctcactctctaccatgaatatttttaatgaagagtagatggcatgtgaaacttttaaaaggcaatcttgatgccttttaaaaatagacgttaatattaggtcctgttaggccaaaaaggaagtggtaaggaaccacttctttttttaagggaccacccctcctccccacaagacacacatactcttaaatgatttgaatgggaccaacatatctgtgcagcatgagccctacttacaaagcagtttattggtccagaggcagacatatacatttttgcaaatttgggattggaaccaagagttgactcagtctttccagatggctggacaagtaatacatgaacttgaaagcttatagtggccatattttctattgtgagaaggggaagcaaagaaaattgtcctatagtaatggagtgacaatgaagcaacatctgggggaaaatatttcatgtgaaaaagaaatatggtccatatttggtcccttccacccactgtcaatgaagaaaccactcagaagaagtagaagtggatgtgaaggacatgaaaaataaatccccatggcttggccccaagcatgttactgaagactatttaaaattaaatataaaaatacaagtaacaaa

SEQ ID NO: 682718 - DNA, 1323 bp, Homo sapiens
gcattaagctaagaaattcagggaatataaaaagatggaaatgtgttcccatgatcattgcagacatacatatttgttcacttagtaaatatgtattgagtatttacaatggactgcacagtcatgagcatatacagagtctaaagtaggaactgtacaaatgaaagagagagaaagagagaacaaatgtgaccatagtaccacagtactatccacagtactacccatagagtggtcaataactacctaaaaaatataccagtcttaaatgaccaatcatcagtattttgacaatgcctagaaatctcaagaaactcctcttgctactaactttatgaaagtatttggggttccctggaattggttactgtgcaactgggatgctttagtgatggagctgccattcggaaggcatgaagtacacaccctagctacactcagttcacaacagagggccctttccaatcaactgagagggcaagtcaatagttattgagctctgtrgaaaagaagagattaaagattatttgccttgctcttaacttagtttttctgccaatctaatacacgtatctgttttatcatatcctgtctttacacatttctggaaataatatctctgagtggcaacaagcttacatgaaaaacataagaacaatattttaaatcccaagcaatgattactagatagctcagcctcactctctaccatgaatatttttaatgaagagtagatggcatgtgaaacttttaaaaggcaatcttgatgccttttaaaaatagacgttaatattaggtcctgttaggccaaaaaggaagtggtaaggaaccacttctttttttaagggaccacccctcctccccacaagacacacatactcttaaatgatttgaatgggaccaacatatctgtgcagcatgagccctacttacaaagcagtttattggtccagaggcagacatatacatttttgcaaatttgggattggaaccaagagttgactcagtctttccagatggctggacaagtaatacatgaacttgaaagcttatagtggccatattttctattgtgagaaggggaagcaaagaaaattgtcctatagtaatggagtgacaatgaagcaacatctgggggaaaatatttcatgtgaaaaagaaatatggtccatatttggtcccttccacccactgtcaatgaagaaaccactcagaagaagtagaagtggatgtgaaggacatgaaaaataaatccccatggcttggccccaagcatgttactgaagactatttaaaattaaatataaaaatacaagtaacaaa

SEQ ID NO: 682719 - DNA, 638 bp, Homo sapiens
ggccgcagagatggaccctgccattaaaggacccttactcagttctgaaaaatcactgaccgttcctttcttatatacttttccttcctgtttcagacaactaaaatgcttggaatcacgaacaatttgatagctgtatgccgaaagacatggcagaatacaaagtcttaaccgtttttaaaaggatttctattttgctttcttatatatgtcaagaaaggtgccaactgattaacacatacatatcaattggaattctaaagctgaaaagccagcactatgggagactcctttttaagtgacttagcttsaggcaagagtcagaagtcatatccctttcatttcaaaacataaactgtatgaaacagtcctataaaattaacgtgtgctatttatcctccattcctcagtaaattattaaaatcaagcagtacaattctctcatcagttataaatggccctagaaggcagatttacatctatccaggggcaatttctgatgagtatttttattaatgatctaataaaatgtcttgttttgttatcaactaaatgattcaaatgatgttttaaaatctaatactccaacccaatagtctggtgattaagctactgagatgacattaatttaaagtgat

SEQ ID NO: 682720 - DNA, 638 bp, Homo sapiens
ggccgcagagatggaccctgccattaaaggacccttactcagttctgaaaaatcactgaccgttcctttcttatatacttttccttcctgtttcagacaactaaaatgcttggaatcacgaacaatttgatagctgtatgccgaaagacatggcagaatacaaagtcttaaccgtttttaaaaggatttctattttgctttcttatatatgtcaagaaaggtgccaactgattaacacatacatatcaattggaattctaaagctgaaaagccagcactatgggagactcctttttaagtgacttagcttcaggcaagagtcagaagtcatatccctttcatttcaaaacataaactgtatgaaacagtcctataaaattaacgtgtgctatttatcctccattcctcagtaaattattaaaatcaagcagtacaattctctcatcagttataaatggccctagaaggcagatttacatctatccaggggcaatttctgatgastatttttattaatgatctaataaaatgtcttgttttgttatcaactaaatgattcaaatgatgttttaaaatctaatactccaacccaatagtctggtgattaagctactgagatgacattaatttaaagtgat

SEQ ID NO: 682721 - DNA, 623 bp, Homo sapiens
gagacggagaggagactcaagctaggccgttaagatccaatccaggaatgatggggacagtaggatagaggctgtctctgctggcgtcaataggcctagagctgctgggagccagggagagagccctcaggagaaagaaaccagcccagagggaagcagagcrgagagatgggaagagacagataacatttgagctttggttccagtcatgcttggactttccaggggagccagtaaataagcttttgtggtgattttattttacattacaaaggagtgtccttactgaaaaatcttcactgataacactgagctccatgcttgaataaagttaagggaaaaattttaaaagtaaccaaaatatacattcgatctcaaaacattgctcttccacatacatcttaaacatacggtagaagattgtttactcagattatacagaaataacttgttccaaattaatgatatttccagagtttagataggttaattcaaaaagggcataacgataaaagtaacgatttatttatcaaattttctggttgttttcttatgggttttctttctgttatataaattaagaaatgagatgcataaaaatatgcattttaaccattgcagct

SEQ ID NO: 682722 - DNA, 623 bp, Homo sapiens
gagacggagaggagactcaagctaggccgttaagatccaatccaggaatgatggggacagtaggatagaggctgtctctgctggcgtcaataggcctagagctgctgggagccagggagagagccctcaggagaaagaaaccagcccagagggaagcagagcggagagatgggaagagacagataacatttgagctttggttccagtcatgcttggactttccaggggagccartaaataagcttttgtggtgattttattttacattacaaaggagtgtccttactgaaaaatcttcactgataacactgagctccatgcttgaataaagttaagggaaaaattttaaaagtaaccaaaatatacattcgatctcaaaacattgctcttccacatacatcttaaacatacggtagaagattgtttactcagattatacagaaataacttgttccaaattaatgatatttccagagtttagataggttaattcaaaaagggcataacgataaaagtaacgatttatttatcaaattttctggttgttttcttatgggttttctttctgttatataaattaagaaatgagatgcataaaaatatgcattttaaccattgcagct

SEQ ID NO: 682723 - DNA, 870 bp, Homo sapiens
  misc_feature 462, 463, 464, 465, 466, 467, 468, 469, 470, 471, 472, 473,474, 475, 476, 477, 478, 479, 480, 481, 482, 483, 484, 485,486, 487, 488, 489, 490, 491, 492, 493, 494, 495, 496, 497,498, 499, 500, 501, 502, 503, 504, 505, 506, 507, 508: n = A,T,C or G
  misc_feature 509, 510, 511, 512, 513, 514, 515, 516, 517, 518, 519, 520,521, 522, 523, 524, 525, 526, 527, 528, 529, 530, 531, 532,533, 534, 535, 536, 537, 538, 539, 540, 541, 542, 543, 544,545, 546, 547, 548, 549, 550, 551, 552, 553, 554, 555: n = A,T,C or G
  misc_feature 556, 557, 558, 559, 560, 561: n = A,T,C or G
agatttaagctctggaattaagtagctatgtgaagttagaaattattcttgattttttctcatctgtaaatgaaattaataatggtatttgggccatgaagatgttatcaatagtaaatgaaataaaaagtataaacattttagcacaatgcataattgaatagtaaaagatcaataattgtgacacataatcctcatcactgttataaagataatccacattacattctccctcacttctttcatgtctttatttgatcatctctattttaagygaggcctttttctggctgtttaaaactgtaatacttcataaatttttcactccccttccctgctttacttttcttcataacatttaatattatcatactatatttcttttactatctagcttaatttttttaatataatttaagtacatggatacatgtgcggaatgtgtaggtatgttacatagannnnnnnnnnnnnnnnnnnnnnnnnnnnnnnnnnnnnnnnnnnnnnnnnnnnnnnnnnnnnnnnnnnnnnnnnnnnnnnnnnnnnnnnnnnnnnnnnnnnagtattatgttgaataataggggtgaaagtgggcatccgtgggttgttccagtccttagaggaaagtcttcaatttttcctcacttcagtatgaggttagttgtgattttatcatatagggcctttatgattttgagatatgttccttcattactcatgttgattagtgttttcttaataaaggcaagttctgatcaatttttctgagggtttagatgtagggttatattaattcacatgaaagcataaagtaaaatttcttgatcatatccccacaaatatcttgatagttaatcttgaaattaccaa

SEQ ID NO: 682724 - DNA, 674 bp, Homo sapiens
atgctagaatctctctttcttttatgctgacaagttgatagggagcaaactgataattcttattataataaaaccttgttttcaaaataatacaatagaatcacaattttacaagataaaatgtttattagtggaataggtttttttttgtttttccttttttttaagcctaaagcctactagaaatactgtaagacatcaaactttttttttaattggagaaaaatggtcttataatctgatgtttcttgtggartaaattctatattaagaactactgatcagagatcattaaattcctacaagtaaaaatacatatgaatgagataaatagcaaatgatataaaactaaacatcgaatataaaaagattaatgttaaaacattgaagtgttaaatttaaaaattgaatataaaacaattcaatatggaaattaaagtaggttctctgaaataggtatatatagaattggaatattttatatgtatcttctagaaagtgtaaatcaaaataaaaaacataactattaataaacaatgttggttagagccctttcagtgtttatcataaaatattttggccacatttgaattagtgttgtatagtcacacatattgaaactagctaatataatcagctagtgaaattcttgataatttatttaaccaaataat

SEQ ID NO: 682725 - DNA, 674 bp, Homo sapiens
atgctagaatctctctttcttttatgctgacaagttgatagggagcaaactgataattcttattataataaaaccttgttttcaaaataatacaatagaatcacaattttacaagataaaatgtttattagtggaataggtttttttttgtttttccttttttttaagcctaaagcctactagaaatactgtaagacatcaaactttttttttaattggagaaaaatggtcttataatctgatgtttcttgtggagtaaattctatattaagaactactgatcagagatcattaaattcctacaagtaaaaatacatatgaatgagataaatagcaaatgatataaaactaaacatcgaatataaaaagattaatgttaaaacattgaagtgttaaatttaaaaattgaatataaaacaattcaatatggaaattaaagtaggttctctgaaataggtatatatagaattggaatattttatatgtatcttctagaaagtgtaaatcaaaataaaaaacataactattaataaacaatgttggttagagccctttcagtgtttatcataaaatattttggccacatttgaattagtgttgtatagtcacacatattgaaactagctaatataatcagctagtkaaattcttgataatttatttaaccaaataat

SEQ ID NO: 682726 - DNA, 631 bp, Homo sapiens
cttgaaccaatgaacatgttaaagtacatattttaagcagaaagaaaatgattccacatggaatgtcagagatacaagaaggggtgaagaggaaagaaagtgttgagcaggtcatcagtgtaaatgaacaccaacttcataaagtacagcaagtcctcaaatcatgttgtttcattataatgatgagaaaaaaaatcactttccagtctacacatcctccccttayctgtgtgggttttctccgggtcctctggtttcctcctgcattccaaagatgtgcatgttaggttgattggcatgtgtacaacgtcccagtctgagtgagtgtgaaaccacctttgcaaagatgatggcagtgagagaagcctagcatagctgactccatcttgcctccagcctcacaggctggctgtccttgctcattcctgggcagaagccaggctaaccacgggaggaatttatttgtagtttaactttaaagcaaggatgaaaatagcccttcccaaaactaaactgccctataaaactaatgaaagaccacaatgttaggattccgggaggagcccaaattctgctaagatgtaggcatacttaaacaatagccagccattgttttggaggtcacaagatt

SEQ ID NO: 682727 - DNA, 631 bp, Homo sapiens
cttgaaccaatgaacatgttaaagtacatattttaagcagaaagaaaatgattccacatggaatgtcagagatacaagaaggggtgaagaggaaagaaagtgttgagcaggtcatcagtgtaaatgaacaccaacttcataaagtacagcaagtcctcaaatcatgttgtttcattataatgatgagaaaaaaaatcactttccagtctacacatcctccccttatctgtgtgggttttctccgggtcctctggtttcctcctgcattccaaagatgtgcatgttaggttgattggcatgtgtacaacgtcccagtctgagtgagtgtgaaaccacctttgcaaagatgatggcagtgagagaagcctarcatagctgactccatcttgcctccagcctcacaggctggctgtccttgctcattcctgggcagaagccaggctaaccacgggaggaatttatttgtagtttaactttaaagcaaggatgaaaatagcccttcccaaaactaaactgccctataaaactaatgaaagaccacaatgttaggattccgggaggagcccaaattctgctaagatgtaggcatacttaaacaatagccagccattgttttggaggtcacaagatt

SEQ ID NO: 682728 - DNA, 1663 bp, Homo sapiens
tctccataagaaagagtttggtggccggacgcggtggctcacgcctgtaatcccagcactttgggaggccgaggcgggcagatcacgaggtcaggagatcgagaccttcctggctaacacggtgaaatcccatctctactaaaaatacaaaaaattagccggccgtggtggcaggctcctgtagtcccagctacccgggaggctgagacagcagaatggcatgaactcgggaggcggagcctgcagtgagccgagatcgcgcactacagcctgggtgatagagcgagacaccgtctcaaaaaaaaaaaaaaaaaaaaaaaaaaaaggaaaaagaaaaaaagaaagagtttgatcaaatgtgtctaaaacgttctctacacgaccaatcttaaaagctcaggaatgacaattctgagaagacttaaaattaaaataaccgtttaatgcttaccctttccaaacttatctaagcacatgactacagaatccaatttagaagacattgtagtagaaaataaaaccaatatttggcctaatggatttcttaggaaaaggagaaaaaaaaaaaaacctaagacaattaagactaaagcccagtgaagattccatactgtggccttcatagaaaagcatataaccaggagggtactctttgttaaacttaccttccatcccacaagcctaagtacatgggatatgggttaaagggaagtcaggtgagtgccatatatccctcaccttttaaggaaggcagaaccttatcatgagaggctattactgctgcaaagaacacaagtgttttgagtatggacgtggagtacagtgaaaccttctcataaagtttcataggaatgagattttagatataattggatttgatcttgaatctcatcttccacccagcaggcttggtaatggcaaaaaggaggtagaaagtagatccctgcctccacagtatcctgtctacctgatccagattggaacaacaaaatgggcagtgtaattcattttgtgaatcactcccataggaccattaacagcctccattagtatataaaccagagcgcacaaacaccacccaggtgttgtcaaaccattaccagggtacatttgaatccctcagaagcatccagggaactgatgaaaaattagtatccaaatttgccccagtcatgtcattcctcttgccaaaacattattccacatcctgattgacttttttcagactcaagttatcacttaacattaaaattttagtgtataggaagttaaaatccgtcataaggaaatcagtggccatgaacatgaatgctgascaacttctctgcaagagagttttttgaatagttccttagtaaccacctcttggctctttgcatcactgtgaaatgctttcgctgcaaatgtatagaaaaactgataaatggtgtcttaaataaaaggagctcatttttctcacttgtaaaacaaaacaaaaaaatagctactgacactgaataccatctaactagctcaataattcaggtccaatatatctatttttggcctttccctcactgatgccagactgctcctatagcttaggtatcatttgtatatcagagatggacaagggaaaaagcagtatcaaccatgacagtcactttcaaactgaaagtaacag

SEQ ID NO: 682729 - DNA, 532 bp, Homo sapiens
accagaattattgtagtataattgtgtagtctttggaagcctttaatggtatcagaacaatatttatccttataatagattttagggtttcttagatttatttgttttgttgactcaaatgtctgtaatgcatatatgtttttatatacatacaaaagcatatacacaaagtagggacattcagtatcaattggtaactgaaacacrttttagaaaatgaatgagaaatatatcattcctgcatttggactatatttttaagggaaaacatgtataatacctataatttttttatatatatgcagttataaaaatgtttcttattttttactctgattaatatatgtgtttaatattttatgtatacatataatatgaaggaagagtatgtcttgtttttatattgtcaataagtcaaaatacaaatttggaaaaatattttttaaacatcaactgaatgagaaacttcttcctgttgagtatattttttctgtaattattccaatccacatttgggaaagaaataagaaaa

SEQ ID NO: 682730 - DNA, 1992 bp, Homo sapiens
tgagaaacgaaggaaaaggagagttctggagctcgagagcagtgtgtgcactgatgcgatgtggcaacttggctcagctcactgttttgttctggggcaacttagagttgtgtggggaaaagcaagagagatcagattgttactgtgtctgtatagaaasaagtagacataggagactccattttgttctgtactaagaaaaattcttctgccttgagattctgttaatctaggaccttacccccaaccccgtgctctctgaaacatgtgctgtgtcaaactcagggttaaatggattaagggctgtgcagggtgtgctttgttaaacagatgcttgaaggcagcatgctccttaagagtcatcaccactccctaatctcaagtacccagggacataaacactgcggaaggccgcagggacctctgcctaggaaagccaggtattgtccaaggtttctccccatgtgatagtctgaaatatggcctcgtaggaagggaaagacctgaccgtcccccagcccgacacctgtaaagggtctgtgctgaggaggattagtataagaggaaggcatgcctcttgcagttgagacaaggagaaggcatctgtctcctgcccgtccctgggcaatggaatgtctcggtataaaacccaattgtacattccatctactgagatagggaaaaactgccttagggctggaggtgggacatgcgggcagcaatactgctttataaagcattgagatgtttatgtgtatgcatatctaaaagcacagcacttaatcctttaccttgtgtatgatgcaaagacctttgttcacgtgtttgtccgctgaccctctccccactattgtcttgtgaccctgacacatccccctctcggagaaacacccacgaatgatcaataaatactaagggaactcagaggctggcgggatcctccatatgctgaacgctggttccccgggtccccttatttctttctctatactttgtctctgtgtctttttcttttccaagtctctcgttccaccttacgagaaacacccacaggtttggaggggcaacccaccccttcagagttgagttcaaggggtaggatatcttgataatgatcgcctgctaatggcaacatttatgctaagagtttcatcttaaattctaatgtacattttttttttttaaatccagagtttcagggctgcaacaattccatcttcatgatgagtggtatgagattgtgacatcctaagtcacagccctgttccctgggatgagtattgtcattgattatcctttcccagtaaatatgagtagacagtgtcaggtgttaattaggctgcctttagaggtgaagctagaacatatgttctacttatcaagatggggttgttgtttgtgtttggcactgcagaccatgaccatctgagcaaagaaacccattgagattaacttgtaactgtttaatagcatatgtatttttaaagccagcctgcaagaatgattccttgctcattgaggacaagtatgtggccactactgctacatctgtgcacttactggccttggtcagttgtttcctcacactcatcaagtgatgtggaaagtggagtaaacccagtggtgaaaaccaatgatattattaggcagaaagtttaagaaaacgtcacactgcaggaaagcacactgccctctataacatgggaaatcttgatcagccaatcaggtgtcaattgcagagtcaaatgctatagatatgtacctggtgtactggtgtatgcagtcataagattacattttctaataaacatttctgttgttaccattaagtgtatttagcgtgagaaactttcttgagatatattacaataggaaagaagatattgagtgctccaatgacttttagaaaccaatttttaatgcttcttctacaagaactgttgcacttttgttttcctgaagtcttggctcgagtcaaaggttcagaatttt

SEQ ID NO: 682731 - DNA, 653 bp, Homo sapiens
cctgccatctcttgccccactccctctgtcataagaatggcatgcccaaataggggctgctctttcagtctgggacttggaatgagaagtggaaacagagctaaagcagggtcacagcagcccrcctgtagctgtcagaagtaagaggagcaagaaagaaatgtttgaggctgcaaacttctgcaatgtaggggttgttttgtttctagaaaaaaggtgactaatacaagcagtggccaacagaagaaacaactaaaaatttgaaaatgtttgcctatagaagtaactagaagacaatttttcctttaatgtgtcttgtcaccttttgattttttgaaaccatgtacatgtattactttgataaatttttctattttaattttttaaaaagatgtcttcctttagaaatttataaattagcattacggtttatattaagtctcttgtgagtacaagtttaatttcctgagcaacaaaagtgaggttcccatccaagtaataatgaaattataatagagatatgctttagccaaatcatctaacctacctaaactccagactttgtagtacaggttaaaacgtaactgaatacaatatatgaaagaggcacgaatacccagacattacccaggcagacttcggcctgccagctg

SEQ ID NO: 682732 - DNA, 663 bp, Homo sapiens
gtcccaggagatgaactccccaggacttctgcagatttcagagcaagagcaagctttcagctggagctttatctcagtaggacaggaagaygctgtcagcttggactaggactcagaatggtgagtgccgtggccatgtgggcaaggcagagagccaaaatccttactgtcctgaacagcagaggcagccgggagcctttccattgtgggagatatgtcccagacagagggtttgctagttcaagtacttcatacagagatgaacttgattagccatcaaactctctctctacatttggtatgttttaaaaggtgtcaggtcagtgtttccaaattcaaatacaaatttataaggatgtggttcaaagtttaaactcagagcccctaagcaaaaattccaggatgggttttctcagcttttggccgccaacttcttgactggagggtctcctgtccttctctgcccctgaaccctgctctagggatggcagtgactttggggaatgggttttctgcttggactgtccctcttagcacctggagcctcaagataaccttgctcctgtttgtccctgcacttccggtggccccttctttctgtcaagcattaggtgtagaacctaacagccaccacatttgtgtggagtacagagctttattttg

SEQ ID NO: 682733 - DNA, 619 bp, Homo sapiens
tgccaccatgccattctaatttttgyatttttagtagagacggggtttcatcatgttggtcaggctggtctcgaactcctgacattgtgatccacccgcctcggcctcccaaagtgctgggattacaggcgtgagccaccacacccagccaataacctgtttttaacaatttttccatgtgcttctgctgcacagtatgattaaaaactactgccgatatggtgtctttctttaaaagagtaaagcttacagtgcagtccttcccaagaaacatcttcagtttaacagggggccttttcagacctgtaaaggaatttgtgatgcggggaaaagggtcacagtcttgggtctggagagatgtgtttgtgtctgagttagaccctatccttgctagtgttgaactcgaatgtatcactcaatttacacattagtttgtttttttttttttttaacaaaatagggatgctttccctatttcataaagttgtgattagatcatagaaagtattatcaaatggaatcatgataactgctatttatggagggtcaagtctcacaacaaccttgcaagtaatattctctttaaagagctgggaaatcaagcccagataattcataa

SEQ ID NO: 682734 - DNA, 699 bp, Homo sapiens
tgatcctaagtaaatatgcattagtaattaattttctatgtgagccatcttgtagatttctctaagcttcattcatttgtataaacccaatctcaaatatccatagaatttgtaactccaagtgcacagttgacttcatagctctcaactratgtatattttccaatgcctaactttcagagactgttaacttgatagataagtactatttttgtcttttctttccctcatggatcttgctgagggaaacacctagaaagcccatgagaatggaagggagagaagctctttactgtggtttggccaatgactgctgtttttaacatgccagttcctatgggcaaaacacaaaaagaaaattgcacttaaaaaatagtgttccatgcgatctgcagaaaagtccggaagttcacttgggtttctcaggaaattaaaaagcaggaaaaattgtaccaaaaagattaagacaatttttagattacaaacattttctgggcaaggattcaaaccaattcaaataagcagcatagaggagaacaagggaggattcaaggacgactgggtaacacaaaattgcagggttaggttaattggtatgggtgggaaggcttcctatcaggttttagcagtgagcgtgtctaaataatgctgagaaaattgagttagaaagtgtacacacaacacttaggaaccatgatg

SEQ ID NO: 682735 - DNA, 699 bp, Homo sapiens
tgatcctaagtaaatatgcattagtaattaattttctatgtgagccatcttgtagatttctctaagcttcattcatttgtataaacccaatctcaaatatccatagaatttgtaactccaagtgcacagttgacttcatagctctcaactgatgtatattttccaatgcctaactttcagagactgttaacttgatagataagtactatttttgtcttttctttccctcatggatcttgctgagggaaacacctagaaagcccatgaraatggaagggagagaagctctttactgtggtttggccaatgactgctgtttttaacatgccagttcctatgggcaaaacacaaaaagaaaattgcacttaaaaaatagtgttccatgcgatctgcagaaaagtccggaagttcacttgggtttctcaggaaattaaaaagcaggaaaaattgtaccaaaaagattaagacaatttttagattacaaacattttctgggcaaggattcaaaccaattcaaataagcagcatagaggagaacaagggaggattcaaggacgactgggtaacacaaaattgcagggttaggttaattggtatgggtgggaaggcttcctatcaggttttagcagtgagcgtgtctaaataatgctgagaaaattgagttagaaagtgtacacacaacacttaggaaccatgatg

SEQ ID NO: 682736 - DNA, 686 bp, Homo sapiens
tagaggaaaagcttgcctaaggcttggaagcagggagcttggtatcatatttaagaatacaacaggccaggcgcggtggctcacgcctgtaatcctagcagtttgggaggtcgaggcagataaatcacgaggtcaggagttcaaggccagcctggccaagatggtgaaacccccgtctctactaaaaatataaaaattagtggggcgtggtggcacgcacctataatctcagctacttgagatcctgaggcagagaattgcttaaacctgggaggtggagtttgcagtgagccgagatcatgccctcgcactccagcctgggcaaaaagagtgaaagtcagtctcaaaaaaaaaaaaaaaaaagaaagaaagaaaatttaaaaaaataataatacaactgtttggccgggggcagtggctcacacttgtaatcccagcactttgggaggttgaagctggtggatcacaaggtcaagagatagagaccatcctggccaacatggtgaaaccycatctctacaaaaattcgaaaattagctgggtgtggtggtgcatgcctgtagtcccagctactcaggagggtgaggcaggagaatctctcgaacccgggaggcggaggttgcagtgagccgagaccacgccactgcactccagcctggcaacagagtgagactctgtctcaaaaa

SEQ ID NO: 682737 - DNA, 593 bp, Homo sapiens
tgcccgctaattttggtatttttagtagagacggggtttcaccatgttgaccaggatggtctcgaactcctgacctcaggtgatctgtccacctcagcctcccaaagtgctgggattacaggtatgagccaccgcrcctggccacctctgctgatctctatggctatctgtttaacactggtcacatcgttcctcatgacactgccccaggaggctgcttcatctgttgtgacatccatgaataccggcttctggtgacttcgtcagaggttttcttgggctgagtggatgacaaacacaaatgccaatgccaatctttattcttcttgtcagacagtaatgtgctgatgtcataagaaggcttaaaagggaggcgcattgtattactccgttttcacgctgctgataaagacacacctgagactgggtaatttataaagaaaaagaggtttaatggactgacagttccaagtgtctggggaggcctcacaatcatggtggaaggcaaagagcacgtcttatatggcagcagagaagagagagaataagaaccaagtgaaaggggagaaacccttacaaaaccatcagatccg

SEQ ID NO: 682738 - DNA, 579 bp, Homo sapiens
cccaaaaagttttaaccagagtaatgtgagcaagaacttttctggtcatgttaaatgatcatatttggaatttcctggtggaaatgtagaaccacacaccttccacccaagtctgtctttaggccaccatccccgcattcaaaaagccttttttttcttttttttttagacagggtttcactctgtcacccaggcggagcgatcgcagttcacctaagccttggcctcccaggtttaagcaattctttcacctcagcctcccgagtagctgagactgcaggtgcatgccaccacgcctggctaatttttctgtatttttagtagacatggcgtttcccygtgttggccaggctggtctcaaactcctgacctgaagtgatccacctgcctcggcctcccaaagtgctgggattacaggcatgagccaccacacccagccaagatttttaaaactttttacaattttatttttagagctgaggtctcactatgtcacgcaggctgatctcaaactcctgggctcaagcgatcctcttgcctcagcctcccaaagtgctgggattacaggcgtgagccatc

SEQ ID NO: 682739 - DNA, 604 bp, Homo sapiens
ccgaaagcccaggactgmgcttcatctacatgtcagcatttctgcctgcctggccagcctgtctgcctgcaaggccttggccagtctctccctggctttcttcaccctcctggcctgtctccggatatctgcaggagtcaccaattggccagagaggggcggtgggagctgacaacccattcctggggttggcccccctgccacagctggaaaccgcccaggggtgggctcaagcgggctgtgcacacgctcagcaccagccctgtccagagattcaccggccgtccccggtgcaaggatacttaagacgctctccaaatgcagtggacttgaaccttctccttggctgctgcagggctgcagggcctgcagtctccggtaggcgcagagttgctgcggcttctccaggtgctcgtccccttttctgcgtctgacctggttgtcaggatgagacctgatccttgtcaccggcctccggaagatgcagctggtgagtctcatggggagagcagacctcgcagctcgtctccgatgggccttggccatgtggatttctcgtttcttctgtaaagcccagggcatcatgtttcttttgagcttcccc

SEQ ID NO: 682740 - DNA, 604 bp, Homo sapiens
ccgaaagcccaggactgcgcttcatctacatgtcagcatttctgcctgcctggccagcctgtctgcctgcaaggccttggccagtctctccctggctttcttcaccctcctggcctgtctccggatatctgcaggagtcaccaattggccagagaggggcggtgggagctgacaacccattcctggggttggcccccctgccacagctggaaaccgcccaggggtgggctcaagcgggctgygcacacgctcagcaccagccctgtccagagattcaccggccgtccccggtgcaaggatacttaagacgctctccaaatgcagtggacttgaaccttctccttggctgctgcagggctgcagggcctgcagtctccggtaggcgcagagttgctgcggcttctccaggtgctcgtccccttttctgcgtctgacctggttgtcaggatgagacctgatccttgtcaccggcctccggaagatgcagctggtgagtctcatggggagagcagacctcgcagctcgtctccgatgggccttggccatgtggatttctcgtttcttctgtaaagcccagggcatcatgtttcttttgagcttcccc

SEQ ID NO: 682741 - DNA, 640 bp, Homo sapiens
tttttcacttatttrtatattttttcattttatggggatttgcttaaaattttaggaaatcatgcttatcaatcttgtgatgagtgtgaatataaattcatatgttttatcacatttagacaggcctcttcacaattattttaaaactcacctaagttttcttttaatagcttcattatttcaatgctatatttttattctttgttcagcttggaatttattttgatataaagagcaaagttttgtttttttttccaaacgatttgccgttttcccaagaccattcatccatggccctgcacctcccccgcctggtgtgcaaagcctcccttggacccatgcctgcatattatctgggtctgggctctactccccacagcagcttcactttacaattttgtggagtttgtctcccttaacacctttatcttacatttcttccctgagtcttctcataagtctctctctctttaagtttttgcacatctaaagtgaaagaaacactttaccgtaagtattttaatgtgcttaattgtgtttggtcttcacactgacagagttctggaatcatctgtacagcaggctcatttcaggggccttagacatctgtccatctccatatctggagagctccctggtg

SEQ ID NO: 682742 - DNA, 640 bp, Homo sapiens
tttttcacttatttgtatattttttcattttatggggatttgcttaaaattttaggaaatcatgcttatcaatcttgtgatgagtgtgaatataaattcatatgttttatcacatttagacaggcctcttcacaattattttaaaactcacctaagttttcttttaatagcttcattatttcaatgctatatttttattctttgttcagcttggaatttattttgatataaagagcaaagttttgtttttttttccaaacgatttgccgttttcccaagaccattcatccatggccctgcacctcccccgcctggtgtgcaaagcctcccttggacccatgyctgcatattatctgggtctgggctctactccccacagcagcttcactttacaattttgtggagtttgtctcccttaacacctttatcttacatttcttccctgagtcttctcataagtctctctctctttaagtttttgcacatctaaagtgaaagaaacactttaccgtaagtattttaatgtgcttaattgtgtttggtcttcacactgacagagttctggaatcatctgtacagcaggctcatttcaggggccttagacatctgtccatctccatatctggagagctccctggtg

SEQ ID NO: 682743 - DNA, 640 bp, Homo sapiens
tttttcacttatttgtatattttttcattttatggggatttgcttaaaattttaggaaatcatgcttatcaatcttgtgatgagtgtgaatataaattcatatgttttatcacatttagacaggcctcttcacaattattttaaaactcacctaagttttcttttaatagcttcattatttcaatgctatatttttattctttgttcagcttggaatttattttgatataaagagcaaagttttgtttttttttccaaacgatttgccgttttcccaagaccattcatccatggccctgcacctcccccgcctggtgtgcaaagcctcccttggacccatgcctgcatattatctgggtctgggctctactccccacagcagcttcactttacaattttgtggagtttrtctcccttaacacctttatcttacatttcttccctgagtcttctcataagtctctctctctttaagtttttgcacatctaaagtgaaagaaacactttaccgtaagtattttaatgtgcttaattgtgtttggtcttcacactgacagagttctggaatcatctgtacagcaggctcatttcaggggccttagacatctgtccatctccatatctggagagctccctggtg

SEQ ID NO: 682744 - DNA, 2958 bp, Homo sapiens
aaagtcaactttgtctttagtaagaaagaaataatagactttggactccattttgctttgccatatgaataggccattttatccacagactcttcacttccctcaccaggactgtatatcatgtggacttgagtgacagctacaaggactgggatttgtaaaaaatatctgaccatgtacaatgaagccccaaaataggaacaacttggaggtcaaatgctttgtgatttcctatgcactttcacatatattaattaattagctaaaataatttttaaggctaatgtttattcactattttgaatgtgccaggtaccatgctaagaaatgcacctgcatcatttatttgtacaatacctgtgtaggtagcctcatgcccattttatagatgaagaaacagaggtctaaaaactcaccccaagttttcactgctaatgaaagagattgggcatttaaacacagtaaatgccaccatcaggccccagctcttaactcttaggctctaataacagcaagcactgggtaggaaccttctaaaggaagaataagcatcagcataggaagatgagagaacagaatcaggaaagatcacttctaaggtctctgccaacattaagagtctctgatttaatgattccatcttttaatttctccattttcagtttttgtatcttactactttgaatagtacctggggatcttttaggttccctaagctttgtgcctggtaataataataattaggctgtcattaaaggcttcacaccttgcaatcaccttttagaggaagctctttagaccctttacaagcaaaacctcaatgtccccctgcattaggtaagatttgttttgcatactttgtagggaggggacttttaagggagtcaaaaagatgaattttccatggtcattataaatcatatagtcaagcagatcttcctaaaacagaggtctacgtcattgccctgctcaagtatggtcaatagctccccttggtctattaaatacatagttgttcactgattaaatatagaacttacatatttcaagtgtaggcatctaggtcaaactacattaggttcaatgtttattccatgtttctttataattctcttcatttcaaatgttggtggggaacctattctgtatctcacagggtgccaggtgctgggcaatatgaagaggaatcagacacagtctctgcctcaaggcaggtgaatgtggcagaagaagaagacagacgaacccggacaactgtcacccagaaagaccatgacaagtgctctaaaagatgtaaacacagcagcgggggagcaaagaaggatgcaatcagtgtgtctgtctgtggggatccagcaaggcttcaaaagaactgagccgtgaaggatgaggagattataggcagtaactgaggactgggaaggacatgcaaaccaaggaaagagccccagcaaaggctgggggcaggaaagaatgccacgtgctctgttagcctggagccggcagtgcataactgggaagagtgtactggggaacttggaacttagaggaagtcagtgtcaggatttggaacccactgaattcctggtggaccatgatgagccatgggggcatttttagtatgctagttacaatagcgggcatgtgcatgagaaagaaaagattgaccactggtagaaggtgattttctcatttcctcatcctcaaggttagaactacctaccaaacagcttcatttccctaaataacttatttgacgtcatcctttattagctcatcatgctgtctctctttagagtccccagtcctatttgccattcccaaagtggcaaagtcttcaaagtggctacatgattagcttaagacagtggttctcaactgacagcaattttctcccccaggggatatttggcaaaaatgtccagagatgttttttgttctcacaattatggaattgtacccctggaatctcatgggtgaaggccagggatgccactaaacatcctacaattcacagagcatccaccccacaaaaaagaattatctggttccaaatataaatagcattgaggccaaaaaaccttccttaaggggactagtgattggcatgccagggactgggcaccaggaccctgcagcgtccctcccattatattacactgaagaaaaattaagttgattatcttttaagacttttcatattttaaagtgggatatctgaagatgggtgctcattaaagtccagcagttaagtatctaatggaggaactccaggtggctgacatcccattggaaaagcctccaaatgctgctcaaattgtgctctagagacagcatggcacctactcctcaaattaattatgacccatcccagctcatatttttggcatactttaagtcctcttaccatgtagccaaaacagtctaagatttacttattttggctttgttttgacaccgcaaatcaaggagaatggtgttggacagggwttacaaatgcaaatgcttccttgagccaggcagggaaatgaatgaagtgagccaagttggggagaatggggaagacaaacggaactagagagactgtgccctgttaaaggtggccacagggactcaataggcagcagattattaccatgaggaattgtaggcctagagtggctagatcctcagattcttttctcaaggaaaagtagaaatatggaatatatatatatatacacacacatatatgggatatggaatatagtgacttagggaaaaaaggggtagggtaagagtagtgcctctgagcttgatctgactgacaggccacggagtgccagtggaatcctggagacaagagtccaaccacttctcatgcccagtatcaatttaggggccaagtccatttcctctacaagactgtttcctcatctattaaatgacaagattagatgtggtgatggctacagaccc

SEQ ID NO: 682745 - DNA, 1249 bp, Homo sapiens
catttattcattttctttcattgtgtctaaaggtagcatgtcaggaaatctcatgctactgtctgaaaaaacacattctactgttacctaagaaatcaactggatggcatttttataaccttgcaccacataaggaaaaactgcaatgtagtctgataaatgcagactccatcacatggaaaaggataatccagaatgccactttcaatacttaagtattcaaccttttggttgaaaaatgtagtaaaatagagctcttggtaagttttgtgtagcttaacatcagcataaattaggaaaaaatatcttttaaaatgtaaacaaacaaaaacctacaccaaaaacaaaaacattcaccaatgcatacatattgactgacgctccagggacataaaataatttttcctgggtacacagctagtgacccaaatcaagctcaaatgtgwgattttaaaaatttcattttcccacttttgacaatattgacataacagcgaaatcttactctcagagttgatagttgaaaataaactaagacaagtactgttgagggaggctaggtagccaagaaggtcaccatgtccttgggacatgcagcaggcatggcgattgcatagtgacagcatattggcaacacaataagccccaacatttgcattgtatttcagctcactgaagcacagctctcttcagtagggaagagagttctttactcccctgtaaagaacatgcacattttgattttacttgtcctctgaccttttactcattataatagtaaaaaacacacaagtgagtggagattaaagatgctaataagatatgtgacacataagcatgtacagccactgtgtatgtacaccaacaagaccactcagaacatgctaactaataacaccactttccacctcttcataaataatgatctaagactcccatagatggagtctctctagttccagtctttgctgtctcattcttataagcagcccaccctgaatcccttctctcttggggctattttgcacctaatttttaaaatagtatttcaactttgcaataaatccctctatgttgcatcttcattgttttgtgtctcttgtttaaatttttgaaactaagaaccaaggtctcacaacagccatcaacactatcgtgctttgttttgtattcttcattaacagtatttttgggaatatgtcaatatctacattttaaacacagcccaaactgctaaattaaaaattta

SEQ ID NO: 682746 - DNA, 600 bp, Homo sapiens
atcttatccaaaaacatcctcacaggaacatccatataatgtctgaccaaacctcagggcactccatggcccaacatgtgacataaaatgaatcatcacacgtgtaaaactttcctttttttttaaggataggaagaataaaatatagatggcaggagattaatgacatttacaggagtctgtcttggaaaattcacatctcttctatgtcctgtattgaaaatagataaaagatggaggaaaatgctttagagattagacacttttagrttttagagagagaagagggtggggttcaagcttgctattgtcttgaaagacaatttggatgggcataggactgaaattgagtgggctttccccggcctgtgctccgctgccttttttattggagcttaagtagtaaaactggacaacctgcctttcaattataagttgagttggcagagaagcgctgtcttcttctgttttatttaggcaaaccaacttaagaataccaaacaatagttgattaattttccccaaggatgtctgtaaagcatttaattcagttcagtcaacttgagtaactaccatgtgcagtgcactgagctaggcgtg

SEQ ID NO: 682747 - DNA, 597 bp, Homo sapiens
ttgcccttcatttccatactactagaggctaccaagtgcttgagccccctcaccctactaatgaagtttcagtcaatctttccaaatcttttatagtctgactaacaaaacaatttccttttatattaatcattatcatcatcgagacagaatattggtgactcacctaatcctstccttggctcatgtttttttttttttttgtggggatgttgtattagtctattttcatactgctataaagaacttccctgagactgggtaatttacaaaggaaagaggtttaattaattcacacttcagtatggctggagaggcctcagaaaacttacagtcatggcagaaggggaagcaggcatgtcttacatggtggcaggtgagagagagcaggggaaactgccacttataaaaacatcagatcttacgagaactcactcattatcacaagaacaacatgggggaaactgcccacatgatccagtcacctcccagcaggtctctccctcgacacctggggattacaatttgagatgagatttggatggggacacagaaccaaaccatatcattctgctcctggcccctcccaaatctctt

SEQ ID NO: 682748 - DNA, 597 bp, Homo sapiens
ttgcccttcatttccatactactagaggctaccaagtgcttgagccccctcaccctactaatgaagtttcagtcaatctttccaaatcttttatagtctgactaacaaaacaatttccttttatattaatcattatcatcatcgagacagaatattggtgactcacctaatcctctccttggctcatgtttttttttttttttgtggggatgttgtattagtctattttcatactgctataaagaacttccctgagactgggtaatttacaaaggaaagaggtttaattaattcacacttcagtatggctggagaggcctcagaaaacttacagtcatggcagaaggggaagcaggcatgtcttacatggtggcaggtgagagagagcaggggaaactgccacttataaaamcatcagatcttacgagaactcactcattatcacaagaacaacatgggggaaactgcccacatgatccagtcacctcccagcaggtctctccctcgacacctggggattacaatttgagatgagatttggatggggacacagaaccaaaccatatcattctgctcctggcccctcccaaatctctt

SEQ ID NO: 682749 - DNA, 597 bp, Homo sapiens
ttgcccttcatttccatactactagaggctaccaagtgcttgagccccctcaccctactaatgaagtttcagtcaatctttccaaatcttttatagtctgactaacaaaacaatttccttttatattaatcattatcatcatcgagacagaatattggtgactcacctaatcctctccttggctcatgtttttttttttttttgtggggatgttgtattagtctattttcatactgctataaagaacttccctgagactgggtaatttacaaaggaaagaggtttaattaattcacacttcagtatggctggagaggcctcagaaaacttacagtcatggcagaaggggaagcaggcatgtcttacatggtggcaggtgagagagagcaggggaaactgccacttataaaaacatcagatcttacgagaactcactcattatcacaagaacaacrtgggggaaactgcccacatgatccagtcacctcccagcaggtctctccctcgacacctggggattacaatttgagatgagatttggatggggacacagaaccaaaccatatcattctgctcctggcccctcccaaatctctt

SEQ ID NO: 682750 - DNA, 2416 bp, Homo sapiens
tgactatttaataagagaaagcatgtaaagcatttattagagtgctcaatgaaacatatgcacttagtgttagctattattataaataacattattattgtttcctcaaccttatactctttcttcataaacaagcaatttttaaattggagtttgcagccctttgagggatcagcacacatgtyctcacgtgtgtctgagaagtttctctgaaatttgttgttttattttgtgctttcattttcatgataatcttaaaaataatgaataactgtgtactggttcccctttataagagagtcctgccatgagttatattgtccaagtttccccatgtttaaaggaaggcgctctactccagtgtttgtagatggataagcaataaaagagcagtcttaaaaatgtgcccgatacagtcagactcagtgaaggccacctgatgccatctctttgtaggagggaagggttccctgagttcgagtagaggaaagtgatatgcaggttgagtcctcacgcagccgggagtgggcacgtgcatgcacaaaacaaagagaacattggctttagcagtgagtactgtatttaaattttgaaagacagtttaatctcagcaaaataacatcatcaatcatgttaaactaatgctgttaatttgaatgttatggatcttattgtttttgcatttaatttgttattttgttttagttttattattgaatcagagctagagcatatggagtttatttctagttttccatttgtgcatctctaagcaacaatataataaaaataatttaagtctacatattggtgttgcacaataatgttatttgccttattaaatggagtggtttggattactgaggtttgaggaataaagtaatggactcaaagaattatagactgagctgctaggaatcatttttccagaaatttcccctaccagatacagacactaggcctgcagagtgagaagtaaatgtcaaaggtcagaaagcaagggagtggtagactggggtcagaggccaggtggacatacttctaaccaggtgcccagtctgccatgtcaacccacttccaaagatgaaccatggcagataaatggccacagctgccaggccacaaaggctggttaggcaaaaacaaatggagaattgctgcattgttttggttaactctgagggtagaggctgtggaaggggtggggacgaagggaataacagatttgttcagagcctaagtcccaatgagcaatgggtgatagtgagaggaaatgatggccatttttctgagttccttggtattcccatgggtaatatcacctgagccattccctcctcaagtgatattaaccatcagcctgtattgttcggtgactttcatcataaggaaacaaaactccaaagtctaaggagttctactctgtatgaatttagactgtaagcttatgccacctaactagagttctgtactgtcttagtccattcgggctgttataaccaaataccatagactggggggcttataaacaacagaaatgtatttctcacagttctggagaccgacaagtcaaagatcaaggtgccagcagatttagtgtctggtgaggatgcacttcctactttataaacagtcttctactgtgtcctcacgtggcagaagggggcaaggaagctctgtgggatgtctcataagggcactaagcagagtcctcatgacctaaccacctcccaaggccccacctccttataccatcaccttgggggttaggatttcaacatgtgaattctggaaggacataaacattcagttcattgcatttaccactgggaagaaaagactgttggaaaatgatgtttctcagctgcacatcagagttttgatcatcacttgtggagcaaaaagaattcatctgtgatataactagttggtcattagcaatagcttgcattcttttcttttcttttcttttctttttttttttttgagacgggctctcactctgttgcccaggctggagtgcaatggcgcaatcttggctcactgcaacctccgcctcctgggttcaagtgattcttctgccgcagactcccgagtagctaggattacaggcatgtgccaccatgcctggctaatttttctatttttagtagagatggggtttcacgatgttggccaggctagttttgaacttttgacctcaagtgatccatgtgcctcggtctcccaaagtgctgggattacaggcacaagccaccgcgcccatccagcagtagttttctattgctgagtaaaaacattaccacacacttagcagcttaacataggagcatttattattccacagtttcctggaatcagaattctgaacatgcattagctggatcttttgttcgggtctcacagtgctgcaatg

SEQ ID NO: 682751 - DNA, 2416 bp, Homo sapiens
tgactatttaataagagaaagcatgtaaagcatttattagagtgctcaatgaaacatatgcacttagtgttagctattattataaataacattattattgtttcctcaaccttatactctttcttcataaacaagcaatttttaaattggagtttgcagccctttgagggatcagcacacatgttctcacgtgtgtctgagaagtttctctgaaatttgttgttttattttgtgctttcattttcatgataatcttaaaaataatgaataactgtgtactggttcccctttataagagagtcctgccatgagttatattgtccaagtttccccatgtttaaaggaaggcgctctactccagtgtttgtagatggataagcaataaaagagcagtcttaaaaatgtgcccgatacagtcagactcagtgaaggccacctgatgccatctctttgtaggagggaagggttccctgagttcgagtagaggaaagtgatatgcaggttgagtcctcacgcagccgggagtgggcacgtgcatgcacaaaacaaagagaacattggctttagcagtgagtactgtatttaaattttgaaagacagtttaatctcagcaaaataacatcatcaatcatgttaaactaatgctgttaatttgaatgttatggatcttattgtttttgcatttaatttgttattttgttttagttttattattgaatcagagctagagcatatggagtttatttctagttttccatttgtgcatctctaagcaacaatataataaaaataatttaagtctacatattggtgttgcacaataatgttatttgccttattaaatggagtggtttggattactgaggtttgaggaataaagtaatggactcaaagaattatagactgagctgctaggaatcatttttccagaaatttcccctaccagatacagacactaggcctgcagagtgagaagtaaatgtcaaaggtcagaaagcaagggagtggtagactggggtcagaggccaggtggacatacttctaaccaggtgcccagtctgccatgtcaacccacttccaaagatgaaccatggcagataaatggccacagctgccaggccacaaaggctggttaggcaaaaacaaatggagaattgctgcattgttttggttaactctgagggtagaggctgtggaaggggtggggacgaagggaataacagatttgttcagagcctaagtcccaatgagcaatgggtgatagtgagaggaaatgatggccatttttctgagttccttggtattcccatgggtaatatcacctgagccattccctcctcaagtgatattaaccatcagcctgtattgttcggtgactttcatcataaggaaacaaaactccaaagtctaaggagttctactctgtatgaatttagactgtaagcttatgccacctaactagagttctgtactgtcttagtccattcgggctgttataaccaaataccatagactggggggcttataaacaacagaaatgtatttctcacagttctggagaccgacaagtcaaagatcaaggtgccagcagatttagtgtctggtgaggatgcacttcctactttataaacagtcttctactgtgtcctcacgtggcagaagggggcaaggaagctctgtgggatgtctcataagggcactaagcagagtcctcatgacctaaccacctcccaaggccccacctccttataccatcaccttgggggttaggatttcaacatgtgaattctggaaggacataaacattcagttcattgcatttaccactgggaagaaaagactgttggaaaatgatgtttctcagctgcacatcagagttttgatcatcacttgtggagcaaaaagaattcatctgtgatataactagttggtcattagcaatagcttgcrttcttttcttttcttttcttttctttttttttttttgagacgggctctcactctgttgcccaggctggagtgcaatggcgcaatcttggctcactgcaacctccgcctcctgggttcaagtgattcttctgccgcagactcccgagtagctaggattacaggcatgtgccaccatgcctggctaatttttctatttttagtagagatggggtttcacgatgttggccaggctagttttgaacttttgacctcaagtgatccatgtgcctcggtctcccaaagtgctgggattacaggcacaagccaccgcgcccatccagcagtagttttctattgctgagtaaaaacattaccacacacttagcagcttaacataggagcatttattattccacagtttcctggaatcagaattctgaacatgcattagctggatcttttgttcgggtctcacagtgctgcaatg

SEQ ID NO: 682752 - DNA, 1009 bp, Homo sapiens
tcctgcagtgcccaggacagcccccacaacaaagagttatctgggccaaaatgccaatagctactagattgaggaactcttcaacagagaatggggccgggcgtggtggctcacacctgtaatcccagcactttgggacgccaaggcgggaagattgcttgaggtcaggtgttcgagaccaccctggccaatgtgatgaagccctgtctccactaaaaatacaaaaattagccaggggtgatggcactcgtctgtaaccccagctacttgggaggctgaagtgggagaatctcttgaacctgggaagtggaggttgcagtgagctgagatcgcaacactacactccggcctgggtgacagaggctccatatcccccccccmaaaaaaaaaaaaagagagagaatggaatgagtgaaatgacccagggacaagcaagatgcatatagaagtacaaaggaaataaaccattcctggtcctgcaatacaatacccagcgtcctacatccttccttccttcttcgctctccattgcttccaacccactgtctcatacctggcaacagtgcatcaagcctgtggttgtatgaagcggggtctaaagcctagtttctctgtatccactgtttaaccttaagcaaaaacaatgggtaagacctgtttgatagcacagtggggtgactatagtcaacagtaatttaattgtatattttaaaataactaaaagagtataattggattgtttgcaacacaaagagataatgcctgaggggatggatactgcattctccatgatgtgattactatctattgcatgcctgtatcaaaacatctcatgtaccccataaatatacatacttaccatgtacccacaaagattaaaaattttaaaaatttttaattaaaaagaaaaaataaccttggacaagccactaaccttcctgaacctcattctcatctcgactctcctccttgaacaacagagactcaggaagaaaagggggcctatttt

SEQ ID NO: 682753 - DNA, 1009 bp, Homo sapiens
tcctgcagtgcccaggacagcccccacaacaaagagttatctgggccaaaatgccaatagctactagattgaggaactcttcaacagagaatggggccgggcgtggtggctcacacctgtaatcccagcactttgggacgccaaggcgggaagattgcttgaggtcaggtgttcgagaccaccctggccaatgtgatgaagccctgtctccactaaaaatacaaaaattagccaggggtgatggcactcgtctgtaaccccagctacttgggaggctgaagtgggagaatctcttgaacctgggaagtggaggttgcagtgagctgagatcgcaacactacactccggcctgggtgacagaggctccatatccccccccccaaaaaaaaaaaaagagagagaatggaatgagtgaaatgacccagggacaagcaagatgcatatagaagtacaaaggaaataaaccattcctggtcctgcaatacaatacccagcgtcctacatccttccttccttcttcgctctccaytgcttccaacccactgtctcatacctggcaacagtgcatcaagcctgtggttgtatgaagcggggtctaaagcctagtttctctgtatccactgtttaaccttaagcaaaaacaatgggtaagacctgtttgatagcacagtggggtgactatagtcaacagtaatttaattgtatattttaaaataactaaaagagtataattggattgtttgcaacacaaagagataatgcctgaggggatggatactgcattctccatgatgtgattactatctattgcatgcctgtatcaaaacatctcatgtaccccataaatatacatacttaccatgtacccacaaagattaaaaattttaaaaatttttaattaaaaagaaaaaataaccttggacaagccactaaccttcctgaacctcattctcatctcgactctcctccttgaacaacagagactcaggaagaaaagggggcctatttt

SEQ ID NO: 682754 - DNA, 1169 bp, Homo sapiens
gctgggattacaggcatgagccactgcgcccagcctcccatgatcttttcttatctcatatatatatacacatacgcacacacacataagtattgtacctaggtggatgcgttcccccttagtttagggaatgccctactctgtctatggaatggctgtactttcaccactttacttttttaataaacttgcttttgctttgtactatggactcaccctgaattctttcttgcatggggtccaagaaccctctcttggggtctggatcaggacccctttctggtaacatcaccacatgagactgtgcttttgtttcatagatgaagaaactgaggctaagaaaagttaaccaactcaccctggttctacagccagctacatgataccaggattcagatccaagctgtatgcctccagaaactatgttcttggccactatcaaccactaagctgggttgccccaaggaaagtaaaagaggcaacccacttggtgggttgccaagtgaaaaacagaatatgcagttatattggaatttcacacaaacaatgggggaayaattttttagtataattatgttccaaatataacatgatacatacttataccacaaaagttattgtttatctgaaatttcaatgtaactgggcatccatccaacccgtatttttaaatctggaaaccttatagcaggtaggaccaaacctatgcaacccctagctcagaagacatgtggcttgactattaggccacaagaagcaactacagcttcagaatccaggtcttctgtaaaccttcccaaatgtctacgtgcctaataaccatcaggtcattttttaattttggggcattggtgggatggtggtacgtgagttctagcaagatgccagagaatcccacaaggaattattataaagaacaaacagggatatctgtgagaaaaacctactgaagcagcattgttgtctggggtaaaaaccgggtttgtcatctcactccaagaaaattaaggacacagacacatgtggataggttaaggagtggaaagtttaacacgcaaaagaaaggagagatgagagcagttccttgtgagagagatgctaaggaaaaaaaaagtgggggaaaggtgtggaccacagcagattttataggcaggcttgaggaggcagtg

SEQ ID NO: 682755 - DNA, 1169 bp, Homo sapiens
gctgggattacaggcatgagccactgcgcccagcctcccatgatcttttcttatctcatatatatatacacatacgcacacacacataagtattgtacctaggtggatgcgttcccccttagtttagggaatgccctactctgtctatggaatggctgtactttcaccactttacttttttaataaacttgcttttgctttgtactatggactcaccctgaattctttcttgcatggggtccaagaaccctctcttggggtctggatcaggacccctttctggtaacatcaccacatgagactgtgcttttgtttcatagatgaagaaactgaggctaagaaaagttaaccaactcaccctggttctacagccagctacatgataccaggattcagatccaagctgtatgcctccagaaactatgttcttggccactatcaaccactaagctgggttgccccaaggaaagtaaaagaggcaacccacttggtgggttgccaagtgaaaaacagaatatgcagttatattggaatttcacacaaacaatgggggaacaattttttagtataattatgttccaaatataacatgatacatacttataccacaaaagttattgtttatctgaaatttcaatgtaactgggcatccatccaacccgtatttttaaatctggaaaccttatagcaggtaggaccaaacctatgcaacccctagctcagaagacatgtggcttgactattaggccacaagaagcaactacagcttcagaatccaggtcttctgtaaaccttcccaaatgtctacgtgcctaataaccatcaggtcattttttaattttggggcattggtgggatggtggtacgtgagttctagcragatgccagagaatcccacaaggaattattataaagaacaaacagggatatctgtgagaaaaacctactgaagcagcattgttgtctggggtaaaaaccgggtttgtcatctcactccaagaaaattaaggacacagacacatgtggataggttaaggagtggaaagtttaacacgcaaaagaaaggagagatgagagcagttccttgtgagagagatgctaaggaaaaaaaaagtgggggaaaggtgtggaccacagcagattttataggcaggcttgaggaggcagtg

SEQ ID NO: 682756 - DNA, 598 bp, Homo sapiens
ttagtagagatggtaaaatctgtctctactaagagtacaaaatacaaaagtatttacaatatgtaaaaaatataaaaattagccaggcrtggtggcatgcacctgcagtcccagctacttaggaggctgaagtagaagaatcagttgaacccaggaggaggaggttgcagtgagctgagactgcaccactgcactccagcctgggtgagacagtgagactccatctcaaaaaaataaaaaaatgaaaaaataaatttagaaaaaaagatattttatgacctataaataggaaaatatttcttaaataggtagagaaagtaaaattcataaaaaaggactgaaaaattgaactgcattaaaattcggtcctctacttgacaaacgacaccataagtaaattttaaagaaaacagcagactgaaataagatatttctaatatctaaaacagatacattaatagcaaaagggaaataataaaattagtggacaaaatatatgacccaacaacttagaatagatgaaacccaaaatgaccactaaacatataaaaagatacacaacctctttggtgtaatttagtaaaaactaaagtaaaac

SEQ ID NO: 682757 - DNA, 910 bp, Homo sapiens
gaaagcagtgggagatataattaaagccgcactgtagtgaggaggagagagggcatccaggagaaagggctgagtaataaggagttcagtgctgaaggttatctaagaaaaagatgatgctgggaaaagaaattttaaaaagagtttttcattgatttataatttgaagtcatttgtattgttatttaacatacccacataaagggtaatattcgtcaggtattgtttaaggtgcatttacaaatattacttcatttaatctttgtaacaacccatgattgtcaggcctctgagcctaagctaagccatcatatcccctgtgacctgcatgtacacatccagatggactgttcctgccttaactgatgacattgtcttgtgaaattccttctcctggctcatcctggctcaaaagctcccccactgagtaccttgtgacccgtactcctgccygtcagagaacaaccccctttgactgtaattttcctttacctacccaaatcttataaaatggccccacccctatctcccttccctgactctcttttcggacttagcccgcctgcacccaggtgattaaaagctttattgctcacacaaagcctgttcagtagtctcttcacagggacgtacatgaaaatgataagcatgccattatgaccatttccattgtacaggtgaagagagtaaggaccagagatgttaagtaacttgtccaagatcatgcaactattacatggaaaagccaggaattaaactcagactgttataaatatgttcccattgatagagtccatttgaaacacatgaccctgcccaacgcaaattcacactttctcgttttgaaaccagaataacacaaagacaagaaaataggggaactgtcaaagaagtgataaagactgagttt

SEQ ID NO: 682758 - DNA, 1195 bp, Homo sapiens
aatttggtatgtaaaagagaagaagaagaggtgatggggaagaagatgtctgctcatcttcatatcacaatgcgggaatcaaaaaacatcagccataggtaatgaacaaaaaacacaaagatgttatttagtgttacagtgataaacaaaagaataaacaaaaagcaatgaaaggtgagatgagttaaatctatacctatcataacaagaatgtaaagataagtttactgtataaaatgttgttacaagaataacatttacagctattttttaaaaacaacagaagaaaaaaattacaaagcagaaacattctctggtaggatcatctctggcctagcctacctgtgtgcaaatcagatgagtgcaagggcctcttctgcagttcttttttataaacaagaagcacataacattgttttgattaaaatattatgttttaagagggttaaatatgaacagtactataatctaaaaacttttaacataatacaagtattgaatactaaaatgtaatttaaaaaaattaaaaaataaaaagtgataaagtaatggggagtcaaagagcatgaattcaatttgccttcaaactctgtattccatattactctactttttcagatttaatgtcccaataaccaatttgtagattctagcctctattctaaagtccaaaaatgttccccactacgtacataatgaagataatgggaagaataaaagtcaaaaacctccataacttggccacaacttacataatctatgtctttataaaaataccacactcaaatagtctgtgtttcacgaacatactatgtccattcttaaccacgtgcatgaaatacttcacttagaatgtcctcccttctttcagaagcttgctcaaaaactgcctctctttaggaagtcacttcaaatcactatacttacaatgcttgctgatggaaatgtctgaaacagaaattctcagcgactgtgtagcactactgattttatgcatagctgttcttattacatattgattgtccaatggctaggatctagtacagaagtggcatttaataaaggtataatgatactgatgatgaataatatagtttcatagccagycactatatcataaatacccttaagctaagtttaccacattagaatttctgaattctagagagtctacaactcatttagtcagatttat

SEQ ID NO: 682759 - DNA, 1851 bp, Homo sapiens
tgcttactcgcttgatacttctgtcttctactagaattaccattgacaagaaatattcacatcttgctcataatatttctccagagttttgtacattgcctgttgcatagtaactacccaacagatattttggtacagaaattaataaatgaatagattaaactttgtccaaaaacctattctatatgacatgttttataggagaaagcctaagtgaggataactttttaaatacataaatgtagacataataaaccctcaatttatccaaacctttaaaaattgaaaaactattttaataaaaagttatttaaataactaatttaattaaaaccccaaatgattaagctgaaaaacacccaggaatgatctgttcatttttggcaacttttaaatcttcaaatattttttctgaaataaccaaaaaaaggacctaatgatgccaaaaataaaaacaactaccatttgttcaccacctcctatatgccaagcatcacactttcttaaaagtactttaaagaactcagcatggcaaagatttctcctacttctttatatcagatctgrcaaaacaaattataggctggttgcagtgcctcaagcctataattcaagcactctgggaggccaaggcacacagactgcttgagtccaggagtttgacaccagcctgggcaacatagcaaaactccgtctcctcaaaaaatacaaaaaaattagccaggcacagtggtgtgcacctgttgtgccagctacttgggtggctgtggtgagaggactgcctgagcccaggaggtagaggcaacaatgagccaagattgcaccacagcactccagcctgggcaacagagcaaaaccctgtctcagaaaagcaacaaacaaacaaaaaccaataataataataaataaataaataaaaataaatatttataaatactttgaagaatcccccacatagagcaacatggcagagtggtgttcagggaaattccttctattctagaacctctaaaaatagtaaataaaattcaaaacaaaaattaaatgttaatgggggaattggcaagaaagaatttattttcttagatgctgggagagagaagaaagttagaagccggaggagaaagaaaacaaaagctaatgttcactcatgacgtctctcactaggcatgatggcctaaagcttgggttttgtataagaagaagcctgggtttgactttgccataaactgtctttgccattaactggctataaaacttctctggagatactctggaattcctcatctgcaaaattaaagacttaaagacataaaggcctgaaaccagagcagagtgaaaagtccaatcagaaactcctgtgtaaagcattagcaggctgtacattggaattatctaagataattttaaaatatccataaatgtcatctatcacctctgttacaatacaatttgtgacctcctaaatactaagtcagatgcttttaacagaatattaatagagtggggcctaactccaaatttaaatggaattttcagagaagcattatgaaattacagacaaacattataaagtgaaatctacgcctaccaaaaagatcaagtctacattaagttaagctgaagttgatccgttctttcctactctatcctcactagggatagtgagaatttatacttatttcgaacttttccaaaagaagttctagaatcagaattttgttcatggcttggctcaaccattaactcacttttggtaggacactgactatattacttaagttgtctaaggctgtatgcttatttgtaagatgataatggttataaatgatgtacaaaaaacaaaataat

SEQ ID NO: 682760 - DNA, 1851 bp, Homo sapiens
tgcttactcgcttgatacttctgtcttctactagaattaccattgacaagaaatattcacatcttgctcataatatttctccagagttttgtacattgcctgttgcatagtaactacccaacagatattttggtacagaaattaataaatgaatagattaaactttgtccaaaaacctattctatatgacatgttttataggagaaagcctaagtgaggataactttttaaatacataaatgtagacataataaaccctcaatttatccaaacctttaaaaattgaaaaactattttaataaaaagttatttaaataactaatttaattaaaaccccaaatgattaagctgaaaaacacccaggaatgatctgttcatttttggcaacttttaaatcttcaaatattttttctgaaataaccaaaaaaaggacctaatgatgccaaaaataaaaacaactaccatttgttcaccacctcctatatgccaagcatcacactttcttaaaagtactttaaagaactcagcatggcaaagatttctcctacttctttatatcagatctggcaaaacaaattataggctggttgcagtgcctcaagcctataattcaagcactctgggaggccaaggcacacagactgcttgagtccaggagtttgacaccagcctgggcaacatagcaaaactccgtctcctcaaaaaatacaaaaaaattagccaggcacagtggtgtgcacctgttgtgccagctacttgggtggctgtggtgagaggactgcytgagcccaggaggtagaggcaacaatgagccaagattgcaccacagcactccagcctgggcaacagagcaaaaccctgtctcagaaaagcaacaaacaaacaaaaaccaataataataataaataaataaataaaaataaatatttataaatactttgaagaatcccccacatagagcaacatggcagagtggtgttcagggaaattccttctattctagaacctctaaaaatagtaaataaaattcaaaacaaaaattaaatgttaatgggggaattggcaagaaagaatttattttcttagatgctgggagagagaagaaagttagaagccggaggagaaagaaaacaaaagctaatgttcactcatgacgtctctcactaggcatgatggcctaaagcttgggttttgtataagaagaagcctgggtttgactttgccataaactgtctttgccattaactggctataaaacttctctggagatactctggaattcctcatctgcaaaattaaagacttaaagacataaaggcctgaaaccagagcagagtgaaaagtccaatcagaaactcctgtgtaaagcattagcaggctgtacattggaattatctaagataattttaaaatatccataaatgtcatctatcacctctgttacaatacaatttgtgacctcctaaatactaagtcagatgcttttaacagaatattaatagagtggggcctaactccaaatttaaatggaattttcagagaagcattatgaaattacagacaaacattataaagtgaaatctacgcctaccaaaaagatcaagtctacattaagttaagctgaagttgatccgttctttcctactctatcctcactagggatagtgagaatttatacttatttcgaacttttccaaaagaagttctagaatcagaattttgttcatggcttggctcaaccattaactcacttttggtaggacactgactatattacttaagttgtctaaggctgtatgcttatttgtaagatgataatggttataaatgatgtacaaaaaacaaaataat

SEQ ID NO: 682761 - DNA, 1851 bp, Homo sapiens
tgcttactcgcttgatacttctgtcttctactagaattaccattgacaagaaatattcacatcttgctcataatatttctccagagttttgtacattgcctgttgcatagtaactacccaacagatattttggtacagaaattaataaatgaatagattaaactttgtccaaaaacctattctatatgacatgttttataggagaaagcctaagtgaggataactttttaaatacataaatgtagacataataaaccctcaatttatccaaacctttaaaaattgaaaaactattttaataaaaagttatttaaataactaatttaattaaaaccccaaatgattaagctgaaaaacacccaggaatgatctgttcatttttggcaacttttaaatcttcaaatattttttctgaaataaccaaaaaaaggacctaatgatgccaaaaataaaaacaactaccatttgttcaccacctcctatatgccaagcatcacactttcttaaaagtactttaaagaactcagcatggcaaagatttctcctacttctttatatcagatctggcaaaacaaattataggctggttgcagtgcctcaagcctataattcaagcactctgggaggccaaggcacacagactgcttgagtccaggagtttgacaccagcctgggcaacatagcaaaactccgtctcctcaaaaaatacaaaaaaattagccaggcacagtggtgtgcacctgttgtgccagctacttgggtggctgtggtgagaggactgcctgagcccaggaggtagaggcaacaatgagccaagattgcaccacagcactccagcctgggcaacagagcaaaaccctgtctcagaaaagcaacaaacaaacaaaaaccaataataataataaataaataaataaaaataaatatttataaatactttgaagaatcccccacatagagcaacatggcagagtggtgttcagggaaattccttctattctagaacctctaaaaatagtaaataaaattcaaaacaaaaattaaatgttaatgggggaattggcaagaaagaatttattttcttagatgctgggagagagaagaaagttagaagccggaggagaaagaaaacaaaagctaatgttcactcatgacgtctctcactaggcatgatggcctaaagcttgggttttgtataagaagaagcctgggtttgactttgccataaactgtctttgccattaactggctataaaacttctctggagatactctggaattcctcatctgcaaaattaaagacttaaagacataaaggcctgaaaccagagcagagtgaaaagtccaatcagaaactcctgtgtaaagcattagcaggctgtacattggaattatctaagataattttaaaatatccataaatgtcatctatcacctctgttacaatacaatttgtgacctcctaaatactaagtcagatgcttttaacagaatattaatagagtggggcctaactccaaatttaaatggaattttcagagaagcattatgaaattacagacaaacattataaagtgaaatctacrcctaccaaaaagatcaagtctacattaagttaagctgaagttgatccgttctttcctactctatcctcactagggatagtgagaatttatacttatttcgaacttttccaaaagaagttctagaatcagaattttgttcatggcttggctcaaccattaactcacttttggtaggacactgactatattacttaagttgtctaaggctgtatgcttatttgtaagatgataatggttataaatgatgtacaaaaaacaaaataat

SEQ ID NO: 682762 - DNA, 1851 bp, Homo sapiens
tgcttactcgcttgatacttctgtcttctactagaattaccattgacaagaaatattcacatcttgctcataatatttctccagagttttgtacattgcctgttgcatagtaactacccaacagatattttggtacagaaattaataaatgaatagattaaactttgtccaaaaacctattctatatgacatgttttataggagaaagcctaagtgaggataactttttaaatacataaatgtagacataataaaccctcaatttatccaaacctttaaaaattgaaaaactattttaataaaaagttatttaaataactaatttaattaaaaccccaaatgattaagctgaaaaacacccaggaatgatctgttcatttttggcaacttttaaatcttcaaatattttttctgaaataaccaaaaaaaggacctaatgatgccaaaaataaaaacaactaccatttgttcaccacctcctatatgccaagcatcacactttcttaaaagtactttaaagaactcagcatggcaaagatttctcctacttctttatatcagatctggcaaaacaaattataggctggttgcagtgcctcaagcctataattcaagcactctgggaggccaaggcacacagactgcttgagtccaggagtttgacaccagcctgggcaacatagcaaaactccgtctcctcaaaaaatacaaaaaaattagccaggcacagtggtgtgcacctgttgtgccagctacttgggtggctgtggtgagaggactgcctgagcccaggaggtagaggcaacaatgagccaagattgcaccacagcactccagcctgggcaacagagcaaaaccctgtctcagaaaagcaacaaacaaacaaaaaccaataataataataaataaataaataaaaataaatatttataaatactttgaagaatcccccacatagagcaacatggcagagtggtgttcagggaaattccttctattctagaacctctaaaaatagtaaataaaattcaaaacaaaaattaaatgttaatgggggaattggcaagaaagaatttattttcttagatgctgggagagagaagaaagttagaagccggaggagaaagaaaacaaaagctaatgttcactcatgacgtctctcactaggcatgatggcctaaagcttgggttttgtataagaagaagcctgggtttgactttgccataaactgtctttgccattaactggctataaaacttctctggagatactctggaattcctcatctgcaaaattaaagacttaaagacataaaggcctgaaaccagagcagagtgaaaagtccaatcagaaactcctgtgtaaagcattagcaggctgtacattggaattatctaagataattttaaaatatccataaatgtcatctatcacctctgttacaatacaatttgtgacctcctaaatactaagtcagatgcttttaacagaatattaatagagtggggcctaactccaaatttaaatggaattttcagagaagcattatgaaattacagacaaacattataaagtgaaatctacgcctaccaaaaagatcaagtctacattaagttaagctgaagttgatccgttctttcctactctatcctcactagggatagtgagaatttatacttatttcgaacttttccaaaagaagttctagaatcagaattttgttcatggcttggctcaaccattaactcacttttggtaggacactgactatattacttaagttgtctaaggctgtatgcttatttgtaagatgataatgrttataaatgatgtacaaaaaacaaaataat

SEQ ID NO: 682763 - DNA, 2055 bp, Homo sapiens
tttttaatagagatggggtttcgccatgttggccaggctggtctcgaacttctgaccttaggtgttccacccgcctcggtctcccaaagtgctgggattataggcgtgagccaccatgcccagccagctttttctttaagcattgaattattgaaatataattcacataacatactatttacacatttataatgtacaattaaatatcttagtataaagcttgttcaaccagaggcatgattcatatgtggcatgttctttcttttggctggctgaacaaggtgtcccaattgcatatgtctgctttactcactcctgtatttcaatccagtttgattgagtgttctcaccagcatccatgttaaaatgtaaatgccaccaggaaaagaaatatggctgtgtagaatagacctgggtccaaaccaagtacagtaccagctcagtatagagcgaatggttaaaacttgttttataataatagtaccattttaaatttaagctgcttgtttgaagaatagtaattttcatcatggatttaattcatccttgaaaatgaccatgtactcaaaatccctgaactcttctcacttccccttgttcttccctcttttctcatagcaaaatgatagggtatgggaccatattagtccactgttctgctaccgaagaaaaatacttatgcttttagttagataaatgagaatagaaggataaattattaacagtatagaagacaatgatccagcatggccaaaaaggtgaaaccccatctctactaaaaatacaaaaattagcagggtgtggtggcttgcgcctgtaatcccagctactcgggagactgaggtgggagaatcgctggaacccgagaggcagaggttgcagtgagccaacatcgcgccactgcactccagcctgggtgacagaacaagactctgtctcaaaaaaaaaaaaaaaagacaatgataaacacaaggaaggccattgtagattatgtggggtcaattaaagcaggcttcgtgatttagagagggaaaaaaaaatagtgttcattcctaggactatcttattaattcaggcattcaggcacttgactcacccaaactatagcactttttcttttttgagacggatctcgctctatcactcaggctaaagtgcaatggtgcaatctcagctcactgtaacctctgcctcccacgttcaagcgattctcccgcctcggcctcccaagtagctgggattacaggcacccgccatcatgcccagctgatttttgtattttggtagagacgaggtttcaccatgttggccaggatggtctcgaactcctggcctcgtgatccgcccgcctcggcctcccaaacttctgggattacaggcatgagccatggcacccggcagcacttttaagttaaaaaaaaaaaaaaaaaaaaatawatatatatatatatatatatatatatatatatatatataattttttgtgctgtctagccttaatatgtaatccatatgtcgagcttgctgtattgcatttttaaatggtagaactggccgagtgcagtggctcacgcctgtaatcccagcactttgggaggctgaggcgggaggatcacttgaggtcaggagtttgagaccagcctggccaacatggtgaaaccccatctctgctaaaaatacaaaaattagccaggcacggtggcaggcacctgtaatcccagctactcaggaggctgaggcaggagaattgcttgaacctgggaggtggagggttgcagtgagccgagattatgccactgcactccaacgtgggtaatagagcaagactccgtctcaaaaaaaaaaaaaggtagaaccactatacttcaagcccaaatttaaatctcgggcccttcctccaacactcctttccccaaatagatgctaggtcctctcttccaggtgctaggcatacagcagtgaaaaagacaagtacttgttcccatgttctagaagaggggaaagcaaaagattcagtcctcctctgccctggtttgcctaacaaccacctgtgga

SEQ ID NO: 682764 - DNA, 1383 bp, Homo sapiens
tttgtacatatttttaaagtacctgaagtttcaaagaagattgttccacaaaaaccttcccggactccagtacaggaagaagttattgaagtgaaaggtatacatctttgtgtttcagctacaagttcaaaatttttttatttatgtgtatggacatgtgtacatatattgctaagtaactcacaaatctgaaacgaccaaaaacagcacatttttacataatacaaattttatgttgagttgcacatatgtttaatttaaatagtaacattatctactttgtttctagttctgcttaaaaattacatttttttattataaagaaggtttgtgtttaattagtagtttgctaacttcactatgcaatgcattccattgcatataatattccctgtcctcttatttatagaaatagaccctaacagatttggaaaagcacaacattgtgtgtgaagaagttgtgtctatttgattctcatttaagaatgtttgatgaaggctgcatgcattgtttgtccctatagatcaaaacatgatttgttttcttgtcaatactgaatttgttctcaagctaccatattaacccactcattctgtgtctaaatacttgagtataaaatccatgtgtttgatctgatgtcttgtactaaaaaaaaggaatactaatgtgaaatactctctttaaagtaccagctgtgcatacaaagaagatggttatttcagaagaaaagatgttctttgcttctcacacagaggaggaggtgtcagtcacaggtataaggcaaactggaatgtgggggctcaaatggaagggttttaggcagatttttatccctcttgttgtctaatttgtgatcgtgtagacatttctgtctccttgtaaattctgtcatctttttcatttcatgtttgtctctgttttcatttttattttaatgttctttgtaaattacaattaccacccacaacatggcatatcagtaattaaaatgtacatttttttaagtccccgaggtacaaaaggaaattgttactgaagagaaaattcacgttgccrtttccaaaagggttgaaccaccacctaaaggtattagtaattcattctaagtttaaactcttttaataaaaattagtacaaataccatagtaaaacatttatgttagtattaaataatagatttagtcacagtgtgcatacctatagccactatgtacaaaggatgtgatgggggacgggaagaaccatgaggaaggcacagggggaaaaaagtgaaaattatgggaggctccattccctgcttcagagagtttgcaatctcgtaacctgttacttggaaatacagtgtcctggagccagttcatgctagctcaccagagcctatg

SEQ ID NO: 682765 - DNA, 3519 bp, Homo sapiens
ctagataatggtggctcagaaataacaaacttcatagtagaatatcgcaaaccaaaccagaaaggctggtcaattgttgcatcagatgtcactaaacgattaatcaaggccaaccttttagccaacaatgaatactatttccgagtttgtgcagagaataaagtaggtgttgggccaaccatcgaaacaaaaactcccattctggctattaaccctattgacagaccaggtgagcctgaaaaccttcacattgcagataaaggaaagacatttgtctatctaaagtggcggaggcctgactatgatggtggcagtccaaatctgtcatatcatgttgagagaaggcttaagggctccgatgactgggaaagagtgcataaaggaagcattaaagaaactcactacatggttgacagatgtgttgaaaaccagatttatgagttcagagtgcaaacaaagaatgaaggtggggaaagtgactgggtgaagacagaggaagttgttgtgaaagaagacttacaaaaaccagtacttgatctgaaattaagtggggtcctaactgtcaaagcaggggacaccattaggcttgaggcaggggttagaggcaaaccattcccagaagttgcatggaccaaggacaaagacgctacagacttaacaagatcaccaagggtcaagattgatacccgtgctgattcatctaaattttctcttactaaagcaaagcgaagtgatgggggtaaatatgtagttacggcaactaacacggctggcagttttgtggcctatgccactgtcaatgttttagataagcctggtcctgtgagaaatctgaaaattgttgatgtgtccagtgataggtgtactgtttgctgggatccaccagaagatgatggtggctgtgaaatccaaaattatattctagaaaaatgtgagacaaagcgaatggtttggtctacctattctgctactgtcttgacacctggtactacagtaacacgtctcatagaaggaaatgaatatattttcagagtccgtgcagaaaataaaataggcacagggcctccaacagaaagtaaaccagtcatagccaaaaccaagtatgataaacctggtcgccctgatcccccagaagtcactaaagtaagcaaagaagagatgactgtggtttggaatccacctgaatatgatggtggaaagtctataactggatactttttggagaaaaaggaaaagcattcaacacgatgggtccctgtcaacaagagtgcaatccctgagagacgtatgaaagtacagaatctcctcccagaccatgaatatcagttccgtgtcaaggcagaaaatgaaattggaattggagaaccaagcttgccttcaagaccggtggtggcaaaagaccccataggtaggatgtccttgttttttctgatattacagcaactcttaatctcaagcacagaagtattcgataaataagttaatgtaacatctaaatctgtaacatccaaactgtatttagcaaatatttttccaaatagaccttttaccaaaatacctaaaaggtacaaacaatagtagattctcatttttatgaaggaaaataaagaggacactaattgaaaaattggatgacctatatttgattaactgagaataggctatataaaattacacattgaagtatcactagtagtagttaactatatgtatattttactttcagagccacctggtccaccaaccaatttcagagtggttgatacaccaaacattccataactcttgggtggggaaaaccagtctatgatggtggtgcaccgatcattggatatgttgtggaaatgagaccaaaaatagcagatgcgtctcctgatgaaggctggaaacggtgtaatgctgcagcacagcttgtacgcaaggaattcactgttaccagcttggatgaaaaccaggaatatgagttcagggtgtgtgcccaaaaccaagttggtattgggcgccctgcagagctaaaggaagctatcaaacctaaagaaatactaggtaagtccttcccttagcatgtgattcattcacacttaatttcttatgatttccccacattctgaaaaatcaattaatgaccttaatgtcatttgcagaacctccggagattgatttggatgccagcatgaggaaactggtcatagtgagagcaggatgccctattcgtctctttgctatagtgagaggacgaccagcccctaaagtcacttggcgaaaagttggcattgataatgtggtcagaaaaggacaagttgatctggttgacactatggccttccttgtcatccccaattctacccgtgatgactcaggaaaatattccttaacacttgtgaacccagcaggagaaaaggctgtattcgtaaatgtcagagtattaggtgggttactaaaatgcttctccctcccacttcaaaaatgaatttgttaatagggatgctgaggagacatgtatatctgattttatgattctttacagacactcctgggcctgtgtctgatttaaaagtttcagatgtcactaaaacatcatgccatgtgtcctgggcccctcctgaaaacgacggtgggagccaagtgacacattatatcgtggagaaacgtgaggcagacagaaagacatggtcgaccgttaccccagaagttaagaaaacaagcttccatgtaaccaatcttgtccctgggaatgagtattacttcagagtaactgctgtcaacgaatatggccctggcgtcccaacagatgtcccaaaaccagtgcttgcatcagatcctctaagtaagtattatgctttcttcctccttttaaccccagtctcctattttagcaaggtcaagatactaataccattttaatccacttctgaaagagatttcatttgtagagaccgaaatagtgtaataaatatctatctcactcatgaaacacttttttgatctgtctcatcttatatgttttgcttttaatgtactgaactacaggttctatgtacattggagcaaatccatactaaaactcttatgtacattaacaaaggggatttgattaggttacctaggtaatcttctaaattatgtttttcttctaggtgagccggatcccccaaggaaattagaagtgactgaaatgaccaagaacagtgccaccttagcctggttacctcccctacgtgatggaggtgctaaaatcgatggctacatcaytagttacagagaagaagagcagcctgcagatcgctggacagagtactcagtggtaaaagatctgagccttgttgtcactggcctaaaggaaggaaagaaatacaaatttagagtagcggccagaaatgctgttggagtcagtttgccaagagaagctgaaggagtgtatgaagccaaagaacaactgtgtaagtagtctttgcttcatttatgtcatgtggtaagtttattagaatttcttcttttatatgtagacatttctccctg

SEQ ID NO: 682766 - DNA, 1635 bp, Homo sapiens
cacattacatggtacaatgaccagggaagcaaaaccagaagactggtgaaatgtgaaggttctccaatccaagggccaaggccagaggccagccttgccatctgactgcctgtaggacctctggcaaggtgcttaggatttctacactttggattttctactgtaaaataagacagagtacctgcttcatggggctgtctcaagaaacaaagaaaatcacaaatataaggagtctactgtctaaagctgagtgctcttgctgttcatactcttctcttcttttttcttcactagatcctgtgcctctagaatataagcaccctgcrtttgcccatattaaaaacaaaacaaaacaaaacaaaaaacaaaaaaaactaacacctgccctagaaactacagtgttaaaatataaaattaattcataaactgaagtggtattgaatagttttaaaggcagtaatgtgacaaagttactgttattatatatcattaggatattagagagcagagatagtgaagggttggaaagaagtcatgataaatcttcagaaattttatgaaagaatgcaaaagaaaaaatatgagatttgtggtatataataaatatctattgggaatgcaattccaatttcccctagtatgagatgatctaaaagttgtgaaaaatatcttaagactttgctgcctttcaaccttcttatgcacgtcaccttttctatcttctgacccacctcacttgctgagccttccatacctactaccatcatgctagcctctaggtaggtacttaaaatctgtagtgcctcactcaagtccaactgccccaatatctgtattaccctttactctaaactccctcaccttctgggttcctgggaaagaacaaaagatttgggggtcagaacatccaagttatagttttggatctagaggttaattcctcatctttgtaagataaccagaaggaaataactatgaataaattataagctaaaattatatgatggacatctgcttttaagaatatctttatggatacataaagctatgatgacagttatgaatcttctcaaaaagcacacacatttacacacattcccacgaaattttatatataatttcaggagttatctggcaaccttcaactataaaaagggatttcggtaagaactgcttcttaactggtgacagaacttcaggaagtattagggagatgcttggaggagagtttgaaacttctgagctaccccttaaatcataccatttcaagagctgcctaaaccgaaaacaaaacaaaacaaaaaaacaaacaaaactggctctgccttttattgattataatagtgtttcatcttcgttacatccaaaccaactcactttctctacattttctgatactaccttgccctgtttcaaagggtaacgggatcagcatctcagtaataatagtttccatatttaaatataaccattgaagaccatattttctttcctttcaatcatttaaagggaacagctaagactcagtgtaagctgtctttacctgttgtgccaaacccctatcaaggccaatggggatggcactatgttcaaggggttgaagaagagactcagagccattgaatgagacatggg

SEQ ID NO: 682767 - DNA, 1338 bp, Homo sapiens
aaataatacaaaattcaaaattgtaatcacaataattaagaatatcagctaactacaatatagtaatgtgttataaaataattacatatcatgcttccttggcaaataaatttattacaacaatttcartatttatttgtaactgtgtctcattctatagaaatgaccactgggttagactacatatcttatgatattctagtccttaagtcatgtttaataaattttcaatttgaaaaaacattttccacaggttactgatattcacaaaattaaatacaagccgagagccagataagtatttgaaactgtgtgcagtaaattcaggttgtatgattatatcccatctaatgttattcctcactgtgtataccagttcatttcaattgcaaatctttgtgtaattgcagtaattcattctataatttttcaaagttgatatgcaatctacaatagcggtcagcaaataatggctcacaagctgaatctgaccctccttctatttttgtacagccaacaaattgcttttacattttgaaaagaataatattgtaggacatgaaacttatataaaatttaaatttcagtgtacataaataaaattttattagaacacagccatatttatttgcttattattgtctgtaactatttttgcaccataatggcagagttgaaaaattgcaagagagaccatatggcccacagagccgaaaatatttaatagctggccccttacagaaaaagtttgccaacccctgatctagaactctgaaaaggtcatgactgtcttttaatattaaaaaagtttttaaatgagacttgtatcattattatgtattaatagtaacagtgatattatattattatgtcattgtatattattataatatagctattagtgtattaattagtgcatattattatgctttattggtgtatattgctaatattccacatatttaggtagctttaaccacatcatcagcaatttctgaaagacaatggcacacacttctaacttagtaatataatgatatcaactggcttctccatcacataaatgacaaggattttaaatttttttatacttagtaaacacattttaaacagaatccaatgtttagttaaactcaaaagtagtttgttcgttcttaaaagacaatctccactctacccctaggcagaaattcagatttttggggcactcacgcacctggatcagcagcctaacccaccccacccatcctgtgcagagatcccggtgcagcaaggccctcttcactccacactcaggcagatctccaggcagctgaagcgtccactctcctggattaa

SEQ ID NO: 682768 - DNA, 1338 bp, Homo sapiens
aaataatacaaaattcaaaattgtaatcacaataattaagaatatcagctaactacaatatagtaatgtgttataaaataattacatatcatgcttccttggcaaataaatttattacaacaatttcaatatttatttgtaactgtgtctcattcyatagaaatgaccactgggttagactacatatcttatgatattctagtccttaagtcatgtttaataaattttcaatttgaaaaaacattttccacaggttactgatattcacaaaattaaatacaagccgagagccagataagtatttgaaactgtgtgcagtaaattcaggttgtatgattatatcccatctaatgttattcctcactgtgtataccagttcatttcaattgcaaatctttgtgtaattgcagtaattcattctataatttttcaaagttgatatgcaatctacaatagcggtcagcaaataatggctcacaagctgaatctgaccctccttctatttttgtacagccaacaaattgcttttacattttgaaaagaataatattgtaggacatgaaacttatataaaatttaaatttcagtgtacataaataaaattttattagaacacagccatatttatttgcttattattgtctgtaactatttttgcaccataatggcagagttgaaaaattgcaagagagaccatatggcccacagagccgaaaatatttaatagctggccccttacagaaaaagtttgccaacccctgatctagaactctgaaaaggtcatgactgtcttttaatattaaaaaagtttttaaatgagacttgtatcattattatgtattaatagtaacagtgatattatattattatgtcattgtatattattataatatagctattagtgtattaattagtgcatattattatgctttattggtgtatattgctaatattccacatatttaggtagctttaaccacatcatcagcaatttctgaaagacaatggcacacacttctaacttagtaatataatgatatcaactggcttctccatcacataaatgacaaggattttaaatttttttatacttagtaaacacattttaaacagaatccaatgtttagttaaactcaaaagtagtttgttcgttcttaaaagacaatctccactctacccctaggcagaaattcagatttttggggcactcacgcacctggatcagcagcctaacccaccccacccatcctgtgcagagatcccggtgcagcaaggccctcttcactccacactcaggcagatctccaggcagctgaagcgtccactctcctggattaa

SEQ ID NO: 682769 - DNA, 1627 bp, Homo sapiens
tctcttagggagaacctgctttctgaggacattcccacactcagttcgctgggctgttgtccatttttcattagcctcaaaggtttaatggcaactccatcaccaaaatattaatcacacaatgaagttacagattttccaacattcttgagcaagatgtgctaagacttatgttacatttggcccacgttcacattctttggttctatttaatctcaattaatttctgtaaattcctcatttgcatgctctctctctctttctctgtgtgtgtgtgtgtgtgtgtctgtctgtctgtctgtctgtctatgacaaatacacctgaagttaaggggaaaaagtaaagatgtttgggccatagcatgggcctctcctaagccatatctgcagtcaggataacaaagaaaattagcatgttatataacgaatatgtctgaaaactgaattagaaagatatccctgttacctaaggaaaagccactcacagtggctctctgactttttttaatttatggagacaaaaatatttctactttactgaatactgcatatagaaatttaataagccaaaacatgccctcctatttaaaaccaattataatttttgttgaaaaccattatcattcaaattgttgcatacatatatataatacattttactactttatgaagaggaaaatttaaatatttaccatttatctaaaatgcctgttcacatacataaaattatcatgtaaaaactaaaatttctctttatttagaatgcaaaacattcaggatttaacaactggcatataaaaatagtaatgaccctactaaagtaaatttaaaagatatcatttctatttaaatgtcatcacatttaggcaaatttgacagattgcctcctcacagaaaaacgtttaggcagtatatggatttaaaatacattatattgtaggctaggagtcaaacatgttaattatctagcatcgttcctctacagaatggatttctccagcttcaacatgcctcatgcccccatttagagactaatgctattacctgtctgtaagctaatattcaggtgaaatgaggtagtttggtgacctaaattatcttctaatacccttaacctttagctggtaaaagcttagcctaacaacatgtcaaatgaggcctagttctggctgtaatgaaatttccacctcatgtaagcctgtaacttgtctatgcttttcccctttacagtggtgtcttttacatatgctaaaaaaggagttagttgatatatgtttctctggaaatttgcataaaggaggacactggaaaggaaaattagagagtcaaaaaccttgaaactgcttttggctctaggctagggagatttttatttttactttttaatctaccaatttatttaaaaggaatgtataatacacatatagtaaagagcacgaatcttagcatayggattgatgaatttttatgtacacatatagcctagtaaccacccagctcaagatacagaacattctcgtcaacctacaagctttcctcatgtaccttcctagccaatactctccctctactcagaggtaactgctccttttttttttaattgacaaataatcattgtatttattta

SEQ ID NO: 682770 - DNA, 630 bp, Homo sapiens
ccaaatggaatatgcctcctgatatttttctttatgcaacaggtattttcttagtttccattatgtggcatgcactttttaggcacttgggagaccagggaacaaaacagaaaatactccctgctcttctggggtcaaaagatataatcaaacttttgccttgcaggagtttgctacctatgggatatactatatcataggagtaatggtcagagtgtctctgcttctagctttagctctatacacttagtgctaaagaggcacatgacttctaacagctgaagaagtttcaggaatatatcctttacctccttctcttaatctcaactctacataaatctgagcttcatgtaaaatttttgaaattttagggagctatcaaggcaaagacatagagtkgtgaaagtgtgtaaaatgttcggagctggtaaatgaaccacgtggccagagtgtagggctcatagagcctttagttggagatgaggttggagagttagcttgacaccacagtagagggtcttggaagaagccatttagattttgggtaactgagagtgttttgtggtttttgataaagaaaacaaatacgaacttacctgtgtttaggaaggttactgtggcaggggtgag

SEQ ID NO: 682771 - DNA, 606 bp, Homo sapiens
atacacacagaaaagaccgttggttttttctgtgaaagggtaaataattgctattcatatgatacatactagcatggaaatttttcagcttaaaggattctgcaaatttctgttccaaaatagcaactgagtccacaaacgacactggtaactcccctctgtacctcaacagactctccagtgtggctaaatgagctgacaggtgactgggtgggctcttcacagaacttcacatcaagtctggtgctctggcaggagaggtaggcagttacacaattttctcttccacaaaagcctagagacagccaactgacaccactggaaacttcaacataaacagcgctcctgtggctgtcctacctggtaggtaagcaaggcagtgttgccaaaacagctctttttaaaaaaagacccatgtaataaccactggggtagctataatcataaaaacagaaaataacaaatackggccaagtagatggagaaagtgaaatactcaggcgcttgctgttggcgggactgtcaaatggtacatctgctgtggaaaatagtttggcaagtcttcaaaaagtgaaacacagaattaccatatgacccagcaattcc

SEQ ID NO: 682772 - DNA, 1376 bp, Homo sapiens
tagatttccttgatcacattatgctagaatttgggtgacctactccacacacaacacaggaaattgatggtaacttgtgaagtgagtagaagtgactgaatttaatttggaagagtccccaaaaaacaattagtttagcttgaaattcttataaggagagttttgggtactgttaggtttcattttatttgcctatactccagaaaaaaaaagaaaactacatcaaaactgttgtgatgaaagctagtgatcttcagcacatcaaaacttgttcaaaatgcttgcatctgatctcacacaatagggatattcacacaaaatatctgtatagaaatcatgttttaaaaattaagaaacaaaatacatgaagaaagtaactttcgggtgaatcatatagtgcatcattatgtaacatcaaataagcctttgatatttcctcatttttcttagatttttatacactggctctatctgtagaaagtaggctggaagggaaatattcttataggacacaaattgaaatagtttattttagttgatcccttaaaatctcttagtaatagtcaaagaattatgtatgggtttactttttaaatggatttacacatttaatgaaaccatgtaagatgaaactaggatatttatcatttagcatcttattttcattagttgacagaaaaaaatccttttgtagaacttattttaaaggcatttcatactgttaaaaaggaacagctttcaaaatacaaatcaagtatataaatccattaagtgcagtcacatcaatacttaggtcaaaaccatcacatgacacatagtactataagatcatacttaaaatccctcttatctgtaagtctttatattaactgcttagaattgcagctgtctcccttatttttctctaagtcttcgtagacatcatatatatatatatatatatatatatatatatatatatatatatatatatatattcttaaatgtcagaaggatagtgttgttttcatatagagtggaaatgactagatacttaaaaatacattgttcctatggaaagtaatctctggaggtttagattaaagaaaaatactattcgggtatgagatgaaagctatataaaatgactaattttatttcaattttataatcattcagggctacatctttcaaccttatctctaaaatatgcaagtagatagcaggacaatactagagtgccgtgttaattccctttgctmatgtactggcagtcaaaactgaaagactacaattttatgaaagcaagaataaattgcatgtaatcctggcctttacaatgaaagtcaaacttaaccctaaatgaaattcctaaatttttagggcctcttttatcc

SEQ ID NO: 682773 - DNA, 977 bp, Homo sapiens
tgcagtcccaccactctttgcaatgctcaactgttttgactctgaatccgagctagagttttgacctagaacaggtcaaatgcgaaggctgagtaatgcttttccaattctatttatttttattccacggctccacttgagttctggaaacagactgctttgcagccagaggcccctgacctaattctttatcctggttttaaccagattaagccaagggagagctcacagctcctgctgcccaagtawgtctgcaaagccacaggaaggtgccactaagcaataagattcgagctagttttgtttaatttgggggctcccacctcacgtacagtttagggttaaaagagcaaaactcaggatgagattttgctaatgctgtcaggggaggggtggggcttgccattttccatgtgatattgttattcctaatcaactagttggaaccacctccgagttctggggctctgcaaggaagaaagataattagtcacagcaaagacaaaggataatatgactaaattcctgcccgtggatagaaaaagaagacttacatttctaacaaggcagaaatagccaattcgttcaattagtttaagcatgtaccattgagaaaggccacttcttcaaagtcgtgacccaaatttagactgaactctgaatccagagtagagaaaacatctcaaagatcttgctatccctccacatccagacctgtgttgtccaatacagcagccaatagccacacgtggctactgagcacctcaacgtagctgatccaaactgagatgggcggtaagggtaaaatacacatcagatttttgaagacttaagaaaaaagggccaagcatggtggctcacgcttgtaatcccagcaatttgggaggccaaagcagatggattgcttgagcccaggagtttgagaccagcctgggaaatgtggcaaaactttgtccctacaaaatatacaaaaggca

SEQ ID NO: 682774 - DNA, 977 bp, Homo sapiens
tgcagtcccaccactctttgcaatgctcaactgttttgactctgaatccgagctagagttttgacctagaacaggtcaaatgcgaaggctgagtaatgcttttccaattctatttatttttattccacggctccacttgagttctggaaacagactgctttgcagccagaggcccctgacctaattctttatcctggttttaaccagattaagccaagggagagctcacagctcctgctgcccaagtaagtctgcaaagccacaggaaggtgccactaagcaataagattcgagctagttttgtttaatttgggggctcccacctcacgtacagtttagggttaaaagagcaaaactcaggatgagattttgctaatgctgtcaggggagggstggggcttgccattttccatgtgatattgttattcctaatcaactagttggaaccacctccgagttctggggctctgcaaggaagaaagataattagtcacagcaaagacaaaggataatatgactaaattcctgcccgtggatagaaaaagaagacttacatttctaacaaggcagaaatagccaattcgttcaattagtttaagcatgtaccattgagaaaggccacttcttcaaagtcgtgacccaaatttagactgaactctgaatccagagtagagaaaacatctcaaagatcttgctatccctccacatccagacctgtgttgtccaatacagcagccaatagccacacgtggctactgagcacctcaacgtagctgatccaaactgagatgggcggtaagggtaaaatacacatcagatttttgaagacttaagaaaaaagggccaagcatggtggctcacgcttgtaatcccagcaatttgggaggccaaagcagatggattgcttgagcccaggagtttgagaccagcctgggaaatgtggcaaaactttgtccctacaaaatatacaaaaggca

SEQ ID NO: 682775 - DNA, 3406 bp, Homo sapiens
ctttggttcttctgaagtcaccttctgttcttgttgggtgtatgtttgtgtgtactccaagtcaataggtgacagtctcgtgtgggaagtgcacttgtgtttttcattcttctttttgtctgaagtgtataaacaccactgtcactgacaaattgtatctcattagcatgataaatcattttgatgtacaatatcacctcctcctgttcttcctacctctttgacgtgcctgtattgacattccaattctgagaagccttccatcaacaatctggaagagataatcccccagaattgatataattatagaggggctagtttttttgtttgtttttaatctgctccctacaactatgtggcaagcgtccttttcattgtcttctttgccatctcttgcagaaccatcttcagcttctgcttcactttgcgtgttaaagcatgaaacacgttgtctgtcccaaaatgaatggctccatttctcccctttcctttagtccttagttctagggcttcgtaacatgcttcgccagttttcatagagttaatgtaagtcaggaggtctcaaaaagctttacaaatattaattaattatgcgacagaacagccctgtgagacaaggatgatgatccctatttcacaggtggggraaattccaaacacacaaagcttgagtgacatgaatagctggccattattaagaaactgcaatcgtgtttgtggctgtgccttatggtgtcagtgtctggcgtatgcagcgtgattgccccactttgcagatgagaaaatggactgagaggtccgtttctgtatcagaggtttattcaaccttcaggtttgctcagattattcacaggcctctggggtttcccatttttctttattttctcagctttccccccaatacagcactattagtcagtgagccagcaatggaaaaatccaggtgtgcatttcatatgacttggtttgccccaactctcagaccacatctgtaaaacatgggtctcaggtctgatcacaggggccagttaaaagaagagacttaaaaaacagggatccaactctacacaagtgtcctgtgtcagaacaagaccaaggatgcaaccagcacatatgtcctggctatctgcatggtgccttgctattctcccgctctgcggcccaggaagagcaaacaacgtacagttccagggccacgttcaaggtctccaacttcttgccagtagctgcctggaaagcccacctctgtccttttccttccacgcaccttcaagactcaggcattattcctgcctccccagccggggctgccttcctgggctggcgacttgctcaccccagtgccagctctcagtgtgcaggtgagcattgcagatggcctctcaaactcggctctcacacatctggctactacaagcccctggagacaggaaccgtctttcatctgcgtgtgctcaacaacacccaaagcttcacgcacaacaaaattttgtagaatgaggcatgaccaaagctatagagggggtgaggcagattgtgcttattaatagaaaacttattttttggctcaaagaaactgatttttgacaaaaggattgtgtgtgtgtcattccttcactgacttaagagctatgattggcagccactggtctgtggctgaacagcctttgagttagttgaatgcattggttaaagatatagactccaggctttttttcaaatacatggaatctgtattctgggaagtagactcagaaacctgtacttttgattgtgtgattttgatgtttgtttggtacgtttagaaatgagatttctgttttatgaaacattatattatcttattaatgctataatattggtatgctctctcagttaaagaagtttgttaactgaaataatgatataaaaagaagcttttttttttttaattacctcaaacttgagtttgaaaatttgctgtcctggaagacaattgtttctcttctccccattgtaaagttcacaatagctctgtccgggagcagagtaaccagtgacttcaaaaccactgaccatccccaaagcaacaagataagggggccaatggccattcagtttgacccactgggtgttttaaatgttttgaatgtgaatatccttagttgaaatttgccttcccctgtttccacaggccccagtctcactgtcttgccctatctcttcattcgctctccctcccagatgtggaagctgaatttatactggtgcctccaagctggcactctgagtgcaaataagcagtggctattgcattatttattggacctgaaagaaacctccaatatgatctagttcagccaccaatttatgcgtgagaaaacaaaggaccagaaaggtaaatcaagttacctaatactgcacagctgacctggaggctcaccagaattgaaagccattcttcggattcttcatccactgcccttccagtatagcatagaatctgctctgtattctagaacagaggcttggaatctagtctcatcaggcaattctatctgttaagtcttttaagcagatatccctaatatatgtattattttaaaaatcatacacatgtacaattgttaatctagtcattaaatgttaatgaagcataatatctttattttttgtaagctggaaaagaagtacaaataaagcactccaatttgtgtttttcttcatccctatacatgatcctgcacagtttctgaggacggtagcaattgctttcaaagaccactgtactagaaaacaatttctcaatgcatcgtggtgtgggcagtcttctgtgaggtctttcacaaatcatttctaactagtaattgaagcagaccacagtttggagatgattgacttgctttagcaatcacagtgtatttaaaatcacttccagctcttcctctcactctttcttctgtgtgtttcttggtgggtgggaggctgaacgtcctttaacccttagtctatcttatctacacaagagtccaaagtgacccaccattcctgatacgatgttaatagagcaattgcgaattatcgaagtaattgcgagaagttgttgcagtattctttccactggatctttccgaattcgtatctattacacatgtgaatgacagccctcgagtgtgccagagccgaaaacgatggctacactctgcgctagccaggatctcccgcccctcaataaactactaaattccatcttcctctccgaagaggaaggaaatacagagcagaggtcacggctgccgtctcttttcgtcgcaatttcttttccagaacggagctggtgccagccctgacacgctgcgcgttccccacggggcctcttcttccccttgagggttccgcgctcggagtcccgaccacacgttttcgc

SEQ ID NO: 682776 - DNA, 797 bp, Homo sapiens
taatccattctactctccaactccagccttccttgttggacctcttgttctcgggcacctgaaagtaacaactaccactgttttcccctgctccccactgtgcctcagcacactccactgcctcattcttcctatccaataaattacgtattcttcaagacagaacacaatacctgcttctctatcagatcattttttcctcctcatggctaaactaatcaacatgctctcaactcataagcagtcaggacagaactcctcttggggatgtcttagcatctccagccagagatttctggctctctctacaaacatgataacagcatggtagacagcgtrtctctcaaatgaatggcacacacccccagtgttagctgagatagttcagggagcataagaacatgccccatcatagctgtgacagtaaattactgaaatatatttatgtgggaacaaatccagcataatagatactaagtaaacaccacactggaggtgcaacacctggcaaaatggtgaagtggtatatgaacaactgatgtttggaaactacagtcaagtggaaaaatcatgggattttgatagaaatctggagttcaatgtaagttctgctataagcttcctgatcccccagaaaggcatctgggccacgtgaagtcagtgtcttttttttaaactggggaaatgggttattgttattgtaagcctatttctttctctaaactgtgagcaccgtgagactaaaataggttttttaaaaaaatcttgtcttttatgtttcacctaccacagacatg

SEQ ID NO: 682777 - DNA, 797 bp, Homo sapiens
taatccattctactctccaactccagccttccttgttggacctcttgttctcgggcacctgaaagtaacaactaccactgttttcccctgctccccactgtgcctcagcacactccactgcctcattcttcctatccaataaattacgtattcttcaagacagaacacaatacctgcttctctatcagatcattttttcctcctcatggctaaactaatcaacatgctctcaactcataagcagtcaggacagaactcctcttggggatgtcttagcatctccagccagagatttctggctctctctacaaacatgataacagcatggtagacagcgtgtctctcaaatgaatggcacacacccccagtgttagctgagatagttcagggagcayaagaacatgccccatcatagctgtgacagtaaattactgaaatatatttatgtgggaacaaatccagcataatagatactaagtaaacaccacactggaggtgcaacacctggcaaaatggtgaagtggtatatgaacaactgatgtttggaaactacagtcaagtggaaaaatcatgggattttgatagaaatctggagttcaatgtaagttctgctataagcttcctgatcccccagaaaggcatctgggccacgtgaagtcagtgtcttttttttaaactggggaaatgggttattgttattgtaagcctatttctttctctaaactgtgagcaccgtgagactaaaataggttttttaaaaaaatcttgtcttttatgtttcacctaccacagacatg

SEQ ID NO: 682778 - DNA, 797 bp, Homo sapiens
taatccattctactctccaactccagccttccttgttggacctcttgttctcgggcacctgaaagtaacaactaccactgttttcccctgctccccactgtgcctcagcacactccactgcctcattcttcctatccaataaattacgtattcttcaagacagaacacaatacctgcttctctatcagatcattttttcctcctcatggctaaactaatcaacatgctctcaactcataagcagtcaggacagaactcctcttggggatgtcttagcatctccagccagagatttctggctctctctacaaacatgataacagcatggtagacagcgtgtctctcaaatgaatggcacacacccccagtgttagctgagatagttcagggagcataagaacatgccccatcatagctgtgacagtaaattactgaaatatatttatgtgggaacaaatccagcataatagataytaagtaaacaccacactggaggtgcaacacctggcaaaatggtgaagtggtatatgaacaactgatgtttggaaactacagtcaagtggaaaaatcatgggattttgatagaaatctggagttcaatgtaagttctgctataagcttcctgatcccccagaaaggcatctgggccacgtgaagtcagtgtcttttttttaaactggggaaatgggttattgttattgtaagcctatttctttctctaaactgtgagcaccgtgagactaaaataggttttttaaaaaaatcttgtcttttatgtttcacctaccacagacatg

SEQ ID NO: 682779 - DNA, 797 bp, Homo sapiens
taatccattctactctccaactccagccttccttgttggacctcttgttctcgggcacctgaaagtaacaactaccactgttttcccctgctccccactgtgcctcagcacactccactgcctcattcttcctatccaataaattacgtattcttcaagacagaacacaatacctgcttctctatcagatcattttttcctcctcatggctaaactaatcaacatgctctcaactcataagcagtcaggacagaactcctcttggggatgtcttagcatctccagccagagatttctggctctctctacaaacatgataacagcatggtagacagcgtgtctctcaaatgaatggcacacacccccagtgttagctgagatagttcagggagcataagaacatgccccatcatagctgtgacagtaaattactgaaatatatttatgtgggaacaaatccagcataatagatactaagtaaacaccacactggaggtgcaacacctggcaaaatggtgaagtggtatatgaacaactgatgtttggaaactacagtcaagtggaaaaatcatgggattttgatagaaatctggagttcaatgtaagttctgctataagcttcctgatcccccagaaaggcatctgggccacgtgaagtcagtgtcttttttttaaactggggaaatgggttattgttattgtaagcctatttctttctctaaactgtgagcaccgtgagactaaaatasgttttttaaaaaaatcttgtcttttatgtttcacctaccacagacatg

SEQ ID NO: 682780 - DNA, 918 bp, Homo sapiens
cataattaggaaaattccccttctgtctaccccgcaagtcccacttggttcagatgggggcagacagcagagagcacttacttcacggaggaagcagaggctacccgctattccaacaggctttctatttctgatagaaacaaatccaaactgagctaatttgtgtacagctgcaggcaatataaacacggctatttagaattctttatagagtataggcctttgtactctatacttcatggaagttaataagtaggtgtcaaactctgaattaaaattcccagaagaggacacagcacaaaggacaataaaaatgatttttaaataatcatagggataaatagcatccacttctgacaaatgtaagtgctggcataaaatgttattaggctacagagattgtcttttgttcaggaagtatattttattctcctgcctcatcattcatcatcctaatgagccctcaaaatgtaaattaaatagcaaagacggattcatttgaaaagcatcttttcaaaaaaaaaaaaaaagctaggtgttaaaccattttttctacttttattctatatattgtttcattttttcattgaaaaaaagccctcagtacttgaacactttatggggtaagttcatgcaattcatattttcagtaaacagttcattcattctccagtactatgggattggtgatttgaaaagaaaaaaaaaatcgcattttaaaatggtatgccctgtaaatgatgtttgatccggaaaatctgagaaacctgtgcaygcattcacttttttgttttattcagaagtgatttggtccagggaaaccctcaatggaaaaggattagtgaaaatttcaaacagctttagtttactgaactgaatgcattaatggctaagcaaacaccagttcaaccattaatg

SEQ ID NO: 682781 - DNA, 616 bp, Homo sapiens
cagtgaggatgaacaaactgtagctacatgcaggatgatggctaaatctaaaattcataacactgcatgatagaagtgagtctcagaagaatgcctaggtatgattagagtcgtatgaagtttagaaacaacaactaccaaaacagagttaatttattaatacatacataggcggttaaaaagaaaaaaaaaactctccagaaaacaaagagaatgattaacacacaattctttttttttttttttttgagacagagtctcgctctgttgcccaggctggagtgcagtggcacaatctcggctcactgcaagctccaggttcatgccattctcctgcctcagcctcccgagtagctaggactacaggcgcccaccaccacgcctrgctaatttttttgtatttttagtagagacggggtttcaccatgttagccaggatggtctcaatctcctgacctcgtgatctgcctgcctcagcctcccaaagtgctgggattacaggcgtgagccactgtgcccagccacaattcttttaccaatagctggtgggaagggtgggaagagatgggagccagtgaaggcactttcgatgatgttccatccctggcctggaagg

SEQ ID NO: 682782 - DNA, 612 bp, Homo sapiens
atctgtatatcctgatattctcaaatctcaatatttacattaaaattataaattcaatcatccatgtgtcaaatggatcttgaaacatatgaatmattgtgacaatattttctatagtgaatgtttttcaatgtgacattgccatttttttccattgagaacaagagtctattttatcctttcctaaaataatgtgacatttgcattcctcccattaagaagtggtgtctacttattcttctccttaaaactgggttgctcctatgacttactttgcctgatggattgttagggaagtgatgtcgtgcctattctgagtctatacttcataagagcttaacacttctgtttttaacattttgtgactctgagacaaaaggctataaaaatcttaggatagtaggccacatgtaatgagatgtcaagacatcccaattataccaggtatcccagttgagtctatagacatatgagggaggtcatcttaaatcatctggcactagataatctgccatctgactgtatgcatgagaatgaggccaggcaactctagaagaaccactcagtcaacatgtgaaaccttgagaaataataagtgattgttgcattaaa

SEQ ID NO: 682783 - DNA, 612 bp, Homo sapiens
atctgtatatcctgatattctcaaatctcaatatttacattaaaattataaattcaatcatccatgtgtcaaatggatcttgaaacatatgaataattgtgacaatattttctatagtgaatgtttttcaatgtgacattgccatttttttccattgagaacaagagtctattttatcctttcctaaaataatgtgacatttgcattcctcccattaagaagtggtgtctacttattcttctccttaaaactgggttgctcctatgacttactttgcctgatggattgttagggaagtgatgtcgtgcctattctgagtctatacttcataagagcttaacacttctgtwtttaacattttgtgactctgagacaaaaggctataaaaatcttaggatagtaggccacatgtaatgagatgtcaagacatcccaattataccaggtatcccagttgagtctatagacatatgagggaggtcatcttaaatcatctggcactagataatctgccatctgactgtatgcatgagaatgaggccaggcaactctagaagaaccactcagtcaacatgtgaaaccttgagaaataataagtgattgttgcattaaa

SEQ ID NO: 682784 - DNA, 612 bp, Homo sapiens
atctgtatatcctgatattctcaaatctcaatatttacattaaaattataaattcaatcatccatgtgtcaaatggatcttgaaacatatgaataattgtgacaatattttctatagtgaatgtttttcaatgtgacattgccatttttttccattgagaacaagagtctattttatcctttcctaaaataatgtgacatttgcattcctcccattaagaagtggtgtctacttattcttctccttaaaactgggttgctcctatgacttactttgcctgatggattgttagggaagtgatgtcgtgcctattctgagtctatacttcataagagcttaacacttctgtttttaacattttgtgactctgagacaaaaggctataaaaatcttrggatagtaggccacatgtaatgagatgtcaagacatcccaattataccaggtatcccagttgagtctatagacatatgagggaggtcatcttaaatcatctggcactagataatctgccatctgactgtatgcatgagaatgaggccaggcaactctagaagaaccactcagtcaacatgtgaaaccttgagaaataataagtgattgttgcattaaa

SEQ ID NO: 682785 - DNA, 1426 bp, Homo sapiens
ttttaattcttgaaggcagcacataccaaaagaacttttctgtggtgataaaaatgttctataaatctgcattgtctatctaatagccagtatccacatggctattggacatttgaaatgtggctaatgaaactgaggaactgaattttaggggaatgtacctttgcttaatttactatttactatcgattagaggccagattctgcaaaactacatgtttatttgtagaaaattgattagatgaaaaagacttactgttagaaaggcaaatgatttctgtctggtagaaaaaaataaccctacaagttatagtttttttgcactgtaggacgctaaccagtatctaacatagctattttatacctgctggctccatcctgctggttctatcattttaaattatataatccttgatacatattcaatttatatttatggagaatcatagtttttaccttttttgaaaactatttaaaccccacctagtgctggagcaaagataaataagtttccttagctcttcctttgaaggcaaatttttttttttttttttttatacacagagtcttgctctgtcaccaggctggagtgcagtggtgcgatctcagctcaccgcaaactccatctcctgggttcaaatgattccactgcctcagcctcccaagtagctgggattccaggcatgtgccaccaggcctggctaattttttgtattttagtagtgacgaggtttcaccatgttggccaagatggttttgatctcctggcttcatgatctgcccgccgcagcctcccaaactgctgggattactggcatgagcccctgtgcccatctggcaaattgattttctcctagctcacattttcaggaagtgcagagattctaaacatcctaactcaatgccctccctttattttttcaaacagctttattaagatataattgatacacagatagtgacacatatttaatgtgtacaatttgatgagtttggacatatgtaaacactgtgataccattaccacaatcaaggtagtagacatatacagcacttcccaaggttccttgtgtccctaatttttctttttttgtggtaagatcattgaacrtaagatctacccttttaacaattttaaagtacacaatattgttaaccataggcactacgttgtacagcagagttctacaatgtattcatctagcataattgaaactacccattgaacaactgtccatttctcccatccccagctcctggcaaccactgtcaaatactctacttttatgagtttgactatttatattactattacacctcacataagctgaatcatgcagtattgtctttctgtgatcaacttacttcacttagcataatgtcctacagtttgtcacaaatggcagaatttccttgtttttttttg

SEQ ID NO: 682786 - DNA, 2211 bp, Homo sapiens
cattatcctgtgtgtcagactgggtggacatccccattttaccatgtagaaatgggggccctgaaaatttgagtgacaatcaaggacttgaaatcaaagtctcttgcctccacgtttatagatgtcataattgataacttacatgcccacaaaaaaggtggccctgacaacttttaatctctggcttttggactggatttaatttcttgcatactttctgatactttgatttcaagccaaaaatttctgcacctattaaaaatccttcatttaaaatgtgctttcttacttctctagagaaaagcagtgaaaaaagtgtatttttgctgtgttcagcaagtctctcaggcacatatttatgaagactacatctgcaaaatggctttgtctttcagcataatgcaaacaattcttagtgttgaagaagagaaagaaagatttcatgcttcttccagatcattctgctaccaaggtcagaatttaaagagaattccatgctctgatcaaccattcagggttcagaagcaaagagcaaaatgggttatgactataaagtcttcatatgagttgccactgtggcagtgtaaacccatgtagactggaggagaaggttgttcttttccccatccattagtatgtctattcttttctttttaggagtctttcttttacttttcctgttacattttccttttgtttcccaacactttctttatgtaggaaaatatgtaatttcatttttatttgtttaccaagcattgattcacctcatctatttaccaaacatttcttagttgcctactctttgttagctattatatcaaatgtcgggtatttaaaatttaatgaggattcagcccctgacttcaaggagctcactttttaaatggcagaaggtcaagtaaaccattaatgatacaggacatggcaatccatgctctgatcctaggagcacagcatattctagaaacccaagtggggctcttagattgaggkgtcagggtaaacttcctgaaggaataattaattcttgagataattgctgcaaggtgagtggtaagcaaaagccaggtcacatagatatttgcgtgccattttagtttgttttaaaactatggcctgggcgggggattttaacagggagagatgtgattagatatatttttgatagataattttggagggaaattaacacttgtaagagataagtgatgacagtggcagcaagaattatgagagaagcagtcagcttcttgggatactaaggacaattcattgccagggtatgttgactgatacagggttgtgagtgaggaggtggagtcatgtgtgatgacccccatgttcctgccttaagctatctgtagacagtagagtttgctgttcactgagaaagaggatacaggaaaagaaatttgtttggggatgaaatgacaagtttatacctggatatgtcatatttgataaccagttagagatgcccaaaggttagttgcattacagatcaagagctttggatcaagaatgattcaatacttattttgggaagtttatcaataagaaaaaaaggaaaggatcccttcaagggacagtctaagtaatgcgaagaagagagcactgagggtagaatttttcgtaaaacatattaaggctgagaagagaaagatggataggaaagggtcattagagaggtaaaaaggtagaattatggtaaagcaggctatagggtagaacagtgttaatggtgcagagaagtcaaaaaaggacaaagttgtccattggattcagcaacaaaagagtcattggtgactttttttcagggcagtttcaacagagtgctttttaggaggccagattgttgtggcccactgagtgaatgggagcaaggaagaggagtcagcaaggatgatgtactaattcccaaagctagattatcagagtaaagggagagaggatggtattctcgggacaatgtagggttaaagaattttcattatttttttcaaaaagagagagacctgagtgcattaaaatgcaaagagctgagtaggacattgactgaaaatgcagatgatatacgagtgagtgatagggcaacctttatggaaagccaaggagctaagattggcagcactggtgagtagaatagccttagagaggtaaagggagaaagggagataagggaaaaggagcagatgcatgtttataatt

SEQ ID NO: 682787 - DNA, 2211 bp, Homo sapiens
cattatcctgtgtgtcagactgggtggacatccccattttaccatgtagaaatgggggccctgaaaatttgagtgacaatcaaggacttgaaatcaaagtctcttgcctccacgtttatagatgtcataattgataacttacatgcccacaaaaaaggtggccctgacaacttttaatctctggcttttggactggatttaatttcttgcatactttctgatactttgatttcaagccaaaaatttctgcacctattaaaaatccttcatttaaaatgtgctttcttacttctctagagaaaagcagtgaaaaaagtgtatttttgctgtgttcagcaagtctctcaggcacatatttatgaagactacatctgcaaaatggctttgtctttcagcataatgcaaacaattcttagtgttgaagaagagaaagaaagatttcatgcttcttccagatcattctgctaccaaggtcagaatttaaagagaattccatgctctgatcaaccattcagggttcagaagcaaagagcaaaatgggttatgactataaagtcttcatatgagttgccactgtggcagtgtaaacccatgtagactggaggagaaggttgttcttttccccatccattagtatgtctattcttttctttttaggagtctttcttttacttttcctgttacattttccttttgtttcccaacactttctttatgtaggaaaatatgtaatttcatttttatttgtttaccaagcattgattcacctcatctatttaccaaacatttcttagttgcctactctttgttagctattatatcaaatgtcgggtatttaaaatttaatgaggattcagcccctgacttcaaggagctcactttttaaatggcagaaggtcaagtaaaccattaatgatacaggacatggcaatccatgctctgatcctaggagcacagcatattctagaaacccaagtggggctcttagattgaggggtcagggtaaacttcctgaaggaataattaattcttgagataattgctgcaaggtgagtggtaagcaaaagccaggtcacatagatatttgcgtgycattttagtttgttttaaaactatggcctgggcgggggattttaacagggagagatgtgattagatatatttttgatagataattttggagggaaattaacacttgtaagagataagtgatgacagtggcagcaagaattatgagagaagcagtcagcttcttgggatactaaggacaattcattgccagggtatgttgactgatacagggttgtgagtgaggaggtggagtcatgtgtgatgacccccatgttcctgccttaagctatctgtagacagtagagtttgctgttcactgagaaagaggatacaggaaaagaaatttgtttggggatgaaatgacaagtttatacctggatatgtcatatttgataaccagttagagatgcccaaaggttagttgcattacagatcaagagctttggatcaagaatgattcaatacttattttgggaagtttatcaataagaaaaaaaggaaaggatcccttcaagggacagtctaagtaatgcgaagaagagagcactgagggtagaatttttcgtaaaacatattaaggctgagaagagaaagatggataggaaagggtcattagagaggtaaaaaggtagaattatggtaaagcaggctatagggtagaacagtgttaatggtgcagagaagtcaaaaaaggacaaagttgtccattggattcagcaacaaaagagtcattggtgactttttttcagggcagtttcaacagagtgctttttaggaggccagattgttgtggcccactgagtgaatgggagcaaggaagaggagtcagcaaggatgatgtactaattcccaaagctagattatcagagtaaagggagagaggatggtattctcgggacaatgtagggttaaagaattttcattatttttttcaaaaagagagagacctgagtgcattaaaatgcaaagagctgagtaggacattgactgaaaatgcagatgatatacgagtgagtgatagggcaacctttatggaaagccaaggagctaagattggcagcactggtgagtagaatagccttagagaggtaaagggagaaagggagataagggaaaaggagcagatgcatgtttataatt

SEQ ID NO: 682788 - DNA, 2211 bp, Homo sapiens
cattatcctgtgtgtcagactgggtggacatccccattttaccatgtagaaatgggggccctgaaaatttgagtgacaatcaaggacttgaaatcaaagtctcttgcctccacgtttatagatgtcataattgataacttacatgcccacaaaaaaggtggccctgacaacttttaatctctggcttttggactggatttaatttcttgcatactttctgatactttgatttcaagccaaaaatttctgcacctattaaaaatccttcatttaaaatgtgctttcttacttctctagagaaaagcagtgaaaaaagtgtatttttgctgtgttcagcaagtctctcaggcacatatttatgaagactacatctgcaaaatggctttgtctttcagcataatgcaaacaattcttagtgttgaagaagagaaagaaagatttcatgcttcttccagatcattctgctaccaaggtcagaatttaaagagaattccatgctctgatcaaccattcagggttcagaagcaaagagcaaaatgggttatgactataaagtcttcatatgagttgccactgtggcagtgtaaacccatgtagactggaggagaaggttgttcttttccccatccattagtatgtctattcttttctttttaggagtctttcttttacttttcctgttacattttccttttgtttcccaacactttctttatgtaggaaaatatgtaatttcatttttatttgtttaccaagcattgattcacctcatctatttaccaaacatttcttagttgcctactctttgttagctattatatcaaatgtcgggtatttaaaatttaatgaggattcagcccctgacttcaaggagctcactttttaaatggcagaaggtcaagtaaaccattaatgatacaggacatggcaatccatgctctgatcctaggagcacagcatattctagaaacccaagtggggctcttagattgaggggtcagggtaaacttcctgaaggaataattaattcttgagataattgctgcaaggtgagtggtaagcaaaagccaggtcacatagatatttgcgtgccattttagtttgttttaaaactatggcctgggsgggggattttaacagggagagatgtgattagatatatttttgatagataattttggagggaaattaacacttgtaagagataagtgatgacagtggcagcaagaattatgagagaagcagtcagcttcttgggatactaaggacaattcattgccagggtatgttgactgatacagggttgtgagtgaggaggtggagtcatgtgtgatgacccccatgttcctgccttaagctatctgtagacagtagagtttgctgttcactgagaaagaggatacaggaaaagaaatttgtttggggatgaaatgacaagtttatacctggatatgtcatatttgataaccagttagagatgcccaaaggttagttgcattacagatcaagagctttggatcaagaatgattcaatacttattttgggaagtttatcaataagaaaaaaaggaaaggatcccttcaagggacagtctaagtaatgcgaagaagagagcactgagggtagaatttttcgtaaaacatattaaggctgagaagagaaagatggataggaaagggtcattagagaggtaaaaaggtagaattatggtaaagcaggctatagggtagaacagtgttaatggtgcagagaagtcaaaaaaggacaaagttgtccattggattcagcaacaaaagagtcattggtgactttttttcagggcagtttcaacagagtgctttttaggaggccagattgttgtggcccactgagtgaatgggagcaaggaagaggagtcagcaaggatgatgtactaattcccaaagctagattatcagagtaaagggagagaggatggtattctcgggacaatgtagggttaaagaattttcattatttttttcaaaaagagagagacctgagtgcattaaaatgcaaagagctgagtaggacattgactgaaaatgcagatgatatacgagtgagtgatagggcaacctttatggaaagccaaggagctaagattggcagcactggtgagtagaatagccttagagaggtaaagggagaaagggagataagggaaaaggagcagatgcatgtttataatt

SEQ ID NO: 682789 - DNA, 2516 bp, Homo sapiens
aagtagaaaaatcatgaccctgtgtgctgccccaaagttatgagaaagtaagggacaaagagcaaagtgtatcctaagggtgactgaagaaagcagtgtttaagtacagacagggtttaacatagaggaagtgtttcatgagtgaggcaaggaggggtgcatatttggagagagggtgtttgtttataaggaaacaaagcataacagcttgggagggacatcggatgggaggaagaatggaaaaagcagccagagtgtatagatagacttgagttcagcaaaggctgtgagttcagggtaggggtgtggaaaggatgacagataatcttgagattatctgatttcattttccttctatggtgccctcactagtcagaatgagaatttgagcatgtttgggatgaaacagtctggaagaactgagtccagaagggtgttactgtcataagtgaaagcacaaggaatctcaagacactgggaaaagattcaattgcagacaataagagaaagccgcatcaaacctgaagtcattatatctcaagagcatagggacaagcagatggawttggaaggaaggcagtggtaatgggtactgctctaggcactctttaacttttgaactctgcattctgagctgggcattatggttacaactggcggttaaaaaacctatttttgttcttgttttcttcctactcctcatctgatttaccccaaagaaacaatagttgactcttcacccatcctaaaatgttgcaataatctgatagttctttctctagactaagttacttgagtctttccaaacatggtcttatatattcccgtagggtcttaaagcaatcactcaacttattatctataagagaggcaaaaactatttatctcatattatgacaaatctacaatatctgaagatacttagaacttagctgtcatgtggtatcacagcattacataaaatagaaaataggacataggcattaaattgaatttaagaatagtgcacaccgtgcaaagtgaaagacaatacaatggtgagtagttctttttatattcaaagacaaaatgtataggtatggattaaacaccaggaagctggcagtgttagtcaattaaaggtaagttggatatttacagttctaactttgctggttacaaacagtctgttaggaacataacagaccttttaatttacccaactcttgtcttctctgtgtgttttaagcttaatagttgcataaaatgattggggccctgaactgattgtgaatttgtggggaagggaaacaaggtagcaggggatccataagggtgtgggatggggtatgagatcaagtgtagggaatgtgtgcaagcatgtgcattcattaattcatacgacaaataggtattgaggacttaatatttgcaaacaaatgtcatctctaaagacagccatagctgagtatgagatatatcccatgttcataagtaactggaatgccagatagaccaagaaggggccataggaaaggttcaggtggttatggtagtttggagaaaagaacattacctcaagcaaaagtacacagagaaacttaaagaagaggtaaagtttgagctgtacagggagtgagatttaggaatggtggttctcaatcttgattaattacagaatcacctggagagttttcaaagactatgattagggttctcactagactaactaaagcataaccttggaaggtggctccaggctttttatttcaataggtttttggggaacaggtggtgtttggttagatgaataagttatttagtggtgatttctgagacttttggtgcacccatcacccaagcagtgtacactgtacctaatgtgtagtcttttttttttttttttttgacatggagtctcgctctgtcacccaggctggagtgcagtggtgtgatctcggctcactgcaagctctgcctcccaggttcatgccattctcctgcctcagcctcctgagtagctgggactaccggcacccgccaccacacccggctaattttttgtatttttagtagagacggggtttcaccatgttagccaggatggtctcaatctcctgacctcgtgatccgccctcctcggcctcccaaagtgctgggattacaggcgtgagccaccacgcccagcctggattaattcttgagccatctgtaccaaccaagcctgtgaaagttctacttaattttattaacaaaccttttcatttaaaatattaataaatgtttaacaagatcaatttacaggggaccgtgtggatcctgttaaataatagatttgtgtttactgcattataaatcactaggtaaaatcataagcctttataactgcttgctaacttagaaaatagtaccttcagcctaattaaatgtctggaaatagaagcaaaattgaattctccttatgtcaagtaaatacagagaaggcccaaattactgtggtatttgtgtagcaagagggtagcacactggatatttca

SEQ ID NO: 682790 - DNA, 606 bp, Homo sapiens
tacccaaaagcagtagctctcaaatactggttcttagacttgatgacccataaaaatatttttaaaaatttatatgataatgattgttgttttattttgtttaataattcagtttcataaaagcttaatggatctccttcagagataattgtcatccaacatccccgaaaaagtaaacaacaaaaaatttttgtmcaacacatcactttagaagatgaagtttctgacaataggaaccaacaattagtatgcatgtctctgataattatctcttatggcccaaataagctattgactcagttggttagtgcaatggtggttaaatctggctgttggttattgcaatggtggttaaatctggctgactttcactagccataatgctagcactgctctgagaagctcttaaagtatgtaaagcaatttgttcttctatgaaatgctctcctcatggagtctttgttctcatatttttagttttttgttatctccttcacttttacatcaataataagatgaattcactcttcagaagtacccactcatgtctaatttgcaacattggatgtctattggaattacaaaatgactgtcgagaactatcct

SEQ ID NO: 682791 - DNA, 606 bp, Homo sapiens
tacccaaaagcagtagctctcaaatactggttcttagacttgatgacccataaaaatatttttaaaaatttatatgataatgattgttgttttattttgtttaataattcagtttcataaaagcttaatggatctccttcagagataattgtcatccaacatccccgaaaaagtaaacaacaaaaaatttttgtacaacacatcactttagaagatgaagtttctgacaataggaaccaacaattagtatgcatgtctctgataattatctcttrtggcccaaataagctattgactcagttggttagtgcaatggtggttaaatctggctgttggttattgcaatggtggttaaatctggctgactttcactagccataatgctagcactgctctgagaagctcttaaagtatgtaaagcaatttgttcttctatgaaatgctctcctcatggagtctttgttctcatatttttagttttttgttatctccttcacttttacatcaataataagatgaattcactcttcagaagtacccactcatgtctaatttgcaacattggatgtctattggaattacaaaatgactgtcgagaactatcct

SEQ ID NO: 682792 - DNA, 1612 bp, Homo sapiens
ttgagcccaggaggtcaaggctgcagtaagccatgatcatgcccctgcccaccagcctgggtgacagagctagaccatctcaaaagaaaaaacaattggggtgatgggtacactagttcaatctccaccattgtcaatatatacccatgtaacagacgtgcacatatacccccggatctaaaattaaaaaaaaaaattaaaaacaaatacattgttttcttgattctagaattctccttccctggtggaaagactgagggatatgtcatgattttcagagaagtacaaggtaatggcaaaatgcacgagttacttttactctcagatagatccaagaaaaggggagcaatcagaagtaagcatgaaccagagaattaagggaggtcctcagagaagagtgtgattaggtcagcataaaccaggatgaggtccagaaggtattgaatatcagagataaattcagtgcctatagagacaagagtatagggtgttaataacagtagttcaaagaggcaagaaatctgtcctaggaaaaacaccgcctaagatggagctgccaatggttagggatgtgttgctgaggaaacctggactcttttcttctgggaagcccaggctgagagatttctaacctgaactactttgaccacttgtttacatgaatgactcaaaaaatggctacttaactatatatgtatatgtagttttatgtaactatatgtgtatagacatacatatacgttcatacatatacatatacacagagtagatagatagatatcactttggtcacccatgtcacataaaactattatgtgaacccctaatcagtcactactctgtaaaaatyggctttctttaaagattctctatgtgagtacatttcctaagtcctattgaaagaattactatgtgggaatgggcgtgaccattatgccttttctacaggacattaatgtcatgattacaaagagtgaaaacaaaataacacaataactacaacaatgaaaacagcacggctttatctgattgtattaccctaaggctggcataacaacatactggacgccaggttacttaaaacaacagaaaattattgccttacatttctgaagatagaagtcccaaattaagtatcaacagggtcatgctctctctgaaaccagtcaggaagaatccttccttgcctcctgttagcttttgtagggtttttgtttcttttttagccatccttggtgttttttggcttgcatttgcaacagttcaacatacctgtcatcacatggcattctccttgtgtgtctgtctccaaattttccttttcttataagaacaccaattgtaaggtgttagggaaccattctactccaatgtgacttcatcttcttgaattatgactgattaaacttcggtaaccctacttccaaataaggtcacattctgagggacaaggggcaaaatttcaacatatttgtgggagggtctcatatcaatcaagtcaaggtagattatactgcagtaacaaagtccaaaatatatgtggcttgcagtaacaaagacttacattcaattcatgctagatgatattgttctgcttatcagagtcactcaa

SEQ ID NO: 682793 - DNA, 1612 bp, Homo sapiens
ttgagcccaggaggtcaaggctgcagtaagccatgatcatgcccctgcccaccagcctgggtgacagagctagaccatctcaaaagaaaaaacaattggggtgatgggtacactagttcaatctccaccattgtcaatatatacccatgtaacagacgtgcacatatacccccggatctaaaattaaaaaaaaaaattaaaaacaaatacattgttttcttgattctagaattctccttccctggtggaaagactgagggatatgtcatgattttcagagaagtacaaggtaatggcaaaatgcacgagttacttttactctcagatagatccaagaaaaggggagcaatcagaagtaagcatgaaccagagaattaagggaggtcctcagagaagagtgtgattaggtcagcataaaccaggatgaggtccagaaggtattgaatatcagagataaattcagtgcctatagagacaagagtatagggtgttaataacagtagttcaaagaggcaagaaatctgtcctaggaaaaacaccgcctaagatggagctgccaatggttagggatgtgttgctgaggaaacctggactcttttcttctgggaagcccaggctgagagatttctaacctgaactactttgaccacttgtttacatgaatgactcaaaaaatggctacttaactatatatgtatatgtagttttatgtaactatatgtgtatagacatacatatacgttcatacatatacatatacacagagtagatagatagatatcactttggtcacccatgtcacataaaactattatgtgaacccctaatcagtcactactctgtaaaaatcggctttctttaaagattctctatgtgagtacatttcctaagtcctattgaaagaattactatgtgggaatgggcgtgaccattatgccttttctacaggacattaatgtcatgattacaaagagtgaaaacaaaataacacaataactacaacaatgaaaayagcacggctttatctgattgtattaccctaaggctggcataacaacatactggacgccaggttacttaaaacaacagaaaattattgccttacatttctgaagatagaagtcccaaattaagtatcaacagggtcatgctctctctgaaaccagtcaggaagaatccttccttgcctcctgttagcttttgtagggtttttgtttcttttttagccatccttggtgttttttggcttgcatttgcaacagttcaacatacctgtcatcacatggcattctccttgtgtgtctgtctccaaattttccttttcttataagaacaccaattgtaaggtgttagggaaccattctactccaatgtgacttcatcttcttgaattatgactgattaaacttcggtaaccctacttccaaataaggtcacattctgagggacaaggggcaaaatttcaacatatttgtgggagggtctcatatcaatcaagtcaaggtagattatactgcagtaacaaagtccaaaatatatgtggcttgcagtaacaaagacttacattcaattcatgctagatgatattgttctgcttatcagagtcactcaa

SEQ ID NO: 682794 - DNA, 621 bp, Homo sapiens
tttatatttctgcagtgttcagcccctattttttcttcattttattccattgttttcttaaaattccaacttttattttagataaagagggtacatgttcagattggttacatggaaatgttgcatgattctgaggtttggggttacagatcccattgcccaggtagtgagcatagtactcaataggtactttttcagcccttcccacaccctccttccctcttagtagtccacagtatctattgttcccatctttatgtacatgtgtgctcaatgttttgcyccacttatgtgtgagaatatgcactattcaattttctgttcctgcattagctccatctatgttgctgcaaatggcatgatgttatcctttttttgtatggttacccagtattccatagtgtatatgtaccacattttcttcatataatctataattgatgggaagctagttgattccatgtctttgctcttgtggatagtgctgtgatgaacagatgagtacatgtgtcttctttatagaagaattcgttttcctttggatatataccagcaatgggattgctgggtcgaatggtagccctgttttaagttttatgagaaatctccagactgcttccc

SEQ ID NO: 682795 - DNA, 633 bp, Homo sapiens
ctactaaatattttgatgaaaacatatcttaatgtaggacacactacactgcctttgctaaagtataatttttgaaaaattaaaaattggccctcatacaaatataaaataaatatatgttaaatattttattatacttattatttgaagggatgaataaaatggaaagactcctccatagggcatttgaggtattgaaaagtgtataaataatgtaggaaaaattgctgagttatatataaaatttgctagtaacctacagggaacaaaaccgtaatatttagggttatcatattttactatacatagataatttgcatctgtaacatgaaaaatctgttagttaacatgtaatattaattctggaatattcattagataggtaaaatatcctttgaaagaactagttagcaatgctccttatgacattaaaaggacactgctttttctttttgatttcttgcaaatttttccttaaacagatattactataagcagattaatcacatgctgttatgtcatatgtggaagaatgaaactggactcctacctttcwccgtatacaaaaattaactcaacataaatcaaagattgaaatgtaagacctcaaactataaaagtcctagaagaaaa

SEQ ID NO: 682796 - DNA, 1308 bp, Homo sapiens
gaccatataggaaaacagaactctgacctactactcctgcaagaagcagtccaggaaaccacactacagctgctgcagcaatagacccagaatggtcaggacttttgtatttttttcttttttctattttctcttaagatcaactgtacaacactgtcatataaaagtccctcttctagttagcccaccttccatgccaaaaacctctaatyggagtatcactgaagcctttatttcttttcattataaagctttcccatttatctgtctgtctctgagattttgtcaaatgcaaaaaaaaggatgccttgactgtcttgttatagcaaagtctgaatcattgctgattcgttctcatttgtgtggtcttggtttatttccacaacttttgtactcatttgctgtgtagtcatgcagttacacctggcatttctttctctaagattgtcttataatagagaaatagaaaatccttcttgaaggtttaaatgttaaatgggcacttttttcatcctaagagaaggttcattgttcttattcttatttttttctttttattttattagctatttcaggacaatcatgttttgtttctaagttccttctgcttagaatatatgtgggatcttaagaggcttatttcctggtgttttaatgaattgggtagaagaatataattgttttatatcactgtaaactcattactttggaagatctatgtctgatctgttctacatctcatttaaaatgctccatgagtagttaaatgtccatcgtagtatgttgaattgtgctccaattcattatcccaaaagatatgcttaatttctaacccccagtatctgtgaacaggaacatatatatgaataaggtatttgcagatatagtcaaattaaaatgttatatttgattaggatgggctcaatgaaaagtagttggcactcagatgcaatgtaagttgactacactgtggtcagacagactcaccaacagggagctcagaggtgctcacagaagcatactgttgaagtttgggaatctcaagctacggcagaaaaagaattttgacagattcttgagaatattgtcatcaatccgttctcaaaaagacaaccagataagctgttaatgaagttaaatatggctactagttttatagcaatacaacagaataccacttttacagagtattaatagtatgttgaaaacggaaaatcagtagagaatatgtataggattttagaactttttctgggtgattttaagacattctcatttaggcagagaagtgaccaagaatgggcataa

SEQ ID NO: 682797 - DNA, 526 bp, Homo sapiens
ttttagggtaatatatagatttttaattccaaggaaaaaatttgcctgtattcctttaatagaggaaatgcagtaaacgtcaccttattacattatctgccaaaatacagttrgcaagttagcaacatcatttcctcattttccaaacacatctgctgatagattcatcaaaagaggtactttactccctgttgctgattttgtaaattaccaggcccaaaaaggagatatgatgtaaattactcagggacttatgccttatacaaggactgacgatgttttttcagtttaagctaagttactcccattttgccaagaagaaaatggacagagagttggacaactacctaccaaaaaggtctgggatgttgtttctttgccagattgagaggttagggaaactaaagcttgttggtgatggggggtgggggatggaggatcaggaggtggggagcaggatgccttaatggaatttacaatattgaaatatctattttttctagagaaaataaagcatcaggcctcc

SEQ ID NO: 682798 - DNA, 1436 bp, Homo sapiens
cctgtaatcccagcactttgggaggccaaggcgggtggatcacttgaggtcaggagttcgagaccagcccgaccaacatggtgaaaccccatctctaataaaaatacaaaattggccaggcatggtagcccgtgcctgtaatctcagttaatcaggaggctgaggtaggagaattgcttcaacctgggaggcagaggttgcagtgagccaagatgatgccattgcactctagcctgggtggcagagtgagactctgtctcaaaaaaaaaaaaaaaaaaaaatactgaagcagagcagagaagtactattatttgtcctgtgaaactctaaacagattaaaaatatggatctgaattaaaggggcagcttctcaaacatttaccttaactgagaatcttcaccccaaatgactaagattagcaataaactctcataaaaccaaattaatgagatgatctctggttattgagaaaagtagaataaagagggaaagtggccgggcgcagagacccccgtcgctacaaaaaaaatacaaaactgagccaggtgcagtggtgtgcacctgtagtctcagctactctggagggtgaggcgggaggcttgcctgaacctggctcgcagttatgagctatgatggtgccacaacactctagcctgggtgacaatgcaagaccctgtctctcaaaaaaaaaaaaaaaaaaaattgggaaagtaacttttttctaaaagtggccagtggttttacattcaattttttgaggcaacttattgactcaggaactagaaaaacttccaagattctttaatccaacccccctcggatgagtaaactgtgacccagagtgattcaaaatcttgcccaagtcccacggtggggaagtggtggagggagaggcagcacccagcttcagagccctccctccacaccctggatgaaaagatccctgaggtttcctcctgagggctggggcttcaaatgcggggggcagtggctctgggataaaaagatgctgcttttaatatgctctcattaaaaaagtttgaatttaacatctgctacacagggaggaaaataaattccaatggcctccttttttatctcatttagagttggggtagaaagaggggctggaagttataagacagtatcatgagccatgagaatactttgtgacccgcaattagaaagtgaatggttcacagatgccatyaaaaggaaagaaaagaaatggggaaaaagtcttgaatcaagagtgtagctcctggccgggtgcagtgtttcacatctgtaatcccagcactttgggaggctgaggcaggtggatcactagaggtcaggagtttgataccagcctgaccaacatggtgaaacccagtctttactaaaaatacaaaactagccgggcttggtggcacatgcctgtaatcccagctac

SEQ ID NO: 682799 - DNA, 1436 bp, Homo sapiens
cctgtaatcccagcactttgggaggccaaggcgggtggatcacttgaggtcaggagttcgagaccagcccgaccaacatggtgaaaccccatctctaataaaaatacaaaattggccaggcatggtagcccgtgcctgtaatctcagttaatcaggaggctgaggtaggagaattgcttcaacctgggaggcagaggttgcagtgagccaagatgatgccattgcactctagcctgggtggcagagtgagactctgtctcaaaaaaaaaaaaaaaaaaaaatactgaagcagagcagagaagtactattatttgtcctgtgaaactctaaacagattaaaaatatggatctgaattaaaggggcagcttctcaaacatttaccttaactgagaatcttcaccccaaatgactaagattagcaataaactctcataaaaccaaattaatgagatgatctctggttattgagaaaagtagaataaagagggaaagtggccgggcgcagagacccccgtcgctacaaaaaaaatacaaaactgagccaggtgcagtggtgtgcacctgtagtctcagctactctggagggtgaggcgggaggcttgcctgaacctggctcgcagttatgagctatgatggtgccacaacactctagcctgggtgacaatgcaagaccctgtctctcaaaaaaaaaaaaaaaaaaaattgggaaagtaacttttttctaaaagtggccagtggttttacattcaattttttgaggcaacttattgactcaggaactagaaaaacttccaagattctttaatccaacccccctcggatgagtaaactgtgacccagagtgattcaaaatcttgcccaagtcccacggtggggaagtggtggagggagaggcagcacccagcttcagagccctccctccacaccctggatgaaaagatccctgaggtttcctcctgagggctggggcttcaaatgcggggggcagtggctctgggataaaaagatgctgcttttaatatgctctcattaaaaaagtttgaatttaacatctgctacacagggaggaaaataaattccaatggcctccttttttatctcatttagagttggggtagaaagaggggctggaagttataagacagtatcatgagccatgagaatactttgtgacccgcaattagaaagtgaatggttcacagatgccattaaaaggaaagaaaagaaatggggaaaaagtcttgaatcaagagtgtagctcctggccgggtgcagtgtttcacatctgtaatcccagcactttgggaggctgaggcaggtggatcactagaggtcaggagtttgataccagcctgaccaacatggtgaaacccagtctttactaaaaatacaaaaytagccgggcttggtggcacatgcctgtaatcccagctac

SEQ ID NO: 682800 - DNA, 1436 bp, Homo sapiens
cctgtaatcccagcactttgggaggccaaggcgggtggatcacttgaggtcaggagttcgagaccagcccgaccaacatggtgaaaccccatctctaataaaaatacaaaattggccaggcatggtagcccgtgcctgtaatctcagttaatcaggaggctgaggtaggagaattgcttcaacctgggaggcagaggttgcagtgagccaagatgatgccattgcactctagcctgggtggcagagtgagactctgtctcaaaaaaaaaaaaaaaaaaaaatactgaagcagagcagagaagtactattatttgtcctgtgaaactctaaacagattaaaaatatggatctgaattaaaggggcagcttctcaaacatttaccttaactgagaatcttcaccccaaatgactaagattagcaataaactctcataaaaccaaattaatgagatgatctctggttattgagaaaagtagaataaagagggaaagtggccgggcgcagagacccccgtcgctacaaaaaaaatacaaaactgagccaggtgcagtggtgtgcacctgtagtctcagctactctggagggtgaggcgggaggcttgcctgaacctggctcgcagttatgagctatgatggtgccacaacactctagcctgggtgacaatgcaagaccctgtctctcaaaaaaaaaaaaaaaaaaaattgggaaagtaacttttttctaaaagtggccagtggttttacattcaattttttgaggcaacttattgactcaggaactagaaaaacttccaagattctttaatccaacccccctcggatgagtaaactgtgacccagagtgattcaaaatcttgcccaagtcccacggtggggaagtggtggagggagaggcagcacccagcttcagagccctccctccacaccctggatgaaaagatccctgaggtttcctcctgagggctggggcttcaaatgcggggggcagtggctctgggataaaaagatgctgcttttaatatgctctcattaaaaaagtttgaatttaacatctgctacacagggaggaaaataaattccaatggcctccttttttatctcatttagagttggggtagaaagaggggctggaagttataagacagtatcatgagccatgagaatactttgtgacccgcaattagaaagtgaatggttcacagatgccattaaaaggaaagaaaagaaatggggaaaaagtcttgaatcaagagtgtagctcctggccgggtgcagtgtttcacatctgtaatcccagcactttgggaggctgaggcaggtggatcactagaggtcaggagtttgataccagcctgaccaacatggtgaaacccagtctttactaaaaatacaaaactagccgggcttggtggyacatgcctgtaatcccagctac

SEQ ID NO: 682801 - DNA, 635 bp, Homo sapiens
taaaactactaaagccaagatttgatgcctgcaaatagtcacacatatacatcttatatttaaatacatataaaataggcttttgagaagttagaacttctagtagactaattagaatagaaaacagaagcccatgtaagatgattaatacgaaccatgtatcttatattaagtcaaatccttgaacatggtgattgtcattatataaaaaattcaataatcttaccaccactgaataagtattttaatgaatataaaatcaaacacatatttagtacaaaaatatgtttaaccacacttacaaacacaaggcttattaattacattataatgaccactaattgtaaatattatcataaaatagttacacaattacaacttttaccatttcatgtgcatgtaaaaaatttatgttgtaaacaatcaacatttttcacacttttaaaactagaaatgactaaacatggaagtacttttcatagatatttcttctttggaagaaataagaagagttagatgatgagaaaacaatacaattaatatattatcctgtccttaagaagattgtgtcctgtataaaagtaaattattaattattttcaagttctatctttataagccacttataktcaatc

SEQ ID NO: 682802 - DNA, 422 bp, Homo sapiens
ttttttttttttgagatggagtctcgctctgtcgcccaggccggactgcggactgcagtggcgcaatctcggctcactgcaagctccgcttcccgggttcacgccattctcctgcctcagcctcccgwgtagctgggactacaggcgcccgccactgcgcccggctaattttttgtatttttagtagagacggggtttcaccttgttagccaggatggtctcgatctcctgacctcaggtgatctgcctaccttggcttcccagagtggtgggattacaggtgtgagccctcacacccagcctcctactcacttttaaaatatgttctataattcttaatgttgtcccatgtggaaagaaattgctgttgtactaagattataaccatcactttacagttattttatatgtacaaatttatt

SEQ ID NO: 682803 - DNA, 1438 bp, Homo sapiens
tataatctatttggaatacatttttttctacaggatgtgaagtagaaaagtgttttccttacttttaatatagatgtctttcctacaaccatacaggatcaatcctagtttatgaggaccctaggcaaatagagtttgcaggagtcctatctatataaacaattattttccaactggagtataaaatgcatgcattcatgtgatgtagagtagtttaatgatatagatttggatagatagaatagaggtatttaagaatttgtttattgtccaattaatgcatgtgaagattatctgtaaagtacaggaattattgtttaccatccaaatataagaaccatgtattcatgttctttctcactaaatgtgtgtatctcccaccatgaccaaagaatatcaatgcagttattactcattaattcatgccatggctcttgtgaacctgtttgtattaaaactataatacagatattcttgccttttcagttccttccaggactcacttactgccaatgctgattacatcaatactcatggcgcttcatcatcccccataaacgctggtttccaatgactctctcaaaagttgttactgcataatcttagtaatagtcacagatggatgtcttaccaagaatattaaagaacatgtgactgagaattcctattcttgctgtgttaaatttaccattgagatttcataatgatgtagaacaaaacatcttccaaccatgttatctcttaaattctttaggacaaaatcacttcatttttagaatgcaatctttttcagtggaccacaccctagtcttccacatatcatcagggagggcaggtgggtagctgtgggcacgcaaaaagagtgatctcattcaggaagtaatatttatcccttctctgccatggcttaagactgactagggaggccggaatatcccccatacatatcaaagtcaagaaaggatatcacagtaaaggctctgttggctttgtggaacaagagtgttgaaagctcacagaataaatgacaccatgcttgaaaactacctgacacatggygtgaagcctgctcaatgtacgggttgtggatatcactggttaaactgtacaaagagggttaaggaccccttaaccctcagatattttaaaccagaggtgacgctgcagtggacacatgtgtgagtagaggccaaccaaacccctcatactcatagctctaacccaagataaaattgtaggcaaatagtagcccagagtcctgaatgaatcttgtgtataacattgagagtaatgcaaaaccagtgtgtcagctccttcctggttactcaatagcacacgattccacaaaagaaatactgtcagtggaagcatcccactcaccaggctaccctattggatctgacacatatctgcggagcaccagaataactcttaggtc

SEQ ID NO: 682804 - DNA, 615 bp, Homo sapiens
aataataaaattggcttttacattttgattatatatctggcatatcgactaaactttcttataaataaaatacttcatatttctccacatcctctccagcacctgttgtttcctgactttttaatgatcgccattctaacaggtgtgagatggtatctcattgtggttttgatttgcatttctctgatggccagtgatgrtgagcactttttcatgtgtcttttggctgcataaatgtcttcttttgagaagtgtctgttcatatcctttgcccacttgttgatggggttgtttgtttttttcttgtaaatttgtttgaattcattgtagattctggatattagccctttgtcagatgagtagattgcagaaattttctcccattctgtaggttgcctgttcactctgatggtagtttcttttgctgtgcagaagctccttagtttaattagatcccatttgtcaattttggcttttgttgccattgcttttggtgttttagacatgaagtccttgcccatgcctctgtcctgaatggtattgcctaggttttcttctagggtttttatggttttaagtctaagatttaagtctttaatccatcttgaattcatt

SEQ ID NO: 682805 - DNA, 615 bp, Homo sapiens
aataataaaattggcttttacattttgattatatatctggcatatcgactaaactttcttataaataaaatacttcatatttctccacatcctctccagcacctgttgtttcctgactttttaatgatcgccattctaacaggtgtgagatggtatctcattgtggttttgatttgcatttctctgatggccagtgatgatgagcamtttttcatgtgtcttttggctgcataaatgtcttcttttgagaagtgtctgttcatatcctttgcccacttgttgatggggttgtttgtttttttcttgtaaatttgtttgaattcattgtagattctggatattagccctttgtcagatgagtagattgcagaaattttctcccattctgtaggttgcctgttcactctgatggtagtttcttttgctgtgcagaagctccttagtttaattagatcccatttgtcaattttggcttttgttgccattgcttttggtgttttagacatgaagtccttgcccatgcctctgtcctgaatggtattgcctaggttttcttctagggtttttatggttttaagtctaagatttaagtctttaatccatcttgaattcatt

SEQ ID NO: 682806 - DNA, 645 bp, Homo sapiens
ataaaaatttaaaaataaccaccacctaagagtctaacaggagactctcctcccaggaagctgagacatcaaagagttatcccctcaacgtaaaggtgatgagaagtctggacctaggggactaaaagaaaagttgctttgatgataagcaaagcaggggaaaacaaaaaaccacaagaactcgtaaccgcaaatgggctctcagagatacaatctaaattcacatcacaaaaataagtaccgccccccaaataaataaacayagagtggtgcccaagtggtagtgttcctgggtgccagactgtagcagacatgaatgtcatctggtagaacaaactattaaatacagtaaacaagaaaacatggcaccatgaaaaagaaccagccaaaataaacctgcaaggatttcatttattaggattatcaaatgtagattataaaataaccatgctaatacatttaaaattattttttacactgggaaaatacctccacagaaagaaaattaaaaataaatgatctagaaggttggaaagacatttgaacaaattaaatatacactaattgaaaataaaaactcactggagaggttatggaagattagtttacaacagactgacccttccaataagaataactagaaaa

SEQ ID NO: 682807 - DNA, 2398 bp, Homo sapiens
ttagaaggaaaaaatggtccttcaccacagagagctcaagaagcgctattttagagagccttgatgtactcacttatttttcaggactgaacacctataataaataaaactgtaacatgtaatatatccaacagaagcagttcctttaaaagtgcatttaaaatattttaatatataartataaatttaatatatgcatatatatttaattatatattataatcatatattttatgcatatatagtgttatataattatatctgcttttatatattaaataaaattatatattacatacaatgtacatataattatatatgcattttaatataatatataaaattatatattatataacatataatttatgcatttattatatatttaatatattaaaatgtatatttatatataaatatatataatacataattatatataaattgtatattaatatatacttataaaaatatattttatatatttaatatataaatgcatatatttaaaaatatatatctatataaaaacatatagatatatatagttttttttttttgagacaaagtctcactttgctccctaggctggagtccagtggcatgatcatggcatgctgcagcctggaactcctgagctcaagtgatcctcccacctcagcctcccaaagtgctgagattacaggtgtgagctactgcacctggcttaaaatatagttttaatgtattacatgtctgattgtatgccaggcaccatgccaagtgcctccatagatgttagttcatctgcacaaaaaccttctagggttgtaattcatattattgtcattatcattattattattgctagcacagaggactaaatgcactgctcaaatatccctgactaataagaaacacaaatgccttatgacacagctccggaaacagcttcatgagtttataatctgggtcttggagattatgatccagggcttagagacattcacattcccttgctccttatcataacaactcaggaaaggctgatacatggctacgagtcacaaactagctctctgagcacacctactttcttcacaggacagtgtttgacaccatgtaacttactcctcacaggttgctgtccccatgaggttcaatggtaaatctggagtcgaagtccgactgccaaatgacctggaagatttgaaaggatatacatctctgtccttgtttctccaaaggcccaactcaagagaaaatgggggtactgagaatatgtttgtgatgtaccttggaaataaagatgtaagtattgcttggacatctctcttgtttttgaaacaatgtttttcgagaggtgtgcttttgagatgtgtggcacggctgcatcactgccattagcacagcaggcagaaatcctactgagacatcgacaaatccctccagcttcctccctgcccacctccccactgtggcagtgccctcgaggggcctcccatgcattgttggttgctagaggatcaagaggctttacccaatgggcccagcacgtgggcatgtgtgtgtacatgtaaaaaacatatgcacttggggaggatgattggcacccctccatactaccaagttgtatgattgacaccacaccaccagggatcaataccaaggaggagtagctcctcctcacagaattgtgaccttgtcctcttcctcagactgcccagcctcagatccttcctcaagcctgtgggatggagagattatgggtgaggactggagtggaatgaatcctccctctcctgcctaaatgataagaaaagcagttgccctgtctctttatcagtgtaaattcatcactactactactatcagtgtaaattcactacccatacaggcattttgaatggctggctttagcttttaatccctccttttaaaatacatttctttgacataagtgtcagaggaaaagctaatcactcactgggttaggattcagttgttggaagaaaaatgcttgaaatatggttctcaaaaattctgcccaattaggaaattgttagttgtcactagtggatcttgtatttaaagattcttaaaatcaacactattgctaattactcttccatgcttcaagaggttggcattttatttgtagcttgttatgtcatgattttttgctttgttttgtggtaaaatgcacattactttattccttcagcaaatttataccatatacctactatgtgtcacattctggctttgtgataaacaaaaatttattctcgaatgtacttaatgccaatgcacacttaaaatggttaaaatggtaagttttatggatattatgccgtgattttaaaacattttgtttctaccttaaggcgctcacattctagcagggaagaaagatgca

SEQ ID NO: 682808 - DNA, 1422 bp, Homo sapiens
tgtatacccaagcaccaagcattgcgtcttgccaaaaaaaaataaaataagcaggcaaaaaagactaatatttactgggtaaacaaatagccagtttattatcaaaaaagtcattcatgttaaatgcaaaatgtaaagacctcccaattcatgtatatctgaggagtactgtgtggcttaagcacaccttatcagaattgctttatttggtttatgaaactggggtttatccactgccccaaccacagtgaagtagcagtaaaaaagttacagcacagcagaaggtacaaatctcttatctttaaagccacctccactattttctgttaggccaatttttcttaacagagccctcttaggaacacataccacaaagacgacttgaagtataagaggtaagacatgggatttaccacctccctccaccactggcccctgtcaggaccctactgttgaccactcctcctaggaatatttttaccttcagatgagtaggaagggctaggggaggtcaacttacataggactatctgagtgcatcatcatctcatttttgaagaaaggattttctgtagggaattttctgtaaaataaagttctctcataactataagagagcttatccacttggcaatgttattaatatgataccaactctgaccctcatgtacaaatggacaacatgaactgtcagacttccaggccctttagaacagtaggaaaagaggttttcagaacggcatttttaaaatttcagaaaatatatgaaataaaataaaatctgatttacaaaaacccaatcccggaattgagagtgatctaagaatagatgtgtaraaaagagttgatgcagcaggcctgactgctatccttcaatagaactgctaaaaaggttggcccttggctggaatggaagcttggattctgggaaagttcttaccatttccaggactgataagagtggctcactgtgtgcacctaaactgtctgcacaaataatatgatgtacattgaacactgatttttcttctgggagtccggaatttgtctatgtgcctacatgatcggcccccaataaaaactctggcattaagtctctaatgagatttcctggttagtgacatttcatttgtgctgtcgtaactcgttgctggagcaaattagcacatcctgtgtgactccctgcagagcaaagccttggaagcttgtgcctggtctcccctggactccgccaccccatgtgctttttccctttgctgattttcctttgtatctaaggaacacaaacgaactacaaaacataatctaagccctccaaatatccacaataaaattaggaaagaaaaccaatacaaatgaaaaaataagactgcaacgtaatttagctgtaagaagtcatagctaaaaatatgactgtaagat

SEQ ID NO: 682809 - DNA, 636 bp, Homo sapiens
ttttttttttttttttttgagacgtagtctctctctgtcgcccaggctgaagtgcagtggcgcgatctcggctcactgcagcttctgccactcaggttccagtgattctcctgcctcagcctcccaggtagctgggattataggcatgcccagctaatttttgtatttttagtagagatggggtttcaccatgttagccaggctggtctcgaactcctgacctcaggtgatcygcccgcctcagcctcccaaagtgctaggattacaggcgtgagccactgcgcctggccgtattcttttaaagataaaaaattcagtgagtttgcttttattcttccagtttgtattctggactataagatttaaaagtttatttcatcctttttcctatgcacaaagtcctgggtcccaacaaacactgacatacttaactgattgctttctcacgtactatgacccagcagccttagcataacagtacccatttgtccaataagaatatgattacgaaaatagttaagatttttcttttggccacattttggggtcagtttttaagggtatttcacaatagggatgtactgtcagattactgtgttgtaaagtctcttggactagttctgctctggtattata

SEQ ID NO: 682810 - DNA, 636 bp, Homo sapiens
ttttttttttttttttttgagacgtagtctctctctgtcgcccaggctgaagtgcagtggcgcgatctcggctcactgcagcttctgccactcaggttccagtgattctcctgcctcagcctcccaggtagctgggattataggcatgcccagctaatttttgtatttttagtagagatggggtttcaccatgttagccaggctggtctcgaactcctgacctcaggtgatctrcccgcctcagcctcccaaagtgctaggattacaggcgtgagccactgcgcctggccgtattcttttaaagataaaaaattcagtgagtttgcttttattcttccagtttgtattctggactataagatttaaaagtttatttcatcctttttcctatgcacaaagtcctgggtcccaacaaacactgacatacttaactgattgctttctcacgtactatgacccagcagccttagcataacagtacccatttgtccaataagaatatgattacgaaaatagttaagatttttcttttggccacattttggggtcagtttttaagggtatttcacaatagggatgtactgtcagattactgtgttgtaaagtctcttggactagttctgctctggtattata

SEQ ID NO: 682811 - DNA, 636 bp, Homo sapiens
ttttttttttttttttttgagacgtagtctctctctgtcgcccaggctgaagtgcagtggcgcgatctcggctcactgcagcttctgccactcaggttccagtgattctcctgcctcagcctcccaggtagctgggattataggcatgcccagctaatttttgtatttttagtagagatggggtttcaccatgttagccaggctggtctcgaactcctgacctcaggtgatctgcccgcctcagcctcccaaagtgctaggattacaggcgtgagccactgcrcctggccgtattcttttaaagataaaaaattcagtgagtttgcttttattcttccagtttgtattctggactataagatttaaaagtttatttcatcctttttcctatgcacaaagtcctgggtcccaacaaacactgacatacttaactgattgctttctcacgtactatgacccagcagccttagcataacagtacccatttgtccaataagaatatgattacgaaaatagttaagatttttcttttggccacattttggggtcagtttttaagggtatttcacaatagggatgtactgtcagattactgtgttgtaaagtctcttggactagttctgctctggtattata

SEQ ID NO: 682812 - DNA, 619 bp, Homo sapiens
ttaaaaaacaaaaagaaacaatgtgtgtcttgtatcctgtgtctccaggatcatgtattttcagttgtgggaggattttctgatctcattasgcagacagtcaaggattatttacttttataggtgatttcttatcaacctaaaaatcaaaatgcatattctacgtattcattaacctaatacagtaattaacttttctttcaaattttatttctccaaccatagaatctgactatcccatttgctattctctattaaacaagagagatacatggtgatttttttccctaatgatcttatgactttgcatcattaaatagtctaaaagtttagaattatatctagaaaaatatttccattaattcattgtatgttagaaaattactgcatttggtgacaggatttgcttcttcaattctgaacatcaccattttgacattgtcctaattatttagcttttgttagccttagtgctttcgtgtgaaattgaggtaatgttgacctaatgctttgtacataattattgtaaggtacatatagcatatgattagccctcaattgctaataattagctatcaattgtaacaatttattagcaattgatttttatagcctcctg

SEQ ID NO: 682813 - DNA, 2554 bp, Homo sapiens
agccttttgtcctagtcacatgtttgactgtaatttgttctctgataatttcatcaaagaggtcttaaaaacaacattcacagatttttgttgcatatttaaaactttgtggcctgtttatttaaatgccagttttgtgggatataaaatctgagggttatacttatttatgtaagcatgttgtagcttgtcttcacctggacctctatttaatggtaattatattttggaacaatgcatgataggccaactggtctgcttccaatggagttggaggggtgagactttataaactttgttgaagaaaatccctgagaaaagagattgccagtgatacttgttttgttctttatatattcatatgtttttaacttttaatgaatatatattattttagtaattaaaaaaacagaagaactttaattttgtttgagcaataaagctctcttttaaccagatataataatacaattctggttaatattgagattagcaaaaagccagaagatgaatgggacttgggttctaaagtttcacacaagtcagtgtataattgaaagtataatcacaatactgagctaaagataatatactcaaccgagatattgctgattttaaacatagtagctcagcagcagttttgaaagaaagaggagtaggagagactgaaagaaaaaaaaagagattaaaagacatttaaaagtaactgaaagaaaatataggagttatatagggaaaaggagtcctgaagcatattttgtatttgactgctgaggatcctgagctatttggaaacaatattcaatgagacaagattgcatatgaggttaacacctatttcttctacactaacctgccttatccctgcccattatttaagtcagagtttctcaacctgatggagttctttattcttggcactattgacattttgggccagataatccatgtgggagtcaggggctgggggctgtcctgtgcattgtaagatgtctaaacagtacaagatgccaatatatgtcctcagttgtgaccaccaaaaatgtctctgggcacttccaaatgtcctccaaggggtgaaattgctctcagtccttattccaattatggcctccatgaatcaggctcagttattacttactagagtttgccaaaagttccccttttcttcattgatattagtttctaatttcagataatattcttaagtaagcaattagttatcacactatttttatgcctttttcctttgtattactagcttcagtattttcagtraatatctttctatatagtacagtgtgctggtgtttgaagagcatatcaaatcagtggtccctttcccaagagcatcagccctagtttgatgaaagataagtgacaaaatgaatagaagtctggctagaccaaatatagagaaatgacagtaagatgataaaagatttagaaacgtaactcatcattttatcatattatatatatatatcttttgtactctatattttttcatgctgtgttacaaaatgttagagaagtctactgctttattcacttccaggtgatgagaagtcaagtcaaaaatcaggacttataacgtcaatctgtgcctttgggttcctagaagagaagcaacatagcattgaagatcgaagaaggtcaccataaggaaaaattcccaaagcaaaaaacaagctttgtgtaccaccattccatcctgtgcatctgagatacactgggtctggcacaaattacctcctcaattaataaataatatatctgtaaataaatagtaactctaggaatagttataccatttgtttctatatattcattcccaatgttgacaaggatctaattcacttaaaatttagtccatattacattatcaaatttaaaaaagaagactaaagattaatatacccaatgcattcttgcccttcaatgaaaagattccctagttttgaaattaaaaactaataaatttaagtaaaaacataacctataaaatcaaatgttctaatctacctcttacattctgaagcttggagagtgagtttttagtgcttgagaataggaaatcagtccctaataattctctaagggatcatgggaaccaatacgtctaggtctgtcaatgggaaagaactctgaattaagcactaacaaaaacagcactctaccaatttaagtttaacatgagaggcagaattagcaattatggaaaacatacaaaagtggcaaaggagatgatagtttagaaaaaaattacacggctagatgtctaccaatcccagtcaacctagaagctttctccccaaggctgctttcactctgaaggatgtaagtagggactggctacaaaaattgctagttgcctggaggcttcatctggaatgacatgaatctcatgtatcagccaaattatactctgctttgaattcataaaaattgttttcataatgtgataaaattttgagttctgtctccaaactgttgaatagacaccacctgaaatataaactgaaatacctttataaggtatttcagtttataa

SEQ ID NO: 682814 - DNA, 1466 bp, Homo sapiens
ccgaaaaaaaggctttactcttgctgcacgataaagtggaaaaaaaaatccttcctgagaaatttcaaccttgtctctgctgacttccattttctctgctcagaggtaaacagccgctagataagccttgtggacaaggtggaagagcaagtaagtagaaactgacagrgcagaaagcagaaatgaagaatctctcacacagagagactctgcccctctccaagggaagccagaggcttgaagccaggcagggattaggtggcatttaagaggaatctgtgtgttaagacttgccacaatttaactgctcaagtaaggagctgtcatttgtggataatgtaagtatgcttcaggtgatactatcaaacttgatttcctgaaagcaaaggaccactgcatagctcagaattctatattcctaggatctctacctcaaaaccattgcgtcttcttggtctgagatttaccccagcctctgaaatctccctgaatgctagaatagagagggaagcccaagaataacagggcatgctatttgacacagtcagggctcaagaaacggactttgaaaaatgtgaggaaatagccatggaaataggatgatggagcaccaaatgtattgaatgatatccacaatgaggtggatggctttgcaaggttgagtcatctagatgattcattcccaggaccttctcaggcctcctctgaacttttcactgaaatctgaggcatgtacactactcatgctccagctccctttgaagagacattattactcaaggaaaggcagcttctgtgcttccagagccagctttctgtggtcacccagcaatgttatctcaagagaaagacacagaaatccatgtcctttgatagaaaatcctcctttgctcaagggcatgagttactgaataagtccaaggagggtgacacttttcattcttgtttgatgtctgtcattctcagagcaccagcctgatctgcctctttccatcttttcagggacccagataggggacacatgattattgctgatttcataataggcaactggaggctttaccatgaaagatgaataagtaaacagtgcaacttggaggtagggctggccacctaccacttggtggccaacgcagggactgctcacctcctgctgctgtttctggagcctgttgatcagcagcagctgcacagctaccaccgctttacccggtagcttcagaaggaggactattttgatttaccccaaggtgaggttgagtgggatgccttctgtgagtgactttggagaaggctaaggaaagccagatgagaaagagaggattagaagctgtgagaggtttaaccaggcagaaatctctcccagcaggggcctggattgccatcacatcactgaagggagggctcacaaaagtggtctgcaggcagtgcttactccaagcccgctttttacactgaaaatgata

SEQ ID NO: 682815 - DNA, 1816 bp, Homo sapiens
tataggtgagaatcaggagattaacatagtaaggaggttagtgttctaagatgactcctatccaggcttctgtctctccttccaatcaacattttctctgatagcaaagatggataatgataattatatatttgcttaaagtatgttatgcacataagtgctttatatgtaatatatttaatatgtataacactctatataaatgtactattcttatccacattttacacttgagaaaactgaggcaaagggaagtgaagtaacttgcctaaagtcataaagttagtaaatgctgaagctgaaatttgaaagtagaccagttagggttccaggcatctttttcacaacttctctcccccaccttccatcgcagctactctactcctgtggctggatctttctttatggcaccccaattaattcaattgctaacttttaagcttaacacacaagactctgtaatctagacttgccttcttgtcagcctcatctcctgacactttcctatgtggattgtgtgctgaatcatactcaacttgctggcactccccaaagaggatggtgtaatgatttttaccttcacatattctatttgctaggcctggaaagttcttcctgccctgtctattcttttgtgcccacaccctgcaatcctcatcatcatcaggttaactctaactcatctatcagaattccactcagtgacaacgtttgaaaaggcagtcctgtctctcctgggcttccttcctgagccccttcacagagaactgtcacagtttacatgtggacctcctccacttgattgagaatacttgccaaatcaaataatgactgaatgaatgatcagtatcacatcacttgttattacatccccactgtaaatttaatttgagaaaagttggcacagactctatgctgtgatgatcttgctagttgcagctatagtctttgtctctaaatagtgtatataattaaaaaaaacttttcatgattagaagaaaaggagtcttttgattattgtagaaggtttaaggctttcaaatgagaaacatatttggtggctttgatgccatcagacccaggatatgcatagtagttaggaaaatagatcctgaagactcattgcgtgggttcaaataccaactctgccaatcactagatctataaccttgggcaagttacttactctttctgtgcttcagtttcctcatttctgaagtgggaatagtagtgatggactactttataagatcattgtgggagttaaatgagctatatgtaaaacatctagaatcaaacttggcatatagtaagtacaatgtgttttctgtttacctaaacattttttcagcccttatgattttgccaactggtgatgactgagcgcaatttgactttgctggtataggacgccgattatttaaagattttaggaatgtgaaacatattctccaattgaaggactttgcacgataaggaagcaattgtttaaattcaattctttttgtggtggcaggtgacagtaatcccagctacttgggaggctgaggcaggagaatcacttgaacccaggaggcggagattgcagtgggccgagatcacgctgttgcactccagcctgggtgacacagtgacacttcctctccaaaaaataatagtaattaaaaaataaaataaagaataagttcagttctktttatgagaaatttatctatctaatctttctatctacctatgatttatttaaggatatgtcagttatgtgtgttctggagaaagaataccacaattataccagtccttttacggaaaatta

SEQ ID NO: 682816 - DNA, 940 bp, Homo sapiens
gagaggaccccttctgtccccacttagatcccaccaaattccctttcttagacatctaagaatgatcacactggagcagtgaaactttgaaactatccagttacttaaaagactaaacctaggagggtgatgtatgatgtgttgcacgtggagggcagcagggctacctatctataccctgggtgctgaatatgaagacttcgactctctgtgggatcgggggctcggttgccaggggctcggtgggccttgctcagcatggccaggctctgttctcggaagcaggcctgttggaaatccccacttaggtaatccactgtttgcatcaagctgttctggcttgccactggaccgcccccggtccctgctcggtagtgggccccgggagctgccgcacagtcgaggggtgcacctgtgggctgcccaccgtggaacggcatggcraggtcctgagaccccgagctgtcgctattgggagtgggcagaatgttgttccacaggggttggaagtagtgaccattggggtaggccaatggggctgccatgccgttgactggtggggatggggtcggcttttccaggggtggcttcagatggaaggactgcgccaggcagagttcctgcgggtaggcaggggccttgcccacaaagccaggccctgccaactcgcgtcctgccgcatgcttgcctgtcaggccaggggctggcgtcccactagcctcgctgcacatctgctgtaggtgggccagctggtgctggttccaggtgactggcttgaggtcgctagggtagccagtggggacgcgagagatgcctgtgggcaggttgacaggacctgcagcaggcaacgcggcggtggccgcgtgggtgtgctccatgggattgaccacacatgaaggcattggtgtggggacgctgtgggtcgacacccgggtgcttg

SEQ ID NO: 682817 - DNA, 512 bp, Homo sapiens
aaaaaaaaaccagttggaggctgtacaatttcaacttgcttctgtcaaaaaacaagtttgcccttctatttgatatctgggtggtttttatgttctctacccatgggtgagcagtaagtacagctttataaagttatacttcactcacttttttatattactattttttaatttttatgttttgtagagaatagggtctggctctgttgcccaggttggtctcaaactcctggcctcaagcagccctcccagaggcctcccaaagtgttgggattaaggtgtgagccactgcacccctccacgcccgatatttctattttyttgactgatttgtgtgatcactgttttgcatggtgcaataattaggggttcgtgaaagaattttcccaggagacagaagactatgtatagaactaatcataaatgtatttgcactgatgttcaaatatcatttaaggggcatggaaatcctggaatttggtcatctgcaaggaaacaattatagaaagcca

SEQ ID NO: 682818 - DNA, 603 bp, Homo sapiens
tgaaagataatggctgagactatatcagaattgataaaaaaaaaagagatattaatatccaaagccaagaactccatcaattcccaaacaaaatacattgaaaaaaatgaataaaacaataaaaccctacacttagacataaaatagtaagaactaatgatttaattttatrtctatacgtaggtttatcatcaaacagcaggtaatagattggtatacaatagtaatacaaataatacaagtaatacaaataatcaattttaatctttggataattcattaatatataatcagtttccaactctattataattaagccaaatacatttgagagaagtgtgttttataaccatatcttgcttcttgaagaaacccaaaagttaaaagtctcagggtcaaatctgatagttgtaacctattttcccactgtgagggggagaaggaagaaatattagtggtaatttgttcagtttttgctaaaagtgttttcaactcactttcatttgcacattatcagtcaaaggaaaggttgcgaaaaggggaaaaactatttagagaacactatgcaaatggacagtagaaaatagaattctagatgatcat

SEQ ID NO: 682819 - DNA, 624 bp, Homo sapiens
cctcccaaagtgctgggattacaggcttgagccactgcgcccggccttcttcaaacttcttaacatcttgttattattactgcttaaaactttctgaaactggggtaaagagtagtaatgggggatggtagtgaggcatccattgctctttgcatgctttaccccagtccagtctgttagtctcctcccattccttacccctgtctttatactcagagctgagctcctaatttatcaataggttgatgtaagtaagggcctagaacgaaggacggctagactccattttagtgtctaagggaggaacacaggaaatcaagcttctaggcacttgtgatggttgattttctgtgtcaacttgactgggttaagggatgctcagatacytggtaaaacgtttttttctaagtgtaagtgtgagagtgtttctggaaaaggttagcatttaatccatagactgagtaaagatctccctcacccatgcaggtgggcatcgtccaatctgttaagggcctaaatggaacaaaaaggcagagcaagggcaaatggactctctctgcttgaactgagacgtccatcttctcctgcccttggacatcagtgcttctggttcttggaccttta

SEQ ID NO: 682820 - DNA, 628 bp, Homo sapiens
catgttggtcaggctggttacaaactcctgacctcgggtgatccgcctgcctcagcctcccagagtgctgggattacaggcgtgagccaccacgcctggcccattttatttttttaatgaccacagaggccacatttttttaaactgacaactcaatctctacatacatacagtattgcacaaattataagtggatcaacaattatattaatgatacaaactcatgagcatttacataaaactaccgctctaggttttgatgcgttttgtgccaactacttcagtaaataaaagaaacataaagaaactcagctacttgaattcatgagaatcagctttctaaaaacgcatatatgtcatctcagaatwcttaatatgtcaaacccaggaaaatcagaaactaggaacacttttaaagaaaagttggtgataaaaatgttaggttaaaatattgtgtaagaactttagcaactggactgagtaaccaggaagtatttgcatactgggaattttaagaaaagctccccatgttctcctttgcaattaggaccacattccaaaagcataattctgggttgttacaatattttctcttctacaaaccactgtttcaaaggttaaggaaaca

SEQ ID NO: 682821 - DNA, 1143 bp, Homo sapiens
aatgtgagagacagacaaatccaggttctttgtttcatgtgcaaaggaagttcaagatcagagatgagaaattatttaagtgttgtatagactctaataatttttcatacggtgccaccagatcgtctttccctgaatttctagctttctgtccttgctataccctgctcaaaaattatgtcctgctcaaaaattaaaacaaaacaaaaacaagcacacaaaaatactgacaaattcattgtagcagctggcaagctagaaacttttcagcaaagtccattaatgctagaaactcwtttgacggtactcataaactttggctgtggaaattaagactatgtgccagatttattaggaattctctccaggttttgaagttttactattgtttgactgtgaaagacttaattaatcattaacatgccttacctgatatttcgcaaagtagccagaaaaaatgatctcagcacttagattccaatttgtatctcatgctatttctcgggaaaatctagtccaacttgtaaatcttagagttttaaggtcaaattcggagtttctgttctcctgtaatgtggctagctaaggaaatagtatcctaagatatttaacatttttaatgcacagctttttaaagtgcatttattaatttaacagatattaatgagtatttattggatatcaagcactgtgctgagtcccggggtttaggaataaaagtgctcccaatttagtgggaagattgacaaataaatagttacatgtaggctttcatggaggcacatacaggagttccaggcagttctgcctcaagacaatccttggcattgagtggggtatgtgtatacttgagtggcaggttcaaaaaaaaaaattgcagtgacagtatcctaaataaaagggggaaatcattaaggttggctgagtgggttttgcagaggatgggacacttgaaccaagtctcaaaaaattgacgggaatatgccaagtataccttacagtactccaggctggggagtggcatgcagataagtttggagttgtaaaacatcaagacaagctcaagacctacagattgttgttttcagctgaagtgtaagggataagtatcaatgatgacagattaagatatagttagatttc

SEQ ID NO: 682822 - DNA, 610 bp, Homo sapiens
gactgcagtatttaaaagaaagttttatctgagctctatttcaataatttccaggttatgcccttaaaaggacaagaggttcaggtgatgggttcatcaaactctcacaagtcatcactaaataacttactcatgtaagttacaaataccacttgttccccccaaacctatggaaataaaaaatttaaaaaaaacacacacaaaacccatgaaaatatagctagaatgaaaaaaaaaaaaaaagaacaagaggctgccttttgctccccccctccctgtcttctctgaattcccactggctagaatggagatgtgatggttagagttgaagcagccatattagacctcaaggtagcagccaaatattgaggagaacgagcaacaaagacaggagacaggatttcaactgcattctcagctgggcccaccaaactaaatattaacataagacagaagttaactttggcagcatcatcactatcaccaccaccaccaccattgtcaccrtcatcaatgtcaccatcaatgtcatcagcgtcaccaccaacaccatcatcattctcaccactaccattacaatccactatcaccaccttcacaatcaccaaga

SEQ ID NO: 682823 - DNA, 597 bp, Homo sapiens
taaaacgctgttctgcaggacgttaattggtacttactagacaaaagaatttatgatgaaataatcttggggatcagtgacttaaacaaatccaaggagatgttctctgctacagggcttctcagagcatttatatgctaaggatccttatttatctccaagaaggggctggagtgagcaaagtttcccaaacacatctgagcatggaatctttcagtgaagtgcagctcaaagaaccaatggtctgtgaaacacccttccctagcagagtggtttttaaacttttaaaaagccatagaactcgttcttcagattattttctgcaagaaatctcaatttatgtgaagcggacacaaaacagggatgaaacagaccaaagcayggatgggacaacacagataatgacagtgataattctctggccttcccagtgtgccccctaagaaggtatctcagaactcctaggggcctatgtggcaccatttgaagaacacagtttcctctgccttatcttttttcccccctgcaagaacaggatgcagatgagtcccaggcactcccaggattccctggagcctcacagctggaagggacctc

SEQ ID NO: 682824 - DNA, 685 bp, Homo sapiens
gggctcacccaggtgtgtgatgcaagggcagaggatggacccctccactcctatcagctgccactaacatcccttcccgcccactcagtcctccaagaggctgctggagactctccagctctctccttccactccccacctccacacagcccctctgcactcccagctgttctggctggccgcccctctgcccccagcatcctgcaggaagcccactcctatcccaggggctactgcttaaagcatctgaggtcacttggggagaggcacttggctctgggcctgacattccccttgctcagaaggcaggtgctggggaaatgatgtcagatgggacagctgggggccggggtgctcacagctcagatgtcctctaatggccctcctacctgctcaccttcccactaggcaagaggctgagtacaggtcttacctgccccagccccagccccttgggccaatcagccatccctgccccggaggcaccaaggcccaaagtcctcccgtgggcctcattcctactcagggaaggtatcccccagaggatgggaaacctccccttgaagctggggccagtcctggaatgggctgcttggggaatgagctcactgtgtacgtgaccgcatttggctcccacaacagcactgggagtgaggaatgagagtccccattttccmgataagac

SEQ ID NO: 682825 - DNA, 426 bp, Homo sapiens
aattttatatttctaacctctgcagtgataaaaggtccaaattttcaccgttgaactgccttcttgcatggtcttaaacagttatttctataaagcagataaaatttgcataattatttacagtaaaacccattcagaaactcactttgatagtaatacttttatctaccattagagttggaagaaacatttsagtaaaaaagcatagggatgggtcaaggcatttttttttttaagaaaaatatactctatgtaatacatcttggaaactacacagaccatatccttttatttaatgtgaaggcacaactttaacattaaaagcaaagcattttaattatttatgatgtaactgtcagtaccagctcataaaaatatatatttgcaaacatatcattgaagactttcagattgtcaattcaaaaa

SEQ ID NO: 682826 - DNA, 577 bp, Homo sapiens
acatgtcttgtcactgtttctcctttggttgacatacaaaggctccatctggtgtttgcacatgaatatgatcttaataagcagcaaagctgcaggcaaaacttcaaaggagtatcaacaatagttgacctgtccttacttcttaagccatggtcctagaataattgaccacatgtagatactgttactcttgagtcttgaatgcttagtttctcgacattcttgaaggtgccttgcaggtagagatttcatgtactcaccaccatgtgttgccttagccaaaatttgatgagattattgacctgaaattctgaatttgatatcttaatttgttagacaattagattttaagttggttacagtctttattgytaaaattttgtctacatcatcttatccagtctgataagataatttatttaaaattaaaaattatgcctatataaaaaccactttctgaaagtcagtatttatgtttttcccggtatttaataacccaagtttaataaaatatcttcctactttattctgaccttcacagtgaggctaaggatggtttgcaggcacttcagatatt

SEQ ID NO: 682827 - DNA, 829 bp, Homo sapiens
atgtcaaaatgtacattgtaatttaacaatgaaaataatttttcaatgaattactaggttttagctcaattaggccctttttgaattttattgaaattaaagaaytacaaactacatgacttacaaaagtatttgtttcccagacattggtgtcttttagtttttcaacacccatgctaataattcagattgttttgtttggctcctaggaagttttcatatcccaggacaaggcacccatggattcagggtgggtgggaagtgttctttttttgtgtgaagtgggcaaagtacaattaccagaggcaacatggaaaagagagagtctgtgcttccattataagaacagagaagctttaggaaagggcagttgtggaaattgattccctaaatctgtctgtgtctctgtacttcttgaaaatcttcacgtaccacagagataggtacacttcagtttgaaccagtgatacaattcattatgtagataaagatgcccatgacttgcttagcttaatagatttttttttacgtaatctcctagatgttaagatttatatagtgatgaaattcttctgaaagctatcactaggaacaaaaagaatctcaaagattttttgtgtttaatggatttttttggtctattagaacattagaagcttttagaaagatttgtcatagtgtttaaacttccttgtattttaacagtgttcattttttaacaggtggccaatatgttctacattgtagtgattatggctcttgtattacttagttttggtgttcccagaaaggcaatactttatcctcatgaagcaccatcttggactct

SEQ ID NO: 682828 - DNA, 829 bp, Homo sapiens
atgtcaaaatgtacattgtaatttaacaatgaaaataatttttcaatgaattactaggttttagctcaattaggccctttttgaattttattgaaattaaagaattacaaactacatgacttacaaaagtatttgtttcccagacattggtrtcttttagtttttcaacacccatgctaataattcagattgttttgtttggctcctaggaagttttcatatcccaggacaaggcacccatggattcagggtgggtgggaagtgttctttttttgtgtgaagtgggcaaagtacaattaccagaggcaacatggaaaagagagagtctgtgcttccattataagaacagagaagctttaggaaagggcagttgtggaaattgattccctaaatctgtctgtgtctctgtacttcttgaaaatcttcacgtaccacagagataggtacacttcagtttgaaccagtgatacaattcattatgtagataaagatgcccatgacttgcttagcttaatagatttttttttacgtaatctcctagatgttaagatttatatagtgatgaaattcttctgaaagctatcactaggaacaaaaagaatctcaaagattttttgtgtttaatggatttttttggtctattagaacattagaagcttttagaaagatttgtcatagtgtttaaacttccttgtattttaacagtgttcattttttaacaggtggccaatatgttctacattgtagtgattatggctcttgtattacttagttttggtgttcccagaaaggcaatactttatcctcatgaagcaccatcttggactct

SEQ ID NO: 682829 - DNA, 829 bp, Homo sapiens
atgtcaaaatgtacattgtaatttaacaatgaaaataatttttcaatgaattactaggttttagctcaattaggccctttttgaattttattgaaattaaagaattacaaactacatgacttacaaaagtatttgtttcccagacattggtgtcttttagtttttcaacacccatgctaataattcagattgttttgtttggctcctaggaagttttcatatcccaggacaaggcacccatggattcagggtgggtgggaagtgttctttttttgtgtgaagtgggcaaagtacaattaccagaggcaacatggaaaagagagagtctgtgcttccattataagaacagagaagctttaggaaagggcagttgtggaaattgattccctaaatctgtctgtgtctctgtacttcttgaaaatcttmacgtaccacagagataggtacacttcagtttgaaccagtgatacaattcattatgtagataaagatgcccatgacttgcttagcttaatagatttttttttacgtaatctcctagatgttaagatttatatagtgatgaaattcttctgaaagctatcactaggaacaaaaagaatctcaaagattttttgtgtttaatggatttttttggtctattagaacattagaagcttttagaaagatttgtcatagtgtttaaacttccttgtattttaacagtgttcattttttaacaggtggccaatatgttctacattgtagtgattatggctcttgtattacttagttttggtgttcccagaaaggcaatactttatcctcatgaagcaccatcttggactct

SEQ ID NO: 682830 - DNA, 1992 bp, Homo sapiens
gactgctaatcctgtgggaggctccagaggtgggggagagggcctgggccaaatacattagggaaaggctgcttgtatccctgagttgggctttcatggtagatatttgcatgttaaaggttctgaagaagactgcagtttcgaaacctgttcaacctcaccccacccccaccccgcattctgagacagtctcgcattgttgcccaggctggagtacagtggcatgatcttggctcattgcaacgtctacccctgcgggttcaaacgattctcctgcctcagcctcctgagtagctgggattacaggtgtgcgcccccacacttggctaattttttgtatttttagcagacacttggctaactttttgtatttttggcagggttttgccatgttggccaggctggtcttgaactcctggcctaaagtgatccacctcggccttccaaagtgctgggattataagcgtgagccaccacgcctggcctagaaacttgttcaacttaaagaagcatttccctaaaccacttgaacaaagaacaccttccatcccagatgttaggacctgcacatttgggatatcgagtgtcctaccctttgggaggtttaaacttccaaaacagttgcytttcaaaaacactctttgaagtcccactaaattgccttcaaatcaatggagcatttgctcaaatagtgtcgatggtggcttgttttctttactgtgaacatcagtttgaaaattagagtcaaatatttaaggtctgatttaaaaataggatgaataatactagattgggataaataacatgaaacgtgcaattggaaaatgtatttgtgtctaatggcagatgaacgacatctgggaggaggcaataaaagaaagcagttgatgaggagtcatcagagtgcagactggtaccatccactcagccatccagtggtgaactgcttaatttttaaaacaaccatttgcctagaacattttctgtactgtagccctctacttttgacatacatttatccttcattgtaattttttttttttttttttttttgaggtggagtctcactctgttgccagggctggagtgcagtggcacgatctcggttcactgcaacctccgcctcccaggttcaagcgattctcctgcctcagcctcccgaatagctgggattacaggcacctaccatcacgcctggctaattttttgtatttttagtagagatggggtttcaccacgttggccaggctgctctcgaactcttgacctcatgattcacctgcctcagcctcccaaagtgctgggattacaggcgtgagccaccgcgcccggcccattgtattcttgagaatcattcctttgatgcagttgactattttcactgcagcccagtattccattgcatgcagatgtctatgttgatagacatttggattgttcttagacatatgttttgcatttatgacactgctgctgtgaaccttcttacaggtgcctcctggtatgcatgcgcaagtttttctagaggatgtctccaaggagggacctacacagtcatggaggggggatgtttgattttgctggagaactatttctccagtggtggtgtcagtttacactcccactagcaatggaagaagactcccattatttcaccttctggacagttggcactgtgatcattttttccatgtgggtataaaatggtatctttggagttttaatttgcatttctctgattcttaatgagattaagaacatctttttgagttaatggaccatttgcatttccttcagtgaaatgccttttacctatttctctatcagattgtttttcttttattgattcattgattctttacagattttaatactaatactttgtcaggttatgtgctgcagaaagtttatggtgtttttttgatgaaaaaaatttgaattttaatgtcatcgattttatcaccctttttccttcatggtttatacattttt

SEQ ID NO: 682831 - DNA, 1992 bp, Homo sapiens
gactgctaatcctgtgggaggctccagaggtgggggagagggcctgggccaaatacattagggaaaggctgcttgtatccctgagttgggctttcatggtagatatttgcatgttaaaggttctgaagaagactgcagtttcgaaacctgttcaacctcaccccacccccaccccgcattctgagacagtctcgcattgttgcccaggctggagtacagtggcatgatcttggctcattgcaacgtctacccctgcgggttcaaacgattctcctgcctcagcctcctgagtagctgggattacaggtgtgcgcccccacacttggctaattttttgtatttttagcagacacttggctaactttttgtatttttggcagggttttgccatgttggccaggctggtcttgaactcctggcctaaagtgatccacctcggccttccaaagtgctgggattataagcgtgagccaccacgcctggcctagaaacttgttcaacttaaagaagcatttccctaaaccacttgaacaaagaacaccttccatcccagatgttaggacctgcacatttgggatatcgagtgtcctaccctttgggaggtttaaacttccaaaacagttgcttttcaaaaacactctttgaagtcccactaaattgccttcaaatcaatggagcatttgctcaaatagtgtcgatggtggcttgttttctttactgtgaacatcagtttgaaaattagagtcaaatatttaaggtctgatttaaaaataggatgaataatactagattgggataaataacatgaaacgtgcaattggaaaatgtatttgtgtctaatggcagatgaacgacatctgggaggaggcaataaaagaaagcagttgatgaggagtcatcagagtgcagactggtaccatccactcagccatccagtggtgaactgcttaatttttaaaacaaccatttgcctagaacattttctgtactgtagccctctacttttgacatacatttatccttcattgtaattttttttttttttttttttttgaggtggagtctcactctgttgccagggctggagtgcagtggcacgatctcggttcactgcaacctccgcctcccaggttcaagcgattctcctgcctcagcctcccgaatagctgggattacaggcacctaccatcacgcctggctaattttttgtatttttagtagagatggggtttcaccaygttggccaggctgctctcgaactcttgacctcatgattcacctgcctcagcctcccaaagtgctgggattacaggcgtgagccaccgcgcccggcccattgtattcttgagaatcattcctttgatgcagttgactattttcactgcagcccagtattccattgcatgcagatgtctatgttgatagacatttggattgttcttagacatatgttttgcatttatgacactgctgctgtgaaccttcttacaggtgcctcctggtatgcatgcgcaagtttttctagaggatgtctccaaggagggacctacacagtcatggaggggggatgtttgattttgctggagaactatttctccagtggtggtgtcagtttacactcccactagcaatggaagaagactcccattatttcaccttctggacagttggcactgtgatcattttttccatgtgggtataaaatggtatctttggagttttaatttgcatttctctgattcttaatgagattaagaacatctttttgagttaatggaccatttgcatttccttcagtgaaatgccttttacctatttctctatcagattgtttttcttttattgattcattgattctttacagattttaatactaatactttgtcaggttatgtgctgcagaaagtttatggtgtttttttgatgaaaaaaatttgaattttaatgtcatcgattttatcaccctttttccttcatggtttatacattttt

SEQ ID NO: 682832 - DNA, 1992 bp, Homo sapiens
gactgctaatcctgtgggaggctccagaggtgggggagagggcctgggccaaatacattagggaaaggctgcttgtatccctgagttgggctttcatggtagatatttgcatgttaaaggttctgaagaagactgcagtttcgaaacctgttcaacctcaccccacccccaccccgcattctgagacagtctcgcattgttgcccaggctggagtacagtggcatgatcttggctcattgcaacgtctacccctgcgggttcaaacgattctcctgcctcagcctcctgagtagctgggattacaggtgtgcgcccccacacttggctaattttttgtatttttagcagacacttggctaactttttgtatttttggcagggttttgccatgttggccaggctggtcttgaactcctggcctaaagtgatccacctcggccttccaaagtgctgggattataagcgtgagccaccacgcctggcctagaaacttgttcaacttaaagaagcatttccctaaaccacttgaacaaagaacaccttccatcccagatgttaggacctgcacatttgggatatcgagtgtcctaccctttgggaggtttaaacttccaaaacagttgcttttcaaaaacactctttgaagtcccactaaattgccttcaaatcaatggagcatttgctcaaatagtgtcgatggtggcttgttttctttactgtgaacatcagtttgaaaattagagtcaaatatttaaggtctgatttaaaaataggatgaataatactagattgggataaataacatgaaacgtgcaattggaaaatgtatttgtgtctaatggcagatgaacgacatctgggaggaggcaataaaagaaagcagttgatgaggagtcatcagagtgcagactggtaccatccactcagccatccagtggtgaactgcttaatttttaaaacaaccatttgcctagaacattttctgtactgtagccctctacttttgacatacatttatccttcattgtaattttttttttttttttttttttgaggtggagtctcactctgttgccagggctggagtgcagtggcacgatctcggttcactgcaacctccgcctcccaggttcaagcgattctcctgcctcagcctcccgaatagctgggattacaggcacctaccatcacgcctggctaattttttgtatttttagtagagatggggtttcaccacgttggccaggctgctctcgaactcttgacctcatgattcaccygcctcagcctcccaaagtgctgggattacaggcgtgagccaccgcgcccggcccattgtattcttgagaatcattcctttgatgcagttgactattttcactgcagcccagtattccattgcatgcagatgtctatgttgatagacatttggattgttcttagacatatgttttgcatttatgacactgctgctgtgaaccttcttacaggtgcctcctggtatgcatgcgcaagtttttctagaggatgtctccaaggagggacctacacagtcatggaggggggatgtttgattttgctggagaactatttctccagtggtggtgtcagtttacactcccactagcaatggaagaagactcccattatttcaccttctggacagttggcactgtgatcattttttccatgtgggtataaaatggtatctttggagttttaatttgcatttctctgattcttaatgagattaagaacatctttttgagttaatggaccatttgcatttccttcagtgaaatgccttttacctatttctctatcagattgtttttcttttattgattcattgattctttacagattttaatactaatactttgtcaggttatgtgctgcagaaagtttatggtgtttttttgatgaaaaaaatttgaattttaatgtcatcgattttatcaccctttttccttcatggtttatacattttt

SEQ ID NO: 682833 - DNA, 1992 bp, Homo sapiens
gactgctaatcctgtgggaggctccagaggtgggggagagggcctgggccaaatacattagggaaaggctgcttgtatccctgagttgggctttcatggtagatatttgcatgttaaaggttctgaagaagactgcagtttcgaaacctgttcaacctcaccccacccccaccccgcattctgagacagtctcgcattgttgcccaggctggagtacagtggcatgatcttggctcattgcaacgtctacccctgcgggttcaaacgattctcctgcctcagcctcctgagtagctgggattacaggtgtgcgcccccacacttggctaattttttgtatttttagcagacacttggctaactttttgtatttttggcagggttttgccatgttggccaggctggtcttgaactcctggcctaaagtgatccacctcggccttccaaagtgctgggattataagcgtgagccaccacgcctggcctagaaacttgttcaacttaaagaagcatttccctaaaccacttgaacaaagaacaccttccatcccagatgttaggacctgcacatttgggatatcgagtgtcctaccctttgggaggtttaaacttccaaaacagttgcttttcaaaaacactctttgaagtcccactaaattgccttcaaatcaatggagcatttgctcaaatagtgtcgatggtggcttgttttctttactgtgaacatcagtttgaaaattagagtcaaatatttaaggtctgatttaaaaataggatgaataatactagattgggataaataacatgaaacgtgcaattggaaaatgtatttgtgtctaatggcagatgaacgacatctgggaggaggcaataaaagaaagcagttgatgaggagtcatcagagtgcagactggtaccatccactcagccatccagtggtgaactgcttaatttttaaaacaaccatttgcctagaacattttctgtactgtagccctctacttttgacatacatttatccttcattgtaattttttttttttttttttttttgaggtggagtctcactctgttgccagggctggagtgcagtggcacgatctcggttcactgcaacctccgcctcccaggttcaagcgattctcctgcctcagcctcccgaatagctgggattacaggcacctaccatcacgcctggctaattttttgtatttttagtagagatggggtttcaccacgttggccaggctgctctcgaactcttgacctcatgattcacctrcctcagcctcccaaagtgctgggattacaggcgtgagccaccgcgcccggcccattgtattcttgagaatcattcctttgatgcagttgactattttcactgcagcccagtattccattgcatgcagatgtctatgttgatagacatttggattgttcttagacatatgttttgcatttatgacactgctgctgtgaaccttcttacaggtgcctcctggtatgcatgcgcaagtttttctagaggatgtctccaaggagggacctacacagtcatggaggggggatgtttgattttgctggagaactatttctccagtggtggtgtcagtttacactcccactagcaatggaagaagactcccattatttcaccttctggacagttggcactgtgatcattttttccatgtgggtataaaatggtatctttggagttttaatttgcatttctctgattcttaatgagattaagaacatctttttgagttaatggaccatttgcatttccttcagtgaaatgccttttacctatttctctatcagattgtttttcttttattgattcattgattctttacagattttaatactaatactttgtcaggttatgtgctgcagaaagtttatggtgtttttttgatgaaaaaaatttgaattttaatgtcatcgattttatcaccctttttccttcatggtttatacattttt

SEQ ID NO: 682834 - DNA, 1992 bp, Homo sapiens
gactgctaatcctgtgggaggctccagaggtgggggagagggcctgggccaaatacattagggaaaggctgcttgtatccctgagttgggctttcatggtagatatttgcatgttaaaggttctgaagaagactgcagtttcgaaacctgttcaacctcaccccacccccaccccgcattctgagacagtctcgcattgttgcccaggctggagtacagtggcatgatcttggctcattgcaacgtctacccctgcgggttcaaacgattctcctgcctcagcctcctgagtagctgggattacaggtgtgcgcccccacacttggctaattttttgtatttttagcagacacttggctaactttttgtatttttggcagggttttgccatgttggccaggctggtcttgaactcctggcctaaagtgatccacctcggccttccaaagtgctgggattataagcgtgagccaccacgcctggcctagaaacttgttcaacttaaagaagcatttccctaaaccacttgaacaaagaacaccttccatcccagatgttaggacctgcacatttgggatatcgagtgtcctaccctttgggaggtttaaacttccaaaacagttgcttttcaaaaacactctttgaagtcccactaaattgccttcaaatcaatggagcatttgctcaaatagtgtcgatggtggcttgttttctttactgtgaacatcagtttgaaaattagagtcaaatatttaaggtctgatttaaaaataggatgaataatactagattgggataaataacatgaaacgtgcaattggaaaatgtatttgtgtctaatggcagatgaacgacatctgggaggaggcaataaaagaaagcagttgatgaggagtcatcagagtgcagactggtaccatccactcagccatccagtggtgaactgcttaatttttaaaacaaccatttgcctagaacattttctgtactgtagccctctacttttgacatacatttatccttcattgtaattttttttttttttttttttttgaggtggagtctcactctgttgccagggctggagtgcagtggcacgatctcggttcactgcaacctccgcctcccaggttcaagcgattctcctgcctcagcctcccgaatagctgggattacaggcacctaccatcacgcctggctaattttttgtatttttagtagagatggggtttcaccacgttggccaggctgctctcgaactcttgacctcatgattcacctgcctcagcctcccaaagtgctgggattacaggcgtgagccaccgcgcccggcccattgtattcttgagaatcattcctttgatgcagttgactattttcactgcagcccagtattccattgcatgcagatgtctatgttgatagacatttggattgttcttagacatatgttttgcatttatgacactgctgctgtgaaccttcttacaggtgcctcctggtatgcatgcgcaagtttttctagaggatgtctccaaggagggacctacacagtcatggaggggggatgtttgattttgctggagaactatttctccagtggtggtgtcagtttacactcccactagcaatggaagaagactcccattatttcaccttctggacagttggcactgtgatcattttttccatgtgggtataaaatggtatctttggagttttaatttgcatttctctgattcttaatgagattaagaacatctttttgagttaatggaccatttgcatttccttcagtgaaatgccttttacctatttctctatcagattgtttttcttttattgattcattgattctttacagattttaatactaatactttgtcaggttatgtgctgcagaaagtttatggtgtttttttgatgaaaaaaatttgaattttaatgtsatcgattttatcaccctttttccttcatggtttatacattttt

SEQ ID NO: 682835 - DNA, 1462 bp, Homo sapiens
atcaatatgggccacattagtgatagaaagcttaaactcaccaattttacataataaatagagaaagttacctcttacaaaagcaacaggcccatatggttttactgagtattctacaaaccgtcaaagaccagctaagtaagtccaatatcactgatagcaccacaaaagactatttcaaccaatatcacacgataatatcgacgtaaaactccaaaagacaataacagaatacaatctcattaaaaatgttacacaccatgggccaggcacggtggctcacacctgtaatcccagcaytttgggaggccgaggtgggtggatcacgaggccaggagatcgagaccatcctggctcacatggtgaaaccccgtctctactaaaaatacaaaaacaaaattagccgggtgtggtggtgggcgcctgtagtcccagctactcaggaggctgaggcaggagaatggcgcgaacccaggaggcagagcttgcagtgagccgagactgcgccactgccagggcgacagagcgagactccatctcaaaaaaaaaaaaaaaaaaaagaaagaaaaaaaaaatgttacacaccttgaccagctaggatgtacttcaggagtgtatatttgctcaacagtaggaaacgtatcaatataacatagcatattattaggaaagagaaccataagattatttccatagtgctaagaaaaagcttctgacaattcagcacccattcttgattaaaagacacacaccgacaaaacagaaattgatggatatgtaattaatcctaaagtcagcatctttacttacctttcttaatgtgaaacgcgaatttccactatagtcagaagcaaaacacagacactacccccactactactgaacattattacttcttaacattaacattctatttagccaaatcaattagaggcataagaattagaacagtagtaaaactatatgtgcaaatgagacagtgtatctagaaaaacaatgaatatctccacagcaaaaaatttagtaaagaagcatataaaatataaagataaaatgctcagaaaaaagcttaagaaatttgaaaaacataaatgaagaatgttttaaaacactcttgaacggcaaaaaggtaaacaataaaaagatattccttgttcttgggctagatgactcagtaaggatcagttctccttaatttataaatttcaataaaattacaaactccaaaaatatcaaatttttgtttttttatggagctaggcatgatgataccaactccacatggaaaactgaacatgcaagaatagtcaataaaacaccaaaaaagaaaagccacaggaggaatatcccagacagatattaaaacatacaaccgcatcttaagttaaaacagggttgtatcgcacatgagtaagaggacagagaccaatggattagagcagaaaattcagaattagacctg

SEQ ID NO: 682836 - DNA, 1462 bp, Homo sapiens
atcaatatgggccacattagtgatagaaagcttaaactcaccaattttacataataaatagagaaagttacctcttacaaaagcaacaggcccatatggttttactgagtattctacaaaccgtcaaagaccagctaagtaagtccaatatcactgatagcaccacaaaagactatttcaaccaatatcacacgataatatcgacgtaaaactccaaaagacaataacagaatacaatctcattaaaaatgttacacaccatgggccaggcacggtggctcacacctgtaatcccagcactttgggaggccgaggtgggtggatcacgaggccaggagatcgagaccatcctggctcacatggtgaaaccccgtctctactaaaaatacaaaaacaaaattagccgggtgtggtggtgggcgcctgtagtcccagctactcaggaggctgaggcaggagaatggcgcgaacccaggaggcagagcttgcagtgagccgagaytgcgccactgccagggcgacagagcgagactccatctcaaaaaaaaaaaaaaaaaaaagaaagaaaaaaaaaatgttacacaccttgaccagctaggatgtacttcaggagtgtatatttgctcaacagtaggaaacgtatcaatataacatagcatattattaggaaagagaaccataagattatttccatagtgctaagaaaaagcttctgacaattcagcacccattcttgattaaaagacacacaccgacaaaacagaaattgatggatatgtaattaatcctaaagtcagcatctttacttacctttcttaatgtgaaacgcgaatttccactatagtcagaagcaaaacacagacactacccccactactactgaacattattacttcttaacattaacattctatttagccaaatcaattagaggcataagaattagaacagtagtaaaactatatgtgcaaatgagacagtgtatctagaaaaacaatgaatatctccacagcaaaaaatttagtaaagaagcatataaaatataaagataaaatgctcagaaaaaagcttaagaaatttgaaaaacataaatgaagaatgttttaaaacactcttgaacggcaaaaaggtaaacaataaaaagatattccttgttcttgggctagatgactcagtaaggatcagttctccttaatttataaatttcaataaaattacaaactccaaaaatatcaaatttttgtttttttatggagctaggcatgatgataccaactccacatggaaaactgaacatgcaagaatagtcaataaaacaccaaaaaagaaaagccacaggaggaatatcccagacagatattaaaacatacaaccgcatcttaagttaaaacagggttgtatcgcacatgagtaagaggacagagaccaatggattagagcagaaaattcagaattagacctg

SEQ ID NO: 682837 - DNA, 914 bp, Homo sapiens
gaagtactcaactgtcttgagaaaggaactgagctgttctgttctggtgtagattgccaaagatcatgtttgcaaatrctgctaatcttatctgaacatattaataaagtccctaaatcctcctattaagaaatactaccactgacagtgcagctggctaacatttgcttcttaaatgctatcaccactctctttttttgtccaccccccacccgctgctgccccaacccccaagaaaaaaaatgatggctgcttcctggaatgtttagctaccaaaaaaatctctaaagcctcataagacattgtgagagaacgaagatgaaagtcggggtgaaatgaacaattaagataaactatgcagaattctttttaaagaacgagcctcataaagctaccatgttaggaccacaaatcattctgcagattatttcccctctatctgtaagcaaagaggtgagaggattaggtcatttctaaggtctcctctcatcatgatgtcctgtatttattgaaagaggttttaaacgcattttttcttttcttttctttttttttgaaatggagattagctctggttgccaaggctggagtgcagtggtgtgatctcggctcactgtaacctctgcttcccaggttcaagcggttctcctgcttcagcctcccaagtagctgggaggctaccatacccagctaccctacccaccaccatacccagctaattttttgtatttttagtagagatggggtttcgccatgttggccaggctggtctcaaactcctgacctcaggtgatccatccgccttggcctcccaaagtgttgggattacaggcgtgagccactgcgcctggctgcattttcttttatttactctatttcattagacatttcttgcttgtgtgcctaagttagct

SEQ ID NO: 682838 - DNA, 1392 bp, Homo sapiens
  misc_feature 853, 868, 883, 897: n = A,T,C or G
caaaaaagatgttaaaaaattgccaaaaggtataggaaaagatgttcaacatcactaatcatcagagaaatgcaaatcaaaaccacgatgagatataacttcacacgttaggctattattaagacagttttgaaaaatgttctctacattgcagattgcagcaaattgctcaagttcgccatccagcttacctttcaccatgttaactagaagagcagctgcagaactgtgagaaacaaatgacctattagcatacccatttctgcccagcaataggagaagattctctcttctctttggtaattccaatggtcagatgttgaaaaacattattgagtaaggaactatgcaaactgatatatctattagtacaactgagatctatgatttaaagaataagaataaattgaaaaatatgttctaaaaatcatttctaagtcagtttcaggtcattccctaccaaatatttcctttcactgcacccaaaactagaattattttgtgatgyataatttctagttatatgaaatatataccatgcagctaactctcaatttatggaaataaagaatgactgaataaaccagggcctcaggagaatgattaaggtggtcaaagagccgtcttatgaggtatggttgaggtatcagttatacaattgttccttggtatctgcaggagattagttccaggacccttgacaaataacaaaatctgcaaatactcaagtcctttatataaagtggcacagtatttgcatataacctatgcacacccttccataaactttcaatctctctagattgtttataaaacctaatacaatgtaaatgctatgtaaataattgttacnctgtattgtttttanggggatctttttatnggggaggttatttntattgtgtggttttttttcaaatatattcagcctaaggttggttgaatccactgtcatggagggccaaccgaagttagtttacagacctagggaggacagggtattagtctttgagcattatgcttgtcatgtggaaatataattagacctgttccatactatgttattcagaagagtagatcaaggacatagaggtgaaaattacatgggagcagttagctaaataattcaaaatagggttagcaataaatgacataaaaccaaacatataacaactgagaaaagagagattttttttctccctctctcaaataaacaaaatctgtaaataaacagtccaggttctttgtaagaccccacaatcaaagacctaggcagttgacacctcaatatatgtcttctacctcatgatctaagatggctacttaagttctagccatcgtgactgcattccagtcagtaagaaaggaaaaaaaggggtgggggcaagaagg

SEQ ID NO: 682839 - DNA, 606 bp, Homo sapiens
ttaaaacaagccaatgttgatttagcttacaattctatgagttgacagtttgggctggctttgtctgaatggtttgtctgcatctcagccagacccaggtatccagctgaagattgtgttcagagttggctagctgtctcataaaatccaatagattaacctgggcttcttgccagagcagttctgagtttcaagagagcaagagagaaagctccaagacttctggaggcctagtctcagaactggcataatgtgtctgctgtaacaatagctcaaaacatgtcataaagccagtccagattatagcagtggggaaagaggctctatcacctgatgtagagttggttgccaagcattgtggccccttttgcaatgttttatacctagaattattatcattctctgtattttcatgtaatctgtaatgyatacatgaatgttgaaatgatacatttgttttgattttatgtatgtttatgtataaaatttagatgtgaaaacaataaagaaattgtccattacatttaaatgttattatatttaaatgtaataaacttacatttaaatgttattatatttaaatgtaataaacttacatttaaatgt

SEQ ID NO: 682840 - DNA, 588 bp, Homo sapiens
aaatgttactagagagtatcataacacaagtgtgctagacagttcttacattgctataaagaaatacctgaagttaggtgattataaagaaaaggaatttaattgactctaaatggttctataagctgtagaagcattgttctggcatctgctcagcttctagtgaggcctcaggtagcttttactcatggcagaaggtgaaggaggagcaggtgtctcatccggtgagaggaggagcaataccagggaggtgccacatacttttaaactctcatattttacaagaactcactcactgtcacaagggcagcaccaagtcatgagagatctgtgcccaggtcatgagagatctgcgcccaaacacttgccaccagatcctacctccaacagtgtgggttacctttcaacatgagatttgttgaggacaaatacccaaactattggaccaagtatttcatggacagagcaatagtcaggccatctcaaatatgaaagaacctatatgtcacctgttaaccactggtaagaaaaackgaaacaaactgcatattaaaatttaactgataacaatcctcatcgtgacaattc

SEQ ID NO: 682841 - DNA, 627 bp, Homo sapiens
tattaaaatgcaaacattgtaggagatgtaacagagcaaccttatgtttcatttagatatcaggcttatatttctatgaatagcttttgtaaatggtcatcagttaaagactctggaaacactggaggtagtgattttcaaaatcattaacagtttgtcatgaatactggccagcctgaggggaccctggcggtaattttccctatggccacaccagtctatcaggtgaaccttgtcattggacacgaaataactgaggagagaagctcaaggcagtaagtgataaggaggaatttggagttactagagatagagtcactcatttttgtttactgacacctggcccaaacgcaactctgattctaattttaataarttatacaatcaagagtcactttcactctgaaatctaaaagattgcattcaacttttaaattatttgggaacatagtcactttcccatacattccagaagtaactttttatttgaaactctattaaatgtgtattttgctccttaactgactagagttctgagcgggcttctagctgtgcaagtaatctttgatgcatatgcttattcttattttaaattatgttatcatttcatatttttattcttatttt

SEQ ID NO: 682842 - DNA, 627 bp, Homo sapiens
tattaaaatgcaaacattgtaggagatgtaacagagcaaccttatgtttcatttagatatcaggcttatatttctatgaatagcttttgtaaatggtcatcagttaaagactctggaaacactggaggtagtgattttcaaaatcattaacagtttgtcatgaatactggccagcctgaggggaccctggcggtaattttccctatggccacaccagtctatcaggtgaaccttgtcattggacacgaaataactgaggagagaagctcaaggcagtaagtgataaggaggaatttggagttactagagatagagtcactcatttttgtttactgacacctggcccaaacgcaactctgattctaattttaataaattatacaatcaagagtcactttcactctgaaatctaaaagattgcattcaacttttaaattatttgggaacatagtcactttcccatacattccagaagtaactttttatttgaaactctattraatgtgtattttgctccttaactgactagagttctgagcgggcttctagctgtgcaagtaatctttgatgcatatgcttattcttattttaaattatgttatcatttcatatttttattcttatttt

SEQ ID NO: 682843 - DNA, 1198 bp, Homo sapiens
ttatataaaataaaacgtgatgactctttaaaaatagttttaaaatttggctgtactccacaaacatgaatctatgctgtgccttctaagtacactctcgcatttcttccatacagacaatgcaatgcaatgacatcatttcattatatggaatgttggaaatatgcaaatagaaaggtcagcagaagaaaccactgcagaaagaagcttggtcaggacagcacagcaggaaacagattcaacatccttgtctccgacctgtgtttgcctatgaacccatcctaktcaccatattgaggtctgatcctaccagcaccaaaagagtgaagtaagttatacagagaatggagaagtgtattattataaagtgccagaaattgttgctgcaggattactacggaggattaatctagtaggtagcctaatgttttcccttcataggttaagttgtaaaggatgttaagataccaggtcaagcatgccaaattacttcccaaaattgtagtacggctggcaaaggatattttgaactcctattttccaaattctaactaacaccaatagggaattatgcttaggtgggaaaaagatgaaatggaaagcattttggaaatgaggggacacgagaaaagaggaagagattcattcaacacacagctaccaatatccataatttggctactcaagccacactgatcctacctgaatttcacaaccaatatatttggcttaagaagaaagcagctaatctgacgaatgcttacagtgttgaataaggagattgatgcttttttgtaaagccacatgcacacggaatactgacgtttcagaagaaaattcaactgttgaaattctaacacattggagttggcaataaagattgtcacatagcccaaattagtaagattcttagctctcctttttcagaaacaacacaaatgattgtctagcaagagaatctctgccagaaagctgacaaaatgctgcttttgcttcatttttggaattttcaaatttagaatagtaaaagaagaatttggccacaaattactgacctctttgttttggcaacataaatcaatggtgagaagtaaaacaggcaatctgcgaaaacaacaaagaaaaccaagttaaaacaaatattgattgtaagtggagaaatgcaatggagaaatcaatcactattataattcatcat

SEQ ID NO: 682844 - DNA, 1198 bp, Homo sapiens
ttatataaaataaaacgtgatgactctttaaaaatagttttaaaatttggctgtactccacaaacatgaatctatgctgtgccttctaagtacactctcgcatttcttccatacagacaatgcaatgcaatgacatcatttcattatatggaatgttggaaatatgcaaatagaaaggtcagcagaagaaaccactgcagaaagaagcttggtcaggacagcacagcaggaaacagattcaacatccttgtctccgacctgtgtttgcctatgaacccatcctagtcaccatattgaggtctgatcctaccagcaccaaaagagtgaagtaagttatacagagaatggagaagtgtattattataaagtgccagaaattgttgctgcaggattactacggaggattaatctagtaggtagcctaatgttttcccttcataggttaagttgtaaaggatgttaagataccaggtcaagcatgccaaattacttcccaaaattgtagtacggctggcaaaggatattttgarctcctattttccaaattctaactaacaccaatagggaattatgcttaggtgggaaaaagatgaaatggaaagcattttggaaatgaggggacacgagaaaagaggaagagattcattcaacacacagctaccaatatccataatttggctactcaagccacactgatcctacctgaatttcacaaccaatatatttggcttaagaagaaagcagctaatctgacgaatgcttacagtgttgaataaggagattgatgcttttttgtaaagccacatgcacacggaatactgacgtttcagaagaaaattcaactgttgaaattctaacacattggagttggcaataaagattgtcacatagcccaaattagtaagattcttagctctcctttttcagaaacaacacaaatgattgtctagcaagagaatctctgccagaaagctgacaaaatgctgcttttgcttcatttttggaattttcaaatttagaatagtaaaagaagaatttggccacaaattactgacctctttgttttggcaacataaatcaatggtgagaagtaaaacaggcaatctgcgaaaacaacaaagaaaaccaagttaaaacaaatattgattgtaagtggagaaatgcaatggagaaatcaatcactattataattcatcat

SEQ ID NO: 682845 - DNA, 589 bp, Homo sapiens
tggtgaaatctttgaagcgagctggtaatgtagtgctagtatttgcagattgataggcatgagtgctgataaaaggagagagaggtcattggagcaggctttgatgatggatgtgactagttgatcaagggaagaaaaacaataggctggagaatggaaagaagatgatgactgctggagtaagtaattaagattcttatcctctggtgacattaggcagggttctggaaatcttcatgccttgggtggatttgcagactaaactcaataatttattgttcatttttgttctccttacattatttgagytccttaaccctgagaacttaaagaagaatggaaagctatgcattaaagatagaaatagtggcaggaatattttcttagcttcttggtttcctgtacttggctccaggatgcagactttcacaaattcaggcacactttctttagggaggaatgtggcttagagttaaaagatgttaacactccttggggactattcttatagctgcctgagtggcagggtactgtgaccttgaagagaaccaaggagaaagaacaggtttcaggagataggtatcatgcc

SEQ ID NO: 682846 - DNA, 1264 bp, Homo sapiens
agtgtgaaaacaggaaaaagggggtttcgaagctgaggcggtccaagccacccacgatcactttgaaaaaattttcagcattcatcttaggaaataagccttcacatttcttgctcacattctgcatggcagcccaaaagtgggggattgaggaagatgattttacaattcataacttggctgggtgtggtggctcacacctataatcccagcactttgggaaacggacacaggaggatcacttgaggccaggagtttgaaaccagcctgggtaacacagagagacctcctctctacaaaaaaaaaaaaaaaaaaaaaaaaattatcccggcgtggtggcacgtacctgtggtcccygctactgaggaggctgaggtgagcagattgcttgcgcccaggaggttgaggctgcagtgagctgtgattgtgccatggcactctagcctgggtgacagagtgagactctgtctccataataataataatattataataataataatttttaaaatgtttaaaaattaataaaattcaaaagtgcttaagtaaggccagattagtttgcaagtccagtactaagttggctcagtggtggagtagggtagaagtgatggggaggacatgaaggagagttgtcatgatgatgatttttttttattaaatagtgtttaaataaccttttagggagtttattttgactaattgaaagaatgttcaaatgcttcaactttgatatcgtattggaacaatttggagtaagattggtagaaatgttaaatctgtgggttctgatggccctaggggaaaacagtcacagaaaattaacttaggatgcactctacccataacccagttcagccaatatactctgcagttgaggaaatcctatcttagaaaagttcacctcccaaaaatggaacaaccaagactagcacctgagttatttatcttcatatttggtggtggtcttgttctaaaagacctaaaacaattattccataacattgcattacaaaataagccatgggctctaccacaagaagctgatgtcttgctggatacaaatgaatttgattgcaaggttccccagtccctaagaatttaaagggaatactttaataggatttctttgggtaaatttttaagaagaaagtttatgagaccacttaaaccacttttcccaaagttaagtaaattttttttttttttttttttaacagagggtcaaacagatcatctggaatagtggtacgtttttgagcaa

SEQ ID NO: 682847 - DNA, 1264 bp, Homo sapiens
agtgtgaaaacaggaaaaagggggtttcgaagctgaggcggtccaagccacccacgatcactttgaaaaaattttcagcattcatcttaggaaataagccttcacatttcttgctcacattctgcatggcagcccaaaagtgggggattgaggaagatgattttacaattcataacttggctgggtgtggtggctcacacctataatcccagcactttgggaaacggacacaggaggatcacttgaggccaggagtttgaaaccagcctgggtaacacagagagacctcctctctacaaaaaaaaaaaaaaaaaaaaaaaaattatcccggcgtggtggcacgtacctgtggtccccgctactgaggaggctgaggtgagcagattgcttgcgcccaggaggttgaggctgcagtgagctgtgattgtgccatggcactctagcctgggtgacagagtgagactctgtctccataataataataatattatwataataataatttttaaaatgtttaaaaattaataaaattcaaaagtgcttaagtaaggccagattagtttgcaagtccagtactaagttggctcagtggtggagtagggtagaagtgatggggaggacatgaaggagagttgtcatgatgatgatttttttttattaaatagtgtttaaataaccttttagggagtttattttgactaattgaaagaatgttcaaatgcttcaactttgatatcgtattggaacaatttggagtaagattggtagaaatgttaaatctgtgggttctgatggccctaggggaaaacagtcacagaaaattaacttaggatgcactctacccataacccagttcagccaatatactctgcagttgaggaaatcctatcttagaaaagttcacctcccaaaaatggaacaaccaagactagcacctgagttatttatcttcatatttggtggtggtcttgttctaaaagacctaaaacaattattccataacattgcattacaaaataagccatgggctctaccacaagaagctgatgtcttgctggatacaaatgaatttgattgcaaggttccccagtccctaagaatttaaagggaatactttaataggatttctttgggtaaatttttaagaagaaagtttatgagaccacttaaaccacttttcccaaagttaagtaaattttttttttttttttttttaacagagggtcaaacagatcatctggaatagtggtacgtttttgagcaa

SEQ ID NO: 682848 - DNA, 1264 bp, Homo sapiens
agtgtgaaaacaggaaaaagggggtttcgaagctgaggcggtccaagccacccacgatcactttgaaaaaattttcagcattcatcttaggaaataagccttcacatttcttgctcacattctgcatggcagcccaaaagtgggggattgaggaagatgattttacaattcataacttggctgggtgtggtggctcacacctataatcccagcactttgggaaacggacacaggaggatcacttgaggccaggagtttgaaaccagcctgggtaacacagagagacctcctctctacaaaaaaaaaaaaaaaaaaaaaaaaattatcccggcgtggtggcacgtacctgtggtccccgctactgaggaggctgaggtgagcagattgcttgcgcccaggaggttgaggctgcagtgagctgtgattgtgccatggcactctagcctgggtgacagagtgagactctgtctccataataataataatattataataataataatttttaaaatgtttaaaaattaataaaattcaaaagtgcttaagtaaggccagattagtttgcaagtccastactaagttggctcagtggtggagtagggtagaagtgatggggaggacatgaaggagagttgtcatgatgatgatttttttttattaaatagtgtttaaataaccttttagggagtttattttgactaattgaaagaatgttcaaatgcttcaactttgatatcgtattggaacaatttggagtaagattggtagaaatgttaaatctgtgggttctgatggccctaggggaaaacagtcacagaaaattaacttaggatgcactctacccataacccagttcagccaatatactctgcagttgaggaaatcctatcttagaaaagttcacctcccaaaaatggaacaaccaagactagcacctgagttatttatcttcatatttggtggtggtcttgttctaaaagacctaaaacaattattccataacattgcattacaaaataagccatgggctctaccacaagaagctgatgtcttgctggatacaaatgaatttgattgcaaggttccccagtccctaagaatttaaagggaatactttaataggatttctttgggtaaatttttaagaagaaagtttatgagaccacttaaaccacttttcccaaagttaagtaaattttttttttttttttttttaacagagggtcaaacagatcatctggaatagtggtacgtttttgagcaa

SEQ ID NO: 682849 - DNA, 655 bp, Homo sapiens
tgaaagaagccttgtggtcatgaccatgcaatagtgctttattggacacttgtggatcaaggatctgaaccgaaaacagaatccagggaaaggtgctgatgatcctaaaaactcctgatgaccctaaaaactatcttttttcagaatagaaggctagttttgatacagaaatcaagagcatgggaaggaaacttctgtttgtttgtcacctgctctgctggcttctcatatggttcaatatttctcctccattaggaatactgtaagatgacgccttgggagcagatggagaatgtctttgtctgcaacactgaagccacagagcagtaagccaacactaacactggggacaaccatccacatctgtgtcactcccacagatgctgagaagacaactcccaatatggggcaaatgcatggacttgggaaatgtcctttcttgtgggagaagaaaaagagaaagtacacttctgacacattcagcaaacagggagttaagcatactgggccrccttccctaatgtgtgtgtagtgacacagtcaaggaggtcaccatggatacatctggctgcatctgcctgagttatttgtattgaacagattgctacagggtgttttttttctggtcccattatgtgcatgtaatgccaattaa

SEQ ID NO: 682850 - DNA, 1183 bp, Homo sapiens
gttcagtttcctcccccataaaatttttaaaaatgaaaatatttaaaataatgtaaataatcagtcccaactttcagggttgttgcaaggattcagtgatgaatcagcgataaatcaagtccctgacaaatggaagatttgcaataaatgttggtttacttctcctatttggcatccttgagaaagaataagaataaaaccaaaatacagatttgactctgcctggcaagcaatcaagagaagaggatcaacatgtggcctgaccagagaaaagagaagagatatgcaagaacttcacaaaatgagttaagaacagggcatggcgccacatgttcttgggccagccccagcagatgggatcctggacagcaggactcaaacccaaactttgggacttcagtccaaccctcttcccacgtttcctccmtaaatcctgcttccacatgcctctgttgtttcagttttgcattctctccctctccatttaatgatagggctaaaaatagtttgcaattaaatacacaaatctattaacttgaaacaaaaaaggtaatgtgcttatataaaataatttctatatcacaagccaactgtcaaagcaaaatgaatgagccagcaaagaggtcatttgcacctgtaaataattctacatggaattgccaatgtacagtgatggaaacactgtcagggcagagggggactctatgctgaaaacatacatgacaggtatccttcctccccactccaattttggtggctgttggtcatctaaacagtacattccaacatgttctgctctctgtgccctggattttgtaggataattcttattttacatggtgtaacagtccccttgccagagtagcggaagctagaaggcccttgacattcattggtccttagagcaactgaaggtcagaagcctgcccctgggtgggtgtgacaatgagaaactctcaccttggccaggggaggagagatagtggagggcatgaccaggagccccagcttcatggcttctgaagagtgtaaactagggtatgcactgaaatacagaccaacatgtgtcttcacgcacactggcacgtccctgcacactcttgggcaaatattttatttgtctttcacaagataactaacacacaatgctacaaattataaagtttttttaaataaatcaaat

SEQ ID NO: 682851 - DNA, 609 bp, Homo sapiens
gagttcatgttctttgcagggacatgaatgaagctggaaaccatcattctcagcagactatcacagaaaaccaaacaccacatgttcttattcacaggtgggaactgaacaatgagaacacttggacacagacagggaggggaacatcatacaccagggcccgtcagggggtgggggactgggggagggatagcattaggagaaatacctaatgtaaatgacgagttaatgggtgcaacaaaccaacatggcacatgtatacctatatatcaaacctgcacgttgtgcacatgtgccctagaacttaaagtataataaaaacaaaccattaaaaaatagttaatayaatataaaacaaaatttctgtggggataaatttctaaagcttgcttattaccaacaaggggaatgtttaaaagccagacattttagtatatcttttaggattttttttttttccagacagagtctcactctgttgctggagtgcagtggtgtgatctcggctcactgcaaccttcgccccctggcctcaagcaatcctctcatctcagcctctcaagtagctgggactacacatgtgcaccaccacgctccgctaattcttta

SEQ ID NO: 682852 - DNA, 609 bp, Homo sapiens
gagttcatgttctttgcagggacatgaatgaagctggaaaccatcattctcagcagactatcacagaaaaccaaacaccacatgttcttattcacaggtgggaactgaacaatgagaacacttggacacagacagggaggggaacatcatacaccagggcccgtcagggggtgggggactgggggagggatagcattaggagaaatacctaatgtaaatgacgagttaatgggtgcaacaaaccaacatggcacatgtatacctatatatcaaacctgcacgttgtgcacatgtgccctagaacttaaagtataataaaaacaaaccattaaaaaatagttaatacaatataaaacaaaatttctgtggggatraatttctaaagcttgcttattaccaacaaggggaatgtttaaaagccagacattttagtatatcttttaggattttttttttttccagacagagtctcactctgttgctggagtgcagtggtgtgatctcggctcactgcaaccttcgccccctggcctcaagcaatcctctcatctcagcctctcaagtagctgggactacacatgtgcaccaccacgctccgctaattcttta

SEQ ID NO: 682853 - DNA, 609 bp, Homo sapiens
gagttcatgttctttgcagggacatgaatgaagctggaaaccatcattctcagcagactatcacagaaaaccaaacaccacatgttcttattcacaggtgggaactgaacaatgagaacacttggacacagacagggaggggaacatcatacaccagggcccgtcagggggtgggggactgggggagggatagcattaggagaaatacctaatgtaaatgacgagttaatgggtgcaacaaaccaacatggcacatgtatacctatatatcaaacctgcacgttgtgcacatgtgccctagaacttaaagtataataaaaacaaaccattaaaaaatagttaatacaatataaaacaaaatttctgtggggataaatttctaaagcttgcttattaccaacaaggggaatgtttaaaagccagacattttagtatatcttttaggattttttttttttccagacagagtctcactctgttgctggagtgcagtggtgtgatctcggctcactgcaaccttcgccccctggcctcaagcaatcctctcatctcagcctctcaagtagctgggactacacatgtgyaccaccacgctccgctaattcttta

SEQ ID NO: 682854 - DNA, 844 bp, Homo sapiens
gccagctaaatggggcttaggcatacagaatacccttgtgttttcactcaatgttcaggatacatcagacagttcaaacacatccacaggtgaaggttagaaactagagagagctcccggtgctctggaagaggcagtgtgaccagaaatgttctttgtcacctagaaagatggtgacctctggaatgctgagcaaataagggaaactttgatgtcaggcagaaaggatgtgttggggtataggagcacctattccttgatctagctgtaccacagggccccagtgggaagaggcgctttaggattcacatcctaggtgatgtgtctccaatcttaatgccatgcccttggggstgtatctaggaagtggcagctccctgcattcctgtctcccatttacaccagaaccttactaaggtagaagagttcaagtctgtggttaaaccagctaggtcaccattgatgatgtgagctctgtgttctcatttctcatttctgaactctatggtaactgcgaagatggcatttacaggagaaatgttgcccagcagtggccaaaatgttcctggctttacacaacgctgaggtcctgaggtgcctgtgaattacgtcctgtcccctgcccttgtagagttgtgtttattagatttccctttaatttgattgtctgtcttctcccttccctgctccatgaaatccagagttgtcaaagtggtgaggatgaagaagaagatgaagacaaggaaaaaacattcgaagtaagttctcatgaagaataaaaatagagccaccctccaaggccaataggccaggccttcagaggtgggtgctgacattagcctat

SEQ ID NO: 682855 - DNA, 654 bp, Homo sapiens
atagacttcgacaggagagagctgctcagctggcaggagagcctgccacaaacccttgaacataaatgtcctgccctccacttccagctctacgtactaactgtaaaataatgatgtggcagaaagtgaagtgcaaagactgccaaattctaagaaagaacctggtttcatgccttttaatccttatgagtcattccttggtctgcgccaagccctgtgctttacagcaagaatacagatgtcttcattgaactgcatctcattagctggacctaacagagtgcaaatttctttccaatgccatttgaactcaatgcccagatgcttttttcccctgggcccgtgcagatgaaatcttgggctggtttataactttgaacacccagaatattcccatttcagtttaagattccctctgacttatctaattgttaggctctcttcaccttcagcctgagaaatgggyaccatcaatttctcctttctcacccagcttcacacccaggccctccagactcagtgggtgtctgacacctctacagctggagtccttcagcaatgggccccctgggctcagcagatattttgagctggccatttcttctgtgagacaatcttgtgttttctcaggaattcccctgcagaagatctctg

SEQ ID NO: 682856 - DNA, 633 bp, Homo sapiens
ggtctgttcagctttcatctgagttttaagacaatgagttgtcttttttcccctgaattttcaacacctggaaagagcttaccacacagtaagaactcaataaatgttgtatgaataaaagtttgctatgataaaccttgttgccatgacaacagcgtagaaagggatgtgtagaatatatatattttttctatcttaaactttccctccacctgaaagccaatgagaaggaggaagaacaggagggaagcctgaaaacagaattttaaaaatagaataatttttctaatgtcttctccatttttccctagtagtttcttttttatttcatgtgttgattttgaattcttcattcttattttcttacaattcttcttgttagttctcartacatctatgactgattacaagtagtgtgttctcatccccattcctcctctcctcaattttcctcttcctttctcatccgtgtttctttgctttaactctaatctatgaaaattatagtatccattggataaaaatgctttgactatttcatctaaaattctcagactactgactttttttttttttaagagttataaaccacctcagaaagatcctcccaggagtaagcagtgacaatttgtt

SEQ ID NO: 682857 - DNA, 920 bp, Homo sapiens
atgtgcagaggttgtcaaatggcatttcctccttggtctcaaatcattctgccaacaaaatgaatgcaaaatcctttcgtttacaacatcagtatgggtgttaattattggtgaatagaattcaaagtcagaatcttttctgttaaatattgatagatattcataccactcactaatgagatattaatctcgcaaaaggattgttctggaagaagcttatatttaatctgtgtaacaaggtaggtgtgtcatttgttttattcactttcaatactacaaacatgaaacaaacactttggctaaaattttaaattgaatggctggggtaagaaacaccaggaaactgtttagagagagagactgcaaagatggttatgaatagtacataagaggaaatattaaaagctacaaaacatgttatcaacactaagtataaatttacatggttctctagatgcacttttaattgaattagattattattcacttaagcctagaggcctgcacagtgaagatgagtggtgcagcagagcactaataatagatgtttgccatgatttcgtgcttctcatttgcatatcacctattgccaaaaagcctgggaatactgaaaatggattcctacwatacgggtagataaggccattcataggacgcatagttgctggagatattcttccagacaggctttccattgaggaaagtttgaatctttccattctggatgttggaacagaaaaaatacattttgtgagaggaaaacagttttagggctacccaacagaaggcgaactaatgtgcccgtcatgtgttaagaatctgtgatgatttagattgtagaggtttattttctctacaaataaagattatataagcatttcatgtcaactgtgtgaattggctccatggaaaatgtgcag

SEQ ID NO: 682858 - DNA, 1431 bp, Homo sapiens
cctcttgcttggattcctgctgtagttttcaaactggttttctcttgcctatatacctcccaccctggaccttagtcttagtcttcaccataactttcaaaagatcactcagcactcagagtgatcttttaaaaatgcatttgggaacatgtcagcaccagctcaaaactctccagtgagtttccattaaagttagaatggaatccaagttcctcatcataggacatgtcatctggcccctgcctacttctaattcatctccccctgctctcctcctttcccattaagcatcagctgtctccctggccttcttgcagttccttcaatgggtcaaagtttttccagcctccagacttttccatctgcagttcacacttcctgggacactgtcaacatatggcttctccatagttgttcaggtgcctgctcaactgccatcaccagcctccacgctagtactctgtatctacttaccctgcttcaatttcttcatagagcttcatattaataaaaaatattaattattagtttttagagatagggtctcactctgtcacccaggctggagtgcagtggtgcaatcataactcactgcagccttgagcccctgggctgtagcaatccttctgcctcagcctgctgagtagctgggactataggcgctcaccaccatgcctggctaattacaaaagggatttttttgtttttattttttgtagagatgagggtctccctatgttgcctaggctggtcttgaacttctggcctcaagtgatcctcccatctcacctcccaaagtgctgagattataggcatgagtctctgtgcccagcctagagcttgttttctaaaaacttattttttttttattttctttctctcccactaaaataggagcttcctgaagacagtgatttttgtctgtatgttttacattcaaccctcagtgggtaagaatggtactgatagatagcataacagcccaaaattttaaaataacagccagtgggtggtattggtgttgaggagatgtctggttaggcaatgaattctggctaccagaaagaattccccacattttgggctggagagacaagtggtgttcagtctgggcatttctttctgtggtgacttattaaaatgaatagcgactccatctccatttcctactctgtggtctttctcatatttggatgctgtgcttttctggtttgaaggaccgttgcatatttttttgrgtaaaggggagggggtttcatcttgatgagacacttactccttgtttggtaggctgaatagagctttagtggctcaagttccctctctctgtgctcatggccaccaggggacattgttgagctgtttaatgttcattgagatgcctattttccaactctacccactttaaaggactcgtaattttaaagaagc

SEQ ID NO: 682859 - DNA, 663 bp, Homo sapiens
gggcataaataaactgcaaaaggacagctctagacattgcaatacccactcagggactgcattacatgaaaggaaatggacagatgaaacttgtgtcaatgrtcatttttcttcttcacacatcaaataaagacatctccagagcagttactatggtgtgaaatgtcattttcttggtaattaatgagtaacgtctaagatctagagagagagttcttggaaatctgaacgctttgaaaacccttgtgggccataaatcactgccttgaattttcacaagcctttcacatttcaaaagtagtatgtatgctagggtccagagttgattttttcctccctatatgaattcttgtgtttgtaggttgtagttttttagaatagagttagcccataatagcttttacagcaataaaggcaattttattgaaggcttgctttattgctactgaatataacacatttattatctacttttatttctctgagcaaagtctctgagcaataaggaaatctttgcaaatctgtgcattccaaaagttcagttcagtgcactgagagtaccatggataacatattcacatccataaaaaattttgaaccctacaactgcctagttagggtagataatattaatttcttttgtagaagaagagggtatccctc

SEQ ID NO: 682860 - DNA, 602 bp, Homo sapiens
atagatactatcattagctccattctgtagattagaaaaaaaactttagaggaatcaaatctcctgaaaaggaaacactgctcctaagtggcagaaccaggttaggaatccagctctgtttggctctggagcatggattcctcactactattcttattttatctcttctgctcaaaacctaaaagtaaataaagtctaggggcttatcattcaaggccattacccccaactgccattccaattatattttmtttctttctttttttttgagaaggagtctcgctgtgttgcccaggctggagtgcagtggcgcgatcttggctcaccactgcaacctccacctcctgggttcaagcaattctcctgccttagcctcctgagtagctgggattacaggtgtgtgccaccatgcctggctaatttttttgtatttttagtagagacagggtttcaccatgttggtcaggctggtctcaaactcctgacgtcatgattcgcctgcctcggcctcccaaagtgctgggattaaaggcgtgagccactgcacctggcccgattttattttctactgctacactttcatacatctgattttcagggca

SEQ ID NO: 682861 - DNA, 577 bp, Homo sapiens
gctcatgtctctttttatcgtaccttagtattttgtaaaacctttgaaaactcctttctcttcaccgtgctaaagaccacaaagaaaaaaggctctgtgtccatgctcaaatgagaaytgaggggaaaaaagttagtggagagtaggtgaaggtagaaaaatcacaaatcaagagtaaatgaggtggagtaactcagcccaactgcttctctctatgtagtgattttcctactaggggtaaaacagtgaagcctttacatgtttattttaatgaagaaggcaattccttataagaagatgcttttcatcaaggatattatatgggtcatttcatttaataaaattataaactgcaaatcctctgctataggtataaatgtgggagaatttacatcttacttgctggagattatcagatgtgtaggccattcttgtcaatggccacaacatcctcctggctaaaaacatgaaatagtggtgtattctcatctctgaatatgcatagtttacctaatattaagaaacccaactaaataaaaagatttgcaatatgagcctagtatatgaaagaaatgta

SEQ ID NO: 682862 - DNA, 596 bp, Homo sapiens
atttagggctctgattcattttgaattaaattttgtaaatgaggcttctctacatggggtttctctccatggtatgtttcgttttctttatgtgacatcatgaacaatgatcgaacttagaataaaaatttcagggctgacatatctgtgccaccagttcctagtggtaaaatggtcccccttctttgattttcattttctccccagtaatgtgaaggagctgaatattctcagtggagactgtttcagttctatctgagattttacaacctctaaaatttgaggttamatttaagaaatgaatccctatttcctaaagttaaatgccaaaattttgtagatgaaaagatataatgaatttgcaaaatgaaaaattaggtgagagagagtagtggtatagttagacaaaataggattggccataaatggccaactgcaaagtacatatgggttcattaccctactctgttttttcaaaataagttcccaaaaaatttcaataaaagaaactgttgttcactattgccaccattttgggttgccaagtaaaaacatttttttttaaaaaactgccatctattatcattatcatttca

SEQ ID NO: 682863 - DNA, 694 bp, Homo sapiens
tggaatgcagtggcgcgatctcagctcactgcaaccaccgcctccctggttcaagcagttctcctgcctcagcctcccaaggcacgtgccaccacacccagctaacctttttgtatttttagtagagacagggtttcaccatgttggccaggttggtctcgatctcttgacctcgtgatcccgcccaccttggcctcccaaagtgctgggtttacaggcgtgagccaccgcgccyagcccagtagtgtgtttttaaaggacctaaaagttttaaataaaatgagggccacaaggtgaaattatcctttattaattgttctcttaacatcttcttaaattttctcctgagactggtgagcagagggacccagagcaaggggacttaggggaaagaaggcagtaattagggaggaggaggccaggaggaggaagaaagcatttcatgggattacaggaatgtcccaaaaacaacctcactgtgatgaagtccactaatgctatttcttcacttctgtttttcagaaaacggtattttgtctccgagtacactcccatcgatagcaatatagctttttctgttaatgcaagtgacaaaggtaggcatatttgtccatgaataaaagggttcagatgatgctgtctgtcatgagagcattcgtttcctcagtggggttgcagcagtgggtgaggtggt

SEQ ID NO: 682864 - DNA, 649 bp, Homo sapiens
ctgcactccagcctgggtgacagagtgagactcagtctccaaaaaaaaaaagaatcagtggctaatgcacagtgctttaaatcacacatcattttgaataaatcagtaaaattcatttcagatgttgcagtgttaaacagaactttgatggtttactatagaatagctgtaggacacaataatccatgcaatggtattcatggaggtatttgtttcttgtcctaagtaaccaagctctgacaaatgaaagctcaaagtgccagtgggcaattttgctctttttgccctggatgacaaacaaaactgcttacctgtagcaccacactgcaaaaaatgctccaaaaaacacaagcaaaaacgccatgtaggtgatccacatgatgacatacatggcgtccaagccaaggatcgtccagggagcaggaggaggtgggggctggggcttggggccacagacaatagagcagtcttggcagctacatggtgctgtgacctcatccacagactcgtcacagcctttggtggcattgttcatgggctccatcccayggactggaaaatctacagaaaggaattgtgttgagtacaaatctcaattaaaaacatccaaaattttgtattatacttaaactcaaagaaaagcccactg

SEQ ID NO: 682865 - DNA, 596 bp, Homo sapiens
atctcatctagatcaaatgtgatccttctaagctagacacctcttccctacagtaagaaggcctccatattgttyaagctactggcttcaattttatggctctaatattgttcaagaacattacccacttaaaactattgatgtaataggccaattacatgttttagtgaaaaacagtaagtttgtgattcatcccattttggcttttggaactttgttatcagtacccataacgttttgctttgtatcagtgattagcaactatttttgccataagggctaactaaggggaaaatacaaagcatttaatgccatattattttcctcttcaaaatgaatatagctttttgaaattcgcacaggagaaaatgtatatttgtacaaatttgctgaataaaagaatgtcaatgaggaaatggcattgattttagccaccaaaatgtttatatctggatgttttagcaacagagagctttctaatattttatcctagaatcaggttgcaggctttttgtatagctggtcaggctgtaggcacctgtggggcctgtgagttgctcatttgcttgagacatttatcaaaatatgctgatttt

SEQ ID NO: 682866 - DNA, 674 bp, Homo sapiens
cgagaaaatatttgaggaagaggctttgtgtgaggaggcatgaaggttcctttaaccctgagatgatgtttttccatcttgccagatgctcttccattttcttatgggacttaacttgcttatttaaagagaacagatcaccgctgttagctgggccaaatgtaagcttgaatttttagggacgatatggtatattctgcctatcaagttcttrctccctggggtccattgctctaaagaacagctgattcttgggggtttagccatgaggaatactaagtaatcgatatttggctttcttttattagatgagcccaagaggcaggtatgatttttctaaaagtctacttagctcagttggttagaacatgatgctaatgagaccattatcttggtctcattttcttgtggtttaactttgcatagaagaaatttcttccatgctcacagaatttactcatgaagagaaacagtgtggcctgctcaagacaaagccatcatcacctctgggaaaccaaatcacagagcctaagctgttcctgtgtttctcacacctgttccttctttccattctgggaagaaaagtttagtgacctgtcacagcttgtttcagtaggcttctaatattctccgtgtctctagtctcttcccatcctaataatcctacacatgaa

SEQ ID NO: 682867 - DNA, 611 bp, Homo sapiens
ttcaargtgactcacctttcatggtggatcttttttagaatttagagagaaagtagtttgaccaagatggttaagttaaggtaaatgattgcagtaattattcctaattaaatatcaccagagggatgataggtatatcaaaaaggaaagcctcctgagatggaggcaagtaacgttgtattatagtatccacattttaggaagtgtttgcatagacatggtttaacctggatattttataatctgtatatatcaaaccacatcataaaaagttttattatagttatggggaaaattaatttatgaaattaattaggttaatcaatgattatctacttaacagaaatttttctgatgtgtcattggcacatatatctgacacagggacatatattagagcaaatacatcaactttttctttaatgagtacactgatcagatcatatgtggtttacctgctccagttaccttaagtatgaaataacaagatttggctctgttgatcattaaaggtggcccattaggtctggctacttagaaatccatttgtggttgaggcatttttcacagtggcacctagacaatctcaggaccattatccgggctctgat

SEQ ID NO: 682868 - DNA, 2405 bp, Homo sapiens
tgagaaaagtccctgcctttaaggagccatgaggagatgagacgtctccaggaaccactgcaacatcaggsaggcagttggcaacactaagagggcagtctgggtgctccccagaccctttgggggaaaactcccttctgggaggtgagcagggtcatcgataagcctgccgtttgcaaaaggccttgactgatggtaggatttggctgagaaatgggcagagagccttccagtagagggtcacacagggacagagagtgtgaatcaggggtatcgtgggactaggcattcaaggacccacaaggagtctggggacactggaatagtggtgaccagtcaggtagcacttcctggaagcctcagcccctgattccaccaggaggtggctcggtgggctcctgctctagtctttaaccatcctccctccccttctaattcccacagtcaatcctaaaatccaagaaatcagaagagtacttgggaacagggggcttttttcccccatggagtagttccatggtagagatatgggcaggctggaaataggaactttgaaagggagtaacaaatacattgagacaaaagttaaaaaaaatttttttttgaggcggaatctcactctgttatcgggctggagtgcaggggtgtgatctcggctcactacaacctctgcctcccaggttcaagcaattctcctgcctcagcctcccaagtagctgggactacaggtgccaccaccacacccggctaatttttgtatttttagtagagacagggtttcaccatgttggccaggatggtctcaatctcttgacctcctgatccgccggcctcggcctcccagagtactgggattacaggtgtgagccaccgcgcccaggcaaaaacaaaaaatttttaagcattttgtttatcacaaacaatgaccactagatggcaacatgtgctcacttgggggaaggaaccttgcaaactctaagatgccttcctcttaaccttgagtggggtatctgggtggaggggatccatctctaaatgtaagcaagacttcggcttggaattttgtcccccaccaacatttcttgtaataaatcaggtaacaccggctgaagtcttattggataattgtcaaactcgaagtcatatttgatgtaggactttgctcctgacctctgccacatgtacaggaagtggaaactagaaggaccctgggtgccagctatggggcacagagatacgacagggtggggagttcatgagtcctgcagcagctgcaaacactaggcacctgctgtgtgagagcggccagtgtaagaacccaggatgaacacgtgttccccaaaatggcttaggtgcaagggcgtagttctgaccagaactggacggtgtaaaaaaaaaaatctgacccatctgaagacacaaaatccagaaatgggttgtttttccttttatttctttctttaaagatagcatttccaaagtaggatcaaatgaattgggaaatgctgggctaggtgggtgtctttgctgcagaacttcaaataacattttttaaaatgctattgtgctctgccattttccaaaggacttgggtggggatgggggtgggtgttgtgacatacaatgttatccaaaattacttgaccacagaaccctttttcatacctatttataactcaaagaagccatgctccttacagccccaccttagaaaacctttttagatgaacataacaccaaatatcttttcattttaacttctttacttctaagggaagaattgtctgataccaaacacagaaatgaaattatagatgtctatttattccatcaaaatattttttattgatttatttttgtcccctggggctctctttagactcctctgccttctattaacttcttgtcattgtggtcaaagattactcctttttagtcttgaagacaactacaaaacaacatgattgggaaaaaggaaactgcataccaagtgagcacatgccatttgaaggtgctggcccgatgctgcctgcctgtctgaacaacactgccacccctcacaacttcaaccccaaggtattgttttttgagcctgcaccaaatttttcaaagaatactcagtatggacaaatctctgtccctctagcacagtgccaggcactgatacctaaaaggtgctcagctgccattcattttggtgtagagtgagaacaaaaggaaagaaatgaaggaatagagagagaggtaggggaggcatgctcagcacagcagtcgagaaggaggcgaggaagctgacaccaggggggcccctcccaaggccatggacccggcccctgcaagttggcctcccctcatccccccaggaccccaatggcttcctacttgttgtagagaacaatgtcggg

SEQ ID NO: 682869 - DNA, 873 bp, Homo sapiens
tatcttcctatgaagatatgttgggtgaagagtctcttaatgaatttcaaccccaaggacctcgagttaaattttcctccaccatgtctacaacagaaattggttgcttcttagaaggaaatctgaaaaaaaaattttgtgcaagcagagtcctggagagtttcaccaactagaatcattagctggatttagtctgacccctctcagagactatgggtaggggagaagstgcacggccgtgtctggcctgatacaaatcttattcaaccccttgatatggtgcctttacttctcaagtggctgggaatctccctcaccagagtctcttctttttattttgaaattatttcatactttttaaaaagttggaaaaaaaaaaaacaaggctaaggactcccatatagctttctcccagatcctcaatggtttaaatttattgttttctgtattgccagctcagtctcttcataagcaggcatacatgcatacacatacacaaatatgcccattatcgttattcttttttctgaactatttgagagcaagttgtagtattgctgccccatcaccggaatgctccagggtttatctccccaaacagggacattctcctacagaagatgtgctgcatgcatctaaatcaggaagtcagcgttgctataacactaccttccacaccatagacgccatccagattttaccaactgtcccagcagtgtctgtttttcctgtctgatccaggagcacacattgcacttagctgtcatatccctttagtctcctccaatctgggagagttcctaaatccaaaagagtacaggccttttgttctataggtccctgaggaggctcttcatcctgggtctctggtct

SEQ ID NO: 682870 - DNA, 873 bp, Homo sapiens
tatcttcctatgaagatatgttgggtgaagagtctcttaatgaatttcaaccccaaggacctcgagttaaattttcctccaccatgtctacaacagaaattggttgcttcttagaaggaaatctgaaaaaaaaattttgtgcaagcagagtcctggagagtttcaccaactagaatcattagctggatttagtctgacccctctcagagactatgggtaggggagaaggtgcacggccrtgtctggcctgatacaaatcttattcaaccccttgatatggtgcctttacttctcaagtggctgggaatctccctcaccagagtctcttctttttattttgaaattatttcatactttttaaaaagttggaaaaaaaaaaaacaaggctaaggactcccatatagctttctcccagatcctcaatggtttaaatttattgttttctgtattgccagctcagtctcttcataagcaggcatacatgcatacacatacacaaatatgcccattatcgttattcttttttctgaactatttgagagcaagttgtagtattgctgccccatcaccggaatgctccagggtttatctccccaaacagggacattctcctacagaagatgtgctgcatgcatctaaatcaggaagtcagcgttgctataacactaccttccacaccatagacgccatccagattttaccaactgtcccagcagtgtctgtttttcctgtctgatccaggagcacacattgcacttagctgtcatatccctttagtctcctccaatctgggagagttcctaaatccaaaagagtacaggccttttgttctataggtccctgaggaggctcttcatcctgggtctctggtct

SEQ ID NO: 682871 - DNA, 873 bp, Homo sapiens
tatcttcctatgaagatatgttgggtgaagagtctcttaatgaatttcaaccccaaggacctcgagttaaattttcctccaccatgtctacaacagaaattggttgcttcttagaaggaaatctgaaaaaaaaattttgtgcaagcagagtcctggagagtttcaccaactagaatcattagctggatttagtctgacccctctcagagactatgggtaggggagaaggtgcacggccgtgtctggcctgatacaaatcttattcaaccccttgatatggtgcctttacttctcawgtggctgggaatctccctcaccagagtctcttctttttattttgaaattatttcatactttttaaaaagttggaaaaaaaaaaaacaaggctaaggactcccatatagctttctcccagatcctcaatggtttaaatttattgttttctgtattgccagctcagtctcttcataagcaggcatacatgcatacacatacacaaatatgcccattatcgttattcttttttctgaactatttgagagcaagttgtagtattgctgccccatcaccggaatgctccagggtttatctccccaaacagggacattctcctacagaagatgtgctgcatgcatctaaatcaggaagtcagcgttgctataacactaccttccacaccatagacgccatccagattttaccaactgtcccagcagtgtctgtttttcctgtctgatccaggagcacacattgcacttagctgtcatatccctttagtctcctccaatctgggagagttcctaaatccaaaagagtacaggccttttgttctataggtccctgaggaggctcttcatcctgggtctctggtct

SEQ ID NO: 682872 - DNA, 638 bp, Homo sapiens
atggcacaacacaggcatttatagtggaatattttaagaatgatgggagagttatacacagggccctctgagagcactgagacaggcatttacctcgagatggaggtacaaaaagtgacttcagaaatgaattgacaaatggggaatgtaggaattccagagtgagaatcagaggaatgatgggcaaatgcatggaggtatgagaggaaaagtcagcttgaaagcctgtagcttgagggatctgcagaatcaggtatggttgaatgatggggaaakatatgggcatattagttaggaccactttggcttcaaatgtcataaatatcaagtagaaatagtttaagcaaggaggagatggaggaggaaaagaaggataattatttattatgaagaaccatgctactttagtgagcccaaggacagccataggtctgaatcttagaagcaactgtaattagaaaatttaaatgctgagaggcatttctcttttctctaatatctgttctcagtctttgtctctctctctctgtgtgtgtctcattctttccttgcttacatcatccacttttccaatttacatggcaggaaatatagccaccagctgctttacagcatgcaatttgcacactcaaacaaag

SEQ ID NO: 682873 - DNA, 582 bp, Homo sapiens
tacccttaatttgaaaggttatgttcccccaagctctagtacccagtagagtgaggcttgcaattaagatgaaatcagttatagaaactacagaagctacttttattatacagcttcatttggagtggtttaaatattgaccttactacatatttaaatgatgaaaggggaactctgcccttagtatccctaagcccaaaatatgactcatctcatttaagaatagccaagcaaactctcccctcctccttccctctatacccaatttataatcccaatccaaggaagcagatcttaagaaaagcagggatcacatccagagcatcaaacaaaaaaaacaaatgtggtcacttgttaatcgatgatttaatcacaaaaaattagtttacacaactctttaggatcaaaggcaataataacaggtatcatacttgagcattaattctaaaccaagagctctacatgtatgattttacttatgctttataaaaaacatacaggtgtgataatagcataggaaaatgaggtcaagagaatgaagcaaattgtccaaaaatcacraagttagtaactagacagcca

SEQ ID NO: 682874 - DNA, 617 bp, Homo sapiens
gagtaaggtacacctacatagttcataaggttcccatgaggatcgcattacacagtaagtgtgaaggtgaaagccaaggaagtagtggatgaaagagtcacttcccctcccacagattccagttgaaaaagaagaggctgtaccgctccaacattgtatgagtctgtggaatccccaggctaaaggacactaaagttctcagaagagcaaaaacaaaagaattacaacaaatggaacatgcatttgctgaaagcaaataattttttttctctctctttttttattctcagatttctctgtcttctttatccaacttatttcatttccttcagaattatctcccagtaagaccccagggccaatcattgaaggttccttgggatctccagatcactcattgcttctcttcacctgggatgaactgtcataagctcagcaccagctatcccacscctgagtgttctgacatggaagaagatggcccctgccacagggcagggaacctctgcccggttccaagcactttgtttccaatcctggtgaacatggagttattttcatagacgcttagcccataacagaagagggaacttttcagcagccctaccagaacatgc

SEQ ID NO: 682875 - DNA, 1181 bp, Homo sapiens
tgtrtatatatatatacacacatacatattcatatttatacatatatgctttttatgtatacataaaagatctttacaaaaacaagtaaaaattgacataactattttaaaataaaataaaactaagaaaagcaaaatataataaataaaaacatggattatcataagtgattatttcattacaaaatattttaaattgggtatattaaaattgcaagacgaaattttttctactttgatagagtaactggtagtggacttgccctcctttcagaaaaaattacaaaactggaaaatacagataaaatactgtttgcagatattggcaaacatgcagcacagaactgtaatcagtgaagaagggttaaaagaaggtaagcaccacaatatcccaaacagagaaataggaaaggtaaactcaggtaaataccagtaatctccctggattgaaaagatcagaattaaaattctggaaagtttagataaactttggaatttgtagagtactggaggtgaaggaatagcacagagaaagagcttcacaaatctgaatagaaaagccgttgaatttttcctcaataaaaagctgtgcatgcataaggtgaaattccacaagttaaaacagacaacagctggaaagtcctgacttgaataattcccagaaattacaaagggtgggaagacatttaaactctaaccaatacgttgaaaaactcatttaatccttctctacggaaaaatctgtcagactttatctgaccaatcaggttgatagatttttctgtagcgaaggattaaactgatctgtaagtaatatagctgcctgtctaaatataattcaaatcttgctaatgtaggacaacaaatatagacactcaataccataatattcacagacacctactatacagtgaaaaattattagatatgcaaagaagccaaaaattatgacccataaaatgatggataaacatatgccatgctaacaacagcaagaagaaagatgtagtaactatattaatttcagacaagacagatttgagaataaggaaaaatattaaaagtaaagaagggcattacataatgagaaaggaatcaattctccaaaagatataaaaattcttaatatgtatgtgcttaacaatgagcattgaatatgtgaaaaaagaagtgacagaaat

SEQ ID NO: 682876 - DNA, 1181 bp, Homo sapiens
tgtgtatatatatatacacacatacatattcatatttatacatatatgctttttatgtatacataaaagatctttacaaaaacaagtaaaaattgacataactattttaaaataaaataaaactaagaaaagcaaaatataataaataaaaacatggattatcataagtgattatttcattacaaaatattttaaattgggtatattaaaattgcaagaygaaattttttctactttgatagagtaactggtagtggacttgccctcctttcagaaaaaattacaaaactggaaaatacagataaaatactgtttgcagatattggcaaacatgcagcacagaactgtaatcagtgaagaagggttaaaagaaggtaagcaccacaatatcccaaacagagaaataggaaaggtaaactcaggtaaataccagtaatctccctggattgaaaagatcagaattaaaattctggaaagtttagataaactttggaatttgtagagtactggaggtgaaggaatagcacagagaaagagcttcacaaatctgaatagaaaagccgttgaatttttcctcaataaaaagctgtgcatgcataaggtgaaattccacaagttaaaacagacaacagctggaaagtcctgacttgaataattcccagaaattacaaagggtgggaagacatttaaactctaaccaatacgttgaaaaactcatttaatccttctctacggaaaaatctgtcagactttatctgaccaatcaggttgatagatttttctgtagcgaaggattaaactgatctgtaagtaatatagctgcctgtctaaatataattcaaatcttgctaatgtaggacaacaaatatagacactcaataccataatattcacagacacctactatacagtgaaaaattattagatatgcaaagaagccaaaaattatgacccataaaatgatggataaacatatgccatgctaacaacagcaagaagaaagatgtagtaactatattaatttcagacaagacagatttgagaataaggaaaaatattaaaagtaaagaagggcattacataatgagaaaggaatcaattctccaaaagatataaaaattcttaatatgtatgtgcttaacaatgagcattgaatatgtgaaaaaagaagtgacagaaat

SEQ ID NO: 682877 - DNA, 1181 bp, Homo sapiens
tgtgtatatatatatacacacatacatattcatatttatacatatatgctttttatgtatacataaaagatctttacaaaaacaagtaaaaattgacataactattttaaaataaaataaaactaagaaaagcaaaatataataaataaaaacatggattatcataagtgattatttcattacaaaatattttaaattgggtatattaaaattgcaagacgaaattttttctactttgatagagtaactggtagtggacttgccctcctttcagaaaaaattacaamactggaaaatacagataaaatactgtttgcagatattggcaaacatgcagcacagaactgtaatcagtgaagaagggttaaaagaaggtaagcaccacaatatcccaaacagagaaataggaaaggtaaactcaggtaaataccagtaatctccctggattgaaaagatcagaattaaaattctggaaagtttagataaactttggaatttgtagagtactggaggtgaaggaatagcacagagaaagagcttcacaaatctgaatagaaaagccgttgaatttttcctcaataaaaagctgtgcatgcataaggtgaaattccacaagttaaaacagacaacagctggaaagtcctgacttgaataattcccagaaattacaaagggtgggaagacatttaaactctaaccaatacgttgaaaaactcatttaatccttctctacggaaaaatctgtcagactttatctgaccaatcaggttgatagatttttctgtagcgaaggattaaactgatctgtaagtaatatagctgcctgtctaaatataattcaaatcttgctaatgtaggacaacaaatatagacactcaataccataatattcacagacacctactatacagtgaaaaattattagatatgcaaagaagccaaaaattatgacccataaaatgatggataaacatatgccatgctaacaacagcaagaagaaagatgtagtaactatattaatttcagacaagacagatttgagaataaggaaaaatattaaaagtaaagaagggcattacataatgagaaaggaatcaattctccaaaagatataaaaattcttaatatgtatgtgcttaacaatgagcattgaatatgtgaaaaaagaagtgacagaaat

SEQ ID NO: 682878 - DNA, 864 bp, Homo sapiens
acagtcacagcgtggactgttctggttatcaatttattgtctcttagttcgaaatacccactttttgcctgccctgtgaaaatggagctgaaccctttaaatatttatcttttgttaaaggaaatggaggctaagttttaccattaaagatctgtggagagaggctgtaggagaaaagtcttttgtttcctggtccctgtctgcttgctcagtaggtccgtgccatgcacacagcttccccaggaccatctcctgccttcagggtggctttcacagcagcagtctcctatggcatgcaaagcttttgcagtgcatggaggccagcagcacccagggctagcaccccatggtactcccagcctcagatgtgtttatagcaaattgtctctcatgaaacacttttccttgagcagcttccccttgcaccsaagagggcaggcttccagcaagttttgctggtgtggcaacacaatggcttctcttccgtcttgtgagcactggcctctccaataaggtctggacctcagtcctgaggaacctcttgcttgggtgctctaccttagtctcaggtgtagtgactcctctttgtgtttgctcttcctatattctctgatgctccctttacttctaactagacagtccctcactgtagttgataagttcttattttagatattccctgtttaaattgctgtgtgattttcctctactgattggaccctgactgatacacccagctactgcactgggtactgaggaatgactagaatttggataagcaaagaggaaggagaatgggagatttcagctagaacaagagcattgagattcatgtttttcatatttatattactttcttaagga

SEQ ID NO: 682879 - DNA, 1437 bp, Homo sapiens
acttaactgtaactgtctttgtgatgatctttaatctgctacatgataagatttatttgtttccaagaaacattatttctttctaaacaagtttgaggtaatatggtccagttctgtaaatgacaattagcagccattaaaagagcattataaactcagagggacacaaacacttagatcaatggaattcaagagcagagaaatagaagataaaatatctgtgtctgccacatgattttagccagcagtagctgcatttcagactgtatgcctgcagcctatatttatatacatctctttgagtaagtgttatttttcacagcagtagtagtatttgtgctgcttttgttgacatttagatagtatacagtaaataccttataacagtgatctgtttcacttacagtttcactagcctacaacactgtccactgcagttacaggtttgcagactcacagatattctcttccagatgcaattttgctgtaacttaaatttttgtcaagcatatgttctgcttaaaggttggattttttaatagaatgaaattgattaaaaggcctgcaagcgaggactccaagatgacttccggattccacatctgacttgctggatgagtcaggrccactggccccataccttggtctcgacatctgtaaacccttctcagtggtaatgagagttacataggagcaccaggacacaagtgacttcaaagggatttcttcacctgagggagatgcaagccagagtaaaggtagggaatcaggctgtgaaagcaaatttctttcaacatgggaccaaaagctcaggaggctatggttgattaaagggcacagcttttcaaggcagccagtagaattcatattagttctgaaagaagaaaaaaatgcattttttcctgcattctagggcaataagatgagacagaaatgaaattcactggtgtaatgtaaatgacatgcgttcatgtaagtacatctatacgagcatttacactatggtcttcatgatgcccacatctactttgatgttttcctttacttcccagacatgaaaactctgcatctcagttatatcatctgtaaaactgggataatcctcactctcctttccttcgtatgagggttaagacagtaacaacaaccaaaccatacattgttgttgtggaattaactgtgcctgtttgttatgggatgcccatggtggaaagaagcattgattatacacagggtggttgagttggatttaattgcttttttacaaatatacattgaacacttgctgtatggtaggcaatgatttttgctcttggaatgtagtcaataaacatacagagcaaaaaattttcttagctttatggaatttataaatatatatatttaaattttattttactttatgttatgggataaatgtgcagaatgtgcagattt

SEQ ID NO: 682880 - DNA, 691 bp, Homo sapiens
tattccattattcttcttgtgttccttttaaaatttgcctcctcaactgctcattttccctaggaagggaaaaatttcattgcttgggctacttacaattcaacagaaaaagttgaaagtcacctaagaaaagaaaaggaacagaggagtgaagaagagaggaggagatcatgataaaygtgggttattatgtggttttgccaaaggctgtcagtgagcttacatcttctccatagagtgctagtttaagatcaaaatctcaataaaatgaatgattaaaaaagacacatgatgtctgccttcatattcctctttcctgcaagaatctgctatctcctcaaagattcccattcagggaggtgaaattatctttggcgaaaattgactataggacaggcaagttggggcttttctgctggtgtagacgttcatccctggaagtgatcctggaaagctctggggaggaaataaggatgagcgagcatcctagatttatttagtcatcatttgtttctcatgaaaccagcaccagccttagcttattctctggtcaattaaatgtaaaggatggcagaaactagagcccacagtctgtgagtagtttgtggggttaacaagctgactttctgcggtatggaatggcatcagggatgaaacacagacttcatatgctgcccattcactccttttg

SEQ ID NO: 682881 - DNA, 652 bp, Homo sapiens
aggatttatgggccacctgttctgcttgagattttaggagaagactctgctctcatgaagcttagagtgtcattgcagggagataggcaagtaaatgaatatatatgcatatatttagtttgtcaggtggtgataaatgtaggaaggaaaataatgcaagacagagagaaagagaaatcatgctgggaagacaaaaaagatttgtcaagatcacttactaaagctactgccatgcacataagaacataaaggcattatgaagactggcagccttttcatctttgtttctatttttctctttgccccaaggctttaccctgtatacctgagttagcctctccctagctctgggcctggcccttgctgcaatatcactccttaactccaggtgctctaatagaaggttgggctgccctgcctactcccatgctctagttccctacctcattggcaagaaagttgaaaaagatttctatttaatttttgaaaggataaaggcattgtttttttttttttktttttttttttttttttctttagtggaatgtgaaaagtgtgattttgctaagagggtatttcagtcttttccaggcatgtgccatatgttggagctgccatacatgttggtgttatctctcagtgcagagacaga

SEQ ID NO: 682882 - DNA, 465 bp, Homo sapiens
taactacggcaaattattcttgtaaagtaatcagttaatatgggtaaagcatttagtacttctgtcatattcgacaccatgtatgtgtttttttcaataactgaatgaatgactaaacttctaatctgacatacatacataagttgtactgttgaaaggagatggtgatgagagaaaaggaaagcccgtagtgatttatggaatcaccatttgtaatttcttgtcataagggaatatatcttcttactccttttaattttagtaygaaggcattttctgggtgactttgtattaaacattatcatagttattttacctcttttatgctttcattagaaatattcctttttaggttattctaaaataaaattagaatcttgaacattctgctatatcagaaagaaaatcaggcaatttcatgttataaacaatggctagatggattcttctgtaattattacattt

SEQ ID NO: 682883 - DNA, 1178 bp, Homo sapiens
tgtattgaaagtttggcaygaggaagtgtcacattacctacgctccagtctgttgtcagctcctctcctcatcaatggttgtacaaataatcctttatccaaaaaaagcttttatttctgggataaaccatgaaaggggtgctatgatacatgtatccctagtgccaattctcttttgaatattctagattccctcagcatgtattctcaaccatggttctccttcaatattcttacctttaaaaattttcaccctcttcccatctcctcctgttttttgacaaggtgggtatatgatagagctttgtattagtctgttttcatgctgctaataaagacataccctagactaggtaatttataaaggaaagagtttttggttttttgtttggttgttttgttttgtttgagacagagtcttgctctgtcgcccaggctggagtacagtggcacaatctcagctcactgcaagctccgtgtaaaggaaagagttttaattgactcacagttccacatggctggggaggcctcaaaatcatggcagaagagcaaggtacgtcctacatggtggtaggcaagaagcttgggtaggggaattcccatttataaaaccatcagatcttgtgacacttaatcactaccatgagaacagtatgggggaaattgcccccatgattcaattatctccacctagcaccacccttcctacatgaggattattacaattcaaggtgagatttgggtggggacacagccaaaccatatcaagcttagagaatcagacacttggcaaagaatctttataaccctagtaagacctaccatgcattgaaagccaactgttgaaacaatgagtaaagtccattgcttatattacctctgctccttatgtactagtgtatgaaatgggtatctctacctgtttctcaggtaagggaggaagttggggctaagatgggtcaaataggttgcacctggttttacacctaatcaagatcagagctgggaggtaaacccaggtctactttaaataccattttcattccaggaggaaagatatccattcacttatttatttaatcattcagagagtatttgggatcctacactgaagggtgttttgtgataaattcaaagtcagaatttctttccaacactcattctgcagttaagatggg

SEQ ID NO: 682884 - DNA, 705 bp, Homo sapiens
agatactggggaaactatgactttgaccagcatataccctttgaatagaataggagaaaaaataaaagactacagtaaatttaactggtctcaaaactattgattttgtaatagagtttttaaatttttcaaagaccaaagtcattacttcagaaataatgaaccatcaatattccaccaaacagcttctagcagatataaaaggagatgtaattggaaggaaatcaacttcagctactccagtgaaaactttgcataaatatgttgttaaaaatggtcttggtggttatggacctgtagtttatgttgctttcatggagtacactatggatttattaatggaactacaggtctatggtaactataagttaartatttaggtgaatatataaattgtcattattttaaatacagaaaaatttgtaaatattctaaataatgaaacaatttaatttacaatatatgtacaaggtttagcaagcaacaaaactccagattaaagcaaaaatacagtagtgatttttaaaaatagtacaatggtaaaagtaagatatgtgtgtatctgaaagtttagaaaattgtataagccagtcaggacatttcttatgggaatgcagcaagactgaagagcttctgcacagcaaaagaagctgccatcagagtgaacaggcaacctacagcatgggagaaaatttttgcaatcta

SEQ ID NO: 682885 - DNA, 705 bp, Homo sapiens
agatactggggaaactatgactttgaccagcatataccctttgaatagaataggagaaaaaataaaagactacagtaaatttaactggtctcaaaactattgattttgtaatagagtttttaaatttttcaaagaccaaagtcattacttcagaaataatgaaccatcaatattccaccaaacagcttctagcagatataaaaggagatgtaattggaaggaaatcaacttcagctactccagtgaaaactttgcataaatatgttgttaaaaatggtcttggtggttatggacctgtagtttatgttgctttcatggagtacactatggatttattaatggaactacaggtctatggtaactataagttaagtatttaggtgaatatataaattgtcattattttaaatacagaaaaatttgtaaatattctaaataatgaaacaatttaatttacaatatatgtacaaggtttagcaagcaacaaaactccagattaaagcaaaaatacagtagtgatttttaaaaatagtacaatggtaaaagtaagatatgtgtgtatctgaaagtttagaaaattgtataagccagtcaggacatttcttatgggaatgcagcaagactraagagcttctgcacagcaaaagaagctgccatcagagtgaacaggcaacctacagcatgggagaaaatttttgcaatcta

SEQ ID NO: 682886 - DNA, 1383 bp, Homo sapiens
ggattgcagtggccagtggagggctagtgaaggttcaagcacactgacaattaggctaaatcggcagtggcaggttcttgcatggaagttgcatcacctgctggagtgactgtcccttgacctcctcctgtctactgggtcttcctccacctcactttaatgctgctatgctgctaatgtgaactctgaggctttaactggggaagtcgccaccgccccctccatcacccttgtcctacaggtcagggctggaatgaggagcacttgcagttgcctagtgggtgggatttcaaggaaacgggatacctttcttccccaccccttcaccttttcccagaaatggtctcatcactgtttccttttggaattctgtcattggaatttcctgcttttgcagctcttgccagcttgcgtttcttttgaaattcagtacgcttgggagcagtgacgcgaaacttcgcagacgctgacctcgctgacagagccaggccgggcaagaagaggtccgggaggatctatcaggagtgtgggggctggtggggcctgccctgtagcgaggcttagggtatgggcccctggggggtgagagaggacaagggatgagagttgggaggtaattggggggcggtaagaggtggagggtgaggggtgagagggccccaaaaacacaccccctgggccacggtttctcttaggctgtgctgccccagggtgggagtagaggagattctggacttcagaatgccagccaggctcccctcctatttttttcgatcccagagacaacagagttctttttttctgcatgttttttgggggctcctcttttcttgctgcaatgctgtcagaatcataaagagctgacatctataattaatgtcagtggcctgcactagtgaatgcccgtggcacacagaacacctggctgtggagaagcagcagcaggacctagcgtgttggcactggaaggaaacgcagaggcctttcccctcattttacatgcaaggaaactgaggcccagagagggggccccacagccagccagtggcagtgggctctgaggggctctggacagcagcatcccacctgagtgcgctcttggctaggcagggtgatggggccccagtctggtggacgctcagcaataggaaggggagcggtggggaatcccttctcgttcccgggtgctggtctaccagactggggctccactggggccatggtccaataccagtcctagcagtcattgaaatatggggtttcaggctcctgatccttaaaaaccctgtgtaagtagtctccaagctaaaaacaatctacactratagatctgctcatcaaaagattattttgagagcattcgggtaatgtaaacaacctttc

SEQ ID NO: 682887 - DNA, 602 bp, Homo sapiens
cccctaaaagggcctcccacccctccccggccacctgcatcaagggtggctgtgggaatatgggcatctgactcctgagtagccttcacaaatagggtctcatttgctggggttggggagagcctcayccccatttactgatgaagaaacaagataagagaaattaagccaccagcccgaggacaaacagcttgcaagtggcagaggaaagactgaagtccaagtgggtctggcccttcccttcccttcttaacccctcctgtgtcaggcagaacagcagccctcccagaatgaggccaagtgcatcccagcatccctaacgaccaacgaattaccctggcagccccctgacctggtccctgagattctgcagtgagttggcaggaagggcaacaagactaccgccttcctgggtcgcagggctgcagcaggagctcaggagccatctgcacaggttcaaacccaacctctgcctctactagctgtgttgccttgggccagttcttccacctctctgtgcctcagtgtactcatctgcagaaaagggaaaacagtgcacccactcacagggctatggtgagggctaagggaaatcaaactaa

SEQ ID NO: 682888 - DNA, 1949 bp, Homo sapiens
ctggttggcgtctcatgcatcagcttccatcagagcatccctgccgccctgggtcctgctacccctagtcccttcctctgctcctgcctggggagattccctaagcagtaacgtaagatcctccttgcacgacttgatggaaacagggaaagtatccccatgctgggccagcataacgatttctgagcatccacgctatttgagggtctttcatgtcggctattccaacttcatgacactcctgcgaggatgcgtgtatcctcctcattctggaagatgaagaagtgtgctcagctgtctaaggaggctgtgtggggcatcagagaccatgcatttcctcagggggttgcagagtgtgctgtgtggtttcacctggaccctgagcgtccagcctactcttcctatgactttggatgaattcctgattgaatagtctacctggcctgcttggaaatctgaccagcctctctcactttaatacccatgtaggttgctgttgggaattgcatttgtgcggcccacagagtgcctggtgatgtggttgtacctgctgctatcagtggtcaattctgtgtgctgaggcccacaaagaagtcacatttctttctctgaagatgataaaagcggaggcatctctcaatctggaaggggctagctgggcatgaaggtggtggcagaggctcccctagaccccggtttgcaccgttcctctggcactgtgggacagaagtggacttgctggaagccaggagatcacatgaatgttaatgatcaccttgttgtggtctttgmcctagagtgacagcccgtgcttcaaagagcatgaatatacggagtttgggaaatggatggatggctgggagaccaggaggaaaaggattccaggtaataacaacggttcgttcatcgaagtgcagctgacactgcaaagttaaaaacgcaggctgtggcaaagccagtgtccgttttgggtcagctttaacatggggccctggaatgctctgtaatcttggatgtccttatctgaacatcaggctctaagtcaggaaggggcagcgtgagcccgggtcactgacgtcccaccaggcacaaagggtgagaagcacgttgtcgggaaaatgaaaaccctggtgaggtctgcggatggaaaaaagagtggattctcactgagcaatgtggcaggcattaggcagcgtgcatcttctgggtccttactacagtcctctggagtaggtctctttatccccgtttaaccgccatggaaacagattcctggactcagcccagggcacactgctagcaagataagctggggactgggccagggtctgtcctcaacactgtacctgctgtcttttacgattttatgcaatttttattcattgctattactcagtctcaatcaaaatataccttctgaagttgaagaaaagcaaacaaatccaggcattaggttgataattggatttttacttgccactatctcaagtattacagaaatatttgatatttctagttttctaactttctacagtacttgaagcagtattagtttctaacaaatctggacattttaaggtgagttaatatctggcagtaaataaccaagaactcaatagtggcagacttgacttcaagactctgaaggctttggtagatgcaggcaggtgtctgaccagtggtggggctggaggctggagggtgctgtgtcagttcctgagcttgagaggacaatgaacacagtgtctgcaggagaaccagctctgcttactacctgctgagcttggtgaggtgctttctacatcgcacactcagtctaagctttatggaagctaacggcatccctaatttacagttgagaaaatgagattctctactgtaagaggtaaataatttgccaaggacagtcataggaaatgatccatttggaaccagaatcaggtcttcct

SEQ ID NO: 682889 - DNA, 1949 bp, Homo sapiens
ctggttggcgtctcatgcatcagcttccatcagagcatccctgccgccctgggtcctgctacccctagtcccttcctctgctcctgcctggggagattccctaagcagtaacgtaagatcctccttgcacgacttgatggaaacagggaaagtatccccatgctgggccagcataacgatttctgagcatccacgctatttgagggtctttcatgtcggctattccaacttcatgacactcctgcgaggatgcgtgtatcctcctcattctggaagatgaagaagtgtgctcagctgtctaaggaggctgtgtggggcatcagagaccatgcatttcctcagggggttgcagagtgtgctgtgtggtttcacctggaccctgagcgtccagcctactcttcctatgactttggatgaattcctgattgaatagtctacctggcctgcttggaaatctgaccagcctctctcactttaatacccatgtaggttgctgttgggaattgcatttgtgcggcccacagagtgcctggtgatgtggttgtacctgctgctatcagtggtcaattctgtgtgctgaggcccacaaagaagtcacatttctttctctgaagatgataaaagcggaggcatctctcaatctggaaggggctagctgggcatgaaggtggtggcagaggctcccctagaccccggtttgcaccgttcctctggcactgtgggacagaagtggacttgctggaagccaggagatcacatgaatgttaatgatcaccttgttgtggtctttgccctagagtgacagcccgtgcttcaaagagcatgaatayacggagtttgggaaatggatggatggctgggagaccaggaggaaaaggattccaggtaataacaacggttcgttcatcgaagtgcagctgacactgcaaagttaaaaacgcaggctgtggcaaagccagtgtccgttttgggtcagctttaacatggggccctggaatgctctgtaatcttggatgtccttatctgaacatcaggctctaagtcaggaaggggcagcgtgagcccgggtcactgacgtcccaccaggcacaaagggtgagaagcacgttgtcgggaaaatgaaaaccctggtgaggtctgcggatggaaaaaagagtggattctcactgagcaatgtggcaggcattaggcagcgtgcatcttctgggtccttactacagtcctctggagtaggtctctttatccccgtttaaccgccatggaaacagattcctggactcagcccagggcacactgctagcaagataagctggggactgggccagggtctgtcctcaacactgtacctgctgtcttttacgattttatgcaatttttattcattgctattactcagtctcaatcaaaatataccttctgaagttgaagaaaagcaaacaaatccaggcattaggttgataattggatttttacttgccactatctcaagtattacagaaatatttgatatttctagttttctaactttctacagtacttgaagcagtattagtttctaacaaatctggacattttaaggtgagttaatatctggcagtaaataaccaagaactcaatagtggcagacttgacttcaagactctgaaggctttggtagatgcaggcaggtgtctgaccagtggtggggctggaggctggagggtgctgtgtcagttcctgagcttgagaggacaatgaacacagtgtctgcaggagaaccagctctgcttactacctgctgagcttggtgaggtgctttctacatcgcacactcagtctaagctttatggaagctaacggcatccctaatttacagttgagaaaatgagattctctactgtaagaggtaaataatttgccaaggacagtcataggaaatgatccatttggaaccagaatcaggtcttcct

SEQ ID NO: 682890 - DNA, 1949 bp, Homo sapiens
ctggttggcgtctcatgcatcagcttccatcagagcatccctgccgccctgggtcctgctacccctagtcccttcctctgctcctgcctggggagattccctaagcagtaacgtaagatcctccttgcacgacttgatggaaacagggaaagtatccccatgctgggccagcataacgatttctgagcatccacgctatttgagggtctttcatgtcggctattccaacttcatgacactcctgcgaggatgcgtgtatcctcctcattctggaagatgaagaagtgtgctcagctgtctaaggaggctgtgtggggcatcagagaccatgcatttcctcagggggttgcagagtgtgctgtgtggtttcacctggaccctgagcgtccagcctactcttcctatgactttggatgaattcctgattgaatagtctacctggcctgcttggaaatctgaccagcctctctcactttaatacccatgtaggttgctgttgggaattgcatttgtgcggcccacagagtgcctggtgatgtggttgtacctgctgctatcagtggtcaattctgtgtgctgaggcccacaaagaagtcacatttctttctctgaagatgataaaagcggaggcatctctcaatctggaaggggctagctgggcatgaaggtggtggcagaggctcccctagaccccggtttgcaccgttcctctggcactgtgggacagaagtggacttgctggaagccaggagatcacatgaatgttaatgatcaccttgttgtggtctttgccctagagtgacagcccgtgcttcaaagagcatgaatatacggagtttgggaaatggatggatggctgggagaccaggaggaaaaggattccaggtaataacaacggttcgytcatcgaagtgcagctgacactgcaaagttaaaaacgcaggctgtggcaaagccagtgtccgttttgggtcagctttaacatggggccctggaatgctctgtaatcttggatgtccttatctgaacatcaggctctaagtcaggaaggggcagcgtgagcccgggtcactgacgtcccaccaggcacaaagggtgagaagcacgttgtcgggaaaatgaaaaccctggtgaggtctgcggatggaaaaaagagtggattctcactgagcaatgtggcaggcattaggcagcgtgcatcttctgggtccttactacagtcctctggagtaggtctctttatccccgtttaaccgccatggaaacagattcctggactcagcccagggcacactgctagcaagataagctggggactgggccagggtctgtcctcaacactgtacctgctgtcttttacgattttatgcaatttttattcattgctattactcagtctcaatcaaaatataccttctgaagttgaagaaaagcaaacaaatccaggcattaggttgataattggatttttacttgccactatctcaagtattacagaaatatttgatatttctagttttctaactttctacagtacttgaagcagtattagtttctaacaaatctggacattttaaggtgagttaatatctggcagtaaataaccaagaactcaatagtggcagacttgacttcaagactctgaaggctttggtagatgcaggcaggtgtctgaccagtggtggggctggaggctggagggtgctgtgtcagttcctgagcttgagaggacaatgaacacagtgtctgcaggagaaccagctctgcttactacctgctgagcttggtgaggtgctttctacatcgcacactcagtctaagctttatggaagctaacggcatccctaatttacagttgagaaaatgagattctctactgtaagaggtaaataatttgccaaggacagtcataggaaatgatccatttggaaccagaatcaggtcttcct

SEQ ID NO: 682891 - DNA, 1949 bp, Homo sapiens
ctggttggcgtctcatgcatcagcttccatcagagcatccctgccgccctgggtcctgctacccctagtcccttcctctgctcctgcctggggagattccctaagcagtaacgtaagatcctccttgcacgacttgatggaaacagggaaagtatccccatgctgggccagcataacgatttctgagcatccacgctatttgagggtctttcatgtcggctattccaacttcatgacactcctgcgaggatgcgtgtatcctcctcattctggaagatgaagaagtgtgctcagctgtctaaggaggctgtgtggggcatcagagaccatgcatttcctcagggggttgcagagtgtgctgtgtggtttcacctggaccctgagcgtccagcctactcttcctatgactttggatgaattcctgattgaatagtctacctggcctgcttggaaatctgaccagcctctctcactttaatacccatgtaggttgctgttgggaattgcatttgtgcggcccacagagtgcctggtgatgtggttgtacctgctgctatcagtggtcaattctgtgtgctgaggcccacaaagaagtcacatttctttctctgaagatgataaaagcggaggcatctctcaatctggaaggggctagctgggcatgaaggtggtggcagaggctcccctagaccccggtttgcaccgttcctctggcactgtgggacagaagtggacttgctggaagccaggagatcacatgaatgttaatgatcaccttgttgtggtctttgccctagagtgacagcccgtgcttcaaagagcatgaatatacggagtttgggaaatggatggatggctgggagaccaggaggaaaaggattccaggtaataacaacggttcgttcatcgaagtgcagctgacactgcaaagttaaaaacgcaggctgtggcaaagccagtgtccgttttgggtcagctttaacatggggccctggaatgctctgtaatcttggatgtccttatctgaacatcaggctctaagtcaggaaggggcagcgtgagcccgggtcactgacgtcccaccaggcacaaagggtgagaagcacgttgtcgggaaaatgaaaaccctggtgaggtctgcggatggaaaaaagagtggattctcactgagcaatgtggcaggcattaggcagcgtgcatcttctgggtccttactacagtcctctggagtaggtctctttatccccgtttaaccgccatggaaacagattcctggactcagcccagggcacactgctagcaagataagctggggactgggccagggtctgtcctcaacactgtaccygctgtcttttacgattttatgcaatttttattcattgctattactcagtctcaatcaaaatataccttctgaagttgaagaaaagcaaacaaatccaggcattaggttgataattggatttttacttgccactatctcaagtattacagaaatatttgatatttctagttttctaactttctacagtacttgaagcagtattagtttctaacaaatctggacattttaaggtgagttaatatctggcagtaaataaccaagaactcaatagtggcagacttgacttcaagactctgaaggctttggtagatgcaggcaggtgtctgaccagtggtggggctggaggctggagggtgctgtgtcagttcctgagcttgagaggacaatgaacacagtgtctgcaggagaaccagctctgcttactacctgctgagcttggtgaggtgctttctacatcgcacactcagtctaagctttatggaagctaacggcatccctaatttacagttgagaaaatgagattctctactgtaagaggtaaataatttgccaaggacagtcataggaaatgatccatttggaaccagaatcaggtcttcct

SEQ ID NO: 682892 - DNA, 1385 bp, Homo sapiens
gtctctactaaaaatacaaaaattagctggggggcggcagggggcggtggtgtgtccccgtagtcccagctactcaggaggcagaggcaggagaatcgcttgaacctggaaagtgtagggcgcagtgagccaagatggggccactgcaccccagcctgggtgacaaagtgagactctgtctcaaaagaaaaaaaaaaagtgtctgattgtgattacttatttcattgttaagacaaatgttctgggctgatccatctttggcccagactttctaggaacatcagctttttacttgtagcaaaactatttacctgtttttgtagactaaattattcccttaacataggtaacacaggcctggtcttgaccctagggaatttgaacattttcctgaattatttctatgttcttattgatataatcatggtaacacttccttcttttctttctccttcaggaatttattgagcacttattatgggctagtcttagtgattaaaaacacagtatttctgcccccaagcagctcagtcaaatgaaaggaagagatgtaaataaacaataataaaatgttgtaagtgctgtcacagagatacacaggttcagaatagtgtacccttagtgagacatgggctcaggagctgaactactcagattcaaatgcggcttccataaccatctagacacacaacctcacatatgtttaggcagcttgtctcatttcctcaactgtaatggaaataaggaaagtgcagacttcataaggctcttgtgagaatcaatgagacgatgcttgcaaggtgtctggagagctctcagcctatggagagagctcagtaagtattcagggatctccgttattatgcaatggaagcacaaagaaggaaataactaaaagcggctaactcctacccagaggggtctgggaaggcttctcaaggaggtgacaaaagttgaatcctcttctgggaaggagggaggggagaggcagtccagggggaaggagtggatagccaaaaatcctgagggtgatggggaacccaggraagttggtgagcaagaaaatgacacaaactgatgtgtgttttagaagaatttcttgagtagccatgtagaaaacagattggaacagaaggaatctgaaggcagagagaggagaggagctatgatgctgtcacaattatacaagggagaagtgagagaggcctggatgaaggcagggggaaggagagtaagcaatggcttcagagacagaatcagtaaaattgatgacacctggtgaaggcaaggggccaaccaaagcagaaagaaaacgtttgttcttagaacctgcagggcttctttcccaaggctggctgggatctcactgaacagccatcagcccc

SEQ ID NO: 682893 - DNA, 587 bp, Homo sapiens
tcaatgactcaagtcactgccctttataaagcctgttaagggaagttttatagctaactcttgttaagaataaacctggtcaatgaaggccactcctaggactcttgaagccaacagggaaacctctgtgctgcattccctgttggcagtcatgacagtactttgcactgcagtagaacaccctgtgaccatctttatgtgacaaaggcaaagatagagaaaacttcagtctctgtggaaatgcagtcatgcctactacagtggggaaaagcccaattccaaaccatctgcaatggaaataaaataccagatgtctctttgctattggtaggtctcctgtagaagacaggcctatatgggatctccaaataggcccacatattttggaatttttaaattatataccaaagaagcaagtacaaaaggaggatttcttcatacattggttagagagtctcacagtttcctgcaatctaaaaattgatttaagaattgtttgattgatcgatgtatttatctattgactagttcayttatcacacaacatcgttaggcaggagccatgaaccttgccctgagctaagcac

SEQ ID NO: 682894 - DNA, 579 bp, Homo sapiens
agtcattgaaattgatcagtggtgatttatattcctggcagacagtgcttttgaggttcttttccttagttgtgaagtgtcagttgtccaatgaaagttgccagttgttcaatgaaaattttgtcccattctataagaaattcacaatcccaaaaacattctaaagcctgcagagagctgagaggtgactctggatgctggtttcagcgagctgtacgtggctgaatatataatgcaataaagctaatctgagacacaatgtgacaatcagtagcaattcaatgtgtgctgaatgaaagatttaatattagcttagtgttgcgacaagatgcaagacacaagtcaatttagggatggaagsctttcaactggatttagcaatcatccaaaactggttgctggatctggcagaactcaaacttgggctccagcacctccactctcctagtgtccattgtcatttgtgaagtggggctgatgtaagttaaaagagtttatttctgccttagcaagttacagagctgttggactggaagggagttgggagttacctggttgaactcctcattttgtgagcaa

SEQ ID NO: 682895 - DNA, 599 bp, Homo sapiens
tctgccccccaccatcaagctgtgcaccttcagtgagcagtagtggcgtcttcttcctttaatccaaaatgccgagatggtgcctgggctttctgaggtactcagtggagatttgttgagtaattgggagatccttggtcttacagtgtccagaaattgaacattgtgrggtatatttagagtatctggctggtggggagaaatagggtgaagcaagctcatatgctatataaacaaaatgactctatgtcccagactttttggaacaaacaggtttcaaatattccctctgttttccccaaaagtacattcgtatctgtttgaccgtgtgctctcgtattttggttcagaaaatatgaattgcacagcaaagatgacaatttgttatctcccagtggctggactattgatgtctgttttttctcaggtatccggaggcttgagaccctgagtaagccattacaaggctgtgtggtgagaaagggcgcagtagagctgtcggctgatttatttaatatcttgttctggcctatttctgatacatgggtttatctgtctgggttctgtagagaaacagagcagtaggttgtatttcaagg

SEQ ID NO: 682896 - DNA, 599 bp, Homo sapiens
tctgccccccaccatcaagctgtgcaccttcagtgagcagtagtggcgtcttcttcctttaatccaaaatgccgagatggtgcctgggctttctgaggtactcagtggagatttgttgagtaattgggagatccttggtcttacagtgtccagaaattgaacattgtgaggtatatttagagtatctggctggtggggagaaatagggtgaagcaagcycatatgctatataaacaaaatgactctatgtcccagactttttggaacaaacaggtttcaaatattccctctgttttccccaaaagtacattcgtatctgtttgaccgtgtgctctcgtattttggttcagaaaatatgaattgcacagcaaagatgacaatttgttatctcccagtggctggactattgatgtctgttttttctcaggtatccggaggcttgagaccctgagtaagccattacaaggctgtgtggtgagaaagggcgcagtagagctgtcggctgatttatttaatatcttgttctggcctatttctgatacatgggtttatctgtctgggttctgtagagaaacagagcagtaggttgtatttcaagg

SEQ ID NO: 682897 - DNA, 599 bp, Homo sapiens
tctgccccccaccatcaagctgtgcaccttcagtgagcagtagtggcgtcttcttcctttaatccaaaatgccgagatggtgcctgggctttctgaggtactcagtggagatttgttgagtaattgggagatccttggtcttacagtgtccagaaattgaacattgtgaggtatatttagagtatctggctggtggggagaaatagggtgaagcaagctcatatgctatataaacaaaatgactctatgtcccagactttttggaacaaacaggtttcaaatattccctctgttttccccaaaagtacattcgtatcygtttgaccgtgtgctctcgtattttggttcagaaaatatgaattgcacagcaaagatgacaatttgttatctcccagtggctggactattgatgtctgttttttctcaggtatccggaggcttgagaccctgagtaagccattacaaggctgtgtggtgagaaagggcgcagtagagctgtcggctgatttatttaatatcttgttctggcctatttctgatacatgggtttatctgtctgggttctgtagagaaacagagcagtaggttgtatttcaagg

SEQ ID NO: 682898 - DNA, 588 bp, Homo sapiens
ttaaatagaacaatcaagcaacatgcagggaccrgctagaagcatgtgtcccctgtaaatctggtcagaaatagtaaatacaggaaacggagacaatatgctgccctattagttcattctctttcataattaacagcagatgaatgtaagcagtgatacaatctttatcttacccaaagcaccttaatcctctgagaccccagctttactgtctgcagaaagtgagtcctttttaactcatttaacagacatcaattgagcaactactatttgccaaaaactctgctaggagctagcgtggaatgtaagcctaagtaagacatgatgttggttcccaggagcccaggagacagacatgcaaacaaataattataacgcactctgggaaaagctgtaacagactctatgcaaggtgcatgggagctcagagcaagcagtaattagtttggctgctgagttaggaaagacctcaaggagaggcagcatctgaaataacatcacagatggatgggtccagataatccctgtggtttatttcaactctgtgttcagattctgttaaaaaaaaaaaaagagagagagagagag

SEQ ID NO: 682899 - DNA, 588 bp, Homo sapiens
ttaaatagaacaatcaagcaacatgcagggaccagctagaagcatgtgkcccctgtaaatctggtcagaaatagtaaatacaggaaacggagacaatatgctgccctattagttcattctctttcataattaacagcagatgaatgtaagcagtgatacaatctttatcttacccaaagcaccttaatcctctgagaccccagctttactgtctgcagaaagtgagtcctttttaactcatttaacagacatcaattgagcaactactatttgccaaaaactctgctaggagctagcgtggaatgtaagcctaagtaagacatgatgttggttcccaggagcccaggagacagacatgcaaacaaataattataacgcactctgggaaaagctgtaacagactctatgcaaggtgcatgggagctcagagcaagcagtaattagtttggctgctgagttaggaaagacctcaaggagaggcagcatctgaaataacatcacagatggatgggtccagataatccctgtggtttatttcaactctgtgttcagattctgttaaaaaaaaaaaaagagagagagagagag

SEQ ID NO: 682900 - DNA, 588 bp, Homo sapiens
ttaaatagaacaatcaagcaacatgcagggaccagctagaagcatgtgtccyctgtaaatctggtcagaaatagtaaatacaggaaacggagacaatatgctgccctattagttcattctctttcataattaacagcagatgaatgtaagcagtgatacaatctttatcttacccaaagcaccttaatcctctgagaccccagctttactgtctgcagaaagtgagtcctttttaactcatttaacagacatcaattgagcaactactatttgccaaaaactctgctaggagctagcgtggaatgtaagcctaagtaagacatgatgttggttcccaggagcccaggagacagacatgcaaacaaataattataacgcactctgggaaaagctgtaacagactctatgcaaggtgcatgggagctcagagcaagcagtaattagtttggctgctgagttaggaaagacctcaaggagaggcagcatctgaaataacatcacagatggatgggtccagataatccctgtggtttatttcaactctgtgttcagattctgttaaaaaaaaaaaaagagagagagagagag

SEQ ID NO: 682901 - DNA, 639 bp, Homo sapiens
atcgtttttaagtaggtgcctgattttcattgtttgggtaatctgtaaatcatataccatctctacggtactgggcatgtaggttgctttggcaataatgaataacagtgtgattaacatctgtgctcatatgtctttgtctgcatttctgattatttctttaraagattcctggaagaggaattactgggtaaagtgtatgaatattttaaggctttccggaatgcactcctatcaacagcgtgggctctgtgcttttctccctgcacccttaccagccttgagtagtgtcctagtcttaattttgcacgatgcagtaggggaaatagtatattattgtcattatttgcctttctgtgatcactggtaaagctgatcatttacccacatgttgtgagccatttttattcccttatctgtgaactgtctgttcatgtccctacccagtttcctacgttgatattttagtgtttttcttgtcaaagtagaaaccctttaaagactgagaccactaactgcttctctaccacatttgtgattcccattcccagctggcttttaattttgtggttttttaaaaaacttgcatttaccattcatccatctagttggaattgtttcctttgctttcgttgttaa

SEQ ID NO: 682902 - DNA, 1219 bp, Homo sapiens
ttgggaagctatggagttctttccttttgctatgacctagttctgggctagtgatatgagattggatgtaaatcaaagtggggcccaatcaaaggtgtataccaaagtggggggaaacctggagctttactgcagaggccagcataacatgtcataacagagtcaaggatgaaagctccagaggtggtaagggctgtgtggtgggagcagggggcggtgctgaagagctaaaggaatatagagatgggtactctacagagatgacagtaagtgttactcaaaataagtgtgtctggaggtgatgcgtttccgaagttcagtgatttctctacatcaggatctcccagagccttgcatgccagtcttgcggtgcaatctcccagcagtggctcagcagcctgcatttggaggtggagttggtgcatctgcagaaagtgcacttaggaatgtgggctccaaaggcagactgctcaggttcaaatctcagctccatggatgtttgttaccatgatgctgggtgaactccttaacatttctgtggctcagtttcctcatctgtggcatgctggttgtgaggattaaatgaggtgatgcttgtaggctgcctgtgtagtgtctgacttatggaaactgctcagtaagtgttagtggctgctcttgtttgtgtcatcatgatcatggtcatcatctcaccagggaccaaggtgactttgccctagagcagtggttctcagtctgtgccccatccctggcatcaacatcacccaagggtttgttggaaataaaacatcttaggctctatcctattgagtatcaagtttggtaggtctggggtgaggtccaagagtttgcatttctaacaacttcccaggtgatgctgatacgcctggtttgtggaccacgtgagacaacatctccttgcattgygttccaagtaatatcatctagaacatgcagttgcatacactgttcctcccactccactattatctcttctaatggttagatgatttcttagccagaattcttctgaaatcaaggattcctgtgattaatgcaggaatacctggtatcaggatgaactgtcacaaagaagtaaggcagtgagtgtttcctgctctttaaaccagccttgtttgtgtatgtgtctcagttgggctgctataacaaaataccatggactggctggcttatgaacagcagaaacttatttctcaca

SEQ ID NO: 682903 - DNA, 616 bp, Homo sapiens
ttttcatgctctgctgaaaaataatttgactgacaccagaaaaataaagatgacccttaaaggaaagcttttaggaaagggaaagctgcaagggaaaatgccttacattgttggacacaagtcctattgaagagaagtttttttggttttaaaccatacgatatgtattctcttaaaataaaaaattccattctgccaggaaatcctctaaaaagctttcactcaattgcatgcaagcaacactaatatagggatggcaccctgctgattctaaacttgaacatgcaacctgtaccactctattccaagacagaaaatttggcattcagtactgtagaatgtgaatatcacatgaggctagcagaaggtcatygcctggggatgtttataaaacacacaaattaaggtattagcctttcaccttgggggtctgaagatcaaatcccagcttaggtaacatgcataaagtctctctgccagccttttcctaatacttgcttgttgaaatcacacagaccctttcctctgacccaagttaacaaaggcatagatgagaaagctaagaaatgacaggtcaaagccaaaaacacaaaacaaacaaacaaacaaacaaaca

SEQ ID NO: 682904 - DNA, 558 bp, Homo sapiens
cgctcccccgctcgccttcgccgcgctgctcaaatgccgcatttcggatgcagcgccgcgctcggcctgtttgcttgcagagccggggccccggggcaggaagccaactcgcaagtgtatcggagattagggcccgcggcggcgggggcgggcgctgggcaaacacgcggcggccgcctcaatccccagtgctcgattccgcccgcgcggtgcctgcccggcagtgactcggtggtgggggaagggggcggccccgctcccagcgcccgagtgccctcgrcgcccaccccgggggatactcggggaggcaggcaccggatggggagcgacgggtttttccttcgggagaggccacccgggcacggtctcctttcgccccatcctcaggcacacctcgccgcgccgtcttgaggcctggttctaaccctcccgtctcccgcacccctagttccccgtctgcctagtgggtcgaggggaaggggaaccggttggggaagggaaggaaaaagacccaaaggcggaggtgtgaagactggagagtggcggggccccgcccgg

SEQ ID NO: 682905 - DNA, 1558 bp, Homo sapiens
aagaaaggggaggaaaaccattggtcactgatagtaatagatcctctgcttttggcaacttggcccactcatcttcctgcttgaccaattctcctccatctctgagcttatccattcatttttcttttcaaactagaacccacatgcagatgactcccaaatctatatccagtccagacaacttctgttatctaacttctggttaggtatctccactaggatgtttctcagacacctcagactcaacacaagcaaaactcaattgataactaccccctccaactgcctgttgcctacagctggaaaggcatgtggagagaagatacacacccaatcatcttcctgaagcttttgaatactgatgataaagaaaaaaaccttccaaactttttaacaacagaaagattttctgcaaatagttaacctgacagcygacttttcatctgcaacgtgaaatactagaaaacagctattagaagcaatgaaacttccatgcatacagcaccaaagagagactttaaaaatagttttaaaaaagagatttatacacaataccatttatgtaaattaaaaacaaatacagaacagccctgcacattttacatggatccataaataatagcaaatacacaagagaagggcttactaggagaggaggaggaaatagggggaaagagaaaaagccagaatgaagagtggggtctagtgtggacctctgatggcaatgcccacaaaagagcaggagagaatatctcagccctctgcttctgagatccaaaatttaaaaaaaaaatcgtttaaaaataggggatgggcacggtggttcatgcctgtaatcccagcactttgggaggctgaggtggacggatcacttgagaccagcctagccaacatggtgaaactctgtctctaataaaaatacaaaaattagctgggtgtggtggttgtaatcccagctacttgggaggctgaggcaggagaatcgcttgaaccccagagaatcgcttgaacccaggaggcagaggttgcagtgagccaagatcgtgccactgcactccagccttggcgacagagcgagaatccgtctcaaagaaaaaaaggtgttcctaaatgcagaaaaaggttgcgcatcactgaagtaaatgatgaactaaatataagatttggaggtaggcaggtaggtagaggagcttgccagagtgcaggtatttatgtttgcttagaaaagctacaagtttttcacttcacagttcatatggaaccaaaaaagagcccacattgccaagataatcctaagccaaaagaacaaagctggaggcatcacactacctgacttcaaactatactacaaggctacagtaaccaaaagagcatggtgctggtaccaaaacagagatgtagaccaatggaacagaacagagccctcagaaataataccacacatctacaaccatctgatctttgacaaacctgacaaaaacaagaaatggggaaaggattccctatttaataaacgatgctgggaaaactgcctagccatatgtagaaagctaaaact

SEQ ID NO: 682906 - DNA, 1558 bp, Homo sapiens
aagaaaggggaggaaaaccattggtcactgatagtaatagatcctctgcttttggcaacttggcccactcatcttcctgcttgaccaattctcctccatctctgagcttatccattcatttttcttttcaaactagaacccacatgcagatgactcccaaatctatatccagtccagacaacttctgttatctaacttctggttaggtatctccactaggatgtttctcagacacctcagactcaacacaagcaaaactcaattgataactaccccctccaactgcctgttgcctacagctggaaaggcatgtggagagaagatacacacccaatcatcttcctgaagcttttgaatactgatgataaagaaaaaaaccttccaaactttttaacaacagaaagattttctgcaaatagttaacctgacagccgacttttcatctgcaacgtgaaatactagaaaacagctattagaagcaatgaaacttccatgcatacagcaccaaagagagactttaaaaatagttttaaaaaagagatttatacacaataccatttatgtaaattaaaaacaaatacagaacagccctgcacattttacatggatccataaataatagcaaatacacaagagaagggcttactaggagaggaggaggaaatagggggaaagagaaaaagccagaatgaagagtgsggtctagtgtggacctctgatggcaatgcccacaaaagagcaggagagaatatctcagccctctgcttctgagatccaaaatttaaaaaaaaaatcgtttaaaaataggggatgggcacggtggttcatgcctgtaatcccagcactttgggaggctgaggtggacggatcacttgagaccagcctagccaacatggtgaaactctgtctctaataaaaatacaaaaattagctgggtgtggtggttgtaatcccagctacttgggaggctgaggcaggagaatcgcttgaaccccagagaatcgcttgaacccaggaggcagaggttgcagtgagccaagatcgtgccactgcactccagccttggcgacagagcgagaatccgtctcaaagaaaaaaaggtgttcctaaatgcagaaaaaggttgcgcatcactgaagtaaatgatgaactaaatataagatttggaggtaggcaggtaggtagaggagcttgccagagtgcaggtatttatgtttgcttagaaaagctacaagtttttcacttcacagttcatatggaaccaaaaaagagcccacattgccaagataatcctaagccaaaagaacaaagctggaggcatcacactacctgacttcaaactatactacaaggctacagtaaccaaaagagcatggtgctggtaccaaaacagagatgtagaccaatggaacagaacagagccctcagaaataataccacacatctacaaccatctgatctttgacaaacctgacaaaaacaagaaatggggaaaggattccctatttaataaacgatgctgggaaaactgcctagccatatgtagaaagctaaaact

SEQ ID NO: 682907 - DNA, 1558 bp, Homo sapiens
aagaaaggggaggaaaaccattggtcactgatagtaatagatcctctgcttttggcaacttggcccactcatcttcctgcttgaccaattctcctccatctctgagcttatccattcatttttcttttcaaactagaacccacatgcagatgactcccaaatctatatccagtccagacaacttctgttatctaacttctggttaggtatctccactaggatgtttctcagacacctcagactcaacacaagcaaaactcaattgataactaccccctccaactgcctgttgcctacagctggaaaggcatgtggagagaagatacacacccaatcatcttcctgaagcttttgaatactgatgataaagaaaaaaaccttccaaactttttaacaacagaaagattttctgcaaatagttaacctgacagccgacttttcatctgcaacgtgaaatactagaaaacagctattagaagcaatgaaacttccatgcatacagcaccaaagagagactttaaaaatagttttaaaaaagagatttatacacaataccatttatgtaaattaaaaacaaatacagaacagccctgcacattttacatggatccataaataatagcaaatacacaagagaagggcttactaggagaggaggaggaaatagggggaaagagaaaaagccagaatgaagagtggggtctagtgtggacctctgatggcaatgcccacaaaagagcaggagagaatatctcagccctctgcttctgagatccaaaatttwaaaaaaaaatcgtttaaaaataggggatgggcacggtggttcatgcctgtaatcccagcactttgggaggctgaggtggacggatcacttgagaccagcctagccaacatggtgaaactctgtctctaataaaaatacaaaaattagctgggtgtggtggttgtaatcccagctacttgggaggctgaggcaggagaatcgcttgaaccccagagaatcgcttgaacccaggaggcagaggttgcagtgagccaagatcgtgccactgcactccagccttggcgacagagcgagaatccgtctcaaagaaaaaaaggtgttcctaaatgcagaaaaaggttgcgcatcactgaagtaaatgatgaactaaatataagatttggaggtaggcaggtaggtagaggagcttgccagagtgcaggtatttatgtttgcttagaaaagctacaagtttttcacttcacagttcatatggaaccaaaaaagagcccacattgccaagataatcctaagccaaaagaacaaagctggaggcatcacactacctgacttcaaactatactacaaggctacagtaaccaaaagagcatggtgctggtaccaaaacagagatgtagaccaatggaacagaacagagccctcagaaataataccacacatctacaaccatctgatctttgacaaacctgacaaaaacaagaaatggggaaaggattccctatttaataaacgatgctgggaaaactgcctagccatatgtagaaagctaaaact

SEQ ID NO: 682908 - DNA, 1558 bp, Homo sapiens
aagaaaggggaggaaaaccattggtcactgatagtaatagatcctctgcttttggcaacttggcccactcatcttcctgcttgaccaattctcctccatctctgagcttatccattcatttttcttttcaaactagaacccacatgcagatgactcccaaatctatatccagtccagacaacttctgttatctaacttctggttaggtatctccactaggatgtttctcagacacctcagactcaacacaagcaaaactcaattgataactaccccctccaactgcctgttgcctacagctggaaaggcatgtggagagaagatacacacccaatcatcttcctgaagcttttgaatactgatgataaagaaaaaaaccttccaaactttttaacaacagaaagattttctgcaaatagttaacctgacagccgacttttcatctgcaacgtgaaatactagaaaacagctattagaagcaatgaaacttccatgcatacagcaccaaagagagactttaaaaatagttttaaaaaagagatttatacacaataccatttatgtaaattaaaaacaaatacagaacagccctgcacattttacatggatccataaataatagcaaatacacaagagaagggcttactaggagaggaggaggaaatagggggaaagagaaaaagccagaatgaagagtggggtctagtgtggacctctgatggcaatgcccacaaaagagcaggagagaatatctcagccctctgcttctgagatccaaaatttaaaaaaaaaatcgttyaaaaataggggatgggcacggtggttcatgcctgtaatcccagcactttgggaggctgaggtggacggatcacttgagaccagcctagccaacatggtgaaactctgtctctaataaaaatacaaaaattagctgggtgtggtggttgtaatcccagctacttgggaggctgaggcaggagaatcgcttgaaccccagagaatcgcttgaacccaggaggcagaggttgcagtgagccaagatcgtgccactgcactccagccttggcgacagagcgagaatccgtctcaaagaaaaaaaggtgttcctaaatgcagaaaaaggttgcgcatcactgaagtaaatgatgaactaaatataagatttggaggtaggcaggtaggtagaggagcttgccagagtgcaggtatttatgtttgcttagaaaagctacaagtttttcacttcacagttcatatggaaccaaaaaagagcccacattgccaagataatcctaagccaaaagaacaaagctggaggcatcacactacctgacttcaaactatactacaaggctacagtaaccaaaagagcatggtgctggtaccaaaacagagatgtagaccaatggaacagaacagagccctcagaaataataccacacatctacaaccatctgatctttgacaaacctgacaaaaacaagaaatggggaaaggattccctatttaataaacgatgctgggaaaactgcctagccatatgtagaaagctaaaact

SEQ ID NO: 682909 - DNA, 607 bp, Homo sapiens
tattcatatgtaatatgtatatgtgacatttgttgttacgtctggacrtgttgattcagtgtaatttttttcctcttccatagttttatgtcataaagaattttgtacagtgagcatgtattatttttatagtcaggaaaaaatctagctaggttggaaagttgacagcaaaaagattgagcattgtattggaatgttaaaacaacaaaaaaattaggtgaaatgtttccctagtcttaatgtataagaaggcaacaatatgcattttttgcaagatggtagtaatatctacttcacaaggctattgcaaggatctcaaagtaatcacactaagaatcttaatattctacaagtattaattatgactatgagaaatgaataggaaaaactacatataaaattgttcagtccaaatttatatagcattctctaagggtaaggcttgggagattttgtaaatgttaacaagatagagtataatatccttctctagagatttaaaaataatttattatagaagacatcaagcatgctctaaacgtgggaagaacagttgaatgaattcccatatacctattgccgagactcaacaatcaccaaaatgttg

SEQ ID NO: 682910 - DNA, 607 bp, Homo sapiens
tattcatatgtaatatgtatatgtgacatttgttgttacgtctggacatgttgattcagtgtaatttttttcctcttccatagttttatgtcataaagaattttgtacagtgagcatgtwttatttttatagtcaggaaaaaatctagctaggttggaaagttgacagcaaaaagattgagcattgtattggaatgttaaaacaacaaaaaaattaggtgaaatgtttccctagtcttaatgtataagaaggcaacaatatgcattttttgcaagatggtagtaatatctacttcacaaggctattgcaaggatctcaaagtaatcacactaagaatcttaatattctacaagtattaattatgactatgagaaatgaataggaaaaactacatataaaattgttcagtccaaatttatatagcattctctaagggtaaggcttgggagattttgtaaatgttaacaagatagagtataatatccttctctagagatttaaaaataatttattatagaagacatcaagcatgctctaaacgtgggaagaacagttgaatgaattcccatatacctattgccgagactcaacaatcaccaaaatgttg

SEQ ID NO: 682911 - DNA, 607 bp, Homo sapiens
tattcatatgtaatatgtatatgtgacatttgttgttacgtctggacatgttgattcagtgtaatttttttcctcttccatagttttatgtcataaagaattttgtacagtgagcatgtattwtttttatagtcaggaaaaaatctagctaggttggaaagttgacagcaaaaagattgagcattgtattggaatgttaaaacaacaaaaaaattaggtgaaatgtttccctagtcttaatgtataagaaggcaacaatatgcattttttgcaagatggtagtaatatctacttcacaaggctattgcaaggatctcaaagtaatcacactaagaatcttaatattctacaagtattaattatgactatgagaaatgaataggaaaaactacatataaaattgttcagtccaaatttatatagcattctctaagggtaaggcttgggagattttgtaaatgttaacaagatagagtataatatccttctctagagatttaaaaataatttattatagaagacatcaagcatgctctaaacgtgggaagaacagttgaatgaattcccatatacctattgccgagactcaacaatcaccaaaatgttg

SEQ ID NO: 682912 - DNA, 648 bp, Homo sapiens
ttgcttacttctgtgattccatgttgtatttctgtagacatttcagatgtaagagtgcttattatgtagctgatgattcccctctcaggaatctacatctgttgtgtagggtttctgctggcgctcacctgatggagtttgtttggttctctttgagagcatgagtttaggtgaatagggayactctccagagagggccagcttttgtttccagggaaaactgtgggactaaggacttggaaccacttttgttcccttctagagtccccaccttgctgcaagagtcttaggttcaggtccccacctgggctgggtctcacatattgattgaagggctcttggcatttgcttcagggcagccttgactagtaagtttccatcatatactgttctggtttcagctcaaggtttttgcttgtttgcattttttttcttttctcttttagtatttttcttgtttccagtaagtccagtaaaaatgttatgcttaacacataatgtctaggctggtctcgaactcttgggctcaggtgatcctcctgccttggcctcccaaagtgctgggatgagtacctaataggccatacttctgggaatgggagcctacagcaaaatttacagaattaaaatatggaaacaacttaaagg

SEQ ID NO: 682913 - DNA, 648 bp, Homo sapiens
ttgcttacttctgtgattccatgttgtatttctgtagacatttcagatgtaagagtgcttattatgtagctgatgattcccctctcaggaatctacatctgttgtgtagggtttctgctggcgctcacctgatggagtttgtttggttctctttgagagcatgagtttaggtgaatagggacactctccagagagggccagcttttgtttccagggaaaactgtgggactaaggacttggarccacttttgttcccttctagagtccccaccttgctgcaagagtcttaggttcaggtccccacctgggctgggtctcacatattgattgaagggctcttggcatttgcttcagggcagccttgactagtaagtttccatcatatactgttctggtttcagctcaaggtttttgcttgtttgcattttttttcttttctcttttagtatttttcttgtttccagtaagtccagtaaaaatgttatgcttaacacataatgtctaggctggtctcgaactcttgggctcaggtgatcctcctgccttggcctcccaaagtgctgggatgagtacctaataggccatacttctgggaatgggagcctacagcaaaatttacagaattaaaatatggaaacaacttaaagg

SEQ ID NO: 682914 - DNA, 648 bp, Homo sapiens
ttgcttacttctgtgattccatgttgtatttctgtagacatttcagatgtaagagtgcttattatgtagctgatgattcccctctcaggaatctacatctgttgtgtagggtttctgctggcgctcacctgatggagtttgtttggttctctttgagagcatgagtttaggtgaatagggacactctccagagagggccagcttttgtttccagggaaaactgtgggactaaggacttggaaccacttttgttcccttctagagtccccaccttgctgcaagagtctyaggttcaggtccccacctgggctgggtctcacatattgattgaagggctcttggcatttgcttcagggcagccttgactagtaagtttccatcatatactgttctggtttcagctcaaggtttttgcttgtttgcattttttttcttttctcttttagtatttttcttgtttccagtaagtccagtaaaaatgttatgcttaacacataatgtctaggctggtctcgaactcttgggctcaggtgatcctcctgccttggcctcccaaagtgctgggatgagtacctaataggccatacttctgggaatgggagcctacagcaaaatttacagaattaaaatatggaaacaacttaaagg

SEQ ID NO: 682915 - DNA, 669 bp, Homo sapiens
tttcatacattaggtaggctgctcaaaaagacagatgaatccaggaacattaactataaattacaggaagyaaaatggggatctggcaactatggttagtgttgcatcagacatagtttctgtattagatctttgtaaaatgctccttgagtagtatgccatgattggtcttacttagtaagttatttactaactttaatttattggtattaaaataccaataaatttcagcttcaaacaataatcagaatagagactgactgcactttactttcattgtcctgccataaagatatttaaattctctaatgtgtgttataatctgataaacagtgtttaaataggttgcagtttctcattttattgatgacaggctcattaaggatgattcagaaaccataatattagaagttctgtcttccttcattgctttcatgactgaagggaacagggcactaaagagaagtacagagaagtaatttgcccatagagacacagctcaaatacagataatgtggctctagcaccctggctcctaaccactcctctatgcagcattagaaataagaatgttggccaggcacggtggctcacgcctgtaatcccagcactttgggaagccgaggcaggcagatcacaaggtcaggagatcgagaccatcctggccaa

SEQ ID NO: 682916 - DNA, 589 bp, Homo sapiens
tcttgcatctctgcccttccttctgggattacattccttctcctaaagctaattatttagaagttctttcactgagggtctgatgattgtaaactctctgtgttgtttacctgaaaatatacatckcaccaattctaggtcaacaaaaattttgcctcagcactttgcaggcatttttcactgccttctgattttcattgttgttttcaagagatgagctatcagactattgttcctttaaactttttaaagacaatctgcatttatccctggttatttaaagatctcttggccgggcacgatggctcacacctgtaatcccagcactttgggaggccaaggtgggcagatcacctgaggtcaagagttcgagaccagcctggccaacatggtgaaaccccgtctctactaaaaatacaaaaattagctgggtgtggtggtgggctcctataatcccagctactcaggaggctgaggcagaagaatcacttgaatttgggaggcaaatgttgcagtgagccaagatcacgccactgcactccagcctgggcgacagagcgagactccatcttaaaaaaaaaaaaaaaaa

SEQ ID NO: 682917 - DNA, 589 bp, Homo sapiens
tcttgcatctctgcccttccttctgggattacattccttctcctaaagctaattatttagaagttctttcactgagggtctgatgattgtaaactctctgtgttgtttacctgaaaatatacatctcaccaattctaggtcaacaaaaattttgcctcagcactttgcaggcatttttcactgccttctgattttcattgttgttttcaagagatgagctatcagactattgttcctttaaactttttaaagacaatctgcatttatccctggttatttaaagatctcttggccgggcacgatggctcacacctgtaatcccagcactttgggaggccaaggtgggcagatcacctgaggtcaagagttcgagaccagcctggccaacatggtgaaaccccgtctctactaaaaatacaaaaattagctgggtgtggtggtgggctcctataatcccagctactcaggaggctgaggcagaagaatcacttgaatttgggaggcaaatgttgcagtgagccaagatcacgccactgcactccagcctgggcgacagagcgagactccatcttaaaaaaraaaaaaaaaa

SEQ ID NO: 682918 - DNA, 2271 bp, Homo sapiens
tgggttttctttcacccctaatctcaggaagtgagtgaccttaaggcaggtctggctggctaaaatgactcagctgtaagccattagctgcaaacactcctagcagctgggaggtggcgtgccacaccgttctctccagttgatatcttgtaccactcaaatccacttrggttgtatgataaggttacaccatctatagaaatagtttgtctagaactattatatatatagatatagtttgttggtctcatttcctgggaaacttacaaagagttatagtggtacgttctgcaactccaagtactgaagcagaactcatcaactccttccattctagattcctttcacgcacagcaggcatctctgtttacctggtgcagcagcctagatcctcattaggtctctgaaaccctgttcacaaagcccttatcacactgtggctgctgaacttgtccatttaccatcataatccaccaagggagtagaaagagataacccactggatcacctggatgctaagtgtattcttcccttttcccattttacctcctcctgatgatcagttgccaggatggtgaatcctttctttgtttctgggttttatggcataagaagcctgaagtaatcagaaagcagctgcagtttaatggttatcttgctgtgtgccttgattaaagcagtttctctttgggaactaggaactttgagcctacacagaccaagctgtgaggtgggaagcagaaaatccctagtggttctgagagtgatagtaactgggcccctaatatcccatgcttcctgaactcatgtattctatgtattggtgacatggtactgtaggagggttgctggattttgctggacactttctcctgaaggatggtgatctgtcctcacggggtataactcctagctgcccctctgcgggcctccaccagatttttccattgctccattaggctgggagcaagtaggcaatgcacgtaggcaatgagaacttagatccaatggttgcatgctactgcgcctcctttgctagataaagtgagttattcagcctgagacaatgttatgtggaatcctgtgttaacaacaacaaaatcatctctgagagtggtgctgataaaggcactgtcgtcagaaaaggaaagccatacctggcatatctctctctcctggcgtatatgtctctccctgctcctttgagggttgtagtcacccaaactaatctatttgacactaagatatttttaaaaatatatctcttataattctagcaatctaataagggaaatagtcattaaaattaaaaattacaagacattgggattgataaactaagttcgcttaagaaagaattgatctcttgtgtttgaggatttagaaaagtggagttacatgagatggacattttaattggtcagtatgttcctgatgaagtgaacattgatgttaggaaaatgaagtgtcattactgaaggtcctgaaatgtaaacatgctgaatgcagtgcatgaattcactgaattgatgtgtgtgtgtgtgtgtgtgtgtgtgtgtgtgtgtgtgtgtgtgtgtatgcccaatccaagttagtccccaatagtctccaatctcattttcactctgaaacattctggttaaaaaatccctagtactgcttagaactgagtaggtcattaagaaaagtgatgtctaattattgttcccccagttgaaaatattgcattcttaagatggaaaatatggtttgtgggaattttggtaataagaggttgccagaaaagtgaagctcactgaaatataattttcttatttgattcatgcaggtttatattctatgattacgaaatcatttcatgctaaatttagttttgagcctaagttttgttttctaatattttgtagaacttggattttgaagattccataatgattgtaaatgctgaatgcaatattttatcatgattatccacctcaggaaaatataattatgtctctggaaactctaattagtatgtaaaatagatttaacaaaaaagaaaaagaagggcaaagaatagaaatcacctcttttgtgcagtttcttagtttgaatgagacaagcagtttttttgtcttatgccaaaaaatggatttataattttcattagaatcataaagtgttaagtatatttaattaatggaaatatgtgatagaaaatatccagaaaaaaactgcggaatttcaaataatacaaatacattgtttaagattaaatatacaataatc

SEQ ID NO: 682919 - DNA, 2271 bp, Homo sapiens
tgggttttctttcacccctaatctcaggaagtgagtgaccttaaggcaggtctggctggctaaaatgactcagctgtaagccattagctgcaaacactcctagcagctgggaggtggcgtgccacaccgttctctccagttgatatcttgtaccactcaaatccacttaggttgtatgataaggttacaccatctatagaaatagtttgtctagaactattatatatatagatatagtttgttggtctcatttcctgggaaacttacaaagagttatagtggtacgttctgcaactccaagtactgaagcagaactcatcaactccttccattctagattcctttcacgcacagcaggcatctctgtttacctggtgcagcagcctagatcctcattaggtctctgaaaccctgttcacaaagcccttatcacactgtggctgctgaacttgtccatttaccatcataatccaccaagggagtagaaagagataacccactggatcacctggatgctaagtgtattcttcccttttcccattttacctcctcctgatgatcagttgcyaggatggtgaatcctttctttgtttctgggttttatggcataagaagcctgaagtaatcagaaagcagctgcagtttaatggttatcttgctgtgtgccttgattaaagcagtttctctttgggaactaggaactttgagcctacacagaccaagctgtgaggtgggaagcagaaaatccctagtggttctgagagtgatagtaactgggcccctaatatcccatgcttcctgaactcatgtattctatgtattggtgacatggtactgtaggagggttgctggattttgctggacactttctcctgaaggatggtgatctgtcctcacggggtataactcctagctgcccctctgcgggcctccaccagatttttccattgctccattaggctgggagcaagtaggcaatgcacgtaggcaatgagaacttagatccaatggttgcatgctactgcgcctcctttgctagataaagtgagttattcagcctgagacaatgttatgtggaatcctgtgttaacaacaacaaaatcatctctgagagtggtgctgataaaggcactgtcgtcagaaaaggaaagccatacctggcatatctctctctcctggcgtatatgtctctccctgctcctttgagggttgtagtcacccaaactaatctatttgacactaagatatttttaaaaatatatctcttataattctagcaatctaataagggaaatagtcattaaaattaaaaattacaagacattgggattgataaactaagttcgcttaagaaagaattgatctcttgtgtttgaggatttagaaaagtggagttacatgagatggacattttaattggtcagtatgttcctgatgaagtgaacattgatgttaggaaaatgaagtgtcattactgaaggtcctgaaatgtaaacatgctgaatgcagtgcatgaattcactgaattgatgtgtgtgtgtgtgtgtgtgtgtgtgtgtgtgtgtgtgtgtgtgtgtatgcccaatccaagttagtccccaatagtctccaatctcattttcactctgaaacattctggttaaaaaatccctagtactgcttagaactgagtaggtcattaagaaaagtgatgtctaattattgttcccccagttgaaaatattgcattcttaagatggaaaatatggtttgtgggaattttggtaataagaggttgccagaaaagtgaagctcactgaaatataattttcttatttgattcatgcaggtttatattctatgattacgaaatcatttcatgctaaatttagttttgagcctaagttttgttttctaatattttgtagaacttggattttgaagattccataatgattgtaaatgctgaatgcaatattttatcatgattatccacctcaggaaaatataattatgtctctggaaactctaattagtatgtaaaatagatttaacaaaaaagaaaaagaagggcaaagaatagaaatcacctcttttgtgcagtttcttagtttgaatgagacaagcagtttttttgtcttatgccaaaaaatggatttataattttcattagaatcataaagtgttaagtatatttaattaatggaaatatgtgatagaaaatatccagaaaaaaactgcggaatttcaaataatacaaatacattgtttaagattaaatatacaataatc

SEQ ID NO: 682920 - DNA, 586 bp, Homo sapiens
tagcataattacatgtaatcagaggcaaattgtggttctttcattaattggctatggccctaaagaagtcatgtaatatactgaattccacggttttaagtgggtgtataattaggaagcaaaaccagaattttaaaatataatgactttgactacctttaacacattatggtgccaaggttttaatgacattctcctcaatcatttagcagttttctgctgtactcaattagacaaagattacttggctgaggctcagtgctttgggtgttctgaccttgatttcctgttggtagttctttaactctgggtcatgatacttgtatgttggtcaagtccagtgttttttttccggagcaattgttaaaagtacaaatgcatggactccccaaagacaaactaagtcagaatttttaagagtgtgatcataatattattttttaaagtattgctactggattaaaaatgcacttaaagttgaatcactggtttatatgccaataaarttaaatagaaaagtctgacctccttgagctctatccccagaatagccatcaaggaatcggctactttctagagacaataa

SEQ ID NO: 682921 - DNA, 607 bp, Homo sapiens
ctagagtgcagtggtgcgatctcggctcactgaaacttccgcctcccgggttcragcgatcctcctgtctcaacctcccaagtagctgggattacaggtacccgccatcacgccaggctaattttttgtatttttactagagacggggtctcaccatgttggccaggctggtctcgaactcctgacctcaagtgatccactcaccttggcctcccaacattttccttttattctaaagacacacgttacattggactaaggcactaacctactgcagtatgacattctcttaatttaattaattttatctgcaattactttatatccaaataaattgcattctgaggtactggggactagaacttcaacacctgtttttggagaaacaactcaatgcataacaatgtctttttcatcttggaaattagtgctatgttactttaatggcaaagaaagaaaaaaggcaagtattccacttttacaatctaaaatgcctgctatgtagtacagagcagatgaaacctgtgaaaagccacatattagactctctaagcccagctttttacaggcagcctgctcaaatttgaaacatagaacttccactcaa

SEQ ID NO: 682922 - DNA, 607 bp, Homo sapiens
ctagagtgcagtggtgcgatctcggctcactgaaacttccgcctcccgggttcgagcgatcctcctgtctcaacctcccaagtagctgggattacaggtacccgccatcacgccaggctaattttttgtatttttactagagacggggtctcaccatgttggccaggctggtctcgaactcctgacctcaagtgatccactcaccttggcctcccaacattttccttttattctaaagacacacgttacattggactaaggcactaacctactgcagtatgacattctcttaatttaattaattttatctgcaattactttatatccaaataaattgcattctgaggtactggggactagaacttcaacayctgtttttggagaaacaactcaatgcataacaatgtctttttcatcttggaaattagtgctatgttactttaatggcaaagaaagaaaaaaggcaagtattccacttttacaatctaaaatgcctgctatgtagtacagagcagatgaaacctgtgaaaagccacatattagactctctaagcccagctttttacaggcagcctgctcaaatttgaaacatagaacttccactcaa

SEQ ID NO: 682923 - DNA, 3023 bp, Homo sapiens
gagaaagactgatgcctctttctttgcaagcagtctgtgtttatgtgtgcctatgtctgtgtgtgtctctgttttctttctggcagttccatttttaccctcaaaattaaaacctttcccctgaaatatattaataaaaattattttattaatatatttcacttcataaacaaaataagtcatatttatataggactaagaaaaacatagatcatagtgcttccgattatagaaataatacattttaaaagcaaaacctgagaaactacataaaattacacacataaaaacgaagaatacattcacttttccatcataacgactgctgacattttgatgaatatccttccaaactaccagagcagaaaacagcttgtgcaagatattttatcacagcattgtttcagattctataaaattcaaaaaaggcttgtttaataaatcttgctctatcacaaaatgaattactctgtaagtattacaaataaggaaataaatcaatgtgttaacgtggaaaacattccgcagcgcatttttattcaaaacaacagcaagttgcaaagcagtatgtcaggtagaattgcgttttattaataaacttttaattttagaacagttttagatatacagaaaaattgcaaggagtgtacagagagttgccacataccccaaacccagtttcttctaataacatcttaacattactaaggtatgtttcgtgtttaccttctgtagcattttatttcaggaatgtttcttcataaacatacaaatatctggatattgttatttgatgctaaaaacctttgccttttaacaaaaatgttttaatgtcttttaatttggtaaattttgataaaaaatgaaattcttattttctattctttgtcttttacggtatcagctttttcaaaaaactactgcctagcattaagcttttcatctcccaggtagctgttgtacatatctttatctatagttatgcctacgtgtacatcgataactatatttgcattttccctatatccgtgagtgttgtttgctcctgtcattattttaagaagttgataggagtgtactgagtctttcaataactgaaaatatctttctattggatcctttctgttgcatcctaacttgatgaaacacagacgttgtaagtcacagcacatctcacaaaagctttccatcttttgcatctttgtgtttgcatattagttttgttcattcccaattggagaaacacagatacctctttctctgcaaccagtctgtgtttatttgtgcccatgtctgtgttttctttctggcagtttcacttttaccctctaaattaaaactcttctcataaatatatcttggaataagtttctgaacttttcatgtagattttatatatatatatatatatatatatatatatatatatatatatatatatatatatataaactcactgcagtgaggacaaagagaataaattcacaaatctcagaataagtcagtagccctgaatttgccaaaaagagagtgtaaagaaaggccatgttgtaatccatgctgaggcggtggggcataacaaattgtggcaccaagtttgtttcatttataacaactgctaggaaatcttcattgttatttattctgaaatagtgaaaatgtatggaatggtaaagtatattgtggccatgagaaaccccataggactggctgcaaagtgtgatatggtgatatgcaggcagattagtatatccaggcaaaataccaagtctagtgtgggaaacactgctgcagctttaatagtggctctgttatggctgggaaacagcaagtgacagtcaaggacgagtccatacgccagtcgtgctttgtgaagaactacactgtgaagtgtccaaggtaccatagtgctcttgatccagaagggaaataagtgatctgcaacaaagtcaactgctctgtattcaaaggacagcctgtgttactgctgtactgaggattatactggctgaagtgcatgtccaaagaaggttagagtctttctgttcagataattgtaagaaatatagataataacttataaaaggtcaatactgagccactctgtccatagccatcggcattttcactgcaaaattgaattattgtaaacatatttttaaaaaagaaagaaaaagaaaaaccagaggaaaccaaaaactatttttcaatatctttttttaccctcttttcctttgaaatagttcaagcctaattaaaaaaaaattgaggtttgcattttaaaatgcagaaatgtatctagcttcatccttctaaaccaaaactctttaagaatttgaggttaataaatcttagtattgttcatttgccaattaaagtgcaagagtaactgccaaagagtattaaggtatgaaaagttgaaaacttcagttcttaacaccttttcatttgtaaaagaaaaatgaaataaaatttatgttttattgccttttctcattgactaaagtttgcagtgctatacagtcaacatttttttaatagtgtaacagatgaagcttaccatttattatcattttaatgtgtacctactcacttgatttaaacagaggtggtgtttttaaatcacttttcttgctatctatgccacatttattccattcctgagcactgtcattgtatttttttatcttctctgaaaacytgatatttttattatgtgtcatgaaaacattcacatagacttccacagattgttttgagcttggatataaattttgagttcggcattcagtcataataaatggtatcaattccaagaattcatttactagcagttcacaaaagtttctgtctcattaacaccttaaaagctcaaaaatgttaaagagcccaaagaccttttatctatgtgagttttatttttatatatgtatacttaatagaaattaatactgaggaattcttaaaataattgtcatttaaaataatactttcattacatgcccatgttacattgcataaca

SEQ ID NO: 682924 - DNA, 3023 bp, Homo sapiens
gagaaagactgatgcctctttctttgcaagcagtctgtgtttatgtgtgcctatgtctgtgtgtgtctctgttttctttctggcagttccatttttaccctcaaaattaaaacctttcccctgaaatatattaataaaaattattttattaatatatttcacttcataaacaaaataagtcatatttatataggactaagaaaaacatagatcatagtgcttccgattatagaaataatacattttaaaagcaaaacctgagaaactacataaaattacacacataaaaacgaagaatacattcacttttccatcataacgactgctgacattttgatgaatatccttccaaactaccagagcagaaaacagcttgtgcaagatattttatcacagcattgtttcagattctataaaattcaaaaaaggcttgtttaataaatcttgctctatcacaaaatgaattactctgtaagtattacaaataaggaaataaatcaatgtgttaacgtggaaaacattccgcagcgcatttttattcaaaacaacagcaagttgcaaagcagtatgtcaggtagaattgcgttttattaataaacttttaattttagaacagttttagatatacagaaaaattgcaaggagtgtacagagagttgccacataccccaaacccagtttcttctaataacatcttaacattactaaggtatgtttcgtgtttaccttctgtagcattttatttcaggaatgtttcttcataaacatacaaatatctggatattgttatttgatgctaaaaacctttgccttttaacaaaaatgttttaatgtcttttaatttggtaaattttgataaaaaatgaaattcttattttctattctttgtcttttacggtatcagctttttcaaaaaactactgcctagcattaagcttttcatctcccaggtagctgttgtacatatctttatctatagttatgcctacgtgtacatcgataactatatttgcattttccctatatccgtgagtgttgtttgctcctgtcattattttaagaagttgataggagtgtactgagtctttcaataactgaaaatatctttctattggatcctttctgttgcatcctaacttgatgaaacacagacgttgtaagtcacagcacatctcacaaaagctttccatcttttgcatctttgtgtttgcatattagttttgttcattcccaattggagaaacacagatacctctttctctgcaaccagtctgtgtttatttgtgcccatgtctgtgttttctttctggcagtttcacttttaccctctaaattaaaactcttctcataaatatatcttggaataagtttctgaacttttcatgtagattttatatatatatatatatatatatatatatatatatatatatatatatatatatatataaactcactgcagtgaggacaaagagaataaattcacaaatctcagaataagtcagtagccctgaatttgccaaaaagagagtgtaaagaaaggccatgttgtaatccatgctgaggcggtggggcataacaaattgtggcaccaagtttgtttcatttataacaactgctaggaaatcttcattgttatttattctgaaatagtgaaaatgtatggaatggtaaagtatattgtggccatgagaaaccccataggactggctgcaaagtgtgatatggtgatatgcaggcagattagtatatccaggcaaaataccaagtctagtgtgggaaacactgctgcagctttaatagtggctctgttatggctgggaaacagcaagtgacagtcaaggacgagtccatacgccagtcgtgctttgtgaagaactacactgtgaagtgtccaaggtaccatagtgctcttgatccagaagggaaataagtgatctgcaacaaagtcaactgctctgtattcaaaggacagcctgtgttactgctgtactgaggattatactggctgaagtgcatgtccaaagaaggttagagtctttctgttcagataattgtaagaaatatagataataacttataaaaggtcaatactgagccactctgtccatagccatcggcattttcactgcaaaattgaattattgtaaacatatttttaaaaaagaaagaaaaagaaaaaccagaggaaaccaaaaactatttttcaatatctttttttaccctcttttcctttgaaatagttcaagcctaattaaaaaaaaattgaggtttgcattttaaaatgcagaaatgtatctagcttcatccttctaaaccaaaactctttaagaatttgaggttaataaatcttagtattgttcatttgccaattaaagtgcaagagtaactgccaaagagtattaaggtatgaaaagttgaaaacttcagttcttaacaccttttcatttgtaaaagaaaaatgaaataaaatttatgttttattgccttttctcattgactaaagtttgcagtgctatacagtcaacatttttttaatagtgtaacagatgaagcttaccatttattatcattttaatgtgtacctactcacttgatttaaacagaggtggtgtttttaaatcacttttcttgctatctatgccacatttattccattcctgagcactgtcattgtatttttttatcttctctgaaaacttgatatttttattatgtgtcatgaaaacattcacatagacttccacagattgttttgagcttggatataaattttgagttcggcattcagtcataataaatgrtatcaattccaagaattcatttactagcagttcacaaaagtttctgtctcattaacaccttaaaagctcaaaaatgttaaagagcccaaagaccttttatctatgtgagttttatttttatatatgtatacttaatagaaattaatactgaggaattcttaaaataattgtcatttaaaataatactttcattacatgcccatgttacattgcataaca

SEQ ID NO: 682925 - DNA, 1410 bp, Homo sapiens
tagcccaaaacaaagaacaactattatttattcaatgatcctttttgagcactttccaagaactgttgccaggaacttggacaaacagggttgcaaaacagttagtcatagccgtgtgcggtggctcacacctgtaatcccaacactttggcaggccgaggcaggtggatcacaaggtcaggagatcgaggccacggtgaaaccccgtctctactaaaaatacaaaaaaattagctaggcgtggtggcaggcgactgtagtcccagctactcgggaggctgaggcaggagaatggcgtgaacctgggaggtggagcttgcagtgagccgagattgcgccactgcactccagcctgggtgacagagtgagactccatctcaaaacaaaaacaaaacaaaacaaaacaaaacaaaacaaaaacagttagtcataaactccatcacaccttcccatggaaatcaccttcaggggtcacggttaggcatcagatcccaagaacagctctgcagaactagcagggacccattagctctcagggagctgagctcagttttgccatgcacatatcacatagaggtataccatgggagggcatgttggagggagagctgattgtgcatgttaaataggcattttttgtgtcagattctactgagtattaatatctattttggttttacactctactagcctaatggccaagatggagctcatctactaagggaagctaataagctttcagaacacccaggtttttagtaaaattcctctgacaacatgcaagaaacacatctagactacttccctttgaggatgccaagttctgtacaaagagaaccattcaactctgtaaccatgtgttgagaaatactgcataaaaacacatctgaattgggaaagttgtacagctggaggtagggtaggtggctgctgagacgtagggcagttcccaggtagggaacaaaacatggttggggatccatatgccactggtaaatccctcttatctgcacagtcttcctttacagaagtttctgtgaacctcatcatggtttccacacccgactgaccatgagaatcatctacgagcttgttggagatgcggatttctgcgtcccatccctggagatccaattaaatagacctgtagatgtgcattattaaaaagctccttggataattctgttgcacagctcagttgggtaacactggtggacaatgatgcagaaagtatgtcatcaggcaactgccgacccctcagaagaggaagaaaacagcagcctgcaggcaagattggaatgaaggccacttgtccaggacactgataaccccatctcttcatccccagccagagtgaaactaactgactcttgrtctgccatggactccccttcacagaggtattgcaga

SEQ ID NO: 682926 - DNA, 659 bp, Homo sapiens
tgtagccttctaaaatccaaggaaacattgagagctatttgtttttgaatatgagtattatttgggtggcaatctttgaaggttttcttttactggtaaaagacagtgatatatcttgccccgatgaaggcaaacccaagacagccttgtaaggtagagtcagggagacttattagccaagacttttcagaagccaattcattttaataaatgatttttatcaaatgtcttttgaagaaactgtgatgtccaccctgaaattttcctttgcaggcacctattgcaaagagtgcatctgattctagataatagtttctgatttgagtgaaggctactgtcctyttgcatttgctttcctattgatttccacagctatgtttgtccttctatgagtatgagagccatagcctgatgtgacccctggtagtgagtgtacatctgcatataagtggtatagagcttcctggctctgaaacatgtgtaagcacacagagctttctttactttttaatctcacgatcagtggatttattgggatggtgctgacataaaaaatgaaatgaaacatctgtgtctaacagctgcacaaaatttggattcgtgtcaacttctctgacatcacacactctgcatgtgagttccatgagtagtctccgtat

SEQ ID NO: 682927 - DNA, 620 bp, Homo sapiens
cctgacttggttaaatctgagtgagaattccagattatgggtaacaaagcctctctaatttggctaaaattcctcacagctgcaagaggaaaaaaaacccaacacaacaaaacaaaaaatacgatgcaattggtttccgtgtttgcttcctgtcttgaaaaccaaatgttctttaatttacttttctttcacccaatacctccttccccctttgccatctgcagtatcaaaaaaaatctagagaaggcttctaatgacttgaactcctttaaagaattcagaacaaagccaccactcaccccttttggtgtgttctgttttctttgtggagtgtcaagaatcatgggcagacwcttcttaggtctaaagctcttttttcctgacctctttggctctgggggtaccagagattaccttgtactgtgagaggcatgtgtaatggcagacaagaactacagtgttggggtggttgagcacagtttacaggaagtggtcatggctgttttttgttttttgtttttttattttctcctaggaagttgtttaacaatcctaattctagtccagagatgcatcctaaagggtcttctctattgctttttctctgaacattaatcttg

SEQ ID NO: 682928 - DNA, 639 bp, Homo sapiens
acactggttctttccccctctacccttttctttaacctgaacagaccaggaacacatgcagaggtgttcctggatctctcatgtttttgtaacccttttgtcctgaggacaaaaccgaatcaggagaactgttacggttttcaaaggggaatcagtggtactgtatttaacaagaagaaggtgtgtattttccttgtgggaaaggactggggcattcattggctgcagtagaagagaatcttagtgagtgtggtcttgctcacttacaggaactgtgagccttggccctcctttcgctgggggagaaaatccttcttgattgcttaaaaaatgtgtaaaatggggggaaaaaaacccaaaccaaaacaaatagaatatcatggccttgctggagaaaycccctcctccaagcaggcttctttgtagctacatgaagagagaatttcttttccaacagctgtgttggtggcttcatagccttccttccctcctcattttagttgtactggtcgctctgcatttgtgcactccacgttgtattctatttttgtgttttaaaaataatacaaataataacaactcattctcactcaatatagaagtgaagtgaaatgtagacgtgccatcaccatcctccct

SEQ ID NO: 682929 - DNA, 639 bp, Homo sapiens
acactggttctttccccctctacccttttctttaacctgaacagaccaggaacacatgcagaggtgttcctggatctctcatgtttttgtaacccttttgtcctgaggacaaaaccgaatcaggagaactgttacggttttcaaaggggaatcagtggtactgtatttaacaagaagaaggtgtgtattttccttgtgggaaaggactggggcattcattggctgcagtagaagagaatcttagtgagtgtggtcttgctcacttacaggaactgtgagccttggccctcctttcgctgggggagaaaatccttcttgattgcttaaaaaatgtgtaaaatggggggaaaaaaacccaaaccaaaacaaatagaatatcatggccttgctggagaaatcccctcctccaagcaggcttctttgtagctacatgaagrgagaatttcttttccaacagctgtgttggtggcttcatagccttccttccctcctcattttagttgtactggtcgctctgcatttgtgcactccacgttgtattctatttttgtgttttaaaaataatacaaataataacaactcattctcactcaatatagaagtgaagtgaaatgtagacgtgccatcaccatcctccct

SEQ ID NO: 682930 - DNA, 639 bp, Homo sapiens
acactggttctttccccctctacccttttctttaacctgaacagaccaggaacacatgcagaggtgttcctggatctctcatgtttttgtaacccttttgtcctgaggacaaaaccgaatcaggagaactgttacggttttcaaaggggaatcagtggtactgtatttaacaagaagaaggtgtgtattttccttgtgggaaaggactggggcattcattggctgcagtagaagagaatcttagtgagtgtggtcttgctcacttacaggaactgtgagccttggccctcctttcgctgggggagaaaatccttcttgattgcttaaaaaatgtgtaaaatggggggaaaaaaacccaaaccaaaacaaatagaatatcatggccttgctggagaaatcccctcctccaagcaggcttctttgtagctacatgaagagagaatttcttttccaacagctgtgttggtggcttcatagcyttccttccctcctcattttagttgtactggtcgctctgcatttgtgcactccacgttgtattctatttttgtgttttaaaaataatacaaataataacaactcattctcactcaatatagaagtgaagtgaaatgtagacgtgccatcaccatcctccct

SEQ ID NO: 682931 - DNA, 600 bp, Homo sapiens
cattcataataccttgatctgtctaccctttgctaagtatctgacatattttaaatttagtgactcattgtgatactatgtgcaattaaaacaatattatcctctaggaatacaactycaaatatgttgacttgattgaggaacaactcaatgaagcacttactacttaccggaagcctgttgatggtgataactatgttcgtcggagtaaccaaaggtgcgtacccagttatcagatttaaaactagttcatcataaattatttttaacatttctgagtttttgtatattctgcttctaacatgatataggaagaatcttaatgcgcagcattaattgctcaaaaattcagtggcattcatggcatgttgaatatccttactgataacgcattcacatatactccatgctggcaccccagtctgtatttctaggcctagattctcttaccagtactttgagctctgataaactgttacaggttgaacatcacttatccaaaatgatgaaatgtttcgcatttcagattttttcagatttggaatatttgcatatatataacgagataccttgggaatggtacccaagtctaaacatgaa

SEQ ID NO: 682932 - DNA, 651 bp, Homo sapiens
gcaattattttagaatcttaaccattacttatgacataataaggctttcagaatatgttttgggtctgaaccattgggataaatggcaagaaatgtattaaaagtgtttggtacatgatatggtctgcctgtgcccccacccaaatctcaccttgaattgtagttcccataatccccacaygtcatgaaagggacctcatgagaggagataagattatgggggcggttacccttatgctgttctcgtgacagtgagtgagttctcacatctgatggttttatcaccagcttttccccctgtgctctgtacttctctctcctgctgccatatgaagaaggatatgtttgcttccccttctgccacaattatgtttcctgaggcctccctagccatgtggaattgtgagtcaattaaacctctttcctttataggtaatttctatattatctgtagaggcagttataaataactgccagtctcaggcagtgatttatagcagcatgagaatggactaatacagtacatttcataccaaaaaaaaccccaaaaaccaagcaaacaaaaaaccttcatttaaaaaaaaatctctgtggagtaagaattttatggtgagatggttagaaaaaataaaggagaagaaagatgctaga

SEQ ID NO: 682933 - DNA, 1187 bp, Homo sapiens
tgagtagctgggactacaggctcctgccaccatgcctggctaatttttgtacttttagtagagacggggtttcaccgtgttagccaggatggtctcgatctyctgacttcatgatctgcccaccttggcctcccaaagtgctgggattacaggcgtgagccactgcgcctggccggtctggaactttttagtatttatttgtaaaggttaaggattatattgtttacttagaaaaattagacgatctttattacctttatgagactggatagcattctgcatctcagccataattatttctcagagactggagatatatgcttatttgtgactttccccaggctctctcagaagtctatgtatgctttgaactagaatgctgttctatgtgagttacataaattaaactcatctctcacaacaaccctgtgaaatacagaacatcatttcccccattttgcacatgaggaaatgtggttgagagaggttaaataacttacataagaatatctatttgtttagtgggacatctgggctctgatccaagaagtcagctttccagagcccgtattcttaactgcagtttctgtggatactccagagttgagttttagtactgtggacatcatggactatcacagggtgacagaatctagggtataagagggttcttcatcaaatttgcttgttattggggttctgattattaaggtagacaagtgaagccagaggaaactggtggattgaaaatggggaggagttaaggagccataggttctgttgacagttaaggaggtatcatgtgggcgataaggggaaggggagttccacgtccaggatctaggagaaaggaatgaagcctaagacttgactgcagcactgggtggtaaggatggctcaaatcaggcctgccctgtaactgtgctcttaattactatgctatattgctcaactttattgactcattattattttaagccacctaattccatgcacaaaagtctctatctagttgtcatcttgtttggtgacttccttatacaaaccagtcactcagatagtttgaattttggctttgtcatttactaactgtgtgaccttgagcaaataatttagcttcagagtttccttccatcatatagggatgataatacccatctcattggtcactatggcagtgaagcatg

SEQ ID NO: 682934 - DNA, 1187 bp, Homo sapiens
tgagtagctgggactacaggctcctgccaccatgcctggctaatttttgtacttttagtagagacggggtttcaccgtgttagccaggatggtctcgatctcctgacttcatgatctgcccaccttggcctcccaaagtgctgggattacaggcgtgagccactgcgccyggccggtctggaactttttagtatttatttgtaaaggttaaggattatattgtttacttagaaaaattagacgatctttattacctttatgagactggatagcattctgcatctcagccataattatttctcagagactggagatatatgcttatttgtgactttccccaggctctctcagaagtctatgtatgctttgaactagaatgctgttctatgtgagttacataaattaaactcatctctcacaacaaccctgtgaaatacagaacatcatttcccccattttgcacatgaggaaatgtggttgagagaggttaaataacttacataagaatatctatttgtttagtgggacatctgggctctgatccaagaagtcagctttccagagcccgtattcttaactgcagtttctgtggatactccagagttgagttttagtactgtggacatcatggactatcacagggtgacagaatctagggtataagagggttcttcatcaaatttgcttgttattggggttctgattattaaggtagacaagtgaagccagaggaaactggtggattgaaaatggggaggagttaaggagccataggttctgttgacagttaaggaggtatcatgtgggcgataaggggaaggggagttccacgtccaggatctaggagaaaggaatgaagcctaagacttgactgcagcactgggtggtaaggatggctcaaatcaggcctgccctgtaactgtgctcttaattactatgctatattgctcaactttattgactcattattattttaagccacctaattccatgcacaaaagtctctatctagttgtcatcttgtttggtgacttccttatacaaaccagtcactcagatagtttgaattttggctttgtcatttactaactgtgtgaccttgagcaaataatttagcttcagagtttccttccatcatatagggatgataatacccatctcattggtcactatggcagtgaagcatg

SEQ ID NO: 682935 - DNA, 453 bp, Homo sapiens
gggagaaaattgaattttctcttcagagcagccaggtcacagtggatcataatatcagagacttcatcagacactttcaacagagtaaataataggtgagagacagtttcaaacatacctaaacaggcttaaacaggaartgccaccattttgtatttggtggatcttccatgatgaccaaggtcagtgtttctcaattttctttttccattatcaccccttaaaggagccttttcaaagtttttccctcctgcccgtcatgaaattctatactacaggtaccctgcataactgttttaggtactcgtatgtgtatgcatgtgcgtgcatgctttatacgtaagagggataaaaaaatgttctggcctccaggattttattcctgctcccctcatttagggtctttccagctctatcttccccaccaccccctctctggaggaggaaaagcat

SEQ ID NO: 682936 - DNA, 453 bp, Homo sapiens
gggagaaaattgaattttctcttcagagcagccaggtcacagtggatcataatatcagagacttcatcagacactttcaacagagtaaataataggtgagagacagtttcaaacatacctaaacaggcttaaacaggaaatgccaccattttgtatttggtggatcttccatgatgaccaaggtcagtgtttctcaattttctttttccattatcaccccttaaaggagccttttcaaagtttttccctcctgcccgtcatgaaattctatactacaggtaccctgcataactgttttaggtactcgtatgtgtatgcatgtgcgtgcatgctttatacgtaagagggataaaaaaatgttctggcctccaggattttattcctgctcccctcatttagggtctttccagctctatcttccccaccacccccyctctggaggaggaaaagcat

SEQ ID NO: 682937 - DNA, 602 bp, Homo sapiens
agaaactgtaatataaatatgaaataaatgacaaaaatacatacgcggctatgttataaaaatcttgagaggaaacttttcatgtaattaacttttggtgaatgtttctgattttacggataatcatgactagaaaatgtggctcactttgctagtcatgattacagtaagttgttcacatacaaggatgttagcaataccttaaaatgtattttctttttaaaacaagcttattttttttctctcaaactaaataatcatatttcagttacttaaaaggaagtttacttttctctactgcctaatttcagaaccagttcttcaatttgatacattggtcagtcattgatttgatttgttgagacaacaaagttttgctttgttttgttggattggatttgccatttctaaaattcccctaaaagaattcttttgggtagcaactgtaggattcattttttcggaaatttgttcttccatagcctgtcccattaaattaccttgaggaaaaagcactgagtctcaatctcagggatagagagaatcaggatagtcctagaaagctragcaagaaattcaaattgcagcactgtacactctag

SEQ ID NO: 682938 - DNA, 607 bp, Homo sapiens
tgcaggcaaaaattcctctaggtatccctctatgcagacacctaaattcgaccatcacagtagcctgttcacatattacaagctttttacaacttgccacaacttttgaaattttgttttgacatttctgtatgtaatataacatactatatactatatattgatgtatgtatttaatataaacctgaagcctcaaaaactggaattagcctgaacatttcttgccttgggaagaccctaagtaaattcaccagacctattctccaatttcatgtttcaaaatttggctgtatgttaattgctgtgaagcaaattttgactgtgacataaaggtcctcagtgtggggaatgcayctgaattgtccagagttggactgagtgaagttgaacagaccactgggagctagctttctttaatggggagggctacaaggagtctggataatgtgacctaatgtggagttttcatttccaatcatcatatctatgaaatctctcctaattgattgcagaatctgaattcagagagaacactcagctgtcagtaattccttttaagctctctgcagacccaagcaccacttttctctttgagtgctctattttc

SEQ ID NO: 682939 - DNA, 626 bp, Homo sapiens
tttttatttataattttagaattatcttcactagttttattttatcacacattaacgatctctacatcaatacatttcccttaatttgaaaactaaagtagtacaaaggagagtaatagcaacttaattatctactttagtaagaaacagtcagatacctaactgtggtgagataattttatattactttgaatgaaggggtttaaacttttctctgtgtgagcagcatacaaaatgggaagtatgtttgctatgtaagtatgtataactaaaagtttggaagtatttacatattagaaatgtaaaatttcatacttcyttcattttaaacatttttaatttaaaaattttatagcaactgttagagaaattttccgttgacataaaataaaccttcagtttgataatgagctttatttttaataagatattatactgcatattatttattgtatttgttttatgatgcattaacttactaaaagacacccgtattaataacatttaactctaataatacatttctctctaatcaaataatttacttcattaaaaaaataaaatccacacatgtagaaggtcgaaaagtgaagtggaacatttattaaatagtgtatatagtccat

SEQ ID NO: 682940 - DNA, 626 bp, Homo sapiens
tttttatttataattttagaattatcttcactagttttattttatcacacattaacgatctctacatcaatacatttcccttaatttgaaaactaaagtagtacaaaggagagtaatagcaacttaattatctactttagtaagaaacagtcagatacctaactgtggtgagataattttatattactttgaatgaaggggtttaaacttttctctgtgtgagcagcatacaaaatgggaagtatgtttgctatgtaagtatgtataactaaaagtttggaagtatttacatattagaaatgtaaaatttcatacttccttcattttaaacatttttaatttaaaaattttatagcaactgttagakaaattttccgttgacataaaataaaccttcagtttgataatgagctttatttttaataagatattatactgcatattatttattgtatttgttttatgatgcattaacttactaaaagacacccgtattaataacatttaactctaataatacatttctctctaatcaaataatttacttcattaaaaaaataaaatccacacatgtagaaggtcgaaaagtgaagtggaacatttattaaatagtgtatatagtccat

SEQ ID NO: 682941 - DNA, 635 bp, Homo sapiens
actttctggggatgtttttagagacagtataattgctggccaccaggcagcaacttgccaaacaatatggtctggggatggtacctgtcaggagatagagacttctaggaataaatctcagagggacagcttagtaacatttaggctgtgtattactaccacaactactatgaactttgaatttatctctaagcaaggcctccctgggaaaaaatctaccctgacttgcttacatatgagtatggtttgaatatgtcccccaaattttgtgtgttagaaatttaatctcccatatgctgattggaggtgggggtctttgagaagtaattaggatttgataagttcatcaggacccccatgatggaactggtggccttctaagaggggaaagagaggcctatggtgacacacacattcttaatttctcaccakgtgatgccctccaccacataacaaacatgccctcaccagatactgggaccatgttcttggacttcccagactccagaactgtaaaacaaatttttttcttcataaattactcagtctcacatgtcctattatagcaatagaaatggactaggaaacacattcccctcaactgataatggtaaactgtgcaggtcttcgaacct

SEQ ID NO: 682942 - DNA, 1731 bp, Homo sapiens
ttttttttttttgctataaaattcttagttgtttttgttctatctgtctcagcacggtgcatgatccatgtcagtatgcactaaatcttaggtgtcaggtgtctccctgctgatggattctgccatcgtattcttgaataaggaaaatcacattaaggagcttgtttatatttcctgttgtttaattaaaacatcagattctgagtgttgaaatcaaagactgtcctttagaaagctgggatttctgtgtgggtgatcaggtcccaggataaagataattttgaaaaataccttcagttataagaaaaccagagttagtagatggaaaacacttgaaaaaacaaaaattactattgtgtaaatttataacagtatcaccatttgggaaagacctcaggccgtatataatttgagaaagaccttatataattttcttgaccatcatcaaagcatacttgtatagtaaaaatggcagtagagtaaaatgatatatgaatttttaaaaatttttctgattgccagtttaattacgaaaattggtgatagagaaatattatcacttattcttcttaattctttatagtacagtaccatttatggagtttgagtacaagaaaggaaaaaaaattaatgtctacatatgggacctagttgtatgttacaaaacagttctgttttccttggatttatagggaatacatggattgtaactggttttcttttttttttttttcaattttagaactaagagttgcataaacagcagagattcaattagatcaacctgctgcttctttattgccatgccattctttatatttagaacatataattgttttgtgagcaataaatccatgtctgttgacctggtttcaaaaaagtgttcagaaaaagatggagaaaacatgtttattgaaaagtgtaacatctattgaccctgtttcataaaaagtcctgaaaaagatggagaaaacatgtttataatgaagagtaagaaagttctggctttcgcaaaactacctcattttaaaagtttatttgggacattagttttttaaacacagaaaatgactatctgtttagtttcctttacattggaggggctagtcttgaacttgtggcttcgagagcttgtttccacactggataataataaccagcaatccctttggatcagagcatgacaacctcagatagtcctggcagatgcaggctgggtggacccacctgggatgtggtgtatgcctggaatgagcccaccttctgacctggcacccacagggctcattcactgcttcatgctttgtgactcccacttgtttctacttcagagatttgatgagattcctatttagctccaacgtgaaggctcttcaagtccaaaaagggatttaagatgggaatgctttcttgctcttcagtttttattctgttgttgattcagacattattcaccaatgttgactctcttgcccaatatttttgcatccatttgactccatcttaactttctctttgattatctgccttygtttcttctccctgggaagctatatagttttggaggcccagagtaatgtcagtgttttgttatgtttttgtttttgtttttctttttttagaagaagcattttggggaatatttattaacatgcatagggcatcttaactaagaagaaataatttatgcactgtagaagggtttgcaagtccatttccagtgcactagag

SEQ ID NO: 682943 - DNA, 1873 bp, Homo sapiens
ataaattttgttcaacaaattacttagcttctgtccagatatatcatcaaccttccatccaagaccactactctcattttcactttcaaaaccatctgaccttgccaaaatgccaggcaccttgctgtatagacacattaagccgatgctagcaatactaaattgagaagaactgagaattcattcatgaacccaaaagattatcaacctaagaaagaaacattcaaaactttgtgtaatggctgtctaatgcatttcaataagccttccctgtttcactgttgaaagagttgtgaggtttgcaagggctaacattttatgtgtatttaacaacctcacaattttatattaaatgaataaatgtcttatacatcagtctaatcagattgttaacattgtttgactgcttagttggggacaagaacgttctgtgaaatatgcttctttattcagacagtaacccagctaggaaaactgggagaactctcccaactccctttagaattctagtgacatcaaaattagaagaagatgaggacaaaaggagaaagaaacttcacttttgaatataaatgcaaaagtagtaacttacacattagcaacagagtctagcaattcatttttctttaatcgacttgcagggattgtcagaggaaagcaaggatagcttattagaaaatgtgttaatgaaatttatcacattaacagatgaaaggagaaaaaccatatgatcacctttcaatagatgcagaaaatatttgataaaattcaacactcaatcttcttagtaaactaaaataaaatgagaatatcttatcttcaaatagcaaatgaagcataaatattaggctggtgtaaaagtaactgcagttttcaccattactttcaatggcaaaaactgcatttacgtttgcaccaacctaatagcacatctaatcatgaaaggtgagatataatctttttaaagtcaagaagagggtaagcatgtccactaacatcccttctattcaacaatatagtaattcacaaaagtgagatttctggattaaaaagcatgtacatatgcatttataattgtgatatatattgccaattagccttcatagatgttgaataattttacactttttttcagcactgtatgaaaggatctctctccccatattcttaccaatacagcagattgtcaaattgtaaaatttttgagtgaaaaatgatataatagggcatttgaggcattttaaaaatctattttagaattcttctaaacatgtgagatgtaactaatatagagtacatcactcagcaacttcatgtgcagccccagcttagctcctgatggttactggggagtacacatcacctgggatgtctggctcagctgatccaaccccataggctatctgcctgaaactacatgccagacttcaaacaagaccccacaggggaacaaaaaaatcacactcaattcgggccagtaaatccacagacrcactagagataattgttgctcaaagcactgagacattggtcatttaattatgcagcaatacatagccaaaacacccctagcatgattaatcaaggaaaaaaaacccactttgctagcattagaaattaaaaaagacattattcctaggtattttattctctttgaagcaattgtgagtgggagttcacttatgatttggctatctgtttgtctgttattggtatataagaatgcttgtgatttttgcacattgattttgtatcctgagactttgctgaagttgcttatcagtttaaggagatttcgggctgagacgatggggttttctagatatacaatcatgtcatctgcaaacagggacaatttgacttcctcttttcc

SEQ ID NO: 682944 - DNA, 1873 bp, Homo sapiens
ataaattttgttcaacaaattacttagcttctgtccagatatatcatcaaccttccatccaagaccactactctcattttcactttcaaaaccatctgaccttgccaaaatgccaggcaccttgctgtatagacacattaagccgatgctagcaatactaaattgagaagaactgagaattcattcatgaacccaaaagattatcaacctaagaaagaaacattcaaaactttgtgtaatggctgtctaatgcatttcaataagccttccctgtttcactgttgaaagagttgtgaggtttgcaagggctaacattttatgtgtatttaacaacctcacaattttatattaaatgaataaatgtcttatacatcagtctaatcagattgttaacattgtttgactgcttagttggggacaagaacgttctgtgaaatatgcttctttattcagacagtaacccagctaggaaaactgggagaactctcccaactccctttagaattctagtgacatcaaaattagaagaagatgaggacaaaaggagaaagaaacttcacttttgaatataaatgcaaaagtagtaacttacacattagcaacagagtctagcaattcatttttctttaatcgacttgcagggattgtcagaggaaagcaaggatagcttattagaaaatgtgttaatgaaatttatcacattaacagatgaaaggagaaaaaccatatgatcacctttcaatagatgcagaaaatatttgataaaattcaacactcaatcttcttagtaaactaaaataaaatgagaatatcttatcttcaaatagcaaatgaagcataaatattaggctggtgtaaaagtaactgcagttttcaccattactttcaatggcaaaaactgcatttacgtttgcaccaacctaatagcacatctaatcatgaaaggtgagatataatctttttaaagtcaagaagagggtaagcatgtccactaacatcccttctattcaacaatatagtaattcacaaaagtgagatttctggattaaaaagcatgtacatatgcatttataattgtgatatatattgccaattagccttcatagatgttgaataattttacactttttttcagcactgtatgaaaggatctctctccccatattcttaccaatacagcagattgtcaaattgtaaaatttttgagtgaaaaatgatataatagggcatttgaggcattttaaaaatctattttagaattcttctaaacatgtgagatgtaactaatatagagtacatcactcagcaacttcatgtgcagccccagcttagctcctgatggttactggggagtacacatcacctgggatgtctggctcagctgatccaaccccataggctatctgcctgaaactacatgccagacttcaaacaagaccccacaggggaacaaaaaaatcacactcaattcgggccagtaaatccacagacacactagagataattgttgctcaaagcactgagacattggtcatttaattatgcagcaatacatagccaaaacacccctagcatgattaatcaaggaaaaaaaacccactttgctagcattagwaattaaaaaagacattattcctaggtattttattctctttgaagcaattgtgagtgggagttcacttatgatttggctatctgtttgtctgttattggtatataagaatgcttgtgatttttgcacattgattttgtatcctgagactttgctgaagttgcttatcagtttaaggagatttcgggctgagacgatggggttttctagatatacaatcatgtcatctgcaaacagggacaatttgacttcctcttttcc

SEQ ID NO: 682945 - DNA, 2253 bp, Homo sapiens
tgctatagccctggccactattaaatgaggtgcactctcccttcttctgcatgtgctggtgaatgccacacatccaggaagaccaggctccttggaccacaccaactagaagtgaggtctccacaacccgtgcaggtcaacatagctgaccagctggcatggcccactagagacacactatctcgaacctgctagatgcaaattgctaggtgcataaatctgttaggccagagatgcttgggacagttgccgcatctgtgcagcagatttggggaaaattaggacagaagtaaccctaagaaatgattgcagcaattgcagtagcattaaaatgctgagtgcactgcacagccttcccttccttctgaatgtggtcattatgtaactaatggtctaattaggagagtcatgtaagcccagcattgtgccctcctggcggcaagcactgtggatttccaaagccatggctttcggaggctatctctgttttaatgcagagaaagagtagcacagagttgaggcagagaagtcagaggggagctcagagcatcagatgcatttcagtgacaatccctgtaaccttgaaagagtcagcaaatccctgtgtccctcacaccagattgcagcagggccttgagtcaataagctatgaagttagcgatgcgtcctcctgggaaggtggcgagcgaggcatccatcatgttccctctttcagcctgttccaaggagagagcctctgagagccgtggaaaccatttcccgggcccattaggctctggccctgtggtgcagtagcagctgtcacctcgtgccagccaaggctcaccaagtggaggccgagggaaaggtgggtgcacaaatacctgccaggaagagaagcaggactctgcctgggaatgcaaggggacaaagcagcttctctgctctgcgatataaaagagcttaaactcagcttctcagggtttctgcaggacatcgcagaggttcacacatcattcagtgaggctcaggacattcctgtggtgtttagacagtaacctgcagatggaacccactttgttttaaaaaaatacatattcacggattttttttaaaaaagaagaagtcactggcraggaaaacatacaaaatcaagaggaaaagcatattttatgttttctctttggccccatttcttggagataacagttaccacttttgtgtgtttttccaagtttttctatgctgctcaagcacacacacatacacaaacacatatctatctatctatctatctatctatctatctatatatagatataattgataaatcctttttatgcaaatgacaccacatcgtaaatactattctggttagaaagaatgaataagacctactatttgatagcacaatggggtgactatagtcaataataactgtacattataaaataaagggtgtaatttgattgtttgcaactcaatggataaatgcttgaaagagtagatgacccattcttcacgatgtgcctgttcacattgcattcctgtattgaaacgtctcatgtacatcataaatatatacacctactatacactcacaaaaattaaaagtaaaaataaatgaatactattctgcaattttttcagttaatatttcttgaacgttgttcaagatgtatcactgtatggacaatataccagtaaatataaataaacagaattgatctgtttgaattactgcactattttgcattattatggatacactcacagaaccagtcccctagtggtgaacaatcaggttgtttataggcttcctttttattgcaaacaatgctgtaattaaaaaaaaatcttcacatatatactgctaactatttgtgcaagcatgtgtgctggttaaattcctagtcctggaattactagattaaaggagatatgtattttaaatgttgtactattggacaaactgctgtccacagaggtcacacctattcttgcctacacttctgatgctgattgagctccctgtttaagggatggctcttccgcagtgaatgcaaaaggtctatatcaataaaatgtaaaataaaagcattgagaaagctcacaaacaaacctattctaaccagtaatgcttggctaagtacctgatttaaagcttagatcagtcaagctcttaacagaagtaatccaaataaaaatgtgacagtttgcaagtagagctggggaaggagaaggagcctgtggagaaggttcctgtagttaaat

SEQ ID NO: 682946 - DNA, 2253 bp, Homo sapiens
tgctatagccctggccactattaaatgaggtgcactctcccttcttctgcatgtgctggtgaatgccacacatccaggaagaccaggctccttggaccacaccaactagaagtgaggtctccacaacccgtgcaggtcaacatagctgaccagctggcatggcccactagagacacactatctcgaacctgctagatgcaaattgctaggtgcataaatctgttaggccagagatgcttgggacagttgccgcatctgtgcagcagatttggggaaaattaggacagaagtaaccctaagaaatgattgcagcaattgcagtagcattaaaatgctgagtgcactgcacagccttcccttccttctgaatgtggtcattatgtaactaatggtctaattaggagagtcatgtaagcccagcattgtgccctcctggcggcaagcactgtggatttccaaagccatggctttcggaggctatctctgttttaatgcagagaaagagtagcacagagttgaggcagagaagtcagaggggagctcagagcatcagatgcatttcagtgacaatccctgtaaccttgaaagagtcagcaaatccctgtgtccctcacaccagattgcagcagggccttgagtcaataagctatgaagttagcgatgcgtcctcctgggaaggtggcgagcgaggcatccatcatgttccctctttcagcctgttccaaggagagagcctctgagagccgtggaaaccatttcccgggcccattaggctctggccctgtggtgcagtagcagctgtcacctcgtgccagccaaggctcaccaagtggaggccgagggaaaggtgggtgcacaaatacctgccaggaagagaagcaggactctgcctgggaatgcaaggggacaaagcagcttctctgctctgcgatataaaagagcttaaactcagcttctcagggtttctgcaggacatcgcagaggttcacacatcattcagtgaggctcaggacattcctgtggtgtttagacagtaacctgcagatggaacccactttgttttaaaaaaatacatattcacggattttttttaaaaaagaagaagtcactggcaaggaaaacatacaaaatcaagaggaaaagcatattttatgttttctctttggccccatttcttggagataacagttaccacttttgtgtgtttttccaagtttttctatgctgctcaagcacacacacatacacaaacacatatctatctatctatctatctatctatctatctatatatagatataattgataaatcctttttatgcaaatgacaccacatcgtaaatactattctggttagaaagaatgaataagacctactatttgatagcacaatggggtgactatagtcaataataactgtacattataaaataaagggtgtaatttgattgtttgcaactcaatggataaatgcttgaaagagtagatgacccattcttcacgatgtgcctgttcacattgcattcctgtattgaaacgtctcatgtacatcataaatatatacacctactatacactcacaaaaattaaaagtaaaaataaatgaatactattctgcaattttttcagttaatatttcttgaacgttgttcaagatgtatcactgtatggacaatataccagtaaatataaataaacagaattgatctgtttgaattactgcactattttgcattattatggatacactcacagaaccagtcccctagtggtgaacawtcaggttgtttataggcttcctttttattgcaaacaatgctgtaattaaaaaaaaatcttcacatatatactgctaactatttgtgcaagcatgtgtgctggttaaattcctagtcctggaattactagattaaaggagatatgtattttaaatgttgtactattggacaaactgctgtccacagaggtcacacctattcttgcctacacttctgatgctgattgagctccctgtttaagggatggctcttccgcagtgaatgcaaaaggtctatatcaataaaatgtaaaataaaagcattgagaaagctcacaaacaaacctattctaaccagtaatgcttggctaagtacctgatttaaagcttagatcagtcaagctcttaacagaagtaatccaaataaaaatgtgacagtttgcaagtagagctggggaaggagaaggagcctgtggagaaggttcctgtagttaaat

SEQ ID NO: 682947 - DNA, 2253 bp, Homo sapiens
tgctatagccctggccactattaaatgaggtgcactctcccttcttctgcatgtgctggtgaatgccacacatccaggaagaccaggctccttggaccacaccaactagaagtgaggtctccacaacccgtgcaggtcaacatagctgaccagctggcatggcccactagagacacactatctcgaacctgctagatgcaaattgctaggtgcataaatctgttaggccagagatgcttgggacagttgccgcatctgtgcagcagatttggggaaaattaggacagaagtaaccctaagaaatgattgcagcaattgcagtagcattaaaatgctgagtgcactgcacagccttcccttccttctgaatgtggtcattatgtaactaatggtctaattaggagagtcatgtaagcccagcattgtgccctcctggcggcaagcactgtggatttccaaagccatggctttcggaggctatctctgttttaatgcagagaaagagtagcacagagttgaggcagagaagtcagaggggagctcagagcatcagatgcatttcagtgacaatccctgtaaccttgaaagagtcagcaaatccctgtgtccctcacaccagattgcagcagggccttgagtcaataagctatgaagttagcgatgcgtcctcctgggaaggtggcgagcgaggcatccatcatgttccctctttcagcctgttccaaggagagagcctctgagagccgtggaaaccatttcccgggcccattaggctctggccctgtggtgcagtagcagctgtcacctcgtgccagccaaggctcaccaagtggaggccgagggaaaggtgggtgcacaaatacctgccaggaagagaagcaggactctgcctgggaatgcaaggggacaaagcagcttctctgctctgcgatataaaagagcttaaactcagcttctcagggtttctgcaggacatcgcagaggttcacacatcattcagtgaggctcaggacattcctgtggtgtttagacagtaacctgcagatggaacccactttgttttaaaaaaatacatattcacggattttttttaaaaaagaagaagtcactggcaaggaaaacatacaaaatcaagaggaaaagcatattttatgttttctctttggccccatttcttggagataacagttaccacttttgtgtgtttttccaagtttttctatgctgctcaagcacacacacatacacaaacacatatctatctatctatctatctatctatctatctatatatagatataattgataaatcctttttatgcaaatgacaccacatcgtaaatactattctggttagaaagaatgaataagacctactatttgatagcacaatggggtgactatagtcaataataactgtacattataaaataaagggtgtaatttgattgtttgcaactcaatggataaatgcttgaaagagtagatgacccattcttcacgatgtgcctgttcacattgcattcctgtattgaaacgtctcatgtacatcataaatatatacacctactatacactcacaaaaattaaaagtaaaaataaatgaatactattctgcaattttttcagttaatatttcttgaacgttgttcaagatgtatcactgtatggacaatataccagtaaatataaataaacagaattgatctgtttgaattactgcactattttgcattattatggatacactcacagaaccagtcccctagtggtgaacaatcaggttgtttataggcttcctttttattgcaaacaatgctgtaattaaaaaaaaatcttcacatatatacygctaactatttgtgcaagcatgtgtgctggttaaattcctagtcctggaattactagattaaaggagatatgtattttaaatgttgtactattggacaaactgctgtccacagaggtcacacctattcttgcctacacttctgatgctgattgagctccctgtttaagggatggctcttccgcagtgaatgcaaaaggtctatatcaataaaatgtaaaataaaagcattgagaaagctcacaaacaaacctattctaaccagtaatgcttggctaagtacctgatttaaagcttagatcagtcaagctcttaacagaagtaatccaaataaaaatgtgacagtttgcaagtagagctggggaaggagaaggagcctgtggagaaggttcctgtagttaaat

SEQ ID NO: 682948 - DNA, 821 bp, Homo sapiens
agtgatgcagaaaagtatttgatttgggtaattattacactcacctagaaacaagtgttgtgtaatagattacatatttccataatgcaatgttgtatcagaaactaccttcctaagaaaatatagtatgggctcggcgtggtggctcgcacctgtaatcccagcactttgggagatggaggcaggaggatcacttgagcccagactgggcaacaaagcgagaccctgtctcaacaaaaaawttaaaaattagctgagtgtggtggcacgcactgatggtcccctctacttgggaagctgaggcaagaggatctcctgagcccaggagttcaaggtttcagcgagctatgattgtgccactgcactccagcctgggagacagagcaagtccctgtctcaaaaaagaagaaggagaaggaggagaaaatacagtattaagtaatctgtcaatatattccacaaggattacactagtggtttaataataaaattatattacctttttaaattgtaaggccattcctcaagctttataaattaagcatgaatgcatcatacacattttataaaaagttccaactcatcataatctgtacttatgatacattaatacaaatgaagttcattataaaattaacttaaaatggatataccagttattaaaccattaaccatttaataattttatttttttcaaatttaaaaaccttttggggaagaaatactacaacatggatgaaccttgaaaacgttatgctaagtgaaataagccagacacaaaaggacaaatactgtatgattacacttaaatgaggtaccta

SEQ ID NO: 682949 - DNA, 821 bp, Homo sapiens
agtgatgcagaaaagtatttgatttgggtaattattacactcacctagaaacaagtgttgtgtaatagattacatatttccataatgcaatgttgtatcagaaactaccttcctaagaaaatatagtatgggctcggcgtggtggctcgcacctgtaatcccagcactttgggagatggaggcaggaggatcacttgagcccagactgggcaacaaagcgagaccctgtctcaacaaaaaatttaaaaattagctgagtgtggtggcacgcactgatggtcccctctacttgggaagctgaggcaagaggatctcctgagcccaggagttcaaggtttcagcgagctatgattgtgccactgcactccagcctgggagacagagcaagtccctgtctcaaaaaagaagaaggagaaggaggagaaaatacagtattaagtaatctgtcaatatattccacaaggattacactagtggtttaataataaaattatattacctttttaaattgtaaggccattcctcaagctttataaattaagcatgaatgcatcatacacattttataaaaagttccaactcatcataatctgtacttatgatacattaatacaaaygaagttcattataaaattaacttaaaatggatataccagttattaaaccattaaccatttaataattttatttttttcaaatttaaaaaccttttggggaagaaatactacaacatggatgaaccttgaaaacgttatgctaagtgaaataagccagacacaaaaggacaaatactgtatgattacacttaaatgaggtaccta

SEQ ID NO: 682950 - DNA, 746 bp, Homo sapiens
tcccagcactttgggaggcagaggcaggcggatcacttgaggccaggagtttgagatcagcctgggccaacacagcgaaaccccatctctactaaaaattccaaaactagccaggcatagtggcacatgcctgtactcccagctacttgggaggctaagacacaagaatcgcttgaacccgggagggaggtggaggttgcggtgagctgagattgtgccaccgtactccagcctgggtgacacagctagactctgtttcaaaaaaaaaaagaaaaagaaaagaaaaaaatagactttctcttggctcagtgtatactgccaaattgttttccaaaaaaattgtgtcaatgtataacaccatcactaatatagtattgatattatggttattacattttaaaattcataatttgtaattataacattcataatttattactatttataatattaatgtaaatgtatattatatataaatgttatagtaattataactttggtagtgacaaagtattaatttattaggtgaagtatatgcttttttattagtgataataaatatatcctctctcccattataaaagtttgtatttcttcttttagaaattgattcttctgtcatttgcacatttatctgtataaytataacagggtatttcccagtggtggctaatgagagaattatgggaaagtatagaacactattcaaatgcaaagcactgtatgatttttatttaataggaaga

SEQ ID NO: 682951 - DNA, 631 bp, Homo sapiens
acaaaaattttttaaaattcaagtttttcacaaacatgagaaaacgggaattctcagtattctcagtttggaaatacaaatcagcacaatccctttagaatataatttgccaatatctaggatattttaaaatgtgcttagcctaccacccagcaatttcctgcacaagtatttccctagagaaactttcttatgtatgcgcaagaaaacatatacaaaaaatgtttatagcagcagaagactaaaagcaatttaaaattagatgaataaattatgagatgttatataatactatacgacagtaaacatgaatgaattatagctacctatatcctctaggtccatcccaaaaaaactgatgttaagtgaaaaaaaacaaattaaatattaagtatgttacaacactgtctaggtaaagtttaaaaacgtgaaacattcaatagcatactttatatacaaatttawgataacactgtcaatagacaagttagaaaactagttttccagtttattactgatttattttggtaaatacaatttctgtttcatgaagaatagagggttttgagtttattactgatttatgaaaatttcataccaaattcttactaccaagttggtttaagcaaat

SEQ ID NO: 682952 - DNA, 623 bp, Homo sapiens
aagctcctgacaatgattggcaggatctgagaaaacttcacaagaggagccccaccctctgagaattaatgttagaagagcagtaattggctaacacctaatccattcttaccacagttgagggattayaatctaattgtgactttctggtccctctcaaatgtcacaagaagaaggtgaacaaagcacagatcaatactgaacaccctggaaggactgcagaagttcaaagaaggagataagtctaatagtctgtattaaactgacacaataaaaacaaagggaaacttgtattgattgattgagtgattatcaacaggcccattaggctagtgtcttcccaagaacctgacatttaaaatcaaaaacaggacaggcctaattttaaattctgcaatgagggaatttaatttaaatgtgagtgagaacagaggtgcatatatcaacccaatttagtacagacagaaaaacagacagaaatggaaattacagagtcagttcagaatagacataatgaagcccatttacatttgatgtaatagatgtttagaatattaatagtccaagtggcaaaatttgaggctactgacagtgggtgtcattaaatactgatttttgaattt

SEQ ID NO: 682953 - DNA, 623 bp, Homo sapiens
aagctcctgacaatgattggcaggatctgagaaaacttcacaagaggagccccaccctctgagaattaatgttagaagagcagtaattggctaacacctaatccattcttaccacagttgagggattacwatctaattgtgactttctggtccctctcaaatgtcacaagaagaaggtgaacaaagcacagatcaatactgaacaccctggaaggactgcagaagttcaaagaaggagataagtctaatagtctgtattaaactgacacaataaaaacaaagggaaacttgtattgattgattgagtgattatcaacaggcccattaggctagtgtcttcccaagaacctgacatttaaaatcaaaaacaggacaggcctaattttaaattctgcaatgagggaatttaatttaaatgtgagtgagaacagaggtgcatatatcaacccaatttagtacagacagaaaaacagacagaaatggaaattacagagtcagttcagaatagacataatgaagcccatttacatttgatgtaatagatgtttagaatattaatagtccaagtggcaaaatttgaggctactgacagtgggtgtcattaaatactgatttttgaattt

SEQ ID NO: 682954 - DNA, 682 bp, Homo sapiens
tcagtttttattttcaggggcactgcaagatatctacttttctaaaaatgcaatttatatataatgttgatatttattaattactattcctggagtactttctaaagttcatgagatataatttaaatagttattgaaaacctgctacagattctaaaggaagcacacttgtgaataactcatgtgtttgttgtatgcctccgtatacagggaccatccatcagtttactgcctcttgttccttccaagtttttgaatgcttctrtaaaccccaaaaggactcattaggcttgtttcctttccattttgaagtcccagtgcttagagtactttcacaaataatgatttgaacttgggtgaaaatttctggaacataccgaagatcaaacaaatcatctaatatcaaacatttccaacgacaggacttggaagtgaaatctatttctaaaatatcctgtatgaatttgttaagaaattatgtggtaattataccccagataatacattcatataaaataattcagaaataataggagaagagaaatacatagggattggtatgaatgtccaggtatgtcctgcaagaataggaaagggtgaaaaaagtggcaaagataattattaaaataattaatgttctttttgtttatacttctttttgcaaactaattacaacttcaaa

SEQ ID NO: 682955 - DNA, 608 bp, Homo sapiens
gcacgtgtagtcccagctactcacgaggctgaggtaggagaatcatgtgagcctggggagataaaggctgcagtgagctgtgatggagccactgcactccagcctgggcaacagagtgagaatctgtctcaaaaaagaaaaaaaaatactatgccaaggttggcatcgggatcatatactgaaaacactgtgtataactatccttaagacacattacatttaaaatattttaattggatgaacaaaactagtaaattgtgtctaatttcccacaattgcaaaatgtccttcactgacatgaaatataacagatttttaactattttaatataktttctgtattttgtagctcctgtgcacccatacatattcaaaccccttttgtagaaaaattccttatagacgagagaggaaatatattttttacttcacactggagtctggccttacctgtttgaagtctgagtaaacctaaacgtggtataaaataaagctttctttttactcatttatttatattattaaaaatttttttctatccaaaaagctgagatacaataaaataaagttttctaatcaagtaaaagttctatccaaaatatgcatca

SEQ ID NO: 682956 - DNA, 618 bp, Homo sapiens
taataggggaagctatgtgtaggggaagctatgtgtatgggaaatctctgtacctacattctactcagttttgctgtgaacttaaaactgctcttaaaaataaagactattttttaaaaattaaccatastaggtattactgaaaaatttgcttataaaaagtgagcatgggccaggctccgtggctcacgcctgtaatcccagcactttgggaggccaaggtgggtggatcacaagatcagaagtttcagaccagcctggccaacgtagtgaaaactggtctctacaaaaagtacaaaaaattacccagtcgtggtggtgggcacctgtaatcccagctacttgggaggctgaggcaggagaatcgcttgaacctgacaggcggaggttgcagtgagccaagatcatgccattgcactctagtccaggcaacagtgtgagactccatctcaaaagaaaaaaaaaaaaagaaaaaaaggaaagatgattggtgcatgcctgttgctataggggaggccgagaactcaaggaggatcccttgaggtcaggagttcaaggccacagtgcagtctgatggtgccagtattgaatagtcactgcagtctagcctgggcaaca

SEQ ID NO: 682957 - DNA, 618 bp, Homo sapiens
taataggggaagctatgtgtaggggaagctatgtgtatgggaaatctctgtacctacattctactcagttttgctgtgaacttaaaactgctcttaaaaataaagactattttttaaaaattaaccatagtaggtattacygaaaaatttgcttataaaaagtgagcatgggccaggctccgtggctcacgcctgtaatcccagcactttgggaggccaaggtgggtggatcacaagatcagaagtttcagaccagcctggccaacgtagtgaaaactggtctctacaaaaagtacaaaaaattacccagtcgtggtggtgggcacctgtaatcccagctacttgggaggctgaggcaggagaatcgcttgaacctgacaggcggaggttgcagtgagccaagatcatgccattgcactctagtccaggcaacagtgtgagactccatctcaaaagaaaaaaaaaaaaagaaaaaaaggaaagatgattggtgcatgcctgttgctataggggaggccgagaactcaaggaggatcccttgaggtcaggagttcaaggccacagtgcagtctgatggtgccagtattgaatagtcactgcagtctagcctgggcaaca

SEQ ID NO: 682958 - DNA, 618 bp, Homo sapiens
taataggggaagctatgtgtaggggaagctatgtgtatgggaaatctctgtacctacattctactcagttttgctgtgaacttaaaactgctcttaaaaataaagactattttttaaaaattaaccatagtaggtattactgaaaaatttgcttataaaaagtgagcatgggccaggctccgtggctcacgcctgtaatcccagcactttgggaggccaaggtgggtggatcacaagatcagaagtttcagaccagcctggccaacgtagtgaaaactggtctctacaaaaagtacaaaaaattacccagtcgtggtggtgggcacctgtaatcccagctacttgggaggctgaggcaggagaatcgcttgaacctgacaggcggaggttgcagtgagccaagatcaygccattgcactctagtccaggcaacagtgtgagactccatctcaaaagaaaaaaaaaaaaagaaaaaaaggaaagatgattggtgcatgcctgttgctataggggaggccgagaactcaaggaggatcccttgaggtcaggagttcaaggccacagtgcagtctgatggtgccagtattgaatagtcactgcagtctagcctgggcaaca

SEQ ID NO: 682959 - DNA, 1562 bp, Homo sapiens
tacgacctggttacttggcttgcgagtgtcagggaagagaactacctcaccttcctatctcaggttcaatgttcagggcttagatctctataacaaaagaaacaagagaaaagaaatcaaaaaaagcatacaaattgagtataagttttacgtgacacgggagccttcataaggaaatgaagccctgaagaagtgggtaagcccgtgtattttcatgctaagtttgatgaagatgaggatggccgtggaaaagtatgattggacacagccgtatgatctaatggcagtaaactggagagaaacgtagccaggcctgtttgttcaggttctcctctgggtccctgtgtcgtcggaggttaggatgttcctttcctccaggtatagggagggcacctctggaatgagggtcttatgacctgctttagggcaacatcaaaaaaatccttcctaagtttatgacctgcttcaaggaagaagggtagggggaaaggtgacagccaccttcttgttttgccattttctcaagttctttcagcctaaaatattttgggatagtgtgtcctgaaccccattagcagtcactgaaccctgtaaatgaagcaggagcccaatcctggcaagccaatgtaacagctaaaaagtagaaagggacagcagtgaccctggacttcatgctgagcacctggccttgggtcccttcgattctcctgagcctcagaacatgatgaaatccacggagaagagtggtcccaggccaaactatcaaggggctgcagaggctggaaagagagaagttggcaggcttaatattccactaacttccatgagtgatgtagagatttattctaggaaatgaacatatacattttctcattaaaaacaccaaaacttggccgggcacagtggctcacgcctgtaattccagcactctgggagaccaagacaggctgatcacttgaggtcaggagttcaaggccagcctgggcaacatggtgaaaccccgtctccaccgaaaaatacaaaaattagccgggcgtggtggtgtgtccctgtagtcccagctacttgggaagctgaggcaggagaatcgcttgaacccgggagatggaggttgcagctagccgagattgygccactgcactccagcctaggcaacaaagcaagactccgtctcaaaaaagaaaaaaacaaacaaaaaaaaacactaaaattctatcattctgggatgatagactttgaaacgactgtttcttcctcaatacatttattctgcttattagtgactaagaacatttctaatcgcaaatgaaggccaagcacgatcgctcatgcctgtaatcccagtaacttgggaggctgaggcaggaggattgcttcagcctaggagtttgaggctgcagtgaggtatgattgcaccactgtactccagcctgagcgacagagtaagaacctcttaaaaaaataataaaaaaaaacccacaaaactgatggcaccttttggcctagctaaagtagatttgtctataatcccctctatcacacaagaatataaagagaatttt

SEQ ID NO: 682960 - DNA, 809 bp, Homo sapiens
ctagagagtttatttggtccaagtttgaggattgcaacccaggagcatagaattgaagttgtgctgaatccatctactcagaagatatgccagtttggaagttaagtgaacacttagtaaccaatcataattgtcttaagtcttgcccattctagattatttgctttgttaaataggcaattgagatagggcataattccaataacaataatctttgatggggttaagtagccctttctaaccatacatacctccatctcagcttctatctcaagaaacaactcttttgactttgtttctttgacttctagaactagtgcagcagcatcaagaaattagacctgccataaataaaaagacccagaagaagatactctaataagtagtgaggcttttgtccatgaagcctatgatgagcagctgtgctggggaaactccaagaagtttctctraggaaattggattgtgagacacagttaaagaatgtcccttctgaaaaatcctagctaggtgaaaatagtcgaagtcagtcaaaaaatagtaaaaaaaaaaaaaaaaaaaaaatacaagctagatgaaaatagctacatgaaaattactatcgtgcagtaactttttttgtctttagactctggtttgagctattaaaggttgaacaaagtgaaacatgcatgaaataaccgaaaaggaagatgaggcaaaattaatataagtagagtttatctgggccaagtttgaggattgcaattgtagattcaagttgccctgggtatactcagatcagtagaagctacaagtgaatttttaaa

SEQ ID NO: 682961 - DNA, 1016 bp, Homo sapiens
aaatcataaaaaccaaggattcactttttgtatgtgtgtgtgtgtgtgtgtgtgtgtgtgtagtgaaagaaaagttatatgttgattctctgtattacagtaatattctaagtttaaacaatatgctatagttgaaaatataaatatatgctttattatttatagagttttacacttacaaattctaaaacatttaagttgcttgaaatgtacatcttgccttcccagtgtcaatgactttatattaagaagagagaaaaaaattcaacwacaacacaagactctgacttcaaaaggcccagggctgattgttggggttcaggtatgttttcagttatgtttacatacgctggcttcctgagtctctgaattcttgcattactttgcacaatttgtattccttaaaattcagtaaaaactctgtgaaagcttagtttatatatttgtccccaaactcatactgctacacatttatgcttttcaaatgagcaattgcaatgtaaatgaatgtggtcttttaaagcataacgcacagattgtagctttcatctgtgctgaagcaacttttagcactgcttccttatgatgagaattattttttttgttgttgtaacaaatgatacatttgttaaacgtatcattcagattaggctaggtttggctctgtttaataattcaatcagtcaggtgatggttcagtcaagagagttgtttaggatgctgaaagaaactacaaactttatcagctccctgtttcttgagcaaattggcaggaagacctattcattgtagtcactcgggataccaggcaagttaagaagttgcttagcagactgcagaaaaaaaataaaaatattttattgacaattaaatgttaaagttcaatgccttcccagcagctcattggccagaattaatcatgcttccctcctgtccctgcaaagctggtcagaaagtggaatccgagaatgtacctaaaaggctgagagtcacagatgtgtggccaaaacactgaa

SEQ ID NO: 682962 - DNA, 774 bp, Homo sapiens
taaaattcattttagaaatgaattcctaaaatgtgactggaacatatgtttaaaaaagcattgagatttagatttttggaaaaataagtgagttgaattttattttatgattgattaataaaattggtttagagcaattgtcttctgatagttcaaggcaagttgaagtgtatattattcaagaaactckttcacattaaacatttggatgttgaatttaactctaggtgttatcttcacagatcagtaaaagatgacagagttctctctaaaatgtgctcagtttaaattaaaccaacattcttggtttcccaaaatagcacaacttttatttgacacttctataaaaattatactctctaattgttgcatttaattttgtgctccaaatcataccaagcactataaaacagtaattgttctcaataaaaaacccaagctacagaggggccagaaatactcactggtatataatagtttatcagttatcttcatccttagccaggctgcagaatgatctaaagaaagaaccaaaaattataagaattaaatatattgctttatattatgtttataattttttattatactttgaggaaaatatgaatatatcttaaaatgtaaactttttggacatttattgacacatttctctccaaaatgtaaaaatcagttttgcaaaaatataaaagagcagatatttactttttgtaagaatacaattttaaattgcaagcttgtatgtgaagaataaaacaaaaataacactacatg

SEQ ID NO: 682963 - DNA, 349 bp, Homo sapiens
atttttaagcctttgaagtgatcgcctatagaatcaacgaactagcaacatggggctgactctggtgatctctgaaaatgagcacacacaaaacaattctcaaggagattgcagtctacaagggctgtgggctttaacccttgcagactgtggatatattattttttaattttgcattttgtaataccaaccaattatgaatgctatgaaaaatatcatccaaacaatacactttgaggggtggtattagtggagatttccaatgtgaggtccttgaatatagataattttgaagcttttcccttctttatagtgagtygtctattaaaagatccccttcaaagaattc

SEQ ID NO: 682964 - DNA, 1221 bp, Homo sapiens
ctccctcagctctagccagacactctcctggctcttcctgaaacccaccaaagattctcccaatgcgggcctttacatgactgttccttctgtgtgcactgtctttccctagacttcctcccctcccaagcgtcatcagggtgggcttccccaggccacctaaaatagctcaccaaccctcactgctgcactgtctagcatgtgtaacaacctgactttctttgttttcttcattgctgttttcccyaataatcagctagttgaatacatgaatgactaaattcaaggatgcatctgataacctctgaggtgacaactatataaaatgcatttggtatttttttaattgtaaaaaaaaaatccctttctcttacatattaaaaatactcctaacattagtgttgtttttttttgtttgtttgttttgttttttggcaccttctgtgttctatagttcactagggttttgtggagtttgggaaatgctgttctgcaagacagaataaaggcaaggtgactgcccatctgtctcttgtcattattcagcatacctcagcgtttcaaacaaatataaaaggtggtagataaaaagaatatcatcatttacctacatctgtgtttgagaatagcattcaaaagagatggttttaataacagaaaagttacttcataaggagtttggattaaaaacaagaatataaattgaaagagaattgggaatctgaaaataaggaaaatatttaataacattagtgacccaggaggaatataatgcaataatgcttatgagatgataaaaatggtaacaaggacccaaaaaatcaaagcacttatataggcatgaaatttacgaaaataaaaaatagcatgacttctcaaatgcaaatgatacagctggaggaaaattatcagagagatgtattttgttatcagtgaaatcagaaatgcaaaaaacactgaaaagtggccagtatagtggaaaaggtattagtaggtaagagctttttaaaaaccttactcatatgctgacagaaagactggaggcctcctaaagactgagcagcatgggagtgttacctgctgaaacagggacaataaaattattgggcttcaaaatcagtaccaaataaaaaatcagtagcttagtgtcccaagagccaagggagtaattctgccacctcccccatgtctcacttcaaaaatagcatttttatgtgctgc

SEQ ID NO: 682965 - DNA, 872 bp, Homo sapiens
tgggaataatttgaagagattttgctgctttaagagtgattcccaaagtttaatatttcaggtggttttctatatgaaatgttttcactaaagaaatcttcatcttcatgtatattgtctccatctctttgcttctaagggatttttcagtaatatttgcatcagtttagggatttagcttttaatctttgtcaattattttaatctttgtcaagcttttaatctttgtcagtagcagctgaagaaacttgaccttttagaatratcacaacctaatgcatttgcttatcatctctactatatccagattaattccttacacggaagtggttttttaatatcaaaatcaaagaagaatatattttttttgtttaataaaagcttgaacctctaatctgtaggaagcatgctatgtagtactttctctttcttaaaaataactcaatagtaagaagcctgttgtttattctctgggtagaaggcattattaaggaaacaaagtgaagattgttaattttaatgaacattttttcttgttctttgtgctttttttccttttctttcctttttttaaaaaatattgttaggggaaaaaaaagattttccagaagttttacacataaaagataatgaattttcaccttgttcatgctataggaatttgggattgtgcaagttaagttacatgaagttaagaaagtgcttaacatggttaatttctctgtgtgtatttgtgtgtgtgtgtatgcatgcatgtgtgttttctctttctttgccctgtttgcaagtaatgcatcaagactttgtaagataattttttaatttttattttggaaacagctgcttggatactacaggagtggctaacttca

SEQ ID NO: 682966 - DNA, 611 bp, Homo sapiens
aaaattgggagaatttttttttgtttttttgagacgagagtcttgctctgtcgcccaggctggagtgcagtggcgcgatctctactcactgcaaactccgcctcctgggttcacgccattctcctgcctcagcctcccaagtagctgggactacaggcgcccgccaccacgcccggctaatttttttgtatttttaggagagactgggtttcaccgtgttagccaggatggtctcgatctcctgacctcatgatcagcccgcctcagcttcccaaagtgctgggattacaggygtgagccaccgcgcccggccgggagaatttttaatataaaattcaggatcatagttacatccagggaaaggagaagaatgagatagctaagtgcacatataaggcttctttataaaggattgtcgaattgtgggcacatgggcgaccacgtcattgattttctttaactgtactaatattttatagcaaacactatttttctctatactcacactcactcttcaatacttcactctgacactagatatgtgggatttttttccctacacatccattcttcagccaacaccaactggctgtcctacaattccattcaat

SEQ ID NO: 682967 - DNA, 2501 bp, Homo sapiens
tagtagagatggcatttcaccatcttggccaggctggtcttaaactcctgacctcatgatctgccttcctcagcatcccaaagtgctgggattacaggcgtgagcctgtacctgtacatggccatagctactattttaaatacgttctccattggccaggctagcagtataccaggaatactaaggcctgtgagctacagagtcagacaacagggctttgattcctggctccacaactttcgcacttcctgagccttcagttctcttattgtaaaatgggattaataacagtacaggcctcaaagagttttggtagattaaatgagttgatgtgtggagcaagtgcttaagaagtggtaattattcctttatggctttctttatctggaccaaatgtactttcaataagaagcctttctctctgaccactctcttcacctaactgcaacacatctcccgaggcccctggtggaattttgtgcgaaatgaagctgtaccacctggcttttgaagagctctattatcatctgtttatgttttctcacctgataaaagtgaggcttctccagtgtagtgctgttctttctctgttttccctgtgctcccctgcattcaggggagactggctagtaaagaagtaactcagaaggatgccccagagtcttcctcttcctttaagagctgacctaagtctcattccctgaccataacactgcactccctgtagccaacctgggcattcagtcctttgagctcactgccttcccttcctaagcatttatcacaactgaaccacacttgcctgttaaaaacagactagttaagtgttccagtgccagtaaatagcatgagacaaagcctggaggtaagacctaaaagacatccatcatgatgaagtgatgaacacagaatgagaatgtggcgtggaggtgagcttggagccttaatatccatgtttatgagtcacttaaaggcaggctaggtgggacttcacagttttctgtgaaatcttctgtccctaatccttgtatcctacttcattcagttagaccttctgctgcttagaacatttttcttcaagtagtgagtactgtaatgttaacatccaagaaagtaaaacaaatagtcacctctgcaatagctcattaacaaytgggaacagagaggttaatgttccatagcttaaaaaagtatcaatacaactagggactctctcagtacaggatggggtgctatatccatattaccaatggcagtcatcccgagaaatccaagcagccacacttactctccttcagtgggtagatccactatacttgtcatgtagattagctgttttcactggagacttgcatcccatcatccttctgcacacagttgaggtggaccatacctcttttttttttttttttttttttagacgcagtcttgctctgtcgcccaggctggagaacagtggcatgatcttggctcactgcaagctctgcctcccgggttcacaccattctctggcctcagcctcctgagtagctgggactacaggcgcctgctgccacgcccggctaatttttttgtatttttagtagagacggggtttcaccatgttagccaggatggtctcgatctcctgacctcatgatccacccgcctcggcttcccaaagtgttgggattacaggcgtgagccaccgcgcccggcaggaccatacctcttgagcaggcttctctgcaggtgcttggtagctggctcgatgggtcagatcataagcctttcatgtcacagaagtggccctgatccatgatcccacaagcacacagactcagagcctacagagaagatgactctggagatctggttccctttactgtccatctatgattcatcatacaaaggtaagcacattccacatttccttttttgaaataagactgctgattttaaaaaaatggtaattacatctgctatactgcaaactgcagaagttcaagcttaaggaaagaccttttacatccttccctcttccttataccttaaaattaaagtctaacatcaaacagggggattcattatttaatttgtaagataagaaacatatctgcatgtgtaagttttttaaaaagaagggagaggaaacaaacaactgtttcctgtagactacaagcttcttgaggtcaaaacctgtccttccatctgtgtttctacaaaagctacagcagggacaacatcaagatgaatgcagttggagggaatccatctgtcttcaggcttcgtgtactttccaaaggaccttttgaatgtaaaagaaaagcctctgaaactaagactaggctgaaaatctgtctttaaggtttttgagacatgccaaaaagaaacaaacaaaaaccactaatgcttttaaaagaagaagtcaaggtgggagaaggagcttactacgtgagttcacacgcttaatcaagtgaacggctttgtgtcaggacgaacgtgaggatggataaataacc

SEQ ID NO: 682968 - DNA, 612 bp, Homo sapiens
tatatttagatgtatatatgtgaatgtatctgtgtcttagtatctgtatacacacacacacacacagaaagagagtgaaagctaagcactcacatatatgcttcatattgcagagttcaaagatcttgccatcattttctgtacctttaaaaattttgttggcatgttacataaagaataacttgtcacctcgttattctaagtgtgcccgcagaccagcagtcatcagcatcccctgggaacttactggaaatgcagagtcttagcgctgtcctcaactaactgaatcagaatcyacatttaaaagttctctcagtgattcatttacacattcaagtttcagaggtaaattttattcttgctaaacagtttagcaaaaataaagttaagttctttggtactctgccatagagatgctttcctcctacaaaaaatttcttagtggaattgtttgcaaagctctggtacagctgtattcagcactagccaatgagaaaatggcccatgataattttctagtcaattaactggtggaggagtgtagaatgagatatgcttccccatccatcatcctagtaaaaagcacaccaatttaggcaaacaataaaaagt

SEQ ID NO: 682969 - DNA, 612 bp, Homo sapiens
tatatttagatgtatatatgtgaatgtatctgtgtcttagtatctgtatacacacacacacacacagaaagagagtgaaagctaagcactcacatatatgcttcatattgcagagttcaaagatcttgccatcattttctgtacctttaaaaattttgttggcatgttacataaagaataacttgtcacctcgttattctaagtgtgcccgcagaccagcagtcatcagcatcccctgggaacttactggaaatgcagagtcttagcgctgtcctcaactaactgaatcagaatctrcatttaaaagttctctcagtgattcatttacacattcaagtttcagaggtaaattttattcttgctaaacagtttagcaaaaataaagttaagttctttggtactctgccatagagatgctttcctcctacaaaaaatttcttagtggaattgtttgcaaagctctggtacagctgtattcagcactagccaatgagaaaatggcccatgataattttctagtcaattaactggtggaggagtgtagaatgagatatgcttccccatccatcatcctagtaaaaagcacaccaatttaggcaaacaataaaaagt

SEQ ID NO: 682970 - DNA, 624 bp, Homo sapiens
catttcagaaaatttctttaacatgaagcaaaatatacaaagtagttatgtaaagtcttaaatataaggataaatttgtcagagatgataaaaattccattttataatamatttcagaaaatgcaactacccagatatttgtttcttcttcaatagtgtaattgattctaaagcctctaaatgtttctgctcttgaattgtaaacagaaattaaaacaccatagaatgacatattaaagtcacctaaattatgtttcttgtctttgcaatcactgtgctatcattgtttatttcaaagctactgcttaaacacaggaatatggagcacagtgggagtcagaaacagaactttagcctgaagcaagctcaaaggatttcaaactgttacagacttcctctcaaagtgaatttatatagctgagtctaggtattctgggtcaagctgtctaaccaaggattctctcaattttcatgtcgaatataaaatttattaatgtagaaattataaaatatgctaacttgctacttatatattgcgttggttcgaatgtgttcctcccaaaattatgtgttggaaacttaatccccgatgcaacagtattaggaggtagggctcaaagagag

SEQ ID NO: 682971 - DNA, 632 bp, Homo sapiens
gagttttacaacattccaattcaactaaagtaatttgttacttaccagcaaaattagtcaacctaaacgaaaatgtgctgctttctgasagccctcatatttaaacccttgagggaagggggacaggataagacatggtcctttcctcaagatctttaagttcttctagggaatttttaaaaatgcacgaaatgattttcatcaaaagagctttggaaataaggatggtctaaatgaagatgtgctttttaattaagttattcatttaggatttaaacaattctttatctcaaagtactgaggcagcttaatggaaaatgcagaaactaacacaaaatctggtaagaacagatttttaaaagatagtgactattagagaatctgaaaaatcagcccctgaaatgaaccatttgcctcaactaagcatgggatttggtccgaatatcaatgttctgtgagagcagaattttcactgataaatttctccgtggaggcttttgcttcagtttttcaaaatatgctgcggggttcttgtgcatgcctggtacctgaaaggtttttcaattacagttttattaaacatgtgaaaatattggtcaaaacagatgatttccatattttctctggaaaag

SEQ ID NO: 682972 - DNA, 632 bp, Homo sapiens
gagttttacaacattccaattcaactaaagtaatttgttacttaccagcaaaattagtcaacctaaacgaaaatgtgctgctttctgacagccctcatatttaaacccttgagggaagggggacaggataagacatggtcctttcctcaagatctttaagttcttctagggaatttttwaaaatgcacgaaatgattttcatcaaaagagctttggaaataaggatggtctaaatgaagatgtgctttttaattaagttattcatttaggatttaaacaattctttatctcaaagtactgaggcagcttaatggaaaatgcagaaactaacacaaaatctggtaagaacagatttttaaaagatagtgactattagagaatctgaaaaatcagcccctgaaatgaaccatttgcctcaactaagcatgggatttggtccgaatatcaatgttctgtgagagcagaattttcactgataaatttctccgtggaggcttttgcttcagtttttcaaaatatgctgcggggttcttgtgcatgcctggtacctgaaaggtttttcaattacagttttattaaacatgtgaaaatattggtcaaaacagatgatttccatattttctctggaaaag

SEQ ID NO: 682973 - DNA, 600 bp, Homo sapiens
tagttgagtatttttaattacatggccatatggaataagcaacacattttccagattgacttgcatctaaagtaaccgtctaactaagctccagcaaggacaggtaagcggaagtctcatgtgtagcttctaggaggtgttcttaatggaaggctgtatagccttcttttctttttcctttcctaatcctggaatggaaacataatgactccattttgagtagccaccctggaatttgaagtgaatctacatttttgaggatgaagaagcaagcagaatagaggattcgtggatcaatgtgagaatttgccttactagccatgtaaatggatctcatttacacgggaaacagaaaaatcccccaaaacctacgcgtgcacacacagacacacacacaygcaccacacaacacacacttctatcttgtttaagctgctgtttgtatgtgtgtgtttctctctcattcatctcaacagtgctttatctacagaataatccttgcaaaagccaaatctgaacacttaacacttcttactacattataaccttccagtgactcttgtttgtctcgaggataaagttccacttcctcagcaaagc

SEQ ID NO: 682974 - DNA, 3582 bp, Homo sapiens
ctttaatctaagtctgaatatatgtcattttaagctcacaaactttgttattcttcaggacagtttttacatttcttcgattttttatatgtatttaaattttttaaactgattagacagtttccacaagatttctgccaaaatattgtattgtgaaaatggaaatctatgaatcaatttagggagaagttacatagaaacaaagcaaaacaaaacactaataacatccaaaacaaacttaaagagaacaccacaataagaaaagaaattcccaaattggaataaatatttacaactcatgaaattacaaaggggctcgcatttccataaagggcactctctctctccctctctctctctttttttttttccacagagactaactctgtcaccatgtcttgagtgcagtcgtgcaatctcggctcactgcaacctctgcctcccaagtttcagcaattcttctgtctcagcctcctgagtagctggggctacaggcttgtgccaccattcccggctaattttttgtaattttagtagagacggggtttcaccaggttggccaggctggtttttaactcctgacctcaaatgatccgcccgcctcagcctctcaagtgttgaaattacagatgtgaggcaccacagctgacctgtaaagacctcttaaaaattagttaaaaaacaaacaaaacagaaaaagagaaagaagaaacagccactcagttaaaagaaaaagataaagaaaaagaaaaagaaaagaaaagaaaaaaaggcaaaagacattattttacaggtctagtgccctgtgcccctcactgtaatgggggtggatatgggcttcacaggacatgaaattcatcaaacagttgctggttgaaggagggaaaatcttgcgggaccagcctccagaacagagcctgtggtgcactgtttcatcccgtagccctggtaagaaaacctggctgtgccgtgctttatgttcacctgcatttgccctgttcagaggcctgagctaccgtggacacaaaagtctgctcaaactctccccatcccaatattctatctggtattgagcatgacaccctgtcttcactgagcatgtgtttatgcagttttgtgaccacctatccattttacaacaggaagactgaggcccccaaaaaaggcaaagactggtccatatcccagaaattgggaagagcacagagtattagggagggatccagcttccaaggccttgcatgcaccccacccatcaggtttgctttggaaatgagtgctcttaagtcctggaaaaccctgtggtctactttctacctgggctttctacccttccttattctcacataggtgtgcagccatgaacacacaaacacaccacacacacacacacacacacacaggcttctaaggtggagatcatggaggtgaggttagagaagaggaaaccagagaagtgacaaaacgggaagaaatagaagaggcagctttgccatgaggcagaggcatccactcccccagctacatgaccaggagctgacagcatgygatgaaggatcctccaggttccctgggttcttccaggcctggggatcttcccagctgtttcaagaggacaggacaggggttgtgactcccacctctatgggcacctggaactaaaatgagctatgccctcccccaaccaccccatgtgatataaagtgaggctacgggaaagaaaaccttcgttttctctctcataaataggggtactcaaaaggaataataccaagaattctagatactcataagtgtctgctccccttggctcttcattggtaactcactgtgctttgagactctgggaagaggcttttcaggttctagaggtccttcagagaagagagaggcctagagatgtgggcagatgaggacttggaataaagcagaatgtgacaatgcactgggctctggagtgtggggcccagaaaaaatactagatttttgggctgtccttgaggtcctcattcagaagtggaagaaaataatgtctctgaatgctgttaaagtgtttaatgagtgcacagcacactcaaagaggctgaggaaaataggaatcaagggaggtttccgaggttacttttatggcccttggagtcttcagatactgctccttttcccaggggtccttgaatagccactgccttgagaattccccaatgcaggtgcctgttttgtgatgcttccacctgggacttcagggctagtggaggcctctaggtggcggcagaccccgtgtttcttatgcccgctgggctttactggagcagctggagccgggggagagacaggctgaggtcctgcagctcctgttatcattcatgatctccacattattgggtggccaaaagtgggaagaagggctttgtgattttccatgttattttactcagcgactcttcccctagcactcaccatgtggcagctaccttggtaggttcaccttatggtaccaaaaatgattatgttatccctgcctccccgcggggagcccacagtctgaggacggcaggacaaaaacactaaagcaagtacatgtgaaagaaaagagcattttataatggaaataaagtagaatgttgggagggagggctggggagaggttgcctggaggggacatgaatgcctccctgaggtgacattatgttgtgaccagaatgacaacagagagccagtcctgcgcaggtgtgcaaagtgtgtcagggaaaagccactctttgtgaagagactcacaggcacaggtgagttcagcagaggaggttataacgggacaattgtggcggcaggcagcctgagaaagaaaggaaaagaggggagggaggatcctggggactgaaagaggagattagtcatttgcccctctctgacaaaatttccctgaattttagcacatgttgacaacaaatactatctcacaacttttgtgaaccagaatctcgatatagcttagttgggtgcctctgcctcaaggtctcttacgaggctggggctgtgatttcaactgaagctggatttgaggagagatcagccttctatctgcctcatggaaactggcacgattcagtgtgaactgagagcccgagttccttcctctcgattggcctgggcatctcctcagttctctatcatgtgggtctgtgcctagagcatcttaggacactgcagatcacttcctcatcttgaggattacaatacagagatgaaaaatgaaagagatagacagacatatgcagagaaaaagagagaaagggagacagagagattgagagaggacacacaggacagagcaagtaagaggaaaataatagctgttttagaaatataactttggaagttgcagaagactatgtgattccccaccatgttcacataccagaaccttaatccccagtgtaatggccttagcaggtcagaggtaattaagtccgaagcatgaggacctcatgatagcgattacgggctttgtaaaagaaaccgcagaaggctgtctctccctctctctgctaaatgagaaaacaacctgaagtctggagtttgaaa

SEQ ID NO: 682975 - DNA, 930 bp, Homo sapiens
gctttttttgtaacgatttgttcggcatgaggcccactcacaagggcccttcgtgactggactcaaggaaaacgaaaaggcctacttgtttttgcgattttctgttgtttttcaataactatttctcagaaacagtgctggatgaattccacaaggggttcacacaacctgttccaggacttagtgaccattgtttctgtccatgttcattgagttcaaatttaatatttaacttttcctcctcattcagcctcaatttgacactgaatcataggaaaatatttttacagttatacggggaagtcacaactggtatagattacagatagagcagaggagaattaaaagcacaattaatagaaaccacacccaccacggccaacgccaatgctagtttgacagccagtccatgatggggtcctgatggttagattctaactgttttacttgtccttgcatgtcttcggcaaggagagtaatactgcgagaactgtcagggatacacacaacattcagaatgcagcaagactcaaacccctccttgggctgcggtaaacatacctaatgccattcgattttgcaacacaacagtacacagctgaacaagttcttctgataacaacagaagtccagtgctactatcttaggagcttttactatatgtrgacttaatattttaatttgttgctgaagcaggattgtacgaggggcaagggagaatactgtgatagttttccaccaccagggagtctggcacgttcataaccagctacctttgtaagcatctagattattggggaagggaatattatcccggatggtgaatggaattaatggcacccccaagtgaatctccccatccaataagggggcagataggccacccatagggtctgcatacccagagggccccccaggggacagcaatgg

SEQ ID NO: 682976 - DNA, 961 bp, Homo sapiens
aatcccccaggacaaaggtgatgccctcttttcaggacttacatccagcagcgtcatctcgggatgggtttttcaaacacaagcagcatgaggtagcaagcatggtgtgacaggctcagggccatgggcagccggcttctggagaagcagcacagggcaggcacatctgtgggtggcaccatgacaagccaagacagcctcagcccgtaatcccaacagctccagcccagatggcattcaaattttcccggatagtattggggtgcccgatgcccatcactcgccctctcattagcacggccttgttggttactcagggactaaggagagagagtgggggatgtagatccagggtgggcactgcctcacagccagagtccacctgactgcaggccagcaagcaagccyaagcagctcagctctagtcacctctggctgcactttttatgtgtaatttacacaaaggcagcaaaaggaggtcaacattagctgttgtgacatgaaagtctatgccccattaagaccttaaaatgctattgtcttaagctatctttattctaataaaatttatacaaataaacacatacaaggtgaactactataaaggaaatattaggattttttaaacccataaacagacatgtaaacagtcactgtttgattgcagagaaagtgagcttctaaagcagctgaccacaaaacagcctcaccaaaccccaggcaggccaggcagtctgaacactacaaggccacgtgatggtcacagaggatgacagctcccgtgagtattgcaaggcactgtgttagcttctcactcacagtctcagaataccctgtgaggggaggccccgtctcactagagcacaggaggttcctgagctcttcccagaaaatggtcatcaaacgatggagcagggggaagcccagacagaacaagtgagtccctagggtctccttaacc

SEQ ID NO: 682977 - DNA, 961 bp, Homo sapiens
aatcccccaggacaaaggtgatgccctcttttcaggacttacatccagcagcgtcatctcgggatgggtttttcaaacacaagcagcatgaggtagcaagcatggtgtgacaggctcagggccatgggcagccggcttctggagaagcagcacagggcaggcacatctgtgggtggcaccatgacaagccaagacagcctcagcccgtaatcccaacagctccagcccagatggcattcaaattttcccggatagtattggggtgcccgatgcccatcactcgccctctcattagcacggccttgttggttactcagggactaaggagagagagtgggggatgtagatccagggtgggcactgcctcacagccagagtccacctgactgcaggccagcaagcaagcccaagcagctcagctctagtcacctctggytgcactttttatgtgtaatttacacaaaggcagcaaaaggaggtcaacattagctgttgtgacatgaaagtctatgccccattaagaccttaaaatgctattgtcttaagctatctttattctaataaaatttatacaaataaacacatacaaggtgaactactataaaggaaatattaggattttttaaacccataaacagacatgtaaacagtcactgtttgattgcagagaaagtgagcttctaaagcagctgaccacaaaacagcctcaccaaaccccaggcaggccaggcagtctgaacactacaaggccacgtgatggtcacagaggatgacagctcccgtgagtattgcaaggcactgtgttagcttctcactcacagtctcagaataccctgtgaggggaggccccgtctcactagagcacaggaggttcctgagctcttcccagaaaatggtcatcaaacgatggagcagggggaagcccagacagaacaagtgagtccctagggtctccttaacc

SEQ ID NO: 682978 - DNA, 961 bp, Homo sapiens
aatcccccaggacaaaggtgatgccctcttttcaggacttacatccagcagcgtcatctcgggatgggtttttcaaacacaagcagcatgaggtagcaagcatggtgtgacaggctcagggccatgggcagccggcttctggagaagcagcacagggcaggcacatctgtgggtggcaccatgacaagccaagacagcctcagcccgtaatcccaacagctccagcccagatggcattcaaattttcccggatagtattggggtgcccgatgcccatcactcgccctctcattagcacggccttgttggttactcagggactaaggagagagagtgggggatgtagatccagggtgggcactgcctcacagccagagtccacctgactgcaggccagcaagcaagcccaagcagctcagctctagtcacctctggctgcactttttatgtgtaatttacacaaaggcagcaaaaggaggtcaacattagctgttgtgacatgaaagtctatgccccattaagaccttaaaatgctattgtcttaagctmtctttattctaataaaatttatacaaataaacacatacaaggtgaactactataaaggaaatattaggattttttaaacccataaacagacatgtaaacagtcactgtttgattgcagagaaagtgagcttctaaagcagctgaccacaaaacagcctcaccaaaccccaggcaggccaggcagtctgaacactacaaggccacgtgatggtcacagaggatgacagctcccgtgagtattgcaaggcactgtgttagcttctcactcacagtctcagaataccctgtgaggggaggccccgtctcactagagcacaggaggttcctgagctcttcccagaaaatggtcatcaaacgatggagcagggggaagcccagacagaacaagtgagtccctagggtctccttaacc

SEQ ID NO: 682979 - DNA, 961 bp, Homo sapiens
aatcccccaggacaaaggtgatgccctcttttcaggacttacatccagcagcgtcatctcgggatgggtttttcaaacacaagcagcatgaggtagcaagcatggtgtgacaggctcagggccatgggcagccggcttctggagaagcagcacagggcaggcacatctgtgggtggcaccatgacaagccaagacagcctcagcccgtaatcccaacagctccagcccagatggcattcaaattttcccggatagtattggggtgcccgatgcccatcactcgccctctcattagcacggccttgttggttactcagggactaaggagagagagtgggggatgtagatccagggtgggcactgcctcacagccagagtccacctgactgcaggccagcaagcaagcccaagcagctcagctctagtcacctctggctgcactttttatgtgtaatttacacaaaggcagcaaaaggaggtcaacattagctgttgtgacatgaaagtctatgccccattaagaccttaaaatgctattgtcttaagctatctttaytctaataaaatttatacaaataaacacatacaaggtgaactactataaaggaaatattaggattttttaaacccataaacagacatgtaaacagtcactgtttgattgcagagaaagtgagcttctaaagcagctgaccacaaaacagcctcaccaaaccccaggcaggccaggcagtctgaacactacaaggccacgtgatggtcacagaggatgacagctcccgtgagtattgcaaggcactgtgttagcttctcactcacagtctcagaataccctgtgaggggaggccccgtctcactagagcacaggaggttcctgagctcttcccagaaaatggtcatcaaacgatggagcagggggaagcccagacagaacaagtgagtccctagggtctccttaacc

SEQ ID NO: 682980 - DNA, 961 bp, Homo sapiens
aatcccccaggacaaaggtgatgccctcttttcaggacttacatccagcagcgtcatctcgggatgggtttttcaaacacaagcagcatgaggtagcaagcatggtgtgacaggctcagggccatgggcagccggcttctggagaagcagcacagggcaggcacatctgtgggtggcaccatgacaagccaagacagcctcagcccgtaatcccaacagctccagcccagatggcattcaaattttcccggatagtattggggtgcccgatgcccatcactcgccctctcattagcacggccttgttggttactcagggactaaggagagagagtgggggatgtagatccagggtgggcactgcctcacagccagagtccacctgactgcaggccagcaagcaagcccaagcagctcagctctagtcacctctggctgcactttttatgtgtaatttacacaaaggcagcaaaaggaggtcaacattagctgttgtgacatgaaagtctatgccccattaagaccttaaaatgctattgtcttaagctatctttattctaataaaatttatacaaataaacacatacaagstgaactactataaaggaaatattaggattttttaaacccataaacagacatgtaaacagtcactgtttgattgcagagaaagtgagcttctaaagcagctgaccacaaaacagcctcaccaaaccccaggcaggccaggcagtctgaacactacaaggccacgtgatggtcacagaggatgacagctcccgtgagtattgcaaggcactgtgttagcttctcactcacagtctcagaataccctgtgaggggaggccccgtctcactagagcacaggaggttcctgagctcttcccagaaaatggtcatcaaacgatggagcagggggaagcccagacagaacaagtgagtccctagggtctccttaacc

SEQ ID NO: 682981 - DNA, 961 bp, Homo sapiens
aatcccccaggacaaaggtgatgccctcttttcaggacttacatccagcagcgtcatctcgggatgggtttttcaaacacaagcagcatgaggtagcaagcatggtgtgacaggctcagggccatgggcagccggcttctggagaagcagcacagggcaggcacatctgtgggtggcaccatgacaagccaagacagcctcagcccgtaatcccaacagctccagcccagatggcattcaaattttcccggatagtattggggtgcccgatgcccatcactcgccctctcattagcacggccttgttggttactcagggactaaggagagagagtgggggatgtagatccagggtgggcactgcctcacagccagagtccacctgactgcaggccagcaagcaagcccaagcagctcagctctagtcacctctggctgcactttttatgtgtaatttacacaaaggcagcaaaaggaggtcaacattagctgttgtgacatgaaagtctatgccccattaagaccttaaaatgctattgtcttaagctatctttattctaataaaatttatacaaataaacacatacaaggtgaactactataaaggaaatattaggattttttaaacccataaacagacatgwaaacagtcactgtttgattgcagagaaagtgagcttctaaagcagctgaccacaaaacagcctcaccaaaccccaggcaggccaggcagtctgaacactacaaggccacgtgatggtcacagaggatgacagctcccgtgagtattgcaaggcactgtgttagcttctcactcacagtctcagaataccctgtgaggggaggccccgtctcactagagcacaggaggttcctgagctcttcccagaaaatggtcatcaaacgatggagcagggggaagcccagacagaacaagtgagtccctagggtctccttaacc

SEQ ID NO: 682982 - DNA, 771 bp, Homo sapiens
gatgaagctggaaaccaccattctcagcaaactaacacaagagtagaaaagctaacatcgcatgttctcactcataatagggagttaaacaaagagaacacacggacacaggaaggggaacatcacacactggagcctgtcgggaagtgggggactatgggagggatagcattagaagaaatattcctggcctaggccactattgcgattttctaaattttgtttcaaaaacatgatatgtttcaaaaattgttattggtatgtaattatataaatatatagttcagaaaaaagaatcaacattaattatgctttttccaaaatactttatggttttgagctcttctagcagtgacatttttgctgtaggtaattgctgtrtatctggtatattcatcatagcatactttgtgccgtttacacttatccttcaatttcccactctcctaagtgtaaaagttcaaggccagagctcccatatcttcccaatattactttttgaaaagaagcttctatgtactgttttctctgggtcttgattggatatattgctaaaagagctgaaaaataataatttttttaaaaattcggtgatgagattaaagtaaatatattttataaatctaatgtacaaaatgaggtcagctgagaagacaatgacagttgaagcagaacctgagatcctgtttctctccattgacatatgaacttaactacaattgggtgaacaaagccagttgagtttgtagcaccccacatgagaaaaaagcc

SEQ ID NO: 682983 - DNA, 771 bp, Homo sapiens
gatgaagctggaaaccaccattctcagcaaactaacacaagagtagaaaagctaacatcgcatgttctcactcataatagggagttaaacaaagagaacacacggacacaggaaggggaacatcacacactggagcctgtcgggaagtgggggactatgggagggatagcattagaagaaatattcctggcctaggccactattgcgattttctaaattttgtttcaaaaacatgatatgtttcaaaaattgttattggtatgtaattatataaatatatagttcagaaaaaagaatcaacattaattatgctttttccaaaatactttatggttttgagctcttctagcagtgacatttttgctgtaggtaattgctgtgtatctggtatattcatcatagcatactttgtgccgtttacacttatccttcaatttcccactctcctaagtgtaaaagttcaaggccagagctcccatatcttcccaatattactttttgaaaagaagcttctatgtactgttttctctgggtcttgattggatatattgctaaaagagctgaaaaataataatttttttaaaaattcggtgatgagattaaagtaaatatattttataaatctaatgtacaaaatgaggtcagctgagaagacaatgacagttkaagcagaacctgagatcctgtttctctccattgacatatgaacttaactacaattgggtgaacaaagccagttgagtttgtagcaccccacatgagaaaaaagcc

SEQ ID NO: 682984 - DNA, 582 bp, Homo sapiens
aaaagtgacttagcatgtacaagtttacccctgcaggatgaccagcagatgtctcagcaaaaaaacttacaggtaagaggttgtaggatgacatactcaaagtgctgaaaaaatggcaastaccagccaagaacactatgtctgccaaaactatcatttcaaatgaattaaaaaataaaaataaagaatattcaagatcaacaaaaactgtataaatttatacccactaggcctgtcttaaaaaatgctaaatagtcattcacattaaaaaatgaaataatgatgagagcaacacaaaattatgtaaaatatgacattttctaatagagaaaattatgtacacaatcataatattctttgtaattataatgaagatgcacagaatactttaattctgctatatatttgagacaacaaagacttaaaaatgactataaatctgtgccaacagattcacaacacaaaatgatataatttgtgacatcaataaaacacatagggagccataaagaggcagggttttatatgtaatagtagttattcttggtaatatctatagtaacaacaaagaaaatacctaca

SEQ ID NO: 682985 - DNA, 582 bp, Homo sapiens
aaaagtgacttagcatgtacaagtttacccctgcaggatgaccagcagatgtctcagcaaaaaaacttacaggtaagaggttgtaggatgacatactcaaagtgctgaaaaaatggcaactaccagccaagaacactatgtctgccaaaactatcatttcaaatgaattaaaaaataaaaataaagaatattcaagatcaacaaaaactgtataaatttatacccactaggcctgtcttaaaaaatgctaaatagtcattcacattaaaaaatgaaataatgatgagagcaacacaaaattatgtaaaatatgacattttctaatagagaaaattatgtacacaatcataatattctttgtaattataatgaagatgcacagaatactttaattctgctatatatttgagayaacaaagacttaaaaatgactataaatctgtgccaacagattcacaacacaaaatgatataatttgtgacatcaataaaacacatagggagccataaagaggcagggttttatatgtaatagtagttattcttggtaatatctatagtaacaacaaagaaaatacctaca

SEQ ID NO: 682986 - DNA, 575 bp, Homo sapiens
aaagaatacagaaataacctttttaaaaggagttatttcccacagacttaccatatattgttcaaatcttcaaattaattttgtaaacataaagaatgtcaggtrtggtctaacatcaagtggaatttattagaatctaacaaacagttttatacttcaatactaaatatctttaacccttttacaagtggggagatacgatcctttttggcatctgactctgcatatgaacagcatgagcagcagagagatttgccaaagtcagaaaaatcatcatggagtccgtgagattgatcagtccaggagaaaaatattcaaaggtgttgctcctccagcctaccaatcaattcattcaaaacaaactattagcttattaacatattccaagaagacatcagtgtcttttggcaagctagcctgaaaaataaccacaaaataatagaactcattcttctcacctaggaagtaagtaggacagtttcataacatatacatgctcagggcaagactacaaactgtccgaaaaaaaaaaaaaaagatagcaggttgaaagagctgaccagcccaaaatctcc

SEQ ID NO: 682987 - DNA, 575 bp, Homo sapiens
aaagaatacagaaataacctttttaaaaggagttatttcccacagacttaccatatattgttcaaatcttcaaattaattttgtaaacataaagaatgtcaggtatggtctaacatcaagtggaatttattagaatctaacaaacagttttatacttcaatactaaatatctttaacccttttacaagtggggagatacgatcctttttggcatctgactctgcatatgaacagcatgagcagcagagagatttgccaaagtcagaaaaatcatcatggagtccgtgagattgatcagtccaggagaaaaatattcaaaggtgttgctcctccagcctaccaatcaattcattcaaaacaaactattagcttattaacataytccaagaagacatcagtgtcttttggcaagctagcctgaaaaataaccacaaaataatagaactcattcttctcacctaggaagtaagtaggacagtttcataacatatacatgctcagggcaagactacaaactgtccgaaaaaaaaaaaaaaagatagcaggttgaaagagctgaccagcccaaaatctcc

SEQ ID NO: 682988 - DNA, 600 bp, Homo sapiens
aagaatattcttcaaaattgaagaaatttgtaccatttgaaatccagctgaccaaggtatatcagagctggctagaaacgttcacccagattgcaaakttgttcacacaggtgaacagctcatagcatacatagaatctttatcaatgggtgtgatggaagtaatgaataggactatgccatatgtgcttgtcgtggagatctggttgaaaaacactggtagaaaataagaagtgaagctaactcaccaatcaacaaatactgaaggatcactttggcaggtaatttaaaaattgctttatcattcccctttagataaaagaagtatttatctataaagctttcttgaaaaaacaggagtttaaaggattatggcttttccatttgcctttctcgttttagatacgcttttattttaacaaacttggcatcacctttcatcttcttgcacattgaacaccctgatgagttttgtttccatgtcatcaacctggatgtaaaatgctgttaacctcctttaatattattatagcatagagcatatacatttcagccaatcagatgaccttttccactgaataactggaagaactctatataa

SEQ ID NO: 682989 - DNA, 670 bp, Homo sapiens
ctaataatgtatacttcataagggtagatgaaaggataaaacataaatctataaaatttgaagcttaattcttaggtaaataagttaaaatagaaaaaaataactatttatatagtttattgygaccactcttctatttttttacataagacaaattataacctcatgactttggcatccttcttgccatatatatctcaatcaccaattaggctctattcaggatgactgttcttgatttttcttctacttgaagggctctagtctgacctattcgcatggcttccccttcacttccttaaagtctgggttcatgtttcatctaaacagaaagattttctcagttccttatataaagcagtagtttctaatccttgctatcccctctaccatgcttcttcagagcacctatcactatctacctccatctgaatacaacttatactccttgggtgtatagactttatttattgttttatctctagtacctaaggtaatatcttgcatatatagacctttaataagaaatgtaagttgaataaacacatgaatgaaagttttctaagctattagtgatgggtatgaactctgtgaaatgtgactttttctagctccacaacttttcaattatataacctaagacaagttaaataatatctctaagcctcaa

SEQ ID NO: 682990 - DNA, 670 bp, Homo sapiens
ctaataatgtatacttcataagggtagatgaaaggataaaacataaatctataaaatttgaagcttaattcttaggtaaataagttaaaatagaaaaaaataactatttatatagtttattgtgaccactcttctatttttttacataagacaaattataacctcatgactttggcatccttcttgccatatatatctcaatcaccaattaggctctattcaggatgactgttcttgmtttttcttctacttgaagggctctagtctgacctattcgcatggcttccccttcacttccttaaagtctgggttcatgtttcatctaaacagaaagattttctcagttccttatataaagcagtagtttctaatccttgctatcccctctaccatgcttcttcagagcacctatcactatctacctccatctgaatacaacttatactccttgggtgtatagactttatttattgttttatctctagtacctaaggtaatatcttgcatatatagacctttaataagaaatgtaagttgaataaacacatgaatgaaagttttctaagctattagtgatgggtatgaactctgtgaaatgtgactttttctagctccacaacttttcaattatataacctaagacaagttaaataatatctctaagcctcaa

SEQ ID NO: 682991 - DNA, 480 bp, Homo sapiens
  misc_feature 380, 381, 382, 383, 384, 385, 386, 387, 388, 389, 390, 391,392, 393, 394, 395, 396, 397, 398, 399, 400, 401, 402, 403,404, 405, 406, 407, 408, 409, 410, 411, 412, 413, 414, 415,416, 417, 418, 419, 420, 421, 422, 423, 424, 425, 426: n = A,T,C or G
  misc_feature 427, 428, 429, 430, 431, 432, 433, 434, 435, 436, 437, 438,439, 440, 441, 442, 443, 444, 445, 446, 447, 448, 449, 450,451, 452, 453, 454, 455, 456, 457, 458, 459, 460, 461, 462,463, 464, 465, 466, 467, 468, 469, 470, 471, 472, 473: n = A,T,C or G
  misc_feature 474, 475, 476, 477, 478, 479: n = A,T,C or G
ataatatcaaccttgccttgactcaacacattaatatcaaccatgcattgatggctttgagattcaaattatgtaacatacstaaaagcacacagtgcaggactcagcacatactacatgtttaattactgtaaatttccttactttctgcttccttccttttcaccctgaccagtcaatggtggacaatagcattaagaaactcattacctctggacacttgcaagatttcttctttcaataatatcggccttgtgtataatagcccatcctgatatacatcattttccttctctatactcaaactaaaaatagaaaactgaatgcaagcaggatatgggttggccatcaagattctggtggaaaagaaaattccttgnnnnnnnnnnnnnnnnnnnnnnnnnnnnnnnnnnnnnnnnnnnnnnnnnnnnnnnnnnnnnnnnnnnnnnnnnnnnnnnnnnnnnnnnnnnnnnnnnnnng

SEQ ID NO: 682992 - DNA, 1303 bp, Homo sapiens
ccgagtagctgggactgtaggcgcccgccacggcgcccggctaattttttgtatttttagtagcgacggggtttcaccatcgtctcgatttcctgaccttgtgatccgcccgcctcagcatcccaaagtgctgggattaccggcgtgagccaccgtgcccagccaaccatatgttagactttttcataatgtgttaataaagaaacatatacttttaatattacctttaaaaatacgtttgtaccttggcatrattttttagtaatcttatgaattttattttgtaattaaaacaatttatacgctctctaaatcataaaagagattcatggcataaataacccccataaagtttagaaaaaaatcattctttcaacttagtttaaatagtattagaatttcctgtttcttaaagttatggtggaattgcacaataaaaatagattgacctggtaccttttggtaaatttctctatttcttctacatagctgtttgctgatttatatacattattaaaattgtccatttttttgcagatcatttaattgcatagtttacttatgtattttcttaacattctcacctcttttgtgttttcttaacattctcctctgacagtgattatgctcactttgtcacttagtttgaggtttcatgtctttcccttttgcttctaaatattcttctcttgcctccacccaatccctgccaaggaaaaagctcatattagccactttatgatttgctttattcttttgactttaattttttcttctactttctacagatttatttgactttcatttttaaatttatttaggaggataattaacatgtatttcaattctgtcttagttaattatatatattcaagggtctgagatttcctttagctatagctattaggttctgtttatagtgctttctctaccttctttcccttacatattttgcaatctgagtttcgagttcattttgaaatttagaatgtgtgtttgtttatgtattgacacatttaatttccagacgatagattttttcactttcagattttttctcctaaactaattttaaatattattttattatgatcaaatagaattatctgtaactttaatttttgcctataatttaagattttttgtaattttagtaagatgaaatgttatgaatatttcatgaggtttaatttcctgtggtaaatttcttgggttcgataaatatacattgggtctaaataatattaaccacattttatttcctcgaataaaatataaatacatattagtataaaaatgcgca

SEQ ID NO: 682993 - DNA, 613 bp, Homo sapiens
aagaagaagaagaagaagtagaaaaaaatcttgaatataaatggattaagttcttcaattaaaaggtacactacagcctgggcaacagagagacaccctgtctcaaagaaagaaagaaaaaaaaggtatacattggttgaatagattaaaacacaaaatctaagtatacattgcctagaagaaacacgcttcacaagcaagaatcaaaacatataccaaaacctatggtatgcaacaaaagcagttctaagagataagtatacagcaataaatggctacatcaaaaaagaagaacaatctggtttttaattttttttagggacagtttcgctgttgtccaggctggagtccccaggagtttgaggttgctgtgagctatgactgtgcaatcgtggaaccgcactccagcctaggcaacagagcaagaccctgacttaaagaaaataaaaaaagaataaaatcttgtaatttgccacatcgattaacctggaggacaycatgtaaagtgaaataagccagacatggaaagacaaatactgcatgatctaagacttaaacataagacctaaaaccataaaaaccctagaagaaaacctaggcaataccattcagg

SEQ ID NO: 682994 - DNA, 1880 bp, Homo sapiens
actgttaaagttttaactacctctcactttttttacattctctatgatgagacaattgtattagggcccttacttcttattagtacgataaattaatggtttataacctttgttttactactcagggaacacttcataaatcaactataattacaagctagaaaatagcctataaaatgattctttcttctgtatcctttctccttctctggaattataaatgttgaaaataataagcattaggaacctaagagtacaccttgaaactatgtacattctgtttggaatcaccatatatattcatattatattatattatattatattatattatatgtgtgtgtgtctgtgtgtgtgtatttcctttcttcttttgtgccaaacacatgcatacacacaygccatatacatatatgacacatttttgttataaaagtagtatgtatccttgataggaaatttgaaaaagaaaaaaactgaggaagaaaatacaatctaccagaattgaactacctaaagataactactgaaaatatttggtgcgtattcattcactttgtttttaaaaatgatattacatgtatttgatccttactcagtgtgtctttctctctttccacacttaacttcctgaggacaggtgttatgtcgccgtgttcttttgtatttttacatgtgtgcacatgtgtgtgtttcactatgacatctcttacagggtctggcacatagtgtgtatgaaacttgtgtttgttgaatgaatgaatgaataaatgaacctcctactgatgaccacatcttccctttgcaaatgaaggtatctgcagtgcgtttgggtgatatgtgtgatagtttctgcctttagagtaattttacattttttcactcagcttcattatgcatgaagagtaatatcttagagtactatctggcacctactaattgctgattaaaactgactaggcctatgcctaatccaactttgattgcttagaaatccatctgttttcctctacttcaagtttattgattgactgattcaacaagcatttactgatcaccatatgagttcccccaaattaggcaaggcaattgcgatggctcacagtctgctgggggagaaacagtcagctttaaactaataaataatcacaggttaggatccaggtgcaaagagagcaaatgggacactgcagtagtgaactggagggttcctgacctagacagggcagttgtcatgcagggcatttctgggagggtcacatgcaggcccagatctgaagggtgagaaggagctggggacgtgctgaggcaggaccaaggggcccagggtgaggggcccgagtgtgctgagcccccgaggtgaggacatcctgggagaactgacaggagagtaggagggctggggacagaaccagatgagaacgggagacagggatgctacaaagccatgtttctcaacctttatgttttcattattgccccactaaggagaaaaactgagagaattaataaagaattgagttctggggaggcaaaaataactttgctattacaacagtttctgaccttcaaagctcagtcctgctggataatatgaggcccctaacaactactgaaagaggggtgtttgtgtctgttcctactgagagatccaactccatatcttctatgtcaatataaatttccccaacttcaagattatttagtcattcgataagcatttactgagcacgtattatatgccagaagccttgtaattactaacacgtttttcttctcaagaaccagttgtacccactggacaggatcaccacaaggagaaggtgtgtttagagctaaatgggtcggaaccagtgggactttatgtgtcaaagtgcagc

SEQ ID NO: 682995 - DNA, 615 bp, Homo sapiens
tcattattatgattctaatttcagtaatagagaatttaaaagttcttacagaaacagtaaaaggacaaagaagattaaaaaataaaatattctaagcaaaaattcaagctcaggtgcttcaatcttaaaacaaatgagcttaaaaacctcttgttttcattttcaagtggtgggagmagaaagtttcatggcctaaataatagaaaataataaatttatcagatctaggctgaatgcccgtctactataaatgaaatcgatgtcttttgaccacgaaatagacattactacataacagttataaatatagtgatgtattcatcagtaacccatgagtcaacagtaatctatttcttttccattaccataagaatgtctgaatatctatattggaagtgtattgattattcaaagacagtgcaacataattcacctggactgacttagattgaacaaatgaaagtttcaagttaacttcatgaactcctaagcatctttatggaaacagagcatatatttactcagtttgatgttctattaacaggttactaacttacataggcaaaacaaaatttctttataaattatatgtgggtatattttcctttatatttt

SEQ ID NO: 682996 - DNA, 615 bp, Homo sapiens
tcattattatgattctaatttcagtaatagagaatttaaaagttcttacagaaacagtaaaaggacaaagaagattaaaaaataaaatattctaagcaaaaattcaagctcaggtgcttcaatcttaaaacaaatgagcttaaaaacctcttgttttcattttcaagtggtgggagcagaaagtttcatggcctaaataatagaaaataataaatttatcagatctaggctgaatgcccgtctactataaatgaaatcgatgtcttttgaccacgaaatagacattactacataacagttataaatatagtgatgtattcatcagtaacccatgagtcaacagtaatctatttcttttccattaccataagaatgyctgaatatctatattggaagtgtattgattattcaaagacagtgcaacataattcacctggactgacttagattgaacaaatgaaagtttcaagttaacttcatgaactcctaagcatctttatggaaacagagcatatatttactcagtttgatgttctattaacaggttactaacttacataggcaaaacaaaatttctttataaattatatgtgggtatattttcctttatatttt

SEQ ID NO: 682997 - DNA, 1751 bp, Homo sapiens
cagatgacagtatctgtcttcctgctagctggctggagagctagtgtgccaggctctcacagctgtgggggcacagctgactatccatcttcaaaatgcaccacatcccagtggtttgaaatagcttggaaaagtcacttcttacaaagaaaagtttatctgagagctgatcttctcataagaactatgtttcactttcccctccacttctgctcataaagagggcagcccaggtaggaagtaccttttatcagataatgaccttgcctctggggactctttccatcagatttcaacarcaagactgagtcatctaggctgcatgctttgaggaacattcaccaccctgaataaaggtcatcctcattttccaaacatgatggcagctagacatttttaaaattacagttatgtcccataaaaacttcccctatttttgctcacaggaagaatacaaatttatagaaattcatattttgatatgaatgaatagattctaggtattcacttatttaacttatttgttgctatttcaaattctatgttatattttgaggataactccttatatttatatgttttaaatattaatgtacatagaatctaatcatttagcaaaatgtgccctaaggcatccaaacaagtaataggatatatatatatatatatatatatatatatatcctattttatatatatatgtatttacatatataaatttatatacatttatataaatataaatgtatataaatcctattatactataataggatatattataattatatatcattataattagatattatatataaatatatatatttatatatttatatatcctattttatatatatacacatacacacacacatatgtgtgtgtttgtatgtgtacatatataaaaacacacacatgtatttatatatgtatatataaatacatatgtaaaaacacacatgtattcatatggtatgtgtattcaggcatataaagatatgtatgtactctgtaacctatacaaaaatactgttttgttaagtaacatgacatttaatgccctaattatatgatttatctggaggttttagatagatttccactgcaatgtctctctacctttttttaagcacaaattaatcgatgcaaagtaggcaaataacaaggaatcagtgtaatttctagtaccttaaattatggctaggttcataagattgacaaatgcattgattgacagttccctacgttaaccggttctttgaaaaaattgatgaatcttgcccaataacagatagttacttctccacccaacaaatggcttttcttataggcaagagtggtttttgatttacctagtgaatatgatttctcagttcatatctcagattatttacaaatgcatcttaatgtctagtgctcatttattaatagaataaggaaagtaaaaaggtttataataaataagcattttatattttgatacagatttttttgtaaaattaaagtttccattatatgtaaactatttggcatagtggcatagttttttttttttttttttttttgagacggagtctcactcttattgcccaggctggagtgcaatggtgccatctcagctcactgcaactccacctcctgggctcaagtgattctcctgcctcagactccctagtagctggaattacaggcgcacatcaccatgcccagctaatttttgtatttttagtagggacagggtttcacca

SEQ ID NO: 682998 - DNA, 1751 bp, Homo sapiens
cagatgacagtatctgtcttcctgctagctggctggagagctagtgtgccaggctctcacagctgtgggggcacagctgactatccatcttcaaaatgcaccacatcccagtggtttgaaatagcttggaaaagtcacttcttacaaagaaaagtttatctgagagctgatcttctcataagaactatgtttcactttcccctccacttctgctcataaagagggcagcccaggtaggaagtaccttttatcagataatgaccttgcctctggggactctttccatcagatttcaacagcaagactgagtcatctaggctgcatgctttgaggaacattcaccaccctgaataaaggtcatcctcattttccaaacatgatggcagctagacatttttaaaattacagttatgtcccataaaaacttcccctatttttgctcacaggaagaatacaaatttatagaaattcatattttgatatgaatgaatagattctaggtattcacttatttaacttatttgttgctatttcaaattctatgttatattttgaggataactccttatatttatatgttttaaatattaatgtacatagaatctaatcatttagcaaaatgtgccctaaggcatccaaacaagtaataggatatatatatatatatatatatatatatatatcctattttatatatatatgtatttacatatataaatttatatacatttatataaatataaatgtatataaatcctattatactataataggatatattataattatatatcattataattagatattatatataaatatatatatttatatatttatatatcctattttatatatatacacatacacacacacatatgtgtgtgtttgtatgtgtacatatataaaaacacacacatgtatttatatatgtatatataaatacatatgtaaaaacacacatgtattcatatggtatgtgtattcaggcatataaagatatgtatgtactctgtaacctatacaaaaatactgttttgttaagtaacatgacatttaatgccctaattatatgatttatctggaggttttagatagatttccactgcaatgtctctctacctttttttaagcacaaattaatcgatgcaaagtaggcaaataacaaggaatcagtgtaatttctagtaccttaaattatggctaggttcataagattgacaaatgcattgattgacagttccctacgttaaccggttctttgaaaaaattgatgaatcttgcccaataacagatagttacttctccacccaacaaatggcttttcttataggcaagagtggtttttgatttacctagtgaatatgatttctcagttcatatctcagattatttacaaatgcatcttaatgtctagtgctcatttattaatagaataaggaaagtaaamaggtttataataaataagcattttatattttgatacagatttttttgtaaaattaaagtttccattatatgtaaactatttggcatagtggcatagttttttttttttttttttttttgagacggagtctcactcttattgcccaggctggagtgcaatggtgccatctcagctcactgcaactccacctcctgggctcaagtgattctcctgcctcagactccctagtagctggaattacaggcgcacatcaccatgcccagctaatttttgtatttttagtagggacagggtttcacca

SEQ ID NO: 682999 - DNA, 1751 bp, Homo sapiens
cagatgacagtatctgtcttcctgctagctggctggagagctagtgtgccaggctctcacagctgtgggggcacagctgactatccatcttcaaaatgcaccacatcccagtggtttgaaatagcttggaaaagtcacttcttacaaagaaaagtttatctgagagctgatcttctcataagaactatgtttcactttcccctccacttctgctcataaagagggcagcccaggtaggaagtaccttttatcagataatgaccttgcctctggggactctttccatcagatttcaacagcaagactgagtcatctaggctgcatgctttgaggaacattcaccaccctgaataaaggtcatcctcattttccaaacatgatggcagctagacatttttaaaattacagttatgtcccataaaaacttcccctatttttgctcacaggaagaatacaaatttatagaaattcatattttgatatgaatgaatagattctaggtattcacttatttaacttatttgttgctatttcaaattctatgttatattttgaggataactccttatatttatatgttttaaatattaatgtacatagaatctaatcatttagcaaaatgtgccctaaggcatccaaacaagtaataggatatatatatatatatatatatatatatatatcctattttatatatatatgtatttacatatataaatttatatacatttatataaatataaatgtatataaatcctattatactataataggatatattataattatatatcattataattagatattatatataaatatatatatttatatatttatatatcctattttatatatatacacatacacacacacatatgtgtgtgtttgtatgtgtacatatataaaaacacacacatgtatttatatatgtatatataaatacatatgtaaaaacacacatgtattcatatggtatgtgtattcaggcatataaagatatgtatgtactctgtaacctatacaaaaatactgttttgttaagtaacatgacatttaatgccctaattatatgatttatctggaggttttagatagatttccactgcaatgtctctctacctttttttaagcacaaattaatcgatgcaaagtaggcaaataacaaggaatcagtgtaatttctagtaccttaaattatggctaggttcataagattgacaaatgcattgattgacagttccctacgttaaccggttctttgaaaaaattgatgaatcttgcccaataacagatagttacttctccacccaacaaatggcttttcttataggcaagagtggtttttgatttacctagtgaatatgatttctcagttcatatctcagattatttacaaatgcatcttaatgtctagtgctcatttattaatagaataaggaaagtaaaaaggtttataataaataagcattttatattttgatacagatttttttgtaaaattaaagtttccattatatgtaaaytatttggcatagtggcatagttttttttttttttttttttttgagacggagtctcactcttattgcccaggctggagtgcaatggtgccatctcagctcactgcaactccacctcctgggctcaagtgattctcctgcctcagactccctagtagctggaattacaggcgcacatcaccatgcccagctaatttttgtatttttagtagggacagggtttcacca

SEQ ID NO: 683000 - DNA, 654 bp, Homo sapiens
ccaacttcctttgctgagaatttttccactatctgctcaattataaaagaactgctgacatgcaaaccaatcaaaataccgataaaacatgcaagaggagagaggtgaggggaggatgttccaacatcacaaaattagagtattaaattcatataataagaagagggagtatggagatttaagactaattgcatgttgaaaaaaggaagtgtcttgtcactcaactacgctcttgactagtaggttgtgaattcaagacaattacttttagaatggcttttaccaaaaaagccgacagatacaataaaattaaaataagtcatttagtatactttgtttaaaaaaaaagtgtttcattattatactcatttgtctgaagttctatagaagtagaatcctttcacaaaagatcagcaggaaatccttttaaccttcacagatctgttaagggtgtatacaagaactgaacttctatgcgaaatacggggttggcagagttcatggtttgtaacgtgtgtgacacacaacamcactaacttaacagaaactgaatttctgattttagggaacaatctcttgacaatctagcatttgtgcaaaaaagtaactttcacacagcaacacttaatcccatgagggaattaaagattgcca

SEQ ID NO: 683001 - DNA, 1323 bp, Homo sapiens
atcaactcttaatcctcacaacagccctatgaggtaggcactattaatatctccattttacagatgaggaatctgaggtacagagaaagccaataaccagcccaagggcacacagctaacaagtagcagagctgggattaaactcagagttcagctccagagtacacactacaatgatggaaggtgacatggaggaaattttgaagggtgtgtagtgtacaatgctatatactacctttctactaaataaaarcccaatcaattacggcttaaaaagtataggcttaaccaatgaatcatctggcaaaggttttatatattttatagaaaaagatacccataacttaggggaaataaagacaaacaggaatctttttgttagcgaacataaagatggtctgagggttattagtgtcattttaaattgctgcctaattacaattaaatcatttatctgtgtatgaattagccccctacagagccaaagttgccatccctttcagtggtttgacacacacacccctggggctccacccccaggtcatttttcacttccaatgaaatgtcacccagcaaacttttcaaatccctcccagcacctactatgagtgtggacagaggcaaacaattcaattttatgaacggcctgcacatagaaaggcaaacaagaaggatggataaattatccatgacagagcatccatctataacagatgagctaaaacagaactgtcccaatttgggtactgctaccattgaggtcacttacatgacagggctggacgagtctgctaatttatcaaaatcctgctcaacccaatgatcacaaacacaaaccaaacacaaaaggccactattgctacttatggcctgccccatctcccaattaatatctctatactgtgtttaatatttccaaaactaggatccaacaccaggaactttaattcctcacatgtgataaagtgcataaaccgctgaagcatatagtcttccaccctacaacgtgcccttcaagatttcctccatctcaccttccatctcagctgccttcgttataatgatttccctatggagcccaaatgaaaagccaggctcgcaggggtcacatccttctgctgccaaagctcgtgctatatcgcacaattacaccatatgctttctccagataaggacggggaagaactgaatttaagatgcagaagtaaggagatgcataaaatggccacttttccagaacccgagacaggcagggcatacttaaacatcaaaagcaagggactcaaagaataattaataaaggcagattgatgaaggagataa

SEQ ID NO: 683002 - DNA, 647 bp, Homo sapiens
ttaaaacccagagtgctgggtcccacccctggagtttctgattctcaggtctggagtggggcctgagaatttaactggtaaagttgccaggtgatgctgacgctgctggtccggggaccacgcctgagaatgactgctgtaaggtgttgtatgtgaaggtgaggggttactgcggccacgcagcgatcctggcagggcagctgcagcagtgccttccctgagacaacaggaatccgggcagtctgagggccctctaggatcacagggccagggaggagacacggagccttgttaagtctgctcctcagcctgctttggggacaaaagcacagggcctctgctttctgggaggcagactgacgasggggagagaccaggctcaggaagagcagacccaggggtgaatcctgaccctgtcgtcctgtagccagggttcccaggcaagcatcctgctctgtgagtcaggataatgatgcctcactgggttttcaaaaggcggatacaaatgaagtccctgttgaatacatgttacttccccacggctctctgacttggcttttgctattgatttaaaaatgtgcaattgagtttttgaacctaagtttgagattttacattgacctcaattgagttgagtttggctggtt

SEQ ID NO: 683003 - DNA, 1047 bp, Homo sapiens
gcctgatgcctaaagaaagggtcttgctacctgttgcaaagagggagtaaagatgagaaccaggaataggttggggctcagagttgggaggtgctttgcttttttttttttgagacggagtctggctctgtcacccaggctggagtgcagtggcgtgatctcagctcactgcaacctctgcctcctgggttcaagcaattctcctgcctcagcctcctggaacgtgcaccaccacccccggctaatatttgtatttttagtagagacggggtttcaccatgttggccaggatggtctcgatctcttgatcttgtgatccttccacctcggcctcccaaagtgctgggatcacaggtgtgagccaccacgcctgactgggaggtgcttcttgagaagggtccttggccaaggcctaggggaatcttagagcagaggagtcatggacagctcatttctagagacttgccttttcctttactggcttgctggcttccatcttcccaggacgaagttaatggctcttgttttaggcttttcatgtagcatcacttgggtgcctttgggcacttgggtgaaccgggggacattgagcaccactctgattggttggcagggaggagtcagagcttgactcagaccaagtcccatcactggtcgcactgagggtgaagtggcaggaggaggaggaggggctccggctggtctgtggtgaggtaagttgggaaggggtctgaaaatggggtagagagatgtggtccaagggagccagccagtgacgggtactcytgtgtttgctgaattctccaagcccagtgctgcaagcattgagtgagccctagtgtgtgccaggccctgacctgaagctgagcaggggtcagagtgccctgggcagcccaggatgaagtgggctccaacagcagctggagggagttaggtgtgcaagggcctggcagcccatttcccttccacatggtttagcctgctctgctcactactccatggctcacccctcgcccagccatccccaaggcctagcaccagttgatg

SEQ ID NO: 683004 - DNA, 589 bp, Homo sapiens
agtttacagagagctatactctgaaaatttttaataagttggcaaatcatgaaaattcatttgaaaacactagaaagttctgcttttagacaatttttaacttataagcaactgaaatcctaaagggaagatagcagtgtttaattctgggactgcagtctaaatctgagttggcaaataccatgtttatctgttgtttgataaaatactgacaaaatcttataaaaactggattacttgaataactgctttgagaaaatagaatgtagtgaatasttctctcttttctgcttcagcaattaaatgacttgcatatgtgatttctaagaaagagcttgttggttcactcttttaaaaaacaaaaataaaaacatttcattgttttaaaatgaatactagaggtcaggcacagtggctcgcacctgtaatcccagcattttgggaggctgaggcaggaggatcacttgaagccagaagttcaagaccagcctaggcaacatagtgagacagctgtctctacaaaaaattttaaaaaattagccaggcatggtggcatgcacctgtagtcctagctactgggaaggctaca

SEQ ID NO: 683005 - DNA, 656 bp, Homo sapiens
tacgaatgagaagggaagtcatcggagggttttcagaagaaacacgacaggatctggcttccaattatytctacagcatggctctgagagctgtagcgaggaatgcgaagggggcaaggatagaagggaggcgaccactccgggagcaattacaaccatcccagcacaagatactggtgactcacgctaaggcggaggtgggagggtgatgagaagcaggttccgggtctcttttgatgtatgtgccaacaggatttgctgactcagcagatgtgggctgagggtggtgagagaaagagaggagctaaggatgacactgaggcgttcagccagagtggctaggagcactgagttgttataatctgagatgggaaacaggttttgggaaagagttgctcaatgttgaacatactacaatggggaagtctgcagatacacagagtgggcagatggctattcaagtccagggcagagatgcaggccagatataaatttgagagtcgttagcatttgatggtatttaaagccctgggacaggaggagatccctgtgggagtgagtgcagaggagggaagaggtttaagggctgagtcctggggcatctcactgttttgaagaccaggagattaggaggaatgggcaaaagagactggcat

SEQ ID NO: 683006 - DNA, 611 bp, Homo sapiens
tgatgagttcatgtcctttgtagggacatggatgaaattggaaaacatcattctcagtaaactattgcaagaacaaaaaaccaaacaccgcatattctcactcataggtgggaattgaacaatgagatcacatggacacaggaaggggaatatcacactctggggactgttgtggggtgggggaacgggggagggatagcattgggakttatacctaatgctagataacgagttagtgggtgcagtgcaccagtatggcacatgtatacatatgtaactaacctgcacaatgtgcacatgtaccctaaaacttaaagtataataaaaaaaaaatctaaagataaagatgatagtagttatcaaacacaaataatatgtagacctctttaaaagtatcatgattcctaaatgttcactgaaattgtttttattataatgttgcttaagtgtatataaacataaaaatggaaattttataattataaaaccaaaatacatttatatataaatgctgagaaaagatacaaaaatttttttatcacaaatttaatgtggtagagttttactaaaatcaaagcacattcaaaagatcaaacaaatatagggcttat

SEQ ID NO: 683007 - DNA, 611 bp, Homo sapiens
tgatgagttcatgtcctttgtagggacatggatgaaattggaaaacatcattctcagtaaactattgcaagaacaaaaaaccaaacaccgcatattctcactcataggtgggaattgaacaatgagatcacatggacacaggaaggggaatatcacactctggggactgttgtggggtgggggaacgggggagggatagcattgggagttatacctaatgctagataacgagttagtgggtgcagtgcaccagtatggcacatgtatacatatgtaactaacctgcacaatgtgcacatgtaccctaaaacttaaagtataataaaaaaaaaatctaaagataaagatgatagtagttatcaaacacaaataatatgtagacctctttaaaartatcatgattcctaaatgttcactgaaattgtttttattataatgttgcttaagtgtatataaacataaaaatggaaattttataattataaaaccaaaatacatttatatataaatgctgagaaaagatacaaaaatttttttatcacaaatttaatgtggtagagttttactaaaatcaaagcacattcaaaagatcaaacaaatatagggcttat

SEQ ID NO: 683008 - DNA, 1076 bp, Homo sapiens
aagagttaagaggaagccaagcaggtagtgctctatctggaactctacccttaactcaaccagagcaccccagttttatttgtattctatattatagtttttcctgacttttccttagaaatagttgccaatgcttcagaaaacagttcagaaaacactttatcttgaaagtttgtttcttctttaaaattctatgatcttatatttacatcaaagaactagctaatttaatctttacagcccaggacatgaatagcgtaggtactattcctaatcaacaaaacaaaaacagagagttttaaagaactgcaattggttagaaggcattctgtagacaatgcagttctattgtttttatttgttctttttttwaaaaaaaaaaatcagaaatacagacttaatactttctgcgtaatgctgcagtatcctatcattcttcagtgctgcaccagctgacaattgagaattagatactgaagttcacagtcttgaaatctgtctcacaatggtgccaacatgttattaagttccaaacaaaactatgaggtttgtgacatctcatttcttagagagaggtatgctattgacaagtctgtactgaaactctgagaggtcagatgctggggtaatactacaagaaaatgaagtagttaatttatgcatttaaaattgttttaaatcacgtggtaaaacattctcattgttgtacaactaatttccaaaactttcttcatgctctaaaactaaaacgctatacacttttaacaactccccactacccttccctccagcccctggaaaccatctttctaatatctatctctatgattttgactactctaggtactgcatataagtggaatcatacagtattggtctttctgtaactggcttattttacttagcataatgccctgaagcttcatccatgttgtagcatgtatcaaatttccttcctttttaaagctggacagtattccattgtgtgtatacaccacattttgtttatacattcatctgtcagtggacacttgggttgcttccacctgttggctgttgtgaataatcctacaatg

SEQ ID NO: 683009 - DNA, 668 bp, Homo sapiens
ccatacccttaaagatgcatcccaatcacaaaagtacatgtgaaaaaaaaatacagcacttttaattttaaatgtttttaaaagagatatgaaaccaatatgggtggtgggcacacaactgtctgttgcattctgcttgaacttttttcatttttaattattccagaagttgcaatgaatattaagaataattaaatgatagtgatatacacattataattcataaaactgaggagttttagtccagcttcattgtccagcagatctaatttctgttcttgtttgaaaacttgtactaacactgtttcactcctccccaagtccaacatagacttagactctcatgtgacaaaatgtttttcaactctctattttgtaaatgagaatttcattagatgttcaacagacacaagagacagcctggattatgcatccatctgtgtgtacatgggattcatttctctaacattttttcgttttcatttttttgagacagggtctcrctcagctgcccaggctggagtgcagtggcccaagtacagatcactgcagactccaccccctggggtcaagcgatcctcctgccttagcctcccaagtagctaggactacaggtggctagggttttcaatttaaaaaccctaggccacagctggctagggttttta

SEQ ID NO: 683010 - DNA, 654 bp, Homo sapiens
aaaaatactaaacatctttaataaaactaaatttaggactattttttctgatattagtggatatttcgcaaagtaaaatctttcccatgagttcataaagtgggcttattttctccccaggctttctaaacctaatgcattaataatagaaacacaggccggtgtggtggcttacacctgtaatcccagcacagggagactgtggtgggtggatcacttgaggtcaggagtttgagaccagcctgaccaacgcggcgaaacctcacctctactaaaaatacaaaaaaaattagccgggcatggtggcacatgcctgtaatctcagctactcaggaagctgaggcacgagaattgcttgaacccaggaggtacaggttgcagtgagccraaatccagccactgcactccagcctggacaacagagcaagactccgtctcaaaagcaaacaaacaaacaaaaatacacacacacacacacacacacacacacacccacaataatagaaacacaaattgagtagtgggcatgttgaaaggtcagaacattttttttatgaactctagttagaatggtggcaggcagcaagctttatggcactggagttcaaatcatttctataagcaggaaacacaatattccaatagatgaatgct

SEQ ID NO: 683011 - DNA, 654 bp, Homo sapiens
aaaaatactaaacatctttaataaaactaaatttaggactattttttctgatattagtggatatttcgcaaagtaaaatctttcccatgagttcataaagtgggcttattttctccccaggctttctaaacctaatgcattaataatagaaacacaggccggtgtggtggcttacacctgtaatcccagcacagggagactgtggtgggtggatcacttgaggtcaggagtttgagaccagcctgaccaacgcggcgaaacctcacctctactaaaaatacaaaaaaaattagccgggcatggtggcacatgcctgtaatctcagctactcaggaagctgaggcacgagaattgcttgaacccaggaggtacaggttgcagtgagccgaaatccagccactgcactccagcctggacaacagagcaagactccgtctcaaaagcaaacaaacaaacaaaaatacacacacacacacacacacacacacacacmcacaataatagaaacacaaattgagtagtgggcatgttgaaaggtcagaacattttttttatgaactctagttagaatggtggcaggcagcaagctttatggcactggagttcaaatcatttctataagcaggaaacacaatattccaatagatgaatgct

SEQ ID NO: 683012 - DNA, 673 bp, Homo sapiens
ttctcttttcaaagcaaagatccatggggagggttttttgaagccatttagatttcctagtcaaactatggttctcagccatgagattctttatattattacaattaatactaaccatcaagtagactcgagtcccctcatttacttcttttttttttctttctttcttttttgagacagagtctcgctctgtaacccaggctagagtgcagtggcgygatctcggctcactgcaaccgccacctcctgcactcaagtgattctcctgcctcagcctcctgagtagctgggactacaggtggcaccaccatgtctggctgatttttgtatttttagtagagacgggatttcaccatgttggaccgcccagtgttgaactccttaactcaagtgatccgcccaccatggccttccgaagtgctgggattaaaggtatgagtcaccgggcccggcctttgactcccctcattttctgcactgttttccgtacatttcctgttgaggactcaaaactatgtaattttatttatattttcatttaatttttgcttcactaccctctccagtagacaaaatcacacgcaaatttcagtggccatttctgtcatgcctactctgtcttcagaaattgcaccatgtttgaaacagaaaaaggaaccacacatttgtttgt

SEQ ID NO: 683013 - DNA, 673 bp, Homo sapiens
ttctcttttcaaagcaaagatccatggggagggttttttgaagccatttagatttcctagtcaaactatggttctcagccatgagattctttatattattacaattaatactaaccatcaagtagactcgagtcccctcatttacttcttttttttttctttctttcttttttgagacagagtctcgctctgtaacccaggctagagtgcagtggcgcgatctcggctcactgcaaccgccacctcctgcactcaagtgattctcctgcctcagcctcctgagtagctgggactacaggtggcaccaccatgtctggctgatttttgtatttttagtagagacgggatttcaccatgttggaccgcccagtgttgaactccttaactcaagtgatcygcccaccatggccttccgaagtgctgggattaaaggtatgagtcaccgggcccggcctttgactcccctcattttctgcactgttttccgtacatttcctgttgaggactcaaaactatgtaattttatttatattttcatttaatttttgcttcactaccctctccagtagacaaaatcacacgcaaatttcagtggccatttctgtcatgcctactctgtcttcagaaattgcaccatgtttgaaacagaaaaaggaaccacacatttgtttgt

SEQ ID NO: 683014 - DNA, 639 bp, Homo sapiens
agttctgtcacctagcaagttacctaaatctttttcttcagactcctcctttgtgaaatgtataaagttgatggtgaaattagatgagttagtctttgcttagaaaaaatgtgtaacagagagtattatacaagtctttgttacgatcatttaaatacacacgcaacattatatgtacaaaaataaacatgtatacacacatgcaatsacaaaaacatgcaaaatagggcaaaatattatcagtgaatagtttttgtttctgagattgtggataacttttgtgttttactttacgtggtctaaaattttgtctggaataagtaaatattgcttttataattagaaataaaaattttgtgcaagatattaaaaaacaggtggactgagataacatatacacatatgtaatacatatatacataatgcttagaatagtgctgagcatatagcattcattttatgagtgtttattaagttaaaataaatgacaattgaggaattggacatagcaatgagtaacttgagaatatgaaacccaaggaatttgcaagaaaaatagttaaagacaaaaactagaattgtaagagcaggcagtattggcctagcaatatttgggtttgtaattctttcaaagacttg

SEQ ID NO: 683015 - DNA, 639 bp, Homo sapiens
agttctgtcacctagcaagttacctaaatctttttcttcagactcctcctttgtgaaatgtataaagttgatggtgaaattagatgagttagtctttgcttagaaaaaatgtgtaacagagagtattatacaagtctttgttacgatcatttaaatacacacgcaacattatatgtacaaaaataaacatgtatacacacatgcaatcacaaaaacatgcaaaatagggcaaaatattatcagtgaatagtttttgtttctgagattgtggataacttttgtgttttactttaygtggtctaaaattttgtctggaataagtaaatattgcttttataattagaaataaaaattttgtgcaagatattaaaaaacaggtggactgagataacatatacacatatgtaatacatatatacataatgcttagaatagtgctgagcatatagcattcattttatgagtgtttattaagttaaaataaatgacaattgaggaattggacatagcaatgagtaacttgagaatatgaaacccaaggaatttgcaagaaaaatagttaaagacaaaaactagaattgtaagagcaggcagtattggcctagcaatatttgggtttgtaattctttcaaagacttg

SEQ ID NO: 683016 - DNA, 639 bp, Homo sapiens
agttctgtcacctagcaagttacctaaatctttttcttcagactcctcctttgtgaaatgtataaagttgatggtgaaattagatgagttagtctttgcttagaaaaaatgtgtaacagagagtattatacaagtctttgttacgatcatttaaatacacacgcaacattatatgtacaaaaataaacatgtatacacacatgcaatcacaaaaacatgcaaaatagggcaaaatattatcagtgaatagtttttgtttctgagattgtggataacttttgtgttttactttacgtggtctaaaattttgtctggaataagtaaatattgcttttataattagaaataaaaattttgtgcaagatattaaaaaacaggtggactgagataacatatacacatatgtaatacatatatacataatgcttagaatagtgctgagcatatagyattcattttatgagtgtttattaagttaaaataaatgacaattgaggaattggacatagcaatgagtaacttgagaatatgaaacccaaggaatttgcaagaaaaatagttaaagacaaaaactagaattgtaagagcaggcagtattggcctagcaatatttgggtttgtaattctttcaaagacttg

SEQ ID NO: 683017 - DNA, 1650 bp, Homo sapiens
  misc_feature 1550, 1551, 1552, 1553, 1554, 1555, 1556, 1557, 1558, 1559,1560, 1561, 1562, 1563, 1564, 1565, 1566, 1567, 1568, 1569,1570, 1571, 1572, 1573, 1574, 1575, 1576, 1577, 1578, 1579,1580, 1581, 1582, 1583, 1584, 1585, 1586, 1587, 1588: n = A,T,C or G
  misc_feature 1589, 1590, 1591, 1592, 1593, 1594, 1595, 1596, 1597, 1598,1599, 1600, 1601, 1602, 1603, 1604, 1605, 1606, 1607, 1608,1609, 1610, 1611, 1612, 1613, 1614, 1615, 1616, 1617, 1618,1619, 1620, 1621, 1622, 1623, 1624, 1625, 1626, 1627: n = A,T,C or G
  misc_feature 1628, 1629, 1630, 1631, 1632, 1633, 1634, 1635, 1636, 1637,1638, 1639, 1640, 1641, 1642, 1643, 1644, 1645, 1646, 1647,1648, 1649: n = A,T,C or G
ctttaaaagttttcccagaactcagagggaaaaaacaacctgagtttaaaatgcttaagaagaatacaattgatataccaaacaaaaagtgacagcagctgtatttagcccttccgaaggaataattgatgatcaaaaggtagaaggaaaacataaaaaaacaaaaatacataagacattgcattgtatttaaaaatcttcctcagaaaaatggwaagatttgaacacagaaatcgaatgtgcttttcacaattacattaaatttattagccaatatttatattaagacatattctgttcacattcaaacataagaataaaacaatttttagtaatttagcagaaaaaagaggatactttcaatgggaaaaactgatggcagatattacttctgtaacactgagatagtggaatgatgttcattgatggtgatattttgtgaacctagaattccatgcaatccaagcagttcttcacttgtgaaaggaatggtaactgcttatcattctggatgaaaattactaatatattgtaccagattactgataaaagaccaaaataaagaggtcccttataggaagagctagatttaaatgtcaataaatttttgaaatatattaagagctaaataaaaatatttatgctttcatttaaaaattgttactatcaaacacatcttatatgtatggtcaaaaaggaaagatgctaatctaggcctaatccccactaaataagttaataaacatgagttgggaatatgagttttactaaaaggttaaacacatacacacacaaataggcttcaataacctgagaaatgacataatctgaggacttaagaatatggaaatcatgatatagattgactactcatgaatgtcaaaaaatatttattaatttaaaaataaagcataatagttacaaactgaaaatcagggtaaatgaataaaatgtatttaataacactacgagcttttatctccagttgtacattttaatccatgtaaatttagaagggcaagaaaaacaaaggcaaagagtaaggtaaacaattcttcatgtaggggaatatttaaaatgtaatctcattcttgaccttaattacaaagctctaattaagagattcaagattttaaaagtaacttaaatgactcttagaaataatcaagatgtataaatcaaaatgtataaatcccaaaccaagagtagagggtaatatataaaagcagtactgcataacacaattcctatataatacacagaatgcaaaggaaaacatcaagaaatttaaagccataaaataaagcatatatttattttatatgtatgacactattgttaatattctaaacactttttataaaagataaatgcttagattaactttacactaaacccacttataatctgtagaaaaaaaggccacggtgggcctgggatgataaactgaaaattgagggccagctttcctcatgaattacttgcagattctgaagttgttaggggagattaagagttaagataaaaacttctgccaagaaagaaggaannnnnnnnnnnnnnnnnnnnnnnnnnnnnnnnnnnnnnnnnnnnnnnnnnnnnnnnnnnnnnnnnnnnnnnnnnnnnnnnnnnnnnnnnnnnnnnnnnnnc

SEQ ID NO: 683018 - DNA, 1650 bp, Homo sapiens
  misc_feature 1550, 1551, 1552, 1553, 1554, 1555, 1556, 1557, 1558, 1559,1560, 1561, 1562, 1563, 1564, 1565, 1566, 1567, 1568, 1569,1570, 1571, 1572, 1573, 1574, 1575, 1576, 1577, 1578, 1579,1580, 1581, 1582, 1583, 1584, 1585, 1586, 1587, 1588: n = A,T,C or G
  misc_feature 1589, 1590, 1591, 1592, 1593, 1594, 1595, 1596, 1597, 1598,1599, 1600, 1601, 1602, 1603, 1604, 1605, 1606, 1607, 1608,1609, 1610, 1611, 1612, 1613, 1614, 1615, 1616, 1617, 1618,1619, 1620, 1621, 1622, 1623, 1624, 1625, 1626, 1627: n = A,T,C or G
  misc_feature 1628, 1629, 1630, 1631, 1632, 1633, 1634, 1635, 1636, 1637,1638, 1639, 1640, 1641, 1642, 1643, 1644, 1645, 1646, 1647,1648, 1649: n = A,T,C or G
ctttaaaagttttcccagaactcagagggaaaaaacaacctgagtttaaaatgcttaagaagaatacaattgatataccaaacaaaaagtgacagcagctgtatttagcccttccgaaggaataattgatgatcaaaaggtagaaggaaaacataaaaaaacaaaaatacataagacattgcattgtatttaaaaatcttcctcagaaaaatggaaagatttgaacacagaaatcgaatgtgcttttcacaattacattaaatttattagccaatatttatattaagacatattctgttcacattcaaacataagaataaaacaatttttagtaatttagcagaaaaaagaggatactttcaatgggaaaaactgatggcagatattacttctgtaacactgagatagtggaatgatgttcattgatggtgatattttgtgaacctagaattccatgcaatccaagcagttcttcacttgtgaaaggaatggtaactgcttatcattctggatgaaaattactaatatattgtaccagattactgataaaagaccaaaataaagaggtcccttataggaagagctagatttaaatgtcaataaatttttgaaatatattaagagctaaataaaaatatttatgctttcatttaaaaattgttactatcaaacacatcttatatgtatggtcaaaaaggaaagatgctaatctaggcctaatccccactaaataagttaataaacatgagttgggaatatgagttttactaaaaggttaaacacatacacacacaaataggcttcaataacctgagaaatgacataatctgaggacttaagaatatggaaatcatgatatagattgactactcatgaatgtcaaaaaatatttattaatttaaaaataaagcataatagttacaaactgaaaatcagggtaaatgaataaaatgtatttaataacactacgagcttttatctccagttstacattttaatccatgtaaatttagaagggcaagaaaaacaaaggcaaagagtaaggtaaacaattcttcatgtaggggaatatttaaaatgtaatctcattcttgaccttaattacaaagctctaattaagagattcaagattttaaaagtaacttaaatgactcttagaaataatcaagatgtataaatcaaaatgtataaatcccaaaccaagagtagagggtaatatataaaagcagtactgcataacacaattcctatataatacacagaatgcaaaggaaaacatcaagaaatttaaagccataaaataaagcatatatttattttatatgtatgacactattgttaatattctaaacactttttataaaagataaatgcttagattaactttacactaaacccacttataatctgtagaaaaaaaggccacggtgggcctgggatgataaactgaaaattgagggccagctttcctcatgaattacttgcagattctgaagttgttaggggagattaagagttaagataaaaacttctgccaagaaagaaggaannnnnnnnnnnnnnnnnnnnnnnnnnnnnnnnnnnnnnnnnnnnnnnnnnnnnnnnnnnnnnnnnnnnnnnnnnnnnnnnnnnnnnnnnnnnnnnnnnnnc

SEQ ID NO: 683019 - DNA, 1331 bp, Homo sapiens
ttaaaattaaagcatgattatatttattttattcccttgagaaattatattaacaccacaaaatcaccttttccatgactatttgatctgattatgcaagttgtttaaaagaatatcaatcttcctaatatattctattttaaaatactgacataaacctatataagaactatataatgtttacacaatatttcaaaaatattaattgaacttttcttaaaattatcagttagtgatggtgggaaaaaacaaatacttagacatttctactgtagagaacatgcattacattcctgtaatcattattctgttaatgtttattcaaacgtaattagcccaatttgtatatatttttaaagaacaaattcaggcacatttattcatctttaatcaagaaagctatttactcatttttatcccacgtaaaagaaaaacagaacttctttttgaatatttcttgataatttgtgctaacatatamtcttacctttagagtcaataagtgtgaaatgcatcaaattataaagttttaaatatgtctaattatgtatggtttatattttattgtatgatatttcaactataggagagctgcacaaatacttatagctctagcatatgtatctttttaaatttcaaaaattctccattttattgtaatgtaagataaaatagctcatctgagaattcacagccttagaactctgagtgttgaaatataagtaatcattacttctgttttggaggagcctccaaaaatgattgcactttctactttaggtaaccaaaatgtcttgtaacaaaatcacttgcctgacaaaccttcaaaaaggacagacttcaaatatcactggtgtaactagtaatgtaatttcatttttgaaagttagaaaacatttaaatctaaagatataagtctgtccttgaacataactttaatacctccaaagcgtatttcccattattatttttttttgtacaggaaaatttagagaaataatttacttctctaaacacaataaaatgtcctctattttttcctaagtggaacattatttcaaatagttgctgttgaaatccattatgattttggcataaagataattgattaaagcagaaaaaaaatcactgaatgttaaaaaggttcatcaggaatttgtaacaccactgttttacaaattatgcttggtaatccaactaggaagaaaatattctaaataaaatgctttaactttaaatgttaatttccaaataagagtaatttattatcagttttattatcatggtgcaaataatatgataatatataaaaataggggatatgtttttaa

SEQ ID NO: 683020 - DNA, 639 bp, Homo sapiens
ttaaagggaagcttgtgatgagaatgttctcatcacaatctgggcgtaaggcacgcctagatctgtctgcattattttatacaactgcatatgaatctaaaaatatcaaaaataaaaagcttaattaaaaaaatcaagatgtcttcagactggcaaaggctaagtatggtaaggtaatctgccagtaaaatgtagagaaataaggattcattcatggagaaacactggcaatatttttttaattaaaaatgcacataaagtcagatacaaccattctatttccaggaatttatttcacagatatacgcatagctgtgtgaaatgttgtgattatgagaatatttgtctcagcattgttttgttgttgctggtatttacagtgaatattggaaactaaatgtccctgaaatgggcctgattacatttaagaaaaaacattaaacccttcaatataatatggcagccttttatatattyacatggagagatgtccaaaatgttaaagcaaaatgcaaaactgtgtgaagtgtatggtattagaagaaacaagctgatataaagcgacttttgatctgacacaattgattagtcgcaggctcttggcctctgtgaatcccagcattccgaagtccagaagag

SEQ ID NO: 683021 - DNA, 2025 bp, Homo sapiens
tataccatggaatactacacagccataaaaagaacaaaatcatgttccttgcagcaacatggatggagctggaggccattatcctaagtgaattaatgcaggaacagaaaaccaaatacttcatgctatcacttataggtgatagctaaacattgagtatgcatggacacaaagatggaagcaatagacactgtgtactagtcaaggcgggtgtgctgaaagactgcttattgagttctatgcttattacttgcgtaatgggattatccataccccaaacttcagcatcacacaatatacccatataacaaacctgcacatggacccctgaatccaaagtaaaagaaaaatcatacatgttctttagaaacaaatcatgttagcaagataaacatgtattaaaatcagaaataattgatttccatgcactctactccaattggtgtgatgaacccaaagttgagtcatagtaaggaaagttgcacagttaccaagacaagaattctgtggagattatctcatttctcacaccaatcacagggtatctttttatccctaagaatatggcacaggccaggccaggccaagccaagacactgaaggccattgcattttggaggaaaatgtgcactattttttatatatacatatatatatatatatatgtgtgtgtgtgtgtgtgtgtatatatatgtatgtatatatctatacacacacatatgtatatatataatatataattatattatgtatatattagttcaacactaatctttgaagtctgtgtacctgtttctcttgggtatgcagacaatatagtattttcaatattttgatttaaaatcaacaaatacctcctttcatccatattttattagcctttgtaagagctgtgtaatgagataggcattactgaaaacaagagaatacaaaaggcaaaccaatttctatatatattgcttcactttttacagtaacctatggtactttgcaataaaaattaattaaatgtttccagttgcaatatatgtttttctttaggttgagccatacaaactatgcttaatttactgtaattctattttgaaatgtatatatttgggagtttgttggtataaagattaaatattttacacaaagttttattttaaaaagaatattaaggatttcttcttttatgtgattatgaatattcaatctaagttaaagataatagttagactctgatttcctcttatgctggagttttctgatgtatataactctaatgattttccttaaatgacaaattagaaatttaaagataaaaatttaactattgagattaccagttaatgactatagttttatataacaatgttgtataggtgacactttcaaagtctaatatataaatgtcaagtgtgtgaagtcagtattgttattgttactataaatgatgctttacagaatgcaaataatttttcaagatatttcaacaaaagaaaatatactcaatgtttaaaggttaaagtagttgaagtcaagcatcattacaattttacaatttttgtaaagtatttccaagatttatttaaaagtatattttccttttgcacataaattttactttctaaatttagttgttttgaaggaaataatctcttgaaaattagaatacaaataaacygatatttgttgaatgtttattaatgccagattctattatcaagggtttcacatccattatttcattcaatctttgaggcagttttacatagtttcactacaaataacacactcaagttcacagagataataaatagcaaaacctatcttctgatttagctggaggaatatgtgcagaagcaaaagaatatcaaaaaccttactaaacaattcacatgatctcattacattaaaaatcaatacaagttgctaaaaaatgaaaaagaaacaacacagaaacataaatctcatggcccctattttatattaagaatagctttccaaaggagatcaggaatcttcagggtgctgtggcca

SEQ ID NO: 683022 - DNA, 603 bp, Homo sapiens
tccagctctgaaaaagtatgagtgcggcactctcacaggcaagagagacracgtggtagcctggcgtgggaacaagtgcagatgcacacagcccttcctccctgcaggccccctgcctgaggctcatgagggatggaatccgataattgatgggacgggatttcctaagcactggcatactggaccattgtcaacatccagtaataatgtcgaagctctatgctactcctaggttttaatcagtaatgaaagaaaaataacttgttcaaggtagcaatatgaaaaagatatcacagcttctcttcccatttgcaacatgtccaatcaaccaaacattccaagaagtagacagttttattcctatgagtttcagaatataggtaatttttattctacttggtatgttaatcttcattttcacagtattataagagagcaagaaatccaatatattttttgtccaaaggtgcccgtctttcaaagggagccaatattttaaatgacaaaaaatgtagagaagaaaaactgaaatatttaggttgtatctgatgcataggcattcattagtgaattgtgagagaatacatgcagagtaacaaaata

SEQ ID NO: 683023 - DNA, 603 bp, Homo sapiens
tccagctctgaaaaagtatgagtgcggcactctcacaggcaagagagacgacgtggtagcctggcgtgggaacaagtgcagatgcacacagcccttcctccctgcaggccccctgcctgaggctcatgagggatggaatccgataattgatgggacgggatttcctaagcactggcatactggaccattgtyaacatccagtaataatgtcgaagctctatgctactcctaggttttaatcagtaatgaaagaaaaataacttgttcaaggtagcaatatgaaaaagatatcacagcttctcttcccatttgcaacatgtccaatcaaccaaacattccaagaagtagacagttttattcctatgagtttcagaatataggtaatttttattctacttggtatgttaatcttcattttcacagtattataagagagcaagaaatccaatatattttttgtccaaaggtgcccgtctttcaaagggagccaatattttaaatgacaaaaaatgtagagaagaaaaactgaaatatttaggttgtatctgatgcataggcattcattagtgaattgtgagagaatacatgcagagtaacaaaata

SEQ ID NO: 683024 - DNA, 1797 bp, Homo sapiens
gctctgcagattatttttattcataactagcctatttaactcacattatgactttcaatattgtcactgcactctaaagttttgtgactacacctttaagataagattcaaaatttgtaagatgaacctgcaaagctcaatccttggtaccatcacattcacaaacaccaataggagacacatttatccaaggaacattaagctcagttccctaaaccttgaacctaaatgtttcctcttgctcactaccaaactcggtgatgagcagcctctttcagggaacagatcagctttttctgacagacagtaaatgagatgaactagcaaagacacaggagtaaggagtttttcctaaagagagaacaagaatggggaagaaacgagggaagcaaagggcaaatgtctgtctcccccagggtacaaggtaagttacaactgctaacttcatgcctgacaatatattttctgctatcagggatctcttcagtcctttcacttttctgcttccttttccatgaattactcctccctatgttccaaccactagattagctccagygcttgctctccttctagcctggaagccaccaaataactgagagagccctttgtctcaaagaacctcacctgcaggtctcactcaggcccctcctcagaggactcagaagagtactgtttgttgttgctttacctctttcttcacaagcatcttcctcctccccaacctttttctccctctttctattgcttttgactttttgccatttttctgttaccttaagatcctccctgttgcattttgtcatatgaaaatctcagaataatttcaagcctacatagctcacaaaatatttcaaaagtgttcacccacagtctgaacccactgggtggctgtttatttcagaaaccctcaactcctcactaaaaaggcaaaaaaaagagcttgagatgacataaacatcccagagagtgtagagaagcagccaggcatctataaattacttccttgtaccatgcctctggctatagagtactgttgcttgattcccccctactcccatgtttaagagcaggaactagaaaatcagacatacagaaaactactaaaaaagagaaaattccaaatcacattcaatatacagacaaatgtcacaagaccttacttccttacatgaaggagtgaggtgacttttaacaattattttaaagtctttgaagcttgactgattttaaaattgcctaaaagtctccatgaaaaaacatgccacaaaattttgctcagtaaaacatacattatattcagtgccaagaatattaaataagatctaaatttttaaaaaaggaatcagaaaaaaaaaatcaatcccttatttaagatctagaggcaaagagttttctctacttacacaaagagggggcctgtgtatctaaaaaccttaacagcacattctggaaaacaggcaaactggatccagcaagagaggatgaagaaatagactccttctcatctaagacttctgattcaccacatctctacagattaaaaataaataacaaagttaattacagaagtatagtcataacagatcatgaatttgttaattttttattggcatttaagtgctcaggtaaaacatgtaaaattaattgatatgtctgtacttatttaagggaccatgcacctcaggtgaatataatttctccatccaagtactaaccaggcccgaccctgcttagcttccgagatcagacgagatcgggcgcgttcagggtggtatggccgtagacaggtgaata

SEQ ID NO: 683025 - DNA, 611 bp, Homo sapiens
atagaagtgcagtgtggacaactgactggagtagggtcagaccaactgggaggctgagggtaaggggattgggaccagttaccaggctctcatgagagttggaagatcasataatagtagcttggaccaagatggtggtggtggaagtaaagagaaggaagaaatggagggatatttaggagggaaacccaacaggatttacgttgatttcttggatggaatgacaaacagcaaggttgtcaacgatgtcctagacttttgggatggtatatctcccccatgttgggggctttttgcagaggaaggggagcagatcacaagttcaggtataaacgtcgtaagtttgaggcatcagacacacagagaaaatgtttctagtaggcactcagctatacaggtctagagaagtctaggctggagtcttaaagtcgtgagttgtctgcatatggctagtgactgaagcctggagatggctgggatcacctagagagaaggtcaagtgagaaaagaccaggacctaagacagaccctgggaaaaatccagtattgatttaatagccagttagaggaggataagccttcaaaaaagactgagacagtgtggccagagg

SEQ ID NO: 683026 - DNA, 592 bp, Homo sapiens
caaaggtttgcaggctcttgtgggatggatttggggaagtgtgaagtgttttagtgtggctggggtggagagtttagggaatgtaaaaggtgaagcatcattctttcaggggatcagtaaataatcactgtgccaggcactggacttgggaggacagtggaccagaacccaagggccttcgcaggagttggacttttcctgggggtagttgggagctatggatgggttctgggctggagagtgacatgaccacatttgcatttgagaacaagcgttcaggttgctttgtgggaaaaggactcgaggggcaggcctggaagccaggctggttaggaggctgttggcactgctccagacaagagctggtggtggcttggatgtagrtgggatacagtgggaaaaaagtggatggatttcagaggcagtgtagaggtagaacaggcaggatttaccagtgtgtacttatgtggctagtgaaggtctgggggaagtcaagggcgagtataagtatcccttcatgcctctgtggggagggtagtgccctcctctgagctaaggagtgtggcagaagaatgactacaacacccactcc

SEQ ID NO: 683027 - DNA, 629 bp, Homo sapiens
tctgaccaccctaaatatagcaaaccctttcctagtaccctgtcctctggagcacattcttccactcaccctcccagtggctgctcctaatgctctctactcattatattttcccctgtactgcatattatcacttgatatttttatgtttttaaaatttttttattttactttaagttctgggatacgtgtgctgaacgtgcaggtttattacataggtatgcatgtgccacggtggtttgctgcacgtatcaacccatcatctaggttttaagctccgcatgcatyaggtatttgccctagtgctctccctccccttgcacccgactccccaccaagccccggtgtgtgatgttccctgtgtccatgtgttctcattgttcagctcccacctctgagtgagaccatgcagtgtttggtttcctgttcctgtgttaggttgctgagaatgatggtttccagcttcatccatgtccctgcaaaggacacgaactcattcttttttatggctgcatagtattccatggtgtgcatgtgccacattttctttatccagtctatcactgatgggcatttgggttggttccaagtctttgctattgtgaacagtgctgcaataaacataagtg

SEQ ID NO: 683028 - DNA, 581 bp, Homo sapiens
tggtcttcaaccagattatttggcagaaatggaatctctagggatggaaagagaaaagaatcaaaatcacaaccctcttcccaatgtagctctatagggcttgtaaggagggaaccctgagttataaacaagaattacagtattacttacatgattattacatgagacttggcattttaaatttgaattgagactatatttgcaattttgaatgacctgtggctgaatcaagaagtgtacccaaaactgaaatagatgttgtcactaatgatgaccttaccgtgattatgagatctacttagcccctaaaggcatctacatttgtggctcctgatcgtctagaggycccaaaattactgtaggttttagaggtcaacaacaatatcagaccctccacagggagtggaaagaaagagtgctgcaattttttaaaggcccactgtggtaggcaaaacctgaagatgctccccaagattcccagccttggtatgcacacaccttttccccattattcaatcactgctggatgtaatacaggttgtaattagggagattatctgggtgggcctgacataatcaca

SEQ ID NO: 683029 - DNA, 581 bp, Homo sapiens
tggtcttcaaccagattatttggcagaaatggaatctctagggatggaaagagaaaagaatcaaaatcacaaccctcttcccaatgtagctctatagggcttgtaaggagggaaccctgagttataaacaagaattacagtattacttacatgattattacatgagacttggcattttaaatttgaattgagactatatttgcaattttgaatgacctgtggctgaatcaagaagtgtacccaaaactgaaatagatgttgtcactaatgatgaccttaccgtgattatgagatctacttagcccctaaaggcatctacatttgtggctcctgatcgtctagaggccccaaaattactgtaggttttagaggtcarcaacaatatcagaccctccacagggagtggaaagaaagagtgctgcaattttttaaaggcccactgtggtaggcaaaacctgaagatgctccccaagattcccagccttggtatgcacacaccttttccccattattcaatcactgctggatgtaatacaggttgtaattagggagattatctgggtgggcctgacataatcaca

SEQ ID NO: 683030 - DNA, 644 bp, Homo sapiens
taacttggctctaaaaatataaatgtaggaaggatgatggggtattcagcagtaaggaaatgagtcagggactaagtagaagcaagctagatggttgagcaattttcttaaacgatatatgaaaggagaatcttgaaaaggaatgggttttgactttatattcagaacttataaaaatgcggggcaacatgcgctcagcagagcattagtgcattaggagccataatctagttgagtttctacaaagtaactccaaccaagaaatgaaaaatgagggtattcgatttctgcagaatcaattgtttgaaaaaaaaatgtagtgaataatggatgcaacagaatggaataattgmataatacaatgggaaggaattaggagcaaaacagggaaatgtaagtgctcaaagataatctgatccatggcaaagggttataaactactatttagcaataaagatactttggagccagggaaaagaatatgagaaataaaaagtgatttaaaataaaaaacccagaaacgtgaaatattaaacacttgcaccatgcaatattgaaaagacagagcaaaattaaaataatatataaacgttgacagttcctacttgtttctaaaaccatgtttcctggctgaatgcaattat

SEQ ID NO: 683031 - DNA, 1252 bp, Homo sapiens
tgtgtctgaataaaaatattaaaaacttggcagcataaagcagattcaggcaagtgtatcacttaatcagtacatagccaaccatgaaagtctgggattcccatttgagtctctgcaattccctgactcaaaggaaaagataaaaaatcttattctgagattgggacctgatctgcatgtcactgaacccagtaattstctacactatggtgggcctaggaattagagaatgcaattatacaactgatggaccttttgaaaagacgcttcagaaatttatagaaaaacacatctcccttctaagtcattgaagctgcactttgtgaatattgtgtttttaatgtagacatctaagaatattggtctcaaatgccccactgagtatatgtatatgtttgctattctctgtggctttctggaagtgcctgttaggaacaataataacaaataattaaagctggattctccattgattctttattcccatcggggggcaatctagttcatggtttttttactttgaattattcaattcagcttgtatttgtaaagcacctgctgtatatccagtccttggtggtgtgaagagttctcaaaggcgttcgaaacttgatgtctgtttgggaatttacagtaaagttgggaggcaggactcacattaaacaaccaaatgactgacatggtaatgtagttccaacatgtatgatctagataccctagtcctcaaagtgtgaaatgtggaccagcaacatcagcatcacctgggagtttgctagcaatgcaatctgcgttctcacaagatctagatgttaaagtccaagttgaagcactcaaaacagtgagcacctggggatcgagttctggatgaggctgatagagactagagttgtgggcaaaggctttatggaaaaccacagaggttcttggaagaagggtaggatttgggtaacgtggattttggaccagaatgtctgaacttgttttttatgtgaaactcatctccctttgggtgcttgtttaaaatgctgattcctgcaactccctctccatgccttactgaatcagaatctctagggagggccctacgaaatgcatttttaacaaactccccaggaaagtttctaaactagatttgagaatcacagatgcagataaaaaggagtgcattcaagttagggaaagtttgcccacagaagccacacaagttttattgtctttgtttcttccctactgccctagccttcatcatttc

SEQ ID NO: 683032 - DNA, 1004 bp, Homo sapiens
ttttgaccaagagttaagaaatgcatggcaagacacattgttcaataccaagacatttcatcagcatcaaaaggcacagccaagaaatgccattcacttggtacaagaccatggtgaagaccactgaggaagaaaaagctaagacaacttcaatttataagctctctgagtgatgcaatcccatattctcagttctgtcatcaatagggaatgtgcatgaccatgtggaatttcagatctgttcagaatggtaaacaaaagaagaaacttctaactaatatcaagagcagaggatgtcaagaattagggtttgatccataggcatagttagtgattgtcaggggaaataagaaaagacaaaagggaagaagtcagtagccaaggagagactcatgggagaaagggttcagatgatagaactccctagtaagtcatgtcagtgacaattcctaaaggtaattcctgatcctctcacaaaagctaaagttcaaattttctccatctgcactcgctcttgccaggagctcataaatttgggaacacaccagggctctgacctaaccatgatggagaactcagctgggagaacaggctatcctctgagctgctacacacggctccaggggccacctgtgagtcacagcctgtgggaggytggggaacatctggtcaagttcatctcttgccagcaccaagggtctgactctgatactggtgtctgttttaagtgtacctctctctccaacacagcatctttggaacatcaggatgttgcataatgactgagtgggatccaaaaacgaagccacacatgtagaactatgagaaaccacatgtggaaaagaaaaataacctcggcttcaatttttttttttattctcaaagcagtaaatgtgttggaagccatgttgaatatttgatagagactgagaatggatgaggatgtgctgtcctgatagactcctgtgctaaagagacttcggggtattttcaaaataacctta

SEQ ID NO: 683033 - DNA, 1004 bp, Homo sapiens
ttttgaccaagagttaagaaatgcatggcaagacacattgttcaataccaagacatttcatcagcatcaaaaggcacagccaagaaatgccattcacttggtacaagaccatggtgaagaccactgaggaagaaaaagctaagacaacttcaatttataagctctctgagtgatgcaatcccatattctcagttctgtcatcaatagggaatgtgcatgaccatgtggaatttcagatctgttcagaatggtaaacaaaagaagaaacttctaactaatatcaagagcagaggatgtcaagaattagggtttgatccataggcatagttagtgattgtcaggggaaataagaaaagacaaaagggaagaagtcagtagccaaggagagactcatgggagaaagggttcagatgatagaactccctagtaagtcatgtcagtgacaattcctaaaggtaattcctgatcctctcacaaaagctaaagttcaaattttctccatctgcactcgctcttgccaggagctcataaatttgggaacacaccagggctctgacctaaccatgatggagaactcagctgggagaacaggctatcctctgagctgctacacacggctccaggggccacctgtgagtcacagcctgtgggaggctggggaacatctggtcaagttcatctcttgccagcaccaagggtctgactctgatactggtgtctgttttaagtgtacctctctctccaacacagcatctttggaacatcaggatgttgcataatgactgagtgggatccaaaaacgaagccacacatgtagaactatgagaaaccacatgtggaaaagaaaaataacctcggcttcaatttttttttttattctcaaagcagtaaatgtgttggaagccatgttgaatayttgatagagactgagaatggatgaggatgtgctgtcctgatagactcctgtgctaaagagacttcggggtattttcaaaataacctta

SEQ ID NO: 683034 - DNA, 1004 bp, Homo sapiens
ttttgaccaagagttaagaaatgcatggcaagacacattgttcaataccaagacatttcatcagcatcaaaaggcacagccaagaaatgccattcacttggtacaagaccatggtgaagaccactgaggaagaaaaagctaagacaacttcaatttataagctctctgagtgatgcaatcccatattctcagttctgtcatcaatagggaatgtgcatgaccatgtggaatttcagatctgttcagaatggtaaacaaaagaagaaacttctaactaatatcaagagcagaggatgtcaagaattagggtttgatccataggcatagttagtgattgtcaggggaaataagaaaagacaaaagggaagaagtcagtagccaaggagagactcatgggagaaagggttcagatgatagaactccctagtaagtcatgtcagtgacaattcctaaaggtaattcctgatcctctcacaaaagctaaagttcaaattttctccatctgcactcgctcttgccaggagctcataaatttgggaacacaccagggctctgacctaaccatgatggagaactcagctgggagaacaggctatcctctgagctgctacacacggctccaggggccacctgtgagtcacagcctgtgggaggctggggaacatctggtcaagttcatctcttgccagcaccaagggtctgactctgatactggtgtctgttttaagtgtacctctctctccaacacagcatctttggaacatcaggatgttgcataatgactgagtgggatccaaaaacgaagccacacatgtagaactatgagaaaccacatgtggaaaagaaaaataacctcggcttcaatttttttttttattctcaaagcagtaaatgtgttggaagccatgttgaatatytgatagagactgagaatggatgaggatgtgctgtcctgatagactcctgtgctaaagagacttcggggtattttcaaaataacctta

SEQ ID NO: 683035 - DNA, 1004 bp, Homo sapiens
ttttgaccaagagttaagaaatgcatggcaagacacattgttcaataccaagacatttcatcagcatcaaaaggcacagccaagaaatgccattcacttggtacaagaccatggtgaagaccactgaggaagaaaaagctaagacaacttcaatttataagctctctgagtgatgcaatcccatattctcagttctgtcatcaatagggaatgtgcatgaccatgtggaatttcagatctgttcagaatggtaaacaaaagaagaaacttctaactaatatcaagagcagaggatgtcaagaattagggtttgatccataggcatagttagtgattgtcaggggaaataagaaaagacaaaagggaagaagtcagtagccaaggagagactcatgggagaaagggttcagatgatagaactccctagtaagtcatgtcagtgacaattcctaaaggtaattcctgatcctctcacaaaagctaaagttcaaattttctccatctgcactcgctcttgccaggagctcataaatttgggaacacaccagggctctgacctaaccatgatggagaactcagctgggagaacaggctatcctctgagctgctacacacggctccaggggccacctgtgagtcacagcctgtgggaggctggggaacatctggtcaagttcatctcttgccagcaccaagggtctgactctgatactggtgtctgttttaagtgtacctctctctccaacacagcatctttggaacatcaggatgttgcataatgactgagtgggatccaaaaacgaagccacacatgtagaactatgagaaaccacatgtggaaaagaaaaataacctcggcttcaatttttttttttattctcaaagcagtaaatgtgttggaagccatgttgaatatttgatasagactgagaatggatgaggatgtgctgtcctgatagactcctgtgctaaagagacttcggggtattttcaaaataacctta

SEQ ID NO: 683036 - DNA, 625 bp, Homo sapiens
catagaaaagagcaaagaagccaatcaaaatccttgcccagtcataaacttgaggcttcagtctgcaagaagcccaggatccagttctacattttgagaggaaaaaagttgacattaaatcaaggtcagcattattattattattacaacaccagacttgatatattatgaatttatttgacactgcatctgaaactgaatggcactatagaaacttctcttacctaaaaataacaccagaaatcataaatatcaaagcaaatacaatgaaacatgaactccccatgaatgactgaagactccttaggccaatatcaaagaagatttgatgggagaatattccagtccaaataagagtgaccaggccccattttacttctaggccaaggctttttaacctgaagtccatggtcccttaaaaagcaacaagcaaagttttatgtatatatgcacatgctccattccccagaaaagaatccayagcttttatcagagtcacaggaaaggttaaaattattctcaaatcagagaacctctggaagatcaggacaatcttagactttgactttagatccaggtttatttctccttctgatgcagtgctgttcagtccccagccaattct

SEQ ID NO: 683037 - DNA, 746 bp, Homo sapiens
gtttacctttgttattttgcccttaaaacaaaagttttgaaatcatggggataaaaatattgctattaacattgagataatattaaaacctatcaggaaagctagttcatctagatctttatttttgaaaccccaatgaaccacatttttaaaaggaatcttaagaagtggcaattttcaaaaaatctaatcataagaatacagtttttcttcttaagatttggtggctcaaacactgcagctgttgttgagtgatctggcccaaataaaaaggctccccaaactcatcaaaccccacatgggataatytattgactttttatgtcatagtacccaaactggagtgtctcatggtgatttgtacagactccagaagaaaaatcttcatgcaggaaaaaaggagtcaagaaatgaatggaattcaggtaacagttacgcacaataaatataattagtatatgtatctaattgtactctaaagaactgtgcatttatgtatacatatgtaacaaacctgcacgttgtgcacatgtaccctaaaacttaaagtataataataataaaataaaaataaaaaaaagaactgtgcattcactgtatgtaaagtttacctcaatttaagaaaaaaagaaagaaaatgagttaccctgaagttctaatcctctgagaaggtgaaggtatagaaagtattgctttatttgcaggctgttcttactttgcacagttccaatatgcatgaatttcaa

SEQ ID NO: 683038 - DNA, 1524 bp, Homo sapiens
ttcctcaattttctgccaatttctagctccactctttcccaagtttcctcttttgcattatttcaataatattcttagccacaccataaacactgttgtttgtcttttcatcatacttcatcacactttgtaaggcaaaactgcatccctcatgcagcccactctttgctttctctctctttctactcaagtgatcaagtgccccacaatgcagcctattgatattattagaaattttagttcagtggcctcaaaggagccatcaaagctgtttggcartcctacccagttctctgatctcttgctgtctcaattctctaccatcttccctctgcacaccatataaacgcatgcatgcacacacacacccacatgcacaaacacacctttttctgtcttattggtacaatggaaataataatagttcttcctagctttcttggaagaattaaatgaattgttacatgaagctttcagaacattacccagaaaaaataagtgctacattgtgttacttgttgttaagactactattatgattatatacagttgcttactctacatttctattgtcaggtggattaaactcgaggcaacatatactggctgaatttatgaaatttcccaataaacattccacatgctcctagttcaatgaattgcaccagatatttttgatcctctcttctctctcataaatcctcaccctgatagacattccattatgatagcagtagtgtggtatcttagatattagactacctctcaaagactccttaccttctccatattccagcctcatttttctccttccagatccttgcacaatcaaagcttttgcaaatactgcatcttctgtttatgatgttatttctctacctgctcagatctgatcttaacttcttcttctcttttcttccactagagcataatctttgtcctttctctaagtccagtatcttttttatatcttctcttaaaagcatgctgtttttcttaagaatattgttggtcttaagttaagcatttgttggtctcataatgtgattatcttttatctagactataatatctgtagattggacaccatatctgtttttgctcaccataatatatgcagagcctagtacagctcctagtgctcagttgaagattaaaatatatatttttaataaatgaaataaggactgtttggaataagaaaatggaaagccttttaggcatcataaaaaccagaaaatatatgcaatagagaatagaaacaaaaataaaatcaatgaagccaaaagttggttctttgaaaagaataacaaaatggtagcatctttagctaaaataagcatgaaaaaagggaagagacccaaatactaacctgaggaatgaaagagggaatatcactaccaactttataaagtaaaaaagaattctaagaaattacttgcgttgtatggcaacatatcaatttatgtagatgaaactttacaatttctagaaagacacaaactccaaaattggcttaaataa

SEQ ID NO: 683039 - DNA, 1524 bp, Homo sapiens
ttcctcaattttctgccaatttctagctccactctttcccaagtttcctcttttgcattatttcaataatattcttagccacaccataaacactgttgtttgtcttttcatcatacttcatcacactttgtaaggcaaaactgcatccctcatgcagcccactctttgctttctctctctttctactcaagtgatcaagtgccccacaatgcagcctattgatattattagaaattttagttcagtggcctcaaaggagccatcaaagctgtttggcaatcctacccagttctctgatctcttgctgtctcaattctctaccatcttccctctgcacaccatataaacrcatgcatgcacacacacacccacatgcacaaacacacctttttctgtcttattggtacaatggaaataataatagttcttcctagctttcttggaagaattaaatgaattgttacatgaagctttcagaacattacccagaaaaaataagtgctacattgtgttacttgttgttaagactactattatgattatatacagttgcttactctacatttctattgtcaggtggattaaactcgaggcaacatatactggctgaatttatgaaatttcccaataaacattccacatgctcctagttcaatgaattgcaccagatatttttgatcctctcttctctctcataaatcctcaccctgatagacattccattatgatagcagtagtgtggtatcttagatattagactacctctcaaagactccttaccttctccatattccagcctcatttttctccttccagatccttgcacaatcaaagcttttgcaaatactgcatcttctgtttatgatgttatttctctacctgctcagatctgatcttaacttcttcttctcttttcttccactagagcataatctttgtcctttctctaagtccagtatcttttttatatcttctcttaaaagcatgctgtttttcttaagaatattgttggtcttaagttaagcatttgttggtctcataatgtgattatcttttatctagactataatatctgtagattggacaccatatctgtttttgctcaccataatatatgcagagcctagtacagctcctagtgctcagttgaagattaaaatatatatttttaataaatgaaataaggactgtttggaataagaaaatggaaagccttttaggcatcataaaaaccagaaaatatatgcaatagagaatagaaacaaaaataaaatcaatgaagccaaaagttggttctttgaaaagaataacaaaatggtagcatctttagctaaaataagcatgaaaaaagggaagagacccaaatactaacctgaggaatgaaagagggaatatcactaccaactttataaagtaaaaaagaattctaagaaattacttgcgttgtatggcaacatatcaatttatgtagatgaaactttacaatttctagaaagacacaaactccaaaattggcttaaataa

SEQ ID NO: 683040 - DNA, 1524 bp, Homo sapiens
ttcctcaattttctgccaatttctagctccactctttcccaagtttcctcttttgcattatttcaataatattcttagccacaccataaacactgttgtttgtcttttcatcatacttcatcacactttgtaaggcaaaactgcatccctcatgcagcccactctttgctttctctctctttctactcaagtgatcaagtgccccacaatgcagcctattgatattattagaaattttagttcagtggcctcaaaggagccatcaaagctgtttggcaatcctacccagttctctgatctcttgctgtctcaattctctaccatcttccctctgcacaccatataaacgcatgcatgcacrcacacacccacatgcacaaacacacctttttctgtcttattggtacaatggaaataataatagttcttcctagctttcttggaagaattaaatgaattgttacatgaagctttcagaacattacccagaaaaaataagtgctacattgtgttacttgttgttaagactactattatgattatatacagttgcttactctacatttctattgtcaggtggattaaactcgaggcaacatatactggctgaatttatgaaatttcccaataaacattccacatgctcctagttcaatgaattgcaccagatatttttgatcctctcttctctctcataaatcctcaccctgatagacattccattatgatagcagtagtgtggtatcttagatattagactacctctcaaagactccttaccttctccatattccagcctcatttttctccttccagatccttgcacaatcaaagcttttgcaaatactgcatcttctgtttatgatgttatttctctacctgctcagatctgatcttaacttcttcttctcttttcttccactagagcataatctttgtcctttctctaagtccagtatcttttttatatcttctcttaaaagcatgctgtttttcttaagaatattgttggtcttaagttaagcatttgttggtctcataatgtgattatcttttatctagactataatatctgtagattggacaccatatctgtttttgctcaccataatatatgcagagcctagtacagctcctagtgctcagttgaagattaaaatatatatttttaataaatgaaataaggactgtttggaataagaaaatggaaagccttttaggcatcataaaaaccagaaaatatatgcaatagagaatagaaacaaaaataaaatcaatgaagccaaaagttggttctttgaaaagaataacaaaatggtagcatctttagctaaaataagcatgaaaaaagggaagagacccaaatactaacctgaggaatgaaagagggaatatcactaccaactttataaagtaaaaaagaattctaagaaattacttgcgttgtatggcaacatatcaatttatgtagatgaaactttacaatttctagaaagacacaaactccaaaattggcttaaataa

SEQ ID NO: 683041 - DNA, 618 bp, Homo sapiens
ttaccatccaccctgggagctgtcatcctatcactagccatgcaaaacccagaaggcacagacctgctgacgaaacatcagcatctctttcagaagttaggacttactttaggaagttattttaagtagttattcccaaagacaacaatttgacttttgcaactgtcatttacttttcattccatgaagtttgaccttttttggagacagggtctcactgtgttgcccaggctgaagtgcagtggcatgaaaatggcttgctgcagactcgaactcctgaactcaagcgatcctcccacctgagcctcccaaagtgttgggattataggtgtgaaccaccaagcccggcygactttttgtttatatcaaataactgttcgcctaagttaattttgcttttttattccaagttttcttacagatacaaaaaaatcaagcaatagtcgttttgtattttattttatttttagagacagggtctcactctgttgcccaggctggagtgcagtggtgacatcatagctcattgtaaccttgaactcctgtgctcaagcagttctcctacctcagcctcccgagtagctagggctacaggcatgggccaccatgccaggctaa

SEQ ID NO: 683042 - DNA, 627 bp, Homo sapiens
tttcagatatttcatagtagcatttatagatattcctcattttaaaatttttaaaaattgtggtaagatatgcataatacatttaagtaacataattacaattccatctccagagttttctcttcttccagaattgaaaatctacactcattaaataacaaatcagtcctcattttttcttctccctagtccctggcaactaccgttttactttctttgcctctgaagttgaccactctatgtatttygtataagaggaatcacacagtatttgcccttttgcgactggcttattttatttagcataacgtcctcaaggttcatcaatgtatcatgtgttggaattttcttatttttttaaggctgaatagtattccattgtaggtatataacacatttggcttatccatttatccatcagtggacacttgggttgtttctaccattggagtattatgaatagtgttgctatgaatataaatgtacaatctgagttcctgctttaaattatttggggtttgtagtcagaagtggaattgctgggtcatatgttaattccatgtttaattttttgaagaactgtcaaagtgttttccatatggtggtaccattttacatttccaccag

SEQ ID NO: 683043 - DNA, 601 bp, Homo sapiens
cttcaaagggacacaaagtctcaaaagaaatcttcatttctgtcaaaaacaagatatttaggtaacctaatatcagaggaagtcctcttcatcagtctggatagactaaagggaacaacggacttctttactccaaaaactaacaaacaactgagaggatttggaagattggaaggataccatagatatcrgattcaaaaattcttcctacaacctaaacctttatatatacttttaaaacaagataaatcagactcctggaatgaacagaagaaaattagttgacattcgaagaaatgaaaagaagcttcctagaattagagaggagactctccttaattttttggaatagtttcagaaggactggtatcagttttttgtatgtctgatagaatttggctgtgaatccatctggtgcaccgttttttgttgttggtagtggttttttttattactcattcacttaaagaagttgatattggcccattgagggttttaatctcttcctgctttaaccttggagattgtgtgctttcaggaatttatccatttcttctaaattgtctaatttgtgtgtatggagttgttcatagtagtctct

SEQ ID NO: 683044 - DNA, 646 bp, Homo sapiens
taattgtgtaatttgagcttctataaatatgtatttgatagcttattttacataaaaacatttttggatcattgaaggtatagccactttgcttggataaatatcctggctatttttcaggaaaaaataaatctaataaaatgtataaacatgactatttcattagatgcttagtgtgcagctgtagtaaaattgttgcataagaktgcatgcattgttcattttcataaatcatcaacctagttaaatcaatgtttgccaactataaaaggtgacttttatgcactgttaggtgaagggattataaaaatttagcactaaattaagttgagctatgtacttcacaggtgaagatccaactattatcctcttatttaaagaaagcaacattttaatattaatttatgttcaattttataatactaaatattatagtaaagtgtcacaacattgtaaaagcagaaaattttattaaccattatgaaaataaaagctctagaaaaaagagatttagatatatagagagtgagaggcagagaaacaaggaacaatgattgaaagaattcatgcagaagtcagtctgccttttctggacatataattgagacttaaaacatccaagtttgatgtagctaccagtagtcag

SEQ ID NO: 683045 - DNA, 646 bp, Homo sapiens
taattgtgtaatttgagcttctataaatatgtatttgatagcttattttacataaaaacatttttggatcattgaaggtatagccactttgcttggataaatatcctggctatttttcaggaaaaaataaatctaataaaatgtataaacatgactatttcattagatgcttagtgtgcagctgtagtaaaattgttgcataagagtgcatgcattgttcattttcataaatcatcaacctagttaaatcaatgtttgccaactataaaaggtgacttttatgcactgttaggtgaagggattataaaaatttagcactaaattaagttgagctatgtacttcacaggtgaagatccaactattatcctcttatttaaagaaagcaacattttaatattaatttatrttcaattttataatactaaatattatagtaaagtgtcacaacattgtaaaagcagaaaattttattaaccattatgaaaataaaagctctagaaaaaagagatttagatatatagagagtgagaggcagagaaacaaggaacaatgattgaaagaattcatgcagaagtcagtctgccttttctggacatataattgagacttaaaacatccaagtttgatgtagctaccagtagtcag

SEQ ID NO: 683046 - DNA, 1089 bp, Homo sapiens
tgaaatatgaagttaaactgaaagtgaaaaaagaataaaattaatcccggttaaacttagaaaagaagttatatattttgtgttagatgagcccccaaagaaagagaacttaagaaatttatggagtggaatggggagaataacaaaaatggtgttagttatgcattaattttattatttgttaaccatctcttatgttaactaggcattgttctaagctgggtaattataatgatgaagaaaacaaagtccttaattcatgggtcttgtattctgttaggtaaaatatagtactgaaagcttcagatagttttatatcagtattcaacatctgggtaataaatttaaaagtctatctgattttttcagaagaggaggaagtgattgtggtgactgatatagtagtattcttggttttcacatcgatgaaatggaagtctcatttcctatcatttcttcaatacccagaatagtttctaacacagtgagtattcactgaatatcagataaatgaaagactcatggaaaaatacctctttagtagtctatacaactaagaagggaaggattttacatagttaaataagcatttttgcactagagagacacatttcgaaatacctcttcccatgtcagttcctttaagctgaaataatcgagtccaactataattagtagayttgtaatggccctgggataagcatgatcctaatcatctactgattttccttccttattcacttgtgatccaagctaaaatattaggcttctgactgtttttaccatgtgtttctatttccttctttcaggcctaagctttttctgaattccagcttgatcatctgtcttgaatgtttctgagtttcttttaccaaggagtactcatctctgactatttcagccaccatgtgaaatctggtttcactgtggattgtatgtctagattctaaaaagtaacctcatatgactttgagggttgccactatagactcctgtacaaccctctaaaaaaatcaccttttggcaacaatttgacattatgactgagtttaccattcttttgctctctagacactgtagtctgaactg

SEQ ID NO: 683047 - DNA, 600 bp, Homo sapiens
ccttctgaaacatgctaaatggtgattttatttgggtagtttactgtatgacattgtattagtcagtgactgggcaatttacaaaagaaagaggtttaattggacttccacgtagttggggaagcctcacaatcatggtggaaggcaaggaggagcaagtcacgtggcatggatagcagcaggaaaagagagagcttgtgcggggaaacttgcctttataaaaccatcagatctcrcgagactcattcactatcatgagaacagcatgggaaagacctgcccccatgattcaattacctcccaccaggtccctcccacaacacgtgggaattcaagatgagatttgggtggggacacagccaaaccatatcagacatgttgccatattgatattacttgcatatttactttacttcatgtttacaagaaatctgggagattttgaggggccagtgactaaaataatcatccttaggttccctgtgcttactatagttattccctgaaacacaataaagacttaagcttgtgttataagctttggtgataaaaaaccaaccttgggctaccaaaaatttttaaagtactattaatgaacag

SEQ ID NO: 683048 - DNA, 592 bp, Homo sapiens
atatatatatatatayacacacatacacatattagcaatctcattcaaaacaattgccttatttgtatttatgggaagatcaaattaaaagaaagacacataataatgtaatggttagccttagaaactatcttgaccaagttaaagagcaaaaatctgacctaaaacaaagttaaaatcctttgtatattcagacagcctacttagaatctcctgcaggattcacagtgaagtctactccacattgcagtagatttgaaagaatttcttttagaacgctatagggtcataagtcagcttaattaaaagctgatagtcaagatatcaccactgatcccacagaaatacaaaataccatcagagaatattataaacacctctacgcaaataaactagaaaatctagaagaaatggataaattcctggacatatacgccctcccaagactaaaccaggaaaaagtcaaatcactgaataaacaaataacaagttctgaaattgaggcagtaattaatagcctaccacccaaaaaaaaaaacccaagaccaggaggattcacagccaaattctaccagaggtaaaaagaggagct

SEQ ID NO: 683049 - DNA, 924 bp, Homo sapiens
ttgctgctctttatttgtagtagtagataaggaattaagaaagcaaaaatgagtgctttgactaggtcttttgcctttgaaagtagcattagtaaaatcccctcttcttttttattcttataaaatttacccaattcactctgtcccccagcccatctgtgttcacttgctgttcttgctgctctcagtttttaaaagcttattctaaaattacatcaaagcaaccccattttgacaaaattagaattctggtaggaaacgcttgccatgaggctgtggagagaggcccagcaagacttttgtattttatttcaacctctgtcggttaaacctacaattcggcagatgatataattacctccctggggcaggtctctatctctgccttggagaaatagcaaagtccaaagtagtctcctcattcaaagatgttgcaaacgaaggctgttttgatctttatgtattagcatttgggtgttaayctttctggagctcctgacagaaaattcctttaaatttattatataattctaaaatattggacatatttgtttcaagcatctgtcagtatccttactctttccatttcactccccactgccttaattagtcatcaggtcctactgatttttaactcctaagcatttctcaaatctgtctcctcagtatgtattgttggttatataactccatctccattttcactgtgctgctttagactatcttttcttgtctagattagtgcctggcttatattatgggcttcataaagtgggatcaatgaatgaatgattcataatctggacaactgcactctaacacctaactggaaaaaaaaaaatcttaagatctatcttccatgtaaaagcatctatctaaaatgcaaatcttactttgataatctccaggttaataaacctctta

SEQ ID NO: 683050 - DNA, 1416 bp, Homo sapiens
cattggaatgaagtcccgaggtgagtctgctcagcctccctcagggcctgcctcggggcccagcaaacccagagatccctgagacmctgtcccctttggacgctactacccccatgctccgtgggcgaccttgggcacgtcctttcacgacaccccgtgagaccgcagtttccctcctgccaagtggggatcgtgggccctttgcccctgactttcagggtgttatgagaagagctgtccaagggctgggagaggcccaggagggcctggggagtctccgaggagcagggaggccagggccaggcctggaggtcaggctgtcttgtgtctggggtgggcaggccgggtgtggaggcagaccgtgcaggcccgatttagtggtcattaaggccgcatggaggccgccggccaggcagggcgaaaatcctgccaggggtgggcgctgtggctgcacaggcactgggagccggccagggcctaaggacctgtcccagcatcaggcacggctcactggcccttttctccagggatggggctgtgccacagttggggctgtgccgcagttgaggctgagcttcagtgtgacatgcctgccacctcggctggcctctagcctgcctagcctcgtatccgcctgtggctgggcccaggagcagggcagttggtccccaagcaggtgcctctgtcttctcttagtagccaaagcccatgattccctttgtcagccaatcagcatttcatcttgaccacaaccctcctctccaggactcagtttccccattcatacaccaaggggatctcagctccctgagggtctgccagtgtgtgataaagccatgctgtgttctttcttgggggtcctaagagggaaagagcaaggtttcagcagttgcagcccctgaattgggcacctgaatttttatactggtggtggggtcagggcttcccgtttcggtaaatgttcaggtctctttgcttagggttgattggaaaagataccacaaccaaatatcacctggccacggtatagtcacggccccatgtctctcaggctatttttactaagattctaaaatccaaagagagccgatcaccccatgtgggccagaagaaaagggtggtggtccggagggcaggatgcctgcttctggtctcaggtttgccctgccttgcccaacaaccttggacttgtcatctatcgctaggcctcagtttccccaagtgtaatgcggtaggcgctgggagttgcatcactctggctctgacctgtctgcgtttccctggaaaggcatggcagcatggaccggggcggggacgggcttgcctcgaaagacatgggagcgcggaaggggaggcgggctcgcctctttcttgtggctttagctccttgcttgctgttattcaggagaaacaacc

SEQ ID NO: 683051 - DNA, 1416 bp, Homo sapiens
cattggaatgaagtcccgaggtgagtctgctcagcctccctcagggcctgcctcggggcccagcaaacccagagatccctgagaccctgtcccctttggacgctactacccccatgctccgtgggcgaccttgggcacgtcctttcacsacaccccgtgagaccgcagtttccctcctgccaagtggggatcgtgggccctttgcccctgactttcagggtgttatgagaagagctgtccaagggctgggagaggcccaggagggcctggggagtctccgaggagcagggaggccagggccaggcctggaggtcaggctgtcttgtgtctggggtgggcaggccgggtgtggaggcagaccgtgcaggcccgatttagtggtcattaaggccgcatggaggccgccggccaggcagggcgaaaatcctgccaggggtgggcgctgtggctgcacaggcactgggagccggccagggcctaaggacctgtcccagcatcaggcacggctcactggcccttttctccagggatggggctgtgccacagttggggctgtgccgcagttgaggctgagcttcagtgtgacatgcctgccacctcggctggcctctagcctgcctagcctcgtatccgcctgtggctgggcccaggagcagggcagttggtccccaagcaggtgcctctgtcttctcttagtagccaaagcccatgattccctttgtcagccaatcagcatttcatcttgaccacaaccctcctctccaggactcagtttccccattcatacaccaaggggatctcagctccctgagggtctgccagtgtgtgataaagccatgctgtgttctttcttgggggtcctaagagggaaagagcaaggtttcagcagttgcagcccctgaattgggcacctgaatttttatactggtggtggggtcagggcttcccgtttcggtaaatgttcaggtctctttgcttagggttgattggaaaagataccacaaccaaatatcacctggccacggtatagtcacggccccatgtctctcaggctatttttactaagattctaaaatccaaagagagccgatcaccccatgtgggccagaagaaaagggtggtggtccggagggcaggatgcctgcttctggtctcaggtttgccctgccttgcccaacaaccttggacttgtcatctatcgctaggcctcagtttccccaagtgtaatgcggtaggcgctgggagttgcatcactctggctctgacctgtctgcgtttccctggaaaggcatggcagcatggaccggggcggggacgggcttgcctcgaaagacatgggagcgcggaaggggaggcgggctcgcctctttcttgtggctttagctccttgcttgctgttattcaggagaaacaacc

SEQ ID NO: 683052 - DNA, 1416 bp, Homo sapiens
cattggaatgaagtcccgaggtgagtctgctcagcctccctcagggcctgcctcggggcccagcaaacccagagatccctgagaccctgtcccctttggacgctactacccccatgctccgtgggcgaccttgggcacgtcctttcacgacaccccgtgagacygcagtttccctcctgccaagtggggatcgtgggccctttgcccctgactttcagggtgttatgagaagagctgtccaagggctgggagaggcccaggagggcctggggagtctccgaggagcagggaggccagggccaggcctggaggtcaggctgtcttgtgtctggggtgggcaggccgggtgtggaggcagaccgtgcaggcccgatttagtggtcattaaggccgcatggaggccgccggccaggcagggcgaaaatcctgccaggggtgggcgctgtggctgcacaggcactgggagccggccagggcctaaggacctgtcccagcatcaggcacggctcactggcccttttctccagggatggggctgtgccacagttggggctgtgccgcagttgaggctgagcttcagtgtgacatgcctgccacctcggctggcctctagcctgcctagcctcgtatccgcctgtggctgggcccaggagcagggcagttggtccccaagcaggtgcctctgtcttctcttagtagccaaagcccatgattccctttgtcagccaatcagcatttcatcttgaccacaaccctcctctccaggactcagtttccccattcatacaccaaggggatctcagctccctgagggtctgccagtgtgtgataaagccatgctgtgttctttcttgggggtcctaagagggaaagagcaaggtttcagcagttgcagcccctgaattgggcacctgaatttttatactggtggtggggtcagggcttcccgtttcggtaaatgttcaggtctctttgcttagggttgattggaaaagataccacaaccaaatatcacctggccacggtatagtcacggccccatgtctctcaggctatttttactaagattctaaaatccaaagagagccgatcaccccatgtgggccagaagaaaagggtggtggtccggagggcaggatgcctgcttctggtctcaggtttgccctgccttgcccaacaaccttggacttgtcatctatcgctaggcctcagtttccccaagtgtaatgcggtaggcgctgggagttgcatcactctggctctgacctgtctgcgtttccctggaaaggcatggcagcatggaccggggcggggacgggcttgcctcgaaagacatgggagcgcggaaggggaggcgggctcgcctctttcttgtggctttagctccttgcttgctgttattcaggagaaacaacc

SEQ ID NO: 683053 - DNA, 1416 bp, Homo sapiens
cattggaatgaagtcccgaggtgagtctgctcagcctccctcagggcctgcctcggggcccagcaaacccagagatccctgagaccctgtcccctttggacgctactacccccatgctccgtgggcgaccttgggcacgtcctttcacgacaccccgtgagaccgcagtttccctcctgccaagtggggatcgtgggccctttgcccctgactttcagggtgttatgagaagagctgtccaagggctgggagaggcccaggagggcctggggagtctccgaggagcagggaggccagggccaggcctggaggtcaggctgtcttgtgtctggggtgggcaggccgggtgtggaggcagaccgtgcaggcccgatttmgtggtcattaaggccgcatggaggccgccggccaggcagggcgaaaatcctgccaggggtgggcgctgtggctgcacaggcactgggagccggccagggcctaaggacctgtcccagcatcaggcacggctcactggcccttttctccagggatggggctgtgccacagttggggctgtgccgcagttgaggctgagcttcagtgtgacatgcctgccacctcggctggcctctagcctgcctagcctcgtatccgcctgtggctgggcccaggagcagggcagttggtccccaagcaggtgcctctgtcttctcttagtagccaaagcccatgattccctttgtcagccaatcagcatttcatcttgaccacaaccctcctctccaggactcagtttccccattcatacaccaaggggatctcagctccctgagggtctgccagtgtgtgataaagccatgctgtgttctttcttgggggtcctaagagggaaagagcaaggtttcagcagttgcagcccctgaattgggcacctgaatttttatactggtggtggggtcagggcttcccgtttcggtaaatgttcaggtctctttgcttagggttgattggaaaagataccacaaccaaatatcacctggccacggtatagtcacggccccatgtctctcaggctatttttactaagattctaaaatccaaagagagccgatcaccccatgtgggccagaagaaaagggtggtggtccggagggcaggatgcctgcttctggtctcaggtttgccctgccttgcccaacaaccttggacttgtcatctatcgctaggcctcagtttccccaagtgtaatgcggtaggcgctgggagttgcatcactctggctctgacctgtctgcgtttccctggaaaggcatggcagcatggaccggggcggggacgggcttgcctcgaaagacatgggagcgcggaaggggaggcgggctcgcctctttcttgtggctttagctccttgcttgctgttattcaggagaaacaacc

SEQ ID NO: 683054 - DNA, 1416 bp, Homo sapiens
cattggaatgaagtcccgaggtgagtctgctcagcctccctcagggcctgcctcggggcccagcaaacccagagatccctgagaccctgtcccctttggacgctactacccccatgctccgtgggcgaccttgggcacgtcctttcacgacaccccgtgagaccgcagtttccctcctgccaagtggggatcgtgggccctttgcccctgactttcagggtgttatgagaagagctgtccaagggctgggagaggcccaggagggcctggggagtctccgaggagcagggaggccagggccaggcctggaggtcaggctgtcttgtgtctggggtgggcaggccgggtgtggaggcagaccgtgcaggcccgatttagtggtcattaaggccgcatggaggccgccggccaggcagggcgaaaatcctgccaggggtgggcgctgtggctgcacaggcactgggagccggccagggcctaaggacctgtcccagcatcaggcacggctcactggcccttttctccagggatggggctgtgccacagttggggctgtgccgcagttgaggctgagcttcagtgtgacatgcctgccacctcggctggcctctagcctgcctagcctcgtatccgcctgtggctgggcccaggagcagggcagttggtccccaagcaggtgcctctgtcttctcttagtagccaaagcccatgattccctttgtcagccaatcagcatttcatcttgaccacaaccctcctctccaggactcagtttccccattcatacaccaaggggatctcagctccctgagggtctgccagtgtgtgataaagccatgctgtgttctttcttgggggtcctaagagggaaagagcaaggtttcagcagttgcagcccctgaattgggcacctgaatttttatactggtggtggggtcagggcttcccgtttcggtaaatgttcaggtctctttgcttagggttgattggaaaagataccacaaccaaatatcacctggccacggtatagtcacggccccatgtctctcaggctatttttactaagattctaaaatccaaagagagccgatcaccccatgtgggccagaagaaaagggtggtggtccrgagggcaggatgcctgcttctggtctcaggtttgccctgccttgcccaacaaccttggacttgtcatctatcgctaggcctcagtttccccaagtgtaatgcggtaggcgctgggagttgcatcactctggctctgacctgtctgcgtttccctggaaaggcatggcagcatggaccggggcggggacgggcttgcctcgaaagacatgggagcgcggaaggggaggcgggctcgcctctttcttgtggctttagctccttgcttgctgttattcaggagaaacaacc

SEQ ID NO: 683055 - DNA, 743 bp, Homo sapiens
ttaaacctcttttcttcataaattacccagtctcaggtgtttctttatagcaatgcgagaaagacttaatacacctcaccagtgcctcagccctcctgttttggtgcctgagcactgtgaccccacactgcaaacctgccatgtgtcagtcatggccctggaagataacacagatgtctcatgtggtcagcataaaaactctatgaggaagtaatgtatagtcatgttgccaatcagggaattgatacctagcaactcccttatttcctttcatcttctgtcaattcttgcaactctatcttctctaagatcaccaacgactgcaaagtatggtgggaaacgtgccaaactgatcagttaacttttataaaatayatatttaggtcttctgaatatacaagtaatacacatcctttgagaggacataaaaactacaacaagaatatagataattatgagaacacctctaatcacaccatgattagataattatgagaacacctctaatcacaccagagatgtagcaactctggaggtgttttctttagtcttccttcaagaaaaaacttgccattgaagggcagttagcagatggactccgtcttctgctgtcagcatcttcaagacctgcctcagcgttggagaagaagccatattcttcctggatggccctcagccaatgattgatcatggctggggataccatgactgatcaatttctgcccaacctaggactcttctaa

SEQ ID NO: 683056 - DNA, 1041 bp, Homo sapiens
aacaaaagctgtgggtgtctgcaacactgccgcaacctcagtggccatccgcagaaagagaaaaaaccttgaaggaagttagattttggtcacaggtaaccacaaagaactagttatcacacattgccacatgggttgtaatacatctattaagaagcagattttctttggggtttgtgagtcatcgttcagaatcttagttctgcttgagaacatgtgaactgaaatgatctatttctgtgttattccttttttctcttttctatcttcatttattttttaaatttattttatttgtagcattcttaaaactctgtaagaatggagcccaggagagggattttctttacttcattcctaagccttcagattcctttgtcttagcttattgttgccagctattagtttggaaagcctaagaccttccatgagaattgtgtagcccctgaacccatttctcacccatcagattggcaaaaatttacaagcctgacaatacactctgttgacaaaattgtggggaaacaaacattcctaccatgcattgctagtgggaaggcaaatgtaagtattcatcttgttcaaagagatccctgcagaaatgccccaaataatgcttgaccaagtatctgggcaccctgtgtggtacagccaagttgacacagaaaattaattatcacagctatgatacttaatcatagctgattaatgactgttgtgacccctatgaaaaagaatttggcaatatccaaattctgtgtgcaacccctatgtaaaagaatttggcamtatccaaaagatctacctaatgcatctgggctttgactcagcaactcctaggaatttatcccaagatttacctccaacaatatgaaaatacagatgcacaaggttattcactgaagcattgtttctaatagcaagacattggaaactaccaaaatgtccaagcaaaaacaaatctattgaacccaggaaattggttcagtaaactctggcacatacatacaatagaataataagcagctatacaaagaatga

SEQ ID NO: 683057 - DNA, 1041 bp, Homo sapiens
aacaaaagctgtgggtgtctgcaacactgccgcaacctcagtggccatccgcagaaagagaaaaaaccttgaaggaagttagattttggtcacaggtaaccacaaagaactagttatcacacattgccacatgggttgtaatacatctattaagaagcagattttctttggggtttgtgagtcatcgttcagaatcttagttctgcttgagaacatgtgaactgaaatgatctatttctgtgttattccttttttctcttttctatcttcatttattttttaaatttattttatttgtagcattcttaaaactctgtaagaatggagcccaggagagggattttctttacttcattcctaagccttcagattcctttgtcttagcttattgttgccagctattagtttggaaagcctaagaccttccatgagaattgtgtagcccctgaacccatttctcacccatcagattggcaaaaatttacaagcctgacaatacactctgttgacaaaattgtggggaaacaaacattcctaccatgcattgctagtgggaaggcaaatgtaagtattcatcttgttcaaagagatccctgcagaaatgccccaaataatgcttgaccaagtatctgggcaccctgtgtggtacagccaagttgacacagaaaattaattatcacagctatgatacttaatcatagctgattaatgactgttgtgacccctatgaaaaagaatttggcaatatccaaattctgtgtgcaacccctatgtaaaagaatttggcaatatccaaaagatctacctaatgcatctgggctttgactcagcaactcctaggaatttatcccaagatttacctccaacaatatgaaaatacagatgcacaaggttattcactgaagcattgtttctaatagcaagacattggaaactaccaaaatgtccaagcaaaaacaaatctattgaacccrggaaattggttcagtaaactctggcacatacatacaatagaataataagcagctatacaaagaatga

SEQ ID NO: 683058 - DNA, 1851 bp, Homo sapiens
gtattcacccgcagtcttctgatctcttatttggtttcccaagtcgacctaccatcccaggcaaacaatcctccttgttctggggccaggcagtggcaaatatattccaagctccgggagtagaggctttggaagcaagaaatatgggtcccatcccagttctgtttacaactcactgtgtggctctaggcaagtcattctgagtccttttcccacaggcctcgtcttcctcagtgcagggctggccagtagaactttctgcgaggatggaaaggttctatatctgtactgtatgcacggtagctaccaggactattgagtacttataatgtggctagtgcaactaggaaacttaatttctattactttttaattttcaggaattgaaatttaagtagctacatgagactagtggctactatattgaacaatgcaagtccttaatataaggatgagaaaaacacctgccccctcgtcctgggatgagaaggacccctaatgtgtgcatagagcttggcagatgagagatgctcactgcttcttcacttccttctcctctcctgactcctccaaatgagatgagtgtctttgagtggaagaatttccctttagagacattcaactcccctgtggacactggctggagaagtggatgagtggtagggggagagaccctgggagcttctgtgatggacaggctcggagagcagaggacaaggccagctcagagaaggacaaaaatgactgcatctgccaaatcccacctctatttttggtgtttacaggcactagtgctggaaaggggcccatcttcgaaattccttttctttgcatagagtggttaagatcatgggctctagaatcagatggttctaggttagtgtttcagttccattagttaccagctgtgagaccttgggcaggttgccagcttctctgctactcatctgtaaaagaagcagaataatgtctacatctgaggattttgtgagtaatcaatgagctaatatgtgcaaagctctttacaggagacccggcagatatcaagtgcttaaaaaacagatgccacggccaatcttatgtaaacagagcctcttaacgtccacgcccatgcagaccagagtccagtgagatgtctgcaaagcccatgattccacatctccagacaatctcttttttggtggtcttcagagtgaggcagtgaccacayacagaaacaagtcctggtatcctcagacggcagctgacccatcaaatttgacacttggaagccatcctgaagtttctagtgcttggatctcctttccattgcccttgccaaatggaaatctcctaggactcatccagaggcaggagctctgaggcctgggggctcagggatggctgcctctctgcgacttctcacccctggtcctggtggagtctccactttccagactcattttcccttcattgtttccccaggctggaggcgtctgcagatcagccctggtcaaaatgcccagcacaggagctggcttccataggtcaggggcagagtaatctttgctgaactggaagagctaaaactcaaaaactaacacctgtccctggttaatagccaaggatgactttcatcagtgtgtcttattttgtgggcaaagaaactgggtgattggttcatccatctgctcatccacttcctcactggacaatagttactaagcacctactgtgtgccaagtcctaggaacacaaaaatggattcctgtccttaaacttcacaagttggtgggggagacagctatactgaaattaattgtaacagtgtgatatgggctattaggtcaggactaggatgagaagaggtga

SEQ ID NO: 683059 - DNA, 314 bp, Homo sapiens
ggagaatggcgtgaacccaggaggcggagcttgcagtgagccaagttcrtgccactgcactccagcctgggcgacagagcgagactctgcctcaaaaaaaaaaaaatagactttaaaaagtgtcttcccaaagccttaattcccctactctgactttttccagaattgctccaagataatccttggtccttcctcttcatcctctccaatctgctgccactgttgtgagaatgccttttcatggggccaggcccccagctcaccatgggcaacgactaaaggtcaaagtgtcaagctgccctggggttgcctgg

SEQ ID NO: 683060 - DNA, 640 bp, Homo sapiens
ttcagagaagggtaggaacccacccaaagttgcataataagttagggacagcatctaaagcaagcccagagctccctgcgtaagagggtctaacatggatgagtgtggctaccctgtgcacaatggaagccccccatctgatggaagcttgaagtctgaggtttcctttggagaccttactcttatgaaatggctcaggtgattatacctggtgccacctgaaagcacacagtcagcttggttctctcgactcagaggcctggcctggacatgccttttggccatcaggacagagggtcaaggttggtactggggcgttgccagagtccttctcatcagtatctggatggcctatccctccctggaataggagctggggccggtgggagaagggaaacaactatttgggttaatawatgtggtcaaggcgtgtgatgggggctttatgagaaggggcaggtcttgaaaggggagggaatcccagcatcccgtgtgacgtggtggctcagcacagtccagacctcaagtcctactcagtttactcctccattgacaaatcctagccctgagagacggtctcgccttctctcttgattcagaaggaatggttgcgatacaccatctcttggtcacagttgct

SEQ ID NO: 683061 - DNA, 976 bp, Homo sapiens
taataagatttatgttttaggaagttctctttgccaaggggagaagcactaatggcaaggagcaatccagattagaaatgataacccatgtttgggcatgctccctttggcatgacctccactgctacactaccttgaaagagaacttgtatcaaaggagatccggttccacaacatggagcaccaagatattgacattgyactgaatgtcatgagtagactgaagggataatagcattttgctccaaaaatcttcacttatctttgctattggtctcttcctatgcttccagtgaattccctttcaattctggatccttcctggctcttctaatgagccattcagccccaccttctacttgcgtttctcactccacaaaacaaaaaacaactagttcaatatctgtggcttaggaatttgcccttagaagtgggtgatggtctcagtttaatccactggagcaagagcatgaataaactaaggtagctgctgcagggattggggaaaaggggggacaaatattttgcagacaaaactattaagtttcagtgactggtatatcagaaagagaagtaaagggccattttctttcccaaagtccgctgccctagatcaggcttatactgttctgttttgttcggcccttatttttattgcattcacctaattatacacccctactctctagtttctcttcaaatgtataaaatgaattggagcaaaccagatgtctctctccaggttatcagtcattaatggtgccattgcctgctaggcagaactcaaaacgacctcacatggcctccaatggtctacaaagactttcttgatagagtccttgtgtgtcagggactcatctcccactacacccccatgtaactacacttactaagtatacttactacacttcaaaattaaggaatgacttatgatttataaacagtaagtcgtcacttaccaccatagtatgtgggg

SEQ ID NO: 683062 - DNA, 636 bp, Homo sapiens
tttcatatgccctaatataagatgaccccaaacataaggtaatcttgtattttcccaaatgggcccaaataacatatctggccacctgacatayatcaacttttaggagtacaaataaagtggtcaaatgccaatatataatatttaatctaataatgtagatatttttaaataataaagtatgttagagaaaaattagagacaatacaatctttaaaaatcaaagcatttttatttccataagttatttgaaaatcagcatttaagaagactgctggctgggcacggtggctcatgcctgtaatcccagcactctgggaggccgaggcgggtggatcacgaggtcaggagattgagaccatcctggctaacacggtgaaaccccatctctactaaaaatacaaaaaaaaaattagccgggcgtggtggcgggtgcctgtagtcccagctactcaggaggctgaggcaggagaatggcatgaacctgggaggcggagcttgcagtgagcagagatcgtgccactgcactccagcctgggcaacagagggagactccatctcaaaaaaaaaaaaaaagactgctttatgattctgtcactggaaattctccgccaggtcatgagtacccattcctac

SEQ ID NO: 683063 - DNA, 819 bp, Homo sapiens
aaaccatatcaccgattcttaggaacttagaggaagtgctgaaaaaagtataaattaatggaaatttatgtattccatttagtaagtatatatattccattttaaaataagcaaaatggttccccttcaacttcattttcctcttcctgaacaattctgccttagagctattaggtgaggtcaagctacgtgggtgttctgggctgtggcatgggggacccactgtggctcagagcagggagactgtccatatggggtgtggaatgtggggatggcccgatgcagggtgtgggagcctcttgcagtaaggagggaatctgcagagaaggggaacctggtttgggaggttgtaggaggcagcatactggcagagggaaggcccagtgcgggtgtcagagccacagtggaggggagcgagcattcacagggatgggtgcctaagcaggctgaggatgtgcatgtgttggggtggcagccccagcagggagttggcacagcctgggtgggatgaggacagtgtctgtgcagtggccattgtggagatgggttatatatacacagggactgaagaagtaagtaaatgtcttaaggatagtggggtccagggaggaagaaattactaatatgaaaagggtagaaattagaatgaaccctgtgttggattcaacttggaggtatcacactaaagaacttactcatgtaaccagataacacctgttcctgcctggccgacatggtaaaacccygtctctactaaaaatacaaaaaaatgagctgggtgtggtgttgcgtgcctgtaatcccagctactcaggaggc

SEQ ID NO: 683064 - DNA, 675 bp, Homo sapiens
actgtaaagccagaaactgccaaatttctcctcgtcgacttttgggaactcctacaatgaaggagataaataaccaaggccttgaactctggaatgaagttgatagatcccagctgattcactatataattctggtaaacagacagctgtatgtactgcatgccaccctaagaccacacaatataattgacagaagcatattttgacaagctgaatcctatagctcttgatgccttgcaaaagaaaaccctcacgcaacacttaygataatgacaatattaacaataacatcacccgttgctgactgagcattaataaaacatttattgagggtgcctagctactaagcacatgcactcagaaaacaactcaactataaggtaggcaattactattaggtccactttatagacagaaagctgaggcagaaagagatgaagtaattgccccaagttcacatggctaggaagtggcagtttagaattagaactccaaaagtctggtttcagaggccaaatcctgatatcccaaagtgtattactgcctattttcactctttatctggcttgaggatagcaacaaatgctaaacctaatttacaactctaaatatttgtcatcaacaagtaactttataatagagaatcaaatagcattcttatatgggcattaaaaa

SEQ ID NO: 683065 - DNA, 613 bp, Homo sapiens
gaaaatgtcatttttagaaggtaactatcagcccactaaatgaatcactgataacatgagtgggcagttttattatccaaccaataataaatgtacaaaaagcaacttcattccagtcaaacaaacatttattgagcatccagtatgtaacagagaataaagcaaggcagtcaggatgcctcatcattgagtgatgaataaatccattctcaggaaaatcatctcattcattcattcatccattcattcatctagtaatgagtgcaagatactgtcttagggtgctaggtgtgcagtggtggggtaagaaaaacattaaacaaatacacacataattattaarctgtaaattatgattaagtataattaatcacgaaaaagaatgataaagtacaatgaactgattttggtcggggggcaggggtggtgctctgaggaaatggtatttgagggacctgagggataataggatgctcggggcttaaagcgcaggcagcagtcactccaggagaggaccgcataaaggccctgagacgggcagaggaaagggcggaagaaagaggagtgagaagaggatggagtggaaagaaagggagatgggaaatgagaatgt

SEQ ID NO: 683066 - DNA, 613 bp, Homo sapiens
gaaaatgtcatttttagaaggtaactatcagcccactaaatgaatcactgataacatgagtgggcagttttattatccaaccaataataaatgtacaaaaagcaacttcattccagtcaaacaaacatttattgagcatccagtatgtaacagagaataaagcaaggcagtcaggatgcctcatcattgagtgatgaataaatccattctcaggaaaatcatctcattcattcattcatccattcattcatctagtaatgagtgcaagatactgtcttagggtgctaggtgtgcagtggtggggtaagaaaaacattaaacaaatacacacataattattaagctgtaaattatgattaagtataatwaatcacgaaaaagaatgataaagtacaatgaactgattttggtcggggggcaggggtggtgctctgaggaaatggtatttgagggacctgagggataataggatgctcggggcttaaagcgcaggcagcagtcactccaggagaggaccgcataaaggccctgagacgggcagaggaaagggcggaagaaagaggagtgagaagaggatggagtggaaagaaagggagatgggaaatgagaatgt

SEQ ID NO: 683067 - DNA, 1318 bp, Homo sapiens
atgtttgaaaaagagctcttggggcatcataatactccctacacccctgaactcactccaaccccaacagtaagatcccataacttagggttatcagtgtagatcccaagaaaataaaagcaacaaaatttgtgacctgtaagatcaaaagggaccatcccagtgtacaacagcaaatatttggaaggagatatggacagttgctgaaagataatttttaaaagattaaaaacatgactcttgggccaatataaaattaacatgtgtcaaagattgtattcaacccattcattagtgaggaaatcactaaagtggttaaaaccagttatatatatatcaartaaaaatgctgaaataaatccgctaatagatacggaactgaataatgtctcagatggcaataaaataaaatatttaggtcgtgttttctacaggtagaaatcaacagtctctagttgtcaaaattcatttgcattgctataaacaagaatcatttgctttactaacagtttttaacaagttaacttcttcccctaaagtgatataaagtagactagtccatagaaaggcaattgaaaattacacaccactatagaatcatataatccccagaaggttcaccagaccatggattttcaaccttggcgccattgacatttggagccagaaaattctttgttttgtgggttgtcctgtccattgtgggatggttaggagcatccctggcctctgcctactagaggtcagtggcaggccatcccacccagtggtgacaatcaacaatgtctccaatattgccaaattcttccaatttgaaaacactgtgttagacaatgcccagcgctccattgtaaggacaccaggattttcttctgcccagttccaactcctagacaatttctgagtaagtcagaaccactttccccacatctcttttcttttctttttttttttttttttttttttttgagacggagtctcgcactgtcgcccagcctgggtgcattggcgcgatctcggctcactgcaagctccgcctcccacgttcacaccattctcctgcctcagcctcccaagtagccaggactacaggcaccggccaccactcccggctaattttttttgtatttttggtaaagatggggtttcaccgtgttagccgagatggtctcagtctcctgacctcgtgatccgcccgccttggccttccaaagtgctgggattacaggcgtgagccaccgcgcccaggctccccacagcttttttactcccccttgagtgtaggaaaaaatcctccgagttgggtagaaatagagtt

SEQ ID NO: 683068 - DNA, 1318 bp, Homo sapiens
atgtttgaaaaagagctcttggggcatcataatactccctacacccctgaactcactccaaccccaacagtaagatcccataacttagggttatcagtgtagatcccaagaaaataaaagcaacaaaatttgtgacctgtaagatcaaaagggaccatcccagtgtacaacagcaaatatttggaaggagatatggacagttgctgaaagataatttttaaaagattaaaaacatgactcttgggccaatataaaattaacatgtgtcaaagattgtattcaacccattcattagtgaggaaatcactaaagtggttaaaaccagttatatatatatcaagtaaaaatgctgaaataaatccgctaatagatacggaactgaataatgtctcagatggcaataaaataaaatatttaggtcgtgttttctacaggtagaaatcaacagtctctagttgtcaaaattcatttgcattgctataaacaagaatcatttgctttactaacagtttttaacaagttaacttcttcccctaaagtgatataaagtagactagtccatagaaaggcaattgaaaattacacaccactatagaatcatataatccccagaaggttcaccagaccatggattttcaaccttggcgccattgacatttggagccagaaaattctttgttttgtgggttgtcctgtccattgtgggatggttaggagcatccctggcctctgcctactagaggtcagtggcaggccatcccacccagtggtgacaatcaacaatgtctccaatattgccaaattcttccaatttgaaaacactgtgttagacaatgcccagcgctccattgtaaggacaccaggattttcttctgcccagttccaactcctagacaatttctgagtaagtcagaaccactttccccacatctcttttcttttctttttttttttttttttttttttttgagacggagtctcgcactgtcgcccagcctgggtgcattggcgcgatctcggctcactgcaagctccgcctcccacgttcacaccattctcctgcctcagcctcccaagtagccaggactacaggcaccggccaccactcccggctaatttkttttgtatttttggtaaagatggggtttcaccgtgttagccgagatggtctcagtctcctgacctcgtgatccgcccgccttggccttccaaagtgctgggattacaggcgtgagccaccgcgcccaggctccccacagcttttttactcccccttgagtgtaggaaaaaatcctccgagttgggtagaaatagagtt

SEQ ID NO: 683069 - DNA, 603 bp, Homo sapiens
atctccataaccaagttaagaatatccactgatgaaattggtacatatgctcatttatttatatatttttctatgtctttaatatggttttataatttgtatccataagatttgtacatatcttttgggtttttcctagatattttacatttactgcttttttttaaaatggaattttattttatatagtatttcctggctggcggttgctggtatttattgggcagtctgcttacctctctttatagtttcaggtttgtctgcaaattctattggacttgtttctyatcaagctgattaggacttctagtaaagtgcacaccatacgtagtaacagtgggtatccttatcttgttttagattttgtaggggattcttataacagttcaccattaaacatgactcttgaggatgcttattggtaaacatatcttataaatataaaatgataaatataaatgcaaatatgatgcttgctataggattttgatgcataacttttattgaggacatttctttccagtttgctaagtgtttttttttaatggcactgcattttattattccttgatatatttttatccacagactttcaccacacaa

SEQ ID NO: 683070 - DNA, 2088 bp, Homo sapiens
gcagtaagttctagccaggaaatacccacgatgcctcagcccatcgaaaaagtctccgtgtcaactcagacaaagaagttaagtgcctcttcaccaagaatgctgcatcggagcacccagaccacaaacgacggcgtgtgtcagagcatgtgccatgacaaatacaccaagatcttcaatgacttcaaagaccggatgaagtcggaccacaagcgggagacagagcgtgttgtccgagaagctctggagaaggtaatgcttgtcgccactgtgggtgccctgctgcagccggcactcctgtcatggttaggctcctttcactcatgcatcaacccagtagcagcttttacatgtagccatataatgacaccagtatcttttacagcatttcaagtaataatgatactttcctcacctaaattttttacacatgtaatgaaggggaaaaaaggtacctcatgcaagttgtgttaagtttctgttccagtgtagatggtctgtgttaagttgtgtgctgacgcactgtgggttgtcttttcattccagctgcgttctgaaatggaagaagaaaagagacaagctgtaaataaagctgtagccaacatgcagggtgagatggacagaaaatgtaagcaagtaaaggaaaagtgtaaggaagaatttgtagaagaaatcaagaagctggcaacacagcacaagcaactgatttctcagaccaagaagaagcagtgggtaaataccagtcttttttagacccttatttctgaaaatgtaccacaggtatgatgcccgttaattcagaaggtagctgtggcacatgcagaagatgtttctgaaataagatcaaatgtgaaatggtcagctttagttttaaaaattttattaaaagtcctatgatctctcaaccccagatcccatattactgtgtactgctcaggattattttgttaaattgagattataataccttagtacatatttattacaattaacttatataatttctccatctatgcatatattttatttgggcaaagtggctggccctgacttttacctggtgatttcagatgggtaacatccaaatggtgaaattataaatgtaattatcacaataaatagtttcagatttccctgcacttaacatttatacattagattttgttaaagaaatcagttacttttactttatagtagtgacatctcattggtctctaactaccctccctcatacctgactagtatcatttgtcatcgtgtcctgctcgccagtctcatcctccccactagagtgggagcttctgagtgcacagggtccaagtgctcgtcctacagccgccacagtgctcagtgaattagggaaaagttttgctcccgaaagctcataacttggtttcagttttaataaatgactatataaagttttgtgataaactaattcttcattttatcaagcctatattatataaatacacataagcttttcatgaaagaaatatttttaaatctgtgacaaagatttggcaagaaggaaaatggaaacttcgaatagatgaagataacttggtaggaagagctggtgaataacaaaataaatattgttaacaaaagaccaggagatctgtggagggaaaaagagaactttattttctgttaaaaaaacaacctgcacattgggtgttatagccttcagtacaagtgaaagcgtgctytccgaataacttttccatgttcttctttaagaaatttcactgctgctcgtaaggttttgaggagctgacaagctctgactggtgagggatggcagtcggcaaaactagtctgagagctgcagccaacattttgtgttccaggtgcttctccccccagcttctcaactcagttttagttgggtatgacaagaatgactgaatttgtgtgatcaactctcacaatatcattagatgggaattaaggtgtgctgaagataacagaagcacaacacccaaagacgccaggtgcagtggctcatgcccgtagtcccagtgctttgggaggccaaggtggaaggattggttgagcccaggagtgcaaggttgcagagaggtg

SEQ ID NO: 683071 - DNA, 613 bp, Homo sapiens
taaaggacaggacactcaacaggaaaccaaggagcaagattggccacaaaattgggtctgcatggcaagggttagaaggaggtttatcctggcagggcatggtggctcacacttgtaatcccagcactttgggaggccgtggtgggtggatcacctgaggtcacgagtttgagaccagcctggccaaaatggtgaaaccctgtctctactaaaaatacaaaaaattagccgggtgtgtgcctgttatcccagttactcaggaggctgaggcaggagaatcgcttgaacccgggaggtggaggttgcagtgagtggagatygagccattgcactccagcttgggcaacaagagcaaaactctgtctcaaaacaacaaaataataaaaacaaaaaaggaggtttagcccatgattatgtggtgggaagcagggtgcaaaggaacaatagaccacacatctgtgccacaaagaatgatatgttaatggggaagagaccatgatacaaaagaaagagacaaagtcctgggtaagatgaggaggagaacgatggatattttttcatatgaaccaggaggcaggaagcagcagttaggggcagatgtagcaggttggta

SEQ ID NO: 683072 - DNA, 1697 bp, Homo sapiens
ctttccttggtcgaaagatgtctgcatcaataggaaggtagacacacaaatctctaactctgaaattttatagtgtgtaagcccatgatttttctgtccagatagaaagaataaaatttagaatgaacatcttcctttcaccaaagcatggcacatttgcatcttttaaaacaggtagttcyctaagttctttgtaaacgctcactgacagtattcagatcacccaggaatccacctaagaacctacagcagggctggaagcactgggtgttccaatcactgtctggagaacctctcatttgtatgcctaccgatagtgacctcatattctcacttttcaactatttttgactatttttatttatttatttatttttatttattttttgagacagagccttgctctgtcacccaggctggagtgcaatggcaaaatctcagctcactgcaacctccacctcccgggttcaaaggattctcacgcctcagcctcccaagtagctggaattacaggcatgtgccaccacgtccagctaatttttttttgtatttttagtagaaatggggtttcaccatgttggtcaggctggtctcgaaatactgacctcaaatgatccgcccgccttggcctcccaaagtgctgggatgacaggcgtgagccactgagcccggccctgttttctttttatagtctcagattaggtgatttatcggctgaactatgtcatattcaaatgtcatttcatatccaacactcactcacttggacacagattgggaggagaaaagtttattcttctctgagattacagggaaaagtgaccattttcttcacgggaaaacataaattcccagaagtttttgtttgtttgttttttgttttgttttgttttttgtttggttttttttttttttttttgaaaaagtgtctcgctgtgtcactcaggtgggagtgcactggcgcaatctgcgctcactgtaacctccacctcccaggttcaagtgatcccatcacttcagcctcctgagtagctgggattacaggcatgtaacaccacacccagttaatttttgtatttttgtagagacagggttttaccatgttggccaggctggtcttgaactcacgacatcaggcatgagccaccacgcccggccttatttttaagaataaagcctaaggtcattactgagactatcccttccaaatatcattgccattgtgccttacttcctgtaaaaaatagaaataaaattcaagtggatagagattttggatttcgagttactcgagtcaaggttccatgggccaattgcagaggctctgtgggtctaagttaaaaaaaaaaaaaaaaacataaaacaaaaagactccaaagttcttcagcttttccaagtgctcaggtcactcatggtcactgatgctcaacaaggtgtcctttctgattcaccattctttctaaggtccaaaaaaggtccttgagttatttgcaggatcttactctctcaatcctttgctttcttgttcaagccagcaaatttacccgtttcctgcaacctgctgttcaccaaattcaaagcctgtcttcatactactaccgtatcagttatctgaaatgattcctgaactcattttccaattagctctagcaattaagtctcaaggtctctgagatcagagatctatagacccaaag

SEQ ID NO: 683073 - DNA, 1697 bp, Homo sapiens
ctttccttggtcgaaagatgtctgcatcaataggaaggtagacacacaaatctctaactctgaaattttatagtgtgtaagcccatgatttttctgtccagatagaaagaataaaatttagaatgaacatcttcctttcaccaaagcatggcacatttgcatcttttaaaacaggtagttctctaagttctttgtaaacgctcactgacagtattcagatcacccaggaatccacctaagaacctacagcagggctggaagcactgggtgttccaatcactgtctggagaacctctcatttgtatgcctaccgatagtgacctcatattctcacttttcaactatttttgactatttttatttatttatttatttttatttattttttgagacagagccttgctctgtcacccaggctggagtgcaatggcaaaatctcagctcactgcaacctccacctcccgggttcaaaggattctcacgcctcagcctcccaagtagctggaattacaggcatgtgccaccacgtccagctaatttttttttgtatttttagtagaaatggggtttcaccatgttggtcaggctggtctcgaaatactgacctcaaatgatccgcccgccttggcctcccaaagtgctgggatgacaggcgtgagccactgagcccggccctgttttctttttatagtctcagattaggtgatttatcggctgaactatgtcatattcaaatgtcatttcatatccaacactcactcacttggacacagattgggaggagaaaagtttattcttctctgagattacagggaaaagtgaccattttcttcacgggaaaacataaattcccagaagtttttgtttgtttgttttttgttttgttttgttttttgtttgkttttttttttttttttttgaaaaagtgtctcgctgtgtcactcaggtgggagtgcactggcgcaatctgcgctcactgtaacctccacctcccaggttcaagtgatcccatcacttcagcctcctgagtagctgggattacaggcatgtaacaccacacccagttaatttttgtatttttgtagagacagggttttaccatgttggccaggctggtcttgaactcacgacatcaggcatgagccaccacgcccggccttatttttaagaataaagcctaaggtcattactgagactatcccttccaaatatcattgccattgtgccttacttcctgtaaaaaatagaaataaaattcaagtggatagagattttggatttcgagttactcgagtcaaggttccatgggccaattgcagaggctctgtgggtctaagttaaaaaaaaaaaaaaaaacataaaacaaaaagactccaaagttcttcagcttttccaagtgctcaggtcactcatggtcactgatgctcaacaaggtgtcctttctgattcaccattctttctaaggtccaaaaaaggtccttgagttatttgcaggatcttactctctcaatcctttgctttcttgttcaagccagcaaatttacccgtttcctgcaacctgctgttcaccaaattcaaagcctgtcttcatactactaccgtatcagttatctgaaatgattcctgaactcattttccaattagctctagcaattaagtctcaaggtctctgagatcagagatctatagacccaaag

SEQ ID NO: 683074 - DNA, 650 bp, Homo sapiens
gtgggaccctctgcagctccctggccttctctctgtgtgtggaactatcctccgtgacactgtgtcctgtgaattctagctgcctcagcctctctggacattcacattcctcttttcaactcatggtggttcctgggctctgcctgggtttcccttccccacagtgtaactggaaactctattaaggaagtaagctagggccatcatagtgctcacctcattcgttttctgcctgttgggcatcattgctcctcatttcctggtgtctggtgtcttgaacactgttatttaatacattgtattcggattttttaattgtttcatgcataaaggtaagtctggtccctgttactcctacttggttggaagtgggtgtcagaccactaatttttgtctgacgaatatacttatattccttttacatttaatgcattttgattcatttttttcacaacttgattccaatctgygtatgtagattcacataaattttctgaactgtccaaagtctgctcaaatatgcaagattggtttatcattagaatatcagttaatttaatccatcacattaacaaatttaaaagggcaaaattatccaatcatctgtagatgaagaaaaagagtcacataaaacctaaaatccatttatg

SEQ ID NO: 683075 - DNA, 616 bp, Homo sapiens
tgctcacacccttccatctctctgacttccaattctttattttaaggcaaagcatgttgattgtctaatatgttaagcatttgatgaaaaattggctattttacctaatttacaaaaagagattacaaagtaaacataagacatgcaaaagaaagacggaaggtgtgtgtgtgcatggggggcaggtgtgaggggtggggagagagagagagagagagagagattattatgattggcaaagataaaaacagtagaagrcatccagtattagtatggaaaccaaatcaaaaacaaatccagaaatttttttaaacgttgaaggctgcatatgagaataagaaaaatactcattaaaattttatttttgactatttaacttcaaatattcaactcggttgattaaaaaaaatagaattacatcattgaattgatctaatcaaccagttttccctagcgtgatgctcacaaagtcttattacccaattcagttatctgtttcaaagatgaggtggcaaagaggataatccaggtagtaatagcaaacttcttaccaactaacctagtcggcttaggtgaaagaagcattttcttcaattatccagagaatgatcttttc

SEQ ID NO: 683076 - DNA, 616 bp, Homo sapiens
aagattataaatgttatatgaccttttttataattcaaggtggcatagttcaatgagaattacactttagagaaagcatggtgaaactatgcctataaattttaatttgatgtatctgcaggaaaatagctataatttaaaaacaggatttgagttatatgaattagtttatcaactctttcttactttgctggagttatacaattttttattgtagtaaactttagttgcatagattcaaaattactgccaacttcaacaaatgtttcttatatgacttctaggttccatgcttgggcattaaaaattattatatgctattgaagttgatagctaaagctaaaatagaaaagttcacagaactattgcccctctctctgttaaaaatcttttcattgttttctatgtgtaacatattctgttttctagataaagttaaarctttttcaacagggacagacttaccactaaatcaacgaaacttgagccattaaggtgcccaactccactttcaaaaactgagactctatgaatatgtttacttgcccatagtattttcataaaaattgcataagtaagcaattaacatttaatttaaatgtaattagataaactc

SEQ ID NO: 683077 - DNA, 655 bp, Homo sapiens
atcataaggagctgagcatctgggtctgaacatgggtagaagacatgggcaggagaaagtcatttaggactgtatattgtactcagtttatgccccaacctaaatccatgcaattatgcctttcctccccacccaccctgactgtagccaaggccacttatcttgctttcagactgagcaaaacctaacaaaggtagtgaatccaagttgctgctgctgctgcagtgagtgtcctcatgcacagctctgacttgtaaagattgctgtgcctacacattgaacaaaaaaatcccatgggactctggttttcatagtgcctgccaggagtgattgagaagtgtggttaaggccccatgaagtagtctttgacygatgggagatgagagacagaaagcaatcagaagatatattattctttcttcctcgctgtatgcacagttattctgaaacagtaatttctatagcttctttgaaaacatctcacaagaccaaggaatcagctgcacttgtcacaaagcagtcagtagcttggtgtcactctccttgactgtgttctttttccttcctcacccaaattttcctttctcctttttgctttcctcctacttctgcatgatcacagcccccagaaagcttttgttttggattgttttct

SEQ ID NO: 683078 - DNA, 605 bp, Homo sapiens
cttataggataccaatgctactcctcttcaaataatcaagtaactgtttctagatgttttgttttacctcagagtgatctaaattcatgattagattatgatgaaagaaggaaccctccctctaaagacagagcctcctgaccccaccagggaaggagttaggatgagtgctggttctgcatcttaaattaagtaaaaaaaaaatcttaatcccattaagatcaatcatctttttctaaatctctgtctaacctaagaattattaaaatgtaattttgaccctatttcaaacgaatgaacaactctggccttattatatgaagagagacaggtctctccctgtcctagcttatcatgttatgtttcctaagctaatatgcaatatgtgacatgcccataytgtttttctcatatggaaacaggttgtatattgctggcctgtttgtttgtttgcttgtgggtgtggttgaataaagaaaagtttgattttacagtcccgtatacttgttttatactatacttgttttcagcaagttctacctcttggggtaagggcatttgtaatgttttaatgatagtatgatgtgatagtgtgagctagcata

SEQ ID NO: 683079 - DNA, 668 bp, Homo sapiens
agtagagaaaactctctgctcttaaagaaaatgggataaaattaggtccaccctgaccatcttttttttttttttttttttttttttttgatgaagtgtgctctgtcccccaggtagagtacagtggcacgatcttggctcactgcagcctcttcctcccaggttcatgcaattctcccacctcagcctcctgagtagctgggactacaggcatgcaccaccatgcccagttaatttttgtatttttagtaaatacagagttttgccctgttggccaggctggtcttgaactcctgacttcaggtgatctgcccatcttggcctcccaaagtgctgggattacaggtgcgtgaccatctttcttttgatgaactcaaagtcaacttattagtaaccttaattacatcagcaaaatsccttttgccatataagtaacataatcatagacatgaatgaaatttcatcatattcagtcagtataagaaatcttgggggtacattttagaattctgcctaccacagcaggaaagacatttaccaccagcttgaaatgatggctatctcattatgtgctcgatacaccataagtgtgtcattgccttaaatatattttagtgctgaatgttgccaaatttcatttgttgttattgtatcagtaccaagataaa

SEQ ID NO: 683080 - DNA, 1368 bp, Homo sapiens
gtgctgaaggcaaaagatgaacaagatggtatctctgccttcacacaatttatgagactaataggcaaaaaagtactgtaagcaaattctttctatttggtttgtttgttaaatgcaacaataaaagcatgtacaatctgtagagaaaaacaaggacagtctactctgaatgatgaggtgatgagatgacaggttcctgttctgcaagaccccaggctgcttttgatggtactaagagttaaccacagagcgaagggaaaatgttctgtaacctaagtttggagtgataactttaaagttgagatctcatctgtctttaggaatttctcgttacctccaattttagcagggatatttgacacaaactgcaaagaattattaatcctctaggctctgcatcatggcaatacacttggccagtgtgcttcctgtcttgaatcaaaggttagaaatcatagataaatgaaacctgcaaacaggcttatgttgcttgtaggtgtttcatctttgagttttaggcataaccgcaattggcagtgaaataattaagtaaaatgaatacttgattcctatcaaatctgccaaaaagaaagcaggtattgagttttgaagaaatgccctacagattggtaatctggggtggtggggaggaggatttcctgttttacagatgggtgagcgctctaagggaactaacttgttgtgaagttaatcaaggcagactgtttgtcaaggaagaggctcattgcctaggacagatttagatcaattctggcaggaaggaatatccacaaggggcctttttcaattttatttaatcagttagagaagatggagttaccaactccaagcaggaggasaatatggaatctataaaataggcagagaaatatgtattcaagtgaagtaatttgtttgataatccacagacatgtgggtttctgtaatttcttgataaagtcatatagttcataatttctccaaactggctctagttgtagtcctttacttagtccaaaacctcccactgggattttatgtttctttgctgttctgtctctttcattcctctcaacttttgctttcagaatctcatacatttaatacatcttcttattggctttaaataattccttagtgttgttttgataaaactgtcagaaatttaaaaaattttttatttaaaaaacttttatcttattatcttctgtcaatctttatagacatacaacatgaaaatacatgttatgtatttttttcaggcaaagatgccttagtctacctgttatctgttagtatggtgttcaagaggaatagaaagtgaggaaggaaactaactgttattgaatgcctgctattggttaaccg

SEQ ID NO: 683081 - DNA, 1368 bp, Homo sapiens
gtgctgaaggcaaaagatgaacaagatggtatctctgccttcacacaatttatgagactaataggcaaaaaagtactgtaagcaaattctttctatttggtttgtttgttaaatgcaacaataaaagcatgtacaatctgtagagaaaaacaaggacagtctactctgaatgatgaggtgatgagatgacaggttcctgttctgcaagaccccaggctgcttttgatggtactaagagttaaccacagagcgaagggaaaatgttctgtaacctaagtttggagtgataactttaaagttgagatctcatctgtctttaggaatttctcgttacctccaattttagcagggatatttgacacaaactgcaaagaattattaatcctctaggctctgcatcatggcaatacacttggccagtgtgcttcctgtcttgaatcaaaggttagaaatcatagataaatgaaacctgcaaacaggcttatgttgcttgtaggtgtttcatctttgagttttaggcataaccgcaattggcagtgaaataattaagtaaaatgaatacttgattcctatcaaatctgccaaaaagaaagcaggtattgagttttgaagaaatgccctacagattggtaatctggggtggtggggaggaggatttcctgttttacagatgggtgagcgctctaagggaactaacttgttgtgaagttaatcaaggcagactgtttgtcaaggaagaggctcattgcctaggacagatttagatcaattctggcaggaaggaatatccacaaggggcctttttcaattttatttaatcagttagagaagatggagttaccaactccaagcaggaggagaatatggaatctataaaataggcagagaaatatgtattcaagtgaagtaatttgtttgataatccacagacatgtgggtttctgtaatttcttgataaagtcatatagttcataatttctccaaactggctctagttgtagtccyttacttagtccaaaacctcccactgggattttatgtttctttgctgttctgtctctttcattcctctcaacttttgctttcagaatctcatacatttaatacatcttcttattggctttaaataattccttagtgttgttttgataaaactgtcagaaatttaaaaaattttttatttaaaaaacttttatcttattatcttctgtcaatctttatagacatacaacatgaaaatacatgttatgtatttttttcaggcaaagatgccttagtctacctgttatctgttagtatggtgttcaagaggaatagaaagtgaggaaggaaactaactgttattgaatgcctgctattggttaaccg

SEQ ID NO: 683082 - DNA, 1392 bp, Homo sapiens
tagttgtctgaatcgcaatcatacacactgacatcaaatatcttattaaagatttgcctttagaacgttccatcagaatgatttgcaaagccattgggaagagatttttatgggaacktgatgtgctctatttatttagagaaaacgatgctttccaaagttaaatgaccatattgacagaaacacaaaatagaacctaccgttggcctcatcactcatcctgtttcccatgactgaaatcagaatgcaaatttgttgacatctttctttatgttaagcactcaatggggcactggagacatggtgatgaataaaactcagttctcgcctttatgaaactcccagcctaataaggaggtccaagagttacctgacatttaaagcttttgttatcccatggtcagaattcttcccttgcacattaattgttgaagatttcccctgtaaagttatagtctaaaattgcaatgttagtctacgatgcttctatcattaaaactatactttctccccaagaatttttacacttctttaattgacccacagcattttcctgatgaagtaatactaaactaaaaccttgaatgcgtataccctctacatcgctcaggctttagataactgggggttagtaatcaatcaccttcatgttttttggcctaggctctgtacatttcagtagtttattcaaagggaatcattcttttcctgagtacaagaaatagtgaatctgactcctcactgaccaaacccctgaccaatgtggcagagtcccctgaacacttctggggtggccatgggtacataccacttaggaggagcatcaaggtccactctctgtacccttaagaagtagcttggcatggtggcgccattctgagcccaggccctccttgggactgagataagatatgacttcagcctgaggccatttctcacacttgaaaaagtaagacactcctatccccatcccattccagctacccagcctccaaggaagtcatccaacttcgcagctatacccacatattgctcaatttccccaaatcagtctcattatcaaaacagtcgatcatattaactcttcttatgaaattacctctctttctgtggtgctgtggctgttgaaggaggaaaacctggcattgatagactatgaatgtgcttcaggggtgggtggtgaggatatacagcaaaggtgaattgccctttggtttcagaagttacctcatattccacttctgctccactatttcttctagtagacagaaagttcttttcaacagccctaacctattgctgttccaaaggttagtcaatgcaaaaaaaaatgcagacacttccgggtttgcaggtgaaattgagctaatcctctgaccaattaattcatca

SEQ ID NO: 683083 - DNA, 1392 bp, Homo sapiens
tagttgtctgaatcgcaatcatacacactgacatcaaatatcttattaaagatttgcctttagaacgttccatcagaatgatttgcaaagccattgggaagagatttttatgggaacttgatgtgctctatttatttagagaaaacgatgctttccaaagttaaatgaccatattgacagaaacacaaaatagaacctaccgttggcctcatcactcatcctgtttcccatgactgaaatcagaatgcaaatttgttgacatctttctttatgttaagcactcaatggggcactggagacatggtgatgaataaaactcagttctcgcctttatgaaactcccagcctaataaggaggtccaagagttacctgacatttaaagcttttgttatcccatggtcagaattcttcccttgcacattaattgttgaagatttcccctgtaaagttatagtctaaaattgcaatgttagtctacgatgcttctatcattaaaactatactttctccccaagaatttttacacttctttaattgacccacagcattttcctgatgaagtaatactaaactaaaaccttgaatgcgtataccctctacatcgctcaggctttagataactgggggttagtaatcaatcaccttcatgttttttggcctaggctctgtacatttcagtagtttattcaaagggaatcattcttttcctgagtacaagaaatagtgaatctgactcctcactgaccaaacccctgaccaatgtggcagagtcccctgaacacttctggggtggccatgggtacataccacttaggaggagcatcaaggtccactctctgtacccttaagaagtagcttggcatggtggcgccattctgagcccaggccctccttgggactgagataagatatgacttcagcctgaggccatttctcacacttgaaaaagtaagacactcctatccccatcccattccagctacccagcctccaaggaagtcatccaacttcgcagctatacccacatattgctcaatttccccaaatcagtctcattatcaaaacagtcgatcatattaactcttcttatgaaattacctctctttctgtggtgctgtggctgttgaaggaggaaaacytggcattgatagactatgaatgtgcttcaggggtgggtggtgaggatatacagcaaaggtgaattgccctttggtttcagaagttacctcatattccacttctgctccactatttcttctagtagacagaaagttcttttcaacagccctaacctattgctgttccaaaggttagtcaatgcaaaaaaaaatgcagacacttccgggtttgcaggtgaaattgagctaatcctctgaccaattaattcatca

SEQ ID NO: 683084 - DNA, 1175 bp, Homo sapiens
ctttgcagatcagcttaaaagtaaaagaaatcttggggctgtattcatgaaaacagagtttacagatcaaggaaaatagtagtataattctactgctttctgtaataaccaaattcaagagtttctgcttgatctgaatatgttacataaacagataaatattagtgtatttccagctcaggtgactaggattgtgaactatctggttaggaaattctttgcagaattgttcaagaaaagttgaacaattccaaggagaggaaagaacaaaactataagctgactttggatacttgaatttcaaatatgcagatgaggaattacataaattccaggttttccagaataatcamaataaagtattggttcaaagaggttttccacgatccaccaaaccaaataattcacccgttattttctgccatgaaaatctatgattttcctcacagaatgtataattatttgtaattatgagtcttatatgggtatgagaagttaaattttattttaactggtggctctagcattagcttagagagtggtttggcttagtttggtttggtttggtaaggtgtagggaaagacctaagccaggtgatcctaagggcctggctggaactcatcttgaaagaagactcacacacgactcttcacggatcaaggaaaggaatttacttcggcaaccaagggaggaagaagactcaatgatgatggaagcctaagaccggatgtgtgaagggtcagtgagaaagaccaacgacagtagacaaaaggatacatgtggactttctttcatttcttgaaaaatggtgagctatatggtgagagtgacccaacacacaacacattaatatatattaattattaatacagttttttaaaaattatttttaaacatggccaagatagtagcaagaccacaggagttatgcagaggttacataaggcaagaaaacaaaaatcacaaaggtaaattagaaggaagatgtattctctctaggagtatctgccgttatctggcattcaagaggttgtgtgttaaagaccttctgatcaattgcataggcctcagccgaatgtgagactgggcaaaaatccctgcctgaattcaagacccctcaaaggagaactttagtggctgaaacaggcaaagcaaaaacatgaacaaccatctc

SEQ ID NO: 683085 - DNA, 1332 bp, Homo sapiens
cgatgccgtcctttccacctgttacaaagccctgtgaaggcacacatgagaggtattatatacacatcaaaatgaccaattacccacttggccccaggaggattccccgcaggtaaggaagctttgtggatgctaccttcctaaatatatgagatggaaaactctggtgataacaatgttcgaataatattttttgggagcatttctcccatacttccctaagcaagattaagcacgttctcagcatgtgtccactgcactctcctcagaacaatggttggcagctggcccactgatcaaggatggctctgcttgtgcccagtctcccaaccagaatgtggttcctacagaatggaaccagcctcaaaacctagcagagtttctggtatctcacatactctgaccaaatggattgaagttaacatcacagtttaaaattattgttaaacatttaaaaataaaagtcatgtccagaagaaaacatcattatttattaagagtagcttaggtactttatataatgaaacgatcctatttcattcaatagacacaatttccataattaaaatccagattaatttttacaaaaacctggaaagtaaaaagcttaacatattggatattttttactgaacagtgatctttattcctgttctaagcttataattttttggctgtactagttttcctttctggtaatttattatatataccaactgttcttagaggtttttttttttttctaagaaaaaagctgagtaattcactgctttcttagcaacttttaatttaatgcatttttatgaagtttacaaagaaataatatttccaagtgtataacactaaatatccttattcttatatagaatttgtacccaggaaaattcaatccccaaattaaattaaaatgcaatatattatattgtgatatccttgtcttttctcatgattttgcagcttaatttaccaaacaacaagagcttaaacaagttacaccatatctacttctgggcctacagaaattctttcttcttctttaatcttttctaatacttgcagtttaaccaaaaacatatgtaccaataaaaaaacaaaacaaaacaaaacaacacctttgccagcaaaacaaccrttacagttgcatacctaacaagaacctacttttgtagtagaatcaacacatttgcctaaggacaggtaaaagaaaattgagacatgggttaggagtagtaggtggcttcaactggaggtcagagggcacagatgaagtggtactaccagcaacctggaaataactgaaaagaagttgatatttgctggcaagttgattga

SEQ ID NO: 683086 - DNA, 740 bp, Homo sapiens
actgcaacctgcgcctcttgggttcaagcaattctcatgcttcagcctcccaagtagctgggactacaggcacccgccaccacatctggctaatttttgtatttttagtagagacaggattttgccttgctggccaggctggtcttgaactcctggccttaagtgatccacctacctcagcctcccaaagtgctggaattacaggtgtgagccaccacacccggcctgaattgtcttttatytcaagttccttcattgctactcaaagtgtgctccacaacccagcacagccacatcatcggagagcttgctagaatgttgggccctatcttagacctactgagtcagactctgtattttaagaaggtgcccacgtgactcacgtccacgctaaagtttgaaaaatgctgagctacttcaacctggactttgtcacctataatagaattaaatccccttcatcagttgcgacaacagaaaccccaactcaaacttccctaaatcattagggtatctttgattggccaggtgcaatggcccacatctgtaattctagcactttgggaggctgaagcaggggcatcgcttgaggccaggagtttgagaacagcccaagtaacgtagcaagagacctcatctttacaaaaagttaaaaaaaagaaaagaaaagaaaagaaaaagaaattagctaggtggtagcacgagcctatagtcctagctactcaggaggctgagctgga

SEQ ID NO: 683087 - DNA, 1466 bp, Homo sapiens
ctcaggaccccactgtggccttcagcctcatcatcagccagtttcctagagaattaggttggttttatgtattgagtaacagcttaaccaataacccactggtcttcgattgcattgctcattgcctttttgtgtataggttctctagacacctccatggaagaaaacctcattgcttaaggtttgtttcaaaaatttctggattcattgctagtattgcataagctcattcattctcccctgagttcgatgaaaaacacccaaattcctctaattctcatgttcctctgtgatattgagacacagcgtccaatagttttccaacggaatagcttttcttacctgggaatgtcccccccagatagttgacactcaggaacagcacggawcaataatggctctgcctctgtctcatcatcttcttggaaaaaatgtgagatgtcacaaagggtctcagaaacacagggtagctccctgtataccctggaaaacaacaacagaatttttactatgaatataaggtaggtgcctgatgatagcataggctgtgcaggaagattttatgttaatagccatagactcaatattttatcttagggaagtcattcctcaggcccctacgactccatctcacctctcagactcccatgactctttcttacatctcattatgttaaatttaactggctctctgtttcccactatatgctgctctttccatcctaggaagcagacgtcagtcagttctcaacatctagcatttgccacaaacattggtttcataataggtcaacaagtatgttgacctatataaccttgctaagaattttagggaaaggatgagattcctaatttgtagtctcccttcatccataattggtgcccgagagaataggaccctaaaatgattgggattgcagggcattagtgagattgggcatgttttataagaacccatggaacagttatctcctcttctcccttctgcctgcaaatggtgagaggggttgcataaagcaacaaaaatgctcacagaaaaagaaaattatggatattgtacacactttcttttcccatcaaggatccttattcagatatggaacatgagagtcctatgctagatccttttctcttcttcatttttgaaggcttggtgctgtcctcctatggctggcaggaatcaagattgaggttaggagtgatggagtgtcctttatgccaagatattcaatggccaatatgacagccactagccacacctgcctatttacatttagttttaaattgttaaatgtgaaaatcagttcctcctttgaagtagccatatttcaagtgctcaaaagccacacgtggctcttgcctgccaccatgtaagacatgcctttgctcctcctttgacttctgccatgatggtgaggcctccccagccacgtgaaactaaaagaatttttctgggtaatggacat

SEQ ID NO: 683088 - DNA, 599 bp, Homo sapiens
tgaaaaaattgaataatctaagtgtaacaaagtctgggcactttgtaacattaggtcaatatgctgcattctgggattttatgaaggtcagacgtcatgagtggacaacgacatatattggaacaattccacataaagagatakgcaaatccagtgtaagaagcacaaaatgctattgtagtatggcaaaaagaaattactatctatttcatctgcactagaatctcatttgattagcaatatttccatcagcccaagacaatccagcccctaaatacccaaaaagatcggaactgtatttttaggaggatttttcggggtcgcgctgagtataactgttcttaccttcatttagtctttgtgatggctaattttatgtgttatcttggccaaactttggtgtccagttgatttggtaagtctcatgaaatcccttgaaagctttcggaataaagacagaagtttcctgatgcaggactgtaacatacaaactcttcctgagtttctagactgcctggcctgctttgtgaatttttctctcgagactgcaatatcaactccaacctgaatttctagtctgctggtcttccctatggaat

SEQ ID NO: 683089 - DNA, 1092 bp, Homo sapiens
acattattattattttttaccaatcaaatgggtgtaaagagcagtcttcttattgtaaccttttcaggtgaatgtggcaggagaatttcaagttatgtaatccttttgctcctggatttagaatttatactaattacattaatggctattctctggttgagagaaaagacattccccttgattaaatgcatttgatttaaagaatccttctcatagaaagagcctagacagtggatggtatttttctgattgctcccaccacaagtggtttaatatatatcatagagttgatcatcatagcacacatacaaataaagaagaggtagtctctattatgcatagctaataaacttaaaggttgagggaatttacagaagttatccattgattaaactgagctagcaagtcagctaagatgctattcatttcctaagcaccaacgaggaattacgaactatgccttttcttttttctggagggcacttactccagttatccacctggctcagtcacacattttctccaagtctttgcttaaatgttctcttctcataaatcttccttgacaacaatcttcccatatgtgtttgtgtatgtatgtgtgtgcatttgataatgtactcaaggtttttaaataaaatattatatatcaacgtatatttgcaaatatcatcagagcaaaatatagtacatttttgaaataaataatatattgtcattttgtttatattcattttagtggccttcaatttgcaaattctttttatgcaagcattctctggaatatttcattttcttcacaagttggaattaacattaacaaaaggatcaaagggtagctgtacacacagatgtcatatcttttcaactagaattttggtaacacagaaaaaacaaagattataacaaaaggartatagtgacatatgactaaaatcactaagcttaaactgtgcataagtaaaacctgacttggtgtaaggacttaacctatggagaattctggagcactaaataagactgaatggtgctttttgcagacttcaacatgaggtcttggacaaatcagctaacttccaaagagtgcccagg

SEQ ID NO: 683090 - DNA, 623 bp, Homo sapiens
tgacttacctctcattctttgaatagcactatccctttcttccgtccctctctccctcccttctttttcttttttctgtctctctctcatattttattttctttcacagacacttccccagaaaaatcttaaattgtaaaagtattgtagtcatggctttggaatctaattgcttggttcaccacttgctagttcagtgatactgggcaatttaccttgactcccattttttttttttttagttaacacctaataattacccatatttatgtgattaagaatgatattttgatacaaatatacaatgtataatgatcaaatcaaagtaattagtgtgtctawtacctcaaacatttatgatttctttacatttatgatttcttcctatcttctagctttttggaaatacacaaaaaattattgttaaccatatttactctacagtgtttatagaacactagaacttattccttctatttagctgtaatttgcatctattcaccaatacctctctatcgcccctgcccacttgcccttctcagtctcaaataaccacaattctctctacttctatgatgtcaatttttttagctcttacatttcagtgaaatatgaagtattta

SEQ ID NO: 683091 - DNA, 623 bp, Homo sapiens
tgacttacctctcattctttgaatagcactatccctttcttccgtccctctctccctcccttctttttcttttttctgtctctctctcatattttattttctttcacagacacttccccagaaaaatcttaaattgtaaaagtattgtagtcatggctttggaatctaattgcttggttcaccacttgctagttcagtgatactgggcaatttaccttgactcccattttttttttttttagttaacacctaataattacccatatttatgtgattaagaatgatattttgatacaaatatacaatgtataatgatcaaatcaaagtaattagtgtgtctaatacctcaaacatttatgatttctttacatttatgatttcttcctatcttctagctttttggaaatacacaaaaaattattgttaaccatatttactstacagtgtttatagaacactagaacttattccttctatttagctgtaatttgcatctattcaccaatacctctctatcgcccctgcccacttgcccttctcagtctcaaataaccacaattctctctacttctatgatgtcaatttttttagctcttacatttcagtgaaatatgaagtattta

SEQ ID NO: 683092 - DNA, 623 bp, Homo sapiens
tgacttacctctcattctttgaatagcactatccctttcttccgtccctctctccctcccttctttttcttttttctgtctctctctcatattttattttctttcacagacacttccccagaaaaatcttaaattgtaaaagtattgtagtcatggctttggaatctaattgcttggttcaccacttgctagttcagtgatactgggcaatttaccttgactcccattttttttttttttagttaacacctaataattacccatatttatgtgattaagaatgatattttgatacaaatatacaatgtataatgatcaaatcaaagtaattagtgtgtctaatacctcaaacatttatgatttctttacatttatgatttcttcctatcttctagctttttggaaatacacaaaaaattattgttaaccatatttactctacagtgtttatagaacactagaacttattccttctatttagctgtaatttgcatctattcaccaatacctctctatcgcccctgcccacttgcccttctcagtctcaaataaccacaattctctctacttctatgatgtcaatttttttagctcttacatttcagtgaaatatraagtattta

SEQ ID NO: 683093 - DNA, 2485 bp, Homo sapiens
  misc_feature 2385, 2386, 2387, 2388, 2389, 2390, 2391, 2392, 2393, 2394,2395, 2396, 2397, 2398, 2399, 2400, 2401, 2402, 2403, 2404,2405, 2406, 2407, 2408, 2409, 2410, 2411, 2412, 2413, 2414,2415, 2416, 2417, 2418, 2419, 2420, 2421, 2422, 2423: n = A,T,C or G
  misc_feature 2424, 2425, 2426, 2427, 2428, 2429, 2430, 2431, 2432, 2433,2434, 2435, 2436, 2437, 2438, 2439, 2440, 2441, 2442, 2443,2444, 2445, 2446, 2447, 2448, 2449, 2450, 2451, 2452, 2453,2454, 2455, 2456, 2457, 2458, 2459, 2460, 2461, 2462: n = A,T,C or G
  misc_feature 2463, 2464, 2465, 2466, 2467, 2468, 2469, 2470, 2471, 2472,2473, 2474, 2475, 2476, 2477, 2478, 2479, 2480, 2481, 2482,2483, 2484: n = A,T,C or G
ccattgccttctgctccctctgtctcctttttacaaggacatttgtgatggcatttagggctcactcagataacccaggatgatctcctctcaaatttcttttttctttcttcttcttttttttgagacagagtcttgctctgccacccaggctagagtgcaatggtgcgatcttggcttactgcaacctctgcctcctgtgttcaagtgaatctccctgcctcaggctctcgagtagctgggattacaggtgccgccaccaccacacccagctaacttttgtatttttggtagatacgggcttttcaccatgttgaccaagctggtctcgaactcctgacctcaggtgaatccacctgcctcggcctttcaaagtgctgggattacagaatgagccactgtgcccagcctcaaatatcttaaatacatctgcaaatgccctacttcaaataaagtcaggctccatggattaacacttggacatgcctttcagaggcattattggcctaccacagaatgggtatataaatatcaaaacattaagaaaagtaaactccaaatagtgggtatctttgaagacaaatcaaggagtagtaatctatttcgcaaaaaaaacagttattctgagtagtagttgtgaaggtgtttgttttgtgataattccctaaggtgtatacattttcttaggatttgacattacatatatatgtttatgcataaattattcatagatatacatgtaattaaaatttaagaaataaattataatgatgcaatcttctaatgttttttaaatttttttwaaaaaatgtgaccttttaggaaataatgcagtcacgtagataaatttaatacttccaattaaaaaaagtagatatagtattcttttattataaaattattttttatctattctgctagctctctatctcactatacatatagttatgtatcttccatctatatctaaactttttggagtatgaaatttgaaacacatataactattttacagctattataataattgtatgtgcttattccttttaaacttgaaaaataccaaaaagtgcaaagaagaaacaaacaaacaaaaatcacccaaatgaataccaccaacagttaacattggttgtttctgaaaatttggggtgatttattttgttttctttgtactctttggcatgaagtatttttataaaataagcaaagtcattactataaaaatccctgaaatgaaacctatgtagaaattgtaataatgaagataacaaagagaggaatcactgcttacatagccatttatttagtgcttcccatctactatgcattattcagtgtgtattacatttcgtttttcatcatcacaataattttgcaagatatatacatacatataaaacataatattgtgtctgtatttattatagatgataaaacagagttgttttgtgagtttaagtgacagccagcaaacaatattgctgcgttatggtacccaagagttctggcttcagtgtgaaaaaaaatattcaatgttttccaccgccgctcaggatgatactaattcaattatgactgaatcagatggatgtattgacaattcagaagtgcagattatttaatgaaaccatgtacgtgtgcatgtttgttttctcctcaaatcttgctccccttcctcattctttcaaccaacacctaacacctccctcaaaacacacaatacacacaaacacaactaatgccttgagagctgaggccatagctgacacatatttcaacaccagagtctagcacagaatctagcactaaaagtctcccccagagtgtttactataaataaactagtgatgagactttagcttaaatccatgaccatcaactctgctgccactcttccaagcaagagttaggtccgtcattgaagctatgtagttgtgatttatgcagaaactttgtaaagaaaaccagagcttgggtagtgggtagcagtaatctcttcttaatttcccctatgaagagataaactcattgcagtctatagctaccaaacacagaggtcacaagacttctgtgacaagaactcccactgctatggtctccacaaataatgctaatggaaacagagaggaaaaacaattattaaacaatcaaataaaggtctgactgcatgctctttttcaagattttgcatctgaggatatcagaaaggaaagcaattcagaggtgcaaattgcctaatgtgcaaatcaataacatgctggtctaatgctcaattttatgagattgctgttatataaatgtagggaaaagcaaataatcaggagccaaaattgtctcttatcagaggaagttcataattagtttgcattttcacagaattcnnnnnnnnnnnnnnnnnnnnnnnnnnnnnnnnnnnnnnnnnnnnnnnnnnnnnnnnnnnnnnnnnnnnnnnnnnnnnnnnnnnnnnnnnnnnnnnnnnnnt

SEQ ID NO: 683094 - DNA, 2485 bp, Homo sapiens
  misc_feature 2385, 2386, 2387, 2388, 2389, 2390, 2391, 2392, 2393, 2394,2395, 2396, 2397, 2398, 2399, 2400, 2401, 2402, 2403, 2404,2405, 2406, 2407, 2408, 2409, 2410, 2411, 2412, 2413, 2414,2415, 2416, 2417, 2418, 2419, 2420, 2421, 2422, 2423: n = A,T,C or G
  misc_feature 2424, 2425, 2426, 2427, 2428, 2429, 2430, 2431, 2432, 2433,2434, 2435, 2436, 2437, 2438, 2439, 2440, 2441, 2442, 2443,2444, 2445, 2446, 2447, 2448, 2449, 2450, 2451, 2452, 2453,2454, 2455, 2456, 2457, 2458, 2459, 2460, 2461, 2462: n = A,T,C or G
  misc_feature 2463, 2464, 2465, 2466, 2467, 2468, 2469, 2470, 2471, 2472,2473, 2474, 2475, 2476, 2477, 2478, 2479, 2480, 2481, 2482,2483, 2484: n = A,T,C or G
ccattgccttctgctccctctgtctcctttttacaaggacatttgtgatggcatttagggctcactcagataacccaggatgatctcctctcaaatttcttttttctttcttcttcttttttttgagacagagtcttgctctgccacccaggctagagtgcaatggtgcgatcttggcttactgcaacctctgcctcctgtgttcaagtgaatctccctgcctcaggctctcgagtagctgggattacaggtgccgccaccaccacacccagctaacttttgtatttttggtagatacgggcttttcaccatgttgaccaagctggtctcgaactcctgacctcaggtgaatccacctgcctcggcctttcaaagtgctgggattacagaatgagccactgtgcccagcctcaaatatcttaaatacatctgcaaatgccctacttcaaataaagtcaggctccatggattaacacttggacatgcctttcagaggcattattggcctaccacagaatgggtatataaatatcaaaacattaagaaaagtaaactccaaatagtgggtatctttgaagacaaatcaaggagtagtaatctatttcgcaaaaaaaacagttattctgagtagtagttgtgaaggtgtttgttttgtgataattccctaaggtgtatacattttcttaggatttgacattacatatatatgtttatgcataaattattcatagatatacatgtaattaaaatttaagaaataaattataatgatgcaatcttctaatgttttttaaatttttttaaaaaaatgtgaccttttaggaaataatgcagtcacgtagataaatttaatacttccaattaaaaaaagtagatatagtattcttttattataaaattattttttatctattctgctagctctctatctcactatacatatagttatgtatcttccatctatatctaaactttttggagtatgaaatttgaaacacatataactattttacagctattataataattgtatgtgcttattccttttaaacttgaaaaataccaaaaagtgcaaagaagaaacaaacaaacaaaaatcacccaaatgaataccaccaacagttaacattggttgtttctgaaaatttggggtgatttattttgttttctttgtactctttggcatgaagtatttttataaaataagcaaagtcattactataaaaatccctgaaatgaaacctatgtagaaattgtaataatgaagataacaaagagaggaatcactgcttacatagccatttatttagtgcttcccatctactatgcattattcagtgtgtattacatttcgtttttcatcatcacaataattttgcaagatatatacatacatataaaacataatattgtgtctgtatttattatagatgataaaacagagttgttttgtgagtttaagtgacagccagcaaacaatattgctgcgttatggtacccaagagttctggcttcagtgtgaaaaaaaatattcaatgttttccaccgccgctcaggatgatactaattcaattatgactgaatcagatggatgtattgacaattcagaagtgcagattatttaatgaaaccatgtacgtgtgcatgtttgttttctcctcaaatcttgctccccttcctcattctttcaaccaacacctaacacctccctcaaaacacacaatacacacaaacacaactaatgccttgagagctgaggccatagctgacacatatttcaacaccagagtctagcacagaatctagcactaaaagtctcccccagagtgtttactataaataaactagtgatgagactttagcttaaatccatgaccatcaactctgctgccactcttccaagcaagagttaggtccgtcattgaagctatgtagttgtgatttatgcagaaactttgtaaagaaaaccagagcttgggtagtgggtagcagtaatctcttcttaatttcccctatgaagagataaactcattgcagtctatagctaccaaacacagaggtcacaagacttctgtgacaagaactcccactgctatggtctccacaaataatgctaatggaaacagagaggaaaaacaattattaaacaatcaaataaaggtctgactgcatgctctttttcaagattttgcatctgaggatatcagaaaggaaagcaattcagaggtgcaaattgcctaatgtgcaaatcaataacatgctggtctaatgctcaattttatgagattgctgttatataaatgtagggaaaagcaaataatcaggagccaaaattgtctcttatcagaggaagttcataattagtttgcrttttcacagaattcnnnnnnnnnnnnnnnnnnnnnnnnnnnnnnnnnnnnnnnnnnnnnnnnnnnnnnnnnnnnnnnnnnnnnnnnnnnnnnnnnnnnnnnnnnnnnnnnnnnnt

SEQ ID NO: 683095 - DNA, 3017 bp, Homo sapiens
gcgggggtggagtgcatccgaaaagaactgaggaggctcccgctggagctgcaggacccagctcttcgccttggttcccttgagcacaagcttggtagacttcacataagagtactaggccatggctccgggagacttctgtgcggagaggctgaagccggctcaggacgagtgtgtgacctggagcagcaccagggcggggaggaaaagaagtggaggcaaagtaaacactccctgacagcgtaagtctgtccagaacccgccttcgtctttacccaaacgctgaatggctgagatttccacttccggttttctgccagggagctaccgcggccgcagagggccgaaaggtgtccgcacgcatctgctccctcgtttcctctcgaggagcccctgaggatttgtgcctcccagaagtggggaaagctcgcccaaggcgccggtgctgacggtggcgggactgccgggctcgctgtggaaccgcctcccgctagagctgcgggctgatgacggtccccgcgggggcgggaagcggcttaggctgccctcgccggcctgcggcggcgagtctggaagcgcggtccactcgtgcgcgggtcactcggggctgtgcctcgcgcgactgtgtgtgcaggaaacaagcaggaaataccctaaaatagaatgaagtgccatgttgagggccgcggacgtcgcgagtgctgtgggaatgtgggctaaggtggagagttatggtggcgcgtgttacaggctcaggggtcaggaagaagcctaatcgtggaggcggcatctgaggagggtcttgaacgctgggcaggcttttgcycgatagagatggaggaagctagtcctgtctgctggaggaaacagggcagaggcgaggagggagccgtgcagcgctggtgtgaggagccgcgagcaggccaggcctgtaaagcagagtgatgggaaccaggatagagaaggcaaatcggagtcctgtggtcgctgaagaatttgaatgaaatcagtaaacaggtgacagggatccatcgcaagagcatgggatgaaacgaggagtagtccacggtgattcctccgcagcggtgggtattattaatcgcttatgtgacaccaaaacggtgggtattattgataacgtatgtgacaccaaaaccaccccactcaagttgtggctctttccctaaagtagaaaacagagaccagttgggttccaagcatccacgaagatcttactaaatttgtgatccccagtggcaccatggagtcaggattggctcatctcaaacctgactcagaaacaaaaccatctcaatgtgcagagattagcgtccttactcgctatcatattttctggtgttttcacagtgctgcgcttcctaatccccattccaccacaatccacatgccatgatgcccagaggcattaacaaaggagacacacaggggctcctcacgttggctttccatggttttgatgaaaatctgtttcctcatctcatacaatgtggttagtaatagtatcatttagagttgaagaattaaatggtacgaattatatagggtgcttattataacctacatggaaaatgcctaggatatgttagctatgctcatcaccaacatcgttatatgatggtaataatcagatagttaggaagggcgacgccaagaaaatggatacatgctctgagggaatgaatgtggagagatcagaaggtcaagaacaaagccgtacaacatgtctgcagtaaagggatagagaaaagaaaggctataaaagaaggaatgaaacaaagttagagtaaaattataaaatcaaagctaaggacaatttccagaaagggtaatatcatttaatatcatagaagtttaggagcacaagatggaaaaatggcctgtgggtaactgacattgaggcgatctttagggaaactccatttccgatagagaagtagacagaaagtcagcttgaagcagggactaggtgaagaagctgttggctggtcgcatggggaaataaataagggatcgcatatgccatatttctgggtttctttctttcttgcccagcctctatatatgcctagagtttggcgaaaacttacaaaaaataaaaatgaaaccaatttcgtttgtagactcaaatacaatgctttgtgttagaatcaagataaattcatgcctcttccttctattgtcaccatcagttttgaaattaaacatgagcttttcttcttcattaaaatcattttcaactccttccaggtgttggtggtttggggcgttacataagcagtcaggtcttgatgagtagaggaggagggaacaaacactttcagcaaagagagaattctgaaattccgctcatatttttctccagtaactttcctatgtttgtgaggatgttcagtcataaagatcctagtgaaatttttttcaagcttgactaatcttaatcactgtggacgtttgtttaaaatgtgtattcccaggcctcacacctgctgattctgattcaggagatcacggatgggactcagaatacatgtgtttgagaagtaccacaagtggttcttatggtcaggcaaatttgggaatctaaccagaaatttatgtttttatgactggcagctagaaaagattcctagagtctttgctttttgaaaataaaatatttcttttttaaaaggaaaattgtatgactagatacaacatttatacatgtggcacatgtactatactgtgtgcttttgtcatatttacagttaaagatgtgtaagaacactctgagaaaaattatatattaaatgcaaagaggggtaagtcagggtgggggagaaatgggaagggtgtgcttattgttgctaaaaggtaggaaagccagaatgatagccatctaaggttgcaaatagcacattgtaagttgagggagcttcacaatcatgtctgaaaccttctttgatatactgagttgtaaacagtggctttggacaagatttgagggagaaacaaac

SEQ ID NO: 683096 - DNA, 3017 bp, Homo sapiens
gcgggggtggagtgcatccgaaaagaactgaggaggctcccgctggagctgcaggacccagctcttcgccttggttcccttgagcacaagcttggtagacttcacataagagtactaggccatggctccgggagacttctgtgcggagaggctgaagccggctcaggacgagtgtgtgacctggagcagcaccagggcggggaggaaaagaagtggaggcaaagtaaacactccctgacagcgtaagtctgtccagaacccgccttcgtctttacccaaacgctgaatggctgagatttccacttccggttttctgccagggagctaccgcggccgcagagggccgaaaggtgtccgcacgcatctgctccctcgtttcctctcgaggagcccctgaggatttgtgcctcccagaagtggggaaagctcgcccaaggcgccggtgctgacggtggcgggactgccgggctcgctgtggaaccgcctcccgctagagctgcgggctgatgacggtccccgcgggggcgggaagcggcttaggctgccctcgccggcctgcggcggcgagtctggaagcgcggtccactcgtgcgcgggtcactcggggctgtgcctcgcgcgactgtgtgtgcaggaaacaagcaggaaataccctaaaatagaatgaagtgccatgttgagggccgcggacgtcgcgagtgctgtgggaatgtgggctaaggtggagagttatggtggcgcgtgttacaggctcaggggtcaggaagaagcctaatcgtggaggcggcatctgaggagggtcttgaacgctgggcaggcttttgctcgatagagatggaggaagctagtcctgtctgctggaggaaacagggcagaggcgaggagggagccgtgcagcgctggtgtgaggagccgcgagcaggccaggcctgtaaagcagagtgatgggaaccaggatagagaaggcaaatcggagtcctgtggtcgctgaagaatttgaatgaaatcagtaaacaggtgacagggatccatcgcaagagcatgggatgaaacgaggagtagtccacggtgattcctccgcagcgrtgggtattattaatcgcttatgtgacaccaaaacggtgggtattattgataacgtatgtgacaccaaaaccaccccactcaagttgtggctctttccctaaagtagaaaacagagaccagttgggttccaagcatccacgaagatcttactaaatttgtgatccccagtggcaccatggagtcaggattggctcatctcaaacctgactcagaaacaaaaccatctcaatgtgcagagattagcgtccttactcgctatcatattttctggtgttttcacagtgctgcgcttcctaatccccattccaccacaatccacatgccatgatgcccagaggcattaacaaaggagacacacaggggctcctcacgttggctttccatggttttgatgaaaatctgtttcctcatctcatacaatgtggttagtaatagtatcatttagagttgaagaattaaatggtacgaattatatagggtgcttattataacctacatggaaaatgcctaggatatgttagctatgctcatcaccaacatcgttatatgatggtaataatcagatagttaggaagggcgacgccaagaaaatggatacatgctctgagggaatgaatgtggagagatcagaaggtcaagaacaaagccgtacaacatgtctgcagtaaagggatagagaaaagaaaggctataaaagaaggaatgaaacaaagttagagtaaaattataaaatcaaagctaaggacaatttccagaaagggtaatatcatttaatatcatagaagtttaggagcacaagatggaaaaatggcctgtgggtaactgacattgaggcgatctttagggaaactccatttccgatagagaagtagacagaaagtcagcttgaagcagggactaggtgaagaagctgttggctggtcgcatggggaaataaataagggatcgcatatgccatatttctgggtttctttctttcttgcccagcctctatatatgcctagagtttggcgaaaacttacaaaaaataaaaatgaaaccaatttcgtttgtagactcaaatacaatgctttgtgttagaatcaagataaattcatgcctcttccttctattgtcaccatcagttttgaaattaaacatgagcttttcttcttcattaaaatcattttcaactccttccaggtgttggtggtttggggcgttacataagcagtcaggtcttgatgagtagaggaggagggaacaaacactttcagcaaagagagaattctgaaattccgctcatatttttctccagtaactttcctatgtttgtgaggatgttcagtcataaagatcctagtgaaatttttttcaagcttgactaatcttaatcactgtggacgtttgtttaaaatgtgtattcccaggcctcacacctgctgattctgattcaggagatcacggatgggactcagaatacatgtgtttgagaagtaccacaagtggttcttatggtcaggcaaatttgggaatctaaccagaaatttatgtttttatgactggcagctagaaaagattcctagagtctttgctttttgaaaataaaatatttcttttttaaaaggaaaattgtatgactagatacaacatttatacatgtggcacatgtactatactgtgtgcttttgtcatatttacagttaaagatgtgtaagaacactctgagaaaaattatatattaaatgcaaagaggggtaagtcagggtgggggagaaatgggaagggtgtgcttattgttgctaaaaggtaggaaagccagaatgatagccatctaaggttgcaaatagcacattgtaagttgagggagcttcacaatcatgtctgaaaccttctttgatatactgagttgtaaacagtggctttggacaagatttgagggagaaacaaac

SEQ ID NO: 683097 - DNA, 1318 bp, Homo sapiens
attccttaaaagataaatgacccgagttttggccttttcctatatgyaagataacatctgatgggattagcgatgatgcctctgtaatctataagcaggattactctcacacccacactctgatgtgagtctgctttaatgtgactcctaagcaagttcaatgtgattttgcatgtgctgaacccatttcccccaaacagaaaatcacagtctcgcaaatgtatccttctctcttctctcttacttcctacctaaactggaatattctccttttcccctcctccactgaaatcccactgtctcattcaagaatcattctttcactgccagagacttcatgggtattttttaatttattttttattttttgagacagagtctttctttgtcacccaggctggagtgcagtggcgcgacctcggctcactgcaacctctgactccctggttcaagcgattctcctgcctcagcctcccgagtagctgggattacaggcgtgtgccaccatgcccagctaattttttgtatttttagtagagacggggtttcactgtgttagccaggatggtctcgatctcctgacctcgtgatccacctgccttggcctcccaagtgctgggattacaggcatgagccaccgcgcccggccatgggtctttcttagactctctgtgtgccaaataactccgccttggtatacggtcctgggcagcagtcattctcctgactatgaagtgatgcttcgggagggcagtcatcagttaagaggcttttggttgcaagtaagaaacagcccaatccagagtggcataatcaataaggggaattattggctcacagagctgaggcctatagtagcagcactgcctgcaggcaggactcagtactgtcaccgagaacctattttcagctgggcgttggggtgcatggctgtagtccgagctccttggaagactgaggcaaaagcatcccttgagcccaggagtttgaggccagcctgggcaaccctgtctcaaaacaaacaaacaaaccaaccctctatttcctgaggtctatcctctctttctctgggaatagcttcagtgttcccaaaaggctgtcagaggctctcagaactatcagctttcttattcaggcataggaagaaagagaaagcctatatcccaggattcccaaccaaagtctccagattcctgctgattggagaggttcaggaacacgccactgcctgaccaacccctggggccagacggggatggaaggggtgactgacacccactctacccctggaggtgggtactttggcctccctatccac

SEQ ID NO: 683098 - DNA, 655 bp, Homo sapiens
atgatgactccatttggcacaatgtctactgacatctcttaccacatggycatatcgatgctagtctcctcactgaactctgaaaccctagagtgaaggtactttatctttttcccttttgtgtcacctgaaccttttgcagtgcctaaaacagaatacagtagatgctcaatcaatgcttattggtaaagaaaacacaaaatgctttcttgtaaaacaaagatccaaaagaaagaaagaaagggagtaagagaagcaaatatttgaaaaaataagcatgcaaataagtagctcagaaatggctttccacctggctaagggtgtttctttttttttttttttttaataaaaagaacaatagggatcattaagcaatacaatgtaccctttctctctagcccagatgcttttatcccttttagctagtacctgtaatcagagggagtatgtgatcttatttagggttcactcaactctaatctttcacaaaaacatttatgtctttcagaaaatttaggaacatttcagtaattcatttgaaaaattttcagtcccattctctcctttcttttagagactctaattatacaaatgttagctcagatccctgagactttacttttttcagcctattttctctctgttattcaggaca

SEQ ID NO: 683099 - DNA, 610 bp, Homo sapiens
ctcattaatctagttctgggcttgtcatcaaatctgactttaaaatcttttttccttaacttttaaatagctaattttaatttttattagagaagggatacatgcttaccaaactttaaaatgtagaaaattttaaagaagaaaataaaaatatctttgatctcattactgtcaatattttggaatattccctttcagtattttctttttttttggtctacctagatgcgttaatcatataatgtgtacagttttaaatcttgcttttgtcatctaacactgtcctgaccattttcttatgagattaaacttattaggaaaattrattttattggcagcagattaaagacaaatcttaatttatttagacaatctcttgttattaaacatttatattgtttcctcatttttttttactactataaatagtgctgcagaaagtatagtttttgaacaaatgtttatataattgtgattattttcttagaatagttttcttgccttccaactttatttctaagggtgatcctagctcataaatttaatgccagtattttggtctgttcagaaaacttggagaaatagccaactttctagttttaaactttgc

SEQ ID NO: 683100 - DNA, 1346 bp, Homo sapiens
tcccagaattcccacatgttgtaggagtgacctaggggaaggtaattgaatcagaatcatgggggctggtctttcctgtggtattctcgtgatagtaaataagtctgacgagatctgatgggttttatcaggggtttaaaccacttttgcttcctgctcattttgtcttgcctccaccaagtaagaagtgccttttgcctcccaccatgattctgaggcctccccagccatgtggaactgtaagtccaattagatctctttttgttcgcagttttgggtgtgtctttttcagcagcatgaaaagagactaatacactcagcatcccaggatctacttcagatagcagttgaattaagcatagtgtacaccgacttctacaatgatatcatagtattgactgttccacaaaacttcacaaattctcctggatctatcattgaccaagacatgcagcaatagtatttgcttcttctacccctcatgtgtgtggttatttatggcatgctcactactggtgaaataaataagcctcttcttgacaatcacctgttttatcaaagtcctgtggctctattggctggggactcaccactcaaccatgtaacagtaaactctaccctaaatttcacttctaaatactgctttcttagatttctagaaacactcaggcttgatctcacctgtatttctactctagagaattaaaacaagaacaaagatctttaggaaaattttttaaaagaagatttacttcttatactaaaaacattagcagtgcagtaaacctggtatctaaaagggtttctttgctaaatcattaaataatatatttttaaatccaatgtctactattccataaagattcaaaagcattatatagagaatgtttattagattttcactagcaaaaaaaatggagaattttgacagcagggtttattattgtacttaagtttttttttttttttaatagtaacaccaatgcataggtcagtaagaatgtccacatttgtggaagttttatctttagatctttccataaatgagattttagacatgtcagcatctcagtcagggccaagattagggtgattcaagtgaggacaagttgctacattaaaatattatatatcttgatctcagttttccacacctccttttaacttgatgccccaggcaagtaactcaattcactttagtccaaaacaagraggttaagaaaatggctttttaagtttctctgtgacaacctctcatacctggtgattctctttagcccactgagtgagacgaacactttctagctattagtgagagaaatcccactctacattcagtcatcatg

SEQ ID NO: 683101 - DNA, 1823 bp, Homo sapiens
tcaactttgttttaatattctcttgcaagaagaatataatgaaagttcaaaaaggtaaaaaacatgataaatagaaaattgaaattcaaggtaatttggatataaacagttccaacttgttttagtatgcaggctcagacaaaggtttatcaggctactaaatgaatttaaaaatggaaagctaaaaatacaatttaaacttaaaagtgatgagaaaatatagtaaaaaatgacaacatattttatttctaagcatacagaattggaagacagtaaaaaagaggggcattttttttttggaaaaagaagataaagtggcgacaattcttttaaatgcctgaaggacaattttagggaagaaaacggtgtattttaaatgattatctcagaagaatgaaaataactgaggtttttagaaaggaatattttatcaaaggctttagtcataaaatttctgaaaatttatatactgaaatgattatcccttgtggaattagtctgcatgtgtttgatgtggacttattcttttttactttgtgttctaagtaatttctacttttttcctctgtgaacaaaactcatgggtttttttttaaatagaataatcaggaaagtaatgattgacaagtaacatttaattaaatatctggttcagtgtagcagcattgaaggaaataagtggatatctggagtgatttcctggcaaaacaaataagttttgaggtataattgacaaaaaaattgtgtatatttaagctattcaatatgatgatttgatatacatatgtgttgtgtaatgattaccacaattaaattaatcaacacatttatcaccacactgttaccgtgtgagtgtgtgtgtgggtgtgtgtgtgtgtgtgtgtgtgtgtgtgtgtgtgtgtatgtatggtgaggaaacaagatatactcttctagcaaatttcaaataaacaatgtatcattagtaactatagtcaccattctgtacactagatctctagaatgtattcatcgtatagctgactcactttttggaattaaagacaaaggtatgtccttaaatattttttcatcaaaagagaaattcatactgatcagagatgtaaatgaataagaaaaacaaaaaaatagttgtcaaagaaaatataaaatactaatatgtatagaaatactttttatcaatgtgactttatcaaatcaatgctatctacattttggataacatttaaaacaaaaatcagcagatcaccaagtgcaggtgctttttctgatctgtacctatgtgtttttaaatagtattaatatattggctgagcatgacttatttgaaatgcttggggccagaaatatttctaatttcaattttccttggattttggagtatttgcatatagataataagatatcttggagatgggttccaagtctaaacacaaattcgcttatgtatcatatatacttgatatatatactctgaatataattgtatacaatattttcagtaatatacattatctatcaygtgaaggcaggtttggaatttttcactagaggcatgttgttactcaaaaagtttccaattttagagcatttcagattagggatgttcaacctgtattatcatattttattttatgaaatataaatacttatttgctttcatttaaagtagaatagatttatctctgataaattttttcataatacctttataaaccataaccctccccaccttcacaattatgattttccccctacatgtgattattttgaaaatcctcctgataaagccagtgtgtaagcagtacttactctccacatca

SEQ ID NO: 683102 - DNA, 669 bp, Homo sapiens
ataggtagcagtgggacagcattaaagctgttttagtctggtcactttataaagacttgttatttccagctgtaccccctaactattgtggtacatgactttattgtgctatgaagccactccatccattcatgcatccattcagcaaacatttgctgatcccccttggtaggctaagcacacatgaatgctacttcctcacaaataaagcttaagggtttgattcttgtgtctcacatgtacgctgcatggctttaaatcacttagcttaatttacagatttctaagtccaatcttatcctttatayataaatagcaaattttcagtgcaatgagccagcatctccaatagtagacagagccactgtcttccaggcctgtaggtaatctgagtccaataattcataaaactttgaattgactacacatgaaactagcttgtgttatgtttctcttagaagtaaatctttcattttctgttaattcatatatagctattagcggtagccacaatagtggtttaaatctggattcaaaaaatacaggagtttcaggttaattagataaaatttgaatttcaacactctaaatacttgtggcattttctttcaaactgttaccaacaaaaattgaatgaaaatattgttattttgtttgagatggctttga

SEQ ID NO: 683103 - DNA, 635 bp, Homo sapiens
attttatttaagactggtcttattgccaatcaagtaccaataaggtgttgcattgaatatttgcaaacctgcttagtgcttggctcctctgctgggtgtcagctataaaaaggtgaagaagagtttggagctgtttgtgagccacagatatgagcacagccacaatattccaaggcccagatgtcagctctattggatgttctaagtgctgtaggtgcaaccaggaaggagtgattagtttccctaggaacaaatgggaaggactggttcattctattaatactttacatgtgatgagtcttgctctagctaagccctcttatcatgtatctcattcagcaaatactcgtggagcaccatctgtatgacaaacattgtggaatgttggtagtaggataataaaaatgaacatttatagaatacttagactatgccaggtaccattctrtggacttcacagatattaattaattgaatttccacaataaccctaagaaagtaatatcatattgtcatcatatcatttttatacatgagaaactgttaagtaacatggccaaaattatatagctggtaagtagggaaggcagcatgtaagccaggaaggctgcctctatagcatgtgctcataactg

SEQ ID NO: 683104 - DNA, 635 bp, Homo sapiens
attttatttaagactggtcttattgccaatcaagtaccaataaggtgttgcattgaatatttgcaaacctgcttagtgcttggctcctctgctgggtgtcagctataaaaaggtgaagaagagtttggagctgtttgtgagccacagatatgagcacagccacaatattccaaggcccagatgtcagctctattggatgttctaagtgctgtaggtgcaaccaggaaggagtgattagtttccctaggaacaaatgggaaggactggttcattctattaatactttacatgtgatgagtcttgctctagctaagccctcttatcatgtatctcattcagcaaatactcgtggagcaccatctgtatgacaaacattgtggaatgttggtagtaggataataaaaatgaacatttatagaatacttagactatgccaggtaccattctatggacttcacagatattaattaattgaatttccacaataaccctaagaaagtaatatcatattgtcatcatatcatttttatacatgagaaactgttaagtaacatggccaaaattatatagctggtaagtagggaaggcagcatgtaagccaggaaggctrcctctatagcatgtgctcataactg

SEQ ID NO: 683105 - DNA, 648 bp, Homo sapiens
gtatactccctgtctccaacatatagttttttcctattattaacatcttgcattcatgtgatagtttcataaacaaacatttcatagttacatacacaaacattgagtgcataacacagttcaaattgtgttcccctccccaaatttatgtatcgaaattctaaccatgagtgtaatgtttttaggaggcatggggcctttgggaggtaattatgtcgtgatgatgcagttctcatagatgggattagtgcgccatgagagcttcctctcactctttttctgccatttgaggatacaatgtgaagtcagcagtctgcaagccagaagagagaacccaccagaatgtgactatgcyggtaccctggtctcagacttccagcctctagaactgtgagaaatagatttctgttgttttttaagccatccagcttctggtactttgttatagcagcttgaattgccgaagactaactgttataaaaataaataccatagtttgggaatttaaatgagaaatttatttccacagttctggaggctggaaagtccaaattcaaggtgtgtcttgatttagttcgtgatgaaggttgtcttcttgtcttaaagatggccatcttcttgctgtgtcctcacatggtgggggagaga

SEQ ID NO: 683106 - DNA, 586 bp, Homo sapiens
gtttatggggaattcctttccatgcccaggaaatttaagtatttacttgaaaggagcaaccgtggcagtgaggcttctgctgttcttcattcaccacaaaacattaattcaattaatttattaccttgaaaggctttgacgcaacagtggtgtacatgacctactcatgttgggaacagatgaaaatgctgtgttggcaaaaggcttccatctccttaatgagatgtgatactgtttagggtattgtaaggcataagaatatcttgaaaagtcaaactgagatgacggggacataaaaaaattggatagatgagatgcataaaattgtggaataaggaaattcactttctctttagagaaaaaataatacttttttgtattttaaggtaaagactatatattaactttctaggtttttgaatttatgtttctttgaataaaatacatcacagacatatgagggaaaacaatgaatgcaaaacagacacaaacttctgtgcatattttggaatatggggagggagcgtcaagctgatgaatcctccacacctatcctctgccratagtttgggttgccctttccacc

SEQ ID NO: 683107 - DNA, 1246 bp, Homo sapiens
attagccaggcttggtggtgggcacctgtaatctcagctactcaggaggccaaggcaggagaatcacttgaacctgggaggtggaggttgcagtgagccaagactgggccactgtactccaaactgggtgacaaaccgagactccgtcttaaaaaaaaaaaaaaaaaaagaaaagaaaagttaaattcaggtacgttggttttaaaatataaactagacactatgaatttggggtaataatcactgygaaactcagttttctcatctgtcaaatggttataataattcatataacagaggattttgtgactattaaatgagactgtatgtaaaaggaccaaaatacgactatttaataaatgttaaagaaaaaaaattattcttggccgggcgcggtggctcacgcctgtaatcccagcactttgggaggccgaggagggtggatcacgaggtcaggagatcaagaccatcctggctaacatggtgaaaccctatctctactaaaaatacaaaaaaattagccgggcgtagtggtgggcgcctgtagtcccagctactcgcgaggctaaggcaggagaatggcgtgaacccgggaggcagagcttgcagtgaactgagatctcgcgactgcactccagcctgggcaacagagagagactccgtcttaaaaaaaagaaaaaaagaaaaaaaattattaacctccgtaatgatttaaaaaacttacagcgtcaataggaatttttggaggtgtagataccagagttgggataaaattgagttctcatcgtaagaatacaattttcccatttacacatttaactatcaatatctaaaaattccatcagacaggttttgtttctcatgtgtatcatgcttagaataacaaagcttaaaatgtctcaattacttcctttatttaagtgtgagaaacgggggagtaggaatgcagggtggagttatgtaaagtcatcttccactgactcaattaaaagtatccttgcataacaacaacagcaaatttataacactttgcaggtacatgagcatcttttgtgtcaaagtctacctctgaggtatctgtaaagtcttcctcctgcttttagcgatagtctagaacaaggattgaaatcaaataataccattagtttaattcatatacttaaaatgtactaattatattattttgttcagataaacaaaccttcctctctaagaaaaatggttacgggattttcagacacatggg

SEQ ID NO: 683108 - DNA, 1246 bp, Homo sapiens
attagccaggcttggtggtgggcacctgtaatctcagctactcaggaggccaaggcaggagaatcacttgaacctgggaggtggaggttgcagtgagccaagactgggccactgtactccaaactgggtgacaaaccgagactccgtcttaaaaaaaaaaaaaaaaaaagaaaagaaaagttaaattcaggtacgttggttttaaaatataaactagacactatgaatttggggtaataatcactgcgaaactcagttttctcatctgtcaaatggttataataattcatataacagaggattttgtgactattaaatgagactgtatgtaaaaggaccaaaatacgactatttaataaatgttaaagaaaaaaaattattcttggccgggcgcggtggctcacgcctgtaatcccagcactttgggaggccgaggagggtggatcacgaggtcaggagatcaagaccatcctggctaacatggtgaaaccctatctctactaaaaatacaaaaaaattagccgggcgtagtggtgggcgcctgtagtcccagctactcgcgaggctaaggcaggagaatggcgtgaacccgggaggcagagcttgcagtgaactgagatctcgcgactgcactccagcctgggcaacagagagagactccgtcttaaaaaaaagaaaaaaagaaaaaaaattattaacctccgtaatgatttaaaaaacttacagcgtcaataggaatttttggaggtgtagataccagagttgggataaaattgagttctcatcgtaagaatacaattttcccatttacacatttaactatcaatatctaaaaattccatcagacaggttttgtttctcatgtgtatcatgcttagaataacaaagcttaaaatgtctcaattacttcctttatttaagtgtgagaaacgggggagtaggaatgcagggtggagttatgtaaagtcatcttccactgactcaattaaaagtatccttgcataacaacaacagcaartttataacactttgcaggtacatgagcatcttttgtgtcaaagtctacctctgaggtatctgtaaagtcttcctcctgcttttagcgatagtctagaacaaggattgaaatcaaataataccattagtttaattcatatacttaaaatgtactaattatattattttgttcagataaacaaaccttcctctctaagaaaaatggttacgggattttcagacacatggg

SEQ ID NO: 683109 - DNA, 1773 bp, Homo sapiens
gtatggcaagaatgggctcaaattcctacacggtaacagtcagcagcccccagatgggctgtggccacccctcctgcagagctctgtggtgtgtctgggctgagtggggctgggttcaaaccctggacccaccacttaccagctggcatgacctcaagcaggttacctgacctcttctgtacatctgggcagtggcagtacctgcgtcctgatcttgttgtggggatttgctgagcttcagtctgtgtaaaagcccagaagcacctgataattattatygtggctgctgttattatcttgactcctctatgcccaaccctgggaagcattcatgtgcttgctctgtgggtcggaagaaggaaaactcatcacagcctggggattgatggactttttagaggacctgtcttttgaattgggcctgaactgcgagagggaagagccatgctaggcagggggacagcaagagtaaaagcgcagaggtggaaagtgtgcaccgtgtcaagtggctgtcagcagggtccttttatgactgatgagttttcttttgtttctgtgtgagttgcaaatgggtttgggtcttggtgcacgtcagtatcttggacccctgaggaaggatgtcatcacccccaggttgagcatgcacagccttcttcaggacggtgagacgaacccgctgagcaggctgtgggcaaggtcactgtggggtccaaacagagacatggggagggtcagaggacccttctgtgtcattacgggattgggaagtggaatggccctaagatgtcccctgggactcgaatgtgacaaaaccttgtccctcagcagaagagaatctagaaaatctgtctggtggagtcctggaagtgggtgaggtgtggggtggggtgagaaggggttgtgcaagactggactggtgacccaagggaggcccagaaaacgccttgaaggggagcacaaagatgggcaggagaaacctccagtttccctgtggctggggtggggggagggtttgggggccaggtgcatgaatggaccccagctcctttttgggtgggagcagccatgacaaggaactgtattaaacttcgaaatgcagaactctagagtagcctgtgtctacactgattttaagttatgaattttctagtggttcttattataggtaatgagacatattccctacaaatcaggaatatcctataattctatggtttccacctcccaatgacacctctctgattgtctcacacttagaagtaatacccaaaaatagcctttgaggaatcctatgccccagtgttttatttggaaggtaaggtcactgtatttatgtatcagccataaatacttgaatgagagtgaaaattcctaaggatttgccatttccggctgatggcactagatcccttggaagtgtcccatgtcataatatgccaacacatttagaattttcaacagtcatggaaacaaacaggtgcttggggcagctaaaaataaccaccctgggaagtgaaactgtggcagtgccaaggagctaaggtgggcagtactgcgcttttgggtgaggtcaaaactctggagggaaggccaagaaaagaaaattctgcccatgcccctcctcccagcacccaggagtgtgttttctcttctcagaatctctgtctgatgtgctagcctttttgtgtcatttcgactgaaacgtctcacagctccaacccactgcccccatatcttgcatagctttctgtccagatttctgaattaaaggct

SEQ ID NO: 683110 - DNA, 624 bp, Homo sapiens
tgcattaggggagtatcctctctggtcccacgtgggcaggtgcccagagccaggaatgagccgcctgtggtgattcctgtgtgtctggagtccaggagtcccttgcactgttggccagtggtcactgtgcrgtgattgactgggctcagtgtctgtagcttttgtctgagccccttgcacccctccccggggatgattgtctgagttggtggatgttaatctgcagcccctgagaagctgcctggcaaatgggaggttaatgtgcaaacagcggggagcattgtccatgtgtgaggctggacagcaagtgggagggaaatagttaaaaatcctattcatggctcaggaggggaggaggggtgggcgcaggagcaggcccggccttgtgctaatcttgctggaatgtaactagttcgggcagtttctggcttcgatgtgctttggggccggttggcgtcccccccgccccaacccagtacatcgatggtgcgtccgcgcgccgaaggctgctctttgtgttctctgcagccacagcttagaagcgtccgagtcagaccgctttcagttgtaaggatggggagggaggaagctcagcgaggcagttgtgttatccaaatccacagg

SEQ ID NO: 683111 - DNA, 624 bp, Homo sapiens
tgcattaggggagtatcctctctggtcccacgtgggcaggtgcccagagccaggaatgagccgcctgtggtgattcctgtgtgtctggagtccaggagtcccttgcactgttggccagtggtcactgtgcggtgattgactgggctcagtgtctgtagcttttgtctgagccccttgcacccctccccggggatgattgtctgagttggtggatgttaatctgcagcccctgagaagctgcctggcaaatgggaggttaatgtgcaaacagcggggagcattgtccatgtgtgaggctggacagcaagtgggagggaaatagttaaaaatcctattcatggctcaggaggggaggaggggtgggcgcaggagcaggcccggccttgtgctaatcttgctggaatgtaactagttcgggcagtttctggcttcgatgtgctttggggccggttggcgtcccccccgccccaacccagtwcatcgatggtgcgtccgcgcgccgaaggctgctctttgtgttctctgcagccacagcttagaagcgtccgagtcagaccgctttcagttgtaaggatggggagggaggaagctcagcgaggcagttgtgttatccaaatccacagg

SEQ ID NO: 683112 - DNA, 651 bp, Homo sapiens
tacaccaacattcatagcagcaaccttcacaatacacagaaaaagtggaaagagcccacatgtccattgtgtttgaatagataatcaaaatgtagtatgtacatataaaggaatattgtatattgtatgtctgccataaaaaaagaaaattttgacatacactacaacatggatgaactgtgaagacattataccaagtgaaatatgccagacacaaaaggaaaaatgctgtgtgatacagcttacagaggtgcctagaataaattcatcaacatagaaagtagaatgayggttgccaggggctccgggaagaggaatgaggaacgaggaactggtgtacagacttcagtttggaatggcaaaaacgcaaaacgttgatggataacggtgatgacttacacaacaatgcgaatgcatttaatgccactgaacagtacacttaaaaatggttaagatgatgaattttgtgttatatatgtttcaccacaatacaaaatattctttaaaaaagacttttggaaatactgtatctacttaattacaggatgtcaaactaatacaggctgatagtatcatttgtccccttgacacacaatcttgggtccagagattttgttcaccacaccttttagcatcactaaaaagggcaca

SEQ ID NO: 683113 - DNA, 651 bp, Homo sapiens
tacaccaacattcatagcagcaaccttcacaatacacagaaaaagtggaaagagcccacatgtccattgtgtttgaatagataatcaaaatgtagtatgtacatataaaggaatattgtatattgtatgtctgccataaaaaaagaaaattttgacatacactacaacatggatgaactgtgaagacattataccaagtgaaatatgccagacacaaaaggaaaaatgctgtgtgatacagcttacagaggtgcctagaataaattcatcaacatagaaagtagaatgatggttgccaggggctccgggaagaggaatgaggaacgaggaactggtgtacagacttcagtttggaatggcaaaaacgcaaaacgttgatggataacggtgatgacttacacaacaatgcgaatgcatttaatgccactgaacagtacacttaaaaatggttaagatgatgaattttgtgttatatatgtttcaccacaatacaaaatattctttaaaaaaracttttggaaatactgtatctacttaattacaggatgtcaaactaatacaggctgatagtatcatttgtccccttgacacacaatcttgggtccagagattttgttcaccacaccttttagcatcactaaaaagggcaca

SEQ ID NO: 683114 - DNA, 728 bp, Homo sapiens
gataaaccaattcaagaatctttcttttttatttcaatgaaagtttaatgctaatgtattcagtgaagccaagttttattttgcttattttgctctctgccctcaggctgattgaggagtgacctttgccttgatttatgacagacgtttgggtatggagaratggagactactattaagcagatccctctaaaagatctgagtaagtatttcttatttccattcctctcatcttcattattcataaattcttccaatgtctgaaacccttccttataattttctcttctcaagaaggaacatactcatttggacaatgagacaatgagaaagaagtcttcttattcctgtagttagtggtatcatccttcctgataagctcaatagagggtaaaataaatgagcaacagaatacaaaccacatgcctagcaatggagagaattctaggttctaaataatgaaatgaaaataatatttttggtgctgataatgctcctggccgatagcttgtctttccaaaacaaatatcataagagaaatctgcagacattcacatcatgaatgcggtttttctctctgcacacacactcatttgcacgcttggcacctggaatgcttggttggtacacagtttgctgaaatttcctttcccatttggcacaacttttcctagataacattcatgagcatcagtcacctccacaaatagcaaagagagaggccagct

SEQ ID NO: 683115 - DNA, 728 bp, Homo sapiens
gataaaccaattcaagaatctttcttttttatttcaatgaaagtttaatgctaatgtattcagtgaagccaagttttattttgcttattttgctctctgccctcaggctgattgaggagtgacctttgccttgatttatgacagacgtttgggtatggagagatggagactactattaagcagatccctctaaaagatctgagtaagtatttcttatttccattcctctcatcttcattattcataaattcttccaatgtctgaaacccttccttataattttctcttctcaagaaggaacatactcatttggacaatgagacaatgagaaagaagtcttcttattcctgtagttagtggtatcatccttcctgataagctcaatagagggtaaaataaatgagcaacagaatacaaaccacatgcctagcaatggagagaattctaggttctaaataatgaaatgaaaataatatttttggtgctgataatgctcctggccgatagcttgtctttccaaaacaaatatcataagagaaatctgcagacattcacatcatgaatgyggtttttctctctgcacacacactcatttgcacgcttggcacctggaatgcttggttggtacacagtttgctgaaatttcctttcccatttggcacaacttttcctagataacattcatgagcatcagtcacctccacaaatagcaaagagagaggccagct

SEQ ID NO: 683116 - DNA, 1237 bp, Homo sapiens
ttagtggttcataaaataacattacatgaggtatcatttgctttcctctgatgaagctatactacatgtcaaaggtactcagaaaggaaggatatttcttacactgaaatgtattgagtattcatgagactataaaaccaagttatgattgctatttaccaactacaataaaccagatcgtttctatttacccaaatatgagtaactggctgtaatgagaataaaagaaacattggaggcaggcatttaaaattgttgctgatatggcrcaactaattattaacttatcctccttggcaactgacaaaaaaagaacatggtgacttgagaatataactactcacagaagatgaatgttttaaaaggagattatatttgacatatatgtcaacgggctgttggagcaactgggaaacttcagctatagggtcttagaaaactaagtaaatattaaaaatgaggcaataactttaggaaaaaatgttaacataaagatgtgatcatagtgatttgactcaacgtaaacaatatttgtaatcaaaacaaaaataagcactatgcatgtaattaaaactgcgatataattatattgaagaatagggatgctctgggaggtacaaaaagatatattataatctaccataataataaagaagtagtactttgacatacacacagaaacatatgatttaggaatattacataaaaacagctgaagaaaaaaaaaactcagaaatggggtagagagggtggcccaagagactgtaagattttatataaatatacacacacatatatatatacacatatagagaaacacatactcaatgtttatatatatgagcatgttagagctattgtttagtactaatattcatatatatacatagatatataaacaatttactattgttggattttctgatttatgagcatgtattactttgactttttaagttgctacaaaaccagttagcactgacaatggaaaccatttgagaaatgccttttgggctggcctggatcagttctatgtttctagattcaatttgccaaatgaagcaagttgcctttatggagcggtttgtcagacatgcgtctcgacagtaacacttgttcccacatttcagaactaacagctcttctttcaacaccgtaatatttatctgccatgttattattcccagtgtatgctccaaaatgggcttgggactctcctctttcctcttgaactcag

SEQ ID NO: 683117 - DNA, 1132 bp, Homo sapiens
acattgattctgactaaggagagaagaacttgacataaatgcttaacacaatcctcttctcaagtcccagaaactcacatctatgaataatttgtgaggcagagcctcagccgctaagaggtaaataactaatctgtccgtgacagagcaagacctacagctgcaaagtttgaaaggtataacggataaatcaaaccaacaaatagttcattgaacccccactctgctagactccaggacaggtgctgagcatatacaagtgaataaagcacatccctataaaatgtgcacaaggaaccaagctaaatctctatttcagaaagtttgctttctatttcaagtttgcttgatttgattccttgctctgttcacacgcattgcgtaacagaaaaggtgasccacacatgttggcccagagactgcagaagaatagccaaccatcagacttagtctaaagtgaattagtctgtttcactggactaagcagattttcacaccggatagcaaacccaaccaggttgttaagaataatattcatcagcattaaaactctcagaaagttagtttacagacaactgaactaatgcacatacctaagaaggtctccaagacttcctctgctcttcaatatttgaacctgtattgaattcttgttcaacttacccccaaggttaagataaatgggggatggaacaactatacgtaggcttagcatttggcatcagctatacagtagtgtttttgtataggctgaagtctacatcagttgtaattaatgtaattatatataatgttgacagattatgacatttgcctattaagacactatacaaacattccaataatttgctggcttttgagtttgtaaaaaataaatgaaacaaaatctcaagggatgttgctaatggtgtaactggaagagaggtttcaaaagcacagcgttcaggaaataacagtcaaagaataatgcattcaaagccaaaacatatagagtggtaaatgaatatttagtacttaccacaagactgctgtctagagacagcctttttccaaagtcccttttctcaagctgtctctttccctccatggatgaagttatttattttcttttgtgacttataagaatcccccg

SEQ ID NO: 683118 - DNA, 1994 bp, Homo sapiens
attcttcagggcatagaaaatacacatttccttctgtttgtgtggaaataagcaaaatacctgttataatagattcctcacagaattttgtgaagcttcaggtaaacttgaaagagaaaaattaaaatgctagagtttcataattacaaattgggatataaaaatagaataattatttgaattttgtatttctctccaggggatcaaaagtaatatataaacttttaataaatattgatatagcttcacgttgactccatatgtgagcaatttgctttctgttaaattcacaattgcataatttttttcaggctggaatgcacttggatgccagagattttgatttcttcatgtgaaataaggtgataatacattccaaagtatatattttttcaactttgaatatatctggtgtatttggagtaatatctgagtaaatacacttatatgtaagagaatcaaaggaacaagatattattttatatccaaggaaattaacacttagaacataaatacgtattgcattacttcatattaaagaaatgttttacaaaagaaaataaaggagcttattttatagccccatttccacaaataatagcaaaggtacatacacatatctaatgttttacacactcattattgtttctcttaaaatttgttgcttatactattttaaaaggcaagcctatagattgttgtgtgtatatacatatacacacaacatacatatatgtgtgtgtgtgtgtgtgtgtgtgtgtatatatatatatatatatatatatatatatcagcaagcaagagaatgggcctcttcctgctgaggtttaacatttgcatgtatatgtatattttgattcacatagacttattgttctttaattacatgaacagtgattcctggttacattattggaaaatggaagcaatgctcaaagagcatcacctaaatttccatcatattttgctctcaatatattttgtacatccaaatatattgtgattaatctgcatacatttttgctgttctaggtgacgctggtatgaggctaggtaatacacgaccttagtctgcatgttgtacttgtgtaacacacataattttacagtgctaacaggtgctataataactaactatagttaatratgaatgaaagaaggaagatgttaagatgttagggaaggactcaaaagatgcagtgcttgagttagaattttaagggagattatgcaaaagcagtcacttaaggtgggtcgggatgatctagaatgtgggaatgatgtatgcaaagtcacacaggagagatacagcatgcatgtttagaaaattgttgattacatatggaaagtttgcaggacttgcatcctagaatgtcaggattttaagctaagtagggttcaaattaaatttttcacatacttcgctgcattataataactagtttatgtttaactcatccactaaactaagttatttgaaaagagatgccagtgttcactcaatctagttgtctgtcattaataatttaaaaataattgagattttaattttggtctgctaagcctgtttaattaaaatttgacgttaaataagattttacaggcctcatttttttttcagtcatcacagtttgaatattaaacattactacttttatctccctcagtcagcataaaacatactacttatggttttaataaccaaattcaatgagcaccaacaaaatttgatgtaactattaactttgaaattttgttgaaatagaactatgccttgggtatcattcaaagcatttaattgttgcaataaaaaactttgagataaattgaaatgatggacaatatgggtcgaaagcaacactggcttgagggaataggctaatgtttgagaacagaattgttaaggacaagattggatgtttatattattttaggaaagatacactctaatggagtttaattctaaaatgtttaatattatgaaaatattatat

SEQ ID NO: 683119 - DNA, 3301 bp, Homo sapiens
agagagagctgacatgctgtggtacacacttatagtcccagcgacttggaaagctgaggcaggaggattgcttgatcccaggagtttgaggtagtgtgcgatgatcgttcttgtgaatagccactagccactgaactccagcttgggcaacattgagacaccctgtctcttaatttaaaaaaaaaaaaaaaaaaaaaaaggaggaaagaaagtggtctcagtttttaatgtaaatatttttaatgggatactgatattttaagattaatgtatattgtatatcagttaactgcaggtcaataattatataaaacttaaggtacgaaaaacatttatttttgctaacatatctgtgagttgactgttgttggcttggtgaggctgcaagctgcagatagagtctaggtatgttttctgtgtgtttgttcccccttggatcagtggactacctgagaatgtgtttctgtcacagtgatagaatcacaaggaaactccagttctggaagtacattttaagccattgcttctctcatgtccactaacattcagtcagccaaagcacataccttgtccatggctaacattgatagtatagataaatatacctgatctctagcaggaggaactgcattgtcttggggaaaggttttagatatagggaggggtgatgagttgggaacaataatgtagtctgccgcaaacatattaaagtgtaactggatatggttgctgcagaattttgaacctttgttttaattgtgatttttactctttcccccctatctagtgcccttttgtaatacagtaattatcatgatttttgtctgaactgaaatcttctgagattagattgtctacgaaaatacagtcgatcctccttgttttcagcttttgtatttgtgaactcacctactattttttgtaacccccaaatcagtactcacagcactttcatagtcatgtgtttgcgcagagtgtcaaagaatttgagtttgaacaggatgatattctgccttctttttcagctctcatacaatagtcaggtatcctttttgtggtctatttaatgccatgcttttcctgtttttgtactgtttgttggttgttttgccatttaaattaacccccaagcatagtgctgaagtgctgcttagcattcacaagtccaagaagtctgtgatgtgtcttacagagaaaatacatgcattaaataaactccattcaggcgtgagtgctgtagtgccgttggctgtgagttcaatgttaatgaatgaacaatgtatattatttatttattcttcatttaattaattattattattattttttttgagatagagtctcactctgttgctcaggctggagtgcagtggtgcagtcttggctcactgcaacctctgcctcctgggttcaagcgattcccctgccttcgcctcccaagtagctaagactacaggcatgcgccaccatgcctggctaattttttttttttttttttgtagttttagtagagacggggtttcaccacgttggccaggctggtctcgaactccagacctcaaatgatctgcccgccttggcttcccaaagtgctgggattacaggcgttagccactgtgcctggccaacaatatatattaaataagcacacatacaacaaaagtaggtgttggtaagcttacaaaagtgtgaccagtagcttgctgaaacctaactttttatttgttcatggaactttctagaccgtaactacactgaataatgagaatctgctgtaatctttttaggtgctgtagatgagccattggattaaattattacagtatgtttcagactgctgtatgttgaaccctagtgaaatgcctctcaaaccttcataaggatcacaatctcatgtcctttttttttgttattaaatgcccagtatgtgttagcgatttaaacaaaattcaaatatttttttttttttttttttgagacagagtctcgctctgtcacctaagctggagagtgcagtggtatgatctcggctcactacaacctctgcctcccgggttcaggcgattctcctgcctcagcatcctgagtagctgggattacaggcacccgccaccacgctgggctaatttttgtatttttagtagagacggggtttcgccaggttgtccaggctggtctggaactcctgacctcatgcgatctgcctgccttggcctcctgaagtgctgggattataggcgtgagccaccatgcccggcgttgacttcttaataataaccatactgactggtgtgagatggtatgccattgtggttttgatttgcatttctctaatgatcagtgatattgagctttttctcatatgcttgttggccgcatgtgtgtcttcttttgaagtgtctgtttatgtcctgtgcccactttctaatgagatttttttttttcttgtaaatttgtttaagttccttatcagtgttggacattagatctttgtcacatgcattgttgcaaaaattttctcccattctgtaggttgtctgttcactctgttgatagtttcttttgctgtgcagaagcttcaagaagaaaggaatccgattggttctgtgtctgtctcttttggtattctcagaattatgtagtcattcatatagaaagatgattaggaaaataggacaagaatagcagaaatctacataaaaatgtaggaaattaaaattagttaccagcatacaaaaaacttctgtatgttataattacatactataactcacccctccttggcaaatattctctctcttttgacttcaaaatcatggcttatatgtactttctctatttcccagatgcaaatataattaattgactttatttatctaggaaatgttactcatatcttaattgtagtcattggcttgagtgacgggttttggtaattcaactactattacttgaaagtagtagatttcataggatactgttataaaatctttttaacctcttttctgatttcaggagtaattagtaattgtggtttactggaaaattcaatgaatagggtgttaaaggaarcaattcattaataatatatgtaatctattgggagactgaggcgggtggatcacctgagttcaggagttcgagaccagcctggccaacatggcaaaactccgtctctactgaaaatagaaaaattcgccgggcatggtggtgcattcctgtattcccaggtactcggaaggctgaggcaggagaatcacctgaactccagaggtggaggttgcagcgagtcaggatcgca

SEQ ID NO: 683120 - DNA, 666 bp, Homo sapiens
gctccagctcccacagctctacggaaggcctcccgcaactaaagcggaggagggggccagcctcatcccactgccagctggcccacagttcctcaaacacagtgagtgaggacggacctcaggctgtctcttcgggtcacacccgctgtgagaagaaggcaggtacagcaccagggcagacacttgcccccaggggtggctcccccagatcccaggcctctaggcccgcatcaacactgcactgcacrttgaggacaaggccatctcggactgcagaccctcacggccttcccacactttgtcctcacttgcaacaggggcttcgggtgggcctcccgtttctaaagcacccactatggatgcacagcaggacagacccaagtcccaagactgcctgggcctactggcccccctagcatctgctgcagaggtctcctctacagctcccatgtctgggaagaagcacagaccaccaggacccctgttctcctcctcagatccccttcctgccacctcttcccactccggggactcagcccaggacacctcgctgattcctgcccccttcacacctgcaagcagggatgccggcatcagaagaatgtttcgtgttcgaaattgtttgaggggtttgggtttatttttgttggttttttcttttttttt

SEQ ID NO: 683121 - DNA, 666 bp, Homo sapiens
gctccagctcccacagctctacggaaggcctcccgcaactaaagcggaggagggggccagcctcatcccactgccagctggcccacagttcctcaaacacagtgagtgaggacggacctcaggctgtctcttcgggtcacacccgctgtgagaagaaggcaggtacagcaccagggcagacacttgcccccaggggtggctcccccagatcccaggcctctaggcccgcatcaacactgcactgcacgttgaggacaaggccatctcggactgcagaccctcacggccttcccacactttgtcctcacttgcaacaggggcttcgggtgggcctcccgtttctaaagcacccactatggatgcacagcaggacagacccaagtcccaagactgcctgggcctastggcccccctagcatctgctgcagaggtctcctctacagctcccatgtctgggaagaagcacagaccaccaggacccctgttctcctcctcagatccccttcctgccacctcttcccactccggggactcagcccaggacacctcgctgattcctgcccccttcacacctgcaagcagggatgccggcatcagaagaatgtttcgtgttcgaaattgtttgaggggtttgggtttatttttgttggttttttcttttttttt

SEQ ID NO: 683122 - DNA, 631 bp, Homo sapiens
cacccccaccccactcttccccaccgacatccccttgctctattttctctagatcacacactcttacttcacaacatgggtgtactatagatctccttctgtggttctttgttgcttctcctttctgatgcctatcctgagtcccaagctacagtgccttgaccaggtcttgctggatccatagagatcctggttaacagcactgctcytcccagggggattgtattctgcctgggactccaaatggtggagttacaggtattgcatctgtcacctctggtgggaaggtatactagggtaccaaaaatgcctacatttgaggtcaacactgataataaccacaaggacttagaagaaaaaacaaagaggttgcatcctagtcttcttggtctgtgatctcttagcttggctaccagacttcacaggagcctggcactacagaagatcagaaaggaccatccttctcccttttcagcctttccatggtgcccctcaatggtcagcggcacagtgcatactgcaagacagacgggaatctcacttctgctcctgtccctgtctcgccatccccatatcctggtggtagcagcctcacatctctgcctggagagatgcagcaccagctaccccc

SEQ ID NO: 683123 - DNA, 659 bp, Homo sapiens
tttgggtgactggttgtagatgggccaggcaggaaaggaccaactggcatggtggacaggggccactgctctgggactcaaaagacttagttaagcccttgaggggggcacttgatgtccccagcctttcgttttcaagcagtgagaaaaatccctgctggaattgccttctggagctcagacaaggtctcactggtgaatgtgttctgggaaccatgtgacaccacgtaaatayatgatgttatcacatacagaaatgtcattgttgcaccagctccatgccaggcgctgggggagattcaatggtgtacaagacctagccctgattcacaaggcccctgacctaatggtgagctggagctacgcgtacaaggcaagagcctgtgcgtgacgtttcccccagcagtgtccacaggcggtgatagccgagcggtatctggaaacagcaaacagattccctttgcttcttgaagaagccgcaccctggctttggtcctgctgcccccatccattgacaatgtaatgatatctagaaactccaggtggattgcgactccctgggatcaaacccttcagtgctcacttggtcccttgaggaagccacactctggtcccacagccctggtcccagatggtggtggttgggctgcctcctgccg

SEQ ID NO: 683124 - DNA, 637 bp, Homo sapiens
aacaaacaaaaaaaccccacaaacaaaactcactctggattctctgggattctgattccctcagggtcattacaagccaggctgggcctttgcttccttttcaaacagactcatcttttaaatatatcccactataatamcccactcatattcatcaaccacctgccttccctaagctctcacattcacagtgattcctaagagatcagtagggggaagcccagaagatgttctctggtttgctaatggaagggaataaagataactcctaggttgtttggcccttgcagatttttattactgagggactctgtgccttagaaattctattttataggtttttgttgtctttaggagtgatgccttgtacacaccattattgtgcatggggacgtaactgaattcaaagcacccagctgtgattcgtaaccagattttaatgtatcttctcccaatatgcaaggggaaattcctgtatgagaacttgttctccatagatcctatggcaaggagccagaaaagaatccagtgggaggatagagccttgcatataagtcttttacaacattccagagactcatttaatgtcttcccagtcagagttcttaatttctttgccttgcacataattactgct

SEQ ID NO: 683125 - DNA, 637 bp, Homo sapiens
aacaaacaaaaaaaccccacaaacaaaactcactctggattctctgggattctgattccctcagggtcattacaagccaggctgggcctttgcttccttttcaaacagactcatcttttaaatatatcccactataataccccactcatattcatcaaccacctgccttccctaagctctcacattcacagtgattcctaagagatcagtagggggaagcccagaagatgttctctggtttgctaatggaagggaataaagataactcctaggttgtttggcccttgcagatttttattactgagggactctgtgccttagaaattctattttataggtttttgttgtctttaggagtgatgccttgtacacaccattattgtgcatggggacgtaactgaattcaaagcacccagctgtgattcktaaccagattttaatgtatcttctcccaatatgcaaggggaaattcctgtatgagaacttgttctccatagatcctatggcaaggagccagaaaagaatccagtgggaggatagagccttgcatataagtcttttacaacattccagagactcatttaatgtcttcccagtcagagttcttaatttctttgccttgcacataattactgct

SEQ ID NO: 683126 - DNA, 790 bp, Homo sapiens
tgactatctactatatagaaagaccctgttggccacagaatcttagttcatgtcctcagtgagctttacaatttggtgagagcaggaagcaaacaaccaagcaagaatgaagtagacggctgggtgcggtggctcacasctgtaatcccagcactttgggaggctgaggtgggtggatcacctgaagtcaggagtttgagaccagcttggctaacatggtgaaacgctgtctctactaaaaatacaaaaaattagctgggcatggtggcacatgcctgtaatcccagcaacttgagaggctgaagcaggagaattgcttgaatctgggagatggagggtgtggtgagccaagattgtgccattgcactccagtctgggtgacagagtgagactctgtctcaaaaaaataaaaaaataaaaagtaaagtagagctaagtacagcaaacaggcaacattgttgcctacccaatcttcccagtcaaaagataatgacagtcaaagggagattactgtctcccaccctagaccaacaacacattgttgggccatttgttgaggcctagttatgtaccacgcattgtgctacacacattacatgtgctctgtaatttaatcatcacatacgttatatgaagtccatactattactaacttcattttatagataagaaaaactgagactcagaaaaattaagtaactctcccaagatcacactgttcagagttgcaggaatgagatttataaccaggtccaagaccaagttctgaggattagtatttggtagttcc

SEQ ID NO: 683127 - DNA, 636 bp, Homo sapiens
acttgctacaggtggttaaatttctatctaggacagaatgagcaaagccagtaactgaaaatattgaacagcatgattcccaactagacaaaagagagactcgaaataagaaaaatttataatgaacactggacacagtaggcctgaagactccctatgattccaatatatttctaggtgtaaaagattactgttattctactcaccctcccatgaagactaacaggcttcatgggactaactctataacaagaaaatattttaaattggtgaagcttttcttggaaatgactcattttacccaattcaatgacaacaattttcaccacttataattaatgagaaatactgaataaagtatcatcaacttcaaggttaaccaataaacttctttgtaaaacaaccatatttcataccatgtatgataataatttttatcaatgtttaaaaagcattttgaaaaattcatgtcaaatgttttcttttcattttaatttctgagttatttttcctatgtgtatcagttgtktattgctgtgaaaaaagtcacttcaaatttagtagcttcaaccaacaatcattttatttgctaccaattttttgggtgagaagtttgtgctgggctcagttggacag

SEQ ID NO: 683128 - DNA, 633 bp, Homo sapiens
tgtaaaattcttagtaaaaatgacattttcaagttgtgttccatagtcttcccacgatgcaacatgmattgtaatttttaagttttatttaaatctatatggaatcttttaaaaagcatcacagatttaaatagaaacaacaacaatcaatcaaaaattatttccaaggacattcagtaggttatggttagattcatgaccaaaaaaggattcattctgttgcttattgagcatttactctgtgccagccatctcctaaaaattgtgatacacaaacagccaaaagtgacaataaagttctgcctttttaagcttatattttaacatcaagtgacaaacaataagcataatgaataattaaattatgctcggtgtatatatatgtattaaatacatattatgaggaaaaagagaaaagtgaatagagaacagtggaaaagactggaggtgggagcaagaagagcagtttgcaattttaatctccgggctcaggggtgaccattattgagaaggtagcatctgagcaaaggcttgatagagatgaaagattttgctgtagttatctgtgcaaaaactcagagatgggattatttctagcaaagataaggaataccaaaaagaaaagtggaatga

SEQ ID NO: 683129 - DNA, 673 bp, Homo sapiens
cagaagaagatggataacccagctcaatcacacagagcaaattccttcttctctacctttctgttctatgcagcccttcaacagagtgtgtgatcacccttatcagtgagggtgatcttctttactcaatgtactaattcaaatgctcatctcttctggaaacatcttcacagacttaaccagaaataatctttrccagctatctgggcatctcttagcccagtcaagttgacacataaaattagccctcacagccgttaaatgtatgcagccctttctactcaatatacttccaagcatataacttagaacatctgatagaagaaaactgtaaagcttatttttgtatttgttttaagactttgaccttcggggtcaaagtttttttcttgagtcaatcttgatatagtatttttgtattttgtatttttttattatttttttaaatataaaaagaggtttatacagttctgcaggctgtacaggaagaatggtgccagcatctaatctaggggggactcagcaagcttttactcatagcagaaggtgaagcaggagtatgcacttcatacagcaaaatcaggagcacaagagacagtgcagagggggaggtgccacacacttttaaatgaccagatcttatgagaactcactcactatcacaaagactgca

SEQ ID NO: 683130 - DNA, 1516 bp, Homo sapiens
  misc_feature 918, 919, 920, 921, 922, 923, 924, 925, 926, 927, 928, 929,930, 931, 932, 933, 934, 935, 936, 937, 938, 939, 940, 941,942, 943, 944, 945, 946, 947, 948, 949, 950, 951, 952, 953,954, 955, 956, 957, 958, 959, 960, 961, 962, 963, 964: n = A,T,C or G
  misc_feature 965, 966, 967, 968, 969, 970, 971, 972, 973, 974, 975, 976,977, 978, 979, 980, 981, 982, 983, 984, 985, 986, 987, 988,989, 990, 991, 992, 993, 994, 995, 996, 997, 998, 999, 1000,1001, 1002, 1003, 1004, 1005, 1006, 1007, 1008, 1009: n = A,T,C or G
  misc_feature 1010, 1011, 1012, 1013, 1014, 1015, 1016, 1017: n = A,T,C or G
tggcttggccaggtagagtcaaggctgattaggaccaaagacaaaagctggtctctctgtaaccattccttttaggattgtttgaatgccagtctccaggaacagcagagaatgaggtaaggccatcatactcttatttcttttccaattttctgagtaagggcttgcctctaatcaagtcaaacagaagcctgtgtcactgtcctgacgctataagtagttaaagtcaggctgataaaaatatatggacaaggctatgaatgaaataggagcataccttaaaaacagaaatttaggttaagtaggaaacagaaacctactaggttttaagagctagcctagcatgaaggaagtgcaaagaaaatggctttattgttggtattaaaaactgactaaaaaaacctgaagttgaactcccggtaagacaacygcagtaatcaagacagaaactatgattcacctaatggatatagttaagccatgttaacaaagaccaaggtgaagaagaaaagagtaaatacagtacgttctcattttgctaaaagaaactgtgtggattttaagaattgtttatgtacagaaaaaagtctggaaattgttaacagcggccattctggggaatggaactggagaccgaattcttaaattcatgtttctgtatatgttgacttttctgcaatgagatagtattactttttgaattttatttttattaagatgccaaaagcttaaacatttgtaagaaaagtaggggactgccctaaccactcagatgaataggacaaaggataataacaacaatagtcatctctgaagcacatcctgagtgctaagtggctggataagtactttagagagggtctccaattccaacagctgtttgggataggcggaatacccagccttcaacgggggaannnnnnnnnnnnnnnnnnnnnnnnnnnnnnnnnnnnnnnnnnnnnnnnnnnnnnnnnnnnnnnnnnnnnnnnnnnnnnnnnnnnnnnnnnnnnnnnnnnnaatattagcgacttgggttatttggttgttgagaaagggttctctagagaaaatataatttcataactgcagtacttattcaattagactaggaaggctcctcagaggtaatctacttcaacctctttctgtaggcggaagccatgctcccaaccaatcatattcatgaatatccagcctctgtttgacattattctttaaggttgtttgcttttagaattttcagcccatttcttgtaagttccagttctaagaaaggcttttttacatattaagacaactcatttttcctgaaacttgcaatcttttccactgactgccttttgtgattctgattggtggtgactttctggttttctctttacctctgtgggggactaaaggtgattttttttgtttttcagaataatagtaatcaactacataatctccagaaactgccagcaacttccaaattcctcttcacatagcttctcaaatacttcattagaaccagtgt

SEQ ID NO: 683131 - DNA, 1088 bp, Homo sapiens
  misc_feature 2, 3, 4, 5, 6, 7, 8, 9, 10, 11, 12, 13, 14, 15, 16, 17, 18,19, 20, 21, 22, 23, 24, 25, 26, 27, 28, 29, 30, 31, 32,33, 34, 35, 36, 37, 38, 39, 40, 41, 42, 43, 44, 45, 46,47, 48, 49, 50, 51, 52, 53, 54, 55, 56, 57, 58, 59, 60,61: n = A,T,C or G
  misc_feature 62, 63, 64, 65, 66, 67, 68, 69, 70, 71, 72, 73, 74, 75, 76,77, 78, 79, 80, 81, 82, 83, 84, 85, 86, 87, 88, 89, 90,91, 92, 93, 94, 95, 96, 97, 98, 99, 100, 101: n = A,T,C or G
annnnnnnnnnnnnnnnnnnnnnnnnnnnnnnnnnnnnnnnnnnnnnnnnnnnnnnnnnnnnnnnnnnnnnnnnnnnnnnnnnnnnnnnnnnnnnnnnnnntgtatataaaaattaatgtaatgtttagtcctgggtgccatccctaaggtatctaattatgtatatacaaatattccmaaatctgaaaaagtccaaatctaaaacacttctggtctgaaggctttcagataagggatattcaacttgtattagaattccaaatcactaaaaacactctcacccaacttcctacctttaaaggagggtattaaggatacctcagttgagtaaatgtcaaacaactaagttttgtttttgtttcctgatgtttttccatttataaagtaaacatacacttcacatataatactttaaaatatcacaaatgtataattatgtcaccataaatacagtattaaaaacttacaaaacagcagagctgaggagcaagcacatttcatcatcctcttcttgaagcactgaacttattttctttcctgtagctttacttatagatgtcttgagtttcttagctagcttttttggtgtgttggttatagaagattcttctgtacagcaactatacacttccacctttatctgaaagtctggccctgcttcattactaaaaacaagggcattcataatgttggaaatttaactcagtagaaaataaaattataccattcttttatgtttatgtaacatttaaaatcagcatttaacatcaggaaaatgcaaattaaaaccactatgagatactacttcacacccataaggatggctattatcaaaaaggcatgagataaattgttgacgagggtatggagaaaagggaaccctagtacactgctggcggagtcattatggaaagcagtatagaggttcctaaagaaattaaaagggaaactactacatgatccagcagtccttcttctgggtttatactggaaggagtaaaatcattaccttgtgaagttatctgcactcccctgttcattgcagcattattcacaatagccaagatattgaagaaactataagaat

SEQ ID NO: 683132 - DNA, 1088 bp, Homo sapiens
  misc_feature 2, 3, 4, 5, 6, 7, 8, 9, 10, 11, 12, 13, 14, 15, 16, 17, 18,19, 20, 21, 22, 23, 24, 25, 26, 27, 28, 29, 30, 31, 32,33, 34, 35, 36, 37, 38, 39, 40, 41, 42, 43, 44, 45, 46,47, 48, 49, 50, 51, 52, 53, 54, 55, 56, 57, 58, 59, 60,61: n = A,T,C or G
  misc_feature 62, 63, 64, 65, 66, 67, 68, 69, 70, 71, 72, 73, 74, 75, 76,77, 78, 79, 80, 81, 82, 83, 84, 85, 86, 87, 88, 89, 90,91, 92, 93, 94, 95, 96, 97, 98, 99, 100, 101: n = A,T,C or G
annnnnnnnnnnnnnnnnnnnnnnnnnnnnnnnnnnnnnnnnnnnnnnnnnnnnnnnnnnnnnnnnnnnnnnnnnnnnnnnnnnnnnnnnnnnnnnnnnnntgtatataaaaattaatgtaatgtttagtcctgggtgccatccctaaggtatctaattatgtatatacaaatattccaaaatctgaaaaagtccaaatctaaaacacttctggtctgaaggctttcagataagggatattcaacttgtattagaattccaaatcactaaaaacactctcacccaacttcctacctttaaaggagggtattaaggatacctcagttgagtaaatgtcaaacaactaagttttgtttttgtttcctgatgtttttccatttataaagtaaacatacacttcacatataatactttaaaatatcacaaatgtataattatgtcaccataaatacagtattaaaaacttacaaaacagcagagctgaggagcaagcacatttcatcatcctcttcttgaagcactgaacttattttctttcctgtagctttacttatagatgtcttgagtttcttagctagcttttttggtgtgttggttatagaagattcttctgtacagcaactatayacttccacctttatctgaaagtctggccctgcttcattactaaaaacaagggcattcataatgttggaaatttaactcagtagaaaataaaattataccattcttttatgtttatgtaacatttaaaatcagcatttaacatcaggaaaatgcaaattaaaaccactatgagatactacttcacacccataaggatggctattatcaaaaaggcatgagataaattgttgacgagggtatggagaaaagggaaccctagtacactgctggcggagtcattatggaaagcagtatagaggttcctaaagaaattaaaagggaaactactacatgatccagcagtccttcttctgggtttatactggaaggagtaaaatcattaccttgtgaagttatctgcactcccctgttcattgcagcattattcacaatagccaagatattgaagaaactataagaat

SEQ ID NO: 683133 - DNA, 608 bp, Homo sapiens
tttttttatgtatttcccttagctccaygagccaactaaacctcttcttaatttacctagccttaggtattcctttatagcaatgcaagaatggcctaactcaggcttctgctattttgattttttgcttttagtaatatcatttttttccagctactatctatgtcaagatcaatgagcttattgtatttcccctactccactttttttttcaagttgtgttatttctactttggtggaatggataatatttacataataatcttatagtcatatcttcacctttgttttagtctttgatatgcaattaaataggtataattttcacttcttgttcttccgttgtactttccaaaatcatccttttggaagaagttcatcagctagaagattcttccacatgagtacggtttccttcactttcttgcatgtttaaggtgtttttctttagtgtttctacttttagggtgactttgctagttataaattccttagccaacacattctttccttgagttttgtgaagactttgctccattgtattgttattaagaaatctaatctttcattttctttcctttgtaaatgagtttgactttttgcctgga

SEQ ID NO: 683134 - DNA, 2150 bp, Homo sapiens
acacacaaatataaaggtctaaaccttcttagctactccattttcatgagctaaattctcttcttggatgagttttaaatgttccttttcaagtcagtaggggtgatgaatgcccagccaaagagttggccccttgattctacggtaaagcagatgtccatgttagacatcaagaaaaataacattggttgggaatgttgtaacatttatataaattatatgggttaaacatactggaaaaaatgaggcatataatttatgtacagtgtgattattgtaaaagcagactatgcatatttatagatagttaaaaataaataatagcagaaaaggaaaagaattgaagagtcatagattagtggcatatgtgtaaaggccttattggaagccaagacaatgaaattagttgatattaaaatagtaccagaaaatatttttgtaccagtaaaatttagctgcagttgataattactgattaatttataaaatgatgtttctaaacatttattattctttgctagagctcctactagaataaaaatgctactggtagaagaaggaaaaaagagttttaaagatatttaaaggtcatatcacagcctcttatataaattaatctctaccagaatctaattaccatatagcaaaatatattctatttgttcctttatcttattctgctattgtcagaaatagagagcagccaattagtatggactgattaatactaatcaagtacaaattcttgaatttaagcacttaaatgtttttgtaccttgtttttacatgctgagatatattttaataaataatgattaatgtataatgtgagccatttggtataattaactttgaaaatttccaaataaacagatttacaaagcaaaaaaataagaggatttatctagtaagatggtaaattaaaaaaattaactgaaattgacaaaagaaaaaatagaataatcatagaaaagaaaatgcaactagggaaaatatttgggttttattcttactacaaatcaaaggaatgtaaatttaaaagttactctttaggcctattggatgtgtcatatcccttcctgttttgtcagtctcagctggcttgtgtctattgaaataaacactttcataattcactgataggaaggctatacactaataaaactcttttgcaatgtaatatcatttttccagagacctaaaaatgttcatcgttgttaattctataattctgtctccagcacctaattaaaaaaattatatgtgtaagagaagaagatgatgaagaaacagcagcagcattttgtgaaactatctggggtccctctactgaagtctgatatcyagccagcttctgtgtgtgttgctccataaggcaataagtcatagatgatctatatctggtattgttcctgttgccatgagtttttctcaggaaatgctatttcagagggcttggtggacatgttcttgggtcacctgaaccttgacagttgatacagcaagcagagtttctcttttagcaccagagggtcttataaacgtttacctacataacaaacctgcacatgtacccctgaacttaaaataaaagttaataaaaataaaacaatttgttcagaattgaaaaaaaaggctttgaggtgatggatgtgttaattagattgatttaattatcttacattgtacttataaattataacaccatacatatatgcaactataattaaaacataaaaaacatacaactataatttgtccatttacaatttaaaaataaccaaagacagaacttctcgaatgatggcttaagtagctcagtaaatcctctctcaaaaaagcaacaattaaaaaaactgtcacaagcagccatttcaggactctggatattgatcaaaagcatagacgtagctgaaaagcatttatgtaagaatatctactaaacttcatgtactaactatgagattttgtgggattttagcatagtgctattcctatttgcctccccattcaccctacctctgtgaagtgcaacaaaatgtaccctacccggtagggcaagcccttaatattagaacattaccgcagagggagtggatatgattttaggcaaagcatagaaaaacctaggtattgtcagagccagtagc

SEQ ID NO: 683135 - DNA, 2150 bp, Homo sapiens
acacacaaatataaaggtctaaaccttcttagctactccattttcatgagctaaattctcttcttggatgagttttaaatgttccttttcaagtcagtaggggtgatgaatgcccagccaaagagttggccccttgattctacggtaaagcagatgtccatgttagacatcaagaaaaataacattggttgggaatgttgtaacatttatataaattatatgggttaaacatactggaaaaaatgaggcatataatttatgtacagtgtgattattgtaaaagcagactatgcatatttatagatagttaaaaataaataatagcagaaaaggaaaagaattgaagagtcatagattagtggcatatgtgtaaaggccttattggaagccaagacaatgaaattagttgatattaaaatagtaccagaaaatatttttgtaccagtaaaatttagctgcagttgataattactgattaatttataaaatgatgtttctaaacatttattattctttgctagagctcctactagaataaaaatgctactggtagaagaaggaaaaaagagttttaaagatatttaaaggtcatatcacagcctcttatataaattaatctctaccagaatctaattaccatatagcaaaatatattctatttgttcctttatcttattctgctattgtcagaaatagagagcagccaattagtatggactgattaatactaatcaagtacaaattcttgaatttaagcacttaaatgtttttgtaccttgtttttacatgctgagatatattttaataaataatgattaatgtataatgtgagccatttggtataattaactttgaaaatttccaaataaacagatttacaaagcaaaaaaataagaggatttatctagtaagatggtaaattaaaaaaattaactgaaattgacaaaagaaaaaatagaataatcatagaaaagaaaatgcaactagggaaaatatttgggttttattcttactacaaatcaaaggaatgtaaatttaaaagttactctttaggcctattggatgtgtcatatcccttcctgttttgtcagtctcagctggcttgtgtctattgaaataaacactttcataattcactgataggaaggctatacactaataaaactcttttgcaatgtaatatcatttttccagagacctaaaaatgttcatcgttgttaattctataattctgtctccagcacctaattaaaaaaattatatgtgtaagagaagaagatgatgaagaaacagcagcagcattttgtgaaactatctggggtccctctactgaagtctgatatctagccagcttctgtgtgtgttgctccataaggcaataagtcatagatgatctatatctggtattgttcctgttgccatgagtttttctcaggaaatgctatttcagagggcttggtggacatgttcttgggtcacctgaaccttgacagttgatacagcaagcagagtttctcttttagcaccagagggtcttataaacgtttacctacataacaaacctgcacatgtacccctgaacttaaaataaaagttaataaaaataaaacaatttgttcagaattgaaaaaaaaggctttgaggtgatggatgtgttaattagattgatttaattatcttacattgtacttataaattataacaccatacatatatgcaactataattaaaacataaaaaacatacaactataatttgtccatttacaatttaaaaataaccaaagacagaacttctcgaatgatggcttaagtagctcagtaaatcctctctcaaaaaagcaacaattaaaaaaaytgtcacaagcagccatttcaggactctggatattgatcaaaagcatagacgtagctgaaaagcatttatgtaagaatatctactaaacttcatgtactaactatgagattttgtgggattttagcatagtgctattcctatttgcctccccattcaccctacctctgtgaagtgcaacaaaatgtaccctacccggtagggcaagcccttaatattagaacattaccgcagagggagtggatatgattttaggcaaagcatagaaaaacctaggtattgtcagagccagtagc

SEQ ID NO: 683136 - DNA, 2150 bp, Homo sapiens
acacacaaatataaaggtctaaaccttcttagctactccattttcatgagctaaattctcttcttggatgagttttaaatgttccttttcaagtcagtaggggtgatgaatgcccagccaaagagttggccccttgattctacggtaaagcagatgtccatgttagacatcaagaaaaataacattggttgggaatgttgtaacatttatataaattatatgggttaaacatactggaaaaaatgaggcatataatttatgtacagtgtgattattgtaaaagcagactatgcatatttatagatagttaaaaataaataatagcagaaaaggaaaagaattgaagagtcatagattagtggcatatgtgtaaaggccttattggaagccaagacaatgaaattagttgatattaaaatagtaccagaaaatatttttgtaccagtaaaatttagctgcagttgataattactgattaatttataaaatgatgtttctaaacatttattattctttgctagagctcctactagaataaaaatgctactggtagaagaaggaaaaaagagttttaaagatatttaaaggtcatatcacagcctcttatataaattaatctctaccagaatctaattaccatatagcaaaatatattctatttgttcctttatcttattctgctattgtcagaaatagagagcagccaattagtatggactgattaatactaatcaagtacaaattcttgaatttaagcacttaaatgtttttgtaccttgtttttacatgctgagatatattttaataaataatgattaatgtataatgtgagccatttggtataattaactttgaaaatttccaaataaacagatttacaaagcaaaaaaataagaggatttatctagtaagatggtaaattaaaaaaattaactgaaattgacaaaagaaaaaatagaataatcatagaaaagaaaatgcaactagggaaaatatttgggttttattcttactacaaatcaaaggaatgtaaatttaaaagttactctttaggcctattggatgtgtcatatcccttcctgttttgtcagtctcagctggcttgtgtctattgaaataaacactttcataattcactgataggaaggctatacactaataaaactcttttgcaatgtaatatcatttttccagagacctaaaaatgttcatcgttgttaattctataattctgtctccagcacctaattaaaaaaattatatgtgtaagagaagaagatgatgaagaaacagcagcagcattttgtgaaactatctggggtccctctactgaagtctgatatctagccagcttctgtgtgtgttgctccataaggcaataagtcatagatgatctatatctggtattgttcctgttgccatgagtttttctcaggaaatgctatttcagagggcttggtggacatgttcttgggtcacctgaaccttgacagttgatacagcaagcagagtttctcttttagcaccagagggtcttataaacgtttacctacataacaaacctgcacatgtacccctgaacttaaaataaaagttaataaaaataaaacaatttgttcagaattgaaaaaaaaggctttgaggtgatggatgtgttaattagattgatttaattatcttacattgtacttataaattataacaccatacatatatgcaactataattaaaacataaaaaacatacaactataatttgtccatttacaatttaaaaataaccaaagacagaacttctcgaatgatggcttaagtagctcagtaaatcctctctcaaaaaagcaacaattaaaaaaactgtcacaagcagccatttcaggactctggatattgatcaaaagcatagacgtagctgaaaagcatttatgtaagaatatctactaaacttcatgtactaactatgagattttgtgggattttagcatagtgctattccyatttgcctccccattcaccctacctctgtgaagtgcaacaaaatgtaccctacccggtagggcaagcccttaatattagaacattaccgcagagggagtggatatgattttaggcaaagcatagaaaaacctaggtattgtcagagccagtagc

SEQ ID NO: 683137 - DNA, 2150 bp, Homo sapiens
acacacaaatataaaggtctaaaccttcttagctactccattttcatgagctaaattctcttcttggatgagttttaaatgttccttttcaagtcagtaggggtgatgaatgcccagccaaagagttggccccttgattctacggtaaagcagatgtccatgttagacatcaagaaaaataacattggttgggaatgttgtaacatttatataaattatatgggttaaacatactggaaaaaatgaggcatataatttatgtacagtgtgattattgtaaaagcagactatgcatatttatagatagttaaaaataaataatagcagaaaaggaaaagaattgaagagtcatagattagtggcatatgtgtaaaggccttattggaagccaagacaatgaaattagttgatattaaaatagtaccagaaaatatttttgtaccagtaaaatttagctgcagttgataattactgattaatttataaaatgatgtttctaaacatttattattctttgctagagctcctactagaataaaaatgctactggtagaagaaggaaaaaagagttttaaagatatttaaaggtcatatcacagcctcttatataaattaatctctaccagaatctaattaccatatagcaaaatatattctatttgttcctttatcttattctgctattgtcagaaatagagagcagccaattagtatggactgattaatactaatcaagtacaaattcttgaatttaagcacttaaatgtttttgtaccttgtttttacatgctgagatatattttaataaataatgattaatgtataatgtgagccatttggtataattaactttgaaaatttccaaataaacagatttacaaagcaaaaaaataagaggatttatctagtaagatggtaaattaaaaaaattaactgaaattgacaaaagaaaaaatagaataatcatagaaaagaaaatgcaactagggaaaatatttgggttttattcttactacaaatcaaaggaatgtaaatttaaaagttactctttaggcctattggatgtgtcatatcccttcctgttttgtcagtctcagctggcttgtgtctattgaaataaacactttcataattcactgataggaaggctatacactaataaaactcttttgcaatgtaatatcatttttccagagacctaaaaatgttcatcgttgttaattctataattctgtctccagcacctaattaaaaaaattatatgtgtaagagaagaagatgatgaagaaacagcagcagcattttgtgaaactatctggggtccctctactgaagtctgatatctagccagcttctgtgtgtgttgctccataaggcaataagtcatagatgatctatatctggtattgttcctgttgccatgagtttttctcaggaaatgctatttcagagggcttggtggacatgttcttgggtcacctgaaccttgacagttgatacagcaagcagagtttctcttttagcaccagagggtcttataaacgtttacctacataacaaacctgcacatgtacccctgaacttaaaataaaagttaataaaaataaaacaatttgttcagaattgaaaaaaaaggctttgaggtgatggatgtgttaattagattgatttaattatcttacattgtacttataaattataacaccatacatatatgcaactataattaaaacataaaaaacatacaactataatttgtccatttacaatttaaaaataaccaaagacagaacttctcgaatgatggcttaagtagctcagtaaatcctctctcaaaaaagcaacaattaaaaaaactgtcacaagcagccatttcaggactctggatattgatcaaaagcatagacgtagctgaaaagcatttatgtaagaatatctactaaacttcatgtactaactatgagattttgtgggattttagcatagtgctattcctatttgcctccccattcaccctacctctgtsaagtgcaacaaaatgtaccctacccggtagggcaagcccttaatattagaacattaccgcagagggagtggatatgattttaggcaaagcatagaaaaacctaggtattgtcagagccagtagc

SEQ ID NO: 683138 - DNA, 2150 bp, Homo sapiens
acacacaaatataaaggtctaaaccttcttagctactccattttcatgagctaaattctcttcttggatgagttttaaatgttccttttcaagtcagtaggggtgatgaatgcccagccaaagagttggccccttgattctacggtaaagcagatgtccatgttagacatcaagaaaaataacattggttgggaatgttgtaacatttatataaattatatgggttaaacatactggaaaaaatgaggcatataatttatgtacagtgtgattattgtaaaagcagactatgcatatttatagatagttaaaaataaataatagcagaaaaggaaaagaattgaagagtcatagattagtggcatatgtgtaaaggccttattggaagccaagacaatgaaattagttgatattaaaatagtaccagaaaatatttttgtaccagtaaaatttagctgcagttgataattactgattaatttataaaatgatgtttctaaacatttattattctttgctagagctcctactagaataaaaatgctactggtagaagaaggaaaaaagagttttaaagatatttaaaggtcatatcacagcctcttatataaattaatctctaccagaatctaattaccatatagcaaaatatattctatttgttcctttatcttattctgctattgtcagaaatagagagcagccaattagtatggactgattaatactaatcaagtacaaattcttgaatttaagcacttaaatgtttttgtaccttgtttttacatgctgagatatattttaataaataatgattaatgtataatgtgagccatttggtataattaactttgaaaatttccaaataaacagatttacaaagcaaaaaaataagaggatttatctagtaagatggtaaattaaaaaaattaactgaaattgacaaaagaaaaaatagaataatcatagaaaagaaaatgcaactagggaaaatatttgggttttattcttactacaaatcaaaggaatgtaaatttaaaagttactctttaggcctattggatgtgtcatatcccttcctgttttgtcagtctcagctggcttgtgtctattgaaataaacactttcataattcactgataggaaggctatacactaataaaactcttttgcaatgtaatatcatttttccagagacctaaaaatgttcatcgttgttaattctataattctgtctccagcacctaattaaaaaaattatatgtgtaagagaagaagatgatgaagaaacagcagcagcattttgtgaaactatctggggtccctctactgaagtctgatatctagccagcttctgtgtgtgttgctccataaggcaataagtcatagatgatctatatctggtattgttcctgttgccatgagtttttctcaggaaatgctatttcagagggcttggtggacatgttcttgggtcacctgaaccttgacagttgatacagcaagcagagtttctcttttagcaccagagggtcttataaacgtttacctacataacaaacctgcacatgtacccctgaacttaaaataaaagttaataaaaataaaacaatttgttcagaattgaaaaaaaaggctttgaggtgatggatgtgttaattagattgatttaattatcttacattgtacttataaattataacaccatacatatatgcaactataattaaaacataaaaaacatacaactataatttgtccatttacaatttaaaaataaccaaagacagaacttctcgaatgatggcttaagtagctcagtaaatcctctctcaaaaaagcaacaattaaaaaaactgtcacaagcagccatttcaggactctggatattgatcaaaagcatagacgtagctgaaaagcatttatgtaagaatatctactaaacttcatgtactaactatgagattttgtgggattttagcatagtgctattcctatttgcctccccattcaccctacctctgtgaagtgcaacaaaatgtaccctacmcggtagggcaagcccttaatattagaacattaccgcagagggagtggatatgattttaggcaaagcatagaaaaacctaggtattgtcagagccagtagc

SEQ ID NO: 683139 - DNA, 2150 bp, Homo sapiens
acacacaaatataaaggtctaaaccttcttagctactccattttcatgagctaaattctcttcttggatgagttttaaatgttccttttcaagtcagtaggggtgatgaatgcccagccaaagagttggccccttgattctacggtaaagcagatgtccatgttagacatcaagaaaaataacattggttgggaatgttgtaacatttatataaattatatgggttaaacatactggaaaaaatgaggcatataatttatgtacagtgtgattattgtaaaagcagactatgcatatttatagatagttaaaaataaataatagcagaaaaggaaaagaattgaagagtcatagattagtggcatatgtgtaaaggccttattggaagccaagacaatgaaattagttgatattaaaatagtaccagaaaatatttttgtaccagtaaaatttagctgcagttgataattactgattaatttataaaatgatgtttctaaacatttattattctttgctagagctcctactagaataaaaatgctactggtagaagaaggaaaaaagagttttaaagatatttaaaggtcatatcacagcctcttatataaattaatctctaccagaatctaattaccatatagcaaaatatattctatttgttcctttatcttattctgctattgtcagaaatagagagcagccaattagtatggactgattaatactaatcaagtacaaattcttgaatttaagcacttaaatgtttttgtaccttgtttttacatgctgagatatattttaataaataatgattaatgtataatgtgagccatttggtataattaactttgaaaatttccaaataaacagatttacaaagcaaaaaaataagaggatttatctagtaagatggtaaattaaaaaaattaactgaaattgacaaaagaaaaaatagaataatcatagaaaagaaaatgcaactagggaaaatatttgggttttattcttactacaaatcaaaggaatgtaaatttaaaagttactctttaggcctattggatgtgtcatatcccttcctgttttgtcagtctcagctggcttgtgtctattgaaataaacactttcataattcactgataggaaggctatacactaataaaactcttttgcaatgtaatatcatttttccagagacctaaaaatgttcatcgttgttaattctataattctgtctccagcacctaattaaaaaaattatatgtgtaagagaagaagatgatgaagaaacagcagcagcattttgtgaaactatctggggtccctctactgaagtctgatatctagccagcttctgtgtgtgttgctccataaggcaataagtcatagatgatctatatctggtattgttcctgttgccatgagtttttctcaggaaatgctatttcagagggcttggtggacatgttcttgggtcacctgaaccttgacagttgatacagcaagcagagtttctcttttagcaccagagggtcttataaacgtttacctacataacaaacctgcacatgtacccctgaacttaaaataaaagttaataaaaataaaacaatttgttcagaattgaaaaaaaaggctttgaggtgatggatgtgttaattagattgatttaattatcttacattgtacttataaattataacaccatacatatatgcaactataattaaaacataaaaaacatacaactataatttgtccatttacaatttaaaaataaccaaagacagaacttctcgaatgatggcttaagtagctcagtaaatcctctctcaaaaaagcaacaattaaaaaaactgtcacaagcagccatttcaggactctggatattgatcaaaagcatagacgtagctgaaaagcatttatgtaagaatatctactaaacttcatgtactaactatgagattttgtgggattttagcatagtgctattcctatttgcctccccattcaccctacctctgtgaagtgcaacaaaatgtaccctaccsggtagggcaagcccttaatattagaacattaccgcagagggagtggatatgattttaggcaaagcatagaaaaacctaggtattgtcagagccagtagc

SEQ ID NO: 683140 - DNA, 656 bp, Homo sapiens
tgcaagtacgtatgaaaagcatgtaaggctaagaggagatatttgtgcatatcttcttggcctttgtgactcaagaatttgtgcctcttccttttttcccaggttaaatcccctaaaaaaacagagtgtttggcataaaatgcatgtattgaaggctgtgtacaatgattcttagtttagtttctcatttttaaataagaagcaagaattcataatactgtcttttagcatgggaagggtgaataaaatttaaacttaatggcataacacacttgatagtgtgatgtttatccacaacaaacaagcaagtaggcaacgctaacctaatggcttaagttacatgagaaaccaagcyactacttagtctaattgcagaagtcttattcaggggacaaaattctctggatacagggcacttaatttctaattaaaagcatgctatttgttgaccttcatacttccaaaaagaactggggctaccttactattaaatatatacctaatatatgaaaacaaaagaaaaccaacaactgctagtaagtagttaaggaaaaagaagatagaactgtgtccccaaactcagactagagaaagttgtcaatgtgcagtaaaaattaactttaaacttcttaaaaataaaggcaaaaactgacttt

SEQ ID NO: 683141 - DNA, 656 bp, Homo sapiens
tgcaagtacgtatgaaaagcatgtaaggctaagaggagatatttgtgcatatcttcttggcctttgtgactcaagaatttgtgcctcttccttttttcccaggttaaatcccctaaaaaaacagagtgtttggcataaaatgcatgtattgaaggctgtgtacaatgattcttagtttagtttctcatttttaaataagaagcaagaattcataatactgtcttttagcatgggaagggtgaataaaatttaaacttaatggcataacacacttgatagtgtgatgtttatccacaacaaacaagcaagtaggcaacgctaacctaatggcttaagttacatgagaaaccaagctactacttagtctaattgcagaagtcttattcaggggacaaaattctctggatacagggcacttaatttctaattaaaagcatgctatttgttgaccttcatacttccaaaaagaactggggctaccttacyattaaatatatacctaatatatgaaaacaaaagaaaaccaacaactgctagtaagtagttaaggaaaaagaagatagaactgtgtccccaaactcagactagagaaagttgtcaatgtgcagtaaaaattaactttaaacttcttaaaaataaaggcaaaaactgacttt

SEQ ID NO: 683142 - DNA, 1309 bp, Homo sapiens
atgaatctgttcttgtattgctataaagaaacatctaaagctgggtaatttataaataacagagggttaactgcttcacagttctgcaggcttgtacaggaagcatggtgccagcttctgcttggtttctgttgaagcctcagggagcttacaatcatggcagaaggcaaaaggggagctggagtctcacatggcaagaatagaagcaagagagagaggtgagggtggaaggtcccacacacttaaacaaccagatctcacaggaactcgctcatcaccaagaggatagcactaagccattcatgaggaatccaccgcgtgatgcaaacacctcccaccaggccccatctccaacactggggattacaggtcaacatgagatttggcagggacacagatccaaaacatatcaggttatatattgaaatatatggtatttgggctaactcaggattgtaggttttgtggtggtttgttttcttcattggtttctccgtattttctacattttacctgcacaagcataaagatgtgctttatttttctaagtaaagatctcatttgataagatatattttcttcttgaatccttagcatggccctatgtttagttaccattgttattcttatttttacacactgagattgagagtgtgggaacatgcctggtggtagccaagctgggatgcattagacccctgagcagtccttctccacactgccccgattatgtaaatccagggatgtgtccaacaagatctggttatacttggaaaatacacaccaggaaatgtaaaaatattggtgayagatggcagaagcaacgcctctgactccagttatcagaagatatgggccttgtgggttgggtaagctcagcattactaatttccaactactggaatattgagcctggaatgacaaaaaaaattcagaattattctttcacatacccatgttatgagtgcaaagcacaggctctccagtccaattttctgtatcaagactttcttatgatggttgagcgggtttgactaactcttacacagtccattaatctcctggatatccagtttctgaaattaattaccatttcattccataaatgtctatgaattccctagtctatgtcaggctttggtgggccagacactgtatgcataaacagtgtttcattctctagtcccaaggtgtttgctgtttagagaggccctaggcatgtagtgagtttaaataattacaacaggaggaaggaacatatggcagcaatgatgtccgtggtgcaatgactgcagagaagggcatggaa

SEQ ID NO: 683143 - DNA, 1388 bp, Homo sapiens
tgagcttccttgagctcagggtcagcctttttcttcagctccttcacgttatgttcctgagcagaaacaaacaaacgcactttgtagaacggcatgtggggttaaggaggcctgcatgtctgtggtgacaatcaaaataactgataaactcggatgggatgtgtctattaaaatagtggtagctgcctctcaggactgcccactgcctgccaagttaggaacatgacctcacatccgtacaccaaccctgtgaagggaggggccggatgcccattttatagagacattgtcatgaactcctggaactaaggtcagacttgaggtcttcccagttttcaggactgtttaagctctgtactcttggactgccttgggacccgcctgtaactcttgtaccttcatgcctscacctcaccctgtaatgtaagctctccaggtacatgagccccacctacctccccatacaaacacacccacatactcccccaccccagagggtgttcaaaagctctatctatccttcagggtctggtataaatgtactcttccttattctaaccccagcaccttgtttcttaaagtgcaattcaatgtttcccacttccaaaaagcatttatttttattagtgagttaatatcatctgagaaataatgactcaagactgtccctagaaaaagtgaccctagctggccatcatttgtcgtggtatggagatgagtgaggagagaacatgttgaattgaggagaataccccagaatgcgtccctagacctagctacagagtaggaatgcaataaacaaagccattgttgactggctggctcagcctgtgataggcgaggctgtttcaagggagctgctgcaccacagactgaagcctgaccttgatccctacacaccttcccacctagacccaggggagctatctcctagactggagaaagatgcataccccaccggagctatttcacactgctcacagctccgggccagcaaagatgaagaagcgctataatcattgaaacaaggccagtagctgtcattgtcctataataacagagcaacacagttttcttggcttcatggaagactgcctattaggaggtcatctgagggaagccagccatccattatgagcgccatatcatatttcccccccatattttgtcttaattttctaaagtttcttagaggaaaagtggcttatgctaggctgatggtttctcttatcccaaaatagtatgggagattctttttaaggaatctcattatcgagtttacctcttgtttccacagctccttttcattcagtcagtccttcatttatttatttgccgacgtaaaagggccatcagcaaagatctgtggggtgactctttcacacata

SEQ ID NO: 683144 - DNA, 804 bp, Homo sapiens
gcagccccgcagtgcacactggagcatcacatgctcctcctgcaggtggctgtgactcccaagcagctgtgctgccccccagtaggcaccaggccctgggccctctccagcttttgctctgcacacaaagccacatggacaccaccgtgcgggcctcatcctctgaggctgcctcacctcctgcaggaggctcagcttctccagctcccactggtggtccagaatgagactgtcactccggggcctccagcctgccaggttctcctcgccccggacataggccacagatgtgtccaggactcgtcggcgccggcgctgcatccctgcatggggcacgtggacattccacccctacctgatgggtggytgctcctcccacccatcctagaggtccgcccatctgtgaagctgtctcccctctggagtggagatgggcttcccctggtccttggtccaccctggggcccaaagagccatgtaggcctcttccataggaagttatccagcccggcgtcccatggccatctcggctgtgccctgggaacccaaggaagccagcaggcctgactctcctccctcgctctcctcccatctcagaacaactccagaagccacaaggtgagtgcttgggttctgtgagggatccccctgcaaatggcagcttcgctgtggtcaccccaagtgggcagaggttgagcaggccaggaacccacccagtgagagcagggcagatacctacctgggctgcccgcgtcagccacgtggcacaggctgagctcgtacacaccagtcacacggttactg

SEQ ID NO: 683145 - DNA, 688 bp, Homo sapiens
tgaaggtggccacgggtgcccggtagcctcggcagccctgctgtcagggccctgacattccggctcattctcccccacccccaagaatcaggagcgtgttcagcacgcaagcacggctggtcctggtgttcggtgtgtggctccccaaggtgctgacagcctccaagaagagccacccagcaggtcctgtgggaagctgtgtccagagcccccttccagccaccgcccacttatccagctcctccttcagtgccttgtgggcagtcagtcccatggcacaggttccgtggtcctcagggaagaaggtcaccggcggcsggggggggggggggggaacggtgtggccccaggatcacccacaggaggccccaggtgggcaccctgggcctgcccctcctcccatccgctgcaggctggccctcaagtccctcatagtggtgtcagtgtcccctgcaggaaccatggcctccacagagtcttcatctagggtgagcaggaggggactgagcgcagggagccagccaggagtgtggctgggcctcgcacagggtgagctgccgggtggcccaaggaccgctgccaggcagagccctgcctggcccgcaccgagaccagggtgggagtccatgtggtcctcacccctgggagcttacctctctgaggcccgaaggctcccactgccaaagag

SEQ ID NO: 683146 - DNA, 1129 bp, Homo sapiens
cacgcacacacacacacacacacccctatagacatacacaatgaaatagtattcagcctttaaagaagaaggaaatcctgtccttttatacaacattgattcacctggaggaaattaagtgaaataagccaggcacagaaagacaaatgacacatgatgtcacttatatatggaatctaaaaaacacaaactcacagaaacagaaagcagaatgacaatcaccaggggctgggggatgatgggagatgttggtcaaaggatacaaaattcaattcgacaggaagaatacattctgtagagctattgtacagcatggtgactatagttaataataatatattatatacttgaaaatagctaagtgagtagatatgttttctcatcagaaaaaaataagtatawgaagcgataattatatattacttagcttgagttagccatttcacaatatatatatatttgaaaacatcattttgtacaacataaatatattcatttttatttgtcaattaaaaaatgaatatatttttgaaaagcaattaaaataaaaatgcatatacattttaggaactctatatagatgcactaaaactatataaaaatgatataatactatacaacaataaaataaaatttttcttcctctgtgtttacaaatacttccttaggcccatctgcctagattcctcttaccatgattgaactatcttttctgccccacgctggaaacatgatggttctaaaaactttattgtctccctgactatgcatttggtagcatagccaagtcctttgttactgggagtttaatctaggcactcattgttttcctcccttcctactctgaggaaagaagtgctggccccaaggggggttgaaaaggggtgtgtgtgtgtgtgtgtatgtgtccacacgcgtgtgtgtagatagagaaagagagagagactttcaaataggaaaattgctctcttgcaaatgaaaactttccaattaagactattgtgtctgctatgcactcataataattcattcagctattcaactgactgcagtattaaatctccactagctcctggacacaatccacttacacgatcctcaagactattaaaatagtcaggaaagggga

SEQ ID NO: 683147 - DNA, 1288 bp, Homo sapiens
  misc_feature 920, 1043, 1044: n = A,T,C or G
tgtgaatcctcaacttatattagcataaattctgagccagattaataaaaataatttcataggctcatagaaataaaaaacaaattataaatatttatatacatattttaatataaatattataattttacataaatatttatatataattttacttatattatttttatataaatatatattatataagtatataatatatatttatttaatataaatatattatttatatataaatatttatattatatataattatatatattatattaatataagtagatatatacaaaaaataattmtaattaaaaatgtggccaaaattaaaccattttcagaaaaagaaaaacggggtcattttgctgctagcagatctgacagaattcctgaaggatacatttcaagaaagaaatagaacacaaaatgaaaaagttggctgaagaaacaaatttgagggaaaaaattaccaataattagtatgtaagtctaaataagtactgcctacaaattcatgtaataatactgtttaatttgttttatctcaaattaaggtagagttaagatactacacaaaaataacatattagaggagagcaatgatatgtcatcagtctaggaaaattcatttttccagatcaggacacaaatattgattacagttcaccttaattaagtatgcatgttaaaatttaagagtaatcacttataaaagagaaagaaaaaagaagaaaggaaggaaaggagggagggagggatgaatggagggagatgatgtgtaactttccatcagagatgggggaaagagaaacagaaaacacaaagcaaaagaggacaagaaggaagaggagaataaaaggaaaaacctcaaaaagtggaaagtgtgaagtaaagtgataggcataaattagatgtatctgtanatataacacatgtaactgactaaaatgggctattagcaggacgtgtcacattggatgactaaaaatctggtatatgctttacctattaaatctatatactatacccaggggataagaccccannttaaataattgggaaaatgagattgctgtaaatactagaaaaatgggcagcatagccttattactaccagattcagcagctacagatgtgtcatatttcactgttccttctacttctcaggagtaatcactcctttttgccacagaatcaattccaaactctagcatggctttccaggttcttcacctctggttatagcctttctttggatagttatattcctctttgatctcttagctgctat

SEQ ID NO: 683148 - DNA, 1470 bp, Homo sapiens
attccaattatttaagaggtcatatttatgaattatgtgactacttcaaatgatttatgtatatatgtgtgtggattgattgtttattcaaagcagtaactgtcaataccacaggagtatgaccaggtacaagactattctaccaaagttgcagttattgtcttctgagatgagaacagatgaaaatattaaatgagaataaatgaaagctgaaaatataaattccttgtattccactcatcatttcaagcacagcatgcaattagagaaatggcaaactaaaactaaaacaatggactattagatttttatttgggagtttgggatgaatgagaaagattagtgaaaaacacctctaaagttttaaaacacatatttttaccactatattccttaactgaataaaagcacctcttcttacctacaatggagagaatgaccaccacaaaatcaaaaatattccatccaatagtgaaatagtagtaacgaagagagatcagtttcagcacacattctccagtgaacagaacaataaacaccagattaatccagtacagaatgtttgtcatttcttgactctggtcatcggtttccaccatcatggtgaccatgttaaggcagatgaggatcatgatgctgatatcaaagacttgtttggttacaaaatcaaagaccattccttggaatttgttctggaacaaataatatgtaaaagttccattagaaaccttaaaaaaaatcgaattcaattcttctgattttaagaaagcaacaaaaaatgtagcttttataaaaacacatctttaatcctcacaacattttacaaaaaaaaaaattccttgcaaaaccagtgattggagagctgaggtaacttgccttaggtcacaaagcaggtaagtagtgtaaatagggaagctccatgtcagatctcaaatcttatctctctctcttttttttaattttttttattttttgagatggagtctcgctctgttgcacaggttggagtgcagtggcacgatcttggctcactgcaacctctgcctcccgggttcaagcgatactcctgcctcagcctcctgagtagctgggattacaggtacatgccaccatgcccgactactttttgtaattttagtagagacgggatttcaccgtattggtcaggctggtctcaaactcctgacctaatgatctgcccacctcgacctcccaaagtgctggaattacaggcatgagccaccatgcccagcctcaaatcttatctcttaatgctacctcatagcatttatgtgagggtcaaatgcaatggaacattattacaatgttctattctattaaagaaagtagtgtattttattttcgttttatacttggaagaaaattttgtatattgtatattcaactgtattcaaatgtatttgttttatttatactcacattgataccaggttttataaactcacstat

SEQ ID NO: 683149 - DNA, 422 bp, Homo sapiens
gatggcttagagtcacaaatttattccaatgtagaaaattagattttaaaaagtctctaatttcctgacttaaagtgttatatttcagatgtctcaccttggagcagagatataacaaaaggcagtgaggctaatagtctaagatacatgaatccttccatgttttggtgatgctggtgcaattgatcaaatagcccagtaaasttagaggtatatagatgctgtagttagtaactgattttcacaataattttgtcctttattcctcttgttgcaaaccctagacttaaatcctgattttctgacttcaagtacagtgtcttttactgtaagttaaaaatgcttggagagatggtcatggttgtttggccacagttgggaggtcattgtatatttattaccactagtttataaaccaacaa

SEQ ID NO: 683150 - DNA, 1249 bp, Homo sapiens
tttctcaaggctgaacagggtactgatttaaaaaaacaaaaaattaaatggttgtgatcagcctcttagtgaaaattaagtttttgtaaatattgccctcagatttcttgagacagagacaaaggggtgaaaattggggaataaatcatacagttatttcagcttgatttaatttattcatgaagaccatcataaaatatgcaaagggaagtggagaagctgccccgtgtactataattaaacatccctactagcaagattaattatatttcctccatggtaagatttgcatcagggtgtggtcactagcgagctcttactggctacatttttgacctcagaggatctaaaggtagatttgtgtttaattgttttccattgggttgttaactgaaattaacttctaaagaagggtctatcaacagtatcagttctagatgccmgtaacaggacaaaacattatggggacacttctgactatgttgaggtgtgggtaaagtaggagaaaagagagcagaagatggaaaatggaggaaggagaaaaagcgagagtgaaatagaaaaggtgaaccttgtagaaagtgccaaaatgccaccagcagtcatcagaggggtgctttcttccacatgtccaatgacttatccttgagtaagtcaatgactatgacacaatgaatcaaattctgtttttcagaatgccagctcttaactctcttcatctcatttttgtttcttctcttgttattcatagtccttactgagcatccgtggctcccttttctctccaagacgcaacagtagggcgagccttttcagcttcagaggtcgagcaaaggacattggctctgagaatgactttgctgatgatgagcacagcacctttgaggacaatgacagccgaagagactctctgttcgtgccgcacagacatggagaacggcgccacagcaatgtcagccaggccagccgtgcctccagggtgctccccatcctgcccatgaatgggaagatgcatagcgctgtggactgcaatggtgtggtctccctggtcgggggcccttctaccctcacatctgctgggcagctcctaccagaggtgaggccaattaaaattgcagctgatgtgaagagagttgtgactggtgcaggcaggagtgtttttccatttccacatctaagaatttgttgagtttgttgcccaaaggctgggagtttgttcaatcaagctgttaactgtcttgtgaaactg

SEQ ID NO: 683151 - DNA, 711 bp, Homo sapiens
agactaagcagaaaagctaaatcaataaaacatctgaaataaaacacaggagaacatctttgagaccttggggtaggcaaaaatttattggaaaacagacaaaaagtgctatctattatttaaatgtccatgaaatttcaaacaatggagacctactgaacaaaaaagaaaagtctagtaatatacacatgggtgaatttcaatttgaagtattcaagtaatatttggaaaagtcactaagactgtcaggtctctgaggtarccacctaggtagagagagattccatttactgagttagcaaatatcagaagagaagcaaaactgtggagaaaaagcagtaagatgaattttggacctgttgaatttgagatgcctgggagatagtctttcaaatgtaggtattgaataggcaggtgggtatgtatttctagagactaggaggtatgcttgaacagaaaaatagattttgaaatatgaactattataaaaatgtaacttattataaaaggaaaactaaagtaagaggggtctagacagagagagttctgaataaatccagtatcaaatgatttgttagaggaagaaaatcaggtgagtagcatccagggaggtgtggatcacagaagctaagggcagaaaatatttcaatgaacaaggaacagaaaacaatgcctgaaacttctaaaagggcaagcaagcaagataattgt

SEQ ID NO: 683152 - DNA, 1156 bp, Homo sapiens
ttgatgaaggtggaagccatcatcctcagcaaactaatacaggaacagaaaaccaaacaatgcatgatctcactcataagtgggagttgaacgttgagaacacatggacacagattgggggacaacacacaccggggcctgttgggggtggggggtgaggggagggaacttagaggatgggtcaataggtgcagtaaaccaccatggcacatgtatgcctatgtaacaaacctgcacgttctgtacatgtatcccttttttttttaaagaataagtaaagaaaataaataaataaagttttacaaagcgaaatattaaatatatctgtttcttattttcatataattacccaggaaacacttactcactacctaccgtttttcagggctsgatattgtggggaatataaaagtgaatcagacatataccatccctctttaagtagaagagtcagaaatatctggctctgtaagtaattgtaaaatataaaagagaaagtaataagtttcataagagagatgcaagcagatgagagttttccatgtaatccgaatctttttttcttttttacaggaagtatggtgttgatgagcttgagtgagaaaaaaaatggatttgggttagaagacttgggatcttgcacttaccaggtacgtggcttgaggaggctactttaccttttctacccagctctaccctgtctaacatgaggacagtagtaggtttcctacttatggaacatagtttttgggaagcatataacagataatagacatagttttatataagtaacttattcaaaataggtattatttcttccagggaatagtcaaacattttgttctctagaacaaggaattaatttatcttcttctaactttaataaggtgcaccatgagccagtcctaggaatagcaacatggattcaatttaaattgctaataggcgatactcatgaggtagcaaagagcctctttctgacacatccatcaaatctcattctcttaccagcctggtgagagccagttattttgacgttgatgctgactgcttttgaaagcacatgctgtgcagcactttgcccagggtttagctttcccacagacctgacatttgtatgttgttttgctttccttgatcttctccccttcttccc

SEQ ID NO: 683153 - DNA, 669 bp, Homo sapiens
atgaccttacccgtgtagggtgttatttagttaacccagcctaagaggatgttttaaaggtggagaattgccctggtgatgaacaaatatgagaaataaacttccagtggggctgggttgcctgctgactgtgatttcctgatgatctataacaatggttattcactaacagctggcgcatgtctcccccggacaaagccactgggaagcacaggcgctctgattggtgaaccagaaccgtttccctggtaacagttaactagcacgtgttttattgtttccaactgcttttcctggggtatttgcaggtggtgggagatgctttcttaaagaggggtcataacctygtgaactttcagatgttgcaacaaattggggaacaaaacatttttcctttttcaaatatattaagtaaatcttattacatagcattttcaagacagatgcagcccaacagtttttcctttttgccattatttccagatgttatcaattttaaagtcagcattccattttaagaacaggatctataggaaggtgatattagtaatacgtatagcagcagagtattattttgccctttttggaggtgtgttctggttttacattttgctataaaatgtgagatcaaaccgtaaaatgtgagtgtatttttaattggccttttaa

SEQ ID NO: 683154 - DNA, 667 bp, Homo sapiens
tcttagatttatcaaaattacagaagtgtatatagtatagctagaatgagcttggatataatatgttccatcctttacaatctccctatggaaatgtagcaacttctgtgataggatctttataaataatgataatattattaattgactatttattgaatgcttagtttgtggcaggcaccatgcaaagctccttatatattttrtctcatccagtcatcaccaaatcctatgatatcgtcacaattactaacccagtttcacggatgataagactaaggctaccaattaatgcattttctattgactgcctcagtggatgtaaaagtataagggcactgaaataaagaccccagtacaaaatctttagagaattgccttagtcctatacccaaaaggaataacaacttacaagtttccatctcttaagcctgcagaaaatctctctatttttaaaaaagctggccgggcacggtggctcacacctgtaatcccatcactttgggaggccgaggcgggcagatcacgaggtcaggagatcaagaccattctggctaacacagtgaaaccccatctctaccaaaaaatacaaaaaaaaattagctgggcatggcggcgggcgtctgtggtcccaggtactcgggaggctgaggcaggagaatggcat

SEQ ID NO: 683155 - DNA, 995 bp, Homo sapiens
gtttttacttttgggggtattcctaatgggggttcagggtggtccccatataagttatttcattctaggtcacatgtgaaatgaaaacctaagatttgtcctttttggaagaagccatgattttttaatagtgttcaaacacatagtgcgaagcacatacttttcaggccataaatgactactttgacatatgaaatcctatgaaaattatatacattatttaaagaatttggcactcttcccctttgctatactagcaaatcacagaatgtactttaatatcaagctatttttgacttataaaatagatgatatattttgtacatgaattaaattcttcacagtaccagaggaattaattttaatgttatgaaattttgattagcctgctgtaaaatcagaattgtttaccgcaagtgtctgggttctgactcttatagtctttccaaacagataatgaaatgaactgggaatgggggtsggggggcggcagagtaatttatgaaaacatggtacaccataattttgccatttgtctgcaataaggatggcaaatgattcatgggataaaatgaaatatttctcactgtcatttcaatggatctaagatttacagcttctcaacttggataggaaaaactctgtatgcagaaaaatgaactgtaaatcaattaatgatggagatgaaaaacaaaaaatgatattgaagcaaaggtgagaaaaatctaagcaagaaattaaaagggaagacgtgactatttactttgaatctttggaggcaggaggtagcagagagggaagcctctgtttaagagggcattaaggtcaggttaaagaatagtgatatgttgattgaggtcattacgtttagatcacttagacaaacaataagatagcttttaaagcaaaatcagatatgcctaaattggatttaaataataaatttagatctagttttatagtataagactaaaacaaataaagaaattctgtgg

SEQ ID NO: 683156 - DNA, 668 bp, Homo sapiens
ccaacaatgagtctaaagtattaagggactcttggcttaaatatttctgcaaaacttgaagagcaggaaggagaattaagtcatcagtggrtgacagagctgctggcacctgggcacccagcatggtttattcttggtttggttatggtccttgcccttgaagactcagattttctaggtccctcaggatttggcccaagtattgtgatagtttcaacataaatgcgtggtgcacgccttctgccactccaggttccttgtcacacatctctaaaataattattttgatctgttatttaagggataacaaaatttcttaaggtaattcagtttttgagtcaccacagcctatgactttttctagttgtccatttcatggcatctagagatctctgtttagaggtggcccaggtaaatgagaggaaccctctatcagaggtgaccaggggaagtctacatttatttccaacgtacattagatgatgccctgtagagtttgggtgtagatcagcccccttggggtaacacacattcctctcacaccttgcttccttaaattgaagtggaaaagactgtgcatgtatgttgttttgaagcttttataatgaggtatgaaatacatgtagtaagtagcaaaaatcttagccgtacagcttcatacattttta

SEQ ID NO: 683157 - DNA, 596 bp, Homo sapiens
tttagtagagacggggtttcaccgtgttggccaggctggtcttgaactcccgaccttaggtgatccacccacctcggcctcccaaagtgctgggattacaggcatgagccaccgtgcctggcctttaggatgtttatatgctctctatgcaccatgatatttgcgccctggcggagcagtctcagttccacttctgagctgggwtgagtatttagctccttccccatctgatgcgaactaggcaacactacagagccagaggcagaaaacaggagggcttctcacctgtccttgtccatgaatagccagtgctctgctgaggactccaggaacccactcttcatgatcagcctcaattggcagtggccatctcctctggcagcaagcacaagtggacttctcttcctgcccacatctgctagatgagggtgaccctctggagagaggctgggagaagctagccagcctgtaaccagtgggctagtgtgtgtacatattgtatgcatgctgggggacagaagagggtgtggggaagggcaacttgctttccccaggtgaaggagtaaggaaatgtttccttcccaaccttctttcta

SEQ ID NO: 683158 - DNA, 1085 bp, Homo sapiens
agttgttgccaaaggagattaacatttgagtcagtgggctgggaaaggyagacacacccttaaactgggtgagcaccatctaatcagctgccagcgcagctagaatataaagcaggcaggaaaacatgaaaagactagatgggcctagcctcctagcctacatctttctcctgtgctggacccttcctctccttgaacatcagactccgggttcttcagtttggggacttggattggctttccttgctcctcagcttgtagatggcctcttgtgggaccttgtgatcgagtgagttaatacttacatagtgtgagttaatactactccactttatatttatatatatatatatctcctattaattctgtccctctagagaatgctgactaatacactaggcctgcacttattattgagactttttctttgtatcgtcagtgtgtattttttcatagatacctaacctgtcaaatgagatgtttgaaactttcagaggagaagttttaaatgtgggctccaaggagtccagaaccactcagcaacttggggaacagaaagcgaggtaggatgtatgagcaggaacagatgtgatttactctcttaccaaccctaacactcccctcccaaccttgattaagctagcataacacaaattttatatatttaattggcttgctttaattaggtttgaagaagagtctccaacaacttaatgtcttttctatatcttgtatcttcttttttatatcttggtaaattattttgaaaatcacctaatttgatcttcctaaatttcctgttcacttaagtccttagttctgaaccctcgctgacaaattatatccacacgtattctgattcagtaaatttatgcgggaccctaacattttaaaaaatctccctagaggatcccaacttgcagccagggttgagatgtattggttagtccaactgcactgatttccttccaggtagaaatgggtaggagaagcatttcattttttttttttttctgccagaggacaggttttcccaggaaaatggggggttatagagcttaagttattcctttctttccatattc

SEQ ID NO: 683159 - DNA, 1515 bp, Homo sapiens
ttgtgaaacattttcataaacctgaaaaagaggtatttatgggctataaaacttagtatagtgggacttttaaagatgcttttatatgtgatacacgaggcaatatggggtgcttgaattttcatttgtaagctttctggtagctgtaaaaacatgcttcatatagctaccttcagcacttgcttctctagtgtttttcttagacatagatgcaggagatttttctttggcactgtgtgttatgccccacagagaggaagcctcaccgtgttgctgtgtggagaaaatggcctggttgcagcccttgagcaagttttccaccatgggttcaaatctgcccgcatctttcacaagaatgtcttcatctgggacttcataggtaaataaagtagatgtgtattacattaaggtcactgaagcctttcttaggaactcaaagacccaggaatctgagtgaataagggttagtgataagggtatatatattttttttctttttttttttttgagacggaatcttactctgttgcccaagctggagtgcagtggtgcggtcttggctcactgtaacctccgcctcccaggttcaaatgattctcctgcctcagcctcccaagcagctgggactacaggtgtgcaccaccatgcccaactaatttttgtatttttaatagagaaggggtttcaccatattggccaggctggtcttgaactcctgaccttgtgatccacccgcctcagcctcccaaagtgctgggattacaggagtgagccrtcgtgcccggcaaggatatatatattttaaaataaatattaaattagctgggtgtggtagcacatacctgtggtcccagctacctgggaggctgaggcaagagaatcgcttgagcccaggagcctaggaggtgaaggctgcagtcagccatgatcaagctactgcactccagcctgggcgacagagtgagaccgtgtctcaaaaagtgtatataataatgataaataaatatcaagtattgtctttgtttttcatttactcaacaaattgtaatatgcacaatattccaaatagtatttgagttgctcaagatatacattagtaaacaaaacagaaatcctatggttgacaaacttatactcaggtcggtgtgggaaacaaacaatacacaaaaacataacaaatatgtaattcatatggtatgtcagaaatgtgaccattgatctggaaagaaatagagcagtataaaaggaaataaagtggggagtggtctttcaaatggggtggttttagattctgctgaatgtcaaggtacattggagcacagacttcatgtaggtgaggaagtgagccatgtagatatctgggaggagggactccaggttgacagcactgccagtgctaagccccaaggcggaagtgtttccatggaactccaagcccagtgtgactggagcacagcaagagagagaaagtaggagattgggggagggggtgtttagtgccagtgccaggttgtg

SEQ ID NO: 683160 - DNA, 638 bp, Homo sapiens
gcaaatactaggtcttattcactctatttttttgtacccattagagctacgagttttttttttttgtttttttttttagacagagtttcgctctcgttgcccaggctggagtgcaatggtgcaatctccgctcaccacaacctccgcctcccggattcaagcgattctcctgcctcagcctcccgagaagctgggattacaggcatgtgccaccatgcccggctaatttttgtgtttttagtagagacggggtttcttcattttggtcaggctggcctcagactcccgacctcaggtgatccgcctgcctcggcctcccaaagtgctgggattacaggygtgagccactggcccggccagagctgcgagttcttaaagcactttattctttgtatctcagtgagaaggcatcaccatgctctaacttagggatgatggcatcttgaattagttgtgcagcagagatggaaagaagtaggtagacatgagagagacagcttagaaatggcaatgatgggggttttaatgtactttcattattgttagatgaagaaaagccaagggttttaatattttatatacaggtggctttgagtctactgcatggataaggccaaactgggctcctgggggcggga

SEQ ID NO: 683161 - DNA, 638 bp, Homo sapiens
gcaaatactaggtcttattcactctatttttttgtacccattagagctacgagttttttttttttgtttttttttttagacagagtttcgctctcgttgcccaggctggagtgcaatggtgcaatctccgctcaccacaacctccgcctcccggattcaagcgattctcctgcctcagcctcccgagaagctgggattacaggcatgtgccaccatgcccggctaatttttgtgtttttagtagagacggggtttcttcattttggtcaggctggcctcagactcccgacctcaggtgatccgcctgcctcggcctcccaaagtgctgggattacaggcgtgagccactggcccggccagagctrcgagttcttaaagcactttattctttgtatctcagtgagaaggcatcaccatgctctaacttagggatgatggcatcttgaattagttgtgcagcagagatggaaagaagtaggtagacatgagagagacagcttagaaatggcaatgatgggggttttaatgtactttcattattgttagatgaagaaaagccaagggttttaatattttatatacaggtggctttgagtctactgcatggataaggccaaactgggctcctgggggcggga

SEQ ID NO: 683162 - DNA, 653 bp, Homo sapiens
catagtaatgaagaaagagcatgaagaatgttggagaatcttttttaaataacttataattttggtaattctggagaattcccagaaattcctatttttttatgccaaaatcccaaagatcaatgtctgtcaagaatttggaaatagctcctggcatcttaggcctttaagactgttcattgaaggaaagaataaaggaagggacaggatccacagcactgcggtatttctcgcatggaaatrgaagagaaggaaagagctagatactctttgtctagatactaataaggtgactaaacctatggctgtgggtagaaagtgtagttgtttccatgaaaggcctctgtcttctaatgatacaaaattagggtcattcattgagaggaaggcaggaagtggctggcagacagggctcctaagagacttacaaaggtttgaaattaccccgagggaggatgagagttgccgtggaatgcctgggaggtcttgtgggtaccagagttcttagctgaagtctaagcactcactacagtagagaaaggaagcacgcgacaggctcccagtgccacagaaccttatggattttctgagtaggcccggggtacccacatccacacacaagcacagccacacacacgctctcataaaccgca

SEQ ID NO: 683163 - DNA, 653 bp, Homo sapiens
catagtaatgaagaaagagcatgaagaatgttggagaatcttttttaaataacttataattttggtaattctggagaattcccagaaattcctatttttttatgccaaaatcccaaagatcaatgtctgtcaagaatttggaaatagctcctggcatcttaggcctttaagactgttcattgaaggaaagaataaaggaagggacaggatccacagcactgcggtatttctcgcatggaaatagaagagaaggaaagagctagatactctttgtctagatactaataaggtgactaaacctatggctgtgggtagaaagtgtagttgtttccatgaaaggcctctgtcttctaatgatacaaaattagggtcattcattgagaggaaggcaggaagtggctggcagacagggctcctaagagacttacaaaggtttgaaattaccccgagggaggatgagagttgccgtggaatgcctgggaggtcttgtgggtaccagagttcttagctgaagtctaagcactcactacagtagagaaaggaagcacgygacaggctcccagtgccacagaaccttatggattttctgagtaggcccggggtacccacatccacacacaagcacagccacacacacgctctcataaaccgca

SEQ ID NO: 683164 - DNA, 1054 bp, Homo sapiens
gttcagtttctaggcgagtgggggctgtctagaaggctcaccaggaaggcagctgggaaacttggttgcctgctggatgtggagccaggaccaaagccggcgactggggctattgcaatggatttccttccaaagggaggtcctccttctccctccctttccacggtcgagggagtagctctgtagctgggtttgccctccttctcctgctgcccgcctcctggttcgtatgcctctgctgcgttcgggtgcgagaactgccgtcatcctcctctccttgccgtgttgtgactggttcttcgttcgttttgtgctctcctgtcttgttgctttcctcgcctgtcatttcccatgtgcatttccgtgaagctgccctccgggactgcagccagaggcaggccaggcctgctgctccactcccctcccctcgttcattaccatccttggcttcattcacatgggagaaaagtatgaaccccattatttaggattgaattcactgtggagttgtgggtggggaaagtgctgaatttttgaaaacgccggttcagtgttgtgtgagctctgtgtttcctatttttatgttgcactctgttgatttttttcatctccctgaactgatctattaaaggaaatagattgataaatatcattttgactaaaaatatctatcgctgttggtgaagtgatgrtttttttttacatacaatttttaagagctgtctttaagaggcttatgcatgtgcagatgcatgaacacacatgtacagtcttccttcctagaacatgcttcctcttagttttgggggatatctggcagtcctttcttccatgctgaggacaaaggtatccttgccatctccttgtgagatgtacatttaagtagactgatagaaagatgaacagatggatgaatggagaggaagactgaaggataagtagacaagtattttttaacctggttatttttggagaaaaaaataattcacttttggcttacatttggtctttttttttcttgttataaaatctgatcctcagtatagctctctat

SEQ ID NO: 683165 - DNA, 367 bp, Homo sapiens
tcaaaacagaaagttcaagatcgatgatgtctatagaaatcatatacctcaagcctttcctctgataggtgggaaactgaggcagagagcagctgggtttacccagcaaggttttggcacggtcaggcctaggaactttatttccaggcttctggcttagttctgtttccatttcattctggtacctttgcataaatatcttccatttgtccacaggaaacctcccctgatggagagttgcataataggaayggcaaaccttagactaaatgctaagtcgaagacccagttgtgccttagcgtatgtctgccattcttaggcctctgggcagatgaggtgatttgtcatcactggaattgatcaacc

SEQ ID NO: 683166 - DNA, 716 bp, Homo sapiens
tctacatgctaccaatttgctgatagcatcttcattttctctctcaagagctcactggtctaaattgtgttggttttttttttcctttttaattagttggacaatttgcatagaaagggaataaattaccaacattggaaggcacatcttcctaatcagatgtgtatatttaaagcggcggggggggaaagccagccggtggagatgtcagtgatgctgcagtccagcaagagactgagactgggagagggcctgcgagcagcctgagggagcccaaaatgggcgcaaaggggcccctcaccaaggtgcaggggcatttgyctggcactggactgcaagtcaggttcaccactccctgcaggtaacctctctgagcatccatttcttcatctattcaatgaaataatcatgacactcaggtttcctgtctggaaacccaagtggttggtgaagtcatcatccaatttaaggaacacaggaaatggagcatatttgggggagacatgacaaaggttttgggggacatgttgagtttgaagttcctgaaaggatattcaattagaaatagccagaaggaagaggtgtctattggtatgaatctcaacagaaagatcagagctggagatagatgttttggagtcattggcatagagatcattttttcatctattgattcaaacatccatccagcaattcacagacaagtaatcagaaga

SEQ ID NO: 683167 - DNA, 1102 bp, Homo sapiens
tagaaattgcaatccttccatcttatggagtagaaagctgaagctcagagagtttaagctgtgatcctaagcctcacactcggtaggtggtagagccatctagaatatgagtgttctggactctcagtaccatgctcaggccaccagatcatcaggatatcagggtttgcttgccttcttcccttccttccttccttctttccttccttcttccctccctcaatgtttttttttctttctttttgacgatctgcttttatttttaatgaggactatttttaatgtggattattcttaggtctaacaacaaatatgtttatttttgtcatccattttccaagagccaactcttgacaaaattgtaaattgggcagagtttctcactccacatccccttgcatacgcatggtcacttgggcgtccatcccatcctatgagatttgtcatctctgggcgtttaggagtggtcttcccagttcacagcatgggaatacaaaagcatggaattcaccatttttgcgacaaatatttcagcatcagctctgggttattagatttactgagctgtaaataacactgattaaaaaacacaataacattatttttcaacagcttatggcttggtattttatcaacaggaaaagaaaataattagtgaaaaactaggacaaacattgctagagtactcacctaatctacttaaataattgttaaaatgatactattctctaacaccattatcattttatttttgcttactttttctcctgggaattaggacatcaggatgattttctctgttatgatattctgaaaatattttgtaaaagtagtaaagaaatcattgacttttcttggggcagctgtaagtttgtattgtgctaaattagaggatttcccacctgcaggtttatttcctattgattctaagtcagtactatcactttctttgctgttacattatgacaagaataagcccctttaragtgtcagatgacaatccctacttcaataactgagcaaattctgtaccatgttttgtgtttatttttatttatatgccctggaggtaaggttcaaataggaataaaaataaagttct

SEQ ID NO: 683168 - DNA, 526 bp, Homo sapiens
ccccaacccagctcgcggcaagcaggcagcgcagcagcagtagcagcagcaaccgggccgccgccgccgcggggctaagagattacgttcagcaaaaactcttccaggaaagaggctcgagagctcccctcctatctcgccaagggtgctgactctgtcgcgccacgccacgtaccaaaaggctcgcgaagaaaaacgcgggcgaagttcagcatccccgaacagaaagggaactcattccagaargggggttcacgggtctgagggtccttgggtggggaaagcagtattggagggagaagacagaagggatggcaagacagaggaaaccacggggacaaaaaggaagggatgaggagccctcttactataaaagggactgacggacgggatgcagagcaatgggcccccctcgaaaaatggactggcaggcccttccgcacccccaaacaacctcgcaccacctgaaagcggggagcttgagtttggggctgcgtagatcaaagcagggtaagacgaagggaaa

SEQ ID NO: 683169 - DNA, 1475 bp, Homo sapiens
taaaacatcctaaaccaaaatttgaggagaaatcacccaattactccattaataatttaaccatcttattcaccttcaaacccacatttttctatctcattggcaaatatgcagtacatagcaccagatctgaaacaaggtcttcaaatacagtaaaattcaaagagcctaaatgttcacatcttaagaaatatataattagcatgctgacaagtattcaaaagaagcttgtacagttgcccactcttcttcctgaaaaatgatggctgttcaaattgttcactgtgctacattataatatgaatacttgctgcaactcccttatttgaccaaactgctatggagcagggtgtatcactcctcctactccatcagtatcttacatactactgctatttttaaatttaggttgagacaaaggcattttttaaaaaagggttacttcaaaagcatgcccaataatttgctccaagactattgaaaagtaattttaatattaatttttaacaaaagtttgctatgatactattcataaggataactggaagacattacactagaacttggaaatattttcattgaacttcttagatattaacttatatgtattttataaatacatgtactattatgtactgagatagatttagcatttacacaatatctatcttatatatacgtatatttatttgagacagggtcttgctctgttgctaggctgaagagcactggtacaatcataactcactgcagccttgaacttcagggcaaaagcaatcctctcacttcagcctcccaagtagctaagaccgtaagagcgtgccactgcgcctggctaatttattctttatacagacaaggtcttgctatgttgcccaaactgggctaaaactttctgcctcaagcgatcctcccacctcggcctcccaacgtattgggattacaggcttgagctaatgctcccagcccttatatagtatctacatcttaagctttaattttcaargaagaatttcactgatatagatgaggaattcattcaggcaatcagtgcttgtcccttactatgcagctccatgcttctatatagttatctttcctacacaattgcttattagttggtttttatgtgaaagcatctaattttacatggtaccaatgtacactatgatgagaaaaaaagtctggttttctgttaggagccaaaatatccaccaatcatggtggctaataactagaaaaaaataattaattttatgacattcctacaaatttaatttctgaaatgtttggcattttcacactgaaatcattagtaacaattttaaacaaattgtgtacaattttacaacatgagaatcatggctgaaaaccaactaaaattttacttcattcttattgaaaaaggctgaaaatttaaccaaaggtccatactatttctctatttttacggacctttctccatatttagaaac

SEQ ID NO: 683170 - DNA, 1475 bp, Homo sapiens
taaaacatcctaaaccaaaatttgaggagaaatcacccaattactccattaataatttaaccatcttattcaccttcaaacccacatttttctatctcattggcaaatatgcagtacatagcaccagatctgaaacaaggtcttcaaatacagtaaaattcaaagagcctaaatgttcacatcttaagaaatatataattagcatgctgacaagtattcaaaagaagcttgtacagttgcccactcttcttcctgaaaaatgatggctgttcaaattgttcactgtgctacattataatatgaatacttgctgcaactcccttatttgaccaaactgctatggagcagggtgtatcactcctcctactccatcagtatcttacatactactgctatttttaaatttaggttgagacaaaggcattttttaaaaaagggttacttcaaaagcatgcccaataatttgctccaagactattgaaaagtaattttaatattaatttttaacaaaagtttgctatgatactattcataaggataactggaagacattacactagaacttggaaatattttcattgaacttcttagatattaacttatatgtattttataaatacatgtactattatgtactgagatagatttagcatttacacaatatctatcttatatatacgtatatttatttgagacagggtcttgctctgttgctaggctgaagagcactggtacaatcataactcactgcagccttgaacttcagggcaaaagcaatcctctcacttcagcctcccaagtagctaagaccgtaagagcgtgccactgcgcctggctaatttattctttatacagacaaggtcttgctatgttgcccaaactgggctaaaactttctgcctcaagcgatcctcccacctcggcctcccaacgtattgggattacaggcttgagctaatgctcccagcccttatatagtatctacatcttaagctttaattttcaaggaagaatttcactgatatagatgaggaattcattcaggcaatcartgcttgtcccttactatgcagctccatgcttctatatagttatctttcctacacaattgcttattagttggtttttatgtgaaagcatctaattttacatggtaccaatgtacactatgatgagaaaaaaagtctggttttctgttaggagccaaaatatccaccaatcatggtggctaataactagaaaaaaataattaattttatgacattcctacaaatttaatttctgaaatgtttggcattttcacactgaaatcattagtaacaattttaaacaaattgtgtacaattttacaacatgagaatcatggctgaaaaccaactaaaattttacttcattcttattgaaaaaggctgaaaatttaaccaaaggtccatactatttctctatttttacggacctttctccatatttagaaac

SEQ ID NO: 683171 - DNA, 1047 bp, Homo sapiens
agaatttttacattttaacaagaaataaaggcatgaaatttagatggcagaatttcaggccttactaaggaccaataaggaaaatatcttggcaagaagaagctctcaaatctaaccacacctgggagatgtaatatgcatagttatgagaggcactgactccagcatagtgcttaagatgctggaataactcaaatcccagtttcttgtgtctcgggaaagttatttaacctcctaagcttcagtttccacattttcaacatgaaaataataacaacatctagctcatagttagatgaggtactacattgtaaaccactggctttgggtacatggtggctgctactattacttatgaaggcagtcatagattccaggctgtgttgtgacatccaggagtgactatacaatatggcatcattcaagcaggtcacctgcgcagcctggtgcctcaaacccctcctatcccttcaacttaaagtttgcacaaatctgagctcaaaagaaaactaggaatagaagaataggtgtgcttatgagactacagagaagactgactggcaggaggcatcctccattctgaggacatggacatcaagaacttccaacagctgagtttccagagggcaggcaccatgtcagtctccttcatcacccccatgcctagcacagggcttagtttgaagctgctgaraaaacagatgaatgaatgccccttcccataggcaggtgtgtcttctgggtgccttagactgaggaaagcccaaagcacctgagtctgctccaggtacttgcctcacattccagaacaaagaccaccctgtctgctaagtacccagagcctacatacactaggatcagccctggtcagaagcattagactgcaggaccaggagaaagttaataaaatttaccttggaggtgtgtcaatgaaatgccccaggggccaggcagggatgcagggaaatcagtggaccaggtgtaaacaatagggagtggtgggactgcagaaactggagccctcttgccttgactaagggaagcagc

SEQ ID NO: 683172 - DNA, 2196 bp, Homo sapiens
ccaaaataccaaacctatgtcattctcctgcttcaaaccttttcatggcttcctactattctgaggataaaaatgaaaatcctcaccctggtccatgaggccctgcagtatctggccccagcctacctctccagccttgtccactcctcattcctgtgctctaggcacactggtctttttccatccttctgaaagaaccatgctacctcctaccagggggccattccatctgctgttccctttgtccagaagagtcttcccaccctcagcctccatctcctcatccttccaatcccagctaaagtcacttcttctgaaaggcatcctctattttctcagactagatttacctgcctccaaaagatttcacagcaccatgaatcctttatagcactcaccacaatcagtaattacacattagtttttttatttatgtagtgaatataaatgctcaccattttatcctcagggcctataacatgacctggctggcatatagtgaactctcaataattatttgttggtcaagtgaggaggcccttgcctatagtcccagcactttgggaggctgagacgaggggatcacctgagcccaggagttagagaccagcctgagcaacacaatgagatcccatctctagaaaataatttaaaattagctgagtgtggtggctcacacctgtaattccagcactttgggaggccaaggcaagtggatcacttgaggccatgggttgggcaacacagtgagaccccgtctgtacaaaaaaattaaaataaaaaaattagccaggcacaatggcatgctcctatagtcctagccacttgaagtctgaggtgggaagattgcctgagctcaggagttcaaggcagcaatgggctatgatcatgccactgcactctagcctgggcaacagagtgagaacttgtctctaaattaaaaaaataataattatttgttaagtgaaaatgtttaaaagaaagagggaattcctagctgatctagagttatatggaaaggccaagaaggatttttactagggcaggttgagttataatagtaattagtcatgttaatagttatttttagtaataatggtactaatactagtaatataataaaaatagtatttaaaattttcaaacttttgaccaaagttagaaatggaaaagaaaaaagcatgtaagtgtataagcttcagaagtaataggttatagtgtgctaagctcgccaaagaagagactaggttcttatgtgaatctagttattttgatgaaaattccaaaattactcccttcacataagccaccacagggggcaagagcaaccacaacagcattaactcaaaatacaggttgtgttcatttaaaatatactaaacacgtcatggcagcagcagtggcaaaagcaacaggaaatgcagtatttcaaatacttctccactggggaaatgtccaagttagamagatagtataatctgacctgtatccttcgagagcccctgtgacagatgaaaatgtaccagaacacaggggaagggcaaatcagagcaaagagaaaacaagatacatacaggtaacaagttagggggatggagagcaagggtacaggcagaaaataatgtctggatccaggaaggcaaacaggcctgcaaagcctacagtgtctgttttcccacctccagctccttcagagctgatcccaaggctgactatcctagcctagaaaacccatccatattaagcagaagccctgtccatattgagtaaggccacctcatgcttgaattttgactcccactgacactgtcactgacttcagtcacaggccaggacccagataacaactcttgttttctgggttgggggataatctatggtagactgcaacatcgtcaccaatttttttcctccctgcttgtcacactctctgccatgtgactttacagttcctcctactgcagagtgtgccttctcacaccttgactttggattttgcttatcacatgcattggccagtgggatgctagcaaatgggccgcaaacagatgtttgaaatgtgcttgcatggttgtatcatgttctgctattgtcatgaaaagaacatcactgactctccctctccctctccctctccctctccccctctccccctctccccctctccctctccccacggtctccctctccctctcc

SEQ ID NO: 683173 - DNA, 426 bp, Homo sapiens
cagaggactgtgactccatctgctggcttgacagcagctccagatcagagcctttgaattccttgcaaggcaggctctggctctgaactggaagaccaagaagtcttttcatcatgataaagtaaagatattcagccattttgtcaaaggcgatgacatctacccctcccaccttaaacccatagacacagatacaaatacrccagggaaacactgagccaaggattgttgatctctctgacaggagttagggaaggcagcccagtagccactggctgtgctgtgcataagcattgctttgggggctataatagagaccttcatacaacaagaggacagctccaaaccgaggtaggggtgggatcagaaaaacactaatgaaattagcgttttcttctttccatcatgcccttcacctctacttgc

SEQ ID NO: 683174 - DNA, 605 bp, Homo sapiens
aaattctcccagctgcagatcacggcacacactgcagacccctgagacacccacctgtgaaaccagtgtgggaatggaccagtgaggtgcacatctgtgggaagggccaaggatgaggaaactgtatctgttcaaagcccatcgcaaatcagcttcttcatccctctcaaaggtcaaaagcatgacagggcccagaggagtgttggtattttcagaggagaaggcagtgaggatttgggagcagtccaccctcctcagccacatytcagatctccttgctgaaataaggcctcagctggaccaacagaagacagggaacttaggcacctggaagaggtgcagaccttatccatcctcctgtgtgtccccccaccccaagcctgataccaggccctctgtataggggcaaaactttttccattctaaacgaacatttactccttttctccaggacactgggcattagctggacatcggcctgttcaggggacctcaggcttgagacagaaatgaggaagcacagagatcaaagcctccttcccagacaggagtgactttgaagttcactggcattgcaattaggaatgacttccgcagagggcagg

SEQ ID NO: 683175 - DNA, 657 bp, Homo sapiens
cctgcggggttaagagcaccaggtgacagagcagatgagtcctgcccctgtccctgcattcgttcgttcattcattcaagcaaccaacacctgttgaaccctcatgctgtgtctggcctcacctggggccacagagaatgcctgacacagtccctgctactcaaggtttccaattctccccctctaccttcagccccacacccccactcctcagttgatcacacccatcctcccatcaggagcaaccatgacagcagtgttaccccaagtgctggattagacttcctccctcatttctggaatgtaaccatctggagaggagatgggggccgggagctgcctaggtcccctcctgcccccagcagccagcctcccacttcctctttgctaacagaaccccaagtgttagcaggtgccctaggggatgcacgcttgatctaagaaagccaggcactcccattccccttcattgactgatcctttccctttccttatagctagagatggtcatgtaatccagttctggtcaaagacacgcctggactctgcrgaacctctgttcttcttagtaaatgaggagcccctactttctgcctcgaacacagcgtccgaagacatgatgatccaagctgtggtagcctcttgactgtgagggga

SEQ ID NO: 683176 - DNA, 600 bp, Homo sapiens
ccaaaaccacagccagtccgcccagagtgcctcatgagatggaaaggcttgccatctcagtctggaccagtcaccttccttggcagagaaagagcccagggcgtggagtggggttctgtggcaccgcactgtgtccagggccctcccggcagcccagccaaatgccatctcatcatgtgtgaccctgaggcagctggggccacccttcccttcaacctgcagatacaggcactcgagccccgccccacrggtacctgcaggacacgcggcaccctcctcactgcttcccaggagatccccagcggcgcctaccttccctcagtgttctgtctcctgctcctgaagcccactgtcagctgttccctggtcacttctgccaccttggccaccagttgctggctccgctccaccctgcttgtcccaagcatgaacacagcccacacttcttcattccccaaagcacctcaagaacagggcttttgcccgtgacagagagatagtgctgcaaagagcaaaactcaactaaagctggagagaaaataatctgtccctagagtttgttagcgctttaccttgacaaaggatttcccttgtatgttt

SEQ ID NO: 683177 - DNA, 768 bp, Homo sapiens
gggggtttgggactgcacactactcagaggtgagaaaagggcctcttgtttactatggcttgggggaaagactgatggagatttaggggacccacatgtccatcccccaagccacccctcggctgccactgcctatgacagccgacatgtcccagagtctctagtcagggtggaagtctcttcatcagggatataaggttctctgcccagttgctgaggccaaagattaaagcatctacccctgtcacctgaggcctggaccttatctcaaagtcaaggtagcacccacagagggagcaagtagtggtctgggggctctacccctaaccagctctgggcccgtgggcaagtccctgctcctgtytggggcttggagaggggggcattcgatcagggcttttcaaactggcctggaaagcttcaggctcctgtacccccacctcctctgcttccacccacttttatctcttaaatgttgggattctggataagattcttctaaaggagaaaagcagcagaatgcagaagttaagtcacaagctccagaggcaaagagacctgggttcaaatgagcaaggttgggcaagacacttcacctcattgatcctcagtctccccatctgtaacagaaataatactggaacatacccccgtttgggttgttcctagtattaggggagattgtgtatatagaactcttggtattgtgtttgccacatggtgagtgctctatggatgtaacctaccattatcattattttgaaaagc

SEQ ID NO: 683178 - DNA, 768 bp, Homo sapiens
gggggtttgggactgcacactactcagaggtgagaaaagggcctcttgtttactatggcttgggggaaagactgatggagatttaggggacccacatgtccatcccccaagccacccctcggctgccactgcctatgacagccgacatgtcccagagtctctagtcagggtggaagtctcttcatcagggatataaggttctctgcccagttgctgaggccaaagattaaagcatctacccctgtcacctgaggcctggaccttatctcaaagtcaaggtagcacccacagagggagcaagtagtggtctgggggctctacccctaaccagctctgggcccgtgggcaagtccctgctcctgtctggggcttggagaggggggcattcgatcagggcttttcaaactggcctggaaagcttcaggctcctgtacccccacctcctctgcttccacccacttttatctcttaaatgttgggattctggataagawtcttctaaaggagaaaagcagcagaatgcagaagttaagtcacaagctccagaggcaaagagacctgggttcaaatgagcaaggttgggcaagacacttcacctcattgatcctcagtctccccatctgtaacagaaataatactggaacatacccccgtttgggttgttcctagtattaggggagattgtgtatatagaactcttggtattgtgtttgccacatggtgagtgctctatggatgtaacctaccattatcattattttgaaaagc

SEQ ID NO: 683179 - DNA, 940 bp, Homo sapiens
ttctaggcaaccccaaacataggtggatttaaaccagaggagtttgtaaggctgaagcagaggcagccactttatcaccatgaggggagatcctgtctgacagtgaagccagcacagatgaagcaaagycaaggaggagagaaggacagaaactacgtcctggtcacatcatttgggctctagatccagccacgtctgaagctcacattacctcacggttatgtgggccaatgatggttcgtttcctttaaaacaggtgatactgtgttctatcgcttacaacagaaatgagtcctgatagatttgcataaaacctgacattaaatcagctactcagctgtaactcaactccactgtgatctagttaaatacaaattacatgtcatgtgggatgtggtgcattttaatacttggtatgaagaaaggtggggcctccaaaaataagagatttcgcatggccaaactccaaactgtgccgtcggttgtgggatctcaggctcctgggccgatgtgtgaactcccttgggagcctgggtctgctggacaaggagcactagatttggagtcagaaaacaaacgacctctaacacttcccttgtgtaacctcaggccagtcagtcccactctgtaaacctcaaattcctcacctacctaatgggaacaatgactcctgcatcatagagacactgtaggagtgatgcttataaatgaatctgacacacagtaggagcttgctagattattcctgaacggcagctgttcccgacagggctggcgtgccttccttggatctgatctggacagggggtggtgaggaggcagggtgttagtctcctctctgagacagccgaattgctcgatggggaagagtgggaaacacaaagttggaaggcctgaattagcagcacttgagtttccaactaacatctccaaatttagg

SEQ ID NO: 683180 - DNA, 686 bp, Homo sapiens
tctgcagatctgttgcaatatatggtaaatagatcagtatggaaattagctctgattaatcacataactcttcagaatactttcatttgatacaagtacatatttaggaacttcttaaagggctctagtattcagcagacatgtataaagcactttttaaatataagatgcagtatattttacagtggataggtaaaaagctttgtataaggcagtgttcctcattgttattcaaaagcctaaaatccaactagggtaaagggcccacaaatactgataactaagacacataagagcagtgggcatcaagaactgaaactttttactgggtgatcataggggaaaatgagatttgatgtgggcccggagttttgatgggtaagaacattccagagggaaaaaggcacagaaagcaggtgtgaattcagccaggtgaaggcagttctgtggatgtagtaattggctttgtatgagcaagagtttgtgaagggagatagaaagtcctgactacarctgttgtttatagaatctttggaatgttagatgggcgtatttaaacttcatatgtagcttttagagaatccttcagagtttttgagcaggggtatgagaggacttgtgtggtgttttggaaacattaacttggcagcaatttctaggatgcatcatggtagaagagataccaa

SEQ ID NO: 683181 - DNA, 686 bp, Homo sapiens
tctgcagatctgttgcaatatatggtaaatagatcagtatggaaattagctctgattaatcacataactcttcagaatactttcatttgatacaagtacatatttaggaacttcttaaagggctctagtattcagcagacatgtataaagcactttttaaatataagatgcagtatattttacagtggataggtaaaaagctttgtataaggcagtgttcctcattgttattcaaaagcctaaaatccaactagggtaaagggcccacaaatactgataactaagacacataagagcagtgggcatcaagaactgaaactttttactgggtgatcataggggaaaatgagatttgatgtgggcccggagttttgatgggtaagaacattccagagggaaaaaggcacagaaagcaggtgtgaattcagccaggtgaaggcagttctgtggatgtagtaattggctttgtatgagcaagagtttgtgaagggagatagaaagtcctgactacaactgttgtttatagaatctttggaatgttagatgggsgtatttaaacttcatatgtagcttttagagaatccttcagagtttttgagcaggggtatgagaggacttgtgtggtgttttggaaacattaacttggcagcaatttctaggatgcatcatggtagaagagataccaa

SEQ ID NO: 683182 - DNA, 1362 bp, Homo sapiens
ccacccgtgtttccccaagtcaaatcctgaatggaccaaagaggagcccttaagcgtatgttcagattgattgcttatggcataaataatttaaagaaatttaatggattgattcccttttaaagtttcatgggaggaggttttataatccttcatcattgatcattcttgctatgtaccatttgcttgtaagcaaaaaataagagtttggcccggcgtggtggctcatgcctgtaatcccagcactttgggaggccgaggcaggcagataacttgaggtcaggagttcgagaccagcatggccaccgtggtgaaaccccgtctctactaaaaatacaaaaattagctggctgtggttgctcatgcctatgatcccagctacttgggaggagaatggcttgaacccgagagacggaggttgcggtgagctgagatcgtgccactgcactccagcctgggtaacagagcaagattccatctcaaaaaaaaaaaaaaaaaaaaaaaatatatatatatatatatatatatatattaataagagtttggatacacttatgagcatttgtgcccaatattcgggtcattttgggaacttcccttttgaagagaaccagtttaatggtgttttgtcttgcagagctctgtgcagagctcccaagctggctgctcttgagctatagttagcctatagtttatttgttccacagttatttttcaagtttttttaaattagttgccaacattttaaaaatcaaaattatttcacataaaacgcctgaatgtttttacttttcttgaaagttggaatatcaagaaaagctagcctacatttcacatggcaccctttggctggrgctgagttgttgctgtctcctccatacaggtcatgtgccttccagttcagtaagatcccaccaccataccccaacttagtatttgaaggggtaacccctgctcaatagtcacttgttgctttgggtcccaaacagaatgatgttccccaagctcagagctgacagctcttggttactgctaaaaatcagttcaactgtccaagtaccattttctaccactgagtatcccagtaaaagtatttaaaaaaaaaaatgtgctaaaggctcagagaccatctctgaaagaggaaggccaggaggagtatctgagtttccactggaggggcatatcacctctctgctgacagttttaggaggtacaaacttttgtgaatgtatagattctggtgtagtcacacaaaaagagtcttactaagaatagagaaataggctgggtacagtggttgacacctataatcccaactctttgggaggctgagacaggagaatcacttgagcctaggagttg

SEQ ID NO: 683183 - DNA, 1362 bp, Homo sapiens
ccacccgtgtttccccaagtcaaatcctgaatggaccaaagaggagcccttaagcgtatgttcagattgattgcttatggcataaataatttaaagaaatttaatggattgattcccttttaaagtttcatgggaggaggttttataatccttcatcattgatcattcttgctatgtaccatttgcttgtaagcaaaaaataagagtttggcccggcgtggtggctcatgcctgtaatcccagcactttgggaggccgaggcaggcagataacttgaggtcaggagttcgagaccagcatggccaccgtggtgaaaccccgtctctactaaaaatacaaaaattagctggctgtggttgctcatgcctatgatcccagctacttgggaggagaatggcttgaacccgagagacggaggttgcggtgagctgagatcgtgccactgcactccagcctgggtaacagagcaagattccatctcaaaaaaaaaaaaaaaaaaaaaaaatatatatatatatatatatatatatattaataagagtttggatacacttatgagcatttgtgcccaatattcgggtcattttgggaacttcccttttgaagagaaccagtttaatggtgttttgtcttgcagagctctgtgcagagctcccaagctggctgctcttgagctatagttagcctatagtttatttgttccacagttatttttcaagtttttttaaattagttgccaacattttaaaaatcaaaattatttcacataaaacgcctgaatgtttttacttttcttgaaagttggaatatcaagaaaagctagcctacatttcacatggcaccctttggctggagctgagttgttgctgtctcctccatacaggtcatgtgccttccagttcagtaagatcccaccaccataccccaacttagtatttgaaggggtaacccctgctcaatagtcacttgttgctttgggtcccaaacagaatgatgttycccaagctcagagctgacagctcttggttactgctaaaaatcagttcaactgtccaagtaccattttctaccactgagtatcccagtaaaagtatttaaaaaaaaaaatgtgctaaaggctcagagaccatctctgaaagaggaaggccaggaggagtatctgagtttccactggaggggcatatcacctctctgctgacagttttaggaggtacaaacttttgtgaatgtatagattctggtgtagtcacacaaaaagagtcttactaagaatagagaaataggctgggtacagtggttgacacctataatcccaactctttgggaggctgagacaggagaatcacttgagcctaggagttg

SEQ ID NO: 683184 - DNA, 675 bp, Homo sapiens
gaaggttacattttttctttttacttgagaaaaacacagttataacctctttttgttgttgttgttgttgttgttgtttggagttcattatcttggaatgcttttttggaactcaataggtagattttgatgtttctcaatgaggctttcatatgtaaatgtttggctccatcttattttttatttcctttttagaccaattcaattctgaatgtgcaaaagacactattgactcttacattataccttctcattgaaggatggataatttggtatgaaaatcctctgcagattctggaggaaattgctaatgttttgattaccttyagcagaaaaataacaatgtatcgctatcaggagagggatttctggggaggggacttaacatggaaattataaattcattcatgacttttcttttttaaattaggctttctcctgtttctcagaggatttatcaattatgcaaaagttcggaagatgccagaaactttctcaaatctccccaggaccagagttctctttatttattaaaggtattaaagaaaaaatttattctagtcccagtgtaaccatgtgctacattgtagatttctgttcagttttagagtaagtatctgtgataggggcatatagagaaagtaaagaaggcacagtccctgccttttagcagtt

SEQ ID NO: 683185 - DNA, 579 bp, Homo sapiens
aacatggaagcacaaacaagctcctaattatttgtcatttaaaatgatacattaagcagctccttccaaaggagaaaaaaaagtcacaaaagaccatggactacaactggcatctattcaagaattattttatggctggacatggtggatctcacctgtaatcccagcactttgggaggctgaggtggaaggactgcttgagcccaggagttcaagaccagcctgggcaacatagcaagaccctgcctcttaaaaaaaataattcttttagatttcaagaacaattttaaaaatcacttgtttgggccaggcacagtggctcatgcctgtaataccagcactttgggaggccgaggtgggasgatcacttgagatcaggagtttgagaccagcctggccaacatggtgaaaccccatctctactaaaaatagaaaaattagctgggtgtggtggcatgcccctgtagtcccagctacttgggaggctgaggcacgagaatcactgcaacctgggaggtagaggttgcagtgagccgagattaccccactgcactccagcctgggcaacagagcgagact

SEQ ID NO: 683186 - DNA, 612 bp, Homo sapiens
tgcacgtattcagccaacagctaaggacttcgtgaacttgactcactgaaggggtcagactgccatgctcctgaattgttcttaaacaaattctccattgcattaggcacgaagaagcttttctttaatgtcaggcatgcttatcatcttattcctcctcattttcttctagaatatgtgtgggcactgaaaaggcagttcttccctatggattcagttcctgtaatacaccttccatttactggatgcaacatattttttatatattgcttttggtttcttgcttttttttttaaaggtgaaaktatatttgcagtgtttatatcaattaatgtacaaaattatttaaaaaattaactttacagtaatgtttatggcaatggttcccaaattgtggtcccctgatcaataacatcagccttacctggaaacttgtttgaaatgcaaattgtcacactctgtaccagacctactgagtcagaaactctgagatggggtcaagcaatcatctgtgctttagcaagccgtctagactattctaacagtcactagagtttgagacgcatttgtgtgcagctttcattttgggggatgttgcagtttacctgcaaa

SEQ ID NO: 683187 - DNA, 638 bp, Homo sapiens
cactgtgtaaagtgcattccttacaacaatctcacaaggttagtattttggttatttccattttacaaacaaggaaaatgaagctcaaaatataaagcagcttatccaaggtcacacacagtaaggaggagagccaggattcctgaccccagagcctaggctcacaaccttcaacaggaggaactgttagaggccaggccccacatacatgtcacatctagctgttgaccatctcctaggcatccctgactgccagcaccttgtgtccaaggcagatgccatcacagatattcatatccctgmcctaaaaagtggaccaatcagcctactccagaagccccgatatccaccactgcccttgacactcaccttggagtcttctgccccaaaggggattccacactgccttagcaggtgctgcagcttctcttcactgtaggagccaatctcatcaagcttgcaggtgccctcctggagcagcctcaccaaggcactgccactgcctgcaagagacaacagtgctggtgggagggtgctgccgccagtcaccagaggccaaggctaggcccacaaaacagcaaacagtggaagccagctctgcaccaagccctcccccagtgctggcagaggtggaactc

SEQ ID NO: 683188 - DNA, 612 bp, Homo sapiens
tctggtcctaggaggttggttaaaaagaggaatttgggtcaagaggctggcaaggtgaagagagattactattgatctaagacggtttctggtgagatggctatctccacagatcaagctcgggcaggcagggataggatggcatagaaaagtctagtaaggattgggcgtggtgactcacgcctgtaatcccagcagtttgggaggccgaggtgggtggatcacttgaggtcaggagtttgagaccaacctggccaacatggcaaaactctgtctctactaaaaatacaaaaaaaaaaaaaaaaaaaaaaaaaatcagcctggtgtggtagcatgtgcctgtagtcccagctactcaggargctaaggcaggagaatcactcgcatctgggaggcagaggatgcagtgatccaagatcatacgacagcactccagcctgggtgacagaataagtgagactccgtctcaaaaaaaaaaagaggctagtatagtaagaattttcatatgacagaactggaaggaatgttgaaaaacaaccctactgacttttaaagatttgcaatgcaaagtggtaaaggagatttgcaccctaaaagaccatgtagctaatc

SEQ ID NO: 683189 - DNA, 614 bp, Homo sapiens
aatgttgtctctgccgaggtctgaacatgctttctgttgttggaaaatgaaaactatgcaaccccatgtgcttctctttctgccttagctgccagaagccagagccaaatgtgtcgcccaagtatgggggctgcgctccctggtttctgaagcaccacctcggcttcctttggggagcactgttcagawtcacctgccttgcgccagaatctctgggcacccccatgcctagcccagggcaggagccaagtctgaaagaaactcaagtgcttgacaagctcatccgggaaagcacaaagctgtcggacctgagaaggacgtcttatcaaagtccacactctccgatcttagaggagacgaaataggagggcaatggcttccgtcaaggctgaaaccaaacattttggctatatctgaacgaccactgaatcaccgagtccaccgtatttttccactttcaagttgtttctgggctgctgtggagacacgcccttcctgggtttaatggccctcgtgtcaggctgtggggaggaggcgtgtttactttttgcagggaaaatagtggttaatggtggacggatggacctgattagtaattgggtgatttatcccat

SEQ ID NO: 683190 - DNA, 1514 bp, Homo sapiens
aacataatgtggatgcaaatgagtcaattctccttaatttaatattcttttaaaaattattatctactctgaatgattaacaaccatgttaaaaactagttaatctaaaacatgtacaactcccttcaaattataatatctggttttagccactaccacaaaagtatagctgaaaagtattagtgggccaaaaattgtaagctgctagggtagcgcatatatatatatatattttttaacacacgcacttgattttaaaatacataaaataggaaatcattttatactggcaaatgctacagggtaaccatttcattggattttgtaatagttaaatactttcttgatcaggrtcaatttcaaaatggtagaaacaaaagttctgagaaagttggcaaatggataattgaataatggagtttcaacagagacttcagctgaagcagagtagactttgtttggataaaggcaaaatttcatcagagggctatgaaagtaggatagacttgaaaccatgtccctaaagagttaagaaaaaaaacctcaacacagtaataaccaacaaaaattcttgagtttgcaggatagcacgtaaaaaaagaaacaacttgcttaatcactgaaactcccgttgtttataaaagaactggctgaaattggttagaacaaatagggctgactggcatctgtgcagaaacaagcttgctaacatcacagcctgaatttccactgcatggttcagactaactccccctggatttgcacatatgaaccatgagattgcatgaagagataactgtgtgtggccaaggactttccaggcctcccatttccccttccaccaatcacttagtaatttcagaatctaccccctcaaccttttctaataaaactattgctttgaaatcattaagagttgacgtttaatagtaagcttttcttttctcaaagacctggtgtcacagtattggcttctagcacattgggcagtgagccccttctacttgataatgcactcacctataggactctaaacatgaactaaaaataaactagattacctcaaatgcctgtctgtcccaattatttctattaccaaatcttattctttattatcttatcaacagttataaattcactcatctttgaaaactgctgtatactttcctaagagaatgaaaaaggtaactttggagaaagataaaaaatttatgcatgttttgtacatgtacaactaaaccaaggatagctataaaaaggtatataatgtatatatataatgtatataatgtatatacttaaatgtatatacttaaatgtatatgtaagttatacagttgaagaagaaatctgaggttctcagaaatgaaacctaacagctgagaaaacagaagcaagcagtactatctaaggagggtaggacagatgtaattatctacttaaatgtatatgtgagctgtacagtatatgtatataatacattaatatttttatcataagcacagtattgcata

SEQ ID NO: 683191 - DNA, 599 bp, Homo sapiens
gcagtatatgctttatgggtagacctgggatggcccgggccaagcagaaggaagtaaggtcatacagaaaagctttacaaagagttgcttttgctttcttttctgtttttgagcgctggttattagaacttcaccttatagtagcagaaatcaccagaaacagagaagtgtcagccaaaggcaactggactggtaaagtcaaaggaataaggtcaaagggtaaggaatcaggccaatttacaaagaaatgggaataagacaggcttagagtgggagtcctggattactggataatagtggtccttgtttttagagagttttggtgagttggggaggctatagtytattgcccccaaaagtcttgtttcccttgttcaaaccctttccagggttccatctgtatttataatacccaaattcttctgcatgacattaggttgaaccatttgaaattaccaatatgtaaccattgcgacttgcaaaaatgtcagttacatatgtctaattaaatacaaaaagccccacactattaagagcgtaaacttggagccagactgcctgggttcaaaagctggttctgccctaagtcacttatatga

SEQ ID NO: 683192 - DNA, 596 bp, Homo sapiens
gtttcactaacatattcaaggtcaagcctgaagtaggaacagccatctgacttccaagcctagtaaagcatgaaaacatgaacaacaacaataccacaacagcaacaacaaccagcaatctatgcctgtgagcatcaggtaaacagggccaaatatggccagcccatccctgtagtcacccatatatctrtggagacctaccacgccttagggtagatgagcaatatatgtgtggttttaatactgaacatcaggttggtgacactgacttttgttagcccatcactatttgctgatcctttgggaggtatcattcaaggatagttttaagagctggaaggtgagggactctctcttttacctgtcattctacactttcatcatgccttcacattcaatagctgaagtgccacatttaatcatctctttattataccacctccatttataattattgataattatgacagaattaattggttaccaagcaatgagagtttttaagactgaatcagtcatagtatatatgaaatatatgtattccttctttatggaaactcagaatattattgtagaatattattattctacaatat

SEQ ID NO: 683193 - DNA, 641 bp, Homo sapiens
tgccacttctgcactagcccccaagatcggccccctgggtctgtctccaaaaaagcttggtaatgaccttgccaaggcaatggggtgactggaagggcctgaggattacagtgaaactgaccattcagaacagacaggcccagattgaggtggtgccttctgcctctgccctgatcattaaagccctcaaggaaccaccaagagacagaaagaaacagaaaaacattagacacaatgggaatatcacttttgatgagatcgtcaacattactcgacagatgtggcaccgatctttagccagagaactctctggaaccatcaaagagatcctggggactgcccagtctgtaggcygtaatgttgatggccgccaccctcgtgacatcatagatgacatcaacagtggtgatggctgggcgcggtggctcacgcctgtaatcccagccctttgggaggccgaggcaggcagatcacgaggtcaggagatcaagaccatccttgctaacaaggtgaaaccccgtctctactaaaaatacaatacaaaaaaattagccgggcgtggtggcaggcgcctgtagtcccagctactcaggaggctgaggcaggagaatggcgtgaacctgggaggtggaacttgcagt

SEQ ID NO: 683194 - DNA, 641 bp, Homo sapiens
tgccacttctgcactagcccccaagatcggccccctgggtctgtctccaaaaaagcttggtaatgaccttgccaaggcaatggggtgactggaagggcctgaggattacagtgaaactgaccattcagaacagacaggcccagattgaggtggtgccttctgcctctgccctgatcattaaagccctcaaggaaccaccaagagacagaaagaaacagaaaaacattagacacaatgggaatatcacttttgatgagatcgtcaacattactcgacagatgtggcaccgatctttagccagagaactctctggaaccatcaaagagatcctggggactgcccagtctgtaggccgtaatgttgatggccgccaccctcgtgacatcatagatgacatcaacagtggtgatggctgggcgcggtggctcacgcctgtaatcccagccctttgggaggccgaggcrggcagatcacgaggtcaggagatcaagaccatccttgctaacaaggtgaaaccccgtctctactaaaaatacaatacaaaaaaattagccgggcgtggtggcaggcgcctgtagtcccagctactcaggaggctgaggcaggagaatggcgtgaacctgggaggtggaacttgcagt

SEQ ID NO: 683195 - DNA, 696 bp, Homo sapiens
tgtcaccactctccctgggcctgcaaggggacacctgcactggccacccatggatccaaacccatcagaagcccactcctcccctgccatccccagtccccatcaggccagacaagtgcacacagccaaggagcatcatgatagctgctcattgtgtggccctcttgtccttccctcctcagagcttccctggctgtccccaagagtcaccctctagctcttccatgtgtcccacagcactccccccagtgatgtctcatgtggctccccctgcagagcaggrcgacttcctgagaagcaagtgatatccttattgtttttcgctttgttttgtttttgagatggggtcttgctctgttgcccagagtggagtgcagtggtacgatcatagctcaccgcagcctcaaactcccgcttcagccacacgagtagacgggactacagatgttcaccaccatgcctaggtaatttttgtatttttttgtagagacaggatctcactacattgcccagactggtctcgaacttctagcttcaagtgatcctcccacctcagcttcccaaagtgttgggattataggtgcgagtgctgcacctggcccactctcttatctttatcaatcctggaactctagcattgagcacattgcctcacacctcataggggcttaatataagcttttaggtggcttatct

SEQ ID NO: 683196 - DNA, 696 bp, Homo sapiens
tgtcaccactctccctgggcctgcaaggggacacctgcactggccacccatggatccaaacccatcagaagcccactcctcccctgccatccccagtccccatcaggccagacaagtgcacacagccaaggagcatcatgatagctgctcattgtgtggccctcttgtccttccctcctcagagcttccctggctgtccccaagagtcaccctctagctcttccatgtgtcccacagcactccccccagtgatgtctcatgtggctccccctgcagagcagggcgacttcctgagaagcaagtgatatccttattgtttttcgctttgttttgtttttgagatggggtcttgctctgttgcccagagtggagtgcagtggtacgatcatagctcaccgcagcctcaaactcccgcttcagccacacgagtagacgggactacagatgttcaccaccatgcctaggtaatttttgtatttttttgtagagacaggatctcactacattgcccagactggtctcgaacttctagcttcaagtgatcctcccacctcagcytcccaaagtgttgggattataggtgcgagtgctgcacctggcccactctcttatctttatcaatcctggaactctagcattgagcacattgcctcacacctcataggggcttaatataagcttttaggtggcttatct

SEQ ID NO: 683197 - DNA, 2179 bp, Homo sapiens
gtgcaggtgtgggcctggggggccttcagcaacccagaccctgccatccagcctgggttcccggccccatctctctctctgaggtccagagaggccctcagggtggcaagagctgatccgctcacaccctgctagagtcagccagggaacctcactgggtcccacgctgggagcaggtcctacagctgttcttgtgtgtcctagtcccgcttgtggcagtgcctcaaatctgatctcctcaggctgaggtgggtccaaggtcctgttctcccgcctcgtcctccacagagtgggagctttccactgggctgaacatggccacgcacgtccctagcaccccggctcctcgtacctgacccctggggcgtgcttttgtgcttctggatccttctcgatgtagcagagcctagtttaggttacacagcatgcatcattatcccatcccaccaccctccaaaccgactgtgcccagtcatgccactgagcttgcctttccaaaactgccatctgacaatgtcacttcctctgctttagaaatcttcccaaggctgcagacaccgacggatttgctttgggagccagagtagctgccgccaccagagtccggagccatgagcgggtttaattttggaggcactggggcccctacaggcgggttcacgtttggcactgcaaagacggcaacaaccacacctgctacagggttttctttctccacctctggcactggagggtttaattttggggctcccttccaaccagccacaagtaccccttccaccggcctgttctcacttgccacccagactccggccacacagacgacaggcttcacttttggaacagcgactcttgcttcggggggaactggattttctttggggatcggtgcttcaaagctcaacttgagcaacacagctgccaccccagccatggcaaaccccagcggctttgggctgggcagcagcaacctcactaatgccatatcgagcaccgtcacctccagccagggcacagcacccaccggctttgtgtttggcccctccaccacctctgtggctccagctaccacatctggaggcttctcattcactggtggaagcacggcccaaccctccggtttcaacattggctcagcagggaattcagcccagcccacggcacctgccacgttgcccttcactccggccacgccagcagccaccacagcaggtgccacacagccagctgctcccacacccacagccaccatcaccagcactgggcccagcctctttgcgtcaatagcaactgctccaacctcatctgccaccactggactctccctctgtacccctgtgaccacagcgggcgcccccactgctgggacacagggcttcagcttaaaggcacctggagcagcttccggcacctccacaacaacatccaccgctgccaccgccaccgccaccaccaccagcagcagcagcaccaccggctttgccttgaatttaaaaccactggcgccagccgggatccccagcaatacagcagctgccgtgaccgctccacctggccctggcgcagctgcaggggcggctgccagctccgccatgacctacgcgcagctggagagcctgatcaacaaatggagcctggagctagaggaccaggagcggcacttcctccagcaggccacccaggtcaacgcctgggaccgcacgctgatcgagaatggagaaaagatcaccagcctgcaccgcgaggtggagaaggtgaagctggaccagaagaggctggaccaggagctcgacttcatcctgtcccagcagaaggagctggaagacctgctgagcccactggaggagttggtcaaggagcagagcgggaccatctacctgcagcacgcggatgaggagcgtgagaaaacctacaagctggctgagaacatcgaygcacagctcaagcgcatggcccaggatctcaaggacatcatcgagcacctgaacacgtccggggcccccgccgacaccagtgacccactgcagcagatctgcaagatcctcaatgcgcacatggactcactgcagtggatcgaccagaactcggccctgctgcagaggaaggtggaggaggtgaccaaggtgtgcgagggccggcgcaaggagcaggagcgcagcttccggatcacctttgactg

SEQ ID NO: 683198 - DNA, 644 bp, Homo sapiens
tgctgggccactgtctccatggccagggttcccaggctgagatcgtgctccagaaacagggtgtagatgtactgcagaggcatgtggctctggggaagacagagtggtgtaggaggatactgaagatctgtgggggacaaaggtggggttctagggggcttgggctctccgggggggtctggtcatgactacctgctgttgaatggacaccttgccagcttcagcgatcttcatggtgctcttagcaaactccagctctgggggaagagagagccgggctctgggtctagctggggtctggggactgcctggtaactggggctgggcggaagaggtcctcaccatagctggctctcttttcagtccaggcaagcagttccttggcatagcggctccaggtcttggcatattccagggctgcgtccacacccccctttgtccgaatgagccgcaagtccagttcctcccctggggaagatggatggacctctgacctttgcaccctagtctgctatggatgtcttccctaagcccccagaccagmccagtggcacctgtcctacagcctcacagctccccaaacactactttgggatcacttgtcctggttgcaattttacagattcactgttttttgtttttta

SEQ ID NO: 683199 - DNA, 591 bp, Homo sapiens
attttttctaaaagtatgtttatgaagtcattgtgtgcatcctttccttcaagggttttacctttctggaggtgtctccagggatggaatgccacactcagttccccatgcagctcagagaacactgccatccttccacctgtgacgagtgtggcttctgggacctgagccatgcctagggaggaagggcactagccctgtatcacagcagagcaggcaggagtcccaggttgcagagggcacatgacagcggcttgcctacgtgaaggggcccgtgtgggtgtcatcgacctcacactacacaggcaatcactgsgtggtgtcatgggctcatctatccagcgtagcaggtggccgcacagcttttggtcatagaaaggagaaagggctcattccccaggcaggaaaagcagtcagtcaacgtggcagggagctgcaggaagggccgcctaggggaacctctgatgctgtgtgggtttgagctggagcctgcgaggcctgagcgctgggccagcggcttctggagaaattccgctttggggcccttctgtgctgggcttggatgaataactcttccaccccggcaataaa

SEQ ID NO: 683200 - DNA, 647 bp, Homo sapiens
tggaagtaggaaaatggggcaaaatattgagtttcaaatgactgtaaaatgagttcaactccagaggagttccttctggagcacgttttccagccagtccttgtaaactagatctccctgcattagcaagtcttaaggagcgaagaaaaaaagtgaattaataaaatgttcctgtgcaacattgtcctaccctgctcagagatgctttctgggcttccttggggcaaactgggatcacgttcagcattccaagtctaaagaaacagaaagggaatgtgttccacctgccgactgacacctctgtcctaggtcacctgccctgaagatgctaaatgcttttccaacgtggtgtaatttgagtttttttatttttttttaagattctatgagcatatcacatttcataaacataagaatgacatttcaattttttcatataaatggcaaatttgcagaatgagagaaawaaaacaagactctagaaaccattttttgcacactcaaagaatgtgagcacagcccccttctggcaaggacatctgtcactcacacagacgcaaccctcttgaagccaatgtaaacagctccttactctccctgcctggctcttgggtggaggcgcagaaccttcggcggtgtggatggag

SEQ ID NO: 683201 - DNA, 2007 bp, Homo sapiens
ccctatgacttggatgttattgtttcaaatttaggaatgaggatgaggaaactgggacatagagagtttggaaacctgccttgggttacacgagttgggccaggatttgaagtgttgctctgtgagtggctggtttcaggagggaagttcagaatagctgaagtgcatgatgtggatggatgaaggttgttagaggagggaagtggggaactgatgaggaatgaggttggggaactgatgaggaatgaggttggggaactgatgaggaatgaggttggaaaggaaggatgtagaagtcagattccaaagggccttgcaagtctcataaaggagcagcttgaatatgacttaaatggtagccatcctatccaaacttcaaattcctgctttaaagtatttctggagctccttcatcttgcttgatgtagtgaagaatatagtcctggctcagctgccgtgacttaaacatgacaaactgtattccagtagaaactgattttggttgaggaaattattttaccctagagtaaaataatcaggaaaaaaaaacacttccttatatgaacttgtatcttcctgacaaacagcattcattgtctatagttctttttgctgagatacatttattttattttaatctttgggttagataggacacaatggactgtcctattttgtggtaagggtgcctcaccaataatctgttataaaaaataaagtattgcactttgtgaatgtttaatataatttaaaagtaaactcagattcaaaatgttccttatatataaccattatattagaattcttcttttttgagtggaagaggaagaagagttatttttagtatacatactattgtatatggaggtgtttcatgaatgacaatgacatttctcaagtatatcaaggcaaatgatcaattgacaaaaagtgtggtgctctgggagggtggggggactcattaaagaaggaatgagctagtggctacaggaggctacattcttttttttttttttttgacagagtctcctctttcacccaggctggagtgcagtggcgctatctcagtgcagaggctacattcttaatcctggccaatcatcttatactcaaagagccaggaaaaaagagtgtgtgtattagggttctccaaagaaacagtaccaataggagacagatagatagatagacaacataatttactaagggaactgactcacgggattatggaggttcttctgaaataaaatggaagttttgtctttgtgtctgcttgagtacctgctcaggaaccctgaacttagttctaggaatgcaacaaattctaatttttggattgctaactcagggttaaaaagaatcctgtacattcccactttattatcaaccaccttaaatgtggttaattatgtgaaattatggttaaggtgaggggtaaatatggagaaaaagaagggggcttccctgtattcactagacttttatttcgttccagggcttatgacagagcccaagagagtcagagaagctttctacaaattcagctgtcgcattcattttcttacacactagagttgccacttaaaaatactaaaataaaataaaaaattaatgttgaccatctaacaggaatacttgactcagctastaagttacaaatttgcttcatttttggaagacatctagcatctgagaattggacttttcccagaagttcacttggtaacctcaggtaagtcctggttcatcctggagaggatccgaggggaaagcctgatgggacccacggccgccctgagaagaaaggggtgctgtggggtgcgggaggaggaggagctgggaagcaggagcgcccgggactggatctagctggaaagggggcagatgctctcccggaatcagggtaggtaccctctaggaatgggacgttccgagaggggggtgtgtctggaacattggctaggggtccttagaggtgatttctgggaagggaaggtctggggcagg

SEQ ID NO: 683202 - DNA, 589 bp, Homo sapiens
gacatcccaagggtcyctttctcacacccatattcctcggtgactaaactgaaataaaacccctgaacacggacattcacatgcgtttccacttcatggtcgtccccacaagctccccatccggattcacacgcagcatcaggctttcaaggctacagtagcagctgccaaaggctgaacacgtatcagaacctacttccgattctggaattctggtgctgcaaccccatccttcgccatctctaagaacaccgagagactgggaggcgggcttccggagagggatatgggacatttcccaaagtccaggttctggctttgaacattttatatgaggtaacatagctgttttacctcatagagcatattatgtcatttctgatgggagtgaccgtagattattagtggagtgatagacacgcacatcaacagaatagagtcaagaaatggacacaagaacaggcaactgatttttacaaatgttcaaaatcaatttaatggaaagaggacagtgttttcaatactgttgaatcaactgggcaaccataggctgaactttaaattaacccttaccctatatacaaagatg

SEQ ID NO: 683203 - DNA, 595 bp, Homo sapiens
attcggctcctgctgcttccctacggggtagcaaggctggagggagagtagaatatggtgttccccactgagtgtttgggggacttagtagggtccccagtgtttgctcctggttttagcctcaggagcacttggtaagggggctatagggatggtcrctcttcacccttagagacaagtggctcttgtaaaagggggtcatctggtttggcacggtggctcacgcctgtaatcccagcactttgggaggccgagctgggcagatcacctgaggtcgggagttcgagaccagcctgaccaacatggagaaaccccgtctctactaaaaatacaaaattagatgggcatggtggtgtgtgcctgtaatcccagccacctgggaggctgaggcaggagaattgcttgaacctgggaggtggaggttgcagtgagcggagatcaagccattgcactccagcctgggcgatgagagcaaaactctgtctcaaaaaagaaaaagtaagagtgggggggatcatctataatatctaattctaccttagaactttcctttggtggtgggggtgggttctgggagtttgacagattgctaggt

SEQ ID NO: 683204 - DNA, 595 bp, Homo sapiens
attcggctcctgctgcttccctacggggtagcaaggctggagggagagtagaatatggtgttccccactgagtgtttgggggacttagtagggtccccagtgtttgctcctggttttagcctcaggagcacttggtaagggggctatagggatggtcgctcttcacccttagagacaagtggctcttgtaaaagggggtcatctggtttggcacggtggctcacgcctgtaatcccagcactttgggaggccgagstgggcagatcacctgaggtcgggagttcgagaccagcctgaccaacatggagaaaccccgtctctactaaaaatacaaaattagatgggcatggtggtgtgtgcctgtaatcccagccacctgggaggctgaggcaggagaattgcttgaacctgggaggtggaggttgcagtgagcggagatcaagccattgcactccagcctgggcgatgagagcaaaactctgtctcaaaaaagaaaaagtaagagtgggggggatcatctataatatctaattctaccttagaactttcctttggtggtgggggtgggttctgggagtttgacagattgctaggt

SEQ ID NO: 683205 - DNA, 595 bp, Homo sapiens
attcggctcctgctgcttccctacggggtagcaaggctggagggagagtagaatatggtgttccccactgagtgtttgggggacttagtagggtccccagtgtttgctcctggttttagcctcaggagcacttggtaagggggctatagggatggtcgctcttcacccttagagacaagtggctcttgtaaaagggggtcatctggtttggcacggtggctcacgcctgtaatcccagcactttgggaggccgagctgggcagatcacctgaggtcgggagttcgagaccagcctgaccaacatggagaaaccccgtctctactaaaaatacaaaattagatgggcatggtggtgtgtgcctgtaatcccagccacctgggaggctgaggcaggagaattgcttgaacctgggaggtggaggttgcagtgagcggagatcaagccattgcactccagcctgggcgatgagagcaaaactctgtctcaaaaaagaaaaagtaagagtgggggggatcatctataatatctaattctaccttagaactttcctttggtggtgggggtgggttctgggagtttgacagattgytaggt

SEQ ID NO: 683206 - DNA, 624 bp, Homo sapiens
aatggctcttgaagtatttctacactcttgatatttgggttgacctgttatctgcactgcttgtttgggaagttgtttttaaaaaacatgtttgatcttgcaaacccaggttcttgtgtcttactttctttgtaaattgggtatagatacataaatcctgtgggcatatttagtgtgcttgtttgttaaatagtgataatttacctaaagactttttaaacaagttaatgctgttagctagcttagaatattgcatgttttatagtacagactcacaaatttgtttaataacgtgtatcaacattgtttcatgtttataatgagatagcatattggctttaccttagtcagcatgactagctatatcagataccatagatagggtggtttaaacagcagaaatkgacttttcacagatctgggtggtgcaaagttcaacatgtcagagccagccactttggttcttggtgtggacttttttctggtgtgccatggctgactctgtgttctcatgtggcagagagattgtcatgcaaaaagcagaggctttttcacgtttctgctaattgcattcctgaagttctatgcaccatcctgacctaattgccttccaaagaccacact

SEQ ID NO: 683207 - DNA, 1225 bp, Homo sapiens
tttttttttattattttcctgtagaaacagggtcttactttgttgcctaggctgatctcgaactcctaggctcaagcaatcgtccttcctatgcctccaaattgctgactctccaggcgtgaaccactgtccccggcctccgtgatttattgatcaattttcctgtgatggacatctgagttgtttccaggttggggctgctgtgactatttgagcatctgacttttgatgaacatagagtgtaccatattgtagggcagtacccaggagtggaataaatgggtcatagtagttactgtgattctaccaaacatagcatgttagcaattcattgaaatcgttctctcagaagtatatttttccactttttttttcactaaaagaaagaaccgtggatgtatattttttccaatgcagaacatttagacagtcactgaactcgccgtctttagtttttccatcacgcgatgttaccatagcttcagactctctcttcctgcccgttttcaccctctctccccctggcctcatggtgttctgtctgactctctcagaccatctcctgtagcacctgcatcttgaatgtgacttaacaatcctggctgagcagagacttcgtagtgtggcagtgtctccaggccctggggacccagaaaagcctcaaggaggaggtcagaaatcctggcacttgtttctactgtacacaggcagccttagtcctcgggctggccaagaatacccacaataccmgtgctgatgactacaaaggaagggacttctgaatcaaaccacagaaactcctaaggcagaaaaatgatggacatgataacatgcaaatacagactttcttcttttgttgctgttcttctttctttctcttttaaattttaaagatggggtcttgctatgttgcccaggctggtctcaaactcctgggctcaagggatcctttcacctagacctcccaaagtgctgagattacaggcagattttcttttaacgaagacaccatgggacaaatgtcagatgacagaaggggaaaaggtgtttgcaatatttaaaaatcaatgagatattaatatctagaatataggtcaggtgcagtagctcatgcctctaatcccagcactttgagaggctgaggcgggcagatcacttgagatcaggagttcgaggccaacctggccaacgtggcaaaaccccgtctctattaaaaatacaaaaa

SEQ ID NO: 683208 - DNA, 1225 bp, Homo sapiens
tttttttttattattttcctgtagaaacagggtcttactttgttgcctaggctgatctcgaactcctaggctcaagcaatcgtccttcctatgcctccaaattgctgactctccaggcgtgaaccactgtccccggcctccgtgatttattgatcaattttcctgtgatggacatctgagttgtttccaggttggggctgctgtgactatttgagcatctgacttttgatgaacatagagtgtaccatattgtagggcagtacccaggagtggaataaatgggtcatagtagttactgtgattctaccaaacatagcatgttagcaattcattgaaatcgttctctcagaagtatatttttccactttttttttcactaaaagaaagaaccgtggatgtatattttttccaatgcagaacatttagacagtcactgaactcgccgtctttagtttttccatcacgcgatgttaccatagcttcagactctctcttcctgcccgttttcaccctctctccccctggcctcatggtgttctgtctgactctctcagaccatctcctgtagcacctgcatcttgaatgtgacttaacaatcctggctgagcagagacttcgtagtgtggcagtgtctccaggccctggggacccagaaaagcctcaaggaggaggtcagaaatcctggcacttgtttctactgtacacaggcagccttagtcctcgggctggccaagaatacccacaatacccgtgctgatgactacaaaggaagggacttctgaatcaaaccacagaaactcctaaggcagaaaaatgatggacatgataacatgcaaatacagactttcttcttttgttgctgttcttctttctttctcttttaaattttaaagatggggtcttgctatgttgcccaggctggtctcaaactcctgggctcaagggatcctttcacctagacctcccaaagtgctgagattacaggcagattttcttttaacgaagacaccatgggacaaatgtcagatgacagaaggggaaaaggtgtttgcaatatttaaaaatcaatgagatattaatatctagaatataggtcaggtgcagtagctcatgcctstaatcccagcactttgagaggctgaggcgggcagatcacttgagatcaggagttcgaggccaacctggccaacgtggcaaaaccccgtctctattaaaaatacaaaaa

SEQ ID NO: 683209 - DNA, 976 bp, Homo sapiens
cagtgagccgagattgcgccactgcactccagcgtgggcaacagatcgagactccgtctcaaaaagaaaaagaaaaaaatttacaattacacagggaattgggaagcagaagggagtaagccctgaaaacccaggcaatcagcttgtctattttaagagggactaaggcccagagagggtatcctacctgcccaaagccacacagccagaagacctggggcttcccctcactcagcagatttgggcaagttgtagaagaagactggaagggactcactcattctgtcaaaaaaaagtacaaggcgggcagatcgcttgagctcaggagttcgagaccagcctgggcaacatggcaagaccctgtctctactgaaaatagaaagattaaccaggcatggtggtgcacacctgtaatcacagctacttgggaggctgaggctgaggtgggaggaggatcgcttgagcctgggaggcgaaggttgcagtgagccgatatcgtgccactacactccagcctgggcaacagagcaaccctgtctcaaaaaaaaaaaaaaaaagtaggccgggagcggtggctcatgcctgtaatcccagcactttgggaggctgaggcaggtgtgtcacctaaggtcaggagtttgagaccagcctggccaacattgtgaaaccccgtctctgctaaaaatacgaaaaattagccaggtgtggtggcacatgccagtaatcccagctactcaggaggcggaggcaggagaatcgcttgaacccgggaagcaggtgttgcagtgagccgggattgtggccattgcactccagcctgggcaacaagagcgaaactccatctcagaaaaaaaaggagtgtgtgcctagtatgtgcaaggccctctttgkgggacacacagccctagctcctgccttcacagagaccccagggagcaggagtctccacactcaaagcacggagcccgaactcagg

SEQ ID NO: 683210 - DNA, 600 bp, Homo sapiens
catccagagtccaggggggtctggcgagcccagggaaagggcacttccactcctcttgtccccctcctcctgcctggctcctgctgcactaaccccgagccctccagctgcatcttcccctggcatgtctccagagggggtacgggaaggggtggcacctcgcactctgtgacccctgcctctgtccccagctgcttcacgaggagctggctctgcagtgggtggtcagcagcagtgccgtacgcgaggccatcctccagcacgcctggttcttcttccagctcatggtgagaccccctcctccctgcctggtggcaagagacccccagtggagccccttccttttttaaagagagaagccccctggccaggcatagtggctcacacctgtaatcccaacactttgggaggccgaggcgggcggatcacgaggtcaggagatcgagaccatcctggctaacacggtgaaaccccgtctctactaaaaatacaaaaaaaaattagccrggagtggtggcaggcgcctgtagtcccagatactcgggaggctgaggcagaagaatggcgtgcacccaggaggaggagcttgcagtgagccga

SEQ ID NO: 683211 - DNA, 583 bp, Homo sapiens
taaactgaatcatgaggtgttgcatccatgtgcccaactttgttcactcagcatcatgtcaggaaggctcagctgggccattgcctgcaatcctttttcattgctgggtagtattcccctgcctcatgcatttatttccctctttggtcagtgaacatgtgagtttcactttggagctgtcatgatcagaggtgtcaacattcttggccatgtgtttccttctgagtaatccacaccttggagtagaattgctggattggcatattttcaaccttgcttaataatcacagatgrttttttctgtgtgcgtgtgtgtgtgtacatttgtgtttattagaaatggggtctcgctatgttgcccaagctggtcttgaactcctggcctcatgtgatcctcccacctcagcctcccaaaatgctgggagtataggcatgagcacaacacctggcttatagatggatatctattttttcttgagacagctgctccttctgttgcctaggctggagtacagtggcgcaatctcggctcactgcaacctccacctcccgggttcaagtgattctcttgcctcagcctccc

SEQ ID NO: 683212 - DNA, 604 bp, Homo sapiens
ggtccaggcggccagcgcagcacagctcagaggggaggagctgcaggccctctccaaggctgtcctcgccagcgggtgcccsgggccagcccttcttgcctccagtgcctgcctttcagtttcctcgtctatggcccaggagtcactcccaccccctggctcactgtggctcatctatcaagcccttgttttctaaggtctcctgctgggggcaaagggaagaagggggtcctataggactttcctcctttccctcaagttcctctctaggggctccacagaggcagttgccagctccttctgtcatggcaggagcttttcctaggaaatcccatgtgcccttagaaaccactttggacccccgaatgtaagaccctgccaggccccattgctgtcctcagcttctgaagggagagggcagacttgcaccgctctatgcagattcaggaccacagcggggttccaggaaagcaggctcatttggggactgattccaagcagggttctgaagaaagagctagcccactgcgcagtggcccacctggagaggtagcagtctcctttcctgatgccagatccaagcagaggctaatgctggagacca

SEQ ID NO: 683213 - DNA, 868 bp, Homo sapiens
tgaccaacttggagaaactccatctctactaaaaatacaaaattagcccggtgtggtggtgcatgcctgtaatcccagctcctcgggaggctgaggcaggagaatcgcttgaacccgcgagatggaggttgcagtgagccgagatcgcgccattgcactccagcctgggcaacaagagcaaaactccgtctcaaaaaaaaaaaaaaagcaagcaaccgagcgaggcaatgccagtctaaaatcttgctatcaatgccattctgaaatatttaaaaatgtgaagtccagtgcaatggttcatrgttcagactgcaacagtattattatatcaaagagctttttttttttttctctttgagacagagtcttgctctgtcacccaggctggagtgcagtggcgtgatctcagctcaactgcaacttccgcctcgtgggttcaagcaattcttctgcctcactctactgagtaactgggattacagccacagaccaccattcctggctaatttttgtatttttagtacagacgggatttcaccatgttggccaggatggtctccaactcctgacctcaagtgatccgccagcctcggcctcccaaagtgctgggattataggcgtgaaccaccgcgcccagccagaaataaagattttagtaaatattttcaacttaaaggactgtcctttattttattcctatagttttggtgataaagacaatcttgctaattatgaaaaacggaaatggtgaatgatcactaatttaaagatattttccttgacaaaataaaaagttggcaaatacagccgggcatggtggctcacacctgtaatcccagcactttgggaggccagggcaggcagatca

SEQ ID NO: 683214 - DNA, 1343 bp, Homo sapiens
atgatacatgtagaatttacagggaaaggataaattctttattcagtagccctgaatgtatattaggaagaaaaggccaggcatggtggctcatgcctgtaatcctagcactttgggaggctgaagcaggcggattgcctgagctcaggagtttgagaccagcctgggcaacacggcgaaaccctgcctctactaaaatacacaaaaaaattaggcgagcatggccggaacacgaggtcaggagatcgagaccattctggctaacacggtgaaaccccgtctctactaaaaatacaaaaaattagccgggcgtggtggcagacacctgtagtctcagctactcgggaggctgaggcaggagaatggcgtgaaccagggaggcggagcttgcagtgagccgagatggcgccactgcactccagcctgggcaacagagcacgactccgtctcaaaaaaaaaaaaaaaaaaaaaaaggccgggcgcagtggcttacacctgtaaacccagcacttttgggaggcgaaggcggggagatcacaaggtcaggagatcgagaccatcctggctaacatggtgaaaccccatctctactaaaaatacaaaaaagtagccgggtgtggcagcatgtgtctgtagtcccagctactcgggaggctgaggcagaagaatggcgtgaacccgggaggtggagcttgaagtaaaccgagactacgacactgcactccagcctgggcaacagagcgagactccgtctcaaaaaaaaaaaaaaaaaaaaattagccaggcatggtggcaggcgcctgtagtcccagctactcgggagtttgaggcaggagaatggcatgaacccgggaggcggaggttgcagtgagccgagatcacgccactgcacttccagcctggatgagaagagtgaaactgtctaaaagaaaaaaaattccacatggattaatcacgcaaacacagaaaactcaaaactattacaagtatgaagggaaagcataagagaatacttctaccatcagataggcagtaagaccggtaaagccagaaggcagagagacaagggagtaccggaagtttctggtgtcagctagaatggcagagggtgagcggctgcatagagacagccagtggtgagcaaagcgaactcactacctttcagatcctctccaccatactggaggccatttcatcaacccattttataggagagagaaccgaggctcagaaaagggaagggctttgctagtcacttgagcggtccgttcccagtctaggtttgatgagtacgtgggagccayggagggtgtttgagcaggagcatgacagggccgcaccgg

SEQ ID NO: 683215 - DNA, 613 bp, Homo sapiens
gatggatggattgatgaatggatagatgaataaattaatgatgcaagaatggatgaacggatggatggatggatggatagatgaataaattgatgaatgttagaatggatgaatggatggatgaatggaaagatgaataaatgaatgaatgcaagaagggatgaatgaatggatgaataaatggatggatgaatggataatggatagacgaacaaataaatgaatgcaaaaatggatgaagaaatggatgacgaatggawggatggatcaatgaatcgatggaagatggattaatgaatggctaaatgagtggatgcgtggatggattaatgaatgcaagaatgaatggatggatggacgaatggatggatagatgaatgaaaggaaggatgaatgaatggatggaaggatggttgattggtttggggtctccacccgtcattactcctgggtggctagggaaagtgaaggggggcagcagacccatctgaagtcgcagtacctctcccggccccgcagccatcttcaagttggccgacagcgctgctcacctggccgcctcccctttaagacgcacacacctgggctctcacctgggcgcaggcgcttccgc

SEQ ID NO: 683216 - DNA, 1375 bp, Homo sapiens
tcatgtgcacacacacacacacccagcagggacttacaccaaggtctgcagtttacaatcagggtaactcaagccctcacacagaaacttcacccctgtatccccaatggggttcttggccaagcacaggtgtgtcagcttcttgctgacaaccaagacagcagcaaggtccttgcaactggcttctgtaagacgacagttttccaacctgcaaaaatatgaaacaaatggtagaaggatgagaacatttccacaactccaacctgctcagtgatgtccacatgctagggtactcagcttcagcccttcctgttcatcccctgccctctgtcctgtgggagtcatcatggccacaaaagagcaggaaggcgagaaggccaagatgcagcggtccacctggagccatcacaggacacaggtgttgtttttgagacggagtctcgctctgtcgcccaggctggagtgcagtggcgcgatctcggttcactgccaatckccgcctcccaggtttacaccattctgctgactcagcctcctgagtagctgggactacaggcgcccaccacacctggataattttttgtattttttagtagagacggggtttcaccatgttagccaggatggtctcgatctcttgacctcgtgatctccccgccttggcctcccaacgtgctgggattacaggcatgagccaccgcacccggcctgtttttggtatttttaatagaaacagggtttcaccatgttggccaggttggtctcgaactcctgaactcagatgatccgcccacctctctgctgagattacaggcaggagccaccgtgccgggcctgaagcaggtgtttatttcagcaagaggcgccacgtgggtggcgcagtaagtcaggtgttaccctttctcttctatagccccagaactaaaccagagctgcccatgggaagaggagacttacgacaacatctgcaggaagtgttttgggcgtgtcatggtcttgtacagcaacatggcaccctcatccaggagcacattggctgagagacgcaggtgcttcagggactggttggctttgaggacatagaagaattcagcccactgctccggggtggcacagtgacctcccaacctgtgaaaagagtgggaaaagtcattcttctgggaggacagagtataccctatcagctttttttttttgagacagagtttcactctgttgcccagtctggaatgcaaaggcgtgatctcacctcactgcagcctccgcctcccgggttcaagctattctcctgcctcagcctccgaagtagctgggattacaggcattcgccaatttttgtatttttagtagagacgggatttcaccatgttggcca

SEQ ID NO: 683217 - DNA, 1375 bp, Homo sapiens
tcatgtgcacacacacacacacccagcagggacttacaccaaggtctgcagtttacaatcagggtaactcaagccctcacacagaaacttcacccctgtatccccaatggggttcttggccaagcacaggtgtgtcagcttcttgctgacaaccaagacagcagcaaggtccttgcaactggcttctgtaagacgacagttttccaacctgcaaaaatatgaaacaaatggtagaaggatgagaacatttccacaactccaacctgctcagtgatgtccacatgctagggtactcagcttcagcccttcctgttcatcccctgccctctgtcctgtgggagtcatcatggccacaaaagagcaggaaggcgagaaggccaagatgcagcggtccacctggagccatcacaggacacaggtgttgtttttgagacggagtctcgctctgtcgcccaggctggagtgcagtggcgcgatctcggttcactgccaatcgccgcctcccaggtttacaccattctsctgactcagcctcctgagtagctgggactacaggcgcccaccacacctggataattttttgtattttttagtagagacggggtttcaccatgttagccaggatggtctcgatctcttgacctcgtgatctccccgccttggcctcccaacgtgctgggattacaggcatgagccaccgcacccggcctgtttttggtatttttaatagaaacagggtttcaccatgttggccaggttggtctcgaactcctgaactcagatgatccgcccacctctctgctgagattacaggcaggagccaccgtgccgggcctgaagcaggtgtttatttcagcaagaggcgccacgtgggtggcgcagtaagtcaggtgttaccctttctcttctatagccccagaactaaaccagagctgcccatgggaagaggagacttacgacaacatctgcaggaagtgttttgggcgtgtcatggtcttgtacagcaacatggcaccctcatccaggagcacattggctgagagacgcaggtgcttcagggactggttggctttgaggacatagaagaattcagcccactgctccggggtggcacagtgacctcccaacctgtgaaaagagtgggaaaagtcattcttctgggaggacagagtataccctatcagctttttttttttgagacagagtttcactctgttgcccagtctggaatgcaaaggcgtgatctcacctcactgcagcctccgcctcccgggttcaagctattctcctgcctcagcctccgaagtagctgggattacaggcattcgccaatttttgtatttttagtagagacgggatttcaccatgttggcca

SEQ ID NO: 683218 - DNA, 1375 bp, Homo sapiens
tcatgtgcacacacacacacacccagcagggacttacaccaaggtctgcagtttacaatcagggtaactcaagccctcacacagaaacttcacccctgtatccccaatggggttcttggccaagcacaggtgtgtcagcttcttgctgacaaccaagacagcagcaaggtccttgcaactggcttctgtaagacgacagttttccaacctgcaaaaatatgaaacaaatggtagaaggatgagaacatttccacaactccaacctgctcagtgatgtccacatgctagggtactcagcttcagcccttcctgttcatcccctgccctctgtcctgtgggagtcatcatggccacaaaagagcaggaaggcgagaaggccaagatgcagcggtccacctggagccatcacaggacacaggtgttgtttttgagacggagtctcgctctgtcgcccaggctggagtgcagtggcgcgatctcggttcactgccaatcgccgcctcccaggtttacaccattctgctgactcagcctcctgagtagctgggactacaggcgcccaccacacctggataattttttgtattttttagtagagacggggtttcaccatgttagccaggatggtctcgatctcttgacctcgtgatctccccgccttggcctcccaacgtgctgggattacaggcatgagccaccgcacccggcctgtttttggtatttttaatagaaacagggtttcaccatgttggccaggttggtctcgaactcctgaactcagatgatccgcccacctctctgctgagattacaggcaggagccaccgtgccgggcctgaagcaggtgtttatttcagcaagaggcgccacgtgggtggcgcagtaagtcaggtgttaccctttctcttctatagccccagaactaaaccagagctgcccatgggaagaggagacttacgacaacatctgcaggaagtgttttgggcgtgtcatggtcttgtacagcaacatggcaccctcatccaggagcacattggctgagagacgcaggtgcttcagggactggttggctttgaggacatagaagaattcagcccactgctccggggtggcacagtgacctcccaacctgtgaaaagagtgggaaaagtcattcttctgggaggacagagtataccctatcagctttttttttttgagacagagtttcactctgttgcccagtctggaatgcaaaggcgtgatctcacctcactgcagcctccgcctcccrggttcaagctattctcctgcctcagcctccgaagtagctgggattacaggcattcgccaatttttgtatttttagtagagacgggatttcaccatgttggcca

SEQ ID NO: 683219 - DNA, 1530 bp, Homo sapiens
ttctaaggcccagctccatgacttttggtgttgacataaaaggctaaaagaaagcctcagtgctgaggccattgttagacagacacctcagttgtgtccctcagggagctgggctctcaccccccacacagcctctttcactcaggtgctcaggacaaagagatccaagtctaccgatatttgatccactcaaagaaggcactgactgactcatccatctcaccctcagacagagcctttgcatcatctcctgaaacccatctggacaaccggtctgcagcacaacagtctctcctttctcagtgggatctaatctgttgctagagtcgaggacctcctgcaggcacttctgatgatcaaaatttccttctgaaacttcagcctcctctccgtaatgacagcccgaggctcagctcacgccttgagttttctctagtctctctgaccttctaccttctaatcagccaacacatttcagtcccctctgaagcttttgaggtccattcctccttcaacttgcgggtcctggcagtgactttctcactggggcttaacctggaaggcaaatgccatcagctgtccaccagagatggaggacagactgtcaacccccagggaaggattgactagaagaactttcctgcaacaagaccctcaaaccccctggttgaaatgggccccaagtgtcctccaagtgtactttgcaacaaccaatatacagaaataaaagatttccaatatacaatttgtaaaattaaggagctgaagattacttaggaaagggcgatttgcaatgcaaacgaactttctgatttatagagtcaccacggggttccttacatgagtcaatctaaaataggattcagctcacaatgcatctaaaataggattcggttcccaaaatccaacacccacgccatatcagcaatggcccccatcaacacagccattgcagagggaggtggtcccgcaaactttgctgtgcttttttctcaaaaggttttcctgcaagtgcatggccaatctcattaaataggctttcctttggctcgtactattatccttggctttgcaatcagagtcgcttttccatccacaaccaacccctcaaacaccttcaaggacttgccccactctactgccatcctctaggtctcctcatcttgggacaggcattacatcccggccaagagaagcccctaattcctgtcttggatttgagatttggcgggaagtgacctcccattgaggagtaaatctgaggtttaaaattaagtgaaaaaggatataaatatttcattgctttgatgcagtaattccatttctggtggtcttccctagagaaatactctaaagcacgagggtgaagatggaataagaggagctgcctttatgttcaaagamattccctgtattatatttgtaataataaaaacattggaaacagtcgacatattcaacaatagggtaaataactatataatgatattttagtgtagccatacgtttatacatatacgttttaataac

SEQ ID NO: 683220 - DNA, 1530 bp, Homo sapiens
ttctaaggcccagctccatgacttttggtgttgacataaaaggctaaaagaaagcctcagtgctgaggccattgttagacagacacctcagttgtgtccctcagggagctgggctctcaccccccacacagcctctttcactcaggtgctcaggacaaagagatccaagtctaccgatatttgatccactcaaagaaggcactgactgactcatccatctcaccctcagacagagcctttgcatcatctcctgaaacccatctggacaaccggtctgcagcacaacagtctctcctttctcagtgggatctaatctgttgctagagtcgaggacctcctgcaggcacttctgatgatcaaaatttccttctgaaacttcagcctcctctccgtaatgacagcccgaggctcagctcacgccttgagttttctctagtctctctgaccttctaccttctaatcagccaacacatttcagtcccctctgaagcttttgaggtccattcctccttcaacttgcgggtcctggcagtgactttctcactggggcttaacctggaaggcaaatgccatcagctgtccaccagagatggaggacagactgtcaacccccagggaaggattgactagaagaactttcctgcaacaagaccctcaaaccccctggttgaaatgggccccaagtgtcctccaagtgtactttgcaacaaccaatatacagaaataaaagatttccaatatacaatttgtaaaattaaggagctgaagattacttaggaaagggcgatttgcaatgcaaacgaactttctgatttatagagtcaccacggggttccttacatgagtcaatctaaaataggattcagctcacaatgcatctaaaataggattcggttcccaaaatccaacacccacgccatatcagcaatggcccccatcaacacagccattgcagagggaggtggtcccgcaaactttgctgtgcttttttctcaaaaggttttcctgcaagtgcatggccaatctcattaaataggctttcctttggctcgtactattatccttggctttgcaatcagagtcgcttttccatccacaaccaacccctcaaacaccttcaaggacttgccccactctactgccatcctctaggtctcctcatcttgggacaggcattacatcccggccaagagaagcccctaattcctgtcttggatttgagatttggcgggaagtgacctcccattgaggagtaaatctgaggtttaaaattaagtgaaaaaggatataaatatttcattgctttgatgcagtaattccatttctggtggtcttccctagagaaatactctaaagcacgagggtgaagatggaataagaggagctgcctttatgttcaaagacattccctgtattatatttgtaataataaaaacattggaaacagtcgacatattcaacaatagggtaaataactatataatgatattttagtgtagccatacrtttatacatatacgttttaataac

SEQ ID NO: 683221 - DNA, 650 bp, Homo sapiens
gatggcaaaggctattctttctatctgtattttgaaggtgcagtctgcagatttgctgttggaatggatatggggtaggagacaaaaagaagggtcaagaatgacaccaattgttccactggtgttccagtctgggtgatgcagcaagatcccatctcaaaaaaamaaaaaaacaaaaaaacaaaaaaaaaaacacaagatttttagctggaaaaaaccagaaggacagagagctgctgttaacagagataaaagaaaaaaaaaaactctaggaggagtgggttctgggtccaagatggggcaggggcttcctaggttgtctgccttggaggatacaggaggtcagggaagtgaggtatttggggttccaacatcgcaggcagccggtgaggtggcctgcaggtggtgagtctgtcagggccagcagcctgcttttcctccccaaagcaccaccccaaacatctgacctccccgtctccctggtgactcccaaagctgggccttcaacctacagctgcgtagcggggaaccagggagctgagggtaaaacaacatatataaaaagcatccccagatagtctgaaaatacagaggtgtaaagcacagcatcccaaataagcctcctgctagagggactatttttaaaaaga

SEQ ID NO: 683222 - DNA, 650 bp, Homo sapiens
gatggcaaaggctattctttctatctgtattttgaaggtgcagtctgcagatttgctgttggaatggatatggggtaggagacaaaaagaagggtcaagaatgacaccaattgttccactggtgttccagtctgggtgatgcagcaagatcccatctcaaaaaaacaaaaaaacaaaaaaacaaaaaaaaaaacacaagatttttagctggaaaaaaccagaaggacagagagctgctgttaacagagataaaagaaaaaaaaaaactctaggaggagtgggttctgggtccaagatggggcaggggcttcctaggttgtctgccttggaggatacaggaggtcagggaagtgaggtatttggggttccarcatcgcaggcagccggtgaggtggcctgcaggtggtgagtctgtcagggccagcagcctgcttttcctccccaaagcaccaccccaaacatctgacctccccgtctccctggtgactcccaaagctgggccttcaacctacagctgcgtagcggggaaccagggagctgagggtaaaacaacatatataaaaagcatccccagatagtctgaaaatacagaggtgtaaagcacagcatcccaaataagcctcctgctagagggactatttttaaaaaga

SEQ ID NO: 683223 - DNA, 650 bp, Homo sapiens
gatggcaaaggctattctttctatctgtattttgaaggtgcagtctgcagatttgctgttggaatggatatggggtaggagacaaaaagaagggtcaagaatgacaccaattgttccactggtgttccagtctgggtgatgcagcaagatcccatctcaaaaaaacaaaaaaacaaaaaaacaaaaaaaaaaacacaagatttttagctggaaaaaaccagaaggacagagagctgctgttaacagagataaaagaaaaaaaaaaactctaggaggagtgggttctgggtccaagatggggcaggggcttcctaggttgtctgccttggaggatacaggaggtcagggaagtgaggtatttggggttccaacatcgcaggcagccggtgaggtggcctgcaggtggtgagtctgtcagggccagcagcctgcttttcctccccaaagcaccaccccaaacatctgacctccccgtctccctggtgactcccaaagctgggccttcaacctacagctgcgtagcggggaaccagggagctgagggtaaaacracatatataaaaagcatccccagatagtctgaaaatacagaggtgtaaagcacagcatcccaaataagcctcctgctagagggactatttttaaaaaga

SEQ ID NO: 683224 - DNA, 670 bp, Homo sapiens
ttccagttcggtgtctgtctgggcgggtggagctgaccctcccctgggtgtgctactgagggcagggactgtggctcattcaccattgtattcccaacctcagcaagagtgcctagcaaacaggaaacacatatttgttgaatgagaatctccctaacggactttctggataatttcggaggagtttcggggagtttcgggagggttcctgggaagaagctcctcccaggrtgtctttgattttccgtctgagggtctgtgagtgagggatgacattcctccgtgtgcagccgttgctgtcctggattagttttgcccccagcgtgtctgtgtgacgtcttcctccggggacttatgtgcatcctcacgcgccaggcgagcccagagcgggacagctgtctctctgggtttgctgtctgtgacagtgtttcccgtaggggtgtcctatctccctggctgtatctggattcctgaagaggtgtctgttttccctcgggtgtccctgcaagtgtgtgtgcattctaagattatgactcagtaagggggtctgcttctgtccctccgtggctagtctgtctgcatgacagggacagcccctgtctgggagtttgtccctacaccttcagtcatgtttctggggggcctgcacattgcgtgtttgcacaggtgt

SEQ ID NO: 683225 - DNA, 661 bp, Homo sapiens
ccacttctagaaagacagcaggcttcaccaaccaaaactctgatcttattaaatcarttatctgaggcaagactccagggtggggacaggactaaataaagcccccaagtaggaactgaacagaactggagcagggagtggagcctatgtagaatttgttctctgtgccactggggtacttccagttctgtttcctaagcttacctaagaaaaacttaaatcccagagttcatgtaactttaatcttttttagctactgccctgtcaatttcctaatatatactaataatccatttaaacaaatatcttaaggatatctagaataattttattagaagataaataagtattcttagcaaaataaaagaaataaaaataataacaattcttctgtccataaacatcccttcaggtgatgacatcagaagtcacaacaatattgtttttttgtttttaagacagagtcttgccctgatgtccaggctggaatgcaatcactcaatcactcaatcttggctcactgcaacctccgcctcctgggttcaggcaattctcctgcttcagcctcccaagtagctgggattacaggcgcccaccaccacgcccagctaattttttattttttttagtagagatggggtttcaccatgttggccaggct

SEQ ID NO: 683226 - DNA, 625 bp, Homo sapiens
tgtcctgatttgctagcttttgggtaagaggaaggacaaaaatgttctactccagtatcacattttaggagtaggtatagttgcagtcatggctctggatactttgtagccttgatctctcactcctaagatgttgctatcagattctgtttacaccaggatcctctcatgtaactgcagcaggtcactggacaagacttgaaaagctcaaagagccacactatcaaaggggggctttaagatgtctatgttgacatctcacaatgcagaaattcctcctgttggttttcattaccttcttaatctaaaacctggccctgtcttgtgaatctcaggcagagatcagctcttatgtgcagattcttggtcagatcaaactggctctgcattcttrggtgttacagcaagtggagtacaatcaaagagagatgttctcctagaggctgttctagcacatcctaagtaatatgtctgcctaaaaagaaaaacccgaggcaacacagatataagtagacagtttatttgttccatctttgaggactgtaacctgggagcaaagattcaagttgcctggaatctacactttgataatcagcagttacaagtggatttgtaaaggcaaaaa

SEQ ID NO: 683227 - DNA, 625 bp, Homo sapiens
tgtcctgatttgctagcttttgggtaagaggaaggacaaaaatgttctactccagtatcacattttaggagtaggtatagttgcagtcatggctctggatactttgtagccttgatctctcactcctaagatgttgctatcagattctgtttacaccaggatcctctcatgtaactgcagcaggtcactggacaagacttgaaaagctcaaagagccacactatcaaaggggggctttaagatgtctatgttgacatctcacaatgcagaaattcctcctgttggttttcattaccttcttaatctaaaacctggccctgtcttgtgaatctcaggcagagatcagctcttatgtgcagattcttggtcagatcaaactggctctgcattcttgggtgttacagcaagtggagtacaatcaaagagagatgttctcctagaggctgttctagcacatcctaagtaatatgtctgcctaaaaagaaaaacccgaggcaacacrgatataagtagacagtttatttgttccatctttgaggactgtaacctgggagcaaagattcaagttgcctggaatctacactttgataatcagcagttacaagtggatttgtaaaggcaaaaa

SEQ ID NO: 683228 - DNA, 607 bp, Homo sapiens
atgagattacgaacaggtggtccagaaccctaggttggtggagaaaacaggttgctgctgcagattcagtgtctaggggtgaggatatgccaggagacttgtagacacttgtgggtttttggcaaaaaaaaacattaggataaaaatgctgtggtgaaattcctgagggtggtgtctagccctgggagtggtgtagacacctcaatgtctagtgggtgtstttgtgactgggtagaaatcctgtgctgacagctgtggaaaaagggaatctgctatccgagcttctttcctttaagttttcagtcctctctcaccctgggaggagacctagaatcacaaaacaatgggcactatgacagacagaaaagcagagcctcccagagtttcatttcaggccaggcctctgtggtatctttcttctggcaccaaatctgtagagtttgctgaataccaagattctccaacatcaactcattgtctaaaatttgaattctgacaccacccattcagcacagaccctgattcagggctcagtaccacagtattctctttactgcagatgtcaggaacaaacccaatgaacccatctatgctcctgagctactgt

SEQ ID NO: 683229 - DNA, 1519 bp, Homo sapiens
catgctttttgcaagaataaaactttttttttttacaaagaaaaagctaactgatgtaatcttttcacttgttaacagtgtatgtctattctcttaattgactaatctgaaagttttattgataagcaaattcttcagttaaaaccaatttttcaatgcattaaaaataccaactttctcatgagaacccacaaactaccatgtaaaatgacatggcatgaagacaacaatgagaaaactgtagtcataacacagtaaaagaagaaagactgtgatgcatatatagttggaatacactaagtaagacaaaactgaagatcagtagaaaataaaagcagcagaatttgtgtttaaattcagcaagtcagctttgcagcctgaaaatgtcctctccacatgatgaatcaatgttatttcttcaccattgctattttccatctctgacttgaagttacaaactaactccagcaaaaatatttatgacttattataaagcatgttttactcagaagaactgtcatatttgtttgctacatttatatgtaaaaacatcctcatgacttatgaagtctccctagtacttaccaaagcaaattagctcactcaatagatttacttatgtcaattataaaaagtgaaagaaacaataaagaaaattagccttatacaggtttctccaataaaacaaaaatcaaacgttaaaatataacaatataactattatataaaaactaacttatataaaaatataactaattttgtaattacatctaaaaattattttgtgtgcactcttaaatttcataaaaatcattcttataatccctgaccagctcacataatgagtacttcataaaatacaaaacaagaacattatgggtctagcatgagtaccagacaagtaaaaacagagaatgtgcatagggagattctgaactataagccctaacattttatagcaatgaattcaatacaatgcacagagtatagatttgctttcaacattttcgaggtttttagttttctaataagtcaccttattaaaataatttgttttgttccaatattgctttctccttccaaaaatgggtacaaactcatactcatacacacttacttcataattttcttacacctaaggtttatctttagagtaatatatgtatatgtttaactctatgtaaatcaaaactaaaagcctatatgtgtttgcaggcagagataaatcatgttcaaagaaaaatatgtaacaaattctttaaatatttattcagtacttagaaatgtatcaattttatttatacttctatataaattttattatgaccataaaaatgaccctgtagtcagaacaattgcaaattttaaaataaagtacttttaatattttaaaataacaatatttttattttactaatcaaattgtttgtaataaaaaggataaatgctagaggtgatggatgcctcatttaycctgatgtaactattatatattatatgcctgtaccaaaatatgcca

SEQ ID NO: 683230 - DNA, 1207 bp, Homo sapiens
accctaagataggtagggtttattatccccatttcaaatggggaaactgaggccacagaatcagtaaaagtcagagccgggattcgagcctgagcagtctatggctccacaatcctcactcttagccaaacccttgacctttctgttcatgccacggtttggggtacagctatccctcccccatcctttccaaaggaggaaactgaggcgcagggagatggagcatgtgccaaggacacacagcacaggtaggcctgacttcaaagcccacttcatctggttggtggaccccatgcctcacccaagagtttaaggcgttcaatatcctgacccaagccaggtacctacccaccagcctcgccactgtctcctctgttccagccttggtttatttccttccagacccttctctcaatctgcagtggtgctgtctgctggttggccaacttgtttcccacacttccctctctctggacaataagcctggaaggcagggccgggcttgccttgccactgctgtgtccccagtacaggactgggcactgagctcaatactcgctgaatgcatgcctgaaccactaagaaaacacagccaatcctgtggtggagactaataacactctcagaacacaagggcccaagactgtccyctagcccagggctttctgctgggatgtgtagggggagttagggggttcctttatggcctccataagccccccagctggaaggagcttcccaaagggatgtacacatctgaggacactagtgactttctgccttgtgatgtgaatgcaccttccgaaaatttaattttttatattttgtggagatgggggggggggtctcacttgttgcccagggtggtcttgaactcctggcctcaagtgatcctcctgcctcggcctcccaaagtgctggaattataggtgtgagccactatgcccagcctgtgaatgcaccttctaaacacatgtaacagcaacctagtgagggcatggcctttgcagtcagaccttgtatttgggggtgcctatttggggtgtctgcagagcctcctctaaaaactgccctccaccccaacaagcgtgggctggccctctatcgcccatttgacagggaggatgtggggtcctagctaagcctgcatgagctgcccgggtcagggggctggactgggtggtcctgttccagacaccaggagggc

SEQ ID NO: 683231 - DNA, 1207 bp, Homo sapiens
accctaagataggtagggtttattatccccatttcaaatggggaaactgaggccacagaatcagtaaaagtcagagccgggattcgagcctgagcagtctatggctccacaatcctcactcttagccaaacccttgacctttctgttcatgccacggtttggggtacagctatccctcccccatcctttccaaaggaggaaactgaggcgcagggagatggagcatgtgccaaggacacacagcacaggtaggcctgacttcaaagcccacttcatctggttggtggaccccatgcctcacccaagagtttaaggcgttcaatatcctgacccaagccaggtacctacccaccagcctcgccactgtctcctctgttccagccttggtttatttccttccagacccttctctcaatctgcagtggtgctgtctgctggttggccaacttgtttcccacacttccctctctctggacaataagcctggaaggcagggccgggcttgccttgccactgctgtgtccccagtacaggactgggcactgagctcaatactcgctgaatgcatgcctgaaccactaagaaaacacagccaatcctgtggtggagactaataacactctcagaacacaagggcccaagactgtcccctagcccagggctttctgctgggatgtgtagggggagttagggggttcctttatggcctccataagccccccagctggaaggagcttcccaaagggatgtacacatctgaggacactagtgactttctgccttgtgatgtgaatgcaccttcygaaaatttaattttttatattttgtggagatgggggggggggtctcacttgttgcccagggtggtcttgaactcctggcctcaagtgatcctcctgcctcggcctcccaaagtgctggaattataggtgtgagccactatgcccagcctgtgaatgcaccttctaaacacatgtaacagcaacctagtgagggcatggcctttgcagtcagaccttgtatttgggggtgcctatttggggtgtctgcagagcctcctctaaaaactgccctccaccccaacaagcgtgggctggccctctatcgcccatttgacagggaggatgtggggtcctagctaagcctgcatgagctgcccgggtcagggggctggactgggtggtcctgttccagacaccaggagggc

SEQ ID NO: 683232 - DNA, 1207 bp, Homo sapiens
accctaagataggtagggtttattatccccatttcaaatggggaaactgaggccacagaatcagtaaaagtcagagccgggattcgagcctgagcagtctatggctccacaatcctcactcttagccaaacccttgacctttctgttcatgccacggtttggggtacagctatccctcccccatcctttccaaaggaggaaactgaggcgcagggagatggagcatgtgccaaggacacacagcacaggtaggcctgacttcaaagcccacttcatctggttggtggaccccatgcctcacccaagagtttaaggcgttcaatatcctgacccaagccaggtacctacccaccagcctcgccactgtctcctctgttccagccttggtttatttccttccagacccttctctcaatctgcagtggtgctgtctgctggttggccaacttgtttcccacacttccctctctctggacaataagcctggaaggcagggccgggcttgccttgccactgctgtgtccccagtacaggactgggcactgagctcaatactcgctgaatgcatgcctgaaccactaagaaaacacagccaatcctgtggtggagactaataacactctcagaacacaagggcccaagactgtcccctagcccagggctttctgctgggatgtgtagggggagttagggggttcctttatggcctccataagccccccagctggaaggagcttcccaaagggatgtacacatctgaggacactagtgactttctgccttgtgatgtgaatgcaccttccgaaaatttaattttttatattttgtggagatgggggggggggtctcacttgttgcccagggtggtcttgaactcctggcctcaagtgatcctcctgcctcggcctcccaaagtgctggaattayaggtgtgagccactatgcccagcctgtgaatgcaccttctaaacacatgtaacagcaacctagtgagggcatggcctttgcagtcagaccttgtatttgggggtgcctatttggggtgtctgcagagcctcctctaaaaactgccctccaccccaacaagcgtgggctggccctctatcgcccatttgacagggaggatgtggggtcctagctaagcctgcatgagctgcccgggtcagggggctggactgggtggtcctgttccagacaccaggagggc

SEQ ID NO: 683233 - DNA, 644 bp, Homo sapiens
ctcctaccagcaccgttcagtaccacggacagcgacacagccctggtgccaggagaggaaaggaaaccccagggtttggccttctcactcatcctttgccgcagccagcagtcttccctgtgagggagaatggttgcgctctctcttggttgcgctcttctctctctctctctccctccctcccttcttccttttcttttcctctttctttcttttctttctctttttcgttctttctttctttctttcttttttgagacagagtcttactctgtcatccaggttggagtgcagtgatgtgatcttggctccctgcaacctccacctcctaggttcaagtgattctcctgcctcagcctcctgagtagctggcactacaggcatgtgccaccaagcctggctaatttttgtatttttagtagagacagggttttcccatgttggccaggctggtctcaaactcctgacttcaggtgatcygcctaccttggcctcccaaagtgctgggattacaggcctgagccacggcaaccagcctgactctgttaatttttgttgcgtgacctcaggcaactgattgtttgtattggttagctattgctgtgtaaaaaactaccccaaaacttagtggcttaaaacaacac

SEQ ID NO: 683234 - DNA, 1886 bp, Homo sapiens
  misc_feature 1393, 1394, 1395, 1396, 1397, 1398, 1399, 1400, 1401, 1402,1403, 1404, 1405, 1406, 1407, 1408, 1409, 1410, 1411, 1412,1413, 1414, 1415, 1416, 1417, 1418, 1419, 1420, 1421, 1422,1423, 1424, 1425, 1426, 1427, 1428, 1429, 1430, 1431: n = A,T,C or G
  misc_feature 1432, 1433, 1434, 1435, 1436, 1437, 1438, 1439, 1440, 1441,1442, 1443, 1444, 1445, 1446, 1447, 1448, 1449, 1450, 1451,1452, 1453, 1454, 1455, 1456, 1457, 1458, 1459, 1460, 1461,1462, 1463, 1464, 1465, 1466, 1467, 1468, 1469, 1470: n = A,T,C or G
  misc_feature 1471, 1472, 1473, 1474, 1475, 1476, 1477, 1478, 1479, 1480,1481, 1482, 1483, 1484, 1485, 1486, 1487, 1488, 1489, 1490,1491, 1492: n = A,T,C or G
cagctagtttttaaattttgtgtagggactgggtcttgctatgttgcttaggctggtcttgaacttctggcctcaagtgatcctcctgtctcgaccttccaaagtactaggattaaaggtgagagccaccatacccagcctctcagtgccttctgcaagggctctcatctgggtgcaggatgaaaacagaacactggaccacagtggctgctggggattccagagagaagagctctagagcccttacccatcatctcagcctcgtaggaccaatcattcagctccctcccatgttagaggtgggactactgaggaccgggaaccatatctctggctaaggaagagcaagaatcagtgagaccgtgaggatcctggagtctcataatcccacttcccaggtatgggaagccccggggtgaaaggcaacagggtcagagcaacctgagcctcggactctcctcccagaaaagtctcctggactcaccaagtttaaatcctggctctaataaccagggtgaccctgggcacagccttcaaactccttgaacacctgttttatcacctggaaaatgggatgaagtctgtatcatatagattgcatctaactccccatgtcactgtgcagattaaaggaggtgtttcacgtaaaatgtttagggtcatgcctggtacacagcaagcactttttttttttttttgagatgaggtctcgctcttgtccctcaggctggagtgcaatggtgcgatctcggctcattgaaacctccgcctcctgggttcaagccattctcttgcctcagcctcccaagcagctgggattacaggtgcctgccaccaaacctggctaatttttgtatttttagtagagatggggtttcaccatgttggccaggctggtctcgaactcctgacctcaggtgatccactcaccttggcctcgcaaagtgctgtgattacaggcgtgagcctccgcgcccggccttttttttttttttttttttttgagacagggtctccctctgtcacccaggctggagtgcagtggtatgacctcagctcactgcatcctccacttcttgggttcaagaaatcctcccccctcagcctcccaagtagctggaactacaagcacacaccaccacacccagctaatttttaaaaactttttgtagagacagggtcttgctatgttgcccaggctggtctggaactcctgggctcaagcgatcttcctgcctctgcgttccaaattgctggggttacaggcatgagccatggtgctaggtacatccatgattttttagcacttcccatgtggtgttttaacaggggacgagaagaccgctctcagatagcccaggacatacgtgcacgcaagtatgccccccacccnnnnnnnnnnnnnnnnnnnnnnnnnnnnnnnnnnnnnnnnnnnnnnnnnnnnnnnnnnnnnnnnnnnnnnnnnnnnnnnnnnnnnnnnnnnnnnnnnnnntcaaagtcattaagtgttaagagacatagaacatattagcactgactgagcctctcttctccaaatattggaaattgaaaaagttgattactttcasacaccacagtgattttttttttttttttgagagggagtctcaccctgtcgcccaggctggagtgcagtggtgcaatctcggctcactgcaacctccgttttctgggttcaagctattctcctgcctcagtctcctgagtagctgagattacaggcgcgtgccaccacaccaggctaatttttgtatttttagtagagacggggtttcaccattttggccaggctagtcttgaactcctgacctcaagtgctccacctgcctcagcctcccagagtgctgggattacaggggtgagcc

SEQ ID NO: 683235 - DNA, 628 bp, Homo sapiens
tgttgtgacatatggctgggatcaaaacctaagtgatgcaactcttcgacctgggccctgccagcaggggtattatgacatctttttgttcatcacttaggtgttgtgactcttttcttctgtctgggtcctgacagaaaaaggggattggggcatgtcccttgaccgagcacctaggtgatgtgactgtcttatttgcctgggccttgcatatttggggtattgagacatatggctgggccctacatcaatgggayttaaggctcctgccttggtcttgctaacagaaaactttttacatatccctgaatccatcacctaggatatgtgactctcctcttctgccggcattctgcccacaggaaagactgggacatattgctgggcccaccattgagatgatgtgtctttcctgcctgggtactgtccacagggagcattgtgacatatcactgggcccagcacctaggtgatgtgagtatgcatcgtgttccctgctttcaggaaggcattgtaaaatatccctgacttagcatgaagggatgtgactcttctagctggtctttgtcctcagggaagagtgtgatatatgccttgtccagctcccagttgatataaccctcctgct

SEQ ID NO: 683236 - DNA, 644 bp, Homo sapiens
cttatgttatttttttttcactttttgtgatggatataagtaaatttattcgttaggcaatttgttcaggtaagtactagggaaacttcataagtcatgagaatgtttttatacataaatgtagcaaacaaacatgacagtgcttgctgtataacagatgctccataataaggcataaatacttctgtgaaagttgcaaactgcaagtcaggtggaaaatatcaaaggtaaacaaataacattgattcttcatgtggagaggacattttattttttttcaggctgcaaagctgaattttactgaatttaaaaagaaattctgcttcatttattttctaattatcttaagctttgtctttttatgtgtattccacccacgtatacatcatagcccttcttctttttctgtgttactggctgcagttatcccactgtttttttcatgccatgtcatctcacatggtattttgtgggttttgatgagaastttggtattttttaatgaactgaaaaaatggttttaactggagagtttgcttatcaatataactttcagatcagttaattaagataaaaggcatacatgtccacaggtgagaggattaaatcagttagtgttgtgctgctttctttgtaaaaagaaa

SEQ ID NO: 683237 - DNA, 1218 bp, Homo sapiens
tgaagctgtttctgagttttctgccttccccatcctctgaattcccctgtctctccccgcctcgctccctctgctgcccgtgatgaagaatggaattatatttttataacttcttgtttttcctgaaccaagttccatgtgcactgggctaaatttaaaaagcggatggatggagagatgatcatgttcactttcactcccttggaaaaaaataaacgccttgattcaggtgccatttccctcggggacactgggggcggggtggtggcctttctgctcacagtgacagggctggacagagataagtcagacctggattccagctgcctccttccggaagccttgcctgacctgtgcctgaaccaggcccacccctcagatcttctgacaccctgggcatcccccaaaacagccctggtcaccctgtgctggaactgcctgtttgcttgttctctctgcctggtcctcctttcccattcttttttttttttttttttttttttgagacagagtctcgctctgttgcccaggctgcagtgcagtggcgcgatcttggctcactgcaacctccgcctcccagattcaagcaattctcctgcctcagcctacctagtagctgggattacaggcgcgcaccactacacccatcctttgccatctttagggctagcttctcaacctttagggcttagctccaatgttacctcctccaggaagccctcccggaccgccctgactaaagaagctacgaagttgttttctatcacatcatcatcataatcttctttttttttatgagacagggtcccctgtcgcccaggctggagtgcagtggcatgatcacagctcactacagcctygaactcctggactcaagcaatcctcttgcctcagcttcccccgtagctggaacgtagctagcacaccaccatacctggtgcttgtattttctttttttttttttttgagacggagtttcgcttttgtttcccaggctggagtgcaatggcatgatctccggttcactgcaagctccgcctcccggattcaagccattctcctgcctcagcctcccgagtagctgggattacaggcatgtgccaccacacctggctaattttgtatttttagcagagatggggtttctccgtgtgggtcagggtggtctcgaactcccaacctcaggtgatccacccacttcggcctcccaaagtgctg

SEQ ID NO: 683238 - DNA, 1218 bp, Homo sapiens
tgaagctgtttctgagttttctgccttccccatcctctgaattcccctgtctctccccgcctcgctccctctgctgcccgtgatgaagaatggaattatatttttataacttcttgtttttcctgaaccaagttccatgtgcactgggctaaatttaaaaagcggatggatggagagatgatcatgttcactttcactcccttggaaaaaaataaacgccttgattcaggtgccatttccctcggggacactgggggcggggtggtggcctttctgctcacagtgacagggctggacagagataagtcagacctggattccagctgcctccttccggaagccttgcctgacctgtgcctgaaccaggcccacccctcagatcttctgacaccctgggcatcccccaaaacagccctggtcaccctgtgctggaactgcctgtttgcttgttctctctgcctggtcctcctttcccattcttttttttttttttttttttttttgagacagagtctcgctctgttgcccaggctgcagtgcagtggcgcgatcttggctcactgcaacctccgcctcccagattcaagcaattctcctgcctcagcctacctagtagctgggattacaggcgcgcaccactacacccatcctttgccatctttagggctagcttctcaacctttagggcttagctccaatgttacctcctccaggaagccctcccggaccgccctgactaaagaagctacgaagttgttttctatcacatcatcatcataatcttctttttttttatgagacagggtcccctgtcgcccaggctggagtgcagtggcatgatcacagctcactacagccttgaactcctggactcaagcaatcctcttgcctcagcttcccccgtagctggaacgtagctagcacaccaccatacctggtgcttgtattttctttttttttttttttgagacggagtttcgcttttgtttcccaggctggagtgcaatggcatgatctccggttcactgcaagctcygcctcccggattcaagccattctcctgcctcagcctcccgagtagctgggattacaggcatgtgccaccacacctggctaattttgtatttttagcagagatggggtttctccgtgtgggtcagggtggtctcgaactcccaacctcaggtgatccacccacttcggcctcccaaagtgctg

SEQ ID NO: 683239 - DNA, 1218 bp, Homo sapiens
tgaagctgtttctgagttttctgccttccccatcctctgaattcccctgtctctccccgcctcgctccctctgctgcccgtgatgaagaatggaattatatttttataacttcttgtttttcctgaaccaagttccatgtgcactgggctaaatttaaaaagcggatggatggagagatgatcatgttcactttcactcccttggaaaaaaataaacgccttgattcaggtgccatttccctcggggacactgggggcggggtggtggcctttctgctcacagtgacagggctggacagagataagtcagacctggattccagctgcctccttccggaagccttgcctgacctgtgcctgaaccaggcccacccctcagatcttctgacaccctgggcatcccccaaaacagccctggtcaccctgtgctggaactgcctgtttgcttgttctctctgcctggtcctcctttcccattcttttttttttttttttttttttttgagacagagtctcgctctgttgcccaggctgcagtgcagtggcgcgatcttggctcactgcaacctccgcctcccagattcaagcaattctcctgcctcagcctacctagtagctgggattacaggcgcgcaccactacacccatcctttgccatctttagggctagcttctcaacctttagggcttagctccaatgttacctcctccaggaagccctcccggaccgccctgactaaagaagctacgaagttgttttctatcacatcatcatcataatcttctttttttttatgagacagggtcccctgtcgcccaggctggagtgcagtggcatgatcacagctcactacagccttgaactcctggactcaagcaatcctcttgcctcagcttcccccgtagctggaacgtagctagcacaccaccatacctggtgcttgtattttctttttttttttttttgagacggagtttcgcttttgtttcccaggctggagtgcaatggcatgatctccggttcactgcaagctccgcctcccggrttcaagccattctcctgcctcagcctcccgagtagctgggattacaggcatgtgccaccacacctggctaattttgtatttttagcagagatggggtttctccgtgtgggtcagggtggtctcgaactcccaacctcaggtgatccacccacttcggcctcccaaagtgctg

SEQ ID NO: 683240 - DNA, 1218 bp, Homo sapiens
tgaagctgtttctgagttttctgccttccccatcctctgaattcccctgtctctccccgcctcgctccctctgctgcccgtgatgaagaatggaattatatttttataacttcttgtttttcctgaaccaagttccatgtgcactgggctaaatttaaaaagcggatggatggagagatgatcatgttcactttcactcccttggaaaaaaataaacgccttgattcaggtgccatttccctcggggacactgggggcggggtggtggcctttctgctcacagtgacagggctggacagagataagtcagacctggattccagctgcctccttccggaagccttgcctgacctgtgcctgaaccaggcccacccctcagatcttctgacaccctgggcatcccccaaaacagccctggtcaccctgtgctggaactgcctgtttgcttgttctctctgcctggtcctcctttcccattcttttttttttttttttttttttttgagacagagtctcgctctgttgcccaggctgcagtgcagtggcgcgatcttggctcactgcaacctccgcctcccagattcaagcaattctcctgcctcagcctacctagtagctgggattacaggcgcgcaccactacacccatcctttgccatctttagggctagcttctcaacctttagggcttagctccaatgttacctcctccaggaagccctcccggaccgccctgactaaagaagctacgaagttgttttctatcacatcatcatcataatcttctttttttttatgagacagggtcccctgtcgcccaggctggagtgcagtggcatgatcacagctcactacagccttgaactcctggactcaagcaatcctcttgcctcagcttcccccgtagctggaacgtagctagcacaccaccatacctggtgcttgtattttctttttttttttttttgagacggagtttcgcttttgtttcccaggctggagtgcaatggcatgatctccggttcactgcaagctccgcctcccggattcaagccattctcctgcctcagcctcccgagtagctgggattacaggcatgtgccaccacaccyggctaattttgtatttttagcagagatggggtttctccgtgtgggtcagggtggtctcgaactcccaacctcaggtgatccacccacttcggcctcccaaagtgctg

SEQ ID NO: 683241 - DNA, 675 bp, Homo sapiens
cagagcaagactcggtctccaaaaaaaaaaaaaaaagcctgctggggagtgggctctaacagtgacactgggcaggcaggacatccagttaaacagggatgggggcctggacaggggtggcctcgtagaccctgaactgtggcccaatctgagatgttattcaggaggagtggctgcattcgacagatgcgggagggacaggggacatctctggcctaggaagactgaagattcactggctcctgcagacagaggctcctgcacgcacttgtccgagatggggcctcccaccgggctcaccaaactctttcatcccaacccctcagcatccctggctcggctgtctgcgcctttgacctgacacaggtggcagctgtgtttgaaggccgcttccgagagcagaagtcccccgagtccatctggacgccggtgccggaggatcaggtgcctcgaccccggtgagaaccccctccatcctgagtcacatgcccggatgaggtcctgatccccagggccgagggctggggcttccgggtggttatttagctgatgctgagttcagctgtacccrttatacagttgggaaaaactgaggcctggtgtggtggctcacgcctgtaatcctagccctttgggaggcggaggtgggcagatcacctgaggtcgagggtttga

SEQ ID NO: 683242 - DNA, 980 bp, Homo sapiens
tgcagtattaaaatctagtaagagtcacttattcagcacttgctcaaagttctcagctgacacttgttgtagggagacgccatgtctatgtggggtgggtccttcctgtagccctgggcacccaggtgtggtaggagccttagaaagcggaaatgggagaatcttctgagcacagggagggaggggtggctccacatcctcctctctaaggcagtgcctccttctcccccaggtggtcaggacaaacccttcctgtctgcccggcccagcactgtggtgcctcgaggaggacacgtggctcttcagtgtcactatcgtcgtgggtttaacaatttcatgctgtacaaagaagacagaagccacgttcccatcttccacggcagaatattccaggagagcttcatcatgggccctgtgaccccagcacatgcagggacctacagatgtcggggttcacgcccacactccctcactgggtggtcggcacccagcaaccccctggtgatcatggtcacaggtcagaggctttctgtctgggcttctcactgtcccacctcctgaatcccagagcttctggtgggggtgtccatcagggtcccatcacccaggccccaactgtatttggggtcaagggrgattgaatacaggggaaatgggcgctgtggtgggaagaataactgtcgccaatgatggctacattgtaaaccctggagcctgtgactatttatgttatagggcaggggactgaaggggaaggtggagctcaggttgttgatgagttgaccttgagatggggagacagcctggactgtcctgctgggctcagtgtaatcacaagggtccgcgtgagaggtggaggaagaggggagtggggattagagcagtgtagtgggagggagacgctatcagccactgtgggctttgaaggtggaggaaggccactagtcacagaatgcaggtggcctctaagggctggagaa

SEQ ID NO: 683243 - DNA, 1307 bp, Homo sapiens
gaagaaaagtggtgattggccatctttagtctcaatgtaaacggtaatactgatgagtgtggaaaaggcagggaagaggattgacaataagtgacactcattgttttcatctgagctttgagactgaaagaggaacacaggagtgagatgtatgggaacaaaccccttctttttccagctaaacagagtggaagttggacactgagttttggcgtacagcaaaatcctaagtccattgttgggttgaacacggccatgttgtacatcctggtttcacagcagacactggaggaaaacagcctgtattcataagaggctgtccctcgggtcactgcccagaatatccggagttggtgctcacagggttgggaactctcctggaccagacaggctctggatatgggggggtaccaagctccccggggccatgcctccacagctctcttctcacctcattcttgaccatttcccaaacctctgacctcaccttcattcatccatggtgaacacgctaaagctggccttcaaagcttgagacagaggaaaattgggcttcatctctgggaactaaattggggagtggagactcagttctggcctgacaggagggagaagaccctggatcccagtgtggatgggaagaagtatgtgtttctcttttgtgcttggaccctgtgtccaagcatgtctgagatgtgatgaagatgaatcttcctttccttgtctattttctcatgccagagaattggaatcttatattccattaactctttctgttctgttcatccagattctatgaaggagaaaggaaaagatgtgatactgtaattttgctccatttgtctaaaatgagtaggctgcaactcctcttgaagtgataccttttctagctcttgttggaggtgtctcaggactcattacttcggggaacctgcaactgtgtcagtctggggaaactgcaaatattcttgtcttacatttgtctccagccaattgtgatggactccagtgacctgcaattgctgttattgcaggtaaaatgtacctgagtcaggccacagttctcctggactatgagcccctggccatgttcctgaggcaattctgttcatctaaatataataataataacacactaaaaatggcaagccattgttaattcctgaagtctcatttgaaaattactaaatgtctgttattttttggtgtttacattatatgtagacagataaactacacacacacacacacacacacacatgcacacagaagaatggattgkttcatgtagaaaagtaaataattca

SEQ ID NO: 683244 - DNA, 621 bp, Homo sapiens
cctccctggcttaagaaatcctcccacctcagcctcccaagcagctgggtctacaggcacatgccaccacccccagataaattttgtattttttgtagagatggggtctcgccatgttgtccaggttggtctggaacacctgggctcaagcaatgccctcaccttggcctcaagtgatccacctgccttgggctcccaaaacactgggattacaggcgtgagccaccatggctggcccattatatattctggatacaaatcccttatcatgtatttttctccaagtttgcagcttatcatttagtgatggggtctcactctgttgcccaggctggagtgcagtggaaccatcatagctcactgcagcctcctggactctagcgatccccccacctaagcctcgggagtggctgggactataggcacgtgccaccacacccagataatttttgaattttttgtagtaataggtaatatgtaatattggtaatatgtaatatgtaatattactaatattacatacacatgcatatrcaatattgctagtattatatatgcatatgcaatattgctaatattgcatacatgtatatgcactattactaatattacatgcatgta

SEQ ID NO: 683245 - DNA, 853 bp, Homo sapiens
tcacctgatcctgagaggtcaaggttgcagtgagccatgactgcaccactacactccaagcctgggtgacagagtgagaccctgtctcagaaaaaaaaaaaaaaaaaaaaaaaaaaaagagggatgttaggagcaagatctggctggtgtaagctacgttgagggtgtgagatatgtatgtatgtctgtatatgggtttttattttgggggggttgacagaggtgggaatatagtcargagtacaggggtcattattgttgcagcttaagagttacgatctgtatcaagggggccactgtttgttattgtcctgccagactggggtcatttatttctgcaaggagtccctgactagagtttccgtccaacctcttcacccaagtcttcctgcccttagtgccttgttttcctcccagcggcatctgccagccactcacagtgcccagaagcaagtgtgaactgccaccatctcctccacttctcccatctgctcccagaagcgggcaggagtggggcaagaatctcatctgtccagtaggccactgcttgctgggacacccaggaaaagccctctgagcctcagtttccccatctaaaaatagggtccattctagtgtctccccacacaatggagccagccgcctaagttcacatcatggttctgctgcttatcagctgagtgacgttgggcaagtgacttaacctctctgtgcctcagtttttcatctgtaacatgggttaacatgatagaattgttgtaaggattaaggaattgatccatgtcaagcacttcccatgatagttcctggcatactgcagtatcgtaagtctagccattattataactgatta

SEQ ID NO: 683246 - DNA, 1007 bp, Homo sapiens
ttttccttgtctttgaacttccttggaggagagcttgggagacgtcccggggccaggctacggacttgcggacgagccccccagtcctgggagccggccgccctcggtctggtgtaagcacacatgcacgattaaagaggagacgccgggaccccctgcccgatcgcgcgcggcctccgcccaccgcctcctgccgcaaggggcctggactgcaggcctgacctgctccctgctccgtgtctgtcctaggacgtcccctcccgctccccgatggtggcgtggacatggttatttatctctgctccttcttgcctggaggagggcagtgccagccctggggttctgggattccagccctcctggagccttttgttccccatgtggtctcagtgacccgtccccctgacagtgggctcggggagctgcatcacccagccttccccttctccgactgcagggtctgatgtcatcrttgacagcctttgcttcgtgggggcctggcagggcccctgcctccccgacccccgacccactgcaaatccccgttcccctgcactcctcttctcccagcccatccctccggcccctgtgcctctgcggccccagcccagctcccagggccgtcacctgcttggccctggcccagctccctgccctgagtcctgagccagtgcctggtgtttcctgggctcggtactgggcccccaggccatccaggctttgccacggccagttggtcctccctggggaactgggtgcgggtggagtactgggaggcaggaggtggcccggggaggccttgtggctcctcccctcgctcctcgccctgggcctcagcttcctcatcaatagaaaggatgtgttcggggtgggggcgtcaggtgagaacgtttgctgggaaggagaggacttggggcatggcctctggggccacccttcctggaactcagagaggaaggtccgggccctcgggaagccttggacagaaccctccaccccgcagacca

SEQ ID NO: 683247 - DNA, 1007 bp, Homo sapiens
ttttccttgtctttgaacttccttggaggagagcttgggagacgtcccggggccaggctacggacttgcggacgagccccccagtcctgggagccggccgccctcggtctggtgtaagcacacatgcacgattaaagaggagacgccgggaccccctgcccgatcgcgcgcggcctccgcccaccgcctcctgccgcaaggggcctggactgcaggcctgacctgctccctgctccgtgtctgtcctaggacgtcccctcccgctccccgatggtggcgtggacatggttatttatctctgctccttcttgcctggaggagggcagtgccagccctggggttctgggattccagccctcctggagccttttgttccccatgtggtctcagtgacccgtccccctgacagtgggctcggggagctgcatcacccagccttccccttctccgactgcagggtctgatgtcatcattgacagcctttgcttcgtgggggcctggcagggcccctgcctccccgacccccgacccactgcaaayccccgttcccctgcactcctcttctcccagcccatccctccggcccctgtgcctctgcggccccagcccagctcccagggccgtcacctgcttggccctggcccagctccctgccctgagtcctgagccagtgcctggtgtttcctgggctcggtactgggcccccaggccatccaggctttgccacggccagttggtcctccctggggaactgggtgcgggtggagtactgggaggcaggaggtggcccggggaggccttgtggctcctcccctcgctcctcgccctgggcctcagcttcctcatcaatagaaaggatgtgttcggggtgggggcgtcaggtgagaacgtttgctgggaaggagaggacttggggcatggcctctggggccacccttcctggaactcagagaggaaggtccgggccctcgggaagccttggacagaaccctccaccccgcagacca

SEQ ID NO: 683248 - DNA, 1172 bp, Homo sapiens
gcctgtgctcccttttctttgtagtgggttgtgcatgtttctcttgagaagcaagggagaggtgccggtcatctatcctgtagggtcttgtgggatgtgactgctcttcatcctcgccagatctctcttggatccaagagggaggagggaaacgaagacatgccaaggtgaggtcacagtaggagacccaagatctgaacctagatccctgtgaagccagagtcaccatcacctgtgtgacagcacaaagaaggaaacaggaggggccagtaaaaagcatctggcttggatttggcttgatttacttaattaagagatggagtctcgctctgttgcccattctgcattgcagtggcacaatcatagcttactacagctttgaactcctgggctcaagccatcctccggactcagcctcctgagtagctgggagtacaggcacgtgcaccatcacacacggattttttttttttttttttttttaaagacagagtctcactctgtcacccaggctggagtacagtggtgcaatctcagctcactacaacctctgcctcctgggttcaagcgattctcatgtctcagcctctcgagtagctgggattacaggcatgcaccaacacacccagctaattctatttttagtagagctggggtttgatccacccgccttggtctcccaaagtgctgggattacaggcgtgagccactgtgcccagcctggataattttttaagagagagatggggtcttgctgtgttgctcaggctggtctcaaactctgggcctcaagccatcctcccaactgtgctttccaaaatcctggggttataggcatgagacaccacgcctagcctgggttcccgtaaaggaggaggagttgtgagtcattagtacgccaggaaaaagggtccagtgggagggcttctgaagcctgakgtcacaaaacgggagcaggcctacaagtgagctgagagtggaagcgccttcgttcttagaaacaggaaggaaggcagagaagggcagctgtggacatcagtgagtcaggaggaaggggaagaggcccatatcaccaaatcctcagcctggctagtgcccacagaccccaaaggcccttaggatccaagatggaggcctaacagtgtccaagggcagccgggtcggggtggctg

SEQ ID NO: 683249 - DNA, 1420 bp, Homo sapiens
tactcctgattctttcttcagggagggaccagaaaatagctacagggactcttacagtgatgctttatgaaaaatacagtacttccaatgtatcaccactgctacaagaatcatctttgcattcacaacattctcacactagatcaagagtttgtgggacatgggtcagtagcccccgttgtccccatcaccatcgtttatgctgaaaagctccctgaaaaacagctctctagggatggtccactttgtcaacgtgtgtttgttttgaatgtcgtctctaaccacaattcgttacactcagtgtttctgcagcgcagggttcaggctccatctgcagttaggcaggctctttccagactgagtctctgtgtggccctggcactgtcctgctattccagggttctgagcacaaatgctcccctaaagggttaagcacaaactgctcagaagtgctgttgtgaaccggaagtgtatctcccactctgtcttcatctgccatgtgtcactagttggcaaggaatatctcttttgtgtctacatatggtttaaaaaaattcccacctaatttggatggaagtaaactgttttctatgaattaaagattaaaaaaaaaaaatcagaaaactaccaggaaaaacaaaaaggctatatgacagcctcgagtctggaaatcagcctattcaaaccccccaagcagggaaggagtgttagtcacatgatcggtctaataaatatccttagttggacatgcagaaaaacgtatttttaaaacttggcatctatttcacaccctactccccatttgttaaatggcagatctgccaacttaggaaaacattcctcccaaatgttttcctaacaggatgtatactccccaaaccccccatttatagtgaaatgcccgtaatttatttaaaaaacacaggtggagtgcccttctagtttgttctctctttcacagcttgataataacaaccatgccctctcacatgcccacgtaatcaggtctatatctaactaactcctgttttgggaagactaagatatttatttcaaatttaggtcaaaaaggtaaccttcaatagagacaatttgagaggttaaatataaaggctaaagtttgaaaatgcagtgaaagtttaaaaattggctgggcgaggtggctcacacctgtaagctcagcactttgggagacccaggcgggcagatcacttgagcccaggagttccagaccagcctgggcaacatggcaaaacccygtccctacaaaaaagaatacaaaaattagcaggcttgagcctgggaggtcaaggctgtagtgagctgtgtcactactgccactgcgctccagcgtgggcaacagaatgagaccctgtctcaaaaaaaaaaaaaagtaggtttttgtttgtttgtttgagat

SEQ ID NO: 683250 - DNA, 1366 bp, Homo sapiens
atggtttttctccagcagaaactttcttgtgcagggtaagatctggcatttgatggatggcttctccatattgattaccttcattatgtgtacagaatctgtccaccatatgatttctgttaaaaatgagagacatttttatgtatggtatgtttagtaatgatgtgttgagatgtattaacaagtattagaaataatgtctaactacatttcagtatacgtgaagtttttctattctgaattgtttgaagagacatattttttaatgcagtatttattatatatggggttttcctgtaatttctttttatttatttattttttgagayggagtctcactctgtcacccaggctggagtgcagtggcgcaatctcagctcactgcaagctctgcctcccaggttcacagcattctcctgcctccgcctcacaggtagctgggactacaggtgcctgccaccacgctcggctattttttttttggtatttttagtagaggcgggttttcaccatgttagccagaatggtcttgatctcctgacctcgtgatccgcctgcctcagcctcccaaagtgctgggattacaggcgtgagccatcgcgcccggccccctgtaattacttctaacaattatgtttcaaattctcaatgtcttagtcaaatacaaatttttttttttggttaaaattctgaggaataaacaaatttggagcaatgcttatatttggagcaatacttagatatatatttaattgcatacaaggatttttctcttgtgagtgcaactcacctcagatttttgtggtggtcttcagtgccatagccttcacaatttttttctaaagtgtaggcacaggaattatttcctgtgaagtttggtattgtctgttccttagatttttcttgcccgtacatatcctgcagagaaactgacccattggctttaaattgagtcccatcatctgcaacaaaaaagtaaacaaatctcaaaaggaataagacacgtattaagcaaaggaagacactgaggagtttagcattttgaggacctcatcaataacagacataaggggtcaaaatgttaggtatttcacaaacacagtaagtcacaggtatcaaacaaggaaccactctgtgatcctaaatgaccagtgaaatctatacccctactaatgacactaaaggaacttcaagtcctttaaaccaagacagaaataacatctgtttcacacatgttttcactgttagggaataatgactagattctaggtccatggtggctgtgaacatgtctgtcttagtcctttcccacatttcacatcttgcaacagaactgatgagaaagaaatgagttcattaaaaacca

SEQ ID NO: 683251 - DNA, 1366 bp, Homo sapiens
atggtttttctccagcagaaactttcttgtgcagggtaagatctggcatttgatggatggcttctccatattgattaccttcattatgtgtacagaatctgtccaccatatgatttctgttaaaaatgagagacatttttatgtatggtatgtttagtaatgatgtgttgagatgtattaacaagtattagaaataatgtctaactacatttcagtatacgtgaagtttttctattctgaattgtttgaagagacatattttttaatgcagtatttattatatatggggttttcctgtaatttctttttatttatttattttttgagatggagtctcactctgtcacccaggctggagtgcagtggcgcaatctcagctcactgcaagctctgcctcccaggttcacagcattctcctgcctccgcctcacaggtagctgggactacaggtgcctgccaccacgctcggctattttttttttggtatttttagtagaggcgggttttcaccatgttagccagaatggtcttgatctcctgacctcgtgatccgcctgcctcagcctcccaaagtgctgggattacaggcgtgagccatcgcgcccggccccctgtaattacttctaacaattatgtttcaaattctcaatgtcttagtcaaatacaaatttttttttttggttaaaattctgaggaataaacaaatttggagcaatgcttatatttggagcaatacttagatatatatttaattgcatacaaggatttttctcttgtgagtgcaactcacctcagatttttgtggtggtcttcagtgccatagccttcacaatttttttctaaagtgtaggcacaggaattatttcctgtgaagtttggtattgtctgttccttagatttttcttgcccgtacatatcctgcagagaaactgacccattggctttaaattgagtcccatcatctgcaacaaaaaagtaaacaaatctcawaaggaataagacacgtattaagcaaaggaagacactgaggagtttagcattttgaggacctcatcaataacagacataaggggtcaaaatgttaggtatttcacaaacacagtaagtcacaggtatcaaacaaggaaccactctgtgatcctaaatgaccagtgaaatctatacccctactaatgacactaaaggaacttcaagtcctttaaaccaagacagaaataacatctgtttcacacatgttttcactgttagggaataatgactagattctaggtccatggtggctgtgaacatgtctgtcttagtcctttcccacatttcacatcttgcaacagaactgatgagaaagaaatgagttcattaaaaacca

SEQ ID NO: 683252 - DNA, 1366 bp, Homo sapiens
atggtttttctccagcagaaactttcttgtgcagggtaagatctggcatttgatggatggcttctccatattgattaccttcattatgtgtacagaatctgtccaccatatgatttctgttaaaaatgagagacatttttatgtatggtatgtttagtaatgatgtgttgagatgtattaacaagtattagaaataatgtctaactacatttcagtatacgtgaagtttttctattctgaattgtttgaagagacatattttttaatgcagtatttattatatatggggttttcctgtaatttctttttatttatttattttttgagatggagtctcactctgtcacccaggctggagtgcagtggcgcaatctcagctcactgcaagctctgcctcccaggttcacagcattctcctgcctccgcctcacaggtagctgggactacaggtgcctgccaccacgctcggctattttttttttggtatttttagtagaggcgggttttcaccatgttagccagaatggtcttgatctcctgacctcgtgatccgcctgcctcagcctcccaaagtgctgggattacaggcgtgagccatcgcgcccggccccctgtaattacttctaacaattatgtttcaaattctcaatgtcttagtcaaatacaaatttttttttttggttaaaattctgaggaataaacaaatttggagcaatgcttatatttggagcaatacttagatatatatttaattgcatacaaggatttttctcttgtgagtgcaactcacctcagatttttgtggtggtcttcagtgccatagccttcacaatttttttctaaagtgtaggcacaggaattatttcctgtgaagtttggtattgtctgttccttagatttttcttgcccgtacatatcctgcagagaaactgacccattggctttaaattgagtcccatcatctgcaacaaaaaagtaaacaaatctcaaaaggaataagacacgtattaagcaaaggaagacactgaggagtttagcattttgaggacctcatcaataacagacataaggggtcaaaatgttaggtatttcacaaacacagtaagtcacaggtatcaaacaaggaaccactctgtgatcctaaatgaccagtgaaatctatacccctactaatgacactaaaggaacttcaagtcctttaaaccaagacagaaataacatctgtttcacacatgttttcactgttagggaataatgactagattctaggtccatggtggctgtgaacatgtctgtcttwgtcctttcccacatttcacatcttgcaacagaactgatgagaaagaaatgagttcattaaaaacca

SEQ ID NO: 683253 - DNA, 602 bp, Homo sapiens
ggcaataagaatatcaagaggaagcaagggaaggcaactgattcaaacctgggattcaaatccagtttgtctgattccagagctcatgttcatacctactgtgttataatatatcgtgtagctatgtggaagtaaacataacattatgggaatgaaaagtatgtacagtatcatggatttggcatttctttttaacttggatggttagctcaggtgtttggtatatatgactttgggatgccaagatctccagttctgatgtggtaaaaattaattcgacttttgactaaggagactcakattataccatcctaggcacctacctaactgacagtggtcacaatggaagcaaagagagtgtgactggctcggggcaaatccatcccaaccacttgccaggatgcacaaagcacacagtccattgcagaagacaaagaattatctcaccatctccctgagtctagcctgaactctgcaggcatggtgtacaaggattttctgggtacttatcatttcatcaccaacttctccatgttgcagtcttgctagaggagttattataatgacactaaaagtatgaggtctaaatgagatggtttgaa

SEQ ID NO: 683254 - DNA, 665 bp, Homo sapiens
gagtgatgagcactgaatgtaagaagtgggagctcctttcccagccttagaccttagattgacttctcattactaggctattgaattcttcagccgcaccagccaaagggtgccaaacattcatgttaatttgggtaaatcctaaatccttcagcaatctgctatcaacttgagtacaatgacaattagcatatcaattagatttctctcctctttctccccacccgacctccataccaccccccatcctaaaccacttactacttttaaaagtcagccaagcctgtaatgccagctactcctggaggatcacttgaagccaggagttcgagaccagcatgggcaacataacaagaccttgtcttaaarttttttttttttttaattaactgggcctggtggtccacacctgtagtcccacttagctatttccagaactgaggcaagagggttgcttgagctcaggtggtcaaggctgcagttagctatgattgcaccactgcaatccagcctgggcaacagagaaagaccctgtcttaaaaaaagtcagtaacactaaaccatctccttttcttcagtctctgagagctttgcagccagaactctacaccagggtaggctactatgagaataataaccagtgaggcaaaagatggttcttaatt

SEQ ID NO: 683255 - DNA, 657 bp, Homo sapiens
ttatcaaacttactgtgacaatgaatgattagataaagtcttgtaattttcagggacaatatgtagttccrtccatctcccatgttcatctgatgttgatgggcagcaaaaagtattttccaaagctaatgtgaatcactgccccaatgtaatcaatacttaagttcttattcaattagttaattattagtgttactaatcaagggagatagaaaagaaatgagtaccccagagtttgaatcccagattttataaactagctgcatgaatgtgagaaatcactcaagctagtgatttctagctaaaagatctatctatctgctctaagtgattttcataaaaaccatgtgtgcacgggaagttatgttatataggttttatctgtatcagtcatcattgctatttttctttaaataccaatctacctgtgatgccagtatcgcaaatgaaagaaaatagaaatcatgttgcaccttatttttgaacatatatatttcagctttcatgtcagaaatcaactacattgggatagaatcatcccttgggtttcagaatggtaactggaataatgattttcatggctaaaagggaaccaagagacaattaaaaatgacagtcatcaaaatgatagtcatcaaaaatgatatttgctatttg

SEQ ID NO: 683256 - DNA, 1898 bp, Homo sapiens
aaaaaaaaaaaaaaaaaaaaaaagagagaaaagaaaagaaaaagaaaaaaggctaactaaaaaggacgggttttagttatgtttgattttaatgtccttacatatctctatttttcccatttctaaagataattttggtttacctattataataattttgtgattattttgggtttgagaatctggacttaaatgcctattggtgttttaagtcaatatctacaagggccaaaatgcacagatgaatgaaaagtaatttggctaattggataggataaatagccatactgaagatagacaaatgcctgccttgaatttcccagcatgatgtttagtcaatctctaattttcttgtcatgttaccaaagtagacaagagccttagctactagttgataaggtcatcaagttatcattatatattagctctatcactatcaaaagaataaacagatcatggtctctccatcaaatagtaactactgagacaagcttttctctttaccattcaggttctgaagcactttgtatcccagtaatcacttttcctaatatcataacaggacataagtgtcttttctaatgttgttgaattagagtactcactaaagaatgaggaggaaaaatgccttgataatctccttgagaccaattcttttatccccmgtgtctagctctgggcattcaatgatgaagaagtacatcctatctttttcttggaaattctaactgttttcctgctcctgagaactaatgattttatgtctttgaatggtataactgacaaagttaaagtgaaatctatgttatgcttcaaagaaacacatacataaataattctccatattttaaacttatttcctaacatatagaagtgacaacatatcttagttgtagatattacaaaatatccttatttacagttcaggccaaagtgaaatattacagaggggtatttatatttgccattttttgttagacttccataaatcaatgaaaactcataaagatgtttaccgtcatctttaattggcaaagatacagtgagaaatcattcagaagtagaatcatgaaacttgtggattatatatggcctagtgtaatacactgaaaattcttaacaaaaatatggaaacatggaagtaaatgcatataaatgttaccaacacatagaaataatactcaaggtgatataaatacctcgacttgatccttacatagtctatactcacatgtagcacatgcaaatataaaatatatgttttaaaaaccatagaaatggaagaaatcatagagttcatggagtcccgtcctatcccccagcatgaaatatcttaactacattcttggtaagagtttgtaagtactcaatgaagacatggtgaataaatgaaaaacagataaaagcctctagattcacattggacatttctaggaatcctcttcagaaggcagctcactctattttggacagttccaacatgcagagtgctcttttctatattaccttatggcatttattataatatcatctagatattcttcaatctatagatagagagctactgctttttaaaaaaaataactggatcactatgtcaaacttaattatccttagggtttttaagaggaaaaaaatccataaggaagctctaggaagagctacatatttttatgagttattaatgttccacgttgctttaatatgctgttatccagtccaaataatgagtacaaaaattaatgtaatccaatataaatataaatataaatacagaaaggaaatcttaacaaaatcatcctgaagactgaatggtttgggcaataaaaatcacatagatttattctgcacttcaggatatgtggataaatagcgttagtgacaatctgctaatccaa

SEQ ID NO: 683257 - DNA, 2075 bp, Homo sapiens
cacaccatgatacatttttggaagtcacgtctcatttaggtaaaaattatttaccaatacataatctccctccccacttttatttctttatttttatttttttatttttattttttttgaagtttgtaatagatatgcatggctaaaatttattgttacattaatcaatatattttataaattgggagaaaatattaaaagttcctccccacttttgatggccatatatttaatcacagccagagaaaatggcttcatatacatatttcttaaattttaaaaaatacttatacttccagaatttgcattaacttgtgtcaacttgcacaaactgcccaaactccaagagctttctcatatccaaagtggagataataatttttatttgccaggtgtttctaaagattaaatgagattaaatatatttgacacatagtacaggctcaataaatgcttgttttttgcttagtcttcctcatggaaatctccattcacaagattttcactaaacacacactagacattctgaaaatgattaataaataaattttgagaaataatttatataagcctattttcctttattgaaatacattgcacggggaaaattcactataactttacatccaaaaaggttaaatgcttaatgaactctttaaatgatggtgcccaatgcttgtaaagatgcacatgtgtgtgtgtttctgtatgttgaggagtgatcattctcacacaatgctaacataaacatacattaatttggcacagattatctgaagtattatttggacctctgtattattatttttattccagaaattcgatttctaagaattctgactaaaaacaattaaagaatattcatttacaaagatgctcattgcaataccatytttaagtttatattagtctgttttcatgctgctgatagagacatacctgagactggacaatttacaaaagaaagaggttcaatggacttacagttccacatggctggggaggcctcacaattatggtggaaggcaaggaggagcaagtcacatcttacatggatggcagcaggcaaagagagagcacttatacagggaaactcccccttataaaaccatctgatctcgtgagccttattcactatcacaagaacagcatgggaaagccctgcccccatgattcaattacttcccactggatccctcccacaacacatgggaattcaagaagagatttgggtggggacacagccaaaccatatcaaagttttattttctttttaatttacaaataataattatgtatattttgaggacaatgtgatgtttggctatttatcataaaaaattgggttagaaatctagatgctcaacagtagatgattgggtaaagtggatttaaatgactattaaatgaggtggcgaagtatatttcttgacatgaacagatgcacatagtatatgctgagatttaaaaaaaaaaagatcttgaaacgccatttatagagtcaccatagttttaaaaaataaattcacacatctgtgaagaaaaatacctgggagagtttatttaaaagatgttaagaataggtatggttgtctctgttatgtggtggtgatttgtactcatttagcatatcaagattttctcatttttcagtgatgaactgatgctactgatataatatgaatgaaaagaccactgcctaaagtcctacctattttcatgttccttctggtttttgcttcacgggtggtgcattcccaggcaaatggttcagaaaagaactaagcatagtgcatggcgtgttacataatcccagctttgttttttaatagatgtacttgagtgaccttaaaagcctaaaaatgcaatagttaagagggagttgtgtagggagggtgacttgtgatgttatcagcagtatttagattctatctttattcaatttcaagacatgctgctattggacaagactgtctattctatttatttgttaaaatacaaatcagttctcaaacaagtcacttagaacaagttttgaaccagtttgccttcacttttgattacctggtagtgtt

SEQ ID NO: 683258 - DNA, 2075 bp, Homo sapiens
cacaccatgatacatttttggaagtcacgtctcatttaggtaaaaattatttaccaatacataatctccctccccacttttatttctttatttttatttttttatttttattttttttgaagtttgtaatagatatgcatggctaaaatttattgttacattaatcaatatattttataaattgggagaaaatattaaaagttcctccccacttttgatggccatatatttaatcacagccagagaaaatggcttcatatacatatttcttaaattttaaaaaatacttatacttccagaatttgcattaacttgtgtcaacttgcacaaactgcccaaactccaagagctttctcatatccaaagtggagataataatttttatttgccaggtgtttctaaagattaaatgagattaaatatatttgacacatagtacaggctcaataaatgcttgttttttgcttagtcttcctcatggaaatctccattcacaagattttcactaaacacacactagacattctgaaaatgattaataaataaattttgagaaataatttatataagcctattttcctttattgaaatacattgcacggggaaaattcactataactttacatccaaaaaggttaaatgcttaatgaactctttaaatgatggtgcccaatgcttgtaaagatgcacatgtgtgtgtgtttctgtatgttgaggagtgatcattctcacacaatgctaacataaacatacattaatttggcacagattatctgaagtattatttggacctctgtattattatttttattccagaaattcgatttctaagaattctgactaaaaacaattaaagaatattcatttacaaagatgctcattgcaataccatctttaagtttatattagtctgttttcatgctgctgatagagacatacctgagactggacaatttacaaaagaaagaggttcaatggacttacagttccacatggctggggaggcctcacaattatggtggaaggcaaggaggagcaagtcacatcttacatggatggcagcaggcaaagagagagcacttatacagggaaactcccccttataaaaccatctgatctcgtgagccttattcactatcacaagaacagcatgggaaagccctgcccccatgattcaattacttcccactggatccctcccacaacacatgggaattcaagaagagatttgggtggggacacagccaaaccatatcaaagttttattttctttttaatttacaaataataattatgtatattttgaggacaatgtgatgtttggctatttatcataaaaaattgggttagaaatctagatgctcaacagtagatgattgggtaaagtggatttaaatgactattaaatgaggtggcgaagtatatttcttgacatgaacagatgcacatagtatatgctgagatttaaaaaaaaaaagatcttgaaacgccatttatagagtcaccatagttttaaaaaataaattcacacatctgtgaagaaaaatacctgggagagtttatttaaaagatgttaagaataggtatggttgtctctgttatgtggtggtgatttgtactcatttagcatatcaagattttctcatttttcagtgatgaactgatgctactgatataatatgaatgaaaagaccrctgcctaaagtcctacctattttcatgttccttctggtttttgcttcacgggtggtgcattcccaggcaaatggttcagaaaagaactaagcatagtgcatggcgtgttacataatcccagctttgttttttaatagatgtacttgagtgaccttaaaagcctaaaaatgcaatagttaagagggagttgtgtagggagggtgacttgtgatgttatcagcagtatttagattctatctttattcaatttcaagacatgctgctattggacaagactgtctattctatttatttgttaaaatacaaatcagttctcaaacaagtcacttagaacaagttttgaaccagtttgccttcacttttgattacctggtagtgtt

SEQ ID NO: 683259 - DNA, 676 bp, Homo sapiens
taaaggtcactttaaaaaaagagtgtttcatcaagaactctaatctgattgttcccccactccttataattatcaaaaattgcaatgataaatccttatgtgttttttaaaattgattttgttgtcccataagtacttcatataaagacttcctttagtacaraaaaggattatttgttctatcactcgttatattttttacaattttttctacacacagcattgcaaatgatctttctgttgattctttagttttcccttcatattagtcattttcacttacttttccatttaaataaattaatacaggaaaagcccctgagttcatcttccatggtgcaacttttattttttgctttattacattagccttttactgctgccagtgtggatgctgtaaatttgctttaatttctttacacattttacttcatgcatacttatttcattgctccccaatgcctgtttctttccagattttatctcctcatgactttttgctactaatttacaagaagctagatattcttatattctagagaagtggtccccagccttttttggcaccagggactggtttcatagaagacagtttttccacagttggtgggttggggatggtttcaagatgaaactgttccacctcaggtcaacaggcattagttagattatcata

SEQ ID NO: 683260 - DNA, 676 bp, Homo sapiens
taaaggtcactttaaaaaaagagtgtttcatcaagaactctaatctgattgttcccccactccttataattatcaaaaattgcaatgataaatccttatgtgttttttaaaattgattttgttgtcccataagtacttcatataaagacttcctttagtacaaaaaaggattatttgttctatcactcgttatattttttacaattttttctacacacagcattgcaaatgatctttctrttgattctttagttttcccttcatattagtcattttcacttacttttccatttaaataaattaatacaggaaaagcccctgagttcatcttccatggtgcaacttttattttttgctttattacattagccttttactgctgccagtgtggatgctgtaaatttgctttaatttctttacacattttacttcatgcatacttatttcattgctccccaatgcctgtttctttccagattttatctcctcatgactttttgctactaatttacaagaagctagatattcttatattctagagaagtggtccccagccttttttggcaccagggactggtttcatagaagacagtttttccacagttggtgggttggggatggtttcaagatgaaactgttccacctcaggtcaacaggcattagttagattatcata

SEQ ID NO: 683261 - DNA, 611 bp, Homo sapiens
aaggcaacattcgtttggttaaaaggcattatttagaaagaataaatcaggaaagggtgggcaaacaggaacagaagttctcactctgggttgtgggtttcatgcaggattagcagttaggactttcagccttcggactgttttttgtctttaaggtggagtttcaccagggacccatctttatctacctagccatttggctgcctcctgtcactatcagaagtgcaggttaatacasagaaattcaagtcaacagtacaggtttgaaggttaatcctcagtaaatactgctacttgatttctttcaatgttattgctttcctactattttactcaagtagatcaaatcaaagattataatatcactttgcttggcaaaatataaaattactctgaaaatttaaggtattgctatcttagtttttacttgcacaatattttgttccctttactattcctaaaatagtggtggattgtcatagatgagtttccataagaagcggactctggcgaagatttgtatgcatgaggtgattgctgaggagagctttggagaaaaatatatgtgagtgaggaaaatacaattgcttagaggggaatactgtactata

SEQ ID NO: 683262 - DNA, 611 bp, Homo sapiens
aaggcaacattcgtttggttaaaaggcattatttagaaagaataaatcaggaaagggtgggcaaacaggaacagaagttctcactctgggttgtgggtttcatgcaggattagcagttaggactttcagccttcggactgttttttgtctttaaggtggagtttcaccagggacccatctttatctacctagccatttggctgcctcctgtcactatcagaagtgcaggttaatacagagaaattcaagtcaacagtayaggtttgaaggttaatcctcagtaaatactgctacttgatttctttcaatgttattgctttcctactattttactcaagtagatcaaatcaaagattataatatcactttgcttggcaaaatataaaattactctgaaaatttaaggtattgctatcttagtttttacttgcacaatattttgttccctttactattcctaaaatagtggtggattgtcatagatgagtttccataagaagcggactctggcgaagatttgtatgcatgaggtgattgctgaggagagctttggagaaaaatatatgtgagtgaggaaaatacaattgcttagaggggaatactgtactata

SEQ ID NO: 683263 - DNA, 611 bp, Homo sapiens
aaggcaacattcgtttggttaaaaggcattatttagaaagaataaatcaggaaagggtgggcaaacaggaacagaagttctcactctgggttgtgggtttcatgcaggattagcagttaggactttcagccttcggactgttttttgtctttaaggtggagtttcaccagggacccatctttatctacctagccatttggctgcctcctgtcactatcagaagtgcaggttaatacagagaaattcaagtcaacagtacaggtttgaaggttaatcctcagtaaatactgctacttgatttctttcaatgttattgctttcctactattttactcaagtagatcaaatcaaagattataatatcactttgcttggcaaaatataaaattactctgaaaatttaaggtattgctatcttagtttttacttgcacaatattttgttccctttactattcctaaaatagtggtggattrtcatagatgagtttccataagaagcggactctggcgaagatttgtatgcatgaggtgattgctgaggagagctttggagaaaaatatatgtgagtgaggaaaatacaattgcttagaggggaatactgtactata

SEQ ID NO: 683264 - DNA, 1313 bp, Homo sapiens
ggcttaacttcctacttggcatcataaatttaaatcatttttaagtttgttcttttcttttacattacttttttcttttttgcattagtttttattttaaaaattagactaggagctaggttgaatgagaagttcttactctgatttcagtacttggggcctgacgtttgtggtagccatctcgtttcttcctctattaaggctactagggctcattcttccctttctgttttatttttcatttcttagtgcttgaattcacctcagttattttaagtcacccttcattattggaagataagaaaaaatcctttcttatttttaaatgtggttttttatttcttaaactaggttaatcattattattattttatttttagacataattttctaaaaaaacagcaggggtattaaggtttttctaatttattattaattctgtagttaacactcagactatgtcatggatatactaagattacactacatgagcaaataatgaatgtattaatgtattgctgttaatgttcttattttaaaaagttcattatagttataccttaagctgattgagagcaagaatcttcatgttaactgctctgtttctggtgcttagcacagtgcctcacacagagtaggcactcaacttgttaattttgaataatttaaagaaaaagtgggcaaatgtctgttacaattatcaataaccttgggtaattttattcaattggttgcatgatttaaaaaggtgaattcttttttatagtttcttctatgtttggatcctgagattattaatcaatgcctagtatggtgctaatcagaagtcatacatttactgacaacaatccggtgaccaaatactgttcttctagtcatttctggcaagtgaagtacatgagactaaatatgcacacaaaatagagaaactaaaagtatccaaactatatttgcctcacaccaaattagtacattcgtattttgtaattatttatgtttccaccatgaggcctagttatccagaagctctccttgcaaaaattacactgagactcgaatagaatttaaaagattcccctcagagatctcatggaactctacactggattttttttgtttcctctcaaagctctttcagttctattttgccagattcaattcygtgtattatctatgcccaccaccttaatatagaggccagtccacaattttctttcagcgtgaatttaatcatgtcacaatatatatgtatgtcaaaacatcatgtttcacatcttaaatatatacatttttattggtagactctaatttaa

SEQ ID NO: 683265 - DNA, 1313 bp, Homo sapiens
ggcttaacttcctacttggcatcataaatttaaatcatttttaagtttgttcttttcttttacattacttttttcttttttgcattagtttttattttaaaaattagactaggagctaggttgaatgagaagttcttactctgatttcagtacttggggcctgacgtttgtggtagccatctcgtttcttcctctattaaggctactagggctcattcttccctttctgttttatttttcatttcttagtgcttgaattcacctcagttattttaagtcacccttcattattggaagataagaaaaaatcctttcttatttttaaatgtggttttttatttcttaaactaggttaatcattattattattttatttttagacataattttctaaaaaaacagcaggggtattaaggtttttctaatttattattaattctgtagttaacactcagactatgtcatggatatactaagattacactacatgagcaaataatgaatgtattaatgtattgctgttaatgttcttattttaaaaagttcattatagttataccttaagctgattgagagcaagaatcttcatgttaactgctctgtttctggtgcttagcacagtgcctcacacagagtaggcactcaacttgttaattttgaataatttaaagaaaaagtgggcaaatgtctgttacaattatcaataaccttgggtaattttattcaattggttgcatgatttaaaaaggtgaattcttttttatagtttcttctatgtttggatcctgagattattaatcaatgcctagtatggtgctaatcagaagtcatacatttactgacaacaatccggtgaccaaatactgttcttctagtcatttctggcaagtgaagtacatgagactaaatatgcacacaaaatagagaaactaaaagtatccaaactatatttgcctcacaccaaattagtacattcgtattttgtaattatttatgtttccaccatgaggcctagttatccagaagctctccttgcaaaaattacactgagactcgaatagaatttaaaagattcccctcagagatctcatggaactctacactggattttttttgtttcctctcaaagctctttcagttctattttgccagattcaattctgtgtattatctatgcccaccaccttaatatagaggccagtccacaattttctttcagcgtgaatttaatcatgtcacaatatataygtatgtcaaaacatcatgtttcacatcttaaatatatacatttttattggtagactctaatttaa

SEQ ID NO: 683266 - DNA, 652 bp, Homo sapiens
ccattattaaaaattaaactatataaacacagagataaatactatataaacaaaggctataaatactcaaaacgcattattttctaattatttttactatattttattattatctgtgcttttaaggttattcatattaatcttatctgtatggagaaaataccgtattttgtgtgctgttacacatctcttccaaactctgtgttcagcaacatcaagttggtagcttgaaactggccatagtgggagtatttattccacagaaattggttagctaatgctaaaattagggatctcccaaaccctggccagttgttaaatctttatcagcacaccactgcaaagctgatagactgtagttgtaccccactgaaaatcctctatcctggcactatcatttaaactgccatttgtagaatttcagaaatatatttaaagcattatttatcagtacttggtataattagaaattcatattgcttactgggccatctcagtgatctcaaatagatgactaaattgtccattttattttctttcaaatccaragagctagtgttttccctttggagaaactaataatcaaacttctatttttgacttccctacactttcaccatttcaactctttgaaatctctctttttattagc

SEQ ID NO: 683267 - DNA, 640 bp, Homo sapiens
ttatttaactaaaattgtatttacttttgaaaataatttccaggaaagagatcaactactaaaataaatgcagctattttaagtagaaagatacatccataaggagaaaaaaagtgtgtgaaggcattgtaaacattgtaaatgttttccaagacttttagtataagaacatgagttcagctcatggatgcctttgatacatcacactattatcataatggactttagtttgaaaaccttttgtggcttaagcataaacagttatgtaagtcaaatcagaaatgtccaaaaataatcttagctatgtgtagagcctccaaatattgtatgtgtgtaagtaccagatacaatttctttttcttttggtacgctattatttataaactcatgtaaatatttataattgtggctatgcaaaaaatacataacaatgtctcgaataaatgcctccttgtgagaaataagctacggcacttacattacattatatacatttgagtctgttatatggcatacagaaraatataaaatgtcaggaagtaaacgaacttcctaagaaatcacctttaaaatatatttgatctaagctgcatgcaatttgaagaatactgctgatccatcattctagttataatgctgc

SEQ ID NO: 683268 - DNA, 1194 bp, Homo sapiens
caaaggaaaagggagttctcattgccttaagctcaaattctagcacagcatataaagctagtctatcatcacttctctccattcttgtacatgcattctgtgctttacacacatcagaagtcaatttattcctccagtgtaccatgtgcattccataagtccatgcatttgcacatacggttcactctgcctcatttgccctttgctccctttccagctagtgaattcctgttcatctctcaaagcaccaaaccaaatattatttcctttatctattgtttcaccattttccaggtactttttttttttttcttgtgagatgcagtcttgctcttgttgcccaggctggagtgcaatggtgcaatctcagctcactgcaacctgtgtctccggggttcaagtgattctcctacctcagcctcccaagtagatggaactacaggcacgtgccagcgtgccagcattccaggctaatttttgcatttttagtagagatggggtttcaccatgttggccaggctggtctggaacgcctgacctcaggtgatccgctgcctcggcctcccaaagtgctgggattacaggcgtgagccaccacgccctgtctccaggtacctttaacattcttttagcattgcactttttaccttacaccacacagttatttatktgggtacattcatctctgagacacagagcacctgaagaccaggactttttcttatttacctttatgttgctagcatagtgcctagcatataacaagagatcagtaagtgctggttttataagagaaaaagaaggtgcaatttagagagttcagaaaaatatttataataaaaattattaatagagaaaggatttcatacaaacttgaacatctaccaaatactcctatctcttaatagaacatgtctaagtttctcaacagaaggaaggagaatatttgttttaaaaagttggaatggcaaaggcacagtttttaaaaagagacagacagaaaaaaggcaagagcatcaacactatacaggaggatactccttcattcacgtaagagtgttgaccaaaggattactaaggacagactttgtcatcaaaagaaggacataaaggttaaatgtgagaggaaaaagtggggaagtctcatgatgaggttgggagtgactgcagaaacagccccataagacttctaag

SEQ ID NO: 683269 - DNA, 1428 bp, Homo sapiens
ccctcccacctccaacatcaatgtcttcccactgctctaagacaaacaccaaacctcataatgtgatctataagagccagatggtctgactcctgccagcttccccaacaccatctactctctgcatcagagcctctgtaggcttttttcagttyttctaacctgtcattccctctggccacaggacctttgcatacactgctctctcacctataacattcatctctgtttgttagaaaaggtcacttcatccttcaaaacttgtctcaattttcagttccaaaggaaaacactcccttaccgtagatagcatagtatgattaagagcacaggttctggagttctaaatcctgtttgccacttattggcactatagcttcgagcaagtcacattaacactcagtgcctcactttcatcttctgtaaatgggggacatacgactgttgtgagattgaataaattagttcaagcaaagcaacagaacagtatctagaacacagaattcaaaatcttggcttggtcaaatccctctattttattttcttatagcacccgggcatctcccctaataccattttacacttgttacagtctccctactagagtaaaatttctaagaaagcagaaaccatattcattccccagaagtggaagacaggagatattcagtaaatatttgttgaaaaaaatagctacaaggacgaagctgacgcccaaggaagagacctgtccaatatacaaagcctcatgcgcctgaccccaaagcccacactttacaccatactaacttgcctcctatgtaaatgcataagtcttacagctgcaattgaagtggccaacacagatgaacagaatgataaagattaaagaacactaaactgtatgggaacacagaaaacagtgaaagtccgcacgctgaattggacacaaaacaaacataggtgccactcacttccatgtcgataagctccagctctcatactgcccacctggggctcggttccctcctctttaaagagtaggatggggcaggtcgtctctaaagtgtcttcaacgtctaaaattaaatgactataaatcaagttatgtggcaatgttttaataattattttttaaaaggaagtttaacaagcacactgaaccagctgacagatggttttcaggggaccttcattttaaagaatgtgttcaagtgcctcaacaaaccttataaagtaggttaggtggtctgtgccccagaattaacgacagactcgacattgactggagacagagctcagaagcacacacaagcactccaacctgtttgtcaatctgccatcatgacagcctaggtatacagaacagtcatgaaatgtgtttagaacagtgccaaaatcaggctcaccactataccgaaaaggaaagtaagttcacgggatgcattt

SEQ ID NO: 683270 - DNA, 849 bp, Homo sapiens
gagatgtttgcttcctccctttccttagggtttgtactatagtgaattacatattccaatgagatgattttccataatgacagtctttgtcaacactaataycctgttaaggaaagatgactctttgccgaagagaacataatacagtttcataaatgacaattataacacaggatgaaacatggataaaataacacttttgtttatgctgagacaagttttccaagtctctttaggtctctttaaatatagagcattgtctgccctccccttgaccctttctcttcctcacccctcctccatttcccccattcttatttggaatagtcacccccacctcactccatgacttggtttcgcttcactctgcaagagcacagagccactaacaaaaggaagagggtgtggaagataaaagcagttactcagtgaggggtcctgagtgggcagtttaagctatgactgagaaatgtctctacctacctgctacacctctccctgcccatttcattaagcacaggttctttttggataactaggttctctggggggatgtggaacacctctttggcgtgctaagctttttactcactttcatctaataattaattcaaacaaatcaacacctgactcagggcgaagatgctttgatgctggtacaaaaaaaaattgcaaagatgtgaagatgctggtgcagaagagaaggccagcaggaccaggacaggaagaaagcatgagagagggtgctgggactccacccacatcaggttttctactccagactggctgtaactcccacttctgcacacttgggttcccaacatcctccttaaatgttgggaggtgtcc

SEQ ID NO: 683271 - DNA, 973 bp, Homo sapiens
tgcagacaccaacttgatgtccaaggctggctctggccacatccatgctattctaagtttttcctatagactagttttccctgtagtctggtgacatcagcattatgtaaaagtttgttgagaatacataatattaggccctactctaaaactactcaatcaaaaatctatttttaacaaggttcccaagtggttcacctgcacataaaagtaggaaaatggtctagagaccatctcagctgtgtttgaagaaattaattcatcaaattcaccaggacttcatgttcagtgtccattttacagcatatatgtatatatatacatatatatatacacatataatatgtatacatatacatatatatatatacacatataatatgtatacatatacatatatatataaaatcatttcttcagagagatttaatgttttaggaaattgcatttctgyataagtttgtttaaaaacaaaatccttttggtagctttgcaacaaagtgattaaccatatataagtttgggtttttttcctagttgttctgattgcaaatgtaaggttctcctaatatgcatgaattaaaagttaaaaacagtttaaacacttccttacaacacaatttacacacagaaaaaaactttaagtcacgtttctattgtttattaattaacaaataaaaattgcacatatcatatgttcctttcattctctcacacattcataaaataaatgtcagtcacgggattagctaggcaggtggtgaaaataaaattctgaataaaacacagcttttgtcttgctagacatttgaatgtagcagaacatatctacaatgaataaccaattcaaagtaaataagataaggaaattgggtaatatgagaggagcagatagggacaatatatgggaatcagcatgtttaccctgataaaaatgaggcttaagctgaacactggctgttcttgtttttga

SEQ ID NO: 683272 - DNA, 2279 bp, Homo sapiens
tataacataccacttcttcaagcagaatgaattctacctttaattgtattactacagatttggattatatcatttatcataccatagtacagttacttatttctccatgtgcctacctctcttgaaagtcaggcaacccttccaagtcacaaatcacatattgttcacattgcatgctacctaatatatagcaggcccttactatatacttattgagttacatttttaaakgtacagtaaatagaattcttcttccccactttaattctaaatatgtcacaaaaaaatctaagtctcataaactgttagaaggtaaaaagcaattatttttataatgtatataagctgcattattctttgtttacctcatggacagtgtgccccccaggacaccagtgaatgctatccctaaagccacctgctcaccatgcattgcatggacagttgtagtatgataacgacagtaccaagagaagctaggagaccaaaacagcagagttcattttagctcttggtgaaaagtaaaaacaaatcaatgccttttcctttgggaatcagtgaataaacttcttaatgtctgaaacatgtctccttgttcagttttcagaggagaaacagcatttttataagtcagtttaatttctctaagtttctgaactacctaccaatcctgtcttttactgaaaatcagcctgagagtgttgagtaagcaggatatgtaaaaattaatgtgctaaatttatttgtaaaaatatgctatactaaaaattactttacataggaagatttaagaatgtattatttgaaaagttgaccttttctattaaagcggtttccatggatgtataaagttcctaccactacggatagctattctgaagacatgagtattttaaagtcaagtttggcaattgtacaattagccaaatctttttggttgttgttaactttgtttctgagacagaatttacagcactgttatcattaaattagcaccattaaatacctgcagttaatcactcttcaagtatgtgggagagactttatctagtttgggaaattagtaaacccattctgctctgtggaagacaacatgaatcagagatttccgtaagaaatgaagcttatctggacaaggttgacagtggactgaactttaaccaaataagaatggtatatacgcagaaaatagtctgttggcttgcatctatctgctaatgagactatcgctatagtttcctagggaaaaaatattaaaacaggcatataaaaatctcaatacattttgctggagagaatgcggagaaaagggaaacctcgtacgctgtgggtggaaatgtaaattagtacaaccactatggagaacagcttggaggttcctcaaaaaaactaaaaatacagctactatatgatccagcaatcccgctgctgggtatatacgcttaacacaggaaatcaatatatcaaagaaatacctgcagtcccacatttgttgcagcactgttcacaatagccaagatttggaagcaacctaagtgtccatcagcagatgaatagataacgaaaatgtggtgcttatacacagtgatgtccattcagtcacaaaaaagaatgagatcctgtcatttgcaacaacatggatggaactggaagtcattatgttaagtgaaataagtcaggcacagaaagacaaacttcccatgtttttatttctggaagctaaaaaatcaaaacaattgaactcatggagctagagagtagaaggatggctaccagaagctgggaagggtagtggaggggaagtggagatggttaatgggtacaaaaatgtatgaagtatgggtaaaacctagtatttgacagcacaacagggcgactatagtcaataataaacttaatgatacattttgaaataactcaatgaatataattgaactgtttgtaacacgaaggatacttgaggggatggatacaccactgccatgatgtgattgttatgcattgcatgcctatatcaaaatctctcttataccccataaatatctacatctactatgtacccccaaaaattataaatgaaaaaaactcattttaaaacagggctattagcatcacaggtgatattgtatatgacacataggaatcaaaaaatgctgttaaaaccttactgatggagcaaagatgaggttaagtctaattggtgagcagcatatggtgccatgggttaaatcctacgtattaagagttacgatggcaatatcttaaccaagatgacagaa

SEQ ID NO: 683273 - DNA, 2279 bp, Homo sapiens
tataacataccacttcttcaagcagaatgaattctacctttaattgtattactacagatttggattatatcatttatcataccatagtacagttacttatttctccatgtgcctacctctcttgaaagtcaggcaacccttccaagtcacaaatcacatattgttcacattgcatgctacctaatatatagcaggcccttactatatacttattgagttacatttttaaaggtacagtaaatagaattcttcttccccactttaattctaaatatgtcacaaaaaaatctaagtctcataaactgttagaaggtaaaaagcaattatttttataatgtatataagctgcattattctttgtttacctcatggacagtgtgccccccaggacaccagtgaatgctatccctaaagccacctgctcaccatgcattgcatggacagttgtagtatgataacgacagtaccaagagaagctaggagaccaaaacagcagagttcattttagctcttggtgaaaagtaaaaacaaatcaatgccttttcctttgggaatcagtgaataaacttcttaatgtctgaaacatgtctccttgttcagttttcagaggagaaacagcatttttataagtcagtttaatttctctaagtttctgaactacctaccaatcctgtcttttactgaaaatcagcctgagagtgttgagtaagcaggatatgtaaaaattaatgtgctaaatttatttgtaaaaatatgctatactaaaaattactttacataggaagatttaagaatgtattatttgaaaagttgaccttttctattaaagcggtttccatggatgtataaagttcctaccactacggatagctattctgaagacatgagtattttaaagtcaagtttggcaattgtacaattagccaaatctttttggttgttgttaactttgtttctgagacagaatttacagcactgttatcattaaattagcaccattaaatacctgcagttaatcactcttcaagtatgtgggagagactttatctagtttgggaaattagtaaacccattctgctctgtggaagacaacatgaatcagagatttccgtaagaaatgaagcttatctggacaaggttgacagtggactgaactttaaccaaataagaatggtatatacgcagaaaatagtctgttggcttgcatctatctgctaatgagactatcgctatagtttyctagggaaaaaatattaaaacaggcatataaaaatctcaatacattttgctggagagaatgcggagaaaagggaaacctcgtacgctgtgggtggaaatgtaaattagtacaaccactatggagaacagcttggaggttcctcaaaaaaactaaaaatacagctactatatgatccagcaatcccgctgctgggtatatacgcttaacacaggaaatcaatatatcaaagaaatacctgcagtcccacatttgttgcagcactgttcacaatagccaagatttggaagcaacctaagtgtccatcagcagatgaatagataacgaaaatgtggtgcttatacacagtgatgtccattcagtcacaaaaaagaatgagatcctgtcatttgcaacaacatggatggaactggaagtcattatgttaagtgaaataagtcaggcacagaaagacaaacttcccatgtttttatttctggaagctaaaaaatcaaaacaattgaactcatggagctagagagtagaaggatggctaccagaagctgggaagggtagtggaggggaagtggagatggttaatgggtacaaaaatgtatgaagtatgggtaaaacctagtatttgacagcacaacagggcgactatagtcaataataaacttaatgatacattttgaaataactcaatgaatataattgaactgtttgtaacacgaaggatacttgaggggatggatacaccactgccatgatgtgattgttatgcattgcatgcctatatcaaaatctctcttataccccataaatatctacatctactatgtacccccaaaaattataaatgaaaaaaactcattttaaaacagggctattagcatcacaggtgatattgtatatgacacataggaatcaaaaaatgctgttaaaaccttactgatggagcaaagatgaggttaagtctaattggtgagcagcatatggtgccatgggttaaatcctacgtattaagagttacgatggcaatatcttaaccaagatgacagaa

SEQ ID NO: 683274 - DNA, 2279 bp, Homo sapiens
tataacataccacttcttcaagcagaatgaattctacctttaattgtattactacagatttggattatatcatttatcataccatagtacagttacttatttctccatgtgcctacctctcttgaaagtcaggcaacccttccaagtcacaaatcacatattgttcacattgcatgctacctaatatatagcaggcccttactatatacttattgagttacatttttaaaggtacagtaaatagaattcttcttccccactttaattctaaatatgtcacaaaaaaatctaagtctcataaactgttagaaggtaaaaagcaattatttttataatgtatataagctgcattattctttgtttacctcatggacagtgtgccccccaggacaccagtgaatgctatccctaaagccacctgctcaccatgcattgcatggacagttgtagtatgataacgacagtaccaagagaagctaggagaccaaaacagcagagttcattttagctcttggtgaaaagtaaaaacaaatcaatgccttttcctttgggaatcagtgaataaacttcttaatgtctgaaacatgtctccttgttcagttttcagaggagaaacagcatttttataagtcagtttaatttctctaagtttctgaactacctaccaatcctgtcttttactgaaaatcagcctgagagtgttgagtaagcaggatatgtaaaaattaatgtgctaaatttatttgtaaaaatatgctatactaaaaattactttacataggaagatttaagaatgtattatttgaaaagttgaccttttctattaaagcggtttccatggatgtataaagttcctaccactacggatagctattctgaagacatgagtattttaaagtcaagtttggcaattgtacaattagccaaatctttttggttgttgttaactttgtttctgagacagaatttacagcactgttatcattaaattagcaccattaaatacctgcagttaatcactcttcaagtatgtgggagagactttatctagtttgggaaattagtaaacccattctgctctgtggaagacaacatgaatcagagatttccgtaagaaatgaagcttatctggacaaggttgacagtggactgaactttaaccaaataagaatggtatatacgcagaaaatagtctgttggcttgcatctatctgctaatgagactatcgctatagtttcctagggaaaaaatattaaaacaggcatataaaaatctcaatacattttgctggagagaatgcggagaaaagggaaacctcrtacgctgtgggtggaaatgtaaattagtacaaccactatggagaacagcttggaggttcctcaaaaaaactaaaaatacagctactatatgatccagcaatcccgctgctgggtatatacgcttaacacaggaaatcaatatatcaaagaaatacctgcagtcccacatttgttgcagcactgttcacaatagccaagatttggaagcaacctaagtgtccatcagcagatgaatagataacgaaaatgtggtgcttatacacagtgatgtccattcagtcacaaaaaagaatgagatcctgtcatttgcaacaacatggatggaactggaagtcattatgttaagtgaaataagtcaggcacagaaagacaaacttcccatgtttttatttctggaagctaaaaaatcaaaacaattgaactcatggagctagagagtagaaggatggctaccagaagctgggaagggtagtggaggggaagtggagatggttaatgggtacaaaaatgtatgaagtatgggtaaaacctagtatttgacagcacaacagggcgactatagtcaataataaacttaatgatacattttgaaataactcaatgaatataattgaactgtttgtaacacgaaggatacttgaggggatggatacaccactgccatgatgtgattgttatgcattgcatgcctatatcaaaatctctcttataccccataaatatctacatctactatgtacccccaaaaattataaatgaaaaaaactcattttaaaacagggctattagcatcacaggtgatattgtatatgacacataggaatcaaaaaatgctgttaaaaccttactgatggagcaaagatgaggttaagtctaattggtgagcagcatatggtgccatgggttaaatcctacgtattaagagttacgatggcaatatcttaaccaagatgacagaa

SEQ ID NO: 683275 - DNA, 2279 bp, Homo sapiens
tataacataccacttcttcaagcagaatgaattctacctttaattgtattactacagatttggattatatcatttatcataccatagtacagttacttatttctccatgtgcctacctctcttgaaagtcaggcaacccttccaagtcacaaatcacatattgttcacattgcatgctacctaatatatagcaggcccttactatatacttattgagttacatttttaaaggtacagtaaatagaattcttcttccccactttaattctaaatatgtcacaaaaaaatctaagtctcataaactgttagaaggtaaaaagcaattatttttataatgtatataagctgcattattctttgtttacctcatggacagtgtgccccccaggacaccagtgaatgctatccctaaagccacctgctcaccatgcattgcatggacagttgtagtatgataacgacagtaccaagagaagctaggagaccaaaacagcagagttcattttagctcttggtgaaaagtaaaaacaaatcaatgccttttcctttgggaatcagtgaataaacttcttaatgtctgaaacatgtctccttgttcagttttcagaggagaaacagcatttttataagtcagtttaatttctctaagtttctgaactacctaccaatcctgtcttttactgaaaatcagcctgagagtgttgagtaagcaggatatgtaaaaattaatgtgctaaatttatttgtaaaaatatgctatactaaaaattactttacataggaagatttaagaatgtattatttgaaaagttgaccttttctattaaagcggtttccatggatgtataaagttcctaccactacggatagctattctgaagacatgagtattttaaagtcaagtttggcaattgtacaattagccaaatctttttggttgttgttaactttgtttctgagacagaatttacagcactgttatcattaaattagcaccattaaatacctgcagttaatcactcttcaagtatgtgggagagactttatctagtttgggaaattagtaaacccattctgctctgtggaagacaacatgaatcagagatttccgtaagaaatgaagcttatctggacaaggttgacagtggactgaactttaaccaaataagaatggtatatacgcagaaaatagtctgttggcttgcatctatctgctaatgagactatcgctatagtttcctagggaaaaaatattaaaacaggcatataaaaatctcaatacattttgctggagagaatgcggagaaaagggaaacctcgtacrctgtgggtggaaatgtaaattagtacaaccactatggagaacagcttggaggttcctcaaaaaaactaaaaatacagctactatatgatccagcaatcccgctgctgggtatatacgcttaacacaggaaatcaatatatcaaagaaatacctgcagtcccacatttgttgcagcactgttcacaatagccaagatttggaagcaacctaagtgtccatcagcagatgaatagataacgaaaatgtggtgcttatacacagtgatgtccattcagtcacaaaaaagaatgagatcctgtcatttgcaacaacatggatggaactggaagtcattatgttaagtgaaataagtcaggcacagaaagacaaacttcccatgtttttatttctggaagctaaaaaatcaaaacaattgaactcatggagctagagagtagaaggatggctaccagaagctgggaagggtagtggaggggaagtggagatggttaatgggtacaaaaatgtatgaagtatgggtaaaacctagtatttgacagcacaacagggcgactatagtcaataataaacttaatgatacattttgaaataactcaatgaatataattgaactgtttgtaacacgaaggatacttgaggggatggatacaccactgccatgatgtgattgttatgcattgcatgcctatatcaaaatctctcttataccccataaatatctacatctactatgtacccccaaaaattataaatgaaaaaaactcattttaaaacagggctattagcatcacaggtgatattgtatatgacacataggaatcaaaaaatgctgttaaaaccttactgatggagcaaagatgaggttaagtctaattggtgagcagcatatggtgccatgggttaaatcctacgtattaagagttacgatggcaatatcttaaccaagatgacagaa

SEQ ID NO: 683276 - DNA, 2829 bp, Homo sapiens
tcaagagtaagacagaggtgggccgggcgcggtggctcaagcctgtaatcccagcactttgggaagcagaggtgggcggatcacgaggtcaggagatcgagaccatcctggctaagacggtgaaaccccctctctactaaaattacaagaaattagccaggcgtgatggtgggcgcctgtagtcccagctacgtggaaggctgaggcagaagaatggcgtgaacccggggggcggagcttgcagtgagccgagatagcgccactgcactccagcctgggcaacacagcgagactccgtctcaacaacaacaamaaaaaaaagagtaaggcagaggccaagaggatagaagaaaaagtggcatcgttaaatatgcacaagatcgcatcagcagtccttggttatagtaagagaaactgaagtcaagtgatgaatcctagatcactgcagatggagacaagaatggtgctccgtgggttgtgatccccctgccagctggagacagacaggatgtgggggccagctggagcaaggagacaagttccagtgactgcaggggcggggtggggatttgtgcacactttgtggtagacatatgtgaacctattagacaatttgtagttattagaatttgaaaaaaatataagatatcataaaataacaaattttagattcagcagaaactggatggctgagacccagaataggctgcctaggcaatgccagcagcaatgcctgtgcatgagtgtcaaacaggacggatgtgctcacgggactccgttccagtctgtgacacctctaactcagaaacttgaagccgtgcatctagtataattcatgtaattgcattttattgaaatcttcaaacatatatttatatgcatttgaaaactttatatatatgtttatatataaaactatatatatattttttaaaaaaactgatttctcaatatttaagaggattccccagctccagtgaagaaaattcatattagtggtgaagatgactactagttaattagtgattaaataatgtattgcattctctcaccaaacttaacagtataaacctaaaaaataaagccagaaataaaattaataaatacaaaataaactattcattacccttgccatgcttttgtttcctgcaatatctttgtttcattcaaagaatattgattctccatccccatctcttcccaaatatcccaatgaatgcaatgtgcaacgttcaacatttacaaagcaagattgtctgtgcccatggtcacaggttaggtttacttaatgttgagtttattgatttttataaatcaaagaagtctgaagagtatattgaagatattcatttcaagtagtgttgttttgtcgttgccaatatttcaaattgttcctatgaaacactcaatagtgaggtcaataataacatctttttcattctcctactaaagcatagtcataaaaaaccatccatggcctgatattttctccccatgccctttcagacagaatcacttcatgtgttaccagcctcgctctccactggatgaactgcagaaagcctgaaaaaggacagccagccacttcgagcagatcttggaagaatcagtctccttttaaacaaagctctaatttaatatttttatggtaaataaaaaagaaagtggaagatgcctacatttttgctaaagcataatataaaaagaacagaaaagaaccacaccctgcaaacccatgcttcagacaaccagatgctagagaggtggatgcttcagacaaccagatgctagaaaggtgtattgtagatgacttactttctgcagtttgaaaacttatacattgcatctgaggactaagtaatgttttgtattggataaaacaaatttcatttcaataaaattttcaatttcttttttaattttttcactgacctacttgtcattcaggagcttgttgcttaatttttgtgtatttttacattaatagtttccaaaatagctcttgttattaatttctagtttaaataaaacaaattttaaaacttcaaaaaataaaaatatttttagaacctgtttttatcactttgcttcaccctgaacccttattttctcagaggcttctcctctgctattctccatctctgtccctctcccctccctgactccccaaagaaccaaagtagaaaattatctccttagaaaatgcatatctatccttagtatcagctcaaccttgatctttagagtgaaaatgctataggttaaatttaaataaaacacatgctattataggttaaatttatatgttgagatcttaatcccaaaaactccaaatgtgaccttaattgaagacagggttgttgaagatgtaattaattaaggtgaaggacttagggtgggccctaatccaatgtgactggtgtctttattaataggggaaacatggacacacatacacacacacacacacacacacacacacacacagagagagagagagagagagagaaagagaacgcagtgaacatgaagtcagacaccagggtgatgtttctacaagccaagggatgccaaaagttgtcagcaaactcccagaataccccacgtggctgtggagattttgaggtcaaaggttgtcttcccaaattttagcccccgataacttgtgttataccacacaaagagtaggctctcaacaattgtgaagaatgagccttcttgcttttaaattttatgccttcttgtatgtctgttgcatctcactgtatgtatttactggtattatgtgtttgtgcacaaatattatattctcttcagattctaatttcc

SEQ ID NO: 683277 - DNA, 2829 bp, Homo sapiens
tcaagagtaagacagaggtgggccgggcgcggtggctcaagcctgtaatcccagcactttgggaagcagaggtgggcggatcacgaggtcaggagatcgagaccatcctggctaagacggtgaaaccccctctctactaaaattacaagaaattagccaggcgtgatggtgggcgcctgtagtcccagctacgtggaaggctgaggcagaagaatggcgtgaacccggggggcggagcttgcagtgagccgagatagcgccactgcactccagcctgggcaacacagcgagactccgtctcaacaacaacaaaaaaaaaaagagtaaggcagaggccaagaggatagaagaaaaagtggcatcgttamatatgcacaagatcgcatcagcagtccttggttatagtaagagaaactgaagtcaagtgatgaatcctagatcactgcagatggagacaagaatggtgctccgtgggttgtgatccccctgccagctggagacagacaggatgtgggggccagctggagcaaggagacaagttccagtgactgcaggggcggggtggggatttgtgcacactttgtggtagacatatgtgaacctattagacaatttgtagttattagaatttgaaaaaaatataagatatcataaaataacaaattttagattcagcagaaactggatggctgagacccagaataggctgcctaggcaatgccagcagcaatgcctgtgcatgagtgtcaaacaggacggatgtgctcacgggactccgttccagtctgtgacacctctaactcagaaacttgaagccgtgcatctagtataattcatgtaattgcattttattgaaatcttcaaacatatatttatatgcatttgaaaactttatatatatgtttatatataaaactatatatatattttttaaaaaaactgatttctcaatatttaagaggattccccagctccagtgaagaaaattcatattagtggtgaagatgactactagttaattagtgattaaataatgtattgcattctctcaccaaacttaacagtataaacctaaaaaataaagccagaaataaaattaataaatacaaaataaactattcattacccttgccatgcttttgtttcctgcaatatctttgtttcattcaaagaatattgattctccatccccatctcttcccaaatatcccaatgaatgcaatgtgcaacgttcaacatttacaaagcaagattgtctgtgcccatggtcacaggttaggtttacttaatgttgagtttattgatttttataaatcaaagaagtctgaagagtatattgaagatattcatttcaagtagtgttgttttgtcgttgccaatatttcaaattgttcctatgaaacactcaatagtgaggtcaataataacatctttttcattctcctactaaagcatagtcataaaaaaccatccatggcctgatattttctccccatgccctttcagacagaatcacttcatgtgttaccagcctcgctctccactggatgaactgcagaaagcctgaaaaaggacagccagccacttcgagcagatcttggaagaatcagtctccttttaaacaaagctctaatttaatatttttatggtaaataaaaaagaaagtggaagatgcctacatttttgctaaagcataatataaaaagaacagaaaagaaccacaccctgcaaacccatgcttcagacaaccagatgctagagaggtggatgcttcagacaaccagatgctagaaaggtgtattgtagatgacttactttctgcagtttgaaaacttatacattgcatctgaggactaagtaatgttttgtattggataaaacaaatttcatttcaataaaattttcaatttcttttttaattttttcactgacctacttgtcattcaggagcttgttgcttaatttttgtgtatttttacattaatagtttccaaaatagctcttgttattaatttctagtttaaataaaacaaattttaaaacttcaaaaaataaaaatatttttagaacctgtttttatcactttgcttcaccctgaacccttattttctcagaggcttctcctctgctattctccatctctgtccctctcccctccctgactccccaaagaaccaaagtagaaaattatctccttagaaaatgcatatctatccttagtatcagctcaaccttgatctttagagtgaaaatgctataggttaaatttaaataaaacacatgctattataggttaaatttatatgttgagatcttaatcccaaaaactccaaatgtgaccttaattgaagacagggttgttgaagatgtaattaattaaggtgaaggacttagggtgggccctaatccaatgtgactggtgtctttattaataggggaaacatggacacacatacacacacacacacacacacacacacacacacagagagagagagagagagagagaaagagaacgcagtgaacatgaagtcagacaccagggtgatgtttctacaagccaagggatgccaaaagttgtcagcaaactcccagaataccccacgtggctgtggagattttgaggtcaaaggttgtcttcccaaattttagcccccgataacttgtgttataccacacaaagagtaggctctcaacaattgtgaagaatgagccttcttgcttttaaattttatgccttcttgtatgtctgttgcatctcactgtatgtatttactggtattatgtgtttgtgcacaaatattatattctcttcagattctaatttcc

SEQ ID NO: 683278 - DNA, 618 bp, Homo sapiens
ctctctctctctctcatctaaaaagcctttagtgtctcttcattactttatgttgttcttaaattatgagatataagctgttgtttattgtttgattttggttaatcacagcagagtgtttcagaaatttggtacatctcacaattgattgattgagagataaatgtcattcaaacttaatattatctcttctaaagacctgttatgtggaaattacatctttatatattgtttttttaatatgttatcttatttaaagatcttgatgtcacttgcatgcaattgtgtgtacttcacacacacacacacacatatttgtttcacacaccatgctgaaaaatattaagttattagtttcatgggtttaccatgattatctacgtatgaagtacatraagtgacaaggtctgtgtatacatgtgagtgtacattaaaaaagcaactagcagctgggcatggtggctcaggcctataatcccagcactttgggaggccgagatgggcagatcacaaatctgccaaatcacattttggagtaaccaaaaatcactcttcatttttgtcagagacaatattcaaactgcagtgagagatgtactcaaacagaacatagtaatc

SEQ ID NO: 683279 - DNA, 618 bp, Homo sapiens
ctctctctctctctcatctaaaaagcctttagtgtctcttcattactttatgttgttcttaaattatgagatataagctgttgtttattgtttgattttggttaatcacagcagagtgtttcagaaatttggtacatctcacaattgattgattgagagataaatgtcattcaaacttaatattatctcttctaaagacctgttatgtggaaattacatctttatatattgtttttttaatatgttatcttatttaaagatcttgatgtcacttgcatgcaattgtgtgtacttcacacacacacacacacatatttgtttcacacaccatgctgaaaaatattaagttattagtttcatgggtttaccatgattatctacgtatgaagtacatgaagtgacaaggtctgtgtatacatgtgagtgtacattaaaaaagcaactagcagctgggcayggtggctcaggcctataatcccagcactttgggaggccgagatgggcagatcacaaatctgccaaatcacattttggagtaaccaaaaatcactcttcatttttgtcagagacaatattcaaactgcagtgagagatgtactcaaacagaacatagtaatc

SEQ ID NO: 683280 - DNA, 629 bp, Homo sapiens
ttttataatgtttcctgcatttagaaatgcaattactcctgtatctggatcttatatctgacatgaggaaacatgataaaatttcttattaattttacaaaaaactgtatatttgggaaaattcctatatgaattatcacatctaatttaaccaatttttttctttcttttcagtaggcagaaatgttttatctttctcttgtgtaattgcactattttggacttccagtacaatgttggatagaagagattgtgagacttcttattgattttaaaggcaatggtttcaacatttttacaggttttttaaatatgatttctattaagttttatatttaacatatttcaattaactttattagtaattagagaaatgcaattgaaattctcaattaaaatatatcaggatttggtttggtttactgctaaagggcatattttatttaaatgcatgagttaattttttttcactgcaatgagaatttggccattggcrtgagttagtggctcaaggatatcaggtcaagtttttggtgattcccatcgtcttttcatcacgataccaagtggactcctggaactccaacaatcacttctacatttcaagcagcagcattcagaaaattcaa

SEQ ID NO: 683281 - DNA, 1264 bp, Homo sapiens
caaggactttctggaaacaccttttaagtaaactacctgcactcacctacttctctcrgagtcagcttttagggaacccaaactaatcaggaatggcctgtctgtggattatccctaaagccagttcagtctctgcctttttcccccctaaggttgagtaattgaattaaatcctgtcattctcaaacaaagaatcatgaaacagagaaggtgggtaagtcactcaaccctgggattttgagagaagtggtcactgggggatgtagggtggtggtctctcaaccttatctgagctcacacctcccaacccatggaaataattgaggcccagatgccatgaactgggcatatccctgtagagggtaagtaactgtctgtcctcccacccaaagaagcctgcattgagcagagtttggcttcagccacagaggcagcagtgagaggaggaggctgagctccactcatacaaggccacagtgacgcatggtcttagggggtaagcaggggctctcaccagacctcagggatggggtggttttccctactcagccagctggaggaagcgaatctgagtgccttcccatggcaaggccaagggagtgagaaagccaaggaacatgctcagagagatggccagcagcatcccgcaggggtggggtggagtggtgccctcagggagggctggcagcctgtatcctaactgatgcatcatccctaagaagaatcatgagtttcacttcagtgatgtctagctgtaaagcactttcactcccataatttaactgtatcttcttaacctcaaattctagaccacaaattttctgcacatttcacagaggaggaagttcaggctctggaaggtgaggtggctgccagctccacagggccagggtgcatccctaaaaacagataacttccccagtctcaagagcatggtcatgtctttcaaataaatgcacatacctaactttaagtttggttcttccattctgctgcgtgcgtgcctacagatccaaagtggtggccaagtgcactggattttatcatttatttgagtgaacttgactgcttacttagctgcttaaaagtttagttgagagtgattcagcggcatacacctaaaggcaccaattcatcatttgttcattcagacaatcaataaataaacctcgggaatttacatggattaagagctcaaagtcttcttgaagtggtatttttcagcacttatttcactttgggttgctaggagataaattggttt

SEQ ID NO: 683282 - DNA, 2790 bp, Homo sapiens
ttggtaacaatatctagaagtatttccaattcttatttgtattacagggctatttatgttattaaatatatttttaaaatattatgtgtaattattttgttcagatttgtggatattgggatattaattgtacccaagtaaaatctctgatgcctttcttcaggatcatacatctaaactgtatcagagagaaagcacagactctcaaagtttctaatataccctttatactttgttggtttatttacctaagagatattttttccagttttataatttcctggataattcagtgaggcattttgactggggagaattaaatgtctgtacttaaataactatgttaccaaaaaacaaaattcatatagtgcatatgtatacataaaagaaagtaacaagttagtaattgtgaatttttgctgtagattaatggttggtatctgtgtagatatggttcaaaatatagcttacatataaataactgaaaagcttctagtcttgtcaacacctgtacattaacaggaatatcagtttacagagttcatacctacttagtttcagaaagattaacccttaagcagaatagtgagcaaacttactccatggatatcaacattctacagcaatgggaataaaataaatcatcactccaagttatgtgtggcctgtattcttatatttttcctgggcacgggagttacatatcatgttttcatttctgaaagagattcacaacaaaattattataccacactctagcataaaaaacaggggattctaacttgtaagaatttgtgtcatcctaggatgcattaaatattacggagcttaagcagcatctcaaaagtttactatttttctctgaaaaaaattataaatggtaatactaaaactaatggttgcaattgcaataatgactctcacttttgtagtgatgatgtttaccagactctgtactaagccctttacatgtattaattcatttgacctttacattctattattacttccattttacagatatggtaactgaagtacaaatcgattaattgtcttacccaaggccacatatatgacatgtggtaaaatcagtcttcaaagactgttagaatgcctctagaattcaagctctagaaatggaagcatatttgtttttgatgggttaaatttaaaaaaaaaactgtacaaaaaagcaaaaataaatacctattatttcagctccagaaatgataatatagaacaaaagcttatttatgttcctaccatataatatgtaaaaaggaattcaactcgttcccttgcctgagtaacctacattctcatagtccagcagctttgaacatagttaagtccattattaaggtgattcagatgtaggaaaaaatyacacattgtagaatttttaacctttaaaaaacatgtttaagtagactagaaacactgatgaatctcagatgatattcaactaacactgctatatgaaacaacaagaatatctgagttctggtactgatttgtaatattttaaaccgtgtaacctataccgataaggaactcattttcttcatttacaaaacagtggggttgaacaagatgatctctaatgcccttataaccaaacgtgaatttatcacagctttgtgaaatgacaaatccttaaaaataggtgtgctagtggtcaagacgctgaagccattagagaattattggcagaataaagacagagttgtggccttaccagggtggcataaggcctgagtccactcaaagttccaagttattaatttaccaagaaaagcaacctcattaatgtaacaccatctgttcagtgctgctttgtttctggtttgtgctttgtggtcttcacatagagcttcttgttctgacttgtccctttacctttggatttgaactttacccctttcgatcccttgtgaaatgactctgaccagaagcgatcccaactcctgcatcattatttggcctgaaggaatcacttagctttacacacaggcacagcttccttgctactggatcaataacctaatttcaatatcttctctctggtattccgggattagaaatactactgcttgtttgggcggatttatttggctttcttctaatacaactatttatattttcatgtacagccatttcaatgactgtctttccatcatgcttgtttaatgtgattgcattgtaattataacagttggaataaaatgagttgaacaaaaaagactagtataatctgaagagacttatatccataaattctttgtcaaaaatattaaagaaagtaaactcccctactattttttttcatttaggtaatccccacatatgttcccttctctcggaccctttcatgggatctctgatatcaagactgtttttataatgatatcaaaaaatgaattgccttcttaaatatgtttccatttgcactgatgatgcaaaataatagtaggtaaaactgttggagcttcagcaacatccaggttgaagcagggcattaagctgttgtagtaatcatttattcttcatgtccacacacagaaaaaaagaaaaaagtcaatttcactcaagaatatcgatggtgatattcatcagtaagatattagtgttttattaagtctcaacacttaagcacacatctttttaatattcagtgtgataaaatgggaagcaggtataaagcattcctgctgcatctgatgttcaagtatgatgattgtctccagaaaaacactcagataacactaagttgcaaactgaaactgccac

SEQ ID NO: 683283 - DNA, 2790 bp, Homo sapiens
ttggtaacaatatctagaagtatttccaattcttatttgtattacagggctatttatgttattaaatatatttttaaaatattatgtgtaattattttgttcagatttgtggatattgggatattaattgtacccaagtaaaatctctgatgcctttcttcaggatcatacatctaaactgtatcagagagaaagcacagactctcaaagtttctaatataccctttatactttgttggtttatttacctaagagatattttttccagttttataatttcctggataattcagtgaggcattttgactggggagaattaaatgtctgtacttaaataactatgttaccaaaaaacaaaattcatatagtgcatatgtatacataaaagaaagtaacaagttagtaattgtgaatttttgctgtagattaatggttggtatctgtgtagatatggttcaaaatatagcttacatataaataactgaaaagcttctagtcttgtcaacacctgtacattaacaggaatatcagtttacagagttcatacctacttagtttcagaaagattaacccttaagcagaatagtgagcaaacttactccatggatatcaacattctacagcaatgggaataaaataaatcatcactccaagttatgtgtggcctgtattcttatatttttcctgggcacgggagttacatatcatgttttcatttctgaaagagattcacaacaaaattattataccacactctagcataaaaaacaggggattctaacttgtaagaatttgtgtcatcctaggatgcattaaatattacggagcttaagcagcatctcaaaagtttactatttttctctgaaaaaaattataaatggtaatactaaaactaatggttgcaattgcaataatgactctcacttttgtagtgatgatgtttaccagactctgtactaagccctttacatgtattaattcatttgacctttacattctattattacttccattttacagatatggtaactgaagtacaaatcgattaattgtcttacccaaggccacatatatgacatgtggtaaaatcagtcttcaaagactgttagaatgcctctagaattcaagctctagaaatggaagcatatttgtttttgatgggttaaatttaaaaaaaaaactgtacaaaaaagcaaaaataaatacctattatttcagctccagaaatgataatatagaacaaaagcttatttatgttcctaccatataatatgtaaaaaggaattcaactcgttcccttgcctgagtaacctacattctcatagtccagcagctttgaacatagttaagtccattattaaggtgattcagatgtaggaaaaaatcacacattgtagaatttttaacctttaaaaaacatgtttaagtagactagaaacactgatgaatctcagatgatattcarctaacactgctatatgaaacaacaagaatatctgagttctggtactgatttgtaatattttaaaccgtgtaacctataccgataaggaactcattttcttcatttacaaaacagtggggttgaacaagatgatctctaatgcccttataaccaaacgtgaatttatcacagctttgtgaaatgacaaatccttaaaaataggtgtgctagtggtcaagacgctgaagccattagagaattattggcagaataaagacagagttgtggccttaccagggtggcataaggcctgagtccactcaaagttccaagttattaatttaccaagaaaagcaacctcattaatgtaacaccatctgttcagtgctgctttgtttctggtttgtgctttgtggtcttcacatagagcttcttgttctgacttgtccctttacctttggatttgaactttacccctttcgatcccttgtgaaatgactctgaccagaagcgatcccaactcctgcatcattatttggcctgaaggaatcacttagctttacacacaggcacagcttccttgctactggatcaataacctaatttcaatatcttctctctggtattccgggattagaaatactactgcttgtttgggcggatttatttggctttcttctaatacaactatttatattttcatgtacagccatttcaatgactgtctttccatcatgcttgtttaatgtgattgcattgtaattataacagttggaataaaatgagttgaacaaaaaagactagtataatctgaagagacttatatccataaattctttgtcaaaaatattaaagaaagtaaactcccctactattttttttcatttaggtaatccccacatatgttcccttctctcggaccctttcatgggatctctgatatcaagactgtttttataatgatatcaaaaaatgaattgccttcttaaatatgtttccatttgcactgatgatgcaaaataatagtaggtaaaactgttggagcttcagcaacatccaggttgaagcagggcattaagctgttgtagtaatcatttattcttcatgtccacacacagaaaaaaagaaaaaagtcaatttcactcaagaatatcgatggtgatattcatcagtaagatattagtgttttattaagtctcaacacttaagcacacatctttttaatattcagtgtgataaaatgggaagcaggtataaagcattcctgctgcatctgatgttcaagtatgatgattgtctccagaaaaacactcagataacactaagttgcaaactgaaactgccac

SEQ ID NO: 683284 - DNA, 2790 bp, Homo sapiens
ttggtaacaatatctagaagtatttccaattcttatttgtattacagggctatttatgttattaaatatatttttaaaatattatgtgtaattattttgttcagatttgtggatattgggatattaattgtacccaagtaaaatctctgatgcctttcttcaggatcatacatctaaactgtatcagagagaaagcacagactctcaaagtttctaatataccctttatactttgttggtttatttacctaagagatattttttccagttttataatttcctggataattcagtgaggcattttgactggggagaattaaatgtctgtacttaaataactatgttaccaaaaaacaaaattcatatagtgcatatgtatacataaaagaaagtaacaagttagtaattgtgaatttttgctgtagattaatggttggtatctgtgtagatatggttcaaaatatagcttacatataaataactgaaaagcttctagtcttgtcaacacctgtacattaacaggaatatcagtttacagagttcatacctacttagtttcagaaagattaacccttaagcagaatagtgagcaaacttactccatggatatcaacattctacagcaatgggaataaaataaatcatcactccaagttatgtgtggcctgtattcttatatttttcctgggcacgggagttacatatcatgttttcatttctgaaagagattcacaacaaaattattataccacactctagcataaaaaacaggggattctaacttgtaagaatttgtgtcatcctaggatgcattaaatattacggagcttaagcagcatctcaaaagtttactatttttctctgaaaaaaattataaatggtaatactaaaactaatggttgcaattgcaataatgactctcacttttgtagtgatgatgtttaccagactctgtactaagccctttacatgtattaattcatttgacctttacattctattattacttccattttacagatatggtaactgaagtacaaatcgattaattgtcttacccaaggccacatatatgacatgtggtaaaatcagtcttcaaagactgttagaatgcctctagaattcaagctctagaaatggaagcatatttgtttttgatgggttaaatttaaaaaaaaaactgtacaaaaaagcaaaaataaatacctattatttcagctccagaaatgataatatagaacaaaagcttatttatgttcctaccatataatatgtaaaaaggaattcaactcgttcccttgcctgagtaacctacattctcatagtccagcagctttgaacatagttaagtccattattaaggtgattcagatgtaggaaaaaatcacacattgtagaatttttaacctttaaaaaacatgtttaagtagactagaaacactgatgaatctcagatgatattcaactaacactgctatatgaaacaacaagaatatctgagttctggtactgatttgtaatattttaaaccgtgtaacctataccgataaggaactcattttcttcatttacaaaacagtggggttgaacaagatgatctctaatgcccttataaccaaacgtgaatttatcacagctttgtgaaatgacaaatccttaaaaataggtgtgctagtggtcaagacgctgaagccattagagaattattggcagaataaagacagagttgtggccttaccagggtggcataaggcctgagtccactcaaagttccaagttattaatttaccaagaaaagcaacctcattaatgtaacaccatctgttcagtgctgctttgtttctggtttgtgctttgtggtcttcacatagagcttcttgttctgacttgtccctttacctttggatttgaactttacccctttcgatcccttgtgaaatgactctgaccagaagcgatcccaactcctgcatcattatttggcctgaaggaatcacttagctttacacacaggcacagcttccttgctactggatcaataacctaatttcaatatcttctctctggtattccgggattagaaatactactgcttgtttgggcggatttatttggctttcttctaatacaactatttatattttcatgtacagccatttcaatgactgtctttccatcatgcttgtttaatgtgattgcattgtaattataacagttggaataaaatkagttgaacaaaaaagactagtataatctgaagagacttatatccataaattctttgtcaaaaatattaaagaaagtaaactcccctactattttttttcatttaggtaatccccacatatgttcccttctctcggaccctttcatgggatctctgatatcaagactgtttttataatgatatcaaaaaatgaattgccttcttaaatatgtttccatttgcactgatgatgcaaaataatagtaggtaaaactgttggagcttcagcaacatccaggttgaagcagggcattaagctgttgtagtaatcatttattcttcatgtccacacacagaaaaaaagaaaaaagtcaatttcactcaagaatatcgatggtgatattcatcagtaagatattagtgttttattaagtctcaacacttaagcacacatctttttaatattcagtgtgataaaatgggaagcaggtataaagcattcctgctgcatctgatgttcaagtatgatgattgtctccagaaaaacactcagataacactaagttgcaaactgaaactgccac

SEQ ID NO: 683285 - DNA, 1488 bp, Homo sapiens
tttttcctctttttaaaattatattttaagttttgggatacatgtgcagaatgtgcaggtttgttacatrggtatacacgtgccatggtggtttgctgcacccatcaacccttcatctacattaggtatttctcctaatgccatccctccccttgccccccacccgccgacaggccccagtgtgtgatgttcccctccctgtgcccgtatgttcccattgttcaactcccatttatgagtgagaacatgcagtgtctacaaaatatgttttaaaaaattagttgggcattgtagcatacaccttatagtcctagctacttggaggctgaggcaggaggattgcttgagcccagtagttttaggttgcagtgagctataatcatgccagtacacttcagcctggatgacagagggagaccctgtctccaaaaaaaaaaaaaaagaagaagctagtccaagattttcagcatgttgaaccagcatcatccagggggattttttctagaaaaatacctgtgaactcccttttcccttttgaaagcctaggtccaagctcagcatatattgttattgctaaccccacaacctatttgatgagacctcccttcctgttgaatttttgctagagctttatctggaaggtagatgtaatcttaagtctatttctatctttgaataacacatatcttttcctcttttctaatgccaacccccaggaaggtgaagccaagtagtgcagggtttcagaagaggccgagcagtggtttttggtgaaggaggagacttccatgtcattgggagtattaggccaaccatggcagagaggcagggtgagatgttagtagtgggctggaggtggatggcccaacaagggtcatgaaggccagttctggagagactgacctggctgtaggactggctttgcaagcagtcaaatcatgctataagttcttgtctggcctgagatgctgagatggcacttaaagaggttcaatccccaagaacaagttacagtggcaggatcctcctttcctgcttatgcaaaacacaggactgcagctagaaatcaggggctaaggttcagccagccacccctttcatttggaacaaaatatcaaagtgccaatcctggaactttgccctggagggcaaactgggaattggagctgggactaggcaagagttgtctttccagaagcacagaggacattaggggtgctcaggcactcactaagggaacattcagttaagggctaaaggctaaacatggactccaatcactggtagagatagggccccaaatattaacaatatttgtttctcaatggtcagggacagagtagatcagcctgaggcttaccagtctttagaatatttataatcaatatttaacttttaagattttgaaatcctaaatgtccacaagcacataaataatcaaggaaaatacatttaaattgggatgcaatctctgtttagacccatcaa

SEQ ID NO: 683286 - DNA, 1488 bp, Homo sapiens
tttttcctctttttaaaattatattttaagttttgggatacatgtgcagaatgtgcaggtttgttacataggtatacacgtgccatggtggtttgctgcacccatcaacccttcatctacattaggtatttctcctaatgccatccctccccttgccccccacccgccgacaggccccagtgtgtgatgttcccctccctgtgcccgtatgttcccattgttcaactcccatttatgagtgagaacatgcagtgtctacaaaatawgttttaaaaaattagttgggcattgtagcatacaccttatagtcctagctacttggaggctgaggcaggaggattgcttgagcccagtagttttaggttgcagtgagctataatcatgccagtacacttcagcctggatgacagagggagaccctgtctccaaaaaaaaaaaaaaagaagaagctagtccaagattttcagcatgttgaaccagcatcatccagggggattttttctagaaaaatacctgtgaactcccttttcccttttgaaagcctaggtccaagctcagcatatattgttattgctaaccccacaacctatttgatgagacctcccttcctgttgaatttttgctagagctttatctggaaggtagatgtaatcttaagtctatttctatctttgaataacacatatcttttcctcttttctaatgccaacccccaggaaggtgaagccaagtagtgcagggtttcagaagaggccgagcagtggtttttggtgaaggaggagacttccatgtcattgggagtattaggccaaccatggcagagaggcagggtgagatgttagtagtgggctggaggtggatggcccaacaagggtcatgaaggccagttctggagagactgacctggctgtaggactggctttgcaagcagtcaaatcatgctataagttcttgtctggcctgagatgctgagatggcacttaaagaggttcaatccccaagaacaagttacagtggcaggatcctcctttcctgcttatgcaaaacacaggactgcagctagaaatcaggggctaaggttcagccagccacccctttcatttggaacaaaatatcaaagtgccaatcctggaactttgccctggagggcaaactgggaattggagctgggactaggcaagagttgtctttccagaagcacagaggacattaggggtgctcaggcactcactaagggaacattcagttaagggctaaaggctaaacatggactccaatcactggtagagatagggccccaaatattaacaatatttgtttctcaatggtcagggacagagtagatcagcctgaggcttaccagtctttagaatatttataatcaatatttaacttttaagattttgaaatcctaaatgtccacaagcacataaataatcaaggaaaatacatttaaattgggatgcaatctctgtttagacccatcaa

SEQ ID NO: 683287 - DNA, 1488 bp, Homo sapiens
tttttcctctttttaaaattatattttaagttttgggatacatgtgcagaatgtgcaggtttgttacataggtatacacgtgccatggtggtttgctgcacccatcaacccttcatctacattaggtatttctcctaatgccatccctccccttgccccccacccgccgacaggccccagtgtgtgatgttcccctccctgtgcccgtatgttcccattgttcaactcccatttatgagtgagaacatgcagtgtctacaaaatatgttttaaaaaattagttgggcattgtagcatacrccttatagtcctagctacttggaggctgaggcaggaggattgcttgagcccagtagttttaggttgcagtgagctataatcatgccagtacacttcagcctggatgacagagggagaccctgtctccaaaaaaaaaaaaaaagaagaagctagtccaagattttcagcatgttgaaccagcatcatccagggggattttttctagaaaaatacctgtgaactcccttttcccttttgaaagcctaggtccaagctcagcatatattgttattgctaaccccacaacctatttgatgagacctcccttcctgttgaatttttgctagagctttatctggaaggtagatgtaatcttaagtctatttctatctttgaataacacatatcttttcctcttttctaatgccaacccccaggaaggtgaagccaagtagtgcagggtttcagaagaggccgagcagtggtttttggtgaaggaggagacttccatgtcattgggagtattaggccaaccatggcagagaggcagggtgagatgttagtagtgggctggaggtggatggcccaacaagggtcatgaaggccagttctggagagactgacctggctgtaggactggctttgcaagcagtcaaatcatgctataagttcttgtctggcctgagatgctgagatggcacttaaagaggttcaatccccaagaacaagttacagtggcaggatcctcctttcctgcttatgcaaaacacaggactgcagctagaaatcaggggctaaggttcagccagccacccctttcatttggaacaaaatatcaaagtgccaatcctggaactttgccctggagggcaaactgggaattggagctgggactaggcaagagttgtctttccagaagcacagaggacattaggggtgctcaggcactcactaagggaacattcagttaagggctaaaggctaaacatggactccaatcactggtagagatagggccccaaatattaacaatatttgtttctcaatggtcagggacagagtagatcagcctgaggcttaccagtctttagaatatttataatcaatatttaacttttaagattttgaaatcctaaatgtccacaagcacataaataatcaaggaaaatacatttaaattgggatgcaatctctgtttagacccatcaa

SEQ ID NO: 683288 - DNA, 1488 bp, Homo sapiens
tttttcctctttttaaaattatattttaagttttgggatacatgtgcagaatgtgcaggtttgttacataggtatacacgtgccatggtggtttgctgcacccatcaacccttcatctacattaggtatttctcctaatgccatccctccccttgccccccacccgccgacaggccccagtgtgtgatgttcccctccctgtgcccgtatgttcccattgttcaactcccatttatgagtgagaacatgcagtgtctacaaaatatgttttaaaaaattagttgggcattgtagcatacaccttatagtcctagctacttggaggctgaggcaggaggattgcttgagcccagtagttttaggttgcagtgagctataatcatgccagtacacttcagcctggatgacagagggagaccctgtctccaaaaaaaaaaaaaaagaagaagctagtccaagattttcagcatgttgaaccagcatcatccagggggattttttctagaaaaatacctgtgaactcccttttcccttttgaaagcctaggtccaagctcagcatatattgttattgctaaccccacaacctatttgatgagacctcccttcctgttgaatttttgctagagctttatctggaaggtagatgtaatcttaagtctatttctatctttgaataacacatatcttttcctcttttctaatgccaacccccaggaaggtgaagccaagtagtgcagggtttcagaagaggccgagcagtggtttttggtgaaggaggagacttccatgtcattgggagtattaggccaaccatggcagagaggcagggtgagatgttagtagtgggctggaggtggatggcccaacaagggtcatgaaggccagttctggagagactgacctggctgtaggactggctttgcaagcagtcaaatcatgctataagttcttgtctggcctgagatgctgagatggcacttaaagaggttcaatccccaagaacaagttacagtggcaggatcctcctttcctgcttatgcaaaacacaggactgcagctagaaatcaggggctaaggttcagccagccacccctttcatttggaacaaaatatcaaagtgccaatcctggaactttgccctggagggcaaactgggaattggagctgggactaggcaagagttgtcttyccagaagcacagaggacattaggggtgctcaggcactcactaagggaacattcagttaagggctaaaggctaaacatggactccaatcactggtagagatagggccccaaatattaacaatatttgtttctcaatggtcagggacagagtagatcagcctgaggcttaccagtctttagaatatttataatcaatatttaacttttaagattttgaaatcctaaatgtccacaagcacataaataatcaaggaaaatacatttaaattgggatgcaatctctgtttagacccatcaa

SEQ ID NO: 683289 - DNA, 557 bp, Homo sapiens
ctcttcttcttcttcttcttcttcttcttcttttttcttctccttcttcttcttctctctctctctctctccccccctctctctcttttataccctcactctcttctsttctttctcattccaggttcccagcgaaagactgtgattggcccagctttggtcaggtgcccacccctagttcactcagctgggacccaggggcaggagactacttcacaaacacagtgtccaggtagtatataaagccaggcaaactctctaaaagagatcaactacaaactataacattaaggggttcagactcagctggccaggcatgatgacatgtgaaatgagtggtagggtcaagcattttttaaaagccctgagcagggaaggtcagtcagggaagacttcctggaagaggtgagccttgagagactgtcagactttggatggagcagctgggaagtgtttcaggagaaagaaacagcatgaacaaaggccagggggcagaacaaatgaagctaaattggttatctcatttctcttctgatattcccccatgtcacctcatg

SEQ ID NO: 683290 - DNA, 557 bp, Homo sapiens
ctcttcttcttcttcttcttcttcttcttcttttttcttctccttcttcttcttctctctctctctctctccccccctctctctcttttataccctcactctcttctcttctttctcattccaggttcccagcgaaagactgtgattggcccagctttggtcaggtgcccacccctagttcactcagctgggacccaggggcaggagactacttcacaaacacagtgtccaggtagtatataaagccaggcaaactctctaaaagagatcaactacaaactataacattaaggggttcagactcagctggccaggcatgatgacatgtgaaatgagtggtagggtcaagcattttttaaaagccctgagcagggaaggtcagtcagggaagacttcctggaagaggtgagccttgagagactgtcagactttggatggagcagctgggaagtgtttcaggagaaagaaacagcatgaacaaaggccagggggcagaacaaatgaagctaaattggttatctcatttctcttctgawattcccccatgtcacctcatg

SEQ ID NO: 683291 - DNA, 1387 bp, Homo sapiens
ggctcactcaaatctcagcctacgtggatgacaaatttatactcttgccctactattaggttcatgcaaaactgattgtggttttcaccattactttaatgaatggtacctgaaacaaaagtgctaatagaatagtacctggaacaaaagtgctcaatacctttttgtaaaacacatgaatgattcaatgactaaataagcaaatgaatgaatgagaatagtggataatgttaaggatcattgatcttgttagatcagttcagccattccctgccttcaaaagaacctatatcaggacctgcttgcaaatcttcctgcctgagaaccctggagtagcacagttgtgtctgagaagagaaacataaactgtttgtagatatttccaagtaactgatgctagaaatacagccctgcttttgtttctaaggaaaccagaatcaattatttggaaggttttgcttctaaccttctctgcaggggtttttctagtacagtggggttgtcaaatttgggtgtacatcagagacacgtggagggctaatgattactctgggtgctgtaacccacccccagagtttccaattcagcaggtctggggctaccctttgagaactgctgctcaaatgcattattaagcagtttaccaggggcctgccattctcaagaggtgattttccaggggcacaggatggagcagcaacactttctgattccaggacctctgctgggttctgcagaaacatcttacacaagccccactgcccctggccacgagctgggggtcagggcaggggctgggggcgatgccgtgtacaataaggaatacaggcttttccacagcccctgtctcttgatttctcttctgcttctctggatttttagagcagtgattttcgccaagagtggtatctcctcccagaaagacctatccaaatctcagggagcacaggtagcttgcaaaagcatattgtagtgcaatttctctagtaagatgagaggagcttttaactgatagtgcactcatccaaagtgtcttcatggtgggaattcagagaatatttgagaatacagacttattataacttatcttctcgtgggcagcatgcttaaggctcacagggtgggggcatcagattcaaatgcttatcaaaggacgtgtttgtctatttcgtttcttttcaagttggagaaacacttccaacggatgagagatcacagttaacaaatgccaaagaggcttcctactttgtcccagaaagccaggatcacccttayctaaaataggagaagtgatgaaagggttggccagttccagcacatcacaatgcaaagaacccataaagagatgcaatcttgcatggccaagaggagagatttccagaaacca

SEQ ID NO: 683292 - DNA, 652 bp, Homo sapiens
cacaactatttttgtgtatttatcttgtatcctgcaactttgcttaattatttttattacctctacaataccaaggttttctgtgtgtgtattatctggcactttctacatataggaccatgtaatctgtgaataggggtggctttacttcttccttcctaatctctatgtcttttatttcattttattgtctaattggtttgtctagaacttccagtacagtgttgaatagcactggtgaaagtgggcatccttgtcttattcctggttaaagctatcagcctttccccatttagtatgatgttagctgtggatttttcataaatgtactttattaagttgcagttcccttctgttcctaattttctgaatgttgttatcatgaaagggtgttggattttgtcaaatgcttttcctgcatcaattgggatgatcatgtggtttttttccctttgttccattaatgtggcatgttacattgacattgagycacccttgactgacttttctttaaaaaaaacacatgatgatcttgaaaggaaaaaacccctctgaccctgtgtactacctagaaaatagccttggcaacatatcagcaaattctgctgctgaaagtgtgtaagaagtacttggattgtttagttctgggaaa

SEQ ID NO: 683293 - DNA, 1154 bp, Homo sapiens
attctggtggagaggtatatgatgattgttattaataatacagtggatttcatatctagatttagtcataagtgatgttgaccataaagcaaccagaaatgacataaaaagaatccattgtggctaggcgtggcagctcaagcctgtaatctcagcactttgggaggccgaagtgggtggatcacttgaggtcaggagtttgagaccagcctggtcaacatggtgaaacactgtctctactaaaaatgcaaacattagctgggcgtggtggcgggtgcctgtaatcccagctacttgggaagctgaggcaggagaatcacttgaaaccagaggtagaggctgcagtgagccaagattgtgccactgcaygccagcctgggcaacagagcgagactccatctcaaaaaaaaaaaaaaaaaaagaatccattgtatcattgatacagtgattcaatatatatcatcaatacagtggtaaaattattctttttgctgagtcttaggaagttgatagttaatgcatttgcagactgggagtcaggatttgaaatttgtaaccaaaatgtttctttgctcaatccctgcagcaaccccaaatttttatttattttgccaggcagtttgtcagagtagagacaggctattcatctacttcctacctgaatgggcttataaagtagaagaaacagagtattatgtgctttttgtgtggcagccagagtatctttgaaaacaaaaattgtacaatgttttaaataaaacaataaaaaataatttatttcatgtagatgaagtgaacagatggacatataaaaatttaaataaaaacctgtaatggaaggaataccatatatttatatgtggtatttcttagttctgttcccagacatatcacttacaagccatgtggcctgcaaaatataactgaacttctctgattttctgttccttgtaaaagagagagttgggcaagactaaatgatcctggaaagtcccttctaactctaaaagtcttacatcctggtaaacaactaagcagtcttaggtgtgtcataggaattgagcgaaagcaatgagtgagaaattggttttgaagaagtagaaacatgggaacagaattgtagttgactaaggaattagaagaaacagaaaaac

SEQ ID NO: 683294 - DNA, 607 bp, Homo sapiens
ggacagaccacatatacaataatggttgcataagattataatcccctatttttactgcactttttttttaaaaggacttagtktactttttctatgtttatatatatttagatacacaaatacctaccattatgttacaactgcctacagtattcagtaacatgctgtacgggtttgtcctaggtttgtgacttaagagcaacagactacaacatacagcctaggtgtgtctaggctagaccatctaggtttgtataagtacgctctatgatgagagtaaaatgaaattgcctaaggactcatttctcagaacatatccctgacgtgactatactttcataattttcacctttgggaccagcttatggtattggcaggggtctcccttaaaaccaaaccaaatacacaacaaataatgctaaaaggtagaggttggaaaaaaaaaaaagtttcactctcgcccaggctggaatgcaatggtgccaacactggaccagactcctgggcttaagcaatcctcccacctcagcctcctcagtaactaggaatacaggcctgcaccaccatgccttttttttttcttttttttttaagagatggagtctca

SEQ ID NO: 683295 - DNA, 1283 bp, Homo sapiens
  misc_feature 244, 245, 247, 248, 249: n = A,T,C or G
agaagatacttgagagtagtctttttcctccctactaatgtaattgcttctgaactttttcttctttcttatggaaatatcatttcttacggtattattttatgtaggctgggcatggtggctcacacctgtaattccagcactttgagaggctgagataggtggactgcttgagcccaggagtttcagaccagcctgggcaacattgctagactctgtctccattaaaaaaaaaaaaaagaannannnaaatattatatattatatatacacacatatacacacacacacacacacacacagaagagagtccagagaactatgaacacttgaaatcactcagtttaattattttgtaaaagcaacctataacagattcagttcaaattttaaggaattttcaaaaatttaatattgaacataaatagcatgttatactgccatagcaaggcttttttcccactaaaattaatacattttaatattctgtcatgtacttcaaaaagcaatccatatgatattaataaagagaaatttataatttagcctgggtcaattctaaattataagtaaactgacttcctttacctaactacatgtaattctgtcttggtggcatttctatcttgtcaactcaatgatataagcaaaagatgacatatattgaaaagcagtactttttttcagtttgatgaaaattgtaagaaagctaatatctgacaatattagggcaattrctattttgtctaaataatttttatagaaaagatggttaagtgacataatttaaaaatattctccagtagccaaaggaaaatatttggaagaatagctatatactgttggatatcctaaaatagactgaaaaaagagtcttacagagtgtgtgtaacattgtgcctggctggtattcagggatgtgtgcaattctggtacattaatcttaactgtcttaagaaactaaaagctttgctcactcaaagcattcttttttattttcatgcacttttaagcttgtggagaacacatgaacacctcttcctgaaaacaaaaatgtattcttttgtgaagccaaggtaaaaatcaaatgagagatgatgaactattttgttcaaaagagacctaatttcacagaggtagatacgcatctctatgttaagcaaactgataacatctaagtaaagattcttgctggaattctgaggagactgtttcagcctttgccatctaaactgatagccatttccttctactcagtcactggaacagcatgggagtctctt

SEQ ID NO: 683296 - DNA, 602 bp, Homo sapiens
aaatggatttttaaaatattgtaattacttgcagttggcattacaaaaccccaaattactcatctttagatttcagatcttacctcacttgcagcatatgtatatagtactttattttttatgacaaaccaaaagtgtttccagggttttttattgccctttgatctgtacaagtagccactcatagaagaatcctctgtgtttgctgatacctagataagaaaccccatacaaagtttaatggttttcagacaaattataacagcaaaattatttgcaaccaataggtgctgaaagcaataactgtaatgatagaatgtttcagaatgaaatatattttcaaagtgctactatacaaattgaactctgctattaacatgagcacaaaaaagaagacaaccatgttagaggcaattatagaattttacttggtttaactgtgcctgcacrtgtttgcgtatgtttcttggtgggttcatctgtgttttctgggttggcaggtgaagaaaaatagttccagaagactaaaatgcttttctaaaagctggatttggggacttggggatttgttttttattgctcttattttggggcatcaggga

SEQ ID NO: 683297 - DNA, 993 bp, Homo sapiens
atagattactggcgggaaataagtcagtctggttgtttaattttcctatgggaaattgggcattttaagttttgtggatcctagaacaaactgagttttattattttgaaacccaggataaaatattacataaaagcattgctttttagtttcttacatgttttatccatttatttttatttttgagatagagtcttgctctgttgcccaggctggagtgcagtggcatgatctcggctcactacagctgtcatctcccgggttcaagcgattctcgtgcctcagcattccaagtagtcgggattacaggcgtgtgccactgagcccagctgatttttgtacttttagtagagatgggttttcaccatgttggccaggctggtctcgacctcctgacctccagtgatcctcccacctcagcctctcaaagtgctggcctctcaaaagtgctgggattacaagcatgagccaccacgcccagccagtttcttayatgttttaaacttaaagccaaaaagaaggaactaggaatgtgtgattaaacgtgagtgccagaagtcgacagatctcatatccagagttgaaggtcttattcataattttatcattcataatgtattaggcaattgcggctctggtaaatttcatgaggttgtaaaatagttgctaccagaaggctcaaaatttgtatgagcttttagctgagattttgagaatctgtaggaatttgtgaagtgagaggaagaacctctgaacggtgagcagttcaggtggaggaacaggaggaaatacaggcaaaggtcccagaacagaacaattgaggctacattcaaggaattgagatacctggaaatacaggtagaaatacaagtggccagtccatagaaagtttagctgtggaagtcctcttaatgggtttaaaacactggaaccacctgttacaagagtatttcaagtgaggatgaggatgaccattccatgtagaaatttttt

SEQ ID NO: 683298 - DNA, 1118 bp, Homo sapiens
gtgaccccagcaactagcttgacctctctgcattgcagtacctcatctgtcaaagcaggcaactggttcacccaatttttaaagttcttcccagctgtagaaatcattattcctagaataagcacaatttgcaaaacagcaattttcaaatctgggccttatttgcaataattctcgccttatggggcttccgaaaccagattttcctgaaaagatcaccaaagcaccaaatggttcctactgtctcccttgaaacattttgttgcatctcatgaaatagcagggaaataccaaatgtggattccatcatgttttaagggactacattcagggtaggttaaagaagaggtcaaaatctaccacttgactttgcgaggctttgtgcataaaacaacatatttttgggttctactaacctaaactccagagttgaagaatctgattcaaggcaaaagatttgcaaaatttgatcttattgtgaaggaggtaatgtrttatatgattaccattaatctattaaagacagaaaaatttctatccaagggaggaaaaaaaactctctatgctttttggtttgccttccaaataagcctagaaataccctactcaagataaccatattaaaaagctttaaaaccatatatttaaaaaattatttaaaagataatttttacattatcaagtcaagtttcctttaagttgtagctcttccaagatattttatgttaaagatcatgtgcatttcacaaagaattacaataaatgacagctaacggaagaccaattagagtcttaaattactgttagtcagtcagtaggaaaatatgattcagttcctctgtgttgtaaggggaggtcacgctaccctaaaatgtcacaaaacacaaatagttttacttcttccaaaagtacaagtaatcctggtagctcaacaaagcagaattgcaagcctttcaatttatctaagccttattccatgaccctagccaatttgctcctctgcacttatctgaacactctctggccttttgcatatactacttcgaattgttattggtccggtttctcaatcagactgtaaatccctggaaggcagtgtccacattttatacctttcc

SEQ ID NO: 683299 - DNA, 1118 bp, Homo sapiens
gtgaccccagcaactagcttgacctctctgcattgcagtacctcatctgtcaaagcaggcaactggttcacccaatttttaaagttcttcccagctgtagaaatcattattcctagaataagcacaatttgcaaaacagcaattttcaaatctgggccttatttgcaataattctcgccttatggggcttccgaaaccagattttcctgaaaagatcaccaaagcaccaaatggttcctactgtctcccttgaaacattttgttgcatctcatgaaatagcagggaaataccaaatgtggattccatcatgttttaagggactacattcagggtaggttaaagaagaggtcaaaatctaccacttgactttgcgaggctttgtgcataaaacaacatatttttgggttctactaacctaaactccagagttgaagaatctgattcaaggcaaaagatttgcaaaatttgatcttattgtgaaggaggtaatgtattatatgattaccattaatctattaaagacagaaaaatttctatccaagggaggaaaaaaaactctctatgctttttggtttgccttccaaataagcctagaaataccctactcaagataaccatattaaaaagctttaaaaccatatatttaaaaaattatttaaaagataatttttacattatcaagtcaagtttcctttaagttgtagctcttccaagatattttatgttaaagatcatgtgcatttcacaaagaattacaataaatgacagctaacggaagaccaattagagtcttaaattactgttagtcagtcagtaggaaaatatgattcagttcctctgtgttgtaaggggaggtcacgctaccctaaaatgtcacaaaacacaaatagttttayttcttccaaaagtacaagtaatcctggtagctcaacaaagcagaattgcaagcctttcaatttatctaagccttattccatgaccctagccaatttgctcctctgcacttatctgaacactctctggccttttgcatatactacttcgaattgttattggtccggtttctcaatcagactgtaaatccctggaaggcagtgtccacattttatacctttcc

SEQ ID NO: 683300 - DNA, 1349 bp, Homo sapiens
ttacatcggcacaaggaatttacagaaactggatgtggctgtgataaaaaacagagcagagcacagttttgctgggacaacagtggccatcaggtattctcagagtccaaggacaaattttagataactaatgtctttacagttttgtcatttgtaaagtagttctcwtttactcattaccacaaccatatgagataaatagtatcactatccctgtttcacagctcagagccagatggttaagtgcctgtcctaagcaggagcttcacttaagtcctatttctatgtcttaaattatattttatatatacagtggacacttgaatatgaaggaattaaagtgctgtgtatattttcagtgcttgaaaagctactgctagatatatgggtttcccaaaagttatcatcagaatgaatgcagaaaaactggaaaattatacatttatatctaacgactaacttctgagttcatttgcaagggggaagtttcaaaaatttcacctttgcatataaacaaaaaagagtagcaaattgcctatctgtggttatatttgcaaaactgtgttcttctaccattagaaaacttacatacatatgaaaacactataattttgaaagtcatggtatcttttttaaaaaagcaaatgtgatttttttaatgaacaaaatttaattttaaaaaatggttagattcccaggaaatgtaaattctgcctaggcaaagaaagtcaaagtagctaggaatgtctggtaatgaggcctgagcaataatctggcaacaacaagcacaaaactctaatccaaaataaagtacaatctatcacactctccaaactatgttctcctaactaatactatcagggatcacaattagccagataattataatttcattatactaaccttgtttctgcagattttagcttaaccgatacatcacatagctgattctgagtaacaagtgtatatagccgtgtcttacaatgtgtgatcatagtgaatgcaatctgtaatctttggggcaaatggtcacaggcgttgcattgcttactacatacctttaaaacaatctgaacttcgatgcaacattctgttgacaatagcaataaagaggaccaatgaggacttgttccagctgactacagaattgctctgatgacctcaaccaatttacaaaatatatcaattcataaagtttagttatagggctcaactggaaatatctatttattaaaatcatcctgaaaatacaatctaaatgtgggagcatagggaattatcaaaataaattaaagtagctgtagatagattaatacaatgaaattggatttttattttttatttttatt

SEQ ID NO: 683301 - DNA, 1349 bp, Homo sapiens
ttacatcggcacaaggaatttacagaaactggatgtggctgtgataaaaaacagagcagagcacagttttgctgggacaacagtggccatcaggtattctcagagtccaaggacaaattttagataactaatgtctttacagttttgtcatttgtaaagtagttctcatttactcattaccacaaccatatgagataaatagtatcactatccctgtttcacagctcagagccagatggttaagtgcctgtcctaagcaggagcttcacttaagtcctatttctatgtcttaaattatattttatatatacagtggacacttgaatatgaaggaattaaagtgctgtgtatattttcagtgcttgaaaagctactgctagatatatgggtttcccaaaagttatcatcagaatgaatgcagaaaaactggaaaattatacatttatatctaacgactaacttctgagttcatttgcaagggggaagtttcaaaaatttcacctttgcatataaacaaaaaagagtagcaaattgcctatctgtggttatatttgcaaaactgtgttcttctaccattagaaaacttacatacatatgaaaacactataattttgaaagtcatggtatcttttttaaaaaagcaaatgtgatttttttaatgaacaaaatttaattttaaaaaatgsttagattcccaggaaatgtaaattctgcctaggcaaagaaagtcaaagtagctaggaatgtctggtaatgaggcctgagcaataatctggcaacaacaagcacaaaactctaatccaaaataaagtacaatctatcacactctccaaactatgttctcctaactaatactatcagggatcacaattagccagataattataatttcattatactaaccttgtttctgcagattttagcttaaccgatacatcacatagctgattctgagtaacaagtgtatatagccgtgtcttacaatgtgtgatcatagtgaatgcaatctgtaatctttggggcaaatggtcacaggcgttgcattgcttactacatacctttaaaacaatctgaacttcgatgcaacattctgttgacaatagcaataaagaggaccaatgaggacttgttccagctgactacagaattgctctgatgacctcaaccaatttacaaaatatatcaattcataaagtttagttatagggctcaactggaaatatctatttattaaaatcatcctgaaaatacaatctaaatgtgggagcatagggaattatcaaaataaattaaagtagctgtagatagattaatacaatgaaattggatttttattttttatttttatt

SEQ ID NO: 683302 - DNA, 613 bp, Homo sapiens
tattaactgccactcttcraatacagctgtccaattaaagagaatatggagtcaaagaatgaagaacctaattgtgttatttcatttacacccctagaaatgtttaagctgctgaactaaaagaagaaggggaggtaatgctaccagaacatggaaactctttctggacccacaatggaatacagggttgcacaggtaaaatagggtgtctgataggaggaaaagaggtgaggtagtacctgccctcacaaacattttatttttactccaactatcactcagggaccctttatttgaacctgtcccactgcctataccagagacagatggatttgctaagatatctgcatatcacttttcttaaaaaaaaagtattttaaaatattttcaacttattccgaagagacatgggtttttacagatgtaagcattatagaaatgccacatagaagagtgtcaaagactgtgtaactggtggtttgcatggtacaggctctgaatgcttttactaaagtcaagagtctttataagagcaggagcaaaatcccaaggaggttgcaagaaagccccttgaaagatctgtcactctgctgtgataaaagctaacagacga

SEQ ID NO: 683303 - DNA, 613 bp, Homo sapiens
tattaactgccactcttcgaatacagctgtccaattaaagagaatatggagtcaaagaatgaagaacctawttgtgttatttcatttacacccctagaaatgtttaagctgctgaactaaaagaagaaggggaggtaatgctaccagaacatggaaactctttctggacccacaatggaatacagggttgcacaggtaaaatagggtgtctgataggaggaaaagaggtgaggtagtacctgccctcacaaacattttatttttactccaactatcactcagggaccctttatttgaacctgtcccactgcctataccagagacagatggatttgctaagatatctgcatatcacttttcttaaaaaaaaagtattttaaaatattttcaacttattccgaagagacatgggtttttacagatgtaagcattatagaaatgccacatagaagagtgtcaaagactgtgtaactggtggtttgcatggtacaggctctgaatgcttttactaaagtcaagagtctttataagagcaggagcaaaatcccaaggaggttgcaagaaagccccttgaaagatctgtcactctgctgtgataaaagctaacagacga

SEQ ID NO: 683304 - DNA, 2465 bp, Homo sapiens
  misc_feature 1537: n = A,T,C or G
agtttcagctttctacatatggctagccagttttcccagcaccatttattaaatagggaatcctttccccattgcttgtttttctcaggtttgtcaaagatcagacggttgtagatgtgtggtattatttccgagggctctattctgttccattggtcacaagcgctatgatgaagagtagttttgatgatattgaatcatagtatcactgagcaacaaatgcaacaagcagccagagaaaggataggatcaggggaggaaaaggtaatttaccataaagataaaatgtctatttcagttgggtaaacagcagagataggaaaaaaaattatcccttcaaaataaaaaagttgttattattataataaaagtaatatagacttattgaaacctaatttaatgatatcagtaattatcattatttttaacatcttgctgtctatcatgctatattaaaatactttcattaacttaatcaattgaacttcacatacaattttaaactattttgttaatatgccaaaaatataccacgtaatacaagaaatatcttaatatatcataaatgtcaacaaatatggaagcacaaagatataataactgcatgtttcattacatgattatatgagaatttacataactagtgctttgatacactcactagtattgattgcttctcatttttctatattttaagtaatgctgtaataaacatcttgtgtacattttgtttgtctaattgttttaagataatttctagaaattgacttgatatgtcctaaggtatgcacatttaaattctgatatatattttaccaaattgccattgtgaaaagctgtactaatttgttcctatgagtaggatttgagaatatgtttcttccagccagttgctgcttagtgtgttatcaatttttgaacttttgccatagtgattaaaaactctgtattttactatctcatttctatgactataaaaaactggaatatttttgttaataattttatttctatatgttactatatagtgaaccatatttgctattatatatacagaaatataaattttgatatatactgcatactgtgttatttatatcttagctttatatataattatatttatatataattaaaaatttttacgttaaatttttacgaagtcaaggtaatctttttctttttttttattttatttatagagatgtggtctcactgtgttgcctaggctagtctcaaactcctggcctcaaastatcatcccaccttagcctcccaaagtgccgggatcacaagtatgagataatctttttctttatactttgtggcctttaaatcggcatcttaatgttatgtaaataataacacttattaacaatattataataatttacatcgtgttttatagtttagcaagtgctaatctcagattcttagaaaaacttatttatccattcaatattatctcatttaatcttttcaaaatatcatttaatcttcacaaaagccttgtgaaggcagaaaatatgattgccanttaacaggtaaggaaatagatttaaaatatttaagctcagatagttagttaaatggtagttctggactttaaatctagttgagaaatttaaagcagactctgtcattacaaaagccaggaaaaatgacttattggtaacactgatgtcctgccttccctgtgctttggacttcatagccgttcaagttcctgttcatactgataaaatacacacctgcaaaatgtcagtgacagtaaacaattttttgtgcatcttaaaaattatgacttatacttagcaattttgttgtgagagtggatcattgcttactttcccaaagagctttgcatctcagggaccagccaggtttcaccttggagctgtttctgcagaccagctactggaacgagaatcctgctaaggccattaacaattgaatcagactatctggagcagtggtagggatgactcagttaccccaaagtgtccctgcaaaggatggaagtccagctgcttcatgtcccagaatgtgggaagagggcaggaaaacatatttgctgtgaaagagcatttcccacaaatttgttttcagttagggcctgatgttgtcttactgaagccgggaagaggattgacttctcactctactcctacatttagggagttgagaaatcttttcctgattcaagcaaaaagaaattttggaaaactgaaggggctgaaaaactattcttggaaatctagactgttttaagtagaatcttaagggaaaagggagaaattattgggaaggccctctatcagttctaaaattggcttgaatactttgactctaatgattttttttggtctgctattaatgtcgaagtttttgtttgtttgctttcttggttaaagttcaaaacaatatgtaggaagaatcatgaacattggatgtcaacatcccca

SEQ ID NO: 683305 - DNA, 2465 bp, Homo sapiens
  misc_feature 1537: n = A,T,C or G
agtttcagctttctacatatggctagccagttttcccagcaccatttattaaatagggaatcctttccccattgcttgtttttctcaggtttgtcaaagatcagacggttgtagatgtgtggtattatttccgagggctctattctgttccattggtcacaagcgctatgatgaagagtagttttgatgatattgaatcatagtatcactgagcaacaaatgcaacaagcagccagagaaaggataggatcaggggaggaaaaggtaatttaccataaagataaaatgtctatttcagttgggtaaacagcagagataggaaaaaaaattatcccttcaaaataaaaaagttgttattattataataaaagtaatatagacttattgaaacctaatttaatgatatcagtaattatcattatttttaacatcttgctgtctatcatgctatattaaaatactttcattaacttaatcaattgaacttcacatacaattttaaactattttgttaatatgccaaaaatataccacgtaatacaagaaatatcttaatatatcataaatgtcaacaaatatggaagcacaaagatataataactgcatgtttcattacatgattatatgagaatttacataactagtgctttgatacactcactagtattgattgcttctcatttttctatattttaagtaatgctgtaataaacatcttgtgtacattttgtttgtctaattgttttaagataatttctagaaattgacttgatatgtcctaaggtatgcacatttaaattctgatatatattttaccaaattgccattgtgaaaagctgtactaatttgttcctatgagtaggatttgagaatatgtttcttccagccagttgctgcttagtgtgttatcaatttttgaacttttgccatagtgattaaaaactctgtattttactatctcatttctatgactataaaaaactggaatatttttgttaataattttatttctatatgttactatatagtgaaccatatttgctattatatatacagaaatataaattttgatatatactgcatactgtgttatttatatcttagctttatatataattatatttatatataattaaaaatttttacgttaaatttttacgaagtcaaggtaatctttttctttttttttattttatttatagagatgtggtctcactgtgttgcctaggctagtctcaaactcctggcctcaaactatcatcccaccttagcctcccaaagtgccgggatcacargtatgagataatctttttctttatactttgtggcctttaaatcggcatcttaatgttatgtaaataataacacttattaacaatattataataatttacatcgtgttttatagtttagcaagtgctaatctcagattcttagaaaaacttatttatccattcaatattatctcatttaatcttttcaaaatatcatttaatcttcacaaaagccttgtgaaggcagaaaatatgattgccanttaacaggtaaggaaatagatttaaaatatttaagctcagatagttagttaaatggtagttctggactttaaatctagttgagaaatttaaagcagactctgtcattacaaaagccaggaaaaatgacttattggtaacactgatgtcctgccttccctgtgctttggacttcatagccgttcaagttcctgttcatactgataaaatacacacctgcaaaatgtcagtgacagtaaacaattttttgtgcatcttaaaaattatgacttatacttagcaattttgttgtgagagtggatcattgcttactttcccaaagagctttgcatctcagggaccagccaggtttcaccttggagctgtttctgcagaccagctactggaacgagaatcctgctaaggccattaacaattgaatcagactatctggagcagtggtagggatgactcagttaccccaaagtgtccctgcaaaggatggaagtccagctgcttcatgtcccagaatgtgggaagagggcaggaaaacatatttgctgtgaaagagcatttcccacaaatttgttttcagttagggcctgatgttgtcttactgaagccgggaagaggattgacttctcactctactcctacatttagggagttgagaaatcttttcctgattcaagcaaaaagaaattttggaaaactgaaggggctgaaaaactattcttggaaatctagactgttttaagtagaatcttaagggaaaagggagaaattattgggaaggccctctatcagttctaaaattggcttgaatactttgactctaatgattttttttggtctgctattaatgtcgaagtttttgtttgtttgctttcttggttaaagttcaaaacaatatgtaggaagaatcatgaacattggatgtcaacatcccca

SEQ ID NO: 683306 - DNA, 3097 bp, Homo sapiens
acttgctgcttgaagcaactgactaggccaacctaggccctgccttcctcctggagggccaagaaaatcaatatatctggcaagcctatgactggcatactcgttgggaagctctatgccggagaaccaattttgtgtaagtatactacacagcgagaatcatggaacccaaatagtttgcagccatcctgttttcttatcaacaaggcaagatatccacctgtttctgcatttgtaagcctcatgttattgacagagatgtcaatgaaccatgtccacttttataattttcaagaagaaaaactatcaaagatgtaaaattattacactcttccaagtcacttttgccagtgattcctaattttttcagcaatcaattttagctggtctgtgtccgttagcctttgcagtttgggctacagtgtgcaaacaagaatggtgaattaaactgaagacattaataacttatttaaagtagttgcattttacttcaaggacaaaagatgaagtccttgagtttgttcataggcttttggtatttgaattctctttaaagtgaaatatgaaaaaaatctgtgctggaaaggaagctacaaacagtttcatgaggttgtgtaatggaataacatctcatctcattattctaatatgggtttgtcccaactagtggataattcaaaacaactgctacttctctaatgccttgttattctttaataaaacagccgataattcaaagttagtttgttgaaactcacatatttttgtcttttatttcctgctctttgctcctctgattcattgggtttcaccataaagtaaaaaatagagctaagaattgtgataactaraaatcagtaatagactgaaaactgcagcttaaaggaaactacatttaaatgtgcatttatatttctttatctatttattgctcatcctcatttatgttccagactccttcgagtaaacagctttggatccactctgtttctgctgcaggttttaataatagtagagtgtttctttctgcagttaatcaaaactacttcccaaggagactaagcatggcttttccacattcaaactgcagctgtttttcatatgatggtgttctagaaaggatcttcagtcggctagccctctgagaaggtgggcagagtaagagaaagttctgttgtccattattgcctaccatttctgttcctggaacacccaaaataaaacgataagtagttttgtccttacaaaaattctttcctccttcttttttctctaagtagtgtaaacactcagaaaccaattttttggctacccatcttttttggctattcatttctcccgagggaaaggaatgctaaggaagattttctgttatagtttgtctttcaccgtaacaatgacaatgacagaatcaagcacctcttccactcaataggtgtttgtcggatgcctattgtaattgcctgacaggtccttcctgcctactgcacaaacaaaaccaattcacagagactgtagtattatagtaaagaaagagtttaattaatgcaagggtggccatgtggaagatgaagttagtactcaaatcagtcttcccaaaggctcaaaggttagggttttttagggatagtttggtgggcaggggactagggaatgggtgccactgaatggtcggagatggaatcatggggatatggaaaatggtcctcatgtgctgagttcacctctgggtggggccacaggactgatagagtcatgagtcacgactccaggtggggtagtctgaaaaacatctcaaagggccaatcttaggttctacaaaaatgatgttatctataggagcaactggtgaagttataaatcttatgacctccagaacaatggctagttatcatttaactgtgcctacatcttagcagaattcaggctcttctcataatcctaatattttggccttttattagctttaaaaaggtggttacattttggaaagggctattatcatcattgctttaaggttaaaccttaaacttagttactcccccaaagttagcttgatctaaacccagaaatgactgaggacagtctggagattgtaagtaagatggagtcaactatgtgagatttctcttactgacataattttgcgaaggcagcttcgccatcataggtctgtgggctaaaacagaggaaataagttcaacaaggctaagttcctccacttaacaagttcataattttggggtgggggtaatagaaaaatcagccagtgttttcaaaacaatgaggttaattacttcaaagaaatacatgtgacatgggcacagagtttaagtaacttgcccaagtgacatattttttaaagtgataaatcaagaacttgaatccaataatattacacacccatttctatggtttttccaacattatttcacactgcatttgtattaagcaattaatctcatggttttggaaatagcggcttatttgacaagtggaaaaatttaggcttattcatctctgccttctctgtgtcccagttttcaaatctgagaaataagaatcaggccacagtaccttgattttaaagcagcattgattttaaattaccgtacttaataataggttgtaaggggaagaaaaaccactacattaaatgtactcacagctgcaaaacaccataatttctgaaatactgaagtatgaaaaaatgtgaacataattatatatagttattagaggctgtgaagggtagaggggaaaggagaatagagagaggttggttaacacataaaaaattaaagctagatgggataaataagttctagtgttctatagcactataggggtaaatatggttaacaagaatttgttgtatatttcaaagctagaagagagaattccaaatgttcacaacacaaaaaaatggtaaacatttgaggtgatgaatatgctaatgatcattacacactgtatacatgtactgaaatattctgtattccataaatatgtacaattgtagccatcaactaataataaaaggaaaaaatggtgacatatagtatgtgaattttaataaagctatttttaaataaaa

SEQ ID NO: 683307 - DNA, 3097 bp, Homo sapiens
acttgctgcttgaagcaactgactaggccaacctaggccctgccttcctcctggagggccaagaaaatcaatatatctggcaagcctatgactggcatactcgttgggaagctctatgccggagaaccaattttgtgtaagtatactacacagcgagaatcatggaacccaaatagtttgcagccatcctgttttcttatcaacaaggcaagatatccacctgtttctgcatttgtaagcctcatgttattgacagagatgtcaatgaaccatgtccacttttataattttcaagaagaaaaactatcaaagatgtaaaattattacactcttccaagtcacttttgccagtgattcctaattttttcagcaatcaattttagctggtctgtgtccgttagcctttgcagtttgggctacagtgtgcaaacaagaatggtgaattaaactgaagacattaataacttatttaaagtagttgcattttacttcaaggacaaaagatgaagtccttgagtttgttcataggcttttggtatttgaattctctttaaagtgaaatatgaaaaaaatctgtgctggaaaggaagctacaaacagtttcatgaggttgtgtaatggaataacatctcatctcattattctaatatgggtttgtcccaactagtggataattcaaaacaactgctacttctctaatgccttgttattctttaataaaacagccgataattcaaagttagtttgttgaaactcacatatttttgtcttttatttcctgctctttgctcctctgattcattgggtttcaccataaagtaaaaaatagagctaagaattgtgataactaaaaatcagtaatagactgaaaactgcagcttaaaggaaactacatttaaatgtgcatttatatttctttatctatttattgctcatcctcatttatgttccagactccttcgagtaaacagctttggatccactctgtttctgctgcaggttttaataatagtagagtgtttctttctgcagttaatcaaaactacttcccaaggagactaagcatggcttttccacattcaaactgcagctgtttttcatatgatggtgttctagaaaggatcttcagtcggctagccctctgagaaggtgggcagagtaagagaaagttctgttgtccattattgcctaccatttctgttcctggaacacycaaaataaaacgataagtagttttgtccttacaaaaattctttcctccttcttttttctctaagtagtgtaaacactcagaaaccaattttttggctacccatcttttttggctattcatttctcccgagggaaaggaatgctaaggaagattttctgttatagtttgtctttcaccgtaacaatgacaatgacagaatcaagcacctcttccactcaataggtgtttgtcggatgcctattgtaattgcctgacaggtccttcctgcctactgcacaaacaaaaccaattcacagagactgtagtattatagtaaagaaagagtttaattaatgcaagggtggccatgtggaagatgaagttagtactcaaatcagtcttcccaaaggctcaaaggttagggttttttagggatagtttggtgggcaggggactagggaatgggtgccactgaatggtcggagatggaatcatggggatatggaaaatggtcctcatgtgctgagttcacctctgggtggggccacaggactgatagagtcatgagtcacgactccaggtggggtagtctgaaaaacatctcaaagggccaatcttaggttctacaaaaatgatgttatctataggagcaactggtgaagttataaatcttatgacctccagaacaatggctagttatcatttaactgtgcctacatcttagcagaattcaggctcttctcataatcctaatattttggccttttattagctttaaaaaggtggttacattttggaaagggctattatcatcattgctttaaggttaaaccttaaacttagttactcccccaaagttagcttgatctaaacccagaaatgactgaggacagtctggagattgtaagtaagatggagtcaactatgtgagatttctcttactgacataattttgcgaaggcagcttcgccatcataggtctgtgggctaaaacagaggaaataagttcaacaaggctaagttcctccacttaacaagttcataattttggggtgggggtaatagaaaaatcagccagtgttttcaaaacaatgaggttaattacttcaaagaaatacatgtgacatgggcacagagtttaagtaacttgcccaagtgacatattttttaaagtgataaatcaagaacttgaatccaataatattacacacccatttctatggtttttccaacattatttcacactgcatttgtattaagcaattaatctcatggttttggaaatagcggcttatttgacaagtggaaaaatttaggcttattcatctctgccttctctgtgtcccagttttcaaatctgagaaataagaatcaggccacagtaccttgattttaaagcagcattgattttaaattaccgtacttaataataggttgtaaggggaagaaaaaccactacattaaatgtactcacagctgcaaaacaccataatttctgaaatactgaagtatgaaaaaatgtgaacataattatatatagttattagaggctgtgaagggtagaggggaaaggagaatagagagaggttggttaacacataaaaaattaaagctagatgggataaataagttctagtgttctatagcactataggggtaaatatggttaacaagaatttgttgtatatttcaaagctagaagagagaattccaaatgttcacaacacaaaaaaatggtaaacatttgaggtgatgaatatgctaatgatcattacacactgtatacatgtactgaaatattctgtattccataaatatgtacaattgtagccatcaactaataataaaaggaaaaaatggtgacatatagtatgtgaattttaataaagctatttttaaataaaa

SEQ ID NO: 683308 - DNA, 3097 bp, Homo sapiens
acttgctgcttgaagcaactgactaggccaacctaggccctgccttcctcctggagggccaagaaaatcaatatatctggcaagcctatgactggcatactcgttgggaagctctatgccggagaaccaattttgtgtaagtatactacacagcgagaatcatggaacccaaatagtttgcagccatcctgttttcttatcaacaaggcaagatatccacctgtttctgcatttgtaagcctcatgttattgacagagatgtcaatgaaccatgtccacttttataattttcaagaagaaaaactatcaaagatgtaaaattattacactcttccaagtcacttttgccagtgattcctaattttttcagcaatcaattttagctggtctgtgtccgttagcctttgcagtttgggctacagtgtgcaaacaagaatggtgaattaaactgaagacattaataacttatttaaagtagttgcattttacttcaaggacaaaagatgaagtccttgagtttgttcataggcttttggtatttgaattctctttaaagtgaaatatgaaaaaaatctgtgctggaaaggaagctacaaacagtttcatgaggttgtgtaatggaataacatctcatctcattattctaatatgggtttgtcccaactagtggataattcaaaacaactgctacttctctaatgccttgttattctttaataaaacagccgataattcaaagttagtttgttgaaactcacatatttttgtcttttatttcctgctctttgctcctctgattcattgggtttcaccataaagtaaaaaatagagctaagaattgtgataactaaaaatcagtaatagactgaaaactgcagcttaaaggaaactacatttaaatgtgcatttatatttctttatctatttattgctcatcctcatttatgttccagactccttcgagtaaacagctttggatccactctgtttctgctgcaggttttaataatagtagagtgtttctttctgcagttaatcaaaactacttcccaaggagactaagcatggcttttccacattcaaactgcagctgtttttcatatgatggtgttctagaaaggatcttcagtcggctagccctctgagaaggtgggcagagtaagagaaagttctgttgtccattattgcctaccatttctgttcctggaacacccaaaataaaacgataagtagttttgtccttacaaaaattctttcctccttcttttttctctaagtagtgtaaacactcagaaaccaattttttggctacccatcttttttggctattcatttctcccgagggaaaggaatgctaaggaagattttctgttatagtttgtctttyaccgtaacaatgacaatgacagaatcaagcacctcttccactcaataggtgtttgtcggatgcctattgtaattgcctgacaggtccttcctgcctactgcacaaacaaaaccaattcacagagactgtagtattatagtaaagaaagagtttaattaatgcaagggtggccatgtggaagatgaagttagtactcaaatcagtcttcccaaaggctcaaaggttagggttttttagggatagtttggtgggcaggggactagggaatgggtgccactgaatggtcggagatggaatcatggggatatggaaaatggtcctcatgtgctgagttcacctctgggtggggccacaggactgatagagtcatgagtcacgactccaggtggggtagtctgaaaaacatctcaaagggccaatcttaggttctacaaaaatgatgttatctataggagcaactggtgaagttataaatcttatgacctccagaacaatggctagttatcatttaactgtgcctacatcttagcagaattcaggctcttctcataatcctaatattttggccttttattagctttaaaaaggtggttacattttggaaagggctattatcatcattgctttaaggttaaaccttaaacttagttactcccccaaagttagcttgatctaaacccagaaatgactgaggacagtctggagattgtaagtaagatggagtcaactatgtgagatttctcttactgacataattttgcgaaggcagcttcgccatcataggtctgtgggctaaaacagaggaaataagttcaacaaggctaagttcctccacttaacaagttcataattttggggtgggggtaatagaaaaatcagccagtgttttcaaaacaatgaggttaattacttcaaagaaatacatgtgacatgggcacagagtttaagtaacttgcccaagtgacatattttttaaagtgataaatcaagaacttgaatccaataatattacacacccatttctatggtttttccaacattatttcacactgcatttgtattaagcaattaatctcatggttttggaaatagcggcttatttgacaagtggaaaaatttaggcttattcatctctgccttctctgtgtcccagttttcaaatctgagaaataagaatcaggccacagtaccttgattttaaagcagcattgattttaaattaccgtacttaataataggttgtaaggggaagaaaaaccactacattaaatgtactcacagctgcaaaacaccataatttctgaaatactgaagtatgaaaaaatgtgaacataattatatatagttattagaggctgtgaagggtagaggggaaaggagaatagagagaggttggttaacacataaaaaattaaagctagatgggataaataagttctagtgttctatagcactataggggtaaatatggttaacaagaatttgttgtatatttcaaagctagaagagagaattccaaatgttcacaacacaaaaaaatggtaaacatttgaggtgatgaatatgctaatgatcattacacactgtatacatgtactgaaatattctgtattccataaatatgtacaattgtagccatcaactaataataaaaggaaaaaatggtgacatatagtatgtgaattttaataaagctatttttaaataaaa

SEQ ID NO: 683309 - DNA, 3097 bp, Homo sapiens
acttgctgcttgaagcaactgactaggccaacctaggccctgccttcctcctggagggccaagaaaatcaatatatctggcaagcctatgactggcatactcgttgggaagctctatgccggagaaccaattttgtgtaagtatactacacagcgagaatcatggaacccaaatagtttgcagccatcctgttttcttatcaacaaggcaagatatccacctgtttctgcatttgtaagcctcatgttattgacagagatgtcaatgaaccatgtccacttttataattttcaagaagaaaaactatcaaagatgtaaaattattacactcttccaagtcacttttgccagtgattcctaattttttcagcaatcaattttagctggtctgtgtccgttagcctttgcagtttgggctacagtgtgcaaacaagaatggtgaattaaactgaagacattaataacttatttaaagtagttgcattttacttcaaggacaaaagatgaagtccttgagtttgttcataggcttttggtatttgaattctctttaaagtgaaatatgaaaaaaatctgtgctggaaaggaagctacaaacagtttcatgaggttgtgtaatggaataacatctcatctcattattctaatatgggtttgtcccaactagtggataattcaaaacaactgctacttctctaatgccttgttattctttaataaaacagccgataattcaaagttagtttgttgaaactcacatatttttgtcttttatttcctgctctttgctcctctgattcattgggtttcaccataaagtaaaaaatagagctaagaattgtgataactaaaaatcagtaatagactgaaaactgcagcttaaaggaaactacatttaaatgtgcatttatatttctttatctatttattgctcatcctcatttatgttccagactccttcgagtaaacagctttggatccactctgtttctgctgcaggttttaataatagtagagtgtttctttctgcagttaatcaaaactacttcccaaggagactaagcatggcttttccacattcaaactgcagctgtttttcatatgatggtgttctagaaaggatcttcagtcggctagccctctgagaaggtgggcagagtaagagaaagttctgttgtccattattgcctaccatttctgttcctggaacacccaaaataaaacgataagtagttttgtccttacaaaaattctttcctccttcttttttctctaagtagtgtaaacactcagaaaccaattttttggctacccatcttttttggctattcatttctcccgagggaaaggaatgctaaggaagattttctgttatagtttgtctttcaccgtaacaatgacaatgacagaatcaagcacctcttccactcaataggtgtttgtcggatgcctattgtaattgcctgacaggtccttcctgcctactgcacaaacaaaaccaattcacagagactgtagtattatagtaaagaaagagtttaattaatgcaagggtggccatgtggaagatgaagttagtactcaaatcagtcttcccaaaggctcaaaggttagggttttttagggatagtttggtgggcaggggactagggaatgggtgccactgaatggtcrgagatggaatcatggggatatggaaaatggtcctcatgtgctgagttcacctctgggtggggccacaggactgatagagtcatgagtcacgactccaggtggggtagtctgaaaaacatctcaaagggccaatcttaggttctacaaaaatgatgttatctataggagcaactggtgaagttataaatcttatgacctccagaacaatggctagttatcatttaactgtgcctacatcttagcagaattcaggctcttctcataatcctaatattttggccttttattagctttaaaaaggtggttacattttggaaagggctattatcatcattgctttaaggttaaaccttaaacttagttactcccccaaagttagcttgatctaaacccagaaatgactgaggacagtctggagattgtaagtaagatggagtcaactatgtgagatttctcttactgacataattttgcgaaggcagcttcgccatcataggtctgtgggctaaaacagaggaaataagttcaacaaggctaagttcctccacttaacaagttcataattttggggtgggggtaatagaaaaatcagccagtgttttcaaaacaatgaggttaattacttcaaagaaatacatgtgacatgggcacagagtttaagtaacttgcccaagtgacatattttttaaagtgataaatcaagaacttgaatccaataatattacacacccatttctatggtttttccaacattatttcacactgcatttgtattaagcaattaatctcatggttttggaaatagcggcttatttgacaagtggaaaaatttaggcttattcatctctgccttctctgtgtcccagttttcaaatctgagaaataagaatcaggccacagtaccttgattttaaagcagcattgattttaaattaccgtacttaataataggttgtaaggggaagaaaaaccactacattaaatgtactcacagctgcaaaacaccataatttctgaaatactgaagtatgaaaaaatgtgaacataattatatatagttattagaggctgtgaagggtagaggggaaaggagaatagagagaggttggttaacacataaaaaattaaagctagatgggataaataagttctagtgttctatagcactataggggtaaatatggttaacaagaatttgttgtatatttcaaagctagaagagagaattccaaatgttcacaacacaaaaaaatggtaaacatttgaggtgatgaatatgctaatgatcattacacactgtatacatgtactgaaatattctgtattccataaatatgtacaattgtagccatcaactaataataaaaggaaaaaatggtgacatatagtatgtgaattttaataaagctatttttaaataaaa

SEQ ID NO: 683310 - DNA, 586 bp, Homo sapiens
tggacaccaactaaatcagtcttcaggctctggtggtagtagcagtggggtcctttcaggccccagagcaacttacactggctctagtgtttgtgagtctgggaggactgattcttgagccttcacgtggcttgcttagaaattaatagtaagagcagtggtcccagtgtgtgggtgggttcttaggacccttggtagctaatgtggtatgggtgatggtagtagcaatggtggtgcaacccactgggacccaagcaacgcatgttgttgttgctggaagctgtgatgggttgggtgggctagtctccagtcccacagccacctgtagcagggcagtaagcattgtcctaactgtgcttaggagagctttgtctcacttatccctttcccagctgggtggcagctgcaactatgtcacctcaaacttggcccaaggttggggcacagcccagtrttaagttctcagaatggcactctgggcctgtgaccagggagtgtaaggtcccttcaggcaagaagcatgggcaagaagctatgggaaaagcagtttacttgagtcttggtcttacagcagcccgtagtaggg

SEQ ID NO: 683311 - DNA, 586 bp, Homo sapiens
tggacaccaactaaatcagtcttcaggctctggtggtagtagcagtggggtcctttcaggccccagagcaacttacactggctctagtgtttgtgagtctgggaggactgattcttgagccttcacgtggcttgcttagaaattaatagtaagagcagtggtcccagtgtgtgggtgggttcttaggacccttggtagctaatgtggtatgggtgatggtagtagcaatggtggtgcaacccactgggacccaagcaacgcatgttgttgttgctggaagctgtgatgggttgggtgggctagtctccagtcccacagccacctgtagcagggcagtaagcattgtcctaactgtgcttaggagagctttgtctcacttatccctttcccagctgggtggcagctgcaactatgtcacctcaaacttggcccaaggttggggcacagcccagtattaagttctcagaatggcactctgggcctgtgaccagggagtgtaaggycccttcaggcaagaagcatgggcaagaagctatgggaaaagcagtttacttgagtcttggtcttacagcagcccgtagtaggg

SEQ ID NO: 683312 - DNA, 586 bp, Homo sapiens
tggacaccaactaaatcagtcttcaggctctggtggtagtagcagtggggtcctttcaggccccagagcaacttacactggctctagtgtttgtgagtctgggaggactgattcttgagccttcacgtggcttgcttagaaattaatagtaagagcagtggtcccagtgtgtgggtgggttcttaggacccttggtagctaatgtggtatgggtgatggtagtagcaatggtggtgcaacccactgggacccaagcaacgcatgttgttgttgctggaagctgtgatgggttgggtgggctagtctccagtcccacagccacctgtagcagggcagtaagcattgtcctaactgtgcttaggagagctttgtctcacttatccctttcccagctgggtggcagctgcaactatgtcacctcaaacttggcccaaggttggggcacagcccagtattaagttctcagaatggcactctgggcctgtgaccagggagtgtaaggtcccttcaggcaagaagcatgggcaagaagctatgggaaaagcagtttacttgagtcttggtcttayagcagcccgtagtaggg

SEQ ID NO: 683313 - DNA, 691 bp, Homo sapiens
ttgccactaaaagtgaaggcaaaactgcagttacttttgcaccaacctaatacttgcacatgaatctttatctcaggctttgcttctggagaactaaaaaaggcacatggtaattttctttaagtggcaacttggacagatttttgtagtaaggctatgattcctgatgagccatattctctcccatgctgcagagtgtttccttacaggcacagagtccacaraaatctacaactgcagagttttaatcaatatctcagtttgcaaacgaaggaaaaataataaatggatacggcactgaaggacagtgtgtaattgtgaaagtcttttctttggttactgataaaagtaattttattccagagaagaccaaattgatctgaaaaatctccttcggctccgaggagagtatgtttggattgttccttaaaagtcatgcggagacatgtacaaggcatgaatggggtgcaatggtacatctttgagcaattagctaagtaccgtagaacttgccaggactgtctgtcagattaaatgtggaacaatgcccagcttcaactctggcaaaaataaaacaaagcaaaaaaaaaaaaaaaaacagcaaatgaagtcaaaacaatgtaataaaccatgctaaactaagtacaataaaagtggaaggtattgaaaaagaataaagctttagtaaaga

SEQ ID NO: 683314 - DNA, 598 bp, Homo sapiens
tttctgttttgtccaaaaggaacctagagcaatacagggaaggggattctgagaaatgtagttctagcctagctaagatgataaggaaaaaaagctctgcaatcactcagccaagttgctctccagtaattgccctcagtcaaagtaagctgccccatccaaggctttgacccctctttggggacagcaaccactatggaggtacagaggcttagcctccttgcatcaattggaccaactgcgagcacctgatttcagagccacccaaactcctcaaggcctctgayacaactgtattgcaattcagtggctccttctgcccaatcctggtcctctcacccctcacagatgttcttcctgggaacgcctccccaaaagcctcctgcagcaactctcagaaactcagaattcgtttcccaacaaacccaacttactacaagtatatatagatattttatgatgccttgtttgtggtaacaaaatgaggagacaatgtgaatttcaattattggttgaatatattaggtatctacatcatagactatatgccagcaagaatatgtagtagttgctcactcaggtctcccttttgaagtgc

SEQ ID NO: 683315 - DNA, 862 bp, Homo sapiens
gaagaatgaattgttagagttgcctactcccctacttctgctgacatcatctctatttttacttatttgttttctggacattactagtagataacaaaagagcaatagagatgaaatatgaaacaaaacccctgcaattctttcctgctcctggactgcactttgcaataggcaacaacatgaacttttacaaattcaaaggtgaaatccaggagaaggtgtcctgaagggatttgtgggcatgctgttgctagacttraatacgttcgattccttttacatatctccattctaatgagaagaccctacattttcataattagtgtgccaatcttaccagcagaaagaagactaaaaataattttgtccctgcagtgtagcaatgtgcccaataaatgtatttgtttggatcctcagataattaattttggcagtatgtgttcattattcatccattgattaatttactcaacatataaactctatgtatatacatatatatacacatatatatacatatacgtatataagtatatacgtatatacgtatatgtatattatatatgtgtatatatacacatagtttatatattaaatatatacatatatacgtatatatacacgcgtatatgtacatatacgtgtatatacacgtatatacgtatatatacgtatacatatatctatatgtatagatatacgtatatacacatgtatctgtatatacatatatgtatatacacatgtatctgtatatatatatttattatgtatgtatacatttatacatatgtatgtatacatgtatatatgtatgtatacatgtatatataggtatgtatacatgtatgtatgtatgtat

SEQ ID NO: 683316 - DNA, 862 bp, Homo sapiens
gaagaatgaattgttagagttgcctactcccctacttctgctgacatcatctctatttttacttatttgttttctggacattactagtagataacaaaagagcaatagagatgaaatatgaaacaaaacccctgcaattctttcctgctcctggactgcactttgcaataggcaacaacatgaacttttacaaattcaaaggtgaaatccaggagaaggtgtcctgaagggatttgtgggcatgctgttgctagacttaaatacgttcgattccttttacatatctccattctaatgagaagaccctacattttcataattagtgtgccaatcttaccagcagaaagaagactaaaaataattttgtccctgcagtgtagcaatgtgcccaataaatgtatttgtttggatcctcagataattaattttggcagtatgtgttcattattcatccattgattaatttactcaacatataaactctatgtatatacatatatatacacatatatatacatatacgtatataagtatatacgtatatacgtatatgtatattatatatgtgtatatatacacatagtttatatattaaatatatacatatatacgtatatatacacgcgtatatrtacatatacgtgtatatacacgtatatacgtatatatacgtatacatatatctatatgtatagatatacgtatatacacatgtatctgtatatacatatatgtatatacacatgtatctgtatatatatatttattatgtatgtatacatttatacatatgtatgtatacatgtatatatgtatgtatacatgtatatataggtatgtatacatgtatgtatgtatgtat

SEQ ID NO: 683317 - DNA, 862 bp, Homo sapiens
gaagaatgaattgttagagttgcctactcccctacttctgctgacatcatctctatttttacttatttgttttctggacattactagtagataacaaaagagcaatagagatgaaatatgaaacaaaacccctgcaattctttcctgctcctggactgcactttgcaataggcaacaacatgaacttttacaaattcaaaggtgaaatccaggagaaggtgtcctgaagggatttgtgggcatgctgttgctagacttaaatacgttcgattccttttacatatctccattctaatgagaagaccctacattttcataattagtgtgccaatcttaccagcagaaagaagactaaaaataattttgtccctgcagtgtagcaatgtgcccaataaatgtatttgtttggatcctcagataattaattttggcagtatgtgttcattattcatccattgattaatttactcaacatataaactctatgtatatacatatatatacacatatatatacatatacgtatataagtatatacgtatatacgtatatgtatattatatatgtgtatatatacacatagtttatatattaaatatatacatatatacgtatatatacacgcgtatatgtacatatacgtgtatatacacgtatatacgtrtatatacgtatacatatatctatatgtatagatatacgtatatacacatgtatctgtatatacatatatgtatatacacatgtatctgtatatatatatttattatgtatgtatacatttatacatatgtatgtatacatgtatatatgtatgtatacatgtatatataggtatgtatacatgtatgtatgtatgtat

SEQ ID NO: 683318 - DNA, 862 bp, Homo sapiens
gaagaatgaattgttagagttgcctactcccctacttctgctgacatcatctctatttttacttatttgttttctggacattactagtagataacaaaagagcaatagagatgaaatatgaaacaaaacccctgcaattctttcctgctcctggactgcactttgcaataggcaacaacatgaacttttacaaattcaaaggtgaaatccaggagaaggtgtcctgaagggatttgtgggcatgctgttgctagacttaaatacgttcgattccttttacatatctccattctaatgagaagaccctacattttcataattagtgtgccaatcttaccagcagaaagaagactaaaaataattttgtccctgcagtgtagcaatgtgcccaataaatgtatttgtttggatcctcagataattaattttggcagtatgtgttcattattcatccattgattaatttactcaacatataaactctatgtatatacatatatatacacatatatatacatatacgtatataagtatatacgtatatacgtatatgtatattatatatgtgtatatatacacatagtttatatattaaatatatacatatatacgtatatatacacgcgtatatgtacatatacgtgtatatacacgtatatacgtatatatacgtatacatatatctatatgtatagatatacgtatatacacatgtatctgtatatacatatatgtatatacacatgtatctgtatatatatatttattatgtatgtatacatttatacatatgtatgtatacatgtatatatgtatgtatacatgtatatataggtatgtatacatgtatrtatgtatgtat

SEQ ID NO: 683319 - DNA, 862 bp, Homo sapiens
gaagaatgaattgttagagttgcctactcccctacttctgctgacatcatctctatttttacttatttgttttctggacattactagtagataacaaaagagcaatagagatgaaatatgaaacaaaacccctgcaattctttcctgctcctggactgcactttgcaataggcaacaacatgaacttttacaaattcaaaggtgaaatccaggagaaggtgtcctgaagggatttgtgggcatgctgttgctagacttaaatacgttcgattccttttacatatctccattctaatgagaagaccctacattttcataattagtgtgccaatcttaccagcagaaagaagactaaaaataattttgtccctgcagtgtagcaatgtgcccaataaatgtatttgtttggatcctcagataattaattttggcagtatgtgttcattattcatccattgattaatttactcaacatataaactctatgtatatacatatatatacacatatatatacatatacgtatataagtatatacgtatatacgtatatgtatattatatatgtgtatatatacacatagtttatatattaaatatatacatatatacgtatatatacacgcgtatatgtacatatacgtgtatatacacgtatatacgtatatatacgtatacatatatctatatgtatagatatacgtatatacacatgtatctgtatatacatatatgtatatacacatgtatctgtatatatatatttattatgtatgtatacatttatacatatgtatgtatacatgtatatatgtatgtatacatgtatatataggtatgtatacatgtatgyatgtatgtat

SEQ ID NO: 683320 - DNA, 2178 bp, Homo sapiens
tggcatactggaatataaagctactactacttccgttgttccatagagctttccaatgtaaaatggggctcatctcctttcaccctaacccagcatctcctccttatttcttcagtccattcttgatgtgaatattttcctcmtcagtcaagtttgaaaacttagagccatttttgtcctttcatttccttttctttctatatccattggttatcaaatgccttaagttcagcatctaccatctcttgtagcctcttcctctttctgtttctgctactatcatctgagtttcttctcacactaatagcagctcaaataggcaaacaggaccagatctgagttttgggagtttggcacttttacaattttagagggccatctttagggaaaaaaaaaaatagtaatatgaatacaaaatgaaacatttattcagaatgagaaaataagccacaagaaatcaacaatcttagaacttcttatttctttgttttgagatctctgatggcaatttaccagaaatttttacatacaggtgattcctgactgtaactcaaaacccttccccgctctaaactccctgcaactccacctactcacaggggccatgcaaagaagtaaccctaatactcaggcttccgtagctttagaaacttagagtctctactatcaattctttttccatttttagtaaaggaaataaattaagcaatggaaggtctaacaaattattcagagtttcatggaggtggggagaggttacgaacctgggacgttttaaacactcagattcctgaattataacccaatattctaaataaaaacctgaggacatctgtatttttacaaggctccacaggtgaaatggatgcaactgacctatgaattacaaatttgaaaaccactgctctagctcaactgcatgaaaagtgacctgatcctctgtctccaaaggttaaagctttcagagtgcaacagagtcctccaatatttcctgggcactgtggtctgtacaatgcaaaattcagaagctataaaaaatggaggtgaaaagggccctgattaaagactgaaacagaagcaactgcttttctctctgtgcagctaccatactggtcttgattcaagtaaagcaatgtgcctgatgagaatcactgaagcacagaaaatggtctggtactgagagatgagcaaatgaatcccaagtatcaggagtacacaggaccagaaaagaagtatttccaatacccacgcctgactaaagatttcactagcctcttagctcaaagggacaatagataaacatcaggtctacactgcaaatttgcctgcatattaattataatttatttcttctatctttgtccttgcattagactgtttaattccgtgtatgaattcattttgaagtgtagagtccatcgttctcagtaattagctttacaaagtctatcatcgaaaatattgttttagattctttgaatacagattctatgaaagagaaaaatccttaaaagtgggagactcggccgggcgcagtggctcacgcctgtaaccccatcactttgggaggctgaggcgggaggatcacgaggtcacgagatcgagaccatcttggctaacacagtgaaaccccgtctctactaaaaatacaaaaaattagccaggcgtggtggcgggcgcctatagtcccagctactcaggaggctgaggcaggagaatggggtgaacccgggaggcggagcttgcagtgagcagagatcacgccattgcactccagcctgggcgacagagcgagactcgtctcaaaaaaaagaaaaaaaaaagtggaagaccaataagaattattcagattctactggccagagcaggaagctcagctaccagcatttatctttagactcctaccacatatgattgccccaactgaaacacaggtcagagagtctgctgtacttctaaagtgatgagaacaaatcttcctgtcactttatgtcacagtcatacagttcccgaatagcaacccatagatagagcccttggcaaatttgttatcagcggtgtgtgtttacacacatcaagtgtctgggaaataaagaaaaaaaggaaaatattgacagtgtagaggatgttctttcttctggaaactcataagattttgaaacacagctgaatattttg

SEQ ID NO: 683321 - DNA, 2178 bp, Homo sapiens
tggcatactggaatataaagctactactacttccgttgttccatagagctttccaatgtaaaatggggctcatctcctttcaccctaacccagcatctcctccttatttcttcagtccattcttgatgtgaatattttcctcctcagtcaagtttgaaaacttagagccatttttgtcctttcatttccttttctttctatatccattggttatcaaatgccttaagttcagcatctaccatctcttgtagcctcttcctctttctgtttctgctactatcatctgagtttcttctcacactaatagcagctcaaataggcaaacaggaccagatctgagttttgggagtttggcacttttacaattttagagggccatctttagggaaaaaaaaaaatagtaatatgaatacaaaatgaaacatttattcagaatgagaaaataagccacaagaaatcaacaatcttagaacttcttatttctttgttttgagatctctgatggcaatttaccagaaatttttacatacaggtgattcctgactgtaactcaaaacccttccccgctctaaactccctgcaactccacctactcacaggggccatgcaaagaagtaaccctaatactcaggcttccgtagctttagaaacttagagtctctactatcaattctttttccatttttagtaaaggaaataaattaagcaatggaaggtctaacaaattattcagagtttcatggaggtggggagaggttacgaacctgggacgttttaaacactcagattcctgaattataacccaatattctaaataaaaacctgaggacatctgtatttttacaaggctccacaggtgaaatggatgcaactgacctatgaattacaaatttgaaaaccactgctctagctcaactgcatgaaaagtgacctgatcctctgtctccaaaggttaaagctttcagagtgcaacagagtcctccaatatttcctgggcactgtggtctgtacaatgcaaaattcagaagctataaaaaatggaggtgaaaagggccctgattaaagactgaaacagaagcaactgcttttctctctgtgcagctaccatactggtcttgattcaagtaaagcaatgtgcctgatgagaatcactgaagcacagaaaatggtctggtactgagagatgagcaaatgaatcccaagtatcaggagtacacaggaccagaaaagaagtatttccaatacccacgcctgactaaagatttcactagcctcttagctcaaagggacaatagataaacatcaggtctacactgcaaatttgcctgcatattaattataatttatttcttctatctttgtccttgcattagactgtttaattccgtgtatgaattcattttgaagtgtagagtccatcgttctcagtaattagctttacaaagtctatcatcgaaaatattgttttagattctttgaatacagattctatgaaagagaaaaatccttaaaagtgggagactcggccgggcgcagtggctcacgcctgtaaccccatcactttgggaggctgaggcgggaggatcacgaggtcacgagatcgagaccatcttggctaacacagtgaaaccccgtctctactaaaaatacaaaaaattagccrggcgtggtggcgggcgcctatagtcccagctactcaggaggctgaggcaggagaatggggtgaacccgggaggcggagcttgcagtgagcagagatcacgccattgcactccagcctgggcgacagagcgagactcgtctcaaaaaaaagaaaaaaaaaagtggaagaccaataagaattattcagattctactggccagagcaggaagctcagctaccagcatttatctttagactcctaccacatatgattgccccaactgaaacacaggtcagagagtctgctgtacttctaaagtgatgagaacaaatcttcctgtcactttatgtcacagtcatacagttcccgaatagcaacccatagatagagcccttggcaaatttgttatcagcggtgtgtgtttacacacatcaagtgtctgggaaataaagaaaaaaaggaaaatattgacagtgtagaggatgttctttcttctggaaactcataagattttgaaacacagctgaatattttg

SEQ ID NO: 683322 - DNA, 2178 bp, Homo sapiens
tggcatactggaatataaagctactactacttccgttgttccatagagctttccaatgtaaaatggggctcatctcctttcaccctaacccagcatctcctccttatttcttcagtccattcttgatgtgaatattttcctcctcagtcaagtttgaaaacttagagccatttttgtcctttcatttccttttctttctatatccattggttatcaaatgccttaagttcagcatctaccatctcttgtagcctcttcctctttctgtttctgctactatcatctgagtttcttctcacactaatagcagctcaaataggcaaacaggaccagatctgagttttgggagtttggcacttttacaattttagagggccatctttagggaaaaaaaaaaatagtaatatgaatacaaaatgaaacatttattcagaatgagaaaataagccacaagaaatcaacaatcttagaacttcttatttctttgttttgagatctctgatggcaatttaccagaaatttttacatacaggtgattcctgactgtaactcaaaacccttccccgctctaaactccctgcaactccacctactcacaggggccatgcaaagaagtaaccctaatactcaggcttccgtagctttagaaacttagagtctctactatcaattctttttccatttttagtaaaggaaataaattaagcaatggaaggtctaacaaattattcagagtttcatggaggtggggagaggttacgaacctgggacgttttaaacactcagattcctgaattataacccaatattctaaataaaaacctgaggacatctgtatttttacaaggctccacaggtgaaatggatgcaactgacctatgaattacaaatttgaaaaccactgctctagctcaactgcatgaaaagtgacctgatcctctgtctccaaaggttaaagctttcagagtgcaacagagtcctccaatatttcctgggcactgtggtctgtacaatgcaaaattcagaagctataaaaaatggaggtgaaaagggccctgattaaagactgaaacagaagcaactgcttttctctctgtgcagctaccatactggtcttgattcaagtaaagcaatgtgcctgatgagaatcactgaagcacagaaaatggtctggtactgagagatgagcaaatgaatcccaagtatcaggagtacacaggaccagaaaagaagtatttccaatacccacgcctgactaaagatttcactagcctcttagctcaaagggacaatagataaacatcaggtctacactgcaaatttgcctgcatattaattataatttatttcttctatctttgtccttgcattagactgtttaattccgtgtatgaattcattttgaagtgtagagtccatcgttctcagtaattagctttacaaagtctatcatcgaaaatattgttttagattctttgaatacagattctatgaaagagaaaaatccttaaaagtgggagactcggccgggcgcagtggctcacgcctgtaaccccatcactttgggaggctgaggcgggaggatcacgaggtcacgagatcgagaccatcttggctaacacagtgaaaccccgtctctactaaaaatacaaaaaattagccaggcgtggtggcgggcgcctatagtcccagctactcaggaggctgaggcaggagaatggggtgaacccgggaggcggagcttgcagtgagcagagatcacgccattgcactccagcctgggcgacagagcgagactcgtctcaaaaaaaagaaaaaaaaaagtggaagaccaataagaattattcagattctactggccagagcaggaagctcagctaccagcatttatctttagaytcctaccacatatgattgccccaactgaaacacaggtcagagagtctgctgtacttctaaagtgatgagaacaaatcttcctgtcactttatgtcacagtcatacagttcccgaatagcaacccatagatagagcccttggcaaatttgttatcagcggtgtgtgtttacacacatcaagtgtctgggaaataaagaaaaaaaggaaaatattgacagtgtagaggatgttctttcttctggaaactcataagattttgaaacacagctgaatattttg

SEQ ID NO: 683323 - DNA, 2178 bp, Homo sapiens
tggcatactggaatataaagctactactacttccgttgttccatagagctttccaatgtaaaatggggctcatctcctttcaccctaacccagcatctcctccttatttcttcagtccattcttgatgtgaatattttcctcctcagtcaagtttgaaaacttagagccatttttgtcctttcatttccttttctttctatatccattggttatcaaatgccttaagttcagcatctaccatctcttgtagcctcttcctctttctgtttctgctactatcatctgagtttcttctcacactaatagcagctcaaataggcaaacaggaccagatctgagttttgggagtttggcacttttacaattttagagggccatctttagggaaaaaaaaaaatagtaatatgaatacaaaatgaaacatttattcagaatgagaaaataagccacaagaaatcaacaatcttagaacttcttatttctttgttttgagatctctgatggcaatttaccagaaatttttacatacaggtgattcctgactgtaactcaaaacccttccccgctctaaactccctgcaactccacctactcacaggggccatgcaaagaagtaaccctaatactcaggcttccgtagctttagaaacttagagtctctactatcaattctttttccatttttagtaaaggaaataaattaagcaatggaaggtctaacaaattattcagagtttcatggaggtggggagaggttacgaacctgggacgttttaaacactcagattcctgaattataacccaatattctaaataaaaacctgaggacatctgtatttttacaaggctccacaggtgaaatggatgcaactgacctatgaattacaaatttgaaaaccactgctctagctcaactgcatgaaaagtgacctgatcctctgtctccaaaggttaaagctttcagagtgcaacagagtcctccaatatttcctgggcactgtggtctgtacaatgcaaaattcagaagctataaaaaatggaggtgaaaagggccctgattaaagactgaaacagaagcaactgcttttctctctgtgcagctaccatactggtcttgattcaagtaaagcaatgtgcctgatgagaatcactgaagcacagaaaatggtctggtactgagagatgagcaaatgaatcccaagtatcaggagtacacaggaccagaaaagaagtatttccaatacccacgcctgactaaagatttcactagcctcttagctcaaagggacaatagataaacatcaggtctacactgcaaatttgcctgcatattaattataatttatttcttctatctttgtccttgcattagactgtttaattccgtgtatgaattcattttgaagtgtagagtccatcgttctcagtaattagctttacaaagtctatcatcgaaaatattgttttagattctttgaatacagattctatgaaagagaaaaatccttaaaagtgggagactcggccgggcgcagtggctcacgcctgtaaccccatcactttgggaggctgaggcgggaggatcacgaggtcacgagatcgagaccatcttggctaacacagtgaaaccccgtctctactaaaaatacaaaaaattagccaggcgtggtggcgggcgcctatagtcccagctactcaggaggctgaggcaggagaatggggtgaacccgggaggcggagcttgcagtgagcagagatcacgccattgcactccagcctgggcgacagagcgagactcgtctcaaaaaaaagaaaaaaaaaagtggaagaccaataagaattattcagattctactggccagagcaggaagctcagctaccagcatttatctttagactcctaccacatatgattgccccaactgaaacacaggtcagagagtctgctgtacttctaaagtgatgagaacaaatcttcctgtcactttatgtcacagtcatacagttcccgaatagcaacccatagatagagcccttggcaaatttgttatcagcggtgtgtgtttacacacrtcaagtgtctgggaaataaagaaaaaaaggaaaatattgacagtgtagaggatgttctttcttctggaaactcataagattttgaaacacagctgaatattttg

SEQ ID NO: 683324 - DNA, 781 bp, Homo sapiens
tattctctcttctctttacttcccctcaaatctctaaaataaccatcttctaagaatcttctatttttttcccactggtatctacatcattttttgataaaagttagagtctatccagtctctttgatattcttgtctctcaattttgatttaaargtgatattatttttggaatttattttctttagactggtgtgatataagcaacttgaattcataaagataaatcagtctcagttcattgtttgacatatccccaagaatcacactacagttaactctgtgattagcatcctctgctcagtggtatttatcataagctttatagcacaatacaagagatatggatgaagacacttaataagtgttggttgaaagaatagtgggtatatcagtgaattgctgataaaaagatatcaagaaaagaaactgtgaaggactgacatagcttactcccctaaccccaaatggcaagtagcagggtttgtttactgattccagaatttaaaatatttaactttagtgtagaatagatggtgtaacctgttaaagctagccataacaaagttgcacaaactgggtggcttaagcaacagacacttattgtcttactgtaagacaagaattttgattctgggagctcaaaatcaaggtgtcagtagagtcagttccttctgagggctgtaagggagctgttccctgcctctccctagcatctggtagcctgatatgctcatggtaaaagacattgtcccatcttccctatatgcttgtctttttt

SEQ ID NO: 683325 - DNA, 787 bp, Homo sapiens
cagggcttcagggtcaaacaaaaactatagcaccagctctcctggctctcctgcttgcagactcaccatgtagatcttgcaatttgtttgactctataattgtgtgccagtttcttataataatctctgtgtgacacacacacacacacacacacacatgcacacacacatacatatatgattggttctgtttctctggagaaccttgactaatacaccagtcatatgggttaggttggcctcctaatccaatctgacctcatcctaactaattacatctatagtcacaaaatttccaaatacagtcacaatctgaaagactagaggctaggacttcagcatgtgaatttgggagaacaccatttaacctatcactgatggaatatattttatttaaatagcaagattccataataaggagccactgtataatggaaggagagatttcttatccatttgtctgtgatttgcttgaggacataggagratttaatttacattgtcatctacatccattagcacaggacatatgacaaaattagtgctaagtaaaggttgaaggaatgaatgcatgaattatgtattatttgtattcactttccagggctgccatagcaacgtaccacatattgggtggcttaaataacagcaatttattttctcataattgtagaggctggaagtcaaagatcaagatgtgaacaagatagatttcttctgagggctctctctttggcttgtagatggccatctgcctgctgtgtcttcacatggttgtccctctgta

SEQ ID NO: 683326 - DNA, 631 bp, Homo sapiens
ttcttaacaatatttgaataaggaaattatattttcactttaccctaggccctttctgtactcaaatacctatgcaaggcaaagatgtagattcaaatttcatataatgctcattgttcagggaaaataggtgtagtcttgtctctttattcaatttaacattgaggtagaaaatacagcacataaaacttaagtgtacactctgatgcatttgtacatgcacacacacacagttgtaaccaccaatcattttaagatacagacattatcagctgatcatctgtctcyctcatccttcttcccactcaatctctgcaccttctatgggtaaatattatgctgatatatcaccaaattttgaacttaatgtaaacggaatcgtaaacaatatagctttttgtgcttttttggcattctatttgtgagatttatccaagatctaacagagatgtatttttttaaagccgtataatattcaattatatgaatatatcacaatttatccattctattgcagtgggtgtctgggttgtttctaatatttggttattgtgaatattaactattgcgaacattcttgcacatatcttttgatagatatatgcactattttcttttgggtatataacta

SEQ ID NO: 683327 - DNA, 631 bp, Homo sapiens
ttcttaacaatatttgaataaggaaattatattttcactttaccctaggccctttctgtactcaaatacctatgcaaggcaaagatgtagattcaaatttcatataatgctcattgttcagggaaaataggtgtagtcttgtctctttattcaatttaacattgaggtagaaaatacagcacataaaacttaagtgtacactctgatgcatttgtacatgcacacacacacagttgtaaccaccaatcattttaagatacagacattatcagctgatcatctgtctccctcatccttcttcccactcaatctctgcaccttctatgggtaaatattatgctgatatatcaccaaattttgaacttaatgtaaacggaatcgtaaacaatatagctttttgtgcttttttggcattmtatttgtgagatttatccaagatctaacagagatgtatttttttaaagccgtataatattcaattatatgaatatatcacaatttatccattctattgcagtgggtgtctgggttgtttctaatatttggttattgtgaatattaactattgcgaacattcttgcacatatcttttgatagatatatgcactattttcttttgggtatataacta

SEQ ID NO: 683328 - DNA, 642 bp, Homo sapiens
taaacaaatacatggacaaagtaaaaatctatggtaaactcttcagtttgttccctccttgtcacactcctcaactataaaagggctrtcactattttgagtcttttgattataaaatatgtttcttgaagaaaataatacaaagcacaggctagccaaaaaataaaataaaaaacaatcacatgtaattttaccagagatatctacagtaaacctactgggataatctgccacatgatatacataatacttgtatctacatgcatttgtatttgttatcacaatgagattacactgtaatactctctgtaactcttttacactccataatatctttgtatctcttcttataaatcagtacaaccactttactcatgaaaactacagtaccctgactactgaatggctctttagtagtatgttgttggaggcacattaatttatttagacagtctctttttgggggcatataaaggtttatttatttgttttttttttcctattataggcaatgctgtataacaatctttatttagttagatttaggtgactatctacttattcttaccatcagacatttctattagaattttggggggcaaaggcatcagtatttttatggtagatagtgccaaattaccc

SEQ ID NO: 683329 - DNA, 642 bp, Homo sapiens
taaacaaatacatggacaaagtaaaaatctatggtaaactcttcagtttgttccctccttgtcacactcctcaactataaaagggctatcactattttgagtcttttgattataaaatatgtttcttgaagaaaataatacaaagcacaggctagccaaaaaataaaataaaaaacaatcacatgtaattttaccagagatatctacagtaaacctaytgggataatctgccacatgatatacataatacttgtatctacatgcatttgtatttgttatcacaatgagattacactgtaatactctctgtaactcttttacactccataatatctttgtatctcttcttataaatcagtacaaccactttactcatgaaaactacagtaccctgactactgaatggctctttagtagtatgttgttggaggcacattaatttatttagacagtctctttttgggggcatataaaggtttatttatttgttttttttttcctattataggcaatgctgtataacaatctttatttagttagatttaggtgactatctacttattcttaccatcagacatttctattagaattttggggggcaaaggcatcagtatttttatggtagatagtgccaaattaccc

SEQ ID NO: 683330 - DNA, 660 bp, Homo sapiens
gtcagagccggcacacacaggggattgggcttcctgtgctgcccacccctccacattctctccagggcaggccctggcagagctggatgcttcccgctgacagatagggccaccgtgcagggagcagcacctaactcgggccgctcaggagtggaccatgcacaatcccagcctcctcaaacatgctccagggaggtggcccttacagaggagagaacacctggcattaggaagcggtgctgtgtttttgcagtgggtccttccacaatgagcatggagatcaccaccaactctgtcccaatgccctgacacttatttccaaggaccccctgaagggtctcctgaacatccctttattacaacaaagtcttcttgagccccaccttggattcagcaaacaggtgacaccagaggctggtggagaccactgcagagtggccaggtgctgatctcccactgccgcacccctaggactactgtacttatctgcagccaccacagcagagtcctgcagaggactgcccccagccagcatgctctccataccttgtaaatgaaagctcgcacatccaagtttcgactcagcaacacaatcagagaatacacttttgaccctggcaggctacagagttcctccrctgcgatccaagatttttcccc

SEQ ID NO: 683331 - DNA, 590 bp, Homo sapiens
tgttaaattgaaataatgaaaatgaaatgtatcaaaaatgtcttccagaaattaacttggacaggcagcagacaaacaaatggagcatagaaagacagctctctacacattaaaaatataaaatatttaggctccatgacctcatcttctgggatggggctcttagtccttactagaggagatggtcctaaatataccactagttcactgcattagaaaaacccgtgagccctccttgaacatggacctgaccctggcccactgtctgctgagtttgttcctacccycaaactctctctctttttctcctagttctccaactaggagacctagaaaaagacctagaaggagcaagtgtaggactcccaagtcctggttgctacaccagttctttaagaacccaagagggccagtggatgtatgtggccagtcggtgcccactgtcaccatccccttctcctgttagcatgccagcagaaactgggtgcgttttttagttttctagggctgctatagcaaagaaccacaaactgggttacttaacagaaatgtattttctcactgttctggaggccagaagtctgaaatca

SEQ ID NO: 683332 - DNA, 590 bp, Homo sapiens
tgttaaattgaaataatgaaaatgaaatgtatcaaaaatgtcttccagaaattaacttggacaggcagcagacaaacaaatggagcatagaaagacagctctctacacattaaaaatataaaatatttaggctccatgacctcatcttctgggatggggctcttagtccttactagaggagatggtcctaaatataccactagttcactgcattagaaaaacccgtgagccctccttgaacatggacctgaccctggcccactgtctgctgagtttgttcctacccccaaactctctctctttttctcctagttctccaactaggagacctagaaaaagacctagaaggagcaagtgtaggactcccaagtcctggttgctacaccagttctttaagaacccaagagggccagtggatgtatgtggccagtcrgtgcccactgtcaccatccccttctcctgttagcatgccagcagaaactgggtgcgttttttagttttctagggctgctatagcaaagaaccacaaactgggttacttaacagaaatgtattttctcactgttctggaggccagaagtctgaaatca

SEQ ID NO: 683333 - DNA, 2395 bp, Homo sapiens
aattgatggtagtgatctcaacacagcatgattctacgtcattccagtgtgctgtattttgctagtgtgagctgccatgataagcatacacccacacccatagcagggacaaaggtgcagcatcgtctggttatttccagagtctttgcccattttgtagcaatgtctacactgccatcaaaagcatttaggaagagtttttggatgtgccatttttcttatgccacagggcaggggactgtgattcccctaagtgacccaggagtgccagcttccataggcctcctactcgcggacaccaactcagcctgcacagcagcccctgccacagatgtgagcccaggcccacacaatgcacagtcagccctgtttcagtttcaatatccagaggttttcaatagcccagagggttggccacaaacacatattggagtctatttcttttcaggcattgaacatcgtttgaagaaacacaaatagaattttacttcgtttgatggaagatggccatctgctctgcctaaggggaccgagtgtgcattgctctgtcctatgtgggttccctcagatgagtgtgcatcactctgtcctatgtgggctccctcagaatgtttttctatgttctcgctttcctgtcctgagggctcattttcaccccagctcagtgatcccaggggtgcctacaacagactcccacctccctttcttccaagaatctgactcagggcccacctctcccaggggtggaagcttctgtgggttttcaggattaacttcccagcccaaggcattggttccttgctattaggagcccagcgaccctgcactgccctccacaccagctcccatctgcactgtctacaccattgacactggtggcaccatttgccttagcgtgacctcctatgctccttgtctgtctgaaagccaatgccttgacccagctcagttgccctgggtgccccttcacaccagcagcccctcccagggcacggctgtaggcgggtccctgcacaagcaggtatctggctggtccttaagtgcgagctgggcttctgcactcactcatgctgtcttctctctttttttcattgtcttgggatcctagaaccctgtgcccaccccagcaccatcctgaaccttcaggaaggggagcgggaggtagactaaccagactgcatcttaagcaagaatcattattttttcaaatggactcacctctgctctgtgcatttcttcctggatggtgcctggtgaggggcacgacgcgagaaagcacaggttgttccctgggaacgttgctgctcaagaaggacagtgctgctggcgagtgactctgggatgttggccacattgctcaggatggtgccacagccttgtttcacctggtagcttccaccygcttctgtgggggtagagagcaggccactgcagaggagggagcaggtggaaccggcacatggcagagggaggacacacactaagtgggatgtggggactgcacatcatcataaaagcagaggactcagcaggtagaagtggatgtgcgggccacctccttgggtgcccagcatccaagttgtttgctggcttggccaggtagggatgcacaatgcccgtaggcaggaccctttggagacagcacctttgtctccagattcctgctgagtatgagccagatgaaggctacttcctccctcctgagtcccttgcctgggccagtccctacagatgagagctgctgcaggtgaagcttacagtctttctcagcagcctggctctgctgacgatggagcggcagctgcattcctgcaggcagcacatcgtatttctacagctcggtctccagggagcatggactgtcctctgcagagggacggctgcctttaccctccactagtcttaaccatacagccttccagggacccccacagaggctgagcttgtcagtaacagtactcagtcactcctgccatgccatggttgcctcgctggccacatcgttatgacatgtggagaggacactgatggggtcaggatttagccagcatgtcatgagaaagcacgggttgttccctgggagtgttgctacacaagaaggaccacactcctggtgagtgactctgggatggtggccacattgctcaggatggtgccacagccttgtttcacctggcagcttccacctgctcctgtgggggcagagagcaaagtgttatctcaagcagtgaattgggctactttaatggcactgaaaatcagaagggatggatgtgcccagcctgtgatggagaggagcacagtggctcagccccatctgggggacaataccctgagcaaggcaaagcccccctgcaggctgtgaggccccagggaaaagctctccatgcggcct

SEQ ID NO: 683334 - DNA, 2395 bp, Homo sapiens
aattgatggtagtgatctcaacacagcatgattctacgtcattccagtgtgctgtattttgctagtgtgagctgccatgataagcatacacccacacccatagcagggacaaaggtgcagcatcgtctggttatttccagagtctttgcccattttgtagcaatgtctacactgccatcaaaagcatttaggaagagtttttggatgtgccatttttcttatgccacagggcaggggactgtgattcccctaagtgacccaggagtgccagcttccataggcctcctactcgcggacaccaactcagcctgcacagcagcccctgccacagatgtgagcccaggcccacacaatgcacagtcagccctgtttcagtttcaatatccagaggttttcaatagcccagagggttggccacaaacacatattggagtctatttcttttcaggcattgaacatcgtttgaagaaacacaaatagaattttacttcgtttgatggaagatggccatctgctctgcctaaggggaccgagtgtgcattgctctgtcctatgtgggttccctcagatgagtgtgcatcactctgtcctatgtgggctccctcagaatgtttttctatgttctcgctttcctgtcctgagggctcattttcaccccagctcagtgatcccaggggtgcctacaacagactcccacctccctttcttccaagaatctgactcagggcccacctctcccaggggtggaagcttctgtgggttttcaggattaacttcccagcccaaggcattggttccttgctattaggagcccagcgaccctgcactgccctccacaccagctcccatctgcactgtctacaccattgacactggtggcaccatttgccttagcgtgacctcctatgctccttgtctgtctgaaagccaatgccttgacccagctcagttgccctgggtgccccttcacaccagcagcccctcccagggcacggctgtaggcgggtccctgcacaagcaggtatctggctggtccttaagtgcgagctgggcttctgcactcactcatgctgtcttctctctttttttcattgtcttgggatcctagaaccctgtgcccaccccagcaccatcctgaaccttcaggaaggggagcgggaggtagactaaccagactgcatcttaagcaagaatcattattttttcaaatggactcacctctgctctgtgcatttcttcctggatggtgcctggtgaggggcacgacgcgagaaagcacaggttgttccctgggaacgttgctgctcaagaaggacagtgctgctggcgagtgactctgggatgttggccacattgctcaggatggtgccacagccttgtttcacctggtagcttccacctgcttctgtgggggtagagagcaggccactgcagaggagggagcaggtggaaccggcacatggcagagggaggacacacactaagtgggatgtggggamtgcacatcatcataaaagcagaggactcagcaggtagaagtggatgtgcgggccacctccttgggtgcccagcatccaagttgtttgctggcttggccaggtagggatgcacaatgcccgtaggcaggaccctttggagacagcacctttgtctccagattcctgctgagtatgagccagatgaaggctacttcctccctcctgagtcccttgcctgggccagtccctacagatgagagctgctgcaggtgaagcttacagtctttctcagcagcctggctctgctgacgatggagcggcagctgcattcctgcaggcagcacatcgtatttctacagctcggtctccagggagcatggactgtcctctgcagagggacggctgcctttaccctccactagtcttaaccatacagccttccagggacccccacagaggctgagcttgtcagtaacagtactcagtcactcctgccatgccatggttgcctcgctggccacatcgttatgacatgtggagaggacactgatggggtcaggatttagccagcatgtcatgagaaagcacgggttgttccctgggagtgttgctacacaagaaggaccacactcctggtgagtgactctgggatggtggccacattgctcaggatggtgccacagccttgtttcacctggcagcttccacctgctcctgtgggggcagagagcaaagtgttatctcaagcagtgaattgggctactttaatggcactgaaaatcagaagggatggatgtgcccagcctgtgatggagaggagcacagtggctcagccccatctgggggacaataccctgagcaaggcaaagcccccctgcaggctgtgaggccccagggaaaagctctccatgcggcct

SEQ ID NO: 683335 - DNA, 2395 bp, Homo sapiens
aattgatggtagtgatctcaacacagcatgattctacgtcattccagtgtgctgtattttgctagtgtgagctgccatgataagcatacacccacacccatagcagggacaaaggtgcagcatcgtctggttatttccagagtctttgcccattttgtagcaatgtctacactgccatcaaaagcatttaggaagagtttttggatgtgccatttttcttatgccacagggcaggggactgtgattcccctaagtgacccaggagtgccagcttccataggcctcctactcgcggacaccaactcagcctgcacagcagcccctgccacagatgtgagcccaggcccacacaatgcacagtcagccctgtttcagtttcaatatccagaggttttcaatagcccagagggttggccacaaacacatattggagtctatttcttttcaggcattgaacatcgtttgaagaaacacaaatagaattttacttcgtttgatggaagatggccatctgctctgcctaaggggaccgagtgtgcattgctctgtcctatgtgggttccctcagatgagtgtgcatcactctgtcctatgtgggctccctcagaatgtttttctatgttctcgctttcctgtcctgagggctcattttcaccccagctcagtgatcccaggggtgcctacaacagactcccacctccctttcttccaagaatctgactcagggcccacctctcccaggggtggaagcttctgtgggttttcaggattaacttcccagcccaaggcattggttccttgctattaggagcccagcgaccctgcactgccctccacaccagctcccatctgcactgtctacaccattgacactggtggcaccatttgccttagcgtgacctcctatgctccttgtctgtctgaaagccaatgccttgacccagctcagttgccctgggtgccccttcacaccagcagcccctcccagggcacggctgtaggcgggtccctgcacaagcaggtatctggctggtccttaagtgcgagctgggcttctgcactcactcatgctgtcttctctctttttttcattgtcttgggatcctagaaccctgtgcccaccccagcaccatcctgaaccttcaggaaggggagcgggaggtagactaaccagactgcatcttaagcaagaatcattattttttcaaatggactcacctctgctctgtgcatttcttcctggatggtgcctggtgaggggcacgacgcgagaaagcacaggttgttccctgggaacgttgctgctcaagaaggacagtgctgctggcgagtgactctgggatgttggccacattgctcaggatggtgccacagccttgtttcacctggtagcttccacctgcttctgtgggggtagagagcaggccactgcagaggagggagcaggtggaaccggcacatggcagagggaggacacacactaagtgggatgtggggactgcacatcatcataaaagcagaggactcagcaggtagaagtggatgtgcgggccacctccttgggtgcccagcatccaagttgtttgctggcttggccaggtagggatgcacaatgcccgtaggcaggrccctttggagacagcacctttgtctccagattcctgctgagtatgagccagatgaaggctacttcctccctcctgagtcccttgcctgggccagtccctacagatgagagctgctgcaggtgaagcttacagtctttctcagcagcctggctctgctgacgatggagcggcagctgcattcctgcaggcagcacatcgtatttctacagctcggtctccagggagcatggactgtcctctgcagagggacggctgcctttaccctccactagtcttaaccatacagccttccagggacccccacagaggctgagcttgtcagtaacagtactcagtcactcctgccatgccatggttgcctcgctggccacatcgttatgacatgtggagaggacactgatggggtcaggatttagccagcatgtcatgagaaagcacgggttgttccctgggagtgttgctacacaagaaggaccacactcctggtgagtgactctgggatggtggccacattgctcaggatggtgccacagccttgtttcacctggcagcttccacctgctcctgtgggggcagagagcaaagtgttatctcaagcagtgaattgggctactttaatggcactgaaaatcagaagggatggatgtgcccagcctgtgatggagaggagcacagtggctcagccccatctgggggacaataccctgagcaaggcaaagcccccctgcaggctgtgaggccccagggaaaagctctccatgcggcct

SEQ ID NO: 683336 - DNA, 1550 bp, Homo sapiens
tttaaccagtcaatgaagctatggactgggagaaccaatcgatttcaaccctaggttaacttcaaccagccagttggtagtgaggcctgggtcctggatcaagaaggatcccaaatgcaggagaaagccaggctgtggggcgggtggctcagtccatggtgtgcactgctggtggggtgggcagtgggcacgtggccacattttccccacttgatatgccatgttggctgaaaagcaggagagacaattgtgtctttagaaaacttgaaggctggctgaacacggtggctcacgcctgtaatcccagcactttgggaggctgaggcaggcatatgacctgaggtcaggagttcaagaccagcctggccaacatggtgaaaccccatctctaccaaaaatacaaaaattagtcaggcatggtggcatgcacctgtaatcccagctacttgggaggctgagacacaagaattgcttgaacctgggaggcggaggttgcagtgagccgagattgtgccagtgcactccagcctgggcgacacagcaagactccatctcaaaaaaaagaaaaaaaaaagaaagaaaaagaaaagaaaagaaaaaagaaaacttgaaggctgaagggtattttgttttccttttagaataaggggcctttccatttggtatcaatgcctgcccttgtcttgagtgggtcatatcccggtcatgggcatactggctgctgccttacctcatgggagagcccatattctgttatgagtcaagtttagaggacttagcacgggagcaaaaaggttaaacactaaatcaaaccaagtgcctgtacgtgggctaggggagtggaatgatagaaattgctgacatttattaaaacactgtatgacgatctctggtctaggtactattgtatgttttgattcatttatttttctattcctctttatttattttgagacagagtctcgctctgtcgcccacactggagtgcggtgtcgtgatctcggctcactgcaacctctgccttccaggttcaagagatagtcgtgccttagcctcctaagtagctgggactacaggcatgcagcatttagttaatttttaatagagatgggtttttgccatgttggctaggctagtcctgacctcaggtgatccgcccrcctcagctttccaaagtactggtattacagactgagccactgcgaccggccacctatgttttcattcatttaattcacacaaaaactccatgagggatgggccattattatgcccatttgacaggtgagaaacttgaggctcatggagataagtacctctcccaaggccactccagagcctggactctcttcgttctctcctgggttgcttttcgtagacttgcaagagaaacaacaggtgctcttagtctcctttggatccagaaagtcaccagaaggatctcctctatacggtcgcaaaggactcaggacaaggcagatgcattttaaaaatactcccgacagtgaggccagggagggagtggggtgcaggtgggggctggtgactgt

SEQ ID NO: 683337 - DNA, 1550 bp, Homo sapiens
tttaaccagtcaatgaagctatggactgggagaaccaatcgatttcaaccctaggttaacttcaaccagccagttggtagtgaggcctgggtcctggatcaagaaggatcccaaatgcaggagaaagccaggctgtggggcgggtggctcagtccatggtgtgcactgctggtggggtgggcagtgggcacgtggccacattttccccacttgatatgccatgttggctgaaaagcaggagagacaattgtgtctttagaaaacttgaaggctggctgaacacggtggctcacgcctgtaatcccagcactttgggaggctgaggcaggcatatgacctgaggtcaggagttcaagaccagcctggccaacatggtgaaaccccatctctaccaaaaatacaaaaattagtcaggcatggtggcatgcacctgtaatcccagctacttgggaggctgagacacaagaattgcttgaacctgggaggcggaggttgcagtgagccgagattgtgccagtgcactccagcctgggcgacacagcaagactccatctcaaaaaaaagaaaaaaaaaagaaagaaaaagaaaagaaaagaaaaaagaaaacttgaaggctgaagggtattttgttttccttttagaataaggggcctttccatttggtatcaatgcctgcccttgtcttgagtgggtcatatcccggtcatgggcatactggctgctgccttacctcatgggagagcccatattctgttatgagtcaagtttagaggacttagcacgggagcaaaaaggttaaacactaaatcaaaccaagtgcctgtacgtgggctaggggagtggaatgatagaaattgctgacatttattaaaacactgtatgacgatctctggtctaggtactattgtatgttttgattcatttatttttctattcctctttatttattttgagacagagtctcgctctgtcgcccacactggagtgcggtgtcgtgatctcggctcactgcaacctctgccttccaggttcaagagatagtcgtgccttagcctcctaagtagctgggactacaggcatgcagcatttagttaatttttaatagagatgggtttttgccatgttggctaggctagtcctgacctcaggtgatccgcccacctcagctttccaaagtactgrtattacagactgagccactgcgaccggccacctatgttttcattcatttaattcacacaaaaactccatgagggatgggccattattatgcccatttgacaggtgagaaacttgaggctcatggagataagtacctctcccaaggccactccagagcctggactctcttcgttctctcctgggttgcttttcgtagacttgcaagagaaacaacaggtgctcttagtctcctttggatccagaaagtcaccagaaggatctcctctatacggtcgcaaaggactcaggacaaggcagatgcattttaaaaatactcccgacagtgaggccagggagggagtggggtgcaggtgggggctggtgactgt

SEQ ID NO: 683338 - DNA, 1550 bp, Homo sapiens
tttaaccagtcaatgaagctatggactgggagaaccaatcgatttcaaccctaggttaacttcaaccagccagttggtagtgaggcctgggtcctggatcaagaaggatcccaaatgcaggagaaagccaggctgtggggcgggtggctcagtccatggtgtgcactgctggtggggtgggcagtgggcacgtggccacattttccccacttgatatgccatgttggctgaaaagcaggagagacaattgtgtctttagaaaacttgaaggctggctgaacacggtggctcacgcctgtaatcccagcactttgggaggctgaggcaggcatatgacctgaggtcaggagttcaagaccagcctggccaacatggtgaaaccccatctctaccaaaaatacaaaaattagtcaggcatggtggcatgcacctgtaatcccagctacttgggaggctgagacacaagaattgcttgaacctgggaggcggaggttgcagtgagccgagattgtgccagtgcactccagcctgggcgacacagcaagactccatctcaaaaaaaagaaaaaaaaaagaaagaaaaagaaaagaaaagaaaaaagaaaacttgaaggctgaagggtattttgttttccttttagaataaggggcctttccatttggtatcaatgcctgcccttgtcttgagtgggtcatatcccggtcatgggcatactggctgctgccttacctcatgggagagcccatattctgttatgagtcaagtttagaggacttagcacgggagcaaaaaggttaaacactaaatcaaaccaagtgcctgtacgtgggctaggggagtggaatgatagaaattgctgacatttattaaaacactgtatgacgatctctggtctaggtactattgtatgttttgattcatttatttttctattcctctttatttattttgagacagagtctcgctctgtcgcccacactggagtgcggtgtcgtgatctcggctcactgcaacctctgccttccaggttcaagagatagtcgtgccttagcctcctaagtagctgggactacaggcatgcagcatttagttaatttttaatagagatgggtttttgccatgttggctaggctagtcctgacctcaggtgatccgcccacctcagctttccaaagtactggtattacagactgagccactgmgaccggccacctatgttttcattcatttaattcacacaaaaactccatgagggatgggccattattatgcccatttgacaggtgagaaacttgaggctcatggagataagtacctctcccaaggccactccagagcctggactctcttcgttctctcctgggttgcttttcgtagacttgcaagagaaacaacaggtgctcttagtctcctttggatccagaaagtcaccagaaggatctcctctatacggtcgcaaaggactcaggacaaggcagatgcattttaaaaatactcccgacagtgaggccagggagggagtggggtgcaggtgggggctggtgactgt

SEQ ID NO: 683339 - DNA, 1550 bp, Homo sapiens
tttaaccagtcaatgaagctatggactgggagaaccaatcgatttcaaccctaggttaacttcaaccagccagttggtagtgaggcctgggtcctggatcaagaaggatcccaaatgcaggagaaagccaggctgtggggcgggtggctcagtccatggtgtgcactgctggtggggtgggcagtgggcacgtggccacattttccccacttgatatgccatgttggctgaaaagcaggagagacaattgtgtctttagaaaacttgaaggctggctgaacacggtggctcacgcctgtaatcccagcactttgggaggctgaggcaggcatatgacctgaggtcaggagttcaagaccagcctggccaacatggtgaaaccccatctctaccaaaaatacaaaaattagtcaggcatggtggcatgcacctgtaatcccagctacttgggaggctgagacacaagaattgcttgaacctgggaggcggaggttgcagtgagccgagattgtgccagtgcactccagcctgggcgacacagcaagactccatctcaaaaaaaagaaaaaaaaaagaaagaaaaagaaaagaaaagaaaaaagaaaacttgaaggctgaagggtattttgttttccttttagaataaggggcctttccatttggtatcaatgcctgcccttgtcttgagtgggtcatatcccggtcatgggcatactggctgctgccttacctcatgggagagcccatattctgttatgagtcaagtttagaggacttagcacgggagcaaaaaggttaaacactaaatcaaaccaagtgcctgtacgtgggctaggggagtggaatgatagaaattgctgacatttattaaaacactgtatgacgatctctggtctaggtactattgtatgttttgattcatttatttttctattcctctttatttattttgagacagagtctcgctctgtcgcccacactggagtgcggtgtcgtgatctcggctcactgcaacctctgccttccaggttcaagagatagtcgtgccttagcctcctaagtagctgggactacaggcatgcagcatttagttaatttttaatagagatgggtttttgccatgttggctaggctagtcctgacctcaggtgatccgcccacctcagctttccaaagtactggtattacagactgagccactgcgaccggccacctatgttttcattcatttaattcacacaaaaactccatgagggatgggccattattatgcccatttgacaggtgagaaacttgaggctcatggagataagtacctctcccaaggccactccagagcctggactctcttcgttctctcctgggttgcttttcgtagacttgcaagagaaacaacaggtgctcttagtctcctttggatccagaaagtcaccagaaggatctcctctatacggtcrcaaaggactcaggacaaggcagatgcattttaaaaatactcccgacagtgaggccagggagggagtggggtgcaggtgggggctggtgactgt

SEQ ID NO: 683340 - DNA, 583 bp, Homo sapiens
cctagtgtattctgtttcaaatcattcaaataacacagtaagtaaataagtaatggccttcagcatgtatttttcagaggaaaacacaacatttatgtttgttaatgttctacaaggccaaatagaagcttctgggggccgggatgaagttgttttcttcccaagcagtgacgtggaatgaatttctaatgattattccaagcttcctgggggcgagctgtgctgtatttatcgaggctcatcttcaggacgctgcgtggaaaataagcccgagctgctccccagcgaccctccctgcgtcgctgtgagcacagccctcgcccggccctgcactggtcasgcagctatgcggagaggaggctgcaggacttggccaggtcaaagccaaaggccctcgtggtgtaagacctagaattaagacttcataggacaggctgccttgacctctggtgatgccagaagggccttatctggcctaaccttgagtcccctctcagctctgctctcacagtaaaggccccttagcaaatccactctcctgcagcagggactaggagcagctcctgctcacccctgagtcggg

SEQ ID NO: 683341 - DNA, 909 bp, Homo sapiens
ggacgtgtcccccagacagcaggtggatggtcttttcttagcctctcacccagctcccacctrcctatccactgacactgggctttcgacctcctcctctgcaacctcagcgtttggcatctgtgcatctcctggggtgaatgactgagaattcccaatatggaggattttatttcctaaatgtggctgcagcaagggctgccgtcacgttccctcctctgtggcaggtcctgccatgccctcacctagaagtgtggtcttttgccccacctcctcccctcccatgaggatgagtgggcctggagacctgctttgaccaatagaatctggagggcggggacactgagcccctgtggaccaagctcttagctgtccgggcagcttcctcctcctggctcttggaaggcttccatttagagcttgccaccatgtaagagacgaagctagccaggcgcggtggctcacccttgtaatcccagcactttgggaggctgaggcgggcagatcacgaggtcaggagtttgagaccagcctggccaacatagtgaaaccccatctttactaaaaatacaaaaaattaactgggcgggcgcctgtagtcccagctactcaggaagctgaggcaggagaatggcatgaacccgggaggcggagcttgcagtgagccgagatggcgccactgcactccagcccaggcgacagtgtgagactccatctcaaaaataaaaataaaaagagagagagagagagagaggtggatccaccacagagacgggcatgcatgggaagcccagcccctgagggtcctcatccagtgaggagactgcaggtggagggagacagagactgagggtcactagtcctgctgcccaggctgacacccctgaaacagagaaaaatacccagcaa

SEQ ID NO: 683342 - DNA, 909 bp, Homo sapiens
ggacgtgtcccccagacagcaggtggatggtcttttcttagcctctcacccagctcccacctacctatccactgacactgggctttcgacctcctcctctgcaacctcagcgtttggcatctgtgcatctcctggggtgaatgactgagaattcccaatatggaggattttatttcctaaatgtggctgcagcaagggctgccgtcacgttccctcctctgtggcaggtcctgccatgccctcacctagaagtgtggtcttttgccccacctcctcccctcccatgaggatgagtgggcctggagacctgctttgaccaatagaatctggagggyggggacactgagcccctgtggaccaagctcttagctgtccgggcagcttcctcctcctggctcttggaaggcttccatttagagcttgccaccatgtaagagacgaagctagccaggcgcggtggctcacccttgtaatcccagcactttgggaggctgaggcgggcagatcacgaggtcaggagtttgagaccagcctggccaacatagtgaaaccccatctttactaaaaatacaaaaaattaactgggcgggcgcctgtagtcccagctactcaggaagctgaggcaggagaatggcatgaacccgggaggcggagcttgcagtgagccgagatggcgccactgcactccagcccaggcgacagtgtgagactccatctcaaaaataaaaataaaaagagagagagagagagagaggtggatccaccacagagacgggcatgcatgggaagcccagcccctgagggtcctcatccagtgaggagactgcaggtggagggagacagagactgagggtcactagtcctgctgcccaggctgacacccctgaaacagagaaaaatacccagcaa

SEQ ID NO: 683343 - DNA, 2444 bp, Homo sapiens
caagagtcaaatcctggagagatgtccgcaaacaggttttcagctatagacaggggagttcaaattgatatgtggatttgaaaatgattcgaaaactgtacaaagaatcttaaaatatttataccactttgccaattgattgtactattggaaatgtaggttaagaaaataattctaaatgaagaaaaataatagttctatcagtgttcagtagtagagaaacagttaaataaataagtgaataaataaatccacctaaggaaatattaaaaagtcattgaagacatttttacacagtgcagcatttttttaagtctgttacagtgtaaagtaacacacacaagttcctaggcagcatgaacaaaattctgtagaaaagaaactttaaataaaaagaggaaggggcattctgtttccaaaatcacaatagcacatgcttacacctcgcctctccacacacactcccaaatccttcagggctcaacaccgaaagccaaggaagtcacccagccccctgcccagagcatagctggtgactggttgtaatagttgtctctagagggactggactaataggatagatgcatgcatgaaaggaagtttattaaggagtactgactcacacgatcacaaggtgaagtcccacaataagctgtctgcaagctggggagccaggaagccagtctgagtcccaacacctcaaaagcagggaagccgacagtgcagccttcagtctgtggccaaaggcccgagagcccctggcaaaccactggtgtaggtccaagagtccaaaagctaaagaacttaaagtccgatgatcaagggcaggaagcatccagcacatgagaaagatggaggccagaagactcagccagtctagtccttccacgttcctctgcctgcttttatcctagctgcagaggcagctgattagatggtgcccacccagattgagggtatgtctgcctctcccagtccacagactcaaatgttaatctcctctggcaacatcctcacagacacacccaagaacaatattttgcatccttcaagccaatcaagttgacacttaatattcaccattgcattggtgcatggaattccaccaaatcacaagtatggaataaacacccaagtccttcagagtcaccccagacccactcgaaagcaggctgatggcacaagtgtgaggagaggggagcagaggcctgcggttgtgaaaagcagataaaatcatatccagaaatagaagttccaccgggtgggaaaatgctgagaccaggggtgaagtctggtggatcaagcaccgactcttgggaaggcaaagacagggcttgggagtgtgccgggcagaagctcaggcttgggaaggcacggatgctggagagggagggtgaggctggaggaggaggcaggtgggccaggagacctgagggtaccaaggagaaaatgaggtatgtggagggaaaaacaaacaagtgacaatgttttcaacaaggggagatgaaccagacactacccctgcccctttactccccaagagaagagtatcacagattagaggagacacacctccttatacacagaggagcrggtgctcttggactgcgaaacccagggagagaggcccaaacctctcacctctgcctagtataagccccacaggtgctgctttagtaaaacaagacacttcgaatggaatgaaaaagagcagacaatatccataaaagtgaatttcctcaagtcaaaacttacacagcagaataaaaccatgacacagtggccaacttcaatgacttcttcttaaacaagtatttgatgatctgaaaaaagaaaattgaatcagaatttcaaaaactcagaacagaaacgaatcagtgaagtggaaaaaaagtagaatttactttttaaaaaagtattagtttgttgtgggaaaaaagaatagacaaactagatagcctaattttaaaatatgagaaagtgaaaatatacaacataataagttacaagggagaaaaaaatctttgaaacataggctttaaaaaattgcaaaggtctacttttcataaccctctgaaaatatatttgaaaaacttgaatggaaaagataattttccaggaaaatacagcataccaaaattgaacccaagggagaaggaaagatttaacaggctaatttctataaaaaacaatgaagaaactatacacaaaaaaaattaccagacccaaaatagtatcttgggagaattctataaactctttaaaaagtacaaataaaaaggagaaaacatattaaaataaaagaaatcttctaaatcatttgcatgaaggaaatatacaattgagaactataactgttaaaaatggcagtacaagaaagagaccaatatcacaaatatcaatataaaaattcataaaatattagcaaatagaataaaacattc

SEQ ID NO: 683344 - DNA, 2152 bp, Homo sapiens
tgcacctgtttgtgcattcacagttaacttatcctggggttgcaatcatgattttccccacaatccctcctgcacctggtgacgcactgtcatgcacgtcacgctggtctgggtttgccctagatttcccaggcactcccgcctagcacaggtgagcagagggtgctggaaacctcccaactccgataacccggggaagggctggggactgcaggcttaacgaatacccagcattttcaaatgcccagcatggtttgggaagcagcaggctgaactgtttgagagcctgcgtgatcgttcttatcagacgtcctgtggaaatgcctgccactgtcacgagcacacaggctcaactcatacaacaccagctggcctgaaaagtcatggccacaagaagcagaggccgcagaccagactccagcacaaaggtgcgggctccttggctttgactcactggcatctcttccgtcctttsacttctgcttctccttagtaacacgactcttcctatgttttacaataatctaataagcgccagtagcggtcagtgtgcagtcaacagacagaactgtggctgttatactgataggcagattttaaaatgaagagatgttgccttggccagtgcagacgggggacacctgcgcacacggaggagcccgtgaggccgctgccgccctgtgggatgggaaacggggaaggctttgggggggcctctggggaggaggccccacccagctggtgctggggtcctgagtgctgagcaggggttccaggggctgagacagagagctctgaggaaggaactggccagcttgtgcgggcgtctgaaggagaacgagaggctgactctgcaagtgttgagaaaaccgccaggcggatccagtgctggaacaaactgcactggggtgggggcaggaaactcagggaacaggaagagaaggagctgcccagagccaccctccagggcgcccctgttcagagcctccctgggggctgctgactgcgcggccatgacgtttcaggccagctggtgttggcagagctgagccgggtttgctcagccagcgcctcagagctgggggtggaggagtggaactgggggtgaggcatagttgacgggatcacggcgccccatgggccctccaccccaaacaagaccttggtgcttggtagcagtcagcctagggccctgcagccccagctcagacctcacgcagaccttcttccagccccacaattgccatctgccgccccacgcgcaacacgtcctgctctccttttcaagtaatttattgcatctgcgataaataaaatcaaataaaagtatattttaagtgttcgtttttaatctttgtggaaaaaggtagagtgttggaagcaatcttgggagttcgttcttggaatttaagattatgtcctcaggactcaggaggcttcttcctgccgtgcctgttttctttggctgggctgtgttcccttctgcctgttccgccctctgcccctctcctcttctgcggacagtccggcacctgtgatgctctgaccttgaacacatctccctggacgttcagggatttctcaacgcgacagaccaggacatagcactgcagcccaccaggtgcctgccttcactgcagggagatccctccacacttgcacagtgggttcacatctttgtcgctgcttggtgtagtcagctgccttcatttctgcaactgaccaggtgtcagttcgtgtccattgtcaccgtggtttgcacccccggctccctggcgaccatcggagcacatcctcctgggcctgtgggccgtggacatttcctcttcagctcaacgtctgccgtgcccacttttctacggggctgtgtttttcctgttgatttgtgggaactccttatatgttcttgccaccaaccctttgccaattctgtgaatcatttcttctattgtgtcacttgctcttgcattttcttatctgacaaatatgactcagctacgatgtacactgtacatatttggggatcacgccactttgtttctgattcttagcaggagaggaatagaaggaggccgagcaaccttcacttcccttcactgggggcccacaggcccggcacgttctgcagagaagcccttgggtaagtggagga

SEQ ID NO: 683345 - DNA, 1029 bp, Homo sapiens
ggatagaataaaatgccaaagattaaagaaaagcacacagttgtttaattgtaagcttttgtaagaaggaggaggaaggctccaaagttcaagcatttgtatattgcactttgaatcttgaatgatgagcaagggtgaaaaagtcaaggttagagaaaaacattccaagctgcaatgcaaagctgtagaggtgaaaaggaatagggcctctctgagggactaagattgctaaaatgctagactgcggggtgcacacaggagagaatggagaggcatgatgaacaacattggaactgatttatgacagtcatccaagtgttttctttctgggtgaactagagcacttatgaatgcagattataggtaatttgaaaccctaatctctgcttattttcaccatactcaactgtgattctgaaaatgtggctttataagaaagggaatctgatgtgaactgatgtgaaattaaacatttctctgtatgtgactaactgtaaatcccatgcacgttctttgattcctgactgtcttatctatattttcatgcctcctgtgatgctcatcaggtgataatagtaatgtcaccgtgactgtctcaaattgtttggagactttttaagaaaacgttactcaacacaatatagctaatcaacatttttctcaggtagtcaatacattatgatgcggtaaaaaaactaccatttctattctctaatattagaaggaacacacgccatcagaaagtggtaatgtctgtaacatctatccaaatactttatttcttacttgttacyaaaaacaaataaaccaaaaaagtgctcctcttactagatgagttgataagaatggattagtaagtaaaatccaaattactcagtaatattattatttttctattgcatttgattcatgtaaatctcaaagtgaattctgtataagaaaccattttgaattatcccatgttcaccatataaacctttatcctttcaatatctagcaatacatttatgatagccaaaatccagtaag

SEQ ID NO: 683346 - DNA, 1029 bp, Homo sapiens
ggatagaataaaatgccaaagattaaagaaaagcacacagttgtttaattgtaagcttttgtaagaaggaggaggaaggctccaaagttcaagcatttgtatattgcactttgaatcttgaatgatgagcaagggtgaaaaagtcaaggttagagaaaaacattccaagctgcaatgcaaagctgtagaggtgaaaaggaatagggcctctctgagggactaagattgctaaaatgctagactgcggggtgcacacaggagagaatggagaggcatgatgaacaacattggaactgatttatgacagtcatccaagtgttttctttctgggtgaactagagcacttatgaatgcagattataggtaatttgaaaccctaatctctgcttattttcaccatactcaactgtgattctgaaaatgtggctttataagaaagggaatctgatgtgaactgatgtgaaattaaacatttctctgtatgtgactaactgtaaatcccatgcacgttctttgattcctgactgtcttatctatattttcatgcctcctgtgatgctcatcaggtgataatagtaatgtcaccgtgactgtctcaaattgtttggagactttttaagaaaacgttactcaacacaatatagctaatcaacatttttctcaggtagtcaatacattatgatgcggtaaaaaaactaccatttctattctctaatattagaaggaacacacgccatcagaaagtggtaatgtctgtaacatctatccaaatactttatttcttacttgttaccaaaaacaaataaaccaraaaagtgctcctcttactagatgagttgataagaatggattagtaagtaaaatccaaattactcagtaatattattatttttctattgcatttgattcatgtaaatctcaaagtgaattctgtataagaaaccattttgaattatcccatgttcaccatataaacctttatcctttcaatatctagcaatacatttatgatagccaaaatccagtaag

SEQ ID NO: 683347 - DNA, 1029 bp, Homo sapiens
ggatagaataaaatgccaaagattaaagaaaagcacacagttgtttaattgtaagcttttgtaagaaggaggaggaaggctccaaagttcaagcatttgtatattgcactttgaatcttgaatgatgagcaagggtgaaaaagtcaaggttagagaaaaacattccaagctgcaatgcaaagctgtagaggtgaaaaggaatagggcctctctgagggactaagattgctaaaatgctagactgcggggtgcacacaggagagaatggagaggcatgatgaacaacattggaactgatttatgacagtcatccaagtgttttctttctgggtgaactagagcacttatgaatgcagattataggtaatttgaaaccctaatctctgcttattttcaccatactcaactgtgattctgaaaatgtggctttataagaaagggaatctgatgtgaactgatgtgaaattaaacatttctctgtatgtgactaactgtaaatcccatgcacgttctttgattcctgactgtcttatctatattttcatgcctcctgtgatgctcatcaggtgataatagtaatgtcaccgtgactgtctcaaattgtttggagactttttaagaaaacgttactcaacacaatatagctaatcaacatttttctcaggtagtcaatacattatgatgcggtaaaaaaactaccatttctattctctaatattagaaggaacacacgccatcagaaagtggtaatgtctgtaacatctatccaaatactttatttcttacttgttaccaaaaacaaataaaccaaaaaagtgctcctcttactagaygagttgataagaatggattagtaagtaaaatccaaattactcagtaatattattatttttctattgcatttgattcatgtaaatctcaaagtgaattctgtataagaaaccattttgaattatcccatgttcaccatataaacctttatcctttcaatatctagcaatacatttatgatagccaaaatccagtaag

SEQ ID NO: 683348 - DNA, 660 bp, Homo sapiens
tctcgctctattgcccaggctggagtgcagkggggccatctctgctcactgcaacctctgcttcctgggctcatctgattctcctgcctcagcctcccgagtagctgggattaccggtgtccgccaccacacctggctaatttttgtatttttagtagagatggggttcaccatgttggccaggctggtcttgaactcttgacctcaaatgatccacccgccttggcctcccaaagtgctgggattacaggagtgagccaccgtgccaggctgatgtcatttttttttttaagtcacttctgagactctaagtatgtacctccagttttataatcaaaataaacaaaaacaggtttctgaaaggtaggggtttttaaaggcagttgattaagaatacaatacatttgtgtattaagcagtgtttatagctttaacaaaagatctctgttggggtaggggattgtatttatacaatgctgagggcattttggcacataataatctcatgtttgctcagaatcatgaactgtgtccactcttcccccacacaacattttttaattaaaaaaaataaagcttgtttctatttgtttataacatttattttcttaccagaggtgattgattgcaaggacagaagtgcctatgcttggtgacatt

SEQ ID NO: 683349 - DNA, 607 bp, Homo sapiens
tgaggtcaggaattcgagactagcctggccaacatgatgaaacctcgtctctactaaaaatacaaaaattagccagggatggtggtgcccgcctgtagtcccagctgttcgggtggctgaggcaggagaattgcttgaacctggaggcagaggctgcagtgagccaagatcgcgccacagcgctccagcctgggtgacagagcgagactccatctcaaataaataaataaataaatacataaataaataaataaaatccccttggtcattctgaaaattatcatctaggttttgttcatttartaggcaaaacactttctcattattggtttaatatgaatttctttaattactgaagtgataatttttcccttatgtttgcttgaagtaattatttctgttatatgaattaaatctctatatttcctttgcctaagggtttttattcattagttcatgttctttatatattaggcatattgactctagtcatattgataacaaatgtaacaaactttgcagttcgttacaaggtgctgaaaatgtcttggtacatttatgagtcttactttaatgattttttaacatacaggatctttattcatca

SEQ ID NO: 683350 - DNA, 598 bp, Homo sapiens
cactcatttcaagtaatttattttctgatttaggatacactagcatggctaattaattgggagtagccagagaaagaagggraacagctaagtgctggcaatcaggagacctacgttccagcctctgctctgtcactactttactgctgagagcttggataagttacttaaacttcatggagcattttgcatttgtttttcatctgtgaaatggagataagaagtgttgccctacttatcgcatgctgctgttgtgaggcaatagatgtaaacacatgtgcaaaattaacagtgctctacaaatgtatcatttttaccattatcattaatatttatgactagtcattcatattgatggaaatagttcactgtcataattgaggaaagggaattttgccattggcttgtttctttctcttctggaacttttcccagccagtttaggtggctttctgagctcagactcttacccatcagaaacaatcagagtacagaagatgcaaatgttagatttgtgtcgtggtatacactgcaggatatgtgcagagctgttgagctccaatgaacccatgaagctcactgaaaactctttggcttc

SEQ ID NO: 683351 - DNA, 598 bp, Homo sapiens
cactcatttcaagtaatttattttctgatttaggatacactagcatggctaattaattgggagtagccagagaaagaaggggaacagctaagtgctggcaatcaggagacctacgttccagcctctgctctgtcactactttactgctgagagcttggataagttacttaaacttcatggagcattttgcatttgtttttcatctgtgaaatggagataagaagtgttgccctacttatcgcatgctgctgttgtgaggcaatagatgtaaacamatgtgcaaaattaacagtgctctacaaatgtatcatttttaccattatcattaatatttatgactagtcattcatattgatggaaatagttcactgtcataattgaggaaagggaattttgccattggcttgtttctttctcttctggaacttttcccagccagtttaggtggctttctgagctcagactcttacccatcagaaacaatcagagtacagaagatgcaaatgttagatttgtgtcgtggtatacactgcaggatatgtgcagagctgttgagctccaatgaacccatgaagctcactgaaaactctttggcttc

SEQ ID NO: 683352 - DNA, 647 bp, Homo sapiens
ataatccagtcgtcgttggcaaaacacaagccaatggcttggtgctggttgacagatgagatcatagcgcattatgactgatgtgtagtgtcagagaaaaatccaggacagcaaaactttagtgtgctctgacaggtcagtaatgatgaagacgttatcacagttacaacaactatgtgctgcttcttaaatgagatgtgttygatatgcccggctagcttggttggtagagcatgagagtcttaaatgagatggacgtgatggctgttattgcccaactgcagaagaccagctgaatcggagtgactcacagggcgttttgaacaatacattctctaaggttccaccctagagattcaaattgagtagatccagattagaacccagatgtatatattcttataatgctttctaggtgatctgaggcctgtgcagctttgatttttaaattcatatatatatatatgaattttatatatatttaaatatatatatatatgaatttataaaattgaattcattagccattcattgggaaccaaggcctaacaaagtgaattagctctctgcccttgaaaatctaagaactgtttttaggcagtaagcattaagttagaaatatcgccctgatatttatgtatcaattc

SEQ ID NO: 683353 - DNA, 611 bp, Homo sapiens
aggcatcattctagcagagacctgaataaagtgaggaagtaagtcatagaaatatctagggactatgttcctggtagaggaaaaatcagatgcaaatgtcctgaggcagaaacctgttgtaatatttgagcaacagcaaagaggacaggagaataaaaggggtaggagatattagaatatgggaaataatttgaatgtgagcttaaagctgaagagagsctatttataggtcttaggcagggggtagcatggtctgacttaggaccatagaggtattgccgtgagtactgtgtggagtgttgattcaggggggctgggacaggggaggggtatatcaagagaagtgtagaggcagaaatttgtagctcctgtgatccttatgccagtgttaaaaatctacagcagatcttcaaagacaggttatatattattgatttgctgctacagctgtgttatcttcagaaaaaccctacattgctgtaattcagttgtgcaagtattaaaataaaatgcaccatgttctaaaagccaggtttccctgcactcctttaagaaggaggaaggttaaaaaacaaatgaaagtgtctctttttttttctgcacatggagca

SEQ ID NO: 683354 - DNA, 611 bp, Homo sapiens
aggcatcattctagcagagacctgaataaagtgaggaagtaagtcatagaaatatctagggactatgttcctggtagaggaaaaatcagatgcaaatgtcctgaggcagaaacctgttgtaatatttgagcaacagcaaagaggacaggagaataaaaggggtaggagatattagaatatgggaaataatttgaatgtgagcttaaagctgaagagagcctatttataggtcttaggcagggggtagcatggtctgacttaggaccatagaggtattgccgtgagtactgtgtggagtgttgattcagkggggctgggacaggggaggggtatatcaagagaagtgtagaggcagaaatttgtagctcctgtgatccttatgccagtgttaaaaatctacagcagatcttcaaagacaggttatatattattgatttgctgctacagctgtgttatcttcagaaaaaccctacattgctgtaattcagttgtgcaagtattaaaataaaatgcaccatgttctaaaagccaggtttccctgcactcctttaagaaggaggaaggttaaaaaacaaatgaaagtgtctctttttttttctgcacatggagca

SEQ ID NO: 683355 - DNA, 611 bp, Homo sapiens
aggcatcattctagcagagacctgaataaagtgaggaagtaagtcatagaaatatctagggactatgttcctggtagaggaaaaatcagatgcaaatgtcctgaggcagaaacctgttgtaatatttgagcaacagcaaagaggacaggagaataaaaggggtaggagatattagaatatgggaaataatttgaatgtgagcttaaagctgaagagagcctatttataggtcttaggcagggggtagcatggtctgacttaggaccatagaggtattgccgtgagtactgtgtggagtgttgattcaggggggctgggacaggggaggggtatatcargagaagtgtagaggcagaaatttgtagctcctgtgatccttatgccagtgttaaaaatctacagcagatcttcaaagacaggttatatattattgatttgctgctacagctgtgttatcttcagaaaaaccctacattgctgtaattcagttgtgcaagtattaaaataaaatgcaccatgttctaaaagccaggtttccctgcactcctttaagaaggaggaaggttaaaaaacaaatgaaagtgtctctttttttttctgcacatggagca

SEQ ID NO: 683356 - DNA, 597 bp, Homo sapiens
gcttcacctctctatactaggataagggactgaagagtcacatgaacttgtgtattctgtaagaatgtgattaattgcatcacttactgcctattctttaagagctttctaaagatatttctccattcttcatatcaagaagtagttttgcttctctaacaattaactgtctgtaacttatagccatcatgaattatgtagctaatcatgtttaactctcacayagactgttagaaagcttacagctcaatttctgacccacatataataagagaacaaaaattcatagcaggtggaaagtgtattttcggcctattttttgtcttaatttttaaaaatctttctacttttcttcttgccttttctatttatactttgtaatatgccacataacaatgtttctgaacaatggtcccataagattacaataccatattttagagtaccttgtctatgtttagacatgtttagatgcacaaataccattatattatacttccctacaatattcggtatagtaacatgatgtacagttttgtagcctaggagctatagaatattatagagagccaaggctgtatcacacaggtttgtgta

SEQ ID NO: 683357 - DNA, 597 bp, Homo sapiens
gcttcacctctctatactaggataagggactgaagagtcacatgaacttgtgtattctgtaagaatgtgattaattgcatcacttactgcctattctttaagagctttctaaagatatttctccattcttcatatcaagaagtagttttgcttctctaacaattaactgtctgtaacttatagccatcatgaattatgtagctaatcatgtttaactctcacacagactgttagaaagcttacagctcaatttctgacccacatataataagagaacaaaaattcatagcaggtggaaagtgtattttcggcctattttttgtcttaatttttaaaaatctttctacttttcttyttgccttttctatttatactttgtaatatgccacataacaatgtttctgaacaatggtcccataagattacaataccatattttagagtaccttgtctatgtttagacatgtttagatgcacaaataccattatattatacttccctacaatattcggtatagtaacatgatgtacagttttgtagcctaggagctatagaatattatagagagccaaggctgtatcacacaggtttgtgta

SEQ ID NO: 683358 - DNA, 597 bp, Homo sapiens
gcttcacctctctatactaggataagggactgaagagtcacatgaacttgtgtattctgtaagaatgtgattaattgcatcacttactgcctattctttaagagctttctaaagatatttctccattcttcatatcaagaagtagttttgcttctctaacaattaactgtctgtaacttatagccatcatgaattatgtagctaatcatgtttaactctcacacagactgttagaaagcttacagctcaatttctgacccacatataataagagaacaaaaattcatagcaggtggaaagtgtattttcggcctattttttgtcttaatttttaaaaatctttctacttttcttcttgccttttctatttatactttgtaatatgccacataacaatgtttctgaacaatkgtcccataagattacaataccatattttagagtaccttgtctatgtttagacatgtttagatgcacaaataccattatattatacttccctacaatattcggtatagtaacatgatgtacagttttgtagcctaggagctatagaatattatagagagccaaggctgtatcacacaggtttgtgta

SEQ ID NO: 683359 - DNA, 666 bp, Homo sapiens
tattctttcactttgaatcattttaaggtagccaatattgcatagaaataaaatgtttatgggtttagcaaagttacaattgactttctctttgacccattaattctatttctagaaatctaccctacagaaacatttgcaaaagcatgagatgacaaatgtgtaaggtcattcattatagcattattcataaatcaaaacattaaaaacaactcaagtgttcagcaatggggaacagttaaataaactgacacacaatggagtaacatgcagctattcaaaagaatggggacagtatctatgtagtaatatggaaaattcatctgagtgtattgcaaagtgaaaacaggaaagcgtagaagagttataatatgctaccttttgtgtaagggaagaaaatatgaacctctatatgtttcatatatctgcaaaaacaggaggacgaaaaacacagagaatgtaaacaaaaaactaataaaagtagttaccttataggaaatgcattgggaatatatgtaagggaaagagaaacaaaacttctttgtgtatamctttctataccatcatgccctttgaataatgtgggttcattattcattaaaagtaaagctaatttttaaaaatatttctaaaattaaaaataaaccaagacaaataaatataacc

SEQ ID NO: 683360 - DNA, 614 bp, Homo sapiens
tggcccatttcacttattatagctctaacgttgtcaagccctcacttgacctaatatcctcttatacaaaargtagaaaactgaggcctaaatgaagtgaaataatggaatcttgagtcaaagatcagtcacccccagaaatgtgtgaacctaaaaataaaaacctcacaggaattaaatttgcataggccagtccctcctcctaacataacctggtggccaagcctccataatactctggggccaggctcttggttatgttttagaattatttttaatttaacttttgttcttgttcactcagtgtcccacagtaaggtgcactgggggctaaaggcttgaaaaagcaaacagagttaggggccctaagtttcttctcaagagttcagatggaaatcataaaaccaccacaccaggttccagatgagttccactggaagctggcaaaaacctcccgcccagcctggttaatggcacttaagcactggattgtttgactgccactctcccttactggaattgttagaataatctctctctctctctctccctccctgcctcccgttttttttttttcttttttttctttgagacagaatttcactgtctggagt

SEQ ID NO: 683361 - DNA, 1069 bp, Homo sapiens
tcaggcaagaggaaaattgagagtcaagccacatggcttgtctaagagaacccccaacctgcagctgacagctcatcttggcgagaatccagagaaggcgacttcagagatgaaggtgaaggccaggttgtgaaaggcctttaatgccaggctaactaaggggttgagcttttttctcatcaccaagaaggrgccattaaagattctgaagcagcggggaatctgtaccaactaggctttcggggaaagatgactctgagggaaaagagaggcagcaggatgaggagcccaggtacgggttgggaggactggaagtgggaagcaggagagaggtggtgggaaagtggaagggagttggagtggaaggaattgagaggaaaggaccacagtgcaaggcagtatgaagaaataatggcacccctaaagttaagtttgagatttgggatggatgtggttggaagtccctagcaagtcataagagatgatgggctgatggtcaggagaaaggtcaagagacatttatctgtgtagatatgatcattgaagtattagaagggataagaaggttgaatgggaatggaacactgaaacttgggtcctactaactttaagaagttggatcagaaaggcaagcaagaaaaagatgtaagagatgggaagagaagcagaacagagggaaggcagcactcccaagaagtcttcccaatcaggcccctggctccagttgtgcccgttcccttctttacaccaacttcctccctgtgtctaagctgggttcatgtcccaggtcctgccacactccagaagtgtagtatcaagttagagacttagagacatctgcggaagtttactagtcttgtgacaatccagagcaaagtcatgaaaaccagacaaaaatagtttcaaaaaggagatgtgggactgggcactgtggatttgagaggttgaggcaggaggattgcttgaggccaagagttcaagaacaatctggacaatgtaggagaccccatctctgcaaaaaataaaaataaaaactagcctggctcagtggcatgtacctgtggtctca

SEQ ID NO: 683362 - DNA, 1329 bp, Homo sapiens
ttgcactaattgccagaaattaacacccctcaaaacgtgtgtgtgtgtgtgtgtgtgtgtgtgtgtatgtatattttagattgagtctcactttgtcgcccaggctggagtgcagtggcgagatctctgctcactgcaacctctgcctccccagttcaagcaattctcctgcttcagccccccgaatagctgggattacaggygtgcaccaccatccctggctaattttttgtatttttagtagagatggggtttcaccatgttggccaggctggtctcgaactcctgacctcaggtgatctgccagccttggcctcccaaagtgctaggattacaggcatgagccaccttgcccggctctatttatatattaaaaagacctttataaatttaaaaacttaaaatatatattataaaagtatcatacacatgtgacaataaaaattcaaatagaattttaaaaattcaaataggactgaagggaacaaactaaaatataagtggttgcccaagaaccatctttaagcatctctgggttttagttcttgcaatgattacttctctttgtgacactgtgttattttgatcttgacatttttaaagaaaacatggattgacagatacaaatgtctttgcatatgtcaaaatacttttaaaaataaataaaggggaaaagagcctctcagaaatggccactaggtggtagaagttgactaaaaactgctttattcggtagagccatctcgattgctgcccgcgacttttttcctctagggagaagggatttcttcagggtcttctcctgagatatccaacatctcctcctcgagcccctttgcttagaatgccctgtagccattttagactgcacacaaatggagataacacaagcaacttctcaccttccagagggcaggacaagatgaagaaggaagatcttcggaagtggaaggttaagaaagacaagtacacacccatacacacgccagtcctaccaaggcaatggtgacagcaggaagagatggctgctcttcctccagagcagctgtgatgcagacccacctgtcacccaagaaggagaaaagtgaacaacagcttctgccctagtggagcctgaattaactcataagtccccacccccagaatctctttgcgctttggtctgtgatattgtacttaacacacgctcaataaagacttattgatttgacttaatctcaaaaccacatttctaaagcaccaaaggactatcttttgattcattagatgtttcttgagctcacacaagtgcctaaacaacaggggaaaaggtcgtaaagataaataaaa

SEQ ID NO: 683363 - DNA, 1329 bp, Homo sapiens
ttgcactaattgccagaaattaacacccctcaaaacgtgtgtgtgtgtgtgtgtgtgtgtgtgtgtatgtatattttagattgagtctcactttgtcgcccaggctggagtgcagtggcgagatctctgctcactgcaacctctgcctccccagttcaagcaattctcctgcttcagccccccgaatagctgggattacaggcrtgcaccaccatccctggctaattttttgtatttttagtagagatggggtttcaccatgttggccaggctggtctcgaactcctgacctcaggtgatctgccagccttggcctcccaaagtgctaggattacaggcatgagccaccttgcccggctctatttatatattaaaaagacctttataaatttaaaaacttaaaatatatattataaaagtatcatacacatgtgacaataaaaattcaaatagaattttaaaaattcaaataggactgaagggaacaaactaaaatataagtggttgcccaagaaccatctttaagcatctctgggttttagttcttgcaatgattacttctctttgtgacactgtgttattttgatcttgacatttttaaagaaaacatggattgacagatacaaatgtctttgcatatgtcaaaatacttttaaaaataaataaaggggaaaagagcctctcagaaatggccactaggtggtagaagttgactaaaaactgctttattcggtagagccatctcgattgctgcccgcgacttttttcctctagggagaagggatttcttcagggtcttctcctgagatatccaacatctcctcctcgagcccctttgcttagaatgccctgtagccattttagactgcacacaaatggagataacacaagcaacttctcaccttccagagggcaggacaagatgaagaaggaagatcttcggaagtggaaggttaagaaagacaagtacacacccatacacacgccagtcctaccaaggcaatggtgacagcaggaagagatggctgctcttcctccagagcagctgtgatgcagacccacctgtcacccaagaaggagaaaagtgaacaacagcttctgccctagtggagcctgaattaactcataagtccccacccccagaatctctttgcgctttggtctgtgatattgtacttaacacacgctcaataaagacttattgatttgacttaatctcaaaaccacatttctaaagcaccaaaggactatcttttgattcattagatgtttcttgagctcacacaagtgcctaaacaacaggggaaaaggtcgtaaagataaataaaa

SEQ ID NO: 683364 - DNA, 1329 bp, Homo sapiens
ttgcactaattgccagaaattaacacccctcaaaacgtgtgtgtgtgtgtgtgtgtgtgtgtgtgtatgtatattttagattgagtctcactttgtcgcccaggctggagtgcagtggcgagatctctgctcactgcaacctctgcctccccagttcaagcaattctcctgcttcagccccccgaatagctgggattacaggcgygcaccaccatccctggctaattttttgtatttttagtagagatggggtttcaccatgttggccaggctggtctcgaactcctgacctcaggtgatctgccagccttggcctcccaaagtgctaggattacaggcatgagccaccttgcccggctctatttatatattaaaaagacctttataaatttaaaaacttaaaatatatattataaaagtatcatacacatgtgacaataaaaattcaaatagaattttaaaaattcaaataggactgaagggaacaaactaaaatataagtggttgcccaagaaccatctttaagcatctctgggttttagttcttgcaatgattacttctctttgtgacactgtgttattttgatcttgacatttttaaagaaaacatggattgacagatacaaatgtctttgcatatgtcaaaatacttttaaaaataaataaaggggaaaagagcctctcagaaatggccactaggtggtagaagttgactaaaaactgctttattcggtagagccatctcgattgctgcccgcgacttttttcctctagggagaagggatttcttcagggtcttctcctgagatatccaacatctcctcctcgagcccctttgcttagaatgccctgtagccattttagactgcacacaaatggagataacacaagcaacttctcaccttccagagggcaggacaagatgaagaaggaagatcttcggaagtggaaggttaagaaagacaagtacacacccatacacacgccagtcctaccaaggcaatggtgacagcaggaagagatggctgctcttcctccagagcagctgtgatgcagacccacctgtcacccaagaaggagaaaagtgaacaacagcttctgccctagtggagcctgaattaactcataagtccccacccccagaatctctttgcgctttggtctgtgatattgtacttaacacacgctcaataaagacttattgatttgacttaatctcaaaaccacatttctaaagcaccaaaggactatcttttgattcattagatgtttcttgagctcacacaagtgcctaaacaacaggggaaaaggtcgtaaagataaataaaa

SEQ ID NO: 683365 - DNA, 662 bp, Homo sapiens
cttttaatgcaattaactccaactttgatagcaaagtggttgctcggacattaaagatcctgggtttgagttgaacaaactatactatctcatgaaattttgtctggaagctagtgcttctcattaaagactttccgggccgggcgcgatggctcacgcctataatcccagctctttgggaggctgaggtgggtggatcacttgaggtcaagagttcaaaaccagcctagccaatatatagtgaaaccccatgtctactaaaaatacaaaaattagccgggcatggtggcacaggcctgtcgtcccagctacctgggaggctgaggcaggagaattgcttgaacctgggaggcrgaggcaggagaattgcttgaacctgggaggcggaggttgcagtgagctgagactgcaccactgcacgccagtctgggtgacagagtgagagtccatctcaaaaaaaaaaaaaaaagacttcccatgaaatcccttttaaaatctcctctgacagacctgtaagcttttatgtcaaacttttccaaaacacttggtaaatcttatgaaaggaaaaaaaagggaaatgattttaattttcttagaatacaaatggctagaaagcaaaaacagtctgtacctaaaagtactgtctctatatgtaagaaagc

SEQ ID NO: 683366 - DNA, 1881 bp, Homo sapiens
gcttaaataactgttctaccataattaagggaggtgtgcagttattcacacttcacacccactcctcttaagaacagaagcacaagaatccagagagattgggctttgatatgagcttgacttagtacaaattacagctttsccacttaacaaattgtataatatcctacaaattaattacttcttagctttagttttctcatccataaaaataagaacaatgacagcacagtagacagatgccatagtcatcatggtcagtgatatctttgacagggtatggcaaggcctggcacagaggaggtaataattcattcatggagtatcaggcacaatggacactctggatgcagctataaacaaaacagactgaagtcccctgcccttgggagatactagcccagcagtgatagatagaaaggtagacagaggtggacaggactccccagctagtccccaaagtgcagccagggtggacaccagaactctagggcaacatgggaagtctctggccaagttcctggtgaaaggaaagctatgaattgtcctgttgccaagacccgcctgaatgctgcctgtgcactgtcgctatagcctaattagtggcagagcatgccttgatccctcccgctccccagtatgatgggggctcagaacagcagaacagctgtgcagcctcacactacagtgtctttggacacacacgccagccagccccatagtgaggaccaaagacacaaggagatcatttccggtcaaattcatcaattgtaatgaaatctccacgtttgctgctagagactgatcccacagatacttgcagatgataaagccagaccaggaggctagagccccgtttattacgaagaggctcctgcaactttttgaaacggcaacccacacctcgatgagcagatgctctatgctgttttgtacttgtctcccaatgatggagccaaatgatccaccgagctgcctgtatcttctctattacctgcctgcctggaagatggagaagttagtctctaactgcacttgatttttctccttctgcttgcctccctcccatggcagctttcttacaggcactgggcatttaattgtacatgccactattcgtcgtgcccagagctcaagcaggggctgctggccctagcttcttcacgctacaggctgagcgtgctctcattcctgtcccatcggcttcatgaatcatagttcatgttctcataattatctcatgttttgggctcaagagggagatcctagcaagctcaagaagaaggtgaagtttttagtctgcaccaaatgaggaacacaactgtgcatacttcctttgtatgtcaattagcagcatatggtgagagccaaacacactaataaagttataaagaaatataggggttagggagacagatgcttcctcataggtgccggcaagagcgcatgctgttaacgttgcaatttcccaaacagattgtctgaacacctgcagatgttcaagagccctcctactctcaagaactctccttggtgtctctttcaacaagatcatcataattcagggaagggtatggtgtttagggtggagaggctatgtgacaagtttcatctcacacctggggttggctggagtgctgtgttgagaaggattctgaggctgcacttgggctcagcgggaacaaagacagtgttcagttattatgtttgtcacaaaggggcacggagcaggaaaacgcatgtgcacccattggacctgtctgcgaatggaaagagccctcactgagaaactgaacatcttgcggtcctgaggaagtcattccctttcctcagccttggtttcctgatctgtaaaatcaagatggtgataatatttccatt

SEQ ID NO: 683367 - DNA, 852 bp, Homo sapiens
tgaagcaatccaaaaatcatctttttattttccacttttgggtgccaaacttactcccttgccagatccaatggatgactgagtcctgcatgaaactctaattgattttcctttataaaaaatcatcttattacctcacaagcaattttgtctagatagtttgcatcttagctcaaaacctcactccacatttcccaacggattgctaaacatacagaattggtgtcctattctttagtcttgtcccctcctcttctttcacactgctgacagagtgatctttcaaaaatgcgtttgtttattcaatagcttgaaacatcttgtggttgtccgtggcctatagaatgaaggtcaaatcttttaacacccatttcatgttctgaactgtcattcaagttgtaactacaacagaagtcagtttctgtgtataacattgatttgctctgtatctttagaatataaagacctcctgtctcaattataccaactttcttagtttttctaatagttcagcagtgcttgttccttttatagaaatctgtgaaaactgcaaaaatatacaatatgtagtcttattgatatgtaagcatttcctttgcagaattccattgacttccttagaaagaaatcacatgcttatagattccttctacatatttaatgacagtggattttgcagaaaatgaaaattatgttttactttaattttctttgagagtccattattacttagragcaatttttcatatatatgtatatatatatgtatttattattttccttaatcaaataatttggaactttagaatcttgaattgtacttctttgagggagaaattgtattttttgcct

SEQ ID NO: 683368 - DNA, 852 bp, Homo sapiens
tgaagcaatccaaaaatcatctttttattttccacttttgggtgccaaacttactcccttgccagatccaatggatgactgagtcctgcatgaaactctaattgattttcctttataaaaaatcatcttattacctcacaagcaattttgtctagatagtttgcatcttagctcaaaacctcactccacatttcccaacggattgctaaacatacagaattggtgtcctattctttagtcttgtcccctcctcttctttcacactgctgacagagtgatctttcaaaaatgcgtttgtttattcaatagcttgaaacatcttgtggttgtccgtggcctatagaatgaaggtcaaatcttttaacacccatttcatgttctgaactgtcattcaagttgtaactacaacagaagtcagtttctgtgtataacattgatttgctctgtatctttagaatataaagacctcctgtctcaattataccaactttcttagtttttctaatagttcagcagtgcttgttccttttatagaaatctgtgaaaactgcaaaaatatacaatatgtagtcttattgatatgtaagcatttcctttgcagaattccattgacttccttagaaagaaatcacatgcttatagattccttctacatatttaatgacagtggattttgcagaaaatgaaaattatgttttactttaattttctttgagagtccattattacttaggagcaatttttcatatatatgtatatatatatgtatttattattttccttaatcaaataatttggaackttagaatcttgaattgtacttctttgagggagaaattgtattttttgcct

SEQ ID NO: 683369 - DNA, 852 bp, Homo sapiens
tgaagcaatccaaaaatcatctttttattttccacttttgggtgccaaacttactcccttgccagatccaatggatgactgagtcctgcatgaaactctaattgattttcctttataaaaaatcatcttattacctcacaagcaattttgtctagatagtttgcatcttagctcaaaacctcactccacatttcccaacggattgctaaacatacagaattggtgtcctattctttagtcttgtcccctcctcttctttcacactgctgacagagtgatctttcaaaaatgcgtttgtttattcaatagcttgaaacatcttgtggttgtccgtggcctatagaatgaaggtcaaatcttttaacacccatttcatgttctgaactgtcattcaagttgtaactacaacagaagtcagtttctgtgtataacattgatttgctctgtatctttagaatataaagacctcctgtctcaattataccaactttcttagtttttctaatagttcagcagtgcttgttccttttatagaaatctgtgaaaactgcaaaaatatacaatatgtagtcttattgatatgtaagcatttcctttgcagaattccattgacttccttagaaagaaatcacatgcttatagattccttctacatatttaatgacagtggattttgcagaaaatgaaaattatgttttactttaattttctttgagagtccattattacttaggagcaatttttcatatatatgtatatatatatgtatttattattttccttaatcaaataatttggaactktagaatcttgaattgtacttctttgagggagaaattgtattttttgcct

SEQ ID NO: 683370 - DNA, 1470 bp, Homo sapiens
atcctacctaatcaaaatgcctgcatagccaaaacaatcctaagcaaaaagaacaaagctggagatatcaccctacctgaattcaaactatactacaaggctacagtaaccaaaacagcaaggtaacggtaccaaaacagatacatagaccaatggaacagaacagagacctcagaaatagtgccacacatgtacraccatctgaactttgacaaacatgacaaaaatatgcaatggggaaaggattccctattaataaatggtattataaaactggctagccatatgcagaaagctgaaactggatcccttccttacaccttattatgaaaatgctcaaacttttaaagttgcaagaataatataataaaaactcttaggatccattttgaatggatccatatcttatgctttccctgatttagacctggaattagcctcagtttcttccagtatctaaaaatacttagtggatgtatgatggtagtttagagaacactaggcactaggggtgctcattactgctagggtgcctttgtctatatgttctttcatacatatcaatcaagagtttacactgatatttccttttcacatttaatattacaatgttaaaagttaagttttattcaagttttctgattttatatctttcttgtttacataaaaatcatgttttacaacaattcatataattacttatttgctttaactacaatattgctaatggagtttcaatatgacaataattttgctaacaatacagctgcttgctttgcagtttcagtgtccttatagtaaatctcactcgtagaattaggcttatttgcttctgttttcaattttaataattttttcctttgatttttttaaagtgtgaaacattttcaatgttagaatccatctttaacaattaacaggaatcaatcagatataatcatctaaatctatgttagtcaaaatgtggtaaaacagtatcatcaatatataggagctcagtagaaatgcagaatcttaggcttcatcctgtgtctattgaatcagactgtacaatttttaatatatccctaagtgatgtgtatgctctctgaagtttgagaaagagtaatctagactagggattctcaacctaggcaacacataagaactatctgggaatattttttttaaatcacaatgcccaggctctctaccagctgaattaattcagaacctccaggggtgagacccaggaatctgcattaaagtgaacagctgagttgagaatctcttatataggttctgttacttagagtaagaatctctatccttgtagaaccattaaaattttcagttcaataaaataacattagtttttgaacattgtgtatttttcatttatttgtaaattatttgacattgtatttgatgaaatgtatgaaaaaaaagttttctttccatggaatataaaacaacttaactatctttaat

SEQ ID NO: 683371 - DNA, 1470 bp, Homo sapiens
atcctacctaatcaaaatgcctgcatagccaaaacaatcctaagcaaaaagaacaaagctggagatatcaccctacctgaattcaaactatactacaaggctacagtaaccaaaacagcaaggtaacggtaccaaaacagatacatagaccaatggaacagaacagagacctcagaaatagtgccacacatgtacgaccatctgaactttgacaaacatgacaaaaatatgcaatggggaaaggattccctattaataaatggtattataaaactggctagccatatgcagaaagctgaaactggatcccttccttacaccttattatgaaaatgctcaaacttttaaagttgcaagaataatataataaaaactcttaggatccattttgaatggatccatatcttatgctttccctgatttagacctggaattagcctcagtttcttccagtatctaaaaatacttastggatgtatgatggtagtttagagaacactaggcactaggggtgctcattactgctagggtgcctttgtctatatgttctttcatacatatcaatcaagagtttacactgatatttccttttcacatttaatattacaatgttaaaagttaagttttattcaagttttctgattttatatctttcttgtttacataaaaatcatgttttacaacaattcatataattacttatttgctttaactacaatattgctaatggagtttcaatatgacaataattttgctaacaatacagctgcttgctttgcagtttcagtgtccttatagtaaatctcactcgtagaattaggcttatttgcttctgttttcaattttaataattttttcctttgatttttttaaagtgtgaaacattttcaatgttagaatccatctttaacaattaacaggaatcaatcagatataatcatctaaatctatgttagtcaaaatgtggtaaaacagtatcatcaatatataggagctcagtagaaatgcagaatcttaggcttcatcctgtgtctattgaatcagactgtacaatttttaatatatccctaagtgatgtgtatgctctctgaagtttgagaaagagtaatctagactagggattctcaacctaggcaacacataagaactatctgggaatattttttttaaatcacaatgcccaggctctctaccagctgaattaattcagaacctccaggggtgagacccaggaatctgcattaaagtgaacagctgagttgagaatctcttatataggttctgttacttagagtaagaatctctatccttgtagaaccattaaaattttcagttcaataaaataacattagtttttgaacattgtgtatttttcatttatttgtaaattatttgacattgtatttgatgaaatgtatgaaaaaaaagttttctttccatggaatataaaacaacttaactatctttaat

SEQ ID NO: 683372 - DNA, 1674 bp, Homo sapiens
gggttgataggtgcagcaaaccgccatggcacatgtatacctatgtaacaaacctacacattctgcacatgtatcccagaacttaaaagtaggaaaaaaaaagaactcaatcccactcccacttataatagctacacaaaaaacacatgcctaataatatacttataagtaagggctaagctatgggtacacgaaggcttacagagtggtctaattgacactgcggactcacaagtggggagaatggaaaggagatggggcaaaatacactatttggatgacaagtacactaaaagtccagacttcataactgtacaatttattgaagaaaccaaaaatcaatggcacccctaaagctattgaaataaaataacaaaatgaaataaaacaaaacattaaactattaaataatgccggttcctattacattaactgtaaatgacatagataaacctgtgcagaaaaggacactggaagagttgattctaaaaagtgacctaactatatgctatttataagaaattcacttcaaatataataacgtagttatgtggtaattaaaataatgaaaaaagttatatcatgaaatagtaaaagaatacaagaattcctatgttagtgtcagataaagtagacttcaaaacaaaataaaaattatcagagacacagagggatactacctagtaacaattatcaacctaaaagacataacaatcctcagtgtataccacaggcaacaaaactgcataatatttgaagcatatattgatagaaggagaaatagacaaatctagtactgtagttggagactccaacacccctctctcaactactgatagaataactagacagaaaatcaacaaagatttggaagaccaataccatcaccccacaggatgtaattgacatttatagaccacctcccttcagcagtagcagaatatgcattcttttaagaacctattgacttatataaaacttgctatattcctgtaatggcaaaattataaaaatggaaaacagatcaatggttcctatcaatcacatttgttatgtttaacattttgtttaagtttttatatttctgtggtgatcataagtatcattcatttaattgatcaaaaggatgaataaataattytgataatgaaaatgtgttaaagtgcatgtgattttagaatggtttattaaaacagaggtagaatttggaaggaatgacatatttgctttaacttctgccgtgtcttgcatggcaaacagcatttaacctttaattaaaatttgctttggaccacttttaatgaaatgtacttgagaatttactattaaagtagtgcttttattcttacttttgaaattaccatcaaatcagaagctttgccaagaacaaatacccaaggatgaatcaccaactgtcctacaacttagataaactaaataaattcagagaaaactgttttcaacttcagctttagggatacattcttccaagtataatgctgaataatttgcaagcttatcctttaaggagatttgatttgcacctaaaagctttgaaaaacctctcttgatcattacatgctcactgtatttagtataactgtcttagaaacatttccttttctcttcatttgagcagcatgatctgcctgcgtctttcagcactctcaagag

SEQ ID NO: 683373 - DNA, 1350 bp, Homo sapiens
ggtgcctagacaggtgtttaactctttcttcccaccgcacaccggaagtataaagaactcagaaaagacacaattacctctcactacagtatgggcaaaagtccatcttcctgttattagatcattgactttacctctgagttgcctaaagtgtcagagagattccttttcattgaaatatgtgaatatcacacaaaatttttaaattatgggtattgctaattaagtattagttataaatcactgcgtcacacagttaaatctagtgaatgacatcaactatatacatattgtttgcaaatgtgagtattgacatattaaaatgatagagatgttttgctatcaccaattaaattagtatattagtacatagctacattagaaaaaacttaacatgattgattgtttatgaaaaacagcagctaaagaccagaaattctttttttttttctttttgagacggagttttgctcttgttgcccaggctggartgcaatggcgtgatctcagctcaccgcaacctctgcctcccgggttcaagcgattctcctgccttagcctcccgagtagccgggattacaggcatgcaccaccacgcccggctaatttttttgtatttttagttgagatggggtttctccatgttggtcaggctagtgttgaactcctcacctcaggtgatctgcctgcctcagcctcccaagaccagaaattttaataggtcatgattttgactaaaactgtactgctttcttcaggggcaagcacttttgtttgttcttcttaaacccaatgctattacatgttagcattatcagggtccaatataaccaccagatccttttcttgtaataaatgtttatatgggtaaagggacagaactaataacacatcataatttcataatattttatggctagtttagtgatccatataaattgtcctagaggtctaatcatattatttagagagcagatgctgcacaaaaagtgcgacggtttttttttcacagtaagtctccagtgaagctgacttattgtcatagggttcatctctagggaggtctggcattcagtttcaaaacgatttagagtcctaacactgtctacaagggcattaataatttgcatgctgtgggaacttgtctacagtgaactagactgaaaccattctgtatttcacattagtactagagcagctgttgatgttagcagtattaatcacaagcaacttggactggaatcaaagtgacctagaagagctactttctacatcttgctatgaattccctagggcaaagacattatgtggcaatatgtccacattaaaagaaagtatatcctttgatta

SEQ ID NO: 683374 - DNA, 1350 bp, Homo sapiens
ggtgcctagacaggtgtttaactctttcttcccaccgcacaccggaagtataaagaactcagaaaagacacaattacctctcactacagtatgggcaaaagtccatcttcctgttattagatcattgactttacctctgagttgcctaaagtgtcagagagattccttttcattgaaatatgtgaatatcacacaaaatttttaaattatgggtattgctaattaagtattagttataaatcactgcgtcacacagttaaatctagtgaatgacatcaactatatacatattgtttgcaaatgtgagtattgacatattaaaatgatagagatgttttgctatcaccaattaaattagtatattagtacatagctacattagaaaaaacttaacatgattgattgtttatgaaaaacagcagctaaagaccagaaattctttttttttttctttttgagacggagttttgctcttgttgcccaggctggaatgcaatggygtgatctcagctcaccgcaacctctgcctcccgggttcaagcgattctcctgccttagcctcccgagtagccgggattacaggcatgcaccaccacgcccggctaatttttttgtatttttagttgagatggggtttctccatgttggtcaggctagtgttgaactcctcacctcaggtgatctgcctgcctcagcctcccaagaccagaaattttaataggtcatgattttgactaaaactgtactgctttcttcaggggcaagcacttttgtttgttcttcttaaacccaatgctattacatgttagcattatcagggtccaatataaccaccagatccttttcttgtaataaatgtttatatgggtaaagggacagaactaataacacatcataatttcataatattttatggctagtttagtgatccatataaattgtcctagaggtctaatcatattatttagagagcagatgctgcacaaaaagtgcgacggtttttttttcacagtaagtctccagtgaagctgacttattgtcatagggttcatctctagggaggtctggcattcagtttcaaaacgatttagagtcctaacactgtctacaagggcattaataatttgcatgctgtgggaacttgtctacagtgaactagactgaaaccattctgtatttcacattagtactagagcagctgttgatgttagcagtattaatcacaagcaacttggactggaatcaaagtgacctagaagagctactttctacatcttgctatgaattccctagggcaaagacattatgtggcaatatgtccacattaaaagaaagtatatcctttgatta

SEQ ID NO: 683375 - DNA, 652 bp, Homo sapiens
aggttcctcaaaaaattcaaaatacaactaccatgtgatccagtgatcgcactactgggaatgtattcaaaggatatgaaatcagtatctccaagagatacctgtaccctcatatttattgcagcattattcacaataaccaagatatgaaattaacctcaatgttcaacagtggatgaataaagaaaatgtagcatttatgtacaatgaaatactatttgaccttaaaaaaataaggaagtttcatgccgtttcaagggagtagttaaaaaaataaataacaaaataaaataaggaaggcctgacatttgcatcaacacagatgaactgtgaggaygtttttttaggtgaaataggccatgagcagaaaggccagtactgcatgatctcacttatatgtggaatctaaaaaagtcaaactcaggccgggcacatttccaggccctgagaggacacagaggcctgaaacccttttctgcatggcccgcagcagtttagacctgtgtcaagagctggcagaactggaatgtcttgcaactgggatgtaggggagagctgttggtcagaggatgcaaaatttcagttagataggaggaatatgttcaagagatctattgtgcaacatggtaactgtagttcataacaatgtatt

SEQ ID NO: 683376 - DNA, 581 bp, Homo sapiens
gaacagagcaaatttttctcaattcataggttctgattgacatgcaccagcaataaggcgttgcacaattacagctgctctgcattcctgccctgggcagcaattgccatagtgatgtgacaccactggatcactgtggcacgggaacgatactgaatctccccttgttttgaaaagggcaatgctttgaaaaagaaagaaaaaaaaggaaagaaagaaggaaggaaaaaaaagagagggggggctggaaaagaaaggggcttagactcttaattttttttcatattaatcacattgatatgcacatcctgtaagggaaggggtaggtcttgttatcagccacatggaaaaatgggggaataatggcattatcttttatctgtttagcacagtttttttcagagtgtcaaaaaagtctatagttacacgaaacagactcaaaaaagagggcctaaaagcaaatcatgccagcttgaaatctccaatccttctaaagaaactgcagtgtgatgtgggctcayggcgctgctctctatgctgggaaagctgctgctgctgcctttaccgggagtgtgggcatc

SEQ ID NO: 683377 - DNA, 390 bp, Homo sapiens
  misc_feature 16, 26: n = A,T,C or G
caaatattaagaacangattcattgntatcttctgtctgcctatggcatgttttatttacctctgttactgtaatatattcattgtaattatttgtgtagatttgatttttatatccaatttcccaytctgtctgttccacactcccatggactttgcctgtaacccccagtggatgaaggacttcagatgcactctgtttttaggctacactgttgagctcctctaggtcaagacattttaggagactacttttaatgttggtcttattttagtcccttgggcataagtctcaggaaggaggcaaaaaagaaaagctgcatgatgaactccaatttttcccttttagaaaagctctagccaggtgcggtggctcgtgtctctaattcca

SEQ ID NO: 683378 - DNA, 1001 bp, Homo sapiens
taattgagtgcctaagatgtgtcaggtgctgtgataagcactttggattaaacggtgcccaaaatagatatctctgtcctcagagttaggatctatctagtggaggacacagacatgggaaaaataactttcttttttcaaattatgtaaattataactcagataagcactgtgtggaaagttacatgatactttaagaacatataacaggggtgtttgacctaattaggaaagtaagagaaagctttcttagtgaaggcatggtagaatagtgagatgaagaataatgtaatacttagtttaagaaagaaagcagaaatttctatggaaatcagttttaataaagttgttctttgctattgcactctataaaaaatgaatatgctgaaggcatgaaaacttttgatttttaaatttttaattatgactacataataattgtacatatgttatggggtacatgtgatattttgttacaaacatgcaatgcataatgaccaaatcagcrcaattgggatatcaatctcctcaagtatttatcatttgtttgtgttaggaacattccaattacactttttagttattttgttttagttatttttgaaataaataacaaattactgttacgtatagttgccccattgtgctaatgtatactagattttatttattctatttaactgtatctaatatttgtacctattaactatcaatttcttcactattccctctctgaaatatacattgtcaaaagattttggataccattttaccttttgatatatatgtatatatttgcatacactgtatttggtttattttagcaaaatctgatgatattaaatatattcctctaaagtttataggtttttgttttgatttgcttttgtttttcaccttataataattttggatacctttccttgtcaacacttatggaactttttattattcttaatagccgtataagattttattcctgcatctaagattgttattta

SEQ ID NO: 683379 - DNA, 1001 bp, Homo sapiens
taattgagtgcctaagatgtgtcaggtgctgtgataagcactttggattaaacggtgcccaaaatagatatctctgtcctcagagttaggatctatctagtggaggacacagacatgggaaaaataactttcttttttcaaattatgtaaattataactcagataagcactgtgtggaaagttacatgatactttaagaacatataacaggggtgtttgacctaattaggaaagtaagagaaagctttcttagtgaaggcatggtagaatagtgagatgaagaataatgtaatacttagtttaagaaagaaagcagaaatttctatggaaatcagttttaataaagttgttctttgctattgcactctataaaaaatgaatatgctgaaggcatgaaaacttttgatttttaaatttttaattatgactacataataattgtacatatgttatggggtacatgtgatattttgttacaaacatgcaatgcataatgaccaaatcagcgcaattgggatatcaatctcctcaagtatttatcatttgtttgtgttaggaacattccaattacactttttagttattttgttttagttatttttgaaataaataacaaattactgttacrtatagttgccccattgtgctaatgtatactagattttatttattctatttaactgtatctaatatttgtacctattaactatcaatttcttcactattccctctctgaaatatacattgtcaaaagattttggataccattttaccttttgatatatatgtatatatttgcatacactgtatttggtttattttagcaaaatctgatgatattaaatatattcctctaaagtttataggtttttgttttgatttgcttttgtttttcaccttataataattttggatacctttccttgtcaacacttatggaactttttattattcttaatagccgtataagattttattcctgcatctaagattgttattta

SEQ ID NO: 683380 - DNA, 1450 bp, Homo sapiens
cccggcctgtctctccatcctcggcctgacctgctcatggtgtctgcggccttcaccccgtgaccactcccgagggaagccgcctgcgaccctggcaaccctcctgccttgtgtaccccagtcgtgggtctcctgctctggccagattctggattcctccagaggggacaggccagcacctggggtggcgccaggcccaccgagaggttcagcagcgacagctgtcgttgggtgtagatgcttggtgccaaggcgtgccrccccttccagggaaagcacgtggggcagggcaccttgcgcaccagcattgagagcaccccagcaggaggcccgtgtgctgctcgccgcactgagcatcgtgggtgggaggcacgggcggtggtgccacggtgggctctgtgtctccactgatcccctttgaatgtgccaagtgccagtcccgacgtgtagacttggggttgtccaagcagaggggaaagatggagaaaggaagccccacagtgtcttgttgaggattggaacgcgggccctgacaccgcagggtgtaaagttaaaatcacgatgtcaggccatgaggaacggtccaaggcttccaggcacagtccatggcagctgtgtggtttgaggggctgacctgggtcccaaggcaggccggccagatgtaggggtgagttagtgggagtcagagagaggcgtggggaggcctgacctagggctgggggctggcaacacaggagagaccagggccggggccgcacggaggctggggcagctgtggggactataggagtcagagctgagggcaaaggggaggaggctggcgggtggaggtgcccagggaggcctggggccgggtcccaccaggctctggaggggcctgtgggacaagggtggagaagcagcctccacaggaggactgggagccgagggcctggcccgggcctagcggttccccccagtgccctgtgccttcttgtctcccggggtgagaagcctcccttctgggctggggacggctgcctggtccagggctgctccggacccagcgtcttcccggctcccagggttggcagcacaaaggcgggacaggcctgtgcacgcagcgcctcctctagattaggtgggctgggtcgcacctgcaggtcctccccaccctcctgacacccagccagcgcttggggcagaaaccaagtaggaaggtgatggctggaagagggaatgcctgggtttctctcttggcaccgcttttaacccgactgttggccttcgttgacgcaacacagggtggctgaaacttggatagttaactccactctgcctttcttgaagaacccacaggcagagttcgggtggagttaggagatggggcgggaatttcaaaccctcgtgttaaataaaaccatgaacactctcagaggaatatagcagtgtagtctatgacacatcattc

SEQ ID NO: 683381 - DNA, 1450 bp, Homo sapiens
cccggcctgtctctccatcctcggcctgacctgctcatggtgtctgcggccttcaccccgtgaccactcccgagggaagccgcctgcgaccctggcaaccctcctgccttgtgtaccccagtcgtgggtctcctgctctggccagattctggattcctccagaggggacaggccagcacctggggtggcgccaggcccaccgagaggttcagcagcgacagctgtcgttgggtgtagatgcttggtgccaaggcgtgccgccccttccagggaaagcacgtggggcagggcaccttgcgcaccagcattgagagcrccccagcaggaggcccgtgtgctgctcgccgcactgagcatcgtgggtgggaggcacgggcggtggtgccacggtgggctctgtgtctccactgatcccctttgaatgtgccaagtgccagtcccgacgtgtagacttggggttgtccaagcagaggggaaagatggagaaaggaagccccacagtgtcttgttgaggattggaacgcgggccctgacaccgcagggtgtaaagttaaaatcacgatgtcaggccatgaggaacggtccaaggcttccaggcacagtccatggcagctgtgtggtttgaggggctgacctgggtcccaaggcaggccggccagatgtaggggtgagttagtgggagtcagagagaggcgtggggaggcctgacctagggctgggggctggcaacacaggagagaccagggccggggccgcacggaggctggggcagctgtggggactataggagtcagagctgagggcaaaggggaggaggctggcgggtggaggtgcccagggaggcctggggccgggtcccaccaggctctggaggggcctgtgggacaagggtggagaagcagcctccacaggaggactgggagccgagggcctggcccgggcctagcggttccccccagtgccctgtgccttcttgtctcccggggtgagaagcctcccttctgggctggggacggctgcctggtccagggctgctccggacccagcgtcttcccggctcccagggttggcagcacaaaggcgggacaggcctgtgcacgcagcgcctcctctagattaggtgggctgggtcgcacctgcaggtcctccccaccctcctgacacccagccagcgcttggggcagaaaccaagtaggaaggtgatggctggaagagggaatgcctgggtttctctcttggcaccgcttttaacccgactgttggccttcgttgacgcaacacagggtggctgaaacttggatagttaactccactctgcctttcttgaagaacccacaggcagagttcgggtggagttaggagatggggcgggaatttcaaaccctcgtgttaaataaaaccatgaacactctcagaggaatatagcagtgtagtctatgacacatcattc

SEQ ID NO: 683382 - DNA, 1450 bp, Homo sapiens
cccggcctgtctctccatcctcggcctgacctgctcatggtgtctgcggccttcaccccgtgaccactcccgagggaagccgcctgcgaccctggcaaccctcctgccttgtgtaccccagtcgtgggtctcctgctctggccagattctggattcctccagaggggacaggccagcacctggggtggcgccaggcccaccgagaggttcagcagcgacagctgtcgttgggtgtagatgcttggtgccaaggcgtgccgccccttccagggaaagcacgtggggcagggcaccttgcgcaccagcattgagagcaccccagcaggaggcccgtgtgctgctcgccgcactgagcatcgtgggtgggaggcacgggcggtggtgccacggtgggctctgtgtctccactgatcccctttgaatgtgccaagtgccagtccygacgtgtagacttggggttgtccaagcagaggggaaagatggagaaaggaagccccacagtgtcttgttgaggattggaacgcgggccctgacaccgcagggtgtaaagttaaaatcacgatgtcaggccatgaggaacggtccaaggcttccaggcacagtccatggcagctgtgtggtttgaggggctgacctgggtcccaaggcaggccggccagatgtaggggtgagttagtgggagtcagagagaggcgtggggaggcctgacctagggctgggggctggcaacacaggagagaccagggccggggccgcacggaggctggggcagctgtggggactataggagtcagagctgagggcaaaggggaggaggctggcgggtggaggtgcccagggaggcctggggccgggtcccaccaggctctggaggggcctgtgggacaagggtggagaagcagcctccacaggaggactgggagccgagggcctggcccgggcctagcggttccccccagtgccctgtgccttcttgtctcccggggtgagaagcctcccttctgggctggggacggctgcctggtccagggctgctccggacccagcgtcttcccggctcccagggttggcagcacaaaggcgggacaggcctgtgcacgcagcgcctcctctagattaggtgggctgggtcgcacctgcaggtcctccccaccctcctgacacccagccagcgcttggggcagaaaccaagtaggaaggtgatggctggaagagggaatgcctgggtttctctcttggcaccgcttttaacccgactgttggccttcgttgacgcaacacagggtggctgaaacttggatagttaactccactctgcctttcttgaagaacccacaggcagagttcgggtggagttaggagatggggcgggaatttcaaaccctcgtgttaaataaaaccatgaacactctcagaggaatatagcagtgtagtctatgacacatcattc

SEQ ID NO: 683383 - DNA, 229 bp, Homo sapiens
ctcgttgtccagaaactgaaggatggtgcccaattggtaattccaagcgcctcagctttgttatgacagtgctttcatgattagctcggtgccaagtcctcacatactgaagggacgaaataaatgtttagtaaaattaactgctacccaacttccccctggctaaggtctagtcgcgaaagtggtycttcagttccacgaacacagccaggtctcccctccctcagcc

SEQ ID NO: 683384 - DNA, 641 bp, Homo sapiens
agtgatatagaaaaagaagacattagaaagagaggtatgtcaccttctgaatacactttagggaaaaaatgtggaaagaaaaagtttagttgagasaataaactatagcaacagcaaaatattctccctaccctttcaagtctaacatcttcaaaccatttatagtccaatggtggagggaagtcaatttagagaccacactactcaaaagtcaaaaaacatttgctggggttactaatttaatatttcaaggaaactttccacacctcatcttccaacaaactcattaatgctgaatctttatgatgctctgaatttaaaattctgctaccgtcttaccccggaacactcacttctgccaataaaaacacttgcttttagtaaggtttgcgggttcactcatctttgctcaagcggctttctccatctgaaattcatttttctcttctctctctacctgttccaatcttgcctggcccactcagtcaactgtgggactctctctcccatacaacctcttttgactcgtggaactgtaacgctcccattctggccactctgggtgtccaccacacattttctgtctcacactaggagtttggatcctacaacatgtaaaagcataaacttgagagcctacc

SEQ ID NO: 683385 - DNA, 641 bp, Homo sapiens
agtgatatagaaaaagaagacattagaaagagaggtatgtcaccttctgaatacactttagggaaaaaatgtggaaagaaaaagtttagttgagacaataaactatagcaacagcaaaatattctccctaccctttcaagtctaacatcttcaaaccatttatagtccaatggtggagggaagtcaatttagagaccacactactcaaaagtcaaaaaacatttgctggggttactaatttaatatttcaaggaaactttccacacctcatcttccaacaaactcattaatgctgaatctttatgatgctctgaatttaaaattctgctaccgtcttaccccggaacactcacttctgccaataaaaasacttgcttttagtaaggtttgcgggttcactcatctttgctcaagcggctttctccatctgaaattcatttttctcttctctctctacctgttccaatcttgcctggcccactcagtcaactgtgggactctctctcccatacaacctcttttgactcgtggaactgtaacgctcccattctggccactctgggtgtccaccacacattttctgtctcacactaggagtttggatcctacaacatgtaaaagcataaacttgagagcctacc

SEQ ID NO: 683386 - DNA, 655 bp, Homo sapiens
tttacacaggggtgtggttaaagagaagggarcagtctgtgtccatgtgtgcaatctaccacatcactgttgatcctaatacctaattggcacacaagaaatacttgtggaatgagtaagtgattctcctaacaactgaactttcaaattttgcaaatgatggcgaatcacttgcacatgacaacctagtttcacgtgcacaggggactgctgatgaatagtagagtccccacttgatggctgtgtgatcttcaccctcaagccttggggctttcgcatataaaatgaggatgataattttcatctcacagagttgtggtaagaatcaaatttgagaatccaggctgggcgtggtggctcacgcctgtaatcccagaacttgaggaagctgaggtgggcagatcacctgaggtcaggagatcaagaatagcccagccaacatggtaaaaccctgtctctactaaaataataataataataataataataataataataataatacaaaaattagctgggtgtggtggtgggcgcctgtaatcccagctactcgggaggctgaggcaggagaatcacttgaacccgggaggcagaggctgcagtgagccaagactgagctattgcaatccaacctgggcgacaagagtgagattcc

SEQ ID NO: 683387 - DNA, 655 bp, Homo sapiens
tttacacaggggtgtggttaaagagaagggaacagtctgtgtccatgtgtgcaatctaccacatcactgttgatcctaatacctaattggcacacaagaaatacttgtggaatgagtaagtgattctcctaacaactgaactttcaaattttgcaaatgatggcgaatcacttgcacatgacaacctagtttcacgtgcacaggggactgctgatgaatagtagagtccccacttgatggctgtgtgatcttcaccctcaagccttggggctttcgcatataaaatgaggatgataattttcatctcacagagttgtggtaagaatcaaatttgagaatccaggctgggcgtggtggctcacgcctgtaatcccagaacttgaggaagctgaggtgggcagatcacctgaggtcaggagatcaagaatagcccagccaacatggtaaaaccctgtctctactaaaataataataataataataataataataataataataatacaaaaattagctgggtgtggtggtgggcgcctgtaatcccagctactcgggaggctgaggcaggagaatcacttgaacccgggaggcagaggctgcagtgagccaagactgagctattgcaatccaacctgggcracaagagtgagattcc

SEQ ID NO: 683388 - DNA, 631 bp, Homo sapiens
tatttccttgagcagtggtttgtagttctccttgaagaggtccttcacatcccttgtaagttggattcctaggtattttattctctttgaagcaattgtgaatgggagttcactcatgatttggctctctgtttgtctgttgttggtgtataagaatgcttgtgatttttgtacattgattttgtatcctgagactttgcagaagttgtttatcagcttaaggagattttgggctgagacagtggggttttctagatatacaatcatgtcatctgcaaagagggacaatttgacttcctcttttcctaattgaataccctttatttccttctcctgcctaattgccctggccagaacttccaacactatgttgaataggagtggtgagagagggcgtccatgtcttgtgccagtcttcaaagggaatgcttccagtttttgcccattcagtatgatattggctgtgggtttgtctcttattattttgagatacgtcccatcaatacctaatttattgagagtttttagcatgmagggttgttgaattttgtcaaaggccttttctgcatatattgagataattatatggtttttgtaaaggatataaaatgccagtgagagaggcctgggg

SEQ ID NO: 683389 - DNA, 652 bp, Homo sapiens
aactgttttaatataaagaccattctttagaaagactattataagcaattccatgttaattatagctagtttaatcacacacaattttttttcataaattcctcttcacaaaccttatcatgacatacacagatcatctatgacatgtttggcctttctgacttgtcttataccacctttctcttaaataccagtcagtttattctaggataagatttaccatacaagattttccctcatttaaaattactttctatatcctatgttaccaaaaatacatttttgtatctataaccttttccacatctctcttttctaccgactggttcatttattttttacaactaaaatgccatgtatagccaatcactatgtaaagccacttttctgttagcaattctaaagcctgcaaactttagcatctcacctaggtaagaaccttaaagttaaattttaaaagacrcaatgttaccaacaaactaataagtttagactagtcccattcacccaaagattaccaagttatgtgaacttgagaagtatttggtcttatctgtttagtttatcagagccatttttttataattcaatttgatagcatgttagatacaacacacatcacaacacctgtatatacacataagcagaaaca

SEQ ID NO: 683390 - DNA, 652 bp, Homo sapiens
aactgttttaatataaagaccattctttagaaagactattataagcaattccatgttaattatagctagtttaatcacacacaattttttttcataaattcctcttcacaaaccttatcatgacatacacagatcatctatgacatgtttggcctttctgacttgtcttataccacctttctcttaaataccagtcagtttattctaggataagatttaccatacaagattttccctcatttaaaattactttctatatcctatgttaccaaaaatacatttttgtatctataaccttttccacatctctcttttctaccgactggttcatttattttttacaactaaaatgccatgtatagccaatcactatgtaaagccacttttctgttagcaattctaaagcctgcaaactttagcatctcacctaggtaagaaccttaaagttaaattttaaaagacacaatgttaccaacaaactaataagtttagactagtcccattyacccaaagattaccaagttatgtgaacttgagaagtatttggtcttatctgtttagtttatcagagccatttttttataattcaatttgatagcatgttagatacaacacacatcacaacacctgtatatacacataagcagaaaca

SEQ ID NO: 683391 - DNA, 528 bp, Homo sapiens
tacagtgatattatatgaaacagcaataataggttaaagtgtctagagacttttacagtgtgttagcaattcaacttgtctttttttctagctattgagcatcaacaacaacagtctaagccactattctccagaccatgttggacagtaaactcagaagatctcctrcaatggtgaattgactgttttataatgactatccttggtgactccaaatgtttctgcacttgatttcattttacagtttctaaagaagtgttaggttggcactccaagtagtacctggacatttatgcactgataaagtgcacgcatgtgatcaattgtaagcaagccaatagataacattgtagtcagtaactggctgaagttcagacaacaggaaaaggctgggtttaaccattttctagcaggaaaaggctgggattaacaattttaaaattgttgagattaatttgagcatgagcatcatttttgtaaacttcagagacaaactacctggactggcttcaagcatcaggcaagcag

SEQ ID NO: 683392 - DNA, 1130 bp, Homo sapiens
ccctaggcaacacttaaataggaaaacttttgcctatctgttactaagacatgctgatttccagatatcttagtaccctttttattatctctctgcctggggtttaataacagttaaaagagacaattcatgcaatgtgcaacaaagtttactttgtgtacatatatttgctctgcacatacctggcatatagtaactgctcaataaatatcagtggctattataatctagagcttgttggggagttgtctgagtgagaaaagaacaaaagatactcgttttacaaacaatttttgcttcatctctggatggcatattcatttctgaagcatcttcacactcagttgctaagaataggatatattctttccattgtacagatggagtaaccgagagactggaaagtgacatcaccaacaggcggtgacctagggagtcagggccagaaccaggtctggaatacagacttcctgactcctgacccaggttcccttctgccctgtggccttcacaggacgcctggagagaccagggaagtatctgtttcagggctctctgagttgcccttggaagtttatcatctatcaactgactgttgaccaaaaacacactgattcctgaggagaccttacaggatgtcctgttgagacttttcctcctcttttcattagtgctttgctggcagattaaaattcagcggatcccatttgtaggaagtctgataaaatattctcatctctattgcaaacaacttctccatctgccacttggctgagaggatccgactcaaacactctcaaagaggagagagtgataccaggcagaagaaggtacaggaagcagcaaggggtttgtgtctggacgtgtctacctgatctattgtctgatggagctgacyagccagctctgttaagctgctggcttttcttccctaaaatgcctgaatgcacctataattacttaccctattatttggtatcttatagatgcggctctatatatgcagtgtacaaatctctaagagaaacaacacatttggcattgggcctaggatatagatgagctatgggaggaaaagattggagaatatatgtagtgagatcagaaaagctgatttgagaaaggtaagg

SEQ ID NO: 683393 - DNA, 663 bp, Homo sapiens
tactaattaatatgtatttctcattataaaatgaaaatgactgagaaagaaattaaattttaaagaactattctaatcaaaacttctaagaaattccaatgattttactgataaattatgctaaacttccagtaakcaggtactacatacagtatatagactattcatcacattaaataatgaagaggtttaaattaattctcaaaagcaaacaaggcagattctataacttgacaacatttgcctcaaaccaaaaacaatggaccaatctcaatttggaaaacagatataaacaaacaataatttaatagaaaatacaatttaatgacatacaaataacagcccagctgcattacatagtgtttatgtaaagaaaaaaagatagttttgcaaaagcaataaaaaagacataattatgatgtttgcttagtatttaaaaaaattctcataaatgcaataatgcatgattatttcagagcatagaaatttgggcctgcctcaaatcttaccccaagattaagaaagaatcacttcacagaacagtgtggtctgacaataataccacaataaagttgtttccccagagcttcccaaatcattttgtgccattaaaatattctatgacccaaaactattccagaatattattggtactttatgttt

SEQ ID NO: 683394 - DNA, 656 bp, Homo sapiens
aaattgccaagcctgatgaatggtccaattctatcaattaatatttttgaatactaattttttttaactgaagacaattgactgatgaaagatttagctgatttaatttggctgagtacttcagttgtgtatgtagattgttgtggttttcaaagaccaaatatgtcagggaaacatctttaaatagtagaaatacactggatgctwgatctgggttttgttgcaaatttgtggtgtgattctggcagagtcgactttcataaggtttgtaaatcagactcttgtaaaggaagctagacaggaagtcaagagttctagaattctagtctttgccctatctattcagggcctacttctcttcacataaaatatgacaaatttatatcagtgtcttctgaagttagcaaacccaaattttaggcttctgtcccataagccatcaattattcaggctgtggttcttgggcagtgacatcacaggctctcttgaccttcagaagaatgttttacattttggtgattgtaaataaaggcatctctgtgtgtgagcatactattttccatatggagtaagagtggtgctgatctatattagggagaaaaagtactcctcagtaaacacaacatgctgatatagaatagttcagggttttttg

SEQ ID NO: 683395 - DNA, 656 bp, Homo sapiens
aaattgccaagcctgatgaatggtccaattctatcaattaatatttttgaatactaattttttttaactgaagacaattgactgatgaaagatttagctgatttaatttggctgagtacttcagttgtgtatgtagattgttgtggttttcaaagaccaaatatgtcagggaaacatctttaaatagtagaaatacactggatgctagatctgggttttgttgcaaatttgtggtgtgattctggcagagtcgactttcataaggtttgtaaatcagactcttgtaaaggaagctagacaggaagtcaagagttctagaattctagtctttgccctatctaytcagggcctacttctcttcacataaaatatgacaaatttatatcagtgtcttctgaagttagcaaacccaaattttaggcttctgtcccataagccatcaattattcaggctgtggttcttgggcagtgacatcacaggctctcttgaccttcagaagaatgttttacattttggtgattgtaaataaaggcatctctgtgtgtgagcatactattttccatatggagtaagagtggtgctgatctatattagggagaaaaagtactcctcagtaaacacaacatgctgatatagaatagttcagggttttttg

SEQ ID NO: 683396 - DNA, 658 bp, Homo sapiens
tgctatgaaaatgaaggcaggctgattatactcaccacagagttggaaaaagcaccacagagaaggaaggtttccactaggccttgaagtatgggaaggatttcagtagaacagaatgaatatgaagtaagtttgctccgtgtccccacccaaatctcatcttgtagctcccataattcccacatgttgtaggagggacccatgggagatgactgaaccacggggcaactctttcccatgctgttctcgtgacagtgaatgggtctcatgagatctgatggttttatgactgggagtgtgatagttaatactgaatgtcaacttgattagacygaaggatataaaatattgatcctgggtgtgtctgtgagggtgttgctaaaagagattaacatttgagtcagtgggctgggaaaggcagacccacccttaatctgggtgggcatcatctaatcagctgccagtgtggctagaatataagcaggcagaaaaatgtgaaaacagactggcctagcctcccagcctacacctttctcccatgctggatgcttcctgccctcaaacatccgaatccaaattcttcagttttggaacctggactgcttgctcctcagcctgtagatggcctattgtgggaccgtgtgatcatgtgagataa

SEQ ID NO: 683397 - DNA, 991 bp, Homo sapiens
tgagctatttggatatcatacatagaggtttttttttagtaatttcataatgaaggcagagatcagattaactagattgaactagaaaggaggagtgaagttgaagtagagagaactaatgaagcctattctttcaagattttagtcaaagatataagaacggatactatgttgaggatgaagcaaggttgagaaaaggacttcttgggtttgttttgtacaggggaagaacaaacttgaggcatgtatgacacagggaaaagagccagtgaagaggcagagatggaatagtcaggtgggagaaagtaaatagagacggctgagcaagttctggaagtgttagagggtggggcacattaaggaagtaaattttagaaaacaacattcctttttttgaggcaggtggaatgtagattaaaaacaagtgaaaagatagatgttgaggggaatgttaggcaarttgaaatttatttacgatggaaaagaagtaggttgcacagcagcactggggtgccttttgagagtggaagccagaatgtatttatagtaaatctaatcaggacagattcaggatgatccaagttttgggaaaggtaataatggtgtgatcaaagaagtctgtggcatcctgttattttgtttttaagaactgctctgtattaccatttcacgaatttatggtatagaagcaagttaatttctgtgtccacctgatatatctgtctcatgatgccactgtgctttcatgtagcttaggtcagtgtttcaaattggagttatgaaccattagtgaagggatcatgaaatcagtgtagtttttatttctatttttattttttttttaaataaaacagaataggtagtattcaatataaggcatttggggttcacttttaaatttgtatacgttgcatctgaagtgtgtgtgtgtgtgtgtgtgtgtgtgtgtgtcttaggttgtgttacaaaatgtattttttcctgttagcta

SEQ ID NO: 683398 - DNA, 636 bp, Homo sapiens
aacacctaccaaactacttggattgcagaaagccagtcattatgttggaacctgtacttctcagcacaggcaactgcctaatgggcaactgagcatttgtaggtgtaatcttttaaaagaatacttacaaccacttcaaaagtgaatccaattttttgtctagacagtrgccttacactttgcattaaagaaatattggtaataaatcttgcatttctcttgaggtacatgaagtctactaagaagacaatggattagttagcaccaaggacaaaggagttagaaaccagggctcctaggacaaatggctaattccaggtctatgacagaatatttacaagatgagcttgaaacacagggtctaactgcaaggaagttaaaatcttgtcaaatgaactcagtccaaagatggaacaaattgaatactgataaggacaataattgtgatagactgaaaatgactgctcaccattggagattgctagtcaacaactcattactttgaaaattattaaatacatagaaaaattaagcatttatctttgttttcctatagacttataccactgggtaatagtaaatgaagagaaatttagctttatagaagtaatccagcttacaaataaaaatgaaagt

SEQ ID NO: 683399 - DNA, 1577 bp, Homo sapiens
ttaacagacaccttcagtattaaaagtaaatccgtaataatgaatcttagttgttccatccacttggataatgttagcaggtttagatcaaagcaaattaaatatcagcagtggcaaatcgagaaaaatgttttatgccatttgaatcaaggtttacatttagttcactaaagtccatcctggctaatttagtaggtattgtatgcaagcgacatatatgtatacattgaaaagagtgtccattcctatttcatttgtctagggtaacagaaaaggtctttttcaataaagtataacaataaagggttagcttttacacatgatgagggcatttctattaagattttgttaaaatgaaatatgccccacaggtgattgagattactgacttggaagatagactttctgtatgtatagttctctatactttcaaatatttgaatcttcgactgcattctgagaagacagtacagtgtggtagatttatgacggcctcaccgaaacagaactagcaaagattatggcttgcttgtttagaataacagtgaactgaaagttcctgatttacaccaacatatatctagatgaaaccacagtttgcaaattgtcttgaggagtcatcttttattaagcatttgataggtatagaaatgtacatgtctatttctaaacatattataataactatgctgatattatatttgcaaatattctatttaatatttttaggttaaaattaatttaccttatatatttgtatttctggaatgccttaaaatttaatttccagcaataaatatcatgttaaaagatatgttttataatatatcaaaaaaaggtccaatagtattaaaaattttgagacgtcacagtaaatctgcatactaagacattcaaaatttttgtcttttttaacatttgtattcgtattcaaggataaaaaataaatcatcaaagactgcctaaattggtcaacctaaagctacccaacttcttcgctttttaagtgtttaatcaccatgatctttatttgaagggtagagctgtttccctcttactttataaggccagcgaagacactcccttactaaatttaggactaaaattgtgagcaaatgttcttatagactttttcctatgggaagtcttatccgtgtattatcagaaatgacagaatgcatgacataaacttgtaattattctgctattcatttctaattcttgtgactatattctttgctcccccctttaaatttttttaataatagcttatagtgttaccatttatatttgggtgaaccacaaattrtttttccaaatcccacataccaatttatatacttccatttaatctgagaaataaatgtttgggaaaaggtgaagatgttatacaattagatgacataactttgaaattgctggagtcacagctcccttgaaatcctcattctattggtttgattaatcttgtattttaaagcttaagagtttagatgcttaatattggtattgtgtaaattaggtgttcctggaagtcatatttatgaattattttgtgccccaactgtttcagggca

SEQ ID NO: 683400 - DNA, 1706 bp, Homo sapiens
tagttcttcaatcataacctttctctgcactactccttaaaaattgcttgatggaaaaatatagtcctaacactaaccccttaagcaacagaagagagaaatgtatattttatgctagtacttacaatgaaataaagtctataggaaattctaaatcaaaagaatatgatctccatacactttaatatttatgtatgcacatttaatttatgtaagttcaagattacaaaatttccttaaagataaggaaaataaaatgttaataaaatggtgtaaaaccaagtgaaataaaatatggtcacaacaactgtttttatctgtgataataacactgtaactggtcattacaataatgtatctttaagcagtactttcattgaccttattgtaaattgaatttacagaggtttcccaagagttataccacatttttatcctggttatttaaaggggtggatggtagttgtaattagacacattttgcatttctttttttttttttttttttttttttttaagatggagtcttgttctgttgcccaggctggagtgcagtggcgcaatctcggctcactgcaacctccacctcctgggttcaagaaattctcctgcctcagcctcccgagtagctgggactacaggtgcgcaccaccattgctggctaatttttgtgtttttagtagagtcagggtttcaccaggctggtctcgaactcctgacctcaggatccacccacctcagcctctcaaagtgctgggatcacaggcgtgagccaccacgcctggcctgcattctttattatgtggttttcttcttcatattctaggagatgcattagtagcaacatcctcatgtttgaaaactacatatatgtcctaactagtaraaaagctctatcctgccctcaagttcccaccataatcgttgtctaaaactgataaataaagtcttgctatgcaatagggcaataaaagtaagcgaagacacagaagtgacattatactacatctactgatgactcaaaagaccactcacatgcagccctttgactaaacattgctgaaaaaatgcatggaaactcttgatgactacgtccatagatttaactctgaacaactttaatgtccccgacatctaagcaccaaatgtaacccataatattggtgagcagaatgagttaggaagtatcaccttagaaaactctttgtctctgagcagcacttagaaagatggcttatattccatcacatcaatgggacacagccaccataccagacacttcaaaacctttcacatagtaagtgttcaataagtgcttctatatttaccagaagtaaaaattgagatatcgtctgtgtattctgctaacagaatggtggcctttgtgactgttatactaatcgccatcctcttgagttatagaatctgtgaaggtgtttcctcacggttattggtggctgtgcctccatgcctgtccttcacctttcaaacaaatcaaatcctcccatacgctctcctggaataggctgataatttggggggcaggcagaaagcaccttttaaggcttgaatttccagcaacatttccagcaaagttcaggaagtccagatgttctggaagcagaaccacggtcattatacacatgccagctcctcctcactccacccagggccaagaccctttcagcagtgtgaggcctggttaa

SEQ ID NO: 683401 - DNA, 1726 bp, Homo sapiens
ggcttttgtcttcagatagttttataaaataaacactgagcacttcttgcattgctgagatattgtcttgttagtgaagaagtattatcaggacactcagaatcaagtatggtcccatttttattagttgtatggattctttacagctgttattgtgaaatcattcccattccattaatataggacagattataaattggagtggtcttactgcttttatttagtggatagaagggaggaggcaagggagataaagagggctatagtgtaacagataaatctatcccttccattacctgcgctggaagcttaaaatgctccaggaaggtcatttgtgatgtaaacagggacagtgtgcacagagagctttttacaaatctgctgtttacctaagagaggcaccctgtgggttatcccaatggaattcactttcctgtttggtttaccatggaagggaaaggaggcctaacaaacagcccttcggtttgctcagctgtgagatatccattaaccaagcagaagtttgcctgcacacactgtatgtttgcacagcttgcagtaccatcttttcaagacccaccattgtctggaaagcactccaaagtcctaagtctataataaagcaaatagcttgcacagttattactgtcaggttcactttttacactgtagcctatgaatgtcatcagttaaattaaacctcaagaagaccaaacacagtgcatgaaggttaaatatgctcttgtgtttgtcggcacattagccaccaagccactttctcttcaaagtgtccttcaagacactttctttccaaaaatctattagaaatttgattatcaagttcagatagagaaaaattcactctctgagttttattgagaaacttttccctagcaagtaaccataaagcattttcccttaacagttcagattgagtccgtagcagaatgatatccatagctagcaattatttacatagactggcttttcaaaaccacttgcccatgtattttctcatttgcttggaacaagtatcattattattatttaatttttctcaagagaaaactatcctcaaagtggttcaaggattktcctaagattattcacctagtaagtggtagaaaaaaagcttaggtgcctgtagttctgcctccagggtctttccactactcatcttcatatacaaatctactagatcttgctacttaaagtgtggtccaagaagcagtagcagcagcaacagcgatggcacagcaccacctaggcagcatctcagaccccacccaagacctactgaatctgaatttttttttccttctttttttagagataggctcctgctgtgtcacccatgttggaatgcagtggcatgataatagctcactcttacctcaaattcctgggctcaaacaatcctcccaccttagcctcttgagtagctggaactacaggtggcaccaccacacttgggctaatttttttttttcttattttgtagagacgaggtcttgccatgttgtgcagggtgatcttgaactggcttcaagcaatcctcctacctcaagctcctaaagagctcagattacaggcgtgagccaccgcgtggtcctgaatctgcgatttaaacaagatccccagttgacattaaagtttgcaaggtactctcattaagactcacaggtatagtggtatctcctttcctcaactaaataatatatcaaaa

SEQ ID NO: 683402 - DNA, 1726 bp, Homo sapiens
ggcttttgtcttcagatagttttataaaataaacactgagcacttcttgcattgctgagatattgtcttgttagtgaagaagtattatcaggacactcagaatcaagtatggtcccatttttattagttgtatggattctttacagctgttattgtgaaatcattcccattccattaatataggacagattataaattggagtggtcttactgcttttatttagtggatagaagggaggaggcaagggagataaagagggctatagtgtaacagataaatctatcccttccattacctgcgctggaagcttaaaatgctccaggaaggtcatttgtgatgtaaacagggacagtgtgcacagagagctttttacaaatctgctgtttacctaagagaggcaccctgtgggttatcccaatggaattcactttcctgtttggtttaccatggaagggaaaggaggcctaacaaacagcccttcggtttgctcagctgtgagatatccattaaccaagcagaagtttgcctgcacacactgtatgtttgcacagcttgcagtaccatcttttcaagacccaccattgtctggaaagcactccaaagtcctaagtctataataaagcaaatagcttgcacagttattactgtcaggttcactttttacactgtagcctatgaatgtcatcagttaaattaaacctcaagaagaccaaacacagtgcatgaaggttaaatatgctcttgtgtttgtcggcacattagccaccaagccactttctcttcaaagtgtccttcaagacactttctttccaaaaatctattagaaatttgattatcaagttcagatagagaaaaattcactctctgagttttattgagaaacttttccctagcaagtaaccataaagcattttcccttaacagttcagattgagtccgtagcagaatgatatccatagctagcaattatttacatagactggcttttcaaaaccacttgcccatgtattttctcatttgcttggaacaagtatcattattattatttaatttttctcaagagaaaactatcctcaaagtggttcaaggattgtcctaagattattcacctagtaagtggtagaaaaaaagcttaggtgcctgtagttctgcctccagggtctttccactactcatcttcatatacaaatctactagatcttgctacttaaagtgtggtccaagaagcagtagcagcagcaacagcgatggcacagcaycacctaggcagcatctcagaccccacccaagacctactgaatctgaatttttttttccttctttttttagagataggctcctgctgtgtcacccatgttggaatgcagtggcatgataatagctcactcttacctcaaattcctgggctcaaacaatcctcccaccttagcctcttgagtagctggaactacaggtggcaccaccacacttgggctaatttttttttttcttattttgtagagacgaggtcttgccatgttgtgcagggtgatcttgaactggcttcaagcaatcctcctacctcaagctcctaaagagctcagattacaggcgtgagccaccgcgtggtcctgaatctgcgatttaaacaagatccccagttgacattaaagtttgcaaggtactctcattaagactcacaggtatagtggtatctcctttcctcaactaaataatatatcaaaa

SEQ ID NO: 683403 - DNA, 697 bp, Homo sapiens
tggattgtattttattcaaaaagggtgaaattctattgatttcttaatctgggaactgatattttccttcttgtgacttcacaaatttcgccaaatcaaatgaccacagataaacctgttcttcccaaaaatgagattaaaatggaagacaggtgctattaactgccttatttggtggttaagagcagaggattttagagtaaagcaaatttgtgctttaatctgatatttaccacttacatgttaggtgaccttgatagagctgagttattttatatctctaaactttagttaccttatttatataaatgaggaaaatactcttccttcatagaattgtcattaggattccatgatataatatatgaaagtcacaggaagattaactgaactcaaagtgctattattattgttattattgactgctaccactgctcttgctacaattgtagtcattatagtccatgttgtaacttcataaatttcactaaaattttctagtattttttaacaaatatatatttattagataatatagtcatttagtatagtatataaatctgactataaatgttttacatataaactgatgtattcrtgagtatctgtgctattcatattaccatataaataataaaatattctagaaaatatactgtttattataaaaaagatattacacacatatattatacat

SEQ ID NO: 683404 - DNA, 612 bp, Homo sapiens
tcattcctgttatgggatggttttgattttattctttgtggaaatgatacacatttttcctattttctgcaataaacatactaagaatagtcaagacttaaaggcaaacttctgaaagaatttcacttaacatttttcaacagctacttctaaatataagtaactccattgtgcttttayaggctgagtatcccttatccaagatgcttaggaccagaagtgtttcagatttcacatttttttccatattttggaatatttacatattcatgatattatcttagggaggggacccaagtctaaatacaaaattcagtggttttgtatataccttatacatatagcctgaaagtaattttatacagcattttaattaattttgtgcatgaaacaaagttttgactgtgacccatcacatgaggccaggggaattttccacttgtggtatcacatcagcattcaataagtctccaattctggaatactttggattttgggttaggaatgctcaacctgtactaactttctccttccttaaatgaaactctgcaaaaatgtaggaaatatttactttgctccgtggaaaaaatttaaaaatttaagaaaataata

SEQ ID NO: 683405 - DNA, 612 bp, Homo sapiens
tcattcctgttatgggatggttttgattttattctttgtggaaatgatacacatttttcctattttctgcaataaacatactaagaatagtcaagacttaaaggcaaacttctgaaagaatttcacttaacatttttcaacagctacttctaaatataagtaactccattgtgcttttacaggctgagtatcccttatccaagatgcttaggaccagaagtgtttcagatttcacatttttttccatattttggaatatttacatattcatgatattatcttagggaggggacccaagtctaaatayaaaattcagtggttttgtatataccttatacatatagcctgaaagtaattttatacagcattttaattaattttgtgcatgaaacaaagttttgactgtgacccatcacatgaggccaggggaattttccacttgtggtatcacatcagcattcaataagtctccaattctggaatactttggattttgggttaggaatgctcaacctgtactaactttctccttccttaaatgaaactctgcaaaaatgtaggaaatatttactttgctccgtggaaaaaatttaaaaatttaagaaaataata

SEQ ID NO: 683406 - DNA, 2488 bp, Homo sapiens
tcggtcatctgatattatttgactggtgtttttacacagagggataaatggcacctttcctgcaaaactgtactgtcacatacataatcacattcagacattcagccacatcatcattttatgagccagtatcagatgttttcaatacattgcaagctatgtaatgtattgcataccatatcgagccacatggtgaggtttaaccccattttctaaacgaggattccccatacccactctcatactctcatagtcaccaacaggagagggacagtgagaatgacggaaacagaggttactgataaaccctatgtccattccagctgaaaccacgctcactccctaattgttactgcctgttattcactgtgttgttgttttgtcatacccacatcctaaggccaaaatcatgaaaagaagccaaattaaatgggcaggaaaaatgtcttatccccagcttgcaatgctatttttctttttattggaataagagactgccaagttctgatgtcactacaataatttcatggcctgataaaagcagtattttatccattaaacattcgttccccttgccaattttacctctaaccaggcagtgtgtacaattactcactgaacagataccaaactacagtaaaataaaaaattctaattacttttattctgatactgtaaaaagccagtaactgtcagaaatttccctggcaagagacacaatcctgaatatgttttttagtacctatatacccaggagaacccctgcaaaatacaaaaagacaaaacatgacatcagctctctgggcactgaataatgttgcacagaactactacatacattttaaatatataaaattgttaaaatattcaaaatatttgacaaggattccagtcatagtgtgataatgcatgtcccagcatcttcaatatgtaactgtttttttctttatctaaagctttcgtttatcttcattacttgaagctgtggtatcactccctgaacttgagagtcattgatgtcactgaatttttacgagcaaaatcgtgtgttgaaatcattcatggatctagagaagatggttcagcatctttctactcagtgtgctccacccagctcatcagtattatctggaaacttgttagaaaggaagaatattgggccccaccccagacctactgaatcagaatatgcagttgaacacactcgctcacccagaaattcaaatgcacgttaatgccatccaggatatctgagtgtttagtacttgttcagcagagtgcaaagaaaggggtgggtgggccaatggtacataggggaaaatcacattgtccttaaggaataaaggggagactgacacgtatgcaattatgatacgtatcagtgccaggagagatgcgtttccagcctgcgagaaagcatggtatattcatggaaggcaaagcagccgggatggcagaagcttccagtaggcatataaccctgtacatccaattaaagacctgggcttcaacaagtgagcaattcagggactttaaaggattttaatgaaagcagtcacgtgatcacatatttacatttcagaaagatcattactcaggcaaaatgtaagaaaaatcaatgatctggaagggggcaaaccaaaactgaagacaaggggatgagttagtagcagtttaagcaggagttgcaaaggcatttttttcatctcacatgctgaatctcctctgtccctctcccaaagtttgaggaggaggatggaggggtaaggtaatggtaacagacaagagataaagaaggcccacttctaagctacagggaggatggaattggtatggatgggcatacataaatataaaacagtaaaaattcaatatacttttctgttttataaaatggagaaaatattattttggtggttcaggatcccacagttccttccatcattttaaatatcagtgattaacataaagtactatatttacagatacaagatgtgtacatggttaaatatctatggatcccagaaaagatcttgaayatggttttgatacttggacacgtctctgataccggcctttctcctcctatatgagttatttatctctcttgtaactcaagtttagaaaagttgcagtggaggagggacaagagggacatttattaatgtttacatataatttgttgtaggaatgaataaataactgggccaacaaatggcttcagatgtgtacctatataaaaaggtagtacatgctatacttttaagtattatcatttctgataccaatacacttagaatattgaaaaagtccctatttaagtaaggaagaaagaatacccgacatttacttgttagtgataaactaaggattacatttaaagtgaaaagagccagcaagtcgaggcaatctccaactttaaactggagctggtttaaaaaatgtatttatccaatggctgttggtaacttttaacatatttcctacc

SEQ ID NO: 683407 - DNA, 2488 bp, Homo sapiens
tcggtcatctgatattatttgactggtgtttttacacagagggataaatggcacctttcctgcaaaactgtactgtcacatacataatcacattcagacattcagccacatcatcattttatgagccagtatcagatgttttcaatacattgcaagctatgtaatgtattgcataccatatcgagccacatggtgaggtttaaccccattttctaaacgaggattccccatacccactctcatactctcatagtcaccaacaggagagggacagtgagaatgacggaaacagaggttactgataaaccctatgtccattccagctgaaaccacgctcactccctaattgttactgcctgttattcactgtgttgttgttttgtcatacccacatcctaaggccaaaatcatgaaaagaagccaaattaaatgggcaggaaaaatgtcttatccccagcttgcaatgctatttttctttttattggaataagagactgccaagttctgatgtcactacaataatttcatggcctgataaaagcagtattttatccattaaacattcgttccccttgccaattttacctctaaccaggcagtgtgtacaattactcactgaacagataccaaactacagtaaaataaaaaattctaattacttttattctgatactgtaaaaagccagtaactgtcagaaatttccctggcaagagacacaatcctgaatatgttttttagtacctatatacccaggagaacccctgcaaaatacaaaaagacaaaacatgacatcagctctctgggcactgaataatgttgcacagaactactacatacattttaaatatataaaattgttaaaatattcaaaatatttgacaaggattccagtcatagtgtgataatgcatgtcccagcatcttcaatatgtaactgtttttttctttatctaaagctttcgtttatcttcattacttgaagctgtggtatcactccctgaacttgagagtcattgatgtcactgaatttttacgagcaaaatcgtgtgttgaaatcattcatggatctagagaagatggttcagcatctttctactcagtgtgctccacccagctcatcagtattatctggaaacttgttagaaaggaagaatattgggccccaccccagacctactgaatcagaatatgcagttgaacacactcgctcacccagaaattcaaatgcacgttaatgccatccaggatatctgagtgtttagtacttgttcagcagagtgcaaagaaaggggtgggtgggccaatggtacataggggaaaatcacattgtccttaaggaataaaggggagactgacacgtatgcaattatgatacgtatcagtgccaggagagatgcgtttccagcctgcgagaaagcatggtatattcatggaaggcaaagcagccgggatggcagaagcttccagtaggcatataaccctgtacatccaattaaagacctgggcttcaacaagtgagcaattcagggactttaaaggattttaatgaaagcagtcacgtgatcacatatttacatttcagaaagatcattactcaggcaaaatgtaagaaaaatcaatgatctggaagggggcaaaccaaaactgaagacaaggggatgagttagtagcagtttaagcaggagttgcaaaggcatttttttcatctcacatgctgaatctcctctgtccctctcccaaagtttgaggaggaggatggaggggtaaggtaatggtaacagacaagagataaagaaggcccacttctaagctacagggaggatggaattggtatggatgggcatacataaatataaaacagtaaaaattcaatatacttttctgttttataaaatggagaaaatattattttggtggttcaggatcccacagttccttccatcattttaaatatcagtgattaacataaagtactatatttacagatacaagatgtgtacatggttaaatatctatggatcccagaaaagatcttgaatatggttttgatacttggacacgtctctgatacyggcctttctcctcctatatgagttatttatctctcttgtaactcaagtttagaaaagttgcagtggaggagggacaagagggacatttattaatgtttacatataatttgttgtaggaatgaataaataactgggccaacaaatggcttcagatgtgtacctatataaaaaggtagtacatgctatacttttaagtattatcatttctgataccaatacacttagaatattgaaaaagtccctatttaagtaaggaagaaagaatacccgacatttacttgttagtgataaactaaggattacatttaaagtgaaaagagccagcaagtcgaggcaatctccaactttaaactggagctggtttaaaaaatgtatttatccaatggctgttggtaacttttaacatatttcctacc

SEQ ID NO: 683408 - DNA, 631 bp, Homo sapiens
ctaaattagaattctataataataataatgtaacagaaacaatcaaattctatcaatagtaaactaaaatatgcctattaaaacaagcatttcatcactgcaaaaccatttgtttcacatgaagtctgattttgctctcagtttgaaagttattaaaacgatacatyagcctttacaggcaagaccaaacagtaagataattttacatatttatcaaaagatcattcaaagaaaacttaccaagtctgcaacgtgtatatgcttgtgcttcggagggaaagcagagaagccactttctgtacttacactggagttcacttcagtgctgaaaacacatcactgtagtcctgcttgtaataaagtccggactagcaatctgcctttgggttgggcttttctcttacaagataagctgttaagtcatgccttgattttagatctgccaacatatggagtcttctaatgtagccttccctccaccccctcaaccccccctgcccgcatccccccaatccccgctctgctccactccctctgcacacacacacatacacacatacaaaaaaggcactgcagggcagaaattcctcaggtgctcgctaatggaattcccagggtcttggagccgctt

SEQ ID NO: 683409 - DNA, 669 bp, Homo sapiens
aaagaatcaagtaaagccctcccctgtgctgttgaaagtgagttagtgccaaatacacaacaaaaacttatcacatggaatgattacatacaatataaaaatttaagtaaaaataaaacattctcaaattcaagttcacgaaatttcttgaaaaaattccccattaaaaaatactgtaaaaaagcaagtccttcaactcaaaatatttggcaaccatactccaaattctgtttctaatctaattagtttgtattaagttcatttacttaaaggggggctaccatgtacgcagctcatctacagctccactgtattgtcttacccatacttctacatcatgccatagctgatcacaaggcgctggctcatatcattacacgttaaagcaacacatttttcaactcattatttattttctaacgcttccctgatttttactacgataatatttaattcctgaaatcatttccctagyatttaacttcgaaacaatcaccaatttttagtctaaacgttcgtggaaaaaaaaaaattctacagaaggaaaattttacttcaacttacatttcgacaaaaccatacatgaaattgtctacaaagtcatgaaggcagatgggcgaagtgggaaaataagaagcaagcccaagaaatagtcaacaaatttttacc

SEQ ID NO: 683410 - DNA, 926 bp, Homo sapiens
tccaagcctggccgaggagggagccctcagggaaccacgggtcgctaagaagcttagaaggtgccttccttccccataggtgtgctcctgttaaggacaagacagtgtctagtgagactgcatagatgtccaaacggatttccaaagcccaggagctctggattcagtcaggcctaacttaaaacctcctttgtggtcccccagacttaacagaaacagggcccttgaggctctggccttggcgttcctctccagccctctctcagcacagctcctctctcagccctagcaagctacccatagttccttaatgcatcaggctctcctcacctttggggatactcagccctccctccaggcagctttctcagtgccccccagcacctgttcccccacccccagctccactaagagccccttcctgtctcagggcttataatatacattttaacttatttttcacttgtgggtgtggattgcatcttaatcctcaaggtatctgcagcactgtgcacagaaagtagtggtcactctggttttatgtgttgggtgagtagaagcaaggtttctgaaactttcgagaattgctatgtttatgaatatagtgctcacgttctctctctctctctgtctctctctmtatatatatctatatatagatatatatagattagatatatagatatatataattagatatatagatatatacacagatatagatatagatatagatatatattgccccaacaaaggacagccggactgcttcagcagaagcaagtgcatctctcagggtccctcagcctggcacctcatccttgagggcacctccataaaaggatggagttggatggttggccataaggaaggcccagaaggtgctaacacggatgagctgacatggacctcagggtcctgcttct

SEQ ID NO: 683411 - DNA, 2389 bp, Homo sapiens
tgaaatgacatctttattttattttatgcatctggcccttggctgcagaaatgacatctttacagtgctgaaataggcagggcgcggtggctcatgcctgtaatcccagcactttggaaggccgaggcaggtggatcacctgaggtcaggagtttgagaccagcctggccaacatggtgaaaccccatctctactaaaaatacaaaatattagctgggcatggtggcgcacgcctgtaatcccagctactcaggaggcaggagaattgcttgaacccaggaggcagaggttgcagtgagccaagatcgcaccattggactccagcctgggcaacgagagcgaaactccatctcaacaacaacaaaaaatacaaacattagctgggcatggtggcagccacctgtaatcccagctactcgggaggctgaggcaggagaatcatttgaacctaggaggcagaggttgcagtgagccaagatcgtgctattgcactccagcctgggcaacagagcgagactccatctctaaataaataaataaataaataaataaataaataaataaataaagcactgaaataaagtaaggggagagattaggtcatctcaacactgcattcccttctgactctaaagtaactggttaccaacctcttcaaaattactatgaaggttgggtgcggtgcctcacatctgtaatcccagcactctgggaggccgaggtgggtggatcacttgaggtcaggaggtcgagaccagcctggccaacatgatgaaaccctgtctctactaaaaatataaaaattagccaggcatggtggcatgcacctgtgatcccagctacttaggaggctgaggcaggagaatcacttgaacctaggaggcggaggttgcagtgagccaagatcgtgctacagtactccagcctgggtgacagagtgagactccacctcaaaaaaaaaattactatgaagtatttgaagaattactaaataaggtttctagactcctttattaaatatattaatacatgcttattagatctaatcctcaaatgtctactgaatcacatatcatatcacatagatgggtttatatcacatagcatgatattgactttttcctaacatcacattggaagctcattataaatcaagggcagtagtacataatttggataaatcatgttgtaaagtaaaatataatgtttgaagatagaataaatgaatggctctatgaaaaggaaaccatgatatatctatatgatacgtgtatagtgttaattaagatgttggttgaaatagtgacttagaattccttgctatgtaaaatatgaccatggcacataccaaaagcataagcaacaaaagaaaaattagataaagtgaacttcatcaaaattaaaaactgttgagctgcaaaggacaccacgaagaaagtgaaaagacaacccacaaacaaatcatatatctgatatgggactcatatctacaacatataaagaactgttatacctccatcatttttaaaaaccccgatttttaaagtggacaagggatctagacagttctccaaagaagacgaacaactggccactaagcccaggaaaaagatgcttagtgtcattagtcatcagggaaatacaaaccaaaaccacagtgaggtatcccttcacacccactagtatggctagaattaaaaagaaagataaccaggatgtgaagaaattggaaccttctttgtagacatttaaaattttctataatgaaacacatatggttgggcacagtggctcgcacctgtaatcccagcactttgggaggccaaggagggtggatcatttgaggtcaggagttcgagatcagcctggccaacatggtgaaaccgtctctactaaaaatacaaaaattacctgggtgtggtggtgcatgctggtaatcccagctactcaggaggctgaggcacaagaatcgcttgaaccgtggaggcggaggttgcagtgagcagacattggccactgcactgcagcctgggggacagagcgagactccgtctgaaaaaaaaaaaagaaatgaaacatataaaaagacaaagtatatctaatctacaatggtagatcttcagatctttggaggggagggagaaaagtagttgtatggggacacaagtgacactgatgctgttccttggttacatacatgtattcactctgtaatcatttattaaggtttaygtgagtgctctttgcatgtatttctgtgtgcatggtatatatcaataagtattaaatattccatatttgcacaaaaaaattggaaccctcacacactgctggtggaaatgtaaaatggtgcagtacatgatacctgcagtgatgataagatgatcga

SEQ ID NO: 683412 - DNA, 1514 bp, Homo sapiens
tctcttacactgtggctcctcgagatttggagtccactgtgctggggatagcaaactgcagtacctgcagcaaagtattagtggatataggggtgtctgcctctctgcaggtgttcaccacagtattggaggcaaggcagctgttgggggagcaagggccttctgctggagacagagtgcactgctgcactgtaggtggtgatggcttggggtggggtgctggccagtggaggtcttggagccttatctgtggtctgcaagcaggagcaattgctcaggttgtggggggatcccctgctctgtgtgcagcacagcacaagggcagggcactggtgtagatggggcttgatgactctgtgcccaacaaggatccatctgcagtggtggttggtggggcttatggggggtcacactgcattcccatgtgctgttgaagcaagtaaagcccacccatgcagatatatgccagcaaagtgatgtggggagatgtgggcagttgctgtctcatatcaattttaataaatcttctgatattgtctcaaatcttggaaacctgtgtcagctcaaaaagacttccttgtataaaactgaaatgcttctacctttaaaatgtatatgtgatagattatttattcatagtagttgaatttaatgcaattaatgttgtaatgaatacaggacatattaatatgctaagagtagactacttaaatgtttgtattttcagtaactcaaatataagcatgtctataaatgaactaaaacagaattttgcccaaatcactcaaaaaattagttaaattgaatatgtttaaaatatacttaaatactttgtrtataatagattgtcaagtaattaaaataatttacatgttttatttagttgtcctcaactttaaaaatatatatctacatataatttacattatattactgaccacatggctaaatatgatagtttggcagaaatcaattcatattaattatgaaagacctacttttggcaaaaatatttctcaagtttgatatcaattctgactctattattgacattgatgttaaatgtaaacctctgtccatattcttccagggacagaatatcatgaattagcatttttttttacttatatatcacagtatcacatactcagaaagctgttttgataaaatacaactttatcagtcattgcccaatactgcaattatatgtcacaaatgtatctgtataaccaaacgtaacatatgcaaattttttttgctgattataattaatgaatcaaccaaatgagaaaaaaactctcaattcgatattgacttaaactttccaatttactaaaagtgttggtaatatttgttttaaatatttaaatgtttgaatcatatgaatatgttaaatgaataaatactaatggtatcttttacaagcggacacttcaacattttggagaggtaagtgcatacatattttttgtgtgttcattcacatataaacaatctgtgattaactttgatca

SEQ ID NO: 683413 - DNA, 1406 bp, Homo sapiens
tgacactattcccaggcaatattgtgctatacaattataaaatccttgtttatagctgttagcgtaacttcatatgttttagcctaatactttacatagcaggacttaatgcagatatctgttggtgatcaaaactagcttaatgaagtactgaccggcttaaagaactgaacacatgtggctttgtaaggaaaatcaaaacaagtttttagttcctcaaactgagctcaaattctgtattttcatactggttaactaactgacatttcacaaactatttgtcttctctaaactagaggaattttcttgtctgtgaaaacaaagaactagtaaggttcagatgaacaatctgaaacttccattttgtacatccaaatgatcaaacaccaacaacttcatatatttctaactttagctttctagagcattagtcgtgctttcaaaggttagttttcattcatttcagcattgttatattagtaaaaaactatcaacaactcattttctatcaaaggaaattagtcaagtaaattatgatatcaaaactatgtctcaaaataataattttaataaatctaaaaatattacttaacaaaagagaaaattaagtatattttttcttactgtataatgttagattttaataattttgaagcacttgaatgccttcagaaattacaaataaaagccatagatgtttattgttttctccccattgtcatctttcttttactcagtcttttatttcccgttgcattaagagtaataccacttttcctcataaatctttttagtgctttatactttaatctcaaaagagaaacattacaaagtaattcattttttcttgcacttcttagtcttctttcatttcgtatatttgcagcatttaattttaggccctttcacaatatcaagatagctattgcaccatgttggtgggccacgtagtatactacatgtgtgtatcatcttctgcaaatgaatatggctgtttatgttagaggaaggtataattcctcttaggcagtcacattggcttaatggttrgaagcctaaggaatacatctcatctttagatcagaatctccttctgattcttctataataatcaaacagcatatcattttaactctttcattccaggttttcaaaaaaattatttattaatcatagttgttaatgtgaaaaaatatatttgacattcaacatgcaatgttttgggaaaatacaaaatactattaatggatttaaagaatcataagaataaggtattatttttccattactgcagtatgtttatgtgttgggtaattggaaataaatattagtacattgcttgtgtatttcctgatgctttgttacaaggaaggaaaataaagaaaagtaatataaatgtggtagta

SEQ ID NO: 683414 - DNA, 1406 bp, Homo sapiens
tgacactattcccaggcaatattgtgctatacaattataaaatccttgtttatagctgttagcgtaacttcatatgttttagcctaatactttacatagcaggacttaatgcagatatctgttggtgatcaaaactagcttaatgaagtactgaccggcttaaagaactgaacacatgtggctttgtaaggaaaatcaaaacaagtttttagttcctcaaactgagctcaaattctgtattttcatactggttaactaactgacatttcacaaactatttgtcttctctaaactagaggaattttcttgtctgtgaaaacaaagaactagtaaggttcagatgaacaatctgaaacttccattttgtacatccaaatgatcaaacaccaacaacttcatatatttctaactttagctttctagagcattagtcgtgctttcaaaggttagttttcattcatttcagcattgttatattagtaaaaaactatcaacaactcattttctatcaaaggaaattagtcaagtaaattatgatatcaaaactatgtctcaaaataataattttaataaatctaaaaatattacttaacaaaagagaaaattaagtatattttttcttactgtataatgttagattttaataattttgaagcacttgaatgccttcagaaattacaaataaaagccatagatgtttattgttttctccccattgtcatctttcttttactcagtcttttatttcccgttgcattaagagtaataccacttttcctcataaatctttttagtgctttatactttaatctcaaaagagaaacattacaaagtaattcattttttcttgcacttcttagtcttctttcatttcgtatatttgcagcatttaattttaggccctttcacaatatcaagatagctattgcaccatgttggtgggccacgtagtatactacatgtgtgtatcatcttctgcaaatgaatatggctgtttatgttagaggaaggtataattcctcttaggcagtcacattggcttaatggttggaagcctaaggaatacawctcatctttagatcagaatctccttctgattcttctataataatcaaacagcatatcattttaactctttcattccaggttttcaaaaaaattatttattaatcatagttgttaatgtgaaaaaatatatttgacattcaacatgcaatgttttgggaaaatacaaaatactattaatggatttaaagaatcataagaataaggtattatttttccattactgcagtatgtttatgtgttgggtaattggaaataaatattagtacattgcttgtgtatttcctgatgctttgttacaaggaaggaaaataaagaaaagtaatataaatgtggtagta

SEQ ID NO: 683415 - DNA, 639 bp, Homo sapiens
aattttatctttattttaatttgatgaaaaaatcatgggttataagtaaaataataataaataatgattaagaatcataatattaacttgtttgagtaagctcctattctgtgcaatatattttgcatataaattatatttatattgtctttatactaatttcttatatttcataggaaaggtatatttatcctaattttacatataagagatggaagtactaaagcgatttgataacgtgtccaaggtcactcagttgacaggtggtagtgatttgctttttaccatacaacctttaataaaacattgtgttttattaactggaagagttaacaaacccattccagcaatcatcccacccagttctataactgggtargagcctgacttttaagtgagctcttaagcagcaattttaaaacagttggtggtaattgcaaattatgggacagttggaaaaatgcaactcttctctcttttactttacagtggactatcactgaaaattaacgtcagcctttggatgaaatgcagatgcatgtctgacccaatggttattagccgaactcattatatagtacagaaccacagctgcgatttttgttgctagcgagcctcaaaagaaaccgcaatttcaga

SEQ ID NO: 683416 - DNA, 614 bp, Homo sapiens
atatatattgttgattgcacatgtttgatttttttgaatttttttttttcagaaatggagtttctgtcactcaggctggagtgcaatgacacgatcatagcacacttccacctttaactcctgggctctagaggttctctcgcctcaacctcctgagtagctgggactgcagacaggctccaccatcctcaactatttatttttatttttatttttatttttacttttgagttatgggtcttgtttgttgctcaggtgggtctcgaactcttggcttaaagtgaaccttccaccttggcctcccaaagtactgggattatacacgtgagccacgaaatggggccaatgtttcatttttatgtcaaagttctgatattataattttgcagtttaattttacttttaataagttaagttctaggtctgtttatattgctataaatagatctaatttttacaatttcatktggttcatagtgtttgatagcataaatagataaccatgaattcatacaattttttcctgctactcatcgatgatatatacgtttttaagtttacaaataacaaggcaaggtcttgtctctgcctcctgagtacttatgtacaagtgt

SEQ ID NO: 683417 - DNA, 1424 bp, Homo sapiens
cacctggtcaagcaggcaaagtgatttagtctaatacacctaacacaagtccttctcctcttttgtaattcaagaattttggctcaatttaataatattaaataatatacagctgcctcaaagagctaaataatagagaccaagtacttgtactaccaatgatgtacaataaaagatgtacgatgcagctgggtgcagtggctcacacctgtaatcccagcactttgggaggccaaggcgggtggatcatgatgtgaaagagatagagaccatcctggccaacaaggtgaaactccgtctctactaaaaatacagaaaaattatctgggcgtggtggtgcgcgtctgtagtcccagctacttgggaggctgaggcaggagaatcgcttgaacccaggaggtggaggttgcagtgagcagagatcgtgccactgcactccagccgggcgacatagcgagactccatctcaaaacaacaacaacaacaaaaaacccaaaaaaacatgtatgatgcttctcttaagccactgaactctaggagggtatctggattaaagtgaatgaaaagcacactgtatatatgtgtgattatcattattttttatagatggcgtcttgctatattgcccaagttggccttgatctcttgggttcaagtgatcctcccacctcaccctctcaagtagctgggactacagtcatgagccattgtgcctggctctggcttatttttttacctgataaacatttaacaattatatcacctgttggtcattaaggttcccttgtactaaggagtcaatgaaaatatgttgactgaagttccttccttttcgttcttttatgatgttccttaaaacagactccagttgcatgagggcttagagaaaaaaacaaaataattttagaatacaagcattagtggagactgaactttaaaaaaataattctgtgcaatgttactatatgaagaaaaccttcaaagttagtaaccaacaacaaagaaagctaatttatgtttaaactcatcattttcttccttttttgccraatttaacatacatacaaaaaagtgcacaaagcatgtaagtacagtttaaggaataattataaatcaccaccaaccacctaggtcaagaagtagagcaatgccagcacttgactttttcttttatttttgagacacagtcttgctctgttgcccaggctgcagtgtagtggtgtgatcttggcttactgcagccttgacttcccaggctcaggtgattctcccatctcagcctcccaagtagctgggactacagacatgccaccacgcccagctaatttttgtatttttggtagagacggggtttcaccatgttggccaggccggtctcaaactcctgggctcaagcaatccatccgcctcggcctcttaaagtg

SEQ ID NO: 683418 - DNA, 1735 bp, Homo sapiens
ttttagggcctgtaacccagccgtatctgccctgcagctgcacaaaatgttcttttgtttttttttttttttttgagatggagtctcgctctgtcgcccaggctacagtgcagtggtgcgatctcggctcactgcaacctstgcctccttgattcaagcaattctccctgcctcagcctcccaagtagctgggattacaggcacctgccaccatgcctggctaatttttgtatttttagtagagatggggtttcaccatgttgaccaggctggtctcgaactcctgacctcaggtgatccgcctacctcagcctctcaaagtgttgggattacaggcatgagccaccatgcctggccatgaaatattcttttgagaagaatggaagccttctggtccttcatctataccatcttatgttggaatgtcaaggcctaaaacttgttttttttttcttttcataagctctataatgcagtcagaaatagccatctagcccatcatcttttttttttttttcttcttcttcttcttttagacagagtcttactctgtcgcccaggttggattacagtggtgccatctcagttcactgcaacctctgcctcctgggttcaggtgattctcctgccttagcctcctaagaacctgggattacaggcatgtgccaccatgtccagctaatttttgtatttttagtagagacagggtttctgccatgttggccaggttggtcttgaactcctggcctcaagtgatcagtctgccctggcttcccaaagtgctgggattacaggcatgagccactgcgtccggcctattccacaatcttttgcaatacccattgttgctaccaataatcacttgaccatgtaaaatttcttccctactgacattccatcccatgtcaccactggcaataatttgaataatcttgctgtcattgcatgctacacattatcactatcaagaatgaatctcatcatgaggttgtcaaatatgtgtttaaactggtcctagaattccaacttgaggaactgtttctgggagccactccttgtgccaactagagtcaggtctgacagtaaacagtatctcactccaatggttcaaaagattttaaggaagaaactatatacaaaagtgtggggaggattaagggaaccaataaaggatgctgaagtctccagagactaccaacaggggaaaccattgtcactcctaggtctgaaggggcaaggagagaaaatattactgttgctcagagagggttggaggatcataggaggaagttctacctcaaaagctatatatatagtgggatgtagctcctgccagcaaatatggctcagagctgacagggagcaaaacaggaggcttctaaagctgctctcttctcagccttagcctattgatgcctcttggtggaattagaagcaagctcataagaagcccaggtggcgtagtctgaaggaatgaacatcagtggtgacagttgcatggtagacacacctgacagtgataacgtaagcataccctgagaatgaccctatattctaagaagattgtgtgttcacaattccaatctaaggaatctagtagtagccaaccagagattcatttggaggttgttgtcagctgggactccaaactgcactccaaagctgggactcaccactgcactccaaacctgggtcacaaagtgagactccgtctcaaaaaagaaaattaaggcca

SEQ ID NO: 683419 - DNA, 1360 bp, Homo sapiens
tcttaccttccagggaagtgctatagggaactaagccaaaggagtcaaatttgaatcagtaagagaatttatcagactacagtgtttactagggaagcaaaaatgaccatatgctatttcagctatatataccacttaggttaaaagtgtytgagttagataaggtgaggatttagactaaccatcagctgactacaggtctgttaaccaactccatgggcaaactcatgtctttatatatacagtttcactgaatacagccagtcaattttttttttttttttttttttgagacagggtctcgcttttcccttaggctggaatgcagtgctgtgatcactactcactgcagccttgacctcctgggctcaagtaatcctctcagctcagcctcctgagtagctaggactacaggtctgcaccaccatgcctgcaatttttttttttgtagagatggggtctcactttgttgtccaggctggtctcgaactcctggactcaagtgatccttccaccttggcctcccaaagtgctcggattacaggtgggagtcaccatgcccggccagcttcatttttgtgtcatagaaggtttctttcaaagtaagcatagtggcagatttgagtagttgcaacagatatgataacactcacaaagccaaaaatatttattctttgactttttataggaaaaatttggtaactcctgatttagagcatgcaagagtaggcaaattaaaatgacaggatataagttactgtaatatttgaaaatttatgttatgtttttgaagtagagaagtatggagttaaatattaatacctttttaaatgtccaaatcctttttctgtgaggtagttttacatttacttttaagtacaaataaggaaattagcaatatttttattattggtgttctttagggaggttccacagtattaaagggttattaccaacttttttccctgccctaacatgtaatgttagtgtttgacccttcatttattcagtacaattatttgtcatactgtggagaatatatccagggcttaatgtcactttgaccatgaactctggaacaagctgttggaggcagggcatcacagtaaggcagtcagaattggtgactttcagaaaatgaggtaaatctgttgtctgagtctgatcctaaactctcagtcagctattggactggattcttctaaagcagagtatctagaataggagggatgagcagactacatttggataaagaatttataaggtactctttaacaatttatatcagagttagttgctatctttagcaccattgtcctgatggcctccacttctagctatacattgcctctttgaaatg

SEQ ID NO: 683420 - DNA, 1360 bp, Homo sapiens
tcttaccttccagggaagtgctatagggaactaagccaaaggagtcaaatttgaatcagtaagagaatttatcagactacagtgtttactagggaagcaaaaatgaccatatgctatttcagctatatataccacttaggttaaaagtgtttgagttagataaggtgaggatttagactaaccatcagctgactacaggtctgttaaccaactccatgggcaaactcatgtctttatatatacagtttcactgaatacagccagtcaattttttttttttttttttttttgagacagggtctcgcttttcccttaggctggaatgcagtgctgtgatcactactcactgcagccttgacctcctgggctcaagtaatcctctcagctcagcctcctgagtagctaggactacaggtctgcaccaccatgcctgcaatttttttttttgtagagatggggtctcactttgttgtccaggctggtctcgaactcctggactcaagtgatccttccaccttggcctcccaaagtgctcggattacaggtgggagtcaccatgcccggccagcttcatttttgtgtcatagaaggtttctttcaaagtaagcatagtggcagatttgagtagttgcaacagatatgataacactcacaaagccaaaaatatttattctttgactttttataggaaaaatttggtaactcctgatttagagcatgcaagagtaggcaaattaaaatgacaggatataagttactgtaatatttgaaaatttatgttatgtttttgaagtagagaagtatggagttaaatattaatacctttttaaatgtccaaatcctttttctgtgaggtagttttacatttacttttaagtacaaataaggaaattagcaatatttttattattggtgttctttagggaggttccacagtattaaagggttattaccaacttttttccctgccctaacatgtaatgttagtgtttgacccttcatttattcagtacaattatttgtcatactgtggagaatatatccagggcttaatgtcactttgaccatgaastctggaacaagctgttggaggcagggcatcacagtaaggcagtcagaattggtgactttcagaaaatgaggtaaatctgttgtctgagtctgatcctaaactctcagtcagctattggactggattcttctaaagcagagtatctagaataggagggatgagcagactacatttggataaagaatttataaggtactctttaacaatttatatcagagttagttgctatctttagcaccattgtcctgatggcctccacttctagctatacattgcctctttgaaatg

SEQ ID NO: 683421 - DNA, 1360 bp, Homo sapiens
tcttaccttccagggaagtgctatagggaactaagccaaaggagtcaaatttgaatcagtaagagaatttatcagactacagtgtttactagggaagcaaaaatgaccatatgctatttcagctatatataccacttaggttaaaagtgtttgagttagataaggtgaggatttagactaaccatcagctgactacaggtctgttaaccaactccatgggcaaactcatgtctttatatatacagtttcactgaatacagccagtcaattttttttttttttttttttttgagacagggtctcgcttttcccttaggctggaatgcagtgctgtgatcactactcactgcagccttgacctcctgggctcaagtaatcctctcagctcagcctcctgagtagctaggactacaggtctgcaccaccatgcctgcaatttttttttttgtagagatggggtctcactttgttgtccaggctggtctcgaactcctggactcaagtgatccttccaccttggcctcccaaagtgctcggattacaggtgggagtcaccatgcccggccagcttcatttttgtgtcatagaaggtttctttcaaagtaagcatagtggcagatttgagtagttgcaacagatatgataacactcacaaagccaaaaatatttattctttgactttttataggaaaaatttggtaactcctgatttagagcatgcaagagtaggcaaattaaaatgacaggatataagttactgtaatatttgaaaatttatgttatgtttttgaagtagagaagtatggagttaaatattaatacctttttaaatgtccaaatcctttttctgtgaggtagttttacatttacttttaagtacaaataaggaaattagcaatatttttattattggtgttctttagggaggttccacagtattaaagggttattaccaacttttttccctgccctaacatgtaatgttagtgtttgacccttcatttattcagtacaattatttgtcatactgtggagaatatatccagggcttaatgtcactttgaccatgaactctggaacaagctgttggaggcagggcatcacagtaaggcagtcagaattggtgactttcagaaartgaggtaaatctgttgtctgagtctgatcctaaactctcagtcagctattggactggattcttctaaagcagagtatctagaataggagggatgagcagactacatttggataaagaatttataaggtactctttaacaatttatatcagagttagttgctatctttagcaccattgtcctgatggcctccacttctagctatacattgcctctttgaaatg

SEQ ID NO: 683422 - DNA, 745 bp, Homo sapiens
gcacctgtaatcccagctactagggaggctgaggcacgagaattgcttaaacctaagaggcggaggttgcagtgagccgagatcacaccactgtactccagcctgggtgacagagtgagactctgtctcaacaacaataacaacaacaaaatatatatatatatatacacatacatacatacagaaacttcttcaggtgctctctactctcatcattccaacttatacagtgagtctggatgttaagatttttgttttcttttcttttgtgtgtgtgtgttttgttattgttgtcgtttttaatttcagaataaaattagcttagagggacaggaaagaaaagagtaacaaagatagtacacaccaatactcaaaaaataaatactattatttatgttgtagaacactagaccaaactacttatcaccttacctttaggaggagggcaaagttactcttcagagaatcagtcacaccattttcatacaattttttcctcatgtggttttcactcacactgccaccaccagattgataccttaataatgacttcagcatggtttcaaaagggtccrctgaaacagacaaattaaatatttctgtatcaaaataatcactcaaaaagataccctgtaagagaacaagagatcagggaggtaaagaattgtagctgaaagcatggcaactgtttttcataattcccttgtttttattttttattttttatatatatatatatatatat

SEQ ID NO: 683423 - DNA, 638 bp, Homo sapiens
gtcacatttcttagaaaagaaacttgccttagcttcctcactgaggtgttccaaggaccaagtatatattgaggaaagtgttttcaaataatataaaaccatacaatacaaacgtataaaaataccttataagataaggcctggcgtggtggctcatgcctgtaatcccagcatttcgggaggccaaggcaggcagattccctgaggccaggaattcaagaccagcccggccaacgtggcaaaacctcttctctactaaaaaaatacaaaaattagccaggtgtggtggtttgcgcctgtaatcccagctactcaggaggctgagacaggagaattgcttgaacccaggaggcagaggttgcagtgagctgagatcacgccactgcactccagcctgcagcctgggagacagagtgagactctgtctcaaaaacaaaacaaaacaaaaaaaccttataaacactagatgttattgtcaagtgcagctataaccaatgcttcatttattcatataaccgccaacttttttgcaaatatcytaacattaaaatgcagcaggggaagtgagaaataaattgatgatgaatttttcccgacggtctttgtcgacagggtaaattgctgtatgtaatagatga

SEQ ID NO: 683424 - DNA, 2937 bp, Homo sapiens
tattttgagatagggtctgcactctgttgctcaggctggagtgcacttgtgtgatcatggctcactgcagtctcgacctccagacttaagtgatcctcccaccttagcacctcaagttaggaccacaggcacatagcaccacacccagctaattttttattttttgtaaagatggactctccctatgttgcctaggctggtctcaaactcaggggctcaagagatccttctgctttggcctccaaaagggctggaattacaggtgtgagccactatgcctggcctcatttaacaatatttcttgggcacctactatgtgccaggaatagtcaggcactggggatcctgtgtgaggcaggacagattttatcctagctctcagagagctgctcccagcagagagaaaggttttgttttttatcctcatgattttgcactgtccctcagctatatcacccacctatcaatattatttcttccactggttttcctggagactgtcttcctgctcccctctgggtaggttgcttccaagtccaactacatagcccctccaggactggcccacacttgagtccctgttttctgagtctccggcttttcttttccttggtgtactctttccttttcctagagtagattcctgagaaggacagcaagggaaaaaaacatttacctgtttgcatatctgaatatgtcatttattttgcctttacatttgacaagtaagttccttttctatttttgtattttctctctgataattactttatgtcttagtctgttttgtgctgctataacagaatactatagactggctaatttataaagaacagaaatttatttcccccacttttttttttttttttttttttaatgagacagagtcttgctctgttgcccaggctggagtgcagtggcttgatctcagctcactgcaacctccgcctcctggattcaagtgattcttctgcctcagcctccagagtagcctcccgagtagctgggactataaatatgtgctacgacatccagctaatttttgtatttttagtagagacggggtttcactatgttggccaggctggtctcaaactcctgtcctcaagtgatctgcctgcctgggcctcccaaagtgctgggattacaggcaggagccactgtgcctggcctattcttctcttgaatcattttatttcagtggatagtttttattttagagatcattttttcattatttgttcttttttatagcatcctattcttaatttatggatcccatgtcattcaaaaatattgcttaaagtgagtttggggtttttctttggttttccttaccttttttcccctgaagtctcctttttatgtttgttagttgttttactgtctcttttatgtcaacatgaagaactgaatatctgactcaatctgggtgtcaggtatgtggattgttatttttatttattttatttatttttattattattattttttgagacgttgttgctctgttgccaggctggagtgcagtggcacaatctcagctcactgcaacctccacctcctgggttcaagcaattctcctacctcagtttcctgagtggctgggattataggtgtgtgcaaccatgcccggctatttttttctgtagattgttattaattttcctatacttttctttatgttgactgatttcgtatatacggttttggtagattggaaactttgtatgtgtttatatgtcctcagaactggaggaatctgctataaggggcctttttgttggtgaacttccatgtgacagaaggacttcctaatcttctgcctgagtacatgtatttggctgctaaaattctgggaaagggaaggaagaatgaaggaaagaagcttaggagcccattattcaagacaggcgtccacttcattccttgtttttgatactatgactcacctccacctctctctgggcctggtggcctcacatctgaagcctctatagtttcatttctgcaaataataaggcttgaagaggggtgacagcaactcctggctgtgaggggtgggaagggacacttgggatccgttatttccttgctccatttttagcccattgccatatgcctcagttgtccatggtaactggtacctataaatcctggaactcttgggatcccatcagagaaaatatacccacttcttatcgacatccccctttgaaaacaatgaggttgtaacttatgctccacgtcagttagctctgttttccatcttccattttttaaagactaatatttacatacataaaaattttaattctcacttgctgatgtctcttgctccctaatttttatctttgtaggtttatacttttaaaattccgtgtctgccatgctggtgggggtagggagagatcatttaattttgtgtggctatatattaccctaaaatcttgatgggcttttgagaaatctctcatggcacactgaagaaatgcagtttccagcattggtcacacggtggcggagcgaccctacgtttaatttatagtttctccatgcaagccccactgccaaccccacaagagttggggtattggagtcctggctaatccagcaaggtggactacagaattgtagaatatttccattgaactgttggagagctttcgagtccatctcctttagagacaaggaaatgattcacaggagtcaactaatgtatccaatacccggaagtagtaagaataaatttgaactttaaatttttttttttttttttgaggcggagtctcrctctgttgcctaggctggagtgcagtggtgtgatctcggctcactgcaacctccgcttcccaggatcaagtgattctcctgcctcagcctcctgagtagctgggattacaggcatgcgttcccatgcctggctaatttttgtat

SEQ ID NO: 683425 - DNA, 561 bp, Homo sapiens
tattttaggtgggtattttagacttcattctcctagctgtgaattaagggtaaagctcttttagtatggaagtattcatattttgttctccttggatttcactatctttatcttttatagcacattggattttgtaggagttgttttaatttttaagtttgttaaccatttttattatttttgcttttgtgtttagagtaacctgaaaagaaaagaggctcttaagtaaaatgaatttgggatgaytgaaagtattttggttgtttgtctttcattttactaattctggctaatgtcagtcttctacatatatttcttatcctttcaagataaaatgatggaggaattaagttcccggtcagaatttttctgtgataagaaatcaggggaaaaacatatttggtgttggatttttcttttcttttttttcttaattaaagcattttagtttttgtttctcatttgaatattctaagaaaaccttataatcattttggcttatatgaaatatttatttataaataataatactaagaagttgtgtttcagcttatttaaaca

SEQ ID NO: 683426 - DNA, 1164 bp, Homo sapiens
ggtactttaatattgagttctctttgagtatatattaaagattcacatgactgcaaaaggtttttgctgctgctgttactttaaattcaggaggatagagatagaacagtgggtgacttagagttctagtgcccagttagcacccaagtgagaatttaatgttcctgagtaaagctaaagtaatcatttacatttcagacaccatttaaaaatactgaattataatcaattttattgttgaagttgctgacaaatgatttcctagccagatacctggaatatcctgcaatcagttcacattgtcagtgtgttaagttgatatgtggcatccggaattttaaaggaatcctgcatgtcaatcagtgatcatgaagagggacatttatattccctaggctctgaactagtgtaatcagattatattgtcaattattagcatgagcgatagcaggacacataaactcatgtagatgtgtatgtcagaggaaacaatcacctttctatcctcaggctagatcctgggataataatgttcttgattatttgataatttctctctagaaaatggaatagcaagatacaaaatagcaacccttagtcagcttctccagaagtcaagtttccttagtggctaccaagggccaaatatagtgctgctgttctaatgtgggggtggggggcattgatgagacatgatgatcttaacattaactgtgactttgtgagttttgcatcaaacagcctcatgcagcctcagtagtgtattatttctcaagtctactttttagtcctgaagttctaatgtggctcttgtgtttgaataacagtagtcaattggtatcataaaatagccttgcctctcattataactgcagaaaatatggcccaggtttttagcatatcttttctgtcatagctatcacagtattaccttcmtgcagctgcattgttcatgatttatttatttattcagttatacacttaagaactatttattaggtgctgaccatatgcaaaacactgtgccaagatgtattattttaagggtgaataagactaggctcctgccttcaaaaccttacaggctactggggagacattaggacattagcatagagtgcaatgcatgttaggaaagggtgcatattgctgtagtctcaccca

SEQ ID NO: 683427 - DNA, 1164 bp, Homo sapiens
ggtactttaatattgagttctctttgagtatatattaaagattcacatgactgcaaaaggtttttgctgctgctgttactttaaattcaggaggatagagatagaacagtgggtgacttagagttctagtgcccagttagcacccaagtgagaatttaatgttcctgagtaaagctaaagtaatcatttacatttcagacaccatttaaaaatactgaattataatcaattttattgttgaagttgctgacaaatgatttcctagccagatacctggaatatcctgcaatcagttcacattgtcagtgtgttaagttgatatgtggcatccggaattttaaaggaatcctgcatgtcaatcagtgatcatgaagagggacatttatattccctaggctctgaactagtgtaatcagattatattgtcaattattagcatgagcgatagcaggacacataaactcatgtagatgtgtatgtcagaggaaacaatcacctttctatcctcaggctagatcctgggataataatgttcttgattatttgataatttctctctagaaaatggaatagcaagatacaaaatagcaacccttagtcagcttctccagaagtcaagtttccttagtggctaccaagggccaaatatagtgctgctgttctaatgtgggggtggggggcattgatgagacatgatgatcttaacattaactgtgactttgtgagttttgcatcaaacagcctcatgcagcctcagtagtgtattatttctcaagtctactttttagtcctgaagttctaatgtggctcttgtgtttgaataacagtagtcaattggtatcataaaatagccttgcctctcattataactgcagaaaatatggcccaggtttttagcatatcttttctgtcatagctatcacagtattaccttcatgcagctgcattgttcatgatttatttatttattcagttatacacttaagaactatttattaggtgctgaccatatgcaaaacactgtgccaagatgtattrttttaagggtgaataagactaggctcctgccttcaaaaccttacaggctactggggagacattaggacattagcatagagtgcaatgcatgttaggaaagggtgcatattgctgtagtctcaccca

SEQ ID NO: 683428 - DNA, 587 bp, Homo sapiens
tcagaatgcccctttgcattccagtgtggtgggattgatgcccatgctccctggcagtattggagaattcccactgctccacatcctcaccagattaccagattttctgttgtcagactttttaatttttgccaatctcatggatgtgttgcgccatggtaaaccaagtcctaacaagggccaagaggccttaggccaacaccatctggctgccacaattccacccccacaccaccccactgtacaccttcctacacttagttcctattcccttcctggactcaccgcgtttctgccaccctggcctcgatgttccatgtatgtaccaggcactcatgccttggaacttttacactggctgttccctcttccacaaatgctgttacccaggtacagtcatgttctctccttsctttcttcaagtctctgtgcaaatgtcaccttctcagtgcaacctattggggccaccttattcacaactgtacccaatccttgctcctggcacttctcctttatcacctacacctttatcaccttctaataacctatgtgattcactcaccaattttatttctttgtctcttccc

SEQ ID NO: 683429 - DNA, 1883 bp, Homo sapiens
cttgtagttcctttatttccaactagggcatgggactcttggcaaggctctgaagtagaaagtaccctttatagacagataaagaagtacagacaatctgatagtgtaaaggtggttggggcatttgtcttttagggaaaataatccacataaaaccacctttctcatagttttgtatgtttagggagagcccaatattttcaaaaaatgtttgaaaggcagtaattccccagtgcaagcctacatttttatttttacctattatrtacctagttagctttctgtaacttcaagaatttgtccttattttcacctagctaatgtgaaaatttcatgcatttatcacttcacctcatcaccactgcaattcttttgtttttttctttctgttcagtgatcttttgttttaggaaaaaggagttagatttacagccttggcaatcaaaggtgtctcttttaaataacagaataaatattgtatggatagtgagagtgtttttgtaactgcaggcaaggacctgtgtctgctcctgtggtctcctcagcaggcagatttctgctagcacttgctgacattttccatagcaataagagcagccaataaaacaagtgaagaccattgtgtggccgaatgggataaatgcataataaaaaaagaaaccataattaattcttgtctttgggataatggaatcagaaccttggtgcagagacctccctctaccccatgaatcatcagtgttagacttacagtgctttgggatgttttcaatataatttggttttgtcggacattatatatataaaatagaagatcttgtttacagtacaattttagatcatcttggaagacattatgtataaaacaaaactctgctttaaacagtaatggttaaattattaagcaacggaagtgtagaattagtagtgcagaaagtaatgacttgtgaaaataaatataatttaaaagctatcgaagcccccaaaacactttaagccttgagagagatgtgactgtgatctgagtcacatatggctacaacttctatttctcagattatagattacttcattttcttattttccttgttctgtacaatgactaaagataattaaatgatgtcagggacaaaaacctcctgccttcttaattaacgacccttgctatagattaacttcccctttgttgttctgctttgcttaaaccagatgacagaaaacccatggctattccagcctctgtaaaaaatgttaaatgtacccttccccaaaagaaacactgcctataaccaatcaaactgctgtaacgatgagccaagtttgtatgaatacctggtaatcctgctaaaaactctatgtctgcctataaatgttaacttccctgcttgggaatgctgactccattcttttagagttggtgtttgcaggtgggctttcctcaaactttgcacgtgcataaactctctttaaattggattctgactattttgataaatttagggtgacacacatcaaggattcagagtcagaaagttaacatggggacaagtagaccagaaagcttcataggaatagatagcgcttgaccttaaccttgaacaatgagtgggcttcttgatagatacagaggggaaaatgatagaagccctgaaggtacagataagaaggggttcaaatgaaaagagttggttctcaggcagtaacaagatcaccaacacttgctagagcaaatggaatccagctgtggagacctaatagctgaggaagtcgacctctgctttgtggagtggataatggttaagtggtaacttttgaaagtatttctttttttctttttttggcttctctgaactgtgagagacagggtgataatttccttttaa

SEQ ID NO: 683430 - DNA, 975 bp, Homo sapiens
tgcaaaaggaaaggaatttaactcttcactttatcctctaggctgaagaattcctcagaccagtgttaagaaagattcattatctatattgaacatattgcccttcctatacattttaatatgttggtgaaaacaataatcaagtagaggaaaagagaccaatgatggaaaaaagaatgataattctaggagagaagagcttgagtagggaagaaaggatggagtctgcaatgcatatggatgtgttgattattgataggaccagagccactttatccatttgaacagcagacaaatgggaaacgtgggtgaatatgcagaagggtgggaaatgtaatggaagaaatagggaagccttcacatctgattccatccgtgttttctgtgagatatgagactacgtcatcacatgaaattgagaagagagagtgccagagaatttcactctaaagaaaagatgataaatattttataattttacctcatttcctgtgtaagacatttctcccacttgaaatgttgratatttcttaactttttcacaaccttgcctgttttatgactaatgtcaaaacctcaataattttttaaataaatgtttaactgttctagtcattaaaaaatacgaaacaaagtaagttataaatttataccttttatgtgttagcaaaaaagttataatactcagtgatggcaaggtaacttacttgtaacttacattgcattaatgcaactgaaataagtgaaagtgttttattcattcagttactaatttattcatgaactattgactatctcttatatgccaggcattgttttaggcactaggaatgtatcagagaataaaacagatgaatatctctgtccttgatgacccttcttcctagtgggaagagaagatagatattaatattggtaataaaatatcaaaaataaagactaatgattaccagttgaggacttgttatatcccaa

SEQ ID NO: 683431 - DNA, 2965 bp, Homo sapiens
tttagagatcacttattaaacactcatgtgcctctattttaaacaaatagtgaagattgataaattagtacagttaaatctccaatttttttttcctctttaactcacatattaaattacagtgtgaggtaaggagattaagagtcctttaagagagaggagcaggatgctgggaaaggaaaagatgagaaataggacaattataacattattaaatttgtgtaaatctgacttggaacaaaaacctaaagaaggccaaatcatgtgagattaatatgccgaagtattaaaatgggactctttttctagcagtttacaattgacaatagaaattaacattcatgtaaaaatacaacaaacatctgtacaataaactgagatgcaataataatagacaaatacaaatatacatgctttatgtgataagtatattactagtaaagttatatgccaatggattaaattacctttaatgaactggataaattcatggcctaaagaaaattagtaatttttaaaatatattatgtaattcaaccaatatatattaaatgctatttgttaggtactgtcctagaaacaatgtaaaccatgcttaccgaagcagccttttaaccacacgtttgatcactgtaacaggctgactgtggtacctgccttaccccatcttctgctatgactactgtttaccttggaggtggggtgtcacacccgtacaggtactctgtcactcttatgccaaccacatctgattgggtatggagtagatatctgactaaggggggcatattttcataggcttgttccagtaaacttgaaatcagggaatagggagattggatgatttaacccccagatacagcacttgtaaagataggagaggggtagccatgttggcccaaataagatgtagcagaagagtcaggcagacacattcagaggggcacattagagacagcccatgtggccccagagaaggggaagtggaaagcataatcttgtttctacactgtattttttttttcatttttgctttcaatccctgtgaagtgtggctatattcactgaccctaagttccaaaagatacccatttgttcctttatccttccccttacattattgcttttacctatttatttgttggttagttttgcttaaggaattttagaaggaattttactaattttttttgacttgcaaataaaggcaccagtgcttacaatttacatttttttctatatgtggtattgagacgaaaaagtcaacaacttgaaaaaaatccattttgatgtttaacttatagaccgtaagcaaaaatgcataatttatttcttgtatatttgaatatgtcatactcaaggaaaacaattgagtttttagcaaaattttggagaagggatgaatttctgagtttagaagtacaatagtttcaaagttaaaattagtggatttgacagcatgatttaaaaactgcatgcaaaaaagaaagattgtcttaaaaaacaatcaactgattatgtagacacactatataagacagtgttactacctttctaatataattatcctacaaaaaactataaaaattttaagaactttacaaataaatggaccaacatccaagtgcacaaagatgattaaacaaaataattgatattactgtgaaaacactggaatctctacttttaagtaaacgaataaatattcacacaaaatattttaaaaaacagattttttgctattaaattggaattttttttttttttttttttttttttttttttgagacggagtctcgttctgtcgcccaggcgggagtgctgtggcgcgatctccgctcactgcaagctccgccttccgggttcacgccattctcctgcctcagcctcccgagtagctgggactacaggcgcccgccactgcgcccggctaatttttttgtatttttagtagagacggggtttcaccgtggtctcgatctcctgacctcgtgatccgcccgcctcggcctcccaaagtgctgggattacaggcgtgagcccmcgcgcccggcggaaatttatttttaaatattcactattgcgcaagatggtttgcaaatggtagttccatatatttcagataacattaactagtacaactcttttgcaaactgattggagatactgctgtgagtcaagaaatgaagtgtgtgtgtgtgtgtgtgtgtgtgtgtgtacactcaagatacagtcccagaagagaattactaggctaaaggatacaaatatatatttttacacacacataggtatattacagaaaagatctatattagtgtgtatttaaaataaactcatcacaacattacaccatgaagcttttttaaaaaaaacttgctgtccaattgttggagaatatttagaaaatttggtagacacattgtggctttccgagtaaatgctacacagtactgggaaaccaaacatgaaataatatcagattaagaaaataagctttggcaactaagcaagacctcatttctacaaaaactaaaaaaattagccaggcatggtggtgcgcacctgtagtcccagctgctcggaagactaaggctagaggactccttgagcccagaagtgcaaggctgtagttgcttatgattgcaccactgcactccagcctgggtgacagagtgagaccctgtctttaaaaaaaaaaaacctgtctccccttctctctctctctctatctaactattgcttatctaattatacctagataaataaatggatagcgagatacataaagggtacatagatagatataattagataagcaatatttgctcaaaacataaaaaacaggaaaaaagaattgaataaaatgaaccataataattaagataatttatagtgatttttaacatctttaattccaaaatgtgtacaattaatatatatatccttgagtctagtttttaaa

SEQ ID NO: 683432 - DNA, 644 bp, Homo sapiens
tgtgtgatgttgaggaatattgggatgctttaagactggactggattggtgtggggatccatttttccagggacttgaataccagacagaggacaacagggcttatatgggaggaaagagtcattgtatgtttcttttgcataacaaaagcagggttttagaaagactattctagggaaagagtccagatggctttgaatggaaagacaagagagacagataaaccaaatgtcaaaaagcccactggaaaaaactccatatccctccagtatccctcgatttctctccatatccagccagttgtttgcaattaccttcattgagaaggtgtgaggtgagcaayagagaaaagatgagtaatggagaaaaggtataggcaatgacctgatgatggagaacttactgtgtcaggccaataaggaaccagtttctcaaactagactgaggctcctcagggggtcatgagttaatataatgcatcttaaaagccatacttagaaacaaaagcacattgaaaaataaaattttatatacatttttatttttcaacagtttgcaagctgtatcgattatttaattgcaaatttatctataagcctaaataaatgtatagtaccatttatagcatcatgcaaaatgataag

SEQ ID NO: 683433 - DNA, 644 bp, Homo sapiens
tgtgtgatgttgaggaatattgggatgctttaagactggactggattggtgtggggatccatttttccagggacttgaataccagacagaggacaacagggcttatatgggaggaaagagtcattgtatgtttcttttgcataacaaaagcagggttttagaaagactattctagggaaagagtccagatggctttgaatggaaagacaagagagacagataaaccaaatgtcaaaaagcccactggaaaaaactccatatccctccagtatccctcgatttctctccatatccagccagttgtttgcaattaccttcattgagaaggtgtgaggtgagcaacagagaaaagatgagtaatggagaaaaggtataggcaatgacctgatgatggagaacttactgtgtcaggccaataaggaaccagtttctcaaactagactgaggctcctcagggggtcatgagttaatataatgcatcttaaaagccatacttagaaacaaaagcacattgaaaaataaaattttatatacatttttatttttcaacaktttgcaagctgtatcgattatttaattgcaaatttatctataagcctaaataaatgtatagtaccatttatagcatcatgcaaaatgataag

SEQ ID NO: 683434 - DNA, 2261 bp, Homo sapiens
attacaatacctcaaggtgaaaccactaaagtccttctgtgggtaatttattatactgcgagatctcagacacatgagaaactgtcctgaactcccaaatgaaagcacttccaaaatacagcatttctaaaacgagtaacctttaacttatctagcataagcagaagaataagatatgtttaaagttttcatgtttttgctgatagacttaaaatctacgtagcgtttcctagattctgactttgacttgctcacacgctgtccctacccatgcaagctagaatcttycctctcccttcttgatttcaacatgagtttagaaccaaaggaacttttacttggtccggtgacagtttcccgtctgagacttccccacgcaggcacagagccatggcccctgggctgtttttatttgctctaattcaaatgccaattctaatttgctttctacggtgctcttttgttcgtctgtcttcttctagtatttataattgataactgtagtttaattattcaaaatcattatttttagatgtttaaaattgttttttttccccttcagacttgtatataaatgtcattatctcctgagaagtggtataattttcagaagcagagaatacattatcttctcttgtatccagtggtgtagtgtctgtcggggttcccaacctctacactattgatgctttaggctggctgcacctttgttgtggaggggctttcctgtacgttgggcgttgtagggtgctcagcagtgtccttggcctctgtcattggatactaataacatgcccacttcacaaatttaatctttctgtaagactcagaaatacataggaacagaaacaaaagcaaaaaatcagtatcgactgcttcttgagggctcactgcctgctgtgaagcagcatctgcaggtctgtggtcagcgctggaggttgaaaaccattttaaatgagcaactgtggcgggttcacagggtcaaagggcagagttcctgttgggatgtgggaaaagatgtgatctctactatctcagtggcaattccacagccaatggaagtaagcaatggaacaatttagaccatttgagaaccaaggtgtcaccctactgtgaaatctgcagacagagaaggcatttcatctgtatttttaccttcaatccttgtctgtgtctataagttcacattgccgacagcccacctgccagctctgctaccagaattgccttgctaaccagctttactcctggaatttaggaaagtctgagaaaagtcttcatctattcatattggcatgctggtacttaaattcaatgaaagtaagagtagaaccatgtattcaataaaaataagaatagctttatttgcatgctgtcactagtatcaacctaacttcttatgtccttttcaagtaagtcagtgaaaaccagaaatttcctgacagctggccttggaccgtggctgctttaacctctctgcaggggcaagtacatttctgtcattctgcatttgtgatcctgaggtctgactgtcacatgtacagttattggcatccacagggtagaacttctttcttatctatagttcccaggtacagagcaggaaaggagaactgcagccaaggggtgatatctaattcacaactgggatgccccagtgtgtgtgccgaggagaaggtacctgagtaatgttattcattaacatttatttctgggctttggccaattggtcttcctgtagggttatttggcatgttctaataaaatgtgcctatgattgagattatcttggattaagaaaataacttattcaacaagtatttattgagcatctcttctgtgttgagcactgtgctagagagtatagcacagaacaggccagatacagctctggtgcagcttgtagtctagtctaggagaggtagaattgaacacacatgtaactgcaaactttgagaagtgccacaaaggcaagagtattcaggaaacccagtttaattagagtcagagaaggtttctgtaaagaagtgaaatttaagctgaggacatttaaggcagaaggaatgtaactgtcataggcctgtactgtaggctgcaaagatcaacttctccatgtctcatgaatagttaattatgtatatttcttattttagcacctcacattatgcagttgactgtcgaacaatgtgagagttagggttacagggcccacatacagttgaaaatctgagtataacttgcaactccccaaaaaacttaac

SEQ ID NO: 683435 - DNA, 2261 bp, Homo sapiens
attacaatacctcaaggtgaaaccactaaagtccttctgtgggtaatttattatactgcgagatctcagacacatgagaaactgtcctgaactcccaaatgaaagcacttccaaaatacagcatttctaaaacgagtaacctttaacttatctagcataagcagaagaataagatatgtttaaagttttcatgtttttgctgatagacttaaaatctacgtagcgtttcctagattctgactttgacttgctcacacgctgtccctacccatgcaagctagaatctttcctctcccttcttgatttcaacatgagtttagaaccaaaggaacttttacttggtccggtgacagtttcccgtctgagacttccccacgcaggcacagagccatggcccctgggctgtttttatttgctctaattcaaatgccaattctaatttgctttctacggtgctcttttgttcgtctgtcttcttctagtatttataattgataactgtagtttaattattcaaaatcattatttttagatgtttaaaattgttttttttccccttcagacttgtatataaatgtcattatctcctgagaagtggtataattttcagaagcagagaatacattatcttctcttgtatccagtggtgtagtgtctgtcggggttcccaacctctacactattgatgctttaggctggctgcacctttgttgtggaggggctttcctgtacgttgggcgttgtagggtgctcagcagtgtccttggcctctgtcattggatactaataacatgcccacttcacaaatttaatctttctgtaagactcagaaatacataggaacagaaacaaaagcaaaaaatcagtatcgactgcttcttgagggctcactgcctgctgtgaagcagcatctgcaggtctgtggtcagcgctggaggttgaaaaccattttaaatgagcaactgtggcgggttcacagggtcaaagggcagagttcctgttgggatgtgggaaaagatgtgatctctactatctcagtggcaattccacagccaatggaagtaagcaatggaacaatttagaccatttgagaaccaaggtgtcaccctactgtgaaatctgcagacagagaaggcatttcatctgtatttttaccttcaatccttgtctgtgtctataagttcacattgccgacagcccacctgccagctctgctaccagaattgccttgctaaccagctttactcctggaatttaggaaagtctgagaaaagtcttcatctattcatattggcatgctggtacttaaattcaatgaaagtaagagtagaaccatgtattcaataaaaataagaatagctttatttgcatgctgtcactagtatcaacctaacttcttatgtccttttcaagtaagtcagtgaaaaccagaartttcctgacagctggccttggaccgtggctgctttaacctctctgcaggggcaagtacatttctgtcattctgcatttgtgatcctgaggtctgactgtcacatgtacagttattggcatccacagggtagaacttctttcttatctatagttcccaggtacagagcaggaaaggagaactgcagccaaggggtgatatctaattcacaactgggatgccccagtgtgtgtgccgaggagaaggtacctgagtaatgttattcattaacatttatttctgggctttggccaattggtcttcctgtagggttatttggcatgttctaataaaatgtgcctatgattgagattatcttggattaagaaaataacttattcaacaagtatttattgagcatctcttctgtgttgagcactgtgctagagagtatagcacagaacaggccagatacagctctggtgcagcttgtagtctagtctaggagaggtagaattgaacacacatgtaactgcaaactttgagaagtgccacaaaggcaagagtattcaggaaacccagtttaattagagtcagagaaggtttctgtaaagaagtgaaatttaagctgaggacatttaaggcagaaggaatgtaactgtcataggcctgtactgtaggctgcaaagatcaacttctccatgtctcatgaatagttaattatgtatatttcttattttagcacctcacattatgcagttgactgtcgaacaatgtgagagttagggttacagggcccacatacagttgaaaatctgagtataacttgcaactccccaaaaaacttaac

SEQ ID NO: 683436 - DNA, 943 bp, Homo sapiens
ttgacagccacagcctatgttcagaatttaataactgtttcatgcattggccccataggggtaccaggtcttcctgctgtaactaatccagtttcccactcctcatttcctcacatgtatgcaccatgtccttttatcaagccatcctcaattatccttacatgagagtgccatctgtttcccttaaacctcaactcagacaagtagagctaaatatattaatgtcttatgaatccatcccaaaaattctcggtgaaatttcaagcaaatacaaatgcccatgttcattttccacattccacacaagacatgtcgtatacatttattctgtcctctacttactaatcctttgttattttacttagcagtatattctgaccatcttatcatgacgctacatagtaattcctaaataccatatttttagagcaacaatttccttcatacatatggaaaataatttatgtgtgtatccaattatctatttaaaaatgcaactacaaataactttgtgcttatgtttcataaaagtgtgtatgtatcagtaggataattttctagtgtaagatttctgggtcaagtataggcacacttgtaatattcttagatatttaccaattgaccttgttaggaattgaatcgtagctaattttgtagctcattataatcacacacacttcagagcttacaacagagggttaagtaaaaatttaagattgcaaaactgacagttaaaaaatgatcttagtgtgcttttaaataatttctcttttaattgattattagtgtacttttaattaatttctctctctctctctctctctctctctctctctctctctctctctctctctctctattagtcttttggagattagtcctttgcaaagtgattggtaaacatttyccaagatgattggtttggttatgtgtcctttgctat

SEQ ID NO: 683437 - DNA, 1842 bp, Homo sapiens
tgtattaatttatgcatttatttatttatttgaaaatggacatctctgaggaagttttcttctccttcctatcatttcccagcagaacaatcagctttgcaaagcttcagattttatggctgatcatgtttctttcctccctggaaaagaactggaaaaaacatttgcatgtttttatgagtcttattacatagctttatgacttgtacatgtaataatagcaagccagacgttcatggtatgcgtctccagagaagtcatcatttgaacataaaaatgtaaatccatttggaaaaacacagaccagttattgaaagtgaagcctgcagaccatgtgcccctggtgattgattagcaaaagcccagggacacacatccttagctcggacagactctgcagaccatctggaaacagatgatgcttaataatgcagaataataaaatcagctaagttcccatttacaaatgaaataaattgaagaatgagtgattacactgatctaaagtgcatgaaaatattttctgcaaattgggggcaggactggggctggaggctgaggagtggggaaagatggtcaaagattcctgtgcccattttgtgaatcctagatgaagccagacatttgaaaatatgaaaccacagattctaggttgttggttctctctgcaaaattgacctgtcgaaaccctccatgaatgactgtactttctctgacaaacagatatcaatatctaaaaatgcttcctgcaatttctttccacaaagcaataagactgtttcacaccaataagagctcactaagtggtattctcagctctgtcacccccgcagctataaccaatgaaatgaaaaggtaagaaagataaagcaaaaatcaggggtcacctgctataacccagtggggttctttattctgatagggcaagccagggcagctttactcttttctcatttcattagcttttcctcttaaaatcttacaggtctttcacaagcaattaagaccattatttgtttgactattaaacagggaacccagaacctggaagtttatgtcatatacaattaagaggtggtttagctggaagaacctggctggggagcagaggaggccagagcctgagtgtcccatattgtaactgccccagttctggtgctggatgcatgttaagggtttgctgctcctccagcagtgctgtgctcattctgcagcaaaacctggcagagatttctgtgctgggttagaagcagcagcaactttcctggatttgtcatattggaagcagaagaattttatcagccatccaagaaatgtgttcctgctaccccagcacattctcctagttctaaagttacgtctaacaccatttctctttcttttgtgtcaatcaaatatctaacaaacctatattggtgtggccagccttatgccatatggtttggccgatgcgttgccttgcatgtgtgcatatgtgcgtgtgggagtggtgatgggtgcgggggggttgggtcaaaggggacggggagaggaatagggttgaagtagcaagggtggtccttagtgcatkctgaactggggaaagaaccctggccagtaaatcgcagaggaagtaactcacataaaattccaaataaggcaagtgcaatgcacgttgaggctctgtaggaagagagaggtccctgtgtcttgggaggggctgtggtggtgtggtaatgtctaggctggaccttgaagatgagggtggaggaaggaggggaatgaaggaaccctgatggtaggggaaatgttggcctctatagaggatgctgtagtgcaccatccatatacgcgctataggac

SEQ ID NO: 683438 - DNA, 649 bp, Homo sapiens
tttgtttatttatttatttttgtcctcccaagaaccgatttctgctctctttagggggagagataatacaggtactgcccccattgagaatgcatgatccatggttagccatcctagcaatagggcaacatatgttttttcttctgagtctgctactagatttgaaaacagtctaagactaaatactctgtacattataagttaaatgaggcattcaagaacttactcaggaccttagctgtttgtaatattgtttctatggagactgtartcttactccaagcagcttactaatatgaatttttggaaaatacaaattatttgtgtgattatgatttatactacctttaaataagtagaatgaaagctttttacaaaaagctcaatattgagctaaatagtaaacgaagcgatggccatggattagcggagaagagcaggctagacattttagacaggaagaatattcactgtctgacactgtttatatgctgaaacttaaaataacatgagaagcctttcaattcttcactattcatgaaagaaatagctttgctgggcgtggtggctcatgcctgtaatcccagcactttgggaggctgaggtgggtgggtcacctccggtcaggagtttgagaccagcctggtca

SEQ ID NO: 683439 - DNA, 1214 bp, Homo sapiens
ctttttcccagctcttagctccacttctctggcttcatgccagtctcagatggctcttctgttggggaacaagttggccaccccagctccagcctcacaccctcccgtgtttgaatccaaagagcctgcttctctcagtagcctcagcatgaccctcatgctgtctccttggctctggttgggtcatttactcctctctgaacaaatcctgcctccagggaaatgatgtcctttggctggccaggccttagccacatgccccaacaaagcacagtgcgggaggaggcggggtgaattcccctggagcaaaatcacagtggctgccagaaaaagggcagtggccattggaggtatgcacggtgacctgcttcccagtcctccctagtggtcctaaactgcgctttcctccattccagaagccaaggccagaggcgaagtagggttctgtgtctcccttccctgagccacaggctcctgctcctctggtcctcagctgagctcctgcaggacactgtcctgtttctaaccggaattcacttctctaaggggctctgccatgcatgatgggtagccttttaytatacatgggaatgtatctctctgcctggccctgtctctgtgctctcgggctgtgttctggaaagtactgagtttggcttcaactgcacaggcagcttgggtccctcaatcatcgtgagccctgggaggactctggccttcagctgacaggactgcacagaccagctctgctatctctacctctggggctcatcattgaagctctcaactgccattttctcattgacaaaatggggttaataatgcctccctcaaggctacatgaaataatgtgacagttaacagagttcccaaggcttagaccagcacttctcaaactattaatatctgtgaagaagaaacagttttgtttgtttttcttatctgtcatagaccagtacttgtgtaaaatataataaaaatgaattactagaaaatttaaaaagatatgcaaaataccagctccaatattttattattatattcaactaatataaaatcattctgtcaaatagctataaacatttctaaatgctcattctcagtctctttactttcttatgggcaactggtgacaaatacttcctagaccagtatggagccacattttttttggtagcactgaagtcagtgagccttctaagtagaaggcacct

SEQ ID NO: 683440 - DNA, 563 bp, Homo sapiens
caaacaaaaagacgtctcttttcctgtttctatttataatttcagggtcttagcattttcccaaatagaaagtgcttcttcaactgagttttgattatctctaactgtgctcccagattcttctgggtagccacattgttaaatcagagcatttctggatattttggaagcttgaagaataaaggcaaatctgtgttgtttttgctttgtttattgttttcattgtttcgcatatttattctttaaccaataagaattttaattataaatcacagctgactctattactgcagctttccatagtctatacagtatttacactatgacaagttgatgagtctattctttaaaaattattttggaaatacatgaatactactacatattctgtggtgaaaaaaaaaacacacccaaataaaactcatctttatatttttatcacctgactatagtgatatcaaataacatttgatccggaatcttaggttcataccagtgctaccagtgctkcacaaagccaaacttatacttttttgaaggggaaggtgggaataaaggctgtg

SEQ ID NO: 683441 - DNA, 602 bp, Homo sapiens
gaaaataaatatagaaaaataggagattagttaaataattatgatattaagtaaagaagttctaagcagcaattatgacgctataatcaagaactatctattgatacataaatacttccctacatattgttaaccccagaactatatatacatacataactatgtatgtataatatatatatacaatacataagtttattataatcatgtgttgtaaatactttttatatgtgtgtacttacatgggtatactatatatacaaacactctctggtccctgagactcctctgcactccataaggacaaaggtatatttataataatgctgaaatattatttgccttttttactstcattctcttagaagaaatacagtagggcgttttccactacatatacagacatggaagtacataggtttaatatgcaacttccttcccaatcattcagaatatacggaaaaaacaaagaaaagaacaaatttggcagaagatgacaatgagtgaccataggtgaaaggtacataggtgttgactatactattactacttgaaatgacaggattgaatctttttgaaataaattgttggttgagagaaga

SEQ ID NO: 683442 - DNA, 667 bp, Homo sapiens
ttaggttatgtcttttattcctgatccacccagggtggctatgttacacatttgtaatatagtctcctagaggttaggggttccttcagtttgtatgtctgacatttcatgtcccggttttctgcagtagctctagatggacttgtctcttgtttgtctctatggtattggggtattttaaatttttcacgtctagagtgttaagagttcgtctttctggagattgtttcatatcacccgtaggcctgttcatcagcctccctcttggctccacgatttttctcagtctgcctttgctcacactaagcatgtggctggctgagggtagtataggagtgtgagttgtrtagtgggatttggtgggaattttttccctgttactcagctcctttgcagttggaaaattctccaagtaatgctgaggacagttttatatagaatttatttttcacttcttgttttttgtttgttttgtttcttgggggaataggggagataggcaacttctgttctcagctacttgcaagtgttttggttttaacagtgggacttcctgcaggacttgaaaaattgatagttgatgaacctgagttccctgagatactgctgtttttgttagtgtttatccagcaattgcacgatttaaacaactcacagaactaagttg

SEQ ID NO: 683443 - DNA, 591 bp, Homo sapiens
ctgcaaattcgtgcaaaattaaaactacagaatacattggaaakaaatatacctttagaatctccaagtacatagagaactgctttacttaggcgttacataaatacaaacgcatattaattaccctgttcagtgaggtagaaaaaagacaattaattgtttagctgctgaagattctttattattaggacagaaggacaattagctttaaaagcattgctcagaacatgtatttttttttccccaaatgttgcttttttttttttttttttccgaaacagaacaaaccaagccctttcccgcaagaactacattgtgaagaaagcaaatgctaagtaggaattagaaaaaagaaaacatgcctaaagcccatgggaatgacaattcctggttaactgtaaaaaatggggaatgtaattgagacagatgaccagatttaggaaaaataaacctcaccattaaaatctaattaaatatttacatttcagcattaagtttcttctcaaaagttttgtgagcagcggggtgacagtgaagattattgactataatttgccgaagttttttaaactaaattagttttgtgcaatg

SEQ ID NO: 683444 - DNA, 631 bp, Homo sapiens
tgcctttccacaatcatcctcccaccggggccaccgcactgtgcctttccacaatcatcttcccaccaccacacacactcaggacatgctgagataaccacccaacacagactgaggaaagtcacccaggagactgcctgggtctgaacgcatccctgcactccctggccctgtctttttgacatctgatgtgtttttgatacttgcaccctcatctcagctcttccctacctgcagtctgctctatgtcactgctcaaatgcctctattccaagagggctcagggacacccccgaggagagaggaagcattggtttccaacatctacacctccagcaaagaagtagtgtgagctggggtgaaygcaactgcagaatcttttgttgaatgaaacacctttcacgtgaagaaaaagcagcaagacgaaatgacactttgctaatgatgtattttatggactgccatctgtctctggaaaggtcagagaaaagtggcaactcagttgcaggtgattgggcagggaccgtggttggggggacaaatgtctctcatcggaacatgacagggagccttggtgacatcatataaatgccctaattgggaagtggtcaatcgagcgggcctgactcct

SEQ ID NO: 683445 - DNA, 1389 bp, Homo sapiens
aaaatacaaaaaattagccaggcgtggtggcacatgcctgtaatcccagctactcaggaggctgaggcacgagaatcgtttgaaccagggaggtggaggttgcagtgagccgagattgggctactgcactccagcctgggcaacagagcaagactccatctcaaaatatatatgtgtatatatatgcttttacaaatgtggcaaaatgttatcaattggtgagtctaggtaaaggatatacttcatcttatacttcattgtactagatttagaagggaaaaaaatactctttccaaaaggcagcaatgtaaagacagtaactgaattattgaggggaataaataagccggagagcttaaggaatacgccatcttcatagaattttgtatctgttctttcagactacactgctaccttcttaattcagtgtcttgatatgtataacatcaagaaaaaagctattgatttgctttccttatattttaagtgaacgtaatttaattcactttcttccacttttgagtgcccttttcagacaagaatatgctatagtagacatcacaaggaatacagagacaatatggtgtggagcttgctctcaagatacagtgtagcacaggggttagcagattcagatccacaggccaaatcactacctgtttataaataaagttgtattaaaatacagcatttgtttacataaggctgctttcttcttacaacagtagaactgagtagttgtgatggagactgtataacctgcaaagcataaaatatttactgtctggcccttgacagaaaaaaataatcgccaacttctggtctaatagaatagataagacatggatgttaaaaacaaagtgtcataagcaaagtaaagatcagctgttccaagaggtcagaggagggagagattcctttaaaaggaaagttggagaaagtttcattaaggaagtggtattgatagccaaacctcagtaggaattaggcagagggagatttgaggaaacaagttggtaagtgctggtgcaagaggcgtggaggaaaactttatacatgcccttgaaaatcaccagatagagggaaataagggccaattaagcaaccttgtacccacttgtcatagaattatagaatatcaagagctgtaaaccttaaagattatctcatataactatttcaagttacagttgagaaaacagactcaaagggattaaatcattcatacaaggccacatacaaagttagtggggaagccatactaaaattcagtatttatgcctccacaccttaagccaatatttactgaattaagctgaattgcttccccagagaractttctagggcaaagactttcatctaaggtatagaatacagatcaaaatctg

SEQ ID NO: 683446 - DNA, 605 bp, Homo sapiens
agatggtgcaagagctttaaatgtgttcatgatcttaggacctaataatcttcctcctaagaatctccatgcaagaatcaaatgtcatgcaaagctgctcatttcagagttctatctctcctgcgtcctcattcactagtgcagaatccagtgcctaagagggcctgttactgggggcatccatgaggagcatctgccattggcttgtgaacacaccaatcaattattggtgcatatcctcatttattcctcttctctttgtccttcctcaaggtatttccaggaatgagggttgtcccagcatgactcccttgagtactgaggttcctccaggcatcatcatcaccttgaccagggactgtgccctagtggggagcagctgctagatggggggacctcatccacagtgtggtgctgagcccactgctgccatttccactgtgcataaccacttttgtgcaaaaaccctcaagggtgatggaagggagccagagaraggtagggaaaataataattcggactgacttatattctactctactgtctgagtctcatagagctataggaggaagcaccgctacctgggctctatcccattggtattg

SEQ ID NO: 683447 - DNA, 523 bp, Homo sapiens
tcagtctttttttgtgaattttactttccaaacttttaataatctccatgactttttctttgtgctcctctccatgtattacagagtcttacttagaaaaatccacaagatgatccaacatttattaatggctaagcctaaactgagttctttaaaaggtagttatacgatgatttctctacaccagtggtttgcaagctcattttgttttgttttccaaacagagaaaccatttattcgaattaaatcatctgtgagacggaaggagcctctctgattaaagtaagagtaagcaaaatagagtcccaactatcatctcccctccctactgtgmagaagctactgatgtaacccaagcagccctaagggtctgaaaaccactgttttacaacatgctctggtttatgtgcacagatgttaaattcactgtttcaggtacaggataacagtactgaataacagctgggttttgtttattagtttctaacatttctcccaaaacatctatgcaagttatctttcc

SEQ ID NO: 683448 - DNA, 1221 bp, Homo sapiens
attctaccaaatatttaaagaagaaaccatgttcatctcaaaattattcctgagaataacaaaataggaaacactttccaactaactttatgaggtcactgtaataacactgacaaaatttgtgagaggcttcattagaatggaaaatgacaggtctggccgggcacggtggctcatgcctgtaatcccaacactttgtggggctaaggcaagcagatcatgagatcaggagatccagaccattctggctaacacagtgaaaccccgtttctactaaaaatacaaaaaaaaaaagccgggcatggtggcacgtgcctgtattcccagttatttgggaggctgaggtgggagaatcgcttgaacctgggagatggagattgcagtgagctgagatcgtgccactgcactccagcctgggtgacagaggagactccatctcaagaaaaaaaaaaaaagaaaagaaaaaagaaagaaaaagaaaatgacaggtctatctcgtcataaatatactttcaaaaatgctaaacaaaatgttgccaatgatatataaaagggcaacctaggtatcagagaaaaaaaaaagtttgattaatcacccatttatcataagaaaatttaggcaactaagcaatagtaaagatctacaaaaatggcaacaaatatcaaaaggaatagtgaaatattgaaaacatttcctctatgatggggaacaaaataatgatgtccaccccaatcatttctactaaataccacatttgctcctttatcctgcaatcttgccaactaatctaattaattttaatattttatgtgtagatcttttgaattttatatgcatgctcatgttgacttcagatctgcaacaaatgkggcgctgcagcaacatgggaacagggaaaatattcaatacatgttgctgttaaattgagtattgtgaaataaaactgaaattgacctatacctcccactatatgcaacaatctaaggctggtggattgtagagcccgatttgaaaagcatttcttatgacacttaaatctactcagtgtataaacctataagaaatgtgtaccaaaatacacatataagaatgttcatagcaggatcattcatcacaatgacatgctgagaatactccagatgtctatcgatgatagtatggataaatatttttgttatttacacaaggtaaaagcaaggacattgaacaaactttagctg

SEQ ID NO: 683449 - DNA, 624 bp, Homo sapiens
tttctttgatgtggtgtctacttctcttcacagaaagtttgcattcttttctattagcagtgaaagagatgctgtacatgacagtctcatcttttattcaaatggaaagattatcaaactatttctcaagacaatgcttttaaatattatttatatattaatcttttaagtaaacaatttctatcttattccctatatactagttgtattatactttattttttatttttaaattatatttttatttgggtcaccaggagaaagattcacttgtggttcaaatcaagtgttcagaatcataacaggacagaaaggtttgatcccgagcaaagccctcaagggggaaatcaaaacaggctgaaataagacaataccccatataaagagatgaatgagtggctacacacacacacacrcacacacacacacaccccgatgatgtgcacagaggcacatttcacatggtcatttctgtttctttttaaatactggtttgtggggtgggattttgatttttccagctacaagaaaaggcccaaaagtgcatatgtgaggggggaaaggcagaaattcagcaataaagtagatttccctggaggaacatgaaggggaggaaacaggaag

SEQ ID NO: 683450 - DNA, 609 bp, Homo sapiens
tttctctcctcctccctaccccagtgcccagttctggcccctttctcatcccccaaggctaggcagaaactaagttttcaaaatagaaaatgtatgctacagatttcattgctatagaggaagtgtcttacagctcttctgtttaaacattggttgacctcttaatttatttaaacgtttgaataattaagcttcatgatgaatgtggctttgttgctggaaagtactgtactctcggaatattaaaaaatcgtgaaagaatgaacaaagatagtatgtgaatgaattgyacctttatacacaaagcatgcaagtacttgtgaaagtttttcctcgtttggtggtgtaaggtaggcctcggagtggttttacacactaggtagtagatgggtagtgttggatgagagcccaaaatagactctttatatcattctttaggatttacaacacattttcatgtacgtctcatgtatcaccctgtctctacaaaaaaaaaagggttaaaaattagccaggtatggtggcttgcacccatagtctcagctgcaagaggatattttgagcccaggagtttgaggcttcagtgagctatgctggctccatcgcacc

SEQ ID NO: 683451 - DNA, 609 bp, Homo sapiens
tttctctcctcctccctaccccagtgcccagttctggcccctttctcatcccccaaggctaggcagaaactaagttttcaaaatagaaaatgtatgctacagatttcattgctatagaggaagtgtcttacagctcttctgtttaaacattggttgacctcttaatttatttaaacgtttgaataattaagcttcatgatgaatgtggctttgttgctggaaagtactgtactctcggaatattaaaaaatcgtgaaagaatgaacaaagatagtatgtgaatgaattgtacctttatacacaaagcatgcaagtacttgtgaaagtttttcctcgtttggtggtgtaaggtaggcctcggagtggttttacacactaggtagtagatgggtagtgttggatgagagcccaaaatagactctttatatcattctttaggatttacaacacattttcatgtacgtctcatgtatcaccctgtctctacaaaaaaaaaagggttaaaaattagccaggtatggtggcttgcacccatagtctcagctgcaagaggatattttgagcccaggagtttgargcttcagtgagctatgctggctccatcgcacc

SEQ ID NO: 683452 - DNA, 617 bp, Homo sapiens
tgagacttctgtttttcaatattgaggttttctttaaaaatctccactaattggattgctgacttggagatagggatgcaggctttaaaacgagagaggaagacagacagagacaaggcagtgtgtctgtgtgtctcagagcaatgcacctttatccggttcatctcagccrtgcaagaccgtgcagggcatcagctcagcctcacctcctcaggggggctgccgcggtgctcctcccaccacaggaatatgtgacttcctgcagggagctcctggttccagtgtcaggactatggccctgatttctactttagccatctaatctcgtaagaaatattcgagtaccagagttagagatgcatgtctgtagtcaaatgcagacttggctctccagatggcaatagtgaaaggaagcccatcctgctggtcaaagcatccaagaaataaggcaggtggccaggagaaacctggctctagcatcccacccatctcctttgctacagatgggcttgggcaagtcactccccatgtggccttggattcgccatattaaaagctatggggttctactagatggtctctgagatcatttccagtctggcccctcactggttctt

SEQ ID NO: 683453 - DNA, 617 bp, Homo sapiens
tgagacttctgtttttcaatattgaggttttctttaaaaatctccactaattggattgctgacttggagatagggatgcaggctttaaaacgagagaggaagacagacagagacaaggcagtgtgtctgtgtgtctcagagcaatgcacctttatccggttcatctcagccatgcaagaccgtgcagggcatcagctcagcctcacctcctcagkggggctgccgcggtgctcctcccaccacaggaatatgtgacttcctgcagggagctcctggttccagtgtcaggactatggccctgatttctactttagccatctaatctcgtaagaaatattcgagtaccagagttagagatgcatgtctgtagtcaaatgcagacttggctctccagatggcaatagtgaaaggaagcccatcctgctggtcaaagcatccaagaaataaggcaggtggccaggagaaacctggctctagcatcccacccatctcctttgctacagatgggcttgggcaagtcactccccatgtggccttggattcgccatattaaaagctatggggttctactagatggtctctgagatcatttccagtctggcccctcactggttctt

SEQ ID NO: 683454 - DNA, 658 bp, Homo sapiens
cagtttatcctgtggtctgagtgtgggatccacatgtcatcagaggcagccacccatccagccccttgcttgatacccctacctcctagctagctgctgggtccattccaagtagttggtgccatcttatccaggagctgcctcacatatcaaccctctggaggctaagccttagagtcccattcctgtaggaagcccccaagcctatcacatgccagctctggtctgagacgctcctttttcccaagwgataggtgccaagagtgacttcccttatcaggcaagactcactccgatgcacaagagtgtgacgtgctctctcctggtggtggccctccaggacaggtagcatgtcacgtcctacactgatgcagcaatgacatccatcggtcctagacagtgattcttctgcttttttccaagctgggaatacaaggctgatgattaggaatgggaatggcaatttgaaagcacataagaaatctctgaggctctgtatatttgttcaatcatttaacaagcatttctaagcacctagcgtacactaggtctgtgcttggcaccagaaagcgacagagataaatcagatggaaccaagaagcttctactgtattgggaaagatagcccctgcataaaaacagccatttagaaaaaaaa

SEQ ID NO: 683455 - DNA, 658 bp, Homo sapiens
cagtttatcctgtggtctgagtgtgggatccacatgtcatcagaggcagccacccatccagccccttgcttgatacccctacctcctagctagctgctgggtccattccaagtagttggtgccatcttatccaggagctgcctcacatatcaaccctctggaggctaagccttagagtcccattcctgtaggaagcccccaagcctatcacatgccagctctggtctgagacgctcctttttcccaagagataggtgccaagagtgacttcccttatcaggcaagactcactccgatgcacaagagtgtgacgtgctctctcctggtggtggccctccaggacaggtagcatgtcacgtcctacactgatgcagcaatgacatccatcggtcctagacagtgattcttctgcttttttccaagctgggaatacaaggctgatgattaggaatgggaatggcaatttgaaagcacataagaaatctctgaggctctgtatatttgttcaatcatttaacaagcattyctaagcacctagcgtacactaggtctgtgcttggcaccagaaagcgacagagataaatcagatggaaccaagaagcttctactgtattgggaaagatagcccctgcataaaaacagccatttagaaaaaaaa

SEQ ID NO: 683456 - DNA, 649 bp, Homo sapiens
gaaactatattttggagaacttttgacctcatttgagttctttccagagtctcaaaccacagacccacacctcgctttcctctgaacatttaaaaaaatcttccttcgaaaaggtcctagatacattgctgcccaaatcctgcttttcccttccctgagtatcataaatgccaattttccttatctaaaatttcctgtcaratttatttaatcaactcataagtcctttggggcctcccttggttccaaagtagcagttgccttagtcatttcctctactgtctgggaaagaacttggtctccaaggtgatttcactttctctgatcagggaggacgtcaacatcacacaagtggtatgcttgctatcgatctgttttctcttcctttagggtttctgtgaaaaactggttgaggtgttatttttagcaaattgatgattgcctctgcctgcgcacatgtccatctgtctgtctgtgaacacagccaaccgaggtccaagaaagctttccttgccttgcctcgacagctgtattcatcttaagagcttcatgctgagcaaatggtttaaggcctttggtgattgaaaaaaaatggcagtacagtaacatgggcttcaattgtcacattttctgcacatgaggcctttga

SEQ ID NO: 683457 - DNA, 649 bp, Homo sapiens
gaaactatattttggagaacttttgacctcatttgagttctttccagagtctcaaaccacagacccacacctcgctttcctctgaacatttaaaaaaatcttccttcgaaaaggtcctagatacattgctgcccaaatcctgcttttcccttccctgagtatcataaatgccaattttccttatctaaaatttcctgtcagatttatttaatcaactcataagtcctttggggcctcccttggttccaaagtagcagttgccttagtcatttcctctactgtctgggaaagaacttggtctccaaggtgatttcactttctctgatcagggaggacgtcaacatcacacaagtggtatgcttgctatcgatctgttttctcttcctttagggtttctgtgaaaaactggttgaggtgttatttttagcaaattgatgattgcctctgcctgcgcacatgtccatctgtctgtctgtgaacacagccaaccraggtccaagaaagctttccttgccttgcctcgacagctgtattcatcttaagagcttcatgctgagcaaatggtttaaggcctttggtgattgaaaaaaaatggcagtacagtaacatgggcttcaattgtcacattttctgcacatgaggcctttga

SEQ ID NO: 683458 - DNA, 1524 bp, Homo sapiens
cttgtcatacaacagctggggctaagtctttaaagccccaggttctttctgcctctatgctctgccgtattcagcatcagcttcatcctatgcctgcttccccttgcagttatcattagggccattgggactatatgatttctttttatttctcatatttttctttctttttggaaaaattgtattttctttttaattgacaaataataattacatacatttatgatgtataaggtgatgttttgatatatgcttacattctagaatgattaaattaagctaataacatatccatcacctcacatatttatcaaacttttctggtgaggacatttcaaatctaatgcttaggcaatgttgaggtatatagtcattattattaagtatrtcaccattccatgcaatagattactaaggcttattcctcctgtatagctaaaactttgtaccctttgattaatatcttccctttccctatccacccacatcccccggccactgatgcctatcattcattctattctcaacttctacgagtttgatttttttattttccatgtcttagtgagatcatattcacatccaacaggagagagtgagatcccatacctcaagtatgaaattagattgttcctttcagtcagattggcatgacttaggtcatttcctacactggcccaaaagcagtttgaagacttacacaacgttttgtttgctcaatggagagataacacttagagagggcaagaggtcggaatatcctcccctgaattgtggggaaaaggcatagatacctaaggaaatcatcactctgttgggaaggagaaaggaaaaatggttttgggaggggtaagtaacagtgtgaagccaagttgtttgccgtttcttcatattcgttaaattcaaatggaaagcaatctcctgactcagaaaataaaaaaaaaaccaaaaaacccttccatatcattggggataaaagggcataattctaatgggttctaattctttgaactatgtgtgaattagtaaatagagatgaagtaaatgttgagttgtggagaccgctgtcttatttttccttccctttacttcctgaattatacttatgaatttctacattggtttctgtggtccacatttaccatagagtagaaagaaattacaggcatttatttagctgtaaaagtatttttagatgttttgtgggctgtgtatcaattatcatgtaacatagatttaggaaggaatgtgcaaaatatatttagcaacttttgataatattttaagagcatttgattctgacacgtgctatataatttatagagatgcaggttacatcattaaaaggttacatattggggcaatgacaaaaaacattcttaataaaaataccttattcttgaaacatggactgagaaatattccctcaaaggaaaaaataggtgatgattgctcaggtttttctttttaatttatttctctgtattttcttcttgtacttcatatgcaagtacagttttgtgg

SEQ ID NO: 683459 - DNA, 1965 bp, Homo sapiens
ggctacattactatccctgcttatttgatgaatatcaataaatatggatgaaacacctgaaggagcacatgaatgcctagttagcaaatttgccaaatattcagacaatgggtatactacatgattatgtttgtggaaaataaaaaagaaagacacataaataggctagtgagaatgaagattcagtgacagcatcacacaatattcataaagtatctttcatctgagtagttgaaagcattttaaaagtgtccttatgacacccttctggtgctagtaggtggtaaagaaatatcaactccatttaaattaaaaaggatgctgaaatgggagttgaaaagttaagtgaactgctcattgtcttggtttcacatatgaggctgtgtctatctgtggcaaatgtattgtgtcatttgccccaaacaatctttttccagctctgtataaattatctacctggcaaaaagaagactgaarctgggagcaaaaatacacttctgtgggtgtaattgtattcgtggccaaatagaatttggacttcttccattagcaggaatgcctggtggtagtactaactttaaaatcctgagttgtcaacaaacagaaggagcccagttgagcaagatcagagaagaaaaaatggagagatgggataaatatgcaggcactttcaaggatttaacctaagactctccaaagagagatggatttgtgggaagagcctttccttgtggctgggctcatttctttcccttttcttcctcaactattattcttgcccccttttgccccttggcttctccagaagtaccagaagtgagtactgggaacagccagaatccagagtaagtttcttcccagccaaagctagcagtactgacggtgttccttcttcctgtggaggacattgagcatttctctgaaacaccttgcagcctcatacttctcttcatctcgtatcttgctcacaactgccccaccctcgctaatccttgaccttgcacaagtaataagccaggcatattcctgcctcagggtctttctacttgctgtttcctctactggaagtgttctttttactgaaagaatattttcatagtatgtcttcccttgcctctcaatatagatttagagtgaccaaagatcctattttgcctgggactgaggatttctaggacgtgagacttttctgggcaaatgaggagccctggtcaccctgtctaaacaacagctccttctacctggcttgcccccctttacttttcctctcagcattgatcacgatctaatatactttacattttacctacctatctttttcagtatctgtccctgtgccacctcctgcaatgttatctccatgagggtgggcgattctaaaaattgtttaaatttgttttattcgctcttgtgtccccagtgtccagcatggctcagggcaggaaatcaataacagatttttaaaacataaataaataaataaataagaactttagaaaacattaattatatatgaagaaaccatgttgtggggtagtatttcctgaagtaggttattgaatccataaagtcttagtcaagtgtaatttgactctaaatataaatgcattatttcctaatgatgatgagtttctcaggaaatttaaacaatgtttttgttggtattttaaaatctaagagttatttattttaaaaataaatgtttgtaaaaataaactactagaatagaatgtagtattatactttgatatcaagttggtggataacttgcgtgggtttgggtcaactgattttaatctactggcatatacttgtaaatgtaaatttaatagttttaatccatgtaaatctcttatttgcccccaagaaaatgtaggcatatgtttaatcaacaaacataacacattttctattaatattcagttattattgactgaatgaatagctggatgacttcagaaggca

SEQ ID NO: 683460 - DNA, 594 bp, Homo sapiens
taaatagaaattaattccaaaaaggaaggaataatttttgaataatcaaatttgttgattcaaaggattctcatgaactgtattttaaatagaaatagttatttttatttattttatggctgtagatgttgtaactgcaggtttttccttgcaggagtgagtccgtgctgctgcacatgccccagcctctgaatctagagctcagggcagggcccatcactggactgagggacaggctcatgcaattctgaggtaagtctccacccataggtagcaatccsactatctaaatattattattgttaggaccacataggtaatatttcaccctttatcaaatattttacttttttatagacgtaagtggacaacataatcatgcaacccttctgtatctgtgtctgtacagtcagatttatagcattaagtttgaaagatagtgaaaaacaaatacattttggcctcatatgtactgagtaatgtaatgggaaaaaggagtagtgtagcaaatttaaaaaaggagcaaattgaacaatgctcagaatgaaggtgagttatttaatgttaaatacaaaattttacgtttccttagtg

SEQ ID NO: 683461 - DNA, 669 bp, Homo sapiens
catatccatatccttgtcatcaacgctattatcagcaggggaagctgtgcctcagggctgcctgtgcctatgcctgcctttgtggccaagtaggaggatagccctctgtccgccaggtctagactgagcggaagccctggaagagagggtagtgatgctccagctgtgaggacagaagggcaaggggctttagagaacagggcagtggcagtgggaataaaaaggagctgaattgtggtcacctgctcctggaagaattcctaaatcactttgggtgctcccagagccccttgcacttaccttcaggaggcagagatcctgctgtggtgtgagagcctgtgcctccgtcagcctgagggctccttgaggctaaagcctgggccatgatctacctgtgtacttccagggtcaaactcggtacccggaacgcagtgggtgcatgaatgaacaaacagatgaatgaataaaatgaagaacacatgcccaaatgaatggaagtaggtgggctggctggtccaaggaggagtaaatttgggaatcggaatcgggcgggcagraatacttgtctctcccctggaagatctgcacttaacggcagttgcgcctctttcattggacaccagggggcgccatcactgcagagctggcaccggaaggctgaagggatcg

SEQ ID NO: 683462 - DNA, 669 bp, Homo sapiens
catatccatatccttgtcatcaacgctattatcagcaggggaagctgtgcctcagggctgcctgtgcctatgcctgcctttgtggccaagtaggaggatagccctctgtccgccaggtctagactgagcggaagccctggaagagagggtagtgatgctccagctgtgaggacagaagggcaaggggctttagagaacagggcagtggcagtgggaataaaaaggagctgaattgtggtcacctgctcctggaagaattcctaaatcactttgggtgctcccagagccccttgcacttaccttcaggaggcagagatcctgctgtggtgtgagagcctgtgcctccgtcagcctgagggctccttgaggctaaagcctgggccatgatctacctgtgtacttccagggtcaaactcggtacccggaacgcagtgggtgcatgaatgaacaaacagatgaatgaataaaatgaagaacacatgcccaaatgaatggaagtaggtgggctggctggtccaaggaggagtaaatttgggaatcggaatcgggcgggcagaaatacttgtctctcccctggaagatctgcacttaacggcagttgcgcctctttcattggacaccagggggcgccatcrctgcagagctggcaccggaaggctgaagggatcg

SEQ ID NO: 683463 - DNA, 522 bp, Homo sapiens
tgatgctacatgtccatcatgggttggctgtgagctctgccctgtgtcattctcactcagagaaccagaytgagggaggttccatctccatgctgccttgattgccaagagaagaaatggggaaaaatagcaaacagcatggtggttattaaagcttccatccagaaatgacacatgtcacttttcaaagctcattggccaaagtaaggcatgtggctatgactaatgtcaaaagaggtaaaccaattcaatttatcatgtggctagagagtaaggaactggagatatttctatagcacgaatgactaaccaaaccaaattagtacactaaaaagaagagagagaagaggaagagggggaggaggaagaggacaagaaaggcactgatttgctgagagagtagaactttcctggcctcatgctcttatctactcctgatggcagcgttggagaaattccattcaatgtggcatctgtctctataccagtctcatatacgaagcctcttatatcccacctata

SEQ ID NO: 683464 - DNA, 1644 bp, Homo sapiens
attggagaaatatttgcagtgttcctactgggtgccaggaatatgaagtcaaattgtctcccagaaagcctttgctactggtttactgctcatcaagggtgtgtgtgtgtgtgtgtgtggttctgtccctcctccctccccatccccatccctaggggatgagtgtttaaacttacctgcccaacagatgagccaggatgatggtagttctgtggttgtgacagctccttgcatcacccagctgccaatgtcttgctcatagaaggtctgaggctagaccactgtgggtggccacagagttcctcaaggctcagtggcaccccatccctgtcaggagaaatggctggaacccacaaaggggatccagctgaggtccaaggcaaaaaccttggatctgaggtccaaaccaagttccagagactggggtcctgcttttatcctgctctccttcctcccttttctctctccttctttacctctctccttcctttcttccttcttcattgatcttagaaactgccagatcctgtgctaagtgttcaatgcaccataaagacaatacacatccaatctctgcctttatggaagcagtggaagagacagatattaaatacatacattcacaagtacagcatcacaaattgtaatccaatcacaaagggaaagctttgcactgctatgggagagagcagtggggaatgaaccctcagcttggtcatcagggaagacctctctgaggaattggcacttgtgctgaggcctggaagatgaataggagattgtgaagaaaagggtggggaaagggcattgcaggcagacagtacaacatgtgcaaagaccctgaggctgtggccttgcatgtggctggagtgtcccctgcccagggaggaggaagacaggccgatcaccagggacttgcagttctgaacagcaaatgcagagactggtgggtggcccagctcagggtcaaggccaagatgtgagcagggcaatgttggcatggatgagagtaagccagggacaagtcacaggcaccctgggctacaccggaactcctggtggtggttgctgctccacttgtgagcaaagaggggtctgttgatgggggcgccaggactgcaccagagcctcaaatttgtttttatggctgaaaacatatgtggcctgattcactctttattcctgtgaaaataatataccaataatcagaaattgtatgaaccacagatatacatagctacgtggttgaagctcacaaaagtcatggtgaatgaaagaaggcaaacccacaagggaacgtggtcaacgattccattcacatgaagttcaagarcaggcaaaactaatctgagatgactgaaatcacaggggacccagcagaggcacaaagtgggcgttctggaatgctagtcatttctgtgtttggacacataggtgtgctcagttcgaaaaactgcagtatctagtcacttttctgaatgtctgggctagttcaataaaatgtttactacaagcaaatcccacttcccacatcgcctatgtagagttcttgcctaaaatgtttaataggaattgaatcattgggaaacaacttgacaaatccaaagtaacggaattccccaaaatatcaatattgcaagaaag

SEQ ID NO: 683465 - DNA, 645 bp, Homo sapiens
tctagttctagagattcactagtacaaatacacttacacacaccacattagaacatagtacatttaaagagccrtgattattgtaaatacaggggcattttttaagactttggtttttagtgttttaggcttacaaaattgaccagaacttatagagttccaatataccctttttccccaacacatgcagctcttccccagctatcgacatcccacatcatagttacaatcgatgaacaaatattgaataccattatcactccagatccatagtttaacttatgctactttagatacattaaagttcttgatgttgtacattctatgggttctgacaattgtataatgacatttatctaccattatactataatttacagaatagttttactgccctaaaaatcctctgtactccatctattcatcactttctcctgtaacccttggcaaccactgattttttttatgctttccacagttttatcttttctagaatgatagttggaatcatacagcatgtagatttttttcaaattggcttctttcacttagtaatatgaatgtatgtttccagcatgtcttttcatgacctgatagctcacttctttttagaaccgaataatattccattgtatggatgtacca

SEQ ID NO: 683466 - DNA, 1231 bp, Homo sapiens
gtcacaactgtgtgcagaggtgggggtgatgctactggtatctagtgggttgaggccagagtggtgctaaacattctacaatgtacaagacagcttcctcccctacaacaaagaattatgtggcccaaatgtctgtagttataaagtcgacaaactctagcttagatacacaagatgtgctgggagaagctattgtttaaaaacttctctggggctacagtgatttctgtatgggagacaagaaggaaataartgaacctggcagttgttggaggcataagaaaagaggacaggaaactgagacatgtccctaaagaatctcctgagagcctacttattccacatcagcgttggaagggtctttaagaaattacataaaccaatttccttgtgacgctatttgggaatggagaagcagaaagggaaggctgacttttccaaggttctttagcaagttagctgcagagctgaaactagaactctggcctcatacccctagcccagtgttctgcctactgtatcatgctgatcctaatgaaaacagaaaaggaaacattgctccaaaaactaccattggcctttaaattaattaagagagatgggaagtgagaagccagtaaatttattcaacaacaaatatgtatttagcacctactatataccaagcactggttttggtgctggaaatatagcagtaaatggaaaagaaaaatcccctgctgccacaggactctttctagtgatataggcaagagaggtggcgtggctgccagggaaaggcagcaaagataaacagaagtctaagatacatctggtaccctccagggctcaaagacctcagtgggcaaattccctaagtacctttatacaagatattttaggatgatgtgacatttgacttcaggctctaaaaattccataggtcactaactagttcattactaggcaatgaaagaagagtaataataacatcagccaacacttcctggatacaaatgtatgtgcaggatgctatcttaccatctcactaaatcctcataataatcttttgaagtagacatcattatcccagtttatagatgcaaaaacttgggtttgatgacataaaataattagtccaagttagcggaactcaccctcaggtctgtcagccttcaaggcctattctcttagtgaccaggctagatcgcgcaaagattttctaagcttttggagctaagatcaatcactc

SEQ ID NO: 683467 - DNA, 977 bp, Homo sapiens
tgggaggccgaggtgggcagatcacttgaggccaggagttcgagaccagcctggccaacacagtgaaaccccatctctaccaaaaaatacaaaaattagccaggtgtggtgatgtgcayctgcagtcccagctacctgggaggatgagacaggagaatcacttgaacccaggaggtggaggttgaagtgagccaagatcatgccactgcactccagcctgggtgacagagcaaaaccctatctcaaaaacaagatgaaacaaacaaaaaaaaaaactagtgtagaggtaaaagggaatgaaaatattctgcaaatagcattcaaggaagagacagtgaccaagaaaatgagcatagtcgatgtgaaaacattttctactacagacctgaaataggcccagtaggcagcagagcaaggacccaggtcctagaggaggtaatggtaccttgccattttctaagcagaaaccaagaaactgtaacttgagcctgtgttcacctacaacaggaagcaaatgaatgtttactgaacatccatggcctgccaagcaccgcactctgtgctttatgtagattattccacaatatcagcacaatgactttgcaaggatgatggtggcctctacattttgtagctgaggaaactatggctcagagaagttaagtaacctgttccaggtgacaccaggcaggaaacacaagagccagcagtcacatctggttctgtccaactgctccttctgtgcaccacgatagcctactgccccaaattggctacagattccaccaagttctagaccatcatctcccaaagggtgaactctgctgcacccgactcagacccatacaaccagcagggactcagaacaggtattggttgaatcaaagctgctacatggagaaattatgactcctcttggcaactaacaattcttttgaaggaaaaagacaacccttgataaagcccagggaaactga

SEQ ID NO: 683468 - DNA, 1153 bp, Homo sapiens
tgctcctatgatgcatattgtacctaacaagcagtggattaaggggcttcattaggaagacatggccaattcataggaggcattaacacatctctacttgtctttgtaaggaacattttgataaattgcttaggatgaggggcagagtaaatacttcactgccccccaacctcaaacaaagggtaggcccaaggaacgacagatgacagatgaccagtaatttgccatcaaggggatgggactggcaggtccacctatccatcaagtggctatttcactgcatggtctgtgcctatttggagcagaattgctgaagatgatagagaggagaaagactgagatcaaccaggagcaccatccttttcctctgtttcctcataagtgcatggccttttcacttaataaatgctgttcaaatttgcaaagaagatttgcttgataaaattccaaattactacattttttaggatactcttatgtcttggtctggttctgaccacagaatacattttcctggggctgaatgttaccccgtcatattacctagttctgctagttctaggcttgttcatcctttatgaactgaaggacattcttggagaagaaatgtaggaaaagaaacacaaagaaaacaaatcagaatatttaaaagttgcctcccttaaaagaaatgtagtaagagaagagagggaaagaaataattcaagtatttaggaacgcagttttcatgtgcaggctctttactttcttatcaatggaatcttattgtcctcttgctcactaaaagtcaaratcccgagtctggaaggggggtcttgatagttcaatttttaccttcaatgctgtaagtcagagagactgacttatggtatagagaccatacagagagaccttcaatgctgtaagtctggctagagaaaaattaacggtcttccagccaccattcagcctccaggaatagggtgatatccttcaggagcatgtagctgcttcaccaagaggacatcatgaagagtttgggaggctcttggggctgctttggaacagaagttcaatcattctttgcatttgagctttatttatattccctaatattagccactctcctgtccttggtactttttcattagtgggaatacaatctatgtctggg

SEQ ID NO: 683469 - DNA, 1153 bp, Homo sapiens
tgctcctatgatgcatattgtacctaacaagcagtggattaaggggcttcattaggaagacatggccaattcataggaggcattaacacatctctacttgtctttgtaaggaacattttgataaattgcttaggatgaggggcagagtaaatacttcactgccccccaacctcaaacaaagggtaggcccaaggaacgacagatgacagatgaccagtaatttgccatcaaggggatgggactggcaggtccacctatccatcaagtggctatttcactgcatggtctgtgcctatttggagcagaattgctgaagatgatagagaggagaaagactgagatcaaccaggagcaccatccttttcctctgtttcctcataagtgcatggccttttcacttaataaatgctgttcaaatttgcaaagaagatttgcttgataaaattccaaattactacattttttaggatactcttatgtcttggtctggttctgaccacagaatacattttcctggggctgaatgttaccccgtcatattacctagttctgctagttctaggcttgttcatcctttatgaactgaaggacattcttggagaagaaatgtaggaaaagaaacacaaagaaaacaaatcagaatatttaaaagttgcctcccttaaaagaaatgtagtaagagaagagagggaaagaaataattcaagtatttaggaacgcagttttcatgtgcaggctctttactttcttatcaatggaatcttattgtcctcttgctcactaaaagtcaaaatcccgagtctggaaggggggtcttgatagttcaatttttaccttcaatgctgtaagtcagagagactgacttatggtatagagaccatacagagagaccttcaatgctgtaagtctggctagagaaaaaktaacggtcttccagccaccattcagcctccaggaatagggtgatatccttcaggagcatgtagctgcttcaccaagaggacatcatgaagagtttgggaggctcttggggctgctttggaacagaagttcaatcattctttgcatttgagctttatttatattccctaatattagccactctcctgtccttggtactttttcattagtgggaatacaatctatgtctggg

SEQ ID NO: 683470 - DNA, 3202 bp, Homo sapiens
accctagaccacccaaatgagaatctgtgtagggagtaactttttgtgggggctacaaatcacaaaagcacagattttcataaccaaggagagaagttgcagtccaggctggctttagtattttgtattaaagaccaagaaaccagctgggagacaagttgcagagaatggtgttcaaagttgtgggagagaatgtctgtgtgctgggagaaaaaaaaaatgaaacgtgttgatttagttgatgatcagggaagagtatgagggaaatgataagaaaacataggaaaggacatcaaaaaagatagaaaagggtccttggtaaagtaataaaagtattgtgaagaagctactttgttagagggtggcaaaagagaggcagccagaacttaaagagaggggaaaacgggaggaaagtgtaaaacagcttcaccatgaaagagccaggcatggaatgttaaatgagaagacaggtgaagcagaggaaaaactgaagatgagccttgcctggcccaaaaccagtgaagggagtgaaagctcatgtaaaagagtgctgcccagagatcaggttgacctcatgtgctggaggcaaacaggctgccttgagagtaagccagcgagttgacagacttgttaaagaaaaagggacagggacatggatgaagctggaaaccatcgttctcaacaaactaacacaggaagagaaaaccaaacaccacatgttctcactcataagtgggaactgaacaaccagaagacatgggcacagggaggggaacatcacacaccgggacctgtcggcgggtggagggctaggggagggatagcattaggagaaatacctaatgtagatgacgggttgacgagtgcagcaaaccaccatggcacatgtatacctatgtaacaaacctgcatgttctgcacatatatcccagaacttaaagtatagtaaaaaaaattaacatcaaaaaaaaagaaagaaaaagggacagagtaaaatgtctccttaggaaccaagaacctgatgccaaggaaataactaaggaatagcacctattgagtcacttgtgtgaagagatcctaataagaaaagacagatggtctagaagtgccagctgctctgaactcaccaagagaggaaaaaggtgggtgattttaaagcctccttaaagtctaagcccaaggaaggagcagcattctcaaacatctaattttgttgagagataaatgtgtccttggcagttcctcaaggagttcaagctcctcctataagctggtctgtgtgactatggaaaaattgattcattggctctattttctagggaagatgcttagcccacggtagctgaaactgctttttaataaagggcgttcattattcctcctggaattttcttacaaaactggaaatttgtaggtagcttaatgtggtatgaagttatactaaagtgggaatcaatggacatttttagccctgaattgccttctttaaagggaatttcctgagcctttcctttagacactaggacatggaaacagtgtgggcttggattcagtcttgtctcctctggccttggctacctccttttccttccatttgcccttacaggtatttccatccatttgccctgaaaggtacctcctgtcactaacgtgtcagagatcagtggttcttcactagttataactatctgtctcttagcacactactacggacagatctccagggagcagatttcttatcctgatctcaaatagatgaatttcagagcatcctataaatcatagtagatgtgtacgttaacacaagcctgtgcatatgcaccttctgggaaaaggatccacagctttcaagactccaataatagcttttgtggttattgtttcaagtgagtaacaatatctacagttgccctgagagtcattctatattctatttcatgaaaattaatgaggttgagccccctcttacaaaaaaaaaaaaaggaaaagaaactgattgaaagaagttaagaatgggacccattgactctttatgtgtctaagaaaaaggctccaagttactgataaacatggtacaggcttctttatgacttttctatataggccttcctgagctttttctttcagaaaataagttcttgctgacctgatcacaaaacattgtcaaaaacatatttattttctcctgaaacttgagcatgaaatacatagtttgcctctctctattcaggggttctgatactaaaaatagggactgacagacacaactctgaagtataacaggtgaagaagagtaagtcgaacagttaaaatttaaaagcaataattatcacttagaacaatattcttcatcttagtctttcagggccattgttaggtaatgttaagtataactttgtttcctataataaacttttagatttgaaatagaggttcttttcctcacagcattttgtcctcacttttctatgacaggacagagggagctgcgggagcagtgctagaagtgaatggggtagagccacccatgagtgtgttaaggaagctttaaaacagcacaaacaaattcaaacacttagggcaactcaaatgctaggttacctattttgactcctgtctgagtcattactgtggtccagcacaatcagttttcttaagggtctgagatccccaaagtaagccaagtgcaatagccctgttatgggaatacagagaagagactcctatccctaactcaaagaatattctgcattaactaatttatgcagatttaccccaagttcaatttactcataccagtaaccatgtggaaggtattctgggtaggtcctataacatgaggtccagtccatgcttattaccttgatggaaactagatactaaatgtgatcaaacagtatctctgcagagctttccttatcttcttggtgacagatggtatgataaaactatctttgtattcttagaacaaaccatgctcrgtcactatgaatatagtcgtcccccagtatctccaagaaattgggtccagaactccacagggataccaaaatctgaagatgctcaaatccctcatgtaaaatggagtatttgcatgtaacctacacacatcctcccacatacttttaaataatctctacatttataatacctaatacgaggtaagtgttatgtaaccactggatggggtttatctgcatta

SEQ ID NO: 683471 - DNA, 661 bp, Homo sapiens
gctgggacatggacggagctggaagtcattatctttagcaagctaagacggtcaaaaaatcaaatattgcatgwtctcacttataagtggagtaaatgatgagaacacatggacacgcagagggcaacaatagacattggggcctacatgaggttggaggatgggaggagggggagtatcaagaaaaataactaatgagtacagggcttaatacatgggtgataaatatttacgtaacaaacctgcacacgtacccctgaactaaaaataaaggttaaaaaaatagaatggaatcctgactttgaaaagattatagtctaaaaaagaggaaaaaaattaaataatagcaatttaaaattctaatagcaagtctttaaaaagacaaaacatatctattttttcttaaacctttatcaagacttcacatcccccgcattatttagattggcaatttgataagttttgacatatatgtatgaatccatgaaactatctccataaacaacacactcatattcccaaaagtttccacctgttgttgtgtaagcctttcctcccacccttttaaaccccatctatcccacagacaaccaatgatctgatttctgatgctacagattactttctgttttccaaaatgttatataaatgcaattatgaa

SEQ ID NO: 683472 - DNA, 661 bp, Homo sapiens
gctgggacatggacggagctggaagtcattatctttagcaagctaagacggtcaaaaaatcaaatattgcatgttctcacttataagtggagtaaatgatgagaacacatggacacgcagagggcaacaatagacattggggcctacatgaggttggaggatgggaggagggggagtatcaagaaaaataactaatgagtacagggcttaatacatgggtgataaatatttacgtaacaaacctgcacacgtacccctgaactaaaaataaaggttaaaaaaatagaatggaatcctgactttgaaaagattatagtctaaaaaagaggaaaaaaattaaataatagcaatttaaaattctaatagcaagtctttaaaaagacaaaacatatctattttttcttaaacctttatcaagacttcacatcccccgcattatttagattggcaatttgataagttttgacatatatgtatgaatccatgaaactatctccataaacaacacactcatattcccaaaagtttccacctgttgttgtgtaagcctttcctcccacccttttaaaccccatctatcccacagacaaccaatgatctgatttctgatgctacagattactttctgttttccaaaatgttayataaatgcaattatgaa

SEQ ID NO: 683473 - DNA, 666 bp, Homo sapiens
tggccaaatctggacaatttgagcwttcaaaagaataacaacaataagctacaacataatatataaaaaatccatgaagaatgatattttaaaagagggggagttgttctttaatgaaataatgctagctaataaatgtagaaggaatgacagaattttaaaaagtgtcactttgcaaccaccaatgtaataaaaatagattcagacaaagattatcattgatgaacagttgggtgaaaagacatttgagaacaggatcttcactgatctcaaagtaccaccccacagattttttattaattaccaaagggaaaagttattttttatttttttatgagacaaggtctcactctgtcacctaggctgaagtacagtgacaaaatcatagctaactgcagcctcgaccccctgggctcaagtgaccctccaaattcagcccccgaggtagatgggactataggcttgcaccaccaccccagctaattttagttttttgtttttgttatttttagtagagacaggctttcaccttgttgttcaggctggtctaaaactggactcaagtgatttgcccatctcggccttccaaagtgctgggattacaagtgtgagccaccacacccagcaaaataaccacagtggagagatctggaagatcaccttaaa

SEQ ID NO: 683474 - DNA, 666 bp, Homo sapiens
tggccaaatctggacaatttgagcattcaaaagaataacaacaataagctacaacataatatataaaaaatccatgaagaatgatattttaaaagagggggagttgttctttaatgaaataatgctagctaataaatgtagaaggaatgacagaattttaaaaagtgtcactttgcaaccaccaatgtaataaaaatagattcagacaaagattatcattgatgaacagttgggtgaaaagacatttgagaacaggatcttcactgatctcaaagtaccaccccacagattttttattaattaccaaagggaaaagttattttttatttttttatgagacaaggtctcactctgtcacctaggctgaagtacagtgacaaaatcatagctaactgcagcctcgaccccctgggctcaagtgaccctccaaattcagcccccsaggtagatgggactataggcttgcaccaccaccccagctaattttagttttttgtttttgttatttttagtagagacaggctttcaccttgttgttcaggctggtctaaaactggactcaagtgatttgcccatctcggccttccaaagtgctgggattacaagtgtgagccaccacacccagcaaaataaccacagtggagagatctggaagatcaccttaaa

SEQ ID NO: 683475 - DNA, 666 bp, Homo sapiens
tggccaaatctggacaatttgagcattcaaaagaataacaacaataagctacaacataatatataaaaaatccatgaagaatgatattttaaaagagggggagttgttctttaatgaaataatgctagctaataaatgtagaaggaatgacagaattttaaaaagtgtcactttgcaaccaccaatgtaataaaaatagattcagacaaagattatcattgatgaacagttgggtgaaaagacatttgagaacaggatcttcactgatctcaaagtaccaccccacagattttttattaattaccaaagggaaaagttattttttatttttttatgagacaaggtctcactctgtcacctaggctgaagtacagtgacaaaatcatagctaactgcagcctcgaccccctgggctcaagtgaccctccaaattcagcccccgaggtagatgggactataggcttgcaccaccaccccagctaattttagttttttgtttttgttatttttagtagagacaggstttcaccttgttgttcaggctggtctaaaactggactcaagtgatttgcccatctcggccttccaaagtgctgggattacaagtgtgagccaccacacccagcaaaataaccacagtggagagatctggaagatcaccttaaa

SEQ ID NO: 683476 - DNA, 629 bp, Homo sapiens
gtgcgatctcggctcacagcaacctccgcctcctgggttctagcgattctcctgcctcagcctcccaagtagctgggattataggcatgcagcaccatgcctggctagttttgtatttttagtaaagacagagtttgtccatcttggtcatgctggtctcaaactcccgacctcagatgatccgcccacagctgcctccgacattgttggaattacaggcatgatccaccgtgcctggccaaacaaaggcatttctatgctaggtcgttcttgttcctttatctgagtgagctggaggtttctacaagtttttatccaaatgggccagaggtttttctatctgtgcagccacgggcatgtccccaagcacaacaacatatgctagttcccttgttagtgtctgcagcttgattttttccaggcttctttatatgttatgcagggatgaggcactgaccagggactttccagggactcttctcttgctatctacctaaggcaagctaactaacttctttcataagtaatgagtattcacttttacttttgtaagacacaaattatctaaaacctactgcaaamcaatagaactatactaaccacttctaaaccatatacttaaaatgtca

SEQ ID NO: 683477 - DNA, 600 bp, Homo sapiens
aggcttctgcattggccagtccccactgctttctggtgagatgtccgagttgaagtgaatgttgaaggccacacagctgatggagctcactgccttgcacatgttgtaaatcacctcctggcttcaagggtcagctgtggagacacagcttgatgggaggtaggcccactccaccatcagtggtgctgggttgccctgatctgcaccttccagatacttgctaagatatctgcatgcttctctaagggactgggtcacgagacacccctggcaaggaccagctggcagaacaggctggacactctccctcagcctccccagcagccccacctgtgctgtcatctgtgctgatgatctccgtggtaagattatgggaaacttttacagcaagttttcctttctcacttccctatcttaataacagcactgataacttttaagccctagcaagctgaaactgcaagacacatgatcttctgccttagaagggccatgtttgggcagtgggtgcccaggtgagagccccatggttgttagtggcagcygggagctggatgggcctgccccatagcctagtgaaaagtgggaccctctccttcc

SEQ ID NO: 683478 - DNA, 3266 bp, Homo sapiens
attgtcatcttttcacatgaacacagcccaatgttaaggttccgaatctcacacctgttgatctacctgctgatggaatagtctgtcaagagaaagcagagatgcacgagcatcaatctggaaaacagcaataatggtagtgtgcaccaggattcagatatcttcctagtattgttttctccaaacctctttattcgtaattcaccatttgtttcattgccattcgggcaactaggtagtaagaccattttctgctaagcaagagtaggtatacaagtaacaaatccctctggcctcctcctgaatagttcagagaacagattctagttcagccagctggctgctaacacccctcccttcctcagaaatgcttatgtttttaacaggattataagccacggcctcccagcatcgggtcccatcaatatatttggtggaatcatcagcaaaccaagcatgtctctgatcgtctgggcttggttctttaaaggatttgccccattgggcaggggaggtttccttccttatctgcaggacttgctcagtggtttgctgagctggcaagttttgcacatcctcatttaaaaatgatacctgttttggttccggcttagcctggtcttgtatgtgccatttccatttactttcttgagtgtaccctatccaatgaggtttgagggagttcatgacccaagtcatattaggaatttggggcctcataaaaacatcatgattaagacaaaggtgttctgtttcctgtaaagcccagtagcaggtcaacagctgcttctcaaagagtataagctttgctagcctctgacagcttctgggtctaaaaccccaaaggtatctcttcccatcttgtttctacctaaggctccaatgagcgtgttgatctaggacagttacttgcagttctactggcccatcctgtaagggccatactgttgctctgcttgtttggctggttgaaaagccacgctcactttctgtcttcagtgaaagtcatagcgttttctagtgactgcatgcagaggttgtaaaatgttacccaaatggggaatatgatgtctccagaatccaaacaaaccaatacaattttggacctccttttcagtggtagggctgcaaattctagtattttagccttagcctttggtaaaatggactgtttccctgcattccataggatgccaaggaactttacagtttgtggaggtccttgaattttactagggttaacttcccatccttgagataggatttgggtttttaccggatccaagccccagctgactagttcttcagttttaccctgactgggccactcaggcagctgcttttttcagcaataggctgataactttgaggctgatcagtcaagacataggcctggccatgggccagggccagcctggaagtcagattagcattttcttttctggcttacatttctgttgtagcagctgattcctatcttgacacattaacttataagcagtaagcaagcaccatccatgccgggaaattctctcagcatcccatttaccaactgggattccctgcacctcctcacacacagccaatgattcaaaatgcactaacttagattgcctattttcacaaacgtcagctcccttggaccactgaatggccaaggggaagaactaagggagttcccatctgaagatatggaaagtccccgagctcccagtctggtccctgcaccaaaaaatggcatgcttttgctttcggatcctgttcgtgaagccaaaaatgttctgcgcaggaaatgctcaaggagagaaggaaacacacacacacacacacacacacacacacacacacacacacaatacctttaagggtaaacaaactgtatcccacgtaaatggcaatgcagatataataagcaaatgatataataagcaagttgcaatgggacggagagaagggaaaagagatatatatatttacactcatcagactatggaggattcaccaccagactgcgaagcaacagactgggctccagagttggccacttgtccgtgaacagatgagaagagatctcatgaagttttggcacagtctggaactctagctctttttgtaatgagttatctggcatgacgtccagtcaggagggcccttcatttctgggctcaaggaaaagaaaaaggtcaacttgtttttttgattgtctgttgtttttcagtaactaacatataggaataaattgaaatagagatttatccgaaacagcgctggatgaaagcctcaaggggctcacacaacctgttccaggacttggtgaccattgtttgagtccagattcaattgagttcaaatttaatatttaaattttactccacaaagtgtcaaaagtaattccttcaaatgcaggaaattatgtaactactcacaaactaaacttctcaaccaaaagtcataaattgagtataggaattaaaaaaaaaaagaaagaaaatctaactacatctgtctaaagggactcaatttatttatttatttattttagagacttggtattgctttgtttcccaggctggtctcaaactcctggtttcacgtgatcctcccacctcaatctcctaaaatgctaggatgacagatatgagccatcttactctatagtaacaaaaacagactaaatgtggcaagatgcatccaaaaaattatgcaaatcataaccaaatgaggacagactatgtcacaattatagtatgcaaaatgctttttaaataactgtcttagtttataaaatatattatgaaatcaaattgtcagaaaaacaaaggacaaaataataaaagggtttattcactggaaacctatgacaattatacacatttacataattgtgtgtatatatctaattatgtattcacaccaatatgtatgcaccttacatgagtatttttaaatatctcaataatatcttgacagaacataagcaaaaacggcaatatattaaaagtataatattttaatacaccagttctgtaattaataaaaaagccagatagaatattaaaaagtaaacagaygacatgaaaatactgtaaagcaattagatataacagatgcatacagaacactctacacaaaaacaaaactcacaatcttctcaaaagctcatgaaacattctcctaaaaataactatgaagccaaaaaacaattctgaacagaatttttgaaaaattgaatgttacaaaaaattcaaaaaatcaatgaatatagg

SEQ ID NO: 683479 - DNA, 877 bp, Homo sapiens
tggcaaagatatgactaggagttccacatacagaaccgaagggccaacaagtagatgaacatatccacattcttatgcatcagaacaatgcatatgaaaactacaattgaataccactatgcaatcattaacatttttgaaaactgacaaaattaagtactagtgatgatgtcaagcaactggaactttcttataccattctgtgtgcaaactgttataaccacattcaaaaccacttgagtagtaactccttacatacacgatgtacataagcacactctagaacccagcaactctgctactaggtatatacacccaatagaattgccagcatattttccaatgtagtaaagtgctcgaagtagcattatttggtacttttccaaactgaaaaaaactcaaatgtgcatcaataataaaataaataactaaaacagctacatattcctttataaggggacattatacagatataaaattaattggagacatattaaaatatacaaaaatctaacaaatacaatttaattagatttaaaagtcctatccagagcaatcggccaataraaaagaaaaaggcatacaaatagaaaaagaaattgaattctctttctccatttgcaatatgagtcactacgtagagaatgctaaagcctctccaaaactacttttggggaaaacttgaaaagcctcctgaaacggataagcaagtaaagttttaggacacaaaaccaatgtacaaaaatcagtagcatttctatgcatcaacaactttgaattcctgaacatcttctggttttattgcattttcaattttttccctccattaactatacattttttcttttttcagctaaactaatttattcttctgtat

SEQ ID NO: 683480 - DNA, 877 bp, Homo sapiens
tggcaaagatatgactaggagttccacatacagaaccgaagggccaacaagtagatgaacatatccacattcttatgcatcagaacaatgcatatgaaaactacaattgaataccactatgcaatcattaacatttttgaaaactgacaaaattaagtactagtgatgatgtcaagcaactggaactttcttataccattctgtgtgcaaactgttataaccacattcaaaaccacttgagtagtaactccttacatacacgatgtacataagcacactctagaacccagcaactctgctactaggtatatacacccaatagaattgccagcatattttccaatgtagtaaagtgctcgaagtagcattatttggtacttttccaaactgaaaaaaactcaaatgtgcatcaataataaaataaataactaaaacagctacatattcctttataaggggacattatacagatataaaattaattggagacatattaaaatatacaaaaatctaacaaatacaatttaattagatttaaaagtcctatccagagcaatcggccaatagaaaagaaaaaggcatacaaatagaaaaagaaattgaattctctttctccatttgcaatatgagtcactacgtagagaatgctaaagcctctccaaaactacttttggggaaaacttgaaaagcctcctgaaacggataagcaagtaaagttttaggacacaaaaccaatgtacaaaaatcagyagcatttctatgcatcaacaactttgaattcctgaacatcttctggttttattgcattttcaattttttccctccattaactatacattttttcttttttcagctaaactaatttattcttctgtat

SEQ ID NO: 683481 - DNA, 1450 bp, Homo sapiens
taatagggtagtcattagacatgtgtgacttttaaaatataaagtaattgaaagtaatctcaattaaagtttcagtttctcagttgcatgaactatatttcaaagctcagtatacacttgtggctagtggctgccatactggagtagatgaagagcatttccatcattgtagaaatttctgtggacagtgcttctgcatatgatgtaaagagagtgatggattttaaaaggragatgatggataattttttttttataatgtggagaatgggtttggggtggataaaagcaggagcaggaaaaacactgaggaggttaatgtcacactcaaggcaagagatgatgaagaccagcattacagcatggactgtcactatgccggaagaaatcaagaccatcttgcagctcgtgagacagcaagagaccaaacaccatagtcatcgatgcagttttccaattggaatgtgacaggagtccaggaagacattaatctcatcttttgtcatcagtaccctttggcttgaagccccaatccccaagcttcttggttggttctaggcatgtggacaaactcccaagcacctagagctccctgcagtctccctgcccctgcttgcctcgctttgtcatgccattgggtcttaaccagatgagtatctcacttggcccattttccacccaggatgaatggagtttgggagaggaagattatatggccagcctaggtgtctgctttgctctgagtgtctgggttccatggttataacatggcagtggatacctctgaaaggcaggggcagactggatgataagatgcagttccttgtctcctcccttcctgctaaatgtaaacaaatcacttctattaagagttgacaggaggaagggctataccctgcaggagaagttgccgaggacactgtaataaagaatgtggattgtttctcctagagataaaaagatgctctcagagacagtcatggtgctgtgggcagtttattcatactccagaatatagggcctccatatgtacttgagtcatgtcactctggcttaacttgtatgccataaacagttcttattgccatggcctctcttaaccccttccttgtcgaacccctagagaaagaaagaaggaaatcctctggtggtgaagcactaattttctgaaatccactcatccttcagggcctaattcaagcactacctgccctgtgagatcttcagatcctcagtcctgctcagatggatatttcacacaaacctctgtttgccacataccaaccgtagttggatgattatgttcctgcctgtctctctacataataagcatttgggagcagggtttggcctaagttagttttgcatcaaaaggacttgcacagaattccattctgtaaaggttcactaaattgtataaatgatgatgcatagtatccattacatctaa

SEQ ID NO: 683482 - DNA, 629 bp, Homo sapiens
tcccattccacacccccttatggattcctttcaagccagattccagcccacttgatactctttgaaactattccagctctttttctcttttaacatttattgtctgaattatttatctgcctgcatagcacccacggtcgttaataataagttacttttttatatattaacatatactcccatggctctccaaccacacgacagttttccagttccattctgccccaggccctttgtgcctttttccctgtgccccaaatgcagtccccaccttcacttcctgctacccaacccttgccctaaccatccctcactaaacaactattccccactcttcttctgggtctcagcccaataattatttttttcagaaagccaggtttctctgatcaatatatgtcaatttcacaagttatctatttcactgcaccaatatctgctcttttatatttatttgggtaatttaytgatgaggtatagctgctctaaaaaagttgtgagcttaagaaggcaagatactatatttgtttttgctcaccattgttactgctttaacatccagtaaagcacctggcacgtagctgttccaggggcccagtagctatttgttgctaaatatatacgtgaat

SEQ ID NO: 683483 - DNA, 607 bp, Homo sapiens
tttatttttttccacagtgaaggggaaggaagggaaggagagagagagaaagagtacaagactaccttataggttgttatgaggatacaatgagaaggtgtctgcaaaatggctagctaagagaatgcattttatacatatgtaaaattttattattaaatttaaagccagaatttagcccttacaggtagtgaatttatcttttatttattttttatttctataggttttgagagaacaggtggtgttcgattatatggataagttctttagtggtgatttctgagattttagtacacctatcacccgagcagtgtaaactgtacccaatgtgtagtcttttatccctcaccccctcccaccctttgccccaagtccccaaagtccattgtatcattctcatgcctttgcatcctcatagctgagttcccgtttataagtgagaacrtacgaaagtttgtttttccctccctgagttactttatttagaataatattactcaactccatccgggttgccgcaaatgccattatttcattcctttttatggctgagtagtatttcatggtatatatctcacattttctttatccactcattgattga

SEQ ID NO: 683484 - DNA, 613 bp, Homo sapiens
gcaatggtgcaatctcagctcattgcaacctcccttgaacctcccaggttcaagcgattctcctgcctcagcctcccaagtagctggaattacaggcctacaccaccacacccagctaattttttgtatttagtagagatggggctttaccatgttagtcaggctggtctcaaactcctgacctcaggtgatccacctgcctcggcctcccaaagcgctgggattacagctgtgcgccaccatgccyggcttctgcctccctcttctaaggacacctgtgatttcacttaccgctcaccaggataatctctctatctccaaatccttcacttaatcacacctgtgaagtctcttttgccacctaaggtgacatttacagattccaggaattagaacctggctgtctttgaggaccattattaggtctataacaacaacattaaaaatatgtatcaaccaatacagcatgacacagatccctcagcatggtcctctgctttcctgcctcatgagatgggcagagaccacttagggagctcacattagcagcatttactaaccaggtttcaactatttcaatattttaacaaccaggcataccacctaaatatga

SEQ ID NO: 683485 - DNA, 730 bp, Homo sapiens
ggagccaatatttgaagaaataatgcctgaaatatcccttaaacatacaagtcctcagattcaaatgatttatcaggggaatatctaaagaatggattaaaagaaagaaattccccccacatcccagaagaaacattacagggaaatataagaatcctgagagcaaagaaaattctaaaagcattgagagacaaaaaatagattatctataaaaaccaaccaaaacaacatcagacttttcaatagcaacaatatttacatatttttgaagaaaaatatttcaaactagaattttattcatcactgccttaatgcaaggggaaaattttaaaatgatatttttagacatataaataagcccttacacttgtatcaaagatcaattgacaattatttaaagatcaacaactttgaaagaactattagagaaaatagcccataaagagaaaaatgaatcaaagaggatgctaaaagtatttggggggtaagtgtcagtatattacttagaaaagtttattattgtaaaaaaaaaawtttttttttttttttttaccatttttaactgtaaaaccccagaactaaaactctggatgaagtcagccaatgaatgctgttgggcgctcaaaggggagcgagagcaagcaaaaacacttgccttagctcaaaagtgataggaaaagataaaaatatgcactgatcttaaaaaagtaggagaaaataccataaagta

SEQ ID NO: 683486 - DNA, 957 bp, Homo sapiens
tgacatccttgtgcttttctcctaatgacatttccaacttttaatggtttgtatttcttcctctgcagacataggataattaatatagatatgtcatttttgagtttatattttatataaacttattattttactttaaaatagtttctagccatggcattaatatttattaaaatttctgtacatatacaaaaaggaatttatttctatacatatgaaagaaaggaatagggagtgtctataaatgaatgattttatagacactccctatttgcttttttttaaagaagacatgtttactgagaaagccctagcaagcacagaaaatcttccaatgtggactaatttggattattttctacttttgaagaaactacactgctattagatttttgacaaataaagctataaaatctagtagaacttcaaataagatcttccataagtagaatagtaacctcttatgcatgtgtttcaagtttctatgaaatggaagacaaatacatgcattaagttactactacatgtgagacaaaaacagcaactagtgtcctattatgctggtttccattatgggtaagataatgcttaactaattctatataatctataagaagtattgtctattctgcagttccaaaaattttaaagcacaatgaagtacagcagagatgaccttttctatatgctaaatttttaaaaatgggaacatatactggtttcaagatactaatcttatgctaattttgygagcaaagtgaaataaggtagaatagataatatgtcaggtaggtgaataatttctgattgaacaatgaggttcagagcatatcacatagtcatgagatagacaataagctaaggtaaaatctcttgtagtatcataatactcacaaaagttaatatttttgtcattttttctcagtatttgaattaagataattatttcacctatca

SEQ ID NO: 683487 - DNA, 1182 bp, Homo sapiens
gaaagggatagtggctcattagtctttggtctatggaaatgcaactccagtccctttcaaggtgtctctgttgtccttctcatgaccatgtcatggatggaaatcaccctcagcatagacatgaaactgctcctccagatcactcatggtggccagagattccctttcaggggcactgcagctgagaaaaatggagcatgatcaacgtggggttgagttgagggctatctatggtcaatgtgtgcatgcacaggaatggagctaggggctggtcttattttcacacttttgatcataatcacccaatgaactaggtatgattatttctactttacagaagctgaaggaaactgagttttaggtagagcaactggtcaaggcctcctgtgattaccttgattaacctagctaacccattccctattttagactctcagaatcaacctttccattcttctctctgacattcatagtcttccttgtgctctcaataatatgtcccttgcacattttattctagattggactacaaatcaaaattgtcaataatttgacagaactggagaaacagtgccttgttgagctagtatgggatctaaatgcttagccctgattacaaagctgactctgtttcttatatagtctcaatactgtttctcattggtcctgcagtgtcatgtagtggaggaaactattagagacacctggggttcaaaaccagctyggcagtttattaattgtacagccattcatgattcatttttcctctctgagctcagtttcctcctccataaaatggggttagccatccatcctgggattattaggaggattaaatttaaagtgcacagaatagtccctggcccataataagcattcagcaatataatgagcatttaacaaaaagcttcagtgggcagcaagtaatttgtagtaaattgcagagcaaggatttgaaacccagctcttaagcattaaaatattgcctctgccacaaatggtagcttcagctattaatagatgctcaaccttcataagaagagaatacagtcttataggctataaactggttggcatgcacactgctgctttctaagagcatttgtagctgatgctccacaaaccactatcctggcagccacacatcttcagaagaacagagaccattatagcatcactgaa

SEQ ID NO: 683488 - DNA, 1033 bp, Homo sapiens
aaagccaaagagtgtaactgactttcccaaggtcatccacatgtgatgtgattaagccaacattttaattcaagaatgggaggtgtgaaagttaattgtacatttaaggagcaacaaatggttctgaaaggctgaaataaagaggggcaaggtgtaaaactggagacaagttgaggagtcagactttcctctgttgattaatagttctcaaattttagttattctcttactgtcttcgtgagctttcctatatctaagaacaacttatgctattatagtattttgaaaatgaattctaggttgactcactaattttactgaccatctaagtaataatatccatggtttgatacatatatattattattaaaatgcaaaaatataatgatatatttgtcttattaatgcataggatattcttaatttataacagttaatattatactaatattaatcatattatarttgtaatatgattatactaatatgattattataaaagaaaaaagagtgtaaaaaagaaaagtgtgaagttaactttaatagtatatcttatttaattcaacaaacactaaatattatcatttaacaggtaatcagtatttttaaattataatatattatactaatatgataatatgtaagctataatataaactataacatataagatagtatgttataacttaactatcttacatgttatagttttactttaatatgtatttaaatttttactaacacatagtaaaataagcataagtttgtataagtagtaaaatcattccccactatgcccctaaaatcatttcatgtatcaatagcaatatcataccttccattgggaaactgctagggacattagcaaaccattaaaggatcttaaactttcacaggttagaatttaattagattttaaacctaatcgggttgctattttagacttatagaagccaatctccacgtttgagggtaaatggaaagaagatgagatattagcgctagtcaattataagttaggaaagttctatga

SEQ ID NO: 683489 - DNA, 1065 bp, Homo sapiens
tcagtggtgcgatttcccctcattgcaacttctgcctcccgggttcaagcgaatctcctgcctcagcctcctgagtagctgggattacagacgcgtgccaccacacccagctcatttttgtatttttagtagagacggggttttaccatgttggccgggctggtcttgaactcctgaccttgtggtctgcctgcctcggcctcccaaagtgttgggattacaggcatgagccactgcgcccggcccgagtttaaatattgagatgacaattacttcctagcccctctctgcgcctgccctgtctccctacccttcctctccctaactgacttagagactggggctctgccacaggggagggtggggaaccctggggtcctagagtggtggcatgtgggcagtggcaggtgcttcctcccctcctcactagagaggtgcccagcagggccagggtcggggctggggctgtgctgggaagctttgggccattgacacatgggagctacagcagaaaatggatcagctcagaacatctgggggctctctgcatctagggcgggactcctcctcctttatttttaaatttttaatttttaaaaaagagatgggggtctcactctgtcacccaggctggagtgtagtggtgcgattgtagctcaccgtagccttgacctcttgggctcaaaggatcctctcrcctcagcctcctgagtagctgggactacagacccatgccaccaagcttggctattttttttttttttggatagatacagggtttcgctatgttgcccaggctggccttgaactcctgggcttgagcgatcctcctgccttcagcctcctgagtagctggaatcgattacaggtgtgagccaccgcgcctggcttccctactttcattcagttgtgacaccctcccatcctcgtcctgggcgcacttaacaaatgtctgtgctgcaggcaacagtgatggcgggaaatgagaggggaaagatcttagatgagtggggagaagttatttcctggctggggaatatccttttttaagttacattttgggcc

SEQ ID NO: 683490 - DNA, 971 bp, Homo sapiens
ggatcccttaaatgtccacaacactggggacaacagggtggagtggaagagtagcccagatccaatgttgctttcacagtagcatgtatggggaagaagagcttgtttgccagccgcttcctgaatgctttgctaaatatcatttcatttaattctcacttgtagcattcaaatggggtaggctgtattttctttgccttttttttttttttttttagacgaagtctcgcttttgttgcccaggctggagtgcaatggcatgatcttggctcattgcaacctctgcctcccgggttcaagtgattctcctgcctcagcctcccgagtagctgggattataggtgcataccaccacgcccggctaattttttgtattttaagtagagacggggtttcaccatgttggccaggctggtctcgaactcctgacctcaggtgatccgcccgcctcggcctcscaaagtgttgggattacgggcgtgagccactgcgcccagccccagtgggtaggctgtattttcattacaattttttttttttttttgagatagagtctcactctgtcacccaggctggagtacaatggtgtgatctcggctcactacctcctgggttcaagcgattctcctgtctcagcctcctgagtagctgggattacaggcgcatgccatcacgcccagctaatttttgcattttgagtagtaacggggtttcaccctgttggccaggctggtctccaactcctgacctcagctgatccacctgccttggcctcccaaagtgctgagattatgagcataagccaccacacccaggctatttttagtacaatttaacagctgggaaactgaaactgatgcccagaggcattaacatacaggtaatcatacagaggttgtttcgtttcatcagctggtaaattgcaggctttggactttgggtgagaactctgacctggatgggctgggctg

SEQ ID NO: 683491 - DNA, 1955 bp, Homo sapiens
cggctctccacaaaacacaaaaattaaccccaggcagattaaagcctaaatggggggaaaaaacctgtaaatgttttgaagaaaacatttgagcctctctgaactcagggcagaaaacagtttcctcaaatcctttcctcaaacaacacaaactacggaggaagggagtggtaaaatttgatcaaatcaagtgaagcagcttctgtgcttcaagaaacactattaaaaagtgggaaaaggtgggggtgagccacccgccaggaagcgagattcacggcacctctgtcagatgaaagggctgggtctgcgtccagccaggcaatgaagatgagccgccaatattctaggaagaaaagcgggggtgggagtcaccaaaacaagtcttctgaaaactggccaaggtgtgatgtacgtttgcatcctaggaaattaaagaggtaaaaaaacccatctggaaaaccaagagctgcttgattctatgaacctaagaacagtccgtttctccttcagagacgtattgagagaactcggtatcattatgaaatctctcaggcctccaggaaatgacgctctaaaaatgcaaagctctgaaccaaccaccgagaaacaccctttcccctcccctgggtgatactaagctgctgtggggcgtccccacaattttggggccggaacggagggggaacaggcaccagtttgtcactgccctgagtgcgctgccccaacaccctgcctgctgctgtctgagagaaaatcgtgtcatggatcatcatccctgtgctgcaggtgtgtctgatgtttacagagacctctctcgctccatcatgcgtgcccgatgtctacagagccctctctcactccatcatgcgtgcccgatatctacagagccctctctcactccatcatgcgtgcccgatgtctacagagccctctctcactccatcatgcgtgcccgatatctacagagccctctctcactccatcatgcgtgcccgatgtcgacagagccctctctcactccatcacgtgtgcccgatgtttacagagccctctctgactccatcatgtgtgcctgatgtttacagagccctctctcactccttcatgtgtgcccaatgtttacagagccctctctcactccttcatgtgtggccaatgtttacagagccctccctcactacatcatgtgtggccgatgtttacagagccctctctcattacatcttctgtgcccgatgtttacagagccctctctgactccatcatgtgtgcccgatgtctacagagccctctctcactccatcatgcgtgcccgatgtcgacagagccctctctcactccatcacgtgtgcccgatgtttacagagccctctctgactccatcatgtgtgcccgatgtttacagagccctctctcactccttcatrtgtggccaatgtttacagagccctccctcactacatcatgtgtggccgatgtttacagagccctctctcattacatcttctgtgcccgatgtttacagagccctctctgactctatcacgtgtgcccaatgtttacagagccctctctcactccatcaggtgtgcctgatgtctacaaagccctctctcactccatcatgcgtgcccgatgtctacagagccctctctcactccatcatgcgtgcccgatgtctacagagccctctctcactccatcatgcgtgcccgatgtctacagagccctctctcactccatcatgcgtgcccgatgtctacagagccctctctcactccatcatgtgtgcccaatgtctacagagccctctctcactctgtcatgcatgccggatgtttacagatgtttacagagcgctctctcactccatcatgtgtgcccaatgtctacagagccctctctcactccatcatgcgtgcccgatgtctacagagccctctctcactccatca

SEQ ID NO: 683492 - DNA, 1955 bp, Homo sapiens
cggctctccacaaaacacaaaaattaaccccaggcagattaaagcctaaatggggggaaaaaacctgtaaatgttttgaagaaaacatttgagcctctctgaactcagggcagaaaacagtttcctcaaatcctttcctcaaacaacacaaactacggaggaagggagtggtaaaatttgatcaaatcaagtgaagcagcttctgtgcttcaagaaacactattaaaaagtgggaaaaggtgggggtgagccacccgccaggaagcgagattcacggcacctctgtcagatgaaagggctgggtctgcgtccagccaggcaatgaagatgagccgccaatattctaggaagaaaagcgggggtgggagtcaccaaaacaagtcttctgaaaactggccaaggtgtgatgtacgtttgcatcctaggaaattaaagaggtaaaaaaacccatctggaaaaccaagagctgcttgattctatgaacctaagaacagtccgtttctccttcagagacgtattgagagaactcggtatcattatgaaatctctcaggcctccaggaaatgacgctctaaaaatgcaaagctctgaaccaaccaccgagaaacaccctttcccctcccctgggtgatactaagctgctgtggggcgtccccacaattttggggccggaacggagggggaacaggcaccagtttgtcactgccctgagtgcgctgccccaacaccctgcctgctgctgtctgagagaaaatcgtgtcatggatcatcatccctgtgctgcaggtgtgtctgatgtttacagagacctctctcgctccatcatgcgtgcccgatgtctacagagccctctctcactccatcatgcgtgcccgatatctacagagccctctctcactccatcatgcgtgcccgatgtctacagagccctctctcactccatcatgcgtgcccgatatctacagagccctctctcactccatcatgcgtgcccgatgtcgacagagccctctctcactccatcacgtgtgcccgatgtttacagagccctctctgactccatcatgtgtgcctgatgtttacagagccctctctcactccttcatgtgtgcccaatgtttacagagccctctctcactccttcatgtgtggccaatgtttacagagccctccctcactacatcatgtgtggccgatgtttacagagccctctctcattacatcttctgtgcccgatgtttacagagccctctctgactccatcatgtgtgcccgatgtctacagagccctctctcactccatcatgcgtgcccgatgtcgacagagccctctctcactccatcacgtgtgcccgatgtttacagagccctctctgactccatcatgtgtgcccgatgtttacagagccctctctcactccttcatatgtggccaatgtttacagagccctccctcactacatcatgtgtggccgatgtttacagagccctctctcattacatcttctgtgcccgatgtttacagagccctctctgactctatcacgtgtgcccaatgtttacagagccctctctcactccatcaggtgtgcctgatgtctacaaagccctctctcactccatcatgcgtgcccgatgtctacagagccctctctcactccatcatgcrtgcccgatgtctacagagccctctctcactccatcatgcgtgcccgatgtctacagagccctctctcactccatcatgcgtgcccgatgtctacagagccctctctcactccatcatgtgtgcccaatgtctacagagccctctctcactctgtcatgcatgccggatgtttacagatgtttacagagcgctctctcactccatcatgtgtgcccaatgtctacagagccctctctcactccatcatgcgtgcccgatgtctacagagccctctctcactccatca

SEQ ID NO: 683493 - DNA, 621 bp, Homo sapiens
ccatgtcccagatggtggctgctcccctcaggtccccacatttgctaatgtgtgtgtaaaygcctttcctttggttacatattttctctttatttaggttgtaaaaaatggtactaaaggtaaaatgagatagaactagacacacacattgttccaatatcaatctcctggttttgccataattggcttttataattacccagacgtaaccaccaggggaaaacctcactgggtaagggatacatgagacttctttgttataactttgcaattccctgtgaatctataatggtttcaaaataagaagtcagaaataatataaaaacttttggacaaaggaaaaaactcacttgcaattccactgagaaaaataaagtccaaagccccaactgacggaatgacctactcttgaccaagaggaccccagagaaaccttaaaactgagttgggaccgtgacaggatgaaggtcagacccgcctggttacccgcccccatcattaatcatcaccaggcttccttccctgggttcagacccgcctggttaccgcccccctctcaactaatcaccaccaggcttccttctctgagggctgaacagaaaccagcccttttaaaagact

SEQ ID NO: 683494 - DNA, 621 bp, Homo sapiens
ccatgtcccagatggtggctgctcccctcaggtccccacatttgctaatgtgtgtgtaaacgcctttcctttggttacatattttctctttatttaggttgtaaaaaatggtactaaaggtaaaatgagatagaactagacacacacattgttccaatatcaatctcctggttttgccataattggcttttataattacccagacgtaaccaccaggggaaaacctcactgggtaagggatacatgagacttctttgttataactttgcaattccctgtgaatctataatggtttcaaaataagaagtcagaaataatataaaaacttttggacaaaggaaaaaactcacttgcaattccactgagaaaaataaagtccraagccccaactgacggaatgacctactcttgaccaagaggaccccagagaaaccttaaaactgagttgggaccgtgacaggatgaaggtcagacccgcctggttacccgcccccatcattaatcatcaccaggcttccttccctgggttcagacccgcctggttaccgcccccctctcaactaatcaccaccaggcttccttctctgagggctgaacagaaaccagcccttttaaaagact

SEQ ID NO: 683495 - DNA, 3842 bp, Homo sapiens
atacagaaaaattagctgaacatggtggcagaggcctgtagtcccagctactcgggaggctgaggcaggagaatggcgtgaacctgggaggcagagcttgcagtgagctgagattgcgccactgcactccagcctgggcgacagagcgagactgtgtctcaaacaacaacaacaaaataataggactttagacttaggatgtgattggaacatctacggatttctcaccccactgtagctctgacatttcacctgcccccagcaccacagggcctccggtctcacacaratcattttggctggagagccctttgcaagtggtctgcttgccagctctccacctcacctgttggcatttcccaaatagcatttcttccagccaagagcctcatccatccacctggatccacctgaaacatttaatgtgcctgacaaaggcacggtcctgctgctgggcaccgcagagcaacaacagctgtcaccctgacaagcaggggcagctcctccccacctccccacctccccacctccttactccggctctcttcacctgtgggcaaaggcccccctctgtcccgtcctctcctgggtcacacctgggtgtgcagaaccaggcatctggtgaggcgggcaggaaatctgcatcttgacaagaccccagggagaaggtgcatggccatgtcgagccatcacagctgatatgttcctgctattgatttggccaaagtctgcattcaatgtccaggctcctcttggtaatccccaagcaaccgggtaggagctgtgtacagtagcaaacctctttgcacagacaggaaatgacagggtggaagtcagggggaaatgaagctggtttcgaacacatccgtcacccatctcagttctgcccactgcttgctccctgtgacaagtgctgagcatccccacaccccccgccccccaccccaggtaacaaacatcacacagcaaattcacattattcatggggcggattcccacagccccccaccccccatcccaggtaacacacacatcacacggcaaattcacattattcatggggtggattctcacacccccaccccccatcccaggtaacacatatcatggcaaattcacatttttcatggggtggatgcatgaccataggttcatagacttttaagggacttttgggatccacatattcttggctacagaatcctttcttggaacaaagtctcacccagaagcccagtgagcagcaggcaacagaagcctggaccttgctgagccggagtgtgagggtagcgtgagctgagcagggattcacacccaactgccttggagcccccagggctccttgaataaccatctgaagacctctgacctcatcccacactggacagagagaaggctccctcagcagagatggggggctctttgccacccagacagcccccagtctgagcagctcttcccctcagcttcttctcagattcctcttgttcacgctcctgagcctgcaggggctctgctgagactcagggtcggccacttctcactgacatgctgggcagggcacctctgtgtctatcacgacgcttagaagctagaacgctgggcaggggacctctgtgtctatcacgacgcttagaagctagaacgctgggcaggggacctctgtgtctatcacgatgcttagaagctagaacgctgggcaggggacctctctgctctatcatgatgctaagaagctagaacgcacccctaactctggacacaactgagaaggttggagccatggatctgcctttatccaaattatttttcttccaaacttttgagttttgctttttggtgattatcactttcctttggaaaaaaacatggctttattaatttgaataaaatgcaaatacttttcaagatatcagaaattagattttgaaatacatcaaaatgccacccatctatgaggggtgtgtatctgcactgtaatctgttcatttcctttaaattttgttttgagatatttccatttggcttaaaaggttttaattccactatctgtcatcacttgcattaaacgcaagcgcaggggagagatttagtaaatgctattagatttctgtaatcaaactctgctttatattccagagtcagggattagaagaattttaaatacattaaaaatcagaatcgtcaaattcaggcttaatactgaataaggcaattaaaattagaaaaaaaaatcattagctgttaaataatttatcaacttgtacccctttctcccattttcaccactgcaaatctactccaaatatataaacctcccgaaactacagcagtgaataaaacagacaaacccttccatcacagagctcccattccaggtgaagctggagatgcatccaggaataaggcccattgtttcctctgaaggcagaacccagccgtcacctgcattgctttctgcactcacttggggcaacaggagacacagatgctgggcttgagggccctctgggcacgatgtccgtggggtcaagagctcgagaagaaccatcttttgaaatgtaaaatggccacgtggagaaggataatgctccaggagctggtctccagcatttggtggaacgagaacaaagaaatgtctggagaaggccaggaagacaggcaggtcagggtgaatgagctccttgtggccagatcgtaaccagtgggtgaaataaacactctagcgtttggtaattttctgtcccagggatgacggagcctctgcccctgggaatggcaaggtccatcctctgctcgctcaggggccagagaggacacaggttggatgtggatggaagcagaggtgtggtgctgtgcaggtgagctcctgcctctgccctcagcccccacggtcccccgcagtctagggagaaccttccttcccacatatgagatgggtgggcatcaggagtgggcagaggccaattctttccagagttaaatagtccacttcacagataatctgagcagcaattcagatttccatgcattgaatcaatctacttcctagacagagcttcacaaggagcagtgatgccatttccattaagagataagaaaacctgacgggagaaacaggctgcggcaggaagatcaagagccctgcgtggcccactttaagtgtgaggctcctctacagatctcccaggagagaaaaggaggacacctgtggccatacacacctgttgctcggtgaatgggtcagggctggagacgtaggcttgggatcatcatcgaacagataacataaaaagccagggcccaggtgagttccccacaggagacagcaccggcagaaaggaggagggagccaggccctggagagtccaatctgtagaactcacggaggaggagctggtcgacttgaagggaacagagatggccgtcgcgcccagtgagagcagaaagcaatgcaggggacggctgggttctgccttcagaggaaacaatgggccttattcctcgatacacctccagcttcacctggaatgggagctcgtgatggaagggtttgtctgttttagtcactgctgtagtttcagttcttaaaacctgcctgacgcatataaatacctaggaatgaatgaacgaacagctcactaaactgaggctgagcagggaccctcgcacacgcacatcgaaatcccgcatgacgcatggcatcaactctgaggggcacaaagccgagagcacaggaagaaagtggatctccagactccaaaactgagaggagcaatcaaaaccgggcgtgactgggagctgctgctgaagtggctcctggacgtttggcatctttctgt

SEQ ID NO: 683496 - DNA, 1370 bp, Homo sapiens
aaaagtggcctctcgcgctgtcctccttctgttggggggactggaaacacatttctccattcattgtcagtggtgttacaagccattggtgagcttccttccagagtgaatgccaaatgatacatttatattagatctctctgaccactgctgttgacgttggcggggtagcaggtgtggccrtaacatggagcacaggctgagctgcctgacttgcactgctggacggtgggttggcggtgttgacgctgcacaggtcatgagcgccggccctgcggatccggcgatgatcattgtggaaagaatggacagcaccctggttgatgtgcagagtgaccctgcagtcaagtctgtttgcctcccactagcattttctcatctccagcacggtgtcaatggtgccactccagccgggccaccctgcccacaaggtcttccacggggctcctccccagctcacggggaaatcccctttaatttcaaacagggcccttccacctgcccttgattccctgtggcaccttgggagcatggggctgccctactgtggagttagtgggtccacttcgagaagacagagacagagtgaagcctcaagaacagtgttcactggcagtgggaaccgtcggtcctgccatgggacgatgtgactgggggctcgtccatgccttgtcgtggacatctctggtctcagccggcaggggtgggtgggacctcagacctcagcgggtgatggcagtgggagcctgggcaggggcgggcagggctctgtggtaagacacagagggcaggggctggggtgggcagggctccatgggaagacacaggtagcgggtcaggtgctggggaggtgttgctgggcatggtggatttgcaaatttccagggcggtggggggtctggcaagtgtagacacagggcagaagtgggcgcagtgtctgtgggtgaagagctgtgcgggcgggcactgagaagaggtgcccacgtccatccccagcccctcaggcatgttcaccatcatggcgcacatgtctgggagtgagcagaggaccagggtatggaacaagccctagtcagaaatgcctcctgacgcctgtgacctctgggcagggctagtgaggggctggggagagcagagggtgtttctggataagaactcacactaaaggcctggcccggaccctgcctccatcagcagggtgcagcccaggcccagcacattctcctcctcctgggacctcgatcttggcttcccctaggcctttctggggccccccagttcctgccaacactgctgtccacgctggggccctccagttcctgccaacactgctgtccactctcttgtccaccccatgattccaaccactg

SEQ ID NO: 683497 - DNA, 1370 bp, Homo sapiens
aaaagtggcctctcgcgctgtcctccttctgttggggggactggaaacacatttctccattcattgtcagtggtgttacaagccattggtgagcttccttccagagtgaatgccaaatgatacatttatattagatctctctgaccactgctgttgacgttggcggggtagcaggtgtggccataacatggagcacaggctgagctgcctgacttgcactgctggacggygggttggcggtgttgacgctgcacaggtcatgagcgccggccctgcggatccggcgatgatcattgtggaaagaatggacagcaccctggttgatgtgcagagtgaccctgcagtcaagtctgtttgcctcccactagcattttctcatctccagcacggtgtcaatggtgccactccagccgggccaccctgcccacaaggtcttccacggggctcctccccagctcacggggaaatcccctttaatttcaaacagggcccttccacctgcccttgattccctgtggcaccttgggagcatggggctgccctactgtggagttagtgggtccacttcgagaagacagagacagagtgaagcctcaagaacagtgttcactggcagtgggaaccgtcggtcctgccatgggacgatgtgactgggggctcgtccatgccttgtcgtggacatctctggtctcagccggcaggggtgggtgggacctcagacctcagcgggtgatggcagtgggagcctgggcaggggcgggcagggctctgtggtaagacacagagggcaggggctggggtgggcagggctccatgggaagacacaggtagcgggtcaggtgctggggaggtgttgctgggcatggtggatttgcaaatttccagggcggtggggggtctggcaagtgtagacacagggcagaagtgggcgcagtgtctgtgggtgaagagctgtgcgggcgggcactgagaagaggtgcccacgtccatccccagcccctcaggcatgttcaccatcatggcgcacatgtctgggagtgagcagaggaccagggtatggaacaagccctagtcagaaatgcctcctgacgcctgtgacctctgggcagggctagtgaggggctggggagagcagagggtgtttctggataagaactcacactaaaggcctggcccggaccctgcctccatcagcagggtgcagcccaggcccagcacattctcctcctcctgggacctcgatcttggcttcccctaggcctttctggggccccccagttcctgccaacactgctgtccacgctggggccctccagttcctgccaacactgctgtccactctcttgtccaccccatgattccaaccactg

SEQ ID NO: 683498 - DNA, 1370 bp, Homo sapiens
aaaagtggcctctcgcgctgtcctccttctgttggggggactggaaacacatttctccattcattgtcagtggtgttacaagccattggtgagcttccttccagagtgaatgccaaatgatacatttatattagatctctctgaccactgctgttgacgttggcggggtagcaggtgtggccataacatggagcacaggctgagctgcctgacttgcactgctggacggtgggttggcggtgttgacgctgcacaggtcatgagcgccggccctgcggatccggcgatgatcattgtggaaagaatggacagcaccctggttgatgtgcagagtgaccctgcagtcaagtctgtttgcctcccactagcattttctcatctccagcacggtgtcaatggtgccactccagccgggccaccctgcccacaaggtcttccacggggctcctccccagctcacggggaaatcccctttaatttcaaacagggcccttccacctgcccttgattccctgtggcaccttgggagcatggggctgccctactgtggagttagtgggtccacttmgagaagacagagacagagtgaagcctcaagaacagtgttcactggcagtgggaaccgtcggtcctgccatgggacgatgtgactgggggctcgtccatgccttgtcgtggacatctctggtctcagccggcaggggtgggtgggacctcagacctcagcgggtgatggcagtgggagcctgggcaggggcgggcagggctctgtggtaagacacagagggcaggggctggggtgggcagggctccatgggaagacacaggtagcgggtcaggtgctggggaggtgttgctgggcatggtggatttgcaaatttccagggcggtggggggtctggcaagtgtagacacagggcagaagtgggcgcagtgtctgtgggtgaagagctgtgcgggcgggcactgagaagaggtgcccacgtccatccccagcccctcaggcatgttcaccatcatggcgcacatgtctgggagtgagcagaggaccagggtatggaacaagccctagtcagaaatgcctcctgacgcctgtgacctctgggcagggctagtgaggggctggggagagcagagggtgtttctggataagaactcacactaaaggcctggcccggaccctgcctccatcagcagggtgcagcccaggcccagcacattctcctcctcctgggacctcgatcttggcttcccctaggcctttctggggccccccagttcctgccaacactgctgtccacgctggggccctccagttcctgccaacactgctgtccactctcttgtccaccccatgattccaaccactg

SEQ ID NO: 683499 - DNA, 614 bp, Homo sapiens
tcccaaccacaatgcctgtctgcaggagttcccagggtggaggtccagctgctctgagcctggtccaaggacagccacaaactagagataggctttggacaaagcagtgtggccgaggtggggtgttgtaccccatgcgatgtggagagagggaacttctgtcgaggatggcagagcagagctgggcagcagcccagcacagggccctccctcacctgagtgctcaccatccaagtccttgtagcacaaggtgagctggaagcaaaagccaccccagctcagatgtcctggtgaaacgccgggaaaggggcctcagccagggccatggcagcttagggctggttcccatcgcgttatcagcaaacgaatcttcccagaatcaagctctgatctttcttctctgatgtgaggtgctcggcgattcccaggaggcgctgatgagttgctcagcctggcagccgagttccagcagagttgagacccagcggctcctctggctgttcctgtgttgggcattctcctgctcctrgcaccggctggcactctcctctgtggcctctgttctctttattgttcagttatgaggcttcttcctcagttccatgggttaaaat

SEQ ID NO: 683500 - DNA, 1445 bp, Homo sapiens
tacgggctgccccagagtgcccaggtgccggggccttggctgtgaacacatcatgggctgcgctggtcttccctcagtaatcaccgtgggaaatcatggaactggagagtgggggtgcttccttgggccctcattaaaggatgacctgaagtctcgtggtggaggccgtcaggaaggatggaaaacgctcggaaccgtgtaggaaacggagtcatcatgctgtagggtcagcamtggggaaagtaaaagcactcaggtgatgccccttgagtttcacaatttaaattcatccttgaatgtctcctctcaccatgtctgtggaagctgctgacaagcagaggatgcacttggctgggaaaacctttcctaccaggacaagcccaagaccgaagcttctggggacctgtcacccatctggcccttcagggaggaggccagctggagtgtggggtctcgcctcatggtggatgggcgaggctgcccggctcagccagggcagtagcagcagccatttctctgcctctccacagggaccttgtgaggtcacctcattttttattttaatacttactaggacagaggtgggtagattctaacccatggacagccccacctgttttagtaaataaagttttattgaaactagggttggccgatgtagtggtcttttctggtggactaaaatgctacagcctgggcagcttcagcaacaggagttcatcctctccccactatggaggctggacatcagagatcgaggtggggcagggctgctcctcccgaggcccctctccttggttggcaggctggacatcagagatcaggatgtgggcagggctggctcttccagaggcctctatccttggctggtgggcagcgccttctggctgtgtcctcacagtgctgtccttctgcacccatctctcggggggagatttatattctgtgctaattaccgatatattcccttctttttaaaatgatatcctctgtgtgtgtgcgtgtgcgtgggtgcatacacacacatttatgtatctatttaggtatttggtttttgccggcatcactgatgaagtttctcatggtcttgtcctgaattagaaaagcattatatgcattggtcattatcttccatgtttcctccctcttacctgctgctttcactcaaggcttttgaacttgttttcccttataattactgtggcttgaatagcatccaattctttcctaatacctgctgtgttctaacaaagcaaatataggcattagaaccttagaaaccagaggatgtcaacaaattggaggaaattcagagaaaagcaacataaatgattaagagactgaaggatttgtttgtgagaaaagtggaaaggaactaagtgtgtttgtcttggtaaagcagcaactaaggcagggcaataaatgcctttaagaattttaagtat

SEQ ID NO: 683501 - DNA, 1445 bp, Homo sapiens
tacgggctgccccagagtgcccaggtgccggggccttggctgtgaacacatcatgggctgcgctggtcttccctcagtaatcaccgtgggaaatcatggaactggagagtgggggtgcttccttgggccctcattaaaggatgacctgaagtctcgtggtggaggccgtcaggaaggatggaaaacgctcggaaccgtgtaggaaacggagtcatcatgctgtagggtcagcaatggggaaagtaaaagcactcaggtgatgccccttgagtttcacaatttaaattcatccttgaatgtctcctctcaccatgtctgtggaagctgctgacaagcagaggatgcacttggctgggaaaacctttcctaccaggacaagcccaagaccgaagcttctggggacctgtcacccatctggcccttcagggaggaggccagctggagtgtggggtctcgcctcatggtggatgggcgaggctgcccggctcagccagggcagtagcagcagccatttctctgcctctccacagggaccttgtgaggtcacctcattttttattttaatacttactaggacagaggtgggtagattctaacccatggacagccccacctgttttagtaaataaagttttattgaaactagggttggccgatgtagtggtcttttctggtggactaaaatgctacagcctgggcagcttcagcaacaggagttcatcctctccccactatggaggctggacatcagagatcgaggtggggcagggctgctcctcccgaggcccctctccttggttggcaggctggacatcagagatcaggatgtgggcagggctggctcttccagaggcctctatccttggctggtgggcagcgccttctggctgtgtcctcacagtgctgtccttctgcacccatctctcggggggagatttatattctgtgctaattaccratatattcccttctttttaaaatgatatcctctgtgtgtgtgcgtgtgcgtgggtgcatacacacacatttatgtatctatttaggtatttggtttttgccggcatcactgatgaagtttctcatggtcttgtcctgaattagaaaagcattatatgcattggtcattatcttccatgtttcctccctcttacctgctgctttcactcaaggcttttgaacttgttttcccttataattactgtggcttgaatagcatccaattctttcctaatacctgctgtgttctaacaaagcaaatataggcattagaaccttagaaaccagaggatgtcaacaaattggaggaaattcagagaaaagcaacataaatgattaagagactgaaggatttgtttgtgagaaaagtggaaaggaactaagtgtgtttgtcttggtaaagcagcaactaaggcagggcaataaatgcctttaagaattttaagtat

SEQ ID NO: 683502 - DNA, 1137 bp, Homo sapiens
atttgttacctttgtgataagcttgaaagttgatagcatgtcttttatttgcttttaacttagtaaatgctaactgacaaatggatcatcaataatcacctctaataacttaaaggacagcttttcctgttcctggtgaacacagtttctttctcataatgttctaaagaaaatgggaggccaccctttgaacatcatggaaagaaccattaagttctacatctttaagataatgccctccctctccctccactctttgttttctgaaataaataagtgatggggaaataaaggaaagcaaatagcacctaggaaacgtgacctaggaaatgaagaaaagagaaaaattactttttttttcattaaaaacagctacgataccttctgactatgaccagaatttcaagttggcatcgacctctgtagcacgattccagaagcaatggaaagaaacacaaacttgacaaatcttcgtgtatttcctttccttttcaggaaaactttgagtgctcctcattaataaataaaggcattcaggacataaraaatgtgtcaaaagttgaggctactaggcatgagggggcacataaccccccagagccccagacaaagggaggagacgagaagagacattctgagtaccactgtaggaaaagaccaaaagcaagcacttttcatccatttatgattttgctgtggaaccacgagatgctattctgaatccctgttcatgctgcaagctgactgacctcgtgactggaaagtcagagagatccgcttgggccagcttctctgctttcctttcagtgggaaagtttccaccctgtaaagatcatgatttgaaatgtatctttttggtacgtatgggaaaggaaagggggctgacttaaatatgatgagactgccattcgttgctctactagacaaccaatcaagaattctacatgaaaaaaaatgtaaatgtttgcaaggattctcttcttttaaaaaaatccattacttcatgactgtcagcatatttgaaaaataaagatcatttccaacttctttgaagctaacagaatctgtttcttagtgattgtgtcagaggtttaaaaactgttgctctcagttttttccttaacatttaagaatctg

SEQ ID NO: 683503 - DNA, 1404 bp, Homo sapiens
atggagttttttggatctatctacttaatgcacagaactgtcaggtatttcttttggcctggggttgccatgaacctagggttataaaggcagaaagtttaggaacctgtggtatatattcctgtgactggtttatttcactcatcatcatgtgcaagattcattcatattattttcaagtagttgttgttcactcattttcattgtgtaatattatactacgtgactatcccactatttattaatatttttctattgatgggtatttggacagtttccacctttgggatattatgaatagcagtgctatgaacattcatgagtgtatatatcttgaagtagcattactgggttacagggtatgtttatgttcagttttagtagataatgctgctttccaaaaggcatacacttaattcccattaccaatgtatgagagttttttattgtctccatatccttgctaacattttcattgagtcactgtgatgggtgtacagtaaaacagtacttctctgaacccccaataaggttgagtttctttataaaagtttggccttttgaatattctcttttgggatgcctattcaaattctcttcaaaaaacaaacaaacaaaaaactgagtatttttcttgctctgttgcccaggctggagtgcagtggcgcatttttggctcactgcaatctccttctcggtggttcaagtgatcctcctgcctcagcctcctgtgtcgctgaaattacaggcacgtggcggcgtgcctggctaaattttttggtatttttttgtagagatggggtttcaccatgtctagccaagatggtcttgatctcctgacctcaggtgatccacccacctcagcctcccaaagtgcctggaattacaggcgtgagccatcatgcctggccttgaagtgagctttgatagtggcatagcaatctagcatgggcgacaagagcaagaccctttctctttaaaaaaagaaaaaaaatcctttagccgaagacttttctttccaaggaaaagaaagaaagcaagaatatacaatgagtggaaagtrtaaaccatgatggctgaaagtgtaaacatgatggctgaagcaaaatcgggtataccaattattaatatatgaaagagtttcttttattaaagggcaacaactgtcagatttagcatttaccaaaaaaagatacaactatatgctgttttgaccacaaaaatgagtggaattgttgagagtagaaacaattctattctcaatagaagtcaaaatttcacaatattgtctttccgggaacaaagcatgtccctcctttcattaaaatcctctttcacctccccctattgtcctgtagcttttccacacaggtccatcgcatttttttttactttattcttcca

SEQ ID NO: 683504 - DNA, 566 bp, Homo sapiens
gcccaaaatgcacaagcagtcataccagaaatatctgcatgatcatgactctcacaggcaaagaagtgggtaaaaatctccaaattctaagcaacaaagggactataacraatcagcacaggaacaatcttctaagcaacaaaggaattataacaaaccagcacacagacaatcttctatctttgccaaacgtggctggctgattgggaagctgaagcaaattcttcaatcaacaattctactacttttctgcctttcagtgagaagacaaaaatcataaaaccacatgattaaaaagaataattctaaatactgaaaaatctaaaaatattcctatttgtaaaaaacaatgtacaactttaacttagtaaacacacagtttttaaaaaattactcatctacttataaaataatactttagtgattttagaatgttttctgattaacaaaattcttgattcacattttagactgtaaacataattttataagataaaacaggcaacagggcttggaaagggggcattttcttccaaatgtgccagacaagtccacttacctataca

SEQ ID NO: 683505 - DNA, 656 bp, Homo sapiens
ctatatttaatggaaatgtttggtcaaatattattttgcataatattactttaatgtatatatcagcattagaaggctgtcttctgtctaaatcaatgcgcatttaaaatgtcttacaatgtttttgaaaataaactttcagacggcttaaaagaataactataggaaaatggcataattaaaaggtttttctactgcttgagagttaaagtaaaataattcttcaaaattaaaattgttacctattaagaccatatgctgcacaagatattcttgttgatgtcaacgggtgttccartgaggatgtgggcaacatatgggcctggcattttgttaattaaaaacaatgttttgctacgttgatgtgtgttccaaagagagattcctagagcataacaccaagttgccgagtttagtgttttaggaggttggcaattacacagttcagtgttagacttgaaacacaaagatgtaactttcatgttgcactcattctatttttaataataacaataataaaccttagttgaaaatttttgttgtgatagctggaattaattccagataatttccaagtctactgaaagtttaatactaaattataaaggttagaattgaggactgaacacttataggacacatttttatatgtttta

SEQ ID NO: 683506 - DNA, 875 bp, Homo sapiens
tacgtgttaccactagaggaaactgggtagctggtacatgggatctctctgtcttactttgtacaactgtgtgtgaatctacaattagctcaaacagtttaatttttttaaatctagactgagagggagaggaatctccactcaaacaatggwtcagctgagagaatctttagaaattctattattcaagctccatcacttcacaaatgatgtaaggaagcccaaagatattaggtgatttaggcaacacatagtcaccagcagagctgcaaaaaaacatatgatgtcccagttacatgttgcttttataacacaaatttaaatatatttttgaggagagacccttggcatctaagtagccttttctcttttagctccggagttgcttgcattttgtatctacagccttttacaaagatgactatttttttctgggcaatatttgtagttctttatactaatatagattttcacaaaatcctttcatgtaataatttaagaaagtatctgttgataaataaccttgatattgggtggctgggcatggtggctcatgcctgtaatcccagcactttgggaggccaaggtgggcggatcacctgaggttgggagttcgagaccagcctggccaacatggtgaaaccccgtctctactaaaaatacaaaaattagctaggcacggtggcaggcacctgtaatcccagctacttgggatgctgaggcaggagaaactcttgaacccgggaggcagaggttgcggtgagccaagatcatgccattgcactccagcctgagaacaagagcgagactttgtccaaaaaaaaaaaaaaaaaaaaaaaaaaaaacccaggaaaaaaaaaagaaaagaaaaggaa

SEQ ID NO: 683507 - DNA, 875 bp, Homo sapiens
tacgtgttaccactagaggaaactgggtagctggtacatgggatctctctgtcttactttgtacaactgtgtgtgaatctacaattagctcaaacagtttaatttttttaaatctagactgagagggagaggaatctccactcaaacaatggttcagctgagagaatctttagaaattctattattcaagctccatcacttcacaaatgatgtaaggaakcccaaagatattaggtgatttaggcaacacatagtcaccagcagagctgcaaaaaaacatatgatgtcccagttacatgttgcttttataacacaaatttaaatatatttttgaggagagacccttggcatctaagtagccttttctcttttagctccggagttgcttgcattttgtatctacagccttttacaaagatgactatttttttctgggcaatatttgtagttctttatactaatatagattttcacaaaatcctttcatgtaataatttaagaaagtatctgttgataaataaccttgatattgggtggctgggcatggtggctcatgcctgtaatcccagcactttgggaggccaaggtgggcggatcacctgaggttgggagttcgagaccagcctggccaacatggtgaaaccccgtctctactaaaaatacaaaaattagctaggcacggtggcaggcacctgtaatcccagctacttgggatgctgaggcaggagaaactcttgaacccgggaggcagaggttgcggtgagccaagatcatgccattgcactccagcctgagaacaagagcgagactttgtccaaaaaaaaaaaaaaaaaaaaaaaaaaaaacccaggaaaaaaaaaagaaaagaaaaggaa

SEQ ID NO: 683508 - DNA, 875 bp, Homo sapiens
tacgtgttaccactagaggaaactgggtagctggtacatgggatctctctgtcttactttgtacaactgtgtgtgaatctacaattagctcaaacagtttaatttttttaaatctagactgagagggagaggaatctccactcaaacaatggttcagctgagagaatctttagaaattctattattcaagctccatcacttcacaaatgatgtaaggaagcccaaagatattaggtgatttakgcaacacatagtcaccagcagagctgcaaaaaaacatatgatgtcccagttacatgttgcttttataacacaaatttaaatatatttttgaggagagacccttggcatctaagtagccttttctcttttagctccggagttgcttgcattttgtatctacagccttttacaaagatgactatttttttctgggcaatatttgtagttctttatactaatatagattttcacaaaatcctttcatgtaataatttaagaaagtatctgttgataaataaccttgatattgggtggctgggcatggtggctcatgcctgtaatcccagcactttgggaggccaaggtgggcggatcacctgaggttgggagttcgagaccagcctggccaacatggtgaaaccccgtctctactaaaaatacaaaaattagctaggcacggtggcaggcacctgtaatcccagctacttgggatgctgaggcaggagaaactcttgaacccgggaggcagaggttgcggtgagccaagatcatgccattgcactccagcctgagaacaagagcgagactttgtccaaaaaaaaaaaaaaaaaaaaaaaaaaaaacccaggaaaaaaaaaagaaaagaaaaggaa

SEQ ID NO: 683509 - DNA, 632 bp, Homo sapiens
acggcattcagtttatatttgctgaagggaagataatctccttctagttagcatctatccacacacagtgcttaataacagattgtatcagagtttgctagttgtccaccaaaatctgttctcccttctttgtcagggcatatggctatatactacaattttctgtctaccttgaataaattgtggctggtatccaaaggaatgagaaaggaaataatgtatgctacttcgaagtgggtatggatgcatcccctcagaagacggtggggctgcaacttgggaggagtctgggttcctcaatctccctaagggagaaactcacccacctgccaaaaacacctaccatggacttatgtgaatgagaatcaacctctactgtgtttgagcattttaattgacattcatttaacactatttaatatacagatgttcagtagatgttcactaaatgaattaagtttttgtagtttgattttctgaagaatttgaaacagatcaaatgtatagagaagtttcaagaacagtcaaagagtccctctatccacttcacccagaattcctaattrttaacattttacctcatttgctccctctgcctaacacatggatgtatttgtgcgtgtgtgtgagag

SEQ ID NO: 683510 - DNA, 589 bp, Homo sapiens
ttactcacaatgtaggtcagtgccccctgcaaatatcccgctctgtccggctgcacaaactgacaggcagggagttggagcataagtgaaggtgttgaggcctgaaaggtcaaaagccttggtcctgctacagacttgctgggtgatcttgggcaaatccctgcccttttctagacctcagtttcccatttgtgaagggagcccatgggttgatttacagtgtagttaatgggagtctgagtcattgggagatgactctatctgtcctrcatttcatgactgtatttgtcctacattcattcattcgaaatcgactccatgaggatttgtcatgtgcctgctgtgtgtcatgcaccatgttggtgtgggggtacaggatgaatgagaccaacatggcgcttgccttcttggagggtacattccagtggaacgggggctgctcaacaaacacaggcattcaacaaaccacacagtacagttatgaatacaaacagtgataaatattcctaaaggaaactacgggcacttggaggggtgctaatgagggaagttgtttcagatcaggtagcctgggatggctactctgcag

SEQ ID NO: 683511 - DNA, 589 bp, Homo sapiens
ttactcacaatgtaggtcagtgccccctgcaaatatcccgctctgtccggctgcacaaactgacaggcagggagttggagcataagtgaaggtgttgaggcctgaaaggtcaaaagccttggtcctgctacagacttgctgggtgatcttgggcaaatccctgcccttttctagacctcagtttcccatttgtgaagggagcccatgggttgatttacagtgtagttaatgggagtctgagtcattgggagatgactctatctgtcctacatttcatgactgtatttgtyctacattcattcattcgaaatcgactccatgaggatttgtcatgtgcctgctgtgtgtcatgcaccatgttggtgtgggggtacaggatgaatgagaccaacatggcgcttgccttcttggagggtacattccagtggaacgggggctgctcaacaaacacaggcattcaacaaaccacacagtacagttatgaatacaaacagtgataaatattcctaaaggaaactacgggcacttggaggggtgctaatgagggaagttgtttcagatcaggtagcctgggatggctactctgcag

SEQ ID NO: 683512 - DNA, 606 bp, Homo sapiens
cctccttcctgccagtatagatcagacacaaggctcagcttctgcccagactgcacaagagcttaaggctctgaaaacatcactaaaggtgggaggagatggcagggagcagctccatctcagggttagggcatcgggcatctgaccagcttctctcagctctgyagccttcccagaagtgcacactctggacatgcggtccccctgggaggtggagtcaagtccctgctccagaagtttccctacctgggagcagcctccaggcccctctgcctttgcccagcctctggctttctgggaaaaaattttgttcatcacattgcacgttcctcagagaaaaagtattggcagccctttgcaaaagtttctgtgttgttcttcttttcaaatgtaaattctgtccttatgggcctgagaaagagacgaagcaccatagatactggtcacttccaggccttttccaaccaagagtccttctcctgaggatgtggagggggctcttctttgaagctccttttggggcacagcttcccagttaagcctgttgtcagtgtctccacctgtttcaccgtgtggcacacacagcacatgacactctgcgtgcca

SEQ ID NO: 683513 - DNA, 606 bp, Homo sapiens
cctccttcctgccagtatagatcagacacaaggctcagcttctgcccagactgcacaagagcttaaggctctgaaaacatcactaaaggtgggaggagatggcagggagcagctccatctcagggttagggcatcgggcatctgaccagcttctctcagctctgcagccttcccagaagtgcacactctggacatgcggtccccctgggaggtggagtcaagtccctgctccagaagtttccctacctgggagcagcctccaggcccctctgcctttgyccagcctctggctttctgggaaaaaattttgttcatcacattgcacgttcctcagagaaaaagtattggcagccctttgcaaaagtttctgtgttgttcttcttttcaaatgtaaattctgtccttatgggcctgagaaagagacgaagcaccatagatactggtcacttccaggccttttccaaccaagagtccttctcctgaggatgtggagggggctcttctttgaagctccttttggggcacagcttcccagttaagcctgttgtcagtgtctccacctgtttcaccgtgtggcacacacagcacatgacactctgcgtgcca

SEQ ID NO: 683514 - DNA, 606 bp, Homo sapiens
cctccttcctgccagtatagatcagacacaaggctcagcttctgcccagactgcacaagagcttaaggctctgaaaacatcactaaaggtgggaggagatggcagggagcagctccatctcagggttagggcatcgggcatctgaccagcttctctcagctctgcagccttcccagaagtgcacactctggacatgcggtccccctgggaggtggagtcaagtccctgctccagaagtttccctacctgggagcagcctccaggcccctctgcctttgcccagcctctggctttctgggaaaaaattttgttcatcacattgcacgttcctcagagaaaaagtattggcagccctttgcaaaagtttctgtgttgttcttcttttcaaatgtaaattctgtccttatgggcctgagaaagagacgaagcaccatagatactggtcacttccaggycttttccaaccaagagtccttctcctgaggatgtggagggggctcttctttgaagctccttttggggcacagcttcccagttaagcctgttgtcagtgtctccacctgtttcaccgtgtggcacacacagcacatgacactctgcgtgcca

SEQ ID NO: 683515 - DNA, 658 bp, Homo sapiens
ggatgctcaccttatatttgaaacattacactctttcaggatatactaaatgctgtcggtaacctgaaaagaatacaagttattgttctgtggaaacattattagcctcaaacaaccttaagcaatgctaatattgtggctggtaggataagttgtaaaggaggcacattaacagtcacggtctctaggattataaagctacagttacaagtatttggtgtcactggaaagaagcctgttaaaaatcraaagcaatgctctgtggattctgaaaagcagctgccctagtgctacctacacacaggcatacttgtggcttgggataaatgtccaccaacagcatcatccatagaccccgaaactgctgcatcccaaacaacttagaaagaaaaaagatcatctgctcttaacctattaggggatgccaaagggggcaccaagatcaaatacgaagtcggagtgacatgcctgaaatgcgaatgtgaagagggaaagcccacatgctggttaatagattaacaaatctgaaacacctgtaactaatagtacaggtgtctattttatcctctcatctacaatcctaaactttatatatgtaagttggctaaaaaaaagttttctgggatcttcacattggaaggtaaggggtggcctgttt

SEQ ID NO: 683516 - DNA, 658 bp, Homo sapiens
ggatgctcaccttatatttgaaacattacactctttcaggatatactaaatgctgtcggtaacctgaaaagaatacaagttattgttctgtggaaacattattagcctcaaacaaccttaagcaatgctaatattgtggctggtaggataagttgtaaaggaggcacattaacagtcacggtctctaggattataaagctacagttacaagtatttggtgtcactggaaagaagcctgttaaaaatcaaaagcaatgctctgtggattctgaaaagcagctgccctagtgctacctacacacaggcatacttgtggcttgggataaatgtccaccaacagcatcatmcatagaccccgaaactgctgcatcccaaacaacttagaaagaaaaaagatcatctgctcttaacctattaggggatgccaaagggggcaccaagatcaaatacgaagtcggagtgacatgcctgaaatgcgaatgtgaagagggaaagcccacatgctggttaatagattaacaaatctgaaacacctgtaactaatagtacaggtgtctattttatcctctcatctacaatcctaaactttatatatgtaagttggctaaaaaaaagttttctgggatcttcacattggaaggtaaggggtggcctgttt

SEQ ID NO: 683517 - DNA, 658 bp, Homo sapiens
ggatgctcaccttatatttgaaacattacactctttcaggatatactaaatgctgtcggtaacctgaaaagaatacaagttattgttctgtggaaacattattagcctcaaacaaccttaagcaatgctaatattgtggctggtaggataagttgtaaaggaggcacattaacagtcacggtctctaggattataaagctacagttacaagtatttggtgtcactggaaagaagcctgttaaaaatcaaaagcaatgctctgtggattctgaaaagcagctgccctagtgctacctacacacaggcatacttgtggcttgggataaatgtccaccaacagcatcatccatagaccccgaaactgctgcatcccaaacaacttagaaagaaaaaagatcatctgctcttaacctattaggggatgccaaagggggcaccaagatcaaatacgaagtcggagtgacatgcctgaaatgcgaatgtgaagagggaaagcccacatgctggttaatagattaacaaatctgaaacacctgyaactaatagtacaggtgtctattttatcctctcatctacaatcctaaactttatatatgtaagttggctaaaaaaaagttttctgggatcttcacattggaaggtaaggggtggcctgttt

SEQ ID NO: 683518 - DNA, 1376 bp, Homo sapiens
ccagcaacgccacacacaaacatgtgagcagaaaactaataaccaccggtagcctgtgtaaaacatcagaacaaagccaatctttgtattctttcttttttatttataaataaactatttttgtggttaaacccacttttccttcaaatagctttttgggttatttccaaattaatcataaaaaaccctttctcccaacagaacggaaagcattttacaggaaaacattgatgggctccgggatcccaagatgtgcaccagatmctgagtgttcagacagaagggacaactctaattctagtcttggagtacaaagatgtcagtgaataagaatcatccaaagaagctgaagcattcattgttttttcactcttatttgagatctcctggaggtgtgtttacagattgggaaagattcaaggaacctgtttggaacaaacccctccaaatgatccgaattaaaggtcattctaggagcctggtagaaatgctggaaggttagggtctaggagacaaaggtcactcgagttgctgcttcttatcttatgaaagggaagaattgcttgttcctttaagataactgagaataaattaatcaaacttaagaactgttttttaaactataaacagtaagcaatcattttaaaactcaattatctacccaaatgttcatagcagcattattcataatagcttaaaaagtgcaaaaaacctaaatgtccctcaatggatgaatggatagagaaaataagaggattactcatacaatggaatattacttagcaataaaaaatgaagtagtgatacatgctaaaacatggatgaaccttgaaaatggactgcttaattaaagaagccactaaaagacaaccacattccacttacataaaatgctcagaacagacaaacccagggacagaagaagtacattagtggttgccgagggtgggaagggcttatataatatgatttctttgtggggtgatgaaatggcctaaaattagattatagtgatggctgcaaaactttttaatacattgaaaaccacagaactataaatgagtgaattttatggtatgtaaactatatctcaaactttcaaaaaaagaattcattactaactttctgattttaaaaaataaaatcttcctgcctctcaagagcagcccaaaagaaaaataacaaaaaaataaaatctacaaacataaaccttattaagtggaggaaaaagctacagtaatgtaactgttaaacaattcaattacctaaaagttctccagttaatagtcaaatagattttaaatccagttatgccttcaaaaaaatccacgctttgacctaacagttcaaaactccaaatgcataacattttgtta

SEQ ID NO: 683519 - DNA, 1376 bp, Homo sapiens
ccagcaacgccacacacaaacatgtgagcagaaaactaataaccaccggtagcctgtgtaaaacatcagaacaaagccaatctttgtattctttcttttttatttataaataaactatttttgtggttaaacccacttttccttcaaatagctttttgggttatttccaaattaatcataaaaaaccctttctcccaacagaacggaaagcattttacaggaaaacattgatgggctccgggatcccaagatgtgcaccagatcctgagtgttcagacagaagggacaactctaattctagtcttggagtacaaagatgtcagtgaataagaatcatccaaagaagctgaagcattcattgttttttcactcttatttgagatctcctggaggtgtgtttacagattgggaaagattcaaggaacctgtttggaacaaacccctccaaatgatccgaattaaaggtcattctaggagcctggtagaaatgctggaaggttagggtctaggagacaaaggtcactcgagttgctgcttcttatcttatgaaagggaagaattgcttgttcctttaagataactgagaataaattaatcaaacttaagaactgttttttaaactataaacagtaagcaatcattttaaaactcaattatctacccaaatgttcayagcagcattattcataatagcttaaaaagtgcaaaaaacctaaatgtccctcaatggatgaatggatagagaaaataagaggattactcatacaatggaatattacttagcaataaaaaatgaagtagtgatacatgctaaaacatggatgaaccttgaaaatggactgcttaattaaagaagccactaaaagacaaccacattccacttacataaaatgctcagaacagacaaacccagggacagaagaagtacattagtggttgccgagggtgggaagggcttatataatatgatttctttgtggggtgatgaaatggcctaaaattagattatagtgatggctgcaaaactttttaatacattgaaaaccacagaactataaatgagtgaattttatggtatgtaaactatatctcaaactttcaaaaaaagaattcattactaactttctgattttaaaaaataaaatcttcctgcctctcaagagcagcccaaaagaaaaataacaaaaaaataaaatctacaaacataaaccttattaagtggaggaaaaagctacagtaatgtaactgttaaacaattcaattacctaaaagttctccagttaatagtcaaatagattttaaatccagttatgccttcaaaaaaatccacgctttgacctaacagttcaaaactccaaatgcataacattttgtta

SEQ ID NO: 683520 - DNA, 604 bp, Homo sapiens
cgcccaaggtgaggcagttactaactaccaagtgaggtaggtccaccgtgtcccataccctctacttccaccaccccgactcttcccacttaagagatgagatcagatgcctaagaagagacaaagaggaagaaacacccccagggccacgcagggggcacctttcctggcagcctgcacccctccccagggggagagcacggaccagccagggggtcgcggcccgcggcccgcctagctgtgtgcgcctggcttcttgcctcgccaaatctcaagtttccgcgtcctcagaaagggggcaatcaccatgccatcctaatagactgttgagagcgtttaataaaagcagtcaatctatgaaaagcactgtgcaaactgcgcggtcagtgtaaaggctcaatccacattcgctttctctctctctctttttttttttttaaactctctgggctggtaaagtctgaactttacgtggggatgatctgaaagctagaaaggatcgagaaaaatcccaaagctctaagcctgagctagggagggtctcagagggaggtstgactgcagaccgggagtcttctcctcccgtgcgccgctgcccgggacg

SEQ ID NO: 683521 - DNA, 659 bp, Homo sapiens
tagttaggtgagcctatagaatcacttcacctttactgtgggagttttaaagagttttatttctaataattacagtgattatattttctttaatgtcaaattaaaatagatgttctaagatgcctaactgacttgagacctttagctgattatcagctgaagtaattagagaatagtctttatgtatctggaaattttccaaggaaaatattttaaattataaacaaagagaaagaaagtacatgctcgtggttttggcttatgtctttttgcccatagaaacatatatatatatttataacactcaaatgaagatagtacaaatagacctaatatacttgataagattagttctgtttagaaaattcawatttcaaagggctgagtagtgttgtcattttaacattgtttggtgtgacacatgcctacacgtacaggtttaaatgcacttaaatgtgtctcttcccctaagcagagtctggggtgaagacttgcattcaggactttttctgggaagtcgtcctagggagcaggagtgaggggtaggaggagtgactcagaggaaggtagaaagccagcccacggcggggggtcatcaaggcagtcacagccagtgcagttgctgctcaaactttcaggacctttggaagagattcctg

SEQ ID NO: 683522 - DNA, 967 bp, Homo sapiens
tgataacatatcttggattacctggtaatgagctgtttggaacaggagggccttgactgcagcttagcaggagattctgtgcttcgcttagcaccagtgtgcaggcttccaccactggctataactgtctacagacacagttactttagcaactggttttaacaattgattttgtaaactatgaacacctaagctcagattgcctagtkctcaagcagtctttttgatatcaggccactctcacagtcactcataaaaagtgaaagccgtggagatggggctcatgaagagatgctggtgagtccactctactatagcagggttcttctaagttaattcgctcctacccaatatcatatctgtgcagcatgtctagaaatcaggaaatttagagacattagcagtattcattacaaatacaacatcctttttccccactggtgttcactctcttctcataattgaggtttttatatattcttgactctattttagccttcctcgttttcttttcctcgtgtgatgtgcctacctatacaaatactacactcttttgaattttagagttacaatatgattttatatgacaagttactttttcttttaatgttctttatttaattttttaaatttcatacactcttttagacaaattgctattcttcagttttgttggctttagagtttagaaacaggtaacaggatttaaaatttttaatataaatcaatggtagataaagggaagctactcaatagggtcctcctgggttcaaagagcctgttatagctgcattcccagggaagaggcctaaacagccaatgtaggataatgcaagtttggaactccatttactggaaaaagaaatactgatagctgctgaaatactgtctccttgtactgtaatgaatcataagatgatttgactataataatcagaatataatagacttgaacaattctcacgag

SEQ ID NO: 683523 - DNA, 967 bp, Homo sapiens
tgataacatatcttggattacctggtaatgagctgtttggaacaggagggccttgactgcagcttagcaggagattctgtgcttcgcttagcaccagtgtgcaggcttccaccactggctataactgtctacagacacagttactttagcaactggttttaacaattgattttgtaaactatgaacacctaagctcagattgcctagttctcaagcagtctttttgatatcaggccactctcacagtcactcataaaaagtgaaagccgtggagatggggctcatgaagagatgctggtgagtccactctactatagcagggttcttctargttaattcgctcctacccaatatcatatctgtgcagcatgtctagaaatcaggaaatttagagacattagcagtattcattacaaatacaacatcctttttccccactggtgttcactctcttctcataattgaggtttttatatattcttgactctattttagccttcctcgttttcttttcctcgtgtgatgtgcctacctatacaaatactacactcttttgaattttagagttacaatatgattttatatgacaagttactttttcttttaatgttctttatttaattttttaaatttcatacactcttttagacaaattgctattcttcagttttgttggctttagagtttagaaacaggtaacaggatttaaaatttttaatataaatcaatggtagataaagggaagctactcaatagggtcctcctgggttcaaagagcctgttatagctgcattcccagggaagaggcctaaacagccaatgtaggataatgcaagtttggaactccatttactggaaaaagaaatactgatagctgctgaaatactgtctccttgtactgtaatgaatcataagatgatttgactataataatcagaatataatagacttgaacaattctcacgag

SEQ ID NO: 683524 - DNA, 967 bp, Homo sapiens
tgataacatatcttggattacctggtaatgagctgtttggaacaggagggccttgactgcagcttagcaggagattctgtgcttcgcttagcaccagtgtgcaggcttccaccactggctataactgtctacagacacagttactttagcaactggttttaacaattgattttgtaaactatgaacacctaagctcagattgcctagttctcaagcagtctttttgatatcaggccactctcacagtcactcataaaaagtgaaagccgtggagatggggctcatgaagagatgctggtgagtccactctactatagcagggttcttctaagttmattcgctcctacccaatatcatatctgtgcagcatgtctagaaatcaggaaatttagagacattagcagtattcattacaaatacaacatcctttttccccactggtgttcactctcttctcataattgaggtttttatatattcttgactctattttagccttcctcgttttcttttcctcgtgtgatgtgcctacctatacaaatactacactcttttgaattttagagttacaatatgattttatatgacaagttactttttcttttaatgttctttatttaattttttaaatttcatacactcttttagacaaattgctattcttcagttttgttggctttagagtttagaaacaggtaacaggatttaaaatttttaatataaatcaatggtagataaagggaagctactcaatagggtcctcctgggttcaaagagcctgttatagctgcattcccagggaagaggcctaaacagccaatgtaggataatgcaagtttggaactccatttactggaaaaagaaatactgatagctgctgaaatactgtctccttgtactgtaatgaatcataagatgatttgactataataatcagaatataatagacttgaacaattctcacgag

SEQ ID NO: 683525 - DNA, 967 bp, Homo sapiens
tgataacatatcttggattacctggtaatgagctgtttggaacaggagggccttgactgcagcttagcaggagattctgtgcttcgcttagcaccagtgtgcaggcttccaccactggctataactgtctacagacacagttactttagcaactggttttaacaattgattttgtaaactatgaacacctaagctcagattgcctagttctcaagcagtctttttgatatcaggccactctcacagtcactcataaaaagtgaaagccgtggagatggggctcatgaagagatgctggtgagtccactctactatagcagggttcttctaagttaattcgctcctacccaatatcatatctgtgcagcatgtctagaaatcaggaaatttagagacattagcagtattcattacaaatacaacatcctttttccccactggtgttcactctcttctcataattgaggtttttatatattcttgactctattttagccttcctcgttttcttttcctcgtgtgatgtgcctacctatacaaatactacactctyttgaattttagagttacaatatgattttatatgacaagttactttttcttttaatgttctttatttaattttttaaatttcatacactcttttagacaaattgctattcttcagttttgttggctttagagtttagaaacaggtaacaggatttaaaatttttaatataaatcaatggtagataaagggaagctactcaatagggtcctcctgggttcaaagagcctgttatagctgcattcccagggaagaggcctaaacagccaatgtaggataatgcaagtttggaactccatttactggaaaaagaaatactgatagctgctgaaatactgtctccttgtactgtaatgaatcataagatgatttgactataataatcagaatataatagacttgaacaattctcacgag

SEQ ID NO: 683526 - DNA, 1544 bp, Homo sapiens
atcattcagaacccatctggtctctgggtataaaaggaattttatggagatagtgacattctcgttctgctccagcttgatccgtagtgtaccaggagtggtcatttttctgagaaacggtcttaataatgcaaccaggattgcattctttaattagtgctcattccccrtgagcactttcagcctcccaaatttttcaaactctcatcctctttgtgagcatgtgtgataggtcagggaaaggcaatgatcggtggaaggtaccaaggtagccgtgggctcttccccagtgcaatccaaagatctgtttccctccaagtacttatttttatttctagaatcattccttggaatatttcctgtgccttattacttacatctcttttttcagggttcagccttaaaatccttaattatctcattgagagcttgggtcagtagctaatatttcttatgcagtgcttgggcaaggtaccctatcttcatctgtgacttggggatgatagaggcttctatcacacaggaatggagagagcttaaataagggatgtatgtaacatgctgtggccagcactcattattaattaattagcactattcttattgttcatattactgtttctggctagtttatgtctggctaagttttaccatgggacgtatttgtcaataattttttaccggggaaggctttgaccactacctttcccagacagggtctctccagagaatggtattggtccccttggaggaagatcagcatggatttttatgggaaataaggaaatttgaggaaattaggtttgttatgctgcacagtagcatataaagacacacacaatgaacagttactgtactttgtgtatatacttttgcacttaacgatgctcaatgggtttttacatacataatctcattttaggcaggctgttgcttcactcttattttgaagataaggaaactgaagtgcacagggtgttaagtgcttgtcaaaagtgacatttagaacccagggcttctgacttccaacatcatgctctttgttgtatcacaggcttcttgaaatattttattaatagtccattcctggaagaatgcagtataaacttcatccacattggttgtgctgcttggttagaattttgaagattcttctcaggggagtctccatgaccaattaatatccttctgacacttttttgctcaaatacttaagtgcattacagtttacacccaggacacttgaatttctgtctgtaaaattgaggctttcaaactggaatacctcttctgggttgtgtttaaaattatgaaatgagatacacaccagcatcaatttttaggactctgttattgaaaaattttcatcaagagaaatgttcctatattcctgacttctattttttttacatcaacaaaccaagtgcaataaaccagtctatgatattctatcacaaacataatttttcttttaaaaatattaattttttgataaatagaacttaaattaggtccactggtttccttatattcgcacttttttt

SEQ ID NO: 683527 - DNA, 2577 bp, Homo sapiens
ttcacacatgaaacagccacagcccaaagaagttaagacacttgtataatgtstcaaaagtggtgagtgcctgacacctttttgctgaactgaggcctgcctaactcagcgtcctcttcactgtgtcatcattcctacctgtgatgatgggattaaaaaccaaatacagtataaagaaaatgtagtatatccatacagtggaatagtattagacataaaaaaatggaagaactggcacatgctacaaaatgattaaaccttggaaacattatgctaagtgaaggaagccaaacacaaaagactacatattgcacgattccatttatatgaagtgtccagaataggcaaatccacagagacagaaagagtagtcgcagccagggcctggaggagggagaagtgaggaatgactgctaatgggcatgcggtttctgtttggggtgattcaaagagttctggaactagacagtggtgatgtttgcacaacattgtgaatgtacttaatgccaccaaactgtacactttaaagtggttaaaatggtaaatgttatgtgtattttaccacagtgaaaaggtaaaaaatataatccactgttgccttgctggggcagggggacagcacttccgggcatccatagcccctcctcaactctgcacccctcaatcactagctctgctcaaaattctccttcaggcctagaataacccaacactaatgaatggaaagtggtgacaattgtctttttaaaacccaaccacccttcacacacacatgcagatgtatggtttccatgtttcctatatgaatacacgaaaacatgaatgaaggtataggtgatgtggagggaaacttcattcattcacactaattaccataataagagcaaatacaatttgagtggtcactgtgtgctgggcatgatgcaaggtgatctgatgataaatatctaatgacatttcagcaggggtgatattatcatgccctgattaggaaatggagaccttcagaagttgtgatttgcctgaaactacagagatgacatgtagtagagcaggaatccaaaccatttccaacttccaagttcatgcatatccagacaagaagtgtctgaaataaagaaaatcctagcttgcagaatataaataaattattgcagttttattctttttccctgatacattaactaaacctggtgagcaggctatttcttaataggagctcctaaatatgaaacattacatataaattgataagattttatttggaatttgagctcctatgtgctgatttgtggtataaatgttcactgctgaaaaagaaaaatcattttcataggaaaaaatgacttcaggattcaccactgtatggaaagtcaacaatgcaaaattagtggaggtcatttggtgaggtttgagtgatgtgagtggtttcccatgaaaccgtgggaaggtttcatcactgagcagtcccatcaaggagtggtgctcatcttatccttacatgcagctaatctcatcccatgagtgccaggaagcccctgtgctgtttttcacatgtgtgaagaggggtaactttacatggcataggtgattgatgggctcagcaatttggatatattgagagaagcattgggtagtgtccatcagttggaggactcagtggccacctgcagtcactgtcaatggacagccttcactggacccactgaagagcagcttctcagtctctgtgtcacagtgagcacccaattaatggagagtggatgggacattgcctttgtgtccaactcactccctagacccagccacccacagggctcttttccacgtctctcctctccccaccccttctgaagtcctccaggaggacatcaggattagtatcttctctaccctcattctgtccttttccagcctattgttattaaacacactgtgcccagtcctctcatgaccttccattttgatcctccagatcttgtattagaaatttaagtgaagtgatttttctctataactcccgttttaaccaccccaattcttcttgaaacagtgagggtacctccaactcacagtggtttccaaagtgggacgcaagatgattcatttgggtatgacagaaaaaattaaaacttcaatatatttctttcaaaaattaaaaaattatactttattggttttgaatatatatggattggcagtaatgtactacacatatatctgtgacactaataggaatgtgcagtataagaaaaccagaaattcctattcttagtgattgcaaaaggtcaatatatgtaaaatgtggaaaagaaatgaagaataaaagataaatatttcaaaataatgtctgatttcatttatttttatacttatgtcccatgaagacaacaatattttatagcagaaataaagtactataactcctgacacatctgattagttattaagccaccctagaaagtatcctgagtccaagaccactgacggctgcattaattcagcagtctacaagcggagagtgcaggaatcaggtagcaactgttgggaaatacctgatttgtaggtttggctttg

SEQ ID NO: 683528 - DNA, 2414 bp, Homo sapiens
gatagagcctaggaagacagattaatggaacctactgggaatctggtcagtagtggaggctaaagttcagattttgctgcaaaattgccccaggaagactgtcgagccttgatttagagagactcccccatgctgtcttcaggaagggatcccatagagacacagaggtcttcagagtgtcagcaagtccttgtagaactgtactcacaggcatgcattccccatgctgtctgccatggagaaggcaaggcactggcactgcccctcaccttatacacttctttctgtttcttctgtactcctttttcttttcttcttactttctgcttcttccactccttatctttactctaggctctcactctttatttccctcctactatcttctttctcttcccttttatcatgtatgacagtagtgcagaggcacctaggagctttctttaaccctgctggtggctcttggggctggagatactgctgaatgtaaggataggatgtggtgaaaagtagggcatgccctttgggccccaggggaacaaaaggacaaagtgagggctatcccgaatattgagaaagagtgttgcctagattagaagctaccatggttcacaattctcacaaaatagtaatagtaataacttcaatagcagctaccattggctgatcactgaactacttgcaaaacttgtctaagcattatacatatagtcatttaatactcatagcaacaaccccgtgaagcagttattaatagtcgtgttttctaggagagaaaattaagatttaataacttgctycaatttgcaactaagatgtgacaaatccaagatatgaacccaaatctgtcttatgctaaagacaaagttctccaggaaaggaatccatttcattgtgaatccaggtttagaaggcttagaacatcccacagatgctttcatttcctttagggccatctttatagaaacctgactcataagcagagctccagagagtcctccattccattgcctggtactaactcatttctttgcccctcaaaaccacgacaccctattgaatgtcccacttcaagaggatgcttagcagtttttggtgagtgggctagagccttctataatttacatttgaactttggaaatcttatcctcagccacagagttcaatgagattcaaattgtggtggtcgcagaggccacaccctaagtatacagggcctgtgtgtttaacctgcttcctggggccttgggttccaaagaccttcacatggctgtcccttccacatctgggcactgtttggaagtggcatctgcagaaggcagaggagtcctaactctgcaatagatgctgtcttctcttgggaagggaaagccacccttgaaacttcatccagaacttctggctggcgttccagtctcttaccagttacattaagagccctcgaagtccagatggtcttgttctaggctcggagaaacccttcttacaacaaatcctttctttttagaatagtactatccaatagaactttctattgatggaaacatttatactgtgcttccctgtatggtaaaaactagccacatgtgactaacaagtagttgaaatatggctactgcaaccaaggaactagtgcgactgaatttttaaaccttattgaactttaattaatgtaaatctaaatttaagtggccataggtggacactgtactgtacagttctagaattagcctgaagaaaatcggtcccctttttgtttcaaccatctctgccacctgatgaattgtaaccttggaccttcttactcatcatcaaaaagtctctagcaggaaggtttccaggaggggtgtaagatactagcctcactttgcaagtgagaaacttaaggcacaaagggagaaagctatttgcaacatcagagaagggtggccctagaatcttggagttgtaagccacaggctgtggggcttccagactccttctggacctattccagaccctgtccattttggaatgaggaagaatagtataggatacttatcatagtatcctcaacttgttttccctacaaaccggggacaaaggcctgaatctggctgctaaggagatcatgtataagaatgaatgtgttcatctaatttctcatcctgagaggaaagtgtttagagggggtagtataatttctggctccagggaaaaccccaagggttcggtgggactggggtcaggtgcaggggaagacaatccttgcttacctgaggaacttattcaggtctccatgcttcatgtattcaaagaccatgatgagggggtccccatcgccgcacactccatagaacttgacaatgtgctcatgctgcaggttggtgagcagctcggcctccctctggaaatccttccgggcagccagggtg

SEQ ID NO: 683529 - DNA, 640 bp, Homo sapiens
taggcatctcttcatctatatcctttggaatatccttgtaatcaaacagtaaatgtgtttccctgaggtttgtgagccattttattctagcaaattaatcaaacccaaagaggggrtcgtaggaaccccaaattaaatctgtcagtcagaagttccagaggctaggacttgtgactggtgtctgaaaggggggcagttttgggggctgagctctcaatcggtggggtgacactatctcatggtagatagtgtcagaatcgaattggtggatacccagctgttgtctgctgcagaactgattccttgcttgctgataggaagaaatctcatattttgaggccacagaagtcttctgggtagattgttgtggttttggtgtgaagcagaggaagaacacaggttgagttttttccaaatgggttcacattgggggtcctcaacctcaaatccatcaactccatcgctgaatttttatttatgtatttatttttatttttgaggtagagtctcactctctctcccaggctggagtgcagtggtaccatctcagctcattgtagccttcatctccgatgctcaagtgatccttctacctcagcctgccaaataagctgaaaccagaggcacacactagcactgt

SEQ ID NO: 683530 - DNA, 640 bp, Homo sapiens
taggcatctcttcatctatatcctttggaatatccttgtaatcaaacagtaaatgtgtttccctgaggtttgtgagccattttattctagcaaattaatcaaacccaaagaggggatcgtaggaaccccaamttaaatctgtcagtcagaagttccagaggctaggacttgtgactggtgtctgaaaggggggcagttttgggggctgagctctcaatcggtggggtgacactatctcatggtagatagtgtcagaatcgaattggtggatacccagctgttgtctgctgcagaactgattccttgcttgctgataggaagaaatctcatattttgaggccacagaagtcttctgggtagattgttgtggttttggtgtgaagcagaggaagaacacaggttgagttttttccaaatgggttcacattgggggtcctcaacctcaaatccatcaactccatcgctgaatttttatttatgtatttatttttatttttgaggtagagtctcactctctctcccaggctggagtgcagtggtaccatctcagctcattgtagccttcatctccgatgctcaagtgatccttctacctcagcctgccaaataagctgaaaccagaggcacacactagcactgt

SEQ ID NO: 683531 - DNA, 640 bp, Homo sapiens
taggcatctcttcatctatatcctttggaatatccttgtaatcaaacagtaaatgtgtttccctgaggtttgtgagccattttattctagcaaattaatcaaacccaaagaggggatcgtaggaaccccaaattaaatctgtcagtcagaagttccagaggctaggacttgtgactggtgtctgaaaggggggcagttttgggggctgagctctcaatcggtggggtgacactatctcatggtagatagtgtcagaatcgaattggtggatacccagctgktgtctgctgcagaactgattccttgcttgctgataggaagaaatctcatattttgaggccacagaagtcttctgggtagattgttgtggttttggtgtgaagcagaggaagaacacaggttgagttttttccaaatgggttcacattgggggtcctcaacctcaaatccatcaactccatcgctgaatttttatttatgtatttatttttatttttgaggtagagtctcactctctctcccaggctggagtgcagtggtaccatctcagctcattgtagccttcatctccgatgctcaagtgatccttctacctcagcctgccaaataagctgaaaccagaggcacacactagcactgt

SEQ ID NO: 683532 - DNA, 640 bp, Homo sapiens
taggcatctcttcatctatatcctttggaatatccttgtaatcaaacagtaaatgtgtttccctgaggtttgtgagccattttattctagcaaattaatcaaacccaaagaggggatcgtaggaaccccaaattaaatctgtcagtcagaagttccagaggctaggacttgtgactggtgtctgaaaggggggcagttttgggggctgagctctcaatcggtggggtgacactatctcatggtagatagtgtcagaatcgaattggtggatacccagctgttgtctgctgcagaactgattccttgcttgctgataggaagaaatctcatattttgaggccacagaagtcttctgggtagattgttgtggttttggtgtgaagcagaggaagaacacaggttgagttttttccaaatgggttcacattgggggtcctcaacctcaaatccatcaactccatcrctgaatttttatttatgtatttatttttatttttgaggtagagtctcactctctctcccaggctggagtgcagtggtaccatctcagctcattgtagccttcatctccgatgctcaagtgatccttctacctcagcctgccaaataagctgaaaccagaggcacacactagcactgt

SEQ ID NO: 683533 - DNA, 640 bp, Homo sapiens
taggcatctcttcatctatatcctttggaatatccttgtaatcaaacagtaaatgtgtttccctgaggtttgtgagccattttattctagcaaattaatcaaacccaaagaggggatcgtaggaaccccaaattaaatctgtcagtcagaagttccagaggctaggacttgtgactggtgtctgaaaggggggcagttttgggggctgagctctcaatcggtggggtgacactatctcatggtagatagtgtcagaatcgaattggtggatacccagctgttgtctgctgcagaactgattccttgcttgctgataggaagaaatctcatattttgaggccacagaagtcttctgggtagattgttgtggttttggtgtgaagcagaggaagaacacaggttgagttttttccaaatgggttcacattgggggtcctcaacctcaaatccatcaactccatcgctgaatttttatttatgtatttatttttatttttgaggtagagtctcactctctctcccaggctggagtgcagtggtaccatctcagctcattgyagccttcatctccgatgctcaagtgatccttctacctcagcctgccaaataagctgaaaccagaggcacacactagcactgt

SEQ ID NO: 683534 - DNA, 2333 bp, Homo sapiens
  misc_feature 843, 844, 845, 846, 847, 848, 849, 850, 851, 852, 853, 854,855, 856, 857, 858, 859, 860, 861, 862, 863, 864, 865, 866,867, 868, 869, 870, 871, 872, 873, 874, 875, 876, 877, 878,879, 880, 881, 882, 883, 884, 885, 886, 887, 888, 889: n = A,T,C or G
  misc_feature 890, 891, 892, 893, 894, 895, 896, 897, 898, 899, 900, 901,902, 903, 904, 905, 906, 907, 908, 909, 910, 911, 912, 913,914, 915, 916, 917, 918, 919, 920, 921, 922, 923, 924, 925,926, 927, 928, 929, 930, 931, 932, 933, 934, 935, 936: n = A,T,C or G
  misc_feature 937, 938, 939, 940, 941, 942, 960, 964, 970, 971, 972, 984,985, 991, 992, 993: n = A,T,C or G
tattttatttttgcagagactatgtctccctatatttcccaggcttgacttgaacttctgggctcaagcgatcctcctgccttggcatcccaaaatgctgggattataggcataagccactgtactcaggcaatattaaagtcttgatattagaagtgtctcagtgtactggaaagctttgtctaaattttgaaaaaatattaaaaaacacattggttttatttggccaatactgatttctttgctccatcattatttattggcattattagcctgttgactttcaatttctttacatccctttcactccatttcttttattttgtcccccaaatagaaattctttttttttttagatggattctcgctcttggctcttgtgacccaggctggagtgcagtggtgcagtctcatcactgtaatcttcatcttccaggttcaggcaattctcctgcctcagcctccacagtagcctagattacagtcatgcgctactacaccccgctaattttttgtattctttcttttttttttctttgagatgcagtttcgctcttgttgcccaggctggartacaatggcatgaactctgctcactgcaaattctgcctcccaggttcaagcgattctcctgcttcagcctcccaagttgctgggattagagagtgatccaccacacccgactaatttttgtattttagtagagacagggatttgccatgttggacaggctggtctggaacacctgatctcaagtcatctgcctgtcttggcctcccaaagtgctgggattacaggcatgagccactgtgcccggcttttttgtatttttatatttatttnnnnnnnnnnnnnnnnnnnnnnnnnnnnnnnnnnnnnnnnnnnnnnnnnnnnnnnnnnnnnnnnnnnnnnnnnnnnnnnnnnnnnnnnnnnnnnnnnnnnagaaggaatccccccttncttncatgtnnncttaacatgatnntcttgnnncttgtcagagaatcatcctatctgaaattgaaactatttaccacttcccttttttttccatagcacttaaaacttttttttttttttttttgagatggagtctcgctctgtcacccaggctggagtgcattggtgtgatcttggctcactgcaacctccgccccccaggttcaagtgattctcctgcctcagcctcccaagtagctgggattataggcatctgccaccatgcctggctaacatttttttttgtgtgtgtgtgttttagtagagacggggcttcaccatgttggccaggctggtcttgaactccttacctcaggtgatccaaaccacctcggactcccaaagtgttgggattacaggggtgagccaccacacccagccctggctaatttttgtatgtttagtggaggcaggttttcaccatattggccaggctgatctcgaacccctgacctcaagtgatctccctgcctcggcctcccaaagtgttgggattacaggcatgagccactgtgcccggactgctttttgacaaatcatctctgttcttacattatgtccactagaatgtaaacttgatgagagcaggagatattgtcaattttgttcaatgctatttatccctagagcctagaactgtaccatgcacatggtaaggagacaaatagttgttgaatgaatatattgagcagctgttctcagactttttggtttcagaaaatctttactctctgtttctttactcccgacctcaggtgatctgcccaccttggcctctcaaagtgctaggattataggagtgagccaaaacacccaccacccaaataatttttgtatggtagtaggcactgggttttgccatgttggccaggctgatcttgaacccccgaactcaagcgatcccccacctcagcctccaaaagtgctgagattacaggctgagccactgcacctgactaaataaaccaaaaactttagataagtgaatttggaggaaatacttataacagataaaatggacaaacagataattctaatttactgtctctccggcttaataaaatattagtcaataccctaagaagaaaggaacaaaatctaaaaattcaccattcacaaacacagatagtcagaaaacaaagtcaaaacctaagaacttgttgaccttatgtctcctctgaaatcagctcttgaatgtaatgtgttgaactagtattgacctcagattaggaaatttttaaaatattttttaaagttgcactttttggaatttaaaattaatccagattatgtaatatataacatttggaatttaccaatcaatactctatcat

SEQ ID NO: 683535 - DNA, 2121 bp, Homo sapiens
ctctttctctcacatcagatttattgttaagtgttaattcagtggttattttttccttgaaatttactgtgtttcttgaatggacacgtgtatctttcatcattttggaaagtttaaaccattaagtattcacatatttatctgctccatttattttattctagctctctatttaaatatatcacctcacacaactcattatttgtgataaccactcttctacatttccattttttcatctcactgtattgaactgtgctcatttgcttttctgatttagcttccagtgatctagctcttttgctatgtccaaaatattatcatactcatgctcctaatgtttaattttagtcataatatcatttatctttaaaatttgttattagtttcatgttaaaactgaaagattacattgtattgttttcatttggcagatattttcaaatttacttcttagaacataatacaaatacatgtttttcaatgtgtctgtaataataccagatctgcaatttttgtgacttttttcattatttttcctgctacttattgcaaaatgtgtcctgtttccttgcattctttattagctttgaaagcatgatgcttactgcttctgccaaaattacttggaaggattcctcaaatcctggaatgatgacttcctatatagaatcattttctttatctttactagttatctctgtagattactttaagaacgatataaattaaattagtagcttcctgctgtgacagccagcctgtggactatccttcaaaaccacaacttttcccatttctactatttaacctggtttattcattttcaggacagcaatccacacattttcccggaagtggagggacaagggtcagtaatcgtttgctttaaacatactctgatatttcaggccttcaaaacaatagcacaggttttaggaagtggatttccaagaaaacttcccatttttgcctgacatttctactactgccttctcacttatccaccattgagtttcttctggatcaaacaaccttctcgaaaaatatcagatactttagccctaattaattctcatactttcttttttttttgagacagagtcttgctctgttgcccaggctggagtgcattggtgtgatcttggctcaccacaacctctacttcctgggttcaagctattctcctgcctcagcctcccaagtagctgcgactataggcattcaccaccatgcccagcaaatttttgtatttttagtagacatggggtttcactatgttggccaggctggtctcaaacttctgacctcgtgatacacccacctcaacctcccaaagtgatttttgatcaagtaattccttacatacttaccattttcttcctttaagaagrttttataaaatatttatatatctattaatattatctgccgttacctgacagaagtagatatgcatcatttttttgatgcaggtggagacttaataattgagaaaaataatataatctataagcctgcagtaaagattaaaccaaaaaatcaagagtttgatcacctctgtagataaaggaaataaattgataaagttcaaaatttgtgctacacttgaaggaagtaatttgaaatcatttatcttataaaggctttataatccaagaattaaaaatactcacttttttccattttaggtattcacatcaaaaatctattacctaatatataaaactatcaagtatgttgattatgtttttagtatagtggtattgtttatccggatttaatcttgaagattaaaaataaaaataatgttaacttcagttaactgttcaggcaaattattttcttttttgataaaatgtatttgtgttgctacacactgacatggagctgcagattttctcattcaagttattaaaatgccaaccacctttgtaatgctagtagtcactgccaaatcaattttcattacatcggggggaaaatacaaatcttcttaaaaactgatataactgaaactgtacgtacattgtattatatcacaaaatacatgtaagtataatgaagaaaaatttgttaagaaagtttaccaaagcattctagttaagattacatttaggt

SEQ ID NO: 683536 - DNA, 2121 bp, Homo sapiens
ctctttctctcacatcagatttattgttaagtgttaattcagtggttattttttccttgaaatttactgtgtttcttgaatggacacgtgtatctttcatcattttggaaagtttaaaccattaagtattcacatatttatctgctccatttattttattctagctctctatttaaatatatcacctcacacaactcattatttgtgataaccactcttctacatttccattttttcatctcactgtattgaactgtgctcatttgcttttctgatttagcttccagtgatctagctcttttgctatgtccaaaatattatcatactcatgctcctaatgtttaattttagtcataatatcatttatctttaaaatttgttattagtttcatgttaaaactgaaagattacattgtattgttttcatttggcagatattttcaaatttacttcttagaacataatacaaatacatgtttttcaatgtgtctgtaataataccagatctgcaatttttgtgacttttttcattatttttcctgctacttattgcaaaatgtgtcctgtttccttgcattctttattagctttgaaagcatgatgcttactgcttctgccaaaattacttggaaggattcctcaaatcctggaatgatgacttcctatatagaatcattttctttatctttactagttatctctgtagattactttaagaacgatataaattaaattagtagcttcctgctgtgacagccagcctgtggactatccttcaaaaccacaacttttcccatttctactatttaacctggtttattcattttcaggacagcaatccacacattttcccggaagtggagggacaagggtcagtaatcgtttgctttaaacatactctgatatttcaggccttcaaaacaatagcacaggttttaggaagtggatttccaagaaaacttcccatttttgcctgacatttctactactgccttctcacttatccaccattgagtttcttctggatcaaacaaccttctcgaaaaatatcagatactttagccctaattaattctcatactttcttttttttttgagacagagtcttgctctgttgcccaggctggagtgcattggtgtgatcttggctcaccacaacctctacttcctgggttcaagctattctcctgcctcagcctcccaagtagctgcgactataggcattcaccaccatgcccagcaaatttttgtatttttagtagacatggggtttcactatgttggccaggctggtctcaaacttctgacctcgtgatacacccacctcaacctcccaaagtgatttttgatcaagtaattccttacatacttaccattttcttcctttaagaagattttataaaatatttatatatctattaatattatctgccgttacctgacagaagtagatatgcatcatttttttgatgcaggtggagacttaataattgagaaaaataatataatctataagcctgyagtaaagattaaaccaaaaaatcaagagtttgatcacctctgtagataaaggaaataaattgataaagttcaaaatttgtgctacacttgaaggaagtaatttgaaatcatttatcttataaaggctttataatccaagaattaaaaatactcacttttttccattttaggtattcacatcaaaaatctattacctaatatataaaactatcaagtatgttgattatgtttttagtatagtggtattgtttatccggatttaatcttgaagattaaaaataaaaataatgttaacttcagttaactgttcaggcaaattattttcttttttgataaaatgtatttgtgttgctacacactgacatggagctgcagattttctcattcaagttattaaaatgccaaccacctttgtaatgctagtagtcactgccaaatcaattttcattacatcggggggaaaatacaaatcttcttaaaaactgatataactgaaactgtacgtacattgtattatatcacaaaatacatgtaagtataatgaagaaaaatttgttaagaaagtttaccaaagcattctagttaagattacatttaggt

SEQ ID NO: 683537 - DNA, 1072 bp, Homo sapiens
tctcccattctctcttctctctctgtctctcagtctctgtgtgtttctttccctctctctgtcrgtttgtgtgtgtgtgcccgtgtgcgtgtgtgtccttggccgaatgtgccctgtgcaccacaaagctgtttctcgcatggcggcctgtctttggtgagcctgtttctgcctctctgcctgggtcatgagaccggttgtcaatccttttcgccgacgcgtttccgctttgggtgtgtgaaggcctggcccacgtgaggagattcttcggtcccggagcaattgaaatatccccatcctgagcggtctcttttctaggatcaagatgaacacactgcagacgaggacacgagccccacaggagctctttgtcccgccggagaccagcggacccacgtcagagaagatgcttgtatcttttcacggctcttctctgagaaatgaagccacaccacaatacggtctggaagaggaagccgggaatgggagatggcaacagtccctgtcactggaatgctggcctctctggacaagccacccttttggaaccccatcccttatgaccctggcagtggaacggtgatatatcccgcctggccgccggcgtctgccctgtcctccctcctgctctgcctcacctgtttctcaagtgcctcaatgcctctcgctgacgcccaatgtcttcaacaaagatgacttcccagtccgtcagggagacatttcttcgagatccgtgtcgtgattgtttctctctccaaacctgtttctgcttgattgggcaggtcgcatgacctgggagctcctggcttccattcttgtctcaggcagggaagcttccttcttctccacgtttcccctcatggtgggtggattgcctagactgagcgctaggcgaccatgactggccttgtcttccaggaaaggtagtgtcgcatttcctctgcacttcctgtctcattcatgagggacatcctctcctctgctcctgggtggactgactcccttgatcttctggctgaaacgaatgtaagggaaccaaagggactgggctggggctggggctggggctggg

SEQ ID NO: 683538 - DNA, 1072 bp, Homo sapiens
tctcccattctctcttctctctctgtctctcagtctctgtgtgtttctttccctctctctgtcagtttgtgtgtgtgtgcccgtgtgcgtgtgtgtccttggccgaatgtgccctgtgcaccacaaagctgtttctcgcatggcggcctgtctttggtgagcctgtttctgcctctctgcctgggtcatgagaccggttgtcaatccttttcgccgacgcgkttccgctttgggtgtgtgaaggcctggcccacgtgaggagattcttcggtcccggagcaattgaaatatccccatcctgagcggtctcttttctaggatcaagatgaacacactgcagacgaggacacgagccccacaggagctctttgtcccgccggagaccagcggacccacgtcagagaagatgcttgtatcttttcacggctcttctctgagaaatgaagccacaccacaatacggtctggaagaggaagccgggaatgggagatggcaacagtccctgtcactggaatgctggcctctctggacaagccacccttttggaaccccatcccttatgaccctggcagtggaacggtgatatatcccgcctggccgccggcgtctgccctgtcctccctcctgctctgcctcacctgtttctcaagtgcctcaatgcctctcgctgacgcccaatgtcttcaacaaagatgacttcccagtccgtcagggagacatttcttcgagatccgtgtcgtgattgtttctctctccaaacctgtttctgcttgattgggcaggtcgcatgacctgggagctcctggcttccattcttgtctcaggcagggaagcttccttcttctccacgtttcccctcatggtgggtggattgcctagactgagcgctaggcgaccatgactggccttgtcttccaggaaaggtagtgtcgcatttcctctgcacttcctgtctcattcatgagggacatcctctcctctgctcctgggtggactgactcccttgatcttctggctgaaacgaatgtaagggaaccaaagggactgggctggggctggggctggggctggg

SEQ ID NO: 683539 - DNA, 2328 bp, Homo sapiens
ccaaatgtgaaaggaagatgtgggcccagtcctggctgagcctcagaatcagaggttcccgggccccaccctagacctacagactcagaggctaggggtggggcctgggaatctattgtttcctgagctccttgggtgatcctgctgcacacctggtccacagaggtgttagggaactgctcggctcaaactggctcccagctgggcctcagagcagctcggcctctgattgaacttcactgacccacagggagcgcccttctcttgcagaatgctttggcagaatagtacacaggaagcgtgtgggctttttttttctttttttttwaaaaacagctttattgaaatataatttacatgatttattggagtaaatttacatataatttacatacacataattcactcaattcaataatgtttagtacatttacagagttatgcaaccatcatcacaatccagttgagaagattttcatcatccccaaaaggatccctcatgcttgcttacgtccatctctatgcacaccccatagctgaccacgcatctgctttctggctctttgttgttttattgttgtattttttgtcacccaggatggagtgcagtggcgtgatctctgctcactgcagcctcaacttcctgggctcaagcgatcctcccacctcagcctcccgagtaggtgggaccacaggcacacaccatcatgcctggctaatttttgtattttttgtagagatggggacttgtggtgatgcccaggctgatcttgaactcctgaactcaatggattcctcccgcctcagccttccaaagtgctgggattataggcatgagccacctcacctggcctgctttctgtctctccgaagatccagagctgtgttcattccagctggccctgtgacctcatgcaaattattgcccttccattactcctctgtatgagagggaataatcctaccctccttgtagggggttgtttgaatttcactaatgtgcacagtgtctgacgcacccgaggagctgggcacgtgggaggctggtacgcagggcacaggacataacacagatgcccaggtacggttggcacaggcctagcaaacattttaaagcactcactctgtgccagcttcttagattaagcatcttacatgcattacctactttaatcctcggtgaatgtgagtatcagtttcattttataactgaagaaacgggcactgagacgggaagtcacttttacaggctcacatagatgatagttgatagggctgggagtccatctgagagcctgtcctccctaaacatcatcctgtccccttcctgatgtgaatcaccaagcaagggacaacacaattcatagatccaggacaaggtttatggcacatacttctaaggggtgggacctggtatcatggacacggcattcaagagatagtacatggtatagagtctgtcacaaaacagacatcacatggtgcatgaagcatgacccaggggtaagaggcatgggatgccgctaaagggagacacacaggacaaagcaagaggaacgcagggcctgctacgtggcacagtcacagggtatgtgacactgggcatgacaaactctatgatgcagagacatggtacttaggatttgagacttgagctatggcaactgggcaggctcttggccacagtgggaccctttgtcatcagggatcctccattatgttggtgcctggggccccagcaagcaacagcaggaaccaagttcctcctcctcacaaaggcagtctgttttttttttcttttttttctttttttctccctcctcctccctgtctctttggatgccaaagagtgggaggggcccagcggagtggtggccagagtaaccccccgccatcccatcagctcagacaagggtcaaagcttggggccaagcccacggctcaggaagggtttgccaggcccccagatcccctctctctgagatagctgtgagcaccagtgttggctggggtgaaagccgggtaattttcctctaagctgtcctccctccgctcccctccctgcctgctggtgctggctgtgagcacgtctgcattccagagcttaggagagagagaacctgctgctgttaaggttgaggaagtagattgctaacagctgctgtaggaggggttggatgtgcggaagaggaggccgtggattgcaggctaacatttcttgagcctcttggcacctggcactcactacctcatcttgtctcatttgcataaagccccagtagcccggtgaggagacaggcccagagaggcaaagaacttgcctaaggt

SEQ ID NO: 683540 - DNA, 645 bp, Homo sapiens
agaactggaggttctaaagtcacagttatattttaatcccctttaatgagagaaaaaattgaaaaaactgaggtttactaagtattctacaatgataagaattattggccattaaaaccctaaaattgtaaggaataytgatgatgactgtggcagacagactctactatggtccttaatgatccacttctggtattcatgtccttatgtaatctacttcccccacgccctaaccttgagtgtgagctgaatgtagtgacttgctttcaaccaaaagaatatgacagaggtaatgagatgtcattttcatggttaggttacataagattgtgacttctgtcttgctactggacttgcttgcttgctgctttgggtgcagcaagttgccatgttggactccttcagcaagtaactgagagcagcctctagccaacagccagaaaggaactgaggctcttagtccaagaacccttaaggaattgaatacatctgacaaccacatcagggcacttgaaagtagatctttctcccgttgaatattcagatgagaccttactggcagccaacatcttgattacagcttcgtgagaaacacagaagcagaagatctagccaagccatgctgattcctgacccagagtaacc

SEQ ID NO: 683541 - DNA, 2154 bp, Homo sapiens
aggtcattttgaaacaagggaaaacaggtaatttaggatgattcccagatttccaggtcaagaaggtagaaatattttgatagtttgtaaactagaaaaggaataagttgamaatgaaattgaatacaaaatttccattctgaacacattgtgtttaggataaatatgcagcacataagacttaagccatttaagaaggttgtggaacatcccagtggaacattcagtaagaagagaccatttggaagagatctgagctgcaggtggaaatttggagatcataagtatatgtgtgtccattaaaaccatacatgtaaatggctttatagaatttggagattttaaatatgtgattccataaaactatattgcccaaggaaagtacatagcacaagaaatgagtagcactgagatctaagctctgcaaaacacccacttttaagggtcacacagaggaagagcaacctgagaaaaagacttgaaaacatacatagggaatcagtaggagaattctgaagtcctaaagggtaagaaaggagagttaaaaagtaactggtcaacaatgtcactccctgtggaaaaacagtaaggttgaaagataacatatgacagctgataatttggtggctatcacagaactgctttatgcagcctatttgttaggaattgatcttcattatataccaatacgaaactaattttcttttcatttattcagtatacgtttccatgtctctgtagtctgtggccaatatggcctcttaaaataaaatagatgctccaaaacaaagcccttttctttcgtcattgaaagtccttgttccctaaagcataggatcagctgaatttgggccatttccctttatcaagatagtcatcctgtaactctataaacatgtaaaattctcaaacattaattttggtaattcttaatttgacatacctttattttccttaaaacattattttatctcttccatagaaatggtagcacctttgtgttttactttgcaaccctcatcaaaagacttgtactttatagaagtctgcattcaccactgtctgatatgtggcctttacccctccttgcttgcagcttactcattttataagccaaaaaaaaaaaaaaaagaaaaggcgtaagatgaaagtgagcaagataaaagaggataataaaagaagtgaggctgaaaaaaggtggcttccagaactccttgaacaataacaggtcctcattcataataaggaggcactttgctggaagccttctttcaagaatgtagtacagtgcataaccttggaaagataaggtgaagtcaaactgctatagagaacagttattctcctccaaccccagtatataagacttaaacttttattacattcttccaatactcactggggaagtgacaacatctgttctgaaccaatgcaaagtttgcatcaaagaaataggaagggatgcaatttgaataaaaaagaagtaaaccaagcaagagccatgatcacgaacaaggtttatattagcagcatactctaccactttcaaaaaggtaagaataacacaatcgctttcagttacacctaaaccacattgtcctcacacagaacatctggtaatgttcagttgcaaattcccaaaggattttacacttattaaattcttattaaaattaatagcaggccttcaaggcatggcaatattataacagccctttatcaagaaaacattatcatctgaaataataaaactgtcttcaactgtaagaaaattaagtccaaatattacatacaggaaactagttaaatttattcctgaagaatgttattcctttccataccatattgacacactgattatttattcataatacaatgtcatgaacattacagatgaatacttctgtatgatgacaatagatattcccacaagctcaaaattctaattattcccattcttatattcctttatgctataattaagtggttttagtgactggaatatcattttgcatattgtgtcattgctgcagtctgataaatgccactgtttaaaaagtcaccctttatatgacctaaatctcttcctgagacatatcaacactgcctaattaagaaatttatgtataaattgaagttgttgtttaccttgat

SEQ ID NO: 683542 - DNA, 2154 bp, Homo sapiens
aggtcattttgaaacaagggaaaacaggtaatttaggatgattcccagatttccaggtcaagaaggtagaaatattttgatagtttgtaaactagaaaaggaataagttgaaaatgaaattgaatacaaaatttccattctgaacayattgtgtttaggataaatatgcagcacataagacttaagccatttaagaaggttgtggaacatcccagtggaacattcagtaagaagagaccatttggaagagatctgagctgcaggtggaaatttggagatcataagtatatgtgtgtccattaaaaccatacatgtaaatggctttatagaatttggagattttaaatatgtgattccataaaactatattgcccaaggaaagtacatagcacaagaaatgagtagcactgagatctaagctctgcaaaacacccacttttaagggtcacacagaggaagagcaacctgagaaaaagacttgaaaacatacatagggaatcagtaggagaattctgaagtcctaaagggtaagaaaggagagttaaaaagtaactggtcaacaatgtcactccctgtggaaaaacagtaaggttgaaagataacatatgacagctgataatttggtggctatcacagaactgctttatgcagcctatttgttaggaattgatcttcattatataccaatacgaaactaattttcttttcatttattcagtatacgtttccatgtctctgtagtctgtggccaatatggcctcttaaaataaaatagatgctccaaaacaaagcccttttctttcgtcattgaaagtccttgttccctaaagcataggatcagctgaatttgggccatttccctttatcaagatagtcatcctgtaactctataaacatgtaaaattctcaaacattaattttggtaattcttaatttgacatacctttattttccttaaaacattattttatctcttccatagaaatggtagcacctttgtgttttactttgcaaccctcatcaaaagacttgtactttatagaagtctgcattcaccactgtctgatatgtggcctttacccctccttgcttgcagcttactcattttataagccaaaaaaaaaaaaaaaagaaaaggcgtaagatgaaagtgagcaagataaaagaggataataaaagaagtgaggctgaaaaaaggtggcttccagaactccttgaacaataacaggtcctcattcataataaggaggcactttgctggaagccttctttcaagaatgtagtacagtgcataaccttggaaagataaggtgaagtcaaactgctatagagaacagttattctcctccaaccccagtatataagacttaaacttttattacattcttccaatactcactggggaagtgacaacatctgttctgaaccaatgcaaagtttgcatcaaagaaataggaagggatgcaatttgaataaaaaagaagtaaaccaagcaagagccatgatcacgaacaaggtttatattagcagcatactctaccactttcaaaaaggtaagaataacacaatcgctttcagttacacctaaaccacattgtcctcacacagaacatctggtaatgttcagttgcaaattcccaaaggattttacacttattaaattcttattaaaattaatagcaggccttcaaggcatggcaatattataacagccctttatcaagaaaacattatcatctgaaataataaaactgtcttcaactgtaagaaaattaagtccaaatattacatacaggaaactagttaaatttattcctgaagaatgttattcctttccataccatattgacacactgattatttattcataatacaatgtcatgaacattacagatgaatacttctgtatgatgacaatagatattcccacaagctcaaaattctaattattcccattcttatattcctttatgctataattaagtggttttagtgactggaatatcattttgcatattgtgtcattgctgcagtctgataaatgccactgtttaaaaagtcaccctttatatgacctaaatctcttcctgagacatatcaacactgcctaattaagaaatttatgtataaattgaagttgttgtttaccttgat

SEQ ID NO: 683543 - DNA, 1631 bp, Homo sapiens
ctgcatggctgtacagatgcacctgctgaatgactaggggtatctcttcatgactcctcttaaaacagtggctagtgtagtaacacatcaccttgaattgcttgccattcttgatgcctaaatccattctccctcactctcactgccctggaattgcacacgcaaattgagctctggtacttagtccgtgctttgacttctgtttcctagagagcttttaactaaatcatggtaagagcttttagtgttcggtgtctgttttcatcagaataatgtctcctggggtactttatcatctagtaagcattctagtgtcaaaaaagtaacaaaaattgactaaactcatttgcttagtcatttatatttcacttaacttatatagaaaaattccctgaatatttaaagctcaattttaatagatgtatttccattaaattttaaaatttttattctttttttgtattgatgtctaaacaactataaagtgaatttagacaaataaatttgcagaatctagagattttattgattactaagaaacattgccagtacagttgaccattgaatgacatgagtttgaactataagggtccactttacatgcagatcttctacctctgccatccctaagacagacaagcaagaccagccccttctcttcttcctcctccttagcctattcaacatgaagatgatgaagatgaagactttyatgaaacccacttatgcataatgaatagtcaatatattttctcttcattataattttcttaataacattttcttatctctagtttactttattgttaagaatacagtatgtaatacatatgcaaaatatgtgttagtcacctgtttatataccagtaaggcttctggtcaacagtagactattagtaaagtttttggtgagtcaaaaattatatatggcttttcgactgcatgggagggttggtgcccctaacctctgatttgttcaagtgtcaactgtaattctttcttcagttttatggtataataccaggaaaagaatcttggagtcaaggacatggaaatgaattctagttccatcatttactaattgtctgacattgattttcagtcaattcctatgtaaatgagcataataatgttgcatatctcaaggcataatagaaaaaatacatattattagcccattgtatataaaatcaccatgtaaatagttttgttcagagagtttacatttctctaagttaccaggtttacttcaccacctttcacccccagattgccacctatgctattttctctgaatcataaacactttcttcttcttcaattacagtattagaccacaatatggaaatctggccataatatccaaatatcatgttgatatccatgttatctggtctaagtcactgagcctgttcgtgtttttatttcctcaagtacaaaatgtaaatgagaacacttgacctctctctattgtttaatgatctttgaaaacaatgaggcaatcatgaaaaaaagtcatttttcaaacactttggagagtgtatgccattagtcaaattattgttattcttctacttattttgcaacattaaaaaacagcaaacacgaagaaataaaaaaacacacctgac

SEQ ID NO: 683544 - DNA, 580 bp, Homo sapiens
gacaccctctcagagagcattttctggatctggcaagactagaacttgaattcttcaggtttgccacagcagcagcaatgccaatgtataaagggaattaagagtgctcacgccagccccctgggacaggacagtcaggaggactgtgtggacacgtggtcctccttatcttttgtgaggctgaggcaagagaacaaatgcaggcttacctgccatttacccagatatttaaaagttataaatcaggagaaaacattttgaagtcaaatatgttttatcctctcgccatgataaatatacattcataatgacctaaaagatccaggctaatttaaaattcttagatgccttagaatttcctattataatagaatgtggctgacacagttcacaacgctgcttgttctrtctgccacccccagctccatcctatgccaggagtgctgtgtgtgtgtgtgtgtgtgtaagtgtgtgtgtgtgtgtgtgtaagtgtgtatgtggacccctccacctgcaaccccaactctgtccacagccctctcccttcaagcagccatcttgcaggcacgactcaggctta

SEQ ID NO: 683545 - DNA, 580 bp, Homo sapiens
gacaccctctcagagagcattttctggatctggcaagactagaacttgaattcttcaggtttgccacagcagcagcaatgccaatgtataaagggaattaagagtgctcacgccagccccctgggacaggacagtcaggaggactgtgtggacacgtggtcctccttatcttttgtgaggctgaggcaagagaacaaatgcaggcttacctgccatttacccagatatttaaaagttataaatcaggagaaaacattttgaagtcaaatatgttttatcctctcgccatgataaatatacattcataatgacctaaaagatccaggctaatttaaaattcttagatgccttagaatttcctattataatagaatgtggctgacacagttcacaacgctgcttgttctgtctgccacccccagctccatcctrtgccaggagtgctgtgtgtgtgtgtgtgtgtgtaagtgtgtgtgtgtgtgtgtgtaagtgtgtatgtggacccctccacctgcaaccccaactctgtccacagccctctcccttcaagcagccatcttgcaggcacgactcaggctta

SEQ ID NO: 683546 - DNA, 580 bp, Homo sapiens
gacaccctctcagagagcattttctggatctggcaagactagaacttgaattcttcaggtttgccacagcagcagcaatgccaatgtataaagggaattaagagtgctcacgccagccccctgggacaggacagtcaggaggactgtgtggacacgtggtcctccttatcttttgtgaggctgaggcaagagaacaaatgcaggcttacctgccatttacccagatatttaaaagttataaatcaggagaaaacattttgaagtcaaatatgttttatcctctcgccatgataaatatacattcataatgacctaaaagatccaggctaatttaaaattcttagatgccttagaatttcctattataatagaatgtggctgacacagttcacaacgctgcttgttctgtctgccacccccagctccatcctatgccaggagtgctgtgtgtgtgtgtgtgtgtgtragtgtgtgtgtgtgtgtgtgtaagtgtgtatgtggacccctccacctgcaaccccaactctgtccacagccctctcccttcaagcagccatcttgcaggcacgactcaggctta

SEQ ID NO: 683547 - DNA, 580 bp, Homo sapiens
gacaccctctcagagagcattttctggatctggcaagactagaacttgaattcttcaggtttgccacagcagcagcaatgccaatgtataaagggaattaagagtgctcacgccagccccctgggacaggacagtcaggaggactgtgtggacacgtggtcctccttatcttttgtgaggctgaggcaagagaacaaatgcaggcttacctgccatttacccagatatttaaaagttataaatcaggagaaaacattttgaagtcaaatatgttttatcctctcgccatgataaatatacattcataatgacctaaaagatccaggctaatttaaaattcttagatgccttagaatttcctattataatagaatgtggctgacacagttcacaacgctgcttgttctgtctgccacccccagctccatcctatgccaggagtgctgtgtgtgtgtgtgtgtgtgtawgtgtgtgtgtgtgtgtgtgtaagtgtgtatgtggacccctccacctgcaaccccaactctgtccacagccctctcccttcaagcagccatcttgcaggcacgactcaggctta

SEQ ID NO: 683548 - DNA, 645 bp, Homo sapiens
tattgaccctggaagggtgttatgagtagataaggaagcgcaatataagctgtctgccttactgctatatctgtgtttagtcataccatagttatatcttttagaatgtgaactgctaaaaagtaagactcctctatgtgcatagaggggtgggcataactgaaggcttaaataaataccctttaactatgataatagtgctttgtagtcaattatattgggtagctataaatacagaatggcaaatcaatcttttgagaaagaatttacaagtgtatatgactagtttaactttgattggtagccaatggatcagctatgaaacttttttttctattggttttctattcacatctcacgttatcaaagatttttttttagttcatttgcttaattttaattttacttttttatttcaatagatttttggggaacaggtggtatttggttaaatgaataagttctttagtggtgatttctgaggttttggtgtayccatcacctgagcagtgtacactgtaccccacgtgtagtcttttatccctcacccctctcctaccctttcccctgagtccccaaagtccattgtatcactattatgctgtggcgtcctcatagcctagcttctacttatgagtgagaaca

SEQ ID NO: 683549 - DNA, 606 bp, Homo sapiens
tgccagccaacaaggctcttcctgtggaggagccaacctgtcatatcctgtctgcttatataaaacttggaatgtcaggccctctattttagagtgaagggtattggtgaagcttcaaattgtcggagaaatccatgctagttagtatttgtattatatttgaaaacataattttgatatatttgagtaaaatcaagcttgatgaatgaataaccaataccccattaaaagaagckgtaattccgggtgtggaagataactaaaaatacaaaacaaaattgtgatttgtgttgttaggaaggattcctgtgtaaaaagaacagaaaaccagaaagtgttattggaaattagagacataattatcagaatttaaaaatctgagtaaccagattaataaaatgtcatgttttagatccagttgatgatctgaaacttcagattagagaaaaatttcaaatgtgcagcaatagagatgaaaatacagaatgggaaagatgtgatggaaagagaggtgctccagtatttctctgaaagagtgttaaaagaatacaggaaacaataatcaaaaggaggaatgattaacaaaaacagataaatattttcaga

SEQ ID NO: 683550 - DNA, 617 bp, Homo sapiens
ccaggctggagtgcagtggtgctatctcggctcactgcaagctccgcctcctggattcatgccattctccagcctcagcctccagagtagctgggactacaggcgcccgccaccacgcccggctaatttttttgtatttttagtagagacggggtttcaccgtgttagccactatggtttcgatctcctgaccgcttgatctgcccgcctcggcctcccaaagtgctgggattacaggcgtgagccaccgcgcccggccttaagtgtttttaatagatcattgcttgttttgtcatgtagcataagtcaattaattttccataataattgatagatgtcaccttataggtgttgcattaaatcagctctagacttgcaacaagttgatctgcttttgtttatcagcagtaacacaatgaagagattgagmggggaaatcaaagacaccttgaacaccaaactaagatctaaagtttgagaactagtggattttttaaaaggcaatttaattaatttcactttagcaccacctagtggaaagtttgaagaaataaattggatttttttctgtctttcaaacaaggaaaaatgtaaagtgtcctgagttcattttaaag

SEQ ID NO: 683551 - DNA, 1225 bp, Homo sapiens
tttgcaattaactcactagaaaagtaaatcacagggtgcctggaatagtaagtgcagcaaacaccagacttcagccaagcagactgggactgaatccagagtgtgactcaggttgctgggctggcacagaaaggaggcaggaggccggaggctggctgctcctggaggctggctgctcctggaggctggacaaaggcagtcagtgaggaagaaggagaggggaatagtggttgaaactgagctgagcgagcaccttttgtaggttcacagactatgttttgcattctttgtctcttcaattgcacacaactcttttaggtcaatgttatgactccccatgttacaaaaaaagaaactgaagctcagagacaaagttacttcccaacatccttgcaccgggtctgcactcagtcctcaggaaagacttccagggttaggagggagaaaaaagggaatagagacacgaagaggttctgttctggttgctctagctggctggtggctttttatagaagtcttttttttttttttaatcattttgcctcttttatttagccgagaatatagtagtggtccccaaaagattcagtgaataggtgaattttcatttgctaatatgattcatcagaataatataagctagcattagcaagcactgagtacatgtctgacactgtgttgaatgctttagatacrtttccatctcatttcattctttcacagtttataggaggtactattttgtttgtttgttgatttattttattttactttaagttctgagatacatgtgctgaacgtgcaggtttgttacataggtatacacgtgccatggtgatttgctgcacctttcaacccatcatctaggttttaagccccacatgtattaggtatttgtcctaatgctctccctccccttattatagatgtcttaagtgaaggcttgagtgtctacctctccctctgaggggttcctgcccatctgctgataaaagggttcttttctgtagaggagttctactggggaccatgtgcaggaccaacacactcagtcctatgacaacatccacatctgaggatctgcagtttataagtcaaaaggtatcttcttgcccacagagcctaaaactggcttctttctgcgtctcacagcttcctgaaagatcctgaaatgtgagccaggctgacagctgtgctgacgtacagcaagtgtggggctgggatt

SEQ ID NO: 683552 - DNA, 1225 bp, Homo sapiens
tttgcaattaactcactagaaaagtaaatcacagggtgcctggaatagtaagtgcagcaaacaccagacttcagccaagcagactgggactgaatccagagtgtgactcaggttgctgggctggcacagaaaggaggcaggaggccggaggctggctgctcctggaggctggctgctcctggaggctggacaaaggcagtcagtgaggaagaaggagaggggaatagtggttgaaactgagctgagcgagcaccttttgtaggttcacagactatgttttgcattctttgtctcttcaattgcacacaactcttttaggtcaatgttatgactccccatgttacaaaaaaagaaactgaagctcagagacaaagttacttcccaacatccttgcaccgggtctgcactcagtcctcaggaaagacttccagggttaggagggagaaaaaagggaatagagacacgaagaggttctgttctggttgctctagctggctggtggctttttatagaagtcttttttttttttttaatcattttgcctcttttatttagccgagaatatagtagtggtccccaaaagattcagtgaataggtgaattttcatttgctaatatgattcatcagaataatataagctagcattagcaagcactgagtacatgtctgacactgtgttgaatgctttagatacgtttccatctcatttcattctttcacagtttataggaggtactattttgtttgtttgttgwtttattttattttactttaagttctgagatacatgtgctgaacgtgcaggtttgttacataggtatacacgtgccatggtgatttgctgcacctttcaacccatcatctaggttttaagccccacatgtattaggtatttgtcctaatgctctccctccccttattatagatgtcttaagtgaaggcttgagtgtctacctctccctctgaggggttcctgcccatctgctgataaaagggttcttttctgtagaggagttctactggggaccatgtgcaggaccaacacactcagtcctatgacaacatccacatctgaggatctgcagtttataagtcaaaaggtatcttcttgcccacagagcctaaaactggcttctttctgcgtctcacagcttcctgaaagatcctgaaatgtgagccaggctgacagctgtgctgacgtacagcaagtgtggggctgggatt

SEQ ID NO: 683553 - DNA, 1184 bp, Homo sapiens
atttcagggaatttaaacacgaaagtcagttcattaagtgcttagcaaaatgtagtttatttgtatctttttaggaccctccaaataaatcacttcataaattttaagttcacaaatcaaatcaagtctatttatttatttatatttgcttagaaaatagatttctagtgctctgatagcaaaaccagctacttttactagtgtccatgttaaatatgagaacatccatggactgaagctcttatgggacaaattcccacctgtccaagtaggcatcatcaggttttattgacscactggaaagagactgtttatggtgcaagacacagcttggtggatggaccaggaaaacttgtgctttggcaccatgtaatcccagctctctagtagccatttcattatcagtgaaccagggaccataatactttgttcaccgcattgttgggaggactaaccctgtgagtgtaagtgccttgtgcagagtaggagatcaggaaatattagtatccttccttcttgggtacaagcaggacaggaaaacagaacttaattcttccttcccagcacacataccccatttctcctctggtgtgcacattttcccctaggaacttgacctccaggaacctggttttgacaaatcaacaaatacttattgggcacctgctgtatggctgtccctgtgccaagcactagggatggatctcgcagtctagaggagaagaagggtgacccaataaacaaattcattacatattggggtctttgcatagatatctagtaggtcatcaagtggtacagatttagttcttccctgaggagtggggataaaaatgccttagagggtagatgctgcaggaacagtctccaggtggagggaggttgaggagcagagggaattttactgctctgtgacttgttagatgaccccacttctctggctgagcctgtggtctttaatttccactccaaataagccagtcaccagcatgttctccctggacaagtgaataacaactttttgtcgtgaaaataattctcaggggcctgaggaatggggaaaaaaatatcagtccctatttgtggtgctcatcttttcatttattagtatcgcctttccttgggacattaggggagaagtattctaactcttttaaagtcatgttgttctttggatcttaggg

SEQ ID NO: 683554 - DNA, 590 bp, Homo sapiens
tgtggcagtccaaaatgtctccaaacattgctctatgaccccctggatagcaaaattgctcatgttaagaaccaatgccctagcatgaaagtagaagcaacgttcactcacgtttgcccagaggcaccaagtcttaagggagggcatgtccaacccagcatgcccctttaagcctctgtgcccgcctcacaagtcmcactgtccttccacaggtacagtcctaaacccctcaccttgaccttcttatcccacaattctgtactcattcactaattaagcaaacttctgctgcatgcctgttgcatgcctggatcggtgctggattctgagacagcagcggtgagctctctaccctaccactgattgcccttctccttctctgatcctgaggttgaaggtgtgcttctggcttcctggtgcctatgagaaagctcctttccctgctgactccccaccctggctttaaattcccaggttcagaccctagcctggaccatctgttgggtgcagctgttgcctatgagccttcatctctcattacttcttttccctattgaatctacttgggctcctgtcctgaaaattgggta

SEQ ID NO: 683555 - DNA, 1508 bp, Homo sapiens
agacctaatctgtctctatccctagattcttgactccattcaaatgagtacccctctgccattaagtagttttataaatccttaaatagcttgccctagctttcagcctaagatcaataataatggtgattgccatttttgtgcctattatatgtgaaacactattctagacacttgacatacatatatttgcattagctctcatctgatatcagtctggtaagatagatattaccctaattttataaatgaagaaactgaatgtcagaaagcttagatgatttactcaagactactgagccagttcatgatggagctagggttcaatcctaggatgatggtctggatgcaaaaccttctgttccactggacctgttgctgaattgaaacttgtaagatcaggacacaaaggctgttgatgatctggaatgctcagatgctgatcttccctagcatgggcagttgcttcagtaataccaaagtattaccttctctttcttctctcttttttaacctcatacatatgtacccttttaaaaaattcatggaagaatacattcaggttgttaaaaaattcaaataaagtgaaagtaattagaataaattatacatcctccacacagccccaatctcctcccaagagagctaatcactttcagacactgatgttgactgaattcatttaatctaaagacttagatctcttctcctctatgaagtttctttctgtctatcatttctctttattccctctgttctctgcctctgaaacttctacccagcattctttgtgccacagactgctcgagacactgagcacagcctatataactatatttaaaattgtataaaattagatgcacaggattacaaaggaaaccaattttattaaaatgcagttatctaaatattaaaaagtataatataggaatacaattatgaatgcatcaataacaaaatctagcaacgtatttgatagatatgttaattctgcactactgatgagcacagattgtattttgagatacttgcagcaataatactatcatgaaaatacctgtaatttttgctgatagcaaagtgacatgtactgctaatactactgtgatttttgsctacatccatatttgggggagttattaaattttagttagagtatattttaaaacatgtaatttcttttttctatccaaaggctccttgaaatctatccatggcctcattttagtattactgagcttttaggatttccactatcttcaatatttcttgtactttctctaatattttctagtcttttacactgtgttctaaggttaactttctatttagatattttactccaatggtaaagaaaatttattatattacattataatcattgttttctacctagccctgttataattttatgagtaaattacatataaatgcattcaatcactcaaagaaaagcttccaaaggaaagagaaattgaagtaaggttgatgtggatttcttgaaagga

SEQ ID NO: 683556 - DNA, 525 bp, Homo sapiens
caaaaacttcaactttatcacctctatttttctaaggaaataagccattcttaataacactatgttcccctaagaagtctakatattaagtacatatatatagatggatgaatttaaaacatctaaatattaaagaaataactctgatttctaatttagaggagagagaacattttttaaaggagaagttacaataataagtaagataaaaattacctttttattttttataaaagagaatctagtgttgacttcctttttcttccctactttaggatagaaaattttctagaaaactttaaaaactaattttctaatataccataagaacactatgcatggtatgaaagtgacagcaaattgatatcttgcagtacttccttttgacagtaagacatgtataggataagtcaatagacagcaagtatcttgtttataagcaaattctatttgttttgtaaaatgaaaaatataattattgataccaatttttttttcttatcactaaaactttagcaatgcata

SEQ ID NO: 683557 - DNA, 1272 bp, Homo sapiens
aaacctgctaggaactgattaatcaaatagcctctttactcatagttaaatcagggcatataccacagctggctgcagacccatgcctgcatcccaaagacacggagttcgcttttgcttcatttaagcctttcgtgtcaattccaatagcaaaggtatttgctaaagaggtttggccggtatggaagtttttgttatcctaatcaatccattaggaaataagcaaccaacttatttgacgtagtattttctactcgccttgtgagaaattggtgagtcattgtcccatccacatttctatttgtggaggtgaaaaaaattccatactcctacaccacccccaaaaccacggaaatcacgggaagtgctgctcccccacattttcacaggttaatctttataaagaaaaatttgcatgatttccatgttagtgtttcgtggattataaagaagctagtcacctttgtcttctataacagcgagccacgtagaattctgtgagtgtaagatggagaggaaaaaggaagagagaattgaatggccttttgtttcttaaaaaaaaggaaaccaacaaagacttgtttccttttccctttttgtcaaatgaaagctcttcagagatgattgagctcttgtatgctactgtttgaatcctgtaggatggttttctgtgtagctttgctctaagtacaccaaaggacgcagatacttctgaaggttaaaactactttgtggcgcataggagacctgtctgaagatttctgatccttgagagaagaacatcatactctcctcttggttagagcttgctttaaggaaacacatttggatgccagtttatcaatttgctgtagaaggggagggccagggacatttgggaacaggtaaatcaagttccagaagtatctgaagaaaagtgacacccagagaatgtacaatcccattttctgatggttcaggcttgtttgccactgagatagccttgacaacggaatgagggctgagtttttatttctagtcctttcactgtccctgaccctccctggctgtctcactttggtcttcatcttacccctggaaaacttttttttttttttaattttaaaatgttttatttcatagctcataaaaaagtttgcatgaaatagactcaagtaaatagaaaggcagytttcaatcacaaatcagatagtagtttttcaaactctactgtggaagcatatttaacgcactcatttgaatgttacgcataaataattttaactatgcagt

SEQ ID NO: 683558 - DNA, 1107 bp, Homo sapiens
tgctatcatcacaaccacaataacagcacaaacaccagcttttagagcctgcattgaaaattcaggtgcatttctatcaacataataaattaaagtttgaccaggatccagatccagttgttctccatttactctcaggtccattttcttagaagaatgaaacaaggattcacctttaacatctttttcaaaataatgagccacatcagctatgtccacatcattctgcattttggttctgaaaactatggctacaacatagttggagacctcaagaagaatagatgctggatttgtctatctatttctccaaatttactggctttttaatatcagttcaatgctacaagaaatatcaaatccttacatttctaaccttaatgaaagacatatcaccacagtctttctaataatcaccatttctaaaagcaagatgtttagaaaaaaggttggaggctctttctggaggatctgcttggtgaatcagggtgtaacagaatgattttcataagatcattctaatcatgtcaraacattttagaagcttgagaacagataataaaagtaacctctctctttgaccaggtgtacaagcacaaaatgtcttcagctttaaagagtactgttatgatttttgaaagatcttctcattgatgtgaaattttgttgagtataacatggtgatattttaagtataatgatgtatctgctctatacatagcacccagcctgagtaatacactctctccacattagcttcttcttttttttttttttttttttttttttttttgagacggagtctcgctctgttgcccaggctggagtgcagtgacgtgatctcggctcactgcaagctctgcctcccgcgttcacgccattctcctgcctcagcctcccgagtagctgggactacaggcgcccgccaccgtgcctggctaattttttattttttttttaaattagagacggggtttcaccgcgttagccaggatggtctcgatctcctgacctcgtgatctgcccgtcttggccttccaaagtgctgggattacaggcatgagccaccacacccggcccacattggcttcttaagtgactttagca

SEQ ID NO: 683559 - DNA, 1107 bp, Homo sapiens
tgctatcatcacaaccacaataacagcacaaacaccagcttttagagcctgcattgaaaattcaggtgcatttctatcaacataataaattaaagtttgaccaggatccagatccagttgttctccatttactctcaggtccattttcttagaagaatgaaacaaggattcacctttaacatctttttcaaaataatgagccacatcagctatgtccacatcattctgcattttggttctgaaaactatggctacaacatagttggagacctcaagaagaatagatgctggatttgtctatctatttctccaaatttactggctttttaatatcagttcaatgctacaagaaatatcaaatccttacatttctaaccttaatgaaagacatatcaccacagtctttctaataatcaccatttctaaaagcaagatgtttagaaaaaaggttggaggctctttctggaggatctgcttggtgaatcagggtgtaacagaatgattttcataagatcattctaatcatgtcagaacattttagaagcttgagaacagataataaaagtaacctctctctttgaccaggtgtacaagcacaaaatgtcttcagctttaaagagtactgttatgatttttgaaagatcttctcattgatgtgaaattttgttgagtataacatggtgatattttaagtataatgatgtatctgctctatacatagcacccagcctgagtaatacactctctccacattagcttcttcttttttttttttttttttttttttttttttgagacggagtctcgctctgttgcccaggctggagtgcagtgacgtgatctcggctcactgcaagctctgcctcccgcgttcacgccattctcctgcctcagcctcccgagtagctgggactacaggcgcccgccaccgtgcctggctaattttttatkttttttttaaattagagacggggtttcaccgcgttagccaggatggtctcgatctcctgacctcgtgatctgcccgtcttggccttccaaagtgctgggattacaggcatgagccaccacacccggcccacattggcttcttaagtgactttagca

SEQ ID NO: 683560 - DNA, 1107 bp, Homo sapiens
tgctatcatcacaaccacaataacagcacaaacaccagcttttagagcctgcattgaaaattcaggtgcatttctatcaacataataaattaaagtttgaccaggatccagatccagttgttctccatttactctcaggtccattttcttagaagaatgaaacaaggattcacctttaacatctttttcaaaataatgagccacatcagctatgtccacatcattctgcattttggttctgaaaactatggctacaacatagttggagacctcaagaagaatagatgctggatttgtctatctatttctccaaatttactggctttttaatatcagttcaatgctacaagaaatatcaaatccttacatttctaaccttaatgaaagacatatcaccacagtctttctaataatcaccatttctaaaagcaagatgtttagaaaaaaggttggaggctctttctggaggatctgcttggtgaatcagggtgtaacagaatgattttcataagatcattctaatcatgtcagaacattttagaagcttgagaacagataataaaagtaacctctctctttgaccaggtgtacaagcacaaaatgtcttcagctttaaagagtactgttatgatttttgaaagatcttctcattgatgtgaaattttgttgagtataacatggtgatattttaagtataatgatgtatctgctctatacatagcacccagcctgagtaatacactctctccacattagcttcttcttttttttttttttttttttttttttttttgagacggagtctcgctctgttgcccaggctggagtgcagtgacgtgatctcggctcactgcaagctctgcctcccgcgttcacgccattctcctgcctcagcctcccgagtagctgggactacaggcgcccgccaccgtgcctggctaattttttattttttttttaaattagagacggggtttcaccgcgttagccaggatggtctcgatctcctgacctcgtgatctgcccgtcttggccttccaaagtgctgggattacaggcrtgagccaccacacccggcccacattggcttcttaagtgactttagca

SEQ ID NO: 683561 - DNA, 958 bp, Homo sapiens
tgctactcttctcactaaattatactgtttggggaaacgtagttattatttttgtgttaaaatgcaatgcacttattatttttaaatgaattaataaacatttttaaatgttctcagttttcatttataaggtgataaatactcatagataaacccacataaacaaaacctctttgggattctcaataattctgaagaatgtaaaagaagcctgaaatcaacaagtttgggaactgctgctctaaattttcaacataaatccttggttacaaatgttgacacttaccagaaatacttaacagtcactttaaagactaagggggtgttgtgccccattttttctttgttatgtagatgttcaagcaatataaaagacttgtcaaccatttttcaatgccatgttccttggtgcctcagaaatggctccagagtttcaaggaagacacttcccacgtgtcccaaggtaaggttctcgtggactttttattccaaggagttgttggctaatcgtatggaaacttaatgctgaacccagcaccattaaatgcrggagaggctttatttatatccgaatattattatatcacacagttttggaagagatcagggaaatttgtgagcaatttaaatatactaatattttatcctgatggactactcagtctagaacttaaggtaatttggtaaacaactaaaacaataaccacaaaatgtttttctgacattcagatgagcactcttcctctacaaaaccaacatacaaatcaacaagccgaaaagataaaaggtatcccacatgggctctgaattatgaataactcacagagaaataggatgctaattcataatcatgtaagtcaaccaaattcccaccaagcatctagctactgatagctcactacacatcccatcttcatgacatctcggcataatgctttcacaattagcccagtctcga

SEQ ID NO: 683562 - DNA, 609 bp, Homo sapiens
agaaacagaaaaagcacagcaaaaatactgtataaaagataaaaagtggtacatctgtgtagggcagcttcactataatcttatgggaccaccgttgtcatgtgtagtttgtcattggctcacgtatctatatgcaaggcaaggctatattttcataactctatttcgtgatgtcattcaggtggctctctgtttctgaccacaacaaatcaaaacacagtcatgacggatgattctttccttgttagaaggattcttatagggaaactatagttcttagtgcttcagcttccagggttcttccaccttacctgtacagaatgcatactggcatttagcagtctttttctgacagctgacttcctttctctcaaagcattcagaattctatttgcatgttytaactgcagttagaatgcttccatcaatttccacacagtccctttggtgaattttacagtttctctctgagtctgactatacataaaggatggtaacagtctactaaggtctccctgacacgagattttttgaccaatggaagtgtattaattctcacaatactacttaatgtgtgttacaagtgtccatgatctatttagcatttag

SEQ ID NO: 683563 - DNA, 646 bp, Homo sapiens
gatcaatcagtgaattgatttttctccctgatttaagtccttcctttatacaacaccaagcgtctccacttctcttctagcattacatctctcttttcttatcagtcttcattttctccttcccctctttttcttccacttcccactgtctgcttttccttctctaattttctttccctctgttcttaatggcattcaagataagggtatcaactgagctagtgccaaaaagttaagttcccacagatcttttggtatttctctgatgcccatttaaggctaagtttagcttagagagtgcaaggttataaaatgctcttcttaacggcctcacaagtgcagaaatrtgtgtgtgtgtgtgtgtgtgcctgagggtacatgtgagtctgacatctgcagttggtaacattctctctctgcttattgtaattttcattctactaaatcttcagagtgcaagaaaaagggagacattttatttctgcaaaataaatatcagcttagtaattagggtaattggtcatgaattatggagtttaaataacattagtataagatttaatcatgatatatctcaggaattagtctgatactgtttttcccactgtagtaagctatgttttttcattctacattcatttgactg

SEQ ID NO: 683564 - DNA, 1337 bp, Homo sapiens
tggaaaacgtaaacaagatattctatgtgtgattagagaatacgcaacacaaggagcaagcagaacattcttctctggaatctgacatgatggctgctgtatttttacagggagcattgatttcagatatatgtgaaatatgctaaaccgaaaagcagagacagaagagacagagagaggttagatagagaatatgatatctagaagatagccagctaagcaaaatctagccttctaagccctccttaattcctcttaaatcccccatcccaactctattaactaagtagttatcactcttttaaagagttcgcgcctcccctgttgtggttctcagggatccgccccagctcttaactctcctccscgtcccacgcactgggatggccccatgcccaaagtccttccccgcaggcggtatttccagcgaggtggactcaatgaccttccagggatttggggtagaaagcgaatatcccacagtcgacgggagttactctggaaggcgagccggggaggctgcaccagtgggtaaccagccaccgcccaccacccacccaccccgggggtggggccagcccttttcttcagtactcgggatagacctggagctccgagaatttccctggcccgggggttccagacttttcagccccaatcatgcataaaaagggttcaccgatcttggggagccacagagcctgggctgcaggcacctccctgccagctctcccgctcctcgcaccgccgcccgacctgccttctgagcccggtgaactgcgccgcgccccccgctgtcccccgcgctccccggctactgcgggcggcgctgctgctcctgctcctggtagcctccggccggcgagcggcagatgggtcccggcgccctggggtctccggagcgggacacggctggggtagcaccccgcgccaacagtcccgctcacccagcgagtctcttcttccctaggagtatgggtggcccatgaactgccttgccagtgcttgcagaccctgcagggaattcaccccaagaatatccgaagtgtgaacgtgaagtcccctggaccccactgcacccaaaccgaagtcatataagtccctccccgtgactttttcttttctcagaccatgagaattaaatctgtagtcatttttctaattagtggctggatccaaaagaataataaaatatatctaatctcccccaagaaagcccaaaggttacatccaggacttggtccctaggttaagccctaaggtgctggggagagtggaatgctatcttcctaattatttacatatcaaaagagatgaagcccacagaacctaaagac

SEQ ID NO: 683565 - DNA, 1768 bp, Homo sapiens
aggtggttttagctgggagtaaccatagcatttgctatccaaccaatatttaaactctattttaacggaaatgataaacttgttgacctaaattgatctagcattgcctctatctgaaatatagtgagtcaactgtaacattgagagaagaaaacattttccctttaatcatgataatactttcatatttttaaagaacagtaaaattatattaaggatccagatgctgttttaagaaaacttaattacttcttggatgttagaaatttcatctggcaaatatggtgccctcaaaaatctcatgcatgagtaagtcagttgtcgtaggctactactaccttctggctataggagaatgtgcaatactcatatgcattacttgtcgtgtgtgtgtacatacaaaatctggtttatgaaaatatacattgaaatttcattgtatgtacatacacacacataaatgcataaaacacattttggagatgatacctaagagtagaatttctagcaggtcacaaagatgaatatattcagctgtgttcagctttaataggtactgccaaatagttttccaatgtatttttacatgtggatgagcagtctgagagaattcccattctgaatttgcatgccaccacttttcatggccaaactatttctttgatgtgctagatatgtagtggtattttgttgtggtttatatttgcatgttccttatgactcatgcatttgaccaacccgttattttactattgcccactggatagctcattagtaaaatgcctgttcaagtcttttgtacacttaaaaatgctttctctcgaacccaggaggcggaggttgcggtgagccaagattgcgccactgcattccattttgggcgatagagcaaggctcagtctcaaaaaaaacaacaacaacaaaaaatattttctgctcttttgtcgtacattaatttgcaggagttctaagtatattatggatatgaacactttgtcagataaatataaatatcttcttccagtttgatgtcttgtgatgatcagctctttattttaatgaaatcaaattgaacaaccttttcctttatggctggtgctttttgtatcctatttaagaaagcattgcctttcatttggttttaagaayattttcctatgttaccttctgacattgagctgaaggcaaagatcaagacggagaaagaactgagagattggggtatttgatatataatctgtctcagtgatttttaaactttgctacacattagagacacctggggagctttaaaaactggtgcccctgatgtaccccagaacaatttactcagaatctgttggtttgggacctaggcatcagcatattttaattagtatagagagaatttatgcagaggaaatcagcaaagaaaggacggcaagggagtaaatttggcgattatgaatttgggttagaatataggatctacagagaaaataatgatgtgtcgcattggaacaaaggctgtagctcacagaattttgagtccagaatacagatttagatttagttcgacagacagtggaattaaaaaggtttatcaaggacatgaatatgatttgccaatacattagtatggctgatgtgacagcggggtaagggtagattggaaatgagggagagaagacaaaatttttgaactaatacttgtggtttcccttttctaactctgctaagcaccagaaattgcgtggtaaattttgtgtgtatgggatttttctggcaa

SEQ ID NO: 683566 - DNA, 628 bp, Homo sapiens
gttctgattatctagatgatgcctccaggtagcaggcttcagagagaatagtttgtaartgtctcttattactccttaaaatattccaggctcttggttaaatcgctgctgaattaggaaaagatctggaaaggaaaggggattctgtacagaatgtggatcttccccacgagagacagctttgcaaggccatttcaaagaaatatattttggggtaagatatttcaatttctctcagggcctgctatctgtcgagtgattctatattagagtcaggttgggatttgatatcttattgctacaaagagactcttgttagtcttcaaatctctgttttaattgatgctggtcagttgtgcctgaattccaaagagaggaaggtacaacggggcatgttcaatcccctccacccaccttttcatcatggcctgaactacctttttaggtttactttggaatgcccttgacagagaagcgggttccacttagttggggggctcagaattttatttttggtttacagaacaaacattaagagaatgttcaaactaccttttggattataccttttggattaggattatatccaatcaaaataatgtctgaaacaaaggagccatttactaga

SEQ ID NO: 683567 - DNA, 628 bp, Homo sapiens
gttctgattatctagatgatgcctccaggtagcaggcttcagagagaatagtttgtaaatgtctcttattaytccttaaaatattccaggctcttggttaaatcgctgctgaattaggaaaagatctggaaaggaaaggggattctgtacagaatgtggatcttccccacgagagacagctttgcaaggccatttcaaagaaatatattttggggtaagatatttcaatttctctcagggcctgctatctgtcgagtgattctatattagagtcaggttgggatttgatatcttattgctacaaagagactcttgttagtcttcaaatctctgttttaattgatgctggtcagttgtgcctgaattccaaagagaggaaggtacaacggggcatgttcaatcccctccacccaccttttcatcatggcctgaactacctttttaggtttactttggaatgcccttgacagagaagcgggttccacttagttggggggctcagaattttatttttggtttacagaacaaacattaagagaatgttcaaactaccttttggattataccttttggattaggattatatccaatcaaaataatgtctgaaacaaaggagccatttactaga

SEQ ID NO: 683568 - DNA, 628 bp, Homo sapiens
gttctgattatctagatgatgcctccaggtagcaggcttcagagagaatagtttgtaaatgtctcttattactccttaaaatatkccaggctcttggttaaatcgctgctgaattaggaaaagatctggaaaggaaaggggattctgtacagaatgtggatcttccccacgagagacagctttgcaaggccatttcaaagaaatatattttggggtaagatatttcaatttctctcagggcctgctatctgtcgagtgattctatattagagtcaggttgggatttgatatcttattgctacaaagagactcttgttagtcttcaaatctctgttttaattgatgctggtcagttgtgcctgaattccaaagagaggaaggtacaacggggcatgttcaatcccctccacccaccttttcatcatggcctgaactacctttttaggtttactttggaatgcccttgacagagaagcgggttccacttagttggggggctcagaattttatttttggtttacagaacaaacattaagagaatgttcaaactaccttttggattataccttttggattaggattatatccaatcaaaataatgtctgaaacaaaggagccatttactaga

SEQ ID NO: 683569 - DNA, 671 bp, Homo sapiens
tattctggtgtctcttcattctgtgtatgcccttgccattgttccatctgtgaggggcatcctttctgcagaaattaaaaattgcctcgctgagagaactttttgtctgaatgctgacttttccttgcagaactgagaaacaaacattttgcatttctaatgagtatgaaaattttttgtatagtgttttattacggatttattttactttaaactacatgtgaatagataaaaaaatataaataattagcttttttaaagcacatataaatattattagtttgtaaatttttgcaacttttaaaattcattttgtttatatatgcttttgaaatgagctcatgtttatataaatatatttagtttatttaatttaactcctgttagtatttcaaaatatattattttgtcatttatcccaattgatatagccatcyttatttctgtgaacattttggttagtttttcaactgaattttaaattccagatttgctcttgttccctgattctgaatgggtatttaatgggaatttcagtaagcttttaatttcacatcactatctgtaacttcacaacaacagacaattgacttcaaaccaacaacttcatattccattactttgagcttacttaggcatcagctccctgcagttcccacctgcttggactt

SEQ ID NO: 683570 - DNA, 671 bp, Homo sapiens
tattctggtgtctcttcattctgtgtatgcccttgccattgttccatctgtgaggggcatcctttctgcagaaattaaaaattgcctcgctgagagaactttttgtctgaatgctgacttttccttgcagaactgagaaacaaacattttgcatttctaatgagtatgaaaattttttgtatagtgttttattacggatttattttactttaaactacatgtgaatagataaaaaaatataaataattagcttttttaaagcacatataaatattattagtttgtaaatttttgcaacttttaaaattcattttgtttatatatgcttttgaaatgagctcatgtttatataaatatatttagtttatttaatttaactcctgttagtatttcaaaatatattattttgtcatttatcccaattgatatagccatccytatttctgtgaacattttggttagtttttcaactgaattttaaattccagatttgctcttgttccctgattctgaatgggtatttaatgggaatttcagtaagcttttaatttcacatcactatctgtaacttcacaacaacagacaattgacttcaaaccaacaacttcatattccattactttgagcttacttaggcatcagctccctgcagttcccacctgcttggactt

SEQ ID NO: 683571 - DNA, 1599 bp, Homo sapiens
ttcccaccagtgcatcctcgaatgtcttctacaacatagtcacatcacccaggggcttcaaaccctgcagtgtttccatttggcctcgggagctaataagtgactcttctcttccccaccccaagtcccagctgtagttgacgtaggagtcaggcagatggagaccagaatctcacctttcttactaaggctgtgggcccatgcggttgaggcgtgagggccaaacggccttacccaagctccccgccccaattcctgactccctgcaggatagaccttggcgccgtccatctaagggaaagacctgcacccaagttacctaggaagctgccacacgcaagcaagaaagagagacaaagtctctgtgctaacaggctctcactggattcattctacctagtggaggaaggaggagcagcttctgtctcctactgagacagacttttctcttccgtgggcagtggggtggcgagggctgtgaggcggggagcattgttttggggaagcccttccaggagcagagcaggggattaggatccagtccaagctccttaatatgggacatggatgatgtgaccactgcttattattccagtggctgtctttgcygctgtgtctggaaggttccctggtgtgagcagtggccccagggtcacttggatgagtgagattttgggtgtaggctggggtcatgtcctgtggacccctccaaggccaggctggccctcttccctgctgcccccggcctccctgccctttgccttccagcagcaccatcctgtgtgccttgtctgagtcggtgttgtgcagtcgctgcctgaaggtgctgatcctgccttgtgccattcggctccctccgctccaacccaggcacctgctctttggactgccttttgtgaccacctccttcccagctggctcaggtgcttttccttacaaagagaaagggatcgatggctggaccgacctgaatgcgcctggtctcagaagctaagcagggttggcttggtcagtacttggatgggagaccactggggagacccggtgctgtagacttgaaaaaaaaaagaggaaggggcttgatctgaaggtagattgatgttagctgtgggaacagggtcttggctatgaggtgtgggagccagagtgattttgtgctaatgaaattcttgtttgttacatttcacaactagtagtgaagcattttttaaattttttttttgagacagagtctcgctctgtcgcccaggctggagtgcagtggtgccatctcggctcactgcaagctccgcctcccgggttcatgccattctcctgcctcagcctcccgagtagctgggactacaggtgcccgccgccatgcccggctaattttttttgtatttttagtagagacggggtttcaccgtgttagccaggatggtctcgatctcctgacgtcgtgatccacctgccttggcctcccaaagtgctgggattataacagtgaagcatctttaacagcagtttaaagatgctggtaacttcacaatacccggagagttttccaaggagtgagtttgttttttgtttccccttgactgtgggcattttgccaga

SEQ ID NO: 683572 - DNA, 713 bp, Homo sapiens
tcatcagataaataaatcaacaaattttcctcagaacaaaagagactgatgtaagtagctaatgcaaataytattgatctgctcttgcctgaaattaacagcacagtagaagctaagctcagggctctattccccatggagagagaccccttacacagtcagggcaaaggacatggccagataacagtgtttagacatgtctttgatgttttcagccttcatcctgaacggctgaccagcggaaacaaaagatcattctcgtagcactggctgcagccggcctgtgtgtgcccaccccttgctgttgctgtttcccaggctgacccctgcacccacacacaaagacctcatttgcagcatggttagcagtgtcaaacattctctccagattcagccattgaaaagacatttccttttttccaaaccagctttgtgtcttcatgacccaactggagtaagaatggagttttggaatgaaataaacaaaaaagacaatctgccttccacaattaataataattctgtgtttatggggattgcagatacatgttgcttatctgtgctttttatgttccacccccccaccaccaggaacatgtttgtgtaattaagcattttaaaatcataaccattttttaaaatgaaaacccacacttccaaaatagcacttgagttccacatgttctctgcataggtttttaagcagccagcag

SEQ ID NO: 683573 - DNA, 1408 bp, Homo sapiens
ctggctgtgtgcatgtgagaatgtgtggtgggtttttttttttttggagacagggtcttgctctgttgcccagctgtagtgcagtggtgcagtcacagctcactgtagcctcaactcctgggctcaagtaatcctcccacctcagcctcctgagtagctaggactataggaacatgccaccatgcccagatagctttttttggtaaggacagaggtcttgctaggttgcccaggctggtctcaaactcctcggctcaagaaattctaccgcctcggcctcccaaagcacttggattacaggagtgagccactgcacccagctaacagtgtgttcttggggtagaaggaaagagctataagaaagctaaattctcatattctacagtaagaatgaaaagatggcctagacacaaacaataaattgcaacaccagttgttatttggaaataaagaggtaattccagagaagaagaaaaaaaggaaagaatttaaaaatggttttaaatttcgtcaatttaaaaatggttgtctctaggaagcaggaattgggatagaaataggtttttcattttcatttttcattttaaagcttataatttaacttttagactgtgtgtatatttataatttttgaaaaacgatgattacattttaaaaataaatgaaaggcagggaagaatagaatgacaggcattataaggaatctcagtagaagagaagctgaagatcatggtagactgcagaccaatattaaaggaaggacacgtgtgaagaattatctaatttcatcctgccaacaaccctgtcttctagatatttctctccctacttttatcccataygaagaaactaagaaaataaggcttggaaaggttggacctgtctgaagacacacagctagtgcctggtctggaattaaaagccgatctccaaagaatctcttccatgaaaagtagtgttaagaaatttaaactagcacagccgagcacggtggctcatgcctgtaatcccagcactttgggaggccgaggcaggcggatcacttgaggtcaggagttcgacatcgccctggccaacatggtgaaaccccatctgtactaaaaatacaaaacatagctgggcgtggtggcacacctgtaatcccagctactcgggaggccgaggcaggagaatcacttgagcccaggaggcagagattgcgtgagccgagattgcgccattgcaatccagcctgggcaacagggtgagaagccatctcaaaaaaaaaaaaaaaaaaaagtttaaactagcagaatgtaaaattctcagacatcctcactttcagagttataaatctgtattatcattactttctggtgccatttctagtagtgacaagacacttcctgattttatagaaagttaaggc

SEQ ID NO: 683574 - DNA, 621 bp, Homo sapiens
cacagaagtagcactgtccttaaacatttccatgttgatgagggaaggtgggagcctgtagcctcattagttgtgaagcttgctgtgcatatttcatgagagaaactttaaagacatgaccctaaagaggcagaaactttcaatttttccttcttctgctctctggagaaataggtctgctgtggtttggaatccracacctgcagccttggcctcctggagggtagggtgctgcaggtgacaagccccaaaggaagtgagagtggtacctgtttgaggaaaggcagatgcgttaggtctcccaggaaccttgcctcctatcttaatctcactttgggatatgaaagagcagtgctggaccgaaattactgtcagccacacctaagcaagagtgtgaatggactcagagagaggtcccaccccgggggcataaagatgcctctgcagacttgggcctgctctgaactctgcccacggctgcgcggatgccaggcccctggtccaagctgcctcggctgtaggtccttcttggggatacatgcaggagccctctgttcccatccatgttgctacatctataatggttgccaagccatcatttttaaaatagctttttatttt

SEQ ID NO: 683575 - DNA, 1738 bp, Homo sapiens
gaggagcttgactgtcatactgagggctttagattttttttttttttttgataggtgaagtcattgaaggttttgaatgtcatgattagaactgtgtttgagataagctaatctgacagggagagtattatggaaatgttttcccagcttcttgtgcagaggtaatacatttttgttttgctggttatttttatcaacaataaatcaaactaagtgctggccgggcagtgttcagtgcttcccaaacttgaatgtgcttatgaattacctggaatcttgtgaaaatatacattcctacttgatagttcagggttaggatctgagattctgcctttctaacaagctcctaaatgatgttgagggccctaatctgtgcactacacaggagtagatgtgccaaaggagggtttttgattaaatgagaatttccactttattctttacacgtgagtgtgctttatgatcttaagacttcaggaagctcactttgcgatctgttatggtaatatccctaacaaagttctacttccgttgacccctttctctgtgcaaataacatcctgtttactcacgatttactatgtgaaagcttcaatgcagagccaaccaatacatacataactcagagccaattttctagttaagtcttaagtgttttcataaaactgaaaaatgcggctgggtgcggtggcaggtaagggaataggtggagagaaagggaagggcctagggaggagaacgtgagaactccaaaggaaacagtaatgctgtgcttcctaaactgactgtctgatcctaactgactgtctgattcctaaactgagtgtctgatcctaaattgaatgcctggtttggagtccagtgtgttttcatctcagcatgcaaatttaaacccaaagaaagttaggtgcttaaatgctctagggtagctgggctttaagtggctacttatcatagtgtttatttgaatgttagagaaatagcttcaagcaacagaaggcttgacttagagtggtttaaacaaatagggatttaatgtttttgtataattagaagctggcggtagacagatgtttgttttgttgttcttctttgtacctttgtacctttcacatatctaatgagtatttatgtaattaataactaaaacaatgtttaaagattgtttttggaccaggtatggtggctcacacctgtaatcccagcactttgggaggctgaggtgggcggatcacgaggtcaggagttcgagatcagcctgatcaacatggtgaaaccctgtctctactaaaaatacaaaaattagctgggtgtgtggtggcacgcgcctgtagtcccagctactcaggargctgaggcaggagaatcgcttgaacccgggaggggaaggttggagtgagctgagatcgcgccactgcactccagcctgggcaagagaccatctcaaaacaaaacaaaaaacaacaaaaaaacctgaaaaacgcttttgagtaggaggaactttcacagaataagaggtttgaagttagttaactgtattgagttacaaagccaccattgcttatttcttggtatagttgttccttaatcaaatttcttaatcagatataaccaacagatgaattataaagcagaatttggaatatctgtaactttagagtacctcttttgtctgccttcactacatatatactgtctcttattagatttgaacctttttgcttcaaagtagattctg

SEQ ID NO: 683576 - DNA, 2684 bp, Homo sapiens
tgggccataaaaagaaatgatgtactgatacatgctacaacatggatgagtcttgaaaacgttatgctaagggaaagaagtcagtcaccaaggattacatattatatggctctatttatatgaattgtccaaaactggcaaacccacagagatagaaggtagactggtagactagaaggtaccactcctagactggtattaggagtaggagagctgggggaaatggggagtgactgctaatgggtatagggtttcttctggggtgatggaaatgttctaaaattgagtgtggtgatggtttacacaactctgcaaatatactaaaaaccactgaattaaatggagcattgtatggtatgtgaattatatcccaataacactgtttaaaaattaatgtttaaatccctggactcagtaatcctaagcattagtttgaaccatataaaactgcagatatcggatcatttttgacctatagaacagcaatttaatagttcaacctaacagctattctaagacacagtccaagacttatttgtaaagatgtcaatatttgtaattttgtaagaatgtgatttttgaaacaacctaaatgttaagaaataaaatgattaaataaactattgtataagtacatggtggaaaataatgcaaacatgtaaattacatctttgaagaattatttaaagcatgataaaatactgtgtgtactactttatgcaaayttttaaaacatatatttatttgtaggtaaaaataaataaatataggtaaataaaccaagaatttaacagtattatctctgaaagttaggattacgggtgatactaatttttcctttttttgtattttccaaattttctataacaagctcatattacttttaaaattaggaaataatcttatcaccaaagaaaaggaaaaaaaatccaagaaaggcagagatacccaattcaaagatagacaaatatacttggattctattaaattttacttttcatcagaaaggaatttaatttttaaaaattcaaattcaagtatttcagcattctaagatgaaaagaagcaaccttgctcttttattcaaataatgctaaactagttattcaaagaagaccgttatccatcttaatttgaaatccccagtaaataacaattcaccacatcccattctagttctttaataacaattttgcctgccaacaaatttatttctaatctacagttgcaaattgttctctcctgtccaagtcctgaataaatcagagaagagtttataagacagttctttgtcattttgcacttttagaagtggcttaactaaaatactgtttcaagtcctgccagcatcaagagctatggatgtatcagtcccttaaatcagaacgcagcaagctctccttaccccccaaacttttcctcctagatgtgccagagtcctgtctcttcagcactatgatgcatatctacagcctggctatgtcaggttattatcatccagtctcttaacttccccagttcaggggatggcaaactgaaattgtgattacaacttaatactcataagaagatacaacaaaaagttacttaaggtgaacataataataagacaatactttcttgaacttcaagttttagtgcctaaggcagcctagaggggtttccacatactctgcaggatctaggtaaggtagtttgcagttaccaggaacatgaaaaataaatgaactcagtaactgagttgagtcccctttactccaggtgttcacagtttacatgaacacctggagtaaaggggaaaaaaagaaagattctgttgaagagtcagtcacaatttatcatagttattttgagcgacagctctggatcaaatcttgcttcctagtgaaataccctactttactgctagcccttttgatattacctagactaattaagcacattcgtataaataaaagctacagaaaaaaattgaataatctaaattatgaaaattacatatcctggccagacaaggtggctcatgcctgtaatcccagcactctgggaggctgaggggagaactgcttgagcccaagaattcaggaccagcgtgggcaccatagtgagccccatctcttaaaaaattatgtatctaatcactacttggaattacattatatacttatatatttactttgtttgttgtctgttttttatcactagaatgtaaactctgagagggcaagaatttttgtctgcctaattcatcagtttaacttcagcatttggaaccgtgtctcaaacataatactgtctactaagtagaaacgcaataaatagtgaatgaatgaatagttcttccacacaaatggaacactatatagctattaaaaatagtatgcagatcaatgatcatgcaaagtcctccagattcagcactgtaacagtaacagccctataacttactaagttcatttatttttcatgttcctgataactgcaaactaccttatgtagatcctgcagagtatgtggaaagaaatagaaagaaggatgttgcaactaagcatttatcatttccttggtaactcttagaaacataaaaagaggagctagggaagcaggaaattacaaatgccagtatattagccatcaagaagacactggaatttctgctgaaaggggcctgtaaatctacatgc

SEQ ID NO: 683577 - DNA, 588 bp, Homo sapiens
tcttatgtggcatagcatatataatattggaaaacatcctgattttccaaaagaatgaatactatcaactaaaaaaaacaaactattaaaccagtaaatataagtttgtaaaagattgctgtgaacaagtcctccagccacagcagtgtgttccaccactgaaagcccaggttagaaaaaatcaggcatcttctaytgggaaaaggacttggaagcagcttaacactacttcccaccaaccttccaggtggatccctggagctggttggttccatacacattcccttccccactataagtccctgcatccctgaagccttccttctccattcccaggccaggctctttatttccttggtgttcaccctcgcttcagctacaaataagcaaagtgccgagagtacctggactccttgcagaagttatatagtcacatgttccatcaaaaaaaaaaaaaaaaaatggggacatgaatctcttgccctataatatgagagtaggcgtgacataccaaactgaaggtgtcaacctgtggggggaagtcattcagaggatggatcccatcagcaggaatcatttgtaaataat

SEQ ID NO: 683578 - DNA, 588 bp, Homo sapiens
tcttatgtggcatagcatatataatattggaaaacatcctgattttccaaaagaatgaatactatcaactaaaaaaaacaaactattaaaccagtaaatataagtttgtaaaagattgctgtgaacaagtcctccagccacagcagtgtgttccaccactgaaagcccaggttagaaaaaatcaggcatcttctactgggaaaaggacttggaagcagcttaacactacttcccaccaaccttccaggtggatccctggagctggttggttccatacacattcccttccccactataagtccctgcatccctgaagccttccttctccattcccaggccaggctctttatttccttggtgttcaccctcgcttcagctacaaataagcaaagtgccgagagtacctggactccttgcagaagttatatagtcacatgttccatcaaaaaaaaaaaaaaaaaatggggacatgaatctcttgccctataatatgagagtaggcgtgacataccaaactgaaggtgtcaacctgtkgggggaagtcattcagaggatggatcccatcagcaggaatcatttgtaaataat

SEQ ID NO: 683579 - DNA, 2137 bp, Homo sapiens
tacaccatggaatactatgcagctataaaaaagaatgagttcgtgtcctttgcagggacatgaatgaagctggaagccatcattctcagcgaactaacacaggaacagaaagccaaacaccacatgttctcattcataaatgggagttgaacaatgagaacacatggacacagggaggggaacatcacacaccggtcctgtcggggttgggaggcaaggggagggatagcattaggagaaatacctaatgcatgtggggctgaaaacctagatgatgggttgatgggtgtagcaaaccaccatggcacatgtatacctatgtaacaaacctgcacattctgcacatgaatcccagaacttaaagtaaaataataaaaaaaaactctccagtgtttgcattatacccataatttcactgttaatgttgatataaacactcagtgttccatgagcactatattrttaagctgtgctaatagaaatcaaggaacagagatgtgccctgtaatatatgatactgaaacccatgattcctatatgtgcaaaattttatgtaaagaaaaaaagtaagtaagcctctccctataaatattcattattatcaacaatcagatcttagtgactaaaagtggggtttgcaactaattatgtcagtgccaatcttgtatttacaagattgtattacactactttgtatctcctggggaataaatgagtattaaaaatacatataaccgtgaagactagtcattctaaagattttatttccaagtaaatatttttgaatatctactatgcatttggcattcttctaattactggaaatacaatgttgaaaaaaaattgacctctgctttcatatttatgctcaggagggaagttaataatgataattctatccaagaaacatttattgaatggtatcatatggggaactttaatgaatgttagtgactttaaatgaattctggactaaaggaattgaataagcaaagataacaagctgggaatatgcatttcgagtactgtaaatggcaaaaattccaacgtaaatcaagtgtgaaacatatgggtgatttgtccagagactcgagaagtagttgagactcaatcctgaaaccattcaaatgccatgctaaaaagttttggttttatgctagaagcaatagagagctgtcaaatatttaaactgacacgtttacattaggactgtaaaaatgtaattctagcaatagtagtccagagagtgagagcaagaatcaagaatgtagaaatataaactctcatttttaaaggttatagatccaagagtcatttctaggtcacatcgatagactttgactatatctaattagttagatatagacatgagattagagggaggagcagaataaaggatgatgccaatgcctctagccaagtagttgaaaaactgaccaacacagaaaactcaagagaatgatgaaactcaggacacaagcagaggaagttagtgagtttgattcagggtatgtagcatttgagaagcaagcagaagatccaaacagaaatgacctgtggggccttggagcttcagaagtcaaataagcctagtgacctaggtttagcataaaagtgttagttgaaataatgtacgctaatgagactcccaagagatagactgtagaacataaaggaaagcagaagacagcaactttggagacaccaccacttcaagataaaagaaggtaaaagaagtgaatcacgggaggtacaacaggggaagactaaggcaggcagtccaccagagtcttacagcatggagtcatagcagtcaggggaggagtttcaggaaggagggctatcagcaccatcaactgcttcagagagattaaaaggatgaccatgattacttgttacctggggatcattacttattgaggcaaatgtacttactattgtttgattaaaatagtcatctggggatatacattcacacttgagtaataaagctgtcagagagctacaagtccctggattctataggattgagaagctgcataacaagaaaaccctacctcttcatgttccaacaaacattgctgtatagaaaaaccactcattagcaaggccttaggcaactcacaagacagcagct

SEQ ID NO: 683580 - DNA, 2137 bp, Homo sapiens
tacaccatggaatactatgcagctataaaaaagaatgagttcgtgtcctttgcagggacatgaatgaagctggaagccatcattctcagcgaactaacacaggaacagaaagccaaacaccacatgttctcattcataaatgggagttgaacaatgagaacacatggacacagggaggggaacatcacacaccggtcctgtcggggttgggaggcaaggggagggatagcattaggagaaatacctaatgcatgtggggctgaaaacctagatgatgggttgatgggtgtagcaaaccaccatggcacatgtatacctatgtaacaaacctgcacattctgcacatgaatcccagaacttaaagtaaaataataaaaaaaaactctccagtgtttgcattatacccataatttcactgttaatgttgatataaacactcagtgttccatgagcactatattgttaagctgtgctaatagaaatcaaggaacagagatgtgccctgtaatatatgatactgaaacccatgattcctatatgtgcaaaattttatgtaaagaaaaaaagtaagtaagcctctccctataaatattcattattatcaacaatcagatcttagtgactaaaagtggggtttgcaactaattatgtcagtgccaatcttgtatttacaagattgtattacactactttgtatctcctggggaataaatgagtattaaaaatacatataaccgtgaagactagtcattctaaagattttattwccaagtaaatatttttgaatatctactatgcatttggcattcttctaattactggaaatacaatgttgaaaaaaaattgacctctgctttcatatttatgctcaggagggaagttaataatgataattctatccaagaaacatttattgaatggtatcatatggggaactttaatgaatgttagtgactttaaatgaattctggactaaaggaattgaataagcaaagataacaagctgggaatatgcatttcgagtactgtaaatggcaaaaattccaacgtaaatcaagtgtgaaacatatgggtgatttgtccagagactcgagaagtagttgagactcaatcctgaaaccattcaaatgccatgctaaaaagttttggttttatgctagaagcaatagagagctgtcaaatatttaaactgacacgtttacattaggactgtaaaaatgtaattctagcaatagtagtccagagagtgagagcaagaatcaagaatgtagaaatataaactctcatttttaaaggttatagatccaagagtcatttctaggtcacatcgatagactttgactatatctaattagttagatatagacatgagattagagggaggagcagaataaaggatgatgccaatgcctctagccaagtagttgaaaaactgaccaacacagaaaactcaagagaatgatgaaactcaggacacaagcagaggaagttagtgagtttgattcagggtatgtagcatttgagaagcaagcagaagatccaaacagaaatgacctgtggggccttggagcttcagaagtcaaataagcctagtgacctaggtttagcataaaagtgttagttgaaataatgtacgctaatgagactcccaagagatagactgtagaacataaaggaaagcagaagacagcaactttggagacaccaccacttcaagataaaagaaggtaaaagaagtgaatcacgggaggtacaacaggggaagactaaggcaggcagtccaccagagtcttacagcatggagtcatagcagtcaggggaggagtttcaggaaggagggctatcagcaccatcaactgcttcagagagattaaaaggatgaccatgattacttgttacctggggatcattacttattgaggcaaatgtacttactattgtttgattaaaatagtcatctggggatatacattcacacttgagtaataaagctgtcagagagctacaagtccctggattctataggattgagaagctgcataacaagaaaaccctacctcttcatgttccaacaaacattgctgtatagaaaaaccactcattagcaaggccttaggcaactcacaagacagcagct

SEQ ID NO: 683581 - DNA, 2378 bp, Homo sapiens
ttttgccatgttggcaggctggtctccaactcctggcctcgagtgatccacctgcctcagcctcccaaagtgctgggattacaggcatgagccaccgcgcccagccctatgttaatttttataacttagatactttggaaaattttataactgactcaggtgacttactgacataacaaattctagtaggactatcatcagtcacttaggtagactgcccttgtcggtgtacaaaatgctgcattgggcgtactctcaagcagtgtactgtattactgaaagccacatagcaaccagatattgctcagcagattttattaatacctgaatcctaatctggaggagtttcagacttggagaggagctcttcccaagccacatctatgtgagtctttaaaacacttgcccctacttgagacattcacaggaggtaatggtggaaacactggtttcttccatttaatttagatttgatctttcagactaaacatctctcattattaactgtagagtctggaaaagggtggaacttagatgatagctttgttttcaaagtaaagcacatatcaacagagcagtttgtacaaggatattcaaaacagtattgtttataattgcaaaagattaaaaatgatcttaatgtccatcagtgggagatatggtccacccatttagagaaattctgtatgatgattccaatgtttcttagagatcgtccagaaggggaaaaacccaaaggacagaactgtattatgagcatgttactagttgtggttagaaaaggtggggcatgttatgcatgtgcagcaaatctccacagaagggcacacctgagaccggcaacagcgagcacctcggcagaagaaactgggtatcagggatgggagatcttccttttccttttctgtactattttaagttttcccacatgaatttatcatttaatgtaaaacataagtgaaaataaaaattttaaagcataaaacaaaaacatggccatgtaagcttcaaactcaatattttgttggtagagtgaaagaaagaagccccaaattatctgaaaaacaacaaatacagcttaggatataatcaagactgtcaaagctgagagtctgcttggtgcaacctctccttatggagatgaggaaaccaaaactcagagaaagtgaattttatcaaggtcataaaaccggtcggtatcctagaagccaggtgacttgtctcaacccaggaacccaccattcaccttgccactatgctccctctagttgtttaatttcaaaccatactgaaccatcattgacactggagctcatgagcttcacttgtggttgaggttccttaaaaccaccgcttttgacactgagggcagaggaggcctaaggcagagaaaaagagaaacaaagtcctcagcagagcatgggaaggcaaaacatctaaatttgtgatgaacaaaatactccttgggataatattccagaacattttagggagagaacaatagttccattaaaaaaaaaaaaaaaagagctaggcgaggtggcttacgtctgtaatcccagcactttgggaggtcgaggcagatggattgcctgaggtcaggagttcgagaccagcctggccaacacagtaaaaccccgtctctactaaaaatacaaaaaattatctgggcttgttggcaggtgcctataatcccagctactcgggaggctgaggagggagaatggcttgaaccygggacgtggaggttgcagtcacccgagatcacgccattgcactccagcctgagcaacaagagcgaaactccagcttaaaaaaaaagaaaagaaaaggcagagtattccaaatgcagtatctgaggccaagccggattaagggcagactgccacaaactgcctcaaaaaggctaaagacctcgtcagctctagaccgttgccagtccccccagaaaggaataacccaaacagaagatttctccatagaagcaggaatgcatcaaagctaaagcagggacatcttttttgtttttccttccaagagagtcagaatttaaatttagattcccatttatctttttctttttcattgttttcatctccttttccctttttcttttttttttttttaataattggctttctcttctgtgtttggaaattgataaaaccatgctctgcagatgtgtgaccagaaacatttaattggcattattcaatataaaggaaaaaatcacacacacacacacacacacaaaaccgccagtgccaaggcatctgagatacaaacacacttttgattcaatgactgtgtccttggtgaagcaaacagtcaacacgggaatggggcggggggtggggttatttacgtaggacatgacc

SEQ ID NO: 683582 - DNA, 1386 bp, Homo sapiens
atgtgataattggaatgggaatattacatactcattttgtctgtaatttttgaaggaaatcaagcactatttatgacatttattttatgactgcattatatcacccataaacatgcacttggttaaatgcaaaagtcaggaaaacctttcctgttggactcctggttgagccatacatctgaagtaaagctcttttaagaaacattgaactattctcttcctgtgatttgaactaactctcatgttcctggacttgtgctctttataaacaagacctgggaaagagcaaagtctccccctacccctcaggaccaatcacaatgatatggatcttcctttcttacaaaaatggaacaaaaataattttagtgcatttcaaatctgattaaggcacagagtaggcactaaatacattctccccaaagtaaggttaagggaggttagaaattggtaacaaaatatcagttccatttatagcaagatgatcatcataggctttttaaatttcaaatagaaacataatcaagatgagaactgagaaaaaaactggcaacgcctcacccataactcatcttctctagaggatgcattttaacccttacctctagagtttcataggggaatatccaaagggtaccacattctagttgctgcttcctcttacttccagagcatagttgcctgcttagccccatttcattctgagtttcacacatgatttacaaactcatcactttccccacagcactcattataggtgagggccatgtatttacccgagtttgtgctatcaccatagaaattcaggatagaagggtcttagtccatttagagcaatggttctcaaacttttctttagtagtagaatccttctccagagccaagtgtacggcttgaagcagaggctatccttatgtcccagggttctttcatcagctgaggaaattagcacttaaagtcagcacctttgactgtcttctctaaatcatcttggtcttgctttcactctgctttcccttcaggcatttctcaagtgtcatgctgaaactttaaacaaatgtttaaaacacaytgaacagggcccagcttttggaaactgaacactaaggttagcttctgctcacatccccctgagattctagcatgggactttgggacagactttaaaaccaatgatttagactaattcagttattttagagatgaagaatattggaagattaaatgcctcagcccagatctcaggaacaggctgcgacaaacctaggaaacccggaacgcctgctagaatactacagctggcatcagctgcatggatcaccaattactgcccaatgatcaccaacggatcaccaatcactgcccaatcctttttcgtagtcatca

SEQ ID NO: 683583 - DNA, 1447 bp, Homo sapiens
gtgtgaaataactgacattttgtgaagatcaaaattaccacagaaatttagccaagtcagcatcgaatgatttcacacaattattgaacttttctctgttggagatgttcccggccaaatccttcctttttggaaatttcctggagctccctcatctgctgctgaatagtactgaaagtttctcatccgaggactaaagaagacattagtgactccctttagtctttagccaagccattaactgttacctcagcataagctcttggtcttttcctccaatcttgattttcttatgttgtataagcagctttctagagaagcctccatggttgatctttctcacccatccacttgctatctcaaactctggagcagtgctttccaacaaagcctttgtggtgatggaatgttctaaatttgcatggtccaatatggtagccaccagcgacacaaggatttagggcacgaaaaatgctcatgggactgaaattttgtttattgtaattgatttaaatttaaatagtcacacaagtctatattggacatcttagctccaggcatctctttgaatgcagtctctgaaacccttttaaaaactacttgatgaattccatgagcacagggaccaggccacgtctgttttgtgcaatgttgcatgaatcacacttagtactgtgtttggcacataggaggcactcaaatgttttcattcaacatgtgactgagtgagtgaatgaacagataaaccttgaggataaagagagtattcaatggggaagaaaaaagggcttgtatgcacccttttctttyagaatatatcaaatcaattccttttaaaaaagataatctctttaaggtagtatcactggttaaccaaacttttgggacacaaagaagtgatgatttttacactcatggtggtttatcttctgtattctagtcccttaatctaaaggcactgtgtcaaatatgtatgagttgcagaggaactgtatgtggatcagttctgctcacagggttgtatcaagcagttacatcagaggctggcacatattcactgtcaataaatgtaaattcctgagagatcagttactgcacctgttgattgcagctttcttgacatctgcaggtatcaaagagatagcagagaaagtgcctcagaggcacgaaggatggttttcactcattagctcatttagttcaatactgctgcttttggcctcttgcttcactaattatagcctaccatgaccaaatgtaaaataatacaacaataaatacaaagtcaactctcatgtcgtagggtcctattttgttttatggtagtagaacatctaatacagttatattttgggagataattcacactccagatgagaataaagggattagttcctatgcaagaaaccaaataattaaaaaaaaaaattggcttgggctatcacat

SEQ ID NO: 683584 - DNA, 626 bp, Homo sapiens
ccactcttagtatatgtgcatttctgccacaatagtaactacctccaacacacctagactcctgggagttttctatgactagaccacgtgtgaagggttgcggccaacaggtttggggaagacctctcagaataagcttaaagtatgagcatatatacatcccatgaaaattctcaccagaaggcctctagtacagtggttcttcataaccagatagataaaagatggtatgccctaggagtatgaattaaagcaccaggaaataaaggaaagtttattcatggatccaccaacatggattaattcttatgttctgtactctaaagactttgttgatggaactatgtaaaggcccagtccctgtgtccccatttcaagacaaaattgcagggccattccagatttagaactccctataggggctggccaaggactttgcatgattgtttcacaacttccttccagttctcatcctttcacccatccagagctgatggttcctagarcacccttcaatgaacatcctacacacaaacctatctccaagtctacttttcaaggaatctaatttatgacacaggttagacacaagctggatttgagttttatttctctatctgtcatgc

SEQ ID NO: 683585 - DNA, 808 bp, Homo sapiens
tgagatgaaaagctaaaaacagaccaatccttgagattaaggatttggaacaggaagtcagaactaaaaaggcaacggaagaaaaataaaaattaagttaaaactgtaagaaaaaagtggattagggaaaccattattttttaaaaacattaacagaaaaacaaaactatttagaggagtagagtaggaggcaacattatcagggcagtgtgacgttccctgtgggagagactgggtggaggccatgttgactgtgccttctgcatacggtgtccacaggagaagggcaggggctgtcaacccaggcagctgcaggggtgggcctgacctcagaaacatcttctccttctattaaaaaartatatgtatctcactttttctcccatcttccactgcttctgtgactcccttgcctcagccttctgaatcgcctctgggacttttgaatttgtttgaatcggtttgaattggttgctgccctaagtctgttcccttccaatctttccccacactgcaaccagattaatcttttgagaacacaatttttctcatgcaattatattctatgaaagccttctgtgcttattttaaagaccaaactccaagaagctctgcaaatccagcttttgtgcagtttatttttttttcaagtaagagatctttgtttgctccttcattgagccttgcttactacattacttatgtgaacccctaagatacctggagcttattttgaggttgggagttggaattatttcagggaaaaaagaaggaattctgtagttctattctggaaaagtcaaaggaa

SEQ ID NO: 683586 - DNA, 701 bp, Homo sapiens
taagatttcctgccttctgctttttgagttactcaagtcttactcagcctgaggtttggattgttcaacagttaatcttatatattttttaatttgttgtggaccaaatatatgtatcctccccaattcatatgttgaagctctctcccccagtgtggctgtatttagagtaaagaagtaattaaataaagtcatagtgtggggcactgatccaataggattagtttccttataagaggagacaccacagaactcactcccttgctgcctctgtgtgtatgcactgaggaaaagccatgtgaggacacagtgagaaggcagctgtctgcaagccaggaagagagccctcaccagcaactgaattggccggaactttgatctttggatttcccagcttccagaactgtgagaaaataaatttctactgtttaagtcaccagtcygtagtattttgtatggctgctcaagcataacaaacaatatttctgtttctactaatgataaaggaagacaaattggctccaaaaaggagatacattatagatgagggcagggacctggtttgtcttgtttaatgactgtctccctagcacccaagggagggcctggctcttggcaggtactatttatttcgctaagtgaatgagtggatgaatgaatgaataggtaagatatccaagcttctcatgatagctaaaact

SEQ ID NO: 683587 - DNA, 701 bp, Homo sapiens
taagatttcctgccttctgctttttgagttactcaagtcttactcagcctgaggtttggattgttcaacagttaatcttatatattttttaatttgttgtggaccaaatatatgtatcctccccaattcatatgttgaagctctctcccccagtgtggctgtatttagagtaaagaagtaattaaataaagtcatagtgtggggcactgatccaataggattagtttccttataagaggagacaccacagaactcactcccttgctgcctctgtgtgtatgcactgaggaaaagccatgtgaggacacagtgagaaggcagctgtctgcaagccaggaagagagccctcaccagcaactgaattggccggaactttgatctttggatttcccagcttccagaactgtgagaaaataaatttctactgtttaagtcaccagtctgtrgtattttgtatggctgctcaagcataacaaacaatatttctgtttctactaatgataaaggaagacaaattggctccaaaaaggagatacattatagatgagggcagggacctggtttgtcttgtttaatgactgtctccctagcacccaagggagggcctggctcttggcaggtactatttatttcgctaagtgaatgagtggatgaatgaatgaataggtaagatatccaagcttctcatgatagctaaaact

SEQ ID NO: 683588 - DNA, 1595 bp, Homo sapiens
tttaaattcagtcaacttgacacctaaattttagttcacaatccacaacttagcacccatacgcatctctttaaatcatacttcatttccacataagacaataacaaggtaatagttctgcctaacatgatacaactaacatggtgcagatatcctgcgcacaacctaaatgtactaatcctttctccagattttgactttcagaattttaacatttgggattttaatcttttgggaatgagattttcagggttttagactttaggaattttgatctttggggaattcaactttcaggattatgatgtttgggactgcatcttttgggattatgaccggcaccaattgttagcatggtcattatgacgacaacagctactcaaagctggctttgactccccacactccccacctggctgtctttctccgccttcccttcctctctgcaagctttagtgcttgctgtttcttggtattttgtgagttatctttggccttgaagagaattgtgaatagaacaattttttgcctcatgtgaaagtcggatttgtccttaatgtttagcttcaaagaaagcacggarccccactgggctctgagcctggaagacaggctgggtctcaggaagacactcatgcctgcagtgggacaagagctgaacgagctgggacctgtcattcacagagccaggagccatgcagataaatccccttctctgctcatcctgaaaacttgcccctcatgacttatgcattacttcttttcattagcagaggcttgagtaagcacgtgggtaggtggctctgtgaggggtatctgattcgaagagtatatatctgcaggctcgatgacaccactctgagattcagcagggtagagacagagatggaggcagaaactgcatgtccctgtgaggttgtacattttctctctgccctgcagttcgttgcaccttgaggacacagctttcctctgagcccggcatggatgagaagggggatgatgctcagtctaggctgcagcctctggaatcgaggaagggcaagacagaactcctagatcccactgtcatcagaaaattaaacatgaatgagctaagccctaggcctgagttgcctacactccaacctgagtttctacacacacacacacacacacacacacagagagagagagagagaaataatggcaattctgagatgctcccctgtgtgggccctgagtggactctgaatagaagatcacaggatgcgaagcccagtgggtgcggaatactggtccccagcacagtggaagaacaaatagagataaacaagacccttcttccccacccagtctgtaaccaaccagcttcaggaaagagttaagtggggaaagtggtgttgggaaagaagagaaatgttttagttgaggacttaaggtatgagttttggagtcagatctgggtttgaatccaatgttgcattccttggataatatctttggcctcccagagtctgcatgctctcctctataaaatggttgttgtaaagattaaataatacgatgtacaggccaggcacggtggttcacgcctataatcccagcagtttggg

SEQ ID NO: 683589 - DNA, 1232 bp, Homo sapiens
gaagaacattgttttgtaaaagaaggtaccattgctggggtccacagaaacagttatggttcttacctctgaaggagaactgtgtttaactgtggcttttagatttaacttactaaatttgtatttgctgcaaaagtaaaccacactcaagagtaaagcaaaattcatcagcaaggctataattttgcagagagaaataagaagggtgtataatatttaaatcggaactcagcatcccagcaaagagcttcttaatcaaaacaaaagagaaaaaatcattaaatacagtaacccactgagattcacatgaaggtatgtcccacaactttcataaatcccgaatttatgataccactataatatactattactccacaagaagtagatgtgaataacacccaaggattactgtgtatgatacagaaaaccaaagagaagaaaagctgcatggagagcagctgctctgactgtgtgtgcagtgcctcattcaccaacacacaattcaaattcaagcctcagcaaaataacttgtcgtaagccatgatcctctataaggtcatcttcaaatagacgaaatagtgacatttaattcataaagacaaggttctactctcttgctgagcaagtaatccaatcaactgtggtttagtttcatcaactttggagaaaaggcaattttctttcaagatttgacacccttcataccctctgcctataattccagatggtaggtgtaggtggtagaaatgttaggttgagcagaatgatagtacctaaagaagaatgaatagtaccaggaaatgcatgactcatggcattctaattttcttgaagttcttttgtacatttgcatcaagattttccacaaaattcmatcctgactttaattgtaaattaaagagtcctttattgaatttctattattgcagagcagttacgccacatgaggtataatagaagcttataatgtcattgagaggccaggaaaaaacacatgtgcagagagcaatatacctgtggctgtcagcctgtaacataggtaacctgtatctgcagtcctaacttgattctaaatctcatagtgccttctctgtttttcccaaggagaaggcaccatgggatttagaaccaagctagggctagagacatatgttacaggctgtgaaagttctaccaaagttcctactttaaagaatgagcaaaaagaggcggggcatggtggctcacacctg

SEQ ID NO: 683590 - DNA, 1232 bp, Homo sapiens
gaagaacattgttttgtaaaagaaggtaccattgctggggtccacagaaacagttatggttcttacctctgaaggagaactgtgtttaactgtggcttttagatttaacttactaaatttgtatttgctgcaaaagtaaaccacactcaagagtaaagcaaaattcatcagcaaggctataattttgcagagagaaataagaagggtgtataatatttaaatcggaactcagcatcccagcaaagagcttcttaatcaaaacaaaagagaaaaaatcattaaatacagtaacccactgagattcacatgaaggtatgtcccacaactttcataaatcccgaatttatgataccactataatatactattactccacaagaagtagatgtgaataacacccaaggattactgtgtatgatacagaaaaccaaagagaagaaaagctgcatggagagcagctgctctgactgtgtgtgcagtgcctcattcaccaacacacaattcaaattcaagcctcagcaaaataacttgtcgtaagccatgatcctctataaggtcatcttcaaatagacgaaatagtgacatttaattcataaagacaaggttctactctcttgctgagcaagtaatccaatcaactgtggtttagtttcatcaactttggagaaaaggcaattttctttcaagatttgacacccttcataccctctgcctataattccagatggtaggtgtaggtggtagaaatgttaggttgagcagaatgatagtacctaaagaagaatgaatagtaccaggaaatgcatgactcatggcattctaattttcttgaagttcttttgtacatttgcatcaagattttccacaaaattcaatcctgactttaattgtaaattaaagagtcctttattgaatttctattattgcagagcagttacgccacatgaggtataatagaagcttataatgtcattgagaggccaggaaaaaacacatgtgcagagagcaatatacctgtggctgtcagcctgtaacataggtaacctgtatctgcagtcctaacttgrttctaaatctcatagtgccttctctgtttttcccaaggagaaggcaccatgggatttagaaccaagctagggctagagacatatgttacaggctgtgaaagttctaccaaagttcctactttaaagaatgagcaaaaagaggcggggcatggtggctcacacctg

SEQ ID NO: 683591 - DNA, 717 bp, Homo sapiens
caattagactatgacaaaaggccaggcggacaaagtaatacacacagactggtgttatgccatgaataaaagagaatacaacctctgcaggacctgtggtctaggatggaggcagtgagctagttaaaagaagaggggagaatgaagtgaggaagaggaggctgagcctcacatactacatttcattttccttcatatctctgtgcttccaatacacagggcaaatacttgactgatatgcctagccctcacctccatcgaagtctaacatctgggactctgtgtgtgtgtgtgtgtgtgtgtgtgtccccttatgcacctgcatttgaatgctgtggtattaacatccattaaagtcacgtgaccaaaaggacttcaaccagggccagagattcagagccatagtaaatgctttagaattatgtataatttcactgaaaccatacaaataaacatgttgctatgaaattgaaatacacagaggtatggatgaacttatatattgctagaggtcatacaaattgataaaacactttgaaaaggaatttgaccttaggtatcaagagctaccaaattaaaagtgcatgcattttgacctggtaatcccacttgtgggcttgtgggactccagcccaaggaaacagacaaaaaaaaagacagtcatacrcatatgttcatcacagcgctatgtacaatagtgaaatactagaaaccatc

SEQ ID NO: 683592 - DNA, 651 bp, Homo sapiens
tgatggaagaatttaagttgaacttggattaaatttttacatgtatcctaatgtyagcaacaggattatggaaataaatgtttgtggtgttcagttttcttagtaatttagaaatatgccattttctcctttggattagtgaggaaatagagtgcattttctggatattgttgtaatatatcaacaacattcagcaaaagctccagctttaaagaccactattacacacaaaggcagaaggaagcctcttgcatactgaaggttctagctggtgattatgcacacttcaatcctcttgacatgaataaccaccctccatgagaaggcactcctactggaagctcacatgtgatggtgtcagaggaaagttacgcctaatgagcaattcagagccactcagttaactcttttgtcaaaaaatgacatgccctagtttgatcctcccttcatccaacaaaacttagtactaaatagcatgattttaacagggattaatgttttaatctatatatatagaataattagcaaaacaacttgagttttgttctattaaatatattaaagactgaatataactttcttaatgtctgaaataaatctggaaacaacaacaaatctagacatctgcttagtttgtaacttaagtaaaaa

SEQ ID NO: 683593 - DNA, 651 bp, Homo sapiens
tgatggaagaatttaagttgaacttggattaaatttttacatgtatcctaatgttagcaacaggattatggaaataaatgtttgtggtgttcagttttcttagtaatttagaaatatgccattttctcctttggattagtgaggaaatagagtgcattttctggatattgttgtaatatatcaacaacattcagcaaaagctccagctttaaagaccactattacacacaaaggcagaaggaagcctcttgcatactgaaggttctagctggtgattatrcacacttcaatcctcttgacatgaataaccaccctccatgagaaggcactcctactggaagctcacatgtgatggtgtcagaggaaagttacgcctaatgagcaattcagagccactcagttaactcttttgtcaaaaaatgacatgccctagtttgatcctcccttcatccaacaaaacttagtactaaatagcatgattttaacagggattaatgttttaatctatatatatagaataattagcaaaacaacttgagttttgttctattaaatatattaaagactgaatataactttcttaatgtctgaaataaatctggaaacaacaacaaatctagacatctgcttagtttgtaacttaagtaaaaa

SEQ ID NO: 683594 - DNA, 1495 bp, Homo sapiens
ctggctgggcgtcctgtgcgggaaggacagggtaggagaggagggaacgggggtctgagaggaccacaggggtgagaagctatcagaggatgttaagcagggaatgccacttaagtttttattatgatttacgtttttccgatattaccctggctagggtgtggagagtgtgtcggagggagacggtcaggaagtgtgatagtctgaatgtttgtgtcttcccaaaattcagatgtcgaacttaattctcagtgcagtggtgttgggaggtagggcctctgggaggtgatcaggccacgagggtggagctctcatgaatgggactagagtcgttactaagagaacccagagagcatgttcgccccttctaccaccatgtggggactcagtgagaaggcagaatctctcaagtaggggggagccctcaccagacactgattcttctggtaccttgaccttccagtctctggaactgggagcagtatgtctctatttataaattacccaggctaaggtgtttgttatagcagccctaatggactatgacaggaagctactgtggggtcctggtgaaatgtctgcgacttggcgcacagccaccgcgtggcagtgaagatagggagaagtgggcagattagagatatcctttggaggtagaaccaatggtatctgtggctgaattgggttgaggacaggaagggaaactgaggaaagaaaggtgactttgatgttttgatatcagacattagttggttagtggtgccatttactgatttggggaagccgcagttaattgggcatttaatttgtaacaatctaagtttaaggcatgtggtgtatggtgtggtatgccacacagatcccccttcaggactgagggctgtccccagctgccaggagtggtggctgctcacaactgagtctgtccccagtaccctctcagcagaagacagcgaaccctcaagatggcattcgtcctgtgatacacgaaggcctgccaccttgcctctgtttgagacaaccgttccactctacagctccccatggtacctgcctgtgccaaatcctttcttcctcatcacaggattcccgagggtacytcccaatcaacctccccacaagcctccatctcagactggctcttgagaacccaaactaaggcagctggtgccaggagtggtcctataggaagcagaccctaaaataggattttggagctgccatcacctgccagctggatacaagggctcccccgcaccccccccccctcaccaacctcccaggagggaagcctctggcatctgtatgggcaatgattaagccttcactgatggcgcaatagctcagtcatttgaaagatacagggaaacagaaattccaaggcaaagaaatgaagtggctgttgccagtgttagtgatgcattggagaaagacaataaaaatgctacagatgattaatcactaatttaaggggaagtgtgaaacgaggccctta

SEQ ID NO: 683595 - DNA, 284 bp, Homo sapiens
tttctgtgaggcatgaatccaaaaggttacaactcctggtgatcagcttaaattcacgaccatatttcaggtcacaaactgggctcaggggtgcwgtgactccatatactaatctacgtcagtcccccacagacccaaagccaacatccctgatgtctccttgctgatcaacttaaaaagtggtgaggaagcatggattttaaatgagcatgatataaagtagcttgttacacactgcttgaggctacttgccttatacctatttttctaaggaaggtgaacca

SEQ ID NO: 683596 - DNA, 1534 bp, Homo sapiens
tttttatattgtcttttaatgttataaaggccctgtccttcacacccacctttccagtttattctgtaacaaactgataatattccattaaaattagttattataagaaaatgactttcataggctttaaattttagtttttttttyccgtccagagagagaaaaaactaacaaactattcattaatggaattctaatttgttcatctgtctggtaatgaaaagcagttgttttgtttgcctttgtatccctccaagagattttctttctctgtcattgcaaatgttgcttacattttgggttcagagactgcctgcaggatctgtggtatctaaaccatccctaagcagcaagtacaggcgattttggtggagctgatttccataatgtacaactggagaggtgcttttgaaaaatagttgcaatgagtggttaagtgtttgttgtctagtgggcatggagagatttctgtcactcacatctaggcctgctctaggacttgaggaataggtctcttgtttccacctctaagatcttacatttgaccattggatgaagtttcaagagagtttaaaaacaagtaaattttaccaaaagtttatattataaaaaagaaaaaaaaatgatggccccccagagaggcccttaacagaagtgatggctcagatttattttgatgtaagttcgctattaaataaaaaataattaaaagaaaggtttgtggccaagaaagcatgacatgtcattcagattatgactcttgatggctatagtttacagctgcatttattgtcaaataaagcagatgattcctcagtgtattatcaggaacaatcaacaaaataaatttaaaatatactatttaaatgttaatcaaaagcatccccacttactagataaagaatagcccagagaagaaaggcagtgtttatatggtcactaaagtttgaaacaagcttgttggattttgaacaagtgaactttccagatatcactttggatacatgaaccataaatttttatctgagcagaacatacttgtttgagttttgcattatagttcattttccactggactaaaatgagatacagttataacgttagcatgcattgctcaaatcatgaggaattttagtctttacaaacacagactgattggcacttagcaaacaacttaatagtatttttccagtttccctatagaaaataataatatttcatctccttccctgtgcaatccttatcaatttaggcattccctggagatatttagccattgatagcaccttccgtgaaagtttggaaaacttatattatagatctcaggtacacataatactttcaataattgttttaagtaccttttattttagatttataaaatctacatttatcgcatgcttctgtagtccagctgcttctgaaatagcacagtatcagcctatgtgacatcctaacatatgttaaatgaatcaccctgaagtgacagtatttgtcaatctgaaatatagcttttgtttttgtcttaaaaaat

SEQ ID NO: 683597 - DNA, 1534 bp, Homo sapiens
tttttatattgtcttttaatgttataaaggccctgtccttcacacccacctttccagtttattctgtaacaaactgataatattccattaaaattagttattataagaaaatgactttcataggctttaaattttagtttttttttcccgtccagagagagaaaaaactaacaaactattcattaatggaattctaatttgttcatctgtctggtaatgaaaagcagttgttttgtttgcctttgtatccctccaagagattttctttctctgtcattgcaaatgttgcttacattttgggttcagagactgcctgcaggatctgtggtatctaaaccatccctaagcagcaagtacaggcgattttggtggagctgatttccataatgtacaactggagaggtgcttttgaaaaatagttgcaatgagtggttaagtgtttgttgtctagtgggcatggagagatttctgtcactcacatctaggcctgctctaggacttgaggaataggtctcttgtttccacctctaagatcttacatttgaccattggatgaagtttcaagagagtttaaaaacaagtaaattttaccaaaagtttatattataaaaaagaaaaaaaaatgatggccccccagagaggcccttaacagaagtgatggctcagatttattttgatgtaagttcgctattaaataaaaaataattaaaagaaaggtttgtggccaagaaagcatgacatgtcattcagattatgactcttgatggctatagtttacagctgcatttattgtcaaataaagcagatgattcctcagtgtattatcaggaacaatcaacaaaataaatttaaaatatactatttaaatgttaatcaaaagcatccccacttactagataaagaatagcccagagaagaaaggcagtgtttatatggtcactaaagtttgaaacaagcttgttggattttgaacaagtgaactttccagatatcactttggatacatgaaccataaatttttatctgagcagaacatacttgtttgagttttgcattatagttcattttccactggactaaaatgagatacagttataacgttagcatgcattgctcaaatcatgaggaattttagtctttwcaaacacagactgattggcacttagcaaacaacttaatagtatttttccagtttccctatagaaaataataatatttcatctccttccctgtgcaatccttatcaatttaggcattccctggagatatttagccattgatagcaccttccgtgaaagtttggaaaacttatattatagatctcaggtacacataatactttcaataattgttttaagtaccttttattttagatttataaaatctacatttatcgcatgcttctgtagtccagctgcttctgaaatagcacagtatcagcctatgtgacatcctaacatatgttaaatgaatcaccctgaagtgacagtatttgtcaatctgaaatatagcttttgtttttgtcttaaaaaat

SEQ ID NO: 683598 - DNA, 670 bp, Homo sapiens
tggcaatgaccaaagataatcaagacttctaggatggaagagagattgagaggtaggagcaggaaggcaaattcagatcccataaagaatcagttgtgcttccaagaggttctcagcccagtgaagttccaggtctctttccattcttgagaaagagtagcagtctctggtggaaggaatatcccctacatcctrggaaaatttattcatgacctggtctgatagtattccctgcttcttgggaagatttactcatgaccttccagggcagcatgggagttagggttttggttgctgccatgcttcttcctttcccgtgtctcttctgcttatctgaggtaatgcaaaaactttaagctgatacctgttggtgtaatgggagttcctttaatttatattaactttccaactaccttaatgtttgctagtcaagtccatgcacatcttaccctcgaatgctcttacatgtgtgtagacctaactgtcctattagatcccctgtctattagatacccagaggcatgacccagccaggtcactcaagagtggctcagcaactcagcagacaggatgtggtcaaggggatggtcaggtccctggttccacctctgtggtcagcaacaaggaaggtgtctgatcagagagaaagagtcagaaaagcaagaagcaa

SEQ ID NO: 683599 - DNA, 1202 bp, Homo sapiens
aaaaaaagacataatccgttctgtgaagagtaagcactcttcctgtaacctgttactattaataaatttagctaattaatattttttattccaatattttttaataaatgtcattcacatattacactaaaatcaaaaccattcatagaaagttgaggtggaatcagtatgagttgaaactagacttctgttgcattatacgtgaacaatttgccaaattgccagtgaactgtctggaggcccattttttaatacatggatgagctaatgtcgatgtgcagatgtggtaaagggaatggttcaccttgcattagccttgactcaccacaataaattttaaatgttaccagaaatagttgtcctctttttgtaagtgacctacatgccgtaacttcaacatttgcatgtccaaatgccttggtggagggcattctgcttgcctataaaggtctgtctcttgagggaaggatgccctgcaaggacagggaggcaaaattggaacctgatgatgtcataaagagccatcctcaagtggtgatcttgtactttccctgcaacaagagacctcataatgacaaagtcaaattgtgagtgatggatattaatgggaatatcttttgagtttatgttactcaaagagcctccttcttaaatcttgactgcataggaattgtctgctgcctttctcatgcttccctatatattagcatatattttgtatctatgtaaatcattcattcaataatgtggaattaatcataaatgaataaaagaaatgatgtaagcttgaaagtgagacatacctgagtgggaatcttggctgtatctctttattgtggtagaaatcgaagcaagtggtccaacctccagagcttaggtttgtgtatttgtaatgtgacgataacaattcctgtcatacatcacagagttgtggtgtggagcacgtgagctaatacacgtgagttcacattgcagtattgagagtctgtggtgaacacagaatatgctaggacacacagaagagaaagcactctcccacccctggaagagctcgaagtcttgtgaagaagtcacatgggaagcaatgcctgtagcrtaacccgtgtgtccactaacctccatgtgcacaaaatgagctactgtggaggaattttccacctctgctctgtcatttacacatatttgtttcatttctgtctcta

SEQ ID NO: 683600 - DNA, 671 bp, Homo sapiens
ggtggttatgtgagtgtttttatgtaattttgtcaacttttctggtttattgaaatatgtataataaaatattggttacatacatgtttttaaaaatcttacttcaattggtcagaaattgaatgaaattagcaaagcgcacttgcattacctcaccctgaatattcatttgttccctgtcatttactcttttatcaattattgagcagatttccaaccagccgaaacctctgaggtactttagcaacacctgttgtccctcaaatgccccatatacttgagcctatttctctactatccaatcttgtctacattatattccattcttggccagctctttgctggctataaattttgagatggattttataaaaagcttcttaggtgtgccatagaagaagaagawatgagctggaagtcagaggactggagccctcaccgtagttctcccactgattcctacaattagccagtgtttgttgagcagtgagtaatttttgagataatttgacacatttagttctcacaacaaccctatcattcctatttgacagatgagaaaaggtgagtcagataggttatatattttggtaagggtttcatgatacaggcaagatttgaacagtgacttgtcaaactccaaagcctgggactacaaccacttgtttgta

SEQ ID NO: 683601 - DNA, 1255 bp, Homo sapiens
ttgttacaattctttgctaaactttttcatctagaaaaacagtagtagtgataatttattttgtatactatcaaagaaaggtagttagtggggatatttagtagtttcaagtctaactattttttgcatcagaaaactgattaataccttttattggagatattactctgctaacttacattgtttaagtcattgtatacatacaggaagcaaaaaatgacttttccatgctaacgtttctgcagtttgttacagatgaaaaatagtttcattttgtgtgcacagaataaagaaggttagaaggttacaaatcatgtttgtataaggtattacggcatctctccagtcaattggaaaattaaatttatggatgcactgaccaaatcaaaacaatgtgctttatttttttctccagaaaatcttcagcccaaatagcaatttggcttcctattcctctacttagaaaatgcgttttgatttactacaagtgtctaatttaatcaaagatatgaacatgtaaatggtatctggtttctgttttattgtgttttcagaacataaatgagaaacagtgagaaacgtactttctgaagacatctcttgtatattttctcagcagtgcttctagatttcgaactttttcagaagcatctaaaatgtaagaaagttttatttgatatctaatatgaaacagtctctgagataaaaattatttcatccccaaagaaagtatgaatttgcaggagatatacatgctgagagtagaaaatattagcatgcatagagttacagaattcttcttattcttgtgtttaacattgaaaaacacttaaagttccaagttatgattcctagatcttttcaaagaagatcattgtgaagtgaacacctagggaatgatagataaaaactccratacagcacatttctgcctgtcttttccgtctagaagtaagcttaagagcaatgtgcaggaggctttcatcccacaacagcctttctataaaggagtcaatcttacctcaataaagatgtttttttaaaaaacaaaaattccactccagtcactcaccttttgtgtgcctgagtagaaccaaacaaaactttgaagcaaaccctcacctctacatgtacgtaaaaagttgtaacatacttcatcattactctgatcagagatgttccaactggcttccaacagagtttatatgctattaaaattttttacctatcaggctggcaaatatctaaaagctca

SEQ ID NO: 683602 - DNA, 1255 bp, Homo sapiens
ttgttacaattctttgctaaactttttcatctagaaaaacagtagtagtgataatttattttgtatactatcaaagaaaggtagttagtggggatatttagtagtttcaagtctaactattttttgcatcagaaaactgattaataccttttattggagatattactctgctaacttacattgtttaagtcattgtatacatacaggaagcaaaaaatgacttttccatgctaacgtttctgcagtttgttacagatgaaaaatagtttcattttgtgtgcacagaataaagaaggttagaaggttacaaatcatgtttgtataaggtattacggcatctctccagtcaattggaaaattaaatttatggatgcactgaccaaatcaaaacaatgtgctttatttttttctccagaaaatcttcagcccaaatagcaatttggcttcctattcctctacttagaaaatgcgttttgatttactacaagtgtctaatttaatcaaagatatgaacatgtaaatggtatctggtttctgttttattgtgttttcagaacataaatgagaaacagtgagaaacgtactttctgaagacatctcttgtatattttctcagcagtgcttctagatttcgaactttttcagaagcatctaaaatgtaagaaagttttatttgatatctaatatgaaacagtctctgagataaaaattatttcatccccaaagaaagtatgaatttgcaggagatatacatgctgagagtagaaaatattagcatgcatagagttacagaattcttcttattcttgtgtttaacattgaaaaacacttaaagttccaagttatgattcctagatcttttcaaagaagatcattgtgaagtgaacacctagggaatgatagataaaaactccgatacagcacatttctgcctgtcttttccrtctagaagtaagcttaagagcaatgtgcaggaggctttcatcccacaacagcctttctataaaggagtcaatcttacctcaataaagatgtttttttaaaaaacaaaaattccactccagtcactcaccttttgtgtgcctgagtagaaccaaacaaaactttgaagcaaaccctcacctctacatgtacgtaaaaagttgtaacatacttcatcattactctgatcagagatgttccaactggcttccaacagagtttatatgctattaaaattttttacctatcaggctggcaaatatctaaaagctca

SEQ ID NO: 683603 - DNA, 656 bp, Homo sapiens
tggaatttaagaagtatccttcaatgcttgtcaaactgtgggttgtgaaacaacttagaaggtggtggccagcattagtttagtggaataaaacgttggatagaatacagtgcaatggacagataaacagtgtgcatgtatgtgtgtgtatgcatgtgtacgtacatatgtgtttatgtatgtgttgtgtatatacatatactttatacataaagaataagaattgttccrcagagcttttgtttctgctacatgattacacacacatgcatacaggatgcactggaattcatctcagggacagactccgcactcagctttggcttcagccttgctcttcagaagggcagtcagctggaagcccatttcaacatcctttttggctttcctggcagcctgcagatcaaggatcgggtgaccctgcaggttactttcctatctgatcagtgtaacaacagtaataaaattgacaaggcgtatcataggacttttgctaatatatgttcattcccttctaaacacagataaccattctacatgtaacctggaataaaagtcaccttgagtactttatatttcaaaattctttcaggccacggaaatataaatgcatatttattcatattgcatgagtaaaattctagaataaatgacca

SEQ ID NO: 683604 - DNA, 656 bp, Homo sapiens
tggaatttaagaagtatccttcaatgcttgtcaaactgtgggttgtgaaacaacttagaaggtggtggccagcattagtttagtggaataaaacgttggatagaatacagtgcaatggacagataaacagtgtgcatgtatgtgtgtgtatgcatgtgtacgtacatatgtgtttatgtatgtgttgtgtatatacatatactttatacataaagaataagaattgttccacagagcttttgtttctgctacatgattacacacacatgcatacaggatgcactggaattcatctcagggacagactccgcactcagctttggcttcagccttgcycttcagaagggcagtcagctggaagcccatttcaacatcctttttggctttcctggcagcctgcagatcaaggatcgggtgaccctgcaggttactttcctatctgatcagtgtaacaacagtaataaaattgacaaggcgtatcataggacttttgctaatatatgttcattcccttctaaacacagataaccattctacatgtaacctggaataaaagtcaccttgagtactttatatttcaaaattctttcaggccacggaaatataaatgcatatttattcatattgcatgagtaaaattctagaataaatgacca

SEQ ID NO: 683605 - DNA, 656 bp, Homo sapiens
tggaatttaagaagtatccttcaatgcttgtcaaactgtgggttgtgaaacaacttagaaggtggtggccagcattagtttagtggaataaaacgttggatagaatacagtgcaatggacagataaacagtgtgcatgtatgtgtgtgtatgcatgtgtacgtacatatgtgtttatgtatgtgttgtgtatatacatatactttatacataaagaataagaattgttccacagagcttttgtttctgctacatgattacacacacatgcatacaggatgcactggaattcatctcagggacagactccgcactcagctttggcttcagccttgctcttcagaagggcagtcagctggaagcccattkcaacatcctttttggctttcctggcagcctgcagatcaaggatcgggtgaccctgcaggttactttcctatctgatcagtgtaacaacagtaataaaattgacaaggcgtatcataggacttttgctaatatatgttcattcccttctaaacacagataaccattctacatgtaacctggaataaaagtcaccttgagtactttatatttcaaaattctttcaggccacggaaatataaatgcatatttattcatattgcatgagtaaaattctagaataaatgacca

SEQ ID NO: 683606 - DNA, 656 bp, Homo sapiens
tggaatttaagaagtatccttcaatgcttgtcaaactgtgggttgtgaaacaacttagaaggtggtggccagcattagtttagtggaataaaacgttggatagaatacagtgcaatggacagataaacagtgtgcatgtatgtgtgtgtatgcatgtgtacgtacatatgtgtttatgtatgtgttgtgtatatacatatactttatacataaagaataagaattgttccacagagcttttgtttctgctacatgattacacacacatgcatacaggatgcactggaattcatctcagggacagactccgcactcagctttggcttcagccttgctcttcagaagggcagtcagctggaagcccatttcaacatcctttttggctttcctggcagcctrcagatcaaggatcgggtgaccctgcaggttactttcctatctgatcagtgtaacaacagtaataaaattgacaaggcgtatcataggacttttgctaatatatgttcattcccttctaaacacagataaccattctacatgtaacctggaataaaagtcaccttgagtactttatatttcaaaattctttcaggccacggaaatataaatgcatatttattcatattgcatgagtaaaattctagaataaatgacca

SEQ ID NO: 683607 - DNA, 598 bp, Homo sapiens
ataccagagattattatatcatagttctaatctttgtagaactatttgggtattggtattcatcaaagtaaacataatctaaatacctgtatttaactttttcttgtttaactccatttaggctatacgtctttcaagggaaaatcctgttgataatttgtcacatcttaaaagcaaaatatcaacagtttgccatctcaaataatraaaagaagggaaaacccccaaatcatgatcttaacatatgcgtcaacagcatcgagaagatgaagaaaacaggtcttactcacccacccactttcagctgaggttggttaaggaaacaaagtattttagggggcctcatatttctctattttgtattgcaaatgcatagcaggagagccgatagtactgagaaatcactgttcctgcactttactgtcaaactttaaagttttgatctccaaaatttaagaacataataatgataagtaaacataaacagaagcttaaaaatatttccattttactctttttattattaaaccctggatgcttcaacctcagttttagtcaactattgattttaccatttattcagtagccaataagtgta

SEQ ID NO: 683608 - DNA, 598 bp, Homo sapiens
ataccagagattattatatcatagttctaatctttgtagaactatttgggtattggtattcatcaaagtaaacataatctaaatacctgtatttaactttttcttgtttaactccatttaggctatacgtctttcaagggaaaatcctgttgataatttgtcacatcttaaaagcaaaatatcaacagtttgccatctcaaataatgaaaagaagggaaaacccccaaatcatgatcttaacatatgcrtcaacagcatcgagaagatgaagaaaacaggtcttactcacccacccactttcagctgaggttggttaaggaaacaaagtattttagggggcctcatatttctctattttgtattgcaaatgcatagcaggagagccgatagtactgagaaatcactgttcctgcactttactgtcaaactttaaagttttgatctccaaaatttaagaacataataatgataagtaaacataaacagaagcttaaaaatatttccattttactctttttattattaaaccctggatgcttcaacctcagttttagtcaactattgattttaccatttattcagtagccaataagtgta

SEQ ID NO: 683609 - DNA, 598 bp, Homo sapiens
ataccagagattattatatcatagttctaatctttgtagaactatttgggtattggtattcatcaaagtaaacataatctaaatacctgtatttaactttttcttgtttaactccatttaggctatacgtctttcaagggaaaatcctgttgataatttgtcacatcttaaaagcaaaatatcaacagtttgccatctcaaataatgaaaagaagggaaaacccccaaatcatgatcttaacatatgcgtcaacagcatcgagaagatgaagaaaacaggtcttactcacccacccactttcagctgaggttggttaaggaaacaaagtattttagggggcctcatatttctcyattttgtattgcaaatgcatagcaggagagccgatagtactgagaaatcactgttcctgcactttactgtcaaactttaaagttttgatctccaaaatttaagaacataataatgataagtaaacataaacagaagcttaaaaatatttccattttactctttttattattaaaccctggatgcttcaacctcagttttagtcaactattgattttaccatttattcagtagccaataagtgta

SEQ ID NO: 683610 - DNA, 598 bp, Homo sapiens
ataccagagattattatatcatagttctaatctttgtagaactatttgggtattggtattcatcaaagtaaacataatctaaatacctgtatttaactttttcttgtttaactccatttaggctatacgtctttcaagggaaaatcctgttgataatttgtcacatcttaaaagcaaaatatcaacagtttgccatctcaaataatgaaaagaagggaaaacccccaaatcatgatcttaacatatgcgtcaacagcatcgagaagatgaagaaaacaggtcttactcacccacccactttcagctgaggttggttaaggaaacaaagtattttagggggcctcatatttctctatttygtattgcaaatgcatagcaggagagccgatagtactgagaaatcactgttcctgcactttactgtcaaactttaaagttttgatctccaaaatttaagaacataataatgataagtaaacataaacagaagcttaaaaatatttccattttactctttttattattaaaccctggatgcttcaacctcagttttagtcaactattgattttaccatttattcagtagccaataagtgta

SEQ ID NO: 683611 - DNA, 598 bp, Homo sapiens
ataccagagattattatatcatagttctaatctttgtagaactatttgggtattggtattcatcaaagtaaacataatctaaatacctgtatttaactttttcttgtttaactccatttaggctatacgtctttcaagggaaaatcctgttgataatttgtcacatcttaaaagcaaaatatcaacagtttgccatctcaaataatgaaaagaagggaaaacccccaaatcatgatcttaacatatgcgtcaacagcatcgagaagatgaagaaaacaggtcttactcacccacccactttcagctgaggttggttaaggaaacaaagtattttagggggcctcatatttctctattttrtattgcaaatgcatagcaggagagccgatagtactgagaaatcactgttcctgcactttactgtcaaactttaaagttttgatctccaaaatttaagaacataataatgataagtaaacataaacagaagcttaaaaatatttccattttactctttttattattaaaccctggatgcttcaacctcagttttagtcaactattgattttaccatttattcagtagccaataagtgta

SEQ ID NO: 683612 - DNA, 598 bp, Homo sapiens
ataccagagattattatatcatagttctaatctttgtagaactatttgggtattggtattcatcaaagtaaacataatctaaatacctgtatttaactttttcttgtttaactccatttaggctatacgtctttcaagggaaaatcctgttgataatttgtcacatcttaaaagcaaaatatcaacagtttgccatctcaaataatgaaaagaagggaaaacccccaaatcatgatcttaacatatgcgtcaacagcatcgagaagatgaagaaaacaggtcttactcacccacccactttcagctgaggttggttaaggaaacaaagtattttagggggcctcatatttctctattttgtattgcaaatgcatagcaggagagccgatagtactgagaaatcactgttcctgcactttactgtcaaactttaaagttttgatctccaaaatttaagaacataataatgataagtaaacataaacagaagcttaaaaatatttccattttactctttttattattaaaccctggatgcttcaacctcagttttagtcaactattgattttacsatttattcagtagccaataagtgta

SEQ ID NO: 683613 - DNA, 601 bp, Homo sapiens
tgattttatttctgatactctcagggatagatgatatctagagcacacagtttgctcatttggtctttcttagtcaagtccatgacttccttttgtcatggtggtcttttactcaaaatacatttatattttttatcgaaacaaaatatttcaggctgggcatggtggctcacatctgtaatcccaacactttgggaggccgaggtgggtggattacctgaggtcaggagttcaagaccagcctggccaacatggtgaaaccctgtctctactaaaaatacaaagaaaaaaaaattaacagggcatggtggtgtgcatttgtagtcccagctactggggaggttgaggcaggagaatcacatgaacctgggaggcagagcttgcagtgagctgagatcgggccactacactccagcctgggtgacagggcatgactccatctcaaaaaaaaaaaaaaaaatttaaagatgcacatttttgttaagcgtaatgaaagagaacttttgtttatatctcaccrttgaaagtagaagctattttttccttttcagatgagatccggcacgttcagggtggtatggccatagacatttagtttctc

SEQ ID NO: 683614 - DNA, 1116 bp, Homo sapiens
ctgatggccagtgatgatgagcattttttcatgtgtcttttggctgcataaaaataattttaaattttgcagacattaaatggggtcctgactaggaacagcctaatgttgatgaaaggaggtgacttaaaatttatatttttttctccctgaaaatgagtcatgttatttgtaataataaaaaaaatggccatttttatgagagaaagctgatatcacttaccaaaactgctggcaatttaaggtagcccaaatgacaaattactaaataatattagtatgtcttttaggtaatagaactgatttgttctcttgtgtaagyagtaagcagcaaaaagaaagtattttataaaattatttacatgaaaattgctattccttattagggtgccatcaattcaatactgtcaacctgatgatctgtagtgagaaagaaagagacaaaatttctacagaaagacgtaactccttcattgacataagggagtcttccccatccacagtaccaaaggccccattaagtgcaacagcttaattcccaggtttttattatagaaacatacatgtacactgactactgtaggctgaacaatcacacatacacctacatatattattagcttttcaaaattacacaaatgctttttgcatatgcatttattaaaagcattgctgaaattagggtagcctttgatactgttgttatctcaagctagggatactaggaatccaagtattacactaaaatgtataggctttttgatattaaacatgaatcagaattttaaaatagcaatcactagagatgagtggggaacagttgtaacaacaagaaagtagatgcaaccttgatgtttattaaacaaacgtgttttgagctaatcactatgctttaagtaatactaagtggatgatcagactcaagcaatgttaagaaatggccctcgtcctggatggagtcttgcagaagacagggaaatagacaagagaacatgatatttacatgagaacacgacatttacgagagaacataactgattcattacatgtatgtaaaaaatgatgaaaatacaggagagagagaaaataataaagggcataacttctgaagcttga

SEQ ID NO: 683615 - DNA, 625 bp, Homo sapiens
accgtggtatctcttaggtatgaatattaagcattctagtgagaattaatttaaatttgtgctttcctatatcccactccagatatgttcctcagctttgaggactatattgcaatatagagaaggcatgttctaataaaagaggctgccttaaatcctttttaaaaacaaagtggcatatgtataagtaaggaaagaaaaattgagaaaaaattttaaagtctattaattgtctcaaaatgaaatggtattacatataatttgtgaatcattagaatgctagagaaagttcccaaaatgataccctgaatgaaatattttaaagtatcattaagactcttaatccaaagaactttggagagactctgtccctttagttttctttaatatatgcccttgaaaaaaaaaatgcccatgcaataaatgttgaccaaaacacgttggctttgcagttgtgctttgctataaaattaaagataaattytaatgaactatgcagaagtatgacctcataactaggtaggtaatgatacggtcaatgccaaaacacagtcctcatcagtaagagctgaagcttaaggtttgacattttatttctttgttccacatgtttattttttgaatt

SEQ ID NO: 683616 - DNA, 1808 bp, Homo sapiens
gtcttctagagttttgttgtcatagagkcaaatgagatgccaaatgctagcaatcctatttaggaggcctactattaggatttaaaagaagtggactgccagagatgaattatgtgacacagatgctaacatctagttattatgagtgatccattctgtcatgaggtagcacttgaaaaacaacctgggacaaaagaacaggcctctggcactactgaatttttggagagagaaacctttagaagttagcatgtggttctttctggacatgttcattgccttagttcttcttttgcaaatattttgtaaatattcatgaagtgaaatgagatgtttgagaaggcagatctgcagatcccctaaagagcattgtcagttatgctgggctgttcctaccctatccctctgtttacctgcggcggcctctcagagcgtgatcgtggtggctttgtggtggttttaaatgtaatcgtgagaagctagctgagagaatgctagcagtgttccttcggatcaagttgagactagctggtacagttaagcctaagtttctttttgtttctttccttgcccctctcatttttctagactttgagaaatttacagtttggtagttaaggactatgtttgcaagcctaattcaaagcttttggggaatgagttgttttgttgtgcaaaagacaaataggaagtatatgactgtatgccttataggaatagaaggcagcagatagtatagctattttccatatggggaaactgaggcatgggagggttacttaatgaagtccctgatctctcaagaggcaaacattaaaaaaaaaattagagaaagacgtcattatttgaaaatagaggtgagccctcctaaagctggtcttgagctgtttcacgtgttagtgctggcaggaggtaaccaggacggcctaaatcttgctttctgaaactcgttcatcaggcatttcctgagtggatgtgagtactgagatacatcatcagttctcccatgtgccacgtcactgctgacacgtccttagaaatgtctgatgtggtgttggctgatcttggtattgatcagttgtgaaagtggaagaggcatgagaagagacacctcttggggcacgctaaaatgacatatcgtgggggtccctggacaactttttattaggactggagccagacctaggaatatgtgttttaaataagtcttttaggtgattctgacgtaggtcatccaggaactcactttggaaagcattgtactagacatgaaataggagtggctggatgaaaaacaataaggaaaatttgccccggtgctgtggctcatgcctgtaatcccagcactttgggagacagaggtgggaggatcacttgagcccaggagttcgagaccagcctgggcaacatggtaaaaccccatctctacaaaaaatacaaaaaattaaccaagcgtggtggagggcacttgtagtcccagctgctcgggaggttgaggtgggaggatcacttgagcctgggaggttgaggctgcaatgaattatgatggcaccactgcactccaacctaggtgacagagatcctgactcaaaaaaaaaaaaaaggaaaattttcacagattggtgaaattaaactgagaaccacttttgctttacatatgagctcagcagagcctttaaatcacgatcaggtttaatttactatctaattttcagaaatacatttgtcacctgcagacagttagacctagacagttgtagaaattttcagcattcccaacttacagaaaaccctgacagaaagaatac

SEQ ID NO: 683617 - DNA, 982 bp, Homo sapiens
agttgcataactctaaatatgctaaaaaccactgaagtgtattgtagactttaaatgggtgaattgtatagtatgtgaattatgtctcagtagaaatgttacctcttcctcctccaaaataagaatatatttataagcagtataaggctccaatatcattagattcttttttctctcaggcttttcacactaaactattaaacaattaagaacaggcatttgtgaatttccccagaaataaaaacaaaccttttgttattacagttacatctccctagaatattaaagtcagataatttttaaaacattatttattaagctaaaaaaagtcaaatcagtgaaacacttgaggtgacttaggctcttggattcatcagatcctataaagctgcagctcagcttttaatcagtgtgtcgagtgcctgtgacacactgaaggctgtgcaaagtactgtcacaaaaatacatgatgaaatgtatacagaccctgaccacaagggtgggaggcaaaagcacatacaccaaaaggaacttatcttgggagtgcaagaggcttttycctcttgttctaacatgtattcgaaatttcacaatggtctggcaattgaaaaaggagaaaagattatctttctttttcaagaataaacagaaggaagatttgagctgagtaaccccgtattttaagctttacaagttggcttaactacaactgtcagttttacttctttcaaattcccaatgacaactaaagaagttttattttttaaatgtatttggccttttacatgaagataattttatctaggcacacgttagaaaaatgcctagataaaatgaagaaaaatgccgaatatatacaaaattaactcctgtggttttttggcatggtggcaattctaacacatggatcaataatattccttcaaatttccccaaagaagataagcaaagattttggcctaagatttcacaagaatcagca

SEQ ID NO: 683618 - DNA, 982 bp, Homo sapiens
agttgcataactctaaatatgctaaaaaccactgaagtgtattgtagactttaaatgggtgaattgtatagtatgtgaattatgtctcagtagaaatgttacctcttcctcctccaaaataagaatatatttataagcagtataaggctccaatatcattagattcttttttctctcaggcttttcacactaaactattaaacaattaagaacaggcatttgtgaatttccccagaaataaaaacaaaccttttgttattacagttacatctccctagaatattaaagtcagataatttttaaaacattatttattaagctaaaaaaagtcaaatcagtgaaacacttgaggtgacttaggctcttggattcatcagatcctataaagctgcagctcagcttttaatcagtgtgtcgagtgcctgtgacacactgaaggctgtgcaaagtactgtcacaaaaatacatgatgaaatgtatacagaccctgaccacaagggtgggaggcaaaagcacatacaccaaaaggaacttatcttgggagtgcaagaggcttttccctcttgttctaacatgtattcgaaatttcacaatggtctggcaattgaaaaaggagaaaagattayctttctttttcaagaataaacagaaggaagatttgagctgagtaaccccgtattttaagctttacaagttggcttaactacaactgtcagttttacttctttcaaattcccaatgacaactaaagaagttttattttttaaatgtatttggccttttacatgaagataattttatctaggcacacgttagaaaaatgcctagataaaatgaagaaaaatgccgaatatatacaaaattaactcctgtggttttttggcatggtggcaattctaacacatggatcaataatattccttcaaatttccccaaagaagataagcaaagattttggcctaagatttcacaagaatcagca

SEQ ID NO: 683619 - DNA, 982 bp, Homo sapiens
agttgcataactctaaatatgctaaaaaccactgaagtgtattgtagactttaaatgggtgaattgtatagtatgtgaattatgtctcagtagaaatgttacctcttcctcctccaaaataagaatatatttataagcagtataaggctccaatatcattagattcttttttctctcaggcttttcacactaaactattaaacaattaagaacaggcatttgtgaatttccccagaaataaaaacaaaccttttgttattacagttacatctccctagaatattaaagtcagataatttttaaaacattatttattaagctaaaaaaagtcaaatcagtgaaacacttgaggtgacttaggctcttggattcatcagatcctataaagctgcagctcagcttttaatcagtgtgtcgagtgcctgtgacacactgaaggctgtgcaaagtactgtcacaaaaatacatgatgaaatgtatacagaccctgaccacaagggtgggaggcaaaagcacatacaccaaaaggaacttatcttgggagtgcaagaggcttttccctcttgttctaacatgtattcgaaatttcacaatggtctggcaattgaaaaaggagaaaagattatctttctttttcaagaataaacagaaggaagatttgagctgagtaaccccgtattttaagctttacaagttggcttaactacaactgtcagttttacttctttcaaattcccaatgacaactaaagaagttttattttttaaatgtatttggccttttacatgaagataattttatctaggcacacgttagaaaaatgcctagataaaatgaagaaaaatgccgaatatatacaaaattaactcctgtggttttttggcatggtggcaattctaacacatggatcaataatattccttcaaatttccccaaagaagataagcaaagattttggcctaagrtttcacaagaatcagca

SEQ ID NO: 683620 - DNA, 625 bp, Homo sapiens
ttcctgttattctggtaggtctggagcagccacactacgactttacttcgcacttctctgatggacagtaagaactctgtgacacttgtagcaggcagagggatagaattcacccgagacaacacagagggaagggccccggccagaggctctcaaccaaggagattctgccctcctcaggagacatctggcaatgtctggttatttcaaatttgggggtgttgttaacatctagtggttaggagccagggatgctgccaaacatcctacaatgcataggacaccccccmccaccaccaccacaacaaagcattatttggcaaaagtgacaataatgccacaaatcaagaaacccaaatcaagcaaatcattattgggcattttctccttagccaaatcatcattctctgatacagcacaagaggtcaatgtcctattgtcttaaaatgttatttttcctagagttgaggggatagaaagacaacaaaggatactaagtgccacactccatggcacagtgcatatcttctgcatatcctgtttctttctcagttctcgcgacaatgcggagatgaggaaacagataccaagcaggctccttggctcctctaaactcacgcaaaga

SEQ ID NO: 683621 - DNA, 667 bp, Homo sapiens
atttatagtattgcctgcccagcactcctcccttctcctggacccatgtccttctcccctcccccccacacagccatagtaaaagctgtcatgctctttcccctggccacacacgaytggtccaaagatgatcactaatgagttctctgaattttttcacattggaactaggaaaaatagtctacttccacctaaagacagaagctacgaaatgtaaacagtacggagagacatagatgagcagcatggagagacatagatgaggagcatagagagaaagagaggaggatgtccaagtaccaagttcccattgtctatgaatccacctgcccctctgtctttcccatgggttggttgttcaactttgccctcaacaactatcatggtttcctcctctttgcttaagtacttcaggctgggttctgatttttacaattaaatgaacaattgattaatacatggtgttaacttatttaataataatgtagttaaaatatttgacctctgatcataaaaaattataactaacaataacaatcgtaataataaaaagaaagatgacttttaaatggcaatgctactgcagccgtgatgcagcaagtaatcatcagatatcaatatcttggggtgagttaaattatcagaactccaggctaacagggcaagc

SEQ ID NO: 683622 - DNA, 667 bp, Homo sapiens
atttatagtattgcctgcccagcactcctcccttctcctggacccatgtccttctcccctcccccccacacagccatagtaaaagctgtcatgctctttcccctggccacacacgattggtccaaagatgatcactaatgagttctctgaattttttcacattggaactaggaaaaatagtctacttccacctaaagacagaagctacgaaatgtaaacagtacggagagacatagatgagcagcatggagagacatagatgaggagcatagagagaaagagaggaggatgtccaagtaccaagttcccattgtctatgaatccacctgcccctctgtctttcccatgggttggttgttcaactttgccctcaacaactatcatggtttcctcctctttgcttaagtacttcaggctgggttctgatttttacaattaaatgarcaattgattaatacatggtgttaacttatttaataataatgtagttaaaatatttgacctctgatcataaaaaattataactaacaataacaatcgtaataataaaaagaaagatgacttttaaatggcaatgctactgcagccgtgatgcagcaagtaatcatcagatatcaatatcttggggtgagttaaattatcagaactccaggctaacagggcaagc

SEQ ID NO: 683623 - DNA, 1104 bp, Homo sapiens
accactttatgtgctaaaagcaaacagttgtttgctatttgtcagacagtgccttctgtctattaaagctatttttccagttactactcattcatttaaggcagtgaaggatcttgaagtatattcttttagcagttaagatatattgaattgtattgaatagcttattttattctagttatttgaaaattactgaacaatggacaatgtgcaaatcattgacatctgtctcagatctgctgagacaatcgtgatttagagattaaaaaaaaaaaaagaaggcaaattcatggtccaactcatcacagtgaagaaacttgtggcttacatatctcaacttacgtttgtcttgctgatctgcatgttttatccaatttttatttttcctaatcctattttaacaaatactatctatagtttatttcatatcatatgcacacatgcacaaacacctcaatacatacatgtctctgtgttctaagagtggactgcagacgaggcatacacaattaggaaaggaytggtctggactgaattgctcattcaacttcctacttcccaaagagggtcttcagggagtcatggcttctcttctgtgatcaagaatttaggcatttataagaaagtcatgagtgacaagtttattaaaacaaaagtgtggacaaaggaatgtagactgaaagcaggcatatcttctttattagggaatatacttacttgactcctggaggctcaggaatgtttgtgatgaggaatgttgacaagatagtcatggtgttagtagcataatatatgatcctgacattcaggaacctgttgagtattgtaactcttgtgacatgttgttccttggttctcaagatggttcagatgtacttcttccctttgccatttgtttctcttgggattctgttttttctgatttcatcaatgtctacacaaagcaggtgctcagaaaataatgattgatgatagcaatcataatgtttcttgggcttggtcatctttttgcacatttctgtcttatagtcataaatgtcttaacaactggcatgtccatacttgcagaatctgtctctgtgacaagtgtgtgtcatgttctca

SEQ ID NO: 683624 - DNA, 696 bp, Homo sapiens
gtcagtggcactttaagattgcaacattttgtttggtgaccttcacaccagttgactgtatgcaccttaatctctctctcaaaaaaaagctgagcctactatagattggcatctttttctttttaaccccagtttttcatttacctacactggtttacctacacctggtttaatttgtacagcagaatgaagttctttattacaaagctcagaaactcgtctttgagtttttaggaacagtaagtacaaaggttgtcatgaattgagactgaaagacctcatagataaattgggtagtacatttttaaagtaaagaataaataacacttcagaaaaatgtagaatacgttcataaatgcacaaatggagataaaatgtcactttttgtaatgaggtttctttcagactttgacactcgtaagtaaatgttcagaggaaataaacgtcagggcatatcagcttttgtgagggttgccaatgtgtaaatgtgaggtctactgtaaatcgtgctgtccatttacctgcctctctgcaggaatttctttttgagtgtgtagtccttatttcccaakaataaatacaaagacttttcagactatgaatacatatcacatggtctctaaggtacagttgtacattatacccgtggaagttttctttcttaaataattaaacgagattttcaattgtataaaa

SEQ ID NO: 683625 - DNA, 1099 bp, Homo sapiens
acaaagcactttgcaaattactttacagcttttctattgaatggatttgattaaagactcactgtaatgacaaacaccccgtattattctcacatttatttactgaaggtgttaccagcaaattacctaatcgaaacccttttttctcttttagcattgcccacgccttgacctttgtcccagtgtttgtaaaaaaattccattctcatgagtagtacattaattgtgaaagaaagaaaggaaggaaggaagggcaaaagaaaggaagaaagaaaaaaagctgaattttcttgctttcggcctaaacttattgacacatctgtaatattgtctattcaatggatttcttttctgaaaacatctttctcccttgcatctttatccatgtaacttcttcctttttagccccttagtgtttaatactaccttcatcttacatccttggctttggttcctgttttcctaattttaytcaacatctcccatttctaagtccttttagttcctttatttaacgatcaataagtgacattattaatggatagtcaaacataaaggaagttgagttgacaatggcctatcagtcttagtgatatgttcctgagtacatgtggccaaattcttgatattaaaatatttaatcccacaagagcttgcagacatttctaagacataggccaacatttatcttataaaattacagggtgaaaagctcaatattttgaacatagcaaaatgtgcctctacatgtcaggcaccatgccaagggtgtggggagacaatagtgtataagaaaacttcagacgctaacaattcatgaagctaacaactaagcgtaagagatgggctttaatatataataacaaattattatttaatttacagttattgggaatgctatgaaagagacagggtgatgtaaaagtgtctgattgtcgggcatggcctactctgggaatcacggaaagttgctctaacaaaactgacattcaggctaagtcctcaagaatcaatacctgttggctaggtaaagagagggaagagaagtgttcccactaagacaatagcatgccccaaggtcctgaagctggatggagct

SEQ ID NO: 683626 - DNA, 1099 bp, Homo sapiens
acaaagcactttgcaaattactttacagcttttctattgaatggatttgattaaagactcactgtaatgacaaacaccccgtattattctcacatttatttactgaaggtgttaccagcaaattacctaatcgaaacccttttttctcttttagcattgcccacgccttgacctttgtcccagtgtttgtaaaaaaattccattctcatgagtagtacattaattgtgaaagaaagaaaggaaggaaggaagggcaaaagaaaggaagaaagaaaaaaagctgaattttcttgctttcggcctaaacttattgacacatctgtaatattgtctattcaatggatttcttttctgaaaacatctttctcccttgcatctttatccatgtaacttcttcctttttagccccttagtgtttaatactaccttcatcttacatccttggctttggttcctgttttcctaattttattcaacatctcccatttctaagtccttttagttcctttatttaacgatcaataagtgacattattaatggatagtcaaacataaaggaagttgagttgacaatggcctatcagtcttagtgatatgttcctgagtacatgtggccaaattcttgatattaaaatatttaatcccacaagagcttgcagacatttctaagacataggccaacatttatcttataaaattacagggtgaaaagctcaatattttgaacatagcaaaatgtgcctctacatgtcaggcaccatgccaagggtgtggggagacaatagtgtataagaaaacttcagacgctaacaattcatgaagctaacaactaagcgtaagagatgggctttaatatataataacaaattattatttaatttacagttattgggaatgctatgaaagagacagggtgatgtaaaagtgtctgattgtcgggcatggcctactctgggaatcamggaaagttgctctaacaaaactgacattcaggctaagtcctcaagaatcaatacctgttggctaggtaaagagagggaagagaagtgttcccactaagacaatagcatgccccaaggtcctgaagctggatggagct

SEQ ID NO: 683627 - DNA, 933 bp, Homo sapiens
accttttttgcttaatcatgcaagatgaggagtagcctcttaataaggataaagaaaacttggaatcaaactgaaataattaagcatatttacatatttactacacaaatccttcatattttgttgagtttacataatcaagactgaaaatctcagaacagcattctctgaattttctattttcaatttcagaagtttctagtaacaattctatgtaaataataaatagatcaaaatgccaaaggaaactttttccctaagatttagctatctcattgtgcaacaatcctggaaaaagacatacttcaaatcatataaaatacatttctgagtaagtttggagtcaggagacattttttttcacacaaaaacataattggctggcagtttatttcatagcatgtaacaatcactacattaattaaacaatttaattgtcaggaaaaataattcattaaataatatttgatttggatgtcagtctcctttcagcaaacctcatttccaccaatttgtcctcttttaaaacattttatgggccgggtgcggtggctcacgcctgtaatcccagcattttgggaggccgaggmcagcagatcatgaggtcaagagatcgagaccatcctggctaacacagtgtaacaccgtctctactaaaaatacaaaaattagccgggcgtgctggcgggcgcctgtagtcccagctactcgggaggctgaggcaggagaatggcgtgaacccgggaggcagagcttgcagtgagccaagatcgcgccactgcactccagcctgggcgacagagccagactccgtctcaaaaaaattaattaattaattaattaattaaaataaaacattttatgtgtttgttttaggtaaaatttctcaacctcagcactggtgacattttggattggataattctttgatgt

SEQ ID NO: 683628 - DNA, 902 bp, Homo sapiens
cagtctagctgaatgaggtgatgaatcaatccacttactctctccagtgcctgaaacttctcaaggagcttgtgctctcctttgctcctctcttttcaaccaatctgaaaatgcttttaaaagataatktctgttttccagtgcagtcttctcacttggcatgtaatttctccatttttatttcctttgtgaatatcaaggtacaatttccatagctaccagtctaacctggaatcttttcatctcagttttggagttccacaacagtgtcctggtggatctatcttctatatattcctactataatgtacactcttaccaggtaccaatcagttgtttcaaaccacatttctactaaatgacctctctgaagtgattctgaactggcttccctattagatgaagaccaaacctctactctaagcacttaagacaaatggttgcattcatctcaatgctccttactcctcaatattatccattacatttttttgagacagattgttattctctgacagattgttattccttcatcgtccaaaaggagtcctcactttgcttagactggaacacaaaattttatctattttaatgttccgtcatataattataattatattctgttatctattccaaattttcagaattttatctattgcaaattttaagtattccaagttataaacttacgtcttccaaaaagactaccaggattaaaccaaccactgaatcatcatttcattacttcatattactacaagttagatttgggacactgtaatattttagccctgattttgccctttttatagtgtccatagataatttaacttctttgtataaacttccattataaaatgaagttttttatatatatatatgtatatatatatatatatata

SEQ ID NO: 683629 - DNA, 902 bp, Homo sapiens
cagtctagctgaatgaggtgatgaatcaatccacttactctctccagtgcctgaaacttctcaaggagcttgtgctctcctttgctcctctcttttcaaccaatctgaaaatgcttttaaaagataatgtctgttttccagtgcagtcttctcacttggcatgtaatttctccatttttatttcctttgtgaatatcaaggtacaatttccatagctaccagtctaacctggaatcttttcatctcagttttggagttccacaacagtgtcctggtggatctatcttctatatattcctactataatgtacactcttaccaggtaccaatcagttgtttcaaaccacatttctactaaatgacctctctgaagtgattctgaactggcttccctattagatgaagaccaaacctctactctaagcacttaagacaaatggttgcattcatctcaatgctccttactcctcaatattatccattacatttttttgagacagattgttattctctgacagattgttattccttcatcgtccaaaaggagtcctcactttgcttagactggaacacaaaattttatctattttaatgttccgtcatataattataattatattctgttatctattccaaattttcagaattttatctattgcaaattttaagtattccaagttataaacttacgtcttccaaaaagactaccaggattaaaccaaccactgaatcatcatttcattacttcatattactacaagttagatttgggacactgtaatattttagccctgattttgccctttttatagtgtccatagataatttaacttctttgtataaacttccattataaaatgaagttttwtatatatatatatgtatatatatatatatatata

SEQ ID NO: 683630 - DNA, 902 bp, Homo sapiens
cagtctagctgaatgaggtgatgaatcaatccacttactctctccagtgcctgaaacttctcaaggagcttgtgctctcctttgctcctctcttttcaaccaatctgaaaatgcttttaaaagataatgtctgttttccagtgcagtcttctcacttggcatgtaatttctccatttttatttcctttgtgaatatcaaggtacaatttccatagctaccagtctaacctggaatcttttcatctcagttttggagttccacaacagtgtcctggtggatctatcttctatatattcctactataatgtacactcttaccaggtaccaatcagttgtttcaaaccacatttctactaaatgacctctctgaagtgattctgaactggcttccctattagatgaagaccaaacctctactctaagcacttaagacaaatggttgcattcatctcaatgctccttactcctcaatattatccattacatttttttgagacagattgttattctctgacagattgttattccttcatcgtccaaaaggagtcctcactttgcttagactggaacacaaaattttatctattttaatgttccgtcatataattataattatattctgttatctattccaaattttcagaattttatctattgcaaattttaagtattccaagttataaacttacgtcttccaaaaagactaccaggattaaaccaaccactgaatcatcatttcattacttcatattactacaagttagatttgggacactgtaatattttagccctgattttgccctttttatagtgtccatagataatttaacttctttgtataaacttccattataaaatgaagttttttatatatatatatrtatatatatatatatatata

SEQ ID NO: 683631 - DNA, 673 bp, Homo sapiens
atcaaaacaaaggtatattcatactgcatgtgggtataagttttttcttacatatattatatatacatatataagtgtaacacttttaagaattttattgaccatctaaatatatagcaaaatcagctrggggtacaagagtgtaactacttccttttttcctaagttgtggaaaatgtgagaaatgagaagtaagcaagacggaggattagaatcacaaggtaggtttccctagtatgaattcagtacctgaaaatcttcttagttctgagtttgaagcagattctataaaatcctgtattaaaataaatacagtaggaattagcaaggatgggggaataggagtgggcagatatgttcttgaagagaataaatgcagaacattattctttgtcaattaatttttactttttatagattgttagactatttaacaaattcttatgagaaaagtgtgtttttaagtgatctctgggaagatgttcctgataataaattaaattaggactgtgcattgcggagcccccaccagttgtactccctctggtgaatttaataccagacgcaacctagttagaggtgacatgaaatcacagaatttgataatcttttttttcaaagttaagcaaatatagatgagctcttcttgtatatgtaagatgccagatggtgt

SEQ ID NO: 683632 - DNA, 638 bp, Homo sapiens
tcccacctccctatccttgcatcctctaaacattttctctctctgaacattttaattacattcaaacacagtaagatacaccttccgtttttattgtaaaaacatccctttgaatgttgccaactggctttctaaaaatgttatttcaatttgcactgctaccagttttgccaaagcaygacaaagacagaaaataattattttaacaattaagggtggcttaacagatgagaaatgatatttgattttttaattaaccttttttatataggaatatatacagtgtttgctcataggagtcatctcaaaatcaaattattacctagactatgaatatagtcagtaattaaaaccaaaagaaatcaagatctcaaaaatttccatagcttttcatttaataattcttatacctcatacaactggaaattcatgcacataaaataactaaaagaaaaaagttataaggtcaaagacagctgatttatccagtgtaaagtgatttagtaatgcagtcaaaatttgaaaatgccattcttccctaaattctttgacatgtgacaagaattttaaatggattattttagctagtaggcaactgcaaaaataccaggcagagataaggaagctgtgtgagtatt

SEQ ID NO: 683633 - DNA, 638 bp, Homo sapiens
tcccacctccctatccttgcatcctctaaacattttctctctctgaacattttaattacattcaaacacagtaagatacaccttccgtttttattgtaaaaacatccctttgaatgttgccaactggctttctaaaaatgttatttcaatttgcactgctaccagttttgccaaagcatgacaaagacagaaaataattattttaacaattaagggtggcttaacagatgagaaatgatatttgattttttaattaaccttttttatataggaatatatacagtgtttgctcataggagtcatctcaaaatcaaattattacctagactatgaatatagtcagtaattaaaaccaaaagaaatcaagatctcaaaaatttccatagcttttcatttaataattcttatacctcatacaactggaaattcatgcacataaaataactaaaagaaaaaagttataaggtcaaagacagctgatttatccagtgtaaagtgatttagtaatgcagtcaaaattygaaaatgccattcttccctaaattctttgacatgtgacaagaattttaaatggattattttagctagtaggcaactgcaaaaataccaggcagagataaggaagctgtgtgagtatt

SEQ ID NO: 683634 - DNA, 592 bp, Homo sapiens
aaagatgctctgaacatttatatttgcctacagttgggcaaaatcacctaacacaaagcctatttcataaagttgaatgtctcatgtaattyattgaatgcagtatactgtagagtgcagtattagttgtttaccctgctgatcgtgcagctgaatgggagctgcggctcactgctgttgcctagcatcatgagagagcatcattctgcaaatcgctggcccaggaaaaggtcaaaattcaaagtacagtgtctactaaatacatatcactttagcactgtcataaagtctaaaattcataagttaaaccacagtaagttggaggccctccaatcctgccctccaataactgtgtcacctctcacttctcaccatcagctgtaagctgatggagaatgcaggacaatgcattactccatcctcaaataattaacaatgactagaaaacaaatcaaggtcatttcaaggtcttggatccagaaagagacagaggaccgggtcagtggacaccttagtgtttgaggaagttgtaaagcaggaatcaggtgtgaatgcagagaggagggaggcagagggcaagagttagctgatc

SEQ ID NO: 683635 - DNA, 592 bp, Homo sapiens
aaagatgctctgaacatttatatttgcctacagttgggcaaaatcacctaacacaaagcctatttcataaagttgaatgtctcatgtaattcattgaatgcagtatactgtagagtgcagtattagttgtttaccctgctgatcgtgcagctgaatgggagctgcggctcactgctgttgcctagcatcatgagagagcatcattctgcaaatcgctggcccaggaaaaggtcaaaattcaaagtacagtgtctactaaatacrtatcactttagcactgtcataaagtctaaaattcataagttaaaccacagtaagttggaggccctccaatcctgccctccaataactgtgtcacctctcacttctcaccatcagctgtaagctgatggagaatgcaggacaatgcattactccatcctcaaataattaacaatgactagaaaacaaatcaaggtcatttcaaggtcttggatccagaaagagacagaggaccgggtcagtggacaccttagtgtttgaggaagttgtaaagcaggaatcaggtgtgaatgcagagaggagggaggcagagggcaagagttagctgatc

SEQ ID NO: 683636 - DNA, 1602 bp, Homo sapiens
cctgatctgtgtttaatgttaagccaaatctgtattcccaagtatttactatttaattaaatgttcctttctgttaactgcagacctgctaagccattatttattaccagtctctctctctctctcttttttttttccacgcgggctgtattctggattacataactggtcggagcgaactgtcaaggctcggcattcacaggcatacctcccacccaaaygccagcctgggcttttcagcctcagctgctttcctttattttctcctggcgcaagtcataattctgttgacttaaggcagatcattttgtttaaccatatatatttatttaaaatgaactttggactcaaataatgcctatgttgtcagtgtgagtgctatttcctttcgaaatgtaaagagagttgattttgctcattttgtagtttgaaagaagccagactcccaatacagcacactaaaagcttggctttcgctatagagcacggccaactctagaataaaatttctttgcataaatctttggctaaactcttttgatgtgatctgtggccaagttctcatctcctttccctcggcagtgcattttctcagaatacggagttctcattaatgtcagtgggtcaacacctaccccagggcttttttctaaaagaatttcatgctcagggcaagcttgtgctgagaatatatgaatgatgacaaaacaaaaacaaaacaaagcaatgtgattgatgttaacctgaaacactcatttttaaaagcaatttctgagtgttctgtttatttctatgatactcatcattgatctataccaggacttttactctttgttaggaggacagaaatatttggaaaggtgctgagaaacactgtcaatttcccagtacctatagatagacataaaggcagatacaaggctgggcgctatggctcacgtctgtaatccaagcactttgggaggctgaggcaggcaggttacaaggtcaggagattgagaccattccggctaacacagtgaaacccggtctctgctaaaaatacaaaaaattagccgggcgcggtggcacccgcctataatcccagctactcgggaggctgaggcaggagaatcgcttgaacctgggaggcggaggctgcagtgagccgagactgtgccattgcactccaaactgggcgacagagggaggctccgtctcaaagaaaaaagacagatacaaaaggctatttcctagtatcagttcatcccaagaaatgtcacatgtcacatgattctaaaatgttttggctagagtgatactgtagaataatttcttgttgcctttgtgttgattatagtagcagtaaaaattacagcatgctctgcttttgtttattcagttatttactagtacatgggattttgtcttttggcaagggatttattgaaaatgaaatagctatattgataatttagtagtgatttaaaataaataaatgatttattcaggttttttaaaggataaaaattataagaagctaatgaacctcttatataccccaaggcttcagtgttcatgaactctagcagatttttagacaaagttaacaccaggacacat

SEQ ID NO: 683637 - DNA, 1513 bp, Homo sapiens
gggtggagaagtaagctccacatttattgttatttttaaaaatgagtttgtctttaaacgtactgttcacatgaaaagtctcagcacatttttacaatcatttgaaaccagcccttggtatagaaacatcaaacgtctttgctctatttcaatgtgtgagcattagcatagttttcttagcttgagtagggctcaatttcctaatgccattcatattcytttttgtcacagtgttactaatgaatattggagctgaagacagaaaataaagtgcccaagacaaggtcaagaagttaaaacagtagcatattaaaaaatgcccataaaaatgtttctttgagcccaggagtcatacagtgaagtggaagatgaagaggcccctttcacttagaatggcattttttttttctaattagcaagtgtcaaaaagggctgaggggaaaaaatgcatgatgatatttcaggcaatgcaatgaagatgctattcagggagtgcaaggttagcaaatctgtaagggtatttacacacatttattttactattatttttatgtctttgtccctgtgtgaatataaaggatatggttttgtagaaacagaaggtcagacttggaaaggaattagacatagtttagtctagtctcttcatttataaagatgaggccaactgcagtccaagaaggtcaagggaattgcgtaagttcacataactagaaagagtaggaatgaggaaagagatgtgttgcccagtgtcatccttcccattttgttctatgctgtgactgaaatgactcatgagtcaagcaaatatacttcaaatatgataccttgaaaatttcataggccccatcacttatgacaaatggtttcaaatatctcaaccatttcttgactgaattctaatatgtggactatgtagaaaagtagcagtaatatggtaacagattaaatgcttggccgtggcactggcgttagatgttcctaatttcaaatccaaatccgtaacttctatttatgtgacctcagacaagttaattgatttctctgtgactagcctgtcatatttagaaaatttaagtgataagagttccaaactcatacagttatttcgatggttaattgagtccacaggaagtatttagcaaactgtctagtccaaagttagtcctcaatgtatgttagcagccattgttataatttattaatcttaatgataataaagagatcttgcttagccttgcatctagattcagcccgttggactcataaattcatctaccttctacaagagcacagtttccatcttcagacaatgaagaggcataagaagagagtgagcagttctcatgtcataaggaaacacaacccaaagcattcactgtcttgttgtcttcaaaacacataggcagatggtaggttttgacattttggattccaaatcctgcagccttgtaaagttcaatcaaatgaaaatcacattgtaaattatggctcagggagtcaataatttggc

SEQ ID NO: 683638 - DNA, 1513 bp, Homo sapiens
gggtggagaagtaagctccacatttattgttatttttaaaaatgagtttgtctttaaacgtactgttcacatgaaaagtctcagcacatttttacaatcatttgaaaccagcccttggtatagaaacatcaaacgtctttgctctatttcaatgtgtgagcattagcatagttttcttagcttgagtagggctcaatttcctaatgccattcatattcttttttgtcacagtgttactaatgaatattggagctgaagacagaaaataaagtgcccaagacaaggtcaagaagttaaaacagtagcatattaaaaaatgcccataaaaatgtttctttgagcccaggagtcatacagtgaagtggaagatgaagaggcccctttcacttagaatggcattttttttttctaattagcaagtgtcaaaaagggctgaggggaaaaaatgcatgatgatatttcaggcaatgcaatgaagatgctattcagggagtgcaaggttagcaaatctgtaagggtatttacacayatttattttactattatttttatgtctttgtccctgtgtgaatataaaggatatggttttgtagaaacagaaggtcagacttggaaaggaattagacatagtttagtctagtctcttcatttataaagatgaggccaactgcagtccaagaaggtcaagggaattgcgtaagttcacataactagaaagagtaggaatgaggaaagagatgtgttgcccagtgtcatccttcccattttgttctatgctgtgactgaaatgactcatgagtcaagcaaatatacttcaaatatgataccttgaaaatttcataggccccatcacttatgacaaatggtttcaaatatctcaaccatttcttgactgaattctaatatgtggactatgtagaaaagtagcagtaatatggtaacagattaaatgcttggccgtggcactggcgttagatgttcctaatttcaaatccaaatccgtaacttctatttatgtgacctcagacaagttaattgatttctctgtgactagcctgtcatatttagaaaatttaagtgataagagttccaaactcatacagttatttcgatggttaattgagtccacaggaagtatttagcaaactgtctagtccaaagttagtcctcaatgtatgttagcagccattgttataatttattaatcttaatgataataaagagatcttgcttagccttgcatctagattcagcccgttggactcataaattcatctaccttctacaagagcacagtttccatcttcagacaatgaagaggcataagaagagagtgagcagttctcatgtcataaggaaacacaacccaaagcattcactgtcttgttgtcttcaaaacacataggcagatggtaggttttgacattttggattccaaatcctgcagccttgtaaagttcaatcaaatgaaaatcacattgtaaattatggctcagggagtcaataatttggc

SEQ ID NO: 683639 - DNA, 647 bp, Homo sapiens
agtcagatgttgataataactctgaattcacctgactctccaattggggatcacaatttcttttgcaaccctagcttcctgggggaggtagggacaaataaaagttgttgattctcagttttttaaatatttttttgaatgatgacttccaastgctttacatgtaaaactgaattaatagtatcctagatacactgttaactagaaaattttgattcagtaaatctaaagtggggctagagactctatattttaaataaattcctagctgatgttagtgcttctggtctgaaggattaggattggcagatttagcagatgaaatatagaactcctagttaaatttgaatttcaaataagtattttagtataagtatgccctaaatattgcataggacagacagacttacactaaaacattcttcattggttatccaagattttaatttaagctgagtaccctgtattatatctgcagaccctaagagaaccacactttcagtagcaaagctctagacttactttaataaaagtgtctgtagattttctgcaacagaattatcaggggctttggctaaagtcttgggtcctggaaccagatttttggaagtctaaacagtaagtccattaacattatactaatagta

SEQ ID NO: 683640 - DNA, 2063 bp, Homo sapiens
gggtgacctcagcaggaagggaatacttcatccacaacagagaaatcctaaagcaaagttcaccttattagaagctctgtgtggaatctatggctagagggtacttggatttttaacagaaaacagaatacatctaaaagcagatggcaagacacaattcccaaatggacaagacagtcaggctacccttttatgtacctgtctctacattcctttcttggccgatgctagagaagaaagcactttggcatcaygttgtaaaagatacaattaaaaatcaaaacagattggcaaagttcggtattttaatgaaaagaatggctcataattgtatcctggtaatagtttctgaaatggaagaaaagtaaaagagcttttttcattgagataaattctttttaggcctgaggcatgtacacgtgctagaaaaaaaaaagtaacctatatgtttctatctacacagagagggagagttgagaagaaaaatgtgtttacctttatttgtcacacgggaatcaaaatgctggcctgggactctcaaatatgttatcaaatatgatctaccaaatggtgttccaagctaaagtgatgttggctttcacagtacattggaagaaattggggagtgaagtatacaaacacattcctaaactcctaaatgttaaataaaagctataagattaaaaaaatataattccacaatgcagacttcttttcatcctattatatcatccttttctctattttaccttgattttcctgcaggggaaggggtcttccaggcaaggaaagtatcattctccccacaaactatacacttgggtgaccccaaggagtagtacaatgattatatgcggcggtagctaaattaaagggtacagaatgataaccatgaaagagaaaggagaaaataaattctaagattctgatagagaaataaaaacaggagcagttgaggtcactgtagaaataattttttttttgtattgtagcttttgtaaaaattaaatatattgcagatgataataatggtcccaattcttcaacacttcgtggttctatcccctttgccatctactttgtagtgcctttcctttctgagtctgagttcagccatgtttgctttgggccaagtgaatcttaacaggcatcacacaaaaggagggttagaagggctcttgggcttcttcactctttccctctctattgccatgtgaaggacatacctgggctaagccagtggccccaggaggaggaagagagacacacagaggtgagtcactccaaccattctaatcaaggccattctaatcagctgacagctagccaaactccagatatctgagtacaccaagtgagaaacagagaagctgcctacaggaccatccctgatatctgagcataactgcttattattctactgagattttgtgttgtctatcacacaactttattatttcagtcgatatttaatacaaagtaaatgaaaatggccaggcacagtggctcactcatgtaatcccagcactttgggaggccaaggcgggtgcatctcctgaggtcaggagttccagaccagcctggccaacatggcaaaaccccgtctccactaaaaatacaaaaattagcctggcatggtggcacgggcatgtaatcccagccacccgggaggctgaggcaggagaatcgcttgaacacaggaggcagaggttgccgtcagcactgcactccagcccgggcttcagagcaagactccatctcaaaaacaaacaccaacaaaagtaaatgataaacattaacctttattaataacaattgttaatatggtagtcggttttgtttgctgtatttttgtttctctctctctctctctcccccttgtttgtttctaggaaattccaggattgtgaaagaacgcactatggcatttgatatagagatacccatagctcttatatcgttactgagaattttggccttcaagttcagtctgagcctatcattgcggacagagtgatggtaattttgattagcttaagttaatcaggatccacgtctagaaa

SEQ ID NO: 683641 - DNA, 641 bp, Homo sapiens
acatccagctacctttttttgtttgttttttgggtttttgttggtgttgttgttgttgktggtggtggtggtggggtatgtgtgtgtgtgcgtgtgtgtgtgtgtgtgtgtgtgtgtttagagacagggtgtcccaggatggtctcaaactcctggttgcaagtgatcctcccatctcagcttcccaaagtgctgtgattacagttgtgagccactgtacccaacccaaagatgctccctgctcagactcattattcttgtgttagcacatatcttcattcatttctgtttacattctagcactctacaattgaataattgagaaatttactcttgcctaaacccaccatgtcattttatgcttctgaatcttgtgattgactttcctaatctcttcaatgtccttcattgcttctattgcttctgtttgctcataccaaccttttcctctatattaaataattttctgtgaatggtttgcataacctttgtgttgatagagctaacattatgcttaattcatagctggtactcatttaatgtttattgacttgggatctgccaatgggatattgatcagcaacaatatccctctgcctgaagaaccagacaggttattttttaaaagattattttcttta

SEQ ID NO: 683642 - DNA, 604 bp, Homo sapiens
tgggactacaggcgcccaccaccacrcccagctaattttttgtatttttagtacagacatggtttcaccgtgttagccaggatagtctcgatctcctgatctcatgatccgccccccctcagcctcccaaagtgctgggattataggcgtgagccaccgcgcctggccacatgtatctttatatacatatatatgcatatatatgtatctttagatacatctttatatacatatatatgcatatatatgtatctttagatacatctttatatacatatatatttatatatgtatctttatatacatatatgtgtatatatatatctcctaagtgtaaaattcaatttcagaccagtcatctcagatatcagtctaaaagtgacaaactctttgttatcttttattcaactggaagaatattttttaaaacaattgttaacacagattgctgcatcccaccctcagagtttctggttccctaggtccgaagtggggccccaaaatttgtgtgtgtcctgcccaggcgaaactgctgctgatccacactttgagaaccacggctcagaagcttcccagttctccaattcaatggagggaacaatcc

SEQ ID NO: 683643 - DNA, 604 bp, Homo sapiens
tgggactacaggcgcccaccaccacacccagctaattttttgtatttttagtacagacatggtttcaccgtgttagccaggatagtctcgatctcctgatctcatgatccgccccccctcagcctcccaaagtgytgggattataggcgtgagccaccgcgcctggccacatgtatctttatatacatatatatgcatatatatgtatctttagatacatctttatatacatatatatgcatatatatgtatctttagatacatctttatatacatatatatttatatatgtatctttatatacatatatgtgtatatatatatctcctaagtgtaaaattcaatttcagaccagtcatctcagatatcagtctaaaagtgacaaactctttgttatcttttattcaactggaagaatattttttaaaacaattgttaacacagattgctgcatcccaccctcagagtttctggttccctaggtccgaagtggggccccaaaatttgtgtgtgtcctgcccaggcgaaactgctgctgatccacactttgagaaccacggctcagaagcttcccagttctccaattcaatggagggaacaatcc

SEQ ID NO: 683644 - DNA, 1360 bp, Homo sapiens
tcagaccctcagagctgaaagaaaacttgggaatttaggactccacttcggggtcaggaaagctgagtttcagagatgggcaaggattttatgaatgagagctggttatgtttgcagttgaatctctagctctcacttttgaytttcagtatgggcccactgggtgcgcccaactcaagggtctagccattgtaactgcaaggaagtggatgatgaggaaaagagtaggtagaaaagagaagagaacaaaacaaaacaaaacaaagctcacctctgcagagaattattcttcctgctccttcctgtcaaaagcatctcccaaaacggagatcgcctggcctgccccaccccccaacccttataggtgccggggaattcagacaattggcaccttctcttcccattggcgggggctggctcactagaattcctctgcattgcaccgattggaaggcatttagctcccttgattcagaatgaatgggctgcaggtcttgatcctacaggtgcttccgatttgtaaaggaaactcttcccttgcttcttaggtctagaagaacaagcaacagaaaattacatgtttggagagcttcccagtctccttagaaggctaacaccgtgttcagtccgaaagtgccacttcccatttggaaacatccagtcattcacgggctcatcttgtttacatgttcatctcttctacttgggatataattgtatcgagcaaaaggagggtctcaagatcatcagggcccagtctaggtcccacatacaacgggcccagtctcagggagacccagagacagagcttgtgggagaaggaaaactcaccagcagagagtacaagggagggggcgttgggaaggactggcttgaggaattttcttttaaaaaaattaccactagttggctgggcgtggtggctcacacctgtaatcccagcactttgggaggtcaaggcgggcggatcacgaggtcaggagatcgagaccatcctggctaatgcggtgaaaccccgtctctactaaaaaaaatacaaaaaattagctgggcgtggtggcgggcacctgtagtcccagctactcggaaggctgaggcaggagaatggcgtgaacccgggaggcggagcttgcagtgagctgagatcgtgccactgcactccagcccgggtgacagagcgagactccgtctcaaataataataataataataataataataataataataataataatagtaataatcacctatagttgaaggggagaaaccccacaagataaccaactttaccaagtttgcatcaactcaggatagaatatcagcggtttttacataggagttttaatttttttcaatt

SEQ ID NO: 683645 - DNA, 630 bp, Homo sapiens
ttagctcttatgcttaggtctattatctattttgagtttaattttgtgaatggtgtgaggaaggtgtctaacttcactttttttgcatgtgaatatacagttatcacmgaaccagatgttgaaaaaattaccccctccccgaccctcaccattggattgtcttagcactcttataaaaaattgatcatagatatatattcttattttgggactcttaagtttattccattgatcttcatgtatttccttcttccactgcgtgcagttttgattaccataactttgtggcaaattttgaaatcagaaagtgtgaatcctccaacttttttatcctttcataggattgcttctggctatgctgggtcccttgaatttccgtgtgaattttaggattaactcatcaatgggaaattgggatgcaggcttctccaaactctccaggcaaaactaatgttccatcaggattgtaaaccacaggtaaagatctgagaggaggcaaataacatttactgattacctaccatgcatctaaattctgcagtggtgaatttatatgtcttattgtttaatccccatggtagccttatggaacaaatactccaattttcaggtaataaatatgagtctaag

SEQ ID NO: 683646 - DNA, 630 bp, Homo sapiens
ttagctcttatgcttaggtctattatctattttgagtttaattttgtgaatggtgtgaggaaggtgtctaacttcactttttttgcatgtgaatatacagttatcaccgaaccagatgttgaaaaaattaccccctccccgaccctcaccattggattgtcttagcactcttataaaaaattgatcatagatatatattcttattttgggactcttaagtttattccattgatcttcatgtatttccttcttccactgygtgcagttttgattaccataactttgtggcaaattttgaaatcagaaagtgtgaatcctccaacttttttatcctttcataggattgcttctggctatgctgggtcccttgaatttccgtgtgaattttaggattaactcatcaatgggaaattgggatgcaggcttctccaaactctccaggcaaaactaatgttccatcaggattgtaaaccacaggtaaagatctgagaggaggcaaataacatttactgattacctaccatgcatctaaattctgcagtggtgaatttatatgtcttattgtttaatccccatggtagccttatggaacaaatactccaattttcaggtaataaatatgagtctaag

SEQ ID NO: 683647 - DNA, 630 bp, Homo sapiens
ttagctcttatgcttaggtctattatctattttgagtttaattttgtgaatggtgtgaggaaggtgtctaacttcactttttttgcatgtgaatatacagttatcaccgaaccagatgttgaaaaaattaccccctccccgaccctcaccattggattgtcttagcactcttataaaaaattgatcatagatatatattcttattttgggactcttaagtttattccattgatcttcatgtatttccttcttccactgcgtgcagttttgattaccataactttgtggcaaattttgaaatcagaaagtgtgaatcctccaacttttttatcctttcataggattgcttctggctatgctgggtcccttgaatttccgtgtgaattttaggattaactcatcaatgggaaattgggatgcrggcttctccaaactctccaggcaaaactaatgttccatcaggattgtaaaccacaggtaaagatctgagaggaggcaaataacatttactgattacctaccatgcatctaaattctgcagtggtgaatttatatgtcttattgtttaatccccatggtagccttatggaacaaatactccaattttcaggtaataaatatgagtctaag

SEQ ID NO: 683648 - DNA, 648 bp, Homo sapiens
taaaattgcctattacttaaaaatctaaaactcagtagaccctgtgtggargctggagctgccacgagcagtatttttgaaaagtaaaacttgacaacatcatgggaaaaactattcgacatcatttgcatctcagttcgatcccagattaagccttcaaaacacagctgccaggctcaaatttgcaaatacagatacaaatttcctttttataacagtcagacttgtaaaaggcaaacgaaatagacaatgcagcacttagaacatttccagctaagaaggaaaaaaaataaaaaaagacccattctaagatccaaggcaaaataccgacttttcatggtaaaacagctttattcatttctacttcctttaccgaacacaatttaaactccacataatttttgctatcaacccctctcccacagactgtaacagctaaaatgccagtctgtctccaacataattaaacaaaatgtgcaatcttctaaaatctgtgaatgaacaatataaggcaaaataaaagacccagacaaaagaacataccaagatcaatcctcaagctataatatcctgacatccagccaaggagtacttacggaatccactgtggcacagaaaataataattccagaacacaatgaggatcag

SEQ ID NO: 683649 - DNA, 2263 bp, Homo sapiens
gtagaacttcaccttaactaattatatcagcaatgaccctgttaccaagtaaggtcacattctgaggtactagggattaggacttcaacataggaatttggggcggacagaattcaacccatatttcgtaggaaagcaatgaattacccaattggacagtgagtgatcagaaaatctaattcattgttagcttcaagagggcaataagttatctcttctctttatttatttatttatttatttatttatttatttattgagacaaagtctcactctgtcgcctaggctgcagtgcagtggcatgatctcggctcaccacaacctccgcctcccaggttcaagcaattctgcctgcctcagcctcctgagtagctgggattacaggcatgtgccaccaagcctggctaattttttgtatttttagtagaaacggggtttcgccatcttggccagacttgtctcgaactcttgatctctggtgatctacccgcgtcggcctcccaaagtgctgggattacaggtgtgagccaccatgcccaggaaagttatcccttytcatgagcatttcaagccacatgcctccccaaactatcctttgggaaacaatatgggggaatagatcagagagatctgggttcaaattctggctctgccacttacttaagagctgtatgctttggcacaaattgtttaatgtctctgaacacctgtttccatctttgcaaaatgaagataataacatccacctgagagttttgtagtggcgattacatgagataacatgaataaataaggtcacagcctctggcacacagaggaaaccagcactcattaatccactttctctgtctgtctcctgctccctcttgaaccctgcacttcccacagaaagcaagacccctaaagatcaagtcactgtattttacttttaattatactactgaagatttctaaacacaaatacaatgcaacaccaacatcggctcagattacctggcccttacttacagcataaataattattttaatgcaattagcttttagcggtattggaagacaaccttaatgatttttcattttccaccaaagagaattctaattcatgactcccaatgtctattccatgtagtatgaaagagaaacacctttttgcccttagtttttttaggcccactgtttaataaccaactaggccagggagacataaaaatgaaacctaaacaagcagccccgagcatgaaaagaaaaaacaaagcaagacacataacaacaacaaaaatcactctcttcttccttcacttccctcccttccctcccaaagaccaattcctcaacacaattctccatagccttttgatcttttcaaatagtgaggacataagcctgcattttttcatatcttcttaacatctagccagtgcatttctattttcccttgtttttttgctctttgtcaggtatttgtcactttcaccgcacactgcctttacagaaaaccaaagaggactggctatgaccaaaggacagcgatcctattttaagagtgggtagaattttttaatggtgggaagaaattgtttgctaaaaatcaaatcaagagcaaagtgctgtgacccttattgggaagaggtctattgacttggtatgaggcctggaaccctctccctctattagccatggagtgctgggcacattctctgatctctgcttgctcttccatgaaaggacaatcctagcaatctgccttctttggtttcaggctgctatgagttctcaataatctggcaattgtcaaacgatttgaaaagcaccacagaaatataaatataatttgcaagaaaaggtagctttgatctacaaaagagttgtaggaatcgagacacttgaaaatgaagatgcctggaaatcatagaaaggttctggatgtgttatttcatgtctcctgaaaaaaagaatcagtcaaacaaacaaatgaaacacagctgtaaaaaatatctctccactttgggaggctgaggcgggaggatcacttgaggtcaggagtttgagaccagcctgaccaacatggcgaaaccccgtctttactaaaagtacaaaaattaggcggacatgtggcaggcacctatcatcccagctactctgtaggctgaggcaggagaatcgcttgaacccggaaggccgaggttgcagtgagccgagatcgcaacactgcactccagcctgggtgacagagcaagaccctatctccaaaaaaaaaaaaaaa

SEQ ID NO: 683650 - DNA, 870 bp, Homo sapiens
tccgggtcttctgcctagtgagagtagctacagctttcccttcttctttccctagcattgttatcctttctttcaactaaagcaagagaaaggtgactatctaagagaattactttggaggagccagcttgaaggagaacctggcatcctgcttcccagctggatgactgcagggtcagccgctttgctgatcagccctgagtcccccaaccacccygagcaggcaaaaagtgaattggagagaaatggtagggcaagaggggtcaggaaccatctagcaaaggctaggatgagcgagcttcccaagcaccagtgggtctacatccctttgccagggtcctactcaagggggcagcctgcatgtcaagggagctcaggaaggaaaggctgtgggctgtaccaccaggagcggagctgaggggtggcttgataaagccgggttgacattgtatctcctacagccaggaaacacaggacagggagtcccctgaaggggctctaaggagacctcccttgagtaccatgaaaaggccagtatttggatgtctcccacctggcaggcacccaccaccagtcaggggtaccacagaagcaggcacatctccagagagaggatggcagccatggtcagtggtgtgagagacactatctccgccccaccctaaaatacaggaagggaaggagaatgagaagaagaacagagtaagagtgtcccagaactaaatcaaattcctttacccttttccaaggcaagggaaggggaggaagatggaaagagtaagcaccccctccccaatccaagtcttttatttttattttgaaattgatacattaatatttgtacatatgtatggggtacatgtgatattt

SEQ ID NO: 683651 - DNA, 742 bp, Homo sapiens
tgggcaacatcgtttgcttattttttttctaccttcatcccactccattccttgtatagtttttcttgctgggtgccatcttctttcaacttctgataaaacccactgtaaggcaatactcatccaagtgttcttctgattggatagcaagttcatttatttaattattttcaataaattatttttaaatatgatctttttccccagaaaagaggaagacagtaacttgacagtggagaaacctggaagccattgccttaaccgagtcatgaaggttagtgttatcggtgatgtcctcagggtatcatgtcatctgccagatttctattctttccctgggcagttaatgatgagctaactatcttagaagtcaaaggaaatttttgtttatgaagagactttgagaagtcttggggctctcttgagtgctactcgctttcccctgaaatccattcctatcccatccctgccctctgctgggtctgctctccgtcacttcgaccttatttagggtttggcttactggttggggccacttccatcaccaccatgtttaacacaagttgcttgattgctttcatttaaattatggagtatttcaaactgcacaaaaatgccaaaaatagtatgacaatgtaaaacatactccatccctgatttaaaacgctgtaacattttgccrtatttgctttgcccccttaccctcaacttttaaaaaagatatagaagtcccacatctaca

SEQ ID NO: 683652 - DNA, 1430 bp, Homo sapiens
tcaccaggcaagtcacttaagagtttgaagataaataagatgccttatctaatggttaaaatcttactaaagaaaatctctttgaaagtagcttatatttttacaagataaagcatttctatatatggtctagtaaaagatttaaagtaggcaatccagaaagatttgttgaatcaaattgcactgcatgtcttcctttctaatttgctatgagttaggaaccacaagcagccttttcctaacagtgttaaaaaaaagttttgtgctgggcgcagtggttcatggctataatcccagcactttgggaggccgagatgggtggatcacttgaactcaggagtttgagaccagcctggacaacatagtgagactcatctctaaaaaaaatacaaaaattagctggccgtggtggtgtatgtctgtagtctcagctactcacgaggctgaggtgggagtatcgcttgagcccaggtgttggaggttgcagtgagccgagactgtaccactgcactccagcctgggcaacagagacaaactctgtctcaaaaaaaaaaaagtaaagtaagataaaaataaaaaatagttttcctttaacaatcctactacagaatcacaggaaattttaaaatatcaaatatatagcatctaccttccaattacacattcagatgttttcactcattgccatatgtgttatcatcacatattaactgttatcttttatcactataataattgtcttttattaccaactatatgctgagatgccaaaaaataaaacttaccatgtaaggtggattaaaccccaacgatcaattcacagtgacagtttaccttacgctaacaaccctttatgtaagaygagaacaagagacagtgaagtggtttaatggctcagtttctgcagatcagtgagaactggaagagtcatgctggttgactctcaccctattggctaaacagtggctgggccagggcaggttttctggtcctaatataaggccatgatccacctatgaaatgctcctggcttcagtttccttatttgaaaattaagcatgaagtatcatttcatgaacacataaataatatagactggtttctgaatatttggaaaatacagacaaacataaaagtaaaagtaatgtataatcttatcacccacagacaactattattaatattttgacatatttctctttagaaagaggaaaagagaaaggcaggaaaatacacatatatacaaattaggaatgggctataaccagatgtacagatgaaatcagcaagtagaatacttattattactttaaaaaataaattacaacaagatatgaatgattttgagggaaatataaattaccataactggatcaagaataaacagcaggaaacctgaatatatctataattatgaaaaaaaaaccctg

SEQ ID NO: 683653 - DNA, 2510 bp, Homo sapiens
aaagtatagcacctatttcattatttactaattataaaagtaatgcatagtaattctttttaattgaaaaattccaaaatccatgaaaaaaaagaaaaagaaaaagaaagcaccatcttcctcaataatcctgccactcaaaggcaatctgggtctaagttccttcctcagagaaattcgtttacgaacatcagtccagggttggcatcttcattagctgagttttcttcatctgcatttttaagggatttgtaagggcaatgaaataatgtctgggcactttggacgtctgtgtcttcacagcttgtacttgcagctcttgggtctggggtgagaaacgaccttacctcagcatgtaggctgtggtgggcagaaggatggcagagcacctggccgttgccatggcaacgatgccttcatcactcacttcttccaggtggctgattgcctgcgctcccagttcagccccaagctaaggagaatgggcagagagggaaagatttaacaaatagcaacaacgaatccatgaagttccattaaattgttttgtttgtttgttatttttgagacggagtcttgctctgtagccaggctgggtgcagtagtgcaatctcagctcactgcaacctccgcctcctgggttcaagcaattctcccgcctcagcctcccgagcagctagggccacaggcgtgtgccaccatgcccagctaacttttgtatttttagtagagatggggtttcaccatgttggccaggatagtctggatctcttgacctcgtgatccgcctgcctcggactcccaaagtgctaggattacaggcgtgagccaccgagcatggcctaaattgtttttcccataaagagaaacagcgttttattattaagatttcttgccaaccaaccgttgtaagcccaatcccccaaatgggtgaagggtttgtaatgggcactcatttgaaaattagctagtgggctacttcaaaaactattcttaaacacaaatccttcagacattttctgaaacagaaaactttatgaatcttatggatcagaggtgagataaggggatctagagctatttgggagaattgggaggaattggtgtttgcatgaaatgcggtaggtgagggagaggcagcagtcaaaatgatatccaagattttgacttaagcaacagacaggtgatggcgtcatttactgaagcagaaaatgggacaagacttggaagcaatacgaagagatcaagctggatataagccagttaagaggcatgcaggtggggtatctatgtctgtatttatgccccaagggcttgtttatttaggtctcaggctttagaggagagaagcctagactcatgattgtagggactttgtcttactgctgatttctcaatgcctaaaacagtgcctggcacacagtattcattcaaatatttgttgaaaggatgaataagtgaattaatttgagcaaagatatatggatttgaaaatcatcttgtggctatttttggtgtgctccactaaaatgatttggatgctgccacagaaagatctgaaaaggtacaagtgaaattaatatactgtgctagtgtggctttgtgtgccaagcaaaatactttagaaatttagtaaaagagatcactgaggtaattctttttcttttctttcctttttttttttttttttttgagatggagtcttgctctgtcccccaggctggagtgcagtggcatgatctcggctcactgcaacctgtgcctcccagttcaagcaattctcctgcctcagcctcccgagtagctgggattacaggcgcgtgccaccacgctaattktttatatttttagtagatatggggtttcaccgtgttagccaggctggtctcaaactcctgacctcgtgatcaacccacctcggcctcccaaagtgctgggattacaggcgtgagctaccgcgcccagccaattcttttgctattaatactaatatcaccagtggatgataatgaaagtaaatcatcagcaaaaaagtaagtttttaatagaggtcagggttttcaagtctcaaccagaccaatctgtacattgttcaaacaaatttccccattcaatatcttttcagagggctttgaagaaactaattaagtttcccataggatgaatgtgcaagaatgaatgttgacgagggaaaaactaaaagtcaaccacacctcagcagccttcatcgggtggagttcatccccatggaagttaatctgtaaccctatatcttttccacgttgaagaatccttctggtggaatcgagatcaaagacacctttctcacaaaatacgtctatattgtccacgtgtatttccccatttctgccaagttccttcagctttgggaggtggttattgatgatgtcatcagcagcttcagtagcagtttttcctctggggaagaaaatgagattgccatgggcaaatattaaaaacaaaacacaaaaagacagggtaatctggca

SEQ ID NO: 683654 - DNA, 2510 bp, Homo sapiens
aaagtatagcacctatttcattatttactaattataaaagtaatgcatagtaattctttttaattgaaaaattccaaaatccatgaaaaaaaagaaaaagaaaaagaaagcaccatcttcctcaataatcctgccactcaaaggcaatctgggtctaagttccttcctcagagaaattcgtttacgaacatcagtccagggttggcatcttcattagctgagttttcttcatctgcatttttaagggatttgtaagggcaatgaaataatgtctgggcactttggacgtctgtgtcttcacagcttgtacttgcagctcttgggtctggggtgagaaacgaccttacctcagcatgtaggctgtggtgggcagaaggatggcagagcacctggccgttgccatggcaacgatgccttcatcactcacttcttccaggtggctgattgcctgcgctcccagttcagccccaagctaaggagaatgggcagagagggaaagatttaacaaatagcaacaacgaatccatgaagttccattaaattgttttgtttgtttgttatttttgagacggagtcttgctctgtagccaggctgggtgcagtagtgcaatctcagctcactgcaacctccgcctcctgggttcaagcaattctcccgcctcagcctcccgagcagctagggccacaggcgtgtgccaccatgcccagctaacttttgtatttttagtagagatggggtttcaccatgttggccaggatagtctggatctcttgacctcgtgatccgcctgcctcggactcccaaagtgctaggattacaggcgtgagccaccgagcatggcctaaattgtttttcccataaagagaaacagcgttttattattaagatttcttgccaaccaaccgttgtaagcccaatcccccaaatgggtgaagggtttgtaatgggcactcatttgaaaattagctagtgggctacttcaaaaactattcttaaacacaaatccttcagacattttctgaaacagaaaactttatgaatcttatggatcagaggtgagataaggggatctagagctatttgggagaattgggaggaattggtgtttgcatgaaatgcggtaggtgagggagaggcagcagtcaaaatgatatccaagattttgacttaagcaacagacaggtgatggcgtcatttactgaagcagaaaatgggacaagacttggaagcaatacgaagagatcaagctggatataagccagttaagaggcatgcaggtggggtatctatgtctgtatttatgccccaagggcttgtttatttaggtctcaggctttagaggagagaagcctagactcatgattgtagggactttgtcttactgctgatttctcaatgcctaaaacagtgcctggcacacagtattcattcaaatatttgttgaaaggatgaataagtgaattaatttgagcaaagatatatggatttgaaaatcatcttgtggctatttttggtgtgctccactaaaatgatttggatgctgccacagaaagatctgaaaaggtacaagtgaaattaatatactgtgctagtgtggctttgtgtgccaagcaaaatactttagaaatttagtaaaagagatcactgaggtaattctttttcttttctttcctttttttttttttttttttgagatggagtcttgctctgtcccccaggctggagtgcagtggcatgatctcggctcactgcaacctgtgcctcccagttcaagcaattctcctgcctcagcctcccgagtagctgggattacaggcgcgtgccaccacgctaattgtttatatttttagtagatatggggtttcaccgtgttagccaggctggtctcaaactcctgacctcgtgatcaacccacctcggcctcccaaagtgctgggattacaggygtgagctaccgcgcccagccaattcttttgctattaatactaatatcaccagtggatgataatgaaagtaaatcatcagcaaaaaagtaagtttttaatagaggtcagggttttcaagtctcaaccagaccaatctgtacattgttcaaacaaatttccccattcaatatcttttcagagggctttgaagaaactaattaagtttcccataggatgaatgtgcaagaatgaatgttgacgagggaaaaactaaaagtcaaccacacctcagcagccttcatcgggtggagttcatccccatggaagttaatctgtaaccctatatcttttccacgttgaagaatccttctggtggaatcgagatcaaagacacctttctcacaaaatacgtctatattgtccacgtgtatttccccatttctgccaagttccttcagctttgggaggtggttattgatgatgtcatcagcagcttcagtagcagtttttcctctggggaagaaaatgagattgccatgggcaaatattaaaaacaaaacacaaaaagacagggtaatctggca

SEQ ID NO: 683655 - DNA, 2510 bp, Homo sapiens
aaagtatagcacctatttcattatttactaattataaaagtaatgcatagtaattctttttaattgaaaaattccaaaatccatgaaaaaaaagaaaaagaaaaagaaagcaccatcttcctcaataatcctgccactcaaaggcaatctgggtctaagttccttcctcagagaaattcgtttacgaacatcagtccagggttggcatcttcattagctgagttttcttcatctgcatttttaagggatttgtaagggcaatgaaataatgtctgggcactttggacgtctgtgtcttcacagcttgtacttgcagctcttgggtctggggtgagaaacgaccttacctcagcatgtaggctgtggtgggcagaaggatggcagagcacctggccgttgccatggcaacgatgccttcatcactcacttcttccaggtggctgattgcctgcgctcccagttcagccccaagctaaggagaatgggcagagagggaaagatttaacaaatagcaacaacgaatccatgaagttccattaaattgttttgtttgtttgttatttttgagacggagtcttgctctgtagccaggctgggtgcagtagtgcaatctcagctcactgcaacctccgcctcctgggttcaagcaattctcccgcctcagcctcccgagcagctagggccacaggcgtgtgccaccatgcccagctaacttttgtatttttagtagagatggggtttcaccatgttggccaggatagtctggatctcttgacctcgtgatccgcctgcctcggactcccaaagtgctaggattacaggcgtgagccaccgagcatggcctaaattgtttttcccataaagagaaacagcgttttattattaagatttcttgccaaccaaccgttgtaagcccaatcccccaaatgggtgaagggtttgtaatgggcactcatttgaaaattagctagtgggctacttcaaaaactattcttaaacacaaatccttcagacattttctgaaacagaaaactttatgaatcttatggatcagaggtgagataaggggatctagagctatttgggagaattgggaggaattggtgtttgcatgaaatgcggtaggtgagggagaggcagcagtcaaaatgatatccaagattttgacttaagcaacagacaggtgatggcgtcatttactgaagcagaaaatgggacaagacttggaagcaatacgaagagatcaagctggatataagccagttaagaggcatgcaggtggggtatctatgtctgtatttatgccccaagggcttgtttatttaggtctcaggctttagaggagagaagcctagactcatgattgtagggactttgtcttactgctgatttctcaatgcctaaaacagtgcctggcacacagtattcattcaaatatttgttgaaaggatgaataagtgaattaatttgagcaaagatatatggatttgaaaatcatcttgtggctatttttggtgtgctccactaaaatgatttggatgctgccacagaaagatctgaaaaggtacaagtgaaattaatatactgtgctagtgtggctttgtgtgccaagcaaaatactttagaaatttagtaaaagagatcactgaggtaattctttttcttttctttcctttttttttttttttttttgagatggagtcttgctctgtcccccaggctggagtgcagtggcatgatctcggctcactgcaacctgtgcctcccagttcaagcaattctcctgcctcagcctcccgagtagctgggattacaggcgcgtgccaccacgctaattgtttatatttttagtagatatggggtttcaccgtgttagccaggctggtctcaaactcctgacctcgtgatcaacccacctcggcctcccaaagtgctgggattacaggcgtgagctaccgcgcccagccaattcttttgctattaatactaatatcaccagtggatgataatgaaagtaaatcatcagcaaaaaagtaagtttttaatagaggtcagggttttcaagtctcaaccagaccaatctgtacattgttcaaacaaatttccccattcaatatcttttcagagggctttgaagaaactaattaagtttcccatagsatgaatgtgcaagaatgaatgttgacgagggaaaaactaaaagtcaaccacacctcagcagccttcatcgggtggagttcatccccatggaagttaatctgtaaccctatatcttttccacgttgaagaatccttctggtggaatcgagatcaaagacacctttctcacaaaatacgtctatattgtccacgtgtatttccccatttctgccaagttccttcagctttgggaggtggttattgatgatgtcatcagcagcttcagtagcagtttttcctctggggaagaaaatgagattgccatgggcaaatattaaaaacaaaacacaaaaagacagggtaatctggca

SEQ ID NO: 683656 - DNA, 597 bp, Homo sapiens
aactcaggaaaacctgctctctgagagcttagaatctatattagacaatctctagtctagtgttacagtataaatgttgagtaaataaaatgagggatgggtcagcacagattacgagttacaacatttccttctattaggtgggtcttaaaaacttgtttttaaaaggggaatagtatttttggcaggaggctatttagaacgctgtccaggggaggagccaagatggccgaataggaacagctccggtctacagctcccagcgtgagcgacgcagaagacgggtgatttctgcatttccatctgaggtaccgggttcatctcactagggagtgccagacagtgggcgcaggtcagtgggtgcgwgcaccgtgcgcaagctgaagcagggcgaggcattgcctcacttgggaagcgcaaggggtcagggagttccctttctgagtcaaagaaaggggtgatggacggcacctggaaaatcgggtcactactgcgcttttccgacgggcttaaaaaacggcgcaccacgagattatatctcgcacctggctcggagggtcctacgcccacggagtctcgctgattgctagcacagca

SEQ ID NO: 683657 - DNA, 557 bp, Homo sapiens
gaggctcagcaggccaggtggctggctccccatgccagaaagaaacacaagacaagcaccatcaccacccgccaggatggtcaggattgcagaatcataattaactaagttgttacccaaaagagacttaaagtttaactgcaaatgctagttactttaaattgacaataatgagttggtcctcatcaacagaaaatgaggacttgagtaagcttaagttaccttttttttcacagttaagttgtaacttgtatccatttacaactatatctctgctctaaacattttcctgatggtgcactgtgttttaggctctgcgctaggtgttaggtatacaaagataaatatgaactccttttatagtctcatagtggagcaggtatgttagctaggctataggacctgctatatcataatatttgtattaggatacaaatatcttaaataacaggggcttgtcatcatcactggccattagagaaatgcaaatcaaaaccacaatgagataccatctcacaccagtcrgaatggtaattactaaaaagtcaggaaacaac

SEQ ID NO: 683658 - DNA, 1306 bp, Homo sapiens
agatggataataatgcctccctcttgtaatgattttaaaagaatgtatataaagcactttatatacatatctactggcacagtataaatatctactggcacacagtagatattcagtaactagtagctattaattagagcttctaatcagcctgaattaccaataaaaaccattcggcatcaacgtagttccagagtgagagaaagacttaaatcagcctgactagctttatcacatgctagtccatgtgatcaagttaactccagtgagcaagccaggattaattctatacaggcattttggaaatagtttgcagctgcccgattattacctccagtagttaatgggcattcaggggctaccaaatgcaatgttaatactctttacctctctgtgcaaagcaaaatatatttcatcaatgtmtttggaaacaagtaatgaagttcaaaatgtccttaatctcatttgtagaatctactaagtgatttagtgcaataaatattcaatattaaattccagttactataaattattttttgagaaattgaaaattcctctattagagtgagtttctagattcagcaattgaagtcatgtgacattatatattgccatttaaaacctctgggccaggcgcagtggctcactcctgtaatcccaggactttgggaggccgaggcgggaggatgacaaggtcaagagattgagaccaccctggccagcatggtgaaacctcgtctctactaaaaatacaaaaattagctgggcatggtgatgagcacctgtagtcccacagctactcggcggggctgaggcaggagaatcgcttgaacccgggaggtggaggttgcagtgagccgagatcgcaccactgcaccccagcctgggcaacagagcaagatttggtctcaaaaaacaaaacaaaacaaaacaaaaacaacctctgagctatgatttctcacatgtctaatgaaaaggttgaactcggtttctagttgaaatgcttccttttaccacgtcacacattttgtgtgtgaaagatgggcagcagtgggtagaaaaaactgttgaagtaggagaggaaaacaaacaaaaaatgttattgtcccttaaaattgaaatgagttatccagatcatgcattcaaagctctaaaattctatgattctcaaaagacgattgtaccacatatatctttttatctcttccccaccttcatctcaacccaatgtattttctacagtaagcattcaataatatttgtcaatgaagaaacaaatgaatgcataaacttttttaaaaaaagc

SEQ ID NO: 683659 - DNA, 1306 bp, Homo sapiens
agatggataataatgcctccctcttgtaatgattttaaaagaatgtatataaagcactttatatacatatctactggcacagtataaatatctactggcacacagtagatattcagtaactagtagctattaattagagcttctaatcagcctgaattaccaataaaaaccattcggcatcaacgtagttccagagtgagagaaagacttaaatcagcctgactagctttatcacatgctagtccatgtgatcaagttaactccagtgagcaagccaggattaattctatacaggcattttggaaatagtttgcagctgcccgattattacctccagtagttaatgggcattcaggggctaccaaatgcaatgttaatactctttacctctctgtgcaaagcaaaatatatttcatcaatgtatttggaaacaagtaatgaagttcaaaatgtccttaatctcatttgtagaatctactaagtgatttagtgcaataaatattcaatattaaattccagttactataaattattttttgagaaattgaaaattcctctattagagtgagtttctagattcagcaattgaagtcatgtgacattatatattgccatttaaaacctctgggccaggcgcagtggctcactcctgtaatcccaggactttgggaggccgaggcgggaggatgacaaggtcaagagattgagaccaccctggccagcatggtgaaacctcgtctctactaaaaatacaaaaattagctgggcatggtgatgagcacctgtagtcccacagctactcggcggggctgaggcaggagaatcgcttgaacccgggaggtggaggttgcagtgagccgagatcgcaccactgcaccccagcctgggcaacagagcaagrtttggtctcaaaaaacaaaacaaaacaaaacaaaaacaacctctgagctatgatttctcacatgtctaatgaaaaggttgaactcggtttctagttgaaatgcttccttttaccacgtcacacattttgtgtgtgaaagatgggcagcagtgggtagaaaaaactgttgaagtaggagaggaaaacaaacaaaaaatgttattgtcccttaaaattgaaatgagttatccagatcatgcattcaaagctctaaaattctatgattctcaaaagacgattgtaccacatatatctttttatctcttccccaccttcatctcaacccaatgtattttctacagtaagcattcaataatatttgtcaatgaagaaacaaatgaatgcataaacttttttaaaaaaagc

SEQ ID NO: 683660 - DNA, 767 bp, Homo sapiens
ttacaatgaatatttgcctgaataatagtattgagagctattgatattttccttttcatattttctatcttccttccattttcaatacaactgtatattacctatcgaatctgaaaacaaattataactatttttcatctgaaaaaattaatgcttttgatatgctattcttaagttgagcaagacaattctttctgttccccacggattgtctaagtttgtaaacaccttataaccagatttctcttattttgtctgctagctcactgccacacgtgtaggctttcaaacagggaacaatatatataaaatgaatgcttcctttataaatcacacccttaaatattaagcctaaatagtgaaaatacagaaggaagaaatgctggcctccttcgtgactttctaacagccaacttcctcctcccataagaggwcactcctcacattccttaaggctttagcagatccctgttccctggaggagaagcagagcacaccaaacgtcaggagccaatgcctcccttatacattaagaagtcaataactcacttctagtgggattagatcattgattccaacatgatcttaagaagagtgtttaatggcagctctctccctgttaaacctcttagtacagtacattcttaggacatatcctcccaagagagcaacaggagagattcaagtttaaaaagctaaatcaactctttctggttagtagctcagcaaagtggctactgagaaaaagtctatgttgcaaaacggga

SEQ ID NO: 683661 - DNA, 767 bp, Homo sapiens
ttacaatgaatatttgcctgaataatagtattgagagctattgatattttccttttcatattttctatcttccttccattttcaatacaactgtatattacctatcgaatctgaaaacaaattataactatttttcatctgaaaaaattaatgcttttgatatgctattcttaagttgagcaagacaattctttctgttccccacggattgtctaagtttgtaaacaccttataaccagatttctcttattttgtctgctagctcactgccacacgtgtaggctttcaaacagggaacaatatatataaaatgaatgcttcctttataaatcacacccttaaatattaagcctaaatagtgaaaatacagaaggaagaaatgctggcctccttcgtgactttctaacagccaacttcctcctcccataagaggamactcctcacattccttaaggctttagcagatccctgttccctggaggagaagcagagcacaccaaacgtcaggagccaatgcctcccttatacattaagaagtcaataactcacttctagtgggattagatcattgattccaacatgatcttaagaagagtgtttaatggcagctctctccctgttaaacctcttagtacagtacattcttaggacatatcctcccaagagagcaacaggagagattcaagtttaaaaagctaaatcaactctttctggttagtagctcagcaaagtggctactgagaaaaagtctatgttgcaaaacggga

SEQ ID NO: 683662 - DNA, 636 bp, Homo sapiens
gcctgcaagagcccaggggcaaggtcctcgggcagccaagatgctggtggtctcttccacgaccagctccctccacgtggcacacttttgtctgcatggctgggcatggggcacctgttcgtccgacacactttgagcagctactctgtgcattgaggcaacgtggcacggtgccctggggaaatagcgaggaggcactgcacaggccccacccttctggcattttctgtctcctggggatggtggcagttaaataagtgacagccaattgtcaggagagtttggctctgattcaccaggtggagccaggcactcctgccggaagaggcatgggaactagcataggatgaagggaggcagcgagcaccagcccaggccytgcccccacagggcccttttttcacacctacttgtgcaggcgtcccctgtgagggcagagacacctgcagtgcttgagggagacttcctgcgggcggggtcgtccatccacagcggccaggtgggaggtgcatcagtgtcctgtggctgccataatggaccacagctgtggggcttgaaaaaatggaagcgggttctctcccatgctggaggccagaggtccaaaatcaaggtgtcagcaaggccacactccctagg

SEQ ID NO: 683663 - DNA, 647 bp, Homo sapiens
aatttttagatttgtctcttatctccattcctattaaaaacattctgtttgagtctttattacttttcaccttactattgtcagtctcctgamttatctctgcctctaatcttgttcctattcaatctacccttcacacatctgccacgatgatgtgtttaaaatgctgatctgatcacatcactcccctttcttaaactcctccaaaagctccatgctgtctataggagaaagttcagacttcctaccagcatgcaaagcccagcacaaaccagcctctccagatctctctgcctcctctgccctttcttcctgcctgcccgtctcacgtttatgctctaacaacactggtggcctcagcattctcagctcctgctgggctccagcttacatcactcttctgcttagatggtcctcttggtgaagatggtgcctttcctcttcctgccctttctttgactatttcatactcaccctttaggacccaggtcaggtgaaacctcctctgggaagccttcctggagcccttaaacagcttctgctcagagtcctccaaagtctgccaacacatgagcactgtgatgtaatgaaaagaataaggactgtagaggaagcatgacctggatataagaggcagcactggggcc

SEQ ID NO: 683664 - DNA, 647 bp, Homo sapiens
aatttttagatttgtctcttatctccattcctattaaaaacattctgtttgagtctttattacttttcaccttactattgtcagtctcctgaattatctctgcctctaatcttgttcctattcaatctacccttcacacatctgccacgatgatgtgtttaaaatgctgatctgatcacatcactcccctttcttaaactcctccaaaagctccatgctgtctataggagaaagttcagacttcctamcagcatgcaaagcccagcacaaaccagcctctccagatctctctgcctcctctgccctttcttcctgcctgcccgtctcacgtttatgctctaacaacactggtggcctcagcattctcagctcctgctgggctccagcttacatcactcttctgcttagatggtcctcttggtgaagatggtgcctttcctcttcctgccctttctttgactatttcatactcaccctttaggacccaggtcaggtgaaacctcctctgggaagccttcctggagcccttaaacagcttctgctcagagtcctccaaagtctgccaacacatgagcactgtgatgtaatgaaaagaataaggactgtagaggaagcatgacctggatataagaggcagcactggggcc

SEQ ID NO: 683665 - DNA, 2773 bp, Homo sapiens
cctgtccccacccagcatccattcagaagctcccagtcagaggcacagccagggcacaggggaagggcagcatgtagggcctgccaagccagacaagcaggaagatgccaggcaccacgcatgctggggcaggtgacctttcacttcccgaacccagaccaggacaatcagactgcaccaaatcctccaggcagaggtgagctgatctcaggcccacagaaccacctgagatgaatgctttctgggtgatggatggcgccagggactttgtgcattaacccaccctccacgtctccacttggtgcccaggtggagagtgcagcacggacatccactcatggtgctcacgtgcctgcaaacatgctggccaacatggagcctcttttcttgtttaaggatgagtaaccaaaacacaagagcaccaggctttgaggactcaagggccacagcacagtagactattcccctgggttactgggacagtcacatctgatttgcaacatatctcaagacctcagcacacttcaagaatgagaaggctcctccacaaccttgagccaggtagagaggcacagtgagggcgagcatgttctttacgcattcaaatcattcacattctcaccctccttcccaggccctgggtagcctggggtgatagcaccttcccctcaccagtacccgccacttaccgcatgaacaggattgcactggtctatggggctcttaaaatctgtccttaactcatcaaaggcaattatctgaaacagaatacagagatttgaggtgttagtgcacacgagtcaacacaccatgtccaaagcttctgtggatttgcttccaaataacacaacagaaaggaagaggctgtagatggcatgagattggccagcagctggtcactgtcgaagctggcaataagcacatggggttgattatattcttctgtctactgtgtacgcttaaaattgtccccagtaagtttttttaagtatctgtgctctacaaagatgtaaagaaagtctactgtgctgagggcaggtttggatttagataaaagcacaaaaaaattaaaacttcaaaccactacttttagcccctttccttccaggaagagctatttattttttatttgtgtgtatttgggcagaaaaggtgattggaagtgaaacagacagaagtcaggtgagaaggaaaagagaaaaacaaggcagtagagttgacagtaatagaaataaccaaatgtctagatgtccacaagcctggacggtcagctcctgggcagtcagcacttcaaagcacagtcctttggacttcagtcctacagttcattttggatgaagactcagaactccccagagaacaacactttcccgatatccctggaggaaagaatgctggagaggaccttttccagtcacagaatgaggcacggccctccacagaaggacctaactgacaggtgaaggttcacaagcccacatcctcaccacagctaccttgtctgctacagaaggaataaataatagaacaaggtgggatttggccaggggagtgtcctttcttagggtgtggaagccttgggtgctcccagtaaagtctctccttttgaaaataaacagacatgaccgcctgtaatcccagcactttcagaggccgaggcggttggatcacctgaagtcaggaattctagaccagcctggccaacatggtgaaatcccgtctctactaaaaatacaaaaattagctgggtatagtggcatgcacctgtaatctcagctatctaggaggctgaggcaggagaaaaaaaggaaaataaaataaacagacataaccaactccccaggaaggcacatcccaggggtccctgaacatttggtagaattgctgaagcaaggaagccagcttcccgcccccagatgtccccaatccagcaacatggggctgacagtaagcattaagtgagagaaaacaacttccctctacaaagcaagtagaattttaaagcagtcatatgtcatcctgatttcaatcctcctacagaatttgaagaaaattccagtataacttgtattaaaccaacacatttctatatcatcccttgccagataattatccagcctgtacttaaacgcttcagtaacaagaaactcaccacttactgaagatgctcattccacttctggctacctctaattaatcattgctttccttattaaactataatatatgactccctgaagcttccacccacagcctaagccagggtcagcaaactacagcctgaaggccaaatccagcctgctacccatttttgttcaacctgtgagctaagaatgttttggtttgttttttagtttttgtttttgtttttgttttgagacagagtctcactctgtcagccaggctggaatgcagtggtgagatcttggctcactgcaacctccatctcccrggctcaagcaattctcctgcctcagcttctcgagtagctaggattacaggcgtgtgccaccatgtacaaaaaaaaatacaaatacaaaaaaaaaatttttatatttttagtggagatggggtttcatgtttttaacatttttttaaatacttgaaataaaccaaaaaggagaatattttgtggcatgtgaagcttatattaaaattcaaatttcagtatccataaaggtttattggaatatagtagcattcattcttttatcgatactgcttttgcacaacggcagggttgagtagtagttacaggctgtaaggctcacaa

SEQ ID NO: 683666 - DNA, 656 bp, Homo sapiens
ttgtagtaatttattacatagaagtagataactgatacatgctcttttgtttaaacagaattgagtgcatttctgtaccttgctgtctatgttttcaggccaagatacttactttaaaaacattagtttaataagaaatgcgaacagaactataattgttaaagtttttcattttcattttctttttctgagaaaaagaaaagtttttcattttctttttctgagatatacagaagttgacactagtttcaaagcttactgcttattcacctgcctgtcaaccacctattttccttcacattcattcatctatccatgctatgtcttaagactggggttttaagatagaagtacatggataaataatatacggtactgggggcaagaaattttcttttctagaaatccttttggggaaaagtttttcagaaaatggttttttgaccaactgacttggggtaaaagttgagcctccagggcatgatttactttggtataagattgtaggatatagacctggcgtggtggctaatgcctcggatcacgaggtcaggagttcgacaccagcctgaccaacatggcgaaaccccatctctactaaaaatacaaaagttagccaggtgtkgtggtgcatgcgtgtaatcccagctactcag

SEQ ID NO: 683667 - DNA, 622 bp, Homo sapiens
tggagagcatgtgatgaatctggtatgcaatccagatcctcaaactcaggatctgatgctctttcgaccaaattctaggtggagttagmatccatgtcttctcattcccaagccaagattttcttgaagacatcaaatattgcaaggagtggagcaggcaccttcgctattgcttcactgctaccagcataggaatgtcatgccaactaaagccaaacctaacacatagccaaggttaagttatttacaatctcagggtctccgtttccccaagcgtaaaatgaaactaatgtaaacagtaggactagcatccacccttataggattattgtgagaattagatgagaaaatattctacaatcctcactatagtgctcaacatagaaaccatttaataaacagtaactactgccataagaatagttgctgtaattaataataacctccctgagtctcagcctcctgatttcctaattttaagagctaaaactgaataattatttttcttttttttttttaaatggagtctcactctgtcacccagactggagtgcagtggcgtgatctcagctcactgcaacctctgacccctgggttcaagcgattctcctgccttgcctca

SEQ ID NO: 683668 - DNA, 622 bp, Homo sapiens
tggagagcatgtgatgaatctggtatgcaatccagatcctcaaactcaggatctgatgctctttcgaccaaattctaggtggagttagaatccatgtcttctcattcccaagccaagattttcttgaagacatcaaatattgcaaggagtggagcaggcaccttcgctattgcttcactgctaccagcataggaatgtcatgccaactaaagccaaacctaacacatagccaaggktaagttatttacaatctcagggtctccgtttccccaagcgtaaaatgaaactaatgtaaacagtaggactagcatccacccttataggattattgtgagaattagatgagaaaatattctacaatcctcactatagtgctcaacatagaaaccatttaataaacagtaactactgccataagaatagttgctgtaattaataataacctccctgagtctcagcctcctgatttcctaattttaagagctaaaactgaataattatttttcttttttttttttaaatggagtctcactctgtcacccagactggagtgcagtggcgtgatctcagctcactgcaacctctgacccctgggttcaagcgattctcctgccttgcctca

SEQ ID NO: 683669 - DNA, 622 bp, Homo sapiens
tggagagcatgtgatgaatctggtatgcaatccagatcctcaaactcaggatctgatgctctttcgaccaaattctaggtggagttagaatccatgtcttctcattcccaagccaagattttcttgaagacatcaaatattgcaaggagtggagcaggcaccttcgctattgcttcactgctaccagcataggaatgtcatgccaactaaagccaaacctaacacatagccaaggttaagttatttacaatctcagggtctccgtttycccaagcgtaaaatgaaactaatgtaaacagtaggactagcatccacccttataggattattgtgagaattagatgagaaaatattctacaatcctcactatagtgctcaacatagaaaccatttaataaacagtaactactgccataagaatagttgctgtaattaataataacctccctgagtctcagcctcctgatttcctaattttaagagctaaaactgaataattatttttcttttttttttttaaatggagtctcactctgtcacccagactggagtgcagtggcgtgatctcagctcactgcaacctctgacccctgggttcaagcgattctcctgccttgcctca

SEQ ID NO: 683670 - DNA, 622 bp, Homo sapiens
tggagagcatgtgatgaatctggtatgcaatccagatcctcaaactcaggatctgatgctctttcgaccaaattctaggtggagttagaatccatgtcttctcattcccaagccaagattttcttgaagacatcaaatattgcaaggagtggagcaggcaccttcgctattgcttcactgctaccagcataggaatgtcatgccaactaaagccaaacctaacacatagccaaggttaagttatttacaatctcagggtctccgtttccccaagcgtaaaatgaaactaatgtaaacagtaggactagcatccacccttataggattwttgtgagaattagatgagaaaatattctacaatcctcactatagtgctcaacatagaaaccatttaataaacagtaactactgccataagaatagttgctgtaattaataataacctccctgagtctcagcctcctgatttcctaattttaagagctaaaactgaataattatttttcttttttttttttaaatggagtctcactctgtcacccagactggagtgcagtggcgtgatctcagctcactgcaacctctgacccctgggttcaagcgattctcctgccttgcctca

SEQ ID NO: 683671 - DNA, 622 bp, Homo sapiens
tggagagcatgtgatgaatctggtatgcaatccagatcctcaaactcaggatctgatgctctttcgaccaaattctaggtggagttagaatccatgtcttctcattcccaagccaagattttcttgaagacatcaaatattgcaaggagtggagcaggcaccttcgctattgcttcactgctaccagcataggaatgtcatgccaactaaagccaaacctaacacatagccaaggttaagttatttacaatctcagggtctccgtttccccaagcgtaaaatgaaactaatgtaaacagtaggactagcatccacccttataggattattgtgagaattagatgagaaaatattctasaatcctcactatagtgctcaacatagaaaccatttaataaacagtaactactgccataagaatagttgctgtaattaataataacctccctgagtctcagcctcctgatttcctaattttaagagctaaaactgaataattatttttcttttttttttttaaatggagtctcactctgtcacccagactggagtgcagtggcgtgatctcagctcactgcaacctctgacccctgggttcaagcgattctcctgccttgcctca

SEQ ID NO: 683672 - DNA, 1192 bp, Homo sapiens
tgatctgtcctttgrtaacagcagaagtcgtacaaatggactaaagtcagtgtactttatggcggtaactcgataaagaaattatctctgcatgtccttcgtaaggaatgagattttgagccacattttggcagacagctcattagtgatatttttgatgactaagctgatttggaaattgcttgttaaaagtctgcggatgacgtgcacaaaacaacacttctctgtgtctttgtgcctctctctgtgtgtaattgctatacacatgtttcctggtgaagaatcagcattcaggacacctctactctactgaaagcatgcacgcacgcatgcacacacacacacacacacacactctgcctctattacttggttggtttggattatgaatgttggacaagcaatgaagaattccatgaaagtagtaatgaagagtgcttatcaatagattcaaaattattctgtccttttcccctgaagaagtttgttcctttttttccttcaaactgtttgtcatggttctacttgaaataatgtgtagaagaagtttgtatcaaacactgcagtccacctattttccgaagttttagattttcttggaagcatcatctggctagtggctccacctgaccctattttgtttatgaattttgatgttcacataggtcaaagcattactgctctaagtagcatcttaaatgattttaatacactcccataaaatgtcagctgccaagactcacaattacagactccaaaatataggaactatgtagagtctaatatgtagagcctttaaaaatattaaacagtttaatgtaccaggctggttgtattactgtgtatgtatgtatgtatgtgtacgtaaacataattttataattaaatgtgtattatatataaacacacaatatatgtatgtttcatggaataacatatttttttccttccctgggagcagtgtttaattatatcaaatgaagaatagtttactacattttagttctttgtaaataaaagaaaaagacagtcgataaccattttcccctcacagtttttccttgccacaaaataaaccctctttggacccaagaagaacagaaagtaccaactgctaacctgctttataacataatattttgtgccaacttaaaaatatgtcaactaggtttgcagtggaaaagggtaaaat

SEQ ID NO: 683673 - DNA, 1192 bp, Homo sapiens
tgatctgtcctttgataacagcagaagtcgtacaaatggactaaagtcagtgtactttatggcggtaactcgataaagaaattatctctgcatgtccttcgtaaggaatgagattttgagccacattttggcagacagctcattagtgatatttttgatgactaagctgatttggaaattgcttgttaaaagtctgcggatgacgtgcacaaaacaacacttctctgtgtctttgtgcctctctstgtgtgtaattgctatacacatgtttcctggtgaagaatcagcattcaggacacctctactctactgaaagcatgcacgcacgcatgcacacacacacacacacacacactctgcctctattacttggttggtttggattatgaatgttggacaagcaatgaagaattccatgaaagtagtaatgaagagtgcttatcaatagattcaaaattattctgtccttttcccctgaagaagtttgttcctttttttccttcaaactgtttgtcatggttctacttgaaataatgtgtagaagaagtttgtatcaaacactgcagtccacctattttccgaagttttagattttcttggaagcatcatctggctagtggctccacctgaccctattttgtttatgaattttgatgttcacataggtcaaagcattactgctctaagtagcatcttaaatgattttaatacactcccataaaatgtcagctgccaagactcacaattacagactccaaaatataggaactatgtagagtctaatatgtagagcctttaaaaatattaaacagtttaatgtaccaggctggttgtattactgtgtatgtatgtatgtatgtgtacgtaaacataattttataattaaatgtgtattatatataaacacacaatatatgtatgtttcatggaataacatatttttttccttccctgggagcagtgtttaattatatcaaatgaagaatagtttactacattttagttctttgtaaataaaagaaaaagacagtcgataaccattttcccctcacagtttttccttgccacaaaataaaccctctttggacccaagaagaacagaaagtaccaactgctaacctgctttataacataatattttgtgccaacttaaaaatatgtcaactaggtttgcagtggaaaagggtaaaat

SEQ ID NO: 683674 - DNA, 1192 bp, Homo sapiens
tgatctgtcctttgataacagcagaagtcgtacaaatggactaaagtcagtgtactttatggcggtaactcgataaagaaattatctctgcatgtccttcgtaaggaatgagattttgagccacattttggcagacagctcattagtgatatttttgatgactaagctgatttggaaattgcttgttaaaagtctgcggatgacgtgcacaaaacaacacttctctgtgtctttgtgcctctctctgtgtgtaattgctatacacatgtttcctggtgaagaatcagcattcaggacacctctactctactgaaagcatgcacgcacgcatgcacacacacacacacacacacactctgcctctattacttggttggtttggattatgaatgttggacaagcaatgaagaattccatgaaagtagtaatgaagagtgcttatcaatagattcaaaattattctgtccttttcccctgaagaagtttgttcctttttttccttcaaactgtttgtcatggttctacttgaaataatgtgtagaagaagtttgtatcaaacactgcagtccacctattttccgaagttttagattttcttggaagcatcatctggctagtggctccacctgaccctattttgtttatgaattttgatgttcacataggtcaaagcattactgctctaagtagcatcttaaatgattttaatacactcccataaaatgtcagctgccaagactcacaattacagactccaaaatataggaactatgtagagtctaatatgtagagcctttaaaaatattaaacagtttaatgtaccaggctggttgtattactgtgtatgtatgtatgtatgtgtacgtaaacataattttataattaaatgtrtattatatataaacacacaatatatgtatgtttcatggaataacatatttttttccttccctgggagcagtgtttaattatatcaaatgaagaatagtttactacattttagttctttgtaaataaaagaaaaagacagtcgataaccattttcccctcacagtttttccttgccacaaaataaaccctctttggacccaagaagaacagaaagtaccaactgctaacctgctttataacataatattttgtgccaacttaaaaatatgtcaactaggtttgcagtggaaaagggtaaaat

SEQ ID NO: 683675 - DNA, 1060 bp, Homo sapiens
acttagactgtcagagagcgatgtacctggagacagggtttggacccctgcagggayctgctttcgctgactgacctttggaatgattaatttagcctacattgagggatgatattaaaaacacaaacacacataaagaatcatatttattataaaggtagagttgggatgtggttcatggtacagtcatttgtgcttctctgcatgcctggatgacttcattttatgaactctgtcaactatatgactttgtgactcctcttcttgggttagacttttagtttgtttgagcaacatttattatctatatcataggatgcattttaatgcactggcctcaaatgggcttcaacctgtttccctgtacttattttctctttccccaaatgtcctcatttacaattttaaaaagttacacatataattttttcacaagtggtcataaaatctttctttttccaaataaaacatggtatgtataagtaaatgaattcaagaaatacctcatatatctattgtgggtaaaaaacaagatgatgtatatagtttctcacacaaatggtagttataattattatagatagtaataataacaacatttataatttagctgaagcctaataaaatacagaatgacttagtcatgggtagagtacatggatatcagatgataccgctttcaaagaagctgacagaataacttttctactccaaaatacctccttggaaattttaccactgcacggtcaggaccttagcttagaagttaacacttcaaaatgctaataaacctctgaagggttaatttcttggaaatagaatcaggcatgaatacttttgatcttgatttagctaggatatttggttcagccgaatacaattgaattaacccaataaaaggtctccctttttaaaattagttccataaataattattaaacacatttatttatacaacaaacatttagtgagcacctactatgtgccaagcaccaagctctgagcaatgagtattcaatgatgagcaagatgtcatggtccctgaataaagataaataaa

SEQ ID NO: 683676 - DNA, 975 bp, Homo sapiens
caagatttatttttgtaaatgactgagatttatgtaaatgtgtatctctgttgtgttttatatatggggtgtctataagggcatttatccctatgaaggatgtcaaatactttcttctaatatatgtttagacatattgcagaggggtccttgttatttgtaattgagttaggtcatttactttgtgtctggtctcacctgtagcatgggaagaggacagcaatgatgagctgcatgtagtaggtacctgtgtatcaagaactgttggtatgtattgctaatttgcatacaaagagtttgtctgtctgcattgtagtttgtgtttaatatcatttgttaaattcacaaatacaacatattgaataaaatatttatatgaaggcatattaaaaaacatcaaacaactttatgtaacaaaatggcattgcattactcaccaatatagagaaatgtcatgtaaataagttggtaaactcaatttccccctttaccatgccaaagaaaattttagctctttgatgatacctctcttgctatttgtttgggataagacttcgccatttttttcccctcagaaattaagtttgctgttattaagtaagaagtgcaatctgtcactactgatgttccgtatagtaaatctgatggaattcatttgtatttagactgtgtgttttgtacctccatgtgcatatgtccattgtatcaagtctctataatactccattccttctgcatgcatatctggtgtgggagggttatttctactgatttgttatagtagctgattgctttgccagtccctcaacaacgctcagaaatgttgttttggtatttcaagtgacaacatttttgttttytaatataagattgctttttaaaacattttgctaccactttacttggaaaaattagagaagacatgacaattctccaccctatgtaaagagcaaaatggaactgaacatcatttca

SEQ ID NO: 683677 - DNA, 611 bp, Homo sapiens
aaaatataactataaatcaaactttcctaaaattttttcagctaaactttgtggaatgttgaccatcacttcaatattcagttctagtaacatgacggtgatatactttaaaagtgatggtaaaaatcgtttacaaggcttcaaggcyagatttaccattttgccctcaggtgagtataaacatttgtgtaataaggacttttgtttatgcaaatggttacagggaagataatttagccatgtttacctcaatgtagtatagcaatccccttggtaagcataacaaaaatgcagatttctggatccacccctagaaacctagattctgtagatctgggatggggcccaggaatctgtgctttaggaagcacctcagttaatgctcaagaaatggcatccactggaacataaagattccacacgccacatacagaaacaatagaattaggattaaagaaggtaattcagaaatgagattgactgactctattttaccaagttagggggctttgaagaattaataggtatcctggcactctggaagataaagtacgtgctactcagacaaaaagaatatcatatgcagaaaccctcacaaaagagaatggaca

SEQ ID NO: 683678 - DNA, 626 bp, Homo sapiens
tgccagcatgtccagctaatttttgtattttttgtagagacagggtttcaccatgttgcccaggctggtctcaaactcctgggctcaagcgatctgcccacctctgcctcccaaagtgctgggattaaaggcataagccaccatgtccaactgaaattcttaataattaataatttttgagcaagaggtccacactttcattttgcactgggttcccaaacaggtcctgggtaggaaggatggctgaggataaaacaggagttgctttggcctggctgaacakttgaaccaatgatcagagtttcattttatgattgtgttactctgaacagatttgctatttttttccagctacatttagagttcctcatgtatatatcacccctctttttccagtccatctaacctctccttttttttgtgcctagaatcagttctccttgccttcaaaatccctgataagtgtccatttctttttgtatcctttgatgtagaagccacaagaatggctttagcagcttattttaatcttatgaattattcattcaggattttttaaatgattcagatgctttcaatctgttaacagtatttataaaacatgtttcagtgatacaacataggtg

SEQ ID NO: 683679 - DNA, 605 bp, Homo sapiens
tgctttgtaagacaggaaggaggactccataggtacatttcttgtattgtgaaaggaaggaagatgacaaattaggcttacagatctagtggttgaaactttaagaaattccattcagatggtttctatcaaataatagttgacgttgttaagctctttcaatgtaggaaatattgrgctaaacaattgtacatgtacttggttatttttatggcaaagagccaagatacatattgatatttcattttatactatcatatatttatgaaaataccgttttcttgttattgttaccttgaattgtttatttcttattactttttgctattgctcatatactctttttcttttttctttcaattctgaaacgtcctttgttatttaaatcctttaagtaataaagagtctcccaattttatatcctataataaaattttggggggatttagacttacttttttcagggccagtccacaaatattttcccaccttttctgcttaattatttaatactacatagcaaaactcatacttgatactttattatttatattctatatttattttaacatagttatataatttatattcagtagttactttga

SEQ ID NO: 683680 - DNA, 605 bp, Homo sapiens
tgctttgtaagacaggaaggaggactccataggtacatttcttgtattgtgaaaggaaggaagatgacaaattaggcttacagatctagtggttgaaactttaagaaattccattcagatggtttctatcaaataatagttgacgttgttaagctctttcaatgtaggaaatattgggctaaacaattgtacatgtacttggttatttttatggcaaagagccaagatayatattgatatttcattttatactatcatatatttatgaaaataccgttttcttgttattgttaccttgaattgtttatttcttattactttttgctattgctcatatactctttttcttttttctttcaattctgaaacgtcctttgttatttaaatcctttaagtaataaagagtctcccaattttatatcctataataaaattttggggggatttagacttacttttttcagggccagtccacaaatattttcccaccttttctgcttaattatttaatactacatagcaaaactcatacttgatactttattatttatattctatatttattttaacatagttatataatttatattcagtagttactttga

SEQ ID NO: 683681 - DNA, 605 bp, Homo sapiens
tgctttgtaagacaggaaggaggactccataggtacatttcttgtattgtgaaaggaaggaagatgacaaattaggcttacagatctagtggttgaaactttaagaaattccattcagatggtttctatcaaataatagttgacgttgttaagctctttcaatgtaggaaatattgggctaaacaattgtacatgtacttggttatttttatggcaaagagccaagatacatattgatatttcattttatactatcatatatttatgaaaataccrttttcttgttattgttaccttgaattgtttatttcttattactttttgctattgctcatatactctttttcttttttctttcaattctgaaacgtcctttgttatttaaatcctttaagtaataaagagtctcccaattttatatcctataataaaattttggggggatttagacttacttttttcagggccagtccacaaatattttcccaccttttctgcttaattatttaatactacatagcaaaactcatacttgatactttattatttatattctatatttattttaacatagttatataatttatattcagtagttactttga

SEQ ID NO: 683682 - DNA, 605 bp, Homo sapiens
tgctttgtaagacaggaaggaggactccataggtacatttcttgtattgtgaaaggaaggaagatgacaaattaggcttacagatctagtggttgaaactttaagaaattccattcagatggtttctatcaaataatagttgacgttgttaagctctttcaatgtaggaaatattgggctaaacaattgtacatgtacttggttatttttatggcaaagagccaagatacatattgatatttcattttatactatcatatatttatgaaaataccgttttcttgttattgttaccttgaattgtttatttcttattactttttgctattgctcatatactctttttcttttttctttcaattctgaaaygtcctttgttatttaaatcctttaagtaataaagagtctcccaattttatatcctataataaaattttggggggatttagacttacttttttcagggccagtccacaaatattttcccaccttttctgcttaattatttaatactacatagcaaaactcatacttgatactttattatttatattctatatttattttaacatagttatataatttatattcagtagttactttga

SEQ ID NO: 683683 - DNA, 1329 bp, Homo sapiens
gaacatctctcccacaaaacttctgattccgtcttattggccagagccagttcctacagcacatctgattccagagaacatagggagcagctagtcaccttgttccctcaaccaaattgagattatgttagttagaaaacaagaaaaaagcagatattgggtaggcaactagtagtatcaacaacagaagattactatgaaaggaaaaccaaaataaacaaaaagagttattgttagtgtagattacttatggcctagtaattgtgagaccttataattctcaccaggtttttctatcttagcaaataaaatgttattttgactacataatacaaaagcagccctggtttccaaataacataaaatgtatctcttagtgtctaggagaactcactaaaatagggtggggcatggtaacatgttttatgcagaatcagttacatatgtaaaatagagaaacttaaactgatcatgtggaagcaattttttcttttctgtatcatattgatttaaactgcaaaaagtaaatatcaagaaagaatccaacttactgcaaatgctgtttaagcaaaagctttttattgaactcacagaccaaattcaaggagtgcattattcacactatgtcttacatacacagaatcccaaaatgatttataaagttaaataatacaattacacagttaaataaccacaaagggagaagaaaattaagagagctttaggcaagagaagagactttcaagaactatatgaaaagaagaaaagatagcatcaatgaggcagagaaatgtaagaagtttcttccagatgccaagagcaataaagaaaaaggcttttgatcctatctcactgaaaagcaccatggaaggaagaaacaattagtgtcagaaaactgaaggaatgagacggaatagagatagatattccttgaaatacatttcccagctacaagcagaygtaaactttaaaaggagttgggtataaaaggatctcgagatttttttattcaatggcataataaaatatgtacatgattccaaaattcccatggaactatacacagtcctcaaagcagaaaatatgaaaacatacctgtttcatacacataagtaggccagcaatagggttataagtgagctcttttcctccacctcatctgtccttatatcacaatatttgaggtattagaaataaagatgttatataaaccttctttttaatgataaaggtagtacacacattggacatcaaccctgctccagtgagaaatgcaatacgtgtggtttatagctttgctccagctttttgttcaacagccctatctcc

SEQ ID NO: 683684 - DNA, 1329 bp, Homo sapiens
gaacatctctcccacaaaacttctgattccgtcttattggccagagccagttcctacagcacatctgattccagagaacatagggagcagctagtcaccttgttccctcaaccaaattgagattatgttagttagaaaacaagaaaaaagcagatattgggtaggcaactagtagtatcaacaacagaagattactatgaaaggaaaaccaaaataaacaaaaagagttattgttagtgtagattacttatggcctagtaattgtgagaccttataattctcaccaggtttttctatcttagcaaataaaatgttattttgactacataatacaaaagcagccctggtttccaaataacataaaatgtatctcttagtgtctaggagaactcactaaaatagggtggggcatggtaacatgttttatgcagaatcagttacatatgtaaaatagagaaacttaaactgatcatgtggaagcaattttttcttttctgtatcatattgatttaaactgcaaaaagtaaatatcaagaaagaatccaacttactgcaaatgctgtttaagcaaaagctttttattgaactcacagaccaaattcaaggagtgcattattcacactatgtcttacatacacagaatcccaaaatgatttataaagttaaataatacaattacacagttaaataaccacaaagggagaagaaaattaagagagctttaggcaagagaagagactttcaagaactatatgaaaagaagaaaagatagcatcaatgaggcagagaaatgtaagaagtttcttccagatgccaagagcaataaagaaaaaggcttttgatcctatctcactgaaaagcaccatggaaggaagaaacaattagtgtcagaaaactgaaggaatgagacggaatagagatagatattccttgaaatacatttcccagctacaagcagacgtaaactttaaaaggagttgggtataaaaggatctcgagatttttttattcaatggcataataaaatatgtacatgattccaaaattcccrtggaactatacacagtcctcaaagcagaaaatatgaaaacatacctgtttcatacacataagtaggccagcaatagggttataagtgagctcttttcctccacctcatctgtccttatatcacaatatttgaggtattagaaataaagatgttatataaaccttctttttaatgataaaggtagtacacacattggacatcaaccctgctccagtgagaaatgcaatacgtgtggtttatagctttgctccagctttttgttcaacagccctatctcc

SEQ ID NO: 683685 - DNA, 1766 bp, Homo sapiens
aaacacgtgaacaaaggtcttggcatcatagacaatgtaaaggattaagtgctgtgcttttagatatgcatacacataaacatctcaatgctttacaaagcagtattgctgcccgcaggtcccacctccagccctaaggcggtttttccctatctcagtagatggagcatacaatcgggttttataccgagacattccattgcccagggacaggcaggagacagatgccttcctcttgtctcaactgcaagaggcattccttcctcttttactaatcctcctcagcacagaccctttacgggtgtcgggctgggggacggtcaggtctttcccttcccacgaggccatatttcagactatcacatggggagaaaccttggacaatacctggctttcctaggcagaggtccctgcggccttccgcagtttttgtgtccctgggtacttgagattagggagtggtgatgactcttaaggagcatgctgccttcaagcatctgtttaacaaagcacatcctgcaccgcccttaatccattcaactctgagttgacacagcacacgtttcagagagcacggggttgggggtaaggttatagattaacagaatctcaaggcagaagaatttttcttagtacataacaaaatggagtctcctatgtctacttctttctacacagacacagtaacaatctgatctctcttgcttttccccacaattctggcaactgagtgagggacagattgggtgaggccaagactgggagaccaggaaggatccccattttattggttcacactgatcttcctgaatcaattgatggcatgtggctgttgagtgttaggtagaccaaagcagtagccctaagctgtgacttaaagggccttggttggtcacaaaagacgaccacttccccatgggcatctatttgatcaacttccatctaattacttttgtttgtttgtttattttttcttgagacagtgtttcactcttgttgcctaggctagagtacaaaggtgcaattttggctcactgcagcctccgcctaccaggttcaagcgattctcctgactcggcctccgaagtagctgggattacaggcatgcatctccatgcgcagctaattttttgtatttagtagacatggggtttcaccatgttggtcaggctggtctcgaactcctgacctcaggtgatccgcctgcctcggcctcccaaagtgctggaattacaggcgtgagctcttgcacccggcctctaattccttttggagctgagggcataatgaagagagggaagtaggagatgaagtaaaggagcaggcagacatcacagtttgaaaagacctcagaggtcatggtgaaagtttggatttcatatttgctgcagtggaaagccatgagaaattyttaagcaggtgattctcctgtctctcccagtgccttctaagtcaggcactaggagagatacaaagctacaggtggtgcctcagggacttacaaaccagaaggttccatgccttcccctttagtgggtattatttgatttctgtgaacccccttcttacatcttccacataagcaaaaaaaaaaaaaaaaaaaaaaaaaccctgcaccacctcctgcagtgtatggacatatgaaatgccgtggggttgtagtgtggtgtgataattaataggaaaagggcaagcaaactgtaggacttaacctagcaaaactggaaaagctacagacatggcagtgagaaaagatggataccgtt

SEQ ID NO: 683686 - DNA, 1766 bp, Homo sapiens
aaacacgtgaacaaaggtcttggcatcatagacaatgtaaaggattaagtgctgtgcttttagatatgcatacacataaacatctcaatgctttacaaagcagtattgctgcccgcaggtcccacctccagccctaaggcggtttttccctatctcagtagatggagcatacaatcgggttttataccgagacattccattgcccagggacaggcaggagacagatgccttcctcttgtctcaactgcaagaggcattccttcctcttttactaatcctcctcagcacagaccctttacgggtgtcgggctgggggacggtcaggtctttcccttcccacgaggccatatttcagactatcacatggggagaaaccttggacaatacctggctttcctaggcagaggtccctgcggccttccgcagtttttgtgtccctgggtacttgagattagggagtggtgatgactcttaaggagcatgctgccttcaagcatctgtttaacaaagcacatcctgcaccgcccttaatccattcaactctgagttgacacagcacacgtttcagagagcacggggttgggggtaaggttatagattaacagaatctcaaggcagaagaatttttcttagtacataacaaaatggagtctcctatgtctacttctttctacacagacacagtaacaatctgatctctcttgcttttccccacaattctggcaactgagtgagggacagattgggtgaggccaagactgggagaccaggaaggatccccattttattggttcacactgatcttcctgaatcaattgatggcatgtggctgttgagtgttaggtagaccaaagcagtagccctaagctgtgacttaaagggccttggttggtcacaaaagacgaccacttccccatgggcatctatttgatcaacttccatctaattacttttgtttgtttgtttattttttcttgagacagtgtttcactcttgttgcctaggctagagtacaaaggtgcaattttggctcactgcagcctccgcctaccaggttcaagcgattctcctgactcggcctccgaagtagctgggattacaggcatgcatctccatgcgcagctaattttttgtatttagtagacatggggtttcaccatgttggtcaggctggtctcgaactcctgacctcaggtgatccgcctgcctcggcctcccaaagtgctggaattacaggcgtgagctcttgcacccggcctctaattccttttggagctgagggcataatgaagagagggaagtaggagatgaagtaaaggagcaggcagacatcacagtttgaaaagacctcagaggtcatggtgaaagtttggatttcatatttgctgcagtggaaagccatgagaaattcttaagcaggtgattctcctgtctctcccagtgccttytaagtcaggcactaggagagatacaaagctacaggtggtgcctcagggacttacaaaccagaaggttccatgccttcccctttagtgggtattatttgatttctgtgaacccccttcttacatcttccacataagcaaaaaaaaaaaaaaaaaaaaaaaaaccctgcaccacctcctgcagtgtatggacatatgaaatgccgtggggttgtagtgtggtgtgataattaataggaaaagggcaagcaaactgtaggacttaacctagcaaaactggaaaagctacagacatggcagtgagaaaagatggataccgtt

SEQ ID NO: 683687 - DNA, 625 bp, Homo sapiens
taagccgtatctcaagtgcaaatgtaagacattggagagcctgaaacaggagaccaagcctgaaaattcgtttggtgtctgaactgtctccctgacactctagcaaaaaaacccagatgaaaggatgatttcttcccatcaccgtaacaggttrgaaagctttatccataacagctctaattctcggattattcttaattcccccctcctttgttggagtttgtcttctatttgtttttgtcttactgtctatcagcttgtattaattctcggtttcaccttcctccctctcttatttctttctttacctcctttcccaatctctttgctcataagaatctcagagaaaagtcttagggaaaaggcctctgcttgaccattgcttccatctaaatttgcctattcaccacttgttttaagcttttgtaggggcctatgtgcccagcccttcctctcattttccctttataattaggaggtgctgggtcctccactgcttcccagctttggaactaatttcaggggaagcaggaggaggaggacctcctagaagggagacataattctcatttttccttgtggtaagccccacaggtggttgtcaggtgagaaagctgccgggtca

SEQ ID NO: 683688 - DNA, 625 bp, Homo sapiens
taagccgtatctcaagtgcaaatgtaagacattggagagcctgaaacaggagaccaagcctgaaaattcgtttggtgtctgaactgtctccctgacactctagcaaaaaaacccagatgaaaggatgatttcttcccatcaccgtaacaggttggaaagctttatccataacarctctaattctcggattattcttaattcccccctcctttgttggagtttgtcttctatttgtttttgtcttactgtctatcagcttgtattaattctcggtttcaccttcctccctctcttatttctttctttacctcctttcccaatctctttgctcataagaatctcagagaaaagtcttagggaaaaggcctctgcttgaccattgcttccatctaaatttgcctattcaccacttgttttaagcttttgtaggggcctatgtgcccagcccttcctctcattttccctttataattaggaggtgctgggtcctccactgcttcccagctttggaactaatttcaggggaagcaggaggaggaggacctcctagaagggagacataattctcatttttccttgtggtaagccccacaggtggttgtcaggtgagaaagctgccgggtca

SEQ ID NO: 683689 - DNA, 625 bp, Homo sapiens
taagccgtatctcaagtgcaaatgtaagacattggagagcctgaaacaggagaccaagcctgaaaattcgtttggtgtctgaactgtctccctgacactctagcaaaaaaacccagatgaaaggatgatttcttcccatcaccgtaacaggttggaaagctttatccataacagctctaattctcggattattcttaattcccccctcctttgttggagtttgtcttctatttgtttttgtcttactgtctatcagcttgtattaattytcggtttcaccttcctccctctcttatttctttctttacctcctttcccaatctctttgctcataagaatctcagagaaaagtcttagggaaaaggcctctgcttgaccattgcttccatctaaatttgcctattcaccacttgttttaagcttttgtaggggcctatgtgcccagcccttcctctcattttccctttataattaggaggtgctgggtcctccactgcttcccagctttggaactaatttcaggggaagcaggaggaggaggacctcctagaagggagacataattctcatttttccttgtggtaagccccacaggtggttgtcaggtgagaaagctgccgggtca

SEQ ID NO: 683690 - DNA, 1263 bp, Homo sapiens
taagcattctcttcaaataaactttcattaagtcagatttctctatagtctgcaagcttaatgaatgcatgtgtggccgcgtgagatatataggatttacctccatgcctagtttttggagcatgagagaagctgatccataataaaatacgtgaacccattttggtagaggcaccgttaatttaacaaaggaagcgttgaaatggtgcttcaattggggccggttaagataatgaagtttctgagaaaaaggttggtaaaatgttagagtcttacggctgtttttttcttttgcatattattagaaagtctggtttcaacatgacctcactgtttagacccccttaaaatacttgtttccccaccttccacgtggccctgtcaggaaggggtacgtggcrgacagggaatagctacaggtgcaaaatgcagaataccatttttccagtgttttcggcccacatgacataccagcgtggatcttgtttgaaagctaccaggtggtagcatttattttggctgaaactctgcatcatagccaaaatctgctcttctgtgcattcctcttgcatctattccactctgcctgctggggaggaagcggatgattctgagcccagcccacgtaggtgctgttgaaacaggaggtcaggccagcctttgctgcttctggggtgctttagtagcaaatggcttctgttgtgtccaaatggagtcccctccacggaacatgggtatgagatgcccagagaagatgctcgactacacggaccatcactgttttttgtttgtttgtttgtttgttttccccctgtaacccattgtatttaagtggtttagattatcagatgaaaaaaaaataggaaatccaggcagtgggatagagaagaagtcaaatggggctgcctggagcaccattagtgagtgtcaaacaattttgtcagcagaaagccttgttataaagcctataaactaccaacaggtcaaaaagaaaaaaaaaagagtcaattaaatattgatatataggatatggaagagaggtgagtgactgcatttaaacctgacgttttttgatgggaaacaccttatgaatatgtcatcaactaaattatgtcccctcaaaattcatacggtgaagtcctaaccccagctaccttagcacgtgaccttatttggagacagggtgtttatggagctaatcaagtaaaaatcaggtcattagggtgggccctaatccagtatgactggtgtccttataaggag

SEQ ID NO: 683691 - DNA, 1263 bp, Homo sapiens
taagcattctcttcaaataaactttcattaagtcagatttctctatagtctgcaagcttaatgaatgcatgtgtggccgcgtgagatatataggatttacctccatgcctagtttttggagcatgagagaagctgatccataataaaatacgtgaacccattttggtagaggcaccgttaatttaacaaaggaagcgttgaaatggtgcttcaattggggccggttaagataatgaagtttctgagaaaaaggttggtaaaatgttagagtcttacggctgtttttttcttttgcatattattagaaagtctggtttcaacatgacctcactgtttagacccccttaaaatacttgtttccccaccttccacgtggccctgtcaggaaggggtacgtggcagacagggaatagctacaggtgcaaaatgcagaataccatttttccagtgttttcggcccacatgacataccagcgtggatcttgtttgaaagctaccaggtggtagcatttattttggctgaaactctgcatcatagccaaaatctgctcttctgtgcattcctcttgcatctattccactctgcctgctggggaggaagcggatgattctgagcccagcccacgtaggtgctgttgaaacaggaggtcaggccagcctttgctgcttctggggtgctttagtagcaaatggcttctgttgtgtccaaatggagtcccctccacggaacatgggtatgagatgcccagagaagatgctcgactacacggaccatcactgttttttgtttgtttgtttgtttgttttccccctgtaacccattgtatttaagtggtttagattatcagatgaaaaaaaaataggaaatccaggcagtgggatagagaagaagtcaaatggggctgcctggagcaccattagtgagtgtcaaacaattttgtcagcagaaagccttgttataaagcctataaactaccaacaggtcaaaaagaaaaaaaaaagagtcaattaaatattgatatataggatatggaagagaggtgagtgactgcatttaaacctgacgttttttgatgggaaacaccttatgaatatgtcatcaactaaattatgtcccctcaaaattcatacggtgaagtcctaaccccagctaccttagcacgtgaccttatttggagacagggtgtktatggagctaatcaagtaaaaatcaggtcattagggtgggccctaatccagtatgactggtgtccttataaggag

SEQ ID NO: 683692 - DNA, 1152 bp, Homo sapiens
cagcacacctagcctgaggacaacttaagatctgagaaacagttgactgcaaaggatgtgaaagccagccccactgtgctactgctgccttacctctgctcaaggtacgccaaggcctgcctgacaaactccatgcgcacttccacgctgctgcggttcttcagggcatccgttgccggtgtcaacaacacgtctgtcatttgttttaccatggtccacatgtcggaaatgctctgcacataaatgaaactgcatgtgacaatgctgcagggccagagaaattatctagttctttgtggcactctgacctccaaagggggcagaatgtggtgggggatgaggttaatgtcatctgtctgtgacggctaggcttaagctcagtgcagaagatgcgtctctgctggccagacttcagagttccatccaccgatgagcacccctgcccctgccctgagttggttttcagatcaattactattccaggtctgacataaccacgtacataattaaaaccacatacaagtcacgagaacactgaatctcagtgggttatcccttcagagacaaggaatccatttataatcatccaaagttctagaagtttaaactcaaagagctgcayttcagtccttacaaggttatctgagtttctaaaggcttaaaataagactttaacataataatacaggtttttgtcctcccagagacgctccaggggccaccgctcttacgttacttggtgagcgtcacagcctcccattttccttcccactcactcccttcaaaagacgcctcccaggaaaggagcgggtgttctttcctctgtgttaccaccacacagctgggactccctctccccagaatccttctgcctgtaaatggctccttaaaaacaacgtgttccctgaacccttggcaatactttaaatgtatgagtccttgcaggatagcactgattggagaaaaagcaggtttatacttgttccaaagcaaaagagaaaagcctgttttcatggtctgtctcaaaaattaaaattttagaatgtccagacaaatgtgactcttcctaagtggtggaatgattggtgaaacctgactttcttctttagatctgtttacattgtcttatattttagtatttaaaaaaattaa

SEQ ID NO: 683693 - DNA, 644 bp, Homo sapiens
atcagccttttcattgacataggaaggttcggttgttgtaagccctggttagaatcctacaagatccataaatctgtggcgcaaatattaacttacggaataagagcctagatctcagcataattttttaattatggggacagcatttaacatgtttaaatatrtggtagaatgcaaagggattcttttcccttggtttttatgaggcttgcaccttgaaatgaaagagttttaggtcagcaaattagaactccattttaactgcagatttgtttgcataaaatgtttggttggatgacatggggggtatcacagagcctccctttgaaatttttacagtaaaacttggttgaagatcctggtcttttttccttttgttggctttataataaggctaggtgttaagtaccctgggggaggtaggagagacccagtttcttcctgctttctttgcctccaccatggtctactcaagtttggctgctcggaagagcctctcctttctggtacttgtaggggattcctgaacctcttcaatctggaaactcttcagttttctcatgaaattttagcctggctgatagtgaagagtcagggattggttctttttgcaacaaaaaatgtatttgtatcaaaccttttta

SEQ ID NO: 683694 - DNA, 1228 bp, Homo sapiens
tcagttaaccttaatgagaagggggacagatgatacttacttgttatagttttgagtactaccaaggtcatgtttttagggttttctttggtgcttttctaaatacacaatttaatgttaactttatggatgctgtggtttctcacccagataaaatattatgctgccatacactttgactccaagcatctccttcctccatcctcttccaagtgcaccacatcagtttgttcccaccctgtagtgtaggagctcagcatagtacatgtggctctgcagagccggatatctactttgtatcataacattcaaaccagaccactttgtgaataattgaagcaagaactttgttactggacatctggatttaaggaaaaatacagtgtccttgtagatgaaacttagcctggatttacttttttcattttccagctcccctccattatcagttagcaagcagggagcaagtcatttccagtacattgtgtagaagagttgtatgtgatgggtacagtatggagaacattaaaaaaagtgttggaaaagccaaaaaaaaaaaaagtgctctaatctctccaaaggatgtctttgacctacatgtgctatatcctgagagttacccagagcagaggcacctcaggtgagaagagcacatgacactgagccagtggaggattcttctgctggttaatgcattatgagaaggagctggcgagggcaattacatacaactagtttaggtcacatgagactctgatagtcttagaaaactgaaggcaggtatatagatacataaaagtgttcatgaatacttattacttgcagctcatccattttcyttaaagattttcatttaagggtacaatttcacaaaatcatgaacagtatttctgtgatcagataagatgtattctctatatagcagtgtccattatatcacgtgggcatttttacaggcacagtaatattaaggtcaagatgtttagtgattctagcaacaaaaccaaatattaatacacagagtatgaaacagataattctgtcacattgaaagcgtatgtcatctggtcctcagaatgctgtctagtagttttccactgtattatatttaacagaggctttttataaatacagtcataccaattaataatttttccacttctggtgggtggccatcgtagatactagaacacattatcaatgatatgaatgatggttttaaattgca

SEQ ID NO: 683695 - DNA, 2425 bp, Homo sapiens
agggtgtgatttactactcagcagtgtgccagtgatgtggcatgaattaaaaacaagaagtcttccaggagaaaagatttctttagagatgtaattaattgacctggcttgggtccctcctttcccggaggaaaaacttctccttttccggagtagttgtcagtgaagtgtttcaaatactgccctggttgtaattattgttcaagttcatgctgcaaaatcatcttcacttaataattctagcattcaccacccaaaaactcataagcaaggcttttgtattgccacacagtttgggattttttttctcagaattaggaagcaaatgtagccagcaattattttagatattgctttcagaaatgaatttttcccatatctgtcagatttggctcagagttctttttcaatttaatcattgttagcagcatgaaaaactgttaagttaaatgttcaggcataagcaagtcattactccatatttgaactctagagagctactggttgtcatggtaatatgactgcacgtgtgaagttagcattggcaacatcacattttcattaaaacatcatgcatatttgcatgaacttctgcccagaccattgttgcaggattggctcctccaccccatctcataatggtgccaagagatttcatatttcagatccaaacttgttagagtttacagcattcattattcatccctcagagatagaagttgacctgtattcaaggcttaacatatatgaatagagagctcactatatatctctatggttaatcctactaattaccgttcccctgaattgaggtaaccctcccatttcttttagtgaatagttttaattactttctttgacttgcctcttcccaaattagggtatgtttcttcaaataactccccatggatttgtagtgttgctattactcctgaagatgtaggtttccccctcccctcccctcccttcccctcccttccccttgatggagtttcaccctttcacccaggctggaatgaagtggtgtgatctcagttcactgcaatctctgcctcccaggttcaagccattctcctgcctaagcctcctgagtagctgagattacaggcacatgccaccatgcccagctaatttttgtatttttagtagagatgaggtttcgccatgttggccaggctggtctcgaactcctgagttcaggtaatccactcgccttgtgctagaattttttttctccttatgccttcttcccagaacctctattatgtttcctttggtttagggctgtgattatacttatttgcccatatgatcatttatttattcaattaataaatatttattatggtttactatgttgtagggtagatgctagatcccaagtaagccagggcaacaattagttgattagagatgtaagctcttgctgtctaccctgttcttggccaaattgtctgtatttcaatgcagcagatatcttcacaaaggtttttttagcacacaaactgtttgttaagtcctataaattagcaaacaatgctagtttactttttgtttccatgtcattgtttaaacattcttttgttgagctaaaggtttgaatgaataaaccaacaatgaggaagtgccagaacagttcctgtatataccctgcatatatttatttgcagattttactagctattaaatatcatataatacatatcggctctctcctttctctgcttacacatacatggttcctgattgatcaataatttaagtgttgcatttggagattactataggagtttcaaatggtgtccatggtacttctgtttgtgcctctgttcatattgctccttacacttagcctgcctttcccgtcccaaattcccactgaagacctggagaaggcctcatctttcaaaattcaattcaagtatcatttcgtttatgaagtgttatataacaataagaggataaattaataacaggataaataaagaataagaaagcacactaaaaactcttttttttttkaaacaaattcttactctgttgtccaggtagagtgtagtggtgcaatcatggttcattgcagcctcaacatcccgggttcaagtgatcttcctgctttggcctgccaataactgagactataggtgttcactaccacacctgtctaatttttgtgtgtgtgtgtggagatgaggtcttgccatgttgcctaggctggtcctcaaattcctaggctcaagcaatcctcctgccttggccttccaaagtgttaggatttacaatccagagtcactgctcccagactaaaagcatttttttttttaacaactctggaagtgaattccagcagaaccagcaaagagaatggaattaattacctctggggaaagtgcctaagggtaaggagaactggggcaggaaacta

SEQ ID NO: 683696 - DNA, 2425 bp, Homo sapiens
agggtgtgatttactactcagcagtgtgccagtgatgtggcatgaattaaaaacaagaagtcttccaggagaaaagatttctttagagatgtaattaattgacctggcttgggtccctcctttcccggaggaaaaacttctccttttccggagtagttgtcagtgaagtgtttcaaatactgccctggttgtaattattgttcaagttcatgctgcaaaatcatcttcacttaataattctagcattcaccacccaaaaactcataagcaaggcttttgtattgccacacagtttgggattttttttctcagaattaggaagcaaatgtagccagcaattattttagatattgctttcagaaatgaatttttcccatatctgtcagatttggctcagagttctttttcaatttaatcattgttagcagcatgaaaaactgttaagttaaatgttcaggcataagcaagtcattactccatatttgaactctagagagctactggttgtcatggtaatatgactgcacgtgtgaagttagcattggcaacatcacattttcattaaaacatcatgcatatttgcatgaacttctgcccagaccattgttgcaggattggctcctccaccccatctcataatggtgccaagagatttcatatttcagatccaaacttgttagagtttacagcattcattattcatccctcagagatagaagttgacctgtattcaaggcttaacatatatgaatagagagctcactatatatctctatggttaatcctactaattaccgttcccctgaattgaggtaaccctcccatttcttttagtgaatagttttaattactttctttgacttgcctcttcccaaattagggtatgtttcttcaaataactccccatggatttgtagtgttgctattactcctgaagatgtaggtttccccctcccctcccctcccttcccctcccttccccttgatggagtttcaccctttcacccaggctggaatgaagtggtgtgatctcagttcactgcaatctctgcctcccaggttcaagccattctcctgcctaagcctcctgagtagctgagattacaggcacatgccaccatgcccagctaatttttgtatttttagtagagatgaggtttcgccatgttggccaggctggtctcgaactcctgagttcaggtaatccactcgccttgtgctagaattttttttctccttatgccttcttcccagaacctctattatgtttcctttggtttagggctgtgattatacttatttgcccatatgatcatttatttattcaattaataaatatttattatggtttactatgttgtagggtagatgctagatcccaagtaagccagggcaacaattagttgattagagatgtaagctcttgctgtctaccctgttcttggccaaattgtctgtatttcaatgcagcagatatcttcacaaaggtttttttagcacacaaactgtttgttaagtcctataaattagcaaacaatgctagtttactttttgtttccatgtcattgtttaaacattcttttgttgagctaaaggtttgaatgaataaaccaacaatgaggaagtgccagaacagttcctgtatataccctgcatatatttatttgcagattttactagctattaaatatcatataatacatatcggctctctcctttctctgcttacacatacatggttcctgattgatcaataatttaagtgttgcatttggagattactataggagtttcaaatggtgtccatggtacttctgtttgtgcctctgttcatattgctccttacacttagcctgcctttcccgtcccaaattcccactgaagacctggagaaggcctcatctttcaaaattcaattcaagtatcatttcgtttatgaagtgttatataacaataagaggataaattaataacaggataaataaagaataagaaagcacactaaaaactcttttttttttgaaacaaattcttactctgttgtccaggtagagtgtagtggtgcaatcatggttcattgcagcctcaacatcccgggttcaagtgatcttcctgctttggcctgccaataactgagactataggtgttcactaccacacctgtctaatttttgtgtgtgtgtgtggagatgaggtcttgccatgttgcctaggctggtcctcaaattcctaggctcaagcaatcctcctgccttggccttccaaagtgttaggatttacaatccagagtcactgctcccagactaaaagcatttttttttttaacaactctggaagtgaattccagcagaaccagcaaaragaatggaattaattacctctggggaaagtgcctaagggtaaggagaactggggcaggaaacta

SEQ ID NO: 683697 - DNA, 658 bp, Homo sapiens
tcatgttgatcaggctggtttcgagttcctgacctcaggtgatccgcccgcctcagcctcccaaagtgctgggaatacaggcatgagccactgcgcccagtccgataatgcctacttttaaagatgttcctaaacctaaagaaaaggctaagaataacaacttaccagttgtgaagagaagttttctaggatcctgagaaaaagaaaaaaaaataaatgattaaaaactaaagcactgatgatatataattctataaagagtatgcaggatctacaaaccacatacttgtcatgtaaaatactgttcatccaacggaagtgagaaagactcgattaagtttcataacattttcacaatgctagaggagattacaacaagtaaaaacccaattcagagaaatctatccatctgaggcaaaatactggatgactcaaaaggcccagaaattattcttaatggttacctacaagctggtggcactggttttaagcccatctttgaccattttgaaactcaatatcttagccatgatgttaaactattattatatactctgtctaccaaaaccgtgaaactgcatcacaagatgtgaagacagaattaaaaaccaataaaatatgtaggggatttgygcattgtaagctcagtacgaagaag

SEQ ID NO: 683698 - DNA, 623 bp, Homo sapiens
ttctcttctgtaagttcaaaatatttattttatattgagacatagcagcaaatatttgtggatcagcacaagtctctggaaccaagtcttttggaaagagtggttgattaaagtatttttatttsgccagtgccaaaaaataactataaaataactaattttcaaatatgtgctataaattagttctaaataaatataaatattgaaaataatttaggtttctaattagtctttccagactgcatcaacctagagaaggtatataagtcaccataagggaaacaagctgtttttactggttcggctctcatcttcagaattgttatccgtaatgacacttctagcttctgctccagtctctctggaatacttgggaaaactcagaagatgtctcatatagtggccttcgaagacattatcagggtacttaccattcagtatgcacctatctgactctgaggatggctacaaggatctcaggtcactttttgcagaggctccaggcctgtacccaggggaaatgaccctccaaaagtggtagttcttgctccttgcttgaattgcaggggatgaatagaagaaaatggtctagatattctgagtaatttacattatgatcacct

SEQ ID NO: 683699 - DNA, 656 bp, Homo sapiens
tcacttttcccttttgcaacaaaactcatagatttgctaaactccatttcgctcccacagttctcttttaaacacattccaaacagacttttgtgaccaccaatctaccaaagcttctcttttcaacttgaccaatatccaaatgagatccaatggtcatattttagtacttgttttaatttacctaatgaaacatctaatgcatatgatcactctttcttaataaattttattcgtcagtctgtttttgtgttctttcttggtatctattgctagttctctttctcctccatggtctttgggctttttcttttctgcstacacacttttgctctgtcattcagtataaccacctcacagcttaagtactgtctacgtgctgacagtctcacaatttatgtctccagaccagccctctcccttaaattccagatttgcctatcttcctttctactaaatacacccacagagatgtctaatattcatctaaaaatcaataagtctaaaattaacttctgatctcacctgcagcttcccacatctcaataaacagcaactccttcgtttgggacaaagccttggtatcctcttgactcctttcttttacttgtaacctacatcctttctgtcaggaaatcctgaagattttgccttca
